(19) United States
(12) Patent Application Publication
(10) Pub. No.: US 2017/0175128 A1
(43) Pub. Date: Jun. 22, 2017

(54) CRISPR-CAS-RELATED METHODS, COMPOSITIONS AND COMPONENTS FOR CANCER IMMUNOTHERAPY

(71) Applicant: Editas Medicine, Inc., Cambridge, MA (US)

(72) Inventors: G. Grant WELSTEAD, Cambridge, MA (US); Ari E. FRIEDLAND, Boston, MA (US); Morgan L. MAEDER, Jamaica Plain, MA (US); David A. BUMCROT, Belmont, MA (US)

(21) Appl. No.: 15/303,722

(22) PCT Filed: Apr. 17, 2015
(86) PCT No.: PCT/US2015/026504

§ 371 Date: Oct. 12, 2016

Related U.S. Application Data
(60) Provisional application No. 62/138,246, filed on Mar. 25, 2015.
(60) Provisional application No. 61/981,636, filed on Apr. 18, 2014.

(51) Int. Cl. C12N 15/113; C12N 9/22; C12N 15/11

(52) U.S. Cl. CPC C12N 15/1138; C12N 15/111; C12N 15/1135; C12N 9/22; C12N 15/113; C12N 2310/531; C12N 2830/55

(57) ABSTRACT

CRISPR/Cas-related composition and methods for treatment of cancer, in particular by using gRNA molecules comprising a targeting domain which is complementary with a target domain from the FAS, BID, CTLA4, PDCD1, CBLB, PTPN6, TRAC or TRBC gene. In some embodiments, gRNAs are used with Cas9 enzymes to cause a cleavage event in said genes within engineered chimeric antigen receptor (CAR) T cells. In some embodiments, CAR T cells are modified to reduce, decrease or repress expression of said genes using gRNAs and Cas9 enzymes; said modified CAR T-cells are meant for therapeutic uses, especially for cancer.

### CROSS REFERENCE TO RELATED APPLICATIONS

[0001] This application claims the benefit of U.S. Provisional Application Ser. No. 61/981,636, filed Apr. 18, 2014, and U.S. Provisional Application Ser. No. 62/138,246, filed Mar. 25, 2015, the disclosures of which are hereby incorporated by reference.

### SEQUENCE LISTING

[0002] The present specification makes reference to a Sequence Listing (submitted electronically as a .txt file named “SEQUENCE LISTING 2011271-0005 EM034PCT.txt” on Apr. 17, 2015). The .txt file was generated on Apr. 17, 2015 and is 11,400,000 bytes in size. The entire contents of the Sequence Listing are hereby incorporated by reference.

### FIELD OF INVENTION

[0003] The invention relates to CRISPR/CAS-related methods, compositions and components for editing a target nucleic acid sequence, or modulating expression of a target nucleic acid sequence, and applications thereof in connection with cancer immunotherapy comprising adoptive transfer of engineered T cells or T cell precursors.

### BACKGROUND

[0004] Adoptive transfer of genetically engineered T cells has entered clinical testing as a cancer therapeutic modality. Typically, the approach consists of the following steps: 1) obtaining leukocytes from the subject by apheresis; 2) selecting/enriching for T cells; 3) activating the T cells by cytokine treatment; 4) introducing cloned T cell receptor (TCR) genes or a chimeric antigen receptor (CAR) gene by retroviral transduction, lentiviral transduction or electroporation; 5) expanding the T cells by cytokine treatment; 6) conditioning the subject, usually by lymphodepletion; and 7) infusion of the engineered T cells into the subject.

[0005] Sources of cloned TCR genes (TRAC and TRBC) include rare T cell populations isolated from individuals with particular malignancies and T cell clones isolated from T cell receptor-humanized mice immunized with specific tumor antigens or tumor cells. Following adoptive transfer, TCR-engineered T cells recognize their cognate antigen peptides presented by major histocompatibility complex (MHC) proteins on the tumor cell surface. Antigen engagement stimulates signal transduction pathways leading to T cell activation and proliferation. Stimulated T cells then mount a cytotoxic anti-tumor cell response, typically involving a secreted complex comprising Granzyme B, perforin and granulysin, inducing tumor cell apoptosis.

[0006] Chimeric antigen receptor (CAR) genes encode artificial T cell receptors comprising an extra-cellular tumor antigen binding domain, typically derived from the single-chain antibody variable fragment (scFv) domain of a monoclonal antibody, fused via hinge and transmembrane domains to a cytoplasmic effector domain. The effector domain is typically derived from the CD3-zeta chain of the T cell co-receptor complex, and can also include domains derived from CD28 and/or CD137 receptor proteins. The CAR extra-cellular domain binds the tumor antigen in an MHC-independent manner leading to T cell activation and proliferation, culminating in cytotoxic anti-tumor activity as described for TCR engineered T cells.

[0007] To date, at least 15 different tumor antigens have been targeted in clinical trials of engineered T cells. In several trials, anti-tumor activity has been reported. The greatest success has been achieved in hematologic malignancies. For example, adoptive transfer of CAR-T cells engineered to target the B cell antigen, CD19, led to multiple partial and complete responses in subjects with lymphoma, acute lymphoblastic leukemia, acute lymphocytic leukemia and B-cell acute lymphocytic leukemia. In contrast, trials targeting other tumor types, especially solid tumors, including renal cell carcinoma, neuroblastoma, colorectal cancer, breast cancer, ovarian cancer, melanoma, sarcoma and prostate cancer, have been less successful. In many of these trials, very few patients experienced objective responses. Thus, there is a need to improve the anti-tumor efficacy of adoptively transferred engineered T cells.

### SUMMARY

[0008] Methods and compositions discussed herein provide for the treatment of cancer using an immunotherapy approach comprising administration of genetically engineered T cells or T cell precursors to a subject. An approach to treat a subject suffering from cancer is to isolate T cells from the subject, genetically modify them to target an antigen expressed by the cancer cells, then re-introduce them into the subject; a process referred to as adoptive cell transfer. Methods to genetically modify T cells include introduction of T cell receptor (TCR) or chimeric antigen receptor (CAR) genes encoding transmembrane TCR or CAR proteins, respectively, which specifically recognize particular cancer antigens. While not wishing to be bound by theory, it is believed that engagement of the tumor-expressed antigen with the antigen binding domain of the TCR or CAR protein initiates a signaling cascade leading to T cell activation, proliferation and, ultimately, destruction of the cancer cell via a cytotoxic immune response (Kershaw et al., 2013 NatRevCancer 13, 525-541).

[0009] Adoptive cell transfer utilizing genetically modified T cells has entered clinical testing as a therapeutic for solid and hematologic malignancies. Results to date have been mixed. In hematologic malignancies (especially lymphoma, CLL and ALL), the majority of patients in several Phase 1 and 2 trials exhibited at least a partial response, with some exhibiting complete responses (Kochenderfer, J. N. et al., 2012 Blood 119, 2709-2720). However, in most tumor types (including melanoma, renal cell carcinoma and colorectal cancer), fewer responses have been observed (Johnson, L. A. et al., 2009 Blood 114, 535-546; Lamers, C. H. et al., 2013 Mol. Ther. 21, 904-912; Warren, R. S. et al., 1998 Cancer Gene Ther. 5, S1-S2). Thus, there exists a need to improve the efficacy of adoptive transfer of modified T cells in cancer treatment.

[0010] Factors limiting the efficacy of genetically modified T cells as cancer therapeutics include (1) T cell proliferation, e.g., limited proliferation of T cells following adoptive transfer; (2) T cell survival, e.g., induction of T cell apoptosis by factors in the tumor environment; and (3) T cell function, e.g., inhibition of cytotoxic T cell function by inhibitory factors secreted by host immune cells and cancer cells. The methods and compositions described herein address these limitations by modifying the expression of T cell-expressed genes that influence T cell proliferation, survival and/or function.

[0011] In an embodiment, methods and compositions discussed herein can be used to affect T cell proliferation (e.g., by inactivating genes that inhibit T cell proliferation). In an embodiment, methods and compositions discussed herein can be used to affect T cell survival (e.g., by inactivating genes mediating T cell apoptosis). In an embodiment, methods and composition discussed herein can be used to affect T cell function (e.g., by inactivating genes encoding immunosuppressive and inhibitory (e.g., anergy-inducing) signaling factors). It is contemplated herein that the methods and compositions described above can be utilized individually or in combination to affect one or more of the factors limiting the efficacy of genetically modified T cells as cancer therapeutics, e.g., T cell proliferation, T cell survival, T cell function, or any combination thereof.

[0012] Methods and compositions discussed herein can be used to affect T cell proliferation, survival and/or function by altering one or more T-cell expressed genes, e.g., one or more of FAS, BID, CTLA4, PDCD1, CBLB, PTPN6, TRAC and/or TRBC genes. In an embodiment, methods and compositions described herein can be used to affect T cell proliferation by altering one or more T-cell expressed genes, e.g., the CBLB and/or PTPN6 gene. In an embodiment, methods and compositions described herein can be used to affect T cell survival by altering one or more T-cell expressed genes, e.g., FAS and/or BID gene. In an embodiment, methods and compositions described herein can be used to affect T cell function by altering one or more T-cell expressed gene or genes, e.g., CTLA4 and/or PDCD1 and/or TRAC and/or TRBC gene.

[0013] In one approach, one or more T-cell expressed genes, e.g., FAS, BID, CTLA4, PDCD1, CBLB, PTPN6, TRAC and/or TRBC genes, are independently targeted as a targeted knockout or knockdown, e.g., to influence T cell proliferation, survival and/or function. In an embodiment, the approach comprises knocking out or knocking down one T-cell expressed gene (e.g., FAS, BID, CTLA4, PDCD1, CBLB, PTPN6, TRAC or TRBC gene). In another embodiment, the approach comprises independently knocking out or knocking down two T-cell expressed genes, e.g., two of FAS, BID, CTLA4, PDCD1, CBLB, PTPN6, TRAC or TRBC genes. In another embodiment, the approach comprises independently knocking out or knocking down three T-cell expressed genes, e.g., three of FAS, BID, CTLA4, PDCD1, CBLB, PTPN6, TRAC or TRBC genes. In another embodiment, the approach comprises independently knocking out or knocking down four T-cell expressed genes, e.g., four of FAS, BID, CTLA4, PDCD1, CBLB, PTPN6, TRAC or TRBC genes. In another embodiment, the approach comprises independently knocking out or knocking down five T-cell expressed genes, e.g., five of FAS, BID, CTLA4, PDCD1, CBLB, PTPN6, TRAC or TRBC genes. In another embodiment, the approach comprises independently knocking out or knocking down six T-cell expressed genes, e.g., six of FAS, BID, CTLA4, PDCD1, CBLB, PTPN6, TRAC or TRBC genes. In another embodiment, the approach comprises independently knocking out or knocking down seven T-cell expressed genes, e.g., seven of FAS, BID, CTLA4, PDCD1, CBLB, PTPN6, TRAC or TRBC genes. In another embodiment, the approach comprises independently knocking out or knocking down eight T-cell expressed genes, e.g., each of FAS, BID, CTLA4, PDCD1, CBLB, PTPN6, TRAC and TRBC genes.

[0014] In addition to the genes described above, a number of other T-cell expressed genes may be targeted to affect the efficacy of engineered T cells. These genes include, but are not limited to TGFBRI, TGFBRII and TGFBRIII (Kershaw et al. 2013 NatRevCancer 13, 525-541). It is contemplated herein that one or more of TGFBRI, TGFBRII or TGFBRIII gene can be altered either individually or in combination using the methods disclosed herein. It is further contemplated that one or more of TGFBRI, TGFBRII or TGFBRIII gene can be altered either individually or in combination with any one or more of the eight genes described above (i.e., FAS, BID, CTLA4, PDCD1, CBLB, PTPN6, TRAC or TRBC gene) using the methods disclosed herein.

[0015] In one aspect, methods and compositions discussed herein may be used to alter one or more of the FAS, BID, CTLA4, PDCD1, CBLB, PTPN6, TRAC and/or TRBC genes to affect T cell proliferation, survival and/or function by targeting the gene, e.g., the non-coding or coding regions, e.g., the promoter region, or a transcribed sequence, e.g., intronic or exonic sequence. In an embodiment, coding sequence, e.g., a coding region, e.g., an early coding region, of the FAS, BID, CTLA4, PDCD1, CBLB, PTPN6, TRAC and/or TRBC gene, is targeted for alteration and knockout of expression.

[0016] In another aspect, the methods and compositions discussed herein may be used to alter the FAS, BID, CTLA4, PDCD1, CBLB, PTPN6, TRAC and/or TRBC gene to affect T cell proliferation, survival and/or function by targeting the coding sequence of the FAS, BID, CTLA4, PDCD1, CBLB, PTPN6, TRAC and/or TRBC gene. In an embodiment, the gene, e.g., the coding sequence of the FAS, BID, CTLA4, PDCD1, CBLB, PTPN6, TRAC and/or TRBC gene, is targeted to knockout one or more of FAS, BID, CTLA4, PDCD1, CBLB, PTPN6, TRAC and/or TRBC gene, respectively, e.g., to eliminate expression of one or more of FAS, BID, CTLA4, PDCD1, CBLB, PTPN6, TRAC and/or TRBC gene, e.g., to knockout one or two alleles of one or more of FAS, BID, CTLA4, PDCD1, CBLB, PTPN6, TRAC and/or TRBC gene, e.g., by induction of an alteration comprising a deletion or mutation in one or more of FAS, BID, CTLA4, PDCD1, CBLB, PTPN6, TRAC and/or TRBC gene. In an embodiment, the method provides an alteration that comprises an insertion or deletion. As described herein, a targeted knockout approach is mediated by non-homologous end joining (NHEJ) using a CRISPR/Cas system comprising an enzymatically active Cas9 (eaCas9).

[0017] In an embodiment, an early coding sequence of the FAS, BID, CTLA4, PDCD1, CBLB, PTPN6, TRAC and/or TRBC gene is targeted to knockout one or more of FAS, BID, CTLA4, PDCD1, CBLB, PTPN6, TRAC and/or TRBC gene, respectively. In an embodiment, targeting affects one or two alleles of the FAS, BID, CTLA4, PDCD1, CBLB, PTPN6, TRAC and/or TRBC gene. In an embodiment, a targeted knockout approach reduces or eliminates expression of functional FAS, BID, CTLA4, PDCD1, CBLB, PTPN6, TRAC and/or TRBC gene product. In an embodiment, the method provides an alteration that comprises an insertion or deletion.

[0018] In another aspect, the methods and compositions discussed herein may be used to alter the FAS, BID, CTLA4, PDCD1, CBLB, PTPN6, TRAC and/or TRBC gene to affect T cell function by targeting non-coding sequence of the FAS, BID, CTLA4, PDCD1, CBLB, PTPN6, TRAC and/or TRBC gene, e.g., promoter, an enhancer, an intron, 3′UTR, and/or polyadenylation signal. In an embodiment, the gene, e.g., the non-coding sequence of the FAS, BID, CTLA4, PDCD1, CBLB, PTPN6, TRAC and/or TRBC gene, is targeted to knockout the gene, e.g., to eliminate expression of the gene, e.g., to knockout one or two alleles of the FAS, BID, CTLA4, PDCD1, CBLB, PTPN6, TRAC and/or TRBC gene, e.g., by induction of an alteration comprising a deletion or mutation in the FAS, BID, CTLA4, PDCD1, CBLB, PTPN6, TRAC and/or TRBC gene. In an embodiment, the method provides an alteration that comprises an insertion or deletion.

[0019] “T cell target FAS knockout position”, as used herein, refers to a position in the FAS gene, which if altered by NHEJ-mediated alteration, results in a reduction or elimination of expression of functional FAS gene product (e.g., knockout of expression of functional FAS gene product). In an embodiment, the position is in the FAS gene coding region, e.g., an early coding region.

[0020] “T cell target BID knockout position”, as used herein, refers to a position in the BID gene, which if altered by NHEJ-mediated alteration, results in a reduction or elimination of expression of functional BID gene product (e.g., knockout of expression of functional BID gene product). In an embodiment, the position is in the BID gene coding region, e.g., an early coding region.

[0021] “T cell target CTLA4 knockout position”, as used herein, refers to a position in the CTLA4 gene, which if altered by NHEJ-mediated alteration, results in a reduction or elimination of expression of functional CTLA4 gene product (e.g., knockout of expression of functional CTLA4 gene product). In an embodiment, the position is in the CTLA4 gene coding region, e.g., an early coding region.

[0022] “T cell target PDCD1 knockout position”, as used herein, refers to a position in the PDCD1 gene, which if altered by NHEJ-mediated alteration, results in a reduction or elimination of expression of functional PDCD1 gene product (e.g., knockout of expression of functional PDCD1 gene product). In an embodiment, the position is in the PDCD1 gene coding region, e.g., an early coding region.

[0023] “T cell target CBLB knockout position”, as used herein, refers to a position in the CBLB gene, which if altered by NHEJ-mediated alteration, results in a reduction or elimination of expression of functional CBLB gene product (e.g., knockout of expression of functional CBLB gene product). In an embodiment, the position is in the CBLB gene coding region, e.g., an early coding region.

[0024] “T cell target PTPN6 knockout position”, as used herein, refers to a position in the PTPN6 gene, which if altered by NHEJ-mediated alteration, results in a reduction or elimination of expression of functional PTPN6 gene product (e.g., knockout of expression of functional PTPN6 gene product). In an embodiment, the position is in the PTPN6 gene coding region, e.g., an early coding region.

[0025] “T cell target TRAC knockout position”, as used herein, refers to a position in the TRAC gene, which if altered by NHEJ-mediated alteration, results in a reduction or elimination of expression of functional TRAC gene product (e.g., knockout of expression of functional TRAC gene product). In an embodiment, the position is in the TRAC gene coding region, e.g., an early coding region.

[0026] “T cell target TRBC knockout position”, as used herein, refers to a position in the TRBC gene, which if altered by NHEJ-mediated alteration, results in a reduction or elimination of expression of functional TRBC gene product (e.g., knockout of expression of functional TRBC gene product). In an embodiment, the position is in the TRBC gene coding region, e.g., an early coding region.

[0027] In another aspect, methods and compositions discussed herein may be used to alter the expression of one or more T cell-expressed genes, e.g., the FAS, BID, CTLA4, PDCD1, CBLB, or PTPN6 genes, to affect T cell function by targeting a promoter region of the FAS, BID, CTLA4, PDCD1, CBLB, or PTPN6 gene. In an embodiment, the promoter region of the FAS, BID, CTLA4, PDCD1, CBLB, or PTPN6 gene is targeted to knockdown expression of the FAS, BID, CTLA4, PDCD1, CBLB, or PTPN6 gene. A targeted knockdown approach reduces or eliminates expression of the functional FAS, BID, CTLA4, PDCD1, CBLB, and/or PTPN6 gene product. As described herein, a targeted knockdown is mediated by targeting an enzymatically inactive Cas9 (eiCas9) or an eiCas9 fused to a transcription repressor domain or chromatin modifying protein to alter transcription, e.g., to block, reduce, or decrease transcription, of the FAS, BID, CTLA4, PDCD1, CBLB and/or PTPN6 genes.

[0028] “T cell target FAS knockdown position”, as used herein, refers to a position, e.g., in the FAS gene, which if targeted by an eiCas9 or an eiCas9 fusion protein described herein, results in reduction or elimination of expression of functional FAS gene product. In an embodiment, transcription is reduced or eliminated. In an embodiment, the position is in the FAS promoter sequence. In an embodiment, a position in the promoter sequence of the FAS gene is targeted by an enzymatically inactive Cas9 (eiCas9) or an eiCas9-fusion protein, as described herein.

[0029] “T cell target BID knockdown position”, as used herein, refers to a position, e.g., in the BID gene, which if targeted by an eiCas9 or an eiCas9 fusion protein described herein, results in reduction or elimination of expression of functional BID gene product. In an embodiment, transcription is reduced or eliminated. In an embodiment, the position is in the BID promoter sequence. In an embodiment, a position in the promoter sequence of the BID gene is targeted by an enzymatically inactive Cas9 (eiCas9) or an eiCas9-fusion protein, as described herein.

[0030] “T cell target CTLA4 knockdown position”, as used herein, refers to a position, e.g., in the CTLA4 gene, which if targeted by an eiCas9 or an eiCas9 fusion protein described herein, results in reduction or elimination of expression of functional CTLA4 gene product. In an embodiment, transcription is reduced or eliminated. In an embodiment, the position is in the CTLA4 promoter sequence. In an embodiment, a position in the promoter sequence of the CTLA4 gene is targeted by an enzymatically inactive Cas9 (eiCas9) or an eiCas9-fusion protein, as described herein.

[0031] “T cell target PDCD1 knockdown position”, as used herein, refers to a position, e.g., in the PDCD1 gene, which if targeted by an eiCas9 or an eiCas9 fusion protein described herein, results in reduction or elimination of expression of functional PDCD1 gene product. In an embodiment, transcription is reduced or eliminated. In an embodiment, the position is in the PDCD1 promoter sequence. In an embodiment, a position in the promoter sequence of the PDCD1 gene is targeted by an enzymatically inactive Cas9 (eiCas9) or an eiCas9-fusion protein, as described herein.

[0032] “T cell target CBLB knockdown position”, as used herein, refers to a position, e.g., in the CBLB gene, which if targeted by an eiCas9 or an eiCas9 fusion protein described herein, results in reduction or elimination of expression of functional CBLB gene product. In an embodiment, transcription is reduced or eliminated. In an embodiment, the position is in the CBLB promoter sequence. In an embodiment, a position in the promoter sequence of the CBLB gene is targeted by an enzymatically inactive Cas9 (eiCas9) or an eiCas9-fusion protein, as described herein.

[0033] “T cell target PTPN6 knockdown position”, as used herein, refers to a position, e.g., in the PTPN6 gene, which if targeted by an eiCas9 or an eiCas9 fusion protein described herein, results in reduction or elimination of expression of functional PTPN6 gene product. In an embodiment, transcription is reduced or eliminated. In an embodiment, the position is in the PTPN6 promoter sequence. In an embodiment, a position in the promoter sequence of the PTPN6 gene is targeted by an enzymatically inactive Cas9 (eiCas9) or an eiCas9-fusion protein, as described herein.

[0034] “T cell target FAS position”, as used herein, refers to any of the T cell target FAS knockout position and/or T cell target FAS knockdown position, as described herein.

[0035] “T cell target BID position”, as used herein, refers to any of the T cell target BID knockout position and/or T cell target BID knockdown position, as described herein.

[0036] “T cell target CTLA4 position”, as used herein, refers to any of the T cell target CTLA4 knockout position and/or T cell target CTLA4 knockdown position, as described herein.

[0037] “T cell target PDCD1 position”, as used herein, refers to any of the T cell target PDCD1 knockout position and/or T cell target PDCD1 knockdown position, as described herein.

[0038] “T cell target CBLB position”, as used herein, refers to any of the T cell target CBLB knockout position and/or T cell target CBLB knockdown position, as described herein.

[0039] “T cell target PTPN6 position”, as used herein, refers to any of the T cell target PTPN6 knockout position and/or T cell target PTPN6 knockdown position, as described herein.

[0040] “T cell target TRAC position”, as used herein, refers to any of the T cell target TRAC knockout position, as described herein.

[0041] “T cell target TRBC position”, as used herein, refers to any of the T cell target TRBC knockout position, as described herein.

[0042] “T cell target knockout position”, as used herein, refers to any of the T cell target FAS knockout position, T cell target BID knockout position, T cell target CTLA4 knockout position, T cell target PDCD1 knockout position, T cell target CBLB knockout position, T cell target PTPN6 knockout position, T cell target TRAC knockout position, or T cell target TRBC knockout position, as described herein.

[0043] “T cell target knockdown position”, as used herein, refers to any of the T cell target FAS knockdown position, T cell target BID knockdown position, T cell target CTLA4 knockdown position, T cell target PDCD1 knockdown position, T cell target CBLB knockdown position, or T cell target PTPN6 knockdown position, as described herein. “T cell target position”, as used in herein, refers to any of a T cell target knockout position or T cell target knockdown position, as described herein.

[0044] In one aspect, disclosed herein is a gRNA molecule, e.g., an isolated or non-naturally occurring gRNA molecule, comprising a targeting domain which is complementary with a target domain from the FAS, BID, CTLA4, PDCD1, CBLB, PTPN6, TRAC or TRBC gene.

[0045] In an embodiment, the targeting domain of the gRNA molecule is configured to provide a cleavage event, e.g., a double strand break or a single strand break, sufficiently close to a T cell target position in the FAS, BID, CTLA4, PDCD1, CBLB, PTPN6, TRAC or TRBC gene to allow alteration, e.g., alteration associated with NHEJ, of a T cell target position in the FAS, BID, CTLA4, PDCD1, CBLB, PTPN6, TRAC or TRBC gene. In an embodiment, the targeting domain is configured such that a cleavage event, e.g., a double strand or single strand break, is positioned within 1, 2, 3, 4, 5, 10, 15, 20, 25, 30, 35, 40, 45, 50, 60, 70, 80, 90, 100, 150, 200, 250, 300, 350, 400, 450, or 500 nucleotides es of a T cell target position. The break, e.g., a double strand or single strand break, can be positioned upstream or downstream of a T cell target position in the FAS, BID, CTLA4, PDCD1, CBLB, PTPN6, TRAC or TRBC gene.

[0046] In an embodiment, a second gRNA molecule comprising a second targeting domain is configured to provide a cleavage event, e.g., a double strand break or a single strand break, sufficiently close to the T cell target position in the FAS, BID, CTLA4, PDCD1, CBLB, PTPN6, TRAC or TRBC gene, to allow alteration, e.g., alteration associated with NHEJ, of the T cell target position in the FAS, BID, CTLA4, PDCD1, CBLB, PTPN6, TRAC or TRBC gene, either alone or in combination with the break positioned by the first gRNA molecule. In an embodiment, the targeting domains of the first and second gRNA molecules are configured such that a cleavage event, e.g., a double strand or single strand break, is positioned, independently for each of the gRNA molecules, within 1, 2, 3, 4, 5, 10, 15, 20, 25, 30, 35, 40, 45, 50, 60, 70, 80, 90, 100, 150, 200, 250, 300, 350, 400, 450, or 500 nucleotides of the target position. In an embodiment, the breaks, e.g., double strand or single strand breaks, are positioned on both sides of a nucleotide of a T cell target position in the FAS, BID, CTLA4, PDCD1, CBLB, PTPN6, TRAC or TRBC gene. In an embodiment, the breaks, e.g., double strand or single strand breaks, are positioned on one side, e.g., upstream or downstream, of a nucleotide of a T cell target position in the FAS, BID, CTLA4, PDCD1, CBLB, PTPN6, TRAC or TRBC gene.

[0047] In an embodiment, a single strand break is accompanied by an additional single strand break, positioned by a second gRNA molecule, as discussed below. For example, the targeting domains are configured such that a cleavage event, e.g., the two single strand breaks, are positioned within 1, 2, 3, 4, 5, 10, 15, 20, 25, 30, 35, 40, 45, 50, 60, 70, 80, 90, 100, 150, 200, 250, 300, 350, 400, 450, or 500 nucleotides of a T cell target position. In an embodiment, the first and second gRNA molecules are configured such that, when guiding a Cas9 nickase, a single strand break will be accompanied by an additional single strand break, positioned by a second gRNA, sufficiently close to one another to result in alteration of a T cell target position in the FAS, BID, CTLA4, PDCD1, CBLB, PTPN6, TRAC or TRBC gene. In an embodiment, the first and second gRNA molecules are configured such that a single strand break positioned by the second gRNA is within 10, 20, 30, 40, or 50 nucleotides of the break positioned by the first gRNA molecule, e.g., when the Cas9 is a nickase. In an embodiment, the two gRNA molecules are configured to position cuts at the same position, or within a few nucleotides of one another, on different strands, e.g., essentially mimicking a double strand break.

[0048] In an embodiment, a double strand break can be accompanied by an additional double strand break, positioned by a second gRNA molecule, as is discussed below. For example, the targeting domain of a first gRNA molecule is configured such that a double strand break is positioned upstream of a T cell target position in the FAS, BID, CTLA4, PDCD1, CBLB, PTPN6, TRAC or TRBC gene, e.g., within 1, 2, 3, 4, 5, 10, 15, 20, 25, 30, 35, 40, 45, 50, 60, 70, 80, 90, 100, 150, 200, 250, 300, 350, 400, 450, or 500 nucleotides of the target position; and the targeting domain of a second gRNA molecule is configured such that a double strand break is positioned downstream of a T cell target position in the FAS, BID, CTLA4, PDCD1, CBLB, PTPN6, TRAC or TRBC gene, e.g., within 1, 2, 3, 4, 5, 10, 15, 20, 25, 30, 35, 40, 45, 50, 60, 70, 80, 90, 100, 150, 200, 250, 300, 350, 400, 450, or 500 nucleotides of the target position.

[0049] In an embodiment, a double strand break can be accompanied by two additional single strand breaks, positioned by a second gRNA molecule and a third gRNA molecule. For example, the targeting domain of a first gRNA molecule is configured such that a double strand break is positioned upstream of a T cell target position in the FAS, BID, CTLA4, PDCD1, CBLB, PTPN6, TRAC or TRBC gene, e.g., within 1, 2, 3, 4, 5, 10, 15, 20, 25, 30, 35, 40, 45, 50, 60, 70, 80, 90, 100, 150, 200, 250, 300, 350, 400, 450, or 500 nucleotides of the target position; and the targeting domains of a second and third gRNA molecule are configured such that two single strand breaks are positioned downstream of a T cell target position in the FAS, BID, CTLA4, PDCD1, CBLB, PTPN6, TRAC or TRBC gene, e.g., within 1, 2, 3, 4, 5, 10, 15, 20, 25, 30, 35, 40, 45, 50, 60, 70, 80, 90, 100, 150, 200, 250, 300, 350, 400, 450, or 500 nucleotides of the target position. In an embodiment, the targeting domain of the first, second and third gRNA molecules are configured such that a cleavage event, e.g., a double strand or single strand break, is positioned, independently for each of the gRNA molecules.

[0050] In an embodiment, a first and second single strand break can be accompanied by two additional single strand breaks positioned by a third gRNA molecule and a fourth gRNA molecule. For example, the targeting domain of a first and second gRNA molecule are configured such that two single strand breaks are positioned upstream of a T cell target position in the FAS, BID, CTLA4, PDCD1, CBLB, PTPN6, TRAC or TRBC gene, e.g., within 1, 2, 3, 4, 5, 10, 15, 20, 25, 30, 35, 40, 45, 50, 60, 70, 80, 90, 100, 150, 200, 250, 300, 350, 400, 450, or 500 nucleotides of the target position; and the targeting domains of a third and fourth gRNA molecule are configured such that two single strand breaks are positioned downstream of a T cell target position in the FAS, BID, CTLA4, PDCD1, CBLB, PTPN6, TRAC or TRBC gene, e.g., within 1, 2, 3, 4, 5, 10, 15, 20, 25, 30, 35, 40, 45, 50, 60, 70, 80, 90, 100, 150, 200, 250, 300, 350, 400, 450, or 500 nucleotides of the target position.

[0051] It is contemplated herein that when multiple gRNAs are used to generate (1) two single stranded breaks in close proximity, (2) two double stranded breaks, e.g., flanking a position (e.g., to remove a piece of DNA, e.g., to create a deletion mutation) or to create more than one indel in the gene, e.g., in a coding region, e.g., an early coding region, (3) one double stranded break and two paired nicks flanking a position (e.g., to remove a piece of DNA, e.g., to insert a deletion) or (4) four single stranded breaks, two on each side of a position, that they are targeting the same T cell target position. It is further contemplated herein that multiple gRNAs may be used to target more than one position in the same gene.

[0052] When two or more gRNAs are used to position two or more cleavage events, e.g., double strand or single strand breaks, in a target nucleic acid, it is contemplated that the two or more cleavage events may be made by the same or different Cas9 proteins. For example, when two gRNAs are used to position two double stranded breaks in a target nucleic acid, a single Cas9 nuclease may be used to create both double stranded breaks. When two or more gRNAs are used to position two or more single stranded breaks (also referred to as nicks) in a target nucleic acid, a single Cas9 nickase may be used to create the two or more nicks. When two or more gRNAs are used to position at least one double stranded break and at least one single stranded break in a target nucleic acid, two Cas9 proteins may be used, e.g., one Cas9 nuclease and one Cas9 nickase. It is contemplated that when two or more Cas9 proteins are used that the two or more Cas9 proteins may be delivered sequentially to control specificity of a double stranded versus a single stranded break at the desired position in the target nucleic acid. In another embodiment, when two or more Cas9 proteins are used, the Cas9 proteins may be from different species. For example, when two or more gRNAs are used to position at least one double stranded break and at least one single stranded break in a target nucleic acid, the Cas9 nuclease generating the double stranded break may be from one bacterial species and the Cas9 nickase generating the single stranded break may be from a different bacterial species.

[0053] When more than one gene is targeted for alteration in a cell, the targeted nucleic acids may be altered, e.g., cleaved, by one or more Cas9 proteins. For example, if two genes are targeted for alteration, e.g., both genes are targeted for knockout, the same or a different Cas9 protein may be used to target each gene. In one embodiment, both genes (or each gene targeted in a cell), are cleaved by a Cas9 nuclease to generate a double stranded break. In another embodiment, both genes (or each gene targeted in a cell), are cleaved by a Cas9 nuclease to generate a double stranded break. In another embodiment, one or more genes in a cell may be altered by cleavage with a Cas9 nuclease and one or more genes in the same cell may be altered by cleavage with a Cas9 nickase. When two or more Cas9 proteins are used to cut a target nucleic acid, e.g., different genes in a cell, the Cas9 proteins may be from different bacterial species. For example, one or more genes in a cell may be altered by cleavage with a Cas9 protein from one bacterial species, and one or more genes in the same cell may be altered by cleavage with a Cas9 protein from a different bacterial species. It is contemplated that when two or more Cas9 proteins from different species are used that they may be delivered at the same time or delivered sequentially to control specificity of cleavage in the desired gene at the desired position in the target nucleic acid.

[0054] In some embodiments, the targeting domain of the first gRNA molecule and the targeting domain of the second gRNA molecules are complementary to opposite strands of the target nucleic acid molecule. In some embodiments, the gRNA molecule and the second gRNA molecule are configured such that the PAMs are oriented outward.

[0055] In an embodiment, the targeting domain of a gRNA molecule is configured to avoid unwanted target chromosome elements, such as repeat elements, e.g., Alu repeats, in the target domain. The gRNA molecule may be a first, second, third and/or fourth gRNA molecule.

[0056] In an embodiment, the targeting domain of a gRNA molecule is configured to position a cleavage event sufficiently far from a preselected nucleotide, e.g., the nucleotide of a coding region, such that the nucleotide is not be altered. In an embodiment, the targeting domain of a gRNA molecule is configured to position an intronic cleavage event sufficiently far from an intron/exon border, or naturally occurring splice signal, to avoid alteration of the exonic sequence or unwanted splicing events. The gRNA molecule may be a first, second, third and/or fourth gRNA molecule, as described herein.

[0057] In other embodiments, a position in the coding region, e.g., the early coding region, of the FAS, BID, CTLA4, PDCD1, CBLB, PTPN6, TRAC or TRBC gene is targeted, e.g., for knockout. In an embodiment, the targeting domain comprises a sequence that is the same as, or differs by no more than 1, 2, 3, 4, or 5 nucleotides from, a targeting domain sequence from any one of Tables 1A-I, Tables 3A-H, Tables 5A-I, Tables 7A-H, Tables 9A-I, Tables 11A-I, Tables 13A-K, Tables 15A-F, Tables 17A-K, Tables 19A-J, Tables 21A-K, Tables 23A-J, Tables 25A-G, Tables 26A-G, Table 27, Table 29, Table 31, or Table 32.

[0058] In an embodiment, the targeting domain is selected from those in Tables 1A-I. In other embodiments, the targeting domain is:

(SEQ ID NO: 8640)

GACUGACAUCAACUCCA;

(SEQ ID NO: 8641)

GACUGCGUGCCCUGCCAAGA;

(SEQ ID NO: 8642)

GAGGGCUCACCAGAGGUAGG;

(SEQ ID NO: 8643)

GCGUGCCCUGCCAAGAA;

(SEQ ID NO: 8644)

GCUAGGGACUGCACAGUCAA;

(SEQ ID NO: 8645)

GCUCACCAGAGGUAGGA;

(SEQ ID NO: 8646)

GGACUGCACAGUCAAUG;

(SEQ ID NO: 8647)

GGCUCACCAGAGGUAGG;

(SEQ ID NO: 8648)

GUGACUGACAUCAACUCCAA;

(SEQ ID NO: 8649)

GUGUAACAUACCUGGAGGAC;

(SEQ ID NO: 8650)

GUUGAGACUCAGAACUUGGA;
or

(SEQ ID NO: 8651)

GUUUUGUGUAACAUACC.

[0059] In an embodiment, the targeting domain is selected from those in Tables 3A-H. In other embodiments, the targeting domain is:

(SEQ ID NO: 10760)

GAACACCAGCCGGUCGG;

(SEQ ID NO: 10761)

GAACACCAGCCGGUCGGAGG;

(SEQ ID NO: 10762)

GAACCGUUGUUGACCUG;

(SEQ ID NO: 10763)

GAAUGUGCAGCGGUGCU;

(SEQ ID NO: 10764)

GACCGUAGCAUCCCUCC;

(SEQ ID NO: 10765)

GAUGGCUCGGUGGGCAGCGA;

(SEQ ID NO: 10766)

GCACCUCGCCCAGGUCG;

(SEQ ID NO: 10767)

GCGGAUUCUGUAAGUGGGCU;

(SEQ ID NO: 10768)

GCUCAUCGUAGCCCUCCCAC;

(SEQ ID NO: 10769)

GCUCGGUGGGCAGCGAG;

(SEQ ID NO: 10770)

GGAACCGUUGUUGACCUGAG;

(SEQ ID NO: 10771)

GGACCGUAGCAUCCCUC;

(SEQ ID NO: 10772)

GGCCCGGAGGGAUGCUA;

(SEQ ID NO: 10773)

GGGCCUGAGGACCGCGU;

(SEQ ID NO: 10774)

GGGUCAUGAUGGCUCGG;

(SEQ ID NO: 10775)

GGUCAUGAUGGCUCGGU;

(SEQ ID NO: 10776)

GGUCCAUGCUGUCCCCGACC;

(SEQ ID NO: 10777)

GGUUCACAGUGUCCCAG;

(SEQ ID NO: 10778)

GUCCAUGCUGUCCCCGACCU;

(SEQ ID NO: 10779)

GUCCCAGUGGCGACCUGGAA;

(SEQ ID NO: 10780)

GUCCCUUUCCAGGUCGCCAC;

(SEQ ID NO: 10781)

GUGCAUCACAAACCUAC;

(SEQ ID NO: 10782)

GUGCGGAUUCUGUAAGU;
or

(SEQ ID NO: 10783)

GUGUCCCAGUGGCGACC.

[0060] In an embodiment, the targeting domain is selected from those in Tables 5A-I. In other embodiments, the targeting domain is:

(SEQ ID NO: 13286)

GGUGACAGUGCUUCGGC;

(SEQ ID NO: 13287)

GUGCGGCAACCUACAUGAUG;

(SEQ ID NO: 13288)

GCGGCAACCUACAUGAU;

(SEQ ID NO: 13289)

GGCCACGUGCAUUGCUAGCA;
or

(SEQ ID NO: 13290)

GCUUUAUGGGAGCGGUGUUC.

[0061] In an embodiment, the targeting domain is selected from those in Tables 7A-H. In other embodiments, the targeting domain is:

(SEQ ID NO: 563)

GUCUGGGCGGUGCUACAACU;

(SEQ ID NO: 564)

GCCCAGACGACUGGCCA;

(SEQ ID NO: 565)

GCUCGUGGUGACCGAAG;

(SEQ ID NO: 566)

GUGUCACACAACUGCCCAAC;

(SEQ ID NO: 567)

GCGUGACUUCCACAUGAGCG;

(SEQ ID NO: 568)

GCCCGGCGCAAUGACAG;

(SEQ ID NO: 569)

GGUGACAGGUGCGGCCUCGG;

(SEQ ID NO: 570)

GACAGGUGCGGCCUCGG;

(SEQ ID NO: 571)

GUGGAAGUCACGCCCGU;

(SEQ ID NO: 572)

GAAGCUCUCCGAUGUGU;
or

(SEQ ID NO: 573)

GUCACCACGAGCAGGGC.

[0062] In an embodiment, the targeting domain is selected from those in Tables 9A-I. In other embodiments, the targeting domain is:

(SEQ ID NO: 6119)

GGGTATTATTGATGCTATTC;

(SEQ ID NO: 6120)

GATCTGCGGCAGCTTGCTTA;

(SEQ ID NO: 6121)

GCAGGACCGTGGAGAAGACT;

(SEQ ID NO: 6122)

GGATTTCCTCCTCGACCACC;

(SEQ ID NO: 6123)

GATTTCCTCCTCGACCACCA;

(SEQ ID NO: 6124)

GTACTCATTCTCACTGAGTT;

(SEQ ID NO: 6125)

GTATGAAGAACAGTCAC;
or

(SEQ ID NO: 6126)

GCGGCAGCTTGCTTAGG.

[0063] In an embodiment, the targeting domain is selected from those in Tables 11A-I. In other embodiments, the targeting domain is:

(SEQ ID NO: 3749)

GGUUUCACCGAGACCUCAGU;

(SEQ ID NO: 3750)

GGGAUCAGGUGACCCAUAUU;

(SEQ ID NO: 3751)

GUUUGCGACUCUGACAGAGC;

(SEQ ID NO: 3752)

GAGUACUACACUCAGCAGCA;

(SEQ ID NO: 3753)

GUGGGAUCGGAGCAGUUCAG;

(SEQ ID NO: 3754)

GUCACCCUGGUUCUUGCGAC;

(SEQ ID NO: 3755)

GGACACCUCGGCCCUUGAGC;

(SEQ ID NO: 3756)

GCCCAGUCGCAAGAACC;

(SEQ ID NO: 3757)

GUCCUGCAGGACCGCGA;

(SEQ ID NO: 3758)

GAAAGCACGAAGUCUCC;

(SEQ ID NO: 3759)

GGAUCGGAGCAGUUCAG;

(SEQ ID NO: 3760)

GAUCGGAGCAGUUCAGC;

(SEQ ID NO: 3761)

GGAUGAUGGUGCCGUCG;
or

(SEQ ID NO: 3762)

GUUCUGGAUCCGAAUAU.

[0064] In an embodiment, when the T cell target knockout position is the FAS coding region, e.g., an early coding region, and more than one gRNA is used to position breaks, e.g., two single stranded breaks or two double stranded breaks, or a combination of single strand and double strand breaks, e.g., to create one or more indels, in the target nucleic acid sequence, each guide RNA is independently selected from one of Tables 1A-F or Tables 13A-K.

[0065] In an embodiment, when the T cell target knockout position is the BID coding region, e.g., an early coding region, and more than one gRNA is used to position breaks, e.g., two single stranded breaks or two double stranded breaks, or a combination of single strand and double strand breaks, e.g., to create one or more indels, in the target nucleic acid sequence, each guide RNA is independently selected from one of Tables 3A-H or Tables 15A-F.

[0066] In an embodiment, when the T cell target knockout position is the CTLA4 coding region, e.g., an early coding region, and more than one gRNA is used to position breaks, e.g., two single stranded breaks or two double stranded breaks, or a combination of single strand and double strand breaks, e.g., to create one or more indels, in the target nucleic acid sequence, each guide RNA is independently selected from one of Tables 5A-I or Tables 17A-K.

[0067] In an embodiment, when the T cell target knockout position is the PDCD1 coding region, e.g., an early coding region, and more than one gRNA is used to position breaks, e.g., two single stranded breaks or two double stranded breaks, or a combination of single strand and double strand breaks, e.g., to create one or more indels, in the target nucleic acid sequence, each guide RNA is independently selected from one of Tables 7A-H, Tables 19A-J, Table 31 or Table 32.

[0068] In other embodiments, the targeting domain is:

(SEQ ID NO: 481)

GGUGCUACAACUGGGCUGGCGGC;

(SEQ ID NO: 482)

GUGCUACAACUGGGCUGGCGGC;

(SEQ ID NO: 483)

GCUACAACUGGGCUGGCGGC;

(SEQ ID NO: 484)

GACGACUGGCCAGGGCGCCUG;

(SEQ ID NO: 485)

GACUGGCCAGGGCGCCUG;

(SEQ ID NO: 486)

GCAUGCCUGGAGCAGCCCCAC;

(SEQ ID NO: 487)

GGGGGGUUCCAGGGCCUGUCUG;

(SEQ ID NO: 488)

GGGGGUUCCAGGGCCUGUCUG;

(SEQ ID NO: 489)

GGGGUUCCAGGGCCUGUCUG;

(SEQ ID NO: 490)

GAGAGCCUGCGGGCAGAGCU;

(SEQ ID NO: 491)

GAGCCUGCGGGCAGAGCU;

(SEQ ID NO: 492)

GGGGGGGUUCCAGGGCCUGUCUG;

(SEQ ID NO: 493)

GCAGGGCUGGGGAGAAGGUGG;

(SEQ ID NO: 494)

GGGCUGGGGAGAAGGUGG;

(SEQ ID NO: 495)

GAGCAGGGCUGGGGAGAAGGUGG;

(SEQ ID NO: 496)

GGCCGCCCACGACACCAACCAC;

(SEQ ID NO: 497)

GCCGCCCACGACACCAACCAC;

(SEQ ID NO: 498)

GCCCACGACACCAACCAC;

(SEQ ID NO: 499)

GGUUUGGAACUGGCCGGCUGGC;

(SEQ ID NO: 500)

GUUUGGAACUGGCCGGCUGGC;

(SEQ ID NO: 501)

GGGCAGCCUGGUGCUGCUAGU;

(SEQ ID NO: 502)

GGCAGCCUGGUGCUGCUAGU;

(SEQ ID NO: 503)

GCAGCCUGGUGCUGCUAGU;

(SEQ ID NO: 504)

GGCUGGCCUGGGUGAGGGGC;

(SEQ ID NO: 505)

GGGUUUGGAACUGGCCGGCUGGC;

(SEQ ID NO: 506)

GCUGGGCAGCCUGGUGCUGCUAGU;

(SEQ ID NO: 507)

GGCCGGCUGGCCUGGGUGAGGGGC;

(SEQ ID NO: 508)

GUCUGGGCGGUGCUACAACU;

(SEQ ID NO: 509)

GGCGCCCUGGCCAGUCGUCU;

(SEQ ID NO: 510)

GGGCGGUGCUACAACUGGGC;

(SEQ ID NO: 511)

GGCCAGGAUGGUUCUUAGGU;

(SEQ ID NO: 512)

GGAUGGUUCUUAGGUAGGUG;

(SEQ ID NO: 513)

GAAGGCGGCACUCUGGU;

(SEQ ID NO: 514)

GCCCUGGCCAGUCGUCU;

(SEQ ID NO: 515)

GCCCAGACGACUGGCCA;

(SEQ ID NO: 516)

GAUGGUUCUUAGGUAGG;

(SEQ ID NO: 517)

GGCGGAGGUGAGCGGAA;

(SEQ ID NO: 518)

GGAAGGGAAACUGUCCC;

(SEQ ID NO: 519)

GCGUGACUUCCACAUGAGCG;

(SEQ ID NO: 520)

GCCCUGCUCGUGGUGACCGA;

(SEQ ID NO: 521)

GGUGCCGCUGUCAUUGCGCC;

(SEQ ID NO: 522)

GCUCUCUUUGAUCUGCGCCU;

(SEQ ID NO: 523)

GAAGGUGGCGUUGUCCCCUU;

(SEQ ID NO: 524)

GUGUCACACAACUGCCCAAC;

(SEQ ID NO: 525)

GCUUGUCCGUCUGGUUGCUG;

(SEQ ID NO: 526)

GAUCUGCGCCUUGGGGGCCA;

(SEQ ID NO: 527)

GGGCCCUGACCACGCUCAUG;

(SEQ ID NO: 528)

GCAGUUGUGUGACACGGAAG;

(SEQ ID NO: 529)

GACAGCGGCACCUACCUCUG;

(SEQ ID NO: 530)

GUGGAAGUCACGCCCGU;

(SEQ ID NO: 531)

GCUCGUGGUGACCGAAG;

(SEQ ID NO: 532)

GCCCGGCGCAAUGACAG;

(SEQ ID NO: 533)

GCCGCUGUCAUUGCGCC;

(SEQ ID NO: 534)

GCGGCACCUACCUCUGU;

(SEQ ID NO: 535)

GGUGGCGUUGUCCCCUU;

(SEQ ID NO: 536)

GAAGCUCUCCGAUGUGU;

(SEQ ID NO: 537)

GUUGUGUGACACGGAAG;

(SEQ ID NO: 538)

GCUGGCUGCGGUCCUCG;

(SEQ ID NO: 539)

GCUGCGGUCCUCGGGGA;

(SEQ ID NO: 540)

GACGUUACCUCGUGCGGCCC;

(SEQ ID NO: 541)

GGUGUCGUGGGCGGCCUGCU;

(SEQ ID NO: 542)

GCCCACGACACCAACCACCA;

(SEQ ID NO: 543)

GCAGCCUGGUGCUGCUAGUC;

(SEQ ID NO: 544)

GGUGCUGCUAGUCUGGGUCC;

(SEQ ID NO: 545)

GGACCCAGACUAGCAGCACC;

(SEQ ID NO: 546)

GGCACUUCUGCCCUUCUCUC;

(SEQ ID NO: 547)

GGGCGGCCUGCUGGGCAGCC;

(SEQ ID NO: 548)

GCAGCACCAGGCUGCCCAGC;

(SEQ ID NO: 549)

GCUGGCCUGGGUGAGGGGCU;

(SEQ ID NO: 550)

GUUACCUCGUGCGGCCC;

(SEQ ID NO: 551)

GUCGUGGGCGGCCUGCU;

(SEQ ID NO: 552)

GUUUGGAACUGGCCGGC;

(SEQ ID NO: 553)

GGCCGUCAUCUGCUCCC;

(SEQ ID NO: 554)

GCUGCUAGUCUGGGUCC;
or

(SEQ ID NO: 555)

GCCUGGUGCUGCUAGUC.

[0069] Moreover, in another embodiment, when the T cell target knockout position is the PDCD1 coding region, e.g., an early coding region, e.g., to create one or more indels, in the target nucleic acid sequence, each guide RNA is independently selected from one of Tables 7A-H, Tables 19A-J, Table 31 or Table 32 so that the break is generated with over 10% efficiency.

[0070] In an embodiment, the targeting domain is:

(SEQ ID NO: 486)

GCAUGCCUGGAGCAGCCCCAC;

(SEQ ID NO: 488)

GGGGGUUCCAGGGCCUGUCUG;

(SEQ ID NO: 493)

GCAGGGCUGGGGAGAAGGUGG;

(SEQ ID NO: 494)

GGGCUGGGGAGAAGGUGG;

(SEQ ID NO: 497)

GCCGCCCACGACACCAACCAC;

(SEQ ID NO: 498)

GCCCACGACACCAACCAC;

(SEQ ID NO: 500)

GUUUGGAACUGGCCGGCUGGC;

(SEQ ID NO: 508)

GUCUGGGCGGUGCUACAACU;

(SEQ ID NO: 509)

GGCGCCCUGGCCAGUCGUCU;

(SEQ ID NO: 511)

GGCCAGGAUGGUUCUUAGGU;

(SEQ ID NO: 512)

GGAUGGUUCUUAGGUAGGUG;

(SEQ ID NO: 513)

GAAGGCGGCACUCUGGU;

(SEQ ID NO: 515)

GCCCAGACGACUGGCCA;

(SEQ ID NO: 517)

GGCGGAGGUGAGCGGAA;

(SEQ ID NO: 520)

GCCCUGCUCGUGGUGACCGA;

(SEQ ID NO: 522)

GCUCUCUUUGAUCUGCGCCU;

(SEQ ID NO: 523)

GAAGGUGGCGUUGUCCCCUU;

(SEQ ID NO: 525)

GCUUGUCCGUCUGGUUGCUG;

(SEQ ID NO: 526)

GAUCUGCGCCUUGGGGGCCA;

(SEQ ID NO: 527)

GGGCCCUGACCACGCUCAUG;

(SEQ ID NO: 528)

GCAGUUGUGUGACACGGAAG;

(SEQ ID NO: 529)

GACAGCGGCACCUACCUCUG;

(SEQ ID NO: 533)

GCCGCUGUCAUUGCGCC;

(SEQ ID NO: 535)

GGUGGCGUUGUCCCCUU;

(SEQ ID NO: 536)

GAAGCUCUCCGAUGUGU;

(SEQ ID NO: 537)

GUUGUGUGACACGGAAG;

(SEQ ID NO: 538)

GCUGGCUGCGGUCCUCG;

(SEQ ID NO: 539)

GCUGCGGUCCUCGGGGA;

(SEQ ID NO: 540)

GACGUUACCUCGUGCGGCCC;

(SEQ ID NO: 544)

GGUGCUGCUAGUCUGGGUCC;

(SEQ ID NO: 545)

GGACCCAGACUAGCAGCACC;
or

(SEQ ID NO: 546)

GGCACUUCUGCCCUUCUCUC.

[0071] In an embodiment, when the T cell target knockout position is the CBLB coding region, e.g., an early coding region, and more than one gRNA is used to position breaks, e.g., two single stranded breaks or two double stranded breaks, or a combination of single strand and double strand breaks, e.g., to create one or more indels, in the target nucleic acid sequence, each guide RNA is independently selected from one of Tables 9A-I or Tables 21A-K.

[0072] In an embodiment, when the T cell target knockout position is the PTPN6 coding region, e.g., an early coding region, and more than one gRNA is used to position breaks, e.g., two single stranded breaks or two double stranded breaks, or a combination of single strand and double strand breaks, e.g., to create one or more indels, in the target nucleic acid sequence, each guide RNA is independently selected from one of Tables 11A-I or Tables 23A-J.

[0073] In an embodiment, when the T cell target knockout position is the TRAC coding region, e.g., an early coding region, and more than one gRNA is used to position breaks, e.g., two single stranded breaks or two double stranded breaks, or a combination of single strand and double strand breaks, e.g., to create one or more indels, in the target nucleic acid sequence, each guide RNA is independently selected from one of Tables 25A-G or Table 29.

[0074] In other embodiments, the targeting domain is:

(SEQ ID NO: 449)

UCUCUCAGCUGGUACACGGC;

(SEQ ID NO: 450)

UGGAUUUAGAGUCUCUCAGC;

(SEQ ID NO: 451)

ACACGGCAGGGUCAGGGUUC;

(SEQ ID NO: 452)

GAGAAUCAAAAUCGGUGAAU;

(SEQ ID NO: 453)

GCUGGUACACGGCAGGGUCA;

(SEQ ID NO: 454)

CUCAGCUGGUACACGGC;

(SEQ ID NO: 455)

UGGUACACGGCAGGGUC;

(SEQ ID NO: 456)

GCUAGACAUGAGGUCUA;

(SEQ ID NO: 457)

GUCAGAUUUGUUGCUCC;

(SEQ ID NO: 458)

UCAGCUGGUACACGGCA;

(SEQ ID NO: 459)

GCAGACAGACUUGUCAC;

(SEQ ID NO: 460)

GGUACACGGCAGGGUCA;

(SEQ ID NO: 461)

CUUCAAGAGCAACAGUGCUG;

(SEQ ID NO: 462)

AGAGCAACAGUGCUGUGGCC;

(SEQ ID NO: 463)

AAAGUCAGAUUUGUUGCUCC;

(SEQ ID NO: 464)

ACAAAACUGUGCUAGACAUG;

(SEQ ID NO: 465)

AAACUGUGCUAGACAUG;

(SEQ ID NO: 466)

UGUGCUAGACAUGAGGUCUA;

(SEQ ID NO: 467)

GGCUGGGGAAGAAGGUGUCUUC;

(SEQ ID NO: 468)

GCUGGGGAAGAAGGUGUCUUC;

(SEQ ID NO: 469)

GGGGAAGAAGGUGUCUUC;

(SEQ ID NO: 470)

GUUUUGUCUGUGAUAUACACAU;

(SEQ ID NO: 471)

GGCAGACAGACUUGUCACUGGAUU;

(SEQ ID NO: 472)

GCAGACAGACUUGUCACUGGAUU;

(SEQ ID NO: 473)

GACAGACUUGUCACUGGAUU;

(SEQ ID NO: 474)

GUGAAUAGGCAGACAGACUUGUCA;

(SEQ ID NO: 475)

GAAUAGGCAGACAGACUUGUCA;

(SEQ ID NO: 476)

GAGUCUCUCAGCUGGUACACGG;

(SEQ ID NO: 477)

GUCUCUCAGCUGGUACACGG;
or

(SEQ ID NO: 478)

GGUACACGGCAGGGUCAGGGUU.

[0075] In another embodiment, when the T cell target knockout position is the TRAC coding region, e.g., an early coding region, and more than one gRNA is used to position breaks, e.g., two single stranded breaks or two double stranded breaks, or a combination of single strand and double strand breaks, e.g., to create one or more indels, in the target nucleic acid sequence, each guide RNA is independently selected from one of Tables 25A-G or Table 29 so that the break is generated with over 10% efficiency.

[0076] In an embodiment, the targeting domain is:

(SEQ ID NO: 467)

GGCUGGGGAAGAAGGUGUCUUC;

(SEQ ID NO: 468)

GCUGGGGAAGAAGGUGUCUUC;

(SEQ ID NO: 470)

GUUUUGUCUGUGAUAUACACAU;

(SEQ ID NO: 471)

GGCAGACAGACUUGUCACUGGAUU;

(SEQ ID NO: 472)

GCAGACAGACUUGUCACUGGAUU;

(SEQ ID NO: 473)

GACAGACUUGUCACUGGAUU;

(SEQ ID NO: 474)

GUGAAUAGGCAGACAGACUUGUCA;

(SEQ ID NO: 475)

GAAUAGGCAGACAGACUUGUCA;

(SEQ ID NO: 476)

GAGUCUCUCAGCUGGUACACGG;

(SEQ ID NO: 477)

GUCUCUCAGCUGGUACACGG;

(SEQ ID NO: 478)

GGUACACGGCAGGGUCAGGGUU;

(SEQ ID NO: 49451)

GUACACGGCAGGGUCAGGGUU;

(SEQ ID NO: 452)

GAGAAUCAAAAUCGGUGAAU;

(SEQ ID NO: 456)

GCUAGACAUGAGGUCUA;

(SEQ ID NO: 459)

GCAGACAGACUUGUCAC;

(SEQ ID NO: 460)

GGUACACGGCAGGGUCA;

(SEQ ID NO: 461)

CUUCAAGAGCAACAGUGCUG;

(SEQ ID NO: 462)

AGAGCAACAGUGCUGUGGCC;

(SEQ ID NO: 464)

ACAAAACUGUGCUAGACAUG;

(SEQ ID NO: 465)

AAACUGUGCUAGACAUG;
or

(SEQ ID NO: 466)

UGUGCUAGACAUGAGGUCUA.

[0077] In an embodiment, when the T cell target knockout position is the TRBC coding region, e.g., an early coding region, and more than one gRNA is used to position breaks, e.g., two single stranded breaks or two double stranded breaks, or a combination of single strand and double strand breaks, e.g., to create one or more indels, in the target nucleic acid sequence, each guide RNA is independently selected from one of Tables 26A-G or Table 27.

[0078] In other embodiments, the targeting domain is:

(SEQ ID NO: 387)

CACCCAGAUCGUCAGCGCCG;

(SEQ ID NO: 388)

CAAACACAGCGACCUCGGGU;

(SEQ ID NO: 389)

UGACGAGUGGACCCAGGAUA;

(SEQ ID NO: 390)

GGCUCUCGGAGAAUGACGAG;

(SEQ ID NO: 391)

GGCCUCGGCGCUGACGAUCU;

(SEQ ID NO: 392)

GAAAAACGUGUUCCCACCCG;

(SEQ ID NO: 393)

AUGACGAGUGGACCCAGGAU;

(SEQ ID NO: 394)

AGUCCAGUUCUACGGGCUCU;

(SEQ ID NO: 395)

CGCUGUCAAGUCCAGUUCUA;

(SEQ ID NO: 396)

AUCGUCAGCGCCGAGGCCUG;

(SEQ ID NO: 397)

UCAAACACAGCGACCUCGGG;

(SEQ ID NO: 398)

CGUAGAACUGGACUUGACAG;

(SEQ ID NO: 399)

AGGCCUCGGCGCUGACGAUC;

(SEQ ID NO: 400)

UGACAGCGGAAGUGGUUGCG;

(SEQ ID NO: 401)

UUGACAGCGGAAGUGGUUGC;

(SEQ ID NO: 402)

UCUCCGAGAGCCCGUAGAAC;

(SEQ ID NO: 403)

CGGGUGGGAACACGUUUUUC;

(SEQ ID NO: 404)

GACAGGUUUGGCCCUAUCCU;

(SEQ ID NO: 405)

GAUCGUCAGCGCCGAGGCCU;

(SEQ ID NO: 406)

GGCUCAAACACAGCGACCUC;

(SEQ ID NO: 407)

UGAGGGUCUCGGCCACCUUC;

(SEQ ID NO: 408)

AGGCUUCUACCCCGACCACG;

(SEQ ID NO: 409)

CCGACCACGUGGAGCUGAGC;

(SEQ ID NO: 410)

UGACAGGUUUGGCCCUAUCC;

(SEQ ID NO: 411)

CUUGACAGCGGAAGUGGUUG;

(SEQ ID NO: 412)

AGAUCGUCAGCGCCGAGGCC;

(SEQ ID NO: 413)

GCGCUGACGAUCUGGGUGAC;

(SEQ ID NO: 414)

UGAGGGCGGGCUGCUCCUUG;

(SEQ ID NO: 415)

GUUGCGGGGGUUCUGCCAGA;

(SEQ ID NO: 416)

AGCUCAGCUCCACGUGGUCG;

(SEQ ID NO: 417)

GCGGCUGCUCAGGCAGUAUC;

(SEQ ID NO: 418)

GCGGGGGUUCUGCCAGAAGG;

(SEQ ID NO: 419)

UGGCUCAAACACAGCGACCU;

(SEQ ID NO: 420)

ACUGGACUUGACAGCGGAAG;

(SEQ ID NO: 421)

GACAGCGGAAGUGGUUGCGG;

(SEQ ID NO: 422)

GCUGUCAAGUCCAGUUCUAC;

(SEQ ID NO: 423)

GUAUCUGGAGUCAUUGAGGG;

(SEQ ID NO: 424)

CUCGGCGCUGACGAUCU;

(SEQ ID NO: 425)

CCUCGGCGCUGACGAUC;

(SEQ ID NO: 426)

CCGAGAGCCCGUAGAAC;

(SEQ ID NO: 427)

CCAGAUCGUCAGCGCCG;

(SEQ ID NO: 428)

GAAUGACGAGUGGACCC;

(SEQ ID NO: 429)

GGGUGACAGGUUUGGCCCUAUC;

(SEQ ID NO: 430)

GGUGACAGGUUUGGCCCUAUC;

(SEQ ID NO: 431)

GUGACAGGUUUGGCCCUAUC;

(SEQ ID NO: 432)

GACAGGUUUGGCCCUAUC;

(SEQ ID NO: 433)

GAUACUGCCUGAGCAGCCGCCU;

(SEQ ID NO: 434)

GACCACGUGGAGCUGAGCUGGUGG;

(SEQ ID NO: 435)

GUGGAGCUGAGCUGGUGG;

(SEQ ID NO: 436)

GGGCGGGCUGCUCCUUGAGGGGCU;

(SEQ ID NO: 437)

GGCGGGCUGCUCCUUGAGGGGCU;

(SEQ ID NO: 438)

GCGGGCUGCUCCUUGAGGGGCU;

(SEQ ID NO: 439)

GGGCUGCUCCUUGAGGGGCU;

(SEQ ID NO: 440)

GGCUGCUCCUUGAGGGGCU;

(SEQ ID NO: 441)

GCUGCUCCUUGAGGGGCU;

(SEQ ID NO: 442)

GGUGAAUGGGAAGGAGGUGCACAG;

(SEQ ID NO: 443)

GUGAAUGGGAAGGAGGUGCACAG;
or

(SEQ ID NO: 444)

GAAUGGGAAGGAGGUGCACAG.

[0079] In an embodiment, when the T cell target knockout position is the TRBC coding region, e.g., an early coding region, and more than one gRNA is used to position breaks, e.g., two single stranded breaks or two double stranded breaks, or a combination of single strand and double strand breaks, e.g., to create one or more indels, in the target nucleic acid sequence, each guide RNA is independently selected from one of Tables 26A-G or Table 27 so that the break is generated with over 10% efficiency.

[0080] In an embodiment, the targeting domain is:

(SEQ ID NO: 429)

GGGUGACAGGUUUGGCCCUAUC;

(SEQ ID NO: 430)

GGUGACAGGUUUGGCCCUAUC;

(SEQ ID NO: 431)

GUGACAGGUUUGGCCCUAUC;

(SEQ ID NO: 433)

GAUACUGCCUGAGCAGCCGCCU;

(SEQ ID NO: 434)

GACCACGUGGAGCUGAGCUGGUGG;

(SEQ ID NO: 436)

GGGCGGGCUGCUCCUUGAGGGGCU;

(SEQ ID NO: 437)

GGCGGGCUGCUCCUUGAGGGGCU;

(SEQ ID NO: 438)

GCGGGCUGCUCCUUGAGGGGCU;

(SEQ ID NO: 439)

GGGCUGCUCCUUGAGGGGCU;

(SEQ ID NO: 440)

GGCUGCUCCUUGAGGGGCU;

(SEQ ID NO: 441)

GCUGCUCCUUGAGGGGCU;

(SEQ ID NO: 442)

GGUGAAUGGGAAGGAGGUGCACAG;

(SEQ ID NO: 443)

GUGAAUGGGAAGGAGGUGCACAG;

(SEQ ID NO: 444)

GAAUGGGAAGGAGGUGCACAG.

(SEQ ID NO: 389)

UGACGAGUGGACCCAGGAUA;

(SEQ ID NO: 390)

GGCUCUCGGAGAAUGACGAG;

(SEQ ID NO: 408)

AGGCUUCUACCCCGACCACG;

(SEQ ID NO: 414)

UGAGGGCGGGCUGCUCCUUG;
or

(SEQ ID NO: 421)

GACAGCGGAAGUGGUUGCGG.

[0081] In an embodiment, the targeting domain of the gRNA molecule is configured to target an enzymatically inactive Cas9 (eiCas9) or an eiCas9 fusion protein (e.g., an eiCas9 fused to a transcription repressor domain), sufficiently close to a T cell knockdown target position to reduce, decrease or repress expression of the FAS, BID, CTLA4, PDCD1, CBLB, or PTPN6 gene. In an embodiment, the targeting domain is configured to target the promoter region of the FAS, BID, CTLA4, PDCD1, CBLB, or PTPN6 gene to block transcription initiation, binding of one or more transcription enhancers or activators, and/or RNA polymerase. One or more gRNA may be used to target an eiCas9 to the promoter region of the FAS, BID, CTLA4, PDCD1, CBLB, or PTPN6 gene.

[0082] In an embodiment, when the FAS, BID, CTLA4, PDCD1, CBLB, or PTPN6 promoter region is targeted, e.g., for knockdown, the targeting domain can comprise a sequence that is the same as, or differs by no more than 1, 2, 3, 4, or 5 nucleotides from, a targeting domain sequence from any one of Tables 2A-I, Tables 4A-I, Tables 6A-I, Tables 8A-H, Tables 10A-I, Tables 12A-I, Tables 14A-K, Table 16A-K, Tables 18A-K, Tables 20A-J, Tables 22A-K, or Tables 24A-K. In an embodiment, the targeting domain is selected from those in Tables 2A-I. In other embodiments, the targeting domain is:

(SEQ ID NO: 9236)

GAAGCGGUUUACGAGUGACU;

(SEQ ID NO: 9237)

GUUGGUGGACCCGCUCAGUA;

(SEQ ID NO: 9238)

GGACCCGCUCAGUACGGAGU;

(SEQ ID NO: 9239)

GACCCGCUCAGUACGGAGUU;

(SEQ ID NO: 9240)

GGGAAGCUCUUUCACUUCGG;

(SEQ ID NO: 9241)

GGAUUGCUCAACAACCAUGC;

(SEQ ID NO: 9242)

GGCUUACCCCGUCUUAGUCC;

(SEQ ID NO: 9243)

GCUUACCCCGUCUUAGUCCC;

(SEQ ID NO: 9244)

GUCCCGGGGAUAGGCAAAGU;

(SEQ ID NO: 9245)

GCGGGACGCGUGCGGGAUUG;

(SEQ ID NO: 9246)

GCCUAUCCCCGGGACUAAGA;

(SEQ ID NO: 9247)

GACGGGGUAAGCCUCCACCC;

(SEQ ID NO: 9248)

GAGCGGGUCCACCAACCCGC;

(SEQ ID NO: 9249)

GACGAGCUCACGAAAAGCCC;

(SEQ ID NO: 9250)

GAGCUCACGAAAAGCCCCGG;

(SEQ ID NO: 9251)

GAAAAGCCCCGGUGGUCAGG;

(SEQ ID NO: 9252)

GCUCCAUUGAUUCAGCAACU;

(SEQ ID NO: 9253)

GUCAGGGUUCGUUGCACAAA;

(SEQ ID NO: 9254)

GUCCCGGGGCGUUCCUGCAG;

(SEQ ID NO: 9255)

GUGGCUGGCAUGCUCACUUC;

(SEQ ID NO: 9256)

GCUUCUGCUGUAGUUCAACC;

(SEQ ID NO: 9257)

GUAGUUCAACCUGGGAAGUU;

(SEQ ID NO: 9258)

GACUUGCGGGGCAUUUGACU;

(SEQ ID NO: 9259)

GAGAGGCUCACAGACGUUUC;

(SEQ ID NO: 9260)

GCGCCAUAGGGCUCUGAAAA;

(SEQ ID NO: 9261)

GCUGGGGCUAUGCGAUU;

(SEQ ID NO: 9262)

GCGCAAGAGUGACACAC;

(SEQ ID NO: 9263)

GUGUUCAAAGACGCUUC;

(SEQ ID NO: 9264)

GCGGUUUACGAGUGACU;

(SEQ ID NO: 9265)

GGUGGACCCGCUCAGUA;

(SEQ ID NO: 9266)

GGGAAGCUCUUUCACUU;

(SEQ ID NO: 9267)

GUCUUAGUCCCGGGGAU;

(SEQ ID NO: 9268)

GGAUAGGCAAAGUGGGG;

(SEQ ID NO: 9269)

GGACGCGUGCGGGAUUG;

(SEQ ID NO: 9270)

GGCGCACGCGGGCACCU;

(SEQ ID NO: 9271)

GGGGUAAGCCUCCACCC;

(SEQ ID NO: 9272)

GCGGGUCCACCAACCCG;

(SEQ ID NO: 9273)

GAGCUCACGAAAAGCCC;

(SEQ ID NO: 9274)

GAAAAGCCCCGGUGGUC;

(SEQ ID NO: 9275)

GCAACUUGGCCUGCGCG;

(SEQ ID NO: 9276)

GGGUUCGUUGCACAAAU;

(SEQ ID NO: 9277)

GCUGGCAUGCUCACUUC;

(SEQ ID NO: 9278)

GUUCAACCUGGGAAGUU;
or

(SEQ ID NO: 9279)

GCCAUAGGGCUCUGAAA.

[0083] In an embodiment, the targeting domain is selected from those in Tables 4A-I. In other embodiments, the targeting domain is:

(SEQ ID NO: 11440)

GAAAACCCGCGGGCCUGGCC;

(SEQ ID NO: 11441)

GAAAGACCACGGUGUGGGCG;

(SEQ ID NO: 11442)

GAAGCGCGCGGGGCGCCAUA;

(SEQ ID NO: 11443)

GAAUGACCCCAGGGGACCCU;

(SEQ ID NO: 11444)

GACUACCCGCUUCCUCCUUA;

(SEQ ID NO: 11445)

GAGGAGAAAACCCGCGGGCC;

(SEQ ID NO: 11446)

GAGGGUCGGGUCCGCCUCGG;

(SEQ ID NO: 11447)

GCGCGCGGGGCGCCAUAAGG;

(SEQ ID NO: 11448)

GCGGAUUCUGUAAGUGGGCU;

(SEQ ID NO: 11449)

GCGGGAGAGACCCGGCCCUC;

(SEQ ID NO: 11450)

GCUCCUCCCGAGCGGAGCUC;

(SEQ ID NO: 11451)

GCUCGGCGCGUACCCCGGGA;

(SEQ ID NO: 11452)

GCUGAGGGUCGGGUCCGCCU;

(SEQ ID NO: 11453)

GGAUUCCGAUCCGCCGGCAA;

(SEQ ID NO: 11454)

GGCCACCCUUGCCGGCGGAU;

(SEQ ID NO: 11455)

GGCUCGGCGCGUACCCCGGG;

(SEQ ID NO: 11456)

GGGAUUCCGAUCCGCCGGCA;

(SEQ ID NO: 11457)

GGGCGCCAUAAGGAGGAAGC;

(SEQ ID NO: 11458)

GGGCGGGGAUUCCGAUCCGC;

(SEQ ID NO: 11459)

GGUCAGAGCGGCCGCUUACU;

(SEQ ID NO: 11460)

GGUCGGGUCCGCCUCGGAGG;

(SEQ ID NO: 11461)

GUCAGAGCGGCCGCUUACUG;

(SEQ ID NO: 11462)

GUCGACCGUGUCCGCGCGCC;

(SEQ ID NO: 11463)

GUCGGGUCCGCCUCGGAGGC;

(SEQ ID NO: 11464)

GUCUCCCAGGCGCGCGGACA;

(SEQ ID NO: 11465)

GUGCAGGCCACCCUUGCCGG;

(SEQ ID NO: 11466)

GAAUGUGCAGCGGUGCU;

(SEQ ID NO: 11467)

GACCGUGUCCGCGCGCC;

(SEQ ID NO: 11468)

GAGAAAACCCGCGGGCC;

(SEQ ID NO: 11469)

GAGGGUCGGGUCCGCCU;

(SEQ ID NO: 11470)

GAUUCUGUAAGUGGGCU;

(SEQ ID NO: 11471)

GCAGGUGUCUGCGGUGC;

(SEQ ID NO: 11472)

GCCGGUCCAGCCGCAGA;

(SEQ ID NO: 11473)

GCGCGCGGGGCGCCAUA;

(SEQ ID NO: 11474)

GCUCGGGAGGAGCCGGC;

(SEQ ID NO: 11475)

GGAGAGACCCGGCCCUC;

(SEQ ID NO: 11476)

GGAGAGGAGAAAACCCG;

(SEQ ID NO: 11477)

GGAUUCUGUAAGUGGGC;

(SEQ ID NO: 11478)

GGCUCGGCGCGUACCCC;

(SEQ ID NO: 11479)

GGGCGAGCCCCAGUAAG;

(SEQ ID NO: 11480)

GGGCUCGGCGCGUACCC;

(SEQ ID NO: 11481)

GGGUCCGCCUCGGAGGC;

(SEQ ID NO: 11482)

GGGUUUUCUCCUCUCCG;

(SEQ ID NO: 11483)

GGUCAUGAUGGCUCGGU;

(SEQ ID NO: 11484)

GGUCCGCCUCGGAGGCG;

(SEQ ID NO: 11485)

GGUCGGGUCCGCCUCGG;
or

(SEQ ID NO: 11486)

GUGCGGAUUCUGUAAGU.

[0084] In an embodiment, the targeting domain is selected from those in Tables 6A-I. In other embodiments, the targeting domain is:

(SEQ ID NO: 13746)

GCUCAGAACAGAGCGCC;

(SEQ ID NO: 13747)

GAGCGCCAGGUAUUUAGUAG;

(SEQ ID NO: 13748)

GCGCCAGGUAUUUAGUA;

(SEQ ID NO: 13749)

GCUUUAUGGGAGCGGUGUUC;

(SEQ ID NO: 13750)

GGAGCGGUGUUCAGGUCUUC;

(SEQ ID NO: 13751)

GCGGUGUUCAGGUCUUC;
or

(SEQ ID NO: 13752)

UUAUGGGAGCGGUGUUC.

[0085] In an embodiment, the targeting domain is selected from those in Tables 8A-H. In other embodiments, the targeting domain is:

(SEQ ID NO: 1517)

GCCCCAAGGACCGGCUGAGA;

(SEQ ID NO: 1518)

GUCUGGGCGGUGCUACAACU;

(SEQ ID NO: 1519)

GGGCGGUGCUACAACUGGGC;

(SEQ ID NO: 1520)

GCGUGUUUCUGUAGAAUGAC;

(SEQ ID NO: 1521)

GCCCAGACGACUGGCCA;

(SEQ ID NO: 1522)

GGGCAGCUCGAACUCCU;
or

(SEQ ID NO: 1523)

GGGCGGGAUAUGGAAAG.

[0086] In an embodiment, the targeting domain is selected from those in Tables 10A-I. In other embodiments, the targeting domain is:

(SEQ ID NO: 7635)

GAAAGTGAAGTTTCTGCGTA;

(SEQ ID NO: 7636)

GATAGGACCTTCAGTTGTTC;

(SEQ ID NO: 7637)

GGTTTTGCTCTAATCGATGG;

(SEQ ID NO: 7638)

GGGTATTATTGATGCTATTC;

(SEQ ID NO: 7639)

GCAGGACCGTGGAGAAGACT;

(SEQ ID NO: 7640)

GTGTATGGCCATAGAATGCT;

(SEQ ID NO: 7641)

GATCTGCGGCAGCTTGCTTA;

(SEQ ID NO: 7642)

GGATTTCCTCCTCGACCACC;

(SEQ ID NO: 7643)

GATTTCCTCCTCGACCACCA;

(SEQ ID NO: 7644)

GCTCACGTTTCAAGTAGCTA;

(SEQ ID NO: 7645)

GAAGGTCCTATCATACATTT;

(SEQ ID NO: 7646)

GATGAATCCGGAACTTT;

(SEQ ID NO: 7647)

GGTTTTGCTCTAATCGA;

(SEQ ID NO: 7648)

GGAGGAAATCCCCGAAA;

(SEQ ID NO: 7649)

GGACCGTGGAGAAGACT;

(SEQ ID NO: 7650)

GCGGCAGCTTGCTTAGG;
or

(SEQ ID NO: 7651)

GGTCCTATCATACATTT.

[0087] In an embodiment, the targeting domain is selected from those in Tables 12A-I. In other embodiments, the targeting domain is:

(SEQ ID NO: 4701)

GGCCCUUUGGUUUCCGCCUA;

(SEQ ID NO: 4702)

GGGUAAGUCCCGGGCACCAU;

(SEQ ID NO: 4703)

GGUAAGUCCCGGGCACCAUC;

(SEQ ID NO: 4704)

GCCUGCUGUACUCCCGCUUU;

(SEQ ID NO: 4705)

GGGGGAAACCUCUCCGUAGG;

(SEQ ID NO: 4706)

GGUCCUCACACCUUGCGGGA;

(SEQ ID NO: 4707)

GGCGGAAACCAAAGGGCCUA;

(SEQ ID NO: 4708)

GGACGUGGGAGGGCCUUCGC;

(SEQ ID NO: 4709)

GCACUCACGUUCACACACGU;

(SEQ ID NO: 4710)

GUCCUCACACCUUGCGGGAA;

(SEQ ID NO: 4711)

GGUUUCCGCCUACGGAG;

(SEQ ID NO: 4712)

GUCCCGUGGGUAAGUCC;

(SEQ ID NO: 4713)

GGAAACCUCUCCGUAGG;

(SEQ ID NO: 4714)

GACCGGAAACAGGCGCA;

(SEQ ID NO: 4715)

GGGGGAAACCUCUCCGU;
or

(SEQ ID NO: 4716

GGACCGGAAACAGGCGC.

[0088] In an embodiment, when the T cell target knockdown position is the FAS promoter region and more than one gRNA is used to position an eiCas9 or an eiCas9-fusion protein (e.g., an eiCas9-transcription repressor domain fusion protein), in the target nucleic acid sequence, each guide RNA is independently selected from one of Tables 2A-I or Tables 14A-K.

[0089] In an embodiment, when the T cell target knockdown position is the BID promoter region and more than one gRNA is used to position an eiCas9 or an eiCas9-fusion protein (e.g., an eiCas9-transcription repressor domain fusion protein), in the target nucleic acid sequence, each guide RNA is independently selected from one of Tables 4A-I or Tables 16A-K.

[0090] In an embodiment, when the T cell target knockdown position is the CTLA4 promoter region and more than one gRNA is used to position an eiCas9 or an eiCas9-fusion protein (e.g., an eiCas9-transcription repressor domain fusion protein), in the target nucleic acid sequence, each guide RNA is independently selected from one of Tables 6A-I or Tables 18A-K.

[0091] In an embodiment, when the T cell target knockdown position is the PDCD1 promoter region and more than one gRNA is used to position an eiCas9 or an eiCas9-fusion protein (e.g., an eiCas9-transcription repressor domain fusion protein), in the target nucleic acid sequence, each guide RNA is independently selected from one of Tables 8A-H or Tables 20A-J.

[0092] In an embodiment, when the T cell target knockdown position is the CBLB promoter region and more than one gRNA is used to position an eiCas9 or an eiCas9-fusion protein (e.g., an eiCas9-transcription repressor domain fusion protein), in the target nucleic acid sequence, each guide RNA is independently selected from one of Tables 10A-I or Tables 22A-K.

[0093] In an embodiment, when the T cell target knockdown position is the PTPD6 promoter region and more than one gRNA is used to position an eiCas9 or an eiCas9-fusion protein (e.g., an eiCas9-transcription repressor domain fusion protein), in the target nucleic acid sequence, each guide RNA is independently selected from one of Tables 12A-I or Tables 24A-K.

[0094] In an embodiment, the gRNA, e.g., a gRNA comprising a targeting domain, which is complementary with the FAS, BID, CTLA4, PDCD1, CBLB, PTPN6, TRAC or TRBC gene, is a modular gRNA. In other embodiments, the gRNA is a unimolecular or chimeric gRNA.

[0095] In an embodiment, the targeting domain which is complementary with the FAS, BID, CTLA4, PDCD1, CBLB, PTPN6, TRAC or TRBC gene comprises 16 or more nucleotides in length. In an embodiment, the targeting domain which is complementary with a target domain from the FAS, BID, CTLA4, PDCD1, CBLB, PTPN6, TRAC or TRBC gene is 16 nucleotides or more in length. In an embodiment, the targeting domain is 16 nucleotides in length. In an embodiment, the targeting domain is 17 nucleotides in length. In an embodiment, the targeting domain is 18 nucleotides in length. In an embodiment, the targeting domain is 19 nucleotides in length. In an embodiment, the targeting domain is 20 nucleotides in length. In an embodiment, the targeting domain is 21 nucleotides in length. In an embodiment, the targeting domain is 22 nucleotides in length. In an embodiment, the targeting domain is 23 nucleotides in length. In an embodiment, the targeting domain is 24 nucleotides in length. In an embodiment, the targeting domain is 25 nucleotides in length. In an embodiment, the targeting domain is 26 nucleotides in length. A gRNA as described herein may comprise from 5′ to 3′: a targeting domain (comprising a “core domain”, and optionally a “secondary domain”); a first complementarity domain; a linking domain; a second complementarity domain; a proximal domain; and a tail domain. In some embodiments, the proximal domain and tail domain are taken together as a single domain.

[0096] In an embodiment, the targeting domain comprises 16 nucleotides.

[0097] In an embodiment, the targeting domain comprises 17 nucleotides.

[0098] In an embodiment, the targeting domain comprises 18 nucleotides.

[0099] In an embodiment, the targeting domain comprises 19 nucleotides.

[0100] In an embodiment, the targeting domain comprises 20 nucleotides.

[0101] In an embodiment, the targeting domain comprises 21 nucleotides.

[0102] In an embodiment, the targeting domain comprises 22 nucleotides.

[0103] In an embodiment, the targeting domain comprises 23 nucleotides.

[0104] In an embodiment, the targeting domain comprises 24 nucleotides.

[0105] In an embodiment, the targeting domain comprises 25 nucleotides.

[0106] In an embodiment, the targeting domain comprises 26 nucleotides.

[0107] A gRNA as described herein may comprise from 5′ to 3′: a targeting domain (comprising a “core domain”, and optionally a “secondary domain”); a first complementarity domain; a linking domain; a second complementarity domain; a proximal domain; and a tail domain. In some embodiments, the proximal domain and tail domain are taken together as a single domain.

[0108] In an embodiment, a gRNA comprises a linking domain of no more than 25 nucleotides in length; a proximal and tail domain, that taken together, are at least 20 nucleotides in length; and a targeting domain of equal to or greater than 16, 17, 18, 19, 20, 21, 22, 23, 24, 25 or 26 nucleotides in length.

[0109] In another embodiment, a gRNA comprises a linking domain of no more than 25 nucleotides in length; a proximal and tail domain, that taken together, are at least 30 nucleotides in length; and a targeting domain of equal to or greater than 16, 17, 18, 19, 20, 21, 22, 23, 24, 25 or 26 nucleotides in length.

[0110] In another embodiment, a gRNA comprises a linking domain of no more than 25 nucleotides in length; a proximal and tail domain, that taken together, are at least 35 nucleotides in length; and a targeting domain of equal to or greater than 16, 17, 18, 19, 20, 21, 22, 23, 24, 25 or 26 nucleotides in length.

[0111] In another embodiment, a gRNA comprises a linking domain of no more than 25 nucleotides in length; a proximal and tail domain, that taken together, are at least 40 nucleotides in length; and a targeting domain of equal to or greater than 16, 17, 18, 19, 20, 21, 22, 23, 24, 25 or 26 nucleotides in length.

[0112] A cleavage event, e.g., a double strand or single strand break, is generated by a Cas9 molecule. The Cas9 molecule may be an enzymatically active Cas9 (eaCas9) molecule, e.g., an eaCas9 molecule that forms a double strand break in a target nucleic acid or an eaCas9 molecule forms a single strand break in a target nucleic acid (e.g., a nickase molecule). Alternatively, in some embodiments, the Cas9 molecule may be an enzymatically inactive Cas9 (eiCas9) molecule or a modified eiCas9 molecule, e.g., the eiCas9 molecule is fused to Krüppel-associated box (KRAB) to generate an eiCas9-KRAB fusion protein molecule.

[0113] In an embodiment, the eaCas9 molecule catalyzes a double strand break.

[0114] In some embodiments, the eaCas9 molecule comprises HNH-like domain cleavage activity but has no, or no significant, N-terminal RuvC-like domain cleavage activity. In this case, the eaCas9 molecule is an HNH-like domain nickase, e.g., the eaCas9 molecule comprises a mutation at D10, e.g., D 10A. In other embodiments, the eaCas9 molecule comprises N-terminal RuvC-like domain cleavage activity but has no, or no significant, HNH-like domain cleavage activity. In an embodiment, the eaCas9 molecule is an N-terminal RuvC-like domain nickase, e.g., the eaCas9 molecule comprises a mutation at H840, e.g., H840A. In an embodiment, the eaCas9 molecule is an N-terminal RuvC-like domain nickase, e.g., the eaCas9 molecule comprises a mutation at N863, e.g., N863A.

[0115] In an embodiment, a single strand break is formed in the strand of the target nucleic acid to which the targeting domain of the gRNA is complementary. In another embodiment, a single strand break is formed in the strand of the target nucleic acid other than the strand to which the targeting domain of the gRNA is complementary.

[0116] In another aspect, disclosed herein is a nucleic acid, e.g., an isolated or non-naturally occurring nucleic acid, e.g., DNA, that comprises (a) a sequence that encodes a gRNA molecule comprising a targeting domain that is complementary with a target domain, e.g., with a T cell target position, in FAS, BID, CTLA4, PDCD1, CBLB, PTPN6, TRAC or TRBC gene, as disclosed herein.

[0117] In an embodiment, the nucleic acid encodes a gRNA molecule, e.g., a first gRNA molecule, comprising a targeting domain configured to provide a cleavage event, e.g., a double strand break or a single strand break, sufficiently close to a T cell target position in the FAS, BID, CTLA4, PDCD1, CBLB, PTPN6, TRAC or TRBC gene to allow alteration, e.g., alteration associated with NHEJ, of the a T cell target position in the FAS, BID, CTLA4, PDCD1, CBLB, PTPN6, TRAC or TRBC gene, respectively.

[0118] In an embodiment, the nucleic acid encodes a gRNA molecule, e.g., a first gRNA molecule, comprising a targeting domain configured to target an enzymatically inactive Cas9 (eiCas9) or an eiCas9 fusion protein (e.g., an eiCas9 fused to a transcription repressor domain), sufficiently close to a T cell knockdown target position to reduce, decrease or repress expression of the FAS, BID, CTLA4, PDCD1, CBLB, or PTPN6 gene.

[0119] In an embodiment, the nucleic acid encodes a gRNA molecule, e.g., the first gRNA molecule, comprising a targeting domain comprising a sequence that is the same as, or differs by no more than 1, 2, 3, 4, or 5 nucleotides from, a targeting domain sequence from any one of Tables 1A-I, Tables 2A-I, Tables 3A-H, Tables 4A-I, Tables 5A-I, Tables 6A-I, Tables 7A-H, Tables 8A-H, Tables 9A-I, Tables 10A-I, Tables 11A-I, Tables 12A-I, Tables 13A-K, Tables 14A-K, Tables 15A-F, Tables 16A-K, Tables 17A-K, Tables 18A-K, Tables 19A-J, Tables 20A-J, Tables 21A-K, Tables 22A-K, Tables 23A-J, Tables 24A-K, Tables 25A-G, Tables 26A-G, Table 27, Table 29, Table 31, or Table 32. In an embodiment, the nucleic acid encodes a gRNA molecule comprising a targeting domain selected from those in Tables 1A-I, Tables 2A-I, Tables 3A-H, Tables 4A-I, Tables 5A-I, Tables 6A-I, Tables 7A-H, Tables 8A-H, Tables 9A-I, Tables 10A-I, Tables 11A-I, Tables 12A-I, Tables 13A-K, Tables 14A-K, Tables 15A-F, Tables 16A-K, Tables 17A-K, Tables 18A-K, Tables 19A-J, Tables 20A-J, Tables 21A-K, Tables 22A-K, Tables 23A-J, Tables 24A-K, Tables 25A-G, Tables 26A-G, Table 27, Table 29, Table 31, or Table 32.

[0120] In an embodiment, the nucleic acid encodes a modular gRNA, e.g., one or more nucleic acids encode a modular gRNA. In other embodiments, the nucleic acid encodes a chimeric gRNA. The nucleic acid may encode a gRNA, e.g., the first gRNA molecule, comprising a targeting domain comprising 16 nucleotides or more in length. The nucleic acid may encode a gRNA, e.g., the first gRNA molecule, comprising a targeting domain comprising 16 nucleotides or more in length. In an embodiment, the nucleic acid encodes a gRNA, e.g., the first gRNA molecule, comprising a targeting domain that is 17 nucleotides in length. In other embodiments, the nucleic acid encodes a gRNA, e.g., the first gRNA molecule, comprising a targeting domain that is 18 nucleotides in length. In still other embodiments, the nucleic acid encodes a gRNA, e.g., the first gRNA molecule, comprising a targeting domain that is 19 nucleotides in length. In still other embodiments, the nucleic acid encodes a gRNA, e.g., the first gRNA molecule, comprising a targeting domain that is 20 nucleotides in length. In still other embodiments, the nucleic acid encodes a gRNA, e.g., the first gRNA molecule, comprising a targeting domain that is 21 nucleotides in length. In still other embodiments, the nucleic acid encodes a gRNA, e.g., the first gRNA molecule, comprising a targeting domain that is 22 nucleotides in length. In still other embodiments, the nucleic acid encodes a gRNA, e.g., the first gRNA molecule, comprising a targeting domain that is 23 nucleotides in length. In still other embodiments, the nucleic acid encodes a gRNA, e.g., the first gRNA molecule, comprising a targeting domain that is 24 nucleotides in length. In still other embodiments, the nucleic acid encodes a gRNA, e.g., the first gRNA molecule, comprising a targeting domain that is 25 nucleotides in length. In still other embodiments, the nucleic acid encodes a gRNA, e.g., the first gRNA molecule, comprising a targeting domain that is 26 nucleotides in length.

[0121] In an embodiment, a nucleic acid encodes a gRNA comprising from 5′ to 3′: a targeting domain (comprising a “core domain”, and optionally a “secondary domain”); a first complementarity domain; a linking domain; a second complementarity domain; a proximal domain; and a tail domain. In some embodiments, the proximal domain and tail domain are taken together as a single domain.

[0122] In an embodiment, a nucleic acid encodes a gRNA e.g., the first gRNA molecule, comprising a linking domain of no more than 25 nucleotides in length; a proximal and tail domain, that taken together, are at least 20 nucleotides in length; and a targeting domain equal to or greater than 16, 17, 18, 19, 20, 21, 22, 23, 24, 25 or 26 nucleotides in length.

[0123] In an embodiment, a nucleic acid encodes a gRNA e.g., the first gRNA molecule, comprising a linking domain of no more than 25 nucleotides in length; a proximal and tail domain, that taken together, are at least 30 nucleotides in length; and a targeting domain equal to or greater than 16, 17, 18, 19, 20, 21, 22, 23, 24, 25 or 26 nucleotides in length.

[0124] In an embodiment, a nucleic acid encodes a gRNA e.g., the first gRNA molecule, comprising a linking domain of no more than 25 nucleotides in length; a proximal and tail domain, that taken together, are at least 35 nucleotides in length; and a targeting domain equal to or greater than 16, 17, 18, 19, 20, 21, 22, 23, 24, 25 or 26 nucleotides in length.

[0125] In an embodiment, a nucleic acid encodes a gRNA comprising e.g., the first gRNA molecule, a linking domain of no more than 25 nucleotides in length; a proximal and tail domain, that taken together, are at least 40 nucleotides in length; and a targeting domain equal to or greater than 16, 17, 18, 19, 20, 21, 22, 23, 24, 25 or 26 nucleotides in length.

[0126] In an embodiment, a nucleic acid comprises (a) a sequence that encodes a gRNA molecule, e.g., the first gRNA molecule, comprising a targeting domain that is complementary with a target domain in the FAS, BID, CTLA4, PDCD1, CBLB, PTPN6, TRAC or TRBC gene, as disclosed herein, and further comprising (b) a sequence that encodes a Cas9 molecule.

[0127] In an embodiment, the nucleic acid further comprises a sequence encoding a governing gRNA molecule.

[0128] The Cas9 molecule may be an enzymatically active Cas9 (eaCas9) molecule, e.g., an eaCas9 molecule that forms a double strand break in a target nucleic acid or an eaCas9 molecule forms a single strand break in a target nucleic acid (e.g., a nickase molecule). Alternatively, in some embodiments, the Cas9 molecule may be an enzymatically inactive Cas9 (eiCas9) molecule or a modified eiCas9 molecule, e.g., the eiCas9 molecule is fused to Krüppel-associated box (KRAB) to generate an eiCas9-KRAB fusion protein molecule.

[0129] A nucleic acid disclosed herein may comprise (a) a sequence that encodes a gRNA molecule comprising a targeting domain that is complementary with a target domain in the FAS, BID, CTLA4, PDCD1, CBLB, PTPN6, TRAC or TRBC gene, as disclosed herein; (b) a sequence that encodes a Cas9 molecule; and further comprises (c) (i) a sequence that encodes a second gRNA molecule described herein having a targeting domain that is complementary to a second target domain of the FAS, BID, CTLA4, PDCD1, CBLB, PTPN6, TRAC or TRBC gene, and optionally, (ii) a sequence that encodes a third gRNA molecule described herein having a targeting domain that is complementary to a third target domain of the FAS, BID, CTLA4, PDCD1, CBLB, PTPN6, TRAC or TRBC gene; and optionally, (iii) a sequence that encodes a fourth gRNA molecule described herein having a targeting domain that is complementary to a fourth target domain of the FAS, BID, CTLA4, PDCD1, CBLB, PTPN6, TRAC or TRBC gene.

[0130] In an embodiment, a nucleic acid encodes a second gRNA molecule comprising a targeting domain configured to provide a cleavage event, e.g., a double strand break or a single strand break, sufficiently close to a T cell target position in the FAS, BID, CTLA4, PDCD1, CBLB, PTPN6, TRAC or TRBC gene, to allow alteration, e.g., alteration associated with NHEJ, of the a T cell target position in the FAS, BID, CTLA4, PDCD1, CBLB, PTPN6, TRAC or TRBC gene, either alone or in combination with the break positioned by the first gRNA molecule.

[0131] In an embodiment, the nucleic acid encodes a second gRNA molecule comprising a targeting domain configured to target an enzymatically inactive Cas9 (eiCas9) or an eiCas9 fusion protein (e.g., an eiCas9 fused to a transcription repressor domain), sufficiently close to a T cell knockdown target position to reduce, decrease or repress expression of the FAS, BID, CTLA4, PDCD1, CBLB, or PTPN6 gene.

[0132] In an embodiment, a nucleic acid encodes a third gRNA molecule comprising a targeting domain configured to provide a cleavage event, e.g., a double strand break or a single strand break, sufficiently close to a T cell target position in the FAS, BID, CTLA4, PDCD1, CBLB, PTPN6, TRAC or TRBC gene to allow alteration, e.g., alteration associated with NHEJ, of a T cell target position in the FAS, BID, CTLA4, PDCD1, CBLB, PTPN6, TRAC or TRBC gene, either alone or in combination with the break positioned by the first and/or second gRNA molecule.

[0133] In an embodiment, the nucleic acid encodes a third gRNA molecule comprising a targeting domain configured to target an enzymatically inactive Cas9 (eiCas9) or an eiCas9 fusion protein (e.g., an eiCas9 fused to a transcription repressor domain), sufficiently close to a T cell knockdown target position to reduce, decrease or repress expression of the FAS, BID, CTLA4, PDCD1, CBLB, or PTPN6 gene.

[0134] In an embodiment, a nucleic acid encodes a fourth gRNA molecule comprising a targeting domain configured to provide a cleavage event, e.g., a double strand break or a single strand break, sufficiently close to a T cell target position in the FAS, BID, CTLA4, PDCD1, CBLB, PTPN6, TRAC or TRBC gene to allow alteration, e.g., alteration associated with NHEJ, of a T cell target position in the FAS, BID, CTLA4, PDCD1, CBLB, PTPN6, TRAC or TRBC gene, either alone or in combination with the break positioned by the first gRNA molecule, the second gRNA molecule and the third gRNA molecule.

[0135] In an embodiment, the nucleic acid encodes a fourth gRNA molecule comprising a targeting domain configured to target an enzymatically inactive Cas9 (eiCas9) or an eiCas9 fusion protein (e.g., an eiCas9 fused to a transcription repressor domain), sufficiently close to a T cell knockdown target position to reduce, decrease or repress expression of the FAS, BID, CTLA4, PDCD1, CBLB, or PTPN6 gene.

[0136] In an embodiment, the nucleic acid encodes a second gRNA molecule. The second gRNA is selected to target the same T cell target position as the first gRNA molecule. Optionally, the nucleic acid may encode a third gRNA, and further optionally, the nucleic acid may encode a fourth gRNA molecule. In an embodiment, the third gRNA molecule and the fourth gRNA molecule are selected to target the same T cell target position as the first and second gRNA molecules.

[0137] In an embodiment, the nucleic acid encodes a second gRNA molecule comprising a targeting domain comprising a sequence that is the same as, or differs by no more than 1, 2, 3, 4, or 5 nucleotides from, a targeting domain sequence from one of Tables 1A-I, Tables 2A-I, Tables 3A-H, Tables 4A-I, Tables 5A-I, Tables 6A-I, Tables 7A-H, Tables 8A-H, Tables 9A-I, Tables 10A-I, Tables 11A-I, Tables 12A-I, Tables 13A-K, Tables 14A-K, Tables 15A-F, Tables 16A-K, Tables 17A-K, Tables 18A-K, Tables 19A-J, Tables 20A-J, Tables 21A-K, Tables 22A-K, Tables 23A-J, Tables 24A-K, Tables 25A-G, or Tables 26A-G Tables 26A-G, Table 27, Table 29, Table 31, or Table 32. In an embodiment, the nucleic acid encodes a second gRNA molecule comprising a targeting domain selected from those in Tables 1A-I, Tables 2A-I, Tables 3A-H, Tables 4A-I, Tables 5A-I, Tables 6A-I, Tables 7A-H, Tables 8A-H, Tables 9A-I, Tables 10A-I, Tables 11A-I, Tables 12A-I, Tables 13A-K, Tables 14A-K, Tables 15A-F, Tables 16A-K, Tables 17A-K, Tables 18A-K, Tables 19A-J, Tables 20A-J, Tables 21A-K, Tables 22A-K, Tables 23A-J, Tables 24A-K, Tables 25A-G, or Tables 26A-G, Table 27, Table 29, Table 31, or Table 32. In an embodiment, when a third or fourth gRNA molecule are present, the third and fourth gRNA molecules may comprise a targeting domain comprising a sequence that is the same as, or differs by no more than 1, 2, 3, 4, or 5 nucleotides from, a targeting domain sequence independently selected from one of Tables 1A-I, Tables 2A-I, Tables 3A-H, Tables 4A-I, Tables 5A-I, Tables 6A-I, Tables 7A-H, Tables 8A-H, Tables 9A-I, Tables 10A-I, Tables 11A-I, Tables 12A-I, Tables 13A-K, Tables 14A-K, Tables 15A-F, Tables 16A-K, Tables 17A-K, Tables 18A-K, Tables 19A-J, Tables 20A-J, Tables 21A-K, Tables 22A-K, Tables 23A-J, Tables 24A-K, Tables 25A-G, Tables 26A-G, Table 27, Table 29, Table 31, or Table 32. In a further embodiment, when a third or fourth gRNA molecule are present, the third and fourth gRNA molecules may comprise a targeting domain independently selected from those in Tables 1A-I, Tables 2A-I, Tables 3A-H, Tables 4A-I, Tables 5A-I, Tables 6A-I, Tables 7A-H, Tables 8A-H, Tables 9A-I, Tables 10A-I, Tables 11A-I, Tables 12A-I, Tables 13A-K, Tables 14A-K, Tables 15A-F, Tables 16A-K, Tables 17A-K, Tables 18A-K, Tables 19A-J, Tables 20A-J, Tables 21A-K, Tables 22A-K, Tables 23A-J, Tables 24A-K, Tables 25A-G, Tables 26A-G, Table 27, Table 29, Table 31, or Table 32.

[0138] In an embodiment, the nucleic acid encodes a second gRNA which is a modular gRNA, e.g., wherein one or more nucleic acid molecules encode a modular gRNA. In other embodiments, the nucleic acid encoding a second gRNA is a chimeric gRNA. In other embodiments, when a nucleic acid encodes a third or fourth gRNA, the third and fourth gRNA may be a modular gRNA or a chimeric gRNA. When multiple gRNAs are used, any combination of modular or chimeric gRNAs may be used.

[0139] A nucleic acid may encode a second, a third, and/or a fourth gRNA comprising a targeting domain comprising 16 nucleotides or more in length. In an embodiment, the nucleic acid encodes a second gRNA comprising a targeting domain that is 16 nucleotides in length. In an embodiment, the nucleic acid encodes a second gRNA comprising a targeting domain that is 17 nucleotides in length. In other embodiments, the nucleic acid encodes a second gRNA comprising a targeting domain that is 18 nucleotides in length. In still other embodiments, the nucleic acid encodes a second gRNA comprising a targeting domain that is 19 nucleotides in length. In still other embodiments, the nucleic acid encodes a second gRNA comprising a targeting domain that is 20 nucleotides in length. In still other embodiments, the nucleic acid encodes a second gRNA comprising a targeting domain that is 21 nucleotides in length. In still other embodiments, the nucleic acid encodes a second gRNA comprising a targeting domain that is 22 nucleotides in length. In still other embodiments, the nucleic acid encodes a second gRNA comprising a targeting domain that is 23 nucleotides in length. In still other embodiments, the nucleic acid encodes a second gRNA comprising a targeting domain that is 24 nucleotides in length. In still other embodiments, the nucleic acid encodes a second gRNA comprising a targeting domain that is 25 nucleotides in length. In still other embodiments, the nucleic acid encodes a second gRNA comprising a targeting domain that is 26 nucleotides in length.

[0140] In an embodiment, the targeting domain comprises 16 nucleotides.

[0141] In an embodiment, the targeting domain comprises 17 nucleotides.

[0142] In an embodiment, the targeting domain comprises 18 nucleotides.

[0143] In an embodiment, the targeting domain comprises 19 nucleotides.

[0144] In an embodiment, the targeting domain comprises 20 nucleotides.

[0145] In an embodiment, the targeting domain comprises 21 nucleotides.

[0146] In an embodiment, the targeting domain comprises 22 nucleotides.

[0147] In an embodiment, the targeting domain comprises 23 nucleotides.

[0148] In an embodiment, the targeting domain comprises 24 nucleotides.

[0149] In an embodiment, the targeting domain comprises 25 nucleotides.

[0150] In an embodiment, the targeting domain comprises 26 nucleotides.

[0151] In an embodiment, a nucleic acid encodes a second, a third, and/or a fourth gRNA comprising from 5′ to 3′: a targeting domain (comprising a “core domain”, and optionally a “secondary domain”); a first complementarity domain; a linking domain; a second complementarity domain; a proximal domain; and a tail domain. In some embodiments, the proximal domain and tail domain are taken together as a single domain.

[0152] In an embodiment, a nucleic acid encodes a second, a third, and/or a fourth gRNA comprising a linking domain of no more than 25 nucleotides in length; a proximal and tail domain, that taken together, are at least 20 nucleotides in length; and a targeting domain of equal to or greater than 16, 17, 18, 19, 20, 21, 22, 23, 24, 25 or 26 nucleotides in length.

[0153] In an embodiment, a nucleic acid encodes a second, a third, and/or a fourth gRNA comprising a linking domain of no more than 25 nucleotides in length; a proximal and tail domain, that taken together, are at least 30 nucleotides in length; and a targeting domain of equal to or greater than 16, 17, 18, 19, 20, 21, 22, 23, 24, 25 or 26 nucleotides in length.

[0154] In an embodiment, a nucleic acid encodes a second, a third, and/or a fourth gRNA comprising a linking domain of no more than 25 nucleotides in length; a proximal and tail domain, that taken together, are at least 35 nucleotides in length; and a targeting domain of equal to or greater than 16, 17, 18, 19, 20, 21, 22, 23, 24, 25 or 26 nucleotides in length.

[0155] In an embodiment, a nucleic acid encodes a second, a third, and/or a fourth gRNA comprising a linking domain of no more than 25 nucleotides in length; a proximal and tail domain, that taken together, are at least 40 nucleotides in length; and a targeting domain of equal to or greater than 16, 17, 18, 19, 20, 21, 22, 23, 24, 25 or 26 nucleotides in length.

[0156] As described above, a nucleic acid may comprise (a) a sequence encoding a gRNA molecule comprising a targeting domain that is complementary with a target domain in the FAS, BID, CTLA4, PDCD1, CBLB, PTPN6, TRAC or TRBC gene, and (b) a sequence encoding a Cas9 molecule. In some embodiments, (a) and (b) are present on the same nucleic acid molecule, e.g., the same vector, e.g., the same viral vector, e.g., the same adeno-associated virus (AAV) vector. In an embodiment, the nucleic acid molecule is an AAV vector. Exemplary AAV vectors that may be used in any of the described compositions and methods include an AAV1 vector, a modified AAV1 vector, an AAV2 vector, a modified AAV2 vector, an AAV3 vector, an AAV4 vector, a modified AAV4 vector, an AAV5 vector, a modified AAV5 vector, a modified AAV3 vector, an AAV6 vector, a modified AAV6 vector, an AAV7 vector, a modified AAV7 vector, an AAV8 vector, an AAV9 vector an AAV.rh10 vector, a modified AAV.rh10 vector, an AAV.rh32/33 vector, a modified AAV.rh32/33 vector, an AAV.rh43 vector, a modified AAV.rh43 vector, an AAV.rh64R1 vector, and a modified AAV.rh64R1 vector. In other embodiments, (a) is present on a first nucleic acid molecule, e.g. a first vector, e.g., a first viral vector, e.g., a first AAV vector; and (b) is present on a second nucleic acid molecule, e.g., a second vector, e.g., a second vector, e.g., a second AAV vector. The first and second nucleic acid molecules may be AAV vectors.

[0157] In other embodiments, the nucleic acid may further comprise (c) (i) a sequence that encodes a second gRNA molecule as described herein. In some embodiments, the nucleic acid comprises (a), (b) and (c)(i). Each of (a) and (c)(i) may be present on the same nucleic acid molecule, e.g., the same vector, e.g., the same viral vector, e.g., the same adeno-associated virus (AAV) vector. In an embodiment, the nucleic acid molecule is an AAV vector.

[0158] In other embodiments, (a) and (c)(i) are on different vectors. For example, (a) may be present on a first nucleic acid molecule, e.g. a first vector, e.g., a first viral vector, e.g., a first AAV vector; and (c)(i) may be present on a second nucleic acid molecule, e.g., a second vector, e.g., a second vector, e.g., a second AAV vector. In an embodiment, the first and second nucleic acid molecules are AAV vectors.

[0159] In another embodiment, each of (a), (b), and (c)(i) are present on the same nucleic acid molecule, e.g., the same vector, e.g., the same viral vector, e.g., an AAV vector. In an embodiment, the nucleic acid molecule is an AAV vector. In an alternate embodiment, one of (a), (b), and (c)(i) is encoded on a first nucleic acid molecule, e.g., a first vector, e.g., a first viral vector, e.g., a first AAV vector; and a second and third of (a), (b), and (c)(i) is encoded on a second nucleic acid molecule, e.g., a second vector, e.g., a second vector, e.g., a second AAV vector. The first and second nucleic acid molecule may be AAV vectors.

[0160] In an embodiment, (a) is present on a first nucleic acid molecule, e.g., a first vector, e.g., a first viral vector, a first AAV vector; and (b) and (c)(i) are present on a second nucleic acid molecule, e.g., a second vector, e.g., a second vector, e.g., a second AAV vector. The first and second nucleic acid molecule may be AAV vectors.

[0161] In other embodiments, (b) is present on a first nucleic acid molecule, e.g., a first vector, e.g., a first viral vector, e.g., a first AAV vector; and (a) and (c)(i) are present on a second nucleic acid molecule, e.g., a second vector, e.g., a second vector, e.g., a second AAV vector. The first and second nucleic acid molecule may be AAV vectors.

[0162] In other embodiments, (c)(i) is present on a first nucleic acid molecule, e.g., a first vector, e.g., a first viral vector, e.g., a first AAV vector; and (b) and (a) are present on a second nucleic acid molecule, e.g., a second vector, e.g., a second vector, e.g., a second AAV vector. The first and second nucleic acid molecule may be AAV vectors.

[0163] In another embodiment, each of (a), (b) and (c)(i) are present on different nucleic acid molecules, e.g., different vectors, e.g., different viral vectors, e.g., different AAV vector. For example, (a) may be on a first nucleic acid molecule, (b) on a second nucleic acid molecule, and (c)(i) on a third nucleic acid molecule. The first, second and third nucleic acid molecule may be AAV vectors.

[0164] In another embodiment, when a third and/or fourth gRNA molecule are present, each of (a), (b), (c)(i), (c) (ii) and (c)(iii) may be present on the same nucleic acid molecule, e.g., the same vector, e.g., the same viral vector, e.g., an AAV vector. In an embodiment, the nucleic acid molecule is an AAV vector. In an alternate embodiment, each of (a), (b), (c)(i), (c) (ii) and (c)(iii) may be present on the different nucleic acid molecules, e.g., different vectors, e.g., the different viral vectors, e.g., different AAV vectors. In further embodiments, each of (a), (b), (c)(i), (c) (ii) and (c)(iii) may be present on more than one nucleic acid molecule, but fewer than five nucleic acid molecules, e.g., AAV vectors.

[0165] The nucleic acids described herein may comprise a promoter operably linked to the sequence that encodes the gRNA molecule of (a), e.g., a promoter described herein. The nucleic acid may further comprise a second promoter operably linked to the sequence that encodes the second, third and/or fourth gRNA molecule of (c), e.g., a promoter described herein. The promoter and second promoter differ from one another. In some embodiments, the promoter and second promoter are the same.

[0166] The nucleic acids described herein may further comprise a promoter operably linked to the sequence that encodes the Cas9 molecule of (b), e.g., a promoter described herein.

[0167] In another aspect, disclosed herein is a composition comprising (a) a gRNA molecule comprising a targeting domain that is complementary with a target domain in the FAS, BID, CTLA4, PDCD1, CBLB, PTPN6, TRAC or TRBC gene, as described herein. The composition of (a) may further comprise (b) a Cas9 molecule, e.g., a Cas9 molecule as described herein. A composition of (a) and (b) may further comprise (c) a second, third and/or fourth gRNA molecule, e.g., a second, third and/or fourth gRNA molecule described herein. In an embodiment, a composition may comprise at least two gRNA molecules to target two or more of FAS, BID, CTLA4, PDCD1, CBLB, PTPN6, TRAC and TRBC genes. In an embodiment, the composition further comprises a governing gRNA molecule, or a nucleic acid that encodes a governing gRNA molecule.

[0168] In another aspect, disclosed herein is a method of altering a cell, e.g., altering the structure, e.g., altering the sequence, of a target nucleic acid of a cell, comprising contacting the cell with: (a) a gRNA that targets the FAS, BID, CTLA4, PDCD1, CBLB, PTPN6, TRAC or TRBC gene, e.g., a gRNA as described herein; (b) a Cas9 molecule, e.g., a Cas9 molecule as described herein; and optionally, (c) a second, third and/or fourth gRNA that targets FAS, BID, CTLA4, PDCD1, CBLB, PTPN6, TRAC or TRBC gene, e.g., a gRNA, as described herein. In an embodiment, the method further comprises, introducing into the cell, a governing gRNA molecule, or a nucleic acid that encodes a governing gRNA molecule, into the cell.

[0169] In some embodiments, the method comprises contacting the cell with (a) and (b).

[0170] In some embodiments, the method comprises contacting the cell with (a), (b), and (c).

[0171] The gRNA of (a) and optionally (c) may be independently selected from any of Tables 1A-I, Tables 2A-I, Tables 3A-H, Tables 4A-I, Tables 5A-I, Tables 6A-I, Tables 7A-H, Tables 8A-H, Tables 9A-I, Tables 10A-I, Tables 11A-I, Tables 12A-I, Tables 13A-K, Tables 14A-K, Tables 15A-F, Tables 16A-K, Tables 17A-K, Tables 18A-K, Tables 19A-J, Tables 20A-J, Tables 21A-K, Tables 22A-K, Tables 23A-J, Tables 24A-K, Tables 25A-G, Tables 26A-G, Table 27, Table 29, Table 31, or Table 32, or a gRNA that differs by no more than 1, 2, 3, 4, or 5 nucleotides from, a targeting domain sequence independently selected from any of Tables 1A-I, Tables 2A-I, Tables 3A-H, Tables 4A-I, Tables 5A-I, Tables 6A-I, Tables 7A-H, Tables 8A-H, Tables 9A-I, Tables 10A-I, Tables 11A-I, Tables 12A-I, Tables 13A-K, Tables 14A-K, Tables 15A-F, Tables 16A-K, Tables 17A-K, Tables 18A-K, Tables 19A-J, Tables 20A-J, Tables 21A-K, Tables 22A-K, Tables 23A-J, Tables 24A-K, Tables 25A-G, Tables 26A-G, Table 27, Table 29, Table 31, or Table 32.

[0172] In an embodiment, the method of altering a cell, e.g., altering the structure, e.g., altering the sequence, of a target nucleic acid of a cell, comprising altering two or more of FAS, BID, CTLA4, PDCD1, CBLB, PTPN6, TRAC or TRBC genes. When two or more genes are altered in a cell, the cell is contacted with: (a) gRNAs that target two or more of the FAS, BID, CTLA4, PDCD1, CBLB, PTPN6, TRAC or TRBC genes, e.g., two or more of the gRNA as described herein; (b) a Cas9 molecule, e.g., a Cas9 molecule as described herein; and optionally, (c) second, third and/or fourth gRNAs that respectively targets the two or more genes selected in (a), e.g., a gRNA, as described herein. In an embodiment, the method further comprises, introducing into the cell, a governing gRNA molecule, or a nucleic acid that encodes a governing gRNA molecule, into the cell.

[0173] In an embodiment, the method of altering a cell comprises altering two or more of FAS, BID, CTLA4, PDCD1, CBLB, PTPN6, TRAC or TRBC genes.

[0174] In an embodiment, the method of altering a cell comprises altering three or more of FAS, BID, CTLA4, PDCD1, CBLB, PTPN6, TRAC or TRBC genes.

[0175] In an embodiment, the method of altering a cell comprises altering four or more of FAS, BID, CTLA4, PDCD1, CBLB, PTPN6, TRAC or TRBC genes.

[0176] In an embodiment, the method of altering a cell comprises altering five or more of FAS, BID, CTLA4, PDCD1, CBLB, PTPN6, TRAC or TRBC genes.

[0177] In an embodiment, the method of altering a cell comprises altering six or more of FAS, BID, CTLA4, PDCD1, CBLB, PTPN6, TRAC or TRBC genes.

[0178] In an embodiment, the method of altering a cell comprises altering seven or more of FAS, BID, CTLA4, PDCD1, CBLB, PTPN6, TRAC or TRBC genes.

[0179] In an embodiment, the method of altering a cell comprises altering each of FAS, BID, CTLA4, PDCD1, CBLB, PTPN6, TRAC or TRBC genes.

[0180] In some embodiments, the method comprises contacting a cell from a subject suffering from cancer. The cell may be from a subject that would benefit from having a mutation at a T cell target position.

[0181] In some embodiments, the cell being contacted in the disclosed method is a T cell. The contacting may be performed ex vivo and the contacted cell may be returned to the subject's body after the contacting step. The T cell may be an engineered T cell, e.g., an engineered CAR (chimeric antigen receptor) T cell or an engineered TCR (T-cell receptor) T cell. A T cell may engineered to express a TCR or a CAR prior to, after, or at the same time as introducing a T cell target position mutation in one or more of the FAS, BID, CTLA4, PDCD1, CBLB, PTPN6, TRAC or TRBC gene.

[0182] In some embodiments, the method of altering a cell as described herein comprises acquiring knowledge of the sequence of a T cell target position in the cell, prior to the contacting step. Acquiring knowledge of the sequence of a T cell target position in the cell may be by sequencing the FAS, BID, CTLA4, PDCD1, CBLB, PTPN6, TRAC or TRBC gene, or a portion of the FAS, BID, CTLA4, PDCD1, CBLB, PTPN6, TRAC or TRBC gene.

[0183] In some embodiments, the contacting step of the method comprises contacting the cell with a nucleic acid, e.g., a vector, e.g., an AAV vector, e.g., an AAV vector described herein, that expresses at least one of (a), (b), and (c). In some embodiments, the contacting step of the method comprises contacting the cell with a nucleic acid, e.g., a vector, e.g., an AAV vector, that expresses each of (a), (b), and (c). In another embodiment, the contacting step of the method comprises delivering to the cell a Cas9 molecule of (b) and a nucleic acid which encodes a gRNA (a) and optionally, a second gRNA (c)(i) (and further optionally, a third gRNA (c)(iv) and/or fourth gRNA (c)(iii).

[0184] In some embodiments, the contacting step of the method comprises contacting the cell with a nucleic acid, e.g., a vector, e.g., an AAV vector, that expresses at least one of (a), (b), and (c). In some embodiments, the contacting step of the method comprises contacting the cell with a nucleic acid, e.g., a vector, e.g., an AAV vector, that expresses each of (a), (b), and (c). In an embodiment, contacting comprises contacting the cell with a nucleic acid, e.g., a vector, e.g., an AAV vector an AAV1 vector, a modified AAV1 vector, an AAV2 vector, a modified AAV2 vector, an AAV3 vector, a modified AAV3 vector, an AAV4 vector, a modified AAV4 vector, an AAV5 vector, a modified AAV5 vector, an AAV6 vector, a modified AAV6 vector, an AAV7 vector, a modified AAV7 vector, an AAV8 vector, an AAV9 vector, an AAV.rh10 vector, a modified AAV.rh10 vector, an AAV.rh32/33 vector, a modified AAV.rh32/33 vector, an AAV.rh43vector, a modified AAV.rh43vector, an AAV.rh64R1vector, and a modified AAV.rh64R1vector.

[0185] In an embodiment, contacting comprises delivering to the cell a Cas9 molecule of (b), as a protein or an mRNA, and a nucleic acid which encodes (a) and optionally (c).

[0186] In an embodiment, contacting comprises delivering to the cell a Cas9 molecule of (b), as a protein or an mRNA, the gRNA of (a), as an RNA, and optionally the second gRNA of (c), as an RNA.

[0187] In an embodiment, contacting comprises delivering to the cell a gRNA of (a) as an RNA, optionally the second gRNA of (c) as an RNA, and a nucleic acid that encodes the Cas9 molecule of (b).

[0188] In another aspect, disclosed herein is a method of treating a subject suffering from cancer, e.g., altering the structure, e.g., sequence, of a target nucleic acid of the subject, comprising contacting the subject (or a cell from the subject) with:

[0189] (a) a gRNA that targets the FAS, BID, CTLA4, PDCD1, CBLB, PTPN6, TRAC or TRBC gene, e.g., a gRNA disclosed herein;

[0190] (b) a Cas9 molecule, e.g., a Cas9 molecule disclosed herein; and

[0191] optionally, (c)(i) a second gRNA that targets the FAS, BID, CTLA4, PDCD1, CBLB, PTPN6, TRAC or TRBC gene, e.g., a second gRNA disclosed herein, and

[0192] further optionally, (c)(ii) a third gRNA, and still further optionally, (c)(iii) a fourth gRNA that target the FAS, BID, CTLA4, PDCD1, CBLB, PTPN6, TRAC or TRBC gene, e.g., a third and fourth gRNA disclosed herein. In an embodiment, the method further comprises, introducing into the subject, or a cell of the subject, a governing gRNA molecule, or a nucleic acid that encodes a governing gRNA molecule.

[0193] In some embodiments, contacting comprises contacting with (a) and (b).

[0194] In some embodiments, contacting comprises contacting with (a), (b), and (c)(i).

[0195] In some embodiments, contacting comprises contacting with (a), (b), (c)(i) and (c)(ii).

[0196] In some embodiments, contacting comprises contacting with (a), (b), (c)(i), (c)(ii) and (c)(iii).

[0197] The gRNA of (a) or (c) (e.g., (c)(i), (c)(ii), or (c)(iii) may be independently selected from any of Tables 1A-I, Tables 2A-I, Tables 3A-H, Tables 4A-I, Tables 5A-I, Tables 6A-I, Tables 7A-H, Tables 8A-H, Tables 9A-I, Tables 10A-I, Tables 11A-I, Tables 12A-I, Tables 13A-K, Tables 14A-K, Tables 15A-F, Tables 16A-K, Tables 17A-K, Tables 18A-K, Tables 19A-J, Tables 20A-J, Tables 21A-K, Tables 22A-K, Tables 23A-J, Tables 24A-K, Tables 25A-G, Tables 26A-G, Table 27, Table 29, Table 31, or Table 32, or a gRNA that differs by no more than 1, 2, 3, 4, or 5 nucleotides from, a targeting domain sequence independently selected from any of Tables 1A-I, Tables 2A-I, Tables 3A-H, Tables 4A-I, Tables 5A-I, Tables 6A-I, Tables 7A-H, Tables 8A-H, Tables 9A-I, Tables 10A-I, Tables 11A-I, Tables 12A-I, Tables 13A-K, Tables 14A-K, Tables 15A-F, Tables 16A-K, Tables 17A-K, Tables 18A-K, Tables 19A-J, Tables 20A-J, Tables 21A-K, Tables 22A-K, Tables 23A-J, Tables 24A-K, Tables 25A-G, Tables 26A-G, Table 27, Table 29, Table 31, or Table 32.

[0198] In an embodiment, the method of treating a subject suffering from cancer, comprises altering two or more of FAS, BID, CTLA4, PDCD1, CBLB, PTPN6, TRAC or TRBC genes, e.g., altering the structure, e.g., sequence, of two or more target nucleic acids of the subject (e.g., two or more of FAS, BID, CTLA4, PDCD1, CBLB, PTPN6, TRAC or TRBC genes). When two or more genes are altered in a subject (or a cell from the subject), the subject (or a cell from the subject) is contacted with: (a) gRNAs that target two or more of the FAS, BID, CTLA4, PDCD1, CBLB, PTPN6, TRAC or TRBC genes, e.g., two or more of the gRNA as described herein; (b) a Cas9 molecule, e.g., a Cas9 molecule as described herein; and optionally, (c) second, third and/or fourth gRNAs that respectively targets the two or more genes selected in (a), e.g., a gRNA, as described herein. In an embodiment, the method further comprises, introducing into the subject, or a cell of the subject, a governing gRNA molecule, or a nucleic acid that encodes a governing gRNA molecule.

[0199] In an embodiment, the method of treating a subject suffering from cancer comprises altering two or more of FAS, BID, CTLA4, PDCD1, CBLB, PTPN6, TRAC or TRBC genes.

[0200] In an embodiment, the method of treating a subject suffering from cancer comprises altering three or more of FAS, BID, CTLA4, PDCD1, CBLB, PTPN6, TRAC or TRBC genes.

[0201] In an embodiment, the method of treating a subject suffering from cancer comprises altering four or more of FAS, BID, CTLA4, PDCD1, CBLB, PTPN6, TRAC or TRBC genes.

[0202] In an embodiment, the method of treating a subject suffering from cancer comprises altering five or more of FAS, BID, CTLA4, PDCD1, CBLB, PTPN6, TRAC or TRBC genes.

[0203] In an embodiment, the method of treating a subject suffering from cancer comprises altering six or more of FAS, BID, CTLA4, PDCD1, CBLB, PTPN6, TRAC or TRBC genes.

[0204] In an embodiment, the method of treating a subject suffering from cancer comprises altering seven or more of FAS, BID, CTLA4, PDCD1, CBLB, PTPN6, TRAC or TRBC genes.

[0205] In an embodiment, the method of treating a subject suffering from cancer comprises altering each of FAS, BID, CTLA4, PDCD1, CBLB, PTPN6, TRAC or TRBC genes.

[0206] In an embodiment, the method comprises acquiring knowledge of the sequence at a T cell target position in the subject.

[0207] In an embodiment, the method comprises acquiring knowledge of the sequence at a T cell target position in the subject by sequencing one or more of the FAS, BID, CTLA4, PDCD1, CBLB, PTPN6, TRAC or TRBC gene or a portion of one or more of the FAS, BID, CTLA4, PDCD1, CBLB, PTPN6, TRAC or TRBC gene.

[0208] In an embodiment, the method comprises inducing a mutation at a T cell target position in the FAS, BID, CTLA4, PDCD1, CBLB, PTPN6, TRAC or TRBC gene.

[0209] In an embodiment, the method comprises inducing a mutation at a T cell target position in one or more of the FAS, BID, CTLA4, PDCD1, CBLB, PTPN6, TRAC and TRBC genes.

[0210] In an embodiment, the method comprises inducing a mutation at a T cell target position in two or more of the FAS, BID, CTLA4, PDCD1, CBLB, PTPN6, TRAC and TRBC genes.

[0211] In an embodiment, the method comprises inducing a mutation at a T cell target position in three or more of the FAS, BID, CTLA4, PDCD1, CBLB, PTPN6, TRAC and TRBC genes.

[0212] In an embodiment, the method comprises inducing a mutation at a T cell target position in four or more of the FAS, BID, CTLA4, PDCD1, CBLB, PTPN6, TRAC and TRBC genes.

[0213] In an embodiment, the method comprises inducing a mutation at a T cell target position in five or more of the FAS, BID, CTLA4, PDCD1, CBLB, PTPN6, TRAC and TRBC genes.

[0214] In an embodiment, the method comprises inducing a mutation at a T cell target position in six or more of the FAS, BID, CTLA4, PDCD1, CBLB, PTPN6, TRAC and TRBC genes.

[0215] In an embodiment, the method comprises inducing a mutation at a T cell target position in seven or more of the FAS, BID, CTLA4, PDCD1, CBLB, PTPN6, TRAC and TRBC genes.

[0216] In an embodiment, the method comprises inducing a mutation at a T cell target position in each of the FAS, BID, CTLA4, PDCD1, CBLB, PTPN6, TRAC and TRBC genes.

[0217] In an embodiment, the method comprises inducing a mutation at a T cell target position in one or more of the FAS, BID, CTLA4, PDCD1, CBLB, PTPN6, TRAC or TRBC gene by NHEJ.

[0218] In an embodiment, a cell of the subject is contacted ex vivo with (a), (b), and optionally (c). In an embodiment, the cell is returned to the subject's body. In an embodiment, the cell of the subject being contacted ex vivo is a T cell. The T cell may be an engineered T cell, e.g., an engineered CAR (chimeric antigen receptor) T cell or an engineered TCR (T-cell receptor) T cell. A T cell may engineered to express a TCR or a CAR prior to, after, or at the same time as introducing a T cell target position mutation in one or more of the FAS, BID, CTLA4, PDCD1, CBLB, PTPN6, TRAC or TRBC gene.

[0219] When the method comprises (1) inducing a mutation at a T cell target position by NHEJ or (2) knocking down expression of the FAS, BID, CTLA4, PDCD1, CBLB, or PTPN6 gene, e.g., by targeting the promoter region, a Cas9 of (b) and at least one guide RNA, e.g., a guide RNA of (a) are included in the contacting step.

[0220] In another aspect, disclosed herein is a reaction mixture comprising a, gRNA, a nucleic acid, or a composition described herein, and a cell, e.g., a cell from a subject having cancer, or a subject which would benefit from a mutation at a T cell target position.

[0221] In another aspect, disclosed herein is a kit comprising, (a) gRNA molecule described herein, or nucleic acid that encodes the gRNA, and one or more of the following:

[0222] (b) a Cas9 molecule, e.g., a Cas9 molecule described herein, or a nucleic acid or mRNA that encodes the Cas9;

[0223] (c)(i) a second gRNA molecule, e.g., a second gRNA molecule described herein or a nucleic acid that encodes (c)(i);

[0224] (c)(ii) a third gRNA molecule, e.g., a second gRNA molecule described herein or a nucleic acid that encodes (c)(ii);

[0225] (c)(iii) a fourth gRNA molecule, e.g., a second gRNA molecule described herein or a nucleic acid that encodes (c)(iii).

[0226] In an embodiment, the kit comprises nucleic acid, e.g., an AAV vector, e.g., an AAV vector described herein, that encodes one or more of (a), (b), (c)(i), (c)(ii), and (c)(iii). In an embodiment, the kit further comprises a governing gRNA molecule, or a nucleic acid that encodes a governing gRNA molecule.

[0227] In an aspect, the disclosure features a gRNA molecule, referred to herein as a governing gRNA molecule, comprising a targeting domain which is complementary to a target domain on a nucleic acid that encodes a component of the CRISPR/Cas system introduced into a cell or subject. In an embodiment, the governing gRNA molecule targets a nucleic acid that encodes a Cas9 molecule or a nucleic acid that encodes a target gene gRNA molecule. In an embodiment, the governing gRNA comprises a targeting domain that is complementary to a target domain in a sequence that encodes a Cas9 component, e.g., a Cas9 molecule or target gene gRNA molecule. In an embodiment, the target domain is designed with, or has, minimal homology to other nucleic acid sequences in the cell, e.g., to minimize off-target cleavage. For example, the targeting domain on the governing gRNA can be selected to reduce or minimize off-target effects. In an embodiment, a target domain for a governing gRNA can be disposed in the control or coding region of a Cas9 molecule or disposed between a control region and a transcribed region. In an embodiment, a target domain for a governing gRNA can be disposed in the control or coding region of a target gene gRNA molecule or disposed between a control region and a transcribed region for a target gene gRNA. While not wishing to be bound by theory, in an embodiment, it is believed that altering, e.g., inactivating, a nucleic acid that encodes a Cas9 molecule or a nucleic acid that encodes a target gene gRNA molecule can be effected by cleavage of the targeted nucleic acid sequence or by binding of a Cas9 molecule/governing gRNA molecule complex to the targeted nucleic acid sequence.

[0228] The compositions, reaction mixtures and kits, as disclosed herein, can also include a governing gRNA molecule, e.g., a governing gRNA molecule disclosed herein.

[0229] Unless otherwise defined, all technical and scientific terms used herein have the same meaning as commonly understood by one of ordinary skill in the art to which this invention belongs. Although methods and materials similar or equivalent to those described herein can be used in the practice or testing of the present invention, suitable methods and materials are described below. All publications, patent applications, patents, and other references mentioned herein are incorporated by reference in their entirety. In addition, the materials, methods, and examples are illustrative only and not intended to be limiting.

[0230] Headings, including numeric and alphabetical headings and subheadings, are for organization and presentation and are not intended to be limiting.

[0231] Other features and advantages of the invention will be apparent from the detailed description, drawings, and from the claims.

### DESCRIPTION

[0232] The drawings are first briefly described.

[0233] FIGS. 1A-1G are representations of several exemplary gRNAs.

[0234] FIG. 1A depicts a modular gRNA molecule derived in part (or modeled on a sequence in part) from Streptococcus pyogenes (S. pyogenes) as a duplexed structure (SEQ ID NO:42 and 43, respectively, in order of appearance);

[0235] FIG. 1B depicts a unimolecular (or chimeric) gRNA molecule derived in part from S. pyogenes as a duplexed structure (SEQ ID NO:44);

[0236] FIG. 1C depicts a unimolecular gRNA molecule derived in part from S. pyogenes as a duplexed structure (SEQ ID NO:45);

[0237] FIG. 1D depicts a unimolecular gRNA molecule derived in part from S. pyogenes as a duplexed structure (SEQ ID NO:46);

[0238] FIG. 1E depicts a unimolecular gRNA molecule derived in part from S. pyogenes as a duplexed structure (SEQ ID NO:47);

[0239] FIG. 1F depicts a modular gRNA molecule derived in part from Streptococcus thermophilus (S. thermophilus) as a duplexed structure (SEQ ID NO:48 and 49, respectively, in order of appearance);

[0240] FIG. 1G depicts an alignment of modular gRNA molecules of S. pyogenes and S. thermophilus (SEQ ID NO:50-53, respectively, in order of appearance).

[0241] FIGS. 2A-2G depict an alignment of Cas9 sequences from Chylinski et al. (RNA Biol. 2013; 10(5): 726-737). The N-terminal RuvC-like domain is boxed and indicated with a “y”. The other two RuvC-like domains are boxed and indicated with a “b”. The HNH-like domain is boxed and indicated by a “g”. Sm: S. mutans (SEQ ID NO: 1); Sp: S. pyogenes (SEQ ID NO:2); St: S. thermophilus (SEQ ID NO:3); Li: L. innocua (SEQ ID NO:4). Motif: this is a motif based on the four sequences: residues conserved in all four sequences are indicated by single letter amino acid abbreviation; “*” indicates any amino acid found in the corresponding position of any of the four sequences; and “-” indicates any amino acid, e.g., any of the 20 naturally occurring amino acids.

[0242] FIGS. 3A-3B show an alignment of the N-terminal RuvC-like domain from the Cas9 molecules disclosed in Chylinski et al (SEQ ID NO:54-103, respectively, in order of appearance). The last line of FIG. 3B identifies 4 highly conserved residues.

[0243] FIGS. 4A-4B show an alignment of the N-terminal RuvC-like domain from the Cas9 molecules disclosed in Chylinski et al. with sequence outliers removed (SEQ ID NO: 104-177, respectively, in order of appearance). The last line of FIG. 4B identifies 3 highly conserved residues.

[0244] FIGS. 5A-5C show an alignment of the HNH-like domain from the Cas9 molecules disclosed in Chylinski et al (SEQ ID NO:178-252, respectively, in order of appearance). The last line of FIG. 5C identifies conserved residues.

[0245] FIGS. 6A-6B show an alignment of the HNH-like domain from the Cas9 molecules disclosed in Chylinski et al. with sequence outliers removed (SEQ ID NO:253-302, respectively, in order of appearance). The last line of FIG. 6B identifies 3 highly conserved residues.

[0246] FIGS. 7A-7B depict an alignment of Cas9 sequences from S. pyogenes and Neisseria meningitidis (N. meningitidis). The N-terminal RuvC-like domain is boxed and indicated with a “Y”. The other two RuvC-like domains are boxed and indicated with a “B”. The HNH-like domain is boxed and indicated with a “G”. Sp: S. pyogenes; Nm: N. meningitidis. Motif: this is a motif based on the two sequences: residues conserved in both sequences are indicated by a single amino acid designation; “*” indicates any amino acid found in the corresponding position of any of the two sequences; “-” indicates any amino acid, e.g., any of the 20 naturally occurring amino acids, and “-” indicates any amino acid, e.g., any of the 20 naturally occurring amino acids, or absent.

[0247] FIG. 8 shows a nucleic acid sequence encoding Cas9 of N. meningitidis (SEQ ID NO:303). Sequence indicated by an “R” is an SV40 NLS; sequence indicated as “G” is an HA tag; and sequence indicated by an “O” is a synthetic NLS sequence; the remaining (unmarked) sequence is the open reading frame (ORF).

[0248] FIG. 9A shows schematic representations of the domain organization of S. pyogenes Cas 9 and the organization of the Cas9 domains, including amino acid positions, in reference to the two lobes of Cas9 (recognition (REC) and nuclease (NUC) lobes).

[0249] FIG. 9B shows schematic representations of the domain organization of S. pyogenes Cas 9 and the percent homology of each domain across 83 Cas9 orthologs.

[0250] FIG. 10A shows an exemplary structure of a unimolecular gRNA molecule derived in part from S. pyogenes as a duplexed structure (SEQ ID NO:40).

[0251] FIG. 10B shows an exemplary structure of a unimolecular gRNA molecule derived in part from S. aureus as a duplexed structure (SEQ ID NO:41).

[0252] FIG. 11 shows results from an experiment assessing the activity of gRNAs directed against TRBC gene in 293 cells using S. aureus Cas9. 293s were transfected with two plasmids—one encoding S. aureus Cas9 and the other encoding the listed gRNA. The graph summarizes the average % NHEJ observed at the TRBC2 locus for each gRNA, which was calculated from a T7E1 assay performed on genomic DNA isolated from duplicate samples.

[0253] FIG. 12 shows results from an experiment assessing the activity of gRNAs directed against TRBC gene in 293 cells using S. pyrogenes Cas9. 293 cells were transfected with two plasmids—one encoding S. pyogenes Cas9 and the other encoding the listed gRNA. The graph shows the average % NHEJ observed at both the TRBC1 and TRBC2 loci for each gRNA, which was calculated from a T7E1 assay performed on genomic DNA isolated from duplicate samples.

[0254] FIG. 13 shows results from an experiment assessing the activity of gRNAs directed against TRAC gene in 293 cells using S. aureus Cas9. 293 cells were transfected with two plasmids—one encoding S. aureus Cas9 and the other encoding the listed gRNA. The graph shows the average % NHEJ observed at the TRAC locus for each gRNA, which was calculated from a T7E1 assay performed on genomic DNA isolated from duplicate samples.

[0255] FIG. 14 shows results from an experiment assessing the activity of gRNAs directed against TRAC gene in 293 cells using S. pyogenes Cas9. 293 cells were transfected with two plasmids—one encoding S. pyogenes Cas9 and the other encoding the listed gRNA. The graph shows the average % NHEJ observed at the TRAC locus for each gRNA, which was calculated from a T7E1 assay performed on genomic DNA isolated from duplicate samples.

[0256] FIG. 15 shows results from an experiment assessing the activity of gRNAs directed against PDCD1 gene in 293 cells using S. aureus Cas9. 293 cells were transfected with two plasmids—one encoding S. aureus Cas9 and the other encoding the listed gRNA. The graph shows the average % NHEJ observed at the PDCD1 locus for each gRNA, which was calculated from a T7E1 assay performed on genomic DNA isolated from duplicate samples.

[0257] FIG. 16 shows results from an experiment assessing the activity of gRNAs directed against PDCD1 gene in 293 cells using S. pyogenes Cas9. 293 cells were transfected with two plasmids—one encoding S. pyogenes Cas9 and the other encoding the listed gRNA. The graph shows the average % NHEJ observed at the PDCD1 locus for each gRNA, which was calculated from a T7E1 assay performed on genomic DNA isolated from duplicate samples.

[0258] FIGS. 17A-C depict results showing a loss of CD3 expression in CD4+ T cells due to delivery of S. pyogenes Cas9 mRNA and TRBC and TRAC gene specific gRNAs

[0259] FIG. 17A shows CD4+ T cells electroporated with S. pyogenes Cas9 mRNA and the gRNA indicated (TRBC-210 (GCGCUGACGAUCUGGGUGAC) (SEQ ID NO:413), TRAC-4 (GCUGGUACACGGCAGGGUCA) (SEQ ID NO:453) or AAVS1 (GUCCCCUCCACCCCACAGUG) (SEQ ID NO:51201)) and stained with an APC-CD3 antibody and analyzed by FACS. The cells were analyzed on day 2 and day 3 after the electroporation.

[0260] FIG. 17B shows quantification of the CD3 negative population from the plots in (A).

[0261] FIG. 17C shows % NHEJ results from the T7E1 assay performed on TRBC2 and TRAC loci.

[0262] FIGS. 18A-C depict results showing a loss of CD3 expression in Jurkat T cells due to delivery of S. aureus Cas9/gRNA RNP targeting TRAC gene

[0263] FIG. 18A shows Jurkat T cells electroporated with S. aureus Cas9/gRNA TRAC-233 (GUGAAUAGGCAGACAGACUUGUCA) (SEQ ID NO:474) RNPs targeting TRAC gene and stained with an APC-CD3 antibody and analyzed by FACS. The cells were analyzed on day 1, day 2 and day 3 after the electroporation.

[0264] FIG. 18B shows quantification of the CD3 negative population from the plots in (A).

[0265] FIG. 18C shows % NHEJ results from the T7E1 assay performed on the TRAC locus

[0266] FIG. 19 shows the structure of the 5′ ARCA cap.

[0267] FIG. 20 depicts results from the quantification of live Jurkat T cells post electroporation with Cas9 mRNA and AAVS1 gRNAs. Jurkat T cells were electroporated with S. pyogenes Cas9 mRNA and the respective modified gRNA. 24 hours after electroporation, 1×10⁵ cells were stained with FITC-conjugated Annexin-V specific antibody for 15 minutes at room temperature followed by staining with propidium iodide immediately before analysis by flow cytometry. The percentage of cells that did not stain for either Annexin-V or PI is presented in the bar graph.

[0268] FIGS. 21A-C depict loss of CD3 expression in Naive CD3+ T cells due to delivery of S. aureus Cas9/gRNA RNP targeting TRAC.

[0269] FIG. 21A depicts naïve CD3+ T cells electroporated with S. aureus Cas9/gRNA (with targeting domain GUGAAUAGGCAGACAGACUUGUCA (SEQ ID NO:474) RNPs targeting TRAC were stained with an APC-CD3 antibody and analyzed by FACS. The cells were analyzed on day 4 after the electroporation. The negative control are cells with the gRNA with the targeting domain GUGAAUAGGCAGACAGACUUGUCA (SEQ ID NO:474) without a functional Cas9.

[0270] FIG. 21B depicts quantification of the CD3 negative population from the plots in FIG. 21A.

[0271] FIG. 21C depicts % NHEJ results from the T7E1 assay performed on the TRAC locus.

[0272] FIG. 22 depicts genomic editing at the PDCD1 locus in Jurkat T cells after delivery of S. pyogenes Cas9 mRNA and PDCD1 gRNA (with a targeting domain GUCUGGGCGGUGCUACAACU (SEQ ID NO:508)) or S. pyogenes Cas9/gRNA (with a targeting domain GUCUGGGCGGUGCUACAACU (SEQ ID NO:508)) RNP targeting PDCD1. Quantification of % NHEJ results from the T7E1 assay performed on the PDCD1 locus at 24, 48, and 72 hours. Higher levels of % NHEJ were detected with RNP vs mRNA delivery.

### DEFINITIONS

[0273] “Domain”, as used herein, is used to describe segments of a protein or nucleic acid. Unless otherwise indicated, a domain is not required to have any specific functional property.

[0274] Calculations of homology or sequence identity between two sequences (the terms are used interchangeably herein) are performed as follows. The sequences are aligned for optimal comparison purposes (e.g., gaps can be introduced in one or both of a first and a second amino acid or nucleic acid sequence for optimal alignment and non-homologous sequences can be disregarded for comparison purposes). The optimal alignment is determined as the best score using the GAP program in the GCG software package with a Blossum 62 scoring matrix with a gap penalty of 12, a gap extend penalty of 4, and a frame shift gap penalty of 5. The amino acid residues or nucleotides at corresponding amino acid positions or nucleotide positions are then compared. When a position in the first sequence is occupied by the same amino acid residue or nucleotide as the corresponding position in the second sequence, then the molecules are identical at that position. The percent identity between the two sequences is a function of the number of identical positions shared by the sequences.

[0275] “Governing gRNA molecule”, as used herein, refers to a gRNA molecule that comprises a targeting domain that is complementary to a target domain on a nucleic acid that comprises a sequence that encodes a component of the CRISPR/Cas system that is introduced into a cell or subject. A governing gRNA does not target an endogenous cell or subject sequence. In an embodiment, a governing gRNA molecule comprises a targeting domain that is complementary with a target sequence on: (a) a nucleic acid that encodes a Cas9 molecule; (b) a nucleic acid that encodes a gRNA which comprises a targeting domain that targets FAS, BID, CTLA4, PDCD1, CBLB, PTPN6, TRAC or TRBC gene (a target gene gRNA); or on more than one nucleic acid that encodes a CRISPR/Cas component, e.g., both (a) and (b). In an embodiment, a nucleic acid molecule that encodes a CRISPR/Cas component, e.g., that encodes a Cas9 molecule or a target gene gRNA, comprises more than one target domain that is complementary with a governing gRNA targeting domain. While not wishing to be bound by theory, it is believed that a governing gRNA molecule complexes with a Cas9 molecule and results in Cas9 mediated inactivation of the targeted nucleic acid, e.g., by cleavage or by binding to the nucleic acid, and results in cessation or reduction of the production of a CRISPR/Cas system component. In an embodiment, the Cas9 molecule forms two complexes: a complex comprising a Cas9 molecule with a target gene gRNA, which complex will alter the FAS, BID, CTLA4, PDCD1, CBLB, PTPN6, TRAC or TRBC gene; and a complex comprising a Cas9 molecule with a governing gRNA molecule, which complex will act to prevent further production of a CRISPR/Cas system component, e.g., a Cas9 molecule or a target gene gRNA molecule. In an embodiment, a governing gRNA molecule/Cas9 molecule complex binds to or promotes cleavage of a control region sequence, e.g., a promoter, operably linked to a sequence that encodes a Cas9 molecule, a sequence that encodes a transcribed region, an exon, or an intron, for the Cas9 molecule. In an embodiment, a governing gRNA molecule/Cas9 molecule complex binds to or promotes cleavage of a control region sequence, e.g., a promoter, operably linked to a gRNA molecule, or a sequence that encodes the gRNA molecule. In an embodiment, the governing gRNA, e.g., a Cas9-targeting governing gRNA molecule, or a target gene gRNA-targeting governing gRNA molecule, limits the effect of the Cas9 molecule/target gene gRNA molecule complex-mediated gene targeting. In an embodiment, a governing gRNA places temporal, level of expression, or other limits, on activity of the Cas9 molecule/target gene gRNA molecule complex. In an embodiment, a governing gRNA reduces off-target or other unwanted activity. In an embodiment, a governing gRNA molecule inhibits, e.g., entirely or substantially entirely inhibits, the production of a component of the Cas9 system and thereby limits, or governs, its activity.

[0276] “Modulator”, as used herein, refers to an entity, e.g., a drug, which can alter the activity (e.g., enzymatic activity, transcriptional activity, or translational activity), amount, distribution, or structure of a subject molecule or genetic sequence. In an embodiment, modulation comprises cleavage, e.g., breaking of a covalent or non-covalent bond, or the forming of a covalent or non-covalent bond, e.g., the attachment of a moiety, to the subject molecule. In an embodiment, a modulator alters the, three dimensional, secondary, tertiary, or quaternary structure, of a subject molecule. A modulator can increase, decrease, initiate, or eliminate a subject activity.

[0277] “Large molecule”, as used herein, refers to a molecule having a molecular weight of at least 2, 3, 5, 10, 20, 30, 40, 50, 60, 70, 80, 90, or 100 kD. Large molecules include proteins, polypeptides, nucleic acids, biologics, and carbohydrates.

[0278] “Polypeptide”, as used herein, refers to a polymer of amino acids having less than 100 amino acid residues. In an embodiment, it has less than 50, 20, or 10 amino acid residues.

[0279] “Non-homologous end joining” or “NHEJ”, as used herein, refers to ligation mediated repair and/or non-template mediated repair including, e.g., canonical NHEJ (cNHEJ), alternative NHEJ (altNHEJ), microhomology-mediated end joining (MMEJ), single-strand annealing (SSA), and synthesis-dependent microhomology-mediated end joining (SD-MMEJ).

[0280] “Reference molecule”, e.g., a reference Cas9 molecule or reference gRNA, as used herein, refers to a molecule to which a subject molecule, e.g., a subject Cas9 molecule of subject gRNA molecule, e.g., a modified or candidate Cas9 molecule is compared. For example, a Cas9 molecule can be characterized as having no more than 10% of the nuclease activity of a reference Cas9 molecule. Examples of reference Cas9 molecules include naturally occurring unmodified Cas9 molecules, e.g., a naturally occurring Cas9 molecule such as a Cas9 molecule of S. pyogenes, S. aureus, or S. thermophilus. In an embodiment, the reference Cas9 molecule is the naturally occurring Cas9 molecule having the closest sequence identity or homology with the Cas9 molecule to which it is being compared. In an embodiment, the reference Cas9 molecule is a sequence, e.g., a naturally occurring or known sequence, which is the parental form on which a change, e.g., a mutation has been made.

[0281] “Replacement”, or “replaced”, as used herein with reference to a modification of a molecule does not require a process limitation but merely indicates that the replacement entity is present.

[0282] “Small molecule”, as used herein, refers to a compound having a molecular weight less than about 2 kD, e.g., less than about 2 kD, less than about 1.5 kD, less than about 1 kD, or less than about 0.75 kD.

[0283] “Subject”, as used herein, may mean either a human or non-human animal. The term includes, but is not limited to, mammals (e.g., humans, other primates, pigs, rodents (e.g., mice and rats or hamsters), rabbits, guinea pigs, cows, horses, cats, dogs, sheep, and goats). In an embodiment, the subject is a human. In other embodiments, the subject is poultry.

[0284] “Treat”, “treating” and “treatment”, as used herein, mean the treatment of a disease in a mammal, e.g., in a human, including (a) inhibiting the disease, i.e., arresting or preventing its development; (b) relieving the disease, i.e., causing regression of the disease state; and (c) curing the disease.

[0285] “X” as used herein in the context of an amino acid sequence, refers to any amino acid (e.g., any of the twenty natural amino acids) unless otherwise specified.

[0286] Improving Cancer Immunotherapy

[0287] In an aspect, compositions and methods described herein can be used to affect proliferation of engineered T cells by altering one ore more T cell-expressed genes, e.g., the FAS, BID, CTLA4, PDCD1, CBLB, PTPN6, TRAC and/or TRBC gene. In order for engineered T cells to mount an effective anti-tumor response they need to: 1) proliferate adequately following transfer to the subject to provide a sufficient number of specific tumor-targeting T cells; 2) survive in the subject for a length of time sufficient to maintain the required anti-tumor activity; and 3) evade the influence of suppressive factors produced by immune cells, tumor cells and other cells in the tumor environment so that the engineered T cells maintain a functional anti-tumor phenotype. Insufficient proliferation and/or survival, as well as susceptibility to inhibitory factors, can contribute to lack of efficacy of engineered T cells in subjects suffering from cancer. The methods and compositions disclosed herein address these issues in order to improve efficacy of engineered T cells as a cancer therapeutic modality.

[0288] In an embodiment, compositions and methods described herein can be used to affect proliferation of engineered T cells by altering the CBLB gene. While not wishing to be bound by theory, it is considered that reduced or absent expression of Casitas B-lineage lymphoma b protein (encoded by CBLB) reduces the requirement for exogenous interleukin signaling to promote proliferation of engineered T cells following transfer to the subject (Stromnes, I. M. et al., 2010 J. Clin. Invest. 120, 3722-3734).

[0289] In an embodiment, compositions and methods described herein can be used to affect proliferation of engineered T cells by altering the PTPN6 gene. While not wishing to be bound by theory, it is considered that reduced or absent expression of Src homology region 2 domain-containing phosphatase-1 protein (encoded by PTPN6) leads to increased short-term accumulation of transferred T cells with subsequently improved anti-tumor activity (Stromnes, I. M. et al., 2012 J. Immunol. 189, 1812-1825).

[0290] In an embodiment, compositions and methods described herein can be used to affect proliferation of engineered T cells by altering the FAS gene. While not wishing to be bound by theory, it is considered that reduced or absent expression of the Fas protein will inhibit induction of T cell apoptosis by Fas-ligand; a factor expressed by many cancer types (Dotti, G. et al., 2005 Blood 105, 4677-4684).

[0291] In an embodiment, compositions and methods described herein can be used to affect proliferation of engineered T cells by altering the BID gene. While not wishing to be bound by theory, it is considered that reduced or absent expression of the Bid protein prevents the induction of T cell apoptosis following activation of the Fas pathway (Lei, X. Y. et al., 2009 Immunol. Lett. 122, 30-36).

[0292] In an embodiment, compositions and methods described herein can be used to decrease the effect of immune suppressive factors on engineered T cells by altering the CTLA4 gene. While not wishing to be bound by theory, it is considered that reduced or absent expression of cytoxic T-lymphocyte-associated antigen 4 (encoded by CTLA4) abrogates the induction of a non-responsive state (“anergy”) following binding of CD80 or CD86 expressed by antigen presenting cells in the tumor environment (Shrikant, P. et al, 1999 Immunity 11, 483-493).

[0293] In an embodiment, compositions and methods described herein can be used to decrease the effect of immune suppressive factors on engineered T cells by altering the PDCD1 gene. While not wishing to be bound by theory, it is considered that reduced or absent expression of the Programmed Cell Death Protein 1 (encoded by PDCD1) prevents induction of T cell apoptosis by engagement of PD 1 Ligand expressed by tumor cells or cells in the tumor environment (Topalian, S. L. et al., 2012 N. Engl. J. Med. 366, 2443-2454).

[0294] In an embodiment, compositions and methods described herein can be used to improve T cell specificity and safety by altering the TRAC and/or TRBC gene. While not wishing to be bound by theory, it is considered that reduced or absent expression of T-cell receptors (encoded by TRAC and TRBC) prevents graft vs. host disease by eliminating T cell receptor recognition of and response to host tissues. This approach, therefore, could be used to generate “off the shelf” T cells (Torikai et al., 2012 Blood 119, 5697-5705). Also, while not wishing to be bound by theory, it is considered that reduced or absent expression of the TRAC and/or TRBC gene will reduce or eliminate mis-pairing of endogenous T cell receptors with exogenously introduced engineered T cell receptors, thus improving therapeutic efficacy (Provasi et al., 2012, Nature Medicine 18, 807-815).

[0295] In an embodiment, compositions and methods described herein can be used to decrease one or more of FAS, BID, CTLA4, PDCD1, CBLB, PTPN6, TRAC and TRBC genes to improve treatment of cancer immunotherapy using engineered T cells.

[0296] Disclosed herein are the approaches to treat cancer via immunotherapy, using the compositions and methods described herein.

[0297] In one approach, one or more of the FAS, BID, CTLA4, PDCD1, CBLB, PTPN6, TRAC and TRBC genes are targeted as a targeted knockout or knockdown, e.g., to affect T cell proliferation, survival and/or function. In an embodiment, said approach comprises knocking out or knocking down one T-cell expressed gene (e.g., FAS, BID, CTLA4, PDCD1, CBLB, PTPN6, TRAC or TRBC gene). In another embodiment, the approach comprises knocking out or knocking down two T-cell expressed genes, e.g., two of FAS, BID, CTLA4, PDCD1, CBLB, PTPN6, TRAC or TRBC genes. In another embodiment, the approach comprises knocking out or knocking down three T-cell expressed genes, e.g., three of FAS, BID, CTLA4, PDCD1, CBLB, PTPN6, TRAC or TRBC genes. In another embodiment, the approach comprises knocking out or knocking down four T-cell expressed genes, e.g., four of FAS, BID, CTLA4, PDCD1, CBLB, PTPN6, TRAC or TRBC genes. In another embodiment, the approach comprises knocking out or knocking down five T-cell expressed genes, e.g., five of FAS, BID, CTLA4, PDCD1, CBLB, PTPN6, TRAC or TRBC genes. In another embodiment, the approach comprises knocking out or knocking down six T-cell expressed genes, e.g., six of FAS, BID, CTLA4, PDCD1, CBLB, PTPN6, TRAC or TRBC genes. In another embodiment, the approach comprises knocking out or knocking down seven T-cell expressed genes, e.g., seven of FAS, BID, CTLA4, PDCD1, CBLB, PTPN6, TRAC or TRBC genes. In another embodiment, the approach comprises knocking out or knocking down eight T-cell expressed genes, e.g., each of FAS, BID, CTLA4, PDCD1, CBLB, PTPN6, TRAC and TRBC genes.

[0298] In an embodiment, the methods comprise initiating treatment of a subject after disease onset. In an embodiment, the method comprises initiating treatment of a subject well after disease onset, e.g., 1, 2, 3, 4, 5, 6, 7, 8, 9, 10, 12, 24, or 36 months after onset of cancer.

[0299] In an embodiment, the method comprises initiating treatment of a subject in an advanced stage of disease.

[0300] Overall, initiation of treatment for subjects at all stages of disease is expected to be of benefit to subjects.

[0301] Cancers that may be treated using the compositions and methods disclosed herein include cancers of the blood and solid tumors. For example, cancers that may be treated using the compositions and methods disclosed herein include, but are not limited to, lymphoma, chronic lymphocytic leukemia (CLL), B cell acute lymphocytic leukemia (B-ALL), acute lymphoblastic leukemia, acute myeloid leukemia, non-Hodgkin's lymphoma (NHL), diffuse large cell lymphoma (DELL), multiple myeloma, renal cell carcinoma (RCC), neuroblastoma, colorectal cancer, breast cancer, ovarian cancer, melanoma, sarcoma, prostate cancer, lung cancer, esophageal cancer, hepatocellular carcinoma, pancreatic cancer, astrocytoma, mesothelioma, head and neck cancer, and medulloblastoma.

Methods of Altering One or More T Cell-Expressed Genes, e.g., the FAS, BID, CTLA4, PDCD1, CBLB, PTPN6, TRAC and/or TRBC Gene

[0302] As disclosed herein, one or more T cell-expressed genes, e.g., the FAS, BID, CTLA4, PDCD1, CBLB, PTPN6, TRAC and/or TRBC gene can be targeted (e.g., altered) by gene editing, e.g., using CRISPR-Cas9 mediated methods as described herein.

[0303] Methods and compositions discussed herein, provide for targeting (e.g., altering) a T cell target position in one or more T cell-expressed genes, e.g., the FAS, BID, CTLA4, PDCD1, CBLB, PTPN6, TRAC and/or TRBC gene. A T cell target position can be targeted (e.g., altered) by gene editing, e.g., using CRISPR-Cas9 mediated methods to target (e.g. alter) in one or more T cell-expressed genes, e.g., the FAS, BID, CTLA4, PDCD1, CBLB, PTPN6, TRAC and/or TRBC gene.

Disclosed herein are methods for targeting (e.g., altering) a T cell target position in one or more T cell-expressed genes, e.g., the FAS, BID, CTLA4, PDCD1, CBLB, PTPN6, TRAC and/or TRBC gene.

[0304] Targeting (e.g., altering) a T cell target position is achieved, e.g., by:

[0305] (1) knocking out one or more T cell-expressed genes, e.g., the FAS, BID, CTLA4, PDCD1, CBLB, PTPN6, TRAC and/or TRBC gene:

[0306] (a) insertion or deletion (e.g., NHEJ-mediated insertion or deletion) of one or more nucleotides in close proximity to or within the coding region of one or more T cell-expressed genes, e.g., the FAS, BID, CTLA4, PDCD1, CBLB, PTPN6, TRAC and/or TRBC gene, or

[0307] (b) deletion (e.g., NHEJ-mediated deletion) of a genomic sequence including at least a portion of one or more T cell-expressed genes, e.g., the FAS, BID, CTLA4, PDCD1, CBLB, PTPN6, TRAC and/or TRBC gene, or

[0308] (2) knocking down one or more T cell-expressed genes, e.g., the FAS, BID, CTLA4, PDCD1, CBLB, and/or PTPN6 gene mediated by enzymatically inactive Cas9 (eiCas9) molecule or an eiCas9-fusion protein by targeting non-coding region, e.g., a promoter region, of the gene.

[0309] All approaches give rise to targeting (e.g., alteration) of one or more T cell-expressed genes, e.g., the FAS, BID, CTLA4, PDCD1, CBLB, PTPN6, TRAC and/or TRBC gene.

[0310] In one embodiment, methods described herein introduce one or more breaks near the coding region in at least one allele of one or more T cell-expressed genes, e.g., the FAS, BID, CTLA4, PDCD1, CBLB, PTPN6, TRAC and/or TRBC gene. In another embodiment, methods described herein introduce two or more breaks to flank at least a portion of one or more T cell-expressed genes, e.g., the FAS, BID, CTLA4, PDCD1, CBLB, PTPN6, TRAC and/or TRBC gene. The two or more breaks remove (e.g., delete) a genomic sequence including at least a portion of one or more T cell-expressed genes, e.g., the FAS, BID, CTLA4, PDCD1, CBLB, PTPN6, TRAC and/or TRBC gene. In another embodiment, methods described herein comprise knocking down one or more T cell-expressed genes, e.g., the FAS, BID, CTLA4, PDCD1, CBLB, and/or PTPN6 gene mediated by enzymatically inactive Cas9 (eiCas9) molecule or an eiCas9-fusion protein by targeting the promoter region of T cell target knockdown position. All methods described herein result in targeting (e.g., alteration) of one or more T cell-expressed genes, e.g., the FAS, BID, CTLA4, PDCD1, CBLB, PTPN6, TRAC and/or TRBC gene.

[0311] The targeting (e.g., alteration) of one or more T cell-expressed genes, e.g., the FAS, BID, CTLA4, PDCD1, CBLB, PTPN6, TRAC and/or TRBC gene can be mediated by any mechanism. Exemplary mechanisms that can be associated with the alteration of one or more T cell-expressed genes, e.g., the FAS, BID, CTLA4, PDCD1, CBLB, PTPN6, TRAC and/or TRBC gene include, but are not limited to, non-homologous end joining (e.g., classical or alternative), microhomology-mediated end joining (MMEJ), homology-directed repair (e.g., endogenous donor template mediated), SDSA (synthesis dependent strand annealing), single strand annealing or single strand invasion.

Knocking Out One or More T Cell-Expressed Genes, e.g., the FAS, BID, CTLA4, PDCD1, CBLB, PTPN6, TRAC and/or TRBC Gene by Introducing an Indel or a Deletion in One or More T Cell-Expressed Genes, e.g., the FAS, BID, CTLA4, PDCD1, CBLB, PTPN6, TRAC and/or TRBC Gene

[0312] In an embodiment, the method comprises introducing an insertion or deletion of one more nucleotides in close proximity to the T cell target knockout position (e.g., the early coding region) of one or more T cell-expressed genes, e.g., the FAS, BID, CTLA4, PDCD1, CBLB, PTPN6, TRAC and/or TRBC gene genes. As described herein, in one embodiment, the method comprises the introduction of one or more breaks (e.g., single strand breaks or double strand breaks) to the T cell target knockout position, e.g., the coding region (e.g., the early coding region, e.g., within 500 bp from the start codon or the remaining coding sequence, e.g., downstream of the first 500 bp from the start codon) of one or more T cell-expressed genes, e.g., the FAS, BID, CTLA4, PDCD1, CBLB, PTPN6, TRAC and/or TRBC gene. While not wishing to be bound by theory, it is believed that NHEJ-mediated repair of the break(s) allows for the NHEJ-mediated introduction of an indel in close proximity to within the T cell target knockout position.

[0313] In an embodiment, a single strand break is introduced (e.g., positioned by one gRNA molecule) at or in close proximity to a T cell target knockout position in one or more T cell-expressed genes, e.g., the FAS, BID, CTLA4, PDCD1, CBLB, PTPN6, TRAC and/or TRBC gene. In an embodiment, a single gRNA molecule (e.g., with a Cas9 nickase) is used to create a single strand break at or in close proximity to the T cell target knockout position, e.g., the coding region (e.g., the early coding region, e.g., within 500 bp from the start codon or the remaining coding sequence, e.g., downstream of the first 500 bp from the start codon). In an embodiment, the break is positioned to avoid unwanted target chromosome elements, such as repeat elements, e.g., an Alu repeat.

[0314] In an embodiment, a double strand break is introduced (e.g., positioned by one gRNA molecule) at or in close proximity to a T cell target knockout position in one or more T cell-expressed genes, e.g., the FAS, BID, CTLA4, PDCD1, CBLB, PTPN6, TRAC and/or TRBC gene. In an embodiment, a single gRNA molecule (e.g., with a Cas9 nuclease other than a Cas9 nickase) is used to create a double strand break at or in close proximity to the T cell target knockout position, e.g., the coding region (e.g., the early coding region, e.g., within 500 bp from the start codon or the remaining coding sequence, e.g., downstream of the first 500 bp from the start codon). In an embodiment, the break is positioned to avoid unwanted target chromosome elements, such as repeat elements, e.g., an Alu repeat.

[0315] In an embodiment, two single strand breaks are introduced (e.g., positioned by two gRNA molecules) at or in close proximity to a T cell target knockout position in one or more T cell-expressed genes, e.g., the FAS, BID, CTLA4, PDCD1, CBLB, PTPN6, TRAC and/or TRBC gene. In an embodiment, two gRNA molecules (e.g., with one or two Cas9 nickcases) are used to create two single strand breaks at or in close proximity to the T cell target knockout position, e.g., the coding region (e.g., the early coding region, e.g., within 500 bp from the start codon or the remaining coding sequence, e.g., downstream of the first 500 bp from the start codon). In an embodiment, the gRNAs molecules are configured such that both single strand breaks are positioned upstream or downstream of the T cell target knockout position. In another embodiment, two gRNA molecules (e.g., with two Cas9 nickcases) are used to create two single strand breaks at or in close proximity to the T cell target knockout position, e.g., the gRNAs molecules are configured such that one single strand break is positioned upstream and a second single strand break is positioned downstream of the T cell target knockout position. In an embodiment, the breaks are positioned to avoid unwanted target chromosome elements, such as repeat elements, e.g., an Alu repeat.

[0316] In an embodiment, two sets of breaks (e.g., two double strand breaks) are introduced (e.g., positioned by two gRNA molecules) at or in close proximity to a T cell target knockout position in one or more T cell-expressed genes, e.g., the FAS, BID, CTLA4, PDCD1, CBLB, PTPN6, TRAC and/or TRBC gene. In an embodiment, two gRNA molecules (e.g., with one or two Cas9 nucleases that are not Cas9 nickases) are used to create two double strand breaks to flank a T cell target knockout position, e.g., the coding region (e.g., the early coding region, e.g., within 500 bp from the start codon or the remaining coding sequence, e.g., downstream of the first 500 bp from the start codon). In an embodiment, the gRNAs molecules are configured such that both sets of breaks are positioned upstream or downstream of the T cell target knockout position. In an embodiment, the gRNA molecules are configured such that one set of break(s) are positioned upstream and a second set of break(s) are positioned downstream of the T cell target knockout position. In an embodiment, the breaks are positioned to avoid unwanted target chromosome elements, such as repeat elements, e.g., an Alu repeat.

[0317] In an embodiment, two sets of breaks (e.g., one double strand breaks and a pair of single strand breaks) are introduced (e.g., positioned by three gRNA molecules) at or in close proximity to a T cell target knockout position in one or more T cell-expressed genes, e.g., the FAS, BID, CTLA4, PDCD1, CBLB, PTPN6, TRAC and/or TRBC gene. In an embodiment, three gRNA molecules (e.g., with a Cas9 nuclease and one or two Cas9 nickases) are used to create two sets of breaks to flank a T cell target knockout position, e.g., the coding region (e.g., the early coding region, e.g., within 500 bp from the start codon or the remaining coding sequence, e.g., downstream of the first 500 bp from the start codon). In an embodiment, the gRNAs molecules are configured such that both sets of breaks are positioned upstream or downstream of the T cell target knockout position. In an embodiment, the gRNA molecules are configured such that one set of break(s) are positioned upstream and a second set of break(s) are positioned downstream of the T cell target knockout position. In an embodiment, the breaks are positioned to avoid unwanted target chromosome elements, such as repeat elements, e.g., an Alu repeat.

[0318] In an embodiment, two sets of breaks (e.g., two pairs of single strand breaks) are introduced (e.g., positioned by four gRNA molecules) at or in close proximity to a T cell target knockout position in one or more T cell-expressed genes, e.g., the FAS, BID, CTLA4, PDCD1, CBLB, PTPN6, TRAC and/or TRBC gene. In an embodiment, four gRNA molecules (e.g., with one or more Cas9 nickases) are used to create two sets of breaks to flank a T cell target knockout position, e.g., the coding region (e.g., the early coding region, e.g., within 500 bp from the start codon or the remaining coding sequence, e.g., downstream of the first 500 bp from the start codon). In an embodiment, the gRNAs molecules are configured such that both sets of breaks are positioned upstream or downstream of the T cell target knockout position. In an embodiment, the gRNA molecules are configured such that one set of break(s) are positioned upstream and a second set of break(s) are positioned downstream of the T cell target knockout position. In an embodiment, the breaks are positioned to avoid unwanted target chromosome elements, such as repeat elements, e.g., an Alu repeat.

[0319] In an embodiment, two or more (e.g., three or four) gRNA molecules are used with one Cas9 molecule. In another embodiment, when two ore more (e.g., three or four) gRNAs are used with two or more Cas9 molecules, at least one Cas9 molecule is from a different species than the other Cas9 molecule(s). For example, when two gRNA molecules are used with two Cas9 molecules, one Cas9 molecule can be from one species and the other Cas9 molecule can be from a different species. Both Cas9 species are used to generate a single or double-strand break, as desired.

[0320] When more than one gene is targeted for alteration in a cell, the targeted nucleic acids may be altered, e.g., cleaved, by one or more Cas9 proteins. For example, if two genes are targeted for alteration, e.g., both genes are targeted for knockout, the same or a different Cas9 protein may be used to target each gene. In one embodiment, both genes (or each gene targeted in a cell), are cleaved by a Cas9 nuclease to generate a double stranded break. In another embodiment, both genes (or each gene targeted in a cell), are cleaved by a Cas9 nuclease to generate a double stranded break. In another embodiment, one or more genes in a cell may be altered by cleavage with a Cas9 nuclease and one or more genes in the same cell may be altered by cleavage with a Cas9 nickase. When two or more Cas9 proteins are used to cut a target nucleic acid, e.g., different genes in a cell, the Cas9 proteins may be from different bacterial species. For example, one or more genes in a cell may be altered by cleavage with a Cas9 protein from one bacterial species, and one or more genes in the same cell may be altered by cleavage with a Cas9 protein from a different bacterial species. It is contemplated that when two or more Cas9 proteins from different species are used that they may be delivered at the same time or delivered sequentially to control specificity of cleavage in the desired gene at the desired position in the target nucleic acid.

[0321] In some embodiments, the targeting domain of the first gRNA molecule and the targeting domain of the second gRNA molecules are complementary to opposite strands of the target nucleic acid molecule. In some embodiments, the gRNA molecule and the second gRNA molecule are configured such that the PAMs are oriented outward.

Knocking Out One or More T Cell-Expressed Genes, e.g., the FAS, BID, CTLA4, PDCD1, CBLB, PTPN6, TRAC and/or TRBC Gene by Deleting (e.g., NHEJ-Mediated Deletion) a Genomic Sequence Including at Least a Portion of One or More T Cell-Expressed Genes, e.g., the FAS, BID, CTLA4, PDCD1, CBLB, PTPN6, TRAC and/or TRBC Gene Genes

[0322] In an embodiment, the method comprises introducing a deletion of a genomic sequence comprising at least a portion of one or more T cell-expressed genes, e.g., the FAS, BID, CTLA4, PDCD1, CBLB, PTPN6, TRAC and/or TRBC gene genes. As described herein, in an embodiment, the method comprises the introduction of two double stand breaks—one 5′ and the other 3′ to (i.e., flanking) T cell target knockout position. In an embodiment, two gRNAs, e.g., unimolecular (or chimeric) or modular gRNA molecules, are configured to position the two sets of breaks (e.g., two double strand breaks, one double strand break and a pair of single strand breaks or two pairs of single strand breaks) on opposite sides of the T cell target knockout position in one or more T cell-expressed genes, e.g., the FAS, BID, CTLA4, PDCD1, CBLB, PTPN6, TRAC and/or TRBC gene.

[0323] In an embodiment, the method comprises deleting (e.g., NHEJ-mediated deletion) a genomic sequence including at least a portion of one or more T cell-expressed genes, e.g., the FAS, BID, CTLA4, PDCD1, CBLB, PTPN6, TRAC and/or TRBC gene genes. As described herein, in one embodiment, the method comprises the introduction two sets of breaks (e.g., a pair of double strand breaks, one double strand break or a pair of single strand breaks, or two pairs of single strand breaks) to flank a region in one or more T cell-expressed genes, e.g., the FAS, BID, CTLA4, PDCD1, CBLB, PTPN6, TRAC and/or TRBC gene genes (e.g., a coding region, e.g., an early coding region, or a non-coding region, e.g., a non-coding sequence of one or more T cell-expressed genes, e.g., the FAS, BID, CTLA4, PDCD1, CBLB, PTPN6, TRAC and/or TRBC gene genes, e.g., a promoter, an enhancer, an intron, a 3′UTR, and/or a polyadenylation signal). While not wishing to be bound by theory, it is believed that NHEJ-mediated repair of the break(s) allows for alteration of one or more T cell-expressed genes, e.g., the FAS, BID, CTLA4, PDCD1, CBLB, PTPN6, TRAC and/or TRBC gene genes as described herein, which reduces or eliminates expression of the gene, e.g., to knock out one or both alleles of one or more T cell-expressed genes, e.g., the FAS, BID, CTLA4, PDCD1, CBLB, PTPN6, TRAC and/or TRBC gene genes.

[0324] In an embodiment, two sets of breaks (e.g., two double strand breaks) are introduced (e.g., positioned by two gRNA molecules) at or in close proximity to a T cell target knockout position in one or more T cell-expressed genes, e.g., the FAS, BID, CTLA4, PDCD1, CBLB, PTPN6, TRAC and/or TRBC gene. In an embodiment, two gRNA molecules (e.g., with one or two Cas9 nucleases that are not Cas9 nickases) are used to create two sets of breaks to flank a T cell target knockout position, e.g., the gRNA molecules are configured such that one set of break(s) are positioned upstream and a second set of break(s) are positioned downstream of the T cell target knockout position. In an embodiment, the breaks are positioned to avoid unwanted target chromosome elements, such as repeat elements, e.g., an Alu repeat.

[0325] In an embodiment, two sets of breaks (e.g., one double strand breaks and a pair of single strand breaks) are introduced (e.g., positioned by three gRNA molecules) at or in close proximity to a T cell target knockout position in one or more T cell-expressed genes, e.g., the FAS, BID, CTLA4, PDCD1, CBLB, PTPN6, TRAC and/or TRBC gene. In an embodiment, three gRNA molecules (e.g., with a Cas9 nuclease and one or two Cas9 nickases) are used to create two sets of breaks to flank a T cell target knockout position, e.g., the gRNA molecules are configured such that one set of break(s) are positioned upstream and a second set of break(s) are positioned downstream of the T cell target knockout position. In an embodiment, the breaks are positioned to avoid unwanted target chromosome elements, such as repeat elements, e.g., an Alu repeat.

[0326] In an embodiment, two sets of breaks (e.g., two pairs of single strand breaks) are introduced (e.g., positioned by four gRNA molecules) at or in close proximity to a T cell target knockout position in one or more T cell-expressed genes, e.g., the FAS, BID, CTLA4, PDCD1, CBLB, PTPN6, TRAC and/or TRBC gene. In an embodiment, four gRNA molecules (e.g., with a Cas9 nuclease and one or two Cas9 nickases) are used to create two sets of breaks to flank a T cell target knockout position, e.g., the gRNA molecules are configured such that one set of break(s) are positioned upstream and a second set of break(s) are positioned downstream of the T cell target knockout position. In an embodiment, the breaks are positioned to avoid unwanted target chromosome elements, such as repeat elements, e.g., an Alu repeat.

[0327] In an embodiment, two or more (e.g., three or four) gRNA molecules are used with one Cas9 molecule. In another embodiment, when two ore more (e.g., three or four) gRNAs are used with two or more Cas9 molecules, at least one Cas9 molecule is from a different species than the other Cas9 molecule(s). For example, when two gRNA molecules are used with two Cas9 molecules, one Cas9 molecule can be from one species and the other Cas9 molecule can be from a different species. Both Cas9 species are used to generate a single or double-strand break, as desired.

[0328] When more than one gene is targeted for alteration in a cell, the targeted nucleic acids may be altered, e.g., cleaved, by one or more Cas9 proteins. For example, if two genes are targeted for alteration, e.g., both genes are targeted for knockout, the same or a different Cas9 protein may be used to target each gene. In one embodiment, both genes (or each gene targeted in a cell), are cleaved by a Cas9 nuclease to generate a double stranded break. In another embodiment, both genes (or each gene targeted in a cell), are cleaved by a Cas9 nuclease to generate a double stranded break. In another embodiment, one or more genes in a cell may be altered by cleavage with a Cas9 nuclease and one or more genes in the same cell may be altered by cleavage with a Cas9 nickase. When two or more Cas9 proteins are used to cut a target nucleic acid, e.g., different genes in a cell, the Cas9 proteins may be from different bacterial species. For example, one or more genes in a cell may be altered by cleavage with a Cas9 protein from one bacterial species, and one or more genes in the same cell may be altered by cleavage with a Cas9 protein from a different bacterial species. It is contemplated that when two or more Cas9 proteins from different species are used that they may be delivered at the same time or delivered sequentially to control specificity of cleavage in the desired gene at the desired position in the target nucleic acid.

[0329] In some embodiments, the targeting domain of the first gRNA molecule and the targeting domain of the second gRNA molecules are complementary to opposite strands of the target nucleic acid molecule. In some embodiments, the gRNA molecule and the second gRNA molecule are configured such that the PAMs are oriented outward.

Knocking Down One or More T Cell-Expressed Genes, e.g., the FAS, BID, CTLA4, PDCD1, CBLB, and/or PTPN6 Gene Mediated by an Enzymatically Inactive Cas9 (eiCas9) Molecule

[0330] A targeted knockdown approach reduces or eliminates expression of functional FAS, BID, CTLA4, PDCD1, CBLB, and/or PTPN6 gene product. As described herein, in an embodiment, a targeted knockdown is mediated by targeting an enzymatically inactive Cas9 (eiCas9) molecule or an eiCas9 fused to a transcription repressor domain or chromatin modifying protein to alter transcription, e.g., to block, reduce, or decrease transcription, of one or more T cell-expressed genes, e.g., the FAS, BID, CTLA4, PDCD1, CBLB, and/or PTPN6 gene.

[0331] Methods and compositions discussed herein may be used to alter the expression of one or more T cell-expressed genes, e.g., the FAS, BID, CTLA4, PDCD1, CBLB, and/or PTPN6 gene to treat or prevent HIV infection or AIDS by targeting a promoter region of one or more T cell-expressed genes, e.g., the FAS, BID, CTLA4, PDCD1, CBLB, and/or PTPN6 gene. In an embodiment, the promoter region is targeted to knock down expression of one or more T cell-expressed genes, e.g., the FAS, BID, CTLA4, PDCD1, CBLB, and/or PTPN6 gene. A targeted knockdown approach reduces or eliminates expression of functional FAS, BID, CTLA4, PDCD1, CBLB, and/or PTPN6 gene product. As described herein, in an embodiment, a targeted knockdown is mediated by targeting an enzymatically inactive Cas9 (eiCas9) or an eiCas9 fusion protein (e.g., an eiCas9 fused to a transcription repressor domain or chromatin modifying protein) to alter transcription, e.g., to block, reduce, or decrease transcription, of one or more T cell-expressed genes, e.g., the FAS, BID, CTLA4, PDCD1, CBLB, P and/or PTPN6 gene.

[0332] In an embodiment, one or more eiCas9s may be used to block binding of one or more endogenous transcription factors. In another embodiment, an eiCas9 can be fused to a chromatin modifying protein. Altering chromatin status can result in decreased expression of the target gene. One or more eiCas9s fused to one or more chromatin modifying proteins may be used to alter chromatin status.

[0333] When more than one gene is targeted for alteration in a cell, the targeted nucleic acids may be altered, e.g., by one or more eiCas9 proteins or eiCas9 fusion proteins. When two or more eiCas9 proteins or eiCas9 fusion proteins are used the eiCas9 proteins or eiCas9 fusion proteins may be from different bacterial species. For example, one or more genes in a cell may be altered with an eiCas9 protein or eiCas9 fusion protein from one bacterial species, and one or more genes in the same cell may be altered with an eiCas9 protein or eiCas9 fusion protein from a different bacterial species. It is contemplated that when two or more eiCas9 proteins or eiCas9 fusion proteins from different species are used that they may be delivered at the same time or delivered sequentially to control specificity of cleavage in the desired gene at the desired position in the target nucleic acid.

[0334] While not wishing to be bound by theory, it is considered that adoptive transfer of genetically engineered T cells may provide a potential treatment for cancer. Genes encoding cell surface receptors are inserted into the T cells. The genetically engineered T cells are able to detect tumor associated antigens, which can be used to discriminate tumor cells from most normal tissues.

[0335] Knockout or knockdown of one or two alleles of the target gene (e.g., FAS, BID, CTLA4, PDCD1, CBLB, PTPN6, TRAC or TRBC gene) may be performed after disease onset, but preferably early in the disease course.

I. gRNA Molecules

[0336] A gRNA molecule, as that term is used herein, refers to a nucleic acid that promotes the specific targeting or homing of a gRNA molecule/Cas9 molecule complex to a target nucleic acid. gRNA molecules can be unimolecular (having a single RNA molecule), sometimes referred to herein as “chimeric” gRNAs, or modular (comprising more than one, and typically two, separate RNA molecules). A gRNA molecule comprises a number of domains. The gRNA molecule domains are described in more detail below.

[0337] Several exemplary gRNA structures, with domains indicated thereon, are provided in FIG. 1. While not wishing to be bound by theory, with regard to the three dimensional form, or intra- or interstrand interactions of an active form of a gRNA, regions of high complementarity are sometimes shown as duplexes in FIG. 1 and other depictions provided herein.

[0338] In an embodiment, a unimolecular, or chimeric, gRNA comprises, preferably from 5′ to 3′: a targeting domain (which is complementary to a target nucleic acid in the FAS, BID, CTLA4, PDCD1, CBLB, PTPN6, TRAC or TRBC gene, e.g., a targeting domain from any of Tables 1A-I, Tables 2A-I, Tables 3A-H, Tables 4A-I, Tables 5A-I, Tables 6A-I, Tables 7A-H, Tables 8A-H, Tables 9A-I, Tables 10A-I, Tables 11A-I, Tables 12A-I, Tables 13A-K, Tables 14A-K, Tables 15A-F, Tables 16A-K, Tables 17A-K, Tables 18A-K, Tables 19A-J, Tables 20A-J, Tables 21A-K, Tables 22A-K, Tables 23A-J, Tables 24A-K, Tables 25A-G, Tables 26A-G, Table 27, Table 29, Table 31, or Table 32;
[0339] a first complementarity domain;
[0340] a linking domain;
[0341] a second complementarity domain (which is complementary to the first complementarity domain);
[0342] a proximal domain; and optionally, a tail domain.

[0343] In an embodiment, a modular gRNA comprises:
[0344] a first strand comprising, preferably from 5′ to 3′;
   [0345] a targeting domain (which is complementary to a target nucleic acid in the FAS, BID, CTLA4, PDCD1, CBLB, PTPN6, TRAC or TRBC gene, e.g., a targeting domain from Tables 1A-I, Tables 2A-I, Tables 3A-H, Tables 4A-I, Tables 5A-I, Tables 6A-I, Tables 7A-H, Tables 8A-H, Tables 9A-I, Tables 10A-I, Tables 11A-I, Tables 12A-I, Tables 13A-K, Tables 14A-K, Tables 15A-F, Tables 16A-K, Tables 17A-K, Tables 18A-K, Tables 19A-J, Tables 20A-J, Tables 21A-K, Tables 22A-K, Tables 23A-J, Tables 24A-K, Tables 25A-G, Tables 26A-G, Table 27, Table 29, Table 31, or Table 32; and
   [0346] a first complementarity domain; and
[0347] a second strand, comprising, preferably from 5′ to 3′:
   [0348] optionally, a 5′ extension domain;
   [0349] a second complementarity domain;
   [0350] a proximal domain; and optionally, a tail domain.

[0351] The domains are discussed briefly below:

[0352] The Targeting Domain

[0353] FIG. 1 provides examples of the placement of targeting domains.

[0354] The targeting domain comprises a nucleotide sequence that is complementary, e.g., at least 80, 85, 90, 95, 98 or 99% complementary, e.g., fully complementary, to the target sequence on the target nucleic acid. The targeting domain is part of an RNA molecule and will therefore comprise the base uracil (U), while any DNA encoding the gRNA molecule will comprise the base thymine (T). While not wishing to be bound by theory, in an embodiment, it is believed that the complementarity of the targeting domain with the target sequence contributes to specificity of the interaction of the gRNA molecule/Cas9 molecule complex with a target nucleic acid. It is understood that in a targeting domain and target sequence pair, the uracil bases in the targeting domain will pair with the adenine bases in the target sequence. In an embodiment, the target domain itself comprises in the 5′ to 3′ direction, an optional secondary domain, and a core domain. In an embodiment, the core domain is fully complementary with the target sequence. In an embodiment, the targeting domain is 5 to 50 nucleotides in length. The strand of the target nucleic acid with which the targeting domain is complementary is referred to herein as the complementary strand. Some or all of the nucleotides of the domain can have a modification, e.g., modification found in Section VIII herein.

In an embodiment, the targeting domain is 16 nucleotides in length.

[0355] In an embodiment, the targeting domain is 17 nucleotides in length.

[0356] In an embodiment, the targeting domain is 18 nucleotides in length.

[0357] In an embodiment, the targeting domain is 19 nucleotides in length.

[0358] In an embodiment, the targeting domain is 20 nucleotides in length.

[0359] In an embodiment, the targeting domain is 21 nucleotides in length.

[0360] In an embodiment, the targeting domain is 22 nucleotides in length.

[0361] In an embodiment, the targeting domain is 23 nucleotides in length.

[0362] In an embodiment, the targeting domain is 24 nucleotides in length.

[0363] In an embodiment, the targeting domain is 25 nucleotides in length.

[0364] In an embodiment, the targeting domain is 26 nucleotides in length.

[0365] In an embodiment, the targeting domain comprises 16 nucleotides.

[0366] In an embodiment, the targeting domain comprises 17 nucleotides.

[0367] In an embodiment, the targeting domain comprises 18 nucleotides.

[0368] In an embodiment, the targeting domain comprises 19 nucleotides.

[0369] In an embodiment, the targeting domain comprises 20 nucleotides.

[0370] In an embodiment, the targeting domain comprises 21 nucleotides.

[0371] In an embodiment, the targeting domain comprises 22 nucleotides.

[0372] In an embodiment, the targeting domain comprises 23 nucleotides.

[0373] In an embodiment, the targeting domain comprises 24 nucleotides.

[0374] In an embodiment, the targeting domain comprises 25 nucleotides.

[0375] In an embodiment, the targeting domain comprises 26 nucleotides.

[0376] Targeting domains are discussed in more detail below.

[0377] The First Complementarity Domain

[0378] FIGS. 1A-1G provide examples of first complementarity domains.

[0379] The first complementarity domain is complementary with the second complementarity domain, and in an embodiment, has sufficient complementarity to the second complementarity domain to form a duplexed region under at least some physiological conditions. In an embodiment, the first complementarity domain is 5 to 30 nucleotides in length. In an embodiment, the first complementarity domain is 5 to 25 nucleotides in length. In an embodiment, the first complementary domain is 7 to 25 nucleotides in length. In an embodiment, the first complementary domain is 7 to 22 nucleotides in length. In an embodiment, the first complementary domain is 7 to 18 nucleotides in length. In an embodiment, the first complementary domain is 7 to 15 nucleotides in length. In an embodiment, the first complementary domain is 5, 6, 7, 8, 9, 10, 11, 12, 13, 14, 15, 16, 17, 18, 19, 20, 21, 22, 23, 24, or 25 nucleotides in length.

[0380] In an embodiment, the first complementarity domain comprises 3 subdomains, which, in the 5′ to 3′ direction are: a 5′ subdomain, a central subdomain, and a 3′ subdomain. In an embodiment, the 5′ subdomain is 4-9, e.g., 4, 5, 6, 7, 8 or 9 nucleotides in length. In an embodiment, the central subdomain is 1, 2, or 3, e.g., 1, nucleotide in length. In an embodiment, the 3′ subdomain is 3 to 25, e.g., 4-22, 4-18, or 4 to 10, or 3, 4, 5, 6, 7, 8, 9, 10, 11, 12, 13, 14, 15, 16, 17, 18, 19, 20, 21, 22, 23, 24, or 25, nucleotides in length.

[0381] The first complementarity domain can share homology with, or be derived from, a naturally occurring first complementarity domain. In an embodiment, it has at least 50% homology with a first complementarity domain disclosed herein, e.g., an S. pyogenes, S. aureus, N. meningtidis, or S. thermophilus, first complementarity domain.

[0382] Some or all of the nucleotides of the first complementarity domain can have a modification, e.g., a modification found in Section VIII herein.

[0383] First complementarity domains are discussed in more detail below.

[0384] The Linking Domain

[0385] FIGS. 1A-1G provide examples of linking domains.

[0386] A linking domain serves to link the first complementarity domain with the second complementarity domain of a unimolecular gRNA. The linking domain can link the first and second complementarity domains covalently or non-covalently. In an embodiment, the linkage is covalent. In an embodiment, the linking domain covalently couples the first and second complementarity domains, see, e.g., FIGS. 1B-1E. In an embodiment, the linking domain is, or comprises, a covalent bond interposed between the first complementarity domain and the second complementarity domain. Typically the linking domain comprises one or more, e.g., 2, 3, 4, 5, 6, 7, 8, 9, or 10 nucleotides.

[0387] In modular gRNA molecules the two molecules are associated by virtue of the hybridization of the complementarity domains see e.g., FIG. 1A.

[0388] A wide variety of linking domains are suitable for use in unimolecular gRNA molecules. Linking domains can consist of a covalent bond, or be as short as one or a few nucleotides, e.g., 1, 2, 3, 4, or 5 nucleotides in length. In an embodiment, a linking domain is 2, 3, 4, 5, 6, 7, 8, 9, 10, 15, 20, or 25 or more nucleotides in length. In an embodiment, a linking domain is 2 to 50, 2 to 40, 2 to 30, 2 to 20, 2 to 10, or 2 to 5 nucleotides in length. In an embodiment, a linking domain shares homology with, or is derived from, a naturally occurring sequence, e.g., the sequence of a tracrRNA that is 5′ to the second complementarity domain. In an embodiment, the linking domain has at least 50% homology with a linking domain disclosed herein.

[0389] Some or all of the nucleotides of the linking domain can have a modification, e.g., a modification found in Section VIII herein.

[0390] Linking domains are discussed in more detail below.

[0391] The 5′ Extension Domain

[0392] In an embodiment, a modular gRNA can comprise additional sequence, 5′ to the second complementarity domain, referred to herein as the 5′ extension domain, see, e.g., FIG. 1A. In an embodiment, the 5′ extension domain is, 2-10, 2-9, 2-8, 2-7, 2-6, 2-5, or 2-4 nucleotides in length. In an embodiment, the 5′ extension domain is 2, 3, 4, 5, 6, 7, 8, 9, or 10 or more nucleotides in length.

[0393] The Second Complementarity Domain

[0394] FIGS. 1A-1G provide examples of second complementarity domains.

[0395] The second complementarity domain is complementary with the first complementarity domain, and in an embodiment, has sufficient complementarity to the second complementarity domain to form a duplexed region under at least some physiological conditions. In an embodiment, e.g., as shown in FIGS. 1A-1B, the second complementarity domain can include sequence that lacks complementarity with the first complementarity domain, e.g., sequence that loops out from the duplexed region.

[0396] In an embodiment, the second complementarity domain is 5 to 27 nucleotides in length. In an embodiment, it is longer than the first complementarity region. In an embodiment the second complementary domain is 7 to 27 nucleotides in length. In an embodiment, the second complementary domain is 7 to 25 nucleotides in length. In an embodiment, the second complementary domain is 7 to 20 nucleotides in length. In an embodiment, the second complementary domain is 7 to 17 nucleotides in length. In an embodiment, the complementary domain is 5, 6, 7, 8, 9, 10, 11, 12, 13, 14, 15, 16, 17, 18, 19, 20, 21, 22, 23, 24, 25, or 26 nucleotides in length.

[0397] In an embodiment, the second complementarity domain comprises 3 subdomains, which, in the 5′ to 3′ direction are: a 5′ subdomain, a central subdomain, and a 3′ subdomain. In an embodiment, the 5′ subdomain is 3 to 25, e.g., 4 to 22, 4 to 18, or 4 to 10, or 3, 4, 5, 6, 7, 8, 9, 10, 11, 12, 13, 14, 15, 16, 17, 18, 19, 20, 21, 22, 23, 24, or 25 nucleotides in length. In an embodiment, the central subdomain is 1, 2, 3, 4 or 5, e.g., 3, nucleotides in length. In an embodiment, the 3′ subdomain is 4 to 9, e.g., 4, 5, 6, 7, 8 or 9 nucleotides in length.

[0398] In an embodiment, the 5′ subdomain and the 3′ subdomain of the first complementarity domain, are respectively, complementary, e.g., fully complementary, with the 3′ subdomain and the 5′ subdomain of the second complementarity domain.

[0399] The second complementarity domain can share homology with or be derived from a naturally occurring second complementarity domain. In an embodiment, it has at least 50% homology with a second complementarity domain disclosed herein, e.g., an S. pyogenes, S. aureus, N. meningtidis, or S. thermophilus, first complementarity domain.

[0400] Some or all of the nucleotides of the second complementarity domain can have a modification, e.g., a modification found in Section VIII herein.

[0401] A Proximal Domain

[0402] FIGS. 1A-1G provide examples of proximal domains.

[0403] In an embodiment, the proximal domain is 5 to 20 nucleotides in length. In an embodiment, the proximal domain can share homology with or be derived from a naturally occurring proximal domain. In an embodiment, it has at least 50% homology with a proximal domain disclosed herein, e.g., an S. pyogenes, S. aureus, N. meningtidis, or S. thermophilus, proximal domain.

[0404] Some or all of the nucleotides of the proximal domain can have a modification, e.g., a modification found in Section VIII herein.

[0405] A Tail Domain

[0406] FIGS. 1A-1G provide examples of tail domains.

[0407] As can be seen by inspection of the tail domains in FIG. 1A and FIGS. 1B-1F, a broad spectrum of tail domains are suitable for use in gRNA molecules. In an embodiment, the tail domain is 0 (absent), 1, 2, 3, 4, 5, 6, 7, 8, 9, or 10 nucleotides in length. In embodiment, the tail domain nucleotides are from or share homology with sequence from the 5′ end of a naturally occurring tail domain, see e.g., FIG. 1D or 1E. In an embodiment, the tail domain includes sequences that are complementary to each other and which, under at least some physiological conditions, form a duplexed region.

[0408] In an embodiment, the tail domain is absent or is 1 to 50 nucleotides in length. In an embodiment, the tail domain can share homology with or be derived from a naturally occurring proximal tail domain. In an embodiment, it has at least 50% homology with a tail domain disclosed herein, e.g., an S. pyogenes, S. aureus, N. meningtidis, or S. thermophilus, tail domain.

[0409] In an embodiment, the tail domain includes nucleotides at the 3′ end that are related to the method of in vitro or in vivo transcription. When a T7 promoter is used for in vitro transcription of the gRNA, these nucleotides may be any nucleotides present before the 3′ end of the DNA template. When a U6 promoter is used for in vivo transcription, these nucleotides may be the sequence UUUUUU. When alternate pol-III promoters are used, these nucleotides may be various numbers or uracil bases or may include alternate bases.

[0410] The domains of gRNA molecules are described in more detail below.

[0411] The Targeting Domain

[0412] The “targeting domain” of the gRNA is complementary to the “target domain” on the target nucleic acid. The strand of the target nucleic acid comprising the core domain target is referred to herein as the “complementary strand” of the target nucleic acid. Guidance on the selection of targeting domains can be found, e.g., in Fu Y et al., Nat Biotechnol 2014 (doi: 10.1038/nbt.2808) and Sternberg S H et al., Nature 2014 (doi: 10.1038/nature13 011).

[0413] In an embodiment, the targeting domain is 16, 17, 18, 19, 20, 21, 22, 23, 24, 25 or 26 nucleotides in length.

[0414] In an embodiment, the targeting domain is 16 nucleotides in length.

[0415] In an embodiment, the targeting domain is 17 nucleotides in length.

[0416] In an embodiment, the targeting domain is 18 nucleotides in length.

[0417] In an embodiment, the targeting domain is 19 nucleotides in length.

[0418] In an embodiment, the targeting domain is 20 nucleotides in length.

[0419] In an embodiment, the targeting domain is 21 nucleotides in length.

[0420] In an embodiment, the targeting domain is 22 nucleotides in length.

[0421] In an embodiment, the targeting domain is 23 nucleotides in length.

[0422] In an embodiment, the targeting domain is 24 nucleotides in length.

[0423] In an embodiment, the targeting domain is 25 nucleotides in length.

[0424] In an embodiment, the targeting domain is 26 nucleotides in length.

[0425] In an embodiment, the targeting domain comprises 16 nucleotides.

[0426] In an embodiment, the targeting domain comprises 17 nucleotides.

[0427] In an embodiment, the targeting domain comprises 18 nucleotides.

[0428] In an embodiment, the targeting domain comprises 19 nucleotides.

[0429] In an embodiment, the targeting domain comprises 20 nucleotides.

[0430] In an embodiment, the targeting domain comprises 21 nucleotides.

[0431] In an embodiment, the targeting domain comprises 22 nucleotides.

[0432] In an embodiment, the targeting domain comprises 23 nucleotides.

[0433] In an embodiment, the targeting domain comprises 24 nucleotides.

[0434] In an embodiment, the targeting domain comprises 25 nucleotides.

[0435] In an embodiment, the targeting domain comprises 26 nucleotides. In an embodiment, the targeting domain is 10+/−5, 20+/−5, 30+/−5, 40+/−5, 50+/−5, 60+/−5, 70+/−5, 80+/−5, 90+/−5, or 100+/−5 nucleotides, in length.

[0436] In an embodiment, the targeting domain is 20+/−5 nucleotides in length.

[0437] In an embodiment, the targeting domain is 20+/−10, 30+/−10, 40+/−10, 50+/−10, 60+/−10, 70+/−10, 80+/−10, 90+/−10, or 100+/−10 nucleotides, in length.

[0438] In an embodiment, the targeting domain is 30+/−10 nucleotides in length.

[0439] In an embodiment, the targeting domain is 10 to 100, 10 to 90, 10 to 80, 10 to 70, 10 to 60, 10 to 50, 10 to 40, 10 to 30, 10 to 20 or 10 to 15 nucleotides in length.

[0440] In other embodiments, the targeting domain is 20 to 100, 20 to 90, 20 to 80, 20 to 70, 20 to 60, 20 to 50, 20 to 40, 20 to 30, or 20 to 25 nucleotides in length.

[0441] Typically the targeting domain has full complementarity with the target sequence. In some embodiments the targeting domain has or includes 1, 2, 3, 4, 5, 6, 7 or 8 nucleotides that are not complementary with the corresponding nucleotide of the targeting domain.

[0442] In an embodiment, the target domain includes 1, 2, 3, 4 or 5 nucleotides that are complementary with the corresponding nucleotide of the targeting domain within 5 nucleotides of its 5′ end. In an embodiment, the target domain includes 1, 2, 3, 4 or 5 nucleotides that are complementary with the corresponding nucleotide of the targeting domain within 5 nucleotides of its 3′ end.

[0443] In an embodiment, the target domain includes 1, 2, 3, or 4 nucleotides that are not complementary with the corresponding nucleotide of the targeting domain within 5 nucleotides of its 5′ end. In an embodiment, the target domain includes 1, 2, 3, or 4 nucleotides that are not complementary with the corresponding nucleotide of the targeting domain within 5 nucleotides of its 3′ end.

[0444] In an embodiment, the degree of complementarity, together with other properties of the gRNA, is sufficient to allow targeting of a Cas9 molecule to the target nucleic acid.

[0445] In some embodiments, the targeting domain comprises two consecutive nucleotides that are not complementary to the target domain (“non-complementary nucleotides”), e.g., two consecutive noncomplementary nucleotides that are within 5 nucleotides of the 5′ end of the targeting domain, within 5 nucleotides of the 3′ end of the targeting domain, or more than 5 nucleotides away from one or both ends of the targeting domain.

[0446] In an embodiment, no two consecutive nucleotides within 5 nucleotides of the 5′ end of the targeting domain, within 5 nucleotides of the 3′ end of the targeting domain, or within a region that is more than 5 nucleotides away from one or both ends of the targeting domain, are not complementary to the targeting domain.

[0447] In an embodiment, there are no noncomplementary nucleotides within 5 nucleotides of the 5′ end of the targeting domain, within 5 nucleotides of the 3′ end of the targeting domain, or within a region that is more than 5 nucleotides away from one or both ends of the targeting domain.

[0448] In an embodiment, the targeting domain nucleotides do not comprise modifications, e.g., modifications of the type provided in Section VIII. However, in an embodiment, the targeting domain comprises one or more modifications, e.g., modifications that render it less susceptible to degradation or more bio-compatible, e.g., less immunogenic. By way of example, the backbone of the targeting domain can be modified with a phosphorothioate, or other modification(s) from Section VIII. In an embodiment, a nucleotide of the targeting domain can comprise a 2′ modification, e.g., a 2-acetylation, e.g., a 2′ methylation, or other modification(s) from Section VIII.

[0449] In some embodiments, the targeting domain includes 1, 2, 3, 4, 5, 6, 7 or 8 or more modifications. In an embodiment, the targeting domain includes 1, 2, 3, or 4 modifications within 5 nucleotides of its 5′ end. In an embodiment, the targeting domain comprises as many as 1, 2, 3, or 4 modifications within 5 nucleotides of its 3′ end.

[0450] In some embodiments, the targeting domain comprises modifications at two consecutive nucleotides, e.g., two consecutive nucleotides that are within 5 nucleotides of the 5′ end of the targeting domain, within 5 nucleotides of the 3′ end of the targeting domain, or more than 5 nucleotides away from one or both ends of the targeting domain.

[0451] In an embodiment, no two consecutive nucleotides are modified within 5 nucleotides of the 5′ end of the targeting domain, within 5 nucleotides of the 3′ end of the targeting domain, or within a region that is more than 5 nucleotides away from one or both ends of the targeting domain. In an embodiment, no nucleotide is modified within 5 nucleotides of the 5′ end of the targeting domain, within 5 nucleotides of the 3′ end of the targeting domain, or within a region that is more than 5 nucleotides away from one or both ends of the targeting domain.

[0452] Modifications in the targeting domain can be selected to not interfere with targeting efficacy, which can be evaluated by testing a candidate modification in the system described in Section IV. gRNAs having a candidate targeting domain having a selected length, sequence, degree of complementarity, or degree of modification, can be evaluated in a system in Section IV. The candidate targeting domain can be placed, either alone, or with one or more other candidate changes in a gRNA molecule/Cas9 molecule system known to be functional with a selected target and evaluated.

[0453] In some embodiments, all of the modified nucleotides are complementary to and capable of hybridizing to corresponding nucleotides present in the target domain. In other embodiments, 1, 2, 3, 4, 5, 6, 7 or 8 or more modified nucleotides are not complementary to or capable of hybridizing to corresponding nucleotides present in the target domain.

[0454] In an embodiment, the targeting domain comprises, preferably in the 5′-3′ direction: a secondary domain and a core domain. These domains are discussed in more detail below.

[0455] The Core Domain and Secondary Domain of the Targeting Domain

[0456] The “core domain” of the targeting domain is complementary to the “core domain target” on the target nucleic acid. In an embodiment, the core domain comprises about 8 to about 13 nucleotides from the 3′ end of the targeting domain (e.g., the most 3′ 8 to 13 nucleotides of the targeting domain).

[0457] In an embodiment, the secondary domain is absent or optional.

[0458] In an embodiment, the core domain and targeting domain are independently 6+/−2, 7+/−2, 8+/−2, 9+/−2, 10+/−2, 11+/−2, 12+/−2, 13+/−2, 14+/−2, 15+/−2, or 16+−2 nucleotides in length.

[0459] In an embodiment, the core domain and targeting domain are independently 10+/−2 nucleotides in length.

[0460] In an embodiment, the core domain and targeting domain are independently 10+/−4 nucleotides in length.

[0461] In an embodiment, the core domain and targeting domain are independently 6, 7, 8, 9, 10, 11, 12, 13, 14, 15 or 16 nucleotides in length.

[0462] In an embodiment, the core and targeting domain are independently 3 to 20, 4 to 20, 5 to 20, 6 to 20, 7 to 20, 8 to 20, 9 to 20 10 to 20 or 15 to 20 nucleotides in length.

[0463] In an embodiment, the core and targeting domain, are independently 3 to 15, e.g., 6 to 15, 7 to 14, 7 to 13, 6 to 12, 7 to 12, 7 to 11, 7 to 10, 8 to 14, 8 to 13, 8 to 12, 8 to 11, 8 to 10 or 8 to 9 nucleotides in length.

[0464] The core domain is complementary with the core domain target. Typically the core domain has exact complementarity with the core domain target. In some embodiments, the core domain can have 1, 2, 3, 4 or 5 nucleotides that are not complementary with the corresponding nucleotide of the core domain. In an embodiment, the degree of complementarity, together with other properties of the gRNA, is sufficient to allow targeting of a Cas9 molecule to the target nucleic acid.

[0465] The “secondary domain” of the targeting domain of the gRNA is complementary to the “secondary domain target” of the target nucleic acid.

[0466] In an embodiment, the secondary domain is positioned 5′ to the core domain.

[0467] In an embodiment, the secondary domain is absent or optional.

[0468] In an embodiment, if the targeting domain is 26 nucleotides in length and the core domain (counted from the 3′ end of the targeting domain) is 8 to 13 nucleotides in length, the secondary domain is 12 to 17 nucleotides in length.

[0469] In an embodiment, if the targeting domain is 25 nucleotides in length and the core domain (counted from the 3′ end of the targeting domain) is 8 to 13 nucleotides in length, the secondary domain is 12 to 17 nucleotides in length.

[0470] In an embodiment, if the targeting domain is 24 nucleotides in length and the core domain (counted from the 3′ end of the targeting domain) is 8 to 13 nucleotides in length, the secondary domain is 11 to 16 nucleotides in length.

[0471] In an embodiment, if the targeting domain is 23 nucleotides in length and the core domain (counted from the 3′ end of the targeting domain) is 8 to 13 nucleotides in length, the secondary domain is 10 to 15 nucleotides in length.

[0472] In an embodiment, if the targeting domain is 22 nucleotides in length and the core domain (counted from the 3′ end of the targeting domain) is 8 to 13 nucleotides in length, the secondary domain is 9 to 14 nucleotides in length.

[0473] In an embodiment, if the targeting domain is 21 nucleotides in length and the core domain (counted from the 3′ end of the targeting domain) is 8 to 13 nucleotides in length, the secondary domain is 8 to 13 nucleotides in length.

[0474] In an embodiment, if the targeting domain is 20 nucleotides in length and the core domain (counted from the 3′ end of the targeting domain) is 8 to 13 nucleotides in length, the secondary domain is 7 to 12 nucleotides in length.

[0475] In an embodiment, if the targeting domain is 19 nucleotides in length and the core domain (counted from the 3′ end of the targeting domain) is 8 to 13 nucleotides in length, the secondary domain is 6 to 11 nucleotides in length.

[0476] In an embodiment, if the targeting domain is 18 nucleotides in length and the core domain (counted from the 3′ end of the targeting domain) is 8 to 13 nucleotides in length, the secondary domain is 5 to 10 nucleotides in length.

[0477] In an embodiment, if the targeting domain is 17 nucleotides in length and the core domain (counted from the 3′ end of the targeting domain) is 8 to 13 nucleotides in length, the secondary domain is 4 to 9 nucleotides in length.

[0478] In an embodiment, if the targeting domain is 16 nucleotides in length and the core domain (counted from the 3′ end of the targeting domain) is 8 to 13 nucleotides in length, the secondary domain is 3 to 8 nucleotides in length.

[0479] In an embodiment, the secondary domain is 0, 1, 2, 3, 4, 5, 6, 7, 8, 9, 10, 11, 12, 13, 14 or 15 nucleotides in length.

[0480] The secondary domain is complementary with the secondary domain target. Typically the secondary domain has exact complementarity with the secondary domain target. In some embodiments the secondary domain can have 1, 2, 3, 4 or 5 nucleotides that are not complementary with the corresponding nucleotide of the secondary domain. In an embodiment, the degree of complementarity, together with other properties of the gRNA, is sufficient to allow targeting of a Cas9 molecule to the target nucleic acid.

[0481] In an embodiment, the core domain nucleotides do not comprise modifications, e.g., modifications of the type provided in Section VIII. However, in an embodiment, the core domain comprises one or more modifications, e.g., modifications that render it less susceptible to degradation or more bio-compatible, e.g., less immunogenic. By way of example, the backbone of the core domain can be modified with a phosphorothioate, or other modification(s) from Section VIII. In an embodiment a nucleotide of the core domain can comprise a 2′ modification (e.g., a modification at the 2′ position on ribose), e.g., a 2-acetylation, e.g., a 2′ methylation, or other modification(s) from Section VIII. Typically, a core domain will contain no more than 1, 2, or 3 modifications.

[0482] Modifications in the core domain can be selected to not interfere with targeting efficacy, which can be evaluated by testing a candidate modification in the system described in Section IV. gRNAs having a candidate core domain having a selected length, sequence, degree of complementarity, or degree of modification, can be evaluated in the system described at Section IV. The candidate core domain can be placed, either alone, or with one or more other candidate changes in a gRNA molecule/Cas9 molecule system known to be functional with a selected target and evaluated.

[0483] In an embodiment, the secondary domain nucleotides do not comprise modifications, e.g., modifications of the type provided in Section VIII. However, in an embodiment, the secondary domain comprises one or more modifications, e.g., modifications that render it less susceptible to degradation or more bio-compatible, e.g., less immunogenic. By way of example, the backbone of the secondary domain can be modified with a phosphorothioate, or other modification(s) from Section VIII. In an embodiment a nucleotide of the secondary domain can comprise a 2′ modification, e.g., a 2-acetylation, e.g., a 2′ methylation, or other modification(s) from Section VIII. Typically, a secondary domain will contain no more than 1, 2, or 3 modifications.

[0484] Modifications in the secondary domain can be selected to not interfere with targeting efficacy, which can be evaluated by testing a candidate modification in the system described in Section IV. gRNAs having a candidate secondary domain having a selected length, sequence, degree of complementarity, or degree of modification, can be evaluated in the system described at Section IV. The candidate secondary domain can be placed, either alone, or with one or more other candidate changes in a gRNA molecule/Cas9 molecule system known to be functional with a selected target and evaluated.

[0485] In an embodiment, (1) the degree of complementarity between the core domain and its target, and (2) the degree of complementarity between the secondary domain and its target, may differ. In an embodiment, (1) may be greater than (2). In an embodiment, (1) may be less than (2). In an embodiment, (1) and (2) are the same, e.g., each may be completely complementary with its target.

[0486] In an embodiment, (1) the number of modifications (e.g., modifications from Section VIII) of the nucleotides of the core domain and (2) the number of modification (e.g., modifications from Section VIII) of the nucleotides of the secondary domain, may differ. In an embodiment, (1) may be less than (2). In an embodiment, (1) may be greater than (2). In an embodiment, (1) and (2) may be the same, e.g., each may be free of modifications.

[0487] The First and Second Complementarity Domains

[0488] The first complementarity domain is complementary with the second complementarity domain.

[0489] Typically the first complementarity domain does not have exact complementarity with the second complementarity domain target. In some embodiments, the first complementarity domain can have 1, 2, 3, 4 or 5 nucleotides that are not complementary with the corresponding nucleotide of the second complementarity domain. In an embodiment, 1, 2, 3, 4, 5 or 6, e.g., 3 nucleotides, will not pair in the duplex, and, e.g., form a non-duplexed or looped-out region. In an embodiment, an unpaired, or loop-out, region, e.g., a loop-out of 3 nucleotides, is present on the second complementarity domain. In an embodiment, the unpaired region begins 1, 2, 3, 4, 5, or 6, e.g., 4, nucleotides from the 5′ end of the second complementarity domain.

[0490] In an embodiment, the degree of complementarity, together with other properties of the gRNA, is sufficient to allow targeting of a Cas9 molecule to the target nucleic acid.

[0491] In an embodiment, the first and second complementarity domains are:

[0492] independently, 6+/−2, 7+/−2, 8+/−2, 9+/−2, 10+/−2, 11+/−2, 12+/−2, 13+/−2, 14+/−2, 15+/−2, 16+/−2, 17+/−2, 18+/−2, 19+/−2, or 20+/−2, 21+/−2, 22+/−2, 23+/−2, or 24+/−2 nucleotides in length;

[0493] independently, 6, 7, 8, 9, 10, 11, 12, 13, 14, 14, 16, 17, 18, 19, 20, 21, 22, 23, 24, 25, or 26, nucleotides in length; or

[0494] independently, 5 to 24, 5 to 23, 5 to 22, 5 to 21, 5 to 20, 7 to 18, 9 to 16, or 10 to 14 nucleotides in length.

[0495] In an embodiment, the second complementarity domain is longer than the first complementarity domain, e.g., 2, 3, 4, 5, or 6, e.g., 6, nucleotides longer.

[0496] In an embodiment, the first and second complementary domains, independently, do not comprise modifications, e.g., modifications of the type provided in Section VIII.

[0497] In an embodiment, the first and second complementary domains, independently, comprise one or more modifications, e.g., modifications that the render the domain less susceptible to degradation or more bio-compatible, e.g., less immunogenic. By way of example, the backbone of the domain can be modified with a phosphorothioate, or other modification(s) from Section VIII. In an embodiment a nucleotide of the domain can comprise a 2′ modification, e.g., a 2-acetylation, e.g., a 2′ methylation, or other modification(s) from Section VIII.

[0498] In an embodiment, the first and second complementary domains, independently, include 1, 2, 3, 4, 5, 6, 7 or 8 or more modifications. In an embodiment, the first and second complementary domains, independently, include 1, 2, 3, or 4 modifications within 5 nucleotides of its 5′ end. In an embodiment, the first and second complementary domains, independently, include as many as 1, 2, 3, or 4 modifications within 5 nucleotides of its 3′ end.

[0499] In an embodiment, the first and second complementary domains, independently, include modifications at two consecutive nucleotides, e.g., two consecutive nucleotides that are within 5 nucleotides of the 5′ end of the domain, within 5 nucleotides of the 3′ end of the domain, or more than 5 nucleotides away from one or both ends of the domain. In an embodiment, the first and second complementary domains, independently, include no two consecutive nucleotides that are modified, within 5 nucleotides of the 5′ end of the domain, within 5 nucleotides of the 3′ end of the domain, or within a region that is more than 5 nucleotides away from one or both ends of the domain. In an embodiment, the first and second complementary domains, independently, include no nucleotide that is modified within 5 nucleotides of the 5′ end of the domain, within 5 nucleotides of the 3′ end of the domain, or within a region that is more than 5 nucleotides away from one or both ends of the domain.

[0500] Modifications in a complementarity domain can be selected to not interfere with targeting efficacy, which can be evaluated by testing a candidate modification in the system described in Section IV. gRNAs having a candidate complementarity domain having a selected length, sequence, degree of complementarity, or degree of modification, can be evaluated in the system described in Section IV. The candidate complementarity domain can be placed, either alone, or with one or more other candidate changes in a gRNA molecule/Cas9 molecule system known to be functional with a selected target and evaluated.

[0501] In an embodiment, the first complementarity domain has at least 60, 70, 80, 85%, 90% or 95% homology with, or differs by no more than 1, 2, 3, 4, 5, or 6 nucleotides from, a reference first complementarity domain, e.g., a naturally occurring, e.g., an S. pyogenes, S. aureus, N. meningtidis, or S. thermophilus, first complementarity domain, or a first complementarity domain described herein, e.g., from FIGS. 1A-1G.

[0502] In an embodiment, the second complementarity domain has at least 60, 70, 80, 85%, 90%, or 95% homology with, or differs by no more than 1, 2, 3, 4, 5, or 6 nucleotides from, a reference second complementarity domain, e.g., a naturally occurring, e.g., an S. pyogenes, S. aureus, N. meningtidis, or S. thermophilus, second complementarity domain, or a second complementarity domain described herein, e.g., from FIGS. 1A-1G.

[0503] The duplexed region formed by first and second complementarity domains is typically 6, 7, 8, 9, 10, 11, 12, 13, 14, 15, 16, 17, 18, 19, 20, 21 or 22 base pairs in length (excluding any looped out or unpaired nucleotides).

[0504] In some embodiments, the first and second complementarity domains, when duplexed, comprise 11 paired nucleotides, for example, in the gRNA sequence (one paired strand underlined, one bolded):

(SEQ ID NO: 5)

NNNNNNNNNNNNNNNNNNNNGUUUUAGAGCUAGAAAUAGCAAGUUAAAAU
AAGGCUAGUCCGUUAUCAACUUGAAAAAGUGGCACCGAGUCGGUGC.

[0505] In some embodiments the first and second complementarity domains, when duplexed, comprise 15 paired nucleotides, for example in the gRNA sequence (one paired strand underlined, one bolded):

(SEQ ID NO: 27)

NNNNNNNNNNNNNNNNNNNNGUUUUAGAGCUAUGCUGAAAAGCAUAGCAA
GUUAAAAUAAGGCUAGUCCGUUAUCAACUUGAAAAAGUGGCACCGAGUCG
GUGC.

[0506] In some embodiments the first and second complementarity domains, when duplexed, comprise 16 paired nucleotides, for example in the gRNA sequence (one paired strand underlined, one bolded):

(SEQ ID NO: 28)

NNNNNNNNNNNNNNNNNNNNGUUUUAGAGCUAUGCUGGAAACAGCAUAGC
AAGUUAAAAUAAGGCUAGUCCGUUAUCAACUUGAAAAAGUGGCACCGAGU
CGGUGC.

[0507] In some embodiments the first and second complementarity domains, when duplexed, comprise 21 paired nucleotides, for example in the gRNA sequence (one paired strand underlined, one bolded):

(SEQ ID NO: 29)

NNNNNNNNNNNNNNNNNNNNGUUUUAGAGCUAUGCUGUUUUGGAAACAAA
ACAGCAUAGCAAGUUAAAAUAAGGCUAGUCCGUUAUCAACUUGAAAAAGU
GGCACCGAGUCGGUGC.

[0508] In some embodiments, nucleotides are exchanged to remove poly-U tracts, for example in the gRNA sequences (exchanged nucleotides underlined):

(SEQ ID NO: 30)

NNNNNNNNNNNNNNNNNNNNGUAUUAGAGCUAGAAAUAGCAAGUUAAUAU
AAGGCUAGUCCGUUAUCAACUUGAAAAAGUGGCACCGAGUCGGUGC;

(SEQ ID NO: 31)

NNNNNNNNNNNNNNNNNNNNGUUUAAGAGCUAGAAAUAGCAAGUUUAAAU
AAGGCUAGUCCGUUAUCAACUUGAAAAAGUGGCACCGAGUCGGUGC;
and

(SEQ ID NO: 32)

NNNNNNNNNNNNNNNNNNNNGUAUUAGAGCUAUGCUGUAUUGGAAACAAU
ACAGCAUAGCAAGUUAAUAUAAGGCUAGUCCGUUAUCAACUUGAAAAAGU
GGCACCGAGUCGGUGC.

[0509] The 5′ Extension Domain

[0510] In an embodiment, a modular gRNA can comprise additional sequence, 5′ to the second complementarity domain. In an embodiment, the 5′ extension domain is 2 to 10, 2 to 9, 2 to 8, 2 to 7, 2 to 6, 2 to 5, or 2 to 4 nucleotides in length. In an embodiment, the 5′ extension domain is 2, 3, 4, 5, 6, 7, 8, 9, or 10 or more nucleotides in length.

[0511] In an embodiment, the 5′ extension domain nucleotides do not comprise modifications, e.g., modifications of the type provided in Section VIII. However, in an embodiment, the 5′ extension domain comprises one or more modifications, e.g., modifications that render it less susceptible to degradation or more bio-compatible, e.g., less immunogenic. By way of example, the backbone of the 5′ extension domain can be modified with a phosphorothioate, or other modification(s) from Section VIII. In an embodiment, a nucleotide of the 5′ extension domain can comprise a 2′ modification, e.g., a 2-acetylation, e.g., a 2′ methylation, or other modification(s) from Section VIII.

[0512] In some embodiments, the 5′ extension domain can comprise as many as 1, 2, 3, 4, 5, 6, 7 or 8 modifications. In an embodiment, the 5′ extension domain comprises as many as 1, 2, 3, or 4 modifications within 5 nucleotides of its 5′ end, e.g., in a modular gRNA molecule. In an embodiment, the 5′ extension domain comprises as many as 1, 2, 3, or 4 modifications within 5 nucleotides of its 3′ end, e.g., in a modular gRNA molecule.

[0513] In some embodiments, the 5′ extension domain comprises modifications at two consecutive nucleotides, e.g., two consecutive nucleotides that are within 5 nucleotides of the 5′ end of the 5′ extension domain, within 5 nucleotides of the 3′ end of the 5′ extension domain, or more than 5 nucleotides away from one or both ends of the 5′ extension domain. In an embodiment, no two consecutive nucleotides are modified within 5 nucleotides of the 5′ end of the 5′ extension domain, within 5 nucleotides of the 3′ end of the 5′ extension domain, or within a region that is more than 5 nucleotides away from one or both ends of the 5′ extension domain. In an embodiment, no nucleotide is modified within 5 nucleotides of the 5′ end of the 5′ extension domain, within 5 nucleotides of the 3′ end of the 5′ extension domain, or within a region that is more than 5 nucleotides away from one or both ends of the 5′ extension domain.

[0514] Modifications in the 5′ extension domain can be selected to not interfere with gRNA molecule efficacy, which can be evaluated by testing a candidate modification in the system described in Section IV. gRNAs having a candidate 5′ extension domain having a selected length, sequence, degree of complementarity, or degree of modification, can be evaluated in the system described at Section IV. The candidate 5′ extension domain can be placed, either alone, or with one or more other candidate changes in a gRNA molecule/Cas9 molecule system known to be functional with a selected target and evaluated.

[0515] In an embodiment, the 5′ extension domain has at least 60, 70, 80, 85, 90, 95, 98 or 99% homology with, or differs by no more than 1, 2, 3, 4, 5, or 6 nucleotides from, a reference 5′ extension domain, e.g., a naturally occurring, e.g., an S. pyogenes, S. aureus, N. meningtidis, or S. thermophilus, 5′ extension domain, or a 5′ extension domain described herein, e.g., from FIGS. 1A-1G.

[0516] The Linking Domain

[0517] In a unimolecular gRNA molecule the linking domain is disposed between the first and second complementarity domains. In a modular gRNA molecule, the two molecules are associated with one another by the complementarity domains.

[0518] In an embodiment, the linking domain is 10+/−5, 20+/−5, 30+/−5, 40+/−5, 50+/−5, 60+/−5, 70+/−5, 80+/−5, 90+/−5, or 100+/−5 nucleotides, in length.

[0519] In an embodiment, the linking domain is 20+/−10, 30+/−10, 40+/−10, 50+/−10, 60+/−10, 70+/−10, 80+/−10, 90+/−10, or 100+/−10 nucleotides, in length.

[0520] In an embodiment, the linking domain is 10 to 100, 10 to 90, 10 to 80, 10 to 70, 10 to 60, 10 to 50, 10 to 40, 10 to 30, 10 to 20 or 10 to 15 nucleotides in length. In other embodiments, the linking domain is 20 to 100, 20 to 90, 20 to 80, 20 to 70, 20 to 60, 20 to 50, 20 to 40, 20 to 30, or 20 to 25 nucleotides in length.

[0521] In an embodiment, the linking domain is 1, 2, 3, 4, 5, 6, 7, 8, 9, 10, 11, 12, 13, 14, 15, 16 17, 18, 19, or 20 nucleotides in length.

[0522] In an embodiment, the linking domain is a covalent bond.

[0523] In an embodiment, the linking domain comprises a duplexed region, typically adjacent to or within 1, 2, or 3 nucleotides of the 3′ end of the first complementarity domain and/or the 5-end of the second complementarity domain. In an embodiment, the duplexed region can be 20+/−10 base pairs in length. In an embodiment, the duplexed region can be 10+/−5, 15+/−5, 20+/−5, or 30+/−5 base pairs in length. In an embodiment, the duplexed region can be 1, 2, 3, 4, 5, 6, 7, 8, 9, 10, 11, 12, 13, 14, or 15 base pairs in length.

[0524] Typically the sequences forming the duplexed region have exact complementarity with one another, though in some embodiments as many as 1, 2, 3, 4, 5, 6, 7 or 8 nucleotides are not complementary with the corresponding nucleotides.

[0525] In an embodiment, the linking domain nucleotides do not comprise modifications, e.g., modifications of the type provided in Section VIII. However, in an embodiment, the linking domain comprises one or more modifications, e.g., modifications that render it less susceptible to degradation or more bio-compatible, e.g., less immunogenic. By way of example, the backbone of the linking domain can be modified with a phosphorothioate, or other modification(s) from Section VIII. In an embodiment a nucleotide of the linking domain can comprise a 2′ modification, e.g., a 2-acetylation, e.g., a 2′ methylation, or other modification(s) from Section VIII. In some embodiments, the linking domain can comprise as many as 1, 2, 3, 4, 5, 6, 7 or 8 modifications.

[0526] Modifications in a linking domain can be selected to not interfere with targeting efficacy, which can be evaluated by testing a candidate modification in the system described in Section IV. gRNAs having a candidate linking domain having a selected length, sequence, degree of complementarity, or degree of modification, can be evaluated a system described in Section IV. A candidate linking domain can be placed, either alone, or with one or more other candidate changes in a gRNA molecule/Cas9 molecule system known to be functional with a selected target and evaluated.

[0527] In an embodiment, the linking domain has at least 60, 70, 80, 85, 90, 95, 98 or 99% homology with, or differs by no more than 1, 2, 3, 4, 5, or 6 nucleotides from, a reference linking domain, e.g., a linking domain described herein, e.g., from FIGS. 1A-1G.

[0528] The Proximal Domain

[0529] In an embodiment, the proximal domain is 6+/−2, 7+/−2, 8+/−2, 9+/−2, 10+/−2, 11+/−2, 12+/−2, 13+/−2, 14+/−2, 14+/−2, 16+/−2, 17+/−2, or 18+/−2 nucleotides in length.

[0530] In an embodiment, the proximal domain is 6, 7, 8, 9, 10, 11, 12, 13, 14, 14, 16, 17, 18, 19, or 20 nucleotides in length.

[0531] In an embodiment, the proximal domain is 5 to 20, 7, to 18, 9 to 16, or 10 to 14 nucleotides in length.

[0532] In an embodiment, the proximal domain nucleotides do not comprise modifications, e.g., modifications of the type provided in Section VIII. However, in an embodiment, the proximal domain comprises one or more modifications, e.g., modifications that render it less susceptible to degradation or more bio-compatible, e.g., less immunogenic. By way of example, the backbone of the proximal domain can be modified with a phosphorothioate, or other modification(s) from Section VIII. In an embodiment a nucleotide of the proximal domain can comprise a 2′ modification, e.g., a 2-acetylation, e.g., a 2′ methylation, or other modification(s) from Section VIII.

[0533] In some embodiments, the proximal domain can comprise as many as 1, 2, 3, 4, 5, 6, 7 or 8 modifications. In an embodiment, the proximal domain comprises as many as 1, 2, 3, or 4 modifications within 5 nucleotides of its 5′ end, e.g., in a modular gRNA molecule. In an embodiment, the target domain comprises as many as 1, 2, 3, or 4 modifications within 5 nucleotides of its 3′ end, e.g., in a modular gRNA molecule.

[0534] In some embodiments, the proximal domain comprises modifications at two consecutive nucleotides, e.g., two consecutive nucleotides that are within 5 nucleotides of the 5′ end of the proximal domain, within 5 nucleotides of the 3′ end of the proximal domain, or more than 5 nucleotides away from one or both ends of the proximal domain. In an embodiment, no two consecutive nucleotides are modified within 5 nucleotides of the 5′ end of the proximal domain, within 5 nucleotides of the 3′ end of the proximal domain, or within a region that is more than 5 nucleotides away from one or both ends of the proximal domain. In an embodiment, no nucleotide is modified within 5 nucleotides of the 5′ end of the proximal domain, within 5 nucleotides of the 3′ end of the proximal domain, or within a region that is more than 5 nucleotides away from one or both ends of the proximal domain.

[0535] Modifications in the proximal domain can be selected to not interfere with gRNA molecule efficacy, which can be evaluated by testing a candidate modification in the system described in Section IV. gRNAs having a candidate proximal domain having a selected length, sequence, degree of complementarity, or degree of modification, can be evaluated in the system described at Section IV. The candidate proximal domain can be placed, either alone, or with one or more other candidate changes in a gRNA molecule/Cas9 molecule system known to be functional with a selected target and evaluated.

[0536] In an embodiment, the proximal domain has at least 60, 70, 80, 85 90, 95, 98 or 99% homology with, or differs by no more than 1, 2, 3, 4, 5, or 6 nucleotides from, a reference proximal domain, e.g., a naturally occurring, e.g., an S. pyogenes, S. aureus, N. meningtidis, or S. thermophilus, proximal domain, or a proximal domain described herein, e.g., from FIGS. 1A-1G.

[0537] The Tail Domain

[0538] In an embodiment, the tail domain is 10+/−5, 20+/−5, 30+/−5, 40+/−5, 50+/−5, 60+/−5, 70+/−5, 80+/−5, 90+/−5, or 100+/−5 nucleotides, in length.

[0539] In an embodiment, the tail domain is 20+/−5 nucleotides in length.

[0540] In an embodiment, the tail domain is 20+/−10, 30+/−10, 40+/−10, 50+/−10, 60+/−10, 70+/−10, 80+/−10, 90+/−10, or 100+/−10 nucleotides, in length.

[0541] In an embodiment, the tail domain is 25+/−10 nucleotides in length.

[0542] In an embodiment, the tail domain is 10 to 100, 10 to 90, 10 to 80, 10 to 70, 10 to 60, 10 to 50, 10 to 40, 10 to 30, 10 to 20 or 10 to 15 nucleotides in length.

[0543] In other embodiments, the tail domain is 20 to 100, 20 to 90, 20 to 80, 20 to 70, 20 to 60, 20 to 50, 20 to 40, 20 to 30, or 20 to 25 nucleotides in length.

[0544] In an embodiment, the tail domain is 1 to 20, 1 to 1, 1 to 10, or 1 to 5 nucleotides in length.

[0545] In an embodiment, the tail domain nucleotides do not comprise modifications, e.g., modifications of the type provided in Section VIII. However, in an embodiment, the tail domain comprises one or more modifications, e.g., modifications that render it less susceptible to degradation or more bio-compatible, e.g., less immunogenic. By way of example, the backbone of the tail domain can be modified with a phosphorothioate, or other modification(s) from Section VIII. In an embodiment a nucleotide of the tail domain can comprise a 2′ modification, e.g., a 2-acetylation, e.g., a 2′ methylation, or other modification(s) from Section VIII.

[0546] In some embodiments, the tail domain can have as many as 1, 2, 3, 4, 5, 6, 7 or 8 modifications. In an embodiment, the target domain comprises as many as 1, 2, 3, or 4 modifications within 5 nucleotides of its 5′ end. In an embodiment, the target domain comprises as many as 1, 2, 3, or 4 modifications within 5 nucleotides of its 3′ end.

[0547] In an embodiment, the tail domain comprises a tail duplex domain, which can form a tail duplexed region. In an embodiment, the tail duplexed region can be 3, 4, 5, 6, 7, 8, 9, 10, 11, or 12 base pairs in length. In an embodiment, a further single stranded domain, exists 3′ to the tail duplexed domain. In an embodiment, this domain is 3, 4, 5, 6, 7, 8, 9, or 10 nucleotides in length. In an embodiment it is 4 to 6 nucleotides in length.

[0548] In an embodiment, the tail domain has at least 60, 70, 80, 90, 95, 98 or 99% homology with, or differs by no more than 1, 2, 3, 4, 5, or 6 nucleotides from, a reference tail domain, e.g., a naturally occurring, e.g., an S. pyogenes, S. aureus, N. meningtidis, or S. thermophilus, tail domain, or a tail domain described herein, e.g., from FIGS. 1A-1G.

[0549] In an embodiment, the proximal and tail domain, taken together comprise the following sequences:

(SEQ ID NO: 33)

AAGGCUAGUCCGUUAUCAACUUGAAAAAGUGGCACCGAGUCGGUGCU,

(SEQ ID NO: 34)

AAGGCUAGUCCGUUAUCAACUUGAAAAAGUGGCACCGAGUCGGUGGUGC,

(SEQ ID NO: 35)

AAGGCUAGUCCGUUAUCAACUUGAAAAAGUGGCACCGAGUCGGUGCGGAU
C,

(SEQ ID NO: 36)

AAGGCUAGUCCGUUAUCAACUUGAAAAAGUG,

(SEQ ID NO: 37)

AAGGCUAGUCCGUUAUCA,
or

(SEQ ID NO: 38)

AAGGCUAGUCCG.

[0550] In an embodiment, the tail domain comprises the 3′ sequence UUUUUU, e.g., if a U6 promoter is used for transcription.

[0551] In an embodiment, the tail domain comprises the 3′ sequence UUUU, e.g., if an H1 promoter is used for transcription.

[0552] In an embodiment, tail domain comprises variable numbers of 3′ Us depending, e.g., on the termination signal of the pol-III promoter used.

[0553] In an embodiment, the tail domain comprises variable 3′ sequence derived from the DNA template if a T7 promoter is used.

[0554] In an embodiment, the tail domain comprises variable 3′ sequence derived from the DNA template, e.g., if in vitro transcription is used to generate the RNA molecule.

[0555] In an embodiment, the tail domain comprises variable 3′ sequence derived from the DNA template, e.g., if a pol-II promoter is used to drive transcription.

[0556] Modifications in the tail domain can be selected to not interfere with targeting efficacy, which can be evaluated by testing a candidate modification in the system described in Section IV. gRNAs having a candidate tail domain having a selected length, sequence, degree of complementarity, or degree of modification, can be evaluated in the system described in Section IV. The candidate tail domain can be placed, either alone, or with one or more other candidate changes in a gRNA molecule/Cas9 molecule system known to be functional with a selected target and evaluated.

[0557] In some embodiments, the tail domain comprises modifications at two consecutive nucleotides, e.g., two consecutive nucleotides that are within 5 nucleotides of the 5′ end of the tail domain, within 5 nucleotides of the 3′ end of the tail domain, or more than 5 nucleotides away from one or both ends of the tail domain. In an embodiment, no two consecutive nucleotides are modified within 5 nucleotides of the 5′ end of the tail domain, within 5 nucleotides of the 3′ end of the tail domain, or within a region that is more than 5 nucleotides away from one or both ends of the tail domain. In an embodiment, no nucleotide is modified within 5 nucleotides of the 5′ end of the tail domain, within 5 nucleotides of the 3′ end of the tail domain, or within a region that is more than 5 nucleotides away from one or both ends of the tail domain.

[0558] In an embodiment a gRNA has the following structure:

[0559] 5′ [targeting domain]-[first complementarity domain]-[linking domain]-[second complementarity domain]-[proximal domain]-[tail domain]-3′

[0560] wherein, the targeting domain comprises a core domain and optionally a secondary domain, and is 10 to 50 nucleotides in length;

[0561] the first complementarity domain is 5 to 25 nucleotides in length and, In an embodiment has at least 50, 60, 70, 80, 85, 90, 95, 98 or 99% homology with a reference first complementarity domain disclosed herein;

[0562] the linking domain is 1 to 5 nucleotides in length;

[0563] the proximal domain is 5 to 20 nucleotides in length and, in an embodiment has at least 50, 60, 70, 80, 85, 90, 95, 98 or 99% homology with a reference proximal domain disclosed herein; and

[0564] the tail domain is absent or a nucleotide sequence is 1 to 50 nucleotides in length and, in an embodiment has at least 50, 60, 70, 80, 85, 90, 95, 98 or 99% homology with a reference tail domain disclosed herein.

[0565] Exemplary Chimeric gRNAs

[0566] In an embodiment, a unimolecular, or chimeric, gRNA comprises, preferably from 5′ to 3′:

[0567] a targeting domain, e.g., comprising 15, 16, 17, 18, 19, 20, 21, 22, 23, 24, 25, or 26 nucleotides (which is complementary to a target nucleic acid);

a first complementarity domain;
a linking domain;

[0568] a second complementarity domain (which is complementary to the first complementarity domain);

a proximal domain; and
a tail domain,
wherein,
(a) the proximal and tail domain, when taken together, comprise
at least 15, 18, 20, 25, 30, 31, 35, 40, 45, 49, 50, or 53 nucleotides;
(b) there are at least 15, 18, 20, 25, 30, 31, 35, 40, 45, 49, 50, or 53 nucleotides 3′ to the last nucleotide of the second complementarity domain; or
(c) there are at least 16, 19, 21, 26, 31, 32, 36, 41, 46, 50, 51, or 54 nucleotides 3′ to the last nucleotide of the second complementarity domain that is complementary to its corresponding nucleotide of the first complementarity domain.

[0569] In an embodiment, the sequence from (a), (b), or (c), has at least 60, 75, 80, 85, 90, 95, or 99% homology with the corresponding sequence of a naturally occurring gRNA, or with a gRNA described herein.

[0570] In an embodiment, the proximal and tail domain, when taken together, comprise at least 15, 18, 20, 25, 30, 31, 35, 40, 45, 49, 50, or 53 nucleotides.

[0571] In an embodiment, there are at least 15, 18, 20, 25, 30, 31, 35, 40, 45, 49, 50, or 53 nucleotides 3′

[0572] to the last nucleotide of the second complementarity domain.

[0573] In an embodiment, there are at least 16, 19, 21, 26, 31, 32, 36, 41, 46, 50, 51, or 54 nucleotides 3′ to the last nucleotide of the second complementarity domain that is complementary to its corresponding nucleotide of the first complementarity domain.

[0574] In an embodiment, the targeting domain comprises, has, or consists of, 16, 17, 18, 19, 20, 21, 22, 23, 24, 25 or 26 nucleotides (e.g., 16, 17, 18, 19, 20, 21, 22, 23, 24, 25 or 26 consecutive nucleotides) having complementarity with the target domain, e.g., the targeting domain is 16, 17, 18, 19, 20, 21, 22, 23, 24, 25 or 26 nucleotides in length.

[0575] In an embodiment, the targeting domain comprises, has, or consists of, 16 nucleotides (e.g., 16 consecutive nucleotides) having complementarity with the target domain, e.g., the targeting domain is 16 nucleotides in length.

[0576] In an embodiment, the targeting domain comprises, has, or consists of, 17 nucleotides (e.g., 17 consecutive nucleotides) having complementarity with the target domain, e.g., the targeting domain is 17 nucleotides in length.

[0577] In an embodiment, the targeting domain comprises, has, or consists of, 18 nucleotides (e.g., 18 consecutive nucleotides) having complementarity with the target domain, e.g., the targeting domain is 18 nucleotides in length.

[0578] In an embodiment, the targeting domain comprises, has, or consists of, 19 nucleotides (e.g., 19 consecutive nucleotides) having complementarity with the target domain, e.g., the targeting domain is 19 nucleotides in length.

[0579] In an embodiment, the targeting domain comprises, has, or consists of, 20 nucleotides (e.g., 20 consecutive nucleotides) having complementarity with the target domain, e.g., the targeting domain is 20 nucleotides in length.

[0580] In an embodiment, the targeting domain comprises, has, or consists of, 21 nucleotides (e.g., 21 consecutive nucleotides) having complementarity with the target domain, e.g., the targeting domain is 21 nucleotides in length.

[0581] In an embodiment, the targeting domain comprises, has, or consists of, 22 nucleotides (e.g., 22 consecutive nucleotides) having complementarity with the target domain, e.g., the targeting domain is 22 nucleotides in length.

[0582] In an embodiment, the targeting domain comprises, has, or consists of, 23 nucleotides (e.g., 23 consecutive nucleotides) having complementarity with the target domain, e.g., the targeting domain is 23 nucleotides in length.

[0583] In an embodiment, the targeting domain comprises, has, or consists of, 24 nucleotides (e.g., 24 consecutive nucleotides) having complementarity with the target domain, e.g., the targeting domain is 24 nucleotides in length.

[0584] In an embodiment, the targeting domain comprises, has, or consists of, 25 nucleotides (e.g., 25 consecutive nucleotides) having complementarity with the target domain, e.g., the targeting domain is 25 nucleotides in length.

[0585] In an embodiment, the targeting domain comprises, has, or consists of, 26 nucleotides (e.g., 26 consecutive nucleotides) having complementarity with the target domain, e.g., the targeting domain is 26 nucleotides in length.

[0586] In an embodiment, the targeting domain comprises, has, or consists of, 16 nucleotides (e.g., 16 consecutive nucleotides) having complementarity with the target domain, e.g., the targeting domain is 16 nucleotides in length; and the proximal and tail domain, when taken together, comprise at least 15, 18, 20, 25, 30, 31, 35, 40, 45, 49, 50, or 53 nucleotides.

[0587] In an embodiment, the targeting domain comprises, has, or consists of, 16 nucleotides (e.g., 16 consecutive nucleotides) having complementarity with the target domain, e.g., the targeting domain is 16 nucleotides in length; and there are at least 15, 18, 20, 25, 30, 31, 35, 40, 45, 49, 50, or 53 nucleotides 3′ to the last nucleotide of the second complementarity domain.

[0588] In an embodiment, the targeting domain comprises, has, or consists of, 16 nucleotides (e.g., 16 consecutive nucleotides) having complementarity with the target domain, e.g., the targeting domain is 16 nucleotides in length; and there are at least 16, 19, 21, 26, 31, 32, 36, 41, 46, 50, 51, or 54 nucleotides 3′ to the last nucleotide of the second complementarity domain that is complementary to its corresponding nucleotide of the first complementarity domain.

[0589] In an embodiment, the targeting domain comprises, has, or consists of, 17 nucleotides (e.g., 17 consecutive nucleotides) having complementarity with the target domain, e.g., the targeting domain is 17 nucleotides in length; and the proximal and tail domain, when taken together, comprise at least 15, 18, 20, 25, 30, 31, 35, 40, 45, 49, 50, or 53 nucleotides.

[0590] In an embodiment, the targeting domain comprises, has, or consists of, 17 nucleotides (e.g., 17 consecutive nucleotides) having complementarity with the target domain, e.g., the targeting domain is 17 nucleotides in length; and there are at least 15, 18, 20, 25, 30, 31, 35, 40, 45, 49, 50, or 53 nucleotides 3′ to the last nucleotide of the second complementarity domain.

[0591] In an embodiment, the targeting domain comprises, has, or consists of, 17 nucleotides (e.g., 17 consecutive nucleotides) having complementarity with the target domain, e.g., the targeting domain is 17 nucleotides in length; and there are at least 16, 19, 21, 26, 31, 32, 36, 41, 46, 50, 51, or 54 nucleotides 3′ to the last nucleotide of the second complementarity domain that is complementary to its corresponding nucleotide of the first complementarity domain.

[0592] In an embodiment, the targeting domain comprises, has, or consists of, 18 nucleotides (e.g., 18 consecutive nucleotides) having complementarity with the target domain, e.g., the targeting domain is 18 nucleotides in length; and the proximal and tail domain, when taken together, comprise at least 15, 18, 20, 25, 30, 31, 35, 40, 45, 49, 50, or 53 nucleotides.

[0593] In an embodiment, the targeting domain comprises, has, or consists of, 18 nucleotides (e.g., 18 consecutive nucleotides) having complementarity with the target domain, e.g., the targeting domain is 18 nucleotides in length; and there are at least 15, 18, 20, 25, 30, 31, 35, 40, 45, 49, 50, or 53 nucleotides 3′ to the last nucleotide of the second complementarity domain.

[0594] In an embodiment, the targeting domain comprises, has, or consists of, 18 nucleotides (e.g., 18 consecutive nucleotides) having complementarity with the target domain, e.g., the targeting domain is 18 nucleotides in length; and there are at least 16, 19, 21, 26, 31, 32, 36, 41, 46, 50, 51, or 54 nucleotides 3′ to the last nucleotide of the second complementarity domain that is complementary to its corresponding nucleotide of the first complementarity domain.

[0595] In an embodiment, the targeting domain comprises, has, or consists of, 19 nucleotides (e.g., 19 consecutive nucleotides) having complementarity with the target domain, e.g., the targeting domain is 19 nucleotides in length; and the proximal and tail domain, when taken together, comprise at least 15, 18, 20, 25, 30, 31, 35, 40, 45, 49, 50, or 53 nucleotides.

[0596] In an embodiment, the targeting domain comprises, has, or consists of, 19 nucleotides (e.g., 19 consecutive nucleotides) having complementarity with the target domain, e.g., the targeting domain is 19 nucleotides in length; and there are at least 15, 18, 20, 25, 30, 31, 35, 40, 45, 49, 50, or 53 nucleotides 3′ to the last nucleotide of the second complementarity domain.

[0597] In an embodiment, the targeting domain comprises, has, or consists of, 19 nucleotides (e.g., 19 consecutive nucleotides) having complementarity with the target domain, e.g., the targeting domain is 19 nucleotides in length; and there are at least 16, 19, 21, 26, 31, 32, 36, 41, 46, 50, 51, or 54 nucleotides 3′ to the last nucleotide of the second complementarity domain that is complementary to its corresponding nucleotide of the first complementarity domain.

[0598] In an embodiment, the targeting domain comprises, has, or consists of, 20 nucleotides (e.g., 20 consecutive nucleotides) having complementarity with the target domain, e.g., the targeting domain is 20 nucleotides in length; and the proximal and tail domain, when taken together, comprise at least 15, 18, 20, 25, 30, 31, 35, 40, 45, 49, 50, or 53 nucleotides.

[0599] In an embodiment, the targeting domain comprises, has, or consists of, 20 nucleotides (e.g., 20 consecutive nucleotides) having complementarity with the target domain, e.g., the targeting domain is 20 nucleotides in length; and there are at least 15, 18, 20, 25, 30, 31, 35, 40, 45, 49, 50, or 53 nucleotides 3′ to the last nucleotide of the second complementarity domain.

[0600] In an embodiment, the targeting domain comprises, has, or consists of, 20 nucleotides (e.g., 20 consecutive nucleotides) having complementarity with the target domain, e.g., the targeting domain is 20 nucleotides in length; and there are at least 16, 19, 21, 26, 31, 32, 36, 41, 46, 50, 51, or 54 nucleotides 3′ to the last nucleotide of the second complementarity domain that is complementary to its corresponding nucleotide of the first complementarity domain.

[0601] In an embodiment, the targeting domain comprises, has, or consists of, 21 nucleotides (e.g., 21 consecutive nucleotides) having complementarity with the target domain, e.g., the targeting domain is 21 nucleotides in length; and the proximal and tail domain, when taken together, comprise at least 15, 18, 20, 25, 30, 31, 35, 40, 45, 49, 50, or 53 nucleotides.

[0602] In an embodiment, the targeting domain comprises, has, or consists of, 21 nucleotides (e.g., 21 consecutive nucleotides) having complementarity with the target domain, e.g., the targeting domain is 21 nucleotides in length; and there are at least 15, 18, 20, 25, 30, 31, 35, 40, 45, 49, 50, or 53 nucleotides 3′ to the last nucleotide of the second complementarity domain.

[0603] In an embodiment, the targeting domain comprises, has, or consists of, 21 nucleotides (e.g., 21 consecutive nucleotides) having complementarity with the target domain, e.g., the targeting domain is 21 nucleotides in length; and there are at least 16, 19, 21, 26, 31, 32, 36, 41, 46, 50, 51, or 54 nucleotides 3′ to the last nucleotide of the second complementarity domain that is complementary to its corresponding nucleotide of the first complementarity domain.

[0604] In an embodiment, the targeting domain comprises, has, or consists of, 22 nucleotides (e.g., 22 consecutive nucleotides) having complementarity with the target domain, e.g., the targeting domain is 22 nucleotides in length; and the proximal and tail domain, when taken together, comprise at least 15, 18, 20, 25, 30, 31, 35, 40, 45, 49, 50, or 53 nucleotides.

[0605] In an embodiment, the targeting domain comprises, has, or consists of, 22 nucleotides (e.g., 22 consecutive nucleotides) having complementarity with the target domain, e.g., the targeting domain is 22 nucleotides in length; and there are at least 15, 18, 20, 25, 30, 31, 35, 40, 45, 49, 50, or 53 nucleotides 3′ to the last nucleotide of the second complementarity domain.

[0606] In an embodiment, the targeting domain comprises, has, or consists of, 22 nucleotides (e.g., 22 consecutive nucleotides) having complementarity with the target domain, e.g., the targeting domain is 22 nucleotides in length; and there are at least 16, 19, 21, 26, 31, 32, 36, 41, 46, 50, 51, or 54 nucleotides 3′ to the last nucleotide of the second complementarity domain that is complementary to its corresponding nucleotide of the first complementarity domain.

[0607] In an embodiment, the targeting domain comprises, has, or consists of, 23 nucleotides (e.g., 23 consecutive nucleotides) having complementarity with the target domain, e.g., the targeting domain is 23 nucleotides in length; and the proximal and tail domain, when taken together, comprise at least 15, 18, 20, 25, 30, 31, 35, 40, 45, 49, 50, or 53 nucleotides.

[0608] In an embodiment, the targeting domain comprises, has, or consists of, 23 nucleotides (e.g., 23 consecutive nucleotides) having complementarity with the target domain, e.g., the targeting domain is 23 nucleotides in length; and there are at least 15, 18, 20, 25, 30, 31, 35, 40, 45, 49, 50, or 53 nucleotides 3′ to the last nucleotide of the second complementarity domain.

[0609] In an embodiment, the targeting domain comprises, has, or consists of, 23 nucleotides (e.g., 23 consecutive nucleotides) having complementarity with the target domain, e.g., the targeting domain is 23 nucleotides in length; and there are at least 16, 19, 21, 26, 31, 32, 36, 41, 46, 50, 51, or 54 nucleotides 3′ to the last nucleotide of the second complementarity domain that is complementary to its corresponding nucleotide of the first complementarity domain.

[0610] In an embodiment, the targeting domain comprises, has, or consists of, 24 nucleotides (e.g., 24 consecutive nucleotides) having complementarity with the target domain, e.g., the targeting domain is 24 nucleotides in length; and the proximal and tail domain, when taken together, comprise at least 15, 18, 20, 25, 30, 31, 35, 40, 45, 49, 50, or 53 nucleotides.

[0611] In an embodiment, the targeting domain comprises, has, or consists of, 24 nucleotides (e.g., 24 consecutive nucleotides) having complementarity with the target domain, e.g., the targeting domain is 24 nucleotides in length; and there are at least 15, 18, 20, 25, 30, 31, 35, 40, 45, 49, 50, or 53 nucleotides 3′ to the last nucleotide of the second complementarity domain.

[0612] In an embodiment, the targeting domain comprises, has, or consists of, 24 nucleotides (e.g., 24 consecutive nucleotides) having complementarity with the target domain, e.g., the targeting domain is 24 nucleotides in length; and there are at least 16, 19, 21, 26, 31, 32, 36, 41, 46, 50, 51, or 54 nucleotides 3′ to the last nucleotide of the second complementarity domain that is complementary to its corresponding nucleotide of the first complementarity domain.

[0613] In an embodiment, the targeting domain comprises, has, or consists of, 25 nucleotides (e.g., 25 consecutive nucleotides) having complementarity with the target domain, e.g., the targeting domain is 25 nucleotides in length; and the proximal and tail domain, when taken together, comprise at least 15, 18, 20, 25, 30, 31, 35, 40, 45, 49, 50, or 53 nucleotides.

[0614] In an embodiment, the targeting domain comprises, has, or consists of, 25 nucleotides (e.g., 25 consecutive nucleotides) having complementarity with the target domain, e.g., the targeting domain is 25 nucleotides in length; and there are at least 15, 18, 20, 25, 30, 31, 35, 40, 45, 49, 50, or 53 nucleotides 3′ to the last nucleotide of the second complementarity domain.

[0615] In an embodiment, the targeting domain comprises, has, or consists of, 25 nucleotides (e.g., 25 consecutive nucleotides) having complementarity with the target domain, e.g., the targeting domain is 25 nucleotides in length; and there are at least 16, 19, 21, 26, 31, 32, 36, 41, 46, 50, 51, or 54 nucleotides 3′ to the last nucleotide of the second complementarity domain that is complementary to its corresponding nucleotide of the first complementarity domain.

[0616] In an embodiment, the targeting domain comprises, has, or consists of, 26 nucleotides (e.g., 26 consecutive nucleotides) having complementarity with the target domain, e.g., the targeting domain is 26 nucleotides in length; and the proximal and tail domain, when taken together, comprise at least 15, 18, 20, 25, 30, 31, 35, 40, 45, 49, 50, or 53 nucleotides.

[0617] In an embodiment, the targeting domain comprises, has, or consists of, 26 nucleotides (e.g., 26 consecutive nucleotides) having complementarity with the target domain, e.g., the targeting domain is 26 nucleotides in length; and there are at least 15, 18, 20, 25, 30, 31, 35, 40, 45, 49, 50, or 53 nucleotides 3′ to the last nucleotide of the second complementarity domain.

[0618] In an embodiment, the targeting domain comprises, has, or consists of, 26 nucleotides (e.g., 26 consecutive nucleotides) having complementarity with the target domain, e.g., the targeting domain is 26 nucleotides in length; and there are at least 16, 19, 21, 26, 31, 32, 36, 41, 46, 50, 51, or 54 nucleotides 3′ to the last nucleotide of the second complementarity domain that is complementary to its corresponding nucleotide of the first complementarity domain.

[0619] In an embodiment, the unimolecular, or chimeric, gRNA molecule (comprising a targeting domain, a first complementary domain, a linking domain, a second complementary domain, a proximal domain and, optionally, a tail domain) comprises the following sequence in which the targeting domain is depicted as 20 Ns but could be any sequence and range in length from 16 to 26 nucleotides and in which the gRNA sequence is followed by 6 Us, which serve as a termination signal for the U6 promoter, but which could be either absent or fewer in number:

(SEQ ID NO: 40)

NNNNNNNNNNNNNNNNNNNNGUUUUAGAGCUAGAAAUAGCAAGUUAAAAU
AAGGCUAGUCCGUUAUCAACUUGAAAAAGUGGCACCGAGUCGGUGCUUUU
UU.

In an embodiment, the unimolecular, or chimeric, gRNA molecule is a S. pyogenes gRNA molecule.

[0620] In some embodiments, the unimolecular, or chimeric, gRNA molecule (comprising a targeting domain, a first complementary domain, a linking domain, a second complementary domain, a proximal domain and, optionally, a tail domain) comprises the following sequence in which the targeting domain is depicted as 20 Ns but could be any sequence and range in length from 16 to 26 nucleotides and in which the gRNA sequence is followed by 6 Us, which serve as a termination signal for the U6 promoter, but which could be either absent or fewer in number:

(SEQ ID NO: 41)

NNNNNNNNNNNNNNNNNNNNGUUUUAGUACUCUGGAAACAGAAUCUACUA
AAACAAGGCAAAAUGCCGUGUUUAUCUCGUCAACUUGUUGGCGAGAUUUU
UU.

In an embodiment, the unimolecular, or chimeric, gRNA molecule is a S. aureus gRNA molecule.

[0621] The sequences and structures of exemplary chimeric gRNAs are also shown in FIGS. 10A-10B.

[0622] Exemplary Modular gRNAs

[0623] In an embodiment, a modular gRNA comprises:
[0624] a first strand comprising, preferably from 5′ to 3′;
   a targeting domain, e.g., comprising 15, 16, 17, 18, 19, 20, 21, 22, 23, 24, 25, or 26 nucleotides;
[0625] a first complementarity domain; and
[0626] a second strand, comprising, preferably from 5′ to 3′:
[0627] optionally a 5′ extension domain;
[0628] a second complementarity domain;
[0629] a proximal domain; and
[0630] a tail domain,
[0631] wherein:
   (a) the proximal and tail domain, when taken together, comprise at least 15, 18, 20, 25, 30, 31, 35, 40, 45, 49, 50, or 53 nucleotides;
   (b) there are at least 15, 18, 20, 25, 30, 31, 35, 40, 45, 49, 50, or 53 nucleotides 3′ to the last nucleotide of the second complementarity domain; or
   (c) there are at least 16, 19, 21, 26, 31, 32, 36, 41, 46, 50, 51, or 54 nucleotides 3′ to the last nucleotide of the second complementarity domain that is complementary to its corresponding nucleotide of the first complementarity domain.

[0632] In an embodiment, the sequence from (a), (b), or (c), has at least 60, 75, 80, 85, 90, 95, or 99% homology with the corresponding sequence of a naturally occurring gRNA, or with a gRNA described herein.

[0633] In an embodiment, the proximal and tail domain, when taken together, comprise at least 15, 18, 20, 25, 30, 31, 35, 40, 45, 49, 50, or 53 nucleotides.

[0634] In an embodiment there are at least 15, 18, 20, 25, 30, 31, 35, 40, 45, 49, 50, or 53 nucleotides 3′

[0635] to the last nucleotide of the second complementarity domain.

[0636] In an embodiment, there are at least 16, 19, 21, 26, 31, 32, 36, 41, 46, 50, 51, or 54 nucleotides 3′ to the last nucleotide of the second complementarity domain that is complementary to its corresponding nucleotide of the first complementarity domain.

[0637] In an embodiment, the targeting domain has, or consists of, 16, 17, 18, 19, 20, 21, 22, 23, 24, 25 or 26 nucleotides (e.g., 16, 17, 18, 19, 20, 21, 22, 23, 24, 25 or 26 consecutive nucleotides) having complementarity with the target domain, e.g., the targeting domain is 16, 17, 18, 19, 20, 21, 22, 23, 24, 25 or 26 nucleotides in length.

[0638] In an embodiment, the targeting domain comprises, has, or consists of, 16 nucleotides (e.g., 16 consecutive nucleotides) having complementarity with the target domain, e.g., the targeting domain is 16 nucleotides in length.

[0639] In an embodiment, the targeting domain comprises, has, or consists of, 17 nucleotides (e.g., 17 consecutive nucleotides) having complementarity with the target domain, e.g., the targeting domain is 17 nucleotides in length.

[0640] In an embodiment, the targeting domain comprises, has, or consists of, 18 nucleotides (e.g., 18 consecutive nucleotides) having complementarity with the target domain, e.g., the targeting domain is 18 nucleotides in length.

[0641] In an embodiment, the targeting domain comprises, has, or consists of, 19 nucleotides (e.g., 19 consecutive nucleotides) having complementarity with the target domain, e.g., the targeting domain is 19 nucleotides in length.

[0642] In an embodiment, the targeting domain comprises, has, or consists of, 20 nucleotides (e.g., 20 consecutive nucleotides) having complementarity with the target domain, e.g., the targeting domain is 20 nucleotides in length.

[0643] In an embodiment, the targeting domain comprises, has, or consists of, 21 nucleotides (e.g., 21 consecutive nucleotides) having complementarity with the target domain, e.g., the targeting domain is 21 nucleotides in length.

[0644] In an embodiment, the targeting domain comprises, has, or consists of, 22 nucleotides (e.g., 22 consecutive nucleotides) having complementarity with the target domain, e.g., the targeting domain is 22 nucleotides in length.

[0645] In an embodiment, the targeting domain comprises, has, or consists of, 23 nucleotides (e.g., 23 consecutive nucleotides) having complementarity with the target domain, e.g., the targeting domain is 23 nucleotides in length.

[0646] In an embodiment, the targeting domain comprises, has, or consists of, 24 nucleotides (e.g., 24 consecutive nucleotides) having complementarity with the target domain, e.g., the targeting domain is 24 nucleotides in length.

[0647] In an embodiment, the targeting domain comprises, has, or consists of, 25 nucleotides (e.g., 25 consecutive nucleotides) having complementarity with the target domain, e.g., the targeting domain is 25 nucleotides in length.

[0648] In an embodiment, the targeting domain comprises, has, or consists of, 26 nucleotides (e.g., 26 consecutive nucleotides) having complementarity with the target domain, e.g., the targeting domain is 26 nucleotides in length.

[0649] In an embodiment, the targeting domain comprises, has, or consists of, 16 nucleotides (e.g., 16 consecutive nucleotides) having complementarity with the target domain, e.g., the targeting domain is 16 nucleotides in length; and the proximal and tail domain, when taken together, comprise at least 15, 18, 20, 25, 30, 31, 35, 40, 45, 49, 50, or 53 nucleotides.

[0650] In an embodiment, the targeting domain comprises, has, or consists of, 16 nucleotides (e.g., 16 consecutive nucleotides) having complementarity with the target domain, e.g., the targeting domain is 16 nucleotides in length; and there are at least 15, 18, 20, 25, 30, 31, 35, 40, 45, 49, 50, or 53 nucleotides 3′ to the last nucleotide of the second complementarity domain.

[0651] In an embodiment, the targeting domain comprises, has, or consists of, 16 nucleotides (e.g., 16 consecutive nucleotides) having complementarity with the target domain, e.g., the targeting domain is 16 nucleotides in length; and there are at least 16, 19, 21, 26, 31, 32, 36, 41, 46, 50, 51, or 54 nucleotides 3′ to the last nucleotide of the second complementarity domain that is complementary to its corresponding nucleotide of the first complementarity domain.

[0652] In an embodiment, the targeting domain comprises, has, or consists of, 17 nucleotides (e.g., 17 consecutive nucleotides) having complementarity with the target domain, e.g., the targeting domain is 17 nucleotides in length; and the proximal and tail domain, when taken together, comprise at least 15, 18, 20, 25, 30, 31, 35, 40, 45, 49, 50, or 53 nucleotides.

[0653] In an embodiment, the targeting domain comprises, has, or consists of, 17 nucleotides (e.g., 17 consecutive nucleotides) having complementarity with the target domain, e.g., the targeting domain is 17 nucleotides in length; and there are at least 15, 18, 20, 25, 30, 31, 35, 40, 45, 49, 50, or 53 nucleotides 3′ to the last nucleotide of the second complementarity domain.

[0654] In an embodiment, the targeting domain comprises, has, or consists of, 17 nucleotides (e.g., 17 consecutive nucleotides) having complementarity with the target domain, e.g., the targeting domain is 17 nucleotides in length; and there are at least 16, 19, 21, 26, 31, 32, 36, 41, 46, 50, 51, or 54 nucleotides 3′ to the last nucleotide of the second complementarity domain that is complementary to its corresponding nucleotide of the first complementarity domain.

[0655] In an embodiment, the targeting domain comprises, has, or consists of, 18 nucleotides (e.g., 18 consecutive nucleotides) having complementarity with the target domain, e.g., the targeting domain is 18 nucleotides in length; and the proximal and tail domain, when taken together, comprise at least 15, 18, 20, 25, 30, 31, 35, 40, 45, 49, 50, or 53 nucleotides.

[0656] In an embodiment, the targeting domain comprises, has, or consists of, 18 nucleotides (e.g., 18 consecutive nucleotides) having complementarity with the target domain, e.g., the targeting domain is 18 nucleotides in length; and there are at least 15, 18, 20, 25, 30, 31, 35, 40, 45, 49, 50, or 53 nucleotides 3′ to the last nucleotide of the second complementarity domain.

[0657] In an embodiment, the targeting domain comprises, has, or consists of, 18 nucleotides (e.g., 18 consecutive nucleotides) having complementarity with the target domain, e.g., the targeting domain is 18 nucleotides in length; and there are at least 16, 19, 21, 26, 31, 32, 36, 41, 46, 50, 51, or 54 nucleotides 3′ to the last nucleotide of the second complementarity domain that is complementary to its corresponding nucleotide of the first complementarity domain.

[0658] In an embodiment, the targeting domain comprises, has, or consists of, 19 nucleotides (e.g., 19 consecutive nucleotides) having complementarity with the target domain, e.g., the targeting domain is 19 nucleotides in length; and the proximal and tail domain, when taken together, comprise at least 15, 18, 20, 25, 30, 31, 35, 40, 45, 49, 50, or 53 nucleotides.

[0659] In an embodiment, the targeting domain comprises, has, or consists of, 19 nucleotides (e.g., 19 consecutive nucleotides) having complementarity with the target domain, e.g., the targeting domain is 19 nucleotides in length; and there are at least 15, 18, 20, 25, 30, 31, 35, 40, 45, 49, 50, or 53 nucleotides 3′ to the last nucleotide of the second complementarity domain.

[0660] In an embodiment, the targeting domain comprises, has, or consists of, 19 nucleotides (e.g., 19 consecutive nucleotides) having complementarity with the target domain, e.g., the targeting domain is 19 nucleotides in length; and there are at least 16, 19, 21, 26, 31, 32, 36, 41, 46, 50, 51, or 54 nucleotides 3′ to the last nucleotide of the second complementarity domain that is complementary to its corresponding nucleotide of the first complementarity domain.

[0661] In an embodiment, the targeting domain comprises, has, or consists of, 20 nucleotides (e.g., 20 consecutive nucleotides) having complementarity with the target domain, e.g., the targeting domain is 20 nucleotides in length; and the proximal and tail domain, when taken together, comprise at least 15, 18, 20, 25, 30, 31, 35, 40, 45, 49, 50, or 53 nucleotides.

[0662] In an embodiment, the targeting domain comprises, has, or consists of, 20 nucleotides (e.g., 20 consecutive nucleotides) having complementarity with the target domain, e.g., the targeting domain is 20 nucleotides in length; and there are at least 15, 18, 20, 25, 30, 31, 35, 40, 45, 49, 50, or 53 nucleotides 3′ to the last nucleotide of the second complementarity domain.

[0663] In an embodiment, the targeting domain comprises, has, or consists of, 20 nucleotides (e.g., 20 consecutive nucleotides) having complementarity with the target domain, e.g., the targeting domain is 20 nucleotides in length; and there are at least 16, 19, 21, 26, 31, 32, 36, 41, 46, 50, 51, or 54 nucleotides 3′ to the last nucleotide of the second complementarity domain that is complementary to its corresponding nucleotide of the first complementarity domain.

[0664] In an embodiment, the targeting domain comprises, has, or consists of, 21 nucleotides (e.g., 21 consecutive nucleotides) having complementarity with the target domain, e.g., the targeting domain is 21 nucleotides in length; and the proximal and tail domain, when taken together, comprise at least 15, 18, 20, 25, 30, 31, 35, 40, 45, 49, 50, or 53 nucleotides.

[0665] In an embodiment, the targeting domain comprises, has, or consists of, 21 nucleotides (e.g., 21 consecutive nucleotides) having complementarity with the target domain, e.g., the targeting domain is 21 nucleotides in length; and there are at least 15, 18, 20, 25, 30, 31, 35, 40, 45, 49, 50, or 53 nucleotides 3′ to the last nucleotide of the second complementarity domain.

[0666] In an embodiment, the targeting domain comprises, has, or consists of, 21 nucleotides (e.g., 21 consecutive nucleotides) having complementarity with the target domain, e.g., the targeting domain is 21 nucleotides in length; and there are at least 16, 19, 21, 26, 31, 32, 36, 41, 46, 50, 51, or 54 nucleotides 3′ to the last nucleotide of the second complementarity domain that is complementary to its corresponding nucleotide of the first complementarity domain.

[0667] In an embodiment, the targeting domain comprises, has, or consists of, 22 nucleotides (e.g., 22 consecutive nucleotides) having complementarity with the target domain, e.g., the targeting domain is 22 nucleotides in length; and the proximal and tail domain, when taken together, comprise at least 15, 18, 20, 25, 30, 31, 35, 40, 45, 49, 50, or 53 nucleotides.

[0668] In an embodiment, the targeting domain comprises, has, or consists of, 22 nucleotides (e.g., 22 consecutive nucleotides) having complementarity with the target domain, e.g., the targeting domain is 22 nucleotides in length; and there are at least 15, 18, 20, 25, 30, 31, 35, 40, 45, 49, 50, or 53 nucleotides 3′ to the last nucleotide of the second complementarity domain.

[0669] In an embodiment, the targeting domain comprises, has, or consists of, 22 nucleotides (e.g., 22 consecutive nucleotides) having complementarity with the target domain, e.g., the targeting domain is 22 nucleotides in length; and there are at least 16, 19, 21, 26, 31, 32, 36, 41, 46, 50, 51, or 54 nucleotides 3′ to the last nucleotide of the second complementarity domain that is complementary to its corresponding nucleotide of the first complementarity domain.

[0670] In an embodiment, the targeting domain comprises, has, or consists of, 23 nucleotides (e.g., 23 consecutive nucleotides) having complementarity with the target domain, e.g., the targeting domain is 23 nucleotides in length; and the proximal and tail domain, when taken together, comprise at least 15, 18, 20, 25, 30, 31, 35, 40, 45, 49, 50, or 53 nucleotides.

[0671] In an embodiment, the targeting domain comprises, has, or consists of, 23 nucleotides (e.g., 23 consecutive nucleotides) having complementarity with the target domain, e.g., the targeting domain is 23 nucleotides in length; and there are at least 15, 18, 20, 25, 30, 31, 35, 40, 45, 49, 50, or 53 nucleotides 3′ to the last nucleotide of the second complementarity domain.

[0672] In an embodiment, the targeting domain comprises, has, or consists of, 23 nucleotides (e.g., 23 consecutive nucleotides) having complementarity with the target domain, e.g., the targeting domain is 23 nucleotides in length; and there are at least 16, 19, 21, 26, 31, 32, 36, 41, 46, 50, 51, or 54 nucleotides 3′ to the last nucleotide of the second complementarity domain that is complementary to its corresponding nucleotide of the first complementarity domain.

[0673] In an embodiment, the targeting domain comprises, has, or consists of, 24 nucleotides (e.g., 24 consecutive nucleotides) having complementarity with the target domain, e.g., the targeting domain is 24 nucleotides in length; and the proximal and tail domain, when taken together, comprise at least 15, 18, 20, 25, 30, 31, 35, 40, 45, 49, 50, or 53 nucleotides.

[0674] In an embodiment, the targeting domain comprises, has, or consists of, 24 nucleotides (e.g., 24 consecutive nucleotides) having complementarity with the target domain, e.g., the targeting domain is 24 nucleotides in length; and there are at least 15, 18, 20, 25, 30, 31, 35, 40, 45, 49, 50, or 53 nucleotides 3′ to the last nucleotide of the second complementarity domain.

[0675] In an embodiment, the targeting domain comprises, has, or consists of, 24 nucleotides (e.g., 24 consecutive nucleotides) having complementarity with the target domain, e.g., the targeting domain is 24 nucleotides in length; and there are at least 16, 19, 21, 26, 31, 32, 36, 41, 46, 50, 51, or 54 nucleotides 3′ to the last nucleotide of the second complementarity domain that is complementary to its corresponding nucleotide of the first complementarity domain.

[0676] In an embodiment, the targeting domain comprises, has, or consists of, 25 nucleotides (e.g., 25 consecutive nucleotides) having complementarity with the target domain, e.g., the targeting domain is 25 nucleotides in length; and the proximal and tail domain, when taken together, comprise at least 15, 18, 20, 25, 30, 31, 35, 40, 45, 49, 50, or 53 nucleotides.

[0677] In an embodiment, the targeting domain comprises, has, or consists of, 25 nucleotides (e.g., 25 consecutive nucleotides) having complementarity with the target domain, e.g., the targeting domain is 25 nucleotides in length; and there are at least 15, 18, 20, 25, 30, 31, 35, 40, 45, 49, 50, or 53 nucleotides 3′ to the last nucleotide of the second complementarity domain.

[0678] In an embodiment, the targeting domain comprises, has, or consists of, 25 nucleotides (e.g., 25 consecutive nucleotides) having complementarity with the target domain, e.g., the targeting domain is 25 nucleotides in length; and there are at least 16, 19, 21, 26, 31, 32, 36, 41, 46, 50, 51, or 54 nucleotides 3′ to the last nucleotide of the second complementarity domain that is complementary to its corresponding nucleotide of the first complementarity domain.

[0679] In an embodiment, the targeting domain comprises, has, or consists of, 26 nucleotides (e.g., 26 consecutive nucleotides) having complementarity with the target domain, e.g., the targeting domain is 26 nucleotides in length; and the proximal and tail domain, when taken together, comprise at least 15, 18, 20, 25, 30, 31, 35, 40, 45, 49, 50, or 53 nucleotides.

[0680] In an embodiment, the targeting domain comprises, has, or consists of, 26 nucleotides (e.g., 26 consecutive nucleotides) having complementarity with the target domain, e.g., the targeting domain is 26 nucleotides in length; and there are at least 15, 18, 20, 25, 30, 31, 35, 40, 45, 49, 50, or 53 nucleotides 3′ to the last nucleotide of the second complementarity domain.

[0681] In an embodiment, the targeting domain comprises, has, or consists of, 26 nucleotides (e.g., 26 consecutive nucleotides) having complementarity with the target domain, e.g., the targeting domain is 26 nucleotides in length; and there are at least 16, 19, 21, 26, 31, 32, 36, 41, 46, 50, 51, or 54 nucleotides 3′ to the last nucleotide of the second complementarity domain that is complementary to its corresponding nucleotide of the first complementarity domain.

II. Methods for Designing gRNAs

[0682] Methods for designing gRNAs are described herein, including methods for selecting, designing and validating targeting domains. Exemplary targeting domains are also provided herein. Targeting domains discussed herein can be incorporated into the gRNAs described herein.

[0683] Methods for selection and validation of target sequences as well as off-target analyses are described, e.g., in Mali et al., 2013 SCIENCE 339(6121): 823-826; Hsu et al. NAT BIOTECHNOL, 31(9): 827-32; Fu et al., 2014 NAT BIOTECHNOL, doi: 10.1038/nbt.2808. PubMed PMID: 24463574; Heigwer et al., 2014 NAT METHODS 11(2):122-3. doi: 10.1038/nmeth.2812. PubMed PMID: 24481216; Bae et al., 2014 BIOINFORMATICS PubMed PMID: 24463181; Xiao A et al., 2014 BIOINFORMATICS PubMed PMID: 24389662.

[0684] In some embodiments, a software tool can be used to optimize the choice of gRNA within a user's target sequence, e.g., to minimize total off-target activity across the genome. Off target activity may be other than cleavage. For example, for each possible gRNA choice using S. pyogenes Cas9, software tools can identify all potential off-target sequences (preceding either NAG or NGG PAMs) across the genome that contain up to a certain number (e.g., 1, 2, 3, 4, 5, 6, 7, 8, 9, or 10) of mismatched base-pairs. The cleavage efficiency at each off-target sequence can be predicted, e.g., using an experimentally-derived weighting scheme. Each possible gRNA can then be ranked according to its total predicted off-target cleavage; the top-ranked gRNAs represent those that are likely to have the greatest on-target and the least off-target cleavage. Other functions, e.g., automated reagent design for gRNA vector construction, primer design for the on-target Surveyor assay, and primer design for high-throughput detection and quantification of off-target cleavage via next-generation sequencing, can also be included in the tool. Candidate gRNA molecules can be evaluated by art-known methods or as described in Section IV herein.

[0685] In some embodiments, gRNAs for use with S. pyogenes, S. aureus, and N. meningitidis Cas9s were identified using a DNA sequence searching algorithm, e.g., using a custom gRNA design software based on the public tool cas-offinder (Bae et al. Bioinformatics. 2014; 30(10): 1473-1475). Said custom gRNA design software scores guides after calculating their genomewide off-target propensity. Typically matches ranging from perfect matches to 7 mismatches are considered for guides ranging in length from 17 to 24. Once the off-target sites were computationally determined, an aggregate score was calculated for each guide and summarized in a tabular output using a web-interface. In addition to identifying potential gRNA sites adjacent to PAM sequences, the software also identifies all PAM adjacent sequences that differ by 1, 2, 3 or more nucleotides from the selected gRNA sites. Genomic DNA sequence for each gene were obtained from the UCSC Genome browser and sequences were screened for repeat elements using the publicly available RepeatMasker program. RepeatMasker searches input DNA sequences for repeated elements and regions of low complexity. The output is a detailed annotation of the repeats present in a given query sequence.

[0686] Following identification, gRNAs were ranked into tiers based on on one or more of their distance to the target site, their orthogonality and presence of a 5′ G (based on identification of close matches in the human genome containing a relavant PAM, e.g., in the case of S. pyogenes, a NGG PAM, in the case of S. aureus, NNGRR (e.g, a NNGRRT or NNGRRV) PAM, and in the case of N. meningtidis, a NNNNGATT or NNNNGCTT PAM). Orthogonality refers to the number of sequences in the human genome that contain a minimum number of mismatches to the target sequence. A “high level of orthogonality” or “good orthogonality” may, for example, refer to 20-mer targeting domains that have no identical sequences in the human genome besides the intended target, nor any sequences that contain one or two mismatches in the target sequence. Targeting domains with good orthogonality are selected to minimize off-target DNA cleavage. It is to be understood that this is a non-limiting example and that a variety of strategies could be utilized to identify gRNAs for use with S. pyogenes, S. aureus and N. meningitidis or other Cas9 enzymes.

[0687] Two design and tiering strategies were utilized to identify exemplary gRNAs for use with S. pyogenes, S. aureus and N. meningitidis Cas9 enzymes.

[0688] First Strategy for Designing and Tiering gRNAs

[0689] In the first strategy, gRNAs for use with the S. pyogenes Cas9 were identified using the publicly available web-based ZiFiT server (Fu et al., Improving CRISPR-Cas nuclease specificity using truncated guide RNAs. Nat Biotechnol. 2014 Jan. 26. doi: 10.1038/nbt.2808. PubMed PMID: 24463574, for the original references see Sander et al., 2007, NAR 35:W599-605; Sander et al., 2010, NAR 38: W462-8). In addition to identifying potential gRNA sites adjacent to PAM sequences, the software also identifies all PAM adjacent sequences that differ by 1, 2, 3 or more nucleotides from the selected gRNA sites. Genomic DNA sequences for each gene were obtained from the UCSC Genome browser and sequences were screened for repeat elements using the publicly available Repeat-Masker program. RepeatMasker searches input DNA sequences for repeated elements and regions of low complexity. The output is a detailed annotation of the repeats present in a given query sequence. Following identification, gRNAs for use with a S. pyogenes Cas9 were ranked into 5 tiers.

[0690] The targeting domains for first tier gRNA molecules were selected based on their distance to the target site, their orthogonality and presence of a 5′ G (based on the ZiFiT identification of close matches in the human genome containing an NGG PAM). Orthogonality refers to the number of sequences in the human genome that contain a minimum number of mismatches to the target sequence. A “high level of orthogonality” or “good orthogonality” may, for example, refer to 20-mer gRNAs that have no identical sequences in the human genome nor any sequences that contain one or two mismatches in the target sequence. Targeting domains with good orthogonality are selected to miminize off-target DNA cleavage. For all targets, both 17-mer and 20-mer gRNAs were designed. gRNAs were also selected both for single-gRNA nuclease cutting and for the dual gRNA nickase strategy. Criteria for selecting gRNAs and the determination for which gRNAs can be used for which strategy is based on several considerations:

[0691] gRNAs were identified for both single-gRNA nuclease cleavage and for a dual-gRNA paired “nickase” strategy. Criteria for selecting gRNAs and the determination for which gRNAs can be used for the dual-gRNA paired “nickase” strategy is based on two considerations:
[0692] 1. gRNA pairs should be oriented on the DNA such that PAMs are facing out and cutting with the D10A Cas9 nickase will result in 5′ overhangs.
[0693] 2. An assumption that cleaving with dual nickase pairs will result in deletion of the entire intervening sequence at a reasonable frequency. However, cleaving with dual nickase pairs canalso often result in indel mutations at the site of only one of the gRNAs. Candidate pair members can be tested for how efficiently they remove the entire sequence versus just causing indel mutations at the site of one gRNA.

[0694] The targeting domains for first tier gRNA molecules were selected based on (1) a reasonable distance to the target position, e.g., within the first 500 bp of coding sequence downstream of start codon, (2) a high level of orthogonality, and (3) the presence of a 5′ G. For selection of second tier gRNAs, the requirement for a 5′G was removed, but the distance restriction was required and a high level of orthogonality was required. Third tier selection used the same distance restriction and the requirement for a 5′G, but removed the requirement of good orthogonality. Fourth tier selection used the same distance restriction but remove the requirement of good orthogonality and start with a 5′G. Fifth tier selection removed the requirement of good orthogonality and a 5′G, and a longer sequence (e.g., the rest of the coding sequence, e.g., additional 500 bp upstream or downstream to the transcription target site) was scanned. Note that tiers are non-inclusive (each gRNA is listed only once). In certain instances, no gRNA was identified based on the criteria of the particular tier.

[0695] As discussed above, gRNAs were identified for single-gRNA nuclease cleavage as well as for a dual-gRNA paired “nickase” strategy, as indicated.

[0696] gRNAs for use with the N. meningitidis and S. aureus Cas9s were identified manually by scanning genomic DNA sequence for the presence of PAM sequences. These gRNAs were separated into two tiers. For first tier gRNAs, targeting domains were selected within the first 500 bp of coding sequence downstream of start codon. For second tier gRNAs, targeting domains were selected within the remaining coding sequence (downstream of the first 500 bp). Note that tiers are non-inclusive (each gRNA is listed only once for the strategy). In certain instances, no gRNA was identified based on the criteria of the particular tier.

[0697] Exemplary Targeting Domains (First Strategy) Below are tables for providing exemplary targeting domains according to the first design and tiering strategy. As an example, for S. pyogenes, S. aureus and N. meningtidis targets, 17-mer, or 20-mer targeting domains were designed.

[0698] Table 1A provides targeting domains for knocking out the FAS gene using S. pyogenes Cas9 selected according to first tier parameters. The targeting domains bind within the first 500 bp of coding sequence downstream of start codon, have good orthogonality, and start with G. It is contemplated herein that the targeting domain hybridizes to the target domain through complementary base pairing. Any of the targeting domains in the table can be used with a S. pyogenes Cas9 molecule that generates a double stranded break (Cas9 nuclease) or a single-stranded break (Cas9 nickase). In an embodiment, dual targeting is used to create two nicks on opposite DNA strands by using S. pyogenes Cas9 nickases with two targeting domains that are complementary to opposite DNA strands, e.g., a gRNA comprising any minus strand targeting domain may be paired with any gRNA comprising a plus strand targeting domain provided that the two gRNAs are oriented on the DNA such that PAMs face outward and the distance between the 5′ ends of the gRNAs is 0-50 bp. In an embodiment, two gRNAs are used to target two Cas9 nucleases or two Cas9 nickases, e.g., a gRNA with a targeting domain from Group A can be paired with a gRNA with any targeting domain from Group B as shown in Table 1.

TABLE 1

| Group A | Group B |
|---|---|
| CACUUGGGCAUUAACACUUU | GUGACUGACAUCAACUCCAA |
| (SEQ ID NO: 8655); | (SEQ ID NO: 8648); |
| UUGGGCAUUAACACUUU | GUUGAGACUCAGAACUUGGA |
| (SEQ ID NO: 8735) | (SEQ ID NO: 8650); |
| | ACUGACAUCAACUCCAA |
| | (SEQ ID NO: 8686); |
| | GAGACUCAGAACUUGGA |
| | (SEQ ID NO: 8668) |

TABLE 1A
1st Tier

Targeting domains for knocking out the FAS gene using
S. pyogenes Cas9 selected according to first tier
parameters are presented in SEQ ID NO: 8640-8651.

[0699] Table 1B provides targeting domains for knocking out the FAS gene using S. pyogenes Cas9 selected according to second tier parameters. The targeting domains bind within the first 500 bp of coding sequence downstream of start codon, have good orthogonality, and do not start with G. It is contemplated herein that the targeting domain hybridizes to the target domain through complementary base pairing. Any of the targeting domains in the table can be used with a S. pyogenes Cas9 molecule that generates a double stranded break (Cas9 nuclease) or a single-stranded break (Cas9 nickase). In an embodiment, dual targeting is used to create two nicks on opposite DNA strands by using S. pyogenes Cas9 nickases with two targeting domains that are complementary to opposite DNA strands, e.g., a gRNA comprising any minus strand targeting domain may be paired with any gRNA comprising a plus strand targeting domain provided that the two gRNAs are oriented on the DNA such that PAMs face outward and the distance between the 5′ ends of the gRNAs is 0-50 bp.

TABLE 1B
2nd Tier

Targeting domains for knocking out the FAS gene using
S. pyogenes Cas9 selected according to second
tier parameters are presented in SEQ ID NO: 8652-8665.

[0700] Table 1C provides targeting domains for knocking out the FAS gene using S. pyogenes Cas9 selected according to third tier parameters. The targeting domains bind within the first 500 bp of coding sequence downstream of start codon, and start with G. It is contemplated herein that the targeting domain hybridizes to the target domain through complementary base pairing Any of the targeting domains in the table can be used with a S. pyogenes Cas9 molecule that generates a double stranded break (Cas9 nuclease) or a single-stranded break (Cas9 nickase). In an embodiment, dual targeting is used to create two nicks on opposite DNA strands by using S. pyogenes Cas9 nickases with two targeting domains that are complementary to opposite DNA strands, e.g., a gRNA comprising any minus strand targeting domain may be paired with any gRNA comprising a plus strand targeting domain provided that the two gRNAs are oriented on the DNA such that PAMs face outward and the distance between the 5′ ends of the gRNAs is 0-50 bp.

TABLE 1C
3rd Tier

Targeting domains for knocking out the FAS gene using
S. pyogenes Cas9 selected according to third
tier parameters are presented in SEQ ID NO: 8666-8681.

[0701] Table 1D provides targeting domains for knocking out the FAS gene using S. pyogenes Cas9 selected according to fourth tier parameters. The targeting domains bind within the first 500 bp of coding sequence downstream of start codon, and do not start with G. It is contemplated herein that the targeting domain hybridizes to the target domain through complementary base pairing. Any of the targeting domains in the table can be used with a S. pyogenes Cas9 molecule that generates a double stranded break (Cas9 nuclease) or a single-stranded break (Cas9 nickase). In an embodiment, dual targeting is used to create two nicks on opposite DNA strands by using S. pyogenes Cas9 nickases with two targeting domains that are complementary to opposite DNA strands, e.g., a gRNA comprising any minus strand targeting domain may be paired with any gRNA comprising a plus strand targeting domain provided that the two gRNAs are oriented on the DNA such that PAMs face outward and the distance between the 5′ ends of the gRNAs is 0-50 bp.

TABLE 1D
4th Tier

Targeting domains for knocking out the FAS gene using
S. pyogenes Cas9 selected according to fourth
tier parameters are presented in SEQ ID NO: 8682-8737.

[0702] Table 1E provides targeting domains for knocking out the FAS gene using S. pyogenes Cas9 selected according to fifth tier parameters. The targeting domains bind within the remaining coding sequence (downstream of the first 500 bp). It is contemplated herein that the targeting domain hybridizes to the target domain through complementary base pairing. Any of the targeting domains in the table can be used with a S. pyogenes Cas9 molecule that generates a double stranded break (Cas9 nuclease) or a single-stranded break (Cas9 nickase). In an embodiment, dual targeting is used to create two nicks on opposite DNA strands by using S. pyogenes Cas9 nickases with two targeting domains that are complementary to opposite DNA strands, e.g., a gRNA comprising any minus strand targeting domain may be paired with any gRNA comprising a plus strand targeting domain provided that the two gRNAs are oriented on the DNA such that PAMs face outward and the distance between the 5′ ends of the gRNAs is 0-50 bp.

TABLE 1E
5th Tier

Targeting domains for knocking out the FAS gene using
S. pyogenes Cas9 selected according to fifth tier
parameters are presented in SEQ ID NO: 8738-8859.

[0703] Table 1F provides targeting domains for knocking out the FAS gene using S. aureus Cas9 selected according to first tier parameters. The targeting domains bind within the first 500 bp of coding sequence downstream of start codon. It is contemplated herein that the targeting domain hybridizes to the target domain through complementary base pairing. Any of the targeting domains in the table can be used with a S. aureus Cas9 molecule that generates a double stranded break (Cas9 nuclease) or a single-stranded break (Cas9 nickase). In an embodiment, dual targeting is used to create two nicks on opposite DNA strands by using S. aureus Cas9 nickases with two targeting domains that are complementary to opposite DNA strands, e.g., a gRNA comprising any minus strand targeting domain may be paired with any gRNA comprising a plus strand targeting domain provided that the two gRNAs are oriented on the DNA such that PAMs face outward and the distance between the 5′ ends of the gRNAs is 0-50 bp.

TABLE 1F
1st Tier

Targeting domains for knocking out the FAS gene using
S. aureus Cas9 selected according to first tier
parameters are presented in SEQ ID NO: 8860-8997.

[0704] Table 1G provides targeting domains for knocking out the FAS gene using S. aureus Cas9 selected according to second tier parameters. The targeting domains bind within the remaining coding sequence (downstream of the first 500 bp). It is contemplated herein that the targeting domain hybridizes to the target domain through complementary base pairing. Any of the targeting domains in the table can be used with a S. aureus Cas9 molecule that generates a double stranded break (Cas9 nuclease) or a single-stranded break (Cas9 nickase). In an embodiment, dual targeting is used to create two nicks on opposite DNA strands by using S. aureus Cas9 nickases with two targeting domains that are complementary to opposite DNA strands, e.g., a gRNA comprising any minus strand targeting domain may be paired with any gRNA comprising a plus strand targeting domain provided that the two gRNAs are oriented on the DNA such that PAMs face outward and the distance between the 5′ ends of the gRNAs is 0-50 bp.

TABLE 1G
2nd Tier

Targeting domains for knocking out the FAS gene using
S. aureus Cas9 selected according to second tier
parameters are presented in SEQ ID NO: 8998-9213.

[0705] Table 1H provides targeting domains for knocking out the FAS gene using N. meningitidis Cas9 selected according to first tier parameters. The targeting domains bind within the first 500 bp of coding sequence downstream of start codon. It is contemplated herein that the targeting domain hybridizes to the target domain through complementary base pairing. Any of the targeting domains in the table can be used with a N. meningitidis Cas9 molecule that generates a double stranded break (Cas9 nuclease) or a single-stranded break (Cas9 nickase). In an embodiment, dual targeting is used to create two nicks on opposite DNA strands by using N. meningitidis Cas9 nickases with two targeting domains that are complementary to opposite DNA strands, e.g., a gRNA comprising any minus strand targeting domain may be paired with any gRNA comprising a plus strand targeting domain provided that the two gRNAs are oriented on the DNA such that PAMs face outward and the distance between the 5′ ends of the gRNAs is 0-50 bp.

TABLE 1H
1st Tier

Targeting domains for knocking out the FAS gene using
N. meningitidis meningitidis Cas9 selected according
to first tier parameters are presented in SEQ ID NO: 9214-9221.

[0706] Table 11 provides targeting domains for knocking out the FAS gene using N. meningitidis Cas9 selected according to second tier parameters. The targeting domains bind within the remaining coding sequence (downstream of the first 500 bp). It is contemplated herein that the targeting domain hybridizes to the target domain through complementary base pairing. Any of the targeting domains in the table can be used with a N. meningitidis Cas9 molecule that generates a double stranded break (Cas9 nuclease) or a single-stranded break (Cas9 nickase). In an embodiment, dual targeting is used to create two nicks on opposite DNA strands by using N. meningitidis Cas9 nickases with two targeting domains that are complementary to opposite DNA strands, e.g., a gRNA comprising any minus strand targeting domain may be paired with any gRNA comprising a plus strand targeting domain provided that the two gRNAs are oriented on the DNA such that PAMs face outward and the distance between the 5′ ends of the gRNAs is 0-50 bp.

TABLE 1I
2nd Tier

Targeting domains for knocking out the FAS gene using
N. meningitidis meningitidis Cas9 selected according
to second tier parameters are presented in SEQ ID NO: 9222-9235.

[0707] Table 2A provides targeting domains for knocking down the FAS gene using S. pyogenes Cas9 selected according to first tier parameters. The targeting domains bind within the 500 bp upstream and downstream of transcription start site, have good orthogonality, and start with G. It is contemplated herein that the targeting domain hybridizes to the target domain through complementary base pairing. Any of the targeting domains in the table can be used with a S. pyogenes eiCas9 molecule, e.g., an eiCas9 fusion protein, as described herein.

TABLE 2A
1st Tier

Targeting domains for knocking out the FAS gene using
S. pyogenes Cas9 selected according to first tier
parameters are presented in SEQ ID NO: 9236-9279.

[0708] Table 2B provides targeting domains for knocking down the FAS gene using S. pyogenes Cas9 selected according to second tier parameters. The targeting domains bind within the 500 bp upstream and downstream of transcription start site, have good orthogonality, and do not start with G. It is contemplated herein that the targeting domain hybridizes to the target domain through complementary base pairing. Any of the targeting domains in the table can be used with a S. pyogenes eiCas9 molecule, e.g., an eiCas9 fusion protein, as described herein.

TABLE 2B
2nd Tier

Targeting domains for knocking out the FAS gene using
S. pyogenes Cas9 selected according to second
tier parameters are presented in SEQ ID NO: 9280-9351.

[0709] Table 2C provides targeting domains for knocking down the FAS gene using S. pyogenes Cas9 selected according to third tier parameters. The targeting domains bind within the 500 bp upstream and downstream of transcription start site, and start with G. It is contemplated herein that the targeting domain hybridizes to the target domain through complementary base pairing. Any of the targeting domains in the table can be used with a S. pyogenes eiCas9 molecule, e.g., an eiCas9 fusion protein, as described herein.

TABLE 2C
3rd Tier

Targeting domains for knocking out the FAS gene using
S. pyogenes Cas9 selected according to third tier
parameters are presented in SEQ ID NO: 9352-9442.

[0710] Table 2D provides targeting domains for knocking down the FAS gene using S. pyogenes Cas9 selected according to fourth tier parameters. The targeting domains bind within the 500 bp upstream and downstream of transcription start site, and do not start with G. It is contemplated herein that the targeting domain hybridizes to the target domain through complementary base pairing. Any of the targeting domains in the table can be used with a S. pyogenes eiCas9 molecule, e.g., an eiCas9 fusion protein, as described herein.

TABLE 2D
4th Tier

Targeting domains for knocking out the FAS gene using S. pyogenes Cas9
selected according to fourth tier parameters are presented in SEQ ID NO:
9443-9617.

[0711] Table 2E provides targeting domains for knocking down the FAS gene using S. pyogenes Cas9 selected according to fifth tier parameters. The targeting domains bind within the additional 500 bp upstream and downstream of transcription start site (extending to 1 kb up and downstream of the transcription start site). It is contemplated herein that the targeting domain hybridizes to the target domain through complementary base pairing. Any of the targeting domains in the table can be used with a S. pyogenes eiCas9 molecule, e.g., an eiCas9 fusion protein, as described herein.

TABLE 2E
5th Tier

Targeting domains for knocking out the FAS gene using S. pyogenes Cas9
selected according to fifth tier parameters are presented in SEQ ID NO:
9618-9959.

[0712] Table 2F provides targeting domains for knocking down the FAS gene using S. aureus Cas9 selected according to first tier parameters. The targeting domains bind within 500 bp upstream and downstream of transcription start site. It is contemplated herein that the targeting domain hybridizes to the target domain through complementary base pairing. Any of the targeting domains in the table can be used with a S. aureus eiCas9 molecule, e.g., an eiCas9 fusion protein, as described herein.

TABLE 2F
1st Tier

Targeting domains for knocking out the FAS gene using S. aureus Cas9
selected according to first tier parameters are presented in SEQ ID NO:
9960-10369.

[0713] Table 2G provides targeting domains for knocking down the FAS gene using S. aureus Cas9 selected according to second tier parameters. The targeting domains bind within additional 500 bp upstream and downstream of transcription start site (extending to 1 kb up and downstream of the transcription start site). It is contemplated herein that the targeting domain hybridizes to the target domain through complementary base pairing. Any of the targeting domains in the table can be used with a S. aureus eiCas9 molecule, e.g., an eiCas9 fusion protein, as described herein.

TABLE 2G
2nd Tier

Targeting domains for knocking out the FAS gene using S. aureus Cas9
selected according to second tier parameters are presented in SEQ ID NO:
10370-10745.

[0714] Table 2H provides targeting domains for knocking down the FAS gene using N. meningitidis Cas9 selected according to first tier parameters. The targeting domains bind within 500 bp upstream and downstream of transcription start site. It is contemplated herein that the targeting domain hybridizes to the target domain through complementary base pairing. Any of the targeting domains in the table can be used with a N. meningitidis eiCas9 molecule, e.g., an eiCas9 fusion protein, as described herein.

TABLE 2H
1st Tier

Targeting domains for knocking out the FAS gene using S. meningitidis
Cas9 selected according to first tier parameters are presented in SEQ ID
NO: 10746-10753.

[0715] Table 21 provides targeting domains for knocking down the FAS gene using N. meningitidis Cas9 selected according to second tier parameters. The targeting domains bind within additional 500 bp upstream and downstream of transcription start site (extending to 1 kb up and downstream of the transcription start site). It is contemplated herein that the targeting domain hybridizes to the target domain through complementary base pairing. Any of the targeting domains in the table can be used with a N. meningitidis eiCas9 molecule, e.g., an eiCas9 fusion protein, as described herein.

TABLE 2I
2nd Tier

Targeting domains for knocking out the FAS gene using S. meningitidis
Cas9 selected according to first tier parameters are presented in SEQ ID
NO: 10754-10759.

[0716] Table 3A provides targeting domains for knocking out the BID gene using S. pyogenes Cas9 selected according to first tier parameters. The targeting domains bind within the first 500 bp of coding sequence downstream of start codon, have good orthogonality, and start with G. It is contemplated herein that the targeting domain hybridizes to the target domain through complementary base pairing. Any of the targeting domains in the table can be used with a S. pyogenes Cas9 molecule that generates a double stranded break (Cas9 nuclease) or a single-stranded break (Cas9 nickase). In an embodiment, dual targeting is used to create two nicks on opposite DNA strands by using S. pyogenes Cas9 nickases with two targeting domains that are complementary to opposite DNA strands, e.g., a gRNA comprising any minus strand targeting domain may be paired with any gRNA comprising a plus strand targeting domain provided that the two gRNAs are oriented on the DNA such that PAMs face outward and the distance between the 5′ ends of the gRNAs is 0-50 bp. In an embodiment, two gRNAs are used to target two Cas9 nucleases or two Cas9 nickases, e.g., a gRNA with a targeting domain from Group A can be paired with a gRNA with any targeting domain from Group B as shown in Table 3 or a gRNA with a targeting domain from Group C can be paired with a gRNA with any targeting domain from Group D as shown in Table 3.

TABLE 3

| Group A | Group B |
|---|---|
| GUCCCAGUGGCGACCUGGAA | UCGGAGCUGCCGCGCUGCCC |
| (SEQ ID NO: 10779); | (SEQ ID NO: 10833) |
| GUGUCCCAGUGGCGACC | |
| (SEQ ID NO: 10783); | |
| GGUUCACAGUGUCCCAG | |
| (SEQ ID NO: 10777) | |
| Group C | Group D |
| GCUCAUCGUAGCCCUCCCAC | CGCAGCAGCCACUCCCGCUU |
| (SEQ ID NO: 10768); | (SEQ ID NO: 10815); |
| CAUCGUAGCCCUCCCAC | AGCAGCCACUCCCGCUU |
| (SEQ ID NO: 10803) | (SEQ ID NO: 10792) |

TABLE 3A
1st Tier

Targeting domains for knocking out the BID gene using S. pyogenes Cas9
selected according to first tier parameters are presented in SEQ ID NO:
10760-10783.

[0717] Table 3B provides targeting domains for knocking out the BID gene using S. pyogenes Cas9 selected according to second tier parameters. The targeting domains bind within the first 500 bp of coding sequence downstream of start codon, have good orthogonality, and do not start with G. It is contemplated herein that the targeting domain hybridizes to the target domain through complementary base pairing. Any of the targeting domains in the table can be used with a S. pyogenes Cas9 molecule that generates a double stranded break (Cas9 nuclease) or a single-stranded break (Cas9 nickase). In an embodiment, dual targeting is used to create two nicks on opposite DNA strands by using S. pyogenes Cas9 nickases with two targeting domains that are complementary to opposite DNA strands, e.g., a gRNA comprising any minus strand targeting domain may be paired with any gRNA comprising a plus strand targeting domain provided that the two gRNAs are oriented on the DNA such that PAMs face outward and the distance between the 5′ ends of the gRNAs is 0-50 bp.

TABLE 3B
2nd Tier

Targeting domains for knocking out the BID gene using S. pyogenes Cas9
selected according to second tier parameters are presented in SEQ ID NO:
10784-10839.

[0718] Table 3C provides targeting domains for knocking out the BID gene using S. pyogenes Cas9 selected according to third tier parameters. The targeting domains bind within the first 500 bp of coding sequence downstream of start codon, and start with G. It is contemplated herein that the targeting domain hybridizes to the target domain through complementary base pairing. Any of the targeting domains in the table can be used with a S. pyogenes Cas9 molecule that generates a double stranded break (Cas9 nuclease) or a single-stranded break (Cas9 nickase). In an embodiment, dual targeting is used to create two nicks on opposite DNA strands by using S. pyogenes Cas9 nickases with two targeting domains that are complementary to opposite DNA strands, e.g., a gRNA comprising any minus strand targeting domain may be paired with any gRNA comprising a plus strand targeting domain provided that the two gRNAs are oriented on the DNA such that PAMs face outward and the distance between the 5′ ends of the gRNAs is 0-50 bp.

TABLE 3C
3rd Tier

Targeting domains for knocking out the BID gene using S. pyogenes Cas9
selected according to third tier parameters are presented in SEQ ID NO:
10840-10898.

[0719] Table 3D provides targeting domains for knocking out the BID gene using S. pyogenes Cas9 selected according to fourth tier parameters. The targeting domains bind within the first 500 bp of coding sequence downstream of start codon, and do not start with G. It is contemplated herein that the targeting domain hybridizes to the target domain through complementary base pairing. Any of the targeting domains in the table can be used with a S. pyogenes Cas9 molecule that generates a double stranded break (Cas9 nuclease) or a single-stranded break (Cas9 nickase). In an embodiment, dual targeting is used to create two nicks on opposite DNA strands by using S. pyogenes Cas9 nickases with two targeting domains that are complementary to opposite DNA strands, e.g., a gRNA comprising any minus strand targeting domain may be paired with any gRNA comprising a plus strand targeting domain provided that the two gRNAs are oriented on the DNA such that PAMs face outward and the distance between the 5′ ends of the gRNAs is 0-50 bp.

TABLE 3D
4th Tier

Targeting domains for knocking out the BID gene using S. pyogenes Cas9
selected according to fourth tier parameters are presented in SEQ ID NO:
10899-11033.

[0720] Table 3E provides targeting domains for knocking out the BID gene using S. pyogenes Cas9 selected according to fifth tier parameters. The targeting domains bind within the remaining coding sequence (downstream of the first 500 bp). It is contemplated herein that the targeting domain hybridizes to the target domain through complementary base pairing. Any of the targeting domains in the table can be used with a S. pyogenes Cas9 molecule that generates a double stranded break (Cas9 nuclease) or a single-stranded break (Cas9 nickase). In an embodiment, dual targeting is used to create two nicks on opposite DNA strands by using S. pyogenes Cas9 nickases with two targeting domains that are complementary to opposite DNA strands, e.g., a gRNA comprising any minus strand targeting domain may be paired with any gRNA comprising a plus strand targeting domain provided that the two gRNAs are oriented on the DNA such that PAMs face outward and the distance between the 5′ ends of the gRNAs is 0-50 bp.

TABLE 3E
5th Tier

Targeting domains for knocking out the BID gene using S. pyogenes Cas9
selected according to fifth tier parameters are presented in SEQ ID NO:
11034-11115.

[0721] Table 3F provides targeting domains for knocking out the BID gene using S. aureus Cas9 selected according to first tier parameters. The targeting domains bind within the first 500 bp of coding sequence downstream of start codon. It is contemplated herein that the targeting domain hybridizes to the target domain through complementary base pairing. Any of the targeting domains in the table can be used with a S. aureus Cas9 molecule that generates a double stranded break (Cas9 nuclease) or a single-stranded break (Cas9 nickase). In an embodiment, dual targeting is used to create two nicks on opposite DNA strands by using S. aureus Cas9 nickases with two targeting domains that are complementary to opposite DNA strands, e.g., a gRNA comprising any minus strand targeting domain may be paired with any gRNA comprising a plus strand targeting domain provided that the two gRNAs are oriented on the DNA such that PAMs face outward and the distance between the 5′ ends of the gRNAs is 0-50 bp.

TABLE 3F
1st Tier

Targeting domains for knocking out the BID gene using S. aureus Cas9
selected according to first tier parameters are presented in SEQ ID NO:
11116-11367.

[0722] Table 3G provides targeting domains for knocking out the BID gene using S. aureus Cas9 selected according to second tier parameters. The targeting domains bind within the remaining coding sequence (downstream of the first 500 bp). It is contemplated herein that the targeting domain hybridizes to the target domain through complementary base pairing. Any of the targeting domains in the table can be used with a S. aureus Cas9 molecule that generates a double stranded break (Cas9 nuclease) or a single-stranded break (Cas9 nickase). In an embodiment, dual targeting is used to create two nicks on opposite DNA strands by using S. aureus Cas9 nickases with two targeting domains that are complementary to opposite DNA strands, e.g., a gRNA comprising any minus strand targeting domain may be paired with any gRNA comprising a plus strand targeting domain provided that the two gRNAs are oriented on the DNA such that PAMs face outward and the distance between the 5′ ends of the gRNAs is 0-50 bp.

TABLE 3G
2nd Tier

Targeting domains for knocking out the BID gene using S. aureus Cas9
selected according to second tier parameters are presented in SEQ ID NO:
11368-11435.

[0723] Table 3H provides targeting domains for knocking out the BID gene using N. meningitidis Cas9 selected according to first tier parameters. The targeting domains bind within the first 500 bp of coding sequence downstream of start codon. It is contemplated herein that the targeting domain hybridizes to the target domain through complementary base pairing. Any of the targeting domains in the table can be used with a N. meningitidis Cas9 molecule that generates a double stranded break (Cas9 nuclease) or a single-stranded break (Cas9 nickase). In an embodiment, dual targeting is used to create two nicks on opposite DNA strands by using N. meningitidis Cas9 nickases with two targeting domains that are complementary to opposite DNA strands, e.g., a gRNA comprising any minus strand targeting domain may be paired with any gRNA comprising a plus strand targeting domain provided that the two gRNAs are oriented on the DNA such that PAMs face outward and the distance between the 5′ ends of the gRNAs is 0-50 bp.

TABLE 3H
1st Tier

Targeting domains for knocking out the BID gene using
N. meningitidismeningitidis Cas9 selected according to first tier
parameters are presented in SEQ ID NO: 11436-11439.

[0724] Table 4A provides targeting domains for knocking down the BID gene using S. pyogenes Cas9 selected according to first tier parameters. The targeting domains bind within the 500 bp upstream and downstream of transcription start site, have good orthogonality, and start with G. It is contemplated herein that the targeting domain hybridizes to the target domain through complementary base pairing. Any of the targeting domains in the table can be used with a S. pyogenes eiCas9 molecule, e.g., an eiCas9 fusion protein, as described herein.

TABLE 4A
1st Tier

Targeting domains for knocking down the BID gene using S. pyogenes
Cas9 selected according to first tier parameters are presented in SEQ ID
NO: 11440-11486.

[0725] Table 4B provides targeting domains for knocking down the BID gene using S. pyogenes Cas9 selected according to second tier parameters. The targeting domains bind within the 500 bp upstream and downstream of transcription start site, have good orthogonality, and do not start with G. It is contemplated herein that the targeting domain hybridizes to the target domain through complementary base pairing. Any of the targeting domains in the table can be used with a S. pyogenes eiCas9 molecule, e.g., an eiCas9 fusion protein, as described herein.

TABLE 4B
2nd Tier

Targeting domains for knocking down the BID gene using S. pyogenes
Cas9 selected according to second tier parameters are presented in
SEQ ID NO: 11487-11559.

[0726] Table 4C provides targeting domains for knocking down the BID gene using S. pyogenes Cas9 selected according to third tier parameters. The targeting domains bind within the 500 bp upstream and downstream of transcription start site, and start with G. It is contemplated herein that the targeting domain hybridizes to the target domain through complementary base pairing. Any of the targeting domains in the table can be used with a S. pyogenes eiCas9 molecule, e.g., an eiCas9 fusion protein, as described herein.

TABLE 4C
3rd Tier

Targeting domains for knocking down the BID gene using S. pyogenes
Cas9 selected according to third tier parameters are presented in
SEQ ID NO: 11560-11721.

[0727] Table 4D provides targeting domains for knocking down the BID gene using S. pyogenes Cas9 selected according to fourth tier parameters. The targeting domains bind within the 500 bp upstream and downstream of transcription start site, and do not start with G. It is contemplated herein that the targeting domain hybridizes to the target domain through complementary base pairing. Any of the targeting domains in the table can be used with a S. pyogenes eiCas9 molecule, e.g., an eiCas9 fusion protein, as described herein.

TABLE 4D
4th Tier

Targeting domains for knocking down the BID gene using S. pyogenes
Cas9 selected according to fourth tier parameters are presented in
SEQ ID NO: 11722-11983.

[0728] Table 4E provides targeting domains for knocking down the BID gene using S. pyogenes Cas9 selected according to fifth tier parameters. The targeting domains bind within the additional 500 bp upstream and downstream of transcription start site (extending to 1 kb up and downstream of the transcription start site). It is contemplated herein that the targeting domain hybridizes to the target domain through complementary base pairing. Any of the targeting domains in the table can be used with a S. pyogenes eiCas9 molecule, e.g., an eiCas9 fusion protein, as described herein.

TABLE 4E
5th Tier

Targeting domains for knocking down the BID gene using S. pyogenes
Cas9 selected according to fifth tier parameters are presented in
SEQ ID NO: 11984-12411.

[0729] Table 4F provides targeting domains for knocking down the BID gene using S. aureus Cas9 selected according to first tier parameters. The targeting domains bind within 500 bp upstream and downstream of transcription start site. It is contemplated herein that the targeting domain hybridizes to the target domain through complementary base pairing. Any of the targeting domains in the table can be used with a S. aureus eiCas9 molecule, e.g., an eiCas9 fusion protein, as described herein.

TABLE 4F
1st Tier

Targeting domains for knocking down the BID gene using S. aureus
Cas9 selected according to first tier parameters are presented in
SEQ ID NO: 12412-12841.

[0730] Table 4G provides targeting domains for knocking down the BID gene using S. aureus Cas9 selected according to second tier parameters. The targeting domains bind within additional 500 bp upstream and downstream of transcription start site (extending to 1 kb up and downstream of the Transcription start site). It is contemplated herein that the targeting domain hybridizes to the target domain through complementary base pairing. Any of the targeting domains in the table can be used with a S. aureus eiCas9 molecule, e.g., an eiCas9 fusion protein, as described herein.

TABLE 4G
2nd Tier

Targeting domains for knocking down the BID gene using S. aureus
Cas9 selected according to second tier parameters are presented in
SEQ ID NO: 12842-13269.

[0731] Table 4H provides targeting domains for knocking down the BID gene using N. meningitidis Cas9 selected according to first tier parameters. The targeting domains bind within 500 bp upstream and downstream of transcription start site. It is contemplated herein that the targeting domain hybridizes to the target domain through complementary base pairing. Any of the targeting domains in the table can be used with a N. meningitidis eiCas9 molecule, e.g., an eiCas9 fusion protein, as described herein.

TABLE 4H
1st Tier

Targeting domains for knocking down the BID gene using
N. meningitidis meningitidis Cas9 selected according to first tier
parameters are presented in SEQ ID NO: 13270-13275.

[0732] Table 4I provides targeting domains for knocking down the BID gene using N. meningitidis Cas9 selected according to second tier parameters. The targeting domains bind within additional 500 bp upstream and downstream of transcription start site (extending to 1 kb up and downstream of the transcription start site). It is contemplated herein that the targeting domain hybridizes to the target domain through complementary base pairing. Any of the targeting domains in the table can be used with a N. meningitidis eiCas9 molecule, e.g., an eiCas9 fusion protein, as described herein.

TABLE 4I
2nd Tier

Targeting domains for knocking down the BID gene using
N. meningitidis meningitidis Cas9 selected according to second tier
parameters are presented in SEQ ID NO: 13276-13285.

[0733] Table 5A provides targeting domains for knocking out the CTLA4 gene using S. pyogenes Cas9 selected according to first tier parameters. The targeting domains bind within the first 500 bp of coding sequence downstream of start codon, have good orthogonality, and start with G. It is contemplated herein that the targeting domain hybridizes to the target domain through complementary base pairing. Any of the targeting domains in the table can be used with a S. pyogenes Cas9 molecule that generates a double stranded break (Cas9 nuclease) or a single-stranded break (Cas9 nickase). In an embodiment, dual targeting is used to create two nicks on opposite DNA strands by using S. pyogenes Cas9 nickases with two targeting domains that are complementary to opposite DNA strands, e.g., a gRNA comprising any minus strand targeting domain may be paired with any gRNA comprising a plus strand targeting domain provided that the two gRNAs are oriented on the DNA such that PAMs face outward and the distance between the 5′ ends of the gRNAs is 0-50 bp. In an embodiment, two gRNAs are used to target two Cas9 nucleases or two Cas9 nickases, e.g., a gRNA with a targeting domain from Group A can be paired with a gRNA with any targeting domain from Group B as shown in Table 5 or a gRNA with a targeting domain from Group C can be paired with a gRNA with any targeting domain from Group D as shown in Table 5.

TABLE 5

| Group A | Group B |
|---|---|
| CCUUGGAUUUCAGCGGCACA | GCUUUAUGGGAGCGGUGUUC |
| (SEQ ID NO: 13293); | (SEQ ID NO: 13290); |
| UGGAUUUCAGCGGCACA | UUAUGGGAGCGGUGUUC |
| (SEQ ID NO: 13294) | (SEQ ID NO: 13307) |
| Group C | Group D |
| UGAACCUGGCUACCAGGACC | CCUUGUGCCGCUGAAAUCCA |
| (SEQ ID NO: 13295); | (SEQ ID NO: 13305); |
| ACCUGGCUACCAGGACC | UGUGCCGCUGAAAUCCA |
| (SEQ ID NO: 13296) | (SEQ ID NO: 13306) |

TABLE 5A
1st Tier

Targeting domains for knocking out the CTLA4 gene using S. pyogenes
Cas9 selected according to first tier parameters are presented in
SEQ ID NO: 13286-13290.

[0734] Table 5B provides targeting domains for knocking out the CTLA4 gene using S. pyogenes Cas9 selected according to second tier parameters. The targeting domains bind within the first 500 bp of coding sequence downstream of start codon, have good orthogonality, and do not start with G. It is contemplated herein that the targeting domain hybridizes to the target domain through complementary base pairing. Any of the targeting domains in the table can be used with a S. pyogenes Cas9 molecule that generates a double stranded break (Cas9 nuclease) or a single-stranded break (Cas9 nickase). In an embodiment, dual targeting is used to create two nicks on opposite DNA strands by using S. pyogenes Cas9 nickases with two targeting domains that are complementary to opposite DNA strands, e.g., a gRNA comprising any minus strand targeting domain may be paired with any gRNA comprising a plus strand targeting domain provided that the two gRNAs are oriented on the DNA such that PAMs face outward and the distance between the 5′ ends of the gRNAs is 0-50 bp.

TABLE 5B
2nd Tier

Targeting domains for knocking out the CTLA4 gene using S. pyogenes
Cas9 selected according to second tier parameters are presented in
SEQ ID NO: 13291-13307.

[0735] Table 5C provides targeting domains for knocking out the CTLA4 gene using S. pyogenes Cas9 selected according to third tier parameters. The targeting domains bind within the first 500 bp of coding sequence downstream of start codon, and start with G. It is contemplated herein that the targeting domain hybridizes to the target domain through complementary base pairing. Any of the targeting domains in the table can be used with a S. pyogenes Cas9 molecule that generates a double stranded break (Cas9 nuclease) or a single-stranded break (Cas9 nickase). In an embodiment, dual targeting is used to create two nicks on opposite DNA strands by using S. pyogenes Cas9 nickases with two targeting domains that are complementary to opposite DNA strands, e.g., a gRNA comprising any minus strand targeting domain may be paired with any gRNA comprising a plus strand targeting domain provided that the two gRNAs are oriented on the DNA such that PAMs face outward and the distance between the 5′ ends of the gRNAs is 0-50 bp.

TABLE 5C
3rd Tier

Targeting domains for knocking out the CTLA4 gene using S. pyogenes
Cas9 selected according to third tier parameters are presented in
SEQ ID NO: 13308-13340.

[0736] Table 5D provides targeting domains for knocking out the CTLA4 gene using S. pyogenes Cas9 selected according to fourth tier parameters. The targeting domains bind within the first 500 bp of coding sequence downstream of start codon, and do not start with G. It is contemplated herein that the targeting domain hybridizes to the target domain through complementary base pairing. Any of the targeting domains in the table can be used with a S. pyogenes Cas9 molecule that generates a double stranded break (Cas9 nuclease) or a single-stranded break (Cas9 nickase). In an embodiment, dual targeting is used to create two nicks on opposite DNA strands by using S. pyogenes Cas9 nickases with two targeting domains that are complementary to opposite DNA strands, e.g., a gRNA comprising any minus strand targeting domain may be paired with any gRNA comprising a plus strand targeting domain provided that the two gRNAs are oriented on the DNA such that PAMs face outward and the distance between the 5′ ends of the gRNAs is 0-50 bp.

TABLE 5D
4th Tier

Targeting domains for knocking out the CTLA4 gene using S. pyogenes
Cas9 selected according to fourth tier parameters are presented in
SEQ ID NO: 13341-13429.

[0737] Table 5E provides targeting domains for knocking out the CTLA4 gene using S. pyogenes Cas9 selected according to fifth tier parameters. The targeting domains bind within the remaining coding sequence (downstream of the first 500 bp). It is contemplated herein that the targeting domain hybridizes to the target domain through complementary base pairing. Any of the targeting domains in the table can be used with a S. pyogenes Cas9 molecule that generates a double stranded break (Cas9 nuclease) or a single-stranded break (Cas9 nickase). In an embodiment, dual targeting is used to create two nicks on opposite DNA strands by using S. pyogenes Cas9 nickases with two targeting domains that are complementary to opposite DNA strands, e.g., a gRNA comprising any minus strand targeting domain may be paired with any gRNA comprising a plus strand targeting domain provided that the two gRNAs are oriented on the DNA such that PAMs face outward and the distance between the 5′ ends of the gRNAs is 0-50 bp.

TABLE 5E
5th Tier

Targeting domains for knocking out the CTLA4 gene using S. pyogenes
Cas9 selected according to fifth tier parameters are presented in
SEQ ID NO: 13430-13500.

[0738] Table 5F provides targeting domains for knocking out the CTLA4 gene using S. aureus Cas9 selected according to first tier parameters. The targeting domains bind within the first 500 bp of coding sequence downstream of start codon. It is contemplated herein that the targeting domain hybridizes to the target domain through complementary base pairing. Any of the targeting domains in the table can be used with a S. aureus Cas9 molecule that generates a double stranded break (Cas9 nuclease) or a single-stranded break (Cas9 nickase). In an embodiment, dual targeting is used to create two nicks on opposite DNA strands by using S. aureus Cas9 nickases with two targeting domains that are complementary to opposite DNA strands, e.g., a gRNA comprising any minus strand targeting domain may be paired with any gRNA comprising a plus strand targeting domain provided that the two gRNAs are oriented on the DNA such that PAMs face outward and the distance between the 5′ ends of the gRNAs is 0-50 bp.

TABLE 5F
1st Tier

Targeting domains for knocking out the CTLA4 gene using S. aureus
Cas9 selected according to first tier parameters are presented in
SEQ ID NO: 13501-13630.

[0739] Table 5G provides targeting domains for knocking out the CTLA4 gene using S. aureus Cas9 selected according to second tier parameters. The targeting domains bind within the remaining coding sequence (downstream of the first 500 bp). It is contemplated herein that the targeting domain hybridizes to the target domain through complementary base pairing. Any of the targeting domains in the table can be used with a S. aureus Cas9 molecule that generates a double stranded break (Cas9 nuclease) or a single-stranded break (Cas9 nickase). In an embodiment, dual targeting is used to create two nicks on opposite DNA strands by using S. aureus Cas9 nickases with two targeting domains that are complementary to opposite DNA strands, e.g., a gRNA comprising any minus strand targeting domain may be paired with any gRNA comprising a plus strand targeting domain provided that the two gRNAs are oriented on the DNA such that PAMs face outward and the distance between the 5′ ends of the gRNAs is 0-50 bp.

TABLE 5G
2nd Tier

Targeting domains for knocking out the CTLA4 gene using S. aureus
Cas9 selected according to second tier parameters are presented in
SEQ ID NO: 13631-13735.

[0740] Table 5H provides targeting domains for knocking out the CTLA4 gene using N. meningitidis Cas9 selected according to first tier parameters. The targeting domains bind within the first 500 bp of coding sequence downstream of start codon. It is contemplated herein that the targeting domain hybridizes to the target domain through complementary base pairing. Any of the targeting domains in the table can be used with a N. meningitidis Cas9 molecule that generates a double stranded break (Cas9 nuclease) or a single-stranded break (Cas9 nickase). In an embodiment, dual targeting is used to create two nicks on opposite DNA strands by using N. meningitidis Cas9 nickases with two targeting domains that are complementary to opposite DNA strands, e.g., a gRNA comprising any minus strand targeting domain may be paired with any gRNA comprising a plus strand targeting domain provided that the two gRNAs are oriented on the DNA such that PAMs face outward and the distance between the 5′ ends of the gRNAs is 0-50 bp.

TABLE 5H
1st Tier

Targeting domains for knocking out the CTLA4 gene using
N. meningitidismeningitidis Cas9 selected according to first tier
parameters are presented in SEQ ID NO: 13736-13741.

[0741] Table 5I provides targeting domains for knocking out the CTLA4 gene using N. meningitidis Cas9 selected according to second tier parameters. The targeting domains bind within the remaining coding sequence (downstream of the first 500 bp). It is contemplated herein that the targeting domain hybridizes to the target domain through complementary base pairing. Any of the targeting domains in the table can be used with a N. meningitidis Cas9 molecule that generates a double stranded break (Cas9 nuclease) or a single-stranded break (Cas9 nickase). In an embodiment, dual targeting is used to create two nicks on opposite DNA strands by using N. meningitidis Cas9 nickases with two targeting domains that are complementary to opposite DNA strands, e.g., a gRNA comprising any minus strand targeting domain may be paired with any gRNA comprising a plus strand targeting domain provided that the two gRNAs are oriented on the DNA such that PAMs face outward and the distance between the 5′ ends of the gRNAs is 0-50 bp.

TABLE 5I
2nd Tier

Targeting domains for knocking out the CTLA4 gene using
N. meningitidismeningitidisCas9 selected according to second tier
parameters are presented in SEQ ID NO: 13742-13745.

[0742] Table 6A provides targeting domains for knocking down the CTLA4 gene using S. pyogenes Cas9 selected according to first tier parameters. The targeting domains bind within the 500 bp upstream and downstream of transcription start site, have good orthogonality, and start with G. It is contemplated herein that the targeting domain hybridizes to the target domain through complementary base pairing. Any of the targeting domains in the table can be used with a S. pyogenes eiCas9 molecule, e.g., an eiCas9 fusion protein, as described herein.

TABLE 6A
1st Tier

Targeting domains for knocking down the CTLA4 gene using S. pyogenes
Cas9 selected according to first tier parameters are presented in SEQ ID
NO: 13746-13752.

[0743] Table 6B provides targeting domains for knocking down the CTLA4 gene using S. pyogenes Cas9selected according to second tier parameters. The targeting domains bind within the 500 bp upstream and downstream of transcription start site, have good orthogonality, and do not start with G. It is contemplated herein that the targeting domain hybridizes to the target domain through complementary base pairing. Any of the targeting domains in the table can be used with a S. pyogenes eiCas9 molecule, e.g., an eiCas9 fusion protein, as described herein.

TABLE 6B
2nd Tier

Targeting domains for knocking down the CTLA4 gene using S. pyogenes
Cas9 selected according to second tier parameters are presented in SEQ ID
NO: 13753-13771.

[0744] Table 6C provides targeting domains for knocking down the CTLA4 gene using S. pyogenes Cas9selected according to third tier parameters. The targeting domains bind within the 500 bp upstream and downstream of transcription start site, and start with G. It is contemplated herein that the targeting domain hybridizes to the target domain through complementary base pairing. Any of the targeting domains in the table can be used with a S. pyogenes eiCas9 molecule, e.g., an eiCas9 fusion protein, as described herein.

TABLE 6C
3rd Tier

Targeting domains for knocking down the CTLA4 gene using S. pyogenes
Cas9 selected according to third tier parameters are presented in SEQ ID
NO: 13772-13818.

[0745] Table 6D provides targeting domains for knocking down the CTLA4 gene using S. pyogenes Cas9selected according to fourth tier parameters. The targeting domains bind within the 500 bp upstream and downstream of transcription start site, and do not start with G. It is contemplated herein that the targeting domain hybridizes to the target domain through complementary base pairing. Any of the targeting domains in the table can be used with a S. pyogenes eiCas9 molecule, e.g., an eiCas9 fusion protein, as described herein.

TABLE 6D
4th Tier

Targeting domains for knocking down the CTLA4 gene using S. pyogenes
Cas9 selected according to fourth tier parameters are presented in SEQ ID
NO: 13819-13969.

[0746] Table 6E provides targeting domains for knocking down the CTLA4 gene using S. pyogenes Cas9selected according to fifth tier parameters. The targeting domains bind within the additional 500 bp upstream and downstream of transcription start site (extending to 1 kb up and downstream of the transcription start site). It is contemplated herein that the targeting domain hybridizes to the target domain through complementary base pairing. Any of the targeting domains in the table can be used with a S. pyogenes eiCas9 molecule, e.g., an eiCas9 fusion protein, as described herein.

TABLE 6E
5th Tier

Targeting domains for knocking down the CTLA4 gene using S. pyogenes
Cas9 selected according to fifth tier parameters are presented in SEQ ID
NO: 13970-14107.

[0747] Table 6F provides targeting domains for knocking down the CTLA4 gene using S. aureus Cas9selected according to first tier parameters. The targeting domains bind within 500 bp upstream and downstream of transcription start site. It is contemplated herein that the targeting domain hybridizes to the target domain through complementary base pairing. Any of the targeting domains in the table can be used with a S. aureus eiCas9 molecule, e.g., an eiCas9 fusion protein, as described herein.

TABLE 6F
1st Tier

Targeting domains for knocking down the CTLA4 gene using S. aureus
Cas9 selected according to first tier parameters are presented in SEQ ID
NO: 14108-14400.

[0748] Table 6G provides targeting domains for knocking down the CTLA4 gene using S. aureus Cas9 selected according to second tier parameters. The targeting domains bind within additional 500 bp upstream and downstream of transcription start site (extending to 1 kb up and downstream of the transcription start site). It is contemplated herein that the targeting domain hybridizes to the target domain through complementary base pairing. Any of the targeting domains in the table can be used with a S. aureus eiCas9 molecule, e.g., an eiCas9 fusion protein, as described herein.

TABLE 6G
2nd Tier

Targeting domains for knocking down the CTLA4 gene using S. aureus
Cas9 selected according to second tier parameters are presented in SEQ ID
NO: 14401-14616.

[0749] Table 6H provides targeting domains for knocking down the CTLA4 gene using N. meningitidis Cas9 selected according to first tier parameters. The targeting domains bind within 500 bp upstream and downstream of transcription start site. It is contemplated herein that the targeting domain hybridizes to the target domain through complementary base pairing. Any of the targeting domains in the table can be used with a N. meningitidis eiCas9 molecule, e.g., an eiCas9 fusion protein, as described herein.

TABLE 6H
1st Tier

Targeting domains for knocking down the CTLA4 gene using
N. meningitidismeningitidis Cas9 selected according to first tier
parameters are presented in SEQ ID NO: 14617-14634.

[0750] Table 6I provides targeting domains for knocking down the CTLA4 gene using N. meningitidis Cas9 selected according to second tier parameters. The targeting domains bind within additional 500 bp upstream and downstream of transcription start site (extending to 1 kb up and downstream of the transcription start site). It is contemplated herein that the targeting domain hybridizes to the target domain through complementary base pairing. Any of the targeting domains in the table can be used with a N. meningitidis eiCas9 molecule, e.g., an eiCas9 fusion protein, as described herein.

TABLE 6I
2nd Tier

Targeting domains for knocking down the CTLA4 gene using
N. meningitidismeningitidis Cas9 selected according to second tier
parameters are presented in SEQ ID NO: 14635-14656.

[0751] Table 7A provides targeting domains for knocking out the PDCD1 gene using S. pyogenes Cas9 selected according to first tier parameters. The targeting domains bind within the first 500 bp of coding sequence downstream of start codon, have good orthogonality, and start with G. It is contemplated herein that the targeting domain hybridizes to the target domain through complementary base pairing. Any of the targeting domains in the table can be used with a S. pyogenes Cas9 molecule that generates a double stranded break (Cas9 nuclease) or a single-stranded break (Cas9 nickase). In an embodiment, dual targeting is used to create two nicks on opposite DNA strands by using S. pyogenes Cas9 nickases with two targeting domains that are complementary to opposite DNA strands, e.g., a gRNA comprising any minus strand targeting domain may be paired with any gRNA comprising a plus strand targeting domain provided that the two gRNAs are oriented on the DNA such that PAMs face outward and the distance between the 5′ ends of the gRNAs is 0-50 bp. In an embodiment, two gRNAs are used to target two Cas9 nucleases or two Cas9 nickases, e.g., a gRNA with a targeting domain from Group A can be paired with a gRNA with any targeting domain from Group B as shown in Table 7 or a gRNA with a targeting domain from Group C can be paired with a gRNA with any targeting domain from Group D as shown in Table 7.

TABLE 7

| Group A | Group B |
|---|---|
| UGACACGGAAGCGGCAGUCC | GCGUGACUUCCACAUGAGCG |
| (SEQ ID NO: 600); | (SEQ ID NO: 567); |
| CACGGAAGCGGCAGUCC | ACUUCCACAUGAGCGUGGUC |
| (SEQ ID NO: 601) | (SEQ ID NO: 590); |
| | UGACUUCCACAUGAGCG |
| | (SEQ ID NO: 592); |
| | UCCACAUGAGCGUGGUC |
| | (SEQ ID NO: 593) |
| Group C | Group D |
| CAUGUGGAAGUCACGCCCGU | AGGGCCCGGCGCAAUGACAG |
| (SEQ ID NO: 597); | (SEQ ID NO: 594); |
| AUGUGGAAGUCACGCCCGUU | GCCCGGCGCAAUGACAG |
| (SEQ ID NO: 598); | (SEQ ID NO: 568) |
| GUGGAAGUCACGCCCGU | |
| (SEQ ID NO: 571); | |
| UGGAAGUCACGCCCGUU | |
| (SED ID NO: 599) | |

TABLE 7A
1st Tier

Targeting domains for knocking out the PDCD1 gene using S. pyogenes
Cas9 selected according to first tier parameters are presented in SEQ ID
NO: 563-573.

[0752] Table 7B provides targeting domains for knocking out the PDCD1 gene using S. pyogenes Cas9 selected according to second tier parameters. The targeting domains bind within the first 500 bp of coding sequence downstream of start codon, have good orthogonality, and do not start with G. It is contemplated herein that the targeting domain hybridizes to the target domain through complementary base pairing. Any of the targeting domains in the table can be used with a S. pyogenes Cas9 molecule that generates a double stranded break (Cas9 nuclease) or a single-stranded break (Cas9 nickase). In an embodiment, dual targeting is used to create two nicks on opposite DNA strands by using S. pyogenes Cas9 nickases with two targeting domains that are complementary to opposite DNA strands, e.g., a gRNA comprising any minus strand targeting domain may be paired with any gRNA comprising a plus strand targeting domain provided that the two gRNAs are oriented on the DNA such that PAMs face outward and the distance between the 5′ ends of the gRNAs is 0-50 bp.

TABLE 7B
2nd Tier

Targeting domains for knocking out the PDCD1 gene using S. pyogenes
Cas9 selected according to second tier parameters are presented in SEQ ID
NO: 574-607.

[0753] Table 7C provides targeting domains for knocking out the PDCD1 gene using S. pyogenes Cas9 selected according to third tier parameters. The targeting domains bind within the first 500 bp of coding sequence downstream of start codon, and start with G. It is contemplated herein that the targeting domain hybridizes to the target domain through complementary base pairing. Any of the targeting domains in the table can be used with a S. pyogenes Cas9 molecule that generates a double stranded break (Cas9 nuclease) or a single-stranded break (Cas9 nickase). In an embodiment, dual targeting is used to create two nicks on opposite DNA strands by using S. pyogenes Cas9 nickases with two targeting domains that are complementary to opposite DNA strands, e.g., a gRNA comprising any minus strand targeting domain may be paired with any gRNA comprising a plus strand targeting domain provided that the two gRNAs are oriented on the DNA such that PAMs face outward and the distance between the 5′ ends of the gRNAs is 0-50 bp.

TABLE 7C
3rd Tier

Targeting domains for knocking out the PDCD1 gene using S. pyogenes
Cas9 selected according to third tier parameters are presented in SEQ ID
NO: 608-687.

[0754] Table 7D provides targeting domains for knocking out the PDCD1 gene using S. pyogenes Cas9 selected according to fourth tier parameters. The targeting domains bind within the first 500 bp of coding sequence downstream of start codon, and do not start with G. It is contemplated herein that the targeting domain hybridizes to the target domain through complementary base pairing. Any of the targeting domains in the table can be used with a S. pyogenes Cas9 molecule that generates a double stranded break (Cas9 nuclease) or a single-stranded break (Cas9 nickase). In an embodiment, dual targeting is used to create two nicks on opposite DNA strands by using S. pyogenes Cas9 nickases with two targeting domains that are complementary to opposite DNA strands, e.g., a gRNA comprising any minus strand targeting domain may be paired with any gRNA comprising a plus strand targeting domain provided that the two gRNAs are oriented on the DNA such that PAMs face outward and the distance between the 5′ ends of the gRNAs is 0-50 bp.

TABLE 7D
4th Tier

Targeting domains for knocking out the PDCD1 gene using S. pyogenes
Cas9 selected according to fourth tier parameters are presented in SEQ ID
NO: 688-816.

[0755] Table 7E provides targeting domains for knocking out the PDCD1 gene using S. pyogenes Cas9 selected according to fifth tier parameters. The targeting domains bind within the remaining coding sequence (downstream of the first 500 bp). It is contemplated herein that the targeting domain hybridizes to the target domain through complementary base pairing. Any of the targeting domains in the table can be used with a S. pyogenes Cas9 molecule that generates a double stranded break (Cas9 nuclease) or a single-stranded break (Cas9 nickase). In an embodiment, dual targeting is used to create two nicks on opposite DNA strands by using S. pyogenes Cas9 nickases with two targeting domains that are complementary to opposite DNA strands, e.g., a gRNA comprising any minus strand targeting domain may be paired with any gRNA comprising a plus strand targeting domain provided that the two gRNAs are oriented on the DNA such that PAMs face outward and the distance between the 5′ ends of the gRNAs is 0-50 bp.

TABLE 7E
5th Tier

Targeting domains for knocking out the PDCD1 gene using S. pyogenes
Cas9 selected according to fifth tier parameters are presented in SEQ ID
NO: 817-1090.

[0756] Table 7F provides targeting domains for knocking out the PDCD1 gene using S. aureus Cas9 selected according to first tier parameters. The targeting domains bind within the first 500 bp of coding sequence downstream of start codon. It is contemplated herein that the targeting domain hybridizes to the target domain through complementary base pairing. Any of the targeting domains in the table can be used with a S. aureus Cas9 molecule that generates a double stranded break (Cas9 nuclease) or a single-stranded break (Cas9 nickase). In an embodiment, dual targeting is used to create two nicks on opposite DNA strands by using S. aureus Cas9 nickases with two targeting domains that are complementary to opposite DNA strands, e.g., a gRNA comprising any minus strand targeting domain may be paired with any gRNA comprising a plus strand targeting domain provided that the two gRNAs are oriented on the DNA such that PAMs face outward and the distance between the 5′ ends of the gRNAs is 0-50 bp.

TABLE 7F
1st Tier

Targeting domains for knocking out the PDCD1 gene using S. aureus
Cas9 selected according to first tier parameters are presented in SEQ ID
NO: 1091-1268.

[0757] Table 7G provides targeting domains for knocking out the PDCD1 gene using S. aureus Cas9 selected according to second tier parameters. The targeting domains bind within the remaining coding sequence (downstream of the first 500 bp). It is contemplated herein that the targeting domain hybridizes to the target domain through complementary base pairing. Any of the targeting domains in the table can be used with a S. aureus Cas9 molecule that generates a double stranded break (Cas9 nuclease) or a single-stranded break (Cas9 nickase). In an embodiment, dual targeting is used to create two nicks on opposite DNA strands by using S. aureus Cas9 nickases with two targeting domains that are complementary to opposite DNA strands, e.g., a gRNA comprising any minus strand targeting domain may be paired with any gRNA comprising a plus strand targeting domain provided that the two gRNAs are oriented on the DNA such that PAMs face outward and the distance between the 5′ ends of the gRNAs is 0-50 bp.

TABLE 7G
2nd Tier

Targeting domains for knocking out the PDCD1 gene using S. aureus
Cas9 selected according to second tier parameters are presented in SEQ
ID NO: 1269-1514.

[0758] Table 7H provides targeting domains for knocking out the PDCD1 gene using N. meningitidis Cas9 selected according to second tier parameters. The targeting domains bind within the remaining coding sequence (downstream of the first 500 bp). It is contemplated herein that the targeting domain hybridizes to the target domain through complementary base pairing. Any of the targeting domains in the table can be used with a N. meningitidis Cas9 molecule that generates a double stranded break (Cas9 nuclease) or a single-stranded break (Cas9 nickase). In an embodiment, dual targeting is used to create two nicks on opposite DNA strands by using N. meningitidis Cas9 nickases with two targeting domains that are complementary to opposite DNA strands, e.g., a gRNA comprising any minus strand targeting domain may be paired with any gRNA comprising a plus strand targeting domain provided that the two gRNAs are oriented on the DNA such that PAMs face outward and the distance between the 5′ ends of the gRNAs is 0-50 bp.

TABLE 7H
2nd Tier

Targeting domains for knocking out the PDCD1 gene using
N. meningitidis meningitidis Cas9 selected according to second
tier parameters are presented in SEQ ID NO: 1515-1516.

[0759] Table 8A provides targeting domains for knocking down the PDCD1 gene using S. pyogenes Cas9 selected according to first tier parameters. The targeting domains bind within the 500 bp upstream and downstream of transcription start site, have good orthogonality, and start with G. It is contemplated herein that the targeting domain hybridizes to the target domain through complementary base pairing. Any of the targeting domains in the table can be used with a S. pyogenes eiCas9 molecule, e.g., an eiCas9 fusion protein, as described herein.

TABLE 8A
1st Tier

Targeting domains for knocking down the PDCD1 gene using S. pyogenes
Cas9 selected according to first tier parameters are presented in SEQ ID
NO: 1517-1523.

[0760] Table 8B provides targeting domains for knocking down the PDCD1 gene using S. pyogenes Cas9 selected according to second tier parameters. The targeting domains bind within the 500 bp upstream and downstream of transcription start site, have good orthogonality, and do not start with G. It is contemplated herein that the targeting domain hybridizes to the target domain through complementary base pairing. Any of the targeting domains in the table can be used with a S. pyogenes eiCas9 molecule, e.g., an eiCas9 fusion protein, as described herein.

TABLE 8B
2nd Tier

Targeting domains for knocking down the PDCD1 gene using S. pyogenes
Cas9 selected according to second tier parameters are presented in SEQ ID
NO: 1524-1566.

[0761] Table 8C provides targeting domains for knocking down the PDCD1 gene using S. pyogenes Cas9 selected according to third tier parameters. The targeting domains bind within the 500 bp upstream and downstream of transcription start site, and start with G. It is contemplated herein that the targeting domain hybridizes to the target domain through complementary base pairing. Any of the targeting domains in the table can be used with a S. pyogenes eiCas9 molecule, e.g., an eiCas9 fusion protein, as described herein.

TABLE 8C
3rd Tier

Targeting domains for knocking down the PDCD1 gene using S. pyogenes
Cas9 selected according to third tier parameters are presented in SEQ ID
NO: 1567-1753.

[0762] Table 8D provides targeting domains for knocking down the PDCD1 gene using S. pyogenes Cas9 selected according to fourth tier parameters. The targeting domains bind within the 500 bp upstream and downstream of transcription start site, and do not start with G. It is contemplated herein that the targeting domain hybridizes to the target domain through complementary base pairing. Any of the targeting domains in the table can be used with a S. pyogenes eiCas9 molecule, e.g., an eiCas9 fusion protein, as described herein.

TABLE 8D
4th Tier

Targeting domains for knocking down the PDCD1 gene using S. pyogenes
Cas9 selected according to fourth tier parameters are presented in SEQ ID
NO: 1754-8682-2130.

[0763] Table 8E provides targeting domains for knocking down the PDCD1 gene using S. pyogenes Cas9 selected according to fifth tier parameters. The targeting domains bind within the additional 500 bp upstream and downstream of transcription start site (extending to 1 kb up and downstream of the transcription start site). It is contemplated herein that the targeting domain hybridizes to the target domain through complementary base pairing. Any of the targeting domains in the table can be used with a S. pyogenes eiCas9 molecule, e.g., an eiCas9 fusion protein, as described herein.

TABLE 8E
5th Tier

Targeting domains for knocking down the PDCD1 gene using S. pyogenes
Cas9 selected according to fifth tier parameters are presented in SEQ ID
NO: 2131-2620.

[0764] Table 8F provides targeting domains for knocking down the PDCD1 gene using S. aureus Cas9 selected according to first tier parameters. The targeting domains bind within 500 bp upstream and downstream of transcription start site. It is contemplated herein that the targeting domain hybridizes to the target domain through complementary base pairing. Any of the targeting domains in the table can be used with a S. aureus eiCas9 molecule, e.g., an eiCas9 fusion protein, as described herein.

TABLE 8F
1st Tier

Targeting domains for knocking down the PDCD1 gene using S. aureus
Cas9 selected according to first tier parameters are presented in SEQ ID
NO: 2621-3320.

[0765] Table 8G provides targeting domains for knocking down the PDCD1 gene using S. aureus Cas9 selected according to second tier parameters. The targeting domains bind within additional 500 bp upstream and downstream of transcription start site (extending to 1 kb up and downstream of the transcription start site). It is contemplated herein that the targeting domain hybridizes to the target domain through complementary base pairing. Any of the targeting domains in the table can be used with a S. aureus eiCas9 molecule, e.g., an eiCas9 fusion protein, as described herein.

TABLE 8G
2nd Tier

Targeting domains for knocking down the PDCD1 gene using S. aureus
Cas9 selected according to second tier parameters are presented in SEQ
ID NO: 3321-3742.

[0766] Table 8H provides targeting domains for knocking down the PDCD1 gene using N. meningitidis Cas9 selected according to second tier parameters. The targeting domains bind within additional 500 bp upstream and downstream of transcription start site (extending to 1 kb up and downstream of the transcription start site). It is contemplated herein that the targeting domain hybridizes to the target domain through complementary base pairing. Any of the targeting domains in the table can be used with a N. meningitidis eiCas9 molecule, e.g., an eiCas9 fusion protein, as described herein.

TABLE 8H
2nd Tier

Targeting domains for knocking down the PDCD1 gene using
N. meningitidis meningitidis Cas9 selected according to second
tier parameters are presented in SEQ ID NO: 3743-3748.

[0767] Table 9A provides targeting domains for knocking out the CBLB gene using S. pyogenes Cas9 selected according to first tier parameters. The targeting domains bind within the first 500 bp of coding sequence downstream of start codon, have good orthogonality, and start with G. It is contemplated herein that the targeting domain hybridizes to the target domain through complementary base pairing. Any of the targeting domains in the table can be used with a S. pyogenes Cas9 molecule that generates a double stranded break (Cas9 nuclease) or a single-stranded break (Cas9 nickase). In an embodiment, dual targeting is used to create two nicks on opposite DNA strands by using S. pyogenes Cas9 nickases with two targeting domains that are complementary to opposite DNA strands, e.g., a gRNA comprising any minus strand targeting domain may be paired with any gRNA comprising a plus strand targeting domain provided that the two gRNAs are oriented on the DNA such that PAMs face outward and the distance between the 5′ ends of the gRNAs is 0-50 bp. In an embodiment, two gRNAs are used to target two Cas9 nucleases or two Cas9 nickases, e.g., a gRNA with a targeting domain from Group A can be paired with a gRNA with any targeting domain from Group B as shown in Table 9 or a gRNA with a targeting domain from Group C can be paired with a gRNA with any targeting domain from Group D as shown in Table 9.

TABLE 9

| Group A | Group B |
|---|---|
| UGACACGGAAGCGGCAGUCC | GCGUGACUUCCACAUGAGCG |
| (SEQ ID NO: 600); | (SEQ ID NO: 567); |
| CACGGAAGCGGCAGUCC | ACUUCCACAUGAGCGUGGUC |
| (SEQ ID NO: 601) | (SEQ ID NO: 590); |
| | UGACUUCCACAUGAGCG |
| | (SEQ ID NO: 592); |
| | UCCACAUGAGCGUGGUC |
| | (SEQ ID NO: 593) |
| Group C | Group D |
| CAUGUGGAAGUCACGCCCGU | AGGGCCCGGCGCAAUGACAG |
| (SEQ ID NO: 597); | (SEQ ID NO: 594); |
| AUGUGGAAGUCACGCCCGUU | GCCCGGCGCAAUGACAG |
| (SEQ ID NO: 598); | (SEQ ID NO: 568) |
| GUGGAAGUCACGCCCGU | |
| (SEQ ID NO: 571); | |
| UGGAAGUCACGCCCGUU | |
| (SED ID NO: 599) | |

TABLE 9A
1st Tier

Targeting domains for knocking out the CBLB gene using S. pyogenes
Cas9 selected according to first tier parameters are presented in SEQ
ID NO: 6119-6126.

[0768] Table 9B provides targeting domains for knocking out the CBLB gene using S. pyogenes Cas9 selected according to second tier parameters. The targeting domains bind within the first 500 bp of coding sequence downstream of start codon, have good orthogonality, and do not start with G. It is contemplated herein that the targeting domain hybridizes to the target domain through complementary base pairing. Any of the targeting domains in the table can be used with a S. pyogenes Cas9 molecule that generates a double stranded break (Cas9 nuclease) or a single-stranded break (Cas9 nickase). In an embodiment, dual targeting is used to create two nicks on opposite DNA strands by using S. pyogenes Cas9 nickases with two targeting domains that are complementary to opposite DNA strands, e.g., a gRNA comprising any minus strand targeting domain may be paired with any gRNA comprising a plus strand targeting domain provided that the two gRNAs are oriented on the DNA such that PAMs face outward and the distance between the 5′ ends of the gRNAs is 0-50 bp.

TABLE 9B
2nd Tier

Targeting domains for knocking out the CBLB gene using S. pyogenes
Cas9 selected according to second tier parameters are presented in SEQ
ID NO: 6127-6151.

[0769] Table 9C provides targeting domains for knocking out the CBLB gene using S. pyogenes Cas9 selected according to third tier parameters. The targeting domains bind within the first 500 bp of coding sequence downstream of start codon, and start with G. It is contemplated herein that the targeting domain hybridizes to the target domain through complementary base pairing. Any of the targeting domains in the table can be used with a S. pyogenes Cas9 molecule that generates a double stranded break (Cas9 nuclease) or a single-stranded break (Cas9 nickase). In an embodiment, dual targeting is used to create two nicks on opposite DNA strands by using S. pyogenes Cas9 nickases with two targeting domains that are complementary to opposite DNA strands, e.g., a gRNA comprising any minus strand targeting domain may be paired with any gRNA comprising a plus strand targeting domain provided that the two gRNAs are oriented on the DNA such that PAMs face outward and the distance between the 5′ ends of the gRNAs is 0-50 bp.

TABLE 9C
3rd Tier

Targeting domains for knocking out the CBLB gene using S. pyogenes
Cas9 selected according to third tier parameters are presented in SEQ
ID NO: 6152-6166.

[0770] Table 9D provides targeting domains for knocking out the CBLB gene using S. pyogenes Cas9 selected according to fourth tier parameters. The targeting domains bind within the first 500 bp of coding sequence downstream of start codon, and do not start with G. It is contemplated herein that the targeting domain hybridizes to the target domain through complementary base pairing. Any of the targeting domains in the table can be used with a S. pyogenes Cas9 molecule that generates a double stranded break (Cas9 nuclease) or a single-stranded break (Cas9 nickase). In an embodiment, dual targeting is used to create two nicks on opposite DNA strands by using S. pyogenes Cas9 nickases with two targeting domains that are complementary to opposite DNA strands, e.g., a gRNA comprising any minus strand targeting domain may be paired with any gRNA comprising a plus strand targeting domain provided that the two gRNAs are oriented on the DNA such that PAMs face outward and the distance between the 5′ ends of the gRNAs is 0-50 bp.

TABLE 9D
4th Tier

Targeting domains for knocking out the CBLB gene using S. pyogenes
Cas9 selected according to fourth tier parameters are presented in
SEQ ID NO: 6167-6202.

[0771] Table 9E provides targeting domains for knocking out the CBLB gene using S. pyogenes Cas9 selected according to fifth tier parameters. The targeting domains bind within the remaining coding sequence (downstream of the first 500 bp). It is contemplated herein that the targeting domain hybridizes to the target domain through complementary base pairing. Any of the targeting domains in the table can be used with a S. pyogenes Cas9 molecule that generates a double stranded break (Cas9 nuclease) or a single-stranded break (Cas9 nickase). In an embodiment, dual targeting is used to create two nicks on opposite DNA strands by using S. pyogenes Cas9 nickases with two targeting domains that are complementary to opposite DNA strands, e.g., a gRNA comprising any minus strand targeting domain may be paired with any gRNA comprising a plus strand targeting domain provided that the two gRNAs are oriented on the DNA such that PAMs face outward and the distance between the 5′ ends of the gRNAs is 0-50 bp.

TABLE 9E
5th Tier

Targeting domains for knocking out the CBLB gene using S. pyogenes
Cas9 selected according to fifth tier parameters are presented in
SEQ ID NO: 6203-7006.

[0772] Table 9F provides targeting domains for knocking out the CBLB gene using S. aureus Cas9 selected according to first tier parameters. The targeting domains bind within the first 500 bp of coding sequence downstream of start codon. It is contemplated herein that the targeting domain hybridizes to the target domain through complementary base pairing. Any of the targeting domains in the table can be used with a S. aureus Cas9 molecule that generates a double stranded break (Cas9 nuclease) or a single-stranded break (Cas9 nickase). In an embodiment, dual targeting is used to create two nicks on opposite DNA strands by using S. aureus Cas9 nickases with two targeting domains that are complementary to opposite DNA strands, e.g., a gRNA comprising any minus strand targeting domain may be paired with any gRNA comprising a plus strand targeting domain provided that the two gRNAs are oriented on the DNA such that PAMs face outward and the distance between the 5′ ends of the gRNAs is 0-50 bp.

TABLE 9F
1st Tier

Targeting domains for knocking out the CBLB gene using S. aureus
Cas9 selected according to first tier parameters are presented in
SEQ ID NO: 7007-7116.

[0773] Table 9G provides targeting domains for knocking out the CBLB gene using S. aureus Cas9 selected according to second tier parameters. The targeting domains bind within the remaining coding sequence (downstream of the first 500 bp). It is contemplated herein that the targeting domain hybridizes to the target domain through complementary base pairing. Any of the targeting domains in the table can be used with a S. aureus Cas9 molecule that generates a double stranded break (Cas9 nuclease) or a single-stranded break (Cas9 nickase). In an embodiment, dual targeting is used to create two nicks on opposite DNA strands by using S. aureus Cas9 nickases with two targeting domains that are complementary to opposite DNA strands, e.g., a gRNA comprising any minus strand targeting domain may be paired with any gRNA comprising a plus strand targeting domain provided that the two gRNAs are oriented on the DNA such that PAMs face outward and the distance between the 5′ ends of the gRNAs is 0-50 bp.

TABLE 9G
2nd Tier

Targeting domains for knocking out the CBLB gene using S. aureus
Cas9 selected according to second tier parameters are presented in
SEQ ID NO: 7117-7566.

[0774] Table 9H provides targeting domains for knocking out the CBLB gene using N. meningitidis Cas9 selected according to first tier parameters. The targeting domains bind within the first 500 bp of coding sequence downstream of start codon. It is contemplated herein that the targeting domain hybridizes to the target domain through complementary base pairing. Any of the targeting domains in the table can be used with a N. meningitidis Cas9 molecule that generates a double stranded break (Cas9 nuclease) or a single-stranded break (Cas9 nickase). In an embodiment, dual targeting is used to create two nicks on opposite DNA strands by using N. meningitidis Cas9 nickases with two targeting domains that are complementary to opposite DNA strands, e.g., a gRNA comprising any minus strand targeting domain may be paired with any gRNA comprising a plus strand targeting domain provided that the two gRNAs are oriented on the DNA such that PAMs face outward and the distance between the 5′ ends of the gRNAs is 0-50 bp.

TABLE 9H
1st Tier

Targeting domains for knocking out the CBLB gene using
N. meningitidis meningitidis Cas9 selected according to first tier
parameters are presented in SEQ ID NO: 7567-7574.

[0775] Table 91 provides targeting domains for knocking out the CBLB gene using N. meningitidis Cas9 selected according to second tier parameters. The targeting domains bind within the remaining coding sequence (downstream of the first 500 bp). It is contemplated herein that the targeting domain hybridizes to the target domain through complementary base pairing. Any of the targeting domains in the table can be used with a N. meningitidis Cas9 molecule that generates a double stranded break (Cas9 nuclease) or a single-stranded break (Cas9 nickase). n an embodiment, dual targeting is used to create two nicks on opposite DNA strands by using N. meningitidis Cas9 nickases with two targeting domains that are complementary to opposite DNA strands, e.g., a gRNA comprising any minus strand targeting domain may be paired with any gRNA comprising a plus strand targeting domain provided that the two gRNAs are oriented on the DNA such that PAMs face outward and the distance between the 5′ ends of the gRNAs is 0-50 bp.

TABLE 9I
2nd Tier

Targeting domains for knocking out the CBLB gene using
N. meningitidis meningitidis Cas9 selected according to second tier
parameters are presented in SEQ ID NO: 7575-7634.

[0776] Table 10A provides targeting domains for knocking down the CBLB gene using S. pyogenes Cas9 selected according to first tier parameters. The targeting domains bind within the 500 bp upstream and downstream of transcription start site, have good orthogonality, and start with G. It is contemplated herein that the targeting domain hybridizes to the target domain through complementary base pairing. Any of the targeting domains in the table can be used with a S. pyogenes eiCas9 molecule, e.g., an eiCas9 fusion protein, as described herein.

TABLE 10A
1st Tier

Targeting domains for knocking down the CBLB gene using S. pyogenes
Cas9 selected according to first tier parameters are presented in
SEQ ID NO: 7635-7651.

[0777] Table 10B provides targeting domains for knocking down the CBLB gene using S. pyogenes Cas9 selected according to second tier parameters. The targeting domains bind within the 500 bp upstream and downstream of transcription start site, have good orthogonality, and do not start with G. It is contemplated herein that the targeting domain hybridizes to the target domain through complementary base pairing. Any of the targeting domains in the table can be used with a S. pyogenes eiCas9 molecule, e.g., an eiCas9 fusion protein, as described herein.

TABLE 10B
2nd Tier

Targeting domains for knocking down the CBLB gene using S. pyogenes
Cas9 selected according to second tier parameters are presented in
SEQ ID NO: 7652-7682.

[0778] Table 10C provides targeting domains for knocking down the CBLB gene using S. pyogenes Cas9 selected according to third tier parameters. The targeting domains bind within the 500 bp upstream and downstream of transcription start site, and start with G. It is contemplated herein that the targeting domain hybridizes to the target domain through complementary base pairing. Any of the targeting domains in the table can be used with a S. pyogenes eiCas9 molecule, e.g., an eiCas9 fusion protein, as described herein.

TABLE 10C
3rd Tier

Targeting domains for knocking down the CBLB gene using S. pyogenes
Cas9 selected according to third tier parameters are presented in
SEQ ID NO: 7683-7701.

[0779] Table 10D provides targeting domains for knocking down the CBLB gene using S. pyogenes Cas9 selected according to fourth tier parameters. The targeting domains bind within the 500 bp upstream and downstream of transcription start site, and do not start with G. It is contemplated herein that the targeting domain hybridizes to the target domain through complementary base pairing. Any of the targeting domains in the table can be used with a S. pyogenes eiCas9 molecule, e.g., an eiCas9 fusion protein, as described herein.

TABLE 10D
4th Tier

Targeting domains for knocking down the CBLB gene using S. pyogenes
Cas9 selected according to fourth tier parameters are presented in
SEQ ID NO: 7702-7790.

[0780] Table 10E provides targeting domains for knocking down the CBLB gene using S. pyogenes Cas9 selected according to fifth tier parameters. The targeting domains bind within the additional 500 bp upstream and downstream of transcription start site (extending to 1 kb up and downstream of the transcription start site). It is contemplated herein that the targeting domain hybridizes to the target domain through complementary base pairing. Any of the targeting domains in the table can be used with a S. pyogenes eiCas9 molecule, e.g., an eiCas9 fusion protein, as described herein.

TABLE 10E
5th Tier

Targeting domains for knocking down the CBLB gene using S. pyogenes
Cas9 selected according to fifth tier parameters are presented in
SEQ ID NO: 7791-8042.

[0781] Table 10F provides targeting domains for knocking down the CBLB gene using S. aureus Cas9 selected according to first tier parameters. The targeting domains bind within 500 bp upstream and downstream of transcription start site. It is contemplated herein that the targeting domain hybridizes to the target domain through complementary base pairing. Any of the targeting domains in the table can be used with a S. aureus eiCas9 molecule, e.g., an eiCas9 fusion protein, as described herein.

TABLE 10F
1st Tier

Targeting domains for knocking down the CBLB gene using S. aureus
Cas9 selected according to first tier parameters are presented in
SEQ ID NO: 8043-8277.

[0782] Table 10G provides targeting domains for knocking down the CBLB gene using S. aureus Cas9 selected according to second tier parameters. The targeting domains bind within additional 500 bp upstream and downstream of transcription start site (extending to 1 kb up and downstream of the transcription start site). It is contemplated herein that the targeting domain hybridizes to the target domain through complementary base pairing. Any of the targeting domains in the table can be used with a S. aureus eiCas9 molecule, e.g., an eiCas9 fusion protein, as described herein.

TABLE 10G
2nd Tier

Targeting domains for knocking down the CBLB gene using S. aureus
Cas9 selected according to second tier parameters are presented in
SEQ ID NO: 8278-8599.

[0783] Table 10H provides targeting domains for knocking down the CBLB gene using N. meningitidis Cas9 selected according to first tier parameters. The targeting domains bind within 500 bp upstream and downstream of transcription start site. It is contemplated herein that the targeting domain hybridizes to the target domain through complementary base pairing. Any of the targeting domains in the table can be used with a N. meningitidis eiCas9 molecule, e.g., an eiCas9 fusion protein, as described herein.

TABLE 10H
1st Tier

Targeting domains for knocking down the CBLB gene using
N. meningitidis meningitidis Cas9 selected according to first tier
parameters are presented in SEQ ID NO: 8600-8623.

[0784] Table 10I provides targeting domains for knocking down the CBLB gene using N. meningitidis Cas9 selected according to second tier parameters. The targeting domains bind within additional 500 bp upstream and downstream of transcription start site (extending to 1 kb up and downstream of the transcription start site). It is contemplated herein that the targeting domain hybridizes to the target domain through complementary base pairing. Any of the targeting domains in the table can be used with a N. meningitidis eiCas9 molecule, e.g., an eiCas9 fusion protein, as described herein.

TABLE 10I
2nd Tier

Targeting domains for knocking down the CBLB gene using
N. meningitidis meningitidis Cas9 selected according to second tier
parameters are presented in SEQ ID NO: 8624-8639.

[0785] Table 11A provides targeting domains for knocking out the PTPN6 gene using S. pyogenes Cas9 selected according to first tier parameters. The targeting domains bind within the first 500 bp of coding sequence downstream of start codon, have good orthogonality, and start with G. It is contemplated herein that the targeting domain hybridizes to the target domain through complementary base pairing. Any of the targeting domains in the table can be used with a S. pyogenes Cas9 molecule that generates a double stranded break (Cas9 nuclease) or a single-stranded break (Cas9 nickase). In an embodiment, dual targeting is used to create two nicks on opposite DNA strands by using S. pyogenes Cas9 nickases with two targeting domains that are complementary to opposite DNA strands, e.g., a gRNA comprising any minus strand targeting domain may be paired with any gRNA comprising a plus strand targeting domain provided that the two gRNAs are oriented on the DNA such that PAMs face outward and the distance between the 5′ ends of the gRNAs is 0-50 bp. In an embodiment, two gRNAs are used to target two Cas9 nucleases or two Cas9 nickases, e.g., a gRNA with a targeting domain from Group A can be paired with a gRNA with any targeting domain from Group B as shown in Table 11.

TABLE 11

| Group A | Group B |
|---|---|
| GGACACCUCGGCCCUUGAGC | GCCCAGUCGCAAGAACC |
| (SEQ ID NO: 3755); | (SEQ ID NO: 3756) |
| GUUCUGGAUCCGAAUAU | GUUUGCGACUCUGACAGAGC |
| (SEQ ID NO: 3762) | (SEQ ID NO: 3751) |

TABLE 11A
1st Tier

Targeting domains for knocking out the PTPN6 gene using S. pyogenes
Cas9 selected according to first tier parameters are presented in SEQ ID
NO: 3749-3762.

[0786] Table 11B provides targeting domains for knocking out the PTPN6 gene using S. pyogenes Cas9 selected according to second tier parameters. The targeting domains bind within the first 500 bp of coding sequence downstream of start codon, have good orthogonality, and do not start with G. It is contemplated herein that the targeting domain hybridizes to the target domain through complementary base pairing. Any of the targeting domains in the table can be used with a S. pyogenes Cas9 molecule that generates a double stranded break (Cas9 nuclease) or a single-stranded break (Cas9 nickase). In an embodiment, dual targeting is used to create two nicks on opposite DNA strands by using S. pyogenes Cas9 nickases with two targeting domains that are complementary to opposite DNA strands, e.g., a gRNA comprising any minus strand targeting domain may be paired with any gRNA comprising a plus strand targeting domain provided that the two gRNAs are oriented on the DNA such that PAMs face outward and the distance between the 5′ ends of the gRNAs is 0-50 bp.

TABLE 11B
2nd Tier

Targeting domains for knocking out the PTPN6 gene using S. pyogenes
Cas9 selected according to second tier parameters are presented in SEQ ID
NO: 3763-3806.

[0787] Table 11C provides targeting domains for knocking out the PTPN6 gene using S. pyogenes Cas9 selected according to third tier parameters. The targeting domains bind within the first 500 bp of coding sequence downstream of start codon, and start with G. It is contemplated herein that the targeting domain hybridizes to the target domain through complementary base pairing. Any of the targeting domains in the table can be used with a S. pyogenes Cas9 molecule that generates a double stranded break (Cas9 nuclease) or a single-stranded break (Cas9 nickase). In an embodiment, dual targeting is used to create two nicks on opposite DNA strands by using S. pyogenes Cas9 nickases with two targeting domains that are complementary to opposite DNA strands, e.g., a gRNA comprising any minus strand targeting domain may be paired with any gRNA comprising a plus strand targeting domain provided that the two gRNAs are oriented on the DNA such that PAMs face outward and the distance between the 5′ ends of the gRNAs is 0-50 bp.

TABLE 11C
3rd Tier

Targeting domains for knocking out the PTPN6 gene using S. pyogenes
Cas9 selected according to third tier parameters are presented in SEQ ID
NO: 3807-3838.

[0788] Table 11D provides targeting domains for knocking out the PTPN6 gene using S. pyogenes Cas9 selected according to fourth tier parameters. The targeting domains bind within the first 500 bp of coding sequence downstream of start codon, and do not start with G. It is contemplated herein that the targeting domain hybridizes to the target domain through complementary base pairing. Any of the targeting domains in the table can be used with a S. pyogenes Cas9 molecule that generates a double stranded break (Cas9 nuclease) or a single-stranded break (Cas9 nickase). In an embodiment, dual targeting is used to create two nicks on opposite DNA strands by using S. pyogenes Cas9 nickases with two targeting domains that are complementary to opposite DNA strands, e.g., a gRNA comprising any minus strand targeting domain may be paired with any gRNA comprising a plus strand targeting domain provided that the two gRNAs are oriented on the DNA such that PAMs face outward and the distance between the 5′ ends of the gRNAs is 0-50 bp.

TABLE 11D
4th Tier

Targeting domains for knocking out the PTPN6 gene using S. pyogenes
Cas9 selected according to fourth tier parameters are presented in SEQ ID
NO: 3839-3894.

[0789] Table 11E provides targeting domains for knocking out the PTPN6 gene using S. pyogenes Cas9 selected according to fifth tier parameters. The targeting domains bind within the remaining coding sequence (downstream of the first 500 bp). It is contemplated herein that the targeting domain hybridizes to the target domain through complementary base pairing. Any of the targeting domains in the table can be used with a S. pyogenes Cas9 molecule that generates a double stranded break (Cas9 nuclease) or a single-stranded break (Cas9 nickase). In an embodiment, dual targeting is used to create two nicks on opposite DNA strands by using S. pyogenes Cas9 nickases with two targeting domains that are complementary to opposite DNA strands, e.g., a gRNA comprising any minus strand targeting domain may be paired with any gRNA comprising a plus strand targeting domain provided that the two gRNAs are oriented on the DNA such that PAMs face outward and the distance between the 5′ ends of the gRNAs is 0-50 bp.

TABLE 11E
5th Tier

Targeting domains for knocking out the PTPN6 gene using S. pyogenes
Cas9 selected according to fifth tier parameters are presented in SEQ ID
NO: 3895-4250.

[0790] Table 11F provides targeting domains for knocking out the PTPN6 gene using S. aureus Cas9 selected according to first tier parameters. The targeting domains bind within the first 500 bp of coding sequence downstream of start codon. It is contemplated herein that the targeting domain hybridizes to the target domain through complementary base pairing. Any of the targeting domains in the table can be used with a S. aureus Cas9 molecule that generates a double stranded break (Cas9 nuclease) or a single-stranded break (Cas9 nickase). In an embodiment, dual targeting is used to create two nicks on opposite DNA strands by using S. aureus Cas9 nickases with two targeting domains that are complementary to opposite DNA strands, e.g., a gRNA comprising any minus strand targeting domain may be paired with any gRNA comprising a plus strand targeting domain provided that the two gRNAs are oriented on the DNA such that PAMs face outward and the distance between the 5′ ends of the gRNAs is 0-50 bp.

TABLE 11F
1st Tier

Targeting domains for knocking out the PTPN6 gene using S. aureus Cas9
selected according to first tier parameters are presented in SEQ ID NO:
4251-4378.

[0791] Table 11G provides targeting domains for knocking out the PTPN6 gene using S. aureus Cas9 selected according to second tier parameters. The targeting domains bind within the remaining coding sequence (downstream of the first 500 bp). It is contemplated herein that the targeting domain hybridizes to the target domain through complementary base pairing. Any of the targeting domains in the table can be used with a S. aureus Cas9 molecule that generates a double stranded break (Cas9 nuclease) or a single-stranded break (Cas9 nickase). In an embodiment, dual targeting is used to create two nicks on opposite DNA strands by using S. aureus Cas9 nickases with two targeting domains that are complementary to opposite DNA strands, e.g., a gRNA comprising any minus strand targeting domain may be paired with any gRNA comprising a plus strand targeting domain provided that the two gRNAs are oriented on the DNA such that PAMs face outward and the distance between the 5′ ends of the gRNAs is 0-50 bp.

TABLE 11G
2nd Tier

Targeting domains for knocking out the PTPN6 gene using S. aureus Cas9
selected according to second tier parameters are presented in SEQ ID NO:
4379-4692.

[0792] Table 11H provides targeting domains for knocking out the PTPN6 gene using N. meningitidis Cas9 selected according to first tier parameters. The targeting domains bind within the first 500 bp of coding sequence downstream of start codon. It is contemplated herein that the targeting domain hybridizes to the target domain through complementary base pairing. Any of the targeting domains in the table can be used with a N. meningitidis Cas9 molecule that generates a double stranded break (Cas9 nuclease) or a single-stranded break (Cas9 nickase). In an embodiment, dual targeting is used to create two nicks on opposite DNA strands by using N. meningitidis Cas9 nickases with two targeting domains that are complementary to opposite DNA strands, e.g., a gRNA comprising any minus strand targeting domain may be paired with any gRNA comprising a plus strand targeting domain provided that the two gRNAs are oriented on the DNA such that PAMs face outward and the distance between the 5′ ends of the gRNAs is 0-50 bp.

TABLE 11H
1st Tier

Targeting domains for knocking out the PTPN6 gene using
N. meningitidismeningitidis Cas9 selected according to first tier parameters
are presented in SEQ ID NO: 4693-4696.

[0793] Table 11I provides targeting domains for knocking out the PTPN6 gene using N. meningitidis Cas9 selected according to second tier parameters. The targeting domains bind within the remaining coding sequence (downstream of the first 500 bp). It is contemplated herein that the targeting domain hybridizes to the target domain through complementary base pairing. Any of the targeting domains in the table can be used with a N. meningitidis Cas9 molecule that generates a double stranded break (Cas9 nuclease) or a single-stranded break (Cas9 nickase). In an embodiment, dual targeting is used to create two nicks on opposite DNA strands by using N. meningitidis Cas9 nickases with two targeting domains that are complementary to opposite DNA strands, e.g., a gRNA comprising any minus strand targeting domain may be paired with any gRNA comprising a plus strand targeting domain provided that the two gRNAs are oriented on the DNA such that PAMs face outward and the distance between the 5′ ends of the gRNAs is 0-50 bp.

TABLE 11I
2nd Tier

Targeting domains for knocking out the PTPN6 gene using
N. meningitidismeningitidis Cas9 selected according to second tier
parameters are presented in SEQ ID NO: 4697-4700.

[0794] Table 12A provides targeting domains for knocking down the PTPN6 gene using S. pyogenes Cas9 selected according to first tier parameters. The targeting domains bind within the 500 bp upstream and downstream of transcription start site, have good orthogonality, and start with G. It is contemplated herein that the targeting domain hybridizes to the target domain through complementary base pairing. Any of the targeting domains in the table can be used with a S. pyogenes eiCas9 molecule, e.g., an eiCas9 fusion protein, as described herein.

TABLE 12A
1st Tier

Targeting domains for knocking down the PTPN6 gene using S. pyogenes
Cas9 selected according to first tier parameters are presented in SEQ ID
NO: 4701-4716.

[0795] Table 12B provides targeting domains for knocking down the PTPN6 gene using S. pyogenes Cas9 selected according to second tier parameters. The targeting domains bind within the 500 bp upstream and downstream of transcription start site, have good orthogonality, and do not start with G. It is contemplated herein that the targeting domain hybridizes to the target domain through complementary base pairing. Any of the targeting domains in the table can be used with a S. pyogenes eiCas9 molecule, e.g., an eiCas9 fusion protein, as described herein.

TABLE 12B
2nd Tier

Targeting domains for knocking down the PTPN6 gene using S. pyogenes
Cas9 selected according to second tier parameters are presented in SEQ ID
NO: 4717-4750.

[0796] Table 12C provides targeting domains for knocking down the PTPN6 gene using S. pyogenes Cas9 selected according to third tier parameters. The targeting domains bind within the 500 bp upstream and downstream of transcription start site, and start with G. It is contemplated herein that the targeting domain hybridizes to the target domain through complementary base pairing. Any of the targeting domains in the table can be used with a S. pyogenes eiCas9 molecule, e.g., an eiCas9 fusion protein, as described herein.

TABLE 12C
3rd Tier

Targeting domains for knocking down the PTPN6 gene using S. pyogenes
Cas9 selected according to third tier parameters are presented in SEQ ID
NO: 4751-4883.

[0797] Table 12D provides targeting domains for knocking down the PTPN6 gene using S. pyogenes Cas9 selected according to fourth tier parameters. The targeting domains bind within the 500 bp upstream and downstream of transcription start site, and do not start with G. It is contemplated herein that the targeting domain hybridizes to the target domain through complementary base pairing. Any of the targeting domains in the table can be used with a S. pyogenes eiCas9 molecule, e.g., an eiCas9 fusion protein, as described herein.

TABLE 12D
4th Tier

Targeting domains for knocking down the PTPN6 gene using S. pyogenes
Cas9 selected according to fourth tier parameters are presented in SEQ ID
NO: 4884-5137.

[0798] Table 12E provides targeting domains for knocking down the PTPN6 gene using S. pyogenes Cas9 selected according to fifth tier parameters. The targeting domains bind within the additional 222 bp upstream and downstream of transcription start site (extending to 722 bp upstream and 1 kb downstream of the transcription start site). It is contemplated herein that the targeting domain hybridizes to the target domain through complementary base pairing. Any of the targeting domains in the table can be used with a S. pyogenes eiCas9 molecule, e.g., an eiCas9 fusion protein, as described herein.

TABLE 12E
5th Tier

Targeting domains for knocking down the PTPN6 gene using S. pyogenes
Cas9 selected according to fifth tier parameters are presented in SEQ ID
NO: 5138-5399.

[0799] Table 12F provides targeting domains for knocking down the PTPN6 gene using S. aureus Cas9 selected according to first tier parameters. The targeting domains bind within 500 bp upstream and downstream of transcription start site. It is contemplated herein that the targeting domain hybridizes to the target domain through complementary base pairing. Any of the targeting domains in the table can be used with a S. aureus eiCas9 molecule, e.g., an eiCas9 fusion protein, as described herein.

TABLE 12F
1st Tier

Targeting domains for knocking down the PTPN6 gene using S. aureus
Cas9 selected according to first tier parameters are presented in SEQ ID
NO: 5400-5845.

[0800] Table 12G provides targeting domains for knocking down the PTPN6 gene using S. aureus Cas9 selected according to second tier parameters. The targeting domains bind within additional 222 bp upstream and downstream of transcription start site (extending to 722 bp upstream and 1 kb downstream of the transcription start site). It is contemplated herein that the targeting domain hybridizes to the target domain through complementary base pairing. Any of the targeting domains in the table can be used with a S. aureus eiCas9 molecule, e.g., an eiCas9 fusion protein, as described herein.

TABLE 12G
2nd Tier

Targeting domains for knocking down the PTPN6 gene using S. aureus
Cas9 selected according to second tier parameters are presented in
SEQ ID NO: 5846-6094.

[0801] Table 12H provides targeting domains for knocking down the PTPN6 gene using N. meningitidis Cas9 selected according to first tier parameters. The targeting domains bind within 500 bp upstream and downstream of transcription start site. It is contemplated herein that the targeting domain hybridizes to the target domain through complementary base pairing. Any of the targeting domains in the table can be used with a N. meningitidis eiCas9 molecule, e.g., an eiCas9 fusion protein, as described herein.

TABLE 12H
1st Tier

Targeting domains for knocking down the PTPN6 gene using
N. meningitidis meningitidis Cas9 selected according to first tier
parameters are presented in SEQ ID NO: 6095-6102.

[0802] Table 12I provides targeting domains for knocking down the PTPN6 gene using N. meningitidis Cas9 selected according to second tier parameters. The targeting domains bind within additional 222 bp upstream and downstream of transcription start site (extending to 722 bp upstream and 1 kb downstream of the transcription start site). It is contemplated herein that the targeting domain hybridizes to the target domain through complementary base pairing. Any of the targeting domains in the table can be used with a N. meningitidis eiCas9 molecule, e.g., an eiCas9 fusion protein, as described herein.

TABLE 12I
2nd Tier

Targeting domains for knocking down the PTPN6 gene using
N. meningitidis meningitidis Cas9 selected according to second tier
parameters are presented in SEQ ID NO: 6103-6118.

[0803] Targeting domains, disclosed herein, may comprise a 17-mer described in Tables 1A-I, Tables 2A-I, Tables 3A-H, Tables 4A-I, Tables 5A-I, Tables 6A-I, Tables 7A-H, Tables 8A-H, Tables 9A-I, Tables 10A-I, Tables 11A-I, Tables 12A-I, e.g., the targeting domains of 18 or more nucleotides may comprise the 17-mer gRNAs described in Tables 1A-I, Tables 2A-I, Tables 3A-H, Tables 4A-I, Tables 5A-I, Tables 6A-I, Tables 7A-H, Tables 8A-H, Tables 9A-I, Tables 10A-I, Tables 11A-I, Tables 12A-I.

[0804] Targeting domains, disclosed herein, may comprise a 20-mer gRNAs described in Tables 1A-I, Tables 2A-I, Tables 3A-H, Tables 4A-I, Tables 5A-I, Tables 6A-I, Tables 7A-H, Tables 8A-H, Tables 9A-I, Tables 10A-I, Tables 11A-I, Tables 12A-I, e.g., the targeting domains of 21 or more nucleotides may comprise the 20-mer gRNAs described in Tables 1A-I, Tables 2A-I, Tables 3A-H, Tables 4A-I, Tables 5A-I, Tables 6A-I, Tables 7A-H, Tables 8A-H, Tables 9A-I, Tables 10A-I, Tables 11A-I, Tables 12A-I.

[0805] Second Strategy for Designing and Tiering gRNAs

[0806] The second strategy used to identify gRNAs for use with S. pyogenes, S. aureus and N. meningtidis Cas9 enzymes differed from the first strategy as follows.

[0807] Guide RNAs (gRNAs) for use with S. pyogenes, S. aureus and N. meningtidis Cas9s were identified using a DNA sequence searching algorithm. Guide RNA design was carried out using a custom guide RNA design software based on the public tool cas-offinder (reference:Cas-OFFinder: a fast and versatile algorithm that searches for potential off-target sites of Cas9 RNA-guided endonucleases, Bioinformatics. 2014 Feb. 17. Bae S, Park J, Kim J S. PMID:24463181). Said custom guide RNA design software scores guides after calculating their genomewide off-target propensity. Typically matches ranging from perfect matches to 7 mismatches are considered for guides ranging in length from 17 to 24. Once the off-target sites are computationally determined, an aggregate score is calculated for each guide and summarized in a tabular output using a web-interface. In addition to identifying potential gRNA sites adjacent to PAM sequences, the software also identifies all PAM adjacent sequences that differ by 1, 2, 3 or more nucleotides from the selected gRNA sites. Genomic DNA sequence for each gene was obtained from the UCSC Genome browser and sequences were screened for repeat elements using the publically available RepeatMasker program. RepeatMasker searches input DNA sequences for repeated elements and regions of low complexity. The output is a detailed annotation of the repeats present in a given query sequence.

[0808] Following identification, gRNAs were ranked into tiers based on their distance to the target site or their orthogonality (based on identification of close matches in the human genome containing a relavant PAM, e.g., in the case of S. pyogenes, a NGG PAM, in the case of S. aureus, NNGRR (e.g, a NNGRRT or NNGRRV) PAM, and in the case of N. meningtidiss, a NNNNGATT or NNNNGCTT PAM. Orthogonality refers to the number of sequences in the human genome that contain a minimum number of mismatches to the target sequence. A “high level of orthogonality” or “good orthogonality” may, for example, refer to 20-mer gRNAs that have no identical sequences in the human genome besides the intended target, nor any sequences that contain one or two mismatches in the target sequence. Targeting domains with good orthogonality are selected to minimize off-target DNA cleavage.

[0809] As an example, for S. pyogenes and N. meningtidiss targets, 17-mer, or 20-mer gRNAs were designed. As another example, for S. aureus targets, 18-mer, 19-mer, 20-mer, 21-mer, 22-mer, 23-mer and 24-mer gRNAs were designed. Targeting domains, disclosed herein, may comprise the 17-mer described in Targeting domains, disclosed herein, may comprise a 17-mer described in Tables 13A-K, Tables 14A-K, Tables 15A-F, Tables 16A-K, Tables 17A-K, Tables 18A-K, Tables 19A-J, Tables 20A-J, Tables 21A-K, Tables 22A-K, Tables 23A-J, Tables 24A-K, Tables 25A-G, Tables 26A-G, Table 27, Table 29, Table 31, or Table 32, e.g., the targeting domains of 18 or more nucleotides may comprise the 17-mer gRNAs described in Tables 13A-K, Tables 14A-K, Tables 15A-F, Tables 16A-K, Tables 17A-K, Tables 18A-K, Tables 19A-J, Tables 20A-J, Tables 21A-K, Tables 22A-K, Tables 23A-J, Tables 24A-K, Tables 25A-G, Tables 26A-G, Table 27, Table 29, Table 31, or Table 32.

[0810] Targeting domains, disclosed herein, may comprise a 18-mer described in Tables 13A-K, Tables 14A-K, Tables 15A-F, Tables 16A-K, Tables 17A-K, Tables 18A-K, Tables 19A-J, Tables 20A-J, Tables 21A-K, Tables 22A-K, Tables 23A-J, Tables 24A-K, Tables 25A-G, Tables 26A-G, Table 27, Table 29, Table 31, or Table 32, e.g., the targeting domains of 19 or more nucleotides may comprise the 18-mer gRNAs described in Tables 13A-K, Tables 14A-K, Tables 15A-F, Tables 16A-K, Tables 17A-K, Tables 18A-K, Tables 19A-J, Tables 20A-J, Tables 21A-K, Tables 22A-K, Tables 23A-J, Tables 24A-K, Tables 25A-G, Tables 26A-G, Table 27, Table 29, Table 31, or Table 32, Tables 25A-G, Tables 26A-G, Table 27, Table 29, Table 31, or Table 32.

[0811] Targeting domains, disclosed herein, may comprise a 19-mer described in Tables 13A-K, Tables 14A-K, Tables 15A-F, Tables 16A-K, Tables 17A-K, Tables 18A-K, Tables 19A-J, Tables 20A-J, Tables 21A-K, Tables 22A-K, Tables 23A-J, Tables 24A-K, Tables 25A-G, Tables 26A-G, Table 27, Table 29, Table 31, or Table 32, e.g., the targeting domains of 20 or more nucleotides may comprise the 19-mer gRNAs described in Tables 13A-K, Tables 14A-K, Tables 15A-F, Tables 16A-K, Tables 17A-K, Tables 18A-K, Tables 19A-J, Tables 20A-J, Tables 21A-K, Tables 22A-K, Tables 23A-J, Tables 24A-K, Tables 25A-G, Tables 26A-G, Table 27, Table 29, Table 31, or Table 32.

[0812] Targeting domains, disclosed herein, may comprise a 20-mer gRNAs described in Tables 13A-K, Tables 14A-K, Tables 15A-F, Tables 16A-K, Tables 17A-K, Tables 18A-K, Tables 19A-J, Tables 20A-J, Tables 21A-K, Tables 22A-K, Tables 23A-J, Tables 24A-K, Tables 25A-G, Tables 26A-G, Table 27, Table 29, Table 31, or Table 32, e.g., the targeting domains of 21 or more nucleotides may comprise the 20-mer gRNAs described in Tables 13A-K, Tables 14A-K, Tables 15A-F, Tables 16A-K, Tables 17A-K, Tables 18A-K, Tables 19A-J, Tables 20A-J, Tables 21A-K, Tables 22A-K, Tables 23A-J, Tables 24A-K, Tables 25A-G, Tables 26A-G, Table 27, Table 29, Table 31, or Table 32.

[0813] Targeting domains, disclosed herein, may comprise a 21-mer described in Tables 13A-K, Tables 14A-K, Tables 15A-F, Tables 16A-K, Tables 17A-K, Tables 18A-K, Tables 19A-J, Tables 20A-J, Tables 21A-K, Tables 22A-K, Tables 23A-J, Tables 24A-K, Tables 25A-G, Tables 26A-G, Table 27, Table 29, Table 31, or Table 32, e.g., the targeting domains of 22 or more nucleotides may comprise the 21-mer gRNAs described in Tables 13A-K, Tables 14A-K, Tables 15A-F, Tables 16A-K, Tables 17A-K, Tables 18A-K, Tables 19A-J, Tables 20A-J, Tables 21A-K, Tables 22A-K, Tables 23A-J, Tables 24A-K, Tables 25A-G, Tables 26A-G, Table 27, Table 29, Table 31, or Table 32.

[0814] Targeting domains, disclosed herein, may comprise a 22-mer described in Tables 13A-K, Tables 14A-K, Tables 15A-F, Tables 16A-K, Tables 17A-K, Tables 18A-K, Tables 19A-J, Tables 20A-J, Tables 21A-K, Tables 22A-K, Tables 23A-J, Tables 24A-K, Tables 25A-G, Tables 26A-G, Table 27, Table 29, Table 31, or Table 32, e.g., the targeting domains of 23 or more nucleotides may comprise the 22-mer gRNAs described in Tables 13A-K, Tables 14A-K, Tables 15A-F, Tables 16A-K, Tables 17A-K, Tables 18A-K, Tables 19A-J, Tables 20A-J, Tables 21A-K, Tables 22A-K, Tables 23A-J, Tables 24A-K, Tables 25A-G, Tables 26A-G, Table 27, Table 29, Table 31, or Table 32.

[0815] Targeting domains, disclosed herein, may comprise a 23-mer described in Tables 13A-K, Tables 14A-K, Tables 15A-F, Tables 16A-K, Tables 17A-K, Tables 18A-K, Tables 19A-J, Tables 20A-J, Tables 21A-K, Tables 22A-K, Tables 23A-J, Tables 24A-K, Tables 25A-G, Tables 26A-G, Table 27, Table 29, Table 31, or Table 32, e.g., the targeting domains of 24 or more nucleotides may comprise the 23-mer gRNAs described in Tables 13A-K, Tables 14A-K, Tables 15A-F, Tables 16A-K, Tables 17A-K, Tables 18A-K, Tables 19A-J, Tables 20A-J, Tables 21A-K, Tables 22A-K, Tables 23A-J, Tables 24A-K, Tables 25A-G, Tables 26A-G, Table 27, Table 29, Table 31, or Table 32.

[0816] Targeting domains, disclosed herein, may comprise a 24-mer described in Tables 13A-K, Tables 14A-K, Tables 15A-F, Tables 16A-K, Tables 17A-K, Tables 18A-K, Tables 19A-J, Tables 20A-J, Tables 21A-K, Tables 22A-K, Tables 23A-J, Tables 24A-K, Tables 25A-G, Tables 26A-G, Table 27, Table 29, Table 31, or Table 32, e.g., the targeting domains of 25 or more nucleotides may comprise the 24-mer gRNAs described in Tables 13A-K, Tables 14A-K, Tables 15A-F, Tables 16A-K, Tables 17A-K, Tables 18A-K, Tables 19A-J, Tables 20A-J, Tables 21A-K, Tables 22A-K, Tables 23A-J, Tables 24A-K, Tables 25A-G, Tables 26A-G, Table 27, Table 29, Table 31, or Table 32.

[0817] gRNAs were identified for both single-gRNA nuclease cleavage and for a dual-gRNA paired “nickase” strategy. Criteria for selecting gRNAs and the determination for which gRNAs can be used for which strategy is based on several considerations:

[0818] 1. gRNA pairs should be oriented on the DNA such that PAMs are facing out and cutting with the D10A Cas9 nickase will result in 5′ overhangs.

[0819] 2. An assumption that cleaving with dual nickase pairs will result in deletion of the entire intervening sequence at a reasonable frequency. However, it will also often result in indel mutations at the site of only one of the gRNAs. Candidate pair members can be tested for how efficiently they remove the entire sequence versus just causing indel mutations at the site of one gRNA.

[0820] The Targeting Domains discussed herein can be incorporated into the gRNAs described herein.

[0821] For designing knock out strategies, in some embodiments, the targeting domains for tier 1 gRNA molecules for S. pyogenes were selected based on their distance to the target site and their orthogonality (PAM is NGG). The targeting domains for tier 1 gRNA molecules were selected based on (1) a reasonable distance to the target position, e.g., within the first 500 bp of coding sequence downstream of start codon and (2) a high level of orthogonality. For selection of tier 2 gRNAs, a high level of orthogonality was not required. Tier 3 gRNAs removed the requirement of good orthogonality and a longer sequence (e.g., the rest of the coding sequence) was scanned. Note that tiers are non-inclusive (each gRNA is listed only once). In certain instances, no gRNA was identified based on the criteria of the particular tier.

[0822] For designing knock out strategies, in some embodiments, the targeting domain for tier 1 gRNA molecules for N. meningtidis were selected within the first 500 bp of the coding sequence and had a high level of orthogonality. The targeting domain for tier 2 gRNA molecules for N. meningtidis were selected within the first 500 bp of the coding sequence and did not require high orthogonality. The targeting domain for tier 3 gRNA molecules for N. meningtidis were selected within a remainder of coding sequence downstream of the 500 bp. Note that tiers are non-inclusive (each gRNA is listed only once). In certain instances, no gRNA was identified based on the criteria of the particular tier.

[0823] For designing knock out strategies, in some embodiments, the targeting domain for tier 1 grNA molecules for S. aureus were selected within the first 500 bp of the coding sequence, had a high level of orthogonality, and contained a NNGRRT PAM. The targeting domain for tier 2 grNA molecules for S. aureus were selected within the first 500 bp of the coding sequence, no level of orthogonality was required, and contained a NNGRRT PAM. The targeting domain for tier 3 gRNA molecules for S. aureus were selected within the remainder of the coding sequence downstream and contained a NNGRRT PAM. The targeting domain for tier 4 gRNA molecules for S. aureus were selected within the first 500 bp of the coding sequence and contained a NNGRRV PAM. The targeting domain for tier 5 gRNA molecules for S. aureus were selected within the remainder of the coding sequence downstream and contained a NNGRRV PAM. Note that tiers are non-inclusive (each gRNA is listed only once). In certain instances, no gRNA was identified based on the criteria of the particular tier.

[0824] For designing of gRNA molecules for knocking down strategies, in some embodiments, the targeting domain for tier 1 gRNA molecules for S. pyogenes were selected within the first 500 bp upstream and downstream of the transcription start site and had a high level of orthogonality. The targeting domain for tier 2 gRNA molecules for S. pyogenes were selected within the first 500 bp upstream and downstream of the transcription start site and did not require high orthogonality. The targeting domain for tier 3 gRNA molecules for S. pyogenes were selected within the additional 500 bp upstream and downstream of transcription start site (e.g., extending to 1 kb up and downstream of the transcription start site). Note that tiers are non-inclusive (each gRNA is listed only once). In certain instances, no gRNA was identified based on the criteria of the particular tier.

[0825] For designing of gRNA molecules for knocking down strategies, in some embodiments, the targeting domain for tier 1 gRNA molecules for N. meningtidis were selected within the first 500 bp upstream and downstream of the transcription start site and had a high level of orthogonality. The targeting domain for tier 2 gRNA molecules for N. meningtidis were selected within the first 500 bp upstream and downstream of the transcription start site and did not require high orthogonality. The targeting domain for tier 3 gRNA molecules for N. meningtidis were selected within the additional 500 bp upstream and downstream of transcription start site (e.g., extending to 1 kb up and downstream of the transcription start site). Note that tiers are non-inclusive (each gRNA is listed only once). In certain instances, no gRNA was identified based on the criteria of the particular tier.

[0826] For designing of gRNA molecules for knocking down strategies, in some embodiments, the targeting domain for tier 1 gRNA molecules for S. aureus were selected within 500 bp upstream and downstream of transcription start site, a high level of orthogonality and PAM is NNGRRT. The targeting domain for tier 2 gRNA molecules for S. aureus were selected within 500 bp upstream and downstream of transcription start site, no orthogonality requirement and PAM is NNGRRT. The targeting domain for tier 3 gRNA molecules for S. aureus were selected within the additional 500 bp upstream and downstream of transcription start site (e.g., extending to 1 kb up and downstream of the transcription start site) and PAM is NNGRRT. The targeting domain for tier 4 gRNA molecules for S. aureus were selected within 500 bp upstream and downstream of transcription start site and PAM is NNGRRV. The targeting domain for tier 5 gRNA molecules for S. aureus were selected within the additional 500 bp upstream and downstream of transcription start site (extending to 1 kb up and downstream of the transcription start site) and PAM is NNGRRV. Note that tiers are non-inclusive (each gRNA is listed only once). In certain instances, no gRNA was identified based on the criteria of the particular tier.

[0827] Exemplary Targeting Domains (Second Strategy)

[0828] Below are tables for providing exemplary targeting domains according to the second design and tiering strategy. As an example, for S. pyogenes and N. meningtidis targets, 17-mer, or 20-mer gRNAs were designed. As another example, for S. aureus targets, 18-mer, 19-mer, 20-mer, 21-mer, 22-mer, 23-mer and 24-mer gRNAs were designed.

[0829] Table 13A provides targeting domains for knocking out the FAS gene using S. pyogenes Cas9 selected according to first tier parameters. The targeting domains bind within the first 500 bp of coding sequence downstream of start codon and have good orthogonality. It is contemplated herein that the targeting domain hybridizes to the target domain through complementary base pairing. Any of the targeting domains in the table can be used with a S. pyogenes Cas9 molecule that generates a double stranded break (Cas9 nuclease) or a single-stranded break (Cas9 nickase). In an embodiment, dual targeting is used to create two nicks on opposite DNA strands by using S. pyogenes Cas9 nickases with two targeting domains that are complementary to opposite DNA strands, e.g., a gRNA comprising any minus strand targeting domain may be paired with any gRNA comprising a plus strand targeting domain provided that the two gRNAs are oriented on the DNA such that PAMs face outward and the distance between the 5′ ends of the gRNAs is 0-50 bp.

TABLE 13A
1st Tier

Targeting domains for knocking out the FAS gene using S. pyogenes
Cas9 selected according to first tier parameters are presented in
SEQ ID NO: 27729-27741.

[0830] Table 13B provides targeting domains for knocking out the FAS gene using S. pyogenes Cas9 selected according to second tier parameters. The targeting domains bind within the first 500 bp of coding sequence downstream of start codon and good orthogonality is not required. It is contemplated herein that the targeting domain hybridizes to the target domain through complementary base pairing. Any of the targeting domains in the table can be used with a S. pyogenes Cas9 molecule that generates a double stranded break (Cas9 nuclease) or a single-stranded break (Cas9 nickase). In an embodiment, dual targeting is used to create two nicks on opposite DNA strands by using S. pyogenes Cas9 nickases with two targeting domains that are complementary to opposite DNA strands, e.g., a gRNA comprising any minus strand targeting domain may be paired with any gRNA comprising a plus strand targeting domain provided that the two gRNAs are oriented on the DNA such that PAMs face outward and the distance between the 5′ ends of the gRNAs is 0-50 bp.

TABLE 13B
2nd Tier

Targeting domains for knocking out the FAS gene using S. pyogenes
Cas9 selected according to second tier parameters are presented in
SEQ ID NO: 27742-27888.

[0831] Table 13C provides targeting domains for knocking out the FAS gene using S. pyogenes Cas9 selected according to third tier parameters. The targeting domains are beyond the first 500 bp of coding sequence downstream of start codon and good orthogonality is not required. It is contemplated herein that the targeting domain hybridizes to the target domain through complementary base pairing. Any of the targeting domains in the table can be used with a S. pyogenes Cas9 molecule that generates a double stranded break (Cas9 nuclease) or a single-stranded break (Cas9 nickase). In an embodiment, dual targeting is used to create two nicks on opposite DNA strands by using S. pyogenes Cas9 nickases with two targeting domains that are complementary to opposite DNA strands, e.g., a gRNA comprising any minus strand targeting domain may be paired with any gRNA comprising a plus strand targeting domain provided that the two gRNAs are oriented on the DNA such that PAMs face outward and the distance between the 5′ ends of the gRNAs is 0-50 bp.

TABLE 13C
3rd Tier

Targeting domains for knocking out the FAS gene using S. pyogenes
Cas9 selected according to third tier parameters are presented in
SEQ ID NO: 27889-27968.

[0832] Table 13D provides targeting domains for knocking out the FAS gene using S. aureus Cas9 selected according to first tier parameters. The targeting domains were selected within the first 500 bp of the coding sequence, had a high level of orthogonality, and contained a NNGRRT PAM. It is contemplated herein that the targeting domain hybridizes to the target domain through complementary base pairing. Any of the targeting domains in the table can be used with a S. aureus Cas9 molecule that generates a double stranded break (Cas9 nuclease) or a single-stranded break (Cas9 nickase). In an embodiment, dual targeting is used to create two nicks on opposite DNA strands by using S. aureus Cas9 nickases with two targeting domains that are complementary to opposite DNA strands, e.g., a gRNA comprising any minus strand targeting domain may be paired with any gRNA comprising a plus strand targeting domain provided that the two gRNAs are oriented on the DNA such that PAMs face outward and the distance between the 5′ ends of the gRNAs is 0-50 bp.

TABLE 13D
1st Tier

Targeting domains for knocking out the FAS gene using S. aureus
Cas9 selected according to first tier parameters are presented in
SEQ ID NO: 27969-28034.

[0833] Table 13E provides targeting domains for knocking out the FAS gene using S. aureus Cas9 selected according to second tier parameters. The targeting domains were selected within the first 500 bp of the coding sequence, no level of orthogonality was required, and contained a NNGRRT PAM. It is contemplated herein that the targeting domain hybridizes to the target domain through complementary base pairing. Any of the targeting domains in the table can be used with a S. aureus Cas9 molecule that generates a double stranded break (Cas9 nuclease) or a single-stranded break (Cas9 nickase). In an embodiment, dual targeting is used to create two nicks on opposite DNA strands by using S. aureus Cas9 nickases with two targeting domains that are complementary to opposite DNA strands, e.g., a gRNA comprising any minus strand targeting domain may be paired with any gRNA comprising a plus strand targeting domain provided that the two gRNAs are oriented on the DNA such that PAMs face outward and the distance between the 5′ ends of the gRNAs is 0-50 bp.

TABLE 13E
2nd Tier

Targeting domains for knocking out the FAS gene using S. aureus
Cas9 selected according to second tier parameters are presented in
SEQ ID NO: 28035-28101.

[0834] Table 13F provides targeting domains for knocking out the FAS gene using S. aureus Cas9 selected according to third tier parameters. The targeting domains were selected within the remainder of the coding sequence downstream and contained a NNGRRT PAM. It is contemplated herein that the targeting domain hybridizes to the target domain through complementary base pairing. Any of the targeting domains in the table can be used with a S. aureus Cas9 molecule that generates a double stranded break (Cas9 nuclease) or a single-stranded break (Cas9 nickase). In an embodiment, dual targeting is used to create two nicks on opposite DNA strands by using S. aureus Cas9 nickases with two targeting domains that are complementary to opposite DNA strands, e.g., a gRNA comprising any minus strand targeting domain may be paired with any gRNA comprising a plus strand targeting domain provided that the two gRNAs are oriented on the DNA such that PAMs face outward and the distance between the 5′ ends of the gRNAs is 0-50 bp.

TABLE 13F
3rd Tier

Targeting domains for knocking out the FAS gene using S. aureus
Cas9 selected according to third tier parameters are presented in
SEQ ID NO: 28102-28639.

[0835] Table 13G provides targeting domains for knocking out the FAS gene using S. aureus Cas9 selected according to fourth tier parameters. The targeting domains were selected within the first 500 bp of the coding sequence and contained a NNGRRV PAM. It is contemplated herein that the targeting domain hybridizes to the target domain through complementary base pairing. Any of the targeting domains in the table can be used with a S. aureus Cas9 molecule that generates a double stranded break (Cas9 nuclease) or a single-stranded break (Cas9 nickase). In an embodiment, dual targeting is used to create two nicks on opposite DNA strands by using S. aureus Cas9 nickases with two targeting domains that are complementary to opposite DNA strands, e.g., a gRNA comprising any minus strand targeting domain may be paired with any gRNA comprising a plus strand targeting domain provided that the two gRNAs are oriented on the DNA such that PAMs face outward and the distance between the 5′ ends of the gRNAs is 0-50 bp.

TABLE 13G
4th Tier

Targeting domains for knocking out the FAS gene using S. aureus
Cas9 selected according to fourth tier parameters are presented in
SEQ ID NO: 28640-28772.

[0836] Table 13H provides targeting domains for knocking out the FAS gene using S. aureus Cas9 selected according to fifth tier parameters. The targeting domains were selected within the remainder of the coding sequence downstream and contained a NNGRRV PAM. It is contemplated herein that the targeting domain hybridizes to the target domain through complementary base pairing. Any of the targeting domains in the table can be used with a S. aureus Cas9 molecule that generates a double stranded break (Cas9 nuclease) or a single-stranded break (Cas9 nickase). In an embodiment, dual targeting is used to create two nicks on opposite DNA strands by using S. aureus Cas9 nickases with two targeting domains that are complementary to opposite DNA strands, e.g., a gRNA comprising any minus strand targeting domain may be paired with any gRNA comprising a plus strand targeting domain provided that the two gRNAs are oriented on the DNA such that PAMs face outward and the distance between the 5′ ends of the gRNAs is 0-50 bp.

TABLE 13H
5th Tier

Targeting domains for knocking out the FAS gene using S. aureus
Cas9 selected according to fifth tier parameters are presented in
SEQ ID NO: 28773-29209.

[0837] Table 13I provides targeting domains for knocking out the FAS gene using N. meningitidis Cas9 selected according to first tier parameters. The targeting domains bind within the first 500 bp of coding sequence downstream of start codon and have good orthogonality. It is contemplated herein that the targeting domain hybridizes to the target domain through complementary base pairing. Any of the targeting domains in the table can be used with a N. meningitidis Cas9 molecule that generates a double stranded break (Cas9 nuclease) or a single-stranded break (Cas9 nickase). In an embodiment, dual targeting is used to create two nicks on opposite DNA strands by using N. meningitidis nickases with two targeting domains that are complementary to opposite DNA strands, e.g., a gRNA comprising any minus strand targeting domain may be paired with any gRNA comprising a plus strand targeting domain provided that the two gRNAs are oriented on the DNA such that PAMs face outward and the distance between the 5′ ends of the gRNAs is 0-50 bp.

TABLE 13I
1st Tier

Targeting domains for knocking out the FAS gene using
N. meningitidis meningitidis Cas9 selected according to first tier
parameters are presented in SEQ ID NO: 29210-29229.

[0838] Table 13J provides targeting domains for knocking out the FAS gene using N. meningitidis Cas9 selected according to second tier parameters. The targeting domains bind within the first 500 bp of coding sequence downstream of start codon and good orthogonality is not required. It is contemplated herein that the targeting domain hybridizes to the target domain through complementary base pairing. Any of the targeting domains in the table can be used with a N. meningitidis Cas9 molecule that generates a double stranded break (Cas9 nuclease) or a single-stranded break (Cas9 nickase). In an embodiment, dual targeting is used to create two nicks on opposite DNA strands by using N. meningitidis Cas9 nickases with two targeting domains that are complementary to opposite DNA strands, e.g., a gRNA comprising any minus strand targeting domain may be paired with any gRNA comprising a plus strand targeting domain provided that the two gRNAs are oriented on the DNA such that PAMs face outward and the distance between the 5′ ends of the gRNAs is 0-50 bp.

TABLE 13J
2nd Tier

Targeting domains for knocking out the FAS gene using
N. meningitidis meningitidis Cas9 selected according to second tier
parameters are presented in SEQ ID NO: 29230-29231.

[0839] Table 13K provides targeting domains for knocking out the FAS gene using N. meningitidis Cas9 selected according to third tier parameters. The targeting domains are beyond the first 500 bp of coding sequence downstream of start codon and good orthogonality is not required. It is contemplated herein that the targeting domain hybridizes to the target domain through complementary base pairing. Any of the targeting domains in the table can be used with a N. meningitidis Cas9 molecule that generates a double stranded break (Cas9 nuclease) or a single-stranded break (Cas9 nickase). In an embodiment, dual targeting is used to create two nicks on opposite DNA strands by using N. meningitidis Cas9 nickases with two targeting domains that are complementary to opposite DNA strands, e.g., a gRNA comprising any minus strand targeting domain may be paired with any gRNA comprising a plus strand targeting domain provided that the two gRNAs are oriented on the DNA such that PAMs face outward and the distance between the 5′ ends of the gRNAs is 0-50 bp.

TABLE 13K
3rd Tier

Targeting domains for knocking out the FAS gene using
N. meningitidis meningitidis Cas9 selected according to third tier
parameters are presented in SEQ ID NO: 29232-29266.

[0840] Table 14A provides targeting domains for knocking down the FAS gene using S. pyogenes Cas9 selected according to first tier parameters. The targeting domains were selected within the first 500 bp upstream and downstream of the transcription start site and had a high level of orthogonality. It is contemplated herein that the targeting domain hybridizes to the target domain through complementary base pairing. Any of the targeting domains in the table can be used with a S. pyogenes eiCas9 molecule, e.g., an eiCas9 fusion protein, as described herein.

TABLE 14A
1st Tier

Targeting domains for knocking down the FAS gene using S. pyogenes
Cas9 selected according to first tier parameters are presented in
SEQ ID NO: 29267-29363.

[0841] Table 14B provides targeting domains for knocking down the FAS gene using S. pyogenes Cas9 selected according to second tier parameters. The targeting domains were selected within the first 500 bp upstream and downstream of the transcription start site and did not require high orthogonality. It is contemplated herein that the targeting domain hybridizes to the target domain through complementary base pairing. Any of the targeting domains in the table can be used with a S. pyogenes eiCas9 molecule, e.g., an eiCas9 fusion protein, as described herein.

TABLE 14B
2nd Tier

Targeting domains for knocking down the FAS gene using S. pyogenes
Cas9 selected according to second tier parameters are presented in SEQ
ID NO: 29364-29648.

[0842] Table 14C provides targeting domains for knocking down the FAS gene using S. pyogenes Cas9 selected according to third tier parameters. The targeting domains were selected within the additional 500 bp upstream and downstream of transcription start site (e.g. extending to 1 kb up and downstream of the transcription start site). It is contemplated herein that the targeting domain hybridizes to the target domain through complementary base pairing. Any of the targeting domains in the table can be used with a S. pyogenes eiCas9 molecule, e.g., an eiCas9 fusion protein, as described herein.

TABLE 14C
3rd Tier

Targeting domains for knocking down the FAS gene using S. pyogenes
Cas9 selected according to third tier parameters are presented in
SEQ ID NO: 29649-29960.

[0843] Table 14D provides targeting domains for knocking down the FAS gene using S. aureus Cas9 selected according to first tier parameters. The targeting domains were selected within 500 bp upstream and downstream of transcription start site, a high level of orthogonality and PAM is NNGRRT. It is contemplated herein that the targeting domain hybridizes to the target domain through complementary base pairing. Any of the targeting domains in the table can be used with a S. aureus eiCas9 molecule, e.g., an eiCas9 fusion protein, as described herein.

TABLE 14D
1st Tier

Targeting domains for knocking down the FAS gene using S. aureus
Cas9 selected according to first tier parameters are presented in
SEQ ID NO: 29961-30083.

[0844] Table 14E provides targeting domains for knocking down the FAS gene using S. aureus Cas9 selected according to second tier parameters. The targeting domains were selected within 500 bp upstream and downstream of transcription start site, no orthogonality requirement and PAM is NNGRRT. It is contemplated herein that the targeting domain hybridizes to the target domain through complementary base pairing. Any of the targeting domains in the table can be used with a S. aureus eiCas9 molecule, e.g., an eiCas9 fusion protein, as described herein.

TABLE 14E
2nd Tier

Targeting domains for knocking down the FAS gene using S. aureus
Cas9 selected according to second tier parameters are presented in
SEQ ID NO: 30084-30149.

[0845] Table 14F provides targeting domains for knocking down the FAS gene using S. aureus Cas9 selected according to third tier parameters. The targeting domains were selected within the additional 500 bp upstream and downstream of transcription start site (e.g. extending to 1 kb up and downstream of the transcription start site) and PAM is NNGRRT. It is contemplated herein that the targeting domain hybridizes to the target domain through complementary base pairing. Any of the targeting domains in the table can be used with a S. aureus eiCas9 molecule, e.g., an eiCas9 fusion protein, as described herein.

TABLE 14F
3rd Tier

Targeting domains for knocking down the FAS gene using S. aureus
Cas9 selected according to third tier parameters are presented in
SEQ ID NO: 30150-31395.

[0846] Table 14G provides targeting domains for knocking down the FAS gene using S. aureus Cas9 selected according to fourth tier parameters. The targeting domains were selected within 500 bp upstream and downstream of transcription start site and PAM is NNGRRV. It is contemplated herein that the targeting domain hybridizes to the target domain through complementary base pairing. Any of the targeting domains in the table can be used with a S. aureus eiCas9 molecule, e.g., an eiCas9 fusion protein, as described herein.

TABLE 14G
4th Tier

Targeting domains for knocking down the FAS gene using S. aureus
Cas9 selected according to fourth tier parameters are presented in
SEQ ID NO: 31396-31556.

[0847] Table 14H provides targeting domains for knocking down the FAS gene using S. aureus Cas9 selected according to fifth tier parameters. The targeting domains were selected within the additional 500 bp upstream and downstream of transcription start site (extending to 1 kb up and downstream of the transcription start site) and PAM is NNGRRV. It is contemplated herein that the targeting domain hybridizes to the target domain through complementary base pairing. Any of the targeting domains in the table can be used with a S. aureus eiCas9 molecule, e.g., an eiCas9 fusion protein, as described herein.

TABLE 14H
5th Tier

Targeting domains for knocking down the FAS gene using S. aureus
Cas9 selected according to fifth tier parameters are presented in
SEQ ID NO: 31557-32573.

[0848] Table 14I provides targeting domains for knocking down the FAS gene using N. meningitidis Cas9 selected according to first tier parameters. The targeting were selected within the first 500 bp upstream and downstream of the transcription start site and had a high level of orthogonality. It is contemplated herein that the targeting domain hybridizes to the target domain through complementary base pairing. Any of the targeting domains in the table can be used with a N. meningitidis eiCas9 molecule, e.g., an eiCas9 fusion protein, as described herein.

TABLE 14I
1st Tier

Targeting domains for knocking down the FAS gene using
N. meningitidis meningitidis Cas9 selected according to first tier
parameters are presented in SEQ ID NO: 32574-32597.

[0849] Table 14J provides targeting domains for knocking down the FAS gene using N. meningitidis Cas9 selected according to second tier parameters. The targeting domains were selected within the first 500 bp upstream and downstream of the transcription start site and did not require high orthogonality. It is contemplated herein that the targeting domain hybridizes to the target domain through complementary base pairing. Any of the targeting domains in the table can be used with a N. meningitidis eiCas9 molecule, e.g., an eiCas9 fusion protein, as described herein.

TABLE 14J
2nd Tier

Targeting domains for knocking down the FAS gene using
N. meningitidis meningitidis Cas9 selected according to second tier
parameters are presented in SEQ ID NO: 32598-32599.

[0850] Table 14K provides targeting domains for knocking down the FAS gene using N. meningitidis Cas9 selected according to third tier parameters. The targeting domains were selected within the additional 500 bp upstream and downstream of transcription start site (e.g. extending to 1 kb up and downstream of the transcription start site). It is contemplated herein that the targeting domain hybridizes to the target domain through complementary base pairing. Any of the targeting domains in the table can be used with a N. meningitidis eiCas9 molecule, e.g., an eiCas9 fusion protein, as described herein.

TABLE 14K
3rd Tier

Targeting domains for knocking down the FAS gene using
N. meningitidis meningitidis Cas9 selected according to third tier
parameters are presented in SEQ ID NO: 32600-32635.

[0851] Table 15A provides targeting domains for knocking out the BID gene using S. pyogenes Cas9 selected according to first tier parameters. The targeting domains bind within the first 500 bp of coding sequence downstream of start codon and have good orthogonality. It is contemplated herein that the targeting domain hybridizes to the target domain through complementary base pairing. Any of the targeting domains in the table can be used with a S. pyogenes Cas9 molecule that generates a double stranded break (Cas9 nuclease) or a single-stranded break (Cas9 nickase). In an embodiment, dual targeting is used to create two nicks on opposite DNA strands by using S. pyogenes Cas9 nickases with two targeting domains that are complementary to opposite DNA strands, e.g., a gRNA comprising any minus strand targeting domain may be paired with any gRNA comprising a plus strand targeting domain provided that the two gRNAs are oriented on the DNA such that PAMs face outward and the distance between the 5′ ends of the gRNAs is 0-50 bp.

TABLE 15A
1st Tier

Targeting domains for knocking out the BID gene using S. pyogenes
Cas9 selected according to first tier parameters are presented in
SEQ ID NO: 40252-40513.

[0852] Table 15B provides targeting domains for knocking out the BID gene using S. pyogenes Cas9 selected according to second tier parameters. The targeting domains bind within the first 500 bp of coding sequence downstream of start codon and good orthogonality is not required. It is contemplated herein that the targeting domain hybridizes to the target domain through complementary base pairing. Any of the targeting domains in the table can be used with a S. pyogenes Cas9 molecule that generates a double stranded break (Cas9 nuclease) or a single-stranded break (Cas9 nickase). In an embodiment, dual targeting is used to create two nicks on opposite DNA strands by using S. pyogenes Cas9 nickases with two targeting domains that are complementary to opposite DNA strands, e.g., a gRNA comprising any minus strand targeting domain may be paired with any gRNA comprising a plus strand targeting domain provided that the two gRNAs are oriented on the DNA such that PAMs face outward and the distance between the 5′ ends of the gRNAs is 0-50 bp.

TABLE 15B
2nd Tier

Targeting domains for knocking out the BID gene using S. pyogenes
Cas9 selected according to second tier parameters are presented in
SEQ ID NO: 40514-40627.

[0853] Table 15C provides targeting domains for knocking out the BID gene using S. aureus Cas9 selected according to first tier parameters. The targeting domains were selected within the first 500 bp of the coding sequence, had a high level of orthogonality, and contained a NNGRRT PAM. It is contemplated herein that the targeting domain hybridizes to the target domain through complementary base pairing. Any of the targeting domains in the table can be used with a S. aureus Cas9 molecule that generates a double stranded break (Cas9 nuclease) or a single-stranded break (Cas9 nickase). In an embodiment, dual targeting is used to create two nicks on opposite DNA strands by using S. aureus Cas9 nickases with two targeting domains that are complementary to opposite DNA strands, e.g., a gRNA comprising any minus strand targeting domain may be paired with any gRNA comprising a plus strand targeting domain provided that the two gRNAs are oriented on the DNA such that PAMs face outward and the distance between the 5′ ends of the gRNAs is 0-50 bp.

TABLE 15C
1st Tier

Targeting domains for knocking out the BID gene using S. aureus
Cas9 selected according to first tier parameters are presented in
SEQ ID NO: 40628-40675.

[0854] Table 15D provides targeting domains for knocking out the BID gene using S. aureus Cas9 selected according to second tier parameters. The targeting domains were selected within the first 500 bp of the coding sequence, no level of orthogonality was required, and contained a NNGRRT PAM. It is contemplated herein that the targeting domain hybridizes to the target domain through complementary base pairing. Any of the targeting domains in the table can be used with a S. aureus Cas9 molecule that generates a double stranded break (Cas9 nuclease) or a single-stranded break (Cas9 nickase). In an embodiment, dual targeting is used to create two nicks on opposite DNA strands by using S. aureus Cas9 nickases with two targeting domains that are complementary to opposite DNA strands, e.g., a gRNA comprising any minus strand targeting domain may be paired with any gRNA comprising a plus strand targeting domain provided that the two gRNAs are oriented on the DNA such that PAMs face outward and the distance between the 5′ ends of the gRNAs is 0-50 bp.

TABLE 15D
2nd Tier

Targeting domains for knocking out the BID gene using S. aureus
Cas9 selected according to second tier parameters are presented in
SEQ ID NO: 40676-40802.

[0855] Table 15E provides targeting domains for knocking out the BID gene using S. aureus Cas9 selected according to third tier parameters. The targeting domains were selected within the remainder of the coding sequence downstream and contained a NNGRRT PAM. It is contemplated herein that the targeting domain hybridizes to the target domain through complementary base pairing. Any of the targeting domains in the table can be used with a S. aureus Cas9 molecule that generates a double stranded break (Cas9 nuclease) or a single-stranded break (Cas9 nickase). In an embodiment, dual targeting is used to create two nicks on opposite DNA strands by using S. aureus Cas9 nickases with two targeting domains that are complementary to opposite DNA strands, e.g., a gRNA comprising any minus strand targeting domain may be paired with any gRNA comprising a plus strand targeting domain provided that the two gRNAs are oriented on the DNA such that PAMs face outward and the distance between the 5′ ends of the gRNAs is 0-50 bp.

TABLE 15E
3rd Tier

Targeting domains for knocking out the BID gene using S. aureus
Cas9 selected according to third tier parameters are presented in
SEQ ID NO: 40803-41834.

[0856] Table 15F provides targeting domains for knocking out the BID gene using N. meningitidis Cas9 selected according to first tier parameters. The targeting domains bind within the first 500 bp of coding sequence downstream of start codon and have good orthogonality. It is contemplated herein that the targeting domain hybridizes to the target domain through complementary base pairing. Any of the targeting domains in the table can be used with a N. meningitidis Cas9 molecule that generates a double stranded break (Cas9 nuclease) or a single-stranded break (Cas9 nickase). In an embodiment, dual targeting is used to create two nicks on opposite DNA strands by using N. meningitidis nickases with two targeting domains that are complementary to opposite DNA strands, e.g., a gRNA comprising any minus strand targeting domain may be paired with any gRNA comprising a plus strand targeting domain provided that the two gRNAs are oriented on the DNA such that PAMs face outward and the distance between the 5′ ends of the gRNAs is 0-50 bp.

TABLE 15F
1st Tier

Targeting domains for knocking out the BID gene using
N. meningitidismeningitidis Cas9 selected according to first tier
parameters are presented in SEQ ID NO: 41835-41848.

[0857] Table 16A provides targeting domains for knocking down the BID gene using S. pyogenes Cas9 selected according to first tier parameters. The targeting domains were selected within the first 500 bp upstream and downstream of the transcription start site and had a high level of orthogonality. It is contemplated herein that the targeting domain hybridizes to the target domain through complementary base pairing. Any of the targeting domains in the table can be used with a S. pyogenes eiCas9 molecule, e.g., an eiCas9 fusion protein, as described herein.

TABLE 16A
1st Tier

Targeting domains for knocking down the BID gene using S. pyogenes
Cas9 selected according to first tier parameters are presented in SEQ ID
NO: 41849-41956.

[0858] Table 16B provides targeting domains for knocking down the BID gene using S. pyogenes Cas9 selected according to second tier parameters. The targeting domains were selected within the first 500 bp upstream and downstream of the transcription start site and did not require high orthogonality. It is contemplated herein that the targeting domain hybridizes to the target domain through complementary base pairing. Any of the targeting domains in the table can be used with a S. pyogenes eiCas9 molecule, e.g., an eiCas9 fusion protein, as described herein.

TABLE 16B
2nd Tier

Targeting domains for knocking down the BID gene using S. pyogenes
Cas9 selected according to second tier parameters are presented in SEQ ID
NO: 41957-42424.

[0859] Table 16C provides targeting domains for knocking down the BID gene using S. pyogenes Cas9 selected according to third tier parameters. The targeting domains were selected within the additional 500 bp upstream and downstream of transcription start site (e.g. extending to 1 kb up and downstream of the transcription start site). It is contemplated herein that the targeting domain hybridizes to the target domain through complementary base pairing. Any of the targeting domains in the table can be used with a S. pyogenes eiCas9 molecule, e.g., an eiCas9 fusion protein, as described herein.

TABLE 16C
3rd Tier

Targeting domains for knocking down the BID gene using S. pyogenes
Cas9 selected according to third tier parameters are presented in SEQ ID
NO: 42425-42854.

[0860] Table 16D provides targeting domains for knocking down the BID gene using S. aureus Cas9 selected according to first tier parameters. The targeting domains were selected within 500 bp upstream and downstream of transcription start site, a high level of orthogonality and PAM is NNGRRT. It is contemplated herein that the targeting domain hybridizes to the target domain through complementary base pairing. Any of the targeting domains in the table can be used with a S. aureus eiCas9 molecule, e.g., an eiCas9 fusion protein, as described herein.

TABLE 16D
1st Tier

Targeting domains for knocking down the BID gene using S. aureus Cas9
selected according to first tier parameters are presented in SEQ ID NO:
42855-42963.

[0861] Table 16E provides targeting domains for knocking down the BID gene using S. aureus Cas9 selected according to second tier parameters. The targeting domains were selected within 500 bp upstream and downstream of transcription start site, no orthogonality requirement and PAM is NNGRRT. It is contemplated herein that the targeting domain hybridizes to the target domain through complementary base pairing. Any of the targeting domains in the table can be used with a S. aureus eiCas9 molecule, e.g., an eiCas9 fusion protein, as described herein.

TABLE 16E
2nd Tier

Targeting domains for knocking down the BID gene using S. aureus Cas9
selected according to second tier parameters are presented in SEQ ID NO:
42964-43092.

[0862] Table 16F provides targeting domains for knocking down the BID gene using S. aureus Cas9 selected according to third tier parameters. The targeting domains were selected within the additional 500 bp upstream and downstream of transcription start site (e.g. extending to 1 kb up and downstream of the transcription start site) and PAM is NNGRRT. It is contemplated herein that the targeting domain hybridizes to the target domain through complementary base pairing. Any of the targeting domains in the table can be used with a S. aureus eiCas9 molecule, e.g., an eiCas9 fusion protein, as described herein.

TABLE 16F
3rd Tier

Targeting domains for knocking down the BID gene using S. aureus Cas9
selected according to third tier parameters are presented in SEQ ID NO:
43093-44450.

[0863] Table 16G provides targeting domains for knocking down the BID gene using S. aureus Cas9 selected according to fourth tier parameters. The targeting domains were selected within the first 500 bp of the coding sequence and contained a NNGRRV PAM. It is contemplated herein that the targeting domain hybridizes to the target domain through complementary base pairing. Any of the targeting domains in the table can be used with a S. aureus Cas9 molecule that generates a double stranded break (Cas9 nuclease) or a single-stranded break (Cas9 nickase). In an embodiment, dual targeting is used to create two nicks on opposite DNA strands by using S. aureus Cas9 nickases with two targeting domains that are complementary to opposite DNA strands, e.g., a gRNA comprising any minus strand targeting domain may be paired with any gRNA comprising a plus strand targeting domain provided that the two gRNAs are oriented on the DNA such that PAMs face outward and the distance between the 5′ ends of the gRNAs is 0-50 bp.

TABLE 16G
4th Tier

Targeting domains for knocking down the BID gene using S. aureus Cas9
selected according to fourth tier parameters are presented in SEQ ID NO:
44451-44744.

[0864] Table 16H provides targeting domains for knocking down the BID gene using S. aureus Cas9 selected according to fifth tier parameters. The targeting domains were selected within the remainder of the coding sequence downstream and contained a NNGRRV PAM. It is contemplated herein that the targeting domain hybridizes to the target domain through complementary base pairing. Any of the targeting domains in the table can be used with a S. aureus Cas9 molecule that generates a double stranded break (Cas9 nuclease) or a single-stranded break (Cas9 nickase). In an embodiment, dual targeting is used to create two nicks on opposite DNA strands by using S. aureus Cas9 nickases with two targeting domains that are complementary to opposite DNA strands, e.g., a gRNA comprising any minus strand targeting domain may be paired with any gRNA comprising a plus strand targeting domain provided that the two gRNAs are oriented on the DNA such that PAMs face outward and the distance between the 5′ ends of the gRNAs is 0-50 bp.

TABLE 16H
5th Tier

Targeting domains for knocking down the BID gene using S. aureus Cas9
selected according to fifth tier parameters are presented in SEQ ID NO:
44745-45940.

[0865] Table 16I provides targeting domains for knocking down the BID gene using N. meningitidis Cas9 selected according to first tier parameters. The targeting were selected within the first 500 bp upstream and downstream of the transcription start site and had a high level of orthogonality. It is contemplated herein that the targeting domain hybridizes to the target domain through complementary base pairing. Any of the targeting domains in the table can be used with a N. meningitidis eiCas9 molecule, e.g., an eiCas9 fusion protein, as described herein.

TABLE 16I
1st Tier

Targeting domains for knocking down the BID gene using
N. meningitidismeningitidis Cas9 selected according to first tier
parameters are presented in SEQ ID NO: 45941-45955.

[0866] Table 16J provides targeting domains for knocking down the BID gene using N. meningitidis Cas9 selected according to second tier parameters. The targeting domains were selected within the first 500 bp upstream and downstream of the transcription start site and did not require high orthogonality. It is contemplated herein that the targeting domain hybridizes to the target domain through complementary base pairing. Any of the targeting domains in the table can be used with a N. meningitidis eiCas9 molecule, e.g., an eiCas9 fusion protein, as described herein.

TABLE 16J
2nd Tier

Targeting domains for knocking down the BID gene using
N. meningitidismeningitidis Cas9 selected according to second tier
parameters are presented in SEQ ID NO: 45956-45958.

[0867] Table 16K provides targeting domains for knocking down the BID gene using N. meningitidis Cas9 selected according to third tier parameters. The targeting domains were selected within the additional 500 bp upstream and downstream of transcription start site (e.g. extending to 1 kb up and downstream of the transcription start site). It is contemplated herein that the targeting domain hybridizes to the target domain through complementary base pairing. Any of the targeting domains in the table can be used with a N. meningitidis eiCas9 molecule, e.g., an eiCas9 fusion protein, as described herein.

TABLE 16K
3rd Tier

Targeting domains for knocking down the BID gene using
N. meningitidismeningitidis Cas9 selected according to third tier
parameters are presented in SEQ ID NO: 45959-45980.

[0868] Table 17A provides targeting domains for knocking out the CTLA4 gene using S. pyogenes Cas9 selected according to first tier parameters. The targeting domains bind within the first 500 bp of coding sequence downstream of start codon and have good orthogonality. It is contemplated herein that the targeting domain hybridizes to the target domain through complementary base pairing. Any of the targeting domains in the table can be used with a S. pyogenes Cas9 molecule that generates a double stranded break (Cas9 nuclease) or a single-stranded break (Cas9 nickase). In an embodiment, dual targeting is used to create two nicks on opposite DNA strands by using S. pyogenes Cas9 nickases with two targeting domains that are complementary to opposite DNA strands, e.g., a gRNA comprising any minus strand targeting domain may be paired with any gRNA comprising a plus strand targeting domain provided that the two gRNAs are oriented on the DNA such that PAMs face outward and the distance between the 5′ ends of the gRNAs is 0-50 bp.

TABLE 17A
1st Tier

Targeting domains for knocking out the CTLA4 gene using S. pyogenes
Cas9 selected according to first tier parameters are presented in SEQ ID
NO: 45981-46023.

[0869] Table 17B provides targeting domains for knocking out the CTLA4 gene using S. pyogenes Cas9 selected according to second tier parameters. The targeting domains bind within the first 500 bp of coding sequence downstream of start codon and good orthogonality is not required. It is contemplated herein that the targeting domain hybridizes to the target domain through complementary base pairing. Any of the targeting domains in the table can be used with a S. pyogenes Cas9 molecule that generates a double stranded break (Cas9 nuclease) or a single-stranded break (Cas9 nickase). In an embodiment, dual targeting is used to create two nicks on opposite DNA strands by using S. pyogenes Cas9 nickases with two targeting domains that are complementary to opposite DNA strands, e.g., a gRNA comprising any minus strand targeting domain may be paired with any gRNA comprising a plus strand targeting domain provided that the two gRNAs are oriented on the DNA such that PAMs face outward and the distance between the 5′ ends of the gRNAs is 0-50 bp.

TABLE 17B
2nd Tier

Targeting domains for knocking out the CTLA4 gene using S. pyogenes
Cas9 selected according to second tier parameters are presented in SEQ ID
NO: 46024-46149.

[0870] Table 17C provides targeting domains for knocking out the CTLA4 gene using S. pyogenes Cas9 selected according to third tier parameters. The targeting domains are beyond the first 500 bp of coding sequence downstream of start codon and good orthogonality is not required. It is contemplated herein that the targeting domain hybridizes to the target domain through complementary base pairing. Any of the targeting domains in the table can be used with a S. pyogenes Cas9 molecule that generates a double stranded break (Cas9 nuclease) or a single-stranded break (Cas9 nickase). In an embodiment, dual targeting is used to create two nicks on opposite DNA strands by using S. pyogenes Cas9 nickases with two targeting domains that are complementary to opposite DNA strands, e.g., a gRNA comprising any minus strand targeting domain may be paired with any gRNA comprising a plus strand targeting domain provided that the two gRNAs are oriented on the DNA such that PAMs face outward and the distance between the 5′ ends of the gRNAs is 0-50 bp.

TABLE 17C
3rd Tier

Targeting domains for knocking out the CTLA4 gene using S. pyogenes
Cas9 selected according to third tier parameters are presented in SEQ ID
NO: 46150-46207.

[0871] Table 17D provides targeting domains for knocking out the CTLA4 gene using S. aureus Cas9 selected according to first tier parameters. The targeting domains were selected within the first 500 bp of the coding sequence, had a high level of orthogonality, and contained a NNGRRT PAM. It is contemplated herein that the targeting domain hybridizes to the target domain through complementary base pairing. Any of the targeting domains in the table can be used with a S. aureus Cas9 molecule that generates a double stranded break (Cas9 nuclease) or a single-stranded break (Cas9 nickase). In an embodiment, dual targeting is used to create two nicks on opposite DNA strands by using S. aureus Cas9 nickases with two targeting domains that are complementary to opposite DNA strands, e.g., a gRNA comprising any minus strand targeting domain may be paired with any gRNA comprising a plus strand targeting domain provided that the two gRNAs are oriented on the DNA such that PAMs face outward and the distance between the 5′ ends of the gRNAs is 0-50 bp.

TABLE 17D
1st Tier

Targeting domains for knocking out the CTLA4 gene using S. aureus Cas9
selected according to first tier parameters are presented in SEQ ID NO:
46208-46269.

[0872] Table 17E provides targeting domains for knocking out the CTLA4 gene using S. aureus Cas9 selected according to second tier parameters. The targeting domains were selected within the first 500 bp of the coding sequence, no level of orthogonality was required, and contained a NNGRRT PAM. It is contemplated herein that the targeting domain hybridizes to the target domain through complementary base pairing. Any of the targeting domains in the table can be used with a S. aureus Cas9 molecule that generates a double stranded break (Cas9 nuclease) or a single-stranded break (Cas9 nickase). In an embodiment, dual targeting is used to create two nicks on opposite DNA strands by using S. aureus Cas9 nickases with two targeting domains that are complementary to opposite DNA strands, e.g., a gRNA comprising any minus strand targeting domain may be paired with any gRNA comprising a plus strand targeting domain provided that the two gRNAs are oriented on the DNA such that PAMs face outward and the distance between the 5′ ends of the gRNAs is 0-50 bp.

TABLE 17E
2nd Tier

Targeting domains for knocking out the CTLA4 gene using S. aureus Cas9
selected according to second tier parameters are presented in SEQ ID NO:
46270-46305.

[0873] Table 17F provides targeting domains for knocking out the CTLA4 gene using S. aureus Cas9 selected according to third tier parameters. The targeting domains were selected within the remainder of the coding sequence downstream and contained a NNGRRT PAM. It is contemplated herein that the targeting domain hybridizes to the target domain through complementary base pairing. Any of the targeting domains in the table can be used with a S. aureus Cas9 molecule that generates a double stranded break (Cas9 nuclease) or a single-stranded break (Cas9 nickase). In an embodiment, dual targeting is used to create two nicks on opposite DNA strands by using S. aureus Cas9 nickases with two targeting domains that are complementary to opposite DNA strands, e.g., a gRNA comprising any minus strand targeting domain may be paired with any gRNA comprising a plus strand targeting domain provided that the two gRNAs are oriented on the DNA such that PAMs face outward and the distance between the 5′ ends of the gRNAs is 0-50 bp.

TABLE 17F
3rd Tier

Targeting domains for knocking out the CTLA4 gene using S. aureus Cas9
selected according to third tier parameters are presented in SEQ ID NO:
46306-46718.

[0874] Table 17G provides targeting domains for knocking out the CTLA4 gene using S. aureus Cas9 selected according to fourth tier parameters. The targeting domains were selected within the first 500 bp of the coding sequence and contained a NNGRRV PAM. It is contemplated herein that the targeting domain hybridizes to the target domain through complementary base pairing. Any of the targeting domains in the table can be used with a S. aureus Cas9 molecule that generates a double stranded break (Cas9 nuclease) or a single-stranded break (Cas9 nickase). In an embodiment, dual targeting is used to create two nicks on opposite DNA strands by using S. aureus Cas9 nickases with two targeting domains that are complementary to opposite DNA strands, e.g., a gRNA comprising any minus strand targeting domain may be paired with any gRNA comprising a plus strand targeting domain provided that the two gRNAs are oriented on the DNA such that PAMs face outward and the distance between the 5′ ends of the gRNAs is 0-50 bp.

TABLE 17G
4th Tier

Targeting domains for knocking out the CTLA4 gene using S. aureus Cas9
selected according to fourth tier parameters are presented in SEQ ID NO:
46719-46788.

[0875] Table 17H provides targeting domains for knocking out the CTLA4 gene using S. aureus Cas9 selected according to fifth tier parameters. The targeting domains were selected within the remainder of the coding sequence downstream and contained a NNGRRV PAM. It is contemplated herein that the targeting domain hybridizes to the target domain through complementary base pairing. Any of the targeting domains in the table can be used with a S. aureus Cas9 molecule that generates a double stranded break (Cas9 nuclease) or a single-stranded break (Cas9 nickase). In an embodiment, dual targeting is used to create two nicks on opposite DNA strands by using S. aureus Cas9 nickases with two targeting domains that are complementary to opposite DNA strands, e.g., a gRNA comprising any minus strand targeting domain may be paired with any gRNA comprising a plus strand targeting domain provided that the two gRNAs are oriented on the DNA such that PAMs face outward and the distance between the 5′ ends of the gRNAs is 0-50 bp.

TABLE 17H
5th Tier

Targeting domains for knocking out the CTLA4 gene using S. aureus Cas9
selected according to fifth tier parameters are presented in SEQ ID NO:
46789-47047.

[0876] Table 17I provides targeting domains for knocking out the CTLA4 gene using N. meningitidis Cas9 selected according to first tier parameters. The targeting domains bind within the first 500 bp of coding sequence downstream of start codon and have good orthogonality. It is contemplated herein that the targeting domain hybridizes to the target domain through complementary base pairing. Any of the targeting domains in the table can be used with a N. meningitidis Cas9 molecule that generates a double stranded break (Cas9 nuclease) or a single-stranded break (Cas9 nickase). In an embodiment, dual targeting is used to create two nicks on opposite DNA strands by using N. meningitidis nickases with two targeting domains that are complementary to opposite DNA strands, e.g., a gRNA comprising any minus strand targeting domain may be paired with any gRNA comprising a plus strand targeting domain provided that the two gRNAs are oriented on the DNA such that PAMs face outward and the distance between the 5′ ends of the gRNAs is 0-50 bp.

TABLE 17I
1st Tier

Targeting domains for knocking out the CTLA4 gene using
N. meningitidismeningitidis Cas9 selected according to first tier
parameters are presented in SEQ ID NO: 47048-47064.

[0877] Table 17J provides targeting domains for knocking out the CTLA4 gene using N. meningitidis Cas9 selected according to second tier parameters. The targeting domains bind within the first 500 bp of coding sequence downstream of start codon and good orthogonality is not required. It is contemplated herein that the targeting domain hybridizes to the target domain through complementary base pairing. Any of the targeting domains in the table can be used with a N. meningitidis Cas9 molecule that generates a double stranded break (Cas9 nuclease) or a single-stranded break (Cas9 nickase). In an embodiment, dual targeting is used to create two nicks on opposite DNA strands by using N. meningitidis Cas9 nickases with two targeting domains that are complementary to opposite DNA strands, e.g., a gRNA comprising any minus strand targeting domain may be paired with any gRNA comprising a plus strand targeting domain provided that the two gRNAs are oriented on the DNA such that PAMs face outward and the distance between the 5′ ends of the gRNAs is 0-50 bp.

TABLE 17J
2nd Tier

A targeting domains for knocking out the CTLA4 gene using
N. meningitidismeningitidis Cas9 selected according to second tier
parameters is presented in SEQ ID NO: 47065.

[0878] Table 17K provides targeting domains for knocking out the CTLA4 gene using N. meningitidis Cas9 selected according to third tier parameters. The targeting domains are beyond the first 500 bp of coding sequence downstream of start codon and good orthogonality is not required. It is contemplated herein that the targeting domain hybridizes to the target domain through complementary base pairing. Any of the targeting domains in the table can be used with a N. meningitidis Cas9 molecule that generates a double stranded break (Cas9 nuclease) or a single-stranded break (Cas9 nickase). In an embodiment, dual targeting is used to create two nicks on opposite DNA strands by using N. meningitidis Cas9 nickases with two targeting domains that are complementary to opposite DNA strands, e.g., a gRNA comprising any minus strand targeting domain may be paired with any gRNA comprising a plus strand targeting domain provided that the two gRNAs are oriented on the DNA such that PAMs face outward and the distance between the 5′ ends of the gRNAs is 0-50 bp.

TABLE 17K
3rd Tier

Targeting domains for knocking out the CTLA4 gene using
N. meningitidismeningitidis Cas9 selected according to third tier
parameters are presented in SEQ ID NO: 47066-47073.

[0879] Table 18A provides targeting domains for knocking down the CTLA4 gene using S. pyogenes Cas9 selected according to first tier parameters. The targeting domains were selected within the first 500 bp upstream and downstream of the transcription start site and had a high level of orthogonality. It is contemplated herein that the targeting domain hybridizes to the target domain through complementary base pairing. Any of the targeting domains in the table can be used with a S. pyogenes eiCas9 molecule, e.g., an eiCas9 fusion protein, as described herein.

TABLE 18A
1st Tier

Targeting domains for knocking down the CTLA4 gene using S. pyogenes
Cas9 selected according to first tier parameters are presented in SEQ ID
NO: 47074-47104.

[0880] Table 18B provides targeting domains for knocking down the CTLA4 gene using S. pyogenes Cas9 selected according to second tier parameters. The targeting domains were selected within the first 500 bp upstream and downstream of the transcription start site and did not require high orthogonality. It is contemplated herein that the targeting domain hybridizes to the target domain through complementary base pairing. Any of the targeting domains in the table can be used with a S. pyogenes eiCas9 molecule, e.g., an eiCas9 fusion protein, as described herein.

TABLE 18B
2nd Tier

Targeting domains for knocking down the CTLA4 gene using S. pyogenes
Cas9 selected according to second tier parameters are presented in SEQ ID
NO: 47105-47291.

[0881] Table 18C provides targeting domains for knocking down the CTLA4 gene using S. pyogenes Cas9 selected according to third tier parameters. The targeting domains were selected within the additional 500 bp upstream and downstream of transcription start site (e.g. extending to 1 kb up and downstream of the transcription start site). It is contemplated herein that the targeting domain hybridizes to the target domain through complementary base pairing. Any of the targeting domains in the table can be used with a S. pyogenes eiCas9 molecule, e.g., an eiCas9 fusion protein, as described herein.

TABLE 18C
3rd Tier

Targeting domains for knocking down the CTLA4 gene using S. pyogenes
Cas9 selected according to third tier parameters are presented in SEQ ID
NO: 47292-47446.

[0882] Table 18D provides targeting domains for knocking down the CTLA4 gene using S. aureus Cas9 selected according to first tier parameters. The targeting domains were selected within 500 bp upstream and downstream of transcription start site, a high level of orthogonality and PAM is NNGRRT. It is contemplated herein that the targeting domain hybridizes to the target domain through complementary base pairing. Any of the targeting domains in the table can be used with a S. aureus eiCas9 molecule, e.g., an eiCas9 fusion protein, as described herein.

TABLE 18D
1st Tier

Targeting domains for knocking down the CTLA4 gene using S. aureus
Cas9 selected according to first tier parameters are presented in SEQ ID
NO: 47447-47574.

[0883] Table 18E provides targeting domains for knocking down the CTLA4 gene using S. aureus Cas9 selected according to second tier parameters. The targeting domains were selected within 500 bp upstream and downstream of transcription start site, no orthogonality requirement and PAM is NNGRRT. It is contemplated herein that the targeting domain hybridizes to the target domain through complementary base pairing. Any of the targeting domains in the table can be used with a S. aureus eiCas9 molecule, e.g., an eiCas9 fusion protein, as described herein.

TABLE 18E
2nd Tier

Targeting domains for knocking down the CTLA4 gene using S. aureus
Cas9 selected according to second tier parameters are presented in SEQ ID
NO: 47575-47677.

[0884] Table 18F provides targeting domains for knocking down the CTLA4 gene using S. aureus Cas9 selected according to third tier parameters. The targeting domains were selected within the additional 500 bp upstream and downstream of transcription start site (e.g. extending to 1 kb up and downstream of the transcription start site) and PAM is NNGRRT. It is contemplated herein that the targeting domain hybridizes to the target domain through complementary base pairing. Any of the targeting domains in the table can be used with a S. aureus eiCas9 molecule, e.g., an eiCas9 fusion protein, as described herein.

TABLE 18F
3rd Tier

Targeting domains for knocking down the CTLA4 gene using S. aureus
Cas9 selected according to third tier parameters are presented in SEQ ID
NO: 47678-48391.

[0885] Table 18G provides targeting domains for knocking down the CTLA4 gene using S. aureus Cas9 selected according to fourth tier parameters. The targeting domains were selected within 500 bp upstream and downstream of transcription start site and PAM is NNGRRV. It is contemplated herein that the targeting domain hybridizes to the target domain through complementary base pairing. Any of the targeting domains in the table can be used with a S. aureus eiCas9 molecule, e.g., an eiCas9 fusion protein, as described herein.

TABLE 18G
4th Tier

Targeting domains for knocking down the CTLA4 gene using S. aureus
Cas9 selected according to fourth tier parameters are presented in SEQ ID
NO: 48392-48618.

[0886] Table 18H provides targeting domains for knocking down the CTLA4 gene using S. aureus Cas9 selected according to fifth tier parameters. The targeting domains were selected within the additional 500 bp upstream and downstream of transcription start site (extending to 1 kb up and downstream of the transcription start site) and PAM is NNGRRV. It is contemplated herein that the targeting domain hybridizes to the target domain through complementary base pairing. Any of the targeting domains in the table can be used with a S. aureus eiCas9 molecule, e.g., an eiCas9 fusion protein, as described herein.

TABLE 18H
5th Tier

Targeting domains for knocking down the CTLA4 gene using S. aureus
Cas9 selected according to fifth tier parameters are presented
in SEQ ID NO: 48619-49187.

[0887] Table 18I provides targeting domains for knocking down the CTLA4 gene using N. meningitidis Cas9 selected according to first tier parameters. The targeting were selected within the first 500 bp upstream and downstream of the transcription start site and had a high level of orthogonality. It is contemplated herein that the targeting domain hybridizes to the target domain through complementary base pairing. Any of the targeting domains in the table can be used with a N. meningitidis eiCas9 molecule, e.g., an eiCas9 fusion protein, as described herein.

TABLE 18I
1st Tier

Targeting domains for knocking down the CTLA4 gene using
N. meningitidismeningitidis Cas9 selected according to first
tier parameters are presented in SEQ ID NO: 49188-49232.

[0888] Table 18J provides targeting domains for knocking down the CTLA4 gene using N. meningitidis Cas9 selected according to second tier parameters. The targeting domains were selected within the first 500 bp upstream and downstream of the transcription start site and did not require high orthogonality. It is contemplated herein that the targeting domain hybridizes to the target domain through complementary base pairing. Any of the targeting domains in the table can be used with a N. meningitidis eiCas9 molecule, e.g., an eiCas9 fusion protein, as described herein.

TABLE 18J
2nd Tier

Targeting domains for knocking down the CTLA4 gene using
N. meningitidismeningitidis Cas9 selected according to second
tier parameters are presented in SEQ ID NO: 49233-49239.

[0889] Table 18K provides targeting domains for knocking down the CTLA4 gene using N. meningitidis Cas9 selected according to third tier parameters. The targeting domains were selected within the additional 500 bp upstream and downstream of transcription start site (e.g. extending to 1 kb up and downstream of the transcription start site). It is contemplated herein that the targeting domain hybridizes to the target domain through complementary base pairing. Any of the targeting domains in the table can be used with a N. meningitidis eiCas9 molecule, e.g., an eiCas9 fusion protein, as described herein.

TABLE 18K
3rd Tier

Targeting domains for knocking down the CTLA4 gene using
N. meningitidismeningitidis Cas9 selected according to third
tier parameters are presented in SEQ ID NO: 49240-49273.

[0890] Table 19A provides targeting domains for knocking out the PDCD1 gene using S. pyogenes Cas9 selected according to first tier parameters. The targeting domains bind within the first 500 bp of coding sequence downstream of start codon and have good orthogonality. It is contemplated herein that the targeting domain hybridizes to the target domain through complementary base pairing. Any of the targeting domains in the table can be used with a S. pyogenes Cas9 molecule that generates a double stranded break (Cas9 nuclease) or a single-stranded break (Cas9 nickase). In an embodiment, dual targeting is used to create two nicks on opposite DNA strands by using S. pyogenes Cas9 nickases with two targeting domains that are complementary to opposite DNA strands, e.g., a gRNA comprising any minus strand targeting domain may be paired with any gRNA comprising a plus strand targeting domain provided that the two gRNAs are oriented on the DNA such that PAMs face outward and the distance between the 5′ ends of the gRNAs is 0-50 bp.

TABLE 19A
1st Tier

Targeting domains for knocking out the PDCD1 gene using
S. pyogenes Cas9 selected according to first tier parameters are
presented in SEQ ID NO: 14657-14724.

[0891] Table 19B provides targeting domains for knocking out the PDCD1 gene using S. pyogenes Cas9 selected according to second tier parameters. The targeting domains bind within the first 500 bp of coding sequence downstream of start codon and good orthogonality is not required. It is contemplated herein that the targeting domain hybridizes to the target domain through complementary base pairing. Any of the targeting domains in the table can be used with a S. pyogenes Cas9 molecule that generates a double stranded break (Cas9 nuclease) or a single-stranded break (Cas9 nickase). In an embodiment, dual targeting is used to create two nicks on opposite DNA strands by using S. pyogenes Cas9 nickases with two targeting domains that are complementary to opposite DNA strands, e.g., a gRNA comprising any minus strand targeting domain may be paired with any gRNA comprising a plus strand targeting domain provided that the two gRNAs are oriented on the DNA such that PAMs face outward and the distance between the 5′ ends of the gRNAs is 0-50 bp.

TABLE 19B
2nd Tier

Targeting domains for knocking out the PDCD1 gene using
S. pyogenes Cas9 selected according to second tier parameters are
presented in SEQ ID NO: 14725-14910.

[0892] Table 19C provides targeting domains for knocking out the PDCD1 gene using S. pyogenes Cas9 selected according to third tier parameters. The targeting domains are beyond the first 500 bp of coding sequence downstream of start codon and good orthogonality is not required. It is contemplated herein that the targeting domain hybridizes to the target domain through complementary base pairing. Any of the targeting domains in the table can be used with a S. pyogenes Cas9 molecule that generates a double stranded break (Cas9 nuclease) or a single-stranded break (Cas9 nickase). In an embodiment, dual targeting is used to create two nicks on opposite DNA strands by using S. pyogenes Cas9 nickases with two targeting domains that are complementary to opposite DNA strands, e.g., a gRNA comprising any minus strand targeting domain may be paired with any gRNA comprising a plus strand targeting domain provided that the two gRNAs are oriented on the DNA such that PAMs face outward and the distance between the 5′ ends of the gRNAs is 0-50 bp.

TABLE 19C
3rd Tier

Targeting domains for knocking out the PDCD1 gene using
S. pyogenes Cas9 selected according to third tier parameters are
presented in SEQ ID NO: 14911-15185.

[0893] Table 19D provides targeting domains for knocking out the PDCD1 gene using S. aureus Cas9 selected according to first tier parameters. The targeting domains were selected within the first 500 bp of the coding sequence, had a high level of orthogonality, and contained a NNGRRT PAM. It is contemplated herein that the targeting domain hybridizes to the target domain through complementary base pairing. Any of the targeting domains in the table can be used with a S. aureus Cas9 molecule that generates a double stranded break (Cas9 nuclease) or a single-stranded break (Cas9 nickase). In an embodiment, dual targeting is used to create two nicks on opposite DNA strands by using S. aureus Cas9 nickases with two targeting domains that are complementary to opposite DNA strands, e.g., a gRNA comprising any minus strand targeting domain may be paired with any gRNA comprising a plus strand targeting domain provided that the two gRNAs are oriented on the DNA such that PAMs face outward and the distance between the 5′ ends of the gRNAs is 0-50 bp.

TABLE 19D
1st Tier

Targeting domains for knocking out the PDCD1 gene using S. aureus
Cas9 selected according to first tier parameters are presented
in SEQ ID NO: 15186-15214.

[0894] Table 19E provides targeting domains for knocking out the PDCD1 gene using S. aureus Cas9 selected according to second tier parameters. The targeting domains were selected within the first 500 bp of the coding sequence, no level of orthogonality was required, and contained a NNGRRT PAM. It is contemplated herein that the targeting domain hybridizes to the target domain through complementary base pairing. Any of the targeting domains in the table can be used with a S. aureus Cas9 molecule that generates a double stranded break (Cas9 nuclease) or a single-stranded break (Cas9 nickase). In an embodiment, dual targeting is used to create two nicks on opposite DNA strands by using S. aureus Cas9 nickases with two targeting domains that are complementary to opposite DNA strands, e.g., a gRNA comprising any minus strand targeting domain may be paired with any gRNA comprising a plus strand targeting domain provided that the two gRNAs are oriented on the DNA such that PAMs face outward and the distance between the 5′ ends of the gRNAs is 0-50 bp.

TABLE 19E
2nd Tier

Targeting domains for knocking out the PDCD1 gene using S. aureus
Cas9 selected according to second tier parameters are presented
in SEQ ID NO: 15215-15241.

[0895] Table 19F provides targeting domains for knocking out the PDCD1 gene using S. aureus Cas9 selected according to third tier parameters. The targeting domains were selected within the remainder of the coding sequence downstream and contained a NNGRRT PAM. It is contemplated herein that the targeting domain hybridizes to the target domain through complementary base pairing. Any of the targeting domains in the table can be used with a S. aureus Cas9 molecule that generates a double stranded break (Cas9 nuclease) or a single-stranded break (Cas9 nickase). In an embodiment, dual targeting is used to create two nicks on opposite DNA strands by using S. aureus Cas9 nickases with two targeting domains that are complementary to opposite DNA strands, e.g., a gRNA comprising any minus strand targeting domain may be paired with any gRNA comprising a plus strand targeting domain provided that the two gRNAs are oriented on the DNA such that PAMs face outward and the distance between the 5′ ends of the gRNAs is 0-50 bp.

TABLE 19F
3rd Tier

Targeting domains for knocking out the PDCD1 gene using S. aureus
Cas9 selected according to third tier parameters are presented
in SEQ ID NO: 15242-15857.

[0896] Table 19G provides targeting domains for knocking out the PDCD1 gene using S. aureus Cas9 selected according to fourth tier parameters. The targeting domains were selected within the first 500 bp of the coding sequence and contained a NNGRRV PAM. It is contemplated herein that the targeting domain hybridizes to the target domain through complementary base pairing. Any of the targeting domains in the table can be used with a S. aureus Cas9 molecule that generates a double stranded break (Cas9 nuclease) or a single-stranded break (Cas9 nickase). In an embodiment, dual targeting is used to create two nicks on opposite DNA strands by using S. aureus Cas9 nickases with two targeting domains that are complementary to opposite DNA strands, e.g., a gRNA comprising any minus strand targeting domain may be paired with any gRNA comprising a plus strand targeting domain provided that the two gRNAs are oriented on the DNA such that PAMs face outward and the distance between the 5′ ends of the gRNAs is 0-50 bp.

TABLE 19G
4th Tier

Targeting domains for knocking out the PDCD1 gene using S. aureus
Cas9 selected according to fourth tier parameters are presented
in SEQ ID NO: 15858-15969.

[0897] Table 19H provides targeting domains for knocking out the PDCD1 gene using S. aureus Cas9 selected according to fifth tier parameters. The targeting domains were selected within the remainder of the coding sequence downstream and contained a NNGRRV PAM. It is contemplated herein that the targeting domain hybridizes to the target domain through complementary base pairing. Any of the targeting domains in the table can be used with a S. aureus Cas9 molecule that generates a double stranded break (Cas9 nuclease) or a single-stranded break (Cas9 nickase). In an embodiment, dual targeting is used to create two nicks on opposite DNA strands by using S. aureus Cas9 nickases with two targeting domains that are complementary to opposite DNA strands, e.g., a gRNA comprising any minus strand targeting domain may be paired with any gRNA comprising a plus strand targeting domain provided that the two gRNAs are oriented on the DNA such that PAMs face outward and the distance between the 5′ ends of the gRNAs is 0-50 bp.

TABLE 19H
5th Tier

Targeting domains for knocking out the PDCD1 gene using S. aureus
Cas9 selected according to fifth tier parameters are presented
in SEQ ID NO: 15970-16658.

[0898] Table 19I provides targeting domains for knocking out the PDCD1 gene using N. meningitidis Cas9 selected according to first tier parameters. The targeting domains bind within the first 500 bp of coding sequence downstream of start codon and have good orthogonality. It is contemplated herein that the targeting domain hybridizes to the target domain through complementary base pairing. Any of the targeting domains in the table can be used with a N. meningitidis Cas9 molecule that generates a double stranded break (Cas9 nuclease) or a single-stranded break (Cas9 nickase). In an embodiment, dual targeting is used to create two nicks on opposite DNA strands by using N. meningitidis nickases with two targeting domains that are complementary to opposite DNA strands, e.g., a gRNA comprising any minus strand targeting domain may be paired with any gRNA comprising a plus strand targeting domain provided that the two gRNAs are oriented on the DNA such that PAMs face outward and the distance between the 5′ ends of the gRNAs is 0-50 bp.

TABLE 19I
1st Tier

Targeting domains for knocking out the PDCD1 gene using
N. meningitidismeningitidis Cas9 selected according to first tier
parameters are presented in SEQ ID NO: 16659-16666.

[0899] Table 19J provides targeting domains for knocking out the PDCD1 gene using N. meningitidis Cas9 selected according to third tier parameters. The targeting domains are beyond the first 500 bp of coding sequence downstream of start codon and good orthogonality is not required. It is contemplated herein that the targeting domain hybridizes to the target domain through complementary base pairing. Any of the targeting domains in the table can be used with a N. meningitidis Cas9 molecule that generates a double stranded break (Cas9 nuclease) or a single-stranded break (Cas9 nickase). In an embodiment, dual targeting is used to create two nicks on opposite DNA strands by using N. meningitidis Cas9 nickases with two targeting domains that are complementary to opposite DNA strands, e.g., a gRNA comprising any minus strand targeting domain may be paired with any gRNA comprising a plus strand targeting domain provided that the two gRNAs are oriented on the DNA such that PAMs face outward and the distance between the 5′ ends of the gRNAs is 0-50 bp.

TABLE 19J
3rd Tier

Targeting domains for knocking out the PDCD1 gene using
N. meningitidismeningitidis Cas9 selected according to third tier
parameters are presented in SEQ ID NO: 16667-16670.

[0900] Table 20A provides targeting domains for knocking down the PDCD1 gene using S. pyogenes Cas9 selected according to first tier parameters. The targeting domains were selected within the first 500 bp upstream and downstream of the transcription start site and had a high level of orthogonality. It is contemplated herein that the targeting domain hybridizes to the target domain through complementary base pairing. Any of the targeting domains in the table can be used with a S. pyogenes eiCas9 molecule, e.g., an eiCas9 fusion protein, as described herein.

TABLE 20A
1st Tier

Targeting domains for knocking down the PDCD1 gene using
S. pyogenes Cas9 selected according to first tier parameters are
presented in SEQ ID NO: 16671-16718.

[0901] Table 20B provides targeting domains for knocking down the PDCD1 gene using S. pyogenes Cas9 selected according to second tier parameters. The targeting domains were selected within the first 500 bp upstream and downstream of the transcription start site and did not require high orthogonality. It is contemplated herein that the targeting domain hybridizes to the target domain through complementary base pairing. Any of the targeting domains in the table can be used with a S. pyogenes eiCas9 molecule, e.g., an eiCas9 fusion protein, as described herein.

TABLE 20B
2nd Tier

Targeting domains for knocking down the PDCD1 gene using
S. pyogenes Cas9 selected according to second tier parameters are
presented in SEQ ID NO: 16719-17276.

[0902] Table 20C provides targeting domains for knocking down the PDCD1 gene using S. pyogenes Cas9 selected according to third tier parameters. The targeting domains were selected within the additional 500 bp upstream and downstream of transcription start site (e.g. extending to 1 kb up and downstream of the transcription start site). It is contemplated herein that the targeting domain hybridizes to the target domain through complementary base pairing. Any of the targeting domains in the table can be used with a S. pyogenes eiCas9 molecule, e.g., an eiCas9 fusion protein, as described herein.

TABLE 20C
3rd Tier

Targeting domains for knocking down the PDCD1 gene using
S. pyogenes Cas9 selected according to third tier parameters are
presented in SEQ ID NO: 17277-17713.

[0903] Table 20D provides targeting domains for knocking down the PDCD1 gene using S. aureus Cas9 selected according to first tier parameters. The targeting domains were selected within 500 bp upstream and downstream of transcription start site, a high level of orthogonality and PAM is NNGRRT. It is contemplated herein that the targeting domain hybridizes to the target domain through complementary base pairing. Any of the targeting domains in the table can be used with a S. aureus eiCas9 molecule, e.g., an eiCas9 fusion protein, as described herein.

TABLE 20D
1st Tier

Targeting domains for knocking down the PDCD1 gene using S. aureus
Cas9 selected according to first tier parameters are presented
in SEQ ID NO: 17714-17818.

[0904] Table 20E provides targeting domains for knocking down the PDCD1 gene using S. aureus Cas9 selected according to second tier parameters. The targeting domains were selected within 500 bp upstream and downstream of transcription start site, no orthogonality requirement and PAM is NNGRRT. It is contemplated herein that the targeting domain hybridizes to the target domain through complementary base pairing. Any of the targeting domains in the table can be used with a S. aureus eiCas9 molecule, e.g., an eiCas9 fusion protein, as described herein.

TABLE 20E
2nd Tier

Targeting domains for knocking down the PDCD1 gene using S. aureus
Cas9 selected according to second tier parameters are presented
in SEQ ID NO: 17819-17921.

[0905] Table 20F provides targeting domains for knocking down the PDCD1 gene using S. aureus Cas9 selected according to third tier parameters. The targeting domains were selected within the additional 500 bp upstream and downstream of transcription start site (e.g. extending to 1 kb up and downstream of the transcription start site) and PAM is NNGRRT. It is contemplated herein that the targeting domain hybridizes to the target domain through complementary base pairing. Any of the targeting domains in the table can be used with a S. aureus eiCas9 molecule, e.g., an eiCas9 fusion protein, as described herein.

TABLE 20F
3rd Tier

Targeting domains for knocking down the PDCD1 gene using S. aureus
Cas9 selected according to third tier parameters are presented
in SEQ ID NO: 17922-19687.

[0906] Table 20G provides targeting domains for knocking down the PDCD1 gene using S. aureus Cas9 selected according to fourth tier parameters. The targeting domains were selected within 500 bp upstream and downstream of transcription start site and PAM is NNGRRV. It is contemplated herein that the targeting domain hybridizes to the target domain through complementary base pairing. Any of the targeting domains in the table can be used with a S. aureus eiCas9 molecule, e.g., an eiCas9 fusion protein, as described herein.

TABLE 20G
4th Tier

Targeting domains for knocking down the PDCD1 gene using S. aureus
Cas9 selected according to fourth tier parameters are presented
in SEQ ID NO: 19688-19904.

[0907] Table 20H provides targeting domains for knocking down the PDCD1 gene using S. aureus Cas9 selected according to fifth tier parameters. The targeting domains were selected within the additional 500 bp upstream and downstream of transcription start site (extending to 1 kb up and downstream of the transcription start site) and PAM is NNGRRV. It is contemplated herein that the targeting domain hybridizes to the target domain through complementary base pairing. Any of the targeting domains in the table can be used with a S. aureus eiCas9 molecule, e.g., an eiCas9 fusion protein, as described herein.

TABLE 20H
5th Tier

Targeting domains for knocking down the PDCD1 gene using S. aureus
Cas9 selected according to fifth tier parameters are presented
in SEQ ID NO: 19905-21017.

[0908] Table 20I provides targeting domains for knocking down the PDCD1 gene using N. meningitidis Cas9 selected according to first tier parameters. The targeting were selected within the first 500 bp upstream and downstream of the transcription start site and had a high level of orthogonality. It is contemplated herein that the targeting domain hybridizes to the target domain through complementary base pairing. Any of the targeting domains in the table can be used with a N. meningitidis eiCas9 molecule, e.g., an eiCas9 fusion protein, as described herein.

TABLE 20I
1st Tier

Targeting domains for knocking down the PDCD1 gene using
N. meningitidismeningitidis Cas9 selected according to first tier
parameters are presented in SEQ ID NO: 21018-21019.

[0909] Table 20J provides targeting domains for knocking down the PDCD1 gene using N. meningitidis Cas9 selected according to third tier parameters. The targeting domains were selected within the additional 500 bp upstream and downstream of transcription start site (e.g. extending to 1 kb up and downstream of the transcription start site). It is contemplated herein that the targeting domain hybridizes to the target domain through complementary base pairing. Any of the targeting domains in the table can be used with a N. meningitidis eiCas9 molecule, e.g., an eiCas9 fusion protein, as described herein.

TABLE 20J
3rd Tier

Targeting domains for knocking down the PDCD1 gene using
N. meningitidismeningitidis Cas9 selected according to third tier
parameters are presented in SEQ ID NO: 21020-21037.

[0910] Table 21A provides targeting domains for knocking out the CBLB gene using S. pyogenes Cas9 selected according to first tier parameters. The targeting domains bind within the first 500 bp of coding sequence downstream of start codon and have good orthogonality. It is contemplated herein that the targeting domain hybridizes to the target domain through complementary base pairing. Any of the targeting domains in the table can be used with a S. pyogenes Cas9 molecule that generates a double stranded break (Cas9 nuclease) or a single-stranded break (Cas9 nickase). In an embodiment, dual targeting is used to create two nicks on opposite DNA strands by using S. pyogenes Cas9 nickases with two targeting domains that are complementary to opposite DNA strands, e.g., a gRNA comprising any minus strand targeting domain may be paired with any gRNA comprising a plus strand targeting domain provided that the two gRNAs are oriented on the DNA such that PAMs face outward and the distance between the 5′ ends of the gRNAs is 0-50 bp.

TABLE 21A
1st Tier

Targeting domains for knocking out the CBLB gene using
S. pyogenes Cas9 selected according to first tier parameters are
presented in SEQ ID NO: 32636-32652.

[0911] Table 21B provides targeting domains for knocking out the CBLB gene using S. pyogenes Cas9 selected according to second tier parameters. The targeting domains bind within the first 500 bp of coding sequence downstream of start codon and good orthogonality is not required. It is contemplated herein that the targeting domain hybridizes to the target domain through complementary base pairing. Any of the targeting domains in the table can be used with a S. pyogenes Cas9 molecule that generates a double stranded break (Cas9 nuclease) or a single-stranded break (Cas9 nickase). In an embodiment, dual targeting is used to create two nicks on opposite DNA strands by using S. pyogenes Cas9 nickases with two targeting domains that are complementary to opposite DNA strands, e.g., a gRNA comprising any minus strand targeting domain may be paired with any gRNA comprising a plus strand targeting domain provided that the two gRNAs are oriented on the DNA such that PAMs face outward and the distance between the 5′ ends of the gRNAs is 0-50 bp.

TABLE 21B
2nd Tier

Targeting domains for knocking out the CBLB gene using
S. pyogenes Cas9 selected according to second tier parameters are
presented in SEQ ID NO: 32653-32731.

[0912] Table 21C provides targeting domains for knocking out the CBLB gene using S. pyogenes Cas9 selected according to third tier parameters. The targeting domains are beyond the first 500 bp of coding sequence downstream of start codon and good orthogonality is not required. It is contemplated herein that the targeting domain hybridizes to the target domain through complementary base pairing. Any of the targeting domains in the table can be used with a S. pyogenes Cas9 molecule that generates a double stranded break (Cas9 nuclease) or a single-stranded break (Cas9 nickase). In an embodiment, dual targeting is used to create two nicks on opposite DNA strands by using S. pyogenes Cas9 nickases with two targeting domains that are complementary to opposite DNA strands, e.g., a gRNA comprising any minus strand targeting domain may be paired with any gRNA comprising a plus strand targeting domain provided that the two gRNAs are oriented on the DNA such that PAMs face outward and the distance between the 5′ ends of the gRNAs is 0-50 bp.

TABLE 21C
3rd Tier

Targeting domains for knocking out the CBLB gene using
S. pyogenes Cas9 selected according to third tier parameters are
presented in SEQ ID NO: 32732-33533.

[0913] Table 21D provides targeting domains for knocking out the CBLB gene using S. aureus Cas9 selected according to first tier parameters. The targeting domains were selected within the first 500 bp of the coding sequence, had a high level of orthogonality, and contained a NNGRRT PAM. It is contemplated herein that the targeting domain hybridizes to the target domain through complementary base pairing. Any of the targeting domains in the table can be used with a S. aureus Cas9 molecule that generates a double stranded break (Cas9 nuclease) or a single-stranded break (Cas9 nickase). In an embodiment, dual targeting is used to create two nicks on opposite DNA strands by using S. aureus Cas9 nickases with two targeting domains that are complementary to opposite DNA strands, e.g., a gRNA comprising any minus strand targeting domain may be paired with any gRNA comprising a plus strand targeting domain provided that the two gRNAs are oriented on the DNA such that PAMs face outward and the distance between the 5′ ends of the gRNAs is 0-50 bp.

TABLE 21D
1st Tier

Targeting domains for knocking out the CBLB gene using S. aureus
Cas9 selected according to first tier parameters are presented
in SEQ ID NO: 33534-33622.

[0914] Table 21E provides targeting domains for knocking out the CBLB gene using S. aureus Cas9 selected according to second tier parameters. The targeting domains were selected within the first 500 bp of the coding sequence, no level of orthogonality was required, and contained a NNGRRT PAM. It is contemplated herein that the targeting domain hybridizes to the target domain through complementary base pairing. Any of the targeting domains in the table can be used with a S. aureus Cas9 molecule that generates a double stranded break (Cas9 nuclease) or a single-stranded break (Cas9 nickase). In an embodiment, dual targeting is used to create two nicks on opposite DNA strands by using S. aureus Cas9 nickases with two targeting domains that are complementary to opposite DNA strands, e.g., a gRNA comprising any minus strand targeting domain may be paired with any gRNA comprising a plus strand targeting domain provided that the two gRNAs are oriented on the DNA such that PAMs face outward and the distance between the 5′ ends of the gRNAs is 0-50 bp.

TABLE 21E
2nd Tier

Targeting domains for knocking out the CBLB gene using S. aureus
Cas9 selected according to second tier parameters are presented
in SEQ ID NO: 33623-33659.

[0915] Table 21F provides targeting domains for knocking out the CBLB gene using S. aureus Cas9 selected according to third tier parameters. The targeting domains were selected within the remainder of the coding sequence downstream and contained a NNGRRT PAM. It is contemplated herein that the targeting domain hybridizes to the target domain through complementary base pairing. Any of the targeting domains in the table can be used with a S. aureus Cas9 molecule that generates a double stranded break (Cas9 nuclease) or a single-stranded break (Cas9 nickase). In an embodiment, dual targeting is used to create two nicks on opposite DNA strands by using S. aureus Cas9 nickases with two targeting domains that are complementary to opposite DNA strands, e.g., a gRNA comprising any minus strand targeting domain may be paired with any gRNA comprising a plus strand targeting domain provided that the two gRNAs are oriented on the DNA such that PAMs face outward and the distance between the 5′ ends of the gRNAs is 0-50 bp.

TABLE 21F
3rd Tier

Targeting domains for knocking out the CBLB gene using S. aureus
Cas9 selected according to third tier parameters are presented
in SEQ ID NO: 33660-33935.

[0916] Table 21G provides targeting domains for knocking out the CBLB gene using S. aureus Cas9 selected according to fourth tier parameters. The targeting domains were selected within the first 500 bp of the coding sequence and contained a NNGRRV PAM. It is contemplated herein that the targeting domain hybridizes to the target domain through complementary base pairing. Any of the targeting domains in the table can be used with a S. aureus Cas9 molecule that generates a double stranded break (Cas9 nuclease) or a single-stranded break (Cas9 nickase). In an embodiment, dual targeting is used to create two nicks on opposite DNA strands by using S. aureus Cas9 nickases with two targeting domains that are complementary to opposite DNA strands, e.g., a gRNA comprising any minus strand targeting domain may be paired with any gRNA comprising a plus strand targeting domain provided that the two gRNAs are oriented on the DNA such that PAMs face outward and the distance between the 5′ ends of the gRNAs is 0-50 bp.

TABLE 21G
4th Tier

Targeting domains for knocking out the CBLB gene using S. aureus
Cas9 selected according to fourth tier parameters are presented
in SEQ ID NO: 33936-34600.

[0917] Table 21H provides targeting domains for knocking out the CBLB gene using S. aureus Cas9 selected according to fifth tier parameters. The targeting domains were selected within the remainder of the coding sequence downstream and contained a NNGRRV PAM. It is contemplated herein that the targeting domain hybridizes to the target domain through complementary base pairing. Any of the targeting domains in the table can be used with a S. aureus Cas9 molecule that generates a double stranded break (Cas9 nuclease) or a single-stranded break (Cas9 nickase). In an embodiment, dual targeting is used to create two nicks on opposite DNA strands by using S. aureus Cas9 nickases with two targeting domains that are complementary to opposite DNA strands, e.g., a gRNA comprising any minus strand targeting domain may be paired with any gRNA comprising a plus strand targeting domain provided that the two gRNAs are oriented on the DNA such that PAMs face outward and the distance between the 5′ ends of the gRNAs is 0-50 bp.

TABLE 21H
5th Tier

Targeting domains for knocking out the CBLB gene using S. aureus
Cas9 selected according to fifth tier parameters are presented
in SEQ ID NO: 34601-37358.

[0918] Table 21I provides targeting domains for knocking out the CBLB gene using N. meningitidis Cas9 selected according to first tier parameters. The targeting domains bind within the first 500 bp of coding sequence downstream of start codon and have good orthogonality. It is contemplated herein that the targeting domain hybridizes to the target domain through complementary base pairing. Any of the targeting domains in the table can be used with a N. meningitidis Cas9 molecule that generates a double stranded break (Cas9 nuclease) or a single-stranded break (Cas9 nickase). In an embodiment, dual targeting is used to create two nicks on opposite DNA strands by using N. meningitidis nickases with two targeting domains that are complementary to opposite DNA strands, e.g., a gRNA comprising any minus strand targeting domain may be paired with any gRNA comprising a plus strand targeting domain provided that the two gRNAs are oriented on the DNA such that PAMs face outward and the distance between the 5′ ends of the gRNAs is 0-50 bp.

TABLE 21I
1st Tier

Targeting domains for knocking out the CBLB gene using
N. meningitidismeningitidis Cas9 selected according to first tier
parameters are presented in SEQ ID NO: 37359-37369.

[0919] Table 21J provides targeting domains for knocking out the CBLB gene using N. meningitidis Cas9 selected according to second tier parameters. The targeting domains bind within the first 500 bp of coding sequence downstream of start codon and good orthogonality is not required. It is contemplated herein that the targeting domain hybridizes to the target domain through complementary base pairing. Any of the targeting domains in the table can be used with a N. meningitidis Cas9 molecule that generates a double stranded break (Cas9 nuclease) or a single-stranded break (Cas9 nickase). In an embodiment, dual targeting is used to create two nicks on opposite DNA strands by using N. meningitidis Cas9 nickases with two targeting domains that are complementary to opposite DNA strands, e.g., a gRNA comprising any minus strand targeting domain may be paired with any gRNA comprising a plus strand targeting domain provided that the two gRNAs are oriented on the DNA such that PAMs face outward and the distance between the 5′ ends of the gRNAs is 0-50 bp.

TABLE 21J
2nd Tier

Targeting domains for knocking out the CBLB gene using
N. meningitidismeningitidis Cas9 selected according to second
tier parameters are presented in SEQ ID NO: 37370-37372.

[0920] Table 21K provides targeting domains for knocking out the CBLB gene using N. meningitidis Cas9 selected according to third tier parameters. The targeting domains are beyond the first 500 bp of coding sequence downstream of start codon and good orthogonality is not required. It is contemplated herein that the targeting domain hybridizes to the target domain through complementary base pairing. Any of the targeting domains in the table can be used with a N. meningitidis Cas9 molecule that generates a double stranded break (Cas9 nuclease) or a single-stranded break (Cas9 nickase). In an embodiment, dual targeting is used to create two nicks on opposite DNA strands by using N. meningitidis Cas9 nickases with two targeting domains that are complementary to opposite DNA strands, e.g., a gRNA comprising any minus strand targeting domain may be paired with any gRNA comprising a plus strand targeting domain provided that the two gRNAs are oriented on the DNA such that PAMs face outward and the distance between the 5′ ends of the gRNAs is 0-50 bp.

TABLE 21K
3rd Tier

Targeting domains for knocking out the CBLB gene using
N. meningitidismeningitidis Cas9 selected according to third
tier parameters are presented in SEQ ID NO: 37373-37471.

[0921] Table 22A provides targeting domains for knocking down the CBLB gene using S. pyogenes Cas9 selected according to first tier parameters. The targeting domains were selected within the first 500 bp upstream and downstream of the transcription start site and had a high level of orthogonality. It is contemplated herein that the targeting domain hybridizes to the target domain through complementary base pairing. Any of the targeting domains in the table can be used with a S. pyogenes eiCas9 molecule, e.g., an eiCas9 fusion protein, as described herein.

TABLE 22A
1st Tier

Targeting domains for knocking down the CBLB gene using
S. pyogenes Cas9 selected according to first tier parameters
are presented in SEQ ID NO: 37472-37530.

[0922] Table 22B provides targeting domains for knocking down the CBLB gene using S. pyogenes Cas9 selected according to second tier parameters. The targeting domains were selected within the first 500 bp upstream and downstream of the transcription start site and did not require high orthogonality. It is contemplated herein that the targeting domain hybridizes to the target domain through complementary base pairing. Any of the targeting domains in the table can be used with a S. pyogenes eiCas9 molecule, e.g., an eiCas9 fusion protein, as described herein.

TABLE 22B
2nd Tier

Targeting domains for knocking down the CBLB gene using
S. pyogenes Cas9 selected according to second tier parameters
are presented in SEQ ID NO: 37531-37754.

[0923] Table 22C provides targeting domains for knocking down the CBLB gene using S. pyogenes Cas9 selected according to third tier parameters. The targeting domains were selected within the additional 500 bp upstream and downstream of transcription start site (e.g. extending to 1 kb up and downstream of the transcription start site). It is contemplated herein that the targeting domain hybridizes to the target domain through complementary base pairing. Any of the targeting domains in the table can be used with a S. pyogenes eiCas9 molecule, e.g., an eiCas9 fusion protein, as described herein.

TABLE 22C
3rd Tier

Targeting domains for knocking down the CBLB gene using
S. pyogenes Cas9 selected according to third tier parameters
are presented in SEQ ID NO: 37755-38052.

[0924] Table 22D provides targeting domains for knocking down the CBLB gene using S. aureus Cas9 selected according to first tier parameters. The targeting domains were selected within 500 bp upstream and downstream of transcription start site, a high level of orthogonality and PAM is NNGRRT. It is contemplated herein that the targeting domain hybridizes to the target domain through complementary base pairing. Any of the targeting domains in the table can be used with a S. aureus eiCas9 molecule, e.g., an eiCas9 fusion protein, as described herein.

TABLE 22D
1st Tier

Targeting domains for knocking down the CBLB gene using S. aureus
Cas9 selected according to first tier parameters are presented
in SEQ ID NO: 38053-38141.

[0925] Table 22E provides targeting domains for knocking down the CBLB gene using S. aureus Cas9 selected according to second tier parameters. The targeting domains were selected within 500 bp upstream and downstream of transcription start site, no orthogonality requirement and PAM is NNGRRT. It is contemplated herein that the targeting domain hybridizes to the target domain through complementary base pairing. Any of the targeting domains in the table can be used with a S. aureus eiCas9 molecule, e.g., an eiCas9 fusion protein, as described herein.

TABLE 22E
2nd Tier

Targeting domains for knocking down the CBLB gene using S. aureus
Cas9 selected according to second tier parameters are presented
in SEQ ID NO: 38142-38206.

[0926] Table 22F provides targeting domains for knocking down the CBLB gene using S. aureus Cas9 selected according to third tier parameters. The targeting domains were selected within the additional 500 bp upstream and downstream of transcription start site (e.g. extending to 1 kb up and downstream of the transcription start site) and PAM is NNGRRT. It is contemplated herein that the targeting domain hybridizes to the target domain through complementary base pairing. Any of the targeting domains in the table can be used with a S. aureus eiCas9 molecule, e.g., an eiCas9 fusion protein, as described herein.

TABLE 22F
3rd Tier

Targeting domains for knocking down the CBLB gene using S. aureus
Cas9 selected according to third tier parameters are presented
in SEQ ID NO: 38207-39105.

[0927] Table 22G provides targeting domains for knocking down the CBLB gene using S. aureus Cas9 selected according to fourth tier parameters. The targeting domains were selected within 500 bp upstream and downstream of transcription start site and PAM is NNGRRV. It is contemplated herein that the targeting domain hybridizes to the target domain through complementary base pairing. Any of the targeting domains in the table can be used with a S. aureus eiCas9 molecule, e.g., an eiCas9 fusion protein, as described herein.

TABLE 22G
4th Tier

Targeting domains for knocking down the CBLB gene using S. aureus
Cas9 selected according to fourth tier parameters are presented
in SEQ ID NO: 39106-39259.

[0928] Table 22H provides targeting domains for knocking down the CBLB gene using S. aureus Cas9 selected according to fifth tier parameters. The targeting domains were selected within the additional 500 bp upstream and downstream of transcription start site (extending to 1 kb up and downstream of the transcription start site) and PAM is NNGRRV. It is contemplated herein that the targeting domain hybridizes to the target domain through complementary base pairing. Any of the targeting domains in the table can be used with a S. aureus eiCas9 molecule, e.g., an eiCas9 fusion protein, as described herein.

TABLE 22H
5th Tier

Targeting domains for knocking down the CBLB gene using S. aureus
Cas9 selected according to fifth tier parameters are presented
in SEQ ID NO: 39260-40211.

[0929] Table 22I provides targeting domains for knocking down the CBLB gene using N. meningitidis Cas9 selected according to first tier parameters. The targeting were selected within the first 500 bp upstream and downstream of the transcription start site and had a high level of orthogonality. It is contemplated herein that the targeting domain hybridizes to the target domain through complementary base pairing. Any of the targeting domains in the table can be used with a N. meningitidis eiCas9 molecule, e.g., an eiCas9 fusion protein, as described herein.

TABLE 22I
1st Tier

Targeting domains for knocking down the CBLB gene using
N. meningitidismeningitidis Cas9 selected according to first tier
parameters are presented in SEQ ID NO: 40212-40230.

[0930] Table 22J provides targeting domains for knocking down the CBLB gene using N. meningitidis Cas9 selected according to second tier parameters. The targeting domains were selected within the first 500 bp upstream and downstream of the transcription start site and did not require high orthogonality. It is contemplated herein that the targeting domain hybridizes to the target domain through complementary base pairing. Any of the targeting domains in the table can be used with a N. meningitidis eiCas9 molecule, e.g., an eiCas9 fusion protein, as described herein.

TABLE 22J
2nd Tier

Targeting domains for knocking down the CBLB gene using
N. meningitidismeningitidis Cas9 selected according to second tier
parameters are presented in SEQ ID NO: 40231-40235.

[0931] Table 22K provides targeting domains for knocking down the CBLB gene using N. meningitidis Cas9 selected according to third tier parameters. The targeting domains were selected within the additional 500 bp upstream and downstream of transcription start site (e.g. extending to 1 kb up and downstream of the transcription start site). It is contemplated herein that the targeting domain hybridizes to the target domain through complementary base pairing. Any of the targeting domains in the table can be used with a N. meningitidis eiCas9 molecule, e.g., an eiCas9 fusion protein, as described herein.

TABLE 22K
3rd Tier

Targeting domains for knocking down the CBLB gene using
N. meningitidis meningitidis Cas9 selected according to third tier
parameters are presented in SEQ ID NO: 40236-40251.

[0932] Table 23A provides targeting domains for knocking out the PTPN6 gene using S. pyogenes Cas9 selected according to first tier parameters. The targeting domains bind within the first 500 bp of coding sequence downstream of start codon and have good orthogonality. It is contemplated herein that the targeting domain hybridizes to the target domain through complementary base pairing. Any of the targeting domains in the table can be used with a S. pyogenes Cas9 molecule that generates a double stranded break (Cas9 nuclease) or a single-stranded break (Cas9 nickase). In an embodiment, dual targeting is used to create two nicks on opposite DNA strands by using S. pyogenes Cas9 nickases with two targeting domains that are complementary to opposite DNA strands, e.g., a gRNA comprising any minus strand targeting domain may be paired with any gRNA comprising a plus strand targeting domain provided that the two gRNAs are oriented on the DNA such that PAMs face outward and the distance between the 5′ ends of the gRNAs is 0-50 bp.

TABLE 23A
1st Tier

Targeting domains for knocking out the PTPN6 gene using S. pyogenes
Cas9 selected according to first tier parameters are presented in
SEQ ID NO: 21038-21112.

[0933] Table 23B provides targeting domains for knocking out the PTPN6 gene using S. pyogenes Cas9 selected according to second tier parameters. The targeting domains bind within the first 500 bp of coding sequence downstream of start codon and good orthogonality is not required. It is contemplated herein that the targeting domain hybridizes to the target domain through complementary base pairing. Any of the targeting domains in the table can be used with a S. pyogenes Cas9 molecule that generates a double stranded break (Cas9 nuclease) or a single-stranded break (Cas9 nickase). In an embodiment, dual targeting is used to create two nicks on opposite DNA strands by using S. pyogenes Cas9 nickases with two targeting domains that are complementary to opposite DNA strands, e.g., a gRNA comprising any minus strand targeting domain may be paired with any gRNA comprising a plus strand targeting domain provided that the two gRNAs are oriented on the DNA such that PAMs face outward and the distance between the 5′ ends of the gRNAs is 0-50 bp.

TABLE 23B
2nd Tier

Targeting domains for knocking out the PTPN6 gene using S. pyogenes
Cas9 selected according to second tier parameters are presented in
SEQ ID NO: 21113-21332.

[0934] Table 23C provides targeting domains for knocking out the PTPN6 gene using S. pyogenes Cas9 selected according to third tier parameters. The targeting domains are beyond the first 500 bp of coding sequence downstream of start codon and good orthogonality is not required. It is contemplated herein that the targeting domain hybridizes to the target domain through complementary base pairing. Any of the targeting domains in the table can be used with a S. pyogenes Cas9 molecule that generates a double stranded break (Cas9 nuclease) or a single-stranded break (Cas9 nickase). In an embodiment, dual targeting is used to create two nicks on opposite DNA strands by using S. pyogenes Cas9 nickases with two targeting domains that are complementary to opposite DNA strands, e.g., a gRNA comprising any minus strand targeting domain may be paired with any gRNA comprising a plus strand targeting domain provided that the two gRNAs are oriented on the DNA such that PAMs face outward and the distance between the 5′ ends of the gRNAs is 0-50 bp.

TABLE 23C
3rd Tier

Targeting domains for knocking out the PTPN6 gene using S. pyogenes
Cas9 selected according to third tier parameters are presented in
SEQ ID NO: 21333-21976.

[0935] Table 23D provides targeting domains for knocking out the PTPN6 gene using S. aureus Cas9 selected according to first tier parameters. The targeting domains were selected within the first 500 bp of the coding sequence, had a high level of orthogonality, and contained a NNGRRT PAM. It is contemplated herein that the targeting domain hybridizes to the target domain through complementary base pairing. Any of the targeting domains in the table can be used with a S. aureus Cas9 molecule that generates a double stranded break (Cas9 nuclease) or a single-stranded break (Cas9 nickase). In an embodiment, dual targeting is used to create two nicks on opposite DNA strands by using S. aureus Cas9 nickases with two targeting domains that are complementary to opposite DNA strands, e.g., a gRNA comprising any minus strand targeting domain may be paired with any gRNA comprising a plus strand targeting domain provided that the two gRNAs are oriented on the DNA such that PAMs face outward and the distance between the 5′ ends of the gRNAs is 0-50 bp

TABLE 23D
1st Tier

Targeting domains for knocking out the PTPN6 gene using S. aureus
Cas9 selected according to first tier parameters are presented in
SEQ ID NO: 21977-22077.

[0936] Table 23E provides targeting domains for knocking out the PTPN6 gene using S. aureus Cas9 selected according to second tier parameters. The targeting domains were selected within the first 500 bp of the coding sequence, no level of orthogonality was required, and contained a NNGRRT PAM. It is contemplated herein that the targeting domain hybridizes to the target domain through complementary base pairing. Any of the targeting domains in the table can be used with a S. aureus Cas9 molecule that generates a double stranded break (Cas9 nuclease) or a single-stranded break (Cas9 nickase). In an embodiment, dual targeting is used to create two nicks on opposite DNA strands by using S. aureus Cas9 nickases with two targeting domains that are complementary to opposite DNA strands, e.g., a gRNA comprising any minus strand targeting domain may be paired with any gRNA comprising a plus strand targeting domain provided that the two gRNAs are oriented on the DNA such that PAMs face outward and the distance between the 5′ ends of the gRNAs is 0-50 bp.

TABLE 23E
2nd Tier

Targeting domains for knocking out the PTPN6 gene using S. aureus
Cas9 selected according to second tier parameters are presented in
SEQ ID NO: 22078-22137.

[0937] Table 23F provides targeting domains for knocking out the PTPN6 gene using S. aureus Cas9 selected according to third tier parameters. The targeting domains were selected within the remainder of the coding sequence downstream and contained a NNGRRT PAM. It is contemplated herein that the targeting domain hybridizes to the target domain through complementary base pairing. Any of the targeting domains in the table can be used with a S. aureus Cas9 molecule that generates a double stranded break (Cas9 nuclease) or a single-stranded break (Cas9 nickase). In an embodiment, dual targeting is used to create two nicks on opposite DNA strands by using S. aureus Cas9 nickases with two targeting domains that are complementary to opposite DNA strands, e.g., a gRNA comprising any minus strand targeting domain may be paired with any gRNA comprising a plus strand targeting domain provided that the two gRNAs are oriented on the DNA such that PAMs face outward and the distance between the 5′ ends of the gRNAs is 0-50 bp.

TABLE 23F
3rd Tier

Targeting domains for knocking out the PTPN6 gene using S. aureus
Cas9 selected according to third tier parameters are presented in
SEQ ID NO: 22138-22815.

[0938] Table 23G provides targeting domains for knocking out the PTPN6 gene using S. aureus Cas9 selected according to fourth tier parameters. The targeting domains were selected within the first 500 bp of the coding sequence and contained a NNGRRV PAM. It is contemplated herein that the targeting domain hybridizes to the target domain through complementary base pairing. Any of the targeting domains in the table can be used with a S. aureus Cas9 molecule that generates a double stranded break (Cas9 nuclease) or a single-stranded break (Cas9 nickase). In an embodiment, dual targeting is used to create two nicks on opposite DNA strands by using S. aureus Cas9 nickases with two targeting domains that are complementary to opposite DNA strands, e.g., a gRNA comprising any minus strand targeting domain may be paired with any gRNA comprising a plus strand targeting domain provided that the two gRNAs are oriented on the DNA such that PAMs face outward and the distance between the 5′ ends of the gRNAs is 0-50 bp.

TABLE 23G
4th Tier

Targeting domains for knocking out the PTPN6 gene using S. aureus
Cas9 selected according to fourth tier parameters are presented in
SEQ ID NO: 22816-23105.

[0939] Table 23H provides targeting domains for knocking out the PTPN6 gene using S. aureus Cas9 selected according to fifth tier parameters. The targeting domains were selected within the remainder of the coding sequence downstream and contained a NNGRRV PAM. It is contemplated herein that the targeting domain hybridizes to the target domain through complementary base pairing. Any of the targeting domains in the table can be used with a S. aureus Cas9 molecule that generates a double stranded break (Cas9 nuclease) or a single-stranded break (Cas9 nickase). In an embodiment, dual targeting is used to create two nicks on opposite DNA strands by using S. aureus Cas9 nickases with two targeting domains that are complementary to opposite DNA strands, e.g., a gRNA comprising any minus strand targeting domain may be paired with any gRNA comprising a plus strand targeting domain provided that the two gRNAs are oriented on the DNA such that PAMs face outward and the distance between the 5′ ends of the gRNAs is 0-50 bp.

TABLE 23H
5th Tier

Targeting domains for knocking out the PTPN6 gene using S. aureus
Cas9 selected according to fifth tier parameters are presented in
SEQ ID NO: 23106-24749.

[0940] Table 23I provides targeting domains for knocking out the PTPN6 gene using N. meningitidis Cas9 selected according to first tier parameters. The targeting domains bind within the first 500 bp of coding sequence downstream of start codon and have good orthogonality. It is contemplated herein that the targeting domain hybridizes to the target domain through complementary base pairing. Any of the targeting domains in the table can be used with a N. meningitidis Cas9 molecule that generates a double stranded break (Cas9 nuclease) or a single-stranded break (Cas9 nickase). In an embodiment, dual targeting is used to create two nicks on opposite DNA strands by using N. meningitidis nickases with two targeting domains that are complementary to opposite DNA strands, e.g., a gRNA comprising any minus strand targeting domain may be paired with any gRNA comprising a plus strand targeting domain provided that the two gRNAs are oriented on the DNA such that PAMs face outward and the distance between the 5′ ends of the gRNAs is 0-50 bp.

TABLE 23I
1st Tier

Targeting domains for knocking out the PTPN6 gene using
N. meningitidis meningitidis Cas9 selected according to first tier
parameters are presented in SEQ ID NO: 24750-24755.

[0941] Table 23J provides targeting domains for knocking out the PTPN6 gene using N. meningitidis Cas9 selected according to third tier parameters. The targeting domains are beyond the first 500 bp of coding sequence downstream of start codon and good orthogonality is not required. It is contemplated herein that the targeting domain hybridizes to the target domain through complementary base pairing. Any of the targeting domains in the table can be used with a N. meningitidis Cas9 molecule that generates a double stranded break (Cas9 nuclease) or a single-stranded break (Cas9 nickase). In an embodiment, dual targeting is used to create two nicks on opposite DNA strands by using N. meningitidis Cas9 nickases with two targeting domains that are complementary to opposite DNA strands, e.g., a gRNA comprising any minus strand targeting domain may be paired with any gRNA comprising a plus strand targeting domain provided that the two gRNAs are oriented on the DNA such that PAMs face outward and the distance between the 5′ ends of the gRNAs is 0-50 bp.

TABLE 23J
3rd Tier

Targeting domains for knocking out the PTPN6 gene using
N. meningitidis meningitidis Cas9 selected according to third tier
parameters are presented in SEQ ID NO: 24756-24777.

[0942] Table 24A provides targeting domains for knocking down the PTPN6 gene using S. pyogenes Cas9 selected according to first tier parameters. The targeting domains were selected within the first 500 bp upstream and downstream of the transcription start site and had a high level of orthogonality. It is contemplated herein that the targeting domain hybridizes to the target domain through complementary base pairing. Any of the targeting domains in the table can be used with a S. pyogenes eiCas9 molecule, e.g., an eiCas9 fusion protein, as described herein.

TABLE 24A
1st Tier

Targeting domains for knocking down the PTPN6 gene using S. pyogenes
Cas9 selected according to first tier parameters are presented in
SEQ ID NO: 24778-24841.

[0943] Table 24B provides targeting domains for knocking down the PTPN6 gene using S. pyogenes Cas9 selected according to second tier parameters. The targeting domains were selected within the first 500 bp upstream and downstream of the transcription start site and did not require high orthogonality. It is contemplated herein that the targeting domain hybridizes to the target domain through complementary base pairing. Any of the targeting domains in the table can be used with a S. pyogenes eiCas9 molecule, e.g., an eiCas9 fusion protein, as described herein.

TABLE 24B
2nd Tier

Targeting domains for knocking down the PTPN6 gene using S. pyogenes
Cas9 selected according to second tier parameters are presented in
SEQ ID NO: 24842-25280.

[0944] Table 24C provides targeting domains for knocking down the PTPN6 gene using S. pyogenes Cas9 selected according to third tier parameters. The targeting domains were selected within the additional 73 bp upstream and 500 bp downstream of transcription start site (extending to 573 bp up and 1 kb downstream of the transcription start site). It is contemplated herein that the targeting domain hybridizes to the target domain through complementary base pairing. Any of the targeting domains in the table can be used with a S. pyogenes eiCas9 molecule, e.g., an eiCas9 fusion protein, as described herein.

TABLE 24C
3rd Tier

Targeting domains for knocking down the PTPN6 gene using S. pyogenes
Cas9 selected according to third tier parameters are presented in
SEQ ID NO: 25281-25439.

[0945] Table 24D provides targeting domains for knocking down the PTPN6 gene using S. aureus Cas9 selected according to first tier parameters. The targeting domains were selected within 500 bp upstream and downstream of transcription start site, a high level of orthogonality and PAM is NNGRRT. It is contemplated herein that the targeting domain hybridizes to the target domain through complementary base pairing. Any of the targeting domains in the table can be used with a S. aureus eiCas9 molecule, e.g., an eiCas9 fusion protein, as described herein.

TABLE 24D
1st Tier

Targeting domains for knocking down the PTPN6 gene using S. aureus
Cas9 selected according to first tier parameters are presented in
SEQ ID NO: 25440-25521.

[0946] Table 24E provides targeting domains for knocking down the PTPN6 gene using S. aureus Cas9 selected according to second tier parameters. The targeting domains were selected within 500 bp upstream and downstream of transcription start site, no orthogonality requirement and PAM is NNGRRT. It is contemplated herein that the targeting domain hybridizes to the target domain through complementary base pairing. Any of the targeting domains in the table can be used with a S. aureus eiCas9 molecule, e.g., an eiCas9 fusion protein, as described herein.

TABLE 24E
2nd Tier
Targeting domains for knocking down the PTPN6
gene using S. aureus Cas9 selected according to
second tier parameters are presented in SEQ ID NO: 25522-25593.

[0947] Table 24F provides targeting domains for knocking down the PTPN6 gene using S. aureus Cas9 selected according to third tier parameters. The targeting domains were selected within the additional 500 bp upstream and downstream of transcription start site (e.g. extending to 1 kb up and downstream of the transcription start site) and PAM is NNGRRT. It is contemplated herein that the targeting domain hybridizes to the target domain through complementary base pairing. Any of the targeting domains in the table can be used with a S. aureus eiCas9 molecule, e.g., an eiCas9 fusion protein, as described herein.

TABLE 24F
3rd Tier
Targeting domains for knocking down the PTPN6
gene using S. aureus Cas9 selected according to third
tier parameters are presented in SEQ ID NO: 25594-27119.

[0948] Table 24G provides targeting domains for knocking down the PTPN6 gene using S. aureus Cas9 selected according to fourth tier parameters. The targeting domains were selected Within the additional 73 bp upstream and 500 bp downstream of transcription start site (extending to 573 bp up and 1 kb downstream of the transcription start site) and PAM is NNGRRT. It is contemplated herein that the targeting domain hybridizes to the target domain through complementary base pairing. Any of the targeting domains in the table can be used with a S. aureus eiCas9 molecule, e.g., an eiCas9 fusion protein, as described herein.

TABLE 24G
4th Tier
Targeting domains for knocking down the PTPN6
gene using S. aureus Cas9 selected according to
fourth tier parameters are presented in SEQ ID NO: 27120-27224.

[0949] Table 24H provides targeting domains for knocking down the PTPN6 gene using S. aureus Cas9 selected according to fifth tier parameters. The targeting domains were selected within the additional 73 bp upstream and 500 bp downstream of transcription start site (extending to 573 bp up and 1 kb downstream of the transcription start site) and PAM is NNGRRV. It is contemplated herein that the targeting domain hybridizes to the target domain through complementary base pairing. Any of the targeting domains in the table can be used with a S. aureus eiCas9 molecule, e.g., an eiCas9 fusion protein, as described herein.

TABLE 24H
5th Tier
Targeting domains for knocking down the PTPN6
gene using S. aureus Cas9 selected according to fifth
tier parameters are presented in SEQ ID NO: 27225-27698.

[0950] Table 24I provides targeting domains for knocking down the PTPN6 gene using N. meningitidis Cas9 selected according to first tier parameters. The targeting were selected within the first 500 bp upstream and downstream of the transcription start site and had a high level of orthogonality. It is contemplated herein that the targeting domain hybridizes to the target domain through complementary base pairing. Any of the targeting domains in the table can be used with a N. meningitidis eiCas9 molecule, e.g., an eiCas9 fusion protein, as described herein.

TABLE 24I
1st Tier
Targeting domains for knocking down the PTPN6
gene using N. meningitidismeningitidis Cas9 selected according
to first tier parameters are presented in SEQ ID NO: 27699-27715.

[0951] Table 24J provides targeting domains for knocking down the PTPN6 gene using N. meningitidis Cas9 selected according to second tier parameters. The targeting domains were selected within the first 500 bp upstream and downstream of the transcription start site and did not require high orthogonality. It is contemplated herein that the targeting domain hybridizes to the target domain through complementary base pairing. Any of the targeting domains in the table can be used with a N. meningitidis eiCas9 molecule, e.g., an eiCas9 fusion protein, as described herein.

TABLE 24J
2nd Tier
Targeting domains for knocking down the PTPN6
gene using N. meningitidismeningitidis Cas9 selected according
to second tier parameters are presented in SEQ ID NO: 27716-27718.

[0952] Table 24K provides targeting domains for knocking down the PTPN6 gene using N. meningitidis Cas9 selected according to third tier parameters. The targeting domains were selected within the additional 73 bp upstream and 500 bp downstream of transcription start site (extending to 573 bp up and 1 kb downstream of the transcription start site). It is contemplated herein that the targeting domain hybridizes to the target domain through complementary base pairing. Any of the targeting domains in the table can be used with a N. meningitidis eiCas9 molecule, e.g., an eiCas9 fusion protein, as described herein.

TABLE 24K
3rd Tier
Targeting domains for knocking down the PTPN6
gene using N. meningitidismeningitidis Cas9 selected according
to third tier parameters are presented in SEQ ID NO: 27719-27728.

[0953] Table 25A provides targeting domains for knocking out the TRAC gene using S. pyogenes Cas9 selected according to first tier parameters. The targeting domains bind within the first 500 bp of coding sequence downstream of start codon and have good orthogonality. It is contemplated herein that the targeting domain hybridizes to the target domain through complementary base pairing. Any of the targeting domains in the table can be used with a S. pyogenes Cas9 molecule that generates a double stranded break (Cas9 nuclease) or a single-stranded break (Cas9 nickase). In an embodiment, dual targeting is used to create two nicks on opposite DNA strands by using S. pyogenes Cas9 nickases with two targeting domains that are complementary to opposite DNA strands, e.g., a gRNA comprising any minus strand targeting domain may be paired with any gRNA comprising a plus strand targeting domain provided that the two gRNAs are oriented on the DNA such that PAMs face outward and the distance between the 5′ ends of the gRNAs is 0-50 bp. In an embodiment, two gRNAs are used to target two Cas9 nucleases or two Cas9 nickases, e.g., a gRNA with a targeting domain from Group A can be paired with a gRNA with a targeting domain from Group B as shown in Table 25-1.

TABLE 25-1

| Group A | Group B |
|---|---|
| GCUAGACAUGAGGUCUA | AAAGUCAGAUUUGUUGCUCC |
| (SEQ ID NO: 49303) | (SEQ ID NO: 49379) |

TABLE 25A
1st Tier
Targeting domains for knocking out the TRAC
gene using S. pyogenes Cas9 selected according to first
tier parameters are presented in SEQ ID NO: 49274-49291.

[0954] Table 25B provides targeting domains for knocking out the TRAC gene using S. pyogenes Cas9 selected according to second tier parameters. The targeting domains bind within the first 500 bp of coding sequence downstream of start codon and good orthogonality is not required. It is contemplated herein that the targeting domain hybridizes to the target domain through complementary base pairing. Any of the targeting domains in the table can be used with a S. pyogenes Cas9 molecule that generates a double stranded break (Cas9 nuclease) or a single-stranded break (Cas9 nickase). In an embodiment, dual targeting is used to create two nicks on opposite DNA strands by using S. pyogenes Cas9 nickases with two targeting domains that are complementary to opposite DNA strands, e.g., a gRNA comprising any minus strand targeting domain may be paired with any gRNA comprising a plus strand targeting domain provided that the two gRNAs are oriented on the DNA such that PAMs face outward and the distance between the 5′ ends of the gRNAs is 0-50 bp.

TABLE 25B
2nd Tier
Targeting domains for knocking out the TRAC
gene using S. pyogenes Cas9 selected according to
second tier parameters are presented in SEQ ID NO: 49292-49415.

[0955] Table 25C provides targeting domains for knocking out the TRAC gene using S. aureus Cas9 selected according to first tier parameters. The targeting domains were selected within the first 500 bp of the coding sequence, had a high level of orthogonality, and contained a NNGRRT PAM. It is contemplated herein that the targeting domain hybridizes to the target domain through complementary base pairing. Any of the targeting domains in the table can be used with a S. aureus Cas9 molecule that generates a double stranded break (Cas9 nuclease) or a single-stranded break (Cas9 nickase). In an embodiment, dual targeting is used to create two nicks on opposite DNA strands by using S. aureus Cas9 nickases with two targeting domains that are complementary to opposite DNA strands, e.g., a gRNA comprising any minus strand targeting domain may be paired with any gRNA comprising a plus strand targeting domain provided that the two gRNAs are oriented on the DNA such that PAMs face outward and the distance between the 5′ ends of the gRNAs is 0-50 bp. In an embodiment, two gRNAs are used to target two Cas9 nucleases or two Cas9 nickases, e.g., a gRNA with a targeting domain from Group A can be paired with a gRNA with a targeting domain from Group B as shown in Table 25-2.

TABLE 25-2

| Group A | Group B |
|---|---|
| GUUUUGUCUGUGAUAUACACAU | UCUCAAACAAAUGUGUCACAAAGU |
| (SEQ ID NO: 49440) | (SEQ ID NO: 49489) |

TABLE 25C
1st Tier
Targeting domains for knocking out the TRAC
gene using S. aureus Cas9 selected according to first tier
parameters are presented in SEQ ID NO: 49416-49496.

[0956] Table 25D provides targeting domains for knocking out the TRAC gene using S. aureus Cas9 selected according to second tier parameters. The targeting domains were selected within the first 500 bp of the coding sequence, no level of orthogonality was required, and contained a NNGRRT PAM. It is contemplated herein that the targeting domain hybridizes to the target domain through complementary base pairing. Any of the targeting domains in the table can be used with a S. aureus Cas9 molecule that generates a double stranded break (Cas9 nuclease) or a single-stranded break (Cas9 nickase). In an embodiment, dual targeting is used to create two nicks on opposite DNA strands by using S. aureus Cas9 nickases with two targeting domains that are complementary to opposite DNA strands, e.g., a gRNA comprising any minus strand targeting domain may be paired with any gRNA comprising a plus strand targeting domain provided that the two gRNAs are oriented on the DNA such that PAMs face outward and the distance between the 5′ ends of the gRNAs is 0-50 bp.

TABLE 25D
2nd Tier
Targeting domains for knocking out the TRAC gene
using S. aureus Cas9 selected according to second
tier parameters are presented in SEQ ID NO: 49497-49555.

[0957] Table 25E provides targeting domains for knocking out the TRAC gene using S. aureus Cas9 selected according to third tier parameters. The targeting domains were selected within the remainder of the coding sequence downstream and contained a NNGRRT PAM. It is contemplated herein that the targeting domain hybridizes to the target domain through complementary base pairing. Any of the targeting domains in the table can be used with a S. aureus Cas9 molecule that generates a double stranded break (Cas9 nuclease) or a single-stranded break (Cas9 nickase). In an embodiment, dual targeting is used to create two nicks on opposite DNA strands by using S. aureus Cas9 nickases with two targeting domains that are complementary to opposite DNA strands, e.g., a gRNA comprising any minus strand targeting domain may be paired with any gRNA comprising a plus strand targeting domain provided that the two gRNAs are oriented on the DNA such that PAMs face outward and the distance between the 5′ ends of the gRNAs is 0-50 bp.

TABLE 25E
3rd Tier
Targeting domains for knocking out the TRAC gene
using S. aureus Cas9 selected according to third tier
parameters are presented in SEQ ID NO: 49556-49926.

[0958] Table 25F provides targeting domains for knocking out the TRAC gene using N. meningitidis Cas9 selected according to first tier parameters. The targeting domains bind within the first 500 bp of coding sequence downstream of start codon and have good orthogonality. It is contemplated herein that the targeting domain hybridizes to the target domain through complementary base pairing. Any of the targeting domains in the table can be used with a N. meningitidis Cas9 molecule that generates a double stranded break (Cas9 nuclease) or a single-stranded break (Cas9 nickase). In an embodiment, dual targeting is used to create two nicks on opposite DNA strands by using N. meningitidis nickases with two targeting domains that are complementary to opposite DNA strands, e.g., a gRNA comprising any minus strand targeting domain may be paired with any gRNA comprising a plus strand targeting domain provided that the two gRNAs are oriented on the DNA such that PAMs face outward and the distance between the 5′ ends of the gRNAs is 0-50 bp.

TABLE 25F
1st Tier
Targeting domains for knocking out the TRAC gene
using N. meningitidismeningitidis Cas9 selected according
to first tier parameters are presented in SEQ ID NO: 49927-49949.

[0959] Table 25G provides targeting domains for knocking out the TRAC gene using N. meningitidis Cas9 selected according to second tier parameters. The targeting domains bind within the first 500 bp of coding sequence downstream of start codon and good orthogonality is not required. It is contemplated herein that the targeting domain hybridizes to the target domain through complementary base pairing. Any of the targeting domains in the table can be used with a N. meningitidis Cas9 molecule that generates a double stranded break (Cas9 nuclease) or a single-stranded break (Cas9 nickase). In an embodiment, dual targeting is used to create two nicks on opposite DNA strands by using N. meningitidis Cas9 nickases with two targeting domains that are complementary to opposite DNA strands, e.g., a gRNA comprising any minus strand targeting domain may be paired with any gRNA comprising a plus strand targeting domain provided that the two gRNAs are oriented on the DNA such that PAMs face outward and the distance between the 5′ ends of the gRNAs is 0-50 bp.

TABLE 25G
2nd Tier
A targeting domains for knocking out the TRAC gene
using N. meningitidismeningitidis Cas9 selected
according to second tier parameters is presented in SEQ ID NO: 49950.

[0960] Table 26A provides targeting domains for knocking out the TRBC gene using S. pyogenes Cas9 selected according to first tier parameters. The targeting domains bind within the first 500 bp of coding sequence downstream of start codon and have good orthogonality. It is contemplated herein that the targeting domain hybridizes to the target domain through complementary base pairing. Any of the targeting domains in the table can be used with a S. pyogenes Cas9 molecule that generates a double stranded break (Cas9 nuclease) or a single-stranded break (Cas9 nickase). In an embodiment, dual targeting is used to create two nicks on opposite DNA strands by using S. pyogenes Cas9 nickases with two targeting domains that are complementary to opposite DNA strands, e.g., a gRNA comprising any minus strand targeting domain may be paired with any gRNA comprising a plus strand targeting domain provided that the two gRNAs are oriented on the DNA such that PAMs face outward and the distance between the 5′ ends of the gRNAs is 0-50 bp. In an embodiment, two gRNAs are used to target two Cas9 nucleases or two Cas9 nickases, e.g., a gRNA with a targeting domain from Group A can be paired with a gRNA with a targeting domain from Group B as shown in Table 26-1.

TABLE 26-1

| Group A | Group B |
|---|---|
| AUGACGAGUGGACCCAGGAU | GCGCUGACGAUCUGGGUGAC |
| (SEQ ID NO: 49999) | (SEQ ID NO: 50160) |

TABLE 26A
1st Tier
Targeting domains for knocking out the TRBC
gene using S. pyogenes Cas9 selected according to first
tier parameters are presented in SEQ ID NO: 49951-50002.

[0961] Table 26B provides targeting domains for knocking out the TRBC gene using S. pyogenes Cas9 selected according to second tier parameters. The targeting domains bind within the first 500 bp of coding sequence downstream of start codon and good orthogonality is not required. It is contemplated herein that the targeting domain hybridizes to the target domain through complementary base pairing. Any of the targeting domains in the table can be used with a S. pyogenes Cas9 molecule that generates a double stranded break (Cas9 nuclease) or a single-stranded break (Cas9 nickase). In an embodiment, dual targeting is used to create two nicks on opposite DNA strands by using S. pyogenes Cas9 nickases with two targeting domains that are complementary to opposite DNA strands, e.g., a gRNA comprising any minus strand targeting domain may be paired with any gRNA comprising a plus strand targeting domain provided that the two gRNAs are oriented on the DNA such that PAMs face outward and the distance between the 5′ ends of the gRNAs is 0-50 bp.

TABLE 26B
2nd Tier

Targeting domains for knocking out the TRBC gene using S. pyogenes
Cas9 selected according to second tier parameters are presented in
SEQ ID NO: 50003-50240.

[0962] Table 26C provides targeting domains for knocking out the TRBC gene using S. aureus Cas9 selected according to first tier parameters. The targeting domains were selected within the first 500 bp of the coding sequence, had a high level of orthogonality, and contained a NNGRRT PAM. It is contemplated herein that the targeting domain hybridizes to the target domain through complementary base pairing. Any of the targeting domains in the table can be used with a S. aureus Cas9 molecule that generates a double stranded break (Cas9 nuclease) or a single-stranded break (Cas9 nickase). In an embodiment, dual targeting is used to create two nicks on opposite DNA strands by using S. aureus Cas9 nickases with two targeting domains that are complementary to opposite DNA strands, e.g., a gRNA comprising any minus strand targeting domain may be paired with any gRNA comprising a plus strand targeting domain provided that the two gRNAs are oriented on the DNA such that PAMs face outward and the distance between the 5′ ends of the gRNAs is 0-50 bp. In an embodiment, two gRNAs are used to target two Cas9 nucleases or two Cas9 nickases, e.g., a gRNA with a targeting domain from Group A can be paired with a gRNA with a targeting domain from Group B as shown in Table 26-2.

TABLE 26-2

| Group A | Group B |
|---|---|
| GUGAAUGGGAAGGAGGUGCACAG | GGCGGGCUGCUCCUUGAGGGGCU |
| (SEQ ID NO: 50401) | (SEQ ID NO: 50378) |

TABLE 26C
1st Tier

Targeting domains for knocking out the TRBC gene using S. aureus
Cas9 selected according to first tier parameters are presented in
SEQ ID NO: 50241-50358.

[0963] Table 26D provides targeting domains for knocking out the TRBC gene using S. aureus Cas9 selected according to second tier parameters. The targeting domains were selected within the first 500 bp of the coding sequence, no level of orthogonality was required, and contained a NNGRRT PAM. It is contemplated herein that the targeting domain hybridizes to the target domain through complementary base pairing. Any of the targeting domains in the table can be used with a S. aureus Cas9 molecule that generates a double stranded break (Cas9 nuclease) or a single-stranded break (Cas9 nickase). In an embodiment, dual targeting is used to create two nicks on opposite DNA strands by using S. aureus Cas9 nickases with two targeting domains that are complementary to opposite DNA strands, e.g., a gRNA comprising any minus strand targeting domain may be paired with any gRNA comprising a plus strand targeting domain provided that the two gRNAs are oriented on the DNA such that PAMs face outward and the distance between the 5′ ends of the gRNAs is 0-50 bp.

TABLE 26D
2nd Tier

Targeting domains for knocking out the TRBC gene using S. aureus
Cas9 selected according to second tier parameters are presented in
SEQ ID NO: 50359-50429.

[0964] Table 26E provides targeting domains for knocking out the TRBC gene using S. aureus Cas9 selected according to third tier parameters. The targeting domains were selected within the remainder of the coding sequence downstream and contained a NNGRRT PAM. It is contemplated herein that the targeting domain hybridizes to the target domain through complementary base pairing. Any of the targeting domains in the table can be used with a S. aureus Cas9 molecule that generates a double stranded break (Cas9 nuclease) or a single-stranded break (Cas9 nickase). In an embodiment, dual targeting is used to create two nicks on opposite DNA strands by using S. aureus Cas9 nickases with two targeting domains that are complementary to opposite DNA strands, e.g., a gRNA comprising any minus strand targeting domain may be paired with any gRNA comprising a plus strand targeting domain provided that the two gRNAs are oriented on the DNA such that PAMs face outward and the distance between the 5′ ends of the gRNAs is 0-50 bp.

TABLE 26E
3rd Tier

Targeting domains for knocking out the TRBC gene using S. aureus
Cas9 selected according to third tier parameters are presented in
SEQ ID NO: 50430-51192.

[0965] Table 26F provides targeting domains for knocking out the TRBC gene using N. meningitidis Cas9 selected according to first tier parameters. The targeting domains bind within the first 500 bp of coding sequence downstream of start codon and have good orthogonality. It is contemplated herein that the targeting domain hybridizes to the target domain through complementary base pairing. Any of the targeting domains in the table can be used with a N. meningitidis Cas9 molecule that generates a double stranded break (Cas9 nuclease) or a single-stranded break (Cas9 nickase). In an embodiment, dual targeting is used to create two nicks on opposite DNA strands by using N. meningitidis nickases with two targeting domains that are complementary to opposite DNA strands, e.g., a gRNA comprising any minus strand targeting domain may be paired with any gRNA comprising a plus strand targeting domain provided that the two gRNAs are oriented on the DNA such that PAMs face outward and the distance between the 5′ ends of the gRNAs is 0-50 bp.

TABLE 26F
1st Tier

Targeting domains for knocking out the TRBC gene using
N. meningitidismeningitidis Cas9 selected according to
first tier parameters are presented in SEQ ID NO: 51193-51198.

[0966] Table 26G provides targeting domains for knocking out the TRBC gene using N. meningitidis Cas9 selected according to second tier parameters. The targeting domains bind within the first 500 bp of coding sequence downstream of start codon and good orthogonality is not required. It is contemplated herein that the targeting domain hybridizes to the target domain through complementary base pairing. Any of the targeting domains in the table can be used with a N. meningitidis Cas9 molecule that generates a double stranded break (Cas9 nuclease) or a single-stranded break (Cas9 nickase). In an embodiment, dual targeting is used to create two nicks on opposite DNA strands by using N. meningitidis Cas9 nickases with two targeting domains that are complementary to opposite DNA strands, e.g., a gRNA comprising any minus strand targeting domain may be paired with any gRNA comprising a plus strand targeting domain provided that the two gRNAs are oriented on the DNA such that PAMs face outward and the distance between the 5′ ends of the gRNAs is 0-50 bp.

TABLE 26G
2nd Tier

Targeting domains for knocking out the TRBC gene using
N. meningitidismeningitidis Cas9 selected according to
second tier parameters are presented in SEQ ID NO: 51199-51200.

[0967] Targeting domains, disclosed herein, may comprise a 17-mer described in Tables 13A-K, Tables 14A-K, Tables 15A-F, Tables 16A-K, Tables 17A-K, Tables 18A-K, Tables 19A-J, Tables 20A-J, Tables 21A-K, Tables 22A-K, Tables 23A-J, Tables 24A-K, Tables 25A-G, Tables 26A-G, Table 27, Table 29, Table 31, or Table 32, e.g., the targeting domains of 18 or more nucleotides may comprise the 17-mer gRNAs described in Tables 13A-K, Tables 14A-K, Tables 15A-F, Tables 16A-K, Tables 17A-K, Tables 18A-K, Tables 19A-J, Tables 20A-J, Tables 21A-K, Tables 22A-K, Tables 23A-J, Tables 24A-K, Tables 25A-G, Tables 26A-G, Table 27, Table 29, Table 31, or Table 32.

[0968] Targeting domains, disclosed herein, may comprise a 18-mer described in Tables 13A-K, Tables 14A-K, Tables 15A-F, Tables 16A-K, Tables 17A-K, Tables 18A-K, Tables 19A-J, Tables 20A-J, Tables 21A-K, Tables 22A-K, Tables 23A-J, Tables 24A-K, Tables 25A-G, Tables 26A-G, Table 27, Table 29, Table 31, or Table 32, e.g., the targeting domains of 19 or more nucleotides may comprise the 18-mer gRNAs described in Tables 13A-K, Tables 14A-K, Tables 15A-F, Tables 16A-K, Tables 17A-K, Tables 18A-K, Tables 19A-J, Tables 20A-J, Tables 21A-K, Tables 22A-K, Tables 23A-J, Tables 24A-K, Tables 25A-G, Tables 26A-G, Table 27, Table 29, Table 31, or Table 32, Tables 25A-G, Tables 26A-G, Table 27, Table 29, Table 31, or Table 32.

[0969] Targeting domains, disclosed herein, may comprise a 19-mer described in Tables 13A-K, Tables 14A-K, Tables 15A-F, Tables 16A-K, Tables 17A-K, Tables 18A-K, Tables 19A-J, Tables 20A-J, Tables 21A-K, Tables 22A-K, Tables 23A-J, Tables 24A-K, Tables 25A-G, Tables 26A-G, Table 27, Table 29, Table 31, or Table 32, e.g., the targeting domains of 20 or more nucleotides may comprise the 19-mer gRNAs described in Tables 13A-K, Tables 14A-K, Tables 15A-F, Tables 16A-K, Tables 17A-K, Tables 18A-K, Tables 19A-J, Tables 20A-J, Tables 21A-K, Tables 22A-K, Tables 23A-J, Tables 24A-K, Tables 25A-G, Tables 26A-G, Table 27, Table 29, Table 31, or Table 32.

[0970] Targeting domains, disclosed herein, may comprise a 20-mer gRNAs described in Tables 13A-K, Tables 14A-K, Tables 15A-F, Tables 16A-K, Tables 17A-K, Tables 18A-K, Tables 19A-J, Tables 20A-J, Tables 21A-K, Tables 22A-K, Tables 23A-J, Tables 24A-K, Tables 25A-G, Tables 26A-G, Table 27, Table 29, Table 31, or Table 32, e.g., the targeting domains of 21 or more nucleotides may comprise the 20-mer gRNAs described in Tables 13A-K, Tables 14A-K, Tables 15A-F, Tables 16A-K, Tables 17A-K, Tables 18A-K, Tables 19A-J, Tables 20A-J, Tables 21A-K, Tables 22A-K, Tables 23A-J, Tables 24A-K, Tables 25A-G, Tables 26A-G, Table 27, Table 29, Table 31, or Table 32.

[0971] Targeting domains, disclosed herein, may comprise a 21-mer described in Tables 13A-K, Tables 14A-K, Tables 15A-F, Tables 16A-K, Tables 17A-K, Tables 18A-K, Tables 19A-J, Tables 20A-J, Tables 21A-K, Tables 22A-K, Tables 23A-J, Tables 24A-K, Tables 25A-G, Tables 26A-G, Table 27, Table 29, Table 31, or Table 32, e.g., the targeting domains of 22 or more nucleotides may comprise the 21-mer gRNAs described in Tables 13A-K, Tables 14A-K, Tables 15A-F, Tables 16A-K, Tables 17A-K, Tables 18A-K, Tables 19A-J, Tables 20A-J, Tables 21A-K, Tables 22A-K, Tables 23A-J, Tables 24A-K, Tables 25A-G, Tables 26A-G, Table 27, Table 29, Table 31, or Table 32.

[0972] Targeting domains, disclosed herein, may comprise a 22-mer described in Tables 13A-K, Tables 14A-K, Tables 15A-F, Tables 16A-K, Tables 17A-K, Tables 18A-K, Tables 19A-J, Tables 20A-J, Tables 21A-K, Tables 22A-K, Tables 23A-J, Tables 24A-K, Tables 25A-G, Tables 26A-G, Table 27, Table 29, Table 31, or Table 32, e.g., the targeting domains of 23 or more nucleotides may comprise the 22-mer gRNAs described in Tables 13A-K, Tables 14A-K, Tables 15A-F, Tables 16A-K, Tables 17A-K, Tables 18A-K, Tables 19A-J, Tables 20A-J, Tables 21A-K, Tables 22A-K, Tables 23A-J, Tables 24A-K, Tables 25A-G, Tables 26A-G, Table 27, Table 29, Table 31, or Table 32.

[0973] Targeting domains, disclosed herein, may comprise a 23-mer described in Tables 13A-K, Tables 14A-K, Tables 15A-F, Tables 16A-K, Tables 17A-K, Tables 18A-K, Tables 19A-J, Tables 20A-J, Tables 21A-K, Tables 22A-K, Tables 23A-J, Tables 24A-K, Tables 25A-G, Tables 26A-G, Table 27, Table 29, Table 31, or Table 32, e.g., the targeting domains of 24 or more nucleotides may comprise the 23-mer gRNAs described in Tables 13A-K, Tables 14A-K, Tables 15A-F, Tables 16A-K, Tables 17A-K, Tables 18A-K, Tables 19A-J, Tables 20A-J, Tables 21A-K, Tables 22A-K, Tables 23A-J, Tables 24A-K, Tables 25A-G, Tables 26A-G, Table 27, Table 29, Table 31, or Table 32.

[0974] Targeting domains, disclosed herein, may comprise a 24-mer described in Tables 13A-K, Tables 14A-K, Tables 15A-F, Tables 16A-K, Tables 17A-K, Tables 18A-K, Tables 19A-J, Tables 20A-J, Tables 21A-K, Tables 22A-K, Tables 23A-J, Tables 24A-K, Tables 25A-G, Tables 26A-G, Table 27, Table 29, Table 31, or Table 32, e.g., the targeting domains of 25 or more nucleotides may comprise the 24-mer gRNAs described in Tables 13A-K, Tables 14A-K, Tables 15A-F, Tables 16A-K, Tables 17A-K, Tables 18A-K, Tables 19A-J, Tables 20A-J, Tables 21A-K, Tables 22A-K, Tables 23A-J, Tables 24A-K, Tables 25A-G, Tables 26A-G, Table 27, Table 29, Table 31, or Table 32.

### III. Cas9 Molecules

[0975] Cas9 molecules of a variety of species can be used in the methods and compositions described herein. While the S. pyogenes, S. aureus, N. meningitidis, and S. thermophilus Cas9 molecules are the subject of much of the disclosure herein, Cas9 molecules of, derived from, or based on the Cas9 proteins of other species listed herein can be used as well. In other words, while the much of the description herein uses S. pyogenes, S. aureus, N. meningitidis, and S. thermophilus Cas9 molecules, Cas9 molecules from the other species can replace them. Such species include: Acidovorax avenae, Actinobacillus pleuropneumoniae, Actinobacillus succinogenes, Actinobacillus suis, Actinomyces sp., Cycliphilusdenitrificans, Aminomonas paucivorans, Bacillus cereus, Bacillus smithii, Bacillus thuringiensis, Bacteroides sp., Blastopirellula marina, Bradyrhizobium sp., Brevibacillus laterosporus, Campylobacter coli, Campylobacter jejuni, Campylobacter lari, Candidatus puniceispirillum, Clostridium cellulolyticum, Clostridium perfringens, Corynebacterium accolens, Corynebacterium diphtheria, Corynebacterium matruchotii, Dinoroseobacter shibae, Eubacterium dolichum, Gammaproteobacterium, Gluconacetobacter diazotrophicus, Haemophilus parainfluenzae, Haemophilus sputorum, Helicobacter canadensis, Helicobacter cinaedi, Helicobacter mustelae, Ilyobacter polytropus, Kingella kingae, Lactobacillus crispatus, Listeria ivanovii, Listeria monocytogenes, Listeriaceae bacterium, Methylocystis sp., Methylosinus trichosporium, Mobiluncus mulieris, Neisseria bacilliformis, Neisseria cinerea, Neisseria flavescens, Neisseria lactamica, Neisseria meningitidis, Neisseria sp., Neisseria wadsworthii, Nitrosomonas sp., Parvibaculum lavamentivorans, Pasteurella multocida, Phascolarctobacterium succinatutens, Ralstonia syzygii, Rhodopseudomonas palustris, Rhodovulum sp., Simonsiella muelleri, Sphingomonas sp., Sporolactobacillus vineae, Staphylococcus aureus, Staphylococcus lugdunensis, Streptococcus sp., Subdoligranulum sp., Tistrella mobilis, Treponema sp., or Verminephrobacter eiseniae.

[0976] A Cas9 molecule, or Cas9 polypeptide, as that term is used herein, refers to a molecule or polypeptide that can interact with a gRNA molecule and, in concert with the gRNA molecule, homes or localizes to a site which comprises a target domain and PAM sequence. Cas9 molecule and Cas9 polypeptide, as those terms are used herein, refer to naturally occurring Cas9 molecules and to engineered, altered, or modified Cas9 molecules or Cas9 polypeptides that differ, e.g., by at least one amino acid residue, from a reference sequence, e.g., the most similar naturally occurring Cas9 molecule or a sequence of Table 100.

[0977] Cas9 Domains

[0978] Crystal structures have been determined for two different naturally occurring bacterial Cas9 molecules (Jinek et al., Science, 343(6176):1247997, 2014) and for S. pyogenes Cas9 with a guide RNA (e.g., a synthetic fusion of crRNA and tracrRNA) (Nishimasu et al., Cell, 156:935-949, 2014; and Anders et al., Nature, 2014, doi: 10.1038/nature13579).

[0979] A naturally occurring Cas9 molecule comprises two lobes: a recognition (REC) lobe and a nuclease (NUC) lobe; each of which further comprises domains described herein. FIGS. 8A-8B provide a schematic of the organization of important Cas9 domains in the primary structure. The domain nomenclature and the numbering of the amino acid residues encompassed by each domain used throughout this disclosure is as described in Nishimasu et al. The numbering of the amino acid residues is with reference to Cas9 from S. pyogenes.

[0980] The REC lobe comprises the arginine-rich bridge helix (BH), the REC1 domain, and the REC2 domain. The REC lobe does not share structural similarity with other known proteins, indicating that it is a Cas9-specific functional domain. The BH domain is a long α-helix and arginine rich region and comprises amino acids 60-93 of the sequence of S. pyogenes Cas9. The REC1 domain is important for recognition of the repeat:anti-repeat duplex, e.g., of a gRNA or a tracrRNA, and is therefore critical for Cas9 activity by recognizing the target sequence. The REC1 domain comprises two REC1 motifs at amino acids 94 to 179 and 308 to 717 of the sequence of S. pyogenes Cas9. These two REC1 domains, though separated by the REC2 domain in the linear primary structure, assemble in the tertiary structure to form the REC1 domain. The REC2 domain, or parts thereof, may also play a role in the recognition of the repeat:anti-repeat duplex. The REC2 domain comprises amino acids 180-307 of the sequence of S. pyogenes Cas9.

[0981] The NUC lobe comprises the RuvC domain (also referred to herein as RuvC-like domain), the HNH domain (also referred to herein as HNH-like domain), and the PAM-interacting (PI) domain. The RuvC domain shares structural similarity to retroviral integrase superfamily members and cleaves a single strand, e.g., the non-complementary strand of the target nucleic acid molecule. The RuvC domain is assembled from the three split RuvC motifs (RuvC I, RuvCII, and RuvCIII, which are often commonly referred to in the art as RuvCI domain, or N-terminal RuvC domain, RuvCII domain, and RuvCIII domain) at amino acids 1-59, 718-769, and 909-1098, respectively, of the sequence of S. pyogenes Cas9. Similar to the REC1 domain, the three RuvC motifs are linearly separated by other domains in the primary structure, however in the tertiary structure, the three RuvC motifs assemble and form the RuvC domain. The HNH domain shares structural similarity with HNH endonucleases, and cleaves a single strand, e.g., the complementary strand of the target nucleic acid molecule. The HNH domain lies between the RuvC II-III motifs and comprises amino acids 775-908 of the sequence of S. pyogenes Cas9. The PI domain interacts with the PAM of the target nucleic acid molecule, and comprises amino acids 1099-1368 of the sequence of S. pyogenes Cas9.

[0982] A RuvC-Like Domain and an HNH-Like Domain

[0983] In an embodiment, a Cas9 molecule or Cas9 polypeptide comprises an HNH-like domain and a RuvC-like domain. In an embodiment, cleavage activity is dependent on a RuvC-like domain and an HNH-like domain. A Cas9 molecule or Cas9 polypeptide, e.g., an eaCas9 molecule or eaCas9 polypeptide, can comprise one or more of the following domains: a RuvC-like domain and an HNH-like domain. In an embodiment, a Cas9 molecule or Cas9 polypeptide is an eaCas9 molecule or eaCas9 polypeptide and the eaCas9 molecule or eaCas9 polypeptide comprises a RuvC-like domain, e.g., a RuvC-like domain described below, and/or an HNH-like domain, e.g., an HNH-like domain described below.

[0984] RuvC-Like Domains

[0985] In an embodiment, a RuvC-like domain cleaves, a single strand, e.g., the non-complementary strand of the target nucleic acid molecule. The Cas9 molecule or Cas9 polypeptide can include more than one RuvC-like domain (e.g., one, two, three or more RuvC-like domains). In an embodiment, a RuvC-like domain is at least 5, 6, 7, 8 amino acids in length but not more than 20, 19, 18, 17, 16 or 15 amino acids in length. In an embodiment, the Cas9 molecule or Cas9 polypeptide comprises an N-terminal RuvC-like domain of about 10 to 20 amino acids, e.g., about 15 amino acids in length.

[0986] N-Terminal RuvC-Like Domains

[0987] Some naturally occurring Cas9 molecules comprise more than one RuvC-like domain with cleavage being dependent on the N-terminal RuvC-like domain. Accordingly, Cas9 molecules or Cas9 polypeptide can comprise an N-terminal RuvC-like domain. Exemplary N-terminal RuvC-like domains are described below.

[0988] In an embodiment, an eaCas9 molecule or eaCas9 polypeptide comprises an N-terminal RuvC-like domain comprising an amino acid sequence of formula I:

(SEQ ID NO: 8)

D-X1-G-X2-X3-X4-X5-G-X6-X7-X8-X9,

[0989] wherein,
[0990] X1 is selected from I, V, M, L and T (e.g., selected from I, V, and L);
[0991] X2 is selected from T, I, V, S, N, Y, E and L (e.g., selected from T, V, and I);
[0992] X3 is selected from N, S, G, A, D, T, R, M and F (e.g., A or N);
[0993] X4 is selected from S, Y, N and F (e.g., S);
[0994] X5 is selected from V, I, L, C, T and F (e.g., selected from V, I and L);
[0995] X6 is selected from W, F, V, Y, S and L (e.g., W);
[0996] X7 is selected from A, S, C, V and G (e.g., selected from A and S);
[0997] X8 is selected from V, I, L, A, M and H (e.g., selected from V, I, M and L); and
[0998] X9 is selected from any amino acid or is absent, designated by Δ (e.g., selected from T, V, I, L, Δ, F, S, A, Y, M and R, or, e.g., selected from T, V, I, L and Δ).

[0999] In an embodiment, the N-terminal RuvC-like domain differs from a sequence of SEQ ID NO:8, by as many as 1 but no more than 2, 3, 4, or 5 residues.

[1000] In embodiment, the N-terminal RuvC-like domain is cleavage competent.

[1001] In embodiment, the N-terminal RuvC-like domain is cleavage incompetent.

[1002] In an embodiment, a eaCas9 molecule or eaCas9 polypeptide comprises an N-terminal RuvC-like domain comprising an amino acid sequence of formula II:

(SEQ ID NO: 9)

D-X1-G-X2-X3-S-X5-G-X6-X7-X8-X9,

[1003] wherein
[1004] X1 is selected from I, V, M, L and T (e.g., selected from I, V, and L);
[1005] X2 is selected from T, I, V, S, N, Y, E and L (e.g., selected from T, V, and I);
[1006] X3 is selected from N, S, G, A, D, T, R, M and F (e.g., A or N);
[1007] X5 is selected from V, I, L, C, T and F (e.g., selected from V, I and L);
[1008] X6 is selected from W, F, V, Y, S and L (e.g., W);
[1009] X7 is selected from A, S, C, V and G (e.g., selected from A and S);
[1010] X8 is selected from V, I, L, A, M and H (e.g., selected from V, I, M and L); and
[1011] X9 is selected from any amino acid or is absent (e.g., selected from T, V, I, L, Δ, F, S, A, Y, M and R or selected from e.g., T, V, I, L and Δ).

[1012] In an embodiment, the N-terminal RuvC-like domain differs from a sequence of SEQ ID NO:9 by as many as 1 but no more than 2, 3, 4, or 5 residues.

[1013] In an embodiment, the N-terminal RuvC-like domain comprises an amino acid sequence of formula III:

(SEQ ID NO: 10)

D-I-G-X2-X3-S-V-G-W-A-X8-X9,

[1014] wherein
[1015] X2 is selected from T, I, V, S, N, Y, E and L (e.g., selected from T, V, and I);
[1016] X3 is selected from N, S, G, A, D, T, R, M and F (e.g., A or N);
[1017] X8 is selected from V, I, L, A, M and H (e.g., selected from V, I, M and L); and
[1018] X9 is selected from any amino acid or is absent (e.g., selected from T, V, I, L, A, F, S, A, Y, M and R or selected from e.g., T, V, I, L and A).

[1019] In an embodiment, the N-terminal RuvC-like domain differs from a sequence of SEQ ID NO: 10 by as many as 1 but no more than, 2, 3, 4, or 5 residues.

[1020] In an embodiment, the N-terminal RuvC-like domain comprises an amino acid sequence of formula III:

(SEQ ID NO: 11)

D-I-G-T-N-S-V-G-W-A-V-X,

[1021] wherein
[1022] X is a non-polar alkyl amino acid or a hydroxyl amino acid, e.g., X is selected from V, I, L and T (e.g., the eaCas9 molecule can comprise an N-terminal RuvC-like domain shown in FIGS. 2A-2G (is depicted as Y)).

[1023] In an embodiment, the N-terminal RuvC-like domain differs from a sequence of SEQ ID NO: 11 by as many as 1 but no more than, 2, 3, 4, or 5 residues.

[1024] In an embodiment, the N-terminal RuvC-like domain differs from a sequence of an N-terminal RuvC like domain disclosed herein, e.g., in FIGS. 3A-3B or FIGS. 7A-7B, as many as 1 but no more than 2, 3, 4, or 5 residues. In an embodiment, 1, 2, or all 3 of the highly conserved residues identified in FIGS. 3A-3B or FIGS. 7A-7B are present.

[1025] In an embodiment, the N-terminal RuvC-like domain differs from a sequence of an N-terminal RuvC-like domain disclosed herein, e.g., in FIGS. 4A-4B or FIGS. 7A-7B, as many as 1 but no more than 2, 3, 4, or 5 residues. In an embodiment, 1, 2, 3 or all 4 of the highly conserved residues identified in FIGS. 4A-4B or FIGS. 7A-7B are present.

[1026] Additional RuvC-Like Domains

[1027] In addition to the N-terminal RuvC-like domain, the Cas9 molecule or Cas9 polypeptide, e.g., an eaCas9 molecule or eaCas9 polypeptide, can comprise one or more additional RuvC-like domains. In an embodiment, the Cas9 molecule or Cas9 polypeptide can comprise two additional RuvC-like domains. Preferably, the additional RuvC-like domain is at least 5 amino acids in length and, e.g., less than 15 amino acids in length, e.g., 5 to 10 amino acids in length, e.g., 8 amino acids in length.

[1028] An additional RuvC-like domain can comprise an amino acid sequence:

(SEQ ID NO: 12)

I-X1-X2-E-X3-A-R-E,

[1029] wherein

[1030] X1 is V or H,

[1031] X2 is I, L or V (e.g., I or V); and

[1032] X3 is M or T.

[1033] In an embodiment, the additional RuvC-like domain comprises the amino acid sequence:

(SEQ ID NO: 13)

I-V-X2-E-M-A-R-E,

[1034] wherein
[1035] X2 is I, L or V (e.g., I or V) (e.g., the eaCas9 molecule or eaCas9 polypeptide can comprise an additional RuvC-like domain shown in FIGS. 2A-2G or FIGS. 7A-7B (depicted as B)).

[1036] An additional RuvC-like domain can comprise an amino acid sequence:

(SEQ ID NO: 14)

H-H-A-X1-D-A-X2-X3,

[1037] wherein

[1038] X1 is H or L;

[1039] X2 is R or V; and

[1040] X3 is E or V.

[1041] In an embodiment, the additional RuvC-like domain comprises the amino acid sequence: H-H-A-H-D-A-Y-L (SEQ ID NO:15).

[1042] In an embodiment, the additional RuvC-like domain differs from a sequence of SEQ ID NO: 12, 13, 14 or 15 by as many as 1 but no more than 2, 3, 4, or 5 residues.

[1043] In some embodiments, the sequence flanking the N-terminal RuvC-like domain is a sequence of formula V:

(SEQ ID NO: 16)

K-X1′-Y-X2′-X3′-X4′-Z-T-D-X9′-Y,

[1044] wherein
[1045] X1′ is selected from K and P,
[1046] X2′ is selected from V, L, I, and F (e.g., V, I and L);
[1047] X3′ is selected from G, A and S (e.g., G),
[1048] X4′ is selected from L, I, V and F (e.g., L);
[1049] X9′ is selected from D, E, N and Q; and
[1050] Z is an N-terminal RuvC-like domain, e.g., as described above.

[1051] HNH-Like Domains

[1052] In an embodiment, an HNH-like domain cleaves a single stranded complementary domain, e.g., a complementary strand of a double stranded nucleic acid molecule. In an embodiment, an HNH-like domain is at least 15, 20, 25 amino acids in length but not more than 40, 35 or 30 amino acids in length, e.g., 20 to 35 amino acids in length, e.g., 25 to 30 amino acids in length. Exemplary HNH-like domains are described below.

[1053] In an embodiment, an eaCas9 molecule or eaCas9 polypeptide comprises an HNH-like domain having an amino acid sequence of formula VI:

(SEQ ID NO: 17)

X1-X2-X3-H-X4-X5-P-X6-X7-X8-X9-X10-X11-X12-X13-
X14-X15-N-X16-X17-X18-X19-X20-X21-X22-X23-N,

[1054] wherein

[1055] X1 is selected from D, E, Q and N (e.g., D and E);

[1056] X2 is selected from L, I, R, Q, V, M and K;

[1057] X3 is selected from D and E;

[1058] X4 is selected from I, V, T, A and L (e.g., A, I and V);

[1059] X5 is selected from V, Y, I, L, F and W (e.g., V, I and L);

[1060] X6 is selected from Q, H, R, K, Y, I, L, F and W;

[1061] X7 is selected from S, A, D, T and K (e.g., S and A);

[1062] X8 is selected from F, L, V, K, Y, M, I, R, A, E, D and Q (e.g., F);

[1063] X9 is selected from L, R, T, I, V, S, C, Y, K, F and G;

[1064] X10 is selected from K, Q, Y, T, F, L, W, M, A, E, G, and S;

[1065] X11 is selected from D, S, N, R, L and T (e.g., D);

[1066] X12 is selected from D, N and S;

[1067] X13 is selected from S, A, T, G and R (e.g., S);

[1068] X14 is selected from I, L, F, S, R, Y, Q, W, D, K and H (e.g., I, L and F);

[1069] X15 is selected from D, S, I, N, E, A, H, F, L, Q, M, G, Y and V;

[1070] X16 is selected from K, L, R, M, T and F (e.g., L, R and K);

[1071] X17 is selected from V, L, I, A and T;

[1072] X18 is selected from L, I, V and A (e.g., L and I);

[1073] X19 is selected from T, V, C, E, S and A (e.g., T and V);

[1074] X20 is selected from R, F, T, W, E, L, N, C, K, V, S, Q, I, Y, H and A;

[1075] X21 is selected from S, P, R, K, N, A, H, Q, G and L;

[1076] X22 is selected from D, G, T, N, S, K, A, I, E, L, Q, R and Y; and

[1077] X23 is selected from K, V, A, E, Y, I, C, L, S, T, G, K, M, D and F.

[1078] In an embodiment, a HNH-like domain differs from a sequence of SEQ ID NO: 17 by at least one but no more than, 2, 3, 4, or 5 residues.

[1079] In an embodiment, the HNH-like domain is cleavage competent.

[1080] In an embodiment, the HNH-like domain is cleavage incompetent.

[1081] In an embodiment, an eaCas9 molecule or eaCas9 polypeptide comprises an HNH-like domain comprising an amino acid sequence of formula VII:

(SEQ ID NO: 18)

X1-X2-X3-H-X4-X5-P-X6-S-X8-X9-X10-D-D-S-X14-X15-
N-K-V-L-X19-X20-X21-X22-X23-N,

[1082] wherein

[1083] X1 is selected from D and E;

[1084] X2 is selected from L, I, R, Q, V, M and K;

[1085] X3 is selected from D and E;

[1086] X4 is selected from I, V, T, A and L (e.g., A, I and V);

[1087] X5 is selected from V, Y, I, L, F and W (e.g., V, I and L);

[1088] X6 is selected from Q, H, R, K, Y, I, L, F and W;

[1089] X8 is selected from F, L, V, K, Y, M, I, R, A, E, D and Q (e.g., F);

[1090] X9 is selected from L, R, T, I, V, S, C, Y, K, F and G;

[1091] X10 is selected from K, Q, Y, T, F, L, W, M, A, E, G, and S;

[1092] X14 is selected from I, L, F, S, R, Y, Q, W, D, K and H (e.g., I, L and F);

[1093] X15 is selected from D, S, I, N, E, A, H, F, L, Q, M, G, Y and V;

[1094] X19 is selected from T, V, C, E, S and A (e.g., T and V);

[1095] X20 is selected from R, F, T, W, E, L, N, C, K, V, S, Q, I, Y, H and A;

[1096] X21 is selected from S, P, R, K, N, A, H, Q, G and L;

[1097] X22 is selected from D, G, T, N, S, K, A, I, E, L, Q, R and Y; and

[1098] X23 is selected from K, V, A, E, Y, I, C, L, S, T, G, K, M, D and F.

[1099] In an embodiment, the HNH-like domain differs from a sequence of SEQ ID NO:18 by 1, 2, 3, 4, or 5 residues.

[1100] In an embodiment, an eaCas9 molecule or eaCas9 polypeptide comprises an HNH-like domain comprising an amino acid sequence of formula VII:

(SEQ ID NO: 19)

X1-V-X3-H-I-V-P-X6-S-X8-X9-X10-D-D-S-X14-X15-N-
K-V-L-T-X20-X21-X22-X23-N,

[1101] wherein

[1102] X1 is selected from D and E;

[1103] X3 is selected from D and E;

[1104] X6 is selected from Q, H, R, K, Y, I, L and W;

[1105] X8 is selected from F, L, V, K, Y, M, I, R, A, E, D and Q (e.g., F);

[1106] X9 is selected from L, R, T, I, V, S, C, Y, K, F and G;

[1107] X10 is selected from K, Q, Y, T, F, L, W, M, A, E, G, and S;

[1108] X14 is selected from I, L, F, S, R, Y, Q, W, D, K and H (e.g., I, L and F);

[1109] X15 is selected from D, S, I, N, E, A, H, F, L, Q, M, G, Y and V;

[1110] X20 is selected from R, F, T, W, E, L, N, C, K, V, S, Q, I, Y, H and A;

[1111] X21 is selected from S, P, R, K, N, A, H, Q, G and L;

[1112] X22 is selected from D, G, T, N, S, K, A, I, E, L, Q, R and Y; and

[1113] X23 is selected from K, V, A, E, Y, I, C, L, S, T, G, K, M, D and F.

[1114] In an embodiment, the HNH-like domain differs from a sequence of SEQ ID NO:19 by 1, 2, 3, 4, or 5 residues.

[1115] In an embodiment, an eaCas9 molecule or eaCas9 polypeptide comprises an HNH-like domain having an amino acid sequence of formula VIII:

(SEQ ID NO: 20)

D-X2-D-H-I-X5-P-Q-X7-F-X9-X10-D-X12-S-I-D-N-X16-
V-L-X19-X20-S-X22-X23-N,

[1116] wherein

[1117] X2 is selected from I and V;

[1118] X5 is selected from I and V;

[1119] X7 is selected from A and S;

[1120] X9 is selected from I and L;

[1121] X10 is selected from K and T;

[1122] X12 is selected from D and N;

[1123] X16 is selected from R, K and L; X19 is selected from T and V;

[1124] X20 is selected from S and R;

[1125] X22 is selected from K, D and A; and

[1126] X23 is selected from E, K, G and N (e.g., the eaCas9 molecule or eaCas9 polypeptide can comprise an HNH-like domain as described herein).

[1127] In an embodiment, the HNH-like domain differs from a sequence of SEQ ID NO:20 by as many as 1 but no more than 2, 3, 4, or 5 residues.

[1128] In an embodiment, an eaCas9 molecule or eaCas9 polypeptide comprises the amino acid

(SEQ ID NO: 21)

L-Y-Y-L-Q-N-G-X1′-D-M-Y-X2′-X3′-X4′-X5′-L-D-I-X6′-
X7′-L-S-X8′-Y-Z-N-R-X9′-K-X10′-D-X11′-V-P,

[1129] wherein

[1130] X1′ is selected from K and R;

[1131] X2′ is selected from V and T;

[1132] X3′ is selected from G and D;

[1133] X4′ is selected from E, Q and D;

[1134] X5′ is selected from E and D;

[1135] X6′ is selected from D, N and H;

[1136] X7′ is selected from Y, R and N;

[1137] X8′ is selected from Q, D and N; X9′ is selected from G and E;

[1138] X10′ is selected from S and G;

[1139] X11′ is selected from D and N; and

[1140] Z is an HNH-like domain, e.g., as described above.

[1141] In an embodiment, the eaCas9 molecule or eaCas9 polypeptide comprises an amino acid sequence that differs from a sequence of SEQ ID NO:21 by as many as 1 but no more than 2, 3, 4, or 5 residues.

[1142] In an embodiment, the HNH-like domain differs from a sequence of an HNH-like domain disclosed herein, e.g., in FIGS. 5A-5C or FIGS. 7A-7B, as many as 1 but no more than 2, 3, 4, or 5 residues. In an embodiment, 1 or both of the highly conserved residues identified in FIGS. 5A-5C or FIGS. 7A-7B are present.

[1143] In an embodiment, the HNH—like domain differs from a sequence of an HNH-like domain disclosed herein, e.g., in FIGS. 6A-6B or FIGS. 7A-7B, as many as 1 but no more than 2, 3, 4, or 5 residues. In an embodiment, 1, 2, all 3 of the highly conserved residues identified in FIGS. 6A-6B or FIGS. 7A-7B are present.

[1144] Cas9 Activities

[1145] Nuclease and Helicase Activities

[1146] In an embodiment, the Cas9 molecule or Cas9 polypeptide is capable of cleaving a target nucleic acid molecule. Typically wild type Cas9 molecules cleave both strands of a target nucleic acid molecule. Cas9 molecules and Cas9 polypeptides can be engineered to alter nuclease cleavage (or other properties), e.g., to provide a Cas9 molecule or Cas9 polypeptide which is a nickase, or which lacks the ability to cleave target nucleic acid. A Cas9 molecule or Cas9 polypeptide that is capable of cleaving a target nucleic acid molecule is referred to herein as an eaCas9 molecule or eaCas9 polypeptide

[1147] In an embodiment, an eaCas9 molecule or eaCas9 polypeptide comprises one or more of the following activities:

[1148] a nickase activity, i.e., the ability to cleave a single strand, e.g., the non-complementary strand or the complementary strand, of a nucleic acid molecule;

[1149] a double stranded nuclease activity, i.e., the ability to cleave both strands of a double stranded nucleic acid and create a double stranded break, which in an embodiment is the presence of two nickase activities;

[1150] an endonuclease activity;

[1151] an exonuclease activity; and

[1152] a helicase activity, i.e., the ability to unwind the helical structure of a double stranded nucleic acid.

[1153] In an embodiment, an enzymatically active or eaCas9 molecule or eaCas9 polypeptide cleaves both strands and results in a double stranded break. In an embodiment, an eaCas9 molecule cleaves only one strand, e.g., the strand to which the gRNA hybridizes to, or the strand complementary to the strand the gRNA hybridizes with. In an embodiment, an eaCas9 molecule or eaCas9 polypeptide comprises cleavage activity associated with an HNH-like domain. In an embodiment, an eaCas9 molecule or eaCas9 polypeptide comprises cleavage activity associated with an N-terminal RuvC-like domain. In an embodiment, an eaCas9 molecule or eaCas9 polypeptide comprises cleavage activity associated with an HNH-like domain and cleavage activity associated with an N-terminal RuvC-like domain. In an embodiment, an eaCas9 molecule or eaCas9 polypeptide comprises an active, or cleavage competent, HNH-like domain and an inactive, or cleavage incompetent, N-terminal RuvC-like domain. In an embodiment, an eaCas9 molecule or eaCas9 polypeptide comprises an inactive, or cleavage incompetent, HNH-like domain and an active, or cleavage competent, N-terminal RuvC-like domain.

[1154] Some Cas9 molecules or Cas9 polypeptides have the ability to interact with a gRNA molecule, and in conjunction with the gRNA molecule localize to a core target domain, but are incapable of cleaving the target nucleic acid, or incapable of cleaving at efficient rates. Cas9 molecules having no, or no substantial, cleavage activity are referred to herein as an eiCas9 molecule or eiCas9 polypeptide. For example, an eiCas9 molecule or eiCas9 polypeptide can lack cleavage activity or have substantially less, e.g., less than 20, 10, 5, 1 or 0.1% of the cleavage activity of a reference Cas9 molecule or eiCas9 polypeptide, as measured by an assay described herein.

[1155] Targeting and PAMs

[1156] A Cas9 molecule or Cas9 polypeptide, is a polypeptide that can interact with a guide RNA (gRNA) molecule and, in concert with the gRNA molecule, localizes to a site which comprises a target domain and a PAM sequence.

[1157] In an embodiment, the ability of an eaCas9 molecule or eaCas9 polypeptide to interact with and cleave a target nucleic acid is PAM sequence dependent. A PAM sequence is a sequence in the target nucleic acid. In an embodiment, cleavage of the target nucleic acid occurs upstream from the PAM sequence. EaCas9 molecules from different bacterial species can recognize different sequence motifs (e.g., PAM sequences). In an embodiment, an eaCas9 molecule of S. pyogenes recognizes the sequence motif NGG, NAG, NGA and directs cleavage of a target nucleic acid sequence 1 to 10, e.g., 3 to 5, base pairs upstream from that sequence. See, e.g., Mali et al., SCIENCE 2013; 339(6121): 823-826. In an embodiment, an eaCas9 molecule of S. thermophilus recognizes the sequence motif NGGNG and/or NNAGAAW (W=A or T) and directs cleavage of a target nucleic acid sequence 1 to 10, e.g., 3 to 5, base pairs upstream from these sequences. See, e.g., Horvath et al., SCIENCE 2010; 327(5962): 167-170, and Deveau et al., J BACTERIOL 2008; 190(4): 1390-1400. In an embodiment, an eaCas9 molecule of S. mutans recognizes the sequence motif NGG and/or NAAR (R=A or G)) and directs cleavage of a core target nucleic acid sequence 1 to 10, e.g., 3 to 5 base pairs, upstream from this sequence. See, e.g., Deveau et al., J BACTERIOL 2008; 190(4): 1390-1400. In an embodiment, an eaCas9 molecule of S. aureus recognizes the sequence motif NNGRR (R=A or G) and directs cleavage of a target nucleic acid sequence 1 to 10, e.g., 3 to 5, base pairs upstream from that sequence. In an embodiment, an eaCas9 molecule of S. aureus recognizes the sequence motif NNGRRT (R=A or G) and directs cleavage of a target nucleic acid sequence 1 to 10, e.g., 3 to 5, base pairs upstream from that sequence. In an embodiment, an eaCas9 molecule of S. aureus recognizes the sequence motif NNGRRV (R=A or G) and directs cleavage of a target nucleic acid sequence 1 to 10, e.g., 3 to 5, base pairs upstream from that sequence. In an embodiment, an eaCas9 molecule of N. meningitidis recognizes the sequence motif NNNNGATT or NNNGCTT (R=A or G, V=A, G or C and directs cleavage of a target nucleic acid sequence 1 to 10, e.g., 3 to 5, base pairs upstream from that sequence. See, e.g., Hou et al., PNAS EARLY EDITION 2013, 1-6. The ability of a Cas9 molecule to recognize a PAM sequence can be determined, e.g., using a transformation assay described in Jinek et al., SCIENCE 2012 337:816. In the aforementioned embodiments, N can be any nucleotide residue, e.g., any of A, G, C or T.

[1158] As is discussed herein, Cas9 molecules can be engineered to alter the PAM specificity of the Cas9 molecule.

[1159] Exemplary naturally occurring Cas9 molecules are described in Chylinski et al., RNA Biology 2013 10:5, 727-737. Such Cas9 molecules include Cas9 molecules of a cluster 1 bacterial family, cluster 2 bacterial family, cluster 3 bacterial family, cluster 4 bacterial family, cluster 5 bacterial family, cluster 6 bacterial family, a cluster 7 bacterial family, a cluster 8 bacterial family, a cluster 9 bacterial family, a cluster 10 bacterial family, a cluster 11 bacterial family, a cluster 12 bacterial family, a cluster 13 bacterial family, a cluster 14 bacterial family, a cluster 15 bacterial family, a cluster 16 bacterial family, a cluster 17 bacterial family, a cluster 18 bacterial family, a cluster 19 bacterial family, a cluster 20 bacterial family, a cluster 21 bacterial family, a cluster 22 bacterial family, a cluster 23 bacterial family, a cluster 24 bacterial family, a cluster 25 bacterial family, a cluster 26 bacterial family, a cluster 27 bacterial family, a cluster 28 bacterial family, a cluster 29 bacterial family, a cluster 30 bacterial family, a cluster 31 bacterial family, a cluster 32 bacterial family, a cluster 33 bacterial family, a cluster 34 bacterial family, a cluster 35 bacterial family, a cluster 36 bacterial family, a cluster 37 bacterial family, a cluster 38 bacterial family, a cluster 39 bacterial family, a cluster 40 bacterial family, a cluster 41 bacterial family, a cluster 42 bacterial family, a cluster 43 bacterial family, a cluster 44 bacterial family, a cluster 45 bacterial family, a cluster 46 bacterial family, a cluster 47 bacterial family, a cluster 48 bacterial family, a cluster 49 bacterial family, a cluster 50 bacterial family, a cluster 51 bacterial family, a cluster 52 bacterial family, a cluster 53 bacterial family, a cluster 54 bacterial family, a cluster 55 bacterial family, a cluster 56 bacterial family, a cluster 57 bacterial family, a cluster 58 bacterial family, a cluster 59 bacterial family, a cluster 60 bacterial family, a cluster 61 bacterial family, a cluster 62 bacterial family, a cluster 63 bacterial family, a cluster 64 bacterial family, a cluster 65 bacterial family, a cluster 66 bacterial family, a cluster 67 bacterial family, a cluster 68 bacterial family, a cluster 69 bacterial family, a cluster 70 bacterial family, a cluster 71 bacterial family, a cluster 72 bacterial family, a cluster 73 bacterial family, a cluster 74 bacterial family, a cluster 75 bacterial family, a cluster 76 bacterial family, a cluster 77 bacterial family, or a cluster 78 bacterial family.

[1160] Exemplary naturally occurring Cas9 molecules include a Cas9 molecule of a cluster 1 bacterial family. Examples include a Cas9 molecule of: S. pyogenes (e.g., strain SF370, MGAS10270, MGAS10750, MGAS2096, MGAS315, MGAS5005, MGAS6180, MGAS9429, NZ131 and SSI-1), S. thermophilus (e.g., strain LMD-9), S. pseudoporcinus (e.g., strain SPIN 20026), S. mutans (e.g., strain UA159, NN2025), S. macacae (e.g., strain NCTC11558), S. gallolyticus (e.g., strain UCN34, ATCC BAA-2069), S. equines (e.g., strain ATCC 9812, MGCS 124), S. dysdalactiae (e.g., strain GGS 124), S. bovis (e.g., strain ATCC 700338), S. anginosus (e.g., strain F0211), S. agalactiae (e.g., strain NEM316, A909), Listeria monocytogenes (e.g., strain F6854), Listeria innocua (L. innocua, e.g., strain Clip 11262), Enterococcus italicus (e.g., strain DSM 15952), or Enterococcus faecium (e.g., strain 1,231,408). Another exemplary Cas9 molecule is a Cas9 molecule of Neisseria meningitidis (Hou et al., PNAS Early Edition 2013, 1-6).

[1161] In an embodiment, a Cas9 molecule or Cas9 polypeptide, e.g., an eaCas9 molecule or eaCas9 polypeptide, comprises an amino acid sequence:

[1162] having 60%, 65%, 70%, 75%, 80%, 85%, 90%, 95%, 96%, 97%, 98% or 99% homology with;

[1163] differs at no more than, 2, 5, 10, 15, 20, 30, or 40% of the amino acid residues when compared with;

[1164] differs by at least 1, 2, 5, 10 or 20 amino acids but by no more than 100, 80, 70, 60, 50, 40 or 30 amino acids from; or

[1165] is identical to any Cas9 molecule sequence described herein, or a naturally occurring Cas9 molecule sequence, e.g., a Cas9 molecule from a species listed herein or described in Chylinski et al., RNA Biology 2013 10:5, 727-737; Hou et al., PNAS Early Edition 2013, 1-6; SEQ ID NOS:1-4. In an embodiment, the Cas9 molecule or Cas9 polypeptide comprises one or more of the following activities: a nickase activity; a double stranded cleavage activity (e.g., an endonuclease and/or exonuclease activity); a helicase activity; or the ability, together with a gRNA molecule, to home to a target nucleic acid.

[1166] In an embodiment, a Cas9 molecule or Cas9 polypeptide comprises the amino acid sequence of the consensus sequence of FIGS. 2A-2G, wherein “*” indicates any amino acid found in the corresponding position in the amino acid sequence of a Cas9 molecule of S. pyogenes, S. thermophilus, S. mutans and L. innocua, and “-” indicates any amino acid. In an embodiment, a Cas9 molecule or Cas9 polypeptide differs from the sequence of the consensus sequence disclosed in FIGS. 2A-2G by at least 1, but no more than 2, 3, 4, 5, 6, 7, 8, 9, or 10 amino acid residues. In an embodiment, a Cas9 molecule or Cas9 polypeptide comprises the amino acid sequence of SEQ ID NO:7 of FIGS. 7A-7B, wherein “*” indicates any amino acid found in the corresponding position in the amino acid sequence of a Cas9 molecule of S. pyogenes, or N. meningitidis, “-” indicates any amino acid, and “-” indicates any amino acid or absent. In an embodiment, a Cas9 molecule or Cas9 polypeptide differs from the sequence of SEQ ID NO:6 or 7 disclosed in FIGS. 7A-7B by at least 1, but no more than 2, 3, 4, 5, 6, 7, 8, 9, or 10 amino acid residues.

[1167] A comparison of the sequence of a number of Cas9 molecules indicate that certain regions are conserved. These are identified below as:

[1168] region 1 (residues 1 to 180, or in the case of region 1′residues 120 to 180)

[1169] region 2 (residues 360 to 480);

[1170] region 3 (residues 660 to 720);

[1171] region 4 (residues 817 to 900); and

[1172] region 5 (residues 900 to 960);

[1173] In an embodiment, a Cas9 molecule or Cas9 polypeptide comprises regions 1-5, together with sufficient additional Cas9 molecule sequence to provide a biologically active molecule, e.g., a Cas9 molecule having at least one activity described herein. In an embodiment, each of regions 1-6, independently, have, 50%, 60%, 70%, or 80% homology with the corresponding residues of a Cas9 molecule or Cas9 polypeptide described herein, e.g., a sequence from FIGS. 2A-2G or from FIGS. 7A-7B.

[1174] In an embodiment, a Cas9 molecule or Cas9 polypeptide, e.g., an eaCas9 molecule or eaCas9 polypeptide, comprises an amino acid sequence referred to as region 1:

[1175] having 50%, 60%, 70%, 80%, 85%, 90%, 95%, 96%, 97%, 98% or 99% homology with amino acids 1-180 (the numbering is according to the motif sequence in FIGS. 2A-2G; 52% of residues in the four Cas9 sequences in FIGS. 2A-2G are conserved) of the amino acid sequence of Cas9 of S. pyogenes;

[1176] differs by at least 1, 2, 5, 10 or 20 amino acids but by no more than 90, 80, 70, 60, 50, 40 or 30 amino acids from amino acids 1-180 of the amino acid sequence of Cas9 of S. pyogenes, S. thermophilus, S. mutans or L. innocua; or

[1177] is identical to 1-180 of the amino acid sequence of Cas9 of S. pyogenes, S. thermophilus, S. mutans or L. innocua.

[1178] In an embodiment, a Cas9 molecule or Cas9 polypeptide, e.g., an eaCas9 molecule or eaCas9 polypeptide, comprises an amino acid sequence referred to as region 1′:

[1179] having 55%, 60%, 65%, 70%, 75%, 80%, 85%, 90%, 95%, 96%, 97%, 98% or 99% homology with amino acids 120-180 (55% of residues in the four Cas9 sequences in FIGS. 2A-2G are conserved) of the amino acid sequence of Cas9 of S. pyogenes, S. thermophilus, S. mutans or L. innocua;

[1180] differs by at least 1, 2, or 5 amino acids but by no more than 35, 30, 25, 20 or 10 amino acids from amino acids 120-180 of the amino acid sequence of Cas9 of S. pyogenes, S. thermophilus, S. mutans or L. innocua; or

[1181] is identical to 120-180 of the amino acid sequence of Cas9 of S. pyogenes, S. thermophilus, S. mutans or L. innocua.

[1182] In an embodiment, a Cas9 molecule or Cas9 polypeptide, e.g., an eaCas9 molecule or eaCas9 polypeptide, comprises an amino acid sequence referred to as region 2:

[1183] having 50%, 55%, 60%, 65%, 70%, 75%, 80%, 85%, 90%, 95%, 96%, 97%, 98% or 99% homology with amino acids 360-480 (52% of residues in the four Cas9 sequences in FIGS. 2A-2G are conserved) of the amino acid sequence of Cas9 of S. pyogenes, S. thermophilus, S. mutans or L. innocua;

[1184] differs by at least 1, 2, or 5 amino acids but by no more than 35, 30, 25, 20 or 10 amino acids from amino acids 360-480 of the amino acid sequence of Cas9 of S. pyogenes, S. thermophilus, S. mutans or L. innocua; or

[1185] is identical to 360-480 of the amino acid sequence of Cas9 of S. pyogenes, S. thermophilus, S. mutans or L. innocua.

[1186] In an embodiment, a Cas9 molecule or Cas9 polypeptide, e.g., an eaCas9 molecule or eaCas9 polypeptide, comprises an amino acid sequence referred to as region 3:

[1187] having 55%, 60%, 65%, 70%, 75%, 80%, 85%, 90%, 95%, 96%, 97%, 98%, or 99% homology with amino acids 660-720 (56% of residues in the four Cas9 sequences in FIGS. 2A-2G are conserved) of the amino acid sequence of Cas9 of S. pyogenes, S. thermophilus, S. mutans or L. innocua;

[1188] differs by at least 1, 2, or 5 amino acids but by no more than 35, 30, 25, 20 or 10 amino acids from amino acids 660-720 of the amino acid sequence of Cas9 of S. pyogenes, S. thermophilus, S. mutans or L. innocua; or

[1189] is identical to 660-720 of the amino acid sequence of Cas9 of S. pyogenes, S. thermophilus, S. mutans or L. innocua.

[1190] In an embodiment, a Cas9 molecule or Cas9 polypeptide, e.g., an eaCas9 molecule or eaCas9 polypeptide, comprises an amino acid sequence referred to as region 4:

[1191] having 50%, 55%, 60%, 65%, 70%, 75%, 80%, 85%, 90%, 95%, 96%, 97%, 98%, or 99% homology with amino acids 817-900 (55% of residues in the four Cas9 sequences in FIGS. 2A-2G are conserved) of the amino acid sequence of Cas9 of S. pyogenes, S. thermophilus, S. mutans or L. innocua;

[1192] differs by at least 1, 2, or 5 amino acids but by no more than 35, 30, 25, 20 or 10 amino acids from amino acids 817-900 of the amino acid sequence of Cas9 of S. pyogenes, S. thermophilus, S. mutans or L. innocua; or

[1193] is identical to 817-900 of the amino acid sequence of Cas9 of S. pyogenes, S. thermophilus, S. mutans or L. innocua.

[1194] In an embodiment, a Cas9 molecule or Cas9 polypeptide, e.g., an eaCas9 molecule or eaCas9 polypeptide, comprises an amino acid sequence referred to as region 5:

[1195] having 50%, 55%, 60%, 65%, 70%, 75%, 80%, 85%, 90%, 95%, 96%, 97%, 98%, or 99% homology with amino acids 900-960 (60% of residues in the four Cas9 sequences in FIGS. 2A-2G are conserved) of the amino acid sequence of Cas9 of S. pyogenes, S. thermophilus, S. mutans or L. innocua;

[1196] differs by at least 1, 2, or 5 amino acids but by no more than 35, 30, 25, 20 or 10 amino acids from amino acids 900-960 of the amino acid sequence of Cas9 of S. pyogenes, S. thermophilus, S. mutans or L. innocua; or

[1197] is identical to 900-960 of the amino acid sequence of Cas9 of S. pyogenes, S. thermophilus, S. mutans or L. innocua.

[1198] Engineered or Altered Cas9 Molecules and Cas9 Polypeptides

[1199] Cas9 molecules and Cas9 polypeptides described herein, e.g., naturally occurring Cas9 molecules, can possess any of a number of properties, including: nickase activity, nuclease activity (e.g., endonuclease and/or exonuclease activity); helicase activity; the ability to associate functionally with a gRNA molecule; and the ability to target (or localize to) a site on a nucleic acid (e.g., PAM recognition and specificity). In an embodiment, a Cas9 molecule or Cas9 polypeptide can include all or a subset of these properties. In typical embodiments, a Cas9 molecule or Cas9 polypeptide has the ability to interact with a gRNA molecule and, in concert with the gRNA molecule, localize to a site in a nucleic acid. Other activities, e.g., PAM specificity, cleavage activity, or helicase activity can vary more widely in Cas9 molecules and Cas9 polypeptides.

[1200] Cas9 molecules include engineered Cas9 molecules and engineered Cas9 polypeptides (engineered, as used in this context, means merely that the Cas9 molecule or Cas9 polypeptide differs from a reference sequences, and implies no process or origin limitation). An engineered Cas9 molecule or Cas9 polypeptide can comprise altered enzymatic properties, e.g., altered nuclease activity, (as compared with a naturally occurring or other reference Cas9 molecule) or altered helicase activity. As discussed herein, an engineered Cas9 molecule or Cas9 polypeptide can have nickase activity (as opposed to double strand nuclease activity). In an embodiment an engineered Cas9 molecule or Cas9 polypeptide can have an alteration that alters its size, e.g., a deletion of amino acid sequence that reduces its size, e.g., without significant effect on one or more, or any Cas9 activity. In an embodiment, an engineered Cas9 molecule or Cas9 polypeptide can comprise an alteration that affects PAM recognition. E.g., an engineered Cas9 molecule can be altered to recognize a PAM sequence other than that recognized by the endogenous wild-type PI domain. In an embodiment a Cas9 molecule or Cas9 polypeptide can differ in sequence from a naturally occurring Cas9 molecule but not have significant alteration in one or more Cas9 activities.

[1201] Cas9 molecules or Cas9 polypeptides with desired properties can be made in a number of ways, e.g., by alteration of a parental, e.g., naturally occurring, Cas9 molecules or Cas9 polypeptides, to provide an altered Cas9 molecule or Cas9 polypeptide having a desired property. For example, one or more mutations or differences relative to a parental Cas9 molecule, e.g., a naturally occurring or engineered Cas9 molecule, can be introduced. Such mutations and differences comprise: substitutions (e.g., conservative substitutions or substitutions of non-essential amino acids); insertions; or deletions. In an embodiment, a Cas9 molecule or Cas9 polypeptide can comprises one or more mutations or differences, e.g., at least 1, 2, 3, 4, 5, 10, 15, 20, 30, 40 or 50 mutations but less than 200, 100, or 80 mutations relative to a reference, e.g., a parental, Cas9 molecule.

[1202] In an embodiment, a mutation or mutations do not have a substantial effect on a Cas9 activity, e.g. a Cas9 activity described herein. In an embodiment, a mutation or mutations have a substantial effect on a Cas9 activity, e.g. a Cas9 activity described herein.

[1203] Non-Cleaving and Modified-Cleavage Cas9 Molecules and Cas9 Polypeptides

[1204] In an embodiment, a Cas9 molecule or Cas9 polypeptide comprises a cleavage property that differs from naturally occurring Cas9 molecules, e.g., that differs from the naturally occurring Cas9 molecule having the closest homology. For example, a Cas9 molecule or Cas9 polypeptide can differ from naturally occurring Cas9 molecules, e.g., a Cas9 molecule of S. pyogenes, as follows: its ability to modulate, e.g., decreased or increased, cleavage of a double stranded nucleic acid (endonuclease and/or exonuclease activity), e.g., as compared to a naturally occurring Cas9 molecule (e.g., a Cas9 molecule of S. pyogenes); its ability to modulate, e.g., decreased or increased, cleavage of a single strand of a nucleic acid, e.g., a non-complementary strand of a nucleic acid molecule or a complementary strand of a nucleic acid molecule (nickase activity), e.g., as compared to a naturally occurring Cas9 molecule (e.g., a Cas9 molecule of S. pyogenes); or the ability to cleave a nucleic acid molecule, e.g., a double stranded or single stranded nucleic acid molecule, can be eliminated.

[1205] Modified Cleavage eaCas9 Molecules and eaCas9 Polypeptides

[1206] In an embodiment, an eaCas9 molecule or eaCas9 polypeptide comprises one or more of the following activities: cleavage activity associated with an N-terminal RuvC-like domain; cleavage activity associated with an HNH-like domain; cleavage activity associated with an HNH-like domain and cleavage activity associated with an N-terminal RuvC-like domain.

[1207] In an embodiment, an eaCas9 molecule or eaCas9 polypeptide comprises an active, or cleavage competent, HNH-like domain (e.g., an HNH-like domain described herein, e.g., SEQ ID NO: 17, SEQ ID NO:18, SEQ ID NO:19, SEQ ID NO:20, or SEQ ID NO:21) and an inactive, or cleavage incompetent, N-terminal RuvC-like domain. An exemplary inactive, or cleavage incompetent N-terminal RuvC-like domain can have a mutation of an aspartic acid in an N-terminal RuvC-like domain, e.g., an aspartic acid at position 9 of the consensus sequence disclosed in FIGS. 2A-2G or an aspartic acid at position 10 of SEQ ID NO:7, e.g., can be substituted with an alanine. In an embodiment, the eaCas9 molecule or eaCas9 polypeptide differs from wild type in the N-terminal RuvC-like domain and does not cleave the target nucleic acid, or cleaves with significantly less efficiency, e.g., less than 20, 10, 5, 1 or 0.1% of the cleavage activity of a reference Cas9 molecule, e.g., as measured by an assay described herein. The reference Cas9 molecule can by a naturally occurring unmodified Cas9 molecule, e.g., a naturally occurring Cas9 molecule such as a Cas9 molecule of S. pyogenes, or S. thermophilus. In an embodiment, the reference Cas9 molecule is the naturally occurring Cas9 molecule having the closest sequence identity or homology.

[1208] In an embodiment, an eaCas9 molecule or eaCas9 polypeptide comprises an inactive, or cleavage incompetent, HNH domain and an active, or cleavage competent, N-terminal RuvC-like domain (e.g., an N-terminal RuvC-like domain described herein, e.g., SEQ ID NO:8, SEQ ID NO:9, SEQ ID NO:10, SEQ ID NO:11, SEQ ID NO:12, SEQ ID NO:13, SEQ ID NO:14, SEQ ID NO:15, or SEQ ID NO:16). Exemplary inactive, or cleavage incompetent HNH-like domains can have a mutation at one or more of: a histidine in an HNH-like domain, e.g., a histidine shown at position 856 of FIGS. 2A-2G, e.g., can be substituted with an alanine; and one or more asparagines in an HNH-like domain, e.g., an asparagine shown at position 870 of FIGS. 2A-2G and/or at position 879 of FIGS. 2A-2G, e.g., can be substituted with an alanine. In an embodiment, the eaCas9 differs from wild type in the HNH-like domain and does not cleave the target nucleic acid, or cleaves with significantly less efficiency, e.g., less than 20, 10, 5, 1 or 0.1% of the cleavage activity of a reference Cas9 molecule, e.g., as measured by an assay described herein. The reference Cas9 molecule can by a naturally occurring unmodified Cas9 molecule, e.g., a naturally occurring Cas9 molecule such as a Cas9 molecule of S. pyogenes, or S. thermophilus. In an embodiment, the reference Cas9 molecule is the naturally occurring Cas9 molecule having the closest sequence identity or homology.

[1209] In an embodiment, an eaCas9 molecule or eaCas9 polypeptide comprises an inactive, or cleavage incompetent, HNH domain and an active, or cleavage competent, N-terminal RuvC-like domain (e.g., an N-terminal RuvC-like domain described herein, e.g., SEQ ID NO:8, SEQ ID NO:9, SEQ ID NO:10, SEQ ID NO:11, SEQ ID NO:12, SEQ ID NO:13, SEQ ID NO:14, SEQ ID NO:15, or SEQ ID NO:16). Exemplary inactive, or cleavage incompetent HNH-like domains can have a mutation at one or more of: a histidine in an HNH-like domain, e.g., a histidine shown at position 856 of FIGS. 2A-2G, e.g., can be substituted with an alanine; and one or more asparagines in an HNH-like domain, e.g., an asparagine shown at position 870 of FIGS. 2A-2G and/or at position 879 of FIGS. 2A-2G, e.g., can be substituted with an alanine. In an embodiment, the eaCas9 differs from wild type in the HNH-like domain and does not cleave the target nucleic acid, or cleaves with significantly less efficiency, e.g., less than 20, 10, 5, 1 or 0.1% of the cleavage activity of a reference Cas9 molecule, e.g., as measured by an assay described herein. The reference Cas9 molecule can by a naturally occurring unmodified Cas9 molecule, e.g., a naturally occurring Cas9 molecule such as a Cas9 molecule of S. pyogenes, or S. thermophilus. In an embodiment, the reference Cas9 molecule is the naturally occurring Cas9 molecule having the closest sequence identity or homology.

[1210] Alterations in the Ability to Cleave One or Both Strands of a Target Nucleic Acid

[1211] In an embodiment, exemplary Cas9 activities comprise one or more of PAM specificity, cleavage activity, and helicase activity. A mutation(s) can be present, e.g., in: one or more RuvC-like domain, e.g., an N-terminal RuvC-like domain; an HNH-like domain; a region outside the RuvC-like domains and the HNH-like domain. In some embodiments, a mutation(s) is present in a RuvC-like domain, e.g., an N-terminal RuvC-like. In some embodiments, a mutation(s) is present in an HNH-like domain. In some embodiments, mutations are present in both a RuvC-like domain, e.g., an N-terminal RuvC-like domain, and an HNH-like domain.

[1212] Exemplary mutations that may be made in the RuvC domain or HNH domain with reference to the S. pyogenes sequence include: D10A, E762A, H840A, N854A, N863A and/or D986A.

[1213] In an embodiment, a Cas9 molecule or Cas9 polypeptide is an eiCas9 molecule or eiCas9 polypeptide comprising one or more differences in a RuvC domain and/or in an HNH domain as compared to a reference Cas9 molecule, and the eiCas9 molecule or eiCas9 polypeptide does not cleave a nucleic acid, or cleaves with significantly less efficiency than does wildype, e.g., when compared with wild type in a cleavage assay, e.g., as described herein, cuts with less than 50, 25, 10, or 1% of a reference Cas9 molecule, as measured by an assay described herein.

[1214] Whether or not a particular sequence, e.g., a substitution, may affect one or more activity, such as targeting activity, cleavage activity, etc, can be evaluated or predicted, e.g., by evaluating whether the mutation is conservative or by the method described in Section IV. In an embodiment, a “non-essential” amino acid residue, as used in the context of a Cas9 molecule, is a residue that can be altered from the wild-type sequence of a Cas9 molecule, e.g., a naturally occurring Cas9 molecule, e.g., an eaCas9 molecule, without abolishing or more preferably, without substantially altering a Cas9 activity (e.g., cleavage activity), whereas changing an “essential” amino acid residue results in a substantial loss of activity (e.g., cleavage activity).

[1215] In an embodiment, a Cas9 molecule or Cas9 polypeptide comprises a cleavage property that differs from naturally occurring Cas9 molecules, e.g., that differs from the naturally occurring Cas9 molecule having the closest homology. For example, a Cas9 molecule or Cas9 polypeptide can differ from naturally occurring Cas9 molecules, e.g., a Cas9 molecule of S aureus, S. pyogenes, or C. jejuni as follows: its ability to modulate, e.g., decreased or increased, cleavage of a double stranded break (endonuclease and/or exonuclease activity), e.g., as compared to a naturally occurring Cas9 molecule (e.g., a Cas9 molecule of S aureus, S. pyogenes, or C. jejuni); its ability to modulate, e.g., decreased or increased, cleavage of a single strand of a nucleic acid, e.g., a non-complementary strand of a nucleic acid molecule or a complementary strand of a nucleic acid molecule (nickase activity), e.g., as compared to a naturally occurring Cas9 molecule (e.g., a Cas9 molecule of S aureus, S. pyogenes, or C. jejuni); or the ability to cleave a nucleic acid molecule, e.g., a double stranded or single stranded nucleic acid molecule, can be eliminated.

[1216] In an embodiment, the altered Cas9 molecule or Cas9 polypeptide is an eaCas9 molecule or eaCas9 polypeptide comprising one or more of the following activities: cleavage activity associated with a RuvC domain; cleavage activity associated with an HNH domain; cleavage activity associated with an HNH domain and cleavage activity associated with a RuvC domain.

[1217] In an embodiment, the altered Cas9 molecule or Cas9 polypeptide is an eiCas9 molecule or eaCas9 polypeptide which does not cleave a nucleic acid molecule (either double stranded or single stranded nucleic acid molecules) or cleaves a nucleic acid molecule with significantly less efficiency, e.g., less than 20, 10, 5, 1 or 0.1% of the cleavage activity of a reference Cas9 molecule, e.g., as measured by an assay described herein. The reference Cas9 molecule can be a naturally occurring unmodified Cas9 molecule, e.g., a naturally occurring Cas9 molecule such as a Cas9 molecule of S. pyogenes, S. thermophilus, S. aureus, C. jejuni or N. meningitidis. In an embodiment, the reference Cas9 molecule is the naturally occurring Cas9 molecule having the closest sequence identity or homology. In an embodiment, the eiCas9 molecule or eiCas9 polypeptide lacks substantial cleavage activity associated with a RuvC domain and cleavage activity associated with an HNH domain.

[1218] In an embodiment, the altered Cas9 molecule or Cas9 polypeptide is an eaCas9 molecule or eaCas9 polypeptide comprising the fixed amino acid residues of S. pyogenes shown in the consensus sequence disclosed in FIGS. 2A-2G, and has one or more amino acids that differ from the amino acid sequence of S. pyogenes (e.g., has a substitution) at one or more residue (e.g., 2, 3, 5, 10, 15, 20, 30, 50, 70, 80, 90, 100, 200 amino acid residues) represented by an “-” in the consensus sequence disclosed in FIGS. 2A-2G or SEQ ID NO:7.

[1219] In an embodiment, the altered Cas9 molecule or Cas9 polypeptide comprises a sequence in which:

[1220] the sequence corresponding to the fixed sequence of the consensus sequence disclosed in FIGS. 2A-2G differs at no more than 1, 2, 3, 4, 5, 10, 15, or 20% of the fixed residues in the consensus sequence disclosed in FIGS. 2A-2G;

[1221] the sequence corresponding to the residues identified by “*” in the consensus sequence disclosed in FIGS. 2A-2G differ at no more than 1, 2, 3, 4, 5, 10, 15, 20, 25, 30, 35, or 40% of the “*” residues from the corresponding sequence of naturally occurring Cas9 molecule, e.g., an S. pyogenes Cas9 molecule; and,

[1222] the sequence corresponding to the residues identified by “-” in the consensus sequence disclosed in FIGS. 2A-2G differ at no more than 5, 10, 15, 20, 25, 30, 35, 40, 45, 55, or 60% of the “-” residues from the corresponding sequence of naturally occurring Cas9 molecule, e.g., an S. pyogenes Cas9 molecule.

[1223] In an embodiment, the altered Cas9 molecule or Cas9 polypeptide is an eaCas9 molecule or eaCas9 polypeptide comprising the fixed amino acid residues of S. thermophilus shown in the consensus sequence disclosed in FIGS. 2A-2G, and has one or more amino acids that differ from the amino acid sequence of S. thermophilus (e.g., has a substitution) at one or more residue (e.g., 2, 3, 5, 10, 15, 20, 30, 50, 70, 80, 90, 100, 200 amino acid residues) represented by an “-” in the consensus sequence disclosed in FIGS. 2A-2G.

[1224] In an embodiment the altered Cas9 molecule or Cas9 polypeptide comprises a sequence in which:

[1225] the sequence corresponding to the fixed sequence of the consensus sequence disclosed in FIGS. 2A-2G differs at no more than 1, 2, 3, 4, 5, 10, 15, or 20% of the fixed residues in the consensus sequence disclosed in FIGS. 2A-2G;

[1226] the sequence corresponding to the residues identified by “*” in the consensus sequence disclosed in FIGS. 2A-2G differ at no more than 1, 2, 3, 4, 5, 10, 15, 20, 25, 30, 35, or 40% of the “*” residues from the corresponding sequence of naturally occurring Cas9 molecule, e.g., an S. thermophilus Cas9 molecule; and,

[1227] the sequence corresponding to the residues identified by “-” in the consensus sequence disclosed in FIGS. 2A-2G differ at no more than 5, 10, 15, 20, 25, 30, 35, 40, 45, 55, or 60% of the “-” residues from the corresponding sequence of naturally occurring Cas9 molecule, e.g., an S. thermophilus Cas9 molecule.

[1228] In an embodiment, the altered Cas9 molecule or Cas9 polypeptide is an eaCas9 molecule or eaCas9 polypeptide comprising the fixed amino acid residues of S. mutans shown in the consensus sequence disclosed in FIGS. 2A-2G, and has one or more amino acids that differ from the amino acid sequence of S. mutans (e.g., has a substitution) at one or more residue (e.g., 2, 3, 5, 10, 15, 20, 30, 50, 70, 80, 90, 100, 200 amino acid residues) represented by an “-” in the consensus sequence disclosed in FIGS. 2A-2G.

[1229] In an embodiment, the altered Cas9 molecule or Cas9 polypeptide comprises a sequence in which:

[1230] the sequence corresponding to the fixed sequence of the consensus sequence disclosed in FIGS. 2A-2G differs at no more than 1, 2, 3, 4, 5, 10, 15, or 20% of the fixed residues in the consensus sequence disclosed in FIGS. 2A-2G;

[1231] the sequence corresponding to the residues identified by “*” in the consensus sequence disclosed in FIGS. 2A-2G differ at no more than 1, 2, 3, 4, 5, 10, 15, 20, 25, 30, 35, or 40% of the “*” residues from the corresponding sequence of naturally occurring Cas9 molecule, e.g., an S. mutans Cas9 molecule; and,

[1232] the sequence corresponding to the residues identified by “-” in the consensus sequence disclosed in FIGS. 2A-2G differ at no more than 5, 10, 15, 20, 25, 30, 35, 40, 45, 55, or 60% of the “-” residues from the corresponding sequence of naturally occurring Cas9 molecule, e.g., an S. mutans Cas9 molecule.

[1233] In an embodiment, the altered Cas9 molecule or Cas9 polypeptide is an eaCas9 molecule or eaCas9 polypeptide comprising the fixed amino acid residues of L. innocula shown in the consensus sequence disclosed in FIGS. 2A-2G, and has one or more amino acids that differ from the amino acid sequence of L. innocula (e.g., has a substitution) at one or more residue (e.g., 2, 3, 5, 10, 15, 20, 30, 50, 70, 80, 90, 100, 200 amino acid residues) represented by an “-” in the consensus sequence disclosed in FIGS. 2A-2G.

[1234] In an embodiment, the altered Cas9 molecule or Cas9 polypeptide comprises a sequence in which:

[1235] the sequence corresponding to the fixed sequence of the consensus sequence disclosed in FIGS. 2A-2G differs at no more than 1, 2, 3, 4, 5, 10, 15, or 20% of the fixed residues in the consensus sequence disclosed in FIGS. 2A-2G;

[1236] the sequence corresponding to the residues identified by “*” in the consensus sequence disclosed in FIGS. 2A-2G differ at no more than 1, 2, 3, 4, 5, 10, 15, 20, 25, 30, 35, or 40% of the “*” residues from the corresponding sequence of naturally occurring Cas9 molecule, e.g., an L. innocula Cas9 molecule; and,

[1237] the sequence corresponding to the residues identified by “-” in the consensus sequence disclosed in FIGS. 2A-2G differ at no more than 5, 10, 15, 20, 25, 30, 35, 40, 45, 55, or 60% of the “-” residues from the corresponding sequence of naturally occurring Cas9 molecule, e.g., an L. innocula Cas9 molecule.

[1238] In an embodiment, the altered Cas9 molecule or Cas9 polypeptide, e.g., an eaCas9 molecule, can be a fusion, e.g., of two of more different Cas9 molecules or Cas9 polypeptides, e.g., of two or more naturally occurring Cas9 molecules of different species. For example, a fragment of a naturally occurring Cas9 molecule of one species can be fused to a fragment of a Cas9 molecule of a second species. As an example, a fragment of Cas9 molecule of S. pyogenes comprising an N-terminal RuvC-like domain can be fused to a fragment of Cas9 molecule of a species other than S. pyogenes (e.g., S. thermophilus) comprising an HNH-like domain.

[1239] Cas9 Molecules with Altered PAM Recognition or No PAM Recognition

[1240] Naturally occurring Cas9 molecules can recognize specific PAM sequences, for example the PAM recognition sequences described above for, e.g., S. pyogenes, S. thermophilus, S. mutans, S. aureus and N. meningitidis.

[1241] In an embodiment, a Cas9 molecule or Cas9 polypeptide has the same PAM specificities as a naturally occurring Cas9 molecule. In other embodiments, a Cas9 molecule or Cas9 polypeptide has a PAM specificity not associated with a naturally occurring Cas9 molecule, or a PAM specificity not associated with the naturally occurring Cas9 molecule to which it has the closest sequence homology. For example, a naturally occurring Cas9 molecule can be altered, e.g., to alter PAM recognition, e.g., to alter the PAM sequence that the Cas9 molecule or Cas9 polypeptide recognizes to decrease off target sites and/or improve specificity; or eliminate a PAM recognition requirement. In an embodiment, a Cas9 molecule can be altered, e.g., to increase length of PAM recognition sequence and/or improve Cas9 specificity to high level of identity, e.g., to decrease off target sites and increase specificity. In an embodiment, the length of the PAM recognition sequence is at least 4, 5, 6, 7, 8, 9, 10 or 15 amino acids in length.

[1242] Cas9 molecules or Cas9 polypeptides that recognize different PAM sequences and/or have reduced off-target activity can be generated using directed evolution. Exemplary methods and systems that can be used for directed evolution of Cas9 molecules are described, e.g., in Esvelt et al. Nature 2011, 472(7344): 499-503. Candidate Cas9 molecules can be evaluated, e.g., by methods described in Section IV.

[1243] Alterations of the PI domain, which mediates PAM recognition, are discussed below.

[1244] Synthetic Cas9 Molecules and Cas9 Polypeptides with Altered PI Domains

[1245] Current genome-editing methods are limited in the diversity of target sequences that can be targeted by the PAM sequence that is recognized by the Cas9 molecule utilized. A synthetic Cas9 molecule (or Syn-Cas9 molecule), or synthetic Cas9 polypeptide (or Syn-Cas9 polypeptide), as that term is used herein, refers to a Cas9 molecule or Cas9 polypeptide that comprises a Cas9 core domain from one bacterial species and a functional altered PI domain, i.e., a PI domain other than that naturally associated with the Cas9 core domain, e.g., from a different bacterial species.

[1246] In an embodiment, the altered PI domain recognizes a PAM sequence that is different from the PAM sequence recognized by the naturally-occurring Cas9 from which the Cas9 core domain is derived. In an embodiment, the altered PI domain recognizes the same PAM sequence recognized by the naturally-occurring Cas9 from which the Cas9 core domain is derived, but with different affinity or specificity. A Syn-Cas9 molecule or Syn-Cas9 polypeptide can be, respectively, a Syn-eaCas9 molecule or Syn-eaCas9 polypeptide or a Syn-eiCas9 molecule Syn-eiCas9 polypeptide.

[1247] An exemplary Syn-Cas9 molecule or Syn-Cas9 polypeptide comprises:

[1248] a) a Cas9 core domain, e.g., a Cas9 core domain from Table 100 or 200, e.g., a S. aureus, S. pyogenes, or C. jejuni Cas9 core domain; and

[1249] b) an altered PI domain from a species X Cas9 sequence selected from Tables 400 and 500.

[1250] In an embodiment, the RKR motif (the PAM binding motif) of said altered PI domain comprises: differences at 1, 2, or 3 amino acid residues; a difference in amino acid sequence at the first, second, or third position; differences in amino acid sequence at the first and second positions, the first and third positions, or the second and third positions; as compared with the sequence of the RKR motif of the native or endogenous PI domain associated with the Cas9 core domain.

[1251] In an embodiment, the Cas9 core domain comprises the Cas9 core domain from a species X Cas9 from Table 100 and said altered PI domain comprises a PI domain from a species Y Cas9 from Table 100.

[1252] In an embodiment, the RKR motif of the species X Cas9 is other than the RKR motif of the species Y Cas9.

[1253] In an embodiment, the RKR motif of the altered PI domain is selected from XXY, XNG, and XNQ.

[1254] In an embodiment, the altered PI domain has at least 60, 70, 80, 90, 95, or 100% homology with the amino acid sequence of a naturally occurring PI domain of said species Y from Table 100.

[1255] In an embodiment, the altered PI domain differs by no more than 50, 40, 30, 25, 20, 15, 10, 5, 4, 3, 2, or 1 amino acid residue from the amino acid sequence of a naturally occurring PI domain of said second species from Table 100.

[1256] In an embodiment, the Cas9 core domain comprises a S. aureus core domain and altered PI domain comprises: an A. denitrificans PI domain; a C. jejuni PI domain; a H. mustelae PI domain; or an altered PI domain of species X PI domain, wherein species X is selected from Table 500.

[1257] In an embodiment, the Cas9 core domain comprises a S. pyogenes core domain and the altered PI domain comprises: an A. denitrificans PI domain; a C. jejuni PI domain; a H. mustelae PI domain; or an altered PI domain of species X PI domain, wherein species X is selected from Table 500.

[1258] In an embodiment, the Cas9 core domain comprises a C. jejuni core domain and the altered PI domain comprises: an A. denitrificans PI domain; a H. mustelae PI domain; or an altered PI domain of species X PI domain, wherein species X is selected from Table 500.

[1259] In an embodiment, the Cas9 molecule or Cas9 polypeptide further comprises a linker disposed between said Cas9 core domain and said altered PI domain.

[1260] In an embodiment, the linker comprises: a linker described elsewhere herein disposed between the Cas9 core domain and the heterologous PI domain. Suitable linkers are further described in Section V.

[1261] Exemplary altered PI domains for use in Syn-Cas9 molecules are described in Tables 400 and 500. The sequences for the 83 Cas9 orthologs referenced in Tables 400 and 500 are provided in Table 100. Table 300 provides the Cas9 orthologs with known PAM sequences and the corresponding RKR motif.

[1262] In an embodiment, a Syn-Cas9 molecule or Syn-Cas9 polypeptide may also be size-optimized, e.g., the Syn-Cas9 molecule or Syn-Cas9 polypeptide comprises one or more deletions, and optionally one or more linkers disposed between the amino acid residues flanking the deletions. In an embodiment, a Syn-Cas9 molecule or Syn-Cas9 polypeptide comprises a REC deletion.

[1263] Size-Optimized Cas9 Molecules and Cas9 Polypeptides

[1264] Engineered Cas9 molecules and engineered Cas9 polypeptides described herein include a Cas9 molecule or Cas9 polypeptide comprising a deletion that reduces the size of the molecule while still retaining desired Cas9 properties, e.g., essentially native conformation, Cas9 nuclease activity, and/or target nucleic acid molecule recognition. Provided herein are Cas9 molecules or Cas9 polypeptides comprising one or more deletions and optionally one or more linkers, wherein a linker is disposed between the amino acid residues that flank the deletion. Methods for identifying suitable deletions in a reference Cas9 molecule, methods for generating Cas9 molecules with a deletion and a linker, and methods for using such Cas9 molecules will be apparent to one of ordinary skill in the art upon review of this document.

[1265] A Cas9 molecule, e.g., a S. aureus, S. pyogenes, or C. jejuni, Cas9 molecule, having a deletion is smaller, e.g., has reduced number of amino acids, than the corresponding naturally-occurring Cas9 molecule. The smaller size of the Cas9 molecules allows increased flexibility for delivery methods, and thereby increases utility for genome-editing. A Cas9 molecule or Cas9 polypeptide can comprise one or more deletions that do not substantially affect or decrease the activity of the resultant Cas9 molecules or Cas9 polypeptides described herein. Activities that are retained in the Cas9 molecules or Cas9 polypeptides comprising a deletion as described herein include one or more of the following:

[1266] a nickase activity, i.e., the ability to cleave a single strand, e.g., the non-complementary strand or the complementary strand, of a nucleic acid molecule; a double stranded nuclease activity, i.e., the ability to cleave both strands of a double stranded nucleic acid and create a double stranded break, which in an embodiment is the presence of two nickase activities;

[1267] an endonuclease activity;

[1268] an exonuclease activity;

[1269] a helicase activity, i.e., the ability to unwind the helical structure of a double stranded nucleic acid;

[1270] and recognition activity of a nucleic acid molecule, e.g., a target nucleic acid or a gRNA.

[1271] Activity of the Cas9 molecules or Cas9 polypeptides described herein can be assessed using the activity assays described herein or in the art.

[1272] Identifying Regions Suitable for Deletion

[1273] Suitable regions of Cas9 molecules for deletion can be identified by a variety of methods. Naturally-occurring orthologous Cas9 molecules from various bacterial species, e.g., any one of those listed in Table 100, can be modeled onto the crystal structure of S. pyogenes Cas9 (Nishimasu et al., Cell, 156:935-949, 2014) to examine the level of conservation across the selected Cas9 orthologs with respect to the three-dimensional conformation of the protein. Less conserved or unconserved regions that are spatially located distant from regions involved in Cas9 activity, e.g., interface with the target nucleic acid molecule and/or gRNA, represent regions or domains are candidates for deletion without substantially affecting or decreasing Cas9 activity.

[1274] REC-Optimized Cas9 Molecules and Cas9 Polypeptides

[1275] A REC-optimized Cas9 molecule, or a REC-optimized Cas9 polypeptide, as that term is used herein, refers to a Cas9 molecule or Cas9 polypeptide that comprises a deletion in one or both of the REC2 domain and the RE1_{CT} domain (collectively a REC deletion), wherein the deletion comprises at least 10% of the amino acid residues in the cognate domain. A REC-optimized Cas9 molecule or Cas9 polypeptide can be an eaCas9 molecule or eaCas9 polypeptide, or an eiCas9 molecule or eiCas9 polypeptide. An exemplary REC-optimized Cas9 molecule or REC-optimized Cas9 polypeptide comprises:

[1276] a) a deletion selected from:
[1277] i) a REC2 deletion;
[1278] ii) a REC1_{CT} deletion; or
[1279] iii) a REC1_{SUB} deletion.

[1280] Optionally, a linker is disposed between the amino acid residues that flank the deletion. In an embodiment a Cas9 molecule or Cas9 polypeptide includes only one deletion, or only two deletions. A Cas9 molecule or Cas9 polypeptide can comprise a REC2 deletion and a REC1_{CT} deletion. A Cas9 molecule or Cas9 polypeptide can comprise a REC2 deletion and a REC1 SUB deletion.

[1281] Generally, the deletion will contain at least 10% of the amino acids in the cognate domain, e.g., a REC2 deletion will include at least 10% of the amino acids in the REC2 domain. A deletion can comprise: at least 10, 20, 30, 40, 50, 60, 70, 80, or 90% of the amino acid residues of its cognate domain; all of the amino acid residues of its cognate domain; an amino acid residue outside its cognate domain; a plurality of amino acid residues outside its cognate domain; the amino acid residue immediately N terminal to its cognate domain; the amino acid residue immediately C terminal to its cognate domain; the amino acid residue immediately N terminal to its cognate and the amino acid residue immediately C terminal to its cognate domain; a plurality of, e.g., up to 5, 10, 15, or 20, amino acid residues N terminal to its cognate domain; a plurality of, e.g., up to 5, 10, 15, or 20, amino acid residues C terminal to its cognate domain; a plurality of, e.g., up to 5, 10, 15, or 20, amino acid residues N terminal to to its cognate domain and a plurality of e.g., up to 5, 10, 15, or 20, amino acid residues C terminal to its cognate domain.

[1282] In an embodiment, a deletion does not extend beyond: its cognate domain; the N terminal amino acid residue of its cognate domain; the C terminal amino acid residue of its cognate domain.

[1283] A REC-optimized Cas9 molecule or REC-optimized Cas9 polypeptide can include a linker disposed between the amino acid residues that flank the deletion. Suitable linkers for use between the amino acid resides that flank a REC deletion in a REC-optimized Cas9 molecule is disclosed in Section V.

[1284] In an embodiment, a REC-optimized Cas9 molecule or REC-optimized Cas9 polypeptide comprises an amino acid sequence that, other than any REC deletion and associated linker, has at least 50, 55, 60, 65, 70, 75, 80, 85, 90, 95, 99, or 100% homology with the amino acid sequence of a naturally occurring Cas 9, e.g., a Cas9 molecule described in Table 100, e.g., a S. aureus Cas9 molecule, a S. pyogenes Cas9 molecule, or a C. jejuni Cas9 molecule.

[1285] In an embodiment, a a REC-optimized Cas9 molecule or REC-optimized Cas9 polypeptide comprises an amino acid sequence that, other than any REC deletion and associated linker, differs by no more than 1, 2, 3, 4, 5, 6, 7, 8, 9, 10, 15, 20, or 25, amino acid residues from the amino acid sequence of a naturally occurring Cas 9, e.g., a Cas9 molecule described in Table 100, e.g., a S. aureus Cas9 molecule, a S. pyogenes Cas9 molecule, or a C. jejuni Cas9 molecule.

[1286] In an embodiment, a REC-optimized Cas9 molecule or REC-optimized Cas9 polypeptide comprises an amino acid sequence that, other than any REC deletion and associate linker, differs by no more than 1, 2, 3, 4, 5, 6, 7, 8, 9, 10, 15, 20, or 25% of the, amino acid residues from the amino acid sequence of a naturally occurring Cas 9, e.g., a Cas9 molecule described in Table 100, e.g., a S. aureus Cas9 molecule, a S. pyogenes Cas9 molecule, or a C. jejuni Cas9 molecule.

[1287] For sequence comparison, typically one sequence acts as a reference sequence, to which test sequences are compared. When using a sequence comparison algorithm, test and reference sequences are entered into a computer, subsequence coordinates are designated, if necessary, and sequence algorithm program parameters are designated. Default program parameters can be used, or alternative parameters can be designated. The sequence comparison algorithm then calculates the percent sequence identities for the test sequences relative to the reference sequence, based on the program parameters. Methods of alignment of sequences for comparison are well known in the art. Optimal alignment of sequences for comparison can be conducted, e.g., by the local homology algorithm of Smith and Waterman, (1970) Adv. Appl. Math. 2:482c, by the homology alignment algorithm of Needleman and Wunsch, (1970) J. Mol. Biol. 48:443, by the search for similarity method of Pearson and Lipman, (1988) Proc. Nat'l. Acad. Sci. USA 85:2444, by computerized implementations of these algorithms (GAP, BESTFIT, FASTA, and TFASTA in the Wisconsin Genetics Software Package, Genetics Computer Group, 575 Science Dr., Madison, Wis.), or by manual alignment and visual inspection (see, e.g., Brent et al., (2003) Current Protocols in Molecular Biology).

[1288] Two examples of algorithms that are suitable for determining percent sequence identity and sequence similarity are the BLAST and BLAST 2.0 algorithms, which are described in Altschul et al., (1977) Nuc. Acids Res. 25:3389-3402; and Altschul et al., (1990) J. Mol. Biol. 215:403-410, respectively. Software for performing BLAST analyses is publicly available through the National Center for Biotechnology Information.

[1289] The percent identity between two amino acid sequences can also be determined using the algorithm of E. Meyers and W. Miller, (1988) Comput. Appl. Biosci. 4:11-17) which has been incorporated into the ALIGN program (version 2.0), using a PAM120 weight residue table, a gap length penalty of 12 and a gap penalty of 4. In addition, the percent identity between two amino acid sequences can be determined using the Needleman and Wunsch (1970) J. Mol. Biol. 48:444-453) algorithm which has been incorporated into the GAP program in the GCG software package (available at www.gcg.com), using either a Blossom 62 matrix or a PAM250 matrix, and a gap weight of 16, 14, 12, 10, 8, 6, or 4 and a length weight of 1, 2, 3, 4, 5, or 6.

[1290] Sequence information for exemplary REC deletions are provided for 83 naturally-occurring Cas9 orthologs in Table 100. The amino acid sequences of exemplary Cas9 molecules from different bacterial species are shown below.

TABLE 100
Amino Acid Sequence of Cas9 Orthologs

| | | REC2 | | | REC1_{CT} | | | REC1_{SUB} | | |
|---|---|---|---|---|---|---|---|---|---|---|
| | Amino | start | stop | # AA | start | stop | # AA | start | stop | # AA |
| Species/ | acid | (AA | (AA | deleted | (AA | (AA | deleted | (AA | (AA | deleted |
| Composite ID | sequence | pos) | pos) | (n) | pos) | pos) | (n) | pos) | pos) | (n) |
| Staphylococcus | SEQ ID | 126 | 166 | 41 | 296 | 352 | 57 | 296 | 352 | 57 |
| Aureus | NO: 304 | | | | | | | | | |
| tr\|J7RUA5\|J7RUA5_{—} | | | | | | | | | | |
| STAAU | | | | | | | | | | |
| Streptococcus | SEQ ID | 176 | 314 | 139 | 511 | 592 | 82 | 511 | 592 | 82 |
| Pyogenes | NO: 305 | | | | | | | | | |
| sp\|Q99ZW2\|CAS9_{—} | | | | | | | | | | |
| STRP1 | | | | | | | | | | |
| Campylobacter | SEQ ID | 137 | 181 | 45 | 316 | 360 | 45 | 316 | 360 | 45 |
| jejuni NCTC | NO: 306 | | | | | | | | | |
| 11168 | | | | | | | | | | |
| gi\|218563121\|ref\| | | | | | | | | | | |
| YP_002344900.1 | | | | | | | | | | |
| Bacteroides | SEQ ID | 148 | 339 | 192 | 524 | 617 | 84 | 524 | 617 | 84 |
| fragilis NCTC | NO: 307 | | | | | | | | | |
| 9343 | | | | | | | | | | |
| gi\|60683389\|ref\|YP_{—} | | | | | | | | | | |
| 213533.1\| | | | | | | | | | | |
| Bifidobacterium | SEQ ID | 173 | 335 | 163 | 516 | 607 | 87 | 516 | 607 | 87 |
| bifidum | NO: 308 | | | | | | | | | |
| S17 | | | | | | | | | | |
| gi\|310286728\|ref\| | | | | | | | | | | |
| YP_003937986. | | | | | | | | | | |
| Veillonella atypica | SEQ ID | 185 | 339 | 155 | 574 | 663 | 79 | 574 | 663 | 79 |
| ACS-134-V-Col7a | NO: 309 | | | | | | | | | |
| gi\|303229466\|ref\|ZP_{—} | | | | | | | | | | |
| 07316256.1 | | | | | | | | | | |
| Lactobacillus | SEQ ID | 169 | 320 | 152 | 559 | 645 | 78 | 559 | 645 | 78 |
| rhamnosus GG | NO: 310 | | | | | | | | | |
| gi\|258509199\|ref\| | | | | | | | | | | |
| YP_003171950.1 | | | | | | | | | | |
| Filifactor alocis | SEQ ID | 166 | 314 | 149 | 508 | 592 | 76 | 508 | 592 | 76 |
| ATCC 35896 | NO: 311 | | | | | | | | | |
| gi\|374307738\|ref\| | | | | | | | | | | |
| YP_005054169.1 | | | | | | | | | | |
| Oenococcus | SEQ ID | 169 | 317 | 149 | 555 | 639 | 80 | 555 | 639 | 80 |
| kitaharae DSM | NO: 312 | | | | | | | | | |
| 17330 | | | | | | | | | | |
| gi\|366983953\|gb\| | | | | | | | | | | |
| EHN59352.1\| | | | | | | | | | | |
| Fructobacillus | SEQ ID | 168 | 314 | 147 | 488 | 571 | 76 | 488 | 571 | 76 |
| fructosus KCTC | NO: 313 | | | | | | | | | |
| 3544 | | | | | | | | | | |
| gi\|339625081\|ref\|ZP_{—} | | | | | | | | | | |
| 08660870.1 | | | | | | | | | | |
| Catenibacterium | SEQ ID | 173 | 318 | 146 | 511 | 594 | 78 | 511 | 594 | 78 |
| mitsuokai DSM | NO: 314 | | | | | | | | | |
| 15897 | | | | | | | | | | |
| gi\|224543312\|ref\|ZP_{—} | | | | | | | | | | |
| 03683851.1 | | | | | | | | | | |
| Finegoldia magna | SEQ ID | 168 | 313 | 146 | 452 | 534 | 77 | 452 | 534 | 77 |
| ATCC 29328 | NO: 315 | | | | | | | | | |
| gi\|169823755\|ref\| | | | | | | | | | | |
| YP_001691366.1 | | | | | | | | | | |
| Coriobacterium | SEQ ID | 175 | 318 | 144 | 511 | 592 | 82 | 511 | 592 | 82 |
| glomerans PW2 | NO: 316 | | | | | | | | | |
| gi\|328956315\|ref\| | | | | | | | | | | |
| YP_004373648.1 | | | | | | | | | | |
| Eubacterium yurii | SEQ ID | 169 | 310 | 142 | 552 | 633 | 76 | 552 | 633 | 76 |
| ATCC 43715 | NO: 317 | | | | | | | | | |
| gi\|306821691\|ref\|ZP_{—} | | | | | | | | | | |
| 07455288.1 | | | | | | | | | | |
| Peptoniphilus | SEQ ID | 171 | 311 | 141 | 535 | 615 | 76 | 535 | 615 | 76 |
| duerdenii ATCC | NO: 318 | | | | | | | | | |
| BAA-1640 | | | | | | | | | | |
| gi\|304438954\|ref\|ZP_{—} | | | | | | | | | | |
| 07398877.1 | | | | | | | | | | |
| Acidaminococcus | SEQ ID | 167 | 306 | 140 | 511 | 591 | 75 | 511 | 591 | 75 |
| sp. D21 | NO: 319 | | | | | | | | | |
| gi\|227824983\|ref\|ZP_{—} | | | | | | | | | | |
| 03989815.1 | | | | | | | | | | |
| Lactobacillus | SEQ ID | 171 | 310 | 140 | 542 | 621 | 85 | 542 | 621 | 85 |
| farciminis KCTC | NO: 320 | | | | | | | | | |
| 3681 | | | | | | | | | | |
| gi\|336394882\|ref\|ZP_{—} | | | | | | | | | | |
| 08576281.1 | | | | | | | | | | |
| Streptococcus | SEQ ID | 185 | 324 | 140 | 411 | 490 | 85 | 411 | 490 | 85 |
| sanguinis SK49 | NO: 321 | | | | | | | | | |
| gi\|422884106\|ref\|ZP_{—} | | | | | | | | | | |
| 16930555.1 | | | | | | | | | | |
| Coprococcus catus | SEQ ID | 172 | 310 | 139 | 556 | 634 | 76 | 556 | 634 | 76 |
| GD-7 | NO: 322 | | | | | | | | | |
| gi\|291520705\|emb\| | | | | | | | | | | |
| CBK78998.1\| | | | | | | | | | | |
| Streptococcus | SEQ ID | 176 | 314 | 139 | 392 | 470 | 84 | 392 | 470 | 84 |
| mutans UA159 | NO: 323 | | | | | | | | | |
| gi\|24379809\|ref\|NP_{—} | | | | | | | | | | |
| 721764.1\| | | | | | | | | | | |
| Streptococcus | SEQ ID | 176 | 314 | 139 | 523 | 600 | 82 | 523 | 600 | 82 |
| pyogenes M1 GAS | NO: 324 | | | | | | | | | |
| gi\|13622193\|gb\| | | | | | | | | | | |
| AAK33936.1\| | | | | | | | | | | |
| Streptococcus | SEQ ID | 176 | 314 | 139 | 481 | 558 | 81 | 481 | 558 | 81 |
| thermophilus | NO: 325 | | | | | | | | | |
| LMD-9 | | | | | | | | | | |
| gi\|116628213\|ref\| | | | | | | | | | | |
| YP_820832.1\| | | | | | | | | | | |
| Fusobacterium | SEQ ID | 171 | 308 | 138 | 537 | 614 | 76 | 537 | 614 | 76 |
| nucleatum | NO: 326 | | | | | | | | | |
| ATCC49256 | | | | | | | | | | |
| gi\|34762592\|ref\|ZP_{—} | | | | | | | | | | |
| 00143587.1\| | | | | | | | | | | |
| Planococcus | SEQ ID | 162 | 299 | 138 | 538 | 614 | 94 | 538 | 614 | 94 |
| antarcticus DSM | NO: 327 | | | | | | | | | |
| 14505 | | | | | | | | | | |
| gi\|389815359\|ref\|ZP_{—} | | | | | | | | | | |
| 10206685.1 | | | | | | | | | | |
| Treponema | SEQ ID | 169 | 305 | 137 | 524 | 600 | 81 | 524 | 600 | 81 |
| denticola ATCC | NO: 328 | | | | | | | | | |
| 35405 | | | | | | | | | | |
| gi\|42525843\|ref\|NP_{—} | | | | | | | | | | |
| 970941.1\| | | | | | | | | | | |
| Solobacterium | SEQ ID | 179 | 314 | 136 | 544 | 619 | 77 | 544 | 619 | 77 |
| moorei F0204 | NO: 329 | | | | | | | | | |
| gi\|320528778\|ref\|ZP_{—} | | | | | | | | | | |
| 08029929.1 | | | | | | | | | | |
| Staphylococcus | SEQ ID | 164 | 299 | 136 | 531 | 606 | 92 | 531 | 606 | 92 |
| pseudintermedius | NO: 330 | | | | | | | | | |
| ED99 | | | | | | | | | | |
| gi\|323463801\|gb\| | | | | | | | | | | |
| ADX75954.1\| | | | | | | | | | | |
| Flavobacterium | SEQ ID | 162 | 286 | 125 | 538 | 613 | 63 | 538 | 613 | 63 |
| branchiophilum | NO: 331 | | | | | | | | | |
| FL-15 | | | | | | | | | | |
| gi\|347536497\|ref\| | | | | | | | | | | |
| YP_004843922.1 | | | | | | | | | | |
| Ignavibacterium | SEQ ID | 223 | 329 | 107 | 357 | 432 | 90 | 357 | 432 | 90 |
| album JCM 16511 | NO: 332 | | | | | | | | | |
| gi\|385811609\|ref\| | | | | | | | | | | |
| YP_005848005.1 | | | | | | | | | | |
| Bergeyella | SEQ ID | 165 | 261 | 97 | 529 | 604 | 56 | 529 | 604 | 56 |
| zoohelcum ATCC | NO: 333 | | | | | | | | | |
| 43767 | | | | | | | | | | |
| gi\|423317190\|ref\|ZP_{—} | | | | | | | | | | |
| 17295095.1 | | | | | | | | | | |
| Nitrobacter | SEQ ID | 169 | 253 | 85 | 536 | 611 | 48 | 536 | 611 | 48 |
| hamburgensis X14 | NO: 334 | | | | | | | | | |
| gi\|92109262\|ref\|YP_{—} | | | | | | | | | | |
| 571550.1\| | | | | | | | | | | |
| Odoribacter laneus | SEQ ID | 164 | 242 | 79 | 535 | 610 | 63 | 535 | 610 | 63 |
| YIT 12061 | NO: 335 | | | | | | | | | |
| gi\|374384763\|ref\|ZP_{—} | | | | | | | | | | |
| 09642280.1 | | | | | | | | | | |
| Legionella | SEQ ID | 164 | 239 | 76 | 402 | 476 | 67 | 402 | 476 | 67 |
| pneumophila str. | NO: 336 | | | | | | | | | |
| Paris | | | | | | | | | | |
| gi\|54296138\|ref\|YP_{—} | | | | | | | | | | |
| 122507.1\| | | | | | | | | | | |
| Bacteroides sp. 203 | SEQ ID | 198 | 269 | 72 | 530 | 604 | 83 | 530 | 604 | 83 |
| gi\|301311869\|ref\|ZP_{—} | NO: 337 | | | | | | | | | |
| 07217791.1 | | | | | | | | | | |
| Akkermansia | SEQ ID | 136 | 202 | 67 | 348 | 418 | 62 | 348 | 418 | 62 |
| muciniphila | NO: 338 | | | | | | | | | |
| ATCC BAA-835 | | | | | | | | | | |
| gi\|187736489\|ref\| | | | | | | | | | | |
| YP_001878601. | | | | | | | | | | |
| Prevotella sp. | SEQ ID | 184 | 250 | 67 | 357 | 425 | 78 | 357 | 425 | 78 |
| C561 | NO: 339 | | | | | | | | | |
| gi\|345885718\|ref\|ZP_{—} | | | | | | | | | | |
| 08837074.1 | | | | | | | | | | |
| Wolinella | SEQ ID | 157 | 218 | 36 | 401 | 468 | 60 | 401 | 468 | 60 |
| succinogenes | NO: 340 | | | | | | | | | |
| DSM 1740 | | | | | | | | | | |
| gi\|34557932\|ref\|NP_{—} | | | | | | | | | | |
| 907747.1\| | | | | | | | | | | |
| Alicyclobacillus | SEQ ID | 142 | 196 | 55 | 416 | 482 | 61 | 416 | 482 | 61 |
| hesperidum | NO: 341 | | | | | | | | | |
| URH17-3-68 | | | | | | | | | | |
| gi\|403744858\|ref\|ZP_{—} | | | | | | | | | | |
| 10953934.1 | | | | | | | | | | |
| Caenispirillum | SEQ ID | 161 | 214 | 54 | 330 | 393 | 68 | 330 | 393 | 68 |
| salinarum AK4 | NO: 342 | | | | | | | | | |
| gi\|427429481\|ref\|ZP_{—} | | | | | | | | | | |
| 18919511.1 | | | | | | | | | | |
| Eubacterium | SEQ ID | 133 | 185 | 53 | 322 | 384 | 60 | 322 | 384 | 60 |
| rectale ATCC | NO: 343 | | | | | | | | | |
| 33656 | | | | | | | | | | |
| gi\|238924075\|ref\| | | | | | | | | | | |
| YP_002937591.1 | | | | | | | | | | |
| Mycoplasma | SEQ ID | 187 | 239 | 53 | 319 | 381 | 80 | 319 | 381 | 80 |
| synoviae 53 | NO: 344 | | | | | | | | | |
| gi\|71894592\|ref\|YP_{—} | | | | | | | | | | |
| 278700.1\| | | | | | | | | | | |
| Porphyromonas | SEQ ID | 150 | 202 | 53 | 309 | 371 | 60 | 309 | 371 | 60 |
| sp. oral taxon 279 | NO: 345 | | | | | | | | | |
| str. F0450 | | | | | | | | | | |
| gi\|402847315\|ref\|ZP_{—} | | | | | | | | | | |
| 10895610.1 | | | | | | | | | | |
| Streptococcus | SEQ ID | 127 | 178 | 139 | 424 | 486 | 81 | 424 | 486 | 81 |
| thermophilus | NO: 346 | | | | | | | | | |
| LMD-9 | | | | | | | | | | |
| gi\|116627542\|ref\| | | | | | | | | | | |
| YP_820161.1\| | | | | | | | | | | |
| Roseburia | SEQ ID | 154 | 204 | 51 | 318 | 380 | 69 | 318 | 380 | 69 |
| inulinivorans | NO: 347 | | | | | | | | | |
| DSM 16841 | | | | | | | | | | |
| gi\|225377804\|ref\|ZP_{—} | | | | | | | | | | |
| 03755025.1 | | | | | | | | | | |
| Methylosinus | SEQ ID | 144 | 193 | 50 | 426 | 488 | 64 | 426 | 488 | 64 |
| trichosporium | NO: 348 | | | | | | | | | |
| OB3b | | | | | | | | | | |
| gi\|296446027\|ref\|ZP_{—} | | | | | | | | | | |
| 06887976.1 | | | | | | | | | | |
| Ruminococcus | SEQ ID | 139 | 187 | 49 | 351 | 412 | 55 | 351 | 412 | 55 |
| albus 8 | NO: 349 | | | | | | | | | |
| gi\|325677756\|ref\|ZP_{—} | | | | | | | | | | |
| 08157403.1 | | | | | | | | | | |
| Bifidobacterium | SEQ ID | 183 | 230 | 48 | 370 | 431 | 44 | 370 | 431 | 44 |
| longum DJO10A | NO: 350 | | | | | | | | | |
| gi\|189440764\|ref\| | | | | | | | | | | |
| YP_001955845. | | | | | | | | | | |
| Enterococcus | SEQ ID | 123 | 170 | 48 | 327 | 387 | 60 | 327 | 387 | 60 |
| faecalis TX0012 | NO: 351 | | | | | | | | | |
| gi\|315149830\|gb\| | | | | | | | | | | |
| EFT93846.1 | | | | | | | | | | |
| Mycoplasma | SEQ ID | 179 | 226 | 48 | 314 | 374 | 79 | 314 | 374 | 79 |
| mobile 163K | NO: 352 | | | | | | | | | |
| gi\|47458868\|ref\| | | | | | | | | | | |
| YP_015730.1\| | | | | | | | | | | |
| Actinomyces | SEQ ID | 147 | 193 | 47 | 358 | 418 | 40 | 358 | 418 | 40 |
| coleocanis DSM | NO: 353 | | | | | | | | | |
| 15436 | | | | | | | | | | |
| gi\|227494853\|ref\| | | | | | | | | | | |
| ZP_03925169.1 | | | | | | | | | | |
| Dinoroseobacter | SEQ ID | 138 | 184 | 47 | 338 | 398 | 48 | 338 | 398 | 48 |
| shibae DFL 12 | NO: 354 | | | | | | | | | |
| gi\|159042956\|ref\| | | | | | | | | | | |
| YP_001531750.1 | | | | | | | | | | |
| Actinomyces sp. | SEQ ID | 183 | 228 | 46 | 349 | 409 | 40 | 349 | 409 | 40 |
| oral taxon 180 str. | NO: 355 | | | | | | | | | |
| F0310 | | | | | | | | | | |
| gi\|315605738\|ref\| | | | | | | | | | | |
| ZP_07880770.1 | | | | | | | | | | |
| Alcanivorax sp. | SEQ ID | 139 | 183 | 45 | 344 | 404 | 61 | 344 | 404 | 61 |
| W11-5 | NO: 356 | | | | | | | | | |
| gi\|407803669\|ref\| | | | | | | | | | | |
| ZP_11150502.1 | | | | | | | | | | |
| Aminomonas | SEQ ID | 134 | 178 | 45 | 341 | 401 | 63 | 341 | 401 | 63 |
| paucivorans DSM | NO: 357 | | | | | | | | | |
| 12260 | | | | | | | | | | |
| gi\|312879015\|ref\| | | | | | | | | | | |
| ZP_07738815.1 | | | | | | | | | | |
| Mycoplasma canis | SEQ ID | 139 | 183 | 45 | 319 | 379 | 76 | 319 | 379 | 76 |
| PG 14 | NO: 358 | | | | | | | | | |
| gi\|384393286\|gb\| | | | | | | | | | | |
| EIE39736.1\| | | | | | | | | | | |
| Lactobacillus | SEQ ID | 141 | 184 | 44 | 328 | 387 | 61 | 328 | 387 | 61 |
| coryniformis | NO: 359 | | | | | | | | | |
| KCTC 3535 | | | | | | | | | | |
| gi\|336393381\|ref\| | | | | | | | | | | |
| ZP_08574780.1 | | | | | | | | | | |
| Elusimicrobium | SEQ ID | 177 | 219 | 43 | 322 | 381 | 47 | 322 | 381 | 47 |
| minutum Pei191 | NO: 360 | | | | | | | | | |
| gi\|187250660\|ref\| | | | | | | | | | | |
| YP_001875142.1 | | | | | | | | | | |
| Neisseria | SEQ ID | 147 | 189 | 43 | 360 | 419 | 61 | 360 | 419 | 61 |
| meningitidis | NO: 361 | | | | | | | | | |
| Z2491 | | | | | | | | | | |
| gi\|218767588\|ref\| | | | | | | | | | | |
| YP_002342100.1 | | | | | | | | | | |
| Pasteurella | SEQ ID | 139 | 181 | 43 | 319 | 378 | 61 | 319 | 378 | 61 |
| multocida str. | NO: 362 | | | | | | | | | |
| Pm70 | | | | | | | | | | |
| gi\|15602992\|ref\| | | | | | | | | | | |
| NP_246064.1\| | | | | | | | | | | |
| Rhodovulum sp. | SEQ ID | 141 | 183 | 43 | 319 | 378 | 48 | 319 | 378 | 48 |
| PH10 | NO: 363 | | | | | | | | | |
| gi\|402849997\|ref\| | | | | | | | | | | |
| ZP_10898214.1 | | | | | | | | | | |
| Eubacterium | SEQ ID | 131 | 172 | 42 | 303 | 361 | 59 | 303 | 361 | 59 |
| dolichum DSM | NO: 364 | | | | | | | | | |
| 3991 | | | | | | | | | | |
| gi\|160915782\|ref\| | | | | | | | | | | |
| ZP_02077990.1 | | | | | | | | | | |
| Nitratifractor | SEQ ID | 143 | 184 | 42 | 347 | 404 | 61 | 347 | 404 | 61 |
| salsuginis DSM | NO: 365 | | | | | | | | | |
| 16511 | | | | | | | | | | |
| gi\|319957206\|ref\| | | | | | | | | | | |
| YP_004168469.1 | | | | | | | | | | |
| Rhodospirillum | SEQ ID | 139 | 180 | 42 | 314 | 371 | 55 | 314 | 371 | 55 |
| rubrum ATCC | NO: 366 | | | | | | | | | |
| 11170 | | | | | | | | | | |
| gi\|83591793\|ref\| | | | | | | | | | | |
| YP_425545.1\| | | | | | | | | | | |
| Clostridium | SEQ ID | 137 | 176 | 40 | 320 | 376 | 61 | 320 | 376 | 61 |
| cellulolyticum | NO: 367 | | | | | | | | | |
| H10 | | | | | | | | | | |
| gi\|220930482\|ref\| | | | | | | | | | | |
| YP_002507391.1 | | | | | | | | | | |
| Helicobacter | SEQ ID | 148 | 187 | 40 | 298 | 354 | 48 | 298 | 354 | 48 |
| mustelae 12198 | NO: 368 | | | | | | | | | |
| gi\|291276265\|ref\| | | | | | | | | | | |
| YP_003516037.1 | | | | | | | | | | |
| Ilyobacter | SEQ ID | 134 | 173 | 40 | 462 | 517 | 63 | 462 | 517 | 63 |
| polytropus DSM | NO: 369 | | | | | | | | | |
| 2926 | | | | | | | | | | |
| gi\|310780384\|ref\| | | | | | | | | | | |
| YP_003968716.1 | | | | | | | | | | |
| Sphaerochaeta | SEQ ID | 163 | 202 | 40 | 335 | 389 | 45 | 335 | 389 | 45 |
| globus str. Buddy | NO: 370 | | | | | | | | | |
| gi\|325972003\|ref\| | | | | | | | | | | |
| YP_004248194.1 | | | | | | | | | | |
| Staphylococcus | SEQ ID | 128 | 167 | 40 | 337 | 391 | 57 | 337 | 391 | 57 |
| lugdunensis | NO: 371 | | | | | | | | | |
| M23590 | | | | | | | | | | |
| gi\|315659848\|ref\| | | | | | | | | | | |
| ZP_07912707.1 | | | | | | | | | | |
| Treponema sp. | SEQ ID | 144 | 183 | 40 | 328 | 382 | 63 | 328 | 382 | 63 |
| JC4 | NO: 372 | | | | | | | | | |
| gi\|384109266\|ref\| | | | | | | | | | | |
| ZP_10010146.1 | | | | | | | | | | |
| uncultured delta | SEQ ID | 154 | 193 | 40 | 313 | 365 | 55 | 313 | 365 | 55 |
| proteobacterium | NO: 373 | | | | | | | | | |
| HF0070 07E19 | | | | | | | | | | |
| gi\|297182908\|gb\| | | | | | | | | | | |
| ADI19058.1\| | | | | | | | | | | |
| Alicycliphilus | SEQ ID | 140 | 178 | 39 | 317 | 366 | 48 | 317 | 366 | 48 |
| denitrificans K601 | NO: 374 | | | | | | | | | |
| gi\|330822845\|ref\| | | | | | | | | | | |
| YP_004386148.1 | | | | | | | | | | |
| Azospirillum sp. | SEQ ID | 205 | 243 | 39 | 342 | 389 | 46 | 342 | 389 | 46 |
| B510 | NO: 375 | | | | | | | | | |
| gi\|288957741\|ref\| | | | | | | | | | | |
| YP_003448082.1 | | | | | | | | | | |
| Bradyrhizobium | SEQ ID | 143 | 181 | 39 | 323 | 370 | 48 | 323 | 370 | 48 |
| sp. BTAi1 | NO: 376 | | | | | | | | | |
| gi\|148255343\|ref\| | | | | | | | | | | |
| YP_001239928.1 | | | | | | | | | | |
| Parvibaculum | SEQ ID | 138 | 176 | 39 | 327 | 374 | 58 | 327 | 374 | 58 |
| lavamentivorans | NO: 377 | | | | | | | | | |
| DS-1 | | | | | | | | | | |
| gi\|154250555\|ref\| | | | | | | | | | | |
| YP_001411379.1 | | | | | | | | | | |
| Prevotella | SEQ ID | 170 | 208 | 39 | 328 | 375 | 61 | 328 | 375 | 61 |
| timonensis CRIS | NO: 378 | | | | | | | | | |
| 5C-B1 | | | | | | | | | | |
| gi\|282880052\|ref\| | | | | | | | | | | |
| ZP_06288774.1 | | | | | | | | | | |
| Bacillus smithii 7 | SEQ ID | 134 | 171 | 38 | 401 | 448 | 63 | 401 | 448 | 63 |
| 347FAA | NO: 379 | | | | | | | | | |
| gi\|365156657\|ref\| | | | | | | | | | | |
| ZP_09352959.1 | | | | | | | | | | |
| Cand. | SEQ ID | 135 | 172 | 38 | 344 | 391 | 53 | 344 | 391 | 53 |
| Puniceispirillum | NO: 380 | | | | | | | | | |
| marinum | | | | | | | | | | |
| IMCC1322 | | | | | | | | | | |
| gi\|294086111ref\| | | | | | | | | | | |
| YP_003552871.1 | | | | | | | | | | |
| Barnesiella | SEQ ID | 140 | 176 | 37 | 371 | 417 | 60 | 371 | 417 | 60 |
| intestinihominis | NO: 381 | | | | | | | | | |
| YIT 11860 | | | | | | | | | | |
| gi\|404487228\|ref\| | | | | | | | | | | |
| ZP_11022414.1 | | | | | | | | | | |
| Ralstonia syzygii | SEQ ID | 140 | 176 | 37 | 395 | 440 | 50 | 395 | 440 | 50 |
| R24 | NO: 382 | | | | | | | | | |
| gi\|344171927\|emb\| | | | | | | | | | | |
| CCA84553.1\| | | | | | | | | | | |
| Wolinella | SEQ ID | 145 | 180 | 36 | 348 | 392 | 60 | 348 | 392 | 60 |
| succinogenes | NO: 383 | | | | | | | | | |
| DSM 1740 | | | | | | | | | | |
| gi\|34557790\|ref\| | | | | | | | | | | |
| NP_907605.1\| | | | | | | | | | | |
| Mycoplasma | SEQ ID | 144 | 177 | 34 | 373 | 416 | 71 | 373 | 416 | 71 |
| gallisepticum str. F | NO: 384 | | | | | | | | | |
| gi\|284931710\|gb\| | | | | | | | | | | |
| ADC31648.1\| | | | | | | | | | | |
| Acidothermus | SEQ ID | 150 | 182 | 33 | 341 | 380 | 58 | 341 | 380 | 58 |
| cellulolyticus 11B | NO: 385 | | | | | | | | | |
| gi\|117929158\|ref\| | | | | | | | | | | |
| YP_873709.1\| | | | | | | | | | | |
| Mycoplasma | SEQ ID | 156 | 184 | 29 | 381 | 420 | 62 | 381 | 420 | 62 |
| ovipneumoniae | NO: 386 | | | | | | | | | |
| SC01 | | | | | | | | | | |
| gi\|363542550\|ref\| | | | | | | | | | | |
| ZP_09312133.1 | | | | | | | | | | |

[1291] Table 100. Amino Acid Sequence of Cas9 Orthologs

TABLE 200
Amino Acid Sequence of Cas9 Core Domains

| | |
|---|---|
| Cas9 Start | Cas9 Stop |
| (AA pos) | (AA pos) |

| | |
|---|---|
| | Start and Stop numbers refer to |
| Strain Name | the sequence in Table 100 |

| | | |
|---|---|---|
| Staphylococcus Aureus | 1 | 772 |
| Streptococcus Pyogenes | 1 | 1099 |
| Campulobacter Jejuni | 1 | 741 |

TABLE 300
Identified PAM sequences and corresponding RKR motifs.

| | PAM sequence | RKR motif |
|---|---|---|
| Strain Name | (NA) | (AA) |
| Streptococcus pyogenes | NGG | RKR |
| Streptococcus mutans | NGG | RKR |
| Streptococcus thermophilus A | NGGNG | RYR |
| Treponema denticola | NAAAAN | VAK |
| Streptococcus thermophilus B | NNAAAAW | IYK |
| Campylobacter jejuni | NNNNACA | NLK |
| Pasteurella multocida | GNNNCNNA | KDG |
| Neisseria meningitidis | NNNNGATT or NNGRRT | IGK |
| | (R = A or G) | |
| Staphylococcus aureus | NNGRRV | NDK |
| | (R = A or G; | |
| | V = A. G or C) or | |
| | NNGRRT (R = A or G) | |

PI domains are provided in Tables 400 and 500.

TABLE 400
Altered PI Domains

| | PI Start | PI Stop | | |
|---|---|---|---|---|
| | (AA pos) | (AA pos) | | |
| | Start and Stop | | | |
| | numbers refer to | | Length | RKR |
| | the sequences in | | of PI | motif |
| Strain Name | Table 100 | | (AA) | (AA) |
| Alicycliphilus | 837 | 1029 | 193 | --Y |
| denitrificans K601 | | | | |
| Campylobacter jejuni | 741 | 984 | 244 | -NG |
| NCTC 11168 | | | | |
| Helicobacter mustelae 12198 | 771 | 1024 | 254 | -NQ |

TABLE 500
Other Altered PI Domains

| | PI Start | PI Stop | | |
|---|---|---|---|---|
| | (AA pos) | (AA pos) | | |
| | Start and Stop | | | |
| | numbers refer to | | Length | RKR |
| | the sequences in | | of PI | motif |
| Strain Name | Table 100 | | (AA) | (AA) |
| Akkermansia muciniphila ATCC BAA-835 | 871 | 1101 | 231 | ALK |
| Ralstonia syzygii R24 | 821 | 1062 | 242 | APY |
| Cand. Puniceispirillum marinum IMCC1322 | 815 | 1035 | 221 | AYK |
| Fructobacillus fructosus KCTC 3544 | 1074 | 1323 | 250 | DGN |
| Eubacterium yurii ATCC 43715 | 1107 | 1391 | 285 | DGY |
| Eubacterium dolichum DSM 3991 | 779 | 1096 | 318 | DKK |
| Dinoroseobacter shibae DFL 12 | 851 | 1079 | 229 | DPI |
| Clostridium cellulolyticum H10 | 767 | 1021 | 255 | EGK |
| Pasteurella multocida str. Pm70 | 815 | 1056 | 242 | ENN |
| Mycoplasma canis PG 14 | 907 | 1233 | 327 | EPK |
| Porphyromonas sp. oral taxon 279 str. F0450 | 935 | 1197 | 263 | EPT |
| Filifactor alocis ATCC 35896 | 1094 | 1365 | 272 | EVD |
| Aminomonas paucivorans DSM 12260 | 801 | 1052 | 252 | EVY |
| Wolinella succinogenes DSM 1740 | 1034 | 1409 | 376 | EYK |
| Oenococcus kitaharae DSM 17330 | 1119 | 1389 | 271 | GAL |
| CoriobacteriumglomeransPW2 | 1126 | 1384 | 259 | GDR |
| Peptoniphilus duerdenii ATCC BAA-1640 | 1091 | 1364 | 274 | GDS |
| Bifidobacterium bifidum S17 | 1138 | 1420 | 283 | GGL |
| Alicyclobacillus hesperidum URH17-3-68 | 876 | 1146 | 271 | GGR |
| Roseburia inulinivorans DSM 16841 | 895 | 1152 | 258 | GGT |
| Actinomyces coleocanis DSM 15436 | 843 | 1105 | 263 | GKK |
| Odoribacter laneus YIT 12061 | 1103 | 1498 | 396 | GKV |
| Coprococcus catus GD-7 | 1063 | 1338 | 276 | GNQ |
| Enterococcus faecalis TX0012 | 829 | 1150 | 322 | GRK |
| Bacillus smithii 7 3 47FAA | 809 | 1088 | 280 | GSK |
| Legionella pneumophila str. Paris | 1021 | 1372 | 352 | GTM |
| Bacteroides fragilis NCTC 9343 | 1140 | 1436 | 297 | IPV |
| Mycoplasma ovipneumoniae SC01 | 923 | 1265 | 343 | IRI |
| Actinomyces sp. oral taxon 180 str. F0310 | 895 | 1181 | 287 | KEK |
| Treponema sp. JC4 | 832 | 1062 | 231 | KIS |
| Fusobacteriumnucleatum ATCC49256 | 1073 | 1374 | 302 | KKV |
| Lactobacillus farciminis KCTC 3681 | 1101 | 1356 | 256 | KKV |
| Nitratifractor salsuginis DSM 16511 | 840 | 1132 | 293 | KMR |
| Lactobacillus coryniformis KCTC 3535 | 850 | 1119 | 270 | KNK |
| Mycoplasma mobile 163K | 916 | 1236 | 321 | KNY |
| Flavobacterium branchiophilum FL-15 | 1182 | 1473 | 292 | KQK |
| Prevotella timonensis CRIS 5C-B1 | 957 | 1218 | 262 | KQQ |
| Methylosinus trichosporium OB3b | 830 | 1082 | 253 | KRP |
| Prevotella sp. C561 | 1099 | 1424 | 326 | KRY |
| Mycoplasma gallisepticum str. F | 911 | 1269 | 359 | KTA |
| Lactobacillus rhamnosus GG | 1077 | 1363 | 287 | KYG |
| Wolinella succinogenes DSM 1740 | 811 | 1059 | 249 | LPN |
| Streptococcus thermophilus LMD-9 | 1099 | 1388 | 290 | MLA |
| Treponema denticola ATCC 35405 | 1092 | 1395 | 304 | NDS |
| Bergeyella zoohelcum ATCC 43767 | 1098 | 1415 | 318 | NEK |
| Veillonella atypica ACS-134-V-Col7a | 1107 | 1398 | 292 | NGF |
| Neisseria meningitidis Z2491 | 835 | 1082 | 248 | NHN |
| Ignavibacterium album JCM 16511 | 1296 | 1688 | 393 | NKK |
| Ruminococcus albus 8 | 853 | 1156 | 304 | NNF |
| Streptococcus thermophilus LMD-9 | 811 | 1121 | 311 | NNK |
| Barnesiella intestinihominis YIT 11860 | 871 | 1153 | 283 | NPV |
| Azospirillum sp. B510 | 911 | 1168 | 258 | PFH |
| Rhodospirillum rubrum ATCC 11170 | 863 | 1173 | 311 | PRG |
| Planococcus antarcticus DSM 14505 | 1087 | 1333 | 247 | PYY |
| Staphylococcus pseudintermedius ED99 | 1073 | 1334 | 262 | QIV |
| Alcanivorax sp. W11-5 | 843 | 1113 | 271 | RIE |
| Bradyrhizobium sp. BTAi1 | 811 | 1064 | 254 | RIY |
| Streptococcus pyogenes M1 GAS | 1099 | 1368 | 270 | RKR |
| Streptococcus mutans UA159 | 1078 | 1345 | 268 | RKR |
| Streptococcus Pyogenes | 1099 | 1368 | 270 | RKR |
| Bacteroides sp. 20 3 | 1147 | 1517 | 371 | RNI |
| S. aureus | 772 | 1053 | 282 | RNK |
| Solobacterium moorei F0204 | 1062 | 1327 | 266 | RSG |
| Finegoldia magna ATCC 29328 | 1081 | 1348 | 268 | RTE |
| uncultured delta proteobacterium HF0070 07E19 | 770 | 1011 | 242 | SGG |
| Acidaminococcus sp. D21 | 1064 | 1358 | 295 | SIG |
| Eubacterium rectale ATCC 33656 | 824 | 1114 | 291 | SKK |
| Caenispirillum salinarum AK4 | 1048 | 1442 | 395 | SLV |
| Acidothermus cellulolyticus 11B | 830 | 1138 | 309 | SPS |
| Catenibacterium mitsuokai DSM 15897 | 1068 | 1329 | 262 | SPT |
| Parvibaculum lavamentivorans DS-1 | 827 | 1037 | 211 | TGN |
| Staphylococcus lugdunensis M23590 | 772 | 1054 | 283 | TKK |
| Streptococcus sanguinis SK49 | 1123 | 1421 | 299 | TRM |
| Elusimicrobium minutum Pei191 | 910 | 1195 | 286 | TTG |
| Nitrobacter hamburgensis X14 | 914 | 1166 | 253 | VAY |
| Mycoplasma synoviae 53 | 991 | 1314 | 324 | VGF |
| Sphaerochaeta globus str. Buddy | 877 | 1179 | 303 | VKG |
| Ilyobacter polytropus DSM 2926 | 837 | 1092 | 256 | VNG |
| Rhodovulum sp. PH10 | 821 | 1059 | 239 | VPY |
| Bifidobacterium longum DJO10A | 904 | 1187 | 284 | VRK |

Below are the amino acid sequences for the Cas9 orthologs listed in Table 100.

SEQ ID NO: 304
MKRNYILGLDIGITSVGYGIIDYETRDVIDAGVRLFKEANVENNEGRRSKRGARRLKRRRRHRIQRVKKL
LFDYNLLTDHSELSGINPYEARVKGLSQKLSEEEFSAALLHLAKRRGVHNVNEVEEDTGNELSTKEQISR
NSKALEEKYVAELQLERLKKDGEVRGSINRFKTSDYVKEAKQLLKVQKAYHQLDQSFIDTYIDLLETRRT
YYEGPGEGSPFGWKDIKEWYEMLMGHCTYFPEELRSVKYAYNADLYNALNDLNNLVITRDENEKLEYYEK
FQIIENVFKQKKKPTLKQIAKEILVNEEDIKGYRVTSTGKPEFTNLKVYHDIKDITARKEIIENAELLDQ
IAKILTIYQSSEDIQEELTNLNSELTQEEIEQISNLKGYTGTHNLSLKAINLILDELWHTNDNQIAIFNR
LKLVPKKVDLSQQKEIPTTLVDDFILSPVVKRSFIQSIKVINAIIKKYGLPNDIIIELAREKNSKDAQKM
INEMQKRNRQTNERIEEIIRTTGKENAKYLIEKIKLHDMQEGKCLYSLEAIPLEDLLNNPFNYEVDHIIP
RSVSFDNSFNNKVLVKQEENSKKGNRTPFQYLSSSDSKISYETFKKHILNLAKGKGRISKTKKEYLLEER
DINRFSVQKDFINRNLVDTRYATRGLMNLLRSYFRVNNLDVKVKSINGGFTSFLRRKWKFKKERNKGYKH
HAEDALIIANADFIFKEWKKLDKAKKVMENQMFEEKQAESMPEIETEQEYKEIFITPHQIKHIKDFKDYK
YSHRVDKKPNRELINDTLYSTRKDDKGNTLIVNNLNGLYDKDNDKLKKLINKSPEKLLMYHHDPQTYQKL
KLIMEQYGDEKNPLYKYYEETGNYLTKYSKKDNGPVIKKIKYYGNKLNAHLDITDDYPNSRNKVVKLSLK
PYRFDVYLDNGVYKFVTVKNLDVIKKENYYEVNSKCYEEAKKLKKISNQAEFIASFYNNDLIKINGELYR
VIGVNNDLLNRIEVNMIDITYREYLENMNDKRPPRIIKTIASKTQSIKKYSTDILGNLYEVKSKKHPQII
KKG
SEQ ID NO: 305
[sequence omitted]
SEQ ID NO: 306
MARILAFDIGISSIGWAFSENDELKDCGVRIFTKVENPKTGESLALPRRLARSARKRLARRKARLNHLKH
LIANEFKLNYEDYQSFDESLAKAYKGSLISPYELRFRALNELLSKQDFARVILHIAKRRGYDDIKNSDDK
EKGAILKAIKQNEEKLANYQSVGEYLYKEYFQKFKENSKEFTNVRNKKESYERCIAQSFLKDELKLIFKK
QREFGFSFSKKFEEEVLSVAFYKRALKDFSHLVGNCSFFTDEKRAPKNSPLAFMFVALTRIINLLNNLKN
TEGILYTKDDLNALLNEVLKNGTLTYKQTKKLLGLSDDYEFKGEKGTYFIEFKKYKEFIKALGEHNLSQD
DLNEIAKDITLIKDEIKLKKALAKYDLNQNQIDSLSKLEFKDHLNISFKALKLVTPLMLEGKKYDEACNE
LNLKVAINEDKKDFLPAFNETYYKDEVTNPVVLRAIKEYRKVLNALLKKYGKVHKINIELAREVGKNHSQ
RAKIEKEQNENYKAKKDAELECEKLGLKINSKNILKLRLFKEQKEFCAYSGEKIKISDLQDEKMLEIDHI
YPYSRSFDDSYMNKVLVFTKQNQEKLNQTPFEAFGNDSAKWQKIEVLAKNLPTKKQKRILDKNYKDKEQK
NFKDRNLNDTRYIARLVLNYTKDYLDFLPLSDDENTKLNDTQKGSKVHVEAKSGMLTSALRHTWGFSAKD
RNNHLHHAIDAVIIAYANNSIVKAFSDFKKEQESNSAELYAKKISELDYKNKRKFFEPFSGFRQKVLDKI
DEIFVSKPERKKPSGALHEETFRKEEEFYQSYGGKEGVLKALELGKIRKVNGKIVKNGDMFRVDIFKHKK
TNKFYAVPIYTMDFALKVLPNKAVARSKKGEIKDWILMDENYEFCFSLYKDSLILIQTKDMQEPEFVYYN
AFTSSTVSLIVSKHDNKFETLSKNQKILFKNANEKEVIAKSIGIQNLKVFEKYIVSALGEVTKAEFRQRE
DFKK
SEQ ID NO: 307
MKRILGLDLGTNSIGWALVNEAENKDERSSIVKLGVRVNPLTVDELTNFEKGKSITTNADRTLKRGMRRN
LQRYKLRRETLTEVLKEHKLITEDTILSENGNRTTFETYRLRAKAVTEEISLEEFARVLLMINKKRGYKS
SRKAKGVEEGTLIDGMDIARELYNNNLTPGELCLQLLDAGKKFLPDFYRSDLQNELDRIWEKQKEYYPEI
LTDVLKEELRGKKRDAVWAICAKYFVWKENYTEWNKEKGKTEQQEREHKLEGIYSKRKRDEAKRENLQWR
VNGLKEKLSLEQLVIVFQEMNTQINNSSGYLGAISDRSKELYFNKQTVGQYQMEMLDKNPNASLRNMVFY
RQDYLDEFNMLWEKQAVYHKELTEELKKEIRDIIIFYQRRLKSQKGLIGFCEFESRQIEVDIDGKKKIKT
VGNRVISRSSPLFQEFKIWQILNNIEVTVVGKKRKRRKLKENYSALFEELNDAEQLELNGSRRLCQEEKE
LLAQELFIRDKMTKSEVLKLLFDNPQELDLNFKTIDGNKTGYALFQAYSKMIEMSGHEPVDFKKPVEKVV
EYIKAVFDLLNWNTDILGFNSNEELDNQPYYKLWHLLYSFEGDNTPTGNGRLIQKMTELYGFEKEYATIL
ANVSFQDDYGSLSAKAIHKILPHLKEGNRYDVACVYAGYRHSESSLTREEIANKVLKDRLMLLPKNSLHN
PVVEKILNQMVNVINVIIDIYGKPDEIRVELARELKKNAKEREELTKSIAQTTKAHEEYKTLLQTEFGLT
NVSRTDILRYKLYKELESCGYKTLYSNTYISREKLFSKEFDIEHIIPQARLFDDSFSNKTLEARSVNIEK
GNKTAYDFVKEKFGESGADNSLEHYLNNIEDLFKSGKISKTKYNKLKMAEQDIPDGFIERDLRNTQYIAK
KALSMLNEISHRVVATSGSVTDKLREDWQLIDVMKELNWEKYKALGLVEYFEDRDGRQIGRIKDWTKRND
HRHHAMDALTVAFTKDVFIQYFNNKNASLDPNANEHAIKNKYFQNGRAIAPMPLREFRAEAKKHLENTLI
SIKAKNKVITGNINKTRKKGGVNKNMQQTPRGQLHLETIYGSGKQYLTKEEKVNASFDMRKIGTVSKSAY
RDALLKRLYENDNDPKKAFAGKNSLDKQPIWLDKEQMRKVPEKVKIVTLEAIYTIRKEISPDLKVDKVID
VGVRKILIDRLNEYGNDAKKAFSNLDKNPIWLNKEKGISIKRVTISGISNAQSLHVKKDKDGKPILDENG
RNIPVDFVNTGNNHHVAVYYRPVIDKRGQLVVDEAGNPKYELEEVVVSFFEAVTRANLGLPIIDKDYKTT
EGWQFLFSMKQNEYFVFPNEKTGFNPKEIDLLDVENYGLISPNLFRVQKFSLKNYVFRHHLETTIKDTSS
ILRGITWIDFRSSKGLDTIVKVRVNHIGQIVSVGEY
SEQ ID NO: 308
MSRKNYVDDYAISLDIGNASVGWSAFTPNYRLVRAKGHELIGVRLFDPADTAESRRMARTTRRRYSRRRW
RLRLLDALFDQALSEIDPSFLARRKYSWVHPDDENNADCWYGSVLFDSNEQDKRFYEKYPTIYHLRKALM
EDDSQHDIREIYLAIHHMVKYRGNFLVEGTLESSNAFKEDELLKLLGRITRYEMSEGEQNSDIEQDDENK
LVAPANGQLADALCATRGSRSMRVDNALEALSAVNDLSREQRAIVKAIFAGLEGNKLDLAKIFVSKEFSS
ENKKILGIYFNKSDYEEKCVQIVDSGLLDDEEREFLDRMQGQYNAIALKQLLGRSTSVSDSKCASYDAHR
ANWNLIKLQLRTKENEKDINENYGILVGWKIDSGQRKSVRGESAYENMRKKANVFFKKMIETSDLSETDK
NRLIHDIEEDKLFPIQRDSDNGVIPHQLHQNELKQIIKKQGKYYPFLLDAFEKDGKQINKIEGLLTFRVP
YFVGPLVVPEDLQKSDNSENHWMVRKKKGEITPWNFDEMVDKDASGRKFIERLVGTDSYLLGEPTLPKNS
LLYQEYEVLNELNNVRLSVRTGNHWNDKRRMRLGREEKTLLCQRLFMKGQTVTKRTAENLLRKEYGRTYE
LSGLSDESKFTSSLSTYGKMCRIFGEKYVNEHRDLMEKIVELQTVFEDKETLLHQLRQLEGISEADCALL
VNTHYTGWGRLSRKLLTTKAGECKISDDFAPRKHSIIEIMRAEDRNLMEIITDKQLGFSDWIEQENLGAE
NGSSLMEVVDDLRVSPKVKRGIIQSIRLIDDISKAVGKRPSRIFLELADDIQPSGRTISRKSRLQDLYRN
ANLGKEFKGIADELNACSDKDLQDDRLFLYYTQLGKDMYTGEELDLDRLSSAYDIDHIIPQAVTQNDSID
NRVLVARAENARKTDSFTYMPQIADRMRNFWQILLDNGLISRVKFERLTRQNEFSEREKERFVQRSLVET
RQIMKNVATLMRQRYGNSAAVIGLNAELTKEMHRYLGFSHKNRDINDYHHAQDALCVGIAGQFAANRGFF
ADGEVSDGAQNSYNQYLRDYLRGYREKLSAEDRKQGRAFGFIVGSMRSQDEQKRVNPRTGEVVWSEEDKD
YLRKVMNYRKMLVTQKVGDDFGALYDETRYAATDPKGIKGIPFDGAKQDTSLYGGFSSAKPAYAVLIESK
GKTRLVNVTMQEYSLLGDRPSDDELRKVLAKKKSEYAKANILLRHVPKMQLIRYGGGLMVIKSAGELNNA
QQLWLPYEEYCYFDDLSQGKGSLEKDDLKKLLDSILGSVQCLYPWHRFTEEELADLHVAFDKLPEDEKKN
VITGIVSALHADAKTANLSIVGMTGSWRRMNNKSGYTFSDEDEFIFQSPSGLFEKRVTVGELKRKAKKEV
NSKYRTNEKRLPTLSGASQP
SEQ ID NO: 309
METQTSNQLITSHLKDYPKQDYFVGLDIGTNSVGWAVTNTSYELLKFHSHKMWGSRLFEEGESAVTRRGF
RSMRRRLERRKLRLKLLEELFADAMAQVDSTFFIRLHESKYHYEDKTTGHSSKHILFIDEDYTDQDYFTE
YPTIYHLRKDLMENGTDDIRKLFLAVHHILKYRGNFLYEGATFNSNAFTFEDVLKQALVNITFNCFDTNS
AISSISNILMESGKTKSDKAKAIERLVDTYTVFDEVNTPDKPQKEQVKEDKKTLKAFANLVLGLSANLID
LFGSVEDIDDDLKKLQIVGDTYDEKRDELAKVWGDEIHIIDDCKSVYDAIILMSIKEPGLTISQSKVKAF
DKHKEDLVILKSLLKLDRNVYNEMFKSDKKGLHNYVHYIKQGRTEETSCSREDFYKYTKKIVEGLADSKD
KEYILNEIELQTLLPLQRIKDNGVIPYQLHLEELKVILDKCGPKFPFLHTVSDGFSVTEKLIKMLEFRIP
YYVGPLNTHHNIDNGGFSWAVRKQAGRVTPWNFEEKIDREKSAAAFIKNLTNKCTYLFGEDVLPKSSLLY
SEFMLLNELNNVRIDGKALAQGVKQHLIDSIFKQDHKKMTKNRIELFLKDNNYITKKHKPEITGLDGEIK
NDLTSYRDMVRILGNNFDVSMAEDIITDITIFGESKKMLRQTLRNKFGSQLNDETIKKLSKLRYRDWGRL
SKKLLKGIDGCDKAGNGAPKTIIELMRNDSYNLMEILGDKFSFMECIEEENAKLAQGQVVNPHDIIDELA
LSPAVKRAVWQALRIVDEVAHIKKALPSRIFVEVARTNKSEKKKKDSRQKRLSDLYSAIKKDDVLQSGLQ
DKEFGALKSGLANYDDAALRSKKLYLYYTQMGRCAYTGNIIDLNQLNTDNYDIDHIYPRSLTKDDSFDNL
VLCERTANAKKSDIYPIDNRIQTKQKPFWAFLKHQGLISERKYERLTRIAPLTADDLSGFIARQLVETNQ
SVKATTTLLRRLYPDIDVVFVKAENVSDFRHNNNFIKVRSLNHHHHAKDAYLNIVVGNVYHEKFTRNFRL
FFKKNGANRTYNLAKMFNYDVICTNAQDGKAWDVKTSMNTVKKMMASNDVRVTRRLLEQSGALADATIYK
ASVAAKAKDGAYIGMKTKYSVFADVTKYGGMTKIKNAYSIIVQYTGKKGEEIKEIVPLPIYLINRNATDI
ELIDYVKSVIPKAKDISIKYRKLCINQLVKVNGFYYYLGGKTNDKIYIDNAIELVVPHDIATYIKLLDKY
DLLRKENKTLKASSITTSIYNINTSTVVSLNKVGIDVFDYFMSKLRTPLYMKMKGNKVDELSSTGRSKFI
KMTLEEQSIYLLEVLNLLTNSKTTFDVKPLGITGSRSTIGVKIHNLDEFKIINESITGLYSNEVTIV
SEQ ID NO: 310
MTKLNQPYGIGLDIGSNSIGFAVVDANSHLLRLKGETAIGARLFREGQSAADRRGSRTTRRRLSRTRWRL
SFLRDFFAPHITKIDPDFFLRQKYSEISPKDKDRFKYEKRLFNDRTDAEFYEDYPSMYHLRLHLMTHTHK
ADPREIFLAIHHILKSRGHFLTPGAAKDFNTDKVDLEDIFPALTEAYAQVYPDLELTFDLAKADDFKAKL
LDEQATPSDTQKALVNLLLSSDGEKEIVKKRKQVLTEFAKAITGLKTKFNLALGTEVDEADASNWQFSMG
QLDDKWSNIETSMTDQGTEIFEQIQELYRARLLNGIVPAGMSLSQAKVADYGQHKEDLELFKTYLKKLND
HELAKTIRGLYDRYINGDDAKPFLREDFVKALTKEVTAHPNEVSEQLLNRMGQANFMLKQRTKANGAIPI
QLQQRELDQIIANQSKYYDWLAAPNPVEAHRWKMPYQLDELLNFHIPYYVGPLITPKQQAESGENVFAWM
VRKDPSGNITPYNFDEKVDREASANTFIQRMKTTDTYLIGEDVLPKQSLLYQKYEVLNELNNVRINNECL
GTDQKQRLIREVFERHSSVTIKQVADNLVAHGDFARRPEIRGLADEKRFLSSLSTYHQLKEILHEAIDDP
TKLLDIENIITWSTVFEDHTIFETKLAEIEWLDPKKINELSGIRYRGWGQFSRKLLDGLKLGNGHTVIQE
LMLSNHNLMQILADETLKETMTELNQDKLKTDDIEDVINDAYTSPSNKKALRQVLRVVEDIKHAANGQDP
SWLFIETADGTGTAGKRTQSRQKQIQTVYANAAQELIDSAVRGELEDKIADKASFTDRLVLYFMQGGRDI
YTGAPLNIDQLSHYDIDHILPQSLIKDDSLDNRVLVNATINREKNNVFASTLFAGKMKATWRKWHEAGLI
SGRKLRNLMLRPDEIDKFAKGFVARQLVETRQIIKLTEQIAAAQYPNTKIIAVKAGLSHQLREELDFPKN
RDVNHYHHAFDAFLAARIGTYLLKRYPKLAPFFTYGEFAKVDVKKFREFNFIGALTHAKKNIIAKDTGEI
VWDKERDIRELDRIYNFKRMLITHEVYFETADLFKQTIYAAKDSKERGGSKQLIPKKQGYPTQVYGGYTQ
ESGSYNALVRVAEADTTAYQVIKISAQNASKIASANLKSREKGKQLLNEIVVKQLAKRRKNWKPSANSFK
IVIPRFGMGTLFQNAKYGLFMVNSDTYYRNYQELWLSRENQKLLKKLFSIKYEKTQMNHDALQVYKAIID
QVEKFFKLYDINQFRAKLSDAIERFEKLPINTDGNKIGKTETLRQILIGLQANGTRSNVKNLGIKTDLGL
LQVGSGIKLDKDTQIVYQSPSGLFKRRIPLADL
SEQ ID NO: 311
MTKEYYLGLDVGTNSVGWAVTDSQYNLCKFKKKDMWGIRLFESANTAKDRRLQRGNRRRLERKKQRIDLL
QEIFSPEICKIDPTFFIRLNESRLHLEDKSNDFKYPLFIEKDYSDIEYYKEFPTIFHLRKHLIESEEKQD
IRLIYLALHNIIKTRGHFLIDGDLQSAKQLRPILDTFLLSLQEEQNLSVSLSENQKDEYEEILKNRSIAK
SEKVKKLKNLFEISDELEKEEKKAQSAVIENFCKFIVGNKGDVCKFLRVSKEELEIDSFSFSEGKYEDDI
VKNLEEKVPEKVYLFEQMKAMYDWNILVDILETEEYISFAKVKQYEKHKTNLRLLRDIILKYCTKDEYNR
MFNDEKEAGSYTAYVGKLKKNNKKYWIEKKRNPEEFYKSLGKLLDKIEPLKEDLEVLTMMIEECKNHTLL
PIQKNKDNGVIPHQVHEVELKKILENAKKYYSFLTETDKDGYSVVQKIESIFRFRIPYYVGPLSTRHQEK
GSNVWMVRKPGREDRIYPWNMEEIIDFEKSNENFITRMTNKCTYLIGEDVLPKHSLLYSKYMVLNELNNV
KVRGKKLPTSLKQKVFEDLFENKSKVTGKNLLEYLQIQDKDIQIDDLSGFDKDFKTSLKSYLDFKKQIFG
EEIEKESIQNMIEDIIKWITIYGNDKEMLKRVIRANYSNQLTEEQMKKITGFQYSGWGNFSKMFLKGISG
SDVSTGETFDIITAMWETDNNLMQILSKKFTFMDNVEDFNSGKVGKIDKITYDSTVKEMFLSPENKRAVW
QTIQVAEEIKKVMGCEPKKIFIEMARGGEKVKKRTKSRKAQLLELYAACEEDCRELIKEIEDRDERDFNS
MKLFLYYTQFGKCMYSGDDIDINELIRGNSKWDRDHIYPQSKIKDDSIDNLVLVNKTYNAKKSNELLSED
IQKKMHSFWLSLLNKKLITKSKYDRLTRKGDFTDEELSGFIARQLVETRQSTKAIADIFKQIYSSEVVYV
KSSLVSDFRKKPLNYLKSRRVNDYHHAKDAYLNIVVGNVYNKKFTSNPIQWMKKNRDTNYSLNKVFEHDV
VINGEVIWEKCTYHEDTNTYDGGTLDRIRKIVERDNILYTEYAYCEKGELFNATIQNKNGNSTVSLKKGL
DVKKYGGYFSANTSYFSLIEFEDKKGDRARHIIGVPIYIANMLEHSPSAFLEYCEQKGYQNVRILVEKIK
KNSLLIINGYPLRIRGENEVDTSFKRAIQLKLDQKNYELVRNIEKFLEKYVEKKGNYPIDENRDHITHEK
MNQLYEVLLSKMKKFNKKGMADPSDRIEKSKPKFIKLEDLIDKINVINKMLNLLRCDNDTKADLSLIELP
KNAGSFVVKKNTIGKSKIILVNQSVTGLYENRREL
SEQ ID NO: 312
MARDYSVGLDIGTSSVGWAAIDNKYHLIRAKSKNLIGVRLFDSAVTAEKRRGYRTTRRRLSRRHWRLRLL
NDIFAGPLTDFGDENFLARLKYSWVHPQDQSNQAHFAAGLLFDSKEQDKDFYRKYPTIYHLRLALMNDDQ
KHDLREVYLAIHHLVKYRGHFLIEGDVKADSAFDVHTFADAIQRYAESNNSDENLLGKIDEKKLSAALTD
KHGSKSQRAETAETAFDILDLQSKKQIQAILKSVVGNQANLMAIFGLDSSAISKDEQKNYKFSFDDADID
EKIADSEALLSDTEFEFLCDLKAAFDGLTLKMLLGDDKTVSAAMVRRFNEHQKDWEYIKSHIRNAKNAGN
GLYEKSKKFDGINAAYLALQSDNEDDRKKAKKIFQDEISSADIPDDVKADFLKKIDDDQFLPIQRTKNNG
TIPHQLHRNELEQIIEKQGIYYPFLKDTYQENSHELNKITALINFRVPYYVGPLVEEEQKIADDGKNIPD
PTNHWMVRKSNDTITPWNLSQVVDLDKSGRRFIERLTGTDTYLIGEPTLPKNSLLYQKFDVLQELNNIRV
SGRRLDIRAKQDAFEHLFKVQKTVSATNLKDFLVQAGYISEDTQIEGLADVNGKNFNNALTTYNYLVSVL
GREFVENPSNEELLEEITELQTVFEDKKVLRRQLDQLDGLSDHNREKLSRKHYTGWGRISKKLLTTKIVQ
NADKIDNQTFDVPRMNQSIIDTLYNTKMNLMEIINNAEDDFGVRAWIDKQNTTDGDEQDVYSLIDELAGP
KEIKRGIVQSFRILDDITKAVGYAPKRVYLEFARKTQESHLTNSRKNQLSTLLKNAGLSELVTQVSQYDA
AALQNDRLYLYFLQQGKDMYSGEKLNLDNLSNYDIDHIIPQAYTKDNSLDNRVLVSNITNRRKSDSSNYL
PALIDKMRPFWSVLSKQGLLSKHKFANLTRTRDFDDMEKERFIARSLVETRQIIKNVASLIDSHFGGETK
AVAIRSSLTADMRRYVDIPKNRDINDYHHAFDALLFSTVGQYTENSGLMKKGQLSDSAGNQYNRYIKEWI
HAARLNAQSQRVNPFGFVVGSMRNAAPGKLNPETGEITPEENADWSIADLDYLHKVMNFRKITVTRRLKD
QKGQLYDESRYPSVLHDAKSKASINFDKHKPVDLYGGFSSAKPAYAALIKFKNKFRLVNVLRQWTYSDKN
SEDYILEQIRGKYPKAEMVLSHIPYGQLVKKDGALVTISSATELHNFEQLWLPLADYKLINTLLKTKEDN
LVDILHNRLDLPEMTIESAFYKAFDSILSFAFNRYALHQNALVKLQAHRDDFNALNYEDKQQTLERILDA
LHASPASSDLKKINLSSGFGRLFSPSHFTLADTDEFIFQSVTGLFSTQKTVAQLYQETK
SEQ ID NO: 313
MVYDVGLDIGTGSVGWVALDENGKLARAKGKNLVGVRLFDTAQTAADRRGFRTTRRRLSRRKWRLRLLDE
LFSAEINEIDSSFFQRLKYSYVHPKDEENKAHYYGGYLFPTEEETKKFHRSYPTIYHLRQELMAQPNKRF
DIREIYLAIHHLVKYRGHFLSSQEKITIGSTYNPEDLANAIEVYADEKGLSWELNNPEQLTEIISGEAGY
GLNKSMKADEALKLFEFDNNQDKVAIKTLLAGLTGNQIDFAKLFGKDISDKDEAKLWKLKLDDEALEEKS
QTILSQLTDEEIELFHAVVQAYDGFVLIGLLNGADSVSAAMVQLYDQHREDRKLLKSLAQKAGLKHKRFS
EIYEQLALATDEATIKNGISTARELVEESNLSKEVKEDTLRRLDENEFLPKQRTKANSVIPHQLHLAELQ
KILQNQGQYYPFLLDTFEKEDGQDNKIEELLRFRIPYYVGPLVTKKDVEHAGGDADNHWVERNEGFEKSR
VTPWNFDKVFNRDKAARDFIERLTGNDTYLIGEKTLPQNSLRYQLFTVLNELNNVRVNGKKFDSKTKADL
INDLFKARKTVSLSALKDYLKAQGKGDVTITGLADESKFNSSLSSYNDLKKTFDAEYLENEDNQETLEKI
IEIQTVFEDSKIASRELSKLPLDDDQVKKLSQTHYTGWGRLSEKLLDSKIIDERGQKVSILDKLKSTSQN
FMSIINNDKYGVQAWITEQNTGSSKLTFDEKVNELTTSPANKRGIKQSFAVLNDIKKAMKEEPRRVYLEF
AREDQTSVRSVPRYNQLKEKYQSKSLSEEAKVLKKTLDGNKNKMSDDRYFLYFQQQGKDMYTGRPINFER
LSQDYDIDHIIPQAFTKDDSLDNRVLVSRPENARKSDSFAYTDEVQKQDGSLWTSLLKSGFINRKKYERL
TKAGKYLDGQKTGFIARQLVETRQIIKNVASLIEGEYENSKAVAIRSEITADMRLLVGIKKHREINSFHH
AFDALLITAAGQYMQNRYPDRDSTNVYNEFDRYTNDYLKNLRQLSSRDEVRRLKSFGFVVGTMRKGNEDW
SEENTSYLRKVMMFKNILTTKKTEKDRGPLNKETIFSPKSGKKLIPLNSKRSDTALYGGYSNVYSAYMTL
VRANGKNLLIKIPISIANQIEVGNLKINDYIVNNPAIKKFEKILISKLPLGQLVNEDGNLIYLASNEYRH
NAKQLWLSTTDADKIASISENSSDEELLEAYDILTSENVKNRFPFFKKDIDKLSQVRDEFLDSDKRIAVI
QTILRGLQIDAAYQAPVKIISKKVSDWHKLQQSGGIKLSDNSEMIYQSATGIFETRVKISDLL
SEQ ID NO: 314
IVDYCIGLDLGTGSVGWAVVDMNHRLMKRNGKHLWGSRLFSNAETAANRRASRSIRRRYNKRRERIRLLR
AILQDMVLEKDPTFFIRLEHTSFLDEEDKAKYLGTDYKDNYNLFIDEDFNDYTYYHKYPTIYHLRKALCE
STEKADPRLIYLALHHIVKYRGNFLYEGQKFNMDASNIEDKLSDIFTQFTSFNNIPYEDDEKKNLEILEI
LKKPLSKKAKVDEVMTLIAPEKDYKSAFKELVTGIAGNKMNVTKMILCEPIKQGDSEIKLKFSDSNYDDQ
FSEVEKDLGEYVEFVDALHNVYSWVELQTIMGATHTDNASISEAMVSRYNKHHDDLKLLKDCIKNNVPNK
YFDMFRNDSEKSKGYYNYINRPSKAPVDEFYKYVKKCIEKVDTPEAKQILNDIELENFLLKQNSRTNGSV
PYQMQLDEMIKIIDNQAEYYPILKEKREQLLSILTFRIPYYFGPLNETSEHAWIKRLEGKENQRILPWNY
QDIVDVDATAEGFIKRMRSYCTYFPDEEVLPKNSLIVSKYEVYNELNKIRVDDKLLEVDVKNDIYNELFM
KNKTVTEKKLKNWLVNNQCCSKDAEIKGFQKENQFSTSLTPWIDFTNIFGKIDQSNFDLIENIIYDLTVF
EDKKIMKRRLKKKYALPDDKVKQILKLKYKDWSRLSKKLLDGIVADNRFGSSVTVLDVLEMSRLNLMEII
NDKDLGYAQMIEEATSCPEDGKFTYEEVERLAGSPALKRGIWQSLQIVEEITKVMKCRPKYIYIEFERSE
EAKERTESKIKKLENVYKDLDEQTKKEYKSVLEELKGFDNTKKISSDSLFLYFTQLGKCMYSGKKLDIDS
LDKYQIDHIVPQSLVKDDSFDNRVLVVPSENQRKLDDLVVPFDIRDKMYRFWKLLFDHELISPKKFYSLI
KTEYTERDEERFINRQLVETRQITKNVTQIIEDHYSTTKVAAIRANLSHEFRVKNHIYKNRDINDYHHAH
DAYIVALIGGFMRDRYPNMHDSKAVYSEYMKMFRKNKNDQKRWKDGFVINSMNYPYEVDGKLIWNPDLIN
EIKKCFYYKDCYCTTKLDQKSGQLFNLTVLSNDAHADKGVTKAVVPVNKNRSDVHKYGGFSGLQYTIVAI
EGQKKKGKKTELVKKISGVPLHLKAASINEKINYIEEKEGLSDVRIIKDNIPVNQMIEMDGGEYLLTSPT
EYVNARQLVLNEKQCALIADIYNAIYKQDYDNLDDILMIQLYIELTNKMKVLYPAYRGIAEKFESMNENY
VVISKEEKANIIKQMLIVMHRGPQNGNIVYDDFKISDRIGRLKTKNHNLNNIVFISQSPTGIYTKKYKL
SEQ ID NO: 315
MKSEKKYYIGLDVGTNSVGWAVTDEFYNILRAKGKDLWGVRLFEKADTAANTRIFRSGRRRNDRKGMRLQ
ILREIFEDEIKKVDKDFYDRLDESKFWAEDKKVSGKYSLFNDKNFSDKQYFEKFPTIFHLRKYLMEEHGK
VDIRYYFLAINQMMKRRGHFLIDGQISHVTDDKPLKEQLILLINDLLKIELEEELMDSIFEILADVNEKR
TDKKNNLKELIKGQDFNKQEGNILNSIFESIVTGKAKIKNIISDEDILEKIKEDNKEDFVLTGDSYEENL
QYFEEVLQENITLFNTLKSTYDFLILQSILKGKSTLSDAQVERYDEHKKDLEILKKVIKKYDEDGKLFKQ
VFKEDNGNGYVSYIGYYLNKNKKITAKKKISNIEFTKYVKGILEKQCDCEDEDVKYLLGKIEQENFLLKQ
ISSINSVIPHQIHLFELDKILENLAKNYPSFNNKKEEFTKIEKIRKTFTFRIPYYVGPLNDYHKNNGGNA
WIFRNKGEKIRPWNFEKIVDLHKSEEEFIKRMLNQCTYLPEETVLPKSSILYSEYMVLNELNNLRINGKP
LDTDVKLKLIEELFKKKTKVTLKSIRDYMVRNNFADKEDFDNSEKNLEIASNMKSYIDFNNILEDKFDVE
MVEDLIEKITIHTGNKKLLKKYIEETYPDLSSSQIQKIINLKYKDWGRLSRKLLDGIKGTKKETEKTDTV
INFLRNSSDNLMQIIGSQNYSFNEYIDKLRKKYIPQEISYEVVENLYVSPSVKKMIWQVIRVTEEITKVM
GYDPDKIFIEMAKSEEEKKTTISRKNKLLDLYKAIKKDERDSQYEKLLTGLNKLDDSDLRSRKLYLYYTQ
MGRDMYTGEKIDLDKLFDSTHYDKDHIIPQSMKKDDSIINNLVLVNKNANQTTKGNIYPVPSSIRNNPKI
YNYWKYLMEKEFISKEKYNRLIRNTPLTNEELGGFINRQLVETRQSTKAIKELFEKFYQKSKIIPVKASL
ASDLRKDMNTLKSREVNDLHHAHDAFLNIVAGDVWNREFTSNPINYVKENREGDKVKYSLSKDFTRPRKS
KGKVIWTPEKGRKLIVDTLNKPSVLISNESHVKKGELFNATIAGKKDYKKGKIYLPLKKDDRLQDVSKYG
GYKAINGAFFFLVEHTKSKKRIRSIELFPLHLLSKFYEDKNTVLDYAINVLQLQDPKIIIDKINYRTEII
IDNFSYLISTKSNDGSITVKPNEQMYWRVDEISNLKKIENKYKKDAILTEEDRKIMESYIDKIYQQFKAG
KYKNRRTTDTIIEKYEIIDLDTLDNKQLYQLLVAFISLSYKTSNNAVDFTVIGLGTECGKPRITNLPDNT
YLVYKSITGIYEKRIRIK
SEQ ID NO: 316
MKLRGIEDDYSIGLDMGTSSVGWAVTDERGTLAHFKRKPTWGSRLFREAQTAAVARMPRGQRRRYVRRRW
RLDLLQKLFEQQMEQADPDFFIRLRQSRLLRDDRAEEHADYRWPLFNDCKFTERDYYQRFPTIYHVRSWL
METDEQADIRLIYLALHNIVKHRGNFLREGQSLSAKSARPDEALNHLRETLRVWSSERGFECSIADNGSI
LAMLTHPDLSPSDRRKKIAPLFDVKSDDAAADKKLGIALAGAVIGLKTEFKNIFGDFPCEDSSIYLSNDE
AVDAVRSACPDDCAELFDRLCEVYSAYVLQGLLSYAPGQTISANMVEKYRRYGEDLALLKKLVKIYAPDQ
YRMFFSGATYPGTGIYDAAQARGYTKYNLGPKKSEYKPSESMQYDDFRKAVEKLFAKTDARADERYRMMM
DRFDKQQFLRRLKTSDNGSIYHQLHLEELKAIVENQGRFYPFLKRDADKLVSLVSFRIPYYVGPLSTRNA
RTDQHGENRFAWSERKPGMQDEPIFPWNWESIIDRSKSAEKFILRMTGMCTYLQQEPVLPKSSLLYEEFC
VLNELNGAHWSIDGDDEHRFDAADREGIIEELFRRKRTVSYGDVAGWMERERNQIGAHVCGGQGEKGFES
KLGSYIFFCKDVFKVERLEQSDYPMIERIILWNTLFEDRKILSQRLKEEYGSRLSAEQIKTICKKRFTGW
GRLSEKFLTGITVQVDEDSVSIMDVLREGCPVSGKRGRAMVMMEILRDEELGFQKKVDDFNRAFFAENAQ
ALGVNELPGSPAVRRSLNQSIRIVDEIASIAGKAPANIFIEVTRDEDPKKKGRRTKRRYNDLKDALEAFK
KEDPELWRELCETAPNDMDERLSLYFMQRGKCLYSGRAIDIHQLSNAGIYEVDHIIPRTYVKDDSLENKA
LVYREENQRKTDMLLIDPEIRRRMSGYWRMLHEAKLIGDKKFRNLLRSRIDDKALKGFIARQLVETGQMV
KLVRSLLEARYPETNIISVKASISHDLRTAAELVKCREANDFHHAHDAFLACRVGLFIQKRHPCVYENPI
GLSQVVRNYVRQQADIFKRCRTIPGSSGFIVNSFMTSGFDKETGEIFKDDWDAEAEVEGIRRSLNFRQCF
ISRMPFEDHGVFWDATIYSPRAKKTAALPLKQGLNPSRYGSFSREQFAYFFIYKARNPRKEQTLFEFAQV
PVRLSAQIRQDENALERYARELAKDQGLEFIRIERSKILKNQLIEIDGDRLCITGKEEVRNACELAFAQD
EMRVIRMLVSEKPVSRECVISLFNRILLHGDQASRRLSKQLKLALLSEAFSEASDNVQRNVVLGLIAIFN
GSTNMVNLSDIGGSKFAGNVRIKYKKELASPKVNVHLIDQSVTGMFERRTKIGL
SEQ ID NO: 317
MENKQYYIGLDVGTNSVGWAVTDTSYNLLRAKGKDMWGARLFEKANTAAERRTKRTSRRRSEREKARKAM
LKELFADEINRVDPSFFIRLEESKFFLDDRSENNRQRYTLFNDATFTDKDYYEKYKTIFHLRSALINSDE
KFDVRLVFLAILNLFSHRGHFLNASLKGDGDIQGMDVFYNDLVESCEYFEIELPRITNIDNFEKILSQKG
KSRTKILEELSEELSISKKDKSKYNLIKLISGLEASVVELYNIEDIQDENKKIKIGFRESDYEESSLKVK
EIIGDEYFDLVERAKSVHDMGLLSNIIGNSKYLCEARVEAYENHHKDLLKIKELLKKYDKKAYNDMFRKM
TDKNYSAYVGSVNSNIAKERRSVDKRKIEDLYKYIEDTALKNIPDDNKDKIEILEKIKLGEFLKKQLTAS
NGVIPNQLQSRELRAILKKAENYLPFLKEKGEKNLTVSEMIIQLFEFQIPYYVGPLDKNPKKDNKANSWA
KIKQGGRILPWNFEDKVDVKGSRKEFIEKMVRKCTYISDEHTLPKQSLLYEKFMVLNEINNIKIDGEKIS
VEAKQKIYNDLFVKGKKVSQKDIKKELISLNIMDKDSVLSGTDTVCNAYLSSIGKFTGVFKEEINKQSIV
DMIEDIIFLKTVYGDEKRFVKEEIVEKYGDEIDKDKIKRILGFKFSNWGNLSKSFLELEGADVGTGEVRS
IIQSLWETNFNLMELLSSRFTYMDELEKRVKKLEKPLSEWTIEDLDDMYLSSPVKRMIWQSMKIVDEIQT
VIGYAPKRIFVEMTRSEGEKVRTKSRKDRLKELYNGIKEDSKQWVKELDSKDESYFRSKKMYLYYLQKGR
CMYSGEVIELDKLMDDNLYDIDHIYPRSFVKDDSLDNLVLVKKEINNRKQNDPITPQIQASCQGFWKILH
DQGFMSNEKYSRLTRKTQEFSDEEKLSFINRQIVETGQATKCMAQILQKSMGEDVDVVFSKARLVSEFRH
KFELFKSRLINDFHHANDAYLNIVVGNSYFVKFTRNPANFIKDARKNPDNPVYKYHMDRFFERDVKSKSE
VAWIGQSEGNSGTIVIVKKTMAKNSPLITKKVEEGHGSITKETIVGVKEIKFGRNKVEKADKTPKKPNLQ
AYRPIKTSDERLCNILRYGGRTSISISGYCLVEYVKKRKTIRSLEAIPVYLGRKDSLSEEKLLNYFRYNL
NDGGKDSVSDIRLCLPFISTNSLVKIDGYLYYLGGKNDDRIQLYNAYQLKMKKEEVEYIRKIEKAVSMSK
FDEIDREKNPVLTEEKNIELYNKIQDKFENTVFSKRMSLVKYNKKDLSFGDFLKNKKSKFEEIDLEKQCK
VLYNIIFNLSNLKEVDLSDIGGSKSTGKCRCKKNITNYKEFKLIQQSITGLYSCEKDLMTI
SEQ ID NO: 318
MKNLKEYYIGLDIGTASVGWAVTDESYNIPKFNGKKMWGVRLFDDAKTAEERRTQRGSRRRLNRRKERIN
LLQDLFATEISKVDPNFFLRLDNSDLYREDKDEKLKSKYTLFNDKDFKDRDYHKKYPTIHHLIMDLIEDE
GKKDIRLLYLACHYLLKNRGHFIFEGQKFDTKNSFDKSINDLKIHLRDEYNIDLEFNNEDLIEIITDTTL
NKTNKKKELKNIVGDTKFLKAISAIMIGSSQKLVDLFEDGEFEETTVKSVDFSTTAFDDKYSEYEEALGD
TISLLNILKSIYDSSILENLLKDADKSKDGNKYISKAFVKKFNKHGKDLKTLKRIIKKYLPSEYANIFRN
KSINDNYVAYTKSNITSNKRTKASKFTKQEDFYKFIKKHLDTIKETKLNSSENEDLKLIDEMLTDIEFKT
FIPKLKSSDNGVIPYQLKLMELKKILDNQSKYYDFLNESDEYGTVKDKVESIMEFRIPYYVGPLNPDSKY
AWIKRENTKITPWNFKDIVDLDSSREEFIDRLIGRCTYLKEEKVLPKASLIYNEFMVLNELNNLKLNEFL
ITEEMKKAIFEELFKTKKKVTLKAVSNLLKKEFNLTGDILLSGTDGDFKQGLNSYIDFKNIIGDKVDRDD
YRIKIEEIIKLIVLYEDDKTYLKKKIKSAYKNDFTDDEIKKIAALNYKDWGRLSKRFLTGIEGVDKTTGE
KGSIIYFMREYNLNLMELMSGHYTFTEEVEKLNPVENRELCYEMVDELYLSPSVKRMLWQSLRVVDEIKR
IIGKDPKKIFIEMARAKEAKNSRKESRKNKLLEFYKFGKKAFINEIGEERYNYLLNEINSEEESKFRWDN
LYLYYTQLGRCMYSLEPIDLADLKSNNIYDQDHIYPKSKIYDDSLENRVLVKKNLNHEKGNQYPIPEKVL
NKNAYGFWKILFDKGLIGQKKYTRLTRRTPFEERELAEFIERQIVETRQATKETANLLKNICQDSEIVYS
KAENASRFRQEFDIIKCRTVNDLHHMHDAYLNIVVGNVYNTKFTKNPLNFIKDKDNVRSYNLENMFKYDV
VRGSYTAWIADDSEGNVKAATIKKVKRELEGKNYRFTRMSYIGTGGLYDQNLMRKGKGQIPQKENTNKSN
IEKYGGYNKASSAYFALIESDGKAGRERTLETIPIMVYNQEKYGNTEAVDKYLKDNLELQDPKILKDKIK
INSLIKLDGFLYNIKGKTGDSLSIAGSVQLIVNKEEQKLIKKMDKFLVKKKDNKDIKVTSFDNIKEEELI
KLYKTLSDKLNNGIYSNKRNNQAKNISEALDKFKEISIEEKIDVLNQIILLFQSYNNGCNLKSIGLSAKT
GVVFIPKKLNYKECKLINQSITGLFENEVDLLNL
SEQ ID NO: 319
MGKMYYLGLDIGTNSVGYAVTDPSYHLLKFKGEPMWGAHVFAAGNQSAERRSFRTSRRRLDRRQQRVKLV
QEIFAPVISPIDPRFFIRLHESALWRDDVAETDKHIFFNDPTYTDKEYYSDYPTIHHLIVDLMESSEKHD
PRLVYLAVAWLVAHRGHFLNEVDKDNIGDVLSFDAFYPEFLAFLSDNGVSPWVCESKALQATLLSRNSVN
DKYKALKSLIFGSQKPEDNFDANISEDGLIQLLAGKKVKVNKLFPQESNDASFTLNDKEDAIEEILGTLT
PDECEWIAHIRRLFDWAIMKHALKDGRTISESKVKLYEQHHHDLTQLKYFVKTYLAKEYDDIFRNVDSET
TKNYVAYSYHVKEVKGTLPKNKATQEEFCKYVLGKVKNIECSEADKVDFDEMIQRLTDNSFMPKQVSGEN
RVIPYQLYYYELKTILNKAASYLPFLTQCGKDAISNQDKLLSIMTFRIPYFVGPLRKDNSEHAWLERKAG
KIYPWNFNDKVDLDKSEEAFIRRMTNTCTYYPGEDVLPLDSLIYEKFMILNEINNIRIDGYPISVDVKQQ
VFGLFEKKRRVTVKDIQNLLLSLGALDKHGKLTGIDTTIHSNYNTYHHFKSLMERGVLTRDDVERIVERM
TYSDDTKRVRLWLNNNYGTLTADDVKHISRLRKHDFGRLSKMFLTGLKGVHKETGERASILDFMWNTNDN
LMQLLSECYTFSDEITKLQEAYYAKAQLSLNDFLDSMYISNAVKRPIYRTLAVVNDIRKACGTAPKRIFI
EMARDGESKKKRSVTRREQIKNLYRSIRKDFQQEVDFLEKILENKSDGQLQSDALYLYFAQLGRDMYTGD
PIKLEHIKDQSFYNIDHIYPQSMVKDDSLDNKVLVQSEINGEKSSRYPLDAAIRNKMKPLWDAYYNHGLI
SLKKYQRLTRSTPFTDDEKWDFINRQLVETRQSTKALAILLKRKFPDTEIVYSKAGLSSDFRHEFGLVKS
RNINDLHHAKDAFLAIVTGNVYHERFNRRWFMVNQPYSVKTKTLFTHSIKNGNFVAWNGEEDLGRIVKML
KQNKNTIHFTRFSFDRKEGLFDIQPLKASTGLVPRKAGLDVVKYGGYDKSTAAYYLLVRFTLEDKKTQHK
LMMIPVEGLYKARIDHDKEFLTDYAQTTISEILQKDKQKVINIMFPMGTRHIKLNSMISIDGFYLSIGGK
SSKGKSVLCHAMVPLIVPHKIECYIKAMESFARKFKENNKLRIVEKFDKITVEDNLNLYELFLQKLQHNP
YNKFFSTQFDVLTNGRSTFTKLSPEEQVQTLLNILSIFKTCRSSGCDLKSINGSAQAARIMISADLTGLS
KKYSDIRLVEQSASGLFVSKSQNLLEYL
SEQ ID NO: 320
MTKKEQPYNIGLDIGTSSVGWAVTNDNYDLLNIKKKNLWGVRLFEEAQTAKETRLNRSTRRRYRRRKNRI
NWLNEIFSEELAKTDPSFLIRLQNSWVSKKDPDRKRDKYNLFIDGPYTDKEYYREFPTIFHLRKELILNK
DKADIRLIYLALHNILKYRGNFTYEHQKFNISNLNNNLSKELIELNQQLIKYDISFPDDCDWNHISDILI
GRGNATQKSSNILKDFTLDKETKKLLKEVINLILGNVAHLNTIFKTSLTKDEEKLNFSGKDIESKLDDLD
SILDDDQFTVLDAANRIYSTITLNEILNGESYFSMAKVNQYENHAIDLCKLRDMWHTTKNEEAVEQSRQA
YDDYINKPKYGTKELYTSLKKFLKVALPTNLAKEAEEKISKGTYLVKPRNSENGVVPYQLNKIEMEKIID
NQSQYYPFLKENKEKLLSILSFRIPYYVGPLQSAEKNPFAWMERKSNGHARPWNFDEIVDREKSSNKFIR
RMTVTDSYLVGEPVLPKNSLIYQRYEVLNELNNIRITENLKTNPIGSRLTVETKQRIYNELFKKYKKVTV
KKLTKWLIAQGYYKNPILIGLSQKDEFNSTLTTYLDMKKIFGSSFMEDNKNYDQIEELIEWLTIFEDKQI
LNEKLHSSKYSYTPDQIKKISNMRYKGWGRLSKKILMDITTETNTPQLLQLSNYSILDLMWATNNNFISI
MSNDKYDFKNYIENHNLNKNEDQNISDLVNDIHVSPALKRGITQSIKIVQEIVKFMGHAPKHIFIEVTRE
TKKSEITTSREKRIKRLQSKLLNKANDFKPQLREYLVPNKKIQEELKKHKNDLSSERIMLYFLQNGKSLY
SEESLNINKLSDYQVDHILPRTYIPDDSLENKALVLAKENQRKADDLLLNSNVIDRNLERWTYMLNNNMI
GLKKFKNLTRRVITDKDKLGFIHRQLVQTSQMVKGVANILDNMYKNQGTTCIQARANLSTAFRKALSGQD
DTYHFKHPELVKNRNVNDFHHAQDAYLASFLGTYRLRRFPTNEMLLMNGEYNKFYGQVKELYSKKKKLPD
SRKNGFIISPLVNGTTQYDRNTGEIIWNVGFRDKILKIFNYHQCNVTRKTEIKTGQFYDQTIYSPKNPKY
KKLIAQKKDMDPNIYGGFSGDNKSSITIVKIDNNKIKPVAIPIRLINDLKDKKTLQNWLEENVKHKKSIQ
IIKNNVPIGQIIYSKKVGLLSLNSDREVANRQQLILPPEHSALLRLLQIPDEDLDQILAFYDKNILVEIL
QELITKMKKFYPFYKGEREFLIANIENFNQATTSEKVNSLEELITLLHANSTSAHLIFNNIEKKAFGRKT
HGLTLNNTDFIYQSVTGLYETRIHIE
SEQ ID NO: 321
MTKFNKNYSIGLDIGVSSVGYAVVTEDYRVPAFKFKVLGNTEKEKIKKNLIGSTTFVSAQPAKGTRVFRV
NRRRIDRRNHRITYLRDIFQKEIEKVDKNFYRRLDESFRVLGDKSEDLQIKQPFFGDKELETAYHKKYPT
IYHLRKHLADADKNSPVADIREVYMAISHILKYRGHFLTLDKINPNNINMQNSWIDFIESCQEVFDLEIS
DESKNIADIFKSSENRQEKVKKILPYFQQELLKKDKSIFKQLLQLLFGLKTKFKDCFELEEEPDLNFSKE
NYDENLENFLGSLEEDFSDVFAKLKVLRDTILLSGMLTYTGATHARFSATMVERYEEHRKDLQRFKFFIK
QNLSEQDYLDIFGRKTQNGFDVDKETKGYVGYITNKMVLTNPQKQKTIQQNFYDYISGKITGIEGAEYFL
NKISDGTFLRKLRTSDNGAIPNQIHAYELEKIIERQGKDYPFLLENKDKLLSILTFKIPYYVGPLAKGSN
SRFAWIKRATSSDILDDNDEDTRNGKIRPWNYQKLINMDETRDAFITNLIGNDIILLNEKVLPKRSLIYE
EVMLQNELTRVKYKDKYGKAHFFDSELRQNIINGLFKNNSKRVNAKSLIKYLSDNHKDLNAIEIVSGVEK
GKSFNSTLKTYNDLKTIFSEELLDSEIYQKELEEIIKVITVFDDKKSIKNYLTKFFGHLEILDEEKINQL
SKLRYSGWGRYSAKLLLDIRDEDTGFNLLQFLRNDEENRNLTKLISDNTLSFEPKIKDIQSKSTIEDDIF
DEIKKLAGSPAIKRGILNSIKIVDELVQIIGYPPHNIVIEMARENMTTEEGQKKAKTRKTKLESALKNIE
NSLLENGKVPHSDEQLQSEKLYLYYLQNGKDMYTLDKTGSPAPLYLDQLDQYEVDHIIPYSFLPIDSIDN
KVLTHRENNQQKLNNIPDKETVANMKPFWEKLYNAKLISQTKYQRLTTSERTPDGVLTESMKAGFIERQL
VETRQIIKHVARILDNRFSDTKIITLKSQLITNFRNTFHIAKIRELNDYHHAHDAYLAVVVGQTLLKVYP
KLAPELIYGHHAHFNRHEENKATLRKHLYSNIMRFFNNPDSKVSKDIWDCNRDLPIIKDVIYNSQINFVK
RTMIKKGAFYNQNPVGKFNKQLAANNRYPLKTKALCLDTSIYGGYGPMNSALSIIIIAERFNEKKGKIET
VKEFHDIFIIDYEKFNNNPFQFLNDTSENGFLKKNNINRVLGFYRIPKYSLMQKIDGTRMLFESKSNLHK
ATQFKLTKTQNELFFHMKRLLTKSNLMDLKSKSAIKESQNFILKHKEEFDNISNQLSAFSQKMLGNTTSL
KNLIKGYNERKIKEIDIRDETIKYFYDNFIKMFSFVKSGAPKDINDFFDNKCTVARMRPKPDKKLLNATL
IHQSITGLYETRIDLSKLGED
SEQ ID NO: 322
MKQEYFLGLDMGTGSLGWAVTDSTYQVMRKHGKALWGTRLFESASTAEERRMFRTARRRLDRRNWRIQVL
QEIFSEEISKVDPGFFLRMKESKYYPEDKRDAEGNCPELPYALFVDDNYTDKNYHKDYPTIYHLRKMLME
TTEIPDIRLVYLVLHHMMKHRGHFLLSGDISQIKEFKSTFEQLIQNIQDEELEWHISLDDAAIQFVEHVL
KDRNLTRSTKKSRLIKQLNAKSACEKAILNLLSGGTVKLSDIFNNKELDESERPKVSFADSGYDDYIGIV
EAELAEQYYIIASAKAVYDWSVLVEILGNSVSISEAKIKVYQKHQADLKTLKKIVRQYMTKEDYKRVFVD
TEEKLNNYSAYIGMTKKNGKKVDLKSKQCTQADFYDFLKKNVIKVIDHKEITQEIESEIEKENFLPKQVT
KDNGVIPYQVHDYELKKILDNLGTRMPFIKENAEKIQQLFEFRIPYYVGPLNRVDDGKDGKFTWSVRKSD
ARIYPWNFTEVIDVEASAEKFIRRMTNKCTYLVGEDVLPKDSLVYSKFMVLNELNNLRLNGEKISVELKQ
RIYEELFCKYRKVTRKKLERYLVIEGIAKKGVEITGIDGDFKASLTAYHDFKERLTDVQLSQRAKEAIVL
NVVLFGDDKKLLKQRLSKMYPNLTTGQLKGICSLSYQGWGRLSKTFLEEITVPAPGTGEVWNIMTALWQT
NDNLMQLLSRNYGFTNEVEEFNTLKKETDLSYKTVDELYVSPAVKRQIWQTLKVVKEIQKVMGNAPKRVF
VEMAREKQEGKRSDSRKKQLVELYRACKNEERDWITELNAQSDQQLRSDKLFLYYIQKGRCMYSGETIQL
DELWDNTKYDIDHIYPQSKTMDDSLNNRVLVKKNYNAIKSDTYPLSLDIQKKMMSFWKMLQQQGFITKEK
YVRLVRSDELSADELAGFIERQIVETRQSTKAVATILKEALPDTEIVYVKAGNVSNFRQTYELLKVREMN
DLHHAKDAYLNIVVGNAYFVKFTKNAAWFIRNNPGRSYNLKRMFEFDIERSGEIAWKAGNKGSIVTVKKV
MQKNNILVTRKAYEVKGGLFDQQIMKKGKGQVPIKGNDERLADIEKYGGYNKAAGTYFMLVKSLDKKGKE
IRTIEFVPLYLKNQIEINHESAIQYLAQERGLNSPEILLSKIKIDTLFKVDGFKMWLSGRTGNQLIFKGA
NQLILSHQEAAILKGVVKYVNRKNENKDAKLSERDGMTEEKLLQLYDTFLDKLSNTVYSIRLSAQIKTLT
EKRAKFIGLSNEDQCIVLNEILHMFQCQSGSANLKLIGGPGSAGILVMNNNITACKQISVINQSPTGIYE
KEIDLIKL
SEQ ID NO: 323
MKKPYSIGLDIGTNSVGWAVVTDDYKVPAKKMKVLGNTDKSHIEKNLLGALLFDSGNTAEDRRLKRTARR
RYTRRRNRILYLQEIFSEEMGKVDDSFFHRLEDSFLVTEDKRGERHPIFGNLEEEVKYHENFPTIYHLRQ
YLADNPEKVDLRLVYLALAHIIKFRGHFLIEGKFDTRNNDVQRLFQEFLAVYDNTFENSSLQEQNVQVEE
ILTDKISKSAKKDRVLKLFPNEKSNGRFAEFLKLIVGNQADFKKHFELEEKAPLQFSKDTYEEELEVLLA
QIGDNYAELFLSAKKLYDSILLSGILTVTDVGTKAPLSASMIQRYNEHQMDLAQLKQFIRQKLSDKYNEV
FSDVSKDGYAGYIDGKTNQEAFYKYLKGLLNKIEGSGYFLDKIEREDFLRKQRTFDNGSIPHQIHLQEMR
AIIRRQAEFYPFLADNQDRIEKLLTFRIPYYVGPLARGKSDFAWLSRKSADKITPWNFDEIVDKESSAEA
FINRMTNYDLYLPNQKVLPKHSLLYEKFTVYNELTKVKYKTEQGKTAFFDANMKQEIFDGVFKVYRKVTK
DKLMDFLEKEFDEFRIVDLTGLDKENKVFNASYGTYHDLCKILDKDFLDNSKNEKILEDIVLTLTLFEDR
EMIRKRLENYSDLLTKEQVKKLERRHYTGWGRLSAELIHGIRNKESRKTILDYLIDDGNSNRNFMQLIND
DALSFKEEIAKAQVIGETDNLNQVVSDIAGSPAIKKGILQSLKIVDELVKIMGHQPENIVVEMARENQFT
NQGRRNSQQRLKGLTDSIKEFGSQILKEHPVENSQLQNDRLFLYYLQNGRDMYTGEELDIDYLSQYDIDH
IIPQAFIKDNSIDNRVLTSSKENRGKSDDVPSKDVVRKMKSYWSKLLSAKLITQRKFDNLTKAERGGLTD
DDKAGFIKRQLVETRQITKHVARILDERFNTETDENNKKIRQVKIVTLKSNLVSNFRKEFELYKVREIND
YHHAHDAYLNAVIGKALLGVYPQLEPEFVYGDYPHFHGHKENKATAKKFFYSNIMNFFKKDDVRTDKNGE
IIWKKDEHISNIKKVLSYPQVNIVKKVEEQTGGFSKESILPKGNSDKLIPRKTKKFYWDTKKYGGFDSPI
VAYSILVIADIEKGKSKKLKTVKALVGVTIMEKMTFERDPVAFLERKGYRNVQEENIIKLPKYSLFKLEN
GRKRLLASARELQKGNEIVLPNHLGTLLYHAKNIHKVDEPKHLDYVDKHKDEFKELLDVVSNFSKKYTLA
EGNLEKIKELYAQNNGEDLKELASSFINLLTFTAIGAPATFKFFDKNIDRKRYTSTTEILNATLIHQSIT
GLYETRIDLNKLGGD
SEQ ID NO: 324
[sequence omitted]
SEQ ID NO: 325
MTKPYSIGLDIGTNSVGWAVTTDNYKVPSKKMKVLGNTSKKYIKKNLLGVLLFDSGITAEGRRLKRTARR
RYTRRRNRILYLQEIFSTEMATLDDAFFQRLDDSFLVPDDKRDSKYPIFGNLVEEKAYHDEFPTIYHLRK
YLADSTKKADLRLVYLALAHMIKYRGHFLIEGEFNSKNNDIQKNFQDFLDTYNAIFESDLSLENSKQLEE
IVKDKISKLEKKDRILKLFPGEKNSGIFSEFLKLIVGNQADFRKCFNLDEKASLHFSKESYDEDLETLLG
YIGDDYSDVFLKAKKLYDAILLSGFLTVTDNETEAPLSSAMIKRYNEHKEDLALLKEYIRNISLKTYNEV
FKDDTKNGYAGYIDGKTNQEDFYVYLKKLLAEFEGADYFLEKIDREDFLRKQRTFDNGSIPYQIHLQEMR
AILDKQAKFYPFLAKNKERIEKILTFRIPYYVGPLARGNSDFAWSIRKRNEKITPWNFEDVIDKESSAEA
FINRMTSFDLYLPEEKVLPKHSLLYETFNVYNELTKVRFIAESMRDYQFLDSKQKKDIVRLYFKDKRKVT
DKDIIEYLHAIYGYDGIELKGIEKQFNSSLSTYHDLLNIINDKEFLDDSSNEAIIEEIIHTLTIFEDREM
IKQRLSKFENIFDKSVLKKLSRRHYTGWGKLSAKLINGIRDEKSGNTILDYLIDDGISNRNFMQLIHDDA
LSFKKKIQKAQIIGDEDKGNIKEVVKSLPGSPAIKKGILQSIKIVDELVKVMGGRKPESIVVEMARENQY
TNQGKSNSQQRLKRLEKSLKELGSKILKENIPAKLSKIDNNALQNDRLYLYYLQNGKDMYTGDDLDIDRL
SNYDIDHIIPQAFLKDNSIDNKVLVSSASNRGKSDDVPSLEVVKKRKTFWYQLLKSKLISQRKFDNLTKA
ERGGLSPEDKAGFIQRQLVETRQITKHVARLLDEKFNNKKDENNRAVRTVKIITLKSTLVSQFRKDFELY
KVREINDFHHAHDAYLNAVVASALLKKYPKLEPEFVYGDYPKYNSFRERKSATEKVYFYSNIMNIFKKSI
SLADGRVIERPLIEVNEETGESVWNKESDLATVRRVLSYPQVNVVKKVEEQNHGLDRGKPKGLFNANLSS
KPKPNSNENLVGAKEYLDPKKYGGYAGISNSFTVLVKGTIEKGAKKKITNVLEFQGISILDRINYRKDKL
NFLLEKGYKDIELIIELPKYSLFELSDGSRRMLASILSTNNKRGEIHKGNQIFLSQKFVKLLYHAKRISN
TINENHRKYVENHKKEFEELFYYILEFNENYVGAKKNGKLLNSAFQSWQNHSIDELCSSFIGPTGSERKG
LFELTSRGSAADFEFLGVKIPRYRDYTPSSLLKDATLIHQSVTGLYETRIDLAKLGEG
SEQ ID NO: 326
MKKQKFSDYYLGFDIGTNSVGWCVTDLDYNVLRFNKKDMWGSRLFDEAKTAAERRVQRNSRRRLKRRKWR
LNLLEEIFSDEIMKIDSNFFRRLKESSLWLEDKNSKEKFTLFNDDNYKDYDFYKQYPTIFHLRDELIKNP
EKKDIRLIYLALHSIFKSRGHFLFEGQNLKEIKNFETLYNNLISFLEDNGINKSIDKDNIEKLEKIICDS
GKGLKDKEKEFKGIFNSDKQLVAIFKLSVGSSVSLNDLFDTDEYKKEEVEKEKISFREQIYEDDKPIYYS
ILGEKIELLDIAKSFYDFMVLNNILSDSNYISEAKVKLYEEHKKDLKNLKYIIRKYNKENYDKLFKDKNE
NNYPAYIGLNKEKDKKEVVEKSRLKIDDLIKVIKGYLPKPERIEEKDKTIFNEILNKIELKTILPKQRIS
DNGTLPYQIHEVELEKILENQSKYYDFLNYEENGVSTKDKLLKTFKFRIPYYVGPLNSYHKDKGGNSWIV
RKEEGKILPWNFEQKVDIEKSAEEFIKRMTNKCTYLNGEDVIPKDSFLYSEYIILNELNKVQVNDEFLNE
ENKRKIIDELFKENKKVSEKKFKEYLLVNQIANRTVELKGIKDSFNSNYVSYIKFKDIFGEKLNLDIYKE
ISEKSILWKCLYGDDKKIFEKKIKNEYGDILNKDEIKKINSFKFNTWGRLSEKLLTGIEFINLETGECYS
SVMEALRRTNYNLMELLSSKFTLQESIDNENKEMNEVSYRDLIEESYVSPSLKRAILQTLKIYEEIKKIT
GRVPKKVFIEMARGGDESMKNKKIPARQEQLKKLYDSCGNDIANFSIDIKEMKNSLSSYDNNSLRQKKLY
LYYLQFGKCMYTGREIDLDRLLQNNDTYDIDHIYPRSKVIKDDSFDNLVLVLKNENAEKSNEYPVKKEIQ
EKMKSFWRFLKEKNFISDEKYKRLTGKDDFELRGFMARQLVNVRQTTKEVGKILQQIEPEIKIVYSKAEI
ASSFREMFDFIKVRELNDTHHAKDAYLNIVAGNVYNTKFTEKPYRYLQEIKENYDVKKIYNYDIKNAWDK
ENSLEIVKKNMEKNTVNITRFIKEEKGELFNLNPIKKGETSNEIISIKPKLYDGKDNKLNEKYGYYTSLK
AAYFIYVEHEKKNKKVKTFERITRIDSTLIKNEKNLIKYLVSQKKLLNPKIIKKIYKEQTLIIDSYPYTF
TGVDSNKKVELKNKKQLYLEKKYEQILKNALKFVEDNQGETEENYKFIYLKKRNNNEKNETIDAVKERYN
IEFNEMYDKFLEKLSSKDYKNYINNKLYTNFLNSKEKFKKLKLWEKSLILREFLKIFNKNTYGKYEIKDS
QTKEKLFSFPEDTGRIRLGQSSLGNNKELLEESVTGLFVKKIKL
SEQ ID NO: 327
MKNYTIGLDIGVASVGWVCIDENYKILNYNNRHAFGVHEFESAESAAGRRLKRGMRRRYNRRKKRLQLLQ
SLFDSYITDSGFFSKTDSQHFWKNNNEFENRSLTEVLSSLRISSRKYPTIYHLRSDLIESNKKMDLRLVY
LALHNLVKYRGHFLQEGNWSEAASAEGMDDQLLELVTRYAELENLSPLDLSESQWKAAETLLLNRNLTKT
DQSKELTAMFGKEYEPFCKLVAGLGVSLHQLFPSSEQALAYKETKTKVQLSNENVEEVMELLLEEESALL
EAVQPFYQQVVLYELLKGETYVAKAKVSAFKQYQKDMASLKNLLDKTFGEKVYRSYFISDKNSQREYQKS
HKVEVLCKLDQFNKEAKFAETFYKDLKKLLEDKSKTSIGTTEKDEMLRIIKAIDSNQFLQKQKGIQNAAI
PHQNSLYEAEKILRNQQAHYPFITTEWIEKVKQILAFRIPYYIGPLVKDTTQSPFSWVERKGDAPITPWN
FDEQIDKAASAEAFISRMRKTCTYLKGQEVLPKSSLTYERFEVLNELNGIQLRTTGAESDFRHRLSYEMK
CWIIDNVFKQYKTVSTKRLLQELKKSPYADELYDEHTGEIKEVFGTQKENAFATSLSGYISMKSILGAVV
DDNPAMTEELIYWIAVFEDREILHLKIQEKYPSITDVQRQKLALVKLPGWGRFSRLLIDGLPLDEQGQSV
LDHMEQYSSVFMEVLKNKGFGLEKKIQKMNQHQVDGTKKIRYEDIEELAGSPALKRGIWRSVKIVEELVS
IFGEPANIVLEVAREDGEKKRTKSRKDQWEELTKTTLKNDPDLKSFIGEIKSQGDQRFNEQRFWLYVTQQ
GKCLYTGKALDIQNLSMYEVDHILPQNFVKDDSLDNLALVMPEANQRKNQVGQNKMPLEIIEANQQYAMR
TLWERLHELKLISSGKLGRLKKPSFDEVDKDKFIARQLVETRQIIKHVRDLLDERFSKSDIHLVKAGIVS
KFRRFSEIPKIRDYNNKHHAMDALFAAALIQSILGKYGKNFLAFDLSKKDRQKQWRSVKGSNKEFFLFKN
FGNLRLQSPVTGEEVSGVEYMKHVYFELPWQTTKMTQTGDGMFYKESIFSPKVKQAKYVSPKTEKFVHDE
VKNHSICLVEFTFMKKEKEVQETKFIDLKVIEHHQFLKEPESQLAKFLAEKETNSPIIHARIIRTIPKYQ
KIWIEHFPYYFISTRELHNARQFEISYELMEKVKQLSERSSVEELKIVFGLLIDQMNDNYPIYTKSSIQD
RVQKFVDTQLYDFKSFEIGFEELKKAVAANAQRSDTFGSRISKKPKPEEVAIGYESITGLKYRKPRSVVG
TKR
SEQ ID NO: 328
MKKEIKDYFLGLDVGTGSVGWAVTDTDYKLLKANRKDLWGMRCFETAETAEVRRLHRGARRRIERRKKRI
KLLQELFSQEIAKTDEGFFQRMKESPFYAEDKTILQENTLFNDKDFADKTYHKAYPTINHLIKAWIENKV
KPDPRLLYLACHNIIKKRGHFLFEGDFDSENQFDTSIQALFEYLREDMEVDIDADSQKVKEILKDSSLKN
SEKQSRLNKILGLKPSDKQKKAITNLISGNKINFADLYDNPDLKDAEKNSISFSKDDFDALSDDLASILG
DSFELLLKAKAVYNCSVLSKVIGDEQYLSFAKVKIYEKHKTDLTKLKNVIKKHFPKDYKKVFGYNKNEKN
NNNYSGYVGVCKTKSKKLIINNSVNQEDFYKFLKTILSAKSEIKEVNDILTEIETGTFLPKQISKSNAEI
PYQLRKMELEKILSNAEKHFSFLKQKDEKGLSHSEKIIMLLTFKIPYYIGPINDNHKKFFPDRCWVVKKE
KSPSGKTTPWNFFDHIDKEKTAEAFITSRTNFCTYLVGESVLPKSSLLYSEYTVLNEINNLQIIIDGKNI
CDIKLKQKIYEDLFKKYKKITQKQISTFIKHEGICNKTDEVIILGIDKECTSSLKSYIELKNIFGKQVDE
ISTKNMLEEIIRWATIYDEGEGKTILKTKIKAEYGKYCSDEQIKKILNLKFSGWGRLSRKFLETVTSEMP
GFSEPVNIITAMRETQNNLMELLSSEFTFTENIKKINSGFEDAEKQFSYDGLVKPLFLSPSVKKMLWQTL
KLVKEISHITQAPPKKIFIEMAKGAELEPARTKTRLKILQDLYNNCKNDADAFSSEIKDLSGKIENEDNL
RLRSDKLYLYYTQLGKCMYCGKPIEIGHVFDTSNYDIDHIYPQSKIKDDSISNRVLVCSSCNKNKEDKYP
LKSEIQSKQRGFWNFLQRNNFISLEKLNRLTRATPISDDETAKFIARQLVETRQATKVAAKVLEKMFPET
KIVYSKAETVSMFRNKFDIVKCREINDFHHAHDAYLNIVVGNVYNTKFTNNPWNFIKEKRDNPKIADTYN
YYKVFDYDVKRNNITAWEKGKTIITVKDMLKRNTPIYTRQAACKKGELFNQTIMKKGLGQHPLKKEGPFS
NISKYGGYNKVSAAYYTLIEYEEKGNKIRSLETIPLYLVKDIQKDQDVLKSYLTDLLGKKEFKILVPKIK
INSLLKINGFPCHITGKTNDSFLLRPAVQFCCSNNEVLYFKKIIRFSEIRSQREKIGKTISPYEDLSFRS
YIKENLWKKTKNDEIGEKEFYDLLQKKNLEIYDMLLTKHKDTIYKKRPNSATIDILVKGKEKFKSLIIEN
QFEVILEILKLFSATRNVSDLQHIGGSKYSGVAKIGNKISSLDNCILIYQSITGIFEKRIDLLKV
SEQ ID NO: 329
MEGQMKNNGNNLQQGNYYLGLDVGTSSVGWAVTDTDYNVLKFRGKSMWGARLFDEASTAEERRTHRGNRR
RLARRKYRLLLLEQLFEKEIRKIDDNFFVRLHESNLWADDKSKPSKFLLFNDTNFTDKDYLKKYPTIYHL
RSDLIHNSTEHDIRLVFLALHHLIKYRGHFIYDNSANGDVKTLDEAVSDFEEYLNENDIEFNIENKKEFI
NVLSDKHLTKKEKKISLKKLYGDITDSENINISVLIEMLSGSSISLSNLFKDIEFDGKQNLSLDSDIEET
LNDVVDILGDNIDLLIHAKEVYDIAVLTSSLGKHKYLCDAKVELFEKNKKDLMILKKYIKKNHPEDYKKI
FSSPTEKKNYAAYSQTNSKNVCSQEEFCLFIKPYIRDMVKSENEDEVRIAKEVEDKSFLTKLKGTNNSVV
PYQIHERELNQILKNIVAYLPFMNDEQEDISVVDKIKLIFKFKIPYYVGPLNTKSTRSWVYRSDEKIYPW
NFSNVIDLDKTAHEFMNRLIGRCTYTNDPVLPMDSLLYSKYNVLNEINPIKVNGKAIPVEVKQAIYTDLF
ENSKKKVTRKSIYIYLLKNGYIEKEDIVSGIDIEIKSKLKSHHDFTQIVQENKCTPEEIERIIKGILVYS
DDKSMLRRWLKNNIKGLSENDVKYLAKLNYKEWGRLSKTLLTDIYTINPEDGEACSILDIMWNTNATLME
ILSNEKYQFKQNIENYKAENYDEKQNLHEELDDMYISPAARRSIWQALRIVDEIVDIKKSAPKKIFIEMA
REKKSAMKKKRTESRKDTLLELYKSCKSQADGFYDEELFEKLSNESNSRLRRDQLYLYYTQMGRSMYTGK
RIDFDKLINDKNTYDIDHIYPRSKIKDDSITNRVLVEKDINGEKTDIYPISEDIRQKMQPFWKILKEKGL
INEEKYKRLTRNYELTDEELSSFVARQLVETQQSTKALATLLKKEYPSAKIVYSKAGNVSEFRNRKDKEL
PKFREINDLHHAKDAYLNIVVGNVYDTKFTEKFFNNIRNENYSLKRVFDFSVPGAWDAKGSTFNTIKKYM
AKNNPIIAFAPYEVKGELFDQQIVPKGKGQFPIKQGKDIEKYGGYNKLSSAFLFAVEYKGKKARERSLET
VYIKDVELYLQDPIKYCESVLGLKEPQIIKPKILMGSLFSINNKKLVVTGRSGKQYVCHHIYQLSINDED
SQYLKNIAKYLQEEPDGNIERQNILNITSVNNIKLFDVLCTKFNSNTYEIILNSLKNDVNEGREKFSELD
ILEQCNILLQLLKAFKCNRESSNLEKLNNKKQAGVIVIPHLFTKCSVFKVIHQSITGLFEKEMDLLK
SEQ ID NO: 330
MGRKPYILSLDIGTGSVGYACMDKGFNVLKYHDKDALGVYLFDGALTAQERRQFRTSRRRKNRRIKRLGL
LQELLAPLVQNPNFYQFQRQFAWKNDNMDFKNKSLSEVLSFLGYESKKYPTIYHLQEALLLKDEKFDPEL
IYMALYHLVKYRGHFLFDHLKIENLTNNDNMHDFVELIETYENLNNIKLNLDYEKTKVIYEILKDNEMTK
NDRAKRVKNMEKKLEQFSIMLLGLKFNEGKLFNHADNAEELKGANQSHTFADNYEENLTPFLTVEQSEFI
ERANKIYLSLTLQDILKGKKSMAMSKVAAYDKFRNELKQVKDIVYKADSTRTQFKKIFVSSKKSLKQYDA
TPNDQTFSSLCLFDQYLIRPKKQYSLLIKELKKIIPQDSELYFEAENDTLLKVLNTTDNASIPMQINLYE
AETILRNQQKYHAEITDEMIEKVLSLIQFRIPYYVGPLVNDHTASKFGWMERKSNESIKPWNFDEVVDRS
KSATQFIRRMTNKCSYLINEDVLPKNSLLYQEMEVLNELNATQIRLQTDPKNRKYRMMPQIKLFAVEHIF
KKYKTVSHSKFLEIMLNSNHRENFMNHGEKLSIFGTQDDKKFASKLSSYQDMTKIFGDIEGKRAQIEEII
QWITIFEDKKILVQKLKECYPELTSKQINQLKKLNYSGWGRLSEKLLTHAYQGHSIIELLRHSDENFMEI
LTNDVYGFQNFIKEENQVQSNKIQHQDIANLTTSPALKKGIWSTIKLVRELTSIFGEPEKIIMEFATEDQ
QKGKKQKSRKQLWDDNIKKNKLKSVDEYKYIIDVANKLNNEQLQQEKLWLYLSQNGKCMYSGQSIDLDAL
LSPNATKHYEVDHIFPRSFIKDDSIDNKVLVIKKMNQTKGDQVPLQFIQQPYERIAYWKSLNKAGLISDS
KLHKLMKPEFTAMDKEGFIQRQLVETRQISVHVRDFLKEEYPNTKVIPMKAKMVSEFRKKFDIPKIRQMN
DAHHAIDAYLNGVVYHGAQLAYPNVDLFDFNFKWEKVREKWKALGEFNTKQKSRELFFFKKLEKMEVSQG
ERLISKIKLDMNHFKINYSRKLANIPQQFYNQTAVSPKTAELKYESNKSNEVVYKGLTPYQTYVVAIKSV
NKKGKEKMEYQMIDHYVFDFYKFQNGNEKELALYLAQRENKDEVLDAQIVYSLNKGDLLYINNHPCYFVS
RKEVINAKQFELTVEQQLSLYNVMNNKETNVEKLLIEYDFIAEKVINEYHHYLNSKLKEKRVRTFFSESN
QTHEDFIKALDELFKVVTASATRSDKIGSRKNSMTHRAFLGKGKDVKIAYTSISGLKTTKPKSLFKLAES
RNEL
SEQ ID NO: 331
MAKILGLDLGTNSIGWAVVERENIDFSLIDKGVRIFSEGVKSEKGIESSRAAERTGYRSARKIKYRRKLR
KYETLKVLSLNRMCPLSIEEVEEWKKSGFKDYPLNPEFLKWLSTDEESNVNPYFFRDRASKHKVSLFELG
RAFYHIAQRRGFLSNRLDQSAEGILEEHCPKIEAIVEDLISIDEISTNITDYFFETGILDSNEKNGYAKD
LDEGDKKLVSLYKSLLAILKKNESDFENCKSEIIERLNKKDVLGKVKGKIKDISQAMLDGNYKTLGQYFY
SLYSKEKIRNQYTSREEHYLSEFITICKVQGIDQINEEEKINEKKFDGLAKDLYKAIFFQRPLKSQKGLI
GKCSFEKSKSRCAISHPDFEEYRMWTYLNTIKIGTQSDKKLRFLTQDEKLKLVPKFYRKNDFNFDVLAKE
LIEKGSSFGFYKSSKKNDFFYWFNYKPTDTVAACQVAASLKNAIGEDWKTKSFKYQTINSNKEQVSRTVD
YKDLWHLLTVATSDVYLYEFAIDKLGLDEKNAKAFSKTKLKKDFASLSLSAINKILPYLKEGLLYSHAVF
VANIENIVDENIWKDEKQRDYIKTQISEIIENYTLEKSRFEIINGLLKEYKSENEDGKRVYYSKEAEQSF
ENDLKKKLVLFYKSNEIENKEQQETIFNELLPIFIQQLKDYEFIKIQRLDQKVLIFLKGKNETGQIFCTE
EKGTAEEKEKKIKNRLKKLYHPSDIEKFKKKIIKDEFGNEKIVLGSPLTPSIKNPMAMRALHQLRKVLNA
LILEGQIDEKTIIHIEMARELNDANKRKGIQDYQNDNKKFREDAIKEIKKLYFEDCKKEVEPTEDDILRY
QLWMEQNRSEIYEEGKNISICDIIGSNPAYDIEHTIPRSRSQDNSQMNKTLCSQRFNREVKKQSMPIELN
NHLEILPRIAHWKEEADNLTREIEIISRSIKAAATKEIKDKKIRRRHYLTLKRDYLQGKYDRFIWEEPKV
GFKNSQIPDTGIITKYAQAYLKSYFKKVESVKGGMVAEFRKIWGIQESFIDENGMKHYKVKDRSKHTHHT
IDAITIACMTKEKYDVLAHAWTLEDQQNKKEARSIIEASKPWKTFKEDLLKIEEEILVSHYTPDNVKKQA
KKIVRVRGKKQFVAEVERDVNGKAVPKKAASGKTIYKLDGEGKKLPRLQQGDTIRGSLHQDSIYGAIKNP
LNTDEIKYVIRKDLESIKGSDVESIVDEVVKEKIKEAIANKVLLLSSNAQQKNKLVGTVWMNEEKRIAIN
KVRIYANSVKNPLHIKEHSLLSKSKHVHKQKVYGQNDENYAMAIYELDGKRDFELINIFNLAKLIKQGQG
FYPLHKKKEIKGKIVFVPIEKRNKRDVVLKRGQQVVFYDKEVENPKDISEIVDFKGRIYIIEGLSIQRIV
RPSGKVDEYGVIMLRYFKEARKADDIKQDNFKPDGVFKLGENKPTRKMNHQFTAFVEGIDFKVLPSGKFE
KI
SEQ ID NO: 332
MEFKKVLGLDIGTNSIGCALLSLPKSIQDYGKGGRLEWLTSRVIPLDADYMKAFIDGKNGLPQVITPAGK
RRQKRGSRRLKHRYKLRRSRLIRVFKTLNWLPEDFPLDNPKRIKETISTEGKFSFRISDYVPISDESYRE
FYREFGYPENEIEQVIEEINFRRKTKGKNKNPMIKLLPEDWVVYYLRKKALIKPTTKEELIRIIYLFNQR
RGFKSSRKDLTETAILDYDEFAKRLAEKEKYSAENYETKFVSITKVKEVVELKTDGRKGKKRFKVILEDS
RIEPYEIERKEKPDWEGKEYTFLVTQKLEKGKFKQNKPDLPKEEDWALCTTALDNRMGSKHPGEFFFDEL
LKAFKEKRGYKIRQYPVNRWRYKKELEFIWTKQCQLNPELNNLNINKEILRKLATVLYPSQSKFFGPKIK
EFENSDVLHIISEDIIYYQRDLKSQKSLISECRYEKRKGIDGEIYGLKCIPKSSPLYQEFRIWQDIHNIK
VIRKESEVNGKKKINIDETQLYINENIKEKLFELFNSKDSLSEKDILELISLNIINSGIKISKKEEETTH
RINLFANRKELKGNETKSRYRKVFKKLGFDGEYILNHPSKLNRLWHSDYSNDYADKEKTEKSILSSLGWK
NRNGKWEKSKNYDVFNLPLEVAKAIANLPPLKKEYGSYSALAIRKMLVVMRDGKYWQHPDQIAKDQENTS
LMLFDKNLIQLTNNQRKVLNKYLLTLAEVQKRSTLIKQKLNEIEHNPYKLELVSDQDLEKQVLKSFLEKK
NESDYLKGLKTYQAGYLIYGKHSEKDVPIVNSPDELGEYIRKKLPNNSLRNPIVEQVIRETIFIVRDVWK
SFGIIDEIHIELGRELKNNSEERKKTSESQEKNFQEKERARKLLKELLNSSNFEHYDENGNKIFSSFTVN
PNPDSPLDIEKFRIWKNQSGLTDEELNKKLKDEKIPTEIEVKKYILWLTQKCRSPYTGKIIPLSKLFDSN
VYEIEHIIPRSKMKNDSTNNLVICELGVNKAKGDRLAANFISESNGKCKFGEVEYTLLKYGDYLQYCKDT
FKYQKAKYKNLLATEPPEDFIERQINDTRYIGRKLAELLTPVVKDSKNIIFTIGSITSELKITWGLNGVW
KDILRPRFKRLESIINKKLIFQDEDDPNKYHFDLSINPQLDKEGLKRLDHRHHALDATIIAATTREHVRY
LNSLNAADNDEEKREYFLSLCNHKIRDFKLPWENFTSEVKSKLLSCVVSYKESKPILSDPFNKYLKWEYK
NGKWQKVFAIQIKNDRWKAVRRSMFKEPIGTVWIKKIKEVSLKEAIKIQAIWEEVKNDPVRKKKEKYIYD
DYAQKVIAKIVQELGLSSSMRKQDDEKLNKFINEAKVSAGVNKNLNTTNKTIYNLEGRFYEKIKVAEYVL
YKAKRMPLNKKEYIEKLSLQKMFNDLPNFILEKSILDNYPEILKELESDNKYIIEPHKKNNPVNRLLLEH
ILEYHNNPKEAFSTEGLEKLNKKAINKIGKPIKYITRLDGDINEEEIFRGAVFETDKGSNVYFVMYENNQ
TKDREFLKPNPSISVLKAIEHKNKIDFFAPNRLGFSRIILSPGDLVYVPTNDQYVLIKDNSSNETIINWD
DNEFISNRIYQVKKFTGNSCYFLKNDIASLILSYSASNGVGEFGSQNISEYSVDDPPIRIKDVCIKIRVD
RLGNVRPL
SEQ ID NO: 333
MKHILGLDLGTNSIGWALIERNIEEKYGKIIGMGSRIVPMGAELSKFEQGQAQTKNADRRTNRGARRLNK
RYKQRRNKLIYILQKLDMLPSQIKLKEDFSDPNKIDKITILPISKKQEQLTAFDLVSLRVKALTEKVGLE
DLGKIIYKYNQLRGYAGGSLEPEKEDIFDEEQSKDKKNKSFIAFSKIVFLGEPQEEIFKNKKLNRRAIIV
ETEEGNFEGSTFLENIKVGDSLELLINISASKSGDTITIKLPNKTNWRKKMENIENQLKEKSKEMGREFY
ISEFLLELLKENRWAKIRNNTILRARYESEFEAIWNEQVKHYPFLENLDKKTLIEIVSFIFPGEKESQKK
YRELGLEKGLKYIIKNQVVFYQRELKDQSHLISDCRYEPNEKAIAKSHPVFQEYKVWEQINKLIVNTKIE
AGTNRKGEKKYKYIDRPIPTALKEWIFEELQNKKEITFSAIFKKLKAEFDLREGIDFLNGMSPKDKLKGN
ETKLQLQKSLGELWDVLGLDSINRQIELWNILYNEKGNEYDLTSDRTSKVLEFINKYGNNIVDDNAEETA
IRISKIKFARAYSSLSLKAVERILPLVRAGKYFNNDFSQQLQSKILKLLNENVEDPFAKAAQTYLDNNQS
VLSEGGVGNSIATILVYDKHTAKEYSHDELYKSYKEINLLKQGDLRNPLVEQIINEALVLIRDIWKNYGI
KPNEIRVELARDLKNSAKERATIHKRNKDNQTINNKIKETLVKNKKELSLANIEKVKLWEAQRHLSPYTG
QPIPLSDLFDKEKYDVDHIIPISRYFDDSFTNKVISEKSVNQEKANRTAMEYFEVGSLKYSIFTKEQFIA
HVNEYFSGVKRKNLLATSIPEDPVQRQIKDTQYIAIRVKEELNKIVGNENVKTTTGSITDYLRNHWGLTD
KFKLLLKERYEALLESEKFLEAEYDNYKKDFDSRKKEYEEKEVLFEEQELTREEFIKEYKENYIRYKKNK
LIIKGWSKRIDHRHHAIDALIVACTEPAHIKRLNDLNKVLQDWLVEHKSEFMPNFEGSNSELLEEILSLP
ENERTEIFTQIEKFRAIEMPWKGFPEQVEQKLKEIIISHKPKDKLLLQYNKAGDRQIKLRGQLHEGTLYG
ISQGKEAYRIPLTKFGGSKFATEKNIQKIVSPFLSGFIANHLKEYNNKKEEAFSAEGIMDLNNKLAQYRN
EKGELKPHTPISTVKIYYKDPSKNKKKKDEEDLSLQKLDREKAFNEKLYVKTGDNYLFAVLEGEIKTKKT
SQIKRLYDIISFFDATNFLKEEFRNAPDKKTFDKDLLFRQYFEERNKAKLLFTLKQGDFVYLPNENEEVI
LDKESPLYNQYWGDLKERGKNIYVVQKFSKKQIYFIKHTIADIIKKDVEFGSQNCYETVEGRSIKENCFK
LEIDRLGNIVKVIKR
SEQ ID NO: 334
MHVEIDFPHFSRGDSHLAMNKNEILRGSSVLYRLGLDLGSNSLGWFVTHLEKRGDRHEPVALGPGGVRIF
PDGRDPQSGTSNAVDRRMARGARKRRDRFVERRKELIAALIKYNLLPDDARERRALEVLDPYALRKTALT
DTLPAHHVGRALFHLNQRRGFQSNRKTDSKQSEDGAIKQAASRLATDKGNETLGVFFADMHLRKSYEDRQ
TAIRAELVRLGKDHLTGNARKKIWAKVRKRLFGDEVLPRADAPHGVRARATITGTKASYDYYPTRDMLRD
EFNAIWAGQSAHHATITDEARTEIEHIIFYQRPLKPAIVGKCTLDPATRPFKEDPEGYRAPWSHPLAQRF
RILSEARNLEIRDTGKGSRRLTKEQSDLVVAALLANREVKFDKLRTLLKLPAEARFNLESDRRAALDGDQ
TAARLSDKKGFNKAWRGFPPERQIAIVARLEETEDENELIAWLEKECALDGAAAARVANTTLPDGHCRLG
LRAIKKIVPIMQDGLDEDGVAGAGYHIAAKRAGYDHAKLPTGEQLGRLPYYGQWLQDAVVGSGDARDQKE
KQYGQFPNPTVHIGLGQLRRVVNDLIDKYGPPTEISIEFTRALKLSEQQKAERQREQRRNQDKNKARAEE
LAKFGRPANPRNLLKMRLWEELAHDPLDRKCVYTGEQISIERLLSDEVDIDHILPVAMTLDDSPANKIIC
MRYANRHKRKQTPSEAFGSSPTLQGHRYNWDDIAARATGLPRNKRWRFDANAREEFDKRGGFLARQLNET
GWLARLAKQYLGAVTDPNQIWVVPGRLTSMLRGKWGLNGLLPSDNYAGVQDKAEEFLASTDDMEFSGVKN
RADHRHHAIDGLVTALTDRSLLWKMANAYDEEHEKFVIEPPWPTMRDDLKAALEKMVVSHKPDHGIEGKL
HEDSAYGFVKPLDATGLKEEEAGNLVYRKAIESLNENEVDRIRDIQLRTIVRDHVNVEKTKGVALADALR
QLQAPSDDYPQFKHGLRHVRILKKEKGDYLVPIANRASGVAYKAYSAGENFCVEVFETAGGKWDGEAVRR
FDANKKNAGPKIAHAPQWRDANEGAKLVMRIHKGDLIRLDHEGRARIMVVHRLDAAAGRFKLADHNETGN
LDKRHATNNDIDPFRWLMASYNTLKKLAAVPVRVDELGRVWRVMPN
SEQ ID NO: 335
METTLGIDLGTNSIGLALVDQEEHQILYSGVRIFPEGINKDTIGLGEKEESRNATRRAKRQMRRQYFRKK
LRKAKLLELLIAYDMCPLKPEDVRRWKNWDKQQKSTVRQFPDTPAFREWLKQNPYELRKQAVTEDVTRPE
LGRILYQMIQRRGFLSSRKGKEEGKIFTGKDRMVGIDETRKNLQKQTLGAYLYDIAPKNGEKYRFRTERV
RARYTLRDMYIREFEIIWQRQAGHLGLAHEQATRKKNIFLEGSATNVRNSKLITHLQAKYGRGHVLIEDT
RITVTFQLPLKEVLGGKIEIEEEQLKFKSNESVLFWQRPLRSQKSLLSKCVFEGRNFYDPVHQKWIIAGP
TPAPLSHPEFEEFRAYQFINNIIYGKNEHLTAIQREAVFELMCTESKDFNFEKIPKHLKLFEKFNFDDTT
KVPACTTISQLRKLFPHPVWEEKREEIWHCFYFYDDNTLLFEKLQKDYALQTNDLEKIKKIRLSESYGNV
SLKAIRRINPYLKKGYAYSTAVLLGGIRNSFGKRFEYFKEYEPEIEKAVCRILKEKNAEGEVIRKIKDYL
VHNRFGFAKNDRAFQKLYHHSQAITTQAQKERLPETGNLRNPIVQQGLNELRRTVNKLLATCREKYGPSF
KFDHIHVEMGRELRSSKTEREKQSRQIRENEKKNEAAKVKLAEYGLKAYRDNIQKYLLYKEIEEKGGTVC
CPYTGKTLNISHTLGSDNSVQIEHIIPYSISLDDSLANKTLCDATFNREKGELTPYDFYQKDPSPEKWGA
SSWEEIEDRAFRLLPYAKAQRFIRRKPQESNEFISRQLNDTRYISKKAVEYLSAICSDVKAFPGQLTAEL
RHLWGLNNILQSAPDITFPLPVSATENHREYYVITNEQNEVIRLFPKQGETPRTEKGELLLTGEVERKVF
RCKGMQEFQTDVSDGKYWRRIKLSSSVTWSPLFAPKPISADGQIVLKGRIEKGVFVCNQLKQKLKTGLPD
GSYWISLPVISQTFKEGESVNNSKLTSQQVQLFGRVREGIFRCHNYQCPASGADGNFWCTLDTDTAQPAF
TPIKNAPPGVGGGQIILTGDVDDKGIFHADDDLHYELPASLPKGKYYGIFTVESCDPTLIPIELSAPKTS
KGENLIEGNIWVDEHTGEVRFDPKKNREDQRHHAIDAIVIALSSQSLFQRLSTYNARRENKKRGLDSTEH
FPSPWPGFAQDVRQSVVPLLVSYKQNPKTLCKISKTLYKDGKKIHSCGNAVRGQLHKETVYGQRTAPGAT
EKSYHIRKDIRELKTSKHIGKVVDITIRQMLLKHLQENYHIDITQEFNIPSNAFFKEGVYRIFLPNKHGE
PVPIKKIRMKEELGNAERLKDNINQYVNPRNNHHVMIYQDADGNLKEEIVSFWSVIERQNQGQPIYQLPR
EGRNIVSILQINDTFLIGLKEEEPEVYRNDLSTLSKHLYRVQKLSGMYYTFRHHLASTLNNEREEFRIQS
LEAWKRANPVKVQIDEIGRITFLNGPLC
SEQ ID NO: 336
MESSQILSPIGIDLGGKFTGVCLSHLEAFAELPNHANTKYSVILIDHNNFQLSQAQRRATRHRVRNKKRN
QFVKRVALQLFQHILSRDLNAKEETALCHYLNNRGYTYVDTDLDEYIKDETTINLLKELLPSESEHNFID
WFLQKMQSSEFRKILVSKVEEKKDDKELKNAVKNIKNFITGFEKNSVEGHRHRKVYFENIKSDITKDNQL
DSIKKKIPSVCLSNLLGHLSNLQWKNLHRYLAKNPKQFDEQTFGNEFLRMLKNFRHLKGSQESLAVRNLI
QQLEQSQDYISILEKTPPEITIPPYEARTNTGMEKDQSLLLNPEKLNNLYPNWRNLIPGIIDAHPFLEKD
LEHTKLRDRKRIISPSKQDEKRDSYILQRYLDLNKKIDKFKIKKQLSFLGQGKQLPANLIETQKEMETHF
NSSLVSVLIQIASAYNKEREDAAQGIWFDNAFSLCELSNINPPRKQKILPLLVGAILSEDFINNKDKWAK
FKIFWNTHKIGRTSLKSKCKEIEEARKNSGNAFKIDYEEALNHPEHSNNKALIKIIQTIPDIIQAIQSHL
GHNDSQALIYHNPFSLSQLYTILETKRDGFHKNCVAVTCENYWRSQKTEIDPEISYASRLPADSVRPFDG
VLARMMQRLAYEIAMAKWEQIKHIPDNSSLLIPIYLEQNRFEFEESFKKIKGSSSDKTLEQAIEKQNIQW
EEKFQRIINASMNICPYKGASIGGQGEIDHIYPRSLSKKHFGVIFNSEVNLIYCSSQGNREKKEEHYLLE
HLSPLYLKHQFGTDNVSDIKNFISQNVANIKKYISFHLLTPEQQKAARHALFLDYDDEAFKTITKFLMSQ
QKARVNGTQKFLGKQIMEFLSTLADSKQLQLEFSIKQITAEEVHDHRELLSKQEPKLVKSRQQSFPSHAI
DATLTMSIGLKEFPQFSQELDNSWFINHLMPDEVHLNPVRSKEKYNKPNISSTPLFKDSLYAERFIPVWV
KGETFAIGFSEKDLFEIKPSNKEKLFTLLKTYSTKNPGESLQELQAKSKAKWLYFPINKTLALEFLHHYF
HKEIVTPDDTTVCHFINSLRYYTKKESITVKILKEPMPVLSVKFESSKKNVLGSFKHTIALPATKDWERL
FNHPNFLALKANPAPNPKEFNEFIRKYFLSDNNPNSDIPNNGHNIKPQKHKAVRKVFSLPVIPGNAGTMM
RIRRKDNKGQPLYQLQTIDDTPSMGIQINEDRLVKQEVLMDAYKTRNLSTIDGINNSEGQAYATFDNWLT
LPVSTFKPEIIKLEMKPHSKTRRYIRITQSLADFIKTIDEALMIKPSDSIDDPLNMPNEIVCKNKLFGNE
LKPRDGKMKIVSTGKIVTYEFESDSTPQWIQTLYVTQLKKQP
SEQ ID NO: 337
MKKIVGLDLGTNSIGWALINAYINKEHLYGIEACGSRIIPMDAAILGNFDKGNSISQTADRTSYRGIRRL
RERHLLRRERLHRILDLLGFLPKHYSDSLNRYGKFLNDIECKLPWVKDETGSYKFIFQESFKEMLANFTE
HHPILIANNKKVPYDWTIYYLRKKALTQKISKEELAWILLNFNQKRGYYQLRGEEEETPNKLVEYYSLKV
EKVEDSGERKGKDTWYNVHLENGMIYRRTSNIPLDWEGKTKEFIVTTDLEADGSPKKDKEGNIKRSFRAP
KDDDWTLIKKKTEADIDKIKMTVGAYIYDTLLQKPDQKIRGKLVRTIERKYYKNELYQILKTQSEFHEEL
RDKQLYIACLNELYPNNEPRRNSISTRDFCHLFIEDIIFYQRPLKSKKSLIDNCPYEENRYIDKESGEIK
HASIKCIAKSHPLYQEFRLWQFIVNLRIYRKETDVDVTQELLPTEADYVTLFEWLNEKKEIDQKAFFKYP
PFGFKKTTSNYRWNYVEDKPYPCNETHAQIIARLGKAHIPKAFLSKEKEETLWHILYSIEDKQEIEKALH
SFANKNNLSEEFIEQFKNFPPFKKEYGSYSAKAIKKLLPLMRMGKYWSIENIDNGTRIRINKIIDGEYDE
NIRERVRQKAINLTDITHFRALPLWLACYLVYDRHSEVKDIVKWKTPKDIDLYLKSFKQHSLRNPIVEQV
ITETLRTVRDIWQQVGHIDEIHIELGREMKNPADKRARMSQQMIKNENTNLRIKALLTEFLNPEFGIENV
RPYSPSQQDLLRIYEEGVLNSILELPEDIGIILGKFNQTDTLKRPTRSEILRYKLWLEQKYRSPYTGEMI
PLSKLFTPAYEIEHIIPQSRYFDDSLSNKVICESEINKLKDRSLGYEFIKNHHGEKVELAFDKPVEVLSV
EAYEKLVHESYSHNRSKMKKLLMEDIPDQFIERQLNDSRYISKVVKSLLSNIVREENEQEAISKNVIPCT
GGITDRLKKDWGINDVWNKIVLPRFIRLNELTESTRFTSINTNNTMIPSMPLELQKGFNKKRIDHRHHAM
DAIIIACANRNIVNYLNNVSASKNTKITRRDLQTLLCHKDKTDNNGNYKWVIDKPWETFTQDTLTALQKI
TVSFKQNLRVINKTTNHYQHYENGKKIVSNQSKGDSWAIRKSMHKETVHGEVNLRMIKTVSFNEALKKPQ
AIVEMDLKKKILAMLELGYDTKRIKNYFEENKDTWQDINPSKIKVYYFTKETKDRYFAVRKPIDTSFDKK
KIKESITDTGIQQIMLRHLETKDNDPTLAFSPDGIDEMNRNILILNKGKKHQPIYKVRVYEKAEKFTVGQ
KGNKRTKFVEAAKGTNLFFAIYETEEIDKDTKKVIRKRSYSTIPLNVVIERQKQGLSSAPEDENGNLPKY
ILSPNDLVYVPTQEEINKGEVVMPIDRDRIYKMVDSSGITANFIPASTANLIFALPKATAEIYCNGENCI
QNEYGIGSPQSKNQKAITGEMVKEICFPIKVDRLGNIIQVGSCILTN
SEQ ID NO: 338
MSRSLTFSFDIGYASIGWAVIASASHDDADPSVCGCGTVLFPKDDCQAFKRREYRRLRRNIRSRRVRIER
IGRLLVQAQIITPEMKETSGHPAPFYLASEALKGHRTLAPIELWHVLRWYAHNRGYDNNASWSNSLSEDG
GNGEDTERVKHAQDLMDKHGTATMAETICRELKLEEGKADAPMEVSTPAYKNLNTAFPRLIVEKEVRRIL
ELSAPLIPGLTAEIIELIAQHHPLTTEQRGVLLQHGIKLARRYRGSLLFGQLIPRFDNRIISRCPVTWAQ
VYEAELKKGNSEQSARERAEKLSKVPTANCPEFYEYRMARILCNIRADGEPLSAEIRRELMNQARQEGKL
TKASLEKAISSRLGKETETNVSNYFTLHPDSEEALYLNPAVEVLQRSGIGQILSPSVYRIAANRLRRGKS
VTPNYLLNLLKSRGESGEALEKKIEKESKKKEADYADTPLKPKYATGRAPYARTVLKKVVEEILDGEDPT
RPARGEAHPDGELKAHDGCLYCLLDTDSSVNQHQKERRLDTMTNNHLVRHRMLILDRLLKDLIQDFADGQ
KDRISRVCVEVGKELTTFSAMDSKKIQRELTLRQKSHTDAVNRLKRKLPGKALSANLIRKCRIAMDMNWT
CPFTGATYGDHELENLELEHIVPHSFRQSNALSSLVLTWPGVNRMKGQRTGYDFVEQEQENPVPDKPNLH
ICSLNNYRELVEKLDDKKGHEDDRRRKKKRKALLMVRGLSHKHQSQNHEAMKEIGMTEGMMTQSSHLMKL
ACKSIKTSLPDAHIDMIPGAVTAEVRKAWDVFGVFKELCPEAADPDSGKILKENLRSLTHLHHALDACVL
GLIPYIIPAHHNGLLRRVLAMRRIPEKLIPQVRPVANQRHYVLNDDGRMMLRDLSASLKENIREQLMEQR
VIQHVPADMGGALLKETMQRVLSVDGSGEDAMVSLSKKKDGKKEKNQVKASKLVGVFPEGPSKLKALKAA
IEIDGNYGVALDPKPVVIRHIKVFKRIMALKEQNGGKPVRILKKGMLIHLTSSKDPKHAGVWRIESIQDS
KGGVKLDLQRAHCAVPKNKTHECNWREVDLISLLKKYQMKRYPTSYTGTPR
SEQ ID NO: 339
MTQKVLGLDLGTNSIGSAVRNLDLSDDLQWQLEFFSSDIFRSSVNKESNGREYSLAAQRSAHRRSRGLNE
VRRRRLWATLNLLIKHGFCPMSSESLMRWCTYDKRKGLFREYPIDDKDFNAWILLDFNGDGRPDYSSPYQ
LRRELVTRQFDFEQPIERYKLGRALYHIAQHRGFKSSKGETLSQQETNSKPSSTDEIPDVAGAMKASEEK
LSKGLSTYMKEHNLLTVGAAFAQLEDEGVRVRNNNDYRAIRSQFQHEIETIFKFQQGLSVESELYERLIS
EKKNVGTIFYKRPLRSQRGNVGKCTLERSKPRCAIGHPLFEKFRAWTLINNIKVRMSVDTLDEQLPMKLR
LDLYNECFLAFVRTEFKFEDIRKYLEKRLGIHFSYNDKTINYKDSTSVAGCPITARFRKMLGEEWESFRV
EGQKERQAHSKNNISFHRVSYSIEDIWHFCYDAEEPEAVLAFAQETLRLERKKAEELVRIWSAMPQGYAM
LSQKAIRNINKILMLGLKYSDAVILAKVPELVDVSDEELLSIAKDYYLVEAQVNYDKRINSIVNGLIAKY
KSVSEEYRFADHNYEYLLDESDEKDIIRQIENSLGARRWSLMDANEQTDILQKVRDRYQDFFRSHERKFV
ESPKLGESFENYLTKKFPMVEREQWKKLYHPSQITIYRPVSVGKDRSVLRLGNPDIGAIKNPTVLRVLNT
LRRRVNQLLDDGVISPDETRVVVETARELNDANRKWALDTYNRIRHDENEKIKKILEEFYPKRDGISTDD
IDKARYVIDQREVDYFTGSKTYNKDIKKYKFWLEQGGQCMYTGRTINLSNLFDPNAFDIEHTIPESLSFD
SSDMNLTLCDAHYNRFIKKNHIPTDMPNYDKAITIDGKEYPAITSQLQRWVERVERLNRNVEYWKGQARR
AQNKDRKDQCMREMHLWKMELEYWKKKLERFTVTEVTDGFKNSQLVDTRVITRHAVLYLKSIFPHVDVQR
GDVTAKFRKILGIQSVDEKKDRSLHSHHAIDATTLTIIPVSAKRDRMLELFAKIEEINKMLSFSGSEDRT
GLIQELEGLKNKLQMEVKVCRIGHNVSEIGTFINDNIIVNHHIKNQALTPVRRRLRKKGYIVGGVDNPRW
QTGDALRGEIHKASYYGAITQFAKDDEGKVLMKEGRPQVNPTIKFVIRRELKYKKSAADSGFASWDDLGK
AIVDKELFALMKGQFPAETSFKDACEQGIYMIKKGKNGMPDIKLHHIRHVRCEAPQSGLKIKEQTYKSEK
EYKRYFYAAVGDLYAMCCYTNGKIREFRIYSLYDVSCHRKSDIEDIPEFITDKKGNRLMLDYKLRTGDMI
LLYKDNPAELYDLDNVNLSRRLYKINRFESQSNLVLMTHHLSTSKERGRSLGKTVDYQNLPESIRSSVKS
LNFLIMGENRDFVIKNGKIIFNHR
SEQ ID NO: 340
MLVSPISVDLGGKNTGFFSFTDSLDNSQSGTVIYDESFVLSQVGRRSKRHSKRNNLRNKLVKRLFLLILQ
EHHGLSIDVLPDEIRGLFNKRGYTYAGFELDEKKKDALESDTLKEFLSEKLQSIDRDSDVEDFLNQIASN
AESFKDYKKGFEAVFASATHSPNKKLELKDELKSEYGENAKELLAGLRVTKEILDEFDKQENQGNLPRAK
YFEELGEYIATNEKVKSFFDSNSLKLTDMTKLIGNISNYQLKELRRYFNDKEMEKGDIWIPNKLHKITER
FVRSWHPKNDADRQRRAELMKDLKSKEIMELLTTTEPVMTIPPYDDMNNRGAVKCQTLRLNEEYLDKHLP
NWRDIAKRLNHGKFNDDLADSTVKGYSEDSTLLHRLLDTSKEIDIYELRGKKPNELLVKTLGQSDANRLY
GFAQNYYELIRQKVRAGIWVPVKNKDDSLNLEDNSNMLKRCNHNPPHKKNQIHNLVAGILGVKLDEAKFA
EFEKELWSAKVGNKKLSAYCKNIEELRKTHGNTFKIDIEELRKKDPAELSKEEKAKLRLTDDVILNEWSQ
KIANFFDIDDKHRQRFNNLFSMAQLHTVIDTPRSGFSSTCKRCTAENRFRSETAFYNDETGEFHKKATAT
CQRLPADTQRPFSGKIERYIDKLGYELAKIKAKELEGMEAKEIKVPIILEQNAFEYEESLRKSKTGSNDR
VINSKKDRDGKKLAKAKENAEDRLKDKDKRIKAFSSGICPYCGDTIGDDGEIDHILPRSHTLKIYGTVFN
PEGNLIYVHQKCNQAKADSIYKLSDIKAGVSAQWIEEQVANIKGYKTFSVLSAEQQKAFRYALFLQNDNE
AYKKVVDWLRTDQSARVNGTQKYLAKKIQEKLTKMLPNKHLSFEFILADATEVSELRRQYARQNPLLAKA
EKQAPSSHAIDAVMAFVARYQKVFKDGTPPNADEVAKLAMLDSWNPASNEPLTKGLSTNQKIEKMIKSGD
YGQKNMREVFGKSIFGENAIGERYKPIVVQEGGYYIGYPATVKKGYELKNCKVVTSKNDIAKLEKIIKNQ
DLISLKENQYIKIFSINKQTISELSNRYFNMNYKNLVERDKEIVGLLEFIVENCRYYTKKVDVKFAPKYI
HETKYPFYDDWRRFDEAWRYLQENQNKTSSKDRFVIDKSSLNEYYQPDKNEYKLDVDTQPIWDDFCRWYF
LDRYKTANDKKSIRIKARKTFSLLAESGVQGKVFRAKRKIPTGYAYQALPMDNNVIAGDYANILLEANSK
TLSLVPKSGISIEKQLDKKLDVIKKTDVRGLAIDNNSFFNADFDTHGIRLIVENTSVKVGNFPISAIDKS
AKRMIFRALFEKEKGKRKKKTTISFKESGPVQDYLKVFLKKIVKIQLRTDGSISNIVVRKNAADFTLSFR
SEHIQKLLK
SEQ ID NO: 341
MAYRLGLDIGITSVGWAVVALEKDESGLKPVRIQDLGVRIFDKAEDSKTGASLALPRREARSARRRTRRR
RHRLWRVKRLLEQHGILSMEQIEALYAQRTSSPDVYALRVAGLDRCLIAEEIARVLIHIAHRRGFQSNRK
SEIKDSDAGKLLKAVQENENLMQSKGYRTVAEMLVSEATKTDAEGKLVHGKKHGYVSNVRNKAGEYRHTV
SRQAIVDEVRKIFAAQRALGNDVMSEELEDSYLKILCSQRNFDDGPGGDSPYGHGSVSPDGVRQSIYERM
VGSCTFETGEKRAPRSSYSFERFQLLTKVVNLRIYRQQEDGGRYPCELTQTERARVIDCAYEQTKITYGK
LRKLLDMKDTESFAGLTYGLNRSRNKTEDTVFVEMKFYHEVRKALQRAGVFIQDLSIETLDQIGWILSVW
KSDDNRRKKLSTLGLSDNVIEELLPLNGSKFGHLSLKAIRKILPFLEDGYSYDVACELAGYQFQGKTEYV
KQRLLPPLGEGEVTNPVVRRALSQAIKVVNAVIRKHGSPESIHIELARELSKNLDERRKIEKAQKENQKN
NEQIKDEIREILGSAHVTGRDIVKYKLFKQQQEFCMYSGEKLDVTRLFEPGYAEVDHIIPYGISFDDSYD
NKVLVKTEQNRQKGNRTPLEYLRDKPEQKAKFIALVESIPLSQKKKNHLLMDKRAIDLEQEGFRERNLSD
TRYITRALMNHIQAWLLFDETASTRSKRVVCVNGAVTAYMRARWGLTKDRDAGDKHHAADAVVVACIGDS
LIQRVTKYDKFKRNALADRNRYVQQVSKSEGITQYVDKETGEVFTWESFDERKFLPNEPLEPWPFFRDEL
LARLSDDPSKNIRAIGLLTYSETEQIDPIFVSRMPTRKVTGAAHKETIRSPRIVKVDDNKGTEIQVVVSK
VALTELKLTKDGEIKDYFRPEDDPRLYNTLRERLVQFGGDAKAAFKEPVYKISKDGSVRTPVRKVKIQEK
LTLGVPVHGGRGIAENGGMVRIDVFAKGGKYYFVPIYVADVLKRELPNRLATAHKPYSEWRVVDDSYQFK
FSLYPNDAVMIKPSREVDITYKDRKEPVGCRIMYFVSANIASASISLRTHDNSGELEGLGIQGLEVFEKY
VVGPLGDTHPVYKERRMPFRVERKMN
SEQ ID NO: 342
MPVLSPLSPNAAQGRRRWSLALDIGEGSIGWAVAEVDAEGRVLQLTGTGVTLFPSAWSNENGTYVAHGAA
DRAVRGQQQRHDSRRRRLAGLARLCAPVLERSPEDLKDLTRTPPKADPRAIFFLRADAARRPLDGPELFR
VLHHMAAHRGIRLAELQEVDPPPESDADDAAPAATEDEDGTRRAAADERAFRRLMAEHMHRHGTQPTCGE
IMAGRLRETPAGAQPVTRARDGLRVGGGVAVPTRALIEQEFDAIRAIQAPRHPDLPWDSLRRLVLDQAPI
AVPPATPCLFLEELRRRGETFQGRTITREAIDRGLTVDPLIQALRIRETVGNLRLHERITEPDGRQRYVP
RAMPELGLSHGELTAPERDTLVRALMHDPDGLAAKDGRIPYTRLRKLIGYDNSPVCFAQERDTSGGGITV
NPTDPLMARWIDGWVDLPLKARSLYVRDVVARGADSAALARLLAEGAHGVPPVAAAAVPAATAAILESDI
MQPGRYSVCPWAAEAILDAWANAPTEGFYDVTRGLFGFAPGEIVLEDLRRARGALLAHLPRTMAAARTPN
RAAQQRGPLPAYESVIPSQLITSLRRAHKGRAADWSAADPEERNPFLRTWTGNAATDHILNQVRKTANEV
ITKYGNRRGWDPLPSRITVELAREAKHGVIRRNEIAKENRENEGRRKKESAALDTFCQDNTVSWQAGGLP
KERAALRLRLAQRQEFFCPYCAERPKLRATDLFSPAETEIDHVIERRMGGDGPDNLVLAHKDCNNAKGKK
TPHEHAGDLLDSPALAALWQGWRKENADRLKGKGHKARTPREDKDFMDRVGWRFEEDARAKAEENQERRG
RRMLHDTARATRLARLYLAAAVMPEDPAEIGAPPVETPPSPEDPTGYTAIYRTISRVQPVNGSVTHMLRQ
RLLQRDKNRDYQTHHAEDACLLLLAGPAVVQAFNTEAAQHGADAPDDRPVDLMPTSDAYHQQRRARALGR
VPLATVDAALADIVMPESDRQDPETGRVHWRLTRAGRGLKRRIDDLTRNCVILSRPRRPSETGTPGALHN
ATHYGRREITVDGRTDTVVTQRMNARDLVALLDNAKIVPAARLDAAAPGDTILKEICTEIADRHDRVVDP
EGTHARRWISARLAALVPAHAEAVARDIAELADLDALADADRTPEQEARRSALRQSPYLGRAISAKKADG
RARAREQEILTRALLDPHWGPRGLRHLIMREARAPSLVRIRANKTDAFGRPVPDAAVWVKTDGNAVSQLW
RLTSVVTDDGRRIPLPKPIEKRIEISNLEYARLNGLDEGAGVTGNNAPPRPLRQDIDRLTPLWRDHGTAP
GGYLGTAVGELEDKARSALRGKAMRQTLTDAGITAEAGWRLDSEGAVCDLEVAKGDTVKKDGKTYKVGVI
TQGIFGMPVDAAGSAPRTPEDCEKFEEQYGIKPWKAKGIPLA
SEQ ID NO: 343
MNYTEKEKLFMKYILALDIGIASVGWAILDKESETVIEAGSNIFPEASAADNQLRRDMRGAKRNNRRLKT
RINDFIKLWENNNLSIPQFKSTEIVGLKVRAITEEITLDELYLILYSYLKHRGISYLEDALDDTVSGSSA
YANGLKLNAKELETHYPCEIQQERLNTIGKYRGQSQIINENGEVLDLSNVFTIGAYRKEIQRVFEIQKKY
HPELTDEFCDGYMLIFNRKRKYYEGPGNEKSRTDYGRFTTKLDANGNYITEDNIFEKLIGKCSVYPDELR
AAAASYTAQEYNVLNDLNNLTINGRKLEENEKHEIVERIKSSNTINMRKIISDCMGENIDDFAGARIDKS
GKEIFHKFEVYNKMRKALLEIGIDISNYSREELDEIGYIMTINTDKEAMMEAFQKSWIDLSDDVKQCLIN
MRKTNGALFNKWQSFSLKIMNELIPEMYAQPKEQMTLLTEMGVTKGTQEEFAGLKYIPVDVVSEDIFNPV
VRRSVRISFKILNAVLKKYKALDTIVIEMPRDRNSEEQKKRINDSQKLNEKEMEYIEKKLAVTYGIKLSP
SDFSSQKQLSLKLKLWNEQDGICLYSGKTIDPNDIINNPQLFEIDHIIPRSISFDDARSNKVLVYRSENQ
KKGNQTPYYYLTHSHSEWSFEQYKATVMNLSKKKEYAISRKKIQNLLYSEDITKMDVLKGFINRNINDTS
YASRLVLNTIQNFFMANEADTKVKVIKGSYTHQMRCNLKLDKNRDESYSHHAVDAMLIGYSELGYEAYHK
LQGEFIDFETGEILRKDMWDENMSDEVYADYLYGKKWANIRNEVVKAEKNVKYWHYVMRKSNRGLCNQTI
RGTREYDGKQYKINKLDIRTKEGIKVFAKLAFSKKDSDRERLLVYLNDRRTFDDLCKIYEDYSDAANPFV
QYEKETGDIIRKYSKKHNGPRIDKLKYKDGEVGACIDISHKYGFEKGSKKVILESLVPYRMDVYYKEENH
SYYLVGVKQSDIKFEKGRNVIDEEAYARILVNEKMIQPGQSRADLENLGFKFKLSFYKNDIIEYEKDGKI
YTERLVSRTMPKQRNYIETKPIDKAKFEKQNLVGLGKTKFIKKYRYDILGNKYSCSEEKFTSFC
SEQ ID NO: 344
MLRLYCANNLVLNNVQNLWKYLLLLIFDKKIIFLFKIKVILIRRYMENNNKEKIVIGFDLGVASVGWSIV
NAETKEVIDLGVRLFSEPEKADYRRAKRTTRRLLRRKKFKREKFHKLILKNAEIFGLQSRNEILNVYKDQ
SSKYRNILKLKINALKEEIKPSELVWILRDYLQNRGYFYKNEKLTDEFVSNSFPSKKLHEHYEKYGFFRG
SVKLDNKLDNKKDKAKEKDEEEESDAKKESEELIFSNKQWINEIVKVFENQSYLTESFKEEYLKLFNYVR
PFNKGPGSKNSRTAYGVFSTDIDPETNKFKDYSNIWDKTIGKCSLFEEEIRAPKNLPSALIFNLQNEICT
IKNEFTEFKNWWLNAEQKSEILKFVFTELFNWKDKKYSDKKFNKNLQDKIKKYLLNFALENFNLNEEILK
NRDLENDTVLGLKGVKYYEKSNATADAALEFSSLKPLYVFIKFLKEKKLDLNYLLGLENTEILYFLDSIY
LAISYSSDLKERNEWFKKLLKELYPKIKNNNLEIIENVEDIFEITDQEKFESFSKTHSLSREAFNHIIPL
LLSNNEGKNYESLKHSNEELKKRTEKAELKAQQNQKYLKDNFLKEALVPLSVKTSVLQAIKIFNQIIKNF
GKKYEISQVVIEMARELTKPNLEKLLNNATNSNIKILKEKLDQTEKFDDFTKKKFIDKIENSVVFRNKLF
LWFEQDRKDPYTQLDIKINEIEDETEIDHVIPYSKSADDSWFNKLLVKKSTNQLKKNKTVWEYYQNESDP
EAKWNKFVAWAKRIYLVQKSDKESKDNSEKNSIFKNKKPNLKFKNITKKLFDPYKDLGFLARNLNDTRYA
TKVFRDQLNNYSKHHSKDDENKLFKVVCMNGSITSFLRKSMWRKNEEQVYRFNFWKKDRDQFFHHAVDAS
IIAIFSLLTKTLYNKLRVYESYDVQRREDGVYLINKETGEVKKADKDYWKDQHNFLKIRENAIEIKNVLN
NVDFQNQVRYSRKANTKLNTQLFNETLYGVKEFENNFYKLEKVNLFSRKDLRKFILEDLNEESEKNKKNE
NGSRKRILTEKYIVDEILQILENEEFKDSKSDINALNKYMDSLPSKFSEFFSQDFINKCKKENSLILTFD
AIKHNDPKKVIKIKNLKFFREDATLKNKQAVHKDSKNQIKSFYESYKCVGFIWLKNKNDLEESIFVPINS
RVIHFGDKDKDIFDFDSYNKEKLLNEINLKRPENKKFNSINEIEFVKFVKPGALLLNFENQQIYYISTLE
SSSLRAKIKLLNKMDKGKAVSMKKITNPDEYKIIEHVNPLGINLNWTKKLENNN
SEQ ID NO: 345
MLMSKHVLGLDLGVGSIGWCLIALDAQGDPAEILGMGSRVVPLNNATKAIEAFNAGAAFTASQERTARRT
MRRGFARYQLRRYRLRRELEKVGMLPDAALIQLPLLELWELRERAATAGRRLTLPELGRVLCHINQKRGY
RHVKSDAAAIVGDEGEKKKDSNSAYLAGIRANDEKLQAEHKTVGQYFAEQLRQNQSESPTGGISYRIKDQ
IFSRQCYIDEYDQIMAVQRVHYPDILTDEFIRMLRDEVIFMQRPLKSCKHLVSLCEFEKQERVMRVQQDD
GKGGWQLVERRVKFGPKVAPKSSPLFQLCCIYEAVNNIRLTRPNGSPCDITPEERAKIVAHLQSSASLSF
AALKKLLKEKALIADQLTSKSGLKGNSTRVALASALQPYPQYHHLLDMELETRMMTVQLTDEETGEVTER
EVAVVTDSYVRKPLYRLWHILYSIEEREAMRRALITQLGMKEEDLDGGLLDQLYRLDFVKPGYGNKSAKF
ICKLLPQLQQGLGYSEACAAVGYRHSNSPTSEEITERTLLEKIPLLQRNELRQPLVEKILNQMINLVNAL
KAEYGIDEVRVELARELKMSREERERMARNNKDREERNKGVAAKIRECGLYPTKPRIQKYMLWKEAGRQC
LYCGRSIEEEQCLREGGMEVEHIIPKSVLYDDSYGNKTCACRRCNKEKGNRTALEYIRAKGREAEYMKRI
NDLLKEKKISYSKHQRLRWLKEDIPSDFLERQLRLTQYISRQAMAILQQGIRRVSASEGGVTARLRSLWG
YGKILHTLNLDRYDSMGETERVSREGEATEELHITNWSKRMDHRHHAIDALVVACTRQSYIQRLNRLSSE
FGREDKKKEDQEAQEQQATETGRLSNLERWLTQRPHFSVRTVSDKVAEILISYRPGQRVVTRGRNIYRKK
MADGREVSCVQRGVLVPRGELMEASFYGKILSQGRVRIVKRYPLHDLKGEVVDPHLRELITTYNQELKSR
EKGAPIPPLCLDKDKKQEVRSVRCYAKTLSLDKAIPMCFDEKGEPTAFVKSASNHHLALYRTPKGKLVES
IVTFWDAVDRARYGIPLVITHPREVMEQVLQRGDIPEQVLSLLPPSDWVFVDSLQQDEMVVIGLSDEELQ
RALEAQNYRKISEHLYRVQKMSSSYYVFRYHLETSVADDKNTSGRIPKFHRVQSLKAYEERNIRKVRVDL
LGRISLL
SEQ ID NO: 346
MSDLVLGLDIGIGSVGVGILNKVTGEIIHKNSRIFPAAQAENNLVRRTNRQGRRLARRKKHRRVRLNRLF
EESGLITDFTKISINLNPYQLRVKGLTDELSNEELFIALKNMVKHRGISYLDDASDDGNSSVGDYAQIVK
ENSKQLETKTPGQIQLERYQTYGQLRGDFTVEKDGKKHRLINVFPTSAYRSEALRILQTQQEFNPQITDE
FINRYLEILTGKRKYYHGPGNEKSRTDYGRYRTSGETLDNIFGILIGKCTFYPDEFRAAKASYTAQEFNL
LNDLNNLTVPTETKKLSKEQKNQIINYVKNEKAMGPAKLFKYIAKLLSCDVADIKGYRIDKSGKAEIHTF
EAYRKMKTLETLDIEQMDRETLDKLAYVLTLNTEREGIQEALEHEFADGSFSQKQVDELVQFRKANSSIF
GKGWHNFSVKLMMELIPELYETSEEQMTILTRLGKQKTTSSSNKTKYIDEKLLTEEIYNPVVAKSVRQAI
KIVNAAIKEYGDFDNIVIEMARETNEDDEKKAIQKIQKANKDEKDAAMLKAANQYNGKAELPHSVFHGHK
QLATKIRLWHQQGERCLYTGKTISIHDLINNSNQFEVDHILPLSITFDDSLANKVLVYATANQEKGQRTP
YQALDSMDDAWSFRELKAFVRESKTLSNKKKEYLLTEEDISKFDVRKKFIERNLVDTRYASRVVLNALQE
HFRAHKIDTKVSVVRGQFTSQLRRHWGIEKTRDTYHHHAVDALIIAASSQLNLWKKQKNTLVSYSEDQLL
DIETGELISDDEYKESVFKAPYQHFVDTLKSKEFEDSILFSYQVDSKFNRKISDATIYATRQAKVGKDKA
DETYVLGKIKDIYTQDGYDAFMKIYKKDKSKFLMYRHDPQTFEKVIEPILENYPNKQINEKGKEVPCNPF
LKYKEEHGYIRKYSKKGNGPEIKSLKYYDSKLGNHIDITPKDSNNKVVLQSVSPWRADVYFNKTTGKYEI
LGLKYADLQFEKGTGTYKISQEKYNDIKKKEGVDSDSEFKFTLYKNDLLLVKDTETKEQQLFRFLSRTMP
KQKHYVELKPYDKQKFEGGEALIKVLGNVANSGQCKKGLGKSNISIYKVRTDVLGNQHIIKNEGDKPKLD
F
SEQ ID NO: 347
MNAEHGKEGLLIMEENFQYRIGLDIGITSVGWAVLQNNSQDEPVRITDLGVRIFDVAENPKNGDALAAPR
RDARTTRRRLRRRRHRLERIKFLLQENGLIEMDSFMERYYKGNLPDVYQLRYEGLDRKLKDEELAQVLIH
IAKHRGFRSTRKAETKEKEGGAVLKATTENQKIMQEKGYRTVGEMLYLDEAFHTECLWNEKGYVLTPRNR
PDDYKHTILRSMLVEEVHAIFAAQRAHGNQKATEGLEEAYVEIMTSQRSFDMGPGLQPDGKPSPYAMEGF
GDRVGKCTFEKDEYRAPKATYTAELFVALQKINHTKLIDEFGTGRFFSEEERKTIIGLLLSSKELKYGTI
RKKLNIDPSLKFNSLNYSAKKEGETEEERVLDTEKAKFASMFWTYEYSKCLKDRTEEMPVGEKADLFDRI
GEILTAYKNDDSRSSRLKELGLSGEEIDGLLDLSPAKYQRVSLKAMRKMQPYLEDGLIYDKACEAAGYDF
RALNDGNKKHLLKGEEINAIVNDITNPVVKRSVSQTIKVINAIIQKYGSPQAVNIELAREMSKNFQDRTN
LEKEMKKRQQENERAKQQIIELGKQNPTGQDILKYRLWNDQGGYCLYSGKKIPLEELFDGGYDIDHILPY
SITFDDSYRNKVLVTAQENRQKGNRTPYEYFGADEKRWEDYEASVRLLVRDYKKQQKLLKKNFTEEERKE
FKERNLNDTKYITRVVYNMIRQNLELEPFNHPEKKKQVWAVNGAVTSYLRKRWGLMQKDRSTDRHHAMDA
VVIACCTDGMIHKISRYMQGRELAYSRNFKFPDEETGEILNRDNFTREQWDEKFGVKVPLPWNSFRDELD
IRLLNEDPKNFLLTHADVQRELDYPGWMYGEEESPIEEGRYINYIRPLFVSRMPNHKVTGSAHDATIRSA
RDYETRGVVITKVPLTDLKLNKDNEIEGYYDKDSDRLLYQALVRQLLLHGNDGKKAFAEDFHKPKADGTE
GPVVRKVKIEKKQTSGVMVRGGTGIAANGEMVRIDVFRENGKYYFVPVYTADVVRKVLPNRAATHTKPYS
EWRVMDDANFVFSLYSRDLIHVKSKKDIKTNLVNGGLLLQKEIFAYYTGADIATASIAGFANDSNFKFRG
LGIQSLEIFEKCQVDILGNISVVRHENRQEFH
SEQ ID NO: 348
MRVLGLDAGIASLGWALIEIEESNRGELSQGTIIGAGTWMFDAPEEKTQAGAKLKSEQRRTFRGQRRVVR
RRRQRMNEVRRILHSHGLLPSSDRDALKQPGLDPWRIRAEALDRLLGPVELAVALGHIARHRGFKSNSKG
AKTNDPADDTSKMKRAVNETREKLARFGSAAKMLVEDESFVLRQTPTKNGASEIVRRFRNREGDYSRSLL
RDDLAAEMRALFTAQARFQSAIATADLQTAFTKAAFFQRPLQDSEKLVGPCPFEVDEKRAPKRGYSFELF
RFLSRLNHVTLRDGKQERTLTRDELALAAADFGAAAKVSFTALRKKLKLPETTVFVGVKADEESKLDVVA
RSGKAAEGTARLRSVIVDALGELAWGALLCSPEKLDKIAEVISFRSDIGRISEGLAQAGCNAPLVDALTA
AASDGRFDPFTGAGHISSKAARNILSGLRQGMTYDKACCAADYDHTASRERGAFDVGGHGREALKRILQE
ERISRELVGSPTARKALIESIKQVKAIVERYGVPDRIHVELARDVGKSIEEREEITRGIEKRNRQKDKLR
GLFEKEVGRPPQDGARGKEELLRFELWSEQMGRCLYTDDYISPSQLVATDDAVQVDHILPWSRFADDSYA
NKTLCMAKANQDKKGRTPYEWFKAEKTDTEWDAFIVRVEALADMKGFKKRNYKLRNAEEAAAKFRNRNLN
DTRWACRLLAEALKQLYPKGEKDKDGKERRRVFSRPGALTDRLRRAWGLQWMKKSTKGDRIPDDRHHALD
AIVIAATTESLLQRATREVQEIEDKGLHYDLVKNVTPPWPGFREQAVEAVEKVFVARAERRRARGKAHDA
TIRHIAVREGEQRVYERRKVAELKLADLDRVKDAERNARLIEKLRNWIEAGSPKDDPPLSPKGDPIFKVR
LVTKSKVNIALDTGNPKRPGTVDRGEMARVDVFRKASKKGKYEYYLVPIYPHDIATMKTPPIRAVQAYKP
EDEWPEMDSSYEFCWSLVPMTYLQVISSKGEIFEGYYRGMNRSVGAIQLSAHSNSSDVVQGIGARTLTEF
KKFNVDRFGRKHEVERELRTWRGETWRGKAYI
SEQ ID NO: 349
MGNYYLGLDVGIGSIGWAVINIEKKRIEDFNVRIFKSGEIQEKNRNSRASQQCRRSRGLRRLYRRKSHRK
LRLKNYLSIIGLTTSEKIDYYYETADNNVIQLRNKGLSEKLTPEEIAACLIHICNNRGYKDFYEVNVEDI
EDPDERNEYKEEHDSIVLISNLMNEGGYCTPAEMICNCREFDEPNSVYRKFHNSAASKNHYLITRHMLVK
EVDLILENQSKYYGILDDKTIAKIKDIIFAQRDFEIGPGKNERFRRFTGYLDSIGKCQFFKDQERGSRFT
VIADIYAFVNVLSQYTYTNNRGESVFDTSFANDLINSALKNGSMDKRELKAIAKSYHIDISDKNSDTSLT
KCFKYIKVVKPLFEKYGYDWDKLIENYTDTDNNVLNRIGIVLSQAQTPKRRREKLKALNIGLDDGLINEL
TKLKLSGTANVSYKYMQGSIEAFCEGDLYGKYQAKFNKEIPDIDENAKPQKLPPFKNEDDCEFFKNPVVF
RSINETRKLINAIIDKYGYPAAVNIETADELNKTFEDRAIDTKRNNDNQKENDRIVKEIIECIKCDEVHA
RHLIEKYKLWEAQEGKCLYSGETITKEDMLRDKDKLFEVDHIVPYSLILDNTINNKALVYAEENQKKGQR
TPLMYMNEAQAADYRVRVNTMFKSKKCSKKKYQYLMLPDLNDQELLGGWRSRNLNDTRYICKYLVNYLRK
NLRFDRSYESSDEDDLKIRDHYRVFPVKSRFTSMFRRWWLNEKTWGRYDKAELKKLTYLDHAADAIIIAN
CRPEYVVLAGEKLKLNKMYHQAGKRITPEYEQSKKACIDNLYKLFRMDRRTAEKLLSGHGRLTPIIPNLS
EEVDKRLWDKNIYEQFWKDDKDKKSCEELYRENVASLYKGDPKFASSLSMPVISLKPDHKYRGTITGEEA
IRVKEIDGKLIKLKRKSISEITAESINSIYTDDKILIDSLKTIFEQADYKDVGDYLKKTNQHFFTTSSGK
RVNKVTVIEKVPSRWLRKEIDDNNFSLLNDSSYYCIELYKDSKGDNNLQGIAMSDIVHDRKTKKLYLKPD
FNYPDDYYTHVMYIFPGDYLRIKSTSKKSGEQLKFEGYFISVKNVNENSFRFISDNKPCAKDKRVSITKK
DIVIKLAVDLMGKVQGENNGKGISCGEPLSLLKEKN
SEQ ID NO: 350
MLSRQLLGASHLARPVSYSYNVQDNDVHCSYGERCFMRGKRYRIGIDVGLNSVGLAAVEVSDENSPVRLL
NAQSVIHDGGVDPQKNKEAITRKNMSGVARRTRRMRRRKRERLHKLDMLLGKFGYPVIEPESLDKPFEEW
HVRAELATRYIEDDELRRESISIALRHMARHRGWRNPYRQVDSLISDNPYSKQYGELKEKAKAYNDDATA
AEEESTPAQLVVAMLDAGYAEAPRLRWRTGSKKPDAEGYLPVRLMQEDNANELKQIFRVQRVPADEWKPL
FRSVFYAVSPKGSAEQRVGQDPLAPEQARALKASLAFQEYRIANVITNLRIKDASAELRKLTVDEKQSIY
DQLVSPSSEDITWSDLCDFLGFKRSQLKGVGSLTEDGEERISSRPPRLTSVQRIYESDNKIRKPLVAWWK
SASDNEHEAMIRLLSNTVDIDKVREDVAYASAIEFIDGLDDDALTKLDSVDLPSGRAAYSVETLQKLTRQ
MLTTDDDLHEARKTLFNVTDSWRPPADPIGEPLGNPSVDRVLKNVNRYLMNCQQRWGNPVSVNIEHVRSS
FSSVAFARKDKREYEKNNEKRSIFRSSLSEQLRADEQMEKVRESDLRRLEAIQRQNGQCLYCGRTITFRT
CEMDHIVPRKGVGSTNTRTNFAAVCAECNRMKSNTPFAIWARSEDAQTRGVSLAEAKKRVTMFTFNPKSY
APREVKAFKQAVIARLQQTEDDAAIDNRSIESVAWMADELHRRIDWYFNAKQYVNSASIDDAEAETMKTT
VSVFQGRVTASARRAAGIEGKIHFIGQQSKTRLDRRHHAVDASVIAMMNTAAAQTLMERESLRESQRLIG
LMPGERSWKEYPYEGTSRYESFHLWLDNMDVLLELLNDALDNDRIAVMQSQRYVLGNSIAHDATIHPLEK
VPLGSAMSADLIRRASTPALWCALTRLPDYDEKEGLPEDSHREIRVHDTRYSADDEMGFFASQAAQIAVQ
EGSADIGSAIHHARVYRCWKTNAKGVRKYFYGMIRVFQTDLLRACHDDLFTVPLPPQSISMRYGEPRVVQ
ALQSGNAQYLGSLVVGDEIEMDFSSLDVDGQIGEYLQFFSQFSGGNLAWKHWVVDGFFNQTQLRIRPRYL
AAEGLAKAFSDDVVPDGVQKIVTKQGWLPPVNTASKTAVRIVRRNAFGEPRLSSAHHMPCSWQWRHE
SEQ ID NO: 351
MYSIGLDLGISSVGWSVIDERTGNVIDLGVRLFSAKNSEKNLERRTNRGGRRLIRRKTNRLKDAKKILAA
VGFYEDKSLKNSCPYQLRVKGLTEPLSRGEIYKVTLHILKKRGISYLDEVDTEAAKESQDYKEQVRKNAQ
LLTKYTPGQIQLQRLKENNRVKTGINAQGNYQLNVFKVSAYANELATILKTQQAFYPNELTDDWIALFVQ
PGIAEEAGLIYRKRPYYHGPGNEANNSPYGRWSDFQKTGEPATNIFDKLIGKDFQGELRASGLSLSAQQY
NLLNDLTNLKIDGEVPLSSEQKEYILTELMTKEFTRFGVNDVVKLLGVKKERLSGWRLDKKGKPEIHTLK
GYRNWRKIFAEAGIDLATLPTETIDCLAKVLTLNTEREGIENTLAFELPELSESVKLLVLDRYKELSQSI
STQSWHRFSLKTLHLLIPELMNATSEQNTLLEQFQLKSDVRKRYSEYKKLPTKDVLAEIYNPTVNKTVSQ
AFKVIDALLVKYGKEQIRYITIEMPRDDNEEDEKKRIKELHAKNSQRKNDSQSYFMQKSGWSQEKFQTTI
QKNRRFLAKLLYYYEQDGICAYTGLPISPELLVSDSTEIDHIIPISISLDDSINNKVLVLSKANQVKGQQ
TPYDAWMDGSFKKINGKFSNWDDYQKWVESRHFSHKKENNLLETRNIFDSEQVEKFLARNLNDTRYASRL
VLNTLQSFFTNQETKVRVVNGSFTHTLRKKWGADLDKTRETHHHHAVDATLCAVTSFVKVSRYHYAVKEE
TGEKVMREIDFETGEIVNEMSYWEFKKSKKYERKTYQVKWPNFREQLKPVNLHPRIKFSHQVDRKANRKL
SDATIYSVREKTEVKTLKSGKQKITTDEYTIGKIKDIYTLDGWEAFKKKQDKLLMKDLDEKTYERLLSIA
ETTPDFQEVEEKNGKVKRVKRSPFAVYCEENDIPAIQKYAKKNNGPLIRSLKYYDGKLNKHINITKDSQG
RPVEKTKNGRKVTLQSLKPYRYDIYQDLETKAYYTVQLYYSDLRFVEGKYGITEKEYMKKVAEQTKGQVV
RFCFSLQKNDGLEIEWKDSQRYDVRFYNFQSANSINFKGLEQEMMPAENQFKQKPYNNGAINLNIAKYGK
EGKKLRKFNTDILGKKHYLFYEKEPKNIIK
SEQ ID NO: 352
MYFYKNKENKLNKKVVLGLDLGIASVGWCLTDISQKEDNKFPIILHGVRLFETVDDSDDKLLNETRRKKR
GQRRRNRRLFTRKRDFIKYLIDNNIIELEFDKNPKILVRNFIEKYINPFSKNLELKYKSVTNLPIGFHNL
RKAAINEKYKLDKSELIVLLYFYLSLRGAFFDNPEDTKSKEMNKNEIEIFDKNESIKNAEFPIDKIIEFY
KISGKIRSTINLKFGHQDYLKEIKQVFEKQNIDFMNYEKFAMEEKSFFSRIRNYSEGPGNEKSFSKYGLY
ANENGNPELIINEKGQKIYTKIFKTLWESKIGKCSYDKKLYRAPKNSFSAKVFDITNKLTDWKHKNEYIS
ERLKRKILLSRFLNKDSKSAVEKILKEENIKFENLSEIAYNKDDNKINLPIINAYHSLTTIFKKHLINFE
NYLISNENDLSKLMSFYKQQSEKLFVPNEKGSYEINQNNNVLHIFDAISNILNKFSTIQDRIRILEGYFE
FSNLKKDVKSSEIYSEIAKLREFSGTSSLSFGAYYKFIPNLISEGSKNYSTISYEEKALQNQKNNFSHSN
LFEKTWVEDLIASPTVKRSLRQTMNLLKEIFKYSEKNNLEIEKIVVEVTRSSNNKHERKKIEGINKYRKE
KYEELKKVYDLPNENTTLLKKLWLLRQQQGYDAYSLRKIEANDVINKPWNYDIDHIVPRSISFDDSFSNL
VIVNKLDNAKKSNDLSAKQFIEKIYGIEKLKEAKENWGNWYLRNANGKAFNDKGKFIKLYTIDNLDEFDN
SDFINRNLSDTSYITNALVNHLTFSNSKYKYSVVSVNGKQTSNLRNQIAFVGIKNNKETEREWKRPEGFK
SINSNDFLIREEGKNDVKDDVLIKDRSFNGHHAEDAYFITIISQYFRSFKRIERLNVNYRKETRELDDLE
KNNIKFKEKASFDNFLLINALDELNEKLNQMRFSRMVITKKNTQLFNETLYSGKYDKGKNTIKKVEKLNL
LDNRTDKIKKIEEFFDEDKLKENELTKLHIFNHDKNLYETLKIIWNEVKIEIKNKNLNEKNYFKYFVNKK
LQEGKISFNEWVPILDNDFKIIRKIRYIKFSSEEKETDEIIFSQSNFLKIDQRQNFSFHNTLYWVQIWVY
KNQKDQYCFISIDARNSKFEKDEIKINYEKLKTQKEKLQIINEEPILKINKGDLFENEEKELFYIVGRDE
KPQKLEIKYILGKKIKDQKQIQKPVKKYFPNWKKVNLTYMGEIFKK
SEQ ID NO: 353
MDNKNYRIGIDVGLNSIGFCAVEVDQHDTPLGFLNLSVYRHDAGIDPNGKKTNTTRLAMSGVARRTRRLF
RKRKRRLAALDRFIEAQGWTLPDHADYKDPYTPWLVRAELAQTPIRDENDLHEKLAIAVRHIARHRGWRS
PWVPVRSLHVEQPPSDQYLALKERVEAKTLLQMPEGATPAEMVVALDLSVDVNLRPKNREKTDTRPENKK
PGFLGGKLMQSDNANELRKIAKIQGLDDALLRELIELVFAADSPKGASGELVGYDVLPGQHGKRRAEKAH
PAFQRYRIASIVSNLRIRHLGSGADERLDVETQKRVFEYLLNAKPTADITWSDVAEEIGVERNLLMGTAT
QTADGERASAKPPVDVTNVAFATCKIKPLKEWWLNADYEARCVMVSALSHAEKLTEGTAAEVEVAEFLQN
LSDEDNEKLDSFSLPIGRAAYSVDSLERLTKRMIENGEDLFEARVNEFGVSEDWRPPAEPIGARVGNPAV
DRVLKAVNRYLMAAEAEWGAPLSVNIEHVREGFISKRQAVEIDRENQKRYQRNQAVRSQIADHINATSGV
RGSDVTRYLAIQRQNGECLYCGTAITFVNSEMDHIVPRAGLGSTNTRDNLVATCERCNKSKSNKPFAVWA
AECGIPGVSVAEALKRVDFWIADGFASSKEHRELQKGVKDRLKRKVSDPEIDNRSMESVAWMARELAHRV
QYYFDEKHTGTKVRVFRGSLTSAARKASGFESRVNFIGGNGKTRLDRRHHAMDAATVAMLRNSVAKTLVL
RGNIRASERAIGAAETWKSFRGENVADRQIFESWSENMRVLVEKFNLALYNDEVSIFSSLRLQLGNGKAH
DDTITKLQMHKVGDAWSLTEIDRASTPALWCALTRQPDFTWKDGLPANEDRTIIVNGTHYGPLDKVGIFG
KAAASLLVRGGSVDIGSAIHHARIYRIAGKKPTYGMVRVFAPDLLRYRNEDLFNVELPPQSVSMRYAEPK
VREAIREGKAEYLGWLVVGDELLLDLSSETSGQIAELQQDFPGTTHWTVAGFFSPSRLRLRPVYLAQEGL
GEDVSEGSKSIIAGQGWRPAVNKVFGSAMPEVIRRDGLGRKRRFSYSGLPVSWQG
SEQ ID NO: 354
MRLGLDIGTSSIGWWLYETDGAGSDARITGVVDGGVRIFSDGRDPKSGASLAVDRRAARAMRRRRDRYLR
RRATLMKVLAETGLMPADPAEAKALEALDPFALRAAGLDEPLPLPHLGRALFHLNQRRGFKSNRKTDRGD
NESGKIKDATARLDMEMMANGARTYGEFLHKRRQKATDPRHVPSVRTRLSIANRGGPDGKEEAGYDFYPD
RRHLEEEFHKLWAAQGAHHPELTETLRDLLFEKIFFQRPLKEPEVGLCLFSGHHGVPPKDPRLPKAHPLT
QRRVLYETVNQLRVTADGREARPLTREERDQVIHALDNKKPTKSLSSMVLKLPALAKVLKLRDGERFTLE
TGVRDAIACDPLRASPAHPDRFGPRWSILDADAQWEVISRIRRVQSDAEHAALVDWLTEAHGLDRAHAEA
TAHAPLPDGYGRLGLTATTRILYQLTADVVTYADAVKACGWHHSDGRTGECFDRLPYYGEVLERHVIPGS
YHPDDDDITRFGRITNPTVHIGLNQLRRLVNRIIETHGKPHQIVVELARDLKKSEEQKRADIKRIRDTTE
AAKKRSEKLEELEIEDNGRNRMLLRLWEDLNPDDAMRRFCPYTGTRISAAMIFDGSCDVDHILPYSRTLD
DSFPNRTLCLREANRQKRNQTPWQAWGDTPHWHAIAANLKNLPENKRWRFAPDAMTRFEGENGFLDRALK
DTQYLARISRSYLDTLFTKGGHVWVVPGRFTEMLRRHWGLNSLLSDAGRGAVKAKNRTDHRHHAIDAAVI
AATDPGLLNRISRAAGQGEAAGQSAELIARDTPPPWEGFRDDLRVRLDRIIVSHRADHGRIDHAARKQGR
DSTAGQLHQETAYSIVDDIHVASRTDLLSLKPAQLLDEPGRSGQVRDPQLRKALRVATGGKTGKDFENAL
RYFASKPGPYQAIRRVRIIKPLQAQARVPVPAQDPIKAYQGGSNHLFEIWRLPDGEIEAQVITSFEAHTL
EGEKRPHPAAKRLLRVHKGDMVALERDGRRVVGHVQKMDIANGLFIVPHNEANADTRNNDKSDPFKWIQI
GARPAIASGIRRVSVDEIGRLRDGGTRPI
SEQ ID NO: 355
MLHCIAVIRVPPSEEPGFFETHADSCALCHHGCMTYAANDKAIRYRVGIDVGLRSIGFCAVEVDDEDHPI
RILNSVVHVHDAGTGGPGETESLRKRSGVAARARRRGRAEKQRLKKLDVLLEELGWGVSSNELLDSHAPW
HIRKRLVSEYIEDETERRQCLSVAMAHIARHRGWRNSFSKVDTLLLEQAPSDRMQGLKERVEDRTGLQFS
EEVTQGELVATLLEHDGDVTIRGFVRKGGKATKVHGVLEGKYMQSDLVAELRQICRTQRVSETTFEKLVL
SIFHSKEPAPSAARQRERVGLDELQLALDPAAKQPRAERAHPAFQKFKVVATLANMRIREQSAGERSLTS
EELNRVARYLLNHTESESPTWDDVARKLEVPRHRLRGSSRASLETGGGLTYPPVDDTTVRVMSAEVDWLA
DWWDCANDESRGHMIDAISNGCGSEPDDVEDEEVNELISSATAEDMLKLELLAKKLPSGRVAYSLKTLRE
VTAAILETGDDLSQAITRLYGVDPGWVPTPAPIEAPVGNPSVDRVLKQVARWLKFASKRWGVPQTVNIEH
TREGLKSASLLEEERERWERFEARREIRQKEMYKRLGISGPFRRSDQVRYEILDLQDCACLYCGNEINFQ
TFEVDHIIPRVDASSDSRRTNLAAVCHSCNSAKGGLAFGQWVKRGDCPSGVSLENAIKRVRSWSKDRLGL
TEKAMGKRKSEVISRLKTEMPYEEFDGRSMESVAWMAIELKKRIEGYFNSDRPEGCAAVQVNAYSGRLTA
CARRAAHVDKRVRLIRLKGDDGHHKNRFDRRNHAMDALVIALMTPAIARTIAVREDRREAQQLTRAFESW
KNFLGSEERMQDRWESWIGDVEYACDRLNELIDADKIPVTENLRLRNSGKLHADQPESLKKARRGSKRPR
PQRYVLGDALPADVINRVTDPGLWTALVRAPGFDSQLGLPADLNRGLKLRGKRISADFPIDYFPTDSPAL
AVQGGYVGLEFHHARLYRIIGPKEKVKYALLRVCAIDLCGIDCDDLFEVELKPSSISMRTADAKLKEAMG
NGSAKQIGWLVLGDEIQIDPTKFPKQSIGKFLKECGPVSSWRVSALDTPSKITLKPRLLSNEPLLKTSRV
GGHESDLVVAECVEKIMKKTGWVVEINALCQSGLIRVIRRNALGEVRTSPKSGLPISLNLR
SEQ ID NO: 356
MRYRVGLDLGTASVGAAVFSMDEQGNPMELIWHYERLFSEPLVPDMGQLKPKKAARRLARQQRRQIDRRA
SRLRRIAIVSRRLGIAPGRNDSGVHGNDVPTLRAMAVNERIELGQLRAVLLRMGKKRGYGGTFKAVRKVG
EAGEVASGASRLEEEMVALASVQNKDSVTVGEYLAARVEHGLPSKLKVAANNEYYAPEYALFRQYLGLPA
IKGRPDCLPNMYALRHQIEHEFERIWATQSQFHDVMKDHGVKEEIRNAIFFQRPLKSPADKVGRCSLQTN
LPRAPRAQIAAQNFRIEKQMADLRWGMGRRAEMLNDHQKAVIRELLNQQKELSFRKIYKELERAGCPGPE
GKGLNMDRAALGGRDDLSGNTTLAAWRKLGLEDRWQELDEVTQIQVINFLADLGSPEQLDTDDWSCRFMG
KNGRPRNFSDEFVAFMNELRMTDGFDRLSKMGFEGGRSSYSIKALKALTEWMIAPHWRETPETHRVDEEA
AIRECYPESLATPAQGGRQSKLEPPPLTGNEVVDVALRQVRHTINMMIDDLGSVPAQIVVEMAREMKGGV
TRRNDIEKQNKRFASERKKAAQSIEENGKTPTPARILRYQLWIEQGHQCPYCESNISLEQALSGAYTNFE
HILPRTLTQIGRKRSELVLAHRECNDEKGNRTPYQAFGHDDRRWRIVEQRANALPKKSSRKTRLLLLKDF
EGEALTDESIDEFADRQLHESSWLAKVTTQWLSSLGSDVYVSRGSLTAELRRRWGLDTVIPQVRFESGMP
VVDEEGAEITPEEFEKFRLQWEGHRVTREMRTDRRPDKRIDHRHHLVDAIVTALTSRSLYQQYAKAWKVA
DEKQRHGRVDVKVELPMPILTIRDIALEAVRSVRISHKPDRYPDGRFFEATAYGIAQRLDERSGEKVDWL
VSRKSLTDLAPEKKSIDVDKVRANISRIVGEAIRLHISNIFEKRVSKGMTPQQALREPIEFQGNILRKVR
CFYSKADDCVRIEHSSRRGHHYKMLLNDGFAYMEVPCKEGILYGVPNLVRPSEAVGIKRAPESGDFIRFY
KGDTVKNIKTGRVYTIKQILGDGGGKLILTPVTETKPADLLSAKWGRLKVGGRNIHLLRLCAE
SEQ ID NO: 357
MIGEHVRGGCLFDDHWTPNWGAFRLPNTVRTFTKAENPKDGSSLAEPRRQARGLRRRLRRKTQRLEDLRR
LLAKEGVLSLSDLETLFRETPAKDPYQLRAEGLDRPLSFPEWVRVLYHITKHRGFQSNRRNPVEDGQERS
RQEEEGKLLSGVGENERLLREGGYRTAGEMLARDPKFQDHRRNRAGDYSHTLSRSLLLEEARRLFQSQRT
LGNPHASSNLEEAFLHLVAFQNPFASGEDIRNKAGHCSLEPDQIRAPRRSASAETFMLLQKTGNLRLIHR
RTGEERPLTDKEREQIHLLAWKQEKVTHKTLRRHLEIPEEWLFTGLPYHRSGDKAEEKLFVHLAGIHEIR
KALDKGPDPAVWDTLRSRRDLLDSIADTLTFYKNEDEILPRLESLGLSPENARALAPLSFSGTAHLSLSA
LGKLLPHLEEGKSYTQARADAGYAAPPPDRHPKLPPLEEADWRNPVVFRALTQTRKVVNALVRRYGPPWC
IHLETARELSQPAKVRRRIETEQQANEKKKQQAEREFLDIVGTAPGPGDLLKMRLWREQGGFCPYCEEYL
NPTRLAEPGYAEMDHILPYSRSLDNGWHNRVLVHGKDNRDKGNRTPFEAFGGDTARWDRLVAWVQASHLS
APKKRNLLREDFGEEAERELKDRNLTDTRFITKTAATLLRDRLTFHPEAPKDPVMTLNGRLTAFLRKQWG
LHKNRKNGDLHHALDAAVLAVASRSFVYRLSSHNAAWGELPRGREAENGFSLPYPAFRSEVLARLCPTRE
EILLRLDQGGVGYDEAFRNGLRPVFVSRAPSRRLRGKAHMETLRSPKWKDHPEGPRTASRIPLKDLNLEK
LERMVGKDRDRKLYEALRERLAAFGGNGKKAFVAPFRKPCRSGEGPLVRSLRIFDSGYSGVELRDGGEVY
AVADHESMVRVDVYAKKNRFYLVPVYVADVARGIVKNRAIVAHKSEEEWDLVDGSFDFRFSLFPGDLVEI
EKKDGAYLGYYKSCHRGDGRLLLDRHDRMPRESDCGTFYVSTRKDVLSMSKYQVDPLGEIRLVGSEKPPF
VL
SEQ ID NO: 358
MEKKRKVTLGFDLGIASVGWAIVDSETNQVYKLGSRLFDAPDTNLERRTQRGTRRLLRRRKYRNQKFYNL
VKRTEVFGLSSREAIENRFRELSIKYPNIIELKTKALSQEVCPDEIAWILHDYLKNRGYFYDEKETKEDF
DQQTVESMPSYKLNEFYKKYGYFKGALSQPTESEMKDNKDLKEAFFFDFSNKEWLKEINYFFNVQKNILS
ETFIEEFKKIFSFTRDISKGPGSDNMPSPYGIFGEFGDNGQGGRYEHIWDKNIGKCSIFTNEQRAPKYLP
SALIFNFLNELANIRLYSTDKKNIQPLWKLSSVDKLNILLNLFNLPISEKKKKLTSTNINDIVKKESIKS
IMISVEDIDMIKDEWAGKEPNVYGVGLSGLNIEESAKENKFKFQDLKILNVLINLLDNVGIKFEFKDRND
IIKNLELLDNLYLFLIYQKESNNKDSSIDLFIAKNESLNIENLKLKLKEFLLGAGNEFENHNSKTHSLSK
KAIDEILPKLLDNNEGWNLEAIKNYDEEIKSQIEDNSSLMAKQDKKYLNDNFLKDAILPPNVKVTFQQAI
LIFNKIIQKFSKDFEIDKVVIELAREMTQDQENDALKGIAKAQKSKKSLVEERLEANNIDKSVFNDKYEK
LIYKIFLWISQDFKDPYTGAQISVNEIVNNKVEIDHIIPYSLCFDDSSANKVLVHKQSNQEKSNSLPYEY
IKQGHSGWNWDEFTKYVKRVFVNNVDSILSKKERLKKSENLLTASYDGYDKLGFLARNLNDTRYATILFR
DQLNNYAEHHLIDNKKMFKVIAMNGAVTSFIRKNMSYDNKLRLKDRSDFSHHAYDAAIIALFSNKTKTLY
NLIDPSLNGIISKRSEGYWVIEDRYTGEIKELKKEDWTSIKNNVQARKIAKEIEEYLIDLDDEVFFSRKT
KRKTNRQLYNETIYGIATKTDEDGITNYYKKEKFSILDDKDIYLRLLREREKFVINQSNPEVIDQIIEII
ESYGKENNIPSRDEAINIKYTKNKINYNLYLKQYMRSLTKSLDQFSEEFINQMIANKTFVLYNPTKNTTR
KIKFLRLVNDVKINDIRKNQVINKFNGKNNEPKAFYENINSLGAIVFKNSANNFKTLSINTQIAIFGDKN
WDIEDFKTYNMEKIEKYKEIYGIDKTYNFHSFIFPGTILLDKQNKEFYYISSIQTVRDIIEIKFLNKIEF
KDENKNQDTSKTPKRLMFGIKSIMNNYEQVDISPFGINKKIFE
SEQ ID NO: 359
MGYRIGLDVGITSTGYAVLKTDKNGLPYKILTLDSVIYPRAENPQTGASLAEPRRIKRGLRRRTRRTKFR
KQRTQQLFIHSGLLSKPEIEQILATPQAKYSVYELRVAGLDRRLTNSELFRVLYFFIGHRGFKSNRKAEL
NPENEADKKQMGQLLNSIEEIRKAIAEKGYRTVGELYLKDPKYNDHKRNKGYIDGYLSTPNRQMLVDEIK
QILDKQRELGNEKLTDEFYATYLLGDENRAGIFQAQRDFDEGPGAGPYAGDQIKKMVGKDIFEPTEDRAA
KATYTFQYFNLLQKMTSLNYQNTTGDTWHTLNGLDRQAIIDAVFAKAEKPTKTYKPTDFGELRKLLKLPD
DARFNLVNYGSLQTQKEIETVEKKTRFVDFKAYHDLVKVLPEEMWQSRQLLDHIGTALTLYSSDKRRRRY
FAEELNLPAELIEKLLPLNFSKFGHLSIKSMQNIIPYLEMGQVYSEATTNTGYDFRKKQISKDTIREEIT
NPVVRRAVTKTIKIVEQIIRRYGKPDGINIELARELGRNFKERGDIQKRQDKNRQTNDKIAAELTELGIP
VNGQNIIRYKLHKEQNGVDPYTGDQIPFERAFSEGYEVDHIIPYSISWDDSYTNKVLTSAKCNREKGNRI
PMVYLANNEQRLNALTNIADNIIRNSRKRQKLLKQKLSDEELKDWKQRNINDTRFITRVLYNYFRQAIEF
NPELEKKQRVLPLNGEVTSKIRSRWGFLKVREDGDLHHAIDATVIAAITPKFIQQVTKYSQHQEVKNNQA
LWHDAEIKDAEYAAEAQRMDADLFNKIFNGFPLPWPEFLDELLARISDNPVEMMKSRSWNTYTPIEIAKL
KPVFVVRLANHKISGPAHLDTIRSAKLFDEKGIVLSRVSITKLKINKKGQVATGDGIYDPENSNNGDKVV
YSAIRQALEAHNGSGELAFPDGYLEYVDHGTKKLVRKVRVAKKVSLPVRLKNKAAADNGSMVRIDVFNTG
KKFVFVPIYIKDTVEQVLPNKAIARGKSLWYQITESDQFCFSLYPGDMVHIESKTGIKPKYSNKENNTSV
VPIKNFYGYFDGADIATASILVRAHDSSYTARSIGIAGLLKFEKYQVDYFGRYHKVHEKKRQLFVKRDE
SEQ ID NO: 360
MQKNINTKQNHIYIKQAQKIKEKLGDKPYRIGLDLGVGSIGFAIVSMEENDGNVLLPKEIIMVGSRIFKA
SAGAADRKLSRGQRNNHRHTRERMRYLWKVLAEQKLALPVPADLDRKENSSEGETSAKRFLGDVLQKDIY
ELRVKSLDERLSLQELGYVLYHIAGHRGSSAIRTFENDSEEAQKENTENKKIAGNIKRLMAKKNYRTYGE
YLYKEFFENKEKHKREKISNAANNHKFSPTRDLVIKEAEAILKKQAGKDGFHKELTEEYIEKLTKAIGYE
SEKLIPESGFCPYLKDEKRLPASHKLNEERRLWETLNNARYSDPIVDIVTGEITGYYEKQFTKEQKQKLF
DYLLTGSELTPAQTKKLLGLKNTNFEDIILQGRDKKAQKIKGYKLIKLESMPFWARLSEAQQDSFLYDWN
SCPDEKLLTEKLSNEYHLTEEEIDNAFNEIVLSSSYAPLGKSAMLIILEKIKNDLSYTEAVEEALKEGKL
TKEKQAIKDRLPYYGAVLQESTQKIIAKGFSPQFKDKGYKTPHTNKYELEYGRIANPVVHQTLNELRKLV
NEIIDILGKKPCEIGLETARELKKSAEDRSKLSREQNDNESNRNRIYEIYIRPQQQVIITRRENPRNYIL
KFELLEEQKSQCPFCGGQISPNDIINNQADIEHLFPIAESEDNGRNNLVISHSACNADKAKRSPWAAFAS
AAKDSKYDYNRILSNVKENIPHKAWRFNQGAFEKFIENKPMAARFKTDNSYISKVAHKYLACLFEKPNII
CVKGSLTAQLRMAWGLQGLMIPFAKQLITEKESESFNKDVNSNKKIRLDNRHHALDAIVIAYASRGYGNL
LNKMAGKDYKINYSERNWLSKILLPPNNIVWENIDADLESFESSVKTALKNAFISVKHDHSDNGELVKGT
MYKIFYSERGYTLTTYKKLSALKLTDPQKKKTPKDFLETALLKFKGRESEMKNEKIKSAIENNKRLFDVI
QDNLEKAKKLLEEENEKSKAEGKKEKNINDASIYQKAISLSGDKYVQLSKKEPGKFFAISKPTPTTTGYG
YDTGDSLCVDLYYDNKGKLCGEIIRKIDAQQKNPLKYKEQGFTLFERIYGGDILEVDFDIHSDKNSFRNN
TGSAPENRVFIKVGTFTEITNNNIQIWFGNIIKSTGGQDDSFTINSMQQYNPRKLILSSCGFIKYRSPIL
KNKEG
SEQ ID NO: 361
MAAFKPNPINYILGLDIGIASVGWAMVEIDEDENPICLIDLGVRVFERAEVPKTGDSLAMARRLARSVRR
LTRRRAHRLLRARRLLKREGVLQAADFDENGLIKSLPNTPWQLRAAALDRKLTPLEWSAVLLHLIKHRGY
LSQRKNEGETADKELGALLKGVADNAHALQTGDFRTPAELALNKFEKESGHIRNQRGDYSHTFSRKDLQA
ELILLFEKQKEFGNPHVSGGLKEGIETLLMTQRPALSGDAVQKMLGHCTFEPAEPKAAKNTYTAERFIWL
TKLNNLRILEQGSERPLTDTERATLMDEPYRKSKLTYAQARKLLGLEDTAFFKGLRYGKDNAEASTLMEM
KAYHAISRALEKEGLKDKKSPLNLSPELQDEIGTAFSLFKTDEDITGRLKDRIQPEILEALLKHISFDKF
VQISLKALRRIVPLMEQGKRYDEACAEIYGDHYGKKNTEEKIYLPPIPADEIRNPVVLRALSQARKVING
VVRRYGSPARIHIETAREVGKSFKDRKEIEKRQEENRKDREKAAAKFREYFPNFVGEPKSKDILKLRLYE
QQHGKCLYSGKEINLGRLNEKGYVEIDHALPFSRTWDDSFNNKVLVLGSENQNKGNQTPYEYFNGKDNSR
EWQEFKARVETSRFPRSKKQRILLQKFDEDGFKERNLNDTRYVNRFLCQFVADRMRLTGKGKKRVFASNG
QITNLLRGFWGLRKVRAENDRHHALDAVVVACSTVAMQQKITRFVRYKEMNAFDGKTIDKETGEVLHQKT
HFPQPWEFFAQEVMIRVFGKPDGKPEFEEADTPEKLRTLLAEKLSSRPEAVHEYVTPLFVSRAPNRKMSG
QGHMETVKSAKRLDEGVSVLRVPLTQLKLKDLEKMVNREREPKLYEALKARLEAHKDDPAKAFAEPFYKY
DKAGNRTQQVKAVRVEQVQKTGVWVRNHNGIADNATMVRVDVFEKGDKYYLVPIYSWQVAKGILPDRAVV
QGKDEEDWQLIDDSFNFKFSLHPNDLVEVITKKARMFGYFASCHRGTGNINIRIHDLDHKIGKNGILEGI
GVKTALSFQKYQIDELGKEIRPCRLKKRPPVR
SEQ ID NO: 362
MQTTNLSYILGLDLGIASVGWAVVEINENEDPIGLIDVGVRIFERAEVPKTGESLALSRRLARSTRRLIR
RRAHRLLLAKRFLKREGILSTIDLEKGLPNQAWELRVAGLERRLSAIEWGAVLLHLIKHRGYLSKRKNES
QTNNKELGALLSGVAQNHQLLQSDDYRTPAELALKKFAKEEGHIRNQRGAYTHTFNRLDLLAELNLLFAQ
QHQFGNPHCKEHIQQYMTELLMWQKPALSGEAILKMLGKCTHEKNEFKAAKHTYSAERFVWLTKLNNLRI
LEDGAERALNEEERQLLINHPYEKSKLTYAQVRKLLGLSEQAIFKHLRYSKENAESATFMELKAWHAIRK
ALENQGLKDTWQDLAKKPDLLDEIGTAFSLYKTDEDIQQYLTNKVPNSVINALLVSLNFDKFIELSLKSL
RKILPLMEQGKRYDQACREIYGHHYGEANQKTSQLLPAIPAQEIRNPVVLRTLSQARKVINAIIRQYGSP
ARVHIETGRELGKSFKERREIQKQQEDNRTKRESAVQKFKELFSDFSSEPKSKDILKFRLYEQQHGKCLY
SGKEINIHRLNEKGYVEIDHALPFSRTWDDSFNNKVLVLASENQNKGNQTPYEWLQGKINSERWKNFVAL
VLGSQCSAAKKQRLLTQVIDDNKFIDRNLNDTRYIARFLSNYIQENLLLVGKNKKNVFTPNGQITALLRS
RWGLIKARENNNRHHALDAIVVACATPSMQQKITRFIRFKEVHPYKIENRYEMVDQESGEIISPHFPEPW
AYFRQEVNIRVFDNHPDTVLKEMLPDRPQANHQFVQPLFVSRAPTRKMSGQGHMETIKSAKRLAEGISVL
RIPLTQLKPNLLENMVNKEREPALYAGLKARLAEFNQDPAKAFATPFYKQGGQQVKAIRVEQVQKSGVLV
RENNGVADNASIVRTDVFIKNNKFFLVPIYTWQVAKGILPNKAIVAHKNEDEWEEMDEGAKFKFSLFPND
LVELKTKKEYFFGYYIGLDRATGNISLKEHDGEISKGKDGVYRVGVKLALSFEKYQVDELGKNRQICRPQ
QRQPVR
SEQ ID NO: 363
MGIRFAFDLGTNSIGWAVWRTGPGVFGEDTAASLDGSGVLIFKDGRNPKDGQSLATMRRVPRQSRKRRDR
FVLRRRDLLAALRKAGLFPVDVEEGRRLAATDPYHLRAKALDESLTPHEMGRVIFHLNQRRGFRSNRKAD
RQDREKGKIAEGSKRLAETLAATNCRTLGEFLWSRHRGTPRTRSPTRIRMEGEGAKALYAFYPTREMVRA
EFERLWTAQSRFAPDLLTPERHEEIAGILFRQRDLAPPKIGCCTFEPSERRLPRALPSVEARGIYERLAH
LRITTGPVSDRGLTRPERDVLASALLAGKSLTFKAVRKTLKILPHALVNFEEAGEKGLDGALTAKLLSKP
DHYGAAWHGLSFAEKDTFVGKLLDEADEERLIRRLVTENRLSEDAARRCASIPLADGYGRLGRTANTEIL
AALVEETDETGTVVTYAEAVRRAGERTGRNWHHSDERDGVILDRLPYYGEILQRHVVPGSGEPEEKNEAA
RWGRLANPTVHIGLNQLRKVVNRLIAAHGRPDQIVVELARELKLNREQKERLDRENRKNREENERRTAIL
AEHGQRDTAENKIRLRLFEEQARANAGIALCPYTGRAIGIAELFTSEVEIDHILPVSLTLDDSLANRVLC
RREANREKRRQTPFQAFGATPAWNDIVARAAKLPPNKRWRFDPAALERFEREGGFLGRQLNETKYLSRLA
KIYLGKICDPDRVYVTPGTLTGLLRARWGLNSILSDSNFKNRSDHRHHAVDAVVIGVLTRGMIQRIAHDA
ARAEDQDLDRVFRDVPVPFEDFRDHVRERVSTITVAVKPEHGKGGALHEDTSYGLVPDTDPNAALGNLVV
RKPIRSLTAGEVDRVRDRALRARLGALAAPFRDESGRVRDAKGLAQALEAFGAENGIRRVRILKPDASVV
TIADRRTGVPYRAVAPGENHHVDIVQMRDGSWRGFAASVFEVNRPGWRPEWEVKKLGGKLVMRLHKGDMV
ELSDKDGQRRVKVVQQIEISANRVRLSPHNDGGKLQDRHADADDPFRWDLATIPLLKDRGCVAVRVDPIG
VVTLRRSNV
SEQ ID NO: 364
MMEVFMGRLVLGLDIGITSVGFGIIDLDESEIVDYGVRLFKEGTAAENETRRTKRGGRRLKRRRVTRRED
MLHLLKQAGIISTSFHPLNNPYDVRVKGLNERLNGEELATALLHLCKHRGSSVETIEDDEAKAKEAGETK
KVLSMNDQLLKSGKYVCEIQKERLRTNGHIRGHENNFKTRAYVDEAFQILSHQDLSNELKSAIITIISRK
RMYYDGPGGPLSPTPYGRYTYFGQKEPIDLIEKMRGKCSLFPNEPRAPKLAYSAELFNLLNDLNNLSIEG
EKLTSEQKAMILKIVHEKGKITPKQLAKEVGVSLEQIRGFRIDTKGSPLLSELTGYKMIREVLEKSNDEH
LEDHVFYDEIAEILTKTKDIEGRKKQISELSSDLNEESVHQLAGLTKFTAYHSLSFKALRLINEEMLKTE
LNQMQSITLFGLKQNNELSVKGMKNIQADDTAILSPVAKRAQRETFKVVNRLREIYGEFDSIVVEMAREK
NSEEQRKAIRERQKFFEMRNKQVADIIGDDRKINAKLREKLVLYQEQDGKTAYSLEPIDLKLLIDDPNAY
EVDHIIPISISLDDSITNKVLVTHRENQEKGNLTPISAFVKGRFTKGSLAQYKAYCLKLKEKNIKTNKGY
RKKVEQYLLNENDIYKYDIQKEFINRNLVDTSYASRVVLNTLTTYFKQNEIPTKVFTVKGSLTNAFRRKI
NLKKDRDEDYGHHAIDALIIASMPKMRLLSTIFSRYKIEDIYDESTGEVFSSGDDSMYYDDRYFAFIASL
KAIKVRKFSHKIDTKPNRSVADETIYSTRVIDGKEKVVKKYKDIYDPKFTALAEDILNNAYQEKYLMALH
DPQTFDQIVKVVNYYFEEMSKSEKYFTKDKKGRIKISGMNPLSLYRDEHGMLKKYSKKGDGPAITQMKYF
DGVLGNHIDISAHYQVRDKKVVLQQISPYRTDFYYSKENGYKFVTIRYKDVRWSEKKKKYVIDQQDYAMK
KAEKKIDDTYEFQFSMHRDELIGITKAEGEALIYPDETWHNFNFFFHAGETPEILKFTATNNDKSNKIEV
KPIHCYCKMRLMPTISKKIVRIDKYATDVVGNLYKVKKNTLKFEFD
SEQ ID NO: 365
MKKILGVDLGITSFGYAILQETGKDLYRCLDNSVVMRNNPYDEKSGESSQSIRSTQKSMRRLIEKRKKRI
RCVAQTMERYGILDYSETMKINDPKNNPIKNRWQLRAVDAWKRPLSPQELFAIFAHMAKHRGYKSIATED
LIYELELELGLNDPEKESEKKADERRQVYNALRHLEELRKKYGGETIAQTIHRAVEAGDLRSYRNHDDYE
KMIRREDIEEEIEKVLLRQAELGALGLPEEQVSELIDELKACITDQEMPTIDESLFGKCTFYKDELAAPA
YSYLYDLYRLYKKLADLNIDGYEVTQEDREKVIEWVEKKIAQGKNLKKITHKDLRKILGLAPEQKIFGVE
DERIVKGKKEPRTFVPFFFLADIAKFKELFASIQKHPDALQIFRELAEILQRSKTPQEALDRLRALMAGK
GIDTDDRELLELFKNKRSGTRELSHRYILEALPLFLEGYDEKEVQRILGFDDREDYSRYPKSLRHLHLRE
GNLFEKEENPINNHAVKSLASWALGLIADLSWRYGPFDEIILETTRDALPEKIRKEIDKAMREREKALDK
IIGKYKKEFPSIDKRLARKIQLWERQKGLDLYSGKVINLSQLLDGSADIEHIVPQSLGGLSTDYNTIVTL
KSVNAAKGNRLPGDWLAGNPDYRERIGMLSEKGLIDWKKRKNLLAQSLDEIYTENTHSKGIRATSYLEAL
VAQVLKRYYPFPDPELRKNGIGVRMIPGKVTSKTRSLLGIKSKSRETNFHHAEDALILSTLTRGWQNRLH
RMLRDNYGKSEAELKELWKKYMPHIEGLTLADYIDEAFRRFMSKGEESLFYRDMFDTIRSISYWVDKKPL
SASSHKETVYSSRHEVPTLRKNILEAFDSLNVIKDRHKLTTEEFMKRYDKEIRQKLWLHRIGNTNDESYR
AVEERATQIAQILTRYQLMDAQNDKEIDEKFQQALKELITSPIEVTGKLLRKMRFVYDKLNAMQIDRGLV
ETDKNMLGIHISKGPNEKLIFRRMDVNNAHELQKERSGILCYLNEMLFIFNKKGLIHYGCLRSYLEKGQG
SKYIALFNPRFPANPKAQPSKFTSDSKIKQVGIGSATGIIKAHLDLDGHVRSYEVFGTLPEGSIEWFKEE
SGYGRVEDDPHH
SEQ ID NO: 366
MRPIEPWILGLDIGTDSLGWAVFSCEEKGPPTAKELLGGGVRLFDSGRDAKDHTSRQAERGAFRRARRQT
RTWPWRRDRLIALFQAAGLTPPAAETRQIALALRREAVSRPLAPDALWAALLHLAHHRGFRSNRIDKRER
AAAKALAKAKPAKATAKATAPAKEADDEAGFWEGAEAALRQRMAASGAPTVGALLADDLDRGQPVRMRYN
QSDRDGVVAPTRALIAEELAEIVARQSSAYPGLDWPAVTRLVLDQRPLRSKGAGPCAFLPGEDRALRALP
TVQDFIIRQTLANLRLPSTSADEPRPLTDEEHAKALALLSTARFVEWPALRRALGLKRGVKFTAETERNG
AKQAARGTAGNLTEAILAPLIPGWSGWDLDRKDRVFSDLWAARQDRSALLALIGDPRGPTRVTEDETAEA
VADAIQIVLPTGRASLSAKAARAIAQAMAPGIGYDEAVTLALGLHHSHRPRQERLARLPYYAAALPDVGL
DGDPVGPPPAEDDGAAAEAYYGRIGNISVHIALNETRKIVNALLHRHGPILRLVMVETTRELKAGADERK
RMIAEQAERERENAEIDVELRKSDRWMANARERRQRVRLARRQNNLCPYTSTPIGHADLLGDAYDIDHVI
PLARGGRDSLDNMVLCQSDANKTKGDKTPWEAFHDKPGWIAQRDDFLARLDPQTAKALAWRFADDAGERV
ARKSAEDEDQGFLPRQLTDTGYIARVALRYLSLVTNEPNAVVATNGRLTGLLRLAWDITPGPAPRDLLPT
PRDALRDDTAARRFLDGLTPPPLAKAVEGAVQARLAALGRSRVADAGLADALGLTLASLGGGGKNRADHR
HHFIDAAMIAVTTRGLINQINQASGAGRILDLRKWPRTNFEPPYPTFRAEVMKQWDHIHPSIRPAHRDGG
SLHAATVFGVRNRPDARVLVQRKPVEKLFLDANAKPLPADKIAEIIDGFASPRMAKRFKALLARYQAAHP
EVPPALAALAVARDPAFGPRGMTANTVIAGRSDGDGEDAGLITPFRANPKAAVRTMGNAVYEVWEIQVKG
RPRWTHRVLTRFDRTQPAPPPPPENARLVMRLRRGDLVYWPLESGDRLFLVKKMAVDGRLALWPARLATG
KATALYAQLSCPNINLNGDQGYCVQSAEGIRKEKIRTTSCTALGRLRLSKKAT
SEQ ID NO: 367
MKYTLGLDVGIASVGWAVIDKDNNKIIDLGVRCFDKAEESKTGESLATARRIARGMRRRISRRSQRLRLV
KKLFVQYEIIKDSSEFNRIFDTSRDGWKDPWELRYNALSRILKPYELVQVLTHITKRRGFKSNRKEDLST
TKEGVVITSIKNNSEMLRTKNYRTIGEMIFMETPENSNKRNKVDEYIHTIAREDLLNEIKYIFSIQRKLG
SPFVTEKLEHDFLNIWEFQRPFASGDSILSKVGKCTLLKEELRAPTSCYTSEYFGLLQSINNLVLVEDNN
TLTLNNDQRAKIIEYAHFKNEIKYSEIRKLLDIEPEILFKAHNLTHKNPSGNNESKKFYEMKSYHKLKST
LPTDIWGKLHSNKESLDNLFYCLTVYKNDNEIKDYLQANNLDYLIEYIAKLPTFNKFKHLSLVAMKRIIP
FMEKGYKYSDACNMAELDFTGSSKLEKCNKLTVEPIIENVTNPVVIRALTQARKVINAIIQKYGLPYMVN
IELAREAGMTRQDRDNLKKEHENNRKAREKISDLIRQNGRVASGLDILKWRLWEDQGGRCAYSGKPIPVC
DLLNDSLTQIDHIYPYSRSMDDSYMNKVLVLTDENQNKRSYTPYEVWGSTEKWEDFEARIYSMHLPQSKE
KRLLNRNFITKDLDSFISRNLNDTRYISRFLKNYIESYLQFSNDSPKSCVVCVNGQCTAQLRSRWGLNKN
REESDLHHALDAAVIACADRKIIKEITNYYNERENHNYKVKYPLPWHSFRQDLMETLAGVFISRAPRRKI
TGPAHDETIRSPKHFNKGLTSVKIPLTTVTLEKLETMVKNTKGGISDKAVYNVLKNRLIEHNNKPLKAFA
EKIYKPLKNGTNGAIIRSIRVETPSYTGVFRNEGKGISDNSLMVRVDVFKKKDKYYLVPIYVAHMIKKEL
PSKAIVPLKPESQWELIDSTHEFLFSLYQNDYLVIKTKKGITEGYYRSCHRGTGSLSLMPHFANNKNVKI
DIGVRTAISIEKYNVDILGNKSIVKGEPRRGMEKYNSFKSN
SEQ ID NO: 368
MIRTLGIDIGIASIGWAVIEGEYTDKGLENKEIVASGVRVFTKAENPKNKESLALPRTLARSARRRNARK
KGRIQQVKHYLSKALGLDLECFVQGEKLATLFQTSKDFLSPWELRERALYRVLDKEELARVILHIAKRRG
YDDITYGVEDNDSGKIKKAIAENSKRIKEEQCKTIGEMMYKLYFQKSLNVRNKKESYNRCVGRSELREEL
KTIFQIQQELKSPWVNEELIYKLLGNPDAQSKQEREGLIFYQRPLKGFGDKIGKCSHIKKGENSPYRACK
HAPSAEEFVALTKSINFLKNLTNRHGLCFSQEDMCVYLGKILQEAQKNEKGLTYSKLKLLLDLPSDFEFL
GLDYSGKNPEKAVFLSLPSTFKLNKITQDRKTQDKIANILGANKDWEAILKELESLQLSKEQIQTIKDAK
LNFSKHINLSLEALYHLLPLMREGKRYDEGVEILQERGIFSKPQPKNRQLLPPLSELAKEESYFDIPNPV
LRRALSEFRKVVNALLEKYGGFHYFHIELTRDVCKAKSARMQLEKINKKNKSENDAASQLLEVLGLPNTY
NNRLKCKLWKQQEEYCLYSGEKITIDHLKDQRALQIDHAFPLSRSLDDSQSNKVLCLTSSNQEKSNKTPY
EWLGSDEKKWDMYVGRVYSSNFSPSKKRKLTQKNFKERNEEDFLARNLVDTGYIGRVTKEYIKHSLSFLP
LPDGKKEHIRIISGSMTSTMRSFWGVQEKNRDHHLHHAQDAIIIACIEPSMIQKYTTYLKDKETHRLKSH
QKAQILREGDHKLSLRWPMSNFKDKIQESIQNIIPSHHVSHKVTGELHQETVRTKEFYYQAFGGEEGVKK
ALKFGKIREINQGIVDNGAMVRVDIFKSKDKGKFYAVPIYTYDFAIGKLPNKAIVQGKKNGIIKDWLEMD
ENYEFCFSLFKNDCIKIQTKEMQEAVLAIYKSTNSAKATIELEHLSKYALKNEDEEKMFTDTDKEKNKTM
TRESCGIQGLKVFQKVKLSVLGEVLEHKPRNRQNIALKTTPKHV
SEQ ID NO: 369
MKYSIGLDIGIASVGWSVINKDKERIEDMGVRIFQKAENPKDGSSLASSRREKRGSRRRNRRKKHRLDRI
KNILCESGLVKKNEIEKIYKNAYLKSPWELRAKSLEAKISNKEIAQILLHIAKRRGFKSFRKTDRNADDT
GKLLSGIQENKKIMEEKGYLTIGDMVAKDPKFNTHVRNKAGSYLFSFSRKLLEDEVRKIQAKQKELGNTH
FTDDVLEKYIEVFNSQRNFDEGPSKPSPYYSEIGQIAKMIGNCTFESSEKRTAKNTWSGERFVFLQKLNN
FRIVGLSGKRPLTEEERDIVEKEVYLKKEVRYEKLRKILYLKEEERFGDLNYSKDEKQDKKTEKTKFISL
IGNYTIKKLNLSEKLKSEIEEDKSKLDKIIEILTFNKSDKTIESNLKKLELSREDIEILLSEEFSGTLNL
SLKAIKKILPYLEKGLSYNEACEKADYDYKNNGIKFKRGELLPVVDKDLIANPVVLRAISQTRKVVNAII
RKYGTPHTIHVEVARDLAKSYDDRQTIIKENKKRELENEKTKKFISEEFGIKNVKGKLLLKYRLYQEQEG
RCAYSRKELSLSEVILDESMTDIDHIIPYSRSMDDSYSNKVLVLSGENRKKSNLLPKEYFDRQGRDWDTF
VLNVKAMKIHPRKKSNLLKEKFTREDNKDWKSRALNDTRYISRFVANYLENALEYRDDSPKKRVFMIPGQ
LTAQLRARWRLNKVRENGDLHHALDAAVVAVTDQKAINNISNISRYKELKNCKDVIPSIEYHADEETGEV
YFEEVKDTRFPMPWSGFDLELQKRLESENPREEFYNLLSDKRYLGWFNYEEGFIEKLRPVFVSRMPNRGV
KGQAHQETIRSSKKISNQIAVSKKPLNSIKLKDLEKMQGRDTDRKLYEALKNRLEEYDDKPEKAFAEPFY
KPTNSGKRGPLVRGIKVEEKQNVGVYVNGGQASNGSMVRIDVFRKNGKFYTVPIYVHQTLLKELPNRAIN
GKPYKDWDLIDGSFEFLYSFYPNDLIEIEFGKSKSIKNDNKLTKTEIPEVNLSEVLGYYRGMDTSTGAAT
IDTQDGKIQMRIGIKTVKNIKKYQVDVLGNVYKVKREKRQTF
SEQ ID NO: 370
MSKKVSRRYEEQAQEICQRLGSRPYSIGLDLGVGSIGVAVAAYDPIKKQPSDLVFVSSRIFIPSTGAAER
RQKRGQRNSLRHRANRLKFLWKLLAERNLMLSYSEQDVPDPARLRFEDAVVRANPYELRLKGLNEQLTLS
ELGYALYHIANHRGSSSVRTFLDEEKSSDDKKLEEQQAMTEQLAKEKGISTFIEVLTAFNTNGLIGYRNS
ESVKSKGVPVPTRDIISNEIDVLLQTQKQFYQEILSDEYCDRIVSAILFENEKIVPEAGCCPYFPDEKKL
PRCHFLNEERRLWEAINNARIKMPMQEGAAKRYQSASFSDEQRHILFHIARSGTDITPKLVQKEFPALKT
SIIVLQGKEKAIQKIAGFRFRRLEEKSFWKRLSEEQKDDFFSAWTNTPDDKRLSKYLMKHLLLTENEVVD
ALKTVSLIGDYGPIGKTATQLLMKHLEDGLTYTEALERGMETGEFQELSVWEQQSLLPYYGQILTGSTQA
LMGKYWHSAFKEKRDSEGFFKPNTNSDEEKYGRIANPVVHQTLNELRKLMNELITILGAKPQEITVELAR
ELKVGAEKREDIIKQQTKQEKEAVLAYSKYCEPNNLDKRYIERFRLLEDQAFVCPYCLEHISVADIAAGR
ADVDHIFPRDDTADNSYGNKVVAHRQCNDIKGKRTPYAAFSNTSAWGPIMHYLDETPGMWRKRRKFETNE
EEYAKYLQSKGFVSRFESDNSYIAKAAKEYLRCLFNPNNVTAVGSLKGMETSILRKAWNLQGIDDLLGSR
HWSKDADTSPTMRKNRDDNRHHGLDAIVALYCSRSLVQMINTMSEQGKRAVEIEAMIPIPGYASEPNLSF
EAQRELFRKKILEFMDLHAFVSMKTDNDANGALLKDTVYSILGADTQGEDLVFVVKKKIKDIGVKIGDYE
EVASAIRGRITDKQPKWYPMEMKDKIEQLQSKNEAALQKYKESLVQAAAVLEESNRKLIESGKKPIQLSE
KTISKKALELVGGYYYLISNNKRTKTFVVKEPSNEVKGFAFDTGSNLCLDFYHDAQGKLCGEIIRKIQAM
NPSYKPAYMKQGYSLYVRLYQGDVCELRASDLTEAESNLAKTTHVRLPNAKPGRTFVIIITFTEMGSGYQ
IYFSNLAKSKKGQDTSFTLTTIKNYDVRKVQLSSAGLVRYVSPLLVDKIEKDEVALCGE
SEQ ID NO: 371
MNQKFILGLDIGITSVGYGLIDYETKNIIDAGVRLFPEANVENNEGRRSKRGSRRLKRRRIHRLERVKKL
LEDYNLLDQSQIPQSTNPYAIRVKGLSEALSKDELVIALLHIAKRRGIHKIDVIDSNDDVGNELSTKEQL
NKNSKLLKDKFVCQIQLERMNEGQVRGEKNRFKTADIIKEIIQLLNVQKNFHQLDENFINKYIELVEMRR
EYFEGPGKGSPYGWEGDPKAWYETLMGHCTYFPDELRSVKYAYSADLFNALNDLNNLVIQRDGLSKLEYH
EKYHIIENVFKQKKKPTLKQIANEINVNPEDIKGYRITKSGKPQFTEFKLYHDLKSVLFDQSILENEDVL
DQIAEILTIYQDKDSIKSKLTELDILLNEEDKENIAQLTGYTGTHRLSLKCIRLVLEEQWYSSRNQMEIF
THLNIKPKKINLTAANKIPKAMIDEFILSPVVKRTFGQAINLINKIIEKYGVPEDIIIELARENNSKDKQ
KFINEMQKKNENTRKRINEIIGKYGNQNAKRLVEKIRLHDEQEGKCLYSLESIPLEDLLNNPNHYEVDHI
IPRSVSFDNSYHNKVLVKQSENSKKSNLTPYQYFNSGKSKLSYNQFKQHILNLSKSQDRISKKKKEYLLE
ERDINKFEVQKEFINRNLVDTRYATRELTNYLKAYFSANNMNVKVKTINGSFTDYLRKVWKFKKERNHGY
KHHAEDALIIANADFLFKENKKLKAVNSVLEKPEIESKQLDIQVDSEDNYSEMFIIPKQVQDIKDFRNFK
YSHRVDKKPNRQLINDTLYSTRKKDNSTYIVQTIKDIYAKDNTTLKKQFDKSPEKFLMYQHDPRTFEKLE
VIMKQYANEKNPLAKYHEETGEYLTKYSKKNNGPIVKSLKYIGNKLGSHLDVTHQFKSSTKKLVKLSIKP
YRFDVYLTDKGYKFITISYLDVLKKDNYYYIPEQKYDKLKLGKAIDKNAKFIASFYKNDLIKLDGEIYKI
IGVNSDTRNMIELDLPDIRYKEYCELNNIKGEPRIKKTIGKKVNSIEKLTTDVLGNVFTNTQYTKPQLLF
KRGN
SEQ ID NO: 372
MIMKLEKWRLGLDLGTNSIGWSVFSLDKDNSVQDLIDMGVRIFSDGRDPKTKEPLAVARRTARSQRKLIY
RRKLRRKQVFKFLQEQGLFPKTKEECMTLKSLNPYELRIKALDEKLEPYELGRALFNLAVRRGFKSNRKD
GSREEVSEKKSPDEIKTQADMQTHLEKAIKENGCRTITEFLYKNQGENGGIRFAPGRMTYYPTRKMYEEE
FNLIRSKQEKYYPQVDWDDIYKAIFYQRPLKPQQRGYCIYENDKERTFKAMPCSQKLRILQDIGNLAYYE
GGSKKRVELNDNQDKVLYELLNSKDKVTFDQMRKALCLADSNSFNLEENRDFLIGNPTAVKMRSKNRFGK
LWDEIPLEEQDLIIETIITADEDDAVYEVIKKYDLTQEQRDFIVKNTILQSGTSMLCKEVSEKLVKRLEE
IADLKYHEAVESLGYKFADQTVEKYDLLPYYGKVLPGSTMEIDLSAPETNPEKHYGKISNPTVHVALNQT
RVVVNALIKEYGKPSQIAIELSRDLKNNVEKKAEIARKQNQRAKENIAINDTISALYHTAFPGKSFYPNR
NDRMKYRLWSELGLGNKCIYCGKGISGAELFTKEIEIEHILPFSRTLLDAESNLTVAHSSCNAFKAERSP
FEAFGTNPSGYSWQEIIQRANQLKNTSKKNKFSPNAMDSFEKDSSFIARQLSDNQYIAKAALRYLKCLVE
NPSDVWTTNGSMTKLLRDKWEMDSILCRKFTEKEVALLGLKPEQIGNYKKNRFDHRHHAIDAVVIGLTDR
SMVQKLATKNSHKGNRIEIPEFPILRSDLIEKVKNIVVSFKPDHGAEGKLSKETLLGKIKLHGKETFVCR
ENIVSLSEKNLDDIVDEIKSKVKDYVAKHKGQKIEAVLSDFSKENGIKKVRCVNRVQTPIEITSGKISRY
LSPEDYFAAVIWEIPGEKKTFKAQYIRRNEVEKNSKGLNVVKPAVLENGKPHPAAKQVCLLHKDDYLEFS
DKGKMYFCRIAGYAATNNKLDIRPVYAVSYCADWINSTNETMLTGYWKPTPTQNWVSVNVLFDKQKARLV
TVSPIGRVFRK
SEQ ID NO: 373
MSSKAIDSLEQLDLFKPQEYTLGLDLGIKSIGWAILSGERIANAGVYLFETAEELNSTGNKLISKAAERG
RKRRIRRMLDRKARRGRHIRYLLEREGLPTDELEEVVVHQSNRTLWDVRAEAVERKLTKQELAAVLFHLV
RHRGYFPNTKKLPPDDESDSADEEQGKINRATSRLREELKASDCKTIGQFLAQNRDRQRNREGDYSNLMA
RKLVFEEALQILAFQRKQGHELSKDFEKTYLDVLMGQRSGRSPKLGNCSLIPSELRAPSSAPSTEWFKFL
QNLGNLQISNAYREEWSIDAPRRAQIIDACSQRSTSSYWQIRRDFQIPDEYRFNLVNYERRDPDVDLQEY
LQQQERKTLANFRNWKQLEKIIGTGHPIQTLDEAARLITLIKDDEKLSDQLADLLPEASDKAITQLCELD
FTTAAKISLEAMYRILPHMNQGMGFFDACQQESLPEIGVPPAGDRVPPFDEMYNPVVNRVLSQSRKLINA
VIDEYGMPAKIRVELARDLGKGRELRERIKLDQLDKSKQNDQRAEDFRAEFQQAPRGDQSLRYRLWKEQN
CTCPYSGRMIPVNSVLSEDTQIDHILPISQSFDNSLSNKVLCFTEENAQKSNRTPFEYLDAADFQRLEAI
SGNWPEAKRNKLLHKSFGKVAEEWKSRALNDTRYLTSALADHLRHHLPDSKIQTVNGRITGYLRKQWGLE
KDRDKHTHHAVDAIVVACTTPAIVQQVTLYHQDIRRYKKLGEKRPTPWPETFRQDVLDVEEEIFITRQPK
KVSGGIQTKDTLRKHRSKPDRQRVALTKVKLADLERLVEKDASNRNLYEHLKQCLEESGDQPTKAFKAPF
YMPSGPEAKQRPILSKVTLLREKPEPPKQLTELSGGRRYDSMAQGRLDIYRYKPGGKRKDEYRVVLQRMI
DLMRGEENVHVFQKGVPYDQGPEIEQNYTFLFSLYFDDLVEFQRSADSEVIRGYYRTFNIANGQLKISTY
LEGRQDFDFFGANRLAHFAKVQVNLLGKVIK
SEQ ID NO: 374
MRSLRYRLALDLGSTSLGWALFRLDACNRPTAVIKAGVRIFSDGRNPKDGSSLAVTRRAARAMRRRRDRL
LKRKTRMQAKLVEHGFFPADAGKRKALEQLNPYALRAKGLQEALLPGEFARALFHINQRRGFKSNRKTDK
KDNDSGVLKKAIGQLRQQMAEQGSRTVGEYLWTRLQQGQGVRARYREKPYTTEEGKKRIDKSYDLYIDRA
MIEQEFDALWAAQAAFNPTLFHEAARADLKDTLLHQRPLRPVKPGRCTLLPEEERAPLALPSTQRFRIHQ
EVNHLRLLDENLREVALTLAQRDAVVTALETKAKLSFEQIRKLLKLSGSVQFNLEDAKRTELKGNATSAA
LARKELFGAAWSGFDEALQDEIVWQLVTEEGEGALIAWLQTHTGVDEARAQAIVDVSLPEGYGNLSRKAL
ARIVPALRAAVITYDKAVQAAGFDHHSQLGFEYDASEVEDLVHPETGEIRSVFKQLPYYGKALQRHVAFG
SGKPEDPDEKRYGKIANPTVHIGLNQVRMVVNALIRRYGRPTEVVIELARDLKQSREQKVEAQRRQADNQ
RRNARIRRSIAEVLGIGEERVRGSDIQKWICWEELSFDAADRRCPYSGVQISAAMLLSDEVEVEHILPFS
KTLDDSLNNRTVAMRQANRIKRNRTPWDARAEFEAQGWSYEDILQRAERMPLRKRYRFAPDGYERWLGDD
KDFLARALNDTRYLSRVAAEYLRLVCPGTRVIPGQLTALLRGKFGLNDVLGLDGEKNRNDHRHHAVDACV
IGVTDQGLMQRFATASAQARGDGLTRLVDGMPMPWPTYRDHVERAVRHIWVSHRPDHGFEGAMMEETSYG
IRKDGSIKQRRKADGSAGREISNLIRIHEATQPLRHGVSADGQPLAYKGYVGGSNYCIEITVNDKGKWEG
EVISTFRAYGVVRAGGMGRLRNPHEGQNGRKLIMRLVIGDSVRLEVDGAERTMRIVKISGSNGQIFMAPI
HEANVDARNTDKQDAFTYTSKYAGSLQKAKTRRVTISPIGEVRDPGFKG
SEQ ID NO: 375
MARPAFRAPRREHVNGWTPDPHRISKPFFILVSWHLLSRVVIDSSSGCFPGTSRDHTDKFAEWECAVQPY
RLSFDLGTNSIGWGLLNLDRQGKPREIRALGSRIFSDGRDPQDKASLAVARRLARQMRRRRDRYLTRRTR
LMGALVRFGLMPADPAARKRLEVAVDPYLARERATRERLEPFEIGRALFHLNQRRGYKPVRTATKPDEEA
GKVKEAVERLEAAIAAAGAPTLGAWFAWRKTRGETLRARLAGKGKEAAYPFYPARRMLEAEFDTLWAEQA
RHHPDLLTAEAREILRHRIFHQRPLKPPPVGRCTLYPDDGRAPRALPSAQRLRLFQELASLRVIHLDLSE
RPLTPAERDRIVAFVQGRPPKAGRKPGKVQKSVPFEKLRGLLELPPGTGFSLESDKRPELLGDETGARIA
PAFGPGWTALPLEEQDALVELLLTEAEPERAIAALTARWALDEATAAKLAGATLPDFHGRYGRRAVAELL
PVLERETRGDPDGRVRPIRLDEAVKLLRGGKDHSDFSREGALLDALPYYGAVLERHVAFGTGNPADPEEK
RVGRVANPTVHIALNQLRHLVNAILARHGRPEEIVIELARDLKRSAEDRRREDKRQADNQKRNEERKRLI
LSLGERPTPRNLLKLRLWEEQGPVENRRCPYSGETISMRMLLSEQVDIDHILPFSVSLDDSAANKVVCLR
EANRIKRNRSPWEAFGHDSERWAGILARAEALPKNKRWRFAPDALEKLEGEGGLRARHLNDTRHLSRLAV
EYLRCVCPKVRVSPGRLTALLRRRWGIDAILAEADGPPPEVPAETLDPSPAEKNRADHRHHALDAVVIGC
IDRSMVQRVQLAAASAEREAAAREDNIRRVLEGFKEEPWDGFRAELERRARTIVVSHRPEHGIGGALHKE
TAYGPVDPPEEGFNLVVRKPIDGLSKDEINSVRDPRLRRALIDRLAIRRRDANDPATALAKAAEDLAAQP
ASRGIRRVRVLKKESNPIRVEHGGNPSGPRSGGPFHKLLLAGEVHHVDVALRADGRRWVGHWVTLFEAHG
GRGADGAAAPPRLGDGERFLMRLHKGDCLKLEHKGRVRVMQVVKLEPSSNSVVVVEPHQVKTDRSKHVKI
SCDQLRARGARRVTVDPLGRVRVHAPGARVGIGGDAGRTAMEPAEDIS
SEQ ID NO: 376
MKRTSLRAYRLGVDLGANSLGWFVVWLDDHGQPEGLGPGGVRIFPDGRNPQSKQSNAAGRRLARSARRRR
DRYLQRRGKLMGLLVKHGLMPADEPARKRLECLDPYGLRAKALDEVLPLHHVGRALFHLNQRRGLFANRA
IEQGDKDASAIKAAAGRLQTSMQACGARTLGEFLNRRHQLRATVRARSPVGGDVQARYEFYPTRAMVDAE
FEAIWAAQAPHHPTMTAEAHDTIREAIFSQRAMKRPSIGKCSLDPATSQDDVDGFRCAWSHPLAQRFRIW
QDVRNLAVVETGPTSSRLGKEDQDKVARALLQTDQLSFDEIRGLLGLPSDARFNLESDRRDHLKGDATGA
ILSARRHFGPAWHDRSLDRQIDIVALLESALDEAAIIASLGTTHSLDEAAAQRALSALLPDGYCRLGLRA
IKRVLPLMEAGRTYAEAASAAGYDHALLPGGKLSPTGYLPYYGQWLQNDVVGSDDERDTNERRWGRLPNP
TVHIGIGQLRRVVNELIRWHGPPAEITVELTRDLKLSPRRLAELEREQAENQRKNDKRTSLLRKLGLPAS
THNLLKLRLWDEQGDVASECPYTGEAIGLERLVSDDVDIDHLIPFSISWDDSAANKVVCMRYANREKGNR
TPFEAFGHRQGRPYDWADIAERAARLPRGKRWRFGPGARAQFEELGDFQARLLNETSWLARVAKQYLAAV
THPHRIHVLPGRLTALLRATWELNDLLPGSDDRAAKSRKDHRHHAIDALVAALTDQALLRRMANAHDDTR
RKIEVLLPWPTFRIDLETRLKAMLVSHKPDHGLQARLHEDTAYGTVEHPETEDGANLVYRKTFVDISEKE
IDRIRDRRLRDLVRAHVAGERQQGKTLKAAVLSFAQRRDIAGHPNGIRHVRLTKSIKPDYLVPIRDKAGR
IYKSYNAGENAFVDILQAESGRWIARATTVFQANQANESHDAPAAQPIMRVFKGDMLRIDHAGAEKFVKI
VRLSPSNNLLYLVEHHQAGVFQTRHDDPEDSFRWLFASFDKLREWNAELVRIDTLGQPWRRKRGLETGSE
DATRIGWTRPKKWP
SEQ ID NO: 377
MERIFGFDIGTTSIGFSVIDYSSTQSAGNIQRLGVRIFPEARDPDGTPLNQQRRQKRMMRRQLRRRRIRR
KALNETLHEAGFLPAYGSADWPVVMADEPYELRRRGLEEGLSAYEFGRAIYHLAQHRHFKGRELEESDTP
DPDVDDEKEAANERAATLKALKNEQTTLGAWLARRPPSDRKRGIHAHRNVVAEEFERLWEVQSKFHPALK
SEEMRARISDTIFAQRPVFWRKNTLGECRFMPGEPLCPKGSWLSQQRRMLEKLNNLAIAGGNARPLDAEE
RDAILSKLQQQASMSWPGVRSALKALYKQRGEPGAEKSLKFNLELGGESKLLGNALEAKLADMFGPDWPA
HPRKQEIRHAVHERLWAADYGETPDKKRVIILSEKDRKAHREAAANSFVADFGITGEQAAQLQALKLPTG
WEPYSIPALNLFLAELEKGERFGALVNGPDWEGWRRTNFPHRNQPTGEILDKLPSPASKEERERISQLRN
PTVVRTQNELRKVVNNLIGLYGKPDRIRIEVGRDVGKSKREREEIQSGIRRNEKQRKKATEDLIKNGIAN
PSRDDVEKWILWKEGQERCPYTGDQIGFNALFREGRYEVEHIWPRSRSFDNSPRNKTLCRKDVNIEKGNR
MPFEAFGHDEDRWSAIQIRLQGMVSAKGGTGMSPGKVKRFLAKTMPEDFAARQLNDTRYAAKQILAQLKR
LWPDMGPEAPVKVEAVTGQVTAQLRKLWTLNNILADDGEKTRADHRHHAIDALTVACTHPGMTNKLSRYW
QLRDDPRAEKPALTPPWDTIRADAEKAVSEIVVSHRVRKKVSGPLHKETTYGDTGTDIKTKSGTYRQFVT
RKKIESLSKGELDEIRDPRIKEIVAAHVAGRGGDPKKAFPPYPCVSPGGPEIRKVRLTSKQQLNLMAQTG
NGYADLGSNHHIAIYRLPDGKADFEIVSLFDASRRLAQRNPIVQRTRADGASFVMSLAAGEAIMIPEGSK
KGIWIVQGVWASGQVVLERDTDADHSTTTRPMPNPILKDDAKKVSIDPIGRVRPSND
SEQ ID NO: 378
MNKRILGLDTGTNSLGWAVVDWDEHAQSYELIKYGDVIFQEGVKIEKGIESSKAAERSGYKAIRKQYFRR
RLRKIQVLKVLVKYHLCPYLSDDDLRQWHLQKQYPKSDELMLWQRTSDEEGKNPYYDRHRCLHEKLDLTV
EADRYTLGRALYHLTQRRGFLSNRLDTSADNKEDGVVKSGISQLSTEMEEAGCEYLGDYFYKLYDAQGNK
VRIRQRYTDRNKHYQHEFDAICEKQELSSELIEDLQRAIFFQLPLKSQRHGVGRCTFERGKPRCADSHPD
YEEFRMLCFVNNIQVKGPHDLELRPLTYEEREKIEPLFFRKSKPNFDFEDIAKALAGKKNYAWIHDKEER
AYKFNYRMTQGVPGCPTIAQLKSIFGDDWKTGIAETYTLIQKKNGSKSLQEMVDDVWNVLYSFSSVEKLK
EFAHHKLQLDEESAEKFAKIKLSHSFAALSLKAIRKFLPFLRKGMYYTHASFFANIPTIVGKEIWNKEQN
RKYIMENVGELVFNYQPKHREVQGTIEMLIKDFLANNFELPAGATDKLYHPSMIETYPNAQRNEFGILQL
GSPRTNAIRNPMAMRSLHILRRVVNQLLKESIIDENTEVHVEYARELNDANKRRAIADRQKEQDKQHKKY
GDEIRKLYKEETGKDIEPTQTDVLKFQLWEEQNHHCLYTGEQIGITDFIGSNPKFDIEHTIPQSVGGDST
QMNLTLCDNRFNREVKKAKLPTELANHEEILTRIEPWKNKYEQLVKERDKQRTFAGMDKAVKDIRIQKRH
KLQMEIDYWRGKYERFTMTEVPEGFSRRQGTGIGLISRYAGLYLKSLFHQADSRNKSNVYVVKGVATAEF
RKMWGLQSEYEKKCRDNHSHHCMDAITIACIGKREYDLMAEYYRMEETFKQGRGSKPKFSKPWATFTEDV
LNIYKNLLVVHDTPNNMPKHTKKYVQTSIGKVLAQGDTARGSLHLDTYYGAIERDGEIRYVVRRPLSSFT
KPEELENIVDETVKRTIKEAIADKNFKQAIAEPIYMNEEKGILIKKVRCFAKSVKQPINIRQHRDLSKKE
YKQQYHVMNENNYLLAIYEGLVKNKVVREFEIVSYIEAAKYYKRSQDRNIFSSIVPTHSTKYGLPLKTKL
LMGQLVLMFEENPDEIQVDNTKDLVKRLYKVVGIEKDGRIKFKYHQEARKEGLPIFSTPYKNNDDYAPIF
RQSINNINILVDGIDFTIDILGKVTLKE
SEQ ID NO: 379
MNYKMGLDIGIASVGWAVINLDLKRIEDLGVRIFDKAEHPQNGESLALPRRIARSARRRLRRRKHRLERI
RRLLVSENVLTKEEMNLLFKQKKQIDVWQLRVDALERKLNNDELARVLLHLAKRRGFKSNRKSERNSKES
SEFLKNIEENQSILAQYRSVGEMIVKDSKFAYHKRNKLDSYSNMIARDDLEREIKLIFEKQREFNNPVCT
ERLEEKYLNIWSSQRPFASKEDIEKKVGFCTFEPKEKRAPKATYTFQSFIVWEHINKLRLVSPDETRALT
EIERNLLYKQAFSKNKMTYYDIRKLLNLSDDIHFKGLLYDPKSSLKQIENIRFLELDSYHKIRKCIENVY
GKDGIRMFNETDIDTFGYALTIFKDDEDIVAYLQNEYITKNGKRVSNLANKVYDKSLIDELLNLSFSKFA
HLSMKAIRNILPYMEQGEIYSKACELAGYNFTGPKKKEKALLLPVIPNIANPVVMRALTQSRKVVNAIIK
KYGSPVSIHIELARDLSHSFDERKKIQKDQTENRKKNETAIKQLIEYELTKNPTGLDIVKFKLWSEQQGR
CMYSLKPIELERLLEPGYVEVDHILPYSRSLDDSYANKVLVLTKENREKGNHTPVEYLGLGSERWKKFEK
FVLANKQFSKKKKQNLLRLRYEETEEKEFKERNLNDTRYISKFFANFIKEHLKFADGDGGQKVYTINGKI
TAHLRSRWDFNKNREESDLHHAVDAVIVACATQGMIKKITEFYKAREQNKESAKKKEPIFPQPWPHFADE
LKARLSKFPQESIEAFALGNYDRKKLESLRPVFVSRMPKRSVTGAAHQETLRRCVGIDEQSGKIQTAVKT
KLSDIKLDKDGHFPMYQKESDPRTYEAIRQRLLEHNNDPKKAFQEPLYKPKKNGEPGPVIRTVKIIDTKN
KVVHLDGSKTVAYNSNIVRTDVFEKDGKYYCVPVYTMDIMKGTLPNKAIEANKPYSEWKEMTEEYTFQFS
LFPNDLVRIVLPREKTIKTSTNEEIIIKDIFAYYKTIDSATGGLELISHDRNFSLRGVGSKTLKRFEKYQ
VDVLGNIHKVKGEKRVGLAAPTNQKKGKTVDSLQSVSD
SEQ ID NO: 380
MRRLGLDLGTNSIGWCLLDLGDDGEPVSIFRTGARIFSDGRDPKSLGSLKATRREARLTRRRRDRFIQRQ
KNLINALVKYGLMPADEIQRQALAYKDPYPIRKKALDEAIDPYEMGRAIFHINQRRGFKSNRKSADNEAG
VVKQSIADLEMKLGEAGARTIGEFLADRQATNDTVRARRLSGTNALYEFYPDRYMLEQEFDTLWAKQAAF
NPSLYIEAARERLKEIVFFQRKLKPQEVGRCIFLSDEDRISKALPSFQRFRIYQELSNLAWIDHDGVAHR
ITASLALRDHLFDELEHKKKLTFKAMRAILRKQGVVDYPVGFNLESDNRDHLIGNLTSCIMRDAKKMIGS
AWDRLDEEEQDSFILMLQDDQKGDDEVRSILTQQYGLSDDVAEDCLDVRLPDGHGSLSKKAIDRILPVLR
DQGLIYYDAVKEAGLGEANLYDPYAALSDKLDYYGKALAGHVMGASGKFEDSDEKRYGTISNPTVHIALN
QVRAVVNELIRLHGKPDEVVIEIGRDLPMGADGKRELERFQKEGRAKNERARDELKKLGHIDSRESRQKF
QLWEQLAKEPVDRCCPFTGKMMSISDLFSDKVEIEHLLPFSLTLDDSMANKTVCFRQANRDKGNRAPFDA
FGNSPAGYDWQEILGRSQNLPYAKRWRFLPDAMKRFEADGGFLERQLNDTRYISRYTTEYISTIIPKNKI
WVVTGRLTSLLRGFWGLNSILRGHNTDDGTPAKKSRDDHRHHAIDAIVVGMTSRGLLQKVSKAARRSEDL
DLTRLFEGRIDPWDGFRDEVKKHIDAIIVSHRPRKKSQGALHNDTAYGIVEHAENGASTVVHRVPITSLG
KQSDIEKVRDPLIKSALLNETAGLSGKSFENAVQKWCADNSIKSLRIVETVSIIPITDKEGVAYKGYKGD
GNAYMDIYQDPTSSKWKGEIVSRFDANQKGFIPSWQSQFPTARLIMRLRINDLLKLQDGEIEEIYRVQRL
SGSKILMAPHTEANVDARDRDKNDTFKLTSKSPGKLQSASARKVHISPTGLIREG
SEQ ID NO: 381
MKNILGLDLGLSSIGWSVIRENSEEQELVAMGSRVVSLTAAELSSFTQGNGVSINSQRTQKRTQRKGYDR
YQLRRTLLRNKLDTLGMLPDDSLSYLPKLQLWGLRAKAVTQRIELNELGRVLLHLNQKRGYKSIKSDFSG
DKKITDYVKTVKTRYDELKEMRLTIGELFFRRLTENAFFRCKEQVYPRQAYVEEFDCIMNCQRKFYPDIL
TDETIRCIRDEIIYYQRPLKSCKYLVSRCEFEKRFYLNAAGKKTEAGPKVSPRTSPLFQVCRLWESINNI
VVKDRRNEIVFISAEQRAALFDFLNTHEKLKGSDLLKLLGLSKTYGYRLGEQFKTGIQGNKTRVEIERAL
GNYPDKKRLLQFNLQEESSSMVNTETGEIIPMISLSFEQEPLYRLWHVLYSIDDREQLQSVLRQKFGIDD
DEVLERLSAIDLVKAGFGNKSSKAIRRILPFLQLGMNYAEACEAAGYNHSNNYTKAENEARALLDRLPAI
KKNELRQPVVEKILNQMVNVVNALMEKYGRFDEIRVELARELKQSKEERSNTYKSINKNQRENEQIAKRI
VEYGVPTRSRIQKYKMWEESKHCCIYCGQPVDVGDFLRGFDVEVEHIIPKSLYFDDSFANKVCSCRSCNK
EKNNRTAYDYMKSKGEKALSDYVERVNTMYTNNQISKTKWQNLLTPVDKISIDFIDRQLRESQYIARKAK
EILTSICYNVTATSGSVTSFLRHVWGWDTVLHDLNFDRYKKVGLTEVIEVNHRGSVIRREQIKDWSKRFD
HRHHAIDALTIACTKQAYIQRLNNLRAEEGPDFNKMSLERYIQSQPHFSVAQVREAVDRILVSFRAGKRA
VTPGKRYIRKNRKRISVQSVLIPRGALSEESVYGVIHVWEKDEQGHVIQKQRAVMKYPITSINREMLDKE
KVVDKRIHRILSGRLAQYNDNPKEAFAKPVYIDKECRIPIRTVRCFAKPAINTLVPLKKDDKGNPVAWVN
PGNNHHVAIYRDEDGKYKERTVTFWEAVDRCRVGIPAIVTQPDTIWDNILQRNDISENVLESLPDVKWQF
VLSLQQNEMFILGMNEEDYRYAMDQQDYALLNKYLYRVQKLSKSDYSFRYHTETSVEDKYDGKPNLKLSM
QMGKLKRVSIKSLLGLNPHKVHISVLGEIKEIS
SEQ ID NO: 382
MAEKQHRWGLDIGTNSIGWAVIALIEGRPAGLVATGSRIFSDGRNPKDGSSLAVERRGPRQMRRRRDRYL
RRRDRFMQALINVGLMPGDAAARKALVTENPYVLRQRGLDQALTLPEFGRALFHLNQRRGFQSNRKTDRA
TAKESGKVKNAIAAFRAGMGNARTVGEALARRLEDGRPVRARMVGQGKDEHYELYIAREWIAQEFDALWA
SQQRFHAEVLADAARDRLRAILLFQRKLLPVPVGKCFLEPNQPRVAAALPSAQRFRLMQELNHLRVMTLA
DKRERPLSFQERNDLLAQLVARPKCGFDMLRKIVFGANKEAYRFTIESERRKELKGCDTAAKLAKVNALG
TRWQALSLDEQDRLVCLLLDGENDAVLADALREHYGLTDAQIDTLLGLSFEDGHMRLGRSALLRVLDALE
SGRDEQGLPLSYDKAVVAAGYPAHTADLENGERDALPYYGELLWRYTQDAPTAKNDAERKFGKIANPTVH
IGLNQLRKLVNALIQRYGKPAQIVVELARNLKAGLEEKERIKKQQTANLERNERIRQKLQDAGVPDNREN
RLRMRLFEELGQGNGLGTPCIYSGRQISLQRLFSNDVQVDHILPFSKTLDDSFANKVLAQHDANRYKGNR
GPFEAFGANRDGYAWDDIRARAAVLPRNKRNRFAETAMQDWLHNETDFLARQLTDTAYLSRVARQYLTAI
CSKDDVYVSPGRLTAMLRAKWGLNRVLDGVMEEQGRPAVKNRDDHRHHAIDAVVIGATDRAMLQQVATLA
ARAREQDAERLIGDMPTPWPNFLEDVRAAVARCVVSHKPDHGPEGGLHNDTAYGIVAGPFEDGRYRVRHR
VSLFDLKPGDLSNVRCDAPLQAELEPIFEQDDARAREVALTALAERYRQRKVWLEELMSVLPIRPRGEDG
KTLPDSAPYKAYKGDSNYCYELFINERGRWDGELISTFRANQAAYRRFRNDPARFRRYTAGGRPLLMRLC
INDYIAVGTAAERTIFRVVKMSENKITLAEHFEGGTLKQRDADKDDPFKYLTKSPGALRDLGARRIFVDL
IGRVLDPGIKGD
SEQ ID NO: 383
MIERILGVDLGISSLGWAIVEYDKDDEAANRIIDCGVRLFTAAETPKKKESPNKARREARGIRRVLNRRR
VRMNMIKKLFLRAGLIQDVDLDGEGGMFYSKANRADVWELRHDGLYRLLKGDELARVLIHIAKHRGYKFI
GDDEADEESGKVKKAGVVLRQNFEAAGCRTVGEWLWRERGANGKKRNKHGDYEISIHRDLLVEEVEAIFV
AQQEMRSTIATDALKAAYREIAFFVRPMQRIEKMVGHCTYFPEERRAPKSAPTAEKFIAISKFFSTVIID
NEGWEQKIIERKTLEELLDFAVSREKVEFRHLRKFLDLSDNEIFKGLHYKGKPKTAKKREATLFDPNEPT
ELEFDKVEAEKKAWISLRGAAKLREALGNEFYGRFVALGKHADEATKILTYYKDEGQKRRELTKLPLEAE
MVERLVKIGFSDFLKLSLKAIRDILPAMESGARYDEAVLMLGVPHKEKSAILPPLNKTDIDILNPTVIRA
FAQFRKVANALVRKYGAFDRVHFELAREINTKGEIEDIKESQRKNEKERKEAADWIAETSFQVPLTRKNI
LKKRLYIQQDGRCAYTGDVIELERLFDEGYCEIDHILPRSRSADDSFANKVLCLARANQQKTDRTPYEWF
GHDAARWNAFETRTSAPSNRVRTGKGKIDRLLKKNFDENSEMAFKDRNLNDTRYMARAIKTYCEQYWVFK
NSHTKAPVQVRSGKLTSVLRYQWGLESKDRESHTHHAVDAIIIAFSTQGMVQKLSEYYRFKETHREKERP
KLAVPLANFRDAVEEATRIENTETVKEGVEVKRLLISRPPRARVTGQAHEQTAKPYPRIKQVKNKKKWRL
APIDEEKFESFKADRVASANQKNFYETSTIPRVDVYHKKGKFHLVPIYLHEMVLNELPNLSLGTNPEAMD
ENFFKFSIFKDDLISIQTQGTPKKPAKIIMGYFKNMHGANMVLSSINNSPCEGFTCTPVSMDKKHKDKCK
LCPEENRIAGRCLQGFLDYWSQEGLRPPRKEFECDQGVKFALDVKKYQIDPLGYYYEVKQEKRLGTIPQM
RSAKKLVKK
SEQ ID NO: 384
MNNSIKSKPEVTIGLDLGVGSVGWAIVDNETNIIHHLGSRLFSQAKTAEDRRSFRGVRRLIRRRKYKLKR
FVNLIWKYNSYFGFKNKEDILNNYQEQQKLHNTVLNLKSEALNAKIDPKALSWILHDYLKNRGHFYEDNR
DFNVYPTKELAKYFDKYGYYKGIIDSKEDNDNKLEEELTKYKFSNKHWLEEVKKVLSNQTGLPEKFKEEY
ESLFSYVRNYSEGPGSINSVSPYGIYHLDEKEGKVVQKYNNIWDKTIGKCNIFPDEYRAPKNSPIAMIFN
EINELSTIRSYSIYLTGWFINQEFKKAYLNKLLDLLIKTNGEKPIDARQFKKLREETIAESIGKETLKDV
ENEEKLEKEDHKWKLKGLKLNTNGKIQYNDLSSLAKFVHKLKQHLKLDFLLEDQYATLDKINFLQSLFVY
LGKHLRYSNRVDSANLKEFSDSNKLFERILQKQKDGLFKLFEQTDKDDEKILAQTHSLSTKAMLLAITRM
TNLDNDEDNQKNNDKGWNFEAIKNFDQKFIDITKKNNNLSLKQNKRYLDDRFINDAILSPGVKRILREAT
KVFNAILKQFSEEYDVTKVVIELARELSEEKELENTKNYKKLIKKNGDKISEGLKALGISEDEIKDILKS
PTKSYKFLLWLQQDHIDPYSLKEIAFDDIFTKTEKFEIDHIIPYSISFDDSSSNKLLVLAESNQAKSNQT
PYEFISSGNAGIKWEDYEAYCRKFKDGDSSLLDSTQRSKKFAKMMKTDTSSKYDIGFLARNLNDTRYATI
VFRDALEDYANNHLVEDKPMFKVVCINGSVTSFLRKNFDDSSYAKKDRDKNIHHAVDASIISIFSNETKT
LFNQLTQFADYKLFKNTDGSWKKIDPKTGVVTEVTDENWKQIRVRNQVSEIAKVIEKYIQDSNIERKARY
SRKIENKTNISLFNDTVYSAKKVGYEDQIKRKNLKTLDIHESAKENKNSKVKRQFVYRKLVNVSLLNNDK
LADLFAEKEDILMYRANPWVINLAEQIFNEYTENKKIKSQNVFEKYMLDLTKEFPEKFSEFLVKSMLRNK
TAIIYDDKKNIVHRIKRLKMLSSELKENKLSNVIIRSKNQSGTKLSYQDTINSLALMIMRSIDPTAKKQY
IRVPLNTLNLHLGDHDFDLHNMDAYLKKPKFVKYLKANEIGDEYKPWRVLTSGTLLIHKKDKKLMYISSF
QNLNDVIEIKNLIETEYKENDDSDSKKKKKANRFLMTLSTILNDYILLDAKDNFDILGLSKNRIDEILNS
KLGLDKIVK
SEQ ID NO: 385
MGGSEVGTVPVTWRLGVDVGERSIGLAAVSYEEDKPKEILAAVSWIHDGGVGDERSGASRLALRGMARRA
RRLRRFRRARLRDLDMLLSELGWTPLPDKNVSPVDAWLARKRLAEEYVVDETERRRLLGYAVSHMARHRG
WRNPWTTIKDLKNLPQPSDSWERTRESLEARYSVSLEPGTVGQWAGYLLQRAPGIRLNPTQQSAGRRAEL
SNATAFETRLRQEDVLWELRCIADVQGLPEDVVSNVIDAVFCQKRPSVPAERIGRDPLDPSQLRASRACL
EFQEYRIVAAVANLRIRDGSGSRPLSLEERNAVIEALLAQTERSLTWSDIALEILKLPNESDLTSVPEED
GPSSLAYSQFAPFDETSARIAEFIAKNRRKIPTFAQWWQEQDRTSRSDLVAALADNSIAGEEEQELLVHL
PDAELEALEGLALPSGRVAYSRLTLSGLTRVMRDDGVDVHNARKTCFGVDDNWRPPLPALHEATGHPVVD
RNLAILRKFLSSATMRWGPPQSIVVELARGASESRERQAEEEAARRAHRKANDRIRAELRASGLSDPSPA
DLVRARLLELYDCHCMYCGAPISWENSELDHIVPRTDGGSNRHENLAITCGACNKEKGRRPFASWAETSN
RVQLRDVIDRVQKLKYSGNMYWTRDEFSRYKKSVVARLKRRTSDPEVIQSIESTGYAAVALRDRLLSYGE
KNGVAQVAVFRGGVTAEARRWLDISIERLFSRVAIFAQSTSTKRLDRRHHAVDAVVLTTLTPGVAKTLAD
ARSRRVSAEFWRRPSDVNRHSTEEPQSPAYRQWKESCSGLGDLLISTAARDSIAVAAPLRLRPTGALHEE
TLRAFSEHTVGAAWKGAELRRIVEPEVYAAFLALTDPGGRFLKVSPSEDVLPADENRHIVLSDRVLGPRD
RVKLFPDDRGSIRVRGGAAYIASFHHARVFRWGSSHSPSFALLRVSLADLAVAGLLRDGVDVFTAELPPW
TPAWRYASIALVKAVESGDAKQVGWLVPGDELDFGPEGVTTAAGDLSMFLKYFPERHWVVTGFEDDKRIN
LKPAFLSAEQAEVLRTERSDRPDTLTEAGEILAQFFPRCWRATVAKVLCHPGLTVIRRTALGQPRWRRGH
LPYSWRPWSADPWSGGTP
SEQ ID NO: 386
MHNKKNITIGFDLGIASIGWAIIDSTTSKILDWGTRTFEERKTANERRAFRSTRRNIRRKAYRNQRFINL
ILKYKDLFELKNISDIQRANKKDTENYEKIISFFTEIYKKCAAKHSNILEVKVKALDSKIEKLDLIWILH
DYLENRGFFYDLEEENVADKYEGIEHPSILLYDFFKKNGFFKSNSSIPKDLGGYSFSNLQWVNEIKKLFE
VQEINPEFSEKFLNLFTSVRDYAKGPGSEHSASEYGIFQKDEKGKVFKKYDNIWDKTIGKCSFFVEENRS
PVNYPSYEIFNLLNQLINLSTDLKTTNKKIWQLSSNDRNELLDELLKVKEKAKIISISLKKNEIKKIILK
DFGFEKSDIDDQDTIEGRKIIKEEPTTKLEVTKHLLATIYSHSSDSNWININNILEFLPYLDAICIILDR
EKSRGQDEVLKKLTEKNIFEVLKIDREKQLDFVKSIFSNTKFNFKKIGNFSLKAIREFLPKMFEQNKNSE
YLKWKDEEIRRKWEEQKSKLGKTDKKTKYLNPRIFQDEIISPGTKNTFEQAVLVLNQIIKKYSKENIIDA
IIIESPREKNDKKTIEEIKKRNKKGKGKTLEKLFQILNLENKGYKLSDLETKPAKLLDRLRFYHQQDGID
LYTLDKINIDQLINGSQKYEIEHIIPYSMSYDNSQANKILTEKAENLKKGKLIASEYIKRNGDEFYNKYY
EKAKELFINKYKKNKKLDSYVDLDEDSAKNRFRFLTLQDYDEFQVEFLARNLNDTRYSTKLFYHALVEHF
ENNEFFTYIDENSSKHKVKISTIKGHVTKYFRAKPVQKNNGPNENLNNNKPEKIEKNRENNEHHAVDAAI
VAIIGNKNPQIANLLTLADNKTDKKFLLHDENYKENIETGELVKIPKFEVDKLAKVEDLKKIIQEKYEEA
KKHTAIKFSRKTRTILNGGLSDETLYGFKYDEKEDKYFKIIKKKLVTSKNEELKKYFENPFGKKADGKSE
YTVLMAQSHLSEFNKLKEIFEKYNGFSNKTGNAFVEYMNDLALKEPTLKAEIESAKSVEKLLYYNFKPSD
QFTYHDNINNKSFKRFYKNIRIIEYKSIPIKFKILSKHDGGKSFKDTLFSLYSLVYKVYENGKESYKSIP
VTSQMRNFGIDEFDFLDENLYNKEKLDIYKSDFAKPIPVNCKPVFVLKKGSILKKKSLDIDDFKETKETE
EGNYYFISTISKRFNRDTAYGLKPLKLSVVKPVAEPSTNPIFKEYIPIHLDELGNEYPVKIKEHTDDEKL
MCTIK

[1292] Nucleic Acids Encoding Cas9 Molecules

[1293] Nucleic acids encoding the Cas9 molecules or Cas9 polypeptides, e.g., an eaCas9 molecule or eaCas9 polypeptide, are provided herein.

[1294] Exemplary nucleic acids encoding Cas9 molecules or Cas9 polypeptides are described in Cong et al., Science 2013, 399(6121):819-823; Wang et al., Cell 2013, 153(4):910-918; Mali et al., Science 2013, 399(6121):823-826; Jinek et al., Science 2012, 337(6096):816-821. Another exemplary nucleic acid encoding a Cas9 molecule or Cas9 polypeptide is shown in black in FIG. 8.

[1295] In an embodiment, a nucleic acid encoding a Cas9 molecule or Cas9 polypeptide can be a synthetic nucleic acid sequence. For example, the synthetic nucleic acid molecule can be chemically modified, e.g., as described in Section VIII. In an embodiment, the Cas9 mRNA has one or more (e.g., all of the following properties: it is capped, polyadenylated, substituted with 5-methylcytidine and/or pseudouridine.

[1296] In addition, or alternatively, the synthetic nucleic acid sequence can be codon optimized, e.g., at least one non-common codon or less-common codon has been replaced by a common codon. For example, the synthetic nucleic acid can direct the synthesis of an optimized messenger mRNA, e.g., optimized for expression in a mammalian expression system, e.g., described herein.

[1297] In addition, or alternatively, a nucleic acid encoding a Cas9 molecule or Cas9 polypeptide may comprise a nuclear localization sequence (NLS). Nuclear localization sequences are known in the art.

[1298] Provided below is an exemplary codon optimized nucleic acid sequence encoding a Cas9 molecule of S. pyogenes.

SEQ ID NO: 22

ATGGATAAAAAGTACAGCATCGGGCTGGACATCGGTACAAACTCAGTGGG
GTGGGCCGTGATTACGGACGAGTACAAGGTACCCTCCAAAAAATTTAAAG
TGCTGGGTAACACGGACAGACACTCTATAAAGAAAAATCTTATTGGAGCC
TTGCTGTTCGACTCAGGCGAGACAGCCGAAGCCACAAGGTTGAAGCGGAC
CGCCAGGAGGCGGTATACCAGGAGAAAGAACCGCATATGCTACCTGCAAG
AAATCTTCAGTAACGAGATGGCAAAGGTTGACGATAGCTTTTTCCATCGC
CTGGAAGAATCCTTTCTTGTTGAGGAAGACAAGAAGCACGAACGGCACCC
CATCTTTGGCAATATTGTCGACGAAGTGGCATATCACGAAAAGTACCCGA
CTATCTACCACCTCAGGAAGAAGCTGGTGGACTCTACCGATAAGGCGGAC
CTCAGACTTATTTATTTGGCACTCGCCCACATGATTAAATTTAGAGGACA
TTTCTTGATCGAGGGCGACCTGAACCCGGACAACAGTGACGTCGATAAGC
TGTTCATCCAACTTGTGCAGACCTACAATCAACTGTTCGAAGAAAACCCT
ATAAATGCTTCAGGAGTCGACGCTAAAGCAATCCTGTCCGCGCGCCTCTC
AAAATCTAGAAGACTTGAGAATCTGATTGCTCAGTTGCCCGGGGAAAAGA
AAAATGGATTGTTTGGCAACCTGATCGCCCTCAGTCTCGGACTGACCCCA
AATTTCAAAAGTAACTTCGACCTGGCCGAAGACGCTAAGCTCCAGCTGTC
CAAGGACACATACGATGACGACCTCGACAATCTGCTGGCCCAGATTGGGG
ATCAGTACGCCGATCTCTTTTTGGCAGCAAAGAACCTGTCCGACGCCATC
CTGTTGAGCGATATCTTGAGAGTGAACACCGAAATTACTAAAGCACCCCT
TAGCGCATCTATGATCAAGCGGTACGACGAGCATCATCAGGATCTGACCC
TGCTGAAGGCTCTTGTGAGGCAACAGCTCCCCGAAAAATACAAGGAAATC
TTCTTTGACCAGAGCAAAAACGGCTACGCTGGCTATATAGATGGTGGGGC
CAGTCAGGAGGAATTCTATAAATTCATCAAGCCCATTCTCGAGAAAATGG
ACGGCACAGAGGAGTTGCTGGTCAAACTTAACAGGGAGGACCTGCTGCGG
AAGCAGCGGACCTTTGACAACGGGTCTATCCCCCACCAGATTCATCTGGG
CGAACTGCACGCAATCCTGAGGAGGCAGGAGGATTTTTATCCTTTTCTTA
AAGATAACCGCGAGAAAATAGAAAAGATTCTTACATTCAGGATCCCGTAC
TACGTGGGACCTCTCGCCCGGGGCAATTCACGGTTTGCCTGGATGACAAG
GAAGTCAGAGGAGACTATTACACCTTGGAACTTCGAAGAAGTGGTGGACA
AGGGTGCATCTGCCCAGTCTTTCATCGAGCGGATGACAAATTTTGACAAG
AACCTCCCTAATGAGAAGGTGCTGCCCAAACATTCTCTGCTCTACGAGTA
CTTTACCGTCTACAATGAACTGACTAAAGTCAAGTACGTCACCGAGGGAA
TGAGGAAGCCGGCATTCCTTAGTGGAGAACAGAAGAAGGCGATTGTAGAC
CTGTTGTTCAAGACCAACAGGAAGGTGACTGTGAAGCAACTTAAAGAAGA
CTACTTTAAGAAGATCGAATGTTTTGACAGTGTGGAAATTTCAGGGGTTG
AAGACCGCTTCAATGCGTCATTGGGGACTTACCATGATCTTCTCAAGATC
ATAAAGGACAAAGACTTCCTGGACAACGAAGAAAATGAGGATATTCTCGA
AGACATCGTCCTCACCCTGACCCTGTTCGAAGACAGGGAAATGATAGAAG
AGCGCTTGAAAACCTATGCCCACCTCTTCGACGATAAAGTTATGAAGCAG
CTGAAGCGCAGGAGATACACAGGATGGGGAAGATTGTCAAGGAAGCTGAT
CAATGGAATTAGGGATAAACAGAGTGGCAAGACCATACTGGATTTCCTCA
AATCTGATGGCTTCGCCAATAGGAACTTCATGCAACTGATTCACGATGAC
TCTCTTACCTTCAAGGAGGACATTCAAAAGGCTCAGGTGAGCGGGCAGGG
AGACTCCCTTCATGAACACATCGCGAATTTGGCAGGTTCCCCCGCTATTA
AAAAGGGCATCCTTCAAACTGTCAAGGTGGTGGATGAATTGGTCAAGGTA
ATGGGCAGACATAAGCCAGAAAATATTGTGATCGAGATGGCCCGCGAAAA
CCAGACCACACAGAAGGGCCAGAAAAATAGTAGAGAGCGGATGAAGAGGA
TCGAGGAGGGCATCAAAGAGCTGGGATCTCAGATTCTCAAAGAACACCCC
GTAGAAAACACACAGCTGCAGAACGAAAAATTGTACTTGTACTATCTGCA
GAACGGCAGAGACATGTACGTCGACCAAGAACTTGATATTAATAGACTGT
CCGACTATGACGTAGACCATATCGTGCCCCAGTCCTTCCTGAAGGACGAC
TCCATTGATAACAAAGTCTTGACAAGAAGCGACAAGAACAGGGGTAAAAG
TGATAATGTGCCTAGCGAGGAGGTGGTGAAAAAAATGAAGAACTACTGGC
GACAGCTGCTTAATGCAAAGCTCATTACACAACGGAAGTTCGATAATCTG
ACGAAAGCAGAGAGAGGTGGCTTGTCTGAGTTGGACAAGGCAGGGTTTAT
TAAGCGGCAGCTGGTGGAAACTAGGCAGATCACAAAGCACGTGGCGCAGA
TTTTGGACAGCCGGATGAACACAAAATACGACGAAAATGATAAACTGATA
CGAGAGGTCAAAGTTATCACGCTGAAAAGCAAGCTGGTGTCCGATTTTCG
GAAAGACTTCCAGTTCTACAAAGTTCGCGAGATTAATAACTACCATCATG
CTCACGATGCGTACCTGAACGCTGTTGTCGGGACCGCCTTGATAAAGAAG
TACCCAAAGCTGGAATCCGAGTTCGTATACGGGGATTACAAAGTGTACGA
TGTGAGGAAAATGATAGCCAAGTCCGAGCAGGAGATTGGAAAGGCCACAG
CTAAGTACTTCTTTTATTCTAACATCATGAATTTTTTTAAGACGGAAATT
ACCCTGGCCAACGGAGAGATCAGAAAGCGGCCCCTTATAGAGACAAATGG
TGAAACAGGTGAAATCGTCTGGGATAAGGGCAGGGATTTCGCTACTGTGA
GGAAGGTGCTGAGTATGCCACAGGTAAATATCGTGAAAAAAACCGAAGTA
CAGACCGGAGGATTTTCCAAGGAAAGCATTTTGCCTAAAAGAAACTCAGA
CAAGCTCATCGCCCGCAAGAAAGATTGGGACCCTAAGAAATACGGGGGAT
TTGACTCACCCACCGTAGCCTATTCTGTGCTGGTGGTAGCTAAGGTGGAA
AAAGGAAAGTCTAAGAAGCTGAAGTCCGTGAAGGAACTCTTGGGAATCAC
TATCATGGAAAGATCATCCTTTGAAAAGAACCCTATCGATTTCCTGGAGG
CTAAGGGTTACAAGGAGGTCAAGAAAGACCTCATCATTAAACTGCCAAAA
TACTCTCTCTTCGAGCTGGAAAATGGCAGGAAGAGAATGTTGGCCAGCGC
CGGAGAGCTGCAAAAGGGAAACGAGCTTGCTCTGCCCTCCAAATATGTTA
ATTTTCTCTATCTCGCTTCCCACTATGAAAAGCTGAAAGGGTCTCCCGAA
GATAACGAGCAGAAGCAGCTGTTCGTCGAACAGCACAAGCACTATCTGGA
TGAAATAATCGAACAAATAAGCGAGTTCAGCAAAAGGGTTATCCTGGCGG
ATGCTAATTTGGACAAAGTACTGTCTGCTTATAACAAGCACCGGGATAAG
CCTATTAGGGAACAAGCCGAGAATATAATTCACCTCTTTACACTCACGAA
TCTCGGAGCCCCCGCCGCCTTCAAATACTTTGATACGACTATCGACCGGA
AACGGTATACCAGTACCAAAGAGGTCCTCGATGCCACCCTCATCCACCAG
TCAATTACTGGCCTGTACGAAACACGGATCGACCTCTCTCAACTGGGCGG
CGACTAG

[1299] Provided below is the corresponding amino acid sequence of a S. pyogenes Cas9 molecule.

SEQ ID NO: 23

[sequence omitted]

[1300] Provided below is an exemplary codon optimized nucleic acid sequence encoding a Cas9 molecule of N. meningitidis.

SEQ ID NO: 24

ATGGCCGCCTTCAAGCCCAACCCCATCAACTACATCCTGGGCCTGGACAT
CGGCATCGCCAGCGTGGGCTGGGCCATGGTGGAGATCGACGAGGACGAGA
ACCCCATCTGCCTGATCGACCTGGGTGTGCGCGTGTTCGAGCGCGCTGAG
GTGCCCAAGACTGGTGACAGTCTGGCTATGGCTCGCCGGCTTGCTCGCTC
TGTTCGGCGCCTTACTCGCCGGCGCGCTCACCGCCTTCTGCGCGCTCGCC
GCCTGCTGAAGCGCGAGGGTGTGCTGCAGGCTGCCGACTTCGACGAGAAC
GGCCTGATCAAGAGCCTGCCCAACACTCCTTGGCAGCTGCGCGCTGCCGC
TCTGGACCGCAAGCTGACTCCTCTGGAGTGGAGCGCCGTGCTGCTGCACC
TGATCAAGCACCGCGGCTACCTGAGCCAGCGCAAGAACGAGGGCGAGACC
GCCGACAAGGAGCTGGGTGCTCTGCTGAAGGGCGTGGCCGACAACGCCCA
CGCCCTGCAGACTGGTGACTTCCGCACTCCTGCTGAGCTGGCCCTGAACA
AGTTCGAGAAGGAGAGCGGCCACATCCGCAACCAGCGCGGCGACTACAGC
CACACCTTCAGCCGCAAGGACCTGCAGGCCGAGCTGATCCTGCTGTTCGA
GAAGCAGAAGGAGTTCGGCAACCCCCACGTGAGCGGCGGCCTGAAGGAGG
GCATCGAGACCCTGCTGATGACCCAGCGCCCCGCCCTGAGCGGCGACGCC
GTGCAGAAGATGCTGGGCCACTGCACCTTCGAGCCAGCCGAGCCCAAGGC
CGCCAAGAACACCTACACCGCCGAGCGCTTCATCTGGCTGACCAAGCTGA
ACAACCTGCGCATCCTGGAGCAGGGCAGCGAGCGCCCCCTGACCGACACC
GAGCGCGCCACCCTGATGGACGAGCCCTACCGCAAGAGCAAGCTGACCTA
CGCCCAGGCCCGCAAGCTGCTGGGTCTGGAGGACACCGCCTTCTTCAAGG
GCCTGCGCTACGGCAAGGACAACGCCGAGGCCAGCACCCTGATGGAGATG
AAGGCCTACCACGCCATCAGCCGCGCCCTGGAGAAGGAGGGCCTGAAGGA
CAAGAAGAGTCCTCTGAACCTGAGCCCCGAGCTGCAGGACGAGATCGGCA
CCGCCTTCAGCCTGTTCAAGACCGACGAGGACATCACCGGCCGCCTGAAG
GACCGCATCCAGCCCGAGATCCTGGAGGCCCTGCTGAAGCACATCAGCTT
CGACAAGTTCGTGCAGATCAGCCTGAAGGCCCTGCGCCGCATCGTGCCCC
TGATGGAGCAGGGCAAGCGCTACGACGAGGCCTGCGCCGAGATCTACGGC
GACCACTACGGCAAGAAGAACACCGAGGAGAAGATCTACCTGCCTCCTAT
CCCCGCCGACGAGATCCGCAACCCCGTGGTGCTGCGCGCCCTGAGCCAGG
CCCGCAAGGTGATCAACGGCGTGGTGCGCCGCTACGGCAGCCCCGCCCGC
ATCCACATCGAGACCGCCCGCGAGGTGGGCAAGAGCTTCAAGGACCGCAA
GGAGATCGAGAAGCGCCAGGAGGAGAACCGCAAGGACCGCGAGAAGGCCG
CCGCCAAGTTCCGCGAGTACTTCCCCAACTTCGTGGGCGAGCCCAAGAGC
AAGGACATCCTGAAGCTGCGCCTGTACGAGCAGCAGCACGGCAAGTGCCT
GTACAGCGGCAAGGAGATCAACCTGGGCCGCCTGAACGAGAAGGGCTACG
TGGAGATCGACCACGCCCTGCCCTTCAGCCGCACCTGGGACGACAGCTTC
AACAACAAGGTGCTGGTGCTGGGCAGCGAGAACCAGAACAAGGGCAACCA
GACCCCCTACGAGTACTTCAACGGCAAGGACAACAGCCGCGAGTGGCAGG
AGTTCAAGGCCCGCGTGGAGACCAGCCGCTTCCCCCGCAGCAAGAAGCAG
CGCATCCTGCTGCAGAAGTTCGACGAGGACGGCTTCAAGGAGCGCAACCT
GAACGACACCCGCTACGTGAACCGCTTCCTGTGCCAGTTCGTGGCCGACC
GCATGCGCCTGACCGGCAAGGGCAAGAAGCGCGTGTTCGCCAGCAACGGC
CAGATCACCAACCTGCTGCGCGGCTTCTGGGGCCTGCGCAAGGTGCGCGC
CGAGAACGACCGCCACCACGCCCTGGACGCCGTGGTGGTGGCCTGCAGCA
CCGTGGCCATGCAGCAGAAGATCACCCGCTTCGTGCGCTACAAGGAGATG
AACGCCTTCGACGGTAAAACCATCGACAAGGAGACCGGCGAGGTGCTGCA
CCAGAAGACCCACTTCCCCCAGCCCTGGGAGTTCTTCGCCCAGGAGGTGA
TGATCCGCGTGTTCGGCAAGCCCGACGGCAAGCCCGAGTTCGAGGAGGCC
GACACCCCCGAGAAGCTGCGCACCCTGCTGGCCGAGAAGCTGAGCAGCCG
CCCTGAGGCCGTGCACGAGTACGTGACTCCTCTGTTCGTGAGCCGCGCCC
CCAACCGCAAGATGAGCGGTCAGGGTCACATGGAGACCGTGAAGAGCGCC
AAGCGCCTGGACGAGGGCGTGAGCGTGCTGCGCGTGCCCCTGACCCAGCT
GAAGCTGAAGGACCTGGAGAAGATGGTGAACCGCGAGCGCGAGCCCAAGC
TGTACGAGGCCCTGAAGGCCCGCCTGGAGGCCCACAAGGACGACCCCGCC
AAGGCCTTCGCCGAGCCCTTCTACAAGTACGACAAGGCCGGCAACCGCAC
CCAGCAGGTGAAGGCCGTGCGCGTGGAGCAGGTGCAGAAGACCGGCGTGT
GGGTGCGCAACCACAACGGCATCGCCGACAACGCCACCATGGTGCGCGTG
GACGTGTTCGAGAAGGGCGACAAGTACTACCTGGTGCCCATCTACAGCTG
GCAGGTGGCCAAGGGCATCCTGCCCGACCGCGCCGTGGTGCAGGGCAAGG
ACGAGGAGGACTGGCAGCTGATCGACGACAGCTTCAACTTCAAGTTCAGC
CTGCACCCCAACGACCTGGTGGAGGTGATCACCAAGAAGGCCCGCATGTT
CGGCTACTTCGCCAGCTGCCACCGCGGCACCGGCAACATCAACATCCGCA
TCCACGACCTGGACCACAAGATCGGCAAGAACGGCATCCTGGAGGGCATC
GGCGTGAAGACCGCCCTGAGCTTCCAGAAGTACCAGATCGACGAGCTGGG
CAAGGAGATCCGCCCCTGCCGCCTGAAGAAGCGCCCTCCTGTGCGCTAA

[1301] Provided below is the corresponding amino acid sequence of a N. meningitidis Cas9 molecule.

SEQ ID NO: 25

MAAFKPNPINYILGLDIGIASVGWAMVEIDEDENPICLIDLGVRVFERAE
VPKTGDSLAMARRLARSVRRLTRRRAHRLLRARRLLKREGVLQAADFDEN
GLIKSLPNTPWQLRAAALDRKLTPLEWSAVLLHLIKHRGYLSQRKNEGET
ADKELGALLKGVADNAHALQTGDFRTPAELALNKFEKESGHIRNQRGDYS
HTFSRKDLQAELILLFEKQKEFGNPHVSGGLKEGIETLLMTQRPALSGDA
VQKMLGHCTFEPAEPKAAKNTYTAERFIWLTKLNNLRILEQGSERPLTDT
ERATLMDEPYRKSKLTYAQARKLLGLEDTAFFKGLRYGKDNAEASTLMEM
KAYHAISRALEKEGLKDKKSPLNLSPELQDEIGTAFSLFKTDEDITGRLK
DRIQPEILEALLKHISFDKFVQISLKALRRIVPLMEQGKRYDEACAEIYG
DHYGKKNTEEKIYLPPIPADEIRNPVVLRALSQARKVINGVVRRYGSPAR
IHIETAREVGKSFKDRKEIEKRQEENRKDREKAAAKFREYFPNFVGEPKS
KDILKLRLYEQQHGKCLYSGKEINLGRLNEKGYVEIDHALPFSRTWDDSF
NNKVLVLGSENQNKGNQTPYEYFNGKDNSREWQEFKARVETSRFPRSKKQ
RILLQKFDEDGFKERNLNDTRYVNRFLCQFVADRMRLTGKGKKRVFASNG
QITNLLRGFWGLRKVRAENDRHHALDAVVVACSTVAMQQKITRFVRYKEM
NAFDGKTIDKETGEVLHQKTHFPQPWEFFAQEVMIRVFGKPDGKPEFEEA
DTPEKLRTLLAEKLSSRPEAVHEYVTPLFVSRAPNRKMSGQGHMETVKSA
KRLDEGVSVLRVPLTQLKLKDLEKMVNREREPKLYEALKARLEAHKDDPA
KAFAEPFYKYDKAGNRTQQVKAVRVEQVQKTGVWVRNHNGIADNATMVRV
DVFEKGDKYYLVPIYSWQVAKGILPDRAVVQGKDEEDWQLIDDSFNFKFS
LHPNDLVEVITKKARMFGYFASCHRGTGNINIRIHDLDHKIGKNGILEGI
GVKTALSFQKYQIDELGKEIRPCRLKKRPPVR*

[1302] Provided below is an amino acid sequence of a S. aureus Cas9 molecule.

SEQ ID NO: 26

MKRNYILGLDIGITSVGYGIIDYETRDVIDAGVRLFKEANVENNEGRRSK
RGARRLKRRRRHRIQRVKKLLFDYNLLTDHSELSGINPYEARVKGLSQKL
SEEEFSAALLHLAKRRGVHNVNEVEEDTGNELSTKEQISRNSKALEEKYV
AELQLERLKKDGEVRGSINRFKTSDYVKEAKQLLKVQKAYHQLDQSFIDT
YIDLLETRRTYYEGPGEGSPFGWKDIKEWYEMLMGHCTYFPEELRSVKYA
YNADLYNALNDLNNLVITRDENEKLEYYEKFQIIENVFKQKKKPTLKQIA
KEILVNEEDIKGYRVTSTGKPEFTNLKVYHDIKDITARKEIIENAELLDQ
IAKILTIYQSSEDIQEELTNLNSELTQEEIEQISNLKGYTGTHNLSLKAI
NLILDELWHTNDNQIAIFNRLKLVPKKVDLSQQKEIPTTLVDDFILSPVV
KRSFIQSIKVINAIIKKYGLPNDIIIELAREKNSKDAQKMINEMQKRNRQ
TNERIEEIIRTTGKENAKYLIEKIKLHDMQEGKCLYSLEAIPLEDLLNNP
FNYEVDHIIPRSVSFDNSFNNKVLVKQEENSKKGNRTPFQYLSSSDSKIS
YETFKKHILNLAKGKGRISKTKKEYLLEERDINRFSVQKDFINRNLVDTR
YATRGLMNLLRSYFRVNNLDVKVKSINGGFTSFLRRKWKFKKERNKGYKH
HAEDALIIANADFIFKEWKKLDKAKKVMENQMFEEKQAESMPEIETEQEY
KEIFITPHQIKHIKDFKDYKYSHRVDKKPNRELINDTLYSTRKDDKGNTL
IVNNLNGLYDKDNDKLKKLINKSPEKLLMYHHDPQTYQKLKLIMEQYGDE
KNPLYKYYEETGNYLTKYSKKDNGPVIKKIKYYGNKLNAHLDITDDYPNS
RNKVVKLSLKPYRFDVYLDNGVYKFVTVKNLDVIKKENYYEVNSKCYEEA
KKLKKISNQAEFIASFYNNDLIKINGELYRVIGVNNDLLNRIEVNMIDIT
YREYLENMNDKRPPRIIKTIASKTQSIKKYSTDILGNLYEVKSKKHPQII
KKG*

[1303] Provided below is an exemplary codon optimized nucleic acid sequence encoding a Cas9 molecule of S. aureus Cas9.

SEQ ID NO: 39

ATGAAAAGGAACTACATTCTGGGGCTGGACATCGGGATTACAAGCGTGGG
GTATGGGATTATTGACTATGAAACAAGGGACGTGATCGACGCAGGCGTCA
GACTGTTCAAGGAGGCCAACGTGGAAAACAATGAGGGACGGAGAAGCAAG
AGGGGAGCCAGGCGCCTGAAACGACGGAGAAGGCACAGAATCCAGAGGGT
GAAGAAACTGCTGTTCGATTACAACCTGCTGACCGACCATTCTGAGCTGA
GTGGAATTAATCCTTATGAAGCCAGGGTGAAAGGCCTGAGTCAGAAGCTG
TCAGAGGAAGAGTTTTCCGCAGCTCTGCTGCACCTGGCTAAGCGCCGAGG
AGTGCATAACGTCAATGAGGTGGAAGAGGACACCGGCAACGAGCTGTCTA
CAAAGGAACAGATCTCACGCAATAGCAAAGCTCTGGAAGAGAAGTATGTC
GCAGAGCTGCAGCTGGAACGGCTGAAGAAAGATGGCGAGGTGAGAGGGTC
AATTAATAGGTTCAAGACAAGCGACTACGTCAAAGAAGCCAAGCAGCTGC
TGAAAGTGCAGAAGGCTTACCACCAGCTGGATCAGAGCTTCATCGATACT
TATATCGACCTGCTGGAGACTCGGAGAACCTACTATGAGGGACCAGGAGA
AGGGAGCCCCTTCGGATGGAAAGACATCAAGGAATGGTACGAGATGCTGA
TGGGACATTGCACCTATTTTCCAGAAGAGCTGAGAAGCGTCAAGTACGCT
TATAACGCAGATCTGTACAACGCCCTGAATGACCTGAACAACCTGGTCAT
CACCAGGGATGAAAACGAGAAACTGGAATACTATGAGAAGTTCCAGATCA
TCGAAAACGTGTTTAAGCAGAAGAAAAAGCCTACACTGAAACAGATTGCT
AAGGAGATCCTGGTCAACGAAGAGGACATCAAGGGCTACCGGGTGACAAG
CACTGGAAAACCAGAGTTCACCAATCTGAAAGTGTATCACGATATTAAGG
ACATCACAGCACGGAAAGAAATCATTGAGAACGCCGAACTGCTGGATCAG
ATTGCTAAGATCCTGACTATCTACCAGAGCTCCGAGGACATCCAGGAAGA
GCTGACTAACCTGAACAGCGAGCTGACCCAGGAAGAGATCGAACAGATTA
GTAATCTGAAGGGGTACACCGGAACACACAACCTGTCCCTGAAAGCTATC
AATCTGATTCTGGATGAGCTGTGGCATACAAACGACAATCAGATTGCAAT
CTTTAACCGGCTGAAGCTGGTCCCAAAAAAGGTGGACCTGAGTCAGCAGA
AAGAGATCCCAACCACACTGGTGGACGATTTCATTCTGTCACCCGTGGTC
AAGCGGAGCTTCATCCAGAGCATCAAAGTGATCAACGCCATCATCAAGAA
GTACGGCCTGCCCAATGATATCATTATCGAGCTGGCTAGGGAGAAGAACA
GCAAGGACGCACAGAAGATGATCAATGAGATGCAGAAACGAAACCGGCAG
ACCAATGAACGCATTGAAGAGATTATCCGAACTACCGGGAAAGAGAACGC
AAAGTACCTGATTGAAAAAATCAAGCTGCACGATATGCAGGAGGGAAAGT
GTCTGTATTCTCTGGAGGCCATCCCCCTGGAGGACCTGCTGAACAATCCA
TTCAACTACGAGGTCGATCATATTATCCCCAGAAGCGTGTCCTTCGACAA
TTCCTTTAACAACAAGGTGCTGGTCAAGCAGGAAGAGAACTCTAAAAAGG
GCAATAGGACTCCTTTCCAGTACCTGTCTAGTTCAGATTCCAAGATCTCT
TACGAAACCTTTAAAAAGCACATTCTGAATCTGGCCAAAGGAAAGGGCCG
CATCAGCAAGACCAAAAAGGAGTACCTGCTGGAAGAGCGGGACATCAACA
GATTCTCCGTCCAGAAGGATTTTATTAACCGGAATCTGGTGGACACAAGA
TACGCTACTCGCGGCCTGATGAATCTGCTGCGATCCTATTTCCGGGTGAA
CAATCTGGATGTGAAAGTCAAGTCCATCAACGGCGGGTTCACATCTTTTC
TGAGGCGCAAATGGAAGTTTAAAAAGGAGCGCAACAAAGGGTACAAGCAC
CATGCCGAAGATGCTCTGATTATCGCAAATGCCGACTTCATCTTTAAGGA
GTGGAAAAAGCTGGACAAAGCCAAGAAAGTGATGGAGAACCAGATGTTCG
AAGAGAAGCAGGCCGAATCTATGCCCGAAATCGAGACAGAACAGGAGTAC
AAGGAGATTTTCATCACTCCTCACCAGATCAAGCATATCAAGGATTTCAA
GGACTACAAGTACTCTCACCGGGTGGATAAAAAGCCCAACAGAGAGCTGA
TCAATGACACCCTGTATAGTACAAGAAAAGACGATAAGGGGAATACCCTG
ATTGTGAACAATCTGAACGGACTGTACGACAAAGATAATGACAAGCTGAA
AAAGCTGATCAACAAAAGTCCCGAGAAGCTGCTGATGTACCACCATGATC
CTCAGACATATCAGAAACTGAAGCTGATTATGGAGCAGTACGGCGACGAG
AAGAACCCACTGTATAAGTACTATGAAGAGACTGGGAACTACCTGACCAA
GTATAGCAAAAAGGATAATGGCCCCGTGATCAAGAAGATCAAGTACTATG
GGAACAAGCTGAATGCCCATCTGGACATCACAGACGATTACCCTAACAGT
CGCAACAAGGTGGTCAAGCTGTCACTGAAGCCATACAGATTCGATGTCTA
TCTGGACAACGGCGTGTATAAATTTGTGACTGTCAAGAATCTGGATGTCA
TCAAAAAGGAGAACTACTATGAAGTGAATAGCAAGTGCTACGAAGAGGCT
AAAAAGCTGAAAAAGATTAGCAACCAGGCAGAGTTCATCGCCTCCTTTTA
CAACAACGACCTGATTAAGATCAATGGCGAACTGTATAGGGTCATCGGGG
TGAACAATGATCTGCTGAACCGCATTGAAGTGAATATGATTGACATCACT
TACCGAGAGTATCTGGAAAACATGAATGATAAGCGCCCCCCTCGAATTAT
CAAAACAATTGCCTCTAAGACTCAGAGTATCAAAAAGTACTCAACCGACA
TTCTGGGAAACCTGTATGAGGTGAAGAGCAAAAAGCACCCTCAGATTATC
AAAAAGGGC

[1304] If any of the above Cas9 sequences are fused with a peptide or polypeptide at the C-terminus, it is understood that the stop codon will be removed.

[1305] Other Cas Molecules and Cas Polypeptides

[1306] Various types of Cas molecules or Cas polypeptides can be used to practice the inventions disclosed herein. In some embodiments, Cas molecules of Type II Cas systems are used. In other embodiments, Cas molecules of other Cas systems are used. For example, Type I or Type III Cas molecules may be used. Exemplary Cas molecules (and Cas systems) are described, e.g., in Haft et al., PLoS Computational Biology 2005, 1(6): e60 and Makarova et al., Nature Review Microbiology 2011, 9:467-477, the contents of both references are incorporated herein by reference in their entirety. Exemplary Cas molecules (and Cas systems) are also shown in Table 600.

TABLE 600
Cas Systems

| | | | Structure of | Families | |
|---|---|---|---|---|---|
| Gene | System type | Name from | encoded protein | (and superfamily) | |
| name^{‡} | or subtype | Haft et al.^{§} | (PDB accessions)^{¶} | of encoded protein^{#}** | Representatives |
| cas1 | Type I | cas1 | 3GOD, 3LFX | COG1518 | SERP2463, |
| | Type II | | and 2YZS | | SPy1047 and ygbT |
| | Type III | | | | |
| cas2 | Type I | cas2 | 2IVY, 2I8E | COG1343 and | SERP2462, |
| | Type II | | and 3EXC | COG3512 | SPy1048, SPy1723 |
| | Type III | | | | (N-terminal |
| | | | | | domain) and ygbF |
| cas3′ | Type I^{‡‡} | cas3 | NA | COG1203 | APE1232 and ygcB |
| cas3″ | Subtype I-A | NA | NA | COG2254 | APE1231 and |
| | Subtype I-B | | | | BH0336 |
| cas4 | Subtype I-A | cas4 and | NA | COG1468 | APE1239 and |
| | Subtype I-B | csa1 | | | BH0340 |
| | Subtype I-C | | | | |
| | Subtype I-D | | | | |
| | Subtype II-B | | | | |
| cas5 | Subtype I-A | cas5a, | 3KG4 | COG1688 | APE1234, BH0337, |
| | Subtype I-B | cas5d, | | (RAMP) | devS and ygcI |
| | Subtype I-C | cas5e, | | | |
| | Subtype I-E | cas5h, | | | |
| | | cas5p, | | | |
| | | cas5t and | | | |
| | | cmx5 | | | |
| cas6 | Subtype I-A | cas6 and | 3I4H | COG1583 and | PF1131 and slr7014 |
| | Subtype I-B | cmx6 | | COG5551 | |
| | Subtype I-D | | | (RAMP) | |
| | Subtype III-A | | | | |
| | Subtype III-B | | | | |
| cas6e | Subtype I-E | cse3 | 1WJ9 | (RAMP) | ygcH |
| cas6f | Subtype I-F | csy4 | 2XLJ | (RAMP) | y1727 |
| cas7 | Subtype I-A | csa2, csd2, | NA | COG1857 and | devR and ygcJ |
| | Subtype I-B | cse4, csh2, | | COG3649 | |
| | Subtype I-C | csp1 and | | (RAMP) | |
| | Subtype I-E | cst2 | | | |
| cas8a1 | Subtype I-A^{‡‡} | cmx1, cst1, | NA | BH0338-like | LA3191^{§§} and |
| | | csx8, csx13 | | | PG2018^{§§} |
| | | and CXXC- | | | |
| | | CXXC | | | |
| cas8a2 | Subtype I-A^{‡‡} | csa4 and | NA | PH0918 | AF0070, AF1873, |
| | | csx9 | | | MJ0385, PF0637, |
| | | | | | PH0918 and |
| | | | | | SSO1401 |
| cas8b | Subtype I-B^{‡‡} | csh1 and | NA | BH0338-like | MTH1090 and |
| | | TM1802 | | | TM1802 |
| cas8c | Subtype I-C^{‡‡} | csd1 and | NA | BH0338-like | BH0338 |
| | | csp2 | | | |
| cas9 | Type II^{‡‡} | csn1 and | NA | COG3513 | FTN_0757 and |
| | | csx12 | | | SPy1046 |
| cas10 | Type III^{‡‡} | cmr2, csm1 | NA | COG1353 | MTH326, |
| | | and csx11 | | | Rv2823c^{§§} and |
| | | | | | TM1794^{§§} |
| cas10d | Subtype I-D^{‡‡} | csc3 | NA | COG1353 | slr7011 |
| csy1 | Subtype I-F^{‡‡} | csy1 | NA | y1724-like | y1724 |
| csy2 | Subtype I-F | csy2 | NA | (RAMP) | y1725 |
| csy3 | Subtype I-F | csy3 | NA | (RAMP) | y1726 |
| cse1 | Subtype I-E^{‡‡} | cse1 | NA | YgcL-like | ygcL |
| cse2 | Subtype I-E | cse2 | 2ZCA | YgcK-like | ygcK |
| csc1 | Subtype I-D | csc1 | NA | alr1563-like | alr1563 |
| | | | | (RAMP) | |
| csc2 | Subtype I-D | csc1 and | NA | COG1337 | slr7012 |
| | | csc2 | | (RAMP) | |
| csa5 | Subtype I-A | csa5 | NA | AF1870 | AF1870, MJ0380, |
| | | | | | PF0643 and |
| | | | | | SSO1398 |
| csn2 | Subtype II-A | csn2 | NA | SPy1049-like | SPy1049 |
| csm2 | Subtype III-A^{‡‡} | csm2 | NA | COG1421 | MTH1081 and |
| | | | | | SERP2460 |
| csm3 | Subtype III-A | csc2 and | NA | COG1337 | MTH1080 and |
| | | csm3 | | (RAMP) | SERP2459 |
| csm4 | Subtype III-A | csm4 | NA | COG1567 | MTH1079 and |
| | | | | (RAMP) | SERP2458 |
| csm5 | Subtype III-A | csm5 | NA | COG1332 | MTH1078 and |
| | | | | (RAMP) | SERP2457 |
| csm6 | Subtype III-A | APE2256 | 2WTE | COG1517 | APE2256 and |
| | | and csm6 | | | SSO1445 |
| cmr1 | Subtype III-B | cmr1 | NA | COG1367 | PF1130 |
| | | | | (RAMP) | |
| cmr3 | Subtype III-B | cmr3 | NA | COG1769 | PF1128 |
| | | | | (RAMP) | |
| cmr4 | Subtype III-B | cmr4 | NA | COG1336 | PF1126 |
| | | | | (RAMP) | |
| cmr5 | Subtype III-B^{‡‡} | cmr5 | 2ZOP and | COG3337 | MTH324 and |
| | | | 2OEB | | PF1125 |
| cmr6 | Subtype III-B | cmr6 | NA | COG1604 | PF1124 |
| | | | | (RAMP) | |
| csb1 | Subtype I-U | GSU0053 | NA | (RAMP) | Balac_1306 and |
| | | | | | GSU0053 |
| csb2 | Subtype I-U^{§§} | NA | NA | (RAMP) | Balac_1305 and |
| | | | | | GSU0054 |
| csb3 | Subtype I-U | NA | NA | (RAMP) | Balac_1303^{§§} |
| csx17 | Subtype I-U | NA | NA | NA | Btus_2683 |
| csx14 | Subtype I-U | NA | NA | NA | GSU0052 |
| csx10 | Subtype I-U | csx10 | NA | (RAMP) | Caur_2274 |
| csx16 | Subtype III-U | VVA1548 | NA | NA | VVA1548 |
| csaX | Subtype III-U | csaX | NA | NA | SSO1438 |
| csx3 | Subtype III-U | csx3 | NA | NA | AF1864 |
| csx1 | Subtype III-U | csa3, csx1, | 1XMX and | COG1517 and | MJ1666, NE0113, |
| | | csx2, | 2I71 | COG4006 | PF1127 and |
| | | DXTHG, | | | TM1812 |
| | | NE0113 | | | |
| | | and | | | |
| | | TIGR02710 | | | |
| csx15 | Unknown | NA | NA | TTE2665 | TTE2665 |
| csf1 | Type U | csf1 | NA | NA | AFE_1038 |
| csf2 | Type U | csf2 | NA | (RAMP) | AFE_1039 |
| csf3 | Type U | csf3 | NA | (RAMP) | AFE_1040 |
| csf4 | Type U | csf4 | NA | NA | AFE_1037 |

### IV. Functional Analysis of Candidate Molecules

[1307] Candidate Cas9 molecules, candidate gRNA molecules, candidate Cas9 molecule/gRNA molecule complexes, can be evaluated by art-known methods or as described herein. For example, exemplary methods for evaluating the endonuclease activity of Cas9 molecule are described, e.g., in Jinek et al., SCIENCE 2012, 337(6096):816-821.

[1308] Binding and Cleavage Assay: Testing the Endonuclease Activity of Cas9 Molecule

[1309] The ability of a Cas9 molecule/gRNA molecule complex to bind to and cleave a target nucleic acid can be evaluated in a plasmid cleavage assay. In this assay, synthetic or in vitro-transcribed gRNA molecule is pre-annealed prior to the reaction by heating to 95° C. and slowly cooling down to room temperature. Native or restriction digest-linearized plasmid DNA (300 ng (˜8 nM)) is incubated for 60 min at 37° C. with purified Cas9 protein molecule (50-500 nM) and gRNA (50-500 nM, 1:1) in a Cas9 plasmid cleavage buffer (20 mM HEPES pH 7.5, 150 mM KCl, 0.5 mM DTT, 0.1 mM EDTA) with or without 10 mM MgCl₂. The reactions are stopped with 5×DNA loading buffer (30% glycerol, 1.2% SDS, 250 mM EDTA), resolved by a 0.8 or 1% agarose gel electrophoresis and visualized by ethidium bromide staining. The resulting cleavage products indicate whether the Cas9 molecule cleaves both DNA strands, or only one of the two strands. For example, linear DNA products indicate the cleavage of both DNA strands. Nicked open circular products indicate that only one of the two strands is cleaved.

[1310] Alternatively, the ability of a Cas9 molecule/gRNA molecule complex to bind to and cleave a target nucleic acid can be evaluated in an oligonucleotide DNA cleavage assay. In this assay, DNA oligonucleotides (10 pmol) are radiolabeled by incubating with 5 units T4 polynucleotide kinase and -3-6 pmol (˜20-40 mCi) [γ-32P]-ATP in 1×T4 polynucleotide kinase reaction buffer at 37° C. for 30 min, in a 50 μL reaction. After heat inactivation (65° C. for 20 min), reactions are purified through a column to remove unincorporated label. Duplex substrates (100 nM) are generated by annealing labeled oligonucleotides with equimolar amounts of unlabeled complementary oligonucleotide at 95° C. for 3 min, followed by slow cooling to room temperature. For cleavage assays, gRNA molecules are annealed by heating to 95° C. for 30 s, followed by slow cooling to room temperature. Cas9 (500 nM final concentration) is pre-incubated with the annealed gRNA molecules (500 nM) in cleavage assay buffer (20 mM HEPES pH 7.5, 100 mM KCl, 5 mM MgCl2, 1 mM DTT, 5% glycerol) in a total volume of 9 μl. Reactions are initiated by the addition of 1 μl target DNA (10 nM) and incubated for 1 h at 37° C. Reactions are quenched by the addition of 20 μl of loading dye (5 mM EDTA, 0.025% SDS, 5% glycerol in formamide) and heated to 95° C. for 5 min. Cleavage products are resolved on 12% denaturing polyacrylamide gels containing 7 M urea and visualized by phosphorimaging. The resulting cleavage products indicate that whether the complementary strand, the non-complementary strand, or both, are cleaved.

[1311] One or both of these assays can be used to evaluate the suitability of a candidate gRNA molecule or candidate Cas9 molecule.

[1312] Binding Assay: Testing the Binding of Cas9 Molecule to Target DNA

[1313] Exemplary methods for evaluating the binding of Cas9 molecule to target DNA are described, e.g., in Jinek et al., SCIENCE 2012; 337(6096):816-821.

[1314] For example, in an electrophoretic mobility shift assay, target DNA duplexes are formed by mixing of each strand (10 nmol) in deionized water, heating to 95° C. for 3 min and slow cooling to room temperature. All DNAs are purified on 8% native gels containing 1×TBE. DNA bands are visualized by UV shadowing, excised, and eluted by soaking gel pieces in DEPC-treated H₂O. Eluted DNA is ethanol precipitated and dissolved in DEPC-treated H₂O. DNA samples are 5′ end labeled with [γ-32P]-ATP using T4 polynucleotide kinase for 30 min at 37° C. Polynucleotide kinase is heat denatured at 65° C. for 20 min, and unincorporated radiolabel is removed using a column. Binding assays are performed in buffer containing 20 mM HEPES pH 7.5, 100 mM KCl, 5 mM MgCl₂, 1 mM DTT and 10% glycerol in a total volume of 10 μl. Cas9 protein molecule is programmed with equimolar amounts of pre-annealed gRNA molecule and titrated from 100 pM to 1 μM. Radiolabeled DNA is added to a final concentration of 20 pM. Samples are incubated for 1 h at 37° C. and resolved at 4° C. on an 8% native polyacrylamide gel containing 1×TBE and 5 mM MgCl₂. Gels are dried and DNA visualized by phosphorimaging.

[1315] Differential Scanning Flourimetry (DSF)

[1316] The thermostability of Cas9-gRNA ribonucleoprotein (RNP) complexes can be measured via DSF. This technique measures the thermostability of a protein, which can increase under favorable conditions such as the addition of a binding RNA molecule, e.g., a gRNA.

[1317] The assay is performed using two different protocols, one to test the best stoichiometric ratio of gRNA:Cas9 protein and another to determine the best solution conditions for RNP formation.

[1318] To determine the best solution to form RNP complexes, a 2 uM solution of Cas9 in water+10× SYPRO Orange® (Life Techonologies cat#S-6650) and dispensed into a 384 well plate. An equimolar amount of gRNA diluted in solutions with varied pH and salt is then added. After incubating at room temperature for 10′ and brief centrifugation to remove any bubbles, a Bio-Rad CFX384™ Real-Time System C1000 Touch™ Thermal Cycler with the Bio-Rad CFX Manager software is used to run a gradient from 20° C. to 90° C. with a 10 increase in temperature every 10 seconds.

[1319] The second assay consists of mixing various concentrations of gRNA with 2 uM Cas9 in optimal buffer from assay 1 above and incubating at RT for 10′ in a 384 well plate. An equal volume of optimal buffer+10× SYPRO Orange® (Life Techonologies cat#S-6650) is added and the plate sealed with Microseal® B adhesive (MSB-1001). Following brief centrifugation to remove any bubbles, a Bio-Rad CFX384™ Real-Time System C1000 Touch™ Thermal Cycler with the Bio-Rad CFX Manager software is used to run a gradient from 20° C. to 90° C. with a 10 increase in temperature every 10 seconds.

### V. Genome Editing Approaches

[1320] In general, it is to be understood that the alteration of any gene according to the methods described herein can be mediated by any mechanism and that any methods are not limited to a particular mechanism. Exemplary mechanisms that can be associated with the alteration of a gene include, but are not limited to, non-homologous end joining (e.g., classical or alternative), microhomology-mediated end joining (MMEJ), homology-directed repair (e.g., endogenous donor template mediated), SDSA (synthesis dependent strand annealing), single strand annealing or single strand invasion. Described herein are exemplary methods for targeted knockout of one or both alleles of the FAS, BID, CTLA4, PDCD1, CBLB or, PTPN66, TRAC or TRBC gene using NHEJ (see Section V.1). In another embodiment, exemplary methods are provided for targeted knockdown of the FAS, BID, CTLA4, PDCD1, CBLB, or PTPN6 gene (see Section V.2). It is further contemplated that the disclosed methods may target two or more of the FAS, BID, CTLA4, PDCD1, CBLB, or PTPN6 genes for knockdown or knockout or a combination thereof.

[1321] V.1 NHEJ Approaches for Gene Targeting

[1322] As described herein, nuclease-induced non-homologous end-joining (NHEJ) can be used to target gene-specific knockouts. Nuclease-induced NHEJ can also be used to remove (e.g., delete) sequence insertions in a gene of interest.

[1323] While not wishing to be bound by theory, it is believed that, in an embodiment, the genomic alterations associated with the methods described herein rely on nuclease-induced NHEJ and the error-prone nature of the NHEJ repair pathway. NHEJ repairs a double-strand break in the DNA by joining together the two ends; however, generally, the original sequence is restored only if two compatible ends, exactly as they were formed by the double-strand break, are perfectly ligated. The DNA ends of the double-strand break are frequently the subject of enzymatic processing, resulting in the addition or removal of nucleotides, at one or both strands, prior to rejoining of the ends. This results in the presence of insertion and/or deletion (indel) mutations in the DNA sequence at the site of the NHEJ repair. Two-thirds of these mutations typically alter the reading frame and, therefore, produce a non-functional protein. Additionally, mutations that maintain the reading frame, but which insert or delete a significant amount of sequence, can destroy functionality of the protein. This is locus dependent as mutations in critical functional domains are likely less tolerable than mutations in non-critical regions of the protein.

[1324] The indel mutations generated by NHEJ are unpredictable in nature; however, at a given break site certain indel sequences are favored and are over represented in the population, likely due to small regions of microhomology. The lengths of deletions can vary widely; most commonly in the 1-50 bp range, but they can easily reach greater than 100-200 bp. Insertions tend to be shorter and often include short duplications of the sequence immediately surrounding the break site. However, it is possible to obtain large insertions, and in these cases, the inserted sequence has often been traced to other regions of the genome or to plasmid DNA present in the cells.

[1325] Because NHEJ is a mutagenic process, it can also be used to delete small sequence motifs as long as the generation of a specific final sequence is not required. If a double-strand break is targeted near to a short target sequence, the deletion mutations caused by the NHEJ repair often span, and therefore remove, the unwanted nucleotides. For the deletion of larger DNA segments, introducing two double-strand breaks, one on each side of the sequence, can result in NHEJ between the ends with removal of the entire intervening sequence. Both of these approaches can be used to delete specific DNA sequences; however, the error-prone nature of NHEJ may still produce indel mutations at the site of repair.

[1326] Both double strand cleaving eaCas9 molecules and single strand, or nickase, eaCas9 molecules can be used in the methods and compositions described herein to generate NHEJ-mediated indels. NHEJ-mediated indels targeted to the gene, e.g., a coding region, e.g., an early coding region of a gene, of interest can be used to knockout (i.e., eliminate expression of) a gene of interest. For example, early coding region of a gene of interest includes sequence immediately following a transcription start site, within a first exon of the coding sequence, or within 500 bp of the transcription start site (e.g., less than 500, 450, 400, 350, 300, 250, 200, 150, 100 or 50 bp).

[1327] In an embodiment, NHEJ-mediated indels are introduced into one or more T-cell expressed genes. In an embodiment, in which a Cas9 double-stranded nuclease or a Cas9 single-stranded nickase is used to introduce mutations into two T-cell expressed genes, e.g., any two of FAS, BID, CTLA4, PDCD1, CBLB, PTPN6, TRAC or TRBC genes, individual gRNAs or gRNA pairs targeting both genes are provided together with the Cas9 double-stranded nuclease or single-stranded nickase. In an embodiment, in which a Cas9 double-stranded nuclease or a Cas9 single-stranded nickase is used to introduce mutations into three T-cell expressed genes, e.g., any three of FAS, BID, CTLA4, PDCD1, CBLB, PTPN6, TRAC or TRBC genes, individual gRNAs or gRNA pairs targeting all three genes are provided together with the Cas9 double-stranded nuclease or single-stranded nickase. In an embodiment, in which a Cas9 double-stranded nuclease or a Cas9 single-stranded nickase is used to introduce mutations into four T-cell expressed genes, e.g., any four of FAS, BID, CTLA4, PDCD1, CBLB, PTPN6, TRAC or TRBC genes, individual gRNAs or gRNA pairs targeting all four genes are provided together with the Cas9 double-stranded nuclease or single-stranded nickase. In an embodiment, in which a Cas9 double-stranded nuclease or a Cas9 single-stranded nickase is used to introduce mutations into five T-cell expressed genes, e.g., any five of FAS, BID, CTLA4, PDCD1, CBLB, PTPN6, TRAC or TRBC genes, individual gRNAs or gRNA pairs targeting all five genes are provided together with the Cas9 double-stranded nuclease or single-stranded nickase. In an embodiment, in which a Cas9 double-stranded nuclease or a Cas9 single-stranded nickase is used to introduce mutations into six T-cell expressed genes, e.g., any six of FAS, BID, CTLA4, PDCD1, CBLB, PTPN6, TRAC or TRBC genes, individual gRNAs or gRNA pairs targeting all six genes are provided together with the Cas9 double-stranded nuclease or single-stranded nickase. In an embodiment, in which a Cas9 double-stranded nuclease or a Cas9 single-stranded nickase is used to introduce mutations into seven T-cell expressed genes, e.g., any seven of FAS, BID, CTLA4, PDCD1, CBLB, PTPN6, TRAC or TRBC genes, individual gRNAs or gRNA pairs targeting all seven genes are provided together with the Cas9 double-stranded nuclease or single-stranded nickase. In an embodiment, in which a Cas9 double-stranded nuclease or aCas9 single-stranded nickase is used to introduce mutations into eight T-cell expressed genes, e.g., each of FAS, BID, CTLA4, PDCD1, CBLB, PTPN6, TRAC and TRBC genes, individual gRNAs or gRNA pairs targeting all eight genes are provided together with the Cas9 double-stranded nuclease or single-stranded nickase.

[1328] Placement of Double Strand or Single Strand Breaks Relative to the Target Position

[1329] In an embodiment, in which a gRNA and Cas9 nuclease generate a double strand break for the purpose of inducing NHEJ-mediated indels, a gRNA, e.g., a unimolecular (or chimeric) or modular gRNA molecule, is configured to position one double-strand break in close proximity to a nucleotide of the target position. In an embodiment, the cleavage site is between 0-30 bp away from the target position (e.g., less than 30, 25, 20, 15, 10, 9, 8, 7, 6, 5, 4, 3, 2 or 1 bp from the target position).

[1330] In an embodiment, in which two gRNAs complexing with Cas9 nickases induce two single strand breaks for the purpose of inducing NHEJ-mediated indels, two gRNAs, e.g., independently, unimolecular (or chimeric) or modular gRNA, are configured to position two single-strand breaks to provide for NHEJ repair a nucleotide of the target position. In an embodiment, the gRNAs are configured to position cuts at the same position, or within a few nucleotides of one another, on different strands, essentially mimicking a double strand break. In an embodiment, the closer nick is between 0-30 bp away from the target position (e.g., less than 30, 25, 20, 15, 10, 9, 8, 7, 6, 5, 4, 3, 2 or 1 bp from the target position), and the two nicks are within 25-55 bp of each other (e.g., between 25 to 50, 25 to 45, 25 to 40, 25 to 35, 25 to 30, 50 to 55, 45 to 55, 40 to 55, 35 to 55, 30 to 55, 30 to 50, 35 to 50, 40 to 50, 45 to 50, 35 to 45, or 40 to 45 bp) and no more than 100 bp away from each other (e.g., no more than 90, 80, 70, 60, 50, 40, 30, 20 or 10 bp). In an embodiment, the gRNAs are configured to place a single strand break on either side of a nucleotide of the target position.

[1331] Both double strand cleaving eaCas9 molecules and single strand, or nickase, eaCas9 molecules can be used in the methods and compositions described herein to generate breaks both sides of a target position. Double strand or paired single strand breaks may be generated on both sides of a target position to remove the nucleic acid sequence between the two cuts (e.g., the region between the two breaks in deleted). In an embodiment, two gRNAs, e.g., independently, unimolecular (or chimeric) or modular gRNA, are configured to position a double-strand break on both sides of a target position. In an alternate embodiment, three gRNAs, e.g., independently, unimolecular (or chimeric) or modular gRNA, are configured to position a double strand break (i.e., one gRNA complexes with a cas9 nuclease) and two single strand breaks or paired single stranded breaks (i.e., two gRNAs complex with Cas9 nickases) on either side of the target position. In another embodiment, four gRNAs, e.g., independently, unimolecular (or chimeric) or modular gRNA, are configured to generate two pairs of single stranded breaks (i.e., two pairs of two gRNAs complex with Cas9 nickases) on either side of the target position. The double strand break(s) or the closer of the two single strand nicks in a pair will ideally be within 0-500 bp of the target position (e.g., no more than 450, 400, 350, 300, 250, 200, 150, 100, 50 or 25 bp from the target position). When nickases are used, the two nicks in a pair are within 25-55 bp of each other (e.g., between 25 to 50, 25 to 45, 25 to 40, 25 to 35, 25 to 30, 50 to 55, 45 to 55, 40 to 55, 35 to 55, 30 to 55, 30 to 50, 35 to 50, 40 to 50, 45 to 50, 35 to 45, or 40 to 45 bp) and no more than 100 bp away from each other (e.g., no more than 90, 80, 70, 60, 50, 40, 30, 20 or 10 bp).

[1332] V.2 Targeted Knockdown

[1333] Unlike CRISPR/Cas-mediated gene knockout, which permanently eliminates or reduces expression by mutating the gene at the DNA level, CRISPR/Cas knockdown allows for temporary reduction of gene expression through the use of artificial transcription factors. Mutating key residues in both DNA cleavage domains of the Cas9 protein (e.g., the D10A and H840A mutations) results in the generation of a catalytically inactive Cas9 (eiCas9 which is also known as dead Cas9 or dCas9). A catalytically inactive Cas9 complexes with a gRNA and localizes to the DNA sequence specified by that gRNA's targeting domain, however, it does not cleave the target DNA. Fusion of the dCas9 to an effector domain, e.g., a transcription repression domain, enables recruitment of the effector to any DNA site specified by the gRNA. While it has been shown that the eiCas9 itself can block transcription when recruited to early regions in the coding sequence, more robust repression can be achieved by fusing a transcriptional repression domain (for example KRAB, SID or ERD) to the Cas9 and recruiting it to the promoter region of a gene. It is likely that targeting DNAseI hypersensitive regions of the promoter may yield more efficient gene repression or activation because these regions are more likely to be accessible to the Cas9 protein and are also more likely to harbor sites for endogenous transcription factors. Especially for gene repression, it is contemplated herein that blocking the binding site of an endogenous transcription factor would aid in downregulating gene expression. In another embodiment, an eiCas9 can be fused to a chromatin modifying protein. Altering chromatin status can result in decreased expression of the target gene.

[1334] In an embodiment, a gRNA molecule can be targeted to a known transcription response elements (e.g., promoters, enhancers, etc.), a known upstream activating sequences (UAS), and/or sequences of unknown or known function that are suspected of being able to control expression of the target DNA.

[1335] CRISPR/Cas-mediated gene knockdown can be used to reduce expression of an unwanted allele or transcript. Contemplated herein are scenarios wherein permanent destruction of the gene is not ideal. In these scenarios, site-specific repression may be used to temporarily reduce or eliminate expression. It is also contemplated herein that the off-target effects of a Cas-repressor may be less severe than those of a Cas-nuclease as a nuclease can cleave any DNA sequence and cause mutations whereas a Cas-repressor may only have an effect if it targets the promoter region of an actively transcribed gene. However, while nuclease-mediated knockout is permanent, repression may only persist as long as the Cas-repressor is present in the cells. Once the repressor is no longer present, it is likely that endogenous transcription factors and gene regulatory elements would restore expression to its natural state.

[1336] In an embodiment, CRISPR/Cas-mediated gene knockdown can be used to reduce expression one or more T-cell expressed genes. In an embodiment, in which a eiCas9 or an eiCas9 fusion protein described herein is used to knockdown two T-cell expressed genes, e.g., any two of FAS, BID, CTLA4, PDCD1, CBLB, or PTPN6 genes, individual gRNAs or gRNA pairs targeting both genes are provided together with the eiCas9 or eiCas9 fusion protein. In an embodiment, in which a eiCas9 or eiCas9 fusion protein is used to knockdown three T-cell expressed genes, e.g., any three of FAS, BID, CTLA4, PDCD1, CBLB, or PTPN6 genes, individual gRNAs or gRNA pairs targeting all three genes are provided together with the eiCas9 or eiCas9 fusion protein. In an embodiment, in which a eiCas9 or eiCas9 fusion protein is used to knockdown four T-cell expressed genes, e.g., any four of FAS, BID, CTLA4, PDCD1, CBLB, or PTPN6 genes, individual gRNAs or gRNA pairs targeting all four genes are provided together with the eiCas9 or eiCas9 fusion protein. In an embodiment, in which a eiCas9 or eiCas9 fusion protein is used to knockdown five T-cell expressed genes, e.g., any five of FAS, BID, CTLA4, PDCD1, CBLB, or PTPN6 genes, individual gRNAs or gRNA pairs targeting all five genes are provided together with the eiCas9 or eiCas9 fusion protein. In an embodiment, in which a eiCas9 or eiCas9 fusion protein is used to knockdown six T-cell expressed genes, e.g., each of FAS, BID, CTLA4, PDCD1, CBLB, or PTPN6 genes, individual gRNAs or gRNA pairs targeting all six genes are provided together with the eiCas9 or eiCas9 fusion protein.

[1337] V.3 Single-Strand Annealing

[1338] Single strand annealing (SSA) is another DNA repair process that repairs a double-strand break between two repeat sequences present in a target nucleic acid. Repeat sequences utilized by the SSA pathway are generally greater than 30 nucleotides in length. Resection at the break ends occurs to reveal repeat sequences on both strands of the target nucleic acid. After resection, single strand overhangs containing the repeat sequences are coated with RPA protein to prevent the repeats sequences from inappropriate annealing, e.g., to themselves. RAD52 binds to and each of the repeat sequences on the overhangs and aligns the sequences to enable the annealing of the complementary repeat sequences. After annealing, the single-strand flaps of the overhangs are cleaved. New DNA synthesis fills in any gaps, and ligation restores the DNA duplex. As a result of the processing, the DNA sequence between the two repeats is deleted. The length of the deletion can depend on many factors including the location of the two repeats utilized, and the pathway or processivity of the resection.

[1339] In contrast to HDR pathways, SSA does not require a template nucleic acid to alter or correct a target nucleic acid sequence. Instead, the complementary repeat sequence is utilized.

[1340] V.4 Other DNA Repair Pathways

[1341] SSBR (Single Strand Break Repair)

[1342] Single-stranded breaks (SSB) in the genome are repaired by the SSBR pathway, which is a distinct mechanism from the DSB repair mechanisms discussed above. The SSBR pathway has four major stages: SSB detection, DNA end processing, DNA gap filling, and DNA ligation. A more detailed explanation is given in Caldecott, Nature Reviews Genetics 9, 619-631 (August 2008), and a summary is given here.

[1343] In the first stage, when a SSB forms, PARP1 and/or PARP2 recognize the break and recruit repair machinery. The binding and activity of PARP1 at DNA breaks is transient and it seems to accelerate SSBr by promoting the focal accumulation or stability of SSBr protein complexes at the lesion. Arguably the most important of these SSBr proteins is XRCC1, which functions as a molecular scaffold that interacts with, stabilizes, and stimulates multiple enzymatic components of the SSBr process including the protein responsible for cleaning the DNA 3′ and 5′ ends. For instance, XRCC1 interacts with several proteins (DNA polymerase beta, PNK, and three nucleases, APE1, APTX, and APLF) that promote end processing. APE1 has endonuclease activity. APLF exhibits endonuclease and 3′ to 5′ exonuclease activities. APTX has endonuclease and 3′ to 5′ exonuclease activity.

[1344] This end processing is an important stage of SSBR since the 3′- and/or 5′-termini of most, if not all, SSBs are ‘damaged’. End processing generally involves restoring a damaged 3′-end to a hydroxylated state and and/or a damaged 5′ end to a phosphate moiety, so that the ends become ligation-competent. Enzymes that can process damaged 3′ termini include PNKP, APE1, and TDP1. Enzymes that can process damaged 5′ termini include PNKP, DNA polymerase beta, and APTX. LIG3 (DNA ligase III) can also participate in end processing. Once the ends are cleaned, gap filling can occur.

[1345] At the DNA gap filling stage, the proteins typically present are PARP1, DNA polymerase beta, XRCC1, FEN1 (flap endonculease 1), DNA polymerase delta/epsilon, PCNA, and LIG1. There are two ways of gap filling, the short patch repair and the long patch repair. Short patch repair involves the insertion of a single nucleotide that is missing. At some SSBs, “gap filling” might continue displacing two or more nucleotides (displacement of up to 12 bases have been reported). FEN1 is an endonuclease that removes the displaced 5′-residues. Multiple DNA polymerases, including Pol 3, are involved in the repair of SSBs, with the choice of DNA polymerase influenced by the source and type of SSB.

[1346] In the fourth stage, a DNA ligase such as LIG1 (Ligase I) or LIG3 (Ligase III) catalyzes joining of the ends. Short patch repair uses Ligase III and long patch repair uses Ligase I.

[1347] Sometimes, SSBR is replication-coupled. This pathway can involve one or more of CtIP, MRN, ERCC1, and FEN1. Additional factors that may promote SSBR include: aPARP, PARP1, PARP2, PARG, XRCC1, DNA polymerase b, DNA polymerase d, DNA polymerase e, PCNA, LIG1, PNK, PNKP, APE1, APTX, APLF, TDP1, LIG3, FEN1, CtIP, MRN, and ERCC1.

[1348] MMR (Mismatch Repair)

[1349] Cells contain three excision repair pathways: MMR, BER, and NER. The excision repair pathways have a common feature in that they typically recognize a lesion on one strand of the DNA, then exo/endonucleaseases remove the lesion and leave a 1-30 nucleotide gap that is sub-sequentially filled in by DNA polymerase and finally sealed with ligase. A more complete picture is given in Li, Cell Research (2008) 18:85-98, and a summary is provided here.

[1350] Mismatch repair (MMR) operates on mispaired DNA bases.

[1351] The MSH2/6 or MSH2/3 complexes both have ATPases activity that plays an important role in mismatch recognition and the initiation of repair. MSH2/6 preferentially recognizes base-base mismatches and identifies mispairs of 1 or 2 nucleotides, while MSH2/3 preferentially recognizes larger ID mispairs.

[1352] hMLH1 heterodimerizes with hPMS2 to form hMutL a which possesses an ATPase activity and is important for multiple steps of MMR. It possesses a PCNA/replication factor C (RFC)-dependent endonuclease activity which plays an important role in 3′ nick-directed MMR involving EXO 1. (EXO 1 is a participant in both HR and MMR.) It regulates termination of mismatch-provoked excision. Ligase I is the relevant ligase for this pathway. Additional factors that may promote MMR include: EXO 1, MSH2, MSH3, MSH6, MLH1, PMS2, MLH3, DNA Pol d, RPA, HMGB1, RFC, and DNA ligase I.

[1353] Base Excision Repair (BER)

[1354] The base excision repair (BER) pathway is active throughout the cell cycle; it is responsible primarily for removing small, non-helix-distorting base lesions from the genome. In contrast, the related Nucleotide Excision Repair pathway (discussed in the next section) repairs bulky helix-distorting lesions. A more detailed explanation is given in Caldecott, Nature Reviews Genetics 9, 619-631 (August 2008), and a summary is given here.

[1355] Upon DNA base damage, base excision repair (BER) is initiated and the process can be simplified into five major steps: (a) removal of the damaged DNA base; (b) incision of the subsequent a basic site; (c) clean-up of the DNA ends; (d) insertion of the correct nucleotide into the repair gap; and (e) ligation of the remaining nick in the DNA backbone. These last steps are similar to the SSBR.

[1356] In the first step, a damage-specific DNA glycosylase excises the damaged base through cleavage of the N-glycosidic bond linking the base to the sugar phosphate backbone. Then AP endonuclease-1 (APE1) or bifunctional DNA glycosylases with an associated lyase activity incised the phosphodiester backbone to create a DNA single strand break (SSB). The third step of BER involves cleaning-up of the DNA ends. The fourth step in BER is conducted by Pol R that adds a new complementary nucleotide into the repair gap and in the final step XRCC1/Ligase III seals the remaining nick in the DNA backbone. This completes the short-patch BER pathway in which the majority (˜80%) of damaged DNA bases are repaired. However, if the 5′-ends in step 3 are resistant to end processing activity, following one nucleotide insertion by Pol β there is then a polymerase switch to the replicative DNA polymerases, Pol β/ε, which then add ˜2-8 more nucleotides into the DNA repair gap. This creates a 5′-flap structure, which is recognized and excised by flap endonuclease-1 (FEN-1) in association with the processivity factor proliferating cell nuclear antigen (PCNA). DNA ligase I then seals the remaining nick in the DNA backbone and completes long-patch BER. Additional factors that may promote the BER pathway include: DNA glycosylase, APE1, Polb, Pold, Pole, XRCC1, Ligase III, FEN-1, PCNA, RECQL4, WRN, MYH, PNKP, and APTX.

[1357] Nucleotide Excision Repair (NER)

[1358] Nucleotide excision repair (NER) is an important excision mechanism that removes bulky helix-distorting lesions from DNA. Additional details about NER are given in Marteijn et al., Nature Reviews Molecular Cell Biology 15, 465-481 (2014), and a summary is given here. NER a broad pathway encompassing two smaller pathways: global genomic NER (GG-NER) and transcription coupled repair NER (TC-NER). GG-NER and TC-NER use different factors for recognizing DNA damage. However, they utilize the same machinery for lesion incision, repair, and ligation.

[1359] Once damage is recognized, the cell removes a short single-stranded DNA segment that contains the lesion. Endonucleases XPF/ERCC1 and XPG (encoded by ERCC5) remove the lesion by cutting the damaged strand on either side of the lesion, resulting in a single-strand gap of 22-30 nucleotides. Next, the cell performs DNA gap filling synthesis and ligation. Involved in this process are: PCNA, RFC, DNA Pol δ, DNA Pol ε or DNA Pol κ, and DNA ligase I or XRCC1/Ligase III. Replicating cells tend to use DNA pol ε and DNA ligase I, while non-replicating cells tend to use DNA Pol δ, DNA Pol c, and the XRCC1/Ligase III complex to perform the ligation step.

[1360] NER can involve the following factors: XPA-G, POLH, XPF, ERCC1, XPA-G, and LIG1. Transcription-coupled NER (TC-NER) can involve the following factors: CSA, CSB, XPB, XPD, XPG, ERCC1, and TTDA. Additional factors that may promote the NER repair pathway include XPA-G, POLH, XPF, ERCC1, XPA-G, LIG1, CSA, CSB, XPA, XPB, XPC, XPD, XPF, XPG, TTDA, UVSSA, USP7, CETN2, RAD23B, UV-DDB, CAK subcomplex, RPA, and PCNA.

[1361] Interstrand Crosslink (ICL)

[1362] A dedicated pathway called the ICL repair pathway repairs interstrand crosslinks. Interstrand crosslinks, or covalent crosslinks between bases in different DNA strand, can occur during replication or transcription. ICL repair involves the coordination of multiple repair processes, in particular, nucleolytic activity, translesion synthesis (TLS), and HDR. Nucleases are recruited to excise the ICL on either side of the crosslinked bases, while TLS and HDR are coordinated to repair the cut strands. ICL repair can involve the following factors: endonucleases, e.g., XPF and RAD51C, endonucleases such as RAD51, translesion polymerases, e.g., DNA polymerase zeta and Rev), and the Fanconi anemia (FA) proteins, e.g., FancJ.

[1363] Other Pathways

[1364] Several other DNA repair pathways exist in mammals.

[1365] Translesion synthesis (TLS) is a pathway for repairing a single stranded break left after a defective replication event and involves translesion polymerases, e.g., DNA polξ and Rev1.

[1366] Error-free postreplication repair (PRR) is another pathway for repairing a single stranded break left after a defective replication event.

[1367] V.5 Examples of gRNAs in Genome Editing Methods

[1368] gRNA molecules as described herein can be used with Cas9 molecules that generate a double strand break or a single strand break to alter the sequence of a target nucleic acid, e.g., a target position or target genetic signature. gRNA molecules useful in these methods are described below.

[1369] In an embodiment, the gRNA, e.g., a chimeric gRNA, is configured such that it comprises one or more of the following properties;

[1370] a) it can position, e.g., when targeting a Cas9 molecule that makes double strand breaks, a double strand break (i) within 50, 100, 150, 200, 250, 300, 350, 400, 450, or 500 nucleotides of a target position, or (ii) sufficiently close that the target position is within the region of end resection;

[1371] b) it has a targeting domain of at least 16 nucleotides, e.g., a targeting domain of (i) 16, (ii), 17, (iii) 18, (iv) 19, (v) 20, (vi) 21, (vii) 22, (viii) 23, (ix) 24, (x) 25, or (xi) 26 nucleotides; and

[1372] c)

(i) the proximal and tail domain, when taken together, comprise at least 15, 18, 20, 25, 30, 31, 35, 40, 45, 49, 50, or 53 nucleotides, e.g., at least 15, 18, 20, 25, 30, 31, 35, 40, 45, 49, 50, or 53 nucleotides from a naturally occurring S. pyogenes, S. thermophilus, S. aureus, or N. meningitidis tail and proximal domain, or a sequence that differs by no more than 1, 2, 3, 4, 5; 6, 7, 8, 9 or 10 nucleotides therefrom;
(ii) there are at least 15, 18, 20, 25, 30, 31, 35, 40, 45, 49, 50, or 53 nucleotides 3′ to the last nucleotide of the second complementarity domain, e.g., at least 15, 18, 20, 25, 30, 31, 35, 40, 45, 49, 50, or 53 nucleotides from the corresponding sequence of a naturally occurring S. pyogenes, S. thermophilus, S. aureus, or N. meningitidis gRNA, or a sequence that differs by no more than 1, 2, 3, 4, 5; 6, 7, 8, 9 or 10 nucleotides therefrom;
(iii) there are at least 16, 19, 21, 26, 31, 32, 36, 41, 46, 50, 51, or 54 nucleotides 3′ to the last nucleotide of the second complementarity domain that is complementary to its corresponding nucleotide of the first complementarity domain, e.g., at least 16, 19, 21, 26, 31, 32, 36, 41, 46, 50, 51, or 54 nucleotides from the corresponding sequence of a naturally occurring S. pyogenes, S. thermophilus, S. aureus, or N. meningitidis gRNA, or a sequence that differs by no more than 1, 2, 3, 4, 5; 6, 7, 8, 9 or 10 nucleotides therefrom;
(iv) the tail domain is at least 10, 15, 20, 25, 30, 35 or 40 nucleotides in length, e.g., it comprises at least 10, 15, 20, 25, 30, 35 or 40 nucleotides from a naturally occurring S. pyogenes, S. thermophilus, S. aureus, or N. meningitidis tail domain, or a sequence that differs by no more than 1, 2, 3, 4, 5; 6, 7, 8, 9 or 10 nucleotides therefrom; or
(v) the tail domain comprises 15, 20, 25, 30, 35, 40 nucleotides or all of the corresponding portions of a naturally occurring tail domain, e.g., a naturally occurring S. pyogenes, S. thermophilus, S. aureus, or N. meningitidis tail domain.

[1373] In an embodiment, the gRNA is configured such that it comprises properties: a and b(i).

[1374] In an embodiment, the gRNA is configured such that it comprises properties: a and b(ii).

[1375] In an embodiment, the gRNA is configured such that it comprises properties: a and b(iii).

[1376] In an embodiment, the gRNA is configured such that it comprises properties: a and b(iv).

[1377] In an embodiment, the gRNA is configured such that it comprises properties: a and b(v).

[1378] In an embodiment, the gRNA is configured such that it comprises properties: a and b(vi).

[1379] In an embodiment, the gRNA is configured such that it comprises properties: a and b(vii).

[1380] In an embodiment, the gRNA is configured such that it comprises properties: a and b(viii).

[1381] In an embodiment, the gRNA is configured such that it comprises properties: a and b(ix).

[1382] In an embodiment, the gRNA is configured such that it comprises properties: a and b(x).

[1383] In an embodiment, the gRNA is configured such that it comprises properties: a and b(xi).

[1384] In an embodiment, the gRNA is configured such that it comprises properties: a and c.

[1385] In an embodiment, the gRNA is configured such that in comprises properties: a, b, and c.

[1386] In an embodiment, the gRNA is configured such that in comprises properties: a(i), b(i), and c(i).

[1387] In an embodiment, the gRNA is configured such that in comprises properties: a(i), b(i), and c(ii).

[1388] In an embodiment, the gRNA is configured such that in comprises properties: a(i), b(ii), and c(i).

[1389] In an embodiment, the gRNA is configured such that in comprises properties: a(i), b(ii), and c(ii).

[1390] In an embodiment, the gRNA is configured such that in comprises properties: a(i), b(iii), and c(i).

[1391] In an embodiment, the gRNA is configured such that in comprises properties: a(i), b(iii), and c(ii).

[1392] In an embodiment, the gRNA is configured such that in comprises properties: a(i), b(iv), and c(i).

[1393] In an embodiment, the gRNA is configured such that in comprises properties: a(i), b(iv), and c(ii).

[1394] In an embodiment, the gRNA is configured such that in comprises properties: a(i), b(v), and c(i).

[1395] In an embodiment, the gRNA is configured such that in comprises properties: a(i), b(v), and c(ii).

[1396] In an embodiment, the gRNA is configured such that in comprises properties: a(i), b(vi), and c(i).

[1397] In an embodiment, the gRNA is configured such that in comprises properties: a(i), b(vi), and c(ii).

[1398] In an embodiment, the gRNA is configured such that in comprises properties: a(i), b(vii), and c(i).

[1399] In an embodiment, the gRNA is configured such that in comprises properties: a(i), b(vii), and c(ii).

[1400] In an embodiment, the gRNA is configured such that in comprises properties: a(i), b(viii), and c(i).

[1401] In an embodiment, the gRNA is configured such that in comprises properties: a(i), b(viii), and c(ii).

[1402] In an embodiment, the gRNA is configured such that in comprises properties: a(i), b(ix), and c(i).

[1403] In an embodiment, the gRNA is configured such that in comprises properties: a(i), b(ix), and c(ii).

[1404] In an embodiment, the gRNA is configured such that in comprises properties: a(i), b(x), and c(i).

[1405] In an embodiment, the gRNA is configured such that in comprises properties: a(i), b(x), and c(ii).

[1406] In an embodiment, the gRNA is configured such that in comprises properties: a(i), b(xi), and c(i).

[1407] In an embodiment, the gRNA is configured such that in comprises properties: a(i), b(xi), and c(ii).

[1408] In an embodiment, the gRNA, e.g., a chimeric gRNA, is configured such that it comprises one or more of the following properties;

[1409] a) one or both of the gRNAs can position, e.g., when targeting a Cas9 molecule that makes single strand breaks, a single strand break within (i) 50, 100, 150, 200, 250, 300, 350, 400, 450, or 500 nucleotides of a target position, or (ii) sufficiently close that the target position is within the region of end resection;

[1410] b) one or both have a targeting domain of at least 16 nucleotides, e.g., a targeting domain of (i) 16, (ii), 17, (iii) 18, (iv) 19, (v) 20, (vi) 21, (vii) 22, (viii) 23, (ix) 24, (x) 25, or (xi) 26 nucleotides; and

[1411] c)

(i) the proximal and tail domain, when taken together, comprise at least 15, 18, 20, 25, 30, 31, 35, 40, 45, 49, 50, or 53 nucleotides, e.g., at least 15, 18, 20, 25, 30, 31, 35, 40, 45, 49, 50, or 53 nucleotides from a naturally occurring S. pyogenes, S. thermophilus, S. aureus, or N. meningitidis tail and proximal domain, or a sequence that differs by no more than 1, 2, 3, 4, 5; 6, 7, 8, 9 or 10 nucleotides therefrom;
(ii) there are at least 15, 18, 20, 25, 30, 31, 35, 40, 45, 49, 50, or 53 nucleotides 3′ to the last nucleotide of the second complementarity domain, e.g., at least 15, 18, 20, 25, 30, 31, 35, 40, 45, 49, 50, or 53 nucleotides from the corresponding sequence of a naturally occurring S. pyogenes, S. thermophilus, S. aureus, or N. meningitidis gRNA, or a sequence that differs by no more than 1, 2, 3, 4, 5; 6, 7, 8, 9 or 10 nucleotides therefrom;
(iii) there are at least 16, 19, 21, 26, 31, 32, 36, 41, 46, 50, 51, or 54 nucleotides 3′ to the last nucleotide of the second complementarity domain that is complementary to its corresponding nucleotide of the first complementarity domain, e.g., at least 16, 19, 21, 26, 31, 32, 36, 41, 46, 50, 51, or 54 nucleotides from the corresponding sequence of a naturally occurring S. pyogenes, S. thermophilus, S. aureus, or N. meningitidis gRNA, or a sequence that differs by no more than 1, 2, 3, 4, 5; 6, 7, 8, 9 or 10 nucleotides therefrom;
(iv) the tail domain is at least 10, 15, 20, 25, 30, 35 or 40 nucleotides in length, e.g., it comprises at least 10, 15, 20, 25, 30, 35 or 40 nucleotides from a naturally occurring S. pyogenes, S. thermophilus, S. aureus, or N. meningitidis tail domain, or a sequence that differs by no more than 1, 2, 3, 4, 5; 6, 7, 8, 9 or 10 nucleotides therefrom; or
(v) the tail domain comprises 15, 20, 25, 30, 35, 40 nucleotides or all of the corresponding portions of a naturally occurring tail domain, e.g., a naturally occurring S. pyogenes, S. thermophilus, S. aureus, or N. meningitidis tail domain.

[1412] In an embodiment, the gRNA is configured such that it comprises properties: a and b(i).

[1413] In an embodiment, the gRNA is configured such that it comprises properties: a and b(ii).

[1414] In an embodiment, the gRNA is configured such that it comprises properties: a and b(iii).

[1415] In an embodiment, the gRNA is configured such that it comprises properties: a and b(iv).

[1416] In an embodiment, the gRNA is configured such that it comprises properties: a and b(v).

[1417] In an embodiment, the gRNA is configured such that it comprises properties: a and b(vi).

[1418] In an embodiment, the gRNA is configured such that it comprises properties: a and b(vii).

[1419] In an embodiment, the gRNA is configured such that it comprises properties: a and b(viii).

[1420] In an embodiment, the gRNA is configured such that it comprises properties: a and b(ix).

[1421] In an embodiment, the gRNA is configured such that it comprises properties: a and b(x).

[1422] In an embodiment, the gRNA is configured such that it comprises properties: a and b(xi).

[1423] In an embodiment, the gRNA is configured such that it comprises properties: a and c.

[1424] In an embodiment, the gRNA is configured such that in comprises properties: a, b, and c.

[1425] In an embodiment, the gRNA is configured such that in comprises properties: a(i), b(i), and c(i).

[1426] In an embodiment, the gRNA is configured such that in comprises properties: a(i), b(i), and c(ii).

[1427] In an embodiment, the gRNA is configured such that in comprises properties: a(i), b(ii), and c(i).

[1428] In an embodiment, the gRNA is configured such that in comprises properties: a(i), b(ii), and c(ii).

[1429] In an embodiment, the gRNA is configured such that in comprises properties: a(i), b(iii), and c(i).

[1430] In an embodiment, the gRNA is configured such that in comprises properties: a(i), b(iii), and c(ii).

[1431] In an embodiment, the gRNA is configured such that in comprises properties: a(i), b(iv), and c(i).

[1432] In an embodiment, the gRNA is configured such that in comprises properties: a(i), b(iv), and c(ii).

[1433] In an embodiment, the gRNA is configured such that in comprises properties: a(i), b(v), and c(i).

[1434] In an embodiment, the gRNA is configured such that in comprises properties: a(i), b(v), and c(ii).

[1435] In an embodiment, the gRNA is configured such that in comprises properties: a(i), b(vi), and c(i).

[1436] In an embodiment, the gRNA is configured such that in comprises properties: a(i), b(vi), and c(ii).

[1437] In an embodiment, the gRNA is configured such that in comprises properties: a(i), b(vii), and c(i).

[1438] In an embodiment, the gRNA is configured such that in comprises properties: a(i), b(vii), and c(ii).

[1439] In an embodiment, the gRNA is configured such that in comprises properties: a(i), b(viii), and c(i).

[1440] In an embodiment, the gRNA is configured such that in comprises properties: a(i), b(viii), and c(ii).

[1441] In an embodiment, the gRNA is configured such that in comprises properties: a(i), b(ix), and c(i).

[1442] In an embodiment, the gRNA is configured such that in comprises properties: a(i), b(ix), and c(ii).

[1443] In an embodiment, the gRNA is configured such that in comprises properties: a(i), b(x), and c(i).

[1444] In an embodiment, the gRNA is configured such that in comprises properties: a(i), b(x), and c(ii).

[1445] In an embodiment, the gRNA is configured such that in comprises properties: a(i), b(xi), and c(i).

[1446] In an embodiment, the gRNA is configured such that in comprises properties: a(i), b(xi), and c(ii).

[1447] In an embodiment, the gRNA is used with a Cas9 nickase molecule having HNH activity, e.g., a Cas9 molecule having the RuvC activity inactivated, e.g., a Cas9 molecule having a mutation at D10, e.g., the D10A mutation.

[1448] In an embodiment, the gRNA is used with a Cas9 nickase molecule having RuvC activity, e.g., a Cas9 molecule having the HNH activity inactivated, e.g., a Cas9 molecule having a mutation at H840, e.g., a H840A.

[1449] In an embodiment, a pair of gRNAs, e.g., a pair of chimeric gRNAs, comprising a first and a second gRNA, is configured such that they comprises one or more of the following properties;

[1450] a) one or both of the gRNAs can position, e.g., when targeting a Cas9 molecule that makes single strand breaks, a single strand break within (i) 50, 100, 150, 200, 250, 300, 350, 400, 450, or 500 nucleotides of a target position, or (ii) sufficiently close that the target position is within the region of end resection;

[1451] b) one or both have a targeting domain of at least 16 nucleotides, e.g., a targeting domain of (i) 16, (ii), 17, (iii) 18, (iv) 19, (v) 20, (vi) 21, (vii) 22, (viii) 23, (ix) 24, (x) 25, or (xi) 26 nucleotides;

[1452] c) for one or both:

(i) the proximal and tail domain, when taken together, comprise at least 15, 18, 20, 25, 30, 31, 35, 40, 45, 49, 50, or 53 nucleotides, e.g., at least 15, 18, 20, 25, 30, 31, 35, 40, 45, 49, 50, or 53 nucleotides from a naturally occurring S. pyogenes, S. thermophilus, S. aureus, or N. meningitidis tail and proximal domain, or a sequence that differs by no more than 1, 2, 3, 4, 5; 6, 7, 8, 9 or 10 nucleotides therefrom;
(ii) there are at least 15, 18, 20, 25, 30, 31, 35, 40, 45, 49, 50, or 53 nucleotides 3′ to the last nucleotide of the second complementarity domain, e.g., at least 15, 18, 20, 25, 30, 31, 35, 40, 45, 49, 50, or 53 nucleotides from the corresponding sequence of a naturally occurring S. pyogenes, S. thermophilus, S. aureus, or N. meningitidis gRNA, or a sequence that differs by no more than 1, 2, 3, 4, 5; 6, 7, 8, 9 or 10 nucleotides therefrom;
(iii) there are at least 16, 19, 21, 26, 31, 32, 36, 41, 46, 50, 51, or 54 nucleotides 3′ to the last nucleotide of the second complementarity domain that is complementary to its corresponding nucleotide of the first complementarity domain, e.g., at least 16, 19, 21, 26, 31, 32, 36, 41, 46, 50, 51, or 54 nucleotides from the corresponding sequence of a naturally occurring S. pyogenes, S. thermophilus, S. aureus, or N. meningitidis gRNA, or a sequence that differs by no more than 1, 2, 3, 4, 5; 6, 7, 8, 9 or 10 nucleotides therefrom;
(iv) the tail domain is at least 10, 15, 20, 25, 30, 35 or 40 nucleotides in length, e.g., it comprises at least 10, 15, 20, 25, 30, 35 or 40 nucleotides from a naturally occurring S. pyogenes, S. thermophilus, S. aureus, or N. meningitidis tail domain; or, or a sequence that differs by no more than 1, 2, 3, 4, 5; 6, 7, 8, 9 or 10 nucleotides therefrom; or
(v) the tail domain comprises 15, 20, 25, 30, 35, 40 nucleotides or all of the corresponding portions of a naturally occurring tail domain, e.g., a naturally occurring S. pyogenes, S. thermophilus, S. aureus, or N. meningitidis tail domain;

[1453] d) the gRNAs are configured such that, when hybridized to target nucleic acid, they are separated by 0-50, 0-100, 0-200, at least 10, at least 20, at least 30 or at least 50 nucleotides;

[1454] e) the breaks made by the first gRNA and second gRNA are on different strands; and

[1455] f) the PAMs are facing outwards.

[1456] In an embodiment, one or both of the gRNAs is configured such that it comprises properties: a and b(i).

[1457] In an embodiment, one or both of the gRNAs is configured such that it comprises properties: a and b(ii).

[1458] In an embodiment, one or both of the gRNAs is configured such that it comprises properties: a and b(iii).

[1459] In an embodiment, one or both of the gRNAs is configured such that it comprises properties: a and b(iv).

[1460] In an embodiment, one or both of the gRNAs is configured such that it comprises properties: a and b(v).

[1461] In an embodiment, one or both of the gRNAs is configured such that it comprises properties: a and b(vi).

[1462] In an embodiment, one or both of the gRNAs is configured such that it comprises properties: a and b(vii).

[1463] In an embodiment, one or both of the gRNAs is configured such that it comprises properties: a and b(viii).

[1464] In an embodiment, one or both of the gRNAs is configured such that it comprises properties: a and b(ix).

[1465] In an embodiment, one or both of the gRNAs is configured such that it comprises properties: a and b(x).

[1466] In an embodiment, one or both of the gRNAs is configured such that it comprises properties: a and b(xi).

[1467] In an embodiment, one or both of the gRNAs configured such that it comprises properties: a and C.

[1468] In an embodiment, one or both of the gRNAs is configured such that it comprises properties: a, b, and c.

[1469] In an embodiment, one or both of the gRNAs is configured such that it comprises properties: a(i), b(i), and c(i).

[1470] In an embodiment, one or both of the gRNAs is configured such that it comprises properties: a(i), b(i), and c(ii).

[1471] In an embodiment, one or both of the gRNAs is configured such that it comprises properties: a(i), b(i), c, and d.

[1472] In an embodiment, one or both of the gRNAs is configured such that it comprises properties: a(i), b(i), c, and e.

[1473] In an embodiment, one or both of the gRNAs is configured such that it comprises properties: a(i), b(i), c, d, and e.

[1474] In an embodiment, one or both of the gRNAs is configured such that it comprises properties: a(i), b(ii), and c(i).

[1475] In an embodiment, one or both of the gRNAs is configured such that it comprises properties: a(i), b(ii), and c(ii).

[1476] In an embodiment, one or both of the gRNAs is configured such that it comprises properties: a(i), b(ii), c, and d.

[1477] In an embodiment, one or both of the gRNAs is configured such that it comprises properties: a(i), b(ii), c, and e.

[1478] In an embodiment, one or both of the gRNAs is configured such that it comprises properties: a(i), b(ii), c, d, and e.

[1479] In an embodiment, one or both of the gRNAs is configured such that it comprises properties: a(i), b(iii), and c(i).

[1480] In an embodiment, one or both of the gRNAs is configured such that it comprises properties: a(i), b(iii), and c(ii).

[1481] In an embodiment, one or both of the gRNAs is configured such that it comprises properties: a(i), b(iii), c, and d.

[1482] In an embodiment, one or both of the gRNAs is configured such that it comprises properties: a(i), b(iii), c, and e.

[1483] In an embodiment, one or both of the gRNAs is configured such that it comprises properties: a(i), b(iii), c, d, and e.

[1484] In an embodiment, one or both of the gRNAs is configured such that it comprises properties: a(i), b(iv), and c(i).

[1485] In an embodiment, one or both of the gRNAs is configured such that it comprises properties: a(i), b(iv), and c(ii).

[1486] In an embodiment, one or both of the gRNAs is configured such that it comprises properties: a(i), b(iv), c, and d.

[1487] In an embodiment, one or both of the gRNAs is configured such that it comprises properties: a(i), b(iv), c, and e.

[1488] In an embodiment, one or both of the gRNAs is configured such that it comprises properties: a(i), b(iv), c, d, and e.

[1489] In an embodiment, one or both of the gRNAs is configured such that it comprises properties: a(i), b(v), and c(i).

[1490] In an embodiment, one or both of the gRNAs is configured such that it comprises properties: a(i), b(v), and c(ii).

[1491] In an embodiment, one or both of the gRNAs is configured such that it comprises properties: a(i), b(v), c, and d.

[1492] In an embodiment, one or both of the gRNAs is configured such that it comprises properties: a(i), b(v), c, and e.

[1493] In an embodiment, one or both of the gRNAs is configured such that it comprises properties: a(i), b(v), c, d, and e.

[1494] In an embodiment, one or both of the gRNAs is configured such that it comprises properties: a(i), b(vi), and c(i).

[1495] In an embodiment, one or both of the gRNAs is configured such that it comprises properties: a(i), b(vi), and c(ii).

[1496] In an embodiment, one or both of the gRNAs is configured such that it comprises properties: a(i), b(vi), c, and d.

[1497] In an embodiment, one or both of the gRNAs is configured such that it comprises properties: a(i), b(vi), c, and e.

[1498] In an embodiment, one or both of the gRNAs is configured such that it comprises properties: a(i), b(vi), c, d, and e.

[1499] In an embodiment, one or both of the gRNAs is configured such that it comprises properties: a(i), b(vii), and c(i).

[1500] In an embodiment, one or both of the gRNAs is configured such that it comprises properties: a(i), b(vii), and c(ii).

[1501] In an embodiment, one or both of the gRNAs is configured such that it comprises properties: a(i), b(vii), c, and d.

[1502] In an embodiment, one or both of the gRNAs is configured such that it comprises properties: a(i), b(vii), c, and e.

[1503] In an embodiment, one or both of the gRNAs is configured such that it comprises properties: a(i), b(vii), c, d, and e.

[1504] In an embodiment, one or both of the gRNAs is configured such that it comprises properties: a(i), b(viii), and c(i).

[1505] In an embodiment, one or both of the gRNAs is configured such that it comprises properties: a(i), b(viii), and c(ii).

[1506] In an embodiment, one or both of the gRNAs is configured such that it comprises properties: a(i), b(viii), c, and d.

[1507] In an embodiment, one or both of the gRNAs is configured such that it comprises properties: a(i), b(viii), c, and e.

[1508] In an embodiment, one or both of the gRNAs is configured such that it comprises properties: a(i), b(viii), c, d, and e.

[1509] In an embodiment, one or both of the gRNAs is configured such that it comprises properties: a(i), b(ix), and c(i).

[1510] In an embodiment, one or both of the gRNAs is configured such that it comprises properties: a(i), b(ix), and c(ii).

[1511] In an embodiment, one or both of the gRNAs is configured such that it comprises properties: a(i), b(ix), c, and d.

[1512] In an embodiment, one or both of the gRNAs is configured such that it comprises properties: a(i), b(ix), c, and e.

[1513] In an embodiment, one or both of the gRNAs is configured such that it comprises properties: a(i), b(ix), c, d, and e.

[1514] In an embodiment, one or both of the gRNAs is configured such that it comprises properties: a(i), b(x), and c(i).

[1515] In an embodiment, one or both of the gRNAs is configured such that it comprises properties: a(i), b(x), and c(ii).

[1516] In an embodiment, one or both of the gRNAs is configured such that it comprises properties: a(i), b(x), c, and d.

[1517] In an embodiment, one or both of the gRNAs is configured such that it comprises properties: a(i), b((x)), c, and e.

[1518] In an embodiment, one or both of the gRNAs is configured such that it comprises properties: a(i), b(x), c, d, and e.

[1519] In an embodiment, one or both of the gRNAs is configured such that it comprises properties: a(i), b(xi), and c(i).

[1520] In an embodiment, one or both of the gRNAs is configured such that it comprises properties: a(i), b(xi), and c(ii).

[1521] In an embodiment, one or both of the gRNAs is configured such that it comprises properties: a(i), b(xi), c, and d.

[1522] In an embodiment, one or both of the gRNAs is configured such that it comprises properties: a(i), b(xi), c, and e.

[1523] In an embodiment, one or both of the gRNAs is configured such that it comprises properties: a(i), b(xi), c, d, and e.

[1524] In an embodiment, the gRNAs are used with a Cas9 nickase molecule having HNH activity, e.g., a Cas9 molecule having the RuvC activity inactivated, e.g., a Cas9 molecule having a mutation at D10, e.g., the D10A mutation.

[1525] In an embodiment, the gRNAs are used with a Cas9 nickase molecule having RuvC activity, e.g., a Cas9 molecule having the HNH activity inactivated, e.g., a Cas9 molecule having a mutation at H840, e.g., a H840A. In an embodiment, the gRNAs are used with a Cas9 nickase molecule having RuvC activity, e.g., a Cas9 molecule having the HNH activity inactivated, e.g., a Cas9 molecule having a mutation at N863, e.g., N863A.

### VI. Target Cells

[1526] Cas9 molecules and gRNA molecules, e.g., a Cas9 molecule/gRNA molecule complex, can be used to manipulate a cell, e.g., to edit a target nucleic acid, in a wide variety of cells.

[1527] In an embodiment, a cell is manipulated by editing (e.g., inducing a mutation in) one or more target genes, e.g., as described herein. In some embodiments, the expression of one or more target genes (e.g., FAS, BID, CTLA4, PDCD1, CBLB, PTPN6, TRAC or TRBC gene) is modulated. In another embodiment, a cell is manipulated ex vivo by editing (e.g., inducing a mutation in) one or more target genes and/or modulating the expression of one or more target genes, e.g., FAS, BID, CTLA4, PDCD1, CBLB, PTPN6, TRAC or TRBC gene, and administered to a subject. Sources of target cells for ex vivo manipulation may include, e.g., the subject's blood, the subject's cord blood, or the subject's bone marrow. Sources of target cells for ex vivo manipulation may also include, e.g., heterologous donor blood, cord blood, or bone marrow.

[1528] The Cas9 and gRNA molecules described herein can be delivered to a target cell. In an embodiment, the target cell is a T cell, e.g., a CD8+ T cell (e.g., a CD8+ naïve T cell, central memory T cell, or effector memory T cell), a CD4+ T cell, a natural killer T cell (NKT cells), a regulatory T cell (Treg), a stem cell memory T cell, a lymphoid progenitor cell a hematopoietic stem cell, a natural killer cell (NK cell) or a dendritic cell. In an embodiment, the target cell is an induced pluripotent stem (iPS) cell or a cell derived from an iPS cell, e.g., an iPS cell generated from a subject, manipulated to alter (e.g., induce a mutation in) or manipulate the expression of one or more target genes, e.g., FAS, BID, CTLA4, PDCD1, CBLB, PTPN6, TRAC or TRBC gene, and differentiated into, e.g., a T cell, e.g., a CD8+ T cell (e.g., a CD8+ naïve T cell, central memory T cell, or effector memory T cell), a CD4+ T cell, a stem cell memory T cell, a lymphoid progenitor cell or a hematopoietic stem cell.

[1529] In an embodiment, the target cell has been altered to contain specific T cell receptor (TCR) genes (e.g., a TRAC and TRBC gene). In another embodiment, the TCR has binding specificity for a tumor associated antigen, e.g., carcinoembryonic antigen (CEA), GP100, melanoma antigen recognized by T cells 1 (MART1), melanoma antigen A3 (MAGEA3), NYESO1 or p53.

[1530] In an embodiment, the target cell has been altered to contain a specific chimeric antigen receptor (CAR). In an embodiment, the CAR has binding specificity for a tumor associated antigen, e.g., CD19, CD20, carbonic anhydrase IX (CAIX), CD171, CEA, ERBB2, GD2, alpha-folate receptor, Lewis Y antigen, prostate specific membrane antigen (PSMA) or tumor associated glycoprotein 72 (TAG72).

[1531] In another embodiment, the target cell has been altered to bind one or more of the following tumor antigens, e.g., by a TCR or a CAR. Tumor antigens may include, but are not limited to, AD034, AKT1, BRAP, CAGE, CDX2, CLP, CT-7, CT8/HOM-TES-85, cTAGE-1, Fibulin-1, HAGE, HCA587/MAGE-C2, hCAP-G, HCE661, HER2/neu, HLA-Cw, HOM-HD-21/Galectin9, HOM-MEEL-40/SSX2, HOM-RCC-3.1.3/CAXII, HOXA7, HOXB6, Hu, HUB1, KM-HN-3, KM-KN-1, KOC1, KOC2, KOC3, KOC3, LAGE-1, MAGE-1, MAGE-4a, MPP11, MSLN, NNP-1, NY-BR-1, NY-BR-62, NY-BR-85, NY-CO-37, NY-CO-38, NY-ESO-1, NY-ESO-5, NY-LU-12, NY-REN-10, NY-REN-19/LKB/STK11, NY-REN-21, NY-REN-26/BCR, NY-REN-3/NY-CO-38, NY-REN-33/SNC6, NY-REN-43, NY-REN-65, NY-REN-9, NY-SAR-35, OGFr, PLU-1, Rab38, RBPJkappa, RHAMM, SCP1, SCP-1, SSX3, SSX4, SSX5, TOP2A, TOP2B, or Tyrosinase.

### VII. Ex Vivo Delivery of Components to Target Cells

[1532] The components, e.g., a Cas9 molecule and gRNA molecule can be introduced into target cells in a variety of forms using a variety of delivery methods and formulations, see, e.g., Tables 700 and 800. When a Cas9 or gRNA component is encoded as DNA for delivery, the DNA may typically but not necessarily include a control region, e.g., comprising a promoter, to effect expression. Useful promoters for Cas9 molecule sequences include, e.g., CMV, EF-1a, EFS, MSCV, PGK, or CAG promoters. Useful promoters for gRNAs include, e.g., H1, EF-1a, tRNA or U6 promoters. Promoters with similar or dissimilar strengths can be selected to tune the expression of components. Sequences encoding a Cas9 molecule may comprise a nuclear localization signal (NLS), e.g., an SV40 NLS. In an embodiment a promoter for a Cas9 molecule or a gRNA molecule may be, independently, inducible, tissue specific, or cell specific.

[1533] Table 700 provides examples of the form in which the components can be delivered to a target cell.

TABLE 700

| Elements | | |
|---|---|---|
| Cas9 | gRNA | |
| Mole- | mole- | |
| cule(s) | cule(s) | Comments |
| DNA | DNA | In this embodiment, a Cas9 molecule, typically an |
| | | eaCas9 molecule, and a gRNA are transcribed from |
| | | DNA. In this embodiment, they are encoded on |
| | | separate molecules. |
| DNA | | In this embodiment, a Cas9 molecule, typically an |
| | | eaCas9 molecule, and a gRNA are transcribed from |
| | | DNA, here from a single molecule. |
| DNA | RNA | In this embodiment, a Cas9 molecule, typically an |
| | | eaCas9 molecule, is transcribed from DNA, and a |
| | | gRNA is provided as in vitro transcribed or |
| | | synthesized RNA |
| mRNA | RNA | In this embodiment, a Cas9 molecule, typically an |
| | | eaCas9 molecule, is translated from in vitro |
| | | transcribed mRNA, and a gRNA is provided as in |
| | | vitro transcribed or synthesized RNA. |
| mRNA | DNA | In this embodiment, a Cas9 molecule, typically an |
| | | eaCas9 molecule, is translated from in vitro |
| | | transcribed mRNA, and a gRNA is transcribed from |
| | | DNA. |
| Protein | DNA | In this embodiment, a Cas9 molecule, typically an |
| | | eaCas9 molecule, is provided as a protein, and a |
| | | gRNA is transcribed from DNA. |
| Protein | RNA | In this embodiment, an eaCas9 molecule is provided |
| | | as a protein, and a gRNA is provided as transcribed |
| | | or synthesized RNA. |

[1534] Table 800 summarizes various delivery methods for the components of a Cas system, e.g., the Cas9 molecule component and the gRNA molecule component, as described herein.

TABLE 800

| | | Delivery | | | |
|---|---|---|---|---|---|
| | | into Non- | | | Type of |
| | | Dividing | Duration of | Genome | Molecule |
| Delivery Vector/Mode | | Cells | Expression | Integration | Delivered |
| Physical (eg, electroporation, | | YES | Transient | NO | Nucleic |
| particle gun, Calcium Phosphate | | | | | Acids and |
| transfection, cell compression or | | | | | Proteins |
| squeezing) | | | | | |
| Viral | Retrovirus | NO | Stable | YES | RNA |
| | Lentivirus | YES | Stable | YES/NO with | RNA |
| | | | | modifications | |
| | Adenovirus | YES | Transient | NO | DNA |
| | Adeno- | YES | Stable | NO | DNA |
| | Associated | | | | |
| | Virus (AAV) | | | | |
| | Vaccinia Virus | YES | Very | NO | DNA |
| | | | Transient | | |
| | Herpes Simplex | YES | Stable | NO | DNA |
| | Virus | | | | |
| Non-Viral | Cationic | YES | Transient | Depends on | Nucleic |
| | Liposomes | | | what is | Acids and |
| | | | | delivered | Proteins |
| | Polymeric | YES | Transient | Depends on | Nucleic |
| | Nanoparticles | | | what is | Acids and |
| | | | | delivered | Proteins |
| Biological | Attenuated | YES | Transient | NO | Nucleic |
| Non-Viral | Bacteria | | | | Acids |
| Delivery | Engineered | YES | Transient | NO | Nucleic |
| Vehicles | Bacteriophages | | | | Acids |
| | Mammalian | YES | Transient | NO | Nucleic |
| | Virus-like | | | | Acids |
| | Particles | | | | |
| | Biological | YES | Transient | NO | Nucleic |
| | liposomes: | | | | Acids |
| | Erythrocyte | | | | |
| | Ghosts and | | | | |
| | Exosomes | | | | |

[1535] DNA-Based Delivery of a Cas9 Molecule and/or a gRNA Molecule

[1536] DNA encoding Cas9 molecules (e.g., eaCas9 molecules) and/or gRNA molecules, can be delivered into cells by art-known methods or as described herein. For example, Cas9-encoding and/or gRNA-encoding DNA can be delivered, e.g., by vectors (e.g., viral or non-viral vectors), non-vector based methods (e.g., using naked DNA or DNA complexes), or a combination thereof.

[1537] In some embodiments, the Cas9- and/or gRNA-encoding DNA is delivered by a vector (e.g., viral vector/virus or plasmid).

[1538] A vector may comprise a sequence that encodes a Cas9 molecule and/or a gRNA molecule. A vector may also comprise a sequence encoding a signal peptide (e.g., for nuclear localization, nucleolar localization, mitochondrial localization), fused, e.g., to a Cas9 molecule sequence. For example, a vector may comprise a nuclear localization sequence (e.g., from SV40) fused to the sequence encoding the Cas9 molecule.

[1539] One or more regulatory/control elements, e.g., a promoter, an enhancer, an intron, a polyadenylation signal, a Kozak consensus sequence, internal ribosome entry sites (IRES), a 2A sequence, and splice acceptor or donor can be included in the vectors. In an embodiment, the promoter is recognized by RNA polymerase II (e.g., a CMV promoter). In another embodiment, the promoter is recognized by RNA polymerase III (e.g., a U6 promoter). In another embodiment, the promoter is a regulated promoter (e.g., inducible promoter). In another embodiment, the promoter is a constitutive promoter. In another embodiment, the promoter is a tissue specific promoter. In another embodiment, the promoter is a viral promoter. In another embodiment, the promoter is a non-viral promoter.

[1540] In an embodiment, the vector or delivery vehicle is a viral vector (e.g., for generation of recombinant viruses). In an embodiment, the virus is a DNA virus (e.g., dsDNA or ssDNA virus). In an embodiment, the virus is an RNA virus (e.g., an ssRNA virus). Exemplary viral vectors/viruses include, e.g., retroviruses, lentiviruses, adenovirus, adeno-associated virus (AAV), vaccinia viruses, poxviruses, and herpes simplex viruses.

[1541] In an embodiment, the virus infects dividing cells. In another embodiment, the virus infects non-dividing cells. In another embodiment, the virus infects both dividing and non-dividing cells. In another embodiment, the virus can integrate into the host genome. In another embodiment, the virus is engineered to have reduced immunity, e.g., in human. In another embodiment, the virus is replication-competent. In another embodiment, the virus is replication-defective, e.g., having one or more coding regions for the genes necessary for additional rounds of virion replication and/or packaging replaced with other genes or deleted. In another embodiment, the virus causes transient expression of the Cas9 molecule and/or the gRNA molecule. In another embodiment, the virus causes long-lasting, e.g., at least 1 week, 2 weeks, 1 month, 2 months, 3 months, 6 months, 9 months, 1 year, 2 years, or permanent expression, of the Cas9 molecule and/or the gRNA molecule. The packaging capacity of the viruses may vary, e.g., from at least about 4 kb to at least about 30 kb, e.g., at least about 5 kb, 10 kb, 15 kb, 20 kb, 25 kb, 30 kb, 35 kb, 40 kb, 45 kb, or 50 kb.

[1542] In an embodiment, the Cas9- and/or gRNA-encoding DNA is delivered by a recombinant retrovirus. In another embodiment, the retrovirus (e.g., Moloney murine leukemia virus) comprises a reverse transcriptase, e.g., that allows integration into the host genome. In an embodiment, the retrovirus is replication-competent. In another embodiment, the retrovirus is replication-defective, e.g., having one of more coding regions for the genes necessary for additional rounds of virion replication and packaging replaced with other genes, or deleted.

[1543] In an embodiment, the Cas9- and/or gRNA-encoding DNA is delivered by a recombinant lentivirus. For example, the lentivirus is replication-defective, e.g., does not comprise one or more genes required for viral replication.

[1544] In an embodiment, the Cas9- and/or gRNA-encoding DNA is delivered by a recombinant adenovirus. In another embodiment, the adenovirus is engineered to have reduced immunity in humans.

[1545] In an embodiment, the Cas9- and/or gRNA-encoding DNA is delivered by a recombinant AAV. In an embodiment, the AAV can incorporate its genome into that of a host cell, e.g., a target cell as described herein. In another embodiment, the AAV is a self-complementary adeno-associated virus (scAAV), e.g., a scAAV that packages both strands which anneal together to form double stranded DNA. AAV serotypes that may be used in the disclosed methods, include AAV1, AAV2, modified AAV2 (e.g., modifications at Y444F, Y500F, Y730F and/or S662V), AAV3, modified AAV3 (e.g., modifications at Y705F, Y731F and/or T492V), AAV4, AAV5, AAV6, modified AAV6 (e.g., modifications at S663V and/or T492V), AAV8, AAV 8.2, AAV9, AAV rh 10, and pseudotyped AAV, such as AAV2/8, AAV2/5 and AAV2/6 can also be used in the disclosed methods.

[1546] In an embodiment, the Cas9- and/or gRNA-encoding DNA is delivered by a hybrid virus, e.g., a hybrid of one or more of the viruses described herein.

[1547] A packaging cell is used to form a virus particle that is capable of infecting a target cell. Such a cell includes a 293 cell, which can package adenovirus, and a ψ2 cell or a PA317 cell, which can package retrovirus. A viral vector used in gene therapy is usually generated by a producer cell line that packages a nucleic acid vector into a viral particle. The vector typically contains the minimal viral sequences required for packaging and subsequent integration into a host or target cell (if applicable), with other viral sequences being replaced by an expression cassette encoding the protein to be expressed, eg. Cas9. For example, an AAV vector used in gene therapy typically only possesses inverted terminal repeat (ITR) sequences from the AAV genome which are required for packaging and gene expression in the host or target cell. The missing viral functions are supplied in trans by the packaging cell line. Henceforth, the viral DNA is packaged in a cell line, which contains a helper plasmid encoding the other AAV genes, namely rep and cap, but lacking ITR sequences. The cell line is also infected with adenovirus as a helper. The helper virus promotes replication of the AAV vector and expression of AAV genes from the helper plasmid. The helper plasmid is not packaged in significant amounts due to a lack of ITR sequences. Contamination with adenovirus can be reduced by, e.g., heat treatment to which adenovirus is more sensitive than AAV.

[1548] In an embodiment, the viral vector has the ability of cell type recognition. For example, the viral vector can be pseudotyped with a different/alternative viral envelope glycoprotein; engineered with a cell type-specific receptor (e.g., genetic modification of the viral envelope glycoproteins to incorporate targeting ligands such as a peptide ligand, a single chain antibody, a growth factor); and/or engineered to have a molecular bridge with dual specificities with one end recognizing a viral glycoprotein and the other end recognizing a moiety of the target cell surface (e.g., ligand-receptor, monoclonal antibody, avidin-biotin and chemical conjugation).

[1549] In an embodiment, the viral vector achieves cell type specific expression. For example, a tissue-specific promoter can be constructed to restrict expression of the transgene (Cas 9 and gRNA) in only a specific target cell. The specificity of the vector can also be mediated by microRNA-dependent control of transgene expression. In an embodiment, the viral vector has increased efficiency of fusion of the viral vector and a target cell membrane. For example, a fusion protein such as fusion-competent hemagglutinin (HA) can be incorporated to increase viral uptake into cells. In an embodiment, the viral vector has the ability of nuclear localization. For example, a virus that requires the breakdown of the nuclear membrane (during cell division) and therefore will not infect a non-diving cell can be altered to incorporate a nuclear localization peptide in the matrix protein of the virus thereby enabling the transduction of non-proliferating cells.

[1550] In an embodiment, the Cas9- and/or gRNA-encoding DNA is delivered by a non-vector based method (e.g., using naked DNA or DNA complexes). For example, the DNA can be delivered, e.g., by organically modified silica or silicate (Ormosil), electroporation, transient cell compression or squeezing (eg, as described in Lee, et al [2012] Nano Lett 12: 6322-27), gene gun, sonoporation, magnetofection, lipid-mediated transfection, dendrimers, inorganic nanoparticles, calcium phosphates, or a combination thereof.

[1551] In an embodiment, delivery via electroporation comprises mixing the cells with the Cas9- and/or gRNA-encoding DNA in a cartridge, chamber or cuvette and applying one or more electrical impulses of defined duration and amplitude. In an embodiment, delivery via electroporation is performed using a system in which cells are mixed with the Cas9- and/or gRNA-encoding DNA in a vessel connected to a device (eg, a pump) which feeds the mixture into a cartridge, chamber or cuvette wherein one or more electrical impulses of defined duration and amplitude are applied, after which the cells are delivered to a second vessel.

[1552] In an embodiment, the Cas9- and/or gRNA-encoding DNA is delivered by a combination of a vector and a non-vector based method. For example, a virosome comprises a liposome combined with an inactivated virus (e.g., HIV or influenza virus), which can result in more efficient gene transfer than either a viral or a liposomal method alone.

[1553] In an embodiment, the delivery vehicle is a non-viral vector. In an embodiment, the non-viral vector is an inorganic nanoparticle. Exemplary inorganic nanoparticles include, e.g., magnetic nanoparticles (e.g., Fe₃MnO₂) and silica. The outer surface of the nanoparticle can be conjugated with a positively charged polymer (e.g., polyethylenimine, polylysine, polyserine) which allows for attachment (e.g., conjugation or entrapment) of payload. In an embodiment, the non-viral vector is an organic nanoparticle. Exemplary organic nanoparticles include, e.g., SNALP liposomes that contain cationic lipids together with neutral helper lipids which are coated with polyethylene glycol (PEG), and protamine-nucleic acid complexes coated with lipid.

[1554] Exemplary lipids for gene transfer are shown below in Table 900.

TABLE 900
Lipids Used for Gene Transfer

| Lipid | Abbreviation | Feature |
|---|---|---|
| 1,2-Dioleoyl-sn-glycero-3-phosphatidylcholine | DOPC | Helper |
| 1,2-Dioleoyl-sn-glycero-3-phosphatidyl- | DOPE | Helper |
| ethanolamine | | |
| Cholesterol | | Helper |
| N-[1-(2,3-Dioleyloxy)prophyl]N,N,N- | DOTMA | Cationic |
| trimethylammonium chloride | | |
| 1,2-Dioleoyloxy-3-trimethylammonium-propane | DOTAP | Cationic |
| Dioctadecylamidoglycylspermine | DOGS | Cationic |
| N-(3-Aminopropyl)-N,N-dimethyl-2,3- | GAP- | Cationic |
| bis(dodecyloxy)-1-propanaminium bromide | DLRIE | |
| Cetyltrimethylammonium bromide | CTAB | Cationic |
| 6-Lauroxyhexyl ornithinate | LHON | Cationic |
| 1-(2,3-Dioleoyloxypropyl)-2,4,6- | 2Oc | Cationic |
| trimethylpyridinium | | |
| 2,3-Dioleyloxy-N-[2(spermine-carboxamido- | DOSPA | Cationic |
| ethyl]-N,N-dimethyl-1-propanaminium | | |
| trifluoroacetate | | |
| 1,2-Dioleyl-3-trimethylammonium-propane | DOPA | Cationic |
| N-(2-Hydroxyethyl)-N,N-dimethyl-2,3- | MDRIE | Cationic |
| bis(tetradecyloxy)-1-propanaminium | | |
| bromide | | |
| Dimyristooxypropyl dimethyl hydroxyethyl | DMRI | Cationic |
| ammonium bromide | | |
| 3β-[N-(N′,N′-Dimethyl-aminoethane)- | DC-Chol | Cationic |
| carbamoyl]cholesterol | | |
| Bis-guanidium-tren-cholesterol | BGTC | Cationic |
| 1,3-Diodeoxy-2-(6-carboxy-spermyl)- | DOSPER | Cationic |
| propylamide | | |
| Dimethyloctadecylammonium bromide | DDAB | Cationic |
| Dioctadecylamidoglicylspermidin | DSL | Cationic |
| rac-[(2,3-Dioctadecyloxypropyl)(2- | CLIP-1 | Cationic |
| hydroxyethyl)]-dimethylammonium chloride | | |
| rac-[2(2,3-Dihexadecyloxypropyl- | CLIP-6 | Cationic |
| oxymethyloxy)ethyl]trimethyl- | | |
| ammonium bromide | | |
| Ethyldimyristoylphosphatidylcholine | EDMPC | Cationic |
| 1,2-Distearyloxy-N,N-dimethyl-3-aminopropane | DSDMA | Cationic |
| 1,2-Dimyristoyl-trimethyl-ammonium propane | DMTAP | Cationic |
| O,O′-Dimyristyl-N-lysyl aspartate | DMKE | Cationic |
| 1,2-Distearoyl-sn-glycero-3-ethylphosphocholine | DSEPC | Cationic |
| N-Palmitoyl D-erythro-sphingosyl carbamoyl- | CCS | Cationic |
| spermine | | |
| N-t-Butyl-N0-tetradecyl-3- | diC14- | Cationic |
| tetradecylaminopropionamidine | amidine | |
| Octadecenolyoxy[ethyl-2-heptadecenyl-3 | DOTIM | Cationic |
| hydroxyethyl] imidazolinium chloride | | |
| N1-Cholesteryloxycarbonyl-3,7-diazanonane- | CDAN | Cationic |
| 1,9-diamine | | |
| 2-(3-[Bis(3-amino-propyl)-amino]propyl- | RPR209120 | Cationic |
| amino)-N-ditetradecylcarbamoylme-ethyl- | | |
| acetamide | | |
| 1,2-dilinoleyloxy-3-dimethylaminopropane | DLinDMA | Cationic |
| 2,2-dilinoleyl-4-dimethyl-aminoethyl- | DLin- | Cationic |
| [1,3]-dioxolane | KC2-DMA | |
| dilinoleyl-methyl-4-dimethylaminobutyrate | DLin- | Cationic |
| | MC3-DMA | |

[1555] Exemplary polymers for gene transfer are shown below in Table 1000.

TABLE 1000
Polymers Used for Gene Transfer

| Polymer | Abbreviation |
|---|---|
| Poly(ethylene)glycol | PEG |
| Polyethylenimine | PEI |
| Dithiobis(succinimidylpropionate) | DSP |
| Dimethyl-3,3′-dithiobispropionimidate | DTBP |
| Poly(ethylene imine) biscarbamate | PEIC |
| Poly(L-lysine) | PLL |
| Histidine modified PLL | |
| Poly(N-vinylpyrrolidone) | PVP |
| Poly(propylenimine) | PPI |
| Poly(amidoamine) | PAMAM |
| Poly(amido ethylenimine) | SS-PAEI |
| Triethylenetetramine | TETA |
| Poly(β-aminoester) | |
| Poly(4-hydroxy-L-proline ester) | PHP |
| Poly(allylamine) | |
| Poly(α-[4-aminobutyl]-L-glycolic acid) | PAGA |
| Poly(D,L-lactic-co-glycolic acid) | PLGA |
| Poly(N-ethyl-4-vinylpyridinium bromide) | |
| Poly(phosphazene)s | PPZ |
| Poly(phosphoester)s | PPE |
| Poly(phosphoramidate)s | PPA |
| Poly(N-2-hydroxypropylmethacrylamide) | pHPMA |
| Poly (2-(dimethylamino)ethyl methacrylate) | pDMAEMA |
| Poly(2-aminoethyl propylene phosphate) | PPE-EA |
| Chitosan | |
| Galactosylated chitosan | |
| N-Dodacylated chitosan | |
| Histone | |
| Collagen | |
| Dextran-spermine | D-SPM |

[1556] In an embodiment, the vehicle has targeting modifications to increase target cell update of nanoparticles and liposomes, e.g., cell specific antigens, monoclonal antibodies, single chain antibodies, aptamers, polymers, sugars, and cell penetrating peptides. In an embodiment, the vehicle uses fusogenic and endosome-destabilizing peptides/polymers. In an embodiment, the vehicle undergoes acid-triggered conformational changes (e.g., to accelerate endosomal escape of the cargo). In an embodiment, a stimulus-cleavable polymer is used, e.g., for release in a cellular compartment. For example, disulfide-based cationic polymers that are cleaved in the reducing cellular environment can be used.

[1557] In an embodiment, the delivery vehicle is a biological non-viral delivery vehicle. In an embodiment, the vehicle is an attenuated bacterium (e.g., naturally or artificially engineered to be invasive but attenuated to prevent pathogenesis and expressing the transgene (e.g., Listeria monocytogenes, certain Salmonella strains, Bifidobacterium longum, and modified Escherichia coli), bacteria having nutritional and tissue-specific tropism to target specific cells, bacteria having modified surface proteins to alter target cell specificity). In an embodiment, the vehicle is a genetically modified bacteriophage (e.g., engineered phages having large packaging capacity, less immunogenicity, containing mammalian plasmid maintenance sequences and having incorporated targeting ligands). In an embodiment, the vehicle is a mammalian virus-like particle. For example, modified viral particles can be generated (e.g., by purification of the “empty” particles followed by ex vivo assembly of the virus with the desired cargo). The vehicle can also be engineered to incorporate targeting ligands to alter target tissue specificity. In an embodiment, the vehicle is a biological liposome. For example, the biological liposome is a phospholipid-based particle derived from human cells (e.g., erythrocyte ghosts, which are red blood cells broken down into spherical structures derived from the subject (e.g., tissue targeting can be achieved by attachment of various tissue or cell-specific ligands), or secretory exosomes—subject-derived membrane-bound nanovescicles (30-100 nm) of endocytic origin (e.g., can be produced from various cell types and can therefore be taken up by cells without the need for targeting ligands).

[1558] In an embodiment, one or more nucleic acid molecules (e.g., DNA molecules) other than the components of a Cas system, e.g., the Cas9 molecule component and/or the gRNA molecule component described herein, are delivered. In an embodiment, the nucleic acid molecule is delivered at the same time as one or more of the components of the Cas system. In an embodiment, the nucleic acid molecule is delivered before or after (e.g., less than about 30 minutes, 1 hour, 2 hours, 3 hours, 6 hours, 9 hours, 12 hours, 1 day, 2 days, 3 days, 1 week, 2 weeks, or 4 weeks) one or more of the components of the Cas system are delivered. In an embodiment, the nucleic acid molecule is delivered by a different means from one or more of the components of the Cas system, e.g., the Cas9 molecule component and/or the gRNA molecule component. The nucleic acid molecule can be delivered by any of the delivery methods described herein. For example, the nucleic acid molecule can be delivered by a viral vector, e.g., a retrovirus or a lentivirus, and the Cas9 molecule component and/or the gRNA molecule component can be delivered by electroporation. In an embodiment, the nucleic acid molecule encodes a TRAC gene, a TRBC gene or a CAR gene.

[1559] Delivery of RNA Encoding a Cas9 Molecule

[1560] RNA encoding Cas9 molecules (e.g., eaCas9 molecules, eiCas9 molecules or eiCas9 fusion proteins) and/or gRNA molecules, can be delivered into cells, e.g., target cells described herein, by art-known methods or as described herein. For example, Cas9-encoding and/or gRNA-encoding RNA can be delivered, e.g., by microinjection, electroporation, transient cell compression or squeezing (eg, as described in Lee, et al [2012] Nano Lett 12: 6322-27), lipid-mediated transfection, peptide-mediated delivery, or a combination thereof.

[1561] In an embodiment, delivery via electroporation comprises mixing the cells with the RNA encoding Cas9 molecules (e.g., eaCas9 molecules, eiCas9 molecules or eiCas9 fusion proteins) and/or gRNA molecules in a cartridge, chamber or cuvette and applying one or more electrical impulses of defined duration and amplitude. In an embodiment, delivery via electroporation is performed using a system in which cells are mixed with the RNA encoding Cas9 molecules (e.g., eaCas9 molecules, eiCas9 molecules or eiCas9 fusion proteins) and/or gRNA molecules in a vessel connected to a device (eg, a pump) which feeds the mixture into a cartridge, chamber or cuvette wherein one or more electrical impulses of defined duration and amplitude are applied, after which the cells are delivered to a second vessel.

[1562] Delivery of Cas9 Molecule Protein

[1563] Cas9 molecules (e.g., eaCas9 molecules, eiCas9 molecules or eiCas9 fusion proteins) can be delivered into cells by art-known methods or as described herein. For example, Cas9 protein molecules can be delivered, e.g., by microinjection, electroporation, transient cell compression or squeezing (eg, as described in Lee, et al [2012] Nano Lett 12: 6322-27), lipid-mediated transfection, peptide-mediated delivery, or a combination thereof. Delivery can be accompanied by DNA encoding a gRNA or by a gRNA.

[1564] In an embodiment, delivery via electroporation comprises mixing the cells with the Cas9 molecules (e.g., eaCas9 molecules, eiCas9 molecules or eiCas9 fusion proteins) with or without gRNA molecules in a cartridge, chamber or cuvette and applying one or more electrical impulses of defined duration and amplitude. In an embodiment, delivery via electroporation is performed using a system in which cells are mixed with the Cas9 molecules (e.g., eaCas9 molecules, eiCas9 molecules or eiCas9 fusion proteins) with or without gRNA molecules in a vessel connected to a device (e.g., a pump) which feeds the mixture into a cartridge, chamber or cuvette wherein one or more electrical impulses of defined duration and amplitude are applied, after which the cells are delivered to a second vessel.

### VIII. Modified Nucleosides, Nucleotides, and Nucleic Acids

[1565] Modified nucleosides and modified nucleotides can be present in nucleic acids, e.g., particularly gRNA, but also other forms of RNA, e.g., mRNA, RNAi, or siRNA. As described herein, “nucleoside” is defined as a compound containing a five-carbon sugar molecule (a pentose or ribose) or derivative thereof, and an organic base, purine or pyrimidine, or a derivative thereof. As described herein, “nucleotide” is defined as a nucleoside further comprising a phosphate group.

[1566] Modified nucleosides and nucleotides can include one or more of:

[1567] (i) alteration, e.g., replacement, of one or both of the non-linking phosphate oxygens and/or of one or more of the linking phosphate oxygens in the phosphodiester backbone linkage;

[1568] (ii) alteration, e.g., replacement, of a constituent of the ribose sugar, e.g., of the 2′ hydroxyl on the ribose sugar;

[1569] (iii) wholesale replacement of the phosphate moiety with “dephospho” linkers;

[1570] (iv) modification or replacement of a naturally occurring nucleobase;

[1571] (v) replacement or modification of the ribose-phosphate backbone;

[1572] (vi) modification of the 3′ end or 5′ end of the oligonucleotide, e.g., removal, modification or replacement of a terminal phosphate group or conjugation of a moiety; and

[1573] (vii) modification of the sugar.

[1574] The modifications listed above can be combined to provide modified nucleosides and nucleotides that can have two, three, four, or more modifications. For example, a modified nucleoside or nucleotide can have a modified sugar and a modified nucleobase. In an embodiment, every base of a gRNA is modified, e.g., all bases have a modified phosphate group, e.g., all are phosphorothioate groups. In an embodiment, all, or substantially all, of the phosphate groups of a unimolecular or modular gRNA molecule are replaced with phosphorothioate groups.

[1575] In an embodiment, modified nucleotides, e.g., nucleotides having modifications as described herein, can be incorporated into a nucleic acid, e.g., a “modified nucleic acid.” In some embodiments, the modified nucleic acids comprise one, two, three or more modified nucleotides. In some embodiments, at least 5% (e.g., at least about 5%, at least about 10%, at least about 15%, at least about 20%, at least about 25%, at least about 30%, at least about 35%, at least about 40%, at least about 45%, at least about 50%, at least about 55%, at least about 60%, at least about 65%, at least about 70%, at least about 75%, at least about 80%, at least about 85%, at least about 90%, at least about 95%, or about 100%) of the positions in a modified nucleic acid are a modified nucleotides.

[1576] Unmodified nucleic acids can be prone to degradation by, e.g., cellular nucleases. For example, nucleases can hydrolyze nucleic acid phosphodiester bonds. Accordingly, in one aspect the modified nucleic acids described herein can contain one or more modified nucleosides or nucleotides, e.g., to introduce stability toward nucleases.

[1577] In some embodiments, the modified nucleosides, modified nucleotides, and modified nucleic acids described herein can exhibit a reduced innate immune response when introduced into a population of cells. The term “innate immune response” includes a cellular response to exogenous nucleic acids, including single stranded nucleic acids, generally of viral or bacterial origin, which involves the induction of cytokine expression and release, particularly the interferons, and cell death. In some embodiments, the modified nucleosides, modified nucleotides, and modified nucleic acids described herein can disrupt binding of a major groove interacting partner with the nucleic acid. In some embodiments, the modified nucleosides, modified nucleotides, and modified nucleic acids described herein can exhibit a reduced innate immune response when introduced into a population of cells and also disrupt binding of a major groove interacting partner with the nucleic acid.

[1578] Definitions of Chemical Groups

[1579] As used herein, “alkyl” is meant to refer to a saturated hydrocarbon group which is straight-chained or branched. Example alkyl groups include methyl (Me), ethyl (Et), propyl (e.g., n-propyl and isopropyl), butyl (e.g., n-butyl, isobutyl, t-butyl), pentyl (e.g., n-pentyl, isopentyl, neopentyl), and the like. An alkyl group can contain from 1 to about 20, from 2 to about 20, from 1 to about 12, from 1 to about 8, from 1 to about 6, from 1 to about 4, or from 1 to about 3 carbon atoms.

[1580] As used herein, “aryl” refers to monocyclic or polycyclic (e.g., having 2, 3 or 4 fused rings) aromatic hydrocarbons such as, for example, phenyl, naphthyl, anthracenyl, phenanthrenyl, indanyl, indenyl, and the like. In some embodiments, aryl groups have from 6 to about 20 carbon atoms.

[1581] As used herein, “alkenyl” refers to an aliphatic group containing at least one double bond.

[1582] As used herein, “alkynyl” refers to a straight or branched hydrocarbon chain containing 2-12 carbon atoms and characterized in having one or more triple bonds. Examples of alkynyl groups include, but are not limited to, ethynyl, propargyl, and 3-hexynyl.

[1583] As used herein, “arylalkyl” or “aralkyl” refers to an alkyl moiety in which an alkyl hydrogen atom is replaced by an aryl group. Aralkyl includes groups in which more than one hydrogen atom has been replaced by an aryl group. Examples of“arylalkyl” or “aralkyl” include benzyl, 2-phenylethyl, 3-phenylpropyl, 9-fluorenyl, benzhydryl, and trityl groups.

[1584] As used herein, “cycloalkyl” refers to a cyclic, bicyclic, tricyclic, or polycyclic non-aromatic hydrocarbon groups having 3 to 12 carbons. Examples of cycloalkyl moieties include, but are not limited to, cyclopropyl, cyclopentyl, and cyclohexyl.

[1585] As used herein, “heterocyclyl” refers to a monovalent radical of a heterocyclic ring system. Representative heterocyclyls include, without limitation, tetrahydrofuranyl, tetrahydrothienyl, pyrrolidinyl, pyrrolidonyl, piperidinyl, pyrrolinyl, piperazinyl, dioxanyl, dioxolanyl, diazepinyl, oxazepinyl, thiazepinyl, and morpholinyl.

[1586] As used herein, “heteroaryl” refers to a monovalent radical of a heteroaromatic ring system. Examples of heteroaryl moieties include, but are not limited to, imidazolyl, oxazolyl, thiazolyl, triazolyl, pyrrolyl, furanyl, indolyl, thiophenyl pyrazolyl, pyridinyl, pyrazinyl, pyridazinyl, pyrimidinyl, indolizinyl, purinyl, naphthyridinyl, quinolyl, and pteridinyl.

[1587] Phosphate Backbone Modifications

[1588] The Phosphate Group

[1589] In some embodiments, the phosphate group of a modified nucleotide can be modified by replacing one or more of the oxygens with a different substituent. Further, the modified nucleotide, e.g., modified nucleotide present in a modified nucleic acid, can include the wholesale replacement of an unmodified phosphate moiety with a modified phosphate as described herein. In some embodiments, the modification of the phosphate backbone can include alterations that result in either an uncharged linker or a charged linker with unsymmetrical charge distribution.

[1590] Examples of modified phosphate groups include, phosphorothioate, phosphoroselenates, borano phosphates, borano phosphate esters, hydrogen phosphonates, phosphoroamidates, alkyl or aryl phosphonates and phosphotriesters. In some embodiments, one of the non-bridging phosphate oxygen atoms in the phosphate backbone moiety can be replaced by any of the following groups: sulfur (S), selenium (Se), BR₃ (wherein R can be, e.g., hydrogen, alkyl, or aryl), C (e.g., an alkyl group, an aryl group, and the like), H, NR₂ (wherein R can be, e.g., hydrogen, alkyl, or aryl), or OR (wherein R can be, e.g., alkyl or aryl). The phosphorous atom in an unmodified phosphate group is achiral. However, replacement of one of the non-bridging oxygens with one of the above atoms or groups of atoms can render the phosphorous atom chiral; that is to say that a phosphorous atom in a phosphate group modified in this way is a stereogenic center. The stereogenic phosphorous atom can possess either the “R” configuration (herein Rp) or the “S” configuration (herein Sp).

[1591] Phosphorodithioates have both non-bridging oxygens replaced by sulfur. The phosphorus center in the phosphorodithioates is achiral which precludes the formation of oligoribonucleotide diastereomers. In some embodiments, modifications to one or both non-bridging oxygens can also include the replacement of the non-bridging oxygens with a group independently selected from S, Se, B, C, H, N, and OR (R can be, e.g., alkyl or aryl).

[1592] The phosphate linker can also be modified by replacement of a bridging oxygen, (i.e., the oxygen that links the phosphate to the nucleoside), with nitrogen (bridged phosphoroamidates), sulfur (bridged phosphorothioates) and carbon (bridged methylenephosphonates). The replacement can occur at either linking oxygen or at both of the linking oxygens.

[1593] Replacement of the Phosphate Group

[1594] The phosphate group can be replaced by non-phosphorus containing connectors. In some embodiments, the charge phosphate group can be replaced by a neutral moiety.

[1595] Examples of moieties which can replace the phosphate group can include, without limitation, e.g., methyl phosphonate, hydroxylamino, siloxane, carbonate, carboxymethyl, carbamate, amide, thioether, ethylene oxide linker, sulfonate, sulfonamide, thioformacetal, formacetal, oxime, methyleneimino, methylenemethylimino, methylenehydrazo, methylenedimethylhydrazo and methyleneoxymethylimino.

[1596] Replacement of the Ribophosphate Backbone

[1597] Scaffolds that can mimic nucleic acids can also be constructed wherein the phosphate linker and ribose sugar are replaced by nuclease resistant nucleoside or nucleotide surrogates. In some embodiments, the nucleobases can be tethered by a surrogate backbone. Examples can include, without limitation, the morpholino, cyclobutyl, pyrrolidine and peptide nucleic acid (PNA) nucleoside surrogates.

[1598] Sugar Modifications

[1599] The modified nucleosides and modified nucleotides can include one or more modifications to the sugar group. For example, the 2′ hydroxyl group (OH) can be modified or replaced with a number of different “oxy” or “deoxy” substituents. In some embodiments, modifications to the 2′ hydroxyl group can enhance the stability of the nucleic acid since the hydroxyl can no longer be deprotonated to form a 2′-alkoxide ion. The 2′-alkoxide can catalyze degradation by intramolecular nucleophilic attack on the linker phosphorus atom.

[1600] Examples of “oxy”-2′ hydroxyl group modifications can include alkoxy or aryloxy (OR, wherein “R” can be, e.g., alkyl, cycloalkyl, aryl, aralkyl, heteroaryl or a sugar); polyethyleneglycols (PEG), O(CH₂CH₂O)ₙCH₂CH₂OR wherein R can be, e.g., H or optionally substituted alkyl, and n can be an integer from 0 to 20 (e.g., from 0 to 4, from 0 to 8, from 0 to 10, from 0 to 16, from 1 to 4, from 1 to 8, from 1 to 10, from 1 to 16, from 1 to 20, from 2 to 4, from 2 to 8, from 2 to 10, from 2 to 16, from 2 to 20, from 4 to 8, from 4 to 10, from 4 to 16, and from 4 to 20). In some embodiments, the “oxy”-2′ hydroxyl group modification can include “locked” nucleic acids (LNA) in which the 2′ hydroxyl can be connected, e.g., by a C₁₋₆ alkylene or C₁₋₆ heteroalkylene bridge, to the 4′ carbon of the same ribose sugar, where exemplary bridges can include methylene, propylene, ether, or amino bridges; O-amino (wherein amino can be, e.g., NH₂; alkylamino, dialkylamino, heterocyclyl, arylamino, diarylamino, heteroarylamino, or diheteroarylamino, ethylenediamine, or polyamino) and aminoalkoxy, O(CH₂)ₙ-amino, (wherein amino can be, e.g., NH₂; alkylamino, dialkylamino, heterocyclyl, arylamino, diarylamino, heteroarylamino, or diheteroarylamino, ethylenediamine, or polyamino). In some embodiments, the “oxy”-2′ hydroxyl group modification can include the methoxyethyl group (MOE), (OCH₂CH₂OCH₃, e.g., a PEG derivative).

[1601] “Deoxy” modifications can include hydrogen (i.e. deoxyribose sugars, e.g., at the overhang portions of partially ds RNA); halo (e.g., bromo, chloro, fluoro, or iodo); amino (wherein amino can be, e.g., NH₂; alkylamino, dialkylamino, heterocyclyl, arylamino, diarylamino, heteroarylamino, diheteroarylamino, or amino acid); NH(CH₂CH₂NH)CH₂CH₂-amino (wherein amino can be, e.g., as described herein), —NHC(O)R (wherein R can be, e.g., alkyl, cycloalkyl, aryl, aralkyl, heteroaryl or sugar), cyano; mercapto; alkyl-thio-alkyl; thioalkoxy; and alkyl, cycloalkyl, aryl, alkenyl and alkynyl, which may be optionally substituted with e.g., an amino as described herein.

[1602] The sugar group can also contain one or more carbons that possess the opposite stereochemical configuration than that of the corresponding carbon in ribose. Thus, a modified nucleic acid can include nucleotides containing e.g., arabinose, as the sugar. The nucleotide “monomer” can have an alpha linkage at the 1′ position on the sugar, e.g., alpha-nucleosides. The modified nucleic acids can also include “abasic” sugars, which lack a nucleobase at C-1′. These abasic sugars can also be further modified at one or more of the constituent sugar atoms. The modified nucleic acids can also include one or more sugars that are in the L form, e.g. L-nucleosides.

[1603] Generally, RNA includes the sugar group ribose, which is a 5-membered ring having an oxygen. Exemplary modified nucleosides and modified nucleotides can include, without limitation, replacement of the oxygen in ribose (e.g., with sulfur (S), selenium (Se), or alkylene, such as, e.g., methylene or ethylene); addition of a double bond (e.g., to replace ribose with cyclopentenyl or cyclohexenyl); ring contraction of ribose (e.g., to form a 4-membered ring of cyclobutane or oxetane); ring expansion of ribose (e.g., to form a 6- or 7-membered ring having an additional carbon or heteroatom, such as for example, anhydrohexitol, altritol, mannitol, cyclohexanyl, cyclohexenyl, and morpholino that also has a phosphoramidate backbone). In some embodiments, the modified nucleotides can include multicyclic forms (e.g., tricyclo; and “unlocked” forms, such as glycol nucleic acid (GNA) (e.g., R-GNA or S-GNA, where ribose is replaced by glycol units attached to phosphodiester bonds), threose nucleic acid (TNA, where ribose is replaced with α-L-threofuranosyl-(3′→2′)).

[1604] Modifications on the Nucleobase

[1605] The modified nucleosides and modified nucleotides described herein, which can be incorporated into a modified nucleic acid, can include a modified nucleobase. Examples of nucleobases include, but are not limited to, adenine (A), guanine (G), cytosine (C), and uracil (U). These nucleobases can be modified or wholly replaced to provide modified nucleosides and modified nucleotides that can be incorporated into modified nucleic acids. The nucleobase of the nucleotide can be independently selected from a purine, a pyrimidine, a purine or pyrimidine analog. In some embodiments, the nucleobase can include, for example, naturally-occurring and synthetic derivatives of a base.

[1606] Uracil

[1607] In some embodiments, the modified nucleobase is a modified uracil. Exemplary nucleobases and nucleosides having a modified uracil include without limitation pseudouridine (ψ), pyridin-4-one ribonucleoside, 5-aza-uridine, 6-aza-uridine, 2-thio-5-aza-uridine, 2-thio-uridine (s2U), 4-thio-uridine (s4U), 4-thio-pseudouridine, 2-thio-pseudouridine, 5-hydroxy-uridine (ho⁵U), 5-aminoallyl-uridine, 5-halo-uridine (e.g., 5-iodo-uridine or 5-bromo-uridine), 3-methyl-uridine (m³U), 5-methoxy-uridine (mo⁵U), uridine 5-oxyacetic acid (cmo⁵U), uridine 5-oxyacetic acid methyl ester (mcmo⁵U), 5-carboxymethyl-uridine (cm⁵U), 1-carboxymethyl-pseudouridine, 5-carboxyhydroxymethyl-uridine (chm⁵U), 5-carboxyhydroxymethyl-uridine methyl ester (mchm⁵U), 5-methoxycarbonylmethyl-uridine (mcm⁵U), 5-methoxycarbonylmethyl-2-thio-uridine (mcm⁵s2U), 5-aminomethyl-2-thio-uridine (nm⁵s2U), 5-methylaminomethyl-uridine (mnm⁵U), 5-methylaminomethyl-2-thio-uridine (mnm⁵s2U), 5-methylaminomethyl-2-seleno-uridine (mnm⁵se²U), 5-carbamoylmethyl-uridine (ncm⁵U), 5-carboxymethylaminomethyl-uridine (cmnm⁵U), 5-carboxymethylaminomethyl-2-thio-uridine (cmnm⁵s2U), 5-propynyl-uridine, 1-propynyl-pseudouridine, 5-taurinomethyl-uridine (zcm⁵U), 1-taurinomethyl-pseudouridine, 5-taurinomethyl-2-thio-uridine(τm⁵ s2U), 1-taurinomethyl-4-thio-pseudouridine, 5-methyl-uridine (m⁵U, i.e., having the nucleobase deoxythymine), 1-methyl-pseudouridine (m¹ψ), 5-methyl-2-thio-uridine (m⁵s2U), 1-methyl-4-thio-pseudouridine (m¹s⁴ψ), 4-thio-1-methyl-pseudouridine, 3-methyl-pseudouridine (m³ψ), 2-thio-1-methyl-pseudouridine, 1-methyl-1-deaza-pseudouridine, 2-thio-1-methyl-1-deaza-pseudouridine, dihydrouridine (D), dihydropseudouridine, 5,6-dihydrouridine, 5-methyl-dihydrouridine (m⁵D), 2-thio-dihydrouridine, 2-thio-dihydropseudouridine, 2-methoxy-uridine, 2-methoxy-4-thio-uridine, 4-methoxy-pseudouridine, 4-methoxy-2-thio-pseudouridine, N1-methyl-pseudouridine, 3-(3-amino-3-carboxypropyl)uridine (acp³U), 1-methyl-3-(3-amino-3-carboxypropyl)pseudouridine (acp³ψ), 5-(isopentenylaminomethyl)uridine (inm⁵U), 5-(isopentenylaminomethyl)-2-thio-uridine (inm⁵s2U), α-thio-uridine, 2′-O-methyl-uridine (Um), 5,2′-O-dimethyl-uridine (m⁵Um), 2′-O-methyl-pseudouridine (ψm), 2-thio-2′-O-methyl-uridine (s2Um), 5-methoxycarbonylmethyl-2′-O-methyl-uridine (mcm⁵Um), 5-carbamoylmethyl-2′-O-methyl-uridine (ncm⁵Um), 5-carboxymethylaminomethyl-2′-O-methyl-uridine (cmnm⁵Um), 3,2′-O-dimethyl-uridine (m³Um), 5-(isopentenylaminomethyl)-2′-O-methyl-uridine (inm⁵Um), 1-thio-uridine, deoxythymidine, 2′-F-ara-uridine, 2′-F-uridine, 2′-OH-ara-uridine, 5-(2-carbomethoxyvinyl) uridine, 5-[3-(1-E-propenylamino)uridine, pyrazolo[3,4-d]pyrimidines, xanthine, and hypoxanthine.

[1608] Cytosine

[1609] In some embodiments, the modified nucleobase is a modified cytosine. Exemplary nucleobases and nucleosides having a modified cytosine include without limitation 5-aza-cytidine, 6-aza-cytidine, pseudoisocytidine, 3-methyl-cytidine (m³C), N4-acetyl-cytidine (act), 5-formyl-cytidine (f⁵C), N4-methyl-cytidine (m⁴C), 5-methyl-cytidine (m⁵C), 5-halo-cytidine (e.g., 5-iodo-cytidine), 5-hydroxymethyl-cytidine (hm⁵C), 1-methyl-pseudoisocytidine, pyrrolo-cytidine, pyrrolo-pseudoisocytidine, 2-thio-cytidine (s2C), 2-thio-5-methyl-cytidine, 4-thio-pseudoisocytidine, 4-thio-1-methyl-pseudoisocytidine, 4-thio-1-methyl-1-deaza-pseudoisocytidine, 1-methyl-1-deaza-pseudoisocytidine, zebularine, 5-aza-zebularine, 5-methyl-zebularine, 5-aza-2-thio-zebularine, 2-thio-zebularine, 2-methoxy-cytidine, 2-methoxy-5-methyl-cytidine, 4-methoxy-pseudoisocytidine, 4-methoxy-1-methyl-pseudoisocytidine, lysidine (k²C), α-thio-cytidine, 2′-O-methyl-cytidine (Cm), 5,2′-O-dimethyl-cytidine (m⁵Cm), N4-acetyl-2′-O-methyl-cytidine (ac⁴Cm), N4,2′-O-dimethyl-cytidine (m⁴Cm), 5-formyl-2′-O-methyl-cytidine (f⁵Cm), N4,N4,2′-O-trimethyl-cytidine (m⁴₂Cm), 1-thio-cytidine, 2′-F-ara-cytidine, 2′-F-cytidine, and 2′-OH-ara-cytidine.

[1610] Adenine

[1611] In some embodiments, the modified nucleobase is a modified adenine. Exemplary nucleobases and nucleosides having a modified adenine include without limitation 2-amino-purine, 2,6-diaminopurine, 2-amino-6-halo-purine (e.g., 2-amino-6-chloro-purine), 6-halo-purine (e.g., 6-chloro-purine), 2-amino-6-methyl-purine, 8-azido-adenosine, 7-deaza-adenosine, 7-deaza-8-aza-adenosine, 7-deaza-2-amino-purine, 7-deaza-8-aza-2-amino-purine, 7-deaza-2,6-diaminopurine, 7-deaza-8-aza-2,6-diaminopurine, 1-methyl-adenosine (m¹A), 2-methyl-adenosine (m²A), N6-methyl-adenosine (m⁶A), 2-methylthio-N6-methyl-adenosine (ms2 m⁶A), N6-isopentenyl-adenosine (i⁶A), 2-methylthio-N6-isopentenyl-adenosine (ms²i⁶A), N6-(cis-hydroxyisopentenyl)adenosine (io⁶A), 2-methylthio-N6-(cis-hydroxyisopentenyl)adenosine (ms2io⁶A), N6-glycinylcarbamoyl-adenosine (g⁶A), N6-threonylcarbamoyl-adenosine (t⁶A), N6-methyl-N6-threonylcarbamoyl-adenosine (m⁶t⁶A), 2-methylthio-N6-threonylcarbamoyl-adenosine (ms²g⁶A), N6,N6-dimethyl-adenosine (m⁶₂A), N6-hydroxynorvalylcarbamoyl-adenosine (hn⁶A), 2-methylthio-N6-hydroxynorvalylcarbamoyl-adenosine (ms2hn⁶A), N6-acetyl-adenosine (ac⁶A), 7-methyl-adenosine, 2-methylthio-adenosine, 2-methoxy-adenosine, α-thio-adenosine, 2′-O-methyl-adenosine (Am), N⁶,2′-O-dimethyl-adenosine (m⁶Am), N⁶-Methyl-2′-deoxyadenosine, N6,N6,2′-O-trimethyl-adenosine (m⁶₂Am), 1,2′-O-dimethyl-adenosine (m¹Am), 2′-O-ribosyladenosine (phosphate) (Ar(p)), 2-amino-N6-methyl-purine, 1-thio-adenosine, 8-azido-adenosine, 2′-F-ara-adenosine, 2′-F-adenosine, 2′-OH-ara-adenosine, and N6-(19-amino-pentaoxanonadecyl)-adenosine.

[1612] Guanine

[1613] In some embodiments, the modified nucleobase is a modified guanine. Exemplary nucleobases and nucleosides having a modified guanine include without limitation inosine (I), 1-methyl-inosine (m¹I), wyosine (imG), methylwyosine (mimG), 4-demethyl-wyosine (imG-14), isowyosine (imG2), wybutosine (yW), peroxywybutosine (o₂yW), hydroxywybutosine (OHyW), undermodified hydroxywybutosine (OHyW*), 7-deaza-guanosine, queuosine (Q), epoxyqueuosine (oQ), galactosyl-queuosine (galQ), mannosyl-queuosine (manQ), 7-cyano-7-deaza-guanosine (preQ₀), 7-aminomethyl-7-deaza-guanosine (preQ₁), archaeosine (G+), 7-deaza-8-aza-guanosine, 6-thio-guanosine, 6-thio-7-deaza-guanosine, 6-thio-7-deaza-8-aza-guanosine, 7-methyl-guanosine (m⁷G), 6-thio-7-methyl-guanosine, 7-methyl-inosine, 6-methoxy-guanosine, 1-methyl-guanosine (m′G), N2-methyl-guanosine (m²G), N2,N2-dimethyl-guanosine (m²₂G), N2,7-dimethyl-guanosine (m²,7G), N2, N2,7-dimethyl-guanosine (m²,2,7G), 8-oxo-guanosine, 7-methyl-8-oxo-guanosine, 1-methyl-6-thio-guanosine, N2-methyl-6-thio-guanosine, N2,N2-dimethyl-6-thio-guanosine, α-thio-guanosine, 2′-O-methyl-guanosine (Gm), N2-methyl-2′-O-methyl-guanosine (m²Gm), N2,N2-dimethyl-2′-O-methyl-guanosine (m²₂Gm), 1-methyl-2′-O-methyl-guanosine (m′Gm), N2,7-dimethyl-2′-O-methyl-guanosine (m²,7Gm), 2′-O-methyl-inosine (Im), 1,2′-O-dimethyl-inosine (m′Im), O⁶-phenyl-2′-deoxyinosine, 2′-O-ribosylguanosine (phosphate) (Gr(p)), 1-thio-guanosine, O⁶-methyl-guanosine, O⁶-Methyl-2′-deoxyguanosine, 2′-F-ara-guanosine, and 2′-F-guanosine.

[1614] Exemplary Modified gRNAs

[1615] In some embodiments, the modified nucleic acids can be modified gRNAs. It is to be understood that any of the gRNAs described herein can be modified in accordance with this section, including any gRNA that comprises a targeting domain from Tables 1A-I, Tables 2A-I, Tables 3A-H, Tables 4A-I, Tables 5A-I, Tables 6A-I, Tables 7A-H, Tables 8A-H, Tables 9A-I, Tables 10A-I, Tables 11A-I, Tables 12A-I, Tables 13A-K, Tables 14A-K, Tables 15A-F, Tables 16A-K, Tables 17A-K, Tables 18A-K, Tables 19A-J, Tables 20A-J, Tables 21A-K, Tables 22A-K, Tables 23A-J, Tables 24A-K, Tables 25A-G, Tables 26A-G, Table 27, Table 29, Table 31, or Table 32. As discussed herein, transiently expressed or delivered nucleic acids can be prone to degradation by, e.g., cellular nucleases. Accordingly, in one aspect the modified gRNAs described herein can contain one or more modified nucleosides or nucleotides which introduce stability toward nucleases. While not wishing to be bound by theory it is also believed that certain modified gRNAs described herein can elicit a reduced innate immune response from certain cells, particularly the cells of the present invention (e.g., T-cells). As noted above, the term “innate immune response” includes a cellular response to exogenous nucleic acids, including single stranded nucleic acids, generally of viral or bacterial origin, which involves the induction of cytokine expression and release, particularly the interferons, and cell death.

[1616] For example, as discussed herein, we have seen improvements in ex vivo editing of genes in certain cell types (e.g., T cells) when the 5′ end of a gRNA is modified by the inclusion of a eukaryotic mRNA cap structure or cap analog. The present invention encompasses the realization that the improvements observed with a 5′ capped gRNA can be extended to gRNAs that have been modified in other ways to achieve the same type of structural or functional result (e.g., by the inclusion of modified nucleosides or nucleotides, by the inclusion of a 3′ polyA tract and/or when an in vitro transcribed gRNA is modified by treatment with a phosphatase such as calf intestinal alkaline phosphatase to remove the 5′ triphosphate group).

[1617] Thus, in some embodiments, methods and compositions discussed herein provide methods and compositions where gRNAs have been modified at or near their 5′ end (e.g., within 1-10, 1-5, or 1-2 nucleotides of their 5′ end). In an embodiment, the 5′ end of a gRNA is modified by the inclusion of a eukaryotic mRNA cap structure or cap analog (e.g., a G(5′)ppp(5′)G cap analog, a m7G(5′)ppp(5′)G cap analog, or a 3′-O-Me-m7G(5′)ppp(5′)G anti reverse cap analog (ARCA)) as depicted in FIG. 19. The cap or cap analog can be included during either chemical synthesis or in vitro transcription of the gRNA. In an embodiment, an in vitro transcribed gRNA is modified by treatment with a phosphatase (e.g., calf intestinal alkaline phosphatase) to remove the 5′ triphosphate group.

[1618] In some embodiments, a gRNA comprises a modification at or near its 3′ end (e.g., within 1-10, 1-5, or 1-2 nucleotides of its 3′ end). For example, in some embodiments, the 3′ end of a gRNA is modified by the addition of one or more (e.g., 25-200) adenine (A) residues. The polyA tract can be contained in the nucleic acid (e.g., plasmid, PCR product, viral genome) encoding the gRNA, or can be added to the gRNA during chemical synthesis, or following in vitro transcription using a polyadenosine polymerase (e.g., E. coli Poly(A)Polymerase). In some embodiments, gRNAs can be modified at a 3′ terminal U ribose. For example, the two terminal hydroxyl groups of the U ribose can be oxidized to aldehyde groups and a concomitant opening of the ribose ring to afford a modified nucleoside as shown below:

[chemical structure]

wherein “U” can be an unmodified or modified uridine. In another embodiment, the 3′ terminal U can be modified with a 2′3′ cyclic phosphate as shown below:

[chemical structure]

wherein “U” can be an unmodified or modified uridine. In some embodiments, the gRNA molecules may contain 3′ nucleotides which can be stabilized against degradation, e.g., by incorporating one or more of the modified nucleotides described herein. In this embodiment, e.g., uridines can be replaced with modified uridines, e.g., 5-(2-amino)propyl uridine, and 5-bromo uridine, or with any of the modified uridines described herein; adenosines and guanosines can be replaced with modified adenosines and guanosines, e.g., with modifications at the 8-position, e.g., 8-bromo guanosine, or with any of the modified adenosines or guanosines described herein.

[1619] In some embodiments, a gRNA comprises both a modification at or near its 5′ end and a modification at or near its 3′ end. In an embodiment, in vitro transcribed gRNA contains both a 5′ cap structure or cap analog and a 3′ polyA tract. In an embodiment, an in vitro transcribed gRNA is modified by treatment with a phosphatase (e.g., calf intestinal alkaline phosphatase) to remove the 5′ triphosphate group and comprises a 3′ polyA tract.

[1620] While the foregoing has focused on terminal modifications, it is to be understood that methods and compositions discussed herein may use gRNAs that include one or more modified nucleosides or nucleotides at one or more non-terminal positions and/or one or more terminal positions within the gRNA sequence.

[1621] In some embodiments, sugar-modified ribonucleotides can be incorporated into the gRNA, e.g., wherein the 2′ OH-group is replaced by a group selected from H, —OR, —R (wherein R can be, e.g., alkyl, cycloalkyl, aryl, aralkyl, heteroaryl or sugar), halo, —SH, —SR (wherein R can be, e.g., alkyl, cycloalkyl, aryl, aralkyl, heteroaryl or sugar), amino (wherein amino can be, e.g., NH₂; alkylamino, dialkylamino, heterocyclyl, arylamino, diarylamino, heteroarylamino, diheteroarylamino, or amino acid); or cyano (—CN). In some embodiments, the phosphate backbone can be modified as described herein, e.g., with a phosphothioate group. In some embodiments, one or more of the nucleotides of the gRNA can each independently be a modified or unmodified nucleotide including, but not limited to 2′-sugar modified, such as, 2′-O-methyl, 2′-O-methoxyethyl, or 2′-Fluoro modified including, e.g., 2′-F or 2′-O-methyl, adenosine (A), 2′-F or 2′-O-methyl, cytidine (C), 2′-F or 2′-O-methyl, uridine (U), 2′-F or 2′-O-methyl, thymidine (T), 2′-F or 2′-O-methyl, guanosine (G), 2′-O-methoxyethyl-5-methyluridine (Teo), 2′-O-methoxyethyladenosine (Aeo), 2′-O-methoxyethyl-5-methylcytidine (m5Ceo), and any combinations thereof.

[1622] In some embodiments, a gRNA can include “locked” nucleic acids (LNA) in which the 2′ OH-group can be connected, e.g., by a C1-6 alkylene or C1-6 heteroalkylene bridge, to the 4′ carbon of the same ribose sugar, where exemplary bridges can include methylene, propylene, ether, or amino bridges; O-amino (wherein amino can be, e.g., NH₂; alkylamino, dialkylamino, heterocyclyl, arylamino, diarylamino, heteroarylamino, or diheteroarylamino, ethylenediamine, or polyamino) and aminoalkoxy or O(CH₂)ₙ-amino (wherein amino can be, e.g., NH₂; alkylamino, dialkylamino, heterocyclyl, arylamino, diarylamino, heteroarylamino, or diheteroarylamino, ethylenediamine, or polyamino).

[1623] In some embodiments, a gRNA can include a modified nucleotide which is multicyclic (e.g., tricyclo; and “unlocked” forms, such as glycol nucleic acid (GNA) (e.g., R-GNA or S-GNA, where ribose is replaced by glycol units attached to phosphodiester bonds), or threose nucleic acid (TNA, where ribose is replaced with α-L-threofuranosyl-(3′→2′)).

[1624] Generally, gRNA molecules include the sugar group ribose, which is a 5-membered ring having an oxygen. Exemplary modified gRNAs can include, without limitation, replacement of the oxygen in ribose (e.g., with sulfur (S), selenium (Se), or alkylene, such as, e.g., methylene or ethylene); addition of a double bond (e.g., to replace ribose with cyclopentenyl or cyclohexenyl); ring contraction of ribose (e.g., to form a 4-membered ring of cyclobutane or oxetane); ring expansion of ribose (e.g., to form a 6- or 7-membered ring having an additional carbon or heteroatom, such as for example, anhydrohexitol, altritol, mannitol, cyclohexanyl, cyclohexenyl, and morpholino that also has a phosphoramidate backbone). Although the majority of sugar analog alterations are localized to the 2′ position, other sites are amenable to modification, including the 4′ position. In an embodiment, a gRNA comprises a 4′-S, 4′-Se or a 4′-C-aminomethyl-2′-O-Me modification.

[1625] In some embodiments, deaza nucleotides, e.g., 7-deaza-adenosine, can be incorporated into the gRNA. In some embodiments, 0- and N-alkylated nucleotides, e.g., N6-methyl adenosine, can be incorporated into the gRNA. In some embodiments, one or more or all of the nucleotides in a gRNA molecule are deoxynucleotides.

[1626] miRNA Binding Sites

[1627] microRNAs (or miRNAs) are naturally occurring cellular 19-25 nucleotide long noncoding RNAs. They bind to nucleic acid molecules having an appropriate miRNA binding site, e.g., in the 3′ UTR of an mRNA, and down-regulate gene expression. While not wishing to be bound by theory it is believed that the down regulation is either by reducing nucleic acid molecule stability or by inhibiting translation. An RNA species disclosed herein, e.g., an mRNA encoding Cas9 can comprise an miRNA binding site, e.g., in its 3′UTR. The miRNA binding site can be selected to promote down regulation of expression is a selected cell type. By way of example, the incorporation of a binding site for miR-122, a microRNA abundant in liver, can inhibit the expression of the gene of interest in the liver.

XI. Governing gRNA Molecules and the Use Thereof to Limit the Activity of a Cas9 System

[1628] Methods and compositions that use, or include, a nucleic acid, e.g., DNA, that encodes a Cas9 molecule or a gRNA molecule, can, in addition, use or include a “governing gRNA molecule.” The governing gRNA can limit the activity of the other CRISPR/Cas components introduced into a cell or subject. In an embodiment, a gRNA molecule comprises a targeting domain that is complementary to a target domain on a nucleic acid that comprises a sequence that encodes a component of the CRISPR/Cas system that is introduced into a cell or subject. In an embodiment, a governing gRNA molecule comprises a targeting domain that is complementary with a target sequence on: (a) a nucleic acid that encodes a Cas9 molecule; (b) a nucleic acid that encodes a gRNA which comprises a targeting domain that targets the FAS, BID, CTLA4, PDCD1, CBLB, PTPN6, TRAC or TRBC gene (a target gene gRNA); or on more than one nucleic acid that encodes a CRISPR/Cas component, e.g., both (a) and (b). The governing gRNA molecule can complex with the Cas9 molecule to inactivate a component of the system. In an embodiment, a Cas9 molecule/governing gRNA molecule complex inactivates a nucleic acid that comprises the sequence encoding the Cas9 molecule. In an embodiment, a Cas9 molecule/governing gRNA molecule complex inactivates the nucleic acid that comprises the sequence encoding a target gene gRNA molecule. In an embodiment, a Cas9 molecule/governing gRNA molecule complex places temporal, level of expression, or other limits, on activity of the Cas9 molecule/target gene gRNA molecule complex. In an embodiment, a Cas9 molecule/governing gRNA molecule complex reduces off-target or other unwanted activity. In an embodiment, a governing gRNA molecule targets the coding sequence, or a control region, e.g., a promoter, for the CRISPR/Cas system component to be negatively regulated. For example, a governing gRNA can target the coding sequence for a Cas9 molecule, or a control region, e.g., a promoter, that regulates the expression of the Cas9 molecule coding sequence, or a sequence disposed between the two. In an embodiment, a governing gRNA molecule targets the coding sequence, or a control region, e.g., a promoter, for a target gene gRNA. In an embodiment, a governing gRNA, e.g., a Cas9-targeting or target gene gRNA-targeting, governing gRNA molecule, or a nucleic acid that encodes it, is introduced separately, e.g., later, than is the Cas9 molecule or a nucleic acid that encodes it. For example, a first vector, e.g., a viral vector, e.g., an AAV vector, can introduce nucleic acid encoding a Cas9 molecule and one or more target gene gRNA molecules, and a second vector, e.g., a viral vector, e.g., an AAV vector, can introduce nucleic acid encoding a governing gRNA molecule, e.g., a Cas9-targeting or target gene gRNA targeting, gRNA molecule. In an embodiment, the second vector can be introduced after the first. In other embodiments, a governing gRNA molecule, e.g., a Cas9-targeting or target gene gRNA targeting, governing gRNA molecule, or a nucleic acid that encodes it, can be introduced together, e.g., at the same time or in the same vector, with the Cas9 molecule or a nucleic acid that encodes it, but, e.g., under transcriptional control elements, e.g., a promoter or an enhancer, that are activated at a later time, e.g., such that after a period of time the transcription of Cas9 is reduced. In an embodiment, the transcriptional control element is activated intrinsically. In an embodiment, the transcriptional element is activated via the introduction of an external trigger.

[1629] Typically a nucleic acid sequence encoding a governing gRNA molecule, e.g., a Cas9-targeting gRNA molecule, is under the control of a different control region, e.g., promoter, than is the component it negatively modulates, e.g., a nucleic acid encoding a Cas9 molecule. In an embodiment, “different control region” refers to simply not being under the control of one control region, e.g., promoter, that is functionally coupled to both controlled sequences. In an embodiment, different refers to “different control region” in kind or type of control region. For example, the sequence encoding a governing gRNA molecule, e.g., a Cas9-targeting gRNA molecule, is under the control of a control region, e.g., a promoter, that has a lower level of expression, or is expressed later than the sequence which encodes is the component it negatively modulates, e.g., a nucleic acid encoding a Cas9 molecule.

[1630] By way of example, a sequence that encodes a governing gRNA molecule, e.g., a Cas9-targeting governing gRNA molecule, can be under the control of a control region (e.g., a promoter) described herein, e.g., human U6 small nuclear promoter, or human H1 promoter. In an embodiment, a sequence that encodes the component it negatively regulates, e.g., a nucleic acid encoding a Cas9 molecule, can be under the control of a control region (e.g., a promoter) described herein, e.g., CMV, EF-1a, MSCV, PGK, CAG control promoters.

### EXAMPLES

[1631] The following Examples are merely illustrative and are not intended to limit the scope or content of the invention in any way.

### Example 1: Cloning and Initial Screening of 2RNAs

[1632] The suitability of candidate gRNAs can be evaluated as described in this example. Although described for a chimeric gRNA, the approach can also be used to evaluate modular gRNAs.

[1633] Cloning gRNAs into Vectors

[1634] For each gRNA, a pair of overlapping oligonucleotides is designed and obtained. Oligonucleotides are annealed and ligated into a digested vector backbone containing an upstream U6 promoter and the remaining sequence of a long chimeric gRNA. Plasmid is sequence-verified and prepped to generate sufficient amounts of transfection-quality DNA. Alternate promoters may be used to drive in vivo transcription (e.g., H1 promoter) or for in vitro transcription (e.g., a T7 promoter).

[1635] Cloning gRNAs in Linear dsDNA Molecule (STITCHR)

[1636] For each gRNA, a single oligonucleotide is designed and obtained. The U6 promoter and the gRNA scaffold (e.g. including everything except the targeting domain, e.g., including sequences derived from the crRNA and tracrRNA, e.g., including a first complementarity domain; a linking domain; a second complementarity domain; a proximal domain; and a tail domain) are separately PCR amplified and purified as dsDNA molecules. The gRNA-specific oligonucleotide is used in a PCR reaction to stitch together the U6 and the gRNA scaffold, linked by the targeting domain specified in the oligonucleotide. Resulting dsDNA molecule (STITCHR product) is purified for transfection. Alternate promoters may be used to drive in vivo transcription (e.g., H1 promoter) or for in vitro transcription (e.g., T7 promoter). Any gRNA scaffold may be used to create gRNAs compatible with Cas9s from any bacterial species

[1637] Initial gRNA Screen

[1638] Each gRNA to be tested is transfected, along with a plasmid expressing Cas9 and a small amount of a GFP-expressing plasmid into human cells. In preliminary experiments, these cells can be immortalized human cell lines such as 293T, K562 or U2OS. Alternatively, primary human cells may be used. In this case, cells may be relevant to the eventual therapeutic cell target (for example, an erythroid cell). The use of primary cells similar to the potential therapeutic target cell population may provide important information on gene targeting rates in the context of endogenous chromatin and gene expression.

[1639] Transfection may be performed using lipid transfection (such as Lipofectamine or Fugene) or by electroporation (such as Lonza Nucleofection). Following transfection, GFP expression can be determined either by fluorescence microscopy or by flow cytometry to confirm consistent and high levels of transfection. These preliminary transfections can comprise different gRNAs and different targeting approaches (17-mers, 20-mers, nuclease, dual-nickase, etc.) to determine which gRNAs/combinations of gRNAs give the greatest activity.

[1640] Efficiency of cleavage with each gRNA may be assessed by measuring NHEJ-induced indel formation at the target locus by a T7E1-type assay or by sequencing. Alternatively, other mismatch-sensitive enzymes, such as Cell/Surveyor nuclease, may also be used.

[1641] For the T7E1 assay, PCR amplicons are approximately 500-700 bp with the intended cut site placed asymmetrically in the amplicon. Following amplification, purification and size-verification of PCR products, DNA is denatured and re-hybridized by heating to 95° C. and then slowly cooling. Hybridized PCR products are then digested with T7 Endonuclease I (or other mismatch-sensitive enzyme) which recognizes and cleaves non-perfectly matched DNA. If indels are present in the original template DNA, when the amplicons are denatured and re-annealed, this results in the hybridization of DNA strands harboring different indels and therefore lead to double-stranded DNA that is not perfectly matched. Digestion products may be visualized by gel electrophoresis or by capillary electrophoresis. The fraction of DNA that is cleaved (density of cleavage products divided by the density of cleaved and uncleaved) may be used to estimate a percent NHEJ using the following equation: % NHEJ=(1-(1-fraction cleaved)^{1/2}). The T7E1 assay is sensitive down to about 2-5% NHEJ.

[1642] Sequencing may be used instead of, or in addition to, the T7E1 assay. For Sanger sequencing, purified PCR amplicons are cloned into a plasmid backbone, transformed, miniprepped and sequenced with a single primer. Sanger sequencing may be used for determining the exact nature of indels after determining the NHEJ rate by T7E1.

[1643] Sequencing may also be performed using next generation sequencing techniques. When using next generation sequencing, amplicons may be 300-500 bp with the intended cut site placed asymmetrically. Following PCR, next generation sequencing adapters and barcodes (for example Illumina multiplex adapters and indexes) may be added to the ends of the amplicon, e.g., for use in high throughput sequencing (for example on an Illumina MiSeq). This method allows for detection of very low NHEJ rates.

### Example 2: Assessment of Gene Targeting by NHEJ

[1644] The gRNAs that induce the greatest levels of NHEJ in initial tests can be selected for further evaluation of gene targeting efficiency. In this case, cells are derived from disease subjects and, therefore, harbor the relevant mutation.

[1645] Following transfection (usually 2-3 days post-transfection,) genomic DNA may be isolated from a bulk population of transfected cells and PCR may be used to amplify the target region. Following PCR, gene targeting efficiency to generate the desired mutations (either knockout of a target gene or removal of a target sequence motif) may be determined by sequencing. For Sanger sequencing, PCR amplicons may be 500-700 bp long. For next generation sequencing, PCR amplicons may be 300-500 bp long. If the goal is to knockout gene function, sequencing may be used to assess what percent of alleles have undergone NHEJ-induced indels that result in a frameshift or large deletion or insertion that would be expected to destroy gene function. If the goal is to remove a specific sequence motif, sequencing may be used to assess what percent of alleles have undergone NHEJ-induced deletions that span this sequence.

### Example 3: Screening of 2RNAs in 293 Cells

[1646] Screening of gRNAs for T Cell Receptor Beta (TRBC)

[1647] In order to identify gRNAs with the highest on target NHEJ efficiency, 42 S. pyogenes and 27 S. aureus gRNAs were selected (Table 27). A DNA template comprised of a U6 promoter, the gRNA target region and appropriate TRACR sequence (S. pyogenes or S. aureus) was generated by a PCR STITCHR reaction. This DNA template was subsequently transfected into 293 cells using Lipofectamine 3000 along with a DNA plasmid encoding the appropriate Cas9 (S. pyogenes or S. aureus) downstream of a CMV promoter. Genomic DNA was isolated from the cells 48-72 hours post transfection. To determine the rate of modification at the T cell receptor beta gene (TRBC), the target region was amplified using a locus PCR with the primers listed in Table 28. After PCR amplification, a T7E1 assay was performed on the PCR product. Briefly, this assay involves melting the PCR product followed by a re-annealing step. If gene modification has occurred, there will exist double stranded products that are not perfect matches due to some frequency of insertions or deletions. These double stranded products are sensitive to cleavage by a T7 endonuclease 1 enzyme at the site of mismatch. It is possible, therefore, to determine the efficiency of cutting by the Cas9/gRNA complex by analyzing the amount of T7E1 cleavage. The formula that is used to provide a measure of % NHEJ from the T7E1 cutting is the following: (100*(1-((1-(fraction cleaved))̂0.5))). The results of this analysis are shown in FIG. 11 and FIG. 12.

TABLE 27

| gRNA Name | Targeting Domain | Cas9 species | SEQ ID NO: |
|---|---|---|---|
| TRBC-40 | CACCCAGAUCGUCAGCGCCG | S. pyogenes | 387 |
| TRBC-52 | CAAACACAGCGACCUCGGGU | S. pyogenes | 388 |
| TRBC-25 | UGACGAGUGGACCCAGGAUA | S. pyogenes | 389 |
| TRBC-35 | GGCUCUCGGAGAAUGACGAG | S. pyogenes | 390 |
| TRBC-50 | GGCCUCGGCGCUGACGAUCU | S. pyogenes | 391 |
| TRBC-39 | GAAAAACGUGUUCCCACCCG | S. pyogenes | 392 |
| TRBC-49 | AUGACGAGUGGACCCAGGAU | S. pyogenes | 393 |
| TRBC-51 | AGUCCAGUUCUACGGGCUCU | S. pyogenes | 394 |
| TRBC-26 | CGCUGUCAAGUCCAGUUCUA | S. pyogenes | 395 |
| TRBC-47 | AUCGUCAGCGCCGAGGCCUG | S. pyogenes | 396 |
| TRBC-45 | UCAAACACAGCGACCUCGGG | S. pyogenes | 397 |
| TRBC-34 | CGUAGAACUGGACUUGACAG | S. pyogenes | 398 |
| TRBC-227 | AGGCCUCGGCGCUGACGAUC | S. pyogenes | 399 |
| TRBC-41 | UGACAGCGGAAGUGGUUGCG | S. pyogenes | 400 |
| TRBC-30 | UUGACAGCGGAAGUGGUUGC | S. pyogenes | 401 |
| TRBC-206 | UCUCCGAGAGCCCGUAGAAC | S. pyogenes | 402 |
| TRBC-32 | CGGGUGGGAACACGUUUUUC | S. pyogenes | 403 |
| TRBC-276 | GACAGGUUUGGCCCUAUCCU | S. pyogenes | 404 |
| TRBC-274 | GAUCGUCAGCGCCGAGGCCU | S. pyogenes | 405 |
| TRBC-230 | GGCUCAAACACAGCGACCUC | S. pyogenes | 406 |
| TRBC-235 | UGAGGGUCUCGGCCACCUUC | S. pyogenes | 407 |
| TRBC-38 | AGGCUUCUACCCCGACCACG | S. pyogenes | 408 |
| TRBC-223 | CCGACCACGUGGAGCUGAGC | S. pyogenes | 409 |
| TRBC-221 | UGACAGGUUUGGCCCUAUCC | S. pyogenes | 410 |
| TRBC-48 | CUUGACAGCGGAAGUGGUUG | S. pyogenes | 411 |
| TRBC-216 | AGAUCGUCAGCGCCGAGGCC | S. pyogenes | 412 |
| TRBC-210 | GCGCUGACGAUCUGGGUGAC | S. pyogenes | 413 |
| TRBC-268 | UGAGGGCGGGCUGCUCCUUG | S. pyogenes | 414 |
| TRBC-193 | GUUGCGGGGGUUCUGCCAGA | S. pyogenes | 415 |
| TRBC-246 | AGCUCAGCUCCACGUGGUCG | S. pyogenes | 416 |
| TRBC-228 | GCGGCUGCUCAGGCAGUAUC | S. pyogenes | 417 |
| TRBC-43 | GCGGGGGUUCUGCCAGAAGG | S. pyogenes | 418 |
| TRBC-272 | UGGCUCAAACACAGCGACCU | S. pyogenes | 419 |
| TRBC-33 | ACUGGACUUGACAGCGGAAG | S. pyogenes | 420 |
| TRBC-44 | GACAGCGGAAGUGGUUGCGG | S. pyogenes | 421 |
| TRBC-211 | GCUGUCAAGUCCAGUUCUAC | S. pyogenes | 422 |
| TRBC-253 | GUAUCUGGAGUCAUUGAGGG | S. pyogenes | 423 |
| TRBC-18 | CUCGGCGCUGACGAUCU | S. pyogenes | 424 |
| TRBC-6 | CCUCGGCGCUGACGAUC | S. pyogenes | 425 |
| TRBC-85 | CCGAGAGCCCGUAGAAC | S. pyogenes | 426 |
| TRBC-129 | CCAGAUCGUCAGCGCCG | S. pyogenes | 427 |
| TRBC-93 | GAAUGACGAGUGGACCC | S. pyogenes | 428 |
| TRBC-415 | GGGUGACAGGUUUGGCCCUAUC | S. aureus | 429 |
| TRBC-414 | GGUGACAGGUUUGGCCCUAUC | S. aureus | 430 |
| TRBC-310 | GUGACAGGUUUGGCCCUAUC | S. aureus | 431 |
| TRBC-308 | GACAGGUUUGGCCCUAUC | S. aureus | 432 |
| TRBC-401 | GAUACUGCCUGAGCAGCCGCCU | S. aureus | 433 |
| TRBC-468 | GACCACGUGGAGCUGAGCUGGUGG | S. aureus | 434 |
| TRBC-462 | GUGGAGCUGAGCUGGUGG | S. aureus | 435 |
| TRBC-424 | GGGCGGGCUGCUCCUUGAGGGGCU | S. aureus | 436 |
| TRBC-423 | GGCGGGCUGCUCCUUGAGGGGCU | S. aureus | 437 |
| TRBC-422 | GCGGGCUGCUCCUUGAGGGGCU | S. aureus | 438 |
| TRBC-420 | GGGCUGCUCCUUGAGGGGCU | S. aureus | 439 |
| TRBC-419 | GGCUGCUCCUUGAGGGGCU | S. aureus | 440 |
| TRBC-418 | GCUGCUCCUUGAGGGGCU | S. aureus | 441 |
| TRBC-445 | GGUGAAUGGGAAGGAGGUGCACAG | S. aureus | 442 |
| TRBC-444 | GUGAAUGGGAAGGAGGUGCACAG | S. aureus | 443 |
| TRBC-442 | GAAUGGGAAGGAGGUGCACAG | S. aureus | 444 |

TABLE 28

| Primer name | Sequence | Exon | SEQ ID NO: |
|---|---|---|---|
| GWED133 | ACATCACCTGGAATGTTAGGCA | TRBC2 5′ primer | 445 |
| GWED134 | GTGAACCTTGATCATCCCACCT | TRBC2 3′ Primer | 446 |
| GWED137 | CCCCAAAACAATGAGGGCCT | TRBC1 5′ primer | 447 |
| GWED138 | AGCACCTCCTTTCTTCTGCC | TRBC1 3′ primer | 448 |

[1648] Screening of gRNAs for T Cell Receptor Alpha (TRAC)

[1649] In order to identify gRNAs with the highest on target NHEJ efficiency, 18 S. pyogenes and 13 S. aureus gRNAs were selected (Table 29). A DNA template comprised of a U6 promoter, the gRNA target region and appropriate TRACR sequence (S. pyogenes or S. aureus) was generated by a PCR STITCHR reaction. This DNA template was subsequently transfected into 293 cells using Lipofectamine 3000 along with a DNA plasmid encoding the appropriate Cas9 (S. pyogenes or S. aureus) downstream of a CMV promoter. Genomic DNA was isolated from the cells 48-72 hours post transfection. To determine the rate of modification at the T cell receptor alpha gene (TRAC), the target region was amplified using a locus PCR with the primers listed in Table 30. After PCR amplification, a T7E1 assay was performed on the PCR product. Briefly, this assay involves melting the PCR product followed by a re-annealing step. If gene modification has occurred, there will exist double stranded products that are not perfect matches due to some frequency of insertions or deletions. These double stranded products are sensitive to cleavage by a T7 endonuclease 1 enzyme at the site of mismatch. It is possible, therefore, to determine the efficiency of cutting by the Cas9/gRNA complex by analyzing the amount of T7E1 cleavage. The formula that is used to provide a measure of % NHEJ from the T7E1 cutting is the following: (100*(1−((1−(fraction cleaved))̂0.5))). The results of this analysis are shown in FIG. 13 and FIG. 14.

TABLE 29

| gRNA Name | Targeting Domain | Cas9 species | SEQ ID NO: |
|---|---|---|---|
| TRAC-10 | UCUCUCAGCUGGUACACGGC | S. pyogenes | 449 |
| TRAC-110 | UGGAUUUAGAGUCUCUCAGC | S. pyogenes | 450 |
| TRAC-116 | ACACGGCAGGGUCAGGGUUC | S. pyogenes | 451 |
| TRAC-16 | GAGAAUCAAAAUCGGUGAAU | S. pyogenes | 452 |
| TRAC-4 | GCUGGUACACGGCAGGGUCA | S. pyogenes | 453 |
| TRAC-49 | CUCAGCUGGUACACGGC | S. pyogenes | 454 |
| TRAC-2 | UGGUACACGGCAGGGUC | S. pyogenes | 455 |
| TRAC-30 | GCUAGACAUGAGGUCUA | S. pyogenes | 456 |
| TRAC-43 | GUCAGAUUUGUUGCUCC | S. pyogenes | 457 |
| TRAC-23 | UCAGCUGGUACACGGCA | S. pyogenes | 458 |
| TRAC-34 | GCAGACAGACUUGUCAC | S. pyogenes | 459 |
| TRAC-25 | GGUACACGGCAGGGUCA | S. pyogenes | 460 |
| TRAC-128 | CUUCAAGAGCAACAGUGCUG | S. pyogenes | 461 |
| TRAC-105 | AGAGCAACAGUGCUGUGGCC | S. pyogenes | 462 |
| TRAC-106 | AAAGUCAGAUUUGUUGCUCC | S. pyogenes | 463 |
| TRAC-123 | ACAAAACUGUGCUAGACAUG | S. pyogenes | 464 |
| TRAC-64 | AAACUGUGCUAGACAUG | S. pyogenes | 465 |
| TRAC-97 | UGUGCUAGACAUGAGGUCUA | S. pyogenes | 466 |
| TRAC-148 | GGCUGGGGAAGAAGGUGUCUUC | S. aureus | 467 |
| TRAC-147 | GCUGGGGAAGAAGGUGUCUUC | S. aureus | 468 |
| TRAC-234 | GGGGAAGAAGGUGUCUUC | S. aureus | 469 |
| TRAC-167 | GUUUUGUCUGUGAUAUACACAU | S. aureus | 470 |
| TRAC-177 | GGCAGACAGACUUGUCACUGGAUU | S. aureus | 471 |
| TRAC-176 | GCAGACAGACUUGUCACUGGAUU | S. aureus | 472 |
| TRAC-257 | GACAGACUUGUCACUGGAUU | S. aureus | 473 |
| TRAC-233 | GUGAAUAGGCAGACAGACUUGUCA | S. aureus | 474 |
| TRAC-231 | GAAUAGGCAGACAGACUUGUCA | S. aureus | 475 |
| TRAC-163 | GAGUCUCUCAGCUGGUACACGG | S. aureus | 476 |
| TRAC-241 | GUCUCUCAGCUGGUACACGG | S. aureus | 477 |
| TRAC-179 | GGUACACGGCAGGGUCAGGGUU | S. aureus | 478 |
| TRAC-178 | GUACACGGCAGGGUCAGGGUU | S. aureus | 49451 |

TABLE 30

| Primer | | | SEQ |
|---|---|---|---|
| name | Sequence | Exon | ID NO: |
| GWED141 | GTTTGCTTTGCTGGGCCTTT | TRAC 5′ primer | 479 |
| GWED142 | CCTCTCCTGCCACCTTCTCT | TRAC 3′ primer | 480 |

[1650] Screening of gRNAs for PD-1 Receptor

[1651] In order to identify gRNAs with the highest on target NHEJ efficiency, 48 S. pyogenes and 27 S. aureus gRNAs were selected (see Tables 31 and 32). A DNA template comprised of a U6 promoter, the gRNA target region and appropriate TRACR sequence (S. pyogenes or S. aureus) was generated by a PCR STITCHR reaction. This DNA template was subsequently transfected into 293 cells using Lipofectamine 3000 along with a DNA plasmid encoding the appropriate Cas9 (S. pyogenes or S. aureus) downstream of a CMV promoter. Genomic DNA was isolated from the cells 48-72 hours post transfection. To determine the rate of modification at the PD-1 gene (PDCD1), the target region was amplified using a locus PCR with the primers listed in Table 33. After PCR amplification, a T7E1 assay was performed on the PCR product. Briefly, this assay involves melting the PCR product followed by a re-annealing step. If gene modification has occurred, there will exist double stranded products that are not perfect matches due to some frequency of insertions or deletions. These double stranded products are sensitive to cleavage by a T7 endonuclease 1 enzyme at the site of mismatch. It is possible, therefore, to determine the efficiency of cutting by the Cas9/gRNA complex by analyzing the amount of T7E1 cleavage. The formula that is used to provide a measure of % NHEJ from the T7E1 cutting is the following: (100*(1−((1−(fraction cleaved))̂0.5))). The results of this analysis for the gRNAs shown in Table 31 are shown in FIG. 15 and FIG. 16. Similar experiments can be performed with other gRNAs described herein, including those shown in Table 32.

TABLE 31

| gRNA Name | Targeting Domain | Cas9 species | SEQ ID NO: |
|---|---|---|---|
| PDCD1-3202 | GGUGCUACAACUGGGCUGGCGGC | S. aureus | 481 |
| PDCD1-3201 | GUGCUACAACUGGGCUGGCGGC | S. aureus | 482 |
| PDCD1-531 | GCUACAACUGGGCUGGCGGC | S. aureus | 483 |
| PDCD1-3190 | GACGACUGGCCAGGGCGCCUG | S. aureus | 484 |
| PDCD1-3188 | GACUGGCCAGGGCGCCUG | S. aureus | 485 |
| PDCD1-3216 | GCAUGCCUGGAGCAGCCCCAC | S. aureus | 486 |
| PDCD1-3195 | GGGGGGUUCCAGGGCCUGUCUG | S. aureus | 487 |
| PDCD1-3194 | GGGGGUUCCAGGGCCUGUCUG | S. aureus | 488 |
| PDCD1-94 | GGGGUUCCAGGGCCUGUCUG | S. aureus | 489 |
| PDCD1-557 | GAGAGCCUGCGGGCAGAGCU | S. aureus | 490 |
| PDCD1-3234 | GAGCCUGCGGGCAGAGCU | S. aureus | 491 |
| PDCD1-3196 | GGGGGGGUUCCAGGGCCUGUCUG | S. aureus | 492 |
| PDCD1-3222 | GCAGGGCUGGGGAGAAGGUGG | S. aureus | 493 |
| PDCD1-3220 | GGGCUGGGGAGAAGGUGG | S. aureus | 494 |
| PDCD1-3224 | GAGCAGGGCUGGGGAGAAGGUGG | S. aureus | 495 |
| PDCD1-3773 | GGCCGCCCACGACACCAACCAC | S. aureus | 496 |
| PDCD1-3772 | GCCGCCCACGACACCAACCAC | S. aureus | 497 |
| PDCD1-3770 | GCCCACGACACCAACCAC | S. aureus | 498 |
| PDCD1-3785 | GGUUUGGAACUGGCCGGCUGGC | S. aureus | 499 |
| PDCD1-3784 | GUUUGGAACUGGCCGGCUGGC | S. aureus | 500 |
| PDCD1-108 | GUCUGGGCGGUGCUACAACU | S. pyogenes | 508 |
| PDCD1-105 | GGCGCCCUGGCCAGUCGUCU | S. pyogenes | 509 |
| PDCD1-109 | GGGCGGUGCUACAACUGGGC | S. pyogenes | 510 |
| PDCD1-114 | GGCCAGGAUGGUUCUUAGGU | S. pyogenes | 511 |
| PDCD1-117 | GGAUGGUUCUUAGGUAGGUG | S. pyogenes | 512 |
| PDCD1-2694 | GAAGGCGGCACUCUGGU | S. pyogenes | 513 |
| PDCD1-232 | GCCCUGGCCAGUCGUCU | S. pyogenes | 514 |
| PDCD1-251 | GCCCAGACGACUGGCCA | S. pyogenes | 515 |
| PDCD1-242 | GAUGGUUCUUAGGUAGG | S. pyogenes | 516 |
| PDCD1-2540 | GGCGGAGGUGAGCGGAA | S. pyogenes | 517 |
| PDCD1-2541 | GGAAGGGAAACUGUCCC | S. pyogenes | 518 |
| PDCD1-16 | GCGUGACUUCCACAUGAGCG | S. pyogenes | 519 |
| PDCD1-4 | GCCCUGCUCGUGGUGACCGA | S. pyogenes | 520 |
| PDCD1-52 | GGUGCCGCUGUCAUUGCGCC | S. pyogenes | 521 |
| PDCD1-42 | GCUCUCUUUGAUCUGCGCCU | S. pyogenes | 522 |
| PDCD1-77 | GAAGGUGGCGUUGUCCCCUU | S. pyogenes | 523 |
| PDCD1-15 | GUGUCACACAACUGCCCAAC | S. pyogenes | 524 |
| PDCD1-71 | GCUUGUCCGUCUGGUUGCUG | S. pyogenes | 525 |
| PDCD1-47 | GAUCUGCGCCUUGGGGGCCA | S. pyogenes | 526 |
| PDCD1-53 | GGGCCCUGACCACGCUCAUG | S. pyogenes | 527 |
| PDCD1-57 | GCAGUUGUGUGACACGGAAG | S. pyogenes | 528 |
| PDCD1-21 | GACAGCGGCACCUACCUCUG | S. pyogenes | 529 |
| PDCD1-181 | GUGGAAGUCACGCCCGU | S. pyogenes | 530 |
| PDCD1-133 | GCUCGUGGUGACCGAAG | S. pyogenes | 531 |
| PDCD1-147 | GCCCGGCGCAAUGACAG | S. pyogenes | 532 |
| PDCD1-179 | GCCGCUGUCAUUGCGCC | S. pyogenes | 533 |
| PDCD1-149 | GCGGCACCUACCUCUGU | S. pyogenes | 534 |
| PDCD1-204 | GGUGGCGUUGUCCCCUU | S. pyogenes | 535 |
| PDCD1-200 | GAAGCUCUCCGAUGUGU | S. pyogenes | 536 |
| PDCD1-184 | GUUGUGUGACACGGAAG | S. pyogenes | 537 |
| PDCD1-192 | GCUGGCUGCGGUCCUCG | S. pyogenes | 538 |
| PDCD1-193 | GCUGCGGUCCUCGGGGA | S. pyogenes | 539 |
| PDCD1-385 | GACGUUACCUCGUGCGGCCC | S. pyogenes | 540 |
| PDCD1-266 | GGUGUCGUGGGCGGCCUGCU | S. pyogenes | 541 |
| PDCD1-379 | GCCCACGACACCAACCACCA | S. pyogenes | 542 |
| PDCD1-268 | GCAGCCUGGUGCUGCUAGUC | S. pyogenes | 543 |
| PDCD1-270 | GGUGCUGCUAGUCUGGGUCC | S. pyogenes | 544 |
| PDCD1-382 | GGACCCAGACUAGCAGCACC | S. pyogenes | 545 |
| PDCD1-362 | GGCACUUCUGCCCUUCUCUC | S. pyogenes | 546 |
| PDCD1-267 | GGGCGGCCUGCUGGGCAGCC | S. pyogenes | 547 |

TABLE 32

| gRNA Name | Targeting Domain | Cas9 species | SEQ ID NO: |
|---|---|---|---|
| PDCD1-3856 | GGGCAGCCUGGUGCUGCUAGU | S. aureus | 501 |
| PDCD1-720 | GGCAGCCUGGUGCUGCUAGU | S. aureus | 502 |
| PDCD1-3855 | GCAGCCUGGUGCUGCUAGU | S. aureus | 503 |
| PDCD1-369 | GGCUGGCCUGGGUGAGGGGC | S. aureus | 504 |
| PDCD1-3786 | GGGUUUGGAACUGGCCGGCUGGC | S. aureus | 505 |
| PDCD1-3859 | GCUGGGCAGCCUGGUGCUGCUAGU | S. aureus | 506 |
| PDCD1-3781 | GGCCGGCUGGCCUGGGUGAGGGGC | S. aureus | 507 |
| PDCD1-381 | GCAGCACCAGGCUGCCCAGC | S. pyogenes | 548 |
| PDCD1-368 | GCUGGCCUGGGUGAGGGGCU | S. pyogenes | 549 |
| PDCD1-472 | GUUACCUCGUGCGGCCC | S. pyogenes | 550 |
| PDCD1-316 | GUCGUGGGCGGCCUGCU | S. pyogenes | 551 |
| PDCD1-462 | GUUUGGAACUGGCCGGC | S. pyogenes | 552 |
| PDCD1-322 | GGCCGUCAUCUGCUCCC | S. pyogenes | 553 |
| PDCD1-320 | GCUGCUAGUCUGGGUCC | S. pyogenes | 554 |
| PDCD1-318 | GCCUGGUGCUGCUAGUC | S. pyogenes | 555 |

TABLE 33

| Primer | | | SEQ |
|---|---|---|---|
| name | Sequence | Exon | ID NO: |
| GWED259 | CACTGCCTCTGTCACTCTCG | PD1_exon_1_5′ | 556 |
| GWED260 | AGGGACTGAGAGTGAAAGGT | PD1_exon_1_3′ | 557 |
| JFPR004 | CAGGATGCCCAAGGGTCAG | PD1_exon_2_5′ | 558 |
| JFPR004R | GGAGCTCCTGATCCTGTGC | PD1_exon_2_3′ | 559 |
| GWED257 | AATGGTGACCGGCATCTCTG | PD1_exon_3_5′ | 560 |
| JFPR005 | CTGCACAGGATCAGGAGCTC | PD1_exon_3_5′ | 561 |
| JFPR005R | AGAATGTGAGTCCTGCAGGC | PD1_exon_3_3′ | 562 |

[1652] Delivery of Cas9 mRNA and gRNA as RNA Molecules to T Cells

[1653] To demonstrate Cas9-mediated cutting in primary CD4+ T cells, S. pyogenes Cas9 and a gRNA designed against the TCR beta chain (TRBC-210 (GCGCUGACGAUCUGGGUGAC) (SEQ ID NO:413)) or the TCR alpha chain (TRAC-4 (GCUGGUACACGGCAGGGUCA) (SEQ ID NO:453)) were delivered as RNA molecules to T cells via electroporation. In this embodiment, both the Cas9 and gRNA were in vitro transcribed using a T7 polymerase. A 5′ ARCA cap was added to both RNA species simultaneous to transcription while a polyA tail was added after transcription to the 3′ end of the RNA species by an E. coli polyA polymerase. To generate CD4+ T cells modified at the TRBC1 and TRBC2 loci, 10 ug of Cas9 mRNA and 10 ug of TRBC-210 (GCGCUGACGAUCUGGGUGAC) (SEQ ID NO:413) gRNA were introduced to the cells by electroporation. In the same experiment, we also targeted the TRAC gene by introducing 10 ug of Cas9 mRNA with 10 ug of TRAC-4 (GCUGGUACACGGCAGGGUCA) (SEQ ID NO:453) gRNA. A gRNA targeting the AAVS1 (GUCCCCUCCACCCCACAGUG) (SEQ ID NO:51201) genomic site was used as an experimental control. Prior to electroporation, the T cells were cultured in RPMI 1640 supplemented with 10% FBS and recombinant IL-2. The cells were activated using CD3/CD28 beads and expanded for at least 3 days. Subsequent to introduction of the mRNA to the activated T cells, CD3 expression on the cells was monitored at 24, 48 and 72 hours post electroporation by flow cytometry using a fluorescein (APC) conjugated antibody specific for CD3. At 72 hours, a population of CD3 negative cells was observed (FIG. 17A and FIG. 17B). To confirm that the generation of CD3 negative cells was a result of genome editing at the TRBC loci, genomic DNA was harvested and a T7E1 assay was performed. Indeed, the data confirm the presence of DNA modifications at the TRBC2 locus and TRAC locus (FIG. 17C).

[1654] Delivery of Cas9/gRNA RNP to T Cells

[1655] To demonstrate Cas9-mediated cutting in Jurkat T cells, S. aureus Cas9 and a gRNA designed against the TCR alpha chain (TRAC-233 (GUGAAUAGGCAGACAGACUUGUCA) (SEQ ID NO:474)) were delivered as a ribonucleic acid protein complex (RNP) by electroporation. In this embodiment, the Cas9 was expressed in E. coli and purified. Specifically, the HJ29 plasmid encoding Cas9 was transformed into Rosetta™ 2 (DE3) chemically competent cells (EMD Millipore #71400-4) and plated onto LB plates with appropriate antibiotics for selection and incubated at 37° C. overnight. A 10 mL starter culture of Brain Heart Infusion Broth (Teknova #B9993) with appropriate antibiotics was inoculated with 4 colonies and grown at 37° C. with shaking at 220 rpms. After growing overnight, the starter culture was added to 1 L of Terrific Broth Complete (Teknova #T7060) with appropriate antibiotics plus supplements and grown at 37° C. with shaking at 220 rpms. The temperature was gradually reduced to 18° C. and expression of the gene was induced by addition of IPTG to 0.5 mM when the OD600 was greater than 2.0. The induction was allowed to continue overnight followed by harvesting the cells by centrifugation and resuspension in TG300 (50 mM Tris pH8.0, 300 mM NaCl, 20% glycerol, 1 mM TCEP, protease inhibitor tablets (Thermo Scientific #88266)) and stored at −80° C.

[1656] The cells were lysed by thawing the frozen suspension, followed by two passes through a LM10 Microfluidizer® set to 18000 psi. The extract was clarified via centrifugation and the soluble extract was captured via batch incubation with Ni-NTA Agarose resin (Qiagen #30230) at 4° C. The slurry was poured into a gravity flow column, washed with TG300+30 mM Imidazole and then eluted the protein of interest with TG300+300 mM Imidazole. The Ni eluent was diluted with an equal volume of HG100 (50 mM Hepes pH7.5, 100 mM NaCl, 10% glycerol, 0.5 mM TCEP) and loaded onto a HiTrap SP HP column (GE Healthcare Life Sciences #17-1152-01) and eluted with a 30 column volume gradient from HG100 to HG1000 (50 mM Hepes pH7.5, 1000 mM NaCl, 10% glycerol, 0.5 mM TCEP). Appropriate fractions were pooled after assaying with an SDS-PAGE gel and concentrated for loading onto a SRT10 SEC300 column (Sepax #225300-21230) equilibrated in HG150 (10 mM Hepes pH7.5, 150 mM NaCl, 20% glycerol, 1 mM TCEP). Fractions were assayed by SDS-PAGE and appropriately pooled, concentrated to at least 5 mg/ml.

[1657] The gRNA was generated by in vitro transcription using a T7 polymerase. A 5′ ARCA cap was added to the RNA simultaneous to transcription while a polyA tail was added after transcription to the 3′ end of the RNA species by an E. coli polyA polymerase. Prior to introduction into the cells, the purified Cas9 and gRNA were mixed and allowed to form complexes for 10 minutes. The RNP solution was subsequently introduced into Jurkat T cells by electroporation. Prior to and after electroporation, the cells were cultured in RPMI1640 media supplemented with 10% FBS. CD3 expression on the cells was monitored at 24, 48 and 72 hours post electroporation by flow cytometry using a fluorescein conjugated antibody specific for CD3. At 48 and 72 hours, a population of CD3 negative cells was observed (FIG. 18A and FIG. 18B). To confirm that the generation of CD3 negative cells was a result of genome editing at the TRAC locus, genomic DNA was harvested and a T7E1 assay was performed. Indeed, the data confirm the presence of DNA modifications at the TRAC locus (FIG. 18C).

### Example 5: Assessing Effect of 2RNA Modifications on T Cell Viability

[1658] In order to assess how gRNA modifications affect T cell viability, S. pyogenes Cas9 mRNA was delivered to Jurkat T cells in combination with an AAVS1 gRNA (GUCCCCUCCACCCCACAGUG) (SEQ ID NO:51201) with or without modification. Specifically, 4 different combinations of modification were analyzed, (1) gRNA with a 5′ Anti-Reverse Cap Analog (ARCA) cap (see FIG. 19) and polyA tail, (2) gRNA with a 5′ ARCA cap only, (3) gRNA with a polyA tail only, (4) gRNA without any modification. In order to generate all of four of the aforemention versions of modified gRNAs, a DNA template comprising a T7 promoter, AAVS1 gRNA target sequence (GUCCCCUCCACCCCACAGUG) (SEQ ID NO:51201), and S. pyogenes TRACR sequence. For all gRNAs, T7 polymerase was used to generate the gRNA in the presence of 7.5 mM UTP, 7.5 mM GTP, 7.5 mM CTP and 7.5 mM ATP. In order to modify the gRNAs with a 5′ ARCA cap, 6.0 mM of ARCA analog was added to the NTP pool. Consequently, only 1.5 mM of GTP was added while the rest of the NTP pool remained at the same concentration: 7.5 mM UTP, 7.5 mM CTP and 7.5 mM ATP. In order to add a polyA tail to the gRNAs a recombinant polyA polymerase that was purified from E. coli was used to add a series of As to the end of the transcribed gRNA after the in vitro polymerase reaction was terminated. Termination was achieved by eliminating the DNA template with DNase I. The polyA tail reaction was performed for approximately 40 minutes. Regardless of the gRNA modification, all gRNA preparations were purified by phenol:choroform extraction followed by isopropanol precipitation. Once the gRNAs were generated, Jurkat T cells were electroporated with S. pyogenes Cas9 mRNA (modified with a 5′ ARCA cap and polyA tail) and one of the 4 different modified AAVS1-specific gRNAs. Following electroporation cell viability was determined by performing an Annexin-V and propidium iodide double stain. The fraction of live cells, which do not stain for Annexin-V and PI was determined by flow cytometry. The results are quantified in FIG. 20. Based on the fraction of live cells, it is concluded that gRNAs that have been modified with both a 5′ ARCA cap and polyA tail are the least toxic to Jurkat T cells when introduced by electroporation.

### Example 6: Delivery of Cas9/gRNA RNP to Naïve T Cells

[1659] To demonstrate Cas9-mediated cutting in naïve T cells, S. aureus Cas9 and a gRNA designed against the TCR alpha chain with targeting domain GUGAAUAGGCAGACAGACUUGUCA (SEQ ID NO:474) were delivered as a ribonucleic acid protein complex (RNP) by electroporation. In this embodiment, the Cas9 was expressed in E. coli and purified. Specifically, the HJ29 plasmid encoding Cas9 was transformed into Rosetta™ 2 (DE3) chemically competent cells (EMD Millipore #71400-4) and plated onto LB plates with appropriate antibiotics for selection and incubated at 37° C. overnight. A 10 mL starter culture of Brain Heart Infusion Broth (Teknova #B9993) with appropriate antibiotics was inoculated with 4 colonies and grown at 37° C. with shaking at 220 rpms. After growing overnight, the starter culture was added to 1 L of Terrific Broth Complete (Teknova #T7060) with appropriate antibiotics plus supplements and grown at 37° C. with shaking at 220 rpms. The temperature was gradually reduced to 18° C. and expression of the gene was induced by addition of IPTG to 0.5 mM when the OD600 was greater than 2.0. The induction was allowed to continue overnight followed by harvesting the cells by centrifugation and resuspension in TG300 (50 mM Tris pH8.0, 300 mM NaCl, 20% glycerol, 1 mM TCEP, protease inhibitor tablets (Thermo Scientific #88266)) and stored at −80° C.

[1660] The cells were lysed by thawing the frozen suspension, followed by two passes through a LM10 Microfluidizer® set to 18000 psi. The extract was clarified via centrifugation and the soluble extract was captured via batch incubation with Ni-NTA Agarose resin (Qiagen #30230) at 4° C. The slurry was poured into a gravity flow column, washed with TG300+30 mM Imidazole and then eluted the protein of interest with TG300+300 mM Imidazole. The Ni eluent was diluted with an equal volume of HG100 (50 mM Hepes pH7.5, 100 mM NaCl, 10% glycerol, 0.5 mM TCEP) and loaded onto a HiTrap SP HP column (GE Healthcare Life Sciences #17-1152-01) and eluted with a 30 column volume gradient from HG100 to HG1000 (50 mM Hepes pH7.5, 1000 mM NaCl, 10% glycerol, 0.5 mM TCEP). Appropriate fractions were pooled after assaying with an SDS-PAGE gel and concentrated for loading onto a SRT10 SEC300 column (Sepax #225300-21230) equilibrated in HG150 (10 mM Hepes pH7.5, 150 mM NaCl, 20% glycerol, 1 mM TCEP). Fractions were assayed by SDS-PAGE and appropriately pooled, concentrated to at least 5 mg/ml.

[1661] The gRNA with targeting domain GUGAAUAGGCAGACAGACUUGUCA (SEQ ID NO:474) was generated by in vitro transcription using a T7 polymerase. A 5′ ARCA cap was added to the RNA simultaneous to transcription while a polyA tail was added after transcription to the 3′ end of the RNA species by an E. coli polyA polymerase. In this embodiment, the T cells were isolated from fresh cord blood by a Ficoll gradient followed by positive selection using CD3 magnetic beads. The cells were subsequently cultured in RPMI1640 media supplemented with 10% FBS, IL-7 (5 ng/ml) and IL-15 (5 ng/ml). 24 hours after isolation, the cells were electroporated with a RNP solution that was generated by incubating the purified Cas9 and gRNA for 10 minutes at room temperature. CD3 expression on the cells was monitored at 96 hours post electroporation by flow cytometry using an APC-conjugated antibody specific for CD3. A population of CD3 negative cells was observed in cells that in which a functional RNP complex was provided versus a negative control that received the gRNA and a non-functional Cas9 (FIG. 21A and FIG. 21B). To confirm that the generation of CD3 negative cells was a result of genome editing at the TRAC locus, genomic DNA was harvested and a T7E1 assay was performed. Indeed, the data confirm the presence of DNA modifications at the TRAC locus (FIG. 21C).

### Example 7: Targeting of the PDCD1 Locus by Delivery of Cas9 mRNA and gRNA as RNA Molecules or as Cas9/gRNA RNP to Jurkat T Cells

[1662] Delivery of Cas9 mRNA and gRNA as RNA Molecules to Jurkat T Cells

[1663] To demonstrate Cas9-mediated cutting at the PDCD1 locus in Jurkat T cells, S. pyogenes Cas9 and a gRNA with a targeting domain GUCUGGGCGGUGCUACAACU (SEQ ID NO:508) designed against the PDCD1 locus were delivered as RNA molecules to T cells via electroporation. In this embodiment, both the Cas9 and gRNA were in vitro transcribed using a T7 polymerase. A 5′ ARCA cap was added to both RNA species simultaneous to transcription while a polyA tail was added after transcription to the 3′ end of the RNA species by an E. coli polyA polymerase. To generate Jurkat T cells modified at the PDCD1 locus, 10 ug of Cas9 mRNA and 10 ug of gRNA with a targeting domain GUCUGGGCGGUGCUACAACU (SEQ ID NO:508) were introduced to the cells by electroporation. Prior to electroporation, the T cells were cultured in RPMI 1640 supplemented with 10% FBS. At 24, 48 and 72 hours, genomic DNA was isolated and a T7E1 assay was performed at the PDCD1 locus. Indeed, the data confirm the presence of DNA modifications at the PDCD1 locus (FIG. 22).

[1664] Delivery of Cas9/gRNA RNP to Jurkat T Cells

[1665] To demonstrate Cas9-mediated cutting at the PDCD1 locus in Jurkat T cells, S. pyogenes Cas9 and a gRNA designed against the PDCD1 locus with the targeting domain GUCUGGGCGGUGCUACAACU (SEQ ID NO:508) were delivered as a ribonucleic acid protein complex (RNP) by electroporation. In this embodiment, the Cas9 was expressed in E. coli and purified. Specifically, the HJ29 plasmid encoding Cas9 was transformed into Rosetta™ 2 (DE3) chemically competent cells (EMD Millipore #71400-4) and plated onto LB plates with appropriate antibiotics for selection and incubated at 37° C. overnight. A 10 mL starter culture of Brain Heart Infusion Broth (Teknova #B9993) with appropriate antibiotics was inoculated with 4 colonies and grown at 37° C. with shaking at 220 rpms. After growing overnight, the starter culture was added to 1 L of Terrific Broth Complete (Teknova #T7060) with appropriate antibiotics plus supplements and grown at 37° C. with shaking at 220 rpms. The temperature was gradually reduced to 18° C. and expression of the gene was induced by addition of IPTG to 0.5 mM when the OD600 was greater than 2.0. The induction was allowed to continue overnight followed by harvesting the cells by centrifugation and resuspension in TG300 (50 mM Tris pH8.0, 300 mM NaCl, 20% glycerol, 1 mM TCEP, protease inhibitor tablets (Thermo Scientific #88266)) and stored at −80° C.

[1666] The cells were lysed by thawing the frozen suspension, followed by two passes through a LM10 Microfluidizer® set to 18000 psi. The extract was clarified via centrifugation and the soluble extract was captured via batch incubation with Ni-NTA Agarose resin (Qiagen #30230) at 4° C. The slurry was poured into a gravity flow column, washed with TG300+30 mM Imidazole and then eluted the protein of interest with TG300+300 mM Imidazole. The Ni eluent was diluted with an equal volume of HG100 (50 mM Hepes pH7.5, 100 mM NaCl, 10% glycerol, 0.5 mM TCEP) and loaded onto a HiTrap SP HP column (GE Healthcare Life Sciences #17-1152-01) and eluted with a 30 column volume gradient from HG100 to HG1000 (50 mM Hepes pH7.5, 1000 mM NaCl, 10% glycerol, 0.5 mM TCEP). Appropriate fractions were pooled after assaying with an SDS-PAGE gel and concentrated for loading onto a SRT10 SEC300 column (Sepax #225300-21230) equilibrated in HG150 (10 mM Hepes pH7.5, 150 mM NaCl, 20% glycerol, 1 mM TCEP). Fractions were assayed by SDS-PAGE and appropriately pooled, concentrated to at least 5 mg/ml.

[1667] The gRNA with the targeting domain GUCUGGGCGGUGCUACAACU (SEQ ID NO:508) was generated by in vitro transcription using a T7 polymerase. A 5′ ARCA cap was added to the RNA simultaneous to transcription while a polyA tail was added after transcription to the 3′ end of the RNA species by an E. coli polyA polymerase. Prior to introduction into the cells, the purified Cas9 and gRNA were mixed and allowed to form complexes for 10 minutes. The RNP solution was subsequently introduced into Jurkat T cells by electroporation. Prior to and after electroporation, the cells were cultured in RPMI1640 media supplemented with 10% FBS. At 24, 48 and 72 hours, genomic DNA was isolated and a T7E1 assay was performed at the PDCD1 locus. Indeed, the data confirm the presence of DNA modifications at the PDCD1 locus (FIG. 22).

### INCORPORATION BY REFERENCE

[1668] All publications, patents, sequence listings, and patent applications mentioned herein are hereby incorporated by reference in their entirety as if each individual publication, patent, sequence listing, or patent application was specifically and individually indicated to be incorporated by reference. In case of conflict, the present application, including any definitions herein, will control.

### EQUIVALENTS

[1669] Those skilled in the art will recognize, or be able to ascertain using no more than routine experimentation, many equivalents to the specific embodiments of the invention described herein. Such equivalents are intended to be encompassed by the following claims. Other embodiments are also within the following claims.

The application's sequence listing, which the Patent Office published only in electronic form, follows.

SEQUENCE LISTING (51201 sequences)

SEQ ID NO: 1 - protein, 1344 aa, Streptococcus mutans
KKPYSIGLDIGTNSVGWAVVTDDYKVPAKKMKVLGNTDKSHIEKNLLGALLFDSGNTAEDRRLKRTARRRYTRRRNRILYLQEIFSEEMGKVDDSFFHRLEDSFLVTEDKRGERHPIFGNLEEEVKYHENFPTIYHLRQYLADNPEKVDLRLVYLALAHIIKFRGHFLIEGKFDTRNNDVQRLFQEFLAVYDNTFENSSLQEQNVQVEEILTDKISKSAKKDRVLKLFPNEKSNGRFAEFLKLIVGNQADFKKHFELEEKAPLQFSKDTYEEELEVLLAQIGDNYAELFLSAKKLYDSILLSGILTVTDVGTKAPLSASMIQRYNEHQMDLAQLKQFIRQKLSDKYNEVFSDVSKDGYAGYIDGKTNQEAFYKYLKGLLNKIEGSGYFLDKIEREDFLRKQRTFDNGSIPHQIHLQEMRAIIRRQAEFYPFLADNQDRIEKLLTFRIPYYVGPLARGKSDFAWLSRKSADKITPWNFDEIVDKESSAEAFINRMTNYDLYLPNQKVLPKHSLLYEKFTVYNELTKVKYKTEQGKTAFFDANMKQEIFDGVFKVYRKVTKDKLMDFLEKEFDEFRIVDLTGLDKENKVFNASYGTYHDLCKILDKDFLDNSKNEKILEDIVLTLTLFEDREMIRKRLENYSDLLTKEQVKKLERRHYTGWGRLSAELIHGIRNKESRKTILDYLIDDGNSNRNFMQLINDDALSFKEEIAKAQVIGETDNLNQVVSDIAGSPAIKKGILQSLKIVDELVKIMGHQPENIVVEMARENQFTNQGRRNSQQRLKGLTDSIKEFGSQILKEHPVENSQLQNDRLFLYYLQNGRDMYTGEELDIDYLSQYDIDHIIPQAFIKDNSIDNRVLTSSKENRGKSDDVPSKDVVRKMKSYWSKLLSAKLITQRKFDNLTKAERGGLTDDDKAGFIKRQLVETRQITKHVARILDERFNTETDENNKKIRQVKIVTLKSNLVSNFRKEFELYKVREINDYHHAHDAYLNAVIGKALLGVYPQLEPEFVYGDYPHFHGHKENKATAKKFFYSNIMNFFKKDDVRTDKNGEIIWKKDEHISNIKKVLSYPQVNIVKKVEEQTGGFSKESILPKGNSDKLIPRKTKKFYWDTKKYGGFDSPIVAYSILVIADIEKGKSKKLKTVKALVGVTIMEKMTFERDPVAFLERKGYRNVQEENIIKLPKYSLFKLENGRKRLLASARELQKGNEIVLPNHLGTLLYHAKNIHKVDEPKHLDYVDKHKDEFKELLDVVSNFSKKYTLAEGNLEKIKELYAQNNGEDLKELASSFINLLTFTAIGAPATFKFFDKNIDRKRYTSTTEILNATLIHQSITGLYETRIDLNKLGGD

SEQ ID NO: 2 - protein, 1367 aa, Streptococcus pyogenes
DKKYSIGLDIGTNSVGWAVITDEYKVPSKKFKVLGNTDRHSIKKNLIGALLFDSGETAEATRLKRTARRRYTRRKNRICYLQEIFSNEMAKVDDSFFHRLEESFLVEEDKKHERHPIFGNIVDEVAYHEKYPTIYHLRKKLVDSTDKADLRLIYLALAHMIKFRGHFLIEGDLNPDNSDVDKLFIQLVQTYNQLFEENPINASGVDAKAILSARLSKSRRLENLIAQLPGEKKNGLFGNLIALSLGLTPNFKSNFDLAEDAKLQLSKDTYDDDLDNLLAQIGDQYADLFLAAKNLSDAILLSDILRVNTEITKAPLSASMIKRYDEHHQDLTLLKALVRQQLPEKYKEIFFDQSKNGYAGYIDGGASQEEFYKFIKPILEKMDGTEELLVKLNREDLLRKQRTFDNGSIPHQIHLGELHAILRRQEDFYPFLKDNREKIEKILTFRIPYYVGPLARGNSRFAWMTRKSEETITPWNFEEVVDKGASAQSFIERMTNFDKNLPNEKVLPKHSLLYEYFTVYNELTKVKYVTEGMRKPAFLSGEQKKAIVDLLFKTNRKVTVKQLKEDYFKKIECFDSVEISGVEDRFNASLGTYHDLLKIIKDKDFLDNEENEDILEDIVLTLTLFEDREMIEERLKTYAHLFDDKVMKQLKRRRYTGWGRLSRKLINGIRDKQSGKTILDFLKSDGFANRNFMQLIHDDSLTFKEDIQKAQVSGQGDSLHEHIANLAGSPAIKKGILQTVKVVDELVKVMGRHKPENIVIEMARENQTTQKGQKNSRERMKRIEEGIKELGSQILKEHPVENTQLQNEKLYLYYLQNGRDMYVDQELDINRLSDYDVDHIVPQSFLKDDSIDNKVLTRSDKNRGKSDNVPSEEVVKKMKNYWRQLLNAKLITQRKFDNLTKAERGGLSELDKAGFIKRQLVETRQITKHVAQILDSRMNTKYDENDKLIREVKVITLKSKLVSDFRKDFQFYKVREINNYHHAHDAYLNAVVGTALIKKYPKLESEFVYGDYKVYDVRKMIAKSEQEIGKATAKYFFYSNIMNFFKTEITLANGEIRKRPLIETNGETGEIVWDKGRDFATVRKVLSMPQVNIVKKTEVQTGGFSKESILPKRNSDKLIARKKDWDPKKYGGFDSPTVAYSVLVVAKVEKGKSKKLKSVKELLGITIMERSSFEKNPIDFLEAKGYKEVKKDLIIKLPKYSLFELENGRKRMLASAGELQKGNELALPSKYVNFLYLASHYEKLKGSPEDNEQKQLFVEQHKHYLDEIIEQISEFSKRVILADANLDKVLSAYNKHRDKPIREQAENIIHLFTLTNLGAPAAFKYFDTTIDRKRYTSTKEVLDATLIHQSITGLYETRIDLSQLGGD

SEQ ID NO: 3 - protein, 1387 aa, Streptococcus thermophilus
TKPYSIGLDIGTNSVGWAVTTDNYKVPSKKMKVLGNTSKKYIKKNLLGVLLFDSGITAEGRRLKRTARRRYTRRRNRILYLQEIFSTEMATLDDAFFQRLDDSFLVPDDKRDSKYPIFGNLVEEKAYHDEFPTIYHLRKYLADSTKKADLRLVYLALAHMIKYRGHFLIEGEFNSKNNDIQKNFQDFLDTYNAIFESDLSLENSKQLEEIVKDKISKLEKKDRILKLFPGEKNSGIFSEFLKLIVGNQADFRKCFNLDEKASLHFSKESYDEDLETLLGYIGDDYSDVFLKAKKLYDAILLSGFLTVTDNETEAPLSSAMIKRYNEHKEDLALLKEYIRNISLKTYNEVFKDDTKNGYAGYIDGKTNQEDFYVYLKKLLAEFEGADYFLEKIDREDFLRKQRTFDNGSIPYQIHLQEMRAILDKQAKFYPFLAKNKERIEKILTFRIPYYVGPLARGNSDFAWSIRKRNEKITPWNFEDVIDKESSAEAFINRMTSFDLYLPEEKVLPKHSLLYETFNVYNELTKVRFIAESMRDYQFLDSKQKKDIVRLYFKDKRKVTDKDIIEYLHAIYGYDGIELKGIEKQFNSSLSTYHDLLNIINDKEFLDDSSNEAIIEEIIHTLTIFEDREMIKQRLSKFENIFDKSVLKKLSRRHYTGWGKLSAKLINGIRDEKSGNTILDYLIDDGISNRNFMQLIHDDALSFKKKIQKAQIIGDEDKGNIKEVVKSLPGSPAIKKGILQSIKIVDELVKVMGGRKPESIVVEMARENQYTNQGKSNSQQRLKRLEKSLKELGSKILKENIPAKLSKIDNNALQNDRLYLYYLQNGKDMYTGDDLDIDRLSNYDIDHIIPQAFLKDNSIDNKVLVSSASNRGKSDDVPSLEVVKKRKTFWYQLLKSKLISQRKFDNLTKAERGGLSPEDKAGFIQRQLVETRQITKHVARLLDEKFNNKKDENNRAVRTVKIITLKSTLVSQFRKDFELYKVREINDFHHAHDAYLNAVVASALLKKYPKLEPEFVYGDYPKYNSFRERKSATEKVYFYSNIMNIFKKSISLADGRVIERPLIEVNEETGESVWNKESDLATVRRVLSYPQVNVVKKVEEQNHGLDRGKPKGLFNANLSSKPKPNSNENLVGAKEYLDPKKYGGYAGISNSFTVLVKGTIEKGAKKKITNVLEFQGISILDRINYRKDKLNFLLEKGYKDIELIIELPKYSLFELSDGSRRMLASILSTNNKRGEIHKGNQIFLSQKFVKLLYHAKRISNTINENHRKYVENHKKEFEELFYYILEFNENYVGAKKNGKLLNSAFQSWQNHSIDELCSSFIGPTGSERKGLFELTSRGSAADFEFLGVKIPRYRDYTPSSLLKDATLIHQSVTGLYETRIDLAKLGEG

SEQ ID NO: 4 - protein, 1333 aa, Listeria innocua
KKPYTIGLDIGTNSVGWAVLTDQYDLVKRKMKIAGDSEKKQIKKNFWGVRLFDEGQTAADRRMARTARRRIERRRNRISYLQGIFAEEMSKTDANFFCRLSDSFYVDNEKRNSRHPFFATIEEEVEYHKNYPTIYHLREELVNSSEKADLRLVYLALAHIIKYRGNFLIEGALDTQNTSVDGIYKQFIQTYNQVFASGIEDGSLKKLEDNKDVAKILVEKVTRKEKLERILKLYPGEKSAGMFAQFISLIVGSKGNFQKPFDLIEKSDIECAKDSYEEDLESLLALIGDEYAELFVAAKNAYSAVVLSSIITVAETETNAKLSASMIERFDTHEEDLGELKAFIKLHLPKHYEEIFSNTEKHGYAGYIDGKTKQADFYKYMKMTLENIEGADYFIAKIEKENFLRKQRTFDNGAIPHQLHLEELEAILHQQAKYYPFLKENYDKIKSLVTFRIPYFVGPLANGQSEFAWLTRKADGEIRPWNIEEKVDFGKSAVDFIEKMTNKDTYLPKENVLPKHSLCYQKYLVYNELTKVRYINDQGKTSYFSGQEKEQIFNDLFKQKRKVKKKDLELFLRNMSHVESPTIEGLEDSFNSSYSTYHDLLKVGIKQEILDNPVNTEMLENIVKILTVFEDKRMIKEQLQQFSDVLDGVVLKKLERRHYTGWGRLSAKLLMGIRDKQSHLTILDYLMNDDGLNRNLMQLINDSNLSFKSIIEKEQVTTADKDIQSIVADLAGSPAIKKGILQSLKIVDELVSVMGYPPQTIVVEMARENQTTGKGKNNSRPRYKSLEKAIKEFGSQILKEHPTDNQELRNNRLYLYYLQNGKDMYTGQDLDIHNLSNYDIDHIVPQSFITDNSIDNLVLTSSAGNREKGDDVPPLEIVRKRKVFWEKLYQGNLMSKRKFDYLTKAERGGLTEADKARFIHRQLVETRQITKNVANILHQRFNYEKDDHGNTMKQVRIVTLKSALVSQFRKQFQLYKVRDVNDYHHAHDAYLNGVVANTLLKVYPQLEPEFVYGDYHQFDWFKANKATAKKQFYTNIMLFFAQKDRIIDENGEILWDKKYLDTVKKVMSYRQMNIVKKTEIQKGEFSKATIKPKGNSSKLIPRKTNWDPMKYGGLDSPNMAYAVVIEYAKGKNKLVFEKKIIRVTIMERKAFEKDEKAFLEEQGYRQPKVLAKLPKYTLYECEEGRRRMLASANEAQKGNQQVLPNHLVTLLHHAANCEVSDGKSLDYIESNREMFAELLAHVSEFAKRYTLAEANLNKINQLFEQNKEGDIKAIAQSFVDLMAFNAMGAPASFKFFETTIERKRYNNLKELLNSTIIYQSITGLYESRKRLDD

SEQ ID NO: 5 - RNA, 96 nt, Artificial Sequence
  Synthetic oligonucleotide
  modified_base (1)..(20): a, c, u, g, unknown or other
  misc_feature (1)..(20): n is a, c, g, or u
nnnnnnnnnnnnnnnnnnnnguuuuagagcuagaaauagcaaguuaaaauaaggcuaguccguuaucaacuugaaaaaguggcaccgagucggugc

SEQ ID NO: 6 - protein, 1082 aa, Neisseria meningitidis
MAAFKPNSINYILGLDIGIASVGWAMVEIDEEENPIRLIDLGVRVFERAEVPKTGDSLAMARRLARSVRRLTRRRAHRLLRTRRLLKREGVLQAANFDENGLIKSLPNTPWQLRAAALDRKLTPLEWSAVLLHLIKHRGYLSQRKNEGETADKELGALLKGVAGNAHALQTGDFRTPAELALNKFEKESGHIRNQRSDYSHTFSRKDLQAELILLFEKQKEFGNPHVSGGLKEGIETLLMTQRPALSGDAVQKMLGHCTFEPAEPKAAKNTYTAERFIWLTKLNNLRILEQGSERPLTDTERATLMDEPYRKSKLTYAQARKLLGLEDTAFFKGLRYGKDNAEASTLMEMKAYHAISRALEKEGLKDKKSPLNLSPELQDEIGTAFSLFKTDEDITGRLKDRIQPEILEALLKHISFDKFVQISLKALRRIVPLMEQGKRYDEACAEIYGDHYGKKNTEEKIYLPPIPADEIRNPVVLRALSQARKVINGVVRRYGSPARIHIETAREVGKSFKDRKEIEKRQEENRKDREKAAAKFREYFPNFVGEPKSKDILKLRLYEQQHGKCLYSGKEINLGRLNEKGYVEIDHALPFSRTWDDSFNNKVLVLGSENQNKGNQTPYEYFNGKDNSREWQEFKARVETSRFPRSKKQRILLQKFDEDGFKERNLNDTRYVNRFLCQFVADRMRLTGKGKKRVFASNGQITNLLRGFWGLRKVRAENDRHHALDAVVVACSTVAMQQKITRFVRYKEMNAFDGKTIDKETGEVLHQKTHFPQPWEFFAQEVMIRVFGKPDGKPEFEEADTLEKLRTLLAEKLSSRPEAVHEYVTPLFVSRAPNRKMSGQGHMETVKSAKRLDEGVSVLRVPLTQLKLKDLEKMVNREREPKLYEALKARLEAHKDDPAKAFAEPFYKYDKAGNRTQQVKAVRVEQVQKTGVWVRNHNGIADNATMVRVDVFEKGDKYYLVPIYSWQVAKGILPDRAVVQGKDEEDWQLIDDSFNFKFSLHPNDLVEVITKKARMFGYFASCHRGTGNINIRIHDLDHKIGKNGILEGIGVKTALSFQKYQIDELGKEIRPCRLKKRPPVR

SEQ ID NO: 7 - protein, 1368 aa, Streptococcus pyogenes [sequence omitted]

SEQ ID NO: 8 - protein, 12 aa, Artificial Sequence
  Synthetic peptide
  VARIANT (2)..(2): Xaa is Ile or "Val" or "Met" or "Leu" or "Thr"
  VARIANT (4)..(4): Xaa is Thr or "Ile" or "Val" or "Ser" or "Asn" or "Tyr" or "Glu" or "Leu"
  VARIANT (5)..(5): Xaa is Asn or "Ser" or "Gly" or "Ala" or "Asp" or "Thr" or "Arg" or "Met" or "Phe"
  VARIANT (6)..(6): Xaa is Ser or "Tyr" or "Asn" or "Phe"
  VARIANT (7)..(7): Xaa is Val or "Ile" or "Leu" or "Cys" or "Thr" or "Phe"
  VARIANT (9)..(9): Xaa is Trp or "Phe" or "Val" or "Tyr" or "Ser" or "Leu"
  VARIANT (10)..(10): Xaa is Ala or "Ser" or "Cys" or "Val" or "Gly"
  VARIANT (11)..(11): Xaa is Val or "Ile" or "Leu" or "Ala" or "Met" or "His"
  VARIANT (12)..(12): Xaa is any amino acid or absent
DXGXXXXGXXXX

SEQ ID NO: 9 - protein, 12 aa, Artificial Sequence
  Synthetic peptide
  VARIANT (2)..(2): Xaa is Ile or "Val" or "Met" or "Leu" or "Thr"
  VARIANT (4)..(4): Xaa is Thr or "Ile" or "Val" or "Ser" or "Asn" or "Tyr" or "Glu" or "Leu"
  VARIANT (5)..(5): Xaa is Asn or "Ser" or "Gly" or "Ala" or "Asp" or "Thr" or "Arg" or "Met" or "Phe"
  VARIANT (7)..(7): Xaa is Val or "Ile" or "Leu" or "Cys" or "Thr" or "Phe"
  VARIANT (9)..(9): Xaa is Trp or "Phe" or "Val" or "Tyr" or "Ser" or "Leu"
  VARIANT (10)..(10): Xaa is Ala or "Ser" or "Cys" or "Val" or "Gly"
  VARIANT (11)..(11): Xaa is Val or "Ile" or "Leu" or "Ala" or "Met" or "His"
  VARIANT (12)..(12): Xaa is any amino acid or absent
DXGXXSXGXXXX

SEQ ID NO: 10 - protein, 12 aa, Artificial Sequence
  Synthetic peptide
  VARIANT (4)..(4): Xaa is Thr or "Ile" or "Val" or "Ser" or "Asn" or "Tyr" or "Glu" or "Leu"
  VARIANT (5)..(5): Xaa is Asn or "Ser" or "Gly" or "Ala" or "Asp" or "Thr" or "Arg" or "Met" or "Phe"
  VARIANT (11)..(11): Xaa is Val or "Ile" or "Leu" or "Ala" or "Met" or "His"
  VARIANT (12)..(12): Xaa is any amino acid or absent
DIGXXSVGWAXX

SEQ ID NO: 11 - protein, 12 aa, Artificial Sequence
  Synthetic peptide
  VARIANT (12)..(12): Any non-polar alkyl amino acid or a hydroxyl amino acid
DIGTNSVGWAVX

SEQ ID NO: 12 - protein, 8 aa, Artificial Sequence
  Synthetic peptide
  VARIANT (2)..(2): Xaa is Val or "His
  VARIANT (3)..(3): Xaa is Ile or "Leu" or "Val"
  VARIANT (5)..(5): Xaa is Met or "Thr"
IXXEXARE

SEQ ID NO: 13 - protein, 8 aa, Artificial Sequence
  Synthetic peptide
  VARIANT (3)..(3): Xaa is Ile or "Leu" or "Val"
IVXEMARE

SEQ ID NO: 14 - protein, 8 aa, Artificial Sequence
  Synthetic peptide
  VARIANT (4)..(4): Xaa is His or "Leu"
  VARIANT (7)..(7): Xaa is Arg or "Val"
  VARIANT (8)..(8): Xaa is Glu or "Val"
HHAXDAXX

SEQ ID NO: 15 - protein, 8 aa, Artificial Sequence
  Synthetic peptide
HHAHDAYL

SEQ ID NO: 16 - protein, 30 aa, Artificial Sequence
  Synthetic polypeptide
  VARIANT (2)..(2): Xaa is Lys or "Pro"
  VARIANT (4)..(4): Xaa is Val or "Leu" or "Ile" or "Phe"
  VARIANT (5)..(5): Xaa is Gly or "Ala" or "Ser"
  VARIANT (6)..(6): Xaa is Leu or "Ile" or "Val" or "Phe"
  VARIANT (7)..(26): Any amino acid and this region may encompass 5-20 residues wherein some positions may be absent
  VARIANT (29)..(29): Xaa is Asp or "Glu" or "Asn" or "Gln"
KXYXXXXXXXXXXXXXXXXXXXXXXXTDXY

SEQ ID NO: 17 - protein, 27 aa, Artificial Sequence
  Synthetic peptide
  VARIANT (1)..(1): Xaa is Asp or "Glu" or "Gln" or "Asn"
  VARIANT (2)..(2): Xaa is Leu or "Ile" or "Arg" or "Gln" or "Val" or "Met" or "Lys"
  VARIANT (3)..(3): Xaa is Asp or "Glu"
  VARIANT (5)..(5): Xaa is Ile or "Val" or "Thr" or "Ala" or "Leu"
  VARIANT (6)..(6): Xaa is Val or "Tyr" or "Ile" or "Leu" or "Phe" or "Trp"
  VARIANT (8)..(8): Xaa is Gln or "His" or "Arg" or "Lys" or "Tyr" or "Ile" or "Leu" or "Phe" or "Trp"
  VARIANT (9)..(9): Xaa is Ser or "Ala" or "Asp" or "Thr" or "Lys"
  VARIANT (10)..(10): Xaa is Phe or "Leu" or "Val" or "Lys" or "Tyr" or "Met" or "Ile" or "Arg" or "Ala" or "Glu" or "Asp" or "Gln"
  VARIANT (11)..(11): Xaa is Leu or "Arg" or "Thr" or "Ile" or "Val" or "Ser" or "Cys" or "Tyr" or "Lys" or "Phe" or "Gly"
  VARIANT (12)..(12): Xaa is Lys or "Gln" or "Tyr" or "Thr" or "Phe" or "Leu" or "Trp" or "Met" or "Ala" or "Glu" or "Gly" or "Ser"
  VARIANT (13)..(13): Xaa is Asp or "Ser" or "Asn" or "Arg" or "Leu" or "Thr"
  VARIANT (14)..(14): Xaa is Asp or "Asn" or "Ser"
  VARIANT (15)..(15): Xaa is Ser or "Ala" or "Thr" or "Gly" or "Arg"
  VARIANT (16)..(16): Xaa is Ile or "Leu" or "Phe" or "Ser" or "Arg" or "Tyr" or "Gln" or "Trp" or "Asp" or "Lys" or "His"
  VARIANT (17)..(17): Xaa is Asp or "Ser" or "Ile" or "Asn" or "Glu" or "Ala" or "His" or "Phe" or "Leu" or "Gln" or "Met" or "Gly" or "Tyr" or "Val"
  VARIANT (19)..(19): Xaa is Lys or "Leu" or "Arg" or "Met" or "Thr" or "Phe"
  VARIANT (20)..(20): Xaa is Val or "Leu" or "Ile" or "Ala" or "Thr"
  VARIANT (21)..(21): Xaa is Leu or "Ile" or "Val" or "Ala"
  VARIANT (22)..(22): Xaa is Thr or "Val" or "Cys" or "Glu" or "Ser" or "Ala"
  VARIANT (23)..(23): Xaa is Arg or "Phe" or "Thr" or "Trp" or "Glu" or "Leu" or "Asn" or "Cys" or "Lys" or "Val" or "Ser" or "Gln" or "Ile" or "Tyr" or "His" or "Ala"
  VARIANT (24)..(24): Xaa is Ser or "Pro" or "Arg" or "Lys" or "Asn" or "Ala" or "His" or "Gln" or "Gly" or "Leu"
  VARIANT (25)..(25): Xaa is Asp or "Gly" or "Thr" or "Asn" or "Ser" or "Lys" or "Ala" or "Ile" or "Glu" or "Leu" or "Gln" or " Arg" or "Tyr"
  VARIANT (26)..(26): Xaa is Lys or "Val" or "Ala" or "Glu" or "Tyr" or "Ile" or "Cys" or "Leu" or "Ser" or "Thr" or "Gly" or "Lys" or "Met" or "Asp" or "Phe"
XXXHXXPXXXXXXXXXXNXXXXXXXXN

SEQ ID NO: 18 - protein, 27 aa, Artificial Sequence
  Synthetic peptide
  VARIANT (1)..(1): Xaa is Asp or"Glu
  VARIANT (2)..(2): Xaa is Leu or "Ile" or "Arg" or "Gln" or "Val" or "Met" or "Lys"
  VARIANT (3)..(3): Xaa is Asp or "Glu
  VARIANT (5)..(5): Xaa is Ile or "Val" or "Thr" or "Ala" or "Leu"
  VARIANT (6)..(6): Xaa is Val or "Tyr" or "Ile" or "Leu" or "Phe" or "Trp"
  VARIANT (8)..(8): Xaa is Gln or "His" or "Arg" or "Lys" or "Tyr" or "Ile" or "Leu" or "Phe" or "Trp"
  VARIANT (10)..(10): Xaa is Phe or "Leu" or "Val" or "Lys" or "Tyr" or "Met" or "Ile" or "Arg" or "Ala" or "Glu" or "Asp" or "Gln"
  VARIANT (11)..(11): Xaa is Leu or "Arg" or "Thr" or "Ile" or "Val" or "Ser" or "Cys" or "Tyr" or "Lys" or "Phe" or "Gly"
  VARIANT (12)..(12): Xaa is Lys or "Gln" or "Tyr" or "Thr" or "Phe" or "Leu" or "Trp" or "Met" or "Ala" or "Glu" or "Gly" or "Ser"
  VARIANT (16)..(16): Xaa is Ile or "Leu" or "Phe" or "Ser" or "Arg" or "Tyr" or "Gln" or "Trp" or "Asp" or "Lys" or "His"
  VARIANT (17)..(17): Xaa is Asp or "Ser" or "Ile" or "Asn" or "Glu" or "Ala" or "His" or "Phe" or "Leu" or "Gln" or "Met" or "Gly" or Tyr" or "Val"
  VARIANT (22)..(22): Xaa is Thr or "Val" or "Cys" or "Glu" or "Ser" or "Ala"
  VARIANT (23)..(23): Xaa is Arg or "Phe" or "Thr" or "Trp" or "Glu" or "Leu" or "Asn" or "Cys" or "Lys" or "Val" or "Ser" or "Gln" or "Ile" or "Tyr" or "His" or "Ala"
  VARIANT (24)..(24): Xaa is Ser or "Pro" or "Arg" or "Lys" or "Asn" or "Ala" or "His" or "Gln" or "Gly" or "Leu"
  VARIANT (25)..(25): Xaa is Asp or "Gly" or "Thr" or "Asn" or "Ser" or "Lys" or "Ala" or "Ile" or "Glu" or "Leu" or "Gln" or "Arg" or "Tyr"
  VARIANT (26)..(26): Xaa is Lys or "Val" or "Ala" or "Glu" or "Tyr" or "Ile" or "Cys" or "Leu" or "Ser" or "Thr" or "Gly" or "Lys" "Met" or "Asp" or "Phe"
XXXHXXPXSXXXDDSXXNKVLXXXXXN

SEQ ID NO: 19 - protein, 27 aa, Artificial Sequence
  Synthetic peptide
  VARIANT (1)..(1): Xaa is Asp or "Glu"
  VARIANT (3)..(3): Xaa is Asp or "Glu"
  VARIANT (8)..(8): Xaa is Gln or "His" or "Arg" or "Lys" or "Tyr" or "Ile" or "Leu" or "Trp"
  VARIANT (10)..(10): Xaa is Phe or "Leu" or "Val" or "Lys" or "Tyr" or "Met" or "Ile" or "Arg" or "Ala" or "Glu" or "Asp" or "Gln"
  VARIANT (11)..(11): Xaa is Leu or "Arg" or "Thr" or "Ile" or "Val" or "Ser" or "Cys" or "Tyr" or "Lys" or "Phe" or "Gly"
  VARIANT (12)..(12): Xaa is Lys or "Gln" or "Tyr" or "Thr" or "Phe" or "Leu" or "Trp" or "Met" or "Ala" or "Glu" or "Gly" or "Ser"
  VARIANT (16)..(16): Xaa is Ile or "Leu" or "Phe" or "Ser" or "Arg" or "Tyr" or "Gln" or "Trp" or "Asp" or "Lys" or "His"
  VARIANT (17)..(17): Xaa is Asp or "Ser" or "Ile" or "Asn" or "Glu" or "Ala" or "His" or "Phe" or "Leu" or "Gln" or "Met" or "Gly" or "Tyr" or "Val"
  VARIANT (23)..(23): Xaa is Arg or "Phe" or "Thr" or "Trp" or "Glu" or "Leu" or "Asn" or "Cys" or "Lys" or "Val" or "Ser" or "Gln" or "Ile" or "Tyr" or "His" or "Ala"
  VARIANT (24)..(24): Xaa is Ser or "Pro" or "Arg" or "Lys" or "Asn" or "Ala" or "His" or "Gln" or "Gly" or "Leu"
  VARIANT (25)..(25): Xaa is Asp or "Gly" or "Thr" or "Asn" or "Ser" or "Lys" or "Ala" or "Ile" or "Glu" or "Leu" or "Gln" or "Arg" or "Tyr"
  VARIANT (26)..(26): Xaa is Lys or "Val" or "Ala" or "Glu" or "Tyr" or "Ile" or "Cys" or "Leu" or "Ser" or "Thr" or "Gly" or "Lys" or "Met" or "Asp" or "Phe"
XVXHIVPXSXXXDDSXXNKVLTXXXXN

SEQ ID NO: 20 - protein, 27 aa, Artificial Sequence
  Synthetic peptide
  VARIANT (2)..(2): Xaa is Ile or "Val"
  VARIANT (6)..(6): Xaa is Ile or "Val"
  VARIANT (9)..(9): Xaa is Ala or "Ser"
  VARIANT (11)..(11): Xaa is Ile or "Leu"
  VARIANT (12)..(12): Xaa is Lys or "Thr"
  VARIANT (14)..(14): Xaa is Asp or "Asn"
  VARIANT (19)..(19): Xaa is Arg or "Lys" or "Leu"
  VARIANT (22)..(22): Xaa is Thr or "Val"
  VARIANT (23)..(23): Xaa is Ser or "Arg"
  VARIANT (25)..(25): Xaa is Lys or "Asp" or "Ala"
  VARIANT (26)..(26): Xaa is Glu or "Lys" or "Gly" or "Asn"
DXDHIXPQXFXXDXSIDNXVLXXSXXN

SEQ ID NO: 21 - protein, 73 aa, Artificial Sequence
  Synthetic polypeptide
  VARIANT (8)..(8): Xaa is Lys or "Arg"
  VARIANT (12)..(12): Xaa is Val or "Thr"
  VARIANT (13)..(13): Xaa is Gly or "Asp"
  VARIANT (14)..(14): Xaa is Glu or "Gln" or "Asp"
  VARIANT (15)..(15): Xaa is Glu or "Asp"
  VARIANT (19)..(19): Xaa is Asp or "Asn" or "His"
  VARIANT (20)..(20): Xaa is Tyr or "Arg" or "Asn"
  VARIANT (23)..(23): Xaa is Gln or "Asp" or "Asn"
  VARIANT (25)..(64): Any amino acid and this region may encompass 15-40 residues wherein some positions may be absent
  VARIANT (67)..(67): Xaa is Gly or "Glu"
  VARIANT (69)..(69): Xaa is Ser or "Gly"
  VARIANT (71)..(71): Xaa is Asp or "Asn"
LYYLQNGXDMYXXXXLDIXXLSXYXXXXXXXXXXXXXXXXXXXXXXXXXXXXXXXXXXXXXXXXNRXKXDXVP

SEQ ID NO: 22 - DNA, 4107 bp, Artificial Sequence
  Synthetic polynucleotide
atggataaaaagtacagcatcgggctggacatcggtacaaactcagtggggtgggccgtgattacggacgagtacaaggtaccctccaaaaaatttaaagtgctgggtaacacggacagacactctataaagaaaaatcttattggagccttgctgttcgactcaggcgagacagccgaagccacaaggttgaagcggaccgccaggaggcggtataccaggagaaagaaccgcatatgctacctgcaagaaatcttcagtaacgagatggcaaaggttgacgatagctttttccatcgcctggaagaatcctttcttgttgaggaagacaagaagcacgaacggcaccccatctttggcaatattgtcgacgaagtggcatatcacgaaaagtacccgactatctaccacctcaggaagaagctggtggactctaccgataaggcggacctcagacttatttatttggcactcgcccacatgattaaatttagaggacatttcttgatcgagggcgacctgaacccggacaacagtgacgtcgataagctgttcatccaacttgtgcagacctacaatcaactgttcgaagaaaaccctataaatgcttcaggagtcgacgctaaagcaatcctgtccgcgcgcctctcaaaatctagaagacttgagaatctgattgctcagttgcccggggaaaagaaaaatggattgtttggcaacctgatcgccctcagtctcggactgaccccaaatttcaaaagtaacttcgacctggccgaagacgctaagctccagctgtccaaggacacatacgatgacgacctcgacaatctgctggcccagattggggatcagtacgccgatctctttttggcagcaaagaacctgtccgacgccatcctgttgagcgatatcttgagagtgaacaccgaaattactaaagcaccccttagcgcatctatgatcaagcggtacgacgagcatcatcaggatctgaccctgctgaaggctcttgtgaggcaacagctccccgaaaaatacaaggaaatcttctttgaccagagcaaaaacggctacgctggctatatagatggtggggccagtcaggaggaattctataaattcatcaagcccattctcgagaaaatggacggcacagaggagttgctggtcaaacttaacagggaggacctgctgcggaagcagcggacctttgacaacgggtctatcccccaccagattcatctgggcgaactgcacgcaatcctgaggaggcaggaggatttttatccttttcttaaagataaccgcgagaaaatagaaaagattcttacattcaggatcccgtactacgtgggacctctcgcccggggcaattcacggtttgcctggatgacaaggaagtcagaggagactattacaccttggaacttcgaagaagtggtggacaagggtgcatctgcccagtctttcatcgagcggatgacaaattttgacaagaacctccctaatgagaaggtgctgcccaaacattctctgctctacgagtactttaccgtctacaatgaactgactaaagtcaagtacgtcaccgagggaatgaggaagccggcattccttagtggagaacagaagaaggcgattgtagacctgttgttcaagaccaacaggaaggtgactgtgaagcaacttaaagaagactactttaagaagatcgaatgttttgacagtgtggaaatttcaggggttgaagaccgcttcaatgcgtcattggggacttaccatgatcttctcaagatcataaaggacaaagacttcctggacaacgaagaaaatgaggatattctcgaagacatcgtcctcaccctgaccctgttcgaagacagggaaatgatagaagagcgcttgaaaacctatgcccacctcttcgacgataaagttatgaagcagctgaagcgcaggagatacacaggatggggaagattgtcaaggaagctgatcaatggaattagggataaacagagtggcaagaccatactggatttcctcaaatctgatggcttcgccaataggaacttcatgcaactgattcacgatgactctcttaccttcaaggaggacattcaaaaggctcaggtgagcgggcagggagactcccttcatgaacacatcgcgaatttggcaggttcccccgctattaaaaagggcatccttcaaactgtcaaggtggtggatgaattggtcaaggtaatgggcagacataagccagaaaatattgtgatcgagatggcccgcgaaaaccagaccacacagaagggccagaaaaatagtagagagcggatgaagaggatcgaggagggcatcaaagagctgggatctcagattctcaaagaacaccccgtagaaaacacacagctgcagaacgaaaaattgtacttgtactatctgcagaacggcagagacatgtacgtcgaccaagaacttgatattaatagactgtccgactatgacgtagaccatatcgtgccccagtccttcctgaaggacgactccattgataacaaagtcttgacaagaagcgacaagaacaggggtaaaagtgataatgtgcctagcgaggaggtggtgaaaaaaatgaagaactactggcgacagctgcttaatgcaaagctcattacacaacggaagttcgataatctgacgaaagcagagagaggtggcttgtctgagttggacaaggcagggtttattaagcggcagctggtggaaactaggcagatcacaaagcacgtggcgcagattttggacagccggatgaacacaaaatacgacgaaaatgataaactgatacgagaggtcaaagttatcacgctgaaaagcaagctggtgtccgattttcggaaagacttccagttctacaaagttcgcgagattaataactaccatcatgctcacgatgcgtacctgaacgctgttgtcgggaccgccttgataaagaagtacccaaagctggaatccgagttcgtatacggggattacaaagtgtacgatgtgaggaaaatgatagccaagtccgagcaggagattggaaaggccacagctaagtacttcttttattctaacatcatgaatttttttaagacggaaattaccctggccaacggagagatcagaaagcggccccttatagagacaaatggtgaaacaggtgaaatcgtctgggataagggcagggatttcgctactgtgaggaaggtgctgagtatgccacaggtaaatatcgtgaaaaaaaccgaagtacagaccggaggattttccaaggaaagcattttgcctaaaagaaactcagacaagctcatcgcccgcaagaaagattgggaccctaagaaatacgggggatttgactcacccaccgtagcctattctgtgctggtggtagctaaggtggaaaaaggaaagtctaagaagctgaagtccgtgaaggaactcttgggaatcactatcatggaaagatcatcctttgaaaagaaccctatcgatttcctggaggctaagggttacaaggaggtcaagaaagacctcatcattaaactgccaaaatactctctcttcgagctggaaaatggcaggaagagaatgttggccagcgccggagagctgcaaaagggaaacgagcttgctctgccctccaaatatgttaattttctctatctcgcttcccactatgaaaagctgaaagggtctcccgaagataacgagcagaagcagctgttcgtcgaacagcacaagcactatctggatgaaataatcgaacaaataagcgagttcagcaaaagggttatcctggcggatgctaatttggacaaagtactgtctgcttataacaagcaccgggataagcctattagggaacaagccgagaatataattcacctctttacactcacgaatctcggagcccccgccgccttcaaatactttgatacgactatcgaccggaaacggtataccagtaccaaagaggtcctcgatgccaccctcatccaccagtcaattactggcctgtacgaaacacggatcgacctctctcaactgggcggcgactag

SEQ ID NO: 23 - protein, 1368 aa, Streptococcus pyogenes [sequence omitted]

SEQ ID NO: 24 - DNA, 3249 bp, Artificial Sequence
  Synthetic polynucleotide
atggccgccttcaagcccaaccccatcaactacatcctgggcctggacatcggcatcgccagcgtgggctgggccatggtggagatcgacgaggacgagaaccccatctgcctgatcgacctgggtgtgcgcgtgttcgagcgcgctgaggtgcccaagactggtgacagtctggctatggctcgccggcttgctcgctctgttcggcgccttactcgccggcgcgctcaccgccttctgcgcgctcgccgcctgctgaagcgcgagggtgtgctgcaggctgccgacttcgacgagaacggcctgatcaagagcctgcccaacactccttggcagctgcgcgctgccgctctggaccgcaagctgactcctctggagtggagcgccgtgctgctgcacctgatcaagcaccgcggctacctgagccagcgcaagaacgagggcgagaccgccgacaaggagctgggtgctctgctgaagggcgtggccgacaacgcccacgccctgcagactggtgacttccgcactcctgctgagctggccctgaacaagttcgagaaggagagcggccacatccgcaaccagcgcggcgactacagccacaccttcagccgcaaggacctgcaggccgagctgatcctgctgttcgagaagcagaaggagttcggcaacccccacgtgagcggcggcctgaaggagggcatcgagaccctgctgatgacccagcgccccgccctgagcggcgacgccgtgcagaagatgctgggccactgcaccttcgagccagccgagcccaaggccgccaagaacacctacaccgccgagcgcttcatctggctgaccaagctgaacaacctgcgcatcctggagcagggcagcgagcgccccctgaccgacaccgagcgcgccaccctgatggacgagccctaccgcaagagcaagctgacctacgcccaggcccgcaagctgctgggtctggaggacaccgccttcttcaagggcctgcgctacggcaaggacaacgccgaggccagcaccctgatggagatgaaggcctaccacgccatcagccgcgccctggagaaggagggcctgaaggacaagaagagtcctctgaacctgagccccgagctgcaggacgagatcggcaccgccttcagcctgttcaagaccgacgaggacatcaccggccgcctgaaggaccgcatccagcccgagatcctggaggccctgctgaagcacatcagcttcgacaagttcgtgcagatcagcctgaaggccctgcgccgcatcgtgcccctgatggagcagggcaagcgctacgacgaggcctgcgccgagatctacggcgaccactacggcaagaagaacaccgaggagaagatctacctgcctcctatccccgccgacgagatccgcaaccccgtggtgctgcgcgccctgagccaggcccgcaaggtgatcaacggcgtggtgcgccgctacggcagccccgcccgcatccacatcgagaccgcccgcgaggtgggcaagagcttcaaggaccgcaaggagatcgagaagcgccaggaggagaaccgcaaggaccgcgagaaggccgccgccaagttccgcgagtacttccccaacttcgtgggcgagcccaagagcaaggacatcctgaagctgcgcctgtacgagcagcagcacggcaagtgcctgtacagcggcaaggagatcaacctgggccgcctgaacgagaagggctacgtggagatcgaccacgccctgcccttcagccgcacctgggacgacagcttcaacaacaaggtgctggtgctgggcagcgagaaccagaacaagggcaaccagaccccctacgagtacttcaacggcaaggacaacagccgcgagtggcaggagttcaaggcccgcgtggagaccagccgcttcccccgcagcaagaagcagcgcatcctgctgcagaagttcgacgaggacggcttcaaggagcgcaacctgaacgacacccgctacgtgaaccgcttcctgtgccagttcgtggccgaccgcatgcgcctgaccggcaagggcaagaagcgcgtgttcgccagcaacggccagatcaccaacctgctgcgcggcttctggggcctgcgcaaggtgcgcgccgagaacgaccgccaccacgccctggacgccgtggtggtggcctgcagcaccgtggccatgcagcagaagatcacccgcttcgtgcgctacaaggagatgaacgccttcgacggtaaaaccatcgacaaggagaccggcgaggtgctgcaccagaagacccacttcccccagccctgggagttcttcgcccaggaggtgatgatccgcgtgttcggcaagcccgacggcaagcccgagttcgaggaggccgacacccccgagaagctgcgcaccctgctggccgagaagctgagcagccgccctgaggccgtgcacgagtacgtgactcctctgttcgtgagccgcgcccccaaccgcaagatgagcggtcagggtcacatggagaccgtgaagagcgccaagcgcctggacgagggcgtgagcgtgctgcgcgtgcccctgacccagctgaagctgaaggacctggagaagatggtgaaccgcgagcgcgagcccaagctgtacgaggccctgaaggcccgcctggaggcccacaaggacgaccccgccaaggccttcgccgagcccttctacaagtacgacaaggccggcaaccgcacccagcaggtgaaggccgtgcgcgtggagcaggtgcagaagaccggcgtgtgggtgcgcaaccacaacggcatcgccgacaacgccaccatggtgcgcgtggacgtgttcgagaagggcgacaagtactacctggtgcccatctacagctggcaggtggccaagggcatcctgcccgaccgcgccgtggtgcagggcaaggacgaggaggactggcagctgatcgacgacagcttcaacttcaagttcagcctgcaccccaacgacctggtggaggtgatcaccaagaaggcccgcatgttcggctacttcgccagctgccaccgcggcaccggcaacatcaacatccgcatccacgacctggaccacaagatcggcaagaacggcatcctggagggcatcggcgtgaagaccgccctgagcttccagaagtaccagatcgacgagctgggcaaggagatccgcccctgccgcctgaagaagcgccctcctgtgcgctaa

SEQ ID NO: 25 - protein, 1082 aa, Neisseria meningitidis
MAAFKPNPINYILGLDIGIASVGWAMVEIDEDENPICLIDLGVRVFERAEVPKTGDSLAMARRLARSVRRLTRRRAHRLLRARRLLKREGVLQAADFDENGLIKSLPNTPWQLRAAALDRKLTPLEWSAVLLHLIKHRGYLSQRKNEGETADKELGALLKGVADNAHALQTGDFRTPAELALNKFEKESGHIRNQRGDYSHTFSRKDLQAELILLFEKQKEFGNPHVSGGLKEGIETLLMTQRPALSGDAVQKMLGHCTFEPAEPKAAKNTYTAERFIWLTKLNNLRILEQGSERPLTDTERATLMDEPYRKSKLTYAQARKLLGLEDTAFFKGLRYGKDNAEASTLMEMKAYHAISRALEKEGLKDKKSPLNLSPELQDEIGTAFSLFKTDEDITGRLKDRIQPEILEALLKHISFDKFVQISLKALRRIVPLMEQGKRYDEACAEIYGDHYGKKNTEEKIYLPPIPADEIRNPVVLRALSQARKVINGVVRRYGSPARIHIETAREVGKSFKDRKEIEKRQEENRKDREKAAAKFREYFPNFVGEPKSKDILKLRLYEQQHGKCLYSGKEINLGRLNEKGYVEIDHALPFSRTWDDSFNNKVLVLGSENQNKGNQTPYEYFNGKDNSREWQEFKARVETSRFPRSKKQRILLQKFDEDGFKERNLNDTRYVNRFLCQFVADRMRLTGKGKKRVFASNGQITNLLRGFWGLRKVRAENDRHHALDAVVVACSTVAMQQKITRFVRYKEMNAFDGKTIDKETGEVLHQKTHFPQPWEFFAQEVMIRVFGKPDGKPEFEEADTPEKLRTLLAEKLSSRPEAVHEYVTPLFVSRAPNRKMSGQGHMETVKSAKRLDEGVSVLRVPLTQLKLKDLEKMVNREREPKLYEALKARLEAHKDDPAKAFAEPFYKYDKAGNRTQQVKAVRVEQVQKTGVWVRNHNGIADNATMVRVDVFEKGDKYYLVPIYSWQVAKGILPDRAVVQGKDEEDWQLIDDSFNFKFSLHPNDLVEVITKKARMFGYFASCHRGTGNINIRIHDLDHKIGKNGILEGIGVKTALSFQKYQIDELGKEIRPCRLKKRPPVR

SEQ ID NO: 26 - protein, 1053 aa, Staphylococcus aureus
MKRNYILGLDIGITSVGYGIIDYETRDVIDAGVRLFKEANVENNEGRRSKRGARRLKRRRRHRIQRVKKLLFDYNLLTDHSELSGINPYEARVKGLSQKLSEEEFSAALLHLAKRRGVHNVNEVEEDTGNELSTKEQISRNSKALEEKYVAELQLERLKKDGEVRGSINRFKTSDYVKEAKQLLKVQKAYHQLDQSFIDTYIDLLETRRTYYEGPGEGSPFGWKDIKEWYEMLMGHCTYFPEELRSVKYAYNADLYNALNDLNNLVITRDENEKLEYYEKFQIIENVFKQKKKPTLKQIAKEILVNEEDIKGYRVTSTGKPEFTNLKVYHDIKDITARKEIIENAELLDQIAKILTIYQSSEDIQEELTNLNSELTQEEIEQISNLKGYTGTHNLSLKAINLILDELWHTNDNQIAIFNRLKLVPKKVDLSQQKEIPTTLVDDFILSPVVKRSFIQSIKVINAIIKKYGLPNDIIIELAREKNSKDAQKMINEMQKRNRQTNERIEEIIRTTGKENAKYLIEKIKLHDMQEGKCLYSLEAIPLEDLLNNPFNYEVDHIIPRSVSFDNSFNNKVLVKQEENSKKGNRTPFQYLSSSDSKISYETFKKHILNLAKGKGRISKTKKEYLLEERDINRFSVQKDFINRNLVDTRYATRGLMNLLRSYFRVNNLDVKVKSINGGFTSFLRRKWKFKKERNKGYKHHAEDALIIANADFIFKEWKKLDKAKKVMENQMFEEKQAESMPEIETEQEYKEIFITPHQIKHIKDFKDYKYSHRVDKKPNRELINDTLYSTRKDDKGNTLIVNNLNGLYDKDNDKLKKLINKSPEKLLMYHHDPQTYQKLKLIMEQYGDEKNPLYKYYEETGNYLTKYSKKDNGPVIKKIKYYGNKLNAHLDITDDYPNSRNKVVKLSLKPYRFDVYLDNGVYKFVTVKNLDVIKKENYYEVNSKCYEEAKKLKKISNQAEFIASFYNNDLIKINGELYRVIGVNNDLLNRIEVNMIDITYREYLENMNDKRPPRIIKTIASKTQSIKKYSTDILGNLYEVKSKKHPQIIKKG

SEQ ID NO: 27 - RNA, 104 nt, Artificial Sequence
  Synthetic polynucleotide
  modified_base (1)..(20): a, c, u, g, unknown or other
  misc_feature (1)..(20): n is a, c, g, or u
nnnnnnnnnnnnnnnnnnnnguuuuagagcuaugcugaaaagcauagcaaguuaaaauaaggcuaguccguuaucaacuugaaaaaguggcaccgagucggugc

SEQ ID NO: 28 - RNA, 106 nt, Artificial Sequence
  Synthetic polynucleotide
  modified_base (1)..(20): a, c, u, g, unknown or other
  misc_feature (1)..(20): n is a, c, g, or u
nnnnnnnnnnnnnnnnnnnnguuuuagagcuaugcuggaaacagcauagcaaguuaaaauaaggcuaguccguuaucaacuugaaaaaguggcaccgagucggugc

SEQ ID NO: 29 - RNA, 116 nt, Artificial Sequence
  Synthetic polynucleotide
  modified_base (1)..(20): a, c, u, g, unknown or other
  misc_feature (1)..(20): n is a, c, g, or u
nnnnnnnnnnnnnnnnnnnnguuuuagagcuaugcuguuuuggaaacaaaacagcauagcaaguuaaaauaaggcuaguccguuaucaacuugaaaaaguggcaccgagucggugc

SEQ ID NO: 30 - RNA, 96 nt, Artificial Sequence
  Synthetic oligonucleotide
  modified_base (1)..(20): a, c, u, g, unknown or other
  misc_feature (1)..(20): n is a, c, g, or u
nnnnnnnnnnnnnnnnnnnnguauuagagcuagaaauagcaaguuaauauaaggcuaguccguuaucaacuugaaaaaguggcaccgagucggugc

SEQ ID NO: 31 - RNA, 96 nt, Artificial Sequence
  Synthetic oligonucleotide
  modified_base (1)..(20): a, c, u, g, unknown or other
  misc_feature (1)..(20): n is a, c, g, or u
nnnnnnnnnnnnnnnnnnnnguuuaagagcuagaaauagcaaguuuaaauaaggcuaguccguuaucaacuugaaaaaguggcaccgagucggugc

SEQ ID NO: 32 - RNA, 116 nt, Artificial Sequence
  Synthetic polynucleotide
  modified_base (1)..(20): a, c, u, g, unknown or other
  misc_feature (1)..(20): n is a, c, g, or u
nnnnnnnnnnnnnnnnnnnnguauuagagcuaugcuguauuggaaacaauacagcauagcaaguuaauauaaggcuaguccguuaucaacuugaaaaaguggcaccgagucggugc

SEQ ID NO: 33 - RNA, 47 nt, Artificial Sequence
  Synthetic oligonucleotide
aaggcuaguccguuaucaacuugaaaaaguggcaccgagucggugcu

SEQ ID NO: 34 - RNA, 49 nt, Artificial Sequence
  Synthetic oligonucleotide
aaggcuaguccguuaucaacuugaaaaaguggcaccgagucgguggugc

SEQ ID NO: 35 - RNA, 51 nt, Artificial Sequence
  Synthetic oligonucleotide
aaggcuaguccguuaucaacuugaaaaaguggcaccgagucggugcggauc

SEQ ID NO: 36 - RNA, 31 nt, Artificial Sequence
  Synthetic oligonucleotide
aaggcuaguccguuaucaacuugaaaaagug

SEQ ID NO: 37 - RNA, 18 nt, Artificial Sequence
  Synthetic oligonucleotide
aaggcuaguccguuauca

SEQ ID NO: 38 - RNA, 12 nt, Artificial Sequence
  Synthetic oligonucleotide
aaggcuaguccg

SEQ ID NO: 39 - DNA, 3159 bp, Artificial Sequence
  Synthetic polynucleotide
atgaaaaggaactacattctggggctggacatcgggattacaagcgtggggtatgggattattgactatgaaacaagggacgtgatcgacgcaggcgtcagactgttcaaggaggccaacgtggaaaacaatgagggacggagaagcaagaggggagccaggcgcctgaaacgacggagaaggcacagaatccagagggtgaagaaactgctgttcgattacaacctgctgaccgaccattctgagctgagtggaattaatccttatgaagccagggtgaaaggcctgagtcagaagctgtcagaggaagagttttccgcagctctgctgcacctggctaagcgccgaggagtgcataacgtcaatgaggtggaagaggacaccggcaacgagctgtctacaaaggaacagatctcacgcaatagcaaagctctggaagagaagtatgtcgcagagctgcagctggaacggctgaagaaagatggcgaggtgagagggtcaattaataggttcaagacaagcgactacgtcaaagaagccaagcagctgctgaaagtgcagaaggcttaccaccagctggatcagagcttcatcgatacttatatcgacctgctggagactcggagaacctactatgagggaccaggagaagggagccccttcggatggaaagacatcaaggaatggtacgagatgctgatgggacattgcacctattttccagaagagctgagaagcgtcaagtacgcttataacgcagatctgtacaacgccctgaatgacctgaacaacctggtcatcaccagggatgaaaacgagaaactggaatactatgagaagttccagatcatcgaaaacgtgtttaagcagaagaaaaagcctacactgaaacagattgctaaggagatcctggtcaacgaagaggacatcaagggctaccgggtgacaagcactggaaaaccagagttcaccaatctgaaagtgtatcacgatattaaggacatcacagcacggaaagaaatcattgagaacgccgaactgctggatcagattgctaagatcctgactatctaccagagctccgaggacatccaggaagagctgactaacctgaacagcgagctgacccaggaagagatcgaacagattagtaatctgaaggggtacaccggaacacacaacctgtccctgaaagctatcaatctgattctggatgagctgtggcatacaaacgacaatcagattgcaatctttaaccggctgaagctggtcccaaaaaaggtggacctgagtcagcagaaagagatcccaaccacactggtggacgatttcattctgtcacccgtggtcaagcggagcttcatccagagcatcaaagtgatcaacgccatcatcaagaagtacggcctgcccaatgatatcattatcgagctggctagggagaagaacagcaaggacgcacagaagatgatcaatgagatgcagaaacgaaaccggcagaccaatgaacgcattgaagagattatccgaactaccgggaaagagaacgcaaagtacctgattgaaaaaatcaagctgcacgatatgcaggagggaaagtgtctgtattctctggaggccatccccctggaggacctgctgaacaatccattcaactacgaggtcgatcatattatccccagaagcgtgtccttcgacaattcctttaacaacaaggtgctggtcaagcaggaagagaactctaaaaagggcaataggactcctttccagtacctgtctagttcagattccaagatctcttacgaaacctttaaaaagcacattctgaatctggccaaaggaaagggccgcatcagcaagaccaaaaaggagtacctgctggaagagcgggacatcaacagattctccgtccagaaggattttattaaccggaatctggtggacacaagatacgctactcgcggcctgatgaatctgctgcgatcctatttccgggtgaacaatctggatgtgaaagtcaagtccatcaacggcgggttcacatcttttctgaggcgcaaatggaagtttaaaaaggagcgcaacaaagggtacaagcaccatgccgaagatgctctgattatcgcaaatgccgacttcatctttaaggagtggaaaaagctggacaaagccaagaaagtgatggagaaccagatgttcgaagagaagcaggccgaatctatgcccgaaatcgagacagaacaggagtacaaggagattttcatcactcctcaccagatcaagcatatcaaggatttcaaggactacaagtactctcaccgggtggataaaaagcccaacagagagctgatcaatgacaccctgtatagtacaagaaaagacgataaggggaataccctgattgtgaacaatctgaacggactgtacgacaaagataatgacaagctgaaaaagctgatcaacaaaagtcccgagaagctgctgatgtaccaccatgatcctcagacatatcagaaactgaagctgattatggagcagtacggcgacgagaagaacccactgtataagtactatgaagagactgggaactacctgaccaagtatagcaaaaaggataatggccccgtgatcaagaagatcaagtactatgggaacaagctgaatgcccatctggacatcacagacgattaccctaacagtcgcaacaaggtggtcaagctgtcactgaagccatacagattcgatgtctatctggacaacggcgtgtataaatttgtgactgtcaagaatctggatgtcatcaaaaaggagaactactatgaagtgaatagcaagtgctacgaagaggctaaaaagctgaaaaagattagcaaccaggcagagttcatcgcctccttttacaacaacgacctgattaagatcaatggcgaactgtatagggtcatcggggtgaacaatgatctgctgaaccgcattgaagtgaatatgattgacatcacttaccgagagtatctggaaaacatgaatgataagcgcccccctcgaattatcaaaacaattgcctctaagactcagagtatcaaaaagtactcaaccgacattctgggaaacctgtatgaggtgaagagcaaaaagcaccctcagattatcaaaaagggc

SEQ ID NO: 40 - DNA, 20 bp, Artificial Sequence
  Synthetic oligonucleotide
gttagatgtcaccaattgta

SEQ ID NO: 41 - DNA, 43 bp, Artificial Sequence
  Synthetic oligonucleotide
acttttatgggttagatgtcaccaattgtaaggcctgtgactg

SEQ ID NO: 42 - RNA, 42 nt, Streptococcus pyogenes
  modified_base (1)..(20): a, c, u, g, unknown or other
  misc_feature (1)..(20): n is a, c, g, or u
nnnnnnnnnnnnnnnnnnnnguuuuagagcuaugcuguuuug

SEQ ID NO: 43 - RNA, 85 nt, Streptococcus pyogenes
ggaaccauucaaaacagcauagcaaguuaaaauaaggcuaguccguuaucaacuugaaaaaguggcaccgagucggugcuuuuuu

SEQ ID NO: 44 - RNA, 62 nt, Streptococcus pyogenes
  modified_base (1)..(20): a, c, u, g, unknown or other
  misc_feature (1)..(20): n is a, c, g, or u
nnnnnnnnnnnnnnnnnnnnguuuuagagcuagaaauagcaaguuaaaauaaggcuaguccg

SEQ ID NO: 45 - RNA, 102 nt, Streptococcus pyogenes
  modified_base (1)..(20): a, c, u, g, unknown or other
  misc_feature (1)..(20): n is a, c, g, or u
nnnnnnnnnnnnnnnnnnnnguuuuagagcuagaaauagcaaguuaaaauaaggcuaguccguuaucaacuugaaaaaguggcaccgagucggugcuuuuuu

SEQ ID NO: 46 - RNA, 75 nt, Streptococcus pyogenes
  modified_base (1)..(20): a, c, u, g, unknown or other
  misc_feature (1)..(20): n is a, c, g, or u
nnnnnnnnnnnnnnnnnnnnguuuuagagcuaugcugaaaagcauagcaaguuaaaauaaggcuaguccguuauc

SEQ ID NO: 47 - RNA, 87 nt, Streptococcus pyogenes
  modified_base (1)..(20): a, c, u, g, unknown or other
  misc_feature (1)..(20): n is a, c, g, or u
nnnnnnnnnnnnnnnnnnnnguuuuagagcuaugcuguuuuggaaacaaaacagcauagcaaguuaaaauaaggcuaguccguuauc

SEQ ID NO: 48 - RNA, 42 nt, Streptococcus thermophilus
  modified_base (1)..(20): a, c, u, g, unknown or other
  misc_feature (1)..(20): n is a, c, g, or u
nnnnnnnnnnnnnnnnnnnnguuuuagagcuguguuguuucg

SEQ ID NO: 49 - RNA, 78 nt, Streptococcus thermophilus
gggcgaaacaacacagcgaguuaaaauaaggcuuaguccguacucaacuugaaaagguggcaccgauucgguguuuuu

SEQ ID NO: 50 - RNA, 42 nt, Streptococcus pyogenes; identical to SEQ ID NO: 42
  modified_base (1)..(20): a, c, u, g, unknown or other
  misc_feature (1)..(20): n is a, c, g, or u

SEQ ID NO: 51 - RNA, 42 nt, Streptococcus thermophilus; identical to SEQ ID NO: 48
  modified_base (1)..(20): a, c, u, g, unknown or other
  misc_feature (1)..(20): n is a, c, g, or u

SEQ ID NO: 52 - RNA, 85 nt, Streptococcus pyogenes
gaaccauucaaaacagcauagcaaguuaaaauaaggcuaguccguuaucaacuugaaaaaguggcaccgagucggugcuuuuuuu

SEQ ID NO: 53 - RNA, 78 nt, Streptococcus thermophilus; identical to SEQ ID NO: 49

SEQ ID NO: 54 - protein, 12 aa, Artificial Sequence
  Synthetic peptide
DIGTNSVGWAVT

SEQ ID NO: 55 - protein, 12 aa, Artificial Sequence
  Synthetic peptide
DIGTNSVGWAVT

SEQ ID NO: 56 - protein, 12 aa, Artificial Sequence
  Synthetic peptide
DVGTNSVGWAVT

SEQ ID NO: 57 - protein, 12 aa, Artificial Sequence
  Synthetic peptide
DVGTNSVGWAVT

SEQ ID NO: 58 - protein, 12 aa, Artificial Sequence
  Synthetic peptide
DMGTNSVGWAVT

SEQ ID NO: 59 - protein, 12 aa, Artificial Sequence
  Synthetic peptide
DVGTSSVGWAVT

SEQ ID NO: 60 - protein, 12 aa, Artificial Sequence
  Synthetic peptide
DIGTASVGWAVT

SEQ ID NO: 61 - protein, 12 aa, Artificial Sequence
  Synthetic peptide
DVGTGSVGWAVT

SEQ ID NO: 62 - protein, 12 aa, Artificial Sequence
  Synthetic peptide
DIGTNSVGWAVV

SEQ ID NO: 63 - protein, 12 aa, Artificial Sequence
  Synthetic peptide
DIGTNSVGWAVI

SEQ ID NO: 64 - protein, 12 aa, Artificial Sequence
  Synthetic peptide
DIGTNSVGWAVL

SEQ ID NO: 65 - protein, 12 aa, Artificial Sequence
  Synthetic peptide
DLGTNSIGWAVV

SEQ ID NO: 66 - protein, 11 aa, Artificial Sequence
  Synthetic peptide
DLGTNSIGWAI

SEQ ID NO: 67 - protein, 12 aa, Artificial Sequence
  Synthetic peptide
DLGTNSIGWALV

SEQ ID NO: 68 - protein, 12 aa, Artificial Sequence
  Synthetic peptide
DIGTNSVGWCVT

SEQ ID NO: 69 - protein, 12 aa, Artificial Sequence
  Synthetic peptide
DIGTNSVGYAVT

SEQ ID NO: 70 - protein, 12 aa, Artificial Sequence
  Synthetic peptide
DMGTGSLGWAVT

SEQ ID NO: 71 - protein, 12 aa, Artificial Sequence
  Synthetic peptide
DIGTSSVGWAAI

SEQ ID NO: 72 - protein, 12 aa, Artificial Sequence
  Synthetic peptide
DLGTGSVGWAVV

SEQ ID NO: 73 - protein, 12 aa, Artificial Sequence
  Synthetic peptide
DLGVGSVGWAIV

SEQ ID NO: 74 - protein, 12 aa, Artificial Sequence
  Synthetic peptide
DLGIASIGWAII

SEQ ID NO: 75 - protein, 12 aa, Artificial Sequence
  Synthetic peptide
DLGIASVGWAIV

SEQ ID NO: 76 - protein, 12 aa, Artificial Sequence
  Synthetic peptide
DLGVASVGWSIV

SEQ ID NO: 77 - protein, 12 aa, Artificial Sequence
  Synthetic peptide
DIGIASVGWAIL

SEQ ID NO: 78 - protein, 12 aa, Artificial Sequence
  Synthetic peptide
DLGISSVGWSVI

SEQ ID NO: 79 - protein, 12 aa, Artificial Sequence
  Synthetic peptide
DIGIASVGWSVI

SEQ ID NO: 80 - protein, 12 aa, Artificial Sequence
  Synthetic peptide
DVGIGSIGWAVI

SEQ ID NO: 81 - protein, 12 aa, Artificial Sequence
  Synthetic peptide
DLGVGSIGFAIV

SEQ ID NO: 82 - protein, 12 aa, Artificial Sequence
  Synthetic peptide
DIGYASIGWAVI

SEQ ID NO: 83 - protein, 12 aa, Artificial Sequence
  Synthetic peptide
DTGTNSLGWAIV

SEQ ID NO: 84 - protein, 12 aa, Artificial Sequence
  Synthetic peptide
DLGTNSIGWCLL

SEQ ID NO: 85 - protein, 12 aa, Artificial Sequence
  Synthetic peptide
DIGTDSLGWAVF

SEQ ID NO: 86 - protein, 12 aa, Artificial Sequence
  Synthetic peptide
DIGSNSIGFAVV

SEQ ID NO: 87 - protein, 12 aa, Artificial Sequence
  Synthetic peptide
DLGVGSIGVAVA

SEQ ID NO: 88 - protein, 12 aa, Artificial Sequence
  Synthetic peptide
DLGIASCGWGVV

SEQ ID NO: 89 - protein, 12 aa, Artificial Sequence
  Synthetic peptide
DLGIASVGWCLT

SEQ ID NO: 90 - protein, 12 aa, Artificial Sequence
  Synthetic peptide
DIGIGSVGVGIL

SEQ ID NO: 91 - protein, 12 aa, Artificial Sequence
  Synthetic peptide
DIGITSVGYGLI

SEQ ID NO: 92 - protein, 12 aa, Artificial Sequence
  Synthetic peptide
DIGITSVGFGII

SEQ ID NO: 93 - protein, 12 aa, Artificial Sequence
  Synthetic peptide
DVGITSTGYAVL

SEQ ID NO: 94 - protein, 12 aa, Artificial Sequence
  Synthetic peptide
DLGITSFGYAIL

SEQ ID NO: 95 - protein, 12 aa, Artificial Sequence
  Synthetic peptide
DIGNASVGWSAF

SEQ ID NO: 96 - protein, 12 aa, Artificial Sequence
  Synthetic peptide
DVGTNSCGWVAM

SEQ ID NO: 97 - protein, 12 aa, Artificial Sequence
  Synthetic peptide
DVGERSIGLAAV

SEQ ID NO: 98 - protein, 12 aa, Artificial Sequence
  Synthetic peptide
DVGLNSVGLAAV

SEQ ID NO: 99 - protein, 12 aa, Artificial Sequence
  Synthetic peptide
DVGLMSVGLAAI

SEQ ID NO: 100 - protein, 12 aa, Artificial Sequence
  Synthetic peptide
DVGTFSVGLAAI

SEQ ID NO: 101 - protein, 12 aa, Artificial Sequence
  Synthetic peptide
DIGTGSVGYACM

SEQ ID NO: 102 - protein, 12 aa, Artificial Sequence
  Synthetic peptide
DLGTTSIGFAHI

SEQ ID NO: 103 - protein, 12 aa, Artificial Sequence
  Synthetic peptide
DLGTNSIGSSVR

SEQ ID NO: 104 - protein, 12 aa, Artificial Sequence
  Synthetic peptide
DIGTNSVGWAVT

SEQ ID NO: 105 - protein, 12 aa, Artificial Sequence
  Synthetic peptide
DIGTNSVGWAVT

SEQ ID NO: 106 - protein, 12 aa, Artificial Sequence
  Synthetic peptide
DVGTNSVGWAVT

SEQ ID NO: 107 - protein, 12 aa, Artificial Sequence
  Synthetic peptide
DVGTNSVGWAVT

SEQ ID NO: 108 - protein, 12 aa, Artificial Sequence
  Synthetic peptide
DMGTNSVGWAVT

SEQ ID NO: 109 - protein, 12 aa, Artificial Sequence
  Synthetic peptide
DVGTSSVGWAVT

SEQ ID NO: 110 - protein, 12 aa, Artificial Sequence
  Synthetic peptide
DIGTASVGWAVT

SEQ ID NO: 111 - protein, 12 aa, Artificial Sequence
  Synthetic peptide
DVGTGSVGWAVT

SEQ ID NO: 112 - protein, 12 aa, Artificial Sequence
  Synthetic peptide
DIGTNSVGWAVV

SEQ ID NO: 113 - protein, 12 aa, Artificial Sequence
  Synthetic peptide
DIGTNSVGWAVI

SEQ ID NO: 114 - protein, 12 aa, Artificial Sequence
  Synthetic peptide
DIGTNSIGWAVI

SEQ ID NO: 115 - protein, 12 aa, Artificial Sequence
  Synthetic peptide
DIGTNSVGWAVL

SEQ ID NO: 116 - protein, 12 aa, Artificial Sequence
  Synthetic peptide
DLGTNSIGWAVV

SEQ ID NO: 117 - protein, 11 aa, Artificial Sequence
  Synthetic peptide
DLGTNSIGWAI

SEQ ID NO: 118 - protein, 12 aa, Artificial Sequence
  Synthetic peptide
DLGTNSIGWALV

SEQ ID NO: 119 - protein, 12 aa, Artificial Sequence
  Synthetic peptide
DIGTNSVGWCVT

SEQ ID NO: 120 - protein, 12 aa, Artificial Sequence
  Synthetic peptide
DIGTNSVGYAVT

SEQ ID NO: 121 - protein, 12 aa, Artificial Sequence
  Synthetic peptide
DMGTGSLGWAVT

SEQ ID NO: 122 - protein, 12 aa, Artificial Sequence
  Synthetic peptide
DIGTSSVGWAAI

SEQ ID NO: 123 - protein, 12 aa, Artificial Sequence
  Synthetic peptide
DLGTGSVGWAVV

SEQ ID NO: 124 - protein, 12 aa, Artificial Sequence
  Synthetic peptide
DLGVGSVGWAIV

SEQ ID NO: 125 - protein, 12 aa, Artificial Sequence
  Synthetic peptide
DLGIASIGWAII

SEQ ID NO: 126 - protein, 12 aa, Artificial Sequence
  Synthetic peptide
DLGIASVGWAIV

SEQ ID NO: 127 - protein, 12 aa, Artificial Sequence
  Synthetic peptide
DLGIASVGWAVV

SEQ ID NO: 128 - protein, 12 aa, Artificial Sequence
  Synthetic peptide
DLGVASVGWSIV

SEQ ID NO: 129 - protein, 12 aa, Artificial Sequence
  Synthetic peptide
DIGIASVGWAIL

SEQ ID NO: 130 - protein, 12 aa, Artificial Sequence
  Synthetic peptide
DIGIASVGWAVL

SEQ ID NO: 131 - protein, 12 aa, Artificial Sequence
  Synthetic peptide
DIGIASIGWAVI

SEQ ID NO: 132 - protein, 12 aa, Artificial Sequence
  Synthetic peptide
DIGIASVGWAII

SEQ ID NO: 133 - protein, 12 aa, Artificial Sequence
  Synthetic peptide
DVGIASVGWAVI

SEQ ID NO: 134 - protein, 11 aa, Artificial Sequence
  Synthetic peptide
DIGIASVGWAL

SEQ ID NO: 135 - protein, 12 aa, Artificial Sequence
  Synthetic peptide
DIGIASVGWAMV

SEQ ID NO: 136 - protein, 12 aa, Artificial Sequence
  Synthetic peptide
DIGIASVGWSVI

SEQ ID NO: 137 - protein, 12 aa, Artificial Sequence
  Synthetic peptide
DLGISSVGWSVI

SEQ ID NO: 138 - protein, 12 aa, Artificial Sequence
  Synthetic peptide
DIGITSVGWAVI

SEQ ID NO: 139 - protein, 12 aa, Artificial Sequence
  Synthetic peptide
DVGIGSIGWAVI

SEQ ID NO: 140 - protein, 12 aa, Artificial Sequence
  Synthetic peptide
DLGISSLGWAIV

SEQ ID NO: 141 - protein, 12 aa, Artificial Sequence
  Synthetic peptide
DLGVGSIGFAIV

SEQ ID NO: 142 - protein, 12 aa, Artificial Sequence
  Synthetic peptide
DIGYASIGWAVI

SEQ ID NO: 143 - protein, 12 aa, Artificial Sequence
  Synthetic peptide
DLGTNSIGWCLL

SEQ ID NO: 144 - protein, 12 aa, Artificial Sequence
  Synthetic peptide
DLGTNSIGWGLL

SEQ ID NO: 145 - protein, 12 aa, Artificial Sequence
  Synthetic peptide
DTGTNSLGWAIV

SEQ ID NO: 146 - protein, 12 aa, Artificial Sequence
  Synthetic peptide
DIGTDSLGWAVF

SEQ ID NO: 147 - protein, 12 aa, Artificial Sequence
  Synthetic peptide
DLGSTSLGWAIF

SEQ ID NO: 148 - protein, 12 aa, Artificial Sequence
  Synthetic peptide
DIGISSIGWAFS

SEQ ID NO: 149 - protein, 12 aa, Artificial Sequence
  Synthetic peptide
DLGIASVGWCLT

SEQ ID NO: 150 - protein, 12 aa, Artificial Sequence
  Synthetic peptide
DLGIASCGWGVV

SEQ ID NO: 151 - protein, 12 aa, Artificial Sequence
  Synthetic peptide
DIGSNSIGFAVV

SEQ ID NO: 152 - protein, 12 aa, Artificial Sequence
  Synthetic peptide
DIGTTSIGFSVI

SEQ ID NO: 153 - protein, 12 aa, Artificial Sequence
  Synthetic peptide
DIGITSVGYGLI

SEQ ID NO: 154 - protein, 12 aa, Artificial Sequence
  Synthetic peptide
DIGITSVGFGII

SEQ ID NO: 155 - protein, 12 aa, Artificial Sequence
  Synthetic peptide
DLGTTSIGFAHI

SEQ ID NO: 156 - protein, 12 aa, Artificial Sequence
  Synthetic peptide
DIGIGSVGVGIL

SEQ ID NO: 157 - protein, 12 aa, Artificial Sequence
  Synthetic peptide
DLGVGSIGVAVA

SEQ ID NO: 158 - protein, 12 aa, Artificial Sequence
  Synthetic peptide
DVGITSTGYAVL

SEQ ID NO: 159 - protein, 12 aa, Artificial Sequence
  Synthetic peptide
DLGITSFGYAIL

SEQ ID NO: 160 - protein, 12 aa, Artificial Sequence
  Synthetic peptide
DIGTSSIGWWLY

SEQ ID NO: 161 - protein, 12 aa, Artificial Sequence
  Synthetic peptide
DLGSNSLGWFVT

SEQ ID NO: 162 - protein, 12 aa, Artificial Sequence
  Synthetic peptide
DLGANSLGWFVV

SEQ ID NO: 163 - protein, 12 aa, Artificial Sequence
  Synthetic peptide
DIGNASVGWSAF

SEQ ID NO: 164 - protein, 12 aa, Artificial Sequence
  Synthetic peptide
DVGTNSCGWVAM

SEQ ID NO: 165 - protein, 12 aa, Artificial Sequence
  Synthetic peptide
DVGERSIGLAAV

SEQ ID NO: 166 - protein, 12 aa, Artificial Sequence
  Synthetic peptide
DVGLNSVGLAAV

SEQ ID NO: 167 - protein, 12 aa, Artificial Sequence
  Synthetic peptide
DVGLMSVGLAAI

SEQ ID NO: 168 - protein, 12 aa, Artificial Sequence
  Synthetic peptide
DVGTFSVGLAAI

SEQ ID NO: 169 - protein, 12 aa, Artificial Sequence
  Synthetic peptide
DIGTGSVGYACM

SEQ ID NO: 170 - protein, 12 aa, Artificial Sequence
  Synthetic peptide
DLGTNSIGSSVR

SEQ ID NO: 171 - protein, 15 aa, Artificial Sequence
  Synthetic peptide
DIGLRIGITSCGWSI

SEQ ID NO: 172 - protein, 12 aa, Artificial Sequence
  Synthetic peptide
DMGAKYTGVFYA

SEQ ID NO: 173 - protein, 12 aa, Artificial Sequence
  Synthetic peptide
DLGGKNTGFFSF

SEQ ID NO: 174 - protein, 12 aa, Artificial Sequence
  Synthetic peptide
DLGVKNTGVFSA

SEQ ID NO: 175 - protein, 12 aa, Artificial Sequence
  Synthetic peptide
DLGAKFTGVALY

SEQ ID NO: 176 - protein, 12 aa, Artificial Sequence
  Synthetic peptide
DLGGKFTGVCLS

SEQ ID NO: 177 - protein, 12 aa, Artificial Sequence
  Synthetic peptide
DLGGTYTGTFIT

SEQ ID NO: 178 - protein, 28 aa, Artificial Sequence
  Synthetic peptide
YDIDHIYPRSLTKDDSFDNLVLCERTAN

SEQ ID NO: 179 - protein, 28 aa, Artificial Sequence
  Synthetic peptide
DIDHIYPRSKVIKDDSFDNLVLVLKNEN

SEQ ID NO: 180 - protein, 27 aa, Artificial Sequence
  Synthetic peptide
DRDHIYPQSKIKDDSIDNLVLVNKTYN

SEQ ID NO: 181 - protein, 27 aa, Artificial Sequence
  Synthetic peptide
DIDHIYPRSKIKDDSITNRVLVEKDIN

SEQ ID NO: 182 - protein, 27 aa, Artificial Sequence
  Synthetic peptide
DIDHIYPQSKIKDDSISNRVLVCSSCN

SEQ ID NO: 183 - protein, 27 aa, Artificial Sequence
  Synthetic peptide
DIDHIYPQSKTMDDSLNNRVLVKKNYN

SEQ ID NO: 184 - protein, 27 aa, Artificial Sequence
  Synthetic peptide
DQDHIYPKSKIYDDSLENRVLVKKNLN

SEQ ID NO: 185 - protein, 27 aa, Artificial Sequence
  Synthetic peptide
QIDHIVPQSLVKDDSFDNRVLVVPSEN

SEQ ID NO: 186 - protein, 27 aa, Artificial Sequence
  Synthetic peptide
DIDHIIPQAFIKDNSIDNRVLTSSKEN

SEQ ID NO: 187 - protein, 27 aa, Artificial Sequence
  Synthetic peptide
DIDHIIPQAFLKDNSIDNKVLVSSASN

SEQ ID NO: 188 - protein, 27 aa, Artificial Sequence
  Synthetic peptide
DIDHIIPQAYTKDNSLDNRVLVSNITN

SEQ ID NO: 189 - protein, 27 aa, Artificial Sequence
  Synthetic peptide
DIDHIVPQSFITDNSIDNLVLTSSAGN

SEQ ID NO: 190 - protein, 27 aa, Artificial Sequence
  Synthetic peptide
DVDHIVPQSFLKDDSIDNKVLTRSDKN

SEQ ID NO: 191 - protein, 27 aa, Artificial Sequence
  Synthetic peptide
NIDHIYPQSMVKDDSLDNKVLVQSEIN

SEQ ID NO: 192 - protein, 27 aa, Artificial Sequence
  Synthetic peptide
DIDHILPQSLIKDDSLDNRVLVNATIN

SEQ ID NO: 193 - protein, 27 aa, Artificial Sequence
  Synthetic peptide
DIDHILPQSFIKDDSLENRVLVKKAVN

SEQ ID NO: 194 - protein, 27 aa, Artificial Sequence
  Synthetic peptide
EVDHIFPRSFIKDDSIDNKVLVIKKMN

SEQ ID NO: 195 - protein, 27 aa, Artificial Sequence
  Synthetic peptide
EVDHIIPRSYIKDDSFENKVLVYREEN

SEQ ID NO: 196 - protein, 27 aa, Artificial Sequence
  Synthetic peptide
DIDHIIPQAVTQNDSIDNRVLVARAEN

SEQ ID NO: 197 - protein, 27 aa, Artificial Sequence
  Synthetic peptide
EIDHIIPYSISFDDSSSNKLLVLAESN

SEQ ID NO: 198 - protein, 27 aa, Artificial Sequence
  Synthetic peptide
EIDHIIPYSLCFDDSSANKVLVHKQSN

SEQ ID NO: 199 - protein, 27 aa, Artificial Sequence
  Synthetic peptide
DIDHIIPYSRSMDDSYSNKVLVLSGEN

SEQ ID NO: 200 - protein, 27 aa, Artificial Sequence
  Synthetic peptide
DIDHIIPYSKSMDDSFNNKVLCLAEEN

SEQ ID NO: 201 - protein, 27 aa, Artificial Sequence
  Synthetic peptide
EIDHIYPYSRSFDDSYMNKVLVFTKQN

SEQ ID NO: 202 - protein, 27 aa, Artificial Sequence
  Synthetic peptide
QIDHIYPYSRSMDDSYMNKVLVLTDEN

SEQ ID NO: 203 - protein, 27 aa, Artificial Sequence
  Synthetic peptide
EIDHIIPFSRSFDDSLSNKILVLGSEN

SEQ ID NO: 204 - protein, 27 aa, Artificial Sequence
  Synthetic peptide
EIDHALPFSRTWDDSFNNKVLVLGSEN

SEQ ID NO: 205 - protein, 27 aa, Artificial Sequence
  Synthetic peptide
EIDHALPFSRTWDDSFNNKVLVLASEN

SEQ ID NO: 206 - protein, 27 aa, Artificial Sequence
  Synthetic peptide
EIDHIIPISISLDDSINNKVLVLSKAN

SEQ ID NO: 207 - protein, 27 aa, Artificial Sequence
  Synthetic peptide
EVDHIIPISISLDDSITNKVLVTHREN

SEQ ID NO: 208 - protein, 27 aa, Artificial Sequence
  Synthetic peptide
QVDHALPYSRSYDDSKNNKVLVLTHEN

SEQ ID NO: 209 - protein, 27 aa, Artificial Sequence
  Synthetic peptide
EVDHILPLSITFDDSLANKVLVYATAN

SEQ ID NO: 210 - protein, 27 aa, Artificial Sequence
  Synthetic peptide
EIDHIIPRSISFDDARSNKVLVYRSEN

SEQ ID NO: 211 - protein, 27 aa, Artificial Sequence
  Synthetic peptide
EVDHIIPRSVSFDNSYHNKVLVKQSEN

SEQ ID NO: 212 - protein, 27 aa, Artificial Sequence
  Synthetic peptide
DIDHILPYSITFDDSFRNKVLVTSQEN

SEQ ID NO: 213 - protein, 27 aa, Artificial Sequence
  Synthetic peptide
EIDHILPRSRSADDSFANKVLCLARAN

SEQ ID NO: 214 - protein, 27 aa, Artificial Sequence
  Synthetic peptide
EIEHLLPFSLTLDDSMANKTVCFRQAN

SEQ ID NO: 215 - protein, 27 aa, Artificial Sequence
  Synthetic peptide
DIDHILPFSVSLDDSAANKVVCLREAN

SEQ ID NO: 216 - protein, 27 aa, Artificial Sequence
  Synthetic peptide
DIDHLIPFSISWDDSAANKVVCMRYAN

SEQ ID NO: 217 - protein, 27 aa, Artificial Sequence
  Synthetic peptide
DIDHILPVAMTLDDSPANKIICMRYAN

SEQ ID NO: 218 - protein, 27 aa, Artificial Sequence
  Synthetic peptide
DVDHILPYSRTLDDSFPNRTLCLREAN

SEQ ID NO: 219 - protein, 27 aa, Artificial Sequence
  Synthetic peptide
EIEHILPFSRTLDDSLNNRTVAMRRAN

SEQ ID NO: 220 - protein, 27 aa, Artificial Sequence
  Synthetic peptide
EVDHIIPYSISWDDSYTNKVLTSAKCN

SEQ ID NO: 221 - protein, 27 aa, Artificial Sequence
  Synthetic peptide
QVDHILPWSRFGDDSYLNKTLCTARSN

SEQ ID NO: 222 - protein, 27 aa, Artificial Sequence
  Synthetic peptide
QVDHILPFSKTLDDSFANKVLAQHDAN

SEQ ID NO: 223 - protein, 27 aa, Artificial Sequence
  Synthetic peptide
QIDHAFPLSRSLDDSQSNKVLCLTSSN

SEQ ID NO: 224 - protein, 27 aa, Artificial Sequence
  Synthetic peptide
DIDHIVPRSISFDDSFSNLVIVNKLDN

SEQ ID NO: 225 - protein, 27 aa, Artificial Sequence
  Synthetic peptide
EIEHIIPYSMSYDNSQANKILTEKAEN

SEQ ID NO: 226 - protein, 27 aa, Artificial Sequence
  Synthetic peptide
EIDHVIPYSKSADDSWFNKLLVKKSTN

SEQ ID NO: 227 - protein, 27 aa, Artificial Sequence
  Synthetic peptide
EMDHILPYSRSLDNGWHNRVLVHGKDN

SEQ ID NO: 228 - protein, 27 aa, Artificial Sequence
  Synthetic peptide
EVDHIVPYSLILDNTINNKALVYAEEN

SEQ ID NO: 229 - protein, 27 aa, Artificial Sequence
  Synthetic peptide
EIEHVIPQSLYFDDSFSNKVICEAEVN

SEQ ID NO: 230 - protein, 27 aa, Artificial Sequence
  Synthetic peptide
DIEHIIPQARLFDDSFSNKTLEARSVN

SEQ ID NO: 231 - protein, 27 aa, Artificial Sequence
  Synthetic peptide
EIEHIVPKARVFDDSFSNKTLTFHRIN

SEQ ID NO: 232 - protein, 28 aa, Artificial Sequence
  Synthetic peptide
DKDHIIPQSMKKDDSIINNLVLVNKNAN

SEQ ID NO: 233 - protein, 27 aa, Artificial Sequence
  Synthetic peptide
EVEHIWPRSRSFDNSPRNKTLCRKDVN

SEQ ID NO: 234 - protein, 27 aa, Artificial Sequence
  Synthetic peptide
IVNHIIPYNRSFDDTYHNRVLTLTETK

SEQ ID NO: 235 - protein, 27 aa, Artificial Sequence
  Synthetic peptide
DMEHTIPKSISFDNSDQNLTLCESYYN

SEQ ID NO: 236 - protein, 27 aa, Artificial Sequence
  Synthetic peptide
DIEHTIPRSAGGDSTKMNLTLCSSRFN

SEQ ID NO: 237 - protein, 27 aa, Artificial Sequence
  Synthetic peptide
DIEHTIPRSISQDNSQMNKTLCSLKFN

SEQ ID NO: 238 - protein, 27 aa, Artificial Sequence
  Synthetic peptide
DIDHVIPLARGGRDSLDNMVLCQSDAN

SEQ ID NO: 239 - protein, 27 aa, Artificial Sequence
  Synthetic peptide
DIEHLFPIAESEDNGRNNLVISHSACN

SEQ ID NO: 240 - protein, 27 aa, Artificial Sequence
  Synthetic peptide
DVDHIFPRDDTADNSYGNKVVAHRQCN

SEQ ID NO: 241 - protein, 27 aa, Artificial Sequence
  Synthetic peptide
DIEHIVPQSLGGLSTDYNTIVTLKSVN

SEQ ID NO: 242 - protein, 27 aa, Artificial Sequence
  Synthetic peptide
ELDHIVPRTDGGSNRHENLAITCGACN

SEQ ID NO: 243 - protein, 28 aa, Artificial Sequence
  Synthetic peptide
EMDHIVPRKGVGSTNTRTNFAAVCAECN

SEQ ID NO: 244 - protein, 28 aa, Artificial Sequence
  Synthetic peptide
EMDHIVPRKGVGSTNTRVNLAAACAACN

SEQ ID NO: 245 - protein, 28 aa, Artificial Sequence
  Synthetic peptide
EMDHIVPRAGQGSTNTRENLVAVCHRCN

SEQ ID NO: 246 - protein, 33 aa, Artificial Sequence
  Synthetic polypeptide
EIDHILPRSLIKDARGIVFNAEPNLIYASSRGN

SEQ ID NO: 247 - protein, 33 aa, Artificial Sequence
  Synthetic polypeptide
EIDHIIPRSLTGRTKKTVFNSEANLIYCSSKGN

SEQ ID NO: 248 - protein, 33 aa, Artificial Sequence
  Synthetic polypeptide
EIDHIIPRSLTLKKSESIYNSEVNLIFVSAQGN

SEQ ID NO: 249 - protein, 33 aa, Artificial Sequence
  Synthetic polypeptide
EIDHIYPRSLSKKHFGVIFNSEVNLIYCSSQGN

SEQ ID NO: 250 - protein, 33 aa, Artificial Sequence
  Synthetic polypeptide
EIDHILPRSHTLKIYGTVFNPEGNLIYVHQKCN

SEQ ID NO: 251 - protein, 30 aa, Artificial Sequence
  Synthetic polypeptide
ELDHIIPRSHKKYGTLNDEANLICVTRGDN

SEQ ID NO: 252 - protein, 27 aa, Artificial Sequence
  Synthetic peptide
ELEHIVPHSFRQSNALSSLVLTWPGVN

SEQ ID NO: 253 - protein, 28 aa, Artificial Sequence
  Synthetic peptide
YDIDHIYPRSLTKDDSFDNLVLCERTAN

SEQ ID NO: 254 - protein, 28 aa, Artificial Sequence
  Synthetic peptide
DIDHIYPRSKVIKDDSFDNLVLVLKNEN

SEQ ID NO: 255 - protein, 27 aa, Artificial Sequence
  Synthetic peptide
DRDHIYPQSKIKDDSIDNLVLVNKTYN

SEQ ID NO: 256 - protein, 27 aa, Artificial Sequence
  Synthetic peptide
DIDHIYPRSKIKDDSITNRVLVEKDIN

SEQ ID NO: 257 - protein, 27 aa, Artificial Sequence
  Synthetic peptide
DIDHIYPQSKIKDDSISNRVLVCSSCN

SEQ ID NO: 258 - protein, 27 aa, Artificial Sequence
  Synthetic peptide
DIDHIYPQSKTMDDSLNNRVLVKKNYN

SEQ ID NO: 259 - protein, 27 aa, Artificial Sequence
  Synthetic peptide
DQDHIYPKSKIYDDSLENRVLVKKNLN

SEQ ID NO: 260 - protein, 27 aa, Artificial Sequence
  Synthetic peptide
QIDHIVPQSLVKDDSFDNRVLVVPSEN

SEQ ID NO: 261 - protein, 27 aa, Artificial Sequence
  Synthetic peptide
DIDHIIPQAFIKDNSIDNRVLTSSKEN

SEQ ID NO: 262 - protein, 27 aa, Artificial Sequence
  Synthetic peptide
DIDHIIPQAFLKDNSIDNKVLVSSASN

SEQ ID NO: 263 - protein, 27 aa, Artificial Sequence
  Synthetic peptide
DIDHIIPQAYTKDNSLDNRVLVSNITN

SEQ ID NO: 264 - protein, 27 aa, Artificial Sequence
  Synthetic peptide
DIDHIVPQSFITDNSIDNLVLTSSAGN

SEQ ID NO: 265 - protein, 27 aa, Artificial Sequence
  Synthetic peptide
DVDHIVPQSFLKDDSIDNKVLTRSDKN

SEQ ID NO: 266 - protein, 27 aa, Artificial Sequence
  Synthetic peptide
NIDHIYPQSMVKDDSLDNKVLVQSEIN

SEQ ID NO: 267 - protein, 27 aa, Artificial Sequence
  Synthetic peptide
DIDHILPQSLIKDDSLDNRVLVNATIN

SEQ ID NO: 268 - protein, 27 aa, Artificial Sequence
  Synthetic peptide
DIDHILPQSFIKDDSLENRVLVKKAVN

SEQ ID NO: 269 - protein, 27 aa, Artificial Sequence
  Synthetic peptide
EVDHIFPRSFIKDDSIDNKVLVIKKMN

SEQ ID NO: 270 - protein, 27 aa, Artificial Sequence
  Synthetic peptide
EVDHIIPRSYIKDDSFENKVLVYREEN

SEQ ID NO: 271 - protein, 27 aa, Artificial Sequence
  Synthetic peptide
DIDHIIPQAVTQNDSIDNRVLVARAEN

SEQ ID NO: 272 - protein, 27 aa, Artificial Sequence
  Synthetic peptide
DIDHIVPRSISFDDSFSNLVIVNKLDN

SEQ ID NO: 273 - protein, 27 aa, Artificial Sequence
  Synthetic peptide
EIDHIIPYSISFDDSSSNKLLVLAESN

SEQ ID NO: 274 - protein, 27 aa, Artificial Sequence
  Synthetic peptide
EIDHIIPYSLCFDDSSANKVLVHKQSN

SEQ ID NO: 275 - protein, 27 aa, Artificial Sequence
  Synthetic peptide
EIDHIIPISISLDDSINNKVLVLSKAN

SEQ ID NO: 276 - protein, 27 aa, Artificial Sequence
  Synthetic peptide
EVDHIIPISISLDDSITNKVLVTHREN

SEQ ID NO: 277 - protein, 27 aa, Artificial Sequence
  Synthetic peptide
EVDHILPLSITFDDSLANKVLVYATAN

SEQ ID NO: 278 - protein, 27 aa, Artificial Sequence
  Synthetic peptide
EIDHIIPRSISFDDARSNKVLVYRSEN

SEQ ID NO: 279 - protein, 27 aa, Artificial Sequence
  Synthetic peptide
EVDHIIPRSVSFDNSYHNKVLVKQSEN

SEQ ID NO: 280 - protein, 27 aa, Artificial Sequence
  Synthetic peptide
EVDHIIPYSISWDDSYTNKVLTSAKCN

SEQ ID NO: 281 - protein, 27 aa, Artificial Sequence
  Synthetic peptide
DIDHIIPYSRSMDDSYSNKVLVLSGEN

SEQ ID NO: 282 - protein, 27 aa, Artificial Sequence
  Synthetic peptide
EIEHIIPYSMSYDNSQANKILTEKAEN

SEQ ID NO: 283 - protein, 27 aa, Artificial Sequence
  Synthetic peptide
EVDHIVPYSLILDNTINNKALVYAEEN

SEQ ID NO: 284 - protein, 27 aa, Artificial Sequence
  Synthetic peptide
EIDHVIPYSKSADDSWFNKLLVKKSTN

SEQ ID NO: 285 - protein, 27 aa, Artificial Sequence
  Synthetic peptide
EMDHILPYSRSLDNGWHNRVLVHGKDN

SEQ ID NO: 286 - protein, 27 aa, Artificial Sequence
  Synthetic peptide
EIEHVIPQSLYFDDSFSNKVICEAEVN

SEQ ID NO: 287 - protein, 27 aa, Artificial Sequence
  Synthetic peptide
DIEHIIPQARLFDDSFSNKTLEARSVN

SEQ ID NO: 288 - protein, 27 aa, Artificial Sequence
  Synthetic peptide
EIEHIVPKARVFDDSFSNKTLTFHRIN

SEQ ID NO: 289 - protein, 28 aa, Artificial Sequence
  Synthetic peptide
DKDHIIPQSMKKDDSIINNLVLVNKNAN

SEQ ID NO: 290 - protein, 27 aa, Artificial Sequence
  Synthetic peptide
QVDHILPWSRFGDDSYLNKTLCTARSN

SEQ ID NO: 291 - protein, 27 aa, Artificial Sequence
  Synthetic peptide
DIDHVIPLARGGRDSLDNMVLCQSDAN

SEQ ID NO: 292 - protein, 27 aa, Artificial Sequence
  Synthetic peptide
DMEHTIPKSISFDNSDQNLTLCESYYN

SEQ ID NO: 293 - protein, 27 aa, Artificial Sequence
  Synthetic peptide
DIEHTIPRSAGGDSTKMNLTLCSSRFN

SEQ ID NO: 294 - protein, 27 aa, Artificial Sequence
  Synthetic peptide
DIEHTIPRSISQDNSQMNKTLCSLKFN

SEQ ID NO: 295 - protein, 27 aa, Artificial Sequence
  Synthetic peptide
DIEHLFPIAESEDNGRNNLVISHSACN

SEQ ID NO: 296 - protein, 27 aa, Artificial Sequence
  Synthetic peptide
DVDHIFPRDDTADNSYGNKVVAHRQCN

SEQ ID NO: 297 - protein, 27 aa, Artificial Sequence
  Synthetic peptide
DIEHIVPQSLGGLSTDYNTIVTLKSVN

SEQ ID NO: 298 - protein, 27 aa, Artificial Sequence
  Synthetic peptide
ELDHIVPRTDGGSNRHENLAITCGACN

SEQ ID NO: 299 - protein, 28 aa, Artificial Sequence
  Synthetic peptide
EMDHIVPRKGVGSTNTRTNFAAVCAECN

SEQ ID NO: 300 - protein, 28 aa, Artificial Sequence
  Synthetic peptide
EMDHIVPRKGVGSTNTRVNLAAACAACN

SEQ ID NO: 301 - protein, 28 aa, Artificial Sequence
  Synthetic peptide
EMDHIVPRAGQGSTNTRENLVAVCHRCN

SEQ ID NO: 302 - protein, 27 aa, Artificial Sequence
  Synthetic peptide
ELEHIVPHSFRQSNALSSLVLTWPGVN

SEQ ID NO: 303 - DNA, 3333 bp, Artificial Sequence
  Synthetic polynucleotide
atggtgcctaagaagaagagaaaggtggctgccttcaaacctaattcaatcaactacatcctcggcctcgatatcggcatcgcatccgtcggctgggcgatggtagaaattgacgaagaagaaaaccccatccgcctgattgatttgggcgtgcgcgtatttgagcgtgccgaagtaccgaaaacaggcgactcccttgccatggcaaggcgtttggcgcgcagtgttcgccgcctgacccgccgtcgcgcccaccgcctgcttcggacccgccgcctattgaaacgcgaaggcgtattacaagccgccaattttgacgaaaacggcttgattaaatccttaccgaatacaccatggcaacttcgcgcagccgcattagaccgcaaactgacgcctttagagtggtcggcagtcttgttgcatttaatcaaacatcgcggctatttatcgcaacggaaaaacgagggcgaaactgccgataaggagcttggcgctttgcttaaaggcgtagccggcaatgcccatgccttacagacaggcgatttccgcacaccggccgaattggctttaaataaatttgagaaagaaagcggccatatccgcaatcagcgcagcgattattcgcatacgttcagccgcaaagatttacaggcggagctgattttgctgtttgaaaaacaaaaagaatttggcaatccgcatgtttcaggcggccttaaagaaggtattgaaaccctactgatgacgcaacgccctgccctgtccggcgatgccgttcaaaaaatgttggggcattgcaccttcgaaccggcagagccgaaagccgctaaaaacacctacacagccgaacgtttcatctggctgaccaagctgaacaacctgcgtattttagagcaaggcagcgagcggccattgaccgataccgaacgcgccacgcttatggacgagccatacagaaaatccaaactgacttacgcacaagcccgtaagctgctgggtttagaagataccgcctttttcaaaggcttgcgctatggtaaagacaatgccgaagcctcaacattgatggaaatgaaggcctaccatgccatcagccgtgcactggaaaaagaaggattgaaagacaaaaaatccccattaaacctttctcccgaattacaagacgaaatcggcacggcattctccctgttcaaaaccgatgaagacattacaggccgtctgaaagaccgtatacagcccgaaatcttagaagcgctgttgaaacacatcagcttcgataagttcgtccaaatttccttgaaagcattgcgccgaattgtgcctctaatggaacaaggcaaacgttacgatgaagcctgcgccgaaatctacggagaccattacggcaagaagaatacggaagaaaagatttatctgccgccgattcccgccgacgaaatccgcaaccccgtcgtcttgcgcgccttatctcaagcacgtaaggtcattaacggcgtggtacgccgttacggctccccagctcgtatccatattgaaactgcaagggaagtaggtaaatcgtttaaagaccgcaaagaaattgagaaacgccaagaagaaaaccgcaaagaccgggaaaaagccgccgccaaattccgagagtatttccccaattttgtcggagaacccaaatccaaagatattctgaaactgcgcctgtacgagcaacaacacggcaaatgcctgtattcgggcaaagaaatcaacttaggccgtctgaacgaaaaaggctatgtcgaaatcgaccatgccctgccgttctcgcgcacatgggacgacagtttcaacaataaagtactggtattgggcagcgaaaaccaaaacaaaggcaatcaaaccccttacgaatacttcaacggcaaagacaacagccgcgaatggcaggaatttaaagcgcgtgtcgaaaccagccgtttcccgcgcagtaaaaaacaacggattctgctgcaaaaattcgatgaagacggctttaaagaacgcaatctgaacgacacgcgctacgtcaaccgtttcctgtgtcaatttgttgccgaccgtatgcggctgacaggtaaaggcaagaaacgtgtctttgcatccaacggacaaattaccaatctgttgcgcggcttttggggattgcgcaaagtgcgtgcggaaaacgaccgccatcacgccttggacgccgtcgtcgttgcctgctcgaccgttgccatgcagcagaaaattacccgttttgtacgctataaagagatgaacgcgtttgacggtaaaaccatagacaaagaaacaggagaagtgctgcatcaaaaaacacacttcccacaaccttgggaatttttcgcacaagaagtcatgattcgcgtcttcggcaaaccggacggcaaacccgaattcgaagaagccgataccctagaaaaactgcgcacgttgcttgccgaaaaattatcatctcgccccgaagccgtacacgaatacgttacgccactgtttgtttcacgcgcgcccaatcggaagatgagcgggcaagggcatatggagaccgtcaaatccgccaaacgactggacgaaggcgtcagcgtgttgcgcgtaccgctgacacagttaaaactgaaagacttggaaaaaatggtcaatcgggagcgcgaacctaagctatacgaagcactgaaagcacggctggaagcacataaagacgatcctgccaaagcctttgccgagccgttttacaaatacgataaagcaggcaaccgcacccaacaggtaaaagccgtacgcgtagagcaagtacagaaaaccggcgtatgggtgcgcaaccataacggtattgccgacaacgcaaccatggtgcgcgtagatgtgtttgagaaaggcgacaagtattatctggtaccgatttacagttggcaggtagcgaaagggattttgccggatagggctgttgtacaaggaaaagatgaagaagattggcaacttattgatgatagtttcaactttaaattctcattacaccctaatgatttagtcgaggttataacaaaaaaagctagaatgtttggttactttgccagctgccatcgaggcacaggtaatatcaatatacgcattcatgatcttgatcataaaattggcaaaaatggaatactggaaggtatcggcgtcaaaaccgccctttcattccaaaaataccaaattgacgaactgggcaaagaaatcagaccatgccgtctgaaaaaacgcccgcctgtccgttacccatacgatgttccagattacgctgcagctccagcagcgaagaaaaagaagctggattaa

SEQ ID NO: 304 - protein, 1053 aa, Staphylococcus aureus; identical to SEQ ID NO: 26

SEQ ID NO: 305 - protein, 1368 aa, Streptococcus pyogenes [sequence omitted]

SEQ ID NO: 306 - protein, 984 aa, Campylobacter jejuni
MARILAFDIGISSIGWAFSENDELKDCGVRIFTKVENPKTGESLALPRRLARSARKRLARRKARLNHLKHLIANEFKLNYEDYQSFDESLAKAYKGSLISPYELRFRALNELLSKQDFARVILHIAKRRGYDDIKNSDDKEKGAILKAIKQNEEKLANYQSVGEYLYKEYFQKFKENSKEFTNVRNKKESYERCIAQSFLKDELKLIFKKQREFGFSFSKKFEEEVLSVAFYKRALKDFSHLVGNCSFFTDEKRAPKNSPLAFMFVALTRIINLLNNLKNTEGILYTKDDLNALLNEVLKNGTLTYKQTKKLLGLSDDYEFKGEKGTYFIEFKKYKEFIKALGEHNLSQDDLNEIAKDITLIKDEIKLKKALAKYDLNQNQIDSLSKLEFKDHLNISFKALKLVTPLMLEGKKYDEACNELNLKVAINEDKKDFLPAFNETYYKDEVTNPVVLRAIKEYRKVLNALLKKYGKVHKINIELAREVGKNHSQRAKIEKEQNENYKAKKDAELECEKLGLKINSKNILKLRLFKEQKEFCAYSGEKIKISDLQDEKMLEIDHIYPYSRSFDDSYMNKVLVFTKQNQEKLNQTPFEAFGNDSAKWQKIEVLAKNLPTKKQKRILDKNYKDKEQKNFKDRNLNDTRYIARLVLNYTKDYLDFLPLSDDENTKLNDTQKGSKVHVEAKSGMLTSALRHTWGFSAKDRNNHLHHAIDAVIIAYANNSIVKAFSDFKKEQESNSAELYAKKISELDYKNKRKFFEPFSGFRQKVLDKIDEIFVSKPERKKPSGALHEETFRKEEEFYQSYGGKEGVLKALELGKIRKVNGKIVKNGDMFRVDIFKHKKTNKFYAVPIYTMDFALKVLPNKAVARSKKGEIKDWILMDENYEFCFSLYKDSLILIQTKDMQEPEFVYYNAFTSSTVSLIVSKHDNKFETLSKNQKILFKNANEKEVIAKSIGIQNLKVFEKYIVSALGEVTKAEFRQREDFKK

SEQ ID NO: 307 - protein, 1436 aa, Bacteroides fragilis
MKRILGLDLGTNSIGWALVNEAENKDERSSIVKLGVRVNPLTVDELTNFEKGKSITTNADRTLKRGMRRNLQRYKLRRETLTEVLKEHKLITEDTILSENGNRTTFETYRLRAKAVTEEISLEEFARVLLMINKKRGYKSSRKAKGVEEGTLIDGMDIARELYNNNLTPGELCLQLLDAGKKFLPDFYRSDLQNELDRIWEKQKEYYPEILTDVLKEELRGKKRDAVWAICAKYFVWKENYTEWNKEKGKTEQQEREHKLEGIYSKRKRDEAKRENLQWRVNGLKEKLSLEQLVIVFQEMNTQINNSSGYLGAISDRSKELYFNKQTVGQYQMEMLDKNPNASLRNMVFYRQDYLDEFNMLWEKQAVYHKELTEELKKEIRDIIIFYQRRLKSQKGLIGFCEFESRQIEVDIDGKKKIKTVGNRVISRSSPLFQEFKIWQILNNIEVTVVGKKRKRRKLKENYSALFEELNDAEQLELNGSRRLCQEEKELLAQELFIRDKMTKSEVLKLLFDNPQELDLNFKTIDGNKTGYALFQAYSKMIEMSGHEPVDFKKPVEKVVEYIKAVFDLLNWNTDILGFNSNEELDNQPYYKLWHLLYSFEGDNTPTGNGRLIQKMTELYGFEKEYATILANVSFQDDYGSLSAKAIHKILPHLKEGNRYDVACVYAGYRHSESSLTREEIANKVLKDRLMLLPKNSLHNPVVEKILNQMVNVINVIIDIYGKPDEIRVELARELKKNAKEREELTKSIAQTTKAHEEYKTLLQTEFGLTNVSRTDILRYKLYKELESCGYKTLYSNTYISREKLFSKEFDIEHIIPQARLFDDSFSNKTLEARSVNIEKGNKTAYDFVKEKFGESGADNSLEHYLNNIEDLFKSGKISKTKYNKLKMAEQDIPDGFIERDLRNTQYIAKKALSMLNEISHRVVATSGSVTDKLREDWQLIDVMKELNWEKYKALGLVEYFEDRDGRQIGRIKDWTKRNDHRHHAMDALTVAFTKDVFIQYFNNKNASLDPNANEHAIKNKYFQNGRAIAPMPLREFRAEAKKHLENTLISIKAKNKVITGNINKTRKKGGVNKNMQQTPRGQLHLETIYGSGKQYLTKEEKVNASFDMRKIGTVSKSAYRDALLKRLYENDNDPKKAFAGKNSLDKQPIWLDKEQMRKVPEKVKIVTLEAIYTIRKEISPDLKVDKVIDVGVRKILIDRLNEYGNDAKKAFSNLDKNPIWLNKEKGISIKRVTISGISNAQSLHVKKDKDGKPILDENGRNIPVDFVNTGNNHHVAVYYRPVIDKRGQLVVDEAGNPKYELEEVVVSFFEAVTRANLGLPIIDKDYKTTEGWQFLFSMKQNEYFVFPNEKTGFNPKEIDLLDVENYGLISPNLFRVQKFSLKNYVFRHHLETTIKDTSSILRGITWIDFRSSKGLDTIVKVRVNHIGQIVSVGEY

SEQ ID NO: 308 - protein, 1420 aa, Bifidobacterium bifidum
MSRKNYVDDYAISLDIGNASVGWSAFTPNYRLVRAKGHELIGVRLFDPADTAESRRMARTTRRRYSRRRWRLRLLDALFDQALSEIDPSFLARRKYSWVHPDDENNADCWYGSVLFDSNEQDKRFYEKYPTIYHLRKALMEDDSQHDIREIYLAIHHMVKYRGNFLVEGTLESSNAFKEDELLKLLGRITRYEMSEGEQNSDIEQDDENKLVAPANGQLADALCATRGSRSMRVDNALEALSAVNDLSREQRAIVKAIFAGLEGNKLDLAKIFVSKEFSSENKKILGIYFNKSDYEEKCVQIVDSGLLDDEEREFLDRMQGQYNAIALKQLLGRSTSVSDSKCASYDAHRANWNLIKLQLRTKENEKDINENYGILVGWKIDSGQRKSVRGESAYENMRKKANVFFKKMIETSDLSETDKNRLIHDIEEDKLFPIQRDSDNGVIPHQLHQNELKQIIKKQGKYYPFLLDAFEKDGKQINKIEGLLTFRVPYFVGPLVVPEDLQKSDNSENHWMVRKKKGEITPWNFDEMVDKDASGRKFIERLVGTDSYLLGEPTLPKNSLLYQEYEVLNELNNVRLSVRTGNHWNDKRRMRLGREEKTLLCQRLFMKGQTVTKRTAENLLRKEYGRTYELSGLSDESKFTSSLSTYGKMCRIFGEKYVNEHRDLMEKIVELQTVFEDKETLLHQLRQLEGISEADCALLVNTHYTGWGRLSRKLLTTKAGECKISDDFAPRKHSIIEIMRAEDRNLMEIITDKQLGFSDWIEQENLGAENGSSLMEVVDDLRVSPKVKRGIIQSIRLIDDISKAVGKRPSRIFLELADDIQPSGRTISRKSRLQDLYRNANLGKEFKGIADELNACSDKDLQDDRLFLYYTQLGKDMYTGEELDLDRLSSAYDIDHIIPQAVTQNDSIDNRVLVARAENARKTDSFTYMPQIADRMRNFWQILLDNGLISRVKFERLTRQNEFSEREKERFVQRSLVETRQIMKNVATLMRQRYGNSAAVIGLNAELTKEMHRYLGFSHKNRDINDYHHAQDALCVGIAGQFAANRGFFADGEVSDGAQNSYNQYLRDYLRGYREKLSAEDRKQGRAFGFIVGSMRSQDEQKRVNPRTGEVVWSEEDKDYLRKVMNYRKMLVTQKVGDDFGALYDETRYAATDPKGIKGIPFDGAKQDTSLYGGFSSAKPAYAVLIESKGKTRLVNVTMQEYSLLGDRPSDDELRKVLAKKKSEYAKANILLRHVPKMQLIRYGGGLMVIKSAGELNNAQQLWLPYEEYCYFDDLSQGKGSLEKDDLKKLLDSILGSVQCLYPWHRFTEEELADLHVAFDKLPEDEKKNVITGIVSALHADAKTANLSIVGMTGSWRRMNNKSGYTFSDEDEFIFQSPSGLFEKRVTVGELKRKAKKEVNSKYRTNEKRLPTLSGASQP

SEQ ID NO: 309 - protein, 1397 aa, Veillonella atypica
METQTSNQLITSHLKDYPKQDYFVGLDIGTNSVGWAVTNTSYELLKFHSHKMWGSRLFEEGESAVTRRGFRSMRRRLERRKLRLKLLEELFADAMAQVDSTFFIRLHESKYHYEDKTTGHSSKHILFIDEDYTDQDYFTEYPTIYHLRKDLMENGTDDIRKLFLAVHHILKYRGNFLYEGATFNSNAFTFEDVLKQALVNITFNCFDTNSAISSISNILMESGKTKSDKAKAIERLVDTYTVFDEVNTPDKPQKEQVKEDKKTLKAFANLVLGLSANLIDLFGSVEDIDDDLKKLQIVGDTYDEKRDELAKVWGDEIHIIDDCKSVYDAIILMSIKEPGLTISQSKVKAFDKHKEDLVILKSLLKLDRNVYNEMFKSDKKGLHNYVHYIKQGRTEETSCSREDFYKYTKKIVEGLADSKDKEYILNEIELQTLLPLQRIKDNGVIPYQLHLEELKVILDKCGPKFPFLHTVSDGFSVTEKLIKMLEFRIPYYVGPLNTHHNIDNGGFSWAVRKQAGRVTPWNFEEKIDREKSAAAFIKNLTNKCTYLFGEDVLPKSSLLYSEFMLLNELNNVRIDGKALAQGVKQHLIDSIFKQDHKKMTKNRIELFLKDNNYITKKHKPEITGLDGEIKNDLTSYRDMVRILGNNFDVSMAEDIITDITIFGESKKMLRQTLRNKFGSQLNDETIKKLSKLRYRDWGRLSKKLLKGIDGCDKAGNGAPKTIIELMRNDSYNLMEILGDKFSFMECIEEENAKLAQGQVVNPHDIIDELALSPAVKRAVWQALRIVDEVAHIKKALPSRIFVEVARTNKSEKKKKDSRQKRLSDLYSAIKKDDVLQSGLQDKEFGALKSGLANYDDAALRSKKLYLYYTQMGRCAYTGNIIDLNQLNTDNYDIDHIYPRSLTKDDSFDNLVLCERTANAKKSDIYPIDNRIQTKQKPFWAFLKHQGLISERKYERLTRIAPLTADDLSGFIARQLVETNQSVKATTTLLRRLYPDIDVVFVKAENVSDFRHNNNFIKVRSLNHHHHAKDAYLNIVVGNVYHEKFTRNFRLFFKKNGANRTYNLAKMFNYDVICTNAQDGKAWDVKTSMNTVKKMMASNDVRVTRRLLEQSGALADATIYKASVAAKAKDGAYIGMKTKYSVFADVTKYGGMTKIKNAYSIIVQYTGKKGEEIKEIVPLPIYLINRNATDIELIDYVKSVIPKAKDISIKYRKLCINQLVKVNGFYYYLGGKTNDKIYIDNAIELVVPHDIATYIKLLDKYDLLRKENKTLKASSITTSIYNINTSTVVSLNKVGIDVFDYFMSKLRTPLYMKMKGNKVDELSSTGRSKFIKMTLEEQSIYLLEVLNLLTNSKTTFDVKPLGITGSRSTIGVKIHNLDEFKIINESITGLYSNEVTIV

SEQ ID NO: 310 - protein, 1363 aa, Lactobacillus rhamnosus
MTKLNQPYGIGLDIGSNSIGFAVVDANSHLLRLKGETAIGARLFREGQSAADRRGSRTTRRRLSRTRWRLSFLRDFFAPHITKIDPDFFLRQKYSEISPKDKDRFKYEKRLFNDRTDAEFYEDYPSMYHLRLHLMTHTHKADPREIFLAIHHILKSRGHFLTPGAAKDFNTDKVDLEDIFPALTEAYAQVYPDLELTFDLAKADDFKAKLLDEQATPSDTQKALVNLLLSSDGEKEIVKKRKQVLTEFAKAITGLKTKFNLALGTEVDEADASNWQFSMGQLDDKWSNIETSMTDQGTEIFEQIQELYRARLLNGIVPAGMSLSQAKVADYGQHKEDLELFKTYLKKLNDHELAKTIRGLYDRYINGDDAKPFLREDFVKALTKEVTAHPNEVSEQLLNRMGQANFMLKQRTKANGAIPIQLQQRELDQIIANQSKYYDWLAAPNPVEAHRWKMPYQLDELLNFHIPYYVGPLITPKQQAESGENVFAWMVRKDPSGNITPYNFDEKVDREASANTFIQRMKTTDTYLIGEDVLPKQSLLYQKYEVLNELNNVRINNECLGTDQKQRLIREVFERHSSVTIKQVADNLVAHGDFARRPEIRGLADEKRFLSSLSTYHQLKEILHEAIDDPTKLLDIENIITWSTVFEDHTIFETKLAEIEWLDPKKINELSGIRYRGWGQFSRKLLDGLKLGNGHTVIQELMLSNHNLMQILADETLKETMTELNQDKLKTDDIEDVINDAYTSPSNKKALRQVLRVVEDIKHAANGQDPSWLFIETADGTGTAGKRTQSRQKQIQTVYANAAQELIDSAVRGELEDKIADKASFTDRLVLYFMQGGRDIYTGAPLNIDQLSHYDIDHILPQSLIKDDSLDNRVLVNATINREKNNVFASTLFAGKMKATWRKWHEAGLISGRKLRNLMLRPDEIDKFAKGFVARQLVETRQIIKLTEQIAAAQYPNTKIIAVKAGLSHQLREELDFPKNRDVNHYHHAFDAFLAARIGTYLLKRYPKLAPFFTYGEFAKVDVKKFREFNFIGALTHAKKNIIAKDTGEIVWDKERDIRELDRIYNFKRMLITHEVYFETADLFKQTIYAAKDSKERGGSKQLIPKKQGYPTQVYGGYTQESGSYNALVRVAEADTTAYQVIKISAQNASKIASANLKSREKGKQLLNEIVVKQLAKRRKNWKPSANSFKIVIPRFGMGTLFQNAKYGLFMVNSDTYYRNYQELWLSRENQKLLKKLFSIKYEKTQMNHDALQVYKAIIDQVEKFFKLYDINQFRAKLSDAIERFEKLPINTDGNKIGKTETLRQILIGLQANGTRSNVKNLGIKTDLGLLQVGSGIKLDKDTQIVYQSPSGLFKRRIPLADL

SEQ ID NO: 311 - protein, 1365 aa, Filifactor alocis
MTKEYYLGLDVGTNSVGWAVTDSQYNLCKFKKKDMWGIRLFESANTAKDRRLQRGNRRRLERKKQRIDLLQEIFSPEICKIDPTFFIRLNESRLHLEDKSNDFKYPLFIEKDYSDIEYYKEFPTIFHLRKHLIESEEKQDIRLIYLALHNIIKTRGHFLIDGDLQSAKQLRPILDTFLLSLQEEQNLSVSLSENQKDEYEEILKNRSIAKSEKVKKLKNLFEISDELEKEEKKAQSAVIENFCKFIVGNKGDVCKFLRVSKEELEIDSFSFSEGKYEDDIVKNLEEKVPEKVYLFEQMKAMYDWNILVDILETEEYISFAKVKQYEKHKTNLRLLRDIILKYCTKDEYNRMFNDEKEAGSYTAYVGKLKKNNKKYWIEKKRNPEEFYKSLGKLLDKIEPLKEDLEVLTMMIEECKNHTLLPIQKNKDNGVIPHQVHEVELKKILENAKKYYSFLTETDKDGYSVVQKIESIFRFRIPYYVGPLSTRHQEKGSNVWMVRKPGREDRIYPWNMEEIIDFEKSNENFITRMTNKCTYLIGEDVLPKHSLLYSKYMVLNELNNVKVRGKKLPTSLKQKVFEDLFENKSKVTGKNLLEYLQIQDKDIQIDDLSGFDKDFKTSLKSYLDFKKQIFGEEIEKESIQNMIEDIIKWITIYGNDKEMLKRVIRANYSNQLTEEQMKKITGFQYSGWGNFSKMFLKGISGSDVSTGETFDIITAMWETDNNLMQILSKKFTFMDNVEDFNSGKVGKIDKITYDSTVKEMFLSPENKRAVWQTIQVAEEIKKVMGCEPKKIFIEMARGGEKVKKRTKSRKAQLLELYAACEEDCRELIKEIEDRDERDFNSMKLFLYYTQFGKCMYSGDDIDINELIRGNSKWDRDHIYPQSKIKDDSIDNLVLVNKTYNAKKSNELLSEDIQKKMHSFWLSLLNKKLITKSKYDRLTRKGDFTDEELSGFIARQLVETRQSTKAIADIFKQIYSSEVVYVKSSLVSDFRKKPLNYLKSRRVNDYHHAKDAYLNIVVGNVYNKKFTSNPIQWMKKNRDTNYSLNKVFEHDVVINGEVIWEKCTYHEDTNTYDGGTLDRIRKIVERDNILYTEYAYCEKGELFNATIQNKNGNSTVSLKKGLDVKKYGGYFSANTSYFSLIEFEDKKGDRARHIIGVPIYIANMLEHSPSAFLEYCEQKGYQNVRILVEKIKKNSLLIINGYPLRIRGENEVDTSFKRAIQLKLDQKNYELVRNIEKFLEKYVEKKGNYPIDENRDHITHEKMNQLYEVLLSKMKKFNKKGMADPSDRIEKSKPKFIKLEDLIDKINVINKMLNLLRCDNDTKADLSLIELPKNAGSFVVKKNTIGKSKIILVNQSVTGLYENRREL

SEQ ID NO: 312 - protein, 1389 aa, Oenococcus kitaharae
MARDYSVGLDIGTSSVGWAAIDNKYHLIRAKSKNLIGVRLFDSAVTAEKRRGYRTTRRRLSRRHWRLRLLNDIFAGPLTDFGDENFLARLKYSWVHPQDQSNQAHFAAGLLFDSKEQDKDFYRKYPTIYHLRLALMNDDQKHDLREVYLAIHHLVKYRGHFLIEGDVKADSAFDVHTFADAIQRYAESNNSDENLLGKIDEKKLSAALTDKHGSKSQRAETAETAFDILDLQSKKQIQAILKSVVGNQANLMAIFGLDSSAISKDEQKNYKFSFDDADIDEKIADSEALLSDTEFEFLCDLKAAFDGLTLKMLLGDDKTVSAAMVRRFNEHQKDWEYIKSHIRNAKNAGNGLYEKSKKFDGINAAYLALQSDNEDDRKKAKKIFQDEISSADIPDDVKADFLKKIDDDQFLPIQRTKNNGTIPHQLHRNELEQIIEKQGIYYPFLKDTYQENSHELNKITALINFRVPYYVGPLVEEEQKIADDGKNIPDPTNHWMVRKSNDTITPWNLSQVVDLDKSGRRFIERLTGTDTYLIGEPTLPKNSLLYQKFDVLQELNNIRVSGRRLDIRAKQDAFEHLFKVQKTVSATNLKDFLVQAGYISEDTQIEGLADVNGKNFNNALTTYNYLVSVLGREFVENPSNEELLEEITELQTVFEDKKVLRRQLDQLDGLSDHNREKLSRKHYTGWGRISKKLLTTKIVQNADKIDNQTFDVPRMNQSIIDTLYNTKMNLMEIINNAEDDFGVRAWIDKQNTTDGDEQDVYSLIDELAGPKEIKRGIVQSFRILDDITKAVGYAPKRVYLEFARKTQESHLTNSRKNQLSTLLKNAGLSELVTQVSQYDAAALQNDRLYLYFLQQGKDMYSGEKLNLDNLSNYDIDHIIPQAYTKDNSLDNRVLVSNITNRRKSDSSNYLPALIDKMRPFWSVLSKQGLLSKHKFANLTRTRDFDDMEKERFIARSLVETRQIIKNVASLIDSHFGGETKAVAIRSSLTADMRRYVDIPKNRDINDYHHAFDALLFSTVGQYTENSGLMKKGQLSDSAGNQYNRYIKEWIHAARLNAQSQRVNPFGFVVGSMRNAAPGKLNPETGEITPEENADWSIADLDYLHKVMNFRKITVTRRLKDQKGQLYDESRYPSVLHDAKSKASINFDKHKPVDLYGGFSSAKPAYAALIKFKNKFRLVNVLRQWTYSDKNSEDYILEQIRGKYPKAEMVLSHIPYGQLVKKDGALVTISSATELHNFEQLWLPLADYKLINTLLKTKEDNLVDILHNRLDLPEMTIESAFYKAFDSILSFAFNRYALHQNALVKLQAHRDDFNALNYEDKQQTLERILDALHASPASSDLKKINLSSGFGRLFSPSHFTLADTDEFIFQSVTGLFSTQKTVAQLYQETK

SEQ ID NO: 313 - protein, 1323 aa, Fructobacillus fructosus
MVYDVGLDIGTGSVGWVALDENGKLARAKGKNLVGVRLFDTAQTAADRRGFRTTRRRLSRRKWRLRLLDELFSAEINEIDSSFFQRLKYSYVHPKDEENKAHYYGGYLFPTEEETKKFHRSYPTIYHLRQELMAQPNKRFDIREIYLAIHHLVKYRGHFLSSQEKITIGSTYNPEDLANAIEVYADEKGLSWELNNPEQLTEIISGEAGYGLNKSMKADEALKLFEFDNNQDKVAIKTLLAGLTGNQIDFAKLFGKDISDKDEAKLWKLKLDDEALEEKSQTILSQLTDEEIELFHAVVQAYDGFVLIGLLNGADSVSAAMVQLYDQHREDRKLLKSLAQKAGLKHKRFSEIYEQLALATDEATIKNGISTARELVEESNLSKEVKEDTLRRLDENEFLPKQRTKANSVIPHQLHLAELQKILQNQGQYYPFLLDTFEKEDGQDNKIEELLRFRIPYYVGPLVTKKDVEHAGGDADNHWVERNEGFEKSRVTPWNFDKVFNRDKAARDFIERLTGNDTYLIGEKTLPQNSLRYQLFTVLNELNNVRVNGKKFDSKTKADLINDLFKARKTVSLSALKDYLKAQGKGDVTITGLADESKFNSSLSSYNDLKKTFDAEYLENEDNQETLEKIIEIQTVFEDSKIASRELSKLPLDDDQVKKLSQTHYTGWGRLSEKLLDSKIIDERGQKVSILDKLKSTSQNFMSIINNDKYGVQAWITEQNTGSSKLTFDEKVNELTTSPANKRGIKQSFAVLNDIKKAMKEEPRRVYLEFAREDQTSVRSVPRYNQLKEKYQSKSLSEEAKVLKKTLDGNKNKMSDDRYFLYFQQQGKDMYTGRPINFERLSQDYDIDHIIPQAFTKDDSLDNRVLVSRPENARKSDSFAYTDEVQKQDGSLWTSLLKSGFINRKKYERLTKAGKYLDGQKTGFIARQLVETRQIIKNVASLIEGEYENSKAVAIRSEITADMRLLVGIKKHREINSFHHAFDALLITAAGQYMQNRYPDRDSTNVYNEFDRYTNDYLKNLRQLSSRDEVRRLKSFGFVVGTMRKGNEDWSEENTSYLRKVMMFKNILTTKKTEKDRGPLNKETIFSPKSGKKLIPLNSKRSDTALYGGYSNVYSAYMTLVRANGKNLLIKIPISIANQIEVGNLKINDYIVNNPAIKKFEKILISKLPLGQLVNEDGNLIYLASNEYRHNAKQLWLSTTDADKIASISENSSDEELLEAYDILTSENVKNRFPFFKKDIDKLSQVRDEFLDSDKRIAVIQTILRGLQIDAAYQAPVKIISKKVSDWHKLQQSGGIKLSDNSEMIYQSATGIFETRVKISDLL

SEQ ID NO: 314 - protein, 1329 aa, Catenibacterium mitsuokai
IVDYCIGLDLGTGSVGWAVVDMNHRLMKRNGKHLWGSRLFSNAETAANRRASRSIRRRYNKRRERIRLLRAILQDMVLEKDPTFFIRLEHTSFLDEEDKAKYLGTDYKDNYNLFIDEDFNDYTYYHKYPTIYHLRKALCESTEKADPRLIYLALHHIVKYRGNFLYEGQKFNMDASNIEDKLSDIFTQFTSFNNIPYEDDEKKNLEILEILKKPLSKKAKVDEVMTLIAPEKDYKSAFKELVTGIAGNKMNVTKMILCEPIKQGDSEIKLKFSDSNYDDQFSEVEKDLGEYVEFVDALHNVYSWVELQTIMGATHTDNASISEAMVSRYNKHHDDLKLLKDCIKNNVPNKYFDMFRNDSEKSKGYYNYINRPSKAPVDEFYKYVKKCIEKVDTPEAKQILNDIELENFLLKQNSRTNGSVPYQMQLDEMIKIIDNQAEYYPILKEKREQLLSILTFRIPYYFGPLNETSEHAWIKRLEGKENQRILPWNYQDIVDVDATAEGFIKRMRSYCTYFPDEEVLPKNSLIVSKYEVYNELNKIRVDDKLLEVDVKNDIYNELFMKNKTVTEKKLKNWLVNNQCCSKDAEIKGFQKENQFSTSLTPWIDFTNIFGKIDQSNFDLIENIIYDLTVFEDKKIMKRRLKKKYALPDDKVKQILKLKYKDWSRLSKKLLDGIVADNRFGSSVTVLDVLEMSRLNLMEIINDKDLGYAQMIEEATSCPEDGKFTYEEVERLAGSPALKRGIWQSLQIVEEITKVMKCRPKYIYIEFERSEEAKERTESKIKKLENVYKDLDEQTKKEYKSVLEELKGFDNTKKISSDSLFLYFTQLGKCMYSGKKLDIDSLDKYQIDHIVPQSLVKDDSFDNRVLVVPSENQRKLDDLVVPFDIRDKMYRFWKLLFDHELISPKKFYSLIKTEYTERDEERFINRQLVETRQITKNVTQIIEDHYSTTKVAAIRANLSHEFRVKNHIYKNRDINDYHHAHDAYIVALIGGFMRDRYPNMHDSKAVYSEYMKMFRKNKNDQKRWKDGFVINSMNYPYEVDGKLIWNPDLINEIKKCFYYKDCYCTTKLDQKSGQLFNLTVLSNDAHADKGVTKAVVPVNKNRSDVHKYGGFSGLQYTIVAIEGQKKKGKKTELVKKISGVPLHLKAASINEKINYIEEKEGLSDVRIIKDNIPVNQMIEMDGGEYLLTSPTEYVNARQLVLNEKQCALIADIYNAIYKQDYDNLDDILMIQLYIELTNKMKVLYPAYRGIAEKFESMNENYVVISKEEKANIIKQMLIVMHRGPQNGNIVYDDFKISDRIGRLKTKNHNLNNIVFISQSPTGIYTKKYKL

SEQ ID NO: 315 - protein, 1348 aa, Finegoldia magna
MKSEKKYYIGLDVGTNSVGWAVTDEFYNILRAKGKDLWGVRLFEKADTAANTRIFRSGRRRNDRKGMRLQILREIFEDEIKKVDKDFYDRLDESKFWAEDKKVSGKYSLFNDKNFSDKQYFEKFPTIFHLRKYLMEEHGKVDIRYYFLAINQMMKRRGHFLIDGQISHVTDDKPLKEQLILLINDLLKIELEEELMDSIFEILADVNEKRTDKKNNLKELIKGQDFNKQEGNILNSIFESIVTGKAKIKNIISDEDILEKIKEDNKEDFVLTGDSYEENLQYFEEVLQENITLFNTLKSTYDFLILQSILKGKSTLSDAQVERYDEHKKDLEILKKVIKKYDEDGKLFKQVFKEDNGNGYVSYIGYYLNKNKKITAKKKISNIEFTKYVKGILEKQCDCEDEDVKYLLGKIEQENFLLKQISSINSVIPHQIHLFELDKILENLAKNYPSFNNKKEEFTKIEKIRKTFTFRIPYYVGPLNDYHKNNGGNAWIFRNKGEKIRPWNFEKIVDLHKSEEEFIKRMLNQCTYLPEETVLPKSSILYSEYMVLNELNNLRINGKPLDTDVKLKLIEELFKKKTKVTLKSIRDYMVRNNFADKEDFDNSEKNLEIASNMKSYIDFNNILEDKFDVEMVEDLIEKITIHTGNKKLLKKYIEETYPDLSSSQIQKIINLKYKDWGRLSRKLLDGIKGTKKETEKTDTVINFLRNSSDNLMQIIGSQNYSFNEYIDKLRKKYIPQEISYEVVENLYVSPSVKKMIWQVIRVTEEITKVMGYDPDKIFIEMAKSEEEKKTTISRKNKLLDLYKAIKKDERDSQYEKLLTGLNKLDDSDLRSRKLYLYYTQMGRDMYTGEKIDLDKLFDSTHYDKDHIIPQSMKKDDSIINNLVLVNKNANQTTKGNIYPVPSSIRNNPKIYNYWKYLMEKEFISKEKYNRLIRNTPLTNEELGGFINRQLVETRQSTKAIKELFEKFYQKSKIIPVKASLASDLRKDMNTLKSREVNDLHHAHDAFLNIVAGDVWNREFTSNPINYVKENREGDKVKYSLSKDFTRPRKSKGKVIWTPEKGRKLIVDTLNKPSVLISNESHVKKGELFNATIAGKKDYKKGKIYLPLKKDDRLQDVSKYGGYKAINGAFFFLVEHTKSKKRIRSIELFPLHLLSKFYEDKNTVLDYAINVLQLQDPKIIIDKINYRTEIIIDNFSYLISTKSNDGSITVKPNEQMYWRVDEISNLKKIENKYKKDAILTEEDRKIMESYIDKIYQQFKAGKYKNRRTTDTIIEKYEIIDLDTLDNKQLYQLLVAFISLSYKTSNNAVDFTVIGLGTECGKPRITNLPDNTYLVYKSITGIYEKRIRIK

SEQ ID NO: 316 - protein, 1384 aa, Coriobacterium glomerans
MKLRGIEDDYSIGLDMGTSSVGWAVTDERGTLAHFKRKPTWGSRLFREAQTAAVARMPRGQRRRYVRRRWRLDLLQKLFEQQMEQADPDFFIRLRQSRLLRDDRAEEHADYRWPLFNDCKFTERDYYQRFPTIYHVRSWLMETDEQADIRLIYLALHNIVKHRGNFLREGQSLSAKSARPDEALNHLRETLRVWSSERGFECSIADNGSILAMLTHPDLSPSDRRKKIAPLFDVKSDDAAADKKLGIALAGAVIGLKTEFKNIFGDFPCEDSSIYLSNDEAVDAVRSACPDDCAELFDRLCEVYSAYVLQGLLSYAPGQTISANMVEKYRRYGEDLALLKKLVKIYAPDQYRMFFSGATYPGTGIYDAAQARGYTKYNLGPKKSEYKPSESMQYDDFRKAVEKLFAKTDARADERYRMMMDRFDKQQFLRRLKTSDNGSIYHQLHLEELKAIVENQGRFYPFLKRDADKLVSLVSFRIPYYVGPLSTRNARTDQHGENRFAWSERKPGMQDEPIFPWNWESIIDRSKSAEKFILRMTGMCTYLQQEPVLPKSSLLYEEFCVLNELNGAHWSIDGDDEHRFDAADREGIIEELFRRKRTVSYGDVAGWMERERNQIGAHVCGGQGEKGFESKLGSYIFFCKDVFKVERLEQSDYPMIERIILWNTLFEDRKILSQRLKEEYGSRLSAEQIKTICKKRFTGWGRLSEKFLTGITVQVDEDSVSIMDVLREGCPVSGKRGRAMVMMEILRDEELGFQKKVDDFNRAFFAENAQALGVNELPGSPAVRRSLNQSIRIVDEIASIAGKAPANIFIEVTRDEDPKKKGRRTKRRYNDLKDALEAFKKEDPELWRELCETAPNDMDERLSLYFMQRGKCLYSGRAIDIHQLSNAGIYEVDHIIPRTYVKDDSLENKALVYREENQRKTDMLLIDPEIRRRMSGYWRMLHEAKLIGDKKFRNLLRSRIDDKALKGFIARQLVETGQMVKLVRSLLEARYPETNIISVKASISHDLRTAAELVKCREANDFHHAHDAFLACRVGLFIQKRHPCVYENPIGLSQVVRNYVRQQADIFKRCRTIPGSSGFIVNSFMTSGFDKETGEIFKDDWDAEAEVEGIRRSLNFRQCFISRMPFEDHGVFWDATIYSPRAKKTAALPLKQGLNPSRYGSFSREQFAYFFIYKARNPRKEQTLFEFAQVPVRLSAQIRQDENALERYARELAKDQGLEFIRIERSKILKNQLIEIDGDRLCITGKEEVRNACELAFAQDEMRVIRMLVSEKPVSRECVISLFNRILLHGDQASRRLSKQLKLALLSEAFSEASDNVQRNVVLGLIAIFNGSTNMVNLSDIGGSKFAGNVRIKYKKELASPKVNVHLIDQSVTGMFERRTKIGL

SEQ ID NO: 317 - protein, 1391 aa, Eubacterium yurii
MENKQYYIGLDVGTNSVGWAVTDTSYNLLRAKGKDMWGARLFEKANTAAERRTKRTSRRRSEREKARKAMLKELFADEINRVDPSFFIRLEESKFFLDDRSENNRQRYTLFNDATFTDKDYYEKYKTIFHLRSALINSDEKFDVRLVFLAILNLFSHRGHFLNASLKGDGDIQGMDVFYNDLVESCEYFEIELPRITNIDNFEKILSQKGKSRTKILEELSEELSISKKDKSKYNLIKLISGLEASVVELYNIEDIQDENKKIKIGFRESDYEESSLKVKEIIGDEYFDLVERAKSVHDMGLLSNIIGNSKYLCEARVEAYENHHKDLLKIKELLKKYDKKAYNDMFRKMTDKNYSAYVGSVNSNIAKERRSVDKRKIEDLYKYIEDTALKNIPDDNKDKIEILEKIKLGEFLKKQLTASNGVIPNQLQSRELRAILKKAENYLPFLKEKGEKNLTVSEMIIQLFEFQIPYYVGPLDKNPKKDNKANSWAKIKQGGRILPWNFEDKVDVKGSRKEFIEKMVRKCTYISDEHTLPKQSLLYEKFMVLNEINNIKIDGEKISVEAKQKIYNDLFVKGKKVSQKDIKKELISLNIMDKDSVLSGTDTVCNAYLSSIGKFTGVFKEEINKQSIVDMIEDIIFLKTVYGDEKRFVKEEIVEKYGDEIDKDKIKRILGFKFSNWGNLSKSFLELEGADVGTGEVRSIIQSLWETNFNLMELLSSRFTYMDELEKRVKKLEKPLSEWTIEDLDDMYLSSPVKRMIWQSMKIVDEIQTVIGYAPKRIFVEMTRSEGEKVRTKSRKDRLKELYNGIKEDSKQWVKELDSKDESYFRSKKMYLYYLQKGRCMYSGEVIELDKLMDDNLYDIDHIYPRSFVKDDSLDNLVLVKKEINNRKQNDPITPQIQASCQGFWKILHDQGFMSNEKYSRLTRKTQEFSDEEKLSFINRQIVETGQATKCMAQILQKSMGEDVDVVFSKARLVSEFRHKFELFKSRLINDFHHANDAYLNIVVGNSYFVKFTRNPANFIKDARKNPDNPVYKYHMDRFFERDVKSKSEVAWIGQSEGNSGTIVIVKKTMAKNSPLITKKVEEGHGSITKETIVGVKEIKFGRNKVEKADKTPKKPNLQAYRPIKTSDERLCNILRYGGRTSISISGYCLVEYVKKRKTIRSLEAIPVYLGRKDSLSEEKLLNYFRYNLNDGGKDSVSDIRLCLPFISTNSLVKIDGYLYYLGGKNDDRIQLYNAYQLKMKKEEVEYIRKIEKAVSMSKFDEIDREKNPVLTEEKNIELYNKIQDKFENTVFSKRMSLVKYNKKDLSFGDFLKNKKSKFEEIDLEKQCKVLYNIIFNLSNLKEVDLSDIGGSKSTGKCRCKKNITNYKEFKLIQQSITGLYSCEKDLMTI

SEQ ID NO: 318 - protein, 1364 aa, Peptoniphilus duerdenii
MKNLKEYYIGLDIGTASVGWAVTDESYNIPKFNGKKMWGVRLFDDAKTAEERRTQRGSRRRLNRRKERINLLQDLFATEISKVDPNFFLRLDNSDLYREDKDEKLKSKYTLFNDKDFKDRDYHKKYPTIHHLIMDLIEDEGKKDIRLLYLACHYLLKNRGHFIFEGQKFDTKNSFDKSINDLKIHLRDEYNIDLEFNNEDLIEIITDTTLNKTNKKKELKNIVGDTKFLKAISAIMIGSSQKLVDLFEDGEFEETTVKSVDFSTTAFDDKYSEYEEALGDTISLLNILKSIYDSSILENLLKDADKSKDGNKYISKAFVKKFNKHGKDLKTLKRIIKKYLPSEYANIFRNKSINDNYVAYTKSNITSNKRTKASKFTKQEDFYKFIKKHLDTIKETKLNSSENEDLKLIDEMLTDIEFKTFIPKLKSSDNGVIPYQLKLMELKKILDNQSKYYDFLNESDEYGTVKDKVESIMEFRIPYYVGPLNPDSKYAWIKRENTKITPWNFKDIVDLDSSREEFIDRLIGRCTYLKEEKVLPKASLIYNEFMVLNELNNLKLNEFLITEEMKKAIFEELFKTKKKVTLKAVSNLLKKEFNLTGDILLSGTDGDFKQGLNSYIDFKNIIGDKVDRDDYRIKIEEIIKLIVLYEDDKTYLKKKIKSAYKNDFTDDEIKKIAALNYKDWGRLSKRFLTGIEGVDKTTGEKGSIIYFMREYNLNLMELMSGHYTFTEEVEKLNPVENRELCYEMVDELYLSPSVKRMLWQSLRVVDEIKRIIGKDPKKIFIEMARAKEAKNSRKESRKNKLLEFYKFGKKAFINEIGEERYNYLLNEINSEEESKFRWDNLYLYYTQLGRCMYSLEPIDLADLKSNNIYDQDHIYPKSKIYDDSLENRVLVKKNLNHEKGNQYPIPEKVLNKNAYGFWKILFDKGLIGQKKYTRLTRRTPFEERELAEFIERQIVETRQATKETANLLKNICQDSEIVYSKAENASRFRQEFDIIKCRTVNDLHHMHDAYLNIVVGNVYNTKFTKNPLNFIKDKDNVRSYNLENMFKYDVVRGSYTAWIADDSEGNVKAATIKKVKRELEGKNYRFTRMSYIGTGGLYDQNLMRKGKGQIPQKENTNKSNIEKYGGYNKASSAYFALIESDGKAGRERTLETIPIMVYNQEKYGNTEAVDKYLKDNLELQDPKILKDKIKINSLIKLDGFLYNIKGKTGDSLSIAGSVQLIVNKEEQKLIKKMDKFLVKKKDNKDIKVTSFDNIKEEELIKLYKTLSDKLNNGIYSNKRNNQAKNISEALDKFKEISIEEKIDVLNQIILLFQSYNNGCNLKSIGLSAKTGVVFIPKKLNYKECKLINQSITGLFENEVDLLNL

SEQ ID NO: 319 - protein, 1358 aa, Acidaminococcus sp.
MGKMYYLGLDIGTNSVGYAVTDPSYHLLKFKGEPMWGAHVFAAGNQSAERRSFRTSRRRLDRRQQRVKLVQEIFAPVISPIDPRFFIRLHESALWRDDVAETDKHIFFNDPTYTDKEYYSDYPTIHHLIVDLMESSEKHDPRLVYLAVAWLVAHRGHFLNEVDKDNIGDVLSFDAFYPEFLAFLSDNGVSPWVCESKALQATLLSRNSVNDKYKALKSLIFGSQKPEDNFDANISEDGLIQLLAGKKVKVNKLFPQESNDASFTLNDKEDAIEEILGTLTPDECEWIAHIRRLFDWAIMKHALKDGRTISESKVKLYEQHHHDLTQLKYFVKTYLAKEYDDIFRNVDSETTKNYVAYSYHVKEVKGTLPKNKATQEEFCKYVLGKVKNIECSEADKVDFDEMIQRLTDNSFMPKQVSGENRVIPYQLYYYELKTILNKAASYLPFLTQCGKDAISNQDKLLSIMTFRIPYFVGPLRKDNSEHAWLERKAGKIYPWNFNDKVDLDKSEEAFIRRMTNTCTYYPGEDVLPLDSLIYEKFMILNEINNIRIDGYPISVDVKQQVFGLFEKKRRVTVKDIQNLLLSLGALDKHGKLTGIDTTIHSNYNTYHHFKSLMERGVLTRDDVERIVERMTYSDDTKRVRLWLNNNYGTLTADDVKHISRLRKHDFGRLSKMFLTGLKGVHKETGERASILDFMWNTNDNLMQLLSECYTFSDEITKLQEAYYAKAQLSLNDFLDSMYISNAVKRPIYRTLAVVNDIRKACGTAPKRIFIEMARDGESKKKRSVTRREQIKNLYRSIRKDFQQEVDFLEKILENKSDGQLQSDALYLYFAQLGRDMYTGDPIKLEHIKDQSFYNIDHIYPQSMVKDDSLDNKVLVQSEINGEKSSRYPLDAAIRNKMKPLWDAYYNHGLISLKKYQRLTRSTPFTDDEKWDFINRQLVETRQSTKALAILLKRKFPDTEIVYSKAGLSSDFRHEFGLVKSRNINDLHHAKDAFLAIVTGNVYHERFNRRWFMVNQPYSVKTKTLFTHSIKNGNFVAWNGEEDLGRIVKMLKQNKNTIHFTRFSFDRKEGLFDIQPLKASTGLVPRKAGLDVVKYGGYDKSTAAYYLLVRFTLEDKKTQHKLMMIPVEGLYKARIDHDKEFLTDYAQTTISEILQKDKQKVINIMFPMGTRHIKLNSMISIDGFYLSIGGKSSKGKSVLCHAMVPLIVPHKIECYIKAMESFARKFKENNKLRIVEKFDKITVEDNLNLYELFLQKLQHNPYNKFFSTQFDVLTNGRSTFTKLSPEEQVQTLLNILSIFKTCRSSGCDLKSINGSAQAARIMISADLTGLSKKYSDIRLVEQSASGLFVSKSQNLLEYL

SEQ ID NO: 320 - protein, 1356 aa, Lactobacillus farciminis
MTKKEQPYNIGLDIGTSSVGWAVTNDNYDLLNIKKKNLWGVRLFEEAQTAKETRLNRSTRRRYRRRKNRINWLNEIFSEELAKTDPSFLIRLQNSWVSKKDPDRKRDKYNLFIDGPYTDKEYYREFPTIFHLRKELILNKDKADIRLIYLALHNILKYRGNFTYEHQKFNISNLNNNLSKELIELNQQLIKYDISFPDDCDWNHISDILIGRGNATQKSSNILKDFTLDKETKKLLKEVINLILGNVAHLNTIFKTSLTKDEEKLNFSGKDIESKLDDLDSILDDDQFTVLDAANRIYSTITLNEILNGESYFSMAKVNQYENHAIDLCKLRDMWHTTKNEEAVEQSRQAYDDYINKPKYGTKELYTSLKKFLKVALPTNLAKEAEEKISKGTYLVKPRNSENGVVPYQLNKIEMEKIIDNQSQYYPFLKENKEKLLSILSFRIPYYVGPLQSAEKNPFAWMERKSNGHARPWNFDEIVDREKSSNKFIRRMTVTDSYLVGEPVLPKNSLIYQRYEVLNELNNIRITENLKTNPIGSRLTVETKQRIYNELFKKYKKVTVKKLTKWLIAQGYYKNPILIGLSQKDEFNSTLTTYLDMKKIFGSSFMEDNKNYDQIEELIEWLTIFEDKQILNEKLHSSKYSYTPDQIKKISNMRYKGWGRLSKKILMDITTETNTPQLLQLSNYSILDLMWATNNNFISIMSNDKYDFKNYIENHNLNKNEDQNISDLVNDIHVSPALKRGITQSIKIVQEIVKFMGHAPKHIFIEVTRETKKSEITTSREKRIKRLQSKLLNKANDFKPQLREYLVPNKKIQEELKKHKNDLSSERIMLYFLQNGKSLYSEESLNINKLSDYQVDHILPRTYIPDDSLENKALVLAKENQRKADDLLLNSNVIDRNLERWTYMLNNNMIGLKKFKNLTRRVITDKDKLGFIHRQLVQTSQMVKGVANILDNMYKNQGTTCIQARANLSTAFRKALSGQDDTYHFKHPELVKNRNVNDFHHAQDAYLASFLGTYRLRRFPTNEMLLMNGEYNKFYGQVKELYSKKKKLPDSRKNGFIISPLVNGTTQYDRNTGEIIWNVGFRDKILKIFNYHQCNVTRKTEIKTGQFYDQTIYSPKNPKYKKLIAQKKDMDPNIYGGFSGDNKSSITIVKIDNNKIKPVAIPIRLINDLKDKKTLQNWLEENVKHKKSIQIIKNNVPIGQIIYSKKVGLLSLNSDREVANRQQLILPPEHSALLRLLQIPDEDLDQILAFYDKNILVEILQELITKMKKFYPFYKGEREFLIANIENFNQATTSEKVNSLEELITLLHANSTSAHLIFNNIEKKAFGRKTHGLTLNNTDFIYQSVTGLYETRIHIE

SEQ ID NO: 321 - protein, 1421 aa, Streptococcus sanguinis
MTKFNKNYSIGLDIGVSSVGYAVVTEDYRVPAFKFKVLGNTEKEKIKKNLIGSTTFVSAQPAKGTRVFRVNRRRIDRRNHRITYLRDIFQKEIEKVDKNFYRRLDESFRVLGDKSEDLQIKQPFFGDKELETAYHKKYPTIYHLRKHLADADKNSPVADIREVYMAISHILKYRGHFLTLDKINPNNINMQNSWIDFIESCQEVFDLEISDESKNIADIFKSSENRQEKVKKILPYFQQELLKKDKSIFKQLLQLLFGLKTKFKDCFELEEEPDLNFSKENYDENLENFLGSLEEDFSDVFAKLKVLRDTILLSGMLTYTGATHARFSATMVERYEEHRKDLQRFKFFIKQNLSEQDYLDIFGRKTQNGFDVDKETKGYVGYITNKMVLTNPQKQKTIQQNFYDYISGKITGIEGAEYFLNKISDGTFLRKLRTSDNGAIPNQIHAYELEKIIERQGKDYPFLLENKDKLLSILTFKIPYYVGPLAKGSNSRFAWIKRATSSDILDDNDEDTRNGKIRPWNYQKLINMDETRDAFITNLIGNDIILLNEKVLPKRSLIYEEVMLQNELTRVKYKDKYGKAHFFDSELRQNIINGLFKNNSKRVNAKSLIKYLSDNHKDLNAIEIVSGVEKGKSFNSTLKTYNDLKTIFSEELLDSEIYQKELEEIIKVITVFDDKKSIKNYLTKFFGHLEILDEEKINQLSKLRYSGWGRYSAKLLLDIRDEDTGFNLLQFLRNDEENRNLTKLISDNTLSFEPKIKDIQSKSTIEDDIFDEIKKLAGSPAIKRGILNSIKIVDELVQIIGYPPHNIVIEMARENMTTEEGQKKAKTRKTKLESALKNIENSLLENGKVPHSDEQLQSEKLYLYYLQNGKDMYTLDKTGSPAPLYLDQLDQYEVDHIIPYSFLPIDSIDNKVLTHRENNQQKLNNIPDKETVANMKPFWEKLYNAKLISQTKYQRLTTSERTPDGVLTESMKAGFIERQLVETRQIIKHVARILDNRFSDTKIITLKSQLITNFRNTFHIAKIRELNDYHHAHDAYLAVVVGQTLLKVYPKLAPELIYGHHAHFNRHEENKATLRKHLYSNIMRFFNNPDSKVSKDIWDCNRDLPIIKDVIYNSQINFVKRTMIKKGAFYNQNPVGKFNKQLAANNRYPLKTKALCLDTSIYGGYGPMNSALSIIIIAERFNEKKGKIETVKEFHDIFIIDYEKFNNNPFQFLNDTSENGFLKKNNINRVLGFYRIPKYSLMQKIDGTRMLFESKSNLHKATQFKLTKTQNELFFHMKRLLTKSNLMDLKSKSAIKESQNFILKHKEEFDNISNQLSAFSQKMLGNTTSLKNLIKGYNERKIKEIDIRDETIKYFYDNFIKMFSFVKSGAPKDINDFFDNKCTVARMRPKPDKKLLNATLIHQSITGLYETRIDLSKLGED

SEQ ID NO: 322 - protein, 1338 aa, Coprococcus catus
MKQEYFLGLDMGTGSLGWAVTDSTYQVMRKHGKALWGTRLFESASTAEERRMFRTARRRLDRRNWRIQVLQEIFSEEISKVDPGFFLRMKESKYYPEDKRDAEGNCPELPYALFVDDNYTDKNYHKDYPTIYHLRKMLMETTEIPDIRLVYLVLHHMMKHRGHFLLSGDISQIKEFKSTFEQLIQNIQDEELEWHISLDDAAIQFVEHVLKDRNLTRSTKKSRLIKQLNAKSACEKAILNLLSGGTVKLSDIFNNKELDESERPKVSFADSGYDDYIGIVEAELAEQYYIIASAKAVYDWSVLVEILGNSVSISEAKIKVYQKHQADLKTLKKIVRQYMTKEDYKRVFVDTEEKLNNYSAYIGMTKKNGKKVDLKSKQCTQADFYDFLKKNVIKVIDHKEITQEIESEIEKENFLPKQVTKDNGVIPYQVHDYELKKILDNLGTRMPFIKENAEKIQQLFEFRIPYYVGPLNRVDDGKDGKFTWSVRKSDARIYPWNFTEVIDVEASAEKFIRRMTNKCTYLVGEDVLPKDSLVYSKFMVLNELNNLRLNGEKISVELKQRIYEELFCKYRKVTRKKLERYLVIEGIAKKGVEITGIDGDFKASLTAYHDFKERLTDVQLSQRAKEAIVLNVVLFGDDKKLLKQRLSKMYPNLTTGQLKGICSLSYQGWGRLSKTFLEEITVPAPGTGEVWNIMTALWQTNDNLMQLLSRNYGFTNEVEEFNTLKKETDLSYKTVDELYVSPAVKRQIWQTLKVVKEIQKVMGNAPKRVFVEMAREKQEGKRSDSRKKQLVELYRACKNEERDWITELNAQSDQQLRSDKLFLYYIQKGRCMYSGETIQLDELWDNTKYDIDHIYPQSKTMDDSLNNRVLVKKNYNAIKSDTYPLSLDIQKKMMSFWKMLQQQGFITKEKYVRLVRSDELSADELAGFIERQIVETRQSTKAVATILKEALPDTEIVYVKAGNVSNFRQTYELLKVREMNDLHHAKDAYLNIVVGNAYFVKFTKNAAWFIRNNPGRSYNLKRMFEFDIERSGEIAWKAGNKGSIVTVKKVMQKNNILVTRKAYEVKGGLFDQQIMKKGKGQVPIKGNDERLADIEKYGGYNKAAGTYFMLVKSLDKKGKEIRTIEFVPLYLKNQIEINHESAIQYLAQERGLNSPEILLSKIKIDTLFKVDGFKMWLSGRTGNQLIFKGANQLILSHQEAAILKGVVKYVNRKNENKDAKLSERDGMTEEKLLQLYDTFLDKLSNTVYSIRLSAQIKTLTEKRAKFIGLSNEDQCIVLNEILHMFQCQSGSANLKLIGGPGSAGILVMNNNITACKQISVINQSPTGIYEKEIDLIKL

SEQ ID NO: 323 - protein, 1345 aa, Streptococcus mutans
MKKPYSIGLDIGTNSVGWAVVTDDYKVPAKKMKVLGNTDKSHIEKNLLGALLFDSGNTAEDRRLKRTARRRYTRRRNRILYLQEIFSEEMGKVDDSFFHRLEDSFLVTEDKRGERHPIFGNLEEEVKYHENFPTIYHLRQYLADNPEKVDLRLVYLALAHIIKFRGHFLIEGKFDTRNNDVQRLFQEFLAVYDNTFENSSLQEQNVQVEEILTDKISKSAKKDRVLKLFPNEKSNGRFAEFLKLIVGNQADFKKHFELEEKAPLQFSKDTYEEELEVLLAQIGDNYAELFLSAKKLYDSILLSGILTVTDVGTKAPLSASMIQRYNEHQMDLAQLKQFIRQKLSDKYNEVFSDVSKDGYAGYIDGKTNQEAFYKYLKGLLNKIEGSGYFLDKIEREDFLRKQRTFDNGSIPHQIHLQEMRAIIRRQAEFYPFLADNQDRIEKLLTFRIPYYVGPLARGKSDFAWLSRKSADKITPWNFDEIVDKESSAEAFINRMTNYDLYLPNQKVLPKHSLLYEKFTVYNELTKVKYKTEQGKTAFFDANMKQEIFDGVFKVYRKVTKDKLMDFLEKEFDEFRIVDLTGLDKENKVFNASYGTYHDLCKILDKDFLDNSKNEKILEDIVLTLTLFEDREMIRKRLENYSDLLTKEQVKKLERRHYTGWGRLSAELIHGIRNKESRKTILDYLIDDGNSNRNFMQLINDDALSFKEEIAKAQVIGETDNLNQVVSDIAGSPAIKKGILQSLKIVDELVKIMGHQPENIVVEMARENQFTNQGRRNSQQRLKGLTDSIKEFGSQILKEHPVENSQLQNDRLFLYYLQNGRDMYTGEELDIDYLSQYDIDHIIPQAFIKDNSIDNRVLTSSKENRGKSDDVPSKDVVRKMKSYWSKLLSAKLITQRKFDNLTKAERGGLTDDDKAGFIKRQLVETRQITKHVARILDERFNTETDENNKKIRQVKIVTLKSNLVSNFRKEFELYKVREINDYHHAHDAYLNAVIGKALLGVYPQLEPEFVYGDYPHFHGHKENKATAKKFFYSNIMNFFKKDDVRTDKNGEIIWKKDEHISNIKKVLSYPQVNIVKKVEEQTGGFSKESILPKGNSDKLIPRKTKKFYWDTKKYGGFDSPIVAYSILVIADIEKGKSKKLKTVKALVGVTIMEKMTFERDPVAFLERKGYRNVQEENIIKLPKYSLFKLENGRKRLLASARELQKGNEIVLPNHLGTLLYHAKNIHKVDEPKHLDYVDKHKDEFKELLDVVSNFSKKYTLAEGNLEKIKELYAQNNGEDLKELASSFINLLTFTAIGAPATFKFFDKNIDRKRYTSTTEILNATLIHQSITGLYETRIDLNKLGGD

SEQ ID NO: 324 - protein, 1368 aa, Streptococcus pyogenes [sequence omitted]

SEQ ID NO: 325 - protein, 1388 aa, Streptococcus thermophilus
MTKPYSIGLDIGTNSVGWAVTTDNYKVPSKKMKVLGNTSKKYIKKNLLGVLLFDSGITAEGRRLKRTARRRYTRRRNRILYLQEIFSTEMATLDDAFFQRLDDSFLVPDDKRDSKYPIFGNLVEEKAYHDEFPTIYHLRKYLADSTKKADLRLVYLALAHMIKYRGHFLIEGEFNSKNNDIQKNFQDFLDTYNAIFESDLSLENSKQLEEIVKDKISKLEKKDRILKLFPGEKNSGIFSEFLKLIVGNQADFRKCFNLDEKASLHFSKESYDEDLETLLGYIGDDYSDVFLKAKKLYDAILLSGFLTVTDNETEAPLSSAMIKRYNEHKEDLALLKEYIRNISLKTYNEVFKDDTKNGYAGYIDGKTNQEDFYVYLKKLLAEFEGADYFLEKIDREDFLRKQRTFDNGSIPYQIHLQEMRAILDKQAKFYPFLAKNKERIEKILTFRIPYYVGPLARGNSDFAWSIRKRNEKITPWNFEDVIDKESSAEAFINRMTSFDLYLPEEKVLPKHSLLYETFNVYNELTKVRFIAESMRDYQFLDSKQKKDIVRLYFKDKRKVTDKDIIEYLHAIYGYDGIELKGIEKQFNSSLSTYHDLLNIINDKEFLDDSSNEAIIEEIIHTLTIFEDREMIKQRLSKFENIFDKSVLKKLSRRHYTGWGKLSAKLINGIRDEKSGNTILDYLIDDGISNRNFMQLIHDDALSFKKKIQKAQIIGDEDKGNIKEVVKSLPGSPAIKKGILQSIKIVDELVKVMGGRKPESIVVEMARENQYTNQGKSNSQQRLKRLEKSLKELGSKILKENIPAKLSKIDNNALQNDRLYLYYLQNGKDMYTGDDLDIDRLSNYDIDHIIPQAFLKDNSIDNKVLVSSASNRGKSDDVPSLEVVKKRKTFWYQLLKSKLISQRKFDNLTKAERGGLSPEDKAGFIQRQLVETRQITKHVARLLDEKFNNKKDENNRAVRTVKIITLKSTLVSQFRKDFELYKVREINDFHHAHDAYLNAVVASALLKKYPKLEPEFVYGDYPKYNSFRERKSATEKVYFYSNIMNIFKKSISLADGRVIERPLIEVNEETGESVWNKESDLATVRRVLSYPQVNVVKKVEEQNHGLDRGKPKGLFNANLSSKPKPNSNENLVGAKEYLDPKKYGGYAGISNSFTVLVKGTIEKGAKKKITNVLEFQGISILDRINYRKDKLNFLLEKGYKDIELIIELPKYSLFELSDGSRRMLASILSTNNKRGEIHKGNQIFLSQKFVKLLYHAKRISNTINENHRKYVENHKKEFEELFYYILEFNENYVGAKKNGKLLNSAFQSWQNHSIDELCSSFIGPTGSERKGLFELTSRGSAADFEFLGVKIPRYRDYTPSSLLKDATLIHQSVTGLYETRIDLAKLGEG

SEQ ID NO: 326 - protein, 1374 aa, Fusobacterium nucleatum
MKKQKFSDYYLGFDIGTNSVGWCVTDLDYNVLRFNKKDMWGSRLFDEAKTAAERRVQRNSRRRLKRRKWRLNLLEEIFSDEIMKIDSNFFRRLKESSLWLEDKNSKEKFTLFNDDNYKDYDFYKQYPTIFHLRDELIKNPEKKDIRLIYLALHSIFKSRGHFLFEGQNLKEIKNFETLYNNLISFLEDNGINKSIDKDNIEKLEKIICDSGKGLKDKEKEFKGIFNSDKQLVAIFKLSVGSSVSLNDLFDTDEYKKEEVEKEKISFREQIYEDDKPIYYSILGEKIELLDIAKSFYDFMVLNNILSDSNYISEAKVKLYEEHKKDLKNLKYIIRKYNKENYDKLFKDKNENNYPAYIGLNKEKDKKEVVEKSRLKIDDLIKVIKGYLPKPERIEEKDKTIFNEILNKIELKTILPKQRISDNGTLPYQIHEVELEKILENQSKYYDFLNYEENGVSTKDKLLKTFKFRIPYYVGPLNSYHKDKGGNSWIVRKEEGKILPWNFEQKVDIEKSAEEFIKRMTNKCTYLNGEDVIPKDSFLYSEYIILNELNKVQVNDEFLNEENKRKIIDELFKENKKVSEKKFKEYLLVNQIANRTVELKGIKDSFNSNYVSYIKFKDIFGEKLNLDIYKEISEKSILWKCLYGDDKKIFEKKIKNEYGDILNKDEIKKINSFKFNTWGRLSEKLLTGIEFINLETGECYSSVMEALRRTNYNLMELLSSKFTLQESIDNENKEMNEVSYRDLIEESYVSPSLKRAILQTLKIYEEIKKITGRVPKKVFIEMARGGDESMKNKKIPARQEQLKKLYDSCGNDIANFSIDIKEMKNSLSSYDNNSLRQKKLYLYYLQFGKCMYTGREIDLDRLLQNNDTYDIDHIYPRSKVIKDDSFDNLVLVLKNENAEKSNEYPVKKEIQEKMKSFWRFLKEKNFISDEKYKRLTGKDDFELRGFMARQLVNVRQTTKEVGKILQQIEPEIKIVYSKAEIASSFREMFDFIKVRELNDTHHAKDAYLNIVAGNVYNTKFTEKPYRYLQEIKENYDVKKIYNYDIKNAWDKENSLEIVKKNMEKNTVNITRFIKEEKGELFNLNPIKKGETSNEIISIKPKLYDGKDNKLNEKYGYYTSLKAAYFIYVEHEKKNKKVKTFERITRIDSTLIKNEKNLIKYLVSQKKLLNPKIIKKIYKEQTLIIDSYPYTFTGVDSNKKVELKNKKQLYLEKKYEQILKNALKFVEDNQGETEENYKFIYLKKRNNNEKNETIDAVKERYNIEFNEMYDKFLEKLSSKDYKNYINNKLYTNFLNSKEKFKKLKLWEKSLILREFLKIFNKNTYGKYEIKDSQTKEKLFSFPEDTGRIRLGQSSLGNNKELLEESVTGLFVKKIKL

SEQ ID NO: 327 - protein, 1333 aa, Planococcus antarcticus
MKNYTIGLDIGVASVGWVCIDENYKILNYNNRHAFGVHEFESAESAAGRRLKRGMRRRYNRRKKRLQLLQSLFDSYITDSGFFSKTDSQHFWKNNNEFENRSLTEVLSSLRISSRKYPTIYHLRSDLIESNKKMDLRLVYLALHNLVKYRGHFLQEGNWSEAASAEGMDDQLLELVTRYAELENLSPLDLSESQWKAAETLLLNRNLTKTDQSKELTAMFGKEYEPFCKLVAGLGVSLHQLFPSSEQALAYKETKTKVQLSNENVEEVMELLLEEESALLEAVQPFYQQVVLYELLKGETYVAKAKVSAFKQYQKDMASLKNLLDKTFGEKVYRSYFISDKNSQREYQKSHKVEVLCKLDQFNKEAKFAETFYKDLKKLLEDKSKTSIGTTEKDEMLRIIKAIDSNQFLQKQKGIQNAAIPHQNSLYEAEKILRNQQAHYPFITTEWIEKVKQILAFRIPYYIGPLVKDTTQSPFSWVERKGDAPITPWNFDEQIDKAASAEAFISRMRKTCTYLKGQEVLPKSSLTYERFEVLNELNGIQLRTTGAESDFRHRLSYEMKCWIIDNVFKQYKTVSTKRLLQELKKSPYADELYDEHTGEIKEVFGTQKENAFATSLSGYISMKSILGAVVDDNPAMTEELIYWIAVFEDREILHLKIQEKYPSITDVQRQKLALVKLPGWGRFSRLLIDGLPLDEQGQSVLDHMEQYSSVFMEVLKNKGFGLEKKIQKMNQHQVDGTKKIRYEDIEELAGSPALKRGIWRSVKIVEELVSIFGEPANIVLEVAREDGEKKRTKSRKDQWEELTKTTLKNDPDLKSFIGEIKSQGDQRFNEQRFWLYVTQQGKCLYTGKALDIQNLSMYEVDHILPQNFVKDDSLDNLALVMPEANQRKNQVGQNKMPLEIIEANQQYAMRTLWERLHELKLISSGKLGRLKKPSFDEVDKDKFIARQLVETRQIIKHVRDLLDERFSKSDIHLVKAGIVSKFRRFSEIPKIRDYNNKHHAMDALFAAALIQSILGKYGKNFLAFDLSKKDRQKQWRSVKGSNKEFFLFKNFGNLRLQSPVTGEEVSGVEYMKHVYFELPWQTTKMTQTGDGMFYKESIFSPKVKQAKYVSPKTEKFVHDEVKNHSICLVEFTFMKKEKEVQETKFIDLKVIEHHQFLKEPESQLAKFLAEKETNSPIIHARIIRTIPKYQKIWIEHFPYYFISTRELHNARQFEISYELMEKVKQLSERSSVEELKIVFGLLIDQMNDNYPIYTKSSIQDRVQKFVDTQLYDFKSFEIGFEELKKAVAANAQRSDTFGSRISKKPKPEEVAIGYESITGLKYRKPRSVVGTKR

SEQ ID NO: 328 - protein, 1395 aa, Treponema denticola
MKKEIKDYFLGLDVGTGSVGWAVTDTDYKLLKANRKDLWGMRCFETAETAEVRRLHRGARRRIERRKKRIKLLQELFSQEIAKTDEGFFQRMKESPFYAEDKTILQENTLFNDKDFADKTYHKAYPTINHLIKAWIENKVKPDPRLLYLACHNIIKKRGHFLFEGDFDSENQFDTSIQALFEYLREDMEVDIDADSQKVKEILKDSSLKNSEKQSRLNKILGLKPSDKQKKAITNLISGNKINFADLYDNPDLKDAEKNSISFSKDDFDALSDDLASILGDSFELLLKAKAVYNCSVLSKVIGDEQYLSFAKVKIYEKHKTDLTKLKNVIKKHFPKDYKKVFGYNKNEKNNNNYSGYVGVCKTKSKKLIINNSVNQEDFYKFLKTILSAKSEIKEVNDILTEIETGTFLPKQISKSNAEIPYQLRKMELEKILSNAEKHFSFLKQKDEKGLSHSEKIIMLLTFKIPYYIGPINDNHKKFFPDRCWVVKKEKSPSGKTTPWNFFDHIDKEKTAEAFITSRTNFCTYLVGESVLPKSSLLYSEYTVLNEINNLQIIIDGKNICDIKLKQKIYEDLFKKYKKITQKQISTFIKHEGICNKTDEVIILGIDKECTSSLKSYIELKNIFGKQVDEISTKNMLEEIIRWATIYDEGEGKTILKTKIKAEYGKYCSDEQIKKILNLKFSGWGRLSRKFLETVTSEMPGFSEPVNIITAMRETQNNLMELLSSEFTFTENIKKINSGFEDAEKQFSYDGLVKPLFLSPSVKKMLWQTLKLVKEISHITQAPPKKIFIEMAKGAELEPARTKTRLKILQDLYNNCKNDADAFSSEIKDLSGKIENEDNLRLRSDKLYLYYTQLGKCMYCGKPIEIGHVFDTSNYDIDHIYPQSKIKDDSISNRVLVCSSCNKNKEDKYPLKSEIQSKQRGFWNFLQRNNFISLEKLNRLTRATPISDDETAKFIARQLVETRQATKVAAKVLEKMFPETKIVYSKAETVSMFRNKFDIVKCREINDFHHAHDAYLNIVVGNVYNTKFTNNPWNFIKEKRDNPKIADTYNYYKVFDYDVKRNNITAWEKGKTIITVKDMLKRNTPIYTRQAACKKGELFNQTIMKKGLGQHPLKKEGPFSNISKYGGYNKVSAAYYTLIEYEEKGNKIRSLETIPLYLVKDIQKDQDVLKSYLTDLLGKKEFKILVPKIKINSLLKINGFPCHITGKTNDSFLLRPAVQFCCSNNEVLYFKKIIRFSEIRSQREKIGKTISPYEDLSFRSYIKENLWKKTKNDEIGEKEFYDLLQKKNLEIYDMLLTKHKDTIYKKRPNSATIDILVKGKEKFKSLIIENQFEVILEILKLFSATRNVSDLQHIGGSKYSGVAKIGNKISSLDNCILIYQSITGIFEKRIDLLKV

SEQ ID NO: 329 - protein, 1327 aa, Solobacterium moorei
MEGQMKNNGNNLQQGNYYLGLDVGTSSVGWAVTDTDYNVLKFRGKSMWGARLFDEASTAEERRTHRGNRRRLARRKYRLLLLEQLFEKEIRKIDDNFFVRLHESNLWADDKSKPSKFLLFNDTNFTDKDYLKKYPTIYHLRSDLIHNSTEHDIRLVFLALHHLIKYRGHFIYDNSANGDVKTLDEAVSDFEEYLNENDIEFNIENKKEFINVLSDKHLTKKEKKISLKKLYGDITDSENINISVLIEMLSGSSISLSNLFKDIEFDGKQNLSLDSDIEETLNDVVDILGDNIDLLIHAKEVYDIAVLTSSLGKHKYLCDAKVELFEKNKKDLMILKKYIKKNHPEDYKKIFSSPTEKKNYAAYSQTNSKNVCSQEEFCLFIKPYIRDMVKSENEDEVRIAKEVEDKSFLTKLKGTNNSVVPYQIHERELNQILKNIVAYLPFMNDEQEDISVVDKIKLIFKFKIPYYVGPLNTKSTRSWVYRSDEKIYPWNFSNVIDLDKTAHEFMNRLIGRCTYTNDPVLPMDSLLYSKYNVLNEINPIKVNGKAIPVEVKQAIYTDLFENSKKKVTRKSIYIYLLKNGYIEKEDIVSGIDIEIKSKLKSHHDFTQIVQENKCTPEEIERIIKGILVYSDDKSMLRRWLKNNIKGLSENDVKYLAKLNYKEWGRLSKTLLTDIYTINPEDGEACSILDIMWNTNATLMEILSNEKYQFKQNIENYKAENYDEKQNLHEELDDMYISPAARRSIWQALRIVDEIVDIKKSAPKKIFIEMAREKKSAMKKKRTESRKDTLLELYKSCKSQADGFYDEELFEKLSNESNSRLRRDQLYLYYTQMGRSMYTGKRIDFDKLINDKNTYDIDHIYPRSKIKDDSITNRVLVEKDINGEKTDIYPISEDIRQKMQPFWKILKEKGLINEEKYKRLTRNYELTDEELSSFVARQLVETQQSTKALATLLKKEYPSAKIVYSKAGNVSEFRNRKDKELPKFREINDLHHAKDAYLNIVVGNVYDTKFTEKFFNNIRNENYSLKRVFDFSVPGAWDAKGSTFNTIKKYMAKNNPIIAFAPYEVKGELFDQQIVPKGKGQFPIKQGKDIEKYGGYNKLSSAFLFAVEYKGKKARERSLETVYIKDVELYLQDPIKYCESVLGLKEPQIIKPKILMGSLFSINNKKLVVTGRSGKQYVCHHIYQLSINDEDSQYLKNIAKYLQEEPDGNIERQNILNITSVNNIKLFDVLCTKFNSNTYEIILNSLKNDVNEGREKFSELDILEQCNILLQLLKAFKCNRESSNLEKLNNKKQAGVIVIPHLFTKCSVFKVIHQSITGLFEKEMDLLK

SEQ ID NO: 330 - protein, 1334 aa, Staphylococcus pseudintermedius
MGRKPYILSLDIGTGSVGYACMDKGFNVLKYHDKDALGVYLFDGALTAQERRQFRTSRRRKNRRIKRLGLLQELLAPLVQNPNFYQFQRQFAWKNDNMDFKNKSLSEVLSFLGYESKKYPTIYHLQEALLLKDEKFDPELIYMALYHLVKYRGHFLFDHLKIENLTNNDNMHDFVELIETYENLNNIKLNLDYEKTKVIYEILKDNEMTKNDRAKRVKNMEKKLEQFSIMLLGLKFNEGKLFNHADNAEELKGANQSHTFADNYEENLTPFLTVEQSEFIERANKIYLSLTLQDILKGKKSMAMSKVAAYDKFRNELKQVKDIVYKADSTRTQFKKIFVSSKKSLKQYDATPNDQTFSSLCLFDQYLIRPKKQYSLLIKELKKIIPQDSELYFEAENDTLLKVLNTTDNASIPMQINLYEAETILRNQQKYHAEITDEMIEKVLSLIQFRIPYYVGPLVNDHTASKFGWMERKSNESIKPWNFDEVVDRSKSATQFIRRMTNKCSYLINEDVLPKNSLLYQEMEVLNELNATQIRLQTDPKNRKYRMMPQIKLFAVEHIFKKYKTVSHSKFLEIMLNSNHRENFMNHGEKLSIFGTQDDKKFASKLSSYQDMTKIFGDIEGKRAQIEEIIQWITIFEDKKILVQKLKECYPELTSKQINQLKKLNYSGWGRLSEKLLTHAYQGHSIIELLRHSDENFMEILTNDVYGFQNFIKEENQVQSNKIQHQDIANLTTSPALKKGIWSTIKLVRELTSIFGEPEKIIMEFATEDQQKGKKQKSRKQLWDDNIKKNKLKSVDEYKYIIDVANKLNNEQLQQEKLWLYLSQNGKCMYSGQSIDLDALLSPNATKHYEVDHIFPRSFIKDDSIDNKVLVIKKMNQTKGDQVPLQFIQQPYERIAYWKSLNKAGLISDSKLHKLMKPEFTAMDKEGFIQRQLVETRQISVHVRDFLKEEYPNTKVIPMKAKMVSEFRKKFDIPKIRQMNDAHHAIDAYLNGVVYHGAQLAYPNVDLFDFNFKWEKVREKWKALGEFNTKQKSRELFFFKKLEKMEVSQGERLISKIKLDMNHFKINYSRKLANIPQQFYNQTAVSPKTAELKYESNKSNEVVYKGLTPYQTYVVAIKSVNKKGKEKMEYQMIDHYVFDFYKFQNGNEKELALYLAQRENKDEVLDAQIVYSLNKGDLLYINNHPCYFVSRKEVINAKQFELTVEQQLSLYNVMNNKETNVEKLLIEYDFIAEKVINEYHHYLNSKLKEKRVRTFFSESNQTHEDFIKALDELFKVVTASATRSDKIGSRKNSMTHRAFLGKGKDVKIAYTSISGLKTTKPKSLFKLAESRNEL

SEQ ID NO: 331 - protein, 1472 aa, Flavobacterium branchiophilum
MAKILGLDLGTNSIGWAVVERENIDFSLIDKGVRIFSEGVKSEKGIESSRAAERTGYRSARKIKYRRKLRKYETLKVLSLNRMCPLSIEEVEEWKKSGFKDYPLNPEFLKWLSTDEESNVNPYFFRDRASKHKVSLFELGRAFYHIAQRRGFLSNRLDQSAEGILEEHCPKIEAIVEDLISIDEISTNITDYFFETGILDSNEKNGYAKDLDEGDKKLVSLYKSLLAILKKNESDFENCKSEIIERLNKKDVLGKVKGKIKDISQAMLDGNYKTLGQYFYSLYSKEKIRNQYTSREEHYLSEFITICKVQGIDQINEEEKINEKKFDGLAKDLYKAIFFQRPLKSQKGLIGKCSFEKSKSRCAISHPDFEEYRMWTYLNTIKIGTQSDKKLRFLTQDEKLKLVPKFYRKNDFNFDVLAKELIEKGSSFGFYKSSKKNDFFYWFNYKPTDTVAACQVAASLKNAIGEDWKTKSFKYQTINSNKEQVSRTVDYKDLWHLLTVATSDVYLYEFAIDKLGLDEKNAKAFSKTKLKKDFASLSLSAINKILPYLKEGLLYSHAVFVANIENIVDENIWKDEKQRDYIKTQISEIIENYTLEKSRFEIINGLLKEYKSENEDGKRVYYSKEAEQSFENDLKKKLVLFYKSNEIENKEQQETIFNELLPIFIQQLKDYEFIKIQRLDQKVLIFLKGKNETGQIFCTEEKGTAEEKEKKIKNRLKKLYHPSDIEKFKKKIIKDEFGNEKIVLGSPLTPSIKNPMAMRALHQLRKVLNALILEGQIDEKTIIHIEMARELNDANKRKGIQDYQNDNKKFREDAIKEIKKLYFEDCKKEVEPTEDDILRYQLWMEQNRSEIYEEGKNISICDIIGSNPAYDIEHTIPRSRSQDNSQMNKTLCSQRFNREVKKQSMPIELNNHLEILPRIAHWKEEADNLTREIEIISRSIKAAATKEIKDKKIRRRHYLTLKRDYLQGKYDRFIWEEPKVGFKNSQIPDTGIITKYAQAYLKSYFKKVESVKGGMVAEFRKIWGIQESFIDENGMKHYKVKDRSKHTHHTIDAITIACMTKEKYDVLAHAWTLEDQQNKKEARSIIEASKPWKTFKEDLLKIEEEILVSHYTPDNVKKQAKKIVRVRGKKQFVAEVERDVNGKAVPKKAASGKTIYKLDGEGKKLPRLQQGDTIRGSLHQDSIYGAIKNPLNTDEIKYVIRKDLESIKGSDVESIVDEVVKEKIKEAIANKVLLLSSNAQQKNKLVGTVWMNEEKRIAINKVRIYANSVKNPLHIKEHSLLSKSKHVHKQKVYGQNDENYAMAIYELDGKRDFELINIFNLAKLIKQGQGFYPLHKKKEIKGKIVFVPIEKRNKRDVVLKRGQQVVFYDKEVENPKDISEIVDFKGRIYIIEGLSIQRIVRPSGKVDEYGVIMLRYFKEARKADDIKQDNFKPDGVFKLGENKPTRKMNHQFTAFVEGIDFKVLPSGKFEKI

SEQ ID NO: 332 - protein, 1688 aa, Ignavibacterium album
MEFKKVLGLDIGTNSIGCALLSLPKSIQDYGKGGRLEWLTSRVIPLDADYMKAFIDGKNGLPQVITPAGKRRQKRGSRRLKHRYKLRRSRLIRVFKTLNWLPEDFPLDNPKRIKETISTEGKFSFRISDYVPISDESYREFYREFGYPENEIEQVIEEINFRRKTKGKNKNPMIKLLPEDWVVYYLRKKALIKPTTKEELIRIIYLFNQRRGFKSSRKDLTETAILDYDEFAKRLAEKEKYSAENYETKFVSITKVKEVVELKTDGRKGKKRFKVILEDSRIEPYEIERKEKPDWEGKEYTFLVTQKLEKGKFKQNKPDLPKEEDWALCTTALDNRMGSKHPGEFFFDELLKAFKEKRGYKIRQYPVNRWRYKKELEFIWTKQCQLNPELNNLNINKEILRKLATVLYPSQSKFFGPKIKEFENSDVLHIISEDIIYYQRDLKSQKSLISECRYEKRKGIDGEIYGLKCIPKSSPLYQEFRIWQDIHNIKVIRKESEVNGKKKINIDETQLYINENIKEKLFELFNSKDSLSEKDILELISLNIINSGIKISKKEEETTHRINLFANRKELKGNETKSRYRKVFKKLGFDGEYILNHPSKLNRLWHSDYSNDYADKEKTEKSILSSLGWKNRNGKWEKSKNYDVFNLPLEVAKAIANLPPLKKEYGSYSALAIRKMLVVMRDGKYWQHPDQIAKDQENTSLMLFDKNLIQLTNNQRKVLNKYLLTLAEVQKRSTLIKQKLNEIEHNPYKLELVSDQDLEKQVLKSFLEKKNESDYLKGLKTYQAGYLIYGKHSEKDVPIVNSPDELGEYIRKKLPNNSLRNPIVEQVIRETIFIVRDVWKSFGIIDEIHIELGRELKNNSEERKKTSESQEKNFQEKERARKLLKELLNSSNFEHYDENGNKIFSSFTVNPNPDSPLDIEKFRIWKNQSGLTDEELNKKLKDEKIPTEIEVKKYILWLTQKCRSPYTGKIIPLSKLFDSNVYEIEHIIPRSKMKNDSTNNLVICELGVNKAKGDRLAANFISESNGKCKFGEVEYTLLKYGDYLQYCKDTFKYQKAKYKNLLATEPPEDFIERQINDTRYIGRKLAELLTPVVKDSKNIIFTIGSITSELKITWGLNGVWKDILRPRFKRLESIINKKLIFQDEDDPNKYHFDLSINPQLDKEGLKRLDHRHHALDATIIAATTREHVRYLNSLNAADNDEEKREYFLSLCNHKIRDFKLPWENFTSEVKSKLLSCVVSYKESKPILSDPFNKYLKWEYKNGKWQKVFAIQIKNDRWKAVRRSMFKEPIGTVWIKKIKEVSLKEAIKIQAIWEEVKNDPVRKKKEKYIYDDYAQKVIAKIVQELGLSSSMRKQDDEKLNKFINEAKVSAGVNKNLNTTNKTIYNLEGRFYEKIKVAEYVLYKAKRMPLNKKEYIEKLSLQKMFNDLPNFILEKSILDNYPEILKELESDNKYIIEPHKKNNPVNRLLLEHILEYHNNPKEAFSTEGLEKLNKKAINKIGKPIKYITRLDGDINEEEIFRGAVFETDKGSNVYFVMYENNQTKDREFLKPNPSISVLKAIEHKNKIDFFAPNRLGFSRIILSPGDLVYVPTNDQYVLIKDNSSNETIINWDDNEFISNRIYQVKKFTGNSCYFLKNDIASLILSYSASNGVGEFGSQNISEYSVDDPPIRIKDVCIKIRVDRLGNVRPL

SEQ ID NO: 333 - protein, 1415 aa, Bergeyella zoohelcum
MKHILGLDLGTNSIGWALIERNIEEKYGKIIGMGSRIVPMGAELSKFEQGQAQTKNADRRTNRGARRLNKRYKQRRNKLIYILQKLDMLPSQIKLKEDFSDPNKIDKITILPISKKQEQLTAFDLVSLRVKALTEKVGLEDLGKIIYKYNQLRGYAGGSLEPEKEDIFDEEQSKDKKNKSFIAFSKIVFLGEPQEEIFKNKKLNRRAIIVETEEGNFEGSTFLENIKVGDSLELLINISASKSGDTITIKLPNKTNWRKKMENIENQLKEKSKEMGREFYISEFLLELLKENRWAKIRNNTILRARYESEFEAIWNEQVKHYPFLENLDKKTLIEIVSFIFPGEKESQKKYRELGLEKGLKYIIKNQVVFYQRELKDQSHLISDCRYEPNEKAIAKSHPVFQEYKVWEQINKLIVNTKIEAGTNRKGEKKYKYIDRPIPTALKEWIFEELQNKKEITFSAIFKKLKAEFDLREGIDFLNGMSPKDKLKGNETKLQLQKSLGELWDVLGLDSINRQIELWNILYNEKGNEYDLTSDRTSKVLEFINKYGNNIVDDNAEETAIRISKIKFARAYSSLSLKAVERILPLVRAGKYFNNDFSQQLQSKILKLLNENVEDPFAKAAQTYLDNNQSVLSEGGVGNSIATILVYDKHTAKEYSHDELYKSYKEINLLKQGDLRNPLVEQIINEALVLIRDIWKNYGIKPNEIRVELARDLKNSAKERATIHKRNKDNQTINNKIKETLVKNKKELSLANIEKVKLWEAQRHLSPYTGQPIPLSDLFDKEKYDVDHIIPISRYFDDSFTNKVISEKSVNQEKANRTAMEYFEVGSLKYSIFTKEQFIAHVNEYFSGVKRKNLLATSIPEDPVQRQIKDTQYIAIRVKEELNKIVGNENVKTTTGSITDYLRNHWGLTDKFKLLLKERYEALLESEKFLEAEYDNYKKDFDSRKKEYEEKEVLFEEQELTREEFIKEYKENYIRYKKNKLIIKGWSKRIDHRHHAIDALIVACTEPAHIKRLNDLNKVLQDWLVEHKSEFMPNFEGSNSELLEEILSLPENERTEIFTQIEKFRAIEMPWKGFPEQVEQKLKEIIISHKPKDKLLLQYNKAGDRQIKLRGQLHEGTLYGISQGKEAYRIPLTKFGGSKFATEKNIQKIVSPFLSGFIANHLKEYNNKKEEAFSAEGIMDLNNKLAQYRNEKGELKPHTPISTVKIYYKDPSKNKKKKDEEDLSLQKLDREKAFNEKLYVKTGDNYLFAVLEGEIKTKKTSQIKRLYDIISFFDATNFLKEEFRNAPDKKTFDKDLLFRQYFEERNKAKLLFTLKQGDFVYLPNENEEVILDKESPLYNQYWGDLKERGKNIYVVQKFSKKQIYFIKHTIADIIKKDVEFGSQNCYETVEGRSIKENCFKLEIDRLGNIVKVIKR

SEQ ID NO: 334 - protein, 1166 aa, Nitrobacter hamburgensis
MHVEIDFPHFSRGDSHLAMNKNEILRGSSVLYRLGLDLGSNSLGWFVTHLEKRGDRHEPVALGPGGVRIFPDGRDPQSGTSNAVDRRMARGARKRRDRFVERRKELIAALIKYNLLPDDARERRALEVLDPYALRKTALTDTLPAHHVGRALFHLNQRRGFQSNRKTDSKQSEDGAIKQAASRLATDKGNETLGVFFADMHLRKSYEDRQTAIRAELVRLGKDHLTGNARKKIWAKVRKRLFGDEVLPRADAPHGVRARATITGTKASYDYYPTRDMLRDEFNAIWAGQSAHHATITDEARTEIEHIIFYQRPLKPAIVGKCTLDPATRPFKEDPEGYRAPWSHPLAQRFRILSEARNLEIRDTGKGSRRLTKEQSDLVVAALLANREVKFDKLRTLLKLPAEARFNLESDRRAALDGDQTAARLSDKKGFNKAWRGFPPERQIAIVARLEETEDENELIAWLEKECALDGAAAARVANTTLPDGHCRLGLRAIKKIVPIMQDGLDEDGVAGAGYHIAAKRAGYDHAKLPTGEQLGRLPYYGQWLQDAVVGSGDARDQKEKQYGQFPNPTVHIGLGQLRRVVNDLIDKYGPPTEISIEFTRALKLSEQQKAERQREQRRNQDKNKARAEELAKFGRPANPRNLLKMRLWEELAHDPLDRKCVYTGEQISIERLLSDEVDIDHILPVAMTLDDSPANKIICMRYANRHKRKQTPSEAFGSSPTLQGHRYNWDDIAARATGLPRNKRWRFDANAREEFDKRGGFLARQLNETGWLARLAKQYLGAVTDPNQIWVVPGRLTSMLRGKWGLNGLLPSDNYAGVQDKAEEFLASTDDMEFSGVKNRADHRHHAIDGLVTALTDRSLLWKMANAYDEEHEKFVIEPPWPTMRDDLKAALEKMVVSHKPDHGIEGKLHEDSAYGFVKPLDATGLKEEEAGNLVYRKAIESLNENEVDRIRDIQLRTIVRDHVNVEKTKGVALADALRQLQAPSDDYPQFKHGLRHVRILKKEKGDYLVPIANRASGVAYKAYSAGENFCVEVFETAGGKWDGEAVRRFDANKKNAGPKIAHAPQWRDANEGAKLVMRIHKGDLIRLDHEGRARIMVVHRLDAAAGRFKLADHNETGNLDKRHATNNDIDPFRWLMASYNTLKKLAAVPVRVDELGRVWRVMPN

SEQ ID NO: 335 - protein, 1498 aa, Odoribacter laneus
METTLGIDLGTNSIGLALVDQEEHQILYSGVRIFPEGINKDTIGLGEKEESRNATRRAKRQMRRQYFRKKLRKAKLLELLIAYDMCPLKPEDVRRWKNWDKQQKSTVRQFPDTPAFREWLKQNPYELRKQAVTEDVTRPELGRILYQMIQRRGFLSSRKGKEEGKIFTGKDRMVGIDETRKNLQKQTLGAYLYDIAPKNGEKYRFRTERVRARYTLRDMYIREFEIIWQRQAGHLGLAHEQATRKKNIFLEGSATNVRNSKLITHLQAKYGRGHVLIEDTRITVTFQLPLKEVLGGKIEIEEEQLKFKSNESVLFWQRPLRSQKSLLSKCVFEGRNFYDPVHQKWIIAGPTPAPLSHPEFEEFRAYQFINNIIYGKNEHLTAIQREAVFELMCTESKDFNFEKIPKHLKLFEKFNFDDTTKVPACTTISQLRKLFPHPVWEEKREEIWHCFYFYDDNTLLFEKLQKDYALQTNDLEKIKKIRLSESYGNVSLKAIRRINPYLKKGYAYSTAVLLGGIRNSFGKRFEYFKEYEPEIEKAVCRILKEKNAEGEVIRKIKDYLVHNRFGFAKNDRAFQKLYHHSQAITTQAQKERLPETGNLRNPIVQQGLNELRRTVNKLLATCREKYGPSFKFDHIHVEMGRELRSSKTEREKQSRQIRENEKKNEAAKVKLAEYGLKAYRDNIQKYLLYKEIEEKGGTVCCPYTGKTLNISHTLGSDNSVQIEHIIPYSISLDDSLANKTLCDATFNREKGELTPYDFYQKDPSPEKWGASSWEEIEDRAFRLLPYAKAQRFIRRKPQESNEFISRQLNDTRYISKKAVEYLSAICSDVKAFPGQLTAELRHLWGLNNILQSAPDITFPLPVSATENHREYYVITNEQNEVIRLFPKQGETPRTEKGELLLTGEVERKVFRCKGMQEFQTDVSDGKYWRRIKLSSSVTWSPLFAPKPISADGQIVLKGRIEKGVFVCNQLKQKLKTGLPDGSYWISLPVISQTFKEGESVNNSKLTSQQVQLFGRVREGIFRCHNYQCPASGADGNFWCTLDTDTAQPAFTPIKNAPPGVGGGQIILTGDVDDKGIFHADDDLHYELPASLPKGKYYGIFTVESCDPTLIPIELSAPKTSKGENLIEGNIWVDEHTGEVRFDPKKNREDQRHHAIDAIVIALSSQSLFQRLSTYNARRENKKRGLDSTEHFPSPWPGFAQDVRQSVVPLLVSYKQNPKTLCKISKTLYKDGKKIHSCGNAVRGQLHKETVYGQRTAPGATEKSYHIRKDIRELKTSKHIGKVVDITIRQMLLKHLQENYHIDITQEFNIPSNAFFKEGVYRIFLPNKHGEPVPIKKIRMKEELGNAERLKDNINQYVNPRNNHHVMIYQDADGNLKEEIVSFWSVIERQNQGQPIYQLPREGRNIVSILQINDTFLIGLKEEEPEVYRNDLSTLSKHLYRVQKLSGMYYTFRHHLASTLNNEREEFRIQSLEAWKRANPVKVQIDEIGRITFLNGPLC

SEQ ID NO: 336 - protein, 1372 aa, Legionella pneumophila
MESSQILSPIGIDLGGKFTGVCLSHLEAFAELPNHANTKYSVILIDHNNFQLSQAQRRATRHRVRNKKRNQFVKRVALQLFQHILSRDLNAKEETALCHYLNNRGYTYVDTDLDEYIKDETTINLLKELLPSESEHNFIDWFLQKMQSSEFRKILVSKVEEKKDDKELKNAVKNIKNFITGFEKNSVEGHRHRKVYFENIKSDITKDNQLDSIKKKIPSVCLSNLLGHLSNLQWKNLHRYLAKNPKQFDEQTFGNEFLRMLKNFRHLKGSQESLAVRNLIQQLEQSQDYISILEKTPPEITIPPYEARTNTGMEKDQSLLLNPEKLNNLYPNWRNLIPGIIDAHPFLEKDLEHTKLRDRKRIISPSKQDEKRDSYILQRYLDLNKKIDKFKIKKQLSFLGQGKQLPANLIETQKEMETHFNSSLVSVLIQIASAYNKEREDAAQGIWFDNAFSLCELSNINPPRKQKILPLLVGAILSEDFINNKDKWAKFKIFWNTHKIGRTSLKSKCKEIEEARKNSGNAFKIDYEEALNHPEHSNNKALIKIIQTIPDIIQAIQSHLGHNDSQALIYHNPFSLSQLYTILETKRDGFHKNCVAVTCENYWRSQKTEIDPEISYASRLPADSVRPFDGVLARMMQRLAYEIAMAKWEQIKHIPDNSSLLIPIYLEQNRFEFEESFKKIKGSSSDKTLEQAIEKQNIQWEEKFQRIINASMNICPYKGASIGGQGEIDHIYPRSLSKKHFGVIFNSEVNLIYCSSQGNREKKEEHYLLEHLSPLYLKHQFGTDNVSDIKNFISQNVANIKKYISFHLLTPEQQKAARHALFLDYDDEAFKTITKFLMSQQKARVNGTQKFLGKQIMEFLSTLADSKQLQLEFSIKQITAEEVHDHRELLSKQEPKLVKSRQQSFPSHAIDATLTMSIGLKEFPQFSQELDNSWFINHLMPDEVHLNPVRSKEKYNKPNISSTPLFKDSLYAERFIPVWVKGETFAIGFSEKDLFEIKPSNKEKLFTLLKTYSTKNPGESLQELQAKSKAKWLYFPINKTLALEFLHHYFHKEIVTPDDTTVCHFINSLRYYTKKESITVKILKEPMPVLSVKFESSKKNVLGSFKHTIALPATKDWERLFNHPNFLALKANPAPNPKEFNEFIRKYFLSDNNPNSDIPNNGHNIKPQKHKAVRKVFSLPVIPGNAGTMMRIRRKDNKGQPLYQLQTIDDTPSMGIQINEDRLVKQEVLMDAYKTRNLSTIDGINNSEGQAYATFDNWLTLPVSTFKPEIIKLEMKPHSKTRRYIRITQSLADFIKTIDEALMIKPSDSIDDPLNMPNEIVCKNKLFGNELKPRDGKMKIVSTGKIVTYEFESDSTPQWIQTLYVTQLKKQP

SEQ ID NO: 337 - protein, 1517 aa, Bacteroides sp.
MKKIVGLDLGTNSIGWALINAYINKEHLYGIEACGSRIIPMDAAILGNFDKGNSISQTADRTSYRGIRRLRERHLLRRERLHRILDLLGFLPKHYSDSLNRYGKFLNDIECKLPWVKDETGSYKFIFQESFKEMLANFTEHHPILIANNKKVPYDWTIYYLRKKALTQKISKEELAWILLNFNQKRGYYQLRGEEEETPNKLVEYYSLKVEKVEDSGERKGKDTWYNVHLENGMIYRRTSNIPLDWEGKTKEFIVTTDLEADGSPKKDKEGNIKRSFRAPKDDDWTLIKKKTEADIDKIKMTVGAYIYDTLLQKPDQKIRGKLVRTIERKYYKNELYQILKTQSEFHEELRDKQLYIACLNELYPNNEPRRNSISTRDFCHLFIEDIIFYQRPLKSKKSLIDNCPYEENRYIDKESGEIKHASIKCIAKSHPLYQEFRLWQFIVNLRIYRKETDVDVTQELLPTEADYVTLFEWLNEKKEIDQKAFFKYPPFGFKKTTSNYRWNYVEDKPYPCNETHAQIIARLGKAHIPKAFLSKEKEETLWHILYSIEDKQEIEKALHSFANKNNLSEEFIEQFKNFPPFKKEYGSYSAKAIKKLLPLMRMGKYWSIENIDNGTRIRINKIIDGEYDENIRERVRQKAINLTDITHFRALPLWLACYLVYDRHSEVKDIVKWKTPKDIDLYLKSFKQHSLRNPIVEQVITETLRTVRDIWQQVGHIDEIHIELGREMKNPADKRARMSQQMIKNENTNLRIKALLTEFLNPEFGIENVRPYSPSQQDLLRIYEEGVLNSILELPEDIGIILGKFNQTDTLKRPTRSEILRYKLWLEQKYRSPYTGEMIPLSKLFTPAYEIEHIIPQSRYFDDSLSNKVICESEINKLKDRSLGYEFIKNHHGEKVELAFDKPVEVLSVEAYEKLVHESYSHNRSKMKKLLMEDIPDQFIERQLNDSRYISKVVKSLLSNIVREENEQEAISKNVIPCTGGITDRLKKDWGINDVWNKIVLPRFIRLNELTESTRFTSINTNNTMIPSMPLELQKGFNKKRIDHRHHAMDAIIIACANRNIVNYLNNVSASKNTKITRRDLQTLLCHKDKTDNNGNYKWVIDKPWETFTQDTLTALQKITVSFKQNLRVINKTTNHYQHYENGKKIVSNQSKGDSWAIRKSMHKETVHGEVNLRMIKTVSFNEALKKPQAIVEMDLKKKILAMLELGYDTKRIKNYFEENKDTWQDINPSKIKVYYFTKETKDRYFAVRKPIDTSFDKKKIKESITDTGIQQIMLRHLETKDNDPTLAFSPDGIDEMNRNILILNKGKKHQPIYKVRVYEKAEKFTVGQKGNKRTKFVEAAKGTNLFFAIYETEEIDKDTKKVIRKRSYSTIPLNVVIERQKQGLSSAPEDENGNLPKYILSPNDLVYVPTQEEINKGEVVMPIDRDRIYKMVDSSGITANFIPASTANLIFALPKATAEIYCNGENCIQNEYGIGSPQSKNQKAITGEMVKEICFPIKVDRLGNIIQVGSCILTN

SEQ ID NO: 338 - protein, 1101 aa, Akkermansia muciniphila
MSRSLTFSFDIGYASIGWAVIASASHDDADPSVCGCGTVLFPKDDCQAFKRREYRRLRRNIRSRRVRIERIGRLLVQAQIITPEMKETSGHPAPFYLASEALKGHRTLAPIELWHVLRWYAHNRGYDNNASWSNSLSEDGGNGEDTERVKHAQDLMDKHGTATMAETICRELKLEEGKADAPMEVSTPAYKNLNTAFPRLIVEKEVRRILELSAPLIPGLTAEIIELIAQHHPLTTEQRGVLLQHGIKLARRYRGSLLFGQLIPRFDNRIISRCPVTWAQVYEAELKKGNSEQSARERAEKLSKVPTANCPEFYEYRMARILCNIRADGEPLSAEIRRELMNQARQEGKLTKASLEKAISSRLGKETETNVSNYFTLHPDSEEALYLNPAVEVLQRSGIGQILSPSVYRIAANRLRRGKSVTPNYLLNLLKSRGESGEALEKKIEKESKKKEADYADTPLKPKYATGRAPYARTVLKKVVEEILDGEDPTRPARGEAHPDGELKAHDGCLYCLLDTDSSVNQHQKERRLDTMTNNHLVRHRMLILDRLLKDLIQDFADGQKDRISRVCVEVGKELTTFSAMDSKKIQRELTLRQKSHTDAVNRLKRKLPGKALSANLIRKCRIAMDMNWTCPFTGATYGDHELENLELEHIVPHSFRQSNALSSLVLTWPGVNRMKGQRTGYDFVEQEQENPVPDKPNLHICSLNNYRELVEKLDDKKGHEDDRRRKKKRKALLMVRGLSHKHQSQNHEAMKEIGMTEGMMTQSSHLMKLACKSIKTSLPDAHIDMIPGAVTAEVRKAWDVFGVFKELCPEAADPDSGKILKENLRSLTHLHHALDACVLGLIPYIIPAHHNGLLRRVLAMRRIPEKLIPQVRPVANQRHYVLNDDGRMMLRDLSASLKENIREQLMEQRVIQHVPADMGGALLKETMQRVLSVDGSGEDAMVSLSKKKDGKKEKNQVKASKLVGVFPEGPSKLKALKAAIEIDGNYGVALDPKPVVIRHIKVFKRIMALKEQNGGKPVRILKKGMLIHLTSSKDPKHAGVWRIESIQDSKGGVKLDLQRAHCAVPKNKTHECNWREVDLISLLKKYQMKRYPTSYTGTPR

SEQ ID NO: 339 - protein, 1424 aa, Prevotella sp.
MTQKVLGLDLGTNSIGSAVRNLDLSDDLQWQLEFFSSDIFRSSVNKESNGREYSLAAQRSAHRRSRGLNEVRRRRLWATLNLLIKHGFCPMSSESLMRWCTYDKRKGLFREYPIDDKDFNAWILLDFNGDGRPDYSSPYQLRRELVTRQFDFEQPIERYKLGRALYHIAQHRGFKSSKGETLSQQETNSKPSSTDEIPDVAGAMKASEEKLSKGLSTYMKEHNLLTVGAAFAQLEDEGVRVRNNNDYRAIRSQFQHEIETIFKFQQGLSVESELYERLISEKKNVGTIFYKRPLRSQRGNVGKCTLERSKPRCAIGHPLFEKFRAWTLINNIKVRMSVDTLDEQLPMKLRLDLYNECFLAFVRTEFKFEDIRKYLEKRLGIHFSYNDKTINYKDSTSVAGCPITARFRKMLGEEWESFRVEGQKERQAHSKNNISFHRVSYSIEDIWHFCYDAEEPEAVLAFAQETLRLERKKAEELVRIWSAMPQGYAMLSQKAIRNINKILMLGLKYSDAVILAKVPELVDVSDEELLSIAKDYYLVEAQVNYDKRINSIVNGLIAKYKSVSEEYRFADHNYEYLLDESDEKDIIRQIENSLGARRWSLMDANEQTDILQKVRDRYQDFFRSHERKFVESPKLGESFENYLTKKFPMVEREQWKKLYHPSQITIYRPVSVGKDRSVLRLGNPDIGAIKNPTVLRVLNTLRRRVNQLLDDGVISPDETRVVVETARELNDANRKWALDTYNRIRHDENEKIKKILEEFYPKRDGISTDDIDKARYVIDQREVDYFTGSKTYNKDIKKYKFWLEQGGQCMYTGRTINLSNLFDPNAFDIEHTIPESLSFDSSDMNLTLCDAHYNRFIKKNHIPTDMPNYDKAITIDGKEYPAITSQLQRWVERVERLNRNVEYWKGQARRAQNKDRKDQCMREMHLWKMELEYWKKKLERFTVTEVTDGFKNSQLVDTRVITRHAVLYLKSIFPHVDVQRGDVTAKFRKILGIQSVDEKKDRSLHSHHAIDATTLTIIPVSAKRDRMLELFAKIEEINKMLSFSGSEDRTGLIQELEGLKNKLQMEVKVCRIGHNVSEIGTFINDNIIVNHHIKNQALTPVRRRLRKKGYIVGGVDNPRWQTGDALRGEIHKASYYGAITQFAKDDEGKVLMKEGRPQVNPTIKFVIRRELKYKKSAADSGFASWDDLGKAIVDKELFALMKGQFPAETSFKDACEQGIYMIKKGKNGMPDIKLHHIRHVRCEAPQSGLKIKEQTYKSEKEYKRYFYAAVGDLYAMCCYTNGKIREFRIYSLYDVSCHRKSDIEDIPEFITDKKGNRLMLDYKLRTGDMILLYKDNPAELYDLDNVNLSRRLYKINRFESQSNLVLMTHHLSTSKERGRSLGKTVDYQNLPESIRSSVKSLNFLIMGENRDFVIKNGKIIFNHR

SEQ ID NO: 340 - protein, 1409 aa, Wolinella succinogenes
MLVSPISVDLGGKNTGFFSFTDSLDNSQSGTVIYDESFVLSQVGRRSKRHSKRNNLRNKLVKRLFLLILQEHHGLSIDVLPDEIRGLFNKRGYTYAGFELDEKKKDALESDTLKEFLSEKLQSIDRDSDVEDFLNQIASNAESFKDYKKGFEAVFASATHSPNKKLELKDELKSEYGENAKELLAGLRVTKEILDEFDKQENQGNLPRAKYFEELGEYIATNEKVKSFFDSNSLKLTDMTKLIGNISNYQLKELRRYFNDKEMEKGDIWIPNKLHKITERFVRSWHPKNDADRQRRAELMKDLKSKEIMELLTTTEPVMTIPPYDDMNNRGAVKCQTLRLNEEYLDKHLPNWRDIAKRLNHGKFNDDLADSTVKGYSEDSTLLHRLLDTSKEIDIYELRGKKPNELLVKTLGQSDANRLYGFAQNYYELIRQKVRAGIWVPVKNKDDSLNLEDNSNMLKRCNHNPPHKKNQIHNLVAGILGVKLDEAKFAEFEKELWSAKVGNKKLSAYCKNIEELRKTHGNTFKIDIEELRKKDPAELSKEEKAKLRLTDDVILNEWSQKIANFFDIDDKHRQRFNNLFSMAQLHTVIDTPRSGFSSTCKRCTAENRFRSETAFYNDETGEFHKKATATCQRLPADTQRPFSGKIERYIDKLGYELAKIKAKELEGMEAKEIKVPIILEQNAFEYEESLRKSKTGSNDRVINSKKDRDGKKLAKAKENAEDRLKDKDKRIKAFSSGICPYCGDTIGDDGEIDHILPRSHTLKIYGTVFNPEGNLIYVHQKCNQAKADSIYKLSDIKAGVSAQWIEEQVANIKGYKTFSVLSAEQQKAFRYALFLQNDNEAYKKVVDWLRTDQSARVNGTQKYLAKKIQEKLTKMLPNKHLSFEFILADATEVSELRRQYARQNPLLAKAEKQAPSSHAIDAVMAFVARYQKVFKDGTPPNADEVAKLAMLDSWNPASNEPLTKGLSTNQKIEKMIKSGDYGQKNMREVFGKSIFGENAIGERYKPIVVQEGGYYIGYPATVKKGYELKNCKVVTSKNDIAKLEKIIKNQDLISLKENQYIKIFSINKQTISELSNRYFNMNYKNLVERDKEIVGLLEFIVENCRYYTKKVDVKFAPKYIHETKYPFYDDWRRFDEAWRYLQENQNKTSSKDRFVIDKSSLNEYYQPDKNEYKLDVDTQPIWDDFCRWYFLDRYKTANDKKSIRIKARKTFSLLAESGVQGKVFRAKRKIPTGYAYQALPMDNNVIAGDYANILLEANSKTLSLVPKSGISIEKQLDKKLDVIKKTDVRGLAIDNNSFFNADFDTHGIRLIVENTSVKVGNFPISAIDKSAKRMIFRALFEKEKGKRKKKTTISFKESGPVQDYLKVFLKKIVKIQLRTDGSISNIVVRKNAADFTLSFRSEHIQKLLK

SEQ ID NO: 341 - protein, 1146 aa, Alicyclobacillus hesperidum
MAYRLGLDIGITSVGWAVVALEKDESGLKPVRIQDLGVRIFDKAEDSKTGASLALPRREARSARRRTRRRRHRLWRVKRLLEQHGILSMEQIEALYAQRTSSPDVYALRVAGLDRCLIAEEIARVLIHIAHRRGFQSNRKSEIKDSDAGKLLKAVQENENLMQSKGYRTVAEMLVSEATKTDAEGKLVHGKKHGYVSNVRNKAGEYRHTVSRQAIVDEVRKIFAAQRALGNDVMSEELEDSYLKILCSQRNFDDGPGGDSPYGHGSVSPDGVRQSIYERMVGSCTFETGEKRAPRSSYSFERFQLLTKVVNLRIYRQQEDGGRYPCELTQTERARVIDCAYEQTKITYGKLRKLLDMKDTESFAGLTYGLNRSRNKTEDTVFVEMKFYHEVRKALQRAGVFIQDLSIETLDQIGWILSVWKSDDNRRKKLSTLGLSDNVIEELLPLNGSKFGHLSLKAIRKILPFLEDGYSYDVACELAGYQFQGKTEYVKQRLLPPLGEGEVTNPVVRRALSQAIKVVNAVIRKHGSPESIHIELARELSKNLDERRKIEKAQKENQKNNEQIKDEIREILGSAHVTGRDIVKYKLFKQQQEFCMYSGEKLDVTRLFEPGYAEVDHIIPYGISFDDSYDNKVLVKTEQNRQKGNRTPLEYLRDKPEQKAKFIALVESIPLSQKKKNHLLMDKRAIDLEQEGFRERNLSDTRYITRALMNHIQAWLLFDETASTRSKRVVCVNGAVTAYMRARWGLTKDRDAGDKHHAADAVVVACIGDSLIQRVTKYDKFKRNALADRNRYVQQVSKSEGITQYVDKETGEVFTWESFDERKFLPNEPLEPWPFFRDELLARLSDDPSKNIRAIGLLTYSETEQIDPIFVSRMPTRKVTGAAHKETIRSPRIVKVDDNKGTEIQVVVSKVALTELKLTKDGEIKDYFRPEDDPRLYNTLRERLVQFGGDAKAAFKEPVYKISKDGSVRTPVRKVKIQEKLTLGVPVHGGRGIAENGGMVRIDVFAKGGKYYFVPIYVADVLKRELPNRLATAHKPYSEWRVVDDSYQFKFSLYPNDAVMIKPSREVDITYKDRKEPVGCRIMYFVSANIASASISLRTHDNSGELEGLGIQGLEVFEKYVVGPLGDTHPVYKERRMPFRVERKMN

SEQ ID NO: 342 - protein, 1442 aa, Caenispirillum salinarum
MPVLSPLSPNAAQGRRRWSLALDIGEGSIGWAVAEVDAEGRVLQLTGTGVTLFPSAWSNENGTYVAHGAADRAVRGQQQRHDSRRRRLAGLARLCAPVLERSPEDLKDLTRTPPKADPRAIFFLRADAARRPLDGPELFRVLHHMAAHRGIRLAELQEVDPPPESDADDAAPAATEDEDGTRRAAADERAFRRLMAEHMHRHGTQPTCGEIMAGRLRETPAGAQPVTRARDGLRVGGGVAVPTRALIEQEFDAIRAIQAPRHPDLPWDSLRRLVLDQAPIAVPPATPCLFLEELRRRGETFQGRTITREAIDRGLTVDPLIQALRIRETVGNLRLHERITEPDGRQRYVPRAMPELGLSHGELTAPERDTLVRALMHDPDGLAAKDGRIPYTRLRKLIGYDNSPVCFAQERDTSGGGITVNPTDPLMARWIDGWVDLPLKARSLYVRDVVARGADSAALARLLAEGAHGVPPVAAAAVPAATAAILESDIMQPGRYSVCPWAAEAILDAWANAPTEGFYDVTRGLFGFAPGEIVLEDLRRARGALLAHLPRTMAAARTPNRAAQQRGPLPAYESVIPSQLITSLRRAHKGRAADWSAADPEERNPFLRTWTGNAATDHILNQVRKTANEVITKYGNRRGWDPLPSRITVELAREAKHGVIRRNEIAKENRENEGRRKKESAALDTFCQDNTVSWQAGGLPKERAALRLRLAQRQEFFCPYCAERPKLRATDLFSPAETEIDHVIERRMGGDGPDNLVLAHKDCNNAKGKKTPHEHAGDLLDSPALAALWQGWRKENADRLKGKGHKARTPREDKDFMDRVGWRFEEDARAKAEENQERRGRRMLHDTARATRLARLYLAAAVMPEDPAEIGAPPVETPPSPEDPTGYTAIYRTISRVQPVNGSVTHMLRQRLLQRDKNRDYQTHHAEDACLLLLAGPAVVQAFNTEAAQHGADAPDDRPVDLMPTSDAYHQQRRARALGRVPLATVDAALADIVMPESDRQDPETGRVHWRLTRAGRGLKRRIDDLTRNCVILSRPRRPSETGTPGALHNATHYGRREITVDGRTDTVVTQRMNARDLVALLDNAKIVPAARLDAAAPGDTILKEICTEIADRHDRVVDPEGTHARRWISARLAALVPAHAEAVARDIAELADLDALADADRTPEQEARRSALRQSPYLGRAISAKKADGRARAREQEILTRALLDPHWGPRGLRHLIMREARAPSLVRIRANKTDAFGRPVPDAAVWVKTDGNAVSQLWRLTSVVTDDGRRIPLPKPIEKRIEISNLEYARLNGLDEGAGVTGNNAPPRPLRQDIDRLTPLWRDHGTAPGGYLGTAVGELEDKARSALRGKAMRQTLTDAGITAEAGWRLDSEGAVCDLEVAKGDTVKKDGKTYKVGVITQGIFGMPVDAAGSAPRTPEDCEKFEEQYGIKPWKAKGIPLA

SEQ ID NO: 343 - protein, 1114 aa, Eubacterium rectale
MNYTEKEKLFMKYILALDIGIASVGWAILDKESETVIEAGSNIFPEASAADNQLRRDMRGAKRNNRRLKTRINDFIKLWENNNLSIPQFKSTEIVGLKVRAITEEITLDELYLILYSYLKHRGISYLEDALDDTVSGSSAYANGLKLNAKELETHYPCEIQQERLNTIGKYRGQSQIINENGEVLDLSNVFTIGAYRKEIQRVFEIQKKYHPELTDEFCDGYMLIFNRKRKYYEGPGNEKSRTDYGRFTTKLDANGNYITEDNIFEKLIGKCSVYPDELRAAAASYTAQEYNVLNDLNNLTINGRKLEENEKHEIVERIKSSNTINMRKIISDCMGENIDDFAGARIDKSGKEIFHKFEVYNKMRKALLEIGIDISNYSREELDEIGYIMTINTDKEAMMEAFQKSWIDLSDDVKQCLINMRKTNGALFNKWQSFSLKIMNELIPEMYAQPKEQMTLLTEMGVTKGTQEEFAGLKYIPVDVVSEDIFNPVVRRSVRISFKILNAVLKKYKALDTIVIEMPRDRNSEEQKKRINDSQKLNEKEMEYIEKKLAVTYGIKLSPSDFSSQKQLSLKLKLWNEQDGICLYSGKTIDPNDIINNPQLFEIDHIIPRSISFDDARSNKVLVYRSENQKKGNQTPYYYLTHSHSEWSFEQYKATVMNLSKKKEYAISRKKIQNLLYSEDITKMDVLKGFINRNINDTSYASRLVLNTIQNFFMANEADTKVKVIKGSYTHQMRCNLKLDKNRDESYSHHAVDAMLIGYSELGYEAYHKLQGEFIDFETGEILRKDMWDENMSDEVYADYLYGKKWANIRNEVVKAEKNVKYWHYVMRKSNRGLCNQTIRGTREYDGKQYKINKLDIRTKEGIKVFAKLAFSKKDSDRERLLVYLNDRRTFDDLCKIYEDYSDAANPFVQYEKETGDIIRKYSKKHNGPRIDKLKYKDGEVGACIDISHKYGFEKGSKKVILESLVPYRMDVYYKEENHSYYLVGVKQSDIKFEKGRNVIDEEAYARILVNEKMIQPGQSRADLENLGFKFKLSFYKNDIIEYEKDGKIYTERLVSRTMPKQRNYIETKPIDKAKFEKQNLVGLGKTKFIKKYRYDILGNKYSCSEEKFTSFC

SEQ ID NO: 344 - protein, 1314 aa, Mycoplasma synoviae
MLRLYCANNLVLNNVQNLWKYLLLLIFDKKIIFLFKIKVILIRRYMENNNKEKIVIGFDLGVASVGWSIVNAETKEVIDLGVRLFSEPEKADYRRAKRTTRRLLRRKKFKREKFHKLILKNAEIFGLQSRNEILNVYKDQSSKYRNILKLKINALKEEIKPSELVWILRDYLQNRGYFYKNEKLTDEFVSNSFPSKKLHEHYEKYGFFRGSVKLDNKLDNKKDKAKEKDEEEESDAKKESEELIFSNKQWINEIVKVFENQSYLTESFKEEYLKLFNYVRPFNKGPGSKNSRTAYGVFSTDIDPETNKFKDYSNIWDKTIGKCSLFEEEIRAPKNLPSALIFNLQNEICTIKNEFTEFKNWWLNAEQKSEILKFVFTELFNWKDKKYSDKKFNKNLQDKIKKYLLNFALENFNLNEEILKNRDLENDTVLGLKGVKYYEKSNATADAALEFSSLKPLYVFIKFLKEKKLDLNYLLGLENTEILYFLDSIYLAISYSSDLKERNEWFKKLLKELYPKIKNNNLEIIENVEDIFEITDQEKFESFSKTHSLSREAFNHIIPLLLSNNEGKNYESLKHSNEELKKRTEKAELKAQQNQKYLKDNFLKEALVPLSVKTSVLQAIKIFNQIIKNFGKKYEISQVVIEMARELTKPNLEKLLNNATNSNIKILKEKLDQTEKFDDFTKKKFIDKIENSVVFRNKLFLWFEQDRKDPYTQLDIKINEIEDETEIDHVIPYSKSADDSWFNKLLVKKSTNQLKKNKTVWEYYQNESDPEAKWNKFVAWAKRIYLVQKSDKESKDNSEKNSIFKNKKPNLKFKNITKKLFDPYKDLGFLARNLNDTRYATKVFRDQLNNYSKHHSKDDENKLFKVVCMNGSITSFLRKSMWRKNEEQVYRFNFWKKDRDQFFHHAVDASIIAIFSLLTKTLYNKLRVYESYDVQRREDGVYLINKETGEVKKADKDYWKDQHNFLKIRENAIEIKNVLNNVDFQNQVRYSRKANTKLNTQLFNETLYGVKEFENNFYKLEKVNLFSRKDLRKFILEDLNEESEKNKKNENGSRKRILTEKYIVDEILQILENEEFKDSKSDINALNKYMDSLPSKFSEFFSQDFINKCKKENSLILTFDAIKHNDPKKVIKIKNLKFFREDATLKNKQAVHKDSKNQIKSFYESYKCVGFIWLKNKNDLEESIFVPINSRVIHFGDKDKDIFDFDSYNKEKLLNEINLKRPENKKFNSINEIEFVKFVKPGALLLNFENQQIYYISTLESSSLRAKIKLLNKMDKGKAVSMKKITNPDEYKIIEHVNPLGINLNWTKKLENNN

SEQ ID NO: 345 - protein, 1197 aa, Porphyromonas sp.
MLMSKHVLGLDLGVGSIGWCLIALDAQGDPAEILGMGSRVVPLNNATKAIEAFNAGAAFTASQERTARRTMRRGFARYQLRRYRLRRELEKVGMLPDAALIQLPLLELWELRERAATAGRRLTLPELGRVLCHINQKRGYRHVKSDAAAIVGDEGEKKKDSNSAYLAGIRANDEKLQAEHKTVGQYFAEQLRQNQSESPTGGISYRIKDQIFSRQCYIDEYDQIMAVQRVHYPDILTDEFIRMLRDEVIFMQRPLKSCKHLVSLCEFEKQERVMRVQQDDGKGGWQLVERRVKFGPKVAPKSSPLFQLCCIYEAVNNIRLTRPNGSPCDITPEERAKIVAHLQSSASLSFAALKKLLKEKALIADQLTSKSGLKGNSTRVALASALQPYPQYHHLLDMELETRMMTVQLTDEETGEVTEREVAVVTDSYVRKPLYRLWHILYSIEEREAMRRALITQLGMKEEDLDGGLLDQLYRLDFVKPGYGNKSAKFICKLLPQLQQGLGYSEACAAVGYRHSNSPTSEEITERTLLEKIPLLQRNELRQPLVEKILNQMINLVNALKAEYGIDEVRVELARELKMSREERERMARNNKDREERNKGVAAKIRECGLYPTKPRIQKYMLWKEAGRQCLYCGRSIEEEQCLREGGMEVEHIIPKSVLYDDSYGNKTCACRRCNKEKGNRTALEYIRAKGREAEYMKRINDLLKEKKISYSKHQRLRWLKEDIPSDFLERQLRLTQYISRQAMAILQQGIRRVSASEGGVTARLRSLWGYGKILHTLNLDRYDSMGETERVSREGEATEELHITNWSKRMDHRHHAIDALVVACTRQSYIQRLNRLSSEFGREDKKKEDQEAQEQQATETGRLSNLERWLTQRPHFSVRTVSDKVAEILISYRPGQRVVTRGRNIYRKKMADGREVSCVQRGVLVPRGELMEASFYGKILSQGRVRIVKRYPLHDLKGEVVDPHLRELITTYNQELKSREKGAPIPPLCLDKDKKQEVRSVRCYAKTLSLDKAIPMCFDEKGEPTAFVKSASNHHLALYRTPKGKLVESIVTFWDAVDRARYGIPLVITHPREVMEQVLQRGDIPEQVLSLLPPSDWVFVDSLQQDEMVVIGLSDEELQRALEAQNYRKISEHLYRVQKMSSSYYVFRYHLETSVADDKNTSGRIPKFHRVQSLKAYEERNIRKVRVDLLGRISLL

SEQ ID NO: 346 - protein, 1121 aa, Streptococcus thermophilus
MSDLVLGLDIGIGSVGVGILNKVTGEIIHKNSRIFPAAQAENNLVRRTNRQGRRLARRKKHRRVRLNRLFEESGLITDFTKISINLNPYQLRVKGLTDELSNEELFIALKNMVKHRGISYLDDASDDGNSSVGDYAQIVKENSKQLETKTPGQIQLERYQTYGQLRGDFTVEKDGKKHRLINVFPTSAYRSEALRILQTQQEFNPQITDEFINRYLEILTGKRKYYHGPGNEKSRTDYGRYRTSGETLDNIFGILIGKCTFYPDEFRAAKASYTAQEFNLLNDLNNLTVPTETKKLSKEQKNQIINYVKNEKAMGPAKLFKYIAKLLSCDVADIKGYRIDKSGKAEIHTFEAYRKMKTLETLDIEQMDRETLDKLAYVLTLNTEREGIQEALEHEFADGSFSQKQVDELVQFRKANSSIFGKGWHNFSVKLMMELIPELYETSEEQMTILTRLGKQKTTSSSNKTKYIDEKLLTEEIYNPVVAKSVRQAIKIVNAAIKEYGDFDNIVIEMARETNEDDEKKAIQKIQKANKDEKDAAMLKAANQYNGKAELPHSVFHGHKQLATKIRLWHQQGERCLYTGKTISIHDLINNSNQFEVDHILPLSITFDDSLANKVLVYATANQEKGQRTPYQALDSMDDAWSFRELKAFVRESKTLSNKKKEYLLTEEDISKFDVRKKFIERNLVDTRYASRVVLNALQEHFRAHKIDTKVSVVRGQFTSQLRRHWGIEKTRDTYHHHAVDALIIAASSQLNLWKKQKNTLVSYSEDQLLDIETGELISDDEYKESVFKAPYQHFVDTLKSKEFEDSILFSYQVDSKFNRKISDATIYATRQAKVGKDKADETYVLGKIKDIYTQDGYDAFMKIYKKDKSKFLMYRHDPQTFEKVIEPILENYPNKQINEKGKEVPCNPFLKYKEEHGYIRKYSKKGNGPEIKSLKYYDSKLGNHIDITPKDSNNKVVLQSVSPWRADVYFNKTTGKYEILGLKYADLQFEKGTGTYKISQEKYNDIKKKEGVDSDSEFKFTLYKNDLLLVKDTETKEQQLFRFLSRTMPKQKHYVELKPYDKQKFEGGEALIKVLGNVANSGQCKKGLGKSNISIYKVRTDVLGNQHIIKNEGDKPKLDF

SEQ ID NO: 347 - protein, 1152 aa, Roseburia inulinivorans
MNAEHGKEGLLIMEENFQYRIGLDIGITSVGWAVLQNNSQDEPVRITDLGVRIFDVAENPKNGDALAAPRRDARTTRRRLRRRRHRLERIKFLLQENGLIEMDSFMERYYKGNLPDVYQLRYEGLDRKLKDEELAQVLIHIAKHRGFRSTRKAETKEKEGGAVLKATTENQKIMQEKGYRTVGEMLYLDEAFHTECLWNEKGYVLTPRNRPDDYKHTILRSMLVEEVHAIFAAQRAHGNQKATEGLEEAYVEIMTSQRSFDMGPGLQPDGKPSPYAMEGFGDRVGKCTFEKDEYRAPKATYTAELFVALQKINHTKLIDEFGTGRFFSEEERKTIIGLLLSSKELKYGTIRKKLNIDPSLKFNSLNYSAKKEGETEEERVLDTEKAKFASMFWTYEYSKCLKDRTEEMPVGEKADLFDRIGEILTAYKNDDSRSSRLKELGLSGEEIDGLLDLSPAKYQRVSLKAMRKMQPYLEDGLIYDKACEAAGYDFRALNDGNKKHLLKGEEINAIVNDITNPVVKRSVSQTIKVINAIIQKYGSPQAVNIELAREMSKNFQDRTNLEKEMKKRQQENERAKQQIIELGKQNPTGQDILKYRLWNDQGGYCLYSGKKIPLEELFDGGYDIDHILPYSITFDDSYRNKVLVTAQENRQKGNRTPYEYFGADEKRWEDYEASVRLLVRDYKKQQKLLKKNFTEEERKEFKERNLNDTKYITRVVYNMIRQNLELEPFNHPEKKKQVWAVNGAVTSYLRKRWGLMQKDRSTDRHHAMDAVVIACCTDGMIHKISRYMQGRELAYSRNFKFPDEETGEILNRDNFTREQWDEKFGVKVPLPWNSFRDELDIRLLNEDPKNFLLTHADVQRELDYPGWMYGEEESPIEEGRYINYIRPLFVSRMPNHKVTGSAHDATIRSARDYETRGVVITKVPLTDLKLNKDNEIEGYYDKDSDRLLYQALVRQLLLHGNDGKKAFAEDFHKPKADGTEGPVVRKVKIEKKQTSGVMVRGGTGIAANGEMVRIDVFRENGKYYFVPVYTADVVRKVLPNRAATHTKPYSEWRVMDDANFVFSLYSRDLIHVKSKKDIKTNLVNGGLLLQKEIFAYYTGADIATASIAGFANDSNFKFRGLGIQSLEIFEKCQVDILGNISVVRHENRQEFH

SEQ ID NO: 348 - protein, 1082 aa, Methylosinus trichosporium
MRVLGLDAGIASLGWALIEIEESNRGELSQGTIIGAGTWMFDAPEEKTQAGAKLKSEQRRTFRGQRRVVRRRRQRMNEVRRILHSHGLLPSSDRDALKQPGLDPWRIRAEALDRLLGPVELAVALGHIARHRGFKSNSKGAKTNDPADDTSKMKRAVNETREKLARFGSAAKMLVEDESFVLRQTPTKNGASEIVRRFRNREGDYSRSLLRDDLAAEMRALFTAQARFQSAIATADLQTAFTKAAFFQRPLQDSEKLVGPCPFEVDEKRAPKRGYSFELFRFLSRLNHVTLRDGKQERTLTRDELALAAADFGAAAKVSFTALRKKLKLPETTVFVGVKADEESKLDVVARSGKAAEGTARLRSVIVDALGELAWGALLCSPEKLDKIAEVISFRSDIGRISEGLAQAGCNAPLVDALTAAASDGRFDPFTGAGHISSKAARNILSGLRQGMTYDKACCAADYDHTASRERGAFDVGGHGREALKRILQEERISRELVGSPTARKALIESIKQVKAIVERYGVPDRIHVELARDVGKSIEEREEITRGIEKRNRQKDKLRGLFEKEVGRPPQDGARGKEELLRFELWSEQMGRCLYTDDYISPSQLVATDDAVQVDHILPWSRFADDSYANKTLCMAKANQDKKGRTPYEWFKAEKTDTEWDAFIVRVEALADMKGFKKRNYKLRNAEEAAAKFRNRNLNDTRWACRLLAEALKQLYPKGEKDKDGKERRRVFSRPGALTDRLRRAWGLQWMKKSTKGDRIPDDRHHALDAIVIAATTESLLQRATREVQEIEDKGLHYDLVKNVTPPWPGFREQAVEAVEKVFVARAERRRARGKAHDATIRHIAVREGEQRVYERRKVAELKLADLDRVKDAERNARLIEKLRNWIEAGSPKDDPPLSPKGDPIFKVRLVTKSKVNIALDTGNPKRPGTVDRGEMARVDVFRKASKKGKYEYYLVPIYPHDIATMKTPPIRAVQAYKPEDEWPEMDSSYEFCWSLVPMTYLQVISSKGEIFEGYYRGMNRSVGAIQLSAHSNSSDVVQGIGARTLTEFKKFNVDRFGRKHEVERELRTWRGETWRGKAYI

SEQ ID NO: 349 - protein, 1156 aa, Ruminococcus albus
MGNYYLGLDVGIGSIGWAVINIEKKRIEDFNVRIFKSGEIQEKNRNSRASQQCRRSRGLRRLYRRKSHRKLRLKNYLSIIGLTTSEKIDYYYETADNNVIQLRNKGLSEKLTPEEIAACLIHICNNRGYKDFYEVNVEDIEDPDERNEYKEEHDSIVLISNLMNEGGYCTPAEMICNCREFDEPNSVYRKFHNSAASKNHYLITRHMLVKEVDLILENQSKYYGILDDKTIAKIKDIIFAQRDFEIGPGKNERFRRFTGYLDSIGKCQFFKDQERGSRFTVIADIYAFVNVLSQYTYTNNRGESVFDTSFANDLINSALKNGSMDKRELKAIAKSYHIDISDKNSDTSLTKCFKYIKVVKPLFEKYGYDWDKLIENYTDTDNNVLNRIGIVLSQAQTPKRRREKLKALNIGLDDGLINELTKLKLSGTANVSYKYMQGSIEAFCEGDLYGKYQAKFNKEIPDIDENAKPQKLPPFKNEDDCEFFKNPVVFRSINETRKLINAIIDKYGYPAAVNIETADELNKTFEDRAIDTKRNNDNQKENDRIVKEIIECIKCDEVHARHLIEKYKLWEAQEGKCLYSGETITKEDMLRDKDKLFEVDHIVPYSLILDNTINNKALVYAEENQKKGQRTPLMYMNEAQAADYRVRVNTMFKSKKCSKKKYQYLMLPDLNDQELLGGWRSRNLNDTRYICKYLVNYLRKNLRFDRSYESSDEDDLKIRDHYRVFPVKSRFTSMFRRWWLNEKTWGRYDKAELKKLTYLDHAADAIIIANCRPEYVVLAGEKLKLNKMYHQAGKRITPEYEQSKKACIDNLYKLFRMDRRTAEKLLSGHGRLTPIIPNLSEEVDKRLWDKNIYEQFWKDDKDKKSCEELYRENVASLYKGDPKFASSLSMPVISLKPDHKYRGTITGEEAIRVKEIDGKLIKLKRKSISEITAESINSIYTDDKILIDSLKTIFEQADYKDVGDYLKKTNQHFFTTSSGKRVNKVTVIEKVPSRWLRKEIDDNNFSLLNDSSYYCIELYKDSKGDNNLQGIAMSDIVHDRKTKKLYLKPDFNYPDDYYTHVMYIFPGDYLRIKSTSKKSGEQLKFEGYFISVKNVNENSFRFISDNKPCAKDKRVSITKKDIVIKLAVDLMGKVQGENNGKGISCGEPLSLLKEKN

SEQ ID NO: 350 - protein, 1187 aa, Bifidobacterium longum
MLSRQLLGASHLARPVSYSYNVQDNDVHCSYGERCFMRGKRYRIGIDVGLNSVGLAAVEVSDENSPVRLLNAQSVIHDGGVDPQKNKEAITRKNMSGVARRTRRMRRRKRERLHKLDMLLGKFGYPVIEPESLDKPFEEWHVRAELATRYIEDDELRRESISIALRHMARHRGWRNPYRQVDSLISDNPYSKQYGELKEKAKAYNDDATAAEEESTPAQLVVAMLDAGYAEAPRLRWRTGSKKPDAEGYLPVRLMQEDNANELKQIFRVQRVPADEWKPLFRSVFYAVSPKGSAEQRVGQDPLAPEQARALKASLAFQEYRIANVITNLRIKDASAELRKLTVDEKQSIYDQLVSPSSEDITWSDLCDFLGFKRSQLKGVGSLTEDGEERISSRPPRLTSVQRIYESDNKIRKPLVAWWKSASDNEHEAMIRLLSNTVDIDKVREDVAYASAIEFIDGLDDDALTKLDSVDLPSGRAAYSVETLQKLTRQMLTTDDDLHEARKTLFNVTDSWRPPADPIGEPLGNPSVDRVLKNVNRYLMNCQQRWGNPVSVNIEHVRSSFSSVAFARKDKREYEKNNEKRSIFRSSLSEQLRADEQMEKVRESDLRRLEAIQRQNGQCLYCGRTITFRTCEMDHIVPRKGVGSTNTRTNFAAVCAECNRMKSNTPFAIWARSEDAQTRGVSLAEAKKRVTMFTFNPKSYAPREVKAFKQAVIARLQQTEDDAAIDNRSIESVAWMADELHRRIDWYFNAKQYVNSASIDDAEAETMKTTVSVFQGRVTASARRAAGIEGKIHFIGQQSKTRLDRRHHAVDASVIAMMNTAAAQTLMERESLRESQRLIGLMPGERSWKEYPYEGTSRYESFHLWLDNMDVLLELLNDALDNDRIAVMQSQRYVLGNSIAHDATIHPLEKVPLGSAMSADLIRRASTPALWCALTRLPDYDEKEGLPEDSHREIRVHDTRYSADDEMGFFASQAAQIAVQEGSADIGSAIHHARVYRCWKTNAKGVRKYFYGMIRVFQTDLLRACHDDLFTVPLPPQSISMRYGEPRVVQALQSGNAQYLGSLVVGDEIEMDFSSLDVDGQIGEYLQFFSQFSGGNLAWKHWVVDGFFNQTQLRIRPRYLAAEGLAKAFSDDVVPDGVQKIVTKQGWLPPVNTASKTAVRIVRRNAFGEPRLSSAHHMPCSWQWRHE

SEQ ID NO: 351 - protein, 1150 aa, Enterococcus faecalis
MYSIGLDLGISSVGWSVIDERTGNVIDLGVRLFSAKNSEKNLERRTNRGGRRLIRRKTNRLKDAKKILAAVGFYEDKSLKNSCPYQLRVKGLTEPLSRGEIYKVTLHILKKRGISYLDEVDTEAAKESQDYKEQVRKNAQLLTKYTPGQIQLQRLKENNRVKTGINAQGNYQLNVFKVSAYANELATILKTQQAFYPNELTDDWIALFVQPGIAEEAGLIYRKRPYYHGPGNEANNSPYGRWSDFQKTGEPATNIFDKLIGKDFQGELRASGLSLSAQQYNLLNDLTNLKIDGEVPLSSEQKEYILTELMTKEFTRFGVNDVVKLLGVKKERLSGWRLDKKGKPEIHTLKGYRNWRKIFAEAGIDLATLPTETIDCLAKVLTLNTEREGIENTLAFELPELSESVKLLVLDRYKELSQSISTQSWHRFSLKTLHLLIPELMNATSEQNTLLEQFQLKSDVRKRYSEYKKLPTKDVLAEIYNPTVNKTVSQAFKVIDALLVKYGKEQIRYITIEMPRDDNEEDEKKRIKELHAKNSQRKNDSQSYFMQKSGWSQEKFQTTIQKNRRFLAKLLYYYEQDGICAYTGLPISPELLVSDSTEIDHIIPISISLDDSINNKVLVLSKANQVKGQQTPYDAWMDGSFKKINGKFSNWDDYQKWVESRHFSHKKENNLLETRNIFDSEQVEKFLARNLNDTRYASRLVLNTLQSFFTNQETKVRVVNGSFTHTLRKKWGADLDKTRETHHHHAVDATLCAVTSFVKVSRYHYAVKEETGEKVMREIDFETGEIVNEMSYWEFKKSKKYERKTYQVKWPNFREQLKPVNLHPRIKFSHQVDRKANRKLSDATIYSVREKTEVKTLKSGKQKITTDEYTIGKIKDIYTLDGWEAFKKKQDKLLMKDLDEKTYERLLSIAETTPDFQEVEEKNGKVKRVKRSPFAVYCEENDIPAIQKYAKKNNGPLIRSLKYYDGKLNKHINITKDSQGRPVEKTKNGRKVTLQSLKPYRYDIYQDLETKAYYTVQLYYSDLRFVEGKYGITEKEYMKKVAEQTKGQVVRFCFSLQKNDGLEIEWKDSQRYDVRFYNFQSANSINFKGLEQEMMPAENQFKQKPYNNGAINLNIAKYGKEGKKLRKFNTDILGKKHYLFYEKEPKNIIK

SEQ ID NO: 352 - protein, 1236 aa, Mycoplasma mobile
MYFYKNKENKLNKKVVLGLDLGIASVGWCLTDISQKEDNKFPIILHGVRLFETVDDSDDKLLNETRRKKRGQRRRNRRLFTRKRDFIKYLIDNNIIELEFDKNPKILVRNFIEKYINPFSKNLELKYKSVTNLPIGFHNLRKAAINEKYKLDKSELIVLLYFYLSLRGAFFDNPEDTKSKEMNKNEIEIFDKNESIKNAEFPIDKIIEFYKISGKIRSTINLKFGHQDYLKEIKQVFEKQNIDFMNYEKFAMEEKSFFSRIRNYSEGPGNEKSFSKYGLYANENGNPELIINEKGQKIYTKIFKTLWESKIGKCSYDKKLYRAPKNSFSAKVFDITNKLTDWKHKNEYISERLKRKILLSRFLNKDSKSAVEKILKEENIKFENLSEIAYNKDDNKINLPIINAYHSLTTIFKKHLINFENYLISNENDLSKLMSFYKQQSEKLFVPNEKGSYEINQNNNVLHIFDAISNILNKFSTIQDRIRILEGYFEFSNLKKDVKSSEIYSEIAKLREFSGTSSLSFGAYYKFIPNLISEGSKNYSTISYEEKALQNQKNNFSHSNLFEKTWVEDLIASPTVKRSLRQTMNLLKEIFKYSEKNNLEIEKIVVEVTRSSNNKHERKKIEGINKYRKEKYEELKKVYDLPNENTTLLKKLWLLRQQQGYDAYSLRKIEANDVINKPWNYDIDHIVPRSISFDDSFSNLVIVNKLDNAKKSNDLSAKQFIEKIYGIEKLKEAKENWGNWYLRNANGKAFNDKGKFIKLYTIDNLDEFDNSDFINRNLSDTSYITNALVNHLTFSNSKYKYSVVSVNGKQTSNLRNQIAFVGIKNNKETEREWKRPEGFKSINSNDFLIREEGKNDVKDDVLIKDRSFNGHHAEDAYFITIISQYFRSFKRIERLNVNYRKETRELDDLEKNNIKFKEKASFDNFLLINALDELNEKLNQMRFSRMVITKKNTQLFNETLYSGKYDKGKNTIKKVEKLNLLDNRTDKIKKIEEFFDEDKLKENELTKLHIFNHDKNLYETLKIIWNEVKIEIKNKNLNEKNYFKYFVNKKLQEGKISFNEWVPILDNDFKIIRKIRYIKFSSEEKETDEIIFSQSNFLKIDQRQNFSFHNTLYWVQIWVYKNQKDQYCFISIDARNSKFEKDEIKINYEKLKTQKEKLQIINEEPILKINKGDLFENEEKELFYIVGRDEKPQKLEIKYILGKKIKDQKQIQKPVKKYFPNWKKVNLTYMGEIFKK

SEQ ID NO: 353 - protein, 1105 aa, Actinomyces coleocanis
MDNKNYRIGIDVGLNSIGFCAVEVDQHDTPLGFLNLSVYRHDAGIDPNGKKTNTTRLAMSGVARRTRRLFRKRKRRLAALDRFIEAQGWTLPDHADYKDPYTPWLVRAELAQTPIRDENDLHEKLAIAVRHIARHRGWRSPWVPVRSLHVEQPPSDQYLALKERVEAKTLLQMPEGATPAEMVVALDLSVDVNLRPKNREKTDTRPENKKPGFLGGKLMQSDNANELRKIAKIQGLDDALLRELIELVFAADSPKGASGELVGYDVLPGQHGKRRAEKAHPAFQRYRIASIVSNLRIRHLGSGADERLDVETQKRVFEYLLNAKPTADITWSDVAEEIGVERNLLMGTATQTADGERASAKPPVDVTNVAFATCKIKPLKEWWLNADYEARCVMVSALSHAEKLTEGTAAEVEVAEFLQNLSDEDNEKLDSFSLPIGRAAYSVDSLERLTKRMIENGEDLFEARVNEFGVSEDWRPPAEPIGARVGNPAVDRVLKAVNRYLMAAEAEWGAPLSVNIEHVREGFISKRQAVEIDRENQKRYQRNQAVRSQIADHINATSGVRGSDVTRYLAIQRQNGECLYCGTAITFVNSEMDHIVPRAGLGSTNTRDNLVATCERCNKSKSNKPFAVWAAECGIPGVSVAEALKRVDFWIADGFASSKEHRELQKGVKDRLKRKVSDPEIDNRSMESVAWMARELAHRVQYYFDEKHTGTKVRVFRGSLTSAARKASGFESRVNFIGGNGKTRLDRRHHAMDAATVAMLRNSVAKTLVLRGNIRASERAIGAAETWKSFRGENVADRQIFESWSENMRVLVEKFNLALYNDEVSIFSSLRLQLGNGKAHDDTITKLQMHKVGDAWSLTEIDRASTPALWCALTRQPDFTWKDGLPANEDRTIIVNGTHYGPLDKVGIFGKAAASLLVRGGSVDIGSAIHHARIYRIAGKKPTYGMVRVFAPDLLRYRNEDLFNVELPPQSVSMRYAEPKVREAIREGKAEYLGWLVVGDELLLDLSSETSGQIAELQQDFPGTTHWTVAGFFSPSRLRLRPVYLAQEGLGEDVSEGSKSIIAGQGWRPAVNKVFGSAMPEVIRRDGLGRKRRFSYSGLPVSWQG

SEQ ID NO: 354 - protein, 1079 aa, Dinoroseobacter shibae
MRLGLDIGTSSIGWWLYETDGAGSDARITGVVDGGVRIFSDGRDPKSGASLAVDRRAARAMRRRRDRYLRRRATLMKVLAETGLMPADPAEAKALEALDPFALRAAGLDEPLPLPHLGRALFHLNQRRGFKSNRKTDRGDNESGKIKDATARLDMEMMANGARTYGEFLHKRRQKATDPRHVPSVRTRLSIANRGGPDGKEEAGYDFYPDRRHLEEEFHKLWAAQGAHHPELTETLRDLLFEKIFFQRPLKEPEVGLCLFSGHHGVPPKDPRLPKAHPLTQRRVLYETVNQLRVTADGREARPLTREERDQVIHALDNKKPTKSLSSMVLKLPALAKVLKLRDGERFTLETGVRDAIACDPLRASPAHPDRFGPRWSILDADAQWEVISRIRRVQSDAEHAALVDWLTEAHGLDRAHAEATAHAPLPDGYGRLGLTATTRILYQLTADVVTYADAVKACGWHHSDGRTGECFDRLPYYGEVLERHVIPGSYHPDDDDITRFGRITNPTVHIGLNQLRRLVNRIIETHGKPHQIVVELARDLKKSEEQKRADIKRIRDTTEAAKKRSEKLEELEIEDNGRNRMLLRLWEDLNPDDAMRRFCPYTGTRISAAMIFDGSCDVDHILPYSRTLDDSFPNRTLCLREANRQKRNQTPWQAWGDTPHWHAIAANLKNLPENKRWRFAPDAMTRFEGENGFLDRALKDTQYLARISRSYLDTLFTKGGHVWVVPGRFTEMLRRHWGLNSLLSDAGRGAVKAKNRTDHRHHAIDAAVIAATDPGLLNRISRAAGQGEAAGQSAELIARDTPPPWEGFRDDLRVRLDRIIVSHRADHGRIDHAARKQGRDSTAGQLHQETAYSIVDDIHVASRTDLLSLKPAQLLDEPGRSGQVRDPQLRKALRVATGGKTGKDFENALRYFASKPGPYQAIRRVRIIKPLQAQARVPVPAQDPIKAYQGGSNHLFEIWRLPDGEIEAQVITSFEAHTLEGEKRPHPAAKRLLRVHKGDMVALERDGRRVVGHVQKMDIANGLFIVPHNEANADTRNNDKSDPFKWIQIGARPAIASGIRRVSVDEIGRLRDGGTRPI

SEQ ID NO: 355 - protein, 1181 aa, Actinomyces sp.
MLHCIAVIRVPPSEEPGFFETHADSCALCHHGCMTYAANDKAIRYRVGIDVGLRSIGFCAVEVDDEDHPIRILNSVVHVHDAGTGGPGETESLRKRSGVAARARRRGRAEKQRLKKLDVLLEELGWGVSSNELLDSHAPWHIRKRLVSEYIEDETERRQCLSVAMAHIARHRGWRNSFSKVDTLLLEQAPSDRMQGLKERVEDRTGLQFSEEVTQGELVATLLEHDGDVTIRGFVRKGGKATKVHGVLEGKYMQSDLVAELRQICRTQRVSETTFEKLVLSIFHSKEPAPSAARQRERVGLDELQLALDPAAKQPRAERAHPAFQKFKVVATLANMRIREQSAGERSLTSEELNRVARYLLNHTESESPTWDDVARKLEVPRHRLRGSSRASLETGGGLTYPPVDDTTVRVMSAEVDWLADWWDCANDESRGHMIDAISNGCGSEPDDVEDEEVNELISSATAEDMLKLELLAKKLPSGRVAYSLKTLREVTAAILETGDDLSQAITRLYGVDPGWVPTPAPIEAPVGNPSVDRVLKQVARWLKFASKRWGVPQTVNIEHTREGLKSASLLEEERERWERFEARREIRQKEMYKRLGISGPFRRSDQVRYEILDLQDCACLYCGNEINFQTFEVDHIIPRVDASSDSRRTNLAAVCHSCNSAKGGLAFGQWVKRGDCPSGVSLENAIKRVRSWSKDRLGLTEKAMGKRKSEVISRLKTEMPYEEFDGRSMESVAWMAIELKKRIEGYFNSDRPEGCAAVQVNAYSGRLTACARRAAHVDKRVRLIRLKGDDGHHKNRFDRRNHAMDALVIALMTPAIARTIAVREDRREAQQLTRAFESWKNFLGSEERMQDRWESWIGDVEYACDRLNELIDADKIPVTENLRLRNSGKLHADQPESLKKARRGSKRPRPQRYVLGDALPADVINRVTDPGLWTALVRAPGFDSQLGLPADLNRGLKLRGKRISADFPIDYFPTDSPALAVQGGYVGLEFHHARLYRIIGPKEKVKYALLRVCAIDLCGIDCDDLFEVELKPSSISMRTADAKLKEAMGNGSAKQIGWLVLGDEIQIDPTKFPKQSIGKFLKECGPVSSWRVSALDTPSKITLKPRLLSNEPLLKTSRVGGHESDLVVAECVEKIMKKTGWVVEINALCQSGLIRVIRRNALGEVRTSPKSGLPISLNLR

SEQ ID NO: 356 - protein, 1113 aa, Alcanivorax sp.
MRYRVGLDLGTASVGAAVFSMDEQGNPMELIWHYERLFSEPLVPDMGQLKPKKAARRLARQQRRQIDRRASRLRRIAIVSRRLGIAPGRNDSGVHGNDVPTLRAMAVNERIELGQLRAVLLRMGKKRGYGGTFKAVRKVGEAGEVASGASRLEEEMVALASVQNKDSVTVGEYLAARVEHGLPSKLKVAANNEYYAPEYALFRQYLGLPAIKGRPDCLPNMYALRHQIEHEFERIWATQSQFHDVMKDHGVKEEIRNAIFFQRPLKSPADKVGRCSLQTNLPRAPRAQIAAQNFRIEKQMADLRWGMGRRAEMLNDHQKAVIRELLNQQKELSFRKIYKELERAGCPGPEGKGLNMDRAALGGRDDLSGNTTLAAWRKLGLEDRWQELDEVTQIQVINFLADLGSPEQLDTDDWSCRFMGKNGRPRNFSDEFVAFMNELRMTDGFDRLSKMGFEGGRSSYSIKALKALTEWMIAPHWRETPETHRVDEEAAIRECYPESLATPAQGGRQSKLEPPPLTGNEVVDVALRQVRHTINMMIDDLGSVPAQIVVEMAREMKGGVTRRNDIEKQNKRFASERKKAAQSIEENGKTPTPARILRYQLWIEQGHQCPYCESNISLEQALSGAYTNFEHILPRTLTQIGRKRSELVLAHRECNDEKGNRTPYQAFGHDDRRWRIVEQRANALPKKSSRKTRLLLLKDFEGEALTDESIDEFADRQLHESSWLAKVTTQWLSSLGSDVYVSRGSLTAELRRRWGLDTVIPQVRFESGMPVVDEEGAEITPEEFEKFRLQWEGHRVTREMRTDRRPDKRIDHRHHLVDAIVTALTSRSLYQQYAKAWKVADEKQRHGRVDVKVELPMPILTIRDIALEAVRSVRISHKPDRYPDGRFFEATAYGIAQRLDERSGEKVDWLVSRKSLTDLAPEKKSIDVDKVRANISRIVGEAIRLHISNIFEKRVSKGMTPQQALREPIEFQGNILRKVRCFYSKADDCVRIEHSSRRGHHYKMLLNDGFAYMEVPCKEGILYGVPNLVRPSEAVGIKRAPESGDFIRFYKGDTVKNIKTGRVYTIKQILGDGGGKLILTPVTETKPADLLSAKWGRLKVGGRNIHLLRLCAE

SEQ ID NO: 357 - protein, 1052 aa, Aminomonas paucivorans
MIGEHVRGGCLFDDHWTPNWGAFRLPNTVRTFTKAENPKDGSSLAEPRRQARGLRRRLRRKTQRLEDLRRLLAKEGVLSLSDLETLFRETPAKDPYQLRAEGLDRPLSFPEWVRVLYHITKHRGFQSNRRNPVEDGQERSRQEEEGKLLSGVGENERLLREGGYRTAGEMLARDPKFQDHRRNRAGDYSHTLSRSLLLEEARRLFQSQRTLGNPHASSNLEEAFLHLVAFQNPFASGEDIRNKAGHCSLEPDQIRAPRRSASAETFMLLQKTGNLRLIHRRTGEERPLTDKEREQIHLLAWKQEKVTHKTLRRHLEIPEEWLFTGLPYHRSGDKAEEKLFVHLAGIHEIRKALDKGPDPAVWDTLRSRRDLLDSIADTLTFYKNEDEILPRLESLGLSPENARALAPLSFSGTAHLSLSALGKLLPHLEEGKSYTQARADAGYAAPPPDRHPKLPPLEEADWRNPVVFRALTQTRKVVNALVRRYGPPWCIHLETARELSQPAKVRRRIETEQQANEKKKQQAEREFLDIVGTAPGPGDLLKMRLWREQGGFCPYCEEYLNPTRLAEPGYAEMDHILPYSRSLDNGWHNRVLVHGKDNRDKGNRTPFEAFGGDTARWDRLVAWVQASHLSAPKKRNLLREDFGEEAERELKDRNLTDTRFITKTAATLLRDRLTFHPEAPKDPVMTLNGRLTAFLRKQWGLHKNRKNGDLHHALDAAVLAVASRSFVYRLSSHNAAWGELPRGREAENGFSLPYPAFRSEVLARLCPTREEILLRLDQGGVGYDEAFRNGLRPVFVSRAPSRRLRGKAHMETLRSPKWKDHPEGPRTASRIPLKDLNLEKLERMVGKDRDRKLYEALRERLAAFGGNGKKAFVAPFRKPCRSGEGPLVRSLRIFDSGYSGVELRDGGEVYAVADHESMVRVDVYAKKNRFYLVPVYVADVARGIVKNRAIVAHKSEEEWDLVDGSFDFRFSLFPGDLVEIEKKDGAYLGYYKSCHRGDGRLLLDRHDRMPRESDCGTFYVSTRKDVLSMSKYQVDPLGEIRLVGSEKPPFVL

SEQ ID NO: 358 - protein, 1233 aa, Mycoplasma canis
MEKKRKVTLGFDLGIASVGWAIVDSETNQVYKLGSRLFDAPDTNLERRTQRGTRRLLRRRKYRNQKFYNLVKRTEVFGLSSREAIENRFRELSIKYPNIIELKTKALSQEVCPDEIAWILHDYLKNRGYFYDEKETKEDFDQQTVESMPSYKLNEFYKKYGYFKGALSQPTESEMKDNKDLKEAFFFDFSNKEWLKEINYFFNVQKNILSETFIEEFKKIFSFTRDISKGPGSDNMPSPYGIFGEFGDNGQGGRYEHIWDKNIGKCSIFTNEQRAPKYLPSALIFNFLNELANIRLYSTDKKNIQPLWKLSSVDKLNILLNLFNLPISEKKKKLTSTNINDIVKKESIKSIMISVEDIDMIKDEWAGKEPNVYGVGLSGLNIEESAKENKFKFQDLKILNVLINLLDNVGIKFEFKDRNDIIKNLELLDNLYLFLIYQKESNNKDSSIDLFIAKNESLNIENLKLKLKEFLLGAGNEFENHNSKTHSLSKKAIDEILPKLLDNNEGWNLEAIKNYDEEIKSQIEDNSSLMAKQDKKYLNDNFLKDAILPPNVKVTFQQAILIFNKIIQKFSKDFEIDKVVIELAREMTQDQENDALKGIAKAQKSKKSLVEERLEANNIDKSVFNDKYEKLIYKIFLWISQDFKDPYTGAQISVNEIVNNKVEIDHIIPYSLCFDDSSANKVLVHKQSNQEKSNSLPYEYIKQGHSGWNWDEFTKYVKRVFVNNVDSILSKKERLKKSENLLTASYDGYDKLGFLARNLNDTRYATILFRDQLNNYAEHHLIDNKKMFKVIAMNGAVTSFIRKNMSYDNKLRLKDRSDFSHHAYDAAIIALFSNKTKTLYNLIDPSLNGIISKRSEGYWVIEDRYTGEIKELKKEDWTSIKNNVQARKIAKEIEEYLIDLDDEVFFSRKTKRKTNRQLYNETIYGIATKTDEDGITNYYKKEKFSILDDKDIYLRLLREREKFVINQSNPEVIDQIIEIIESYGKENNIPSRDEAINIKYTKNKINYNLYLKQYMRSLTKSLDQFSEEFINQMIANKTFVLYNPTKNTTRKIKFLRLVNDVKINDIRKNQVINKFNGKNNEPKAFYENINSLGAIVFKNSANNFKTLSINTQIAIFGDKNWDIEDFKTYNMEKIEKYKEIYGIDKTYNFHSFIFPGTILLDKQNKEFYYISSIQTVRDIIEIKFLNKIEFKDENKNQDTSKTPKRLMFGIKSIMNNYEQVDISPFGINKKIFE

SEQ ID NO: 359 - protein, 1119 aa, Lactobacillus coryniformis
MGYRIGLDVGITSTGYAVLKTDKNGLPYKILTLDSVIYPRAENPQTGASLAEPRRIKRGLRRRTRRTKFRKQRTQQLFIHSGLLSKPEIEQILATPQAKYSVYELRVAGLDRRLTNSELFRVLYFFIGHRGFKSNRKAELNPENEADKKQMGQLLNSIEEIRKAIAEKGYRTVGELYLKDPKYNDHKRNKGYIDGYLSTPNRQMLVDEIKQILDKQRELGNEKLTDEFYATYLLGDENRAGIFQAQRDFDEGPGAGPYAGDQIKKMVGKDIFEPTEDRAAKATYTFQYFNLLQKMTSLNYQNTTGDTWHTLNGLDRQAIIDAVFAKAEKPTKTYKPTDFGELRKLLKLPDDARFNLVNYGSLQTQKEIETVEKKTRFVDFKAYHDLVKVLPEEMWQSRQLLDHIGTALTLYSSDKRRRRYFAEELNLPAELIEKLLPLNFSKFGHLSIKSMQNIIPYLEMGQVYSEATTNTGYDFRKKQISKDTIREEITNPVVRRAVTKTIKIVEQIIRRYGKPDGINIELARELGRNFKERGDIQKRQDKNRQTNDKIAAELTELGIPVNGQNIIRYKLHKEQNGVDPYTGDQIPFERAFSEGYEVDHIIPYSISWDDSYTNKVLTSAKCNREKGNRIPMVYLANNEQRLNALTNIADNIIRNSRKRQKLLKQKLSDEELKDWKQRNINDTRFITRVLYNYFRQAIEFNPELEKKQRVLPLNGEVTSKIRSRWGFLKVREDGDLHHAIDATVIAAITPKFIQQVTKYSQHQEVKNNQALWHDAEIKDAEYAAEAQRMDADLFNKIFNGFPLPWPEFLDELLARISDNPVEMMKSRSWNTYTPIEIAKLKPVFVVRLANHKISGPAHLDTIRSAKLFDEKGIVLSRVSITKLKINKKGQVATGDGIYDPENSNNGDKVVYSAIRQALEAHNGSGELAFPDGYLEYVDHGTKKLVRKVRVAKKVSLPVRLKNKAAADNGSMVRIDVFNTGKKFVFVPIYIKDTVEQVLPNKAIARGKSLWYQITESDQFCFSLYPGDMVHIESKTGIKPKYSNKENNTSVVPIKNFYGYFDGADIATASILVRAHDSSYTARSIGIAGLLKFEKYQVDYFGRYHKVHEKKRQLFVKRDE

SEQ ID NO: 360 - protein, 1195 aa, Elusimicrobium minutum
MQKNINTKQNHIYIKQAQKIKEKLGDKPYRIGLDLGVGSIGFAIVSMEENDGNVLLPKEIIMVGSRIFKASAGAADRKLSRGQRNNHRHTRERMRYLWKVLAEQKLALPVPADLDRKENSSEGETSAKRFLGDVLQKDIYELRVKSLDERLSLQELGYVLYHIAGHRGSSAIRTFENDSEEAQKENTENKKIAGNIKRLMAKKNYRTYGEYLYKEFFENKEKHKREKISNAANNHKFSPTRDLVIKEAEAILKKQAGKDGFHKELTEEYIEKLTKAIGYESEKLIPESGFCPYLKDEKRLPASHKLNEERRLWETLNNARYSDPIVDIVTGEITGYYEKQFTKEQKQKLFDYLLTGSELTPAQTKKLLGLKNTNFEDIILQGRDKKAQKIKGYKLIKLESMPFWARLSEAQQDSFLYDWNSCPDEKLLTEKLSNEYHLTEEEIDNAFNEIVLSSSYAPLGKSAMLIILEKIKNDLSYTEAVEEALKEGKLTKEKQAIKDRLPYYGAVLQESTQKIIAKGFSPQFKDKGYKTPHTNKYELEYGRIANPVVHQTLNELRKLVNEIIDILGKKPCEIGLETARELKKSAEDRSKLSREQNDNESNRNRIYEIYIRPQQQVIITRRENPRNYILKFELLEEQKSQCPFCGGQISPNDIINNQADIEHLFPIAESEDNGRNNLVISHSACNADKAKRSPWAAFASAAKDSKYDYNRILSNVKENIPHKAWRFNQGAFEKFIENKPMAARFKTDNSYISKVAHKYLACLFEKPNIICVKGSLTAQLRMAWGLQGLMIPFAKQLITEKESESFNKDVNSNKKIRLDNRHHALDAIVIAYASRGYGNLLNKMAGKDYKINYSERNWLSKILLPPNNIVWENIDADLESFESSVKTALKNAFISVKHDHSDNGELVKGTMYKIFYSERGYTLTTYKKLSALKLTDPQKKKTPKDFLETALLKFKGRESEMKNEKIKSAIENNKRLFDVIQDNLEKAKKLLEEENEKSKAEGKKEKNINDASIYQKAISLSGDKYVQLSKKEPGKFFAISKPTPTTTGYGYDTGDSLCVDLYYDNKGKLCGEIIRKIDAQQKNPLKYKEQGFTLFERIYGGDILEVDFDIHSDKNSFRNNTGSAPENRVFIKVGTFTEITNNNIQIWFGNIIKSTGGQDDSFTINSMQQYNPRKLILSSCGFIKYRSPILKNKEG

SEQ ID NO: 361 - protein, 1082 aa, Neisseria meningitidis; identical to SEQ ID NO: 25

SEQ ID NO: 362 - protein, 1056 aa, Pasteurella multocida
MQTTNLSYILGLDLGIASVGWAVVEINENEDPIGLIDVGVRIFERAEVPKTGESLALSRRLARSTRRLIRRRAHRLLLAKRFLKREGILSTIDLEKGLPNQAWELRVAGLERRLSAIEWGAVLLHLIKHRGYLSKRKNESQTNNKELGALLSGVAQNHQLLQSDDYRTPAELALKKFAKEEGHIRNQRGAYTHTFNRLDLLAELNLLFAQQHQFGNPHCKEHIQQYMTELLMWQKPALSGEAILKMLGKCTHEKNEFKAAKHTYSAERFVWLTKLNNLRILEDGAERALNEEERQLLINHPYEKSKLTYAQVRKLLGLSEQAIFKHLRYSKENAESATFMELKAWHAIRKALENQGLKDTWQDLAKKPDLLDEIGTAFSLYKTDEDIQQYLTNKVPNSVINALLVSLNFDKFIELSLKSLRKILPLMEQGKRYDQACREIYGHHYGEANQKTSQLLPAIPAQEIRNPVVLRTLSQARKVINAIIRQYGSPARVHIETGRELGKSFKERREIQKQQEDNRTKRESAVQKFKELFSDFSSEPKSKDILKFRLYEQQHGKCLYSGKEINIHRLNEKGYVEIDHALPFSRTWDDSFNNKVLVLASENQNKGNQTPYEWLQGKINSERWKNFVALVLGSQCSAAKKQRLLTQVIDDNKFIDRNLNDTRYIARFLSNYIQENLLLVGKNKKNVFTPNGQITALLRSRWGLIKARENNNRHHALDAIVVACATPSMQQKITRFIRFKEVHPYKIENRYEMVDQESGEIISPHFPEPWAYFRQEVNIRVFDNHPDTVLKEMLPDRPQANHQFVQPLFVSRAPTRKMSGQGHMETIKSAKRLAEGISVLRIPLTQLKPNLLENMVNKEREPALYAGLKARLAEFNQDPAKAFATPFYKQGGQQVKAIRVEQVQKSGVLVRENNGVADNASIVRTDVFIKNNKFFLVPIYTWQVAKGILPNKAIVAHKNEDEWEEMDEGAKFKFSLFPNDLVELKTKKEYFFGYYIGLDRATGNISLKEHDGEISKGKDGVYRVGVKLALSFEKYQVDELGKNRQICRPQQRQPVR

SEQ ID NO: 363 - protein, 1059 aa, Rhodovulum sp.
MGIRFAFDLGTNSIGWAVWRTGPGVFGEDTAASLDGSGVLIFKDGRNPKDGQSLATMRRVPRQSRKRRDRFVLRRRDLLAALRKAGLFPVDVEEGRRLAATDPYHLRAKALDESLTPHEMGRVIFHLNQRRGFRSNRKADRQDREKGKIAEGSKRLAETLAATNCRTLGEFLWSRHRGTPRTRSPTRIRMEGEGAKALYAFYPTREMVRAEFERLWTAQSRFAPDLLTPERHEEIAGILFRQRDLAPPKIGCCTFEPSERRLPRALPSVEARGIYERLAHLRITTGPVSDRGLTRPERDVLASALLAGKSLTFKAVRKTLKILPHALVNFEEAGEKGLDGALTAKLLSKPDHYGAAWHGLSFAEKDTFVGKLLDEADEERLIRRLVTENRLSEDAARRCASIPLADGYGRLGRTANTEILAALVEETDETGTVVTYAEAVRRAGERTGRNWHHSDERDGVILDRLPYYGEILQRHVVPGSGEPEEKNEAARWGRLANPTVHIGLNQLRKVVNRLIAAHGRPDQIVVELARELKLNREQKERLDRENRKNREENERRTAILAEHGQRDTAENKIRLRLFEEQARANAGIALCPYTGRAIGIAELFTSEVEIDHILPVSLTLDDSLANRVLCRREANREKRRQTPFQAFGATPAWNDIVARAAKLPPNKRWRFDPAALERFEREGGFLGRQLNETKYLSRLAKIYLGKICDPDRVYVTPGTLTGLLRARWGLNSILSDSNFKNRSDHRHHAVDAVVIGVLTRGMIQRIAHDAARAEDQDLDRVFRDVPVPFEDFRDHVRERVSTITVAVKPEHGKGGALHEDTSYGLVPDTDPNAALGNLVVRKPIRSLTAGEVDRVRDRALRARLGALAAPFRDESGRVRDAKGLAQALEAFGAENGIRRVRILKPDASVVTIADRRTGVPYRAVAPGENHHVDIVQMRDGSWRGFAASVFEVNRPGWRPEWEVKKLGGKLVMRLHKGDMVELSDKDGQRRVKVVQQIEISANRVRLSPHNDGGKLQDRHADADDPFRWDLATIPLLKDRGCVAVRVDPIGVVTLRRSNV

SEQ ID NO: 364 - protein, 1096 aa, Eubacterium dolichum
MMEVFMGRLVLGLDIGITSVGFGIIDLDESEIVDYGVRLFKEGTAAENETRRTKRGGRRLKRRRVTRREDMLHLLKQAGIISTSFHPLNNPYDVRVKGLNERLNGEELATALLHLCKHRGSSVETIEDDEAKAKEAGETKKVLSMNDQLLKSGKYVCEIQKERLRTNGHIRGHENNFKTRAYVDEAFQILSHQDLSNELKSAIITIISRKRMYYDGPGGPLSPTPYGRYTYFGQKEPIDLIEKMRGKCSLFPNEPRAPKLAYSAELFNLLNDLNNLSIEGEKLTSEQKAMILKIVHEKGKITPKQLAKEVGVSLEQIRGFRIDTKGSPLLSELTGYKMIREVLEKSNDEHLEDHVFYDEIAEILTKTKDIEGRKKQISELSSDLNEESVHQLAGLTKFTAYHSLSFKALRLINEEMLKTELNQMQSITLFGLKQNNELSVKGMKNIQADDTAILSPVAKRAQRETFKVVNRLREIYGEFDSIVVEMAREKNSEEQRKAIRERQKFFEMRNKQVADIIGDDRKINAKLREKLVLYQEQDGKTAYSLEPIDLKLLIDDPNAYEVDHIIPISISLDDSITNKVLVTHRENQEKGNLTPISAFVKGRFTKGSLAQYKAYCLKLKEKNIKTNKGYRKKVEQYLLNENDIYKYDIQKEFINRNLVDTSYASRVVLNTLTTYFKQNEIPTKVFTVKGSLTNAFRRKINLKKDRDEDYGHHAIDALIIASMPKMRLLSTIFSRYKIEDIYDESTGEVFSSGDDSMYYDDRYFAFIASLKAIKVRKFSHKIDTKPNRSVADETIYSTRVIDGKEKVVKKYKDIYDPKFTALAEDILNNAYQEKYLMALHDPQTFDQIVKVVNYYFEEMSKSEKYFTKDKKGRIKISGMNPLSLYRDEHGMLKKYSKKGDGPAITQMKYFDGVLGNHIDISAHYQVRDKKVVLQQISPYRTDFYYSKENGYKFVTIRYKDVRWSEKKKKYVIDQQDYAMKKAEKKIDDTYEFQFSMHRDELIGITKAEGEALIYPDETWHNFNFFFHAGETPEILKFTATNNDKSNKIEVKPIHCYCKMRLMPTISKKIVRIDKYATDVVGNLYKVKKNTLKFEFD

SEQ ID NO: 365 - protein, 1132 aa, Nitratifractor salsuginis
MKKILGVDLGITSFGYAILQETGKDLYRCLDNSVVMRNNPYDEKSGESSQSIRSTQKSMRRLIEKRKKRIRCVAQTMERYGILDYSETMKINDPKNNPIKNRWQLRAVDAWKRPLSPQELFAIFAHMAKHRGYKSIATEDLIYELELELGLNDPEKESEKKADERRQVYNALRHLEELRKKYGGETIAQTIHRAVEAGDLRSYRNHDDYEKMIRREDIEEEIEKVLLRQAELGALGLPEEQVSELIDELKACITDQEMPTIDESLFGKCTFYKDELAAPAYSYLYDLYRLYKKLADLNIDGYEVTQEDREKVIEWVEKKIAQGKNLKKITHKDLRKILGLAPEQKIFGVEDERIVKGKKEPRTFVPFFFLADIAKFKELFASIQKHPDALQIFRELAEILQRSKTPQEALDRLRALMAGKGIDTDDRELLELFKNKRSGTRELSHRYILEALPLFLEGYDEKEVQRILGFDDREDYSRYPKSLRHLHLREGNLFEKEENPINNHAVKSLASWALGLIADLSWRYGPFDEIILETTRDALPEKIRKEIDKAMREREKALDKIIGKYKKEFPSIDKRLARKIQLWERQKGLDLYSGKVINLSQLLDGSADIEHIVPQSLGGLSTDYNTIVTLKSVNAAKGNRLPGDWLAGNPDYRERIGMLSEKGLIDWKKRKNLLAQSLDEIYTENTHSKGIRATSYLEALVAQVLKRYYPFPDPELRKNGIGVRMIPGKVTSKTRSLLGIKSKSRETNFHHAEDALILSTLTRGWQNRLHRMLRDNYGKSEAELKELWKKYMPHIEGLTLADYIDEAFRRFMSKGEESLFYRDMFDTIRSISYWVDKKPLSASSHKETVYSSRHEVPTLRKNILEAFDSLNVIKDRHKLTTEEFMKRYDKEIRQKLWLHRIGNTNDESYRAVEERATQIAQILTRYQLMDAQNDKEIDEKFQQALKELITSPIEVTGKLLRKMRFVYDKLNAMQIDRGLVETDKNMLGIHISKGPNEKLIFRRMDVNNAHELQKERSGILCYLNEMLFIFNKKGLIHYGCLRSYLEKGQGSKYIALFNPRFPANPKAQPSKFTSDSKIKQVGIGSATGIIKAHLDLDGHVRSYEVFGTLPEGSIEWFKEESGYGRVEDDPHH

SEQ ID NO: 366 - protein, 1173 aa, Rhodospirillum rubrum
MRPIEPWILGLDIGTDSLGWAVFSCEEKGPPTAKELLGGGVRLFDSGRDAKDHTSRQAERGAFRRARRQTRTWPWRRDRLIALFQAAGLTPPAAETRQIALALRREAVSRPLAPDALWAALLHLAHHRGFRSNRIDKRERAAAKALAKAKPAKATAKATAPAKEADDEAGFWEGAEAALRQRMAASGAPTVGALLADDLDRGQPVRMRYNQSDRDGVVAPTRALIAEELAEIVARQSSAYPGLDWPAVTRLVLDQRPLRSKGAGPCAFLPGEDRALRALPTVQDFIIRQTLANLRLPSTSADEPRPLTDEEHAKALALLSTARFVEWPALRRALGLKRGVKFTAETERNGAKQAARGTAGNLTEAILAPLIPGWSGWDLDRKDRVFSDLWAARQDRSALLALIGDPRGPTRVTEDETAEAVADAIQIVLPTGRASLSAKAARAIAQAMAPGIGYDEAVTLALGLHHSHRPRQERLARLPYYAAALPDVGLDGDPVGPPPAEDDGAAAEAYYGRIGNISVHIALNETRKIVNALLHRHGPILRLVMVETTRELKAGADERKRMIAEQAERERENAEIDVELRKSDRWMANARERRQRVRLARRQNNLCPYTSTPIGHADLLGDAYDIDHVIPLARGGRDSLDNMVLCQSDANKTKGDKTPWEAFHDKPGWIAQRDDFLARLDPQTAKALAWRFADDAGERVARKSAEDEDQGFLPRQLTDTGYIARVALRYLSLVTNEPNAVVATNGRLTGLLRLAWDITPGPAPRDLLPTPRDALRDDTAARRFLDGLTPPPLAKAVEGAVQARLAALGRSRVADAGLADALGLTLASLGGGGKNRADHRHHFIDAAMIAVTTRGLINQINQASGAGRILDLRKWPRTNFEPPYPTFRAEVMKQWDHIHPSIRPAHRDGGSLHAATVFGVRNRPDARVLVQRKPVEKLFLDANAKPLPADKIAEIIDGFASPRMAKRFKALLARYQAAHPEVPPALAALAVARDPAFGPRGMTANTVIAGRSDGDGEDAGLITPFRANPKAAVRTMGNAVYEVWEIQVKGRPRWTHRVLTRFDRTQPAPPPPPENARLVMRLRRGDLVYWPLESGDRLFLVKKMAVDGRLALWPARLATGKATALYAQLSCPNINLNGDQGYCVQSAEGIRKEKIRTTSCTALGRLRLSKKAT

SEQ ID NO: 367 - protein, 1021 aa, Clostridium cellulolyticum
MKYTLGLDVGIASVGWAVIDKDNNKIIDLGVRCFDKAEESKTGESLATARRIARGMRRRISRRSQRLRLVKKLFVQYEIIKDSSEFNRIFDTSRDGWKDPWELRYNALSRILKPYELVQVLTHITKRRGFKSNRKEDLSTTKEGVVITSIKNNSEMLRTKNYRTIGEMIFMETPENSNKRNKVDEYIHTIAREDLLNEIKYIFSIQRKLGSPFVTEKLEHDFLNIWEFQRPFASGDSILSKVGKCTLLKEELRAPTSCYTSEYFGLLQSINNLVLVEDNNTLTLNNDQRAKIIEYAHFKNEIKYSEIRKLLDIEPEILFKAHNLTHKNPSGNNESKKFYEMKSYHKLKSTLPTDIWGKLHSNKESLDNLFYCLTVYKNDNEIKDYLQANNLDYLIEYIAKLPTFNKFKHLSLVAMKRIIPFMEKGYKYSDACNMAELDFTGSSKLEKCNKLTVEPIIENVTNPVVIRALTQARKVINAIIQKYGLPYMVNIELAREAGMTRQDRDNLKKEHENNRKAREKISDLIRQNGRVASGLDILKWRLWEDQGGRCAYSGKPIPVCDLLNDSLTQIDHIYPYSRSMDDSYMNKVLVLTDENQNKRSYTPYEVWGSTEKWEDFEARIYSMHLPQSKEKRLLNRNFITKDLDSFISRNLNDTRYISRFLKNYIESYLQFSNDSPKSCVVCVNGQCTAQLRSRWGLNKNREESDLHHALDAAVIACADRKIIKEITNYYNERENHNYKVKYPLPWHSFRQDLMETLAGVFISRAPRRKITGPAHDETIRSPKHFNKGLTSVKIPLTTVTLEKLETMVKNTKGGISDKAVYNVLKNRLIEHNNKPLKAFAEKIYKPLKNGTNGAIIRSIRVETPSYTGVFRNEGKGISDNSLMVRVDVFKKKDKYYLVPIYVAHMIKKELPSKAIVPLKPESQWELIDSTHEFLFSLYQNDYLVIKTKKGITEGYYRSCHRGTGSLSLMPHFANNKNVKIDIGVRTAISIEKYNVDILGNKSIVKGEPRRGMEKYNSFKSN

SEQ ID NO: 368 - protein, 1024 aa, Helicobacter mustelae
MIRTLGIDIGIASIGWAVIEGEYTDKGLENKEIVASGVRVFTKAENPKNKESLALPRTLARSARRRNARKKGRIQQVKHYLSKALGLDLECFVQGEKLATLFQTSKDFLSPWELRERALYRVLDKEELARVILHIAKRRGYDDITYGVEDNDSGKIKKAIAENSKRIKEEQCKTIGEMMYKLYFQKSLNVRNKKESYNRCVGRSELREELKTIFQIQQELKSPWVNEELIYKLLGNPDAQSKQEREGLIFYQRPLKGFGDKIGKCSHIKKGENSPYRACKHAPSAEEFVALTKSINFLKNLTNRHGLCFSQEDMCVYLGKILQEAQKNEKGLTYSKLKLLLDLPSDFEFLGLDYSGKNPEKAVFLSLPSTFKLNKITQDRKTQDKIANILGANKDWEAILKELESLQLSKEQIQTIKDAKLNFSKHINLSLEALYHLLPLMREGKRYDEGVEILQERGIFSKPQPKNRQLLPPLSELAKEESYFDIPNPVLRRALSEFRKVVNALLEKYGGFHYFHIELTRDVCKAKSARMQLEKINKKNKSENDAASQLLEVLGLPNTYNNRLKCKLWKQQEEYCLYSGEKITIDHLKDQRALQIDHAFPLSRSLDDSQSNKVLCLTSSNQEKSNKTPYEWLGSDEKKWDMYVGRVYSSNFSPSKKRKLTQKNFKERNEEDFLARNLVDTGYIGRVTKEYIKHSLSFLPLPDGKKEHIRIISGSMTSTMRSFWGVQEKNRDHHLHHAQDAIIIACIEPSMIQKYTTYLKDKETHRLKSHQKAQILREGDHKLSLRWPMSNFKDKIQESIQNIIPSHHVSHKVTGELHQETVRTKEFYYQAFGGEEGVKKALKFGKIREINQGIVDNGAMVRVDIFKSKDKGKFYAVPIYTYDFAIGKLPNKAIVQGKKNGIIKDWLEMDENYEFCFSLFKNDCIKIQTKEMQEAVLAIYKSTNSAKATIELEHLSKYALKNEDEEKMFTDTDKEKNKTMTRESCGIQGLKVFQKVKLSVLGEVLEHKPRNRQNIALKTTPKHV

SEQ ID NO: 369 - protein, 1092 aa, Ilyobacter polytropus
MKYSIGLDIGIASVGWSVINKDKERIEDMGVRIFQKAENPKDGSSLASSRREKRGSRRRNRRKKHRLDRIKNILCESGLVKKNEIEKIYKNAYLKSPWELRAKSLEAKISNKEIAQILLHIAKRRGFKSFRKTDRNADDTGKLLSGIQENKKIMEEKGYLTIGDMVAKDPKFNTHVRNKAGSYLFSFSRKLLEDEVRKIQAKQKELGNTHFTDDVLEKYIEVFNSQRNFDEGPSKPSPYYSEIGQIAKMIGNCTFESSEKRTAKNTWSGERFVFLQKLNNFRIVGLSGKRPLTEEERDIVEKEVYLKKEVRYEKLRKILYLKEEERFGDLNYSKDEKQDKKTEKTKFISLIGNYTIKKLNLSEKLKSEIEEDKSKLDKIIEILTFNKSDKTIESNLKKLELSREDIEILLSEEFSGTLNLSLKAIKKILPYLEKGLSYNEACEKADYDYKNNGIKFKRGELLPVVDKDLIANPVVLRAISQTRKVVNAIIRKYGTPHTIHVEVARDLAKSYDDRQTIIKENKKRELENEKTKKFISEEFGIKNVKGKLLLKYRLYQEQEGRCAYSRKELSLSEVILDESMTDIDHIIPYSRSMDDSYSNKVLVLSGENRKKSNLLPKEYFDRQGRDWDTFVLNVKAMKIHPRKKSNLLKEKFTREDNKDWKSRALNDTRYISRFVANYLENALEYRDDSPKKRVFMIPGQLTAQLRARWRLNKVRENGDLHHALDAAVVAVTDQKAINNISNISRYKELKNCKDVIPSIEYHADEETGEVYFEEVKDTRFPMPWSGFDLELQKRLESENPREEFYNLLSDKRYLGWFNYEEGFIEKLRPVFVSRMPNRGVKGQAHQETIRSSKKISNQIAVSKKPLNSIKLKDLEKMQGRDTDRKLYEALKNRLEEYDDKPEKAFAEPFYKPTNSGKRGPLVRGIKVEEKQNVGVYVNGGQASNGSMVRIDVFRKNGKFYTVPIYVHQTLLKELPNRAINGKPYKDWDLIDGSFEFLYSFYPNDLIEIEFGKSKSIKNDNKLTKTEIPEVNLSEVLGYYRGMDTSTGAATIDTQDGKIQMRIGIKTVKNIKKYQVDVLGNVYKVKREKRQTF

SEQ ID NO: 370 - protein, 1179 aa, Sphaerochaeta globus
MSKKVSRRYEEQAQEICQRLGSRPYSIGLDLGVGSIGVAVAAYDPIKKQPSDLVFVSSRIFIPSTGAAERRQKRGQRNSLRHRANRLKFLWKLLAERNLMLSYSEQDVPDPARLRFEDAVVRANPYELRLKGLNEQLTLSELGYALYHIANHRGSSSVRTFLDEEKSSDDKKLEEQQAMTEQLAKEKGISTFIEVLTAFNTNGLIGYRNSESVKSKGVPVPTRDIISNEIDVLLQTQKQFYQEILSDEYCDRIVSAILFENEKIVPEAGCCPYFPDEKKLPRCHFLNEERRLWEAINNARIKMPMQEGAAKRYQSASFSDEQRHILFHIARSGTDITPKLVQKEFPALKTSIIVLQGKEKAIQKIAGFRFRRLEEKSFWKRLSEEQKDDFFSAWTNTPDDKRLSKYLMKHLLLTENEVVDALKTVSLIGDYGPIGKTATQLLMKHLEDGLTYTEALERGMETGEFQELSVWEQQSLLPYYGQILTGSTQALMGKYWHSAFKEKRDSEGFFKPNTNSDEEKYGRIANPVVHQTLNELRKLMNELITILGAKPQEITVELARELKVGAEKREDIIKQQTKQEKEAVLAYSKYCEPNNLDKRYIERFRLLEDQAFVCPYCLEHISVADIAAGRADVDHIFPRDDTADNSYGNKVVAHRQCNDIKGKRTPYAAFSNTSAWGPIMHYLDETPGMWRKRRKFETNEEEYAKYLQSKGFVSRFESDNSYIAKAAKEYLRCLFNPNNVTAVGSLKGMETSILRKAWNLQGIDDLLGSRHWSKDADTSPTMRKNRDDNRHHGLDAIVALYCSRSLVQMINTMSEQGKRAVEIEAMIPIPGYASEPNLSFEAQRELFRKKILEFMDLHAFVSMKTDNDANGALLKDTVYSILGADTQGEDLVFVVKKKIKDIGVKIGDYEEVASAIRGRITDKQPKWYPMEMKDKIEQLQSKNEAALQKYKESLVQAAAVLEESNRKLIESGKKPIQLSEKTISKKALELVGGYYYLISNNKRTKTFVVKEPSNEVKGFAFDTGSNLCLDFYHDAQGKLCGEIIRKIQAMNPSYKPAYMKQGYSLYVRLYQGDVCELRASDLTEAESNLAKTTHVRLPNAKPGRTFVIIITFTEMGSGYQIYFSNLAKSKKGQDTSFTLTTIKNYDVRKVQLSSAGLVRYVSPLLVDKIEKDEVALCGE

SEQ ID NO: 371 - protein, 1054 aa, Staphylococcus lugdunensis
MNQKFILGLDIGITSVGYGLIDYETKNIIDAGVRLFPEANVENNEGRRSKRGSRRLKRRRIHRLERVKKLLEDYNLLDQSQIPQSTNPYAIRVKGLSEALSKDELVIALLHIAKRRGIHKIDVIDSNDDVGNELSTKEQLNKNSKLLKDKFVCQIQLERMNEGQVRGEKNRFKTADIIKEIIQLLNVQKNFHQLDENFINKYIELVEMRREYFEGPGKGSPYGWEGDPKAWYETLMGHCTYFPDELRSVKYAYSADLFNALNDLNNLVIQRDGLSKLEYHEKYHIIENVFKQKKKPTLKQIANEINVNPEDIKGYRITKSGKPQFTEFKLYHDLKSVLFDQSILENEDVLDQIAEILTIYQDKDSIKSKLTELDILLNEEDKENIAQLTGYTGTHRLSLKCIRLVLEEQWYSSRNQMEIFTHLNIKPKKINLTAANKIPKAMIDEFILSPVVKRTFGQAINLINKIIEKYGVPEDIIIELARENNSKDKQKFINEMQKKNENTRKRINEIIGKYGNQNAKRLVEKIRLHDEQEGKCLYSLESIPLEDLLNNPNHYEVDHIIPRSVSFDNSYHNKVLVKQSENSKKSNLTPYQYFNSGKSKLSYNQFKQHILNLSKSQDRISKKKKEYLLEERDINKFEVQKEFINRNLVDTRYATRELTNYLKAYFSANNMNVKVKTINGSFTDYLRKVWKFKKERNHGYKHHAEDALIIANADFLFKENKKLKAVNSVLEKPEIESKQLDIQVDSEDNYSEMFIIPKQVQDIKDFRNFKYSHRVDKKPNRQLINDTLYSTRKKDNSTYIVQTIKDIYAKDNTTLKKQFDKSPEKFLMYQHDPRTFEKLEVIMKQYANEKNPLAKYHEETGEYLTKYSKKNNGPIVKSLKYIGNKLGSHLDVTHQFKSSTKKLVKLSIKPYRFDVYLTDKGYKFITISYLDVLKKDNYYYIPEQKYDKLKLGKAIDKNAKFIASFYKNDLIKLDGEIYKIIGVNSDTRNMIELDLPDIRYKEYCELNNIKGEPRIKKTIGKKVNSIEKLTTDVLGNVFTNTQYTKPQLLFKRGN

SEQ ID NO: 372 - protein, 1061 aa, Treponema sp.
MIMKLEKWRLGLDLGTNSIGWSVFSLDKDNSVQDLIDMGVRIFSDGRDPKTKEPLAVARRTARSQRKLIYRRKLRRKQVFKFLQEQGLFPKTKEECMTLKSLNPYELRIKALDEKLEPYELGRALFNLAVRRGFKSNRKDGSREEVSEKKSPDEIKTQADMQTHLEKAIKENGCRTITEFLYKNQGENGGIRFAPGRMTYYPTRKMYEEEFNLIRSKQEKYYPQVDWDDIYKAIFYQRPLKPQQRGYCIYENDKERTFKAMPCSQKLRILQDIGNLAYYEGGSKKRVELNDNQDKVLYELLNSKDKVTFDQMRKALCLADSNSFNLEENRDFLIGNPTAVKMRSKNRFGKLWDEIPLEEQDLIIETIITADEDDAVYEVIKKYDLTQEQRDFIVKNTILQSGTSMLCKEVSEKLVKRLEEIADLKYHEAVESLGYKFADQTVEKYDLLPYYGKVLPGSTMEIDLSAPETNPEKHYGKISNPTVHVALNQTRVVVNALIKEYGKPSQIAIELSRDLKNNVEKKAEIARKQNQRAKENIAINDTISALYHTAFPGKSFYPNRNDRMKYRLWSELGLGNKCIYCGKGISGAELFTKEIEIEHILPFSRTLLDAESNLTVAHSSCNAFKAERSPFEAFGTNPSGYSWQEIIQRANQLKNTSKKNKFSPNAMDSFEKDSSFIARQLSDNQYIAKAALRYLKCLVENPSDVWTTNGSMTKLLRDKWEMDSILCRKFTEKEVALLGLKPEQIGNYKKNRFDHRHHAIDAVVIGLTDRSMVQKLATKNSHKGNRIEIPEFPILRSDLIEKVKNIVVSFKPDHGAEGKLSKETLLGKIKLHGKETFVCRENIVSLSEKNLDDIVDEIKSKVKDYVAKHKGQKIEAVLSDFSKENGIKKVRCVNRVQTPIEITSGKISRYLSPEDYFAAVIWEIPGEKKTFKAQYIRRNEVEKNSKGLNVVKPAVLENGKPHPAAKQVCLLHKDDYLEFSDKGKMYFCRIAGYAATNNKLDIRPVYAVSYCADWINSTNETMLTGYWKPTPTQNWVSVNVLFDKQKARLVTVSPIGRVFRK

SEQ ID NO: 373 - protein, 1011 aa, Unknown
  Uncultured delta polypeptide
MSSKAIDSLEQLDLFKPQEYTLGLDLGIKSIGWAILSGERIANAGVYLFETAEELNSTGNKLISKAAERGRKRRIRRMLDRKARRGRHIRYLLEREGLPTDELEEVVVHQSNRTLWDVRAEAVERKLTKQELAAVLFHLVRHRGYFPNTKKLPPDDESDSADEEQGKINRATSRLREELKASDCKTIGQFLAQNRDRQRNREGDYSNLMARKLVFEEALQILAFQRKQGHELSKDFEKTYLDVLMGQRSGRSPKLGNCSLIPSELRAPSSAPSTEWFKFLQNLGNLQISNAYREEWSIDAPRRAQIIDACSQRSTSSYWQIRRDFQIPDEYRFNLVNYERRDPDVDLQEYLQQQERKTLANFRNWKQLEKIIGTGHPIQTLDEAARLITLIKDDEKLSDQLADLLPEASDKAITQLCELDFTTAAKISLEAMYRILPHMNQGMGFFDACQQESLPEIGVPPAGDRVPPFDEMYNPVVNRVLSQSRKLINAVIDEYGMPAKIRVELARDLGKGRELRERIKLDQLDKSKQNDQRAEDFRAEFQQAPRGDQSLRYRLWKEQNCTCPYSGRMIPVNSVLSEDTQIDHILPISQSFDNSLSNKVLCFTEENAQKSNRTPFEYLDAADFQRLEAISGNWPEAKRNKLLHKSFGKVAEEWKSRALNDTRYLTSALADHLRHHLPDSKIQTVNGRITGYLRKQWGLEKDRDKHTHHAVDAIVVACTTPAIVQQVTLYHQDIRRYKKLGEKRPTPWPETFRQDVLDVEEEIFITRQPKKVSGGIQTKDTLRKHRSKPDRQRVALTKVKLADLERLVEKDASNRNLYEHLKQCLEESGDQPTKAFKAPFYMPSGPEAKQRPILSKVTLLREKPEPPKQLTELSGGRRYDSMAQGRLDIYRYKPGGKRKDEYRVVLQRMIDLMRGEENVHVFQKGVPYDQGPEIEQNYTFLFSLYFDDLVEFQRSADSEVIRGYYRTFNIANGQLKISTYLEGRQDFDFFGANRLAHFAKVQVNLLGKVIK

SEQ ID NO: 374 - protein, 1029 aa, Alicycliphilus denitrificans
MRSLRYRLALDLGSTSLGWALFRLDACNRPTAVIKAGVRIFSDGRNPKDGSSLAVTRRAARAMRRRRDRLLKRKTRMQAKLVEHGFFPADAGKRKALEQLNPYALRAKGLQEALLPGEFARALFHINQRRGFKSNRKTDKKDNDSGVLKKAIGQLRQQMAEQGSRTVGEYLWTRLQQGQGVRARYREKPYTTEEGKKRIDKSYDLYIDRAMIEQEFDALWAAQAAFNPTLFHEAARADLKDTLLHQRPLRPVKPGRCTLLPEEERAPLALPSTQRFRIHQEVNHLRLLDENLREVALTLAQRDAVVTALETKAKLSFEQIRKLLKLSGSVQFNLEDAKRTELKGNATSAALARKELFGAAWSGFDEALQDEIVWQLVTEEGEGALIAWLQTHTGVDEARAQAIVDVSLPEGYGNLSRKALARIVPALRAAVITYDKAVQAAGFDHHSQLGFEYDASEVEDLVHPETGEIRSVFKQLPYYGKALQRHVAFGSGKPEDPDEKRYGKIANPTVHIGLNQVRMVVNALIRRYGRPTEVVIELARDLKQSREQKVEAQRRQADNQRRNARIRRSIAEVLGIGEERVRGSDIQKWICWEELSFDAADRRCPYSGVQISAAMLLSDEVEVEHILPFSKTLDDSLNNRTVAMRQANRIKRNRTPWDARAEFEAQGWSYEDILQRAERMPLRKRYRFAPDGYERWLGDDKDFLARALNDTRYLSRVAAEYLRLVCPGTRVIPGQLTALLRGKFGLNDVLGLDGEKNRNDHRHHAVDACVIGVTDQGLMQRFATASAQARGDGLTRLVDGMPMPWPTYRDHVERAVRHIWVSHRPDHGFEGAMMEETSYGIRKDGSIKQRRKADGSAGREISNLIRIHEATQPLRHGVSADGQPLAYKGYVGGSNYCIEITVNDKGKWEGEVISTFRAYGVVRAGGMGRLRNPHEGQNGRKLIMRLVIGDSVRLEVDGAERTMRIVKISGSNGQIFMAPIHEANVDARNTDKQDAFTYTSKYAGSLQKAKTRRVTISPIGEVRDPGFKG

SEQ ID NO: 375 - protein, 1168 aa, Azospirillum sp.
MARPAFRAPRREHVNGWTPDPHRISKPFFILVSWHLLSRVVIDSSSGCFPGTSRDHTDKFAEWECAVQPYRLSFDLGTNSIGWGLLNLDRQGKPREIRALGSRIFSDGRDPQDKASLAVARRLARQMRRRRDRYLTRRTRLMGALVRFGLMPADPAARKRLEVAVDPYLARERATRERLEPFEIGRALFHLNQRRGYKPVRTATKPDEEAGKVKEAVERLEAAIAAAGAPTLGAWFAWRKTRGETLRARLAGKGKEAAYPFYPARRMLEAEFDTLWAEQARHHPDLLTAEAREILRHRIFHQRPLKPPPVGRCTLYPDDGRAPRALPSAQRLRLFQELASLRVIHLDLSERPLTPAERDRIVAFVQGRPPKAGRKPGKVQKSVPFEKLRGLLELPPGTGFSLESDKRPELLGDETGARIAPAFGPGWTALPLEEQDALVELLLTEAEPERAIAALTARWALDEATAAKLAGATLPDFHGRYGRRAVAELLPVLERETRGDPDGRVRPIRLDEAVKLLRGGKDHSDFSREGALLDALPYYGAVLERHVAFGTGNPADPEEKRVGRVANPTVHIALNQLRHLVNAILARHGRPEEIVIELARDLKRSAEDRRREDKRQADNQKRNEERKRLILSLGERPTPRNLLKLRLWEEQGPVENRRCPYSGETISMRMLLSEQVDIDHILPFSVSLDDSAANKVVCLREANRIKRNRSPWEAFGHDSERWAGILARAEALPKNKRWRFAPDALEKLEGEGGLRARHLNDTRHLSRLAVEYLRCVCPKVRVSPGRLTALLRRRWGIDAILAEADGPPPEVPAETLDPSPAEKNRADHRHHALDAVVIGCIDRSMVQRVQLAAASAEREAAAREDNIRRVLEGFKEEPWDGFRAELERRARTIVVSHRPEHGIGGALHKETAYGPVDPPEEGFNLVVRKPIDGLSKDEINSVRDPRLRRALIDRLAIRRRDANDPATALAKAAEDLAAQPASRGIRRVRVLKKESNPIRVEHGGNPSGPRSGGPFHKLLLAGEVHHVDVALRADGRRWVGHWVTLFEAHGGRGADGAAAPPRLGDGERFLMRLHKGDCLKLEHKGRVRVMQVVKLEPSSNSVVVVEPHQVKTDRSKHVKISCDQLRARGARRVTVDPLGRVRVHAPGARVGIGGDAGRTAMEPAEDIS

SEQ ID NO: 376 - protein, 1064 aa, Bradyrhizobium sp.
MKRTSLRAYRLGVDLGANSLGWFVVWLDDHGQPEGLGPGGVRIFPDGRNPQSKQSNAAGRRLARSARRRRDRYLQRRGKLMGLLVKHGLMPADEPARKRLECLDPYGLRAKALDEVLPLHHVGRALFHLNQRRGLFANRAIEQGDKDASAIKAAAGRLQTSMQACGARTLGEFLNRRHQLRATVRARSPVGGDVQARYEFYPTRAMVDAEFEAIWAAQAPHHPTMTAEAHDTIREAIFSQRAMKRPSIGKCSLDPATSQDDVDGFRCAWSHPLAQRFRIWQDVRNLAVVETGPTSSRLGKEDQDKVARALLQTDQLSFDEIRGLLGLPSDARFNLESDRRDHLKGDATGAILSARRHFGPAWHDRSLDRQIDIVALLESALDEAAIIASLGTTHSLDEAAAQRALSALLPDGYCRLGLRAIKRVLPLMEAGRTYAEAASAAGYDHALLPGGKLSPTGYLPYYGQWLQNDVVGSDDERDTNERRWGRLPNPTVHIGIGQLRRVVNELIRWHGPPAEITVELTRDLKLSPRRLAELEREQAENQRKNDKRTSLLRKLGLPASTHNLLKLRLWDEQGDVASECPYTGEAIGLERLVSDDVDIDHLIPFSISWDDSAANKVVCMRYANREKGNRTPFEAFGHRQGRPYDWADIAERAARLPRGKRWRFGPGARAQFEELGDFQARLLNETSWLARVAKQYLAAVTHPHRIHVLPGRLTALLRATWELNDLLPGSDDRAAKSRKDHRHHAIDALVAALTDQALLRRMANAHDDTRRKIEVLLPWPTFRIDLETRLKAMLVSHKPDHGLQARLHEDTAYGTVEHPETEDGANLVYRKTFVDISEKEIDRIRDRRLRDLVRAHVAGERQQGKTLKAAVLSFAQRRDIAGHPNGIRHVRLTKSIKPDYLVPIRDKAGRIYKSYNAGENAFVDILQAESGRWIARATTVFQANQANESHDAPAAQPIMRVFKGDMLRIDHAGAEKFVKIVRLSPSNNLLYLVEHHQAGVFQTRHDDPEDSFRWLFASFDKLREWNAELVRIDTLGQPWRRKRGLETGSEDATRIGWTRPKKWP

SEQ ID NO: 377 - protein, 1037 aa, Parvibaculum lavamentivorans
MERIFGFDIGTTSIGFSVIDYSSTQSAGNIQRLGVRIFPEARDPDGTPLNQQRRQKRMMRRQLRRRRIRRKALNETLHEAGFLPAYGSADWPVVMADEPYELRRRGLEEGLSAYEFGRAIYHLAQHRHFKGRELEESDTPDPDVDDEKEAANERAATLKALKNEQTTLGAWLARRPPSDRKRGIHAHRNVVAEEFERLWEVQSKFHPALKSEEMRARISDTIFAQRPVFWRKNTLGECRFMPGEPLCPKGSWLSQQRRMLEKLNNLAIAGGNARPLDAEERDAILSKLQQQASMSWPGVRSALKALYKQRGEPGAEKSLKFNLELGGESKLLGNALEAKLADMFGPDWPAHPRKQEIRHAVHERLWAADYGETPDKKRVIILSEKDRKAHREAAANSFVADFGITGEQAAQLQALKLPTGWEPYSIPALNLFLAELEKGERFGALVNGPDWEGWRRTNFPHRNQPTGEILDKLPSPASKEERERISQLRNPTVVRTQNELRKVVNNLIGLYGKPDRIRIEVGRDVGKSKREREEIQSGIRRNEKQRKKATEDLIKNGIANPSRDDVEKWILWKEGQERCPYTGDQIGFNALFREGRYEVEHIWPRSRSFDNSPRNKTLCRKDVNIEKGNRMPFEAFGHDEDRWSAIQIRLQGMVSAKGGTGMSPGKVKRFLAKTMPEDFAARQLNDTRYAAKQILAQLKRLWPDMGPEAPVKVEAVTGQVTAQLRKLWTLNNILADDGEKTRADHRHHAIDALTVACTHPGMTNKLSRYWQLRDDPRAEKPALTPPWDTIRADAEKAVSEIVVSHRVRKKVSGPLHKETTYGDTGTDIKTKSGTYRQFVTRKKIESLSKGELDEIRDPRIKEIVAAHVAGRGGDPKKAFPPYPCVSPGGPEIRKVRLTSKQQLNLMAQTGNGYADLGSNHHIAIYRLPDGKADFEIVSLFDASRRLAQRNPIVQRTRADGASFVMSLAAGEAIMIPEGSKKGIWIVQGVWASGQVVLERDTDADHSTTTRPMPNPILKDDAKKVSIDPIGRVRPSND

SEQ ID NO: 378 - protein, 1218 aa, Prevotella timonensis
MNKRILGLDTGTNSLGWAVVDWDEHAQSYELIKYGDVIFQEGVKIEKGIESSKAAERSGYKAIRKQYFRRRLRKIQVLKVLVKYHLCPYLSDDDLRQWHLQKQYPKSDELMLWQRTSDEEGKNPYYDRHRCLHEKLDLTVEADRYTLGRALYHLTQRRGFLSNRLDTSADNKEDGVVKSGISQLSTEMEEAGCEYLGDYFYKLYDAQGNKVRIRQRYTDRNKHYQHEFDAICEKQELSSELIEDLQRAIFFQLPLKSQRHGVGRCTFERGKPRCADSHPDYEEFRMLCFVNNIQVKGPHDLELRPLTYEEREKIEPLFFRKSKPNFDFEDIAKALAGKKNYAWIHDKEERAYKFNYRMTQGVPGCPTIAQLKSIFGDDWKTGIAETYTLIQKKNGSKSLQEMVDDVWNVLYSFSSVEKLKEFAHHKLQLDEESAEKFAKIKLSHSFAALSLKAIRKFLPFLRKGMYYTHASFFANIPTIVGKEIWNKEQNRKYIMENVGELVFNYQPKHREVQGTIEMLIKDFLANNFELPAGATDKLYHPSMIETYPNAQRNEFGILQLGSPRTNAIRNPMAMRSLHILRRVVNQLLKESIIDENTEVHVEYARELNDANKRRAIADRQKEQDKQHKKYGDEIRKLYKEETGKDIEPTQTDVLKFQLWEEQNHHCLYTGEQIGITDFIGSNPKFDIEHTIPQSVGGDSTQMNLTLCDNRFNREVKKAKLPTELANHEEILTRIEPWKNKYEQLVKERDKQRTFAGMDKAVKDIRIQKRHKLQMEIDYWRGKYERFTMTEVPEGFSRRQGTGIGLISRYAGLYLKSLFHQADSRNKSNVYVVKGVATAEFRKMWGLQSEYEKKCRDNHSHHCMDAITIACIGKREYDLMAEYYRMEETFKQGRGSKPKFSKPWATFTEDVLNIYKNLLVVHDTPNNMPKHTKKYVQTSIGKVLAQGDTARGSLHLDTYYGAIERDGEIRYVVRRPLSSFTKPEELENIVDETVKRTIKEAIADKNFKQAIAEPIYMNEEKGILIKKVRCFAKSVKQPINIRQHRDLSKKEYKQQYHVMNENNYLLAIYEGLVKNKVVREFEIVSYIEAAKYYKRSQDRNIFSSIVPTHSTKYGLPLKTKLLMGQLVLMFEENPDEIQVDNTKDLVKRLYKVVGIEKDGRIKFKYHQEARKEGLPIFSTPYKNNDDYAPIFRQSINNINILVDGIDFTIDILGKVTLKE

SEQ ID NO: 379 - protein, 1088 aa, Bacillus smithii
MNYKMGLDIGIASVGWAVINLDLKRIEDLGVRIFDKAEHPQNGESLALPRRIARSARRRLRRRKHRLERIRRLLVSENVLTKEEMNLLFKQKKQIDVWQLRVDALERKLNNDELARVLLHLAKRRGFKSNRKSERNSKESSEFLKNIEENQSILAQYRSVGEMIVKDSKFAYHKRNKLDSYSNMIARDDLEREIKLIFEKQREFNNPVCTERLEEKYLNIWSSQRPFASKEDIEKKVGFCTFEPKEKRAPKATYTFQSFIVWEHINKLRLVSPDETRALTEIERNLLYKQAFSKNKMTYYDIRKLLNLSDDIHFKGLLYDPKSSLKQIENIRFLELDSYHKIRKCIENVYGKDGIRMFNETDIDTFGYALTIFKDDEDIVAYLQNEYITKNGKRVSNLANKVYDKSLIDELLNLSFSKFAHLSMKAIRNILPYMEQGEIYSKACELAGYNFTGPKKKEKALLLPVIPNIANPVVMRALTQSRKVVNAIIKKYGSPVSIHIELARDLSHSFDERKKIQKDQTENRKKNETAIKQLIEYELTKNPTGLDIVKFKLWSEQQGRCMYSLKPIELERLLEPGYVEVDHILPYSRSLDDSYANKVLVLTKENREKGNHTPVEYLGLGSERWKKFEKFVLANKQFSKKKKQNLLRLRYEETEEKEFKERNLNDTRYISKFFANFIKEHLKFADGDGGQKVYTINGKITAHLRSRWDFNKNREESDLHHAVDAVIVACATQGMIKKITEFYKAREQNKESAKKKEPIFPQPWPHFADELKARLSKFPQESIEAFALGNYDRKKLESLRPVFVSRMPKRSVTGAAHQETLRRCVGIDEQSGKIQTAVKTKLSDIKLDKDGHFPMYQKESDPRTYEAIRQRLLEHNNDPKKAFQEPLYKPKKNGEPGPVIRTVKIIDTKNKVVHLDGSKTVAYNSNIVRTDVFEKDGKYYCVPVYTMDIMKGTLPNKAIEANKPYSEWKEMTEEYTFQFSLFPNDLVRIVLPREKTIKTSTNEEIIIKDIFAYYKTIDSATGGLELISHDRNFSLRGVGSKTLKRFEKYQVDVLGNIHKVKGEKRVGLAAPTNQKKGKTVDSLQSVSD

SEQ ID NO: 380 - protein, 1035 aa, Puniceispirillum marinum
MRRLGLDLGTNSIGWCLLDLGDDGEPVSIFRTGARIFSDGRDPKSLGSLKATRREARLTRRRRDRFIQRQKNLINALVKYGLMPADEIQRQALAYKDPYPIRKKALDEAIDPYEMGRAIFHINQRRGFKSNRKSADNEAGVVKQSIADLEMKLGEAGARTIGEFLADRQATNDTVRARRLSGTNALYEFYPDRYMLEQEFDTLWAKQAAFNPSLYIEAARERLKEIVFFQRKLKPQEVGRCIFLSDEDRISKALPSFQRFRIYQELSNLAWIDHDGVAHRITASLALRDHLFDELEHKKKLTFKAMRAILRKQGVVDYPVGFNLESDNRDHLIGNLTSCIMRDAKKMIGSAWDRLDEEEQDSFILMLQDDQKGDDEVRSILTQQYGLSDDVAEDCLDVRLPDGHGSLSKKAIDRILPVLRDQGLIYYDAVKEAGLGEANLYDPYAALSDKLDYYGKALAGHVMGASGKFEDSDEKRYGTISNPTVHIALNQVRAVVNELIRLHGKPDEVVIEIGRDLPMGADGKRELERFQKEGRAKNERARDELKKLGHIDSRESRQKFQLWEQLAKEPVDRCCPFTGKMMSISDLFSDKVEIEHLLPFSLTLDDSMANKTVCFRQANRDKGNRAPFDAFGNSPAGYDWQEILGRSQNLPYAKRWRFLPDAMKRFEADGGFLERQLNDTRYISRYTTEYISTIIPKNKIWVVTGRLTSLLRGFWGLNSILRGHNTDDGTPAKKSRDDHRHHAIDAIVVGMTSRGLLQKVSKAARRSEDLDLTRLFEGRIDPWDGFRDEVKKHIDAIIVSHRPRKKSQGALHNDTAYGIVEHAENGASTVVHRVPITSLGKQSDIEKVRDPLIKSALLNETAGLSGKSFENAVQKWCADNSIKSLRIVETVSIIPITDKEGVAYKGYKGDGNAYMDIYQDPTSSKWKGEIVSRFDANQKGFIPSWQSQFPTARLIMRLRINDLLKLQDGEIEEIYRVQRLSGSKILMAPHTEANVDARDRDKNDTFKLTSKSPGKLQSASARKVHISPTGLIREG

SEQ ID NO: 381 - protein, 1153 aa, Barnesiella intestinihominis
MKNILGLDLGLSSIGWSVIRENSEEQELVAMGSRVVSLTAAELSSFTQGNGVSINSQRTQKRTQRKGYDRYQLRRTLLRNKLDTLGMLPDDSLSYLPKLQLWGLRAKAVTQRIELNELGRVLLHLNQKRGYKSIKSDFSGDKKITDYVKTVKTRYDELKEMRLTIGELFFRRLTENAFFRCKEQVYPRQAYVEEFDCIMNCQRKFYPDILTDETIRCIRDEIIYYQRPLKSCKYLVSRCEFEKRFYLNAAGKKTEAGPKVSPRTSPLFQVCRLWESINNIVVKDRRNEIVFISAEQRAALFDFLNTHEKLKGSDLLKLLGLSKTYGYRLGEQFKTGIQGNKTRVEIERALGNYPDKKRLLQFNLQEESSSMVNTETGEIIPMISLSFEQEPLYRLWHVLYSIDDREQLQSVLRQKFGIDDDEVLERLSAIDLVKAGFGNKSSKAIRRILPFLQLGMNYAEACEAAGYNHSNNYTKAENEARALLDRLPAIKKNELRQPVVEKILNQMVNVVNALMEKYGRFDEIRVELARELKQSKEERSNTYKSINKNQRENEQIAKRIVEYGVPTRSRIQKYKMWEESKHCCIYCGQPVDVGDFLRGFDVEVEHIIPKSLYFDDSFANKVCSCRSCNKEKNNRTAYDYMKSKGEKALSDYVERVNTMYTNNQISKTKWQNLLTPVDKISIDFIDRQLRESQYIARKAKEILTSICYNVTATSGSVTSFLRHVWGWDTVLHDLNFDRYKKVGLTEVIEVNHRGSVIRREQIKDWSKRFDHRHHAIDALTIACTKQAYIQRLNNLRAEEGPDFNKMSLERYIQSQPHFSVAQVREAVDRILVSFRAGKRAVTPGKRYIRKNRKRISVQSVLIPRGALSEESVYGVIHVWEKDEQGHVIQKQRAVMKYPITSINREMLDKEKVVDKRIHRILSGRLAQYNDNPKEAFAKPVYIDKECRIPIRTVRCFAKPAINTLVPLKKDDKGNPVAWVNPGNNHHVAIYRDEDGKYKERTVTFWEAVDRCRVGIPAIVTQPDTIWDNILQRNDISENVLESLPDVKWQFVLSLQQNEMFILGMNEEDYRYAMDQQDYALLNKYLYRVQKLSKSDYSFRYHTETSVEDKYDGKPNLKLSMQMGKLKRVSIKSLLGLNPHKVHISVLGEIKEIS

SEQ ID NO: 382 - protein, 1062 aa, Ralstonia syzygii
MAEKQHRWGLDIGTNSIGWAVIALIEGRPAGLVATGSRIFSDGRNPKDGSSLAVERRGPRQMRRRRDRYLRRRDRFMQALINVGLMPGDAAARKALVTENPYVLRQRGLDQALTLPEFGRALFHLNQRRGFQSNRKTDRATAKESGKVKNAIAAFRAGMGNARTVGEALARRLEDGRPVRARMVGQGKDEHYELYIAREWIAQEFDALWASQQRFHAEVLADAARDRLRAILLFQRKLLPVPVGKCFLEPNQPRVAAALPSAQRFRLMQELNHLRVMTLADKRERPLSFQERNDLLAQLVARPKCGFDMLRKIVFGANKEAYRFTIESERRKELKGCDTAAKLAKVNALGTRWQALSLDEQDRLVCLLLDGENDAVLADALREHYGLTDAQIDTLLGLSFEDGHMRLGRSALLRVLDALESGRDEQGLPLSYDKAVVAAGYPAHTADLENGERDALPYYGELLWRYTQDAPTAKNDAERKFGKIANPTVHIGLNQLRKLVNALIQRYGKPAQIVVELARNLKAGLEEKERIKKQQTANLERNERIRQKLQDAGVPDNRENRLRMRLFEELGQGNGLGTPCIYSGRQISLQRLFSNDVQVDHILPFSKTLDDSFANKVLAQHDANRYKGNRGPFEAFGANRDGYAWDDIRARAAVLPRNKRNRFAETAMQDWLHNETDFLARQLTDTAYLSRVARQYLTAICSKDDVYVSPGRLTAMLRAKWGLNRVLDGVMEEQGRPAVKNRDDHRHHAIDAVVIGATDRAMLQQVATLAARAREQDAERLIGDMPTPWPNFLEDVRAAVARCVVSHKPDHGPEGGLHNDTAYGIVAGPFEDGRYRVRHRVSLFDLKPGDLSNVRCDAPLQAELEPIFEQDDARAREVALTALAERYRQRKVWLEELMSVLPIRPRGEDGKTLPDSAPYKAYKGDSNYCYELFINERGRWDGELISTFRANQAAYRRFRNDPARFRRYTAGGRPLLMRLCINDYIAVGTAAERTIFRVVKMSENKITLAEHFEGGTLKQRDADKDDPFKYLTKSPGALRDLGARRIFVDLIGRVLDPGIKGD

SEQ ID NO: 383 - protein, 1059 aa, Wolinella succinogenes
MIERILGVDLGISSLGWAIVEYDKDDEAANRIIDCGVRLFTAAETPKKKESPNKARREARGIRRVLNRRRVRMNMIKKLFLRAGLIQDVDLDGEGGMFYSKANRADVWELRHDGLYRLLKGDELARVLIHIAKHRGYKFIGDDEADEESGKVKKAGVVLRQNFEAAGCRTVGEWLWRERGANGKKRNKHGDYEISIHRDLLVEEVEAIFVAQQEMRSTIATDALKAAYREIAFFVRPMQRIEKMVGHCTYFPEERRAPKSAPTAEKFIAISKFFSTVIIDNEGWEQKIIERKTLEELLDFAVSREKVEFRHLRKFLDLSDNEIFKGLHYKGKPKTAKKREATLFDPNEPTELEFDKVEAEKKAWISLRGAAKLREALGNEFYGRFVALGKHADEATKILTYYKDEGQKRRELTKLPLEAEMVERLVKIGFSDFLKLSLKAIRDILPAMESGARYDEAVLMLGVPHKEKSAILPPLNKTDIDILNPTVIRAFAQFRKVANALVRKYGAFDRVHFELAREINTKGEIEDIKESQRKNEKERKEAADWIAETSFQVPLTRKNILKKRLYIQQDGRCAYTGDVIELERLFDEGYCEIDHILPRSRSADDSFANKVLCLARANQQKTDRTPYEWFGHDAARWNAFETRTSAPSNRVRTGKGKIDRLLKKNFDENSEMAFKDRNLNDTRYMARAIKTYCEQYWVFKNSHTKAPVQVRSGKLTSVLRYQWGLESKDRESHTHHAVDAIIIAFSTQGMVQKLSEYYRFKETHREKERPKLAVPLANFRDAVEEATRIENTETVKEGVEVKRLLISRPPRARVTGQAHEQTAKPYPRIKQVKNKKKWRLAPIDEEKFESFKADRVASANQKNFYETSTIPRVDVYHKKGKFHLVPIYLHEMVLNELPNLSLGTNPEAMDENFFKFSIFKDDLISIQTQGTPKKPAKIIMGYFKNMHGANMVLSSINNSPCEGFTCTPVSMDKKHKDKCKLCPEENRIAGRCLQGFLDYWSQEGLRPPRKEFECDQGVKFALDVKKYQIDPLGYYYEVKQEKRLGTIPQMRSAKKLVKK

SEQ ID NO: 384 - protein, 1269 aa, Mycoplasma gallisepticum
MNNSIKSKPEVTIGLDLGVGSVGWAIVDNETNIIHHLGSRLFSQAKTAEDRRSFRGVRRLIRRRKYKLKRFVNLIWKYNSYFGFKNKEDILNNYQEQQKLHNTVLNLKSEALNAKIDPKALSWILHDYLKNRGHFYEDNRDFNVYPTKELAKYFDKYGYYKGIIDSKEDNDNKLEEELTKYKFSNKHWLEEVKKVLSNQTGLPEKFKEEYESLFSYVRNYSEGPGSINSVSPYGIYHLDEKEGKVVQKYNNIWDKTIGKCNIFPDEYRAPKNSPIAMIFNEINELSTIRSYSIYLTGWFINQEFKKAYLNKLLDLLIKTNGEKPIDARQFKKLREETIAESIGKETLKDVENEEKLEKEDHKWKLKGLKLNTNGKIQYNDLSSLAKFVHKLKQHLKLDFLLEDQYATLDKINFLQSLFVYLGKHLRYSNRVDSANLKEFSDSNKLFERILQKQKDGLFKLFEQTDKDDEKILAQTHSLSTKAMLLAITRMTNLDNDEDNQKNNDKGWNFEAIKNFDQKFIDITKKNNNLSLKQNKRYLDDRFINDAILSPGVKRILREATKVFNAILKQFSEEYDVTKVVIELARELSEEKELENTKNYKKLIKKNGDKISEGLKALGISEDEIKDILKSPTKSYKFLLWLQQDHIDPYSLKEIAFDDIFTKTEKFEIDHIIPYSISFDDSSSNKLLVLAESNQAKSNQTPYEFISSGNAGIKWEDYEAYCRKFKDGDSSLLDSTQRSKKFAKMMKTDTSSKYDIGFLARNLNDTRYATIVFRDALEDYANNHLVEDKPMFKVVCINGSVTSFLRKNFDDSSYAKKDRDKNIHHAVDASIISIFSNETKTLFNQLTQFADYKLFKNTDGSWKKIDPKTGVVTEVTDENWKQIRVRNQVSEIAKVIEKYIQDSNIERKARYSRKIENKTNISLFNDTVYSAKKVGYEDQIKRKNLKTLDIHESAKENKNSKVKRQFVYRKLVNVSLLNNDKLADLFAEKEDILMYRANPWVINLAEQIFNEYTENKKIKSQNVFEKYMLDLTKEFPEKFSEFLVKSMLRNKTAIIYDDKKNIVHRIKRLKMLSSELKENKLSNVIIRSKNQSGTKLSYQDTINSLALMIMRSIDPTAKKQYIRVPLNTLNLHLGDHDFDLHNMDAYLKKPKFVKYLKANEIGDEYKPWRVLTSGTLLIHKKDKKLMYISSFQNLNDVIEIKNLIETEYKENDDSDSKKKKKANRFLMTLSTILNDYILLDAKDNFDILGLSKNRIDEILNSKLGLDKIVK

SEQ ID NO: 385 - protein, 1138 aa, Acidothermus cellulolyticus
MGGSEVGTVPVTWRLGVDVGERSIGLAAVSYEEDKPKEILAAVSWIHDGGVGDERSGASRLALRGMARRARRLRRFRRARLRDLDMLLSELGWTPLPDKNVSPVDAWLARKRLAEEYVVDETERRRLLGYAVSHMARHRGWRNPWTTIKDLKNLPQPSDSWERTRESLEARYSVSLEPGTVGQWAGYLLQRAPGIRLNPTQQSAGRRAELSNATAFETRLRQEDVLWELRCIADVQGLPEDVVSNVIDAVFCQKRPSVPAERIGRDPLDPSQLRASRACLEFQEYRIVAAVANLRIRDGSGSRPLSLEERNAVIEALLAQTERSLTWSDIALEILKLPNESDLTSVPEEDGPSSLAYSQFAPFDETSARIAEFIAKNRRKIPTFAQWWQEQDRTSRSDLVAALADNSIAGEEEQELLVHLPDAELEALEGLALPSGRVAYSRLTLSGLTRVMRDDGVDVHNARKTCFGVDDNWRPPLPALHEATGHPVVDRNLAILRKFLSSATMRWGPPQSIVVELARGASESRERQAEEEAARRAHRKANDRIRAELRASGLSDPSPADLVRARLLELYDCHCMYCGAPISWENSELDHIVPRTDGGSNRHENLAITCGACNKEKGRRPFASWAETSNRVQLRDVIDRVQKLKYSGNMYWTRDEFSRYKKSVVARLKRRTSDPEVIQSIESTGYAAVALRDRLLSYGEKNGVAQVAVFRGGVTAEARRWLDISIERLFSRVAIFAQSTSTKRLDRRHHAVDAVVLTTLTPGVAKTLADARSRRVSAEFWRRPSDVNRHSTEEPQSPAYRQWKESCSGLGDLLISTAARDSIAVAAPLRLRPTGALHEETLRAFSEHTVGAAWKGAELRRIVEPEVYAAFLALTDPGGRFLKVSPSEDVLPADENRHIVLSDRVLGPRDRVKLFPDDRGSIRVRGGAAYIASFHHARVFRWGSSHSPSFALLRVSLADLAVAGLLRDGVDVFTAELPPWTPAWRYASIALVKAVESGDAKQVGWLVPGDELDFGPEGVTTAAGDLSMFLKYFPERHWVVTGFEDDKRINLKPAFLSAEQAEVLRTERSDRPDTLTEAGEILAQFFPRCWRATVAKVLCHPGLTVIRRTALGQPRWRRGHLPYSWRPWSADPWSGGTP

SEQ ID NO: 386 - protein, 1265 aa, Mycoplasma ovipneumoniae
MHNKKNITIGFDLGIASIGWAIIDSTTSKILDWGTRTFEERKTANERRAFRSTRRNIRRKAYRNQRFINLILKYKDLFELKNISDIQRANKKDTENYEKIISFFTEIYKKCAAKHSNILEVKVKALDSKIEKLDLIWILHDYLENRGFFYDLEEENVADKYEGIEHPSILLYDFFKKNGFFKSNSSIPKDLGGYSFSNLQWVNEIKKLFEVQEINPEFSEKFLNLFTSVRDYAKGPGSEHSASEYGIFQKDEKGKVFKKYDNIWDKTIGKCSFFVEENRSPVNYPSYEIFNLLNQLINLSTDLKTTNKKIWQLSSNDRNELLDELLKVKEKAKIISISLKKNEIKKIILKDFGFEKSDIDDQDTIEGRKIIKEEPTTKLEVTKHLLATIYSHSSDSNWININNILEFLPYLDAICIILDREKSRGQDEVLKKLTEKNIFEVLKIDREKQLDFVKSIFSNTKFNFKKIGNFSLKAIREFLPKMFEQNKNSEYLKWKDEEIRRKWEEQKSKLGKTDKKTKYLNPRIFQDEIISPGTKNTFEQAVLVLNQIIKKYSKENIIDAIIIESPREKNDKKTIEEIKKRNKKGKGKTLEKLFQILNLENKGYKLSDLETKPAKLLDRLRFYHQQDGIDLYTLDKINIDQLINGSQKYEIEHIIPYSMSYDNSQANKILTEKAENLKKGKLIASEYIKRNGDEFYNKYYEKAKELFINKYKKNKKLDSYVDLDEDSAKNRFRFLTLQDYDEFQVEFLARNLNDTRYSTKLFYHALVEHFENNEFFTYIDENSSKHKVKISTIKGHVTKYFRAKPVQKNNGPNENLNNNKPEKIEKNRENNEHHAVDAAIVAIIGNKNPQIANLLTLADNKTDKKFLLHDENYKENIETGELVKIPKFEVDKLAKVEDLKKIIQEKYEEAKKHTAIKFSRKTRTILNGGLSDETLYGFKYDEKEDKYFKIIKKKLVTSKNEELKKYFENPFGKKADGKSEYTVLMAQSHLSEFNKLKEIFEKYNGFSNKTGNAFVEYMNDLALKEPTLKAEIESAKSVEKLLYYNFKPSDQFTYHDNINNKSFKRFYKNIRIIEYKSIPIKFKILSKHDGGKSFKDTLFSLYSLVYKVYENGKESYKSIPVTSQMRNFGIDEFDFLDENLYNKEKLDIYKSDFAKPIPVNCKPVFVLKKGSILKKKSLDIDDFKETKETEEGNYYFISTISKRFNRDTAYGLKPLKLSVVKPVAEPSTNPIFKEYIPIHLDELGNEYPVKIKEHTDDEKLMCTIK

SEQ ID NO: 387 - RNA, 20 nt, Artificial Sequence
  Synthetic oligonucleotide: TRBC-40
cacccagaucgucagcgccg

SEQ ID NO: 388 - RNA, 20 nt, Artificial Sequence
  Synthetic oligonucleotide: TRBC-52
caaacacagcgaccucgggu

SEQ ID NO: 389 - RNA, 20 nt, Artificial Sequence
  Synthetic oligonucleotide: TRBC-25
ugacgaguggacccaggaua

SEQ ID NO: 390 - RNA, 20 nt, Artificial Sequence
  Synthetic oligonucleotide: TRBC-35
ggcucucggagaaugacgag

SEQ ID NO: 391 - RNA, 20 nt, Artificial Sequence
  Synthetic oligonucleotide: TRBC-50
ggccucggcgcugacgaucu

SEQ ID NO: 392 - RNA, 20 nt, Artificial Sequence
  Synthetic oligonucleotide: TRBC-39
gaaaaacguguucccacccg

SEQ ID NO: 393 - RNA, 20 nt, Artificial Sequence
  Synthetic oligonucleotide: TRBC-49
augacgaguggacccaggau

SEQ ID NO: 394 - RNA, 20 nt, Artificial Sequence
  Synthetic oligonucleotide: TRBC-51
aguccaguucuacgggcucu

SEQ ID NO: 395 - RNA, 20 nt, Artificial Sequence
  Synthetic oligonucleotide: TRBC-26
cgcugucaaguccaguucua

SEQ ID NO: 396 - RNA, 20 nt, Artificial Sequence
  Synthetic oligonucleotide: TRBC-47
aucgucagcgccgaggccug

SEQ ID NO: 397 - RNA, 20 nt, Artificial Sequence
  Synthetic oligonucleotide: TRBC-45
ucaaacacagcgaccucggg

SEQ ID NO: 398 - RNA, 20 nt, Artificial Sequence
  Synthetic oligonucleotide: TRBC-34
cguagaacuggacuugacag

SEQ ID NO: 399 - RNA, 20 nt, Artificial Sequence
  Synthetic oligonucleotide: TRBC-227
aggccucggcgcugacgauc

SEQ ID NO: 400 - RNA, 20 nt, Artificial Sequence
  Synthetic oligonucleotide: TRBC-41
ugacagcggaagugguugcg

SEQ ID NO: 401 - RNA, 20 nt, Artificial Sequence
  Synthetic oligonucleotide: TRBC-30
uugacagcggaagugguugc

SEQ ID NO: 402 - RNA, 20 nt, Artificial Sequence
  Synthetic oligonucleotide: TRBC-206
ucuccgagagcccguagaac

SEQ ID NO: 403 - RNA, 20 nt, Artificial Sequence
  Synthetic oligonucleotide: TRBC-32
cgggugggaacacguuuuuc

SEQ ID NO: 404 - RNA, 20 nt, Artificial Sequence
  Synthetic oligonucleotide: TRBC-276
gacagguuuggcccuauccu

SEQ ID NO: 405 - RNA, 20 nt, Artificial Sequence
  Synthetic oligonucleotide: TRBC-274
gaucgucagcgccgaggccu

SEQ ID NO: 406 - RNA, 20 nt, Artificial Sequence
  Synthetic oligonucleotide: TRBC-230
ggcucaaacacagcgaccuc

SEQ ID NO: 407 - RNA, 20 nt, Artificial Sequence
  Synthetic oligonucleotide: TRBC-235
ugagggucucggccaccuuc

SEQ ID NO: 408 - RNA, 20 nt, Artificial Sequence
  Synthetic oligonucleotide: TRBC-38
aggcuucuaccccgaccacg

SEQ ID NO: 409 - RNA, 20 nt, Artificial Sequence
  Synthetic oligonucleotide: TRBC-223
ccgaccacguggagcugagc

SEQ ID NO: 410 - RNA, 20 nt, Artificial Sequence
  Synthetic oligonucleotide: TRBC-221
ugacagguuuggcccuaucc

SEQ ID NO: 411 - RNA, 20 nt, Artificial Sequence
  Synthetic oligonucleotide: TRBC-48
cuugacagcggaagugguug

SEQ ID NO: 412 - RNA, 20 nt, Artificial Sequence
  Synthetic oligonucleotide: TRBC-216
agaucgucagcgccgaggcc

SEQ ID NO: 413 - RNA, 20 nt, Artificial Sequence
  Synthetic oligonucleotide: TRBC-210
gcgcugacgaucugggugac

SEQ ID NO: 414 - RNA, 20 nt, Artificial Sequence
  Synthetic oligonucleotide: TRBC-268
ugagggcgggcugcuccuug

SEQ ID NO: 415 - RNA, 20 nt, Artificial Sequence
  Synthetic oligonucleotide: TRBC-193
guugcggggguucugccaga

SEQ ID NO: 416 - RNA, 20 nt, Artificial Sequence
  Synthetic oligonucleotide: TRBC-246
agcucagcuccacguggucg

SEQ ID NO: 417 - RNA, 20 nt, Artificial Sequence
  Synthetic oligonucleotide: TRBC-228
gcggcugcucaggcaguauc

SEQ ID NO: 418 - RNA, 20 nt, Artificial Sequence
  Synthetic oligonucleotide: TRBC-43
gcggggguucugccagaagg

SEQ ID NO: 419 - RNA, 20 nt, Artificial Sequence
  Synthetic oligonucleotide: TRBC-272
uggcucaaacacagcgaccu

SEQ ID NO: 420 - RNA, 20 nt, Artificial Sequence
  Synthetic oligonucleotide: TRBC-33
acuggacuugacagcggaag

SEQ ID NO: 421 - RNA, 20 nt, Artificial Sequence
  Synthetic oligonucleotide: TRBC-44
gacagcggaagugguugcgg

SEQ ID NO: 422 - RNA, 20 nt, Artificial Sequence
  Synthetic oligonucleotide: TRBC-211
gcugucaaguccaguucuac

SEQ ID NO: 423 - RNA, 20 nt, Artificial Sequence
  Synthetic oligonucleotide: TRBC-253
guaucuggagucauugaggg

SEQ ID NO: 424 - RNA, 17 nt, Artificial Sequence
  Synthetic oligonucleotide: TRBC-18
cucggcgcugacgaucu

SEQ ID NO: 425 - RNA, 17 nt, Artificial Sequence
  Synthetic oligonucleotide: TRBC-6
ccucggcgcugacgauc

SEQ ID NO: 426 - RNA, 17 nt, Artificial Sequence
  Synthetic oligonucleotide: TRBC-85
ccgagagcccguagaac

SEQ ID NO: 427 - RNA, 17 nt, Artificial Sequence
  Synthetic oligonucleotide: TRBC-129
ccagaucgucagcgccg

SEQ ID NO: 428 - RNA, 17 nt, Artificial Sequence
  Synthetic oligonucleotide: TRBC-93
gaaugacgaguggaccc

SEQ ID NO: 429 - RNA, 22 nt, Artificial Sequence
  Synthetic oligonucleotide: TRBC-415
gggugacagguuuggcccuauc

SEQ ID NO: 430 - RNA, 21 nt, Artificial Sequence
  Synthetic oligonucleotide: TRBC-414
ggugacagguuuggcccuauc

SEQ ID NO: 431 - RNA, 20 nt, Artificial Sequence
  Synthetic oligonucleotide: TRBC-310
gugacagguuuggcccuauc

SEQ ID NO: 432 - RNA, 18 nt, Artificial Sequence
  Synthetic oligonucleotide: TRBC-308
gacagguuuggcccuauc

SEQ ID NO: 433 - RNA, 22 nt, Artificial Sequence
  Synthetic oligonucleotide: TRBC-401
gauacugccugagcagccgccu

SEQ ID NO: 434 - RNA, 24 nt, Artificial Sequence
  Synthetic oligonucleotide: TRBC-468
gaccacguggagcugagcuggugg

SEQ ID NO: 435 - RNA, 18 nt, Artificial Sequence
  Synthetic oligonucleotide: TRBC-462
guggagcugagcuggugg

SEQ ID NO: 436 - RNA, 24 nt, Artificial Sequence
  Synthetic oligonucleotide: TRBC-424
gggcgggcugcuccuugaggggcu

SEQ ID NO: 437 - RNA, 23 nt, Artificial Sequence
  Synthetic oligonucleotide: TRBC-423
ggcgggcugcuccuugaggggcu

SEQ ID NO: 438 - RNA, 22 nt, Artificial Sequence
  Synthetic oligonucleotide: TRBC-422
gcgggcugcuccuugaggggcu

SEQ ID NO: 439 - RNA, 20 nt, Artificial Sequence
  Synthetic oligonucleotide: TRBC-420
gggcugcuccuugaggggcu

SEQ ID NO: 440 - RNA, 19 nt, Artificial Sequence
  Synthetic oligonucleotide: TRBC-419
ggcugcuccuugaggggcu

SEQ ID NO: 441 - RNA, 18 nt, Artificial Sequence
  Synthetic oligonucleotide: TRBC-418
gcugcuccuugaggggcu

SEQ ID NO: 442 - RNA, 24 nt, Artificial Sequence
  Synthetic oligonucleotide: TRBC-445
ggugaaugggaaggaggugcacag

SEQ ID NO: 443 - RNA, 23 nt, Artificial Sequence
  Synthetic oligonucleotide: TRBC-444
gugaaugggaaggaggugcacag

SEQ ID NO: 444 - RNA, 21 nt, Artificial Sequence
  Synthetic oligonucleotide: TRBC-442
gaaugggaaggaggugcacag

SEQ ID NO: 445 - DNA, 22 bp, Artificial Sequence
  Synthetic oligonucleotide: GWED133
acatcacctggaatgttaggca

SEQ ID NO: 446 - DNA, 22 bp, Artificial Sequence
  Synthetic oligonucleotide: GWED134
gtgaaccttgatcatcccacct

SEQ ID NO: 447 - DNA, 20 bp, Artificial Sequence
  Synthetic oligonucleotide: GWED137
ccccaaaacaatgagggcct

SEQ ID NO: 448 - DNA, 20 bp, Artificial Sequence
  Synthetic oligonucleotide: GWED138
agcacctcctttcttctgcc

SEQ ID NO: 449 - RNA, 20 nt, Artificial Sequence
  Synthetic oligonucleotide: TRAC-10
ucucucagcugguacacggc

SEQ ID NO: 450 - RNA, 20 nt, Artificial Sequence
  Synthetic oligonucleotide: TRAC-110
uggauuuagagucucucagc

SEQ ID NO: 451 - RNA, 20 nt, Artificial Sequence
  Synthetic oligonucleotide: TRAC-116
acacggcagggucaggguuc

SEQ ID NO: 452 - RNA, 20 nt, Artificial Sequence
  Synthetic oligonucleotide: TRAC-16
gagaaucaaaaucggugaau

SEQ ID NO: 453 - RNA, 20 nt, Artificial Sequence
  Synthetic oligonucleotide: TRAC-4
gcugguacacggcaggguca

SEQ ID NO: 454 - RNA, 17 nt, Artificial Sequence
  Synthetic oligonucleotide: TRAC-49
cucagcugguacacggc

SEQ ID NO: 455 - RNA, 17 nt, Artificial Sequence
  Synthetic oligonucleotide: TRAC-2
ugguacacggcaggguc

SEQ ID NO: 456 - RNA, 17 nt, Artificial Sequence
  Synthetic oligonucleotide: TRAC-30
gcuagacaugaggucua

SEQ ID NO: 457 - RNA, 17 nt, Artificial Sequence
  Synthetic oligonucleotide: TRAC-43
gucagauuuguugcucc

SEQ ID NO: 458 - RNA, 17 nt, Artificial Sequence
  Synthetic oligonucleotide: TRAC-23
ucagcugguacacggca

SEQ ID NO: 459 - RNA, 17 nt, Artificial Sequence
  Synthetic oligonucleotide: TRAC-34
gcagacagacuugucac

SEQ ID NO: 460 - RNA, 17 nt, Artificial Sequence
  Synthetic oligonucleotide: TRAC-25
gguacacggcaggguca

SEQ ID NO: 461 - RNA, 20 nt, Artificial Sequence
  Synthetic oligonucleotide: TRAC-128
cuucaagagcaacagugcug

SEQ ID NO: 462 - RNA, 20 nt, Artificial Sequence
  Synthetic oligonucleotide: TRAC-105
agagcaacagugcuguggcc

SEQ ID NO: 463 - RNA, 20 nt, Artificial Sequence
  Synthetic oligonucleotide: TRAC-106
aaagucagauuuguugcucc

SEQ ID NO: 464 - RNA, 20 nt, Artificial Sequence
  Synthetic oligonucleotide: TRAC-123
acaaaacugugcuagacaug

SEQ ID NO: 465 - RNA, 17 nt, Artificial Sequence
  Synthetic oligonucleotide: TRAC-64
aaacugugcuagacaug

SEQ ID NO: 466 - RNA, 20 nt, Artificial Sequence
  Synthetic oligonucleotide: TRAC-97
ugugcuagacaugaggucua

SEQ ID NO: 467 - RNA, 22 nt, Artificial Sequence
  Synthetic oligonucleotide: TRAC-148
ggcuggggaagaaggugucuuc

SEQ ID NO: 468 - RNA, 21 nt, Artificial Sequence
  Synthetic oligonucleotide: TRAC-147
gcuggggaagaaggugucuuc

SEQ ID NO: 469 - RNA, 18 nt, Artificial Sequence
  Synthetic oligonucleotide: TRAC-234
ggggaagaaggugucuuc

SEQ ID NO: 470 - RNA, 22 nt, Artificial Sequence
  Synthetic oligonucleotide: TRAC-167
guuuugucugugauauacacau

SEQ ID NO: 471 - RNA, 24 nt, Artificial Sequence
  Synthetic oligonucleotide: TRAC-177
ggcagacagacuugucacuggauu

SEQ ID NO: 472 - RNA, 23 nt, Artificial Sequence
  Synthetic oligonucleotide: TRAC-176
gcagacagacuugucacuggauu

SEQ ID NO: 473 - RNA, 20 nt, Artificial Sequence
  Synthetic oligonucleotide: TRAC-257
gacagacuugucacuggauu

SEQ ID NO: 474 - RNA, 24 nt, Artificial Sequence
  Synthetic oligonucleotide: TRAC-233
gugaauaggcagacagacuuguca

SEQ ID NO: 475 - RNA, 22 nt, Artificial Sequence
  Synthetic oligonucleotide: TRAC-231
gaauaggcagacagacuuguca

SEQ ID NO: 476 - RNA, 22 nt, Artificial Sequence
  Synthetic oligonucleotide: TRAC-163
gagucucucagcugguacacgg

SEQ ID NO: 477 - RNA, 20 nt, Artificial Sequence
  Synthetic oligonucleotide: TRAC-241
gucucucagcugguacacgg

SEQ ID NO: 478 - RNA, 22 nt, Artificial Sequence
  Synthetic oligonucleotide: TRAC-179
gguacacggcagggucaggguu

SEQ ID NO: 479 - DNA, 20 bp, Artificial Sequence
  Synthetic oligonucleotide: GWED141
gtttgctttgctgggccttt

SEQ ID NO: 480 - DNA, 20 bp, Artificial Sequence
  Synthetic oligonucleotide: GWED142
cctctcctgccaccttctct

SEQ ID NO: 481 - RNA, 23 nt, Artificial Sequence
  Synthetic oligonucleotide: PDCD1-3202
ggugcuacaacugggcuggcggc

SEQ ID NO: 482 - RNA, 22 nt, Artificial Sequence
  Synthetic oligonucleotide: PDCD1-3201
gugcuacaacugggcuggcggc

SEQ ID NO: 483 - RNA, 20 nt, Artificial Sequence
  Synthetic oligonucleotide: PDCD1-531
gcuacaacugggcuggcggc

SEQ ID NO: 484 - RNA, 21 nt, Artificial Sequence
  Synthetic oligonucleotide: PDCD1-3190
gacgacuggccagggcgccug

SEQ ID NO: 485 - RNA, 18 nt, Artificial Sequence
  Synthetic oligonucleotide: PDCD1-3188
gacuggccagggcgccug

SEQ ID NO: 486 - RNA, 21 nt, Artificial Sequence
  Synthetic oligonucleotide: PDCD1-3216
gcaugccuggagcagccccac

SEQ ID NO: 487 - RNA, 22 nt, Artificial Sequence
  Synthetic oligonucleotide: PDCD1-3195
gggggguuccagggccugucug

SEQ ID NO: 488 - RNA, 21 nt, Artificial Sequence
  Synthetic oligonucleotide: PDCD1-3194
ggggguuccagggccugucug

SEQ ID NO: 489 - RNA, 20 nt, Artificial Sequence
  Synthetic oligonucleotide: PDCD1-94
gggguuccagggccugucug

SEQ ID NO: 490 - RNA, 20 nt, Artificial Sequence
  Synthetic oligonucleotide: PDCD1-557
gagagccugcgggcagagcu

SEQ ID NO: 491 - RNA, 18 nt, Artificial Sequence
  Synthetic oligonucleotide: PDCD1-3234
gagccugcgggcagagcu

SEQ ID NO: 492 - RNA, 23 nt, Artificial Sequence
  Synthetic oligonucleotide: PDCD1-3196
ggggggguuccagggccugucug

SEQ ID NO: 493 - RNA, 21 nt, Artificial Sequence
  Synthetic oligonucleotide: PDCD1-3222
gcagggcuggggagaaggugg

SEQ ID NO: 494 - RNA, 18 nt, Artificial Sequence
  Synthetic oligonucleotide: PDCD1-3220
gggcuggggagaaggugg

SEQ ID NO: 495 - RNA, 23 nt, Artificial Sequence
  Synthetic oligonucleotide: PDCD1-3224
gagcagggcuggggagaaggugg

SEQ ID NO: 496 - RNA, 22 nt, Artificial Sequence
  Synthetic oligonucleotide: PDCD1-3773
ggccgcccacgacaccaaccac

SEQ ID NO: 497 - RNA, 21 nt, Artificial Sequence
  Synthetic oligonucleotide: PDCD1-3772
gccgcccacgacaccaaccac

SEQ ID NO: 498 - RNA, 18 nt, Artificial Sequence
  Synthetic oligonucleotide: PDCD1-3770
gcccacgacaccaaccac

SEQ ID NO: 499 - RNA, 22 nt, Artificial Sequence
  Synthetic oligonucleotide: PDCD1-3785
gguuuggaacuggccggcuggc

SEQ ID NO: 500 - RNA, 21 nt, Artificial Sequence
  Synthetic oligonucleotide: PDCD1-3784
guuuggaacuggccggcuggc

SEQ ID NO: 501 - RNA, 21 nt, Artificial Sequence
  Synthetic oligonucleotide: PDCD1-3856
gggcagccuggugcugcuagu

SEQ ID NO: 502 - RNA, 20 nt, Artificial Sequence
  Synthetic oligonucleotide: PDCD1-720
ggcagccuggugcugcuagu

SEQ ID NO: 503 - RNA, 19 nt, Artificial Sequence
  Synthetic oligonucleotide: PDCD1-3855
gcagccuggugcugcuagu

SEQ ID NO: 504 - RNA, 20 nt, Artificial Sequence
  Synthetic oligonucleotide: PDCD1-369
ggcuggccugggugaggggc

SEQ ID NO: 505 - RNA, 23 nt, Artificial Sequence
  Synthetic oligonucleotide: PDCD1-3786
ggguuuggaacuggccggcuggc

SEQ ID NO: 506 - RNA, 24 nt, Artificial Sequence
  Synthetic oligonucleotide: PDCD1-3859
gcugggcagccuggugcugcuagu

SEQ ID NO: 507 - RNA, 24 nt, Artificial Sequence
  Synthetic oligonucleotide: PDCD1-3781
ggccggcuggccugggugaggggc

SEQ ID NO: 508 - RNA, 20 nt, Artificial Sequence
  Synthetic oligonucleotide: PDCD1-108
gucugggcggugcuacaacu

SEQ ID NO: 509 - RNA, 20 nt, Artificial Sequence
  Synthetic oligonucleotide: PDCD1-105
ggcgcccuggccagucgucu

SEQ ID NO: 510 - RNA, 20 nt, Artificial Sequence
  Synthetic oligonucleotide: PDCD1-109
gggcggugcuacaacugggc

SEQ ID NO: 511 - RNA, 20 nt, Artificial Sequence
  Synthetic oligonucleotide: PDCD1-114
ggccaggaugguucuuaggu

SEQ ID NO: 512 - RNA, 20 nt, Artificial Sequence
  Synthetic oligonucleotide: PDCD1-117
ggaugguucuuagguaggug

SEQ ID NO: 513 - RNA, 17 nt, Artificial Sequence
  Synthetic oligonucleotide: PDCD1-2694
gaaggcggcacucuggu

SEQ ID NO: 514 - RNA, 17 nt, Artificial Sequence
  Synthetic oligonucleotide: PDCD1-232
gcccuggccagucgucu

SEQ ID NO: 515 - RNA, 17 nt, Artificial Sequence
  Synthetic oligonucleotide: PDCD1-251
gcccagacgacuggcca

SEQ ID NO: 516 - RNA, 17 nt, Artificial Sequence
  Synthetic oligonucleotide: PDCD1-242
gaugguucuuagguagg

SEQ ID NO: 517 - RNA, 17 nt, Artificial Sequence
  Synthetic oligonucleotide: PDCD1-2540
ggcggaggugagcggaa

SEQ ID NO: 518 - RNA, 17 nt, Artificial Sequence
  Synthetic oligonucleotide: PDCD1-2541
ggaagggaaacuguccc

SEQ ID NO: 519 - RNA, 20 nt, Artificial Sequence
  Synthetic oligonucleotide: PDCD1-16
gcgugacuuccacaugagcg

SEQ ID NO: 520 - RNA, 20 nt, Artificial Sequence
  Synthetic oligonucleotide: PDCD1-4
gcccugcucguggugaccga

SEQ ID NO: 521 - RNA, 20 nt, Artificial Sequence
  Synthetic oligonucleotide: PDCD1-52
ggugccgcugucauugcgcc

SEQ ID NO: 522 - RNA, 20 nt, Artificial Sequence
  Synthetic oligonucleotide: PDCD1-42
gcucucuuugaucugcgccu

SEQ ID NO: 523 - RNA, 20 nt, Artificial Sequence
  Synthetic oligonucleotide: PDCD1-77
gaagguggcguuguccccuu

SEQ ID NO: 524 - RNA, 20 nt, Artificial Sequence
  Synthetic oligonucleotide: PDCD1-15
gugucacacaacugcccaac

SEQ ID NO: 525 - RNA, 20 nt, Artificial Sequence
  Synthetic oligonucleotide: PDCD1-71
gcuuguccgucugguugcug

SEQ ID NO: 526 - RNA, 20 nt, Artificial Sequence
  Synthetic oligonucleotide: PDCD1-47
gaucugcgccuugggggcca

SEQ ID NO: 527 - RNA, 20 nt, Artificial Sequence
  Synthetic oligonucleotide: PDCD1-53
gggcccugaccacgcucaug

SEQ ID NO: 528 - RNA, 20 nt, Artificial Sequence
  Synthetic oligonucleotide: PDCD1-57
gcaguugugugacacggaag

SEQ ID NO: 529 - RNA, 20 nt, Artificial Sequence
  Synthetic oligonucleotide: PDCD1-21
gacagcggcaccuaccucug

SEQ ID NO: 530 - RNA, 17 nt, Artificial Sequence
  Synthetic oligonucleotide: PDCD1-181
guggaagucacgcccgu

SEQ ID NO: 531 - RNA, 17 nt, Artificial Sequence
  Synthetic oligonucleotide: PDCD1-133
gcucguggugaccgaag

SEQ ID NO: 532 - RNA, 17 nt, Artificial Sequence
  Synthetic oligonucleotide: PDCD1-147
gcccggcgcaaugacag

SEQ ID NO: 533 - RNA, 17 nt, Artificial Sequence
  Synthetic oligonucleotide: PDCD1-179
gccgcugucauugcgcc

SEQ ID NO: 534 - RNA, 17 nt, Artificial Sequence
  Synthetic oligonucleotide: PDCD1-149
gcggcaccuaccucugu

SEQ ID NO: 535 - RNA, 17 nt, Artificial Sequence
  Synthetic oligonucleotide: PDCD1-204
gguggcguuguccccuu

SEQ ID NO: 536 - RNA, 17 nt, Artificial Sequence
  Synthetic oligonucleotide: PDCD1-200
gaagcucuccgaugugu

SEQ ID NO: 537 - RNA, 17 nt, Artificial Sequence
  Synthetic oligonucleotide: PDCD1-184
guugugugacacggaag

SEQ ID NO: 538 - RNA, 17 nt, Artificial Sequence
  Synthetic oligonucleotide: PDCD1-192
gcuggcugcgguccucg

SEQ ID NO: 539 - RNA, 17 nt, Artificial Sequence
  Synthetic oligonucleotide: PDCD1-193
gcugcgguccucgggga

SEQ ID NO: 540 - RNA, 20 nt, Artificial Sequence
  Synthetic oligonucleotide: PDCD1-385
gacguuaccucgugcggccc

SEQ ID NO: 541 - RNA, 20 nt, Artificial Sequence
  Synthetic oligonucleotide: PDCD1-266
ggugucgugggcggccugcu

SEQ ID NO: 542 - RNA, 20 nt, Artificial Sequence
  Synthetic oligonucleotide: PDCD1-379
gcccacgacaccaaccacca

SEQ ID NO: 543 - RNA, 20 nt, Artificial Sequence
  Synthetic oligonucleotide: PDCD1-268
gcagccuggugcugcuaguc

SEQ ID NO: 544 - RNA, 20 nt, Artificial Sequence
  Synthetic oligonucleotide: PDCD1-270
ggugcugcuagucugggucc

SEQ ID NO: 545 - RNA, 20 nt, Artificial Sequence
  Synthetic oligonucleotide: PDCD1-382
ggacccagacuagcagcacc

SEQ ID NO: 546 - RNA, 20 nt, Artificial Sequence
  Synthetic oligonucleotide: PDCD1-362
ggcacuucugcccuucucuc

SEQ ID NO: 547 - RNA, 20 nt, Artificial Sequence
  Synthetic oligonucleotide: PDCD1-267
gggcggccugcugggcagcc

SEQ ID NO: 548 - RNA, 20 nt, Artificial Sequence
  Synthetic oligonucleotide: PDCD1-381
gcagcaccaggcugcccagc

SEQ ID NO: 549 - RNA, 20 nt, Artificial Sequence
  Synthetic oligonucleotide: PDCD1-368
gcuggccugggugaggggcu

SEQ ID NO: 550 - RNA, 17 nt, Artificial Sequence
  Synthetic oligonucleotide: PDCD1-472
guuaccucgugcggccc

SEQ ID NO: 551 - RNA, 17 nt, Artificial Sequence
  Synthetic oligonucleotide: PDCD1-316
gucgugggcggccugcu

SEQ ID NO: 552 - RNA, 17 nt, Artificial Sequence
  Synthetic oligonucleotide: PDCD1-462
guuuggaacuggccggc

SEQ ID NO: 553 - RNA, 17 nt, Artificial Sequence
  Synthetic oligonucleotide: PDCD1-322
ggccgucaucugcuccc

SEQ ID NO: 554 - RNA, 17 nt, Artificial Sequence
  Synthetic oligonucleotide: PDCD1-320
gcugcuagucugggucc

SEQ ID NO: 555 - RNA, 17 nt, Artificial Sequence
  Synthetic oligonucleotide: PDCD1-318
gccuggugcugcuaguc

SEQ ID NO: 556 - DNA, 20 bp, Artificial Sequence
  Synthetic oligonucleotide: GWED259
cactgcctctgtcactctcg

SEQ ID NO: 557 - DNA, 20 bp, Artificial Sequence
  Synthetic oligonucleotide: GWED260
agggactgagagtgaaaggt

SEQ ID NO: 558 - DNA, 19 bp, Artificial Sequence
  Synthetic oligonucleotide: JFPR004
caggatgcccaagggtcag

SEQ ID NO: 559 - DNA, 19 bp, Artificial Sequence
  Synthetic oligonucleotide: JFPR004R
ggagctcctgatcctgtgc

SEQ ID NO: 560 - DNA, 20 bp, Artificial Sequence
  Synthetic oligonucleotide: GWED257
aatggtgaccggcatctctg

SEQ ID NO: 561 - DNA, 20 bp, Artificial Sequence
  Synthetic oligonucleotide: JFPR005
ctgcacaggatcaggagctc

SEQ ID NO: 562 - DNA, 20 bp, Artificial Sequence
  Synthetic oligonucleotide: JFPR005R
agaatgtgagtcctgcaggc

SEQ ID NO: 563 - RNA, 20 nt, Artificial Sequence
  Synthetic oligonucleotide: PDCD1-108
gucugggcggugcuacaacu

SEQ ID NO: 564 - RNA, 17 nt, Artificial Sequence
  Synthetic oligonucleotide: PDCD1-251
gcccagacgacuggcca

SEQ ID NO: 565 - RNA, 17 nt, Artificial Sequence
  Synthetic oligonucleotide: PDCD1-133
gcucguggugaccgaag

SEQ ID NO: 566 - RNA, 20 nt, Artificial Sequence
  Synthetic oligonucleotide: PDCD1-15
gugucacacaacugcccaac

SEQ ID NO: 567 - RNA, 20 nt, Artificial Sequence
  Synthetic oligonucleotide: PDCD1-16
gcgugacuuccacaugagcg

SEQ ID NO: 568 - RNA, 17 nt, Artificial Sequence
  Synthetic oligonucleotide: PDCD1-147
gcccggcgcaaugacag

SEQ ID NO: 569 - RNA, 20 nt, Artificial Sequence
  Synthetic oligonucleotide: PDCD1-33
ggugacaggugcggccucgg

SEQ ID NO: 570 - RNA, 17 nt, Artificial Sequence
  Synthetic oligonucleotide: PDCD1-160
gacaggugcggccucgg

SEQ ID NO: 571 - RNA, 17 nt, Artificial Sequence
  Synthetic oligonucleotide: PDCD1-181
guggaagucacgcccgu

SEQ ID NO: 572 - RNA, 17 nt, Artificial Sequence
  Synthetic oligonucleotide: PDCD1-200
gaagcucuccgaugugu

SEQ ID NO: 573 - RNA, 17 nt, Artificial Sequence
  Synthetic oligonucleotide: PDCD1-207
gucaccacgagcagggc

SEQ ID NO: 574 - RNA, 20 nt, Artificial Sequence
  Synthetic oligonucleotide: PDCD1-104
aggcgcccuggccagucguc

SEQ ID NO: 575 - RNA, 17 nt, Artificial Sequence
  Synthetic oligonucleotide: PDCD1-231
cgcccuggccagucguc

SEQ ID NO: 576 - RNA, 20 nt, Artificial Sequence
  Synthetic oligonucleotide: PDCD1-107
cgucugggcggugcuacaac

SEQ ID NO: 577 - RNA, 17 nt, Artificial Sequence
  Synthetic oligonucleotide: PDCD1-234
cugggcggugcuacaac

SEQ ID NO: 578 - RNA, 17 nt, Artificial Sequence
  Synthetic oligonucleotide: PDCD1-235
ugggcggugcuacaacu

SEQ ID NO: 579 - RNA, 20 nt, Artificial Sequence
  Synthetic oligonucleotide: PDCD1-122
uguagcaccgcccagacgac

SEQ ID NO: 580 - RNA, 20 nt, Artificial Sequence
  Synthetic oligonucleotide: PDCD1-123
caccgcccagacgacuggcc

SEQ ID NO: 581 - RNA, 20 nt, Artificial Sequence
  Synthetic oligonucleotide: PDCD1-124
accgcccagacgacuggcca

SEQ ID NO: 582 - RNA, 20 nt, Artificial Sequence
  Synthetic oligonucleotide: PDCD1-126
cgacuggccagggcgccugu

SEQ ID NO: 583 - RNA, 17 nt, Artificial Sequence
  Synthetic oligonucleotide: PDCD1-249
agcaccgcccagacgac

SEQ ID NO: 584 - RNA, 17 nt, Artificial Sequence
  Synthetic oligonucleotide: PDCD1-250
cgcccagacgacuggcc

SEQ ID NO: 585 - RNA, 20 nt, Artificial Sequence
  Synthetic oligonucleotide: PDCD1-5
cccugcucguggugaccgaa

SEQ ID NO: 586 - RNA, 20 nt, Artificial Sequence
  Synthetic oligonucleotide: PDCD1-6
ccugcucguggugaccgaag

SEQ ID NO: 587 - RNA, 20 nt, Artificial Sequence
  Synthetic oligonucleotide: PDCD1-7
cugcagcuucuccaacacau

SEQ ID NO: 588 - RNA, 17 nt, Artificial Sequence
  Synthetic oligonucleotide: PDCD1-132
ugcucguggugaccgaa

SEQ ID NO: 589 - RNA, 17 nt, Artificial Sequence
  Synthetic oligonucleotide: PDCD1-134
cagcuucuccaacacau

SEQ ID NO: 590 - RNA, 20 nt, Artificial Sequence
  Synthetic oligonucleotide: PDCD1-17
acuuccacaugagcgugguc

SEQ ID NO: 591 - RNA, 17 nt, Artificial Sequence
  Synthetic oligonucleotide: PDCD1-142
ucacacaacugcccaac

SEQ ID NO: 592 - RNA, 17 nt, Artificial Sequence
  Synthetic oligonucleotide: PDCD1-143
ugacuuccacaugagcg

SEQ ID NO: 593 - RNA, 17 nt, Artificial Sequence
  Synthetic oligonucleotide: PDCD1-144
uccacaugagcgugguc

SEQ ID NO: 594 - RNA, 20 nt, Artificial Sequence
  Synthetic oligonucleotide: PDCD1-20
agggcccggcgcaaugacag

SEQ ID NO: 595 - RNA, 20 nt, Artificial Sequence
  Synthetic oligonucleotide: PDCD1-51
aggugccgcugucauugcgc

SEQ ID NO: 596 - RNA, 17 nt, Artificial Sequence
  Synthetic oligonucleotide: PDCD1-178
ugccgcugucauugcgc

SEQ ID NO: 597 - RNA, 20 nt, Artificial Sequence
  Synthetic oligonucleotide: PDCD1-54
cauguggaagucacgcccgu

SEQ ID NO: 598 - RNA, 20 nt, Artificial Sequence
  Synthetic oligonucleotide: PDCD1-55
auguggaagucacgcccguu

SEQ ID NO: 599 - RNA, 17 nt, Artificial Sequence
  Synthetic oligonucleotide: PDCD1-182
uggaagucacgcccguu

SEQ ID NO: 600 - RNA, 20 nt, Artificial Sequence
  Synthetic oligonucleotide: PDCD1-58
ugacacggaagcggcagucc

SEQ ID NO: 601 - RNA, 17 nt, Artificial Sequence
  Synthetic oligonucleotide: PDCD1-185
cacggaagcggcagucc

SEQ ID NO: 602 - RNA, 20 nt, Artificial Sequence
  Synthetic oligonucleotide: PDCD1-73
cacgaagcucuccgaugugu

SEQ ID NO: 603 - RNA, 20 nt, Artificial Sequence
  Synthetic oligonucleotide: PDCD1-78
ccccuucggucaccacgagc

SEQ ID NO: 604 - RNA, 20 nt, Artificial Sequence
  Synthetic oligonucleotide: PDCD1-79
cccuucggucaccacgagca

SEQ ID NO: 605 - RNA, 20 nt, Artificial Sequence
  Synthetic oligonucleotide: PDCD1-80
ucggucaccacgagcagggc

SEQ ID NO: 606 - RNA, 17 nt, Artificial Sequence
  Synthetic oligonucleotide: PDCD1-205
cuucggucaccacgagc

SEQ ID NO: 607 - RNA, 17 nt, Artificial Sequence
  Synthetic oligonucleotide: PDCD1-206
uucggucaccacgagca

SEQ ID NO: 608 - RNA, 17 nt, Artificial Sequence
  Synthetic oligonucleotide: PDCD1-186
gaagcggcaguccuggc

SEQ ID NO: 609 - RNA, 17 nt, Artificial Sequence
  Synthetic oligonucleotide: PDCD1-203
gaagcugcaggugaagg

SEQ ID NO: 610 - RNA, 20 nt, Artificial Sequence
  Synthetic oligonucleotide: PDCD1-77
gaagguggcguuguccccuu

SEQ ID NO: 611 - RNA, 17 nt, Artificial Sequence
  Synthetic oligonucleotide: PDCD1-217
gaagguggggggguucc

SEQ ID NO: 612 - RNA, 20 nt, Artificial Sequence
  Synthetic oligonucleotide: PDCD1-21
gacagcggcaccuaccucug

SEQ ID NO: 613 - RNA, 20 nt, Artificial Sequence
  Synthetic oligonucleotide: PDCD1-91
gagaagguggggggguucca

SEQ ID NO: 614 - RNA, 20 nt, Artificial Sequence
  Synthetic oligonucleotide: PDCD1-98
gagauggagagaggugagga

SEQ ID NO: 615 - RNA, 17 nt, Artificial Sequence
  Synthetic oligonucleotide: PDCD1-210
gagcagggcuggggaga

SEQ ID NO: 616 - RNA, 20 nt, Artificial Sequence
  Synthetic oligonucleotide: PDCD1-84
gagcagggcuggggagaagg

SEQ ID NO: 617 - RNA, 17 nt, Artificial Sequence
  Synthetic oligonucleotide: PDCD1-136
gagccccagcaaccaga

SEQ ID NO: 618 - RNA, 20 nt, Artificial Sequence
  Synthetic oligonucleotide: PDCD1-29
gagccugcgggcagagcuca

SEQ ID NO: 619 - RNA, 17 nt, Artificial Sequence
  Synthetic oligonucleotide: PDCD1-139
gaggaccgcagccagcc

SEQ ID NO: 620 - RNA, 17 nt, Artificial Sequence
  Synthetic oligonucleotide: PDCD1-154
gaucaaagagagccugc

SEQ ID NO: 621 - RNA, 20 nt, Artificial Sequence
  Synthetic oligonucleotide: PDCD1-47
gaucugcgccuugggggcca

SEQ ID NO: 622 - RNA, 20 nt, Artificial Sequence
  Synthetic oligonucleotide: PDCD1-100
gauggagagaggugaggaag

SEQ ID NO: 623 - RNA, 17 nt, Artificial Sequence
  Synthetic oligonucleotide: PDCD1-177
gauggccccacagaggu

SEQ ID NO: 624 - RNA, 17 nt, Artificial Sequence
  Synthetic oligonucleotide: PDCD1-242
gaugguucuuagguagg

SEQ ID NO: 625 - RNA, 17 nt, Artificial Sequence
  Synthetic oligonucleotide: PDCD1-157
gcagagcucagggugac

SEQ ID NO: 626 - RNA, 20 nt, Artificial Sequence
  Synthetic oligonucleotide: PDCD1-27
gcagaucaaagagagccugc

SEQ ID NO: 627 - RNA, 20 nt, Artificial Sequence
  Synthetic oligonucleotide: PDCD1-86
gcagggcuggggagaaggug

SEQ ID NO: 628 - RNA, 20 nt, Artificial Sequence
  Synthetic oligonucleotide: PDCD1-57
gcaguugugugacacggaag

SEQ ID NO: 629 - RNA, 20 nt, Artificial Sequence
  Synthetic oligonucleotide: PDCD1-4
gcccugcucguggugaccga

SEQ ID NO: 630 - RNA, 17 nt, Artificial Sequence
  Synthetic oligonucleotide: PDCD1-232
gcccuggccagucgucu

SEQ ID NO: 631 - RNA, 20 nt, Artificial Sequence
  Synthetic oligonucleotide: PDCD1-106
gcccuggccagucgucuggg

SEQ ID NO: 632 - RNA, 17 nt, Artificial Sequence
  Synthetic oligonucleotide: PDCD1-179
gccgcugucauugcgcc

SEQ ID NO: 633 - RNA, 20 nt, Artificial Sequence
  Synthetic oligonucleotide: PDCD1-63
gccgggcuggcugcgguccu

SEQ ID NO: 634 - RNA, 20 nt, Artificial Sequence
  Synthetic oligonucleotide: PDCD1-38
gccucggaggccccggggca

SEQ ID NO: 635 - RNA, 17 nt, Artificial Sequence
  Synthetic oligonucleotide: PDCD1-155
gccugcgggcagagcuc

SEQ ID NO: 636 - RNA, 20 nt, Artificial Sequence
  Synthetic oligonucleotide: PDCD1-127
gccugugggaucugcaugcc

SEQ ID NO: 637 - RNA, 17 nt, Artificial Sequence
  Synthetic oligonucleotide: PDCD1-149
gcggcaccuaccucugu

SEQ ID NO: 638 - RNA, 17 nt, Artificial Sequence
  Synthetic oligonucleotide: PDCD1-162
gcggccucggaggcccc

SEQ ID NO: 639 - RNA, 17 nt, Artificial Sequence
  Synthetic oligonucleotide: PDCD1-194
gcgguccucggggaagg

SEQ ID NO: 640 - RNA, 17 nt, Artificial Sequence
  Synthetic oligonucleotide: PDCD1-158
gcucagggugacaggug

SEQ ID NO: 641 - RNA, 20 nt, Artificial Sequence
  Synthetic oligonucleotide: PDCD1-42
gcucucuuugaucugcgccu

SEQ ID NO: 642 - RNA, 17 nt, Artificial Sequence
  Synthetic oligonucleotide: PDCD1-193
gcugcgguccucgggga

SEQ ID NO: 643 - RNA, 20 nt, Artificial Sequence
  Synthetic oligonucleotide: PDCD1-67
gcugcgguccucggggaagg

SEQ ID NO: 644 - RNA, 17 nt, Artificial Sequence
  Synthetic oligonucleotide: PDCD1-138
gcuggccgccuuccccg

SEQ ID NO: 645 - RNA, 17 nt, Artificial Sequence
  Synthetic oligonucleotide: PDCD1-192
gcuggcugcgguccucg

SEQ ID NO: 646 - RNA, 17 nt, Artificial Sequence
  Synthetic oligonucleotide: PDCD1-215
gcuggggagaagguggg

SEQ ID NO: 647 - RNA, 20 nt, Artificial Sequence
  Synthetic oligonucleotide: PDCD1-71
gcuuguccgucugguugcug

SEQ ID NO: 648 - RNA, 20 nt, Artificial Sequence
  Synthetic oligonucleotide: PDCD1-13
ggaccgcagccagcccggcc

SEQ ID NO: 649 - RNA, 17 nt, Artificial Sequence
  Synthetic oligonucleotide: PDCD1-202
ggagaagcugcagguga

SEQ ID NO: 650 - RNA, 20 nt, Artificial Sequence
  Synthetic oligonucleotide: PDCD1-76
ggagaagcugcaggugaagg

SEQ ID NO: 651 - RNA, 20 nt, Artificial Sequence
  Synthetic oligonucleotide: PDCD1-90
ggagaagguggggggguucc

SEQ ID NO: 652 - RNA, 17 nt, Artificial Sequence
  Synthetic oligonucleotide: PDCD1-227
ggagagaggugaggaag

SEQ ID NO: 653 - RNA, 20 nt, Artificial Sequence
  Synthetic oligonucleotide: PDCD1-50
ggagauggccccacagaggu

SEQ ID NO: 654 - RNA, 20 nt, Artificial Sequence
  Synthetic oligonucleotide: PDCD1-96
ggagucugagagauggagag

SEQ ID NO: 655 - RNA, 20 nt, Artificial Sequence
  Synthetic oligonucleotide: PDCD1-117
ggaugguucuuagguaggug

SEQ ID NO: 656 - RNA, 17 nt, Artificial Sequence
  Synthetic oligonucleotide: PDCD1-188
ggcaguccuggccgggc

SEQ ID NO: 657 - RNA, 20 nt, Artificial Sequence
  Synthetic oligonucleotide: PDCD1-114
ggccaggaugguucuuaggu

SEQ ID NO: 658 - RNA, 20 nt, Artificial Sequence
  Synthetic oligonucleotide: PDCD1-25
ggccaucucccuggccccca

SEQ ID NO: 659 - RNA, 20 nt, Artificial Sequence
  Synthetic oligonucleotide: PDCD1-37
ggccucggaggccccggggc

SEQ ID NO: 660 - RNA, 20 nt, Artificial Sequence
  Synthetic oligonucleotide: PDCD1-105
ggcgcccuggccagucgucu

SEQ ID NO: 661 - RNA, 17 nt, Artificial Sequence
  Synthetic oligonucleotide: PDCD1-191
ggcuggcugcgguccuc

SEQ ID NO: 662 - RNA, 17 nt, Artificial Sequence
  Synthetic oligonucleotide: PDCD1-214
ggcuggggagaaggugg

SEQ ID NO: 663 - RNA, 17 nt, Artificial Sequence
  Synthetic oligonucleotide: PDCD1-176
gggagauggccccacag

SEQ ID NO: 664 - RNA, 20 nt, Artificial Sequence
  Synthetic oligonucleotide: PDCD1-53
gggcccugaccacgcucaug

SEQ ID NO: 665 - RNA, 20 nt, Artificial Sequence
  Synthetic oligonucleotide: PDCD1-109
gggcggugcuacaacugggc

SEQ ID NO: 666 - RNA, 17 nt, Artificial Sequence
  Synthetic oligonucleotide: PDCD1-190
gggcuggcugcgguccu

SEQ ID NO: 667 - RNA, 17 nt, Artificial Sequence
  Synthetic oligonucleotide: PDCD1-213
gggcuggggagaaggug

SEQ ID NO: 668 - RNA, 20 nt, Artificial Sequence
  Synthetic oligonucleotide: PDCD1-89
gggcuggggagaaggugggg

SEQ ID NO: 669 - RNA, 20 nt, Artificial Sequence
  Synthetic oligonucleotide: PDCD1-92
gggggguuccagggccuguc

SEQ ID NO: 670 - RNA, 20 nt, Artificial Sequence
  Synthetic oligonucleotide: PDCD1-93
ggggguuccagggccugucu

SEQ ID NO: 671 - RNA, 20 nt, Artificial Sequence
  Synthetic oligonucleotide: PDCD1-94
gggguuccagggccugucug

SEQ ID NO: 672 - RNA, 17 nt, Artificial Sequence
  Synthetic oligonucleotide: PDCD1-219
ggguuccagggccuguc

SEQ ID NO: 673 - RNA, 20 nt, Artificial Sequence
  Synthetic oligonucleotide: PDCD1-120
gguagguggggucggcgguc

SEQ ID NO: 674 - RNA, 20 nt, Artificial Sequence
  Synthetic oligonucleotide: PDCD1-82
ggucaccacgagcagggcug

SEQ ID NO: 675 - RNA, 17 nt, Artificial Sequence
  Synthetic oligonucleotide: PDCD1-159
ggugacaggugcggccu

SEQ ID NO: 676 - RNA, 20 nt, Artificial Sequence
  Synthetic oligonucleotide: PDCD1-52
ggugccgcugucauugcgcc

SEQ ID NO: 677 - RNA, 20 nt, Artificial Sequence
  Synthetic oligonucleotide: PDCD1-35
ggugcggccucggaggcccc

SEQ ID NO: 678 - RNA, 17 nt, Artificial Sequence
  Synthetic oligonucleotide: PDCD1-204
gguggcguuguccccuu

SEQ ID NO: 679 - RNA, 17 nt, Artificial Sequence
  Synthetic oligonucleotide: PDCD1-220
gguuccagggccugucu

SEQ ID NO: 680 - RNA, 20 nt, Artificial Sequence
  Synthetic oligonucleotide: PDCD1-118
gguucuuagguagguggggu

SEQ ID NO: 681 - RNA, 17 nt, Artificial Sequence
  Synthetic oligonucleotide: PDCD1-199
gguugcuggggcucaug

SEQ ID NO: 682 - RNA, 17 nt, Artificial Sequence
  Synthetic oligonucleotide: PDCD1-141
gucacacaacugcccaa

SEQ ID NO: 683 - RNA, 17 nt, Artificial Sequence
  Synthetic oligonucleotide: PDCD1-223
gucugagagauggagag

SEQ ID NO: 684 - RNA, 20 nt, Artificial Sequence
  Synthetic oligonucleotide: PDCD1-36
gugcggccucggaggccccg

SEQ ID NO: 685 - RNA, 17 nt, Artificial Sequence
  Synthetic oligonucleotide: PDCD1-221
guuccagggccugucug

SEQ ID NO: 686 - RNA, 20 nt, Artificial Sequence
  Synthetic oligonucleotide: PDCD1-75
guuggagaagcugcagguga

SEQ ID NO: 687 - RNA, 17 nt, Artificial Sequence
  Synthetic oligonucleotide: PDCD1-184
guugugugacacggaag

SEQ ID NO: 688 - RNA, 20 nt, Artificial Sequence
  Synthetic oligonucleotide: PDCD1-112
aacugggcuggcggccagga

SEQ ID NO: 689 - RNA, 17 nt, Artificial Sequence
  Synthetic oligonucleotide: PDCD1-187
aagcggcaguccuggcc

SEQ ID NO: 690 - RNA, 17 nt, Artificial Sequence
  Synthetic oligonucleotide: PDCD1-218
aagguggggggguucca

SEQ ID NO: 691 - RNA, 20 nt, Artificial Sequence
  Synthetic oligonucleotide: PDCD1-22
acagcggcaccuaccucugu

SEQ ID NO: 692 - RNA, 20 nt, Artificial Sequence
  Synthetic oligonucleotide: PDCD1-19
acaugagcguggucagggcc

SEQ ID NO: 693 - RNA, 20 nt, Artificial Sequence
  Synthetic oligonucleotide: PDCD1-125
acgacuggccagggcgccug

SEQ ID NO: 694 - RNA, 20 nt, Artificial Sequence
  Synthetic oligonucleotide: PDCD1-59
acggaagcggcaguccuggc

SEQ ID NO: 695 - RNA, 17 nt, Artificial Sequence
  Synthetic oligonucleotide: PDCD1-129
acuccccagacaggccc

SEQ ID NO: 696 - RNA, 17 nt, Artificial Sequence
  Synthetic oligonucleotide: PDCD1-252
acuggccagggcgccug

SEQ ID NO: 697 - RNA, 17 nt, Artificial Sequence
  Synthetic oligonucleotide: PDCD1-224
agagauggagagaggug

SEQ ID NO: 698 - RNA, 20 nt, Artificial Sequence
  Synthetic oligonucleotide: PDCD1-28
agagccugcgggcagagcuc

SEQ ID NO: 699 - RNA, 20 nt, Artificial Sequence
  Synthetic oligonucleotide: PDCD1-31
agagcucagggugacaggug

SEQ ID NO: 700 - RNA, 17 nt, Artificial Sequence
  Synthetic oligonucleotide: PDCD1-135
agagcuucgugcuaaac

SEQ ID NO: 701 - RNA, 17 nt, Artificial Sequence
  Synthetic oligonucleotide: PDCD1-153
agaucaaagagagccug

SEQ ID NO: 702 - RNA, 17 nt, Artificial Sequence
  Synthetic oligonucleotide: PDCD1-230
agaucccacaggcgccc

SEQ ID NO: 703 - RNA, 20 nt, Artificial Sequence
  Synthetic oligonucleotide: PDCD1-99
agauggagagaggugaggaa

SEQ ID NO: 704 - RNA, 20 nt, Artificial Sequence
  Synthetic oligonucleotide: PDCD1-85
agcagggcuggggagaaggu

SEQ ID NO: 705 - RNA, 17 nt, Artificial Sequence
  Synthetic oligonucleotide: PDCD1-148
agcggcaccuaccucug

SEQ ID NO: 706 - RNA, 20 nt, Artificial Sequence
  Synthetic oligonucleotide: PDCD1-61
agcggcaguccuggccgggc

SEQ ID NO: 707 - RNA, 20 nt, Artificial Sequence
  Synthetic oligonucleotide: PDCD1-70
agcuuguccgucugguugcu

SEQ ID NO: 708 - RNA, 20 nt, Artificial Sequence
  Synthetic oligonucleotide: PDCD1-116
aggaugguucuuagguaggu

SEQ ID NO: 709 - RNA, 17 nt, Artificial Sequence
  Synthetic oligonucleotide: PDCD1-229
aggcaugcagaucccac

SEQ ID NO: 710 - RNA, 20 nt, Artificial Sequence
  Synthetic oligonucleotide: PDCD1-68
aggcggccagcuuguccguc

SEQ ID NO: 711 - RNA, 17 nt, Artificial Sequence
  Synthetic oligonucleotide: PDCD1-212
agggcuggggagaaggu

SEQ ID NO: 712 - RNA, 20 nt, Artificial Sequence
  Synthetic oligonucleotide: PDCD1-88
agggcuggggagaagguggg

SEQ ID NO: 713 - RNA, 20 nt, Artificial Sequence
  Synthetic oligonucleotide: PDCD1-34
aggugcggccucggaggccc

SEQ ID NO: 714 - RNA, 17 nt, Artificial Sequence
  Synthetic oligonucleotide: PDCD1-247
agguggggucggcgguc

SEQ ID NO: 715 - RNA, 20 nt, Artificial Sequence
  Synthetic oligonucleotide: PDCD1-62
aguccuggccgggcuggcug

SEQ ID NO: 716 - RNA, 20 nt, Artificial Sequence
  Synthetic oligonucleotide: PDCD1-1
aucucucagacuccccagac

SEQ ID NO: 717 - RNA, 17 nt, Artificial Sequence
  Synthetic oligonucleotide: PDCD1-225
auggagagaggugagga

SEQ ID NO: 718 - RNA, 17 nt, Artificial Sequence
  Synthetic oligonucleotide: PDCD1-243
augguucuuagguaggu

SEQ ID NO: 719 - RNA, 17 nt, Artificial Sequence
  Synthetic oligonucleotide: PDCD1-137
caaccagacggacaagc

SEQ ID NO: 720 - RNA, 17 nt, Artificial Sequence
  Synthetic oligonucleotide: PDCD1-238
caacugggcuggcggcc

SEQ ID NO: 721 - RNA, 20 nt, Artificial Sequence
  Synthetic oligonucleotide: PDCD1-11
caagcuggccgccuuccccg

SEQ ID NO: 722 - RNA, 17 nt, Artificial Sequence
  Synthetic oligonucleotide: PDCD1-209
caccacgagcagggcug

SEQ ID NO: 723 - RNA, 20 nt, Artificial Sequence
  Synthetic oligonucleotide: PDCD1-121
caccuaccuaagaaccaucc

SEQ ID NO: 724 - RNA, 20 nt, Artificial Sequence
  Synthetic oligonucleotide: PDCD1-83
cacgagcagggcuggggaga

SEQ ID NO: 725 - RNA, 20 nt, Artificial Sequence
  Synthetic oligonucleotide: PDCD1-101
cacucugguggggcugcucc

SEQ ID NO: 726 - RNA, 20 nt, Artificial Sequence
  Synthetic oligonucleotide: PDCD1-2
cagacuccccagacaggccc

SEQ ID NO: 727 - RNA, 20 nt, Artificial Sequence
  Synthetic oligonucleotide: PDCD1-10
cagcaaccagacggacaagc

SEQ ID NO: 728 - RNA, 20 nt, Artificial Sequence
  Synthetic oligonucleotide: PDCD1-23
cagcggcaccuaccucugug

SEQ ID NO: 729 - RNA, 20 nt, Artificial Sequence
  Synthetic oligonucleotide: PDCD1-69
cagcuuguccgucugguugc

SEQ ID NO: 730 - RNA, 17 nt, Artificial Sequence
  Synthetic oligonucleotide: PDCD1-241
caggaugguucuuaggu

SEQ ID NO: 731 - RNA, 20 nt, Artificial Sequence
  Synthetic oligonucleotide: PDCD1-115
caggaugguucuuagguagg

SEQ ID NO: 732 - RNA, 17 nt, Artificial Sequence
  Synthetic oligonucleotide: PDCD1-211
cagggcuggggagaagg

SEQ ID NO: 733 - RNA, 20 nt, Artificial Sequence
  Synthetic oligonucleotide: PDCD1-87
cagggcuggggagaaggugg

SEQ ID NO: 734 - RNA, 20 nt, Artificial Sequence
  Synthetic oligonucleotide: PDCD1-32
cagggugacaggugcggccu

SEQ ID NO: 735 - RNA, 17 nt, Artificial Sequence
  Synthetic oligonucleotide: PDCD1-152
caucucccuggccccca

SEQ ID NO: 736 - RNA, 20 nt, Artificial Sequence
  Synthetic oligonucleotide: PDCD1-9
caugagccccagcaaccaga

SEQ ID NO: 737 - RNA, 17 nt, Artificial Sequence
  Synthetic oligonucleotide: PDCD1-145
ccacaugagcgugguca

SEQ ID NO: 738 - RNA, 20 nt, Artificial Sequence
  Synthetic oligonucleotide: PDCD1-49
ccagggagauggccccacag

SEQ ID NO: 739 - RNA, 20 nt, Artificial Sequence
  Synthetic oligonucleotide: PDCD1-40
ccccugccccggggccuccg

SEQ ID NO: 740 - RNA, 20 nt, Artificial Sequence
  Synthetic oligonucleotide: PDCD1-12
cccgaggaccgcagccagcc

SEQ ID NO: 741 - RNA, 17 nt, Artificial Sequence
  Synthetic oligonucleotide: PDCD1-180
cccugaccacgcucaug

SEQ ID NO: 742 - RNA, 17 nt, Artificial Sequence
  Synthetic oligonucleotide: PDCD1-168
cccugagcucugcccgc

SEQ ID NO: 743 - RNA, 17 nt, Artificial Sequence
  Synthetic oligonucleotide: PDCD1-140
ccgcagccagcccggcc

SEQ ID NO: 744 - RNA, 20 nt, Artificial Sequence
  Synthetic oligonucleotide: PDCD1-64
ccgggcuggcugcgguccuc

SEQ ID NO: 745 - RNA, 20 nt, Artificial Sequence
  Synthetic oligonucleotide: PDCD1-39
ccucggaggccccggggcag

SEQ ID NO: 746 - RNA, 20 nt, Artificial Sequence
  Synthetic oligonucleotide: PDCD1-24
ccucuguggggccaucuccc

SEQ ID NO: 747 - RNA, 17 nt, Artificial Sequence
  Synthetic oligonucleotide: PDCD1-156
ccugcgggcagagcuca

SEQ ID NO: 748 - RNA, 17 nt, Artificial Sequence
  Synthetic oligonucleotide: PDCD1-189
ccuggccgggcuggcug

SEQ ID NO: 749 - RNA, 20 nt, Artificial Sequence
  Synthetic oligonucleotide: PDCD1-74
cgauguguuggagaagcugc

SEQ ID NO: 750 - RNA, 20 nt, Artificial Sequence
  Synthetic oligonucleotide: PDCD1-26
cgcagaucaaagagagccug

SEQ ID NO: 751 - RNA, 20 nt, Artificial Sequence
  Synthetic oligonucleotide: PDCD1-48
cgccuugggggccagggaga

SEQ ID NO: 752 - RNA, 20 nt, Artificial Sequence
  Synthetic oligonucleotide: PDCD1-60
cggaagcggcaguccuggcc

SEQ ID NO: 753 - RNA, 20 nt, Artificial Sequence
  Synthetic oligonucleotide: PDCD1-8
cggagagcuucgugcuaaac

SEQ ID NO: 754 - RNA, 17 nt, Artificial Sequence
  Synthetic oligonucleotide: PDCD1-166
cggaggccccggggcag

SEQ ID NO: 755 - RNA, 17 nt, Artificial Sequence
  Synthetic oligonucleotide: PDCD1-150
cggcaccuaccucugug

SEQ ID NO: 756 - RNA, 17 nt, Artificial Sequence
  Synthetic oligonucleotide: PDCD1-195
cggccagcuuguccguc

SEQ ID NO: 757 - RNA, 17 nt, Artificial Sequence
  Synthetic oligonucleotide: PDCD1-240
cggccaggaugguucuu

SEQ ID NO: 758 - RNA, 17 nt, Artificial Sequence
  Synthetic oligonucleotide: PDCD1-163
cggccucggaggccccg

SEQ ID NO: 759 - RNA, 20 nt, Artificial Sequence
  Synthetic oligonucleotide: PDCD1-30
cgggcagagcucagggugac

SEQ ID NO: 760 - RNA, 20 nt, Artificial Sequence
  Synthetic oligonucleotide: PDCD1-65
cgggcuggcugcgguccucg

SEQ ID NO: 761 - RNA, 20 nt, Artificial Sequence
  Synthetic oligonucleotide: PDCD1-81
cggucaccacgagcagggcu

SEQ ID NO: 762 - RNA, 17 nt, Artificial Sequence
  Synthetic oligonucleotide: PDCD1-236
cggugcuacaacugggc

SEQ ID NO: 763 - RNA, 20 nt, Artificial Sequence
  Synthetic oligonucleotide: PDCD1-110
cggugcuacaacugggcugg

SEQ ID NO: 764 - RNA, 20 nt, Artificial Sequence
  Synthetic oligonucleotide: PDCD1-14
cgugucacacaacugcccaa

SEQ ID NO: 765 - RNA, 20 nt, Artificial Sequence
  Synthetic oligonucleotide: PDCD1-56
cguugggcaguugugugaca

SEQ ID NO: 766 - RNA, 20 nt, Artificial Sequence
  Synthetic oligonucleotide: PDCD1-111
cuacaacugggcuggcggcc

SEQ ID NO: 767 - RNA, 17 nt, Artificial Sequence
  Synthetic oligonucleotide: PDCD1-248
cuaccuaagaaccaucc

SEQ ID NO: 768 - RNA, 17 nt, Artificial Sequence
  Synthetic oligonucleotide: PDCD1-130
cuccccagcccugcucg

SEQ ID NO: 769 - RNA, 17 nt, Artificial Sequence
  Synthetic oligonucleotide: PDCD1-164
cucggaggccccggggc

SEQ ID NO: 770 - RNA, 20 nt, Artificial Sequence
  Synthetic oligonucleotide: PDCD1-43
cucucuuugaucugcgccuu

SEQ ID NO: 771 - RNA, 17 nt, Artificial Sequence
  Synthetic oligonucleotide: PDCD1-169
cucuuugaucugcgccu

SEQ ID NO: 772 - RNA, 20 nt, Artificial Sequence
  Synthetic oligonucleotide: PDCD1-45
cucuuugaucugcgccuugg

SEQ ID NO: 773 - RNA, 20 nt, Artificial Sequence
  Synthetic oligonucleotide: PDCD1-97
cugagagauggagagaggug

SEQ ID NO: 774 - RNA, 17 nt, Artificial Sequence
  Synthetic oligonucleotide: PDCD1-167
cugccccggggccuccg

SEQ ID NO: 775 - RNA, 17 nt, Artificial Sequence
  Synthetic oligonucleotide: PDCD1-174
cugcgccuugggggcca

SEQ ID NO: 776 - RNA, 17 nt, Artificial Sequence
  Synthetic oligonucleotide: PDCD1-131
cugcucguggugaccga

SEQ ID NO: 777 - RNA, 17 nt, Artificial Sequence
  Synthetic oligonucleotide: PDCD1-253
cuggccagggcgccugu

SEQ ID NO: 778 - RNA, 17 nt, Artificial Sequence
  Synthetic oligonucleotide: PDCD1-233
cuggccagucgucuggg

SEQ ID NO: 779 - RNA, 20 nt, Artificial Sequence
  Synthetic oligonucleotide: PDCD1-66
cuggcugcgguccucgggga

SEQ ID NO: 780 - RNA, 17 nt, Artificial Sequence
  Synthetic oligonucleotide: PDCD1-216
cuggggagaaggugggg

SEQ ID NO: 781 - RNA, 17 nt, Artificial Sequence
  Synthetic oligonucleotide: PDCD1-222
cuggggagucugagaga

SEQ ID NO: 782 - RNA, 17 nt, Artificial Sequence
  Synthetic oligonucleotide: PDCD1-151
cuguggggccaucuccc

SEQ ID NO: 783 - RNA, 20 nt, Artificial Sequence
  Synthetic oligonucleotide: PDCD1-18
cuuccacaugagcgugguca

SEQ ID NO: 784 - RNA, 20 nt, Artificial Sequence
  Synthetic oligonucleotide: PDCD1-3
cuucuccccagcccugcucg

SEQ ID NO: 785 - RNA, 17 nt, Artificial Sequence
  Synthetic oligonucleotide: PDCD1-175
cuugggggccagggaga

SEQ ID NO: 786 - RNA, 17 nt, Artificial Sequence
  Synthetic oligonucleotide: PDCD1-196
cuuguccgucugguugc

SEQ ID NO: 787 - RNA, 17 nt, Artificial Sequence
  Synthetic oligonucleotide: PDCD1-171
cuuugaucugcgccuug

SEQ ID NO: 788 - RNA, 17 nt, Artificial Sequence
  Synthetic oligonucleotide: PDCD1-246
uagguagguggggucgg

SEQ ID NO: 789 - RNA, 17 nt, Artificial Sequence
  Synthetic oligonucleotide: PDCD1-208
ucaccacgagcagggcu

SEQ ID NO: 790 - RNA, 20 nt, Artificial Sequence
  Synthetic oligonucleotide: PDCD1-41
ucacccugagcucugcccgc

SEQ ID NO: 791 - RNA, 20 nt, Artificial Sequence
  Synthetic oligonucleotide: PDCD1-102
uccaggcaugcagaucccac

SEQ ID NO: 792 - RNA, 17 nt, Artificial Sequence
  Synthetic oligonucleotide: PDCD1-165
ucggaggccccggggca

SEQ ID NO: 793 - RNA, 17 nt, Artificial Sequence
  Synthetic oligonucleotide: PDCD1-128
ucucagacuccccagac

SEQ ID NO: 794 - RNA, 20 nt, Artificial Sequence
  Synthetic oligonucleotide: PDCD1-44
ucucuuugaucugcgccuug

SEQ ID NO: 795 - RNA, 17 nt, Artificial Sequence
  Synthetic oligonucleotide: PDCD1-173
ucugcgccuugggggcc

SEQ ID NO: 796 - RNA, 17 nt, Artificial Sequence
  Synthetic oligonucleotide: PDCD1-228
ucugguggggcugcucc

SEQ ID NO: 797 - RNA, 20 nt, Artificial Sequence
  Synthetic oligonucleotide: PDCD1-72
ucugguugcuggggcucaug

SEQ ID NO: 798 - RNA, 17 nt, Artificial Sequence
  Synthetic oligonucleotide: PDCD1-245
ucuuagguagguggggu

SEQ ID NO: 799 - RNA, 20 nt, Artificial Sequence
  Synthetic oligonucleotide: PDCD1-119
ucuuagguagguggggucgg

SEQ ID NO: 800 - RNA, 17 nt, Artificial Sequence
  Synthetic oligonucleotide: PDCD1-170
ucuuugaucugcgccuu

SEQ ID NO: 801 - RNA, 17 nt, Artificial Sequence
  Synthetic oligonucleotide: PDCD1-146
ugagcguggucagggcc

SEQ ID NO: 802 - RNA, 20 nt, Artificial Sequence
  Synthetic oligonucleotide: PDCD1-46
ugaucugcgccuugggggcc

SEQ ID NO: 803 - RNA, 20 nt, Artificial Sequence
  Synthetic oligonucleotide: PDCD1-103
ugcagaucccacaggcgccc

SEQ ID NO: 804 - RNA, 17 nt, Artificial Sequence
  Synthetic oligonucleotide: PDCD1-161
ugcggccucggaggccc

SEQ ID NO: 805 - RNA, 17 nt, Artificial Sequence
  Synthetic oligonucleotide: PDCD1-237
ugcuacaacugggcugg

SEQ ID NO: 806 - RNA, 17 nt, Artificial Sequence
  Synthetic oligonucleotide: PDCD1-226
uggagagaggugaggaa

SEQ ID NO: 807 - RNA, 20 nt, Artificial Sequence
  Synthetic oligonucleotide: PDCD1-113
uggcggccaggaugguucuu

SEQ ID NO: 808 - RNA, 17 nt, Artificial Sequence
  Synthetic oligonucleotide: PDCD1-183
ugggcaguugugugaca

SEQ ID NO: 809 - RNA, 17 nt, Artificial Sequence
  Synthetic oligonucleotide: PDCD1-239
ugggcuggcggccagga

SEQ ID NO: 810 - RNA, 17 nt, Artificial Sequence
  Synthetic oligonucleotide: PDCD1-244
ugguucuuagguaggug

SEQ ID NO: 811 - RNA, 17 nt, Artificial Sequence
  Synthetic oligonucleotide: PDCD1-198
uguccgucugguugcug

SEQ ID NO: 812 - RNA, 20 nt, Artificial Sequence
  Synthetic oligonucleotide: PDCD1-95
ugucuggggagucugagaga

SEQ ID NO: 813 - RNA, 17 nt, Artificial Sequence
  Synthetic oligonucleotide: PDCD1-254
ugugggaucugcaugcc

SEQ ID NO: 814 - RNA, 17 nt, Artificial Sequence
  Synthetic oligonucleotide: PDCD1-201
uguguuggagaagcugc

SEQ ID NO: 815 - RNA, 17 nt, Artificial Sequence
  Synthetic oligonucleotide: PDCD1-197
uuguccgucugguugcu

SEQ ID NO: 816 - RNA, 17 nt, Artificial Sequence
  Synthetic oligonucleotide: PDCD1-172
uuugaucugcgccuugg

SEQ ID NO: 817 - RNA, 20 nt, Artificial Sequence
  Synthetic oligonucleotide: PDCD1-255
uuugugcccuuccagagaga

SEQ ID NO: 818 - RNA, 20 nt, Artificial Sequence
  Synthetic oligonucleotide: PDCD1-256
uugugcccuuccagagagaa

SEQ ID NO: 819 - RNA, 20 nt, Artificial Sequence
  Synthetic oligonucleotide: PDCD1-257
cccaccccagccccucaccc

SEQ ID NO: 820 - RNA, 20 nt, Artificial Sequence
  Synthetic oligonucleotide: PDCD1-258
agccccucacccaggccagc

SEQ ID NO: 821 - RNA, 20 nt, Artificial Sequence
  Synthetic oligonucleotide: PDCD1-259
agccggccaguuccaaaccc

SEQ ID NO: 822 - RNA, 20 nt, Artificial Sequence
  Synthetic oligonucleotide: PDCD1-260
cggccaguuccaaacccugg

SEQ ID NO: 823 - RNA, 20 nt, Artificial Sequence
  Synthetic oligonucleotide: PDCD1-261
caguuccaaacccugguggu

SEQ ID NO: 824 - RNA, 20 nt, Artificial Sequence
  Synthetic oligonucleotide: PDCD1-262
aacccuggugguuggugucg

SEQ ID NO: 825 - RNA, 20 nt, Artificial Sequence
  Synthetic oligonucleotide: PDCD1-263
acccuggugguuggugucgu

SEQ ID NO: 826 - RNA, 20 nt, Artificial Sequence
  Synthetic oligonucleotide: PDCD1-264
cuggugguuggugucguggg

SEQ ID NO: 827 - RNA, 20 nt, Artificial Sequence
  Synthetic oligonucleotide: PDCD1-265
uggugucgugggcggccugc

SEQ ID NO: 828 - RNA, 20 nt, Artificial Sequence
  Synthetic oligonucleotide: PDCD1-266
ggugucgugggcggccugcu

SEQ ID NO: 829 - RNA, 20 nt, Artificial Sequence
  Synthetic oligonucleotide: PDCD1-267
gggcggccugcugggcagcc

SEQ ID NO: 830 - RNA, 20 nt, Artificial Sequence
  Synthetic oligonucleotide: PDCD1-268
gcagccuggugcugcuaguc

SEQ ID NO: 831 - RNA, 20 nt, Artificial Sequence
  Synthetic oligonucleotide: PDCD1-269
cagccuggugcugcuagucu

SEQ ID NO: 832 - RNA, 20 nt, Artificial Sequence
  Synthetic oligonucleotide: PDCD1-270
ggugcugcuagucugggucc

SEQ ID NO: 833 - RNA, 20 nt, Artificial Sequence
  Synthetic oligonucleotide: PDCD1-271
uccuggccgucaucugcucc

SEQ ID NO: 834 - RNA, 20 nt, Artificial Sequence
  Synthetic oligonucleotide: PDCD1-272
ccuggccgucaucugcuccc

SEQ ID NO: 835 - RNA, 20 nt, Artificial Sequence
  Synthetic oligonucleotide: PDCD1-273
aucugcucccgggccgcacg

SEQ ID NO: 836 - RNA, 20 nt, Artificial Sequence
  Synthetic oligonucleotide: PDCD1-274
guaacgucaucccagccccu

SEQ ID NO: 837 - RNA, 20 nt, Artificial Sequence
  Synthetic oligonucleotide: PDCD1-275
ccccaaguguguuucucugc

SEQ ID NO: 838 - RNA, 20 nt, Artificial Sequence
  Synthetic oligonucleotide: PDCD1-276
cccaaguguguuucucugca

SEQ ID NO: 839 - RNA, 20 nt, Artificial Sequence
  Synthetic oligonucleotide: PDCD1-277
uguuucucugcagggacaau

SEQ ID NO: 840 - RNA, 20 nt, Artificial Sequence
  Synthetic oligonucleotide: PDCD1-278
cugcagggacaauaggagcc

SEQ ID NO: 841 - RNA, 20 nt, Artificial Sequence
  Synthetic oligonucleotide: PDCD1-279
acaauaggagccaggcgcac

SEQ ID NO: 842 - RNA, 20 nt, Artificial Sequence
  Synthetic oligonucleotide: PDCD1-280
caggcgcaccggccagcccc

SEQ ID NO: 843 - RNA, 20 nt, Artificial Sequence
  Synthetic oligonucleotide: PDCD1-281
ucucccuuucuccucaaaga

SEQ ID NO: 844 - RNA, 20 nt, Artificial Sequence
  Synthetic oligonucleotide: PDCD1-282
cccuuucuccucaaagaagg

SEQ ID NO: 845 - RNA, 20 nt, Artificial Sequence
  Synthetic oligonucleotide: PDCD1-283
agccgugccuguguucucug

SEQ ID NO: 846 - RNA, 20 nt, Artificial Sequence
  Synthetic oligonucleotide: PDCD1-284
ccuguguucucuguggacua

SEQ ID NO: 847 - RNA, 20 nt, Artificial Sequence
  Synthetic oligonucleotide: PDCD1-285
cuguguucucuguggacuau

SEQ ID NO: 848 - RNA, 20 nt, Artificial Sequence
  Synthetic oligonucleotide: PDCD1-286
uguguucucuguggacuaug

SEQ ID NO: 849 - RNA, 20 nt, Artificial Sequence
  Synthetic oligonucleotide: PDCD1-287
cucuguggacuauggggagc

SEQ ID NO: 850 - RNA, 20 nt, Artificial Sequence
  Synthetic oligonucleotide: PDCD1-288
auggggagcuggauuuccag

SEQ ID NO: 851 - RNA, 20 nt, Artificial Sequence
  Synthetic oligonucleotide: PDCD1-289
ccaguggcgagagaagaccc

SEQ ID NO: 852 - RNA, 20 nt, Artificial Sequence
  Synthetic oligonucleotide: PDCD1-290
gcccugugucccugagcaga

SEQ ID NO: 853 - RNA, 20 nt, Artificial Sequence
  Synthetic oligonucleotide: PDCD1-291
gccaccauugucuuuccuag

SEQ ID NO: 854 - RNA, 20 nt, Artificial Sequence
  Synthetic oligonucleotide: PDCD1-292
cauugucuuuccuagcggaa

SEQ ID NO: 855 - RNA, 20 nt, Artificial Sequence
  Synthetic oligonucleotide: PDCD1-293
auugucuuuccuagcggaau

SEQ ID NO: 856 - RNA, 20 nt, Artificial Sequence
  Synthetic oligonucleotide: PDCD1-294
gcaccucaucccccgcccgc

SEQ ID NO: 857 - RNA, 20 nt, Artificial Sequence
  Synthetic oligonucleotide: PDCD1-295
caccucaucccccgcccgca

SEQ ID NO: 858 - RNA, 20 nt, Artificial Sequence
  Synthetic oligonucleotide: PDCD1-296
accucaucccccgcccgcag

SEQ ID NO: 859 - RNA, 20 nt, Artificial Sequence
  Synthetic oligonucleotide: PDCD1-297
gcccgcaggggcucagcuga

SEQ ID NO: 860 - RNA, 20 nt, Artificial Sequence
  Synthetic oligonucleotide: PDCD1-298
ggggcucagcugacggcccu

SEQ ID NO: 861 - RNA, 20 nt, Artificial Sequence
  Synthetic oligonucleotide: PDCD1-299
cucggagugcccagccacug

SEQ ID NO: 862 - RNA, 20 nt, Artificial Sequence
  Synthetic oligonucleotide: PDCD1-300
ugcccagccacugaggccug

SEQ ID NO: 863 - RNA, 20 nt, Artificial Sequence
  Synthetic oligonucleotide: PDCD1-301
cagccacugaggccugagga

SEQ ID NO: 864 - RNA, 20 nt, Artificial Sequence
  Synthetic oligonucleotide: PDCD1-302
cugaggauggacacugcucu

SEQ ID NO: 865 - RNA, 20 nt, Artificial Sequence
  Synthetic oligonucleotide: PDCD1-303
cugcucuuggccccucugac

SEQ ID NO: 866 - RNA, 20 nt, Artificial Sequence
  Synthetic oligonucleotide: PDCD1-304
gccccucugaccggcuuccu

SEQ ID NO: 867 - RNA, 17 nt, Artificial Sequence
  Synthetic oligonucleotide: PDCD1-305
gugcccuuccagagaga

SEQ ID NO: 868 - RNA, 17 nt, Artificial Sequence
  Synthetic oligonucleotide: PDCD1-306
ugcccuuccagagagaa

SEQ ID NO: 869 - RNA, 17 nt, Artificial Sequence
  Synthetic oligonucleotide: PDCD1-307
accccagccccucaccc

SEQ ID NO: 870 - RNA, 17 nt, Artificial Sequence
  Synthetic oligonucleotide: PDCD1-308
cccucacccaggccagc

SEQ ID NO: 871 - RNA, 17 nt, Artificial Sequence
  Synthetic oligonucleotide: PDCD1-309
cggccaguuccaaaccc

SEQ ID NO: 872 - RNA, 17 nt, Artificial Sequence
  Synthetic oligonucleotide: PDCD1-310
ccaguuccaaacccugg

SEQ ID NO: 873 - RNA, 17 nt, Artificial Sequence
  Synthetic oligonucleotide: PDCD1-311
uuccaaacccugguggu

SEQ ID NO: 874 - RNA, 17 nt, Artificial Sequence
  Synthetic oligonucleotide: PDCD1-312
ccuggugguuggugucg

SEQ ID NO: 875 - RNA, 17 nt, Artificial Sequence
  Synthetic oligonucleotide: PDCD1-313
cuggugguuggugucgu

SEQ ID NO: 876 - RNA, 17 nt, Artificial Sequence
  Synthetic oligonucleotide: PDCD1-314
gugguuggugucguggg

SEQ ID NO: 877 - RNA, 17 nt, Artificial Sequence
  Synthetic oligonucleotide: PDCD1-315
ugucgugggcggccugc

SEQ ID NO: 878 - RNA, 17 nt, Artificial Sequence
  Synthetic oligonucleotide: PDCD1-316
gucgugggcggccugcu

SEQ ID NO: 879 - RNA, 17 nt, Artificial Sequence
  Synthetic oligonucleotide: PDCD1-317
cggccugcugggcagcc

SEQ ID NO: 880 - RNA, 17 nt, Artificial Sequence
  Synthetic oligonucleotide: PDCD1-318
gccuggugcugcuaguc

SEQ ID NO: 881 - RNA, 17 nt, Artificial Sequence
  Synthetic oligonucleotide: PDCD1-319
ccuggugcugcuagucu

SEQ ID NO: 882 - RNA, 17 nt, Artificial Sequence
  Synthetic oligonucleotide: PDCD1-320
gcugcuagucugggucc

SEQ ID NO: 883 - RNA, 17 nt, Artificial Sequence
  Synthetic oligonucleotide: PDCD1-321
uggccgucaucugcucc

SEQ ID NO: 884 - RNA, 17 nt, Artificial Sequence
  Synthetic oligonucleotide: PDCD1-322
ggccgucaucugcuccc

SEQ ID NO: 885 - RNA, 17 nt, Artificial Sequence
  Synthetic oligonucleotide: PDCD1-323
ugcucccgggccgcacg

SEQ ID NO: 886 - RNA, 17 nt, Artificial Sequence
  Synthetic oligonucleotide: PDCD1-324
acgucaucccagccccu

SEQ ID NO: 887 - RNA, 17 nt, Artificial Sequence
  Synthetic oligonucleotide: PDCD1-325
caaguguguuucucugc

SEQ ID NO: 888 - RNA, 17 nt, Artificial Sequence
  Synthetic oligonucleotide: PDCD1-326
aaguguguuucucugca

SEQ ID NO: 889 - RNA, 17 nt, Artificial Sequence
  Synthetic oligonucleotide: PDCD1-327
uucucugcagggacaau

SEQ ID NO: 890 - RNA, 17 nt, Artificial Sequence
  Synthetic oligonucleotide: PDCD1-328
cagggacaauaggagcc

SEQ ID NO: 891 - RNA, 17 nt, Artificial Sequence
  Synthetic oligonucleotide: PDCD1-329
auaggagccaggcgcac

SEQ ID NO: 892 - RNA, 17 nt, Artificial Sequence
  Synthetic oligonucleotide: PDCD1-330
gcgcaccggccagcccc

SEQ ID NO: 893 - RNA, 17 nt, Artificial Sequence
  Synthetic oligonucleotide: PDCD1-331
cccuuucuccucaaaga

SEQ ID NO: 894 - RNA, 17 nt, Artificial Sequence
  Synthetic oligonucleotide: PDCD1-332
uuucuccucaaagaagg

SEQ ID NO: 895 - RNA, 17 nt, Artificial Sequence
  Synthetic oligonucleotide: PDCD1-333
cgugccuguguucucug

SEQ ID NO: 896 - RNA, 17 nt, Artificial Sequence
  Synthetic oligonucleotide: PDCD1-334
guguucucuguggacua

SEQ ID NO: 897 - RNA, 17 nt, Artificial Sequence
  Synthetic oligonucleotide: PDCD1-335
uguucucuguggacuau

SEQ ID NO: 898 - RNA, 17 nt, Artificial Sequence
  Synthetic oligonucleotide: PDCD1-336
guucucuguggacuaug

SEQ ID NO: 899 - RNA, 17 nt, Artificial Sequence
  Synthetic oligonucleotide: PDCD1-337
uguggacuauggggagc

SEQ ID NO: 900 - RNA, 17 nt, Artificial Sequence
  Synthetic oligonucleotide: PDCD1-338
gggagcuggauuuccag

SEQ ID NO: 901 - RNA, 17 nt, Artificial Sequence
  Synthetic oligonucleotide: PDCD1-339
guggcgagagaagaccc

SEQ ID NO: 902 - RNA, 17 nt, Artificial Sequence
  Synthetic oligonucleotide: PDCD1-340
cugugucccugagcaga

SEQ ID NO: 903 - RNA, 17 nt, Artificial Sequence
  Synthetic oligonucleotide: PDCD1-341
accauugucuuuccuag

SEQ ID NO: 904 - RNA, 17 nt, Artificial Sequence
  Synthetic oligonucleotide: PDCD1-342
ugucuuuccuagcggaa

SEQ ID NO: 905 - RNA, 17 nt, Artificial Sequence
  Synthetic oligonucleotide: PDCD1-343
gucuuuccuagcggaau

SEQ ID NO: 906 - RNA, 17 nt, Artificial Sequence
  Synthetic oligonucleotide: PDCD1-344
ccucaucccccgcccgc

SEQ ID NO: 907 - RNA, 17 nt, Artificial Sequence
  Synthetic oligonucleotide: PDCD1-345
cucaucccccgcccgca

SEQ ID NO: 908 - RNA, 17 nt, Artificial Sequence
  Synthetic oligonucleotide: PDCD1-346
ucaucccccgcccgcag

SEQ ID NO: 909 - RNA, 17 nt, Artificial Sequence
  Synthetic oligonucleotide: PDCD1-347
cgcaggggcucagcuga

SEQ ID NO: 910 - RNA, 17 nt, Artificial Sequence
  Synthetic oligonucleotide: PDCD1-348
gcucagcugacggcccu

SEQ ID NO: 911 - RNA, 17 nt, Artificial Sequence
  Synthetic oligonucleotide: PDCD1-349
ggagugcccagccacug

SEQ ID NO: 912 - RNA, 17 nt, Artificial Sequence
  Synthetic oligonucleotide: PDCD1-350
ccagccacugaggccug

SEQ ID NO: 913 - RNA, 17 nt, Artificial Sequence
  Synthetic oligonucleotide: PDCD1-351
ccacugaggccugagga

SEQ ID NO: 914 - RNA, 17 nt, Artificial Sequence
  Synthetic oligonucleotide: PDCD1-352
aggauggacacugcucu

SEQ ID NO: 915 - RNA, 17 nt, Artificial Sequence
  Synthetic oligonucleotide: PDCD1-353
cucuuggccccucugac

SEQ ID NO: 916 - RNA, 17 nt, Artificial Sequence
  Synthetic oligonucleotide: PDCD1-354
ccucugaccggcuuccu

SEQ ID NO: 917 - RNA, 20 nt, Artificial Sequence
  Synthetic oligonucleotide: PDCD1-355
gggcacaaaggucagggguu

SEQ ID NO: 918 - RNA, 20 nt, Artificial Sequence
  Synthetic oligonucleotide: PDCD1-356
uggaagggcacaaaggucag

SEQ ID NO: 919 - RNA, 20 nt, Artificial Sequence
  Synthetic oligonucleotide: PDCD1-357
cuggaagggcacaaagguca

SEQ ID NO: 920 - RNA, 20 nt, Artificial Sequence
  Synthetic oligonucleotide: PDCD1-358
ucuggaagggcacaaagguc

SEQ ID NO: 921 - RNA, 20 nt, Artificial Sequence
  Synthetic oligonucleotide: PDCD1-359
uucucucuggaagggcacaa

SEQ ID NO: 922 - RNA, 20 nt, Artificial Sequence
  Synthetic oligonucleotide: PDCD1-360
uucugcccuucucucuggaa

SEQ ID NO: 923 - RNA, 20 nt, Artificial Sequence
  Synthetic oligonucleotide: PDCD1-361
cuucugcccuucucucugga

SEQ ID NO: 924 - RNA, 20 nt, Artificial Sequence
  Synthetic oligonucleotide: PDCD1-362
ggcacuucugcccuucucuc

SEQ ID NO: 925 - RNA, 20 nt, Artificial Sequence
  Synthetic oligonucleotide: PDCD1-363
gaggggcuggggugggcugu

SEQ ID NO: 926 - RNA, 20 nt, Artificial Sequence
  Synthetic oligonucleotide: PDCD1-364
ugaggggcuggggugggcug

SEQ ID NO: 927 - RNA, 20 nt, Artificial Sequence
  Synthetic oligonucleotide: PDCD1-365
ccugggugaggggcuggggu

SEQ ID NO: 928 - RNA, 20 nt, Artificial Sequence
  Synthetic oligonucleotide: PDCD1-366
gccugggugaggggcugggg

SEQ ID NO: 929 - RNA, 20 nt, Artificial Sequence
  Synthetic oligonucleotide: PDCD1-367
cuggccugggugaggggcug

SEQ ID NO: 930 - RNA, 20 nt, Artificial Sequence
  Synthetic oligonucleotide: PDCD1-368
gcuggccugggugaggggcu

SEQ ID NO: 931 - RNA, 20 nt, Artificial Sequence
  Synthetic oligonucleotide: PDCD1-369
ggcuggccugggugaggggc

SEQ ID NO: 932 - RNA, 20 nt, Artificial Sequence
  Synthetic oligonucleotide: PDCD1-370
ggccggcuggccugggugag

SEQ ID NO: 933 - RNA, 20 nt, Artificial Sequence
  Synthetic oligonucleotide: PDCD1-371
uggccggcuggccuggguga

SEQ ID NO: 934 - RNA, 20 nt, Artificial Sequence
  Synthetic oligonucleotide: PDCD1-372
cuggccggcuggccugggug

SEQ ID NO: 935 - RNA, 20 nt, Artificial Sequence
  Synthetic oligonucleotide: PDCD1-373
uggaacuggccggcuggccu

SEQ ID NO: 936 - RNA, 20 nt, Artificial Sequence
  Synthetic oligonucleotide: PDCD1-374
uuggaacuggccggcuggcc

SEQ ID NO: 937 - RNA, 20 nt, Artificial Sequence
  Synthetic oligonucleotide: PDCD1-375
aggguuuggaacuggccggc

SEQ ID NO: 938 - RNA, 20 nt, Artificial Sequence
  Synthetic oligonucleotide: PDCD1-376
caccaggguuuggaacuggc

SEQ ID NO: 939 - RNA, 20 nt, Artificial Sequence
  Synthetic oligonucleotide: PDCD1-377
caaccaccaggguuuggaac

SEQ ID NO: 940 - RNA, 20 nt, Artificial Sequence
  Synthetic oligonucleotide: PDCD1-378
cgacaccaaccaccaggguu

SEQ ID NO: 941 - RNA, 20 nt, Artificial Sequence
  Synthetic oligonucleotide: PDCD1-379
gcccacgacaccaaccacca

SEQ ID NO: 942 - RNA, 20 nt, Artificial Sequence
  Synthetic oligonucleotide: PDCD1-380
cgcccacgacaccaaccacc

SEQ ID NO: 943 - RNA, 20 nt, Artificial Sequence
  Synthetic oligonucleotide: PDCD1-381
gcagcaccaggcugcccagc

SEQ ID NO: 944 - RNA, 20 nt, Artificial Sequence
  Synthetic oligonucleotide: PDCD1-382
ggacccagacuagcagcacc

SEQ ID NO: 945 - RNA, 20 nt, Artificial Sequence
  Synthetic oligonucleotide: PDCD1-383
cccgggagcagaugacggcc

SEQ ID NO: 946 - RNA, 20 nt, Artificial Sequence
  Synthetic oligonucleotide: PDCD1-384
ugcggcccgggagcagauga

SEQ ID NO: 947 - RNA, 20 nt, Artificial Sequence
  Synthetic oligonucleotide: PDCD1-385
gacguuaccucgugcggccc

SEQ ID NO: 948 - RNA, 20 nt, Artificial Sequence
  Synthetic oligonucleotide: PDCD1-386
ugacguuaccucgugcggcc

SEQ ID NO: 949 - RNA, 20 nt, Artificial Sequence
  Synthetic oligonucleotide: PDCD1-387
ugggaugacguuaccucgug

SEQ ID NO: 950 - RNA, 20 nt, Artificial Sequence
  Synthetic oligonucleotide: PDCD1-388
gaaacacacuuggggucacc

SEQ ID NO: 951 - RNA, 20 nt, Artificial Sequence
  Synthetic oligonucleotide: PDCD1-389
ccugcagagaaacacacuug

SEQ ID NO: 952 - RNA, 20 nt, Artificial Sequence
  Synthetic oligonucleotide: PDCD1-390
cccugcagagaaacacacuu

SEQ ID NO: 953 - RNA, 20 nt, Artificial Sequence
  Synthetic oligonucleotide: PDCD1-391
ucccugcagagaaacacacu

SEQ ID NO: 954 - RNA, 20 nt, Artificial Sequence
  Synthetic oligonucleotide: PDCD1-392
caggggcuggccggugcgcc

SEQ ID NO: 955 - RNA, 20 nt, Artificial Sequence
  Synthetic oligonucleotide: PDCD1-393
gagacucaccaggggcuggc

SEQ ID NO: 956 - RNA, 20 nt, Artificial Sequence
  Synthetic oligonucleotide: PDCD1-394
gagugagacucaccaggggc

SEQ ID NO: 957 - RNA, 20 nt, Artificial Sequence
  Synthetic oligonucleotide: PDCD1-395
aaaagagugagacucaccag

SEQ ID NO: 958 - RNA, 20 nt, Artificial Sequence
  Synthetic oligonucleotide: PDCD1-396
gaaaagagugagacucacca

SEQ ID NO: 959 - RNA, 20 nt, Artificial Sequence
  Synthetic oligonucleotide: PDCD1-397
ggaaaagagugagacucacc

SEQ ID NO: 960 - RNA, 20 nt, Artificial Sequence
  Synthetic oligonucleotide: PDCD1-398
ucuuugaggagaaagggaga

SEQ ID NO: 961 - RNA, 20 nt, Artificial Sequence
  Synthetic oligonucleotide: PDCD1-399
uucuuugaggagaaagggag

SEQ ID NO: 962 - RNA, 20 nt, Artificial Sequence
  Synthetic oligonucleotide: PDCD1-400
ccuccuucuuugaggagaaa

SEQ ID NO: 963 - RNA, 20 nt, Artificial Sequence
  Synthetic oligonucleotide: PDCD1-401
uccuccuucuuugaggagaa

SEQ ID NO: 964 - RNA, 20 nt, Artificial Sequence
  Synthetic oligonucleotide: PDCD1-402
ugagggguccuccuucuuug

SEQ ID NO: 965 - RNA, 20 nt, Artificial Sequence
  Synthetic oligonucleotide: PDCD1-403
agaacacaggcacggcugag

SEQ ID NO: 966 - RNA, 20 nt, Artificial Sequence
  Synthetic oligonucleotide: PDCD1-404
gagaacacaggcacggcuga

SEQ ID NO: 967 - RNA, 20 nt, Artificial Sequence
  Synthetic oligonucleotide: PDCD1-405
agagaacacaggcacggcug

SEQ ID NO: 968 - RNA, 20 nt, Artificial Sequence
  Synthetic oligonucleotide: PDCD1-406
guccacagagaacacaggca

SEQ ID NO: 969 - RNA, 20 nt, Artificial Sequence
  Synthetic oligonucleotide: PDCD1-407
ccauaguccacagagaacac

SEQ ID NO: 970 - RNA, 20 nt, Artificial Sequence
  Synthetic oligonucleotide: PDCD1-408
ccggggucuucucucgccac

SEQ ID NO: 971 - RNA, 20 nt, Artificial Sequence
  Synthetic oligonucleotide: PDCD1-409
acagggcacggggggcuccg

SEQ ID NO: 972 - RNA, 20 nt, Artificial Sequence
  Synthetic oligonucleotide: PDCD1-410
cacagggcacggggggcucc

SEQ ID NO: 973 - RNA, 20 nt, Artificial Sequence
  Synthetic oligonucleotide: PDCD1-411
acacagggcacggggggcuc

SEQ ID NO: 974 - RNA, 20 nt, Artificial Sequence
  Synthetic oligonucleotide: PDCD1-412
ucagggacacagggcacggg

SEQ ID NO: 975 - RNA, 20 nt, Artificial Sequence
  Synthetic oligonucleotide: PDCD1-413
cucagggacacagggcacgg

SEQ ID NO: 976 - RNA, 20 nt, Artificial Sequence
  Synthetic oligonucleotide: PDCD1-414
gcucagggacacagggcacg

SEQ ID NO: 977 - RNA, 20 nt, Artificial Sequence
  Synthetic oligonucleotide: PDCD1-415
ugcucagggacacagggcac

SEQ ID NO: 978 - RNA, 20 nt, Artificial Sequence
  Synthetic oligonucleotide: PDCD1-416
cugcucagggacacagggca

SEQ ID NO: 979 - RNA, 20 nt, Artificial Sequence
  Synthetic oligonucleotide: PDCD1-417
uccgucugcucagggacaca

SEQ ID NO: 980 - RNA, 20 nt, Artificial Sequence
  Synthetic oligonucleotide: PDCD1-418
cuccgucugcucagggacac

SEQ ID NO: 981 - RNA, 20 nt, Artificial Sequence
  Synthetic oligonucleotide: PDCD1-419
uggcauacuccgucugcuca

SEQ ID NO: 982 - RNA, 20 nt, Artificial Sequence
  Synthetic oligonucleotide: PDCD1-420
guggcauacuccgucugcuc

SEQ ID NO: 983 - RNA, 20 nt, Artificial Sequence
  Synthetic oligonucleotide: PDCD1-421
uccgcuaggaaagacaaugg

SEQ ID NO: 984 - RNA, 20 nt, Artificial Sequence
  Synthetic oligonucleotide: PDCD1-422
cauuccgcuaggaaagacaa

SEQ ID NO: 985 - RNA, 20 nt, Artificial Sequence
  Synthetic oligonucleotide: PDCD1-423
gaugaggugcccauuccgcu

SEQ ID NO: 986 - RNA, 20 nt, Artificial Sequence
  Synthetic oligonucleotide: PDCD1-424
gccccugcgggcgggggaug

SEQ ID NO: 987 - RNA, 20 nt, Artificial Sequence
  Synthetic oligonucleotide: PDCD1-425
agcugagccccugcgggcgg

SEQ ID NO: 988 - RNA, 20 nt, Artificial Sequence
  Synthetic oligonucleotide: PDCD1-426
cagcugagccccugcgggcg

SEQ ID NO: 989 - RNA, 20 nt, Artificial Sequence
  Synthetic oligonucleotide: PDCD1-427
ucagcugagccccugcgggc

SEQ ID NO: 990 - RNA, 20 nt, Artificial Sequence
  Synthetic oligonucleotide: PDCD1-428
gucagcugagccccugcggg

SEQ ID NO: 991 - RNA, 20 nt, Artificial Sequence
  Synthetic oligonucleotide: PDCD1-429
gccgucagcugagccccugc

SEQ ID NO: 992 - RNA, 20 nt, Artificial Sequence
  Synthetic oligonucleotide: PDCD1-430
ggccgucagcugagccccug

SEQ ID NO: 993 - RNA, 20 nt, Artificial Sequence
  Synthetic oligonucleotide: PDCD1-431
ucaguggcugggcacuccga

SEQ ID NO: 994 - RNA, 20 nt, Artificial Sequence
  Synthetic oligonucleotide: PDCD1-432
cucaguggcugggcacuccg

SEQ ID NO: 995 - RNA, 20 nt, Artificial Sequence
  Synthetic oligonucleotide: PDCD1-433
auccucaggccucaguggcu

SEQ ID NO: 996 - RNA, 20 nt, Artificial Sequence
  Synthetic oligonucleotide: PDCD1-434
cauccucaggccucaguggc

SEQ ID NO: 997 - RNA, 20 nt, Artificial Sequence
  Synthetic oligonucleotide: PDCD1-435
uguccauccucaggccucag

SEQ ID NO: 998 - RNA, 20 nt, Artificial Sequence
  Synthetic oligonucleotide: PDCD1-436
caagagcaguguccauccuc

SEQ ID NO: 999 - RNA, 20 nt, Artificial Sequence
  Synthetic oligonucleotide: PDCD1-437
gccaaggaagccggucagag

SEQ ID NO: 1000 - RNA, 20 nt, Artificial Sequence
  Synthetic oligonucleotide: PDCD1-438
ggccaaggaagccggucaga

SEQ ID NO: 1001 - RNA, 20 nt, Artificial Sequence
  Synthetic oligonucleotide: PDCD1-439
uggccaaggaagccggucag

SEQ ID NO: 1002 - RNA, 20 nt, Artificial Sequence
  Synthetic oligonucleotide: PDCD1-440
acacugguggccaaggaagc

SEQ ID NO: 1003 - RNA, 20 nt, Artificial Sequence
  Synthetic oligonucleotide: PDCD1-441
cugcagaacacugguggcca

SEQ ID NO: 1004 - RNA, 17 nt, Artificial Sequence
  Synthetic oligonucleotide: PDCD1-442
cacaaaggucagggguu

SEQ ID NO: 1005 - RNA, 17 nt, Artificial Sequence
  Synthetic oligonucleotide: PDCD1-443
aagggcacaaaggucag

SEQ ID NO: 1006 - RNA, 17 nt, Artificial Sequence
  Synthetic oligonucleotide: PDCD1-444
gaagggcacaaagguca

SEQ ID NO: 1007 - RNA, 17 nt, Artificial Sequence
  Synthetic oligonucleotide: PDCD1-445
ggaagggcacaaagguc

SEQ ID NO: 1008 - RNA, 17 nt, Artificial Sequence
  Synthetic oligonucleotide: PDCD1-446
ucucuggaagggcacaa

SEQ ID NO: 1009 - RNA, 17 nt, Artificial Sequence
  Synthetic oligonucleotide: PDCD1-447
ugcccuucucucuggaa

SEQ ID NO: 1010 - RNA, 17 nt, Artificial Sequence
  Synthetic oligonucleotide: PDCD1-448
cugcccuucucucugga

SEQ ID NO: 1011 - RNA, 17 nt, Artificial Sequence
  Synthetic oligonucleotide: PDCD1-449
acuucugcccuucucuc

SEQ ID NO: 1012 - RNA, 17 nt, Artificial Sequence
  Synthetic oligonucleotide: PDCD1-450
gggcuggggugggcugu

SEQ ID NO: 1013 - RNA, 17 nt, Artificial Sequence
  Synthetic oligonucleotide: PDCD1-451
ggggcuggggugggcug

SEQ ID NO: 1014 - RNA, 17 nt, Artificial Sequence
  Synthetic oligonucleotide: PDCD1-452
gggugaggggcuggggu

SEQ ID NO: 1015 - RNA, 17 nt, Artificial Sequence
  Synthetic oligonucleotide: PDCD1-453
ugggugaggggcugggg

SEQ ID NO: 1016 - RNA, 17 nt, Artificial Sequence
  Synthetic oligonucleotide: PDCD1-454
gccugggugaggggcug

SEQ ID NO: 1017 - RNA, 17 nt, Artificial Sequence
  Synthetic oligonucleotide: PDCD1-455
ggccugggugaggggcu

SEQ ID NO: 1018 - RNA, 17 nt, Artificial Sequence
  Synthetic oligonucleotide: PDCD1-456
uggccugggugaggggc

SEQ ID NO: 1019 - RNA, 17 nt, Artificial Sequence
  Synthetic oligonucleotide: PDCD1-457
cggcuggccugggugag

SEQ ID NO: 1020 - RNA, 17 nt, Artificial Sequence
  Synthetic oligonucleotide: PDCD1-458
ccggcuggccuggguga

SEQ ID NO: 1021 - RNA, 17 nt, Artificial Sequence
  Synthetic oligonucleotide: PDCD1-459
gccggcuggccugggug

SEQ ID NO: 1022 - RNA, 17 nt, Artificial Sequence
  Synthetic oligonucleotide: PDCD1-460
aacuggccggcuggccu

SEQ ID NO: 1023 - RNA, 17 nt, Artificial Sequence
  Synthetic oligonucleotide: PDCD1-461
gaacuggccggcuggcc

SEQ ID NO: 1024 - RNA, 17 nt, Artificial Sequence
  Synthetic oligonucleotide: PDCD1-462
guuuggaacuggccggc

SEQ ID NO: 1025 - RNA, 17 nt, Artificial Sequence
  Synthetic oligonucleotide: PDCD1-463
caggguuuggaacuggc

SEQ ID NO: 1026 - RNA, 17 nt, Artificial Sequence
  Synthetic oligonucleotide: PDCD1-464
ccaccaggguuuggaac

SEQ ID NO: 1027 - RNA, 17 nt, Artificial Sequence
  Synthetic oligonucleotide: PDCD1-465
caccaaccaccaggguu

SEQ ID NO: 1028 - RNA, 17 nt, Artificial Sequence
  Synthetic oligonucleotide: PDCD1-466
cacgacaccaaccacca

SEQ ID NO: 1029 - RNA, 17 nt, Artificial Sequence
  Synthetic oligonucleotide: PDCD1-467
ccacgacaccaaccacc

SEQ ID NO: 1030 - RNA, 17 nt, Artificial Sequence
  Synthetic oligonucleotide: PDCD1-468
gcaccaggcugcccagc

SEQ ID NO: 1031 - RNA, 17 nt, Artificial Sequence
  Synthetic oligonucleotide: PDCD1-469
cccagacuagcagcacc

SEQ ID NO: 1032 - RNA, 17 nt, Artificial Sequence
  Synthetic oligonucleotide: PDCD1-470
gggagcagaugacggcc

SEQ ID NO: 1033 - RNA, 17 nt, Artificial Sequence
  Synthetic oligonucleotide: PDCD1-471
ggcccgggagcagauga

SEQ ID NO: 1034 - RNA, 17 nt, Artificial Sequence
  Synthetic oligonucleotide: PDCD1-472
guuaccucgugcggccc

SEQ ID NO: 1035 - RNA, 17 nt, Artificial Sequence
  Synthetic oligonucleotide: PDCD1-473
cguuaccucgugcggcc

SEQ ID NO: 1036 - RNA, 17 nt, Artificial Sequence
  Synthetic oligonucleotide: PDCD1-474
gaugacguuaccucgug

SEQ ID NO: 1037 - RNA, 17 nt, Artificial Sequence
  Synthetic oligonucleotide: PDCD1-475
acacacuuggggucacc

SEQ ID NO: 1038 - RNA, 17 nt, Artificial Sequence
  Synthetic oligonucleotide: PDCD1-476
gcagagaaacacacuug

SEQ ID NO: 1039 - RNA, 17 nt, Artificial Sequence
  Synthetic oligonucleotide: PDCD1-477
ugcagagaaacacacuu

SEQ ID NO: 1040 - RNA, 17 nt, Artificial Sequence
  Synthetic oligonucleotide: PDCD1-478
cugcagagaaacacacu

SEQ ID NO: 1041 - RNA, 17 nt, Artificial Sequence
  Synthetic oligonucleotide: PDCD1-479
gggcuggccggugcgcc

SEQ ID NO: 1042 - RNA, 17 nt, Artificial Sequence
  Synthetic oligonucleotide: PDCD1-480
acucaccaggggcuggc

SEQ ID NO: 1043 - RNA, 17 nt, Artificial Sequence
  Synthetic oligonucleotide: PDCD1-481
ugagacucaccaggggc

SEQ ID NO: 1044 - RNA, 17 nt, Artificial Sequence
  Synthetic oligonucleotide: PDCD1-482
agagugagacucaccag

SEQ ID NO: 1045 - RNA, 17 nt, Artificial Sequence
  Synthetic oligonucleotide: PDCD1-483
aagagugagacucacca

SEQ ID NO: 1046 - RNA, 17 nt, Artificial Sequence
  Synthetic oligonucleotide: PDCD1-484
aaagagugagacucacc

SEQ ID NO: 1047 - RNA, 17 nt, Artificial Sequence
  Synthetic oligonucleotide: PDCD1-485
uugaggagaaagggaga

SEQ ID NO: 1048 - RNA, 17 nt, Artificial Sequence
  Synthetic oligonucleotide: PDCD1-486
uuugaggagaaagggag

SEQ ID NO: 1049 - RNA, 17 nt, Artificial Sequence
  Synthetic oligonucleotide: PDCD1-487
ccuucuuugaggagaaa

SEQ ID NO: 1050 - RNA, 17 nt, Artificial Sequence
  Synthetic oligonucleotide: PDCD1-488
uccuucuuugaggagaa

SEQ ID NO: 1051 - RNA, 17 nt, Artificial Sequence
  Synthetic oligonucleotide: PDCD1-489
gggguccuccuucuuug

SEQ ID NO: 1052 - RNA, 17 nt, Artificial Sequence
  Synthetic oligonucleotide: PDCD1-490
acacaggcacggcugag

SEQ ID NO: 1053 - RNA, 17 nt, Artificial Sequence
  Synthetic oligonucleotide: PDCD1-491
aacacaggcacggcuga

SEQ ID NO: 1054 - RNA, 17 nt, Artificial Sequence
  Synthetic oligonucleotide: PDCD1-492
gaacacaggcacggcug

SEQ ID NO: 1055 - RNA, 17 nt, Artificial Sequence
  Synthetic oligonucleotide: PDCD1-493
cacagagaacacaggca

SEQ ID NO: 1056 - RNA, 17 nt, Artificial Sequence
  Synthetic oligonucleotide: PDCD1-494
uaguccacagagaacac

SEQ ID NO: 1057 - RNA, 17 nt, Artificial Sequence
  Synthetic oligonucleotide: PDCD1-495
gggucuucucucgccac

SEQ ID NO: 1058 - RNA, 17 nt, Artificial Sequence
  Synthetic oligonucleotide: PDCD1-496
gggcacggggggcuccg

SEQ ID NO: 1059 - RNA, 17 nt, Artificial Sequence
  Synthetic oligonucleotide: PDCD1-497
agggcacggggggcucc

SEQ ID NO: 1060 - RNA, 17 nt, Artificial Sequence
  Synthetic oligonucleotide: PDCD1-498
cagggcacggggggcuc

SEQ ID NO: 1061 - RNA, 17 nt, Artificial Sequence
  Synthetic oligonucleotide: PDCD1-499
gggacacagggcacggg

SEQ ID NO: 1062 - RNA, 17 nt, Artificial Sequence
  Synthetic oligonucleotide: PDCD1-500
agggacacagggcacgg

SEQ ID NO: 1063 - RNA, 17 nt, Artificial Sequence
  Synthetic oligonucleotide: PDCD1-501
cagggacacagggcacg

SEQ ID NO: 1064 - RNA, 17 nt, Artificial Sequence
  Synthetic oligonucleotide: PDCD1-502
ucagggacacagggcac

SEQ ID NO: 1065 - RNA, 17 nt, Artificial Sequence
  Synthetic oligonucleotide: PDCD1-503
cucagggacacagggca

SEQ ID NO: 1066 - RNA, 17 nt, Artificial Sequence
  Synthetic oligonucleotide: PDCD1-504
gucugcucagggacaca

SEQ ID NO: 1067 - RNA, 17 nt, Artificial Sequence
  Synthetic oligonucleotide: PDCD1-505
cgucugcucagggacac

SEQ ID NO: 1068 - RNA, 17 nt, Artificial Sequence
  Synthetic oligonucleotide: PDCD1-506
cauacuccgucugcuca

SEQ ID NO: 1069 - RNA, 17 nt, Artificial Sequence
  Synthetic oligonucleotide: PDCD1-507
gcauacuccgucugcuc

SEQ ID NO: 1070 - RNA, 17 nt, Artificial Sequence
  Synthetic oligonucleotide: PDCD1-508
gcuaggaaagacaaugg

SEQ ID NO: 1071 - RNA, 17 nt, Artificial Sequence
  Synthetic oligonucleotide: PDCD1-509
uccgcuaggaaagacaa

SEQ ID NO: 1072 - RNA, 17 nt, Artificial Sequence
  Synthetic oligonucleotide: PDCD1-510
gaggugcccauuccgcu

SEQ ID NO: 1073 - RNA, 17 nt, Artificial Sequence
  Synthetic oligonucleotide: PDCD1-511
ccugcgggcgggggaug

SEQ ID NO: 1074 - RNA, 17 nt, Artificial Sequence
  Synthetic oligonucleotide: PDCD1-512
ugagccccugcgggcgg

SEQ ID NO: 1075 - RNA, 17 nt, Artificial Sequence
  Synthetic oligonucleotide: PDCD1-513
cugagccccugcgggcg

SEQ ID NO: 1076 - RNA, 17 nt, Artificial Sequence
  Synthetic oligonucleotide: PDCD1-514
gcugagccccugcgggc

SEQ ID NO: 1077 - RNA, 17 nt, Artificial Sequence
  Synthetic oligonucleotide: PDCD1-515
agcugagccccugcggg

SEQ ID NO: 1078 - RNA, 17 nt, Artificial Sequence
  Synthetic oligonucleotide: PDCD1-516
gucagcugagccccugc

SEQ ID NO: 1079 - RNA, 17 nt, Artificial Sequence
  Synthetic oligonucleotide: PDCD1-517
cgucagcugagccccug

SEQ ID NO: 1080 - RNA, 17 nt, Artificial Sequence
  Synthetic oligonucleotide: PDCD1-518
guggcugggcacuccga

SEQ ID NO: 1081 - RNA, 17 nt, Artificial Sequence
  Synthetic oligonucleotide: PDCD1-519
aguggcugggcacuccg

SEQ ID NO: 1082 - RNA, 17 nt, Artificial Sequence
  Synthetic oligonucleotide: PDCD1-520
cucaggccucaguggcu

SEQ ID NO: 1083 - RNA, 17 nt, Artificial Sequence
  Synthetic oligonucleotide: PDCD1-521
ccucaggccucaguggc

SEQ ID NO: 1084 - RNA, 17 nt, Artificial Sequence
  Synthetic oligonucleotide: PDCD1-522
ccauccucaggccucag

SEQ ID NO: 1085 - RNA, 17 nt, Artificial Sequence
  Synthetic oligonucleotide: PDCD1-523
gagcaguguccauccuc

SEQ ID NO: 1086 - RNA, 17 nt, Artificial Sequence
  Synthetic oligonucleotide: PDCD1-524
aaggaagccggucagag

SEQ ID NO: 1087 - RNA, 17 nt, Artificial Sequence
  Synthetic oligonucleotide: PDCD1-525
caaggaagccggucaga

SEQ ID NO: 1088 - RNA, 17 nt, Artificial Sequence
  Synthetic oligonucleotide: PDCD1-526
ccaaggaagccggucag

SEQ ID NO: 1089 - RNA, 17 nt, Artificial Sequence
  Synthetic oligonucleotide: PDCD1-527
cugguggccaaggaagc

SEQ ID NO: 1090 - RNA, 17 nt, Artificial Sequence
  Synthetic oligonucleotide: PDCD1-528
cagaacacugguggcca

SEQ ID NO: 1091 - RNA, 20 nt, Artificial Sequence
  Synthetic oligonucleotide: PDCD1-529
caggcgcccuggccagucgu

SEQ ID NO: 1092 - RNA, 20 nt, Artificial Sequence
  Synthetic oligonucleotide: PDCD1-530
ucgucugggcggugcuacaa

SEQ ID NO: 1093 - RNA, 20 nt, Artificial Sequence
  Synthetic oligonucleotide: PDCD1-531
gcuacaacugggcuggcggc

SEQ ID NO: 1094 - RNA, 20 nt, Artificial Sequence
  Synthetic oligonucleotide: PDCD1-532
ccaggaugguucuuagguag

SEQ ID NO: 1095 - RNA, 20 nt, Artificial Sequence
  Synthetic oligonucleotide: PDCD1-115
caggaugguucuuagguagg

SEQ ID NO: 1096 - RNA, 20 nt, Artificial Sequence
  Synthetic oligonucleotide: PDCD1-534
ucagacuccccagacaggcc

SEQ ID NO: 1097 - RNA, 20 nt, Artificial Sequence
  Synthetic oligonucleotide: PDCD1-2
cagacuccccagacaggccc

SEQ ID NO: 1098 - RNA, 20 nt, Artificial Sequence
  Synthetic oligonucleotide: PDCD1-536
cccagcccugcucgugguga

SEQ ID NO: 1099 - RNA, 20 nt, Artificial Sequence
  Synthetic oligonucleotide: PDCD1-537
agcccugcucguggugaccg

SEQ ID NO: 1100 - RNA, 20 nt, Artificial Sequence
  Synthetic oligonucleotide: PDCD1-4
gcccugcucguggugaccga

SEQ ID NO: 1101 - RNA, 20 nt, Artificial Sequence
  Synthetic oligonucleotide: PDCD1-5
cccugcucguggugaccgaa

SEQ ID NO: 1102 - RNA, 20 nt, Artificial Sequence
  Synthetic oligonucleotide: PDCD1-540
ccugcagcuucuccaacaca

SEQ ID NO: 1103 - RNA, 20 nt, Artificial Sequence
  Synthetic oligonucleotide: PDCD1-7
cugcagcuucuccaacacau

SEQ ID NO: 1104 - RNA, 20 nt, Artificial Sequence
  Synthetic oligonucleotide: PDCD1-542
gcagcuucuccaacacaucg

SEQ ID NO: 1105 - RNA, 20 nt, Artificial Sequence
  Synthetic oligonucleotide: PDCD1-543
ucgugcuaaacugguaccgc

SEQ ID NO: 1106 - RNA, 20 nt, Artificial Sequence
  Synthetic oligonucleotide: PDCD1-544
gcaugagccccagcaaccag

SEQ ID NO: 1107 - RNA, 20 nt, Artificial Sequence
  Synthetic oligonucleotide: PDCD1-545
ggacaagcuggccgccuucc

SEQ ID NO: 1108 - RNA, 20 nt, Artificial Sequence
  Synthetic oligonucleotide: PDCD1-546
acaagcuggccgccuucccc

SEQ ID NO: 1109 - RNA, 20 nt, Artificial Sequence
  Synthetic oligonucleotide: PDCD1-547
aggaccgcagccagcccggc

SEQ ID NO: 1110 - RNA, 20 nt, Artificial Sequence
  Synthetic oligonucleotide: PDCD1-548
ccgugucacacaacugccca

SEQ ID NO: 1111 - RNA, 20 nt, Artificial Sequence
  Synthetic oligonucleotide: PDCD1-549
ccaacgggcgugacuuccac

SEQ ID NO: 1112 - RNA, 20 nt, Artificial Sequence
  Synthetic oligonucleotide: PDCD1-550
gacuuccacaugagcguggu

SEQ ID NO: 1113 - RNA, 20 nt, Artificial Sequence
  Synthetic oligonucleotide: PDCD1-551
ugacagcggcaccuaccucu

SEQ ID NO: 1114 - RNA, 20 nt, Artificial Sequence
  Synthetic oligonucleotide: PDCD1-21
gacagcggcaccuaccucug

SEQ ID NO: 1115 - RNA, 20 nt, Artificial Sequence
  Synthetic oligonucleotide: PDCD1-553
ggcccccaaggcgcagauca

SEQ ID NO: 1116 - RNA, 20 nt, Artificial Sequence
  Synthetic oligonucleotide: PDCD1-554
cccccaaggcgcagaucaaa

SEQ ID NO: 1117 - RNA, 20 nt, Artificial Sequence
  Synthetic oligonucleotide: PDCD1-555
gcgcagaucaaagagagccu

SEQ ID NO: 1118 - RNA, 20 nt, Artificial Sequence
  Synthetic oligonucleotide: PDCD1-556
gaucaaagagagccugcggg

SEQ ID NO: 1119 - RNA, 20 nt, Artificial Sequence
  Synthetic oligonucleotide: PDCD1-557
gagagccugcgggcagagcu

SEQ ID NO: 1120 - RNA, 17 nt, Artificial Sequence
  Synthetic oligonucleotide: PDCD1-558
gcgcccuggccagucgu

SEQ ID NO: 1121 - RNA, 17 nt, Artificial Sequence
  Synthetic oligonucleotide: PDCD1-559
ucugggcggugcuacaa

SEQ ID NO: 1122 - RNA, 17 nt, Artificial Sequence
  Synthetic oligonucleotide: PDCD1-560
acaacugggcuggcggc

SEQ ID NO: 1123 - RNA, 17 nt, Artificial Sequence
  Synthetic oligonucleotide: PDCD1-561
ggaugguucuuagguag

SEQ ID NO: 1124 - RNA, 17 nt, Artificial Sequence
  Synthetic oligonucleotide: PDCD1-242
gaugguucuuagguagg

SEQ ID NO: 1125 - RNA, 17 nt, Artificial Sequence
  Synthetic oligonucleotide: PDCD1-563
gacuccccagacaggcc

SEQ ID NO: 1126 - RNA, 17 nt, Artificial Sequence
  Synthetic oligonucleotide: PDCD1-129
acuccccagacaggccc

SEQ ID NO: 1127 - RNA, 17 nt, Artificial Sequence
  Synthetic oligonucleotide: PDCD1-565
agcccugcucgugguga

SEQ ID NO: 1128 - RNA, 17 nt, Artificial Sequence
  Synthetic oligonucleotide: PDCD1-566
ccugcucguggugaccg

SEQ ID NO: 1129 - RNA, 17 nt, Artificial Sequence
  Synthetic oligonucleotide: PDCD1-131
cugcucguggugaccga

SEQ ID NO: 1130 - RNA, 17 nt, Artificial Sequence
  Synthetic oligonucleotide: PDCD1-132
ugcucguggugaccgaa

SEQ ID NO: 1131 - RNA, 17 nt, Artificial Sequence
  Synthetic oligonucleotide: PDCD1-569
gcagcuucuccaacaca

SEQ ID NO: 1132 - RNA, 17 nt, Artificial Sequence
  Synthetic oligonucleotide: PDCD1-134
cagcuucuccaacacau

SEQ ID NO: 1133 - RNA, 17 nt, Artificial Sequence
  Synthetic oligonucleotide: PDCD1-571
gcuucuccaacacaucg

SEQ ID NO: 1134 - RNA, 17 nt, Artificial Sequence
  Synthetic oligonucleotide: PDCD1-572
ugcuaaacugguaccgc

SEQ ID NO: 1135 - RNA, 17 nt, Artificial Sequence
  Synthetic oligonucleotide: PDCD1-573
ugagccccagcaaccag

SEQ ID NO: 1136 - RNA, 17 nt, Artificial Sequence
  Synthetic oligonucleotide: PDCD1-574
caagcuggccgccuucc

SEQ ID NO: 1137 - RNA, 17 nt, Artificial Sequence
  Synthetic oligonucleotide: PDCD1-575
agcuggccgccuucccc

SEQ ID NO: 1138 - RNA, 17 nt, Artificial Sequence
  Synthetic oligonucleotide: PDCD1-576
accgcagccagcccggc

SEQ ID NO: 1139 - RNA, 17 nt, Artificial Sequence
  Synthetic oligonucleotide: PDCD1-577
ugucacacaacugccca

SEQ ID NO: 1140 - RNA, 17 nt, Artificial Sequence
  Synthetic oligonucleotide: PDCD1-578
acgggcgugacuuccac

SEQ ID NO: 1141 - RNA, 17 nt, Artificial Sequence
  Synthetic oligonucleotide: PDCD1-579
uuccacaugagcguggu

SEQ ID NO: 1142 - RNA, 17 nt, Artificial Sequence
  Synthetic oligonucleotide: PDCD1-580
cagcggcaccuaccucu

SEQ ID NO: 1143 - RNA, 17 nt, Artificial Sequence
  Synthetic oligonucleotide: PDCD1-148
agcggcaccuaccucug

SEQ ID NO: 1144 - RNA, 17 nt, Artificial Sequence
  Synthetic oligonucleotide: PDCD1-582
ccccaaggcgcagauca

SEQ ID NO: 1145 - RNA, 17 nt, Artificial Sequence
  Synthetic oligonucleotide: PDCD1-583
ccaaggcgcagaucaaa

SEQ ID NO: 1146 - RNA, 17 nt, Artificial Sequence
  Synthetic oligonucleotide: PDCD1-584
cagaucaaagagagccu

SEQ ID NO: 1147 - RNA, 17 nt, Artificial Sequence
  Synthetic oligonucleotide: PDCD1-585
caaagagagccugcggg

SEQ ID NO: 1148 - RNA, 17 nt, Artificial Sequence
  Synthetic oligonucleotide: PDCD1-586
agccugcgggcagagcu

SEQ ID NO: 1149 - RNA, 20 nt, Artificial Sequence
  Synthetic oligonucleotide: PDCD1-587
caugccuggagcagccccac

SEQ ID NO: 1150 - RNA, 20 nt, Artificial Sequence
  Synthetic oligonucleotide: PDCD1-127
gccugugggaucugcaugcc

SEQ ID NO: 1151 - RNA, 20 nt, Artificial Sequence
  Synthetic oligonucleotide: PDCD1-589
cgccugugggaucugcaugc

SEQ ID NO: 1152 - RNA, 20 nt, Artificial Sequence
  Synthetic oligonucleotide: PDCD1-125
acgacuggccagggcgccug

SEQ ID NO: 1153 - RNA, 20 nt, Artificial Sequence
  Synthetic oligonucleotide: PDCD1-591
gacgacuggccagggcgccu

SEQ ID NO: 1154 - RNA, 20 nt, Artificial Sequence
  Synthetic oligonucleotide: PDCD1-592
gcaccgcccagacgacuggc

SEQ ID NO: 1155 - RNA, 20 nt, Artificial Sequence
  Synthetic oligonucleotide: PDCD1-593
accgccgaccccaccuaccu

SEQ ID NO: 1156 - RNA, 20 nt, Artificial Sequence
  Synthetic oligonucleotide: PDCD1-98
gagauggagagaggugagga

SEQ ID NO: 1157 - RNA, 20 nt, Artificial Sequence
  Synthetic oligonucleotide: PDCD1-595
agagauggagagaggugagg

SEQ ID NO: 1158 - RNA, 20 nt, Artificial Sequence
  Synthetic oligonucleotide: PDCD1-97
cugagagauggagagaggug

SEQ ID NO: 1159 - RNA, 20 nt, Artificial Sequence
  Synthetic oligonucleotide: PDCD1-597
ucugagagauggagagaggu

SEQ ID NO: 1160 - RNA, 20 nt, Artificial Sequence
  Synthetic oligonucleotide: PDCD1-598
agucugagagauggagagag

SEQ ID NO: 1161 - RNA, 20 nt, Artificial Sequence
  Synthetic oligonucleotide: PDCD1-599
uggggagucugagagaugga

SEQ ID NO: 1162 - RNA, 20 nt, Artificial Sequence
  Synthetic oligonucleotide: PDCD1-600
ucuggggagucugagagaug

SEQ ID NO: 1163 - RNA, 20 nt, Artificial Sequence
  Synthetic oligonucleotide: PDCD1-95
ugucuggggagucugagaga

SEQ ID NO: 1164 - RNA, 20 nt, Artificial Sequence
  Synthetic oligonucleotide: PDCD1-602
cugucuggggagucugagag

SEQ ID NO: 1165 - RNA, 20 nt, Artificial Sequence
  Synthetic oligonucleotide: PDCD1-603
agggccugucuggggagucu

SEQ ID NO: 1166 - RNA, 20 nt, Artificial Sequence
  Synthetic oligonucleotide: PDCD1-604
ccagggccugucuggggagu

SEQ ID NO: 1167 - RNA, 20 nt, Artificial Sequence
  Synthetic oligonucleotide: PDCD1-94
gggguuccagggccugucug

SEQ ID NO: 1168 - RNA, 20 nt, Artificial Sequence
  Synthetic oligonucleotide: PDCD1-93
ggggguuccagggccugucu

SEQ ID NO: 1169 - RNA, 20 nt, Artificial Sequence
  Synthetic oligonucleotide: PDCD1-92
gggggguuccagggccuguc

SEQ ID NO: 1170 - RNA, 20 nt, Artificial Sequence
  Synthetic oligonucleotide: PDCD1-608
ggggggguuccagggccugu

SEQ ID NO: 1171 - RNA, 20 nt, Artificial Sequence
  Synthetic oligonucleotide: PDCD1-609
gggagaagguggggggguuc

SEQ ID NO: 1172 - RNA, 20 nt, Artificial Sequence
  Synthetic oligonucleotide: PDCD1-87
cagggcuggggagaaggugg

SEQ ID NO: 1173 - RNA, 20 nt, Artificial Sequence
  Synthetic oligonucleotide: PDCD1-86
gcagggcuggggagaaggug

SEQ ID NO: 1174 - RNA, 20 nt, Artificial Sequence
  Synthetic oligonucleotide: PDCD1-85
agcagggcuggggagaaggu

SEQ ID NO: 1175 - RNA, 20 nt, Artificial Sequence
  Synthetic oligonucleotide: PDCD1-84
gagcagggcuggggagaagg

SEQ ID NO: 1176 - RNA, 20 nt, Artificial Sequence
  Synthetic oligonucleotide: PDCD1-614
cgagcagggcuggggagaag

SEQ ID NO: 1177 - RNA, 20 nt, Artificial Sequence
  Synthetic oligonucleotide: PDCD1-615
ucaccacgagcagggcuggg

SEQ ID NO: 1178 - RNA, 20 nt, Artificial Sequence
  Synthetic oligonucleotide: PDCD1-82
ggucaccacgagcagggcug

SEQ ID NO: 1179 - RNA, 20 nt, Artificial Sequence
  Synthetic oligonucleotide: PDCD1-81
cggucaccacgagcagggcu

SEQ ID NO: 1180 - RNA, 20 nt, Artificial Sequence
  Synthetic oligonucleotide: PDCD1-80
ucggucaccacgagcagggc

SEQ ID NO: 1181 - RNA, 20 nt, Artificial Sequence
  Synthetic oligonucleotide: PDCD1-619
uucggucaccacgagcaggg

SEQ ID NO: 1182 - RNA, 20 nt, Artificial Sequence
  Synthetic oligonucleotide: PDCD1-620
uccccuucggucaccacgag

SEQ ID NO: 1183 - RNA, 20 nt, Artificial Sequence
  Synthetic oligonucleotide: PDCD1-621
cguuguccccuucggucacc

SEQ ID NO: 1184 - RNA, 20 nt, Artificial Sequence
  Synthetic oligonucleotide: PDCD1-622
auguguuggagaagcugcag

SEQ ID NO: 1185 - RNA, 20 nt, Artificial Sequence
  Synthetic oligonucleotide: PDCD1-623
cgaagcucuccgauguguug

SEQ ID NO: 1186 - RNA, 20 nt, Artificial Sequence
  Synthetic oligonucleotide: PDCD1-73
cacgaagcucuccgaugugu

SEQ ID NO: 1187 - RNA, 20 nt, Artificial Sequence
  Synthetic oligonucleotide: PDCD1-625
gcacgaagcucuccgaugug

SEQ ID NO: 1188 - RNA, 20 nt, Artificial Sequence
  Synthetic oligonucleotide: PDCD1-626
ucaugcgguaccaguuuagc

SEQ ID NO: 1189 - RNA, 20 nt, Artificial Sequence
  Synthetic oligonucleotide: PDCD1-69
cagcuuguccgucugguugc

SEQ ID NO: 1190 - RNA, 20 nt, Artificial Sequence
  Synthetic oligonucleotide: PDCD1-628
ccagcuuguccgucugguug

SEQ ID NO: 1191 - RNA, 20 nt, Artificial Sequence
  Synthetic oligonucleotide: PDCD1-65
cgggcuggcugcgguccucg

SEQ ID NO: 1192 - RNA, 20 nt, Artificial Sequence
  Synthetic oligonucleotide: PDCD1-64
ccgggcuggcugcgguccuc

SEQ ID NO: 1193 - RNA, 20 nt, Artificial Sequence
  Synthetic oligonucleotide: PDCD1-63
gccgggcuggcugcgguccu

SEQ ID NO: 1194 - RNA, 20 nt, Artificial Sequence
  Synthetic oligonucleotide: PDCD1-632
ggccgggcuggcugcggucc

SEQ ID NO: 1195 - RNA, 20 nt, Artificial Sequence
  Synthetic oligonucleotide: PDCD1-633
cacggaagcggcaguccugg

SEQ ID NO: 1196 - RNA, 20 nt, Artificial Sequence
  Synthetic oligonucleotide: PDCD1-56
cguugggcaguugugugaca

SEQ ID NO: 1197 - RNA, 20 nt, Artificial Sequence
  Synthetic oligonucleotide: PDCD1-635
ccguugggcaguugugugac

SEQ ID NO: 1198 - RNA, 20 nt, Artificial Sequence
  Synthetic oligonucleotide: PDCD1-636
ucauguggaagucacgcccg

SEQ ID NO: 1199 - RNA, 20 nt, Artificial Sequence
  Synthetic oligonucleotide: PDCD1-53
gggcccugaccacgcucaug

SEQ ID NO: 1200 - RNA, 20 nt, Artificial Sequence
  Synthetic oligonucleotide: PDCD1-638
cgggcccugaccacgcucau

SEQ ID NO: 1201 - RNA, 20 nt, Artificial Sequence
  Synthetic oligonucleotide: PDCD1-639
uaggugccgcugucauugcg

SEQ ID NO: 1202 - RNA, 20 nt, Artificial Sequence
  Synthetic oligonucleotide: PDCD1-640
gggccagggagauggcccca

SEQ ID NO: 1203 - RNA, 20 nt, Artificial Sequence
  Synthetic oligonucleotide: PDCD1-47
gaucugcgccuugggggcca

SEQ ID NO: 1204 - RNA, 20 nt, Artificial Sequence
  Synthetic oligonucleotide: PDCD1-46
ugaucugcgccuugggggcc

SEQ ID NO: 1205 - RNA, 20 nt, Artificial Sequence
  Synthetic oligonucleotide: PDCD1-643
uugaucugcgccuugggggc

SEQ ID NO: 1206 - RNA, 20 nt, Artificial Sequence
  Synthetic oligonucleotide: PDCD1-43
cucucuuugaucugcgccuu

SEQ ID NO: 1207 - RNA, 20 nt, Artificial Sequence
  Synthetic oligonucleotide: PDCD1-42
gcucucuuugaucugcgccu

SEQ ID NO: 1208 - RNA, 20 nt, Artificial Sequence
  Synthetic oligonucleotide: PDCD1-646
ggcucucuuugaucugcgcc

SEQ ID NO: 1209 - RNA, 17 nt, Artificial Sequence
  Synthetic oligonucleotide: PDCD1-647
gccuggagcagccccac

SEQ ID NO: 1210 - RNA, 17 nt, Artificial Sequence
  Synthetic oligonucleotide: PDCD1-254
ugugggaucugcaugcc

SEQ ID NO: 1211 - RNA, 17 nt, Artificial Sequence
  Synthetic oligonucleotide: PDCD1-649
cugugggaucugcaugc

SEQ ID NO: 1212 - RNA, 17 nt, Artificial Sequence
  Synthetic oligonucleotide: PDCD1-252
acuggccagggcgccug

SEQ ID NO: 1213 - RNA, 17 nt, Artificial Sequence
  Synthetic oligonucleotide: PDCD1-651
gacuggccagggcgccu

SEQ ID NO: 1214 - RNA, 17 nt, Artificial Sequence
  Synthetic oligonucleotide: PDCD1-652
ccgcccagacgacuggc

SEQ ID NO: 1215 - RNA, 17 nt, Artificial Sequence
  Synthetic oligonucleotide: PDCD1-653
gccgaccccaccuaccu

SEQ ID NO: 1216 - RNA, 17 nt, Artificial Sequence
  Synthetic oligonucleotide: PDCD1-225
auggagagaggugagga

SEQ ID NO: 1217 - RNA, 17 nt, Artificial Sequence
  Synthetic oligonucleotide: PDCD1-655
gauggagagaggugagg

SEQ ID NO: 1218 - RNA, 17 nt, Artificial Sequence
  Synthetic oligonucleotide: PDCD1-224
agagauggagagaggug

SEQ ID NO: 1219 - RNA, 17 nt, Artificial Sequence
  Synthetic oligonucleotide: PDCD1-657
gagagauggagagaggu

SEQ ID NO: 1220 - RNA, 17 nt, Artificial Sequence
  Synthetic oligonucleotide: PDCD1-658
cugagagauggagagag

SEQ ID NO: 1221 - RNA, 17 nt, Artificial Sequence
  Synthetic oligonucleotide: PDCD1-659
ggagucugagagaugga

SEQ ID NO: 1222 - RNA, 17 nt, Artificial Sequence
  Synthetic oligonucleotide: PDCD1-660
ggggagucugagagaug

SEQ ID NO: 1223 - RNA, 17 nt, Artificial Sequence
  Synthetic oligonucleotide: PDCD1-222
cuggggagucugagaga

SEQ ID NO: 1224 - RNA, 17 nt, Artificial Sequence
  Synthetic oligonucleotide: PDCD1-662
ucuggggagucugagag

SEQ ID NO: 1225 - RNA, 17 nt, Artificial Sequence
  Synthetic oligonucleotide: PDCD1-663
gccugucuggggagucu

SEQ ID NO: 1226 - RNA, 17 nt, Artificial Sequence
  Synthetic oligonucleotide: PDCD1-664
gggccugucuggggagu

SEQ ID NO: 1227 - RNA, 17 nt, Artificial Sequence
  Synthetic oligonucleotide: PDCD1-221
guuccagggccugucug

SEQ ID NO: 1228 - RNA, 17 nt, Artificial Sequence
  Synthetic oligonucleotide: PDCD1-220
gguuccagggccugucu

SEQ ID NO: 1229 - RNA, 17 nt, Artificial Sequence
  Synthetic oligonucleotide: PDCD1-219
ggguuccagggccuguc

SEQ ID NO: 1230 - RNA, 17 nt, Artificial Sequence
  Synthetic oligonucleotide: PDCD1-668
gggguuccagggccugu

SEQ ID NO: 1231 - RNA, 17 nt, Artificial Sequence
  Synthetic oligonucleotide: PDCD1-669
agaagguggggggguuc

SEQ ID NO: 1232 - RNA, 17 nt, Artificial Sequence
  Synthetic oligonucleotide: PDCD1-214
ggcuggggagaaggugg

SEQ ID NO: 1233 - RNA, 17 nt, Artificial Sequence
  Synthetic oligonucleotide: PDCD1-213
gggcuggggagaaggug

SEQ ID NO: 1234 - RNA, 17 nt, Artificial Sequence
  Synthetic oligonucleotide: PDCD1-212
agggcuggggagaaggu

SEQ ID NO: 1235 - RNA, 17 nt, Artificial Sequence
  Synthetic oligonucleotide: PDCD1-211
cagggcuggggagaagg

SEQ ID NO: 1236 - RNA, 17 nt, Artificial Sequence
  Synthetic oligonucleotide: PDCD1-674
gcagggcuggggagaag

SEQ ID NO: 1237 - RNA, 17 nt, Artificial Sequence
  Synthetic oligonucleotide: PDCD1-675
ccacgagcagggcuggg

SEQ ID NO: 1238 - RNA, 17 nt, Artificial Sequence
  Synthetic oligonucleotide: PDCD1-209
caccacgagcagggcug

SEQ ID NO: 1239 - RNA, 17 nt, Artificial Sequence
  Synthetic oligonucleotide: PDCD1-208
ucaccacgagcagggcu

SEQ ID NO: 1240 - RNA, 17 nt, Artificial Sequence
  Synthetic oligonucleotide: PDCD1-207
gucaccacgagcagggc

SEQ ID NO: 1241 - RNA, 17 nt, Artificial Sequence
  Synthetic oligonucleotide: PDCD1-679
ggucaccacgagcaggg

SEQ ID NO: 1242 - RNA, 17 nt, Artificial Sequence
  Synthetic oligonucleotide: PDCD1-680
ccuucggucaccacgag

SEQ ID NO: 1243 - RNA, 17 nt, Artificial Sequence
  Synthetic oligonucleotide: PDCD1-681
uguccccuucggucacc

SEQ ID NO: 1244 - RNA, 17 nt, Artificial Sequence
  Synthetic oligonucleotide: PDCD1-682
uguuggagaagcugcag

SEQ ID NO: 1245 - RNA, 17 nt, Artificial Sequence
  Synthetic oligonucleotide: PDCD1-683
agcucuccgauguguug

SEQ ID NO: 1246 - RNA, 17 nt, Artificial Sequence
  Synthetic oligonucleotide: PDCD1-200
gaagcucuccgaugugu

SEQ ID NO: 1247 - RNA, 17 nt, Artificial Sequence
  Synthetic oligonucleotide: PDCD1-685
cgaagcucuccgaugug

SEQ ID NO: 1248 - RNA, 17 nt, Artificial Sequence
  Synthetic oligonucleotide: PDCD1-686
ugcgguaccaguuuagc

SEQ ID NO: 1249 - RNA, 17 nt, Artificial Sequence
  Synthetic oligonucleotide: PDCD1-196
cuuguccgucugguugc

SEQ ID NO: 1250 - RNA, 17 nt, Artificial Sequence
  Synthetic oligonucleotide: PDCD1-688
gcuuguccgucugguug

SEQ ID NO: 1251 - RNA, 17 nt, Artificial Sequence
  Synthetic oligonucleotide: PDCD1-192
gcuggcugcgguccucg

SEQ ID NO: 1252 - RNA, 17 nt, Artificial Sequence
  Synthetic oligonucleotide: PDCD1-191
ggcuggcugcgguccuc

SEQ ID NO: 1253 - RNA, 17 nt, Artificial Sequence
  Synthetic oligonucleotide: PDCD1-190
gggcuggcugcgguccu

SEQ ID NO: 1254 - RNA, 17 nt, Artificial Sequence
  Synthetic oligonucleotide: PDCD1-692
cgggcuggcugcggucc

SEQ ID NO: 1255 - RNA, 17 nt, Artificial Sequence
  Synthetic oligonucleotide: PDCD1-693
ggaagcggcaguccugg

SEQ ID NO: 1256 - RNA, 17 nt, Artificial Sequence
  Synthetic oligonucleotide: PDCD1-183
ugggcaguugugugaca

SEQ ID NO: 1257 - RNA, 17 nt, Artificial Sequence
  Synthetic oligonucleotide: PDCD1-695
uugggcaguugugugac

SEQ ID NO: 1258 - RNA, 17 nt, Artificial Sequence
  Synthetic oligonucleotide: PDCD1-696
uguggaagucacgcccg

SEQ ID NO: 1259 - RNA, 17 nt, Artificial Sequence
  Synthetic oligonucleotide: PDCD1-180
cccugaccacgcucaug

SEQ ID NO: 1260 - RNA, 17 nt, Artificial Sequence
  Synthetic oligonucleotide: PDCD1-698
gcccugaccacgcucau

SEQ ID NO: 1261 - RNA, 17 nt, Artificial Sequence
  Synthetic oligonucleotide: PDCD1-699
gugccgcugucauugcg

SEQ ID NO: 1262 - RNA, 17 nt, Artificial Sequence
  Synthetic oligonucleotide: PDCD1-700
ccagggagauggcccca

SEQ ID NO: 1263 - RNA, 17 nt, Artificial Sequence
  Synthetic oligonucleotide: PDCD1-174
cugcgccuugggggcca

SEQ ID NO: 1264 - RNA, 17 nt, Artificial Sequence
  Synthetic oligonucleotide: PDCD1-173
ucugcgccuugggggcc

SEQ ID NO: 1265 - RNA, 17 nt, Artificial Sequence
  Synthetic oligonucleotide: PDCD1-703
aucugcgccuugggggc

SEQ ID NO: 1266 - RNA, 17 nt, Artificial Sequence
  Synthetic oligonucleotide: PDCD1-170
ucuuugaucugcgccuu

SEQ ID NO: 1267 - RNA, 17 nt, Artificial Sequence
  Synthetic oligonucleotide: PDCD1-169
cucuuugaucugcgccu

SEQ ID NO: 1268 - RNA, 17 nt, Artificial Sequence
  Synthetic oligonucleotide: PDCD1-706
ucucuuugaucugcgcc

SEQ ID NO: 1269 - RNA, 20 nt, Artificial Sequence
  Synthetic oligonucleotide: PDCD1-707
ucagggugacaggugcggcc

SEQ ID NO: 1270 - RNA, 20 nt, Artificial Sequence
  Synthetic oligonucleotide: PDCD1-32
cagggugacaggugcggccu

SEQ ID NO: 1271 - RNA, 20 nt, Artificial Sequence
  Synthetic oligonucleotide: PDCD1-709
caggugcggccucggaggcc

SEQ ID NO: 1272 - RNA, 20 nt, Artificial Sequence
  Synthetic oligonucleotide: PDCD1-34
aggugcggccucggaggccc

SEQ ID NO: 1273 - RNA, 20 nt, Artificial Sequence
  Synthetic oligonucleotide: PDCD1-711
cggccucggaggccccgggg

SEQ ID NO: 1274 - RNA, 20 nt, Artificial Sequence
  Synthetic oligonucleotide: PDCD1-37
ggccucggaggccccggggc

SEQ ID NO: 1275 - RNA, 20 nt, Artificial Sequence
  Synthetic oligonucleotide: PDCD1-713
cccugaccuuugugcccuuc

SEQ ID NO: 1276 - RNA, 20 nt, Artificial Sequence
  Synthetic oligonucleotide: PDCD1-714
cugaccuuugugcccuucca

SEQ ID NO: 1277 - RNA, 20 nt, Artificial Sequence
  Synthetic oligonucleotide: PDCD1-715
gaccuuugugcccuuccaga

SEQ ID NO: 1278 - RNA, 20 nt, Artificial Sequence
  Synthetic oligonucleotide: PDCD1-716
cuuugugcccuuccagagag

SEQ ID NO: 1279 - RNA, 20 nt, Artificial Sequence
  Synthetic oligonucleotide: PDCD1-717
ugcccuuccagagagaaggg

SEQ ID NO: 1280 - RNA, 20 nt, Artificial Sequence
  Synthetic oligonucleotide: PDCD1-718
aaacccuggugguugguguc

SEQ ID NO: 1281 - RNA, 20 nt, Artificial Sequence
  Synthetic oligonucleotide: PDCD1-719
uuggugucgugggcggccug

SEQ ID NO: 1282 - RNA, 20 nt, Artificial Sequence
  Synthetic oligonucleotide: PDCD1-720
ggcagccuggugcugcuagu

SEQ ID NO: 1283 - RNA, 20 nt, Artificial Sequence
  Synthetic oligonucleotide: PDCD1-721
guccuggccgucaucugcuc

SEQ ID NO: 1284 - RNA, 20 nt, Artificial Sequence
  Synthetic oligonucleotide: PDCD1-722
gucaucugcucccgggccgc

SEQ ID NO: 1285 - RNA, 20 nt, Artificial Sequence
  Synthetic oligonucleotide: PDCD1-723
accccaaguguguuucucug

SEQ ID NO: 1286 - RNA, 20 nt, Artificial Sequence
  Synthetic oligonucleotide: PDCD1-275
ccccaaguguguuucucugc

SEQ ID NO: 1287 - RNA, 20 nt, Artificial Sequence
  Synthetic oligonucleotide: PDCD1-725
guguuucucugcagggacaa

SEQ ID NO: 1288 - RNA, 20 nt, Artificial Sequence
  Synthetic oligonucleotide: PDCD1-277
uguuucucugcagggacaau

SEQ ID NO: 1289 - RNA, 20 nt, Artificial Sequence
  Synthetic oligonucleotide: PDCD1-727
ggcgcaccggccagccccug

SEQ ID NO: 1290 - RNA, 20 nt, Artificial Sequence
  Synthetic oligonucleotide: PDCD1-728
ucccucucccuuucuccuca

SEQ ID NO: 1291 - RNA, 20 nt, Artificial Sequence
  Synthetic oligonucleotide: PDCD1-729
cucucccuuucuccucaaag

SEQ ID NO: 1292 - RNA, 20 nt, Artificial Sequence
  Synthetic oligonucleotide: PDCD1-281
ucucccuuucuccucaaaga

SEQ ID NO: 1293 - RNA, 20 nt, Artificial Sequence
  Synthetic oligonucleotide: PDCD1-731
ucccuuucuccucaaagaag

SEQ ID NO: 1294 - RNA, 20 nt, Artificial Sequence
  Synthetic oligonucleotide: PDCD1-732
cagccgugccuguguucucu

SEQ ID NO: 1295 - RNA, 20 nt, Artificial Sequence
  Synthetic oligonucleotide: PDCD1-733
gccuguguucucuguggacu

SEQ ID NO: 1296 - RNA, 20 nt, Artificial Sequence
  Synthetic oligonucleotide: PDCD1-284
ccuguguucucuguggacua

SEQ ID NO: 1297 - RNA, 20 nt, Artificial Sequence
  Synthetic oligonucleotide: PDCD1-285
cuguguucucuguggacuau

SEQ ID NO: 1298 - RNA, 20 nt, Artificial Sequence
  Synthetic oligonucleotide: PDCD1-286
uguguucucuguggacuaug

SEQ ID NO: 1299 - RNA, 20 nt, Artificial Sequence
  Synthetic oligonucleotide: PDCD1-737
ucucuguggacuauggggag

SEQ ID NO: 1300 - RNA, 20 nt, Artificial Sequence
  Synthetic oligonucleotide: PDCD1-738
ggggagcuggauuuccagug

SEQ ID NO: 1301 - RNA, 20 nt, Artificial Sequence
  Synthetic oligonucleotide: PDCD1-739
ggagcuggauuuccaguggc

SEQ ID NO: 1302 - RNA, 20 nt, Artificial Sequence
  Synthetic oligonucleotide: PDCD1-740
agcuggauuuccaguggcga

SEQ ID NO: 1303 - RNA, 20 nt, Artificial Sequence
  Synthetic oligonucleotide: PDCD1-741
uccaguggcgagagaagacc

SEQ ID NO: 1304 - RNA, 20 nt, Artificial Sequence
  Synthetic oligonucleotide: PDCD1-289
ccaguggcgagagaagaccc

SEQ ID NO: 1305 - RNA, 20 nt, Artificial Sequence
  Synthetic oligonucleotide: PDCD1-743
gccccccgugcccugugucc

SEQ ID NO: 1306 - RNA, 20 nt, Artificial Sequence
  Synthetic oligonucleotide: PDCD1-744
ugcccugugucccugagcag

SEQ ID NO: 1307 - RNA, 20 nt, Artificial Sequence
  Synthetic oligonucleotide: PDCD1-290
gcccugugucccugagcaga

SEQ ID NO: 1308 - RNA, 20 nt, Artificial Sequence
  Synthetic oligonucleotide: PDCD1-746
ugccaccauugucuuuccua

SEQ ID NO: 1309 - RNA, 20 nt, Artificial Sequence
  Synthetic oligonucleotide: PDCD1-291
gccaccauugucuuuccuag

SEQ ID NO: 1310 - RNA, 20 nt, Artificial Sequence
  Synthetic oligonucleotide: PDCD1-748
ccauugucuuuccuagcgga

SEQ ID NO: 1311 - RNA, 20 nt, Artificial Sequence
  Synthetic oligonucleotide: PDCD1-749
ggcaccucaucccccgcccg

SEQ ID NO: 1312 - RNA, 20 nt, Artificial Sequence
  Synthetic oligonucleotide: PDCD1-294
gcaccucaucccccgcccgc

SEQ ID NO: 1313 - RNA, 20 nt, Artificial Sequence
  Synthetic oligonucleotide: PDCD1-751
aggggcucagcugacggccc

SEQ ID NO: 1314 - RNA, 20 nt, Artificial Sequence
  Synthetic oligonucleotide: PDCD1-298
ggggcucagcugacggcccu

SEQ ID NO: 1315 - RNA, 20 nt, Artificial Sequence
  Synthetic oligonucleotide: PDCD1-753
gcccucggagugcccagcca

SEQ ID NO: 1316 - RNA, 20 nt, Artificial Sequence
  Synthetic oligonucleotide: PDCD1-754
gagugcccagccacugaggc

SEQ ID NO: 1317 - RNA, 20 nt, Artificial Sequence
  Synthetic oligonucleotide: PDCD1-755
gugcccagccacugaggccu

SEQ ID NO: 1318 - RNA, 20 nt, Artificial Sequence
  Synthetic oligonucleotide: PDCD1-756
ccagccacugaggccugagg

SEQ ID NO: 1319 - RNA, 17 nt, Artificial Sequence
  Synthetic oligonucleotide: PDCD1-757
gggugacaggugcggcc

SEQ ID NO: 1320 - RNA, 17 nt, Artificial Sequence
  Synthetic oligonucleotide: PDCD1-159
ggugacaggugcggccu

SEQ ID NO: 1321 - RNA, 17 nt, Artificial Sequence
  Synthetic oligonucleotide: PDCD1-759
gugcggccucggaggcc

SEQ ID NO: 1322 - RNA, 17 nt, Artificial Sequence
  Synthetic oligonucleotide: PDCD1-161
ugcggccucggaggccc

SEQ ID NO: 1323 - RNA, 17 nt, Artificial Sequence
  Synthetic oligonucleotide: PDCD1-761
ccucggaggccccgggg

SEQ ID NO: 1324 - RNA, 17 nt, Artificial Sequence
  Synthetic oligonucleotide: PDCD1-164
cucggaggccccggggc

SEQ ID NO: 1325 - RNA, 17 nt, Artificial Sequence
  Synthetic oligonucleotide: PDCD1-763
ugaccuuugugcccuuc

SEQ ID NO: 1326 - RNA, 17 nt, Artificial Sequence
  Synthetic oligonucleotide: PDCD1-764
accuuugugcccuucca

SEQ ID NO: 1327 - RNA, 17 nt, Artificial Sequence
  Synthetic oligonucleotide: PDCD1-765
cuuugugcccuuccaga

SEQ ID NO: 1328 - RNA, 17 nt, Artificial Sequence
  Synthetic oligonucleotide: PDCD1-766
ugugcccuuccagagag

SEQ ID NO: 1329 - RNA, 17 nt, Artificial Sequence
  Synthetic oligonucleotide: PDCD1-767
ccuuccagagagaaggg

SEQ ID NO: 1330 - RNA, 17 nt, Artificial Sequence
  Synthetic oligonucleotide: PDCD1-768
cccuggugguugguguc

SEQ ID NO: 1331 - RNA, 17 nt, Artificial Sequence
  Synthetic oligonucleotide: PDCD1-769
gugucgugggcggccug

SEQ ID NO: 1332 - RNA, 17 nt, Artificial Sequence
  Synthetic oligonucleotide: PDCD1-770
agccuggugcugcuagu

SEQ ID NO: 1333 - RNA, 17 nt, Artificial Sequence
  Synthetic oligonucleotide: PDCD1-771
cuggccgucaucugcuc

SEQ ID NO: 1334 - RNA, 17 nt, Artificial Sequence
  Synthetic oligonucleotide: PDCD1-772
aucugcucccgggccgc

SEQ ID NO: 1335 - RNA, 17 nt, Artificial Sequence
  Synthetic oligonucleotide: PDCD1-773
ccaaguguguuucucug

SEQ ID NO: 1336 - RNA, 17 nt, Artificial Sequence
  Synthetic oligonucleotide: PDCD1-325
caaguguguuucucugc

SEQ ID NO: 1337 - RNA, 17 nt, Artificial Sequence
  Synthetic oligonucleotide: PDCD1-775
uuucucugcagggacaa

SEQ ID NO: 1338 - RNA, 17 nt, Artificial Sequence
  Synthetic oligonucleotide: PDCD1-327
uucucugcagggacaau

SEQ ID NO: 1339 - RNA, 17 nt, Artificial Sequence
  Synthetic oligonucleotide: PDCD1-777
gcaccggccagccccug

SEQ ID NO: 1340 - RNA, 17 nt, Artificial Sequence
  Synthetic oligonucleotide: PDCD1-778
cucucccuuucuccuca

SEQ ID NO: 1341 - RNA, 17 nt, Artificial Sequence
  Synthetic oligonucleotide: PDCD1-779
ucccuuucuccucaaag

SEQ ID NO: 1342 - RNA, 17 nt, Artificial Sequence
  Synthetic oligonucleotide: PDCD1-331
cccuuucuccucaaaga

SEQ ID NO: 1343 - RNA, 17 nt, Artificial Sequence
  Synthetic oligonucleotide: PDCD1-781
cuuucuccucaaagaag

SEQ ID NO: 1344 - RNA, 17 nt, Artificial Sequence
  Synthetic oligonucleotide: PDCD1-782
ccgugccuguguucucu

SEQ ID NO: 1345 - RNA, 17 nt, Artificial Sequence
  Synthetic oligonucleotide: PDCD1-783
uguguucucuguggacu

SEQ ID NO: 1346 - RNA, 17 nt, Artificial Sequence
  Synthetic oligonucleotide: PDCD1-334
guguucucuguggacua

SEQ ID NO: 1347 - RNA, 17 nt, Artificial Sequence
  Synthetic oligonucleotide: PDCD1-335
uguucucuguggacuau

SEQ ID NO: 1348 - RNA, 17 nt, Artificial Sequence
  Synthetic oligonucleotide: PDCD1-336
guucucuguggacuaug

SEQ ID NO: 1349 - RNA, 17 nt, Artificial Sequence
  Synthetic oligonucleotide: PDCD1-787
cuguggacuauggggag

SEQ ID NO: 1350 - RNA, 17 nt, Artificial Sequence
  Synthetic oligonucleotide: PDCD1-788
gagcuggauuuccagug

SEQ ID NO: 1351 - RNA, 17 nt, Artificial Sequence
  Synthetic oligonucleotide: PDCD1-789
gcuggauuuccaguggc

SEQ ID NO: 1352 - RNA, 17 nt, Artificial Sequence
  Synthetic oligonucleotide: PDCD1-790
uggauuuccaguggcga

SEQ ID NO: 1353 - RNA, 17 nt, Artificial Sequence
  Synthetic oligonucleotide: PDCD1-791
aguggcgagagaagacc

SEQ ID NO: 1354 - RNA, 17 nt, Artificial Sequence
  Synthetic oligonucleotide: PDCD1-339
guggcgagagaagaccc

SEQ ID NO: 1355 - RNA, 17 nt, Artificial Sequence
  Synthetic oligonucleotide: PDCD1-793
ccccgugcccugugucc

SEQ ID NO: 1356 - RNA, 17 nt, Artificial Sequence
  Synthetic oligonucleotide: PDCD1-794
ccugugucccugagcag

SEQ ID NO: 1357 - RNA, 17 nt, Artificial Sequence
  Synthetic oligonucleotide: PDCD1-340
cugugucccugagcaga

SEQ ID NO: 1358 - RNA, 17 nt, Artificial Sequence
  Synthetic oligonucleotide: PDCD1-796
caccauugucuuuccua

SEQ ID NO: 1359 - RNA, 17 nt, Artificial Sequence
  Synthetic oligonucleotide: PDCD1-341
accauugucuuuccuag

SEQ ID NO: 1360 - RNA, 17 nt, Artificial Sequence
  Synthetic oligonucleotide: PDCD1-798
uugucuuuccuagcgga

SEQ ID NO: 1361 - RNA, 17 nt, Artificial Sequence
  Synthetic oligonucleotide: PDCD1-799
accucaucccccgcccg

SEQ ID NO: 1362 - RNA, 17 nt, Artificial Sequence
  Synthetic oligonucleotide: PDCD1-344
ccucaucccccgcccgc

SEQ ID NO: 1363 - RNA, 17 nt, Artificial Sequence
  Synthetic oligonucleotide: PDCD1-801
ggcucagcugacggccc

SEQ ID NO: 1364 - RNA, 17 nt, Artificial Sequence
  Synthetic oligonucleotide: PDCD1-348
gcucagcugacggcccu

SEQ ID NO: 1365 - RNA, 17 nt, Artificial Sequence
  Synthetic oligonucleotide: PDCD1-803
cucggagugcccagcca

SEQ ID NO: 1366 - RNA, 17 nt, Artificial Sequence
  Synthetic oligonucleotide: PDCD1-804
ugcccagccacugaggc

SEQ ID NO: 1367 - RNA, 17 nt, Artificial Sequence
  Synthetic oligonucleotide: PDCD1-805
cccagccacugaggccu

SEQ ID NO: 1368 - RNA, 17 nt, Artificial Sequence
  Synthetic oligonucleotide: PDCD1-806
gccacugaggccugagg

SEQ ID NO: 1369 - RNA, 20 nt, Artificial Sequence
  Synthetic oligonucleotide: PDCD1-807
ccgaggccgcaccugucacc

SEQ ID NO: 1370 - RNA, 20 nt, Artificial Sequence
  Synthetic oligonucleotide: PDCD1-808
agggcacaaaggucaggggu

SEQ ID NO: 1371 - RNA, 20 nt, Artificial Sequence
  Synthetic oligonucleotide: PDCD1-358
ucuggaagggcacaaagguc

SEQ ID NO: 1372 - RNA, 20 nt, Artificial Sequence
  Synthetic oligonucleotide: PDCD1-810
cucuggaagggcacaaaggu

SEQ ID NO: 1373 - RNA, 20 nt, Artificial Sequence
  Synthetic oligonucleotide: PDCD1-811
acuucugcccuucucucugg

SEQ ID NO: 1374 - RNA, 20 nt, Artificial Sequence
  Synthetic oligonucleotide: PDCD1-362
ggcacuucugcccuucucuc

SEQ ID NO: 1375 - RNA, 20 nt, Artificial Sequence
  Synthetic oligonucleotide: PDCD1-813
gggcacuucugcccuucucu

SEQ ID NO: 1376 - RNA, 20 nt, Artificial Sequence
  Synthetic oligonucleotide: PDCD1-814
gugaggggcuggggugggcu

SEQ ID NO: 1377 - RNA, 20 nt, Artificial Sequence
  Synthetic oligonucleotide: PDCD1-815
ggccugggugaggggcuggg

SEQ ID NO: 1378 - RNA, 20 nt, Artificial Sequence
  Synthetic oligonucleotide: PDCD1-369
ggcuggccugggugaggggc

SEQ ID NO: 1379 - RNA, 20 nt, Artificial Sequence
  Synthetic oligonucleotide: PDCD1-817
cggcuggccugggugagggg

SEQ ID NO: 1380 - RNA, 20 nt, Artificial Sequence
  Synthetic oligonucleotide: PDCD1-372
cuggccggcuggccugggug

SEQ ID NO: 1381 - RNA, 20 nt, Artificial Sequence
  Synthetic oligonucleotide: PDCD1-819
acuggccggcuggccugggu

SEQ ID NO: 1382 - RNA, 20 nt, Artificial Sequence
  Synthetic oligonucleotide: PDCD1-820
gaacuggccggcuggccugg

SEQ ID NO: 1383 - RNA, 20 nt, Artificial Sequence
  Synthetic oligonucleotide: PDCD1-821
uuuggaacuggccggcuggc

SEQ ID NO: 1384 - RNA, 20 nt, Artificial Sequence
  Synthetic oligonucleotide: PDCD1-378
cgacaccaaccaccaggguu

SEQ ID NO: 1385 - RNA, 20 nt, Artificial Sequence
  Synthetic oligonucleotide: PDCD1-823
acgacaccaaccaccagggu

SEQ ID NO: 1386 - RNA, 20 nt, Artificial Sequence
  Synthetic oligonucleotide: PDCD1-824
ccgcccacgacaccaaccac

SEQ ID NO: 1387 - RNA, 20 nt, Artificial Sequence
  Synthetic oligonucleotide: PDCD1-825
gcccgggagcagaugacggc

SEQ ID NO: 1388 - RNA, 20 nt, Artificial Sequence
  Synthetic oligonucleotide: PDCD1-385
gacguuaccucgugcggccc

SEQ ID NO: 1389 - RNA, 20 nt, Artificial Sequence
  Synthetic oligonucleotide: PDCD1-386
ugacguuaccucgugcggcc

SEQ ID NO: 1390 - RNA, 20 nt, Artificial Sequence
  Synthetic oligonucleotide: PDCD1-828
augacguuaccucgugcggc

SEQ ID NO: 1391 - RNA, 20 nt, Artificial Sequence
  Synthetic oligonucleotide: PDCD1-391
ucccugcagagaaacacacu

SEQ ID NO: 1392 - RNA, 20 nt, Artificial Sequence
  Synthetic oligonucleotide: PDCD1-830
gucccugcagagaaacacac

SEQ ID NO: 1393 - RNA, 20 nt, Artificial Sequence
  Synthetic oligonucleotide: PDCD1-831
uggcuccuauugucccugca

SEQ ID NO: 1394 - RNA, 20 nt, Artificial Sequence
  Synthetic oligonucleotide: PDCD1-832
ccuggcuccuauugucccug

SEQ ID NO: 1395 - RNA, 20 nt, Artificial Sequence
  Synthetic oligonucleotide: PDCD1-397
ggaaaagagugagacucacc

SEQ ID NO: 1396 - RNA, 20 nt, Artificial Sequence
  Synthetic oligonucleotide: PDCD1-834
aggaaaagagugagacucac

SEQ ID NO: 1397 - RNA, 20 nt, Artificial Sequence
  Synthetic oligonucleotide: PDCD1-398
ucuuugaggagaaagggaga

SEQ ID NO: 1398 - RNA, 20 nt, Artificial Sequence
  Synthetic oligonucleotide: PDCD1-399
uucuuugaggagaaagggag

SEQ ID NO: 1399 - RNA, 20 nt, Artificial Sequence
  Synthetic oligonucleotide: PDCD1-837
cuucuuugaggagaaaggga

SEQ ID NO: 1400 - RNA, 20 nt, Artificial Sequence
  Synthetic oligonucleotide: PDCD1-838
uccuucuuugaggagaaagg

SEQ ID NO: 1401 - RNA, 20 nt, Artificial Sequence
  Synthetic oligonucleotide: PDCD1-400
ccuccuucuuugaggagaaa

SEQ ID NO: 1402 - RNA, 20 nt, Artificial Sequence
  Synthetic oligonucleotide: PDCD1-401
uccuccuucuuugaggagaa

SEQ ID NO: 1403 - RNA, 20 nt, Artificial Sequence
  Synthetic oligonucleotide: PDCD1-841
guccuccuucuuugaggaga

SEQ ID NO: 1404 - RNA, 20 nt, Artificial Sequence
  Synthetic oligonucleotide: PDCD1-842
agggguccuccuucuuugag

SEQ ID NO: 1405 - RNA, 20 nt, Artificial Sequence
  Synthetic oligonucleotide: PDCD1-402
ugagggguccuccuucuuug

SEQ ID NO: 1406 - RNA, 20 nt, Artificial Sequence
  Synthetic oligonucleotide: PDCD1-844
cugagggguccuccuucuuu

SEQ ID NO: 1407 - RNA, 20 nt, Artificial Sequence
  Synthetic oligonucleotide: PDCD1-845
ggcugagggguccuccuucu

SEQ ID NO: 1408 - RNA, 20 nt, Artificial Sequence
  Synthetic oligonucleotide: PDCD1-405
agagaacacaggcacggcug

SEQ ID NO: 1409 - RNA, 20 nt, Artificial Sequence
  Synthetic oligonucleotide: PDCD1-847
cagagaacacaggcacggcu

SEQ ID NO: 1410 - RNA, 20 nt, Artificial Sequence
  Synthetic oligonucleotide: PDCD1-848
cacagagaacacaggcacgg

SEQ ID NO: 1411 - RNA, 20 nt, Artificial Sequence
  Synthetic oligonucleotide: PDCD1-849
ccagcuccccauaguccaca

SEQ ID NO: 1412 - RNA, 20 nt, Artificial Sequence
  Synthetic oligonucleotide: PDCD1-850
auccagcuccccauagucca

SEQ ID NO: 1413 - RNA, 20 nt, Artificial Sequence
  Synthetic oligonucleotide: PDCD1-408
ccggggucuucucucgccac

SEQ ID NO: 1414 - RNA, 20 nt, Artificial Sequence
  Synthetic oligonucleotide: PDCD1-852
uccggggucuucucucgcca

SEQ ID NO: 1415 - RNA, 20 nt, Artificial Sequence
  Synthetic oligonucleotide: PDCD1-411
acacagggcacggggggcuc

SEQ ID NO: 1416 - RNA, 20 nt, Artificial Sequence
  Synthetic oligonucleotide: PDCD1-854
gacacagggcacggggggcu

SEQ ID NO: 1417 - RNA, 20 nt, Artificial Sequence
  Synthetic oligonucleotide: PDCD1-414
gcucagggacacagggcacg

SEQ ID NO: 1418 - RNA, 20 nt, Artificial Sequence
  Synthetic oligonucleotide: PDCD1-415
ugcucagggacacagggcac

SEQ ID NO: 1419 - RNA, 20 nt, Artificial Sequence
  Synthetic oligonucleotide: PDCD1-416
cugcucagggacacagggca

SEQ ID NO: 1420 - RNA, 20 nt, Artificial Sequence
  Synthetic oligonucleotide: PDCD1-858
ucugcucagggacacagggc

SEQ ID NO: 1421 - RNA, 20 nt, Artificial Sequence
  Synthetic oligonucleotide: PDCD1-859
acuccgucugcucagggaca

SEQ ID NO: 1422 - RNA, 20 nt, Artificial Sequence
  Synthetic oligonucleotide: PDCD1-420
guggcauacuccgucugcuc

SEQ ID NO: 1423 - RNA, 20 nt, Artificial Sequence
  Synthetic oligonucleotide: PDCD1-861
gguggcauacuccgucugcu

SEQ ID NO: 1424 - RNA, 20 nt, Artificial Sequence
  Synthetic oligonucleotide: PDCD1-423
gaugaggugcccauuccgcu

SEQ ID NO: 1425 - RNA, 20 nt, Artificial Sequence
  Synthetic oligonucleotide: PDCD1-863
ggaugaggugcccauuccgc

SEQ ID NO: 1426 - RNA, 20 nt, Artificial Sequence
  Synthetic oligonucleotide: PDCD1-864
ugagccccugcgggcggggg

SEQ ID NO: 1427 - RNA, 20 nt, Artificial Sequence
  Synthetic oligonucleotide: PDCD1-426
cagcugagccccugcgggcg

SEQ ID NO: 1428 - RNA, 20 nt, Artificial Sequence
  Synthetic oligonucleotide: PDCD1-427
ucagcugagccccugcgggc

SEQ ID NO: 1429 - RNA, 20 nt, Artificial Sequence
  Synthetic oligonucleotide: PDCD1-428
gucagcugagccccugcggg

SEQ ID NO: 1430 - RNA, 20 nt, Artificial Sequence
  Synthetic oligonucleotide: PDCD1-868
cgucagcugagccccugcgg

SEQ ID NO: 1431 - RNA, 20 nt, Artificial Sequence
  Synthetic oligonucleotide: PDCD1-869
gggccgucagcugagccccu

SEQ ID NO: 1432 - RNA, 20 nt, Artificial Sequence
  Synthetic oligonucleotide: PDCD1-870
ggcacuccgagggccgucag

SEQ ID NO: 1433 - RNA, 20 nt, Artificial Sequence
  Synthetic oligonucleotide: PDCD1-871
ccucaguggcugggcacucc

SEQ ID NO: 1434 - RNA, 20 nt, Artificial Sequence
  Synthetic oligonucleotide: PDCD1-872
ggccucaguggcugggcacu

SEQ ID NO: 1435 - RNA, 20 nt, Artificial Sequence
  Synthetic oligonucleotide: PDCD1-873
ccauccucaggccucagugg

SEQ ID NO: 1436 - RNA, 20 nt, Artificial Sequence
  Synthetic oligonucleotide: PDCD1-874
ggaagccggucagaggggcc

SEQ ID NO: 1437 - RNA, 20 nt, Artificial Sequence
  Synthetic oligonucleotide: PDCD1-439
uggccaaggaagccggucag

SEQ ID NO: 1438 - RNA, 20 nt, Artificial Sequence
  Synthetic oligonucleotide: PDCD1-876
guggccaaggaagccgguca

SEQ ID NO: 1439 - RNA, 20 nt, Artificial Sequence
  Synthetic oligonucleotide: PDCD1-877
ugguggccaaggaagccggu

SEQ ID NO: 1440 - RNA, 20 nt, Artificial Sequence
  Synthetic oligonucleotide: PDCD1-441
cugcagaacacugguggcca

SEQ ID NO: 1441 - RNA, 20 nt, Artificial Sequence
  Synthetic oligonucleotide: PDCD1-441
cugcagaacacugguggcca

SEQ ID NO: 1442 - RNA, 17 nt, Artificial Sequence
  Synthetic oligonucleotide: PDCD1-880
aggccgcaccugucacc

SEQ ID NO: 1443 - RNA, 17 nt, Artificial Sequence
  Synthetic oligonucleotide: PDCD1-881
gcacaaaggucaggggu

SEQ ID NO: 1444 - RNA, 17 nt, Artificial Sequence
  Synthetic oligonucleotide: PDCD1-445
ggaagggcacaaagguc

SEQ ID NO: 1445 - RNA, 17 nt, Artificial Sequence
  Synthetic oligonucleotide: PDCD1-883
uggaagggcacaaaggu

SEQ ID NO: 1446 - RNA, 17 nt, Artificial Sequence
  Synthetic oligonucleotide: PDCD1-884
ucugcccuucucucugg

SEQ ID NO: 1447 - RNA, 17 nt, Artificial Sequence
  Synthetic oligonucleotide: PDCD1-449
acuucugcccuucucuc

SEQ ID NO: 1448 - RNA, 17 nt, Artificial Sequence
  Synthetic oligonucleotide: PDCD1-886
cacuucugcccuucucu

SEQ ID NO: 1449 - RNA, 17 nt, Artificial Sequence
  Synthetic oligonucleotide: PDCD1-887
aggggcuggggugggcu

SEQ ID NO: 1450 - RNA, 17 nt, Artificial Sequence
  Synthetic oligonucleotide: PDCD1-888
cugggugaggggcuggg

SEQ ID NO: 1451 - RNA, 17 nt, Artificial Sequence
  Synthetic oligonucleotide: PDCD1-456
uggccugggugaggggc

SEQ ID NO: 1452 - RNA, 17 nt, Artificial Sequence
  Synthetic oligonucleotide: PDCD1-890
cuggccugggugagggg

SEQ ID NO: 1453 - RNA, 17 nt, Artificial Sequence
  Synthetic oligonucleotide: PDCD1-459
gccggcuggccugggug

SEQ ID NO: 1454 - RNA, 17 nt, Artificial Sequence
  Synthetic oligonucleotide: PDCD1-892
ggccggcuggccugggu

SEQ ID NO: 1455 - RNA, 17 nt, Artificial Sequence
  Synthetic oligonucleotide: PDCD1-893
cuggccggcuggccugg

SEQ ID NO: 1456 - RNA, 17 nt, Artificial Sequence
  Synthetic oligonucleotide: PDCD1-894
ggaacuggccggcuggc

SEQ ID NO: 1457 - RNA, 17 nt, Artificial Sequence
  Synthetic oligonucleotide: PDCD1-465
caccaaccaccaggguu

SEQ ID NO: 1458 - RNA, 17 nt, Artificial Sequence
  Synthetic oligonucleotide: PDCD1-896
acaccaaccaccagggu

SEQ ID NO: 1459 - RNA, 17 nt, Artificial Sequence
  Synthetic oligonucleotide: PDCD1-897
cccacgacaccaaccac

SEQ ID NO: 1460 - RNA, 17 nt, Artificial Sequence
  Synthetic oligonucleotide: PDCD1-898
cgggagcagaugacggc

SEQ ID NO: 1461 - RNA, 17 nt, Artificial Sequence
  Synthetic oligonucleotide: PDCD1-472
guuaccucgugcggccc

SEQ ID NO: 1462 - RNA, 17 nt, Artificial Sequence
  Synthetic oligonucleotide: PDCD1-473
cguuaccucgugcggcc

SEQ ID NO: 1463 - RNA, 17 nt, Artificial Sequence
  Synthetic oligonucleotide: PDCD1-901
acguuaccucgugcggc

SEQ ID NO: 1464 - RNA, 17 nt, Artificial Sequence
  Synthetic oligonucleotide: PDCD1-478
cugcagagaaacacacu

SEQ ID NO: 1465 - RNA, 17 nt, Artificial Sequence
  Synthetic oligonucleotide: PDCD1-903
ccugcagagaaacacac

SEQ ID NO: 1466 - RNA, 17 nt, Artificial Sequence
  Synthetic oligonucleotide: PDCD1-904
cuccuauugucccugca

SEQ ID NO: 1467 - RNA, 17 nt, Artificial Sequence
  Synthetic oligonucleotide: PDCD1-905
ggcuccuauugucccug

SEQ ID NO: 1468 - RNA, 17 nt, Artificial Sequence
  Synthetic oligonucleotide: PDCD1-484
aaagagugagacucacc

SEQ ID NO: 1469 - RNA, 17 nt, Artificial Sequence
  Synthetic oligonucleotide: PDCD1-907
aaaagagugagacucac

SEQ ID NO: 1470 - RNA, 17 nt, Artificial Sequence
  Synthetic oligonucleotide: PDCD1-485
uugaggagaaagggaga

SEQ ID NO: 1471 - RNA, 17 nt, Artificial Sequence
  Synthetic oligonucleotide: PDCD1-486
uuugaggagaaagggag

SEQ ID NO: 1472 - RNA, 17 nt, Artificial Sequence
  Synthetic oligonucleotide: PDCD1-910
cuuugaggagaaaggga

SEQ ID NO: 1473 - RNA, 17 nt, Artificial Sequence
  Synthetic oligonucleotide: PDCD1-911
uucuuugaggagaaagg

SEQ ID NO: 1474 - RNA, 17 nt, Artificial Sequence
  Synthetic oligonucleotide: PDCD1-487
ccuucuuugaggagaaa

SEQ ID NO: 1475 - RNA, 17 nt, Artificial Sequence
  Synthetic oligonucleotide: PDCD1-488
uccuucuuugaggagaa

SEQ ID NO: 1476 - RNA, 17 nt, Artificial Sequence
  Synthetic oligonucleotide: PDCD1-914
cuccuucuuugaggaga

SEQ ID NO: 1477 - RNA, 17 nt, Artificial Sequence
  Synthetic oligonucleotide: PDCD1-915
gguccuccuucuuugag

SEQ ID NO: 1478 - RNA, 17 nt, Artificial Sequence
  Synthetic oligonucleotide: PDCD1-489
gggguccuccuucuuug

SEQ ID NO: 1479 - RNA, 17 nt, Artificial Sequence
  Synthetic oligonucleotide: PDCD1-917
agggguccuccuucuuu

SEQ ID NO: 1480 - RNA, 17 nt, Artificial Sequence
  Synthetic oligonucleotide: PDCD1-918
ugagggguccuccuucu

SEQ ID NO: 1481 - RNA, 17 nt, Artificial Sequence
  Synthetic oligonucleotide: PDCD1-492
gaacacaggcacggcug

SEQ ID NO: 1482 - RNA, 17 nt, Artificial Sequence
  Synthetic oligonucleotide: PDCD1-920
agaacacaggcacggcu

SEQ ID NO: 1483 - RNA, 17 nt, Artificial Sequence
  Synthetic oligonucleotide: PDCD1-921
agagaacacaggcacgg

SEQ ID NO: 1484 - RNA, 17 nt, Artificial Sequence
  Synthetic oligonucleotide: PDCD1-922
gcuccccauaguccaca

SEQ ID NO: 1485 - RNA, 17 nt, Artificial Sequence
  Synthetic oligonucleotide: PDCD1-923
cagcuccccauagucca

SEQ ID NO: 1486 - RNA, 17 nt, Artificial Sequence
  Synthetic oligonucleotide: PDCD1-495
gggucuucucucgccac

SEQ ID NO: 1487 - RNA, 17 nt, Artificial Sequence
  Synthetic oligonucleotide: PDCD1-925
ggggucuucucucgcca

SEQ ID NO: 1488 - RNA, 17 nt, Artificial Sequence
  Synthetic oligonucleotide: PDCD1-498
cagggcacggggggcuc

SEQ ID NO: 1489 - RNA, 17 nt, Artificial Sequence
  Synthetic oligonucleotide: PDCD1-927
acagggcacggggggcu

SEQ ID NO: 1490 - RNA, 17 nt, Artificial Sequence
  Synthetic oligonucleotide: PDCD1-501
cagggacacagggcacg

SEQ ID NO: 1491 - RNA, 17 nt, Artificial Sequence
  Synthetic oligonucleotide: PDCD1-502
ucagggacacagggcac

SEQ ID NO: 1492 - RNA, 17 nt, Artificial Sequence
  Synthetic oligonucleotide: PDCD1-503
cucagggacacagggca

SEQ ID NO: 1493 - RNA, 17 nt, Artificial Sequence
  Synthetic oligonucleotide: PDCD1-931
gcucagggacacagggc

SEQ ID NO: 1494 - RNA, 17 nt, Artificial Sequence
  Synthetic oligonucleotide: PDCD1-932
ccgucugcucagggaca

SEQ ID NO: 1495 - RNA, 17 nt, Artificial Sequence
  Synthetic oligonucleotide: PDCD1-507
gcauacuccgucugcuc

SEQ ID NO: 1496 - RNA, 17 nt, Artificial Sequence
  Synthetic oligonucleotide: PDCD1-934
ggcauacuccgucugcu

SEQ ID NO: 1497 - RNA, 17 nt, Artificial Sequence
  Synthetic oligonucleotide: PDCD1-510
gaggugcccauuccgcu

SEQ ID NO: 1498 - RNA, 17 nt, Artificial Sequence
  Synthetic oligonucleotide: PDCD1-936
ugaggugcccauuccgc

SEQ ID NO: 1499 - RNA, 17 nt, Artificial Sequence
  Synthetic oligonucleotide: PDCD1-937
gccccugcgggcggggg

SEQ ID NO: 1500 - RNA, 17 nt, Artificial Sequence
  Synthetic oligonucleotide: PDCD1-513
cugagccccugcgggcg

SEQ ID NO: 1501 - RNA, 17 nt, Artificial Sequence
  Synthetic oligonucleotide: PDCD1-514
gcugagccccugcgggc

SEQ ID NO: 1502 - RNA, 17 nt, Artificial Sequence
  Synthetic oligonucleotide: PDCD1-515
agcugagccccugcggg

SEQ ID NO: 1503 - RNA, 17 nt, Artificial Sequence
  Synthetic oligonucleotide: PDCD1-941
cagcugagccccugcgg

SEQ ID NO: 1504 - RNA, 17 nt, Artificial Sequence
  Synthetic oligonucleotide: PDCD1-942
ccgucagcugagccccu

SEQ ID NO: 1505 - RNA, 17 nt, Artificial Sequence
  Synthetic oligonucleotide: PDCD1-943
acuccgagggccgucag

SEQ ID NO: 1506 - RNA, 17 nt, Artificial Sequence
  Synthetic oligonucleotide: PDCD1-944
caguggcugggcacucc

SEQ ID NO: 1507 - RNA, 17 nt, Artificial Sequence
  Synthetic oligonucleotide: PDCD1-945
cucaguggcugggcacu

SEQ ID NO: 1508 - RNA, 17 nt, Artificial Sequence
  Synthetic oligonucleotide: PDCD1-946
uccucaggccucagugg

SEQ ID NO: 1509 - RNA, 17 nt, Artificial Sequence
  Synthetic oligonucleotide: PDCD1-947
agccggucagaggggcc

SEQ ID NO: 1510 - RNA, 17 nt, Artificial Sequence
  Synthetic oligonucleotide: PDCD1-526
ccaaggaagccggucag

SEQ ID NO: 1511 - RNA, 17 nt, Artificial Sequence
  Synthetic oligonucleotide: PDCD1-949
gccaaggaagccgguca

SEQ ID NO: 1512 - RNA, 17 nt, Artificial Sequence
  Synthetic oligonucleotide: PDCD1-950
uggccaaggaagccggu

SEQ ID NO: 1513 - RNA, 17 nt, Artificial Sequence
  Synthetic oligonucleotide: PDCD1-528
cagaacacugguggcca

SEQ ID NO: 1514 - RNA, 17 nt, Artificial Sequence
  Synthetic oligonucleotide: PDCD1-952
gcagaacacugguggcc

SEQ ID NO: 1515 - RNA, 20 nt, Artificial Sequence
  Synthetic oligonucleotide: PDCD1-953
uucucuguggacuaugggga

SEQ ID NO: 1516 - RNA, 17 nt, Artificial Sequence
  Synthetic oligonucleotide: PDCD1-954
ucuguggacuaugggga

SEQ ID NO: 1517 - RNA, 20 nt, Artificial Sequence
  Synthetic oligonucleotide: PDCD1-2092
gccccaaggaccggcugaga

SEQ ID NO: 1518 - RNA, 20 nt, Artificial Sequence
  Synthetic oligonucleotide: PDCD1-108
gucugggcggugcuacaacu

SEQ ID NO: 1519 - RNA, 20 nt, Artificial Sequence
  Synthetic oligonucleotide: PDCD1-109
gggcggugcuacaacugggc

SEQ ID NO: 1520 - RNA, 20 nt, Artificial Sequence
  Synthetic oligonucleotide: PDCD1-2219
gcguguuucuguagaaugac

SEQ ID NO: 1521 - RNA, 17 nt, Artificial Sequence
  Synthetic oligonucleotide: PDCD1-251
gcccagacgacuggcca

SEQ ID NO: 1522 - RNA, 17 nt, Artificial Sequence
  Synthetic oligonucleotide: PDCD1-2513
gggcagcucgaacuccu

SEQ ID NO: 1523 - RNA, 17 nt, Artificial Sequence
  Synthetic oligonucleotide: PDCD1-2653
gggcgggauauggaaag

SEQ ID NO: 1524 - RNA, 20 nt, Artificial Sequence
  Synthetic oligonucleotide: PDCD1-2086
acuccccacggccaagguuu

SEQ ID NO: 1525 - RNA, 20 nt, Artificial Sequence
  Synthetic oligonucleotide: PDCD1-2087
cuccccacggccaagguuug

SEQ ID NO: 1526 - RNA, 20 nt, Artificial Sequence
  Synthetic oligonucleotide: PDCD1-2093
ccccaaggaccggcugagag

SEQ ID NO: 1527 - RNA, 20 nt, Artificial Sequence
  Synthetic oligonucleotide: PDCD1-121
caccuaccuaagaaccaucc

SEQ ID NO: 1528 - RNA, 20 nt, Artificial Sequence
  Synthetic oligonucleotide: PDCD1-122
uguagcaccgcccagacgac

SEQ ID NO: 1529 - RNA, 20 nt, Artificial Sequence
  Synthetic oligonucleotide: PDCD1-123
caccgcccagacgacuggcc

SEQ ID NO: 1530 - RNA, 20 nt, Artificial Sequence
  Synthetic oligonucleotide: PDCD1-124
accgcccagacgacuggcca

SEQ ID NO: 1531 - RNA, 20 nt, Artificial Sequence
  Synthetic oligonucleotide: PDCD1-126
cgacuggccagggcgccugu

SEQ ID NO: 1532 - RNA, 20 nt, Artificial Sequence
  Synthetic oligonucleotide: PDCD1-104
aggcgcccuggccagucguc

SEQ ID NO: 1533 - RNA, 20 nt, Artificial Sequence
  Synthetic oligonucleotide: PDCD1-107
cgucugggcggugcuacaac

SEQ ID NO: 1534 - RNA, 20 nt, Artificial Sequence
  Synthetic oligonucleotide: PDCD1-111
cuacaacugggcuggcggcc

SEQ ID NO: 1535 - RNA, 20 nt, Artificial Sequence
  Synthetic oligonucleotide: PDCD1-113
uggcggccaggaugguucuu

SEQ ID NO: 1536 - RNA, 20 nt, Artificial Sequence
  Synthetic oligonucleotide: PDCD1-2206
uuugggcagcucgaacuccu

SEQ ID NO: 1537 - RNA, 20 nt, Artificial Sequence
  Synthetic oligonucleotide: PDCD1-2207
cgaacuccuggguuccucuc

SEQ ID NO: 1538 - RNA, 20 nt, Artificial Sequence
  Synthetic oligonucleotide: PDCD1-2220
uuucuguagaaugacggguc

SEQ ID NO: 1539 - RNA, 20 nt, Artificial Sequence
  Synthetic oligonucleotide: PDCD1-2221
uguagaaugacgggucaggc

SEQ ID NO: 1540 - RNA, 20 nt, Artificial Sequence
  Synthetic oligonucleotide: PDCD1-2223
agaaccccaaaccuuggccg

SEQ ID NO: 1541 - RNA, 20 nt, Artificial Sequence
  Synthetic oligonucleotide: PDCD1-2346
cucgggcgggauauggaaag

SEQ ID NO: 1542 - RNA, 20 nt, Artificial Sequence
  Synthetic oligonucleotide: PDCD1-2361
acccccacgggguagggcgu

SEQ ID NO: 1543 - RNA, 20 nt, Artificial Sequence
  Synthetic oligonucleotide: PDCD1-2366
cucugucacucucgcccacg

SEQ ID NO: 1544 - RNA, 20 nt, Artificial Sequence
  Synthetic oligonucleotide: PDCD1-2367
cacucucgcccacguggaug

SEQ ID NO: 1545 - RNA, 17 nt, Artificial Sequence
  Synthetic oligonucleotide: PDCD1-2393
ccccacggccaagguuu

SEQ ID NO: 1546 - RNA, 17 nt, Artificial Sequence
  Synthetic oligonucleotide: PDCD1-2394
cccacggccaagguuug

SEQ ID NO: 1547 - RNA, 17 nt, Artificial Sequence
  Synthetic oligonucleotide: PDCD1-2399
ccaaggaccggcugaga

SEQ ID NO: 1548 - RNA, 17 nt, Artificial Sequence
  Synthetic oligonucleotide: PDCD1-2400
caaggaccggcugagag

SEQ ID NO: 1549 - RNA, 17 nt, Artificial Sequence
  Synthetic oligonucleotide: PDCD1-248
cuaccuaagaaccaucc

SEQ ID NO: 1550 - RNA, 17 nt, Artificial Sequence
  Synthetic oligonucleotide: PDCD1-249
agcaccgcccagacgac

SEQ ID NO: 1551 - RNA, 17 nt, Artificial Sequence
  Synthetic oligonucleotide: PDCD1-250
cgcccagacgacuggcc

SEQ ID NO: 1552 - RNA, 17 nt, Artificial Sequence
  Synthetic oligonucleotide: PDCD1-253
cuggccagggcgccugu

SEQ ID NO: 1553 - RNA, 17 nt, Artificial Sequence
  Synthetic oligonucleotide: PDCD1-231
cgcccuggccagucguc

SEQ ID NO: 1554 - RNA, 17 nt, Artificial Sequence
  Synthetic oligonucleotide: PDCD1-234
cugggcggugcuacaac

SEQ ID NO: 1555 - RNA, 17 nt, Artificial Sequence
  Synthetic oligonucleotide: PDCD1-235
ugggcggugcuacaacu

SEQ ID NO: 1556 - RNA, 17 nt, Artificial Sequence
  Synthetic oligonucleotide: PDCD1-236
cggugcuacaacugggc

SEQ ID NO: 1557 - RNA, 17 nt, Artificial Sequence
  Synthetic oligonucleotide: PDCD1-238
caacugggcuggcggcc

SEQ ID NO: 1558 - RNA, 17 nt, Artificial Sequence
  Synthetic oligonucleotide: PDCD1-240
cggccaggaugguucuu

SEQ ID NO: 1559 - RNA, 17 nt, Artificial Sequence
  Synthetic oligonucleotide: PDCD1-2514
acuccuggguuccucuc

SEQ ID NO: 1560 - RNA, 17 nt, Artificial Sequence
  Synthetic oligonucleotide: PDCD1-2526
uguuucuguagaaugac

SEQ ID NO: 1561 - RNA, 17 nt, Artificial Sequence
  Synthetic oligonucleotide: PDCD1-2527
cuguagaaugacggguc

SEQ ID NO: 1562 - RNA, 17 nt, Artificial Sequence
  Synthetic oligonucleotide: PDCD1-2528
agaaugacgggucaggc

SEQ ID NO: 1563 - RNA, 17 nt, Artificial Sequence
  Synthetic oligonucleotide: PDCD1-2530
accccaaaccuuggccg

SEQ ID NO: 1564 - RNA, 17 nt, Artificial Sequence
  Synthetic oligonucleotide: PDCD1-2668
cccacgggguagggcgu

SEQ ID NO: 1565 - RNA, 17 nt, Artificial Sequence
  Synthetic oligonucleotide: PDCD1-2673
ugucacucucgcccacg

SEQ ID NO: 1566 - RNA, 17 nt, Artificial Sequence
  Synthetic oligonucleotide: PDCD1-2674
ucucgcccacguggaug

SEQ ID NO: 1567 - RNA, 20 nt, Artificial Sequence
  Synthetic oligonucleotide: PDCD1-2083
gccgccacgcagacucccca

SEQ ID NO: 1568 - RNA, 20 nt, Artificial Sequence
  Synthetic oligonucleotide: PDCD1-2085
gacuccccacggccaagguu

SEQ ID NO: 1569 - RNA, 20 nt, Artificial Sequence
  Synthetic oligonucleotide: PDCD1-2094
gaccggcugagaggggacag

SEQ ID NO: 1570 - RNA, 20 nt, Artificial Sequence
  Synthetic oligonucleotide: PDCD1-2095
gacagagguccugccugccc

SEQ ID NO: 1571 - RNA, 20 nt, Artificial Sequence
  Synthetic oligonucleotide: PDCD1-2098
gccugcccaggagcaaagag

SEQ ID NO: 1572 - RNA, 20 nt, Artificial Sequence
  Synthetic oligonucleotide: PDCD1-2101
gcaaagaggggacuugggcc

SEQ ID NO: 1573 - RNA, 20 nt, Artificial Sequence
  Synthetic oligonucleotide: PDCD1-2104
gaggggacuugggccagggg

SEQ ID NO: 1574 - RNA, 20 nt, Artificial Sequence
  Synthetic oligonucleotide: PDCD1-2108
ggaggaguuggggcccagag

SEQ ID NO: 1575 - RNA, 20 nt, Artificial Sequence
  Synthetic oligonucleotide: PDCD1-2111
gcccaaagccacacagcuca

SEQ ID NO: 1576 - RNA, 20 nt, Artificial Sequence
  Synthetic oligonucleotide: PDCD1-2114
gccacacagcucaggguaag

SEQ ID NO: 1577 - RNA, 20 nt, Artificial Sequence
  Synthetic oligonucleotide: PDCD1-2120
gcagagcugggggccaaggc

SEQ ID NO: 1578 - RNA, 20 nt, Artificial Sequence
  Synthetic oligonucleotide: PDCD1-2136
gaccugccagggacugaggg

SEQ ID NO: 1579 - RNA, 20 nt, Artificial Sequence
  Synthetic oligonucleotide: PDCD1-2138
ggaaggucccuccagacccc

SEQ ID NO: 1580 - RNA, 20 nt, Artificial Sequence
  Synthetic oligonucleotide: PDCD1-105
ggcgcccuggccagucgucu

SEQ ID NO: 1581 - RNA, 20 nt, Artificial Sequence
  Synthetic oligonucleotide: PDCD1-106
gcccuggccagucgucuggg

SEQ ID NO: 1582 - RNA, 20 nt, Artificial Sequence
  Synthetic oligonucleotide: PDCD1-114
ggccaggaugguucuuaggu

SEQ ID NO: 1583 - RNA, 20 nt, Artificial Sequence
  Synthetic oligonucleotide: PDCD1-117
ggaugguucuuagguaggug

SEQ ID NO: 1584 - RNA, 20 nt, Artificial Sequence
  Synthetic oligonucleotide: PDCD1-118
gguucuuagguagguggggu

SEQ ID NO: 1585 - RNA, 20 nt, Artificial Sequence
  Synthetic oligonucleotide: PDCD1-120
gguagguggggucggcgguc

SEQ ID NO: 1586 - RNA, 20 nt, Artificial Sequence
  Synthetic oligonucleotide: PDCD1-2165
ggucaggugucccagagcca

SEQ ID NO: 1587 - RNA, 20 nt, Artificial Sequence
  Synthetic oligonucleotide: PDCD1-2166
gucaggugucccagagccag

SEQ ID NO: 1588 - RNA, 20 nt, Artificial Sequence
  Synthetic oligonucleotide: PDCD1-2167
gugucccagagccagggguc

SEQ ID NO: 1589 - RNA, 20 nt, Artificial Sequence
  Synthetic oligonucleotide: PDCD1-2170
gaccuuccacccucaguccc

SEQ ID NO: 1590 - RNA, 20 nt, Artificial Sequence
  Synthetic oligonucleotide: PDCD1-2180
ggggggugcugaggcgggcc

SEQ ID NO: 1591 - RNA, 20 nt, Artificial Sequence
  Synthetic oligonucleotide: PDCD1-2182
gggccuggcccuggcagccc

SEQ ID NO: 1592 - RNA, 20 nt, Artificial Sequence
  Synthetic oligonucleotide: PDCD1-2183
ggccuggcccuggcagccca

SEQ ID NO: 1593 - RNA, 20 nt, Artificial Sequence
  Synthetic oligonucleotide: PDCD1-2184
gccuggcccuggcagcccag

SEQ ID NO: 1594 - RNA, 20 nt, Artificial Sequence
  Synthetic oligonucleotide: PDCD1-2187
gcccaggggucccggagcga

SEQ ID NO: 1595 - RNA, 20 nt, Artificial Sequence
  Synthetic oligonucleotide: PDCD1-2189
gggucccggagcgagggguc

SEQ ID NO: 1596 - RNA, 20 nt, Artificial Sequence
  Synthetic oligonucleotide: PDCD1-2192
gaccuuucacucucaguccc

SEQ ID NO: 1597 - RNA, 20 nt, Artificial Sequence
  Synthetic oligonucleotide: PDCD1-2202
gccccuuacccugagcugug

SEQ ID NO: 1598 - RNA, 20 nt, Artificial Sequence
  Synthetic oligonucleotide: PDCD1-2208
gaacuccuggguuccucucu

SEQ ID NO: 1599 - RNA, 20 nt, Artificial Sequence
  Synthetic oligonucleotide: PDCD1-2214
gaccucuguccccucucagc

SEQ ID NO: 1600 - RNA, 20 nt, Artificial Sequence
  Synthetic oligonucleotide: PDCD1-2215
guccccucucagccgguccu

SEQ ID NO: 1601 - RNA, 20 nt, Artificial Sequence
  Synthetic oligonucleotide: PDCD1-2224
gaaccccaaaccuuggccgu

SEQ ID NO: 1602 - RNA, 20 nt, Artificial Sequence
  Synthetic oligonucleotide: PDCD1-2227
gccguggggagucugcgugg

SEQ ID NO: 1603 - RNA, 20 nt, Artificial Sequence
  Synthetic oligonucleotide: PDCD1-2243
gagagugacagaggcagugc

SEQ ID NO: 1604 - RNA, 20 nt, Artificial Sequence
  Synthetic oligonucleotide: PDCD1-2245
gagugacagaggcagugcug

SEQ ID NO: 1605 - RNA, 20 nt, Artificial Sequence
  Synthetic oligonucleotide: PDCD1-2247
gacagaggcagugcuggggg

SEQ ID NO: 1606 - RNA, 20 nt, Artificial Sequence
  Synthetic oligonucleotide: PDCD1-2249
gaggcagugcugggggagga

SEQ ID NO: 1607 - RNA, 20 nt, Artificial Sequence
  Synthetic oligonucleotide: PDCD1-2251
gugcugggggaggaggggug

SEQ ID NO: 1608 - RNA, 20 nt, Artificial Sequence
  Synthetic oligonucleotide: PDCD1-2254
gggggaggaggggugaggag

SEQ ID NO: 1609 - RNA, 20 nt, Artificial Sequence
  Synthetic oligonucleotide: PDCD1-2255
ggggaggaggggugaggagg

SEQ ID NO: 1610 - RNA, 20 nt, Artificial Sequence
  Synthetic oligonucleotide: PDCD1-2257
gggugaggaggggguaggac

SEQ ID NO: 1611 - RNA, 20 nt, Artificial Sequence
  Synthetic oligonucleotide: PDCD1-2258
ggugaggaggggguaggacu

SEQ ID NO: 1612 - RNA, 20 nt, Artificial Sequence
  Synthetic oligonucleotide: PDCD1-2259
gugaggaggggguaggacug

SEQ ID NO: 1613 - RNA, 20 nt, Artificial Sequence
  Synthetic oligonucleotide: PDCD1-2260
gaggggguaggacuggggag

SEQ ID NO: 1614 - RNA, 20 nt, Artificial Sequence
  Synthetic oligonucleotide: PDCD1-2262
ggguaggacuggggagaggg

SEQ ID NO: 1615 - RNA, 20 nt, Artificial Sequence
  Synthetic oligonucleotide: PDCD1-2263
gguaggacuggggagagggu

SEQ ID NO: 1616 - RNA, 20 nt, Artificial Sequence
  Synthetic oligonucleotide: PDCD1-2264
guaggacuggggagagggug

SEQ ID NO: 1617 - RNA, 20 nt, Artificial Sequence
  Synthetic oligonucleotide: PDCD1-2266
gacuggggagaggguggggg

SEQ ID NO: 1618 - RNA, 20 nt, Artificial Sequence
  Synthetic oligonucleotide: PDCD1-2269
gggagagagagacagagaca

SEQ ID NO: 1619 - RNA, 20 nt, Artificial Sequence
  Synthetic oligonucleotide: PDCD1-2272
gacagggagacagaggagau

SEQ ID NO: 1620 - RNA, 20 nt, Artificial Sequence
  Synthetic oligonucleotide: PDCD1-2274
gggagacagaggagaugggg

SEQ ID NO: 1621 - RNA, 20 nt, Artificial Sequence
  Synthetic oligonucleotide: PDCD1-2279
ggcccccacgcccuaccccg

SEQ ID NO: 1622 - RNA, 20 nt, Artificial Sequence
  Synthetic oligonucleotide: PDCD1-2280
gcccccacgcccuaccccgu

SEQ ID NO: 1623 - RNA, 20 nt, Artificial Sequence
  Synthetic oligonucleotide: PDCD1-2284
gugggggucuccccagcuca

SEQ ID NO: 1624 - RNA, 20 nt, Artificial Sequence
  Synthetic oligonucleotide: PDCD1-2287
gcugccccuccugaggcugc

SEQ ID NO: 1625 - RNA, 20 nt, Artificial Sequence
  Synthetic oligonucleotide: PDCD1-2300
gggggccgggccucccugcc

SEQ ID NO: 1626 - RNA, 20 nt, Artificial Sequence
  Synthetic oligonucleotide: PDCD1-2301
ggggccgggccucccugccu

SEQ ID NO: 1627 - RNA, 20 nt, Artificial Sequence
  Synthetic oligonucleotide: PDCD1-2302
gggccgggccucccugccug

SEQ ID NO: 1628 - RNA, 20 nt, Artificial Sequence
  Synthetic oligonucleotide: PDCD1-2304
gccucccugccuggggaagg

SEQ ID NO: 1629 - RNA, 20 nt, Artificial Sequence
  Synthetic oligonucleotide: PDCD1-2307
ggaagguggguggcccccuc

SEQ ID NO: 1630 - RNA, 20 nt, Artificial Sequence
  Synthetic oligonucleotide: PDCD1-2308
gaagguggguggcccccucu

SEQ ID NO: 1631 - RNA, 20 nt, Artificial Sequence
  Synthetic oligonucleotide: PDCD1-2309
ggguggcccccucugggcuc

SEQ ID NO: 1632 - RNA, 20 nt, Artificial Sequence
  Synthetic oligonucleotide: PDCD1-2312
gcccaggaaccugagcccag

SEQ ID NO: 1633 - RNA, 20 nt, Artificial Sequence
  Synthetic oligonucleotide: PDCD1-2316
gggggccacccaccuucccc

SEQ ID NO: 1634 - RNA, 20 nt, Artificial Sequence
  Synthetic oligonucleotide: PDCD1-2317
gccacccaccuuccccaggc

SEQ ID NO: 1635 - RNA, 20 nt, Artificial Sequence
  Synthetic oligonucleotide: PDCD1-2321
ggcagggaggcccggccccc

SEQ ID NO: 1636 - RNA, 20 nt, Artificial Sequence
  Synthetic oligonucleotide: PDCD1-2322
gcagggaggcccggccccca

SEQ ID NO: 1637 - RNA, 20 nt, Artificial Sequence
  Synthetic oligonucleotide: PDCD1-2324
ggcccggcccccagggagau

SEQ ID NO: 1638 - RNA, 20 nt, Artificial Sequence
  Synthetic oligonucleotide: PDCD1-2325
gcccggcccccagggagaug

SEQ ID NO: 1639 - RNA, 20 nt, Artificial Sequence
  Synthetic oligonucleotide: PDCD1-2333
ggagaugggggggauggggg

SEQ ID NO: 1640 - RNA, 20 nt, Artificial Sequence
  Synthetic oligonucleotide: PDCD1-2334
gggggggaugggggaggaga

SEQ ID NO: 1641 - RNA, 20 nt, Artificial Sequence
  Synthetic oligonucleotide: PDCD1-2335
ggggggaugggggaggagaa

SEQ ID NO: 1642 - RNA, 20 nt, Artificial Sequence
  Synthetic oligonucleotide: PDCD1-2336
gagaagggccugcccccacc

SEQ ID NO: 1643 - RNA, 20 nt, Artificial Sequence
  Synthetic oligonucleotide: PDCD1-2345
ggggcagcucgggcgggaua

SEQ ID NO: 1644 - RNA, 20 nt, Artificial Sequence
  Synthetic oligonucleotide: PDCD1-2350
gcagagacacagaggaggaa

SEQ ID NO: 1645 - RNA, 20 nt, Artificial Sequence
  Synthetic oligonucleotide: PDCD1-2353
ggaggaaggggcccugagcu

SEQ ID NO: 1646 - RNA, 20 nt, Artificial Sequence
  Synthetic oligonucleotide: PDCD1-2354
gaggaaggggcccugagcug

SEQ ID NO: 1647 - RNA, 20 nt, Artificial Sequence
  Synthetic oligonucleotide: PDCD1-2357
gagcuggggagacccccacg

SEQ ID NO: 1648 - RNA, 20 nt, Artificial Sequence
  Synthetic oligonucleotide: PDCD1-2359
ggggagacccccacggggua

SEQ ID NO: 1649 - RNA, 20 nt, Artificial Sequence
  Synthetic oligonucleotide: PDCD1-2360
gacccccacgggguagggcg

SEQ ID NO: 1650 - RNA, 20 nt, Artificial Sequence
  Synthetic oligonucleotide: PDCD1-2364
gggguagggcgugggggcca

SEQ ID NO: 1651 - RNA, 20 nt, Artificial Sequence
  Synthetic oligonucleotide: PDCD1-2365
ggguagggcgugggggccac

SEQ ID NO: 1652 - RNA, 20 nt, Artificial Sequence
  Synthetic oligonucleotide: PDCD1-2373
ggauguggaggaagaggggg

SEQ ID NO: 1653 - RNA, 20 nt, Artificial Sequence
  Synthetic oligonucleotide: PDCD1-2374
gauguggaggaagagggggc

SEQ ID NO: 1654 - RNA, 20 nt, Artificial Sequence
  Synthetic oligonucleotide: PDCD1-2376
ggaagagggggcgggagcaa

SEQ ID NO: 1655 - RNA, 20 nt, Artificial Sequence
  Synthetic oligonucleotide: PDCD1-2377
gaagagggggcgggagcaag

SEQ ID NO: 1656 - RNA, 20 nt, Artificial Sequence
  Synthetic oligonucleotide: PDCD1-2378
gagggggcgggagcaagggg

SEQ ID NO: 1657 - RNA, 20 nt, Artificial Sequence
  Synthetic oligonucleotide: PDCD1-2382
gcucaccuccgccugagcag

SEQ ID NO: 1658 - RNA, 20 nt, Artificial Sequence
  Synthetic oligonucleotide: PDCD1-2387
ggagaaggcggcacucuggu

SEQ ID NO: 1659 - RNA, 20 nt, Artificial Sequence
  Synthetic oligonucleotide: PDCD1-2388
gagaaggcggcacucuggug

SEQ ID NO: 1660 - RNA, 17 nt, Artificial Sequence
  Synthetic oligonucleotide: PDCD1-2390
gccacgcagacucccca

SEQ ID NO: 1661 - RNA, 17 nt, Artificial Sequence
  Synthetic oligonucleotide: PDCD1-2395
gccaagguuugggguuc

SEQ ID NO: 1662 - RNA, 17 nt, Artificial Sequence
  Synthetic oligonucleotide: PDCD1-2406
ggagcaaagaggggacu

SEQ ID NO: 1663 - RNA, 17 nt, Artificial Sequence
  Synthetic oligonucleotide: PDCD1-2407
gagcaaagaggggacuu

SEQ ID NO: 1664 - RNA, 17 nt, Artificial Sequence
  Synthetic oligonucleotide: PDCD1-2410
gaggggacuugggccag

SEQ ID NO: 1665 - RNA, 17 nt, Artificial Sequence
  Synthetic oligonucleotide: PDCD1-2411
gggacuugggccagggg

SEQ ID NO: 1666 - RNA, 17 nt, Artificial Sequence
  Synthetic oligonucleotide: PDCD1-2413
gggccaggggaggaguu

SEQ ID NO: 1667 - RNA, 17 nt, Artificial Sequence
  Synthetic oligonucleotide: PDCD1-2414
ggccaggggaggaguug

SEQ ID NO: 1668 - RNA, 17 nt, Artificial Sequence
  Synthetic oligonucleotide: PDCD1-2415
ggaguuggggcccagag

SEQ ID NO: 1669 - RNA, 17 nt, Artificial Sequence
  Synthetic oligonucleotide: PDCD1-2416
ggcccagagaggaaccc

SEQ ID NO: 1670 - RNA, 17 nt, Artificial Sequence
  Synthetic oligonucleotide: PDCD1-2423
ggguaaggggcagagcu

SEQ ID NO: 1671 - RNA, 17 nt, Artificial Sequence
  Synthetic oligonucleotide: PDCD1-2424
gguaaggggcagagcug

SEQ ID NO: 1672 - RNA, 17 nt, Artificial Sequence
  Synthetic oligonucleotide: PDCD1-2425
guaaggggcagagcugg

SEQ ID NO: 1673 - RNA, 17 nt, Artificial Sequence
  Synthetic oligonucleotide: PDCD1-2426
ggcagagcugggggcca

SEQ ID NO: 1674 - RNA, 17 nt, Artificial Sequence
  Synthetic oligonucleotide: PDCD1-2427
gagcugggggccaaggc

SEQ ID NO: 1675 - RNA, 17 nt, Artificial Sequence
  Synthetic oligonucleotide: PDCD1-2429
gcaccccccgaccugcc

SEQ ID NO: 1676 - RNA, 17 nt, Artificial Sequence
  Synthetic oligonucleotide: PDCD1-2436
gggaccccugggcugcc

SEQ ID NO: 1677 - RNA, 17 nt, Artificial Sequence
  Synthetic oligonucleotide: PDCD1-2437
ggaccccugggcugcca

SEQ ID NO: 1678 - RNA, 17 nt, Artificial Sequence
  Synthetic oligonucleotide: PDCD1-2429
gcaccccccgaccugcc

SEQ ID NO: 1679 - RNA, 17 nt, Artificial Sequence
  Synthetic oligonucleotide: PDCD1-2442
gaccugccagggacuga

SEQ ID NO: 1680 - RNA, 17 nt, Artificial Sequence
  Synthetic oligonucleotide: PDCD1-232
gcccuggccagucgucu

SEQ ID NO: 1681 - RNA, 17 nt, Artificial Sequence
  Synthetic oligonucleotide: PDCD1-242
gaugguucuuagguagg

SEQ ID NO: 1682 - RNA, 17 nt, Artificial Sequence
  Synthetic oligonucleotide: PDCD1-2483
gucccuggcaggucggg

SEQ ID NO: 1683 - RNA, 17 nt, Artificial Sequence
  Synthetic oligonucleotide: PDCD1-2485
gucggggggugcugagg

SEQ ID NO: 1684 - RNA, 17 nt, Artificial Sequence
  Synthetic oligonucleotide: PDCD1-2487
gggugcugaggcgggcc

SEQ ID NO: 1685 - RNA, 17 nt, Artificial Sequence
  Synthetic oligonucleotide: PDCD1-2498
ggagcgaggggucugga

SEQ ID NO: 1686 - RNA, 17 nt, Artificial Sequence
  Synthetic oligonucleotide: PDCD1-2483
gucccuggcaggucggg

SEQ ID NO: 1687 - RNA, 17 nt, Artificial Sequence
  Synthetic oligonucleotide: PDCD1-2516
ggccccaacuccucccc

SEQ ID NO: 1688 - RNA, 17 nt, Artificial Sequence
  Synthetic oligonucleotide: PDCD1-2518
guccccucuuugcuccu

SEQ ID NO: 1689 - RNA, 17 nt, Artificial Sequence
  Synthetic oligonucleotide: PDCD1-2525
guguuucuguagaauga

SEQ ID NO: 1690 - RNA, 17 nt, Artificial Sequence
  Synthetic oligonucleotide: PDCD1-2529
gccagaaccccaaaccu

SEQ ID NO: 1691 - RNA, 17 nt, Artificial Sequence
  Synthetic oligonucleotide: PDCD1-2533
gccguggggagucugcg

SEQ ID NO: 1692 - RNA, 17 nt, Artificial Sequence
  Synthetic oligonucleotide: PDCD1-2534
guggggagucugcgugg

SEQ ID NO: 1693 - RNA, 17 nt, Artificial Sequence
  Synthetic oligonucleotide: PDCD1-2538
gcucaggcggaggugag

SEQ ID NO: 1694 - RNA, 17 nt, Artificial Sequence
  Synthetic oligonucleotide: PDCD1-2540
ggcggaggugagcggaa

SEQ ID NO: 1695 - RNA, 17 nt, Artificial Sequence
  Synthetic oligonucleotide: PDCD1-2541
ggaagggaaacuguccc

SEQ ID NO: 1696 - RNA, 17 nt, Artificial Sequence
  Synthetic oligonucleotide: PDCD1-2542
ggaaacugucccagguc

SEQ ID NO: 1697 - RNA, 17 nt, Artificial Sequence
  Synthetic oligonucleotide: PDCD1-2543
gucccaggucagguuga

SEQ ID NO: 1698 - RNA, 17 nt, Artificial Sequence
  Synthetic oligonucleotide: PDCD1-2549
gugggcgagagugacag

SEQ ID NO: 1699 - RNA, 17 nt, Artificial Sequence
  Synthetic oligonucleotide: PDCD1-2551
gugacagaggcagugcu

SEQ ID NO: 1700 - RNA, 17 nt, Artificial Sequence
  Synthetic oligonucleotide: PDCD1-2553
gacagaggcagugcugg

SEQ ID NO: 1701 - RNA, 17 nt, Artificial Sequence
  Synthetic oligonucleotide: PDCD1-2555
ggcagugcugggggagg

SEQ ID NO: 1702 - RNA, 17 nt, Artificial Sequence
  Synthetic oligonucleotide: PDCD1-2556
gcagugcugggggagga

SEQ ID NO: 1703 - RNA, 17 nt, Artificial Sequence
  Synthetic oligonucleotide: PDCD1-2559
ggggaggaggggugagg

SEQ ID NO: 1704 - RNA, 17 nt, Artificial Sequence
  Synthetic oligonucleotide: PDCD1-2560
gggaggaggggugagga

SEQ ID NO: 1705 - RNA, 17 nt, Artificial Sequence
  Synthetic oligonucleotide: PDCD1-2561
ggaggaggggugaggag

SEQ ID NO: 1706 - RNA, 17 nt, Artificial Sequence
  Synthetic oligonucleotide: PDCD1-2562
gaggaggggugaggagg

SEQ ID NO: 1707 - RNA, 17 nt, Artificial Sequence
  Synthetic oligonucleotide: PDCD1-2565
gaggaggggguaggacu

SEQ ID NO: 1708 - RNA, 17 nt, Artificial Sequence
  Synthetic oligonucleotide: PDCD1-2567
gggguaggacuggggag

SEQ ID NO: 1709 - RNA, 17 nt, Artificial Sequence
  Synthetic oligonucleotide: PDCD1-2568
ggguaggacuggggaga

SEQ ID NO: 1710 - RNA, 17 nt, Artificial Sequence
  Synthetic oligonucleotide: PDCD1-2571
ggacuggggagagggug

SEQ ID NO: 1711 - RNA, 17 nt, Artificial Sequence
  Synthetic oligonucleotide: PDCD1-2572
gacuggggagagggugg

SEQ ID NO: 1712 - RNA, 17 nt, Artificial Sequence
  Synthetic oligonucleotide: PDCD1-2574
ggggagaggguggggga

SEQ ID NO: 1713 - RNA, 17 nt, Artificial Sequence
  Synthetic oligonucleotide: PDCD1-2575
gagagagagacagagac

SEQ ID NO: 1714 - RNA, 17 nt, Artificial Sequence
  Synthetic oligonucleotide: PDCD1-2580
gggagacagaggagaug

SEQ ID NO: 1715 - RNA, 17 nt, Artificial Sequence
  Synthetic oligonucleotide: PDCD1-2584
ggagauggggaggaggu

SEQ ID NO: 1716 - RNA, 17 nt, Artificial Sequence
  Synthetic oligonucleotide: PDCD1-2585
gggaggaggugggcccg

SEQ ID NO: 1717 - RNA, 17 nt, Artificial Sequence
  Synthetic oligonucleotide: PDCD1-2590
gggggucuccccagcuc

SEQ ID NO: 1718 - RNA, 17 nt, Artificial Sequence
  Synthetic oligonucleotide: PDCD1-2591
ggggucuccccagcuca

SEQ ID NO: 1719 - RNA, 17 nt, Artificial Sequence
  Synthetic oligonucleotide: PDCD1-2592
gucucugcucacugcug

SEQ ID NO: 1720 - RNA, 17 nt, Artificial Sequence
  Synthetic oligonucleotide: PDCD1-2594
gccccuccugaggcugc

SEQ ID NO: 1721 - RNA, 17 nt, Artificial Sequence
  Synthetic oligonucleotide: PDCD1-2600
ggcugccgggugggggc

SEQ ID NO: 1722 - RNA, 17 nt, Artificial Sequence
  Synthetic oligonucleotide: PDCD1-2607
ggccgggccucccugcc

SEQ ID NO: 1723 - RNA, 17 nt, Artificial Sequence
  Synthetic oligonucleotide: PDCD1-2608
gccgggccucccugccu

SEQ ID NO: 1724 - RNA, 17 nt, Artificial Sequence
  Synthetic oligonucleotide: PDCD1-2610
gccucccugccugggga

SEQ ID NO: 1725 - RNA, 17 nt, Artificial Sequence
  Synthetic oligonucleotide: PDCD1-2615
gguggguggcccccucu

SEQ ID NO: 1726 - RNA, 17 nt, Artificial Sequence
  Synthetic oligonucleotide: PDCD1-2621
ggaaccugagcccagag

SEQ ID NO: 1727 - RNA, 17 nt, Artificial Sequence
  Synthetic oligonucleotide: PDCD1-2622
gaaccugagcccagagg

SEQ ID NO: 1728 - RNA, 17 nt, Artificial Sequence
  Synthetic oligonucleotide: PDCD1-2623
ggccacccaccuucccc

SEQ ID NO: 1729 - RNA, 17 nt, Artificial Sequence
  Synthetic oligonucleotide: PDCD1-2629
gggaggcccggccccca

SEQ ID NO: 1730 - RNA, 17 nt, Artificial Sequence
  Synthetic oligonucleotide: PDCD1-2633
ggcccccagggagaugg

SEQ ID NO: 1731 - RNA, 17 nt, Artificial Sequence
  Synthetic oligonucleotide: PDCD1-2634
gcccccagggagauggg

SEQ ID NO: 1732 - RNA, 17 nt, Artificial Sequence
  Synthetic oligonucleotide: PDCD1-2638
gggagaugggggggaug

SEQ ID NO: 1733 - RNA, 17 nt, Artificial Sequence
  Synthetic oligonucleotide: PDCD1-2639
ggagaugggggggaugg

SEQ ID NO: 1734 - RNA, 17 nt, Artificial Sequence
  Synthetic oligonucleotide: PDCD1-2640
gaugggggggauggggg

SEQ ID NO: 1735 - RNA, 17 nt, Artificial Sequence
  Synthetic oligonucleotide: PDCD1-2641
ggggaugggggaggaga

SEQ ID NO: 1736 - RNA, 17 nt, Artificial Sequence
  Synthetic oligonucleotide: PDCD1-2642
gggaugggggaggagaa

SEQ ID NO: 1737 - RNA, 17 nt, Artificial Sequence
  Synthetic oligonucleotide: PDCD1-2651
ggaggggcagcucgggc

SEQ ID NO: 1738 - RNA, 17 nt, Artificial Sequence
  Synthetic oligonucleotide: PDCD1-2652
gcagcucgggcgggaua

SEQ ID NO: 1739 - RNA, 17 nt, Artificial Sequence
  Synthetic oligonucleotide: PDCD1-2655
gagcagagacacagagg

SEQ ID NO: 1740 - RNA, 17 nt, Artificial Sequence
  Synthetic oligonucleotide: PDCD1-2657
gagacacagaggaggaa

SEQ ID NO: 1741 - RNA, 17 nt, Artificial Sequence
  Synthetic oligonucleotide: PDCD1-2660
ggaaggggcccugagcu

SEQ ID NO: 1742 - RNA, 17 nt, Artificial Sequence
  Synthetic oligonucleotide: PDCD1-2661
gaaggggcccugagcug

SEQ ID NO: 1743 - RNA, 17 nt, Artificial Sequence
  Synthetic oligonucleotide: PDCD1-2663
gcuggggagacccccac

SEQ ID NO: 1744 - RNA, 17 nt, Artificial Sequence
  Synthetic oligonucleotide: PDCD1-2665
ggagacccccacggggu

SEQ ID NO: 1745 - RNA, 17 nt, Artificial Sequence
  Synthetic oligonucleotide: PDCD1-2666
gagacccccacggggua

SEQ ID NO: 1746 - RNA, 17 nt, Artificial Sequence
  Synthetic oligonucleotide: PDCD1-2671
guagggcgugggggcca

SEQ ID NO: 1747 - RNA, 17 nt, Artificial Sequence
  Synthetic oligonucleotide: PDCD1-2677
guggauguggaggaaga

SEQ ID NO: 1748 - RNA, 17 nt, Artificial Sequence
  Synthetic oligonucleotide: PDCD1-2679
ggauguggaggaagagg

SEQ ID NO: 1749 - RNA, 17 nt, Artificial Sequence
  Synthetic oligonucleotide: PDCD1-2681
guggaggaagagggggc

SEQ ID NO: 1750 - RNA, 17 nt, Artificial Sequence
  Synthetic oligonucleotide: PDCD1-2684
gagggggcgggagcaag

SEQ ID NO: 1751 - RNA, 17 nt, Artificial Sequence
  Synthetic oligonucleotide: PDCD1-2685
ggggcgggagcaagggg

SEQ ID NO: 1752 - RNA, 17 nt, Artificial Sequence
  Synthetic oligonucleotide: PDCD1-2686
gggcgggagcaaggggc

SEQ ID NO: 1753 - RNA, 17 nt, Artificial Sequence
  Synthetic oligonucleotide: PDCD1-2694
gaaggcggcacucuggu

SEQ ID NO: 1754 - RNA, 20 nt, Artificial Sequence
  Synthetic oligonucleotide: PDCD1-2084
acgcagacuccccacggcca

SEQ ID NO: 1755 - RNA, 20 nt, Artificial Sequence
  Synthetic oligonucleotide: PDCD1-2088
acggccaagguuugggguuc

SEQ ID NO: 1756 - RNA, 20 nt, Artificial Sequence
  Synthetic oligonucleotide: PDCD1-2089
uacagaaacacgcagcccca

SEQ ID NO: 1757 - RNA, 20 nt, Artificial Sequence
  Synthetic oligonucleotide: PDCD1-2090
aaacacgcagccccaaggac

SEQ ID NO: 1758 - RNA, 20 nt, Artificial Sequence
  Synthetic oligonucleotide: PDCD1-2091
agccccaaggaccggcugag

SEQ ID NO: 1759 - RNA, 20 nt, Artificial Sequence
  Synthetic oligonucleotide: PDCD1-2096
cugccugcccaggagcaaag

SEQ ID NO: 1760 - RNA, 20 nt, Artificial Sequence
  Synthetic oligonucleotide: PDCD1-2097
ugccugcccaggagcaaaga

SEQ ID NO: 1761 - RNA, 20 nt, Artificial Sequence
  Synthetic oligonucleotide: PDCD1-2099
ccaggagcaaagaggggacu

SEQ ID NO: 1762 - RNA, 20 nt, Artificial Sequence
  Synthetic oligonucleotide: PDCD1-2100
caggagcaaagaggggacuu

SEQ ID NO: 1763 - RNA, 20 nt, Artificial Sequence
  Synthetic oligonucleotide: PDCD1-2102
caaagaggggacuugggcca

SEQ ID NO: 1764 - RNA, 20 nt, Artificial Sequence
  Synthetic oligonucleotide: PDCD1-2103
aaagaggggacuugggccag

SEQ ID NO: 1765 - RNA, 20 nt, Artificial Sequence
  Synthetic oligonucleotide: PDCD1-2105
acuugggccaggggaggagu

SEQ ID NO: 1766 - RNA, 20 nt, Artificial Sequence
  Synthetic oligonucleotide: PDCD1-2106
cuugggccaggggaggaguu

SEQ ID NO: 1767 - RNA, 20 nt, Artificial Sequence
  Synthetic oligonucleotide: PDCD1-2107
uugggccaggggaggaguug

SEQ ID NO: 1768 - RNA, 20 nt, Artificial Sequence
  Synthetic oligonucleotide: PDCD1-2109
uggggcccagagaggaaccc

SEQ ID NO: 1769 - RNA, 20 nt, Artificial Sequence
  Synthetic oligonucleotide: PDCD1-2110
ugcccaaagccacacagcuc

SEQ ID NO: 1770 - RNA, 20 nt, Artificial Sequence
  Synthetic oligonucleotide: PDCD1-2112
aagccacacagcucagggua

SEQ ID NO: 1771 - RNA, 20 nt, Artificial Sequence
  Synthetic oligonucleotide: PDCD1-2113
agccacacagcucaggguaa

SEQ ID NO: 1772 - RNA, 20 nt, Artificial Sequence
  Synthetic oligonucleotide: PDCD1-2115
cucaggguaaggggcagagc

SEQ ID NO: 1773 - RNA, 20 nt, Artificial Sequence
  Synthetic oligonucleotide: PDCD1-2116
ucaggguaaggggcagagcu

SEQ ID NO: 1774 - RNA, 20 nt, Artificial Sequence
  Synthetic oligonucleotide: PDCD1-2117
caggguaaggggcagagcug

SEQ ID NO: 1775 - RNA, 20 nt, Artificial Sequence
  Synthetic oligonucleotide: PDCD1-2118
aggguaaggggcagagcugg

SEQ ID NO: 1776 - RNA, 20 nt, Artificial Sequence
  Synthetic oligonucleotide: PDCD1-2119
aggggcagagcugggggcca

SEQ ID NO: 1777 - RNA, 20 nt, Artificial Sequence
  Synthetic oligonucleotide: PDCD1-2121
cagagcugggggccaaggcu

SEQ ID NO: 1778 - RNA, 20 nt, Artificial Sequence
  Synthetic oligonucleotide: PDCD1-2122
acagcaccccccgaccugcc

SEQ ID NO: 1779 - RNA, 20 nt, Artificial Sequence
  Synthetic oligonucleotide: PDCD1-2123
cagcaccccccgaccugcca

SEQ ID NO: 1780 - RNA, 20 nt, Artificial Sequence
  Synthetic oligonucleotide: PDCD1-2124
ugccagggacugagagugaa

SEQ ID NO: 1781 - RNA, 20 nt, Artificial Sequence
  Synthetic oligonucleotide: PDCD1-2125
ucccuccagaccccucgcuc

SEQ ID NO: 1782 - RNA, 20 nt, Artificial Sequence
  Synthetic oligonucleotide: PDCD1-2126
cccuccagaccccucgcucc

SEQ ID NO: 1783 - RNA, 20 nt, Artificial Sequence
  Synthetic oligonucleotide: PDCD1-2127
accccucgcuccgggacccc

SEQ ID NO: 1784 - RNA, 20 nt, Artificial Sequence
  Synthetic oligonucleotide: PDCD1-2128
ccccucgcuccgggaccccu

SEQ ID NO: 1785 - RNA, 20 nt, Artificial Sequence
  Synthetic oligonucleotide: PDCD1-2129
uccgggaccccugggcugcc

SEQ ID NO: 1786 - RNA, 20 nt, Artificial Sequence
  Synthetic oligonucleotide: PDCD1-2130
ccgggaccccugggcugcca

SEQ ID NO: 1787 - RNA, 20 nt, Artificial Sequence
  Synthetic oligonucleotide: PDCD1-2131
accccugggcugccagggcc

SEQ ID NO: 1788 - RNA, 20 nt, Artificial Sequence
  Synthetic oligonucleotide: PDCD1-2132
ucagcaccccccgaccugcc

SEQ ID NO: 1789 - RNA, 20 nt, Artificial Sequence
  Synthetic oligonucleotide: PDCD1-2123
cagcaccccccgaccugcca

SEQ ID NO: 1790 - RNA, 20 nt, Artificial Sequence
  Synthetic oligonucleotide: PDCD1-2134
ccccgaccugccagggacug

SEQ ID NO: 1791 - RNA, 20 nt, Artificial Sequence
  Synthetic oligonucleotide: PDCD1-2135
cccgaccugccagggacuga

SEQ ID NO: 1792 - RNA, 20 nt, Artificial Sequence
  Synthetic oligonucleotide: PDCD1-2137
ugccagggacugagggugga

SEQ ID NO: 1793 - RNA, 20 nt, Artificial Sequence
  Synthetic oligonucleotide: PDCD1-2139
ucccuccagaccccuggcuc

SEQ ID NO: 1794 - RNA, 20 nt, Artificial Sequence
  Synthetic oligonucleotide: PDCD1-2140
cccuccagaccccuggcucu

SEQ ID NO: 1795 - RNA, 20 nt, Artificial Sequence
  Synthetic oligonucleotide: PDCD1-125
acgacuggccagggcgccug

SEQ ID NO: 1796 - RNA, 20 nt, Artificial Sequence
  Synthetic oligonucleotide: PDCD1-110
cggugcuacaacugggcugg

SEQ ID NO: 1797 - RNA, 20 nt, Artificial Sequence
  Synthetic oligonucleotide: PDCD1-112
aacugggcuggcggccagga

SEQ ID NO: 1798 - RNA, 20 nt, Artificial Sequence
  Synthetic oligonucleotide: PDCD1-115
caggaugguucuuagguagg

SEQ ID NO: 1799 - RNA, 20 nt, Artificial Sequence
  Synthetic oligonucleotide: PDCD1-116
aggaugguucuuagguaggu

SEQ ID NO: 1800 - RNA, 20 nt, Artificial Sequence
  Synthetic oligonucleotide: PDCD1-119
ucuuagguagguggggucgg

SEQ ID NO: 1801 - RNA, 20 nt, Artificial Sequence
  Synthetic oligonucleotide: PDCD1-2164
cggucaggugucccagagcc

SEQ ID NO: 1802 - RNA, 20 nt, Artificial Sequence
  Synthetic oligonucleotide: PDCD1-2168
ucccagagccaggggucugg

SEQ ID NO: 1803 - RNA, 20 nt, Artificial Sequence
  Synthetic oligonucleotide: PDCD1-2169
cccagagccaggggucugga

SEQ ID NO: 1804 - RNA, 20 nt, Artificial Sequence
  Synthetic oligonucleotide: PDCD1-2171
uuccacccucagucccuggc

SEQ ID NO: 1805 - RNA, 20 nt, Artificial Sequence
  Synthetic oligonucleotide: PDCD1-2172
acccucagucccuggcaggu

SEQ ID NO: 1806 - RNA, 20 nt, Artificial Sequence
  Synthetic oligonucleotide: PDCD1-2173
cccucagucccuggcagguc

SEQ ID NO: 1807 - RNA, 20 nt, Artificial Sequence
  Synthetic oligonucleotide: PDCD1-2174
ccucagucccuggcaggucg

SEQ ID NO: 1808 - RNA, 20 nt, Artificial Sequence
  Synthetic oligonucleotide: PDCD1-2175
cucagucccuggcaggucgg

SEQ ID NO: 1809 - RNA, 20 nt, Artificial Sequence
  Synthetic oligonucleotide: PDCD1-2176
ucagucccuggcaggucggg

SEQ ID NO: 1810 - RNA, 20 nt, Artificial Sequence
  Synthetic oligonucleotide: PDCD1-2177
uggcaggucggggggugcug

SEQ ID NO: 1811 - RNA, 20 nt, Artificial Sequence
  Synthetic oligonucleotide: PDCD1-2178
caggucggggggugcugagg

SEQ ID NO: 1812 - RNA, 20 nt, Artificial Sequence
  Synthetic oligonucleotide: PDCD1-2179
aggucggggggugcugaggc

SEQ ID NO: 1813 - RNA, 20 nt, Artificial Sequence
  Synthetic oligonucleotide: PDCD1-2181
ugcugaggcgggccuggccc

SEQ ID NO: 1814 - RNA, 20 nt, Artificial Sequence
  Synthetic oligonucleotide: PDCD1-2185
cccuggcagcccaggggucc

SEQ ID NO: 1815 - RNA, 20 nt, Artificial Sequence
  Synthetic oligonucleotide: PDCD1-2186
agcccaggggucccggagcg

SEQ ID NO: 1816 - RNA, 20 nt, Artificial Sequence
  Synthetic oligonucleotide: PDCD1-2188
cccaggggucccggagcgag

SEQ ID NO: 1817 - RNA, 20 nt, Artificial Sequence
  Synthetic oligonucleotide: PDCD1-2190
ucccggagcgaggggucugg

SEQ ID NO: 1818 - RNA, 20 nt, Artificial Sequence
  Synthetic oligonucleotide: PDCD1-2191
cccggagcgaggggucugga

SEQ ID NO: 1819 - RNA, 20 nt, Artificial Sequence
  Synthetic oligonucleotide: PDCD1-2193
uuucacucucagucccuggc

SEQ ID NO: 1820 - RNA, 20 nt, Artificial Sequence
  Synthetic oligonucleotide: PDCD1-2194
acucucagucccuggcaggu

SEQ ID NO: 1821 - RNA, 20 nt, Artificial Sequence
  Synthetic oligonucleotide: PDCD1-2195
cucucagucccuggcagguc

SEQ ID NO: 1822 - RNA, 20 nt, Artificial Sequence
  Synthetic oligonucleotide: PDCD1-2196
ucucagucccuggcaggucg

SEQ ID NO: 1823 - RNA, 20 nt, Artificial Sequence
  Synthetic oligonucleotide: PDCD1-2175
cucagucccuggcaggucgg

SEQ ID NO: 1824 - RNA, 20 nt, Artificial Sequence
  Synthetic oligonucleotide: PDCD1-2176
ucagucccuggcaggucggg

SEQ ID NO: 1825 - RNA, 20 nt, Artificial Sequence
  Synthetic oligonucleotide: PDCD1-2177
uggcaggucggggggugcug

SEQ ID NO: 1826 - RNA, 20 nt, Artificial Sequence
  Synthetic oligonucleotide: PDCD1-2200
aggucggggggugcuguggc

SEQ ID NO: 1827 - RNA, 20 nt, Artificial Sequence
  Synthetic oligonucleotide: PDCD1-2201
ugcuguggcaggcccagccu

SEQ ID NO: 1828 - RNA, 20 nt, Artificial Sequence
  Synthetic oligonucleotide: PDCD1-2203
uacccugagcuguguggcuu

SEQ ID NO: 1829 - RNA, 20 nt, Artificial Sequence
  Synthetic oligonucleotide: PDCD1-2204
acccugagcuguguggcuuu

SEQ ID NO: 1830 - RNA, 20 nt, Artificial Sequence
  Synthetic oligonucleotide: PDCD1-2205
cuuugggcagcucgaacucc

SEQ ID NO: 1831 - RNA, 20 nt, Artificial Sequence
  Synthetic oligonucleotide: PDCD1-2209
cugggccccaacuccucccc

SEQ ID NO: 1832 - RNA, 20 nt, Artificial Sequence
  Synthetic oligonucleotide: PDCD1-2210
ccaaguccccucuuugcucc

SEQ ID NO: 1833 - RNA, 20 nt, Artificial Sequence
  Synthetic oligonucleotide: PDCD1-2211
caaguccccucuuugcuccu

SEQ ID NO: 1834 - RNA, 20 nt, Artificial Sequence
  Synthetic oligonucleotide: PDCD1-2212
uccccucuuugcuccugggc

SEQ ID NO: 1835 - RNA, 20 nt, Artificial Sequence
  Synthetic oligonucleotide: PDCD1-2213
cucuuugcuccugggcaggc

SEQ ID NO: 1836 - RNA, 20 nt, Artificial Sequence
  Synthetic oligonucleotide: PDCD1-2216
uccccucucagccgguccuu

SEQ ID NO: 1837 - RNA, 20 nt, Artificial Sequence
  Synthetic oligonucleotide: PDCD1-2217
ccccucucagccgguccuug

SEQ ID NO: 1838 - RNA, 20 nt, Artificial Sequence
  Synthetic oligonucleotide: PDCD1-2218
ugcguguuucuguagaauga

SEQ ID NO: 1839 - RNA, 20 nt, Artificial Sequence
  Synthetic oligonucleotide: PDCD1-2222
cuggccagaaccccaaaccu

SEQ ID NO: 1840 - RNA, 20 nt, Artificial Sequence
  Synthetic oligonucleotide: PDCD1-2225
aaccccaaaccuuggccgug

SEQ ID NO: 1841 - RNA, 20 nt, Artificial Sequence
  Synthetic oligonucleotide: PDCD1-2226
uuggccguggggagucugcg

SEQ ID NO: 1842 - RNA, 20 nt, Artificial Sequence
  Synthetic oligonucleotide: PDCD1-2228
ugccgccuucuccacugcuc

SEQ ID NO: 1843 - RNA, 20 nt, Artificial Sequence
  Synthetic oligonucleotide: PDCD1-2229
cgccuucuccacugcucagg

SEQ ID NO: 1844 - RNA, 20 nt, Artificial Sequence
  Synthetic oligonucleotide: PDCD1-2230
cuucuccacugcucaggcgg

SEQ ID NO: 1845 - RNA, 20 nt, Artificial Sequence
  Synthetic oligonucleotide: PDCD1-2231
acugcucaggcggaggugag

SEQ ID NO: 1846 - RNA, 20 nt, Artificial Sequence
  Synthetic oligonucleotide: PDCD1-2232
cucaggcggaggugagcgga

SEQ ID NO: 1847 - RNA, 20 nt, Artificial Sequence
  Synthetic oligonucleotide: PDCD1-2233
ucaggcggaggugagcggaa

SEQ ID NO: 1848 - RNA, 20 nt, Artificial Sequence
  Synthetic oligonucleotide: PDCD1-2234
agcggaagggaaacuguccc

SEQ ID NO: 1849 - RNA, 20 nt, Artificial Sequence
  Synthetic oligonucleotide: PDCD1-2235
aagggaaacugucccagguc

SEQ ID NO: 1850 - RNA, 20 nt, Artificial Sequence
  Synthetic oligonucleotide: PDCD1-2236
acugucccaggucagguuga

SEQ ID NO: 1851 - RNA, 20 nt, Artificial Sequence
  Synthetic oligonucleotide: PDCD1-2237
cugucccaggucagguugaa

SEQ ID NO: 1852 - RNA, 20 nt, Artificial Sequence
  Synthetic oligonucleotide: PDCD1-2238
ucccaggucagguugaaggg

SEQ ID NO: 1853 - RNA, 20 nt, Artificial Sequence
  Synthetic oligonucleotide: PDCD1-2239
cccaggucagguugaaggga

SEQ ID NO: 1854 - RNA, 20 nt, Artificial Sequence
  Synthetic oligonucleotide: PDCD1-2240
ccucuuccuccacauccacg

SEQ ID NO: 1855 - RNA, 20 nt, Artificial Sequence
  Synthetic oligonucleotide: PDCD1-2241
cucuuccuccacauccacgu

SEQ ID NO: 1856 - RNA, 20 nt, Artificial Sequence
  Synthetic oligonucleotide: PDCD1-2242
cacgugggcgagagugacag

SEQ ID NO: 1857 - RNA, 20 nt, Artificial Sequence
  Synthetic oligonucleotide: PDCD1-2244
agagugacagaggcagugcu

SEQ ID NO: 1858 - RNA, 20 nt, Artificial Sequence
  Synthetic oligonucleotide: PDCD1-2246
agugacagaggcagugcugg

SEQ ID NO: 1859 - RNA, 20 nt, Artificial Sequence
  Synthetic oligonucleotide: PDCD1-2248
agaggcagugcugggggagg

SEQ ID NO: 1860 - RNA, 20 nt, Artificial Sequence
  Synthetic oligonucleotide: PDCD1-2250
aggcagugcugggggaggag

SEQ ID NO: 1861 - RNA, 20 nt, Artificial Sequence
  Synthetic oligonucleotide: PDCD1-2252
cugggggaggaggggugagg

SEQ ID NO: 1862 - RNA, 20 nt, Artificial Sequence
  Synthetic oligonucleotide: PDCD1-2253
ugggggaggaggggugagga

SEQ ID NO: 1863 - RNA, 20 nt, Artificial Sequence
  Synthetic oligonucleotide: PDCD1-2256
aggaggggugaggagggggu

SEQ ID NO: 1864 - RNA, 20 nt, Artificial Sequence
  Synthetic oligonucleotide: PDCD1-2261
aggggguaggacuggggaga

SEQ ID NO: 1865 - RNA, 20 nt, Artificial Sequence
  Synthetic oligonucleotide: PDCD1-2265
uaggacuggggagagggugg

SEQ ID NO: 1866 - RNA, 20 nt, Artificial Sequence
  Synthetic oligonucleotide: PDCD1-2267
acuggggagaggguggggga

SEQ ID NO: 1867 - RNA, 20 nt, Artificial Sequence
  Synthetic oligonucleotide: PDCD1-2268
agggagagagagacagagac

SEQ ID NO: 1868 - RNA, 20 nt, Artificial Sequence
  Synthetic oligonucleotide: PDCD1-2270
agacagagacagggagacag

SEQ ID NO: 1869 - RNA, 20 nt, Artificial Sequence
  Synthetic oligonucleotide: PDCD1-2271
agacagggagacagaggaga

SEQ ID NO: 1870 - RNA, 20 nt, Artificial Sequence
  Synthetic oligonucleotide: PDCD1-2273
acagggagacagaggagaug

SEQ ID NO: 1871 - RNA, 20 nt, Artificial Sequence
  Synthetic oligonucleotide: PDCD1-2275
agacagaggagauggggagg

SEQ ID NO: 1872 - RNA, 20 nt, Artificial Sequence
  Synthetic oligonucleotide: PDCD1-2276
cagaggagauggggaggagg

SEQ ID NO: 1873 - RNA, 20 nt, Artificial Sequence
  Synthetic oligonucleotide: PDCD1-2277
agaggagauggggaggaggu

SEQ ID NO: 1874 - RNA, 20 nt, Artificial Sequence
  Synthetic oligonucleotide: PDCD1-2278
auggggaggaggugggcccg

SEQ ID NO: 1875 - RNA, 20 nt, Artificial Sequence
  Synthetic oligonucleotide: PDCD1-2281
cccccacgcccuaccccgug

SEQ ID NO: 1876 - RNA, 20 nt, Artificial Sequence
  Synthetic oligonucleotide: PDCD1-2282
ccccacgcccuaccccgugg

SEQ ID NO: 1877 - RNA, 20 nt, Artificial Sequence
  Synthetic oligonucleotide: PDCD1-2283
cgugggggucuccccagcuc

SEQ ID NO: 1878 - RNA, 20 nt, Artificial Sequence
  Synthetic oligonucleotide: PDCD1-2285
ugugucucugcucacugcug

SEQ ID NO: 1879 - RNA, 20 nt, Artificial Sequence
  Synthetic oligonucleotide: PDCD1-2286
cgcccgagcugccccuccug

SEQ ID NO: 1880 - RNA, 20 nt, Artificial Sequence
  Synthetic oligonucleotide: PDCD1-2288
cugccccuccugaggcugcc

SEQ ID NO: 1881 - RNA, 20 nt, Artificial Sequence
  Synthetic oligonucleotide: PDCD1-2289
ccccuccugaggcugccggg

SEQ ID NO: 1882 - RNA, 20 nt, Artificial Sequence
  Synthetic oligonucleotide: PDCD1-2290
cccuccugaggcugccgggu

SEQ ID NO: 1883 - RNA, 20 nt, Artificial Sequence
  Synthetic oligonucleotide: PDCD1-2291
ccuccugaggcugccgggug

SEQ ID NO: 1884 - RNA, 20 nt, Artificial Sequence
  Synthetic oligonucleotide: PDCD1-2292
cuccugaggcugccgggugg

SEQ ID NO: 1885 - RNA, 20 nt, Artificial Sequence
  Synthetic oligonucleotide: PDCD1-2293
ugaggcugccgggugggggc

SEQ ID NO: 1886 - RNA, 20 nt, Artificial Sequence
  Synthetic oligonucleotide: PDCD1-2294
ccccaucccccccaucuccc

SEQ ID NO: 1887 - RNA, 20 nt, Artificial Sequence
  Synthetic oligonucleotide: PDCD1-2295
cccaucccccccaucucccu

SEQ ID NO: 1888 - RNA, 20 nt, Artificial Sequence
  Synthetic oligonucleotide: PDCD1-2296
ccaucccccccaucucccug

SEQ ID NO: 1889 - RNA, 20 nt, Artificial Sequence
  Synthetic oligonucleotide: PDCD1-2297
caucccccccaucucccugg

SEQ ID NO: 1890 - RNA, 20 nt, Artificial Sequence
  Synthetic oligonucleotide: PDCD1-2298
ccccccaucucccugggggc

SEQ ID NO: 1891 - RNA, 20 nt, Artificial Sequence
  Synthetic oligonucleotide: PDCD1-2299
cccccaucucccugggggcc

SEQ ID NO: 1892 - RNA, 20 nt, Artificial Sequence
  Synthetic oligonucleotide: PDCD1-2303
cgggccucccugccugggga

SEQ ID NO: 1893 - RNA, 20 nt, Artificial Sequence
  Synthetic oligonucleotide: PDCD1-2305
ccucccugccuggggaaggu

SEQ ID NO: 1894 - RNA, 20 nt, Artificial Sequence
  Synthetic oligonucleotide: PDCD1-2306
cccugccuggggaagguggg

SEQ ID NO: 1895 - RNA, 20 nt, Artificial Sequence
  Synthetic oligonucleotide: PDCD1-2310
ccccucugggcucagguucc

SEQ ID NO: 1896 - RNA, 20 nt, Artificial Sequence
  Synthetic oligonucleotide: PDCD1-2311
cccucugggcucagguuccu

SEQ ID NO: 1897 - RNA, 20 nt, Artificial Sequence
  Synthetic oligonucleotide: PDCD1-2313
cccaggaaccugagcccaga

SEQ ID NO: 1898 - RNA, 20 nt, Artificial Sequence
  Synthetic oligonucleotide: PDCD1-2314
ccaggaaccugagcccagag

SEQ ID NO: 1899 - RNA, 20 nt, Artificial Sequence
  Synthetic oligonucleotide: PDCD1-2315
caggaaccugagcccagagg

SEQ ID NO: 1900 - RNA, 20 nt, Artificial Sequence
  Synthetic oligonucleotide: PDCD1-2318
ccacccaccuuccccaggca

SEQ ID NO: 1901 - RNA, 20 nt, Artificial Sequence
  Synthetic oligonucleotide: PDCD1-2319
cccaccuuccccaggcaggg

SEQ ID NO: 1902 - RNA, 20 nt, Artificial Sequence
  Synthetic oligonucleotide: PDCD1-2320
cuuccccaggcagggaggcc

SEQ ID NO: 1903 - RNA, 20 nt, Artificial Sequence
  Synthetic oligonucleotide: PDCD1-2323
aggcccggcccccagggaga

SEQ ID NO: 1904 - RNA, 20 nt, Artificial Sequence
  Synthetic oligonucleotide: PDCD1-2326
cccggcccccagggagaugg

SEQ ID NO: 1905 - RNA, 20 nt, Artificial Sequence
  Synthetic oligonucleotide: PDCD1-2327
ccggcccccagggagauggg

SEQ ID NO: 1906 - RNA, 20 nt, Artificial Sequence
  Synthetic oligonucleotide: PDCD1-2328
cggcccccagggagaugggg

SEQ ID NO: 1907 - RNA, 20 nt, Artificial Sequence
  Synthetic oligonucleotide: PDCD1-2329
ccccagggagauggggggga

SEQ ID NO: 1908 - RNA, 20 nt, Artificial Sequence
  Synthetic oligonucleotide: PDCD1-2330
cccagggagaugggggggau

SEQ ID NO: 1909 - RNA, 20 nt, Artificial Sequence
  Synthetic oligonucleotide: PDCD1-2331
ccagggagaugggggggaug

SEQ ID NO: 1910 - RNA, 20 nt, Artificial Sequence
  Synthetic oligonucleotide: PDCD1-2332
cagggagaugggggggaugg

SEQ ID NO: 1911 - RNA, 20 nt, Artificial Sequence
  Synthetic oligonucleotide: PDCD1-2337
ugcccccacccggcagccuc

SEQ ID NO: 1912 - RNA, 20 nt, Artificial Sequence
  Synthetic oligonucleotide: PDCD1-2338
ccccacccggcagccucagg

SEQ ID NO: 1913 - RNA, 20 nt, Artificial Sequence
  Synthetic oligonucleotide: PDCD1-2339
cccacccggcagccucagga

SEQ ID NO: 1914 - RNA, 20 nt, Artificial Sequence
  Synthetic oligonucleotide: PDCD1-2340
ccacccggcagccucaggag

SEQ ID NO: 1915 - RNA, 20 nt, Artificial Sequence
  Synthetic oligonucleotide: PDCD1-2341
cagccucaggaggggcagcu

SEQ ID NO: 1916 - RNA, 20 nt, Artificial Sequence
  Synthetic oligonucleotide: PDCD1-2342
agccucaggaggggcagcuc

SEQ ID NO: 1917 - RNA, 20 nt, Artificial Sequence
  Synthetic oligonucleotide: PDCD1-2343
cucaggaggggcagcucggg

SEQ ID NO: 1918 - RNA, 20 nt, Artificial Sequence
  Synthetic oligonucleotide: PDCD1-2344
ucaggaggggcagcucgggc

SEQ ID NO: 1919 - RNA, 20 nt, Artificial Sequence
  Synthetic oligonucleotide: PDCD1-2347
agcagugagcagagacacag

SEQ ID NO: 1920 - RNA, 20 nt, Artificial Sequence
  Synthetic oligonucleotide: PDCD1-2348
agugagcagagacacagagg

SEQ ID NO: 1921 - RNA, 20 nt, Artificial Sequence
  Synthetic oligonucleotide: PDCD1-2349
agcagagacacagaggagga

SEQ ID NO: 1922 - RNA, 20 nt, Artificial Sequence
  Synthetic oligonucleotide: PDCD1-2351
cagagacacagaggaggaag

SEQ ID NO: 1923 - RNA, 20 nt, Artificial Sequence
  Synthetic oligonucleotide: PDCD1-2352
aggaggaaggggcccugagc

SEQ ID NO: 1924 - RNA, 20 nt, Artificial Sequence
  Synthetic oligonucleotide: PDCD1-2355
cugagcuggggagaccccca

SEQ ID NO: 1925 - RNA, 20 nt, Artificial Sequence
  Synthetic oligonucleotide: PDCD1-2356
ugagcuggggagacccccac

SEQ ID NO: 1926 - RNA, 20 nt, Artificial Sequence
  Synthetic oligonucleotide: PDCD1-2358
uggggagacccccacggggu

SEQ ID NO: 1927 - RNA, 20 nt, Artificial Sequence
  Synthetic oligonucleotide: PDCD1-2362
cccccacgggguagggcgug

SEQ ID NO: 1928 - RNA, 20 nt, Artificial Sequence
  Synthetic oligonucleotide: PDCD1-2363
ccccacgggguagggcgugg

SEQ ID NO: 1929 - RNA, 20 nt, Artificial Sequence
  Synthetic oligonucleotide: PDCD1-2368
ucucgcccacguggaugugg

SEQ ID NO: 1930 - RNA, 20 nt, Artificial Sequence
  Synthetic oligonucleotide: PDCD1-2369
ccacguggauguggaggaag

SEQ ID NO: 1931 - RNA, 20 nt, Artificial Sequence
  Synthetic oligonucleotide: PDCD1-2370
cacguggauguggaggaaga

SEQ ID NO: 1932 - RNA, 20 nt, Artificial Sequence
  Synthetic oligonucleotide: PDCD1-2371
acguggauguggaggaagag

SEQ ID NO: 1933 - RNA, 20 nt, Artificial Sequence
  Synthetic oligonucleotide: PDCD1-2372
cguggauguggaggaagagg

SEQ ID NO: 1934 - RNA, 20 nt, Artificial Sequence
  Synthetic oligonucleotide: PDCD1-2375
aggaagagggggcgggagca

SEQ ID NO: 1935 - RNA, 20 nt, Artificial Sequence
  Synthetic oligonucleotide: PDCD1-2379
agggggcgggagcaaggggc

SEQ ID NO: 1936 - RNA, 20 nt, Artificial Sequence
  Synthetic oligonucleotide: PDCD1-2380
acccucccuucaaccugacc

SEQ ID NO: 1937 - RNA, 20 nt, Artificial Sequence
  Synthetic oligonucleotide: PDCD1-2381
cccucccuucaaccugaccu

SEQ ID NO: 1938 - RNA, 20 nt, Artificial Sequence
  Synthetic oligonucleotide: PDCD1-2383
cuccgccugagcaguggaga

SEQ ID NO: 1939 - RNA, 20 nt, Artificial Sequence
  Synthetic oligonucleotide: PDCD1-2384
cgccugagcaguggagaagg

SEQ ID NO: 1940 - RNA, 20 nt, Artificial Sequence
  Synthetic oligonucleotide: PDCD1-2385
caguggagaaggcggcacuc

SEQ ID NO: 1941 - RNA, 20 nt, Artificial Sequence
  Synthetic oligonucleotide: PDCD1-2386
uggagaaggcggcacucugg

SEQ ID NO: 1942 - RNA, 20 nt, Artificial Sequence
  Synthetic oligonucleotide: PDCD1-101
cacucugguggggcugcucc

SEQ ID NO: 1943 - RNA, 17 nt, Artificial Sequence
  Synthetic oligonucleotide: PDCD1-2391
cagacuccccacggcca

SEQ ID NO: 1944 - RNA, 17 nt, Artificial Sequence
  Synthetic oligonucleotide: PDCD1-2392
uccccacggccaagguu

SEQ ID NO: 1945 - RNA, 17 nt, Artificial Sequence
  Synthetic oligonucleotide: PDCD1-2396
agaaacacgcagcccca

SEQ ID NO: 1946 - RNA, 17 nt, Artificial Sequence
  Synthetic oligonucleotide: PDCD1-2397
cacgcagccccaaggac

SEQ ID NO: 1947 - RNA, 17 nt, Artificial Sequence
  Synthetic oligonucleotide: PDCD1-2398
cccaaggaccggcugag

SEQ ID NO: 1948 - RNA, 17 nt, Artificial Sequence
  Synthetic oligonucleotide: PDCD1-2401
cggcugagaggggacag

SEQ ID NO: 1949 - RNA, 17 nt, Artificial Sequence
  Synthetic oligonucleotide: PDCD1-2402
agagguccugccugccc

SEQ ID NO: 1950 - RNA, 17 nt, Artificial Sequence
  Synthetic oligonucleotide: PDCD1-2403
ccugcccaggagcaaag

SEQ ID NO: 1951 - RNA, 17 nt, Artificial Sequence
  Synthetic oligonucleotide: PDCD1-2404
cugcccaggagcaaaga

SEQ ID NO: 1952 - RNA, 17 nt, Artificial Sequence
  Synthetic oligonucleotide: PDCD1-2405
ugcccaggagcaaagag

SEQ ID NO: 1953 - RNA, 17 nt, Artificial Sequence
  Synthetic oligonucleotide: PDCD1-2408
aagaggggacuugggcc

SEQ ID NO: 1954 - RNA, 17 nt, Artificial Sequence
  Synthetic oligonucleotide: PDCD1-2409
agaggggacuugggcca

SEQ ID NO: 1955 - RNA, 17 nt, Artificial Sequence
  Synthetic oligonucleotide: PDCD1-2412
ugggccaggggaggagu

SEQ ID NO: 1956 - RNA, 17 nt, Artificial Sequence
  Synthetic oligonucleotide: PDCD1-2417
ccaaagccacacagcuc

SEQ ID NO: 1957 - RNA, 17 nt, Artificial Sequence
  Synthetic oligonucleotide: PDCD1-2418
caaagccacacagcuca

SEQ ID NO: 1958 - RNA, 17 nt, Artificial Sequence
  Synthetic oligonucleotide: PDCD1-2419
ccacacagcucagggua

SEQ ID NO: 1959 - RNA, 17 nt, Artificial Sequence
  Synthetic oligonucleotide: PDCD1-2420
cacacagcucaggguaa

SEQ ID NO: 1960 - RNA, 17 nt, Artificial Sequence
  Synthetic oligonucleotide: PDCD1-2421
acacagcucaggguaag

SEQ ID NO: 1961 - RNA, 17 nt, Artificial Sequence
  Synthetic oligonucleotide: PDCD1-2422
aggguaaggggcagagc

SEQ ID NO: 1962 - RNA, 17 nt, Artificial Sequence
  Synthetic oligonucleotide: PDCD1-2428
agcugggggccaaggcu

SEQ ID NO: 1963 - RNA, 17 nt, Artificial Sequence
  Synthetic oligonucleotide: PDCD1-2430
caccccccgaccugcca

SEQ ID NO: 1964 - RNA, 17 nt, Artificial Sequence
  Synthetic oligonucleotide: PDCD1-2431
cagggacugagagugaa

SEQ ID NO: 1965 - RNA, 17 nt, Artificial Sequence
  Synthetic oligonucleotide: PDCD1-2432
cuccagaccccucgcuc

SEQ ID NO: 1966 - RNA, 17 nt, Artificial Sequence
  Synthetic oligonucleotide: PDCD1-2433
uccagaccccucgcucc

SEQ ID NO: 1967 - RNA, 17 nt, Artificial Sequence
  Synthetic oligonucleotide: PDCD1-2434
ccucgcuccgggacccc

SEQ ID NO: 1968 - RNA, 17 nt, Artificial Sequence
  Synthetic oligonucleotide: PDCD1-2435
cucgcuccgggaccccu

SEQ ID NO: 1969 - RNA, 17 nt, Artificial Sequence
  Synthetic oligonucleotide: PDCD1-2438
ccugggcugccagggcc

SEQ ID NO: 1970 - RNA, 17 nt, Artificial Sequence
  Synthetic oligonucleotide: PDCD1-2430
caccccccgaccugcca

SEQ ID NO: 1971 - RNA, 17 nt, Artificial Sequence
  Synthetic oligonucleotide: PDCD1-2441
cgaccugccagggacug

SEQ ID NO: 1972 - RNA, 17 nt, Artificial Sequence
  Synthetic oligonucleotide: PDCD1-2443
cugccagggacugaggg

SEQ ID NO: 1973 - RNA, 17 nt, Artificial Sequence
  Synthetic oligonucleotide: PDCD1-2444
cagggacugagggugga

SEQ ID NO: 1974 - RNA, 17 nt, Artificial Sequence
  Synthetic oligonucleotide: PDCD1-2445
aggucccuccagacccc

SEQ ID NO: 1975 - RNA, 17 nt, Artificial Sequence
  Synthetic oligonucleotide: PDCD1-2446
cuccagaccccuggcuc

SEQ ID NO: 1976 - RNA, 17 nt, Artificial Sequence
  Synthetic oligonucleotide: PDCD1-2447
uccagaccccuggcucu

SEQ ID NO: 1977 - RNA, 17 nt, Artificial Sequence
  Synthetic oligonucleotide: PDCD1-252
acuggccagggcgccug

SEQ ID NO: 1978 - RNA, 17 nt, Artificial Sequence
  Synthetic oligonucleotide: PDCD1-233
cuggccagucgucuggg

SEQ ID NO: 1979 - RNA, 17 nt, Artificial Sequence
  Synthetic oligonucleotide: PDCD1-237
ugcuacaacugggcugg

SEQ ID NO: 1980 - RNA, 17 nt, Artificial Sequence
  Synthetic oligonucleotide: PDCD1-239
ugggcuggcggccagga

SEQ ID NO: 1981 - RNA, 17 nt, Artificial Sequence
  Synthetic oligonucleotide: PDCD1-241
caggaugguucuuaggu

SEQ ID NO: 1982 - RNA, 17 nt, Artificial Sequence
  Synthetic oligonucleotide: PDCD1-243
augguucuuagguaggu

SEQ ID NO: 1983 - RNA, 17 nt, Artificial Sequence
  Synthetic oligonucleotide: PDCD1-244
ugguucuuagguaggug

SEQ ID NO: 1984 - RNA, 17 nt, Artificial Sequence
  Synthetic oligonucleotide: PDCD1-245
ucuuagguagguggggu

SEQ ID NO: 1985 - RNA, 17 nt, Artificial Sequence
  Synthetic oligonucleotide: PDCD1-246
uagguagguggggucgg

SEQ ID NO: 1986 - RNA, 17 nt, Artificial Sequence
  Synthetic oligonucleotide: PDCD1-247
agguggggucggcgguc

SEQ ID NO: 1987 - RNA, 17 nt, Artificial Sequence
  Synthetic oligonucleotide: PDCD1-2471
ucaggugucccagagcc

SEQ ID NO: 1988 - RNA, 17 nt, Artificial Sequence
  Synthetic oligonucleotide: PDCD1-2472
caggugucccagagcca

SEQ ID NO: 1989 - RNA, 17 nt, Artificial Sequence
  Synthetic oligonucleotide: PDCD1-2473
aggugucccagagccag

SEQ ID NO: 1990 - RNA, 17 nt, Artificial Sequence
  Synthetic oligonucleotide: PDCD1-2474
ucccagagccagggguc

SEQ ID NO: 1991 - RNA, 17 nt, Artificial Sequence
  Synthetic oligonucleotide: PDCD1-2475
cagagccaggggucugg

SEQ ID NO: 1992 - RNA, 17 nt, Artificial Sequence
  Synthetic oligonucleotide: PDCD1-2476
agagccaggggucugga

SEQ ID NO: 1993 - RNA, 17 nt, Artificial Sequence
  Synthetic oligonucleotide: PDCD1-2477
cuuccacccucaguccc

SEQ ID NO: 1994 - RNA, 17 nt, Artificial Sequence
  Synthetic oligonucleotide: PDCD1-2478
cacccucagucccuggc

SEQ ID NO: 1995 - RNA, 17 nt, Artificial Sequence
  Synthetic oligonucleotide: PDCD1-2479
cucagucccuggcaggu

SEQ ID NO: 1996 - RNA, 17 nt, Artificial Sequence
  Synthetic oligonucleotide: PDCD1-2480
ucagucccuggcagguc

SEQ ID NO: 1997 - RNA, 17 nt, Artificial Sequence
  Synthetic oligonucleotide: PDCD1-2481
cagucccuggcaggucg

SEQ ID NO: 1998 - RNA, 17 nt, Artificial Sequence
  Synthetic oligonucleotide: PDCD1-2482
agucccuggcaggucgg

SEQ ID NO: 1999 - RNA, 17 nt, Artificial Sequence
  Synthetic oligonucleotide: PDCD1-2484
caggucggggggugcug

SEQ ID NO: 2000 - RNA, 17 nt, Artificial Sequence
  Synthetic oligonucleotide: PDCD1-2486
ucggggggugcugaggc

SEQ ID NO: 2001 - RNA, 17 nt, Artificial Sequence
  Synthetic oligonucleotide: PDCD1-2488
ugaggcgggccuggccc

SEQ ID NO: 2002 - RNA, 17 nt, Artificial Sequence
  Synthetic oligonucleotide: PDCD1-2489
ccuggcccuggcagccc

SEQ ID NO: 2003 - RNA, 17 nt, Artificial Sequence
  Synthetic oligonucleotide: PDCD1-2490
cuggcccuggcagccca

SEQ ID NO: 2004 - RNA, 17 nt, Artificial Sequence
  Synthetic oligonucleotide: PDCD1-2491
uggcccuggcagcccag

SEQ ID NO: 2005 - RNA, 17 nt, Artificial Sequence
  Synthetic oligonucleotide: PDCD1-2492
uggcagcccaggggucc

SEQ ID NO: 2006 - RNA, 17 nt, Artificial Sequence
  Synthetic oligonucleotide: PDCD1-2493
ccaggggucccggagcg

SEQ ID NO: 2007 - RNA, 17 nt, Artificial Sequence
  Synthetic oligonucleotide: PDCD1-2494
caggggucccggagcga

SEQ ID NO: 2008 - RNA, 17 nt, Artificial Sequence
  Synthetic oligonucleotide: PDCD1-2495
aggggucccggagcgag

SEQ ID NO: 2009 - RNA, 17 nt, Artificial Sequence
  Synthetic oligonucleotide: PDCD1-2496
ucccggagcgagggguc

SEQ ID NO: 2010 - RNA, 17 nt, Artificial Sequence
  Synthetic oligonucleotide: PDCD1-2497
cggagcgaggggucugg

SEQ ID NO: 2011 - RNA, 17 nt, Artificial Sequence
  Synthetic oligonucleotide: PDCD1-2499
cuuucacucucaguccc

SEQ ID NO: 2012 - RNA, 17 nt, Artificial Sequence
  Synthetic oligonucleotide: PDCD1-2500
cacucucagucccuggc

SEQ ID NO: 2013 - RNA, 17 nt, Artificial Sequence
  Synthetic oligonucleotide: PDCD1-2479
cucagucccuggcaggu

SEQ ID NO: 2014 - RNA, 17 nt, Artificial Sequence
  Synthetic oligonucleotide: PDCD1-2480
ucagucccuggcagguc

SEQ ID NO: 2015 - RNA, 17 nt, Artificial Sequence
  Synthetic oligonucleotide: PDCD1-2481
cagucccuggcaggucg

SEQ ID NO: 2016 - RNA, 17 nt, Artificial Sequence
  Synthetic oligonucleotide: PDCD1-2482
agucccuggcaggucgg

SEQ ID NO: 2017 - RNA, 17 nt, Artificial Sequence
  Synthetic oligonucleotide: PDCD1-2484
caggucggggggugcug

SEQ ID NO: 2018 - RNA, 17 nt, Artificial Sequence
  Synthetic oligonucleotide: PDCD1-2507
ucggggggugcuguggc

SEQ ID NO: 2019 - RNA, 17 nt, Artificial Sequence
  Synthetic oligonucleotide: PDCD1-2508
uguggcaggcccagccu

SEQ ID NO: 2020 - RNA, 17 nt, Artificial Sequence
  Synthetic oligonucleotide: PDCD1-2509
ccuuacccugagcugug

SEQ ID NO: 2021 - RNA, 17 nt, Artificial Sequence
  Synthetic oligonucleotide: PDCD1-2510
ccugagcuguguggcuu

SEQ ID NO: 2022 - RNA, 17 nt, Artificial Sequence
  Synthetic oligonucleotide: PDCD1-2511
cugagcuguguggcuuu

SEQ ID NO: 2023 - RNA, 17 nt, Artificial Sequence
  Synthetic oligonucleotide: PDCD1-2512
ugggcagcucgaacucc

SEQ ID NO: 2024 - RNA, 17 nt, Artificial Sequence
  Synthetic oligonucleotide: PDCD1-2515
cuccuggguuccucucu

SEQ ID NO: 2025 - RNA, 17 nt, Artificial Sequence
  Synthetic oligonucleotide: PDCD1-2517
aguccccucuuugcucc

SEQ ID NO: 2026 - RNA, 17 nt, Artificial Sequence
  Synthetic oligonucleotide: PDCD1-2519
ccucuuugcuccugggc

SEQ ID NO: 2027 - RNA, 17 nt, Artificial Sequence
  Synthetic oligonucleotide: PDCD1-2520
uuugcuccugggcaggc

SEQ ID NO: 2028 - RNA, 17 nt, Artificial Sequence
  Synthetic oligonucleotide: PDCD1-2521
cucuguccccucucagc

SEQ ID NO: 2029 - RNA, 17 nt, Artificial Sequence
  Synthetic oligonucleotide: PDCD1-2522
cccucucagccgguccu

SEQ ID NO: 2030 - RNA, 17 nt, Artificial Sequence
  Synthetic oligonucleotide: PDCD1-2523
ccucucagccgguccuu

SEQ ID NO: 2031 - RNA, 17 nt, Artificial Sequence
  Synthetic oligonucleotide: PDCD1-2524
cucucagccgguccuug

SEQ ID NO: 2032 - RNA, 17 nt, Artificial Sequence
  Synthetic oligonucleotide: PDCD1-2531
ccccaaaccuuggccgu

SEQ ID NO: 2033 - RNA, 17 nt, Artificial Sequence
  Synthetic oligonucleotide: PDCD1-2532
cccaaaccuuggccgug

SEQ ID NO: 2034 - RNA, 17 nt, Artificial Sequence
  Synthetic oligonucleotide: PDCD1-2535
cgccuucuccacugcuc

SEQ ID NO: 2035 - RNA, 17 nt, Artificial Sequence
  Synthetic oligonucleotide: PDCD1-2536
cuucuccacugcucagg

SEQ ID NO: 2036 - RNA, 17 nt, Artificial Sequence
  Synthetic oligonucleotide: PDCD1-2537
cuccacugcucaggcgg

SEQ ID NO: 2037 - RNA, 17 nt, Artificial Sequence
  Synthetic oligonucleotide: PDCD1-2539
aggcggaggugagcgga

SEQ ID NO: 2038 - RNA, 17 nt, Artificial Sequence
  Synthetic oligonucleotide: PDCD1-2544
ucccaggucagguugaa

SEQ ID NO: 2039 - RNA, 17 nt, Artificial Sequence
  Synthetic oligonucleotide: PDCD1-2545
caggucagguugaaggg

SEQ ID NO: 2040 - RNA, 17 nt, Artificial Sequence
  Synthetic oligonucleotide: PDCD1-2546
aggucagguugaaggga

SEQ ID NO: 2041 - RNA, 17 nt, Artificial Sequence
  Synthetic oligonucleotide: PDCD1-2547
cuuccuccacauccacg

SEQ ID NO: 2042 - RNA, 17 nt, Artificial Sequence
  Synthetic oligonucleotide: PDCD1-2548
uuccuccacauccacgu

SEQ ID NO: 2043 - RNA, 17 nt, Artificial Sequence
  Synthetic oligonucleotide: PDCD1-2550
agugacagaggcagugc

SEQ ID NO: 2044 - RNA, 17 nt, Artificial Sequence
  Synthetic oligonucleotide: PDCD1-2552
ugacagaggcagugcug

SEQ ID NO: 2045 - RNA, 17 nt, Artificial Sequence
  Synthetic oligonucleotide: PDCD1-2554
agaggcagugcuggggg

SEQ ID NO: 2046 - RNA, 17 nt, Artificial Sequence
  Synthetic oligonucleotide: PDCD1-2557
cagugcugggggaggag

SEQ ID NO: 2047 - RNA, 17 nt, Artificial Sequence
  Synthetic oligonucleotide: PDCD1-2558
cugggggaggaggggug

SEQ ID NO: 2048 - RNA, 17 nt, Artificial Sequence
  Synthetic oligonucleotide: PDCD1-2563
aggggugaggagggggu

SEQ ID NO: 2049 - RNA, 17 nt, Artificial Sequence
  Synthetic oligonucleotide: PDCD1-2564
ugaggaggggguaggac

SEQ ID NO: 2050 - RNA, 17 nt, Artificial Sequence
  Synthetic oligonucleotide: PDCD1-2566
aggaggggguaggacug

SEQ ID NO: 2051 - RNA, 17 nt, Artificial Sequence
  Synthetic oligonucleotide: PDCD1-2569
uaggacuggggagaggg

SEQ ID NO: 2052 - RNA, 17 nt, Artificial Sequence
  Synthetic oligonucleotide: PDCD1-2570
aggacuggggagagggu

SEQ ID NO: 2053 - RNA, 17 nt, Artificial Sequence
  Synthetic oligonucleotide: PDCD1-2573
uggggagaggguggggg

SEQ ID NO: 2054 - RNA, 17 nt, Artificial Sequence
  Synthetic oligonucleotide: PDCD1-2576
agagagagacagagaca

SEQ ID NO: 2055 - RNA, 17 nt, Artificial Sequence
  Synthetic oligonucleotide: PDCD1-2577
cagagacagggagacag

SEQ ID NO: 2056 - RNA, 17 nt, Artificial Sequence
  Synthetic oligonucleotide: PDCD1-2578
cagggagacagaggaga

SEQ ID NO: 2057 - RNA, 17 nt, Artificial Sequence
  Synthetic oligonucleotide: PDCD1-2579
agggagacagaggagau

SEQ ID NO: 2058 - RNA, 17 nt, Artificial Sequence
  Synthetic oligonucleotide: PDCD1-2581
agacagaggagaugggg

SEQ ID NO: 2059 - RNA, 17 nt, Artificial Sequence
  Synthetic oligonucleotide: PDCD1-2582
cagaggagauggggagg

SEQ ID NO: 2060 - RNA, 17 nt, Artificial Sequence
  Synthetic oligonucleotide: PDCD1-2583
aggagauggggaggagg

SEQ ID NO: 2061 - RNA, 17 nt, Artificial Sequence
  Synthetic oligonucleotide: PDCD1-2586
ccccacgcccuaccccg

SEQ ID NO: 2062 - RNA, 17 nt, Artificial Sequence
  Synthetic oligonucleotide: PDCD1-2587
cccacgcccuaccccgu

SEQ ID NO: 2063 - RNA, 17 nt, Artificial Sequence
  Synthetic oligonucleotide: PDCD1-2588
ccacgcccuaccccgug

SEQ ID NO: 2064 - RNA, 17 nt, Artificial Sequence
  Synthetic oligonucleotide: PDCD1-2589
cacgcccuaccccgugg

SEQ ID NO: 2065 - RNA, 17 nt, Artificial Sequence
  Synthetic oligonucleotide: PDCD1-2593
ccgagcugccccuccug

SEQ ID NO: 2066 - RNA, 17 nt, Artificial Sequence
  Synthetic oligonucleotide: PDCD1-2595
ccccuccugaggcugcc

SEQ ID NO: 2067 - RNA, 17 nt, Artificial Sequence
  Synthetic oligonucleotide: PDCD1-2596
cuccugaggcugccggg

SEQ ID NO: 2068 - RNA, 17 nt, Artificial Sequence
  Synthetic oligonucleotide: PDCD1-2597
uccugaggcugccgggu

SEQ ID NO: 2069 - RNA, 17 nt, Artificial Sequence
  Synthetic oligonucleotide: PDCD1-2598
ccugaggcugccgggug

SEQ ID NO: 2070 - RNA, 17 nt, Artificial Sequence
  Synthetic oligonucleotide: PDCD1-2599
cugaggcugccgggugg

SEQ ID NO: 2071 - RNA, 17 nt, Artificial Sequence
  Synthetic oligonucleotide: PDCD1-2601
caucccccccaucuccc

SEQ ID NO: 2072 - RNA, 17 nt, Artificial Sequence
  Synthetic oligonucleotide: PDCD1-2602
aucccccccaucucccu

SEQ ID NO: 2073 - RNA, 17 nt, Artificial Sequence
  Synthetic oligonucleotide: PDCD1-2603
ucccccccaucucccug

SEQ ID NO: 2074 - RNA, 17 nt, Artificial Sequence
  Synthetic oligonucleotide: PDCD1-2604
cccccccaucucccugg

SEQ ID NO: 2075 - RNA, 17 nt, Artificial Sequence
  Synthetic oligonucleotide: PDCD1-2605
cccaucucccugggggc

SEQ ID NO: 2076 - RNA, 17 nt, Artificial Sequence
  Synthetic oligonucleotide: PDCD1-2606
ccaucucccugggggcc

SEQ ID NO: 2077 - RNA, 17 nt, Artificial Sequence
  Synthetic oligonucleotide: PDCD1-2609
ccgggccucccugccug

SEQ ID NO: 2078 - RNA, 17 nt, Artificial Sequence
  Synthetic oligonucleotide: PDCD1-2611
ucccugccuggggaagg

SEQ ID NO: 2079 - RNA, 17 nt, Artificial Sequence
  Synthetic oligonucleotide: PDCD1-2612
cccugccuggggaaggu

SEQ ID NO: 2080 - RNA, 17 nt, Artificial Sequence
  Synthetic oligonucleotide: PDCD1-2613
ugccuggggaagguggg

SEQ ID NO: 2081 - RNA, 17 nt, Artificial Sequence
  Synthetic oligonucleotide: PDCD1-2614
agguggguggcccccuc

SEQ ID NO: 2082 - RNA, 17 nt, Artificial Sequence
  Synthetic oligonucleotide: PDCD1-2616
uggcccccucugggcuc

SEQ ID NO: 2083 - RNA, 17 nt, Artificial Sequence
  Synthetic oligonucleotide: PDCD1-2617
cucugggcucagguucc

SEQ ID NO: 2084 - RNA, 17 nt, Artificial Sequence
  Synthetic oligonucleotide: PDCD1-2618
ucugggcucagguuccu

SEQ ID NO: 2085 - RNA, 17 nt, Artificial Sequence
  Synthetic oligonucleotide: PDCD1-2619
caggaaccugagcccag

SEQ ID NO: 2086 - RNA, 17 nt, Artificial Sequence
  Synthetic oligonucleotide: PDCD1-2620
aggaaccugagcccaga

SEQ ID NO: 2087 - RNA, 17 nt, Artificial Sequence
  Synthetic oligonucleotide: PDCD1-2624
acccaccuuccccaggc

SEQ ID NO: 2088 - RNA, 17 nt, Artificial Sequence
  Synthetic oligonucleotide: PDCD1-2625
cccaccuuccccaggca

SEQ ID NO: 2089 - RNA, 17 nt, Artificial Sequence
  Synthetic oligonucleotide: PDCD1-2626
accuuccccaggcaggg

SEQ ID NO: 2090 - RNA, 17 nt, Artificial Sequence
  Synthetic oligonucleotide: PDCD1-2627
ccccaggcagggaggcc

SEQ ID NO: 2091 - RNA, 17 nt, Artificial Sequence
  Synthetic oligonucleotide: PDCD1-2628
agggaggcccggccccc

SEQ ID NO: 2092 - RNA, 17 nt, Artificial Sequence
  Synthetic oligonucleotide: PDCD1-2630
cccggcccccagggaga

SEQ ID NO: 2093 - RNA, 17 nt, Artificial Sequence
  Synthetic oligonucleotide: PDCD1-2631
ccggcccccagggagau

SEQ ID NO: 2094 - RNA, 17 nt, Artificial Sequence
  Synthetic oligonucleotide: PDCD1-2632
cggcccccagggagaug

SEQ ID NO: 2095 - RNA, 17 nt, Artificial Sequence
  Synthetic oligonucleotide: PDCD1-2635
cccccagggagaugggg

SEQ ID NO: 2096 - RNA, 17 nt, Artificial Sequence
  Synthetic oligonucleotide: PDCD1-2636
cagggagauggggggga

SEQ ID NO: 2097 - RNA, 17 nt, Artificial Sequence
  Synthetic oligonucleotide: PDCD1-2637
agggagaugggggggau

SEQ ID NO: 2098 - RNA, 17 nt, Artificial Sequence
  Synthetic oligonucleotide: PDCD1-2643
aagggccugcccccacc

SEQ ID NO: 2099 - RNA, 17 nt, Artificial Sequence
  Synthetic oligonucleotide: PDCD1-2644
ccccacccggcagccuc

SEQ ID NO: 2100 - RNA, 17 nt, Artificial Sequence
  Synthetic oligonucleotide: PDCD1-2645
cacccggcagccucagg

SEQ ID NO: 2101 - RNA, 17 nt, Artificial Sequence
  Synthetic oligonucleotide: PDCD1-2646
acccggcagccucagga

SEQ ID NO: 2102 - RNA, 17 nt, Artificial Sequence
  Synthetic oligonucleotide: PDCD1-2647
cccggcagccucaggag

SEQ ID NO: 2103 - RNA, 17 nt, Artificial Sequence
  Synthetic oligonucleotide: PDCD1-2648
ccucaggaggggcagcu

SEQ ID NO: 2104 - RNA, 17 nt, Artificial Sequence
  Synthetic oligonucleotide: PDCD1-2649
cucaggaggggcagcuc

SEQ ID NO: 2105 - RNA, 17 nt, Artificial Sequence
  Synthetic oligonucleotide: PDCD1-2650
aggaggggcagcucggg

SEQ ID NO: 2106 - RNA, 17 nt, Artificial Sequence
  Synthetic oligonucleotide: PDCD1-2654
agugagcagagacacag

SEQ ID NO: 2107 - RNA, 17 nt, Artificial Sequence
  Synthetic oligonucleotide: PDCD1-2656
agagacacagaggagga

SEQ ID NO: 2108 - RNA, 17 nt, Artificial Sequence
  Synthetic oligonucleotide: PDCD1-2658
agacacagaggaggaag

SEQ ID NO: 2109 - RNA, 17 nt, Artificial Sequence
  Synthetic oligonucleotide: PDCD1-2659
aggaaggggcccugagc

SEQ ID NO: 2110 - RNA, 17 nt, Artificial Sequence
  Synthetic oligonucleotide: PDCD1-2662
agcuggggagaccccca

SEQ ID NO: 2111 - RNA, 17 nt, Artificial Sequence
  Synthetic oligonucleotide: PDCD1-2664
cuggggagacccccacg

SEQ ID NO: 2112 - RNA, 17 nt, Artificial Sequence
  Synthetic oligonucleotide: PDCD1-2667
ccccacgggguagggcg

SEQ ID NO: 2113 - RNA, 17 nt, Artificial Sequence
  Synthetic oligonucleotide: PDCD1-2669
ccacgggguagggcgug

SEQ ID NO: 2114 - RNA, 17 nt, Artificial Sequence
  Synthetic oligonucleotide: PDCD1-2670
cacgggguagggcgugg

SEQ ID NO: 2115 - RNA, 17 nt, Artificial Sequence
  Synthetic oligonucleotide: PDCD1-2672
uagggcgugggggccac

SEQ ID NO: 2116 - RNA, 17 nt, Artificial Sequence
  Synthetic oligonucleotide: PDCD1-2675
cgcccacguggaugugg

SEQ ID NO: 2117 - RNA, 17 nt, Artificial Sequence
  Synthetic oligonucleotide: PDCD1-2676
cguggauguggaggaag

SEQ ID NO: 2118 - RNA, 17 nt, Artificial Sequence
  Synthetic oligonucleotide: PDCD1-2678
uggauguggaggaagag

SEQ ID NO: 2119 - RNA, 17 nt, Artificial Sequence
  Synthetic oligonucleotide: PDCD1-2680
uguggaggaagaggggg

SEQ ID NO: 2120 - RNA, 17 nt, Artificial Sequence
  Synthetic oligonucleotide: PDCD1-2682
aagagggggcgggagca

SEQ ID NO: 2121 - RNA, 17 nt, Artificial Sequence
  Synthetic oligonucleotide: PDCD1-2683
agagggggcgggagcaa

SEQ ID NO: 2122 - RNA, 17 nt, Artificial Sequence
  Synthetic oligonucleotide: PDCD1-2687
cucccuucaaccugacc

SEQ ID NO: 2123 - RNA, 17 nt, Artificial Sequence
  Synthetic oligonucleotide: PDCD1-2688
ucccuucaaccugaccu

SEQ ID NO: 2124 - RNA, 17 nt, Artificial Sequence
  Synthetic oligonucleotide: PDCD1-2689
caccuccgccugagcag

SEQ ID NO: 2125 - RNA, 17 nt, Artificial Sequence
  Synthetic oligonucleotide: PDCD1-2690
cgccugagcaguggaga

SEQ ID NO: 2126 - RNA, 17 nt, Artificial Sequence
  Synthetic oligonucleotide: PDCD1-2691
cugagcaguggagaagg

SEQ ID NO: 2127 - RNA, 17 nt, Artificial Sequence
  Synthetic oligonucleotide: PDCD1-2692
uggagaaggcggcacuc

SEQ ID NO: 2128 - RNA, 17 nt, Artificial Sequence
  Synthetic oligonucleotide: PDCD1-2693
agaaggcggcacucugg

SEQ ID NO: 2129 - RNA, 17 nt, Artificial Sequence
  Synthetic oligonucleotide: PDCD1-2695
aaggcggcacucuggug

SEQ ID NO: 2130 - RNA, 17 nt, Artificial Sequence
  Synthetic oligonucleotide: PDCD1-228
ucugguggggcugcucc

SEQ ID NO: 2131 - RNA, 20 nt, Artificial Sequence
  Synthetic oligonucleotide: PDCD1-2697
gucacaccccgguacccagc

SEQ ID NO: 2132 - RNA, 20 nt, Artificial Sequence
  Synthetic oligonucleotide: PDCD1-2698
ucacaccccgguacccagca

SEQ ID NO: 2133 - RNA, 20 nt, Artificial Sequence
  Synthetic oligonucleotide: PDCD1-2699
cgguacccagcagggcccag

SEQ ID NO: 2134 - RNA, 20 nt, Artificial Sequence
  Synthetic oligonucleotide: PDCD1-2700
gguacccagcagggcccaga

SEQ ID NO: 2135 - RNA, 20 nt, Artificial Sequence
  Synthetic oligonucleotide: PDCD1-2701
gggcccagagggacugucuu

SEQ ID NO: 2136 - RNA, 20 nt, Artificial Sequence
  Synthetic oligonucleotide: PDCD1-2702
cagagggacugucuuaggcu

SEQ ID NO: 2137 - RNA, 20 nt, Artificial Sequence
  Synthetic oligonucleotide: PDCD1-2703
ggacugucuuaggcuuggcc

SEQ ID NO: 2138 - RNA, 20 nt, Artificial Sequence
  Synthetic oligonucleotide: PDCD1-2704
gacugucuuaggcuuggccu

SEQ ID NO: 2139 - RNA, 20 nt, Artificial Sequence
  Synthetic oligonucleotide: PDCD1-2705
ugggugaaaccacccucccc

SEQ ID NO: 2140 - RNA, 20 nt, Artificial Sequence
  Synthetic oligonucleotide: PDCD1-2706
aaaccacccuccccaggccu

SEQ ID NO: 2141 - RNA, 20 nt, Artificial Sequence
  Synthetic oligonucleotide: PDCD1-2707
ccccaggccuuggcaucccc

SEQ ID NO: 2142 - RNA, 20 nt, Artificial Sequence
  Synthetic oligonucleotide: PDCD1-2708
gccuuggcauccccaggugc

SEQ ID NO: 2143 - RNA, 20 nt, Artificial Sequence
  Synthetic oligonucleotide: PDCD1-2709
uggcauccccaggugcaggc

SEQ ID NO: 2144 - RNA, 20 nt, Artificial Sequence
  Synthetic oligonucleotide: PDCD1-2710
auccccaggugcaggcuggc

SEQ ID NO: 2145 - RNA, 20 nt, Artificial Sequence
  Synthetic oligonucleotide: PDCD1-2711
uccccaggugcaggcuggcu

SEQ ID NO: 2146 - RNA, 20 nt, Artificial Sequence
  Synthetic oligonucleotide: PDCD1-2712
ugcaggcuggcugggcacag

SEQ ID NO: 2147 - RNA, 20 nt, Artificial Sequence
  Synthetic oligonucleotide: PDCD1-2713
gcaggcuggcugggcacaga

SEQ ID NO: 2148 - RNA, 20 nt, Artificial Sequence
  Synthetic oligonucleotide: PDCD1-2714
gcugggcacagagggccagc

SEQ ID NO: 2149 - RNA, 20 nt, Artificial Sequence
  Synthetic oligonucleotide: PDCD1-2715
cugggcacagagggccagcc

SEQ ID NO: 2150 - RNA, 20 nt, Artificial Sequence
  Synthetic oligonucleotide: PDCD1-2716
agagggccagccgggcacag

SEQ ID NO: 2151 - RNA, 20 nt, Artificial Sequence
  Synthetic oligonucleotide: PDCD1-2717
gagggccagccgggcacaga

SEQ ID NO: 2152 - RNA, 20 nt, Artificial Sequence
  Synthetic oligonucleotide: PDCD1-2718
cagccgggcacagagggucc

SEQ ID NO: 2153 - RNA, 20 nt, Artificial Sequence
  Synthetic oligonucleotide: PDCD1-2719
gggcacagaggguccaggag

SEQ ID NO: 2154 - RNA, 20 nt, Artificial Sequence
  Synthetic oligonucleotide: PDCD1-2720
ggcacagaggguccaggagc

SEQ ID NO: 2155 - RNA, 20 nt, Artificial Sequence
  Synthetic oligonucleotide: PDCD1-2721
gaggguccaggagcgggcug

SEQ ID NO: 2156 - RNA, 20 nt, Artificial Sequence
  Synthetic oligonucleotide: PDCD1-2722
uguggucacaguguacacag

SEQ ID NO: 2157 - RNA, 20 nt, Artificial Sequence
  Synthetic oligonucleotide: PDCD1-2723
guggucacaguguacacaga

SEQ ID NO: 2158 - RNA, 20 nt, Artificial Sequence
  Synthetic oligonucleotide: PDCD1-2724
acaguguacacagagggccc

SEQ ID NO: 2159 - RNA, 20 nt, Artificial Sequence
  Synthetic oligonucleotide: PDCD1-2725
caguguacacagagggccca

SEQ ID NO: 2160 - RNA, 20 nt, Artificial Sequence
  Synthetic oligonucleotide: PDCD1-2726
acacagagggcccaggguca

SEQ ID NO: 2161 - RNA, 20 nt, Artificial Sequence
  Synthetic oligonucleotide: PDCD1-2727
cacagagggcccagggucac

SEQ ID NO: 2162 - RNA, 20 nt, Artificial Sequence
  Synthetic oligonucleotide: PDCD1-2728
cccagggucacgggcagccc

SEQ ID NO: 2163 - RNA, 20 nt, Artificial Sequence
  Synthetic oligonucleotide: PDCD1-2729
gucacgggcagcccaggaag

SEQ ID NO: 2164 - RNA, 20 nt, Artificial Sequence
  Synthetic oligonucleotide: PDCD1-2730
ggcucccucucuccucgauc

SEQ ID NO: 2165 - RNA, 20 nt, Artificial Sequence
  Synthetic oligonucleotide: PDCD1-2731
gcucccucucuccucgaucc

SEQ ID NO: 2166 - RNA, 20 nt, Artificial Sequence
  Synthetic oligonucleotide: PDCD1-2732
cuccucgauccgggagagug

SEQ ID NO: 2167 - RNA, 20 nt, Artificial Sequence
  Synthetic oligonucleotide: PDCD1-2733
gauccgggagagugaggcca

SEQ ID NO: 2168 - RNA, 20 nt, Artificial Sequence
  Synthetic oligonucleotide: PDCD1-2734
ugaggccaaggccuccccca

SEQ ID NO: 2169 - RNA, 20 nt, Artificial Sequence
  Synthetic oligonucleotide: PDCD1-2735
gccaaggccucccccacgga

SEQ ID NO: 2170 - RNA, 20 nt, Artificial Sequence
  Synthetic oligonucleotide: PDCD1-2736
cccccacggauggucugaac

SEQ ID NO: 2171 - RNA, 20 nt, Artificial Sequence
  Synthetic oligonucleotide: PDCD1-2737
ccccacggauggucugaaca

SEQ ID NO: 2172 - RNA, 20 nt, Artificial Sequence
  Synthetic oligonucleotide: PDCD1-2738
cggauggucugaacagggcu

SEQ ID NO: 2173 - RNA, 20 nt, Artificial Sequence
  Synthetic oligonucleotide: PDCD1-2739
ggauggucugaacagggcuc

SEQ ID NO: 2174 - RNA, 20 nt, Artificial Sequence
  Synthetic oligonucleotide: PDCD1-2740
gauggucugaacagggcucg

SEQ ID NO: 2175 - RNA, 20 nt, Artificial Sequence
  Synthetic oligonucleotide: PDCD1-2741
acagggcucggggagagccc

SEQ ID NO: 2176 - RNA, 20 nt, Artificial Sequence
  Synthetic oligonucleotide: PDCD1-2742
ucggggagagcccuggaauc

SEQ ID NO: 2177 - RNA, 20 nt, Artificial Sequence
  Synthetic oligonucleotide: PDCD1-2743
cggggagagcccuggaaucu

SEQ ID NO: 2178 - RNA, 20 nt, Artificial Sequence
  Synthetic oligonucleotide: PDCD1-2744
uggaaucugggcagagaccc

SEQ ID NO: 2179 - RNA, 20 nt, Artificial Sequence
  Synthetic oligonucleotide: PDCD1-2745
aaucugggcagagacccagg

SEQ ID NO: 2180 - RNA, 20 nt, Artificial Sequence
  Synthetic oligonucleotide: PDCD1-2746
aucugggcagagacccaggc

SEQ ID NO: 2181 - RNA, 20 nt, Artificial Sequence
  Synthetic oligonucleotide: PDCD1-2747
ggcgggcacaauccccaccc

SEQ ID NO: 2182 - RNA, 20 nt, Artificial Sequence
  Synthetic oligonucleotide: PDCD1-2748
gggcacaauccccacccagg

SEQ ID NO: 2183 - RNA, 20 nt, Artificial Sequence
  Synthetic oligonucleotide: PDCD1-2749
ggcacaauccccacccagga

SEQ ID NO: 2184 - RNA, 20 nt, Artificial Sequence
  Synthetic oligonucleotide: PDCD1-2750
uccccacccaggagggaucc

SEQ ID NO: 2185 - RNA, 20 nt, Artificial Sequence
  Synthetic oligonucleotide: PDCD1-2751
agaacuguccucacucgaac

SEQ ID NO: 2186 - RNA, 20 nt, Artificial Sequence
  Synthetic oligonucleotide: PDCD1-2752
ucacucgaacagguacacuu

SEQ ID NO: 2187 - RNA, 20 nt, Artificial Sequence
  Synthetic oligonucleotide: PDCD1-2753
acuuugacgucguaaagcca

SEQ ID NO: 2188 - RNA, 20 nt, Artificial Sequence
  Synthetic oligonucleotide: PDCD1-2754
aagccaagguuagucccaca

SEQ ID NO: 2189 - RNA, 20 nt, Artificial Sequence
  Synthetic oligonucleotide: PDCD1-2755
agccaagguuagucccacau

SEQ ID NO: 2190 - RNA, 20 nt, Artificial Sequence
  Synthetic oligonucleotide: PDCD1-2756
gccaagguuagucccacaug

SEQ ID NO: 2191 - RNA, 20 nt, Artificial Sequence
  Synthetic oligonucleotide: PDCD1-2757
auggggcucaucccauccuu

SEQ ID NO: 2192 - RNA, 20 nt, Artificial Sequence
  Synthetic oligonucleotide: PDCD1-2758
uccuuaggaaaacucgagug

SEQ ID NO: 2193 - RNA, 20 nt, Artificial Sequence
  Synthetic oligonucleotide: PDCD1-2759
gaaaacucgagugaggacca

SEQ ID NO: 2194 - RNA, 20 nt, Artificial Sequence
  Synthetic oligonucleotide: PDCD1-2760
gagugaggaccaaggaugcc

SEQ ID NO: 2195 - RNA, 20 nt, Artificial Sequence
  Synthetic oligonucleotide: PDCD1-2761
agugaggaccaaggaugccu

SEQ ID NO: 2196 - RNA, 20 nt, Artificial Sequence
  Synthetic oligonucleotide: PDCD1-2762
ggaccaaggaugccugggca

SEQ ID NO: 2197 - RNA, 20 nt, Artificial Sequence
  Synthetic oligonucleotide: PDCD1-2763
caaccccacucccauucugu

SEQ ID NO: 2198 - RNA, 20 nt, Artificial Sequence
  Synthetic oligonucleotide: PDCD1-2764
ucccauucugucggagccuc

SEQ ID NO: 2199 - RNA, 20 nt, Artificial Sequence
  Synthetic oligonucleotide: PDCD1-2765
cccauucugucggagccucu

SEQ ID NO: 2200 - RNA, 20 nt, Artificial Sequence
  Synthetic oligonucleotide: PDCD1-2766
cggagccucugggagccucc

SEQ ID NO: 2201 - RNA, 20 nt, Artificial Sequence
  Synthetic oligonucleotide: PDCD1-2767
cccacagccucugccccugc

SEQ ID NO: 2202 - RNA, 20 nt, Artificial Sequence
  Synthetic oligonucleotide: PDCD1-2768
ccacagccucugccccugcu

SEQ ID NO: 2203 - RNA, 20 nt, Artificial Sequence
  Synthetic oligonucleotide: PDCD1-2769
cacagccucugccccugcug

SEQ ID NO: 2204 - RNA, 20 nt, Artificial Sequence
  Synthetic oligonucleotide: PDCD1-2770
acagccucugccccugcugg

SEQ ID NO: 2205 - RNA, 20 nt, Artificial Sequence
  Synthetic oligonucleotide: PDCD1-2771
ccucugccccugcugggggc

SEQ ID NO: 2206 - RNA, 20 nt, Artificial Sequence
  Synthetic oligonucleotide: PDCD1-2772
cccugcugggggcaggugcc

SEQ ID NO: 2207 - RNA, 20 nt, Artificial Sequence
  Synthetic oligonucleotide: PDCD1-2773
gugccuggccucugccuucc

SEQ ID NO: 2208 - RNA, 20 nt, Artificial Sequence
  Synthetic oligonucleotide: PDCD1-2774
cccggcccaucccccuucgc

SEQ ID NO: 2209 - RNA, 20 nt, Artificial Sequence
  Synthetic oligonucleotide: PDCD1-2775
ccggcccaucccccuucgcu

SEQ ID NO: 2210 - RNA, 20 nt, Artificial Sequence
  Synthetic oligonucleotide: PDCD1-2776
cggcccaucccccuucgcug

SEQ ID NO: 2211 - RNA, 20 nt, Artificial Sequence
  Synthetic oligonucleotide: PDCD1-2777
aucccccuucgcuggggcac

SEQ ID NO: 2212 - RNA, 20 nt, Artificial Sequence
  Synthetic oligonucleotide: PDCD1-2778
uacugaaugacaacugucca

SEQ ID NO: 2213 - RNA, 20 nt, Artificial Sequence
  Synthetic oligonucleotide: PDCD1-2779
gacaacuguccauggcuaau

SEQ ID NO: 2214 - RNA, 20 nt, Artificial Sequence
  Synthetic oligonucleotide: PDCD1-2780
cccucaaagcuuccaccuug

SEQ ID NO: 2215 - RNA, 20 nt, Artificial Sequence
  Synthetic oligonucleotide: PDCD1-2781
caaagcuuccaccuugugga

SEQ ID NO: 2216 - RNA, 20 nt, Artificial Sequence
  Synthetic oligonucleotide: PDCD1-2782
uuguggauggccucacacca

SEQ ID NO: 2217 - RNA, 20 nt, Artificial Sequence
  Synthetic oligonucleotide: PDCD1-2783
ugaugccugcaacagccuga

SEQ ID NO: 2218 - RNA, 20 nt, Artificial Sequence
  Synthetic oligonucleotide: PDCD1-2784
gaugccugcaacagccugac

SEQ ID NO: 2219 - RNA, 20 nt, Artificial Sequence
  Synthetic oligonucleotide: PDCD1-2785
augccugcaacagccugacg

SEQ ID NO: 2220 - RNA, 20 nt, Artificial Sequence
  Synthetic oligonucleotide: PDCD1-2786
ugccugcaacagccugacgg

SEQ ID NO: 2221 - RNA, 20 nt, Artificial Sequence
  Synthetic oligonucleotide: PDCD1-2787
gccugcaacagccugacggg

SEQ ID NO: 2222 - RNA, 20 nt, Artificial Sequence
  Synthetic oligonucleotide: PDCD1-2788
ccugcaacagccugacgggg

SEQ ID NO: 2223 - RNA, 20 nt, Artificial Sequence
  Synthetic oligonucleotide: PDCD1-2789
caacagccugacgggggggc

SEQ ID NO: 2224 - RNA, 20 nt, Artificial Sequence
  Synthetic oligonucleotide: PDCD1-2790
aacagccugacgggggggcu

SEQ ID NO: 2225 - RNA, 20 nt, Artificial Sequence
  Synthetic oligonucleotide: PDCD1-2791
acagccugacgggggggcug

SEQ ID NO: 2226 - RNA, 20 nt, Artificial Sequence
  Synthetic oligonucleotide: PDCD1-2792
gccugacgggggggcugggg

SEQ ID NO: 2227 - RNA, 20 nt, Artificial Sequence
  Synthetic oligonucleotide: PDCD1-2793
ugacgggggggcuggggcgg

SEQ ID NO: 2228 - RNA, 20 nt, Artificial Sequence
  Synthetic oligonucleotide: PDCD1-2794
gggggggcuggggcgguggc

SEQ ID NO: 2229 - RNA, 20 nt, Artificial Sequence
  Synthetic oligonucleotide: PDCD1-2795
ggggggcuggggcgguggca

SEQ ID NO: 2230 - RNA, 20 nt, Artificial Sequence
  Synthetic oligonucleotide: PDCD1-2796
gggggcuggggcgguggcag

SEQ ID NO: 2231 - RNA, 20 nt, Artificial Sequence
  Synthetic oligonucleotide: PDCD1-2797
gcuggggcgguggcaggggc

SEQ ID NO: 2232 - RNA, 20 nt, Artificial Sequence
  Synthetic oligonucleotide: PDCD1-2798
gguggcaggggcuggcugug

SEQ ID NO: 2233 - RNA, 20 nt, Artificial Sequence
  Synthetic oligonucleotide: PDCD1-2799
ccagccuugaccuucuuccc

SEQ ID NO: 2234 - RNA, 20 nt, Artificial Sequence
  Synthetic oligonucleotide: PDCD1-2800
cagccuugaccuucuucccc

SEQ ID NO: 2235 - RNA, 20 nt, Artificial Sequence
  Synthetic oligonucleotide: PDCD1-2801
agccuugaccuucuuccccg

SEQ ID NO: 2236 - RNA, 20 nt, Artificial Sequence
  Synthetic oligonucleotide: PDCD1-2802
cccuccagcccacucgugcc

SEQ ID NO: 2237 - RNA, 20 nt, Artificial Sequence
  Synthetic oligonucleotide: PDCD1-2803
ccuccagcccacucgugcca

SEQ ID NO: 2238 - RNA, 20 nt, Artificial Sequence
  Synthetic oligonucleotide: PDCD1-2804
ccagcccacucgugccaggg

SEQ ID NO: 2239 - RNA, 20 nt, Artificial Sequence
  Synthetic oligonucleotide: PDCD1-2805
cagcccacucgugccagggu

SEQ ID NO: 2240 - RNA, 20 nt, Artificial Sequence
  Synthetic oligonucleotide: PDCD1-2806
agcccacucgugccagggug

SEQ ID NO: 2241 - RNA, 20 nt, Artificial Sequence
  Synthetic oligonucleotide: PDCD1-2807
ccacucgugccagggugggg

SEQ ID NO: 2242 - RNA, 20 nt, Artificial Sequence
  Synthetic oligonucleotide: PDCD1-2808
gugccaggguggggugguuc

SEQ ID NO: 2243 - RNA, 20 nt, Artificial Sequence
  Synthetic oligonucleotide: PDCD1-2809
ugccaggguggggugguuca

SEQ ID NO: 2244 - RNA, 20 nt, Artificial Sequence
  Synthetic oligonucleotide: PDCD1-2810
gccaggguggggugguucag

SEQ ID NO: 2245 - RNA, 20 nt, Artificial Sequence
  Synthetic oligonucleotide: PDCD1-2811
ccaggguggggugguucagg

SEQ ID NO: 2246 - RNA, 20 nt, Artificial Sequence
  Synthetic oligonucleotide: PDCD1-2812
gguucaggggguccagugcc

SEQ ID NO: 2247 - RNA, 20 nt, Artificial Sequence
  Synthetic oligonucleotide: PDCD1-2813
guucaggggguccagugccu

SEQ ID NO: 2248 - RNA, 20 nt, Artificial Sequence
  Synthetic oligonucleotide: PDCD1-2814
ggggguccagugccugggcc

SEQ ID NO: 2249 - RNA, 20 nt, Artificial Sequence
  Synthetic oligonucleotide: PDCD1-2815
guccagugccugggccuggc

SEQ ID NO: 2250 - RNA, 20 nt, Artificial Sequence
  Synthetic oligonucleotide: PDCD1-2816
cagugccugggccuggcugg

SEQ ID NO: 2251 - RNA, 20 nt, Artificial Sequence
  Synthetic oligonucleotide: PDCD1-2817
ccugggccuggcuggcggcc

SEQ ID NO: 2252 - RNA, 20 nt, Artificial Sequence
  Synthetic oligonucleotide: PDCD1-2818
gcggcccggcguuugugaaa

SEQ ID NO: 2253 - RNA, 20 nt, Artificial Sequence
  Synthetic oligonucleotide: PDCD1-2819
gagcauuuuauuacagcgaa

SEQ ID NO: 2254 - RNA, 20 nt, Artificial Sequence
  Synthetic oligonucleotide: PDCD1-2820
uauuacagcgaauggaaaac

SEQ ID NO: 2255 - RNA, 17 nt, Artificial Sequence
  Synthetic oligonucleotide: PDCD1-2821
acaccccgguacccagc

SEQ ID NO: 2256 - RNA, 17 nt, Artificial Sequence
  Synthetic oligonucleotide: PDCD1-2822
caccccgguacccagca

SEQ ID NO: 2257 - RNA, 17 nt, Artificial Sequence
  Synthetic oligonucleotide: PDCD1-2823
uacccagcagggcccag

SEQ ID NO: 2258 - RNA, 17 nt, Artificial Sequence
  Synthetic oligonucleotide: PDCD1-2824
acccagcagggcccaga

SEQ ID NO: 2259 - RNA, 17 nt, Artificial Sequence
  Synthetic oligonucleotide: PDCD1-2825
cccagagggacugucuu

SEQ ID NO: 2260 - RNA, 17 nt, Artificial Sequence
  Synthetic oligonucleotide: PDCD1-2826
agggacugucuuaggcu

SEQ ID NO: 2261 - RNA, 17 nt, Artificial Sequence
  Synthetic oligonucleotide: PDCD1-2827
cugucuuaggcuuggcc

SEQ ID NO: 2262 - RNA, 17 nt, Artificial Sequence
  Synthetic oligonucleotide: PDCD1-2828
ugucuuaggcuuggccu

SEQ ID NO: 2263 - RNA, 17 nt, Artificial Sequence
  Synthetic oligonucleotide: PDCD1-2829
gugaaaccacccucccc

SEQ ID NO: 2264 - RNA, 17 nt, Artificial Sequence
  Synthetic oligonucleotide: PDCD1-2830
ccacccuccccaggccu

SEQ ID NO: 2265 - RNA, 17 nt, Artificial Sequence
  Synthetic oligonucleotide: PDCD1-2831
caggccuuggcaucccc

SEQ ID NO: 2266 - RNA, 17 nt, Artificial Sequence
  Synthetic oligonucleotide: PDCD1-2832
uuggcauccccaggugc

SEQ ID NO: 2267 - RNA, 17 nt, Artificial Sequence
  Synthetic oligonucleotide: PDCD1-2833
cauccccaggugcaggc

SEQ ID NO: 2268 - RNA, 17 nt, Artificial Sequence
  Synthetic oligonucleotide: PDCD1-2834
cccaggugcaggcuggc

SEQ ID NO: 2269 - RNA, 17 nt, Artificial Sequence
  Synthetic oligonucleotide: PDCD1-2835
ccaggugcaggcuggcu

SEQ ID NO: 2270 - RNA, 17 nt, Artificial Sequence
  Synthetic oligonucleotide: PDCD1-2836
aggcuggcugggcacag

SEQ ID NO: 2271 - RNA, 17 nt, Artificial Sequence
  Synthetic oligonucleotide: PDCD1-2837
ggcuggcugggcacaga

SEQ ID NO: 2272 - RNA, 17 nt, Artificial Sequence
  Synthetic oligonucleotide: PDCD1-2838
gggcacagagggccagc

SEQ ID NO: 2273 - RNA, 17 nt, Artificial Sequence
  Synthetic oligonucleotide: PDCD1-2839
ggcacagagggccagcc

SEQ ID NO: 2274 - RNA, 17 nt, Artificial Sequence
  Synthetic oligonucleotide: PDCD1-2840
gggccagccgggcacag

SEQ ID NO: 2275 - RNA, 17 nt, Artificial Sequence
  Synthetic oligonucleotide: PDCD1-2841
ggccagccgggcacaga

SEQ ID NO: 2276 - RNA, 17 nt, Artificial Sequence
  Synthetic oligonucleotide: PDCD1-2842
ccgggcacagagggucc

SEQ ID NO: 2277 - RNA, 17 nt, Artificial Sequence
  Synthetic oligonucleotide: PDCD1-2843
cacagaggguccaggag

SEQ ID NO: 2278 - RNA, 17 nt, Artificial Sequence
  Synthetic oligonucleotide: PDCD1-2844
acagaggguccaggagc

SEQ ID NO: 2279 - RNA, 17 nt, Artificial Sequence
  Synthetic oligonucleotide: PDCD1-2845
gguccaggagcgggcug

SEQ ID NO: 2280 - RNA, 17 nt, Artificial Sequence
  Synthetic oligonucleotide: PDCD1-2846
ggucacaguguacacag

SEQ ID NO: 2281 - RNA, 17 nt, Artificial Sequence
  Synthetic oligonucleotide: PDCD1-2847
gucacaguguacacaga

SEQ ID NO: 2282 - RNA, 17 nt, Artificial Sequence
  Synthetic oligonucleotide: PDCD1-2848
guguacacagagggccc

SEQ ID NO: 2283 - RNA, 17 nt, Artificial Sequence
  Synthetic oligonucleotide: PDCD1-2849
uguacacagagggccca

SEQ ID NO: 2284 - RNA, 17 nt, Artificial Sequence
  Synthetic oligonucleotide: PDCD1-2850
cagagggcccaggguca

SEQ ID NO: 2285 - RNA, 17 nt, Artificial Sequence
  Synthetic oligonucleotide: PDCD1-2851
agagggcccagggucac

SEQ ID NO: 2286 - RNA, 17 nt, Artificial Sequence
  Synthetic oligonucleotide: PDCD1-2852
agggucacgggcagccc

SEQ ID NO: 2287 - RNA, 17 nt, Artificial Sequence
  Synthetic oligonucleotide: PDCD1-2853
acgggcagcccaggaag

SEQ ID NO: 2288 - RNA, 17 nt, Artificial Sequence
  Synthetic oligonucleotide: PDCD1-2854
ucccucucuccucgauc

SEQ ID NO: 2289 - RNA, 17 nt, Artificial Sequence
  Synthetic oligonucleotide: PDCD1-2855
cccucucuccucgaucc

SEQ ID NO: 2290 - RNA, 17 nt, Artificial Sequence
  Synthetic oligonucleotide: PDCD1-2856
cucgauccgggagagug

SEQ ID NO: 2291 - RNA, 17 nt, Artificial Sequence
  Synthetic oligonucleotide: PDCD1-2857
ccgggagagugaggcca

SEQ ID NO: 2292 - RNA, 17 nt, Artificial Sequence
  Synthetic oligonucleotide: PDCD1-2858
ggccaaggccuccccca

SEQ ID NO: 2293 - RNA, 17 nt, Artificial Sequence
  Synthetic oligonucleotide: PDCD1-2859
aaggccucccccacgga

SEQ ID NO: 2294 - RNA, 17 nt, Artificial Sequence
  Synthetic oligonucleotide: PDCD1-2860
ccacggauggucugaac

SEQ ID NO: 2295 - RNA, 17 nt, Artificial Sequence
  Synthetic oligonucleotide: PDCD1-2861
cacggauggucugaaca

SEQ ID NO: 2296 - RNA, 17 nt, Artificial Sequence
  Synthetic oligonucleotide: PDCD1-2862
auggucugaacagggcu

SEQ ID NO: 2297 - RNA, 17 nt, Artificial Sequence
  Synthetic oligonucleotide: PDCD1-2863
uggucugaacagggcuc

SEQ ID NO: 2298 - RNA, 17 nt, Artificial Sequence
  Synthetic oligonucleotide: PDCD1-2864
ggucugaacagggcucg

SEQ ID NO: 2299 - RNA, 17 nt, Artificial Sequence
  Synthetic oligonucleotide: PDCD1-2865
gggcucggggagagccc

SEQ ID NO: 2300 - RNA, 17 nt, Artificial Sequence
  Synthetic oligonucleotide: PDCD1-2866
gggagagcccuggaauc

SEQ ID NO: 2301 - RNA, 17 nt, Artificial Sequence
  Synthetic oligonucleotide: PDCD1-2867
ggagagcccuggaaucu

SEQ ID NO: 2302 - RNA, 17 nt, Artificial Sequence
  Synthetic oligonucleotide: PDCD1-2868
aaucugggcagagaccc

SEQ ID NO: 2303 - RNA, 17 nt, Artificial Sequence
  Synthetic oligonucleotide: PDCD1-2869
cugggcagagacccagg

SEQ ID NO: 2304 - RNA, 17 nt, Artificial Sequence
  Synthetic oligonucleotide: PDCD1-2870
ugggcagagacccaggc

SEQ ID NO: 2305 - RNA, 17 nt, Artificial Sequence
  Synthetic oligonucleotide: PDCD1-2871
gggcacaauccccaccc

SEQ ID NO: 2306 - RNA, 17 nt, Artificial Sequence
  Synthetic oligonucleotide: PDCD1-2872
cacaauccccacccagg

SEQ ID NO: 2307 - RNA, 17 nt, Artificial Sequence
  Synthetic oligonucleotide: PDCD1-2873
acaauccccacccagga

SEQ ID NO: 2308 - RNA, 17 nt, Artificial Sequence
  Synthetic oligonucleotide: PDCD1-2874
ccacccaggagggaucc

SEQ ID NO: 2309 - RNA, 17 nt, Artificial Sequence
  Synthetic oligonucleotide: PDCD1-2875
acuguccucacucgaac

SEQ ID NO: 2310 - RNA, 17 nt, Artificial Sequence
  Synthetic oligonucleotide: PDCD1-2876
cucgaacagguacacuu

SEQ ID NO: 2311 - RNA, 17 nt, Artificial Sequence
  Synthetic oligonucleotide: PDCD1-2877
uugacgucguaaagcca

SEQ ID NO: 2312 - RNA, 17 nt, Artificial Sequence
  Synthetic oligonucleotide: PDCD1-2878
ccaagguuagucccaca

SEQ ID NO: 2313 - RNA, 17 nt, Artificial Sequence
  Synthetic oligonucleotide: PDCD1-2879
caagguuagucccacau

SEQ ID NO: 2314 - RNA, 17 nt, Artificial Sequence
  Synthetic oligonucleotide: PDCD1-2880
aagguuagucccacaug

SEQ ID NO: 2315 - RNA, 17 nt, Artificial Sequence
  Synthetic oligonucleotide: PDCD1-2881
gggcucaucccauccuu

SEQ ID NO: 2316 - RNA, 17 nt, Artificial Sequence
  Synthetic oligonucleotide: PDCD1-2882
uuaggaaaacucgagug

SEQ ID NO: 2317 - RNA, 17 nt, Artificial Sequence
  Synthetic oligonucleotide: PDCD1-2883
aacucgagugaggacca

SEQ ID NO: 2318 - RNA, 17 nt, Artificial Sequence
  Synthetic oligonucleotide: PDCD1-2884
ugaggaccaaggaugcc

SEQ ID NO: 2319 - RNA, 17 nt, Artificial Sequence
  Synthetic oligonucleotide: PDCD1-2885
gaggaccaaggaugccu

SEQ ID NO: 2320 - RNA, 17 nt, Artificial Sequence
  Synthetic oligonucleotide: PDCD1-2886
ccaaggaugccugggca

SEQ ID NO: 2321 - RNA, 17 nt, Artificial Sequence
  Synthetic oligonucleotide: PDCD1-2887
ccccacucccauucugu

SEQ ID NO: 2322 - RNA, 17 nt, Artificial Sequence
  Synthetic oligonucleotide: PDCD1-2888
cauucugucggagccuc

SEQ ID NO: 2323 - RNA, 17 nt, Artificial Sequence
  Synthetic oligonucleotide: PDCD1-2889
auucugucggagccucu

SEQ ID NO: 2324 - RNA, 17 nt, Artificial Sequence
  Synthetic oligonucleotide: PDCD1-2890
agccucugggagccucc

SEQ ID NO: 2325 - RNA, 17 nt, Artificial Sequence
  Synthetic oligonucleotide: PDCD1-2891
acagccucugccccugc

SEQ ID NO: 2326 - RNA, 17 nt, Artificial Sequence
  Synthetic oligonucleotide: PDCD1-2892
cagccucugccccugcu

SEQ ID NO: 2327 - RNA, 17 nt, Artificial Sequence
  Synthetic oligonucleotide: PDCD1-2893
agccucugccccugcug

SEQ ID NO: 2328 - RNA, 17 nt, Artificial Sequence
  Synthetic oligonucleotide: PDCD1-2894
gccucugccccugcugg

SEQ ID NO: 2329 - RNA, 17 nt, Artificial Sequence
  Synthetic oligonucleotide: PDCD1-2895
cugccccugcugggggc

SEQ ID NO: 2330 - RNA, 17 nt, Artificial Sequence
  Synthetic oligonucleotide: PDCD1-2896
ugcugggggcaggugcc

SEQ ID NO: 2331 - RNA, 17 nt, Artificial Sequence
  Synthetic oligonucleotide: PDCD1-2897
ccuggccucugccuucc

SEQ ID NO: 2332 - RNA, 17 nt, Artificial Sequence
  Synthetic oligonucleotide: PDCD1-2898
ggcccaucccccuucgc

SEQ ID NO: 2333 - RNA, 17 nt, Artificial Sequence
  Synthetic oligonucleotide: PDCD1-2899
gcccaucccccuucgcu

SEQ ID NO: 2334 - RNA, 17 nt, Artificial Sequence
  Synthetic oligonucleotide: PDCD1-2900
cccaucccccuucgcug

SEQ ID NO: 2335 - RNA, 17 nt, Artificial Sequence
  Synthetic oligonucleotide: PDCD1-2901
ccccuucgcuggggcac

SEQ ID NO: 2336 - RNA, 17 nt, Artificial Sequence
  Synthetic oligonucleotide: PDCD1-2902
ugaaugacaacugucca

SEQ ID NO: 2337 - RNA, 17 nt, Artificial Sequence
  Synthetic oligonucleotide: PDCD1-2903
aacuguccauggcuaau

SEQ ID NO: 2338 - RNA, 17 nt, Artificial Sequence
  Synthetic oligonucleotide: PDCD1-2904
ucaaagcuuccaccuug

SEQ ID NO: 2339 - RNA, 17 nt, Artificial Sequence
  Synthetic oligonucleotide: PDCD1-2905
agcuuccaccuugugga

SEQ ID NO: 2340 - RNA, 17 nt, Artificial Sequence
  Synthetic oligonucleotide: PDCD1-2906
uggauggccucacacca

SEQ ID NO: 2341 - RNA, 17 nt, Artificial Sequence
  Synthetic oligonucleotide: PDCD1-2907
ugccugcaacagccuga

SEQ ID NO: 2342 - RNA, 17 nt, Artificial Sequence
  Synthetic oligonucleotide: PDCD1-2908
gccugcaacagccugac

SEQ ID NO: 2343 - RNA, 17 nt, Artificial Sequence
  Synthetic oligonucleotide: PDCD1-2909
ccugcaacagccugacg

SEQ ID NO: 2344 - RNA, 17 nt, Artificial Sequence
  Synthetic oligonucleotide: PDCD1-2910
cugcaacagccugacgg

SEQ ID NO: 2345 - RNA, 17 nt, Artificial Sequence
  Synthetic oligonucleotide: PDCD1-2911
ugcaacagccugacggg

SEQ ID NO: 2346 - RNA, 17 nt, Artificial Sequence
  Synthetic oligonucleotide: PDCD1-2912
gcaacagccugacgggg

SEQ ID NO: 2347 - RNA, 17 nt, Artificial Sequence
  Synthetic oligonucleotide: PDCD1-2913
cagccugacgggggggc

SEQ ID NO: 2348 - RNA, 17 nt, Artificial Sequence
  Synthetic oligonucleotide: PDCD1-2914
agccugacgggggggcu

SEQ ID NO: 2349 - RNA, 17 nt, Artificial Sequence
  Synthetic oligonucleotide: PDCD1-2915
gccugacgggggggcug

SEQ ID NO: 2350 - RNA, 17 nt, Artificial Sequence
  Synthetic oligonucleotide: PDCD1-2916
ugacgggggggcugggg

SEQ ID NO: 2351 - RNA, 17 nt, Artificial Sequence
  Synthetic oligonucleotide: PDCD1-2917
cgggggggcuggggcgg

SEQ ID NO: 2352 - RNA, 17 nt, Artificial Sequence
  Synthetic oligonucleotide: PDCD1-2918
ggggcuggggcgguggc

SEQ ID NO: 2353 - RNA, 17 nt, Artificial Sequence
  Synthetic oligonucleotide: PDCD1-2919
gggcuggggcgguggca

SEQ ID NO: 2354 - RNA, 17 nt, Artificial Sequence
  Synthetic oligonucleotide: PDCD1-2920
ggcuggggcgguggcag

SEQ ID NO: 2355 - RNA, 17 nt, Artificial Sequence
  Synthetic oligonucleotide: PDCD1-2921
ggggcgguggcaggggc

SEQ ID NO: 2356 - RNA, 17 nt, Artificial Sequence
  Synthetic oligonucleotide: PDCD1-2922
ggcaggggcuggcugug

SEQ ID NO: 2357 - RNA, 17 nt, Artificial Sequence
  Synthetic oligonucleotide: PDCD1-2923
gccuugaccuucuuccc

SEQ ID NO: 2358 - RNA, 17 nt, Artificial Sequence
  Synthetic oligonucleotide: PDCD1-2924
ccuugaccuucuucccc

SEQ ID NO: 2359 - RNA, 17 nt, Artificial Sequence
  Synthetic oligonucleotide: PDCD1-2925
cuugaccuucuuccccg

SEQ ID NO: 2360 - RNA, 17 nt, Artificial Sequence
  Synthetic oligonucleotide: PDCD1-2926
uccagcccacucgugcc

SEQ ID NO: 2361 - RNA, 17 nt, Artificial Sequence
  Synthetic oligonucleotide: PDCD1-2927
ccagcccacucgugcca

SEQ ID NO: 2362 - RNA, 17 nt, Artificial Sequence
  Synthetic oligonucleotide: PDCD1-2928
gcccacucgugccaggg

SEQ ID NO: 2363 - RNA, 17 nt, Artificial Sequence
  Synthetic oligonucleotide: PDCD1-2929
cccacucgugccagggu

SEQ ID NO: 2364 - RNA, 17 nt, Artificial Sequence
  Synthetic oligonucleotide: PDCD1-2930
ccacucgugccagggug

SEQ ID NO: 2365 - RNA, 17 nt, Artificial Sequence
  Synthetic oligonucleotide: PDCD1-2931
cucgugccagggugggg

SEQ ID NO: 2366 - RNA, 17 nt, Artificial Sequence
  Synthetic oligonucleotide: PDCD1-2932
ccaggguggggugguuc

SEQ ID NO: 2367 - RNA, 17 nt, Artificial Sequence
  Synthetic oligonucleotide: PDCD1-2933
caggguggggugguuca

SEQ ID NO: 2368 - RNA, 17 nt, Artificial Sequence
  Synthetic oligonucleotide: PDCD1-2934
aggguggggugguucag

SEQ ID NO: 2369 - RNA, 17 nt, Artificial Sequence
  Synthetic oligonucleotide: PDCD1-2935
ggguggggugguucagg

SEQ ID NO: 2370 - RNA, 17 nt, Artificial Sequence
  Synthetic oligonucleotide: PDCD1-2936
ucaggggguccagugcc

SEQ ID NO: 2371 - RNA, 17 nt, Artificial Sequence
  Synthetic oligonucleotide: PDCD1-2937
caggggguccagugccu

SEQ ID NO: 2372 - RNA, 17 nt, Artificial Sequence
  Synthetic oligonucleotide: PDCD1-2938
gguccagugccugggcc

SEQ ID NO: 2373 - RNA, 17 nt, Artificial Sequence
  Synthetic oligonucleotide: PDCD1-2939
cagugccugggccuggc

SEQ ID NO: 2374 - RNA, 17 nt, Artificial Sequence
  Synthetic oligonucleotide: PDCD1-2940
ugccugggccuggcugg

SEQ ID NO: 2375 - RNA, 17 nt, Artificial Sequence
  Synthetic oligonucleotide: PDCD1-2941
gggccuggcuggcggcc

SEQ ID NO: 2376 - RNA, 17 nt, Artificial Sequence
  Synthetic oligonucleotide: PDCD1-2942
gcccggcguuugugaaa

SEQ ID NO: 2377 - RNA, 17 nt, Artificial Sequence
  Synthetic oligonucleotide: PDCD1-2943
cauuuuauuacagcgaa

SEQ ID NO: 2378 - RNA, 17 nt, Artificial Sequence
  Synthetic oligonucleotide: PDCD1-2944
uacagcgaauggaaaac

SEQ ID NO: 2379 - RNA, 20 nt, Artificial Sequence
  Synthetic oligonucleotide: PDCD1-2945
cugggcccugcuggguaccg

SEQ ID NO: 2380 - RNA, 20 nt, Artificial Sequence
  Synthetic oligonucleotide: PDCD1-2946
ucugggcccugcuggguacc

SEQ ID NO: 2381 - RNA, 20 nt, Artificial Sequence
  Synthetic oligonucleotide: PDCD1-2947
cucugggcccugcuggguac

SEQ ID NO: 2382 - RNA, 20 nt, Artificial Sequence
  Synthetic oligonucleotide: PDCD1-2948
cagucccucugggcccugcu

SEQ ID NO: 2383 - RNA, 20 nt, Artificial Sequence
  Synthetic oligonucleotide: PDCD1-2949
acagucccucugggcccugc

SEQ ID NO: 2384 - RNA, 20 nt, Artificial Sequence
  Synthetic oligonucleotide: PDCD1-2950
aagccuaagacagucccucu

SEQ ID NO: 2385 - RNA, 20 nt, Artificial Sequence
  Synthetic oligonucleotide: PDCD1-2951
caagccuaagacagucccuc

SEQ ID NO: 2386 - RNA, 20 nt, Artificial Sequence
  Synthetic oligonucleotide: PDCD1-2952
uggggagggugguuucaccc

SEQ ID NO: 2387 - RNA, 20 nt, Artificial Sequence
  Synthetic oligonucleotide: PDCD1-2953
augccaaggccuggggaggg

SEQ ID NO: 2388 - RNA, 20 nt, Artificial Sequence
  Synthetic oligonucleotide: PDCD1-2954
gggaugccaaggccugggga

SEQ ID NO: 2389 - RNA, 20 nt, Artificial Sequence
  Synthetic oligonucleotide: PDCD1-2955
ggggaugccaaggccugggg

SEQ ID NO: 2390 - RNA, 20 nt, Artificial Sequence
  Synthetic oligonucleotide: PDCD1-2956
ccuggggaugccaaggccug

SEQ ID NO: 2391 - RNA, 20 nt, Artificial Sequence
  Synthetic oligonucleotide: PDCD1-2957
accuggggaugccaaggccu

SEQ ID NO: 2392 - RNA, 20 nt, Artificial Sequence
  Synthetic oligonucleotide: PDCD1-2958
caccuggggaugccaaggcc

SEQ ID NO: 2393 - RNA, 20 nt, Artificial Sequence
  Synthetic oligonucleotide: PDCD1-2959
gccugcaccuggggaugcca

SEQ ID NO: 2394 - RNA, 20 nt, Artificial Sequence
  Synthetic oligonucleotide: PDCD1-2960
gcccagccagccugcaccug

SEQ ID NO: 2395 - RNA, 20 nt, Artificial Sequence
  Synthetic oligonucleotide: PDCD1-2961
ugcccagccagccugcaccu

SEQ ID NO: 2396 - RNA, 20 nt, Artificial Sequence
  Synthetic oligonucleotide: PDCD1-2962
gugcccagccagccugcacc

SEQ ID NO: 2397 - RNA, 20 nt, Artificial Sequence
  Synthetic oligonucleotide: PDCD1-2963
cuggacccucugugcccggc

SEQ ID NO: 2398 - RNA, 20 nt, Artificial Sequence
  Synthetic oligonucleotide: PDCD1-2964
gcuccuggacccucugugcc

SEQ ID NO: 2399 - RNA, 20 nt, Artificial Sequence
  Synthetic oligonucleotide: PDCD1-2965
cugugaccacagcccgcucc

SEQ ID NO: 2400 - RNA, 20 nt, Artificial Sequence
  Synthetic oligonucleotide: PDCD1-2966
ccugggcugcccgugacccu

SEQ ID NO: 2401 - RNA, 20 nt, Artificial Sequence
  Synthetic oligonucleotide: PDCD1-2967
uccugggcugcccgugaccc

SEQ ID NO: 2402 - RNA, 20 nt, Artificial Sequence
  Synthetic oligonucleotide: PDCD1-2968
gagagagggagccucuuccu

SEQ ID NO: 2403 - RNA, 20 nt, Artificial Sequence
  Synthetic oligonucleotide: PDCD1-2969
ggagagagggagccucuucc

SEQ ID NO: 2404 - RNA, 20 nt, Artificial Sequence
  Synthetic oligonucleotide: PDCD1-2970
ucucccggaucgaggagaga

SEQ ID NO: 2405 - RNA, 20 nt, Artificial Sequence
  Synthetic oligonucleotide: PDCD1-2971
cucucccggaucgaggagag

SEQ ID NO: 2406 - RNA, 20 nt, Artificial Sequence
  Synthetic oligonucleotide: PDCD1-2972
ggccucacucucccggaucg

SEQ ID NO: 2407 - RNA, 20 nt, Artificial Sequence
  Synthetic oligonucleotide: PDCD1-2973
aggccuuggccucacucucc

SEQ ID NO: 2408 - RNA, 20 nt, Artificial Sequence
  Synthetic oligonucleotide: PDCD1-2974
accauccgugggggaggccu

SEQ ID NO: 2409 - RNA, 20 nt, Artificial Sequence
  Synthetic oligonucleotide: PDCD1-2975
guucagaccauccguggggg

SEQ ID NO: 2410 - RNA, 20 nt, Artificial Sequence
  Synthetic oligonucleotide: PDCD1-2976
ccuguucagaccauccgugg

SEQ ID NO: 2411 - RNA, 20 nt, Artificial Sequence
  Synthetic oligonucleotide: PDCD1-2977
cccuguucagaccauccgug

SEQ ID NO: 2412 - RNA, 20 nt, Artificial Sequence
  Synthetic oligonucleotide: PDCD1-2978
gcccuguucagaccauccgu

SEQ ID NO: 2413 - RNA, 20 nt, Artificial Sequence
  Synthetic oligonucleotide: PDCD1-2979
agcccuguucagaccauccg

SEQ ID NO: 2414 - RNA, 20 nt, Artificial Sequence
  Synthetic oligonucleotide: PDCD1-2980
gggucucugcccagauucca

SEQ ID NO: 2415 - RNA, 20 nt, Artificial Sequence
  Synthetic oligonucleotide: PDCD1-2981
ugggucucugcccagauucc

SEQ ID NO: 2416 - RNA, 20 nt, Artificial Sequence
  Synthetic oligonucleotide: PDCD1-2982
gguggggauugugcccgccu

SEQ ID NO: 2417 - RNA, 20 nt, Artificial Sequence
  Synthetic oligonucleotide: PDCD1-2983
ggguggggauugugcccgcc

SEQ ID NO: 2418 - RNA, 20 nt, Artificial Sequence
  Synthetic oligonucleotide: PDCD1-2984
uccaggaucccuccugggug

SEQ ID NO: 2419 - RNA, 20 nt, Artificial Sequence
  Synthetic oligonucleotide: PDCD1-2985
cuccaggaucccuccugggu

SEQ ID NO: 2420 - RNA, 20 nt, Artificial Sequence
  Synthetic oligonucleotide: PDCD1-2986
ucuccaggaucccuccuggg

SEQ ID NO: 2421 - RNA, 20 nt, Artificial Sequence
  Synthetic oligonucleotide: PDCD1-2987
cugucuccaggaucccuccu

SEQ ID NO: 2422 - RNA, 20 nt, Artificial Sequence
  Synthetic oligonucleotide: PDCD1-2988
ucugucuccaggaucccucc

SEQ ID NO: 2423 - RNA, 20 nt, Artificial Sequence
  Synthetic oligonucleotide: PDCD1-2989
aggacaguucuucugucucc

SEQ ID NO: 2424 - RNA, 20 nt, Artificial Sequence
  Synthetic oligonucleotide: PDCD1-2990
aaaguguaccuguucgagug

SEQ ID NO: 2425 - RNA, 20 nt, Artificial Sequence
  Synthetic oligonucleotide: PDCD1-2991
acgucaaaguuuagaugagc

SEQ ID NO: 2426 - RNA, 20 nt, Artificial Sequence
  Synthetic oligonucleotide: PDCD1-2992
gccccaugugggacuaaccu

SEQ ID NO: 2427 - RNA, 20 nt, Artificial Sequence
  Synthetic oligonucleotide: PDCD1-2993
ggaugggaugagccccaugu

SEQ ID NO: 2428 - RNA, 20 nt, Artificial Sequence
  Synthetic oligonucleotide: PDCD1-2994
aggaugggaugagccccaug

SEQ ID NO: 2429 - RNA, 20 nt, Artificial Sequence
  Synthetic oligonucleotide: PDCD1-2995
acucgaguuuuccuaaggau

SEQ ID NO: 2430 - RNA, 20 nt, Artificial Sequence
  Synthetic oligonucleotide: PDCD1-2996
cacucgaguuuuccuaagga

SEQ ID NO: 2431 - RNA, 20 nt, Artificial Sequence
  Synthetic oligonucleotide: PDCD1-2997
uccucacucgaguuuuccua

SEQ ID NO: 2432 - RNA, 20 nt, Artificial Sequence
  Synthetic oligonucleotide: PDCD1-2998
cugccuugcccaggcauccu

SEQ ID NO: 2433 - RNA, 20 nt, Artificial Sequence
  Synthetic oligonucleotide: PDCD1-2999
gcuccgacagaaugggagug

SEQ ID NO: 2434 - RNA, 20 nt, Artificial Sequence
  Synthetic oligonucleotide: PDCD1-3000
ggcuccgacagaaugggagu

SEQ ID NO: 2435 - RNA, 20 nt, Artificial Sequence
  Synthetic oligonucleotide: PDCD1-3001
aggcuccgacagaaugggag

SEQ ID NO: 2436 - RNA, 20 nt, Artificial Sequence
  Synthetic oligonucleotide: PDCD1-3002
cccagaggcuccgacagaau

SEQ ID NO: 2437 - RNA, 20 nt, Artificial Sequence
  Synthetic oligonucleotide: PDCD1-3003
ucccagaggcuccgacagaa

SEQ ID NO: 2438 - RNA, 20 nt, Artificial Sequence
  Synthetic oligonucleotide: PDCD1-3004
ggcagccgggaggcucccag

SEQ ID NO: 2439 - RNA, 20 nt, Artificial Sequence
  Synthetic oligonucleotide: PDCD1-3005
agaggcugugggcagccggg

SEQ ID NO: 2440 - RNA, 20 nt, Artificial Sequence
  Synthetic oligonucleotide: PDCD1-3006
ggcagaggcugugggcagcc

SEQ ID NO: 2441 - RNA, 20 nt, Artificial Sequence
  Synthetic oligonucleotide: PDCD1-3007
gggcagaggcugugggcagc

SEQ ID NO: 2442 - RNA, 20 nt, Artificial Sequence
  Synthetic oligonucleotide: PDCD1-3008
ccagcaggggcagaggcugu

SEQ ID NO: 2443 - RNA, 20 nt, Artificial Sequence
  Synthetic oligonucleotide: PDCD1-3009
cccagcaggggcagaggcug

SEQ ID NO: 2444 - RNA, 20 nt, Artificial Sequence
  Synthetic oligonucleotide: PDCD1-3010
ccugcccccagcaggggcag

SEQ ID NO: 2445 - RNA, 20 nt, Artificial Sequence
  Synthetic oligonucleotide: PDCD1-3011
caggcaccugcccccagcag

SEQ ID NO: 2446 - RNA, 20 nt, Artificial Sequence
  Synthetic oligonucleotide: PDCD1-3012
ccaggcaccugcccccagca

SEQ ID NO: 2447 - RNA, 20 nt, Artificial Sequence
  Synthetic oligonucleotide: PDCD1-3013
gccaggcaccugcccccagc

SEQ ID NO: 2448 - RNA, 20 nt, Artificial Sequence
  Synthetic oligonucleotide: PDCD1-3014
gggccgggaaggcagaggcc

SEQ ID NO: 2449 - RNA, 20 nt, Artificial Sequence
  Synthetic oligonucleotide: PDCD1-3015
gggaugggccgggaaggcag

SEQ ID NO: 2450 - RNA, 20 nt, Artificial Sequence
  Synthetic oligonucleotide: PDCD1-3016
cgaagggggaugggccggga

SEQ ID NO: 2451 - RNA, 20 nt, Artificial Sequence
  Synthetic oligonucleotide: PDCD1-3017
ccagcgaagggggaugggcc

SEQ ID NO: 2452 - RNA, 20 nt, Artificial Sequence
  Synthetic oligonucleotide: PDCD1-3018
cccagcgaagggggaugggc

SEQ ID NO: 2453 - RNA, 20 nt, Artificial Sequence
  Synthetic oligonucleotide: PDCD1-3019
gugccccagcgaagggggau

SEQ ID NO: 2454 - RNA, 20 nt, Artificial Sequence
  Synthetic oligonucleotide: PDCD1-3020
ugugccccagcgaaggggga

SEQ ID NO: 2455 - RNA, 20 nt, Artificial Sequence
  Synthetic oligonucleotide: PDCD1-3021
caccugugccccagcgaagg

SEQ ID NO: 2456 - RNA, 20 nt, Artificial Sequence
  Synthetic oligonucleotide: PDCD1-3022
ucaccugugccccagcgaag

SEQ ID NO: 2457 - RNA, 20 nt, Artificial Sequence
  Synthetic oligonucleotide: PDCD1-3023
gucaccugugccccagcgaa

SEQ ID NO: 2458 - RNA, 20 nt, Artificial Sequence
  Synthetic oligonucleotide: PDCD1-3024
ggucaccugugccccagcga

SEQ ID NO: 2459 - RNA, 20 nt, Artificial Sequence
  Synthetic oligonucleotide: PDCD1-3025
uggacaguugucauucagua

SEQ ID NO: 2460 - RNA, 20 nt, Artificial Sequence
  Synthetic oligonucleotide: PDCD1-3026
auggacaguugucauucagu

SEQ ID NO: 2461 - RNA, 20 nt, Artificial Sequence
  Synthetic oligonucleotide: PDCD1-3027
gagggggagccgauuagcca

SEQ ID NO: 2462 - RNA, 20 nt, Artificial Sequence
  Synthetic oligonucleotide: PDCD1-3028
acaagguggaagcuuugagg

SEQ ID NO: 2463 - RNA, 20 nt, Artificial Sequence
  Synthetic oligonucleotide: PDCD1-3029
cacaagguggaagcuuugag

SEQ ID NO: 2464 - RNA, 20 nt, Artificial Sequence
  Synthetic oligonucleotide: PDCD1-3030
ccacaagguggaagcuuuga

SEQ ID NO: 2465 - RNA, 20 nt, Artificial Sequence
  Synthetic oligonucleotide: PDCD1-3031
uccacaagguggaagcuuug

SEQ ID NO: 2466 - RNA, 20 nt, Artificial Sequence
  Synthetic oligonucleotide: PDCD1-3032
gugugaggccauccacaagg

SEQ ID NO: 2467 - RNA, 20 nt, Artificial Sequence
  Synthetic oligonucleotide: PDCD1-3033
auggugugaggccauccaca

SEQ ID NO: 2468 - RNA, 20 nt, Artificial Sequence
  Synthetic oligonucleotide: PDCD1-3034
ggaacuguggccauggugug

SEQ ID NO: 2469 - RNA, 20 nt, Artificial Sequence
  Synthetic oligonucleotide: PDCD1-3035
aagaucuggaacuguggcca

SEQ ID NO: 2470 - RNA, 20 nt, Artificial Sequence
  Synthetic oligonucleotide: PDCD1-3036
gguggaaagaucuggaacug

SEQ ID NO: 2471 - RNA, 20 nt, Artificial Sequence
  Synthetic oligonucleotide: PDCD1-3037
caucacacgguggaaagauc

SEQ ID NO: 2472 - RNA, 20 nt, Artificial Sequence
  Synthetic oligonucleotide: PDCD1-3038
cuguugcaggcaucacacgg

SEQ ID NO: 2473 - RNA, 20 nt, Artificial Sequence
  Synthetic oligonucleotide: PDCD1-3039
aggcuguugcaggcaucaca

SEQ ID NO: 2474 - RNA, 20 nt, Artificial Sequence
  Synthetic oligonucleotide: PDCD1-3040
cccccccgucaggcuguugc

SEQ ID NO: 2475 - RNA, 20 nt, Artificial Sequence
  Synthetic oligonucleotide: PDCD1-3041
accgccccagcccccccguc

SEQ ID NO: 2476 - RNA, 20 nt, Artificial Sequence
  Synthetic oligonucleotide: PDCD1-3042
aaggucaaggcuggaagggg

SEQ ID NO: 2477 - RNA, 20 nt, Artificial Sequence
  Synthetic oligonucleotide: PDCD1-3043
aagaaggucaaggcuggaag

SEQ ID NO: 2478 - RNA, 20 nt, Artificial Sequence
  Synthetic oligonucleotide: PDCD1-3044
gaagaaggucaaggcuggaa

SEQ ID NO: 2479 - RNA, 20 nt, Artificial Sequence
  Synthetic oligonucleotide: PDCD1-3045
ggaagaaggucaaggcugga

SEQ ID NO: 2480 - RNA, 20 nt, Artificial Sequence
  Synthetic oligonucleotide: PDCD1-3046
ccggggaagaaggucaaggc

SEQ ID NO: 2481 - RNA, 20 nt, Artificial Sequence
  Synthetic oligonucleotide: PDCD1-3047
ggccccggggaagaagguca

SEQ ID NO: 2482 - RNA, 20 nt, Artificial Sequence
  Synthetic oligonucleotide: PDCD1-3048
gggcagggccccggggaaga

SEQ ID NO: 2483 - RNA, 20 nt, Artificial Sequence
  Synthetic oligonucleotide: PDCD1-3049
ggcuggagggcagggccccg

SEQ ID NO: 2484 - RNA, 20 nt, Artificial Sequence
  Synthetic oligonucleotide: PDCD1-3050
gggcuggagggcagggcccc

SEQ ID NO: 2485 - RNA, 20 nt, Artificial Sequence
  Synthetic oligonucleotide: PDCD1-3051
ugggcuggagggcagggccc

SEQ ID NO: 2486 - RNA, 20 nt, Artificial Sequence
  Synthetic oligonucleotide: PDCD1-3052
cacgagugggcuggagggca

SEQ ID NO: 2487 - RNA, 20 nt, Artificial Sequence
  Synthetic oligonucleotide: PDCD1-3053
gcacgagugggcuggagggc

SEQ ID NO: 2488 - RNA, 20 nt, Artificial Sequence
  Synthetic oligonucleotide: PDCD1-3054
ccuggcacgagugggcugga

SEQ ID NO: 2489 - RNA, 20 nt, Artificial Sequence
  Synthetic oligonucleotide: PDCD1-3055
cccuggcacgagugggcugg

SEQ ID NO: 2490 - RNA, 20 nt, Artificial Sequence
  Synthetic oligonucleotide: PDCD1-3056
ccacccuggcacgagugggc

SEQ ID NO: 2491 - RNA, 20 nt, Artificial Sequence
  Synthetic oligonucleotide: PDCD1-3057
caccccacccuggcacgagu

SEQ ID NO: 2492 - RNA, 20 nt, Artificial Sequence
  Synthetic oligonucleotide: PDCD1-3058
ccaccccacccuggcacgag

SEQ ID NO: 2493 - RNA, 20 nt, Artificial Sequence
  Synthetic oligonucleotide: PDCD1-3059
cccccugaaccaccccaccc

SEQ ID NO: 2494 - RNA, 20 nt, Artificial Sequence
  Synthetic oligonucleotide: PDCD1-3060
cgccagccaggcccaggcac

SEQ ID NO: 2495 - RNA, 20 nt, Artificial Sequence
  Synthetic oligonucleotide: PDCD1-3061
ccgggccgccagccaggccc

SEQ ID NO: 2496 - RNA, 20 nt, Artificial Sequence
  Synthetic oligonucleotide: PDCD1-3062
caaacgccgggccgccagcc

SEQ ID NO: 2497 - RNA, 20 nt, Artificial Sequence
  Synthetic oligonucleotide: PDCD1-3063
caagccauuucacaaacgcc

SEQ ID NO: 2498 - RNA, 20 nt, Artificial Sequence
  Synthetic oligonucleotide: PDCD1-3064
gcaagccauuucacaaacgc

SEQ ID NO: 2499 - RNA, 20 nt, Artificial Sequence
  Synthetic oligonucleotide: PDCD1-3065
aaugcucagcacagaauaca

SEQ ID NO: 2500 - RNA, 17 nt, Artificial Sequence
  Synthetic oligonucleotide: PDCD1-3066
ggcccugcuggguaccg

SEQ ID NO: 2501 - RNA, 17 nt, Artificial Sequence
  Synthetic oligonucleotide: PDCD1-3067
gggcccugcuggguacc

SEQ ID NO: 2502 - RNA, 17 nt, Artificial Sequence
  Synthetic oligonucleotide: PDCD1-3068
ugggcccugcuggguac

SEQ ID NO: 2503 - RNA, 17 nt, Artificial Sequence
  Synthetic oligonucleotide: PDCD1-3069
ucccucugggcccugcu

SEQ ID NO: 2504 - RNA, 17 nt, Artificial Sequence
  Synthetic oligonucleotide: PDCD1-3070
gucccucugggcccugc

SEQ ID NO: 2505 - RNA, 17 nt, Artificial Sequence
  Synthetic oligonucleotide: PDCD1-3071
ccuaagacagucccucu

SEQ ID NO: 2506 - RNA, 17 nt, Artificial Sequence
  Synthetic oligonucleotide: PDCD1-3072
gccuaagacagucccuc

SEQ ID NO: 2507 - RNA, 17 nt, Artificial Sequence
  Synthetic oligonucleotide: PDCD1-3073
ggagggugguuucaccc

SEQ ID NO: 2508 - RNA, 17 nt, Artificial Sequence
  Synthetic oligonucleotide: PDCD1-3074
ccaaggccuggggaggg

SEQ ID NO: 2509 - RNA, 17 nt, Artificial Sequence
  Synthetic oligonucleotide: PDCD1-3075
augccaaggccugggga

SEQ ID NO: 2510 - RNA, 17 nt, Artificial Sequence
  Synthetic oligonucleotide: PDCD1-3076
gaugccaaggccugggg

SEQ ID NO: 2511 - RNA, 17 nt, Artificial Sequence
  Synthetic oligonucleotide: PDCD1-3077
ggggaugccaaggccug

SEQ ID NO: 2512 - RNA, 17 nt, Artificial Sequence
  Synthetic oligonucleotide: PDCD1-3078
uggggaugccaaggccu

SEQ ID NO: 2513 - RNA, 17 nt, Artificial Sequence
  Synthetic oligonucleotide: PDCD1-3079
cuggggaugccaaggcc

SEQ ID NO: 2514 - RNA, 17 nt, Artificial Sequence
  Synthetic oligonucleotide: PDCD1-3080
ugcaccuggggaugcca

SEQ ID NO: 2515 - RNA, 17 nt, Artificial Sequence
  Synthetic oligonucleotide: PDCD1-3081
cagccagccugcaccug

SEQ ID NO: 2516 - RNA, 17 nt, Artificial Sequence
  Synthetic oligonucleotide: PDCD1-3082
ccagccagccugcaccu

SEQ ID NO: 2517 - RNA, 17 nt, Artificial Sequence
  Synthetic oligonucleotide: PDCD1-3083
cccagccagccugcacc

SEQ ID NO: 2518 - RNA, 17 nt, Artificial Sequence
  Synthetic oligonucleotide: PDCD1-3084
gacccucugugcccggc

SEQ ID NO: 2519 - RNA, 17 nt, Artificial Sequence
  Synthetic oligonucleotide: PDCD1-3085
ccuggacccucugugcc

SEQ ID NO: 2520 - RNA, 17 nt, Artificial Sequence
  Synthetic oligonucleotide: PDCD1-3086
ugaccacagcccgcucc

SEQ ID NO: 2521 - RNA, 17 nt, Artificial Sequence
  Synthetic oligonucleotide: PDCD1-3087
gggcugcccgugacccu

SEQ ID NO: 2522 - RNA, 17 nt, Artificial Sequence
  Synthetic oligonucleotide: PDCD1-3088
ugggcugcccgugaccc

SEQ ID NO: 2523 - RNA, 17 nt, Artificial Sequence
  Synthetic oligonucleotide: PDCD1-3089
agagggagccucuuccu

SEQ ID NO: 2524 - RNA, 17 nt, Artificial Sequence
  Synthetic oligonucleotide: PDCD1-3090
gagagggagccucuucc

SEQ ID NO: 2525 - RNA, 17 nt, Artificial Sequence
  Synthetic oligonucleotide: PDCD1-3091
cccggaucgaggagaga

SEQ ID NO: 2526 - RNA, 17 nt, Artificial Sequence
  Synthetic oligonucleotide: PDCD1-3092
ucccggaucgaggagag

SEQ ID NO: 2527 - RNA, 17 nt, Artificial Sequence
  Synthetic oligonucleotide: PDCD1-3093
cucacucucccggaucg

SEQ ID NO: 2528 - RNA, 17 nt, Artificial Sequence
  Synthetic oligonucleotide: PDCD1-3094
ccuuggccucacucucc

SEQ ID NO: 2529 - RNA, 17 nt, Artificial Sequence
  Synthetic oligonucleotide: PDCD1-3095
auccgugggggaggccu

SEQ ID NO: 2530 - RNA, 17 nt, Artificial Sequence
  Synthetic oligonucleotide: PDCD1-3096
cagaccauccguggggg

SEQ ID NO: 2531 - RNA, 17 nt, Artificial Sequence
  Synthetic oligonucleotide: PDCD1-3097
guucagaccauccgugg

SEQ ID NO: 2532 - RNA, 17 nt, Artificial Sequence
  Synthetic oligonucleotide: PDCD1-3098
uguucagaccauccgug

SEQ ID NO: 2533 - RNA, 17 nt, Artificial Sequence
  Synthetic oligonucleotide: PDCD1-3099
cuguucagaccauccgu

SEQ ID NO: 2534 - RNA, 17 nt, Artificial Sequence
  Synthetic oligonucleotide: PDCD1-3100
ccuguucagaccauccg

SEQ ID NO: 2535 - RNA, 17 nt, Artificial Sequence
  Synthetic oligonucleotide: PDCD1-3101
ucucugcccagauucca

SEQ ID NO: 2536 - RNA, 17 nt, Artificial Sequence
  Synthetic oligonucleotide: PDCD1-3102
gucucugcccagauucc

SEQ ID NO: 2537 - RNA, 17 nt, Artificial Sequence
  Synthetic oligonucleotide: PDCD1-3103
ggggauugugcccgccu

SEQ ID NO: 2538 - RNA, 17 nt, Artificial Sequence
  Synthetic oligonucleotide: PDCD1-3104
uggggauugugcccgcc

SEQ ID NO: 2539 - RNA, 17 nt, Artificial Sequence
  Synthetic oligonucleotide: PDCD1-3105
aggaucccuccugggug

SEQ ID NO: 2540 - RNA, 17 nt, Artificial Sequence
  Synthetic oligonucleotide: PDCD1-3106
caggaucccuccugggu

SEQ ID NO: 2541 - RNA, 17 nt, Artificial Sequence
  Synthetic oligonucleotide: PDCD1-3107
ccaggaucccuccuggg

SEQ ID NO: 2542 - RNA, 17 nt, Artificial Sequence
  Synthetic oligonucleotide: PDCD1-3108
ucuccaggaucccuccu

SEQ ID NO: 2543 - RNA, 17 nt, Artificial Sequence
  Synthetic oligonucleotide: PDCD1-3109
gucuccaggaucccucc

SEQ ID NO: 2544 - RNA, 17 nt, Artificial Sequence
  Synthetic oligonucleotide: PDCD1-3110
acaguucuucugucucc

SEQ ID NO: 2545 - RNA, 17 nt, Artificial Sequence
  Synthetic oligonucleotide: PDCD1-3111
guguaccuguucgagug

SEQ ID NO: 2546 - RNA, 17 nt, Artificial Sequence
  Synthetic oligonucleotide: PDCD1-3112
ucaaaguuuagaugagc

SEQ ID NO: 2547 - RNA, 17 nt, Artificial Sequence
  Synthetic oligonucleotide: PDCD1-3113
ccaugugggacuaaccu

SEQ ID NO: 2548 - RNA, 17 nt, Artificial Sequence
  Synthetic oligonucleotide: PDCD1-3114
ugggaugagccccaugu

SEQ ID NO: 2549 - RNA, 17 nt, Artificial Sequence
  Synthetic oligonucleotide: PDCD1-3115
augggaugagccccaug

SEQ ID NO: 2550 - RNA, 17 nt, Artificial Sequence
  Synthetic oligonucleotide: PDCD1-3116
cgaguuuuccuaaggau

SEQ ID NO: 2551 - RNA, 17 nt, Artificial Sequence
  Synthetic oligonucleotide: PDCD1-3117
ucgaguuuuccuaagga

SEQ ID NO: 2552 - RNA, 17 nt, Artificial Sequence
  Synthetic oligonucleotide: PDCD1-3118
ucacucgaguuuuccua

SEQ ID NO: 2553 - RNA, 17 nt, Artificial Sequence
  Synthetic oligonucleotide: PDCD1-3119
ccuugcccaggcauccu

SEQ ID NO: 2554 - RNA, 17 nt, Artificial Sequence
  Synthetic oligonucleotide: PDCD1-3120
ccgacagaaugggagug

SEQ ID NO: 2555 - RNA, 17 nt, Artificial Sequence
  Synthetic oligonucleotide: PDCD1-3121
uccgacagaaugggagu

SEQ ID NO: 2556 - RNA, 17 nt, Artificial Sequence
  Synthetic oligonucleotide: PDCD1-3122
cuccgacagaaugggag

SEQ ID NO: 2557 - RNA, 17 nt, Artificial Sequence
  Synthetic oligonucleotide: PDCD1-3123
agaggcuccgacagaau

SEQ ID NO: 2558 - RNA, 17 nt, Artificial Sequence
  Synthetic oligonucleotide: PDCD1-3124
cagaggcuccgacagaa

SEQ ID NO: 2559 - RNA, 17 nt, Artificial Sequence
  Synthetic oligonucleotide: PDCD1-3125
agccgggaggcucccag

SEQ ID NO: 2560 - RNA, 17 nt, Artificial Sequence
  Synthetic oligonucleotide: PDCD1-3126
ggcugugggcagccggg

SEQ ID NO: 2561 - RNA, 17 nt, Artificial Sequence
  Synthetic oligonucleotide: PDCD1-3127
agaggcugugggcagcc

SEQ ID NO: 2562 - RNA, 17 nt, Artificial Sequence
  Synthetic oligonucleotide: PDCD1-3128
cagaggcugugggcagc

SEQ ID NO: 2563 - RNA, 17 nt, Artificial Sequence
  Synthetic oligonucleotide: PDCD1-3129
gcaggggcagaggcugu

SEQ ID NO: 2564 - RNA, 17 nt, Artificial Sequence
  Synthetic oligonucleotide: PDCD1-3130
agcaggggcagaggcug

SEQ ID NO: 2565 - RNA, 17 nt, Artificial Sequence
  Synthetic oligonucleotide: PDCD1-3131
gcccccagcaggggcag

SEQ ID NO: 2566 - RNA, 17 nt, Artificial Sequence
  Synthetic oligonucleotide: PDCD1-3132
gcaccugcccccagcag

SEQ ID NO: 2567 - RNA, 17 nt, Artificial Sequence
  Synthetic oligonucleotide: PDCD1-3133
ggcaccugcccccagca

SEQ ID NO: 2568 - RNA, 17 nt, Artificial Sequence
  Synthetic oligonucleotide: PDCD1-3134
aggcaccugcccccagc

SEQ ID NO: 2569 - RNA, 17 nt, Artificial Sequence
  Synthetic oligonucleotide: PDCD1-3135
ccgggaaggcagaggcc

SEQ ID NO: 2570 - RNA, 17 nt, Artificial Sequence
  Synthetic oligonucleotide: PDCD1-3136
augggccgggaaggcag

SEQ ID NO: 2571 - RNA, 17 nt, Artificial Sequence
  Synthetic oligonucleotide: PDCD1-3137
agggggaugggccggga

SEQ ID NO: 2572 - RNA, 17 nt, Artificial Sequence
  Synthetic oligonucleotide: PDCD1-3138
gcgaagggggaugggcc

SEQ ID NO: 2573 - RNA, 17 nt, Artificial Sequence
  Synthetic oligonucleotide: PDCD1-3139
agcgaagggggaugggc

SEQ ID NO: 2574 - RNA, 17 nt, Artificial Sequence
  Synthetic oligonucleotide: PDCD1-3140
ccccagcgaagggggau

SEQ ID NO: 2575 - RNA, 17 nt, Artificial Sequence
  Synthetic oligonucleotide: PDCD1-3141
gccccagcgaaggggga

SEQ ID NO: 2576 - RNA, 17 nt, Artificial Sequence
  Synthetic oligonucleotide: PDCD1-3142
cugugccccagcgaagg

SEQ ID NO: 2577 - RNA, 17 nt, Artificial Sequence
  Synthetic oligonucleotide: PDCD1-3143
ccugugccccagcgaag

SEQ ID NO: 2578 - RNA, 17 nt, Artificial Sequence
  Synthetic oligonucleotide: PDCD1-3144
accugugccccagcgaa

SEQ ID NO: 2579 - RNA, 17 nt, Artificial Sequence
  Synthetic oligonucleotide: PDCD1-3145
caccugugccccagcga

SEQ ID NO: 2580 - RNA, 17 nt, Artificial Sequence
  Synthetic oligonucleotide: PDCD1-3146
acaguugucauucagua

SEQ ID NO: 2581 - RNA, 17 nt, Artificial Sequence
  Synthetic oligonucleotide: PDCD1-3147
gacaguugucauucagu

SEQ ID NO: 2582 - RNA, 17 nt, Artificial Sequence
  Synthetic oligonucleotide: PDCD1-3148
ggggagccgauuagcca

SEQ ID NO: 2583 - RNA, 17 nt, Artificial Sequence
  Synthetic oligonucleotide: PDCD1-3149
agguggaagcuuugagg

SEQ ID NO: 2584 - RNA, 17 nt, Artificial Sequence
  Synthetic oligonucleotide: PDCD1-3150
aagguggaagcuuugag

SEQ ID NO: 2585 - RNA, 17 nt, Artificial Sequence
  Synthetic oligonucleotide: PDCD1-3151
caagguggaagcuuuga

SEQ ID NO: 2586 - RNA, 17 nt, Artificial Sequence
  Synthetic oligonucleotide: PDCD1-3152
acaagguggaagcuuug

SEQ ID NO: 2587 - RNA, 17 nt, Artificial Sequence
  Synthetic oligonucleotide: PDCD1-3153
ugaggccauccacaagg

SEQ ID NO: 2588 - RNA, 17 nt, Artificial Sequence
  Synthetic oligonucleotide: PDCD1-3154
gugugaggccauccaca

SEQ ID NO: 2589 - RNA, 17 nt, Artificial Sequence
  Synthetic oligonucleotide: PDCD1-3155
acuguggccauggugug

SEQ ID NO: 2590 - RNA, 17 nt, Artificial Sequence
  Synthetic oligonucleotide: PDCD1-3156
aucuggaacuguggcca

SEQ ID NO: 2591 - RNA, 17 nt, Artificial Sequence
  Synthetic oligonucleotide: PDCD1-3157
ggaaagaucuggaacug

SEQ ID NO: 2592 - RNA, 17 nt, Artificial Sequence
  Synthetic oligonucleotide: PDCD1-3158
cacacgguggaaagauc

SEQ ID NO: 2593 - RNA, 17 nt, Artificial Sequence
  Synthetic oligonucleotide: PDCD1-3159
uugcaggcaucacacgg

SEQ ID NO: 2594 - RNA, 17 nt, Artificial Sequence
  Synthetic oligonucleotide: PDCD1-3160
cuguugcaggcaucaca

SEQ ID NO: 2595 - RNA, 17 nt, Artificial Sequence
  Synthetic oligonucleotide: PDCD1-3161
ccccgucaggcuguugc

SEQ ID NO: 2596 - RNA, 17 nt, Artificial Sequence
  Synthetic oligonucleotide: PDCD1-3162
gccccagcccccccguc

SEQ ID NO: 2597 - RNA, 17 nt, Artificial Sequence
  Synthetic oligonucleotide: PDCD1-3163
gucaaggcuggaagggg

SEQ ID NO: 2598 - RNA, 17 nt, Artificial Sequence
  Synthetic oligonucleotide: PDCD1-3164
aaggucaaggcuggaag

SEQ ID NO: 2599 - RNA, 17 nt, Artificial Sequence
  Synthetic oligonucleotide: PDCD1-3165
gaaggucaaggcuggaa

SEQ ID NO: 2600 - RNA, 17 nt, Artificial Sequence
  Synthetic oligonucleotide: PDCD1-3166
agaaggucaaggcugga

SEQ ID NO: 2601 - RNA, 17 nt, Artificial Sequence
  Synthetic oligonucleotide: PDCD1-3167
gggaagaaggucaaggc

SEQ ID NO: 2602 - RNA, 17 nt, Artificial Sequence
  Synthetic oligonucleotide: PDCD1-3168
cccggggaagaagguca

SEQ ID NO: 2603 - RNA, 17 nt, Artificial Sequence
  Synthetic oligonucleotide: PDCD1-3169
cagggccccggggaaga

SEQ ID NO: 2604 - RNA, 17 nt, Artificial Sequence
  Synthetic oligonucleotide: PDCD1-3170
uggagggcagggccccg

SEQ ID NO: 2605 - RNA, 17 nt, Artificial Sequence
  Synthetic oligonucleotide: PDCD1-3171
cuggagggcagggcccc

SEQ ID NO: 2606 - RNA, 17 nt, Artificial Sequence
  Synthetic oligonucleotide: PDCD1-3172
gcuggagggcagggccc

SEQ ID NO: 2607 - RNA, 17 nt, Artificial Sequence
  Synthetic oligonucleotide: PDCD1-3173
gagugggcuggagggca

SEQ ID NO: 2608 - RNA, 17 nt, Artificial Sequence
  Synthetic oligonucleotide: PDCD1-3174
cgagugggcuggagggc

SEQ ID NO: 2609 - RNA, 17 nt, Artificial Sequence
  Synthetic oligonucleotide: PDCD1-3175
ggcacgagugggcugga

SEQ ID NO: 2610 - RNA, 17 nt, Artificial Sequence
  Synthetic oligonucleotide: PDCD1-3176
uggcacgagugggcugg

SEQ ID NO: 2611 - RNA, 17 nt, Artificial Sequence
  Synthetic oligonucleotide: PDCD1-3177
cccuggcacgagugggc

SEQ ID NO: 2612 - RNA, 17 nt, Artificial Sequence
  Synthetic oligonucleotide: PDCD1-3178
cccacccuggcacgagu

SEQ ID NO: 2613 - RNA, 17 nt, Artificial Sequence
  Synthetic oligonucleotide: PDCD1-3179
ccccacccuggcacgag

SEQ ID NO: 2614 - RNA, 17 nt, Artificial Sequence
  Synthetic oligonucleotide: PDCD1-3180
ccugaaccaccccaccc

SEQ ID NO: 2615 - RNA, 17 nt, Artificial Sequence
  Synthetic oligonucleotide: PDCD1-3181
cagccaggcccaggcac

SEQ ID NO: 2616 - RNA, 17 nt, Artificial Sequence
  Synthetic oligonucleotide: PDCD1-3182
ggccgccagccaggccc

SEQ ID NO: 2617 - RNA, 17 nt, Artificial Sequence
  Synthetic oligonucleotide: PDCD1-3183
acgccgggccgccagcc

SEQ ID NO: 2618 - RNA, 17 nt, Artificial Sequence
  Synthetic oligonucleotide: PDCD1-3184
gccauuucacaaacgcc

SEQ ID NO: 2619 - RNA, 17 nt, Artificial Sequence
  Synthetic oligonucleotide: PDCD1-3185
agccauuucacaaacgc

SEQ ID NO: 2620 - RNA, 17 nt, Artificial Sequence
  Synthetic oligonucleotide: PDCD1-3186
gcucagcacagaauaca

SEQ ID NO: 2621 - RNA, 20 nt, Artificial Sequence
  Synthetic oligonucleotide: PDCD1-955
agacuccccacggccaaggu

SEQ ID NO: 2622 - RNA, 20 nt, Artificial Sequence
  Synthetic oligonucleotide: PDCD1-2085
gacuccccacggccaagguu

SEQ ID NO: 2623 - RNA, 20 nt, Artificial Sequence
  Synthetic oligonucleotide: PDCD1-957
cagccugacccgucauucua

SEQ ID NO: 2624 - RNA, 20 nt, Artificial Sequence
  Synthetic oligonucleotide: PDCD1-958
cuacagaaacacgcagcccc

SEQ ID NO: 2625 - RNA, 20 nt, Artificial Sequence
  Synthetic oligonucleotide: PDCD1-959
cacgcagccccaaggaccgg

SEQ ID NO: 2626 - RNA, 20 nt, Artificial Sequence
  Synthetic oligonucleotide: PDCD1-960
cgcagccccaaggaccggcu

SEQ ID NO: 2627 - RNA, 20 nt, Artificial Sequence
  Synthetic oligonucleotide: PDCD1-961
cagccccaaggaccggcuga

SEQ ID NO: 2628 - RNA, 20 nt, Artificial Sequence
  Synthetic oligonucleotide: PDCD1-2091
agccccaaggaccggcugag

SEQ ID NO: 2629 - RNA, 20 nt, Artificial Sequence
  Synthetic oligonucleotide: PDCD1-2092
gccccaaggaccggcugaga

SEQ ID NO: 2630 - RNA, 20 nt, Artificial Sequence
  Synthetic oligonucleotide: PDCD1-964
aaggaccggcugagagggga

SEQ ID NO: 2631 - RNA, 20 nt, Artificial Sequence
  Synthetic oligonucleotide: PDCD1-965
ggacagagguccugccugcc

SEQ ID NO: 2632 - RNA, 20 nt, Artificial Sequence
  Synthetic oligonucleotide: PDCD1-2095
gacagagguccugccugccc

SEQ ID NO: 2633 - RNA, 20 nt, Artificial Sequence
  Synthetic oligonucleotide: PDCD1-967
guccugccugcccaggagca

SEQ ID NO: 2634 - RNA, 20 nt, Artificial Sequence
  Synthetic oligonucleotide: PDCD1-968
ccugccugcccaggagcaaa

SEQ ID NO: 2635 - RNA, 20 nt, Artificial Sequence
  Synthetic oligonucleotide: PDCD1-2096
cugccugcccaggagcaaag

SEQ ID NO: 2636 - RNA, 20 nt, Artificial Sequence
  Synthetic oligonucleotide: PDCD1-2097
ugccugcccaggagcaaaga

SEQ ID NO: 2637 - RNA, 20 nt, Artificial Sequence
  Synthetic oligonucleotide: PDCD1-971
cccaggagcaaagaggggac

SEQ ID NO: 2638 - RNA, 20 nt, Artificial Sequence
  Synthetic oligonucleotide: PDCD1-972
agcaaagaggggacuugggc

SEQ ID NO: 2639 - RNA, 20 nt, Artificial Sequence
  Synthetic oligonucleotide: PDCD1-2101
gcaaagaggggacuugggcc

SEQ ID NO: 2640 - RNA, 20 nt, Artificial Sequence
  Synthetic oligonucleotide: PDCD1-2102
caaagaggggacuugggcca

SEQ ID NO: 2641 - RNA, 20 nt, Artificial Sequence
  Synthetic oligonucleotide: PDCD1-2103
aaagaggggacuugggccag

SEQ ID NO: 2642 - RNA, 20 nt, Artificial Sequence
  Synthetic oligonucleotide: PDCD1-976
agaggggacuugggccaggg

SEQ ID NO: 2643 - RNA, 20 nt, Artificial Sequence
  Synthetic oligonucleotide: PDCD1-2104
gaggggacuugggccagggg

SEQ ID NO: 2644 - RNA, 20 nt, Artificial Sequence
  Synthetic oligonucleotide: PDCD1-978
gacuugggccaggggaggag

SEQ ID NO: 2645 - RNA, 20 nt, Artificial Sequence
  Synthetic oligonucleotide: PDCD1-2105
acuugggccaggggaggagu

SEQ ID NO: 2646 - RNA, 20 nt, Artificial Sequence
  Synthetic oligonucleotide: PDCD1-980
ccaggggaggaguuggggcc

SEQ ID NO: 2647 - RNA, 20 nt, Artificial Sequence
  Synthetic oligonucleotide: PDCD1-981
aggggaggaguuggggccca

SEQ ID NO: 2648 - RNA, 20 nt, Artificial Sequence
  Synthetic oligonucleotide: PDCD1-982
gggaggaguuggggcccaga

SEQ ID NO: 2649 - RNA, 20 nt, Artificial Sequence
  Synthetic oligonucleotide: PDCD1-2108
ggaggaguuggggcccagag

SEQ ID NO: 2650 - RNA, 20 nt, Artificial Sequence
  Synthetic oligonucleotide: PDCD1-984
uuggggcccagagaggaacc

SEQ ID NO: 2651 - RNA, 20 nt, Artificial Sequence
  Synthetic oligonucleotide: PDCD1-2109
uggggcccagagaggaaccc

SEQ ID NO: 2652 - RNA, 20 nt, Artificial Sequence
  Synthetic oligonucleotide: PDCD1-986
ccagagaggaacccaggagu

SEQ ID NO: 2653 - RNA, 20 nt, Artificial Sequence
  Synthetic oligonucleotide: PDCD1-987
cugcccaaagccacacagcu

SEQ ID NO: 2654 - RNA, 20 nt, Artificial Sequence
  Synthetic oligonucleotide: PDCD1-988
aaagccacacagcucagggu

SEQ ID NO: 2655 - RNA, 20 nt, Artificial Sequence
  Synthetic oligonucleotide: PDCD1-2112
aagccacacagcucagggua

SEQ ID NO: 2656 - RNA, 20 nt, Artificial Sequence
  Synthetic oligonucleotide: PDCD1-990
acacagcucaggguaagggg

SEQ ID NO: 2657 - RNA, 20 nt, Artificial Sequence
  Synthetic oligonucleotide: PDCD1-991
gcucaggguaaggggcagag

SEQ ID NO: 2658 - RNA, 20 nt, Artificial Sequence
  Synthetic oligonucleotide: PDCD1-2115
cucaggguaaggggcagagc

SEQ ID NO: 2659 - RNA, 20 nt, Artificial Sequence
  Synthetic oligonucleotide: PDCD1-2116
ucaggguaaggggcagagcu

SEQ ID NO: 2660 - RNA, 20 nt, Artificial Sequence
  Synthetic oligonucleotide: PDCD1-994
ggcagagcugggggccaagg

SEQ ID NO: 2661 - RNA, 20 nt, Artificial Sequence
  Synthetic oligonucleotide: PDCD1-995
cacagcaccccccgaccugc

SEQ ID NO: 2662 - RNA, 20 nt, Artificial Sequence
  Synthetic oligonucleotide: PDCD1-2122
acagcaccccccgaccugcc

SEQ ID NO: 2663 - RNA, 20 nt, Artificial Sequence
  Synthetic oligonucleotide: PDCD1-997
accccccgaccugccaggga

SEQ ID NO: 2664 - RNA, 20 nt, Artificial Sequence
  Synthetic oligonucleotide: PDCD1-998
cccccgaccugccagggacu

SEQ ID NO: 2665 - RNA, 20 nt, Artificial Sequence
  Synthetic oligonucleotide: PDCD1-999
cgaccugccagggacugaga

SEQ ID NO: 2666 - RNA, 20 nt, Artificial Sequence
  Synthetic oligonucleotide: PDCD1-1000
gucccuccagaccccucgcu

SEQ ID NO: 2667 - RNA, 20 nt, Artificial Sequence
  Synthetic oligonucleotide: PDCD1-2125
ucccuccagaccccucgcuc

SEQ ID NO: 2668 - RNA, 20 nt, Artificial Sequence
  Synthetic oligonucleotide: PDCD1-1002
gaccccucgcuccgggaccc

SEQ ID NO: 2669 - RNA, 20 nt, Artificial Sequence
  Synthetic oligonucleotide: PDCD1-1003
cuccgggaccccugggcugc

SEQ ID NO: 2670 - RNA, 20 nt, Artificial Sequence
  Synthetic oligonucleotide: PDCD1-1004
cucagcaccccccgaccugc

SEQ ID NO: 2671 - RNA, 20 nt, Artificial Sequence
  Synthetic oligonucleotide: PDCD1-2132
ucagcaccccccgaccugcc

SEQ ID NO: 2672 - RNA, 20 nt, Artificial Sequence
  Synthetic oligonucleotide: PDCD1-997
accccccgaccugccaggga

SEQ ID NO: 2673 - RNA, 20 nt, Artificial Sequence
  Synthetic oligonucleotide: PDCD1-998
cccccgaccugccagggacu

SEQ ID NO: 2674 - RNA, 20 nt, Artificial Sequence
  Synthetic oligonucleotide: PDCD1-1008
cgaccugccagggacugagg

SEQ ID NO: 2675 - RNA, 20 nt, Artificial Sequence
  Synthetic oligonucleotide: PDCD1-2136
gaccugccagggacugaggg

SEQ ID NO: 2676 - RNA, 20 nt, Artificial Sequence
  Synthetic oligonucleotide: PDCD1-1010
gucccuccagaccccuggcu

SEQ ID NO: 2677 - RNA, 20 nt, Artificial Sequence
  Synthetic oligonucleotide: PDCD1-2139
ucccuccagaccccuggcuc

SEQ ID NO: 2678 - RNA, 20 nt, Artificial Sequence
  Synthetic oligonucleotide: PDCD1-593
accgccgaccccaccuaccu

SEQ ID NO: 2679 - RNA, 20 nt, Artificial Sequence
  Synthetic oligonucleotide: PDCD1-592
gcaccgcccagacgacuggc

SEQ ID NO: 2680 - RNA, 20 nt, Artificial Sequence
  Synthetic oligonucleotide: PDCD1-591
gacgacuggccagggcgccu

SEQ ID NO: 2681 - RNA, 20 nt, Artificial Sequence
  Synthetic oligonucleotide: PDCD1-125
acgacuggccagggcgccug

SEQ ID NO: 2682 - RNA, 20 nt, Artificial Sequence
  Synthetic oligonucleotide: PDCD1-589
cgccugugggaucugcaugc

SEQ ID NO: 2683 - RNA, 20 nt, Artificial Sequence
  Synthetic oligonucleotide: PDCD1-127
gccugugggaucugcaugcc

SEQ ID NO: 2684 - RNA, 20 nt, Artificial Sequence
  Synthetic oligonucleotide: PDCD1-587
caugccuggagcagccccac

SEQ ID NO: 2685 - RNA, 20 nt, Artificial Sequence
  Synthetic oligonucleotide: PDCD1-1019
ccgccuucuccacugcucag

SEQ ID NO: 2686 - RNA, 20 nt, Artificial Sequence
  Synthetic oligonucleotide: PDCD1-2229
cgccuucuccacugcucagg

SEQ ID NO: 2687 - RNA, 20 nt, Artificial Sequence
  Synthetic oligonucleotide: PDCD1-1021
ucuccacugcucaggcggag

SEQ ID NO: 2688 - RNA, 20 nt, Artificial Sequence
  Synthetic oligonucleotide: PDCD1-1022
cacugcucaggcggagguga

SEQ ID NO: 2689 - RNA, 20 nt, Artificial Sequence
  Synthetic oligonucleotide: PDCD1-2231
acugcucaggcggaggugag

SEQ ID NO: 2690 - RNA, 20 nt, Artificial Sequence
  Synthetic oligonucleotide: PDCD1-1024
gcucaggcggaggugagcgg

SEQ ID NO: 2691 - RNA, 20 nt, Artificial Sequence
  Synthetic oligonucleotide: PDCD1-2232
cucaggcggaggugagcgga

SEQ ID NO: 2692 - RNA, 20 nt, Artificial Sequence
  Synthetic oligonucleotide: PDCD1-2233
ucaggcggaggugagcggaa

SEQ ID NO: 2693 - RNA, 20 nt, Artificial Sequence
  Synthetic oligonucleotide: PDCD1-1027
ggaaacugucccaggucagg

SEQ ID NO: 2694 - RNA, 20 nt, Artificial Sequence
  Synthetic oligonucleotide: PDCD1-1028
aacugucccaggucagguug

SEQ ID NO: 2695 - RNA, 20 nt, Artificial Sequence
  Synthetic oligonucleotide: PDCD1-2236
acugucccaggucagguuga

SEQ ID NO: 2696 - RNA, 20 nt, Artificial Sequence
  Synthetic oligonucleotide: PDCD1-2237
cugucccaggucagguugaa

SEQ ID NO: 2697 - RNA, 20 nt, Artificial Sequence
  Synthetic oligonucleotide: PDCD1-1031
gucccaggucagguugaagg

SEQ ID NO: 2698 - RNA, 20 nt, Artificial Sequence
  Synthetic oligonucleotide: PDCD1-1032
cccucuuccuccacauccac

SEQ ID NO: 2699 - RNA, 20 nt, Artificial Sequence
  Synthetic oligonucleotide: PDCD1-1033
cuuccuccacauccacgugg

SEQ ID NO: 2700 - RNA, 20 nt, Artificial Sequence
  Synthetic oligonucleotide: PDCD1-1034
uccuccacauccacgugggc

SEQ ID NO: 2701 - RNA, 20 nt, Artificial Sequence
  Synthetic oligonucleotide: PDCD1-1035
auccacgugggcgagaguga

SEQ ID NO: 2702 - RNA, 20 nt, Artificial Sequence
  Synthetic oligonucleotide: PDCD1-1036
cgagagugacagaggcagug

SEQ ID NO: 2703 - RNA, 20 nt, Artificial Sequence
  Synthetic oligonucleotide: PDCD1-2243
gagagugacagaggcagugc

SEQ ID NO: 2704 - RNA, 20 nt, Artificial Sequence
  Synthetic oligonucleotide: PDCD1-2244
agagugacagaggcagugcu

SEQ ID NO: 2705 - RNA, 20 nt, Artificial Sequence
  Synthetic oligonucleotide: PDCD1-2245
gagugacagaggcagugcug

SEQ ID NO: 2706 - RNA, 20 nt, Artificial Sequence
  Synthetic oligonucleotide: PDCD1-2246
agugacagaggcagugcugg

SEQ ID NO: 2707 - RNA, 20 nt, Artificial Sequence
  Synthetic oligonucleotide: PDCD1-1041
ugacagaggcagugcugggg

SEQ ID NO: 2708 - RNA, 20 nt, Artificial Sequence
  Synthetic oligonucleotide: PDCD1-2247
gacagaggcagugcuggggg

SEQ ID NO: 2709 - RNA, 20 nt, Artificial Sequence
  Synthetic oligonucleotide: PDCD1-1043
cagaggcagugcugggggag

SEQ ID NO: 2710 - RNA, 20 nt, Artificial Sequence
  Synthetic oligonucleotide: PDCD1-2248
agaggcagugcugggggagg

SEQ ID NO: 2711 - RNA, 20 nt, Artificial Sequence
  Synthetic oligonucleotide: PDCD1-1045
gcagugcugggggaggaggg

SEQ ID NO: 2712 - RNA, 20 nt, Artificial Sequence
  Synthetic oligonucleotide: PDCD1-1046
agugcugggggaggaggggu

SEQ ID NO: 2713 - RNA, 20 nt, Artificial Sequence
  Synthetic oligonucleotide: PDCD1-2251
gugcugggggaggaggggug

SEQ ID NO: 2714 - RNA, 20 nt, Artificial Sequence
  Synthetic oligonucleotide: PDCD1-1048
gcugggggaggaggggugag

SEQ ID NO: 2715 - RNA, 20 nt, Artificial Sequence
  Synthetic oligonucleotide: PDCD1-2252
cugggggaggaggggugagg

SEQ ID NO: 2716 - RNA, 20 nt, Artificial Sequence
  Synthetic oligonucleotide: PDCD1-2253
ugggggaggaggggugagga

SEQ ID NO: 2717 - RNA, 20 nt, Artificial Sequence
  Synthetic oligonucleotide: PDCD1-1051
gaggaggggugaggaggggg

SEQ ID NO: 2718 - RNA, 20 nt, Artificial Sequence
  Synthetic oligonucleotide: PDCD1-1052
ggggugaggaggggguagga

SEQ ID NO: 2719 - RNA, 20 nt, Artificial Sequence
  Synthetic oligonucleotide: PDCD1-2257
gggugaggaggggguaggac

SEQ ID NO: 2720 - RNA, 20 nt, Artificial Sequence
  Synthetic oligonucleotide: PDCD1-2258
ggugaggaggggguaggacu

SEQ ID NO: 2721 - RNA, 20 nt, Artificial Sequence
  Synthetic oligonucleotide: PDCD1-2259
gugaggaggggguaggacug

SEQ ID NO: 2722 - RNA, 20 nt, Artificial Sequence
  Synthetic oligonucleotide: PDCD1-1056
gaggaggggguaggacuggg

SEQ ID NO: 2723 - RNA, 20 nt, Artificial Sequence
  Synthetic oligonucleotide: PDCD1-1057
ggaggggguaggacugggga

SEQ ID NO: 2724 - RNA, 20 nt, Artificial Sequence
  Synthetic oligonucleotide: PDCD1-1058
gggguaggacuggggagagg

SEQ ID NO: 2725 - RNA, 20 nt, Artificial Sequence
  Synthetic oligonucleotide: PDCD1-2262
ggguaggacuggggagaggg

SEQ ID NO: 2726 - RNA, 20 nt, Artificial Sequence
  Synthetic oligonucleotide: PDCD1-2263
gguaggacuggggagagggu

SEQ ID NO: 2727 - RNA, 20 nt, Artificial Sequence
  Synthetic oligonucleotide: PDCD1-2264
guaggacuggggagagggug

SEQ ID NO: 2728 - RNA, 20 nt, Artificial Sequence
  Synthetic oligonucleotide: PDCD1-2265
uaggacuggggagagggugg

SEQ ID NO: 2729 - RNA, 20 nt, Artificial Sequence
  Synthetic oligonucleotide: PDCD1-1063
ggacuggggagagggugggg

SEQ ID NO: 2730 - RNA, 20 nt, Artificial Sequence
  Synthetic oligonucleotide: PDCD1-2266
gacuggggagaggguggggg

SEQ ID NO: 2731 - RNA, 20 nt, Artificial Sequence
  Synthetic oligonucleotide: PDCD1-2267
acuggggagaggguggggga

SEQ ID NO: 2732 - RNA, 20 nt, Artificial Sequence
  Synthetic oligonucleotide: PDCD1-1066
uggggagagggugggggagg

SEQ ID NO: 2733 - RNA, 20 nt, Artificial Sequence
  Synthetic oligonucleotide: PDCD1-1067
gggagagggugggggaggga

SEQ ID NO: 2734 - RNA, 20 nt, Artificial Sequence
  Synthetic oligonucleotide: PDCD1-1068
gagagggugggggagggaga

SEQ ID NO: 2735 - RNA, 20 nt, Artificial Sequence
  Synthetic oligonucleotide: PDCD1-1069
gugggggagggagagagaga

SEQ ID NO: 2736 - RNA, 20 nt, Artificial Sequence
  Synthetic oligonucleotide: PDCD1-1070
gagggagagagagacagaga

SEQ ID NO: 2737 - RNA, 20 nt, Artificial Sequence
  Synthetic oligonucleotide: PDCD1-2268
agggagagagagacagagac

SEQ ID NO: 2738 - RNA, 20 nt, Artificial Sequence
  Synthetic oligonucleotide: PDCD1-2269
gggagagagagacagagaca

SEQ ID NO: 2739 - RNA, 20 nt, Artificial Sequence
  Synthetic oligonucleotide: PDCD1-1073
gagagacagagacagggaga

SEQ ID NO: 2740 - RNA, 20 nt, Artificial Sequence
  Synthetic oligonucleotide: PDCD1-1074
gagacagagacagggagaca

SEQ ID NO: 2741 - RNA, 20 nt, Artificial Sequence
  Synthetic oligonucleotide: PDCD1-2270
agacagagacagggagacag

SEQ ID NO: 2742 - RNA, 20 nt, Artificial Sequence
  Synthetic oligonucleotide: PDCD1-1076
gagacagggagacagaggag

SEQ ID NO: 2743 - RNA, 20 nt, Artificial Sequence
  Synthetic oligonucleotide: PDCD1-2271
agacagggagacagaggaga

SEQ ID NO: 2744 - RNA, 20 nt, Artificial Sequence
  Synthetic oligonucleotide: PDCD1-2272
gacagggagacagaggagau

SEQ ID NO: 2745 - RNA, 20 nt, Artificial Sequence
  Synthetic oligonucleotide: PDCD1-2273
acagggagacagaggagaug

SEQ ID NO: 2746 - RNA, 20 nt, Artificial Sequence
  Synthetic oligonucleotide: PDCD1-1080
agggagacagaggagauggg

SEQ ID NO: 2747 - RNA, 20 nt, Artificial Sequence
  Synthetic oligonucleotide: PDCD1-2274
gggagacagaggagaugggg

SEQ ID NO: 2748 - RNA, 20 nt, Artificial Sequence
  Synthetic oligonucleotide: PDCD1-1082
acagaggagauggggaggag

SEQ ID NO: 2749 - RNA, 20 nt, Artificial Sequence
  Synthetic oligonucleotide: PDCD1-1083
uggcccccacgcccuacccc

SEQ ID NO: 2750 - RNA, 20 nt, Artificial Sequence
  Synthetic oligonucleotide: PDCD1-2279
ggcccccacgcccuaccccg

SEQ ID NO: 2751 - RNA, 20 nt, Artificial Sequence
  Synthetic oligonucleotide: PDCD1-2280
gcccccacgcccuaccccgu

SEQ ID NO: 2752 - RNA, 20 nt, Artificial Sequence
  Synthetic oligonucleotide: PDCD1-1086
ccgugggggucuccccagcu

SEQ ID NO: 2753 - RNA, 20 nt, Artificial Sequence
  Synthetic oligonucleotide: PDCD1-1087
ggccucuuuccauaucccgc

SEQ ID NO: 2754 - RNA, 20 nt, Artificial Sequence
  Synthetic oligonucleotide: PDCD1-1088
ucccgcccgagcugccccuc

SEQ ID NO: 2755 - RNA, 20 nt, Artificial Sequence
  Synthetic oligonucleotide: PDCD1-1089
agcugccccuccugaggcug

SEQ ID NO: 2756 - RNA, 20 nt, Artificial Sequence
  Synthetic oligonucleotide: PDCD1-1090
gccccuccugaggcugccgg

SEQ ID NO: 2757 - RNA, 20 nt, Artificial Sequence
  Synthetic oligonucleotide: PDCD1-2289
ccccuccugaggcugccggg

SEQ ID NO: 2758 - RNA, 20 nt, Artificial Sequence
  Synthetic oligonucleotide: PDCD1-2290
cccuccugaggcugccgggu

SEQ ID NO: 2759 - RNA, 20 nt, Artificial Sequence
  Synthetic oligonucleotide: PDCD1-1093
cccccaucccccccaucucc

SEQ ID NO: 2760 - RNA, 20 nt, Artificial Sequence
  Synthetic oligonucleotide: PDCD1-2294
ccccaucccccccaucuccc

SEQ ID NO: 2761 - RNA, 20 nt, Artificial Sequence
  Synthetic oligonucleotide: PDCD1-2295
cccaucccccccaucucccu

SEQ ID NO: 2762 - RNA, 20 nt, Artificial Sequence
  Synthetic oligonucleotide: PDCD1-1096
cccccccaucucccuggggg

SEQ ID NO: 2763 - RNA, 20 nt, Artificial Sequence
  Synthetic oligonucleotide: PDCD1-1097
ugggggccgggccucccugc

SEQ ID NO: 2764 - RNA, 20 nt, Artificial Sequence
  Synthetic oligonucleotide: PDCD1-2300
gggggccgggccucccugcc

SEQ ID NO: 2765 - RNA, 20 nt, Artificial Sequence
  Synthetic oligonucleotide: PDCD1-2301
ggggccgggccucccugccu

SEQ ID NO: 2766 - RNA, 20 nt, Artificial Sequence
  Synthetic oligonucleotide: PDCD1-2302
gggccgggccucccugccug

SEQ ID NO: 2767 - RNA, 20 nt, Artificial Sequence
  Synthetic oligonucleotide: PDCD1-1101
ggccucccugccuggggaag

SEQ ID NO: 2768 - RNA, 20 nt, Artificial Sequence
  Synthetic oligonucleotide: PDCD1-1102
gggaagguggguggcccccu

SEQ ID NO: 2769 - RNA, 20 nt, Artificial Sequence
  Synthetic oligonucleotide: PDCD1-1103
cccccucugggcucagguuc

SEQ ID NO: 2770 - RNA, 17 nt, Artificial Sequence
  Synthetic oligonucleotide: PDCD1-1104
cuccccacggccaaggu

SEQ ID NO: 2771 - RNA, 17 nt, Artificial Sequence
  Synthetic oligonucleotide: PDCD1-2392
uccccacggccaagguu

SEQ ID NO: 2772 - RNA, 17 nt, Artificial Sequence
  Synthetic oligonucleotide: PDCD1-1106
ccugacccgucauucua

SEQ ID NO: 2773 - RNA, 17 nt, Artificial Sequence
  Synthetic oligonucleotide: PDCD1-1107
cagaaacacgcagcccc

SEQ ID NO: 2774 - RNA, 17 nt, Artificial Sequence
  Synthetic oligonucleotide: PDCD1-1108
gcagccccaaggaccgg

SEQ ID NO: 2775 - RNA, 17 nt, Artificial Sequence
  Synthetic oligonucleotide: PDCD1-1109
agccccaaggaccggcu

SEQ ID NO: 2776 - RNA, 17 nt, Artificial Sequence
  Synthetic oligonucleotide: PDCD1-1110
ccccaaggaccggcuga

SEQ ID NO: 2777 - RNA, 17 nt, Artificial Sequence
  Synthetic oligonucleotide: PDCD1-2398
cccaaggaccggcugag

SEQ ID NO: 2778 - RNA, 17 nt, Artificial Sequence
  Synthetic oligonucleotide: PDCD1-2399
ccaaggaccggcugaga

SEQ ID NO: 2779 - RNA, 17 nt, Artificial Sequence
  Synthetic oligonucleotide: PDCD1-1113
gaccggcugagagggga

SEQ ID NO: 2780 - RNA, 17 nt, Artificial Sequence
  Synthetic oligonucleotide: PDCD1-1114
cagagguccugccugcc

SEQ ID NO: 2781 - RNA, 17 nt, Artificial Sequence
  Synthetic oligonucleotide: PDCD1-2402
agagguccugccugccc

SEQ ID NO: 2782 - RNA, 17 nt, Artificial Sequence
  Synthetic oligonucleotide: PDCD1-1116
cugccugcccaggagca

SEQ ID NO: 2783 - RNA, 17 nt, Artificial Sequence
  Synthetic oligonucleotide: PDCD1-1117
gccugcccaggagcaaa

SEQ ID NO: 2784 - RNA, 17 nt, Artificial Sequence
  Synthetic oligonucleotide: PDCD1-2403
ccugcccaggagcaaag

SEQ ID NO: 2785 - RNA, 17 nt, Artificial Sequence
  Synthetic oligonucleotide: PDCD1-2404
cugcccaggagcaaaga

SEQ ID NO: 2786 - RNA, 17 nt, Artificial Sequence
  Synthetic oligonucleotide: PDCD1-1120
aggagcaaagaggggac

SEQ ID NO: 2787 - RNA, 17 nt, Artificial Sequence
  Synthetic oligonucleotide: PDCD1-1121
aaagaggggacuugggc

SEQ ID NO: 2788 - RNA, 17 nt, Artificial Sequence
  Synthetic oligonucleotide: PDCD1-2408
aagaggggacuugggcc

SEQ ID NO: 2789 - RNA, 17 nt, Artificial Sequence
  Synthetic oligonucleotide: PDCD1-2409
agaggggacuugggcca

SEQ ID NO: 2790 - RNA, 17 nt, Artificial Sequence
  Synthetic oligonucleotide: PDCD1-2410
gaggggacuugggccag

SEQ ID NO: 2791 - RNA, 17 nt, Artificial Sequence
  Synthetic oligonucleotide: PDCD1-1125
ggggacuugggccaggg

SEQ ID NO: 2792 - RNA, 17 nt, Artificial Sequence
  Synthetic oligonucleotide: PDCD1-2411
gggacuugggccagggg

SEQ ID NO: 2793 - RNA, 17 nt, Artificial Sequence
  Synthetic oligonucleotide: PDCD1-1127
uugggccaggggaggag

SEQ ID NO: 2794 - RNA, 17 nt, Artificial Sequence
  Synthetic oligonucleotide: PDCD1-2412
ugggccaggggaggagu

SEQ ID NO: 2795 - RNA, 17 nt, Artificial Sequence
  Synthetic oligonucleotide: PDCD1-1129
ggggaggaguuggggcc

SEQ ID NO: 2796 - RNA, 17 nt, Artificial Sequence
  Synthetic oligonucleotide: PDCD1-1130
ggaggaguuggggccca

SEQ ID NO: 2797 - RNA, 17 nt, Artificial Sequence
  Synthetic oligonucleotide: PDCD1-1131
aggaguuggggcccaga

SEQ ID NO: 2798 - RNA, 17 nt, Artificial Sequence
  Synthetic oligonucleotide: PDCD1-2415
ggaguuggggcccagag

SEQ ID NO: 2799 - RNA, 17 nt, Artificial Sequence
  Synthetic oligonucleotide: PDCD1-1133
gggcccagagaggaacc

SEQ ID NO: 2800 - RNA, 17 nt, Artificial Sequence
  Synthetic oligonucleotide: PDCD1-2416
ggcccagagaggaaccc

SEQ ID NO: 2801 - RNA, 17 nt, Artificial Sequence
  Synthetic oligonucleotide: PDCD1-1135
gagaggaacccaggagu

SEQ ID NO: 2802 - RNA, 17 nt, Artificial Sequence
  Synthetic oligonucleotide: PDCD1-1136
cccaaagccacacagcu

SEQ ID NO: 2803 - RNA, 17 nt, Artificial Sequence
  Synthetic oligonucleotide: PDCD1-1137
gccacacagcucagggu

SEQ ID NO: 2804 - RNA, 17 nt, Artificial Sequence
  Synthetic oligonucleotide: PDCD1-2419
ccacacagcucagggua

SEQ ID NO: 2805 - RNA, 17 nt, Artificial Sequence
  Synthetic oligonucleotide: PDCD1-1139
cagcucaggguaagggg

SEQ ID NO: 2806 - RNA, 17 nt, Artificial Sequence
  Synthetic oligonucleotide: PDCD1-1140
caggguaaggggcagag

SEQ ID NO: 2807 - RNA, 17 nt, Artificial Sequence
  Synthetic oligonucleotide: PDCD1-2422
aggguaaggggcagagc

SEQ ID NO: 2808 - RNA, 17 nt, Artificial Sequence
  Synthetic oligonucleotide: PDCD1-2423
ggguaaggggcagagcu

SEQ ID NO: 2809 - RNA, 17 nt, Artificial Sequence
  Synthetic oligonucleotide: PDCD1-1143
agagcugggggccaagg

SEQ ID NO: 2810 - RNA, 17 nt, Artificial Sequence
  Synthetic oligonucleotide: PDCD1-1144
agcaccccccgaccugc

SEQ ID NO: 2811 - RNA, 17 nt, Artificial Sequence
  Synthetic oligonucleotide: PDCD1-2429
gcaccccccgaccugcc

SEQ ID NO: 2812 - RNA, 17 nt, Artificial Sequence
  Synthetic oligonucleotide: PDCD1-1146
ccccgaccugccaggga

SEQ ID NO: 2813 - RNA, 17 nt, Artificial Sequence
  Synthetic oligonucleotide: PDCD1-1147
ccgaccugccagggacu

SEQ ID NO: 2814 - RNA, 17 nt, Artificial Sequence
  Synthetic oligonucleotide: PDCD1-1148
ccugccagggacugaga

SEQ ID NO: 2815 - RNA, 17 nt, Artificial Sequence
  Synthetic oligonucleotide: PDCD1-1149
ccuccagaccccucgcu

SEQ ID NO: 2816 - RNA, 17 nt, Artificial Sequence
  Synthetic oligonucleotide: PDCD1-2432
cuccagaccccucgcuc

SEQ ID NO: 2817 - RNA, 17 nt, Artificial Sequence
  Synthetic oligonucleotide: PDCD1-1151
cccucgcuccgggaccc

SEQ ID NO: 2818 - RNA, 17 nt, Artificial Sequence
  Synthetic oligonucleotide: PDCD1-1152
cgggaccccugggcugc

SEQ ID NO: 2819 - RNA, 17 nt, Artificial Sequence
  Synthetic oligonucleotide: PDCD1-1144
agcaccccccgaccugc

SEQ ID NO: 2820 - RNA, 17 nt, Artificial Sequence
  Synthetic oligonucleotide: PDCD1-2429
gcaccccccgaccugcc

SEQ ID NO: 2821 - RNA, 17 nt, Artificial Sequence
  Synthetic oligonucleotide: PDCD1-1146
ccccgaccugccaggga

SEQ ID NO: 2822 - RNA, 17 nt, Artificial Sequence
  Synthetic oligonucleotide: PDCD1-1147
ccgaccugccagggacu

SEQ ID NO: 2823 - RNA, 17 nt, Artificial Sequence
  Synthetic oligonucleotide: PDCD1-1157
ccugccagggacugagg

SEQ ID NO: 2824 - RNA, 17 nt, Artificial Sequence
  Synthetic oligonucleotide: PDCD1-2443
cugccagggacugaggg

SEQ ID NO: 2825 - RNA, 17 nt, Artificial Sequence
  Synthetic oligonucleotide: PDCD1-1159
ccuccagaccccuggcu

SEQ ID NO: 2826 - RNA, 17 nt, Artificial Sequence
  Synthetic oligonucleotide: PDCD1-2446
cuccagaccccuggcuc

SEQ ID NO: 2827 - RNA, 17 nt, Artificial Sequence
  Synthetic oligonucleotide: PDCD1-653
gccgaccccaccuaccu

SEQ ID NO: 2828 - RNA, 17 nt, Artificial Sequence
  Synthetic oligonucleotide: PDCD1-652
ccgcccagacgacuggc

SEQ ID NO: 2829 - RNA, 17 nt, Artificial Sequence
  Synthetic oligonucleotide: PDCD1-651
gacuggccagggcgccu

SEQ ID NO: 2830 - RNA, 17 nt, Artificial Sequence
  Synthetic oligonucleotide: PDCD1-252
acuggccagggcgccug

SEQ ID NO: 2831 - RNA, 17 nt, Artificial Sequence
  Synthetic oligonucleotide: PDCD1-649
cugugggaucugcaugc

SEQ ID NO: 2832 - RNA, 17 nt, Artificial Sequence
  Synthetic oligonucleotide: PDCD1-254
ugugggaucugcaugcc

SEQ ID NO: 2833 - RNA, 17 nt, Artificial Sequence
  Synthetic oligonucleotide: PDCD1-647
gccuggagcagccccac

SEQ ID NO: 2834 - RNA, 17 nt, Artificial Sequence
  Synthetic oligonucleotide: PDCD1-1168
ccuucuccacugcucag

SEQ ID NO: 2835 - RNA, 17 nt, Artificial Sequence
  Synthetic oligonucleotide: PDCD1-2536
cuucuccacugcucagg

SEQ ID NO: 2836 - RNA, 17 nt, Artificial Sequence
  Synthetic oligonucleotide: PDCD1-1170
ccacugcucaggcggag

SEQ ID NO: 2837 - RNA, 17 nt, Artificial Sequence
  Synthetic oligonucleotide: PDCD1-1171
ugcucaggcggagguga

SEQ ID NO: 2838 - RNA, 17 nt, Artificial Sequence
  Synthetic oligonucleotide: PDCD1-2538
gcucaggcggaggugag

SEQ ID NO: 2839 - RNA, 17 nt, Artificial Sequence
  Synthetic oligonucleotide: PDCD1-1173
caggcggaggugagcgg

SEQ ID NO: 2840 - RNA, 17 nt, Artificial Sequence
  Synthetic oligonucleotide: PDCD1-2539
aggcggaggugagcgga

SEQ ID NO: 2841 - RNA, 17 nt, Artificial Sequence
  Synthetic oligonucleotide: PDCD1-2540
ggcggaggugagcggaa

SEQ ID NO: 2842 - RNA, 17 nt, Artificial Sequence
  Synthetic oligonucleotide: PDCD1-1176
aacugucccaggucagg

SEQ ID NO: 2843 - RNA, 17 nt, Artificial Sequence
  Synthetic oligonucleotide: PDCD1-1177
ugucccaggucagguug

SEQ ID NO: 2844 - RNA, 17 nt, Artificial Sequence
  Synthetic oligonucleotide: PDCD1-2543
gucccaggucagguuga

SEQ ID NO: 2845 - RNA, 17 nt, Artificial Sequence
  Synthetic oligonucleotide: PDCD1-2544
ucccaggucagguugaa

SEQ ID NO: 2846 - RNA, 17 nt, Artificial Sequence
  Synthetic oligonucleotide: PDCD1-1180
ccaggucagguugaagg

SEQ ID NO: 2847 - RNA, 17 nt, Artificial Sequence
  Synthetic oligonucleotide: PDCD1-1181
ucuuccuccacauccac

SEQ ID NO: 2848 - RNA, 17 nt, Artificial Sequence
  Synthetic oligonucleotide: PDCD1-1182
ccuccacauccacgugg

SEQ ID NO: 2849 - RNA, 17 nt, Artificial Sequence
  Synthetic oligonucleotide: PDCD1-1183
uccacauccacgugggc

SEQ ID NO: 2850 - RNA, 17 nt, Artificial Sequence
  Synthetic oligonucleotide: PDCD1-1184
cacgugggcgagaguga

SEQ ID NO: 2851 - RNA, 17 nt, Artificial Sequence
  Synthetic oligonucleotide: PDCD1-1185
gagugacagaggcagug

SEQ ID NO: 2852 - RNA, 17 nt, Artificial Sequence
  Synthetic oligonucleotide: PDCD1-2550
agugacagaggcagugc

SEQ ID NO: 2853 - RNA, 17 nt, Artificial Sequence
  Synthetic oligonucleotide: PDCD1-2551
gugacagaggcagugcu

SEQ ID NO: 2854 - RNA, 17 nt, Artificial Sequence
  Synthetic oligonucleotide: PDCD1-2552
ugacagaggcagugcug

SEQ ID NO: 2855 - RNA, 17 nt, Artificial Sequence
  Synthetic oligonucleotide: PDCD1-2553
gacagaggcagugcugg

SEQ ID NO: 2856 - RNA, 17 nt, Artificial Sequence
  Synthetic oligonucleotide: PDCD1-1190
cagaggcagugcugggg

SEQ ID NO: 2857 - RNA, 17 nt, Artificial Sequence
  Synthetic oligonucleotide: PDCD1-2554
agaggcagugcuggggg

SEQ ID NO: 2858 - RNA, 17 nt, Artificial Sequence
  Synthetic oligonucleotide: PDCD1-1192
aggcagugcugggggag

SEQ ID NO: 2859 - RNA, 17 nt, Artificial Sequence
  Synthetic oligonucleotide: PDCD1-2555
ggcagugcugggggagg

SEQ ID NO: 2860 - RNA, 17 nt, Artificial Sequence
  Synthetic oligonucleotide: PDCD1-1194
gugcugggggaggaggg

SEQ ID NO: 2861 - RNA, 17 nt, Artificial Sequence
  Synthetic oligonucleotide: PDCD1-1195
gcugggggaggaggggu

SEQ ID NO: 2862 - RNA, 17 nt, Artificial Sequence
  Synthetic oligonucleotide: PDCD1-2558
cugggggaggaggggug

SEQ ID NO: 2863 - RNA, 17 nt, Artificial Sequence
  Synthetic oligonucleotide: PDCD1-1197
gggggaggaggggugag

SEQ ID NO: 2864 - RNA, 17 nt, Artificial Sequence
  Synthetic oligonucleotide: PDCD1-2559
ggggaggaggggugagg

SEQ ID NO: 2865 - RNA, 17 nt, Artificial Sequence
  Synthetic oligonucleotide: PDCD1-2560
gggaggaggggugagga

SEQ ID NO: 2866 - RNA, 17 nt, Artificial Sequence
  Synthetic oligonucleotide: PDCD1-1200
gaggggugaggaggggg

SEQ ID NO: 2867 - RNA, 17 nt, Artificial Sequence
  Synthetic oligonucleotide: PDCD1-1201
gugaggaggggguagga

SEQ ID NO: 2868 - RNA, 17 nt, Artificial Sequence
  Synthetic oligonucleotide: PDCD1-2564
ugaggaggggguaggac

SEQ ID NO: 2869 - RNA, 17 nt, Artificial Sequence
  Synthetic oligonucleotide: PDCD1-2565
gaggaggggguaggacu

SEQ ID NO: 2870 - RNA, 17 nt, Artificial Sequence
  Synthetic oligonucleotide: PDCD1-2566
aggaggggguaggacug

SEQ ID NO: 2871 - RNA, 17 nt, Artificial Sequence
  Synthetic oligonucleotide: PDCD1-1205
gaggggguaggacuggg

SEQ ID NO: 2872 - RNA, 17 nt, Artificial Sequence
  Synthetic oligonucleotide: PDCD1-1206
ggggguaggacugggga

SEQ ID NO: 2873 - RNA, 17 nt, Artificial Sequence
  Synthetic oligonucleotide: PDCD1-1207
guaggacuggggagagg

SEQ ID NO: 2874 - RNA, 17 nt, Artificial Sequence
  Synthetic oligonucleotide: PDCD1-2569
uaggacuggggagaggg

SEQ ID NO: 2875 - RNA, 17 nt, Artificial Sequence
  Synthetic oligonucleotide: PDCD1-2570
aggacuggggagagggu

SEQ ID NO: 2876 - RNA, 17 nt, Artificial Sequence
  Synthetic oligonucleotide: PDCD1-2571
ggacuggggagagggug

SEQ ID NO: 2877 - RNA, 17 nt, Artificial Sequence
  Synthetic oligonucleotide: PDCD1-2572
gacuggggagagggugg

SEQ ID NO: 2878 - RNA, 17 nt, Artificial Sequence
  Synthetic oligonucleotide: PDCD1-1212
cuggggagagggugggg

SEQ ID NO: 2879 - RNA, 17 nt, Artificial Sequence
  Synthetic oligonucleotide: PDCD1-2573
uggggagaggguggggg

SEQ ID NO: 2880 - RNA, 17 nt, Artificial Sequence
  Synthetic oligonucleotide: PDCD1-2574
ggggagaggguggggga

SEQ ID NO: 2881 - RNA, 17 nt, Artificial Sequence
  Synthetic oligonucleotide: PDCD1-1215
ggagagggugggggagg

SEQ ID NO: 2882 - RNA, 17 nt, Artificial Sequence
  Synthetic oligonucleotide: PDCD1-1216
agagggugggggaggga

SEQ ID NO: 2883 - RNA, 17 nt, Artificial Sequence
  Synthetic oligonucleotide: PDCD1-1217
agggugggggagggaga

SEQ ID NO: 2884 - RNA, 17 nt, Artificial Sequence
  Synthetic oligonucleotide: PDCD1-1218
ggggagggagagagaga

SEQ ID NO: 2885 - RNA, 17 nt, Artificial Sequence
  Synthetic oligonucleotide: PDCD1-1219
ggagagagagacagaga

SEQ ID NO: 2886 - RNA, 17 nt, Artificial Sequence
  Synthetic oligonucleotide: PDCD1-2575
gagagagagacagagac

SEQ ID NO: 2887 - RNA, 17 nt, Artificial Sequence
  Synthetic oligonucleotide: PDCD1-2576
agagagagacagagaca

SEQ ID NO: 2888 - RNA, 17 nt, Artificial Sequence
  Synthetic oligonucleotide: PDCD1-1222
agacagagacagggaga

SEQ ID NO: 2889 - RNA, 17 nt, Artificial Sequence
  Synthetic oligonucleotide: PDCD1-1223
acagagacagggagaca

SEQ ID NO: 2890 - RNA, 17 nt, Artificial Sequence
  Synthetic oligonucleotide: PDCD1-2577
cagagacagggagacag

SEQ ID NO: 2891 - RNA, 17 nt, Artificial Sequence
  Synthetic oligonucleotide: PDCD1-1225
acagggagacagaggag

SEQ ID NO: 2892 - RNA, 17 nt, Artificial Sequence
  Synthetic oligonucleotide: PDCD1-2578
cagggagacagaggaga

SEQ ID NO: 2893 - RNA, 17 nt, Artificial Sequence
  Synthetic oligonucleotide: PDCD1-2579
agggagacagaggagau

SEQ ID NO: 2894 - RNA, 17 nt, Artificial Sequence
  Synthetic oligonucleotide: PDCD1-2580
gggagacagaggagaug

SEQ ID NO: 2895 - RNA, 17 nt, Artificial Sequence
  Synthetic oligonucleotide: PDCD1-1229
gagacagaggagauggg

SEQ ID NO: 2896 - RNA, 17 nt, Artificial Sequence
  Synthetic oligonucleotide: PDCD1-2581
agacagaggagaugggg

SEQ ID NO: 2897 - RNA, 17 nt, Artificial Sequence
  Synthetic oligonucleotide: PDCD1-1231
gaggagauggggaggag

SEQ ID NO: 2898 - RNA, 17 nt, Artificial Sequence
  Synthetic oligonucleotide: PDCD1-1232
cccccacgcccuacccc

SEQ ID NO: 2899 - RNA, 17 nt, Artificial Sequence
  Synthetic oligonucleotide: PDCD1-2586
ccccacgcccuaccccg

SEQ ID NO: 2900 - RNA, 17 nt, Artificial Sequence
  Synthetic oligonucleotide: PDCD1-2587
cccacgcccuaccccgu

SEQ ID NO: 2901 - RNA, 17 nt, Artificial Sequence
  Synthetic oligonucleotide: PDCD1-1235
ugggggucuccccagcu

SEQ ID NO: 2902 - RNA, 17 nt, Artificial Sequence
  Synthetic oligonucleotide: PDCD1-1236
cucuuuccauaucccgc

SEQ ID NO: 2903 - RNA, 17 nt, Artificial Sequence
  Synthetic oligonucleotide: PDCD1-1237
cgcccgagcugccccuc

SEQ ID NO: 2904 - RNA, 17 nt, Artificial Sequence
  Synthetic oligonucleotide: PDCD1-1238
ugccccuccugaggcug

SEQ ID NO: 2905 - RNA, 17 nt, Artificial Sequence
  Synthetic oligonucleotide: PDCD1-1239
ccuccugaggcugccgg

SEQ ID NO: 2906 - RNA, 17 nt, Artificial Sequence
  Synthetic oligonucleotide: PDCD1-2596
cuccugaggcugccggg

SEQ ID NO: 2907 - RNA, 17 nt, Artificial Sequence
  Synthetic oligonucleotide: PDCD1-2597
uccugaggcugccgggu

SEQ ID NO: 2908 - RNA, 17 nt, Artificial Sequence
  Synthetic oligonucleotide: PDCD1-1242
ccaucccccccaucucc

SEQ ID NO: 2909 - RNA, 17 nt, Artificial Sequence
  Synthetic oligonucleotide: PDCD1-2601
caucccccccaucuccc

SEQ ID NO: 2910 - RNA, 17 nt, Artificial Sequence
  Synthetic oligonucleotide: PDCD1-2602
aucccccccaucucccu

SEQ ID NO: 2911 - RNA, 17 nt, Artificial Sequence
  Synthetic oligonucleotide: PDCD1-1245
ccccaucucccuggggg

SEQ ID NO: 2912 - RNA, 17 nt, Artificial Sequence
  Synthetic oligonucleotide: PDCD1-1246
gggccgggccucccugc

SEQ ID NO: 2913 - RNA, 17 nt, Artificial Sequence
  Synthetic oligonucleotide: PDCD1-2607
ggccgggccucccugcc

SEQ ID NO: 2914 - RNA, 17 nt, Artificial Sequence
  Synthetic oligonucleotide: PDCD1-2608
gccgggccucccugccu

SEQ ID NO: 2915 - RNA, 17 nt, Artificial Sequence
  Synthetic oligonucleotide: PDCD1-2609
ccgggccucccugccug

SEQ ID NO: 2916 - RNA, 17 nt, Artificial Sequence
  Synthetic oligonucleotide: PDCD1-1250
cucccugccuggggaag

SEQ ID NO: 2917 - RNA, 17 nt, Artificial Sequence
  Synthetic oligonucleotide: PDCD1-1251
aagguggguggcccccu

SEQ ID NO: 2918 - RNA, 17 nt, Artificial Sequence
  Synthetic oligonucleotide: PDCD1-1252
ccucugggcucagguuc

SEQ ID NO: 2919 - RNA, 20 nt, Artificial Sequence
  Synthetic oligonucleotide: PDCD1-807
ccgaggccgcaccugucacc

SEQ ID NO: 2920 - RNA, 20 nt, Artificial Sequence
  Synthetic oligonucleotide: PDCD1-808
agggcacaaaggucaggggu

SEQ ID NO: 2921 - RNA, 20 nt, Artificial Sequence
  Synthetic oligonucleotide: PDCD1-358
ucuggaagggcacaaagguc

SEQ ID NO: 2922 - RNA, 20 nt, Artificial Sequence
  Synthetic oligonucleotide: PDCD1-810
cucuggaagggcacaaaggu

SEQ ID NO: 2923 - RNA, 20 nt, Artificial Sequence
  Synthetic oligonucleotide: PDCD1-811
acuucugcccuucucucugg

SEQ ID NO: 2924 - RNA, 20 nt, Artificial Sequence
  Synthetic oligonucleotide: PDCD1-362
ggcacuucugcccuucucuc

SEQ ID NO: 2925 - RNA, 20 nt, Artificial Sequence
  Synthetic oligonucleotide: PDCD1-813
gggcacuucugcccuucucu

SEQ ID NO: 2926 - RNA, 20 nt, Artificial Sequence
  Synthetic oligonucleotide: PDCD1-814
gugaggggcuggggugggcu

SEQ ID NO: 2927 - RNA, 20 nt, Artificial Sequence
  Synthetic oligonucleotide: PDCD1-815
ggccugggugaggggcuggg

SEQ ID NO: 2928 - RNA, 20 nt, Artificial Sequence
  Synthetic oligonucleotide: PDCD1-369
ggcuggccugggugaggggc

SEQ ID NO: 2929 - RNA, 20 nt, Artificial Sequence
  Synthetic oligonucleotide: PDCD1-817
cggcuggccugggugagggg

SEQ ID NO: 2930 - RNA, 20 nt, Artificial Sequence
  Synthetic oligonucleotide: PDCD1-372
cuggccggcuggccugggug

SEQ ID NO: 2931 - RNA, 20 nt, Artificial Sequence
  Synthetic oligonucleotide: PDCD1-819
acuggccggcuggccugggu

SEQ ID NO: 2932 - RNA, 20 nt, Artificial Sequence
  Synthetic oligonucleotide: PDCD1-820
gaacuggccggcuggccugg

SEQ ID NO: 2933 - RNA, 20 nt, Artificial Sequence
  Synthetic oligonucleotide: PDCD1-821
uuuggaacuggccggcuggc

SEQ ID NO: 2934 - RNA, 20 nt, Artificial Sequence
  Synthetic oligonucleotide: PDCD1-378
cgacaccaaccaccaggguu

SEQ ID NO: 2935 - RNA, 20 nt, Artificial Sequence
  Synthetic oligonucleotide: PDCD1-823
acgacaccaaccaccagggu

SEQ ID NO: 2936 - RNA, 20 nt, Artificial Sequence
  Synthetic oligonucleotide: PDCD1-824
ccgcccacgacaccaaccac

SEQ ID NO: 2937 - RNA, 20 nt, Artificial Sequence
  Synthetic oligonucleotide: PDCD1-825
gcccgggagcagaugacggc

SEQ ID NO: 2938 - RNA, 20 nt, Artificial Sequence
  Synthetic oligonucleotide: PDCD1-385
gacguuaccucgugcggccc

SEQ ID NO: 2939 - RNA, 20 nt, Artificial Sequence
  Synthetic oligonucleotide: PDCD1-386
ugacguuaccucgugcggcc

SEQ ID NO: 2940 - RNA, 20 nt, Artificial Sequence
  Synthetic oligonucleotide: PDCD1-828
augacguuaccucgugcggc

SEQ ID NO: 2941 - RNA, 20 nt, Artificial Sequence
  Synthetic oligonucleotide: PDCD1-391
ucccugcagagaaacacacu

SEQ ID NO: 2942 - RNA, 20 nt, Artificial Sequence
  Synthetic oligonucleotide: PDCD1-830
gucccugcagagaaacacac

SEQ ID NO: 2943 - RNA, 20 nt, Artificial Sequence
  Synthetic oligonucleotide: PDCD1-831
uggcuccuauugucccugca

SEQ ID NO: 2944 - RNA, 20 nt, Artificial Sequence
  Synthetic oligonucleotide: PDCD1-832
ccuggcuccuauugucccug

SEQ ID NO: 2945 - RNA, 20 nt, Artificial Sequence
  Synthetic oligonucleotide: PDCD1-397
ggaaaagagugagacucacc

SEQ ID NO: 2946 - RNA, 20 nt, Artificial Sequence
  Synthetic oligonucleotide: PDCD1-834
aggaaaagagugagacucac

SEQ ID NO: 2947 - RNA, 20 nt, Artificial Sequence
  Synthetic oligonucleotide: PDCD1-398
ucuuugaggagaaagggaga

SEQ ID NO: 2948 - RNA, 20 nt, Artificial Sequence
  Synthetic oligonucleotide: PDCD1-399
uucuuugaggagaaagggag

SEQ ID NO: 2949 - RNA, 20 nt, Artificial Sequence
  Synthetic oligonucleotide: PDCD1-837
cuucuuugaggagaaaggga

SEQ ID NO: 2950 - RNA, 20 nt, Artificial Sequence
  Synthetic oligonucleotide: PDCD1-838
uccuucuuugaggagaaagg

SEQ ID NO: 2951 - RNA, 20 nt, Artificial Sequence
  Synthetic oligonucleotide: PDCD1-400
ccuccuucuuugaggagaaa

SEQ ID NO: 2952 - RNA, 20 nt, Artificial Sequence
  Synthetic oligonucleotide: PDCD1-401
uccuccuucuuugaggagaa

SEQ ID NO: 2953 - RNA, 20 nt, Artificial Sequence
  Synthetic oligonucleotide: PDCD1-841
guccuccuucuuugaggaga

SEQ ID NO: 2954 - RNA, 20 nt, Artificial Sequence
  Synthetic oligonucleotide: PDCD1-842
agggguccuccuucuuugag

SEQ ID NO: 2955 - RNA, 20 nt, Artificial Sequence
  Synthetic oligonucleotide: PDCD1-402
ugagggguccuccuucuuug

SEQ ID NO: 2956 - RNA, 20 nt, Artificial Sequence
  Synthetic oligonucleotide: PDCD1-844
cugagggguccuccuucuuu

SEQ ID NO: 2957 - RNA, 20 nt, Artificial Sequence
  Synthetic oligonucleotide: PDCD1-845
ggcugagggguccuccuucu

SEQ ID NO: 2958 - RNA, 20 nt, Artificial Sequence
  Synthetic oligonucleotide: PDCD1-405
agagaacacaggcacggcug

SEQ ID NO: 2959 - RNA, 20 nt, Artificial Sequence
  Synthetic oligonucleotide: PDCD1-847
cagagaacacaggcacggcu

SEQ ID NO: 2960 - RNA, 20 nt, Artificial Sequence
  Synthetic oligonucleotide: PDCD1-848
cacagagaacacaggcacgg

SEQ ID NO: 2961 - RNA, 20 nt, Artificial Sequence
  Synthetic oligonucleotide: PDCD1-849
ccagcuccccauaguccaca

SEQ ID NO: 2962 - RNA, 20 nt, Artificial Sequence
  Synthetic oligonucleotide: PDCD1-850
auccagcuccccauagucca

SEQ ID NO: 2963 - RNA, 20 nt, Artificial Sequence
  Synthetic oligonucleotide: PDCD1-408
ccggggucuucucucgccac

SEQ ID NO: 2964 - RNA, 20 nt, Artificial Sequence
  Synthetic oligonucleotide: PDCD1-852
uccggggucuucucucgcca

SEQ ID NO: 2965 - RNA, 20 nt, Artificial Sequence
  Synthetic oligonucleotide: PDCD1-411
acacagggcacggggggcuc

SEQ ID NO: 2966 - RNA, 20 nt, Artificial Sequence
  Synthetic oligonucleotide: PDCD1-854
gacacagggcacggggggcu

SEQ ID NO: 2967 - RNA, 20 nt, Artificial Sequence
  Synthetic oligonucleotide: PDCD1-414
gcucagggacacagggcacg

SEQ ID NO: 2968 - RNA, 20 nt, Artificial Sequence
  Synthetic oligonucleotide: PDCD1-415
ugcucagggacacagggcac

SEQ ID NO: 2969 - RNA, 20 nt, Artificial Sequence
  Synthetic oligonucleotide: PDCD1-416
cugcucagggacacagggca

SEQ ID NO: 2970 - RNA, 20 nt, Artificial Sequence
  Synthetic oligonucleotide: PDCD1-858
ucugcucagggacacagggc

SEQ ID NO: 2971 - RNA, 20 nt, Artificial Sequence
  Synthetic oligonucleotide: PDCD1-859
acuccgucugcucagggaca

SEQ ID NO: 2972 - RNA, 20 nt, Artificial Sequence
  Synthetic oligonucleotide: PDCD1-420
guggcauacuccgucugcuc

SEQ ID NO: 2973 - RNA, 20 nt, Artificial Sequence
  Synthetic oligonucleotide: PDCD1-861
gguggcauacuccgucugcu

SEQ ID NO: 2974 - RNA, 20 nt, Artificial Sequence
  Synthetic oligonucleotide: PDCD1-423
gaugaggugcccauuccgcu

SEQ ID NO: 2975 - RNA, 20 nt, Artificial Sequence
  Synthetic oligonucleotide: PDCD1-863
ggaugaggugcccauuccgc

SEQ ID NO: 2976 - RNA, 20 nt, Artificial Sequence
  Synthetic oligonucleotide: PDCD1-864
ugagccccugcgggcggggg

SEQ ID NO: 2977 - RNA, 20 nt, Artificial Sequence
  Synthetic oligonucleotide: PDCD1-426
cagcugagccccugcgggcg

SEQ ID NO: 2978 - RNA, 20 nt, Artificial Sequence
  Synthetic oligonucleotide: PDCD1-427
ucagcugagccccugcgggc

SEQ ID NO: 2979 - RNA, 20 nt, Artificial Sequence
  Synthetic oligonucleotide: PDCD1-428
gucagcugagccccugcggg

SEQ ID NO: 2980 - RNA, 20 nt, Artificial Sequence
  Synthetic oligonucleotide: PDCD1-868
cgucagcugagccccugcgg

SEQ ID NO: 2981 - RNA, 20 nt, Artificial Sequence
  Synthetic oligonucleotide: PDCD1-869
gggccgucagcugagccccu

SEQ ID NO: 2982 - RNA, 20 nt, Artificial Sequence
  Synthetic oligonucleotide: PDCD1-870
ggcacuccgagggccgucag

SEQ ID NO: 2983 - RNA, 20 nt, Artificial Sequence
  Synthetic oligonucleotide: PDCD1-871
ccucaguggcugggcacucc

SEQ ID NO: 2984 - RNA, 20 nt, Artificial Sequence
  Synthetic oligonucleotide: PDCD1-872
ggccucaguggcugggcacu

SEQ ID NO: 2985 - RNA, 20 nt, Artificial Sequence
  Synthetic oligonucleotide: PDCD1-873
ccauccucaggccucagugg

SEQ ID NO: 2986 - RNA, 20 nt, Artificial Sequence
  Synthetic oligonucleotide: PDCD1-874
ggaagccggucagaggggcc

SEQ ID NO: 2987 - RNA, 20 nt, Artificial Sequence
  Synthetic oligonucleotide: PDCD1-439
uggccaaggaagccggucag

SEQ ID NO: 2988 - RNA, 20 nt, Artificial Sequence
  Synthetic oligonucleotide: PDCD1-876
guggccaaggaagccgguca

SEQ ID NO: 2989 - RNA, 20 nt, Artificial Sequence
  Synthetic oligonucleotide: PDCD1-877
ugguggccaaggaagccggu

SEQ ID NO: 2990 - RNA, 20 nt, Artificial Sequence
  Synthetic oligonucleotide: PDCD1-441
cugcagaacacugguggcca

SEQ ID NO: 2991 - RNA, 20 nt, Artificial Sequence
  Synthetic oligonucleotide: PDCD1-441
cugcagaacacugguggcca

SEQ ID NO: 2992 - RNA, 17 nt, Artificial Sequence
  Synthetic oligonucleotide: PDCD1-880
aggccgcaccugucacc

SEQ ID NO: 2993 - RNA, 17 nt, Artificial Sequence
  Synthetic oligonucleotide: PDCD1-881
gcacaaaggucaggggu

SEQ ID NO: 2994 - RNA, 17 nt, Artificial Sequence
  Synthetic oligonucleotide: PDCD1-445
ggaagggcacaaagguc

SEQ ID NO: 2995 - RNA, 17 nt, Artificial Sequence
  Synthetic oligonucleotide: PDCD1-883
uggaagggcacaaaggu

SEQ ID NO: 2996 - RNA, 17 nt, Artificial Sequence
  Synthetic oligonucleotide: PDCD1-884
ucugcccuucucucugg

SEQ ID NO: 2997 - RNA, 17 nt, Artificial Sequence
  Synthetic oligonucleotide: PDCD1-449
acuucugcccuucucuc

SEQ ID NO: 2998 - RNA, 17 nt, Artificial Sequence
  Synthetic oligonucleotide: PDCD1-886
cacuucugcccuucucu

SEQ ID NO: 2999 - RNA, 17 nt, Artificial Sequence
  Synthetic oligonucleotide: PDCD1-887
aggggcuggggugggcu

SEQ ID NO: 3000 - RNA, 17 nt, Artificial Sequence
  Synthetic oligonucleotide: PDCD1-888
cugggugaggggcuggg

SEQ ID NO: 3001 - RNA, 17 nt, Artificial Sequence
  Synthetic oligonucleotide: PDCD1-456
uggccugggugaggggc

SEQ ID NO: 3002 - RNA, 17 nt, Artificial Sequence
  Synthetic oligonucleotide: PDCD1-890
cuggccugggugagggg

SEQ ID NO: 3003 - RNA, 17 nt, Artificial Sequence
  Synthetic oligonucleotide: PDCD1-459
gccggcuggccugggug

SEQ ID NO: 3004 - RNA, 17 nt, Artificial Sequence
  Synthetic oligonucleotide: PDCD1-892
ggccggcuggccugggu

SEQ ID NO: 3005 - RNA, 17 nt, Artificial Sequence
  Synthetic oligonucleotide: PDCD1-893
cuggccggcuggccugg

SEQ ID NO: 3006 - RNA, 17 nt, Artificial Sequence
  Synthetic oligonucleotide: PDCD1-894
ggaacuggccggcuggc

SEQ ID NO: 3007 - RNA, 17 nt, Artificial Sequence
  Synthetic oligonucleotide: PDCD1-465
caccaaccaccaggguu

SEQ ID NO: 3008 - RNA, 17 nt, Artificial Sequence
  Synthetic oligonucleotide: PDCD1-896
acaccaaccaccagggu

SEQ ID NO: 3009 - RNA, 17 nt, Artificial Sequence
  Synthetic oligonucleotide: PDCD1-897
cccacgacaccaaccac

SEQ ID NO: 3010 - RNA, 17 nt, Artificial Sequence
  Synthetic oligonucleotide: PDCD1-898
cgggagcagaugacggc

SEQ ID NO: 3011 - RNA, 17 nt, Artificial Sequence
  Synthetic oligonucleotide: PDCD1-472
guuaccucgugcggccc

SEQ ID NO: 3012 - RNA, 17 nt, Artificial Sequence
  Synthetic oligonucleotide: PDCD1-473
cguuaccucgugcggcc

SEQ ID NO: 3013 - RNA, 17 nt, Artificial Sequence
  Synthetic oligonucleotide: PDCD1-901
acguuaccucgugcggc

SEQ ID NO: 3014 - RNA, 17 nt, Artificial Sequence
  Synthetic oligonucleotide: PDCD1-478
cugcagagaaacacacu

SEQ ID NO: 3015 - RNA, 17 nt, Artificial Sequence
  Synthetic oligonucleotide: PDCD1-903
ccugcagagaaacacac

SEQ ID NO: 3016 - RNA, 17 nt, Artificial Sequence
  Synthetic oligonucleotide: PDCD1-904
cuccuauugucccugca

SEQ ID NO: 3017 - RNA, 17 nt, Artificial Sequence
  Synthetic oligonucleotide: PDCD1-905
ggcuccuauugucccug

SEQ ID NO: 3018 - RNA, 17 nt, Artificial Sequence
  Synthetic oligonucleotide: PDCD1-484
aaagagugagacucacc

SEQ ID NO: 3019 - RNA, 17 nt, Artificial Sequence
  Synthetic oligonucleotide: PDCD1-907
aaaagagugagacucac

SEQ ID NO: 3020 - RNA, 17 nt, Artificial Sequence
  Synthetic oligonucleotide: PDCD1-485
uugaggagaaagggaga

SEQ ID NO: 3021 - RNA, 17 nt, Artificial Sequence
  Synthetic oligonucleotide: PDCD1-486
uuugaggagaaagggag

SEQ ID NO: 3022 - RNA, 17 nt, Artificial Sequence
  Synthetic oligonucleotide: PDCD1-910
cuuugaggagaaaggga

SEQ ID NO: 3023 - RNA, 17 nt, Artificial Sequence
  Synthetic oligonucleotide: PDCD1-911
uucuuugaggagaaagg

SEQ ID NO: 3024 - RNA, 17 nt, Artificial Sequence
  Synthetic oligonucleotide: PDCD1-487
ccuucuuugaggagaaa

SEQ ID NO: 3025 - RNA, 17 nt, Artificial Sequence
  Synthetic oligonucleotide: PDCD1-488
uccuucuuugaggagaa

SEQ ID NO: 3026 - RNA, 17 nt, Artificial Sequence
  Synthetic oligonucleotide: PDCD1-914
cuccuucuuugaggaga

SEQ ID NO: 3027 - RNA, 17 nt, Artificial Sequence
  Synthetic oligonucleotide: PDCD1-915
gguccuccuucuuugag

SEQ ID NO: 3028 - RNA, 17 nt, Artificial Sequence
  Synthetic oligonucleotide: PDCD1-489
gggguccuccuucuuug

SEQ ID NO: 3029 - RNA, 17 nt, Artificial Sequence
  Synthetic oligonucleotide: PDCD1-917
agggguccuccuucuuu

SEQ ID NO: 3030 - RNA, 17 nt, Artificial Sequence
  Synthetic oligonucleotide: PDCD1-918
ugagggguccuccuucu

SEQ ID NO: 3031 - RNA, 17 nt, Artificial Sequence
  Synthetic oligonucleotide: PDCD1-492
gaacacaggcacggcug

SEQ ID NO: 3032 - RNA, 17 nt, Artificial Sequence
  Synthetic oligonucleotide: PDCD1-920
agaacacaggcacggcu

SEQ ID NO: 3033 - RNA, 17 nt, Artificial Sequence
  Synthetic oligonucleotide: PDCD1-921
agagaacacaggcacgg

SEQ ID NO: 3034 - RNA, 17 nt, Artificial Sequence
  Synthetic oligonucleotide: PDCD1-922
gcuccccauaguccaca

SEQ ID NO: 3035 - RNA, 17 nt, Artificial Sequence
  Synthetic oligonucleotide: PDCD1-923
cagcuccccauagucca

SEQ ID NO: 3036 - RNA, 17 nt, Artificial Sequence
  Synthetic oligonucleotide: PDCD1-495
gggucuucucucgccac

SEQ ID NO: 3037 - RNA, 17 nt, Artificial Sequence
  Synthetic oligonucleotide: PDCD1-925
ggggucuucucucgcca

SEQ ID NO: 3038 - RNA, 17 nt, Artificial Sequence
  Synthetic oligonucleotide: PDCD1-498
cagggcacggggggcuc

SEQ ID NO: 3039 - RNA, 17 nt, Artificial Sequence
  Synthetic oligonucleotide: PDCD1-927
acagggcacggggggcu

SEQ ID NO: 3040 - RNA, 17 nt, Artificial Sequence
  Synthetic oligonucleotide: PDCD1-501
cagggacacagggcacg

SEQ ID NO: 3041 - RNA, 17 nt, Artificial Sequence
  Synthetic oligonucleotide: PDCD1-502
ucagggacacagggcac

SEQ ID NO: 3042 - RNA, 17 nt, Artificial Sequence
  Synthetic oligonucleotide: PDCD1-503
cucagggacacagggca

SEQ ID NO: 3043 - RNA, 17 nt, Artificial Sequence
  Synthetic oligonucleotide: PDCD1-931
gcucagggacacagggc

SEQ ID NO: 3044 - RNA, 17 nt, Artificial Sequence
  Synthetic oligonucleotide: PDCD1-932
ccgucugcucagggaca

SEQ ID NO: 3045 - RNA, 17 nt, Artificial Sequence
  Synthetic oligonucleotide: PDCD1-507
gcauacuccgucugcuc

SEQ ID NO: 3046 - RNA, 17 nt, Artificial Sequence
  Synthetic oligonucleotide: PDCD1-934
ggcauacuccgucugcu

SEQ ID NO: 3047 - RNA, 17 nt, Artificial Sequence
  Synthetic oligonucleotide: PDCD1-510
gaggugcccauuccgcu

SEQ ID NO: 3048 - RNA, 17 nt, Artificial Sequence
  Synthetic oligonucleotide: PDCD1-936
ugaggugcccauuccgc

SEQ ID NO: 3049 - RNA, 17 nt, Artificial Sequence
  Synthetic oligonucleotide: PDCD1-937
gccccugcgggcggggg

SEQ ID NO: 3050 - RNA, 17 nt, Artificial Sequence
  Synthetic oligonucleotide: PDCD1-513
cugagccccugcgggcg

SEQ ID NO: 3051 - RNA, 17 nt, Artificial Sequence
  Synthetic oligonucleotide: PDCD1-514
gcugagccccugcgggc

SEQ ID NO: 3052 - RNA, 17 nt, Artificial Sequence
  Synthetic oligonucleotide: PDCD1-515
agcugagccccugcggg

SEQ ID NO: 3053 - RNA, 17 nt, Artificial Sequence
  Synthetic oligonucleotide: PDCD1-941
cagcugagccccugcgg

SEQ ID NO: 3054 - RNA, 17 nt, Artificial Sequence
  Synthetic oligonucleotide: PDCD1-942
ccgucagcugagccccu

SEQ ID NO: 3055 - RNA, 17 nt, Artificial Sequence
  Synthetic oligonucleotide: PDCD1-943
acuccgagggccgucag

SEQ ID NO: 3056 - RNA, 17 nt, Artificial Sequence
  Synthetic oligonucleotide: PDCD1-944
caguggcugggcacucc

SEQ ID NO: 3057 - RNA, 17 nt, Artificial Sequence
  Synthetic oligonucleotide: PDCD1-945
cucaguggcugggcacu

SEQ ID NO: 3058 - RNA, 17 nt, Artificial Sequence
  Synthetic oligonucleotide: PDCD1-946
uccucaggccucagugg

SEQ ID NO: 3059 - RNA, 17 nt, Artificial Sequence
  Synthetic oligonucleotide: PDCD1-947
agccggucagaggggcc

SEQ ID NO: 3060 - RNA, 17 nt, Artificial Sequence
  Synthetic oligonucleotide: PDCD1-526
ccaaggaagccggucag

SEQ ID NO: 3061 - RNA, 17 nt, Artificial Sequence
  Synthetic oligonucleotide: PDCD1-949
gccaaggaagccgguca

SEQ ID NO: 3062 - RNA, 17 nt, Artificial Sequence
  Synthetic oligonucleotide: PDCD1-950
uggccaaggaagccggu

SEQ ID NO: 3063 - RNA, 17 nt, Artificial Sequence
  Synthetic oligonucleotide: PDCD1-528
cagaacacugguggcca

SEQ ID NO: 3064 - RNA, 17 nt, Artificial Sequence
  Synthetic oligonucleotide: PDCD1-952
gcagaacacugguggcc

SEQ ID NO: 3065 - RNA, 20 nt, Artificial Sequence
  Synthetic oligonucleotide: PDCD1-2225
aaccccaaaccuuggccgug

SEQ ID NO: 3066 - RNA, 20 nt, Artificial Sequence
  Synthetic oligonucleotide: PDCD1-2224
gaaccccaaaccuuggccgu

SEQ ID NO: 3067 - RNA, 20 nt, Artificial Sequence
  Synthetic oligonucleotide: PDCD1-2223
agaaccccaaaccuuggccg

SEQ ID NO: 3068 - RNA, 20 nt, Artificial Sequence
  Synthetic oligonucleotide: PDCD1-1402
cagaaccccaaaccuuggcc

SEQ ID NO: 3069 - RNA, 20 nt, Artificial Sequence
  Synthetic oligonucleotide: PDCD1-1403
gaaugacgggucaggcuggc

SEQ ID NO: 3070 - RNA, 20 nt, Artificial Sequence
  Synthetic oligonucleotide: PDCD1-1404
cugcguguuucuguagaaug

SEQ ID NO: 3071 - RNA, 20 nt, Artificial Sequence
  Synthetic oligonucleotide: PDCD1-1405
cuuggggcugcguguuucug

SEQ ID NO: 3072 - RNA, 20 nt, Artificial Sequence
  Synthetic oligonucleotide: PDCD1-2215
guccccucucagccgguccu

SEQ ID NO: 3073 - RNA, 20 nt, Artificial Sequence
  Synthetic oligonucleotide: PDCD1-1407
uguccccucucagccggucc

SEQ ID NO: 3074 - RNA, 20 nt, Artificial Sequence
  Synthetic oligonucleotide: PDCD1-1408
ccucuuugcuccugggcagg

SEQ ID NO: 3075 - RNA, 20 nt, Artificial Sequence
  Synthetic oligonucleotide: PDCD1-1409
cccaaguccccucuuugcuc

SEQ ID NO: 3076 - RNA, 20 nt, Artificial Sequence
  Synthetic oligonucleotide: PDCD1-1410
ucgaacuccuggguuccucu

SEQ ID NO: 3077 - RNA, 20 nt, Artificial Sequence
  Synthetic oligonucleotide: PDCD1-1411
gcuuugggcagcucgaacuc

SEQ ID NO: 3078 - RNA, 20 nt, Artificial Sequence
  Synthetic oligonucleotide: PDCD1-1412
gcuguguggcuuugggcagc

SEQ ID NO: 3079 - RNA, 20 nt, Artificial Sequence
  Synthetic oligonucleotide: PDCD1-1413
uuacccugagcuguguggcu

SEQ ID NO: 3080 - RNA, 20 nt, Artificial Sequence
  Synthetic oligonucleotide: PDCD1-1414
ccccagcucugccccuuacc

SEQ ID NO: 3081 - RNA, 20 nt, Artificial Sequence
  Synthetic oligonucleotide: PDCD1-2196
ucucagucccuggcaggucg

SEQ ID NO: 3082 - RNA, 20 nt, Artificial Sequence
  Synthetic oligonucleotide: PDCD1-2195
cucucagucccuggcagguc

SEQ ID NO: 3083 - RNA, 20 nt, Artificial Sequence
  Synthetic oligonucleotide: PDCD1-2194
acucucagucccuggcaggu

SEQ ID NO: 3084 - RNA, 20 nt, Artificial Sequence
  Synthetic oligonucleotide: PDCD1-1418
cacucucagucccuggcagg

SEQ ID NO: 3085 - RNA, 20 nt, Artificial Sequence
  Synthetic oligonucleotide: PDCD1-2190
ucccggagcgaggggucugg

SEQ ID NO: 3086 - RNA, 20 nt, Artificial Sequence
  Synthetic oligonucleotide: PDCD1-1420
gucccggagcgaggggucug

SEQ ID NO: 3087 - RNA, 20 nt, Artificial Sequence
  Synthetic oligonucleotide: PDCD1-2189
gggucccggagcgagggguc

SEQ ID NO: 3088 - RNA, 20 nt, Artificial Sequence
  Synthetic oligonucleotide: PDCD1-1422
ggggucccggagcgaggggu

SEQ ID NO: 3089 - RNA, 20 nt, Artificial Sequence
  Synthetic oligonucleotide: PDCD1-2186
agcccaggggucccggagcg

SEQ ID NO: 3090 - RNA, 20 nt, Artificial Sequence
  Synthetic oligonucleotide: PDCD1-1424
cagcccaggggucccggagc

SEQ ID NO: 3091 - RNA, 20 nt, Artificial Sequence
  Synthetic oligonucleotide: PDCD1-1425
ggcagcccaggggucccgga

SEQ ID NO: 3092 - RNA, 20 nt, Artificial Sequence
  Synthetic oligonucleotide: PDCD1-2185
cccuggcagcccaggggucc

SEQ ID NO: 3093 - RNA, 20 nt, Artificial Sequence
  Synthetic oligonucleotide: PDCD1-1427
gcccuggcagcccagggguc

SEQ ID NO: 3094 - RNA, 20 nt, Artificial Sequence
  Synthetic oligonucleotide: PDCD1-2182
gggccuggcccuggcagccc

SEQ ID NO: 3095 - RNA, 20 nt, Artificial Sequence
  Synthetic oligonucleotide: PDCD1-1429
cgggccuggcccuggcagcc

SEQ ID NO: 3096 - RNA, 20 nt, Artificial Sequence
  Synthetic oligonucleotide: PDCD1-1430
gcaggucggggggugcugag

SEQ ID NO: 3097 - RNA, 20 nt, Artificial Sequence
  Synthetic oligonucleotide: PDCD1-1431
cccuggcaggucggggggug

SEQ ID NO: 3098 - RNA, 20 nt, Artificial Sequence
  Synthetic oligonucleotide: PDCD1-2174
ccucagucccuggcaggucg

SEQ ID NO: 3099 - RNA, 20 nt, Artificial Sequence
  Synthetic oligonucleotide: PDCD1-2173
cccucagucccuggcagguc

SEQ ID NO: 3100 - RNA, 20 nt, Artificial Sequence
  Synthetic oligonucleotide: PDCD1-2172
acccucagucccuggcaggu

SEQ ID NO: 3101 - RNA, 20 nt, Artificial Sequence
  Synthetic oligonucleotide: PDCD1-1435
cacccucagucccuggcagg

SEQ ID NO: 3102 - RNA, 20 nt, Artificial Sequence
  Synthetic oligonucleotide: PDCD1-2168
ucccagagccaggggucugg

SEQ ID NO: 3103 - RNA, 20 nt, Artificial Sequence
  Synthetic oligonucleotide: PDCD1-1437
gucccagagccaggggucug

SEQ ID NO: 3104 - RNA, 20 nt, Artificial Sequence
  Synthetic oligonucleotide: PDCD1-2167
gugucccagagccagggguc

SEQ ID NO: 3105 - RNA, 20 nt, Artificial Sequence
  Synthetic oligonucleotide: PDCD1-1439
ggugucccagagccaggggu

SEQ ID NO: 3106 - RNA, 20 nt, Artificial Sequence
  Synthetic oligonucleotide: PDCD1-2164
cggucaggugucccagagcc

SEQ ID NO: 3107 - RNA, 20 nt, Artificial Sequence
  Synthetic oligonucleotide: PDCD1-1441
gcggucaggugucccagagc

SEQ ID NO: 3108 - RNA, 20 nt, Artificial Sequence
  Synthetic oligonucleotide: PDCD1-1442
gggucggcggucaggugucc

SEQ ID NO: 3109 - RNA, 20 nt, Artificial Sequence
  Synthetic oligonucleotide: PDCD1-115
caggaugguucuuagguagg

SEQ ID NO: 3110 - RNA, 20 nt, Artificial Sequence
  Synthetic oligonucleotide: PDCD1-532
ccaggaugguucuuagguag

SEQ ID NO: 3111 - RNA, 20 nt, Artificial Sequence
  Synthetic oligonucleotide: PDCD1-531
gcuacaacugggcuggcggc

SEQ ID NO: 3112 - RNA, 20 nt, Artificial Sequence
  Synthetic oligonucleotide: PDCD1-530
ucgucugggcggugcuacaa

SEQ ID NO: 3113 - RNA, 20 nt, Artificial Sequence
  Synthetic oligonucleotide: PDCD1-529
caggcgcccuggccagucgu

SEQ ID NO: 3114 - RNA, 20 nt, Artificial Sequence
  Synthetic oligonucleotide: PDCD1-2386
uggagaaggcggcacucugg

SEQ ID NO: 3115 - RNA, 20 nt, Artificial Sequence
  Synthetic oligonucleotide: PDCD1-1449
guggagaaggcggcacucug

SEQ ID NO: 3116 - RNA, 20 nt, Artificial Sequence
  Synthetic oligonucleotide: PDCD1-1450
ucaccuccgccugagcagug

SEQ ID NO: 3117 - RNA, 20 nt, Artificial Sequence
  Synthetic oligonucleotide: PDCD1-2382
gcucaccuccgccugagcag

SEQ ID NO: 3118 - RNA, 20 nt, Artificial Sequence
  Synthetic oligonucleotide: PDCD1-1452
cgcucaccuccgccugagca

SEQ ID NO: 3119 - RNA, 20 nt, Artificial Sequence
  Synthetic oligonucleotide: PDCD1-1453
ucccuuccgcucaccuccgc

SEQ ID NO: 3120 - RNA, 20 nt, Artificial Sequence
  Synthetic oligonucleotide: PDCD1-2380
acccucccuucaaccugacc

SEQ ID NO: 3121 - RNA, 20 nt, Artificial Sequence
  Synthetic oligonucleotide: PDCD1-1455
cacccucccuucaaccugac

SEQ ID NO: 3122 - RNA, 20 nt, Artificial Sequence
  Synthetic oligonucleotide: PDCD1-1456
agagggggcgggagcaaggg

SEQ ID NO: 3123 - RNA, 20 nt, Artificial Sequence
  Synthetic oligonucleotide: PDCD1-2375
aggaagagggggcgggagca

SEQ ID NO: 3124 - RNA, 20 nt, Artificial Sequence
  Synthetic oligonucleotide: PDCD1-1458
gaggaagagggggcgggagc

SEQ ID NO: 3125 - RNA, 20 nt, Artificial Sequence
  Synthetic oligonucleotide: PDCD1-2374
gauguggaggaagagggggc

SEQ ID NO: 3126 - RNA, 20 nt, Artificial Sequence
  Synthetic oligonucleotide: PDCD1-2373
ggauguggaggaagaggggg

SEQ ID NO: 3127 - RNA, 20 nt, Artificial Sequence
  Synthetic oligonucleotide: PDCD1-1461
uggauguggaggaagagggg

SEQ ID NO: 3128 - RNA, 20 nt, Artificial Sequence
  Synthetic oligonucleotide: PDCD1-2370
cacguggauguggaggaaga

SEQ ID NO: 3129 - RNA, 20 nt, Artificial Sequence
  Synthetic oligonucleotide: PDCD1-2369
ccacguggauguggaggaag

SEQ ID NO: 3130 - RNA, 20 nt, Artificial Sequence
  Synthetic oligonucleotide: PDCD1-1464
cccacguggauguggaggaa

SEQ ID NO: 3131 - RNA, 20 nt, Artificial Sequence
  Synthetic oligonucleotide: PDCD1-1465
cgcccacguggauguggagg

SEQ ID NO: 3132 - RNA, 20 nt, Artificial Sequence
  Synthetic oligonucleotide: PDCD1-2368
ucucgcccacguggaugugg

SEQ ID NO: 3133 - RNA, 20 nt, Artificial Sequence
  Synthetic oligonucleotide: PDCD1-1467
cucucgcccacguggaugug

SEQ ID NO: 3134 - RNA, 20 nt, Artificial Sequence
  Synthetic oligonucleotide: PDCD1-2367
cacucucgcccacguggaug

SEQ ID NO: 3135 - RNA, 20 nt, Artificial Sequence
  Synthetic oligonucleotide: PDCD1-1469
ucacucucgcccacguggau

SEQ ID NO: 3136 - RNA, 20 nt, Artificial Sequence
  Synthetic oligonucleotide: PDCD1-1470
ccucugucacucucgcccac

SEQ ID NO: 3137 - RNA, 20 nt, Artificial Sequence
  Synthetic oligonucleotide: PDCD1-1471
cgggguagggcgugggggcc

SEQ ID NO: 3138 - RNA, 20 nt, Artificial Sequence
  Synthetic oligonucleotide: PDCD1-2361
acccccacgggguagggcgu

SEQ ID NO: 3139 - RNA, 20 nt, Artificial Sequence
  Synthetic oligonucleotide: PDCD1-2360
gacccccacgggguagggcg

SEQ ID NO: 3140 - RNA, 20 nt, Artificial Sequence
  Synthetic oligonucleotide: PDCD1-1474
agacccccacgggguagggc

SEQ ID NO: 3141 - RNA, 20 nt, Artificial Sequence
  Synthetic oligonucleotide: PDCD1-1475
cuggggagacccccacgggg

SEQ ID NO: 3142 - RNA, 20 nt, Artificial Sequence
  Synthetic oligonucleotide: PDCD1-2355
cugagcuggggagaccccca

SEQ ID NO: 3143 - RNA, 20 nt, Artificial Sequence
  Synthetic oligonucleotide: PDCD1-1477
ccugagcuggggagaccccc

SEQ ID NO: 3144 - RNA, 20 nt, Artificial Sequence
  Synthetic oligonucleotide: PDCD1-2354
gaggaaggggcccugagcug

SEQ ID NO: 3145 - RNA, 20 nt, Artificial Sequence
  Synthetic oligonucleotide: PDCD1-2353
ggaggaaggggcccugagcu

SEQ ID NO: 3146 - RNA, 20 nt, Artificial Sequence
  Synthetic oligonucleotide: PDCD1-2352
aggaggaaggggcccugagc

SEQ ID NO: 3147 - RNA, 20 nt, Artificial Sequence
  Synthetic oligonucleotide: PDCD1-1481
gaggaggaaggggcccugag

SEQ ID NO: 3148 - RNA, 20 nt, Artificial Sequence
  Synthetic oligonucleotide: PDCD1-1482
acacagaggaggaaggggcc

SEQ ID NO: 3149 - RNA, 20 nt, Artificial Sequence
  Synthetic oligonucleotide: PDCD1-2349
agcagagacacagaggagga

SEQ ID NO: 3150 - RNA, 20 nt, Artificial Sequence
  Synthetic oligonucleotide: PDCD1-1484
gagcagagacacagaggagg

SEQ ID NO: 3151 - RNA, 20 nt, Artificial Sequence
  Synthetic oligonucleotide: PDCD1-2348
agugagcagagacacagagg

SEQ ID NO: 3152 - RNA, 20 nt, Artificial Sequence
  Synthetic oligonucleotide: PDCD1-1486
cagugagcagagacacagag

SEQ ID NO: 3153 - RNA, 20 nt, Artificial Sequence
  Synthetic oligonucleotide: PDCD1-2347
agcagugagcagagacacag

SEQ ID NO: 3154 - RNA, 20 nt, Artificial Sequence
  Synthetic oligonucleotide: PDCD1-1488
cagcagugagcagagacaca

SEQ ID NO: 3155 - RNA, 20 nt, Artificial Sequence
  Synthetic oligonucleotide: PDCD1-1489
cacagcagugagcagagaca

SEQ ID NO: 3156 - RNA, 20 nt, Artificial Sequence
  Synthetic oligonucleotide: PDCD1-1490
aaagaggccacagcagugag

SEQ ID NO: 3157 - RNA, 20 nt, Artificial Sequence
  Synthetic oligonucleotide: PDCD1-1491
uauggaaagaggccacagca

SEQ ID NO: 3158 - RNA, 20 nt, Artificial Sequence
  Synthetic oligonucleotide: PDCD1-1492
cagcucgggcgggauaugga

SEQ ID NO: 3159 - RNA, 20 nt, Artificial Sequence
  Synthetic oligonucleotide: PDCD1-2345
ggggcagcucgggcgggaua

SEQ ID NO: 3160 - RNA, 20 nt, Artificial Sequence
  Synthetic oligonucleotide: PDCD1-1494
aggggcagcucgggcgggau

SEQ ID NO: 3161 - RNA, 20 nt, Artificial Sequence
  Synthetic oligonucleotide: PDCD1-2343
cucaggaggggcagcucggg

SEQ ID NO: 3162 - RNA, 20 nt, Artificial Sequence
  Synthetic oligonucleotide: PDCD1-1496
ccucaggaggggcagcucgg

SEQ ID NO: 3163 - RNA, 20 nt, Artificial Sequence
  Synthetic oligonucleotide: PDCD1-1497
gcagccucaggaggggcagc

SEQ ID NO: 3164 - RNA, 20 nt, Artificial Sequence
  Synthetic oligonucleotide: PDCD1-2338
ccccacccggcagccucagg

SEQ ID NO: 3165 - RNA, 20 nt, Artificial Sequence
  Synthetic oligonucleotide: PDCD1-1499
cccccacccggcagccucag

SEQ ID NO: 3166 - RNA, 20 nt, Artificial Sequence
  Synthetic oligonucleotide: PDCD1-2337
ugcccccacccggcagccuc

SEQ ID NO: 3167 - RNA, 20 nt, Artificial Sequence
  Synthetic oligonucleotide: PDCD1-1501
cugcccccacccggcagccu

SEQ ID NO: 3168 - RNA, 20 nt, Artificial Sequence
  Synthetic oligonucleotide: PDCD1-1502
ugggggggaugggggaggag

SEQ ID NO: 3169 - RNA, 20 nt, Artificial Sequence
  Synthetic oligonucleotide: PDCD1-1503
agaugggggggaugggggag

SEQ ID NO: 3170 - RNA, 20 nt, Artificial Sequence
  Synthetic oligonucleotide: PDCD1-2333
ggagaugggggggauggggg

SEQ ID NO: 3171 - RNA, 20 nt, Artificial Sequence
  Synthetic oligonucleotide: PDCD1-1505
gggagaugggggggaugggg

SEQ ID NO: 3172 - RNA, 20 nt, Artificial Sequence
  Synthetic oligonucleotide: PDCD1-2332
cagggagaugggggggaugg

SEQ ID NO: 3173 - RNA, 20 nt, Artificial Sequence
  Synthetic oligonucleotide: PDCD1-2331
ccagggagaugggggggaug

SEQ ID NO: 3174 - RNA, 20 nt, Artificial Sequence
  Synthetic oligonucleotide: PDCD1-2330
cccagggagaugggggggau

SEQ ID NO: 3175 - RNA, 20 nt, Artificial Sequence
  Synthetic oligonucleotide: PDCD1-2329
ccccagggagauggggggga

SEQ ID NO: 3176 - RNA, 20 nt, Artificial Sequence
  Synthetic oligonucleotide: PDCD1-1510
cccccagggagauggggggg

SEQ ID NO: 3177 - RNA, 20 nt, Artificial Sequence
  Synthetic oligonucleotide: PDCD1-2327
ccggcccccagggagauggg

SEQ ID NO: 3178 - RNA, 20 nt, Artificial Sequence
  Synthetic oligonucleotide: PDCD1-2326
cccggcccccagggagaugg

SEQ ID NO: 3179 - RNA, 20 nt, Artificial Sequence
  Synthetic oligonucleotide: PDCD1-2325
gcccggcccccagggagaug

SEQ ID NO: 3180 - RNA, 20 nt, Artificial Sequence
  Synthetic oligonucleotide: PDCD1-2324
ggcccggcccccagggagau

SEQ ID NO: 3181 - RNA, 20 nt, Artificial Sequence
  Synthetic oligonucleotide: PDCD1-2323
aggcccggcccccagggaga

SEQ ID NO: 3182 - RNA, 20 nt, Artificial Sequence
  Synthetic oligonucleotide: PDCD1-1516
gaggcccggcccccagggag

SEQ ID NO: 3183 - RNA, 20 nt, Artificial Sequence
  Synthetic oligonucleotide: PDCD1-2322
gcagggaggcccggccccca

SEQ ID NO: 3184 - RNA, 20 nt, Artificial Sequence
  Synthetic oligonucleotide: PDCD1-2321
ggcagggaggcccggccccc

SEQ ID NO: 3185 - RNA, 20 nt, Artificial Sequence
  Synthetic oligonucleotide: PDCD1-1519
aggcagggaggcccggcccc

SEQ ID NO: 3186 - RNA, 20 nt, Artificial Sequence
  Synthetic oligonucleotide: PDCD1-2318
ccacccaccuuccccaggca

SEQ ID NO: 3187 - RNA, 20 nt, Artificial Sequence
  Synthetic oligonucleotide: PDCD1-2317
gccacccaccuuccccaggc

SEQ ID NO: 3188 - RNA, 20 nt, Artificial Sequence
  Synthetic oligonucleotide: PDCD1-1522
ggccacccaccuuccccagg

SEQ ID NO: 3189 - RNA, 20 nt, Artificial Sequence
  Synthetic oligonucleotide: PDCD1-2313
cccaggaaccugagcccaga

SEQ ID NO: 3190 - RNA, 20 nt, Artificial Sequence
  Synthetic oligonucleotide: PDCD1-2312
gcccaggaaccugagcccag

SEQ ID NO: 3191 - RNA, 20 nt, Artificial Sequence
  Synthetic oligonucleotide: PDCD1-1525
agcccaggaaccugagccca

SEQ ID NO: 3192 - RNA, 20 nt, Artificial Sequence
  Synthetic oligonucleotide: PDCD1-1526
gcagcccaggaaccugagcc

SEQ ID NO: 3193 - RNA, 17 nt, Artificial Sequence
  Synthetic oligonucleotide: PDCD1-2532
cccaaaccuuggccgug

SEQ ID NO: 3194 - RNA, 17 nt, Artificial Sequence
  Synthetic oligonucleotide: PDCD1-2531
ccccaaaccuuggccgu

SEQ ID NO: 3195 - RNA, 17 nt, Artificial Sequence
  Synthetic oligonucleotide: PDCD1-2530
accccaaaccuuggccg

SEQ ID NO: 3196 - RNA, 17 nt, Artificial Sequence
  Synthetic oligonucleotide: PDCD1-1530
aaccccaaaccuuggcc

SEQ ID NO: 3197 - RNA, 17 nt, Artificial Sequence
  Synthetic oligonucleotide: PDCD1-1531
ugacgggucaggcuggc

SEQ ID NO: 3198 - RNA, 17 nt, Artificial Sequence
  Synthetic oligonucleotide: PDCD1-1532
cguguuucuguagaaug

SEQ ID NO: 3199 - RNA, 17 nt, Artificial Sequence
  Synthetic oligonucleotide: PDCD1-1533
ggggcugcguguuucug

SEQ ID NO: 3200 - RNA, 17 nt, Artificial Sequence
  Synthetic oligonucleotide: PDCD1-2522
cccucucagccgguccu

SEQ ID NO: 3201 - RNA, 17 nt, Artificial Sequence
  Synthetic oligonucleotide: PDCD1-1535
ccccucucagccggucc

SEQ ID NO: 3202 - RNA, 17 nt, Artificial Sequence
  Synthetic oligonucleotide: PDCD1-1536
cuuugcuccugggcagg

SEQ ID NO: 3203 - RNA, 17 nt, Artificial Sequence
  Synthetic oligonucleotide: PDCD1-1537
aaguccccucuuugcuc

SEQ ID NO: 3204 - RNA, 17 nt, Artificial Sequence
  Synthetic oligonucleotide: PDCD1-1538
aacuccuggguuccucu

SEQ ID NO: 3205 - RNA, 17 nt, Artificial Sequence
  Synthetic oligonucleotide: PDCD1-1539
uugggcagcucgaacuc

SEQ ID NO: 3206 - RNA, 17 nt, Artificial Sequence
  Synthetic oligonucleotide: PDCD1-1540
guguggcuuugggcagc

SEQ ID NO: 3207 - RNA, 17 nt, Artificial Sequence
  Synthetic oligonucleotide: PDCD1-1541
cccugagcuguguggcu

SEQ ID NO: 3208 - RNA, 17 nt, Artificial Sequence
  Synthetic oligonucleotide: PDCD1-1542
cagcucugccccuuacc

SEQ ID NO: 3209 - RNA, 17 nt, Artificial Sequence
  Synthetic oligonucleotide: PDCD1-2481
cagucccuggcaggucg

SEQ ID NO: 3210 - RNA, 17 nt, Artificial Sequence
  Synthetic oligonucleotide: PDCD1-2480
ucagucccuggcagguc

SEQ ID NO: 3211 - RNA, 17 nt, Artificial Sequence
  Synthetic oligonucleotide: PDCD1-2479
cucagucccuggcaggu

SEQ ID NO: 3212 - RNA, 17 nt, Artificial Sequence
  Synthetic oligonucleotide: PDCD1-1546
ucucagucccuggcagg

SEQ ID NO: 3213 - RNA, 17 nt, Artificial Sequence
  Synthetic oligonucleotide: PDCD1-2497
cggagcgaggggucugg

SEQ ID NO: 3214 - RNA, 17 nt, Artificial Sequence
  Synthetic oligonucleotide: PDCD1-1548
ccggagcgaggggucug

SEQ ID NO: 3215 - RNA, 17 nt, Artificial Sequence
  Synthetic oligonucleotide: PDCD1-2496
ucccggagcgagggguc

SEQ ID NO: 3216 - RNA, 17 nt, Artificial Sequence
  Synthetic oligonucleotide: PDCD1-1550
gucccggagcgaggggu

SEQ ID NO: 3217 - RNA, 17 nt, Artificial Sequence
  Synthetic oligonucleotide: PDCD1-2493
ccaggggucccggagcg

SEQ ID NO: 3218 - RNA, 17 nt, Artificial Sequence
  Synthetic oligonucleotide: PDCD1-1552
cccaggggucccggagc

SEQ ID NO: 3219 - RNA, 17 nt, Artificial Sequence
  Synthetic oligonucleotide: PDCD1-1553
agcccaggggucccgga

SEQ ID NO: 3220 - RNA, 17 nt, Artificial Sequence
  Synthetic oligonucleotide: PDCD1-2492
uggcagcccaggggucc

SEQ ID NO: 3221 - RNA, 17 nt, Artificial Sequence
  Synthetic oligonucleotide: PDCD1-1555
cuggcagcccagggguc

SEQ ID NO: 3222 - RNA, 17 nt, Artificial Sequence
  Synthetic oligonucleotide: PDCD1-2489
ccuggcccuggcagccc

SEQ ID NO: 3223 - RNA, 17 nt, Artificial Sequence
  Synthetic oligonucleotide: PDCD1-1557
gccuggcccuggcagcc

SEQ ID NO: 3224 - RNA, 17 nt, Artificial Sequence
  Synthetic oligonucleotide: PDCD1-1558
ggucggggggugcugag

SEQ ID NO: 3225 - RNA, 17 nt, Artificial Sequence
  Synthetic oligonucleotide: PDCD1-1559
uggcaggucggggggug

SEQ ID NO: 3226 - RNA, 17 nt, Artificial Sequence
  Synthetic oligonucleotide: PDCD1-2481
cagucccuggcaggucg

SEQ ID NO: 3227 - RNA, 17 nt, Artificial Sequence
  Synthetic oligonucleotide: PDCD1-2480
ucagucccuggcagguc

SEQ ID NO: 3228 - RNA, 17 nt, Artificial Sequence
  Synthetic oligonucleotide: PDCD1-2479
cucagucccuggcaggu

SEQ ID NO: 3229 - RNA, 17 nt, Artificial Sequence
  Synthetic oligonucleotide: PDCD1-1563
ccucagucccuggcagg

SEQ ID NO: 3230 - RNA, 17 nt, Artificial Sequence
  Synthetic oligonucleotide: PDCD1-2475
cagagccaggggucugg

SEQ ID NO: 3231 - RNA, 17 nt, Artificial Sequence
  Synthetic oligonucleotide: PDCD1-1565
ccagagccaggggucug

SEQ ID NO: 3232 - RNA, 17 nt, Artificial Sequence
  Synthetic oligonucleotide: PDCD1-2474
ucccagagccagggguc

SEQ ID NO: 3233 - RNA, 17 nt, Artificial Sequence
  Synthetic oligonucleotide: PDCD1-1567
gucccagagccaggggu

SEQ ID NO: 3234 - RNA, 17 nt, Artificial Sequence
  Synthetic oligonucleotide: PDCD1-2471
ucaggugucccagagcc

SEQ ID NO: 3235 - RNA, 17 nt, Artificial Sequence
  Synthetic oligonucleotide: PDCD1-1569
gucaggugucccagagc

SEQ ID NO: 3236 - RNA, 17 nt, Artificial Sequence
  Synthetic oligonucleotide: PDCD1-1570
ucggcggucaggugucc

SEQ ID NO: 3237 - RNA, 17 nt, Artificial Sequence
  Synthetic oligonucleotide: PDCD1-242
gaugguucuuagguagg

SEQ ID NO: 3238 - RNA, 17 nt, Artificial Sequence
  Synthetic oligonucleotide: PDCD1-561
ggaugguucuuagguag

SEQ ID NO: 3239 - RNA, 17 nt, Artificial Sequence
  Synthetic oligonucleotide: PDCD1-560
acaacugggcuggcggc

SEQ ID NO: 3240 - RNA, 17 nt, Artificial Sequence
  Synthetic oligonucleotide: PDCD1-559
ucugggcggugcuacaa

SEQ ID NO: 3241 - RNA, 17 nt, Artificial Sequence
  Synthetic oligonucleotide: PDCD1-558
gcgcccuggccagucgu

SEQ ID NO: 3242 - RNA, 17 nt, Artificial Sequence
  Synthetic oligonucleotide: PDCD1-2693
agaaggcggcacucugg

SEQ ID NO: 3243 - RNA, 17 nt, Artificial Sequence
  Synthetic oligonucleotide: PDCD1-1577
gagaaggcggcacucug

SEQ ID NO: 3244 - RNA, 17 nt, Artificial Sequence
  Synthetic oligonucleotide: PDCD1-1578
ccuccgccugagcagug

SEQ ID NO: 3245 - RNA, 17 nt, Artificial Sequence
  Synthetic oligonucleotide: PDCD1-2689
caccuccgccugagcag

SEQ ID NO: 3246 - RNA, 17 nt, Artificial Sequence
  Synthetic oligonucleotide: PDCD1-1580
ucaccuccgccugagca

SEQ ID NO: 3247 - RNA, 17 nt, Artificial Sequence
  Synthetic oligonucleotide: PDCD1-1581
cuuccgcucaccuccgc

SEQ ID NO: 3248 - RNA, 17 nt, Artificial Sequence
  Synthetic oligonucleotide: PDCD1-2687
cucccuucaaccugacc

SEQ ID NO: 3249 - RNA, 17 nt, Artificial Sequence
  Synthetic oligonucleotide: PDCD1-1583
ccucccuucaaccugac

SEQ ID NO: 3250 - RNA, 17 nt, Artificial Sequence
  Synthetic oligonucleotide: PDCD1-1584
gggggcgggagcaaggg

SEQ ID NO: 3251 - RNA, 17 nt, Artificial Sequence
  Synthetic oligonucleotide: PDCD1-2682
aagagggggcgggagca

SEQ ID NO: 3252 - RNA, 17 nt, Artificial Sequence
  Synthetic oligonucleotide: PDCD1-1586
gaagagggggcgggagc

SEQ ID NO: 3253 - RNA, 17 nt, Artificial Sequence
  Synthetic oligonucleotide: PDCD1-2681
guggaggaagagggggc

SEQ ID NO: 3254 - RNA, 17 nt, Artificial Sequence
  Synthetic oligonucleotide: PDCD1-2680
uguggaggaagaggggg

SEQ ID NO: 3255 - RNA, 17 nt, Artificial Sequence
  Synthetic oligonucleotide: PDCD1-1589
auguggaggaagagggg

SEQ ID NO: 3256 - RNA, 17 nt, Artificial Sequence
  Synthetic oligonucleotide: PDCD1-2677
guggauguggaggaaga

SEQ ID NO: 3257 - RNA, 17 nt, Artificial Sequence
  Synthetic oligonucleotide: PDCD1-2676
cguggauguggaggaag

SEQ ID NO: 3258 - RNA, 17 nt, Artificial Sequence
  Synthetic oligonucleotide: PDCD1-1592
acguggauguggaggaa

SEQ ID NO: 3259 - RNA, 17 nt, Artificial Sequence
  Synthetic oligonucleotide: PDCD1-1593
ccacguggauguggagg

SEQ ID NO: 3260 - RNA, 17 nt, Artificial Sequence
  Synthetic oligonucleotide: PDCD1-2675
cgcccacguggaugugg

SEQ ID NO: 3261 - RNA, 17 nt, Artificial Sequence
  Synthetic oligonucleotide: PDCD1-1595
ucgcccacguggaugug

SEQ ID NO: 3262 - RNA, 17 nt, Artificial Sequence
  Synthetic oligonucleotide: PDCD1-2674
ucucgcccacguggaug

SEQ ID NO: 3263 - RNA, 17 nt, Artificial Sequence
  Synthetic oligonucleotide: PDCD1-1597
cucucgcccacguggau

SEQ ID NO: 3264 - RNA, 17 nt, Artificial Sequence
  Synthetic oligonucleotide: PDCD1-1598
cugucacucucgcccac

SEQ ID NO: 3265 - RNA, 17 nt, Artificial Sequence
  Synthetic oligonucleotide: PDCD1-1599
gguagggcgugggggcc

SEQ ID NO: 3266 - RNA, 17 nt, Artificial Sequence
  Synthetic oligonucleotide: PDCD1-2668
cccacgggguagggcgu

SEQ ID NO: 3267 - RNA, 17 nt, Artificial Sequence
  Synthetic oligonucleotide: PDCD1-2667
ccccacgggguagggcg

SEQ ID NO: 3268 - RNA, 17 nt, Artificial Sequence
  Synthetic oligonucleotide: PDCD1-1602
cccccacgggguagggc

SEQ ID NO: 3269 - RNA, 17 nt, Artificial Sequence
  Synthetic oligonucleotide: PDCD1-1603
gggagacccccacgggg

SEQ ID NO: 3270 - RNA, 17 nt, Artificial Sequence
  Synthetic oligonucleotide: PDCD1-2662
agcuggggagaccccca

SEQ ID NO: 3271 - RNA, 17 nt, Artificial Sequence
  Synthetic oligonucleotide: PDCD1-1605
gagcuggggagaccccc

SEQ ID NO: 3272 - RNA, 17 nt, Artificial Sequence
  Synthetic oligonucleotide: PDCD1-2661
gaaggggcccugagcug

SEQ ID NO: 3273 - RNA, 17 nt, Artificial Sequence
  Synthetic oligonucleotide: PDCD1-2660
ggaaggggcccugagcu

SEQ ID NO: 3274 - RNA, 17 nt, Artificial Sequence
  Synthetic oligonucleotide: PDCD1-2659
aggaaggggcccugagc

SEQ ID NO: 3275 - RNA, 17 nt, Artificial Sequence
  Synthetic oligonucleotide: PDCD1-1609
gaggaaggggcccugag

SEQ ID NO: 3276 - RNA, 17 nt, Artificial Sequence
  Synthetic oligonucleotide: PDCD1-1610
cagaggaggaaggggcc

SEQ ID NO: 3277 - RNA, 17 nt, Artificial Sequence
  Synthetic oligonucleotide: PDCD1-2656
agagacacagaggagga

SEQ ID NO: 3278 - RNA, 17 nt, Artificial Sequence
  Synthetic oligonucleotide: PDCD1-1612
cagagacacagaggagg

SEQ ID NO: 3279 - RNA, 17 nt, Artificial Sequence
  Synthetic oligonucleotide: PDCD1-2655
gagcagagacacagagg

SEQ ID NO: 3280 - RNA, 17 nt, Artificial Sequence
  Synthetic oligonucleotide: PDCD1-1614
ugagcagagacacagag

SEQ ID NO: 3281 - RNA, 17 nt, Artificial Sequence
  Synthetic oligonucleotide: PDCD1-2654
agugagcagagacacag

SEQ ID NO: 3282 - RNA, 17 nt, Artificial Sequence
  Synthetic oligonucleotide: PDCD1-1616
cagugagcagagacaca

SEQ ID NO: 3283 - RNA, 17 nt, Artificial Sequence
  Synthetic oligonucleotide: PDCD1-1617
agcagugagcagagaca

SEQ ID NO: 3284 - RNA, 17 nt, Artificial Sequence
  Synthetic oligonucleotide: PDCD1-1618
gaggccacagcagugag

SEQ ID NO: 3285 - RNA, 17 nt, Artificial Sequence
  Synthetic oligonucleotide: PDCD1-1619
ggaaagaggccacagca

SEQ ID NO: 3286 - RNA, 17 nt, Artificial Sequence
  Synthetic oligonucleotide: PDCD1-1620
cucgggcgggauaugga

SEQ ID NO: 3287 - RNA, 17 nt, Artificial Sequence
  Synthetic oligonucleotide: PDCD1-2652
gcagcucgggcgggaua

SEQ ID NO: 3288 - RNA, 17 nt, Artificial Sequence
  Synthetic oligonucleotide: PDCD1-1622
ggcagcucgggcgggau

SEQ ID NO: 3289 - RNA, 17 nt, Artificial Sequence
  Synthetic oligonucleotide: PDCD1-2650
aggaggggcagcucggg

SEQ ID NO: 3290 - RNA, 17 nt, Artificial Sequence
  Synthetic oligonucleotide: PDCD1-1624
caggaggggcagcucgg

SEQ ID NO: 3291 - RNA, 17 nt, Artificial Sequence
  Synthetic oligonucleotide: PDCD1-1625
gccucaggaggggcagc

SEQ ID NO: 3292 - RNA, 17 nt, Artificial Sequence
  Synthetic oligonucleotide: PDCD1-2645
cacccggcagccucagg

SEQ ID NO: 3293 - RNA, 17 nt, Artificial Sequence
  Synthetic oligonucleotide: PDCD1-1627
ccacccggcagccucag

SEQ ID NO: 3294 - RNA, 17 nt, Artificial Sequence
  Synthetic oligonucleotide: PDCD1-2644
ccccacccggcagccuc

SEQ ID NO: 3295 - RNA, 17 nt, Artificial Sequence
  Synthetic oligonucleotide: PDCD1-1629
cccccacccggcagccu

SEQ ID NO: 3296 - RNA, 17 nt, Artificial Sequence
  Synthetic oligonucleotide: PDCD1-1630
gggggaugggggaggag

SEQ ID NO: 3297 - RNA, 17 nt, Artificial Sequence
  Synthetic oligonucleotide: PDCD1-1631
ugggggggaugggggag

SEQ ID NO: 3298 - RNA, 17 nt, Artificial Sequence
  Synthetic oligonucleotide: PDCD1-2640
gaugggggggauggggg

SEQ ID NO: 3299 - RNA, 17 nt, Artificial Sequence
  Synthetic oligonucleotide: PDCD1-1633
agaugggggggaugggg

SEQ ID NO: 3300 - RNA, 17 nt, Artificial Sequence
  Synthetic oligonucleotide: PDCD1-2639
ggagaugggggggaugg

SEQ ID NO: 3301 - RNA, 17 nt, Artificial Sequence
  Synthetic oligonucleotide: PDCD1-2638
gggagaugggggggaug

SEQ ID NO: 3302 - RNA, 17 nt, Artificial Sequence
  Synthetic oligonucleotide: PDCD1-2637
agggagaugggggggau

SEQ ID NO: 3303 - RNA, 17 nt, Artificial Sequence
  Synthetic oligonucleotide: PDCD1-2636
cagggagauggggggga

SEQ ID NO: 3304 - RNA, 17 nt, Artificial Sequence
  Synthetic oligonucleotide: PDCD1-1638
ccagggagauggggggg

SEQ ID NO: 3305 - RNA, 17 nt, Artificial Sequence
  Synthetic oligonucleotide: PDCD1-2634
gcccccagggagauggg

SEQ ID NO: 3306 - RNA, 17 nt, Artificial Sequence
  Synthetic oligonucleotide: PDCD1-2633
ggcccccagggagaugg

SEQ ID NO: 3307 - RNA, 17 nt, Artificial Sequence
  Synthetic oligonucleotide: PDCD1-2632
cggcccccagggagaug

SEQ ID NO: 3308 - RNA, 17 nt, Artificial Sequence
  Synthetic oligonucleotide: PDCD1-2631
ccggcccccagggagau

SEQ ID NO: 3309 - RNA, 17 nt, Artificial Sequence
  Synthetic oligonucleotide: PDCD1-2630
cccggcccccagggaga

SEQ ID NO: 3310 - RNA, 17 nt, Artificial Sequence
  Synthetic oligonucleotide: PDCD1-1644
gcccggcccccagggag

SEQ ID NO: 3311 - RNA, 17 nt, Artificial Sequence
  Synthetic oligonucleotide: PDCD1-2629
gggaggcccggccccca

SEQ ID NO: 3312 - RNA, 17 nt, Artificial Sequence
  Synthetic oligonucleotide: PDCD1-2628
agggaggcccggccccc

SEQ ID NO: 3313 - RNA, 17 nt, Artificial Sequence
  Synthetic oligonucleotide: PDCD1-1647
cagggaggcccggcccc

SEQ ID NO: 3314 - RNA, 17 nt, Artificial Sequence
  Synthetic oligonucleotide: PDCD1-2625
cccaccuuccccaggca

SEQ ID NO: 3315 - RNA, 17 nt, Artificial Sequence
  Synthetic oligonucleotide: PDCD1-2624
acccaccuuccccaggc

SEQ ID NO: 3316 - RNA, 17 nt, Artificial Sequence
  Synthetic oligonucleotide: PDCD1-1650
cacccaccuuccccagg

SEQ ID NO: 3317 - RNA, 17 nt, Artificial Sequence
  Synthetic oligonucleotide: PDCD1-2620
aggaaccugagcccaga

SEQ ID NO: 3318 - RNA, 17 nt, Artificial Sequence
  Synthetic oligonucleotide: PDCD1-2619
caggaaccugagcccag

SEQ ID NO: 3319 - RNA, 17 nt, Artificial Sequence
  Synthetic oligonucleotide: PDCD1-1653
ccaggaaccugagccca

SEQ ID NO: 3320 - RNA, 17 nt, Artificial Sequence
  Synthetic oligonucleotide: PDCD1-1654
gcccaggaaccugagcc

SEQ ID NO: 3321 - RNA, 20 nt, Artificial Sequence
  Synthetic oligonucleotide: PDCD1-1655
ccccgguacccagcagggcc

SEQ ID NO: 3322 - RNA, 20 nt, Artificial Sequence
  Synthetic oligonucleotide: PDCD1-1656
ccgguacccagcagggccca

SEQ ID NO: 3323 - RNA, 20 nt, Artificial Sequence
  Synthetic oligonucleotide: PDCD1-2699
cgguacccagcagggcccag

SEQ ID NO: 3324 - RNA, 20 nt, Artificial Sequence
  Synthetic oligonucleotide: PDCD1-1658
gggacugucuuaggcuuggc

SEQ ID NO: 3325 - RNA, 20 nt, Artificial Sequence
  Synthetic oligonucleotide: PDCD1-1659
cugucuuaggcuuggccugg

SEQ ID NO: 3326 - RNA, 20 nt, Artificial Sequence
  Synthetic oligonucleotide: PDCD1-1660
cauccccaggugcaggcugg

SEQ ID NO: 3327 - RNA, 20 nt, Artificial Sequence
  Synthetic oligonucleotide: PDCD1-1661
aggugcaggcuggcugggca

SEQ ID NO: 3328 - RNA, 20 nt, Artificial Sequence
  Synthetic oligonucleotide: PDCD1-1662
gugcaggcuggcugggcaca

SEQ ID NO: 3329 - RNA, 20 nt, Artificial Sequence
  Synthetic oligonucleotide: PDCD1-1663
ggcugggcacagagggccag

SEQ ID NO: 3330 - RNA, 20 nt, Artificial Sequence
  Synthetic oligonucleotide: PDCD1-1664
cacagagggccagccgggca

SEQ ID NO: 3331 - RNA, 20 nt, Artificial Sequence
  Synthetic oligonucleotide: PDCD1-1665
cagagggccagccgggcaca

SEQ ID NO: 3332 - RNA, 20 nt, Artificial Sequence
  Synthetic oligonucleotide: PDCD1-1666
ccagccgggcacagaggguc

SEQ ID NO: 3333 - RNA, 20 nt, Artificial Sequence
  Synthetic oligonucleotide: PDCD1-2718
cagccgggcacagagggucc

SEQ ID NO: 3334 - RNA, 20 nt, Artificial Sequence
  Synthetic oligonucleotide: PDCD1-1668
cgggcacagaggguccagga

SEQ ID NO: 3335 - RNA, 20 nt, Artificial Sequence
  Synthetic oligonucleotide: PDCD1-1669
ggcuguggucacaguguaca

SEQ ID NO: 3336 - RNA, 20 nt, Artificial Sequence
  Synthetic oligonucleotide: PDCD1-1670
cuguggucacaguguacaca

SEQ ID NO: 3337 - RNA, 20 nt, Artificial Sequence
  Synthetic oligonucleotide: PDCD1-1671
cacaguguacacagagggcc

SEQ ID NO: 3338 - RNA, 20 nt, Artificial Sequence
  Synthetic oligonucleotide: PDCD1-1672
uacacagagggcccaggguc

SEQ ID NO: 3339 - RNA, 20 nt, Artificial Sequence
  Synthetic oligonucleotide: PDCD1-1673
gcccagggucacgggcagcc

SEQ ID NO: 3340 - RNA, 20 nt, Artificial Sequence
  Synthetic oligonucleotide: PDCD1-2728
cccagggucacgggcagccc

SEQ ID NO: 3341 - RNA, 20 nt, Artificial Sequence
  Synthetic oligonucleotide: PDCD1-1675
agggucacgggcagcccagg

SEQ ID NO: 3342 - RNA, 20 nt, Artificial Sequence
  Synthetic oligonucleotide: PDCD1-1676
aggcucccucucuccucgau

SEQ ID NO: 3343 - RNA, 20 nt, Artificial Sequence
  Synthetic oligonucleotide: PDCD1-2730
ggcucccucucuccucgauc

SEQ ID NO: 3344 - RNA, 20 nt, Artificial Sequence
  Synthetic oligonucleotide: PDCD1-2731
gcucccucucuccucgaucc

SEQ ID NO: 3345 - RNA, 20 nt, Artificial Sequence
  Synthetic oligonucleotide: PDCD1-1679
ucccucucuccucgauccgg

SEQ ID NO: 3346 - RNA, 20 nt, Artificial Sequence
  Synthetic oligonucleotide: PDCD1-1680
ucucuccucgauccgggaga

SEQ ID NO: 3347 - RNA, 20 nt, Artificial Sequence
  Synthetic oligonucleotide: PDCD1-1681
gugaggccaaggccuccccc

SEQ ID NO: 3348 - RNA, 20 nt, Artificial Sequence
  Synthetic oligonucleotide: PDCD1-1682
aggccucccccacggauggu

SEQ ID NO: 3349 - RNA, 20 nt, Artificial Sequence
  Synthetic oligonucleotide: PDCD1-1683
ucccccacggauggucugaa

SEQ ID NO: 3350 - RNA, 20 nt, Artificial Sequence
  Synthetic oligonucleotide: PDCD1-1684
acggauggucugaacagggc

SEQ ID NO: 3351 - RNA, 20 nt, Artificial Sequence
  Synthetic oligonucleotide: PDCD1-2738
cggauggucugaacagggcu

SEQ ID NO: 3352 - RNA, 20 nt, Artificial Sequence
  Synthetic oligonucleotide: PDCD1-2739
ggauggucugaacagggcuc

SEQ ID NO: 3353 - RNA, 20 nt, Artificial Sequence
  Synthetic oligonucleotide: PDCD1-2740
gauggucugaacagggcucg

SEQ ID NO: 3354 - RNA, 20 nt, Artificial Sequence
  Synthetic oligonucleotide: PDCD1-1688
uggucugaacagggcucggg

SEQ ID NO: 3355 - RNA, 20 nt, Artificial Sequence
  Synthetic oligonucleotide: PDCD1-1689
aacagggcucggggagagcc

SEQ ID NO: 3356 - RNA, 20 nt, Artificial Sequence
  Synthetic oligonucleotide: PDCD1-2741
acagggcucggggagagccc

SEQ ID NO: 3357 - RNA, 20 nt, Artificial Sequence
  Synthetic oligonucleotide: PDCD1-1691
cucggggagagcccuggaau

SEQ ID NO: 3358 - RNA, 20 nt, Artificial Sequence
  Synthetic oligonucleotide: PDCD1-1692
ggagagcccuggaaucuggg

SEQ ID NO: 3359 - RNA, 20 nt, Artificial Sequence
  Synthetic oligonucleotide: PDCD1-1693
gaaucugggcagagacccag

SEQ ID NO: 3360 - RNA, 20 nt, Artificial Sequence
  Synthetic oligonucleotide: PDCD1-1694
aggcgggcacaauccccacc

SEQ ID NO: 3361 - RNA, 20 nt, Artificial Sequence
  Synthetic oligonucleotide: PDCD1-2747
ggcgggcacaauccccaccc

SEQ ID NO: 3362 - RNA, 20 nt, Artificial Sequence
  Synthetic oligonucleotide: PDCD1-1696
cgggcacaauccccacccag

SEQ ID NO: 3363 - RNA, 20 nt, Artificial Sequence
  Synthetic oligonucleotide: PDCD1-2748
gggcacaauccccacccagg

SEQ ID NO: 3364 - RNA, 20 nt, Artificial Sequence
  Synthetic oligonucleotide: PDCD1-1698
auccccacccaggagggauc

SEQ ID NO: 3365 - RNA, 20 nt, Artificial Sequence
  Synthetic oligonucleotide: PDCD1-2750
uccccacccaggagggaucc

SEQ ID NO: 3366 - RNA, 20 nt, Artificial Sequence
  Synthetic oligonucleotide: PDCD1-1700
cccaggagggauccuggaga

SEQ ID NO: 3367 - RNA, 20 nt, Artificial Sequence
  Synthetic oligonucleotide: PDCD1-1701
aggagggauccuggagacag

SEQ ID NO: 3368 - RNA, 20 nt, Artificial Sequence
  Synthetic oligonucleotide: PDCD1-1702
gacagaagaacuguccucac

SEQ ID NO: 3369 - RNA, 20 nt, Artificial Sequence
  Synthetic oligonucleotide: PDCD1-1703
cucacucgaacagguacacu

SEQ ID NO: 3370 - RNA, 20 nt, Artificial Sequence
  Synthetic oligonucleotide: PDCD1-1704
acagguacacuuuggauaua

SEQ ID NO: 3371 - RNA, 20 nt, Artificial Sequence
  Synthetic oligonucleotide: PDCD1-1705
agguacacuuuggauauaau

SEQ ID NO: 3372 - RNA, 20 nt, Artificial Sequence
  Synthetic oligonucleotide: PDCD1-1706
aaagccaagguuagucccac

SEQ ID NO: 3373 - RNA, 20 nt, Artificial Sequence
  Synthetic oligonucleotide: PDCD1-2754
aagccaagguuagucccaca

SEQ ID NO: 3374 - RNA, 20 nt, Artificial Sequence
  Synthetic oligonucleotide: PDCD1-1708
cauggggcucaucccauccu

SEQ ID NO: 3375 - RNA, 20 nt, Artificial Sequence
  Synthetic oligonucleotide: PDCD1-2757
auggggcucaucccauccuu

SEQ ID NO: 3376 - RNA, 20 nt, Artificial Sequence
  Synthetic oligonucleotide: PDCD1-1710
caucccauccuuaggaaaac

SEQ ID NO: 3377 - RNA, 20 nt, Artificial Sequence
  Synthetic oligonucleotide: PDCD1-1711
ccauccuuaggaaaacucga

SEQ ID NO: 3378 - RNA, 20 nt, Artificial Sequence
  Synthetic oligonucleotide: PDCD1-1712
auccuuaggaaaacucgagu

SEQ ID NO: 3379 - RNA, 20 nt, Artificial Sequence
  Synthetic oligonucleotide: PDCD1-1713
ggaaaacucgagugaggacc

SEQ ID NO: 3380 - RNA, 20 nt, Artificial Sequence
  Synthetic oligonucleotide: PDCD1-1714
cgagugaggaccaaggaugc

SEQ ID NO: 3381 - RNA, 20 nt, Artificial Sequence
  Synthetic oligonucleotide: PDCD1-1715
ucaaccccacucccauucug

SEQ ID NO: 3382 - RNA, 20 nt, Artificial Sequence
  Synthetic oligonucleotide: PDCD1-2763
caaccccacucccauucugu

SEQ ID NO: 3383 - RNA, 20 nt, Artificial Sequence
  Synthetic oligonucleotide: PDCD1-1717
cucccauucugucggagccu

SEQ ID NO: 3384 - RNA, 20 nt, Artificial Sequence
  Synthetic oligonucleotide: PDCD1-2764
ucccauucugucggagccuc

SEQ ID NO: 3385 - RNA, 20 nt, Artificial Sequence
  Synthetic oligonucleotide: PDCD1-2765
cccauucugucggagccucu

SEQ ID NO: 3386 - RNA, 20 nt, Artificial Sequence
  Synthetic oligonucleotide: PDCD1-1720
gcccacagccucugccccug

SEQ ID NO: 3387 - RNA, 20 nt, Artificial Sequence
  Synthetic oligonucleotide: PDCD1-2767
cccacagccucugccccugc

SEQ ID NO: 3388 - RNA, 20 nt, Artificial Sequence
  Synthetic oligonucleotide: PDCD1-2768
ccacagccucugccccugcu

SEQ ID NO: 3389 - RNA, 20 nt, Artificial Sequence
  Synthetic oligonucleotide: PDCD1-1723
ucccggcccaucccccuucg

SEQ ID NO: 3390 - RNA, 20 nt, Artificial Sequence
  Synthetic oligonucleotide: PDCD1-2774
cccggcccaucccccuucgc

SEQ ID NO: 3391 - RNA, 20 nt, Artificial Sequence
  Synthetic oligonucleotide: PDCD1-1725
cuggggcacaggugacccua

SEQ ID NO: 3392 - RNA, 20 nt, Artificial Sequence
  Synthetic oligonucleotide: PDCD1-1726
ccccucaaagcuuccaccuu

SEQ ID NO: 3393 - RNA, 20 nt, Artificial Sequence
  Synthetic oligonucleotide: PDCD1-1727
gugaugccugcaacagccug

SEQ ID NO: 3394 - RNA, 20 nt, Artificial Sequence
  Synthetic oligonucleotide: PDCD1-2783
ugaugccugcaacagccuga

SEQ ID NO: 3395 - RNA, 20 nt, Artificial Sequence
  Synthetic oligonucleotide: PDCD1-2784
gaugccugcaacagccugac

SEQ ID NO: 3396 - RNA, 20 nt, Artificial Sequence
  Synthetic oligonucleotide: PDCD1-2785
augccugcaacagccugacg

SEQ ID NO: 3397 - RNA, 20 nt, Artificial Sequence
  Synthetic oligonucleotide: PDCD1-2786
ugccugcaacagccugacgg

SEQ ID NO: 3398 - RNA, 20 nt, Artificial Sequence
  Synthetic oligonucleotide: PDCD1-1732
gcaacagccugacggggggg

SEQ ID NO: 3399 - RNA, 20 nt, Artificial Sequence
  Synthetic oligonucleotide: PDCD1-2789
caacagccugacgggggggc

SEQ ID NO: 3400 - RNA, 20 nt, Artificial Sequence
  Synthetic oligonucleotide: PDCD1-1734
cgggggggcuggggcggugg

SEQ ID NO: 3401 - RNA, 20 nt, Artificial Sequence
  Synthetic oligonucleotide: PDCD1-2794
gggggggcuggggcgguggc

SEQ ID NO: 3402 - RNA, 20 nt, Artificial Sequence
  Synthetic oligonucleotide: PDCD1-1736
ggcgguggcaggggcuggcu

SEQ ID NO: 3403 - RNA, 20 nt, Artificial Sequence
  Synthetic oligonucleotide: PDCD1-1737
uccagccuugaccuucuucc

SEQ ID NO: 3404 - RNA, 20 nt, Artificial Sequence
  Synthetic oligonucleotide: PDCD1-2799
ccagccuugaccuucuuccc

SEQ ID NO: 3405 - RNA, 20 nt, Artificial Sequence
  Synthetic oligonucleotide: PDCD1-1739
gcccuccagcccacucgugc

SEQ ID NO: 3406 - RNA, 20 nt, Artificial Sequence
  Synthetic oligonucleotide: PDCD1-1740
uccagcccacucgugccagg

SEQ ID NO: 3407 - RNA, 20 nt, Artificial Sequence
  Synthetic oligonucleotide: PDCD1-2804
ccagcccacucgugccaggg

SEQ ID NO: 3408 - RNA, 20 nt, Artificial Sequence
  Synthetic oligonucleotide: PDCD1-1742
cgugccaggguggggugguu

SEQ ID NO: 3409 - RNA, 20 nt, Artificial Sequence
  Synthetic oligonucleotide: PDCD1-2808
gugccaggguggggugguuc

SEQ ID NO: 3410 - RNA, 20 nt, Artificial Sequence
  Synthetic oligonucleotide: PDCD1-2809
ugccaggguggggugguuca

SEQ ID NO: 3411 - RNA, 20 nt, Artificial Sequence
  Synthetic oligonucleotide: PDCD1-1745
ugguucaggggguccagugc

SEQ ID NO: 3412 - RNA, 20 nt, Artificial Sequence
  Synthetic oligonucleotide: PDCD1-1746
uggcuggcggcccggcguuu

SEQ ID NO: 3413 - RNA, 20 nt, Artificial Sequence
  Synthetic oligonucleotide: PDCD1-1747
uuaucuccuuguauucugug

SEQ ID NO: 3414 - RNA, 20 nt, Artificial Sequence
  Synthetic oligonucleotide: PDCD1-1748
gugcugagcauuuuauuaca

SEQ ID NO: 3415 - RNA, 20 nt, Artificial Sequence
  Synthetic oligonucleotide: PDCD1-1749
ugagcauuuuauuacagcga

SEQ ID NO: 3416 - RNA, 20 nt, Artificial Sequence
  Synthetic oligonucleotide: PDCD1-2819
gagcauuuuauuacagcgaa

SEQ ID NO: 3417 - RNA, 20 nt, Artificial Sequence
  Synthetic oligonucleotide: PDCD1-1751
uuauuacagcgaauggaaaa

SEQ ID NO: 3418 - RNA, 20 nt, Artificial Sequence
  Synthetic oligonucleotide: PDCD1-2820
uauuacagcgaauggaaaac

SEQ ID NO: 3419 - RNA, 20 nt, Artificial Sequence
  Synthetic oligonucleotide: PDCD1-1753
uuacagcgaauggaaaacag

SEQ ID NO: 3420 - RNA, 20 nt, Artificial Sequence
  Synthetic oligonucleotide: PDCD1-1754
gcgaauggaaaacaggagaa

SEQ ID NO: 3421 - RNA, 17 nt, Artificial Sequence
  Synthetic oligonucleotide: PDCD1-1755
cgguacccagcagggcc

SEQ ID NO: 3422 - RNA, 17 nt, Artificial Sequence
  Synthetic oligonucleotide: PDCD1-1756
guacccagcagggccca

SEQ ID NO: 3423 - RNA, 17 nt, Artificial Sequence
  Synthetic oligonucleotide: PDCD1-2823
uacccagcagggcccag

SEQ ID NO: 3424 - RNA, 17 nt, Artificial Sequence
  Synthetic oligonucleotide: PDCD1-1758
acugucuuaggcuuggc

SEQ ID NO: 3425 - RNA, 17 nt, Artificial Sequence
  Synthetic oligonucleotide: PDCD1-1759
ucuuaggcuuggccugg

SEQ ID NO: 3426 - RNA, 17 nt, Artificial Sequence
  Synthetic oligonucleotide: PDCD1-1760
ccccaggugcaggcugg

SEQ ID NO: 3427 - RNA, 17 nt, Artificial Sequence
  Synthetic oligonucleotide: PDCD1-1761
ugcaggcuggcugggca

SEQ ID NO: 3428 - RNA, 17 nt, Artificial Sequence
  Synthetic oligonucleotide: PDCD1-1762
caggcuggcugggcaca

SEQ ID NO: 3429 - RNA, 17 nt, Artificial Sequence
  Synthetic oligonucleotide: PDCD1-1763
ugggcacagagggccag

SEQ ID NO: 3430 - RNA, 17 nt, Artificial Sequence
  Synthetic oligonucleotide: PDCD1-1764
agagggccagccgggca

SEQ ID NO: 3431 - RNA, 17 nt, Artificial Sequence
  Synthetic oligonucleotide: PDCD1-1765
agggccagccgggcaca

SEQ ID NO: 3432 - RNA, 17 nt, Artificial Sequence
  Synthetic oligonucleotide: PDCD1-1766
gccgggcacagaggguc

SEQ ID NO: 3433 - RNA, 17 nt, Artificial Sequence
  Synthetic oligonucleotide: PDCD1-2842
ccgggcacagagggucc

SEQ ID NO: 3434 - RNA, 17 nt, Artificial Sequence
  Synthetic oligonucleotide: PDCD1-1768
gcacagaggguccagga

SEQ ID NO: 3435 - RNA, 17 nt, Artificial Sequence
  Synthetic oligonucleotide: PDCD1-1769
uguggucacaguguaca

SEQ ID NO: 3436 - RNA, 17 nt, Artificial Sequence
  Synthetic oligonucleotide: PDCD1-1770
uggucacaguguacaca

SEQ ID NO: 3437 - RNA, 17 nt, Artificial Sequence
  Synthetic oligonucleotide: PDCD1-1771
aguguacacagagggcc

SEQ ID NO: 3438 - RNA, 17 nt, Artificial Sequence
  Synthetic oligonucleotide: PDCD1-1772
acagagggcccaggguc

SEQ ID NO: 3439 - RNA, 17 nt, Artificial Sequence
  Synthetic oligonucleotide: PDCD1-1773
cagggucacgggcagcc

SEQ ID NO: 3440 - RNA, 17 nt, Artificial Sequence
  Synthetic oligonucleotide: PDCD1-2852
agggucacgggcagccc

SEQ ID NO: 3441 - RNA, 17 nt, Artificial Sequence
  Synthetic oligonucleotide: PDCD1-1775
gucacgggcagcccagg

SEQ ID NO: 3442 - RNA, 17 nt, Artificial Sequence
  Synthetic oligonucleotide: PDCD1-1776
cucccucucuccucgau

SEQ ID NO: 3443 - RNA, 17 nt, Artificial Sequence
  Synthetic oligonucleotide: PDCD1-2854
ucccucucuccucgauc

SEQ ID NO: 3444 - RNA, 17 nt, Artificial Sequence
  Synthetic oligonucleotide: PDCD1-2855
cccucucuccucgaucc

SEQ ID NO: 3445 - RNA, 17 nt, Artificial Sequence
  Synthetic oligonucleotide: PDCD1-1779
cucucuccucgauccgg

SEQ ID NO: 3446 - RNA, 17 nt, Artificial Sequence
  Synthetic oligonucleotide: PDCD1-1780
cuccucgauccgggaga

SEQ ID NO: 3447 - RNA, 17 nt, Artificial Sequence
  Synthetic oligonucleotide: PDCD1-1781
aggccaaggccuccccc

SEQ ID NO: 3448 - RNA, 17 nt, Artificial Sequence
  Synthetic oligonucleotide: PDCD1-1782
ccucccccacggauggu

SEQ ID NO: 3449 - RNA, 17 nt, Artificial Sequence
  Synthetic oligonucleotide: PDCD1-1783
cccacggauggucugaa

SEQ ID NO: 3450 - RNA, 17 nt, Artificial Sequence
  Synthetic oligonucleotide: PDCD1-1784
gauggucugaacagggc

SEQ ID NO: 3451 - RNA, 17 nt, Artificial Sequence
  Synthetic oligonucleotide: PDCD1-2862
auggucugaacagggcu

SEQ ID NO: 3452 - RNA, 17 nt, Artificial Sequence
  Synthetic oligonucleotide: PDCD1-2863
uggucugaacagggcuc

SEQ ID NO: 3453 - RNA, 17 nt, Artificial Sequence
  Synthetic oligonucleotide: PDCD1-2864
ggucugaacagggcucg

SEQ ID NO: 3454 - RNA, 17 nt, Artificial Sequence
  Synthetic oligonucleotide: PDCD1-1788
ucugaacagggcucggg

SEQ ID NO: 3455 - RNA, 17 nt, Artificial Sequence
  Synthetic oligonucleotide: PDCD1-1789
agggcucggggagagcc

SEQ ID NO: 3456 - RNA, 17 nt, Artificial Sequence
  Synthetic oligonucleotide: PDCD1-2865
gggcucggggagagccc

SEQ ID NO: 3457 - RNA, 17 nt, Artificial Sequence
  Synthetic oligonucleotide: PDCD1-1791
ggggagagcccuggaau

SEQ ID NO: 3458 - RNA, 17 nt, Artificial Sequence
  Synthetic oligonucleotide: PDCD1-1792
gagcccuggaaucuggg

SEQ ID NO: 3459 - RNA, 17 nt, Artificial Sequence
  Synthetic oligonucleotide: PDCD1-1793
ucugggcagagacccag

SEQ ID NO: 3460 - RNA, 17 nt, Artificial Sequence
  Synthetic oligonucleotide: PDCD1-1794
cgggcacaauccccacc

SEQ ID NO: 3461 - RNA, 17 nt, Artificial Sequence
  Synthetic oligonucleotide: PDCD1-2871
gggcacaauccccaccc

SEQ ID NO: 3462 - RNA, 17 nt, Artificial Sequence
  Synthetic oligonucleotide: PDCD1-1796
gcacaauccccacccag

SEQ ID NO: 3463 - RNA, 17 nt, Artificial Sequence
  Synthetic oligonucleotide: PDCD1-2872
cacaauccccacccagg

SEQ ID NO: 3464 - RNA, 17 nt, Artificial Sequence
  Synthetic oligonucleotide: PDCD1-1798
cccacccaggagggauc

SEQ ID NO: 3465 - RNA, 17 nt, Artificial Sequence
  Synthetic oligonucleotide: PDCD1-2874
ccacccaggagggaucc

SEQ ID NO: 3466 - RNA, 17 nt, Artificial Sequence
  Synthetic oligonucleotide: PDCD1-1800
aggagggauccuggaga

SEQ ID NO: 3467 - RNA, 17 nt, Artificial Sequence
  Synthetic oligonucleotide: PDCD1-1801
agggauccuggagacag

SEQ ID NO: 3468 - RNA, 17 nt, Artificial Sequence
  Synthetic oligonucleotide: PDCD1-1802
agaagaacuguccucac

SEQ ID NO: 3469 - RNA, 17 nt, Artificial Sequence
  Synthetic oligonucleotide: PDCD1-1803
acucgaacagguacacu

SEQ ID NO: 3470 - RNA, 17 nt, Artificial Sequence
  Synthetic oligonucleotide: PDCD1-1804
gguacacuuuggauaua

SEQ ID NO: 3471 - RNA, 17 nt, Artificial Sequence
  Synthetic oligonucleotide: PDCD1-1805
uacacuuuggauauaau

SEQ ID NO: 3472 - RNA, 17 nt, Artificial Sequence
  Synthetic oligonucleotide: PDCD1-1806
gccaagguuagucccac

SEQ ID NO: 3473 - RNA, 17 nt, Artificial Sequence
  Synthetic oligonucleotide: PDCD1-2878
ccaagguuagucccaca

SEQ ID NO: 3474 - RNA, 17 nt, Artificial Sequence
  Synthetic oligonucleotide: PDCD1-1808
ggggcucaucccauccu

SEQ ID NO: 3475 - RNA, 17 nt, Artificial Sequence
  Synthetic oligonucleotide: PDCD1-2881
gggcucaucccauccuu

SEQ ID NO: 3476 - RNA, 17 nt, Artificial Sequence
  Synthetic oligonucleotide: PDCD1-1810
cccauccuuaggaaaac

SEQ ID NO: 3477 - RNA, 17 nt, Artificial Sequence
  Synthetic oligonucleotide: PDCD1-1811
uccuuaggaaaacucga

SEQ ID NO: 3478 - RNA, 17 nt, Artificial Sequence
  Synthetic oligonucleotide: PDCD1-1812
cuuaggaaaacucgagu

SEQ ID NO: 3479 - RNA, 17 nt, Artificial Sequence
  Synthetic oligonucleotide: PDCD1-1813
aaacucgagugaggacc

SEQ ID NO: 3480 - RNA, 17 nt, Artificial Sequence
  Synthetic oligonucleotide: PDCD1-1814
gugaggaccaaggaugc

SEQ ID NO: 3481 - RNA, 17 nt, Artificial Sequence
  Synthetic oligonucleotide: PDCD1-1815
accccacucccauucug

SEQ ID NO: 3482 - RNA, 17 nt, Artificial Sequence
  Synthetic oligonucleotide: PDCD1-2887
ccccacucccauucugu

SEQ ID NO: 3483 - RNA, 17 nt, Artificial Sequence
  Synthetic oligonucleotide: PDCD1-1817
ccauucugucggagccu

SEQ ID NO: 3484 - RNA, 17 nt, Artificial Sequence
  Synthetic oligonucleotide: PDCD1-2888
cauucugucggagccuc

SEQ ID NO: 3485 - RNA, 17 nt, Artificial Sequence
  Synthetic oligonucleotide: PDCD1-2889
auucugucggagccucu

SEQ ID NO: 3486 - RNA, 17 nt, Artificial Sequence
  Synthetic oligonucleotide: PDCD1-1820
cacagccucugccccug

SEQ ID NO: 3487 - RNA, 17 nt, Artificial Sequence
  Synthetic oligonucleotide: PDCD1-2891
acagccucugccccugc

SEQ ID NO: 3488 - RNA, 17 nt, Artificial Sequence
  Synthetic oligonucleotide: PDCD1-2892
cagccucugccccugcu

SEQ ID NO: 3489 - RNA, 17 nt, Artificial Sequence
  Synthetic oligonucleotide: PDCD1-1823
cggcccaucccccuucg

SEQ ID NO: 3490 - RNA, 17 nt, Artificial Sequence
  Synthetic oligonucleotide: PDCD1-2898
ggcccaucccccuucgc

SEQ ID NO: 3491 - RNA, 17 nt, Artificial Sequence
  Synthetic oligonucleotide: PDCD1-1825
gggcacaggugacccua

SEQ ID NO: 3492 - RNA, 17 nt, Artificial Sequence
  Synthetic oligonucleotide: PDCD1-1826
cucaaagcuuccaccuu

SEQ ID NO: 3493 - RNA, 17 nt, Artificial Sequence
  Synthetic oligonucleotide: PDCD1-1827
augccugcaacagccug

SEQ ID NO: 3494 - RNA, 17 nt, Artificial Sequence
  Synthetic oligonucleotide: PDCD1-2907
ugccugcaacagccuga

SEQ ID NO: 3495 - RNA, 17 nt, Artificial Sequence
  Synthetic oligonucleotide: PDCD1-2908
gccugcaacagccugac

SEQ ID NO: 3496 - RNA, 17 nt, Artificial Sequence
  Synthetic oligonucleotide: PDCD1-2909
ccugcaacagccugacg

SEQ ID NO: 3497 - RNA, 17 nt, Artificial Sequence
  Synthetic oligonucleotide: PDCD1-2910
cugcaacagccugacgg

SEQ ID NO: 3498 - RNA, 17 nt, Artificial Sequence
  Synthetic oligonucleotide: PDCD1-1832
acagccugacggggggg

SEQ ID NO: 3499 - RNA, 17 nt, Artificial Sequence
  Synthetic oligonucleotide: PDCD1-2913
cagccugacgggggggc

SEQ ID NO: 3500 - RNA, 17 nt, Artificial Sequence
  Synthetic oligonucleotide: PDCD1-1834
gggggcuggggcggugg

SEQ ID NO: 3501 - RNA, 17 nt, Artificial Sequence
  Synthetic oligonucleotide: PDCD1-2918
ggggcuggggcgguggc

SEQ ID NO: 3502 - RNA, 17 nt, Artificial Sequence
  Synthetic oligonucleotide: PDCD1-1836
gguggcaggggcuggcu

SEQ ID NO: 3503 - RNA, 17 nt, Artificial Sequence
  Synthetic oligonucleotide: PDCD1-1837
agccuugaccuucuucc

SEQ ID NO: 3504 - RNA, 17 nt, Artificial Sequence
  Synthetic oligonucleotide: PDCD1-2923
gccuugaccuucuuccc

SEQ ID NO: 3505 - RNA, 17 nt, Artificial Sequence
  Synthetic oligonucleotide: PDCD1-1839
cuccagcccacucgugc

SEQ ID NO: 3506 - RNA, 17 nt, Artificial Sequence
  Synthetic oligonucleotide: PDCD1-1840
agcccacucgugccagg

SEQ ID NO: 3507 - RNA, 17 nt, Artificial Sequence
  Synthetic oligonucleotide: PDCD1-2928
gcccacucgugccaggg

SEQ ID NO: 3508 - RNA, 17 nt, Artificial Sequence
  Synthetic oligonucleotide: PDCD1-1842
gccaggguggggugguu

SEQ ID NO: 3509 - RNA, 17 nt, Artificial Sequence
  Synthetic oligonucleotide: PDCD1-2932
ccaggguggggugguuc

SEQ ID NO: 3510 - RNA, 17 nt, Artificial Sequence
  Synthetic oligonucleotide: PDCD1-2933
caggguggggugguuca

SEQ ID NO: 3511 - RNA, 17 nt, Artificial Sequence
  Synthetic oligonucleotide: PDCD1-1845
uucaggggguccagugc

SEQ ID NO: 3512 - RNA, 17 nt, Artificial Sequence
  Synthetic oligonucleotide: PDCD1-1846
cuggcggcccggcguuu

SEQ ID NO: 3513 - RNA, 17 nt, Artificial Sequence
  Synthetic oligonucleotide: PDCD1-1847
ucuccuuguauucugug

SEQ ID NO: 3514 - RNA, 17 nt, Artificial Sequence
  Synthetic oligonucleotide: PDCD1-1848
cugagcauuuuauuaca

SEQ ID NO: 3515 - RNA, 17 nt, Artificial Sequence
  Synthetic oligonucleotide: PDCD1-1849
gcauuuuauuacagcga

SEQ ID NO: 3516 - RNA, 17 nt, Artificial Sequence
  Synthetic oligonucleotide: PDCD1-2943
cauuuuauuacagcgaa

SEQ ID NO: 3517 - RNA, 17 nt, Artificial Sequence
  Synthetic oligonucleotide: PDCD1-1851
uuacagcgaauggaaaa

SEQ ID NO: 3518 - RNA, 17 nt, Artificial Sequence
  Synthetic oligonucleotide: PDCD1-2944
uacagcgaauggaaaac

SEQ ID NO: 3519 - RNA, 17 nt, Artificial Sequence
  Synthetic oligonucleotide: PDCD1-1853
cagcgaauggaaaacag

SEQ ID NO: 3520 - RNA, 17 nt, Artificial Sequence
  Synthetic oligonucleotide: PDCD1-1854
aauggaaaacaggagaa

SEQ ID NO: 3521 - RNA, 20 nt, Artificial Sequence
  Synthetic oligonucleotide: PDCD1-2947
cucugggcccugcuggguac

SEQ ID NO: 3522 - RNA, 20 nt, Artificial Sequence
  Synthetic oligonucleotide: PDCD1-1856
ccucugggcccugcugggua

SEQ ID NO: 3523 - RNA, 20 nt, Artificial Sequence
  Synthetic oligonucleotide: PDCD1-1857
gacagucccucugggcccug

SEQ ID NO: 3524 - RNA, 20 nt, Artificial Sequence
  Synthetic oligonucleotide: PDCD1-1858
ccaagccuaagacagucccu

SEQ ID NO: 3525 - RNA, 20 nt, Artificial Sequence
  Synthetic oligonucleotide: PDCD1-1859
uggggaugccaaggccuggg

SEQ ID NO: 3526 - RNA, 20 nt, Artificial Sequence
  Synthetic oligonucleotide: PDCD1-2956
ccuggggaugccaaggccug

SEQ ID NO: 3527 - RNA, 20 nt, Artificial Sequence
  Synthetic oligonucleotide: PDCD1-2957
accuggggaugccaaggccu

SEQ ID NO: 3528 - RNA, 20 nt, Artificial Sequence
  Synthetic oligonucleotide: PDCD1-2958
caccuggggaugccaaggcc

SEQ ID NO: 3529 - RNA, 20 nt, Artificial Sequence
  Synthetic oligonucleotide: PDCD1-1863
gcaccuggggaugccaaggc

SEQ ID NO: 3530 - RNA, 20 nt, Artificial Sequence
  Synthetic oligonucleotide: PDCD1-2961
ugcccagccagccugcaccu

SEQ ID NO: 3531 - RNA, 20 nt, Artificial Sequence
  Synthetic oligonucleotide: PDCD1-2962
gugcccagccagccugcacc

SEQ ID NO: 3532 - RNA, 20 nt, Artificial Sequence
  Synthetic oligonucleotide: PDCD1-1866
ugugcccagccagccugcac

SEQ ID NO: 3533 - RNA, 20 nt, Artificial Sequence
  Synthetic oligonucleotide: PDCD1-1867
acugugaccacagcccgcuc

SEQ ID NO: 3534 - RNA, 20 nt, Artificial Sequence
  Synthetic oligonucleotide: PDCD1-1868
uuccugggcugcccgugacc

SEQ ID NO: 3535 - RNA, 20 nt, Artificial Sequence
  Synthetic oligonucleotide: PDCD1-1869
aggagagagggagccucuuc

SEQ ID NO: 3536 - RNA, 20 nt, Artificial Sequence
  Synthetic oligonucleotide: PDCD1-2970
ucucccggaucgaggagaga

SEQ ID NO: 3537 - RNA, 20 nt, Artificial Sequence
  Synthetic oligonucleotide: PDCD1-2971
cucucccggaucgaggagag

SEQ ID NO: 3538 - RNA, 20 nt, Artificial Sequence
  Synthetic oligonucleotide: PDCD1-1872
acucucccggaucgaggaga

SEQ ID NO: 3539 - RNA, 20 nt, Artificial Sequence
  Synthetic oligonucleotide: PDCD1-1873
ucacucucccggaucgagga

SEQ ID NO: 3540 - RNA, 20 nt, Artificial Sequence
  Synthetic oligonucleotide: PDCD1-1874
ccucacucucccggaucgag

SEQ ID NO: 3541 - RNA, 20 nt, Artificial Sequence
  Synthetic oligonucleotide: PDCD1-2972
ggccucacucucccggaucg

SEQ ID NO: 3542 - RNA, 20 nt, Artificial Sequence
  Synthetic oligonucleotide: PDCD1-1876
uggccucacucucccggauc

SEQ ID NO: 3543 - RNA, 20 nt, Artificial Sequence
  Synthetic oligonucleotide: PDCD1-1877
cuuggccucacucucccgga

SEQ ID NO: 3544 - RNA, 20 nt, Artificial Sequence
  Synthetic oligonucleotide: PDCD1-1878
gaggccuuggccucacucuc

SEQ ID NO: 3545 - RNA, 20 nt, Artificial Sequence
  Synthetic oligonucleotide: PDCD1-2976
ccuguucagaccauccgugg

SEQ ID NO: 3546 - RNA, 20 nt, Artificial Sequence
  Synthetic oligonucleotide: PDCD1-2977
cccuguucagaccauccgug

SEQ ID NO: 3547 - RNA, 20 nt, Artificial Sequence
  Synthetic oligonucleotide: PDCD1-2978
gcccuguucagaccauccgu

SEQ ID NO: 3548 - RNA, 20 nt, Artificial Sequence
  Synthetic oligonucleotide: PDCD1-2979
agcccuguucagaccauccg

SEQ ID NO: 3549 - RNA, 20 nt, Artificial Sequence
  Synthetic oligonucleotide: PDCD1-1883
gagcccuguucagaccaucc

SEQ ID NO: 3550 - RNA, 20 nt, Artificial Sequence
  Synthetic oligonucleotide: PDCD1-1884
cccagauuccagggcucucc

SEQ ID NO: 3551 - RNA, 20 nt, Artificial Sequence
  Synthetic oligonucleotide: PDCD1-1885
cugggucucugcccagauuc

SEQ ID NO: 3552 - RNA, 20 nt, Artificial Sequence
  Synthetic oligonucleotide: PDCD1-1886
uggguggggauugugcccgc

SEQ ID NO: 3553 - RNA, 20 nt, Artificial Sequence
  Synthetic oligonucleotide: PDCD1-2985
cuccaggaucccuccugggu

SEQ ID NO: 3554 - RNA, 20 nt, Artificial Sequence
  Synthetic oligonucleotide: PDCD1-2986
ucuccaggaucccuccuggg

SEQ ID NO: 3555 - RNA, 20 nt, Artificial Sequence
  Synthetic oligonucleotide: PDCD1-1889
gucuccaggaucccuccugg

SEQ ID NO: 3556 - RNA, 20 nt, Artificial Sequence
  Synthetic oligonucleotide: PDCD1-1890
uucugucuccaggaucccuc

SEQ ID NO: 3557 - RNA, 20 nt, Artificial Sequence
  Synthetic oligonucleotide: PDCD1-1891
gaggacaguucuucugucuc

SEQ ID NO: 3558 - RNA, 20 nt, Artificial Sequence
  Synthetic oligonucleotide: PDCD1-1892
caaaguguaccuguucgagu

SEQ ID NO: 3559 - RNA, 20 nt, Artificial Sequence
  Synthetic oligonucleotide: PDCD1-1893
uccaaaguguaccuguucga

SEQ ID NO: 3560 - RNA, 20 nt, Artificial Sequence
  Synthetic oligonucleotide: PDCD1-1894
uauauccaaaguguaccugu

SEQ ID NO: 3561 - RNA, 20 nt, Artificial Sequence
  Synthetic oligonucleotide: PDCD1-1895
uuuacgacgucaaaguuuag

SEQ ID NO: 3562 - RNA, 20 nt, Artificial Sequence
  Synthetic oligonucleotide: PDCD1-2994
aggaugggaugagccccaug

SEQ ID NO: 3563 - RNA, 20 nt, Artificial Sequence
  Synthetic oligonucleotide: PDCD1-1897
aaggaugggaugagccccau

SEQ ID NO: 3564 - RNA, 20 nt, Artificial Sequence
  Synthetic oligonucleotide: PDCD1-1898
cgaguuuuccuaaggauggg

SEQ ID NO: 3565 - RNA, 20 nt, Artificial Sequence
  Synthetic oligonucleotide: PDCD1-2996
cacucgaguuuuccuaagga

SEQ ID NO: 3566 - RNA, 20 nt, Artificial Sequence
  Synthetic oligonucleotide: PDCD1-1900
ucacucgaguuuuccuaagg

SEQ ID NO: 3567 - RNA, 20 nt, Artificial Sequence
  Synthetic oligonucleotide: PDCD1-1901
guccucacucgaguuuuccu

SEQ ID NO: 3568 - RNA, 20 nt, Artificial Sequence
  Synthetic oligonucleotide: PDCD1-1902
caggcauccuugguccucac

SEQ ID NO: 3569 - RNA, 20 nt, Artificial Sequence
  Synthetic oligonucleotide: PDCD1-1903
ccgacagaaugggagugggg

SEQ ID NO: 3570 - RNA, 20 nt, Artificial Sequence
  Synthetic oligonucleotide: PDCD1-3001
aggcuccgacagaaugggag

SEQ ID NO: 3571 - RNA, 20 nt, Artificial Sequence
  Synthetic oligonucleotide: PDCD1-1905
gaggcuccgacagaauggga

SEQ ID NO: 3572 - RNA, 20 nt, Artificial Sequence
  Synthetic oligonucleotide: PDCD1-3002
cccagaggcuccgacagaau

SEQ ID NO: 3573 - RNA, 20 nt, Artificial Sequence
  Synthetic oligonucleotide: PDCD1-3003
ucccagaggcuccgacagaa

SEQ ID NO: 3574 - RNA, 20 nt, Artificial Sequence
  Synthetic oligonucleotide: PDCD1-1908
cucccagaggcuccgacaga

SEQ ID NO: 3575 - RNA, 20 nt, Artificial Sequence
  Synthetic oligonucleotide: PDCD1-1909
gaggcucccagaggcuccga

SEQ ID NO: 3576 - RNA, 20 nt, Artificial Sequence
  Synthetic oligonucleotide: PDCD1-1910
gugggcagccgggaggcucc

SEQ ID NO: 3577 - RNA, 20 nt, Artificial Sequence
  Synthetic oligonucleotide: PDCD1-3006
ggcagaggcugugggcagcc

SEQ ID NO: 3578 - RNA, 20 nt, Artificial Sequence
  Synthetic oligonucleotide: PDCD1-3007
gggcagaggcugugggcagc

SEQ ID NO: 3579 - RNA, 20 nt, Artificial Sequence
  Synthetic oligonucleotide: PDCD1-1913
ggggcagaggcugugggcag

SEQ ID NO: 3580 - RNA, 20 nt, Artificial Sequence
  Synthetic oligonucleotide: PDCD1-1914
ccccagcaggggcagaggcu

SEQ ID NO: 3581 - RNA, 20 nt, Artificial Sequence
  Synthetic oligonucleotide: PDCD1-1915
gcaccugcccccagcagggg

SEQ ID NO: 3582 - RNA, 20 nt, Artificial Sequence
  Synthetic oligonucleotide: PDCD1-3013
gccaggcaccugcccccagc

SEQ ID NO: 3583 - RNA, 20 nt, Artificial Sequence
  Synthetic oligonucleotide: PDCD1-1917
ggccaggcaccugcccccag

SEQ ID NO: 3584 - RNA, 20 nt, Artificial Sequence
  Synthetic oligonucleotide: PDCD1-1918
agggggaugggccgggaagg

SEQ ID NO: 3585 - RNA, 20 nt, Artificial Sequence
  Synthetic oligonucleotide: PDCD1-3017
ccagcgaagggggaugggcc

SEQ ID NO: 3586 - RNA, 20 nt, Artificial Sequence
  Synthetic oligonucleotide: PDCD1-3018
cccagcgaagggggaugggc

SEQ ID NO: 3587 - RNA, 20 nt, Artificial Sequence
  Synthetic oligonucleotide: PDCD1-1921
ccccagcgaagggggauggg

SEQ ID NO: 3588 - RNA, 20 nt, Artificial Sequence
  Synthetic oligonucleotide: PDCD1-1922
cugugccccagcgaaggggg

SEQ ID NO: 3589 - RNA, 20 nt, Artificial Sequence
  Synthetic oligonucleotide: PDCD1-3022
ucaccugugccccagcgaag

SEQ ID NO: 3590 - RNA, 20 nt, Artificial Sequence
  Synthetic oligonucleotide: PDCD1-3023
gucaccugugccccagcgaa

SEQ ID NO: 3591 - RNA, 20 nt, Artificial Sequence
  Synthetic oligonucleotide: PDCD1-3024
ggucaccugugccccagcga

SEQ ID NO: 3592 - RNA, 20 nt, Artificial Sequence
  Synthetic oligonucleotide: PDCD1-1926
gggucaccugugccccagcg

SEQ ID NO: 3593 - RNA, 20 nt, Artificial Sequence
  Synthetic oligonucleotide: PDCD1-1927
guagggucaccugugcccca

SEQ ID NO: 3594 - RNA, 20 nt, Artificial Sequence
  Synthetic oligonucleotide: PDCD1-1928
cauggacaguugucauucag

SEQ ID NO: 3595 - RNA, 20 nt, Artificial Sequence
  Synthetic oligonucleotide: PDCD1-1929
ugagggggagccgauuagcc

SEQ ID NO: 3596 - RNA, 20 nt, Artificial Sequence
  Synthetic oligonucleotide: PDCD1-3028
acaagguggaagcuuugagg

SEQ ID NO: 3597 - RNA, 20 nt, Artificial Sequence
  Synthetic oligonucleotide: PDCD1-3029
cacaagguggaagcuuugag

SEQ ID NO: 3598 - RNA, 20 nt, Artificial Sequence
  Synthetic oligonucleotide: PDCD1-3030
ccacaagguggaagcuuuga

SEQ ID NO: 3599 - RNA, 20 nt, Artificial Sequence
  Synthetic oligonucleotide: PDCD1-3031
uccacaagguggaagcuuug

SEQ ID NO: 3600 - RNA, 20 nt, Artificial Sequence
  Synthetic oligonucleotide: PDCD1-1934
auccacaagguggaagcuuu

SEQ ID NO: 3601 - RNA, 20 nt, Artificial Sequence
  Synthetic oligonucleotide: PDCD1-1935
ccauccacaagguggaagcu

SEQ ID NO: 3602 - RNA, 20 nt, Artificial Sequence
  Synthetic oligonucleotide: PDCD1-3032
gugugaggccauccacaagg

SEQ ID NO: 3603 - RNA, 20 nt, Artificial Sequence
  Synthetic oligonucleotide: PDCD1-1937
ggugugaggccauccacaag

SEQ ID NO: 3604 - RNA, 20 nt, Artificial Sequence
  Synthetic oligonucleotide: PDCD1-1938
ucuggaacuguggccauggu

SEQ ID NO: 3605 - RNA, 20 nt, Artificial Sequence
  Synthetic oligonucleotide: PDCD1-3037
caucacacgguggaaagauc

SEQ ID NO: 3606 - RNA, 20 nt, Artificial Sequence
  Synthetic oligonucleotide: PDCD1-1940
gcaucacacgguggaaagau

SEQ ID NO: 3607 - RNA, 20 nt, Artificial Sequence
  Synthetic oligonucleotide: PDCD1-3038
cuguugcaggcaucacacgg

SEQ ID NO: 3608 - RNA, 20 nt, Artificial Sequence
  Synthetic oligonucleotide: PDCD1-1942
gcuguugcaggcaucacacg

SEQ ID NO: 3609 - RNA, 20 nt, Artificial Sequence
  Synthetic oligonucleotide: PDCD1-3043
aagaaggucaaggcuggaag

SEQ ID NO: 3610 - RNA, 20 nt, Artificial Sequence
  Synthetic oligonucleotide: PDCD1-3044
gaagaaggucaaggcuggaa

SEQ ID NO: 3611 - RNA, 20 nt, Artificial Sequence
  Synthetic oligonucleotide: PDCD1-3045
ggaagaaggucaaggcugga

SEQ ID NO: 3612 - RNA, 20 nt, Artificial Sequence
  Synthetic oligonucleotide: PDCD1-1946
gggaagaaggucaaggcugg

SEQ ID NO: 3613 - RNA, 20 nt, Artificial Sequence
  Synthetic oligonucleotide: PDCD1-3046
ccggggaagaaggucaaggc

SEQ ID NO: 3614 - RNA, 20 nt, Artificial Sequence
  Synthetic oligonucleotide: PDCD1-1948
cccggggaagaaggucaagg

SEQ ID NO: 3615 - RNA, 20 nt, Artificial Sequence
  Synthetic oligonucleotide: PDCD1-1949
uggagggcagggccccgggg

SEQ ID NO: 3616 - RNA, 20 nt, Artificial Sequence
  Synthetic oligonucleotide: PDCD1-3049
ggcuggagggcagggccccg

SEQ ID NO: 3617 - RNA, 20 nt, Artificial Sequence
  Synthetic oligonucleotide: PDCD1-3050
gggcuggagggcagggcccc

SEQ ID NO: 3618 - RNA, 20 nt, Artificial Sequence
  Synthetic oligonucleotide: PDCD1-3051
ugggcuggagggcagggccc

SEQ ID NO: 3619 - RNA, 20 nt, Artificial Sequence
  Synthetic oligonucleotide: PDCD1-1953
gugggcuggagggcagggcc

SEQ ID NO: 3620 - RNA, 20 nt, Artificial Sequence
  Synthetic oligonucleotide: PDCD1-1954
ggcacgagugggcuggaggg

SEQ ID NO: 3621 - RNA, 20 nt, Artificial Sequence
  Synthetic oligonucleotide: PDCD1-1955
acccuggcacgagugggcug

SEQ ID NO: 3622 - RNA, 20 nt, Artificial Sequence
  Synthetic oligonucleotide: PDCD1-3056
ccacccuggcacgagugggc

SEQ ID NO: 3623 - RNA, 20 nt, Artificial Sequence
  Synthetic oligonucleotide: PDCD1-1957
cccacccuggcacgaguggg

SEQ ID NO: 3624 - RNA, 20 nt, Artificial Sequence
  Synthetic oligonucleotide: PDCD1-1958
accaccccacccuggcacga

SEQ ID NO: 3625 - RNA, 20 nt, Artificial Sequence
  Synthetic oligonucleotide: PDCD1-1959
cugaaccaccccacccuggc

SEQ ID NO: 3626 - RNA, 20 nt, Artificial Sequence
  Synthetic oligonucleotide: PDCD1-1960
aggcccaggcacuggacccc

SEQ ID NO: 3627 - RNA, 20 nt, Artificial Sequence
  Synthetic oligonucleotide: PDCD1-1961
ccgccagccaggcccaggca

SEQ ID NO: 3628 - RNA, 20 nt, Artificial Sequence
  Synthetic oligonucleotide: PDCD1-1962
agcaagccauuucacaaacg

SEQ ID NO: 3629 - RNA, 20 nt, Artificial Sequence
  Synthetic oligonucleotide: PDCD1-3065
aaugcucagcacagaauaca

SEQ ID NO: 3630 - RNA, 20 nt, Artificial Sequence
  Synthetic oligonucleotide: PDCD1-1964
aaaugcucagcacagaauac

SEQ ID NO: 3631 - RNA, 20 nt, Artificial Sequence
  Synthetic oligonucleotide: PDCD1-1965
cuguaauaaaaugcucagca

SEQ ID NO: 3632 - RNA, 17 nt, Artificial Sequence
  Synthetic oligonucleotide: PDCD1-3068
ugggcccugcuggguac

SEQ ID NO: 3633 - RNA, 17 nt, Artificial Sequence
  Synthetic oligonucleotide: PDCD1-1967
cugggcccugcugggua

SEQ ID NO: 3634 - RNA, 17 nt, Artificial Sequence
  Synthetic oligonucleotide: PDCD1-1968
agucccucugggcccug

SEQ ID NO: 3635 - RNA, 17 nt, Artificial Sequence
  Synthetic oligonucleotide: PDCD1-1969
agccuaagacagucccu

SEQ ID NO: 3636 - RNA, 17 nt, Artificial Sequence
  Synthetic oligonucleotide: PDCD1-1970
ggaugccaaggccuggg

SEQ ID NO: 3637 - RNA, 17 nt, Artificial Sequence
  Synthetic oligonucleotide: PDCD1-3077
ggggaugccaaggccug

SEQ ID NO: 3638 - RNA, 17 nt, Artificial Sequence
  Synthetic oligonucleotide: PDCD1-3078
uggggaugccaaggccu

SEQ ID NO: 3639 - RNA, 17 nt, Artificial Sequence
  Synthetic oligonucleotide: PDCD1-3079
cuggggaugccaaggcc

SEQ ID NO: 3640 - RNA, 17 nt, Artificial Sequence
  Synthetic oligonucleotide: PDCD1-1974
ccuggggaugccaaggc

SEQ ID NO: 3641 - RNA, 17 nt, Artificial Sequence
  Synthetic oligonucleotide: PDCD1-3082
ccagccagccugcaccu

SEQ ID NO: 3642 - RNA, 17 nt, Artificial Sequence
  Synthetic oligonucleotide: PDCD1-3083
cccagccagccugcacc

SEQ ID NO: 3643 - RNA, 17 nt, Artificial Sequence
  Synthetic oligonucleotide: PDCD1-1977
gcccagccagccugcac

SEQ ID NO: 3644 - RNA, 17 nt, Artificial Sequence
  Synthetic oligonucleotide: PDCD1-1978
gugaccacagcccgcuc

SEQ ID NO: 3645 - RNA, 17 nt, Artificial Sequence
  Synthetic oligonucleotide: PDCD1-1979
cugggcugcccgugacc

SEQ ID NO: 3646 - RNA, 17 nt, Artificial Sequence
  Synthetic oligonucleotide: PDCD1-1980
agagagggagccucuuc

SEQ ID NO: 3647 - RNA, 17 nt, Artificial Sequence
  Synthetic oligonucleotide: PDCD1-3091
cccggaucgaggagaga

SEQ ID NO: 3648 - RNA, 17 nt, Artificial Sequence
  Synthetic oligonucleotide: PDCD1-3092
ucccggaucgaggagag

SEQ ID NO: 3649 - RNA, 17 nt, Artificial Sequence
  Synthetic oligonucleotide: PDCD1-1983
cucccggaucgaggaga

SEQ ID NO: 3650 - RNA, 17 nt, Artificial Sequence
  Synthetic oligonucleotide: PDCD1-1984
cucucccggaucgagga

SEQ ID NO: 3651 - RNA, 17 nt, Artificial Sequence
  Synthetic oligonucleotide: PDCD1-1985
cacucucccggaucgag

SEQ ID NO: 3652 - RNA, 17 nt, Artificial Sequence
  Synthetic oligonucleotide: PDCD1-3093
cucacucucccggaucg

SEQ ID NO: 3653 - RNA, 17 nt, Artificial Sequence
  Synthetic oligonucleotide: PDCD1-1987
ccucacucucccggauc

SEQ ID NO: 3654 - RNA, 17 nt, Artificial Sequence
  Synthetic oligonucleotide: PDCD1-1988
ggccucacucucccgga

SEQ ID NO: 3655 - RNA, 17 nt, Artificial Sequence
  Synthetic oligonucleotide: PDCD1-1989
gccuuggccucacucuc

SEQ ID NO: 3656 - RNA, 17 nt, Artificial Sequence
  Synthetic oligonucleotide: PDCD1-3097
guucagaccauccgugg

SEQ ID NO: 3657 - RNA, 17 nt, Artificial Sequence
  Synthetic oligonucleotide: PDCD1-3098
uguucagaccauccgug

SEQ ID NO: 3658 - RNA, 17 nt, Artificial Sequence
  Synthetic oligonucleotide: PDCD1-3099
cuguucagaccauccgu

SEQ ID NO: 3659 - RNA, 17 nt, Artificial Sequence
  Synthetic oligonucleotide: PDCD1-3100
ccuguucagaccauccg

SEQ ID NO: 3660 - RNA, 17 nt, Artificial Sequence
  Synthetic oligonucleotide: PDCD1-1994
cccuguucagaccaucc

SEQ ID NO: 3661 - RNA, 17 nt, Artificial Sequence
  Synthetic oligonucleotide: PDCD1-1995
agauuccagggcucucc

SEQ ID NO: 3662 - RNA, 17 nt, Artificial Sequence
  Synthetic oligonucleotide: PDCD1-1996
ggucucugcccagauuc

SEQ ID NO: 3663 - RNA, 17 nt, Artificial Sequence
  Synthetic oligonucleotide: PDCD1-1997
guggggauugugcccgc

SEQ ID NO: 3664 - RNA, 17 nt, Artificial Sequence
  Synthetic oligonucleotide: PDCD1-3106
caggaucccuccugggu

SEQ ID NO: 3665 - RNA, 17 nt, Artificial Sequence
  Synthetic oligonucleotide: PDCD1-3107
ccaggaucccuccuggg

SEQ ID NO: 3666 - RNA, 17 nt, Artificial Sequence
  Synthetic oligonucleotide: PDCD1-2000
uccaggaucccuccugg

SEQ ID NO: 3667 - RNA, 17 nt, Artificial Sequence
  Synthetic oligonucleotide: PDCD1-2001
ugucuccaggaucccuc

SEQ ID NO: 3668 - RNA, 17 nt, Artificial Sequence
  Synthetic oligonucleotide: PDCD1-2002
gacaguucuucugucuc

SEQ ID NO: 3669 - RNA, 17 nt, Artificial Sequence
  Synthetic oligonucleotide: PDCD1-2003
aguguaccuguucgagu

SEQ ID NO: 3670 - RNA, 17 nt, Artificial Sequence
  Synthetic oligonucleotide: PDCD1-2004
aaaguguaccuguucga

SEQ ID NO: 3671 - RNA, 17 nt, Artificial Sequence
  Synthetic oligonucleotide: PDCD1-2005
auccaaaguguaccugu

SEQ ID NO: 3672 - RNA, 17 nt, Artificial Sequence
  Synthetic oligonucleotide: PDCD1-2006
acgacgucaaaguuuag

SEQ ID NO: 3673 - RNA, 17 nt, Artificial Sequence
  Synthetic oligonucleotide: PDCD1-3115
augggaugagccccaug

SEQ ID NO: 3674 - RNA, 17 nt, Artificial Sequence
  Synthetic oligonucleotide: PDCD1-2008
gaugggaugagccccau

SEQ ID NO: 3675 - RNA, 17 nt, Artificial Sequence
  Synthetic oligonucleotide: PDCD1-2009
guuuuccuaaggauggg

SEQ ID NO: 3676 - RNA, 17 nt, Artificial Sequence
  Synthetic oligonucleotide: PDCD1-3117
ucgaguuuuccuaagga

SEQ ID NO: 3677 - RNA, 17 nt, Artificial Sequence
  Synthetic oligonucleotide: PDCD1-2011
cucgaguuuuccuaagg

SEQ ID NO: 3678 - RNA, 17 nt, Artificial Sequence
  Synthetic oligonucleotide: PDCD1-2012
cucacucgaguuuuccu

SEQ ID NO: 3679 - RNA, 17 nt, Artificial Sequence
  Synthetic oligonucleotide: PDCD1-2013
gcauccuugguccucac

SEQ ID NO: 3680 - RNA, 17 nt, Artificial Sequence
  Synthetic oligonucleotide: PDCD1-2014
acagaaugggagugggg

SEQ ID NO: 3681 - RNA, 17 nt, Artificial Sequence
  Synthetic oligonucleotide: PDCD1-3122
cuccgacagaaugggag

SEQ ID NO: 3682 - RNA, 17 nt, Artificial Sequence
  Synthetic oligonucleotide: PDCD1-2016
gcuccgacagaauggga

SEQ ID NO: 3683 - RNA, 17 nt, Artificial Sequence
  Synthetic oligonucleotide: PDCD1-3123
agaggcuccgacagaau

SEQ ID NO: 3684 - RNA, 17 nt, Artificial Sequence
  Synthetic oligonucleotide: PDCD1-3124
cagaggcuccgacagaa

SEQ ID NO: 3685 - RNA, 17 nt, Artificial Sequence
  Synthetic oligonucleotide: PDCD1-2019
ccagaggcuccgacaga

SEQ ID NO: 3686 - RNA, 17 nt, Artificial Sequence
  Synthetic oligonucleotide: PDCD1-2020
gcucccagaggcuccga

SEQ ID NO: 3687 - RNA, 17 nt, Artificial Sequence
  Synthetic oligonucleotide: PDCD1-2021
ggcagccgggaggcucc

SEQ ID NO: 3688 - RNA, 17 nt, Artificial Sequence
  Synthetic oligonucleotide: PDCD1-3127
agaggcugugggcagcc

SEQ ID NO: 3689 - RNA, 17 nt, Artificial Sequence
  Synthetic oligonucleotide: PDCD1-3128
cagaggcugugggcagc

SEQ ID NO: 3690 - RNA, 17 nt, Artificial Sequence
  Synthetic oligonucleotide: PDCD1-2024
gcagaggcugugggcag

SEQ ID NO: 3691 - RNA, 17 nt, Artificial Sequence
  Synthetic oligonucleotide: PDCD1-2025
cagcaggggcagaggcu

SEQ ID NO: 3692 - RNA, 17 nt, Artificial Sequence
  Synthetic oligonucleotide: PDCD1-2026
ccugcccccagcagggg

SEQ ID NO: 3693 - RNA, 17 nt, Artificial Sequence
  Synthetic oligonucleotide: PDCD1-3134
aggcaccugcccccagc

SEQ ID NO: 3694 - RNA, 17 nt, Artificial Sequence
  Synthetic oligonucleotide: PDCD1-2028
caggcaccugcccccag

SEQ ID NO: 3695 - RNA, 17 nt, Artificial Sequence
  Synthetic oligonucleotide: PDCD1-2029
gggaugggccgggaagg

SEQ ID NO: 3696 - RNA, 17 nt, Artificial Sequence
  Synthetic oligonucleotide: PDCD1-3138
gcgaagggggaugggcc

SEQ ID NO: 3697 - RNA, 17 nt, Artificial Sequence
  Synthetic oligonucleotide: PDCD1-3139
agcgaagggggaugggc

SEQ ID NO: 3698 - RNA, 17 nt, Artificial Sequence
  Synthetic oligonucleotide: PDCD1-2032
cagcgaagggggauggg

SEQ ID NO: 3699 - RNA, 17 nt, Artificial Sequence
  Synthetic oligonucleotide: PDCD1-2033
ugccccagcgaaggggg

SEQ ID NO: 3700 - RNA, 17 nt, Artificial Sequence
  Synthetic oligonucleotide: PDCD1-3143
ccugugccccagcgaag

SEQ ID NO: 3701 - RNA, 17 nt, Artificial Sequence
  Synthetic oligonucleotide: PDCD1-3144
accugugccccagcgaa

SEQ ID NO: 3702 - RNA, 17 nt, Artificial Sequence
  Synthetic oligonucleotide: PDCD1-3145
caccugugccccagcga

SEQ ID NO: 3703 - RNA, 17 nt, Artificial Sequence
  Synthetic oligonucleotide: PDCD1-2037
ucaccugugccccagcg

SEQ ID NO: 3704 - RNA, 17 nt, Artificial Sequence
  Synthetic oligonucleotide: PDCD1-2038
gggucaccugugcccca

SEQ ID NO: 3705 - RNA, 17 nt, Artificial Sequence
  Synthetic oligonucleotide: PDCD1-2039
ggacaguugucauucag

SEQ ID NO: 3706 - RNA, 17 nt, Artificial Sequence
  Synthetic oligonucleotide: PDCD1-2040
gggggagccgauuagcc

SEQ ID NO: 3707 - RNA, 17 nt, Artificial Sequence
  Synthetic oligonucleotide: PDCD1-3149
agguggaagcuuugagg

SEQ ID NO: 3708 - RNA, 17 nt, Artificial Sequence
  Synthetic oligonucleotide: PDCD1-3150
aagguggaagcuuugag

SEQ ID NO: 3709 - RNA, 17 nt, Artificial Sequence
  Synthetic oligonucleotide: PDCD1-3151
caagguggaagcuuuga

SEQ ID NO: 3710 - RNA, 17 nt, Artificial Sequence
  Synthetic oligonucleotide: PDCD1-3152
acaagguggaagcuuug

SEQ ID NO: 3711 - RNA, 17 nt, Artificial Sequence
  Synthetic oligonucleotide: PDCD1-2045
cacaagguggaagcuuu

SEQ ID NO: 3712 - RNA, 17 nt, Artificial Sequence
  Synthetic oligonucleotide: PDCD1-2046
uccacaagguggaagcu

SEQ ID NO: 3713 - RNA, 17 nt, Artificial Sequence
  Synthetic oligonucleotide: PDCD1-3153
ugaggccauccacaagg

SEQ ID NO: 3714 - RNA, 17 nt, Artificial Sequence
  Synthetic oligonucleotide: PDCD1-2048
gugaggccauccacaag

SEQ ID NO: 3715 - RNA, 17 nt, Artificial Sequence
  Synthetic oligonucleotide: PDCD1-2049
ggaacuguggccauggu

SEQ ID NO: 3716 - RNA, 17 nt, Artificial Sequence
  Synthetic oligonucleotide: PDCD1-3158
cacacgguggaaagauc

SEQ ID NO: 3717 - RNA, 17 nt, Artificial Sequence
  Synthetic oligonucleotide: PDCD1-2051
ucacacgguggaaagau

SEQ ID NO: 3718 - RNA, 17 nt, Artificial Sequence
  Synthetic oligonucleotide: PDCD1-3159
uugcaggcaucacacgg

SEQ ID NO: 3719 - RNA, 17 nt, Artificial Sequence
  Synthetic oligonucleotide: PDCD1-2053
guugcaggcaucacacg

SEQ ID NO: 3720 - RNA, 17 nt, Artificial Sequence
  Synthetic oligonucleotide: PDCD1-3164
aaggucaaggcuggaag

SEQ ID NO: 3721 - RNA, 17 nt, Artificial Sequence
  Synthetic oligonucleotide: PDCD1-3165
gaaggucaaggcuggaa

SEQ ID NO: 3722 - RNA, 17 nt, Artificial Sequence
  Synthetic oligonucleotide: PDCD1-3166
agaaggucaaggcugga

SEQ ID NO: 3723 - RNA, 17 nt, Artificial Sequence
  Synthetic oligonucleotide: PDCD1-2057
aagaaggucaaggcugg

SEQ ID NO: 3724 - RNA, 17 nt, Artificial Sequence
  Synthetic oligonucleotide: PDCD1-3167
gggaagaaggucaaggc

SEQ ID NO: 3725 - RNA, 17 nt, Artificial Sequence
  Synthetic oligonucleotide: PDCD1-2059
ggggaagaaggucaagg

SEQ ID NO: 3726 - RNA, 17 nt, Artificial Sequence
  Synthetic oligonucleotide: PDCD1-2060
agggcagggccccgggg

SEQ ID NO: 3727 - RNA, 17 nt, Artificial Sequence
  Synthetic oligonucleotide: PDCD1-3170
uggagggcagggccccg

SEQ ID NO: 3728 - RNA, 17 nt, Artificial Sequence
  Synthetic oligonucleotide: PDCD1-3171
cuggagggcagggcccc

SEQ ID NO: 3729 - RNA, 17 nt, Artificial Sequence
  Synthetic oligonucleotide: PDCD1-3172
gcuggagggcagggccc

SEQ ID NO: 3730 - RNA, 17 nt, Artificial Sequence
  Synthetic oligonucleotide: PDCD1-2064
ggcuggagggcagggcc

SEQ ID NO: 3731 - RNA, 17 nt, Artificial Sequence
  Synthetic oligonucleotide: PDCD1-2065
acgagugggcuggaggg

SEQ ID NO: 3732 - RNA, 17 nt, Artificial Sequence
  Synthetic oligonucleotide: PDCD1-2066
cuggcacgagugggcug

SEQ ID NO: 3733 - RNA, 17 nt, Artificial Sequence
  Synthetic oligonucleotide: PDCD1-3177
cccuggcacgagugggc

SEQ ID NO: 3734 - RNA, 17 nt, Artificial Sequence
  Synthetic oligonucleotide: PDCD1-2068
acccuggcacgaguggg

SEQ ID NO: 3735 - RNA, 17 nt, Artificial Sequence
  Synthetic oligonucleotide: PDCD1-2069
accccacccuggcacga

SEQ ID NO: 3736 - RNA, 17 nt, Artificial Sequence
  Synthetic oligonucleotide: PDCD1-2070
aaccaccccacccuggc

SEQ ID NO: 3737 - RNA, 17 nt, Artificial Sequence
  Synthetic oligonucleotide: PDCD1-2071
cccaggcacuggacccc

SEQ ID NO: 3738 - RNA, 17 nt, Artificial Sequence
  Synthetic oligonucleotide: PDCD1-2072
ccagccaggcccaggca

SEQ ID NO: 3739 - RNA, 17 nt, Artificial Sequence
  Synthetic oligonucleotide: PDCD1-2073
aagccauuucacaaacg

SEQ ID NO: 3740 - RNA, 17 nt, Artificial Sequence
  Synthetic oligonucleotide: PDCD1-3186
gcucagcacagaauaca

SEQ ID NO: 3741 - RNA, 17 nt, Artificial Sequence
  Synthetic oligonucleotide: PDCD1-2075
ugcucagcacagaauac

SEQ ID NO: 3742 - RNA, 17 nt, Artificial Sequence
  Synthetic oligonucleotide: PDCD1-2076
uaauaaaaugcucagca

SEQ ID NO: 3743 - RNA, 20 nt, Artificial Sequence
  Synthetic oligonucleotide: PDCD1-2077
ugugcccgccugggucucug

SEQ ID NO: 3744 - RNA, 20 nt, Artificial Sequence
  Synthetic oligonucleotide: PDCD1-2986
ucuccaggaucccuccuggg

SEQ ID NO: 3745 - RNA, 20 nt, Artificial Sequence
  Synthetic oligonucleotide: PDCD1-2079
agguggaagcuuugaggggg

SEQ ID NO: 3746 - RNA, 17 nt, Artificial Sequence
  Synthetic oligonucleotide: PDCD1-2080
gcccgccugggucucug

SEQ ID NO: 3747 - RNA, 17 nt, Artificial Sequence
  Synthetic oligonucleotide: PDCD1-3107
ccaggaucccuccuggg

SEQ ID NO: 3748 - RNA, 17 nt, Artificial Sequence
  Synthetic oligonucleotide: PDCD1-2082
uggaagcuuugaggggg

SEQ ID NO: 3749 - RNA, 20 nt, Artificial Sequence
  Synthetic oligonucleotide: Ptpn6-1
gguuucaccgagaccucagu

SEQ ID NO: 3750 - RNA, 20 nt, Artificial Sequence
  Synthetic oligonucleotide: Ptpn6-2
gggaucaggugacccauauu

SEQ ID NO: 3751 - RNA, 20 nt, Artificial Sequence
  Synthetic oligonucleotide: Ptpn6-3
guuugcgacucugacagagc

SEQ ID NO: 3752 - RNA, 20 nt, Artificial Sequence
  Synthetic oligonucleotide: Ptpn6-4
gaguacuacacucagcagca

SEQ ID NO: 3753 - RNA, 20 nt, Artificial Sequence
  Synthetic oligonucleotide: Ptpn6-5
gugggaucggagcaguucag

SEQ ID NO: 3754 - RNA, 20 nt, Artificial Sequence
  Synthetic oligonucleotide: Ptpn6-6
gucacccugguucuugcgac

SEQ ID NO: 3755 - RNA, 20 nt, Artificial Sequence
  Synthetic oligonucleotide: Ptpn6-7
ggacaccucggcccuugagc

SEQ ID NO: 3756 - RNA, 17 nt, Artificial Sequence
  Synthetic oligonucleotide: Ptpn6-8
gcccagucgcaagaacc

SEQ ID NO: 3757 - RNA, 17 nt, Artificial Sequence
  Synthetic oligonucleotide: Ptpn6-9
guccugcaggaccgcga

SEQ ID NO: 3758 - RNA, 17 nt, Artificial Sequence
  Synthetic oligonucleotide: Ptpn6-10
gaaagcacgaagucucc

SEQ ID NO: 3759 - RNA, 17 nt, Artificial Sequence
  Synthetic oligonucleotide: Ptpn6-11
ggaucggagcaguucag

SEQ ID NO: 3760 - RNA, 17 nt, Artificial Sequence
  Synthetic oligonucleotide: Ptpn6-12
gaucggagcaguucagc

SEQ ID NO: 3761 - RNA, 17 nt, Artificial Sequence
  Synthetic oligonucleotide: Ptpn6-13
ggaugauggugccgucg

SEQ ID NO: 3762 - RNA, 17 nt, Artificial Sequence
  Synthetic oligonucleotide: Ptpn6-14
guucuggauccgaauau

SEQ ID NO: 3763 - RNA, 20 nt, Artificial Sequence
  Synthetic oligonucleotide: Ptpn6-15
ugguuucaccgagaccucag

SEQ ID NO: 3764 - RNA, 20 nt, Artificial Sequence
  Synthetic oligonucleotide: Ptpn6-16
ucggcccagucgcaagaacc

SEQ ID NO: 3765 - RNA, 20 nt, Artificial Sequence
  Synthetic oligonucleotide: Ptpn6-17
cggcccagucgcaagaacca

SEQ ID NO: 3766 - RNA, 20 nt, Artificial Sequence
  Synthetic oligonucleotide: Ptpn6-18
uaccauggccacaugucugg

SEQ ID NO: 3767 - RNA, 20 nt, Artificial Sequence
  Synthetic oligonucleotide: Ptpn6-19
cucacgcacaagaaacgucc

SEQ ID NO: 3768 - RNA, 20 nt, Artificial Sequence
  Synthetic oligonucleotide: Ptpn6-20
ucacgcacaagaaacgucca

SEQ ID NO: 3769 - RNA, 20 nt, Artificial Sequence
  Synthetic oligonucleotide: Ptpn6-21
aaacguccagggcucgcccu

SEQ ID NO: 3770 - RNA, 20 nt, Artificial Sequence
  Synthetic oligonucleotide: Ptpn6-22
ugggaucggagcaguucagc

SEQ ID NO: 3771 - RNA, 20 nt, Artificial Sequence
  Synthetic oligonucleotide: Ptpn6-23
aguucagcggguacuugagg

SEQ ID NO: 3772 - RNA, 20 nt, Artificial Sequence
  Synthetic oligonucleotide: Ptpn6-24
cggguacuugagguggauga

SEQ ID NO: 3773 - RNA, 20 nt, Artificial Sequence
  Synthetic oligonucleotide: Ptpn6-25
uggugccgucgcgguccugc

SEQ ID NO: 3774 - RNA, 20 nt, Artificial Sequence
  Synthetic oligonucleotide: Ptpn6-26
cugaguucuggauccgaaua

SEQ ID NO: 3775 - RNA, 20 nt, Artificial Sequence
  Synthetic oligonucleotide: Ptpn6-27
ucacccugguucuugcgacu

SEQ ID NO: 3776 - RNA, 20 nt, Artificial Sequence
  Synthetic oligonucleotide: Ptpn6-28
ucuugcgacugggccgagcc

SEQ ID NO: 3777 - RNA, 17 nt, Artificial Sequence
  Synthetic oligonucleotide: Ptpn6-29
uuucaccgagaccucag

SEQ ID NO: 3778 - RNA, 17 nt, Artificial Sequence
  Synthetic oligonucleotide: Ptpn6-30
uucaccgagaccucagu

SEQ ID NO: 3779 - RNA, 17 nt, Artificial Sequence
  Synthetic oligonucleotide: Ptpn6-31
acccugcucaagggccg

SEQ ID NO: 3780 - RNA, 17 nt, Artificial Sequence
  Synthetic oligonucleotide: Ptpn6-32
uguccacgguagcuucc

SEQ ID NO: 3781 - RNA, 17 nt, Artificial Sequence
  Synthetic oligonucleotide: Ptpn6-33
acgguagcuuccuggcu

SEQ ID NO: 3782 - RNA, 17 nt, Artificial Sequence
  Synthetic oligonucleotide: Ptpn6-34
cccagucgcaagaacca

SEQ ID NO: 3783 - RNA, 17 nt, Artificial Sequence
  Synthetic oligonucleotide: Ptpn6-35
aucaggugacccauauu

SEQ ID NO: 3784 - RNA, 17 nt, Artificial Sequence
  Synthetic oligonucleotide: Ptpn6-36
auucggauccagaacuc

SEQ ID NO: 3785 - RNA, 17 nt, Artificial Sequence
  Synthetic oligonucleotide: Ptpn6-37
uucggauccagaacuca

SEQ ID NO: 3786 - RNA, 17 nt, Artificial Sequence
  Synthetic oligonucleotide: Ptpn6-38
ucggauccagaacucag

SEQ ID NO: 3787 - RNA, 17 nt, Artificial Sequence
  Synthetic oligonucleotide: Ptpn6-39
uucuaugaccuguaugg

SEQ ID NO: 3788 - RNA, 17 nt, Artificial Sequence
  Synthetic oligonucleotide: Ptpn6-40
ucuaugaccuguaugga

SEQ ID NO: 3789 - RNA, 17 nt, Artificial Sequence
  Synthetic oligonucleotide: Ptpn6-41
cuaugaccuguauggag

SEQ ID NO: 3790 - RNA, 17 nt, Artificial Sequence
  Synthetic oligonucleotide: Ptpn6-42
ugcgacucugacagagc

SEQ ID NO: 3791 - RNA, 17 nt, Artificial Sequence
  Synthetic oligonucleotide: Ptpn6-43
ccacaugucuggcgggc

SEQ ID NO: 3792 - RNA, 17 nt, Artificial Sequence
  Synthetic oligonucleotide: Ptpn6-44
acgcacaagaaacgucc

SEQ ID NO: 3793 - RNA, 17 nt, Artificial Sequence
  Synthetic oligonucleotide: Ptpn6-45
cgcacaagaaacgucca

SEQ ID NO: 3794 - RNA, 17 nt, Artificial Sequence
  Synthetic oligonucleotide: Ptpn6-46
cguccagggcucgcccu

SEQ ID NO: 3795 - RNA, 17 nt, Artificial Sequence
  Synthetic oligonucleotide: Ptpn6-47
ccugcccgccagacaug

SEQ ID NO: 3796 - RNA, 17 nt, Artificial Sequence
  Synthetic oligonucleotide: Ptpn6-48
cgccagacauguggcca

SEQ ID NO: 3797 - RNA, 17 nt, Artificial Sequence
  Synthetic oligonucleotide: Ptpn6-49
aguucagcggguacuug

SEQ ID NO: 3798 - RNA, 17 nt, Artificial Sequence
  Synthetic oligonucleotide: Ptpn6-50
ucagcggguacuugagg

SEQ ID NO: 3799 - RNA, 17 nt, Artificial Sequence
  Synthetic oligonucleotide: Ptpn6-51
ugccgucgcgguccugc

SEQ ID NO: 3800 - RNA, 17 nt, Artificial Sequence
  Synthetic oligonucleotide: Ptpn6-52
aguucuggauccgaaua

SEQ ID NO: 3801 - RNA, 17 nt, Artificial Sequence
  Synthetic oligonucleotide: Ptpn6-53
acccugguucuugcgac

SEQ ID NO: 3802 - RNA, 17 nt, Artificial Sequence
  Synthetic oligonucleotide: Ptpn6-54
cccugguucuugcgacu

SEQ ID NO: 3803 - RNA, 17 nt, Artificial Sequence
  Synthetic oligonucleotide: Ptpn6-55
ugcgacugggccgagcc

SEQ ID NO: 3804 - RNA, 17 nt, Artificial Sequence
  Synthetic oligonucleotide: Ptpn6-56
agcuaccguggacaccu

SEQ ID NO: 3805 - RNA, 17 nt, Artificial Sequence
  Synthetic oligonucleotide: Ptpn6-57
caccucggcccuugagc

SEQ ID NO: 3806 - RNA, 17 nt, Artificial Sequence
  Synthetic oligonucleotide: Ptpn6-58
accucggcccuugagca

SEQ ID NO: 3807 - RNA, 20 nt, Artificial Sequence
  Synthetic oligonucleotide: Ptpn6-59
ggggauuucuaugaccugua

SEQ ID NO: 3808 - RNA, 20 nt, Artificial Sequence
  Synthetic oligonucleotide: Ptpn6-60
ggaugcagagacccugcuca

SEQ ID NO: 3809 - RNA, 20 nt, Artificial Sequence
  Synthetic oligonucleotide: Ptpn6-61
gaugcagagacccugcucaa

SEQ ID NO: 3810 - RNA, 20 nt, Artificial Sequence
  Synthetic oligonucleotide: Ptpn6-62
gagacccugcucaagggccg

SEQ ID NO: 3811 - RNA, 20 nt, Artificial Sequence
  Synthetic oligonucleotide: Ptpn6-63
gauuucuaugaccuguaugg

SEQ ID NO: 3812 - RNA, 20 nt, Artificial Sequence
  Synthetic oligonucleotide: Ptpn6-64
ggaguacuacacucagcagc

SEQ ID NO: 3813 - RNA, 20 nt, Artificial Sequence
  Synthetic oligonucleotide: Ptpn6-65
gguguccugcaggaccgcga

SEQ ID NO: 3814 - RNA, 20 nt, Artificial Sequence
  Synthetic oligonucleotide: Ptpn6-66
gcaggcagagacgcugcugc

SEQ ID NO: 3815 - RNA, 20 nt, Artificial Sequence
  Synthetic oligonucleotide: Ptpn6-67
gagacgcugcugcaggccaa

SEQ ID NO: 3816 - RNA, 20 nt, Artificial Sequence
  Synthetic oligonucleotide: Ptpn6-68
gaccagcccaaggcuggccc

SEQ ID NO: 3817 - RNA, 20 nt, Artificial Sequence
  Synthetic oligonucleotide: Ptpn6-69
gugacccugagcggggagcc

SEQ ID NO: 3818 - RNA, 20 nt, Artificial Sequence
  Synthetic oligonucleotide: Ptpn6-70
ggggagccugggccagccuu

SEQ ID NO: 3819 - RNA, 20 nt, Artificial Sequence
  Synthetic oligonucleotide: Ptpn6-71
gcccgccagacauguggcca

SEQ ID NO: 3820 - RNA, 20 nt, Artificial Sequence
  Synthetic oligonucleotide: Ptpn6-72
gguggaugauggugccgucg

SEQ ID NO: 3821 - RNA, 20 nt, Artificial Sequence
  Synthetic oligonucleotide: Ptpn6-73
gccgagccaggaagcuaccg

SEQ ID NO: 3822 - RNA, 20 nt, Artificial Sequence
  Synthetic oligonucleotide: Ptpn6-74
ggaagcuaccguggacaccu

SEQ ID NO: 3823 - RNA, 20 nt, Artificial Sequence
  Synthetic oligonucleotide: Ptpn6-75
gacaccucggcccuugagca

SEQ ID NO: 3824 - RNA, 17 nt, Artificial Sequence
  Synthetic oligonucleotide: Ptpn6-76
gcagagacccugcucaa

SEQ ID NO: 3825 - RNA, 17 nt, Artificial Sequence
  Synthetic oligonucleotide: Ptpn6-77
gauuucuaugaccugua

SEQ ID NO: 3826 - RNA, 17 nt, Artificial Sequence
  Synthetic oligonucleotide: Ptpn6-78
gacucugacagagcugg

SEQ ID NO: 3827 - RNA, 17 nt, Artificial Sequence
  Synthetic oligonucleotide: Ptpn6-79
guacuacacucagcagc

SEQ ID NO: 3828 - RNA, 17 nt, Artificial Sequence
  Synthetic oligonucleotide: Ptpn6-80
gcagcaggguguccugc

SEQ ID NO: 3829 - RNA, 17 nt, Artificial Sequence
  Synthetic oligonucleotide: Ptpn6-81
ggcagagacgcugcugc

SEQ ID NO: 3830 - RNA, 17 nt, Artificial Sequence
  Synthetic oligonucleotide: Ptpn6-82
gacgcugcugcaggcca

SEQ ID NO: 3831 - RNA, 17 nt, Artificial Sequence
  Synthetic oligonucleotide: Ptpn6-83
gagagccucagccagcc

SEQ ID NO: 3832 - RNA, 17 nt, Artificial Sequence
  Synthetic oligonucleotide: Ptpn6-84
gcucagugaccagccca

SEQ ID NO: 3833 - RNA, 17 nt, Artificial Sequence
  Synthetic oligonucleotide: Ptpn6-85
gcccaggcuccccgcuc

SEQ ID NO: 3834 - RNA, 17 nt, Artificial Sequence
  Synthetic oligonucleotide: Ptpn6-86
ggagccugggccagccu

SEQ ID NO: 3835 - RNA, 17 nt, Artificial Sequence
  Synthetic oligonucleotide: Ptpn6-87
gagccugggccagccuu

SEQ ID NO: 3836 - RNA, 17 nt, Artificial Sequence
  Synthetic oligonucleotide: Ptpn6-88
gcacgaagucuccaggc

SEQ ID NO: 3837 - RNA, 17 nt, Artificial Sequence
  Synthetic oligonucleotide: Ptpn6-89
guacuugagguggauga

SEQ ID NO: 3838 - RNA, 17 nt, Artificial Sequence
  Synthetic oligonucleotide: Ptpn6-90
gagccaggaagcuaccg

SEQ ID NO: 3839 - RNA, 20 nt, Artificial Sequence
  Synthetic oligonucleotide: Ptpn6-91
ucaccgagaccucagugggc

SEQ ID NO: 3840 - RNA, 20 nt, Artificial Sequence
  Synthetic oligonucleotide: Ptpn6-92
cucaagggccgaggugucca

SEQ ID NO: 3841 - RNA, 20 nt, Artificial Sequence
  Synthetic oligonucleotide: Ptpn6-93
agguguccacgguagcuucc

SEQ ID NO: 3842 - RNA, 20 nt, Artificial Sequence
  Synthetic oligonucleotide: Ptpn6-94
uccacgguagcuuccuggcu

SEQ ID NO: 3843 - RNA, 20 nt, Artificial Sequence
  Synthetic oligonucleotide: Ptpn6-95
cauauucggauccagaacuc

SEQ ID NO: 3844 - RNA, 20 nt, Artificial Sequence
  Synthetic oligonucleotide: Ptpn6-96
auauucggauccagaacuca

SEQ ID NO: 3845 - RNA, 20 nt, Artificial Sequence
  Synthetic oligonucleotide: Ptpn6-97
uauucggauccagaacucag

SEQ ID NO: 3846 - RNA, 20 nt, Artificial Sequence
  Synthetic oligonucleotide: Ptpn6-98
auuucuaugaccuguaugga

SEQ ID NO: 3847 - RNA, 20 nt, Artificial Sequence
  Synthetic oligonucleotide: Ptpn6-99
uuucuaugaccuguauggag

SEQ ID NO: 3848 - RNA, 20 nt, Artificial Sequence
  Synthetic oligonucleotide: Ptpn6-100
ugcgacucugacagagcugg

SEQ ID NO: 3849 - RNA, 20 nt, Artificial Sequence
  Synthetic oligonucleotide: Ptpn6-101
ucagcagcaggguguccugc

SEQ ID NO: 3850 - RNA, 20 nt, Artificial Sequence
  Synthetic oligonucleotide: Ptpn6-102
ugguaccauggccacauguc

SEQ ID NO: 3851 - RNA, 20 nt, Artificial Sequence
  Synthetic oligonucleotide: Ptpn6-103
accauggccacaugucuggc

SEQ ID NO: 3852 - RNA, 20 nt, Artificial Sequence
  Synthetic oligonucleotide: Ptpn6-104
uggccacaugucuggcgggc

SEQ ID NO: 3853 - RNA, 20 nt, Artificial Sequence
  Synthetic oligonucleotide: Ptpn6-105
agagacgcugcugcaggcca

SEQ ID NO: 3854 - RNA, 20 nt, Artificial Sequence
  Synthetic oligonucleotide: Ptpn6-106
ugcaggccaagggcgagccc

SEQ ID NO: 3855 - RNA, 20 nt, Artificial Sequence
  Synthetic oligonucleotide: Ptpn6-107
cgugagagccucagccagcc

SEQ ID NO: 3856 - RNA, 20 nt, Artificial Sequence
  Synthetic oligonucleotide: Ptpn6-108
ugugcucagugaccagccca

SEQ ID NO: 3857 - RNA, 20 nt, Artificial Sequence
  Synthetic oligonucleotide: Ptpn6-109
cucagugaccagcccaaggc

SEQ ID NO: 3858 - RNA, 20 nt, Artificial Sequence
  Synthetic oligonucleotide: Ptpn6-110
cuggcccaggcuccccgcuc

SEQ ID NO: 3859 - RNA, 20 nt, Artificial Sequence
  Synthetic oligonucleotide: Ptpn6-111
uggcccaggcuccccgcuca

SEQ ID NO: 3860 - RNA, 20 nt, Artificial Sequence
  Synthetic oligonucleotide: Ptpn6-112
ugacccugagcggggagccu

SEQ ID NO: 3861 - RNA, 20 nt, Artificial Sequence
  Synthetic oligonucleotide: Ptpn6-113
cggggagccugggccagccu

SEQ ID NO: 3862 - RNA, 20 nt, Artificial Sequence
  Synthetic oligonucleotide: Ptpn6-114
agccugggccagccuugggc

SEQ ID NO: 3863 - RNA, 20 nt, Artificial Sequence
  Synthetic oligonucleotide: Ptpn6-115
acagaaagcacgaagucucc

SEQ ID NO: 3864 - RNA, 20 nt, Artificial Sequence
  Synthetic oligonucleotide: Ptpn6-116
aaagcacgaagucuccaggc

SEQ ID NO: 3865 - RNA, 20 nt, Artificial Sequence
  Synthetic oligonucleotide: Ptpn6-117
cgaagucuccaggcuggcug

SEQ ID NO: 3866 - RNA, 20 nt, Artificial Sequence
  Synthetic oligonucleotide: Ptpn6-118
cugccugcccgccagacaug

SEQ ID NO: 3867 - RNA, 20 nt, Artificial Sequence
  Synthetic oligonucleotide: Ptpn6-119
agcaguucagcggguacuug

SEQ ID NO: 3868 - RNA, 20 nt, Artificial Sequence
  Synthetic oligonucleotide: Ptpn6-120
caaacuucuccccuccauac

SEQ ID NO: 3869 - RNA, 20 nt, Artificial Sequence
  Synthetic oligonucleotide: Ptpn6-121
cauagaaauccccugaguuc

SEQ ID NO: 3870 - RNA, 20 nt, Artificial Sequence
  Synthetic oligonucleotide: Ptpn6-122
ugaguucuggauccgaauau

SEQ ID NO: 3871 - RNA, 20 nt, Artificial Sequence
  Synthetic oligonucleotide: Ptpn6-123
cggagagcgagaagucaccc

SEQ ID NO: 3872 - RNA, 20 nt, Artificial Sequence
  Synthetic oligonucleotide: Ptpn6-124
ucucugcauccagcccacug

SEQ ID NO: 3873 - RNA, 20 nt, Artificial Sequence
  Synthetic oligonucleotide: Ptpn6-125
cauccagcccacugaggucu

SEQ ID NO: 3874 - RNA, 17 nt, Artificial Sequence
  Synthetic oligonucleotide: Ptpn6-126
ccgagaccucagugggc

SEQ ID NO: 3875 - RNA, 17 nt, Artificial Sequence
  Synthetic oligonucleotide: Ptpn6-127
ugcagagacccugcuca

SEQ ID NO: 3876 - RNA, 17 nt, Artificial Sequence
  Synthetic oligonucleotide: Ptpn6-128
aagggccgaggugucca

SEQ ID NO: 3877 - RNA, 17 nt, Artificial Sequence
  Synthetic oligonucleotide: Ptpn6-129
uacuacacucagcagca

SEQ ID NO: 3878 - RNA, 17 nt, Artificial Sequence
  Synthetic oligonucleotide: Ptpn6-130
uaccauggccacauguc

SEQ ID NO: 3879 - RNA, 17 nt, Artificial Sequence
  Synthetic oligonucleotide: Ptpn6-131
cauggccacaugucugg

SEQ ID NO: 3880 - RNA, 17 nt, Artificial Sequence
  Synthetic oligonucleotide: Ptpn6-132
auggccacaugucuggc

SEQ ID NO: 3881 - RNA, 17 nt, Artificial Sequence
  Synthetic oligonucleotide: Ptpn6-133
acgcugcugcaggccaa

SEQ ID NO: 3882 - RNA, 17 nt, Artificial Sequence
  Synthetic oligonucleotide: Ptpn6-134
aggccaagggcgagccc

SEQ ID NO: 3883 - RNA, 17 nt, Artificial Sequence
  Synthetic oligonucleotide: Ptpn6-135
agugaccagcccaaggc

SEQ ID NO: 3884 - RNA, 17 nt, Artificial Sequence
  Synthetic oligonucleotide: Ptpn6-136
cagcccaaggcuggccc

SEQ ID NO: 3885 - RNA, 17 nt, Artificial Sequence
  Synthetic oligonucleotide: Ptpn6-137
cccaggcuccccgcuca

SEQ ID NO: 3886 - RNA, 17 nt, Artificial Sequence
  Synthetic oligonucleotide: Ptpn6-138
acccugagcggggagcc

SEQ ID NO: 3887 - RNA, 17 nt, Artificial Sequence
  Synthetic oligonucleotide: Ptpn6-139
cccugagcggggagccu

SEQ ID NO: 3888 - RNA, 17 nt, Artificial Sequence
  Synthetic oligonucleotide: Ptpn6-140
cugggccagccuugggc

SEQ ID NO: 3889 - RNA, 17 nt, Artificial Sequence
  Synthetic oligonucleotide: Ptpn6-141
agucuccaggcuggcug

SEQ ID NO: 3890 - RNA, 17 nt, Artificial Sequence
  Synthetic oligonucleotide: Ptpn6-142
acuucuccccuccauac

SEQ ID NO: 3891 - RNA, 17 nt, Artificial Sequence
  Synthetic oligonucleotide: Ptpn6-143
agaaauccccugaguuc

SEQ ID NO: 3892 - RNA, 17 nt, Artificial Sequence
  Synthetic oligonucleotide: Ptpn6-144
agagcgagaagucaccc

SEQ ID NO: 3893 - RNA, 17 nt, Artificial Sequence
  Synthetic oligonucleotide: Ptpn6-145
cugcauccagcccacug

SEQ ID NO: 3894 - RNA, 17 nt, Artificial Sequence
  Synthetic oligonucleotide: Ptpn6-146
ccagcccacugaggucu

SEQ ID NO: 3895 - RNA, 20 nt, Artificial Sequence
  Synthetic oligonucleotide: Ptpn6-147
gguggacgcuacacaguggg

SEQ ID NO: 3896 - RNA, 20 nt, Artificial Sequence
  Synthetic oligonucleotide: Ptpn6-148
acgcuacacagugggugguu

SEQ ID NO: 3897 - RNA, 20 nt, Artificial Sequence
  Synthetic oligonucleotide: Ptpn6-149
ggagaccuucgacagccuca

SEQ ID NO: 3898 - RNA, 20 nt, Artificial Sequence
  Synthetic oligonucleotide: Ptpn6-150
cuucgacagccucacggacc

SEQ ID NO: 3899 - RNA, 20 nt, Artificial Sequence
  Synthetic oligonucleotide: Ptpn6-151
cgacagccucacggaccugg

SEQ ID NO: 3900 - RNA, 20 nt, Artificial Sequence
  Synthetic oligonucleotide: Ptpn6-152
gguggagcauuucaagaaga

SEQ ID NO: 3901 - RNA, 20 nt, Artificial Sequence
  Synthetic oligonucleotide: Ptpn6-153
guggagcauuucaagaagac

SEQ ID NO: 3902 - RNA, 20 nt, Artificial Sequence
  Synthetic oligonucleotide: Ptpn6-154
uggagcauuucaagaagacg

SEQ ID NO: 3903 - RNA, 20 nt, Artificial Sequence
  Synthetic oligonucleotide: Ptpn6-155
uuucaagaagacggggauug

SEQ ID NO: 3904 - RNA, 20 nt, Artificial Sequence
  Synthetic oligonucleotide: Ptpn6-156
caagaagacggggauugagg

SEQ ID NO: 3905 - RNA, 20 nt, Artificial Sequence
  Synthetic oligonucleotide: Ptpn6-157
acggggauugaggaggccuc

SEQ ID NO: 3906 - RNA, 20 nt, Artificial Sequence
  Synthetic oligonucleotide: Ptpn6-158
caggcgccuuugucuaccug

SEQ ID NO: 3907 - RNA, 20 nt, Artificial Sequence
  Synthetic oligonucleotide: Ptpn6-159
cuaugccacgagggugaaug

SEQ ID NO: 3908 - RNA, 20 nt, Artificial Sequence
  Synthetic oligonucleotide: Ptpn6-160
ugacauugagaaccgagugu

SEQ ID NO: 3909 - RNA, 20 nt, Artificial Sequence
  Synthetic oligonucleotide: Ptpn6-161
guuggaacugaacaagaagc

SEQ ID NO: 3910 - RNA, 20 nt, Artificial Sequence
  Synthetic oligonucleotide: Ptpn6-162
gaacaagaagcaggaguccg

SEQ ID NO: 3911 - RNA, 20 nt, Artificial Sequence
  Synthetic oligonucleotide: Ptpn6-163
ggaguccgaggauacagcca

SEQ ID NO: 3912 - RNA, 20 nt, Artificial Sequence
  Synthetic oligonucleotide: Ptpn6-164
uccgaggauacagccaaggc

SEQ ID NO: 3913 - RNA, 20 nt, Artificial Sequence
  Synthetic oligonucleotide: Ptpn6-165
auacagccaaggcuggcuuc

SEQ ID NO: 3914 - RNA, 20 nt, Artificial Sequence
  Synthetic oligonucleotide: Ptpn6-166
uacagccaaggcuggcuucu

SEQ ID NO: 3915 - RNA, 20 nt, Artificial Sequence
  Synthetic oligonucleotide: Ptpn6-167
agccaaggcuggcuucuggg

SEQ ID NO: 3916 - RNA, 20 nt, Artificial Sequence
  Synthetic oligonucleotide: Ptpn6-168
gaagaacuugcaccagcguc

SEQ ID NO: 3917 - RNA, 20 nt, Artificial Sequence
  Synthetic oligonucleotide: Ptpn6-169
aacuugcaccagcgucugga

SEQ ID NO: 3918 - RNA, 20 nt, Artificial Sequence
  Synthetic oligonucleotide: Ptpn6-170
acuugcaccagcgucuggaa

SEQ ID NO: 3919 - RNA, 20 nt, Artificial Sequence
  Synthetic oligonucleotide: Ptpn6-171
accagcgucuggaagggcag

SEQ ID NO: 3920 - RNA, 20 nt, Artificial Sequence
  Synthetic oligonucleotide: Ptpn6-172
agggcagcggccagagaaca

SEQ ID NO: 3921 - RNA, 20 nt, Artificial Sequence
  Synthetic oligonucleotide: Ptpn6-173
gggcagcggccagagaacaa

SEQ ID NO: 3922 - RNA, 20 nt, Artificial Sequence
  Synthetic oligonucleotide: Ptpn6-174
ccacagccgagugauccugc

SEQ ID NO: 3923 - RNA, 20 nt, Artificial Sequence
  Synthetic oligonucleotide: Ptpn6-175
cacagccgagugauccugca

SEQ ID NO: 3924 - RNA, 20 nt, Artificial Sequence
  Synthetic oligonucleotide: Ptpn6-176
gccgagugauccugcaggga

SEQ ID NO: 3925 - RNA, 20 nt, Artificial Sequence
  Synthetic oligonucleotide: Ptpn6-177
ccgagugauccugcagggac

SEQ ID NO: 3926 - RNA, 20 nt, Artificial Sequence
  Synthetic oligonucleotide: Ptpn6-178
ggacgggacaguaacauccc

SEQ ID NO: 3927 - RNA, 20 nt, Artificial Sequence
  Synthetic oligonucleotide: Ptpn6-179
gacgggacaguaacaucccc

SEQ ID NO: 3928 - RNA, 20 nt, Artificial Sequence
  Synthetic oligonucleotide: Ptpn6-180
uaagaccuacaucgccagcc

SEQ ID NO: 3929 - RNA, 20 nt, Artificial Sequence
  Synthetic oligonucleotide: Ptpn6-181
aagaccuacaucgccagcca

SEQ ID NO: 3930 - RNA, 20 nt, Artificial Sequence
  Synthetic oligonucleotide: Ptpn6-182
caucgccagccaggguuguc

SEQ ID NO: 3931 - RNA, 20 nt, Artificial Sequence
  Synthetic oligonucleotide: Ptpn6-183
cgccagccaggguugucugg

SEQ ID NO: 3932 - RNA, 20 nt, Artificial Sequence
  Synthetic oligonucleotide: Ptpn6-184
ccaggguugucuggaggcca

SEQ ID NO: 3933 - RNA, 20 nt, Artificial Sequence
  Synthetic oligonucleotide: Ptpn6-185
aggccacggucaaugacuuc

SEQ ID NO: 3934 - RNA, 20 nt, Artificial Sequence
  Synthetic oligonucleotide: Ptpn6-186
ggucaaugacuucuggcaga

SEQ ID NO: 3935 - RNA, 20 nt, Artificial Sequence
  Synthetic oligonucleotide: Ptpn6-187
augacuucuggcagauggcg

SEQ ID NO: 3936 - RNA, 20 nt, Artificial Sequence
  Synthetic oligonucleotide: Ptpn6-188
cuucuggcagauggcguggc

SEQ ID NO: 3937 - RNA, 20 nt, Artificial Sequence
  Synthetic oligonucleotide: Ptpn6-189
caucgucaugaccacccgag

SEQ ID NO: 3938 - RNA, 20 nt, Artificial Sequence
  Synthetic oligonucleotide: Ptpn6-190
cgucaugaccacccgagagg

SEQ ID NO: 3939 - RNA, 20 nt, Artificial Sequence
  Synthetic oligonucleotide: Ptpn6-191
accacccgagagguggagaa

SEQ ID NO: 3940 - RNA, 20 nt, Artificial Sequence
  Synthetic oligonucleotide: Ptpn6-192
cccgagagguggagaaaggc

SEQ ID NO: 3941 - RNA, 20 nt, Artificial Sequence
  Synthetic oligonucleotide: Ptpn6-193
augcgucccauacuggcccg

SEQ ID NO: 3942 - RNA, 20 nt, Artificial Sequence
  Synthetic oligonucleotide: Ptpn6-194
cgucccauacuggcccgagg

SEQ ID NO: 3943 - RNA, 20 nt, Artificial Sequence
  Synthetic oligonucleotide: Ptpn6-195
gucccauacuggcccgaggu

SEQ ID NO: 3944 - RNA, 20 nt, Artificial Sequence
  Synthetic oligonucleotide: Ptpn6-196
gugggcaugcagcgugcuua

SEQ ID NO: 3945 - RNA, 20 nt, Artificial Sequence
  Synthetic oligonucleotide: Ptpn6-197
ugggcaugcagcgugcuuau

SEQ ID NO: 3946 - RNA, 20 nt, Artificial Sequence
  Synthetic oligonucleotide: Ptpn6-198
cccuacucugugaccaacug

SEQ ID NO: 3947 - RNA, 20 nt, Artificial Sequence
  Synthetic oligonucleotide: Ptpn6-199
ccuacucugugaccaacugc

SEQ ID NO: 3948 - RNA, 20 nt, Artificial Sequence
  Synthetic oligonucleotide: Ptpn6-200
cuacucugugaccaacugcg

SEQ ID NO: 3949 - RNA, 20 nt, Artificial Sequence
  Synthetic oligonucleotide: Ptpn6-201
auacaaacuccguaccuuac

SEQ ID NO: 3950 - RNA, 20 nt, Artificial Sequence
  Synthetic oligonucleotide: Ptpn6-202
uaccuuacaggucuccccgc

SEQ ID NO: 3951 - RNA, 20 nt, Artificial Sequence
  Synthetic oligonucleotide: Ptpn6-203
gagaccugauucgggagauc

SEQ ID NO: 3952 - RNA, 20 nt, Artificial Sequence
  Synthetic oligonucleotide: Ptpn6-204
ggcauuaccaguaccugagc

SEQ ID NO: 3953 - RNA, 20 nt, Artificial Sequence
  Synthetic oligonucleotide: Ptpn6-205
uaccugagcuggcccgacca

SEQ ID NO: 3954 - RNA, 20 nt, Artificial Sequence
  Synthetic oligonucleotide: Ptpn6-206
accugagcuggcccgaccau

SEQ ID NO: 3955 - RNA, 20 nt, Artificial Sequence
  Synthetic oligonucleotide: Ptpn6-207
ccugagcuggcccgaccaug

SEQ ID NO: 3956 - RNA, 20 nt, Artificial Sequence
  Synthetic oligonucleotide: Ptpn6-208
caugggguccccagugagcc

SEQ ID NO: 3957 - RNA, 20 nt, Artificial Sequence
  Synthetic oligonucleotide: Ptpn6-209
augggguccccagugagccu

SEQ ID NO: 3958 - RNA, 20 nt, Artificial Sequence
  Synthetic oligonucleotide: Ptpn6-210
ugggguccccagugagccug

SEQ ID NO: 3959 - RNA, 20 nt, Artificial Sequence
  Synthetic oligonucleotide: Ptpn6-211
gggguccccagugagccugg

SEQ ID NO: 3960 - RNA, 20 nt, Artificial Sequence
  Synthetic oligonucleotide: Ptpn6-212
uggggguguccucagcuucc

SEQ ID NO: 3961 - RNA, 20 nt, Artificial Sequence
  Synthetic oligonucleotide: Ptpn6-213
uccuggaccagaucaaccag

SEQ ID NO: 3962 - RNA, 20 nt, Artificial Sequence
  Synthetic oligonucleotide: Ptpn6-214
ggaccagaucaaccagcggc

SEQ ID NO: 3963 - RNA, 20 nt, Artificial Sequence
  Synthetic oligonucleotide: Ptpn6-215
caggaaagucugccucacgc

SEQ ID NO: 3964 - RNA, 20 nt, Artificial Sequence
  Synthetic oligonucleotide: Ptpn6-216
aggaaagucugccucacgca

SEQ ID NO: 3965 - RNA, 20 nt, Artificial Sequence
  Synthetic oligonucleotide: Ptpn6-217
cauugucaucgacaugcuca

SEQ ID NO: 3966 - RNA, 20 nt, Artificial Sequence
  Synthetic oligonucleotide: Ptpn6-218
cauggagaacaucuccacca

SEQ ID NO: 3967 - RNA, 20 nt, Artificial Sequence
  Synthetic oligonucleotide: Ptpn6-219
cauccagaagaccauccaga

SEQ ID NO: 3968 - RNA, 20 nt, Artificial Sequence
  Synthetic oligonucleotide: Ptpn6-220
agaagaccauccagauggug

SEQ ID NO: 3969 - RNA, 20 nt, Artificial Sequence
  Synthetic oligonucleotide: Ptpn6-221
gaagaccauccagauggugc

SEQ ID NO: 3970 - RNA, 20 nt, Artificial Sequence
  Synthetic oligonucleotide: Ptpn6-222
gauggugcgggcgcagcgcu

SEQ ID NO: 3971 - RNA, 20 nt, Artificial Sequence
  Synthetic oligonucleotide: Ptpn6-223
auggugcgggcgcagcgcuc

SEQ ID NO: 3972 - RNA, 20 nt, Artificial Sequence
  Synthetic oligonucleotide: Ptpn6-224
gcgggcgcagcgcucgggca

SEQ ID NO: 3973 - RNA, 20 nt, Artificial Sequence
  Synthetic oligonucleotide: Ptpn6-225
gcgcucgggcauggugcaga

SEQ ID NO: 3974 - RNA, 20 nt, Artificial Sequence
  Synthetic oligonucleotide: Ptpn6-226
cucgggcauggugcagacgg

SEQ ID NO: 3975 - RNA, 20 nt, Artificial Sequence
  Synthetic oligonucleotide: Ptpn6-227
gcaguacaaguucaucuacg

SEQ ID NO: 3976 - RNA, 20 nt, Artificial Sequence
  Synthetic oligonucleotide: Ptpn6-228
ugaaaccacuaagaagaagc

SEQ ID NO: 3977 - RNA, 20 nt, Artificial Sequence
  Synthetic oligonucleotide: Ptpn6-229
aaccacuaagaagaagcugg

SEQ ID NO: 3978 - RNA, 20 nt, Artificial Sequence
  Synthetic oligonucleotide: Ptpn6-230
aagggccaggagucggagua

SEQ ID NO: 3979 - RNA, 20 nt, Artificial Sequence
  Synthetic oligonucleotide: Ptpn6-231
agggccaggagucggaguac

SEQ ID NO: 3980 - RNA, 20 nt, Artificial Sequence
  Synthetic oligonucleotide: Ptpn6-232
caugaagaaugcccaugcca

SEQ ID NO: 3981 - RNA, 20 nt, Artificial Sequence
  Synthetic oligonucleotide: Ptpn6-233
accugcacacuaagaacaag

SEQ ID NO: 3982 - RNA, 20 nt, Artificial Sequence
  Synthetic oligonucleotide: Ptpn6-234
ccugcacacuaagaacaaga

SEQ ID NO: 3983 - RNA, 20 nt, Artificial Sequence
  Synthetic oligonucleotide: Ptpn6-235
gcacacuaagaacaagaggg

SEQ ID NO: 3984 - RNA, 20 nt, Artificial Sequence
  Synthetic oligonucleotide: Ptpn6-236
aggagaaagugaagaagcag

SEQ ID NO: 3985 - RNA, 20 nt, Artificial Sequence
  Synthetic oligonucleotide: Ptpn6-237
gaagcagcggucagcagaca

SEQ ID NO: 3986 - RNA, 20 nt, Artificial Sequence
  Synthetic oligonucleotide: Ptpn6-238
agcagacaaggagaagagca

SEQ ID NO: 3987 - RNA, 20 nt, Artificial Sequence
  Synthetic oligonucleotide: Ptpn6-239
gcagacaaggagaagagcaa

SEQ ID NO: 3988 - RNA, 20 nt, Artificial Sequence
  Synthetic oligonucleotide: Ptpn6-240
agagcaaggguucccucaag

SEQ ID NO: 3989 - RNA, 17 nt, Artificial Sequence
  Synthetic oligonucleotide: Ptpn6-241
gguggacgcuacacagu

SEQ ID NO: 3990 - RNA, 17 nt, Artificial Sequence
  Synthetic oligonucleotide: Ptpn6-242
ggacgcuacacaguggg

SEQ ID NO: 3991 - RNA, 17 nt, Artificial Sequence
  Synthetic oligonucleotide: Ptpn6-243
cuacacagugggugguu

SEQ ID NO: 3992 - RNA, 17 nt, Artificial Sequence
  Synthetic oligonucleotide: Ptpn6-244
gaccuucgacagccuca

SEQ ID NO: 3993 - RNA, 17 nt, Artificial Sequence
  Synthetic oligonucleotide: Ptpn6-245
cgacagccucacggacc

SEQ ID NO: 3994 - RNA, 17 nt, Artificial Sequence
  Synthetic oligonucleotide: Ptpn6-246
cagccucacggaccugg

SEQ ID NO: 3995 - RNA, 17 nt, Artificial Sequence
  Synthetic oligonucleotide: Ptpn6-247
ggagcauuucaagaaga

SEQ ID NO: 3996 - RNA, 17 nt, Artificial Sequence
  Synthetic oligonucleotide: Ptpn6-248
gagcauuucaagaagac

SEQ ID NO: 3997 - RNA, 17 nt, Artificial Sequence
  Synthetic oligonucleotide: Ptpn6-249
agcauuucaagaagacg

SEQ ID NO: 3998 - RNA, 17 nt, Artificial Sequence
  Synthetic oligonucleotide: Ptpn6-250
caagaagacggggauug

SEQ ID NO: 3999 - RNA, 17 nt, Artificial Sequence
  Synthetic oligonucleotide: Ptpn6-251
gaagacggggauugagg

SEQ ID NO: 4000 - RNA, 17 nt, Artificial Sequence
  Synthetic oligonucleotide: Ptpn6-252
gggauugaggaggccuc

SEQ ID NO: 4001 - RNA, 17 nt, Artificial Sequence
  Synthetic oligonucleotide: Ptpn6-253
gcgccuuugucuaccug

SEQ ID NO: 4002 - RNA, 17 nt, Artificial Sequence
  Synthetic oligonucleotide: Ptpn6-254
ugccacgagggugaaug

SEQ ID NO: 4003 - RNA, 17 nt, Artificial Sequence
  Synthetic oligonucleotide: Ptpn6-255
cauugagaaccgagugu

SEQ ID NO: 4004 - RNA, 17 nt, Artificial Sequence
  Synthetic oligonucleotide: Ptpn6-256
ggaacugaacaagaagc

SEQ ID NO: 4005 - RNA, 17 nt, Artificial Sequence
  Synthetic oligonucleotide: Ptpn6-257
caagaagcaggaguccg

SEQ ID NO: 4006 - RNA, 17 nt, Artificial Sequence
  Synthetic oligonucleotide: Ptpn6-258
guccgaggauacagcca

SEQ ID NO: 4007 - RNA, 17 nt, Artificial Sequence
  Synthetic oligonucleotide: Ptpn6-259
gaggauacagccaaggc

SEQ ID NO: 4008 - RNA, 17 nt, Artificial Sequence
  Synthetic oligonucleotide: Ptpn6-260
cagccaaggcuggcuuc

SEQ ID NO: 4009 - RNA, 17 nt, Artificial Sequence
  Synthetic oligonucleotide: Ptpn6-261
agccaaggcuggcuucu

SEQ ID NO: 4010 - RNA, 17 nt, Artificial Sequence
  Synthetic oligonucleotide: Ptpn6-262
caaggcuggcuucuggg

SEQ ID NO: 4011 - RNA, 17 nt, Artificial Sequence
  Synthetic oligonucleotide: Ptpn6-263
gaacuugcaccagcguc

SEQ ID NO: 4012 - RNA, 17 nt, Artificial Sequence
  Synthetic oligonucleotide: Ptpn6-264
uugcaccagcgucugga

SEQ ID NO: 4013 - RNA, 17 nt, Artificial Sequence
  Synthetic oligonucleotide: Ptpn6-265
ugcaccagcgucuggaa

SEQ ID NO: 4014 - RNA, 17 nt, Artificial Sequence
  Synthetic oligonucleotide: Ptpn6-266
agcgucuggaagggcag

SEQ ID NO: 4015 - RNA, 17 nt, Artificial Sequence
  Synthetic oligonucleotide: Ptpn6-267
gcagcggccagagaaca

SEQ ID NO: 4016 - RNA, 17 nt, Artificial Sequence
  Synthetic oligonucleotide: Ptpn6-268
cagcggccagagaacaa

SEQ ID NO: 4017 - RNA, 17 nt, Artificial Sequence
  Synthetic oligonucleotide: Ptpn6-269
cagccgagugauccugc

SEQ ID NO: 4018 - RNA, 17 nt, Artificial Sequence
  Synthetic oligonucleotide: Ptpn6-270
agccgagugauccugca

SEQ ID NO: 4019 - RNA, 17 nt, Artificial Sequence
  Synthetic oligonucleotide: Ptpn6-271
gagugauccugcaggga

SEQ ID NO: 4020 - RNA, 17 nt, Artificial Sequence
  Synthetic oligonucleotide: Ptpn6-272
agugauccugcagggac

SEQ ID NO: 4021 - RNA, 17 nt, Artificial Sequence
  Synthetic oligonucleotide: Ptpn6-273
cgggacaguaacauccc

SEQ ID NO: 4022 - RNA, 17 nt, Artificial Sequence
  Synthetic oligonucleotide: Ptpn6-274
gggacaguaacaucccc

SEQ ID NO: 4023 - RNA, 17 nt, Artificial Sequence
  Synthetic oligonucleotide: Ptpn6-275
gaccuacaucgccagcc

SEQ ID NO: 4024 - RNA, 17 nt, Artificial Sequence
  Synthetic oligonucleotide: Ptpn6-276
accuacaucgccagcca

SEQ ID NO: 4025 - RNA, 17 nt, Artificial Sequence
  Synthetic oligonucleotide: Ptpn6-277
cgccagccaggguuguc

SEQ ID NO: 4026 - RNA, 17 nt, Artificial Sequence
  Synthetic oligonucleotide: Ptpn6-278
cagccaggguugucugg

SEQ ID NO: 4027 - RNA, 17 nt, Artificial Sequence
  Synthetic oligonucleotide: Ptpn6-279
ggguugucuggaggcca

SEQ ID NO: 4028 - RNA, 17 nt, Artificial Sequence
  Synthetic oligonucleotide: Ptpn6-280
ccacggucaaugacuuc

SEQ ID NO: 4029 - RNA, 17 nt, Artificial Sequence
  Synthetic oligonucleotide: Ptpn6-281
caaugacuucuggcaga

SEQ ID NO: 4030 - RNA, 17 nt, Artificial Sequence
  Synthetic oligonucleotide: Ptpn6-282
acuucuggcagauggcg

SEQ ID NO: 4031 - RNA, 17 nt, Artificial Sequence
  Synthetic oligonucleotide: Ptpn6-283
cuggcagauggcguggc

SEQ ID NO: 4032 - RNA, 17 nt, Artificial Sequence
  Synthetic oligonucleotide: Ptpn6-284
cgucaugaccacccgag

SEQ ID NO: 4033 - RNA, 17 nt, Artificial Sequence
  Synthetic oligonucleotide: Ptpn6-285
caugaccacccgagagg

SEQ ID NO: 4034 - RNA, 17 nt, Artificial Sequence
  Synthetic oligonucleotide: Ptpn6-286
acccgagagguggagaa

SEQ ID NO: 4035 - RNA, 17 nt, Artificial Sequence
  Synthetic oligonucleotide: Ptpn6-287
gagagguggagaaaggc

SEQ ID NO: 4036 - RNA, 17 nt, Artificial Sequence
  Synthetic oligonucleotide: Ptpn6-288
acaaaugcgucccauac

SEQ ID NO: 4037 - RNA, 17 nt, Artificial Sequence
  Synthetic oligonucleotide: Ptpn6-289
cgucccauacuggcccg

SEQ ID NO: 4038 - RNA, 17 nt, Artificial Sequence
  Synthetic oligonucleotide: Ptpn6-290
cccauacuggcccgagg

SEQ ID NO: 4039 - RNA, 17 nt, Artificial Sequence
  Synthetic oligonucleotide: Ptpn6-291
ccauacuggcccgaggu

SEQ ID NO: 4040 - RNA, 17 nt, Artificial Sequence
  Synthetic oligonucleotide: Ptpn6-292
ggcaugcagcgugcuua

SEQ ID NO: 4041 - RNA, 17 nt, Artificial Sequence
  Synthetic oligonucleotide: Ptpn6-293
gcaugcagcgugcuuau

SEQ ID NO: 4042 - RNA, 17 nt, Artificial Sequence
  Synthetic oligonucleotide: Ptpn6-294
uacucugugaccaacug

SEQ ID NO: 4043 - RNA, 17 nt, Artificial Sequence
  Synthetic oligonucleotide: Ptpn6-295
acucugugaccaacugc

SEQ ID NO: 4044 - RNA, 17 nt, Artificial Sequence
  Synthetic oligonucleotide: Ptpn6-296
cucugugaccaacugcg

SEQ ID NO: 4045 - RNA, 17 nt, Artificial Sequence
  Synthetic oligonucleotide: Ptpn6-297
caaacuccguaccuuac

SEQ ID NO: 4046 - RNA, 17 nt, Artificial Sequence
  Synthetic oligonucleotide: Ptpn6-298
cuuacaggucuccccgc

SEQ ID NO: 4047 - RNA, 17 nt, Artificial Sequence
  Synthetic oligonucleotide: Ptpn6-299
accugauucgggagauc

SEQ ID NO: 4048 - RNA, 17 nt, Artificial Sequence
  Synthetic oligonucleotide: Ptpn6-300
auuaccaguaccugagc

SEQ ID NO: 4049 - RNA, 17 nt, Artificial Sequence
  Synthetic oligonucleotide: Ptpn6-301
cugagcuggcccgacca

SEQ ID NO: 4050 - RNA, 17 nt, Artificial Sequence
  Synthetic oligonucleotide: Ptpn6-302
ugagcuggcccgaccau

SEQ ID NO: 4051 - RNA, 17 nt, Artificial Sequence
  Synthetic oligonucleotide: Ptpn6-303
gagcuggcccgaccaug

SEQ ID NO: 4052 - RNA, 17 nt, Artificial Sequence
  Synthetic oligonucleotide: Ptpn6-304
gggguccccagugagcc

SEQ ID NO: 4053 - RNA, 17 nt, Artificial Sequence
  Synthetic oligonucleotide: Ptpn6-305
ggguccccagugagccu

SEQ ID NO: 4054 - RNA, 17 nt, Artificial Sequence
  Synthetic oligonucleotide: Ptpn6-306
gguccccagugagccug

SEQ ID NO: 4055 - RNA, 17 nt, Artificial Sequence
  Synthetic oligonucleotide: Ptpn6-307
guccccagugagccugg

SEQ ID NO: 4056 - RNA, 17 nt, Artificial Sequence
  Synthetic oligonucleotide: Ptpn6-308
ggguguccucagcuucc

SEQ ID NO: 4057 - RNA, 17 nt, Artificial Sequence
  Synthetic oligonucleotide: Ptpn6-309
uggaccagaucaaccag

SEQ ID NO: 4058 - RNA, 17 nt, Artificial Sequence
  Synthetic oligonucleotide: Ptpn6-310
ccagaucaaccagcggc

SEQ ID NO: 4059 - RNA, 17 nt, Artificial Sequence
  Synthetic oligonucleotide: Ptpn6-311
gaaagucugccucacgc

SEQ ID NO: 4060 - RNA, 17 nt, Artificial Sequence
  Synthetic oligonucleotide: Ptpn6-312
aaagucugccucacgca

SEQ ID NO: 4061 - RNA, 17 nt, Artificial Sequence
  Synthetic oligonucleotide: Ptpn6-313
gccggcaucggccgcac

SEQ ID NO: 4062 - RNA, 17 nt, Artificial Sequence
  Synthetic oligonucleotide: Ptpn6-314
ugucaucgacaugcuca

SEQ ID NO: 4063 - RNA, 17 nt, Artificial Sequence
  Synthetic oligonucleotide: Ptpn6-315
ggagaacaucuccacca

SEQ ID NO: 4064 - RNA, 17 nt, Artificial Sequence
  Synthetic oligonucleotide: Ptpn6-316
ccagaagaccauccaga

SEQ ID NO: 4065 - RNA, 17 nt, Artificial Sequence
  Synthetic oligonucleotide: Ptpn6-317
agaccauccagauggug

SEQ ID NO: 4066 - RNA, 17 nt, Artificial Sequence
  Synthetic oligonucleotide: Ptpn6-318
gaccauccagauggugc

SEQ ID NO: 4067 - RNA, 17 nt, Artificial Sequence
  Synthetic oligonucleotide: Ptpn6-319
ggugcgggcgcagcgcu

SEQ ID NO: 4068 - RNA, 17 nt, Artificial Sequence
  Synthetic oligonucleotide: Ptpn6-320
gugcgggcgcagcgcuc

SEQ ID NO: 4069 - RNA, 17 nt, Artificial Sequence
  Synthetic oligonucleotide: Ptpn6-321
ggcgcagcgcucgggca

SEQ ID NO: 4070 - RNA, 17 nt, Artificial Sequence
  Synthetic oligonucleotide: Ptpn6-322
cucgggcauggugcaga

SEQ ID NO: 4071 - RNA, 17 nt, Artificial Sequence
  Synthetic oligonucleotide: Ptpn6-323
gggcauggugcagacgg

SEQ ID NO: 4072 - RNA, 17 nt, Artificial Sequence
  Synthetic oligonucleotide: Ptpn6-324
guacaaguucaucuacg

SEQ ID NO: 4073 - RNA, 17 nt, Artificial Sequence
  Synthetic oligonucleotide: Ptpn6-325
aaccacuaagaagaagc

SEQ ID NO: 4074 - RNA, 17 nt, Artificial Sequence
  Synthetic oligonucleotide: Ptpn6-326
cacuaagaagaagcugg

SEQ ID NO: 4075 - RNA, 17 nt, Artificial Sequence
  Synthetic oligonucleotide: Ptpn6-327
gcagaagggccaggagu

SEQ ID NO: 4076 - RNA, 17 nt, Artificial Sequence
  Synthetic oligonucleotide: Ptpn6-328
ggccaggagucggagua

SEQ ID NO: 4077 - RNA, 17 nt, Artificial Sequence
  Synthetic oligonucleotide: Ptpn6-329
gccaggagucggaguac

SEQ ID NO: 4078 - RNA, 17 nt, Artificial Sequence
  Synthetic oligonucleotide: Ptpn6-330
gaagaaugcccaugcca

SEQ ID NO: 4079 - RNA, 17 nt, Artificial Sequence
  Synthetic oligonucleotide: Ptpn6-331
ugcacacuaagaacaag

SEQ ID NO: 4080 - RNA, 17 nt, Artificial Sequence
  Synthetic oligonucleotide: Ptpn6-332
gcacacuaagaacaaga

SEQ ID NO: 4081 - RNA, 17 nt, Artificial Sequence
  Synthetic oligonucleotide: Ptpn6-333
cacuaagaacaagaggg

SEQ ID NO: 4082 - RNA, 17 nt, Artificial Sequence
  Synthetic oligonucleotide: Ptpn6-334
agaaagugaagaagcag

SEQ ID NO: 4083 - RNA, 17 nt, Artificial Sequence
  Synthetic oligonucleotide: Ptpn6-335
gcagcggucagcagaca

SEQ ID NO: 4084 - RNA, 17 nt, Artificial Sequence
  Synthetic oligonucleotide: Ptpn6-336
agacaaggagaagagca

SEQ ID NO: 4085 - RNA, 17 nt, Artificial Sequence
  Synthetic oligonucleotide: Ptpn6-337
gacaaggagaagagcaa

SEQ ID NO: 4086 - RNA, 17 nt, Artificial Sequence
  Synthetic oligonucleotide: Ptpn6-338
gcaaggguucccucaag

SEQ ID NO: 4087 - RNA, 20 nt, Artificial Sequence
  Synthetic oligonucleotide: Ptpn6-339
cccucuuguucuuagugugc

SEQ ID NO: 4088 - RNA, 20 nt, Artificial Sequence
  Synthetic oligonucleotide: Ptpn6-340
ggacgaggugcgggaggccu

SEQ ID NO: 4089 - RNA, 20 nt, Artificial Sequence
  Synthetic oligonucleotide: Ptpn6-341
aggugcgggaggccuuggca

SEQ ID NO: 4090 - RNA, 20 nt, Artificial Sequence
  Synthetic oligonucleotide: Ptpn6-342
ggugcgggaggccuuggcau

SEQ ID NO: 4091 - RNA, 20 nt, Artificial Sequence
  Synthetic oligonucleotide: Ptpn6-343
cuuggcaugggcauucuuca

SEQ ID NO: 4092 - RNA, 20 nt, Artificial Sequence
  Synthetic oligonucleotide: Ptpn6-344
gcaugggcauucuucauggc

SEQ ID NO: 4093 - RNA, 20 nt, Artificial Sequence
  Synthetic oligonucleotide: Ptpn6-345
caugggcauucuucauggcu

SEQ ID NO: 4094 - RNA, 20 nt, Artificial Sequence
  Synthetic oligonucleotide: Ptpn6-346
augggcauucuucauggcug

SEQ ID NO: 4095 - RNA, 20 nt, Artificial Sequence
  Synthetic oligonucleotide: Ptpn6-347
ugggcauucuucauggcugg

SEQ ID NO: 4096 - RNA, 20 nt, Artificial Sequence
  Synthetic oligonucleotide: Ptpn6-348
auucuucauggcugggggau

SEQ ID NO: 4097 - RNA, 20 nt, Artificial Sequence
  Synthetic oligonucleotide: Ptpn6-349
uguucccguacuccgacucc

SEQ ID NO: 4098 - RNA, 20 nt, Artificial Sequence
  Synthetic oligonucleotide: Ptpn6-350
gaccuccagcuucuucuuag

SEQ ID NO: 4099 - RNA, 20 nt, Artificial Sequence
  Synthetic oligonucleotide: Ptpn6-351
ucuuagugguuucaaugaac

SEQ ID NO: 4100 - RNA, 20 nt, Artificial Sequence
  Synthetic oligonucleotide: Ptpn6-352
cuuagugguuucaaugaacu

SEQ ID NO: 4101 - RNA, 20 nt, Artificial Sequence
  Synthetic oligonucleotide: Ptpn6-353
gguuucaaugaacugggcga

SEQ ID NO: 4102 - RNA, 20 nt, Artificial Sequence
  Synthetic oligonucleotide: Ptpn6-354
agcgcugcgcccgcaccauc

SEQ ID NO: 4103 - RNA, 20 nt, Artificial Sequence
  Synthetic oligonucleotide: Ptpn6-355
cugcgcccgcaccaucugga

SEQ ID NO: 4104 - RNA, 20 nt, Artificial Sequence
  Synthetic oligonucleotide: Ptpn6-356
gcaccaucuggauggucuuc

SEQ ID NO: 4105 - RNA, 20 nt, Artificial Sequence
  Synthetic oligonucleotide: Ptpn6-357
ggaugucaaugucacagucc

SEQ ID NO: 4106 - RNA, 20 nt, Artificial Sequence
  Synthetic oligonucleotide: Ptpn6-358
gagcaugucgaugacaauga

SEQ ID NO: 4107 - RNA, 20 nt, Artificial Sequence
  Synthetic oligonucleotide: Ptpn6-359
ugacaaugauggugccugug

SEQ ID NO: 4108 - RNA, 20 nt, Artificial Sequence
  Synthetic oligonucleotide: Ptpn6-360
ggugccugugcggccgaugc

SEQ ID NO: 4109 - RNA, 20 nt, Artificial Sequence
  Synthetic oligonucleotide: Ptpn6-361
acgaugaugggcccugcgug

SEQ ID NO: 4110 - RNA, 20 nt, Artificial Sequence
  Synthetic oligonucleotide: Ptpn6-362
gaggcagacuuuccugccgc

SEQ ID NO: 4111 - RNA, 20 nt, Artificial Sequence
  Synthetic oligonucleotide: Ptpn6-363
uuuccugccgcugguugauc

SEQ ID NO: 4112 - RNA, 20 nt, Artificial Sequence
  Synthetic oligonucleotide: Ptpn6-364
gccgcugguugaucuggucc

SEQ ID NO: 4113 - RNA, 20 nt, Artificial Sequence
  Synthetic oligonucleotide: Ptpn6-365
ugaucugguccaggaagcug

SEQ ID NO: 4114 - RNA, 20 nt, Artificial Sequence
  Synthetic oligonucleotide: Ptpn6-366
aggaagcugaggacaccccc

SEQ ID NO: 4115 - RNA, 20 nt, Artificial Sequence
  Synthetic oligonucleotide: Ptpn6-367
gaggacacccccaggcucac

SEQ ID NO: 4116 - RNA, 20 nt, Artificial Sequence
  Synthetic oligonucleotide: Ptpn6-368
aggacacccccaggcucacu

SEQ ID NO: 4117 - RNA, 20 nt, Artificial Sequence
  Synthetic oligonucleotide: Ptpn6-369
ggacacccccaggcucacug

SEQ ID NO: 4118 - RNA, 20 nt, Artificial Sequence
  Synthetic oligonucleotide: Ptpn6-370
caggcucacuggggacccca

SEQ ID NO: 4119 - RNA, 20 nt, Artificial Sequence
  Synthetic oligonucleotide: Ptpn6-371
cucacuggggaccccauggu

SEQ ID NO: 4120 - RNA, 20 nt, Artificial Sequence
  Synthetic oligonucleotide: Ptpn6-372
ucacuggggaccccaugguc

SEQ ID NO: 4121 - RNA, 20 nt, Artificial Sequence
  Synthetic oligonucleotide: Ptpn6-373
ccccauggucgggccagcuc

SEQ ID NO: 4122 - RNA, 20 nt, Artificial Sequence
  Synthetic oligonucleotide: Ptpn6-374
ggucgggccagcucagguac

SEQ ID NO: 4123 - RNA, 20 nt, Artificial Sequence
  Synthetic oligonucleotide: Ptpn6-375
aaugccagaucucccgaauc

SEQ ID NO: 4124 - RNA, 20 nt, Artificial Sequence
  Synthetic oligonucleotide: Ptpn6-376
guccagcggggagaccugua

SEQ ID NO: 4125 - RNA, 20 nt, Artificial Sequence
  Synthetic oligonucleotide: Ptpn6-377
gcggggagaccuguaaggua

SEQ ID NO: 4126 - RNA, 20 nt, Artificial Sequence
  Synthetic oligonucleotide: Ptpn6-378
uaagguacggaguuuguauu

SEQ ID NO: 4127 - RNA, 20 nt, Artificial Sequence
  Synthetic oligonucleotide: Ptpn6-379
ugugucaugcuccccgcagu

SEQ ID NO: 4128 - RNA, 20 nt, Artificial Sequence
  Synthetic oligonucleotide: Ptpn6-380
cccgcaguuggucacagagu

SEQ ID NO: 4129 - RNA, 20 nt, Artificial Sequence
  Synthetic oligonucleotide: Ptpn6-381
ccgcaguuggucacagagua

SEQ ID NO: 4130 - RNA, 20 nt, Artificial Sequence
  Synthetic oligonucleotide: Ptpn6-382
agcacgcugcaugcccaccu

SEQ ID NO: 4131 - RNA, 20 nt, Artificial Sequence
  Synthetic oligonucleotide: Ptpn6-383
gcacgcugcaugcccaccuc

SEQ ID NO: 4132 - RNA, 20 nt, Artificial Sequence
  Synthetic oligonucleotide: Ptpn6-384
augcccaccucgggccagua

SEQ ID NO: 4133 - RNA, 20 nt, Artificial Sequence
  Synthetic oligonucleotide: Ptpn6-385
ugcccaccucgggccaguau

SEQ ID NO: 4134 - RNA, 20 nt, Artificial Sequence
  Synthetic oligonucleotide: Ptpn6-386
ccggccuuucuccaccucuc

SEQ ID NO: 4135 - RNA, 20 nt, Artificial Sequence
  Synthetic oligonucleotide: Ptpn6-387
gccuuucuccaccucucggg

SEQ ID NO: 4136 - RNA, 20 nt, Artificial Sequence
  Synthetic oligonucleotide: Ptpn6-388
ggguggucaugacgaugaca

SEQ ID NO: 4137 - RNA, 20 nt, Artificial Sequence
  Synthetic oligonucleotide: Ptpn6-389
cugccagaagucauugaccg

SEQ ID NO: 4138 - RNA, 20 nt, Artificial Sequence
  Synthetic oligonucleotide: Ptpn6-390
ccguggccuccagacaaccc

SEQ ID NO: 4139 - RNA, 20 nt, Artificial Sequence
  Synthetic oligonucleotide: Ptpn6-391
ggccuccagacaacccuggc

SEQ ID NO: 4140 - RNA, 20 nt, Artificial Sequence
  Synthetic oligonucleotide: Ptpn6-392
acaacccuggcuggcgaugu

SEQ ID NO: 4141 - RNA, 20 nt, Artificial Sequence
  Synthetic oligonucleotide: Ptpn6-393
uaggucuuagcguucucauc

SEQ ID NO: 4142 - RNA, 20 nt, Artificial Sequence
  Synthetic oligonucleotide: Ptpn6-394
aggucuuagcguucucauca

SEQ ID NO: 4143 - RNA, 20 nt, Artificial Sequence
  Synthetic oligonucleotide: Ptpn6-395
ucucaucagggccuagcagc

SEQ ID NO: 4144 - RNA, 20 nt, Artificial Sequence
  Synthetic oligonucleotide: Ptpn6-396
guaguuggcauugauguagu

SEQ ID NO: 4145 - RNA, 20 nt, Artificial Sequence
  Synthetic oligonucleotide: Ptpn6-397
ggcauugauguagucggacc

SEQ ID NO: 4146 - RNA, 20 nt, Artificial Sequence
  Synthetic oligonucleotide: Ptpn6-398
gcauugauguagucggaccc

SEQ ID NO: 4147 - RNA, 20 nt, Artificial Sequence
  Synthetic oligonucleotide: Ptpn6-399
cauugauguagucggacccg

SEQ ID NO: 4148 - RNA, 20 nt, Artificial Sequence
  Synthetic oligonucleotide: Ptpn6-400
uguuacugucccgucccugc

SEQ ID NO: 4149 - RNA, 20 nt, Artificial Sequence
  Synthetic oligonucleotide: Ptpn6-401
cccgucccugcaggaucacu

SEQ ID NO: 4150 - RNA, 20 nt, Artificial Sequence
  Synthetic oligonucleotide: Ptpn6-402
ccugcaggaucacucggcug

SEQ ID NO: 4151 - RNA, 20 nt, Artificial Sequence
  Synthetic oligonucleotide: Ptpn6-403
aggggagaauguucuuguag

SEQ ID NO: 4152 - RNA, 20 nt, Artificial Sequence
  Synthetic oligonucleotide: Ptpn6-404
cgguucuugcccuuguucuc

SEQ ID NO: 4153 - RNA, 20 nt, Artificial Sequence
  Synthetic oligonucleotide: Ptpn6-405
gccgcugcccuuccagacgc

SEQ ID NO: 4154 - RNA, 20 nt, Artificial Sequence
  Synthetic oligonucleotide: Ptpn6-406
cuccucccagaagccagccu

SEQ ID NO: 4155 - RNA, 20 nt, Artificial Sequence
  Synthetic oligonucleotide: Ptpn6-407
gccagccuuggcuguauccu

SEQ ID NO: 4156 - RNA, 20 nt, Artificial Sequence
  Synthetic oligonucleotide: Ptpn6-408
ucuuguucaguuccaacacu

SEQ ID NO: 4157 - RNA, 20 nt, Artificial Sequence
  Synthetic oligonucleotide: Ptpn6-409
gucagccgcauucacccucg

SEQ ID NO: 4158 - RNA, 20 nt, Artificial Sequence
  Synthetic oligonucleotide: Ptpn6-410
uucacccucguggcauagua

SEQ ID NO: 4159 - RNA, 20 nt, Artificial Sequence
  Synthetic oligonucleotide: Ptpn6-411
cagguagacaaaggcgccug

SEQ ID NO: 4160 - RNA, 20 nt, Artificial Sequence
  Synthetic oligonucleotide: Ptpn6-412
ucuucuugaaaugcuccacc

SEQ ID NO: 4161 - RNA, 20 nt, Artificial Sequence
  Synthetic oligonucleotide: Ptpn6-413
aaugcuccaccagguccgug

SEQ ID NO: 4162 - RNA, 20 nt, Artificial Sequence
  Synthetic oligonucleotide: Ptpn6-414
cagguccgugaggcugucga

SEQ ID NO: 4163 - RNA, 20 nt, Artificial Sequence
  Synthetic oligonucleotide: Ptpn6-415
  misc_feature (1)..(1): n is a, c, g, or u
ncucgcacaugaccuugaug

SEQ ID NO: 4164 - RNA, 20 nt, Artificial Sequence
  Synthetic oligonucleotide: Ptpn6-416
cucgcacaugaccuugaugu

SEQ ID NO: 4165 - RNA, 20 nt, Artificial Sequence
  Synthetic oligonucleotide: Ptpn6-417
ucgcacaugaccuugaugug

SEQ ID NO: 4166 - RNA, 20 nt, Artificial Sequence
  Synthetic oligonucleotide: Ptpn6-418
cgcacaugaccuugaugugg

SEQ ID NO: 4167 - RNA, 17 nt, Artificial Sequence
  Synthetic oligonucleotide: Ptpn6-419
ucuuguucuuagugugc

SEQ ID NO: 4168 - RNA, 17 nt, Artificial Sequence
  Synthetic oligonucleotide: Ptpn6-420
cgaggugcgggaggccu

SEQ ID NO: 4169 - RNA, 17 nt, Artificial Sequence
  Synthetic oligonucleotide: Ptpn6-421
ugcgggaggccuuggca

SEQ ID NO: 4170 - RNA, 17 nt, Artificial Sequence
  Synthetic oligonucleotide: Ptpn6-422
gcgggaggccuuggcau

SEQ ID NO: 4171 - RNA, 17 nt, Artificial Sequence
  Synthetic oligonucleotide: Ptpn6-423
ggcaugggcauucuuca

SEQ ID NO: 4172 - RNA, 17 nt, Artificial Sequence
  Synthetic oligonucleotide: Ptpn6-424
ugggcauucuucauggc

SEQ ID NO: 4173 - RNA, 17 nt, Artificial Sequence
  Synthetic oligonucleotide: Ptpn6-425
gggcauucuucauggcu

SEQ ID NO: 4174 - RNA, 17 nt, Artificial Sequence
  Synthetic oligonucleotide: Ptpn6-426
ggcauucuucauggcug

SEQ ID NO: 4175 - RNA, 17 nt, Artificial Sequence
  Synthetic oligonucleotide: Ptpn6-427
gcauucuucauggcugg

SEQ ID NO: 4176 - RNA, 17 nt, Artificial Sequence
  Synthetic oligonucleotide: Ptpn6-428
cuucauggcugggggau

SEQ ID NO: 4177 - RNA, 17 nt, Artificial Sequence
  Synthetic oligonucleotide: Ptpn6-429
ucccguacuccgacucc

SEQ ID NO: 4178 - RNA, 17 nt, Artificial Sequence
  Synthetic oligonucleotide: Ptpn6-430
cuccagcuucuucuuag

SEQ ID NO: 4179 - RNA, 17 nt, Artificial Sequence
  Synthetic oligonucleotide: Ptpn6-431
uagugguuucaaugaac

SEQ ID NO: 4180 - RNA, 17 nt, Artificial Sequence
  Synthetic oligonucleotide: Ptpn6-432
agugguuucaaugaacu

SEQ ID NO: 4181 - RNA, 17 nt, Artificial Sequence
  Synthetic oligonucleotide: Ptpn6-433
uucaaugaacugggcga

SEQ ID NO: 4182 - RNA, 17 nt, Artificial Sequence
  Synthetic oligonucleotide: Ptpn6-434
gcugcgcccgcaccauc

SEQ ID NO: 4183 - RNA, 17 nt, Artificial Sequence
  Synthetic oligonucleotide: Ptpn6-435
cgcccgcaccaucugga

SEQ ID NO: 4184 - RNA, 17 nt, Artificial Sequence
  Synthetic oligonucleotide: Ptpn6-436
ccaucuggauggucuuc

SEQ ID NO: 4185 - RNA, 17 nt, Artificial Sequence
  Synthetic oligonucleotide: Ptpn6-437
ugucaaugucacagucc

SEQ ID NO: 4186 - RNA, 17 nt, Artificial Sequence
  Synthetic oligonucleotide: Ptpn6-438
caugucgaugacaauga

SEQ ID NO: 4187 - RNA, 17 nt, Artificial Sequence
  Synthetic oligonucleotide: Ptpn6-439
caaugauggugccugug

SEQ ID NO: 4188 - RNA, 17 nt, Artificial Sequence
  Synthetic oligonucleotide: Ptpn6-440
gccugugcggccgaugc

SEQ ID NO: 4189 - RNA, 17 nt, Artificial Sequence
  Synthetic oligonucleotide: Ptpn6-441
  misc_feature (1)..(1): n is a, c, g, or u
ncugcagugcacgauga

SEQ ID NO: 4190 - RNA, 17 nt, Artificial Sequence
  Synthetic oligonucleotide: Ptpn6-442
cugcagugcacgaugau

SEQ ID NO: 4191 - RNA, 17 nt, Artificial Sequence
  Synthetic oligonucleotide: Ptpn6-443
augaugggcccugcgug

SEQ ID NO: 4192 - RNA, 17 nt, Artificial Sequence
  Synthetic oligonucleotide: Ptpn6-444
gcagacuuuccugccgc

SEQ ID NO: 4193 - RNA, 17 nt, Artificial Sequence
  Synthetic oligonucleotide: Ptpn6-445
ccugccgcugguugauc

SEQ ID NO: 4194 - RNA, 17 nt, Artificial Sequence
  Synthetic oligonucleotide: Ptpn6-446
gcugguugaucuggucc

SEQ ID NO: 4195 - RNA, 17 nt, Artificial Sequence
  Synthetic oligonucleotide: Ptpn6-447
ucugguccaggaagcug

SEQ ID NO: 4196 - RNA, 17 nt, Artificial Sequence
  Synthetic oligonucleotide: Ptpn6-448
aagcugaggacaccccc

SEQ ID NO: 4197 - RNA, 17 nt, Artificial Sequence
  Synthetic oligonucleotide: Ptpn6-449
gacacccccaggcucac

SEQ ID NO: 4198 - RNA, 17 nt, Artificial Sequence
  Synthetic oligonucleotide: Ptpn6-450
acacccccaggcucacu

SEQ ID NO: 4199 - RNA, 17 nt, Artificial Sequence
  Synthetic oligonucleotide: Ptpn6-451
cacccccaggcucacug

SEQ ID NO: 4200 - RNA, 17 nt, Artificial Sequence
  Synthetic oligonucleotide: Ptpn6-452
gcucacuggggacccca

SEQ ID NO: 4201 - RNA, 17 nt, Artificial Sequence
  Synthetic oligonucleotide: Ptpn6-453
acuggggaccccauggu

SEQ ID NO: 4202 - RNA, 17 nt, Artificial Sequence
  Synthetic oligonucleotide: Ptpn6-454
cuggggaccccaugguc

SEQ ID NO: 4203 - RNA, 17 nt, Artificial Sequence
  Synthetic oligonucleotide: Ptpn6-455
cauggucgggccagcuc

SEQ ID NO: 4204 - RNA, 17 nt, Artificial Sequence
  Synthetic oligonucleotide: Ptpn6-456
cgggccagcucagguac

SEQ ID NO: 4205 - RNA, 17 nt, Artificial Sequence
  Synthetic oligonucleotide: Ptpn6-457
gccagaucucccgaauc

SEQ ID NO: 4206 - RNA, 17 nt, Artificial Sequence
  Synthetic oligonucleotide: Ptpn6-458
cagcggggagaccugua

SEQ ID NO: 4207 - RNA, 17 nt, Artificial Sequence
  Synthetic oligonucleotide: Ptpn6-459
gggagaccuguaaggua

SEQ ID NO: 4208 - RNA, 17 nt, Artificial Sequence
  Synthetic oligonucleotide: Ptpn6-460
gguacggaguuuguauu

SEQ ID NO: 4209 - RNA, 17 nt, Artificial Sequence
  Synthetic oligonucleotide: Ptpn6-461
gucaugcuccccgcagu

SEQ ID NO: 4210 - RNA, 17 nt, Artificial Sequence
  Synthetic oligonucleotide: Ptpn6-462
gcaguuggucacagagu

SEQ ID NO: 4211 - RNA, 17 nt, Artificial Sequence
  Synthetic oligonucleotide: Ptpn6-463
caguuggucacagagua

SEQ ID NO: 4212 - RNA, 17 nt, Artificial Sequence
  Synthetic oligonucleotide: Ptpn6-464
acgcugcaugcccaccu

SEQ ID NO: 4213 - RNA, 17 nt, Artificial Sequence
  Synthetic oligonucleotide: Ptpn6-465
cgcugcaugcccaccuc

SEQ ID NO: 4214 - RNA, 17 nt, Artificial Sequence
  Synthetic oligonucleotide: Ptpn6-466
cccaccucgggccagua

SEQ ID NO: 4215 - RNA, 17 nt, Artificial Sequence
  Synthetic oligonucleotide: Ptpn6-467
ccaccucgggccaguau

SEQ ID NO: 4216 - RNA, 17 nt, Artificial Sequence
  Synthetic oligonucleotide: Ptpn6-468
ggccuuucuccaccucu

SEQ ID NO: 4217 - RNA, 17 nt, Artificial Sequence
  Synthetic oligonucleotide: Ptpn6-469
gccuuucuccaccucuc

SEQ ID NO: 4218 - RNA, 17 nt, Artificial Sequence
  Synthetic oligonucleotide: Ptpn6-470
uuucuccaccucucggg

SEQ ID NO: 4219 - RNA, 17 nt, Artificial Sequence
  Synthetic oligonucleotide: Ptpn6-471
uggucaugacgaugaca

SEQ ID NO: 4220 - RNA, 17 nt, Artificial Sequence
  Synthetic oligonucleotide: Ptpn6-472
ccagaagucauugaccg

SEQ ID NO: 4221 - RNA, 17 nt, Artificial Sequence
  Synthetic oligonucleotide: Ptpn6-473
uggccuccagacaaccc

SEQ ID NO: 4222 - RNA, 17 nt, Artificial Sequence
  Synthetic oligonucleotide: Ptpn6-474
cuccagacaacccuggc

SEQ ID NO: 4223 - RNA, 17 nt, Artificial Sequence
  Synthetic oligonucleotide: Ptpn6-475
acccuggcuggcgaugu

SEQ ID NO: 4224 - RNA, 17 nt, Artificial Sequence
  Synthetic oligonucleotide: Ptpn6-476
gucuuagcguucucauc

SEQ ID NO: 4225 - RNA, 17 nt, Artificial Sequence
  Synthetic oligonucleotide: Ptpn6-477
ucuuagcguucucauca

SEQ ID NO: 4226 - RNA, 17 nt, Artificial Sequence
  Synthetic oligonucleotide: Ptpn6-478
caucagggccuagcagc

SEQ ID NO: 4227 - RNA, 17 nt, Artificial Sequence
  Synthetic oligonucleotide: Ptpn6-479
guuggcauugauguagu

SEQ ID NO: 4228 - RNA, 17 nt, Artificial Sequence
  Synthetic oligonucleotide: Ptpn6-480
auugauguagucggacc

SEQ ID NO: 4229 - RNA, 17 nt, Artificial Sequence
  Synthetic oligonucleotide: Ptpn6-481
uugauguagucggaccc

SEQ ID NO: 4230 - RNA, 17 nt, Artificial Sequence
  Synthetic oligonucleotide: Ptpn6-482
ugauguagucggacccg

SEQ ID NO: 4231 - RNA, 17 nt, Artificial Sequence
  Synthetic oligonucleotide: Ptpn6-483
uacugucccgucccugc

SEQ ID NO: 4232 - RNA, 17 nt, Artificial Sequence
  Synthetic oligonucleotide: Ptpn6-484
gucccugcaggaucacu

SEQ ID NO: 4233 - RNA, 17 nt, Artificial Sequence
  Synthetic oligonucleotide: Ptpn6-485
gcaggaucacucggcug

SEQ ID NO: 4234 - RNA, 17 nt, Artificial Sequence
  Synthetic oligonucleotide: Ptpn6-486
ggagaauguucuuguag

SEQ ID NO: 4235 - RNA, 17 nt, Artificial Sequence
  Synthetic oligonucleotide: Ptpn6-487
uucuugcccuuguucuc

SEQ ID NO: 4236 - RNA, 17 nt, Artificial Sequence
  Synthetic oligonucleotide: Ptpn6-488
gcugcccuuccagacgc

SEQ ID NO: 4237 - RNA, 17 nt, Artificial Sequence
  Synthetic oligonucleotide: Ptpn6-489
cucccagaagccagccu

SEQ ID NO: 4238 - RNA, 17 nt, Artificial Sequence
  Synthetic oligonucleotide: Ptpn6-490
agccuuggcuguauccu

SEQ ID NO: 4239 - RNA, 17 nt, Artificial Sequence
  Synthetic oligonucleotide: Ptpn6-491
uguucaguuccaacacu

SEQ ID NO: 4240 - RNA, 17 nt, Artificial Sequence
  Synthetic oligonucleotide: Ptpn6-492
agccgcauucacccucg

SEQ ID NO: 4241 - RNA, 17 nt, Artificial Sequence
  Synthetic oligonucleotide: Ptpn6-493
acccucguggcauagua

SEQ ID NO: 4242 - RNA, 17 nt, Artificial Sequence
  Synthetic oligonucleotide: Ptpn6-494
cugccgcagguagacaa

SEQ ID NO: 4243 - RNA, 17 nt, Artificial Sequence
  Synthetic oligonucleotide: Ptpn6-495
guagacaaaggcgccug

SEQ ID NO: 4244 - RNA, 17 nt, Artificial Sequence
  Synthetic oligonucleotide: Ptpn6-496
ucuugaaaugcuccacc

SEQ ID NO: 4245 - RNA, 17 nt, Artificial Sequence
  Synthetic oligonucleotide: Ptpn6-497
gcuccaccagguccgug

SEQ ID NO: 4246 - RNA, 17 nt, Artificial Sequence
  Synthetic oligonucleotide: Ptpn6-498
guccgugaggcugucga

SEQ ID NO: 4247 - RNA, 17 nt, Artificial Sequence
  Synthetic oligonucleotide: Ptpn6-499
cgcacaugaccuugaug

SEQ ID NO: 4248 - RNA, 17 nt, Artificial Sequence
  Synthetic oligonucleotide: Ptpn6-500
gcacaugaccuugaugu

SEQ ID NO: 4249 - RNA, 17 nt, Artificial Sequence
  Synthetic oligonucleotide: Ptpn6-501
cacaugaccuugaugug

SEQ ID NO: 4250 - RNA, 17 nt, Artificial Sequence
  Synthetic oligonucleotide: Ptpn6-502
acaugaccuugaugugg

SEQ ID NO: 4251 - RNA, 20 nt, Artificial Sequence
  Synthetic oligonucleotide: Ptpn6-503
ggggaucaggugacccauau

SEQ ID NO: 4252 - RNA, 20 nt, Artificial Sequence
  Synthetic oligonucleotide: Ptpn6-504
gugguuucaccgagaccuca

SEQ ID NO: 4253 - RNA, 20 nt, Artificial Sequence
  Synthetic oligonucleotide: Ptpn6-505
uucaccgagaccucaguggg

SEQ ID NO: 4254 - RNA, 20 nt, Artificial Sequence
  Synthetic oligonucleotide: Ptpn6-506
agaccucagugggcuggaug

SEQ ID NO: 4255 - RNA, 20 nt, Artificial Sequence
  Synthetic oligonucleotide: Ptpn6-507
uggaugcagagacccugcuc

SEQ ID NO: 4256 - RNA, 20 nt, Artificial Sequence
  Synthetic oligonucleotide: Ptpn6-508
gcagagacccugcucaaggg

SEQ ID NO: 4257 - RNA, 20 nt, Artificial Sequence
  Synthetic oligonucleotide: Ptpn6-509
uccuggcucggcccagucgc

SEQ ID NO: 4258 - RNA, 20 nt, Artificial Sequence
  Synthetic oligonucleotide: Ptpn6-510
cucggcccagucgcaagaac

SEQ ID NO: 4259 - RNA, 20 nt, Artificial Sequence
  Synthetic oligonucleotide: Ptpn6-511
aggugacccauauucggauc

SEQ ID NO: 4260 - RNA, 20 nt, Artificial Sequence
  Synthetic oligonucleotide: Ptpn6-512
ccauauucggauccagaacu

SEQ ID NO: 4261 - RNA, 20 nt, Artificial Sequence
  Synthetic oligonucleotide: Ptpn6-95
cauauucggauccagaacuc

SEQ ID NO: 4262 - RNA, 20 nt, Artificial Sequence
  Synthetic oligonucleotide: Ptpn6-96
auauucggauccagaacuca

SEQ ID NO: 4263 - RNA, 20 nt, Artificial Sequence
  Synthetic oligonucleotide: Ptpn6-515
aggggauuucuaugaccugu

SEQ ID NO: 4264 - RNA, 20 nt, Artificial Sequence
  Synthetic oligonucleotide: Ptpn6-59
ggggauuucuaugaccugua

SEQ ID NO: 4265 - RNA, 20 nt, Artificial Sequence
  Synthetic oligonucleotide: Ptpn6-517
ggauuucuaugaccuguaug

SEQ ID NO: 4266 - RNA, 20 nt, Artificial Sequence
  Synthetic oligonucleotide: Ptpn6-63
gauuucuaugaccuguaugg

SEQ ID NO: 4267 - RNA, 20 nt, Artificial Sequence
  Synthetic oligonucleotide: Ptpn6-98
auuucuaugaccuguaugga

SEQ ID NO: 4268 - RNA, 20 nt, Artificial Sequence
  Synthetic oligonucleotide: Ptpn6-99
uuucuaugaccuguauggag

SEQ ID NO: 4269 - RNA, 20 nt, Artificial Sequence
  Synthetic oligonucleotide: Ptpn6-521
ucuaugaccuguauggaggg

SEQ ID NO: 4270 - RNA, 20 nt, Artificial Sequence
  Synthetic oligonucleotide: Ptpn6-522
ggagaaguuugcgacucuga

SEQ ID NO: 4271 - RNA, 20 nt, Artificial Sequence
  Synthetic oligonucleotide: Ptpn6-523
uugcgacucugacagagcug

SEQ ID NO: 4272 - RNA, 20 nt, Artificial Sequence
  Synthetic oligonucleotide: Ptpn6-100
ugcgacucugacagagcugg

SEQ ID NO: 4273 - RNA, 20 nt, Artificial Sequence
  Synthetic oligonucleotide: Ptpn6-525
uggaguacuacacucagcag

SEQ ID NO: 4274 - RNA, 20 nt, Artificial Sequence
  Synthetic oligonucleotide: Ptpn6-526
cucagcagcaggguguccug

SEQ ID NO: 4275 - RNA, 20 nt, Artificial Sequence
  Synthetic oligonucleotide: Ptpn6-527
ucauccaccucaaguacccg

SEQ ID NO: 4276 - RNA, 20 nt, Artificial Sequence
  Synthetic oligonucleotide: Ptpn6-528
gaacugcuccgaucccacua

SEQ ID NO: 4277 - RNA, 20 nt, Artificial Sequence
  Synthetic oligonucleotide: Ptpn6-529
acugcuccgaucccacuagu

SEQ ID NO: 4278 - RNA, 20 nt, Artificial Sequence
  Synthetic oligonucleotide: Ptpn6-530
guaccauggccacaugucug

SEQ ID NO: 4279 - RNA, 20 nt, Artificial Sequence
  Synthetic oligonucleotide: Ptpn6-531
ccacaugucuggcgggcagg

SEQ ID NO: 4280 - RNA, 20 nt, Artificial Sequence
  Synthetic oligonucleotide: Ptpn6-532
cagagacgcugcugcaggcc

SEQ ID NO: 4281 - RNA, 20 nt, Artificial Sequence
  Synthetic oligonucleotide: Ptpn6-533
gacgcugcugcaggccaagg

SEQ ID NO: 4282 - RNA, 20 nt, Artificial Sequence
  Synthetic oligonucleotide: Ptpn6-534
cugcaggccaagggcgagcc

SEQ ID NO: 4283 - RNA, 20 nt, Artificial Sequence
  Synthetic oligonucleotide: Ptpn6-535
gcccuggacguuucuugugc

SEQ ID NO: 4284 - RNA, 20 nt, Artificial Sequence
  Synthetic oligonucleotide: Ptpn6-536
ccuggacguuucuugugcgu

SEQ ID NO: 4285 - RNA, 20 nt, Artificial Sequence
  Synthetic oligonucleotide: Ptpn6-537
gcgugagagccucagccagc

SEQ ID NO: 4286 - RNA, 20 nt, Artificial Sequence
  Synthetic oligonucleotide: Ptpn6-107
cgugagagccucagccagcc

SEQ ID NO: 4287 - RNA, 20 nt, Artificial Sequence
  Synthetic oligonucleotide: Ptpn6-539
gcuggcccaggcuccccgcu

SEQ ID NO: 4288 - RNA, 17 nt, Artificial Sequence
  Synthetic oligonucleotide: Ptpn6-540
gaucaggugacccauau

SEQ ID NO: 4289 - RNA, 17 nt, Artificial Sequence
  Synthetic oligonucleotide: Ptpn6-541
guuucaccgagaccuca

SEQ ID NO: 4290 - RNA, 17 nt, Artificial Sequence
  Synthetic oligonucleotide: Ptpn6-542
accgagaccucaguggg

SEQ ID NO: 4291 - RNA, 17 nt, Artificial Sequence
  Synthetic oligonucleotide: Ptpn6-543
ccucagugggcuggaug

SEQ ID NO: 4292 - RNA, 17 nt, Artificial Sequence
  Synthetic oligonucleotide: Ptpn6-544
augcagagacccugcuc

SEQ ID NO: 4293 - RNA, 17 nt, Artificial Sequence
  Synthetic oligonucleotide: Ptpn6-545
gagacccugcucaaggg

SEQ ID NO: 4294 - RNA, 17 nt, Artificial Sequence
  Synthetic oligonucleotide: Ptpn6-546
uggcucggcccagucgc

SEQ ID NO: 4295 - RNA, 17 nt, Artificial Sequence
  Synthetic oligonucleotide: Ptpn6-547
ggcccagucgcaagaac

SEQ ID NO: 4296 - RNA, 17 nt, Artificial Sequence
  Synthetic oligonucleotide: Ptpn6-548
ugacccauauucggauc

SEQ ID NO: 4297 - RNA, 17 nt, Artificial Sequence
  Synthetic oligonucleotide: Ptpn6-549
uauucggauccagaacu

SEQ ID NO: 4298 - RNA, 17 nt, Artificial Sequence
  Synthetic oligonucleotide: Ptpn6-36
auucggauccagaacuc

SEQ ID NO: 4299 - RNA, 17 nt, Artificial Sequence
  Synthetic oligonucleotide: Ptpn6-37
uucggauccagaacuca

SEQ ID NO: 4300 - RNA, 17 nt, Artificial Sequence
  Synthetic oligonucleotide: Ptpn6-552
ggauuucuaugaccugu

SEQ ID NO: 4301 - RNA, 17 nt, Artificial Sequence
  Synthetic oligonucleotide: Ptpn6-77
gauuucuaugaccugua

SEQ ID NO: 4302 - RNA, 17 nt, Artificial Sequence
  Synthetic oligonucleotide: Ptpn6-554
uuucuaugaccuguaug

SEQ ID NO: 4303 - RNA, 17 nt, Artificial Sequence
  Synthetic oligonucleotide: Ptpn6-39
uucuaugaccuguaugg

SEQ ID NO: 4304 - RNA, 17 nt, Artificial Sequence
  Synthetic oligonucleotide: Ptpn6-40
ucuaugaccuguaugga

SEQ ID NO: 4305 - RNA, 17 nt, Artificial Sequence
  Synthetic oligonucleotide: Ptpn6-41
cuaugaccuguauggag

SEQ ID NO: 4306 - RNA, 17 nt, Artificial Sequence
  Synthetic oligonucleotide: Ptpn6-558
augaccuguauggaggg

SEQ ID NO: 4307 - RNA, 17 nt, Artificial Sequence
  Synthetic oligonucleotide: Ptpn6-559
gaaguuugcgacucuga

SEQ ID NO: 4308 - RNA, 17 nt, Artificial Sequence
  Synthetic oligonucleotide: Ptpn6-560
cgacucugacagagcug

SEQ ID NO: 4309 - RNA, 17 nt, Artificial Sequence
  Synthetic oligonucleotide: Ptpn6-78
gacucugacagagcugg

SEQ ID NO: 4310 - RNA, 17 nt, Artificial Sequence
  Synthetic oligonucleotide: Ptpn6-562
aguacuacacucagcag

SEQ ID NO: 4311 - RNA, 17 nt, Artificial Sequence
  Synthetic oligonucleotide: Ptpn6-563
agcagcaggguguccug

SEQ ID NO: 4312 - RNA, 17 nt, Artificial Sequence
  Synthetic oligonucleotide: Ptpn6-564
uccaccucaaguacccg

SEQ ID NO: 4313 - RNA, 17 nt, Artificial Sequence
  Synthetic oligonucleotide: Ptpn6-565
cugcuccgaucccacua

SEQ ID NO: 4314 - RNA, 17 nt, Artificial Sequence
  Synthetic oligonucleotide: Ptpn6-566
gcuccgaucccacuagu

SEQ ID NO: 4315 - RNA, 17 nt, Artificial Sequence
  Synthetic oligonucleotide: Ptpn6-567
ccauggccacaugucug

SEQ ID NO: 4316 - RNA, 17 nt, Artificial Sequence
  Synthetic oligonucleotide: Ptpn6-568
caugucuggcgggcagg

SEQ ID NO: 4317 - RNA, 17 nt, Artificial Sequence
  Synthetic oligonucleotide: Ptpn6-569
agacgcugcugcaggcc

SEQ ID NO: 4318 - RNA, 17 nt, Artificial Sequence
  Synthetic oligonucleotide: Ptpn6-570
gcugcugcaggccaagg

SEQ ID NO: 4319 - RNA, 17 nt, Artificial Sequence
  Synthetic oligonucleotide: Ptpn6-571
caggccaagggcgagcc

SEQ ID NO: 4320 - RNA, 17 nt, Artificial Sequence
  Synthetic oligonucleotide: Ptpn6-572
cuggacguuucuugugc

SEQ ID NO: 4321 - RNA, 17 nt, Artificial Sequence
  Synthetic oligonucleotide: Ptpn6-573
ggacguuucuugugcgu

SEQ ID NO: 4322 - RNA, 17 nt, Artificial Sequence
  Synthetic oligonucleotide: Ptpn6-574
ugagagccucagccagc

SEQ ID NO: 4323 - RNA, 17 nt, Artificial Sequence
  Synthetic oligonucleotide: Ptpn6-83
gagagccucagccagcc

SEQ ID NO: 4324 - RNA, 17 nt, Artificial Sequence
  Synthetic oligonucleotide: Ptpn6-576
ggcccaggcuccccgcu

SEQ ID NO: 4325 - RNA, 20 nt, Artificial Sequence
  Synthetic oligonucleotide: Ptpn6-577
gcggggagccugggccagcc

SEQ ID NO: 4326 - RNA, 20 nt, Artificial Sequence
  Synthetic oligonucleotide: Ptpn6-578
ggccagccuugggcugguca

SEQ ID NO: 4327 - RNA, 20 nt, Artificial Sequence
  Synthetic oligonucleotide: Ptpn6-579
cuugggcuggucacugagca

SEQ ID NO: 4328 - RNA, 20 nt, Artificial Sequence
  Synthetic oligonucleotide: Ptpn6-580
ggucacugagcacagaaagc

SEQ ID NO: 4329 - RNA, 20 nt, Artificial Sequence
  Synthetic oligonucleotide: Ptpn6-581
gcacgaagucuccaggcugg

SEQ ID NO: 4330 - RNA, 20 nt, Artificial Sequence
  Synthetic oligonucleotide: Ptpn6-582
uggcugaggcucucacgcac

SEQ ID NO: 4331 - RNA, 20 nt, Artificial Sequence
  Synthetic oligonucleotide: Ptpn6-583
ucucacgcacaagaaacguc

SEQ ID NO: 4332 - RNA, 20 nt, Artificial Sequence
  Synthetic oligonucleotide: Ptpn6-584
agugggaucggagcaguuca

SEQ ID NO: 4333 - RNA, 20 nt, Artificial Sequence
  Synthetic oligonucleotide: Ptpn6-585
cggagcaguucagcggguac

SEQ ID NO: 4334 - RNA, 20 nt, Artificial Sequence
  Synthetic oligonucleotide: Ptpn6-586
caguucagcggguacuugag

SEQ ID NO: 4335 - RNA, 20 nt, Artificial Sequence
  Synthetic oligonucleotide: Ptpn6-587
auggugccgucgcgguccug

SEQ ID NO: 4336 - RNA, 20 nt, Artificial Sequence
  Synthetic oligonucleotide: Ptpn6-588
uccugcaggacacccugcug

SEQ ID NO: 4337 - RNA, 20 nt, Artificial Sequence
  Synthetic oligonucleotide: Ptpn6-589
uaguacuccaccagcucugu

SEQ ID NO: 4338 - RNA, 20 nt, Artificial Sequence
  Synthetic oligonucleotide: Ptpn6-590
ucuccccuccauacagguca

SEQ ID NO: 4339 - RNA, 20 nt, Artificial Sequence
  Synthetic oligonucleotide: Ptpn6-591
auacaggucauagaaauccc

SEQ ID NO: 4340 - RNA, 20 nt, Artificial Sequence
  Synthetic oligonucleotide: Ptpn6-592
ucauagaaauccccugaguu

SEQ ID NO: 4341 - RNA, 20 nt, Artificial Sequence
  Synthetic oligonucleotide: Ptpn6-593
aaauccccugaguucuggau

SEQ ID NO: 4342 - RNA, 20 nt, Artificial Sequence
  Synthetic oligonucleotide: Ptpn6-594
ccugaguucuggauccgaau

SEQ ID NO: 4343 - RNA, 20 nt, Artificial Sequence
  Synthetic oligonucleotide: Ptpn6-595
agucacccugguucuugcga

SEQ ID NO: 4344 - RNA, 20 nt, Artificial Sequence
  Synthetic oligonucleotide: Ptpn6-596
cccugguucuugcgacuggg

SEQ ID NO: 4345 - RNA, 20 nt, Artificial Sequence
  Synthetic oligonucleotide: Ptpn6-597
uucuugcgacugggccgagc

SEQ ID NO: 4346 - RNA, 20 nt, Artificial Sequence
  Synthetic oligonucleotide: Ptpn6-28
ucuugcgacugggccgagcc

SEQ ID NO: 4347 - RNA, 20 nt, Artificial Sequence
  Synthetic oligonucleotide: Ptpn6-599
ggccgagccaggaagcuacc

SEQ ID NO: 4348 - RNA, 20 nt, Artificial Sequence
  Synthetic oligonucleotide: Ptpn6-600
uaccguggacaccucggccc

SEQ ID NO: 4349 - RNA, 20 nt, Artificial Sequence
  Synthetic oligonucleotide: Ptpn6-601
uggacaccucggcccuugag

SEQ ID NO: 4350 - RNA, 20 nt, Artificial Sequence
  Synthetic oligonucleotide: Ptpn6-602
gggucucugcauccagccca

SEQ ID NO: 4351 - RNA, 20 nt, Artificial Sequence
  Synthetic oligonucleotide: Ptpn6-603
uccagcccacugaggucucg

SEQ ID NO: 4352 - RNA, 17 nt, Artificial Sequence
  Synthetic oligonucleotide: Ptpn6-604
gggagccugggccagcc

SEQ ID NO: 4353 - RNA, 17 nt, Artificial Sequence
  Synthetic oligonucleotide: Ptpn6-605
cagccuugggcugguca

SEQ ID NO: 4354 - RNA, 17 nt, Artificial Sequence
  Synthetic oligonucleotide: Ptpn6-606
gggcuggucacugagca

SEQ ID NO: 4355 - RNA, 17 nt, Artificial Sequence
  Synthetic oligonucleotide: Ptpn6-607
cacugagcacagaaagc

SEQ ID NO: 4356 - RNA, 17 nt, Artificial Sequence
  Synthetic oligonucleotide: Ptpn6-608
cgaagucuccaggcugg

SEQ ID NO: 4357 - RNA, 17 nt, Artificial Sequence
  Synthetic oligonucleotide: Ptpn6-609
cugaggcucucacgcac

SEQ ID NO: 4358 - RNA, 17 nt, Artificial Sequence
  Synthetic oligonucleotide: Ptpn6-610
cacgcacaagaaacguc

SEQ ID NO: 4359 - RNA, 17 nt, Artificial Sequence
  Synthetic oligonucleotide: Ptpn6-611
gggaucggagcaguuca

SEQ ID NO: 4360 - RNA, 17 nt, Artificial Sequence
  Synthetic oligonucleotide: Ptpn6-612
agcaguucagcggguac

SEQ ID NO: 4361 - RNA, 17 nt, Artificial Sequence
  Synthetic oligonucleotide: Ptpn6-613
uucagcggguacuugag

SEQ ID NO: 4362 - RNA, 17 nt, Artificial Sequence
  Synthetic oligonucleotide: Ptpn6-614
gugccgucgcgguccug

SEQ ID NO: 4363 - RNA, 17 nt, Artificial Sequence
  Synthetic oligonucleotide: Ptpn6-615
ugcaggacacccugcug

SEQ ID NO: 4364 - RNA, 17 nt, Artificial Sequence
  Synthetic oligonucleotide: Ptpn6-616
uacuccaccagcucugu

SEQ ID NO: 4365 - RNA, 17 nt, Artificial Sequence
  Synthetic oligonucleotide: Ptpn6-617
ccccuccauacagguca

SEQ ID NO: 4366 - RNA, 17 nt, Artificial Sequence
  Synthetic oligonucleotide: Ptpn6-618
caggucauagaaauccc

SEQ ID NO: 4367 - RNA, 17 nt, Artificial Sequence
  Synthetic oligonucleotide: Ptpn6-619
uagaaauccccugaguu

SEQ ID NO: 4368 - RNA, 17 nt, Artificial Sequence
  Synthetic oligonucleotide: Ptpn6-620
uccccugaguucuggau

SEQ ID NO: 4369 - RNA, 17 nt, Artificial Sequence
  Synthetic oligonucleotide: Ptpn6-621
gaguucuggauccgaau

SEQ ID NO: 4370 - RNA, 17 nt, Artificial Sequence
  Synthetic oligonucleotide: Ptpn6-622
cacccugguucuugcga

SEQ ID NO: 4371 - RNA, 17 nt, Artificial Sequence
  Synthetic oligonucleotide: Ptpn6-623
ugguucuugcgacuggg

SEQ ID NO: 4372 - RNA, 17 nt, Artificial Sequence
  Synthetic oligonucleotide: Ptpn6-624
uugcgacugggccgagc

SEQ ID NO: 4373 - RNA, 17 nt, Artificial Sequence
  Synthetic oligonucleotide: Ptpn6-55
ugcgacugggccgagcc

SEQ ID NO: 4374 - RNA, 17 nt, Artificial Sequence
  Synthetic oligonucleotide: Ptpn6-626
cgagccaggaagcuacc

SEQ ID NO: 4375 - RNA, 17 nt, Artificial Sequence
  Synthetic oligonucleotide: Ptpn6-627
cguggacaccucggccc

SEQ ID NO: 4376 - RNA, 17 nt, Artificial Sequence
  Synthetic oligonucleotide: Ptpn6-628
acaccucggcccuugag

SEQ ID NO: 4377 - RNA, 17 nt, Artificial Sequence
  Synthetic oligonucleotide: Ptpn6-629
ucucugcauccagccca

SEQ ID NO: 4378 - RNA, 17 nt, Artificial Sequence
  Synthetic oligonucleotide: Ptpn6-630
agcccacugaggucucg

SEQ ID NO: 4379 - RNA, 20 nt, Artificial Sequence
  Synthetic oligonucleotide: Ptpn6-631
uggagaccuucgacagccuc

SEQ ID NO: 4380 - RNA, 20 nt, Artificial Sequence
  Synthetic oligonucleotide: Ptpn6-632
auuucaagaagacggggauu

SEQ ID NO: 4381 - RNA, 20 nt, Artificial Sequence
  Synthetic oligonucleotide: Ptpn6-155
uuucaagaagacggggauug

SEQ ID NO: 4382 - RNA, 20 nt, Artificial Sequence
  Synthetic oligonucleotide: Ptpn6-634
gacgcuacacaguggguggu

SEQ ID NO: 4383 - RNA, 20 nt, Artificial Sequence
  Synthetic oligonucleotide: Ptpn6-148
acgcuacacagugggugguu

SEQ ID NO: 4384 - RNA, 20 nt, Artificial Sequence
  Synthetic oligonucleotide: Ptpn6-636
ucgacagccucacggaccug

SEQ ID NO: 4385 - RNA, 20 nt, Artificial Sequence
  Synthetic oligonucleotide: Ptpn6-151
cgacagccucacggaccugg

SEQ ID NO: 4386 - RNA, 20 nt, Artificial Sequence
  Synthetic oligonucleotide: Ptpn6-638
cggaccugguggagcauuuc

SEQ ID NO: 4387 - RNA, 20 nt, Artificial Sequence
  Synthetic oligonucleotide: Ptpn6-639
ugguggagcauuucaagaag

SEQ ID NO: 4388 - RNA, 20 nt, Artificial Sequence
  Synthetic oligonucleotide: Ptpn6-152
gguggagcauuucaagaaga

SEQ ID NO: 4389 - RNA, 20 nt, Artificial Sequence
  Synthetic oligonucleotide: Ptpn6-153
guggagcauuucaagaagac

SEQ ID NO: 4390 - RNA, 20 nt, Artificial Sequence
  Synthetic oligonucleotide: Ptpn6-642
gcauuucaagaagacgggga

SEQ ID NO: 4391 - RNA, 20 nt, Artificial Sequence
  Synthetic oligonucleotide: Ptpn6-643
gagggugaaugcggcugaca

SEQ ID NO: 4392 - RNA, 20 nt, Artificial Sequence
  Synthetic oligonucleotide: Ptpn6-644
gggugaaugcggcugacauu

SEQ ID NO: 4393 - RNA, 20 nt, Artificial Sequence
  Synthetic oligonucleotide: Ptpn6-645
aaugcggcugacauugagaa

SEQ ID NO: 4394 - RNA, 20 nt, Artificial Sequence
  Synthetic oligonucleotide: Ptpn6-646
cugacauugagaaccgagug

SEQ ID NO: 4395 - RNA, 20 nt, Artificial Sequence
  Synthetic oligonucleotide: Ptpn6-160
ugacauugagaaccgagugu

SEQ ID NO: 4396 - RNA, 20 nt, Artificial Sequence
  Synthetic oligonucleotide: Ptpn6-648
uugagaaccgaguguuggaa

SEQ ID NO: 4397 - RNA, 20 nt, Artificial Sequence
  Synthetic oligonucleotide: Ptpn6-649
accgaguguuggaacugaac

SEQ ID NO: 4398 - RNA, 20 nt, Artificial Sequence
  Synthetic oligonucleotide: Ptpn6-650
uguuggaacugaacaagaag

SEQ ID NO: 4399 - RNA, 20 nt, Artificial Sequence
  Synthetic oligonucleotide: Ptpn6-161
guuggaacugaacaagaagc

SEQ ID NO: 4400 - RNA, 20 nt, Artificial Sequence
  Synthetic oligonucleotide: Ptpn6-652
acugaacaagaagcaggagu

SEQ ID NO: 4401 - RNA, 20 nt, Artificial Sequence
  Synthetic oligonucleotide: Ptpn6-653
ugaacaagaagcaggagucc

SEQ ID NO: 4402 - RNA, 20 nt, Artificial Sequence
  Synthetic oligonucleotide: Ptpn6-654
gauacagccaaggcuggcuu

SEQ ID NO: 4403 - RNA, 20 nt, Artificial Sequence
  Synthetic oligonucleotide: Ptpn6-165
auacagccaaggcuggcuuc

SEQ ID NO: 4404 - RNA, 20 nt, Artificial Sequence
  Synthetic oligonucleotide: Ptpn6-166
uacagccaaggcuggcuucu

SEQ ID NO: 4405 - RNA, 20 nt, Artificial Sequence
  Synthetic oligonucleotide: Ptpn6-657
cagccaaggcuggcuucugg

SEQ ID NO: 4406 - RNA, 20 nt, Artificial Sequence
  Synthetic oligonucleotide: Ptpn6-167
agccaaggcuggcuucuggg

SEQ ID NO: 4407 - RNA, 20 nt, Artificial Sequence
  Synthetic oligonucleotide: Ptpn6-659
ggcuggcuucugggaggagu

SEQ ID NO: 4408 - RNA, 20 nt, Artificial Sequence
  Synthetic oligonucleotide: Ptpn6-660
guuugcagaagcaggaggug

SEQ ID NO: 4409 - RNA, 20 nt, Artificial Sequence
  Synthetic oligonucleotide: Ptpn6-661
ugaagaacuugcaccagcgu

SEQ ID NO: 4410 - RNA, 20 nt, Artificial Sequence
  Synthetic oligonucleotide: Ptpn6-168
gaagaacuugcaccagcguc

SEQ ID NO: 4411 - RNA, 20 nt, Artificial Sequence
  Synthetic oligonucleotide: Ptpn6-663
gaacuugcaccagcgucugg

SEQ ID NO: 4412 - RNA, 20 nt, Artificial Sequence
  Synthetic oligonucleotide: Ptpn6-664
gcgucuggaagggcagcggc

SEQ ID NO: 4413 - RNA, 20 nt, Artificial Sequence
  Synthetic oligonucleotide: Ptpn6-665
gucuggaagggcagcggcca

SEQ ID NO: 4414 - RNA, 20 nt, Artificial Sequence
  Synthetic oligonucleotide: Ptpn6-666
aagggcagcggccagagaac

SEQ ID NO: 4415 - RNA, 20 nt, Artificial Sequence
  Synthetic oligonucleotide: Ptpn6-667
agcggccagagaacaagggc

SEQ ID NO: 4416 - RNA, 20 nt, Artificial Sequence
  Synthetic oligonucleotide: Ptpn6-668
acaagggcaagaaccgcuac

SEQ ID NO: 4417 - RNA, 20 nt, Artificial Sequence
  Synthetic oligonucleotide: Ptpn6-669
accacagccgagugauccug

SEQ ID NO: 4418 - RNA, 20 nt, Artificial Sequence
  Synthetic oligonucleotide: Ptpn6-174
ccacagccgagugauccugc

SEQ ID NO: 4419 - RNA, 20 nt, Artificial Sequence
  Synthetic oligonucleotide: Ptpn6-671
agccgagugauccugcaggg

SEQ ID NO: 4420 - RNA, 20 nt, Artificial Sequence
  Synthetic oligonucleotide: Ptpn6-176
gccgagugauccugcaggga

SEQ ID NO: 4421 - RNA, 20 nt, Artificial Sequence
  Synthetic oligonucleotide: Ptpn6-673
gggacgggacaguaacaucc

SEQ ID NO: 4422 - RNA, 20 nt, Artificial Sequence
  Synthetic oligonucleotide: Ptpn6-674
accagcugcuaggcccugau

SEQ ID NO: 4423 - RNA, 20 nt, Artificial Sequence
  Synthetic oligonucleotide: Ptpn6-675
cuaagaccuacaucgccagc

SEQ ID NO: 4424 - RNA, 20 nt, Artificial Sequence
  Synthetic oligonucleotide: Ptpn6-676
acaucgccagccaggguugu

SEQ ID NO: 4425 - RNA, 20 nt, Artificial Sequence
  Synthetic oligonucleotide: Ptpn6-182
caucgccagccaggguuguc

SEQ ID NO: 4426 - RNA, 20 nt, Artificial Sequence
  Synthetic oligonucleotide: Ptpn6-678
acuucuggcagauggcgugg

SEQ ID NO: 4427 - RNA, 20 nt, Artificial Sequence
  Synthetic oligonucleotide: Ptpn6-188
cuucuggcagauggcguggc

SEQ ID NO: 4428 - RNA, 20 nt, Artificial Sequence
  Synthetic oligonucleotide: Ptpn6-680
ucuggcagauggcguggcag

SEQ ID NO: 4429 - RNA, 20 nt, Artificial Sequence
  Synthetic oligonucleotide: Ptpn6-681
cgugucaucgucaugaccac

SEQ ID NO: 4430 - RNA, 20 nt, Artificial Sequence
  Synthetic oligonucleotide: Ptpn6-682
ugucaucgucaugaccaccc

SEQ ID NO: 4431 - RNA, 20 nt, Artificial Sequence
  Synthetic oligonucleotide: Ptpn6-683
ucgucaugaccacccgagag

SEQ ID NO: 4432 - RNA, 20 nt, Artificial Sequence
  Synthetic oligonucleotide: Ptpn6-190
cgucaugaccacccgagagg

SEQ ID NO: 4433 - RNA, 20 nt, Artificial Sequence
  Synthetic oligonucleotide: Ptpn6-685
ucaugaccacccgagaggug

SEQ ID NO: 4434 - RNA, 20 nt, Artificial Sequence
  Synthetic oligonucleotide: Ptpn6-686
caaaugcgucccauacuggc

SEQ ID NO: 4435 - RNA, 20 nt, Artificial Sequence
  Synthetic oligonucleotide: Ptpn6-687
gcgucccauacuggcccgag

SEQ ID NO: 4436 - RNA, 20 nt, Artificial Sequence
  Synthetic oligonucleotide: Ptpn6-688
ggugggcaugcagcgugcuu

SEQ ID NO: 4437 - RNA, 20 nt, Artificial Sequence
  Synthetic oligonucleotide: Ptpn6-689
gcccuacucugugaccaacu

SEQ ID NO: 4438 - RNA, 20 nt, Artificial Sequence
  Synthetic oligonucleotide: Ptpn6-198
cccuacucugugaccaacug

SEQ ID NO: 4439 - RNA, 20 nt, Artificial Sequence
  Synthetic oligonucleotide: Ptpn6-199
ccuacucugugaccaacugc

SEQ ID NO: 4440 - RNA, 20 nt, Artificial Sequence
  Synthetic oligonucleotide: Ptpn6-200
cuacucugugaccaacugcg

SEQ ID NO: 4441 - RNA, 20 nt, Artificial Sequence
  Synthetic oligonucleotide: Ptpn6-693
cugcggggagcaugacacaa

SEQ ID NO: 4442 - RNA, 20 nt, Artificial Sequence
  Synthetic oligonucleotide: Ptpn6-694
guaccuuacaggucuccccg

SEQ ID NO: 4443 - RNA, 20 nt, Artificial Sequence
  Synthetic oligonucleotide: Ptpn6-695
agaucuggcauuaccaguac

SEQ ID NO: 4444 - RNA, 20 nt, Artificial Sequence
  Synthetic oligonucleotide: Ptpn6-696
guaccugagcuggcccgacc

SEQ ID NO: 4445 - RNA, 20 nt, Artificial Sequence
  Synthetic oligonucleotide: Ptpn6-205
uaccugagcuggcccgacca

SEQ ID NO: 4446 - RNA, 20 nt, Artificial Sequence
  Synthetic oligonucleotide: Ptpn6-698
gcccgaccauggggucccca

SEQ ID NO: 4447 - RNA, 20 nt, Artificial Sequence
  Synthetic oligonucleotide: Ptpn6-699
ccaugggguccccagugagc

SEQ ID NO: 4448 - RNA, 20 nt, Artificial Sequence
  Synthetic oligonucleotide: Ptpn6-208
caugggguccccagugagcc

SEQ ID NO: 4449 - RNA, 20 nt, Artificial Sequence
  Synthetic oligonucleotide: Ptpn6-209
augggguccccagugagccu

SEQ ID NO: 4450 - RNA, 20 nt, Artificial Sequence
  Synthetic oligonucleotide: Ptpn6-702
cuggggguguccucagcuuc

SEQ ID NO: 4451 - RNA, 20 nt, Artificial Sequence
  Synthetic oligonucleotide: Ptpn6-703
uggaccagaucaaccagcgg

SEQ ID NO: 4452 - RNA, 20 nt, Artificial Sequence
  Synthetic oligonucleotide: Ptpn6-214
ggaccagaucaaccagcggc

SEQ ID NO: 4453 - RNA, 20 nt, Artificial Sequence
  Synthetic oligonucleotide: Ptpn6-705
gcaggaaagucugccucacg

SEQ ID NO: 4454 - RNA, 20 nt, Artificial Sequence
  Synthetic oligonucleotide: Ptpn6-706
ucauugucaucgacaugcuc

SEQ ID NO: 4455 - RNA, 20 nt, Artificial Sequence
  Synthetic oligonucleotide: Ptpn6-217
cauugucaucgacaugcuca

SEQ ID NO: 4456 - RNA, 20 nt, Artificial Sequence
  Synthetic oligonucleotide: Ptpn6-708
uugucaucgacaugcucaug

SEQ ID NO: 4457 - RNA, 20 nt, Artificial Sequence
  Synthetic oligonucleotide: Ptpn6-709
uggacugugacauugacauc

SEQ ID NO: 4458 - RNA, 20 nt, Artificial Sequence
  Synthetic oligonucleotide: Ptpn6-710
cagaagaccauccagauggu

SEQ ID NO: 4459 - RNA, 20 nt, Artificial Sequence
  Synthetic oligonucleotide: Ptpn6-711
agauggugcgggcgcagcgc

SEQ ID NO: 4460 - RNA, 20 nt, Artificial Sequence
  Synthetic oligonucleotide: Ptpn6-712
agcgcucgggcauggugcag

SEQ ID NO: 4461 - RNA, 20 nt, Artificial Sequence
  Synthetic oligonucleotide: Ptpn6-225
gcgcucgggcauggugcaga

SEQ ID NO: 4462 - RNA, 20 nt, Artificial Sequence
  Synthetic oligonucleotide: Ptpn6-714
cguggccaucgcccaguuca

SEQ ID NO: 4463 - RNA, 20 nt, Artificial Sequence
  Synthetic oligonucleotide: Ptpn6-715
cccaguucauugaaaccacu

SEQ ID NO: 4464 - RNA, 20 nt, Artificial Sequence
  Synthetic oligonucleotide: Ptpn6-716
aguucauugaaaccacuaag

SEQ ID NO: 4465 - RNA, 20 nt, Artificial Sequence
  Synthetic oligonucleotide: Ptpn6-717
uugaaaccacuaagaagaag

SEQ ID NO: 4466 - RNA, 20 nt, Artificial Sequence
  Synthetic oligonucleotide: Ptpn6-228
ugaaaccacuaagaagaagc

SEQ ID NO: 4467 - RNA, 20 nt, Artificial Sequence
  Synthetic oligonucleotide: Ptpn6-719
gaagggccaggagucggagu

SEQ ID NO: 4468 - RNA, 20 nt, Artificial Sequence
  Synthetic oligonucleotide: Ptpn6-230
aagggccaggagucggagua

SEQ ID NO: 4469 - RNA, 20 nt, Artificial Sequence
  Synthetic oligonucleotide: Ptpn6-231
agggccaggagucggaguac

SEQ ID NO: 4470 - RNA, 20 nt, Artificial Sequence
  Synthetic oligonucleotide: Ptpn6-722
acaucaccuaucccccagcc

SEQ ID NO: 4471 - RNA, 20 nt, Artificial Sequence
  Synthetic oligonucleotide: Ptpn6-723
ucaccuaucccccagccaug

SEQ ID NO: 4472 - RNA, 20 nt, Artificial Sequence
  Synthetic oligonucleotide: Ptpn6-724
uguaugagaaccugcacacu

SEQ ID NO: 4473 - RNA, 20 nt, Artificial Sequence
  Synthetic oligonucleotide: Ptpn6-725
agaaccugcacacuaagaac

SEQ ID NO: 4474 - RNA, 20 nt, Artificial Sequence
  Synthetic oligonucleotide: Ptpn6-726
aaccugcacacuaagaacaa

SEQ ID NO: 4475 - RNA, 20 nt, Artificial Sequence
  Synthetic oligonucleotide: Ptpn6-233
accugcacacuaagaacaag

SEQ ID NO: 4476 - RNA, 20 nt, Artificial Sequence
  Synthetic oligonucleotide: Ptpn6-234
ccugcacacuaagaacaaga

SEQ ID NO: 4477 - RNA, 20 nt, Artificial Sequence
  Synthetic oligonucleotide: Ptpn6-729
ugcacacuaagaacaagagg

SEQ ID NO: 4478 - RNA, 20 nt, Artificial Sequence
  Synthetic oligonucleotide: Ptpn6-235
gcacacuaagaacaagaggg

SEQ ID NO: 4479 - RNA, 20 nt, Artificial Sequence
  Synthetic oligonucleotide: Ptpn6-731
acacuaagaacaagagggag

SEQ ID NO: 4480 - RNA, 20 nt, Artificial Sequence
  Synthetic oligonucleotide: Ptpn6-732
agaacaagagggaggagaaa

SEQ ID NO: 4481 - RNA, 20 nt, Artificial Sequence
  Synthetic oligonucleotide: Ptpn6-733
acaagagggaggagaaagug

SEQ ID NO: 4482 - RNA, 20 nt, Artificial Sequence
  Synthetic oligonucleotide: Ptpn6-734
agaagcagcggucagcagac

SEQ ID NO: 4483 - RNA, 20 nt, Artificial Sequence
  Synthetic oligonucleotide: Ptpn6-237
gaagcagcggucagcagaca

SEQ ID NO: 4484 - RNA, 20 nt, Artificial Sequence
  Synthetic oligonucleotide: Ptpn6-736
agcagcggucagcagacaag

SEQ ID NO: 4485 - RNA, 20 nt, Artificial Sequence
  Synthetic oligonucleotide: Ptpn6-737
agcggucagcagacaaggag

SEQ ID NO: 4486 - RNA, 20 nt, Artificial Sequence
  Synthetic oligonucleotide: Ptpn6-738
cagcagacaaggagaagagc

SEQ ID NO: 4487 - RNA, 20 nt, Artificial Sequence
  Synthetic oligonucleotide: Ptpn6-739
agaagagcaaggguucccuc

SEQ ID NO: 4488 - RNA, 20 nt, Artificial Sequence
  Synthetic oligonucleotide: Ptpn6-740
aagagcaaggguucccucaa

SEQ ID NO: 4489 - RNA, 20 nt, Artificial Sequence
  Synthetic oligonucleotide: Ptpn6-240
agagcaaggguucccucaag

SEQ ID NO: 4490 - RNA, 17 nt, Artificial Sequence
  Synthetic oligonucleotide: Ptpn6-742
agaccuucgacagccuc

SEQ ID NO: 4491 - RNA, 17 nt, Artificial Sequence
  Synthetic oligonucleotide: Ptpn6-743
ucaagaagacggggauu

SEQ ID NO: 4492 - RNA, 17 nt, Artificial Sequence
  Synthetic oligonucleotide: Ptpn6-250
caagaagacggggauug

SEQ ID NO: 4493 - RNA, 17 nt, Artificial Sequence
  Synthetic oligonucleotide: Ptpn6-745
gcuacacaguggguggu

SEQ ID NO: 4494 - RNA, 17 nt, Artificial Sequence
  Synthetic oligonucleotide: Ptpn6-243
cuacacagugggugguu

SEQ ID NO: 4495 - RNA, 17 nt, Artificial Sequence
  Synthetic oligonucleotide: Ptpn6-747
acagccucacggaccug

SEQ ID NO: 4496 - RNA, 17 nt, Artificial Sequence
  Synthetic oligonucleotide: Ptpn6-246
cagccucacggaccugg

SEQ ID NO: 4497 - RNA, 17 nt, Artificial Sequence
  Synthetic oligonucleotide: Ptpn6-749
accugguggagcauuuc

SEQ ID NO: 4498 - RNA, 17 nt, Artificial Sequence
  Synthetic oligonucleotide: Ptpn6-750
uggagcauuucaagaag

SEQ ID NO: 4499 - RNA, 17 nt, Artificial Sequence
  Synthetic oligonucleotide: Ptpn6-247
ggagcauuucaagaaga

SEQ ID NO: 4500 - RNA, 17 nt, Artificial Sequence
  Synthetic oligonucleotide: Ptpn6-248
gagcauuucaagaagac

SEQ ID NO: 4501 - RNA, 17 nt, Artificial Sequence
  Synthetic oligonucleotide: Ptpn6-753
uuucaagaagacgggga

SEQ ID NO: 4502 - RNA, 17 nt, Artificial Sequence
  Synthetic oligonucleotide: Ptpn6-754
cguacuaugccacgagg

SEQ ID NO: 4503 - RNA, 17 nt, Artificial Sequence
  Synthetic oligonucleotide: Ptpn6-755
ggugaaugcggcugaca

SEQ ID NO: 4504 - RNA, 17 nt, Artificial Sequence
  Synthetic oligonucleotide: Ptpn6-756
ugaaugcggcugacauu

SEQ ID NO: 4505 - RNA, 17 nt, Artificial Sequence
  Synthetic oligonucleotide: Ptpn6-757
gcggcugacauugagaa

SEQ ID NO: 4506 - RNA, 17 nt, Artificial Sequence
  Synthetic oligonucleotide: Ptpn6-758
acauugagaaccgagug

SEQ ID NO: 4507 - RNA, 17 nt, Artificial Sequence
  Synthetic oligonucleotide: Ptpn6-255
cauugagaaccgagugu

SEQ ID NO: 4508 - RNA, 17 nt, Artificial Sequence
  Synthetic oligonucleotide: Ptpn6-760
agaaccgaguguuggaa

SEQ ID NO: 4509 - RNA, 17 nt, Artificial Sequence
  Synthetic oligonucleotide: Ptpn6-761
gaguguuggaacugaac

SEQ ID NO: 4510 - RNA, 17 nt, Artificial Sequence
  Synthetic oligonucleotide: Ptpn6-762
uggaacugaacaagaag

SEQ ID NO: 4511 - RNA, 17 nt, Artificial Sequence
  Synthetic oligonucleotide: Ptpn6-256
ggaacugaacaagaagc

SEQ ID NO: 4512 - RNA, 17 nt, Artificial Sequence
  Synthetic oligonucleotide: Ptpn6-764
gaacaagaagcaggagu

SEQ ID NO: 4513 - RNA, 17 nt, Artificial Sequence
  Synthetic oligonucleotide: Ptpn6-765
acaagaagcaggagucc

SEQ ID NO: 4514 - RNA, 17 nt, Artificial Sequence
  Synthetic oligonucleotide: Ptpn6-766
acagccaaggcuggcuu

SEQ ID NO: 4515 - RNA, 17 nt, Artificial Sequence
  Synthetic oligonucleotide: Ptpn6-260
cagccaaggcuggcuuc

SEQ ID NO: 4516 - RNA, 17 nt, Artificial Sequence
  Synthetic oligonucleotide: Ptpn6-261
agccaaggcuggcuucu

SEQ ID NO: 4517 - RNA, 17 nt, Artificial Sequence
  Synthetic oligonucleotide: Ptpn6-769
ccaaggcuggcuucugg

SEQ ID NO: 4518 - RNA, 17 nt, Artificial Sequence
  Synthetic oligonucleotide: Ptpn6-262
caaggcuggcuucuggg

SEQ ID NO: 4519 - RNA, 17 nt, Artificial Sequence
  Synthetic oligonucleotide: Ptpn6-771
uggcuucugggaggagu

SEQ ID NO: 4520 - RNA, 17 nt, Artificial Sequence
  Synthetic oligonucleotide: Ptpn6-772
guuugcagaagcaggag

SEQ ID NO: 4521 - RNA, 17 nt, Artificial Sequence
  Synthetic oligonucleotide: Ptpn6-773
ugcagaagcaggaggug

SEQ ID NO: 4522 - RNA, 17 nt, Artificial Sequence
  Synthetic oligonucleotide: Ptpn6-774
agaacuugcaccagcgu

SEQ ID NO: 4523 - RNA, 17 nt, Artificial Sequence
  Synthetic oligonucleotide: Ptpn6-263
gaacuugcaccagcguc

SEQ ID NO: 4524 - RNA, 17 nt, Artificial Sequence
  Synthetic oligonucleotide: Ptpn6-776
cuugcaccagcgucugg

SEQ ID NO: 4525 - RNA, 17 nt, Artificial Sequence
  Synthetic oligonucleotide: Ptpn6-777
ucuggaagggcagcggc

SEQ ID NO: 4526 - RNA, 17 nt, Artificial Sequence
  Synthetic oligonucleotide: Ptpn6-778
uggaagggcagcggcca

SEQ ID NO: 4527 - RNA, 17 nt, Artificial Sequence
  Synthetic oligonucleotide: Ptpn6-779
ggcagcggccagagaac

SEQ ID NO: 4528 - RNA, 17 nt, Artificial Sequence
  Synthetic oligonucleotide: Ptpn6-780
ggccagagaacaagggc

SEQ ID NO: 4529 - RNA, 17 nt, Artificial Sequence
  Synthetic oligonucleotide: Ptpn6-781
agggcaagaaccgcuac

SEQ ID NO: 4530 - RNA, 17 nt, Artificial Sequence
  Synthetic oligonucleotide: Ptpn6-782
acagccgagugauccug

SEQ ID NO: 4531 - RNA, 17 nt, Artificial Sequence
  Synthetic oligonucleotide: Ptpn6-269
cagccgagugauccugc

SEQ ID NO: 4532 - RNA, 17 nt, Artificial Sequence
  Synthetic oligonucleotide: Ptpn6-784
cgagugauccugcaggg

SEQ ID NO: 4533 - RNA, 17 nt, Artificial Sequence
  Synthetic oligonucleotide: Ptpn6-271
gagugauccugcaggga

SEQ ID NO: 4534 - RNA, 17 nt, Artificial Sequence
  Synthetic oligonucleotide: Ptpn6-786
acgggacaguaacaucc

SEQ ID NO: 4535 - RNA, 17 nt, Artificial Sequence
  Synthetic oligonucleotide: Ptpn6-787
ccagcugcuaggcccug

SEQ ID NO: 4536 - RNA, 17 nt, Artificial Sequence
  Synthetic oligonucleotide: Ptpn6-788
agcugcuaggcccugau

SEQ ID NO: 4537 - RNA, 17 nt, Artificial Sequence
  Synthetic oligonucleotide: Ptpn6-789
agaccuacaucgccagc

SEQ ID NO: 4538 - RNA, 17 nt, Artificial Sequence
  Synthetic oligonucleotide: Ptpn6-790
ucgccagccaggguugu

SEQ ID NO: 4539 - RNA, 17 nt, Artificial Sequence
  Synthetic oligonucleotide: Ptpn6-277
cgccagccaggguuguc

SEQ ID NO: 4540 - RNA, 17 nt, Artificial Sequence
  Synthetic oligonucleotide: Ptpn6-792
ucuggcagauggcgugg

SEQ ID NO: 4541 - RNA, 17 nt, Artificial Sequence
  Synthetic oligonucleotide: Ptpn6-283
cuggcagauggcguggc

SEQ ID NO: 4542 - RNA, 17 nt, Artificial Sequence
  Synthetic oligonucleotide: Ptpn6-794
ggcagauggcguggcag

SEQ ID NO: 4543 - RNA, 17 nt, Artificial Sequence
  Synthetic oligonucleotide: Ptpn6-795
gucaucgucaugaccac

SEQ ID NO: 4544 - RNA, 17 nt, Artificial Sequence
  Synthetic oligonucleotide: Ptpn6-796
caucgucaugaccaccc

SEQ ID NO: 4545 - RNA, 17 nt, Artificial Sequence
  Synthetic oligonucleotide: Ptpn6-797
ucaugaccacccgagag

SEQ ID NO: 4546 - RNA, 17 nt, Artificial Sequence
  Synthetic oligonucleotide: Ptpn6-285
caugaccacccgagagg

SEQ ID NO: 4547 - RNA, 17 nt, Artificial Sequence
  Synthetic oligonucleotide: Ptpn6-799
ugaccacccgagaggug

SEQ ID NO: 4548 - RNA, 17 nt, Artificial Sequence
  Synthetic oligonucleotide: Ptpn6-800
augcgucccauacuggc

SEQ ID NO: 4549 - RNA, 17 nt, Artificial Sequence
  Synthetic oligonucleotide: Ptpn6-801
ucccauacuggcccgag

SEQ ID NO: 4550 - RNA, 17 nt, Artificial Sequence
  Synthetic oligonucleotide: Ptpn6-802
gggcaugcagcgugcuu

SEQ ID NO: 4551 - RNA, 17 nt, Artificial Sequence
  Synthetic oligonucleotide: Ptpn6-803
cuacucugugaccaacu

SEQ ID NO: 4552 - RNA, 17 nt, Artificial Sequence
  Synthetic oligonucleotide: Ptpn6-294
uacucugugaccaacug

SEQ ID NO: 4553 - RNA, 17 nt, Artificial Sequence
  Synthetic oligonucleotide: Ptpn6-295
acucugugaccaacugc

SEQ ID NO: 4554 - RNA, 17 nt, Artificial Sequence
  Synthetic oligonucleotide: Ptpn6-296
cucugugaccaacugcg

SEQ ID NO: 4555 - RNA, 17 nt, Artificial Sequence
  Synthetic oligonucleotide: Ptpn6-807
cggggagcaugacacaa

SEQ ID NO: 4556 - RNA, 17 nt, Artificial Sequence
  Synthetic oligonucleotide: Ptpn6-808
ccuuacaggucuccccg

SEQ ID NO: 4557 - RNA, 17 nt, Artificial Sequence
  Synthetic oligonucleotide: Ptpn6-809
ucuggcauuaccaguac

SEQ ID NO: 4558 - RNA, 17 nt, Artificial Sequence
  Synthetic oligonucleotide: Ptpn6-810
ccugagcuggcccgacc

SEQ ID NO: 4559 - RNA, 17 nt, Artificial Sequence
  Synthetic oligonucleotide: Ptpn6-301
cugagcuggcccgacca

SEQ ID NO: 4560 - RNA, 17 nt, Artificial Sequence
  Synthetic oligonucleotide: Ptpn6-812
cgaccauggggucccca

SEQ ID NO: 4561 - RNA, 17 nt, Artificial Sequence
  Synthetic oligonucleotide: Ptpn6-813
ugggguccccagugagc

SEQ ID NO: 4562 - RNA, 17 nt, Artificial Sequence
  Synthetic oligonucleotide: Ptpn6-304
gggguccccagugagcc

SEQ ID NO: 4563 - RNA, 17 nt, Artificial Sequence
  Synthetic oligonucleotide: Ptpn6-305
ggguccccagugagccu

SEQ ID NO: 4564 - RNA, 17 nt, Artificial Sequence
  Synthetic oligonucleotide: Ptpn6-816
gggguguccucagcuuc

SEQ ID NO: 4565 - RNA, 17 nt, Artificial Sequence
  Synthetic oligonucleotide: Ptpn6-817
accagaucaaccagcgg

SEQ ID NO: 4566 - RNA, 17 nt, Artificial Sequence
  Synthetic oligonucleotide: Ptpn6-310
ccagaucaaccagcggc

SEQ ID NO: 4567 - RNA, 17 nt, Artificial Sequence
  Synthetic oligonucleotide: Ptpn6-819
ggaaagucugccucacg

SEQ ID NO: 4568 - RNA, 17 nt, Artificial Sequence
  Synthetic oligonucleotide: Ptpn6-820
uugucaucgacaugcuc

SEQ ID NO: 4569 - RNA, 17 nt, Artificial Sequence
  Synthetic oligonucleotide: Ptpn6-314
ugucaucgacaugcuca

SEQ ID NO: 4570 - RNA, 17 nt, Artificial Sequence
  Synthetic oligonucleotide: Ptpn6-822
ucaucgacaugcucaug

SEQ ID NO: 4571 - RNA, 17 nt, Artificial Sequence
  Synthetic oligonucleotide: Ptpn6-823
acugugacauugacauc

SEQ ID NO: 4572 - RNA, 17 nt, Artificial Sequence
  Synthetic oligonucleotide: Ptpn6-824
aagaccauccagauggu

SEQ ID NO: 4573 - RNA, 17 nt, Artificial Sequence
  Synthetic oligonucleotide: Ptpn6-825
uggugcgggcgcagcgc

SEQ ID NO: 4574 - RNA, 17 nt, Artificial Sequence
  Synthetic oligonucleotide: Ptpn6-826
gcucgggcauggugcag

SEQ ID NO: 4575 - RNA, 17 nt, Artificial Sequence
  Synthetic oligonucleotide: Ptpn6-322
cucgggcauggugcaga

SEQ ID NO: 4576 - RNA, 17 nt, Artificial Sequence
  Synthetic oligonucleotide: Ptpn6-828
ggccaucgcccaguuca

SEQ ID NO: 4577 - RNA, 17 nt, Artificial Sequence
  Synthetic oligonucleotide: Ptpn6-829
aguucauugaaaccacu

SEQ ID NO: 4578 - RNA, 17 nt, Artificial Sequence
  Synthetic oligonucleotide: Ptpn6-830
ucauugaaaccacuaag

SEQ ID NO: 4579 - RNA, 17 nt, Artificial Sequence
  Synthetic oligonucleotide: Ptpn6-831
aaaccacuaagaagaag

SEQ ID NO: 4580 - RNA, 17 nt, Artificial Sequence
  Synthetic oligonucleotide: Ptpn6-325
aaccacuaagaagaagc

SEQ ID NO: 4581 - RNA, 17 nt, Artificial Sequence
  Synthetic oligonucleotide: Ptpn6-833
cgcagaagggccaggag

SEQ ID NO: 4582 - RNA, 17 nt, Artificial Sequence
  Synthetic oligonucleotide: Ptpn6-327
gcagaagggccaggagu

SEQ ID NO: 4583 - RNA, 17 nt, Artificial Sequence
  Synthetic oligonucleotide: Ptpn6-835
gggccaggagucggagu

SEQ ID NO: 4584 - RNA, 17 nt, Artificial Sequence
  Synthetic oligonucleotide: Ptpn6-328
ggccaggagucggagua

SEQ ID NO: 4585 - RNA, 17 nt, Artificial Sequence
  Synthetic oligonucleotide: Ptpn6-329
gccaggagucggaguac

SEQ ID NO: 4586 - RNA, 17 nt, Artificial Sequence
  Synthetic oligonucleotide: Ptpn6-838
ucaccuaucccccagcc

SEQ ID NO: 4587 - RNA, 17 nt, Artificial Sequence
  Synthetic oligonucleotide: Ptpn6-839
ccuaucccccagccaug

SEQ ID NO: 4588 - RNA, 17 nt, Artificial Sequence
  Synthetic oligonucleotide: Ptpn6-840
acacaaggaggaugugu

SEQ ID NO: 4589 - RNA, 17 nt, Artificial Sequence
  Synthetic oligonucleotide: Ptpn6-841
acaaggaggauguguau

SEQ ID NO: 4590 - RNA, 17 nt, Artificial Sequence
  Synthetic oligonucleotide: Ptpn6-842
augagaaccugcacacu

SEQ ID NO: 4591 - RNA, 17 nt, Artificial Sequence
  Synthetic oligonucleotide: Ptpn6-843
accugcacacuaagaac

SEQ ID NO: 4592 - RNA, 17 nt, Artificial Sequence
  Synthetic oligonucleotide: Ptpn6-844
cugcacacuaagaacaa

SEQ ID NO: 4593 - RNA, 17 nt, Artificial Sequence
  Synthetic oligonucleotide: Ptpn6-331
ugcacacuaagaacaag

SEQ ID NO: 4594 - RNA, 17 nt, Artificial Sequence
  Synthetic oligonucleotide: Ptpn6-332
gcacacuaagaacaaga

SEQ ID NO: 4595 - RNA, 17 nt, Artificial Sequence
  Synthetic oligonucleotide: Ptpn6-847
acacuaagaacaagagg

SEQ ID NO: 4596 - RNA, 17 nt, Artificial Sequence
  Synthetic oligonucleotide: Ptpn6-333
cacuaagaacaagaggg

SEQ ID NO: 4597 - RNA, 17 nt, Artificial Sequence
  Synthetic oligonucleotide: Ptpn6-849
cuaagaacaagagggag

SEQ ID NO: 4598 - RNA, 17 nt, Artificial Sequence
  Synthetic oligonucleotide: Ptpn6-850
acaagagggaggagaaa

SEQ ID NO: 4599 - RNA, 17 nt, Artificial Sequence
  Synthetic oligonucleotide: Ptpn6-851
agagggaggagaaagug

SEQ ID NO: 4600 - RNA, 17 nt, Artificial Sequence
  Synthetic oligonucleotide: Ptpn6-852
agcagcggucagcagac

SEQ ID NO: 4601 - RNA, 17 nt, Artificial Sequence
  Synthetic oligonucleotide: Ptpn6-335
gcagcggucagcagaca

SEQ ID NO: 4602 - RNA, 17 nt, Artificial Sequence
  Synthetic oligonucleotide: Ptpn6-854
agcggucagcagacaag

SEQ ID NO: 4603 - RNA, 17 nt, Artificial Sequence
  Synthetic oligonucleotide: Ptpn6-855
ggucagcagacaaggag

SEQ ID NO: 4604 - RNA, 17 nt, Artificial Sequence
  Synthetic oligonucleotide: Ptpn6-856
cagacaaggagaagagc

SEQ ID NO: 4605 - RNA, 17 nt, Artificial Sequence
  Synthetic oligonucleotide: Ptpn6-857
agagcaaggguucccuc

SEQ ID NO: 4606 - RNA, 17 nt, Artificial Sequence
  Synthetic oligonucleotide: Ptpn6-858
agcaaggguucccucaa

SEQ ID NO: 4607 - RNA, 17 nt, Artificial Sequence
  Synthetic oligonucleotide: Ptpn6-338
gcaaggguucccucaag

SEQ ID NO: 4608 - RNA, 20 nt, Artificial Sequence
  Synthetic oligonucleotide: Ptpn6-860
gaggugcgggaggccuuggc

SEQ ID NO: 4609 - RNA, 20 nt, Artificial Sequence
  Synthetic oligonucleotide: Ptpn6-861
ggcaugggcauucuucaugg

SEQ ID NO: 4610 - RNA, 20 nt, Artificial Sequence
  Synthetic oligonucleotide: Ptpn6-344
gcaugggcauucuucauggc

SEQ ID NO: 4611 - RNA, 20 nt, Artificial Sequence
  Synthetic oligonucleotide: Ptpn6-345
caugggcauucuucauggcu

SEQ ID NO: 4612 - RNA, 20 nt, Artificial Sequence
  Synthetic oligonucleotide: Ptpn6-346
augggcauucuucauggcug

SEQ ID NO: 4613 - RNA, 20 nt, Artificial Sequence
  Synthetic oligonucleotide: Ptpn6-865
gcuucuucuuagugguuuca

SEQ ID NO: 4614 - RNA, 20 nt, Artificial Sequence
  Synthetic oligonucleotide: Ptpn6-866
uucuuagugguuucaaugaa

SEQ ID NO: 4615 - RNA, 20 nt, Artificial Sequence
  Synthetic oligonucleotide: Ptpn6-867
acugggcgauggccacguag

SEQ ID NO: 4616 - RNA, 20 nt, Artificial Sequence
  Synthetic oligonucleotide: Ptpn6-868
cgccuccgucugcaccaugc

SEQ ID NO: 4617 - RNA, 20 nt, Artificial Sequence
  Synthetic oligonucleotide: Ptpn6-869
gagcgcugcgcccgcaccau

SEQ ID NO: 4618 - RNA, 20 nt, Artificial Sequence
  Synthetic oligonucleotide: Ptpn6-870
cgcaccaucuggauggucuu

SEQ ID NO: 4619 - RNA, 20 nt, Artificial Sequence
  Synthetic oligonucleotide: Ptpn6-871
ccuugguggagauguucucc

SEQ ID NO: 4620 - RNA, 20 nt, Artificial Sequence
  Synthetic oligonucleotide: Ptpn6-872
ugcacgaugaugggcccugc

SEQ ID NO: 4621 - RNA, 20 nt, Artificial Sequence
  Synthetic oligonucleotide: Ptpn6-873
ugccgcugguugaucugguc

SEQ ID NO: 4622 - RNA, 20 nt, Artificial Sequence
  Synthetic oligonucleotide: Ptpn6-364
gccgcugguugaucuggucc

SEQ ID NO: 4623 - RNA, 20 nt, Artificial Sequence
  Synthetic oligonucleotide: Ptpn6-875
gguugaucugguccaggaag

SEQ ID NO: 4624 - RNA, 20 nt, Artificial Sequence
  Synthetic oligonucleotide: Ptpn6-876
uugaucugguccaggaagcu

SEQ ID NO: 4625 - RNA, 20 nt, Artificial Sequence
  Synthetic oligonucleotide: Ptpn6-877
ugaggacacccccaggcuca

SEQ ID NO: 4626 - RNA, 20 nt, Artificial Sequence
  Synthetic oligonucleotide: Ptpn6-367
gaggacacccccaggcucac

SEQ ID NO: 4627 - RNA, 20 nt, Artificial Sequence
  Synthetic oligonucleotide: Ptpn6-368
aggacacccccaggcucacu

SEQ ID NO: 4628 - RNA, 20 nt, Artificial Sequence
  Synthetic oligonucleotide: Ptpn6-880
gcucacuggggaccccaugg

SEQ ID NO: 4629 - RNA, 20 nt, Artificial Sequence
  Synthetic oligonucleotide: Ptpn6-881
uacugguaaugccagaucuc

SEQ ID NO: 4630 - RNA, 20 nt, Artificial Sequence
  Synthetic oligonucleotide: Ptpn6-882
agcggggagaccuguaaggu

SEQ ID NO: 4631 - RNA, 20 nt, Artificial Sequence
  Synthetic oligonucleotide: Ptpn6-377
gcggggagaccuguaaggua

SEQ ID NO: 4632 - RNA, 20 nt, Artificial Sequence
  Synthetic oligonucleotide: Ptpn6-884
augcuccccgcaguugguca

SEQ ID NO: 4633 - RNA, 20 nt, Artificial Sequence
  Synthetic oligonucleotide: Ptpn6-885
ccccgcaguuggucacagag

SEQ ID NO: 4634 - RNA, 20 nt, Artificial Sequence
  Synthetic oligonucleotide: Ptpn6-886
aagcacgcugcaugcccacc

SEQ ID NO: 4635 - RNA, 20 nt, Artificial Sequence
  Synthetic oligonucleotide: Ptpn6-887
caugcccaccucgggccagu

SEQ ID NO: 4636 - RNA, 20 nt, Artificial Sequence
  Synthetic oligonucleotide: Ptpn6-384
augcccaccucgggccagua

SEQ ID NO: 4637 - RNA, 20 nt, Artificial Sequence
  Synthetic oligonucleotide: Ptpn6-889
  misc_feature (1)..(2): n is a, c, g, or u
nnccggccuuucuccaccuc

SEQ ID NO: 4638 - RNA, 20 nt, Artificial Sequence
  Synthetic oligonucleotide: Ptpn6-890
ucuccugccacgccaucugc

SEQ ID NO: 4639 - RNA, 20 nt, Artificial Sequence
  Synthetic oligonucleotide: Ptpn6-891
guaggucuuagcguucucau

SEQ ID NO: 4640 - RNA, 20 nt, Artificial Sequence
  Synthetic oligonucleotide: Ptpn6-892
uguaguuggcauugauguag

SEQ ID NO: 4641 - RNA, 20 nt, Artificial Sequence
  Synthetic oligonucleotide: Ptpn6-893
uggcauugauguagucggac

SEQ ID NO: 4642 - RNA, 20 nt, Artificial Sequence
  Synthetic oligonucleotide: Ptpn6-397
ggcauugauguagucggacc

SEQ ID NO: 4643 - RNA, 20 nt, Artificial Sequence
  Synthetic oligonucleotide: Ptpn6-398
gcauugauguagucggaccc

SEQ ID NO: 4644 - RNA, 20 nt, Artificial Sequence
  Synthetic oligonucleotide: Ptpn6-896
auguuacugucccgucccug

SEQ ID NO: 4645 - RNA, 20 nt, Artificial Sequence
  Synthetic oligonucleotide: Ptpn6-897
agccagccuuggcuguaucc

SEQ ID NO: 4646 - RNA, 20 nt, Artificial Sequence
  Synthetic oligonucleotide: Ptpn6-898
ccgcagguagacaaaggcgc

SEQ ID NO: 4647 - RNA, 20 nt, Artificial Sequence
  Synthetic oligonucleotide: Ptpn6-899
ccuccucaauccccgucuuc

SEQ ID NO: 4648 - RNA, 20 nt, Artificial Sequence
  Synthetic oligonucleotide: Ptpn6-900
ugaaaugcuccaccaggucc

SEQ ID NO: 4649 - RNA, 20 nt, Artificial Sequence
  Synthetic oligonucleotide: Ptpn6-901
ccaccagguccgugaggcug

SEQ ID NO: 4650 - RNA, 17 nt, Artificial Sequence
  Synthetic oligonucleotide: Ptpn6-902
gugcgggaggccuuggc

SEQ ID NO: 4651 - RNA, 17 nt, Artificial Sequence
  Synthetic oligonucleotide: Ptpn6-903
augggcauucuucaugg

SEQ ID NO: 4652 - RNA, 17 nt, Artificial Sequence
  Synthetic oligonucleotide: Ptpn6-424
ugggcauucuucauggc

SEQ ID NO: 4653 - RNA, 17 nt, Artificial Sequence
  Synthetic oligonucleotide: Ptpn6-425
gggcauucuucauggcu

SEQ ID NO: 4654 - RNA, 17 nt, Artificial Sequence
  Synthetic oligonucleotide: Ptpn6-426
ggcauucuucauggcug

SEQ ID NO: 4655 - RNA, 17 nt, Artificial Sequence
  Synthetic oligonucleotide: Ptpn6-907
ucuucuuagugguuuca

SEQ ID NO: 4656 - RNA, 17 nt, Artificial Sequence
  Synthetic oligonucleotide: Ptpn6-908
uuagugguuucaaugaa

SEQ ID NO: 4657 - RNA, 17 nt, Artificial Sequence
  Synthetic oligonucleotide: Ptpn6-909
gggcgauggccacguag

SEQ ID NO: 4658 - RNA, 17 nt, Artificial Sequence
  Synthetic oligonucleotide: Ptpn6-910
cuccgucugcaccaugc

SEQ ID NO: 4659 - RNA, 17 nt, Artificial Sequence
  Synthetic oligonucleotide: Ptpn6-911
cgcugcgcccgcaccau

SEQ ID NO: 4660 - RNA, 17 nt, Artificial Sequence
  Synthetic oligonucleotide: Ptpn6-912
accaucuggauggucuu

SEQ ID NO: 4661 - RNA, 17 nt, Artificial Sequence
  Synthetic oligonucleotide: Ptpn6-913
ugguggagauguucucc

SEQ ID NO: 4662 - RNA, 17 nt, Artificial Sequence
  Synthetic oligonucleotide: Ptpn6-914
  misc_feature (1)..(2): n is a, c, g, or u
nncugcagugcacgaug

SEQ ID NO: 4663 - RNA, 17 nt, Artificial Sequence
  Synthetic oligonucleotide: Ptpn6-915
acgaugaugggcccugc

SEQ ID NO: 4664 - RNA, 17 nt, Artificial Sequence
  Synthetic oligonucleotide: Ptpn6-916
cgcugguugaucugguc

SEQ ID NO: 4665 - RNA, 17 nt, Artificial Sequence
  Synthetic oligonucleotide: Ptpn6-446
gcugguugaucuggucc

SEQ ID NO: 4666 - RNA, 17 nt, Artificial Sequence
  Synthetic oligonucleotide: Ptpn6-918
ugaucugguccaggaag

SEQ ID NO: 4667 - RNA, 17 nt, Artificial Sequence
  Synthetic oligonucleotide: Ptpn6-919
aucugguccaggaagcu

SEQ ID NO: 4668 - RNA, 17 nt, Artificial Sequence
  Synthetic oligonucleotide: Ptpn6-920
ggacacccccaggcuca

SEQ ID NO: 4669 - RNA, 17 nt, Artificial Sequence
  Synthetic oligonucleotide: Ptpn6-449
gacacccccaggcucac

SEQ ID NO: 4670 - RNA, 17 nt, Artificial Sequence
  Synthetic oligonucleotide: Ptpn6-450
acacccccaggcucacu

SEQ ID NO: 4671 - RNA, 17 nt, Artificial Sequence
  Synthetic oligonucleotide: Ptpn6-923
cacuggggaccccaugg

SEQ ID NO: 4672 - RNA, 17 nt, Artificial Sequence
  Synthetic oligonucleotide: Ptpn6-924
ugguaaugccagaucuc

SEQ ID NO: 4673 - RNA, 17 nt, Artificial Sequence
  Synthetic oligonucleotide: Ptpn6-925
ggggagaccuguaaggu

SEQ ID NO: 4674 - RNA, 17 nt, Artificial Sequence
  Synthetic oligonucleotide: Ptpn6-459
gggagaccuguaaggua

SEQ ID NO: 4675 - RNA, 17 nt, Artificial Sequence
  Synthetic oligonucleotide: Ptpn6-927
cuccccgcaguugguca

SEQ ID NO: 4676 - RNA, 17 nt, Artificial Sequence
  Synthetic oligonucleotide: Ptpn6-928
cgcaguuggucacagag

SEQ ID NO: 4677 - RNA, 17 nt, Artificial Sequence
  Synthetic oligonucleotide: Ptpn6-929
cacgcugcaugcccacc

SEQ ID NO: 4678 - RNA, 17 nt, Artificial Sequence
  Synthetic oligonucleotide: Ptpn6-930
gcccaccucgggccagu

SEQ ID NO: 4679 - RNA, 17 nt, Artificial Sequence
  Synthetic oligonucleotide: Ptpn6-466
cccaccucgggccagua

SEQ ID NO: 4680 - RNA, 17 nt, Artificial Sequence
  Synthetic oligonucleotide: Ptpn6-932
cggccuuucuccaccuc

SEQ ID NO: 4681 - RNA, 17 nt, Artificial Sequence
  Synthetic oligonucleotide: Ptpn6-933
ccugccacgccaucugc

SEQ ID NO: 4682 - RNA, 17 nt, Artificial Sequence
  Synthetic oligonucleotide: Ptpn6-934
ggucuuagcguucucau

SEQ ID NO: 4683 - RNA, 17 nt, Artificial Sequence
  Synthetic oligonucleotide: Ptpn6-935
aguuggcauugauguag

SEQ ID NO: 4684 - RNA, 17 nt, Artificial Sequence
  Synthetic oligonucleotide: Ptpn6-936
cauugauguagucggac

SEQ ID NO: 4685 - RNA, 17 nt, Artificial Sequence
  Synthetic oligonucleotide: Ptpn6-480
auugauguagucggacc

SEQ ID NO: 4686 - RNA, 17 nt, Artificial Sequence
  Synthetic oligonucleotide: Ptpn6-481
uugauguagucggaccc

SEQ ID NO: 4687 - RNA, 17 nt, Artificial Sequence
  Synthetic oligonucleotide: Ptpn6-939
uuacugucccgucccug

SEQ ID NO: 4688 - RNA, 17 nt, Artificial Sequence
  Synthetic oligonucleotide: Ptpn6-940
cagccuuggcuguaucc

SEQ ID NO: 4689 - RNA, 17 nt, Artificial Sequence
  Synthetic oligonucleotide: Ptpn6-941
cagguagacaaaggcgc

SEQ ID NO: 4690 - RNA, 17 nt, Artificial Sequence
  Synthetic oligonucleotide: Ptpn6-942
ccucaauccccgucuuc

SEQ ID NO: 4691 - RNA, 17 nt, Artificial Sequence
  Synthetic oligonucleotide: Ptpn6-943
aaugcuccaccaggucc

SEQ ID NO: 4692 - RNA, 17 nt, Artificial Sequence
  Synthetic oligonucleotide: Ptpn6-944
ccagguccgugaggcug

SEQ ID NO: 4693 - RNA, 20 nt, Artificial Sequence
  Synthetic oligonucleotide: Ptpn6-95
cauauucggauccagaacuc

SEQ ID NO: 4694 - RNA, 17 nt, Artificial Sequence
  Synthetic oligonucleotide: Ptpn6-36
auucggauccagaacuc

SEQ ID NO: 4695 - RNA, 20 nt, Artificial Sequence
  Synthetic oligonucleotide: Ptpn6-947
gaguucuggauccgaauaug

SEQ ID NO: 4696 - RNA, 17 nt, Artificial Sequence
  Synthetic oligonucleotide: Ptpn6-621
gaguucuggauccgaau

SEQ ID NO: 4697 - RNA, 20 nt, Artificial Sequence
  Synthetic oligonucleotide: Ptpn6-152
gguggagcauuucaagaaga

SEQ ID NO: 4698 - RNA, 17 nt, Artificial Sequence
  Synthetic oligonucleotide: Ptpn6-247
ggagcauuucaagaaga

SEQ ID NO: 4699 - RNA, 20 nt, Artificial Sequence
  Synthetic oligonucleotide: Ptpn6-412
ucuucuugaaaugcuccacc

SEQ ID NO: 4700 - RNA, 17 nt, Artificial Sequence
  Synthetic oligonucleotide: Ptpn6-952
ucuucuugaaaugcucc

SEQ ID NO: 4701 - RNA, 20 nt, Artificial Sequence
  Synthetic oligonucleotide: Ptpn6-953
ggcccuuugguuuccgccua

SEQ ID NO: 4702 - RNA, 20 nt, Artificial Sequence
  Synthetic oligonucleotide: Ptpn6-954
ggguaagucccgggcaccau

SEQ ID NO: 4703 - RNA, 20 nt, Artificial Sequence
  Synthetic oligonucleotide: Ptpn6-955
gguaagucccgggcaccauc

SEQ ID NO: 4704 - RNA, 20 nt, Artificial Sequence
  Synthetic oligonucleotide: Ptpn6-956
gccugcuguacucccgcuuu

SEQ ID NO: 4705 - RNA, 20 nt, Artificial Sequence
  Synthetic oligonucleotide: Ptpn6-957
gggggaaaccucuccguagg

SEQ ID NO: 4706 - RNA, 20 nt, Artificial Sequence
  Synthetic oligonucleotide: Ptpn6-958
gguccucacaccuugcggga

SEQ ID NO: 4707 - RNA, 20 nt, Artificial Sequence
  Synthetic oligonucleotide: Ptpn6-959
ggcggaaaccaaagggccua

SEQ ID NO: 4708 - RNA, 20 nt, Artificial Sequence
  Synthetic oligonucleotide: Ptpn6-960
ggacgugggagggccuucgc

SEQ ID NO: 4709 - RNA, 20 nt, Artificial Sequence
  Synthetic oligonucleotide: Ptpn6-961
gcacucacguucacacacgu

SEQ ID NO: 4710 - RNA, 20 nt, Artificial Sequence
  Synthetic oligonucleotide: Ptpn6-962
guccucacaccuugcgggaa

SEQ ID NO: 4711 - RNA, 17 nt, Artificial Sequence
  Synthetic oligonucleotide: Ptpn6-963
gguuuccgccuacggag

SEQ ID NO: 4712 - RNA, 17 nt, Artificial Sequence
  Synthetic oligonucleotide: Ptpn6-964
gucccguggguaagucc

SEQ ID NO: 4713 - RNA, 17 nt, Artificial Sequence
  Synthetic oligonucleotide: Ptpn6-965
ggaaaccucuccguagg

SEQ ID NO: 4714 - RNA, 17 nt, Artificial Sequence
  Synthetic oligonucleotide: Ptpn6-966
gaccggaaacaggcgca

SEQ ID NO: 4715 - RNA, 17 nt, Artificial Sequence
  Synthetic oligonucleotide: Ptpn6-967
gggggaaaccucuccgu

SEQ ID NO: 4716 - RNA, 17 nt, Artificial Sequence
  Synthetic oligonucleotide: Ptpn6-968
ggaccggaaacaggcgc

SEQ ID NO: 4717 - RNA, 20 nt, Artificial Sequence
  Synthetic oligonucleotide: Ptpn6-969
uuugguuuccgccuacggag

SEQ ID NO: 4718 - RNA, 20 nt, Artificial Sequence
  Synthetic oligonucleotide: Ptpn6-970
uacucccgcuuuggggcugc

SEQ ID NO: 4719 - RNA, 20 nt, Artificial Sequence
  Synthetic oligonucleotide: Ptpn6-971
acagagagaugcugucccgu

SEQ ID NO: 4720 - RNA, 20 nt, Artificial Sequence
  Synthetic oligonucleotide: Ptpn6-972
ccgcaaggugugaggacccc

SEQ ID NO: 4721 - RNA, 20 nt, Artificial Sequence
  Synthetic oligonucleotide: Ptpn6-973
cugucccguggguaaguccc

SEQ ID NO: 4722 - RNA, 20 nt, Artificial Sequence
  Synthetic oligonucleotide: Ptpn6-974
cuggccgcugugggcggucu

SEQ ID NO: 4723 - RNA, 20 nt, Artificial Sequence
  Synthetic oligonucleotide: Ptpn6-975
ugcuuaggaccugucccccu

SEQ ID NO: 4724 - RNA, 20 nt, Artificial Sequence
  Synthetic oligonucleotide: Ptpn6-976
cugagcgguucuuccucacc

SEQ ID NO: 4725 - RNA, 20 nt, Artificial Sequence
  Synthetic oligonucleotide: Ptpn6-977
cagucagaggccacccgcga

SEQ ID NO: 4726 - RNA, 20 nt, Artificial Sequence
  Synthetic oligonucleotide: Ptpn6-978
ugacagagcggcgggguauu

SEQ ID NO: 4727 - RNA, 20 nt, Artificial Sequence
  Synthetic oligonucleotide: Ptpn6-979
ugggaccaaagucugauguu

SEQ ID NO: 4728 - RNA, 20 nt, Artificial Sequence
  Synthetic oligonucleotide: Ptpn6-980
agagcggcgggguauugggu

SEQ ID NO: 4729 - RNA, 20 nt, Artificial Sequence
  Synthetic oligonucleotide: Ptpn6-981
ucuccguaggcggaaaccaa

SEQ ID NO: 4730 - RNA, 20 nt, Artificial Sequence
  Synthetic oligonucleotide: Ptpn6-982
cuccguaggcggaaaccaaa

SEQ ID NO: 4731 - RNA, 20 nt, Artificial Sequence
  Synthetic oligonucleotide: Ptpn6-983
augggaccaaagucugaugu

SEQ ID NO: 4732 - RNA, 20 nt, Artificial Sequence
  Synthetic oligonucleotide: Ptpn6-984
aguucauagggaccggaaac

SEQ ID NO: 4733 - RNA, 20 nt, Artificial Sequence
  Synthetic oligonucleotide: Ptpn6-985
uagggaccggaaacaggcgc

SEQ ID NO: 4734 - RNA, 20 nt, Artificial Sequence
  Synthetic oligonucleotide: Ptpn6-986
acccuggacuaauagucucc

SEQ ID NO: 4735 - RNA, 20 nt, Artificial Sequence
  Synthetic oligonucleotide: Ptpn6-987
cgggacagcaucucucugua

SEQ ID NO: 4736 - RNA, 20 nt, Artificial Sequence
  Synthetic oligonucleotide: Ptpn6-988
uggcccgagaccgcccacag

SEQ ID NO: 4737 - RNA, 20 nt, Artificial Sequence
  Synthetic oligonucleotide: Ptpn6-989
agcggcgggguauuggguag

SEQ ID NO: 4738 - RNA, 20 nt, Artificial Sequence
  Synthetic oligonucleotide: Ptpn6-990
ccggggguccucacaccuug

SEQ ID NO: 4739 - RNA, 20 nt, Artificial Sequence
  Synthetic oligonucleotide: Ptpn6-991
aagccacggcagagggccgc

SEQ ID NO: 4740 - RNA, 20 nt, Artificial Sequence
  Synthetic oligonucleotide: Ptpn6-992
aaugggggaaaccucuccgu

SEQ ID NO: 4741 - RNA, 20 nt, Artificial Sequence
  Synthetic oligonucleotide: Ptpn6-993
ugagguguugugagcuaccc

SEQ ID NO: 4742 - RNA, 20 nt, Artificial Sequence
  Synthetic oligonucleotide: Ptpn6-994
agggaccggaaacaggcgca

SEQ ID NO: 4743 - RNA, 20 nt, Artificial Sequence
  Synthetic oligonucleotide: Ptpn6-995
uggugcccgggacuuaccca

SEQ ID NO: 4744 - RNA, 17 nt, Artificial Sequence
  Synthetic oligonucleotide: Ptpn6-996
ugcuguacucccgcuuu

SEQ ID NO: 4745 - RNA, 17 nt, Artificial Sequence
  Synthetic oligonucleotide: Ptpn6-997
ccuuugguuuccgccua

SEQ ID NO: 4746 - RNA, 17 nt, Artificial Sequence
  Synthetic oligonucleotide: Ptpn6-998
agcgguucuuccucacc

SEQ ID NO: 4747 - RNA, 17 nt, Artificial Sequence
  Synthetic oligonucleotide: Ptpn6-999
ccguaggcggaaaccaa

SEQ ID NO: 4748 - RNA, 17 nt, Artificial Sequence
  Synthetic oligonucleotide: Ptpn6-1000
cggcgggguauugggua

SEQ ID NO: 4749 - RNA, 17 nt, Artificial Sequence
  Synthetic oligonucleotide: Ptpn6-1001
cguaggcggaaaccaaa

SEQ ID NO: 4750 - RNA, 17 nt, Artificial Sequence
  Synthetic oligonucleotide: Ptpn6-1002
cucacguucacacacgu

SEQ ID NO: 4751 - RNA, 20 nt, Artificial Sequence
  Synthetic oligonucleotide: Ptpn6-1003
ggcuguuagggauuuuccuu

SEQ ID NO: 4752 - RNA, 20 nt, Artificial Sequence
  Synthetic oligonucleotide: Ptpn6-1004
gggauuuuccuuaggcccuu

SEQ ID NO: 4753 - RNA, 20 nt, Artificial Sequence
  Synthetic oligonucleotide: Ptpn6-1005
guaagucccgggcaccaucg

SEQ ID NO: 4754 - RNA, 20 nt, Artificial Sequence
  Synthetic oligonucleotide: Ptpn6-1006
guuugucccugcagugccau

SEQ ID NO: 4755 - RNA, 20 nt, Artificial Sequence
  Synthetic oligonucleotide: Ptpn6-1007
gcugucccguggguaagucc

SEQ ID NO: 4756 - RNA, 20 nt, Artificial Sequence
  Synthetic oligonucleotide: Ptpn6-1008
gcagggaagcuggccgcugu

SEQ ID NO: 4757 - RNA, 20 nt, Artificial Sequence
  Synthetic oligonucleotide: Ptpn6-1009
gcucugucagcuugagcucc

SEQ ID NO: 4758 - RNA, 20 nt, Artificial Sequence
  Synthetic oligonucleotide: Ptpn6-1010
gaaggcggcccuggaccagc

SEQ ID NO: 4759 - RNA, 20 nt, Artificial Sequence
  Synthetic oligonucleotide: Ptpn6-1011
ggccugcuguacucccgcuu

SEQ ID NO: 4760 - RNA, 20 nt, Artificial Sequence
  Synthetic oligonucleotide: Ptpn6-1012
gugccauuggccuggcaggc

SEQ ID NO: 4761 - RNA, 20 nt, Artificial Sequence
  Synthetic oligonucleotide: Ptpn6-1013
gguucuuccucaccuggcuu

SEQ ID NO: 4762 - RNA, 20 nt, Artificial Sequence
  Synthetic oligonucleotide: Ptpn6-1014
gcggcccuggaccagcaggc

SEQ ID NO: 4763 - RNA, 20 nt, Artificial Sequence
  Synthetic oligonucleotide: Ptpn6-1015
gggaagcuggccgcuguggg

SEQ ID NO: 4764 - RNA, 20 nt, Artificial Sequence
  Synthetic oligonucleotide: Ptpn6-1016
ggaaguggcugauuacugag

SEQ ID NO: 4765 - RNA, 20 nt, Artificial Sequence
  Synthetic oligonucleotide: Ptpn6-1017
gguggcuccuccucucccgg

SEQ ID NO: 4766 - RNA, 20 nt, Artificial Sequence
  Synthetic oligonucleotide: Ptpn6-1018
gcuccuccucucccggggga

SEQ ID NO: 4767 - RNA, 20 nt, Artificial Sequence
  Synthetic oligonucleotide: Ptpn6-1019
gcauuucuacuuccagccuc

SEQ ID NO: 4768 - RNA, 20 nt, Artificial Sequence
  Synthetic oligonucleotide: Ptpn6-1020
ggcggcccuggaccagcagg

SEQ ID NO: 4769 - RNA, 20 nt, Artificial Sequence
  Synthetic oligonucleotide: Ptpn6-1021
gcuccagguggagcuccagg

SEQ ID NO: 4770 - RNA, 20 nt, Artificial Sequence
  Synthetic oligonucleotide: Ptpn6-1022
guuaguuuuggagggaggga

SEQ ID NO: 4771 - RNA, 20 nt, Artificial Sequence
  Synthetic oligonucleotide: Ptpn6-1023
gcgggaaggggaaguucaua

SEQ ID NO: 4772 - RNA, 20 nt, Artificial Sequence
  Synthetic oligonucleotide: Ptpn6-1024
gcucaagcugacagagcggc

SEQ ID NO: 4773 - RNA, 20 nt, Artificial Sequence
  Synthetic oligonucleotide: Ptpn6-1025
ggugcccgggacuuacccac

SEQ ID NO: 4774 - RNA, 20 nt, Artificial Sequence
  Synthetic oligonucleotide: Ptpn6-1026
gggccgccuucccccgggag

SEQ ID NO: 4775 - RNA, 20 nt, Artificial Sequence
  Synthetic oligonucleotide: Ptpn6-1027
ggggacagguccuaagcagg

SEQ ID NO: 4776 - RNA, 20 nt, Artificial Sequence
  Synthetic oligonucleotide: Ptpn6-1028
gaacagauacacacuugucc

SEQ ID NO: 4777 - RNA, 20 nt, Artificial Sequence
  Synthetic oligonucleotide: Ptpn6-1029
gcugaggaagagcaaccaau

SEQ ID NO: 4778 - RNA, 20 nt, Artificial Sequence
  Synthetic oligonucleotide: Ptpn6-1030
gcggagaaguuggcuggacg

SEQ ID NO: 4779 - RNA, 20 nt, Artificial Sequence
  Synthetic oligonucleotide: Ptpn6-1031
guugggaagugcggagaagu

SEQ ID NO: 4780 - RNA, 20 nt, Artificial Sequence
  Synthetic oligonucleotide: Ptpn6-1032
ggaagugcggagaaguuggc

SEQ ID NO: 4781 - RNA, 20 nt, Artificial Sequence
  Synthetic oligonucleotide: Ptpn6-1033
gagguguugugagcuaccca

SEQ ID NO: 4782 - RNA, 20 nt, Artificial Sequence
  Synthetic oligonucleotide: Ptpn6-1034
gcagaggagcaugagugagc

SEQ ID NO: 4783 - RNA, 20 nt, Artificial Sequence
  Synthetic oligonucleotide: Ptpn6-1035
gccacggcagagggccgcag

SEQ ID NO: 4784 - RNA, 20 nt, Artificial Sequence
  Synthetic oligonucleotide: Ptpn6-1036
gaggagcaugagugagccgg

SEQ ID NO: 4785 - RNA, 20 nt, Artificial Sequence
  Synthetic oligonucleotide: Ptpn6-1037
gauccugccugccaggccaa

SEQ ID NO: 4786 - RNA, 20 nt, Artificial Sequence
  Synthetic oligonucleotide: Ptpn6-1038
gacuaauagucuccaggaaa

SEQ ID NO: 4787 - RNA, 20 nt, Artificial Sequence
  Synthetic oligonucleotide: Ptpn6-1039
ggcugaggaagagcaaccaa

SEQ ID NO: 4788 - RNA, 20 nt, Artificial Sequence
  Synthetic oligonucleotide: Ptpn6-1040
gccucugacugcuauguuug

SEQ ID NO: 4789 - RNA, 20 nt, Artificial Sequence
  Synthetic oligonucleotide: Ptpn6-1041
gagcggcgggguauugggua

SEQ ID NO: 4790 - RNA, 20 nt, Artificial Sequence
  Synthetic oligonucleotide: Ptpn6-1042
gguguugugagcuacccagg

SEQ ID NO: 4791 - RNA, 20 nt, Artificial Sequence
  Synthetic oligonucleotide: Ptpn6-1043
gacagcaucucucuguaggg

SEQ ID NO: 4792 - RNA, 20 nt, Artificial Sequence
  Synthetic oligonucleotide: Ptpn6-1044
gaaguuggcuggacguggga

SEQ ID NO: 4793 - RNA, 20 nt, Artificial Sequence
  Synthetic oligonucleotide: Ptpn6-1045
gcccaguuccucagagaagg

SEQ ID NO: 4794 - RNA, 20 nt, Artificial Sequence
  Synthetic oligonucleotide: Ptpn6-1046
gccaggccaauggcacugca

SEQ ID NO: 4795 - RNA, 20 nt, Artificial Sequence
  Synthetic oligonucleotide: Ptpn6-1047
gucuccaggaaaaggacagg

SEQ ID NO: 4796 - RNA, 20 nt, Artificial Sequence
  Synthetic oligonucleotide: Ptpn6-1048
ggcacugcagggacaaaccc

SEQ ID NO: 4797 - RNA, 20 nt, Artificial Sequence
  Synthetic oligonucleotide: Ptpn6-1049
gcuucccugcagccccaaag

SEQ ID NO: 4798 - RNA, 20 nt, Artificial Sequence
  Synthetic oligonucleotide: Ptpn6-1050
gcaggcccgccugcuggucc

SEQ ID NO: 4799 - RNA, 20 nt, Artificial Sequence
  Synthetic oligonucleotide: Ptpn6-1051
guccagggccgccuuccccc

SEQ ID NO: 4800 - RNA, 20 nt, Artificial Sequence
  Synthetic oligonucleotide: Ptpn6-1052
gguccagggccgccuucccc

SEQ ID NO: 4801 - RNA, 20 nt, Artificial Sequence
  Synthetic oligonucleotide: Ptpn6-1053
gagggggaagccacggcaga

SEQ ID NO: 4802 - RNA, 20 nt, Artificial Sequence
  Synthetic oligonucleotide: Ptpn6-1054
ggcuggaaguagaaaugcaa

SEQ ID NO: 4803 - RNA, 20 nt, Artificial Sequence
  Synthetic oligonucleotide: Ptpn6-1055
gagccaccuggagcuccacc

SEQ ID NO: 4804 - RNA, 20 nt, Artificial Sequence
  Synthetic oligonucleotide: Ptpn6-1056
gcagagggccgcagggggcg

SEQ ID NO: 4805 - RNA, 20 nt, Artificial Sequence
  Synthetic oligonucleotide: Ptpn6-1057
ggagggggaagccacggcag

SEQ ID NO: 4806 - RNA, 20 nt, Artificial Sequence
  Synthetic oligonucleotide: Ptpn6-1058
gaaugaaugaugcaggggaa

SEQ ID NO: 4807 - RNA, 20 nt, Artificial Sequence
  Synthetic oligonucleotide: Ptpn6-1059
ggaaaaggacagguggggcg

SEQ ID NO: 4808 - RNA, 20 nt, Artificial Sequence
  Synthetic oligonucleotide: Ptpn6-1060
ggcagagggccgcagggggc

SEQ ID NO: 4809 - RNA, 20 nt, Artificial Sequence
  Synthetic oligonucleotide: Ptpn6-1061
gugaaaggaaacaaagaaga

SEQ ID NO: 4810 - RNA, 20 nt, Artificial Sequence
  Synthetic oligonucleotide: Ptpn6-1062
gcaggggaaagggaagugaa

SEQ ID NO: 4811 - RNA, 17 nt, Artificial Sequence
  Synthetic oligonucleotide: Ptpn6-1063
gcuguacucccgcuuug

SEQ ID NO: 4812 - RNA, 17 nt, Artificial Sequence
  Synthetic oligonucleotide: Ptpn6-1064
gccgcugugggcggucu

SEQ ID NO: 4813 - RNA, 17 nt, Artificial Sequence
  Synthetic oligonucleotide: Ptpn6-1065
gagagaugcugucccgu

SEQ ID NO: 4814 - RNA, 17 nt, Artificial Sequence
  Synthetic oligonucleotide: Ptpn6-1066
ggagagguuucccccau

SEQ ID NO: 4815 - RNA, 17 nt, Artificial Sequence
  Synthetic oligonucleotide: Ptpn6-1067
gugcacagcugugccgc

SEQ ID NO: 4816 - RNA, 17 nt, Artificial Sequence
  Synthetic oligonucleotide: Ptpn6-1068
gggaagcuggccgcugu

SEQ ID NO: 4817 - RNA, 17 nt, Artificial Sequence
  Synthetic oligonucleotide: Ptpn6-1069
gaggaacugggcuguua

SEQ ID NO: 4818 - RNA, 17 nt, Artificial Sequence
  Synthetic oligonucleotide: Ptpn6-1070
ggguaccuccuucucug

SEQ ID NO: 4819 - RNA, 17 nt, Artificial Sequence
  Synthetic oligonucleotide: Ptpn6-1071
guugcucuuccucagcc

SEQ ID NO: 4820 - RNA, 17 nt, Artificial Sequence
  Synthetic oligonucleotide: Ptpn6-1072
ggcaggcaggaucgagg

SEQ ID NO: 4821 - RNA, 17 nt, Artificial Sequence
  Synthetic oligonucleotide: Ptpn6-1073
ggcggcccuggaccagc

SEQ ID NO: 4822 - RNA, 17 nt, Artificial Sequence
  Synthetic oligonucleotide: Ptpn6-1074
ggcuccuccucucccgg

SEQ ID NO: 4823 - RNA, 17 nt, Artificial Sequence
  Synthetic oligonucleotide: Ptpn6-1075
gguggcuccuccucucc

SEQ ID NO: 4824 - RNA, 17 nt, Artificial Sequence
  Synthetic oligonucleotide: Ptpn6-1076
gcccuggaccagcaggc

SEQ ID NO: 4825 - RNA, 17 nt, Artificial Sequence
  Synthetic oligonucleotide: Ptpn6-1077
gcuucugccuccugcuu

SEQ ID NO: 4826 - RNA, 17 nt, Artificial Sequence
  Synthetic oligonucleotide: Ptpn6-1078
gcuccagguggagcucc

SEQ ID NO: 4827 - RNA, 17 nt, Artificial Sequence
  Synthetic oligonucleotide: Ptpn6-1079
ggcccuggaccagcagg

SEQ ID NO: 4828 - RNA, 17 nt, Artificial Sequence
  Synthetic oligonucleotide: Ptpn6-1080
guggcuccuccucuccc

SEQ ID NO: 4829 - RNA, 17 nt, Artificial Sequence
  Synthetic oligonucleotide: Ptpn6-1081
gcggcgggguauugggu

SEQ ID NO: 4830 - RNA, 17 nt, Artificial Sequence
  Synthetic oligonucleotide: Ptpn6-1082
gauacacacuuguccag

SEQ ID NO: 4831 - RNA, 17 nt, Artificial Sequence
  Synthetic oligonucleotide: Ptpn6-1083
gguguugugagcuaccc

SEQ ID NO: 4832 - RNA, 17 nt, Artificial Sequence
  Synthetic oligonucleotide: Ptpn6-1084
ggcgggguauuggguag

SEQ ID NO: 4833 - RNA, 17 nt, Artificial Sequence
  Synthetic oligonucleotide: Ptpn6-1085
guguugugagcuaccca

SEQ ID NO: 4834 - RNA, 17 nt, Artificial Sequence
  Synthetic oligonucleotide: Ptpn6-1086
gcccgggacuuacccac

SEQ ID NO: 4835 - RNA, 17 nt, Artificial Sequence
  Synthetic oligonucleotide: Ptpn6-1087
ggaccccgauggugccc

SEQ ID NO: 4836 - RNA, 17 nt, Artificial Sequence
  Synthetic oligonucleotide: Ptpn6-1088
gggaccccgauggugcc

SEQ ID NO: 4837 - RNA, 17 nt, Artificial Sequence
  Synthetic oligonucleotide: Ptpn6-1089
gagcuacccagggggac

SEQ ID NO: 4838 - RNA, 17 nt, Artificial Sequence
  Synthetic oligonucleotide: Ptpn6-1090
gggagggccuucgcggg

SEQ ID NO: 4839 - RNA, 17 nt, Artificial Sequence
  Synthetic oligonucleotide: Ptpn6-1091
gacagguccuaagcagg

SEQ ID NO: 4840 - RNA, 17 nt, Artificial Sequence
  Synthetic oligonucleotide: Ptpn6-1092
ggagcaugagugagccg

SEQ ID NO: 4841 - RNA, 17 nt, Artificial Sequence
  Synthetic oligonucleotide: Ptpn6-1093
ggguccucacaccuugc

SEQ ID NO: 4842 - RNA, 17 nt, Artificial Sequence
  Synthetic oligonucleotide: Ptpn6-1094
ggaccaaagucugaugu

SEQ ID NO: 4843 - RNA, 17 nt, Artificial Sequence
  Synthetic oligonucleotide: Ptpn6-1095
gaccaaagucugauguu

SEQ ID NO: 4844 - RNA, 17 nt, Artificial Sequence
  Synthetic oligonucleotide: Ptpn6-1096
ggggacagguccuaagc

SEQ ID NO: 4845 - RNA, 17 nt, Artificial Sequence
  Synthetic oligonucleotide: Ptpn6-1097
gagcaugagugagccgg

SEQ ID NO: 4846 - RNA, 17 nt, Artificial Sequence
  Synthetic oligonucleotide: Ptpn6-1098
gggguccucacaccuug

SEQ ID NO: 4847 - RNA, 17 nt, Artificial Sequence
  Synthetic oligonucleotide: Ptpn6-1099
gggaaguucauagggac

SEQ ID NO: 4848 - RNA, 17 nt, Artificial Sequence
  Synthetic oligonucleotide: Ptpn6-1100
guugugagcuacccagg

SEQ ID NO: 4849 - RNA, 17 nt, Artificial Sequence
  Synthetic oligonucleotide: Ptpn6-1101
ggagacugggaccccga

SEQ ID NO: 4850 - RNA, 17 nt, Artificial Sequence
  Synthetic oligonucleotide: Ptpn6-1102
gcccgccugcuggucca

SEQ ID NO: 4851 - RNA, 17 nt, Artificial Sequence
  Synthetic oligonucleotide: Ptpn6-1103
ggaaaccaaagggccua

SEQ ID NO: 4852 - RNA, 17 nt, Artificial Sequence
  Synthetic oligonucleotide: Ptpn6-1104
ggaagagcaaccaaugg

SEQ ID NO: 4853 - RNA, 17 nt, Artificial Sequence
  Synthetic oligonucleotide: Ptpn6-1105
gcaucucucuguaggga

SEQ ID NO: 4854 - RNA, 17 nt, Artificial Sequence
  Synthetic oligonucleotide: Ptpn6-1106
ggguaggggaacagacc

SEQ ID NO: 4855 - RNA, 17 nt, Artificial Sequence
  Synthetic oligonucleotide: Ptpn6-1107
gaggaagagcaaccaau

SEQ ID NO: 4856 - RNA, 17 nt, Artificial Sequence
  Synthetic oligonucleotide: Ptpn6-1108
ggaaguaacccuggcug

SEQ ID NO: 4857 - RNA, 17 nt, Artificial Sequence
  Synthetic oligonucleotide: Ptpn6-1109
guuggcuggacguggga

SEQ ID NO: 4858 - RNA, 17 nt, Artificial Sequence
  Synthetic oligonucleotide: Ptpn6-1110
ggaaggggaaguucaua

SEQ ID NO: 4859 - RNA, 17 nt, Artificial Sequence
  Synthetic oligonucleotide: Ptpn6-1111
ggcccgccugcuggucc

SEQ ID NO: 4860 - RNA, 17 nt, Artificial Sequence
  Synthetic oligonucleotide: Ptpn6-1112
ggacagcaucucucugu

SEQ ID NO: 4861 - RNA, 17 nt, Artificial Sequence
  Synthetic oligonucleotide: Ptpn6-1113
gacagcaucucucugua

SEQ ID NO: 4862 - RNA, 17 nt, Artificial Sequence
  Synthetic oligonucleotide: Ptpn6-1114
gggggaagccacggcag

SEQ ID NO: 4863 - RNA, 17 nt, Artificial Sequence
  Synthetic oligonucleotide: Ptpn6-1115
gggaaggggaaguucau

SEQ ID NO: 4864 - RNA, 17 nt, Artificial Sequence
  Synthetic oligonucleotide: Ptpn6-1116
gaggagcaugagugagc

SEQ ID NO: 4865 - RNA, 17 nt, Artificial Sequence
  Synthetic oligonucleotide: Ptpn6-1117
gggaagugcggagaagu

SEQ ID NO: 4866 - RNA, 17 nt, Artificial Sequence
  Synthetic oligonucleotide: Ptpn6-1118
gucuccaggaaaaggac

SEQ ID NO: 4867 - RNA, 17 nt, Artificial Sequence
  Synthetic oligonucleotide: Ptpn6-1119
gggaaaauguuaaagag

SEQ ID NO: 4868 - RNA, 17 nt, Artificial Sequence
  Synthetic oligonucleotide: Ptpn6-1120
gcccaguuccucagaga

SEQ ID NO: 4869 - RNA, 17 nt, Artificial Sequence
  Synthetic oligonucleotide: Ptpn6-1121
guggcccaagccaggug

SEQ ID NO: 4870 - RNA, 17 nt, Artificial Sequence
  Synthetic oligonucleotide: Ptpn6-1122
ggaaaauguuaaagagg

SEQ ID NO: 4871 - RNA, 17 nt, Artificial Sequence
  Synthetic oligonucleotide: Ptpn6-1123
gaaugaugcaggggaaa

SEQ ID NO: 4872 - RNA, 17 nt, Artificial Sequence
  Synthetic oligonucleotide: Ptpn6-1124
gagaaguuggcuggacg

SEQ ID NO: 4873 - RNA, 17 nt, Artificial Sequence
  Synthetic oligonucleotide: Ptpn6-1125
guugaaugaaugaugca

SEQ ID NO: 4874 - RNA, 17 nt, Artificial Sequence
  Synthetic oligonucleotide: Ptpn6-1126
ggggaaaauguuaaaga

SEQ ID NO: 4875 - RNA, 17 nt, Artificial Sequence
  Synthetic oligonucleotide: Ptpn6-1127
gggcggggcugagccag

SEQ ID NO: 4876 - RNA, 17 nt, Artificial Sequence
  Synthetic oligonucleotide: Ptpn6-1128
gagggccgcagggggcg

SEQ ID NO: 4877 - RNA, 17 nt, Artificial Sequence
  Synthetic oligonucleotide: Ptpn6-1129
ggagaggaggagccacc

SEQ ID NO: 4878 - RNA, 17 nt, Artificial Sequence
  Synthetic oligonucleotide: Ptpn6-1130
ggcacagcugugcacag

SEQ ID NO: 4879 - RNA, 17 nt, Artificial Sequence
  Synthetic oligonucleotide: Ptpn6-1131
gaaaaggacaggugggg

SEQ ID NO: 4880 - RNA, 17 nt, Artificial Sequence
  Synthetic oligonucleotide: Ptpn6-1132
gacagguggggcggggc

SEQ ID NO: 4881 - RNA, 17 nt, Artificial Sequence
  Synthetic oligonucleotide: Ptpn6-1133
ggggaagccacggcaga

SEQ ID NO: 4882 - RNA, 17 nt, Artificial Sequence
  Synthetic oligonucleotide: Ptpn6-1134
gcacaguggcccaagcc

SEQ ID NO: 4883 - RNA, 17 nt, Artificial Sequence
  Synthetic oligonucleotide: Ptpn6-1135
ggggaaagggaagugaa

SEQ ID NO: 4884 - RNA, 20 nt, Artificial Sequence
  Synthetic oligonucleotide: Ptpn6-1136
uacggagagguuucccccau

SEQ ID NO: 4885 - RNA, 20 nt, Artificial Sequence
  Synthetic oligonucleotide: Ptpn6-1137
cgcugcccugcgccuguuuc

SEQ ID NO: 4886 - RNA, 20 nt, Artificial Sequence
  Synthetic oligonucleotide: Ptpn6-1138
uuccuggagacuauuagucc

SEQ ID NO: 4887 - RNA, 20 nt, Artificial Sequence
  Synthetic oligonucleotide: Ptpn6-1139
accucaaacauagcagucag

SEQ ID NO: 4888 - RNA, 20 nt, Artificial Sequence
  Synthetic oligonucleotide: Ptpn6-1140
acucccgcuuuggggcugca

SEQ ID NO: 4889 - RNA, 20 nt, Artificial Sequence
  Synthetic oligonucleotide: Ptpn6-1141
acugugcacagcugugccgc

SEQ ID NO: 4890 - RNA, 20 nt, Artificial Sequence
  Synthetic oligonucleotide: Ptpn6-1142
uccccuucccgcaaggugug

SEQ ID NO: 4891 - RNA, 20 nt, Artificial Sequence
  Synthetic oligonucleotide: Ptpn6-1143
ucccagucuccuguuaguuu

SEQ ID NO: 4892 - RNA, 20 nt, Artificial Sequence
  Synthetic oligonucleotide: Ptpn6-1144
uccuggagacuauuagucca

SEQ ID NO: 4893 - RNA, 20 nt, Artificial Sequence
  Synthetic oligonucleotide: Ptpn6-1145
cagucuccuguuaguuuugg

SEQ ID NO: 4894 - RNA, 20 nt, Artificial Sequence
  Synthetic oligonucleotide: Ptpn6-1146
uccuguuaguuuuggaggga

SEQ ID NO: 4895 - RNA, 20 nt, Artificial Sequence
  Synthetic oligonucleotide: Ptpn6-1147
cugcuuaggaccuguccccc

SEQ ID NO: 4896 - RNA, 20 nt, Artificial Sequence
  Synthetic oligonucleotide: Ptpn6-1148
uugguugcucuuccucagcc

SEQ ID NO: 4897 - RNA, 20 nt, Artificial Sequence
  Synthetic oligonucleotide: Ptpn6-1149
uggccgcugugggcggucuc

SEQ ID NO: 4898 - RNA, 20 nt, Artificial Sequence
  Synthetic oligonucleotide: Ptpn6-1150
uggccuggcaggcaggaucg

SEQ ID NO: 4899 - RNA, 20 nt, Artificial Sequence
  Synthetic oligonucleotide: Ptpn6-1151
uacagagagaugcugucccg

SEQ ID NO: 4900 - RNA, 20 nt, Artificial Sequence
  Synthetic oligonucleotide: Ptpn6-1152
ccuggcaggcaggaucgagg

SEQ ID NO: 4901 - RNA, 20 nt, Artificial Sequence
  Synthetic oligonucleotide: Ptpn6-1153
cacuucccaacaucagacuu

SEQ ID NO: 4902 - RNA, 20 nt, Artificial Sequence
  Synthetic oligonucleotide: Ptpn6-1154
ccucagccaggguuacuucc

SEQ ID NO: 4903 - RNA, 20 nt, Artificial Sequence
  Synthetic oligonucleotide: Ptpn6-1155
ccugcuguacucccgcuuug

SEQ ID NO: 4904 - RNA, 20 nt, Artificial Sequence
  Synthetic oligonucleotide: Ptpn6-1156
ucugaggaacugggcuguua

SEQ ID NO: 4905 - RNA, 20 nt, Artificial Sequence
  Synthetic oligonucleotide: Ptpn6-1157
cgguucuuccucaccuggcu

SEQ ID NO: 4906 - RNA, 20 nt, Artificial Sequence
  Synthetic oligonucleotide: Ptpn6-1158
agucuccuguuaguuuugga

SEQ ID NO: 4907 - RNA, 20 nt, Artificial Sequence
  Synthetic oligonucleotide: Ptpn6-1159
augaacuuccccuucccgca

SEQ ID NO: 4908 - RNA, 20 nt, Artificial Sequence
  Synthetic oligonucleotide: Ptpn6-1160
cccccugcggcccucugccg

SEQ ID NO: 4909 - RNA, 20 nt, Artificial Sequence
  Synthetic oligonucleotide: Ptpn6-1161
cuccuguuaguuuuggaggg

SEQ ID NO: 4910 - RNA, 20 nt, Artificial Sequence
  Synthetic oligonucleotide: Ptpn6-1162
ugguugcucuuccucagcca

SEQ ID NO: 4911 - RNA, 20 nt, Artificial Sequence
  Synthetic oligonucleotide: Ptpn6-1163
ugcagugccauuggccuggc

SEQ ID NO: 4912 - RNA, 20 nt, Artificial Sequence
  Synthetic oligonucleotide: Ptpn6-1164
ccuccucucccgggggaagg

SEQ ID NO: 4913 - RNA, 20 nt, Artificial Sequence
  Synthetic oligonucleotide: Ptpn6-1165
cucugaggaacugggcuguu

SEQ ID NO: 4914 - RNA, 20 nt, Artificial Sequence
  Synthetic oligonucleotide: Ptpn6-1166
ugcagggaagcuggccgcug

SEQ ID NO: 4915 - RNA, 20 nt, Artificial Sequence
  Synthetic oligonucleotide: Ptpn6-1167
cccucuuuaacauuuucccc

SEQ ID NO: 4916 - RNA, 20 nt, Artificial Sequence
  Synthetic oligonucleotide: Ptpn6-1168
uaccuccuucucugaggaac

SEQ ID NO: 4917 - RNA, 20 nt, Artificial Sequence
  Synthetic oligonucleotide: Ptpn6-1169
agguggcuccuccucucccg

SEQ ID NO: 4918 - RNA, 20 nt, Artificial Sequence
  Synthetic oligonucleotide: Ptpn6-1170
cgccccaccuguccuuuucc

SEQ ID NO: 4919 - RNA, 20 nt, Artificial Sequence
  Synthetic oligonucleotide: Ptpn6-1171
cucccgggggaaggcggccc

SEQ ID NO: 4920 - RNA, 20 nt, Artificial Sequence
  Synthetic oligonucleotide: Ptpn6-1172
accuccuucucugaggaacu

SEQ ID NO: 4921 - RNA, 20 nt, Artificial Sequence
  Synthetic oligonucleotide: Ptpn6-1173
cugucagcuugagcuccagg

SEQ ID NO: 4922 - RNA, 20 nt, Artificial Sequence
  Synthetic oligonucleotide: Ptpn6-1174
cauuucuacuuccagccucu

SEQ ID NO: 4923 - RNA, 20 nt, Artificial Sequence
  Synthetic oligonucleotide: Ptpn6-1175
ucccugcagugccauuggcc

SEQ ID NO: 4924 - RNA, 20 nt, Artificial Sequence
  Synthetic oligonucleotide: Ptpn6-1176
uggcucagccccgcccccug

SEQ ID NO: 4925 - RNA, 20 nt, Artificial Sequence
  Synthetic oligonucleotide: Ptpn6-1177
ugagcuccagguggagcucc

SEQ ID NO: 4926 - RNA, 20 nt, Artificial Sequence
  Synthetic oligonucleotide: Ptpn6-1178
uguuaguuuuggagggaggg

SEQ ID NO: 4927 - RNA, 20 nt, Artificial Sequence
  Synthetic oligonucleotide: Ptpn6-1179
aggcaggaucgaggaggaag

SEQ ID NO: 4928 - RNA, 20 nt, Artificial Sequence
  Synthetic oligonucleotide: Ptpn6-1180
cccugcaucauucauucaac

SEQ ID NO: 4929 - RNA, 20 nt, Artificial Sequence
  Synthetic oligonucleotide: Ptpn6-1181
cagguggcuccuccucuccc

SEQ ID NO: 4930 - RNA, 20 nt, Artificial Sequence
  Synthetic oligonucleotide: Ptpn6-1182
ccagguggcuccuccucucc

SEQ ID NO: 4931 - RNA, 20 nt, Artificial Sequence
  Synthetic oligonucleotide: Ptpn6-1183
cuuuggggcugcagggaagc

SEQ ID NO: 4932 - RNA, 20 nt, Artificial Sequence
  Synthetic oligonucleotide: Ptpn6-1184
ccugcuucugccuccugcuu

SEQ ID NO: 4933 - RNA, 20 nt, Artificial Sequence
  Synthetic oligonucleotide: Ptpn6-1185
cggggguccucacaccuugc

SEQ ID NO: 4934 - RNA, 20 nt, Artificial Sequence
  Synthetic oligonucleotide: Ptpn6-1186
uccucacaccuugcgggaag

SEQ ID NO: 4935 - RNA, 20 nt, Artificial Sequence
  Synthetic oligonucleotide: Ptpn6-1187
acugggaccccgauggugcc

SEQ ID NO: 4936 - RNA, 20 nt, Artificial Sequence
  Synthetic oligonucleotide: Ptpn6-1188
agcucaagcugacagagcgg

SEQ ID NO: 4937 - RNA, 20 nt, Artificial Sequence
  Synthetic oligonucleotide: Ptpn6-1189
uggacgugggagggccuucg

SEQ ID NO: 4938 - RNA, 20 nt, Artificial Sequence
  Synthetic oligonucleotide: Ptpn6-1190
acgggacagcaucucucugu

SEQ ID NO: 4939 - RNA, 20 nt, Artificial Sequence
  Synthetic oligonucleotide: Ptpn6-1191
ccccaaagcgggaguacagc

SEQ ID NO: 4940 - RNA, 20 nt, Artificial Sequence
  Synthetic oligonucleotide: Ptpn6-1192
auuggguaggggaacagacc

SEQ ID NO: 4941 - RNA, 20 nt, Artificial Sequence
  Synthetic oligonucleotide: Ptpn6-1193
aguacagcaggcccgccugc

SEQ ID NO: 4942 - RNA, 20 nt, Artificial Sequence
  Synthetic oligonucleotide: Ptpn6-1194
agguguugugagcuacccag

SEQ ID NO: 4943 - RNA, 20 nt, Artificial Sequence
  Synthetic oligonucleotide: Ptpn6-1195
cugacagagcggcgggguau

SEQ ID NO: 4944 - RNA, 20 nt, Artificial Sequence
  Synthetic oligonucleotide: Ptpn6-1196
cagggggacagguccuaagc

SEQ ID NO: 4945 - RNA, 20 nt, Artificial Sequence
  Synthetic oligonucleotide: Ptpn6-1197
cugggaccccgauggugccc

SEQ ID NO: 4946 - RNA, 20 nt, Artificial Sequence
  Synthetic oligonucleotide: Ptpn6-1198
ccacggcagagggccgcagg

SEQ ID NO: 4947 - RNA, 20 nt, Artificial Sequence
  Synthetic oligonucleotide: Ptpn6-1199
aaggggaaguucauagggac

SEQ ID NO: 4948 - RNA, 20 nt, Artificial Sequence
  Synthetic oligonucleotide: Ptpn6-1200
uccaaaacuaacaggagacu

SEQ ID NO: 4949 - RNA, 20 nt, Artificial Sequence
  Synthetic oligonucleotide: Ptpn6-1201
ccgccuucccccgggagagg

SEQ ID NO: 4950 - RNA, 20 nt, Artificial Sequence
  Synthetic oligonucleotide: Ptpn6-1202
aacagaccaggaaguaaccc

SEQ ID NO: 4951 - RNA, 20 nt, Artificial Sequence
  Synthetic oligonucleotide: Ptpn6-1203
agaggagcaugagugagccg

SEQ ID NO: 4952 - RNA, 20 nt, Artificial Sequence
  Synthetic oligonucleotide: Ptpn6-1204
acaggagacugggaccccga

SEQ ID NO: 4953 - RNA, 20 nt, Artificial Sequence
  Synthetic oligonucleotide: Ptpn6-1205
ccuccucgauccugccugcc

SEQ ID NO: 4954 - RNA, 20 nt, Artificial Sequence
  Synthetic oligonucleotide: Ptpn6-1206
ugugagcuacccagggggac

SEQ ID NO: 4955 - RNA, 20 nt, Artificial Sequence
  Synthetic oligonucleotide: Ptpn6-1207
acagauacacacuuguccag

SEQ ID NO: 4956 - RNA, 20 nt, Artificial Sequence
  Synthetic oligonucleotide: Ptpn6-1208
ucccucccuccaaaacuaac

SEQ ID NO: 4957 - RNA, 20 nt, Artificial Sequence
  Synthetic oligonucleotide: Ptpn6-1209
agaaguuggcuggacguggg

SEQ ID NO: 4958 - RNA, 20 nt, Artificial Sequence
  Synthetic oligonucleotide: Ptpn6-1210
aacagauacacacuugucca

SEQ ID NO: 4959 - RNA, 20 nt, Artificial Sequence
  Synthetic oligonucleotide: Ptpn6-1211
ugcgggaaggggaaguucau

SEQ ID NO: 4960 - RNA, 20 nt, Artificial Sequence
  Synthetic oligonucleotide: Ptpn6-1212
ucuccaggaaaaggacaggu

SEQ ID NO: 4961 - RNA, 20 nt, Artificial Sequence
  Synthetic oligonucleotide: Ptpn6-1213
aagucugauguugggaagug

SEQ ID NO: 4962 - RNA, 20 nt, Artificial Sequence
  Synthetic oligonucleotide: Ptpn6-1214
cggagaaguuggcuggacgu

SEQ ID NO: 4963 - RNA, 20 nt, Artificial Sequence
  Synthetic oligonucleotide: Ptpn6-1215
acagcaucucucuguaggga

SEQ ID NO: 4964 - RNA, 20 nt, Artificial Sequence
  Synthetic oligonucleotide: Ptpn6-1216
agccacggcagagggccgca

SEQ ID NO: 4965 - RNA, 20 nt, Artificial Sequence
  Synthetic oligonucleotide: Ptpn6-1217
ugccaggccaauggcacugc

SEQ ID NO: 4966 - RNA, 20 nt, Artificial Sequence
  Synthetic oligonucleotide: Ptpn6-1218
cucaagcugacagagcggcg

SEQ ID NO: 4967 - RNA, 20 nt, Artificial Sequence
  Synthetic oligonucleotide: Ptpn6-1219
cggaaacaggcgcagggcag

SEQ ID NO: 4968 - RNA, 20 nt, Artificial Sequence
  Synthetic oligonucleotide: Ptpn6-1220
uggagcucaagcugacagag

SEQ ID NO: 4969 - RNA, 20 nt, Artificial Sequence
  Synthetic oligonucleotide: Ptpn6-1221
ugaggaagagcaaccaaugg

SEQ ID NO: 4970 - RNA, 20 nt, Artificial Sequence
  Synthetic oligonucleotide: Ptpn6-1222
agcaucucucuguagggagg

SEQ ID NO: 4971 - RNA, 20 nt, Artificial Sequence
  Synthetic oligonucleotide: Ptpn6-1223
auagucuccaggaaaaggac

SEQ ID NO: 4972 - RNA, 20 nt, Artificial Sequence
  Synthetic oligonucleotide: Ptpn6-1224
aaauguuaaagagggggcag

SEQ ID NO: 4973 - RNA, 20 nt, Artificial Sequence
  Synthetic oligonucleotide: Ptpn6-1225
cuccaaaacuaacaggagac

SEQ ID NO: 4974 - RNA, 20 nt, Artificial Sequence
  Synthetic oligonucleotide: Ptpn6-1226
caggcccgccugcuggucca

SEQ ID NO: 4975 - RNA, 20 nt, Artificial Sequence
  Synthetic oligonucleotide: Ptpn6-1227
ccaggggaaaauguuaaaga

SEQ ID NO: 4976 - RNA, 20 nt, Artificial Sequence
  Synthetic oligonucleotide: Ptpn6-1228
cagcaucucucuguagggag

SEQ ID NO: 4977 - RNA, 20 nt, Artificial Sequence
  Synthetic oligonucleotide: Ptpn6-1229
cgugggagggccuucgcggg

SEQ ID NO: 4978 - RNA, 20 nt, Artificial Sequence
  Synthetic oligonucleotide: Ptpn6-1230
acagcccaguuccucagaga

SEQ ID NO: 4979 - RNA, 20 nt, Artificial Sequence
  Synthetic oligonucleotide: Ptpn6-1231
ccaggaaguaacccuggcug

SEQ ID NO: 4980 - RNA, 20 nt, Artificial Sequence
  Synthetic oligonucleotide: Ptpn6-1232
caggggaaaauguuaaagag

SEQ ID NO: 4981 - RNA, 20 nt, Artificial Sequence
  Synthetic oligonucleotide: Ptpn6-1233
aggggaaaauguuaaagagg

SEQ ID NO: 4982 - RNA, 20 nt, Artificial Sequence
  Synthetic oligonucleotide: Ptpn6-1234
cggcagagggccgcaggggg

SEQ ID NO: 4983 - RNA, 20 nt, Artificial Sequence
  Synthetic oligonucleotide: Ptpn6-1235
acaguggcccaagccaggug

SEQ ID NO: 4984 - RNA, 20 nt, Artificial Sequence
  Synthetic oligonucleotide: Ptpn6-1236
uccaggggaaaauguuaaag

SEQ ID NO: 4985 - RNA, 20 nt, Artificial Sequence
  Synthetic oligonucleotide: Ptpn6-1237
cagaggagcaugagugagcc

SEQ ID NO: 4986 - RNA, 20 nt, Artificial Sequence
  Synthetic oligonucleotide: Ptpn6-1238
ccgggagaggaggagccacc

SEQ ID NO: 4987 - RNA, 20 nt, Artificial Sequence
  Synthetic oligonucleotide: Ptpn6-1239
cugaggaagagcaaccaaug

SEQ ID NO: 4988 - RNA, 20 nt, Artificial Sequence
  Synthetic oligonucleotide: Ptpn6-1240
agcggcacagcugugcacag

SEQ ID NO: 4989 - RNA, 20 nt, Artificial Sequence
  Synthetic oligonucleotide: Ptpn6-1241
cuguugaaugaaugaugcag

SEQ ID NO: 4990 - RNA, 20 nt, Artificial Sequence
  Synthetic oligonucleotide: Ptpn6-1242
cuucccugcagccccaaagc

SEQ ID NO: 4991 - RNA, 20 nt, Artificial Sequence
  Synthetic oligonucleotide: Ptpn6-1243
cuccaggaaaaggacaggug

SEQ ID NO: 4992 - RNA, 20 nt, Artificial Sequence
  Synthetic oligonucleotide: Ptpn6-1244
aaugaaugaugcaggggaaa

SEQ ID NO: 4993 - RNA, 20 nt, Artificial Sequence
  Synthetic oligonucleotide: Ptpn6-1245
cuguagggagggggaagcca

SEQ ID NO: 4994 - RNA, 20 nt, Artificial Sequence
  Synthetic oligonucleotide: Ptpn6-1246
aaggacagguggggcggggc

SEQ ID NO: 4995 - RNA, 20 nt, Artificial Sequence
  Synthetic oligonucleotide: Ptpn6-1247
ugugcacaguggcccaagcc

SEQ ID NO: 4996 - RNA, 20 nt, Artificial Sequence
  Synthetic oligonucleotide: Ptpn6-1248
agaagcaggagcccagaggc

SEQ ID NO: 4997 - RNA, 20 nt, Artificial Sequence
  Synthetic oligonucleotide: Ptpn6-1249
accuguugaaugaaugaugc

SEQ ID NO: 4998 - RNA, 20 nt, Artificial Sequence
  Synthetic oligonucleotide: Ptpn6-1250
ccuguugaaugaaugaugca

SEQ ID NO: 4999 - RNA, 20 nt, Artificial Sequence
  Synthetic oligonucleotide: Ptpn6-1251
aggaaaaggacagguggggc

SEQ ID NO: 5000 - RNA, 20 nt, Artificial Sequence
  Synthetic oligonucleotide: Ptpn6-1252
caggaaaaggacaggugggg

SEQ ID NO: 5001 - RNA, 20 nt, Artificial Sequence
  Synthetic oligonucleotide: Ptpn6-1253
agggggcggggcugagccag

SEQ ID NO: 5002 - RNA, 20 nt, Artificial Sequence
  Synthetic oligonucleotide: Ptpn6-1254
ugaaaggaaacaaagaagau

SEQ ID NO: 5003 - RNA, 20 nt, Artificial Sequence
  Synthetic oligonucleotide: Ptpn6-1255
aggcagaagcaggagcccag

SEQ ID NO: 5004 - RNA, 20 nt, Artificial Sequence
  Synthetic oligonucleotide: Ptpn6-1256
ccuaagcaggaggcagaagc

SEQ ID NO: 5005 - RNA, 17 nt, Artificial Sequence
  Synthetic oligonucleotide: Ptpn6-1257
uuaggaccugucccccu

SEQ ID NO: 5006 - RNA, 17 nt, Artificial Sequence
  Synthetic oligonucleotide: Ptpn6-1258
ucccguggguaaguccc

SEQ ID NO: 5007 - RNA, 17 nt, Artificial Sequence
  Synthetic oligonucleotide: Ptpn6-1259
agucccgggcaccaucg

SEQ ID NO: 5008 - RNA, 17 nt, Artificial Sequence
  Synthetic oligonucleotide: Ptpn6-1260
uaagucccgggcaccau

SEQ ID NO: 5009 - RNA, 17 nt, Artificial Sequence
  Synthetic oligonucleotide: Ptpn6-1261
aagucccgggcaccauc

SEQ ID NO: 5010 - RNA, 17 nt, Artificial Sequence
  Synthetic oligonucleotide: Ptpn6-1262
ucagaggccacccgcga

SEQ ID NO: 5011 - RNA, 17 nt, Artificial Sequence
  Synthetic oligonucleotide: Ptpn6-1263
ccgcugugggcggucuc

SEQ ID NO: 5012 - RNA, 17 nt, Artificial Sequence
  Synthetic oligonucleotide: Ptpn6-1264
aacuuccccuucccgca

SEQ ID NO: 5013 - RNA, 17 nt, Artificial Sequence
  Synthetic oligonucleotide: Ptpn6-1265
ugcccugcgccuguuuc

SEQ ID NO: 5014 - RNA, 17 nt, Artificial Sequence
  Synthetic oligonucleotide: Ptpn6-1266
ccuucccgcaaggugug

SEQ ID NO: 5015 - RNA, 17 nt, Artificial Sequence
  Synthetic oligonucleotide: Ptpn6-1267
cccgcuuuggggcugca

SEQ ID NO: 5016 - RNA, 17 nt, Artificial Sequence
  Synthetic oligonucleotide: Ptpn6-1268
ccugcggcccucugccg

SEQ ID NO: 5017 - RNA, 17 nt, Artificial Sequence
  Synthetic oligonucleotide: Ptpn6-1269
ucaaacauagcagucag

SEQ ID NO: 5018 - RNA, 17 nt, Artificial Sequence
  Synthetic oligonucleotide: Ptpn6-1270
cuuaggaccuguccccc

SEQ ID NO: 5019 - RNA, 17 nt, Artificial Sequence
  Synthetic oligonucleotide: Ptpn6-1271
auuuuccuuaggcccuu

SEQ ID NO: 5020 - RNA, 17 nt, Artificial Sequence
  Synthetic oligonucleotide: Ptpn6-1272
cuggagacuauuagucc

SEQ ID NO: 5021 - RNA, 17 nt, Artificial Sequence
  Synthetic oligonucleotide: Ptpn6-1273
uucccaacaucagacuu

SEQ ID NO: 5022 - RNA, 17 nt, Artificial Sequence
  Synthetic oligonucleotide: Ptpn6-1274
aagcuggccgcuguggg

SEQ ID NO: 5023 - RNA, 17 nt, Artificial Sequence
  Synthetic oligonucleotide: Ptpn6-1275
uguuagggauuuuccuu

SEQ ID NO: 5024 - RNA, 17 nt, Artificial Sequence
  Synthetic oligonucleotide: Ptpn6-1276
aguggcugauuacugag

SEQ ID NO: 5025 - RNA, 17 nt, Artificial Sequence
  Synthetic oligonucleotide: Ptpn6-1277
agugccauuggccuggc

SEQ ID NO: 5026 - RNA, 17 nt, Artificial Sequence
  Synthetic oligonucleotide: Ptpn6-1278
cuguuaguuuuggaggg

SEQ ID NO: 5027 - RNA, 17 nt, Artificial Sequence
  Synthetic oligonucleotide: Ptpn6-1279
ucuccuguuaguuuugg

SEQ ID NO: 5028 - RNA, 17 nt, Artificial Sequence
  Synthetic oligonucleotide: Ptpn6-1280
ugucccugcagugccau

SEQ ID NO: 5029 - RNA, 17 nt, Artificial Sequence
  Synthetic oligonucleotide: Ptpn6-1281
agagagaugcugucccg

SEQ ID NO: 5030 - RNA, 17 nt, Artificial Sequence
  Synthetic oligonucleotide: Ptpn6-1282
cuccuguuaguuuugga

SEQ ID NO: 5031 - RNA, 17 nt, Artificial Sequence
  Synthetic oligonucleotide: Ptpn6-1283
cagccaggguuacuucc

SEQ ID NO: 5032 - RNA, 17 nt, Artificial Sequence
  Synthetic oligonucleotide: Ptpn6-1284
ccauuggccuggcaggc

SEQ ID NO: 5033 - RNA, 17 nt, Artificial Sequence
  Synthetic oligonucleotide: Ptpn6-1285
uggagacuauuagucca

SEQ ID NO: 5034 - RNA, 17 nt, Artificial Sequence
  Synthetic oligonucleotide: Ptpn6-1286
ugcaucauucauucaac

SEQ ID NO: 5035 - RNA, 17 nt, Artificial Sequence
  Synthetic oligonucleotide: Ptpn6-1287
cugcagugccauuggcc

SEQ ID NO: 5036 - RNA, 17 nt, Artificial Sequence
  Synthetic oligonucleotide: Ptpn6-1288
ccuggcaggcaggaucg

SEQ ID NO: 5037 - RNA, 17 nt, Artificial Sequence
  Synthetic oligonucleotide: Ptpn6-1289
ugaggaacugggcuguu

SEQ ID NO: 5038 - RNA, 17 nt, Artificial Sequence
  Synthetic oligonucleotide: Ptpn6-1290
ucagcuugagcuccagg

SEQ ID NO: 5039 - RNA, 17 nt, Artificial Sequence
  Synthetic oligonucleotide: Ptpn6-1291
caaggugugaggacccc

SEQ ID NO: 5040 - RNA, 17 nt, Artificial Sequence
  Synthetic oligonucleotide: Ptpn6-1292
ucuuuaacauuuucccc

SEQ ID NO: 5041 - RNA, 17 nt, Artificial Sequence
  Synthetic oligonucleotide: Ptpn6-1293
uggcuccuccucucccg

SEQ ID NO: 5042 - RNA, 17 nt, Artificial Sequence
  Synthetic oligonucleotide: Ptpn6-1294
caggaucgaggaggaag

SEQ ID NO: 5043 - RNA, 17 nt, Artificial Sequence
  Synthetic oligonucleotide: Ptpn6-1295
agggaagcuggccgcug

SEQ ID NO: 5044 - RNA, 17 nt, Artificial Sequence
  Synthetic oligonucleotide: Ptpn6-1296
ccuccucucccggggga

SEQ ID NO: 5045 - RNA, 17 nt, Artificial Sequence
  Synthetic oligonucleotide: Ptpn6-1297
ccucucccgggggaagg

SEQ ID NO: 5046 - RNA, 17 nt, Artificial Sequence
  Synthetic oligonucleotide: Ptpn6-1298
cccaccuguccuuuucc

SEQ ID NO: 5047 - RNA, 17 nt, Artificial Sequence
  Synthetic oligonucleotide: Ptpn6-1299
cuccuucucugaggaac

SEQ ID NO: 5048 - RNA, 17 nt, Artificial Sequence
  Synthetic oligonucleotide: Ptpn6-1300
uccuucucugaggaacu

SEQ ID NO: 5049 - RNA, 17 nt, Artificial Sequence
  Synthetic oligonucleotide: Ptpn6-1301
uucuuccucaccuggcu

SEQ ID NO: 5050 - RNA, 17 nt, Artificial Sequence
  Synthetic oligonucleotide: Ptpn6-1302
uugcucuuccucagcca

SEQ ID NO: 5051 - RNA, 17 nt, Artificial Sequence
  Synthetic oligonucleotide: Ptpn6-1303
ccgggggaaggcggccc

SEQ ID NO: 5052 - RNA, 17 nt, Artificial Sequence
  Synthetic oligonucleotide: Ptpn6-1304
cucagccccgcccccug

SEQ ID NO: 5053 - RNA, 17 nt, Artificial Sequence
  Synthetic oligonucleotide: Ptpn6-1305
ucuuccucaccuggcuu

SEQ ID NO: 5054 - RNA, 17 nt, Artificial Sequence
  Synthetic oligonucleotide: Ptpn6-1306
uucuacuuccagccucu

SEQ ID NO: 5055 - RNA, 17 nt, Artificial Sequence
  Synthetic oligonucleotide: Ptpn6-1307
uguuaguuuuggaggga

SEQ ID NO: 5056 - RNA, 17 nt, Artificial Sequence
  Synthetic oligonucleotide: Ptpn6-1308
uuucuacuuccagccuc

SEQ ID NO: 5057 - RNA, 17 nt, Artificial Sequence
  Synthetic oligonucleotide: Ptpn6-1309
cugucagcuugagcucc

SEQ ID NO: 5058 - RNA, 17 nt, Artificial Sequence
  Synthetic oligonucleotide: Ptpn6-1310
uaguuuuggagggaggg

SEQ ID NO: 5059 - RNA, 17 nt, Artificial Sequence
  Synthetic oligonucleotide: Ptpn6-1311
cagucuccuguuaguuu

SEQ ID NO: 5060 - RNA, 17 nt, Artificial Sequence
  Synthetic oligonucleotide: Ptpn6-1312
ucccgcuuuggggcugc

SEQ ID NO: 5061 - RNA, 17 nt, Artificial Sequence
  Synthetic oligonucleotide: Ptpn6-1313
ccagguggagcuccagg

SEQ ID NO: 5062 - RNA, 17 nt, Artificial Sequence
  Synthetic oligonucleotide: Ptpn6-1314
aguuuuggagggaggga

SEQ ID NO: 5063 - RNA, 17 nt, Artificial Sequence
  Synthetic oligonucleotide: Ptpn6-1315
uggggcugcagggaagc

SEQ ID NO: 5064 - RNA, 17 nt, Artificial Sequence
  Synthetic oligonucleotide: Ptpn6-1316
cugcuguacucccgcuu

SEQ ID NO: 5065 - RNA, 17 nt, Artificial Sequence
  Synthetic oligonucleotide: Ptpn6-1317
ucauagggaccggaaac

SEQ ID NO: 5066 - RNA, 17 nt, Artificial Sequence
  Synthetic oligonucleotide: Ptpn6-1318
acagagcggcgggguau

SEQ ID NO: 5067 - RNA, 17 nt, Artificial Sequence
  Synthetic oligonucleotide: Ptpn6-1319
ucaagcugacagagcgg

SEQ ID NO: 5068 - RNA, 17 nt, Artificial Sequence
  Synthetic oligonucleotide: Ptpn6-1320
cagagcggcgggguauu

SEQ ID NO: 5069 - RNA, 17 nt, Artificial Sequence
  Synthetic oligonucleotide: Ptpn6-1321
cuggacuaauagucucc

SEQ ID NO: 5070 - RNA, 17 nt, Artificial Sequence
  Synthetic oligonucleotide: Ptpn6-1322
ugcccgggacuuaccca

SEQ ID NO: 5071 - RNA, 17 nt, Artificial Sequence
  Synthetic oligonucleotide: Ptpn6-1323
cgugggagggccuucgc

SEQ ID NO: 5072 - RNA, 17 nt, Artificial Sequence
  Synthetic oligonucleotide: Ptpn6-1324
aagcugacagagcggcg

SEQ ID NO: 5073 - RNA, 17 nt, Artificial Sequence
  Synthetic oligonucleotide: Ptpn6-1325
cccgagaccgcccacag

SEQ ID NO: 5074 - RNA, 17 nt, Artificial Sequence
  Synthetic oligonucleotide: Ptpn6-1326
acgugggagggccuucg

SEQ ID NO: 5075 - RNA, 17 nt, Artificial Sequence
  Synthetic oligonucleotide: Ptpn6-1327
ucacaccuugcgggaag

SEQ ID NO: 5076 - RNA, 17 nt, Artificial Sequence
  Synthetic oligonucleotide: Ptpn6-1328
agaaguuggcuggacgu

SEQ ID NO: 5077 - RNA, 17 nt, Artificial Sequence
  Synthetic oligonucleotide: Ptpn6-1329
agugcggagaaguuggc

SEQ ID NO: 5078 - RNA, 17 nt, Artificial Sequence
  Synthetic oligonucleotide: Ptpn6-1330
caaagcgggaguacagc

SEQ ID NO: 5079 - RNA, 17 nt, Artificial Sequence
  Synthetic oligonucleotide: Ptpn6-1331
caagcugacagagcggc

SEQ ID NO: 5080 - RNA, 17 nt, Artificial Sequence
  Synthetic oligonucleotide: Ptpn6-1332
cagauacacacuugucc

SEQ ID NO: 5081 - RNA, 17 nt, Artificial Sequence
  Synthetic oligonucleotide: Ptpn6-1333
ccgccuucccccgggag

SEQ ID NO: 5082 - RNA, 17 nt, Artificial Sequence
  Synthetic oligonucleotide: Ptpn6-1334
ucugacugcuauguuug

SEQ ID NO: 5083 - RNA, 17 nt, Artificial Sequence
  Synthetic oligonucleotide: Ptpn6-1335
acggcagagggccgcag

SEQ ID NO: 5084 - RNA, 17 nt, Artificial Sequence
  Synthetic oligonucleotide: Ptpn6-1336
cucccuccaaaacuaac

SEQ ID NO: 5085 - RNA, 17 nt, Artificial Sequence
  Synthetic oligonucleotide: Ptpn6-1337
ccucacaccuugcggga

SEQ ID NO: 5086 - RNA, 17 nt, Artificial Sequence
  Synthetic oligonucleotide: Ptpn6-1338
ccacggcagagggccgc

SEQ ID NO: 5087 - RNA, 17 nt, Artificial Sequence
  Synthetic oligonucleotide: Ptpn6-1339
agauacacacuugucca

SEQ ID NO: 5088 - RNA, 17 nt, Artificial Sequence
  Synthetic oligonucleotide: Ptpn6-1340
aguuggcuggacguggg

SEQ ID NO: 5089 - RNA, 17 nt, Artificial Sequence
  Synthetic oligonucleotide: Ptpn6-1341
aggccaauggcacugca

SEQ ID NO: 5090 - RNA, 17 nt, Artificial Sequence
  Synthetic oligonucleotide: Ptpn6-1342
uaauagucuccaggaaa

SEQ ID NO: 5091 - RNA, 17 nt, Artificial Sequence
  Synthetic oligonucleotide: Ptpn6-1343
acugcagggacaaaccc

SEQ ID NO: 5092 - RNA, 17 nt, Artificial Sequence
  Synthetic oligonucleotide: Ptpn6-1344
uguuaaagagggggcag

SEQ ID NO: 5093 - RNA, 17 nt, Artificial Sequence
  Synthetic oligonucleotide: Ptpn6-1345
cucacaccuugcgggaa

SEQ ID NO: 5094 - RNA, 17 nt, Artificial Sequence
  Synthetic oligonucleotide: Ptpn6-1346
ccucgauccugccugcc

SEQ ID NO: 5095 - RNA, 17 nt, Artificial Sequence
  Synthetic oligonucleotide: Ptpn6-1347
agcaucucucuguaggg

SEQ ID NO: 5096 - RNA, 17 nt, Artificial Sequence
  Synthetic oligonucleotide: Ptpn6-1348
caggccaauggcacugc

SEQ ID NO: 5097 - RNA, 17 nt, Artificial Sequence
  Synthetic oligonucleotide: Ptpn6-1349
agcucaagcugacagag

SEQ ID NO: 5098 - RNA, 17 nt, Artificial Sequence
  Synthetic oligonucleotide: Ptpn6-1350
agaccaggaaguaaccc

SEQ ID NO: 5099 - RNA, 17 nt, Artificial Sequence
  Synthetic oligonucleotide: Ptpn6-1351
aucucucuguagggagg

SEQ ID NO: 5100 - RNA, 17 nt, Artificial Sequence
  Synthetic oligonucleotide: Ptpn6-1352
ccuucccccgggagagg

SEQ ID NO: 5101 - RNA, 17 nt, Artificial Sequence
  Synthetic oligonucleotide: Ptpn6-1353
cggcagagggccgcagg

SEQ ID NO: 5102 - RNA, 17 nt, Artificial Sequence
  Synthetic oligonucleotide: Ptpn6-1354
uguugugagcuacccag

SEQ ID NO: 5103 - RNA, 17 nt, Artificial Sequence
  Synthetic oligonucleotide: Ptpn6-1355
aggaagagcaaccaaug

SEQ ID NO: 5104 - RNA, 17 nt, Artificial Sequence
  Synthetic oligonucleotide: Ptpn6-1356
acagcaggcccgccugc

SEQ ID NO: 5105 - RNA, 17 nt, Artificial Sequence
  Synthetic oligonucleotide: Ptpn6-1357
caucucucuguagggag

SEQ ID NO: 5106 - RNA, 17 nt, Artificial Sequence
  Synthetic oligonucleotide: Ptpn6-1358
ugaggaagagcaaccaa

SEQ ID NO: 5107 - RNA, 17 nt, Artificial Sequence
  Synthetic oligonucleotide: Ptpn6-1359
caaaacuaacaggagac

SEQ ID NO: 5108 - RNA, 17 nt, Artificial Sequence
  Synthetic oligonucleotide: Ptpn6-1360
aaaacuaacaggagacu

SEQ ID NO: 5109 - RNA, 17 nt, Artificial Sequence
  Synthetic oligonucleotide: Ptpn6-1361
aaacaggcgcagggcag

SEQ ID NO: 5110 - RNA, 17 nt, Artificial Sequence
  Synthetic oligonucleotide: Ptpn6-1362
ugaaugaugcaggggaa

SEQ ID NO: 5111 - RNA, 17 nt, Artificial Sequence
  Synthetic oligonucleotide: Ptpn6-1363
cagagggccgcaggggg

SEQ ID NO: 5112 - RNA, 17 nt, Artificial Sequence
  Synthetic oligonucleotide: Ptpn6-1364
cagggccgccuuccccc

SEQ ID NO: 5113 - RNA, 17 nt, Artificial Sequence
  Synthetic oligonucleotide: Ptpn6-1365
caguuccucagagaagg

SEQ ID NO: 5114 - RNA, 17 nt, Artificial Sequence
  Synthetic oligonucleotide: Ptpn6-1366
ucugauguugggaagug

SEQ ID NO: 5115 - RNA, 17 nt, Artificial Sequence
  Synthetic oligonucleotide: Ptpn6-1367
ccugccugccaggccaa

SEQ ID NO: 5116 - RNA, 17 nt, Artificial Sequence
  Synthetic oligonucleotide: Ptpn6-1368
ccaggaaaaggacaggu

SEQ ID NO: 5117 - RNA, 17 nt, Artificial Sequence
  Synthetic oligonucleotide: Ptpn6-1369
ucccugcagccccaaag

SEQ ID NO: 5118 - RNA, 17 nt, Artificial Sequence
  Synthetic oligonucleotide: Ptpn6-1370
uugaaugaaugaugcag

SEQ ID NO: 5119 - RNA, 17 nt, Artificial Sequence
  Synthetic oligonucleotide: Ptpn6-1371
uccaggaaaaggacagg

SEQ ID NO: 5120 - RNA, 17 nt, Artificial Sequence
  Synthetic oligonucleotide: Ptpn6-1372
aggagcaugagugagcc

SEQ ID NO: 5121 - RNA, 17 nt, Artificial Sequence
  Synthetic oligonucleotide: Ptpn6-1373
aggggaaaauguuaaag

SEQ ID NO: 5122 - RNA, 17 nt, Artificial Sequence
  Synthetic oligonucleotide: Ptpn6-1374
uggaaguagaaaugcaa

SEQ ID NO: 5123 - RNA, 17 nt, Artificial Sequence
  Synthetic oligonucleotide: Ptpn6-1375
aaaggacagguggggcg

SEQ ID NO: 5124 - RNA, 17 nt, Artificial Sequence
  Synthetic oligonucleotide: Ptpn6-1376
cccugcagccccaaagc

SEQ ID NO: 5125 - RNA, 17 nt, Artificial Sequence
  Synthetic oligonucleotide: Ptpn6-1377
uagggagggggaagcca

SEQ ID NO: 5126 - RNA, 17 nt, Artificial Sequence
  Synthetic oligonucleotide: Ptpn6-1378
agagggccgcagggggc

SEQ ID NO: 5127 - RNA, 17 nt, Artificial Sequence
  Synthetic oligonucleotide: Ptpn6-1379
ccagggccgccuucccc

SEQ ID NO: 5128 - RNA, 17 nt, Artificial Sequence
  Synthetic oligonucleotide: Ptpn6-1380
aaaaggacagguggggc

SEQ ID NO: 5129 - RNA, 17 nt, Artificial Sequence
  Synthetic oligonucleotide: Ptpn6-1381
cagaagcaggagcccag

SEQ ID NO: 5130 - RNA, 17 nt, Artificial Sequence
  Synthetic oligonucleotide: Ptpn6-1382
caggaaaaggacaggug

SEQ ID NO: 5131 - RNA, 17 nt, Artificial Sequence
  Synthetic oligonucleotide: Ptpn6-1383
cacggcagagggccgca

SEQ ID NO: 5132 - RNA, 17 nt, Artificial Sequence
  Synthetic oligonucleotide: Ptpn6-1384
uguugaaugaaugaugc

SEQ ID NO: 5133 - RNA, 17 nt, Artificial Sequence
  Synthetic oligonucleotide: Ptpn6-1385
agcaggagcccagaggc

SEQ ID NO: 5134 - RNA, 17 nt, Artificial Sequence
  Synthetic oligonucleotide: Ptpn6-1386
ccaccuggagcuccacc

SEQ ID NO: 5135 - RNA, 17 nt, Artificial Sequence
  Synthetic oligonucleotide: Ptpn6-1387
aaggaaacaaagaagau

SEQ ID NO: 5136 - RNA, 17 nt, Artificial Sequence
  Synthetic oligonucleotide: Ptpn6-1388
aagcaggaggcagaagc

SEQ ID NO: 5137 - RNA, 17 nt, Artificial Sequence
  Synthetic oligonucleotide: Ptpn6-1389
aaaggaaacaaagaaga

SEQ ID NO: 5138 - RNA, 20 nt, Artificial Sequence
  Synthetic oligonucleotide: Ptpn6-1390
cugauucccucugccuuucc

SEQ ID NO: 5139 - RNA, 20 nt, Artificial Sequence
  Synthetic oligonucleotide: Ptpn6-1391
cccugaacagcuccucccua

SEQ ID NO: 5140 - RNA, 20 nt, Artificial Sequence
  Synthetic oligonucleotide: Ptpn6-1392
acagcuccucccuauggucc

SEQ ID NO: 5141 - RNA, 20 nt, Artificial Sequence
  Synthetic oligonucleotide: Ptpn6-1393
cuccucccuaugguccuggc

SEQ ID NO: 5142 - RNA, 20 nt, Artificial Sequence
  Synthetic oligonucleotide: Ptpn6-1394
uccucccuaugguccuggcu

SEQ ID NO: 5143 - RNA, 20 nt, Artificial Sequence
  Synthetic oligonucleotide: Ptpn6-1395
gcugggccuaacccugcccc

SEQ ID NO: 5144 - RNA, 20 nt, Artificial Sequence
  Synthetic oligonucleotide: Ptpn6-1396
cugggccuaacccugcccca

SEQ ID NO: 5145 - RNA, 20 nt, Artificial Sequence
  Synthetic oligonucleotide: Ptpn6-1397
ccagggccuaacccuaccug

SEQ ID NO: 5146 - RNA, 20 nt, Artificial Sequence
  Synthetic oligonucleotide: Ptpn6-1398
ugaggcuccuccccuucccc

SEQ ID NO: 5147 - RNA, 20 nt, Artificial Sequence
  Synthetic oligonucleotide: Ptpn6-1399
gaggcuccuccccuuccccc

SEQ ID NO: 5148 - RNA, 20 nt, Artificial Sequence
  Synthetic oligonucleotide: Ptpn6-1400
aggcuccuccccuucccccg

SEQ ID NO: 5149 - RNA, 20 nt, Artificial Sequence
  Synthetic oligonucleotide: Ptpn6-1401
uccuccccuucccccggggc

SEQ ID NO: 5150 - RNA, 20 nt, Artificial Sequence
  Synthetic oligonucleotide: Ptpn6-1402
uucccccggggcagguugag

SEQ ID NO: 5151 - RNA, 20 nt, Artificial Sequence
  Synthetic oligonucleotide: Ptpn6-1403
cccggggcagguugagaggc

SEQ ID NO: 5152 - RNA, 20 nt, Artificial Sequence
  Synthetic oligonucleotide: Ptpn6-1404
ggcagguugagaggcuggag

SEQ ID NO: 5153 - RNA, 20 nt, Artificial Sequence
  Synthetic oligonucleotide: Ptpn6-1405
gcagguugagaggcuggagu

SEQ ID NO: 5154 - RNA, 20 nt, Artificial Sequence
  Synthetic oligonucleotide: Ptpn6-1406
gagugggucccucagcgccc

SEQ ID NO: 5155 - RNA, 20 nt, Artificial Sequence
  Synthetic oligonucleotide: Ptpn6-1407
agugggucccucagcgcccu

SEQ ID NO: 5156 - RNA, 20 nt, Artificial Sequence
  Synthetic oligonucleotide: Ptpn6-1408
gggucccucagcgcccuggg

SEQ ID NO: 5157 - RNA, 20 nt, Artificial Sequence
  Synthetic oligonucleotide: Ptpn6-1409
ggucccucagcgcccugggu

SEQ ID NO: 5158 - RNA, 20 nt, Artificial Sequence
  Synthetic oligonucleotide: Ptpn6-1410
cccucagcgcccuggguggg

SEQ ID NO: 5159 - RNA, 20 nt, Artificial Sequence
  Synthetic oligonucleotide: Ptpn6-1411
ccucagcgcccugggugggu

SEQ ID NO: 5160 - RNA, 20 nt, Artificial Sequence
  Synthetic oligonucleotide: Ptpn6-1412
guuuaagaugcugguaauac

SEQ ID NO: 5161 - RNA, 20 nt, Artificial Sequence
  Synthetic oligonucleotide: Ptpn6-1413
uggagugaacaagacagaca

SEQ ID NO: 5162 - RNA, 20 nt, Artificial Sequence
  Synthetic oligonucleotide: Ptpn6-1414
agacauggucucugcucuca

SEQ ID NO: 5163 - RNA, 20 nt, Artificial Sequence
  Synthetic oligonucleotide: Ptpn6-1415
ucacggagcuuacauuccag

SEQ ID NO: 5164 - RNA, 20 nt, Artificial Sequence
  Synthetic oligonucleotide: Ptpn6-1416
cacggagcuuacauuccagu

SEQ ID NO: 5165 - RNA, 20 nt, Artificial Sequence
  Synthetic oligonucleotide: Ptpn6-1417
ggagcuuacauuccaguggg

SEQ ID NO: 5166 - RNA, 20 nt, Artificial Sequence
  Synthetic oligonucleotide: Ptpn6-1418
gaacaaauaacccaauaaau

SEQ ID NO: 5167 - RNA, 20 nt, Artificial Sequence
  Synthetic oligonucleotide: Ptpn6-1419
acgcagaaaauagacagccu

SEQ ID NO: 5168 - RNA, 20 nt, Artificial Sequence
  Synthetic oligonucleotide: Ptpn6-1420
agaaaauagacagccuuggc

SEQ ID NO: 5169 - RNA, 20 nt, Artificial Sequence
  Synthetic oligonucleotide: Ptpn6-1421
gaaaauagacagccuuggcc

SEQ ID NO: 5170 - RNA, 20 nt, Artificial Sequence
  Synthetic oligonucleotide: Ptpn6-1422
acagccuuggccggguguag

SEQ ID NO: 5171 - RNA, 20 nt, Artificial Sequence
  Synthetic oligonucleotide: Ptpn6-1423
caccugugaucccagcacug

SEQ ID NO: 5172 - RNA, 20 nt, Artificial Sequence
  Synthetic oligonucleotide: Ptpn6-1424
accugugaucccagcacugu

SEQ ID NO: 5173 - RNA, 20 nt, Artificial Sequence
  Synthetic oligonucleotide: Ptpn6-1425
ugugaucccagcacuguggg

SEQ ID NO: 5174 - RNA, 20 nt, Artificial Sequence
  Synthetic oligonucleotide: Ptpn6-1426
cccagcacugugggaggcug

SEQ ID NO: 5175 - RNA, 20 nt, Artificial Sequence
  Synthetic oligonucleotide: Ptpn6-1427
cugugggaggcugaggcgag

SEQ ID NO: 5176 - RNA, 20 nt, Artificial Sequence
  Synthetic oligonucleotide: Ptpn6-1428
cgagaggauugcuugagccc

SEQ ID NO: 5177 - RNA, 20 nt, Artificial Sequence
  Synthetic oligonucleotide: Ptpn6-1429
ccaggaguuugagaccagcc

SEQ ID NO: 5178 - RNA, 20 nt, Artificial Sequence
  Synthetic oligonucleotide: Ptpn6-1430
acaaaaaauaagaaauuagc

SEQ ID NO: 5179 - RNA, 20 nt, Artificial Sequence
  Synthetic oligonucleotide: Ptpn6-1431
caaaaaauaagaaauuagcu

SEQ ID NO: 5180 - RNA, 20 nt, Artificial Sequence
  Synthetic oligonucleotide: Ptpn6-1432
aauaagaaauuagcugggug

SEQ ID NO: 5181 - RNA, 20 nt, Artificial Sequence
  Synthetic oligonucleotide: Ptpn6-1433
aagaaauuagcugggugugg

SEQ ID NO: 5182 - RNA, 20 nt, Artificial Sequence
  Synthetic oligonucleotide: Ptpn6-1434
gugugguggcacacguccug

SEQ ID NO: 5183 - RNA, 20 nt, Artificial Sequence
  Synthetic oligonucleotide: Ptpn6-1435
acguccugugguuccagcua

SEQ ID NO: 5184 - RNA, 20 nt, Artificial Sequence
  Synthetic oligonucleotide: Ptpn6-1436
cugugguuccagcuauggag

SEQ ID NO: 5185 - RNA, 20 nt, Artificial Sequence
  Synthetic oligonucleotide: Ptpn6-1437
uuccagcuauggagaggcua

SEQ ID NO: 5186 - RNA, 20 nt, Artificial Sequence
  Synthetic oligonucleotide: Ptpn6-1438
uauggagaggcuaaggugag

SEQ ID NO: 5187 - RNA, 20 nt, Artificial Sequence
  Synthetic oligonucleotide: Ptpn6-1439
gugagaggcuugcuugagcc

SEQ ID NO: 5188 - RNA, 20 nt, Artificial Sequence
  Synthetic oligonucleotide: Ptpn6-1440
ugagaggcuugcuugagccu

SEQ ID NO: 5189 - RNA, 20 nt, Artificial Sequence
  Synthetic oligonucleotide: Ptpn6-1441
gaggcuugcuugagccuggg

SEQ ID NO: 5190 - RNA, 20 nt, Artificial Sequence
  Synthetic oligonucleotide: Ptpn6-1442
ugcuugagccugggagguca

SEQ ID NO: 5191 - RNA, 20 nt, Artificial Sequence
  Synthetic oligonucleotide: Ptpn6-1443
ugcaccacugcacaccagcc

SEQ ID NO: 5192 - RNA, 20 nt, Artificial Sequence
  Synthetic oligonucleotide: Ptpn6-1444
gcaccacugcacaccagccu

SEQ ID NO: 5193 - RNA, 20 nt, Artificial Sequence
  Synthetic oligonucleotide: Ptpn6-1445
uucauaugcuagcaagugac

SEQ ID NO: 5194 - RNA, 20 nt, Artificial Sequence
  Synthetic oligonucleotide: Ptpn6-1446
ucauaugcuagcaagugacu

SEQ ID NO: 5195 - RNA, 20 nt, Artificial Sequence
  Synthetic oligonucleotide: Ptpn6-1447
cauaugcuagcaagugacug

SEQ ID NO: 5196 - RNA, 20 nt, Artificial Sequence
  Synthetic oligonucleotide: Ptpn6-1448
auaugcuagcaagugacugg

SEQ ID NO: 5197 - RNA, 20 nt, Artificial Sequence
  Synthetic oligonucleotide: Ptpn6-1449
uaugcuagcaagugacuggg

SEQ ID NO: 5198 - RNA, 17 nt, Artificial Sequence
  Synthetic oligonucleotide: Ptpn6-1450
auucccucugccuuucc

SEQ ID NO: 5199 - RNA, 17 nt, Artificial Sequence
  Synthetic oligonucleotide: Ptpn6-1451
ugaacagcuccucccua

SEQ ID NO: 5200 - RNA, 17 nt, Artificial Sequence
  Synthetic oligonucleotide: Ptpn6-1452
gcuccucccuauggucc

SEQ ID NO: 5201 - RNA, 17 nt, Artificial Sequence
  Synthetic oligonucleotide: Ptpn6-1453
cucccuaugguccuggc

SEQ ID NO: 5202 - RNA, 17 nt, Artificial Sequence
  Synthetic oligonucleotide: Ptpn6-1454
ucccuaugguccuggcu

SEQ ID NO: 5203 - RNA, 17 nt, Artificial Sequence
  Synthetic oligonucleotide: Ptpn6-1455
gggccuaacccugcccc

SEQ ID NO: 5204 - RNA, 17 nt, Artificial Sequence
  Synthetic oligonucleotide: Ptpn6-1456
ggccuaacccugcccca

SEQ ID NO: 5205 - RNA, 17 nt, Artificial Sequence
  Synthetic oligonucleotide: Ptpn6-1457
gggccuaacccuaccug

SEQ ID NO: 5206 - RNA, 17 nt, Artificial Sequence
  Synthetic oligonucleotide: Ptpn6-1458
ggcuccuccccuucccc

SEQ ID NO: 5207 - RNA, 17 nt, Artificial Sequence
  Synthetic oligonucleotide: Ptpn6-1459
gcuccuccccuuccccc

SEQ ID NO: 5208 - RNA, 17 nt, Artificial Sequence
  Synthetic oligonucleotide: Ptpn6-1460
cuccuccccuucccccg

SEQ ID NO: 5209 - RNA, 17 nt, Artificial Sequence
  Synthetic oligonucleotide: Ptpn6-1461
uccccuucccccggggc

SEQ ID NO: 5210 - RNA, 17 nt, Artificial Sequence
  Synthetic oligonucleotide: Ptpn6-1462
ccccggggcagguugag

SEQ ID NO: 5211 - RNA, 17 nt, Artificial Sequence
  Synthetic oligonucleotide: Ptpn6-1463
ggggcagguugagaggc

SEQ ID NO: 5212 - RNA, 17 nt, Artificial Sequence
  Synthetic oligonucleotide: Ptpn6-1464
agguugagaggcuggag

SEQ ID NO: 5213 - RNA, 17 nt, Artificial Sequence
  Synthetic oligonucleotide: Ptpn6-1465
gguugagaggcuggagu

SEQ ID NO: 5214 - RNA, 17 nt, Artificial Sequence
  Synthetic oligonucleotide: Ptpn6-1466
ugggucccucagcgccc

SEQ ID NO: 5215 - RNA, 17 nt, Artificial Sequence
  Synthetic oligonucleotide: Ptpn6-1467
gggucccucagcgcccu

SEQ ID NO: 5216 - RNA, 17 nt, Artificial Sequence
  Synthetic oligonucleotide: Ptpn6-1468
ucccucagcgcccuggg

SEQ ID NO: 5217 - RNA, 17 nt, Artificial Sequence
  Synthetic oligonucleotide: Ptpn6-1469
cccucagcgcccugggu

SEQ ID NO: 5218 - RNA, 17 nt, Artificial Sequence
  Synthetic oligonucleotide: Ptpn6-1470
ucagcgcccuggguggg

SEQ ID NO: 5219 - RNA, 17 nt, Artificial Sequence
  Synthetic oligonucleotide: Ptpn6-1471
cagcgcccugggugggu

SEQ ID NO: 5220 - RNA, 17 nt, Artificial Sequence
  Synthetic oligonucleotide: Ptpn6-1472
uaagaugcugguaauac

SEQ ID NO: 5221 - RNA, 17 nt, Artificial Sequence
  Synthetic oligonucleotide: Ptpn6-1473
agugaacaagacagaca

SEQ ID NO: 5222 - RNA, 17 nt, Artificial Sequence
  Synthetic oligonucleotide: Ptpn6-1474
cauggucucugcucuca

SEQ ID NO: 5223 - RNA, 17 nt, Artificial Sequence
  Synthetic oligonucleotide: Ptpn6-1475
cggagcuuacauuccag

SEQ ID NO: 5224 - RNA, 17 nt, Artificial Sequence
  Synthetic oligonucleotide: Ptpn6-1476
ggagcuuacauuccagu

SEQ ID NO: 5225 - RNA, 17 nt, Artificial Sequence
  Synthetic oligonucleotide: Ptpn6-1477
gcuuacauuccaguggg

SEQ ID NO: 5226 - RNA, 17 nt, Artificial Sequence
  Synthetic oligonucleotide: Ptpn6-1478
caaauaacccaauaaau

SEQ ID NO: 5227 - RNA, 17 nt, Artificial Sequence
  Synthetic oligonucleotide: Ptpn6-1479
cagaaaauagacagccu

SEQ ID NO: 5228 - RNA, 17 nt, Artificial Sequence
  Synthetic oligonucleotide: Ptpn6-1480
aaauagacagccuuggc

SEQ ID NO: 5229 - RNA, 17 nt, Artificial Sequence
  Synthetic oligonucleotide: Ptpn6-1481
aauagacagccuuggcc

SEQ ID NO: 5230 - RNA, 17 nt, Artificial Sequence
  Synthetic oligonucleotide: Ptpn6-1482
gccuuggccggguguag

SEQ ID NO: 5231 - RNA, 17 nt, Artificial Sequence
  Synthetic oligonucleotide: Ptpn6-1483
cugugaucccagcacug

SEQ ID NO: 5232 - RNA, 17 nt, Artificial Sequence
  Synthetic oligonucleotide: Ptpn6-1484
ugugaucccagcacugu

SEQ ID NO: 5233 - RNA, 17 nt, Artificial Sequence
  Synthetic oligonucleotide: Ptpn6-1485
gaucccagcacuguggg

SEQ ID NO: 5234 - RNA, 17 nt, Artificial Sequence
  Synthetic oligonucleotide: Ptpn6-1486
agcacugugggaggcug

SEQ ID NO: 5235 - RNA, 17 nt, Artificial Sequence
  Synthetic oligonucleotide: Ptpn6-1487
ugggaggcugaggcgag

SEQ ID NO: 5236 - RNA, 17 nt, Artificial Sequence
  Synthetic oligonucleotide: Ptpn6-1488
gaggauugcuugagccc

SEQ ID NO: 5237 - RNA, 17 nt, Artificial Sequence
  Synthetic oligonucleotide: Ptpn6-1489
ggaguuugagaccagcc

SEQ ID NO: 5238 - RNA, 17 nt, Artificial Sequence
  Synthetic oligonucleotide: Ptpn6-1490
aaaaauaagaaauuagc

SEQ ID NO: 5239 - RNA, 17 nt, Artificial Sequence
  Synthetic oligonucleotide: Ptpn6-1491
aaaauaagaaauuagcu

SEQ ID NO: 5240 - RNA, 17 nt, Artificial Sequence
  Synthetic oligonucleotide: Ptpn6-1492
aagaaauuagcugggug

SEQ ID NO: 5241 - RNA, 17 nt, Artificial Sequence
  Synthetic oligonucleotide: Ptpn6-1493
aaauuagcugggugugg

SEQ ID NO: 5242 - RNA, 17 nt, Artificial Sequence
  Synthetic oligonucleotide: Ptpn6-1494
ugguggcacacguccug

SEQ ID NO: 5243 - RNA, 17 nt, Artificial Sequence
  Synthetic oligonucleotide: Ptpn6-1495
uccugugguuccagcua

SEQ ID NO: 5244 - RNA, 17 nt, Artificial Sequence
  Synthetic oligonucleotide: Ptpn6-1496
ugguuccagcuauggag

SEQ ID NO: 5245 - RNA, 17 nt, Artificial Sequence
  Synthetic oligonucleotide: Ptpn6-1497
cagcuauggagaggcua

SEQ ID NO: 5246 - RNA, 17 nt, Artificial Sequence
  Synthetic oligonucleotide: Ptpn6-1498
ggagaggcuaaggugag

SEQ ID NO: 5247 - RNA, 17 nt, Artificial Sequence
  Synthetic oligonucleotide: Ptpn6-1499
agaggcuugcuugagcc

SEQ ID NO: 5248 - RNA, 17 nt, Artificial Sequence
  Synthetic oligonucleotide: Ptpn6-1500
gaggcuugcuugagccu

SEQ ID NO: 5249 - RNA, 17 nt, Artificial Sequence
  Synthetic oligonucleotide: Ptpn6-1501
gcuugcuugagccuggg

SEQ ID NO: 5250 - RNA, 17 nt, Artificial Sequence
  Synthetic oligonucleotide: Ptpn6-1502
uugagccugggagguca

SEQ ID NO: 5251 - RNA, 17 nt, Artificial Sequence
  Synthetic oligonucleotide: Ptpn6-1503
accacugcacaccagcc

SEQ ID NO: 5252 - RNA, 17 nt, Artificial Sequence
  Synthetic oligonucleotide: Ptpn6-1504
ccacugcacaccagccu

SEQ ID NO: 5253 - RNA, 17 nt, Artificial Sequence
  Synthetic oligonucleotide: Ptpn6-1505
auaugcuagcaagugac

SEQ ID NO: 5254 - RNA, 17 nt, Artificial Sequence
  Synthetic oligonucleotide: Ptpn6-1506
uaugcuagcaagugacu

SEQ ID NO: 5255 - RNA, 17 nt, Artificial Sequence
  Synthetic oligonucleotide: Ptpn6-1507
augcuagcaagugacug

SEQ ID NO: 5256 - RNA, 17 nt, Artificial Sequence
  Synthetic oligonucleotide: Ptpn6-1508
ugcuagcaagugacugg

SEQ ID NO: 5257 - RNA, 17 nt, Artificial Sequence
  Synthetic oligonucleotide: Ptpn6-1509
gcuagcaagugacuggg

SEQ ID NO: 5258 - RNA, 20 nt, Artificial Sequence
  Synthetic oligonucleotide: Ptpn6-1510
cccacccacccagggcgcug

SEQ ID NO: 5259 - RNA, 20 nt, Artificial Sequence
  Synthetic oligonucleotide: Ptpn6-1511
ccacccacccagggcgcuga

SEQ ID NO: 5260 - RNA, 20 nt, Artificial Sequence
  Synthetic oligonucleotide: Ptpn6-1512
uccagccucucaaccugccc

SEQ ID NO: 5261 - RNA, 20 nt, Artificial Sequence
  Synthetic oligonucleotide: Ptpn6-1513
ccagccucucaaccugcccc

SEQ ID NO: 5262 - RNA, 20 nt, Artificial Sequence
  Synthetic oligonucleotide: Ptpn6-1514
cagccucucaaccugccccg

SEQ ID NO: 5263 - RNA, 20 nt, Artificial Sequence
  Synthetic oligonucleotide: Ptpn6-1515
agccucucaaccugccccgg

SEQ ID NO: 5264 - RNA, 20 nt, Artificial Sequence
  Synthetic oligonucleotide: Ptpn6-1516
ucucaaccugccccggggga

SEQ ID NO: 5265 - RNA, 20 nt, Artificial Sequence
  Synthetic oligonucleotide: Ptpn6-1517
cucaaccugccccgggggaa

SEQ ID NO: 5266 - RNA, 20 nt, Artificial Sequence
  Synthetic oligonucleotide: Ptpn6-1518
ucaaccugccccgggggaag

SEQ ID NO: 5267 - RNA, 20 nt, Artificial Sequence
  Synthetic oligonucleotide: Ptpn6-1519
accugccccgggggaagggg

SEQ ID NO: 5268 - RNA, 20 nt, Artificial Sequence
  Synthetic oligonucleotide: Ptpn6-1520
gggggaaggggaggagccuc

SEQ ID NO: 5269 - RNA, 20 nt, Artificial Sequence
  Synthetic oligonucleotide: Ptpn6-1521
gaaggggaggagccucaggu

SEQ ID NO: 5270 - RNA, 20 nt, Artificial Sequence
  Synthetic oligonucleotide: Ptpn6-1522
aaggggaggagccucaggua

SEQ ID NO: 5271 - RNA, 20 nt, Artificial Sequence
  Synthetic oligonucleotide: Ptpn6-1523
gaggagccucagguaggguu

SEQ ID NO: 5272 - RNA, 20 nt, Artificial Sequence
  Synthetic oligonucleotide: Ptpn6-1524
ccucagguaggguuaggccc

SEQ ID NO: 5273 - RNA, 20 nt, Artificial Sequence
  Synthetic oligonucleotide: Ptpn6-1525
cucagguaggguuaggcccu

SEQ ID NO: 5274 - RNA, 20 nt, Artificial Sequence
  Synthetic oligonucleotide: Ptpn6-1526
ucagguaggguuaggcccug

SEQ ID NO: 5275 - RNA, 20 nt, Artificial Sequence
  Synthetic oligonucleotide: Ptpn6-1527
guaggguuaggcccuggggc

SEQ ID NO: 5276 - RNA, 20 nt, Artificial Sequence
  Synthetic oligonucleotide: Ptpn6-1528
uaggguuaggcccuggggca

SEQ ID NO: 5277 - RNA, 20 nt, Artificial Sequence
  Synthetic oligonucleotide: Ptpn6-1529
uuaggcccuggggcaggguu

SEQ ID NO: 5278 - RNA, 20 nt, Artificial Sequence
  Synthetic oligonucleotide: Ptpn6-1530
gggcaggguuaggcccagcc

SEQ ID NO: 5279 - RNA, 20 nt, Artificial Sequence
  Synthetic oligonucleotide: Ptpn6-1531
uuaggcccagccaggaccau

SEQ ID NO: 5280 - RNA, 20 nt, Artificial Sequence
  Synthetic oligonucleotide: Ptpn6-1532
uaggcccagccaggaccaua

SEQ ID NO: 5281 - RNA, 20 nt, Artificial Sequence
  Synthetic oligonucleotide: Ptpn6-1533
gcccagccaggaccauaggg

SEQ ID NO: 5282 - RNA, 20 nt, Artificial Sequence
  Synthetic oligonucleotide: Ptpn6-1534
accauagggaggagcuguuc

SEQ ID NO: 5283 - RNA, 20 nt, Artificial Sequence
  Synthetic oligonucleotide: Ptpn6-1535
ccauagggaggagcuguuca

SEQ ID NO: 5284 - RNA, 20 nt, Artificial Sequence
  Synthetic oligonucleotide: Ptpn6-1536
cauagggaggagcuguucag

SEQ ID NO: 5285 - RNA, 20 nt, Artificial Sequence
  Synthetic oligonucleotide: Ptpn6-1537
auagggaggagcuguucagg

SEQ ID NO: 5286 - RNA, 20 nt, Artificial Sequence
  Synthetic oligonucleotide: Ptpn6-1538
ggaggagcuguucaggggga

SEQ ID NO: 5287 - RNA, 20 nt, Artificial Sequence
  Synthetic oligonucleotide: Ptpn6-1539
gaggagcuguucagggggau

SEQ ID NO: 5288 - RNA, 20 nt, Artificial Sequence
  Synthetic oligonucleotide: Ptpn6-1540
aggagcuguucagggggaug

SEQ ID NO: 5289 - RNA, 20 nt, Artificial Sequence
  Synthetic oligonucleotide: Ptpn6-1541
cuguucagggggauggggcc

SEQ ID NO: 5290 - RNA, 20 nt, Artificial Sequence
  Synthetic oligonucleotide: Ptpn6-1542
cagggggauggggccuggaa

SEQ ID NO: 5291 - RNA, 20 nt, Artificial Sequence
  Synthetic oligonucleotide: Ptpn6-1543
gauggggccuggaaaggcag

SEQ ID NO: 5292 - RNA, 20 nt, Artificial Sequence
  Synthetic oligonucleotide: Ptpn6-1544
auggggccuggaaaggcaga

SEQ ID NO: 5293 - RNA, 20 nt, Artificial Sequence
  Synthetic oligonucleotide: Ptpn6-1545
cuggaaaggcagagggaauc

SEQ ID NO: 5294 - RNA, 20 nt, Artificial Sequence
  Synthetic oligonucleotide: Ptpn6-1546
uggaaaggcagagggaauca

SEQ ID NO: 5295 - RNA, 20 nt, Artificial Sequence
  Synthetic oligonucleotide: Ptpn6-1547
aaggcagagggaaucaggga

SEQ ID NO: 5296 - RNA, 20 nt, Artificial Sequence
  Synthetic oligonucleotide: Ptpn6-1548
gggaaucagggaaggagaga

SEQ ID NO: 5297 - RNA, 20 nt, Artificial Sequence
  Synthetic oligonucleotide: Ptpn6-1549
ggaaucagggaaggagagau

SEQ ID NO: 5298 - RNA, 20 nt, Artificial Sequence
  Synthetic oligonucleotide: Ptpn6-1550
gaaucagggaaggagagaug

SEQ ID NO: 5299 - RNA, 20 nt, Artificial Sequence
  Synthetic oligonucleotide: Ptpn6-1551
aaucagggaaggagagaugg

SEQ ID NO: 5300 - RNA, 20 nt, Artificial Sequence
  Synthetic oligonucleotide: Ptpn6-1552
aaggagagauggggguuguc

SEQ ID NO: 5301 - RNA, 20 nt, Artificial Sequence
  Synthetic oligonucleotide: Ptpn6-1553
uccgcaagagacugacacca

SEQ ID NO: 5302 - RNA, 20 nt, Artificial Sequence
  Synthetic oligonucleotide: Ptpn6-1554
ccgcaagagacugacaccaa

SEQ ID NO: 5303 - RNA, 20 nt, Artificial Sequence
  Synthetic oligonucleotide: Ptpn6-1555
cgcaagagacugacaccaag

SEQ ID NO: 5304 - RNA, 20 nt, Artificial Sequence
  Synthetic oligonucleotide: Ptpn6-1556
gcaagagacugacaccaagg

SEQ ID NO: 5305 - RNA, 20 nt, Artificial Sequence
  Synthetic oligonucleotide: Ptpn6-1557
cacuugcuagcauaugaagc

SEQ ID NO: 5306 - RNA, 20 nt, Artificial Sequence
  Synthetic oligonucleotide: Ptpn6-1558
uuuuuuuuuuuuuugagaca

SEQ ID NO: 5307 - RNA, 20 nt, Artificial Sequence
  Synthetic oligonucleotide: Ptpn6-1559
aaggucucacucugucgccc

SEQ ID NO: 5308 - RNA, 20 nt, Artificial Sequence
  Synthetic oligonucleotide: Ptpn6-1560
ucucacucugucgcccaggc

SEQ ID NO: 5309 - RNA, 20 nt, Artificial Sequence
  Synthetic oligonucleotide: Ptpn6-1561
ucgcccaggcuggugugcag

SEQ ID NO: 5310 - RNA, 20 nt, Artificial Sequence
  Synthetic oligonucleotide: Ptpn6-1562
gacugcagccuugaccuccc

SEQ ID NO: 5311 - RNA, 20 nt, Artificial Sequence
  Synthetic oligonucleotide: Ptpn6-1563
caccuuagccucuccauagc

SEQ ID NO: 5312 - RNA, 20 nt, Artificial Sequence
  Synthetic oligonucleotide: Ptpn6-1564
cucuccauagcuggaaccac

SEQ ID NO: 5313 - RNA, 20 nt, Artificial Sequence
  Synthetic oligonucleotide: Ptpn6-1565
uucuuauuuuuuguagagac

SEQ ID NO: 5314 - RNA, 20 nt, Artificial Sequence
  Synthetic oligonucleotide: Ptpn6-1566
ucuuauuuuuuguagagaca

SEQ ID NO: 5315 - RNA, 20 nt, Artificial Sequence
  Synthetic oligonucleotide: Ptpn6-1567
gagacagggucucacuauau

SEQ ID NO: 5316 - RNA, 20 nt, Artificial Sequence
  Synthetic oligonucleotide: Ptpn6-1568
agggucucacuauauuggcc

SEQ ID NO: 5317 - RNA, 20 nt, Artificial Sequence
  Synthetic oligonucleotide: Ptpn6-1569
ucucacuauauuggccaggc

SEQ ID NO: 5318 - RNA, 20 nt, Artificial Sequence
  Synthetic oligonucleotide: Ptpn6-1570
ccaggcuggucucaaacucc

SEQ ID NO: 5319 - RNA, 20 nt, Artificial Sequence
  Synthetic oligonucleotide: Ptpn6-1571
caggcuggucucaaacuccu

SEQ ID NO: 5320 - RNA, 20 nt, Artificial Sequence
  Synthetic oligonucleotide: Ptpn6-1572
gccucagccucccacagugc

SEQ ID NO: 5321 - RNA, 20 nt, Artificial Sequence
  Synthetic oligonucleotide: Ptpn6-1573
ccucagccucccacagugcu

SEQ ID NO: 5322 - RNA, 20 nt, Artificial Sequence
  Synthetic oligonucleotide: Ptpn6-1574
ucccacagugcugggaucac

SEQ ID NO: 5323 - RNA, 20 nt, Artificial Sequence
  Synthetic oligonucleotide: Ptpn6-1575
caggugugaaccacuacacc

SEQ ID NO: 5324 - RNA, 20 nt, Artificial Sequence
  Synthetic oligonucleotide: Ptpn6-1576
ugaaccacuacacccggcca

SEQ ID NO: 5325 - RNA, 20 nt, Artificial Sequence
  Synthetic oligonucleotide: Ptpn6-1577
ucugcaaugauccaauuuau

SEQ ID NO: 5326 - RNA, 20 nt, Artificial Sequence
  Synthetic oligonucleotide: Ptpn6-1578
cugcaaugauccaauuuauu

SEQ ID NO: 5327 - RNA, 20 nt, Artificial Sequence
  Synthetic oligonucleotide: Ptpn6-1579
aauuuauuggguuauuuguu

SEQ ID NO: 5328 - RNA, 20 nt, Artificial Sequence
  Synthetic oligonucleotide: Ptpn6-1580
uucggucuguaaccucccac

SEQ ID NO: 5329 - RNA, 17 nt, Artificial Sequence
  Synthetic oligonucleotide: Ptpn6-1581
acccacccagggcgcug

SEQ ID NO: 5330 - RNA, 17 nt, Artificial Sequence
  Synthetic oligonucleotide: Ptpn6-1582
cccacccagggcgcuga

SEQ ID NO: 5331 - RNA, 17 nt, Artificial Sequence
  Synthetic oligonucleotide: Ptpn6-1583
agccucucaaccugccc

SEQ ID NO: 5332 - RNA, 17 nt, Artificial Sequence
  Synthetic oligonucleotide: Ptpn6-1584
gccucucaaccugcccc

SEQ ID NO: 5333 - RNA, 17 nt, Artificial Sequence
  Synthetic oligonucleotide: Ptpn6-1585
ccucucaaccugccccg

SEQ ID NO: 5334 - RNA, 17 nt, Artificial Sequence
  Synthetic oligonucleotide: Ptpn6-1586
cucucaaccugccccgg

SEQ ID NO: 5335 - RNA, 17 nt, Artificial Sequence
  Synthetic oligonucleotide: Ptpn6-1587
caaccugccccggggga

SEQ ID NO: 5336 - RNA, 17 nt, Artificial Sequence
  Synthetic oligonucleotide: Ptpn6-1588
aaccugccccgggggaa

SEQ ID NO: 5337 - RNA, 17 nt, Artificial Sequence
  Synthetic oligonucleotide: Ptpn6-1589
accugccccgggggaag

SEQ ID NO: 5338 - RNA, 17 nt, Artificial Sequence
  Synthetic oligonucleotide: Ptpn6-1590
ugccccgggggaagggg

SEQ ID NO: 5339 - RNA, 17 nt, Artificial Sequence
  Synthetic oligonucleotide: Ptpn6-1591
ggaaggggaggagccuc

SEQ ID NO: 5340 - RNA, 17 nt, Artificial Sequence
  Synthetic oligonucleotide: Ptpn6-1592
ggggaggagccucaggu

SEQ ID NO: 5341 - RNA, 17 nt, Artificial Sequence
  Synthetic oligonucleotide: Ptpn6-1593
gggaggagccucaggua

SEQ ID NO: 5342 - RNA, 17 nt, Artificial Sequence
  Synthetic oligonucleotide: Ptpn6-1594
gagccucagguaggguu

SEQ ID NO: 5343 - RNA, 17 nt, Artificial Sequence
  Synthetic oligonucleotide: Ptpn6-1595
cagguaggguuaggccc

SEQ ID NO: 5344 - RNA, 17 nt, Artificial Sequence
  Synthetic oligonucleotide: Ptpn6-1596
agguaggguuaggcccu

SEQ ID NO: 5345 - RNA, 17 nt, Artificial Sequence
  Synthetic oligonucleotide: Ptpn6-1597
gguaggguuaggcccug

SEQ ID NO: 5346 - RNA, 17 nt, Artificial Sequence
  Synthetic oligonucleotide: Ptpn6-1598
ggguuaggcccuggggc

SEQ ID NO: 5347 - RNA, 17 nt, Artificial Sequence
  Synthetic oligonucleotide: Ptpn6-1599
gguuaggcccuggggca

SEQ ID NO: 5348 - RNA, 17 nt, Artificial Sequence
  Synthetic oligonucleotide: Ptpn6-1600
ggcccuggggcaggguu

SEQ ID NO: 5349 - RNA, 17 nt, Artificial Sequence
  Synthetic oligonucleotide: Ptpn6-1601
caggguuaggcccagcc

SEQ ID NO: 5350 - RNA, 17 nt, Artificial Sequence
  Synthetic oligonucleotide: Ptpn6-1602
ggcccagccaggaccau

SEQ ID NO: 5351 - RNA, 17 nt, Artificial Sequence
  Synthetic oligonucleotide: Ptpn6-1603
gcccagccaggaccaua

SEQ ID NO: 5352 - RNA, 17 nt, Artificial Sequence
  Synthetic oligonucleotide: Ptpn6-1604
cagccaggaccauaggg

SEQ ID NO: 5353 - RNA, 17 nt, Artificial Sequence
  Synthetic oligonucleotide: Ptpn6-1605
auagggaggagcuguuc

SEQ ID NO: 5354 - RNA, 17 nt, Artificial Sequence
  Synthetic oligonucleotide: Ptpn6-1606
uagggaggagcuguuca

SEQ ID NO: 5355 - RNA, 17 nt, Artificial Sequence
  Synthetic oligonucleotide: Ptpn6-1607
agggaggagcuguucag

SEQ ID NO: 5356 - RNA, 17 nt, Artificial Sequence
  Synthetic oligonucleotide: Ptpn6-1608
gggaggagcuguucagg

SEQ ID NO: 5357 - RNA, 17 nt, Artificial Sequence
  Synthetic oligonucleotide: Ptpn6-1609
ggagcuguucaggggga

SEQ ID NO: 5358 - RNA, 17 nt, Artificial Sequence
  Synthetic oligonucleotide: Ptpn6-1610
gagcuguucagggggau

SEQ ID NO: 5359 - RNA, 17 nt, Artificial Sequence
  Synthetic oligonucleotide: Ptpn6-1611
agcuguucagggggaug

SEQ ID NO: 5360 - RNA, 17 nt, Artificial Sequence
  Synthetic oligonucleotide: Ptpn6-1612
uucagggggauggggcc

SEQ ID NO: 5361 - RNA, 17 nt, Artificial Sequence
  Synthetic oligonucleotide: Ptpn6-1613
ggggauggggccuggaa

SEQ ID NO: 5362 - RNA, 17 nt, Artificial Sequence
  Synthetic oligonucleotide: Ptpn6-1614
ggggccuggaaaggcag

SEQ ID NO: 5363 - RNA, 17 nt, Artificial Sequence
  Synthetic oligonucleotide: Ptpn6-1615
gggccuggaaaggcaga

SEQ ID NO: 5364 - RNA, 17 nt, Artificial Sequence
  Synthetic oligonucleotide: Ptpn6-1616
gaaaggcagagggaauc

SEQ ID NO: 5365 - RNA, 17 nt, Artificial Sequence
  Synthetic oligonucleotide: Ptpn6-1617
aaaggcagagggaauca

SEQ ID NO: 5366 - RNA, 17 nt, Artificial Sequence
  Synthetic oligonucleotide: Ptpn6-1618
gcagagggaaucaggga

SEQ ID NO: 5367 - RNA, 17 nt, Artificial Sequence
  Synthetic oligonucleotide: Ptpn6-1619
aaucagggaaggagaga

SEQ ID NO: 5368 - RNA, 17 nt, Artificial Sequence
  Synthetic oligonucleotide: Ptpn6-1620
aucagggaaggagagau

SEQ ID NO: 5369 - RNA, 17 nt, Artificial Sequence
  Synthetic oligonucleotide: Ptpn6-1621
ucagggaaggagagaug

SEQ ID NO: 5370 - RNA, 17 nt, Artificial Sequence
  Synthetic oligonucleotide: Ptpn6-1622
cagggaaggagagaugg

SEQ ID NO: 5371 - RNA, 17 nt, Artificial Sequence
  Synthetic oligonucleotide: Ptpn6-1623
gagagauggggguuguc

SEQ ID NO: 5372 - RNA, 17 nt, Artificial Sequence
  Synthetic oligonucleotide: Ptpn6-1624
gcaagagacugacacca

SEQ ID NO: 5373 - RNA, 17 nt, Artificial Sequence
  Synthetic oligonucleotide: Ptpn6-1625
caagagacugacaccaa

SEQ ID NO: 5374 - RNA, 17 nt, Artificial Sequence
  Synthetic oligonucleotide: Ptpn6-1626
aagagacugacaccaag

SEQ ID NO: 5375 - RNA, 17 nt, Artificial Sequence
  Synthetic oligonucleotide: Ptpn6-1627
agagacugacaccaagg

SEQ ID NO: 5376 - RNA, 17 nt, Artificial Sequence
  Synthetic oligonucleotide: Ptpn6-1628
uugcuagcauaugaagc

SEQ ID NO: 5377 - RNA, 17 nt, Artificial Sequence
  Synthetic oligonucleotide: Ptpn6-1629
uuuuuuuuuuugagaca

SEQ ID NO: 5378 - RNA, 17 nt, Artificial Sequence
  Synthetic oligonucleotide: Ptpn6-1630
gucucacucugucgccc

SEQ ID NO: 5379 - RNA, 17 nt, Artificial Sequence
  Synthetic oligonucleotide: Ptpn6-1631
cacucugucgcccaggc

SEQ ID NO: 5380 - RNA, 17 nt, Artificial Sequence
  Synthetic oligonucleotide: Ptpn6-1632
cccaggcuggugugcag

SEQ ID NO: 5381 - RNA, 17 nt, Artificial Sequence
  Synthetic oligonucleotide: Ptpn6-1633
ugcagccuugaccuccc

SEQ ID NO: 5382 - RNA, 17 nt, Artificial Sequence
  Synthetic oligonucleotide: Ptpn6-1634
cuuagccucuccauagc

SEQ ID NO: 5383 - RNA, 17 nt, Artificial Sequence
  Synthetic oligonucleotide: Ptpn6-1635
uccauagcuggaaccac

SEQ ID NO: 5384 - RNA, 17 nt, Artificial Sequence
  Synthetic oligonucleotide: Ptpn6-1636
uuauuuuuuguagagac

SEQ ID NO: 5385 - RNA, 17 nt, Artificial Sequence
  Synthetic oligonucleotide: Ptpn6-1637
uauuuuuuguagagaca

SEQ ID NO: 5386 - RNA, 17 nt, Artificial Sequence
  Synthetic oligonucleotide: Ptpn6-1638
acagggucucacuauau

SEQ ID NO: 5387 - RNA, 17 nt, Artificial Sequence
  Synthetic oligonucleotide: Ptpn6-1639
gucucacuauauuggcc

SEQ ID NO: 5388 - RNA, 17 nt, Artificial Sequence
  Synthetic oligonucleotide: Ptpn6-1640
cacuauauuggccaggc

SEQ ID NO: 5389 - RNA, 17 nt, Artificial Sequence
  Synthetic oligonucleotide: Ptpn6-1641
ggcuggucucaaacucc

SEQ ID NO: 5390 - RNA, 17 nt, Artificial Sequence
  Synthetic oligonucleotide: Ptpn6-1642
gcuggucucaaacuccu

SEQ ID NO: 5391 - RNA, 17 nt, Artificial Sequence
  Synthetic oligonucleotide: Ptpn6-1643
ucagccucccacagugc

SEQ ID NO: 5392 - RNA, 17 nt, Artificial Sequence
  Synthetic oligonucleotide: Ptpn6-1644
cagccucccacagugcu

SEQ ID NO: 5393 - RNA, 17 nt, Artificial Sequence
  Synthetic oligonucleotide: Ptpn6-1645
cacagugcugggaucac

SEQ ID NO: 5394 - RNA, 17 nt, Artificial Sequence
  Synthetic oligonucleotide: Ptpn6-1646
gugugaaccacuacacc

SEQ ID NO: 5395 - RNA, 17 nt, Artificial Sequence
  Synthetic oligonucleotide: Ptpn6-1647
accacuacacccggcca

SEQ ID NO: 5396 - RNA, 17 nt, Artificial Sequence
  Synthetic oligonucleotide: Ptpn6-1648
gcaaugauccaauuuau

SEQ ID NO: 5397 - RNA, 17 nt, Artificial Sequence
  Synthetic oligonucleotide: Ptpn6-1649
caaugauccaauuuauu

SEQ ID NO: 5398 - RNA, 17 nt, Artificial Sequence
  Synthetic oligonucleotide: Ptpn6-1650
uuauuggguuauuuguu

SEQ ID NO: 5399 - RNA, 17 nt, Artificial Sequence
  Synthetic oligonucleotide: Ptpn6-1651
ggucuguaaccucccac

SEQ ID NO: 5400 - RNA, 20 nt, Artificial Sequence
  Synthetic oligonucleotide: Ptpn6-1182
ccagguggcuccuccucucc

SEQ ID NO: 5401 - RNA, 20 nt, Artificial Sequence
  Synthetic oligonucleotide: Ptpn6-1169
agguggcuccuccucucccg

SEQ ID NO: 5402 - RNA, 20 nt, Artificial Sequence
  Synthetic oligonucleotide: Ptpn6-1017
gguggcuccuccucucccgg

SEQ ID NO: 5403 - RNA, 20 nt, Artificial Sequence
  Synthetic oligonucleotide: Ptpn6-1655
aggggguaccuccuucucug

SEQ ID NO: 5404 - RNA, 20 nt, Artificial Sequence
  Synthetic oligonucleotide: Ptpn6-1656
guaccuccuucucugaggaa

SEQ ID NO: 5405 - RNA, 20 nt, Artificial Sequence
  Synthetic oligonucleotide: Ptpn6-1657
ucucugaggaacugggcugu

SEQ ID NO: 5406 - RNA, 20 nt, Artificial Sequence
  Synthetic oligonucleotide: Ptpn6-1165
cucugaggaacugggcuguu

SEQ ID NO: 5407 - RNA, 20 nt, Artificial Sequence
  Synthetic oligonucleotide: Ptpn6-1659
aggcccuuugguuuccgccu

SEQ ID NO: 5408 - RNA, 20 nt, Artificial Sequence
  Synthetic oligonucleotide: Ptpn6-953
ggcccuuugguuuccgccua

SEQ ID NO: 5409 - RNA, 20 nt, Artificial Sequence
  Synthetic oligonucleotide: Ptpn6-1661
cccuuugguuuccgccuacg

SEQ ID NO: 5410 - RNA, 20 nt, Artificial Sequence
  Synthetic oligonucleotide: Ptpn6-1662
auugguugcucuuccucagc

SEQ ID NO: 5411 - RNA, 20 nt, Artificial Sequence
  Synthetic oligonucleotide: Ptpn6-1663
uaccccgccgcucugucagc

SEQ ID NO: 5412 - RNA, 20 nt, Artificial Sequence
  Synthetic oligonucleotide: Ptpn6-1664
ucugucagcuugagcuccag

SEQ ID NO: 5413 - RNA, 20 nt, Artificial Sequence
  Synthetic oligonucleotide: Ptpn6-1173
cugucagcuugagcuccagg

SEQ ID NO: 5414 - RNA, 20 nt, Artificial Sequence
  Synthetic oligonucleotide: Ptpn6-1666
uccagguggcuccuccucuc

SEQ ID NO: 5415 - RNA, 20 nt, Artificial Sequence
  Synthetic oligonucleotide: Ptpn6-1181
cagguggcuccuccucuccc

SEQ ID NO: 5416 - RNA, 20 nt, Artificial Sequence
  Synthetic oligonucleotide: Ptpn6-1668
ucucccgggggaaggcggcc

SEQ ID NO: 5417 - RNA, 20 nt, Artificial Sequence
  Synthetic oligonucleotide: Ptpn6-1669
aggcggcccuggaccagcag

SEQ ID NO: 5418 - RNA, 20 nt, Artificial Sequence
  Synthetic oligonucleotide: Ptpn6-1670
gggccugcuguacucccgcu

SEQ ID NO: 5419 - RNA, 20 nt, Artificial Sequence
  Synthetic oligonucleotide: Ptpn6-1011
ggccugcuguacucccgcuu

SEQ ID NO: 5420 - RNA, 20 nt, Artificial Sequence
  Synthetic oligonucleotide: Ptpn6-1672
guacucccgcuuuggggcug

SEQ ID NO: 5421 - RNA, 20 nt, Artificial Sequence
  Synthetic oligonucleotide: Ptpn6-970
uacucccgcuuuggggcugc

SEQ ID NO: 5422 - RNA, 20 nt, Artificial Sequence
  Synthetic oligonucleotide: Ptpn6-1140
acucccgcuuuggggcugca

SEQ ID NO: 5423 - RNA, 20 nt, Artificial Sequence
  Synthetic oligonucleotide: Ptpn6-1675
cugcagggaagcuggccgcu

SEQ ID NO: 5424 - RNA, 20 nt, Artificial Sequence
  Synthetic oligonucleotide: Ptpn6-1676
gcuggccgcugugggcgguc

SEQ ID NO: 5425 - RNA, 20 nt, Artificial Sequence
  Synthetic oligonucleotide: Ptpn6-1677
ccgccccaccuguccuuuuc

SEQ ID NO: 5426 - RNA, 20 nt, Artificial Sequence
  Synthetic oligonucleotide: Ptpn6-1170
cgccccaccuguccuuuucc

SEQ ID NO: 5427 - RNA, 20 nt, Artificial Sequence
  Synthetic oligonucleotide: Ptpn6-1679
uuuccuggagacuauuaguc

SEQ ID NO: 5428 - RNA, 20 nt, Artificial Sequence
  Synthetic oligonucleotide: Ptpn6-1680
agugccauuggccuggcagg

SEQ ID NO: 5429 - RNA, 20 nt, Artificial Sequence
  Synthetic oligonucleotide: Ptpn6-1681
cauuggccuggcaggcagga

SEQ ID NO: 5430 - RNA, 20 nt, Artificial Sequence
  Synthetic oligonucleotide: Ptpn6-1682
uuggccuggcaggcaggauc

SEQ ID NO: 5431 - RNA, 20 nt, Artificial Sequence
  Synthetic oligonucleotide: Ptpn6-1150
uggccuggcaggcaggaucg

SEQ ID NO: 5432 - RNA, 20 nt, Artificial Sequence
  Synthetic oligonucleotide: Ptpn6-1684
gccuggcaggcaggaucgag

SEQ ID NO: 5433 - RNA, 20 nt, Artificial Sequence
  Synthetic oligonucleotide: Ptpn6-1152
ccuggcaggcaggaucgagg

SEQ ID NO: 5434 - RNA, 20 nt, Artificial Sequence
  Synthetic oligonucleotide: Ptpn6-1686
gaggaggaaguggcugauua

SEQ ID NO: 5435 - RNA, 20 nt, Artificial Sequence
  Synthetic oligonucleotide: Ptpn6-1687
gcgguucuuccucaccuggc

SEQ ID NO: 5436 - RNA, 20 nt, Artificial Sequence
  Synthetic oligonucleotide: Ptpn6-1688
ccguggcuucccccucccua

SEQ ID NO: 5437 - RNA, 20 nt, Artificial Sequence
  Synthetic oligonucleotide: Ptpn6-1689
guggcuucccccucccuaca

SEQ ID NO: 5438 - RNA, 20 nt, Artificial Sequence
  Synthetic oligonucleotide: Ptpn6-1690
cuacagagagaugcuguccc

SEQ ID NO: 5439 - RNA, 20 nt, Artificial Sequence
  Synthetic oligonucleotide: Ptpn6-1691
ugcugucccguggguaaguc

SEQ ID NO: 5440 - RNA, 20 nt, Artificial Sequence
  Synthetic oligonucleotide: Ptpn6-1692
uggguaagucccgggcacca

SEQ ID NO: 5441 - RNA, 20 nt, Artificial Sequence
  Synthetic oligonucleotide: Ptpn6-954
ggguaagucccgggcaccau

SEQ ID NO: 5442 - RNA, 20 nt, Artificial Sequence
  Synthetic oligonucleotide: Ptpn6-1694
gucccagucuccuguuaguu

SEQ ID NO: 5443 - RNA, 20 nt, Artificial Sequence
  Synthetic oligonucleotide: Ptpn6-1143
ucccagucuccuguuaguuu

SEQ ID NO: 5444 - RNA, 20 nt, Artificial Sequence
  Synthetic oligonucleotide: Ptpn6-1696
ccagucuccuguuaguuuug

SEQ ID NO: 5445 - RNA, 20 nt, Artificial Sequence
  Synthetic oligonucleotide: Ptpn6-1145
cagucuccuguuaguuuugg

SEQ ID NO: 5446 - RNA, 20 nt, Artificial Sequence
  Synthetic oligonucleotide: Ptpn6-1158
agucuccuguuaguuuugga

SEQ ID NO: 5447 - RNA, 20 nt, Artificial Sequence
  Synthetic oligonucleotide: Ptpn6-1699
ucuccuguuaguuuuggagg

SEQ ID NO: 5448 - RNA, 20 nt, Artificial Sequence
  Synthetic oligonucleotide: Ptpn6-1161
cuccuguuaguuuuggaggg

SEQ ID NO: 5449 - RNA, 20 nt, Artificial Sequence
  Synthetic oligonucleotide: Ptpn6-1146
uccuguuaguuuuggaggga

SEQ ID NO: 5450 - RNA, 20 nt, Artificial Sequence
  Synthetic oligonucleotide: Ptpn6-1702
cuguuaguuuuggagggagg

SEQ ID NO: 5451 - RNA, 20 nt, Artificial Sequence
  Synthetic oligonucleotide: Ptpn6-1703
ugaugcucacuccgacgugu

SEQ ID NO: 5452 - RNA, 20 nt, Artificial Sequence
  Synthetic oligonucleotide: Ptpn6-1704
ucacuccgacgugugugaac

SEQ ID NO: 5453 - RNA, 20 nt, Artificial Sequence
  Synthetic oligonucleotide: Ptpn6-1705
ugcgccuguuuccggucccu

SEQ ID NO: 5454 - RNA, 20 nt, Artificial Sequence
  Synthetic oligonucleotide: Ptpn6-1706
acuuccccuucccgcaaggu

SEQ ID NO: 5455 - RNA, 20 nt, Artificial Sequence
  Synthetic oligonucleotide: Ptpn6-1707
uuccccuucccgcaaggugu

SEQ ID NO: 5456 - RNA, 20 nt, Artificial Sequence
  Synthetic oligonucleotide: Ptpn6-1708
ccccucuuuaacauuuuccc

SEQ ID NO: 5457 - RNA, 20 nt, Artificial Sequence
  Synthetic oligonucleotide: Ptpn6-1709
ugcauuucuacuuccagccu

SEQ ID NO: 5458 - RNA, 20 nt, Artificial Sequence
  Synthetic oligonucleotide: Ptpn6-1710
uccugcuucugccuccugcu

SEQ ID NO: 5459 - RNA, 20 nt, Artificial Sequence
  Synthetic oligonucleotide: Ptpn6-1711
ccugcuuaggaccugucccc

SEQ ID NO: 5460 - RNA, 20 nt, Artificial Sequence
  Synthetic oligonucleotide: Ptpn6-1712
aacaccucaaacauagcagu

SEQ ID NO: 5461 - RNA, 20 nt, Artificial Sequence
  Synthetic oligonucleotide: Ptpn6-1713
auagcagucagaggccaccc

SEQ ID NO: 5462 - RNA, 20 nt, Artificial Sequence
  Synthetic oligonucleotide: Ptpn6-1714
auucauucaacagguacgug

SEQ ID NO: 5463 - RNA, 17 nt, Artificial Sequence
  Synthetic oligonucleotide: Ptpn6-1075
gguggcuccuccucucc

SEQ ID NO: 5464 - RNA, 17 nt, Artificial Sequence
  Synthetic oligonucleotide: Ptpn6-1293
uggcuccuccucucccg

SEQ ID NO: 5465 - RNA, 17 nt, Artificial Sequence
  Synthetic oligonucleotide: Ptpn6-1074
ggcuccuccucucccgg

SEQ ID NO: 5466 - RNA, 17 nt, Artificial Sequence
  Synthetic oligonucleotide: Ptpn6-1070
ggguaccuccuucucug

SEQ ID NO: 5467 - RNA, 17 nt, Artificial Sequence
  Synthetic oligonucleotide: Ptpn6-1719
ccuccuucucugaggaa

SEQ ID NO: 5468 - RNA, 17 nt, Artificial Sequence
  Synthetic oligonucleotide: Ptpn6-1720
cugaggaacugggcugu

SEQ ID NO: 5469 - RNA, 17 nt, Artificial Sequence
  Synthetic oligonucleotide: Ptpn6-1289
ugaggaacugggcuguu

SEQ ID NO: 5470 - RNA, 17 nt, Artificial Sequence
  Synthetic oligonucleotide: Ptpn6-1722
cccuuugguuuccgccu

SEQ ID NO: 5471 - RNA, 17 nt, Artificial Sequence
  Synthetic oligonucleotide: Ptpn6-997
ccuuugguuuccgccua

SEQ ID NO: 5472 - RNA, 17 nt, Artificial Sequence
  Synthetic oligonucleotide: Ptpn6-1724
uuugguuuccgccuacg

SEQ ID NO: 5473 - RNA, 17 nt, Artificial Sequence
  Synthetic oligonucleotide: Ptpn6-1725
gguugcucuuccucagc

SEQ ID NO: 5474 - RNA, 17 nt, Artificial Sequence
  Synthetic oligonucleotide: Ptpn6-1726
cccgccgcucugucagc

SEQ ID NO: 5475 - RNA, 17 nt, Artificial Sequence
  Synthetic oligonucleotide: Ptpn6-1727
gucagcuugagcuccag

SEQ ID NO: 5476 - RNA, 17 nt, Artificial Sequence
  Synthetic oligonucleotide: Ptpn6-1290
ucagcuugagcuccagg

SEQ ID NO: 5477 - RNA, 17 nt, Artificial Sequence
  Synthetic oligonucleotide: Ptpn6-1729
agguggcuccuccucuc

SEQ ID NO: 5478 - RNA, 17 nt, Artificial Sequence
  Synthetic oligonucleotide: Ptpn6-1080
guggcuccuccucuccc

SEQ ID NO: 5479 - RNA, 17 nt, Artificial Sequence
  Synthetic oligonucleotide: Ptpn6-1731
cccgggggaaggcggcc

SEQ ID NO: 5480 - RNA, 17 nt, Artificial Sequence
  Synthetic oligonucleotide: Ptpn6-1732
cggcccuggaccagcag

SEQ ID NO: 5481 - RNA, 17 nt, Artificial Sequence
  Synthetic oligonucleotide: Ptpn6-1733
ccugcuguacucccgcu

SEQ ID NO: 5482 - RNA, 17 nt, Artificial Sequence
  Synthetic oligonucleotide: Ptpn6-1316
cugcuguacucccgcuu

SEQ ID NO: 5483 - RNA, 17 nt, Artificial Sequence
  Synthetic oligonucleotide: Ptpn6-1735
cucccgcuuuggggcug

SEQ ID NO: 5484 - RNA, 17 nt, Artificial Sequence
  Synthetic oligonucleotide: Ptpn6-1312
ucccgcuuuggggcugc

SEQ ID NO: 5485 - RNA, 17 nt, Artificial Sequence
  Synthetic oligonucleotide: Ptpn6-1267
cccgcuuuggggcugca

SEQ ID NO: 5486 - RNA, 17 nt, Artificial Sequence
  Synthetic oligonucleotide: Ptpn6-1738
cagggaagcuggccgcu

SEQ ID NO: 5487 - RNA, 17 nt, Artificial Sequence
  Synthetic oligonucleotide: Ptpn6-1739
ggccgcugugggcgguc

SEQ ID NO: 5488 - RNA, 17 nt, Artificial Sequence
  Synthetic oligonucleotide: Ptpn6-1740
ccccaccuguccuuuuc

SEQ ID NO: 5489 - RNA, 17 nt, Artificial Sequence
  Synthetic oligonucleotide: Ptpn6-1298
cccaccuguccuuuucc

SEQ ID NO: 5490 - RNA, 17 nt, Artificial Sequence
  Synthetic oligonucleotide: Ptpn6-1742
ccuggagacuauuaguc

SEQ ID NO: 5491 - RNA, 17 nt, Artificial Sequence
  Synthetic oligonucleotide: Ptpn6-1743
gccauuggccuggcagg

SEQ ID NO: 5492 - RNA, 17 nt, Artificial Sequence
  Synthetic oligonucleotide: Ptpn6-1744
uggccuggcaggcagga

SEQ ID NO: 5493 - RNA, 17 nt, Artificial Sequence
  Synthetic oligonucleotide: Ptpn6-1745
gccuggcaggcaggauc

SEQ ID NO: 5494 - RNA, 17 nt, Artificial Sequence
  Synthetic oligonucleotide: Ptpn6-1288
ccuggcaggcaggaucg

SEQ ID NO: 5495 - RNA, 17 nt, Artificial Sequence
  Synthetic oligonucleotide: Ptpn6-1747
uggcaggcaggaucgag

SEQ ID NO: 5496 - RNA, 17 nt, Artificial Sequence
  Synthetic oligonucleotide: Ptpn6-1072
ggcaggcaggaucgagg

SEQ ID NO: 5497 - RNA, 17 nt, Artificial Sequence
  Synthetic oligonucleotide: Ptpn6-1749
gaggaaguggcugauua

SEQ ID NO: 5498 - RNA, 17 nt, Artificial Sequence
  Synthetic oligonucleotide: Ptpn6-1750
guucuuccucaccuggc

SEQ ID NO: 5499 - RNA, 17 nt, Artificial Sequence
  Synthetic oligonucleotide: Ptpn6-1751
uggcuucccccucccua

SEQ ID NO: 5500 - RNA, 17 nt, Artificial Sequence
  Synthetic oligonucleotide: Ptpn6-1752
gcuucccccucccuaca

SEQ ID NO: 5501 - RNA, 17 nt, Artificial Sequence
  Synthetic oligonucleotide: Ptpn6-1753
cagagagaugcuguccc

SEQ ID NO: 5502 - RNA, 17 nt, Artificial Sequence
  Synthetic oligonucleotide: Ptpn6-1754
ugucccguggguaaguc

SEQ ID NO: 5503 - RNA, 17 nt, Artificial Sequence
  Synthetic oligonucleotide: Ptpn6-1755
guaagucccgggcacca

SEQ ID NO: 5504 - RNA, 17 nt, Artificial Sequence
  Synthetic oligonucleotide: Ptpn6-1260
uaagucccgggcaccau

SEQ ID NO: 5505 - RNA, 17 nt, Artificial Sequence
  Synthetic oligonucleotide: Ptpn6-1757
ccagucuccuguuaguu

SEQ ID NO: 5506 - RNA, 17 nt, Artificial Sequence
  Synthetic oligonucleotide: Ptpn6-1311
cagucuccuguuaguuu

SEQ ID NO: 5507 - RNA, 17 nt, Artificial Sequence
  Synthetic oligonucleotide: Ptpn6-1759
gucuccuguuaguuuug

SEQ ID NO: 5508 - RNA, 17 nt, Artificial Sequence
  Synthetic oligonucleotide: Ptpn6-1279
ucuccuguuaguuuugg

SEQ ID NO: 5509 - RNA, 17 nt, Artificial Sequence
  Synthetic oligonucleotide: Ptpn6-1282
cuccuguuaguuuugga

SEQ ID NO: 5510 - RNA, 17 nt, Artificial Sequence
  Synthetic oligonucleotide: Ptpn6-1762
ccuguuaguuuuggagg

SEQ ID NO: 5511 - RNA, 17 nt, Artificial Sequence
  Synthetic oligonucleotide: Ptpn6-1278
cuguuaguuuuggaggg

SEQ ID NO: 5512 - RNA, 17 nt, Artificial Sequence
  Synthetic oligonucleotide: Ptpn6-1307
uguuaguuuuggaggga

SEQ ID NO: 5513 - RNA, 17 nt, Artificial Sequence
  Synthetic oligonucleotide: Ptpn6-1765
uuaguuuuggagggagg

SEQ ID NO: 5514 - RNA, 17 nt, Artificial Sequence
  Synthetic oligonucleotide: Ptpn6-1766
ugcucacuccgacgugu

SEQ ID NO: 5515 - RNA, 17 nt, Artificial Sequence
  Synthetic oligonucleotide: Ptpn6-1767
cuccgacgugugugaac

SEQ ID NO: 5516 - RNA, 17 nt, Artificial Sequence
  Synthetic oligonucleotide: Ptpn6-1768
gccuguuuccggucccu

SEQ ID NO: 5517 - RNA, 17 nt, Artificial Sequence
  Synthetic oligonucleotide: Ptpn6-1769
uccccuucccgcaaggu

SEQ ID NO: 5518 - RNA, 17 nt, Artificial Sequence
  Synthetic oligonucleotide: Ptpn6-1770
cccuucccgcaaggugu

SEQ ID NO: 5519 - RNA, 17 nt, Artificial Sequence
  Synthetic oligonucleotide: Ptpn6-1771
cucuuuaacauuuuccc

SEQ ID NO: 5520 - RNA, 17 nt, Artificial Sequence
  Synthetic oligonucleotide: Ptpn6-1772
auuucuacuuccagccu

SEQ ID NO: 5521 - RNA, 17 nt, Artificial Sequence
  Synthetic oligonucleotide: Ptpn6-1773
ugcuucugccuccugcu

SEQ ID NO: 5522 - RNA, 17 nt, Artificial Sequence
  Synthetic oligonucleotide: Ptpn6-1774
gcuuaggaccugucccc

SEQ ID NO: 5523 - RNA, 17 nt, Artificial Sequence
  Synthetic oligonucleotide: Ptpn6-1775
accucaaacauagcagu

SEQ ID NO: 5524 - RNA, 17 nt, Artificial Sequence
  Synthetic oligonucleotide: Ptpn6-1776
gcagucagaggccaccc

SEQ ID NO: 5525 - RNA, 17 nt, Artificial Sequence
  Synthetic oligonucleotide: Ptpn6-1777
cauucaacagguacgug

SEQ ID NO: 5526 - RNA, 20 nt, Artificial Sequence
  Synthetic oligonucleotide: Ptpn6-1778
aaagucugauguugggaagu

SEQ ID NO: 5527 - RNA, 20 nt, Artificial Sequence
  Synthetic oligonucleotide: Ptpn6-1779
gagaaguuggcuggacgugg

SEQ ID NO: 5528 - RNA, 20 nt, Artificial Sequence
  Synthetic oligonucleotide: Ptpn6-1780
acugcuauguuugagguguu

SEQ ID NO: 5529 - RNA, 20 nt, Artificial Sequence
  Synthetic oligonucleotide: Ptpn6-1781
uaccuguugaaugaaugaug

SEQ ID NO: 5530 - RNA, 20 nt, Artificial Sequence
  Synthetic oligonucleotide: Ptpn6-1782
ccagggggacagguccuaag

SEQ ID NO: 5531 - RNA, 20 nt, Artificial Sequence
  Synthetic oligonucleotide: Ptpn6-1783
agaugcucaacacguaccug

SEQ ID NO: 5532 - RNA, 20 nt, Artificial Sequence
  Synthetic oligonucleotide: Ptpn6-1784
gcucaacacguaccuguuga

SEQ ID NO: 5533 - RNA, 20 nt, Artificial Sequence
  Synthetic oligonucleotide: Ptpn6-1249
accuguugaaugaaugaugc

SEQ ID NO: 5534 - RNA, 20 nt, Artificial Sequence
  Synthetic oligonucleotide: Ptpn6-1250
ccuguugaaugaaugaugca

SEQ ID NO: 5535 - RNA, 20 nt, Artificial Sequence
  Synthetic oligonucleotide: Ptpn6-1241
cuguugaaugaaugaugcag

SEQ ID NO: 5536 - RNA, 20 nt, Artificial Sequence
  Synthetic oligonucleotide: Ptpn6-1788
ugaaugaaugaugcagggga

SEQ ID NO: 5537 - RNA, 20 nt, Artificial Sequence
  Synthetic oligonucleotide: Ptpn6-1058
gaaugaaugaugcaggggaa

SEQ ID NO: 5538 - RNA, 20 nt, Artificial Sequence
  Synthetic oligonucleotide: Ptpn6-1244
aaugaaugaugcaggggaaa

SEQ ID NO: 5539 - RNA, 20 nt, Artificial Sequence
  Synthetic oligonucleotide: Ptpn6-1791
augaugcaggggaaagggaa

SEQ ID NO: 5540 - RNA, 20 nt, Artificial Sequence
  Synthetic oligonucleotide: Ptpn6-1792
ugcaggggaaagggaaguga

SEQ ID NO: 5541 - RNA, 20 nt, Artificial Sequence
  Synthetic oligonucleotide: Ptpn6-1062
gcaggggaaagggaagugaa

SEQ ID NO: 5542 - RNA, 20 nt, Artificial Sequence
  Synthetic oligonucleotide: Ptpn6-1794
aagggaagugaaaggaaaca

SEQ ID NO: 5543 - RNA, 20 nt, Artificial Sequence
  Synthetic oligonucleotide: Ptpn6-1795
agugaaaggaaacaaagaag

SEQ ID NO: 5544 - RNA, 20 nt, Artificial Sequence
  Synthetic oligonucleotide: Ptpn6-1061
gugaaaggaaacaaagaaga

SEQ ID NO: 5545 - RNA, 20 nt, Artificial Sequence
  Synthetic oligonucleotide: Ptpn6-1797
gaugggaccaaagucugaug

SEQ ID NO: 5546 - RNA, 20 nt, Artificial Sequence
  Synthetic oligonucleotide: Ptpn6-983
augggaccaaagucugaugu

SEQ ID NO: 5547 - RNA, 20 nt, Artificial Sequence
  Synthetic oligonucleotide: Ptpn6-979
ugggaccaaagucugauguu

SEQ ID NO: 5548 - RNA, 20 nt, Artificial Sequence
  Synthetic oligonucleotide: Ptpn6-1213
aagucugauguugggaagug

SEQ ID NO: 5549 - RNA, 20 nt, Artificial Sequence
  Synthetic oligonucleotide: Ptpn6-1801
gucugauguugggaagugcg

SEQ ID NO: 5550 - RNA, 20 nt, Artificial Sequence
  Synthetic oligonucleotide: Ptpn6-1802
gggaagugcggagaaguugg

SEQ ID NO: 5551 - RNA, 20 nt, Artificial Sequence
  Synthetic oligonucleotide: Ptpn6-1803
ugcggagaaguuggcuggac

SEQ ID NO: 5552 - RNA, 20 nt, Artificial Sequence
  Synthetic oligonucleotide: Ptpn6-1030
gcggagaaguuggcuggacg

SEQ ID NO: 5553 - RNA, 20 nt, Artificial Sequence
  Synthetic oligonucleotide: Ptpn6-1214
cggagaaguuggcuggacgu

SEQ ID NO: 5554 - RNA, 20 nt, Artificial Sequence
  Synthetic oligonucleotide: Ptpn6-1806
cuggacgugggagggccuuc

SEQ ID NO: 5555 - RNA, 20 nt, Artificial Sequence
  Synthetic oligonucleotide: Ptpn6-1807
guggccucugacugcuaugu

SEQ ID NO: 5556 - RNA, 20 nt, Artificial Sequence
  Synthetic oligonucleotide: Ptpn6-1808
uugagguguugugagcuacc

SEQ ID NO: 5557 - RNA, 20 nt, Artificial Sequence
  Synthetic oligonucleotide: Ptpn6-993
ugagguguugugagcuaccc

SEQ ID NO: 5558 - RNA, 20 nt, Artificial Sequence
  Synthetic oligonucleotide: Ptpn6-1033
gagguguugugagcuaccca

SEQ ID NO: 5559 - RNA, 20 nt, Artificial Sequence
  Synthetic oligonucleotide: Ptpn6-1194
agguguugugagcuacccag

SEQ ID NO: 5560 - RNA, 20 nt, Artificial Sequence
  Synthetic oligonucleotide: Ptpn6-1196
cagggggacagguccuaagc

SEQ ID NO: 5561 - RNA, 20 nt, Artificial Sequence
  Synthetic oligonucleotide: Ptpn6-1813
gacagguccuaagcaggagg

SEQ ID NO: 5562 - RNA, 20 nt, Artificial Sequence
  Synthetic oligonucleotide: Ptpn6-1814
uccuaagcaggaggcagaag

SEQ ID NO: 5563 - RNA, 20 nt, Artificial Sequence
  Synthetic oligonucleotide: Ptpn6-1256
ccuaagcaggaggcagaagc

SEQ ID NO: 5564 - RNA, 20 nt, Artificial Sequence
  Synthetic oligonucleotide: Ptpn6-1816
aggaggcagaagcaggagcc

SEQ ID NO: 5565 - RNA, 20 nt, Artificial Sequence
  Synthetic oligonucleotide: Ptpn6-1817
cagaagcaggagcccagagg

SEQ ID NO: 5566 - RNA, 20 nt, Artificial Sequence
  Synthetic oligonucleotide: Ptpn6-1248
agaagcaggagcccagaggc

SEQ ID NO: 5567 - RNA, 20 nt, Artificial Sequence
  Synthetic oligonucleotide: Ptpn6-1819
aggagcccagaggcuggaag

SEQ ID NO: 5568 - RNA, 20 nt, Artificial Sequence
  Synthetic oligonucleotide: Ptpn6-1820
aggcuggaaguagaaaugca

SEQ ID NO: 5569 - RNA, 20 nt, Artificial Sequence
  Synthetic oligonucleotide: Ptpn6-1054
ggcuggaaguagaaaugcaa

SEQ ID NO: 5570 - RNA, 20 nt, Artificial Sequence
  Synthetic oligonucleotide: Ptpn6-1822
cuggaaguagaaaugcaaug

SEQ ID NO: 5571 - RNA, 20 nt, Artificial Sequence
  Synthetic oligonucleotide: Ptpn6-1823
ggaaguagaaaugcaaugga

SEQ ID NO: 5572 - RNA, 20 nt, Artificial Sequence
  Synthetic oligonucleotide: Ptpn6-1824
agaacagauacacacuuguc

SEQ ID NO: 5573 - RNA, 20 nt, Artificial Sequence
  Synthetic oligonucleotide: Ptpn6-1028
gaacagauacacacuugucc

SEQ ID NO: 5574 - RNA, 20 nt, Artificial Sequence
  Synthetic oligonucleotide: Ptpn6-1210
aacagauacacacuugucca

SEQ ID NO: 5575 - RNA, 20 nt, Artificial Sequence
  Synthetic oligonucleotide: Ptpn6-1207
acagauacacacuuguccag

SEQ ID NO: 5576 - RNA, 20 nt, Artificial Sequence
  Synthetic oligonucleotide: Ptpn6-1828
uuguccaggggaaaauguua

SEQ ID NO: 5577 - RNA, 20 nt, Artificial Sequence
  Synthetic oligonucleotide: Ptpn6-1829
guccaggggaaaauguuaaa

SEQ ID NO: 5578 - RNA, 20 nt, Artificial Sequence
  Synthetic oligonucleotide: Ptpn6-1236
uccaggggaaaauguuaaag

SEQ ID NO: 5579 - RNA, 20 nt, Artificial Sequence
  Synthetic oligonucleotide: Ptpn6-1227
ccaggggaaaauguuaaaga

SEQ ID NO: 5580 - RNA, 20 nt, Artificial Sequence
  Synthetic oligonucleotide: Ptpn6-1832
ggaaaauguuaaagaggggg

SEQ ID NO: 5581 - RNA, 20 nt, Artificial Sequence
  Synthetic oligonucleotide: Ptpn6-1833
aaaauguuaaagagggggca

SEQ ID NO: 5582 - RNA, 20 nt, Artificial Sequence
  Synthetic oligonucleotide: Ptpn6-1224
aaauguuaaagagggggcag

SEQ ID NO: 5583 - RNA, 20 nt, Artificial Sequence
  Synthetic oligonucleotide: Ptpn6-1835
uaaagagggggcagaggagc

SEQ ID NO: 5584 - RNA, 20 nt, Artificial Sequence
  Synthetic oligonucleotide: Ptpn6-1836
gagggggcagaggagcauga

SEQ ID NO: 5585 - RNA, 20 nt, Artificial Sequence
  Synthetic oligonucleotide: Ptpn6-1837
ggcagaggagcaugagugag

SEQ ID NO: 5586 - RNA, 20 nt, Artificial Sequence
  Synthetic oligonucleotide: Ptpn6-1034
gcagaggagcaugagugagc

SEQ ID NO: 5587 - RNA, 20 nt, Artificial Sequence
  Synthetic oligonucleotide: Ptpn6-1237
cagaggagcaugagugagcc

SEQ ID NO: 5588 - RNA, 20 nt, Artificial Sequence
  Synthetic oligonucleotide: Ptpn6-1840
gccggggguccucacaccuu

SEQ ID NO: 5589 - RNA, 20 nt, Artificial Sequence
  Synthetic oligonucleotide: Ptpn6-990
ccggggguccucacaccuug

SEQ ID NO: 5590 - RNA, 20 nt, Artificial Sequence
  Synthetic oligonucleotide: Ptpn6-1185
cggggguccucacaccuugc

SEQ ID NO: 5591 - RNA, 20 nt, Artificial Sequence
  Synthetic oligonucleotide: Ptpn6-1843
ggguccucacaccuugcggg

SEQ ID NO: 5592 - RNA, 20 nt, Artificial Sequence
  Synthetic oligonucleotide: Ptpn6-958
gguccucacaccuugcggga

SEQ ID NO: 5593 - RNA, 20 nt, Artificial Sequence
  Synthetic oligonucleotide: Ptpn6-962
guccucacaccuugcgggaa

SEQ ID NO: 5594 - RNA, 20 nt, Artificial Sequence
  Synthetic oligonucleotide: Ptpn6-1186
uccucacaccuugcgggaag

SEQ ID NO: 5595 - RNA, 20 nt, Artificial Sequence
  Synthetic oligonucleotide: Ptpn6-1847
uugcgggaaggggaaguuca

SEQ ID NO: 5596 - RNA, 20 nt, Artificial Sequence
  Synthetic oligonucleotide: Ptpn6-1211
ugcgggaaggggaaguucau

SEQ ID NO: 5597 - RNA, 20 nt, Artificial Sequence
  Synthetic oligonucleotide: Ptpn6-1849
gaaggggaaguucauaggga

SEQ ID NO: 5598 - RNA, 20 nt, Artificial Sequence
  Synthetic oligonucleotide: Ptpn6-1199
aaggggaaguucauagggac

SEQ ID NO: 5599 - RNA, 20 nt, Artificial Sequence
  Synthetic oligonucleotide: Ptpn6-1851
auagggaccggaaacaggcg

SEQ ID NO: 5600 - RNA, 20 nt, Artificial Sequence
  Synthetic oligonucleotide: Ptpn6-1852
cgcacucacguucacacacg

SEQ ID NO: 5601 - RNA, 20 nt, Artificial Sequence
  Synthetic oligonucleotide: Ptpn6-961
gcacucacguucacacacgu

SEQ ID NO: 5602 - RNA, 20 nt, Artificial Sequence
  Synthetic oligonucleotide: Ptpn6-1854
ucacguucacacacgucgga

SEQ ID NO: 5603 - RNA, 20 nt, Artificial Sequence
  Synthetic oligonucleotide: Ptpn6-1855
cucccucccuccaaaacuaa

SEQ ID NO: 5604 - RNA, 20 nt, Artificial Sequence
  Synthetic oligonucleotide: Ptpn6-1208
ucccucccuccaaaacuaac

SEQ ID NO: 5605 - RNA, 20 nt, Artificial Sequence
  Synthetic oligonucleotide: Ptpn6-1857
ccuccaaaacuaacaggaga

SEQ ID NO: 5606 - RNA, 20 nt, Artificial Sequence
  Synthetic oligonucleotide: Ptpn6-1225
cuccaaaacuaacaggagac

SEQ ID NO: 5607 - RNA, 20 nt, Artificial Sequence
  Synthetic oligonucleotide: Ptpn6-1859
gacugggaccccgauggugc

SEQ ID NO: 5608 - RNA, 20 nt, Artificial Sequence
  Synthetic oligonucleotide: Ptpn6-1187
acugggaccccgauggugcc

SEQ ID NO: 5609 - RNA, 20 nt, Artificial Sequence
  Synthetic oligonucleotide: Ptpn6-1861
auggugcccgggacuuaccc

SEQ ID NO: 5610 - RNA, 20 nt, Artificial Sequence
  Synthetic oligonucleotide: Ptpn6-995
uggugcccgggacuuaccca

SEQ ID NO: 5611 - RNA, 20 nt, Artificial Sequence
  Synthetic oligonucleotide: Ptpn6-1863
cacgggacagcaucucucug

SEQ ID NO: 5612 - RNA, 20 nt, Artificial Sequence
  Synthetic oligonucleotide: Ptpn6-1190
acgggacagcaucucucugu

SEQ ID NO: 5613 - RNA, 20 nt, Artificial Sequence
  Synthetic oligonucleotide: Ptpn6-987
cgggacagcaucucucugua

SEQ ID NO: 5614 - RNA, 20 nt, Artificial Sequence
  Synthetic oligonucleotide: Ptpn6-1866
ggacagcaucucucuguagg

SEQ ID NO: 5615 - RNA, 20 nt, Artificial Sequence
  Synthetic oligonucleotide: Ptpn6-1043
gacagcaucucucuguaggg

SEQ ID NO: 5616 - RNA, 20 nt, Artificial Sequence
  Synthetic oligonucleotide: Ptpn6-1215
acagcaucucucuguaggga

SEQ ID NO: 5617 - RNA, 20 nt, Artificial Sequence
  Synthetic oligonucleotide: Ptpn6-1228
cagcaucucucuguagggag

SEQ ID NO: 5618 - RNA, 20 nt, Artificial Sequence
  Synthetic oligonucleotide: Ptpn6-1222
agcaucucucuguagggagg

SEQ ID NO: 5619 - RNA, 20 nt, Artificial Sequence
  Synthetic oligonucleotide: Ptpn6-1871
uagggagggggaagccacgg

SEQ ID NO: 5620 - RNA, 20 nt, Artificial Sequence
  Synthetic oligonucleotide: Ptpn6-1872
gggagggggaagccacggca

SEQ ID NO: 5621 - RNA, 20 nt, Artificial Sequence
  Synthetic oligonucleotide: Ptpn6-1873
gaagccacggcagagggccg

SEQ ID NO: 5622 - RNA, 20 nt, Artificial Sequence
  Synthetic oligonucleotide: Ptpn6-991
aagccacggcagagggccgc

SEQ ID NO: 5623 - RNA, 20 nt, Artificial Sequence
  Synthetic oligonucleotide: Ptpn6-1216
agccacggcagagggccgca

SEQ ID NO: 5624 - RNA, 20 nt, Artificial Sequence
  Synthetic oligonucleotide: Ptpn6-1876
acggcagagggccgcagggg

SEQ ID NO: 5625 - RNA, 20 nt, Artificial Sequence
  Synthetic oligonucleotide: Ptpn6-1234
cggcagagggccgcaggggg

SEQ ID NO: 5626 - RNA, 20 nt, Artificial Sequence
  Synthetic oligonucleotide: Ptpn6-1878
gagggccgcagggggcgggg

SEQ ID NO: 5627 - RNA, 20 nt, Artificial Sequence
  Synthetic oligonucleotide: Ptpn6-1879
ugcacaguggcccaagccag

SEQ ID NO: 5628 - RNA, 20 nt, Artificial Sequence
  Synthetic oligonucleotide: Ptpn6-1880
cacaguggcccaagccaggu

SEQ ID NO: 5629 - RNA, 20 nt, Artificial Sequence
  Synthetic oligonucleotide: Ptpn6-1235
acaguggcccaagccaggug

SEQ ID NO: 5630 - RNA, 20 nt, Artificial Sequence
  Synthetic oligonucleotide: Ptpn6-1882
guggcccaagccaggugagg

SEQ ID NO: 5631 - RNA, 20 nt, Artificial Sequence
  Synthetic oligonucleotide: Ptpn6-1883
cugccaggccaauggcacug

SEQ ID NO: 5632 - RNA, 20 nt, Artificial Sequence
  Synthetic oligonucleotide: Ptpn6-1217
ugccaggccaauggcacugc

SEQ ID NO: 5633 - RNA, 20 nt, Artificial Sequence
  Synthetic oligonucleotide: Ptpn6-1885
uggcacugcagggacaaacc

SEQ ID NO: 5634 - RNA, 20 nt, Artificial Sequence
  Synthetic oligonucleotide: Ptpn6-1886
aacccuggacuaauagucuc

SEQ ID NO: 5635 - RNA, 20 nt, Artificial Sequence
  Synthetic oligonucleotide: Ptpn6-986
acccuggacuaauagucucc

SEQ ID NO: 5636 - RNA, 20 nt, Artificial Sequence
  Synthetic oligonucleotide: Ptpn6-1888
ggacuaauagucuccaggaa

SEQ ID NO: 5637 - RNA, 20 nt, Artificial Sequence
  Synthetic oligonucleotide: Ptpn6-1889
agucuccaggaaaaggacag

SEQ ID NO: 5638 - RNA, 20 nt, Artificial Sequence
  Synthetic oligonucleotide: Ptpn6-1047
gucuccaggaaaaggacagg

SEQ ID NO: 5639 - RNA, 20 nt, Artificial Sequence
  Synthetic oligonucleotide: Ptpn6-1891
ccaggaaaaggacagguggg

SEQ ID NO: 5640 - RNA, 20 nt, Artificial Sequence
  Synthetic oligonucleotide: Ptpn6-1252
caggaaaaggacaggugggg

SEQ ID NO: 5641 - RNA, 20 nt, Artificial Sequence
  Synthetic oligonucleotide: Ptpn6-1893
acagguggggcggggcuggc

SEQ ID NO: 5642 - RNA, 20 nt, Artificial Sequence
  Synthetic oligonucleotide: Ptpn6-1894
agcuucccugcagccccaaa

SEQ ID NO: 5643 - RNA, 20 nt, Artificial Sequence
  Synthetic oligonucleotide: Ptpn6-1049
gcuucccugcagccccaaag

SEQ ID NO: 5644 - RNA, 20 nt, Artificial Sequence
  Synthetic oligonucleotide: Ptpn6-1242
cuucccugcagccccaaagc

SEQ ID NO: 5645 - RNA, 20 nt, Artificial Sequence
  Synthetic oligonucleotide: Ptpn6-1897
agcaggcccgccugcugguc

SEQ ID NO: 5646 - RNA, 20 nt, Artificial Sequence
  Synthetic oligonucleotide: Ptpn6-1898
ugguccagggccgccuuccc

SEQ ID NO: 5647 - RNA, 20 nt, Artificial Sequence
  Synthetic oligonucleotide: Ptpn6-1052
gguccagggccgccuucccc

SEQ ID NO: 5648 - RNA, 20 nt, Artificial Sequence
  Synthetic oligonucleotide: Ptpn6-1051
guccagggccgccuuccccc

SEQ ID NO: 5649 - RNA, 20 nt, Artificial Sequence
  Synthetic oligonucleotide: Ptpn6-1901
ccagggccgccuucccccgg

SEQ ID NO: 5650 - RNA, 20 nt, Artificial Sequence
  Synthetic oligonucleotide: Ptpn6-1902
agggccgccuucccccggga

SEQ ID NO: 5651 - RNA, 20 nt, Artificial Sequence
  Synthetic oligonucleotide: Ptpn6-1026
gggccgccuucccccgggag

SEQ ID NO: 5652 - RNA, 20 nt, Artificial Sequence
  Synthetic oligonucleotide: Ptpn6-1904
gccgccuucccccgggagag

SEQ ID NO: 5653 - RNA, 20 nt, Artificial Sequence
  Synthetic oligonucleotide: Ptpn6-1201
ccgccuucccccgggagagg

SEQ ID NO: 5654 - RNA, 20 nt, Artificial Sequence
  Synthetic oligonucleotide: Ptpn6-1906
cccgggagaggaggagccac

SEQ ID NO: 5655 - RNA, 20 nt, Artificial Sequence
  Synthetic oligonucleotide: Ptpn6-1238
ccgggagaggaggagccacc

SEQ ID NO: 5656 - RNA, 20 nt, Artificial Sequence
  Synthetic oligonucleotide: Ptpn6-1908
ggagccaccuggagcuccac

SEQ ID NO: 5657 - RNA, 20 nt, Artificial Sequence
  Synthetic oligonucleotide: Ptpn6-1055
gagccaccuggagcuccacc

SEQ ID NO: 5658 - RNA, 20 nt, Artificial Sequence
  Synthetic oligonucleotide: Ptpn6-1910
ccaccuggagcucaagcuga

SEQ ID NO: 5659 - RNA, 20 nt, Artificial Sequence
  Synthetic oligonucleotide: Ptpn6-1911
gagcucaagcugacagagcg

SEQ ID NO: 5660 - RNA, 20 nt, Artificial Sequence
  Synthetic oligonucleotide: Ptpn6-1188
agcucaagcugacagagcgg

SEQ ID NO: 5661 - RNA, 20 nt, Artificial Sequence
  Synthetic oligonucleotide: Ptpn6-1913
gcugacagagcggcggggua

SEQ ID NO: 5662 - RNA, 20 nt, Artificial Sequence
  Synthetic oligonucleotide: Ptpn6-1914
cagagcggcgggguauuggg

SEQ ID NO: 5663 - RNA, 20 nt, Artificial Sequence
  Synthetic oligonucleotide: Ptpn6-980
agagcggcgggguauugggu

SEQ ID NO: 5664 - RNA, 20 nt, Artificial Sequence
  Synthetic oligonucleotide: Ptpn6-1041
gagcggcgggguauugggua

SEQ ID NO: 5665 - RNA, 20 nt, Artificial Sequence
  Synthetic oligonucleotide: Ptpn6-989
agcggcgggguauuggguag

SEQ ID NO: 5666 - RNA, 20 nt, Artificial Sequence
  Synthetic oligonucleotide: Ptpn6-1918
uauuggguaggggaacagac

SEQ ID NO: 5667 - RNA, 20 nt, Artificial Sequence
  Synthetic oligonucleotide: Ptpn6-1192
auuggguaggggaacagacc

SEQ ID NO: 5668 - RNA, 20 nt, Artificial Sequence
  Synthetic oligonucleotide: Ptpn6-1920
agaccaggaaguaacccugg

SEQ ID NO: 5669 - RNA, 20 nt, Artificial Sequence
  Synthetic oligonucleotide: Ptpn6-1921
accaggaaguaacccuggcu

SEQ ID NO: 5670 - RNA, 20 nt, Artificial Sequence
  Synthetic oligonucleotide: Ptpn6-1231
ccaggaaguaacccuggcug

SEQ ID NO: 5671 - RNA, 20 nt, Artificial Sequence
  Synthetic oligonucleotide: Ptpn6-1923
ggaaguaacccuggcugagg

SEQ ID NO: 5672 - RNA, 20 nt, Artificial Sequence
  Synthetic oligonucleotide: Ptpn6-1924
uggcugaggaagagcaacca

SEQ ID NO: 5673 - RNA, 20 nt, Artificial Sequence
  Synthetic oligonucleotide: Ptpn6-1039
ggcugaggaagagcaaccaa

SEQ ID NO: 5674 - RNA, 20 nt, Artificial Sequence
  Synthetic oligonucleotide: Ptpn6-1029
gcugaggaagagcaaccaau

SEQ ID NO: 5675 - RNA, 20 nt, Artificial Sequence
  Synthetic oligonucleotide: Ptpn6-1239
cugaggaagagcaaccaaug

SEQ ID NO: 5676 - RNA, 20 nt, Artificial Sequence
  Synthetic oligonucleotide: Ptpn6-1221
ugaggaagagcaaccaaugg

SEQ ID NO: 5677 - RNA, 20 nt, Artificial Sequence
  Synthetic oligonucleotide: Ptpn6-1929
ugggggaaaccucuccguag

SEQ ID NO: 5678 - RNA, 20 nt, Artificial Sequence
  Synthetic oligonucleotide: Ptpn6-957
gggggaaaccucuccguagg

SEQ ID NO: 5679 - RNA, 20 nt, Artificial Sequence
  Synthetic oligonucleotide: Ptpn6-1931
cucuccguaggcggaaacca

SEQ ID NO: 5680 - RNA, 20 nt, Artificial Sequence
  Synthetic oligonucleotide: Ptpn6-1932
aggcggaaaccaaagggccu

SEQ ID NO: 5681 - RNA, 20 nt, Artificial Sequence
  Synthetic oligonucleotide: Ptpn6-959
ggcggaaaccaaagggccua

SEQ ID NO: 5682 - RNA, 20 nt, Artificial Sequence
  Synthetic oligonucleotide: Ptpn6-1934
ucccuaacagcccaguuccu

SEQ ID NO: 5683 - RNA, 20 nt, Artificial Sequence
  Synthetic oligonucleotide: Ptpn6-1935
ccuaacagcccaguuccuca

SEQ ID NO: 5684 - RNA, 20 nt, Artificial Sequence
  Synthetic oligonucleotide: Ptpn6-1936
aacagcccaguuccucagag

SEQ ID NO: 5685 - RNA, 20 nt, Artificial Sequence
  Synthetic oligonucleotide: Ptpn6-1230
acagcccaguuccucagaga

SEQ ID NO: 5686 - RNA, 17 nt, Artificial Sequence
  Synthetic oligonucleotide: Ptpn6-1938
gucugauguugggaagu

SEQ ID NO: 5687 - RNA, 17 nt, Artificial Sequence
  Synthetic oligonucleotide: Ptpn6-1939
aaguuggcuggacgugg

SEQ ID NO: 5688 - RNA, 17 nt, Artificial Sequence
  Synthetic oligonucleotide: Ptpn6-1940
gcuauguuugagguguu

SEQ ID NO: 5689 - RNA, 17 nt, Artificial Sequence
  Synthetic oligonucleotide: Ptpn6-1941
cuguugaaugaaugaug

SEQ ID NO: 5690 - RNA, 17 nt, Artificial Sequence
  Synthetic oligonucleotide: Ptpn6-1942
gggggacagguccuaag

SEQ ID NO: 5691 - RNA, 17 nt, Artificial Sequence
  Synthetic oligonucleotide: Ptpn6-1943
ugcucaacacguaccug

SEQ ID NO: 5692 - RNA, 17 nt, Artificial Sequence
  Synthetic oligonucleotide: Ptpn6-1944
caacacguaccuguuga

SEQ ID NO: 5693 - RNA, 17 nt, Artificial Sequence
  Synthetic oligonucleotide: Ptpn6-1384
uguugaaugaaugaugc

SEQ ID NO: 5694 - RNA, 17 nt, Artificial Sequence
  Synthetic oligonucleotide: Ptpn6-1125
guugaaugaaugaugca

SEQ ID NO: 5695 - RNA, 17 nt, Artificial Sequence
  Synthetic oligonucleotide: Ptpn6-1370
uugaaugaaugaugcag

SEQ ID NO: 5696 - RNA, 17 nt, Artificial Sequence
  Synthetic oligonucleotide: Ptpn6-1948
augaaugaugcagggga

SEQ ID NO: 5697 - RNA, 17 nt, Artificial Sequence
  Synthetic oligonucleotide: Ptpn6-1362
ugaaugaugcaggggaa

SEQ ID NO: 5698 - RNA, 17 nt, Artificial Sequence
  Synthetic oligonucleotide: Ptpn6-1123
gaaugaugcaggggaaa

SEQ ID NO: 5699 - RNA, 17 nt, Artificial Sequence
  Synthetic oligonucleotide: Ptpn6-1951
augcaggggaaagggaa

SEQ ID NO: 5700 - RNA, 17 nt, Artificial Sequence
  Synthetic oligonucleotide: Ptpn6-1952
aggggaaagggaaguga

SEQ ID NO: 5701 - RNA, 17 nt, Artificial Sequence
  Synthetic oligonucleotide: Ptpn6-1135
ggggaaagggaagugaa

SEQ ID NO: 5702 - RNA, 17 nt, Artificial Sequence
  Synthetic oligonucleotide: Ptpn6-1954
ggaagugaaaggaaaca

SEQ ID NO: 5703 - RNA, 17 nt, Artificial Sequence
  Synthetic oligonucleotide: Ptpn6-1955
gaaaggaaacaaagaag

SEQ ID NO: 5704 - RNA, 17 nt, Artificial Sequence
  Synthetic oligonucleotide: Ptpn6-1389
aaaggaaacaaagaaga

SEQ ID NO: 5705 - RNA, 17 nt, Artificial Sequence
  Synthetic oligonucleotide: Ptpn6-1957
gggaccaaagucugaug

SEQ ID NO: 5706 - RNA, 17 nt, Artificial Sequence
  Synthetic oligonucleotide: Ptpn6-1094
ggaccaaagucugaugu

SEQ ID NO: 5707 - RNA, 17 nt, Artificial Sequence
  Synthetic oligonucleotide: Ptpn6-1095
gaccaaagucugauguu

SEQ ID NO: 5708 - RNA, 17 nt, Artificial Sequence
  Synthetic oligonucleotide: Ptpn6-1366
ucugauguugggaagug

SEQ ID NO: 5709 - RNA, 17 nt, Artificial Sequence
  Synthetic oligonucleotide: Ptpn6-1961
ugauguugggaagugcg

SEQ ID NO: 5710 - RNA, 17 nt, Artificial Sequence
  Synthetic oligonucleotide: Ptpn6-1962
aagugcggagaaguugg

SEQ ID NO: 5711 - RNA, 17 nt, Artificial Sequence
  Synthetic oligonucleotide: Ptpn6-1963
ggagaaguuggcuggac

SEQ ID NO: 5712 - RNA, 17 nt, Artificial Sequence
  Synthetic oligonucleotide: Ptpn6-1124
gagaaguuggcuggacg

SEQ ID NO: 5713 - RNA, 17 nt, Artificial Sequence
  Synthetic oligonucleotide: Ptpn6-1328
agaaguuggcuggacgu

SEQ ID NO: 5714 - RNA, 17 nt, Artificial Sequence
  Synthetic oligonucleotide: Ptpn6-1966
gacgugggagggccuuc

SEQ ID NO: 5715 - RNA, 17 nt, Artificial Sequence
  Synthetic oligonucleotide: Ptpn6-1967
gccucugacugcuaugu

SEQ ID NO: 5716 - RNA, 17 nt, Artificial Sequence
  Synthetic oligonucleotide: Ptpn6-1968
agguguugugagcuacc

SEQ ID NO: 5717 - RNA, 17 nt, Artificial Sequence
  Synthetic oligonucleotide: Ptpn6-1083
gguguugugagcuaccc

SEQ ID NO: 5718 - RNA, 17 nt, Artificial Sequence
  Synthetic oligonucleotide: Ptpn6-1085
guguugugagcuaccca

SEQ ID NO: 5719 - RNA, 17 nt, Artificial Sequence
  Synthetic oligonucleotide: Ptpn6-1354
uguugugagcuacccag

SEQ ID NO: 5720 - RNA, 17 nt, Artificial Sequence
  Synthetic oligonucleotide: Ptpn6-1096
ggggacagguccuaagc

SEQ ID NO: 5721 - RNA, 17 nt, Artificial Sequence
  Synthetic oligonucleotide: Ptpn6-1973
agguccuaagcaggagg

SEQ ID NO: 5722 - RNA, 17 nt, Artificial Sequence
  Synthetic oligonucleotide: Ptpn6-1974
uaagcaggaggcagaag

SEQ ID NO: 5723 - RNA, 17 nt, Artificial Sequence
  Synthetic oligonucleotide: Ptpn6-1388
aagcaggaggcagaagc

SEQ ID NO: 5724 - RNA, 17 nt, Artificial Sequence
  Synthetic oligonucleotide: Ptpn6-1976
aggcagaagcaggagcc

SEQ ID NO: 5725 - RNA, 17 nt, Artificial Sequence
  Synthetic oligonucleotide: Ptpn6-1977
aagcaggagcccagagg

SEQ ID NO: 5726 - RNA, 17 nt, Artificial Sequence
  Synthetic oligonucleotide: Ptpn6-1385
agcaggagcccagaggc

SEQ ID NO: 5727 - RNA, 17 nt, Artificial Sequence
  Synthetic oligonucleotide: Ptpn6-1979
agcccagaggcuggaag

SEQ ID NO: 5728 - RNA, 17 nt, Artificial Sequence
  Synthetic oligonucleotide: Ptpn6-1980
cuggaaguagaaaugca

SEQ ID NO: 5729 - RNA, 17 nt, Artificial Sequence
  Synthetic oligonucleotide: Ptpn6-1374
uggaaguagaaaugcaa

SEQ ID NO: 5730 - RNA, 17 nt, Artificial Sequence
  Synthetic oligonucleotide: Ptpn6-1982
gaaguagaaaugcaaug

SEQ ID NO: 5731 - RNA, 17 nt, Artificial Sequence
  Synthetic oligonucleotide: Ptpn6-1983
aguagaaaugcaaugga

SEQ ID NO: 5732 - RNA, 17 nt, Artificial Sequence
  Synthetic oligonucleotide: Ptpn6-1984
acagauacacacuuguc

SEQ ID NO: 5733 - RNA, 17 nt, Artificial Sequence
  Synthetic oligonucleotide: Ptpn6-1332
cagauacacacuugucc

SEQ ID NO: 5734 - RNA, 17 nt, Artificial Sequence
  Synthetic oligonucleotide: Ptpn6-1339
agauacacacuugucca

SEQ ID NO: 5735 - RNA, 17 nt, Artificial Sequence
  Synthetic oligonucleotide: Ptpn6-1082
gauacacacuuguccag

SEQ ID NO: 5736 - RNA, 17 nt, Artificial Sequence
  Synthetic oligonucleotide: Ptpn6-1988
uccaggggaaaauguua

SEQ ID NO: 5737 - RNA, 17 nt, Artificial Sequence
  Synthetic oligonucleotide: Ptpn6-1989
caggggaaaauguuaaa

SEQ ID NO: 5738 - RNA, 17 nt, Artificial Sequence
  Synthetic oligonucleotide: Ptpn6-1373
aggggaaaauguuaaag

SEQ ID NO: 5739 - RNA, 17 nt, Artificial Sequence
  Synthetic oligonucleotide: Ptpn6-1126
ggggaaaauguuaaaga

SEQ ID NO: 5740 - RNA, 17 nt, Artificial Sequence
  Synthetic oligonucleotide: Ptpn6-1992
aaauguuaaagaggggg

SEQ ID NO: 5741 - RNA, 17 nt, Artificial Sequence
  Synthetic oligonucleotide: Ptpn6-1993
auguuaaagagggggca

SEQ ID NO: 5742 - RNA, 17 nt, Artificial Sequence
  Synthetic oligonucleotide: Ptpn6-1344
uguuaaagagggggcag

SEQ ID NO: 5743 - RNA, 17 nt, Artificial Sequence
  Synthetic oligonucleotide: Ptpn6-1995
agagggggcagaggagc

SEQ ID NO: 5744 - RNA, 17 nt, Artificial Sequence
  Synthetic oligonucleotide: Ptpn6-1996
ggggcagaggagcauga

SEQ ID NO: 5745 - RNA, 17 nt, Artificial Sequence
  Synthetic oligonucleotide: Ptpn6-1997
agaggagcaugagugag

SEQ ID NO: 5746 - RNA, 17 nt, Artificial Sequence
  Synthetic oligonucleotide: Ptpn6-1116
gaggagcaugagugagc

SEQ ID NO: 5747 - RNA, 17 nt, Artificial Sequence
  Synthetic oligonucleotide: Ptpn6-1372
aggagcaugagugagcc

SEQ ID NO: 5748 - RNA, 17 nt, Artificial Sequence
  Synthetic oligonucleotide: Ptpn6-2000
ggggguccucacaccuu

SEQ ID NO: 5749 - RNA, 17 nt, Artificial Sequence
  Synthetic oligonucleotide: Ptpn6-1098
gggguccucacaccuug

SEQ ID NO: 5750 - RNA, 17 nt, Artificial Sequence
  Synthetic oligonucleotide: Ptpn6-1093
ggguccucacaccuugc

SEQ ID NO: 5751 - RNA, 17 nt, Artificial Sequence
  Synthetic oligonucleotide: Ptpn6-2003
uccucacaccuugcggg

SEQ ID NO: 5752 - RNA, 17 nt, Artificial Sequence
  Synthetic oligonucleotide: Ptpn6-1337
ccucacaccuugcggga

SEQ ID NO: 5753 - RNA, 17 nt, Artificial Sequence
  Synthetic oligonucleotide: Ptpn6-1345
cucacaccuugcgggaa

SEQ ID NO: 5754 - RNA, 17 nt, Artificial Sequence
  Synthetic oligonucleotide: Ptpn6-1327
ucacaccuugcgggaag

SEQ ID NO: 5755 - RNA, 17 nt, Artificial Sequence
  Synthetic oligonucleotide: Ptpn6-2007
cgggaaggggaaguuca

SEQ ID NO: 5756 - RNA, 17 nt, Artificial Sequence
  Synthetic oligonucleotide: Ptpn6-1115
gggaaggggaaguucau

SEQ ID NO: 5757 - RNA, 17 nt, Artificial Sequence
  Synthetic oligonucleotide: Ptpn6-2009
ggggaaguucauaggga

SEQ ID NO: 5758 - RNA, 17 nt, Artificial Sequence
  Synthetic oligonucleotide: Ptpn6-1099
gggaaguucauagggac

SEQ ID NO: 5759 - RNA, 17 nt, Artificial Sequence
  Synthetic oligonucleotide: Ptpn6-2011
gggaccggaaacaggcg

SEQ ID NO: 5760 - RNA, 17 nt, Artificial Sequence
  Synthetic oligonucleotide: Ptpn6-2012
acucacguucacacacg

SEQ ID NO: 5761 - RNA, 17 nt, Artificial Sequence
  Synthetic oligonucleotide: Ptpn6-1002
cucacguucacacacgu

SEQ ID NO: 5762 - RNA, 17 nt, Artificial Sequence
  Synthetic oligonucleotide: Ptpn6-2014
cguucacacacgucgga

SEQ ID NO: 5763 - RNA, 17 nt, Artificial Sequence
  Synthetic oligonucleotide: Ptpn6-2015
ccucccuccaaaacuaa

SEQ ID NO: 5764 - RNA, 17 nt, Artificial Sequence
  Synthetic oligonucleotide: Ptpn6-1336
cucccuccaaaacuaac

SEQ ID NO: 5765 - RNA, 17 nt, Artificial Sequence
  Synthetic oligonucleotide: Ptpn6-2017
ccaaaacuaacaggaga

SEQ ID NO: 5766 - RNA, 17 nt, Artificial Sequence
  Synthetic oligonucleotide: Ptpn6-1359
caaaacuaacaggagac

SEQ ID NO: 5767 - RNA, 17 nt, Artificial Sequence
  Synthetic oligonucleotide: Ptpn6-2019
ugggaccccgauggugc

SEQ ID NO: 5768 - RNA, 17 nt, Artificial Sequence
  Synthetic oligonucleotide: Ptpn6-1088
gggaccccgauggugcc

SEQ ID NO: 5769 - RNA, 17 nt, Artificial Sequence
  Synthetic oligonucleotide: Ptpn6-2021
gugcccgggacuuaccc

SEQ ID NO: 5770 - RNA, 17 nt, Artificial Sequence
  Synthetic oligonucleotide: Ptpn6-1322
ugcccgggacuuaccca

SEQ ID NO: 5771 - RNA, 17 nt, Artificial Sequence
  Synthetic oligonucleotide: Ptpn6-2023
gggacagcaucucucug

SEQ ID NO: 5772 - RNA, 17 nt, Artificial Sequence
  Synthetic oligonucleotide: Ptpn6-1112
ggacagcaucucucugu

SEQ ID NO: 5773 - RNA, 17 nt, Artificial Sequence
  Synthetic oligonucleotide: Ptpn6-1113
gacagcaucucucugua

SEQ ID NO: 5774 - RNA, 17 nt, Artificial Sequence
  Synthetic oligonucleotide: Ptpn6-2026
cagcaucucucuguagg

SEQ ID NO: 5775 - RNA, 17 nt, Artificial Sequence
  Synthetic oligonucleotide: Ptpn6-1347
agcaucucucuguaggg

SEQ ID NO: 5776 - RNA, 17 nt, Artificial Sequence
  Synthetic oligonucleotide: Ptpn6-1105
gcaucucucuguaggga

SEQ ID NO: 5777 - RNA, 17 nt, Artificial Sequence
  Synthetic oligonucleotide: Ptpn6-1357
caucucucuguagggag

SEQ ID NO: 5778 - RNA, 17 nt, Artificial Sequence
  Synthetic oligonucleotide: Ptpn6-1351
aucucucuguagggagg

SEQ ID NO: 5779 - RNA, 17 nt, Artificial Sequence
  Synthetic oligonucleotide: Ptpn6-2031
ggagggggaagccacgg

SEQ ID NO: 5780 - RNA, 17 nt, Artificial Sequence
  Synthetic oligonucleotide: Ptpn6-2032
agggggaagccacggca

SEQ ID NO: 5781 - RNA, 17 nt, Artificial Sequence
  Synthetic oligonucleotide: Ptpn6-2033
gccacggcagagggccg

SEQ ID NO: 5782 - RNA, 17 nt, Artificial Sequence
  Synthetic oligonucleotide: Ptpn6-1338
ccacggcagagggccgc

SEQ ID NO: 5783 - RNA, 17 nt, Artificial Sequence
  Synthetic oligonucleotide: Ptpn6-1383
cacggcagagggccgca

SEQ ID NO: 5784 - RNA, 17 nt, Artificial Sequence
  Synthetic oligonucleotide: Ptpn6-2036
gcagagggccgcagggg

SEQ ID NO: 5785 - RNA, 17 nt, Artificial Sequence
  Synthetic oligonucleotide: Ptpn6-1363
cagagggccgcaggggg

SEQ ID NO: 5786 - RNA, 17 nt, Artificial Sequence
  Synthetic oligonucleotide: Ptpn6-2038
ggccgcagggggcgggg

SEQ ID NO: 5787 - RNA, 17 nt, Artificial Sequence
  Synthetic oligonucleotide: Ptpn6-2039
acaguggcccaagccag

SEQ ID NO: 5788 - RNA, 17 nt, Artificial Sequence
  Synthetic oligonucleotide: Ptpn6-2040
aguggcccaagccaggu

SEQ ID NO: 5789 - RNA, 17 nt, Artificial Sequence
  Synthetic oligonucleotide: Ptpn6-1121
guggcccaagccaggug

SEQ ID NO: 5790 - RNA, 17 nt, Artificial Sequence
  Synthetic oligonucleotide: Ptpn6-2042
gcccaagccaggugagg

SEQ ID NO: 5791 - RNA, 17 nt, Artificial Sequence
  Synthetic oligonucleotide: Ptpn6-2043
ccaggccaauggcacug

SEQ ID NO: 5792 - RNA, 17 nt, Artificial Sequence
  Synthetic oligonucleotide: Ptpn6-1348
caggccaauggcacugc

SEQ ID NO: 5793 - RNA, 17 nt, Artificial Sequence
  Synthetic oligonucleotide: Ptpn6-2045
cacugcagggacaaacc

SEQ ID NO: 5794 - RNA, 17 nt, Artificial Sequence
  Synthetic oligonucleotide: Ptpn6-2046
ccuggacuaauagucuc

SEQ ID NO: 5795 - RNA, 17 nt, Artificial Sequence
  Synthetic oligonucleotide: Ptpn6-1321
cuggacuaauagucucc

SEQ ID NO: 5796 - RNA, 17 nt, Artificial Sequence
  Synthetic oligonucleotide: Ptpn6-2048
cuaauagucuccaggaa

SEQ ID NO: 5797 - RNA, 17 nt, Artificial Sequence
  Synthetic oligonucleotide: Ptpn6-2049
cuccaggaaaaggacag

SEQ ID NO: 5798 - RNA, 17 nt, Artificial Sequence
  Synthetic oligonucleotide: Ptpn6-1371
uccaggaaaaggacagg

SEQ ID NO: 5799 - RNA, 17 nt, Artificial Sequence
  Synthetic oligonucleotide: Ptpn6-2051
ggaaaaggacagguggg

SEQ ID NO: 5800 - RNA, 17 nt, Artificial Sequence
  Synthetic oligonucleotide: Ptpn6-1131
gaaaaggacaggugggg

SEQ ID NO: 5801 - RNA, 17 nt, Artificial Sequence
  Synthetic oligonucleotide: Ptpn6-2053
gguggggcggggcuggc

SEQ ID NO: 5802 - RNA, 17 nt, Artificial Sequence
  Synthetic oligonucleotide: Ptpn6-2054
uucccugcagccccaaa

SEQ ID NO: 5803 - RNA, 17 nt, Artificial Sequence
  Synthetic oligonucleotide: Ptpn6-1369
ucccugcagccccaaag

SEQ ID NO: 5804 - RNA, 17 nt, Artificial Sequence
  Synthetic oligonucleotide: Ptpn6-1376
cccugcagccccaaagc

SEQ ID NO: 5805 - RNA, 17 nt, Artificial Sequence
  Synthetic oligonucleotide: Ptpn6-2057
aggcccgccugcugguc

SEQ ID NO: 5806 - RNA, 17 nt, Artificial Sequence
  Synthetic oligonucleotide: Ptpn6-2058
uccagggccgccuuccc

SEQ ID NO: 5807 - RNA, 17 nt, Artificial Sequence
  Synthetic oligonucleotide: Ptpn6-1379
ccagggccgccuucccc

SEQ ID NO: 5808 - RNA, 17 nt, Artificial Sequence
  Synthetic oligonucleotide: Ptpn6-1364
cagggccgccuuccccc

SEQ ID NO: 5809 - RNA, 17 nt, Artificial Sequence
  Synthetic oligonucleotide: Ptpn6-2061
gggccgccuucccccgg

SEQ ID NO: 5810 - RNA, 17 nt, Artificial Sequence
  Synthetic oligonucleotide: Ptpn6-2062
gccgccuucccccggga

SEQ ID NO: 5811 - RNA, 17 nt, Artificial Sequence
  Synthetic oligonucleotide: Ptpn6-1333
ccgccuucccccgggag

SEQ ID NO: 5812 - RNA, 17 nt, Artificial Sequence
  Synthetic oligonucleotide: Ptpn6-2064
gccuucccccgggagag

SEQ ID NO: 5813 - RNA, 17 nt, Artificial Sequence
  Synthetic oligonucleotide: Ptpn6-1352
ccuucccccgggagagg

SEQ ID NO: 5814 - RNA, 17 nt, Artificial Sequence
  Synthetic oligonucleotide: Ptpn6-2066
gggagaggaggagccac

SEQ ID NO: 5815 - RNA, 17 nt, Artificial Sequence
  Synthetic oligonucleotide: Ptpn6-1129
ggagaggaggagccacc

SEQ ID NO: 5816 - RNA, 17 nt, Artificial Sequence
  Synthetic oligonucleotide: Ptpn6-2068
gccaccuggagcuccac

SEQ ID NO: 5817 - RNA, 17 nt, Artificial Sequence
  Synthetic oligonucleotide: Ptpn6-1386
ccaccuggagcuccacc

SEQ ID NO: 5818 - RNA, 17 nt, Artificial Sequence
  Synthetic oligonucleotide: Ptpn6-2070
ccuggagcucaagcuga

SEQ ID NO: 5819 - RNA, 17 nt, Artificial Sequence
  Synthetic oligonucleotide: Ptpn6-2071
cucaagcugacagagcg

SEQ ID NO: 5820 - RNA, 17 nt, Artificial Sequence
  Synthetic oligonucleotide: Ptpn6-1319
ucaagcugacagagcgg

SEQ ID NO: 5821 - RNA, 17 nt, Artificial Sequence
  Synthetic oligonucleotide: Ptpn6-2073
gacagagcggcggggua

SEQ ID NO: 5822 - RNA, 17 nt, Artificial Sequence
  Synthetic oligonucleotide: Ptpn6-2074
agcggcgggguauuggg

SEQ ID NO: 5823 - RNA, 17 nt, Artificial Sequence
  Synthetic oligonucleotide: Ptpn6-1081
gcggcgggguauugggu

SEQ ID NO: 5824 - RNA, 17 nt, Artificial Sequence
  Synthetic oligonucleotide: Ptpn6-1000
cggcgggguauugggua

SEQ ID NO: 5825 - RNA, 17 nt, Artificial Sequence
  Synthetic oligonucleotide: Ptpn6-1084
ggcgggguauuggguag

SEQ ID NO: 5826 - RNA, 17 nt, Artificial Sequence
  Synthetic oligonucleotide: Ptpn6-2078
uggguaggggaacagac

SEQ ID NO: 5827 - RNA, 17 nt, Artificial Sequence
  Synthetic oligonucleotide: Ptpn6-1106
ggguaggggaacagacc

SEQ ID NO: 5828 - RNA, 17 nt, Artificial Sequence
  Synthetic oligonucleotide: Ptpn6-2080
ccaggaaguaacccugg

SEQ ID NO: 5829 - RNA, 17 nt, Artificial Sequence
  Synthetic oligonucleotide: Ptpn6-2081
aggaaguaacccuggcu

SEQ ID NO: 5830 - RNA, 17 nt, Artificial Sequence
  Synthetic oligonucleotide: Ptpn6-1108
ggaaguaacccuggcug

SEQ ID NO: 5831 - RNA, 17 nt, Artificial Sequence
  Synthetic oligonucleotide: Ptpn6-2083
aguaacccuggcugagg

SEQ ID NO: 5832 - RNA, 17 nt, Artificial Sequence
  Synthetic oligonucleotide: Ptpn6-2084
cugaggaagagcaacca

SEQ ID NO: 5833 - RNA, 17 nt, Artificial Sequence
  Synthetic oligonucleotide: Ptpn6-1358
ugaggaagagcaaccaa

SEQ ID NO: 5834 - RNA, 17 nt, Artificial Sequence
  Synthetic oligonucleotide: Ptpn6-1107
gaggaagagcaaccaau

SEQ ID NO: 5835 - RNA, 17 nt, Artificial Sequence
  Synthetic oligonucleotide: Ptpn6-1355
aggaagagcaaccaaug

SEQ ID NO: 5836 - RNA, 17 nt, Artificial Sequence
  Synthetic oligonucleotide: Ptpn6-1104
ggaagagcaaccaaugg

SEQ ID NO: 5837 - RNA, 17 nt, Artificial Sequence
  Synthetic oligonucleotide: Ptpn6-2089
gggaaaccucuccguag

SEQ ID NO: 5838 - RNA, 17 nt, Artificial Sequence
  Synthetic oligonucleotide: Ptpn6-965
ggaaaccucuccguagg

SEQ ID NO: 5839 - RNA, 17 nt, Artificial Sequence
  Synthetic oligonucleotide: Ptpn6-2091
uccguaggcggaaacca

SEQ ID NO: 5840 - RNA, 17 nt, Artificial Sequence
  Synthetic oligonucleotide: Ptpn6-2092
cggaaaccaaagggccu

SEQ ID NO: 5841 - RNA, 17 nt, Artificial Sequence
  Synthetic oligonucleotide: Ptpn6-1103
ggaaaccaaagggccua

SEQ ID NO: 5842 - RNA, 17 nt, Artificial Sequence
  Synthetic oligonucleotide: Ptpn6-2094
cuaacagcccaguuccu

SEQ ID NO: 5843 - RNA, 17 nt, Artificial Sequence
  Synthetic oligonucleotide: Ptpn6-2095
aacagcccaguuccuca

SEQ ID NO: 5844 - RNA, 17 nt, Artificial Sequence
  Synthetic oligonucleotide: Ptpn6-2096
agcccaguuccucagag

SEQ ID NO: 5845 - RNA, 17 nt, Artificial Sequence
  Synthetic oligonucleotide: Ptpn6-1120
gcccaguuccucagaga

SEQ ID NO: 5846 - RNA, 20 nt, Artificial Sequence
  Synthetic oligonucleotide: Ptpn6-1412
guuuaagaugcugguaauac

SEQ ID NO: 5847 - RNA, 20 nt, Artificial Sequence
  Synthetic oligonucleotide: Ptpn6-2099
aagaugcugguaauacugga

SEQ ID NO: 5848 - RNA, 20 nt, Artificial Sequence
  Synthetic oligonucleotide: Ptpn6-2100
cagacauggucucugcucuc

SEQ ID NO: 5849 - RNA, 20 nt, Artificial Sequence
  Synthetic oligonucleotide: Ptpn6-1414
agacauggucucugcucuca

SEQ ID NO: 5850 - RNA, 20 nt, Artificial Sequence
  Synthetic oligonucleotide: Ptpn6-2102
cucacggagcuuacauucca

SEQ ID NO: 5851 - RNA, 20 nt, Artificial Sequence
  Synthetic oligonucleotide: Ptpn6-1415
ucacggagcuuacauuccag

SEQ ID NO: 5852 - RNA, 20 nt, Artificial Sequence
  Synthetic oligonucleotide: Ptpn6-1416
cacggagcuuacauuccagu

SEQ ID NO: 5853 - RNA, 20 nt, Artificial Sequence
  Synthetic oligonucleotide: Ptpn6-2105
uuccagugggagguuacaga

SEQ ID NO: 5854 - RNA, 20 nt, Artificial Sequence
  Synthetic oligonucleotide: Ptpn6-2106
cgaacaaauaacccaauaaa

SEQ ID NO: 5855 - RNA, 20 nt, Artificial Sequence
  Synthetic oligonucleotide: Ptpn6-2107
auuggaucauugcagauucu

SEQ ID NO: 5856 - RNA, 20 nt, Artificial Sequence
  Synthetic oligonucleotide: Ptpn6-2108
agauucucagaaguauuacg

SEQ ID NO: 5857 - RNA, 20 nt, Artificial Sequence
  Synthetic oligonucleotide: Ptpn6-2109
cagaaaauagacagccuugg

SEQ ID NO: 5858 - RNA, 20 nt, Artificial Sequence
  Synthetic oligonucleotide: Ptpn6-2110
acaccugugaucccagcacu

SEQ ID NO: 5859 - RNA, 20 nt, Artificial Sequence
  Synthetic oligonucleotide: Ptpn6-1423
caccugugaucccagcacug

SEQ ID NO: 5860 - RNA, 20 nt, Artificial Sequence
  Synthetic oligonucleotide: Ptpn6-1424
accugugaucccagcacugu

SEQ ID NO: 5861 - RNA, 20 nt, Artificial Sequence
  Synthetic oligonucleotide: Ptpn6-2113
gaucccagcacugugggagg

SEQ ID NO: 5862 - RNA, 20 nt, Artificial Sequence
  Synthetic oligonucleotide: Ptpn6-2114
cagcacugugggaggcugag

SEQ ID NO: 5863 - RNA, 20 nt, Artificial Sequence
  Synthetic oligonucleotide: Ptpn6-2115
gcacugugggaggcugaggc

SEQ ID NO: 5864 - RNA, 20 nt, Artificial Sequence
  Synthetic oligonucleotide: Ptpn6-2116
acugugggaggcugaggcga

SEQ ID NO: 5865 - RNA, 20 nt, Artificial Sequence
  Synthetic oligonucleotide: Ptpn6-2117
ggcugaggcgagaggauugc

SEQ ID NO: 5866 - RNA, 20 nt, Artificial Sequence
  Synthetic oligonucleotide: Ptpn6-2118
gcgagaggauugcuugagcc

SEQ ID NO: 5867 - RNA, 20 nt, Artificial Sequence
  Synthetic oligonucleotide: Ptpn6-1428
cgagaggauugcuugagccc

SEQ ID NO: 5868 - RNA, 20 nt, Artificial Sequence
  Synthetic oligonucleotide: Ptpn6-2120
gauugcuugagcccaggagu

SEQ ID NO: 5869 - RNA, 20 nt, Artificial Sequence
  Synthetic oligonucleotide: Ptpn6-2121
agaccagccuggccaauaua

SEQ ID NO: 5870 - RNA, 20 nt, Artificial Sequence
  Synthetic oligonucleotide: Ptpn6-2122
acccugucucuacaaaaaau

SEQ ID NO: 5871 - RNA, 20 nt, Artificial Sequence
  Synthetic oligonucleotide: Ptpn6-2123
uacaaaaaauaagaaauuag

SEQ ID NO: 5872 - RNA, 20 nt, Artificial Sequence
  Synthetic oligonucleotide: Ptpn6-2124
cacguccugugguuccagcu

SEQ ID NO: 5873 - RNA, 20 nt, Artificial Sequence
  Synthetic oligonucleotide: Ptpn6-1435
acguccugugguuccagcua

SEQ ID NO: 5874 - RNA, 20 nt, Artificial Sequence
  Synthetic oligonucleotide: Ptpn6-2126
guccugugguuccagcuaug

SEQ ID NO: 5875 - RNA, 20 nt, Artificial Sequence
  Synthetic oligonucleotide: Ptpn6-2127
ccagcuauggagaggcuaag

SEQ ID NO: 5876 - RNA, 20 nt, Artificial Sequence
  Synthetic oligonucleotide: Ptpn6-2128
agcuauggagaggcuaaggu

SEQ ID NO: 5877 - RNA, 20 nt, Artificial Sequence
  Synthetic oligonucleotide: Ptpn6-2129
ggcuaaggugagaggcuugc

SEQ ID NO: 5878 - RNA, 20 nt, Artificial Sequence
  Synthetic oligonucleotide: Ptpn6-2130
ggugagaggcuugcuugagc

SEQ ID NO: 5879 - RNA, 20 nt, Artificial Sequence
  Synthetic oligonucleotide: Ptpn6-1439
gugagaggcuugcuugagcc

SEQ ID NO: 5880 - RNA, 20 nt, Artificial Sequence
  Synthetic oligonucleotide: Ptpn6-1440
ugagaggcuugcuugagccu

SEQ ID NO: 5881 - RNA, 20 nt, Artificial Sequence
  Synthetic oligonucleotide: Ptpn6-2133
uugcaccacugcacaccagc

SEQ ID NO: 5882 - RNA, 20 nt, Artificial Sequence
  Synthetic oligonucleotide: Ptpn6-2134
cugcacaccagccugggcga

SEQ ID NO: 5883 - RNA, 20 nt, Artificial Sequence
  Synthetic oligonucleotide: Ptpn6-2135
acaccagccugggcgacaga

SEQ ID NO: 5884 - RNA, 20 nt, Artificial Sequence
  Synthetic oligonucleotide: Ptpn6-2136
cucaaaaaaaaaaaaaaaaa

SEQ ID NO: 5885 - RNA, 20 nt, Artificial Sequence
  Synthetic oligonucleotide: Ptpn6-2137
aaaaaaaaaaaaaaaagaaa

SEQ ID NO: 5886 - RNA, 20 nt, Artificial Sequence
  Synthetic oligonucleotide: Ptpn6-2138
cuucauaugcuagcaaguga

SEQ ID NO: 5887 - RNA, 20 nt, Artificial Sequence
  Synthetic oligonucleotide: Ptpn6-1445
uucauaugcuagcaagugac

SEQ ID NO: 5888 - RNA, 20 nt, Artificial Sequence
  Synthetic oligonucleotide: Ptpn6-1446
ucauaugcuagcaagugacu

SEQ ID NO: 5889 - RNA, 20 nt, Artificial Sequence
  Synthetic oligonucleotide: Ptpn6-1447
cauaugcuagcaagugacug

SEQ ID NO: 5890 - RNA, 20 nt, Artificial Sequence
  Synthetic oligonucleotide: Ptpn6-1448
auaugcuagcaagugacugg

SEQ ID NO: 5891 - RNA, 20 nt, Artificial Sequence
  Synthetic oligonucleotide: Ptpn6-1449
uaugcuagcaagugacuggg

SEQ ID NO: 5892 - RNA, 17 nt, Artificial Sequence
  Synthetic oligonucleotide: Ptpn6-2144
uuaagaugcugguaaua

SEQ ID NO: 5893 - RNA, 17 nt, Artificial Sequence
  Synthetic oligonucleotide: Ptpn6-1472
uaagaugcugguaauac

SEQ ID NO: 5894 - RNA, 17 nt, Artificial Sequence
  Synthetic oligonucleotide: Ptpn6-2146
augcugguaauacugga

SEQ ID NO: 5895 - RNA, 17 nt, Artificial Sequence
  Synthetic oligonucleotide: Ptpn6-2147
acauggucucugcucuc

SEQ ID NO: 5896 - RNA, 17 nt, Artificial Sequence
  Synthetic oligonucleotide: Ptpn6-1474
cauggucucugcucuca

SEQ ID NO: 5897 - RNA, 17 nt, Artificial Sequence
  Synthetic oligonucleotide: Ptpn6-2149
acggagcuuacauucca

SEQ ID NO: 5898 - RNA, 17 nt, Artificial Sequence
  Synthetic oligonucleotide: Ptpn6-1475
cggagcuuacauuccag

SEQ ID NO: 5899 - RNA, 17 nt, Artificial Sequence
  Synthetic oligonucleotide: Ptpn6-1476
ggagcuuacauuccagu

SEQ ID NO: 5900 - RNA, 17 nt, Artificial Sequence
  Synthetic oligonucleotide: Ptpn6-2152
cagugggagguuacaga

SEQ ID NO: 5901 - RNA, 17 nt, Artificial Sequence
  Synthetic oligonucleotide: Ptpn6-2153
acaaauaacccaauaaa

SEQ ID NO: 5902 - RNA, 17 nt, Artificial Sequence
  Synthetic oligonucleotide: Ptpn6-2154
ggaucauugcagauucu

SEQ ID NO: 5903 - RNA, 17 nt, Artificial Sequence
  Synthetic oligonucleotide: Ptpn6-2155
uucucagaaguauuacg

SEQ ID NO: 5904 - RNA, 17 nt, Artificial Sequence
  Synthetic oligonucleotide: Ptpn6-2156
aaaauagacagccuugg

SEQ ID NO: 5905 - RNA, 17 nt, Artificial Sequence
  Synthetic oligonucleotide: Ptpn6-2157
ccugugaucccagcacu

SEQ ID NO: 5906 - RNA, 17 nt, Artificial Sequence
  Synthetic oligonucleotide: Ptpn6-1483
cugugaucccagcacug

SEQ ID NO: 5907 - RNA, 17 nt, Artificial Sequence
  Synthetic oligonucleotide: Ptpn6-1484
ugugaucccagcacugu

SEQ ID NO: 5908 - RNA, 17 nt, Artificial Sequence
  Synthetic oligonucleotide: Ptpn6-2160
cccagcacugugggagg

SEQ ID NO: 5909 - RNA, 17 nt, Artificial Sequence
  Synthetic oligonucleotide: Ptpn6-2161
cacugugggaggcugag

SEQ ID NO: 5910 - RNA, 17 nt, Artificial Sequence
  Synthetic oligonucleotide: Ptpn6-2162
cugugggaggcugaggc

SEQ ID NO: 5911 - RNA, 17 nt, Artificial Sequence
  Synthetic oligonucleotide: Ptpn6-2163
gugggaggcugaggcga

SEQ ID NO: 5912 - RNA, 17 nt, Artificial Sequence
  Synthetic oligonucleotide: Ptpn6-2164
ugaggcgagaggauugc

SEQ ID NO: 5913 - RNA, 17 nt, Artificial Sequence
  Synthetic oligonucleotide: Ptpn6-2165
agaggauugcuugagcc

SEQ ID NO: 5914 - RNA, 17 nt, Artificial Sequence
  Synthetic oligonucleotide: Ptpn6-1488
gaggauugcuugagccc

SEQ ID NO: 5915 - RNA, 17 nt, Artificial Sequence
  Synthetic oligonucleotide: Ptpn6-2167
ugcuugagcccaggagu

SEQ ID NO: 5916 - RNA, 17 nt, Artificial Sequence
  Synthetic oligonucleotide: Ptpn6-2168
ccagccuggccaauaua

SEQ ID NO: 5917 - RNA, 17 nt, Artificial Sequence
  Synthetic oligonucleotide: Ptpn6-2169
cugucucuacaaaaaau

SEQ ID NO: 5918 - RNA, 17 nt, Artificial Sequence
  Synthetic oligonucleotide: Ptpn6-2170
aaaaaauaagaaauuag

SEQ ID NO: 5919 - RNA, 17 nt, Artificial Sequence
  Synthetic oligonucleotide: Ptpn6-2171
guccugugguuccagcu

SEQ ID NO: 5920 - RNA, 17 nt, Artificial Sequence
  Synthetic oligonucleotide: Ptpn6-1495
uccugugguuccagcua

SEQ ID NO: 5921 - RNA, 17 nt, Artificial Sequence
  Synthetic oligonucleotide: Ptpn6-2173
cugugguuccagcuaug

SEQ ID NO: 5922 - RNA, 17 nt, Artificial Sequence
  Synthetic oligonucleotide: Ptpn6-2174
gcuauggagaggcuaag

SEQ ID NO: 5923 - RNA, 17 nt, Artificial Sequence
  Synthetic oligonucleotide: Ptpn6-2175
uauggagaggcuaaggu

SEQ ID NO: 5924 - RNA, 17 nt, Artificial Sequence
  Synthetic oligonucleotide: Ptpn6-2176
uaaggugagaggcuugc

SEQ ID NO: 5925 - RNA, 17 nt, Artificial Sequence
  Synthetic oligonucleotide: Ptpn6-2177
gagaggcuugcuugagc

SEQ ID NO: 5926 - RNA, 17 nt, Artificial Sequence
  Synthetic oligonucleotide: Ptpn6-1499
agaggcuugcuugagcc

SEQ ID NO: 5927 - RNA, 17 nt, Artificial Sequence
  Synthetic oligonucleotide: Ptpn6-1500
gaggcuugcuugagccu

SEQ ID NO: 5928 - RNA, 17 nt, Artificial Sequence
  Synthetic oligonucleotide: Ptpn6-2180
caccacugcacaccagc

SEQ ID NO: 5929 - RNA, 17 nt, Artificial Sequence
  Synthetic oligonucleotide: Ptpn6-2181
cacaccagccugggcga

SEQ ID NO: 5930 - RNA, 17 nt, Artificial Sequence
  Synthetic oligonucleotide: Ptpn6-2182
ccagccugggcgacaga

SEQ ID NO: 5931 - RNA, 17 nt, Artificial Sequence
  Synthetic oligonucleotide: Ptpn6-2183
aaaaaaaaaaaaaaaaa

SEQ ID NO: 5932 - RNA, 17 nt, Artificial Sequence
  Synthetic oligonucleotide: Ptpn6-2184
aaaaaaaaaaaaagaaa

SEQ ID NO: 5933 - RNA, 17 nt, Artificial Sequence
  Synthetic oligonucleotide: Ptpn6-2185
cauaugcuagcaaguga

SEQ ID NO: 5934 - RNA, 17 nt, Artificial Sequence
  Synthetic oligonucleotide: Ptpn6-1505
auaugcuagcaagugac

SEQ ID NO: 5935 - RNA, 17 nt, Artificial Sequence
  Synthetic oligonucleotide: Ptpn6-1506
uaugcuagcaagugacu

SEQ ID NO: 5936 - RNA, 17 nt, Artificial Sequence
  Synthetic oligonucleotide: Ptpn6-1507
augcuagcaagugacug

SEQ ID NO: 5937 - RNA, 17 nt, Artificial Sequence
  Synthetic oligonucleotide: Ptpn6-1508
ugcuagcaagugacugg

SEQ ID NO: 5938 - RNA, 17 nt, Artificial Sequence
  Synthetic oligonucleotide: Ptpn6-1509
gcuagcaagugacuggg

SEQ ID NO: 5939 - RNA, 20 nt, Artificial Sequence
  Synthetic oligonucleotide: Ptpn6-2191
uucuuuuuuuuuuuuuuuuu

SEQ ID NO: 5940 - RNA, 20 nt, Artificial Sequence
  Synthetic oligonucleotide: Ptpn6-2192
ucaccuuagccucuccauag

SEQ ID NO: 5941 - RNA, 20 nt, Artificial Sequence
  Synthetic oligonucleotide: Ptpn6-1563
caccuuagccucuccauagc

SEQ ID NO: 5942 - RNA, 20 nt, Artificial Sequence
  Synthetic oligonucleotide: Ptpn6-2194
ccucuccauagcuggaacca

SEQ ID NO: 5943 - RNA, 20 nt, Artificial Sequence
  Synthetic oligonucleotide: Ptpn6-2195
agcuaauuucuuauuuuuug

SEQ ID NO: 5944 - RNA, 20 nt, Artificial Sequence
  Synthetic oligonucleotide: Ptpn6-2196
uuucuuauuuuuuguagaga

SEQ ID NO: 5945 - RNA, 20 nt, Artificial Sequence
  Synthetic oligonucleotide: Ptpn6-2197
gccaggcuggucucaaacuc

SEQ ID NO: 5946 - RNA, 20 nt, Artificial Sequence
  Synthetic oligonucleotide: Ptpn6-2198
cgccucagccucccacagug

SEQ ID NO: 5947 - RNA, 20 nt, Artificial Sequence
  Synthetic oligonucleotide: Ptpn6-1572
gccucagccucccacagugc

SEQ ID NO: 5948 - RNA, 20 nt, Artificial Sequence
  Synthetic oligonucleotide: Ptpn6-2200
acagugcugggaucacaggu

SEQ ID NO: 5949 - RNA, 20 nt, Artificial Sequence
  Synthetic oligonucleotide: Ptpn6-2201
cuauuuucugcguaauacuu

SEQ ID NO: 5950 - RNA, 20 nt, Artificial Sequence
  Synthetic oligonucleotide: Ptpn6-2202
auuuucugcguaauacuucu

SEQ ID NO: 5951 - RNA, 20 nt, Artificial Sequence
  Synthetic oligonucleotide: Ptpn6-2203
aucugcaaugauccaauuua

SEQ ID NO: 5952 - RNA, 20 nt, Artificial Sequence
  Synthetic oligonucleotide: Ptpn6-2204
guucggucuguaaccuccca

SEQ ID NO: 5953 - RNA, 20 nt, Artificial Sequence
  Synthetic oligonucleotide: Ptpn6-1580
uucggucuguaaccucccac

SEQ ID NO: 5954 - RNA, 20 nt, Artificial Sequence
  Synthetic oligonucleotide: Ptpn6-2206
cccacuggaauguaagcucc

SEQ ID NO: 5955 - RNA, 20 nt, Artificial Sequence
  Synthetic oligonucleotide: Ptpn6-2207
cacuggaauguaagcuccgu

SEQ ID NO: 5956 - RNA, 20 nt, Artificial Sequence
  Synthetic oligonucleotide: Ptpn6-2208
gaauguaagcuccgugagag

SEQ ID NO: 5957 - RNA, 17 nt, Artificial Sequence
  Synthetic oligonucleotide: Ptpn6-2209
uuuuuuuuuuuuuuuuu

SEQ ID NO: 5958 - RNA, 17 nt, Artificial Sequence
  Synthetic oligonucleotide: Ptpn6-2210
ccuuagccucuccauag

SEQ ID NO: 5959 - RNA, 17 nt, Artificial Sequence
  Synthetic oligonucleotide: Ptpn6-1634
cuuagccucuccauagc

SEQ ID NO: 5960 - RNA, 17 nt, Artificial Sequence
  Synthetic oligonucleotide: Ptpn6-2212
cuccauagcuggaacca

SEQ ID NO: 5961 - RNA, 17 nt, Artificial Sequence
  Synthetic oligonucleotide: Ptpn6-2213
uaauuucuuauuuuuug

SEQ ID NO: 5962 - RNA, 17 nt, Artificial Sequence
  Synthetic oligonucleotide: Ptpn6-2214
cuuauuuuuuguagaga

SEQ ID NO: 5963 - RNA, 17 nt, Artificial Sequence
  Synthetic oligonucleotide: Ptpn6-2215
aggcuggucucaaacuc

SEQ ID NO: 5964 - RNA, 17 nt, Artificial Sequence
  Synthetic oligonucleotide: Ptpn6-2216
cucagccucccacagug

SEQ ID NO: 5965 - RNA, 17 nt, Artificial Sequence
  Synthetic oligonucleotide: Ptpn6-1643
ucagccucccacagugc

SEQ ID NO: 5966 - RNA, 17 nt, Artificial Sequence
  Synthetic oligonucleotide: Ptpn6-2218
gugcugggaucacaggu

SEQ ID NO: 5967 - RNA, 17 nt, Artificial Sequence
  Synthetic oligonucleotide: Ptpn6-2219
uuuucugcguaauacuu

SEQ ID NO: 5968 - RNA, 17 nt, Artificial Sequence
  Synthetic oligonucleotide: Ptpn6-2220
uucugcguaauacuucu

SEQ ID NO: 5969 - RNA, 17 nt, Artificial Sequence
  Synthetic oligonucleotide: Ptpn6-2221
ugcaaugauccaauuua

SEQ ID NO: 5970 - RNA, 17 nt, Artificial Sequence
  Synthetic oligonucleotide: Ptpn6-2222
cggucuguaaccuccca

SEQ ID NO: 5971 - RNA, 17 nt, Artificial Sequence
  Synthetic oligonucleotide: Ptpn6-1651
ggucuguaaccucccac

SEQ ID NO: 5972 - RNA, 17 nt, Artificial Sequence
  Synthetic oligonucleotide: Ptpn6-2224
acuggaauguaagcucc

SEQ ID NO: 5973 - RNA, 17 nt, Artificial Sequence
  Synthetic oligonucleotide: Ptpn6-2225
uggaauguaagcuccgu

SEQ ID NO: 5974 - RNA, 17 nt, Artificial Sequence
  Synthetic oligonucleotide: Ptpn6-2226
uguaagcuccgugagag

SEQ ID NO: 5975 - RNA, 20 nt, Artificial Sequence
  Synthetic oligonucleotide: Ptpn6-2227
ugggucccucagcgcccugg

SEQ ID NO: 5976 - RNA, 20 nt, Artificial Sequence
  Synthetic oligonucleotide: Ptpn6-2228
uccccuucccccggggcagg

SEQ ID NO: 5977 - RNA, 20 nt, Artificial Sequence
  Synthetic oligonucleotide: Ptpn6-2229
cccuucccccggggcagguu

SEQ ID NO: 5978 - RNA, 20 nt, Artificial Sequence
  Synthetic oligonucleotide: Ptpn6-2230
ccuuuccaggccccaucccc

SEQ ID NO: 5979 - RNA, 20 nt, Artificial Sequence
  Synthetic oligonucleotide: Ptpn6-2231
gcuccucccuaugguccugg

SEQ ID NO: 5980 - RNA, 20 nt, Artificial Sequence
  Synthetic oligonucleotide: Ptpn6-2232
ggcugggccuaacccugccc

SEQ ID NO: 5981 - RNA, 20 nt, Artificial Sequence
  Synthetic oligonucleotide: Ptpn6-2233
gccccagggccuaacccuac

SEQ ID NO: 5982 - RNA, 20 nt, Artificial Sequence
  Synthetic oligonucleotide: Ptpn6-2234
cugaggcuccuccccuuccc

SEQ ID NO: 5983 - RNA, 20 nt, Artificial Sequence
  Synthetic oligonucleotide: Ptpn6-1398
ugaggcuccuccccuucccc

SEQ ID NO: 5984 - RNA, 20 nt, Artificial Sequence
  Synthetic oligonucleotide: Ptpn6-2236
ccccggggcagguugagagg

SEQ ID NO: 5985 - RNA, 20 nt, Artificial Sequence
  Synthetic oligonucleotide: Ptpn6-1403
cccggggcagguugagaggc

SEQ ID NO: 5986 - RNA, 20 nt, Artificial Sequence
  Synthetic oligonucleotide: Ptpn6-2238
gggcagguugagaggcugga

SEQ ID NO: 5987 - RNA, 20 nt, Artificial Sequence
  Synthetic oligonucleotide: Ptpn6-2239
ggagugggucccucagcgcc

SEQ ID NO: 5988 - RNA, 20 nt, Artificial Sequence
  Synthetic oligonucleotide: Ptpn6-2240
ucccucagcgcccugggugg

SEQ ID NO: 5989 - RNA, 17 nt, Artificial Sequence
  Synthetic oligonucleotide: Ptpn6-2241
gucccucagcgcccugg

SEQ ID NO: 5990 - RNA, 17 nt, Artificial Sequence
  Synthetic oligonucleotide: Ptpn6-2242
ccuucccccggggcagg

SEQ ID NO: 5991 - RNA, 17 nt, Artificial Sequence
  Synthetic oligonucleotide: Ptpn6-2243
uucccccggggcagguu

SEQ ID NO: 5992 - RNA, 17 nt, Artificial Sequence
  Synthetic oligonucleotide: Ptpn6-2244
uuccaggccccaucccc

SEQ ID NO: 5993 - RNA, 17 nt, Artificial Sequence
  Synthetic oligonucleotide: Ptpn6-2245
ccucccuaugguccugg

SEQ ID NO: 5994 - RNA, 17 nt, Artificial Sequence
  Synthetic oligonucleotide: Ptpn6-2246
ugggccuaacccugccc

SEQ ID NO: 5995 - RNA, 17 nt, Artificial Sequence
  Synthetic oligonucleotide: Ptpn6-2247
ccagggccuaacccuac

SEQ ID NO: 5996 - RNA, 17 nt, Artificial Sequence
  Synthetic oligonucleotide: Ptpn6-2248
aggcuccuccccuuccc

SEQ ID NO: 5997 - RNA, 17 nt, Artificial Sequence
  Synthetic oligonucleotide: Ptpn6-1458
ggcuccuccccuucccc

SEQ ID NO: 5998 - RNA, 17 nt, Artificial Sequence
  Synthetic oligonucleotide: Ptpn6-2250
cggggcagguugagagg

SEQ ID NO: 5999 - RNA, 17 nt, Artificial Sequence
  Synthetic oligonucleotide: Ptpn6-1463
ggggcagguugagaggc

SEQ ID NO: 6000 - RNA, 17 nt, Artificial Sequence
  Synthetic oligonucleotide: Ptpn6-2252
cagguugagaggcugga

SEQ ID NO: 6001 - RNA, 17 nt, Artificial Sequence
  Synthetic oligonucleotide: Ptpn6-2253
gugggucccucagcgcc

SEQ ID NO: 6002 - RNA, 17 nt, Artificial Sequence
  Synthetic oligonucleotide: Ptpn6-2254
cucagcgcccugggugg

SEQ ID NO: 6003 - RNA, 20 nt, Artificial Sequence
  Synthetic oligonucleotide: Ptpn6-2255
gggaggagcuguucaggggg

SEQ ID NO: 6004 - RNA, 20 nt, Artificial Sequence
  Synthetic oligonucleotide: Ptpn6-1538
ggaggagcuguucaggggga

SEQ ID NO: 6005 - RNA, 20 nt, Artificial Sequence
  Synthetic oligonucleotide: Ptpn6-1545
cuggaaaggcagagggaauc

SEQ ID NO: 6006 - RNA, 20 nt, Artificial Sequence
  Synthetic oligonucleotide: Ptpn6-1546
uggaaaggcagagggaauca

SEQ ID NO: 6007 - RNA, 20 nt, Artificial Sequence
  Synthetic oligonucleotide: Ptpn6-2259
aaaggcagagggaaucaggg

SEQ ID NO: 6008 - RNA, 20 nt, Artificial Sequence
  Synthetic oligonucleotide: Ptpn6-1510
cccacccacccagggcgcug

SEQ ID NO: 6009 - RNA, 20 nt, Artificial Sequence
  Synthetic oligonucleotide: Ptpn6-2261
gccucagguaggguuaggcc

SEQ ID NO: 6010 - RNA, 20 nt, Artificial Sequence
  Synthetic oligonucleotide: Ptpn6-2262
ggggcaggguuaggcccagc

SEQ ID NO: 6011 - RNA, 20 nt, Artificial Sequence
  Synthetic oligonucleotide: Ptpn6-2263
gcuguucagggggauggggc

SEQ ID NO: 6012 - RNA, 20 nt, Artificial Sequence
  Synthetic oligonucleotide: Ptpn6-1541
cuguucagggggauggggcc

SEQ ID NO: 6013 - RNA, 20 nt, Artificial Sequence
  Synthetic oligonucleotide: Ptpn6-2265
aggcccacccacccagggcg

SEQ ID NO: 6014 - RNA, 20 nt, Artificial Sequence
  Synthetic oligonucleotide: Ptpn6-2266
gcccacccacccagggcgcu

SEQ ID NO: 6015 - RNA, 20 nt, Artificial Sequence
  Synthetic oligonucleotide: Ptpn6-2267
cuccagccucucaaccugcc

SEQ ID NO: 6016 - RNA, 20 nt, Artificial Sequence
  Synthetic oligonucleotide: Ptpn6-1512
uccagccucucaaccugccc

SEQ ID NO: 6017 - RNA, 20 nt, Artificial Sequence
  Synthetic oligonucleotide: Ptpn6-1513
ccagccucucaaccugcccc

SEQ ID NO: 6018 - RNA, 20 nt, Artificial Sequence
  Synthetic oligonucleotide: Ptpn6-1514
cagccucucaaccugccccg

SEQ ID NO: 6019 - RNA, 20 nt, Artificial Sequence
  Synthetic oligonucleotide: Ptpn6-1515
agccucucaaccugccccgg

SEQ ID NO: 6020 - RNA, 20 nt, Artificial Sequence
  Synthetic oligonucleotide: Ptpn6-2272
cucucaaccugccccggggg

SEQ ID NO: 6021 - RNA, 20 nt, Artificial Sequence
  Synthetic oligonucleotide: Ptpn6-1516
ucucaaccugccccggggga

SEQ ID NO: 6022 - RNA, 20 nt, Artificial Sequence
  Synthetic oligonucleotide: Ptpn6-1517
cucaaccugccccgggggaa

SEQ ID NO: 6023 - RNA, 20 nt, Artificial Sequence
  Synthetic oligonucleotide: Ptpn6-1518
ucaaccugccccgggggaag

SEQ ID NO: 6024 - RNA, 20 nt, Artificial Sequence
  Synthetic oligonucleotide: Ptpn6-2276
aaccugccccgggggaaggg

SEQ ID NO: 6025 - RNA, 20 nt, Artificial Sequence
  Synthetic oligonucleotide: Ptpn6-1519
accugccccgggggaagggg

SEQ ID NO: 6026 - RNA, 20 nt, Artificial Sequence
  Synthetic oligonucleotide: Ptpn6-2278
ggaaggggaggagccucagg

SEQ ID NO: 6027 - RNA, 20 nt, Artificial Sequence
  Synthetic oligonucleotide: Ptpn6-1524
ccucagguaggguuaggccc

SEQ ID NO: 6028 - RNA, 20 nt, Artificial Sequence
  Synthetic oligonucleotide: Ptpn6-2280
gguaggguuaggcccugggg

SEQ ID NO: 6029 - RNA, 20 nt, Artificial Sequence
  Synthetic oligonucleotide: Ptpn6-2281
guuaggcccagccaggacca

SEQ ID NO: 6030 - RNA, 20 nt, Artificial Sequence
  Synthetic oligonucleotide: Ptpn6-1531
uuaggcccagccaggaccau

SEQ ID NO: 6031 - RNA, 20 nt, Artificial Sequence
  Synthetic oligonucleotide: Ptpn6-1532
uaggcccagccaggaccaua

SEQ ID NO: 6032 - RNA, 20 nt, Artificial Sequence
  Synthetic oligonucleotide: Ptpn6-2284
ggcccagccaggaccauagg

SEQ ID NO: 6033 - RNA, 20 nt, Artificial Sequence
  Synthetic oligonucleotide: Ptpn6-1533
gcccagccaggaccauaggg

SEQ ID NO: 6034 - RNA, 20 nt, Artificial Sequence
  Synthetic oligonucleotide: Ptpn6-2286
gaccauagggaggagcuguu

SEQ ID NO: 6035 - RNA, 20 nt, Artificial Sequence
  Synthetic oligonucleotide: Ptpn6-1534
accauagggaggagcuguuc

SEQ ID NO: 6036 - RNA, 20 nt, Artificial Sequence
  Synthetic oligonucleotide: Ptpn6-1535
ccauagggaggagcuguuca

SEQ ID NO: 6037 - RNA, 20 nt, Artificial Sequence
  Synthetic oligonucleotide: Ptpn6-1536
cauagggaggagcuguucag

SEQ ID NO: 6038 - RNA, 20 nt, Artificial Sequence
  Synthetic oligonucleotide: Ptpn6-2290
ggggauggggccuggaaagg

SEQ ID NO: 6039 - RNA, 20 nt, Artificial Sequence
  Synthetic oligonucleotide: Ptpn6-2291
ggauggggccuggaaaggca

SEQ ID NO: 6040 - RNA, 20 nt, Artificial Sequence
  Synthetic oligonucleotide: Ptpn6-1543
gauggggccuggaaaggcag

SEQ ID NO: 6041 - RNA, 20 nt, Artificial Sequence
  Synthetic oligonucleotide: Ptpn6-1544
auggggccuggaaaggcaga

SEQ ID NO: 6042 - RNA, 20 nt, Artificial Sequence
  Synthetic oligonucleotide: Ptpn6-2294
ccuggaaaggcagagggaau

SEQ ID NO: 6043 - RNA, 20 nt, Artificial Sequence
  Synthetic oligonucleotide: Ptpn6-1547
aaggcagagggaaucaggga

SEQ ID NO: 6044 - RNA, 20 nt, Artificial Sequence
  Synthetic oligonucleotide: Ptpn6-2296
ggcagagggaaucagggaag

SEQ ID NO: 6045 - RNA, 20 nt, Artificial Sequence
  Synthetic oligonucleotide: Ptpn6-2297
agggaaucagggaaggagag

SEQ ID NO: 6046 - RNA, 20 nt, Artificial Sequence
  Synthetic oligonucleotide: Ptpn6-1548
gggaaucagggaaggagaga

SEQ ID NO: 6047 - RNA, 20 nt, Artificial Sequence
  Synthetic oligonucleotide: Ptpn6-1549
ggaaucagggaaggagagau

SEQ ID NO: 6048 - RNA, 20 nt, Artificial Sequence
  Synthetic oligonucleotide: Ptpn6-2300
auggggguugucagguccgc

SEQ ID NO: 6049 - RNA, 17 nt, Artificial Sequence
  Synthetic oligonucleotide: Ptpn6-2301
aggagcuguucaggggg

SEQ ID NO: 6050 - RNA, 17 nt, Artificial Sequence
  Synthetic oligonucleotide: Ptpn6-1609
ggagcuguucaggggga

SEQ ID NO: 6051 - RNA, 17 nt, Artificial Sequence
  Synthetic oligonucleotide: Ptpn6-1616
gaaaggcagagggaauc

SEQ ID NO: 6052 - RNA, 17 nt, Artificial Sequence
  Synthetic oligonucleotide: Ptpn6-1617
aaaggcagagggaauca

SEQ ID NO: 6053 - RNA, 17 nt, Artificial Sequence
  Synthetic oligonucleotide: Ptpn6-2305
ggcagagggaaucaggg

SEQ ID NO: 6054 - RNA, 17 nt, Artificial Sequence
  Synthetic oligonucleotide: Ptpn6-1581
acccacccagggcgcug

SEQ ID NO: 6055 - RNA, 17 nt, Artificial Sequence
  Synthetic oligonucleotide: Ptpn6-2307
ucagguaggguuaggcc

SEQ ID NO: 6056 - RNA, 17 nt, Artificial Sequence
  Synthetic oligonucleotide: Ptpn6-2308
gcaggguuaggcccagc

SEQ ID NO: 6057 - RNA, 17 nt, Artificial Sequence
  Synthetic oligonucleotide: Ptpn6-2309
guucagggggauggggc

SEQ ID NO: 6058 - RNA, 17 nt, Artificial Sequence
  Synthetic oligonucleotide: Ptpn6-1612
uucagggggauggggcc

SEQ ID NO: 6059 - RNA, 17 nt, Artificial Sequence
  Synthetic oligonucleotide: Ptpn6-2311
cccacccacccagggcg

SEQ ID NO: 6060 - RNA, 17 nt, Artificial Sequence
  Synthetic oligonucleotide: Ptpn6-2312
cacccacccagggcgcu

SEQ ID NO: 6061 - RNA, 17 nt, Artificial Sequence
  Synthetic oligonucleotide: Ptpn6-2313
cagccucucaaccugcc

SEQ ID NO: 6062 - RNA, 17 nt, Artificial Sequence
  Synthetic oligonucleotide: Ptpn6-1583
agccucucaaccugccc

SEQ ID NO: 6063 - RNA, 17 nt, Artificial Sequence
  Synthetic oligonucleotide: Ptpn6-1584
gccucucaaccugcccc

SEQ ID NO: 6064 - RNA, 17 nt, Artificial Sequence
  Synthetic oligonucleotide: Ptpn6-1585
ccucucaaccugccccg

SEQ ID NO: 6065 - RNA, 17 nt, Artificial Sequence
  Synthetic oligonucleotide: Ptpn6-1586
cucucaaccugccccgg

SEQ ID NO: 6066 - RNA, 17 nt, Artificial Sequence
  Synthetic oligonucleotide: Ptpn6-2318
ucaaccugccccggggg

SEQ ID NO: 6067 - RNA, 17 nt, Artificial Sequence
  Synthetic oligonucleotide: Ptpn6-1587
caaccugccccggggga

SEQ ID NO: 6068 - RNA, 17 nt, Artificial Sequence
  Synthetic oligonucleotide: Ptpn6-1588
aaccugccccgggggaa

SEQ ID NO: 6069 - RNA, 17 nt, Artificial Sequence
  Synthetic oligonucleotide: Ptpn6-1589
accugccccgggggaag

SEQ ID NO: 6070 - RNA, 17 nt, Artificial Sequence
  Synthetic oligonucleotide: Ptpn6-2322
cugccccgggggaaggg

SEQ ID NO: 6071 - RNA, 17 nt, Artificial Sequence
  Synthetic oligonucleotide: Ptpn6-1590
ugccccgggggaagggg

SEQ ID NO: 6072 - RNA, 17 nt, Artificial Sequence
  Synthetic oligonucleotide: Ptpn6-2324
aggggaggagccucagg

SEQ ID NO: 6073 - RNA, 17 nt, Artificial Sequence
  Synthetic oligonucleotide: Ptpn6-1595
cagguaggguuaggccc

SEQ ID NO: 6074 - RNA, 17 nt, Artificial Sequence
  Synthetic oligonucleotide: Ptpn6-2326
aggguuaggcccugggg

SEQ ID NO: 6075 - RNA, 17 nt, Artificial Sequence
  Synthetic oligonucleotide: Ptpn6-2327
aggcccagccaggacca

SEQ ID NO: 6076 - RNA, 17 nt, Artificial Sequence
  Synthetic oligonucleotide: Ptpn6-1602
ggcccagccaggaccau

SEQ ID NO: 6077 - RNA, 17 nt, Artificial Sequence
  Synthetic oligonucleotide: Ptpn6-1603
gcccagccaggaccaua

SEQ ID NO: 6078 - RNA, 17 nt, Artificial Sequence
  Synthetic oligonucleotide: Ptpn6-2330
ccagccaggaccauagg

SEQ ID NO: 6079 - RNA, 17 nt, Artificial Sequence
  Synthetic oligonucleotide: Ptpn6-1604
cagccaggaccauaggg

SEQ ID NO: 6080 - RNA, 17 nt, Artificial Sequence
  Synthetic oligonucleotide: Ptpn6-2332
cauagggaggagcuguu

SEQ ID NO: 6081 - RNA, 17 nt, Artificial Sequence
  Synthetic oligonucleotide: Ptpn6-1605
auagggaggagcuguuc

SEQ ID NO: 6082 - RNA, 17 nt, Artificial Sequence
  Synthetic oligonucleotide: Ptpn6-1606
uagggaggagcuguuca

SEQ ID NO: 6083 - RNA, 17 nt, Artificial Sequence
  Synthetic oligonucleotide: Ptpn6-1607
agggaggagcuguucag

SEQ ID NO: 6084 - RNA, 17 nt, Artificial Sequence
  Synthetic oligonucleotide: Ptpn6-2336
gauggggccuggaaagg

SEQ ID NO: 6085 - RNA, 17 nt, Artificial Sequence
  Synthetic oligonucleotide: Ptpn6-2337
uggggccuggaaaggca

SEQ ID NO: 6086 - RNA, 17 nt, Artificial Sequence
  Synthetic oligonucleotide: Ptpn6-1614
ggggccuggaaaggcag

SEQ ID NO: 6087 - RNA, 17 nt, Artificial Sequence
  Synthetic oligonucleotide: Ptpn6-1615
gggccuggaaaggcaga

SEQ ID NO: 6088 - RNA, 17 nt, Artificial Sequence
  Synthetic oligonucleotide: Ptpn6-2340
ggaaaggcagagggaau

SEQ ID NO: 6089 - RNA, 17 nt, Artificial Sequence
  Synthetic oligonucleotide: Ptpn6-1618
gcagagggaaucaggga

SEQ ID NO: 6090 - RNA, 17 nt, Artificial Sequence
  Synthetic oligonucleotide: Ptpn6-2342
agagggaaucagggaag

SEQ ID NO: 6091 - RNA, 17 nt, Artificial Sequence
  Synthetic oligonucleotide: Ptpn6-2343
gaaucagggaaggagag

SEQ ID NO: 6092 - RNA, 17 nt, Artificial Sequence
  Synthetic oligonucleotide: Ptpn6-1619
aaucagggaaggagaga

SEQ ID NO: 6093 - RNA, 17 nt, Artificial Sequence
  Synthetic oligonucleotide: Ptpn6-1620
aucagggaaggagagau

SEQ ID NO: 6094 - RNA, 17 nt, Artificial Sequence
  Synthetic oligonucleotide: Ptpn6-2346
gggguugucagguccgc

SEQ ID NO: 6095 - RNA, 20 nt, Artificial Sequence
  Synthetic oligonucleotide: Ptpn6-1657
ucucugaggaacugggcugu

SEQ ID NO: 6096 - RNA, 20 nt, Artificial Sequence
  Synthetic oligonucleotide: Ptpn6-2348
ggcaggaucgaggaggaagu

SEQ ID NO: 6097 - RNA, 17 nt, Artificial Sequence
  Synthetic oligonucleotide: Ptpn6-1720
cugaggaacugggcugu

SEQ ID NO: 6098 - RNA, 17 nt, Artificial Sequence
  Synthetic oligonucleotide: Ptpn6-2350
aggaucgaggaggaagu

SEQ ID NO: 6099 - RNA, 20 nt, Artificial Sequence
  Synthetic oligonucleotide: Ptpn6-2351
acuuccuccucgauccugcc

SEQ ID NO: 6100 - RNA, 20 nt, Artificial Sequence
  Synthetic oligonucleotide: Ptpn6-1230
acagcccaguuccucagaga

SEQ ID NO: 6101 - RNA, 17 nt, Artificial Sequence
  Synthetic oligonucleotide: Ptpn6-2353
acuuccuccucgauccu

SEQ ID NO: 6102 - RNA, 17 nt, Artificial Sequence
  Synthetic oligonucleotide: Ptpn6-2354
acagcccaguuccucag

SEQ ID NO: 6103 - RNA, 20 nt, Artificial Sequence
  Synthetic oligonucleotide: Ptpn6-2355
aacccaauaaauuggaucau

SEQ ID NO: 6104 - RNA, 20 nt, Artificial Sequence
  Synthetic oligonucleotide: Ptpn6-2356
cacugugggaggcugaggcg

SEQ ID NO: 6105 - RNA, 20 nt, Artificial Sequence
  Synthetic oligonucleotide: Ptpn6-2357
gaggucaaggcugcagucag

SEQ ID NO: 6106 - RNA, 17 nt, Artificial Sequence
  Synthetic oligonucleotide: Ptpn6-2358
ccaauaaauuggaucau

SEQ ID NO: 6107 - RNA, 17 nt, Artificial Sequence
  Synthetic oligonucleotide: Ptpn6-2359
ugugggaggcugaggcg

SEQ ID NO: 6108 - RNA, 20 nt, Artificial Sequence
  Synthetic oligonucleotide: Ptpn6-2360
gacaacccccaucucuccuu

SEQ ID NO: 6109 - RNA, 17 nt, Artificial Sequence
  Synthetic oligonucleotide: Ptpn6-2361
aacccccaucucuccuu

SEQ ID NO: 6110 - RNA, 17 nt, Artificial Sequence
  Synthetic oligonucleotide: Ptpn6-2362
gucaaggcugcagucag

SEQ ID NO: 6111 - RNA, 20 nt, Artificial Sequence
  Synthetic oligonucleotide: Ptpn6-2363
cugacugcagccuugaccuc

SEQ ID NO: 6112 - RNA, 20 nt, Artificial Sequence
  Synthetic oligonucleotide: Ptpn6-2198
cgccucagccucccacagug

SEQ ID NO: 6113 - RNA, 20 nt, Artificial Sequence
  Synthetic oligonucleotide: Ptpn6-2365
augauccaauuuauuggguu

SEQ ID NO: 6114 - RNA, 17 nt, Artificial Sequence
  Synthetic oligonucleotide: Ptpn6-2366
cugacugcagccuugac

SEQ ID NO: 6115 - RNA, 17 nt, Artificial Sequence
  Synthetic oligonucleotide: Ptpn6-2367
cgccucagccucccaca

SEQ ID NO: 6116 - RNA, 17 nt, Artificial Sequence
  Synthetic oligonucleotide: Ptpn6-2368
augauccaauuuauugg

SEQ ID NO: 6117 - RNA, 20 nt, Artificial Sequence
  Synthetic oligonucleotide: Ptpn6-1552
aaggagagauggggguuguc

SEQ ID NO: 6118 - RNA, 17 nt, Artificial Sequence
  Synthetic oligonucleotide: Ptpn6-2370
aaggagagauggggguu

SEQ ID NO: 6119 - DNA, 20 bp, Artificial Sequence
  Synthetic oligonucleotide: CBLB-2289
gggtattattgatgctattc

SEQ ID NO: 6120 - DNA, 20 bp, Artificial Sequence
  Synthetic oligonucleotide: CBLB-2299
gatctgcggcagcttgctta

SEQ ID NO: 6121 - DNA, 20 bp, Artificial Sequence
  Synthetic oligonucleotide: CBLB-2293
gcaggaccgtggagaagact

SEQ ID NO: 6122 - DNA, 20 bp, Artificial Sequence
  Synthetic oligonucleotide: CBLB-2305
ggatttcctcctcgaccacc

SEQ ID NO: 6123 - DNA, 20 bp, Artificial Sequence
  Synthetic oligonucleotide: CBLB-2306
gatttcctcctcgaccacca

SEQ ID NO: 6124 - DNA, 20 bp, Artificial Sequence
  Synthetic oligonucleotide: CBLB-2315
gtactcattctcactgagtt

SEQ ID NO: 6125 - DNA, 17 bp, Artificial Sequence
  Synthetic oligonucleotide: CBLB-2327
gtatgaagaacagtcac

SEQ ID NO: 6126 - DNA, 17 bp, Artificial Sequence
  Synthetic oligonucleotide: CBLB-2360
gcggcagcttgcttagg

SEQ ID NO: 6127 - DNA, 20 bp, Artificial Sequence
  Synthetic oligonucleotide: CBLB-2286
cgaggaggaaatccccgaaa

SEQ ID NO: 6128 - DNA, 20 bp, Artificial Sequence
  Synthetic oligonucleotide: CBLB-2287
tccccgaaaaggtcgaattt

SEQ ID NO: 6129 - DNA, 20 bp, Artificial Sequence
  Synthetic oligonucleotide: CBLB-2288
ccccgaaaaggtcgaatttt

SEQ ID NO: 6130 - DNA, 20 bp, Artificial Sequence
  Synthetic oligonucleotide: CBLB-2291
agcaagctgccgcagatcgc

SEQ ID NO: 6131 - DNA, 20 bp, Artificial Sequence
  Synthetic oligonucleotide: CBLB-2292
tgccgcagatcgcaggaccg

SEQ ID NO: 6132 - DNA, 20 bp, Artificial Sequence
  Synthetic oligonucleotide: CBLB-2297
ctccacggtcctgcgatctg

SEQ ID NO: 6133 - DNA, 20 bp, Artificial Sequence
  Synthetic oligonucleotide: CBLB-2298
cgatctgcggcagcttgctt

SEQ ID NO: 6134 - DNA, 20 bp, Artificial Sequence
  Synthetic oligonucleotide: CBLB-2300
atctgcggcagcttgcttag

SEQ ID NO: 6135 - DNA, 20 bp, Artificial Sequence
  Synthetic oligonucleotide: CBLB-2301
tctgcggcagcttgcttagg

SEQ ID NO: 6136 - DNA, 20 bp, Artificial Sequence
  Synthetic oligonucleotide: CBLB-2302
tacccaaaattcgacctttt

SEQ ID NO: 6137 - DNA, 20 bp, Artificial Sequence
  Synthetic oligonucleotide: CBLB-2303
acccaaaattcgaccttttc

SEQ ID NO: 6138 - DNA, 20 bp, Artificial Sequence
  Synthetic oligonucleotide: CBLB-2304
cccaaaattcgaccttttcg

SEQ ID NO: 6139 - DNA, 20 bp, Artificial Sequence
  Synthetic oligonucleotide: CBLB-2313
cccgttttgactttttcata

SEQ ID NO: 6140 - DNA, 20 bp, Artificial Sequence
  Synthetic oligonucleotide: CBLB-2314
agtactcattctcactgagt

SEQ ID NO: 6141 - DNA, 20 bp, Artificial Sequence
  Synthetic oligonucleotide: CBLB-2317
cgtaaatgctgatatgtatc

SEQ ID NO: 6142 - DNA, 17 bp, Artificial Sequence
  Synthetic oligonucleotide: CBLB-2331
actcattctcactgagt

SEQ ID NO: 6143 - DNA, 17 bp, Artificial Sequence
  Synthetic oligonucleotide: CBLB-2332
ctcattctcactgagtt

SEQ ID NO: 6144 - DNA, 17 bp, Artificial Sequence
  Synthetic oligonucleotide: CBLB-2333
tgagttgggcaagtttc

SEQ ID NO: 6145 - DNA, 17 bp, Artificial Sequence
  Synthetic oligonucleotide: CBLB-2334
aaatgctgatatgtatc

SEQ ID NO: 6146 - DNA, 17 bp, Artificial Sequence
  Synthetic oligonucleotide: CBLB-2337
tatcaagtatatatggt

SEQ ID NO: 6147 - DNA, 17 bp, Artificial Sequence
  Synthetic oligonucleotide: CBLB-2346
ccgaaaaggtcgaattt

SEQ ID NO: 6148 - DNA, 17 bp, Artificial Sequence
  Synthetic oligonucleotide: CBLB-2350
aagctgccgcagatcgc

SEQ ID NO: 6149 - DNA, 17 bp, Artificial Sequence
  Synthetic oligonucleotide: CBLB-2351
cgcagatcgcaggaccg

SEQ ID NO: 6150 - DNA, 17 bp, Artificial Sequence
  Synthetic oligonucleotide: CBLB-2359
tgcggcagcttgcttag

SEQ ID NO: 6151 - DNA, 17 bp, Artificial Sequence
  Synthetic oligonucleotide: CBLB-2363
aaaattcgaccttttcg

SEQ ID NO: 6152 - DNA, 20 bp, Artificial Sequence
  Synthetic oligonucleotide: CBLB-2284
ggcagaaaccctggtggtcg

SEQ ID NO: 6153 - DNA, 20 bp, Artificial Sequence
  Synthetic oligonucleotide: CBLB-2290
gatgctattcaggatgcagt

SEQ ID NO: 6154 - DNA, 20 bp, Artificial Sequence
  Synthetic oligonucleotide: CBLB-2294
ggagaagacttggaagctca

SEQ ID NO: 6155 - DNA, 20 bp, Artificial Sequence
  Synthetic oligonucleotide: CBLB-2296
gagcttccaagtcttctcca

SEQ ID NO: 6156 - DNA, 20 bp, Artificial Sequence
  Synthetic oligonucleotide: CBLB-2308
gccttatgaaaaagtcaaaa

SEQ ID NO: 6157 - DNA, 20 bp, Artificial Sequence
  Synthetic oligonucleotide: CBLB-2312
gaagaatatttcagatgttt

SEQ ID NO: 6158 - DNA, 20 bp, Artificial Sequence
  Synthetic oligonucleotide: CBLB-2318
ggcaaaatatcaagtatata

SEQ ID NO: 6159 - DNA, 20 bp, Artificial Sequence
  Synthetic oligonucleotide: CBLB-2321
gctatttttcaactgaagtt

SEQ ID NO: 6160 - DNA, 17 bp, Artificial Sequence
  Synthetic oligonucleotide: CBLB-2329
gaatatttcagatgttt

SEQ ID NO: 6161 - DNA, 17 bp, Artificial Sequence
  Synthetic oligonucleotide: CBLB-2330
gttttgactttttcata

SEQ ID NO: 6162 - DNA, 17 bp, Artificial Sequence
  Synthetic oligonucleotide: CBLB-2345
ggaggaaatccccgaaa

SEQ ID NO: 6163 - DNA, 17 bp, Artificial Sequence
  Synthetic oligonucleotide: CBLB-2349
gctattcaggatgcagt

SEQ ID NO: 6164 - DNA, 17 bp, Artificial Sequence
  Synthetic oligonucleotide: CBLB-2352
ggaccgtggagaagact

SEQ ID NO: 6165 - DNA, 17 bp, Artificial Sequence
  Synthetic oligonucleotide: CBLB-2353
gaagacttggaagctca

SEQ ID NO: 6166 - DNA, 17 bp, Artificial Sequence
  Synthetic oligonucleotide: CBLB-2354
gaagctcatggacaaag

SEQ ID NO: 6167 - DNA, 20 bp, Artificial Sequence
  Synthetic oligonucleotide: CBLB-2282
tcaatgaatggcagaaaccc

SEQ ID NO: 6168 - DNA, 20 bp, Artificial Sequence
  Synthetic oligonucleotide: CBLB-2283
atgaatggcagaaaccctgg

SEQ ID NO: 6169 - DNA, 20 bp, Artificial Sequence
  Synthetic oligonucleotide: CBLB-2285
agaaaccctggtggtcgagg

SEQ ID NO: 6170 - DNA, 20 bp, Artificial Sequence
  Synthetic oligonucleotide: CBLB-2295
ttggaagctcatggacaaag

SEQ ID NO: 6171 - DNA, 20 bp, Artificial Sequence
  Synthetic oligonucleotide: CBLB-2307
ttatttttatctttgttttt

SEQ ID NO: 6172 - DNA, 20 bp, Artificial Sequence
  Synthetic oligonucleotide: CBLB-2309
ccttatgaaaaagtcaaaac

SEQ ID NO: 6173 - DNA, 20 bp, Artificial Sequence
  Synthetic oligonucleotide: CBLB-2310
aatgtatgaagaacagtcac

SEQ ID NO: 6174 - DNA, 20 bp, Artificial Sequence
  Synthetic oligonucleotide: CBLB-2311
atgaagaacagtcacaggac

SEQ ID NO: 6175 - DNA, 20 bp, Artificial Sequence
  Synthetic oligonucleotide: CBLB-2316
cactgagttgggcaagtttc

SEQ ID NO: 6176 - DNA, 20 bp, Artificial Sequence
  Synthetic oligonucleotide: CBLB-2319
aaaatatcaagtatatatgg

SEQ ID NO: 6177 - DNA, 20 bp, Artificial Sequence
  Synthetic oligonucleotide: CBLB-2320
aaatatcaagtatatatggt

SEQ ID NO: 6178 - DNA, 20 bp, Artificial Sequence
  Synthetic oligonucleotide: CBLB-2322
ctatttttcaactgaagttt

SEQ ID NO: 6179 - DNA, 20 bp, Artificial Sequence
  Synthetic oligonucleotide: CBLB-2323
tcaactgaagtttgggattt

SEQ ID NO: 6180 - DNA, 17 bp, Artificial Sequence
  Synthetic oligonucleotide: CBLB-2324
tttttatctttgttttt

SEQ ID NO: 6181 - DNA, 17 bp, Artificial Sequence
  Synthetic oligonucleotide: CBLB-2325
ttatgaaaaagtcaaaa

SEQ ID NO: 6182 - DNA, 17 bp, Artificial Sequence
  Synthetic oligonucleotide: CBLB-2326
tatgaaaaagtcaaaac

SEQ ID NO: 6183 - DNA, 17 bp, Artificial Sequence
  Synthetic oligonucleotide: CBLB-2328
aagaacagtcacaggac

SEQ ID NO: 6184 - DNA, 17 bp, Artificial Sequence
  Synthetic oligonucleotide: CBLB-2335
aaaatatcaagtatata

SEQ ID NO: 6185 - DNA, 17 bp, Artificial Sequence
  Synthetic oligonucleotide: CBLB-2336
atatcaagtatatatgg

SEQ ID NO: 6186 - DNA, 17 bp, Artificial Sequence
  Synthetic oligonucleotide: CBLB-2338
atttttcaactgaagtt

SEQ ID NO: 6187 - DNA, 17 bp, Artificial Sequence
  Synthetic oligonucleotide: CBLB-2339
tttttcaactgaagttt

SEQ ID NO: 6188 - DNA, 17 bp, Artificial Sequence
  Synthetic oligonucleotide: CBLB-2340
actgaagtttgggattt

SEQ ID NO: 6189 - DNA, 17 bp, Artificial Sequence
  Synthetic oligonucleotide: CBLB-2341
atgaatggcagaaaccc

SEQ ID NO: 6190 - DNA, 17 bp, Artificial Sequence
  Synthetic oligonucleotide: CBLB-2342
aatggcagaaaccctgg

SEQ ID NO: 6191 - DNA, 17 bp, Artificial Sequence
  Synthetic oligonucleotide: CBLB-2343
agaaaccctggtggtcg

SEQ ID NO: 6192 - DNA, 17 bp, Artificial Sequence
  Synthetic oligonucleotide: CBLB-2344
aaccctggtggtcgagg

SEQ ID NO: 6193 - DNA, 17 bp, Artificial Sequence
  Synthetic oligonucleotide: CBLB-2347
cgaaaaggtcgaatttt

SEQ ID NO: 6194 - DNA, 17 bp, Artificial Sequence
  Synthetic oligonucleotide: CBLB-2348
tattattgatgctattc

SEQ ID NO: 6195 - DNA, 17 bp, Artificial Sequence
  Synthetic oligonucleotide: CBLB-2355
cttccaagtcttctcca

SEQ ID NO: 6196 - DNA, 17 bp, Artificial Sequence
  Synthetic oligonucleotide: CBLB-2356
cacggtcctgcgatctg

SEQ ID NO: 6197 - DNA, 17 bp, Artificial Sequence
  Synthetic oligonucleotide: CBLB-2357
tctgcggcagcttgctt

SEQ ID NO: 6198 - DNA, 17 bp, Artificial Sequence
  Synthetic oligonucleotide: CBLB-2358
ctgcggcagcttgctta

SEQ ID NO: 6199 - DNA, 17 bp, Artificial Sequence
  Synthetic oligonucleotide: CBLB-2361
ccaaaattcgacctttt

SEQ ID NO: 6200 - DNA, 17 bp, Artificial Sequence
  Synthetic oligonucleotide: CBLB-2362
caaaattcgaccttttc

SEQ ID NO: 6201 - DNA, 17 bp, Artificial Sequence
  Synthetic oligonucleotide: CBLB-2364
tttcctcctcgaccacc

SEQ ID NO: 6202 - DNA, 17 bp, Artificial Sequence
  Synthetic oligonucleotide: CBLB-2365
ttcctcctcgaccacca

SEQ ID NO: 6203 - DNA, 20 bp, Artificial Sequence
  Synthetic oligonucleotide: CBLB-2312
gaagaatatttcagatgttt

SEQ ID NO: 6204 - DNA, 20 bp, Artificial Sequence
  Synthetic oligonucleotide: CBLB-630
ccttatcttcagtcacatgc

SEQ ID NO: 6205 - DNA, 20 bp, Artificial Sequence
  Synthetic oligonucleotide: CBLB-631
atcaaagcaatctttcccaa

SEQ ID NO: 6206 - DNA, 20 bp, Artificial Sequence
  Synthetic oligonucleotide: CBLB-632
ctttcccaatggtcaattcc

SEQ ID NO: 6207 - DNA, 20 bp, Artificial Sequence
  Synthetic oligonucleotide: CBLB-633
tttcccaatggtcaattcca

SEQ ID NO: 6208 - DNA, 20 bp, Artificial Sequence
  Synthetic oligonucleotide: CBLB-634
aagcagatgctgctgaattc

SEQ ID NO: 6209 - DNA, 20 bp, Artificial Sequence
  Synthetic oligonucleotide: CBLB-635
gaattctggagaaagttttt

SEQ ID NO: 6210 - DNA, 20 bp, Artificial Sequence
  Synthetic oligonucleotide: CBLB-636
aaaaatcatttttatagctg

SEQ ID NO: 6211 - DNA, 20 bp, Artificial Sequence
  Synthetic oligonucleotide: CBLB-637
tgcacagaactatcgtacca

SEQ ID NO: 6212 - DNA, 20 bp, Artificial Sequence
  Synthetic oligonucleotide: CBLB-638
attcagacagtgccttcatg

SEQ ID NO: 6213 - DNA, 20 bp, Artificial Sequence
  Synthetic oligonucleotide: CBLB-639
gaggtccaccagattagctc

SEQ ID NO: 6214 - DNA, 20 bp, Artificial Sequence
  Synthetic oligonucleotide: CBLB-640
ccaccagattagctctggcc

SEQ ID NO: 6215 - DNA, 20 bp, Artificial Sequence
  Synthetic oligonucleotide: CBLB-641
tagctctggcctggaagcaa

SEQ ID NO: 6216 - DNA, 20 bp, Artificial Sequence
  Synthetic oligonucleotide: CBLB-642
ttgaatttgatatttttacc

SEQ ID NO: 6217 - DNA, 20 bp, Artificial Sequence
  Synthetic oligonucleotide: CBLB-643
tatttttaccaggctgtttc

SEQ ID NO: 6218 - DNA, 20 bp, Artificial Sequence
  Synthetic oligonucleotide: CBLB-644
atttttttattttttagcct

SEQ ID NO: 6219 - DNA, 20 bp, Artificial Sequence
  Synthetic oligonucleotide: CBLB-645
tttttttattttttagcctt

SEQ ID NO: 6220 - DNA, 20 bp, Artificial Sequence
  Synthetic oligonucleotide: CBLB-646
ttttttattttttagccttg

SEQ ID NO: 6221 - DNA, 20 bp, Artificial Sequence
  Synthetic oligonucleotide: CBLB-647
agccttggggctctattttg

SEQ ID NO: 6222 - DNA, 20 bp, Artificial Sequence
  Synthetic oligonucleotide: CBLB-648
ggggctctattttgcggaat

SEQ ID NO: 6223 - DNA, 20 bp, Artificial Sequence
  Synthetic oligonucleotide: CBLB-649
ttcttagctgtgacacatcc

SEQ ID NO: 6224 - DNA, 20 bp, Artificial Sequence
  Synthetic oligonucleotide: CBLB-650
tgtgacacatccaggttaca

SEQ ID NO: 6225 - DNA, 20 bp, Artificial Sequence
  Synthetic oligonucleotide: CBLB-651
cagaaatatagcaccaaacc

SEQ ID NO: 6226 - DNA, 20 bp, Artificial Sequence
  Synthetic oligonucleotide: CBLB-652
aatatagcaccaaacccgga

SEQ ID NO: 6227 - DNA, 20 bp, Artificial Sequence
  Synthetic oligonucleotide: CBLB-653
tgttttgcagctatattttc

SEQ ID NO: 6228 - DNA, 20 bp, Artificial Sequence
  Synthetic oligonucleotide: CBLB-654
ccggttaagttgcactcgat

SEQ ID NO: 6229 - DNA, 20 bp, Artificial Sequence
  Synthetic oligonucleotide: CBLB-655
cggttaagttgcactcgatt

SEQ ID NO: 6230 - DNA, 20 bp, Artificial Sequence
  Synthetic oligonucleotide: CBLB-656
gttgcactcgattgggacag

SEQ ID NO: 6231 - DNA, 20 bp, Artificial Sequence
  Synthetic oligonucleotide: CBLB-657
ttgcactcgattgggacagt

SEQ ID NO: 6232 - DNA, 20 bp, Artificial Sequence
  Synthetic oligonucleotide: CBLB-658
cgattgggacagtgggccat

SEQ ID NO: 6233 - DNA, 20 bp, Artificial Sequence
  Synthetic oligonucleotide: CBLB-659
tgggccattggctatgtgac

SEQ ID NO: 6234 - DNA, 20 bp, Artificial Sequence
  Synthetic oligonucleotide: CBLB-660
gggccattggctatgtgact

SEQ ID NO: 6235 - DNA, 20 bp, Artificial Sequence
  Synthetic oligonucleotide: CBLB-661
ggccattggctatgtgactg

SEQ ID NO: 6236 - DNA, 20 bp, Artificial Sequence
  Synthetic oligonucleotide: CBLB-662
attggctatgtgactgggga

SEQ ID NO: 6237 - DNA, 20 bp, Artificial Sequence
  Synthetic oligonucleotide: CBLB-663
ttggctatgtgactggggat

SEQ ID NO: 6238 - DNA, 20 bp, Artificial Sequence
  Synthetic oligonucleotide: CBLB-664
ttatttcaagccctgattga

SEQ ID NO: 6239 - DNA, 20 bp, Artificial Sequence
  Synthetic oligonucleotide: CBLB-665
aagccctgattgatggcagc

SEQ ID NO: 6240 - DNA, 20 bp, Artificial Sequence
  Synthetic oligonucleotide: CBLB-666
agccctgattgatggcagca

SEQ ID NO: 6241 - DNA, 20 bp, Artificial Sequence
  Synthetic oligonucleotide: CBLB-667
ctgattgatggcagcaggga

SEQ ID NO: 6242 - DNA, 20 bp, Artificial Sequence
  Synthetic oligonucleotide: CBLB-668
aggattgtaagtatgagaaa

SEQ ID NO: 6243 - DNA, 20 bp, Artificial Sequence
  Synthetic oligonucleotide: CBLB-669
taagtatgagaaatggaagt

SEQ ID NO: 6244 - DNA, 20 bp, Artificial Sequence
  Synthetic oligonucleotide: CBLB-670
ttcagttatctttatcctga

SEQ ID NO: 6245 - DNA, 20 bp, Artificial Sequence
  Synthetic oligonucleotide: CBLB-671
tcagttatctttatcctgat

SEQ ID NO: 6246 - DNA, 20 bp, Artificial Sequence
  Synthetic oligonucleotide: CBLB-672
gttatctttatcctgatggg

SEQ ID NO: 6247 - DNA, 20 bp, Artificial Sequence
  Synthetic oligonucleotide: CBLB-673
agttataatcctgatttaac

SEQ ID NO: 6248 - DNA, 20 bp, Artificial Sequence
  Synthetic oligonucleotide: CBLB-674
tgaccatataaaagttacac

SEQ ID NO: 6249 - DNA, 20 bp, Artificial Sequence
  Synthetic oligonucleotide: CBLB-675
atataaaagttacacaggta

SEQ ID NO: 6250 - DNA, 20 bp, Artificial Sequence
  Synthetic oligonucleotide: CBLB-676
ctccctcctccccaaattcc

SEQ ID NO: 6251 - DNA, 20 bp, Artificial Sequence
  Synthetic oligonucleotide: CBLB-677
atatgaattatattgtgaaa

SEQ ID NO: 6252 - DNA, 20 bp, Artificial Sequence
  Synthetic oligonucleotide: CBLB-678
tatgaattatattgtgaaat

SEQ ID NO: 6253 - DNA, 20 bp, Artificial Sequence
  Synthetic oligonucleotide: CBLB-679
gatgtcaagattgagccttg

SEQ ID NO: 6254 - DNA, 20 bp, Artificial Sequence
  Synthetic oligonucleotide: CBLB-680
atgtcaagattgagccttgt

SEQ ID NO: 6255 - DNA, 20 bp, Artificial Sequence
  Synthetic oligonucleotide: CBLB-681
gatgtgcacctcttgcctta

SEQ ID NO: 6256 - DNA, 20 bp, Artificial Sequence
  Synthetic oligonucleotide: CBLB-682
gcacctcttgccttacggca

SEQ ID NO: 6257 - DNA, 20 bp, Artificial Sequence
  Synthetic oligonucleotide: CBLB-683
ctcttgccttacggcatggc

SEQ ID NO: 6258 - DNA, 20 bp, Artificial Sequence
  Synthetic oligonucleotide: CBLB-684
aggtataatcattagcaaca

SEQ ID NO: 6259 - DNA, 20 bp, Artificial Sequence
  Synthetic oligonucleotide: CBLB-685
catgcattttctatttgttt

SEQ ID NO: 6260 - DNA, 20 bp, Artificial Sequence
  Synthetic oligonucleotide: CBLB-686
ttttctatttgtttaggagt

SEQ ID NO: 6261 - DNA, 20 bp, Artificial Sequence
  Synthetic oligonucleotide: CBLB-687
ctatttgtttaggagtcgga

SEQ ID NO: 6262 - DNA, 20 bp, Artificial Sequence
  Synthetic oligonucleotide: CBLB-688
tgtttaggagtcggatggtc

SEQ ID NO: 6263 - DNA, 20 bp, Artificial Sequence
  Synthetic oligonucleotide: CBLB-689
gtttaggagtcggatggtca

SEQ ID NO: 6264 - DNA, 20 bp, Artificial Sequence
  Synthetic oligonucleotide: CBLB-690
ttctgtcgttgtgaaataaa

SEQ ID NO: 6265 - DNA, 20 bp, Artificial Sequence
  Synthetic oligonucleotide: CBLB-691
aggaactgagcccataatcg

SEQ ID NO: 6266 - DNA, 20 bp, Artificial Sequence
  Synthetic oligonucleotide: CBLB-692
ccctttgatccaagagatga

SEQ ID NO: 6267 - DNA, 20 bp, Artificial Sequence
  Synthetic oligonucleotide: CBLB-693
atccaagagatgaaggctcc

SEQ ID NO: 6268 - DNA, 20 bp, Artificial Sequence
  Synthetic oligonucleotide: CBLB-694
tgcagcatcattgacccctt

SEQ ID NO: 6269 - DNA, 20 bp, Artificial Sequence
  Synthetic oligonucleotide: CBLB-695
tggcatgccgatgctagact

SEQ ID NO: 6270 - DNA, 20 bp, Artificial Sequence
  Synthetic oligonucleotide: CBLB-696
ggacgacgatgatgatcgtg

SEQ ID NO: 6271 - DNA, 20 bp, Artificial Sequence
  Synthetic oligonucleotide: CBLB-697
aggagtccttgatgatgaat

SEQ ID NO: 6272 - DNA, 20 bp, Artificial Sequence
  Synthetic oligonucleotide: CBLB-698
gtccttgatgatgaatcggt

SEQ ID NO: 6273 - DNA, 20 bp, Artificial Sequence
  Synthetic oligonucleotide: CBLB-699
tcggttggcaaacgtccgaa

SEQ ID NO: 6274 - DNA, 20 bp, Artificial Sequence
  Synthetic oligonucleotide: CBLB-700
gaaaggtaaaactagaaaca

SEQ ID NO: 6275 - DNA, 20 bp, Artificial Sequence
  Synthetic oligonucleotide: CBLB-701
aaaggtaaaactagaaacat

SEQ ID NO: 6276 - DNA, 20 bp, Artificial Sequence
  Synthetic oligonucleotide: CBLB-702
tagaaacatgggtttagtta

SEQ ID NO: 6277 - DNA, 20 bp, Artificial Sequence
  Synthetic oligonucleotide: CBLB-703
ttctgttctagtgcactgac

SEQ ID NO: 6278 - DNA, 20 bp, Artificial Sequence
  Synthetic oligonucleotide: CBLB-704
aactcaccagtcacatcacc

SEQ ID NO: 6279 - DNA, 20 bp, Artificial Sequence
  Synthetic oligonucleotide: CBLB-705
gccacccgtgcctcctcgcc

SEQ ID NO: 6280 - DNA, 20 bp, Artificial Sequence
  Synthetic oligonucleotide: CBLB-706
cgcctggatctaattcagaa

SEQ ID NO: 6281 - DNA, 20 bp, Artificial Sequence
  Synthetic oligonucleotide: CBLB-707
ggcatagttagatctccctg

SEQ ID NO: 6282 - DNA, 20 bp, Artificial Sequence
  Synthetic oligonucleotide: CBLB-708
atctccctgtggcagcccaa

SEQ ID NO: 6283 - DNA, 20 bp, Artificial Sequence
  Synthetic oligonucleotide: CBLB-709
tctccctgtggcagcccaac

SEQ ID NO: 6284 - DNA, 20 bp, Artificial Sequence
  Synthetic oligonucleotide: CBLB-710
cagcccaacgggttcaccaa

SEQ ID NO: 6285 - DNA, 20 bp, Artificial Sequence
  Synthetic oligonucleotide: CBLB-711
tctttagtcttctccttgca

SEQ ID NO: 6286 - DNA, 20 bp, Artificial Sequence
  Synthetic oligonucleotide: CBLB-712
gagtagacacatccatcatg

SEQ ID NO: 6287 - DNA, 20 bp, Artificial Sequence
  Synthetic oligonucleotide: CBLB-713
cgccaatgcctcttgaagca

SEQ ID NO: 6288 - DNA, 20 bp, Artificial Sequence
  Synthetic oligonucleotide: CBLB-714
ctcttgaagcatggtgccct

SEQ ID NO: 6289 - DNA, 20 bp, Artificial Sequence
  Synthetic oligonucleotide: CBLB-715
tcttgaagcatggtgccctc

SEQ ID NO: 6290 - DNA, 20 bp, Artificial Sequence
  Synthetic oligonucleotide: CBLB-716
tggtgccctcgggatgtgtt

SEQ ID NO: 6291 - DNA, 20 bp, Artificial Sequence
  Synthetic oligonucleotide: CBLB-717
ggtgccctcgggatgtgttt

SEQ ID NO: 6292 - DNA, 20 bp, Artificial Sequence
  Synthetic oligonucleotide: CBLB-718
gtttgggactaatcagcttg

SEQ ID NO: 6293 - DNA, 20 bp, Artificial Sequence
  Synthetic oligonucleotide: CBLB-719
tttgggactaatcagcttgt

SEQ ID NO: 6294 - DNA, 20 bp, Artificial Sequence
  Synthetic oligonucleotide: CBLB-720
cttgtgggatgtcgactcct

SEQ ID NO: 6295 - DNA, 20 bp, Artificial Sequence
  Synthetic oligonucleotide: CBLB-721
ttgtgggatgtcgactccta

SEQ ID NO: 6296 - DNA, 20 bp, Artificial Sequence
  Synthetic oligonucleotide: CBLB-722
tgtgggatgtcgactcctag

SEQ ID NO: 6297 - DNA, 20 bp, Artificial Sequence
  Synthetic oligonucleotide: CBLB-723
gggatgtcgactcctagggg

SEQ ID NO: 6298 - DNA, 20 bp, Artificial Sequence
  Synthetic oligonucleotide: CBLB-724
ggatgtcgactcctagggga

SEQ ID NO: 6299 - DNA, 20 bp, Artificial Sequence
  Synthetic oligonucleotide: CBLB-725
ggggagggctctccaaaacc

SEQ ID NO: 6300 - DNA, 20 bp, Artificial Sequence
  Synthetic oligonucleotide: CBLB-726
acagcgagttcaaatgtcaa

SEQ ID NO: 6301 - DNA, 20 bp, Artificial Sequence
  Synthetic oligonucleotide: CBLB-727
cgagttcaaatgtcaatgga

SEQ ID NO: 6302 - DNA, 20 bp, Artificial Sequence
  Synthetic oligonucleotide: CBLB-728
caatggaaggcacagtagag

SEQ ID NO: 6303 - DNA, 20 bp, Artificial Sequence
  Synthetic oligonucleotide: CBLB-729
aatggaaggcacagtagagt

SEQ ID NO: 6304 - DNA, 20 bp, Artificial Sequence
  Synthetic oligonucleotide: CBLB-730
gctctgacccagtgcttatg

SEQ ID NO: 6305 - DNA, 20 bp, Artificial Sequence
  Synthetic oligonucleotide: CBLB-731
cgccatgatttgcctttaga

SEQ ID NO: 6306 - DNA, 20 bp, Artificial Sequence
  Synthetic oligonucleotide: CBLB-732
tttgcctttagaaggagcta

SEQ ID NO: 6307 - DNA, 20 bp, Artificial Sequence
  Synthetic oligonucleotide: CBLB-733
taacaatttgatttactttc

SEQ ID NO: 6308 - DNA, 20 bp, Artificial Sequence
  Synthetic oligonucleotide: CBLB-734
tactttcaggtcttttccaa

SEQ ID NO: 6309 - DNA, 20 bp, Artificial Sequence
  Synthetic oligonucleotide: CBLB-735
gtcttttccaatggtcacct

SEQ ID NO: 6310 - DNA, 20 bp, Artificial Sequence
  Synthetic oligonucleotide: CBLB-736
aagaatatgatgttcctccc

SEQ ID NO: 6311 - DNA, 20 bp, Artificial Sequence
  Synthetic oligonucleotide: CBLB-737
aaagtgagttttgttgaatt

SEQ ID NO: 6312 - DNA, 20 bp, Artificial Sequence
  Synthetic oligonucleotide: CBLB-738
agattggattttttttcccc

SEQ ID NO: 6313 - DNA, 20 bp, Artificial Sequence
  Synthetic oligonucleotide: CBLB-739
tggattttttttcccctggt

SEQ ID NO: 6314 - DNA, 20 bp, Artificial Sequence
  Synthetic oligonucleotide: CBLB-740
ttttcccctggtaggtgtac

SEQ ID NO: 6315 - DNA, 20 bp, Artificial Sequence
  Synthetic oligonucleotide: CBLB-741
gaaaacaagagacccagtag

SEQ ID NO: 6316 - DNA, 20 bp, Artificial Sequence
  Synthetic oligonucleotide: CBLB-742
ataatgtaaaacctcctgtt

SEQ ID NO: 6317 - DNA, 20 bp, Artificial Sequence
  Synthetic oligonucleotide: CBLB-743
cctcctgttcggtaagagta

SEQ ID NO: 6318 - DNA, 20 bp, Artificial Sequence
  Synthetic oligonucleotide: CBLB-744
ctcctgttcggtaagagtat

SEQ ID NO: 6319 - DNA, 20 bp, Artificial Sequence
  Synthetic oligonucleotide: CBLB-745
tttactctgaactgtccttt

SEQ ID NO: 6320 - DNA, 20 bp, Artificial Sequence
  Synthetic oligonucleotide: CBLB-746
tcctttaggtcttgtgataa

SEQ ID NO: 6321 - DNA, 20 bp, Artificial Sequence
  Synthetic oligonucleotide: CBLB-747
aatggtcactgtatgctgaa

SEQ ID NO: 6322 - DNA, 20 bp, Artificial Sequence
  Synthetic oligonucleotide: CBLB-748
tgtatgctgaatggaacaca

SEQ ID NO: 6323 - DNA, 20 bp, Artificial Sequence
  Synthetic oligonucleotide: CBLB-749
tgacttaagcatatatttaa

SEQ ID NO: 6324 - DNA, 20 bp, Artificial Sequence
  Synthetic oligonucleotide: CBLB-750
gacttaagcatatatttaaa

SEQ ID NO: 6325 - DNA, 20 bp, Artificial Sequence
  Synthetic oligonucleotide: CBLB-751
aaggttttgtgttatcctct

SEQ ID NO: 6326 - DNA, 20 bp, Artificial Sequence
  Synthetic oligonucleotide: CBLB-752
ccgtgccattaccacctgcc

SEQ ID NO: 6327 - DNA, 20 bp, Artificial Sequence
  Synthetic oligonucleotide: CBLB-753
cacctgccaggcctccaact

SEQ ID NO: 6328 - DNA, 20 bp, Artificial Sequence
  Synthetic oligonucleotide: CBLB-754
acctgccaggcctccaactc

SEQ ID NO: 6329 - DNA, 20 bp, Artificial Sequence
  Synthetic oligonucleotide: CBLB-755
actcgggacaatccaaagca

SEQ ID NO: 6330 - DNA, 20 bp, Artificial Sequence
  Synthetic oligonucleotide: CBLB-756
agcatggttcttcactcaac

SEQ ID NO: 6331 - DNA, 20 bp, Artificial Sequence
  Synthetic oligonucleotide: CBLB-757
gatcttctcatccctccatt

SEQ ID NO: 6332 - DNA, 20 bp, Artificial Sequence
  Synthetic oligonucleotide: CBLB-758
atcgacctttctttaaatgc

SEQ ID NO: 6333 - DNA, 20 bp, Artificial Sequence
  Synthetic oligonucleotide: CBLB-759
cacctcccccacctcctgca

SEQ ID NO: 6334 - DNA, 20 bp, Artificial Sequence
  Synthetic oligonucleotide: CBLB-760
attgaacattcaaaacctcc

SEQ ID NO: 6335 - DNA, 20 bp, Artificial Sequence
  Synthetic oligonucleotide: CBLB-761
aacctcctggctccagtagc

SEQ ID NO: 6336 - DNA, 20 bp, Artificial Sequence
  Synthetic oligonucleotide: CBLB-762
tccagtagccggccatcctc

SEQ ID NO: 6337 - DNA, 20 bp, Artificial Sequence
  Synthetic oligonucleotide: CBLB-763
tagccggccatcctcaggac

SEQ ID NO: 6338 - DNA, 20 bp, Artificial Sequence
  Synthetic oligonucleotide: CBLB-764
gatctttttcttcttccttc

SEQ ID NO: 6339 - DNA, 20 bp, Artificial Sequence
  Synthetic oligonucleotide: CBLB-765
tttttcttcttccttcaggt

SEQ ID NO: 6340 - DNA, 20 bp, Artificial Sequence
  Synthetic oligonucleotide: CBLB-766
ttcttcttccttcaggtagg

SEQ ID NO: 6341 - DNA, 20 bp, Artificial Sequence
  Synthetic oligonucleotide: CBLB-767
tcttcttccttcaggtagga

SEQ ID NO: 6342 - DNA, 20 bp, Artificial Sequence
  Synthetic oligonucleotide: CBLB-768
ccctttgttgatctagcaag

SEQ ID NO: 6343 - DNA, 20 bp, Artificial Sequence
  Synthetic oligonucleotide: CBLB-769
ttcctttgcctcctgctaga

SEQ ID NO: 6344 - DNA, 20 bp, Artificial Sequence
  Synthetic oligonucleotide: CBLB-770
cctcctgctagaaggttacc

SEQ ID NO: 6345 - DNA, 20 bp, Artificial Sequence
  Synthetic oligonucleotide: CBLB-771
caaaactaacagaacatcac

SEQ ID NO: 6346 - DNA, 20 bp, Artificial Sequence
  Synthetic oligonucleotide: CBLB-772
gatcagcttccttcatgttc

SEQ ID NO: 6347 - DNA, 20 bp, Artificial Sequence
  Synthetic oligonucleotide: CBLB-773
tccttcatgttcaggtgagt

SEQ ID NO: 6348 - DNA, 20 bp, Artificial Sequence
  Synthetic oligonucleotide: CBLB-774
tctttaaaaatctacacaga

SEQ ID NO: 6349 - DNA, 20 bp, Artificial Sequence
  Synthetic oligonucleotide: CBLB-775
aatctacacagatggttcac

SEQ ID NO: 6350 - DNA, 20 bp, Artificial Sequence
  Synthetic oligonucleotide: CBLB-776
cccctaaaccacgaccgcgc

SEQ ID NO: 6351 - DNA, 20 bp, Artificial Sequence
  Synthetic oligonucleotide: CBLB-777
attcaccacagaaaacccca

SEQ ID NO: 6352 - DNA, 20 bp, Artificial Sequence
  Synthetic oligonucleotide: CBLB-778
ttcaccacagaaaaccccat

SEQ ID NO: 6353 - DNA, 20 bp, Artificial Sequence
  Synthetic oligonucleotide: CBLB-779
cagaaaaccccatgggcctg

SEQ ID NO: 6354 - DNA, 20 bp, Artificial Sequence
  Synthetic oligonucleotide: CBLB-780
aaaaccccatgggcctgagg

SEQ ID NO: 6355 - DNA, 20 bp, Artificial Sequence
  Synthetic oligonucleotide: CBLB-781
ccatgggcctgaggcggcat

SEQ ID NO: 6356 - DNA, 20 bp, Artificial Sequence
  Synthetic oligonucleotide: CBLB-782
tgcaaaaattgcaaaactca

SEQ ID NO: 6357 - DNA, 20 bp, Artificial Sequence
  Synthetic oligonucleotide: CBLB-783
gcaaaaattgcaaaactcat

SEQ ID NO: 6358 - DNA, 20 bp, Artificial Sequence
  Synthetic oligonucleotide: CBLB-784
aattgcaaaactcatgggag

SEQ ID NO: 6359 - DNA, 20 bp, Artificial Sequence
  Synthetic oligonucleotide: CBLB-785
attgcaaaactcatgggaga

SEQ ID NO: 6360 - DNA, 20 bp, Artificial Sequence
  Synthetic oligonucleotide: CBLB-786
agagggttatgcctttgaag

SEQ ID NO: 6361 - DNA, 20 bp, Artificial Sequence
  Synthetic oligonucleotide: CBLB-787
agaataatgtcgaagttgcc

SEQ ID NO: 6362 - DNA, 20 bp, Artificial Sequence
  Synthetic oligonucleotide: CBLB-788
cagaactgtagacaccaaaa

SEQ ID NO: 6363 - DNA, 17 bp, Artificial Sequence
  Synthetic oligonucleotide: CBLB-2329
gaatatttcagatgttt

SEQ ID NO: 6364 - DNA, 17 bp, Artificial Sequence
  Synthetic oligonucleotide: CBLB-790
tatcttcagtcacatgc

SEQ ID NO: 6365 - DNA, 17 bp, Artificial Sequence
  Synthetic oligonucleotide: CBLB-791
aaagcaatctttcccaa

SEQ ID NO: 6366 - DNA, 17 bp, Artificial Sequence
  Synthetic oligonucleotide: CBLB-792
tcccaatggtcaattcc

SEQ ID NO: 6367 - DNA, 17 bp, Artificial Sequence
  Synthetic oligonucleotide: CBLB-793
cccaatggtcaattcca

SEQ ID NO: 6368 - DNA, 17 bp, Artificial Sequence
  Synthetic oligonucleotide: CBLB-794
cagatgctgctgaattc

SEQ ID NO: 6369 - DNA, 17 bp, Artificial Sequence
  Synthetic oligonucleotide: CBLB-795
ttctggagaaagttttt

SEQ ID NO: 6370 - DNA, 17 bp, Artificial Sequence
  Synthetic oligonucleotide: CBLB-796
aatcatttttatagctg

SEQ ID NO: 6371 - DNA, 17 bp, Artificial Sequence
  Synthetic oligonucleotide: CBLB-797
acagaactatcgtacca

SEQ ID NO: 6372 - DNA, 17 bp, Artificial Sequence
  Synthetic oligonucleotide: CBLB-798
cagacagtgccttcatg

SEQ ID NO: 6373 - DNA, 17 bp, Artificial Sequence
  Synthetic oligonucleotide: CBLB-799
gtccaccagattagctc

SEQ ID NO: 6374 - DNA, 17 bp, Artificial Sequence
  Synthetic oligonucleotide: CBLB-800
ccagattagctctggcc

SEQ ID NO: 6375 - DNA, 17 bp, Artificial Sequence
  Synthetic oligonucleotide: CBLB-801
ctctggcctggaagcaa

SEQ ID NO: 6376 - DNA, 17 bp, Artificial Sequence
  Synthetic oligonucleotide: CBLB-802
aatttgatatttttacc

SEQ ID NO: 6377 - DNA, 17 bp, Artificial Sequence
  Synthetic oligonucleotide: CBLB-803
ttttaccaggctgtttc

SEQ ID NO: 6378 - DNA, 17 bp, Artificial Sequence
  Synthetic oligonucleotide: CBLB-804
tttttattttttagcct

SEQ ID NO: 6379 - DNA, 17 bp, Artificial Sequence
  Synthetic oligonucleotide: CBLB-805
ttttattttttagcctt

SEQ ID NO: 6380 - DNA, 17 bp, Artificial Sequence
  Synthetic oligonucleotide: CBLB-806
tttattttttagccttg

SEQ ID NO: 6381 - DNA, 17 bp, Artificial Sequence
  Synthetic oligonucleotide: CBLB-807
cttggggctctattttg

SEQ ID NO: 6382 - DNA, 17 bp, Artificial Sequence
  Synthetic oligonucleotide: CBLB-808
gctctattttgcggaat

SEQ ID NO: 6383 - DNA, 17 bp, Artificial Sequence
  Synthetic oligonucleotide: CBLB-809
ttagctgtgacacatcc

SEQ ID NO: 6384 - DNA, 17 bp, Artificial Sequence
  Synthetic oligonucleotide: CBLB-810
gacacatccaggttaca

SEQ ID NO: 6385 - DNA, 17 bp, Artificial Sequence
  Synthetic oligonucleotide: CBLB-811
aaatatagcaccaaacc

SEQ ID NO: 6386 - DNA, 17 bp, Artificial Sequence
  Synthetic oligonucleotide: CBLB-812
atagcaccaaacccgga

SEQ ID NO: 6387 - DNA, 17 bp, Artificial Sequence
  Synthetic oligonucleotide: CBLB-813
tttgcagctatattttc

SEQ ID NO: 6388 - DNA, 17 bp, Artificial Sequence
  Synthetic oligonucleotide: CBLB-814
gttaagttgcactcgat

SEQ ID NO: 6389 - DNA, 17 bp, Artificial Sequence
  Synthetic oligonucleotide: CBLB-815
ttaagttgcactcgatt

SEQ ID NO: 6390 - DNA, 17 bp, Artificial Sequence
  Synthetic oligonucleotide: CBLB-816
gcactcgattgggacag

SEQ ID NO: 6391 - DNA, 17 bp, Artificial Sequence
  Synthetic oligonucleotide: CBLB-817
cactcgattgggacagt

SEQ ID NO: 6392 - DNA, 17 bp, Artificial Sequence
  Synthetic oligonucleotide: CBLB-818
ttgggacagtgggccat

SEQ ID NO: 6393 - DNA, 17 bp, Artificial Sequence
  Synthetic oligonucleotide: CBLB-819
gccattggctatgtgac

SEQ ID NO: 6394 - DNA, 17 bp, Artificial Sequence
  Synthetic oligonucleotide: CBLB-820
ccattggctatgtgact

SEQ ID NO: 6395 - DNA, 17 bp, Artificial Sequence
  Synthetic oligonucleotide: CBLB-821
cattggctatgtgactg

SEQ ID NO: 6396 - DNA, 17 bp, Artificial Sequence
  Synthetic oligonucleotide: CBLB-822
ggctatgtgactgggga

SEQ ID NO: 6397 - DNA, 17 bp, Artificial Sequence
  Synthetic oligonucleotide: CBLB-823
gctatgtgactggggat

SEQ ID NO: 6398 - DNA, 17 bp, Artificial Sequence
  Synthetic oligonucleotide: CBLB-824
tttcaagccctgattga

SEQ ID NO: 6399 - DNA, 17 bp, Artificial Sequence
  Synthetic oligonucleotide: CBLB-825
ccctgattgatggcagc

SEQ ID NO: 6400 - DNA, 17 bp, Artificial Sequence
  Synthetic oligonucleotide: CBLB-826
cctgattgatggcagca

SEQ ID NO: 6401 - DNA, 17 bp, Artificial Sequence
  Synthetic oligonucleotide: CBLB-827
attgatggcagcaggga

SEQ ID NO: 6402 - DNA, 17 bp, Artificial Sequence
  Synthetic oligonucleotide: CBLB-828
attgtaagtatgagaaa

SEQ ID NO: 6403 - DNA, 17 bp, Artificial Sequence
  Synthetic oligonucleotide: CBLB-829
gtatgagaaatggaagt

SEQ ID NO: 6404 - DNA, 17 bp, Artificial Sequence
  Synthetic oligonucleotide: CBLB-830
agttatctttatcctga

SEQ ID NO: 6405 - DNA, 17 bp, Artificial Sequence
  Synthetic oligonucleotide: CBLB-831
gttatctttatcctgat

SEQ ID NO: 6406 - DNA, 17 bp, Artificial Sequence
  Synthetic oligonucleotide: CBLB-832
atctttatcctgatggg

SEQ ID NO: 6407 - DNA, 17 bp, Artificial Sequence
  Synthetic oligonucleotide: CBLB-833
tataatcctgatttaac

SEQ ID NO: 6408 - DNA, 17 bp, Artificial Sequence
  Synthetic oligonucleotide: CBLB-834
ccatataaaagttacac

SEQ ID NO: 6409 - DNA, 17 bp, Artificial Sequence
  Synthetic oligonucleotide: CBLB-835
taaaagttacacaggta

SEQ ID NO: 6410 - DNA, 17 bp, Artificial Sequence
  Synthetic oligonucleotide: CBLB-836
cctcctccccaaattcc

SEQ ID NO: 6411 - DNA, 17 bp, Artificial Sequence
  Synthetic oligonucleotide: CBLB-837
tgaattatattgtgaaa

SEQ ID NO: 6412 - DNA, 17 bp, Artificial Sequence
  Synthetic oligonucleotide: CBLB-838
gaattatattgtgaaat

SEQ ID NO: 6413 - DNA, 17 bp, Artificial Sequence
  Synthetic oligonucleotide: CBLB-839
gtcaagattgagccttg

SEQ ID NO: 6414 - DNA, 17 bp, Artificial Sequence
  Synthetic oligonucleotide: CBLB-840
tcaagattgagccttgt

SEQ ID NO: 6415 - DNA, 17 bp, Artificial Sequence
  Synthetic oligonucleotide: CBLB-841
gtgcacctcttgcctta

SEQ ID NO: 6416 - DNA, 17 bp, Artificial Sequence
  Synthetic oligonucleotide: CBLB-842
cctcttgccttacggca

SEQ ID NO: 6417 - DNA, 17 bp, Artificial Sequence
  Synthetic oligonucleotide: CBLB-843
ttgccttacggcatggc

SEQ ID NO: 6418 - DNA, 17 bp, Artificial Sequence
  Synthetic oligonucleotide: CBLB-844
tataatcattagcaaca

SEQ ID NO: 6419 - DNA, 17 bp, Artificial Sequence
  Synthetic oligonucleotide: CBLB-845
gcattttctatttgttt

SEQ ID NO: 6420 - DNA, 17 bp, Artificial Sequence
  Synthetic oligonucleotide: CBLB-846
tctatttgtttaggagt

SEQ ID NO: 6421 - DNA, 17 bp, Artificial Sequence
  Synthetic oligonucleotide: CBLB-847
tttgtttaggagtcgga

SEQ ID NO: 6422 - DNA, 17 bp, Artificial Sequence
  Synthetic oligonucleotide: CBLB-848
ttaggagtcggatggtc

SEQ ID NO: 6423 - DNA, 17 bp, Artificial Sequence
  Synthetic oligonucleotide: CBLB-849
taggagtcggatggtca

SEQ ID NO: 6424 - DNA, 17 bp, Artificial Sequence
  Synthetic oligonucleotide: CBLB-850
tgtcgttgtgaaataaa

SEQ ID NO: 6425 - DNA, 17 bp, Artificial Sequence
  Synthetic oligonucleotide: CBLB-851
aactgagcccataatcg

SEQ ID NO: 6426 - DNA, 17 bp, Artificial Sequence
  Synthetic oligonucleotide: CBLB-852
tttgatccaagagatga

SEQ ID NO: 6427 - DNA, 17 bp, Artificial Sequence
  Synthetic oligonucleotide: CBLB-853
caagagatgaaggctcc

SEQ ID NO: 6428 - DNA, 17 bp, Artificial Sequence
  Synthetic oligonucleotide: CBLB-854
agcatcattgacccctt

SEQ ID NO: 6429 - DNA, 17 bp, Artificial Sequence
  Synthetic oligonucleotide: CBLB-855
catgccgatgctagact

SEQ ID NO: 6430 - DNA, 17 bp, Artificial Sequence
  Synthetic oligonucleotide: CBLB-856
cgacgatgatgatcgtg

SEQ ID NO: 6431 - DNA, 17 bp, Artificial Sequence
  Synthetic oligonucleotide: CBLB-857
agtccttgatgatgaat

SEQ ID NO: 6432 - DNA, 17 bp, Artificial Sequence
  Synthetic oligonucleotide: CBLB-858
cttgatgatgaatcggt

SEQ ID NO: 6433 - DNA, 17 bp, Artificial Sequence
  Synthetic oligonucleotide: CBLB-859
gttggcaaacgtccgaa

SEQ ID NO: 6434 - DNA, 17 bp, Artificial Sequence
  Synthetic oligonucleotide: CBLB-860
aggtaaaactagaaaca

SEQ ID NO: 6435 - DNA, 17 bp, Artificial Sequence
  Synthetic oligonucleotide: CBLB-861
ggtaaaactagaaacat

SEQ ID NO: 6436 - DNA, 17 bp, Artificial Sequence
  Synthetic oligonucleotide: CBLB-862
aaacatgggtttagtta

SEQ ID NO: 6437 - DNA, 17 bp, Artificial Sequence
  Synthetic oligonucleotide: CBLB-863
tgttctagtgcactgac

SEQ ID NO: 6438 - DNA, 17 bp, Artificial Sequence
  Synthetic oligonucleotide: CBLB-864
tcaccagtcacatcacc

SEQ ID NO: 6439 - DNA, 17 bp, Artificial Sequence
  Synthetic oligonucleotide: CBLB-865
acccgtgcctcctcgcc

SEQ ID NO: 6440 - DNA, 17 bp, Artificial Sequence
  Synthetic oligonucleotide: CBLB-866
ctggatctaattcagaa

SEQ ID NO: 6441 - DNA, 17 bp, Artificial Sequence
  Synthetic oligonucleotide: CBLB-867
atagttagatctccctg

SEQ ID NO: 6442 - DNA, 17 bp, Artificial Sequence
  Synthetic oligonucleotide: CBLB-868
tccctgtggcagcccaa

SEQ ID NO: 6443 - DNA, 17 bp, Artificial Sequence
  Synthetic oligonucleotide: CBLB-869
ccctgtggcagcccaac

SEQ ID NO: 6444 - DNA, 17 bp, Artificial Sequence
  Synthetic oligonucleotide: CBLB-870
cccaacgggttcaccaa

SEQ ID NO: 6445 - DNA, 17 bp, Artificial Sequence
  Synthetic oligonucleotide: CBLB-871
ttagtcttctccttgca

SEQ ID NO: 6446 - DNA, 17 bp, Artificial Sequence
  Synthetic oligonucleotide: CBLB-872
tagacacatccatcatg

SEQ ID NO: 6447 - DNA, 17 bp, Artificial Sequence
  Synthetic oligonucleotide: CBLB-873
caatgcctcttgaagca

SEQ ID NO: 6448 - DNA, 17 bp, Artificial Sequence
  Synthetic oligonucleotide: CBLB-874
ttgaagcatggtgccct

SEQ ID NO: 6449 - DNA, 17 bp, Artificial Sequence
  Synthetic oligonucleotide: CBLB-875
tgaagcatggtgccctc

SEQ ID NO: 6450 - DNA, 17 bp, Artificial Sequence
  Synthetic oligonucleotide: CBLB-876
tgccctcgggatgtgtt

SEQ ID NO: 6451 - DNA, 17 bp, Artificial Sequence
  Synthetic oligonucleotide: CBLB-877
gccctcgggatgtgttt

SEQ ID NO: 6452 - DNA, 17 bp, Artificial Sequence
  Synthetic oligonucleotide: CBLB-878
tgggactaatcagcttg

SEQ ID NO: 6453 - DNA, 17 bp, Artificial Sequence
  Synthetic oligonucleotide: CBLB-879
gggactaatcagcttgt

SEQ ID NO: 6454 - DNA, 17 bp, Artificial Sequence
  Synthetic oligonucleotide: CBLB-880
gtgggatgtcgactcct

SEQ ID NO: 6455 - DNA, 17 bp, Artificial Sequence
  Synthetic oligonucleotide: CBLB-881
tgggatgtcgactccta

SEQ ID NO: 6456 - DNA, 17 bp, Artificial Sequence
  Synthetic oligonucleotide: CBLB-882
gggatgtcgactcctag

SEQ ID NO: 6457 - DNA, 17 bp, Artificial Sequence
  Synthetic oligonucleotide: CBLB-883
atgtcgactcctagggg

SEQ ID NO: 6458 - DNA, 17 bp, Artificial Sequence
  Synthetic oligonucleotide: CBLB-884
tgtcgactcctagggga

SEQ ID NO: 6459 - DNA, 17 bp, Artificial Sequence
  Synthetic oligonucleotide: CBLB-885
gagggctctccaaaacc

SEQ ID NO: 6460 - DNA, 17 bp, Artificial Sequence
  Synthetic oligonucleotide: CBLB-886
gcgagttcaaatgtcaa

SEQ ID NO: 6461 - DNA, 17 bp, Artificial Sequence
  Synthetic oligonucleotide: CBLB-887
gttcaaatgtcaatgga

SEQ ID NO: 6462 - DNA, 17 bp, Artificial Sequence
  Synthetic oligonucleotide: CBLB-888
tggaaggcacagtagag

SEQ ID NO: 6463 - DNA, 17 bp, Artificial Sequence
  Synthetic oligonucleotide: CBLB-889
ggaaggcacagtagagt

SEQ ID NO: 6464 - DNA, 17 bp, Artificial Sequence
  Synthetic oligonucleotide: CBLB-890
ctgacccagtgcttatg

SEQ ID NO: 6465 - DNA, 17 bp, Artificial Sequence
  Synthetic oligonucleotide: CBLB-891
catgatttgcctttaga

SEQ ID NO: 6466 - DNA, 17 bp, Artificial Sequence
  Synthetic oligonucleotide: CBLB-892
gcctttagaaggagcta

SEQ ID NO: 6467 - DNA, 17 bp, Artificial Sequence
  Synthetic oligonucleotide: CBLB-893
caatttgatttactttc

SEQ ID NO: 6468 - DNA, 17 bp, Artificial Sequence
  Synthetic oligonucleotide: CBLB-894
tttcaggtcttttccaa

SEQ ID NO: 6469 - DNA, 17 bp, Artificial Sequence
  Synthetic oligonucleotide: CBLB-895
ttttccaatggtcacct

SEQ ID NO: 6470 - DNA, 17 bp, Artificial Sequence
  Synthetic oligonucleotide: CBLB-896
aatatgatgttcctccc

SEQ ID NO: 6471 - DNA, 17 bp, Artificial Sequence
  Synthetic oligonucleotide: CBLB-897
gtgagttttgttgaatt

SEQ ID NO: 6472 - DNA, 17 bp, Artificial Sequence
  Synthetic oligonucleotide: CBLB-898
ttggattttttttcccc

SEQ ID NO: 6473 - DNA, 17 bp, Artificial Sequence
  Synthetic oligonucleotide: CBLB-899
attttttttcccctggt

SEQ ID NO: 6474 - DNA, 17 bp, Artificial Sequence
  Synthetic oligonucleotide: CBLB-900
tcccctggtaggtgtac

SEQ ID NO: 6475 - DNA, 17 bp, Artificial Sequence
  Synthetic oligonucleotide: CBLB-901
aacaagagacccagtag

SEQ ID NO: 6476 - DNA, 17 bp, Artificial Sequence
  Synthetic oligonucleotide: CBLB-902
atgtaaaacctcctgtt

SEQ ID NO: 6477 - DNA, 17 bp, Artificial Sequence
  Synthetic oligonucleotide: CBLB-903
cctgttcggtaagagta

SEQ ID NO: 6478 - DNA, 17 bp, Artificial Sequence
  Synthetic oligonucleotide: CBLB-904
ctgttcggtaagagtat

SEQ ID NO: 6479 - DNA, 17 bp, Artificial Sequence
  Synthetic oligonucleotide: CBLB-905
actctgaactgtccttt

SEQ ID NO: 6480 - DNA, 17 bp, Artificial Sequence
  Synthetic oligonucleotide: CBLB-906
tttaggtcttgtgataa

SEQ ID NO: 6481 - DNA, 17 bp, Artificial Sequence
  Synthetic oligonucleotide: CBLB-907
ggtcactgtatgctgaa

SEQ ID NO: 6482 - DNA, 17 bp, Artificial Sequence
  Synthetic oligonucleotide: CBLB-908
atgctgaatggaacaca

SEQ ID NO: 6483 - DNA, 17 bp, Artificial Sequence
  Synthetic oligonucleotide: CBLB-909
cttaagcatatatttaa

SEQ ID NO: 6484 - DNA, 17 bp, Artificial Sequence
  Synthetic oligonucleotide: CBLB-910
ttaagcatatatttaaa

SEQ ID NO: 6485 - DNA, 17 bp, Artificial Sequence
  Synthetic oligonucleotide: CBLB-911
gttttgtgttatcctct

SEQ ID NO: 6486 - DNA, 17 bp, Artificial Sequence
  Synthetic oligonucleotide: CBLB-912
tgccattaccacctgcc

SEQ ID NO: 6487 - DNA, 17 bp, Artificial Sequence
  Synthetic oligonucleotide: CBLB-913
ctgccaggcctccaact

SEQ ID NO: 6488 - DNA, 17 bp, Artificial Sequence
  Synthetic oligonucleotide: CBLB-914
tgccaggcctccaactc

SEQ ID NO: 6489 - DNA, 17 bp, Artificial Sequence
  Synthetic oligonucleotide: CBLB-915
cgggacaatccaaagca

SEQ ID NO: 6490 - DNA, 17 bp, Artificial Sequence
  Synthetic oligonucleotide: CBLB-916
atggttcttcactcaac

SEQ ID NO: 6491 - DNA, 17 bp, Artificial Sequence
  Synthetic oligonucleotide: CBLB-917
cttctcatccctccatt

SEQ ID NO: 6492 - DNA, 17 bp, Artificial Sequence
  Synthetic oligonucleotide: CBLB-918
gacctttctttaaatgc

SEQ ID NO: 6493 - DNA, 17 bp, Artificial Sequence
  Synthetic oligonucleotide: CBLB-919
ctcccccacctcctgca

SEQ ID NO: 6494 - DNA, 17 bp, Artificial Sequence
  Synthetic oligonucleotide: CBLB-920
gaacattcaaaacctcc

SEQ ID NO: 6495 - DNA, 17 bp, Artificial Sequence
  Synthetic oligonucleotide: CBLB-921
ctcctggctccagtagc

SEQ ID NO: 6496 - DNA, 17 bp, Artificial Sequence
  Synthetic oligonucleotide: CBLB-922
agtagccggccatcctc

SEQ ID NO: 6497 - DNA, 17 bp, Artificial Sequence
  Synthetic oligonucleotide: CBLB-923
ccggccatcctcaggac

SEQ ID NO: 6498 - DNA, 17 bp, Artificial Sequence
  Synthetic oligonucleotide: CBLB-924
ctttttcttcttccttc

SEQ ID NO: 6499 - DNA, 17 bp, Artificial Sequence
  Synthetic oligonucleotide: CBLB-925
ttcttcttccttcaggt

SEQ ID NO: 6500 - DNA, 17 bp, Artificial Sequence
  Synthetic oligonucleotide: CBLB-926
ttcttccttcaggtagg

SEQ ID NO: 6501 - DNA, 17 bp, Artificial Sequence
  Synthetic oligonucleotide: CBLB-927
tcttccttcaggtagga

SEQ ID NO: 6502 - DNA, 17 bp, Artificial Sequence
  Synthetic oligonucleotide: CBLB-928
tttgttgatctagcaag

SEQ ID NO: 6503 - DNA, 17 bp, Artificial Sequence
  Synthetic oligonucleotide: CBLB-929
ctttgcctcctgctaga

SEQ ID NO: 6504 - DNA, 17 bp, Artificial Sequence
  Synthetic oligonucleotide: CBLB-930
cctgctagaaggttacc

SEQ ID NO: 6505 - DNA, 17 bp, Artificial Sequence
  Synthetic oligonucleotide: CBLB-931
aactaacagaacatcac

SEQ ID NO: 6506 - DNA, 17 bp, Artificial Sequence
  Synthetic oligonucleotide: CBLB-932
cagcttccttcatgttc

SEQ ID NO: 6507 - DNA, 17 bp, Artificial Sequence
  Synthetic oligonucleotide: CBLB-933
ttcatgttcaggtgagt

SEQ ID NO: 6508 - DNA, 17 bp, Artificial Sequence
  Synthetic oligonucleotide: CBLB-934
ttaaaaatctacacaga

SEQ ID NO: 6509 - DNA, 17 bp, Artificial Sequence
  Synthetic oligonucleotide: CBLB-935
ctacacagatggttcac

SEQ ID NO: 6510 - DNA, 17 bp, Artificial Sequence
  Synthetic oligonucleotide: CBLB-936
ctaaaccacgaccgcgc

SEQ ID NO: 6511 - RNA, 17 nt, Artificial Sequence
  Synthetic oligonucleotide: CBLB-937
caccacagaaaacccca

SEQ ID NO: 6512 - DNA, 17 bp, Artificial Sequence
  Synthetic oligonucleotide: CBLB-938
accacagaaaaccccat

SEQ ID NO: 6513 - DNA, 17 bp, Artificial Sequence
  Synthetic oligonucleotide: CBLB-939
aaaaccccatgggcctg

SEQ ID NO: 6514 - DNA, 17 bp, Artificial Sequence
  Synthetic oligonucleotide: CBLB-940
accccatgggcctgagg

SEQ ID NO: 6515 - DNA, 17 bp, Artificial Sequence
  Synthetic oligonucleotide: CBLB-941
tgggcctgaggcggcat

SEQ ID NO: 6516 - DNA, 17 bp, Artificial Sequence
  Synthetic oligonucleotide: CBLB-942
aaaaattgcaaaactca

SEQ ID NO: 6517 - DNA, 17 bp, Artificial Sequence
  Synthetic oligonucleotide: CBLB-943
aaaattgcaaaactcat

SEQ ID NO: 6518 - DNA, 17 bp, Artificial Sequence
  Synthetic oligonucleotide: CBLB-944
tgcaaaactcatgggag

SEQ ID NO: 6519 - DNA, 17 bp, Artificial Sequence
  Synthetic oligonucleotide: CBLB-945
gcaaaactcatgggaga

SEQ ID NO: 6520 - DNA, 17 bp, Artificial Sequence
  Synthetic oligonucleotide: CBLB-946
gggttatgcctttgaag

SEQ ID NO: 6521 - DNA, 17 bp, Artificial Sequence
  Synthetic oligonucleotide: CBLB-947
ataatgtcgaagttgcc

SEQ ID NO: 6522 - DNA, 17 bp, Artificial Sequence
  Synthetic oligonucleotide: CBLB-948
aactgtagacaccaaaa

SEQ ID NO: 6523 - DNA, 20 bp, Artificial Sequence
  Synthetic oligonucleotide: CBLB-949
gatttcgtctgtaggcacaa

SEQ ID NO: 6524 - DNA, 20 bp, Artificial Sequence
  Synthetic oligonucleotide: CBLB-950
agatttcgtctgtaggcaca

SEQ ID NO: 6525 - DNA, 20 bp, Artificial Sequence
  Synthetic oligonucleotide: CBLB-951
ttttgtgagatttcgtctgt

SEQ ID NO: 6526 - DNA, 20 bp, Artificial Sequence
  Synthetic oligonucleotide: CBLB-952
cagcatgtgactgaagataa

SEQ ID NO: 6527 - DNA, 20 bp, Artificial Sequence
  Synthetic oligonucleotide: CBLB-953
ccagcatgtgactgaagata

SEQ ID NO: 6528 - DNA, 20 bp, Artificial Sequence
  Synthetic oligonucleotide: CBLB-954
tctccctggaattgaccatt

SEQ ID NO: 6529 - DNA, 20 bp, Artificial Sequence
  Synthetic oligonucleotide: CBLB-955
atctccctggaattgaccat

SEQ ID NO: 6530 - DNA, 20 bp, Artificial Sequence
  Synthetic oligonucleotide: CBLB-956
tgatacgaaagttatctccc

SEQ ID NO: 6531 - DNA, 20 bp, Artificial Sequence
  Synthetic oligonucleotide: CBLB-957
ctgtgcaaggtggaaaaaaa

SEQ ID NO: 6532 - DNA, 20 bp, Artificial Sequence
  Synthetic oligonucleotide: CBLB-958
tctgtgcaaggtggaaaaaa

SEQ ID NO: 6533 - DNA, 20 bp, Artificial Sequence
  Synthetic oligonucleotide: CBLB-959
tacgatagttctgtgcaagg

SEQ ID NO: 6534 - DNA, 20 bp, Artificial Sequence
  Synthetic oligonucleotide: CBLB-960
tggtacgatagttctgtgca

SEQ ID NO: 6535 - DNA, 20 bp, Artificial Sequence
  Synthetic oligonucleotide: CBLB-961
cactgtctgaatactttcca

SEQ ID NO: 6536 - DNA, 20 bp, Artificial Sequence
  Synthetic oligonucleotide: CBLB-962
taatctggtggacctcatga

SEQ ID NO: 6537 - DNA, 20 bp, Artificial Sequence
  Synthetic oligonucleotide: CBLB-963
ccaggccagagctaatctgg

SEQ ID NO: 6538 - DNA, 20 bp, Artificial Sequence
  Synthetic oligonucleotide: CBLB-964
cttccaggccagagctaatc

SEQ ID NO: 6539 - DNA, 20 bp, Artificial Sequence
  Synthetic oligonucleotide: CBLB-965
attttagagccattgcttcc

SEQ ID NO: 6540 - DNA, 20 bp, Artificial Sequence
  Synthetic oligonucleotide: CBLB-966
taaacttacctgaaacagcc

SEQ ID NO: 6541 - DNA, 20 bp, Artificial Sequence
  Synthetic oligonucleotide: CBLB-967
ttccgcaaaatagagcccca

SEQ ID NO: 6542 - DNA, 20 bp, Artificial Sequence
  Synthetic oligonucleotide: CBLB-968
gtgagaaatgccatgtaacc

SEQ ID NO: 6543 - DNA, 20 bp, Artificial Sequence
  Synthetic oligonucleotide: CBLB-969
aaagtcttaccttccgggtt

SEQ ID NO: 6544 - DNA, 20 bp, Artificial Sequence
  Synthetic oligonucleotide: CBLB-970
gctaaaaagtcttaccttcc

SEQ ID NO: 6545 - DNA, 20 bp, Artificial Sequence
  Synthetic oligonucleotide: CBLB-971
tgctaaaaagtcttaccttc

SEQ ID NO: 6546 - DNA, 20 bp, Artificial Sequence
  Synthetic oligonucleotide: CBLB-972
ccaatcgagtgcaacttaac

SEQ ID NO: 6547 - DNA, 20 bp, Artificial Sequence
  Synthetic oligonucleotide: CBLB-973
atccccagtcacatagccaa

SEQ ID NO: 6548 - DNA, 20 bp, Artificial Sequence
  Synthetic oligonucleotide: CBLB-974
taagggcttgttatgaggta

SEQ ID NO: 6549 - DNA, 20 bp, Artificial Sequence
  Synthetic oligonucleotide: CBLB-975
tgaaataagggcttgttatg

SEQ ID NO: 6550 - DNA, 20 bp, Artificial Sequence
  Synthetic oligonucleotide: CBLB-976
tcaatcagggcttgaaataa

SEQ ID NO: 6551 - DNA, 20 bp, Artificial Sequence
  Synthetic oligonucleotide: CBLB-977
atcaatcagggcttgaaata

SEQ ID NO: 6552 - DNA, 20 bp, Artificial Sequence
  Synthetic oligonucleotide: CBLB-978
ttccctgctgccatcaatca

SEQ ID NO: 6553 - DNA, 20 bp, Artificial Sequence
  Synthetic oligonucleotide: CBLB-979
cttccctgctgccatcaatc

SEQ ID NO: 6554 - DNA, 20 bp, Artificial Sequence
  Synthetic oligonucleotide: CBLB-980
ggattataactcctcccatc

SEQ ID NO: 6555 - DNA, 20 bp, Artificial Sequence
  Synthetic oligonucleotide: CBLB-981
tcacataatccagttaaatc

SEQ ID NO: 6556 - DNA, 20 bp, Artificial Sequence
  Synthetic oligonucleotide: CBLB-982
tttatatggtcatgaggtgt

SEQ ID NO: 6557 - DNA, 20 bp, Artificial Sequence
  Synthetic oligonucleotide: CBLB-983
gtaacttttatatggtcatg

SEQ ID NO: 6558 - DNA, 20 bp, Artificial Sequence
  Synthetic oligonucleotide: CBLB-984
ttacctgtgtaacttttata

SEQ ID NO: 6559 - DNA, 20 bp, Artificial Sequence
  Synthetic oligonucleotide: CBLB-985
ttcctggaatttggggagga

SEQ ID NO: 6560 - DNA, 20 bp, Artificial Sequence
  Synthetic oligonucleotide: CBLB-986
gttcctggaatttggggagg

SEQ ID NO: 6561 - DNA, 20 bp, Artificial Sequence
  Synthetic oligonucleotide: CBLB-987
attgttcctggaatttgggg

SEQ ID NO: 6562 - DNA, 20 bp, Artificial Sequence
  Synthetic oligonucleotide: CBLB-988
catattgttcctggaatttg

SEQ ID NO: 6563 - DNA, 20 bp, Artificial Sequence
  Synthetic oligonucleotide: CBLB-989
tcatattgttcctggaattt

SEQ ID NO: 6564 - DNA, 20 bp, Artificial Sequence
  Synthetic oligonucleotide: CBLB-990
ttcatattgttcctggaatt

SEQ ID NO: 6565 - DNA, 20 bp, Artificial Sequence
  Synthetic oligonucleotide: CBLB-991
aatataattcatattgttcc

SEQ ID NO: 6566 - DNA, 20 bp, Artificial Sequence
  Synthetic oligonucleotide: CBLB-992
aatcttacagagctgaaaag

SEQ ID NO: 6567 - DNA, 20 bp, Artificial Sequence
  Synthetic oligonucleotide: CBLB-993
gtgcacatcaaatgcccaca

SEQ ID NO: 6568 - DNA, 20 bp, Artificial Sequence
  Synthetic oligonucleotide: CBLB-994
ctgccatgccgtaaggcaag

SEQ ID NO: 6569 - DNA, 20 bp, Artificial Sequence
  Synthetic oligonucleotide: CBLB-995
attatacctgccatgccgta

SEQ ID NO: 6570 - DNA, 20 bp, Artificial Sequence
  Synthetic oligonucleotide: CBLB-996
caaatagaaaatgcatggat

SEQ ID NO: 6571 - DNA, 20 bp, Artificial Sequence
  Synthetic oligonucleotide: CBLB-997
ctaaacaaatagaaaatgca

SEQ ID NO: 6572 - DNA, 20 bp, Artificial Sequence
  Synthetic oligonucleotide: CBLB-998
ttatttcacaacgacagaaa

SEQ ID NO: 6573 - DNA, 20 bp, Artificial Sequence
  Synthetic oligonucleotide: CBLB-999
tttatttcacaacgacagaa

SEQ ID NO: 6574 - DNA, 20 bp, Artificial Sequence
  Synthetic oligonucleotide: CBLB-1000
tcaaaggggtccacgattat

SEQ ID NO: 6575 - DNA, 20 bp, Artificial Sequence
  Synthetic oligonucleotide: CBLB-1001
atcaaaggggtccacgatta

SEQ ID NO: 6576 - DNA, 20 bp, Artificial Sequence
  Synthetic oligonucleotide: CBLB-1002
cttcatctcttggatcaaag

SEQ ID NO: 6577 - DNA, 20 bp, Artificial Sequence
  Synthetic oligonucleotide: CBLB-1003
ccttcatctcttggatcaaa

SEQ ID NO: 6578 - DNA, 20 bp, Artificial Sequence
  Synthetic oligonucleotide: CBLB-1004
gccttcatctcttggatcaa

SEQ ID NO: 6579 - DNA, 20 bp, Artificial Sequence
  Synthetic oligonucleotide: CBLB-1005
cacctggagccttcatctct

SEQ ID NO: 6580 - DNA, 20 bp, Artificial Sequence
  Synthetic oligonucleotide: CBLB-1006
gtcaatgatgctgcaacacc

SEQ ID NO: 6581 - DNA, 20 bp, Artificial Sequence
  Synthetic oligonucleotide: CBLB-1007
ctagcatcggcatgccaaag

SEQ ID NO: 6582 - DNA, 20 bp, Artificial Sequence
  Synthetic oligonucleotide: CBLB-1008
tctagcatcggcatgccaaa

SEQ ID NO: 6583 - DNA, 20 bp, Artificial Sequence
  Synthetic oligonucleotide: CBLB-1009
gtctagcatcggcatgccaa

SEQ ID NO: 6584 - DNA, 20 bp, Artificial Sequence
  Synthetic oligonucleotide: CBLB-1010
tcgtcgtccaagtctagcat

SEQ ID NO: 6585 - DNA, 20 bp, Artificial Sequence
  Synthetic oligonucleotide: CBLB-1011
tgccaaccgattcatcatca

SEQ ID NO: 6586 - DNA, 20 bp, Artificial Sequence
  Synthetic oligonucleotide: CBLB-1012
atgtttctagttttaccttt

SEQ ID NO: 6587 - DNA, 20 bp, Artificial Sequence
  Synthetic oligonucleotide: CBLB-1013
gaggatcctggtgatgtgac

SEQ ID NO: 6588 - DNA, 20 bp, Artificial Sequence
  Synthetic oligonucleotide: CBLB-1014
tgggcaaggggagaggatcc

SEQ ID NO: 6589 - DNA, 20 bp, Artificial Sequence
  Synthetic oligonucleotide: CBLB-1015
tcttctctgggcaaggggag

SEQ ID NO: 6590 - DNA, 20 bp, Artificial Sequence
  Synthetic oligonucleotide: CBLB-1016
ggctttcttctctgggcaag

SEQ ID NO: 6591 - DNA, 20 bp, Artificial Sequence
  Synthetic oligonucleotide: CBLB-1017
tggctttcttctctgggcaa

SEQ ID NO: 6592 - DNA, 20 bp, Artificial Sequence
  Synthetic oligonucleotide: CBLB-1018
gtggctttcttctctgggca

SEQ ID NO: 6593 - DNA, 20 bp, Artificial Sequence
  Synthetic oligonucleotide: CBLB-1019
aggctgtggctttcttctct

SEQ ID NO: 6594 - DNA, 20 bp, Artificial Sequence
  Synthetic oligonucleotide: CBLB-1020
caggctgtggctttcttctc

SEQ ID NO: 6595 - DNA, 20 bp, Artificial Sequence
  Synthetic oligonucleotide: CBLB-1021
atctggagtgggtcaggctg

SEQ ID NO: 6596 - DNA, 20 bp, Artificial Sequence
  Synthetic oligonucleotide: CBLB-1022
tgtgggatctggagtgggtc

SEQ ID NO: 6597 - DNA, 20 bp, Artificial Sequence
  Synthetic oligonucleotide: CBLB-1023
ttagatgtgggatctggagt

SEQ ID NO: 6598 - DNA, 20 bp, Artificial Sequence
  Synthetic oligonucleotide: CBLB-1024
cttagatgtgggatctggag

SEQ ID NO: 6599 - DNA, 20 bp, Artificial Sequence
  Synthetic oligonucleotide: CBLB-1025
gcaggcttagatgtgggatc

SEQ ID NO: 6600 - DNA, 20 bp, Artificial Sequence
  Synthetic oligonucleotide: CBLB-1026
cgggtggcaggcttagatgt

SEQ ID NO: 6601 - DNA, 20 bp, Artificial Sequence
  Synthetic oligonucleotide: CBLB-1027
acgggtggcaggcttagatg

SEQ ID NO: 6602 - DNA, 20 bp, Artificial Sequence
  Synthetic oligonucleotide: CBLB-1028
ggcgaggaggcacgggtggc

SEQ ID NO: 6603 - DNA, 20 bp, Artificial Sequence
  Synthetic oligonucleotide: CBLB-1029
tccaggcgaggaggcacggg

SEQ ID NO: 6604 - DNA, 20 bp, Artificial Sequence
  Synthetic oligonucleotide: CBLB-1030
agatccaggcgaggaggcac

SEQ ID NO: 6605 - DNA, 20 bp, Artificial Sequence
  Synthetic oligonucleotide: CBLB-1031
tagatccaggcgaggaggca

SEQ ID NO: 6606 - DNA, 20 bp, Artificial Sequence
  Synthetic oligonucleotide: CBLB-1032
tgaattagatccaggcgagg

SEQ ID NO: 6607 - DNA, 20 bp, Artificial Sequence
  Synthetic oligonucleotide: CBLB-1033
ttctgaattagatccaggcg

SEQ ID NO: 6608 - DNA, 20 bp, Artificial Sequence
  Synthetic oligonucleotide: CBLB-1034
tgcctttctgaattagatcc

SEQ ID NO: 6609 - DNA, 20 bp, Artificial Sequence
  Synthetic oligonucleotide: CBLB-1035
gaacccgttgggctgccaca

SEQ ID NO: 6610 - DNA, 20 bp, Artificial Sequence
  Synthetic oligonucleotide: CBLB-1036
tgaacccgttgggctgccac

SEQ ID NO: 6611 - DNA, 20 bp, Artificial Sequence
  Synthetic oligonucleotide: CBLB-1037
ctacctttggtgaacccgtt

SEQ ID NO: 6612 - DNA, 20 bp, Artificial Sequence
  Synthetic oligonucleotide: CBLB-1038
tctacctttggtgaacccgt

SEQ ID NO: 6613 - DNA, 20 bp, Artificial Sequence
  Synthetic oligonucleotide: CBLB-1039
taataaaattgatctacctt

SEQ ID NO: 6614 - DNA, 20 bp, Artificial Sequence
  Synthetic oligonucleotide: CBLB-1040
tcttgttttctcaccatgca

SEQ ID NO: 6615 - DNA, 20 bp, Artificial Sequence
  Synthetic oligonucleotide: CBLB-1041
ggaggaggtggtgctgggag

SEQ ID NO: 6616 - DNA, 20 bp, Artificial Sequence
  Synthetic oligonucleotide: CBLB-1042
ttaagggaggaggtggtgct

SEQ ID NO: 6617 - DNA, 20 bp, Artificial Sequence
  Synthetic oligonucleotide: CBLB-1043
cttaagggaggaggtggtgc

SEQ ID NO: 6618 - DNA, 20 bp, Artificial Sequence
  Synthetic oligonucleotide: CBLB-1044
ggatctcttaagggaggagg

SEQ ID NO: 6619 - DNA, 20 bp, Artificial Sequence
  Synthetic oligonucleotide: CBLB-1045
ggaggatctcttaagggagg

SEQ ID NO: 6620 - DNA, 20 bp, Artificial Sequence
  Synthetic oligonucleotide: CBLB-1046
ggaggaggatctcttaaggg

SEQ ID NO: 6621 - DNA, 20 bp, Artificial Sequence
  Synthetic oligonucleotide: CBLB-1047
ggtggaggaggatctcttaa

SEQ ID NO: 6622 - DNA, 20 bp, Artificial Sequence
  Synthetic oligonucleotide: CBLB-1048
cggtggaggaggatctctta

SEQ ID NO: 6623 - DNA, 20 bp, Artificial Sequence
  Synthetic oligonucleotide: CBLB-1049
ctttcaggtggcggtggagg

SEQ ID NO: 6624 - DNA, 20 bp, Artificial Sequence
  Synthetic oligonucleotide: CBLB-1050
ggtctttcaggtggcggtgg

SEQ ID NO: 6625 - DNA, 20 bp, Artificial Sequence
  Synthetic oligonucleotide: CBLB-1051
ggaggtctttcaggtggcgg

SEQ ID NO: 6626 - DNA, 20 bp, Artificial Sequence
  Synthetic oligonucleotide: CBLB-1052
ggtggaggtctttcaggtgg

SEQ ID NO: 6627 - DNA, 20 bp, Artificial Sequence
  Synthetic oligonucleotide: CBLB-1053
attggtggaggtctttcagg

SEQ ID NO: 6628 - DNA, 20 bp, Artificial Sequence
  Synthetic oligonucleotide: CBLB-1054
gggattggtggaggtctttc

SEQ ID NO: 6629 - DNA, 20 bp, Artificial Sequence
  Synthetic oligonucleotide: CBLB-1055
ttgtctggtgggattggtgg

SEQ ID NO: 6630 - DNA, 20 bp, Artificial Sequence
  Synthetic oligonucleotide: CBLB-1056
ctattgtctggtgggattgg

SEQ ID NO: 6631 - DNA, 20 bp, Artificial Sequence
  Synthetic oligonucleotide: CBLB-1057
agtctattgtctggtgggat

SEQ ID NO: 6632 - DNA, 20 bp, Artificial Sequence
  Synthetic oligonucleotide: CBLB-1058
tactcagtctattgtctggt

SEQ ID NO: 6633 - DNA, 20 bp, Artificial Sequence
  Synthetic oligonucleotide: CBLB-1059
ctactcagtctattgtctgg

SEQ ID NO: 6634 - DNA, 20 bp, Artificial Sequence
  Synthetic oligonucleotide: CBLB-1060
tgtctactcagtctattgtc

SEQ ID NO: 6635 - DNA, 20 bp, Artificial Sequence
  Synthetic oligonucleotide: CBLB-1061
aaggcacgctttccacatga

SEQ ID NO: 6636 - DNA, 20 bp, Artificial Sequence
  Synthetic oligonucleotide: CBLB-1062
ggcattggcgggtctctgga

SEQ ID NO: 6637 - DNA, 20 bp, Artificial Sequence
  Synthetic oligonucleotide: CBLB-1063
aagaggcattggcgggtctc

SEQ ID NO: 6638 - DNA, 20 bp, Artificial Sequence
  Synthetic oligonucleotide: CBLB-1064
atgcttcaagaggcattggc

SEQ ID NO: 6639 - DNA, 20 bp, Artificial Sequence
  Synthetic oligonucleotide: CBLB-1065
catgcttcaagaggcattgg

SEQ ID NO: 6640 - DNA, 20 bp, Artificial Sequence
  Synthetic oligonucleotide: CBLB-1066
caccatgcttcaagaggcat

SEQ ID NO: 6641 - DNA, 20 bp, Artificial Sequence
  Synthetic oligonucleotide: CBLB-1067
cgagggcaccatgcttcaag

SEQ ID NO: 6642 - DNA, 20 bp, Artificial Sequence
  Synthetic oligonucleotide: CBLB-1068
tagtcccaaacacatcccga

SEQ ID NO: 6643 - DNA, 20 bp, Artificial Sequence
  Synthetic oligonucleotide: CBLB-1069
ttagtcccaaacacatcccg

SEQ ID NO: 6644 - DNA, 20 bp, Artificial Sequence
  Synthetic oligonucleotide: CBLB-1070
gttttggagagccctcccct

SEQ ID NO: 6645 - DNA, 20 bp, Artificial Sequence
  Synthetic oligonucleotide: CBLB-1071
ctcgctgtgattccaggttt

SEQ ID NO: 6646 - DNA, 20 bp, Artificial Sequence
  Synthetic oligonucleotide: CBLB-1072
tttgaactcgctgtgattcc

SEQ ID NO: 6647 - DNA, 20 bp, Artificial Sequence
  Synthetic oligonucleotide: CBLB-1073
tgtgtttccgcataagcact

SEQ ID NO: 6648 - DNA, 20 bp, Artificial Sequence
  Synthetic oligonucleotide: CBLB-1074
ctgtgtttccgcataagcac

SEQ ID NO: 6649 - DNA, 20 bp, Artificial Sequence
  Synthetic oligonucleotide: CBLB-1075
ctccttctaaaggcaaatca

SEQ ID NO: 6650 - DNA, 20 bp, Artificial Sequence
  Synthetic oligonucleotide: CBLB-1076
cttaccttagctccttctaa

SEQ ID NO: 6651 - DNA, 20 bp, Artificial Sequence
  Synthetic oligonucleotide: CBLB-1077
ttcacttccaaggtgaccat

SEQ ID NO: 6652 - DNA, 20 bp, Artificial Sequence
  Synthetic oligonucleotide: CBLB-1078
catcatattcttcacttcca

SEQ ID NO: 6653 - RNA, 20 nt, Artificial Sequence
  Synthetic oligonucleotide: CBLB-1079
ggaggaggagaaagccgggg

SEQ ID NO: 6654 - RNA, 20 nt, Artificial Sequence
  Synthetic oligonucleotide: CBLB-1080
ggaggaggaggagaaagccg

SEQ ID NO: 6655 - DNA, 20 bp, Artificial Sequence
  Synthetic oligonucleotide: CBLB-1081
tggaggaggaggagaaagcc

SEQ ID NO: 6656 - DNA, 20 bp, Artificial Sequence
  Synthetic oligonucleotide: CBLB-1082
ctggaggaggaggagaaagc

SEQ ID NO: 6657 - DNA, 20 bp, Artificial Sequence
  Synthetic oligonucleotide: CBLB-1083
agggtggtaactggaggagg

SEQ ID NO: 6658 - DNA, 20 bp, Artificial Sequence
  Synthetic oligonucleotide: CBLB-1084
aggagggtggtaactggagg

SEQ ID NO: 6659 - DNA, 20 bp, Artificial Sequence
  Synthetic oligonucleotide: CBLB-1085
gggaggagggtggtaactgg

SEQ ID NO: 6660 - DNA, 20 bp, Artificial Sequence
  Synthetic oligonucleotide: CBLB-1086
ctagggaggagggtggtaac

SEQ ID NO: 6661 - DNA, 20 bp, Artificial Sequence
  Synthetic oligonucleotide: CBLB-1087
ctttatgctagggaggaggg

SEQ ID NO: 6662 - DNA, 20 bp, Artificial Sequence
  Synthetic oligonucleotide: CBLB-1088
tcactttatgctagggagga

SEQ ID NO: 6663 - DNA, 20 bp, Artificial Sequence
  Synthetic oligonucleotide: CBLB-1089
ctcactttatgctagggagg

SEQ ID NO: 6664 - DNA, 20 bp, Artificial Sequence
  Synthetic oligonucleotide: CBLB-1090
aaactcactttatgctaggg

SEQ ID NO: 6665 - DNA, 20 bp, Artificial Sequence
  Synthetic oligonucleotide: CBLB-1091
acaaaactcactttatgcta

SEQ ID NO: 6666 - DNA, 20 bp, Artificial Sequence
  Synthetic oligonucleotide: CBLB-1092
aacaaaactcactttatgct

SEQ ID NO: 6667 - DNA, 20 bp, Artificial Sequence
  Synthetic oligonucleotide: CBLB-1093
cggaccagtacacctaccag

SEQ ID NO: 6668 - DNA, 20 bp, Artificial Sequence
  Synthetic oligonucleotide: CBLB-1094
acggaccagtacacctacca

SEQ ID NO: 6669 - DNA, 20 bp, Artificial Sequence
  Synthetic oligonucleotide: CBLB-1095
aacggaccagtacacctacc

SEQ ID NO: 6670 - DNA, 20 bp, Artificial Sequence
  Synthetic oligonucleotide: CBLB-1096
tctgaaagagaatttgctaa

SEQ ID NO: 6671 - DNA, 20 bp, Artificial Sequence
  Synthetic oligonucleotide: CBLB-1097
catcatcatcttcctctact

SEQ ID NO: 6672 - DNA, 20 bp, Artificial Sequence
  Synthetic oligonucleotide: CBLB-1098
tcatcatcatcttcctctac

SEQ ID NO: 6673 - DNA, 20 bp, Artificial Sequence
  Synthetic oligonucleotide: CBLB-1099
agggaaacagggtgggatga

SEQ ID NO: 6674 - DNA, 20 bp, Artificial Sequence
  Synthetic oligonucleotide: CBLB-1100
tgaattcagggaaacagggt

SEQ ID NO: 6675 - DNA, 20 bp, Artificial Sequence
  Synthetic oligonucleotide: CBLB-1101
gtgaattcagggaaacaggg

SEQ ID NO: 6676 - DNA, 20 bp, Artificial Sequence
  Synthetic oligonucleotide: CBLB-1102
gttgtgaattcagggaaaca

SEQ ID NO: 6677 - DNA, 20 bp, Artificial Sequence
  Synthetic oligonucleotide: CBLB-1103
ggttgtgaattcagggaaac

SEQ ID NO: 6678 - DNA, 20 bp, Artificial Sequence
  Synthetic oligonucleotide: CBLB-1104
atgagatggttgtgaattca

SEQ ID NO: 6679 - DNA, 20 bp, Artificial Sequence
  Synthetic oligonucleotide: CBLB-1105
aatgagatggttgtgaattc

SEQ ID NO: 6680 - DNA, 20 bp, Artificial Sequence
  Synthetic oligonucleotide: CBLB-1106
tttacattatgacaatgaga

SEQ ID NO: 6681 - DNA, 20 bp, Artificial Sequence
  Synthetic oligonucleotide: CBLB-1107
ccatactcttaccgaacagg

SEQ ID NO: 6682 - DNA, 20 bp, Artificial Sequence
  Synthetic oligonucleotide: CBLB-1108
tgcccatactcttaccgaac

SEQ ID NO: 6683 - DNA, 20 bp, Artificial Sequence
  Synthetic oligonucleotide: CBLB-1109
accattatcacaagacctaa

SEQ ID NO: 6684 - DNA, 20 bp, Artificial Sequence
  Synthetic oligonucleotide: CBLB-1110
tttgatttcttctctgaaga

SEQ ID NO: 6685 - DNA, 20 bp, Artificial Sequence
  Synthetic oligonucleotide: CBLB-1111
ttaaatatatgcttaagtca

SEQ ID NO: 6686 - DNA, 20 bp, Artificial Sequence
  Synthetic oligonucleotide: CBLB-1112
tttaaatatatgcttaagtc

SEQ ID NO: 6687 - DNA, 20 bp, Artificial Sequence
  Synthetic oligonucleotide: CBLB-1113
gaatcaaaaacatctcctag

SEQ ID NO: 6688 - DNA, 20 bp, Artificial Sequence
  Synthetic oligonucleotide: CBLB-1114
tggtaatggcacgggatcag

SEQ ID NO: 6689 - DNA, 20 bp, Artificial Sequence
  Synthetic oligonucleotide: CBLB-1115
ctggcaggtggtaatggcac

SEQ ID NO: 6690 - DNA, 20 bp, Artificial Sequence
  Synthetic oligonucleotide: CBLB-1116
cctggcaggtggtaatggca

SEQ ID NO: 6691 - DNA, 20 bp, Artificial Sequence
  Synthetic oligonucleotide: CBLB-1117
ggaggcctggcaggtggtaa

SEQ ID NO: 6692 - DNA, 20 bp, Artificial Sequence
  Synthetic oligonucleotide: CBLB-1118
cgagttggaggcctggcagg

SEQ ID NO: 6693 - DNA, 20 bp, Artificial Sequence
  Synthetic oligonucleotide: CBLB-1119
tcccgagttggaggcctggc

SEQ ID NO: 6694 - DNA, 20 bp, Artificial Sequence
  Synthetic oligonucleotide: CBLB-1120
attgtcccgagttggaggcc

SEQ ID NO: 6695 - DNA, 20 bp, Artificial Sequence
  Synthetic oligonucleotide: CBLB-1121
tttggattgtcccgagttgg

SEQ ID NO: 6696 - DNA, 20 bp, Artificial Sequence
  Synthetic oligonucleotide: CBLB-1122
tgctttggattgtcccgagt

SEQ ID NO: 6697 - DNA, 20 bp, Artificial Sequence
  Synthetic oligonucleotide: CBLB-1123
ttgagtgaagaaccatgctt

SEQ ID NO: 6698 - DNA, 20 bp, Artificial Sequence
  Synthetic oligonucleotide: CBLB-1124
atgagaagatcataatcaga

SEQ ID NO: 6699 - DNA, 20 bp, Artificial Sequence
  Synthetic oligonucleotide: CBLB-1125
gatgagaagatcataatcag

SEQ ID NO: 6700 - DNA, 20 bp, Artificial Sequence
  Synthetic oligonucleotide: CBLB-1126
aaaggtttcaacctaatgga

SEQ ID NO: 6701 - DNA, 20 bp, Artificial Sequence
  Synthetic oligonucleotide: CBLB-1127
taaaggtttcaacctaatgg

SEQ ID NO: 6702 - DNA, 20 bp, Artificial Sequence
  Synthetic oligonucleotide: CBLB-1128
ttttaaaggtttcaacctaa

SEQ ID NO: 6703 - DNA, 20 bp, Artificial Sequence
  Synthetic oligonucleotide: CBLB-1129
gttgttcaaaacttttttaa

SEQ ID NO: 6704 - DNA, 20 bp, Artificial Sequence
  Synthetic oligonucleotide: CBLB-1130
cttcacctgcatttaaagaa

SEQ ID NO: 6705 - DNA, 20 bp, Artificial Sequence
  Synthetic oligonucleotide: CBLB-1131
aggtgggagagatggaggga

SEQ ID NO: 6706 - DNA, 20 bp, Artificial Sequence
  Synthetic oligonucleotide: CBLB-1132
gaggtgggagagatggaggg

SEQ ID NO: 6707 - DNA, 20 bp, Artificial Sequence
  Synthetic oligonucleotide: CBLB-1133
ggggaggtgggagagatgga

SEQ ID NO: 6708 - DNA, 20 bp, Artificial Sequence
  Synthetic oligonucleotide: CBLB-1134
gggggaggtgggagagatgg

SEQ ID NO: 6709 - DNA, 20 bp, Artificial Sequence
  Synthetic oligonucleotide: CBLB-1135
ggtgggggaggtgggagaga

SEQ ID NO: 6710 - DNA, 20 bp, Artificial Sequence
  Synthetic oligonucleotide: CBLB-1136
ttgcaggaggtgggggaggt

SEQ ID NO: 6711 - DNA, 20 bp, Artificial Sequence
  Synthetic oligonucleotide: CBLB-1137
cttgcaggaggtgggggagg

SEQ ID NO: 6712 - DNA, 20 bp, Artificial Sequence
  Synthetic oligonucleotide: CBLB-1138
tgccttgcaggaggtggggg

SEQ ID NO: 6713 - DNA, 20 bp, Artificial Sequence
  Synthetic oligonucleotide: CBLB-1139
ctatgccttgcaggaggtgg

SEQ ID NO: 6714 - DNA, 20 bp, Artificial Sequence
  Synthetic oligonucleotide: CBLB-1140
actatgccttgcaggaggtg

SEQ ID NO: 6715 - DNA, 20 bp, Artificial Sequence
  Synthetic oligonucleotide: CBLB-1141
gactatgccttgcaggaggt

SEQ ID NO: 6716 - DNA, 20 bp, Artificial Sequence
  Synthetic oligonucleotide: CBLB-1142
agactatgccttgcaggagg

SEQ ID NO: 6717 - DNA, 20 bp, Artificial Sequence
  Synthetic oligonucleotide: CBLB-1143
atgagactatgccttgcagg

SEQ ID NO: 6718 - DNA, 20 bp, Artificial Sequence
  Synthetic oligonucleotide: CBLB-1144
tcaatgagactatgccttgc

SEQ ID NO: 6719 - DNA, 20 bp, Artificial Sequence
  Synthetic oligonucleotide: CBLB-1145
ggccggctactggagccagg

SEQ ID NO: 6720 - DNA, 20 bp, Artificial Sequence
  Synthetic oligonucleotide: CBLB-1146
gatggccggctactggagcc

SEQ ID NO: 6721 - DNA, 20 bp, Artificial Sequence
  Synthetic oligonucleotide: CBLB-1147
tcctgaggatggccggctac

SEQ ID NO: 6722 - DNA, 20 bp, Artificial Sequence
  Synthetic oligonucleotide: CBLB-1148
gatcctgtcctgaggatggc

SEQ ID NO: 6723 - DNA, 20 bp, Artificial Sequence
  Synthetic oligonucleotide: CBLB-1149
aaaagatcctgtcctgagga

SEQ ID NO: 6724 - DNA, 20 bp, Artificial Sequence
  Synthetic oligonucleotide: CBLB-1150
aagaaaaagatcctgtcctg

SEQ ID NO: 6725 - DNA, 20 bp, Artificial Sequence
  Synthetic oligonucleotide: CBLB-1151
ggcttttccctcctacctga

SEQ ID NO: 6726 - DNA, 20 bp, Artificial Sequence
  Synthetic oligonucleotide: CBLB-1152
ccacttgctagatcaacaaa

SEQ ID NO: 6727 - DNA, 20 bp, Artificial Sequence
  Synthetic oligonucleotide: CBLB-1153
gccacttgctagatcaacaa

SEQ ID NO: 6728 - DNA, 20 bp, Artificial Sequence
  Synthetic oligonucleotide: CBLB-1154
tagcaggaggcaaaggaact

SEQ ID NO: 6729 - DNA, 20 bp, Artificial Sequence
  Synthetic oligonucleotide: CBLB-1155
aaccttctagcaggaggcaa

SEQ ID NO: 6730 - DNA, 20 bp, Artificial Sequence
  Synthetic oligonucleotide: CBLB-1156
cctggtaaccttctagcagg

SEQ ID NO: 6731 - DNA, 20 bp, Artificial Sequence
  Synthetic oligonucleotide: CBLB-1157
tcacctggtaaccttctagc

SEQ ID NO: 6732 - DNA, 20 bp, Artificial Sequence
  Synthetic oligonucleotide: CBLB-1158
ttagttttgacattttcacc

SEQ ID NO: 6733 - DNA, 20 bp, Artificial Sequence
  Synthetic oligonucleotide: CBLB-1159
gccaactcacctgaacatga

SEQ ID NO: 6734 - DNA, 20 bp, Artificial Sequence
  Synthetic oligonucleotide: CBLB-1160
cgtggtttagggggtctggc

SEQ ID NO: 6735 - DNA, 20 bp, Artificial Sequence
  Synthetic oligonucleotide: CBLB-1161
cggtcgtggtttagggggtc

SEQ ID NO: 6736 - DNA, 20 bp, Artificial Sequence
  Synthetic oligonucleotide: CBLB-1162
ctgcgcggtcgtggtttagg

SEQ ID NO: 6737 - DNA, 20 bp, Artificial Sequence
  Synthetic oligonucleotide: CBLB-1163
cctgcgcggtcgtggtttag

SEQ ID NO: 6738 - DNA, 20 bp, Artificial Sequence
  Synthetic oligonucleotide: CBLB-1164
tcctgcgcggtcgtggttta

SEQ ID NO: 6739 - DNA, 20 bp, Artificial Sequence
  Synthetic oligonucleotide: CBLB-1165
gtcctgcgcggtcgtggttt

SEQ ID NO: 6740 - DNA, 20 bp, Artificial Sequence
  Synthetic oligonucleotide: CBLB-1166
ggtgcagtcctgcgcggtcg

SEQ ID NO: 6741 - DNA, 20 bp, Artificial Sequence
  Synthetic oligonucleotide: CBLB-1167
atttctggtgcagtcctgcg

SEQ ID NO: 6742 - DNA, 20 bp, Artificial Sequence
  Synthetic oligonucleotide: CBLB-1168
ggttttctgtggtgaatttc

SEQ ID NO: 6743 - DNA, 20 bp, Artificial Sequence
  Synthetic oligonucleotide: CBLB-1169
caggcccatggggttttctg

SEQ ID NO: 6744 - DNA, 20 bp, Artificial Sequence
  Synthetic oligonucleotide: CBLB-1170
aatgccgcctcaggcccatg

SEQ ID NO: 6745 - DNA, 20 bp, Artificial Sequence
  Synthetic oligonucleotide: CBLB-1171
caatgccgcctcaggcccat

SEQ ID NO: 6746 - DNA, 20 bp, Artificial Sequence
  Synthetic oligonucleotide: CBLB-1172
ccaatgccgcctcaggccca

SEQ ID NO: 6747 - DNA, 20 bp, Artificial Sequence
  Synthetic oligonucleotide: CBLB-1173
acattttccaatgccgcctc

SEQ ID NO: 6748 - DNA, 20 bp, Artificial Sequence
  Synthetic oligonucleotide: CBLB-1174
ggctctcttcacctcttcaa

SEQ ID NO: 6749 - DNA, 20 bp, Artificial Sequence
  Synthetic oligonucleotide: CBLB-1175
attattctgggctatctcta

SEQ ID NO: 6750 - DNA, 20 bp, Artificial Sequence
  Synthetic oligonucleotide: CBLB-1176
ggcaacttcgacattattct

SEQ ID NO: 6751 - DNA, 20 bp, Artificial Sequence
  Synthetic oligonucleotide: CBLB-1177
gggcaacttcgacattattc

SEQ ID NO: 6752 - DNA, 20 bp, Artificial Sequence
  Synthetic oligonucleotide: CBLB-1178
aaattctcggaggatgctcc

SEQ ID NO: 6753 - DNA, 20 bp, Artificial Sequence
  Synthetic oligonucleotide: CBLB-1179
caaattctcggaggatgctc

SEQ ID NO: 6754 - DNA, 20 bp, Artificial Sequence
  Synthetic oligonucleotide: CBLB-1180
gagggaaggcaaattctcgg

SEQ ID NO: 6755 - DNA, 20 bp, Artificial Sequence
  Synthetic oligonucleotide: CBLB-1181
gaggagggaaggcaaattct

SEQ ID NO: 6756 - DNA, 20 bp, Artificial Sequence
  Synthetic oligonucleotide: CBLB-1182
tggggatactggaggaggga

SEQ ID NO: 6757 - DNA, 20 bp, Artificial Sequence
  Synthetic oligonucleotide: CBLB-1183
gacgtggggatactggagga

SEQ ID NO: 6758 - DNA, 20 bp, Artificial Sequence
  Synthetic oligonucleotide: CBLB-1184
agacgtggggatactggagg

SEQ ID NO: 6759 - DNA, 20 bp, Artificial Sequence
  Synthetic oligonucleotide: CBLB-1185
tttagacgtggggatactgg

SEQ ID NO: 6760 - DNA, 20 bp, Artificial Sequence
  Synthetic oligonucleotide: CBLB-1186
agatttagacgtggggatac

SEQ ID NO: 6761 - DNA, 20 bp, Artificial Sequence
  Synthetic oligonucleotide: CBLB-1187
ctgctatagatttagacgtg

SEQ ID NO: 6762 - DNA, 20 bp, Artificial Sequence
  Synthetic oligonucleotide: CBLB-1188
gctgctatagatttagacgt

SEQ ID NO: 6763 - DNA, 20 bp, Artificial Sequence
  Synthetic oligonucleotide: CBLB-1189
ggctgctatagatttagacg

SEQ ID NO: 6764 - DNA, 20 bp, Artificial Sequence
  Synthetic oligonucleotide: CBLB-1190
cattttggtgtctacagttc

SEQ ID NO: 6765 - DNA, 17 bp, Artificial Sequence
  Synthetic oligonucleotide: CBLB-1191
ttcgtctgtaggcacaa

SEQ ID NO: 6766 - DNA, 17 bp, Artificial Sequence
  Synthetic oligonucleotide: CBLB-1192
tttcgtctgtaggcaca

SEQ ID NO: 6767 - DNA, 17 bp, Artificial Sequence
  Synthetic oligonucleotide: CBLB-1193
tgtgagatttcgtctgt

SEQ ID NO: 6768 - DNA, 17 bp, Artificial Sequence
  Synthetic oligonucleotide: CBLB-1194
catgtgactgaagataa

SEQ ID NO: 6769 - DNA, 17 bp, Artificial Sequence
  Synthetic oligonucleotide: CBLB-1195
gcatgtgactgaagata

SEQ ID NO: 6770 - DNA, 17 bp, Artificial Sequence
  Synthetic oligonucleotide: CBLB-1196
ccctggaattgaccatt

SEQ ID NO: 6771 - DNA, 17 bp, Artificial Sequence
  Synthetic oligonucleotide: CBLB-1197
tccctggaattgaccat

SEQ ID NO: 6772 - DNA, 17 bp, Artificial Sequence
  Synthetic oligonucleotide: CBLB-1198
tacgaaagttatctccc

SEQ ID NO: 6773 - DNA, 17 bp, Artificial Sequence
  Synthetic oligonucleotide: CBLB-1199
tgcaaggtggaaaaaaa

SEQ ID NO: 6774 - DNA, 17 bp, Artificial Sequence
  Synthetic oligonucleotide: CBLB-1200
gtgcaaggtggaaaaaa

SEQ ID NO: 6775 - DNA, 17 bp, Artificial Sequence
  Synthetic oligonucleotide: CBLB-1201
gatagttctgtgcaagg

SEQ ID NO: 6776 - DNA, 17 bp, Artificial Sequence
  Synthetic oligonucleotide: CBLB-1202
tacgatagttctgtgca

SEQ ID NO: 6777 - DNA, 17 bp, Artificial Sequence
  Synthetic oligonucleotide: CBLB-1203
tgtctgaatactttcca

SEQ ID NO: 6778 - DNA, 17 bp, Artificial Sequence
  Synthetic oligonucleotide: CBLB-1204
tctggtggacctcatga

SEQ ID NO: 6779 - DNA, 17 bp, Artificial Sequence
  Synthetic oligonucleotide: CBLB-1205
ggccagagctaatctgg

SEQ ID NO: 6780 - DNA, 17 bp, Artificial Sequence
  Synthetic oligonucleotide: CBLB-1206
ccaggccagagctaatc

SEQ ID NO: 6781 - DNA, 17 bp, Artificial Sequence
  Synthetic oligonucleotide: CBLB-1207
ttagagccattgcttcc

SEQ ID NO: 6782 - DNA, 17 bp, Artificial Sequence
  Synthetic oligonucleotide: CBLB-1208
acttacctgaaacagcc

SEQ ID NO: 6783 - DNA, 17 bp, Artificial Sequence
  Synthetic oligonucleotide: CBLB-1209
cgcaaaatagagcccca

SEQ ID NO: 6784 - DNA, 17 bp, Artificial Sequence
  Synthetic oligonucleotide: CBLB-1210
agaaatgccatgtaacc

SEQ ID NO: 6785 - DNA, 17 bp, Artificial Sequence
  Synthetic oligonucleotide: CBLB-1211
gtcttaccttccgggtt

SEQ ID NO: 6786 - DNA, 17 bp, Artificial Sequence
  Synthetic oligonucleotide: CBLB-1212
aaaaagtcttaccttcc

SEQ ID NO: 6787 - DNA, 17 bp, Artificial Sequence
  Synthetic oligonucleotide: CBLB-1213
taaaaagtcttaccttc

SEQ ID NO: 6788 - DNA, 17 bp, Artificial Sequence
  Synthetic oligonucleotide: CBLB-1214
atcgagtgcaacttaac

SEQ ID NO: 6789 - DNA, 17 bp, Artificial Sequence
  Synthetic oligonucleotide: CBLB-1215
cccagtcacatagccaa

SEQ ID NO: 6790 - DNA, 17 bp, Artificial Sequence
  Synthetic oligonucleotide: CBLB-1216
gggcttgttatgaggta

SEQ ID NO: 6791 - DNA, 17 bp, Artificial Sequence
  Synthetic oligonucleotide: CBLB-1217
aataagggcttgttatg

SEQ ID NO: 6792 - DNA, 17 bp, Artificial Sequence
  Synthetic oligonucleotide: CBLB-1218
atcagggcttgaaataa

SEQ ID NO: 6793 - DNA, 17 bp, Artificial Sequence
  Synthetic oligonucleotide: CBLB-1219
aatcagggcttgaaata

SEQ ID NO: 6794 - DNA, 17 bp, Artificial Sequence
  Synthetic oligonucleotide: CBLB-1220
cctgctgccatcaatca

SEQ ID NO: 6795 - DNA, 17 bp, Artificial Sequence
  Synthetic oligonucleotide: CBLB-1221
ccctgctgccatcaatc

SEQ ID NO: 6796 - DNA, 17 bp, Artificial Sequence
  Synthetic oligonucleotide: CBLB-1222
ttataactcctcccatc

SEQ ID NO: 6797 - DNA, 17 bp, Artificial Sequence
  Synthetic oligonucleotide: CBLB-1223
cataatccagttaaatc

SEQ ID NO: 6798 - DNA, 17 bp, Artificial Sequence
  Synthetic oligonucleotide: CBLB-1224
atatggtcatgaggtgt

SEQ ID NO: 6799 - DNA, 17 bp, Artificial Sequence
  Synthetic oligonucleotide: CBLB-1225
acttttatatggtcatg

SEQ ID NO: 6800 - DNA, 17 bp, Artificial Sequence
  Synthetic oligonucleotide: CBLB-1226
cctgtgtaacttttata

SEQ ID NO: 6801 - DNA, 17 bp, Artificial Sequence
  Synthetic oligonucleotide: CBLB-1227
ctggaatttggggagga

SEQ ID NO: 6802 - DNA, 17 bp, Artificial Sequence
  Synthetic oligonucleotide: CBLB-1228
cctggaatttggggagg

SEQ ID NO: 6803 - DNA, 17 bp, Artificial Sequence
  Synthetic oligonucleotide: CBLB-1229
gttcctggaatttgggg

SEQ ID NO: 6804 - DNA, 17 bp, Artificial Sequence
  Synthetic oligonucleotide: CBLB-1230
attgttcctggaatttg

SEQ ID NO: 6805 - DNA, 17 bp, Artificial Sequence
  Synthetic oligonucleotide: CBLB-1231
tattgttcctggaattt

SEQ ID NO: 6806 - DNA, 17 bp, Artificial Sequence
  Synthetic oligonucleotide: CBLB-1232
atattgttcctggaatt

SEQ ID NO: 6807 - DNA, 17 bp, Artificial Sequence
  Synthetic oligonucleotide: CBLB-1233
ataattcatattgttcc

SEQ ID NO: 6808 - DNA, 17 bp, Artificial Sequence
  Synthetic oligonucleotide: CBLB-1234
cttacagagctgaaaag

SEQ ID NO: 6809 - DNA, 17 bp, Artificial Sequence
  Synthetic oligonucleotide: CBLB-1235
cacatcaaatgcccaca

SEQ ID NO: 6810 - DNA, 17 bp, Artificial Sequence
  Synthetic oligonucleotide: CBLB-1236
ccatgccgtaaggcaag

SEQ ID NO: 6811 - DNA, 17 bp, Artificial Sequence
  Synthetic oligonucleotide: CBLB-1237
atacctgccatgccgta

SEQ ID NO: 6812 - DNA, 17 bp, Artificial Sequence
  Synthetic oligonucleotide: CBLB-1238
atagaaaatgcatggat

SEQ ID NO: 6813 - DNA, 17 bp, Artificial Sequence
  Synthetic oligonucleotide: CBLB-1239
aacaaatagaaaatgca

SEQ ID NO: 6814 - DNA, 17 bp, Artificial Sequence
  Synthetic oligonucleotide: CBLB-1240
tttcacaacgacagaaa

SEQ ID NO: 6815 - DNA, 17 bp, Artificial Sequence
  Synthetic oligonucleotide: CBLB-1241
atttcacaacgacagaa

SEQ ID NO: 6816 - DNA, 17 bp, Artificial Sequence
  Synthetic oligonucleotide: CBLB-1242
aaggggtccacgattat

SEQ ID NO: 6817 - DNA, 17 bp, Artificial Sequence
  Synthetic oligonucleotide: CBLB-1243
aaaggggtccacgatta

SEQ ID NO: 6818 - DNA, 17 bp, Artificial Sequence
  Synthetic oligonucleotide: CBLB-1244
catctcttggatcaaag

SEQ ID NO: 6819 - DNA, 17 bp, Artificial Sequence
  Synthetic oligonucleotide: CBLB-1245
tcatctcttggatcaaa

SEQ ID NO: 6820 - DNA, 17 bp, Artificial Sequence
  Synthetic oligonucleotide: CBLB-1246
ttcatctcttggatcaa

SEQ ID NO: 6821 - DNA, 17 bp, Artificial Sequence
  Synthetic oligonucleotide: CBLB-1247
ctggagccttcatctct

SEQ ID NO: 6822 - DNA, 17 bp, Artificial Sequence
  Synthetic oligonucleotide: CBLB-1248
aatgatgctgcaacacc

SEQ ID NO: 6823 - DNA, 17 bp, Artificial Sequence
  Synthetic oligonucleotide: CBLB-1249
gcatcggcatgccaaag

SEQ ID NO: 6824 - DNA, 17 bp, Artificial Sequence
  Synthetic oligonucleotide: CBLB-1250
agcatcggcatgccaaa

SEQ ID NO: 6825 - DNA, 17 bp, Artificial Sequence
  Synthetic oligonucleotide: CBLB-1251
tagcatcggcatgccaa

SEQ ID NO: 6826 - DNA, 17 bp, Artificial Sequence
  Synthetic oligonucleotide: CBLB-1252
tcgtccaagtctagcat

SEQ ID NO: 6827 - DNA, 17 bp, Artificial Sequence
  Synthetic oligonucleotide: CBLB-1253
caaccgattcatcatca

SEQ ID NO: 6828 - DNA, 17 bp, Artificial Sequence
  Synthetic oligonucleotide: CBLB-1254
tttctagttttaccttt

SEQ ID NO: 6829 - DNA, 17 bp, Artificial Sequence
  Synthetic oligonucleotide: CBLB-1255
gatcctggtgatgtgac

SEQ ID NO: 6830 - DNA, 17 bp, Artificial Sequence
  Synthetic oligonucleotide: CBLB-1256
gcaaggggagaggatcc

SEQ ID NO: 6831 - DNA, 17 bp, Artificial Sequence
  Synthetic oligonucleotide: CBLB-1257
tctctgggcaaggggag

SEQ ID NO: 6832 - DNA, 17 bp, Artificial Sequence
  Synthetic oligonucleotide: CBLB-1258
tttcttctctgggcaag

SEQ ID NO: 6833 - DNA, 17 bp, Artificial Sequence
  Synthetic oligonucleotide: CBLB-1259
ctttcttctctgggcaa

SEQ ID NO: 6834 - DNA, 17 bp, Artificial Sequence
  Synthetic oligonucleotide: CBLB-1260
gctttcttctctgggca

SEQ ID NO: 6835 - DNA, 17 bp, Artificial Sequence
  Synthetic oligonucleotide: CBLB-1261
ctgtggctttcttctct

SEQ ID NO: 6836 - DNA, 17 bp, Artificial Sequence
  Synthetic oligonucleotide: CBLB-1262
gctgtggctttcttctc

SEQ ID NO: 6837 - DNA, 17 bp, Artificial Sequence
  Synthetic oligonucleotide: CBLB-1263
tggagtgggtcaggctg

SEQ ID NO: 6838 - DNA, 17 bp, Artificial Sequence
  Synthetic oligonucleotide: CBLB-1264
gggatctggagtgggtc

SEQ ID NO: 6839 - DNA, 17 bp, Artificial Sequence
  Synthetic oligonucleotide: CBLB-1265
gatgtgggatctggagt

SEQ ID NO: 6840 - DNA, 17 bp, Artificial Sequence
  Synthetic oligonucleotide: CBLB-1266
agatgtgggatctggag

SEQ ID NO: 6841 - DNA, 17 bp, Artificial Sequence
  Synthetic oligonucleotide: CBLB-1267
ggcttagatgtgggatc

SEQ ID NO: 6842 - DNA, 17 bp, Artificial Sequence
  Synthetic oligonucleotide: CBLB-1268
gtggcaggcttagatgt

SEQ ID NO: 6843 - DNA, 17 bp, Artificial Sequence
  Synthetic oligonucleotide: CBLB-1269
ggtggcaggcttagatg

SEQ ID NO: 6844 - DNA, 17 bp, Artificial Sequence
  Synthetic oligonucleotide: CBLB-1270
gaggaggcacgggtggc

SEQ ID NO: 6845 - RNA, 17 nt, Artificial Sequence
  Synthetic oligonucleotide: CBLB-1271
aggcgaggaggcacggg

SEQ ID NO: 6846 - DNA, 17 bp, Artificial Sequence
  Synthetic oligonucleotide: CBLB-1272
tccaggcgaggaggcac

SEQ ID NO: 6847 - DNA, 17 bp, Artificial Sequence
  Synthetic oligonucleotide: CBLB-1273
atccaggcgaggaggca

SEQ ID NO: 6848 - DNA, 17 bp, Artificial Sequence
  Synthetic oligonucleotide: CBLB-1274
attagatccaggcgagg

SEQ ID NO: 6849 - DNA, 17 bp, Artificial Sequence
  Synthetic oligonucleotide: CBLB-1275
tgaattagatccaggcg

SEQ ID NO: 6850 - DNA, 17 bp, Artificial Sequence
  Synthetic oligonucleotide: CBLB-1276
ctttctgaattagatcc

SEQ ID NO: 6851 - DNA, 17 bp, Artificial Sequence
  Synthetic oligonucleotide: CBLB-1277
cccgttgggctgccaca

SEQ ID NO: 6852 - DNA, 17 bp, Artificial Sequence
  Synthetic oligonucleotide: CBLB-1278
acccgttgggctgccac

SEQ ID NO: 6853 - DNA, 17 bp, Artificial Sequence
  Synthetic oligonucleotide: CBLB-1279
cctttggtgaacccgtt

SEQ ID NO: 6854 - DNA, 17 bp, Artificial Sequence
  Synthetic oligonucleotide: CBLB-1280
acctttggtgaacccgt

SEQ ID NO: 6855 - DNA, 17 bp, Artificial Sequence
  Synthetic oligonucleotide: CBLB-1281
taaaattgatctacctt

SEQ ID NO: 6856 - DNA, 17 bp, Artificial Sequence
  Synthetic oligonucleotide: CBLB-1282
tgttttctcaccatgca

SEQ ID NO: 6857 - DNA, 17 bp, Artificial Sequence
  Synthetic oligonucleotide: CBLB-1283
ggaggtggtgctgggag

SEQ ID NO: 6858 - DNA, 17 bp, Artificial Sequence
  Synthetic oligonucleotide: CBLB-1284
agggaggaggtggtgct

SEQ ID NO: 6859 - DNA, 17 bp, Artificial Sequence
  Synthetic oligonucleotide: CBLB-1285
aagggaggaggtggtgc

SEQ ID NO: 6860 - DNA, 17 bp, Artificial Sequence
  Synthetic oligonucleotide: CBLB-1286
tctcttaagggaggagg

SEQ ID NO: 6861 - DNA, 17 bp, Artificial Sequence
  Synthetic oligonucleotide: CBLB-1287
ggatctcttaagggagg

SEQ ID NO: 6862 - DNA, 17 bp, Artificial Sequence
  Synthetic oligonucleotide: CBLB-1288
ggaggatctcttaaggg

SEQ ID NO: 6863 - DNA, 17 bp, Artificial Sequence
  Synthetic oligonucleotide: CBLB-1289
ggaggaggatctcttaa

SEQ ID NO: 6864 - DNA, 17 bp, Artificial Sequence
  Synthetic oligonucleotide: CBLB-1290
tggaggaggatctctta

SEQ ID NO: 6865 - DNA, 17 bp, Artificial Sequence
  Synthetic oligonucleotide: CBLB-1291
tcaggtggcggtggagg

SEQ ID NO: 6866 - DNA, 17 bp, Artificial Sequence
  Synthetic oligonucleotide: CBLB-1292
ctttcaggtggcggtgg

SEQ ID NO: 6867 - DNA, 17 bp, Artificial Sequence
  Synthetic oligonucleotide: CBLB-1293
ggtctttcaggtggcgg

SEQ ID NO: 6868 - DNA, 17 bp, Artificial Sequence
  Synthetic oligonucleotide: CBLB-1294
ggaggtctttcaggtgg

SEQ ID NO: 6869 - DNA, 17 bp, Artificial Sequence
  Synthetic oligonucleotide: CBLB-1295
ggtggaggtctttcagg

SEQ ID NO: 6870 - DNA, 17 bp, Artificial Sequence
  Synthetic oligonucleotide: CBLB-1296
attggtggaggtctttc

SEQ ID NO: 6871 - DNA, 17 bp, Artificial Sequence
  Synthetic oligonucleotide: CBLB-1297
tctggtgggattggtgg

SEQ ID NO: 6872 - DNA, 17 bp, Artificial Sequence
  Synthetic oligonucleotide: CBLB-1298
ttgtctggtgggattgg

SEQ ID NO: 6873 - DNA, 17 bp, Artificial Sequence
  Synthetic oligonucleotide: CBLB-1299
ctattgtctggtgggat

SEQ ID NO: 6874 - DNA, 17 bp, Artificial Sequence
  Synthetic oligonucleotide: CBLB-1300
tcagtctattgtctggt

SEQ ID NO: 6875 - DNA, 17 bp, Artificial Sequence
  Synthetic oligonucleotide: CBLB-1301
ctcagtctattgtctgg

SEQ ID NO: 6876 - DNA, 17 bp, Artificial Sequence
  Synthetic oligonucleotide: CBLB-1302
ctactcagtctattgtc

SEQ ID NO: 6877 - DNA, 17 bp, Artificial Sequence
  Synthetic oligonucleotide: CBLB-1303
gcacgctttccacatga

SEQ ID NO: 6878 - DNA, 17 bp, Artificial Sequence
  Synthetic oligonucleotide: CBLB-1304
attggcgggtctctgga

SEQ ID NO: 6879 - DNA, 17 bp, Artificial Sequence
  Synthetic oligonucleotide: CBLB-1305
aggcattggcgggtctc

SEQ ID NO: 6880 - DNA, 17 bp, Artificial Sequence
  Synthetic oligonucleotide: CBLB-1306
cttcaagaggcattggc

SEQ ID NO: 6881 - DNA, 17 bp, Artificial Sequence
  Synthetic oligonucleotide: CBLB-1307
gcttcaagaggcattgg

SEQ ID NO: 6882 - DNA, 17 bp, Artificial Sequence
  Synthetic oligonucleotide: CBLB-1308
catgcttcaagaggcat

SEQ ID NO: 6883 - DNA, 17 bp, Artificial Sequence
  Synthetic oligonucleotide: CBLB-1309
gggcaccatgcttcaag

SEQ ID NO: 6884 - DNA, 17 bp, Artificial Sequence
  Synthetic oligonucleotide: CBLB-1310
tcccaaacacatcccga

SEQ ID NO: 6885 - DNA, 17 bp, Artificial Sequence
  Synthetic oligonucleotide: CBLB-1311
gtcccaaacacatcccg

SEQ ID NO: 6886 - DNA, 17 bp, Artificial Sequence
  Synthetic oligonucleotide: CBLB-1312
ttggagagccctcccct

SEQ ID NO: 6887 - DNA, 17 bp, Artificial Sequence
  Synthetic oligonucleotide: CBLB-1313
gctgtgattccaggttt

SEQ ID NO: 6888 - DNA, 17 bp, Artificial Sequence
  Synthetic oligonucleotide: CBLB-1314
gaactcgctgtgattcc

SEQ ID NO: 6889 - DNA, 17 bp, Artificial Sequence
  Synthetic oligonucleotide: CBLB-1315
gtttccgcataagcact

SEQ ID NO: 6890 - DNA, 17 bp, Artificial Sequence
  Synthetic oligonucleotide: CBLB-1316
tgtttccgcataagcac

SEQ ID NO: 6891 - DNA, 17 bp, Artificial Sequence
  Synthetic oligonucleotide: CBLB-1317
cttctaaaggcaaatca

SEQ ID NO: 6892 - DNA, 17 bp, Artificial Sequence
  Synthetic oligonucleotide: CBLB-1318
accttagctccttctaa

SEQ ID NO: 6893 - DNA, 17 bp, Artificial Sequence
  Synthetic oligonucleotide: CBLB-1319
acttccaaggtgaccat

SEQ ID NO: 6894 - DNA, 17 bp, Artificial Sequence
  Synthetic oligonucleotide: CBLB-1320
catattcttcacttcca

SEQ ID NO: 6895 - RNA, 17 nt, Artificial Sequence
  Synthetic oligonucleotide: CBLB-1321
ggaggagaaagccgggg

SEQ ID NO: 6896 - RNA, 17 nt, Artificial Sequence
  Synthetic oligonucleotide: CBLB-1322
ggaggaggagaaagccg

SEQ ID NO: 6897 - RNA, 17 nt, Artificial Sequence
  Synthetic oligonucleotide: CBLB-1323
aggaggaggagaaagcc

SEQ ID NO: 6898 - RNA, 17 nt, Artificial Sequence
  Synthetic oligonucleotide: CBLB-1324
gaggaggaggagaaagc

SEQ ID NO: 6899 - DNA, 17 bp, Artificial Sequence
  Synthetic oligonucleotide: CBLB-1325
gtggtaactggaggagg

SEQ ID NO: 6900 - DNA, 17 bp, Artificial Sequence
  Synthetic oligonucleotide: CBLB-1326
agggtggtaactggagg

SEQ ID NO: 6901 - DNA, 17 bp, Artificial Sequence
  Synthetic oligonucleotide: CBLB-1327
aggagggtggtaactgg

SEQ ID NO: 6902 - DNA, 17 bp, Artificial Sequence
  Synthetic oligonucleotide: CBLB-1328
gggaggagggtggtaac

SEQ ID NO: 6903 - DNA, 17 bp, Artificial Sequence
  Synthetic oligonucleotide: CBLB-1329
tatgctagggaggaggg

SEQ ID NO: 6904 - DNA, 17 bp, Artificial Sequence
  Synthetic oligonucleotide: CBLB-1330
ctttatgctagggagga

SEQ ID NO: 6905 - DNA, 17 bp, Artificial Sequence
  Synthetic oligonucleotide: CBLB-1331
actttatgctagggagg

SEQ ID NO: 6906 - DNA, 17 bp, Artificial Sequence
  Synthetic oligonucleotide: CBLB-1332
ctcactttatgctaggg

SEQ ID NO: 6907 - DNA, 17 bp, Artificial Sequence
  Synthetic oligonucleotide: CBLB-1333
aaactcactttatgcta

SEQ ID NO: 6908 - DNA, 17 bp, Artificial Sequence
  Synthetic oligonucleotide: CBLB-1334
aaaactcactttatgct

SEQ ID NO: 6909 - DNA, 17 bp, Artificial Sequence
  Synthetic oligonucleotide: CBLB-1335
accagtacacctaccag

SEQ ID NO: 6910 - DNA, 17 bp, Artificial Sequence
  Synthetic oligonucleotide: CBLB-1336
gaccagtacacctacca

SEQ ID NO: 6911 - DNA, 17 bp, Artificial Sequence
  Synthetic oligonucleotide: CBLB-1337
ggaccagtacacctacc

SEQ ID NO: 6912 - DNA, 17 bp, Artificial Sequence
  Synthetic oligonucleotide: CBLB-1338
gaaagagaatttgctaa

SEQ ID NO: 6913 - DNA, 17 bp, Artificial Sequence
  Synthetic oligonucleotide: CBLB-1339
catcatcttcctctact

SEQ ID NO: 6914 - DNA, 17 bp, Artificial Sequence
  Synthetic oligonucleotide: CBLB-1340
tcatcatcttcctctac

SEQ ID NO: 6915 - DNA, 17 bp, Artificial Sequence
  Synthetic oligonucleotide: CBLB-1341
gaaacagggtgggatga

SEQ ID NO: 6916 - DNA, 17 bp, Artificial Sequence
  Synthetic oligonucleotide: CBLB-1342
attcagggaaacagggt

SEQ ID NO: 6917 - DNA, 17 bp, Artificial Sequence
  Synthetic oligonucleotide: CBLB-1343
aattcagggaaacaggg

SEQ ID NO: 6918 - DNA, 17 bp, Artificial Sequence
  Synthetic oligonucleotide: CBLB-1344
gtgaattcagggaaaca

SEQ ID NO: 6919 - DNA, 17 bp, Artificial Sequence
  Synthetic oligonucleotide: CBLB-1345
tgtgaattcagggaaac

SEQ ID NO: 6920 - DNA, 17 bp, Artificial Sequence
  Synthetic oligonucleotide: CBLB-1346
agatggttgtgaattca

SEQ ID NO: 6921 - DNA, 17 bp, Artificial Sequence
  Synthetic oligonucleotide: CBLB-1347
gagatggttgtgaattc

SEQ ID NO: 6922 - DNA, 17 bp, Artificial Sequence
  Synthetic oligonucleotide: CBLB-1348
acattatgacaatgaga

SEQ ID NO: 6923 - DNA, 17 bp, Artificial Sequence
  Synthetic oligonucleotide: CBLB-1349
tactcttaccgaacagg

SEQ ID NO: 6924 - DNA, 17 bp, Artificial Sequence
  Synthetic oligonucleotide: CBLB-1350
ccatactcttaccgaac

SEQ ID NO: 6925 - DNA, 17 bp, Artificial Sequence
  Synthetic oligonucleotide: CBLB-1351
attatcacaagacctaa

SEQ ID NO: 6926 - DNA, 17 bp, Artificial Sequence
  Synthetic oligonucleotide: CBLB-1352
gatttcttctctgaaga

SEQ ID NO: 6927 - DNA, 17 bp, Artificial Sequence
  Synthetic oligonucleotide: CBLB-1353
aatatatgcttaagtca

SEQ ID NO: 6928 - DNA, 17 bp, Artificial Sequence
  Synthetic oligonucleotide: CBLB-1354
aaatatatgcttaagtc

SEQ ID NO: 6929 - DNA, 17 bp, Artificial Sequence
  Synthetic oligonucleotide: CBLB-1355
tcaaaaacatctcctag

SEQ ID NO: 6930 - DNA, 17 bp, Artificial Sequence
  Synthetic oligonucleotide: CBLB-1356
taatggcacgggatcag

SEQ ID NO: 6931 - DNA, 17 bp, Artificial Sequence
  Synthetic oligonucleotide: CBLB-1357
gcaggtggtaatggcac

SEQ ID NO: 6932 - DNA, 17 bp, Artificial Sequence
  Synthetic oligonucleotide: CBLB-1358
ggcaggtggtaatggca

SEQ ID NO: 6933 - DNA, 17 bp, Artificial Sequence
  Synthetic oligonucleotide: CBLB-1359
ggcctggcaggtggtaa

SEQ ID NO: 6934 - DNA, 17 bp, Artificial Sequence
  Synthetic oligonucleotide: CBLB-1360
gttggaggcctggcagg

SEQ ID NO: 6935 - DNA, 17 bp, Artificial Sequence
  Synthetic oligonucleotide: CBLB-1361
cgagttggaggcctggc

SEQ ID NO: 6936 - DNA, 17 bp, Artificial Sequence
  Synthetic oligonucleotide: CBLB-1362
gtcccgagttggaggcc

SEQ ID NO: 6937 - DNA, 17 bp, Artificial Sequence
  Synthetic oligonucleotide: CBLB-1363
ggattgtcccgagttgg

SEQ ID NO: 6938 - DNA, 17 bp, Artificial Sequence
  Synthetic oligonucleotide: CBLB-1364
tttggattgtcccgagt

SEQ ID NO: 6939 - DNA, 17 bp, Artificial Sequence
  Synthetic oligonucleotide: CBLB-1365
agtgaagaaccatgctt

SEQ ID NO: 6940 - DNA, 17 bp, Artificial Sequence
  Synthetic oligonucleotide: CBLB-1366
agaagatcataatcaga

SEQ ID NO: 6941 - DNA, 17 bp, Artificial Sequence
  Synthetic oligonucleotide: CBLB-1367
gagaagatcataatcag

SEQ ID NO: 6942 - DNA, 17 bp, Artificial Sequence
  Synthetic oligonucleotide: CBLB-1368
ggtttcaacctaatgga

SEQ ID NO: 6943 - DNA, 17 bp, Artificial Sequence
  Synthetic oligonucleotide: CBLB-1369
aggtttcaacctaatgg

SEQ ID NO: 6944 - DNA, 17 bp, Artificial Sequence
  Synthetic oligonucleotide: CBLB-1370
taaaggtttcaacctaa

SEQ ID NO: 6945 - DNA, 17 bp, Artificial Sequence
  Synthetic oligonucleotide: CBLB-1371
gttcaaaacttttttaa

SEQ ID NO: 6946 - DNA, 17 bp, Artificial Sequence
  Synthetic oligonucleotide: CBLB-1372
cacctgcatttaaagaa

SEQ ID NO: 6947 - DNA, 17 bp, Artificial Sequence
  Synthetic oligonucleotide: CBLB-1373
tgggagagatggaggga

SEQ ID NO: 6948 - DNA, 17 bp, Artificial Sequence
  Synthetic oligonucleotide: CBLB-1374
gtgggagagatggaggg

SEQ ID NO: 6949 - DNA, 17 bp, Artificial Sequence
  Synthetic oligonucleotide: CBLB-1375
gaggtgggagagatgga

SEQ ID NO: 6950 - DNA, 17 bp, Artificial Sequence
  Synthetic oligonucleotide: CBLB-1376
ggaggtgggagagatgg

SEQ ID NO: 6951 - DNA, 17 bp, Artificial Sequence
  Synthetic oligonucleotide: CBLB-1377
gggggaggtgggagaga

SEQ ID NO: 6952 - DNA, 17 bp, Artificial Sequence
  Synthetic oligonucleotide: CBLB-1378
caggaggtgggggaggt

SEQ ID NO: 6953 - DNA, 17 bp, Artificial Sequence
  Synthetic oligonucleotide: CBLB-1379
gcaggaggtgggggagg

SEQ ID NO: 6954 - DNA, 17 bp, Artificial Sequence
  Synthetic oligonucleotide: CBLB-1380
cttgcaggaggtggggg

SEQ ID NO: 6955 - DNA, 17 bp, Artificial Sequence
  Synthetic oligonucleotide: CBLB-1381
tgccttgcaggaggtgg

SEQ ID NO: 6956 - DNA, 17 bp, Artificial Sequence
  Synthetic oligonucleotide: CBLB-1382
atgccttgcaggaggtg

SEQ ID NO: 6957 - DNA, 17 bp, Artificial Sequence
  Synthetic oligonucleotide: CBLB-1383
tatgccttgcaggaggt

SEQ ID NO: 6958 - DNA, 17 bp, Artificial Sequence
  Synthetic oligonucleotide: CBLB-1384
ctatgccttgcaggagg

SEQ ID NO: 6959 - DNA, 17 bp, Artificial Sequence
  Synthetic oligonucleotide: CBLB-1385
agactatgccttgcagg

SEQ ID NO: 6960 - DNA, 17 bp, Artificial Sequence
  Synthetic oligonucleotide: CBLB-1386
atgagactatgccttgc

SEQ ID NO: 6961 - DNA, 17 bp, Artificial Sequence
  Synthetic oligonucleotide: CBLB-1387
cggctactggagccagg

SEQ ID NO: 6962 - DNA, 17 bp, Artificial Sequence
  Synthetic oligonucleotide: CBLB-1388
ggccggctactggagcc

SEQ ID NO: 6963 - DNA, 17 bp, Artificial Sequence
  Synthetic oligonucleotide: CBLB-1389
tgaggatggccggctac

SEQ ID NO: 6964 - DNA, 17 bp, Artificial Sequence
  Synthetic oligonucleotide: CBLB-1390
cctgtcctgaggatggc

SEQ ID NO: 6965 - DNA, 17 bp, Artificial Sequence
  Synthetic oligonucleotide: CBLB-1391
agatcctgtcctgagga

SEQ ID NO: 6966 - DNA, 17 bp, Artificial Sequence
  Synthetic oligonucleotide: CBLB-1392
aaaaagatcctgtcctg

SEQ ID NO: 6967 - DNA, 17 bp, Artificial Sequence
  Synthetic oligonucleotide: CBLB-1393
ttttccctcctacctga

SEQ ID NO: 6968 - DNA, 17 bp, Artificial Sequence
  Synthetic oligonucleotide: CBLB-1394
cttgctagatcaacaaa

SEQ ID NO: 6969 - DNA, 17 bp, Artificial Sequence
  Synthetic oligonucleotide: CBLB-1395
acttgctagatcaacaa

SEQ ID NO: 6970 - DNA, 17 bp, Artificial Sequence
  Synthetic oligonucleotide: CBLB-1396
caggaggcaaaggaact

SEQ ID NO: 6971 - DNA, 17 bp, Artificial Sequence
  Synthetic oligonucleotide: CBLB-1397
cttctagcaggaggcaa

SEQ ID NO: 6972 - DNA, 17 bp, Artificial Sequence
  Synthetic oligonucleotide: CBLB-1398
ggtaaccttctagcagg

SEQ ID NO: 6973 - DNA, 17 bp, Artificial Sequence
  Synthetic oligonucleotide: CBLB-1399
cctggtaaccttctagc

SEQ ID NO: 6974 - DNA, 17 bp, Artificial Sequence
  Synthetic oligonucleotide: CBLB-1400
gttttgacattttcacc

SEQ ID NO: 6975 - DNA, 17 bp, Artificial Sequence
  Synthetic oligonucleotide: CBLB-1401
aactcacctgaacatga

SEQ ID NO: 6976 - DNA, 17 bp, Artificial Sequence
  Synthetic oligonucleotide: CBLB-1402
ggtttagggggtctggc

SEQ ID NO: 6977 - DNA, 17 bp, Artificial Sequence
  Synthetic oligonucleotide: CBLB-1403
tcgtggtttagggggtc

SEQ ID NO: 6978 - DNA, 17 bp, Artificial Sequence
  Synthetic oligonucleotide: CBLB-1404
cgcggtcgtggtttagg

SEQ ID NO: 6979 - DNA, 17 bp, Artificial Sequence
  Synthetic oligonucleotide: CBLB-1405
gcgcggtcgtggtttag

SEQ ID NO: 6980 - DNA, 17 bp, Artificial Sequence
  Synthetic oligonucleotide: CBLB-1406
tgcgcggtcgtggttta

SEQ ID NO: 6981 - DNA, 17 bp, Artificial Sequence
  Synthetic oligonucleotide: CBLB-1407
ctgcgcggtcgtggttt

SEQ ID NO: 6982 - DNA, 17 bp, Artificial Sequence
  Synthetic oligonucleotide: CBLB-1408
gcagtcctgcgcggtcg

SEQ ID NO: 6983 - DNA, 17 bp, Artificial Sequence
  Synthetic oligonucleotide: CBLB-1409
tctggtgcagtcctgcg

SEQ ID NO: 6984 - DNA, 17 bp, Artificial Sequence
  Synthetic oligonucleotide: CBLB-1410
tttctgtggtgaatttc

SEQ ID NO: 6985 - DNA, 17 bp, Artificial Sequence
  Synthetic oligonucleotide: CBLB-1411
gcccatggggttttctg

SEQ ID NO: 6986 - DNA, 17 bp, Artificial Sequence
  Synthetic oligonucleotide: CBLB-1412
gccgcctcaggcccatg

SEQ ID NO: 6987 - DNA, 17 bp, Artificial Sequence
  Synthetic oligonucleotide: CBLB-1413
tgccgcctcaggcccat

SEQ ID NO: 6988 - DNA, 17 bp, Artificial Sequence
  Synthetic oligonucleotide: CBLB-1414
atgccgcctcaggccca

SEQ ID NO: 6989 - DNA, 17 bp, Artificial Sequence
  Synthetic oligonucleotide: CBLB-1415
ttttccaatgccgcctc

SEQ ID NO: 6990 - DNA, 17 bp, Artificial Sequence
  Synthetic oligonucleotide: CBLB-1416
tctcttcacctcttcaa

SEQ ID NO: 6991 - DNA, 17 bp, Artificial Sequence
  Synthetic oligonucleotide: CBLB-1417
attctgggctatctcta

SEQ ID NO: 6992 - DNA, 17 bp, Artificial Sequence
  Synthetic oligonucleotide: CBLB-1418
aacttcgacattattct

SEQ ID NO: 6993 - DNA, 17 bp, Artificial Sequence
  Synthetic oligonucleotide: CBLB-1419
caacttcgacattattc

SEQ ID NO: 6994 - DNA, 17 bp, Artificial Sequence
  Synthetic oligonucleotide: CBLB-1420
ttctcggaggatgctcc

SEQ ID NO: 6995 - DNA, 17 bp, Artificial Sequence
  Synthetic oligonucleotide: CBLB-1421
attctcggaggatgctc

SEQ ID NO: 6996 - DNA, 17 bp, Artificial Sequence
  Synthetic oligonucleotide: CBLB-1422
ggaaggcaaattctcgg

SEQ ID NO: 6997 - DNA, 17 bp, Artificial Sequence
  Synthetic oligonucleotide: CBLB-1423
gagggaaggcaaattct

SEQ ID NO: 6998 - DNA, 17 bp, Artificial Sequence
  Synthetic oligonucleotide: CBLB-1424
ggatactggaggaggga

SEQ ID NO: 6999 - DNA, 17 bp, Artificial Sequence
  Synthetic oligonucleotide: CBLB-1425
gtggggatactggagga

SEQ ID NO: 7000 - DNA, 17 bp, Artificial Sequence
  Synthetic oligonucleotide: CBLB-1426
cgtggggatactggagg

SEQ ID NO: 7001 - DNA, 17 bp, Artificial Sequence
  Synthetic oligonucleotide: CBLB-1427
agacgtggggatactgg

SEQ ID NO: 7002 - DNA, 17 bp, Artificial Sequence
  Synthetic oligonucleotide: CBLB-1428
tttagacgtggggatac

SEQ ID NO: 7003 - DNA, 17 bp, Artificial Sequence
  Synthetic oligonucleotide: CBLB-1429
ctatagatttagacgtg

SEQ ID NO: 7004 - DNA, 17 bp, Artificial Sequence
  Synthetic oligonucleotide: CBLB-1430
gctatagatttagacgt

SEQ ID NO: 7005 - DNA, 17 bp, Artificial Sequence
  Synthetic oligonucleotide: CBLB-1431
tgctatagatttagacg

SEQ ID NO: 7006 - DNA, 17 bp, Artificial Sequence
  Synthetic oligonucleotide: CBLB-1432
tttggtgtctacagttc

SEQ ID NO: 7007 - DNA, 20 bp, Artificial Sequence
  Synthetic oligonucleotide: CBLB-01
aattccagatggcaaactca

SEQ ID NO: 7008 - DNA, 20 bp, Artificial Sequence
  Synthetic oligonucleotide: CBLB-02
atggcaaactcaatgaatgg

SEQ ID NO: 7009 - DNA, 20 bp, Artificial Sequence
  Synthetic oligonucleotide: CBLB-03
aatggcagaaaccctggtgg

SEQ ID NO: 7010 - DNA, 20 bp, Artificial Sequence
  Synthetic oligonucleotide: CBLB-04
tggcagaaaccctggtggtc

SEQ ID NO: 7011 - DNA, 20 bp, Artificial Sequence
  Synthetic oligonucleotide: CBLB-2284
ggcagaaaccctggtggtcg

SEQ ID NO: 7012 - DNA, 20 bp, Artificial Sequence
  Synthetic oligonucleotide: CBLB-06
cagaaaccctggtggtcgag

SEQ ID NO: 7013 - DNA, 20 bp, Artificial Sequence
  Synthetic oligonucleotide: CBLB-2285
agaaaccctggtggtcgagg

SEQ ID NO: 7014 - DNA, 20 bp, Artificial Sequence
  Synthetic oligonucleotide: CBLB-08
ggtggtcgaggaggaaatcc

SEQ ID NO: 7015 - DNA, 20 bp, Artificial Sequence
  Synthetic oligonucleotide: CBLB-09
ggaggaaatccccgaaaagg

SEQ ID NO: 7016 - DNA, 20 bp, Artificial Sequence
  Synthetic oligonucleotide: CBLB-10
atccccgaaaaggtcgaatt

SEQ ID NO: 7017 - DNA, 20 bp, Artificial Sequence
  Synthetic oligonucleotide: CBLB-11
tgggtattattgatgctatt

SEQ ID NO: 7018 - DNA, 20 bp, Artificial Sequence
  Synthetic oligonucleotide: CBLB-12
tgatgctattcaggatgcag

SEQ ID NO: 7019 - DNA, 20 bp, Artificial Sequence
  Synthetic oligonucleotide: CBLB-13
aagcaagctgccgcagatcg

SEQ ID NO: 7020 - DNA, 20 bp, Artificial Sequence
  Synthetic oligonucleotide: CBLB-14
ctgccgcagatcgcaggacc

SEQ ID NO: 7021 - DNA, 20 bp, Artificial Sequence
  Synthetic oligonucleotide: CBLB-2292
tgccgcagatcgcaggaccg

SEQ ID NO: 7022 - DNA, 20 bp, Artificial Sequence
  Synthetic oligonucleotide: CBLB-16
ccgcagatcgcaggaccgtg

SEQ ID NO: 7023 - DNA, 20 bp, Artificial Sequence
  Synthetic oligonucleotide: CBLB-17
cgcaggaccgtggagaagac

SEQ ID NO: 7024 - DNA, 20 bp, Artificial Sequence
  Synthetic oligonucleotide: CBLB-2293
gcaggaccgtggagaagact

SEQ ID NO: 7025 - DNA, 20 bp, Artificial Sequence
  Synthetic oligonucleotide: CBLB-19
tggagaagacttggaagctc

SEQ ID NO: 7026 - DNA, 20 bp, Artificial Sequence
  Synthetic oligonucleotide: CBLB-20
ttctgtctgacgttgcctgt

SEQ ID NO: 7027 - DNA, 20 bp, Artificial Sequence
  Synthetic oligonucleotide: CBLB-21
gccaaaatcccaaacttcag

SEQ ID NO: 7028 - DNA, 20 bp, Artificial Sequence
  Synthetic oligonucleotide: CBLB-22
atcagcatttacgacttata

SEQ ID NO: 7029 - DNA, 20 bp, Artificial Sequence
  Synthetic oligonucleotide: CBLB-23
tgagtaaatatgatgacaac

SEQ ID NO: 7030 - DNA, 20 bp, Artificial Sequence
  Synthetic oligonucleotide: CBLB-24
ccagaaacttgcccaactca

SEQ ID NO: 7031 - DNA, 20 bp, Artificial Sequence
  Synthetic oligonucleotide: CBLB-25
agaaacttgcccaactcagt

SEQ ID NO: 7032 - DNA, 20 bp, Artificial Sequence
  Synthetic oligonucleotide: CBLB-26
acttgcccaactcagtgaga

SEQ ID NO: 7033 - DNA, 20 bp, Artificial Sequence
  Synthetic oligonucleotide: CBLB-27
aaatctacattgatagcctt

SEQ ID NO: 7034 - DNA, 20 bp, Artificial Sequence
  Synthetic oligonucleotide: CBLB-28
agccttatgaaaaagtcaaa

SEQ ID NO: 7035 - DNA, 20 bp, Artificial Sequence
  Synthetic oligonucleotide: CBLB-29
acgggcaataagactcttta

SEQ ID NO: 7036 - DNA, 20 bp, Artificial Sequence
  Synthetic oligonucleotide: CBLB-30
taagactctttaaagaaggc

SEQ ID NO: 7037 - DNA, 20 bp, Artificial Sequence
  Synthetic oligonucleotide: CBLB-31
aagactctttaaagaaggca

SEQ ID NO: 7038 - DNA, 20 bp, Artificial Sequence
  Synthetic oligonucleotide: CBLB-32
gactctttaaagaaggcaag

SEQ ID NO: 7039 - DNA, 20 bp, Artificial Sequence
  Synthetic oligonucleotide: CBLB-33
ctctttaaagaaggcaagga

SEQ ID NO: 7040 - DNA, 20 bp, Artificial Sequence
  Synthetic oligonucleotide: CBLB-34
agaaggcaaggagagaatgt

SEQ ID NO: 7041 - DNA, 20 bp, Artificial Sequence
  Synthetic oligonucleotide: CBLB-35
aggcaaggagagaatgtatg

SEQ ID NO: 7042 - DNA, 17 bp, Artificial Sequence
  Synthetic oligonucleotide: CBLB-36
tccagatggcaaactca

SEQ ID NO: 7043 - DNA, 17 bp, Artificial Sequence
  Synthetic oligonucleotide: CBLB-37
gcaaactcaatgaatgg

SEQ ID NO: 7044 - DNA, 17 bp, Artificial Sequence
  Synthetic oligonucleotide: CBLB-38
ggcagaaaccctggtgg

SEQ ID NO: 7045 - DNA, 17 bp, Artificial Sequence
  Synthetic oligonucleotide: CBLB-39
cagaaaccctggtggtc

SEQ ID NO: 7046 - DNA, 17 bp, Artificial Sequence
  Synthetic oligonucleotide: CBLB-2343
agaaaccctggtggtcg

SEQ ID NO: 7047 - DNA, 17 bp, Artificial Sequence
  Synthetic oligonucleotide: CBLB-41
aaaccctggtggtcgag

SEQ ID NO: 7048 - DNA, 17 bp, Artificial Sequence
  Synthetic oligonucleotide: CBLB-2344
aaccctggtggtcgagg

SEQ ID NO: 7049 - DNA, 17 bp, Artificial Sequence
  Synthetic oligonucleotide: CBLB-43
ggtcgaggaggaaatcc

SEQ ID NO: 7050 - DNA, 17 bp, Artificial Sequence
  Synthetic oligonucleotide: CBLB-44
ggaaatccccgaaaagg

SEQ ID NO: 7051 - DNA, 17 bp, Artificial Sequence
  Synthetic oligonucleotide: CBLB-45
cccgaaaaggtcgaatt

SEQ ID NO: 7052 - DNA, 17 bp, Artificial Sequence
  Synthetic oligonucleotide: CBLB-46
gtattattgatgctatt

SEQ ID NO: 7053 - DNA, 17 bp, Artificial Sequence
  Synthetic oligonucleotide: CBLB-47
tgctattcaggatgcag

SEQ ID NO: 7054 - DNA, 17 bp, Artificial Sequence
  Synthetic oligonucleotide: CBLB-48
caagctgccgcagatcg

SEQ ID NO: 7055 - DNA, 17 bp, Artificial Sequence
  Synthetic oligonucleotide: CBLB-49
ccgcagatcgcaggacc

SEQ ID NO: 7056 - DNA, 17 bp, Artificial Sequence
  Synthetic oligonucleotide: CBLB-2351
cgcagatcgcaggaccg

SEQ ID NO: 7057 - DNA, 17 bp, Artificial Sequence
  Synthetic oligonucleotide: CBLB-51
cagatcgcaggaccgtg

SEQ ID NO: 7058 - DNA, 17 bp, Artificial Sequence
  Synthetic oligonucleotide: CBLB-52
aggaccgtggagaagac

SEQ ID NO: 7059 - DNA, 17 bp, Artificial Sequence
  Synthetic oligonucleotide: CBLB-2352
ggaccgtggagaagact

SEQ ID NO: 7060 - DNA, 17 bp, Artificial Sequence
  Synthetic oligonucleotide: CBLB-54
agaagacttggaagctc

SEQ ID NO: 7061 - DNA, 17 bp, Artificial Sequence
  Synthetic oligonucleotide: CBLB-55
tgtctgacgttgcctgt

SEQ ID NO: 7062 - DNA, 17 bp, Artificial Sequence
  Synthetic oligonucleotide: CBLB-56
aaaatcccaaacttcag

SEQ ID NO: 7063 - DNA, 17 bp, Artificial Sequence
  Synthetic oligonucleotide: CBLB-57
agcatttacgacttata

SEQ ID NO: 7064 - DNA, 17 bp, Artificial Sequence
  Synthetic oligonucleotide: CBLB-58
gtaaatatgatgacaac

SEQ ID NO: 7065 - DNA, 17 bp, Artificial Sequence
  Synthetic oligonucleotide: CBLB-59
gaaacttgcccaactca

SEQ ID NO: 7066 - DNA, 17 bp, Artificial Sequence
  Synthetic oligonucleotide: CBLB-60
aacttgcccaactcagt

SEQ ID NO: 7067 - DNA, 17 bp, Artificial Sequence
  Synthetic oligonucleotide: CBLB-61
tgcccaactcagtgaga

SEQ ID NO: 7068 - DNA, 17 bp, Artificial Sequence
  Synthetic oligonucleotide: CBLB-62
tctacattgatagcctt

SEQ ID NO: 7069 - DNA, 17 bp, Artificial Sequence
  Synthetic oligonucleotide: CBLB-63
cttatgaaaaagtcaaa

SEQ ID NO: 7070 - DNA, 17 bp, Artificial Sequence
  Synthetic oligonucleotide: CBLB-64
ggcaataagactcttta

SEQ ID NO: 7071 - DNA, 17 bp, Artificial Sequence
  Synthetic oligonucleotide: CBLB-65
gactctttaaagaaggc

SEQ ID NO: 7072 - DNA, 17 bp, Artificial Sequence
  Synthetic oligonucleotide: CBLB-66
actctttaaagaaggca

SEQ ID NO: 7073 - DNA, 17 bp, Artificial Sequence
  Synthetic oligonucleotide: CBLB-67
tctttaaagaaggcaag

SEQ ID NO: 7074 - DNA, 17 bp, Artificial Sequence
  Synthetic oligonucleotide: CBLB-68
tttaaagaaggcaagga

SEQ ID NO: 7075 - DNA, 17 bp, Artificial Sequence
  Synthetic oligonucleotide: CBLB-69
aggcaaggagagaatgt

SEQ ID NO: 7076 - DNA, 17 bp, Artificial Sequence
  Synthetic oligonucleotide: CBLB-70
caaggagagaatgtatg

SEQ ID NO: 7077 - DNA, 20 bp, Artificial Sequence
  Synthetic oligonucleotide: CBLB-71
cattcattgagtttgccatc

SEQ ID NO: 7078 - DNA, 20 bp, Artificial Sequence
  Synthetic oligonucleotide: CBLB-72
ccattcattgagtttgccat

SEQ ID NO: 7079 - DNA, 20 bp, Artificial Sequence
  Synthetic oligonucleotide: CBLB-73
accagggtttctgccattca

SEQ ID NO: 7080 - DNA, 20 bp, Artificial Sequence
  Synthetic oligonucleotide: CBLB-74
gggatttcctcctcgaccac

SEQ ID NO: 7081 - DNA, 20 bp, Artificial Sequence
  Synthetic oligonucleotide: CBLB-2303
acccaaaattcgaccttttc

SEQ ID NO: 7082 - DNA, 20 bp, Artificial Sequence
  Synthetic oligonucleotide: CBLB-2302
tacccaaaattcgacctttt

SEQ ID NO: 7083 - DNA, 20 bp, Artificial Sequence
  Synthetic oligonucleotide: CBLB-77
atacccaaaattcgaccttt

SEQ ID NO: 7084 - DNA, 20 bp, Artificial Sequence
  Synthetic oligonucleotide: CBLB-78
ttagggggtccaactgcatc

SEQ ID NO: 7085 - DNA, 20 bp, Artificial Sequence
  Synthetic oligonucleotide: CBLB-2299
gatctgcggcagcttgctta

SEQ ID NO: 7086 - DNA, 20 bp, Artificial Sequence
  Synthetic oligonucleotide: CBLB-2298
cgatctgcggcagcttgctt

SEQ ID NO: 7087 - DNA, 20 bp, Artificial Sequence
  Synthetic oligonucleotide: CBLB-81
gcgatctgcggcagcttgct

SEQ ID NO: 7088 - DNA, 20 bp, Artificial Sequence
  Synthetic oligonucleotide: CBLB-82
cagaacttaccactttgtcc

SEQ ID NO: 7089 - DNA, 20 bp, Artificial Sequence
  Synthetic oligonucleotide: CBLB-83
ttcgcacaggcaacgtcaga

SEQ ID NO: 7090 - DNA, 20 bp, Artificial Sequence
  Synthetic oligonucleotide: CBLB-2321
gctatttttcaactgaagtt

SEQ ID NO: 7091 - DNA, 20 bp, Artificial Sequence
  Synthetic oligonucleotide: CBLB-85
ggctatttttcaactgaagt

SEQ ID NO: 7092 - DNA, 20 bp, Artificial Sequence
  Synthetic oligonucleotide: CBLB-86
tatggtgggctatttttcaa

SEQ ID NO: 7093 - DNA, 20 bp, Artificial Sequence
  Synthetic oligonucleotide: CBLB-87
caaaatatcaagtatatatg

SEQ ID NO: 7094 - DNA, 20 bp, Artificial Sequence
  Synthetic oligonucleotide: CBLB-88
aagtactcattctcactgag

SEQ ID NO: 7095 - DNA, 20 bp, Artificial Sequence
  Synthetic oligonucleotide: CBLB-89
ttttaaagtactcattctca

SEQ ID NO: 7096 - DNA, 20 bp, Artificial Sequence
  Synthetic oligonucleotide: CBLB-90
ttctctccttgccttcttta

SEQ ID NO: 7097 - DNA, 17 bp, Artificial Sequence
  Synthetic oligonucleotide: CBLB-91
tcattgagtttgccatc

SEQ ID NO: 7098 - DNA, 17 bp, Artificial Sequence
  Synthetic oligonucleotide: CBLB-92
ttcattgagtttgccat

SEQ ID NO: 7099 - DNA, 17 bp, Artificial Sequence
  Synthetic oligonucleotide: CBLB-93
agggtttctgccattca

SEQ ID NO: 7100 - DNA, 17 bp, Artificial Sequence
  Synthetic oligonucleotide: CBLB-94
atttcctcctcgaccac

SEQ ID NO: 7101 - DNA, 17 bp, Artificial Sequence
  Synthetic oligonucleotide: CBLB-2362
caaaattcgaccttttc

SEQ ID NO: 7102 - DNA, 17 bp, Artificial Sequence
  Synthetic oligonucleotide: CBLB-2361
ccaaaattcgacctttt

SEQ ID NO: 7103 - DNA, 17 bp, Artificial Sequence
  Synthetic oligonucleotide: CBLB-97
cccaaaattcgaccttt

SEQ ID NO: 7104 - DNA, 17 bp, Artificial Sequence
  Synthetic oligonucleotide: CBLB-98
gggggtccaactgcatc

SEQ ID NO: 7105 - DNA, 17 bp, Artificial Sequence
  Synthetic oligonucleotide: CBLB-2358
ctgcggcagcttgctta

SEQ ID NO: 7106 - DNA, 17 bp, Artificial Sequence
  Synthetic oligonucleotide: CBLB-2357
tctgcggcagcttgctt

SEQ ID NO: 7107 - DNA, 17 bp, Artificial Sequence
  Synthetic oligonucleotide: CBLB-101
atctgcggcagcttgct

SEQ ID NO: 7108 - DNA, 17 bp, Artificial Sequence
  Synthetic oligonucleotide: CBLB-102
aacttaccactttgtcc

SEQ ID NO: 7109 - DNA, 17 bp, Artificial Sequence
  Synthetic oligonucleotide: CBLB-103
gcacaggcaacgtcaga

SEQ ID NO: 7110 - DNA, 17 bp, Artificial Sequence
  Synthetic oligonucleotide: CBLB-2338
atttttcaactgaagtt

SEQ ID NO: 7111 - DNA, 17 bp, Artificial Sequence
  Synthetic oligonucleotide: CBLB-105
tatttttcaactgaagt

SEQ ID NO: 7112 - DNA, 17 bp, Artificial Sequence
  Synthetic oligonucleotide: CBLB-106
ggtgggctatttttcaa

SEQ ID NO: 7113 - DNA, 17 bp, Artificial Sequence
  Synthetic oligonucleotide: CBLB-107
aatatcaagtatatatg

SEQ ID NO: 7114 - DNA, 17 bp, Artificial Sequence
  Synthetic oligonucleotide: CBLB-108
tactcattctcactgag

SEQ ID NO: 7115 - DNA, 17 bp, Artificial Sequence
  Synthetic oligonucleotide: CBLB-109
taaagtactcattctca

SEQ ID NO: 7116 - DNA, 17 bp, Artificial Sequence
  Synthetic oligonucleotide: CBLB-110
tctccttgccttcttta

SEQ ID NO: 7117 - DNA, 20 bp, Artificial Sequence
  Synthetic oligonucleotide: CBLB-111
tttttcccttgtgcctacag

SEQ ID NO: 7118 - DNA, 20 bp, Artificial Sequence
  Synthetic oligonucleotide: CBLB-112
tatcttcagtcacatgctgg

SEQ ID NO: 7119 - DNA, 20 bp, Artificial Sequence
  Synthetic oligonucleotide: CBLB-113
tctttcccaatggtcaattc

SEQ ID NO: 7120 - DNA, 20 bp, Artificial Sequence
  Synthetic oligonucleotide: CBLB-632
ctttcccaatggtcaattcc

SEQ ID NO: 7121 - DNA, 20 bp, Artificial Sequence
  Synthetic oligonucleotide: CBLB-633
tttcccaatggtcaattcca

SEQ ID NO: 7122 - DNA, 20 bp, Artificial Sequence
  Synthetic oligonucleotide: CBLB-116
tatcacaaaagcagatgctg

SEQ ID NO: 7123 - DNA, 20 bp, Artificial Sequence
  Synthetic oligonucleotide: CBLB-117
aaagcagatgctgctgaatt

SEQ ID NO: 7124 - DNA, 20 bp, Artificial Sequence
  Synthetic oligonucleotide: CBLB-634
aagcagatgctgctgaattc

SEQ ID NO: 7125 - DNA, 20 bp, Artificial Sequence
  Synthetic oligonucleotide: CBLB-119
gcagatgctgctgaattctg

SEQ ID NO: 7126 - DNA, 20 bp, Artificial Sequence
  Synthetic oligonucleotide: CBLB-120
tgaattctggagaaagtttt

SEQ ID NO: 7127 - DNA, 20 bp, Artificial Sequence
  Synthetic oligonucleotide: CBLB-635
gaattctggagaaagttttt

SEQ ID NO: 7128 - DNA, 20 bp, Artificial Sequence
  Synthetic oligonucleotide: CBLB-122
taaaaatcatttttatagct

SEQ ID NO: 7129 - DNA, 20 bp, Artificial Sequence
  Synthetic oligonucleotide: CBLB-123
ccctttttttccaccttgca

SEQ ID NO: 7130 - DNA, 20 bp, Artificial Sequence
  Synthetic oligonucleotide: CBLB-124
ttgcacagaactatcgtacc

SEQ ID NO: 7131 - DNA, 20 bp, Artificial Sequence
  Synthetic oligonucleotide: CBLB-637
tgcacagaactatcgtacca

SEQ ID NO: 7132 - DNA, 20 bp, Artificial Sequence
  Synthetic oligonucleotide: CBLB-126
agtattcagacagtgccttc

SEQ ID NO: 7133 - DNA, 20 bp, Artificial Sequence
  Synthetic oligonucleotide: CBLB-127
tccaccagattagctctggc

SEQ ID NO: 7134 - DNA, 20 bp, Artificial Sequence
  Synthetic oligonucleotide: CBLB-640
ccaccagattagctctggcc

SEQ ID NO: 7135 - DNA, 20 bp, Artificial Sequence
  Synthetic oligonucleotide: CBLB-129
caatgattacatttcagttt

SEQ ID NO: 7136 - DNA, 20 bp, Artificial Sequence
  Synthetic oligonucleotide: CBLB-130
aatttttttattttttagcc

SEQ ID NO: 7137 - DNA, 20 bp, Artificial Sequence
  Synthetic oligonucleotide: CBLB-644
atttttttattttttagcct

SEQ ID NO: 7138 - DNA, 20 bp, Artificial Sequence
  Synthetic oligonucleotide: CBLB-132
tagccttggggctctatttt

SEQ ID NO: 7139 - DNA, 20 bp, Artificial Sequence
  Synthetic oligonucleotide: CBLB-647
agccttggggctctattttg

SEQ ID NO: 7140 - DNA, 20 bp, Artificial Sequence
  Synthetic oligonucleotide: CBLB-134
tggggctctattttgcggaa

SEQ ID NO: 7141 - DNA, 20 bp, Artificial Sequence
  Synthetic oligonucleotide: CBLB-648
ggggctctattttgcggaat

SEQ ID NO: 7142 - DNA, 20 bp, Artificial Sequence
  Synthetic oligonucleotide: CBLB-136
catggcatttctcacatatg

SEQ ID NO: 7143 - DNA, 20 bp, Artificial Sequence
  Synthetic oligonucleotide: CBLB-137
atgaagttaaagcacgacta

SEQ ID NO: 7144 - DNA, 20 bp, Artificial Sequence
  Synthetic oligonucleotide: CBLB-138
acagaaatatagcaccaaac

SEQ ID NO: 7145 - DNA, 20 bp, Artificial Sequence
  Synthetic oligonucleotide: CBLB-651
cagaaatatagcaccaaacc

SEQ ID NO: 7146 - DNA, 20 bp, Artificial Sequence
  Synthetic oligonucleotide: CBLB-140
tccggttaagttgcactcga

SEQ ID NO: 7147 - DNA, 20 bp, Artificial Sequence
  Synthetic oligonucleotide: CBLB-654
ccggttaagttgcactcgat

SEQ ID NO: 7148 - DNA, 20 bp, Artificial Sequence
  Synthetic oligonucleotide: CBLB-142
agttgcactcgattgggaca

SEQ ID NO: 7149 - DNA, 20 bp, Artificial Sequence
  Synthetic oligonucleotide: CBLB-143
gtgggccattggctatgtga

SEQ ID NO: 7150 - DNA, 20 bp, Artificial Sequence
  Synthetic oligonucleotide: CBLB-659
tgggccattggctatgtgac

SEQ ID NO: 7151 - DNA, 20 bp, Artificial Sequence
  Synthetic oligonucleotide: CBLB-660
gggccattggctatgtgact

SEQ ID NO: 7152 - DNA, 20 bp, Artificial Sequence
  Synthetic oligonucleotide: CBLB-146
cattggctatgtgactgggg

SEQ ID NO: 7153 - DNA, 20 bp, Artificial Sequence
  Synthetic oligonucleotide: CBLB-662
attggctatgtgactgggga

SEQ ID NO: 7154 - DNA, 20 bp, Artificial Sequence
  Synthetic oligonucleotide: CBLB-663
ttggctatgtgactggggat

SEQ ID NO: 7155 - DNA, 20 bp, Artificial Sequence
  Synthetic oligonucleotide: CBLB-149
caagccctgattgatggcag

SEQ ID NO: 7156 - DNA, 20 bp, Artificial Sequence
  Synthetic oligonucleotide: CBLB-665
aagccctgattgatggcagc

SEQ ID NO: 7157 - DNA, 20 bp, Artificial Sequence
  Synthetic oligonucleotide: CBLB-666
agccctgattgatggcagca

SEQ ID NO: 7158 - DNA, 20 bp, Artificial Sequence
  Synthetic oligonucleotide: CBLB-152
cctgattgatggcagcaggg

SEQ ID NO: 7159 - DNA, 20 bp, Artificial Sequence
  Synthetic oligonucleotide: CBLB-153
agcagggaaggattgtaagt

SEQ ID NO: 7160 - DNA, 20 bp, Artificial Sequence
  Synthetic oligonucleotide: CBLB-154
cagggaaggattgtaagtat

SEQ ID NO: 7161 - DNA, 20 bp, Artificial Sequence
  Synthetic oligonucleotide: CBLB-155
aaggattgtaagtatgagaa

SEQ ID NO: 7162 - DNA, 20 bp, Artificial Sequence
  Synthetic oligonucleotide: CBLB-668
aggattgtaagtatgagaaa

SEQ ID NO: 7163 - DNA, 20 bp, Artificial Sequence
  Synthetic oligonucleotide: CBLB-157
gtaagtatgagaaatggaag

SEQ ID NO: 7164 - DNA, 20 bp, Artificial Sequence
  Synthetic oligonucleotide: CBLB-669
taagtatgagaaatggaagt

SEQ ID NO: 7165 - DNA, 20 bp, Artificial Sequence
  Synthetic oligonucleotide: CBLB-159
attcagttatctttatcctg

SEQ ID NO: 7166 - DNA, 20 bp, Artificial Sequence
  Synthetic oligonucleotide: CBLB-670
ttcagttatctttatcctga

SEQ ID NO: 7167 - DNA, 20 bp, Artificial Sequence
  Synthetic oligonucleotide: CBLB-671
tcagttatctttatcctgat

SEQ ID NO: 7168 - DNA, 20 bp, Artificial Sequence
  Synthetic oligonucleotide: CBLB-162
agttatctttatcctgatgg

SEQ ID NO: 7169 - DNA, 20 bp, Artificial Sequence
  Synthetic oligonucleotide: CBLB-672
gttatctttatcctgatggg

SEQ ID NO: 7170 - DNA, 20 bp, Artificial Sequence
  Synthetic oligonucleotide: CBLB-164
gagttataatcctgatttaa

SEQ ID NO: 7171 - DNA, 20 bp, Artificial Sequence
  Synthetic oligonucleotide: CBLB-165
tcctgatttaactggattat

SEQ ID NO: 7172 - DNA, 20 bp, Artificial Sequence
  Synthetic oligonucleotide: CBLB-166
catataaaagttacacaggt

SEQ ID NO: 7173 - DNA, 20 bp, Artificial Sequence
  Synthetic oligonucleotide: CBLB-167
acacaggtaaggataattgc

SEQ ID NO: 7174 - DNA, 20 bp, Artificial Sequence
  Synthetic oligonucleotide: CBLB-168
tctccctcctccccaaattc

SEQ ID NO: 7175 - DNA, 20 bp, Artificial Sequence
  Synthetic oligonucleotide: CBLB-676
ctccctcctccccaaattcc

SEQ ID NO: 7176 - DNA, 20 bp, Artificial Sequence
  Synthetic oligonucleotide: CBLB-170
ccccaaattccaggaacaat

SEQ ID NO: 7177 - DNA, 20 bp, Artificial Sequence
  Synthetic oligonucleotide: CBLB-171
ggaacaatatgaattatatt

SEQ ID NO: 7178 - DNA, 20 bp, Artificial Sequence
  Synthetic oligonucleotide: CBLB-172
aatatgaattatattgtgaa

SEQ ID NO: 7179 - DNA, 20 bp, Artificial Sequence
  Synthetic oligonucleotide: CBLB-173
tcagctctgtaagatttgtg

SEQ ID NO: 7180 - DNA, 20 bp, Artificial Sequence
  Synthetic oligonucleotide: CBLB-174
agctctgtaagatttgtgca

SEQ ID NO: 7181 - DNA, 20 bp, Artificial Sequence
  Synthetic oligonucleotide: CBLB-175
gaatgacaaagatgtcaaga

SEQ ID NO: 7182 - DNA, 20 bp, Artificial Sequence
  Synthetic oligonucleotide: CBLB-176
agatgtcaagattgagcctt

SEQ ID NO: 7183 - DNA, 20 bp, Artificial Sequence
  Synthetic oligonucleotide: CBLB-177
caggtataatcattagcaac

SEQ ID NO: 7184 - DNA, 20 bp, Artificial Sequence
  Synthetic oligonucleotide: CBLB-178
ccatgcattttctatttgtt

SEQ ID NO: 7185 - DNA, 20 bp, Artificial Sequence
  Synthetic oligonucleotide: CBLB-685
catgcattttctatttgttt

SEQ ID NO: 7186 - DNA, 20 bp, Artificial Sequence
  Synthetic oligonucleotide: CBLB-180
attttctatttgtttaggag

SEQ ID NO: 7187 - DNA, 20 bp, Artificial Sequence
  Synthetic oligonucleotide: CBLB-181
ttgtttaggagtcggatggt

SEQ ID NO: 7188 - DNA, 20 bp, Artificial Sequence
  Synthetic oligonucleotide: CBLB-182
gggctgccctttctgtcgtt

SEQ ID NO: 7189 - DNA, 20 bp, Artificial Sequence
  Synthetic oligonucleotide: CBLB-183
tttctgtcgttgtgaaataa

SEQ ID NO: 7190 - DNA, 20 bp, Artificial Sequence
  Synthetic oligonucleotide: CBLB-690
ttctgtcgttgtgaaataaa

SEQ ID NO: 7191 - DNA, 20 bp, Artificial Sequence
  Synthetic oligonucleotide: CBLB-185
tcgttgtgaaataaaaggaa

SEQ ID NO: 7192 - DNA, 20 bp, Artificial Sequence
  Synthetic oligonucleotide: CBLB-186
aaggaactgagcccataatc

SEQ ID NO: 7193 - DNA, 20 bp, Artificial Sequence
  Synthetic oligonucleotide: CBLB-187
atcgtggacccctttgatcc

SEQ ID NO: 7194 - DNA, 20 bp, Artificial Sequence
  Synthetic oligonucleotide: CBLB-188
ggacccctttgatccaagag

SEQ ID NO: 7195 - DNA, 20 bp, Artificial Sequence
  Synthetic oligonucleotide: CBLB-189
ttggcatgccgatgctagac

SEQ ID NO: 7196 - DNA, 20 bp, Artificial Sequence
  Synthetic oligonucleotide: CBLB-190
cttggacgacgatgatgatc

SEQ ID NO: 7197 - DNA, 20 bp, Artificial Sequence
  Synthetic oligonucleotide: CBLB-191
tggacgacgatgatgatcgt

SEQ ID NO: 7198 - DNA, 20 bp, Artificial Sequence
  Synthetic oligonucleotide: CBLB-696
ggacgacgatgatgatcgtg

SEQ ID NO: 7199 - DNA, 20 bp, Artificial Sequence
  Synthetic oligonucleotide: CBLB-193
atcgtgaggagtccttgatg

SEQ ID NO: 7200 - DNA, 20 bp, Artificial Sequence
  Synthetic oligonucleotide: CBLB-194
atgaatcggttggcaaacgt

SEQ ID NO: 7201 - DNA, 20 bp, Artificial Sequence
  Synthetic oligonucleotide: CBLB-195
aaacgtccgaaaggtaaaac

SEQ ID NO: 7202 - DNA, 20 bp, Artificial Sequence
  Synthetic oligonucleotide: CBLB-196
cgaaaggtaaaactagaaac

SEQ ID NO: 7203 - DNA, 20 bp, Artificial Sequence
  Synthetic oligonucleotide: CBLB-197
tgttctagtgcactgacagg

SEQ ID NO: 7204 - DNA, 20 bp, Artificial Sequence
  Synthetic oligonucleotide: CBLB-198
gaactcaccagtcacatcac

SEQ ID NO: 7205 - DNA, 20 bp, Artificial Sequence
  Synthetic oligonucleotide: CBLB-199
caggatcctctccccttgcc

SEQ ID NO: 7206 - DNA, 20 bp, Artificial Sequence
  Synthetic oligonucleotide: CBLB-200
ggatcctctccccttgccca

SEQ ID NO: 7207 - DNA, 20 bp, Artificial Sequence
  Synthetic oligonucleotide: CBLB-201
tcctctccccttgcccagag

SEQ ID NO: 7208 - DNA, 20 bp, Artificial Sequence
  Synthetic oligonucleotide: CBLB-202
tgccacccgtgcctcctcgc

SEQ ID NO: 7209 - DNA, 20 bp, Artificial Sequence
  Synthetic oligonucleotide: CBLB-203
ctcctcgcctggatctaatt

SEQ ID NO: 7210 - DNA, 20 bp, Artificial Sequence
  Synthetic oligonucleotide: CBLB-204
gatctccctgtggcagccca

SEQ ID NO: 7211 - DNA, 20 bp, Artificial Sequence
  Synthetic oligonucleotide: CBLB-205
caaaggtagatcaattttat

SEQ ID NO: 7212 - DNA, 20 bp, Artificial Sequence
  Synthetic oligonucleotide: CBLB-206
tttagtcttctccttgcatg

SEQ ID NO: 7213 - DNA, 20 bp, Artificial Sequence
  Synthetic oligonucleotide: CBLB-207
tagtcttctccttgcatggt

SEQ ID NO: 7214 - DNA, 20 bp, Artificial Sequence
  Synthetic oligonucleotide: CBLB-208
ccagcaccacctcctccctt

SEQ ID NO: 7215 - DNA, 17 bp, Artificial Sequence
  Synthetic oligonucleotide: CBLB-209
ttcccttgtgcctacag

SEQ ID NO: 7216 - DNA, 17 bp, Artificial Sequence
  Synthetic oligonucleotide: CBLB-210
cttcagtcacatgctgg

SEQ ID NO: 7217 - DNA, 17 bp, Artificial Sequence
  Synthetic oligonucleotide: CBLB-211
ttcccaatggtcaattc

SEQ ID NO: 7218 - DNA, 17 bp, Artificial Sequence
  Synthetic oligonucleotide: CBLB-792
tcccaatggtcaattcc

SEQ ID NO: 7219 - DNA, 17 bp, Artificial Sequence
  Synthetic oligonucleotide: CBLB-793
cccaatggtcaattcca

SEQ ID NO: 7220 - DNA, 17 bp, Artificial Sequence
  Synthetic oligonucleotide: CBLB-214
cacaaaagcagatgctg

SEQ ID NO: 7221 - DNA, 17 bp, Artificial Sequence
  Synthetic oligonucleotide: CBLB-215
gcagatgctgctgaatt

SEQ ID NO: 7222 - DNA, 17 bp, Artificial Sequence
  Synthetic oligonucleotide: CBLB-794
cagatgctgctgaattc

SEQ ID NO: 7223 - DNA, 17 bp, Artificial Sequence
  Synthetic oligonucleotide: CBLB-217
gatgctgctgaattctg

SEQ ID NO: 7224 - DNA, 17 bp, Artificial Sequence
  Synthetic oligonucleotide: CBLB-218
attctggagaaagtttt

SEQ ID NO: 7225 - DNA, 17 bp, Artificial Sequence
  Synthetic oligonucleotide: CBLB-795
ttctggagaaagttttt

SEQ ID NO: 7226 - DNA, 17 bp, Artificial Sequence
  Synthetic oligonucleotide: CBLB-220
aaatcatttttatagct

SEQ ID NO: 7227 - DNA, 17 bp, Artificial Sequence
  Synthetic oligonucleotide: CBLB-221
tttttttccaccttgca

SEQ ID NO: 7228 - DNA, 17 bp, Artificial Sequence
  Synthetic oligonucleotide: CBLB-222
cacagaactatcgtacc

SEQ ID NO: 7229 - DNA, 17 bp, Artificial Sequence
  Synthetic oligonucleotide: CBLB-797
acagaactatcgtacca

SEQ ID NO: 7230 - DNA, 17 bp, Artificial Sequence
  Synthetic oligonucleotide: CBLB-224
attcagacagtgccttc

SEQ ID NO: 7231 - DNA, 17 bp, Artificial Sequence
  Synthetic oligonucleotide: CBLB-225
accagattagctctggc

SEQ ID NO: 7232 - DNA, 17 bp, Artificial Sequence
  Synthetic oligonucleotide: CBLB-800
ccagattagctctggcc

SEQ ID NO: 7233 - DNA, 17 bp, Artificial Sequence
  Synthetic oligonucleotide: CBLB-227
tgattacatttcagttt

SEQ ID NO: 7234 - DNA, 17 bp, Artificial Sequence
  Synthetic oligonucleotide: CBLB-228
ttttttattttttagcc

SEQ ID NO: 7235 - DNA, 17 bp, Artificial Sequence
  Synthetic oligonucleotide: CBLB-804
tttttattttttagcct

SEQ ID NO: 7236 - DNA, 17 bp, Artificial Sequence
  Synthetic oligonucleotide: CBLB-230
ccttggggctctatttt

SEQ ID NO: 7237 - DNA, 17 bp, Artificial Sequence
  Synthetic oligonucleotide: CBLB-807
cttggggctctattttg

SEQ ID NO: 7238 - DNA, 17 bp, Artificial Sequence
  Synthetic oligonucleotide: CBLB-232
ggctctattttgcggaa

SEQ ID NO: 7239 - DNA, 17 bp, Artificial Sequence
  Synthetic oligonucleotide: CBLB-808
gctctattttgcggaat

SEQ ID NO: 7240 - DNA, 17 bp, Artificial Sequence
  Synthetic oligonucleotide: CBLB-234
ggcatttctcacatatg

SEQ ID NO: 7241 - DNA, 17 bp, Artificial Sequence
  Synthetic oligonucleotide: CBLB-235
aagttaaagcacgacta

SEQ ID NO: 7242 - DNA, 17 bp, Artificial Sequence
  Synthetic oligonucleotide: CBLB-236
gaaatatagcaccaaac

SEQ ID NO: 7243 - DNA, 17 bp, Artificial Sequence
  Synthetic oligonucleotide: CBLB-811
aaatatagcaccaaacc

SEQ ID NO: 7244 - DNA, 17 bp, Artificial Sequence
  Synthetic oligonucleotide: CBLB-238
ggttaagttgcactcga

SEQ ID NO: 7245 - DNA, 17 bp, Artificial Sequence
  Synthetic oligonucleotide: CBLB-814
gttaagttgcactcgat

SEQ ID NO: 7246 - DNA, 17 bp, Artificial Sequence
  Synthetic oligonucleotide: CBLB-240
tgcactcgattgggaca

SEQ ID NO: 7247 - DNA, 17 bp, Artificial Sequence
  Synthetic oligonucleotide: CBLB-241
ggccattggctatgtga

SEQ ID NO: 7248 - DNA, 17 bp, Artificial Sequence
  Synthetic oligonucleotide: CBLB-819
gccattggctatgtgac

SEQ ID NO: 7249 - DNA, 17 bp, Artificial Sequence
  Synthetic oligonucleotide: CBLB-820
ccattggctatgtgact

SEQ ID NO: 7250 - DNA, 17 bp, Artificial Sequence
  Synthetic oligonucleotide: CBLB-244
tggctatgtgactgggg

SEQ ID NO: 7251 - DNA, 17 bp, Artificial Sequence
  Synthetic oligonucleotide: CBLB-822
ggctatgtgactgggga

SEQ ID NO: 7252 - DNA, 17 bp, Artificial Sequence
  Synthetic oligonucleotide: CBLB-823
gctatgtgactggggat

SEQ ID NO: 7253 - DNA, 17 bp, Artificial Sequence
  Synthetic oligonucleotide: CBLB-247
gccctgattgatggcag

SEQ ID NO: 7254 - DNA, 17 bp, Artificial Sequence
  Synthetic oligonucleotide: CBLB-825
ccctgattgatggcagc

SEQ ID NO: 7255 - DNA, 17 bp, Artificial Sequence
  Synthetic oligonucleotide: CBLB-826
cctgattgatggcagca

SEQ ID NO: 7256 - DNA, 17 bp, Artificial Sequence
  Synthetic oligonucleotide: CBLB-250
gattgatggcagcaggg

SEQ ID NO: 7257 - DNA, 17 bp, Artificial Sequence
  Synthetic oligonucleotide: CBLB-251
agggaaggattgtaagt

SEQ ID NO: 7258 - DNA, 17 bp, Artificial Sequence
  Synthetic oligonucleotide: CBLB-252
ggaaggattgtaagtat

SEQ ID NO: 7259 - DNA, 17 bp, Artificial Sequence
  Synthetic oligonucleotide: CBLB-253
gattgtaagtatgagaa

SEQ ID NO: 7260 - DNA, 17 bp, Artificial Sequence
  Synthetic oligonucleotide: CBLB-828
attgtaagtatgagaaa

SEQ ID NO: 7261 - DNA, 17 bp, Artificial Sequence
  Synthetic oligonucleotide: CBLB-255
agtatgagaaatggaag

SEQ ID NO: 7262 - DNA, 17 bp, Artificial Sequence
  Synthetic oligonucleotide: CBLB-829
gtatgagaaatggaagt

SEQ ID NO: 7263 - DNA, 17 bp, Artificial Sequence
  Synthetic oligonucleotide: CBLB-257
cagttatctttatcctg

SEQ ID NO: 7264 - DNA, 17 bp, Artificial Sequence
  Synthetic oligonucleotide: CBLB-830
agttatctttatcctga

SEQ ID NO: 7265 - DNA, 17 bp, Artificial Sequence
  Synthetic oligonucleotide: CBLB-831
gttatctttatcctgat

SEQ ID NO: 7266 - DNA, 17 bp, Artificial Sequence
  Synthetic oligonucleotide: CBLB-260
tatctttatcctgatgg

SEQ ID NO: 7267 - DNA, 17 bp, Artificial Sequence
  Synthetic oligonucleotide: CBLB-832
atctttatcctgatggg

SEQ ID NO: 7268 - DNA, 17 bp, Artificial Sequence
  Synthetic oligonucleotide: CBLB-262
ttataatcctgatttaa

SEQ ID NO: 7269 - DNA, 17 bp, Artificial Sequence
  Synthetic oligonucleotide: CBLB-263
tgatttaactggattat

SEQ ID NO: 7270 - DNA, 17 bp, Artificial Sequence
  Synthetic oligonucleotide: CBLB-264
ataaaagttacacaggt

SEQ ID NO: 7271 - DNA, 17 bp, Artificial Sequence
  Synthetic oligonucleotide: CBLB-265
caggtaaggataattgc

SEQ ID NO: 7272 - DNA, 17 bp, Artificial Sequence
  Synthetic oligonucleotide: CBLB-266
ccctcctccccaaattc

SEQ ID NO: 7273 - DNA, 17 bp, Artificial Sequence
  Synthetic oligonucleotide: CBLB-836
cctcctccccaaattcc

SEQ ID NO: 7274 - DNA, 17 bp, Artificial Sequence
  Synthetic oligonucleotide: CBLB-268
caaattccaggaacaat

SEQ ID NO: 7275 - DNA, 17 bp, Artificial Sequence
  Synthetic oligonucleotide: CBLB-269
acaatatgaattatatt

SEQ ID NO: 7276 - DNA, 17 bp, Artificial Sequence
  Synthetic oligonucleotide: CBLB-270
atgaattatattgtgaa

SEQ ID NO: 7277 - DNA, 17 bp, Artificial Sequence
  Synthetic oligonucleotide: CBLB-271
gctctgtaagatttgtg

SEQ ID NO: 7278 - DNA, 17 bp, Artificial Sequence
  Synthetic oligonucleotide: CBLB-272
tctgtaagatttgtgca

SEQ ID NO: 7279 - DNA, 17 bp, Artificial Sequence
  Synthetic oligonucleotide: CBLB-273
tgacaaagatgtcaaga

SEQ ID NO: 7280 - DNA, 17 bp, Artificial Sequence
  Synthetic oligonucleotide: CBLB-274
tgtcaagattgagcctt

SEQ ID NO: 7281 - DNA, 17 bp, Artificial Sequence
  Synthetic oligonucleotide: CBLB-275
gtataatcattagcaac

SEQ ID NO: 7282 - DNA, 17 bp, Artificial Sequence
  Synthetic oligonucleotide: CBLB-276
tgcattttctatttgtt

SEQ ID NO: 7283 - DNA, 17 bp, Artificial Sequence
  Synthetic oligonucleotide: CBLB-845
gcattttctatttgttt

SEQ ID NO: 7284 - DNA, 17 bp, Artificial Sequence
  Synthetic oligonucleotide: CBLB-278
ttctatttgtttaggag

SEQ ID NO: 7285 - DNA, 17 bp, Artificial Sequence
  Synthetic oligonucleotide: CBLB-279
tttaggagtcggatggt

SEQ ID NO: 7286 - DNA, 17 bp, Artificial Sequence
  Synthetic oligonucleotide: CBLB-280
ctgccctttctgtcgtt

SEQ ID NO: 7287 - DNA, 17 bp, Artificial Sequence
  Synthetic oligonucleotide: CBLB-281
ctgtcgttgtgaaataa

SEQ ID NO: 7288 - DNA, 17 bp, Artificial Sequence
  Synthetic oligonucleotide: CBLB-850
tgtcgttgtgaaataaa

SEQ ID NO: 7289 - DNA, 17 bp, Artificial Sequence
  Synthetic oligonucleotide: CBLB-283
ttgtgaaataaaaggaa

SEQ ID NO: 7290 - DNA, 17 bp, Artificial Sequence
  Synthetic oligonucleotide: CBLB-284
gaactgagcccataatc

SEQ ID NO: 7291 - DNA, 17 bp, Artificial Sequence
  Synthetic oligonucleotide: CBLB-285
gtggacccctttgatcc

SEQ ID NO: 7292 - DNA, 17 bp, Artificial Sequence
  Synthetic oligonucleotide: CBLB-286
cccctttgatccaagag

SEQ ID NO: 7293 - DNA, 17 bp, Artificial Sequence
  Synthetic oligonucleotide: CBLB-287
gcatgccgatgctagac

SEQ ID NO: 7294 - DNA, 17 bp, Artificial Sequence
  Synthetic oligonucleotide: CBLB-288
ggacgacgatgatgatc

SEQ ID NO: 7295 - DNA, 17 bp, Artificial Sequence
  Synthetic oligonucleotide: CBLB-289
acgacgatgatgatcgt

SEQ ID NO: 7296 - DNA, 17 bp, Artificial Sequence
  Synthetic oligonucleotide: CBLB-856
cgacgatgatgatcgtg

SEQ ID NO: 7297 - DNA, 17 bp, Artificial Sequence
  Synthetic oligonucleotide: CBLB-291
gtgaggagtccttgatg

SEQ ID NO: 7298 - DNA, 17 bp, Artificial Sequence
  Synthetic oligonucleotide: CBLB-292
aatcggttggcaaacgt

SEQ ID NO: 7299 - DNA, 17 bp, Artificial Sequence
  Synthetic oligonucleotide: CBLB-293
cgtccgaaaggtaaaac

SEQ ID NO: 7300 - DNA, 17 bp, Artificial Sequence
  Synthetic oligonucleotide: CBLB-294
aaggtaaaactagaaac

SEQ ID NO: 7301 - DNA, 17 bp, Artificial Sequence
  Synthetic oligonucleotide: CBLB-295
tctagtgcactgacagg

SEQ ID NO: 7302 - DNA, 17 bp, Artificial Sequence
  Synthetic oligonucleotide: CBLB-296
ctcaccagtcacatcac

SEQ ID NO: 7303 - DNA, 17 bp, Artificial Sequence
  Synthetic oligonucleotide: CBLB-297
gatcctctccccttgcc

SEQ ID NO: 7304 - DNA, 17 bp, Artificial Sequence
  Synthetic oligonucleotide: CBLB-298
tcctctccccttgccca

SEQ ID NO: 7305 - DNA, 17 bp, Artificial Sequence
  Synthetic oligonucleotide: CBLB-299
tctccccttgcccagag

SEQ ID NO: 7306 - DNA, 17 bp, Artificial Sequence
  Synthetic oligonucleotide: CBLB-300
cacccgtgcctcctcgc

SEQ ID NO: 7307 - DNA, 17 bp, Artificial Sequence
  Synthetic oligonucleotide: CBLB-301
ctcgcctggatctaatt

SEQ ID NO: 7308 - DNA, 17 bp, Artificial Sequence
  Synthetic oligonucleotide: CBLB-302
ctccctgtggcagccca

SEQ ID NO: 7309 - DNA, 17 bp, Artificial Sequence
  Synthetic oligonucleotide: CBLB-303
aggtagatcaattttat

SEQ ID NO: 7310 - DNA, 17 bp, Artificial Sequence
  Synthetic oligonucleotide: CBLB-304
agtcttctccttgcatg

SEQ ID NO: 7311 - DNA, 17 bp, Artificial Sequence
  Synthetic oligonucleotide: CBLB-305
tcttctccttgcatggt

SEQ ID NO: 7312 - DNA, 17 bp, Artificial Sequence
  Synthetic oligonucleotide: CBLB-306
gcaccacctcctccctt

SEQ ID NO: 7313 - DNA, 20 bp, Artificial Sequence
  Synthetic oligonucleotide: CBLB-307
tgtaggcacaagggaaaaaa

SEQ ID NO: 7314 - DNA, 20 bp, Artificial Sequence
  Synthetic oligonucleotide: CBLB-949
gatttcgtctgtaggcacaa

SEQ ID NO: 7315 - DNA, 20 bp, Artificial Sequence
  Synthetic oligonucleotide: CBLB-950
agatttcgtctgtaggcaca

SEQ ID NO: 7316 - DNA, 20 bp, Artificial Sequence
  Synthetic oligonucleotide: CBLB-310
gagatttcgtctgtaggcac

SEQ ID NO: 7317 - DNA, 20 bp, Artificial Sequence
  Synthetic oligonucleotide: CBLB-311
tgaagataagggacagtttt

SEQ ID NO: 7318 - DNA, 20 bp, Artificial Sequence
  Synthetic oligonucleotide: CBLB-953
ccagcatgtgactgaagata

SEQ ID NO: 7319 - DNA, 20 bp, Artificial Sequence
  Synthetic oligonucleotide: CBLB-313
gccagcatgtgactgaagat

SEQ ID NO: 7320 - DNA, 20 bp, Artificial Sequence
  Synthetic oligonucleotide: CBLB-314
tgatttctgccagcatgtga

SEQ ID NO: 7321 - DNA, 20 bp, Artificial Sequence
  Synthetic oligonucleotide: CBLB-954
tctccctggaattgaccatt

SEQ ID NO: 7322 - DNA, 20 bp, Artificial Sequence
  Synthetic oligonucleotide: CBLB-955
atctccctggaattgaccat

SEQ ID NO: 7323 - DNA, 20 bp, Artificial Sequence
  Synthetic oligonucleotide: CBLB-317
tatctccctggaattgacca

SEQ ID NO: 7324 - DNA, 20 bp, Artificial Sequence
  Synthetic oligonucleotide: CBLB-956
tgatacgaaagttatctccc

SEQ ID NO: 7325 - DNA, 20 bp, Artificial Sequence
  Synthetic oligonucleotide: CBLB-319
gtgatacgaaagttatctcc

SEQ ID NO: 7326 - DNA, 20 bp, Artificial Sequence
  Synthetic oligonucleotide: CBLB-320
gcagcatctgcttttgtgat

SEQ ID NO: 7327 - DNA, 20 bp, Artificial Sequence
  Synthetic oligonucleotide: CBLB-321
tgtctccaaaaaactttctc

SEQ ID NO: 7328 - DNA, 20 bp, Artificial Sequence
  Synthetic oligonucleotide: CBLB-957
ctgtgcaaggtggaaaaaaa

SEQ ID NO: 7329 - DNA, 20 bp, Artificial Sequence
  Synthetic oligonucleotide: CBLB-958
tctgtgcaaggtggaaaaaa

SEQ ID NO: 7330 - DNA, 20 bp, Artificial Sequence
  Synthetic oligonucleotide: CBLB-324
ttctgtgcaaggtggaaaaa

SEQ ID NO: 7331 - DNA, 20 bp, Artificial Sequence
  Synthetic oligonucleotide: CBLB-959
tacgatagttctgtgcaagg

SEQ ID NO: 7332 - DNA, 20 bp, Artificial Sequence
  Synthetic oligonucleotide: CBLB-326
gtacgatagttctgtgcaag

SEQ ID NO: 7333 - DNA, 20 bp, Artificial Sequence
  Synthetic oligonucleotide: CBLB-327
ggacctcatgaaggcactgt

SEQ ID NO: 7334 - DNA, 20 bp, Artificial Sequence
  Synthetic oligonucleotide: CBLB-328
gagctaatctggtggacctc

SEQ ID NO: 7335 - DNA, 20 bp, Artificial Sequence
  Synthetic oligonucleotide: CBLB-329
tccaggccagagctaatctg

SEQ ID NO: 7336 - DNA, 20 bp, Artificial Sequence
  Synthetic oligonucleotide: CBLB-330
tagagccattgcttccaggc

SEQ ID NO: 7337 - DNA, 20 bp, Artificial Sequence
  Synthetic oligonucleotide: CBLB-331
gttaaatcaattgttgattt

SEQ ID NO: 7338 - DNA, 20 bp, Artificial Sequence
  Synthetic oligonucleotide: CBLB-332
aaaaatatcaaattcaaaaa

SEQ ID NO: 7339 - DNA, 20 bp, Artificial Sequence
  Synthetic oligonucleotide: CBLB-333
ctaagcaagtataaacttac

SEQ ID NO: 7340 - DNA, 20 bp, Artificial Sequence
  Synthetic oligonucleotide: CBLB-334
ctaaaaaataaaaaaattaa

SEQ ID NO: 7341 - DNA, 20 bp, Artificial Sequence
  Synthetic oligonucleotide: CBLB-335
gaaattccaattccgcaaaa

SEQ ID NO: 7342 - DNA, 20 bp, Artificial Sequence
  Synthetic oligonucleotide: CBLB-336
aacctggatgtgtcacagct

SEQ ID NO: 7343 - DNA, 20 bp, Artificial Sequence
  Synthetic oligonucleotide: CBLB-337
tgtgagaaatgccatgtaac

SEQ ID NO: 7344 - DNA, 20 bp, Artificial Sequence
  Synthetic oligonucleotide: CBLB-338
gctttaacttcatcatatgt

SEQ ID NO: 7345 - DNA, 20 bp, Artificial Sequence
  Synthetic oligonucleotide: CBLB-339
gtgctttaacttcatcatat

SEQ ID NO: 7346 - DNA, 20 bp, Artificial Sequence
  Synthetic oligonucleotide: CBLB-340
ctgctaaaaagtcttacctt

SEQ ID NO: 7347 - DNA, 20 bp, Artificial Sequence
  Synthetic oligonucleotide: CBLB-341
aaaatatagctgcaaaacat

SEQ ID NO: 7348 - DNA, 20 bp, Artificial Sequence
  Synthetic oligonucleotide: CBLB-972
ccaatcgagtgcaacttaac

SEQ ID NO: 7349 - DNA, 20 bp, Artificial Sequence
  Synthetic oligonucleotide: CBLB-343
cccaatcgagtgcaacttaa

SEQ ID NO: 7350 - DNA, 20 bp, Artificial Sequence
  Synthetic oligonucleotide: CBLB-344
ccaatggcccactgtcccaa

SEQ ID NO: 7351 - DNA, 20 bp, Artificial Sequence
  Synthetic oligonucleotide: CBLB-345
gcttgaaataagggcttgtt

SEQ ID NO: 7352 - DNA, 20 bp, Artificial Sequence
  Synthetic oligonucleotide: CBLB-346
catcaatcagggcttgaaat

SEQ ID NO: 7353 - DNA, 20 bp, Artificial Sequence
  Synthetic oligonucleotide: CBLB-347
ctgctgccatcaatcagggc

SEQ ID NO: 7354 - DNA, 20 bp, Artificial Sequence
  Synthetic oligonucleotide: CBLB-348
ccttccctgctgccatcaat

SEQ ID NO: 7355 - DNA, 20 bp, Artificial Sequence
  Synthetic oligonucleotide: CBLB-349
taaagataactgaatttaaa

SEQ ID NO: 7356 - DNA, 20 bp, Artificial Sequence
  Synthetic oligonucleotide: CBLB-350
tcccatcaggataaagataa

SEQ ID NO: 7357 - DNA, 20 bp, Artificial Sequence
  Synthetic oligonucleotide: CBLB-351
aggattataactcctcccat

SEQ ID NO: 7358 - DNA, 20 bp, Artificial Sequence
  Synthetic oligonucleotide: CBLB-352
ttcacataatccagttaaat

SEQ ID NO: 7359 - DNA, 20 bp, Artificial Sequence
  Synthetic oligonucleotide: CBLB-353
tgtgtaacttttatatggtc

SEQ ID NO: 7360 - DNA, 20 bp, Artificial Sequence
  Synthetic oligonucleotide: CBLB-354
cctggaatttggggaggagg

SEQ ID NO: 7361 - DNA, 20 bp, Artificial Sequence
  Synthetic oligonucleotide: CBLB-985
ttcctggaatttggggagga

SEQ ID NO: 7362 - DNA, 20 bp, Artificial Sequence
  Synthetic oligonucleotide: CBLB-986
gttcctggaatttggggagg

SEQ ID NO: 7363 - DNA, 20 bp, Artificial Sequence
  Synthetic oligonucleotide: CBLB-357
tgttcctggaatttggggag

SEQ ID NO: 7364 - DNA, 20 bp, Artificial Sequence
  Synthetic oligonucleotide: CBLB-987
attgttcctggaatttgggg

SEQ ID NO: 7365 - DNA, 20 bp, Artificial Sequence
  Synthetic oligonucleotide: CBLB-359
tattgttcctggaatttggg

SEQ ID NO: 7366 - DNA, 20 bp, Artificial Sequence
  Synthetic oligonucleotide: CBLB-988
catattgttcctggaatttg

SEQ ID NO: 7367 - DNA, 20 bp, Artificial Sequence
  Synthetic oligonucleotide: CBLB-989
tcatattgttcctggaattt

SEQ ID NO: 7368 - DNA, 20 bp, Artificial Sequence
  Synthetic oligonucleotide: CBLB-990
ttcatattgttcctggaatt

SEQ ID NO: 7369 - DNA, 20 bp, Artificial Sequence
  Synthetic oligonucleotide: CBLB-363
attcatattgttcctggaat

SEQ ID NO: 7370 - DNA, 20 bp, Artificial Sequence
  Synthetic oligonucleotide: CBLB-991
aatataattcatattgttcc

SEQ ID NO: 7371 - DNA, 20 bp, Artificial Sequence
  Synthetic oligonucleotide: CBLB-365
caatataattcatattgttc

SEQ ID NO: 7372 - DNA, 20 bp, Artificial Sequence
  Synthetic oligonucleotide: CBLB-992
aatcttacagagctgaaaag

SEQ ID NO: 7373 - DNA, 20 bp, Artificial Sequence
  Synthetic oligonucleotide: CBLB-367
aaatcttacagagctgaaaa

SEQ ID NO: 7374 - DNA, 20 bp, Artificial Sequence
  Synthetic oligonucleotide: CBLB-368
tctgcacaaatcttacagag

SEQ ID NO: 7375 - DNA, 20 bp, Artificial Sequence
  Synthetic oligonucleotide: CBLB-369
cattctctgcacaaatctta

SEQ ID NO: 7376 - DNA, 20 bp, Artificial Sequence
  Synthetic oligonucleotide: CBLB-370
tacctgccatgccgtaaggc

SEQ ID NO: 7377 - DNA, 20 bp, Artificial Sequence
  Synthetic oligonucleotide: CBLB-371
cctaaacaaatagaaaatgc

SEQ ID NO: 7378 - DNA, 20 bp, Artificial Sequence
  Synthetic oligonucleotide: CBLB-372
ccatccgactcctaaacaaa

SEQ ID NO: 7379 - DNA, 20 bp, Artificial Sequence
  Synthetic oligonucleotide: CBLB-373
ttttatttcacaacgacaga

SEQ ID NO: 7380 - DNA, 20 bp, Artificial Sequence
  Synthetic oligonucleotide: CBLB-374
ttccttttatttcacaacga

SEQ ID NO: 7381 - DNA, 20 bp, Artificial Sequence
  Synthetic oligonucleotide: CBLB-375
gatcaaaggggtccacgatt

SEQ ID NO: 7382 - DNA, 20 bp, Artificial Sequence
  Synthetic oligonucleotide: CBLB-1004
gccttcatctcttggatcaa

SEQ ID NO: 7383 - DNA, 20 bp, Artificial Sequence
  Synthetic oligonucleotide: CBLB-377
agccttcatctcttggatca

SEQ ID NO: 7384 - DNA, 20 bp, Artificial Sequence
  Synthetic oligonucleotide: CBLB-378
acacctggagccttcatctc

SEQ ID NO: 7385 - DNA, 20 bp, Artificial Sequence
  Synthetic oligonucleotide: CBLB-1006
gtcaatgatgctgcaacacc

SEQ ID NO: 7386 - DNA, 20 bp, Artificial Sequence
  Synthetic oligonucleotide: CBLB-380
ggtcaatgatgctgcaacac

SEQ ID NO: 7387 - DNA, 20 bp, Artificial Sequence
  Synthetic oligonucleotide: CBLB-1009
gtctagcatcggcatgccaa

SEQ ID NO: 7388 - DNA, 20 bp, Artificial Sequence
  Synthetic oligonucleotide: CBLB-382
agtctagcatcggcatgcca

SEQ ID NO: 7389 - DNA, 20 bp, Artificial Sequence
  Synthetic oligonucleotide: CBLB-383
ttgccaaccgattcatcatc

SEQ ID NO: 7390 - DNA, 20 bp, Artificial Sequence
  Synthetic oligonucleotide: CBLB-384
catgtttctagttttacctt

SEQ ID NO: 7391 - DNA, 20 bp, Artificial Sequence
  Synthetic oligonucleotide: CBLB-385
agtgcactagaacagaaaaa

SEQ ID NO: 7392 - DNA, 20 bp, Artificial Sequence
  Synthetic oligonucleotide: CBLB-386
tcagtgcactagaacagaaa

SEQ ID NO: 7393 - DNA, 20 bp, Artificial Sequence
  Synthetic oligonucleotide: CBLB-387
tgcctgtcagtgcactagaa

SEQ ID NO: 7394 - DNA, 20 bp, Artificial Sequence
  Synthetic oligonucleotide: CBLB-388
agttctgcctgtcagtgcac

SEQ ID NO: 7395 - DNA, 20 bp, Artificial Sequence
  Synthetic oligonucleotide: CBLB-389
ggatcctggtgatgtgactg

SEQ ID NO: 7396 - DNA, 20 bp, Artificial Sequence
  Synthetic oligonucleotide: CBLB-390
ttcttctctgggcaagggga

SEQ ID NO: 7397 - DNA, 20 bp, Artificial Sequence
  Synthetic oligonucleotide: CBLB-391
ctttcttctctgggcaaggg

SEQ ID NO: 7398 - DNA, 20 bp, Artificial Sequence
  Synthetic oligonucleotide: CBLB-1016
ggctttcttctctgggcaag

SEQ ID NO: 7399 - DNA, 20 bp, Artificial Sequence
  Synthetic oligonucleotide: CBLB-1017
tggctttcttctctgggcaa

SEQ ID NO: 7400 - DNA, 20 bp, Artificial Sequence
  Synthetic oligonucleotide: CBLB-1018
gtggctttcttctctgggca

SEQ ID NO: 7401 - DNA, 20 bp, Artificial Sequence
  Synthetic oligonucleotide: CBLB-395
tgtggctttcttctctgggc

SEQ ID NO: 7402 - DNA, 20 bp, Artificial Sequence
  Synthetic oligonucleotide: CBLB-396
tcaggctgtggctttcttct

SEQ ID NO: 7403 - DNA, 20 bp, Artificial Sequence
  Synthetic oligonucleotide: CBLB-397
gcttagatgtgggatctgga

SEQ ID NO: 7404 - DNA, 20 bp, Artificial Sequence
  Synthetic oligonucleotide: CBLB-1025
gcaggcttagatgtgggatc

SEQ ID NO: 7405 - DNA, 20 bp, Artificial Sequence
  Synthetic oligonucleotide: CBLB-399
ggcaggcttagatgtgggat

SEQ ID NO: 7406 - DNA, 20 bp, Artificial Sequence
  Synthetic oligonucleotide: CBLB-1027
acgggtggcaggcttagatg

SEQ ID NO: 7407 - DNA, 20 bp, Artificial Sequence
  Synthetic oligonucleotide: CBLB-401
cacgggtggcaggcttagat

SEQ ID NO: 7408 - DNA, 20 bp, Artificial Sequence
  Synthetic oligonucleotide: CBLB-402
ttagatccaggcgaggaggc

SEQ ID NO: 7409 - DNA, 20 bp, Artificial Sequence
  Synthetic oligonucleotide: CBLB-1033
ttctgaattagatccaggcg

SEQ ID NO: 7410 - DNA, 20 bp, Artificial Sequence
  Synthetic oligonucleotide: CBLB-404
tttctgaattagatccaggc

SEQ ID NO: 7411 - DNA, 20 bp, Artificial Sequence
  Synthetic oligonucleotide: CBLB-405
cctttctgaattagatccag

SEQ ID NO: 7412 - DNA, 20 bp, Artificial Sequence
  Synthetic oligonucleotide: CBLB-406
ggagatctaactatgccttt

SEQ ID NO: 7413 - DNA, 20 bp, Artificial Sequence
  Synthetic oligonucleotide: CBLB-1035
gaacccgttgggctgccaca

SEQ ID NO: 7414 - DNA, 20 bp, Artificial Sequence
  Synthetic oligonucleotide: CBLB-1036
tgaacccgttgggctgccac

SEQ ID NO: 7415 - DNA, 20 bp, Artificial Sequence
  Synthetic oligonucleotide: CBLB-409
gtgaacccgttgggctgcca

SEQ ID NO: 7416 - DNA, 20 bp, Artificial Sequence
  Synthetic oligonucleotide: CBLB-410
atctacctttggtgaacccg

SEQ ID NO: 7417 - DNA, 20 bp, Artificial Sequence
  Synthetic oligonucleotide: CBLB-411
ataaaattgatctacctttg

SEQ ID NO: 7418 - DNA, 20 bp, Artificial Sequence
  Synthetic oligonucleotide: CBLB-412
agaagactaaagaaacagaa

SEQ ID NO: 7419 - DNA, 20 bp, Artificial Sequence
  Synthetic oligonucleotide: CBLB-413
ggagaagactaaagaaacag

SEQ ID NO: 7420 - DNA, 20 bp, Artificial Sequence
  Synthetic oligonucleotide: CBLB-414
caaggagaagactaaagaaa

SEQ ID NO: 7421 - DNA, 20 bp, Artificial Sequence
  Synthetic oligonucleotide: CBLB-415
accatgcaaggagaagacta

SEQ ID NO: 7422 - DNA, 20 bp, Artificial Sequence
  Synthetic oligonucleotide: CBLB-416
ttgttttctcaccatgcaag

SEQ ID NO: 7423 - DNA, 20 bp, Artificial Sequence
  Synthetic oligonucleotide: CBLB-1040
tcttgttttctcaccatgca

SEQ ID NO: 7424 - DNA, 20 bp, Artificial Sequence
  Synthetic oligonucleotide: CBLB-418
atcttgttttctcaccatgc

SEQ ID NO: 7425 - DNA, 20 bp, Artificial Sequence
  Synthetic oligonucleotide: CBLB-1042
ttaagggaggaggtggtgct

SEQ ID NO: 7426 - DNA, 20 bp, Artificial Sequence
  Synthetic oligonucleotide: CBLB-1043
cttaagggaggaggtggtgc

SEQ ID NO: 7427 - DNA, 20 bp, Artificial Sequence
  Synthetic oligonucleotide: CBLB-421
tcttaagggaggaggtggtg

SEQ ID NO: 7428 - DNA, 20 bp, Artificial Sequence
  Synthetic oligonucleotide: CBLB-1046
ggaggaggatctcttaaggg

SEQ ID NO: 7429 - DNA, 20 bp, Artificial Sequence
  Synthetic oligonucleotide: CBLB-423
tggaggaggatctcttaagg

SEQ ID NO: 7430 - DNA, 20 bp, Artificial Sequence
  Synthetic oligonucleotide: CBLB-1047
ggtggaggaggatctcttaa

SEQ ID NO: 7431 - DNA, 20 bp, Artificial Sequence
  Synthetic oligonucleotide: CBLB-1048
cggtggaggaggatctctta

SEQ ID NO: 7432 - DNA, 20 bp, Artificial Sequence
  Synthetic oligonucleotide: CBLB-426
gcggtggaggaggatctctt

SEQ ID NO: 7433 - DNA, 20 bp, Artificial Sequence
  Synthetic oligonucleotide: CBLB-427
tctttcaggtggcggtggag

SEQ ID NO: 7434 - DNA, 20 bp, Artificial Sequence
  Synthetic oligonucleotide: CBLB-1050
ggtctttcaggtggcggtgg

SEQ ID NO: 7435 - DNA, 20 bp, Artificial Sequence
  Synthetic oligonucleotide: CBLB-429
aggtctttcaggtggcggtg

SEQ ID NO: 7436 - DNA, 20 bp, Artificial Sequence
  Synthetic oligonucleotide: CBLB-1051
ggaggtctttcaggtggcgg

SEQ ID NO: 7437 - DNA, 20 bp, Artificial Sequence
  Synthetic oligonucleotide: CBLB-431
tggaggtctttcaggtggcg

SEQ ID NO: 7438 - DNA, 20 bp, Artificial Sequence
  Synthetic oligonucleotide: CBLB-1056
ctattgtctggtgggattgg

SEQ ID NO: 7439 - DNA, 20 bp, Artificial Sequence
  Synthetic oligonucleotide: CBLB-433
tctattgtctggtgggattg

SEQ ID NO: 7440 - RNA, 17 nt, Artificial Sequence
  Synthetic oligonucleotide: CBLB-434
aggcacaagggaaaaaa

SEQ ID NO: 7441 - DNA, 17 bp, Artificial Sequence
  Synthetic oligonucleotide: CBLB-1191
ttcgtctgtaggcacaa

SEQ ID NO: 7442 - DNA, 17 bp, Artificial Sequence
  Synthetic oligonucleotide: CBLB-1192
tttcgtctgtaggcaca

SEQ ID NO: 7443 - DNA, 17 bp, Artificial Sequence
  Synthetic oligonucleotide: CBLB-437
atttcgtctgtaggcac

SEQ ID NO: 7444 - DNA, 17 bp, Artificial Sequence
  Synthetic oligonucleotide: CBLB-438
agataagggacagtttt

SEQ ID NO: 7445 - DNA, 17 bp, Artificial Sequence
  Synthetic oligonucleotide: CBLB-1195
gcatgtgactgaagata

SEQ ID NO: 7446 - DNA, 17 bp, Artificial Sequence
  Synthetic oligonucleotide: CBLB-440
agcatgtgactgaagat

SEQ ID NO: 7447 - DNA, 17 bp, Artificial Sequence
  Synthetic oligonucleotide: CBLB-441
tttctgccagcatgtga

SEQ ID NO: 7448 - DNA, 17 bp, Artificial Sequence
  Synthetic oligonucleotide: CBLB-1196
ccctggaattgaccatt

SEQ ID NO: 7449 - DNA, 17 bp, Artificial Sequence
  Synthetic oligonucleotide: CBLB-1197
tccctggaattgaccat

SEQ ID NO: 7450 - DNA, 17 bp, Artificial Sequence
  Synthetic oligonucleotide: CBLB-444
ctccctggaattgacca

SEQ ID NO: 7451 - DNA, 17 bp, Artificial Sequence
  Synthetic oligonucleotide: CBLB-1198
tacgaaagttatctccc

SEQ ID NO: 7452 - DNA, 17 bp, Artificial Sequence
  Synthetic oligonucleotide: CBLB-446
atacgaaagttatctcc

SEQ ID NO: 7453 - DNA, 17 bp, Artificial Sequence
  Synthetic oligonucleotide: CBLB-447
gcatctgcttttgtgat

SEQ ID NO: 7454 - DNA, 17 bp, Artificial Sequence
  Synthetic oligonucleotide: CBLB-448
ctccaaaaaactttctc

SEQ ID NO: 7455 - DNA, 17 bp, Artificial Sequence
  Synthetic oligonucleotide: CBLB-1199
tgcaaggtggaaaaaaa

SEQ ID NO: 7456 - DNA, 17 bp, Artificial Sequence
  Synthetic oligonucleotide: CBLB-1200
gtgcaaggtggaaaaaa

SEQ ID NO: 7457 - DNA, 17 bp, Artificial Sequence
  Synthetic oligonucleotide: CBLB-451
tgtgcaaggtggaaaaa

SEQ ID NO: 7458 - DNA, 17 bp, Artificial Sequence
  Synthetic oligonucleotide: CBLB-1201
gatagttctgtgcaagg

SEQ ID NO: 7459 - DNA, 17 bp, Artificial Sequence
  Synthetic oligonucleotide: CBLB-453
cgatagttctgtgcaag

SEQ ID NO: 7460 - DNA, 17 bp, Artificial Sequence
  Synthetic oligonucleotide: CBLB-454
cctcatgaaggcactgt

SEQ ID NO: 7461 - DNA, 17 bp, Artificial Sequence
  Synthetic oligonucleotide: CBLB-455
ctaatctggtggacctc

SEQ ID NO: 7462 - DNA, 17 bp, Artificial Sequence
  Synthetic oligonucleotide: CBLB-456
aggccagagctaatctg

SEQ ID NO: 7463 - DNA, 17 bp, Artificial Sequence
  Synthetic oligonucleotide: CBLB-457
agccattgcttccaggc

SEQ ID NO: 7464 - DNA, 17 bp, Artificial Sequence
  Synthetic oligonucleotide: CBLB-458
aaatcaattgttgattt

SEQ ID NO: 7465 - DNA, 17 bp, Artificial Sequence
  Synthetic oligonucleotide: CBLB-459
aatatcaaattcaaaaa

SEQ ID NO: 7466 - DNA, 17 bp, Artificial Sequence
  Synthetic oligonucleotide: CBLB-460
agcaagtataaacttac

SEQ ID NO: 7467 - DNA, 17 bp, Artificial Sequence
  Synthetic oligonucleotide: CBLB-461
aaaaataaaaaaattaa

SEQ ID NO: 7468 - DNA, 17 bp, Artificial Sequence
  Synthetic oligonucleotide: CBLB-462
attccaattccgcaaaa

SEQ ID NO: 7469 - DNA, 17 bp, Artificial Sequence
  Synthetic oligonucleotide: CBLB-463
ctggatgtgtcacagct

SEQ ID NO: 7470 - DNA, 17 bp, Artificial Sequence
  Synthetic oligonucleotide: CBLB-464
gagaaatgccatgtaac

SEQ ID NO: 7471 - DNA, 17 bp, Artificial Sequence
  Synthetic oligonucleotide: CBLB-465
ttaacttcatcatatgt

SEQ ID NO: 7472 - DNA, 17 bp, Artificial Sequence
  Synthetic oligonucleotide: CBLB-466
ctttaacttcatcatat

SEQ ID NO: 7473 - DNA, 17 bp, Artificial Sequence
  Synthetic oligonucleotide: CBLB-467
ctaaaaagtcttacctt

SEQ ID NO: 7474 - DNA, 17 bp, Artificial Sequence
  Synthetic oligonucleotide: CBLB-468
atatagctgcaaaacat

SEQ ID NO: 7475 - DNA, 17 bp, Artificial Sequence
  Synthetic oligonucleotide: CBLB-1214
atcgagtgcaacttaac

SEQ ID NO: 7476 - DNA, 17 bp, Artificial Sequence
  Synthetic oligonucleotide: CBLB-470
aatcgagtgcaacttaa

SEQ ID NO: 7477 - DNA, 17 bp, Artificial Sequence
  Synthetic oligonucleotide: CBLB-471
atggcccactgtcccaa

SEQ ID NO: 7478 - DNA, 17 bp, Artificial Sequence
  Synthetic oligonucleotide: CBLB-472
tgaaataagggcttgtt

SEQ ID NO: 7479 - DNA, 17 bp, Artificial Sequence
  Synthetic oligonucleotide: CBLB-473
caatcagggcttgaaat

SEQ ID NO: 7480 - DNA, 17 bp, Artificial Sequence
  Synthetic oligonucleotide: CBLB-474
ctgccatcaatcagggc

SEQ ID NO: 7481 - DNA, 17 bp, Artificial Sequence
  Synthetic oligonucleotide: CBLB-475
tccctgctgccatcaat

SEQ ID NO: 7482 - DNA, 17 bp, Artificial Sequence
  Synthetic oligonucleotide: CBLB-476
agataactgaatttaaa

SEQ ID NO: 7483 - DNA, 17 bp, Artificial Sequence
  Synthetic oligonucleotide: CBLB-477
catcaggataaagataa

SEQ ID NO: 7484 - DNA, 17 bp, Artificial Sequence
  Synthetic oligonucleotide: CBLB-478
attataactcctcccat

SEQ ID NO: 7485 - DNA, 17 bp, Artificial Sequence
  Synthetic oligonucleotide: CBLB-479
acataatccagttaaat

SEQ ID NO: 7486 - DNA, 17 bp, Artificial Sequence
  Synthetic oligonucleotide: CBLB-480
gtaacttttatatggtc

SEQ ID NO: 7487 - DNA, 17 bp, Artificial Sequence
  Synthetic oligonucleotide: CBLB-481
ggaatttggggaggagg

SEQ ID NO: 7488 - DNA, 17 bp, Artificial Sequence
  Synthetic oligonucleotide: CBLB-1227
ctggaatttggggagga

SEQ ID NO: 7489 - DNA, 17 bp, Artificial Sequence
  Synthetic oligonucleotide: CBLB-1228
cctggaatttggggagg

SEQ ID NO: 7490 - DNA, 17 bp, Artificial Sequence
  Synthetic oligonucleotide: CBLB-484
tcctggaatttggggag

SEQ ID NO: 7491 - DNA, 17 bp, Artificial Sequence
  Synthetic oligonucleotide: CBLB-1229
gttcctggaatttgggg

SEQ ID NO: 7492 - DNA, 17 bp, Artificial Sequence
  Synthetic oligonucleotide: CBLB-486
tgttcctggaatttggg

SEQ ID NO: 7493 - DNA, 17 bp, Artificial Sequence
  Synthetic oligonucleotide: CBLB-1230
attgttcctggaatttg

SEQ ID NO: 7494 - DNA, 17 bp, Artificial Sequence
  Synthetic oligonucleotide: CBLB-1231
tattgttcctggaattt

SEQ ID NO: 7495 - DNA, 17 bp, Artificial Sequence
  Synthetic oligonucleotide: CBLB-1232
atattgttcctggaatt

SEQ ID NO: 7496 - DNA, 17 bp, Artificial Sequence
  Synthetic oligonucleotide: CBLB-490
catattgttcctggaat

SEQ ID NO: 7497 - DNA, 17 bp, Artificial Sequence
  Synthetic oligonucleotide: CBLB-1233
ataattcatattgttcc

SEQ ID NO: 7498 - DNA, 17 bp, Artificial Sequence
  Synthetic oligonucleotide: CBLB-492
tataattcatattgttc

SEQ ID NO: 7499 - DNA, 17 bp, Artificial Sequence
  Synthetic oligonucleotide: CBLB-1234
cttacagagctgaaaag

SEQ ID NO: 7500 - DNA, 17 bp, Artificial Sequence
  Synthetic oligonucleotide: CBLB-494
tcttacagagctgaaaa

SEQ ID NO: 7501 - DNA, 17 bp, Artificial Sequence
  Synthetic oligonucleotide: CBLB-495
gcacaaatcttacagag

SEQ ID NO: 7502 - DNA, 17 bp, Artificial Sequence
  Synthetic oligonucleotide: CBLB-496
tctctgcacaaatctta

SEQ ID NO: 7503 - DNA, 17 bp, Artificial Sequence
  Synthetic oligonucleotide: CBLB-497
ctgccatgccgtaaggc

SEQ ID NO: 7504 - DNA, 17 bp, Artificial Sequence
  Synthetic oligonucleotide: CBLB-498
aaacaaatagaaaatgc

SEQ ID NO: 7505 - DNA, 17 bp, Artificial Sequence
  Synthetic oligonucleotide: CBLB-499
tccgactcctaaacaaa

SEQ ID NO: 7506 - DNA, 17 bp, Artificial Sequence
  Synthetic oligonucleotide: CBLB-500
tatttcacaacgacaga

SEQ ID NO: 7507 - DNA, 17 bp, Artificial Sequence
  Synthetic oligonucleotide: CBLB-501
cttttatttcacaacga

SEQ ID NO: 7508 - DNA, 17 bp, Artificial Sequence
  Synthetic oligonucleotide: CBLB-502
caaaggggtccacgatt

SEQ ID NO: 7509 - DNA, 17 bp, Artificial Sequence
  Synthetic oligonucleotide: CBLB-1246
ttcatctcttggatcaa

SEQ ID NO: 7510 - DNA, 17 bp, Artificial Sequence
  Synthetic oligonucleotide: CBLB-504
cttcatctcttggatca

SEQ ID NO: 7511 - DNA, 17 bp, Artificial Sequence
  Synthetic oligonucleotide: CBLB-505
cctggagccttcatctc

SEQ ID NO: 7512 - DNA, 17 bp, Artificial Sequence
  Synthetic oligonucleotide: CBLB-1248
aatgatgctgcaacacc

SEQ ID NO: 7513 - DNA, 17 bp, Artificial Sequence
  Synthetic oligonucleotide: CBLB-507
caatgatgctgcaacac

SEQ ID NO: 7514 - DNA, 17 bp, Artificial Sequence
  Synthetic oligonucleotide: CBLB-1251
tagcatcggcatgccaa

SEQ ID NO: 7515 - DNA, 17 bp, Artificial Sequence
  Synthetic oligonucleotide: CBLB-509
ctagcatcggcatgcca

SEQ ID NO: 7516 - DNA, 17 bp, Artificial Sequence
  Synthetic oligonucleotide: CBLB-510
ccaaccgattcatcatc

SEQ ID NO: 7517 - DNA, 17 bp, Artificial Sequence
  Synthetic oligonucleotide: CBLB-511
gtttctagttttacctt

SEQ ID NO: 7518 - DNA, 17 bp, Artificial Sequence
  Synthetic oligonucleotide: CBLB-512
gcactagaacagaaaaa

SEQ ID NO: 7519 - DNA, 17 bp, Artificial Sequence
  Synthetic oligonucleotide: CBLB-513
gtgcactagaacagaaa

SEQ ID NO: 7520 - DNA, 17 bp, Artificial Sequence
  Synthetic oligonucleotide: CBLB-514
ctgtcagtgcactagaa

SEQ ID NO: 7521 - DNA, 17 bp, Artificial Sequence
  Synthetic oligonucleotide: CBLB-515
tctgcctgtcagtgcac

SEQ ID NO: 7522 - DNA, 17 bp, Artificial Sequence
  Synthetic oligonucleotide: CBLB-516
tcctggtgatgtgactg

SEQ ID NO: 7523 - DNA, 17 bp, Artificial Sequence
  Synthetic oligonucleotide: CBLB-517
ttctctgggcaagggga

SEQ ID NO: 7524 - DNA, 17 bp, Artificial Sequence
  Synthetic oligonucleotide: CBLB-518
tcttctctgggcaaggg

SEQ ID NO: 7525 - DNA, 17 bp, Artificial Sequence
  Synthetic oligonucleotide: CBLB-1258
tttcttctctgggcaag

SEQ ID NO: 7526 - DNA, 17 bp, Artificial Sequence
  Synthetic oligonucleotide: CBLB-1259
ctttcttctctgggcaa

SEQ ID NO: 7527 - DNA, 17 bp, Artificial Sequence
  Synthetic oligonucleotide: CBLB-1260
gctttcttctctgggca

SEQ ID NO: 7528 - DNA, 17 bp, Artificial Sequence
  Synthetic oligonucleotide: CBLB-522
ggctttcttctctgggc

SEQ ID NO: 7529 - DNA, 17 bp, Artificial Sequence
  Synthetic oligonucleotide: CBLB-523
ggctgtggctttcttct

SEQ ID NO: 7530 - DNA, 17 bp, Artificial Sequence
  Synthetic oligonucleotide: CBLB-524
tagatgtgggatctgga

SEQ ID NO: 7531 - DNA, 17 bp, Artificial Sequence
  Synthetic oligonucleotide: CBLB-1267
ggcttagatgtgggatc

SEQ ID NO: 7532 - DNA, 17 bp, Artificial Sequence
  Synthetic oligonucleotide: CBLB-526
aggcttagatgtgggat

SEQ ID NO: 7533 - DNA, 17 bp, Artificial Sequence
  Synthetic oligonucleotide: CBLB-1269
ggtggcaggcttagatg

SEQ ID NO: 7534 - DNA, 17 bp, Artificial Sequence
  Synthetic oligonucleotide: CBLB-528
gggtggcaggcttagat

SEQ ID NO: 7535 - DNA, 17 bp, Artificial Sequence
  Synthetic oligonucleotide: CBLB-529
gatccaggcgaggaggc

SEQ ID NO: 7536 - DNA, 17 bp, Artificial Sequence
  Synthetic oligonucleotide: CBLB-1275
tgaattagatccaggcg

SEQ ID NO: 7537 - DNA, 17 bp, Artificial Sequence
  Synthetic oligonucleotide: CBLB-531
ctgaattagatccaggc

SEQ ID NO: 7538 - DNA, 17 bp, Artificial Sequence
  Synthetic oligonucleotide: CBLB-532
ttctgaattagatccag

SEQ ID NO: 7539 - DNA, 17 bp, Artificial Sequence
  Synthetic oligonucleotide: CBLB-533
gatctaactatgccttt

SEQ ID NO: 7540 - DNA, 17 bp, Artificial Sequence
  Synthetic oligonucleotide: CBLB-1277
cccgttgggctgccaca

SEQ ID NO: 7541 - DNA, 17 bp, Artificial Sequence
  Synthetic oligonucleotide: CBLB-1278
acccgttgggctgccac

SEQ ID NO: 7542 - DNA, 17 bp, Artificial Sequence
  Synthetic oligonucleotide: CBLB-536
aacccgttgggctgcca

SEQ ID NO: 7543 - DNA, 17 bp, Artificial Sequence
  Synthetic oligonucleotide: CBLB-537
tacctttggtgaacccg

SEQ ID NO: 7544 - DNA, 17 bp, Artificial Sequence
  Synthetic oligonucleotide: CBLB-538
aaattgatctacctttg

SEQ ID NO: 7545 - DNA, 17 bp, Artificial Sequence
  Synthetic oligonucleotide: CBLB-539
agactaaagaaacagaa

SEQ ID NO: 7546 - DNA, 17 bp, Artificial Sequence
  Synthetic oligonucleotide: CBLB-540
gaagactaaagaaacag

SEQ ID NO: 7547 - DNA, 17 bp, Artificial Sequence
  Synthetic oligonucleotide: CBLB-541
ggagaagactaaagaaa

SEQ ID NO: 7548 - DNA, 17 bp, Artificial Sequence
  Synthetic oligonucleotide: CBLB-542
atgcaaggagaagacta

SEQ ID NO: 7549 - DNA, 17 bp, Artificial Sequence
  Synthetic oligonucleotide: CBLB-543
ttttctcaccatgcaag

SEQ ID NO: 7550 - DNA, 17 bp, Artificial Sequence
  Synthetic oligonucleotide: CBLB-1282
tgttttctcaccatgca

SEQ ID NO: 7551 - DNA, 17 bp, Artificial Sequence
  Synthetic oligonucleotide: CBLB-545
ttgttttctcaccatgc

SEQ ID NO: 7552 - DNA, 17 bp, Artificial Sequence
  Synthetic oligonucleotide: CBLB-1284
agggaggaggtggtgct

SEQ ID NO: 7553 - DNA, 17 bp, Artificial Sequence
  Synthetic oligonucleotide: CBLB-1285
aagggaggaggtggtgc

SEQ ID NO: 7554 - DNA, 17 bp, Artificial Sequence
  Synthetic oligonucleotide: CBLB-548
taagggaggaggtggtg

SEQ ID NO: 7555 - DNA, 17 bp, Artificial Sequence
  Synthetic oligonucleotide: CBLB-1288
ggaggatctcttaaggg

SEQ ID NO: 7556 - DNA, 17 bp, Artificial Sequence
  Synthetic oligonucleotide: CBLB-550
aggaggatctcttaagg

SEQ ID NO: 7557 - DNA, 17 bp, Artificial Sequence
  Synthetic oligonucleotide: CBLB-1289
ggaggaggatctcttaa

SEQ ID NO: 7558 - DNA, 17 bp, Artificial Sequence
  Synthetic oligonucleotide: CBLB-1290
tggaggaggatctctta

SEQ ID NO: 7559 - DNA, 17 bp, Artificial Sequence
  Synthetic oligonucleotide: CBLB-553
gtggaggaggatctctt

SEQ ID NO: 7560 - DNA, 17 bp, Artificial Sequence
  Synthetic oligonucleotide: CBLB-554
ttcaggtggcggtggag

SEQ ID NO: 7561 - DNA, 17 bp, Artificial Sequence
  Synthetic oligonucleotide: CBLB-1292
ctttcaggtggcggtgg

SEQ ID NO: 7562 - DNA, 17 bp, Artificial Sequence
  Synthetic oligonucleotide: CBLB-556
tctttcaggtggcggtg

SEQ ID NO: 7563 - DNA, 17 bp, Artificial Sequence
  Synthetic oligonucleotide: CBLB-1293
ggtctttcaggtggcgg

SEQ ID NO: 7564 - DNA, 17 bp, Artificial Sequence
  Synthetic oligonucleotide: CBLB-558
aggtctttcaggtggcg

SEQ ID NO: 7565 - DNA, 17 bp, Artificial Sequence
  Synthetic oligonucleotide: CBLB-1298
ttgtctggtgggattgg

SEQ ID NO: 7566 - DNA, 17 bp, Artificial Sequence
  Synthetic oligonucleotide: CBLB-560
attgtctggtgggattg

SEQ ID NO: 7567 - DNA, 20 bp, Artificial Sequence
  Synthetic oligonucleotide: CBLB-561
ggaattttagttctttaaaa

SEQ ID NO: 7568 - DNA, 20 bp, Artificial Sequence
  Synthetic oligonucleotide: CBLB-2302
tacccaaaattcgacctttt

SEQ ID NO: 7569 - DNA, 20 bp, Artificial Sequence
  Synthetic oligonucleotide: CBLB-85
ggctatttttcaactgaagt

SEQ ID NO: 7570 - DNA, 20 bp, Artificial Sequence
  Synthetic oligonucleotide: CBLB-564
ctttttcataaggctatcaa

SEQ ID NO: 7571 - DNA, 17 bp, Artificial Sequence
  Synthetic oligonucleotide: CBLB-565
attttagttctttaaaa

SEQ ID NO: 7572 - DNA, 17 bp, Artificial Sequence
  Synthetic oligonucleotide: CBLB-2361
ccaaaattcgacctttt

SEQ ID NO: 7573 - DNA, 17 bp, Artificial Sequence
  Synthetic oligonucleotide: CBLB-105
tatttttcaactgaagt

SEQ ID NO: 7574 - DNA, 17 bp, Artificial Sequence
  Synthetic oligonucleotide: CBLB-568
tttcataaggctatcaa

SEQ ID NO: 7575 - DNA, 20 bp, Artificial Sequence
  Synthetic oligonucleotide: CBLB-569
acagtgccttcatgaggtcc

SEQ ID NO: 7576 - DNA, 20 bp, Artificial Sequence
  Synthetic oligonucleotide: CBLB-570
gcaatggctctaaaatcaac

SEQ ID NO: 7577 - DNA, 20 bp, Artificial Sequence
  Synthetic oligonucleotide: CBLB-571
tcaacaattgatttaacttg

SEQ ID NO: 7578 - DNA, 20 bp, Artificial Sequence
  Synthetic oligonucleotide: CBLB-572
atattttccggttaagttgc

SEQ ID NO: 7579 - DNA, 20 bp, Artificial Sequence
  Synthetic oligonucleotide: CBLB-573
taacaagcccttatttcaag

SEQ ID NO: 7580 - DNA, 20 bp, Artificial Sequence
  Synthetic oligonucleotide: CBLB-574
ccctgattgatggcagcagg

SEQ ID NO: 7581 - DNA, 20 bp, Artificial Sequence
  Synthetic oligonucleotide: CBLB-575
cctgatgggaggagttataa

SEQ ID NO: 7582 - DNA, 20 bp, Artificial Sequence
  Synthetic oligonucleotide: CBLB-576
ggagttataatcctgattta

SEQ ID NO: 7583 - DNA, 20 bp, Artificial Sequence
  Synthetic oligonucleotide: CBLB-577
gggctccacttttcagctct

SEQ ID NO: 7584 - DNA, 20 bp, Artificial Sequence
  Synthetic oligonucleotide: CBLB-578
tgcagagaatgacaaagatg

SEQ ID NO: 7585 - DNA, 20 bp, Artificial Sequence
  Synthetic oligonucleotide: CBLB-579
cttatgcggaaacacagacg

SEQ ID NO: 7586 - DNA, 20 bp, Artificial Sequence
  Synthetic oligonucleotide: CBLB-580
agaggaagatgatgatgaat

SEQ ID NO: 7587 - DNA, 20 bp, Artificial Sequence
  Synthetic oligonucleotide: CBLB-581
tcctgttcggtaagagtatg

SEQ ID NO: 7588 - DNA, 20 bp, Artificial Sequence
  Synthetic oligonucleotide: CBLB-582
tgttatcctctaggagatgt

SEQ ID NO: 7589 - DNA, 20 bp, Artificial Sequence
  Synthetic oligonucleotide: CBLB-583
tcttcactcaacaggacgcc

SEQ ID NO: 7590 - DNA, 17 bp, Artificial Sequence
  Synthetic oligonucleotide: CBLB-584
gtgccttcatgaggtcc

SEQ ID NO: 7591 - DNA, 17 bp, Artificial Sequence
  Synthetic oligonucleotide: CBLB-585
atggctctaaaatcaac

SEQ ID NO: 7592 - DNA, 17 bp, Artificial Sequence
  Synthetic oligonucleotide: CBLB-586
acaattgatttaacttg

SEQ ID NO: 7593 - DNA, 17 bp, Artificial Sequence
  Synthetic oligonucleotide: CBLB-587
ttttccggttaagttgc

SEQ ID NO: 7594 - DNA, 17 bp, Artificial Sequence
  Synthetic oligonucleotide: CBLB-588
caagcccttatttcaag

SEQ ID NO: 7595 - DNA, 17 bp, Artificial Sequence
  Synthetic oligonucleotide: CBLB-589
tgattgatggcagcagg

SEQ ID NO: 7596 - DNA, 17 bp, Artificial Sequence
  Synthetic oligonucleotide: CBLB-590
gatgggaggagttataa

SEQ ID NO: 7597 - DNA, 17 bp, Artificial Sequence
  Synthetic oligonucleotide: CBLB-591
gttataatcctgattta

SEQ ID NO: 7598 - DNA, 17 bp, Artificial Sequence
  Synthetic oligonucleotide: CBLB-592
ctccacttttcagctct

SEQ ID NO: 7599 - DNA, 17 bp, Artificial Sequence
  Synthetic oligonucleotide: CBLB-593
agagaatgacaaagatg

SEQ ID NO: 7600 - DNA, 17 bp, Artificial Sequence
  Synthetic oligonucleotide: CBLB-594
atgcggaaacacagacg

SEQ ID NO: 7601 - DNA, 17 bp, Artificial Sequence
  Synthetic oligonucleotide: CBLB-595
ggaagatgatgatgaat

SEQ ID NO: 7602 - DNA, 17 bp, Artificial Sequence
  Synthetic oligonucleotide: CBLB-596
tgttcggtaagagtatg

SEQ ID NO: 7603 - DNA, 17 bp, Artificial Sequence
  Synthetic oligonucleotide: CBLB-597
tatcctctaggagatgt

SEQ ID NO: 7604 - DNA, 17 bp, Artificial Sequence
  Synthetic oligonucleotide: CBLB-598
tcactcaacaggacgcc

SEQ ID NO: 7605 - DNA, 20 bp, Artificial Sequence
  Synthetic oligonucleotide: CBLB-311
tgaagataagggacagtttt

SEQ ID NO: 7606 - DNA, 20 bp, Artificial Sequence
  Synthetic oligonucleotide: CBLB-600
ttgaccattgggaaagattg

SEQ ID NO: 7607 - DNA, 20 bp, Artificial Sequence
  Synthetic oligonucleotide: CBLB-601
tccctggaattgaccattgg

SEQ ID NO: 7608 - DNA, 20 bp, Artificial Sequence
  Synthetic oligonucleotide: CBLB-602
tcattgcaagttaaatcaat

SEQ ID NO: 7609 - DNA, 20 bp, Artificial Sequence
  Synthetic oligonucleotide: CBLB-334
ctaaaaaataaaaaaattaa

SEQ ID NO: 7610 - DNA, 20 bp, Artificial Sequence
  Synthetic oligonucleotide: CBLB-604
gttcacataatccagttaaa

SEQ ID NO: 7611 - DNA, 20 bp, Artificial Sequence
  Synthetic oligonucleotide: CBLB-605
  misc_feature (1)..(2): n is a, c, g, or t
nngaaagacatccatgttgc

SEQ ID NO: 7612 - DNA, 20 bp, Artificial Sequence
  Synthetic oligonucleotide: CBLB-606
tcctaaacaaatagaaaatg

SEQ ID NO: 7613 - DNA, 20 bp, Artificial Sequence
  Synthetic oligonucleotide: CBLB-607
atctcttggatcaaaggggt

SEQ ID NO: 7614 - DNA, 20 bp, Artificial Sequence
  Synthetic oligonucleotide: CBLB-608
ttacctttcggacgtttgcc

SEQ ID NO: 7615 - DNA, 20 bp, Artificial Sequence
  Synthetic oligonucleotide: CBLB-609
tctactcagtctattgtctg

SEQ ID NO: 7616 - DNA, 20 bp, Artificial Sequence
  Synthetic oligonucleotide: CBLB-610
ctaggagtcgacatcccaca

SEQ ID NO: 7617 - DNA, 20 bp, Artificial Sequence
  Synthetic oligonucleotide: CBLB-611
tccattgacatttgaactcg

SEQ ID NO: 7618 - DNA, 20 bp, Artificial Sequence
  Synthetic oligonucleotide: CBLB-612
tatatgcttaagtcagggat

SEQ ID NO: 7619 - DNA, 20 bp, Artificial Sequence
  Synthetic oligonucleotide: CBLB-613
tgttgagtgaagaaccatgc

SEQ ID NO: 7620 - DNA, 17 bp, Artificial Sequence
  Synthetic oligonucleotide: CBLB-438
agataagggacagtttt

SEQ ID NO: 7621 - DNA, 17 bp, Artificial Sequence
  Synthetic oligonucleotide: CBLB-615
accattgggaaagattg

SEQ ID NO: 7622 - DNA, 17 bp, Artificial Sequence
  Synthetic oligonucleotide: CBLB-616
ctggaattgaccattgg

SEQ ID NO: 7623 - DNA, 17 bp, Artificial Sequence
  Synthetic oligonucleotide: CBLB-617
ttgcaagttaaatcaat

SEQ ID NO: 7624 - DNA, 17 bp, Artificial Sequence
  Synthetic oligonucleotide: CBLB-461
aaaaataaaaaaattaa

SEQ ID NO: 7625 - DNA, 17 bp, Artificial Sequence
  Synthetic oligonucleotide: CBLB-619
cacataatccagttaaa

SEQ ID NO: 7626 - DNA, 17 bp, Artificial Sequence
  Synthetic oligonucleotide: CBLB-620
aaagacatccatgttgc

SEQ ID NO: 7627 - DNA, 17 bp, Artificial Sequence
  Synthetic oligonucleotide: CBLB-621
taaacaaatagaaaatg

SEQ ID NO: 7628 - DNA, 17 bp, Artificial Sequence
  Synthetic oligonucleotide: CBLB-622
tcttggatcaaaggggt

SEQ ID NO: 7629 - DNA, 17 bp, Artificial Sequence
  Synthetic oligonucleotide: CBLB-623
cctttcggacgtttgcc

SEQ ID NO: 7630 - DNA, 17 bp, Artificial Sequence
  Synthetic oligonucleotide: CBLB-624
actcagtctattgtctg

SEQ ID NO: 7631 - DNA, 17 bp, Artificial Sequence
  Synthetic oligonucleotide: CBLB-625
ggagtcgacatcccaca

SEQ ID NO: 7632 - DNA, 17 bp, Artificial Sequence
  Synthetic oligonucleotide: CBLB-626
attgacatttgaactcg

SEQ ID NO: 7633 - DNA, 17 bp, Artificial Sequence
  Synthetic oligonucleotide: CBLB-627
atgcttaagtcagggat

SEQ ID NO: 7634 - DNA, 17 bp, Artificial Sequence
  Synthetic oligonucleotide: CBLB-628
tgagtgaagaaccatgc

SEQ ID NO: 7635 - DNA, 20 bp, Artificial Sequence
  Synthetic oligonucleotide: CBLB-2367
gaaagtgaagtttctgcgta

SEQ ID NO: 7636 - DNA, 20 bp, Artificial Sequence
  Synthetic oligonucleotide: CBLB-2369
gataggaccttcagttgttc

SEQ ID NO: 7637 - DNA, 20 bp, Artificial Sequence
  Synthetic oligonucleotide: CBLB-2386
ggttttgctctaatcgatgg

SEQ ID NO: 7638 - DNA, 20 bp, Artificial Sequence
  Synthetic oligonucleotide: CBLB-2289
gggtattattgatgctattc

SEQ ID NO: 7639 - DNA, 20 bp, Artificial Sequence
  Synthetic oligonucleotide: CBLB-2293
gcaggaccgtggagaagact

SEQ ID NO: 7640 - DNA, 20 bp, Artificial Sequence
  Synthetic oligonucleotide: CBLB-2414
gtgtatggccatagaatgct

SEQ ID NO: 7641 - DNA, 20 bp, Artificial Sequence
  Synthetic oligonucleotide: CBLB-2299
gatctgcggcagcttgctta

SEQ ID NO: 7642 - DNA, 20 bp, Artificial Sequence
  Synthetic oligonucleotide: CBLB-2305
ggatttcctcctcgaccacc

SEQ ID NO: 7643 - DNA, 20 bp, Artificial Sequence
  Synthetic oligonucleotide: CBLB-2306
gatttcctcctcgaccacca

SEQ ID NO: 7644 - DNA, 20 bp, Artificial Sequence
  Synthetic oligonucleotide: CBLB-2439
gctcacgtttcaagtagcta

SEQ ID NO: 7645 - DNA, 20 bp, Artificial Sequence
  Synthetic oligonucleotide: CBLB-2442
gaaggtcctatcatacattt

SEQ ID NO: 7646 - DNA, 17 bp, Artificial Sequence
  Synthetic oligonucleotide: CBLB-2462
gatgaatccggaacttt

SEQ ID NO: 7647 - DNA, 17 bp, Artificial Sequence
  Synthetic oligonucleotide: CBLB-2463
ggttttgctctaatcga

SEQ ID NO: 7648 - DNA, 17 bp, Artificial Sequence
  Synthetic oligonucleotide: CBLB-2345
ggaggaaatccccgaaa

SEQ ID NO: 7649 - DNA, 17 bp, Artificial Sequence
  Synthetic oligonucleotide: CBLB-2352
ggaccgtggagaagact

SEQ ID NO: 7650 - DNA, 17 bp, Artificial Sequence
  Synthetic oligonucleotide: CBLB-2360
gcggcagcttgcttagg

SEQ ID NO: 7651 - DNA, 17 bp, Artificial Sequence
  Synthetic oligonucleotide: CBLB-2520
ggtcctatcatacattt

SEQ ID NO: 7652 - DNA, 20 bp, Artificial Sequence
  Synthetic oligonucleotide: CBLB-2381
tagctacttgaaacgtgagc

SEQ ID NO: 7653 - DNA, 20 bp, Artificial Sequence
  Synthetic oligonucleotide: CBLB-2385
tttggttttgctctaatcga

SEQ ID NO: 7654 - DNA, 20 bp, Artificial Sequence
  Synthetic oligonucleotide: CBLB-2286
cgaggaggaaatccccgaaa

SEQ ID NO: 7655 - DNA, 20 bp, Artificial Sequence
  Synthetic oligonucleotide: CBLB-2287
tccccgaaaaggtcgaattt

SEQ ID NO: 7656 - DNA, 20 bp, Artificial Sequence
  Synthetic oligonucleotide: CBLB-2288
ccccgaaaaggtcgaatttt

SEQ ID NO: 7657 - DNA, 20 bp, Artificial Sequence
  Synthetic oligonucleotide: CBLB-2291
agcaagctgccgcagatcgc

SEQ ID NO: 7658 - DNA, 20 bp, Artificial Sequence
  Synthetic oligonucleotide: CBLB-2292
tgccgcagatcgcaggaccg

SEQ ID NO: 7659 - DNA, 20 bp, Artificial Sequence
  Synthetic oligonucleotide: CBLB-2418
ttacatactgagtcatgtag

SEQ ID NO: 7660 - DNA, 20 bp, Artificial Sequence
  Synthetic oligonucleotide: CBLB-2422
attgttgccataacaatggt

SEQ ID NO: 7661 - DNA, 20 bp, Artificial Sequence
  Synthetic oligonucleotide: CBLB-2424
aagtgaatagtgtttcgcac

SEQ ID NO: 7662 - DNA, 20 bp, Artificial Sequence
  Synthetic oligonucleotide: CBLB-2297
ctccacggtcctgcgatctg

SEQ ID NO: 7663 - DNA, 20 bp, Artificial Sequence
  Synthetic oligonucleotide: CBLB-2298
cgatctgcggcagcttgctt

SEQ ID NO: 7664 - DNA, 20 bp, Artificial Sequence
  Synthetic oligonucleotide: CBLB-2300
atctgcggcagcttgcttag

SEQ ID NO: 7665 - DNA, 20 bp, Artificial Sequence
  Synthetic oligonucleotide: CBLB-2301
tctgcggcagcttgcttagg

SEQ ID NO: 7666 - DNA, 20 bp, Artificial Sequence
  Synthetic oligonucleotide: CBLB-2302
tacccaaaattcgacctttt

SEQ ID NO: 7667 - DNA, 20 bp, Artificial Sequence
  Synthetic oligonucleotide: CBLB-2303
acccaaaattcgaccttttc

SEQ ID NO: 7668 - DNA, 20 bp, Artificial Sequence
  Synthetic oligonucleotide: CBLB-2304
cccaaaattcgaccttttcg

SEQ ID NO: 7669 - DNA, 17 bp, Artificial Sequence
  Synthetic oligonucleotide: CBLB-2445
agtgaagtttctgcgta

SEQ ID NO: 7670 - DNA, 17 bp, Artificial Sequence
  Synthetic oligonucleotide: CBLB-2459
ctacttgaaacgtgagc

SEQ ID NO: 7671 - DNA, 17 bp, Artificial Sequence
  Synthetic oligonucleotide: CBLB-2464
tttgctctaatcgatgg

SEQ ID NO: 7672 - DNA, 17 bp, Artificial Sequence
  Synthetic oligonucleotide: CBLB-2346
ccgaaaaggtcgaattt

SEQ ID NO: 7673 - DNA, 17 bp, Artificial Sequence
  Synthetic oligonucleotide: CBLB-2347
cgaaaaggtcgaatttt

SEQ ID NO: 7674 - DNA, 17 bp, Artificial Sequence
  Synthetic oligonucleotide: CBLB-2350
aagctgccgcagatcgc

SEQ ID NO: 7675 - DNA, 17 bp, Artificial Sequence
  Synthetic oligonucleotide: CBLB-2351
cgcagatcgcaggaccg

SEQ ID NO: 7676 - DNA, 17 bp, Artificial Sequence
  Synthetic oligonucleotide: CBLB-2502
tgaatagtgtttcgcac

SEQ ID NO: 7677 - DNA, 17 bp, Artificial Sequence
  Synthetic oligonucleotide: CBLB-2356
cacggtcctgcgatctg

SEQ ID NO: 7678 - DNA, 17 bp, Artificial Sequence
  Synthetic oligonucleotide: CBLB-2358
ctgcggcagcttgctta

SEQ ID NO: 7679 - DNA, 17 bp, Artificial Sequence
  Synthetic oligonucleotide: CBLB-2359
tgcggcagcttgcttag

SEQ ID NO: 7680 - DNA, 17 bp, Artificial Sequence
  Synthetic oligonucleotide: CBLB-2362
caaaattcgaccttttc

SEQ ID NO: 7681 - DNA, 17 bp, Artificial Sequence
  Synthetic oligonucleotide: CBLB-2363
aaaattcgaccttttcg

SEQ ID NO: 7682 - DNA, 17 bp, Artificial Sequence
  Synthetic oligonucleotide: CBLB-2517
cacgtttcaagtagcta

SEQ ID NO: 7683 - DNA, 20 bp, Artificial Sequence
  Synthetic oligonucleotide: CBLB-2370
gttgttctggtattttgaat

SEQ ID NO: 7684 - DNA, 20 bp, Artificial Sequence
  Synthetic oligonucleotide: CBLB-2371
ggtattttgaattggaatta

SEQ ID NO: 7685 - DNA, 20 bp, Artificial Sequence
  Synthetic oligonucleotide: CBLB-2374
gaattggaattaaggcagga

SEQ ID NO: 7686 - DNA, 20 bp, Artificial Sequence
  Synthetic oligonucleotide: CBLB-2389
gttagtctctagttttctgg

SEQ ID NO: 7687 - DNA, 20 bp, Artificial Sequence
  Synthetic oligonucleotide: CBLB-2284
ggcagaaaccctggtggtcg

SEQ ID NO: 7688 - DNA, 20 bp, Artificial Sequence
  Synthetic oligonucleotide: CBLB-2290
gatgctattcaggatgcagt

SEQ ID NO: 7689 - DNA, 20 bp, Artificial Sequence
  Synthetic oligonucleotide: CBLB-2294
ggagaagacttggaagctca

SEQ ID NO: 7690 - DNA, 20 bp, Artificial Sequence
  Synthetic oligonucleotide: CBLB-2413
ggctgctttttgttggtgta

SEQ ID NO: 7691 - DNA, 20 bp, Artificial Sequence
  Synthetic oligonucleotide: CBLB-2296
gagcttccaagtcttctcca

SEQ ID NO: 7692 - DNA, 17 bp, Artificial Sequence
  Synthetic oligonucleotide: CBLB-2448
gttctggtattttgaat

SEQ ID NO: 7693 - DNA, 17 bp, Artificial Sequence
  Synthetic oligonucleotide: CBLB-2465
gatggaggaagatgcag

SEQ ID NO: 7694 - DNA, 17 bp, Artificial Sequence
  Synthetic oligonucleotide: CBLB-2466
gttagtctctagttttc

SEQ ID NO: 7695 - DNA, 17 bp, Artificial Sequence
  Synthetic oligonucleotide: CBLB-2468
gtctctagttttctggt

SEQ ID NO: 7696 - DNA, 17 bp, Artificial Sequence
  Synthetic oligonucleotide: CBLB-2349
gctattcaggatgcagt

SEQ ID NO: 7697 - DNA, 17 bp, Artificial Sequence
  Synthetic oligonucleotide: CBLB-2353
gaagacttggaagctca

SEQ ID NO: 7698 - DNA, 17 bp, Artificial Sequence
  Synthetic oligonucleotide: CBLB-2354
gaagctcatggacaaag

SEQ ID NO: 7699 - DNA, 17 bp, Artificial Sequence
  Synthetic oligonucleotide: CBLB-2499
gattgttgccataacaa

SEQ ID NO: 7700 - DNA, 17 bp, Artificial Sequence
  Synthetic oligonucleotide: CBLB-2500
gttgccataacaatggt

SEQ ID NO: 7701 - DNA, 17 bp, Artificial Sequence
  Synthetic oligonucleotide: CBLB-2521
gtcctatcatacatttt

SEQ ID NO: 7702 - DNA, 20 bp, Artificial Sequence
  Synthetic oligonucleotide: CBLB-2366
atctttatgtttatgtaact

SEQ ID NO: 7703 - DNA, 20 bp, Artificial Sequence
  Synthetic oligonucleotide: CBLB-2368
aggctcccaaaatgtatgat

SEQ ID NO: 7704 - DNA, 20 bp, Artificial Sequence
  Synthetic oligonucleotide: CBLB-2372
ttttgaattggaattaaggc

SEQ ID NO: 7705 - DNA, 20 bp, Artificial Sequence
  Synthetic oligonucleotide: CBLB-2373
tgaattggaattaaggcagg

SEQ ID NO: 7706 - DNA, 20 bp, Artificial Sequence
  Synthetic oligonucleotide: CBLB-2375
aattggaattaaggcaggag

SEQ ID NO: 7707 - DNA, 20 bp, Artificial Sequence
  Synthetic oligonucleotide: CBLB-2376
agaacattctgtttttatct

SEQ ID NO: 7708 - DNA, 20 bp, Artificial Sequence
  Synthetic oligonucleotide: CBLB-2377
acattctgtttttatctagg

SEQ ID NO: 7709 - DNA, 20 bp, Artificial Sequence
  Synthetic oligonucleotide: CBLB-2378
cattctgtttttatctaggt

SEQ ID NO: 7710 - DNA, 20 bp, Artificial Sequence
  Synthetic oligonucleotide: CBLB-2379
attctgtttttatctaggtg

SEQ ID NO: 7711 - DNA, 20 bp, Artificial Sequence
  Synthetic oligonucleotide: CBLB-2380
ttctgtttttatctaggtgg

SEQ ID NO: 7712 - DNA, 20 bp, Artificial Sequence
  Synthetic oligonucleotide: CBLB-2382
agtattgtaaaagcaaatct

SEQ ID NO: 7713 - DNA, 20 bp, Artificial Sequence
  Synthetic oligonucleotide: CBLB-2383
cttattgataaagatgaatc

SEQ ID NO: 7714 - DNA, 20 bp, Artificial Sequence
  Synthetic oligonucleotide: CBLB-2384
aaagatgaatccggaacttt

SEQ ID NO: 7715 - DNA, 20 bp, Artificial Sequence
  Synthetic oligonucleotide: CBLB-2387
atcgatggaggaagatgcag

SEQ ID NO: 7716 - DNA, 20 bp, Artificial Sequence
  Synthetic oligonucleotide: CBLB-2388
caagttagtctctagttttc

SEQ ID NO: 7717 - DNA, 20 bp, Artificial Sequence
  Synthetic oligonucleotide: CBLB-2390
ttagtctctagttttctggt

SEQ ID NO: 7718 - DNA, 20 bp, Artificial Sequence
  Synthetic oligonucleotide: CBLB-2391
taaagaactaaaattccaga

SEQ ID NO: 7719 - DNA, 20 bp, Artificial Sequence
  Synthetic oligonucleotide: CBLB-2392
cagatggcaaactcaatgaa

SEQ ID NO: 7720 - DNA, 20 bp, Artificial Sequence
  Synthetic oligonucleotide: CBLB-2282
tcaatgaatggcagaaaccc

SEQ ID NO: 7721 - DNA, 20 bp, Artificial Sequence
  Synthetic oligonucleotide: CBLB-2283
atgaatggcagaaaccctgg

SEQ ID NO: 7722 - DNA, 20 bp, Artificial Sequence
  Synthetic oligonucleotide: CBLB-2285
agaaaccctggtggtcgagg

SEQ ID NO: 7723 - DNA, 20 bp, Artificial Sequence
  Synthetic oligonucleotide: CBLB-2295
ttggaagctcatggacaaag

SEQ ID NO: 7724 - DNA, 20 bp, Artificial Sequence
  Synthetic oligonucleotide: CBLB-2407
aacactattcactttgtctg

SEQ ID NO: 7725 - DNA, 20 bp, Artificial Sequence
  Synthetic oligonucleotide: CBLB-2408
attaataccaaccattgtta

SEQ ID NO: 7726 - DNA, 20 bp, Artificial Sequence
  Synthetic oligonucleotide: CBLB-2409
ctctgtgttttttgaaaagt

SEQ ID NO: 7727 - DNA, 20 bp, Artificial Sequence
  Synthetic oligonucleotide: CBLB-2410
ttcatcctttctactcttta

SEQ ID NO: 7728 - DNA, 20 bp, Artificial Sequence
  Synthetic oligonucleotide: CBLB-2411
agtatgtaaagttttaccat

SEQ ID NO: 7729 - DNA, 20 bp, Artificial Sequence
  Synthetic oligonucleotide: CBLB-2412
taccattggctgctttttgt

SEQ ID NO: 7730 - DNA, 20 bp, Artificial Sequence
  Synthetic oligonucleotide: CBLB-2415
tgtttgttctgtcttctgtg

SEQ ID NO: 7731 - DNA, 20 bp, Artificial Sequence
  Synthetic oligonucleotide: CBLB-2416
aaacacttccaagcattcta

SEQ ID NO: 7732 - RNA, 20 nt, Artificial Sequence
  Synthetic oligonucleotide: CBLB-2417
caccaacaaaaagcagccaa

SEQ ID NO: 7733 - DNA, 20 bp, Artificial Sequence
  Synthetic oligonucleotide: CBLB-2419
ctgaaccttaaagagtagaa

SEQ ID NO: 7734 - DNA, 20 bp, Artificial Sequence
  Synthetic oligonucleotide: CBLB-2420
taaagagtagaaaggatgaa

SEQ ID NO: 7735 - DNA, 20 bp, Artificial Sequence
  Synthetic oligonucleotide: CBLB-2421
aaagattgttgccataacaa

SEQ ID NO: 7736 - DNA, 20 bp, Artificial Sequence
  Synthetic oligonucleotide: CBLB-2423
attaacagtataaataaatc

SEQ ID NO: 7737 - DNA, 20 bp, Artificial Sequence
  Synthetic oligonucleotide: CBLB-71
cattcattgagtttgccatc

SEQ ID NO: 7738 - DNA, 20 bp, Artificial Sequence
  Synthetic oligonucleotide: CBLB-2437
ttaaaaaaagaaaagttagt

SEQ ID NO: 7739 - DNA, 20 bp, Artificial Sequence
  Synthetic oligonucleotide: CBLB-2438
tagagcaaaaccaaaagttc

SEQ ID NO: 7740 - DNA, 20 bp, Artificial Sequence
  Synthetic oligonucleotide: CBLB-2440
agaacaaacaaaacttaaac

SEQ ID NO: 7741 - DNA, 20 bp, Artificial Sequence
  Synthetic oligonucleotide: CBLB-2441
caaaataccagaacaactga

SEQ ID NO: 7742 - DNA, 20 bp, Artificial Sequence
  Synthetic oligonucleotide: CBLB-2443
aaggtcctatcatacatttt

SEQ ID NO: 7743 - DNA, 17 bp, Artificial Sequence
  Synthetic oligonucleotide: CBLB-2444
tttatgtttatgtaact

SEQ ID NO: 7744 - DNA, 17 bp, Artificial Sequence
  Synthetic oligonucleotide: CBLB-2446
ctcccaaaatgtatgat

SEQ ID NO: 7745 - DNA, 17 bp, Artificial Sequence
  Synthetic oligonucleotide: CBLB-2447
aggaccttcagttgttc

SEQ ID NO: 7746 - DNA, 17 bp, Artificial Sequence
  Synthetic oligonucleotide: CBLB-2449
attttgaattggaatta

SEQ ID NO: 7747 - DNA, 17 bp, Artificial Sequence
  Synthetic oligonucleotide: CBLB-2450
tgaattggaattaaggc

SEQ ID NO: 7748 - DNA, 17 bp, Artificial Sequence
  Synthetic oligonucleotide: CBLB-2451
attggaattaaggcagg

SEQ ID NO: 7749 - DNA, 17 bp, Artificial Sequence
  Synthetic oligonucleotide: CBLB-2452
ttggaattaaggcagga

SEQ ID NO: 7750 - DNA, 17 bp, Artificial Sequence
  Synthetic oligonucleotide: CBLB-2453
tggaattaaggcaggag

SEQ ID NO: 7751 - DNA, 17 bp, Artificial Sequence
  Synthetic oligonucleotide: CBLB-2454
acattctgtttttatct

SEQ ID NO: 7752 - DNA, 17 bp, Artificial Sequence
  Synthetic oligonucleotide: CBLB-2455
ttctgtttttatctagg

SEQ ID NO: 7753 - DNA, 17 bp, Artificial Sequence
  Synthetic oligonucleotide: CBLB-2456
tctgtttttatctaggt

SEQ ID NO: 7754 - DNA, 17 bp, Artificial Sequence
  Synthetic oligonucleotide: CBLB-2457
ctgtttttatctaggtg

SEQ ID NO: 7755 - DNA, 17 bp, Artificial Sequence
  Synthetic oligonucleotide: CBLB-2458
tgtttttatctaggtgg

SEQ ID NO: 7756 - DNA, 17 bp, Artificial Sequence
  Synthetic oligonucleotide: CBLB-2460
attgtaaaagcaaatct

SEQ ID NO: 7757 - DNA, 17 bp, Artificial Sequence
  Synthetic oligonucleotide: CBLB-2461
attgataaagatgaatc

SEQ ID NO: 7758 - DNA, 17 bp, Artificial Sequence
  Synthetic oligonucleotide: CBLB-2467
agtctctagttttctgg

SEQ ID NO: 7759 - DNA, 17 bp, Artificial Sequence
  Synthetic oligonucleotide: CBLB-2469
agaactaaaattccaga

SEQ ID NO: 7760 - DNA, 17 bp, Artificial Sequence
  Synthetic oligonucleotide: CBLB-2470
atggcaaactcaatgaa

SEQ ID NO: 7761 - DNA, 17 bp, Artificial Sequence
  Synthetic oligonucleotide: CBLB-2341
atgaatggcagaaaccc

SEQ ID NO: 7762 - DNA, 17 bp, Artificial Sequence
  Synthetic oligonucleotide: CBLB-2342
aatggcagaaaccctgg

SEQ ID NO: 7763 - DNA, 17 bp, Artificial Sequence
  Synthetic oligonucleotide: CBLB-2343
agaaaccctggtggtcg

SEQ ID NO: 7764 - DNA, 17 bp, Artificial Sequence
  Synthetic oligonucleotide: CBLB-2344
aaccctggtggtcgagg

SEQ ID NO: 7765 - DNA, 17 bp, Artificial Sequence
  Synthetic oligonucleotide: CBLB-2348
tattattgatgctattc

SEQ ID NO: 7766 - DNA, 17 bp, Artificial Sequence
  Synthetic oligonucleotide: CBLB-2485
actattcactttgtctg

SEQ ID NO: 7767 - DNA, 17 bp, Artificial Sequence
  Synthetic oligonucleotide: CBLB-2486
aataccaaccattgtta

SEQ ID NO: 7768 - DNA, 17 bp, Artificial Sequence
  Synthetic oligonucleotide: CBLB-2487
tgtgttttttgaaaagt

SEQ ID NO: 7769 - DNA, 17 bp, Artificial Sequence
  Synthetic oligonucleotide: CBLB-2488
atcctttctactcttta

SEQ ID NO: 7770 - DNA, 17 bp, Artificial Sequence
  Synthetic oligonucleotide: CBLB-2489
atgtaaagttttaccat

SEQ ID NO: 7771 - DNA, 17 bp, Artificial Sequence
  Synthetic oligonucleotide: CBLB-2490
cattggctgctttttgt

SEQ ID NO: 7772 - DNA, 17 bp, Artificial Sequence
  Synthetic oligonucleotide: CBLB-2491
tgctttttgttggtgta

SEQ ID NO: 7773 - DNA, 17 bp, Artificial Sequence
  Synthetic oligonucleotide: CBLB-2492
tatggccatagaatgct

SEQ ID NO: 7774 - DNA, 17 bp, Artificial Sequence
  Synthetic oligonucleotide: CBLB-2493
ttgttctgtcttctgtg

SEQ ID NO: 7775 - DNA, 17 bp, Artificial Sequence
  Synthetic oligonucleotide: CBLB-2494
cacttccaagcattcta

SEQ ID NO: 7776 - RNA, 17 nt, Artificial Sequence
  Synthetic oligonucleotide: CBLB-2495
caacaaaaagcagccaa

SEQ ID NO: 7777 - DNA, 17 bp, Artificial Sequence
  Synthetic oligonucleotide: CBLB-2496
catactgagtcatgtag

SEQ ID NO: 7778 - DNA, 17 bp, Artificial Sequence
  Synthetic oligonucleotide: CBLB-2497
aaccttaaagagtagaa

SEQ ID NO: 7779 - DNA, 17 bp, Artificial Sequence
  Synthetic oligonucleotide: CBLB-2498
agagtagaaaggatgaa

SEQ ID NO: 7780 - DNA, 17 bp, Artificial Sequence
  Synthetic oligonucleotide: CBLB-2501
aacagtataaataaatc

SEQ ID NO: 7781 - DNA, 17 bp, Artificial Sequence
  Synthetic oligonucleotide: CBLB-2355
cttccaagtcttctcca

SEQ ID NO: 7782 - DNA, 17 bp, Artificial Sequence
  Synthetic oligonucleotide: CBLB-2357
tctgcggcagcttgctt

SEQ ID NO: 7783 - DNA, 17 bp, Artificial Sequence
  Synthetic oligonucleotide: CBLB-2361
ccaaaattcgacctttt

SEQ ID NO: 7784 - DNA, 17 bp, Artificial Sequence
  Synthetic oligonucleotide: CBLB-2364
tttcctcctcgaccacc

SEQ ID NO: 7785 - DNA, 17 bp, Artificial Sequence
  Synthetic oligonucleotide: CBLB-2365
ttcctcctcgaccacca

SEQ ID NO: 7786 - DNA, 17 bp, Artificial Sequence
  Synthetic oligonucleotide: CBLB-91
tcattgagtttgccatc

SEQ ID NO: 7787 - DNA, 17 bp, Artificial Sequence
  Synthetic oligonucleotide: CBLB-2515
aaaaaagaaaagttagt

SEQ ID NO: 7788 - DNA, 17 bp, Artificial Sequence
  Synthetic oligonucleotide: CBLB-2516
agcaaaaccaaaagttc

SEQ ID NO: 7789 - DNA, 17 bp, Artificial Sequence
  Synthetic oligonucleotide: CBLB-2518
acaaacaaaacttaaac

SEQ ID NO: 7790 - DNA, 17 bp, Artificial Sequence
  Synthetic oligonucleotide: CBLB-2519
aataccagaacaactga

SEQ ID NO: 7791 - RNA, 20 nt, Artificial Sequence
  Synthetic oligonucleotide: CBLB-2030
aacccgcaggccggggagga

SEQ ID NO: 7792 - RNA, 20 nt, Artificial Sequence
  Synthetic oligonucleotide: CBLB-2031
gcaggccggggaggagggag

SEQ ID NO: 7793 - RNA, 20 nt, Artificial Sequence
  Synthetic oligonucleotide: CBLB-2032
caggccggggaggagggaga

SEQ ID NO: 7794 - DNA, 20 bp, Artificial Sequence
  Synthetic oligonucleotide: CBLB-2033
ggaggagggagagggcgtcc

SEQ ID NO: 7795 - DNA, 20 bp, Artificial Sequence
  Synthetic oligonucleotide: CBLB-2034
ggagagggcgtccaggcaga

SEQ ID NO: 7796 - DNA, 20 bp, Artificial Sequence
  Synthetic oligonucleotide: CBLB-2035
gagggcgtccaggcagacgg

SEQ ID NO: 7797 - DNA, 20 bp, Artificial Sequence
  Synthetic oligonucleotide: CBLB-2036
cgtccaggcagacggcggtg

SEQ ID NO: 7798 - DNA, 20 bp, Artificial Sequence
  Synthetic oligonucleotide: CBLB-2037
acggcggtgaggactgcagc

SEQ ID NO: 7799 - DNA, 20 bp, Artificial Sequence
  Synthetic oligonucleotide: CBLB-2038
gcggtgaggactgcagcagg

SEQ ID NO: 7800 - DNA, 20 bp, Artificial Sequence
  Synthetic oligonucleotide: CBLB-2039
tgaggactgcagcaggcggc

SEQ ID NO: 7801 - DNA, 20 bp, Artificial Sequence
  Synthetic oligonucleotide: CBLB-2040
gaggactgcagcaggcggcc

SEQ ID NO: 7802 - DNA, 20 bp, Artificial Sequence
  Synthetic oligonucleotide: CBLB-2041
gactgcagcaggcggccggg

SEQ ID NO: 7803 - DNA, 20 bp, Artificial Sequence
  Synthetic oligonucleotide: CBLB-2042
gccgggaggcgcgtccaccc

SEQ ID NO: 7804 - DNA, 20 bp, Artificial Sequence
  Synthetic oligonucleotide: CBLB-2043
tgtccctcccgcgccctaga

SEQ ID NO: 7805 - DNA, 20 bp, Artificial Sequence
  Synthetic oligonucleotide: CBLB-2044
cctcccgcgccctagacgga

SEQ ID NO: 7806 - DNA, 20 bp, Artificial Sequence
  Synthetic oligonucleotide: CBLB-2045
gccctagacggacggtgctg

SEQ ID NO: 7807 - DNA, 20 bp, Artificial Sequence
  Synthetic oligonucleotide: CBLB-2046
ccctagacggacggtgctgc

SEQ ID NO: 7808 - DNA, 20 bp, Artificial Sequence
  Synthetic oligonucleotide: CBLB-2047
gacggacggtgctgcgggca

SEQ ID NO: 7809 - DNA, 20 bp, Artificial Sequence
  Synthetic oligonucleotide: CBLB-2048
acggacggtgctgcgggcac

SEQ ID NO: 7810 - DNA, 20 bp, Artificial Sequence
  Synthetic oligonucleotide: CBLB-2049
gacggtgctgcgggcacggg

SEQ ID NO: 7811 - DNA, 20 bp, Artificial Sequence
  Synthetic oligonucleotide: CBLB-2050
acggtgctgcgggcacggga

SEQ ID NO: 7812 - DNA, 20 bp, Artificial Sequence
  Synthetic oligonucleotide: CBLB-2051
cctcctgcagctcagacccg

SEQ ID NO: 7813 - DNA, 20 bp, Artificial Sequence
  Synthetic oligonucleotide: CBLB-2052
ctcctgcagctcagacccga

SEQ ID NO: 7814 - DNA, 20 bp, Artificial Sequence
  Synthetic oligonucleotide: CBLB-2053
tcctgcagctcagacccgag

SEQ ID NO: 7815 - DNA, 20 bp, Artificial Sequence
  Synthetic oligonucleotide: CBLB-2054
gcagctcagacccgaggggc

SEQ ID NO: 7816 - DNA, 20 bp, Artificial Sequence
  Synthetic oligonucleotide: CBLB-2055
cagctcagacccgaggggcc

SEQ ID NO: 7817 - DNA, 20 bp, Artificial Sequence
  Synthetic oligonucleotide: CBLB-2056
tcagacccgaggggccggga

SEQ ID NO: 7818 - RNA, 20 nt, Artificial Sequence
  Synthetic oligonucleotide: CBLB-2057
cagacccgaggggccgggaa

SEQ ID NO: 7819 - RNA, 20 nt, Artificial Sequence
  Synthetic oligonucleotide: CBLB-2058
agacccgaggggccgggaag

SEQ ID NO: 7820 - DNA, 20 bp, Artificial Sequence
  Synthetic oligonucleotide: CBLB-2059
ggccgggaaggggcctgagc

SEQ ID NO: 7821 - DNA, 20 bp, Artificial Sequence
  Synthetic oligonucleotide: CBLB-2060
gccgggaaggggcctgagca

SEQ ID NO: 7822 - DNA, 20 bp, Artificial Sequence
  Synthetic oligonucleotide: CBLB-2061
ggaaggggcctgagcaggga

SEQ ID NO: 7823 - DNA, 20 bp, Artificial Sequence
  Synthetic oligonucleotide: CBLB-2062
gaaggggcctgagcagggaa

SEQ ID NO: 7824 - DNA, 20 bp, Artificial Sequence
  Synthetic oligonucleotide: CBLB-2063
cctgagcagggaagggacac

SEQ ID NO: 7825 - DNA, 20 bp, Artificial Sequence
  Synthetic oligonucleotide: CBLB-2064
ggcgtcctgaaacaaagctt

SEQ ID NO: 7826 - DNA, 20 bp, Artificial Sequence
  Synthetic oligonucleotide: CBLB-2065
gcgtcctgaaacaaagcttt

SEQ ID NO: 7827 - DNA, 20 bp, Artificial Sequence
  Synthetic oligonucleotide: CBLB-2066
tgaaacaaagctttgggttg

SEQ ID NO: 7828 - DNA, 20 bp, Artificial Sequence
  Synthetic oligonucleotide: CBLB-2067
gaaacaaagctttgggttga

SEQ ID NO: 7829 - DNA, 20 bp, Artificial Sequence
  Synthetic oligonucleotide: CBLB-2068
aagctttgggttgagggcag

SEQ ID NO: 7830 - DNA, 20 bp, Artificial Sequence
  Synthetic oligonucleotide: CBLB-2069
ttgggttgagggcagaggcg

SEQ ID NO: 7831 - DNA, 20 bp, Artificial Sequence
  Synthetic oligonucleotide: CBLB-2070
aagtgaactcctcctttccg

SEQ ID NO: 7832 - DNA, 20 bp, Artificial Sequence
  Synthetic oligonucleotide: CBLB-2071
ttctcttttctcttttcaaa

SEQ ID NO: 7833 - DNA, 20 bp, Artificial Sequence
  Synthetic oligonucleotide: CBLB-2072
tctcttttctcttttcaaat

SEQ ID NO: 7834 - DNA, 20 bp, Artificial Sequence
  Synthetic oligonucleotide: CBLB-2073
atttgtgtgttaatttcatt

SEQ ID NO: 7835 - DNA, 20 bp, Artificial Sequence
  Synthetic oligonucleotide: CBLB-2074
tgttaatttcatttggttct

SEQ ID NO: 7836 - DNA, 20 bp, Artificial Sequence
  Synthetic oligonucleotide: CBLB-2075
gttaatttcatttggttctt

SEQ ID NO: 7837 - DNA, 20 bp, Artificial Sequence
  Synthetic oligonucleotide: CBLB-2076
caccgcgttgatttaaagaa

SEQ ID NO: 7838 - DNA, 20 bp, Artificial Sequence
  Synthetic oligonucleotide: CBLB-2077
ggtgttcgtgtgtccgtact

SEQ ID NO: 7839 - DNA, 20 bp, Artificial Sequence
  Synthetic oligonucleotide: CBLB-2078
gttcgtgtgtccgtacttgg

SEQ ID NO: 7840 - DNA, 20 bp, Artificial Sequence
  Synthetic oligonucleotide: CBLB-2079
cgtacttggtggttttagtg

SEQ ID NO: 7841 - DNA, 20 bp, Artificial Sequence
  Synthetic oligonucleotide: CBLB-2080
gtacttggtggttttagtgt

SEQ ID NO: 7842 - DNA, 20 bp, Artificial Sequence
  Synthetic oligonucleotide: CBLB-2081
gctgtcccttacgtttgtgt

SEQ ID NO: 7843 - DNA, 20 bp, Artificial Sequence
  Synthetic oligonucleotide: CBLB-2366
atctttatgtttatgtaact

SEQ ID NO: 7844 - DNA, 20 bp, Artificial Sequence
  Synthetic oligonucleotide: CBLB-2083
gataacaaaagagtaccagc

SEQ ID NO: 7845 - DNA, 20 bp, Artificial Sequence
  Synthetic oligonucleotide: CBLB-2084
gaccactcatgacaatcatc

SEQ ID NO: 7846 - DNA, 20 bp, Artificial Sequence
  Synthetic oligonucleotide: CBLB-2085
atgatactgaaaatatttac

SEQ ID NO: 7847 - DNA, 20 bp, Artificial Sequence
  Synthetic oligonucleotide: CBLB-2086
tgatactgaaaatatttact

SEQ ID NO: 7848 - DNA, 20 bp, Artificial Sequence
  Synthetic oligonucleotide: CBLB-2087
gatactgaaaatatttactg

SEQ ID NO: 7849 - DNA, 20 bp, Artificial Sequence
  Synthetic oligonucleotide: CBLB-2088
aagtgaagaagcagtagttg

SEQ ID NO: 7850 - DNA, 20 bp, Artificial Sequence
  Synthetic oligonucleotide: CBLB-2089
agtgaagaagcagtagttga

SEQ ID NO: 7851 - DNA, 20 bp, Artificial Sequence
  Synthetic oligonucleotide: CBLB-2090
gaaactttttttgttgttaa

SEQ ID NO: 7852 - DNA, 20 bp, Artificial Sequence
  Synthetic oligonucleotide: CBLB-2091
aaactttttttgttgttaat

SEQ ID NO: 7853 - DNA, 20 bp, Artificial Sequence
  Synthetic oligonucleotide: CBLB-2092
ctactattccattttgaaac

SEQ ID NO: 7854 - DNA, 20 bp, Artificial Sequence
  Synthetic oligonucleotide: CBLB-2093
tgaaacaggaaacctttcga

SEQ ID NO: 7855 - DNA, 20 bp, Artificial Sequence
  Synthetic oligonucleotide: CBLB-2094
ggcacattgtttattgtgaa

SEQ ID NO: 7856 - DNA, 20 bp, Artificial Sequence
  Synthetic oligonucleotide: CBLB-2095
tgtgaaaggaaaatttatgt

SEQ ID NO: 7857 - DNA, 20 bp, Artificial Sequence
  Synthetic oligonucleotide: CBLB-2096
gtgaaaggaaaatttatgtt

SEQ ID NO: 7858 - DNA, 20 bp, Artificial Sequence
  Synthetic oligonucleotide: CBLB-2097
tgaaaggaaaatttatgttg

SEQ ID NO: 7859 - DNA, 20 bp, Artificial Sequence
  Synthetic oligonucleotide: CBLB-2098
gaaaggaaaatttatgttgg

SEQ ID NO: 7860 - DNA, 20 bp, Artificial Sequence
  Synthetic oligonucleotide: CBLB-2099
aggaaaatttatgttggggg

SEQ ID NO: 7861 - DNA, 20 bp, Artificial Sequence
  Synthetic oligonucleotide: CBLB-2100
aatttatgttgggggtggtg

SEQ ID NO: 7862 - DNA, 20 bp, Artificial Sequence
  Synthetic oligonucleotide: CBLB-2101
gagagtatcagaaacctctg

SEQ ID NO: 7863 - DNA, 20 bp, Artificial Sequence
  Synthetic oligonucleotide: CBLB-2102
ttcacaagaagaaatcatga

SEQ ID NO: 7864 - DNA, 20 bp, Artificial Sequence
  Synthetic oligonucleotide: CBLB-2103
tcacaagaagaaatcatgat

SEQ ID NO: 7865 - RNA, 17 nt, Artificial Sequence
  Synthetic oligonucleotide: CBLB-2104
ccgcaggccggggagga

SEQ ID NO: 7866 - RNA, 17 nt, Artificial Sequence
  Synthetic oligonucleotide: CBLB-2105
ggccggggaggagggag

SEQ ID NO: 7867 - RNA, 17 nt, Artificial Sequence
  Synthetic oligonucleotide: CBLB-2106
gccggggaggagggaga

SEQ ID NO: 7868 - DNA, 17 bp, Artificial Sequence
  Synthetic oligonucleotide: CBLB-2107
ggagggagagggcgtcc

SEQ ID NO: 7869 - DNA, 17 bp, Artificial Sequence
  Synthetic oligonucleotide: CBLB-2108
gagggcgtccaggcaga

SEQ ID NO: 7870 - DNA, 17 bp, Artificial Sequence
  Synthetic oligonucleotide: CBLB-2109
ggcgtccaggcagacgg

SEQ ID NO: 7871 - DNA, 17 bp, Artificial Sequence
  Synthetic oligonucleotide: CBLB-2110
ccaggcagacggcggtg

SEQ ID NO: 7872 - DNA, 17 bp, Artificial Sequence
  Synthetic oligonucleotide: CBLB-2111
gcggtgaggactgcagc

SEQ ID NO: 7873 - DNA, 17 bp, Artificial Sequence
  Synthetic oligonucleotide: CBLB-2112
gtgaggactgcagcagg

SEQ ID NO: 7874 - DNA, 17 bp, Artificial Sequence
  Synthetic oligonucleotide: CBLB-2113
ggactgcagcaggcggc

SEQ ID NO: 7875 - DNA, 17 bp, Artificial Sequence
  Synthetic oligonucleotide: CBLB-2114
gactgcagcaggcggcc

SEQ ID NO: 7876 - DNA, 17 bp, Artificial Sequence
  Synthetic oligonucleotide: CBLB-2115
tgcagcaggcggccggg

SEQ ID NO: 7877 - DNA, 17 bp, Artificial Sequence
  Synthetic oligonucleotide: CBLB-2116
gggaggcgcgtccaccc

SEQ ID NO: 7878 - DNA, 17 bp, Artificial Sequence
  Synthetic oligonucleotide: CBLB-2117
ccctcccgcgccctaga

SEQ ID NO: 7879 - DNA, 17 bp, Artificial Sequence
  Synthetic oligonucleotide: CBLB-2118
cccgcgccctagacgga

SEQ ID NO: 7880 - DNA, 17 bp, Artificial Sequence
  Synthetic oligonucleotide: CBLB-2119
ctagacggacggtgctg

SEQ ID NO: 7881 - DNA, 17 bp, Artificial Sequence
  Synthetic oligonucleotide: CBLB-2120
tagacggacggtgctgc

SEQ ID NO: 7882 - DNA, 17 bp, Artificial Sequence
  Synthetic oligonucleotide: CBLB-2121
ggacggtgctgcgggca

SEQ ID NO: 7883 - DNA, 17 bp, Artificial Sequence
  Synthetic oligonucleotide: CBLB-2122
gacggtgctgcgggcac

SEQ ID NO: 7884 - DNA, 17 bp, Artificial Sequence
  Synthetic oligonucleotide: CBLB-2123
ggtgctgcgggcacggg

SEQ ID NO: 7885 - DNA, 17 bp, Artificial Sequence
  Synthetic oligonucleotide: CBLB-2124
gtgctgcgggcacggga

SEQ ID NO: 7886 - DNA, 17 bp, Artificial Sequence
  Synthetic oligonucleotide: CBLB-2125
cctgcagctcagacccg

SEQ ID NO: 7887 - DNA, 17 bp, Artificial Sequence
  Synthetic oligonucleotide: CBLB-2126
ctgcagctcagacccga

SEQ ID NO: 7888 - DNA, 17 bp, Artificial Sequence
  Synthetic oligonucleotide: CBLB-2127
tgcagctcagacccgag

SEQ ID NO: 7889 - DNA, 17 bp, Artificial Sequence
  Synthetic oligonucleotide: CBLB-2128
gctcagacccgaggggc

SEQ ID NO: 7890 - DNA, 17 bp, Artificial Sequence
  Synthetic oligonucleotide: CBLB-2129
ctcagacccgaggggcc

SEQ ID NO: 7891 - RNA, 17 nt, Artificial Sequence
  Synthetic oligonucleotide: CBLB-2130
gacccgaggggccggga

SEQ ID NO: 7892 - RNA, 17 nt, Artificial Sequence
  Synthetic oligonucleotide: CBLB-2131
acccgaggggccgggaa

SEQ ID NO: 7893 - RNA, 17 nt, Artificial Sequence
  Synthetic oligonucleotide: CBLB-2132
cccgaggggccgggaag

SEQ ID NO: 7894 - DNA, 17 bp, Artificial Sequence
  Synthetic oligonucleotide: CBLB-2133
cgggaaggggcctgagc

SEQ ID NO: 7895 - DNA, 17 bp, Artificial Sequence
  Synthetic oligonucleotide: CBLB-2134
gggaaggggcctgagca

SEQ ID NO: 7896 - DNA, 17 bp, Artificial Sequence
  Synthetic oligonucleotide: CBLB-2135
aggggcctgagcaggga

SEQ ID NO: 7897 - DNA, 17 bp, Artificial Sequence
  Synthetic oligonucleotide: CBLB-2136
ggggcctgagcagggaa

SEQ ID NO: 7898 - RNA, 17 nt, Artificial Sequence
  Synthetic oligonucleotide: CBLB-2137
gagcagggaagggacac

SEQ ID NO: 7899 - DNA, 17 bp, Artificial Sequence
  Synthetic oligonucleotide: CBLB-2138
gtcctgaaacaaagctt

SEQ ID NO: 7900 - DNA, 17 bp, Artificial Sequence
  Synthetic oligonucleotide: CBLB-2139
tcctgaaacaaagcttt

SEQ ID NO: 7901 - DNA, 17 bp, Artificial Sequence
  Synthetic oligonucleotide: CBLB-2140
aacaaagctttgggttg

SEQ ID NO: 7902 - DNA, 17 bp, Artificial Sequence
  Synthetic oligonucleotide: CBLB-2141
acaaagctttgggttga

SEQ ID NO: 7903 - DNA, 17 bp, Artificial Sequence
  Synthetic oligonucleotide: CBLB-2142
ctttgggttgagggcag

SEQ ID NO: 7904 - DNA, 17 bp, Artificial Sequence
  Synthetic oligonucleotide: CBLB-2143
ggttgagggcagaggcg

SEQ ID NO: 7905 - DNA, 17 bp, Artificial Sequence
  Synthetic oligonucleotide: CBLB-2144
tgaactcctcctttccg

SEQ ID NO: 7906 - DNA, 17 bp, Artificial Sequence
  Synthetic oligonucleotide: CBLB-2145
tcttttctcttttcaaa

SEQ ID NO: 7907 - DNA, 17 bp, Artificial Sequence
  Synthetic oligonucleotide: CBLB-2146
cttttctcttttcaaat

SEQ ID NO: 7908 - DNA, 17 bp, Artificial Sequence
  Synthetic oligonucleotide: CBLB-2147
tgtgtgttaatttcatt

SEQ ID NO: 7909 - DNA, 17 bp, Artificial Sequence
  Synthetic oligonucleotide: CBLB-2148
taatttcatttggttct

SEQ ID NO: 7910 - DNA, 17 bp, Artificial Sequence
  Synthetic oligonucleotide: CBLB-2149
aatttcatttggttctt

SEQ ID NO: 7911 - DNA, 17 bp, Artificial Sequence
  Synthetic oligonucleotide: CBLB-2150
cgcgttgatttaaagaa

SEQ ID NO: 7912 - DNA, 17 bp, Artificial Sequence
  Synthetic oligonucleotide: CBLB-2151
gttcgtgtgtccgtact

SEQ ID NO: 7913 - DNA, 17 bp, Artificial Sequence
  Synthetic oligonucleotide: CBLB-2152
cgtgtgtccgtacttgg

SEQ ID NO: 7914 - DNA, 17 bp, Artificial Sequence
  Synthetic oligonucleotide: CBLB-2153
acttggtggttttagtg

SEQ ID NO: 7915 - DNA, 17 bp, Artificial Sequence
  Synthetic oligonucleotide: CBLB-2154
cttggtggttttagtgt

SEQ ID NO: 7916 - DNA, 17 bp, Artificial Sequence
  Synthetic oligonucleotide: CBLB-2155
gtcccttacgtttgtgt

SEQ ID NO: 7917 - DNA, 17 bp, Artificial Sequence
  Synthetic oligonucleotide: CBLB-2444
tttatgtttatgtaact

SEQ ID NO: 7918 - DNA, 17 bp, Artificial Sequence
  Synthetic oligonucleotide: CBLB-2157
aacaaaagagtaccagc

SEQ ID NO: 7919 - DNA, 17 bp, Artificial Sequence
  Synthetic oligonucleotide: CBLB-2158
cactcatgacaatcatc

SEQ ID NO: 7920 - DNA, 17 bp, Artificial Sequence
  Synthetic oligonucleotide: CBLB-2159
atactgaaaatatttac

SEQ ID NO: 7921 - DNA, 17 bp, Artificial Sequence
  Synthetic oligonucleotide: CBLB-2160
tactgaaaatatttact

SEQ ID NO: 7922 - DNA, 17 bp, Artificial Sequence
  Synthetic oligonucleotide: CBLB-2161
actgaaaatatttactg

SEQ ID NO: 7923 - DNA, 17 bp, Artificial Sequence
  Synthetic oligonucleotide: CBLB-2162
tgaagaagcagtagttg

SEQ ID NO: 7924 - DNA, 17 bp, Artificial Sequence
  Synthetic oligonucleotide: CBLB-2163
gaagaagcagtagttga

SEQ ID NO: 7925 - DNA, 17 bp, Artificial Sequence
  Synthetic oligonucleotide: CBLB-2164
actttttttgttgttaa

SEQ ID NO: 7926 - DNA, 17 bp, Artificial Sequence
  Synthetic oligonucleotide: CBLB-2165
ctttttttgttgttaat

SEQ ID NO: 7927 - DNA, 17 bp, Artificial Sequence
  Synthetic oligonucleotide: CBLB-2166
ctattccattttgaaac

SEQ ID NO: 7928 - DNA, 17 bp, Artificial Sequence
  Synthetic oligonucleotide: CBLB-2167
aacaggaaacctttcga

SEQ ID NO: 7929 - DNA, 17 bp, Artificial Sequence
  Synthetic oligonucleotide: CBLB-2168
acattgtttattgtgaa

SEQ ID NO: 7930 - DNA, 17 bp, Artificial Sequence
  Synthetic oligonucleotide: CBLB-2169
gaaaggaaaatttatgt

SEQ ID NO: 7931 - DNA, 17 bp, Artificial Sequence
  Synthetic oligonucleotide: CBLB-2170
aaaggaaaatttatgtt

SEQ ID NO: 7932 - DNA, 17 bp, Artificial Sequence
  Synthetic oligonucleotide: CBLB-2171
aaggaaaatttatgttg

SEQ ID NO: 7933 - DNA, 17 bp, Artificial Sequence
  Synthetic oligonucleotide: CBLB-2172
aggaaaatttatgttgg

SEQ ID NO: 7934 - DNA, 17 bp, Artificial Sequence
  Synthetic oligonucleotide: CBLB-2173
aaaatttatgttggggg

SEQ ID NO: 7935 - DNA, 17 bp, Artificial Sequence
  Synthetic oligonucleotide: CBLB-2174
ttatgttgggggtggtg

SEQ ID NO: 7936 - DNA, 17 bp, Artificial Sequence
  Synthetic oligonucleotide: CBLB-2175
agtatcagaaacctctg

SEQ ID NO: 7937 - DNA, 17 bp, Artificial Sequence
  Synthetic oligonucleotide: CBLB-2176
acaagaagaaatcatga

SEQ ID NO: 7938 - DNA, 17 bp, Artificial Sequence
  Synthetic oligonucleotide: CBLB-2177
caagaagaaatcatgat

SEQ ID NO: 7939 - DNA, 20 bp, Artificial Sequence
  Synthetic oligonucleotide: CBLB-2178
ctccctcctccccggcctgc

SEQ ID NO: 7940 - DNA, 20 bp, Artificial Sequence
  Synthetic oligonucleotide: CBLB-2179
tctccctcctccccggcctg

SEQ ID NO: 7941 - DNA, 20 bp, Artificial Sequence
  Synthetic oligonucleotide: CBLB-2180
gacgccctctccctcctccc

SEQ ID NO: 7942 - DNA, 20 bp, Artificial Sequence
  Synthetic oligonucleotide: CBLB-2181
agtcctcaccgccgtctgcc

SEQ ID NO: 7943 - DNA, 20 bp, Artificial Sequence
  Synthetic oligonucleotide: CBLB-2182
gcctgggtggacgcgcctcc

SEQ ID NO: 7944 - DNA, 20 bp, Artificial Sequence
  Synthetic oligonucleotide: CBLB-2183
ctgtgggctcggcgcctggg

SEQ ID NO: 7945 - DNA, 20 bp, Artificial Sequence
  Synthetic oligonucleotide: CBLB-2184
acactgtgggctcggcgcct

SEQ ID NO: 7946 - DNA, 20 bp, Artificial Sequence
  Synthetic oligonucleotide: CBLB-2185
gacactgtgggctcggcgcc

SEQ ID NO: 7947 - DNA, 20 bp, Artificial Sequence
  Synthetic oligonucleotide: CBLB-2186
cgggagggacactgtgggct

SEQ ID NO: 7948 - DNA, 20 bp, Artificial Sequence
  Synthetic oligonucleotide: CBLB-2187
gggcgcgggagggacactgt

SEQ ID NO: 7949 - DNA, 20 bp, Artificial Sequence
  Synthetic oligonucleotide: CBLB-2188
agggcgcgggagggacactg

SEQ ID NO: 7950 - DNA, 20 bp, Artificial Sequence
  Synthetic oligonucleotide: CBLB-2189
cgtccgtctagggcgcggga

SEQ ID NO: 7951 - DNA, 20 bp, Artificial Sequence
  Synthetic oligonucleotide: CBLB-2190
ccgtccgtctagggcgcggg

SEQ ID NO: 7952 - DNA, 20 bp, Artificial Sequence
  Synthetic oligonucleotide: CBLB-2191
gcaccgtccgtctagggcgc

SEQ ID NO: 7953 - DNA, 20 bp, Artificial Sequence
  Synthetic oligonucleotide: CBLB-2192
agcaccgtccgtctagggcg

SEQ ID NO: 7954 - DNA, 20 bp, Artificial Sequence
  Synthetic oligonucleotide: CBLB-2193
cccgcagcaccgtccgtcta

SEQ ID NO: 7955 - DNA, 20 bp, Artificial Sequence
  Synthetic oligonucleotide: CBLB-2194
gcccgcagcaccgtccgtct

SEQ ID NO: 7956 - DNA, 20 bp, Artificial Sequence
  Synthetic oligonucleotide: CBLB-2195
ggaggaaggtggactgggag

SEQ ID NO: 7957 - DNA, 20 bp, Artificial Sequence
  Synthetic oligonucleotide: CBLB-2196
aggaggaaggtggactggga

SEQ ID NO: 7958 - DNA, 20 bp, Artificial Sequence
  Synthetic oligonucleotide: CBLB-2197
caggaggaaggtggactggg

SEQ ID NO: 7959 - DNA, 20 bp, Artificial Sequence
  Synthetic oligonucleotide: CBLB-2198
ctgcaggaggaaggtggact

SEQ ID NO: 7960 - DNA, 20 bp, Artificial Sequence
  Synthetic oligonucleotide: CBLB-2199
gctgcaggaggaaggtggac

SEQ ID NO: 7961 - DNA, 20 bp, Artificial Sequence
  Synthetic oligonucleotide: CBLB-2200
tctgagctgcaggaggaagg

SEQ ID NO: 7962 - DNA, 20 bp, Artificial Sequence
  Synthetic oligonucleotide: CBLB-2201
gggtctgagctgcaggagga

SEQ ID NO: 7963 - DNA, 20 bp, Artificial Sequence
  Synthetic oligonucleotide: CBLB-2202
cctcgggtctgagctgcagg

SEQ ID NO: 7964 - DNA, 20 bp, Artificial Sequence
  Synthetic oligonucleotide: CBLB-2203
gcccctcgggtctgagctgc

SEQ ID NO: 7965 - DNA, 20 bp, Artificial Sequence
  Synthetic oligonucleotide: CBLB-2204
aggccccttcccggcccctc

SEQ ID NO: 7966 - DNA, 20 bp, Artificial Sequence
  Synthetic oligonucleotide: CBLB-2205
caggccccttcccggcccct

SEQ ID NO: 7967 - DNA, 20 bp, Artificial Sequence
  Synthetic oligonucleotide: CBLB-2206
tccctgctcaggccccttcc

SEQ ID NO: 7968 - DNA, 20 bp, Artificial Sequence
  Synthetic oligonucleotide: CBLB-2207
cctgtgtcccttccctgctc

SEQ ID NO: 7969 - DNA, 20 bp, Artificial Sequence
  Synthetic oligonucleotide: CBLB-2208
tcaacccaaagctttgtttc

SEQ ID NO: 7970 - DNA, 20 bp, Artificial Sequence
  Synthetic oligonucleotide: CBLB-2209
aaaggaggagttcacttctc

SEQ ID NO: 7971 - RNA, 20 nt, Artificial Sequence
  Synthetic oligonucleotide: CBLB-2210
caagagcggccacggaaagg

SEQ ID NO: 7972 - DNA, 20 bp, Artificial Sequence
  Synthetic oligonucleotide: CBLB-2211
tgacaagagcggccacggaa

SEQ ID NO: 7973 - DNA, 20 bp, Artificial Sequence
  Synthetic oligonucleotide: CBLB-2212
aaaaatgacaagagcggcca

SEQ ID NO: 7974 - DNA, 20 bp, Artificial Sequence
  Synthetic oligonucleotide: CBLB-2213
aaagagaaaaatgacaagag

SEQ ID NO: 7975 - DNA, 20 bp, Artificial Sequence
  Synthetic oligonucleotide: CBLB-2214
cacctttctttaaatcaacg

SEQ ID NO: 7976 - DNA, 20 bp, Artificial Sequence
  Synthetic oligonucleotide: CBLB-2215
cacactaaaaccaccaagta

SEQ ID NO: 7977 - DNA, 20 bp, Artificial Sequence
  Synthetic oligonucleotide: CBLB-2216
ctgttgtcaacaaaagcgca

SEQ ID NO: 7978 - DNA, 20 bp, Artificial Sequence
  Synthetic oligonucleotide: CBLB-2217
tctgttgtcaacaaaagcgc

SEQ ID NO: 7979 - DNA, 20 bp, Artificial Sequence
  Synthetic oligonucleotide: CBLB-2218
attatcctacacaaacgtaa

SEQ ID NO: 7980 - DNA, 20 bp, Artificial Sequence
  Synthetic oligonucleotide: CBLB-2219
gattatcctacacaaacgta

SEQ ID NO: 7981 - DNA, 20 bp, Artificial Sequence
  Synthetic oligonucleotide: CBLB-2220
caaagacttaaataacctgc

SEQ ID NO: 7982 - DNA, 20 bp, Artificial Sequence
  Synthetic oligonucleotide: CBLB-2221
taccagatgattgtcatgag

SEQ ID NO: 7983 - DNA, 20 bp, Artificial Sequence
  Synthetic oligonucleotide: CBLB-2222
tgaattctcaaagatgaaaa

SEQ ID NO: 7984 - DNA, 20 bp, Artificial Sequence
  Synthetic oligonucleotide: CBLB-2223
aaaggtttcctgtttcaaaa

SEQ ID NO: 7985 - DNA, 20 bp, Artificial Sequence
  Synthetic oligonucleotide: CBLB-2224
ataaacaatgtgccatcgaa

SEQ ID NO: 7986 - DNA, 20 bp, Artificial Sequence
  Synthetic oligonucleotide: CBLB-2225
gcaacatgcagaaaccacag

SEQ ID NO: 7987 - DNA, 20 bp, Artificial Sequence
  Synthetic oligonucleotide: CBLB-2226
ggtattcagattgacttctc

SEQ ID NO: 7988 - DNA, 20 bp, Artificial Sequence
  Synthetic oligonucleotide: CBLB-2227
tttctgagtaaatctctgta

SEQ ID NO: 7989 - DNA, 20 bp, Artificial Sequence
  Synthetic oligonucleotide: CBLB-2228
ataatcatacttagtaaggt

SEQ ID NO: 7990 - DNA, 20 bp, Artificial Sequence
  Synthetic oligonucleotide: CBLB-2229
ttttataatcatacttagta

SEQ ID NO: 7991 - DNA, 17 bp, Artificial Sequence
  Synthetic oligonucleotide: CBLB-2230
cctcctccccggcctgc

SEQ ID NO: 7992 - DNA, 17 bp, Artificial Sequence
  Synthetic oligonucleotide: CBLB-2231
ccctcctccccggcctg

SEQ ID NO: 7993 - DNA, 17 bp, Artificial Sequence
  Synthetic oligonucleotide: CBLB-2232
gccctctccctcctccc

SEQ ID NO: 7994 - DNA, 17 bp, Artificial Sequence
  Synthetic oligonucleotide: CBLB-2233
cctcaccgccgtctgcc

SEQ ID NO: 7995 - DNA, 17 bp, Artificial Sequence
  Synthetic oligonucleotide: CBLB-2234
tgggtggacgcgcctcc

SEQ ID NO: 7996 - DNA, 17 bp, Artificial Sequence
  Synthetic oligonucleotide: CBLB-2235
tgggctcggcgcctggg

SEQ ID NO: 7997 - DNA, 17 bp, Artificial Sequence
  Synthetic oligonucleotide: CBLB-2236
ctgtgggctcggcgcct

SEQ ID NO: 7998 - DNA, 17 bp, Artificial Sequence
  Synthetic oligonucleotide: CBLB-2237
actgtgggctcggcgcc

SEQ ID NO: 7999 - DNA, 17 bp, Artificial Sequence
  Synthetic oligonucleotide: CBLB-2238
gagggacactgtgggct

SEQ ID NO: 8000 - DNA, 17 bp, Artificial Sequence
  Synthetic oligonucleotide: CBLB-2239
cgcgggagggacactgt

SEQ ID NO: 8001 - DNA, 17 bp, Artificial Sequence
  Synthetic oligonucleotide: CBLB-2240
gcgcgggagggacactg

SEQ ID NO: 8002 - DNA, 17 bp, Artificial Sequence
  Synthetic oligonucleotide: CBLB-2241
ccgtctagggcgcggga

SEQ ID NO: 8003 - DNA, 17 bp, Artificial Sequence
  Synthetic oligonucleotide: CBLB-2242
tccgtctagggcgcggg

SEQ ID NO: 8004 - DNA, 17 bp, Artificial Sequence
  Synthetic oligonucleotide: CBLB-2243
ccgtccgtctagggcgc

SEQ ID NO: 8005 - DNA, 17 bp, Artificial Sequence
  Synthetic oligonucleotide: CBLB-2244
accgtccgtctagggcg

SEQ ID NO: 8006 - DNA, 17 bp, Artificial Sequence
  Synthetic oligonucleotide: CBLB-2245
gcagcaccgtccgtcta

SEQ ID NO: 8007 - DNA, 17 bp, Artificial Sequence
  Synthetic oligonucleotide: CBLB-2246
cgcagcaccgtccgtct

SEQ ID NO: 8008 - DNA, 17 bp, Artificial Sequence
  Synthetic oligonucleotide: CBLB-2247
ggaaggtggactgggag

SEQ ID NO: 8009 - DNA, 17 bp, Artificial Sequence
  Synthetic oligonucleotide: CBLB-2248
aggaaggtggactggga

SEQ ID NO: 8010 - DNA, 17 bp, Artificial Sequence
  Synthetic oligonucleotide: CBLB-2249
gaggaaggtggactggg

SEQ ID NO: 8011 - DNA, 17 bp, Artificial Sequence
  Synthetic oligonucleotide: CBLB-2250
caggaggaaggtggact

SEQ ID NO: 8012 - DNA, 17 bp, Artificial Sequence
  Synthetic oligonucleotide: CBLB-2251
gcaggaggaaggtggac

SEQ ID NO: 8013 - DNA, 17 bp, Artificial Sequence
  Synthetic oligonucleotide: CBLB-2252
gagctgcaggaggaagg

SEQ ID NO: 8014 - DNA, 17 bp, Artificial Sequence
  Synthetic oligonucleotide: CBLB-2253
tctgagctgcaggagga

SEQ ID NO: 8015 - DNA, 17 bp, Artificial Sequence
  Synthetic oligonucleotide: CBLB-2254
cgggtctgagctgcagg

SEQ ID NO: 8016 - DNA, 17 bp, Artificial Sequence
  Synthetic oligonucleotide: CBLB-2255
cctcgggtctgagctgc

SEQ ID NO: 8017 - DNA, 17 bp, Artificial Sequence
  Synthetic oligonucleotide: CBLB-2256
ccccttcccggcccctc

SEQ ID NO: 8018 - DNA, 17 bp, Artificial Sequence
  Synthetic oligonucleotide: CBLB-2257
gccccttcccggcccct

SEQ ID NO: 8019 - DNA, 17 bp, Artificial Sequence
  Synthetic oligonucleotide: CBLB-2258
ctgctcaggccccttcc

SEQ ID NO: 8020 - DNA, 17 bp, Artificial Sequence
  Synthetic oligonucleotide: CBLB-2259
gtgtcccttccctgctc

SEQ ID NO: 8021 - DNA, 17 bp, Artificial Sequence
  Synthetic oligonucleotide: CBLB-2260
acccaaagctttgtttc

SEQ ID NO: 8022 - DNA, 17 bp, Artificial Sequence
  Synthetic oligonucleotide: CBLB-2261
ggaggagttcacttctc

SEQ ID NO: 8023 - RNA, 17 nt, Artificial Sequence
  Synthetic oligonucleotide: CBLB-2262
gagcggccacggaaagg

SEQ ID NO: 8024 - RNA, 17 nt, Artificial Sequence
  Synthetic oligonucleotide: CBLB-2263
caagagcggccacggaa

SEQ ID NO: 8025 - DNA, 17 bp, Artificial Sequence
  Synthetic oligonucleotide: CBLB-2264
aatgacaagagcggcca

SEQ ID NO: 8026 - DNA, 17 bp, Artificial Sequence
  Synthetic oligonucleotide: CBLB-2265
gagaaaaatgacaagag

SEQ ID NO: 8027 - DNA, 17 bp, Artificial Sequence
  Synthetic oligonucleotide: CBLB-2266
ctttctttaaatcaacg

SEQ ID NO: 8028 - DNA, 17 bp, Artificial Sequence
  Synthetic oligonucleotide: CBLB-2267
actaaaaccaccaagta

SEQ ID NO: 8029 - DNA, 17 bp, Artificial Sequence
  Synthetic oligonucleotide: CBLB-2268
ttgtcaacaaaagcgca

SEQ ID NO: 8030 - DNA, 17 bp, Artificial Sequence
  Synthetic oligonucleotide: CBLB-2269
gttgtcaacaaaagcgc

SEQ ID NO: 8031 - DNA, 17 bp, Artificial Sequence
  Synthetic oligonucleotide: CBLB-2270
atcctacacaaacgtaa

SEQ ID NO: 8032 - DNA, 17 bp, Artificial Sequence
  Synthetic oligonucleotide: CBLB-2271
tatcctacacaaacgta

SEQ ID NO: 8033 - DNA, 17 bp, Artificial Sequence
  Synthetic oligonucleotide: CBLB-2272
agacttaaataacctgc

SEQ ID NO: 8034 - DNA, 17 bp, Artificial Sequence
  Synthetic oligonucleotide: CBLB-2273
cagatgattgtcatgag

SEQ ID NO: 8035 - DNA, 17 bp, Artificial Sequence
  Synthetic oligonucleotide: CBLB-2274
attctcaaagatgaaaa

SEQ ID NO: 8036 - DNA, 17 bp, Artificial Sequence
  Synthetic oligonucleotide: CBLB-2275
ggtttcctgtttcaaaa

SEQ ID NO: 8037 - DNA, 17 bp, Artificial Sequence
  Synthetic oligonucleotide: CBLB-2276
aacaatgtgccatcgaa

SEQ ID NO: 8038 - DNA, 17 bp, Artificial Sequence
  Synthetic oligonucleotide: CBLB-2277
acatgcagaaaccacag

SEQ ID NO: 8039 - DNA, 17 bp, Artificial Sequence
  Synthetic oligonucleotide: CBLB-2278
attcagattgacttctc

SEQ ID NO: 8040 - DNA, 17 bp, Artificial Sequence
  Synthetic oligonucleotide: CBLB-2279
ctgagtaaatctctgta

SEQ ID NO: 8041 - DNA, 17 bp, Artificial Sequence
  Synthetic oligonucleotide: CBLB-2280
atcatacttagtaaggt

SEQ ID NO: 8042 - DNA, 17 bp, Artificial Sequence
  Synthetic oligonucleotide: CBLB-2281
tataatcatacttagta

SEQ ID NO: 8043 - DNA, 20 bp, Artificial Sequence
  Synthetic oligonucleotide: CBLB-1433
aatctttatgtttatgtaac

SEQ ID NO: 8044 - DNA, 20 bp, Artificial Sequence
  Synthetic oligonucleotide: CBLB-2366
atctttatgtttatgtaact

SEQ ID NO: 8045 - DNA, 20 bp, Artificial Sequence
  Synthetic oligonucleotide: CBLB-1435
ctttatgtttatgtaacttg

SEQ ID NO: 8046 - DNA, 20 bp, Artificial Sequence
  Synthetic oligonucleotide: CBLB-1436
tgtaacttggagaaatctaa

SEQ ID NO: 8047 - DNA, 20 bp, Artificial Sequence
  Synthetic oligonucleotide: CBLB-1437
acttggagaaatctaacaga

SEQ ID NO: 8048 - DNA, 20 bp, Artificial Sequence
  Synthetic oligonucleotide: CBLB-1438
agaaatctaacagagtgaaa

SEQ ID NO: 8049 - DNA, 20 bp, Artificial Sequence
  Synthetic oligonucleotide: CBLB-1439
aaggctcccaaaatgtatga

SEQ ID NO: 8050 - DNA, 20 bp, Artificial Sequence
  Synthetic oligonucleotide: CBLB-1440
ccttcagttgttctggtatt

SEQ ID NO: 8051 - DNA, 20 bp, Artificial Sequence
  Synthetic oligonucleotide: CBLB-1441
agttgttctggtattttgaa

SEQ ID NO: 8052 - DNA, 20 bp, Artificial Sequence
  Synthetic oligonucleotide: CBLB-2370
gttgttctggtattttgaat

SEQ ID NO: 8053 - DNA, 20 bp, Artificial Sequence
  Synthetic oligonucleotide: CBLB-1443
attttgaattggaattaagg

SEQ ID NO: 8054 - DNA, 20 bp, Artificial Sequence
  Synthetic oligonucleotide: CBLB-2372
ttttgaattggaattaaggc

SEQ ID NO: 8055 - DNA, 20 bp, Artificial Sequence
  Synthetic oligonucleotide: CBLB-1445
ttgaattggaattaaggcag

SEQ ID NO: 8056 - DNA, 20 bp, Artificial Sequence
  Synthetic oligonucleotide: CBLB-2373
tgaattggaattaaggcagg

SEQ ID NO: 8057 - DNA, 20 bp, Artificial Sequence
  Synthetic oligonucleotide: CBLB-2374
gaattggaattaaggcagga

SEQ ID NO: 8058 - DNA, 20 bp, Artificial Sequence
  Synthetic oligonucleotide: CBLB-2375
aattggaattaaggcaggag

SEQ ID NO: 8059 - DNA, 20 bp, Artificial Sequence
  Synthetic oligonucleotide: CBLB-1449
tggaattaaggcaggagggg

SEQ ID NO: 8060 - DNA, 20 bp, Artificial Sequence
  Synthetic oligonucleotide: CBLB-1450
aacattctgtttttatctag

SEQ ID NO: 8061 - DNA, 20 bp, Artificial Sequence
  Synthetic oligonucleotide: CBLB-2377
acattctgtttttatctagg

SEQ ID NO: 8062 - DNA, 20 bp, Artificial Sequence
  Synthetic oligonucleotide: CBLB-2378
cattctgtttttatctaggt

SEQ ID NO: 8063 - DNA, 20 bp, Artificial Sequence
  Synthetic oligonucleotide: CBLB-2379
attctgtttttatctaggtg

SEQ ID NO: 8064 - DNA, 20 bp, Artificial Sequence
  Synthetic oligonucleotide: CBLB-2380
ttctgtttttatctaggtgg

SEQ ID NO: 8065 - DNA, 20 bp, Artificial Sequence
  Synthetic oligonucleotide: CBLB-1455
ttgttctttttttttttttt

SEQ ID NO: 8066 - DNA, 20 bp, Artificial Sequence
  Synthetic oligonucleotide: CBLB-1456
cttttttttttttttatgag

SEQ ID NO: 8067 - DNA, 20 bp, Artificial Sequence
  Synthetic oligonucleotide: CBLB-1457
attagttcagccttagctac

SEQ ID NO: 8068 - DNA, 20 bp, Artificial Sequence
  Synthetic oligonucleotide: CBLB-1458
cagccttagctacttgaaac

SEQ ID NO: 8069 - DNA, 20 bp, Artificial Sequence
  Synthetic oligonucleotide: CBLB-1459
ttagctacttgaaacgtgag

SEQ ID NO: 8070 - DNA, 20 bp, Artificial Sequence
  Synthetic oligonucleotide: CBLB-1460
tagtattgtaaaagcaaatc

SEQ ID NO: 8071 - DNA, 20 bp, Artificial Sequence
  Synthetic oligonucleotide: CBLB-1461
aaaactactgtgtgtaaaga

SEQ ID NO: 8072 - DNA, 20 bp, Artificial Sequence
  Synthetic oligonucleotide: CBLB-1462
aactactgtgtgtaaagatt

SEQ ID NO: 8073 - DNA, 20 bp, Artificial Sequence
  Synthetic oligonucleotide: CBLB-1463
tcacaagcttattgataaag

SEQ ID NO: 8074 - DNA, 20 bp, Artificial Sequence
  Synthetic oligonucleotide: CBLB-1464
gcttattgataaagatgaat

SEQ ID NO: 8075 - DNA, 20 bp, Artificial Sequence
  Synthetic oligonucleotide: CBLB-2383
cttattgataaagatgaatc

SEQ ID NO: 8076 - DNA, 20 bp, Artificial Sequence
  Synthetic oligonucleotide: CBLB-1466
ttttggttttgctctaatcg

SEQ ID NO: 8077 - DNA, 20 bp, Artificial Sequence
  Synthetic oligonucleotide: CBLB-2385
tttggttttgctctaatcga

SEQ ID NO: 8078 - DNA, 20 bp, Artificial Sequence
  Synthetic oligonucleotide: CBLB-1468
tggttttgctctaatcgatg

SEQ ID NO: 8079 - DNA, 20 bp, Artificial Sequence
  Synthetic oligonucleotide: CBLB-2386
ggttttgctctaatcgatgg

SEQ ID NO: 8080 - DNA, 20 bp, Artificial Sequence
  Synthetic oligonucleotide: CBLB-1470
agttagtctctagttttctg

SEQ ID NO: 8081 - DNA, 20 bp, Artificial Sequence
  Synthetic oligonucleotide: CBLB-1471
ttttttaaatctgcctttta

SEQ ID NO: 8082 - DNA, 20 bp, Artificial Sequence
  Synthetic oligonucleotide: CBLB-01
aattccagatggcaaactca

SEQ ID NO: 8083 - DNA, 20 bp, Artificial Sequence
  Synthetic oligonucleotide: CBLB-02
atggcaaactcaatgaatgg

SEQ ID NO: 8084 - DNA, 20 bp, Artificial Sequence
  Synthetic oligonucleotide: CBLB-03
aatggcagaaaccctggtgg

SEQ ID NO: 8085 - DNA, 20 bp, Artificial Sequence
  Synthetic oligonucleotide: CBLB-04
tggcagaaaccctggtggtc

SEQ ID NO: 8086 - DNA, 20 bp, Artificial Sequence
  Synthetic oligonucleotide: CBLB-2284
ggcagaaaccctggtggtcg

SEQ ID NO: 8087 - DNA, 20 bp, Artificial Sequence
  Synthetic oligonucleotide: CBLB-06
cagaaaccctggtggtcgag

SEQ ID NO: 8088 - DNA, 20 bp, Artificial Sequence
  Synthetic oligonucleotide: CBLB-2285
agaaaccctggtggtcgagg

SEQ ID NO: 8089 - DNA, 20 bp, Artificial Sequence
  Synthetic oligonucleotide: CBLB-08
ggtggtcgaggaggaaatcc

SEQ ID NO: 8090 - DNA, 20 bp, Artificial Sequence
  Synthetic oligonucleotide: CBLB-09
ggaggaaatccccgaaaagg

SEQ ID NO: 8091 - DNA, 20 bp, Artificial Sequence
  Synthetic oligonucleotide: CBLB-10
atccccgaaaaggtcgaatt

SEQ ID NO: 8092 - DNA, 20 bp, Artificial Sequence
  Synthetic oligonucleotide: CBLB-11
tgggtattattgatgctatt

SEQ ID NO: 8093 - DNA, 20 bp, Artificial Sequence
  Synthetic oligonucleotide: CBLB-12
tgatgctattcaggatgcag

SEQ ID NO: 8094 - DNA, 20 bp, Artificial Sequence
  Synthetic oligonucleotide: CBLB-13
aagcaagctgccgcagatcg

SEQ ID NO: 8095 - DNA, 20 bp, Artificial Sequence
  Synthetic oligonucleotide: CBLB-14
ctgccgcagatcgcaggacc

SEQ ID NO: 8096 - DNA, 20 bp, Artificial Sequence
  Synthetic oligonucleotide: CBLB-2292
tgccgcagatcgcaggaccg

SEQ ID NO: 8097 - DNA, 20 bp, Artificial Sequence
  Synthetic oligonucleotide: CBLB-16
ccgcagatcgcaggaccgtg

SEQ ID NO: 8098 - DNA, 20 bp, Artificial Sequence
  Synthetic oligonucleotide: CBLB-17
cgcaggaccgtggagaagac

SEQ ID NO: 8099 - DNA, 20 bp, Artificial Sequence
  Synthetic oligonucleotide: CBLB-2293
gcaggaccgtggagaagact

SEQ ID NO: 8100 - DNA, 20 bp, Artificial Sequence
  Synthetic oligonucleotide: CBLB-19
tggagaagacttggaagctc

SEQ ID NO: 8101 - DNA, 20 bp, Artificial Sequence
  Synthetic oligonucleotide: CBLB-20
ttctgtctgacgttgcctgt

SEQ ID NO: 8102 - DNA, 20 bp, Artificial Sequence
  Synthetic oligonucleotide: CBLB-1492
tttcttcaactctgtgtttt

SEQ ID NO: 8103 - DNA, 20 bp, Artificial Sequence
  Synthetic oligonucleotide: CBLB-1493
actctgtgttttttgaaaag

SEQ ID NO: 8104 - DNA, 20 bp, Artificial Sequence
  Synthetic oligonucleotide: CBLB-1494
cctttctactctttaaggtt

SEQ ID NO: 8105 - DNA, 20 bp, Artificial Sequence
  Synthetic oligonucleotide: CBLB-1495
tttttgttggtgtatggcca

SEQ ID NO: 8106 - DNA, 20 bp, Artificial Sequence
  Synthetic oligonucleotide: CBLB-1496
ggtgtatggccatagaatgc

SEQ ID NO: 8107 - DNA, 20 bp, Artificial Sequence
  Synthetic oligonucleotide: CBLB-2414
gtgtatggccatagaatgct

SEQ ID NO: 8108 - DNA, 20 bp, Artificial Sequence
  Synthetic oligonucleotide: CBLB-1498
aagtgtttgttctgtcttct

SEQ ID NO: 8109 - DNA, 17 bp, Artificial Sequence
  Synthetic oligonucleotide: CBLB-1499
ctttatgtttatgtaac

SEQ ID NO: 8110 - DNA, 17 bp, Artificial Sequence
  Synthetic oligonucleotide: CBLB-2444
tttatgtttatgtaact

SEQ ID NO: 8111 - DNA, 17 bp, Artificial Sequence
  Synthetic oligonucleotide: CBLB-1501
tatgtttatgtaacttg

SEQ ID NO: 8112 - DNA, 17 bp, Artificial Sequence
  Synthetic oligonucleotide: CBLB-1502
aacttggagaaatctaa

SEQ ID NO: 8113 - DNA, 17 bp, Artificial Sequence
  Synthetic oligonucleotide: CBLB-1503
tggagaaatctaacaga

SEQ ID NO: 8114 - DNA, 17 bp, Artificial Sequence
  Synthetic oligonucleotide: CBLB-1504
aatctaacagagtgaaa

SEQ ID NO: 8115 - DNA, 17 bp, Artificial Sequence
  Synthetic oligonucleotide: CBLB-1505
gctcccaaaatgtatga

SEQ ID NO: 8116 - DNA, 17 bp, Artificial Sequence
  Synthetic oligonucleotide: CBLB-1506
tcagttgttctggtatt

SEQ ID NO: 8117 - DNA, 17 bp, Artificial Sequence
  Synthetic oligonucleotide: CBLB-1507
tgttctggtattttgaa

SEQ ID NO: 8118 - DNA, 17 bp, Artificial Sequence
  Synthetic oligonucleotide: CBLB-2448
gttctggtattttgaat

SEQ ID NO: 8119 - DNA, 17 bp, Artificial Sequence
  Synthetic oligonucleotide: CBLB-1509
ttgaattggaattaagg

SEQ ID NO: 8120 - DNA, 17 bp, Artificial Sequence
  Synthetic oligonucleotide: CBLB-2450
tgaattggaattaaggc

SEQ ID NO: 8121 - DNA, 17 bp, Artificial Sequence
  Synthetic oligonucleotide: CBLB-1511
aattggaattaaggcag

SEQ ID NO: 8122 - DNA, 17 bp, Artificial Sequence
  Synthetic oligonucleotide: CBLB-2451
attggaattaaggcagg

SEQ ID NO: 8123 - DNA, 17 bp, Artificial Sequence
  Synthetic oligonucleotide: CBLB-2452
ttggaattaaggcagga

SEQ ID NO: 8124 - DNA, 17 bp, Artificial Sequence
  Synthetic oligonucleotide: CBLB-2453
tggaattaaggcaggag

SEQ ID NO: 8125 - DNA, 17 bp, Artificial Sequence
  Synthetic oligonucleotide: CBLB-1515
aattaaggcaggagggg

SEQ ID NO: 8126 - DNA, 17 bp, Artificial Sequence
  Synthetic oligonucleotide: CBLB-1516
attctgtttttatctag

SEQ ID NO: 8127 - DNA, 17 bp, Artificial Sequence
  Synthetic oligonucleotide: CBLB-2455
ttctgtttttatctagg

SEQ ID NO: 8128 - DNA, 17 bp, Artificial Sequence
  Synthetic oligonucleotide: CBLB-2456
tctgtttttatctaggt

SEQ ID NO: 8129 - DNA, 17 bp, Artificial Sequence
  Synthetic oligonucleotide: CBLB-2457
ctgtttttatctaggtg

SEQ ID NO: 8130 - DNA, 17 bp, Artificial Sequence
  Synthetic oligonucleotide: CBLB-2458
tgtttttatctaggtgg

SEQ ID NO: 8131 - DNA, 17 bp, Artificial Sequence
  Synthetic oligonucleotide: CBLB-1521
ttctttttttttttttt

SEQ ID NO: 8132 - DNA, 17 bp, Artificial Sequence
  Synthetic oligonucleotide: CBLB-1522
ttttttttttttatgag

SEQ ID NO: 8133 - DNA, 17 bp, Artificial Sequence
  Synthetic oligonucleotide: CBLB-1523
agttcagccttagctac

SEQ ID NO: 8134 - DNA, 17 bp, Artificial Sequence
  Synthetic oligonucleotide: CBLB-1524
ccttagctacttgaaac

SEQ ID NO: 8135 - DNA, 17 bp, Artificial Sequence
  Synthetic oligonucleotide: CBLB-1525
gctacttgaaacgtgag

SEQ ID NO: 8136 - DNA, 17 bp, Artificial Sequence
  Synthetic oligonucleotide: CBLB-1526
tattgtaaaagcaaatc

SEQ ID NO: 8137 - DNA, 17 bp, Artificial Sequence
  Synthetic oligonucleotide: CBLB-1527
actactgtgtgtaaaga

SEQ ID NO: 8138 - DNA, 17 bp, Artificial Sequence
  Synthetic oligonucleotide: CBLB-1528
tactgtgtgtaaagatt

SEQ ID NO: 8139 - DNA, 17 bp, Artificial Sequence
  Synthetic oligonucleotide: CBLB-1529
caagcttattgataaag

SEQ ID NO: 8140 - DNA, 17 bp, Artificial Sequence
  Synthetic oligonucleotide: CBLB-1530
tattgataaagatgaat

SEQ ID NO: 8141 - DNA, 17 bp, Artificial Sequence
  Synthetic oligonucleotide: CBLB-2461
attgataaagatgaatc

SEQ ID NO: 8142 - DNA, 17 bp, Artificial Sequence
  Synthetic oligonucleotide: CBLB-1532
tggttttgctctaatcg

SEQ ID NO: 8143 - DNA, 17 bp, Artificial Sequence
  Synthetic oligonucleotide: CBLB-2463
ggttttgctctaatcga

SEQ ID NO: 8144 - DNA, 17 bp, Artificial Sequence
  Synthetic oligonucleotide: CBLB-1534
ttttgctctaatcgatg

SEQ ID NO: 8145 - DNA, 17 bp, Artificial Sequence
  Synthetic oligonucleotide: CBLB-2464
tttgctctaatcgatgg

SEQ ID NO: 8146 - DNA, 17 bp, Artificial Sequence
  Synthetic oligonucleotide: CBLB-1536
tagtctctagttttctg

SEQ ID NO: 8147 - DNA, 17 bp, Artificial Sequence
  Synthetic oligonucleotide: CBLB-1537
tttaaatctgcctttta

SEQ ID NO: 8148 - DNA, 17 bp, Artificial Sequence
  Synthetic oligonucleotide: CBLB-36
tccagatggcaaactca

SEQ ID NO: 8149 - DNA, 17 bp, Artificial Sequence
  Synthetic oligonucleotide: CBLB-37
gcaaactcaatgaatgg

SEQ ID NO: 8150 - DNA, 17 bp, Artificial Sequence
  Synthetic oligonucleotide: CBLB-38
ggcagaaaccctggtgg

SEQ ID NO: 8151 - DNA, 17 bp, Artificial Sequence
  Synthetic oligonucleotide: CBLB-39
cagaaaccctggtggtc

SEQ ID NO: 8152 - DNA, 17 bp, Artificial Sequence
  Synthetic oligonucleotide: CBLB-2343
agaaaccctggtggtcg

SEQ ID NO: 8153 - DNA, 17 bp, Artificial Sequence
  Synthetic oligonucleotide: CBLB-41
aaaccctggtggtcgag

SEQ ID NO: 8154 - DNA, 17 bp, Artificial Sequence
  Synthetic oligonucleotide: CBLB-2344
aaccctggtggtcgagg

SEQ ID NO: 8155 - DNA, 17 bp, Artificial Sequence
  Synthetic oligonucleotide: CBLB-43
ggtcgaggaggaaatcc

SEQ ID NO: 8156 - DNA, 17 bp, Artificial Sequence
  Synthetic oligonucleotide: CBLB-44
ggaaatccccgaaaagg

SEQ ID NO: 8157 - DNA, 17 bp, Artificial Sequence
  Synthetic oligonucleotide: CBLB-45
cccgaaaaggtcgaatt

SEQ ID NO: 8158 - DNA, 17 bp, Artificial Sequence
  Synthetic oligonucleotide: CBLB-46
gtattattgatgctatt

SEQ ID NO: 8159 - DNA, 17 bp, Artificial Sequence
  Synthetic oligonucleotide: CBLB-47
tgctattcaggatgcag

SEQ ID NO: 8160 - DNA, 17 bp, Artificial Sequence
  Synthetic oligonucleotide: CBLB-48
caagctgccgcagatcg

SEQ ID NO: 8161 - DNA, 17 bp, Artificial Sequence
  Synthetic oligonucleotide: CBLB-49
ccgcagatcgcaggacc

SEQ ID NO: 8162 - DNA, 17 bp, Artificial Sequence
  Synthetic oligonucleotide: CBLB-2351
cgcagatcgcaggaccg

SEQ ID NO: 8163 - DNA, 17 bp, Artificial Sequence
  Synthetic oligonucleotide: CBLB-51
cagatcgcaggaccgtg

SEQ ID NO: 8164 - DNA, 17 bp, Artificial Sequence
  Synthetic oligonucleotide: CBLB-52
aggaccgtggagaagac

SEQ ID NO: 8165 - DNA, 17 bp, Artificial Sequence
  Synthetic oligonucleotide: CBLB-2352
ggaccgtggagaagact

SEQ ID NO: 8166 - DNA, 17 bp, Artificial Sequence
  Synthetic oligonucleotide: CBLB-54
agaagacttggaagctc

SEQ ID NO: 8167 - DNA, 17 bp, Artificial Sequence
  Synthetic oligonucleotide: CBLB-55
tgtctgacgttgcctgt

SEQ ID NO: 8168 - DNA, 17 bp, Artificial Sequence
  Synthetic oligonucleotide: CBLB-1558
cttcaactctgtgtttt

SEQ ID NO: 8169 - DNA, 17 bp, Artificial Sequence
  Synthetic oligonucleotide: CBLB-1559
ctgtgttttttgaaaag

SEQ ID NO: 8170 - DNA, 17 bp, Artificial Sequence
  Synthetic oligonucleotide: CBLB-1560
ttctactctttaaggtt

SEQ ID NO: 8171 - DNA, 17 bp, Artificial Sequence
  Synthetic oligonucleotide: CBLB-1561
ttgttggtgtatggcca

SEQ ID NO: 8172 - DNA, 17 bp, Artificial Sequence
  Synthetic oligonucleotide: CBLB-1562
gtatggccatagaatgc

SEQ ID NO: 8173 - DNA, 17 bp, Artificial Sequence
  Synthetic oligonucleotide: CBLB-2492
tatggccatagaatgct

SEQ ID NO: 8174 - DNA, 17 bp, Artificial Sequence
  Synthetic oligonucleotide: CBLB-1564
tgtttgttctgtcttct

SEQ ID NO: 8175 - DNA, 20 bp, Artificial Sequence
  Synthetic oligonucleotide: CBLB-1565
tacattttgggagccttacg

SEQ ID NO: 8176 - DNA, 20 bp, Artificial Sequence
  Synthetic oligonucleotide: CBLB-2443
aaggtcctatcatacatttt

SEQ ID NO: 8177 - DNA, 20 bp, Artificial Sequence
  Synthetic oligonucleotide: CBLB-2442
gaaggtcctatcatacattt

SEQ ID NO: 8178 - DNA, 20 bp, Artificial Sequence
  Synthetic oligonucleotide: CBLB-1568
tgaaggtcctatcatacatt

SEQ ID NO: 8179 - DNA, 20 bp, Artificial Sequence
  Synthetic oligonucleotide: CBLB-1569
aattcaaaataccagaacaa

SEQ ID NO: 8180 - DNA, 20 bp, Artificial Sequence
  Synthetic oligonucleotide: CBLB-1570
ttaattccaattcaaaatac

SEQ ID NO: 8181 - DNA, 20 bp, Artificial Sequence
  Synthetic oligonucleotide: CBLB-1571
ttcccccacctagataaaaa

SEQ ID NO: 8182 - DNA, 20 bp, Artificial Sequence
  Synthetic oligonucleotide: CBLB-1572
caactcataaaaaaaaaaaa

SEQ ID NO: 8183 - DNA, 20 bp, Artificial Sequence
  Synthetic oligonucleotide: CBLB-1573
cacgtttcaagtagctaagg

SEQ ID NO: 8184 - DNA, 20 bp, Artificial Sequence
  Synthetic oligonucleotide: CBLB-1574
agatttgcttttacaatact

SEQ ID NO: 8185 - DNA, 20 bp, Artificial Sequence
  Synthetic oligonucleotide: CBLB-1575
tctttacacacagtagtttt

SEQ ID NO: 8186 - DNA, 20 bp, Artificial Sequence
  Synthetic oligonucleotide: CBLB-1576
tcatctttatcaataagctt

SEQ ID NO: 8187 - DNA, 20 bp, Artificial Sequence
  Synthetic oligonucleotide: CBLB-1577
ttagagcaaaaccaaaagtt

SEQ ID NO: 8188 - DNA, 20 bp, Artificial Sequence
  Synthetic oligonucleotide: CBLB-1578
ctgcatcttcctccatcgat

SEQ ID NO: 8189 - DNA, 20 bp, Artificial Sequence
  Synthetic oligonucleotide: CBLB-1579
atatttacccaccagaaaac

SEQ ID NO: 8190 - DNA, 20 bp, Artificial Sequence
  Synthetic oligonucleotide: CBLB-1580
ttttgaaaatatttacccac

SEQ ID NO: 8191 - DNA, 20 bp, Artificial Sequence
  Synthetic oligonucleotide: CBLB-1581
aaaagaaaagttagttggtt

SEQ ID NO: 8192 - DNA, 20 bp, Artificial Sequence
  Synthetic oligonucleotide: CBLB-1582
ttaaaaggcagatttaaaaa

SEQ ID NO: 8193 - DNA, 20 bp, Artificial Sequence
  Synthetic oligonucleotide: CBLB-71
cattcattgagtttgccatc

SEQ ID NO: 8194 - DNA, 20 bp, Artificial Sequence
  Synthetic oligonucleotide: CBLB-72
ccattcattgagtttgccat

SEQ ID NO: 8195 - DNA, 20 bp, Artificial Sequence
  Synthetic oligonucleotide: CBLB-73
accagggtttctgccattca

SEQ ID NO: 8196 - DNA, 20 bp, Artificial Sequence
  Synthetic oligonucleotide: CBLB-74
gggatttcctcctcgaccac

SEQ ID NO: 8197 - DNA, 20 bp, Artificial Sequence
  Synthetic oligonucleotide: CBLB-2303
acccaaaattcgaccttttc

SEQ ID NO: 8198 - DNA, 20 bp, Artificial Sequence
  Synthetic oligonucleotide: CBLB-2302
tacccaaaattcgacctttt

SEQ ID NO: 8199 - DNA, 20 bp, Artificial Sequence
  Synthetic oligonucleotide: CBLB-77
atacccaaaattcgaccttt

SEQ ID NO: 8200 - DNA, 20 bp, Artificial Sequence
  Synthetic oligonucleotide: CBLB-78
ttagggggtccaactgcatc

SEQ ID NO: 8201 - DNA, 20 bp, Artificial Sequence
  Synthetic oligonucleotide: CBLB-2299
gatctgcggcagcttgctta

SEQ ID NO: 8202 - DNA, 20 bp, Artificial Sequence
  Synthetic oligonucleotide: CBLB-2298
cgatctgcggcagcttgctt

SEQ ID NO: 8203 - DNA, 20 bp, Artificial Sequence
  Synthetic oligonucleotide: CBLB-81
gcgatctgcggcagcttgct

SEQ ID NO: 8204 - DNA, 20 bp, Artificial Sequence
  Synthetic oligonucleotide: CBLB-82
cagaacttaccactttgtcc

SEQ ID NO: 8205 - DNA, 20 bp, Artificial Sequence
  Synthetic oligonucleotide: CBLB-83
ttcgcacaggcaacgtcaga

SEQ ID NO: 8206 - DNA, 20 bp, Artificial Sequence
  Synthetic oligonucleotide: CBLB-1596
ctggagaaaccacagacaaa

SEQ ID NO: 8207 - DNA, 20 bp, Artificial Sequence
  Synthetic oligonucleotide: CBLB-1597
taacagtataaataaatctg

SEQ ID NO: 8208 - DNA, 20 bp, Artificial Sequence
  Synthetic oligonucleotide: CBLB-2423
attaacagtataaataaatc

SEQ ID NO: 8209 - DNA, 20 bp, Artificial Sequence
  Synthetic oligonucleotide: CBLB-1599
aattaacagtataaataaat

SEQ ID NO: 8210 - DNA, 20 bp, Artificial Sequence
  Synthetic oligonucleotide: CBLB-1600
agttgaagaaaaatgatgaa

SEQ ID NO: 8211 - DNA, 20 bp, Artificial Sequence
  Synthetic oligonucleotide: CBLB-1601
cacagagttgaagaaaaatg

SEQ ID NO: 8212 - DNA, 20 bp, Artificial Sequence
  Synthetic oligonucleotide: CBLB-1602
tttcaaaaaacacagagttg

SEQ ID NO: 8213 - DNA, 20 bp, Artificial Sequence
  Synthetic oligonucleotide: CBLB-1603
acttttcaaaaaacacagag

SEQ ID NO: 8214 - DNA, 20 bp, Artificial Sequence
  Synthetic oligonucleotide: CBLB-1604
atccaacttttcaaaaaaca

SEQ ID NO: 8215 - DNA, 20 bp, Artificial Sequence
  Synthetic oligonucleotide: CBLB-1605
gttaaaaaacaaaaaagtct

SEQ ID NO: 8216 - DNA, 20 bp, Artificial Sequence
  Synthetic oligonucleotide: CBLB-1606
aaccttaaagagtagaaagg

SEQ ID NO: 8217 - DNA, 20 bp, Artificial Sequence
  Synthetic oligonucleotide: CBLB-1607
tctgaaccttaaagagtaga

SEQ ID NO: 8218 - DNA, 20 bp, Artificial Sequence
  Synthetic oligonucleotide: CBLB-1608
gaactctgaaccttaaagag

SEQ ID NO: 8219 - DNA, 20 bp, Artificial Sequence
  Synthetic oligonucleotide: CBLB-1609
tagaggaactctgaacctta

SEQ ID NO: 8220 - DNA, 20 bp, Artificial Sequence
  Synthetic oligonucleotide: CBLB-1610
ctgagtcatgtagaggaact

SEQ ID NO: 8221 - DNA, 20 bp, Artificial Sequence
  Synthetic oligonucleotide: CBLB-2418
ttacatactgagtcatgtag

SEQ ID NO: 8222 - DNA, 20 bp, Artificial Sequence
  Synthetic oligonucleotide: CBLB-1612
tttacatactgagtcatgta

SEQ ID NO: 8223 - DNA, 20 bp, Artificial Sequence
  Synthetic oligonucleotide: CBLB-1613
actttacatactgagtcatg

SEQ ID NO: 8224 - DNA, 20 bp, Artificial Sequence
  Synthetic oligonucleotide: CBLB-1614
caatggtaaaactttacata

SEQ ID NO: 8225 - DNA, 20 bp, Artificial Sequence
  Synthetic oligonucleotide: CBLB-1615
caacacaacctcacagaaga

SEQ ID NO: 8226 - DNA, 20 bp, Artificial Sequence
  Synthetic oligonucleotide: CBLB-1616
gagcaacacaacctcacaga

SEQ ID NO: 8227 - DNA, 17 bp, Artificial Sequence
  Synthetic oligonucleotide: CBLB-1617
attttgggagccttacg

SEQ ID NO: 8228 - DNA, 17 bp, Artificial Sequence
  Synthetic oligonucleotide: CBLB-2521
gtcctatcatacatttt

SEQ ID NO: 8229 - DNA, 17 bp, Artificial Sequence
  Synthetic oligonucleotide: CBLB-2520
ggtcctatcatacattt

SEQ ID NO: 8230 - DNA, 17 bp, Artificial Sequence
  Synthetic oligonucleotide: CBLB-1620
aggtcctatcatacatt

SEQ ID NO: 8231 - DNA, 17 bp, Artificial Sequence
  Synthetic oligonucleotide: CBLB-1621
tcaaaataccagaacaa

SEQ ID NO: 8232 - DNA, 17 bp, Artificial Sequence
  Synthetic oligonucleotide: CBLB-1622
attccaattcaaaatac

SEQ ID NO: 8233 - DNA, 17 bp, Artificial Sequence
  Synthetic oligonucleotide: CBLB-1623
ccccacctagataaaaa

SEQ ID NO: 8234 - DNA, 17 bp, Artificial Sequence
  Synthetic oligonucleotide: CBLB-1624
ctcataaaaaaaaaaaa

SEQ ID NO: 8235 - DNA, 17 bp, Artificial Sequence
  Synthetic oligonucleotide: CBLB-1625
gtttcaagtagctaagg

SEQ ID NO: 8236 - DNA, 17 bp, Artificial Sequence
  Synthetic oligonucleotide: CBLB-1626
tttgcttttacaatact

SEQ ID NO: 8237 - DNA, 17 bp, Artificial Sequence
  Synthetic oligonucleotide: CBLB-1627
ttacacacagtagtttt

SEQ ID NO: 8238 - DNA, 17 bp, Artificial Sequence
  Synthetic oligonucleotide: CBLB-1628
tctttatcaataagctt

SEQ ID NO: 8239 - DNA, 17 bp, Artificial Sequence
  Synthetic oligonucleotide: CBLB-1629
gagcaaaaccaaaagtt

SEQ ID NO: 8240 - DNA, 17 bp, Artificial Sequence
  Synthetic oligonucleotide: CBLB-1630
catcttcctccatcgat

SEQ ID NO: 8241 - DNA, 17 bp, Artificial Sequence
  Synthetic oligonucleotide: CBLB-1631
tttacccaccagaaaac

SEQ ID NO: 8242 - DNA, 17 bp, Artificial Sequence
  Synthetic oligonucleotide: CBLB-1632
tgaaaatatttacccac

SEQ ID NO: 8243 - DNA, 17 bp, Artificial Sequence
  Synthetic oligonucleotide: CBLB-1633
agaaaagttagttggtt

SEQ ID NO: 8244 - DNA, 17 bp, Artificial Sequence
  Synthetic oligonucleotide: CBLB-1634
aaaggcagatttaaaaa

SEQ ID NO: 8245 - DNA, 17 bp, Artificial Sequence
  Synthetic oligonucleotide: CBLB-91
tcattgagtttgccatc

SEQ ID NO: 8246 - DNA, 17 bp, Artificial Sequence
  Synthetic oligonucleotide: CBLB-92
ttcattgagtttgccat

SEQ ID NO: 8247 - DNA, 17 bp, Artificial Sequence
  Synthetic oligonucleotide: CBLB-93
agggtttctgccattca

SEQ ID NO: 8248 - DNA, 17 bp, Artificial Sequence
  Synthetic oligonucleotide: CBLB-94
atttcctcctcgaccac

SEQ ID NO: 8249 - DNA, 17 bp, Artificial Sequence
  Synthetic oligonucleotide: CBLB-2362
caaaattcgaccttttc

SEQ ID NO: 8250 - DNA, 17 bp, Artificial Sequence
  Synthetic oligonucleotide: CBLB-2361
ccaaaattcgacctttt

SEQ ID NO: 8251 - DNA, 17 bp, Artificial Sequence
  Synthetic oligonucleotide: CBLB-97
cccaaaattcgaccttt

SEQ ID NO: 8252 - DNA, 17 bp, Artificial Sequence
  Synthetic oligonucleotide: CBLB-98
gggggtccaactgcatc

SEQ ID NO: 8253 - DNA, 17 bp, Artificial Sequence
  Synthetic oligonucleotide: CBLB-2358
ctgcggcagcttgctta

SEQ ID NO: 8254 - DNA, 17 bp, Artificial Sequence
  Synthetic oligonucleotide: CBLB-2357
tctgcggcagcttgctt

SEQ ID NO: 8255 - DNA, 17 bp, Artificial Sequence
  Synthetic oligonucleotide: CBLB-101
atctgcggcagcttgct

SEQ ID NO: 8256 - DNA, 17 bp, Artificial Sequence
  Synthetic oligonucleotide: CBLB-102
aacttaccactttgtcc

SEQ ID NO: 8257 - DNA, 17 bp, Artificial Sequence
  Synthetic oligonucleotide: CBLB-103
gcacaggcaacgtcaga

SEQ ID NO: 8258 - RNA, 17 nt, Artificial Sequence
  Synthetic oligonucleotide: CBLB-1648
gagaaaccacagacaaa

SEQ ID NO: 8259 - DNA, 17 bp, Artificial Sequence
  Synthetic oligonucleotide: CBLB-1649
cagtataaataaatctg

SEQ ID NO: 8260 - DNA, 17 bp, Artificial Sequence
  Synthetic oligonucleotide: CBLB-2501
aacagtataaataaatc

SEQ ID NO: 8261 - DNA, 17 bp, Artificial Sequence
  Synthetic oligonucleotide: CBLB-1651
taacagtataaataaat

SEQ ID NO: 8262 - DNA, 17 bp, Artificial Sequence
  Synthetic oligonucleotide: CBLB-1652
tgaagaaaaatgatgaa

SEQ ID NO: 8263 - DNA, 17 bp, Artificial Sequence
  Synthetic oligonucleotide: CBLB-1653
agagttgaagaaaaatg

SEQ ID NO: 8264 - DNA, 17 bp, Artificial Sequence
  Synthetic oligonucleotide: CBLB-1654
caaaaaacacagagttg

SEQ ID NO: 8265 - DNA, 17 bp, Artificial Sequence
  Synthetic oligonucleotide: CBLB-1655
tttcaaaaaacacagag

SEQ ID NO: 8266 - DNA, 17 bp, Artificial Sequence
  Synthetic oligonucleotide: CBLB-1656
caacttttcaaaaaaca

SEQ ID NO: 8267 - DNA, 17 bp, Artificial Sequence
  Synthetic oligonucleotide: CBLB-1657
aaaaaacaaaaaagtct

SEQ ID NO: 8268 - DNA, 17 bp, Artificial Sequence
  Synthetic oligonucleotide: CBLB-1658
cttaaagagtagaaagg

SEQ ID NO: 8269 - DNA, 17 bp, Artificial Sequence
  Synthetic oligonucleotide: CBLB-1659
gaaccttaaagagtaga

SEQ ID NO: 8270 - DNA, 17 bp, Artificial Sequence
  Synthetic oligonucleotide: CBLB-1660
ctctgaaccttaaagag

SEQ ID NO: 8271 - DNA, 17 bp, Artificial Sequence
  Synthetic oligonucleotide: CBLB-1661
aggaactctgaacctta

SEQ ID NO: 8272 - DNA, 17 bp, Artificial Sequence
  Synthetic oligonucleotide: CBLB-1662
agtcatgtagaggaact

SEQ ID NO: 8273 - DNA, 17 bp, Artificial Sequence
  Synthetic oligonucleotide: CBLB-2496
catactgagtcatgtag

SEQ ID NO: 8274 - DNA, 17 bp, Artificial Sequence
  Synthetic oligonucleotide: CBLB-1664
acatactgagtcatgta

SEQ ID NO: 8275 - DNA, 17 bp, Artificial Sequence
  Synthetic oligonucleotide: CBLB-1665
ttacatactgagtcatg

SEQ ID NO: 8276 - DNA, 17 bp, Artificial Sequence
  Synthetic oligonucleotide: CBLB-1666
tggtaaaactttacata

SEQ ID NO: 8277 - DNA, 17 bp, Artificial Sequence
  Synthetic oligonucleotide: CBLB-1667
cacaacctcacagaaga

SEQ ID NO: 8278 - RNA, 20 nt, Artificial Sequence
  Synthetic oligonucleotide: CBLB-2030
aacccgcaggccggggagga

SEQ ID NO: 8279 - RNA, 20 nt, Artificial Sequence
  Synthetic oligonucleotide: CBLB-1669
cccgcaggccggggaggagg

SEQ ID NO: 8280 - RNA, 20 nt, Artificial Sequence
  Synthetic oligonucleotide: CBLB-1670
cgcaggccggggaggaggga

SEQ ID NO: 8281 - DNA, 20 bp, Artificial Sequence
  Synthetic oligonucleotide: CBLB-1671
gggcgtccaggcagacggcg

SEQ ID NO: 8282 - DNA, 20 bp, Artificial Sequence
  Synthetic oligonucleotide: CBLB-1672
gcgtccaggcagacggcggt

SEQ ID NO: 8283 - DNA, 20 bp, Artificial Sequence
  Synthetic oligonucleotide: CBLB-1673
gtgaggactgcagcaggcgg

SEQ ID NO: 8284 - DNA, 20 bp, Artificial Sequence
  Synthetic oligonucleotide: CBLB-2039
tgaggactgcagcaggcggc

SEQ ID NO: 8285 - DNA, 20 bp, Artificial Sequence
  Synthetic oligonucleotide: CBLB-2040
gaggactgcagcaggcggcc

SEQ ID NO: 8286 - DNA, 20 bp, Artificial Sequence
  Synthetic oligonucleotide: CBLB-1676
gaggcgcgtccacccaggcg

SEQ ID NO: 8287 - DNA, 20 bp, Artificial Sequence
  Synthetic oligonucleotide: CBLB-1677
gtgtccctcccgcgccctag

SEQ ID NO: 8288 - DNA, 20 bp, Artificial Sequence
  Synthetic oligonucleotide: CBLB-1678
cgccctagacggacggtgct

SEQ ID NO: 8289 - DNA, 20 bp, Artificial Sequence
  Synthetic oligonucleotide: CBLB-1679
agacggacggtgctgcgggc

SEQ ID NO: 8290 - DNA, 20 bp, Artificial Sequence
  Synthetic oligonucleotide: CBLB-2047
gacggacggtgctgcgggca

SEQ ID NO: 8291 - DNA, 20 bp, Artificial Sequence
  Synthetic oligonucleotide: CBLB-2048
acggacggtgctgcgggcac

SEQ ID NO: 8292 - DNA, 20 bp, Artificial Sequence
  Synthetic oligonucleotide: CBLB-1682
ggacggtgctgcgggcacgg

SEQ ID NO: 8293 - DNA, 20 bp, Artificial Sequence
  Synthetic oligonucleotide: CBLB-2049
gacggtgctgcgggcacggg

SEQ ID NO: 8294 - DNA, 20 bp, Artificial Sequence
  Synthetic oligonucleotide: CBLB-1684
cttcctcctgcagctcagac

SEQ ID NO: 8295 - DNA, 20 bp, Artificial Sequence
  Synthetic oligonucleotide: CBLB-1685
tcctcctgcagctcagaccc

SEQ ID NO: 8296 - DNA, 20 bp, Artificial Sequence
  Synthetic oligonucleotide: CBLB-2051
cctcctgcagctcagacccg

SEQ ID NO: 8297 - DNA, 20 bp, Artificial Sequence
  Synthetic oligonucleotide: CBLB-1687
tgcagctcagacccgagggg

SEQ ID NO: 8298 - DNA, 20 bp, Artificial Sequence
  Synthetic oligonucleotide: CBLB-2054
gcagctcagacccgaggggc

SEQ ID NO: 8299 - DNA, 20 bp, Artificial Sequence
  Synthetic oligonucleotide: CBLB-2055
cagctcagacccgaggggcc

SEQ ID NO: 8300 - DNA, 20 bp, Artificial Sequence
  Synthetic oligonucleotide: CBLB-1690
ctcagacccgaggggccggg

SEQ ID NO: 8301 - DNA, 20 bp, Artificial Sequence
  Synthetic oligonucleotide: CBLB-2056
tcagacccgaggggccggga

SEQ ID NO: 8302 - RNA, 20 nt, Artificial Sequence
  Synthetic oligonucleotide: CBLB-1692
ccgaggggccgggaaggggc

SEQ ID NO: 8303 - DNA, 20 bp, Artificial Sequence
  Synthetic oligonucleotide: CBLB-1693
gggccgggaaggggcctgag

SEQ ID NO: 8304 - DNA, 20 bp, Artificial Sequence
  Synthetic oligonucleotide: CBLB-2059
ggccgggaaggggcctgagc

SEQ ID NO: 8305 - DNA, 20 bp, Artificial Sequence
  Synthetic oligonucleotide: CBLB-2060
gccgggaaggggcctgagca

SEQ ID NO: 8306 - DNA, 20 bp, Artificial Sequence
  Synthetic oligonucleotide: CBLB-1696
gggaaggggcctgagcaggg

SEQ ID NO: 8307 - DNA, 20 bp, Artificial Sequence
  Synthetic oligonucleotide: CBLB-2061
ggaaggggcctgagcaggga

SEQ ID NO: 8308 - DNA, 20 bp, Artificial Sequence
  Synthetic oligonucleotide: CBLB-1698
agggaagggacacaggcgtc

SEQ ID NO: 8309 - DNA, 20 bp, Artificial Sequence
  Synthetic oligonucleotide: CBLB-1699
aggcgtcctgaaacaaagct

SEQ ID NO: 8310 - DNA, 20 bp, Artificial Sequence
  Synthetic oligonucleotide: CBLB-1700
tcctgaaacaaagctttggg

SEQ ID NO: 8311 - DNA, 20 bp, Artificial Sequence
  Synthetic oligonucleotide: CBLB-1701
ctgaaacaaagctttgggtt

SEQ ID NO: 8312 - DNA, 20 bp, Artificial Sequence
  Synthetic oligonucleotide: CBLB-1702
acaaagctttgggttgaggg

SEQ ID NO: 8313 - DNA, 20 bp, Artificial Sequence
  Synthetic oligonucleotide: CBLB-1703
gctttgggttgagggcagag

SEQ ID NO: 8314 - DNA, 20 bp, Artificial Sequence
  Synthetic oligonucleotide: CBLB-1704
tttgggttgagggcagaggc

SEQ ID NO: 8315 - DNA, 20 bp, Artificial Sequence
  Synthetic oligonucleotide: CBLB-2069
ttgggttgagggcagaggcg

SEQ ID NO: 8316 - DNA, 20 bp, Artificial Sequence
  Synthetic oligonucleotide: CBLB-1706
tgagggcagaggcgaggagc

SEQ ID NO: 8317 - RNA, 20 nt, Artificial Sequence
  Synthetic oligonucleotide: CBLB-1707
agggcagaggcgaggagcca

SEQ ID NO: 8318 - RNA, 20 nt, Artificial Sequence
  Synthetic oligonucleotide: CBLB-1708
agaggcgaggagccagagaa

SEQ ID NO: 8319 - DNA, 20 bp, Artificial Sequence
  Synthetic oligonucleotide: CBLB-1709
tttctcttttctcttttcaa

SEQ ID NO: 8320 - DNA, 20 bp, Artificial Sequence
  Synthetic oligonucleotide: CBLB-1710
gtgttaatttcatttggttc

SEQ ID NO: 8321 - DNA, 20 bp, Artificial Sequence
  Synthetic oligonucleotide: CBLB-2074
tgttaatttcatttggttct

SEQ ID NO: 8322 - DNA, 20 bp, Artificial Sequence
  Synthetic oligonucleotide: CBLB-2075
gttaatttcatttggttctt

SEQ ID NO: 8323 - DNA, 20 bp, Artificial Sequence
  Synthetic oligonucleotide: CBLB-1713
cgactcaccgcgttgattta

SEQ ID NO: 8324 - DNA, 20 bp, Artificial Sequence
  Synthetic oligonucleotide: CBLB-1714
ccgtacttggtggttttagt

SEQ ID NO: 8325 - DNA, 20 bp, Artificial Sequence
  Synthetic oligonucleotide: CBLB-2079
cgtacttggtggttttagtg

SEQ ID NO: 8326 - DNA, 20 bp, Artificial Sequence
  Synthetic oligonucleotide: CBLB-1716
ccctgcgcttttgttgacaa

SEQ ID NO: 8327 - DNA, 20 bp, Artificial Sequence
  Synthetic oligonucleotide: CBLB-1717
agctgtcccttacgtttgtg

SEQ ID NO: 8328 - DNA, 20 bp, Artificial Sequence
  Synthetic oligonucleotide: CBLB-1433
aatctttatgtttatgtaac

SEQ ID NO: 8329 - DNA, 20 bp, Artificial Sequence
  Synthetic oligonucleotide: CBLB-2366
atctttatgtttatgtaact

SEQ ID NO: 8330 - DNA, 20 bp, Artificial Sequence
  Synthetic oligonucleotide: CBLB-1435
ctttatgtttatgtaacttg

SEQ ID NO: 8331 - DNA, 20 bp, Artificial Sequence
  Synthetic oligonucleotide: CBLB-1721
gtgttgctcttagataacaa

SEQ ID NO: 8332 - DNA, 20 bp, Artificial Sequence
  Synthetic oligonucleotide: CBLB-1722
gacaatcatctggtatgata

SEQ ID NO: 8333 - DNA, 20 bp, Artificial Sequence
  Synthetic oligonucleotide: CBLB-1723
tatgatactgaaaatattta

SEQ ID NO: 8334 - DNA, 20 bp, Artificial Sequence
  Synthetic oligonucleotide: CBLB-2085
atgatactgaaaatatttac

SEQ ID NO: 8335 - DNA, 20 bp, Artificial Sequence
  Synthetic oligonucleotide: CBLB-2086
tgatactgaaaatatttact

SEQ ID NO: 8336 - DNA, 20 bp, Artificial Sequence
  Synthetic oligonucleotide: CBLB-2087
gatactgaaaatatttactg

SEQ ID NO: 8337 - DNA, 20 bp, Artificial Sequence
  Synthetic oligonucleotide: CBLB-1727
ctgaaaatatttactgggga

SEQ ID NO: 8338 - DNA, 20 bp, Artificial Sequence
  Synthetic oligonucleotide: CBLB-1728
agaaacagattagttcttaa

SEQ ID NO: 8339 - DNA, 20 bp, Artificial Sequence
  Synthetic oligonucleotide: CBLB-1729
aacagattagttcttaagtg

SEQ ID NO: 8340 - DNA, 20 bp, Artificial Sequence
  Synthetic oligonucleotide: CBLB-1730
cttaagtgaagaagcagtag

SEQ ID NO: 8341 - DNA, 20 bp, Artificial Sequence
  Synthetic oligonucleotide: CBLB-1731
taagtgaagaagcagtagtt

SEQ ID NO: 8342 - DNA, 20 bp, Artificial Sequence
  Synthetic oligonucleotide: CBLB-2088
aagtgaagaagcagtagttg

SEQ ID NO: 8343 - DNA, 20 bp, Artificial Sequence
  Synthetic oligonucleotide: CBLB-2089
agtgaagaagcagtagttga

SEQ ID NO: 8344 - DNA, 20 bp, Artificial Sequence
  Synthetic oligonucleotide: CBLB-1734
gggagtttccattttcatct

SEQ ID NO: 8345 - DNA, 20 bp, Artificial Sequence
  Synthetic oligonucleotide: CBLB-1735
gagtttccattttcatcttt

SEQ ID NO: 8346 - DNA, 20 bp, Artificial Sequence
  Synthetic oligonucleotide: CBLB-1736
tttgagaattcatcttcatt

SEQ ID NO: 8347 - DNA, 20 bp, Artificial Sequence
  Synthetic oligonucleotide: CBLB-1737
agaaactttttttgttgtta

SEQ ID NO: 8348 - DNA, 20 bp, Artificial Sequence
  Synthetic oligonucleotide: CBLB-2090
gaaactttttttgttgttaa

SEQ ID NO: 8349 - DNA, 20 bp, Artificial Sequence
  Synthetic oligonucleotide: CBLB-2091
aaactttttttgttgttaat

SEQ ID NO: 8350 - DNA, 20 bp, Artificial Sequence
  Synthetic oligonucleotide: CBLB-1740
actttttttgttgttaatgg

SEQ ID NO: 8351 - DNA, 20 bp, Artificial Sequence
  Synthetic oligonucleotide: CBLB-1741
ctttcatctactattccatt

SEQ ID NO: 8352 - DNA, 20 bp, Artificial Sequence
  Synthetic oligonucleotide: CBLB-1742
tctactattccattttgaaa

SEQ ID NO: 8353 - DNA, 20 bp, Artificial Sequence
  Synthetic oligonucleotide: CBLB-2092
ctactattccattttgaaac

SEQ ID NO: 8354 - DNA, 20 bp, Artificial Sequence
  Synthetic oligonucleotide: CBLB-1744
tcgatggcacattgtttatt

SEQ ID NO: 8355 - DNA, 20 bp, Artificial Sequence
  Synthetic oligonucleotide: CBLB-1745
tggcacattgtttattgtga

SEQ ID NO: 8356 - DNA, 20 bp, Artificial Sequence
  Synthetic oligonucleotide: CBLB-2094
ggcacattgtttattgtgaa

SEQ ID NO: 8357 - DNA, 20 bp, Artificial Sequence
  Synthetic oligonucleotide: CBLB-1747
ttgtgaaaggaaaatttatg

SEQ ID NO: 8358 - DNA, 20 bp, Artificial Sequence
  Synthetic oligonucleotide: CBLB-2095
tgtgaaaggaaaatttatgt

SEQ ID NO: 8359 - DNA, 20 bp, Artificial Sequence
  Synthetic oligonucleotide: CBLB-2096
gtgaaaggaaaatttatgtt

SEQ ID NO: 8360 - DNA, 20 bp, Artificial Sequence
  Synthetic oligonucleotide: CBLB-1750
gaaaatttatgttgggggtg

SEQ ID NO: 8361 - DNA, 20 bp, Artificial Sequence
  Synthetic oligonucleotide: CBLB-1751
ttatgttgggggtggtgagg

SEQ ID NO: 8362 - DNA, 20 bp, Artificial Sequence
  Synthetic oligonucleotide: CBLB-1752
atgttgggggtggtgaggct

SEQ ID NO: 8363 - DNA, 20 bp, Artificial Sequence
  Synthetic oligonucleotide: CBLB-1753
ggtggtgaggctgagagtat

SEQ ID NO: 8364 - DNA, 20 bp, Artificial Sequence
  Synthetic oligonucleotide: CBLB-1754
cagacaaactataatttcac

SEQ ID NO: 8365 - DNA, 20 bp, Artificial Sequence
  Synthetic oligonucleotide: CBLB-1755
acaaactataatttcacaag

SEQ ID NO: 8366 - DNA, 20 bp, Artificial Sequence
  Synthetic oligonucleotide: CBLB-1756
tttcacaagaagaaatcatg

SEQ ID NO: 8367 - DNA, 20 bp, Artificial Sequence
  Synthetic oligonucleotide: CBLB-1757
tcatgatgggtgtcagtatc

SEQ ID NO: 8368 - DNA, 20 bp, Artificial Sequence
  Synthetic oligonucleotide: CBLB-1758
atgatgggtgtcagtatcca

SEQ ID NO: 8369 - DNA, 20 bp, Artificial Sequence
  Synthetic oligonucleotide: CBLB-1759
cagtatccagagaagtcaat

SEQ ID NO: 8370 - DNA, 20 bp, Artificial Sequence
  Synthetic oligonucleotide: CBLB-1760
aagtcaatctgaatacctta

SEQ ID NO: 8371 - DNA, 20 bp, Artificial Sequence
  Synthetic oligonucleotide: CBLB-1761
ataccttacagagatttact

SEQ ID NO: 8372 - RNA, 17 nt, Artificial Sequence
  Synthetic oligonucleotide: CBLB-2104
ccgcaggccggggagga

SEQ ID NO: 8373 - RNA, 17 nt, Artificial Sequence
  Synthetic oligonucleotide: CBLB-1763
gcaggccggggaggagg

SEQ ID NO: 8374 - RNA, 17 nt, Artificial Sequence
  Synthetic oligonucleotide: CBLB-1764
aggccggggaggaggga

SEQ ID NO: 8375 - DNA, 17 bp, Artificial Sequence
  Synthetic oligonucleotide: CBLB-1765
cgtccaggcagacggcg

SEQ ID NO: 8376 - DNA, 17 bp, Artificial Sequence
  Synthetic oligonucleotide: CBLB-1766
tccaggcagacggcggt

SEQ ID NO: 8377 - DNA, 17 bp, Artificial Sequence
  Synthetic oligonucleotide: CBLB-1767
aggactgcagcaggcgg

SEQ ID NO: 8378 - DNA, 17 bp, Artificial Sequence
  Synthetic oligonucleotide: CBLB-2113
ggactgcagcaggcggc

SEQ ID NO: 8379 - DNA, 17 bp, Artificial Sequence
  Synthetic oligonucleotide: CBLB-2114
gactgcagcaggcggcc

SEQ ID NO: 8380 - DNA, 17 bp, Artificial Sequence
  Synthetic oligonucleotide: CBLB-1770
gcgcgtccacccaggcg

SEQ ID NO: 8381 - DNA, 17 bp, Artificial Sequence
  Synthetic oligonucleotide: CBLB-1771
tccctcccgcgccctag

SEQ ID NO: 8382 - DNA, 17 bp, Artificial Sequence
  Synthetic oligonucleotide: CBLB-1772
cctagacggacggtgct

SEQ ID NO: 8383 - DNA, 17 bp, Artificial Sequence
  Synthetic oligonucleotide: CBLB-1773
cggacggtgctgcgggc

SEQ ID NO: 8384 - DNA, 17 bp, Artificial Sequence
  Synthetic oligonucleotide: CBLB-2121
ggacggtgctgcgggca

SEQ ID NO: 8385 - DNA, 17 bp, Artificial Sequence
  Synthetic oligonucleotide: CBLB-2122
gacggtgctgcgggcac

SEQ ID NO: 8386 - DNA, 17 bp, Artificial Sequence
  Synthetic oligonucleotide: CBLB-1776
cggtgctgcgggcacgg

SEQ ID NO: 8387 - DNA, 17 bp, Artificial Sequence
  Synthetic oligonucleotide: CBLB-2123
ggtgctgcgggcacggg

SEQ ID NO: 8388 - DNA, 17 bp, Artificial Sequence
  Synthetic oligonucleotide: CBLB-1778
cctcctgcagctcagac

SEQ ID NO: 8389 - DNA, 17 bp, Artificial Sequence
  Synthetic oligonucleotide: CBLB-1779
tcctgcagctcagaccc

SEQ ID NO: 8390 - DNA, 17 bp, Artificial Sequence
  Synthetic oligonucleotide: CBLB-2125
cctgcagctcagacccg

SEQ ID NO: 8391 - DNA, 17 bp, Artificial Sequence
  Synthetic oligonucleotide: CBLB-1781
agctcagacccgagggg

SEQ ID NO: 8392 - DNA, 17 bp, Artificial Sequence
  Synthetic oligonucleotide: CBLB-2128
gctcagacccgaggggc

SEQ ID NO: 8393 - DNA, 17 bp, Artificial Sequence
  Synthetic oligonucleotide: CBLB-2129
ctcagacccgaggggcc

SEQ ID NO: 8394 - RNA, 17 nt, Artificial Sequence
  Synthetic oligonucleotide: CBLB-1784
agacccgaggggccggg

SEQ ID NO: 8395 - RNA, 17 nt, Artificial Sequence
  Synthetic oligonucleotide: CBLB-2130
gacccgaggggccggga

SEQ ID NO: 8396 - RNA, 17 nt, Artificial Sequence
  Synthetic oligonucleotide: CBLB-1786
aggggccgggaaggggc

SEQ ID NO: 8397 - DNA, 17 bp, Artificial Sequence
  Synthetic oligonucleotide: CBLB-1787
ccgggaaggggcctgag

SEQ ID NO: 8398 - DNA, 17 bp, Artificial Sequence
  Synthetic oligonucleotide: CBLB-2133
cgggaaggggcctgagc

SEQ ID NO: 8399 - DNA, 17 bp, Artificial Sequence
  Synthetic oligonucleotide: CBLB-2134
gggaaggggcctgagca

SEQ ID NO: 8400 - DNA, 17 bp, Artificial Sequence
  Synthetic oligonucleotide: CBLB-1790
aaggggcctgagcaggg

SEQ ID NO: 8401 - DNA, 17 bp, Artificial Sequence
  Synthetic oligonucleotide: CBLB-2135
aggggcctgagcaggga

SEQ ID NO: 8402 - DNA, 17 bp, Artificial Sequence
  Synthetic oligonucleotide: CBLB-1792
gaagggacacaggcgtc

SEQ ID NO: 8403 - DNA, 17 bp, Artificial Sequence
  Synthetic oligonucleotide: CBLB-1793
cgtcctgaaacaaagct

SEQ ID NO: 8404 - DNA, 17 bp, Artificial Sequence
  Synthetic oligonucleotide: CBLB-1794
tgaaacaaagctttggg

SEQ ID NO: 8405 - DNA, 17 bp, Artificial Sequence
  Synthetic oligonucleotide: CBLB-1795
aaacaaagctttgggtt

SEQ ID NO: 8406 - DNA, 17 bp, Artificial Sequence
  Synthetic oligonucleotide: CBLB-1796
aagctttgggttgaggg

SEQ ID NO: 8407 - DNA, 17 bp, Artificial Sequence
  Synthetic oligonucleotide: CBLB-1797
ttgggttgagggcagag

SEQ ID NO: 8408 - DNA, 17 bp, Artificial Sequence
  Synthetic oligonucleotide: CBLB-1798
gggttgagggcagaggc

SEQ ID NO: 8409 - DNA, 17 bp, Artificial Sequence
  Synthetic oligonucleotide: CBLB-2143
ggttgagggcagaggcg

SEQ ID NO: 8410 - RNA, 17 nt, Artificial Sequence
  Synthetic oligonucleotide: CBLB-1800
gggcagaggcgaggagc

SEQ ID NO: 8411 - RNA, 17 nt, Artificial Sequence
  Synthetic oligonucleotide: CBLB-1801
gcagaggcgaggagcca

SEQ ID NO: 8412 - RNA, 17 nt, Artificial Sequence
  Synthetic oligonucleotide: CBLB-1802
ggcgaggagccagagaa

SEQ ID NO: 8413 - DNA, 17 bp, Artificial Sequence
  Synthetic oligonucleotide: CBLB-1803
ctcttttctcttttcaa

SEQ ID NO: 8414 - DNA, 17 bp, Artificial Sequence
  Synthetic oligonucleotide: CBLB-1804
ttaatttcatttggttc

SEQ ID NO: 8415 - DNA, 17 bp, Artificial Sequence
  Synthetic oligonucleotide: CBLB-2148
taatttcatttggttct

SEQ ID NO: 8416 - DNA, 17 bp, Artificial Sequence
  Synthetic oligonucleotide: CBLB-2149
aatttcatttggttctt

SEQ ID NO: 8417 - DNA, 17 bp, Artificial Sequence
  Synthetic oligonucleotide: CBLB-1807
ctcaccgcgttgattta

SEQ ID NO: 8418 - DNA, 17 bp, Artificial Sequence
  Synthetic oligonucleotide: CBLB-1808
tacttggtggttttagt

SEQ ID NO: 8419 - DNA, 17 bp, Artificial Sequence
  Synthetic oligonucleotide: CBLB-2153
acttggtggttttagtg

SEQ ID NO: 8420 - DNA, 17 bp, Artificial Sequence
  Synthetic oligonucleotide: CBLB-1810
tgcgcttttgttgacaa

SEQ ID NO: 8421 - DNA, 17 bp, Artificial Sequence
  Synthetic oligonucleotide: CBLB-1811
tgtcccttacgtttgtg

SEQ ID NO: 8422 - DNA, 17 bp, Artificial Sequence
  Synthetic oligonucleotide: CBLB-1499
ctttatgtttatgtaac

SEQ ID NO: 8423 - DNA, 17 bp, Artificial Sequence
  Synthetic oligonucleotide: CBLB-2444
tttatgtttatgtaact

SEQ ID NO: 8424 - DNA, 17 bp, Artificial Sequence
  Synthetic oligonucleotide: CBLB-1501
tatgtttatgtaacttg

SEQ ID NO: 8425 - DNA, 17 bp, Artificial Sequence
  Synthetic oligonucleotide: CBLB-1815
ttgctcttagataacaa

SEQ ID NO: 8426 - DNA, 17 bp, Artificial Sequence
  Synthetic oligonucleotide: CBLB-1816
aatcatctggtatgata

SEQ ID NO: 8427 - DNA, 17 bp, Artificial Sequence
  Synthetic oligonucleotide: CBLB-1817
gatactgaaaatattta

SEQ ID NO: 8428 - DNA, 17 bp, Artificial Sequence
  Synthetic oligonucleotide: CBLB-2159
atactgaaaatatttac

SEQ ID NO: 8429 - DNA, 17 bp, Artificial Sequence
  Synthetic oligonucleotide: CBLB-2160
tactgaaaatatttact

SEQ ID NO: 8430 - DNA, 17 bp, Artificial Sequence
  Synthetic oligonucleotide: CBLB-2161
actgaaaatatttactg

SEQ ID NO: 8431 - DNA, 17 bp, Artificial Sequence
  Synthetic oligonucleotide: CBLB-1821
aaaatatttactgggga

SEQ ID NO: 8432 - DNA, 17 bp, Artificial Sequence
  Synthetic oligonucleotide: CBLB-1822
aacagattagttcttaa

SEQ ID NO: 8433 - DNA, 17 bp, Artificial Sequence
  Synthetic oligonucleotide: CBLB-1823
agattagttcttaagtg

SEQ ID NO: 8434 - DNA, 17 bp, Artificial Sequence
  Synthetic oligonucleotide: CBLB-1824
aagtgaagaagcagtag

SEQ ID NO: 8435 - DNA, 17 bp, Artificial Sequence
  Synthetic oligonucleotide: CBLB-1825
gtgaagaagcagtagtt

SEQ ID NO: 8436 - DNA, 17 bp, Artificial Sequence
  Synthetic oligonucleotide: CBLB-2162
tgaagaagcagtagttg

SEQ ID NO: 8437 - DNA, 17 bp, Artificial Sequence
  Synthetic oligonucleotide: CBLB-2163
gaagaagcagtagttga

SEQ ID NO: 8438 - DNA, 17 bp, Artificial Sequence
  Synthetic oligonucleotide: CBLB-1828
agtttccattttcatct

SEQ ID NO: 8439 - DNA, 17 bp, Artificial Sequence
  Synthetic oligonucleotide: CBLB-1829
tttccattttcatcttt

SEQ ID NO: 8440 - DNA, 17 bp, Artificial Sequence
  Synthetic oligonucleotide: CBLB-1830
gagaattcatcttcatt

SEQ ID NO: 8441 - DNA, 17 bp, Artificial Sequence
  Synthetic oligonucleotide: CBLB-1831
aactttttttgttgtta

SEQ ID NO: 8442 - DNA, 17 bp, Artificial Sequence
  Synthetic oligonucleotide: CBLB-2164
actttttttgttgttaa

SEQ ID NO: 8443 - DNA, 17 bp, Artificial Sequence
  Synthetic oligonucleotide: CBLB-2165
ctttttttgttgttaat

SEQ ID NO: 8444 - DNA, 17 bp, Artificial Sequence
  Synthetic oligonucleotide: CBLB-1834
ttttttgttgttaatgg

SEQ ID NO: 8445 - DNA, 17 bp, Artificial Sequence
  Synthetic oligonucleotide: CBLB-1835
tcatctactattccatt

SEQ ID NO: 8446 - DNA, 17 bp, Artificial Sequence
  Synthetic oligonucleotide: CBLB-1836
actattccattttgaaa

SEQ ID NO: 8447 - DNA, 17 bp, Artificial Sequence
  Synthetic oligonucleotide: CBLB-2166
ctattccattttgaaac

SEQ ID NO: 8448 - DNA, 17 bp, Artificial Sequence
  Synthetic oligonucleotide: CBLB-1838
atggcacattgtttatt

SEQ ID NO: 8449 - DNA, 17 bp, Artificial Sequence
  Synthetic oligonucleotide: CBLB-1839
cacattgtttattgtga

SEQ ID NO: 8450 - DNA, 17 bp, Artificial Sequence
  Synthetic oligonucleotide: CBLB-2168
acattgtttattgtgaa

SEQ ID NO: 8451 - DNA, 17 bp, Artificial Sequence
  Synthetic oligonucleotide: CBLB-1841
tgaaaggaaaatttatg

SEQ ID NO: 8452 - DNA, 17 bp, Artificial Sequence
  Synthetic oligonucleotide: CBLB-2169
gaaaggaaaatttatgt

SEQ ID NO: 8453 - DNA, 17 bp, Artificial Sequence
  Synthetic oligonucleotide: CBLB-2170
aaaggaaaatttatgtt

SEQ ID NO: 8454 - DNA, 17 bp, Artificial Sequence
  Synthetic oligonucleotide: CBLB-1844
aatttatgttgggggtg

SEQ ID NO: 8455 - DNA, 17 bp, Artificial Sequence
  Synthetic oligonucleotide: CBLB-1845
tgttgggggtggtgagg

SEQ ID NO: 8456 - DNA, 17 bp, Artificial Sequence
  Synthetic oligonucleotide: CBLB-1846
ttgggggtggtgaggct

SEQ ID NO: 8457 - DNA, 17 bp, Artificial Sequence
  Synthetic oligonucleotide: CBLB-1847
ggtgaggctgagagtat

SEQ ID NO: 8458 - DNA, 17 bp, Artificial Sequence
  Synthetic oligonucleotide: CBLB-1848
acaaactataatttcac

SEQ ID NO: 8459 - DNA, 17 bp, Artificial Sequence
  Synthetic oligonucleotide: CBLB-1849
aactataatttcacaag

SEQ ID NO: 8460 - DNA, 17 bp, Artificial Sequence
  Synthetic oligonucleotide: CBLB-1850
cacaagaagaaatcatg

SEQ ID NO: 8461 - DNA, 17 bp, Artificial Sequence
  Synthetic oligonucleotide: CBLB-1851
tgatgggtgtcagtatc

SEQ ID NO: 8462 - DNA, 17 bp, Artificial Sequence
  Synthetic oligonucleotide: CBLB-1852
atgggtgtcagtatcca

SEQ ID NO: 8463 - DNA, 17 bp, Artificial Sequence
  Synthetic oligonucleotide: CBLB-1853
tatccagagaagtcaat

SEQ ID NO: 8464 - DNA, 17 bp, Artificial Sequence
  Synthetic oligonucleotide: CBLB-1854
tcaatctgaatacctta

SEQ ID NO: 8465 - DNA, 17 bp, Artificial Sequence
  Synthetic oligonucleotide: CBLB-1855
ccttacagagatttact

SEQ ID NO: 8466 - DNA, 20 bp, Artificial Sequence
  Synthetic oligonucleotide: CBLB-1856
ctctccctcctccccggcct

SEQ ID NO: 8467 - DNA, 20 bp, Artificial Sequence
  Synthetic oligonucleotide: CBLB-1857
cagtcctcaccgccgtctgc

SEQ ID NO: 8468 - DNA, 20 bp, Artificial Sequence
  Synthetic oligonucleotide: CBLB-1858
actgtgggctcggcgcctgg

SEQ ID NO: 8469 - DNA, 20 bp, Artificial Sequence
  Synthetic oligonucleotide: CBLB-1859
ggacactgtgggctcggcgc

SEQ ID NO: 8470 - DNA, 20 bp, Artificial Sequence
  Synthetic oligonucleotide: CBLB-1860
tagggcgcgggagggacact

SEQ ID NO: 8471 - DNA, 20 bp, Artificial Sequence
  Synthetic oligonucleotide: CBLB-2190
ccgtccgtctagggcgcggg

SEQ ID NO: 8472 - DNA, 20 bp, Artificial Sequence
  Synthetic oligonucleotide: CBLB-1862
accgtccgtctagggcgcgg

SEQ ID NO: 8473 - DNA, 20 bp, Artificial Sequence
  Synthetic oligonucleotide: CBLB-2191
gcaccgtccgtctagggcgc

SEQ ID NO: 8474 - DNA, 20 bp, Artificial Sequence
  Synthetic oligonucleotide: CBLB-2192
agcaccgtccgtctagggcg

SEQ ID NO: 8475 - DNA, 20 bp, Artificial Sequence
  Synthetic oligonucleotide: CBLB-1865
cagcaccgtccgtctagggc

SEQ ID NO: 8476 - DNA, 20 bp, Artificial Sequence
  Synthetic oligonucleotide: CBLB-1866
tgcccgcagcaccgtccgtc

SEQ ID NO: 8477 - DNA, 20 bp, Artificial Sequence
  Synthetic oligonucleotide: CBLB-2196
aggaggaaggtggactggga

SEQ ID NO: 8478 - DNA, 20 bp, Artificial Sequence
  Synthetic oligonucleotide: CBLB-2197
caggaggaaggtggactggg

SEQ ID NO: 8479 - DNA, 20 bp, Artificial Sequence
  Synthetic oligonucleotide: CBLB-1869
gcaggaggaaggtggactgg

SEQ ID NO: 8480 - DNA, 20 bp, Artificial Sequence
  Synthetic oligonucleotide: CBLB-2198
ctgcaggaggaaggtggact

SEQ ID NO: 8481 - DNA, 20 bp, Artificial Sequence
  Synthetic oligonucleotide: CBLB-2199
gctgcaggaggaaggtggac

SEQ ID NO: 8482 - DNA, 20 bp, Artificial Sequence
  Synthetic oligonucleotide: CBLB-1872
agctgcaggaggaaggtgga

SEQ ID NO: 8483 - DNA, 20 bp, Artificial Sequence
  Synthetic oligonucleotide: CBLB-1873
gtctgagctgcaggaggaag

SEQ ID NO: 8484 - DNA, 20 bp, Artificial Sequence
  Synthetic oligonucleotide: CBLB-2202
cctcgggtctgagctgcagg

SEQ ID NO: 8485 - DNA, 20 bp, Artificial Sequence
  Synthetic oligonucleotide: CBLB-1875
ccctcgggtctgagctgcag

SEQ ID NO: 8486 - DNA, 20 bp, Artificial Sequence
  Synthetic oligonucleotide: CBLB-2203
gcccctcgggtctgagctgc

SEQ ID NO: 8487 - DNA, 20 bp, Artificial Sequence
  Synthetic oligonucleotide: CBLB-1877
ggcccctcgggtctgagctg

SEQ ID NO: 8488 - DNA, 20 bp, Artificial Sequence
  Synthetic oligonucleotide: CBLB-1878
cccttcccggcccctcgggt

SEQ ID NO: 8489 - DNA, 20 bp, Artificial Sequence
  Synthetic oligonucleotide: CBLB-1879
tcaggccccttcccggcccc

SEQ ID NO: 8490 - DNA, 20 bp, Artificial Sequence
  Synthetic oligonucleotide: CBLB-1880
ctcaacccaaagctttgttt

SEQ ID NO: 8491 - RNA, 20 nt, Artificial Sequence
  Synthetic oligonucleotide: CBLB-2210
caagagcggccacggaaagg

SEQ ID NO: 8492 - RNA, 20 nt, Artificial Sequence
  Synthetic oligonucleotide: CBLB-1882
acaagagcggccacggaaag

SEQ ID NO: 8493 - DNA, 20 bp, Artificial Sequence
  Synthetic oligonucleotide: CBLB-2211
tgacaagagcggccacggaa

SEQ ID NO: 8494 - DNA, 20 bp, Artificial Sequence
  Synthetic oligonucleotide: CBLB-1884
atgacaagagcggccacgga

SEQ ID NO: 8495 - DNA, 20 bp, Artificial Sequence
  Synthetic oligonucleotide: CBLB-2212
aaaaatgacaagagcggcca

SEQ ID NO: 8496 - DNA, 20 bp, Artificial Sequence
  Synthetic oligonucleotide: CBLB-1886
gaaaaatgacaagagcggcc

SEQ ID NO: 8497 - DNA, 20 bp, Artificial Sequence
  Synthetic oligonucleotide: CBLB-1887
agagaaaagagaaaaatgac

SEQ ID NO: 8498 - DNA, 20 bp, Artificial Sequence
  Synthetic oligonucleotide: CBLB-1888
gcccatttgaaaagagaaaa

SEQ ID NO: 8499 - DNA, 20 bp, Artificial Sequence
  Synthetic oligonucleotide: CBLB-1889
tagcccatttgaaaagagaa

SEQ ID NO: 8500 - DNA, 20 bp, Artificial Sequence
  Synthetic oligonucleotide: CBLB-1890
acaaatagcccatttgaaaa

SEQ ID NO: 8501 - DNA, 20 bp, Artificial Sequence
  Synthetic oligonucleotide: CBLB-1891
acacaaatagcccatttgaa

SEQ ID NO: 8502 - DNA, 20 bp, Artificial Sequence
  Synthetic oligonucleotide: CBLB-1892
ttaacacacaaatagcccat

SEQ ID NO: 8503 - DNA, 20 bp, Artificial Sequence
  Synthetic oligonucleotide: CBLB-1893
tcgttattcccaagaaccaa

SEQ ID NO: 8504 - DNA, 20 bp, Artificial Sequence
  Synthetic oligonucleotide: CBLB-1894
cgcggtgagtcgttattccc

SEQ ID NO: 8505 - DNA, 20 bp, Artificial Sequence
  Synthetic oligonucleotide: CBLB-1895
cctttctttaaatcaacgcg

SEQ ID NO: 8506 - DNA, 20 bp, Artificial Sequence
  Synthetic oligonucleotide: CBLB-1896
aaaccaccaagtacggacac

SEQ ID NO: 8507 - DNA, 20 bp, Artificial Sequence
  Synthetic oligonucleotide: CBLB-1897
ccacactaaaaccaccaagt

SEQ ID NO: 8508 - DNA, 20 bp, Artificial Sequence
  Synthetic oligonucleotide: CBLB-1898
ctctgttgtcaacaaaagcg

SEQ ID NO: 8509 - DNA, 20 bp, Artificial Sequence
  Synthetic oligonucleotide: CBLB-2219
gattatcctacacaaacgta

SEQ ID NO: 8510 - DNA, 20 bp, Artificial Sequence
  Synthetic oligonucleotide: CBLB-1900
agattatcctacacaaacgt

SEQ ID NO: 8511 - DNA, 20 bp, Artificial Sequence
  Synthetic oligonucleotide: CBLB-1615
caacacaacctcacagaaga

SEQ ID NO: 8512 - DNA, 20 bp, Artificial Sequence
  Synthetic oligonucleotide: CBLB-1902
ctaagagcaacacaacctca

SEQ ID NO: 8513 - DNA, 20 bp, Artificial Sequence
  Synthetic oligonucleotide: CBLB-1903
ctggtactcttttgttatct

SEQ ID NO: 8514 - DNA, 20 bp, Artificial Sequence
  Synthetic oligonucleotide: CBLB-1904
tatcataccagatgattgtc

SEQ ID NO: 8515 - DNA, 20 bp, Artificial Sequence
  Synthetic oligonucleotide: CBLB-1905
caactactgcttcttcactt

SEQ ID NO: 8516 - DNA, 20 bp, Artificial Sequence
  Synthetic oligonucleotide: CBLB-2222
tgaattctcaaagatgaaaa

SEQ ID NO: 8517 - DNA, 20 bp, Artificial Sequence
  Synthetic oligonucleotide: CBLB-1907
atgaattctcaaagatgaaa

SEQ ID NO: 8518 - DNA, 20 bp, Artificial Sequence
  Synthetic oligonucleotide: CBLB-1908
atgaagatgaattctcaaag

SEQ ID NO: 8519 - DNA, 20 bp, Artificial Sequence
  Synthetic oligonucleotide: CBLB-1909
aaaaaagtttcttaatgaag

SEQ ID NO: 8520 - DNA, 20 bp, Artificial Sequence
  Synthetic oligonucleotide: CBLB-1910
acaacaaaaaaagtttctta

SEQ ID NO: 8521 - DNA, 20 bp, Artificial Sequence
  Synthetic oligonucleotide: CBLB-1911
caaaatggaatagtagatga

SEQ ID NO: 8522 - DNA, 20 bp, Artificial Sequence
  Synthetic oligonucleotide: CBLB-1912
gtttcaaaatggaatagtag

SEQ ID NO: 8523 - DNA, 20 bp, Artificial Sequence
  Synthetic oligonucleotide: CBLB-2223
aaaggtttcctgtttcaaaa

SEQ ID NO: 8524 - DNA, 20 bp, Artificial Sequence
  Synthetic oligonucleotide: CBLB-1914
gaaaggtttcctgtttcaaa

SEQ ID NO: 8525 - DNA, 20 bp, Artificial Sequence
  Synthetic oligonucleotide: CBLB-1915
tcacaataaacaatgtgcca

SEQ ID NO: 8526 - DNA, 20 bp, Artificial Sequence
  Synthetic oligonucleotide: CBLB-1916
aaagcaacatgcagaaacca

SEQ ID NO: 8527 - DNA, 20 bp, Artificial Sequence
  Synthetic oligonucleotide: CBLB-1917
gtttgtctgaaagcaacatg

SEQ ID NO: 8528 - DNA, 20 bp, Artificial Sequence
  Synthetic oligonucleotide: CBLB-1918
cttgtgaaattatagtttgt

SEQ ID NO: 8529 - DNA, 20 bp, Artificial Sequence
  Synthetic oligonucleotide: CBLB-1919
acccatcatgatttcttctt

SEQ ID NO: 8530 - DNA, 20 bp, Artificial Sequence
  Synthetic oligonucleotide: CBLB-1920
aggtattcagattgacttct

SEQ ID NO: 8531 - DNA, 20 bp, Artificial Sequence
  Synthetic oligonucleotide: CBLB-1921
gatactgacagctacagttt

SEQ ID NO: 8532 - DNA, 20 bp, Artificial Sequence
  Synthetic oligonucleotide: CBLB-1922
tataatcatacttagtaagg

SEQ ID NO: 8533 - DNA, 17 bp, Artificial Sequence
  Synthetic oligonucleotide: CBLB-1923
tccctcctccccggcct

SEQ ID NO: 8534 - DNA, 17 bp, Artificial Sequence
  Synthetic oligonucleotide: CBLB-1924
tcctcaccgccgtctgc

SEQ ID NO: 8535 - DNA, 17 bp, Artificial Sequence
  Synthetic oligonucleotide: CBLB-1925
gtgggctcggcgcctgg

SEQ ID NO: 8536 - DNA, 17 bp, Artificial Sequence
  Synthetic oligonucleotide: CBLB-1926
cactgtgggctcggcgc

SEQ ID NO: 8537 - DNA, 17 bp, Artificial Sequence
  Synthetic oligonucleotide: CBLB-1927
ggcgcgggagggacact

SEQ ID NO: 8538 - DNA, 17 bp, Artificial Sequence
  Synthetic oligonucleotide: CBLB-2242
tccgtctagggcgcggg

SEQ ID NO: 8539 - DNA, 17 bp, Artificial Sequence
  Synthetic oligonucleotide: CBLB-1929
gtccgtctagggcgcgg

SEQ ID NO: 8540 - DNA, 17 bp, Artificial Sequence
  Synthetic oligonucleotide: CBLB-2243
ccgtccgtctagggcgc

SEQ ID NO: 8541 - DNA, 17 bp, Artificial Sequence
  Synthetic oligonucleotide: CBLB-2244
accgtccgtctagggcg

SEQ ID NO: 8542 - DNA, 17 bp, Artificial Sequence
  Synthetic oligonucleotide: CBLB-1932
caccgtccgtctagggc

SEQ ID NO: 8543 - DNA, 17 bp, Artificial Sequence
  Synthetic oligonucleotide: CBLB-1933
ccgcagcaccgtccgtc

SEQ ID NO: 8544 - DNA, 17 bp, Artificial Sequence
  Synthetic oligonucleotide: CBLB-2248
aggaaggtggactggga

SEQ ID NO: 8545 - DNA, 17 bp, Artificial Sequence
  Synthetic oligonucleotide: CBLB-2249
gaggaaggtggactggg

SEQ ID NO: 8546 - DNA, 17 bp, Artificial Sequence
  Synthetic oligonucleotide: CBLB-1936
ggaggaaggtggactgg

SEQ ID NO: 8547 - DNA, 17 bp, Artificial Sequence
  Synthetic oligonucleotide: CBLB-2250
caggaggaaggtggact

SEQ ID NO: 8548 - DNA, 17 bp, Artificial Sequence
  Synthetic oligonucleotide: CBLB-2251
gcaggaggaaggtggac

SEQ ID NO: 8549 - DNA, 17 bp, Artificial Sequence
  Synthetic oligonucleotide: CBLB-1939
tgcaggaggaaggtgga

SEQ ID NO: 8550 - DNA, 17 bp, Artificial Sequence
  Synthetic oligonucleotide: CBLB-1940
tgagctgcaggaggaag

SEQ ID NO: 8551 - DNA, 17 bp, Artificial Sequence
  Synthetic oligonucleotide: CBLB-2254
cgggtctgagctgcagg

SEQ ID NO: 8552 - DNA, 17 bp, Artificial Sequence
  Synthetic oligonucleotide: CBLB-1942
tcgggtctgagctgcag

SEQ ID NO: 8553 - DNA, 17 bp, Artificial Sequence
  Synthetic oligonucleotide: CBLB-2255
cctcgggtctgagctgc

SEQ ID NO: 8554 - DNA, 17 bp, Artificial Sequence
  Synthetic oligonucleotide: CBLB-1944
ccctcgggtctgagctg

SEQ ID NO: 8555 - DNA, 17 bp, Artificial Sequence
  Synthetic oligonucleotide: CBLB-1945
ttcccggcccctcgggt

SEQ ID NO: 8556 - DNA, 17 bp, Artificial Sequence
  Synthetic oligonucleotide: CBLB-1946
ggccccttcccggcccc

SEQ ID NO: 8557 - DNA, 17 bp, Artificial Sequence
  Synthetic oligonucleotide: CBLB-1947
aacccaaagctttgttt

SEQ ID NO: 8558 - RNA, 17 nt, Artificial Sequence
  Synthetic oligonucleotide: CBLB-2262
gagcggccacggaaagg

SEQ ID NO: 8559 - RNA, 17 nt, Artificial Sequence
  Synthetic oligonucleotide: CBLB-1949
agagcggccacggaaag

SEQ ID NO: 8560 - RNA, 17 nt, Artificial Sequence
  Synthetic oligonucleotide: CBLB-2263
caagagcggccacggaa

SEQ ID NO: 8561 - RNA, 17 nt, Artificial Sequence
  Synthetic oligonucleotide: CBLB-1951
acaagagcggccacgga

SEQ ID NO: 8562 - DNA, 17 bp, Artificial Sequence
  Synthetic oligonucleotide: CBLB-2264
aatgacaagagcggcca

SEQ ID NO: 8563 - DNA, 17 bp, Artificial Sequence
  Synthetic oligonucleotide: CBLB-1953
aaatgacaagagcggcc

SEQ ID NO: 8564 - DNA, 17 bp, Artificial Sequence
  Synthetic oligonucleotide: CBLB-1954
gaaaagagaaaaatgac

SEQ ID NO: 8565 - DNA, 17 bp, Artificial Sequence
  Synthetic oligonucleotide: CBLB-1955
catttgaaaagagaaaa

SEQ ID NO: 8566 - DNA, 17 bp, Artificial Sequence
  Synthetic oligonucleotide: CBLB-1956
cccatttgaaaagagaa

SEQ ID NO: 8567 - DNA, 17 bp, Artificial Sequence
  Synthetic oligonucleotide: CBLB-1957
aatagcccatttgaaaa

SEQ ID NO: 8568 - DNA, 17 bp, Artificial Sequence
  Synthetic oligonucleotide: CBLB-1958
caaatagcccatttgaa

SEQ ID NO: 8569 - DNA, 17 bp, Artificial Sequence
  Synthetic oligonucleotide: CBLB-1959
acacacaaatagcccat

SEQ ID NO: 8570 - DNA, 17 bp, Artificial Sequence
  Synthetic oligonucleotide: CBLB-1960
ttattcccaagaaccaa

SEQ ID NO: 8571 - DNA, 17 bp, Artificial Sequence
  Synthetic oligonucleotide: CBLB-1961
ggtgagtcgttattccc

SEQ ID NO: 8572 - DNA, 17 bp, Artificial Sequence
  Synthetic oligonucleotide: CBLB-1962
ttctttaaatcaacgcg

SEQ ID NO: 8573 - DNA, 17 bp, Artificial Sequence
  Synthetic oligonucleotide: CBLB-1963
ccaccaagtacggacac

SEQ ID NO: 8574 - DNA, 17 bp, Artificial Sequence
  Synthetic oligonucleotide: CBLB-1964
cactaaaaccaccaagt

SEQ ID NO: 8575 - DNA, 17 bp, Artificial Sequence
  Synthetic oligonucleotide: CBLB-1965
tgttgtcaacaaaagcg

SEQ ID NO: 8576 - DNA, 17 bp, Artificial Sequence
  Synthetic oligonucleotide: CBLB-2271
tatcctacacaaacgta

SEQ ID NO: 8577 - DNA, 17 bp, Artificial Sequence
  Synthetic oligonucleotide: CBLB-1967
ttatcctacacaaacgt

SEQ ID NO: 8578 - DNA, 17 bp, Artificial Sequence
  Synthetic oligonucleotide: CBLB-1667
cacaacctcacagaaga

SEQ ID NO: 8579 - DNA, 17 bp, Artificial Sequence
  Synthetic oligonucleotide: CBLB-1969
agagcaacacaacctca

SEQ ID NO: 8580 - DNA, 17 bp, Artificial Sequence
  Synthetic oligonucleotide: CBLB-1970
gtactcttttgttatct

SEQ ID NO: 8581 - DNA, 17 bp, Artificial Sequence
  Synthetic oligonucleotide: CBLB-1971
cataccagatgattgtc

SEQ ID NO: 8582 - DNA, 17 bp, Artificial Sequence
  Synthetic oligonucleotide: CBLB-1972
ctactgcttcttcactt

SEQ ID NO: 8583 - DNA, 17 bp, Artificial Sequence
  Synthetic oligonucleotide: CBLB-2274
attctcaaagatgaaaa

SEQ ID NO: 8584 - DNA, 17 bp, Artificial Sequence
  Synthetic oligonucleotide: CBLB-1974
aattctcaaagatgaaa

SEQ ID NO: 8585 - DNA, 17 bp, Artificial Sequence
  Synthetic oligonucleotide: CBLB-1975
aagatgaattctcaaag

SEQ ID NO: 8586 - DNA, 17 bp, Artificial Sequence
  Synthetic oligonucleotide: CBLB-1976
aaagtttcttaatgaag

SEQ ID NO: 8587 - DNA, 17 bp, Artificial Sequence
  Synthetic oligonucleotide: CBLB-1977
acaaaaaaagtttctta

SEQ ID NO: 8588 - DNA, 17 bp, Artificial Sequence
  Synthetic oligonucleotide: CBLB-1978
aatggaatagtagatga

SEQ ID NO: 8589 - DNA, 17 bp, Artificial Sequence
  Synthetic oligonucleotide: CBLB-1979
tcaaaatggaatagtag

SEQ ID NO: 8590 - DNA, 17 bp, Artificial Sequence
  Synthetic oligonucleotide: CBLB-2275
ggtttcctgtttcaaaa

SEQ ID NO: 8591 - DNA, 17 bp, Artificial Sequence
  Synthetic oligonucleotide: CBLB-1981
aggtttcctgtttcaaa

SEQ ID NO: 8592 - DNA, 17 bp, Artificial Sequence
  Synthetic oligonucleotide: CBLB-1982
caataaacaatgtgcca

SEQ ID NO: 8593 - DNA, 17 bp, Artificial Sequence
  Synthetic oligonucleotide: CBLB-1983
gcaacatgcagaaacca

SEQ ID NO: 8594 - DNA, 17 bp, Artificial Sequence
  Synthetic oligonucleotide: CBLB-1984
tgtctgaaagcaacatg

SEQ ID NO: 8595 - DNA, 17 bp, Artificial Sequence
  Synthetic oligonucleotide: CBLB-1985
gtgaaattatagtttgt

SEQ ID NO: 8596 - DNA, 17 bp, Artificial Sequence
  Synthetic oligonucleotide: CBLB-1986
catcatgatttcttctt

SEQ ID NO: 8597 - DNA, 17 bp, Artificial Sequence
  Synthetic oligonucleotide: CBLB-1987
tattcagattgacttct

SEQ ID NO: 8598 - DNA, 17 bp, Artificial Sequence
  Synthetic oligonucleotide: CBLB-1988
actgacagctacagttt

SEQ ID NO: 8599 - DNA, 17 bp, Artificial Sequence
  Synthetic oligonucleotide: CBLB-1989
aatcatacttagtaagg

SEQ ID NO: 8600 - DNA, 20 bp, Artificial Sequence
  Synthetic oligonucleotide: CBLB-1990
gctcttaaaactactgtgtg

SEQ ID NO: 8601 - DNA, 20 bp, Artificial Sequence
  Synthetic oligonucleotide: CBLB-1991
ttcactttgtctgtggtttc

SEQ ID NO: 8602 - DNA, 20 bp, Artificial Sequence
  Synthetic oligonucleotide: CBLB-1992
ccattgttatggcaacaatc

SEQ ID NO: 8603 - DNA, 20 bp, Artificial Sequence
  Synthetic oligonucleotide: CBLB-1993
aactctgtgttttttgaaaa

SEQ ID NO: 8604 - DNA, 17 bp, Artificial Sequence
  Synthetic oligonucleotide: CBLB-1994
cttaaaactactgtgtg

SEQ ID NO: 8605 - DNA, 17 bp, Artificial Sequence
  Synthetic oligonucleotide: CBLB-1995
actttgtctgtggtttc

SEQ ID NO: 8606 - DNA, 17 bp, Artificial Sequence
  Synthetic oligonucleotide: CBLB-1996
ttgttatggcaacaatc

SEQ ID NO: 8607 - DNA, 17 bp, Artificial Sequence
  Synthetic oligonucleotide: CBLB-1997
tctgtgttttttgaaaa

SEQ ID NO: 8608 - DNA, 20 bp, Artificial Sequence
  Synthetic oligonucleotide: CBLB-1998
ttctccaagttacataaaca

SEQ ID NO: 8609 - DNA, 20 bp, Artificial Sequence
  Synthetic oligonucleotide: CBLB-1999
agaaacttcactttcactct

SEQ ID NO: 8610 - DNA, 20 bp, Artificial Sequence
  Synthetic oligonucleotide: CBLB-2000
gtagttttaagagcagtgat

SEQ ID NO: 8611 - DNA, 20 bp, Artificial Sequence
  Synthetic oligonucleotide: CBLB-2001
attagagcaaaaccaaaagt

SEQ ID NO: 8612 - DNA, 20 bp, Artificial Sequence
  Synthetic oligonucleotide: CBLB-2002
tgtaccactgcatcttcctc

SEQ ID NO: 8613 - DNA, 20 bp, Artificial Sequence
  Synthetic oligonucleotide: CBLB-561
ggaattttagttctttaaaa

SEQ ID NO: 8614 - DNA, 20 bp, Artificial Sequence
  Synthetic oligonucleotide: CBLB-2302
tacccaaaattcgacctttt

SEQ ID NO: 8615 - DNA, 20 bp, Artificial Sequence
  Synthetic oligonucleotide: CBLB-2005
aaaaatgatgaattgaaatc

SEQ ID NO: 8616 - DNA, 17 bp, Artificial Sequence
  Synthetic oligonucleotide: CBLB-2006
tccaagttacataaaca

SEQ ID NO: 8617 - DNA, 17 bp, Artificial Sequence
  Synthetic oligonucleotide: CBLB-2007
aacttcactttcactct

SEQ ID NO: 8618 - DNA, 17 bp, Artificial Sequence
  Synthetic oligonucleotide: CBLB-2008
gttttaagagcagtgat

SEQ ID NO: 8619 - DNA, 17 bp, Artificial Sequence
  Synthetic oligonucleotide: CBLB-2009
agagcaaaaccaaaagt

SEQ ID NO: 8620 - DNA, 17 bp, Artificial Sequence
  Synthetic oligonucleotide: CBLB-2010
accactgcatcttcctc

SEQ ID NO: 8621 - DNA, 17 bp, Artificial Sequence
  Synthetic oligonucleotide: CBLB-565
attttagttctttaaaa

SEQ ID NO: 8622 - DNA, 17 bp, Artificial Sequence
  Synthetic oligonucleotide: CBLB-2361
ccaaaattcgacctttt

SEQ ID NO: 8623 - DNA, 17 bp, Artificial Sequence
  Synthetic oligonucleotide: CBLB-2013
aatgatgaattgaaatc

SEQ ID NO: 8624 - DNA, 20 bp, Artificial Sequence
  Synthetic oligonucleotide: CBLB-2014
ttgggaataacgactcaccg

SEQ ID NO: 8625 - DNA, 20 bp, Artificial Sequence
  Synthetic oligonucleotide: CBLB-2015
aaatatttactggggaaaga

SEQ ID NO: 8626 - DNA, 20 bp, Artificial Sequence
  Synthetic oligonucleotide: CBLB-1760
aagtcaatctgaatacctta

SEQ ID NO: 8627 - DNA, 20 bp, Artificial Sequence
  Synthetic oligonucleotide: CBLB-2017
tcagtatcctaccttactaa

SEQ ID NO: 8628 - DNA, 17 bp, Artificial Sequence
  Synthetic oligonucleotide: CBLB-2018
ggaataacgactcaccg

SEQ ID NO: 8629 - DNA, 17 bp, Artificial Sequence
  Synthetic oligonucleotide: CBLB-2019
tatttactggggaaaga

SEQ ID NO: 8630 - DNA, 17 bp, Artificial Sequence
  Synthetic oligonucleotide: CBLB-1854
tcaatctgaatacctta

SEQ ID NO: 8631 - DNA, 17 bp, Artificial Sequence
  Synthetic oligonucleotide: CBLB-2021
gtatcctaccttactaa

SEQ ID NO: 8632 - DNA, 20 bp, Artificial Sequence
  Synthetic oligonucleotide: CBLB-1998
ttctccaagttacataaaca

SEQ ID NO: 8633 - DNA, 20 bp, Artificial Sequence
  Synthetic oligonucleotide: CBLB-2023
aatattttcagtatcatacc

SEQ ID NO: 8634 - DNA, 20 bp, Artificial Sequence
  Synthetic oligonucleotide: CBLB-2024
tctctggatactgacaccca

SEQ ID NO: 8635 - DNA, 20 bp, Artificial Sequence
  Synthetic oligonucleotide: CBLB-2025
gagtaaatctctgtaaggta

SEQ ID NO: 8636 - DNA, 17 bp, Artificial Sequence
  Synthetic oligonucleotide: CBLB-2006
tccaagttacataaaca

SEQ ID NO: 8637 - DNA, 17 bp, Artificial Sequence
  Synthetic oligonucleotide: CBLB-2027
attttcagtatcatacc

SEQ ID NO: 8638 - DNA, 17 bp, Artificial Sequence
  Synthetic oligonucleotide: CBLB-2028
ctggatactgacaccca

SEQ ID NO: 8639 - DNA, 17 bp, Artificial Sequence
  Synthetic oligonucleotide: CBLB-2029
taaatctctgtaaggta

SEQ ID NO: 8640 - RNA, 17 nt, Artificial Sequence
  Synthetic oligonucleotide: FAS-32
gacugacaucaacucca

SEQ ID NO: 8641 - RNA, 20 nt, Artificial Sequence
  Synthetic oligonucleotide: FAS-60
gacugcgugcccugccaaga

SEQ ID NO: 8642 - RNA, 20 nt, Artificial Sequence
  Synthetic oligonucleotide: FAS-3
gagggcucaccagagguagg

SEQ ID NO: 8643 - RNA, 17 nt, Artificial Sequence
  Synthetic oligonucleotide: FAS-85
gcgugcccugccaagaa

SEQ ID NO: 8644 - RNA, 20 nt, Artificial Sequence
  Synthetic oligonucleotide: FAS-57
gcuagggacugcacagucaa

SEQ ID NO: 8645 - RNA, 17 nt, Artificial Sequence
  Synthetic oligonucleotide: FAS-9
gcucaccagagguagga

SEQ ID NO: 8646 - RNA, 17 nt, Artificial Sequence
  Synthetic oligonucleotide: FAS-83
ggacugcacagucaaug

SEQ ID NO: 8647 - RNA, 17 nt, Artificial Sequence
  Synthetic oligonucleotide: FAS-8
ggcucaccagagguagg

SEQ ID NO: 8648 - RNA, 20 nt, Artificial Sequence
  Synthetic oligonucleotide: FAS-13
gugacugacaucaacuccaa

SEQ ID NO: 8649 - RNA, 20 nt, Artificial Sequence
  Synthetic oligonucleotide: FAS-22
guguaacauaccuggaggac

SEQ ID NO: 8650 - RNA, 20 nt, Artificial Sequence
  Synthetic oligonucleotide: FAS-17
guugagacucagaacuugga

SEQ ID NO: 8651 - RNA, 17 nt, Artificial Sequence
  Synthetic oligonucleotide: FAS-40
guuuuguguaacauacc

SEQ ID NO: 8652 - RNA, 20 nt, Artificial Sequence
  Synthetic oligonucleotide: FAS-61
acugcgugcccugccaagaa

SEQ ID NO: 8653 - RNA, 20 nt, Artificial Sequence
  Synthetic oligonucleotide: FAS-4
agggcucaccagagguagga

SEQ ID NO: 8654 - RNA, 17 nt, Artificial Sequence
  Synthetic oligonucleotide: FAS-45
agggcuuauggcagaau

SEQ ID NO: 8655 - RNA, 20 nt, Artificial Sequence
  Synthetic oligonucleotide: FAS-30
cacuugggcauuaacacuuu

SEQ ID NO: 8656 - RNA, 20 nt, Artificial Sequence
  Synthetic oligonucleotide: FAS-2
caucuggacccuccuaccuc

SEQ ID NO: 8657 - RNA, 20 nt, Artificial Sequence
  Synthetic oligonucleotide: FAS-58
cuagggacugcacagucaau

SEQ ID NO: 8658 - RNA, 17 nt, Artificial Sequence
  Synthetic oligonucleotide: FAS-42
uaacauaccuggaggac

SEQ ID NO: 8659 - RNA, 20 nt, Artificial Sequence
  Synthetic oligonucleotide: FAS-59
uagggacugcacagucaaug

SEQ ID NO: 8660 - RNA, 17 nt, Artificial Sequence
  Synthetic oligonucleotide: FAS-90
ucuacaucuucugcauu

SEQ ID NO: 8661 - RNA, 20 nt, Artificial Sequence
  Synthetic oligonucleotide: FAS-72
ucuuggcagggcacgcaguc

SEQ ID NO: 8662 - RNA, 17 nt, Artificial Sequence
  Synthetic oligonucleotide: FAS-84
ugcgugcccugccaaga

SEQ ID NO: 8663 - RNA, 17 nt, Artificial Sequence
  Synthetic oligonucleotide: FAS-96
uggcagggcacgcaguc

SEQ ID NO: 8664 - RNA, 20 nt, Artificial Sequence
  Synthetic oligonucleotide: FAS-23
uguaacauaccuggaggaca

SEQ ID NO: 8665 - RNA, 17 nt, Artificial Sequence
  Synthetic oligonucleotide: FAS-41
uuguguaacauaccugg

SEQ ID NO: 8666 - RNA, 17 nt, Artificial Sequence
  Synthetic oligonucleotide: FAS-38
gaaggccugcaucauga

SEQ ID NO: 8667 - RNA, 20 nt, Artificial Sequence
  Synthetic oligonucleotide: FAS-25
gacagggcuuauggcagaau

SEQ ID NO: 8668 - RNA, 17 nt, Artificial Sequence
  Synthetic oligonucleotide: FAS-37
gagacucagaacuugga

SEQ ID NO: 8669 - RNA, 20 nt, Artificial Sequence
  Synthetic oligonucleotide: FAS-5
gaggguccagaugcccagca

SEQ ID NO: 8670 - RNA, 20 nt, Artificial Sequence
  Synthetic oligonucleotide: FAS-20
gauguuuuguguaacauacc

SEQ ID NO: 8671 - RNA, 17 nt, Artificial Sequence
  Synthetic oligonucleotide: FAS-92
gcauuuggaagaaaaau

SEQ ID NO: 8672 - RNA, 17 nt, Artificial Sequence
  Synthetic oligonucleotide: FAS-86
gcccugccaagaaggga

SEQ ID NO: 8673 - RNA, 20 nt, Artificial Sequence
  Synthetic oligonucleotide: FAS-73
gcuuuccuuucaccugccca

SEQ ID NO: 8674 - RNA, 20 nt, Artificial Sequence
  Synthetic oligonucleotide: FAS-29
ggaguugaugucagucacuu

SEQ ID NO: 8675 - RNA, 20 nt, Artificial Sequence
  Synthetic oligonucleotide: FAS-56
ggcaggugaaaggaaagcua

SEQ ID NO: 8676 - RNA, 17 nt, Artificial Sequence
  Synthetic oligonucleotide: FAS-82
gggacugcacagucaau

SEQ ID NO: 8677 - RNA, 20 nt, Artificial Sequence
  Synthetic oligonucleotide: FAS-55
gggcaggugaaaggaaagcu

SEQ ID NO: 8678 - RNA, 17 nt, Artificial Sequence
  Synthetic oligonucleotide: FAS-10
gguccagaugcccagca

SEQ ID NO: 8679 - RNA, 20 nt, Artificial Sequence
  Synthetic oligonucleotide: FAS-70
guacuccuucccuucuuggc

SEQ ID NO: 8680 - RNA, 17 nt, Artificial Sequence
  Synthetic oligonucleotide: FAS-49
guugaugucagucacuu

SEQ ID NO: 8681 - RNA, 20 nt, Artificial Sequence
  Synthetic oligonucleotide: FAS-21
guuuuguguaacauaccugg

SEQ ID NO: 8682 - RNA, 17 nt, Artificial Sequence
  Synthetic oligonucleotide: FAS-43
aacauaccuggaggaca

SEQ ID NO: 8683 - RNA, 20 nt, Artificial Sequence
  Synthetic oligonucleotide: FAS-51
acacuugcuccuuuuuuccu

SEQ ID NO: 8684 - RNA, 17 nt, Artificial Sequence
  Synthetic oligonucleotide: FAS-98
accugcccaaggaaaaa

SEQ ID NO: 8685 - RNA, 20 nt, Artificial Sequence
  Synthetic oligonucleotide: FAS-15
acuccaagggauuggaauug

SEQ ID NO: 8686 - RNA, 17 nt, Artificial Sequence
  Synthetic oligonucleotide: FAS-33
acugacaucaacuccaa

SEQ ID NO: 8687 - RNA, 20 nt, Artificial Sequence
  Synthetic oligonucleotide: FAS-26
agaauuggccaucaugaugc

SEQ ID NO: 8688 - RNA, 20 nt, Artificial Sequence
  Synthetic oligonucleotide: FAS-63
agauguagauugugugauga

SEQ ID NO: 8689 - RNA, 20 nt, Artificial Sequence
  Synthetic oligonucleotide: FAS-64
agauugugugaugaaggaca

SEQ ID NO: 8690 - RNA, 17 nt, Artificial Sequence
  Synthetic oligonucleotide: FAS-81
agggacugcacagucaa

SEQ ID NO: 8691 - RNA, 17 nt, Artificial Sequence
  Synthetic oligonucleotide: FAS-80
aggugaaaggaaagcua

SEQ ID NO: 8692 - RNA, 20 nt, Artificial Sequence
  Synthetic oligonucleotide: FAS-12
agugacugacaucaacucca

SEQ ID NO: 8693 - RNA, 17 nt, Artificial Sequence
  Synthetic oligonucleotide: FAS-36
aguugagacucagaacu

SEQ ID NO: 8694 - RNA, 17 nt, Artificial Sequence
  Synthetic oligonucleotide: FAS-48
aguugaugucagucacu

SEQ ID NO: 8695 - RNA, 17 nt, Artificial Sequence
  Synthetic oligonucleotide: FAS-46
auuggccaucaugaugc

SEQ ID NO: 8696 - RNA, 20 nt, Artificial Sequence
  Synthetic oligonucleotide: FAS-1
caacaaccaugcugggcauc

SEQ ID NO: 8697 - RNA, 17 nt, Artificial Sequence
  Synthetic oligonucleotide: FAS-6
caaccaugcugggcauc

SEQ ID NO: 8698 - RNA, 20 nt, Artificial Sequence
  Synthetic oligonucleotide: FAS-66
caaucuacaucuucugcauu

SEQ ID NO: 8699 - RNA, 20 nt, Artificial Sequence
  Synthetic oligonucleotide: FAS-52
cacuugcuccuuuuuuccuu

SEQ ID NO: 8700 - RNA, 17 nt, Artificial Sequence
  Synthetic oligonucleotide: FAS-79
caggugaaaggaaagcu

SEQ ID NO: 8701 - RNA, 17 nt, Artificial Sequence
  Synthetic oligonucleotide: FAS-39
cauaagcccuguccucc

SEQ ID NO: 8702 - RNA, 17 nt, Artificial Sequence
  Synthetic oligonucleotide: FAS-34
caucaacuccaagggau

SEQ ID NO: 8703 - RNA, 17 nt, Artificial Sequence
  Synthetic oligonucleotide: FAS-35
ccaagggauuggaauug

SEQ ID NO: 8704 - RNA, 17 nt, Artificial Sequence
  Synthetic oligonucleotide: FAS-47
ccucaauuccaaucccu

SEQ ID NO: 8705 - RNA, 20 nt, Artificial Sequence
  Synthetic oligonucleotide: FAS-62
cgugcccugccaagaaggga

SEQ ID NO: 8706 - RNA, 17 nt, Artificial Sequence
  Synthetic oligonucleotide: FAS-94
cuccuucccuucuuggc

SEQ ID NO: 8707 - RNA, 17 nt, Artificial Sequence
  Synthetic oligonucleotide: FAS-7
cuggacccuccuaccuc

SEQ ID NO: 8708 - RNA, 17 nt, Artificial Sequence
  Synthetic oligonucleotide: FAS-44
cuggaggacagggcuua

SEQ ID NO: 8709 - RNA, 20 nt, Artificial Sequence
  Synthetic oligonucleotide: FAS-69
cuguguacuccuucccuucu

SEQ ID NO: 8710 - RNA, 20 nt, Artificial Sequence
  Synthetic oligonucleotide: FAS-27
cuuccucaauuccaaucccu

SEQ ID NO: 8711 - RNA, 17 nt, Artificial Sequence
  Synthetic oligonucleotide: FAS-75
cuugcuccuuuuuuccu

SEQ ID NO: 8712 - RNA, 17 nt, Artificial Sequence
  Synthetic oligonucleotide: FAS-89
uaaaaugcaauugaaag

SEQ ID NO: 8713 - RNA, 20 nt, Artificial Sequence
  Synthetic oligonucleotide: FAS-16
uacaguugagacucagaacu

SEQ ID NO: 8714 - RNA, 20 nt, Artificial Sequence
  Synthetic oligonucleotide: FAS-24
uaccuggaggacagggcuua

SEQ ID NO: 8715 - RNA, 20 nt, Artificial Sequence
  Synthetic oligonucleotide: FAS-71
uacuccuucccuucuuggca

SEQ ID NO: 8716 - RNA, 17 nt, Artificial Sequence
  Synthetic oligonucleotide: FAS-31
ucaugcuuuuauuuuac

SEQ ID NO: 8717 - RNA, 17 nt, Artificial Sequence
  Synthetic oligonucleotide: FAS-95
uccuucccuucuuggca

SEQ ID NO: 8718 - RNA, 17 nt, Artificial Sequence
  Synthetic oligonucleotide: FAS-77
uccuuuuuuccuugggc

SEQ ID NO: 8719 - RNA, 20 nt, Artificial Sequence
  Synthetic oligonucleotide: FAS-68
ucugcauuuggaagaaaaau

SEQ ID NO: 8720 - RNA, 20 nt, Artificial Sequence
  Synthetic oligonucleotide: FAS-65
ucuuaaaaugcaauugaaag

SEQ ID NO: 8721 - RNA, 20 nt, Artificial Sequence
  Synthetic oligonucleotide: FAS-11
ucuucaugcuuuuauuuuac

SEQ ID NO: 8722 - RNA, 20 nt, Artificial Sequence
  Synthetic oligonucleotide: FAS-14
ugacaucaacuccaagggau

SEQ ID NO: 8723 - RNA, 17 nt, Artificial Sequence
  Synthetic oligonucleotide: FAS-91
ugcauuuggaagaaaaa

SEQ ID NO: 8724 - RNA, 20 nt, Artificial Sequence
  Synthetic oligonucleotide: FAS-19
ugccauaagcccuguccucc

SEQ ID NO: 8725 - RNA, 20 nt, Artificial Sequence
  Synthetic oligonucleotide: FAS-53
ugcuccuuuuuuccuugggc

SEQ ID NO: 8726 - RNA, 20 nt, Artificial Sequence
  Synthetic oligonucleotide: FAS-28
uggaguugaugucagucacu

SEQ ID NO: 8727 - RNA, 17 nt, Artificial Sequence
  Synthetic oligonucleotide: FAS-93
uguacuccuucccuucu

SEQ ID NO: 8728 - RNA, 17 nt, Artificial Sequence
  Synthetic oligonucleotide: FAS-87
uguagauugugugauga

SEQ ID NO: 8729 - RNA, 20 nt, Artificial Sequence
  Synthetic oligonucleotide: FAS-74
uucaccugcccaaggaaaaa

SEQ ID NO: 8730 - RNA, 17 nt, Artificial Sequence
  Synthetic oligonucleotide: FAS-78
uuccuugggcaggugaa

SEQ ID NO: 8731 - RNA, 17 nt, Artificial Sequence
  Synthetic oligonucleotide: FAS-97
uuccuuucaccugccca

SEQ ID NO: 8732 - RNA, 20 nt, Artificial Sequence
  Synthetic oligonucleotide: FAS-67
uucugcauuuggaagaaaaa

SEQ ID NO: 8733 - RNA, 17 nt, Artificial Sequence
  Synthetic oligonucleotide: FAS-76
uugcuccuuuuuuccuu

SEQ ID NO: 8734 - RNA, 20 nt, Artificial Sequence
  Synthetic oligonucleotide: FAS-18
uuggaaggccugcaucauga

SEQ ID NO: 8735 - RNA, 17 nt, Artificial Sequence
  Synthetic oligonucleotide: FAS-50
uugggcauuaacacuuu

SEQ ID NO: 8736 - RNA, 17 nt, Artificial Sequence
  Synthetic oligonucleotide: FAS-88
uugugugaugaaggaca

SEQ ID NO: 8737 - RNA, 20 nt, Artificial Sequence
  Synthetic oligonucleotide: FAS-54
uuuuuccuugggcaggugaa

SEQ ID NO: 8738 - RNA, 20 nt, Artificial Sequence
  Synthetic oligonucleotide: FAS-245
aguuuccaaacugauuuucu

SEQ ID NO: 8739 - RNA, 20 nt, Artificial Sequence
  Synthetic oligonucleotide: FAS-246
ugauuuucuaggcuuagaag

SEQ ID NO: 8740 - RNA, 20 nt, Artificial Sequence
  Synthetic oligonucleotide: FAS-247
aaguggaaauaaacugcacc

SEQ ID NO: 8741 - RNA, 20 nt, Artificial Sequence
  Synthetic oligonucleotide: FAS-248
uuuuuuucuagaugugaaca

SEQ ID NO: 8742 - RNA, 20 nt, Artificial Sequence
  Synthetic oligonucleotide: FAS-249
augugaacauggaaucauca

SEQ ID NO: 8743 - RNA, 20 nt, Artificial Sequence
  Synthetic oligonucleotide: FAS-250
cagcaacaccaagugcaaag

SEQ ID NO: 8744 - RNA, 20 nt, Artificial Sequence
  Synthetic oligonucleotide: FAS-251
aacaccaagugcaaagagga

SEQ ID NO: 8745 - RNA, 20 nt, Artificial Sequence
  Synthetic oligonucleotide: FAS-252
ggaagguaauuauuuuuuua

SEQ ID NO: 8746 - RNA, 20 nt, Artificial Sequence
  Synthetic oligonucleotide: FAS-253
uguccaauguuccaaccuac

SEQ ID NO: 8747 - RNA, 20 nt, Artificial Sequence
  Synthetic oligonucleotide: FAS-254
uacaggauccagaucuaacu

SEQ ID NO: 8748 - RNA, 20 nt, Artificial Sequence
  Synthetic oligonucleotide: FAS-255
acaggauccagaucuaacuu

SEQ ID NO: 8749 - RNA, 20 nt, Artificial Sequence
  Synthetic oligonucleotide: FAS-256
caggauccagaucuaacuug

SEQ ID NO: 8750 - RNA, 20 nt, Artificial Sequence
  Synthetic oligonucleotide: FAS-257
gauccagaucuaacuugggg

SEQ ID NO: 8751 - RNA, 20 nt, Artificial Sequence
  Synthetic oligonucleotide: FAS-258
ugccaauuccacuaauuguu

SEQ ID NO: 8752 - RNA, 20 nt, Artificial Sequence
  Synthetic oligonucleotide: FAS-259
gccaauuccacuaauuguuu

SEQ ID NO: 8753 - RNA, 20 nt, Artificial Sequence
  Synthetic oligonucleotide: FAS-260
ccaauuccacuaauuguuug

SEQ ID NO: 8754 - RNA, 20 nt, Artificial Sequence
  Synthetic oligonucleotide: FAS-261
uguucuuucagugaagagaa

SEQ ID NO: 8755 - RNA, 20 nt, Artificial Sequence
  Synthetic oligonucleotide: FAS-262
aacaugcagaaagcacagaa

SEQ ID NO: 8756 - RNA, 20 nt, Artificial Sequence
  Synthetic oligonucleotide: FAS-263
aagcacagaaaggaaaacca

SEQ ID NO: 8757 - RNA, 20 nt, Artificial Sequence
  Synthetic oligonucleotide: FAS-264
ucuccaacuuuaaauccugu

SEQ ID NO: 8758 - RNA, 20 nt, Artificial Sequence
  Synthetic oligonucleotide: FAS-265
aauccuguagguauugaaau

SEQ ID NO: 8759 - RNA, 20 nt, Artificial Sequence
  Synthetic oligonucleotide: FAS-266
gcuuccauuuuuugcuuucu

SEQ ID NO: 8760 - RNA, 20 nt, Artificial Sequence
  Synthetic oligonucleotide: FAS-267
uuuugcuuucuaggaaacag

SEQ ID NO: 8761 - RNA, 20 nt, Artificial Sequence
  Synthetic oligonucleotide: FAS-268
acaguggcaauaaauuuauc

SEQ ID NO: 8762 - RNA, 20 nt, Artificial Sequence
  Synthetic oligonucleotide: FAS-269
ggcaauaaauuuaucuggua

SEQ ID NO: 8763 - RNA, 20 nt, Artificial Sequence
  Synthetic oligonucleotide: FAS-270
aaauauaucaccacuauugc

SEQ ID NO: 8764 - RNA, 20 nt, Artificial Sequence
  Synthetic oligonucleotide: FAS-271
augacacuaagucaaguuaa

SEQ ID NO: 8765 - RNA, 20 nt, Artificial Sequence
  Synthetic oligonucleotide: FAS-272
aaaggcuuuguucgaaagaa

SEQ ID NO: 8766 - RNA, 20 nt, Artificial Sequence
  Synthetic oligonucleotide: FAS-273
aaguucaacugcuucguaau

SEQ ID NO: 8767 - RNA, 20 nt, Artificial Sequence
  Synthetic oligonucleotide: FAS-274
cguaauuggcaucaacuuca

SEQ ID NO: 8768 - RNA, 20 nt, Artificial Sequence
  Synthetic oligonucleotide: FAS-275
aauucagacuaucauccuca

SEQ ID NO: 8769 - RNA, 20 nt, Artificial Sequence
  Synthetic oligonucleotide: FAS-276
cagaaaugaaauccaaagcu

SEQ ID NO: 8770 - RNA, 17 nt, Artificial Sequence
  Synthetic oligonucleotide: FAS-277
uuccaaacugauuuucu

SEQ ID NO: 8771 - RNA, 17 nt, Artificial Sequence
  Synthetic oligonucleotide: FAS-278
uuuucuaggcuuagaag

SEQ ID NO: 8772 - RNA, 17 nt, Artificial Sequence
  Synthetic oligonucleotide: FAS-279
uggaaauaaacugcacc

SEQ ID NO: 8773 - RNA, 17 nt, Artificial Sequence
  Synthetic oligonucleotide: FAS-280
uuuucuagaugugaaca

SEQ ID NO: 8774 - RNA, 17 nt, Artificial Sequence
  Synthetic oligonucleotide: FAS-281
ugaacauggaaucauca

SEQ ID NO: 8775 - RNA, 17 nt, Artificial Sequence
  Synthetic oligonucleotide: FAS-282
caacaccaagugcaaag

SEQ ID NO: 8776 - RNA, 17 nt, Artificial Sequence
  Synthetic oligonucleotide: FAS-283
accaagugcaaagagga

SEQ ID NO: 8777 - RNA, 17 nt, Artificial Sequence
  Synthetic oligonucleotide: FAS-284
agguaauuauuuuuuua

SEQ ID NO: 8778 - RNA, 17 nt, Artificial Sequence
  Synthetic oligonucleotide: FAS-285
ccaauguuccaaccuac

SEQ ID NO: 8779 - RNA, 17 nt, Artificial Sequence
  Synthetic oligonucleotide: FAS-286
aggauccagaucuaacu

SEQ ID NO: 8780 - RNA, 17 nt, Artificial Sequence
  Synthetic oligonucleotide: FAS-287
ggauccagaucuaacuu

SEQ ID NO: 8781 - RNA, 17 nt, Artificial Sequence
  Synthetic oligonucleotide: FAS-288
gauccagaucuaacuug

SEQ ID NO: 8782 - RNA, 17 nt, Artificial Sequence
  Synthetic oligonucleotide: FAS-289
ccagaucuaacuugggg

SEQ ID NO: 8783 - RNA, 17 nt, Artificial Sequence
  Synthetic oligonucleotide: FAS-290
caauuccacuaauuguu

SEQ ID NO: 8784 - RNA, 17 nt, Artificial Sequence
  Synthetic oligonucleotide: FAS-291
aauuccacuaauuguuu

SEQ ID NO: 8785 - RNA, 17 nt, Artificial Sequence
  Synthetic oligonucleotide: FAS-292
auuccacuaauuguuug

SEQ ID NO: 8786 - RNA, 17 nt, Artificial Sequence
  Synthetic oligonucleotide: FAS-293
ucuuucagugaagagaa

SEQ ID NO: 8787 - RNA, 17 nt, Artificial Sequence
  Synthetic oligonucleotide: FAS-294
augcagaaagcacagaa

SEQ ID NO: 8788 - RNA, 17 nt, Artificial Sequence
  Synthetic oligonucleotide: FAS-295
cacagaaaggaaaacca

SEQ ID NO: 8789 - RNA, 17 nt, Artificial Sequence
  Synthetic oligonucleotide: FAS-296
ccaacuuuaaauccugu

SEQ ID NO: 8790 - RNA, 17 nt, Artificial Sequence
  Synthetic oligonucleotide: FAS-297
ccuguagguauugaaau

SEQ ID NO: 8791 - RNA, 17 nt, Artificial Sequence
  Synthetic oligonucleotide: FAS-298
uccauuuuuugcuuucu

SEQ ID NO: 8792 - RNA, 17 nt, Artificial Sequence
  Synthetic oligonucleotide: FAS-299
ugcuuucuaggaaacag

SEQ ID NO: 8793 - RNA, 17 nt, Artificial Sequence
  Synthetic oligonucleotide: FAS-300
guggcaauaaauuuauc

SEQ ID NO: 8794 - RNA, 17 nt, Artificial Sequence
  Synthetic oligonucleotide: FAS-301
aauaaauuuaucuggua

SEQ ID NO: 8795 - RNA, 17 nt, Artificial Sequence
  Synthetic oligonucleotide: FAS-302
uauaucaccacuauugc

SEQ ID NO: 8796 - RNA, 17 nt, Artificial Sequence
  Synthetic oligonucleotide: FAS-303
acacuaagucaaguuaa

SEQ ID NO: 8797 - RNA, 17 nt, Artificial Sequence
  Synthetic oligonucleotide: FAS-304
ggcuuuguucgaaagaa

SEQ ID NO: 8798 - RNA, 17 nt, Artificial Sequence
  Synthetic oligonucleotide: FAS-305
uucaacugcuucguaau

SEQ ID NO: 8799 - RNA, 17 nt, Artificial Sequence
  Synthetic oligonucleotide: FAS-306
aauuggcaucaacuuca

SEQ ID NO: 8800 - RNA, 17 nt, Artificial Sequence
  Synthetic oligonucleotide: FAS-307
ucagacuaucauccuca

SEQ ID NO: 8801 - RNA, 17 nt, Artificial Sequence
  Synthetic oligonucleotide: FAS-308
aaaugaaauccaaagcu

SEQ ID NO: 8802 - RNA, 20 nt, Artificial Sequence
  Synthetic oligonucleotide: FAS-309
uuucacucuagaccaagcuu

SEQ ID NO: 8803 - RNA, 20 nt, Artificial Sequence
  Synthetic oligonucleotide: FAS-310
agucacuaguaauguccuug

SEQ ID NO: 8804 - RNA, 20 nt, Artificial Sequence
  Synthetic oligonucleotide: FAS-311
cucugcaagaguacaaagau

SEQ ID NO: 8805 - RNA, 20 nt, Artificial Sequence
  Synthetic oligonucleotide: FAS-312
cuuucuguucugcugugucu

SEQ ID NO: 8806 - RNA, 20 nt, Artificial Sequence
  Synthetic oligonucleotide: FAS-313
auucuugaucucaucuauuu

SEQ ID NO: 8807 - RNA, 20 nt, Artificial Sequence
  Synthetic oligonucleotide: FAS-314
ugucaugacuccagcaauag

SEQ ID NO: 8808 - RNA, 20 nt, Artificial Sequence
  Synthetic oligonucleotide: FAS-315
guuuccuagaaagcaaaaaa

SEQ ID NO: 8809 - RNA, 20 nt, Artificial Sequence
  Synthetic oligonucleotide: FAS-316
auaccuauuucaauaccuac

SEQ ID NO: 8810 - RNA, 20 nt, Artificial Sequence
  Synthetic oligonucleotide: FAS-317
auaccuacaggauuuaaagu

SEQ ID NO: 8811 - RNA, 20 nt, Artificial Sequence
  Synthetic oligonucleotide: FAS-318
uuggagauucaugagaaccu

SEQ ID NO: 8812 - RNA, 20 nt, Artificial Sequence
  Synthetic oligonucleotide: FAS-319
aacuuaccccaaacaauuag

SEQ ID NO: 8813 - RNA, 20 nt, Artificial Sequence
  Synthetic oligonucleotide: FAS-320
ccccaaacaauuaguggaau

SEQ ID NO: 8814 - RNA, 20 nt, Artificial Sequence
  Synthetic oligonucleotide: FAS-321
aagccaccccaaguuagauc

SEQ ID NO: 8815 - RNA, 20 nt, Artificial Sequence
  Synthetic oligonucleotide: FAS-322
aaguuagaucuggauccugu

SEQ ID NO: 8816 - RNA, 20 nt, Artificial Sequence
  Synthetic oligonucleotide: FAS-323
uagaucuggauccuguaggu

SEQ ID NO: 8817 - RNA, 20 nt, Artificial Sequence
  Synthetic oligonucleotide: FAS-324
gauccuguagguuggaacau

SEQ ID NO: 8818 - RNA, 20 nt, Artificial Sequence
  Synthetic oligonucleotide: FAS-325
auuaccuuccucuuugcacu

SEQ ID NO: 8819 - RNA, 20 nt, Artificial Sequence
  Synthetic oligonucleotide: FAS-326
cucuuugcacuugguguugc

SEQ ID NO: 8820 - RNA, 20 nt, Artificial Sequence
  Synthetic oligonucleotide: FAS-327
acaucuagaaaaaaaaauac

SEQ ID NO: 8821 - RNA, 20 nt, Artificial Sequence
  Synthetic oligonucleotide: FAS-328
gagaaagacuaaaacuuacu

SEQ ID NO: 8822 - RNA, 20 nt, Artificial Sequence
  Synthetic oligonucleotide: FAS-329
acuaaaacuuacuuggugca

SEQ ID NO: 8823 - RNA, 20 nt, Artificial Sequence
  Synthetic oligonucleotide: FAS-330
cuaaaacuuacuuggugcaa

SEQ ID NO: 8824 - RNA, 20 nt, Artificial Sequence
  Synthetic oligonucleotide: FAS-331
guagaguuacaaaaaaaguu

SEQ ID NO: 8825 - RNA, 20 nt, Artificial Sequence
  Synthetic oligonucleotide: FAS-332
guuugguuuacaucugcacu

SEQ ID NO: 8826 - RNA, 20 nt, Artificial Sequence
  Synthetic oligonucleotide: FAS-333
uacaucugcacuugguauuc

SEQ ID NO: 8827 - RNA, 20 nt, Artificial Sequence
  Synthetic oligonucleotide: FAS-334
acaucugcacuugguauucu

SEQ ID NO: 8828 - RNA, 20 nt, Artificial Sequence
  Synthetic oligonucleotide: FAS-335
ugcacuugguauucuggguc

SEQ ID NO: 8829 - RNA, 20 nt, Artificial Sequence
  Synthetic oligonucleotide: FAS-336
gcacuugguauucugggucc

SEQ ID NO: 8830 - RNA, 20 nt, Artificial Sequence
  Synthetic oligonucleotide: FAS-337
cuaagccuagaaaaucaguu

SEQ ID NO: 8831 - RNA, 17 nt, Artificial Sequence
  Synthetic oligonucleotide: FAS-338
cacucuagaccaagcuu

SEQ ID NO: 8832 - RNA, 17 nt, Artificial Sequence
  Synthetic oligonucleotide: FAS-339
cacuaguaauguccuug

SEQ ID NO: 8833 - RNA, 17 nt, Artificial Sequence
  Synthetic oligonucleotide: FAS-340
ugcaagaguacaaagau

SEQ ID NO: 8834 - RNA, 17 nt, Artificial Sequence
  Synthetic oligonucleotide: FAS-341
ucuguucugcugugucu

SEQ ID NO: 8835 - RNA, 17 nt, Artificial Sequence
  Synthetic oligonucleotide: FAS-342
cuugaucucaucuauuu

SEQ ID NO: 8836 - RNA, 17 nt, Artificial Sequence
  Synthetic oligonucleotide: FAS-343
caugacuccagcaauag

SEQ ID NO: 8837 - RNA, 17 nt, Artificial Sequence
  Synthetic oligonucleotide: FAS-344
uccuagaaagcaaaaaa

SEQ ID NO: 8838 - RNA, 17 nt, Artificial Sequence
  Synthetic oligonucleotide: FAS-345
ccuauuucaauaccuac

SEQ ID NO: 8839 - RNA, 17 nt, Artificial Sequence
  Synthetic oligonucleotide: FAS-346
ccuacaggauuuaaagu

SEQ ID NO: 8840 - RNA, 17 nt, Artificial Sequence
  Synthetic oligonucleotide: FAS-347
gagauucaugagaaccu

SEQ ID NO: 8841 - RNA, 17 nt, Artificial Sequence
  Synthetic oligonucleotide: FAS-348
uuaccccaaacaauuag

SEQ ID NO: 8842 - RNA, 17 nt, Artificial Sequence
  Synthetic oligonucleotide: FAS-349
caaacaauuaguggaau

SEQ ID NO: 8843 - RNA, 17 nt, Artificial Sequence
  Synthetic oligonucleotide: FAS-350
ccaccccaaguuagauc

SEQ ID NO: 8844 - RNA, 17 nt, Artificial Sequence
  Synthetic oligonucleotide: FAS-351
uuagaucuggauccugu

SEQ ID NO: 8845 - RNA, 17 nt, Artificial Sequence
  Synthetic oligonucleotide: FAS-352
aucuggauccuguaggu

SEQ ID NO: 8846 - RNA, 17 nt, Artificial Sequence
  Synthetic oligonucleotide: FAS-353
ccuguagguuggaacau

SEQ ID NO: 8847 - RNA, 17 nt, Artificial Sequence
  Synthetic oligonucleotide: FAS-354
accuuccucuuugcacu

SEQ ID NO: 8848 - RNA, 17 nt, Artificial Sequence
  Synthetic oligonucleotide: FAS-355
uuugcacuugguguugc

SEQ ID NO: 8849 - RNA, 17 nt, Artificial Sequence
  Synthetic oligonucleotide: FAS-356
ucuagaaaaaaaaauac

SEQ ID NO: 8850 - RNA, 17 nt, Artificial Sequence
  Synthetic oligonucleotide: FAS-357
aaagacuaaaacuuacu

SEQ ID NO: 8851 - RNA, 17 nt, Artificial Sequence
  Synthetic oligonucleotide: FAS-358
aaaacuuacuuggugca

SEQ ID NO: 8852 - RNA, 17 nt, Artificial Sequence
  Synthetic oligonucleotide: FAS-359
aaacuuacuuggugcaa

SEQ ID NO: 8853 - RNA, 17 nt, Artificial Sequence
  Synthetic oligonucleotide: FAS-360
gaguuacaaaaaaaguu

SEQ ID NO: 8854 - RNA, 17 nt, Artificial Sequence
  Synthetic oligonucleotide: FAS-361
ugguuuacaucugcacu

SEQ ID NO: 8855 - RNA, 17 nt, Artificial Sequence
  Synthetic oligonucleotide: FAS-362
aucugcacuugguauuc

SEQ ID NO: 8856 - RNA, 17 nt, Artificial Sequence
  Synthetic oligonucleotide: FAS-363
ucugcacuugguauucu

SEQ ID NO: 8857 - RNA, 17 nt, Artificial Sequence
  Synthetic oligonucleotide: FAS-364
acuugguauucuggguc

SEQ ID NO: 8858 - RNA, 17 nt, Artificial Sequence
  Synthetic oligonucleotide: FAS-365
cuugguauucugggucc

SEQ ID NO: 8859 - RNA, 17 nt, Artificial Sequence
  Synthetic oligonucleotide: FAS-366
agccuagaaaaucaguu

SEQ ID NO: 8860 - RNA, 20 nt, Artificial Sequence
  Synthetic oligonucleotide: FAS-99
ucaacaaccaugcugggcau

SEQ ID NO: 8861 - RNA, 20 nt, Artificial Sequence
  Synthetic oligonucleotide: FAS-100
ucuggacccuccuaccucug

SEQ ID NO: 8862 - RNA, 17 nt, Artificial Sequence
  Synthetic oligonucleotide: FAS-101
acaaccaugcugggcau

SEQ ID NO: 8863 - RNA, 17 nt, Artificial Sequence
  Synthetic oligonucleotide: FAS-102
ggacccuccuaccucug

SEQ ID NO: 8864 - RNA, 20 nt, Artificial Sequence
  Synthetic oligonucleotide: FAS-103
ccgggcaggagagggcucac

SEQ ID NO: 8865 - RNA, 20 nt, Artificial Sequence
  Synthetic oligonucleotide: FAS-104
aggagagggcucaccagagg

SEQ ID NO: 8866 - RNA, 20 nt, Artificial Sequence
  Synthetic oligonucleotide: FAS-105
ggagagggcucaccagaggu

SEQ ID NO: 8867 - RNA, 20 nt, Artificial Sequence
  Synthetic oligonucleotide: FAS-106
agagggcucaccagagguag

SEQ ID NO: 8868 - RNA, 20 nt, Artificial Sequence
  Synthetic oligonucleotide: FAS-107
ccagaugcccagcaugguug

SEQ ID NO: 8869 - RNA, 20 nt, Artificial Sequence
  Synthetic oligonucleotide: FAS-108
cagaugcccagcaugguugu

SEQ ID NO: 8870 - RNA, 20 nt, Artificial Sequence
  Synthetic oligonucleotide: FAS-109
agaugcccagcaugguuguu

SEQ ID NO: 8871 - RNA, 20 nt, Artificial Sequence
  Synthetic oligonucleotide: FAS-110
gaugcccagcaugguuguug

SEQ ID NO: 8872 - RNA, 20 nt, Artificial Sequence
  Synthetic oligonucleotide: FAS-111
augcccagcaugguuguuga

SEQ ID NO: 8873 - RNA, 20 nt, Artificial Sequence
  Synthetic oligonucleotide: FAS-112
ugcccagcaugguuguugag

SEQ ID NO: 8874 - RNA, 17 nt, Artificial Sequence
  Synthetic oligonucleotide: FAS-113
ggcaggagagggcucac

SEQ ID NO: 8875 - RNA, 17 nt, Artificial Sequence
  Synthetic oligonucleotide: FAS-114
agagggcucaccagagg

SEQ ID NO: 8876 - RNA, 17 nt, Artificial Sequence
  Synthetic oligonucleotide: FAS-115
gagggcucaccagaggu

SEQ ID NO: 8877 - RNA, 17 nt, Artificial Sequence
  Synthetic oligonucleotide: FAS-116
gggcucaccagagguag

SEQ ID NO: 8878 - RNA, 17 nt, Artificial Sequence
  Synthetic oligonucleotide: FAS-117
gaugcccagcaugguug

SEQ ID NO: 8879 - RNA, 17 nt, Artificial Sequence
  Synthetic oligonucleotide: FAS-118
augcccagcaugguugu

SEQ ID NO: 8880 - RNA, 17 nt, Artificial Sequence
  Synthetic oligonucleotide: FAS-119
ugcccagcaugguuguu

SEQ ID NO: 8881 - RNA, 17 nt, Artificial Sequence
  Synthetic oligonucleotide: FAS-120
gcccagcaugguuguug

SEQ ID NO: 8882 - RNA, 17 nt, Artificial Sequence
  Synthetic oligonucleotide: FAS-121
cccagcaugguuguuga

SEQ ID NO: 8883 - RNA, 17 nt, Artificial Sequence
  Synthetic oligonucleotide: FAS-122
ccagcaugguuguugag

SEQ ID NO: 8884 - RNA, 20 nt, Artificial Sequence
  Synthetic oligonucleotide: FAS-123
aagugacugacaucaacucc

SEQ ID NO: 8885 - RNA, 20 nt, Artificial Sequence
  Synthetic oligonucleotide: FAS-12
agugacugacaucaacucca

SEQ ID NO: 8886 - RNA, 20 nt, Artificial Sequence
  Synthetic oligonucleotide: FAS-125
cugacaucaacuccaaggga

SEQ ID NO: 8887 - RNA, 20 nt, Artificial Sequence
  Synthetic oligonucleotide: FAS-14
ugacaucaacuccaagggau

SEQ ID NO: 8888 - RNA, 20 nt, Artificial Sequence
  Synthetic oligonucleotide: FAS-127
ucaacuccaagggauuggaa

SEQ ID NO: 8889 - RNA, 20 nt, Artificial Sequence
  Synthetic oligonucleotide: FAS-128
aacuccaagggauuggaauu

SEQ ID NO: 8890 - RNA, 20 nt, Artificial Sequence
  Synthetic oligonucleotide: FAS-15
acuccaagggauuggaauug

SEQ ID NO: 8891 - RNA, 20 nt, Artificial Sequence
  Synthetic oligonucleotide: FAS-130
gaggaagacuguuacuacag

SEQ ID NO: 8892 - RNA, 20 nt, Artificial Sequence
  Synthetic oligonucleotide: FAS-131
cuguuacuacaguugagacu

SEQ ID NO: 8893 - RNA, 20 nt, Artificial Sequence
  Synthetic oligonucleotide: FAS-132
cuacaguugagacucagaac

SEQ ID NO: 8894 - RNA, 20 nt, Artificial Sequence
  Synthetic oligonucleotide: FAS-16
uacaguugagacucagaacu

SEQ ID NO: 8895 - RNA, 20 nt, Artificial Sequence
  Synthetic oligonucleotide: FAS-134
gguauguuacacaaaacauc

SEQ ID NO: 8896 - RNA, 17 nt, Artificial Sequence
  Synthetic oligonucleotide: FAS-135
ugacugacaucaacucc

SEQ ID NO: 8897 - RNA, 17 nt, Artificial Sequence
  Synthetic oligonucleotide: FAS-32
gacugacaucaacucca

SEQ ID NO: 8898 - RNA, 17 nt, Artificial Sequence
  Synthetic oligonucleotide: FAS-137
acaucaacuccaaggga

SEQ ID NO: 8899 - RNA, 17 nt, Artificial Sequence
  Synthetic oligonucleotide: FAS-34
caucaacuccaagggau

SEQ ID NO: 8900 - RNA, 17 nt, Artificial Sequence
  Synthetic oligonucleotide: FAS-139
acuccaagggauuggaa

SEQ ID NO: 8901 - RNA, 17 nt, Artificial Sequence
  Synthetic oligonucleotide: FAS-140
uccaagggauuggaauu

SEQ ID NO: 8902 - RNA, 17 nt, Artificial Sequence
  Synthetic oligonucleotide: FAS-35
ccaagggauuggaauug

SEQ ID NO: 8903 - RNA, 17 nt, Artificial Sequence
  Synthetic oligonucleotide: FAS-142
gaagacuguuacuacag

SEQ ID NO: 8904 - RNA, 17 nt, Artificial Sequence
  Synthetic oligonucleotide: FAS-143
uuacuacaguugagacu

SEQ ID NO: 8905 - RNA, 17 nt, Artificial Sequence
  Synthetic oligonucleotide: FAS-144
caguugagacucagaac

SEQ ID NO: 8906 - RNA, 17 nt, Artificial Sequence
  Synthetic oligonucleotide: FAS-36
aguugagacucagaacu

SEQ ID NO: 8907 - RNA, 17 nt, Artificial Sequence
  Synthetic oligonucleotide: FAS-146
auguuacacaaaacauc

SEQ ID NO: 8908 - RNA, 20 nt, Artificial Sequence
  Synthetic oligonucleotide: FAS-147
ggauguuuuguguaacauac

SEQ ID NO: 8909 - RNA, 20 nt, Artificial Sequence
  Synthetic oligonucleotide: FAS-20
gauguuuuguguaacauacc

SEQ ID NO: 8910 - RNA, 20 nt, Artificial Sequence
  Synthetic oligonucleotide: FAS-149
uguuuuguguaacauaccug

SEQ ID NO: 8911 - RNA, 20 nt, Artificial Sequence
  Synthetic oligonucleotide: FAS-150
uguguaacauaccuggagga

SEQ ID NO: 8912 - RNA, 20 nt, Artificial Sequence
  Synthetic oligonucleotide: FAS-151
cuggaggacagggcuuaugg

SEQ ID NO: 8913 - RNA, 20 nt, Artificial Sequence
  Synthetic oligonucleotide: FAS-152
ugaugcaggccuuccaaguu

SEQ ID NO: 8914 - RNA, 20 nt, Artificial Sequence
  Synthetic oligonucleotide: FAS-153
ucuuccucaauuccaauccc

SEQ ID NO: 8915 - RNA, 20 nt, Artificial Sequence
  Synthetic oligonucleotide: FAS-27
cuuccucaauuccaaucccu

SEQ ID NO: 8916 - RNA, 20 nt, Artificial Sequence
  Synthetic oligonucleotide: FAS-155
uuggaguugaugucagucac

SEQ ID NO: 8917 - RNA, 20 nt, Artificial Sequence
  Synthetic oligonucleotide: FAS-156
ucacuugggcauuaacacuu

SEQ ID NO: 8918 - RNA, 20 nt, Artificial Sequence
  Synthetic oligonucleotide: FAS-157
gauaaucuagcaacagacgu

SEQ ID NO: 8919 - RNA, 20 nt, Artificial Sequence
  Synthetic oligonucleotide: FAS-158
agaaccuguaaaauaaaagc

SEQ ID NO: 8920 - RNA, 20 nt, Artificial Sequence
  Synthetic oligonucleotide: FAS-159
accuguaaaauaaaagcaug

SEQ ID NO: 8921 - RNA, 20 nt, Artificial Sequence
  Synthetic oligonucleotide: FAS-160
cuguaaaauaaaagcaugaa

SEQ ID NO: 8922 - RNA, 17 nt, Artificial Sequence
  Synthetic oligonucleotide: FAS-161
uguuuuguguaacauac

SEQ ID NO: 8923 - RNA, 17 nt, Artificial Sequence
  Synthetic oligonucleotide: FAS-40
guuuuguguaacauacc

SEQ ID NO: 8924 - RNA, 17 nt, Artificial Sequence
  Synthetic oligonucleotide: FAS-163
uuuguguaacauaccug

SEQ ID NO: 8925 - RNA, 17 nt, Artificial Sequence
  Synthetic oligonucleotide: FAS-164
guaacauaccuggagga

SEQ ID NO: 8926 - RNA, 17 nt, Artificial Sequence
  Synthetic oligonucleotide: FAS-165
gaggacagggcuuaugg

SEQ ID NO: 8927 - RNA, 17 nt, Artificial Sequence
  Synthetic oligonucleotide: FAS-166
ugcaggccuuccaaguu

SEQ ID NO: 8928 - RNA, 17 nt, Artificial Sequence
  Synthetic oligonucleotide: FAS-167
uccucaauuccaauccc

SEQ ID NO: 8929 - RNA, 17 nt, Artificial Sequence
  Synthetic oligonucleotide: FAS-47
ccucaauuccaaucccu

SEQ ID NO: 8930 - RNA, 17 nt, Artificial Sequence
  Synthetic oligonucleotide: FAS-169
gaguugaugucagucac

SEQ ID NO: 8931 - RNA, 17 nt, Artificial Sequence
  Synthetic oligonucleotide: FAS-170
cuugggcauuaacacuu

SEQ ID NO: 8932 - RNA, 17 nt, Artificial Sequence
  Synthetic oligonucleotide: FAS-171
aaucuagcaacagacgu

SEQ ID NO: 8933 - RNA, 17 nt, Artificial Sequence
  Synthetic oligonucleotide: FAS-172
accuguaaaauaaaagc

SEQ ID NO: 8934 - RNA, 17 nt, Artificial Sequence
  Synthetic oligonucleotide: FAS-173
uguaaaauaaaagcaug

SEQ ID NO: 8935 - RNA, 17 nt, Artificial Sequence
  Synthetic oligonucleotide: FAS-174
uaaaauaaaagcaugaa

SEQ ID NO: 8936 - RNA, 20 nt, Artificial Sequence
  Synthetic oligonucleotide: FAS-175
aacacuugcuccuuuuuucc

SEQ ID NO: 8937 - RNA, 20 nt, Artificial Sequence
  Synthetic oligonucleotide: FAS-176
cuccuuuuuuccuugggcag

SEQ ID NO: 8938 - RNA, 20 nt, Artificial Sequence
  Synthetic oligonucleotide: FAS-177
uuuuuuccuugggcagguga

SEQ ID NO: 8939 - RNA, 20 nt, Artificial Sequence
  Synthetic oligonucleotide: FAS-54
uuuuuccuugggcaggugaa

SEQ ID NO: 8940 - RNA, 20 nt, Artificial Sequence
  Synthetic oligonucleotide: FAS-179
ugggcaggugaaaggaaagc

SEQ ID NO: 8941 - RNA, 20 nt, Artificial Sequence
  Synthetic oligonucleotide: FAS-55
gggcaggugaaaggaaagcu

SEQ ID NO: 8942 - RNA, 20 nt, Artificial Sequence
  Synthetic oligonucleotide: FAS-181
agcuagggacugcacaguca

SEQ ID NO: 8943 - RNA, 20 nt, Artificial Sequence
  Synthetic oligonucleotide: FAS-57
gcuagggacugcacagucaa

SEQ ID NO: 8944 - RNA, 20 nt, Artificial Sequence
  Synthetic oligonucleotide: FAS-58
cuagggacugcacagucaau

SEQ ID NO: 8945 - RNA, 20 nt, Artificial Sequence
  Synthetic oligonucleotide: FAS-184
ggacugcacagucaaugggg

SEQ ID NO: 8946 - RNA, 20 nt, Artificial Sequence
  Synthetic oligonucleotide: FAS-185
accagacugcgugcccugcc

SEQ ID NO: 8947 - RNA, 20 nt, Artificial Sequence
  Synthetic oligonucleotide: FAS-186
agacugcgugcccugccaag

SEQ ID NO: 8948 - RNA, 20 nt, Artificial Sequence
  Synthetic oligonucleotide: FAS-60
gacugcgugcccugccaaga

SEQ ID NO: 8949 - RNA, 20 nt, Artificial Sequence
  Synthetic oligonucleotide: FAS-61
acugcgugcccugccaagaa

SEQ ID NO: 8950 - RNA, 20 nt, Artificial Sequence
  Synthetic oligonucleotide: FAS-189
gcgugcccugccaagaaggg

SEQ ID NO: 8951 - RNA, 20 nt, Artificial Sequence
  Synthetic oligonucleotide: FAS-62
cgugcccugccaagaaggga

SEQ ID NO: 8952 - RNA, 20 nt, Artificial Sequence
  Synthetic oligonucleotide: FAS-191
gcccauuuuucuuccaaaug

SEQ ID NO: 8953 - RNA, 20 nt, Artificial Sequence
  Synthetic oligonucleotide: FAS-192
cagaagauguagauugugug

SEQ ID NO: 8954 - RNA, 20 nt, Artificial Sequence
  Synthetic oligonucleotide: FAS-193
aagauguagauugugugaug

SEQ ID NO: 8955 - RNA, 20 nt, Artificial Sequence
  Synthetic oligonucleotide: FAS-194
ugugugaugaaggacauggu

SEQ ID NO: 8956 - RNA, 20 nt, Artificial Sequence
  Synthetic oligonucleotide: FAS-195
guaagagucuuaaaaugcaa

SEQ ID NO: 8957 - RNA, 20 nt, Artificial Sequence
  Synthetic oligonucleotide: FAS-196
gagucuuaaaaugcaauuga

SEQ ID NO: 8958 - RNA, 17 nt, Artificial Sequence
  Synthetic oligonucleotide: FAS-197
acuugcuccuuuuuucc

SEQ ID NO: 8959 - RNA, 17 nt, Artificial Sequence
  Synthetic oligonucleotide: FAS-198
cuuuuuuccuugggcag

SEQ ID NO: 8960 - RNA, 17 nt, Artificial Sequence
  Synthetic oligonucleotide: FAS-199
uuuccuugggcagguga

SEQ ID NO: 8961 - RNA, 17 nt, Artificial Sequence
  Synthetic oligonucleotide: FAS-78
uuccuugggcaggugaa

SEQ ID NO: 8962 - RNA, 17 nt, Artificial Sequence
  Synthetic oligonucleotide: FAS-201
gcaggugaaaggaaagc

SEQ ID NO: 8963 - RNA, 17 nt, Artificial Sequence
  Synthetic oligonucleotide: FAS-79
caggugaaaggaaagcu

SEQ ID NO: 8964 - RNA, 17 nt, Artificial Sequence
  Synthetic oligonucleotide: FAS-203
uagggacugcacaguca

SEQ ID NO: 8965 - RNA, 17 nt, Artificial Sequence
  Synthetic oligonucleotide: FAS-81
agggacugcacagucaa

SEQ ID NO: 8966 - RNA, 17 nt, Artificial Sequence
  Synthetic oligonucleotide: FAS-82
gggacugcacagucaau

SEQ ID NO: 8967 - RNA, 17 nt, Artificial Sequence
  Synthetic oligonucleotide: FAS-206
cugcacagucaaugggg

SEQ ID NO: 8968 - RNA, 17 nt, Artificial Sequence
  Synthetic oligonucleotide: FAS-207
agacugcgugcccugcc

SEQ ID NO: 8969 - RNA, 17 nt, Artificial Sequence
  Synthetic oligonucleotide: FAS-208
cugcgugcccugccaag

SEQ ID NO: 8970 - RNA, 17 nt, Artificial Sequence
  Synthetic oligonucleotide: FAS-84
ugcgugcccugccaaga

SEQ ID NO: 8971 - RNA, 17 nt, Artificial Sequence
  Synthetic oligonucleotide: FAS-85
gcgugcccugccaagaa

SEQ ID NO: 8972 - RNA, 17 nt, Artificial Sequence
  Synthetic oligonucleotide: FAS-211
ugcccugccaagaaggg

SEQ ID NO: 8973 - RNA, 17 nt, Artificial Sequence
  Synthetic oligonucleotide: FAS-86
gcccugccaagaaggga

SEQ ID NO: 8974 - RNA, 17 nt, Artificial Sequence
  Synthetic oligonucleotide: FAS-213
cauuuuucuuccaaaug

SEQ ID NO: 8975 - RNA, 17 nt, Artificial Sequence
  Synthetic oligonucleotide: FAS-214
aagauguagauugugug

SEQ ID NO: 8976 - RNA, 17 nt, Artificial Sequence
  Synthetic oligonucleotide: FAS-215
auguagauugugugaug

SEQ ID NO: 8977 - RNA, 17 nt, Artificial Sequence
  Synthetic oligonucleotide: FAS-216
gugaugaaggacauggu

SEQ ID NO: 8978 - RNA, 17 nt, Artificial Sequence
  Synthetic oligonucleotide: FAS-217
agagucuuaaaaugcaa

SEQ ID NO: 8979 - RNA, 17 nt, Artificial Sequence
  Synthetic oligonucleotide: FAS-218
ucuuaaaaugcaauuga

SEQ ID NO: 8980 - RNA, 20 nt, Artificial Sequence
  Synthetic oligonucleotide: FAS-219
acaaucuacaucuucugcau

SEQ ID NO: 8981 - RNA, 20 nt, Artificial Sequence
  Synthetic oligonucleotide: FAS-66
caaucuacaucuucugcauu

SEQ ID NO: 8982 - RNA, 20 nt, Artificial Sequence
  Synthetic oligonucleotide: FAS-221
ucuacaucuucugcauuugg

SEQ ID NO: 8983 - RNA, 20 nt, Artificial Sequence
  Synthetic oligonucleotide: FAS-222
cuucugcauuuggaagaaaa

SEQ ID NO: 8984 - RNA, 20 nt, Artificial Sequence
  Synthetic oligonucleotide: FAS-223
uguacuccuucccuucuugg

SEQ ID NO: 8985 - RNA, 20 nt, Artificial Sequence
  Synthetic oligonucleotide: FAS-224
agcuuuccuuucaccugccc

SEQ ID NO: 8986 - RNA, 20 nt, Artificial Sequence
  Synthetic oligonucleotide: FAS-73
gcuuuccuuucaccugccca

SEQ ID NO: 8987 - RNA, 20 nt, Artificial Sequence
  Synthetic oligonucleotide: FAS-226
uuucaccugcccaaggaaaa

SEQ ID NO: 8988 - RNA, 20 nt, Artificial Sequence
  Synthetic oligonucleotide: FAS-74
uucaccugcccaaggaaaaa

SEQ ID NO: 8989 - RNA, 17 nt, Artificial Sequence
  Synthetic oligonucleotide: FAS-228
aucuacaucuucugcau

SEQ ID NO: 8990 - RNA, 17 nt, Artificial Sequence
  Synthetic oligonucleotide: FAS-90
ucuacaucuucugcauu

SEQ ID NO: 8991 - RNA, 17 nt, Artificial Sequence
  Synthetic oligonucleotide: FAS-230
acaucuucugcauuugg

SEQ ID NO: 8992 - RNA, 17 nt, Artificial Sequence
  Synthetic oligonucleotide: FAS-231
cugcauuuggaagaaaa

SEQ ID NO: 8993 - RNA, 17 nt, Artificial Sequence
  Synthetic oligonucleotide: FAS-232
acuccuucccuucuugg

SEQ ID NO: 8994 - RNA, 17 nt, Artificial Sequence
  Synthetic oligonucleotide: FAS-233
uuuccuuucaccugccc

SEQ ID NO: 8995 - RNA, 17 nt, Artificial Sequence
  Synthetic oligonucleotide: FAS-97
uuccuuucaccugccca

SEQ ID NO: 8996 - RNA, 17 nt, Artificial Sequence
  Synthetic oligonucleotide: FAS-235
caccugcccaaggaaaa

SEQ ID NO: 8997 - RNA, 17 nt, Artificial Sequence
  Synthetic oligonucleotide: FAS-98
accugcccaaggaaaaa

SEQ ID NO: 8998 - RNA, 20 nt, Artificial Sequence
  Synthetic oligonucleotide: FAS-367
ccaaacugauuuucuaggcu

SEQ ID NO: 8999 - RNA, 20 nt, Artificial Sequence
  Synthetic oligonucleotide: FAS-368
cugauuuucuaggcuuagaa

SEQ ID NO: 9000 - RNA, 20 nt, Artificial Sequence
  Synthetic oligonucleotide: FAS-246
ugauuuucuaggcuuagaag

SEQ ID NO: 9001 - RNA, 20 nt, Artificial Sequence
  Synthetic oligonucleotide: FAS-370
gaaguggaaauaaacugcac

SEQ ID NO: 9002 - RNA, 20 nt, Artificial Sequence
  Synthetic oligonucleotide: FAS-371
aaauaaacugcacccggacc

SEQ ID NO: 9003 - RNA, 20 nt, Artificial Sequence
  Synthetic oligonucleotide: FAS-372
uuuuuguaacucuacuguau

SEQ ID NO: 9004 - RNA, 20 nt, Artificial Sequence
  Synthetic oligonucleotide: FAS-373
cuguauuuuuuuuucuagau

SEQ ID NO: 9005 - RNA, 20 nt, Artificial Sequence
  Synthetic oligonucleotide: FAS-374
uuuuuuuucuagaugugaac

SEQ ID NO: 9006 - RNA, 20 nt, Artificial Sequence
  Synthetic oligonucleotide: FAS-248
uuuuuuucuagaugugaaca

SEQ ID NO: 9007 - RNA, 20 nt, Artificial Sequence
  Synthetic oligonucleotide: FAS-376
gaugugaacauggaaucauc

SEQ ID NO: 9008 - RNA, 20 nt, Artificial Sequence
  Synthetic oligonucleotide: FAS-249
augugaacauggaaucauca

SEQ ID NO: 9009 - RNA, 20 nt, Artificial Sequence
  Synthetic oligonucleotide: FAS-378
caccagcaacaccaagugca

SEQ ID NO: 9010 - RNA, 20 nt, Artificial Sequence
  Synthetic oligonucleotide: FAS-379
ccagcaacaccaagugcaaa

SEQ ID NO: 9011 - RNA, 20 nt, Artificial Sequence
  Synthetic oligonucleotide: FAS-250
cagcaacaccaagugcaaag

SEQ ID NO: 9012 - RNA, 20 nt, Artificial Sequence
  Synthetic oligonucleotide: FAS-381
auguccaauguuccaaccua

SEQ ID NO: 9013 - RNA, 20 nt, Artificial Sequence
  Synthetic oligonucleotide: FAS-382
cuacaggauccagaucuaac

SEQ ID NO: 9014 - RNA, 20 nt, Artificial Sequence
  Synthetic oligonucleotide: FAS-254
uacaggauccagaucuaacu

SEQ ID NO: 9015 - RNA, 20 nt, Artificial Sequence
  Synthetic oligonucleotide: FAS-384
uugccaauuccacuaauugu

SEQ ID NO: 9016 - RNA, 20 nt, Artificial Sequence
  Synthetic oligonucleotide: FAS-258
ugccaauuccacuaauuguu

SEQ ID NO: 9017 - RNA, 20 nt, Artificial Sequence
  Synthetic oligonucleotide: FAS-386
aaaauuucuuuguucuuuca

SEQ ID NO: 9018 - RNA, 20 nt, Artificial Sequence
  Synthetic oligonucleotide: FAS-387
auuucuuuguucuuucagug

SEQ ID NO: 9019 - RNA, 20 nt, Artificial Sequence
  Synthetic oligonucleotide: FAS-388
uucuuuguucuuucagugaa

SEQ ID NO: 9020 - RNA, 20 nt, Artificial Sequence
  Synthetic oligonucleotide: FAS-389
uuguucuuucagugaagaga

SEQ ID NO: 9021 - RNA, 20 nt, Artificial Sequence
  Synthetic oligonucleotide: FAS-261
uguucuuucagugaagagaa

SEQ ID NO: 9022 - RNA, 20 nt, Artificial Sequence
  Synthetic oligonucleotide: FAS-391
cagugaagagaaaggaagua

SEQ ID NO: 9023 - RNA, 20 nt, Artificial Sequence
  Synthetic oligonucleotide: FAS-392
aaggaaguacagaaaacaug

SEQ ID NO: 9024 - RNA, 20 nt, Artificial Sequence
  Synthetic oligonucleotide: FAS-393
cagaaaacaugcagaaagca

SEQ ID NO: 9025 - RNA, 20 nt, Artificial Sequence
  Synthetic oligonucleotide: FAS-394
aaacaugcagaaagcacaga

SEQ ID NO: 9026 - RNA, 20 nt, Artificial Sequence
  Synthetic oligonucleotide: FAS-262
aacaugcagaaagcacagaa

SEQ ID NO: 9027 - RNA, 20 nt, Artificial Sequence
  Synthetic oligonucleotide: FAS-396
aaaggaaaaccaagguucuc

SEQ ID NO: 9028 - RNA, 20 nt, Artificial Sequence
  Synthetic oligonucleotide: FAS-397
aacuuuaaauccuguaggua

SEQ ID NO: 9029 - RNA, 20 nt, Artificial Sequence
  Synthetic oligonucleotide: FAS-398
ugcuuccauuuuuugcuuuc

SEQ ID NO: 9030 - RNA, 20 nt, Artificial Sequence
  Synthetic oligonucleotide: FAS-266
gcuuccauuuuuugcuuucu

SEQ ID NO: 9031 - RNA, 20 nt, Artificial Sequence
  Synthetic oligonucleotide: FAS-400
gcuuuuaucauuuuauuuca

SEQ ID NO: 9032 - RNA, 20 nt, Artificial Sequence
  Synthetic oligonucleotide: FAS-401
ucuauuuuucagauguugac

SEQ ID NO: 9033 - RNA, 20 nt, Artificial Sequence
  Synthetic oligonucleotide: FAS-402
uaaauauaucaccacuauug

SEQ ID NO: 9034 - RNA, 20 nt, Artificial Sequence
  Synthetic oligonucleotide: FAS-270
aaauauaucaccacuauugc

SEQ ID NO: 9035 - RNA, 20 nt, Artificial Sequence
  Synthetic oligonucleotide: FAS-404
agucaaguuaaaggcuuugu

SEQ ID NO: 9036 - RNA, 20 nt, Artificial Sequence
  Synthetic oligonucleotide: FAS-405
aaguuaaaggcuuuguucga

SEQ ID NO: 9037 - RNA, 20 nt, Artificial Sequence
  Synthetic oligonucleotide: FAS-406
uguucgaaagaaugguguca

SEQ ID NO: 9038 - RNA, 20 nt, Artificial Sequence
  Synthetic oligonucleotide: FAS-407
ugucaaugaagccaaaauag

SEQ ID NO: 9039 - RNA, 20 nt, Artificial Sequence
  Synthetic oligonucleotide: FAS-408
aagccaaaauagaugagauc

SEQ ID NO: 9040 - RNA, 20 nt, Artificial Sequence
  Synthetic oligonucleotide: FAS-409
ugacaauguccaagacacag

SEQ ID NO: 9041 - RNA, 20 nt, Artificial Sequence
  Synthetic oligonucleotide: FAS-410
auguccaagacacagcagaa

SEQ ID NO: 9042 - RNA, 20 nt, Artificial Sequence
  Synthetic oligonucleotide: FAS-411
ucguaauuggcaucaacuuc

SEQ ID NO: 9043 - RNA, 20 nt, Artificial Sequence
  Synthetic oligonucleotide: FAS-274
cguaauuggcaucaacuuca

SEQ ID NO: 9044 - RNA, 20 nt, Artificial Sequence
  Synthetic oligonucleotide: FAS-413
auuggcaucaacuucaugga

SEQ ID NO: 9045 - RNA, 20 nt, Artificial Sequence
  Synthetic oligonucleotide: FAS-414
gcaucaacuucauggaaaga

SEQ ID NO: 9046 - RNA, 20 nt, Artificial Sequence
  Synthetic oligonucleotide: FAS-415
agccaaucuuuguacucuug

SEQ ID NO: 9047 - RNA, 20 nt, Artificial Sequence
  Synthetic oligonucleotide: FAS-416
ccaaucuuuguacucuugca

SEQ ID NO: 9048 - RNA, 20 nt, Artificial Sequence
  Synthetic oligonucleotide: FAS-417
aaauucagacuaucauccuc

SEQ ID NO: 9049 - RNA, 20 nt, Artificial Sequence
  Synthetic oligonucleotide: FAS-418
caaggacauuacuagugacu

SEQ ID NO: 9050 - RNA, 20 nt, Artificial Sequence
  Synthetic oligonucleotide: FAS-419
gacucagaaaauucaaacuu

SEQ ID NO: 9051 - RNA, 20 nt, Artificial Sequence
  Synthetic oligonucleotide: FAS-420
agaaaauucaaacuucagaa

SEQ ID NO: 9052 - RNA, 20 nt, Artificial Sequence
  Synthetic oligonucleotide: FAS-421
augaaauccaaagcuugguc

SEQ ID NO: 9053 - RNA, 20 nt, Artificial Sequence
  Synthetic oligonucleotide: FAS-422
aauccaaagcuuggucuaga

SEQ ID NO: 9054 - RNA, 20 nt, Artificial Sequence
  Synthetic oligonucleotide: FAS-423
gaaaaacaacaaauucaguu

SEQ ID NO: 9055 - RNA, 17 nt, Artificial Sequence
  Synthetic oligonucleotide: FAS-424
aacugauuuucuaggcu

SEQ ID NO: 9056 - RNA, 17 nt, Artificial Sequence
  Synthetic oligonucleotide: FAS-425
auuuucuaggcuuagaa

SEQ ID NO: 9057 - RNA, 17 nt, Artificial Sequence
  Synthetic oligonucleotide: FAS-278
uuuucuaggcuuagaag

SEQ ID NO: 9058 - RNA, 17 nt, Artificial Sequence
  Synthetic oligonucleotide: FAS-427
guggaaauaaacugcac

SEQ ID NO: 9059 - RNA, 17 nt, Artificial Sequence
  Synthetic oligonucleotide: FAS-428
uaaacugcacccggacc

SEQ ID NO: 9060 - RNA, 17 nt, Artificial Sequence
  Synthetic oligonucleotide: FAS-429
uuguaacucuacuguau

SEQ ID NO: 9061 - RNA, 17 nt, Artificial Sequence
  Synthetic oligonucleotide: FAS-430
uauuuuuuuuucuagau

SEQ ID NO: 9062 - RNA, 17 nt, Artificial Sequence
  Synthetic oligonucleotide: FAS-431
uuuuucuagaugugaac

SEQ ID NO: 9063 - RNA, 17 nt, Artificial Sequence
  Synthetic oligonucleotide: FAS-280
uuuucuagaugugaaca

SEQ ID NO: 9064 - RNA, 17 nt, Artificial Sequence
  Synthetic oligonucleotide: FAS-433
gugaacauggaaucauc

SEQ ID NO: 9065 - RNA, 17 nt, Artificial Sequence
  Synthetic oligonucleotide: FAS-281
ugaacauggaaucauca

SEQ ID NO: 9066 - RNA, 17 nt, Artificial Sequence
  Synthetic oligonucleotide: FAS-435
cagcaacaccaagugca

SEQ ID NO: 9067 - RNA, 17 nt, Artificial Sequence
  Synthetic oligonucleotide: FAS-436
gcaacaccaagugcaaa

SEQ ID NO: 9068 - RNA, 17 nt, Artificial Sequence
  Synthetic oligonucleotide: FAS-282
caacaccaagugcaaag

SEQ ID NO: 9069 - RNA, 17 nt, Artificial Sequence
  Synthetic oligonucleotide: FAS-438
uccaauguuccaaccua

SEQ ID NO: 9070 - RNA, 17 nt, Artificial Sequence
  Synthetic oligonucleotide: FAS-439
caggauccagaucuaac

SEQ ID NO: 9071 - RNA, 17 nt, Artificial Sequence
  Synthetic oligonucleotide: FAS-286
aggauccagaucuaacu

SEQ ID NO: 9072 - RNA, 17 nt, Artificial Sequence
  Synthetic oligonucleotide: FAS-441
ccaauuccacuaauugu

SEQ ID NO: 9073 - RNA, 17 nt, Artificial Sequence
  Synthetic oligonucleotide: FAS-290
caauuccacuaauuguu

SEQ ID NO: 9074 - RNA, 17 nt, Artificial Sequence
  Synthetic oligonucleotide: FAS-443
auuucuuuguucuuuca

SEQ ID NO: 9075 - RNA, 17 nt, Artificial Sequence
  Synthetic oligonucleotide: FAS-444
ucuuuguucuuucagug

SEQ ID NO: 9076 - RNA, 17 nt, Artificial Sequence
  Synthetic oligonucleotide: FAS-445
uuuguucuuucagugaa

SEQ ID NO: 9077 - RNA, 17 nt, Artificial Sequence
  Synthetic oligonucleotide: FAS-446
uucuuucagugaagaga

SEQ ID NO: 9078 - RNA, 17 nt, Artificial Sequence
  Synthetic oligonucleotide: FAS-293
ucuuucagugaagagaa

SEQ ID NO: 9079 - RNA, 17 nt, Artificial Sequence
  Synthetic oligonucleotide: FAS-448
ugaagagaaaggaagua

SEQ ID NO: 9080 - RNA, 17 nt, Artificial Sequence
  Synthetic oligonucleotide: FAS-449
gaaguacagaaaacaug

SEQ ID NO: 9081 - RNA, 17 nt, Artificial Sequence
  Synthetic oligonucleotide: FAS-450
aaaacaugcagaaagca

SEQ ID NO: 9082 - RNA, 17 nt, Artificial Sequence
  Synthetic oligonucleotide: FAS-451
caugcagaaagcacaga

SEQ ID NO: 9083 - RNA, 17 nt, Artificial Sequence
  Synthetic oligonucleotide: FAS-294
augcagaaagcacagaa

SEQ ID NO: 9084 - RNA, 17 nt, Artificial Sequence
  Synthetic oligonucleotide: FAS-453
ggaaaaccaagguucuc

SEQ ID NO: 9085 - RNA, 17 nt, Artificial Sequence
  Synthetic oligonucleotide: FAS-454
uuuaaauccuguaggua

SEQ ID NO: 9086 - RNA, 17 nt, Artificial Sequence
  Synthetic oligonucleotide: FAS-455
uuccauuuuuugcuuuc

SEQ ID NO: 9087 - RNA, 17 nt, Artificial Sequence
  Synthetic oligonucleotide: FAS-298
uccauuuuuugcuuucu

SEQ ID NO: 9088 - RNA, 17 nt, Artificial Sequence
  Synthetic oligonucleotide: FAS-457
uuuaucauuuuauuuca

SEQ ID NO: 9089 - RNA, 17 nt, Artificial Sequence
  Synthetic oligonucleotide: FAS-458
auuuuucagauguugac

SEQ ID NO: 9090 - RNA, 17 nt, Artificial Sequence
  Synthetic oligonucleotide: FAS-459
auauaucaccacuauug

SEQ ID NO: 9091 - RNA, 17 nt, Artificial Sequence
  Synthetic oligonucleotide: FAS-302
uauaucaccacuauugc

SEQ ID NO: 9092 - RNA, 17 nt, Artificial Sequence
  Synthetic oligonucleotide: FAS-461
caaguuaaaggcuuugu

SEQ ID NO: 9093 - RNA, 17 nt, Artificial Sequence
  Synthetic oligonucleotide: FAS-462
uuaaaggcuuuguucga

SEQ ID NO: 9094 - RNA, 17 nt, Artificial Sequence
  Synthetic oligonucleotide: FAS-463
ucgaaagaaugguguca

SEQ ID NO: 9095 - RNA, 17 nt, Artificial Sequence
  Synthetic oligonucleotide: FAS-464
caaugaagccaaaauag

SEQ ID NO: 9096 - RNA, 17 nt, Artificial Sequence
  Synthetic oligonucleotide: FAS-465
ccaaaauagaugagauc

SEQ ID NO: 9097 - RNA, 17 nt, Artificial Sequence
  Synthetic oligonucleotide: FAS-466
caauguccaagacacag

SEQ ID NO: 9098 - RNA, 17 nt, Artificial Sequence
  Synthetic oligonucleotide: FAS-467
uccaagacacagcagaa

SEQ ID NO: 9099 - RNA, 17 nt, Artificial Sequence
  Synthetic oligonucleotide: FAS-468
uaauuggcaucaacuuc

SEQ ID NO: 9100 - RNA, 17 nt, Artificial Sequence
  Synthetic oligonucleotide: FAS-306
aauuggcaucaacuuca

SEQ ID NO: 9101 - RNA, 17 nt, Artificial Sequence
  Synthetic oligonucleotide: FAS-470
ggcaucaacuucaugga

SEQ ID NO: 9102 - RNA, 17 nt, Artificial Sequence
  Synthetic oligonucleotide: FAS-471
ucaacuucauggaaaga

SEQ ID NO: 9103 - RNA, 17 nt, Artificial Sequence
  Synthetic oligonucleotide: FAS-472
caaucuuuguacucuug

SEQ ID NO: 9104 - RNA, 17 nt, Artificial Sequence
  Synthetic oligonucleotide: FAS-473
aucuuuguacucuugca

SEQ ID NO: 9105 - RNA, 17 nt, Artificial Sequence
  Synthetic oligonucleotide: FAS-474
uucagacuaucauccuc

SEQ ID NO: 9106 - RNA, 17 nt, Artificial Sequence
  Synthetic oligonucleotide: FAS-475
ggacauuacuagugacu

SEQ ID NO: 9107 - RNA, 17 nt, Artificial Sequence
  Synthetic oligonucleotide: FAS-476
ucagaaaauucaaacuu

SEQ ID NO: 9108 - RNA, 17 nt, Artificial Sequence
  Synthetic oligonucleotide: FAS-477
aaauucaaacuucagaa

SEQ ID NO: 9109 - RNA, 17 nt, Artificial Sequence
  Synthetic oligonucleotide: FAS-478
aaauccaaagcuugguc

SEQ ID NO: 9110 - RNA, 17 nt, Artificial Sequence
  Synthetic oligonucleotide: FAS-479
ccaaagcuuggucuaga

SEQ ID NO: 9111 - RNA, 17 nt, Artificial Sequence
  Synthetic oligonucleotide: FAS-480
aaacaacaaauucaguu

SEQ ID NO: 9112 - RNA, 20 nt, Artificial Sequence
  Synthetic oligonucleotide: FAS-481
uuuucacucuagaccaagcu

SEQ ID NO: 9113 - RNA, 20 nt, Artificial Sequence
  Synthetic oligonucleotide: FAS-482
ccaagcuuuggauuucauuu

SEQ ID NO: 9114 - RNA, 20 nt, Artificial Sequence
  Synthetic oligonucleotide: FAS-483
uuggauuucauuucugaagu

SEQ ID NO: 9115 - RNA, 20 nt, Artificial Sequence
  Synthetic oligonucleotide: FAS-484
auuucugaaguuugaauuuu

SEQ ID NO: 9116 - RNA, 20 nt, Artificial Sequence
  Synthetic oligonucleotide: FAS-485
cugagucacuaguaaugucc

SEQ ID NO: 9117 - RNA, 20 nt, Artificial Sequence
  Synthetic oligonucleotide: FAS-486
gagucacuaguaauguccuu

SEQ ID NO: 9118 - RNA, 20 nt, Artificial Sequence
  Synthetic oligonucleotide: FAS-487
auguccuugaggaugauagu

SEQ ID NO: 9119 - RNA, 20 nt, Artificial Sequence
  Synthetic oligonucleotide: FAS-488
auagucugaauuuucucugc

SEQ ID NO: 9120 - RNA, 20 nt, Artificial Sequence
  Synthetic oligonucleotide: FAS-489
gaguacaaagauuggcuuuu

SEQ ID NO: 9121 - RNA, 20 nt, Artificial Sequence
  Synthetic oligonucleotide: FAS-490
ucauacgcuucuuucuuucc

SEQ ID NO: 9122 - RNA, 20 nt, Artificial Sequence
  Synthetic oligonucleotide: FAS-491
ccaugaaguugaugccaauu

SEQ ID NO: 9123 - RNA, 20 nt, Artificial Sequence
  Synthetic oligonucleotide: FAS-492
ugaugccaauuacgaagcag

SEQ ID NO: 9124 - RNA, 20 nt, Artificial Sequence
  Synthetic oligonucleotide: FAS-493
acuuucuguucugcuguguc

SEQ ID NO: 9125 - RNA, 20 nt, Artificial Sequence
  Synthetic oligonucleotide: FAS-494
gcuucauugacaccauucuu

SEQ ID NO: 9126 - RNA, 20 nt, Artificial Sequence
  Synthetic oligonucleotide: FAS-495
auauuuacucaagucaacau

SEQ ID NO: 9127 - RNA, 20 nt, Artificial Sequence
  Synthetic oligonucleotide: FAS-496
ucaagucaacaucugaaaaa

SEQ ID NO: 9128 - RNA, 20 nt, Artificial Sequence
  Synthetic oligonucleotide: FAS-497
ucugaaaaauagaaaauagu

SEQ ID NO: 9129 - RNA, 20 nt, Artificial Sequence
  Synthetic oligonucleotide: FAS-498
aauuuauugccacuguuucc

SEQ ID NO: 9130 - RNA, 20 nt, Artificial Sequence
  Synthetic oligonucleotide: FAS-499
uguuuccuagaaagcaaaaa

SEQ ID NO: 9131 - RNA, 20 nt, Artificial Sequence
  Synthetic oligonucleotide: FAS-315
guuuccuagaaagcaaaaaa

SEQ ID NO: 9132 - RNA, 20 nt, Artificial Sequence
  Synthetic oligonucleotide: FAS-501
uagaaagcaaaaaauggaag

SEQ ID NO: 9133 - RNA, 20 nt, Artificial Sequence
  Synthetic oligonucleotide: FAS-502
gaaagcaaaaaauggaagca

SEQ ID NO: 9134 - RNA, 20 nt, Artificial Sequence
  Synthetic oligonucleotide: FAS-503
gauaccuauuucaauaccua

SEQ ID NO: 9135 - RNA, 20 nt, Artificial Sequence
  Synthetic oligonucleotide: FAS-504
aauaccuacaggauuuaaag

SEQ ID NO: 9136 - RNA, 20 nt, Artificial Sequence
  Synthetic oligonucleotide: FAS-317
auaccuacaggauuuaaagu

SEQ ID NO: 9137 - RNA, 20 nt, Artificial Sequence
  Synthetic oligonucleotide: FAS-506
ggauuuaaaguuggagauuc

SEQ ID NO: 9138 - RNA, 20 nt, Artificial Sequence
  Synthetic oligonucleotide: FAS-507
auuuaaaguuggagauucau

SEQ ID NO: 9139 - RNA, 20 nt, Artificial Sequence
  Synthetic oligonucleotide: FAS-508
cuguacuuccuuucucuuca

SEQ ID NO: 9140 - RNA, 20 nt, Artificial Sequence
  Synthetic oligonucleotide: FAS-509
acuuccuuucucuucacuga

SEQ ID NO: 9141 - RNA, 20 nt, Artificial Sequence
  Synthetic oligonucleotide: FAS-510
uucucuucacugaaagaaca

SEQ ID NO: 9142 - RNA, 20 nt, Artificial Sequence
  Synthetic oligonucleotide: FAS-511
aucugcaguuugaacaaagc

SEQ ID NO: 9143 - RNA, 20 nt, Artificial Sequence
  Synthetic oligonucleotide: FAS-512
gaacuuaccccaaacaauua

SEQ ID NO: 9144 - RNA, 20 nt, Artificial Sequence
  Synthetic oligonucleotide: FAS-319
aacuuaccccaaacaauuag

SEQ ID NO: 9145 - RNA, 20 nt, Artificial Sequence
  Synthetic oligonucleotide: FAS-514
acaauuaguggaauuggcaa

SEQ ID NO: 9146 - RNA, 20 nt, Artificial Sequence
  Synthetic oligonucleotide: FAS-515
auuaguggaauuggcaaaag

SEQ ID NO: 9147 - RNA, 20 nt, Artificial Sequence
  Synthetic oligonucleotide: FAS-516
aaagccaccccaaguuagau

SEQ ID NO: 9148 - RNA, 20 nt, Artificial Sequence
  Synthetic oligonucleotide: FAS-517
uuagaucuggauccuguagg

SEQ ID NO: 9149 - RNA, 20 nt, Artificial Sequence
  Synthetic oligonucleotide: FAS-323
uagaucuggauccuguaggu

SEQ ID NO: 9150 - RNA, 20 nt, Artificial Sequence
  Synthetic oligonucleotide: FAS-519
ggauccuguagguuggaaca

SEQ ID NO: 9151 - RNA, 20 nt, Artificial Sequence
  Synthetic oligonucleotide: FAS-520
cuuugcacuugguguugcug

SEQ ID NO: 9152 - RNA, 20 nt, Artificial Sequence
  Synthetic oligonucleotide: FAS-521
gaugauuccauguucacauc

SEQ ID NO: 9153 - RNA, 20 nt, Artificial Sequence
  Synthetic oligonucleotide: FAS-522
cacaucuagaaaaaaaaaua

SEQ ID NO: 9154 - RNA, 20 nt, Artificial Sequence
  Synthetic oligonucleotide: FAS-327
acaucuagaaaaaaaaauac

SEQ ID NO: 9155 - RNA, 20 nt, Artificial Sequence
  Synthetic oligonucleotide: FAS-524
aucuagaaaaaaaaauacag

SEQ ID NO: 9156 - RNA, 20 nt, Artificial Sequence
  Synthetic oligonucleotide: FAS-525
gacuaaaacuuacuuggugc

SEQ ID NO: 9157 - RNA, 20 nt, Artificial Sequence
  Synthetic oligonucleotide: FAS-526
gucacaguguucacauacag

SEQ ID NO: 9158 - RNA, 20 nt, Artificial Sequence
  Synthetic oligonucleotide: FAS-527
uuacaucugcacuugguauu

SEQ ID NO: 9159 - RNA, 20 nt, Artificial Sequence
  Synthetic oligonucleotide: FAS-528
cugcacuugguauucugggu

SEQ ID NO: 9160 - RNA, 20 nt, Artificial Sequence
  Synthetic oligonucleotide: FAS-529
uuuauuuccacuucuaagcc

SEQ ID NO: 9161 - RNA, 20 nt, Artificial Sequence
  Synthetic oligonucleotide: FAS-530
ucuaagccuagaaaaucagu

SEQ ID NO: 9162 - RNA, 20 nt, Artificial Sequence
  Synthetic oligonucleotide: FAS-337
cuaagccuagaaaaucaguu

SEQ ID NO: 9163 - RNA, 17 nt, Artificial Sequence
  Synthetic oligonucleotide: FAS-532
ucacucuagaccaagcu

SEQ ID NO: 9164 - RNA, 17 nt, Artificial Sequence
  Synthetic oligonucleotide: FAS-533
agcuuuggauuucauuu

SEQ ID NO: 9165 - RNA, 17 nt, Artificial Sequence
  Synthetic oligonucleotide: FAS-534
gauuucauuucugaagu

SEQ ID NO: 9166 - RNA, 17 nt, Artificial Sequence
  Synthetic oligonucleotide: FAS-535
ucugaaguuugaauuuu

SEQ ID NO: 9167 - RNA, 17 nt, Artificial Sequence
  Synthetic oligonucleotide: FAS-536
agucacuaguaaugucc

SEQ ID NO: 9168 - RNA, 17 nt, Artificial Sequence
  Synthetic oligonucleotide: FAS-537
ucacuaguaauguccuu

SEQ ID NO: 9169 - RNA, 17 nt, Artificial Sequence
  Synthetic oligonucleotide: FAS-538
uccuugaggaugauagu

SEQ ID NO: 9170 - RNA, 17 nt, Artificial Sequence
  Synthetic oligonucleotide: FAS-539
gucugaauuuucucugc

SEQ ID NO: 9171 - RNA, 17 nt, Artificial Sequence
  Synthetic oligonucleotide: FAS-540
uacaaagauuggcuuuu

SEQ ID NO: 9172 - RNA, 17 nt, Artificial Sequence
  Synthetic oligonucleotide: FAS-541
uacgcuucuuucuuucc

SEQ ID NO: 9173 - RNA, 17 nt, Artificial Sequence
  Synthetic oligonucleotide: FAS-542
ugaaguugaugccaauu

SEQ ID NO: 9174 - RNA, 17 nt, Artificial Sequence
  Synthetic oligonucleotide: FAS-543
ugccaauuacgaagcag

SEQ ID NO: 9175 - RNA, 17 nt, Artificial Sequence
  Synthetic oligonucleotide: FAS-544
uucuguucugcuguguc

SEQ ID NO: 9176 - RNA, 17 nt, Artificial Sequence
  Synthetic oligonucleotide: FAS-545
ucauugacaccauucuu

SEQ ID NO: 9177 - RNA, 17 nt, Artificial Sequence
  Synthetic oligonucleotide: FAS-546
uuuacucaagucaacau

SEQ ID NO: 9178 - RNA, 17 nt, Artificial Sequence
  Synthetic oligonucleotide: FAS-547
agucaacaucugaaaaa

SEQ ID NO: 9179 - RNA, 17 nt, Artificial Sequence
  Synthetic oligonucleotide: FAS-548
gaaaaauagaaaauagu

SEQ ID NO: 9180 - RNA, 17 nt, Artificial Sequence
  Synthetic oligonucleotide: FAS-549
uuauugccacuguuucc

SEQ ID NO: 9181 - RNA, 17 nt, Artificial Sequence
  Synthetic oligonucleotide: FAS-550
uuccuagaaagcaaaaa

SEQ ID NO: 9182 - RNA, 17 nt, Artificial Sequence
  Synthetic oligonucleotide: FAS-344
uccuagaaagcaaaaaa

SEQ ID NO: 9183 - RNA, 17 nt, Artificial Sequence
  Synthetic oligonucleotide: FAS-552
aaagcaaaaaauggaag

SEQ ID NO: 9184 - RNA, 17 nt, Artificial Sequence
  Synthetic oligonucleotide: FAS-553
agcaaaaaauggaagca

SEQ ID NO: 9185 - RNA, 17 nt, Artificial Sequence
  Synthetic oligonucleotide: FAS-554
accuauuucaauaccua

SEQ ID NO: 9186 - RNA, 17 nt, Artificial Sequence
  Synthetic oligonucleotide: FAS-555
accuacaggauuuaaag

SEQ ID NO: 9187 - RNA, 17 nt, Artificial Sequence
  Synthetic oligonucleotide: FAS-346
ccuacaggauuuaaagu

SEQ ID NO: 9188 - RNA, 17 nt, Artificial Sequence
  Synthetic oligonucleotide: FAS-557
uuuaaaguuggagauuc

SEQ ID NO: 9189 - RNA, 17 nt, Artificial Sequence
  Synthetic oligonucleotide: FAS-558
uaaaguuggagauucau

SEQ ID NO: 9190 - RNA, 17 nt, Artificial Sequence
  Synthetic oligonucleotide: FAS-559
uacuuccuuucucuuca

SEQ ID NO: 9191 - RNA, 17 nt, Artificial Sequence
  Synthetic oligonucleotide: FAS-560
uccuuucucuucacuga

SEQ ID NO: 9192 - RNA, 17 nt, Artificial Sequence
  Synthetic oligonucleotide: FAS-561
ucuucacugaaagaaca

SEQ ID NO: 9193 - RNA, 17 nt, Artificial Sequence
  Synthetic oligonucleotide: FAS-562
ugcaguuugaacaaagc

SEQ ID NO: 9194 - RNA, 17 nt, Artificial Sequence
  Synthetic oligonucleotide: FAS-563
cuuaccccaaacaauua

SEQ ID NO: 9195 - RNA, 17 nt, Artificial Sequence
  Synthetic oligonucleotide: FAS-348
uuaccccaaacaauuag

SEQ ID NO: 9196 - RNA, 17 nt, Artificial Sequence
  Synthetic oligonucleotide: FAS-565
auuaguggaauuggcaa

SEQ ID NO: 9197 - RNA, 17 nt, Artificial Sequence
  Synthetic oligonucleotide: FAS-566
aguggaauuggcaaaag

SEQ ID NO: 9198 - RNA, 17 nt, Artificial Sequence
  Synthetic oligonucleotide: FAS-567
gccaccccaaguuagau

SEQ ID NO: 9199 - RNA, 17 nt, Artificial Sequence
  Synthetic oligonucleotide: FAS-568
gaucuggauccuguagg

SEQ ID NO: 9200 - RNA, 17 nt, Artificial Sequence
  Synthetic oligonucleotide: FAS-352
aucuggauccuguaggu

SEQ ID NO: 9201 - RNA, 17 nt, Artificial Sequence
  Synthetic oligonucleotide: FAS-570
uccuguagguuggaaca

SEQ ID NO: 9202 - RNA, 17 nt, Artificial Sequence
  Synthetic oligonucleotide: FAS-571
ugcacuugguguugcug

SEQ ID NO: 9203 - RNA, 17 nt, Artificial Sequence
  Synthetic oligonucleotide: FAS-572
gauuccauguucacauc

SEQ ID NO: 9204 - RNA, 17 nt, Artificial Sequence
  Synthetic oligonucleotide: FAS-573
aucuagaaaaaaaaaua

SEQ ID NO: 9205 - RNA, 17 nt, Artificial Sequence
  Synthetic oligonucleotide: FAS-356
ucuagaaaaaaaaauac

SEQ ID NO: 9206 - RNA, 17 nt, Artificial Sequence
  Synthetic oligonucleotide: FAS-575
uagaaaaaaaaauacag

SEQ ID NO: 9207 - RNA, 17 nt, Artificial Sequence
  Synthetic oligonucleotide: FAS-576
uaaaacuuacuuggugc

SEQ ID NO: 9208 - RNA, 17 nt, Artificial Sequence
  Synthetic oligonucleotide: FAS-577
acaguguucacauacag

SEQ ID NO: 9209 - RNA, 17 nt, Artificial Sequence
  Synthetic oligonucleotide: FAS-578
caucugcacuugguauu

SEQ ID NO: 9210 - RNA, 17 nt, Artificial Sequence
  Synthetic oligonucleotide: FAS-579
cacuugguauucugggu

SEQ ID NO: 9211 - RNA, 17 nt, Artificial Sequence
  Synthetic oligonucleotide: FAS-580
auuuccacuucuaagcc

SEQ ID NO: 9212 - RNA, 17 nt, Artificial Sequence
  Synthetic oligonucleotide: FAS-581
aagccuagaaaaucagu

SEQ ID NO: 9213 - RNA, 17 nt, Artificial Sequence
  Synthetic oligonucleotide: FAS-366
agccuagaaaaucaguu

SEQ ID NO: 9214 - RNA, 20 nt, Artificial Sequence
  Synthetic oligonucleotide: FAS-237
uacagguucuuacgucuguu

SEQ ID NO: 9215 - RNA, 20 nt, Artificial Sequence
  Synthetic oligonucleotide: FAS-123
aagugacugacaucaacucc

SEQ ID NO: 9216 - RNA, 20 nt, Artificial Sequence
  Synthetic oligonucleotide: FAS-134
gguauguuacacaaaacauc

SEQ ID NO: 9217 - RNA, 17 nt, Artificial Sequence
  Synthetic oligonucleotide: FAS-240
agguucuuacgucuguu

SEQ ID NO: 9218 - RNA, 17 nt, Artificial Sequence
  Synthetic oligonucleotide: FAS-135
ugacugacaucaacucc

SEQ ID NO: 9219 - RNA, 17 nt, Artificial Sequence
  Synthetic oligonucleotide: FAS-146
auguuacacaaaacauc

SEQ ID NO: 9220 - RNA, 20 nt, Artificial Sequence
  Synthetic oligonucleotide: FAS-243
uuucuuccaaaugcagaaga

SEQ ID NO: 9221 - RNA, 17 nt, Artificial Sequence
  Synthetic oligonucleotide: FAS-244
cuuccaaaugcagaaga

SEQ ID NO: 9222 - RNA, 20 nt, Artificial Sequence
  Synthetic oligonucleotide: FAS-583
ccaaguaaguuuuagucuuu

SEQ ID NO: 9223 - RNA, 20 nt, Artificial Sequence
  Synthetic oligonucleotide: FAS-584
aaagaaagaagcguaugaca

SEQ ID NO: 9224 - RNA, 17 nt, Artificial Sequence
  Synthetic oligonucleotide: FAS-585
aguaaguuuuagucuuu

SEQ ID NO: 9225 - RNA, 17 nt, Artificial Sequence
  Synthetic oligonucleotide: FAS-586
gaaagaagcguaugaca

SEQ ID NO: 9226 - RNA, 20 nt, Artificial Sequence
  Synthetic oligonucleotide: FAS-587
uuuuucacucuagaccaagc

SEQ ID NO: 9227 - RNA, 20 nt, Artificial Sequence
  Synthetic oligonucleotide: FAS-588
gaauuuucucugcaagagua

SEQ ID NO: 9228 - RNA, 20 nt, Artificial Sequence
  Synthetic oligonucleotide: FAS-589
ugauaccuauuucaauaccu

SEQ ID NO: 9229 - RNA, 20 nt, Artificial Sequence
  Synthetic oligonucleotide: FAS-317
auaccuacaggauuuaaagu

SEQ ID NO: 9230 - RNA, 20 nt, Artificial Sequence
  Synthetic oligonucleotide: FAS-591
gcuggugagugugcauuccu

SEQ ID NO: 9231 - RNA, 17 nt, Artificial Sequence
  Synthetic oligonucleotide: FAS-592
uucacucuagaccaagc

SEQ ID NO: 9232 - RNA, 17 nt, Artificial Sequence
  Synthetic oligonucleotide: FAS-593
uuuucucugcaagagua

SEQ ID NO: 9233 - RNA, 17 nt, Artificial Sequence
  Synthetic oligonucleotide: FAS-594
uaccuauuucaauaccu

SEQ ID NO: 9234 - RNA, 17 nt, Artificial Sequence
  Synthetic oligonucleotide: FAS-346
ccuacaggauuuaaagu

SEQ ID NO: 9235 - RNA, 17 nt, Artificial Sequence
  Synthetic oligonucleotide: FAS-596
ggugagugugcauuccu

SEQ ID NO: 9236 - RNA, 20 nt, Artificial Sequence
  Synthetic oligonucleotide: FAS-636
gaagcgguuuacgagugacu

SEQ ID NO: 9237 - RNA, 20 nt, Artificial Sequence
  Synthetic oligonucleotide: FAS-653
guugguggacccgcucagua

SEQ ID NO: 9238 - RNA, 20 nt, Artificial Sequence
  Synthetic oligonucleotide: FAS-654
ggacccgcucaguacggagu

SEQ ID NO: 9239 - RNA, 20 nt, Artificial Sequence
  Synthetic oligonucleotide: FAS-655
gacccgcucaguacggaguu

SEQ ID NO: 9240 - RNA, 20 nt, Artificial Sequence
  Synthetic oligonucleotide: FAS-658
gggaagcucuuucacuucgg

SEQ ID NO: 9241 - RNA, 20 nt, Artificial Sequence
  Synthetic oligonucleotide: FAS-659
ggauugcucaacaaccaugc

SEQ ID NO: 9242 - RNA, 20 nt, Artificial Sequence
  Synthetic oligonucleotide: FAS-667
ggcuuaccccgucuuagucc

SEQ ID NO: 9243 - RNA, 20 nt, Artificial Sequence
  Synthetic oligonucleotide: FAS-668
gcuuaccccgucuuaguccc

SEQ ID NO: 9244 - RNA, 20 nt, Artificial Sequence
  Synthetic oligonucleotide: FAS-672
gucccggggauaggcaaagu

SEQ ID NO: 9245 - RNA, 20 nt, Artificial Sequence
  Synthetic oligonucleotide: FAS-680
gcgggacgcgugcgggauug

SEQ ID NO: 9246 - RNA, 20 nt, Artificial Sequence
  Synthetic oligonucleotide: FAS-689
gccuauccccgggacuaaga

SEQ ID NO: 9247 - RNA, 20 nt, Artificial Sequence
  Synthetic oligonucleotide: FAS-693
gacgggguaagccuccaccc

SEQ ID NO: 9248 - RNA, 20 nt, Artificial Sequence
  Synthetic oligonucleotide: FAS-705
gagcggguccaccaacccgc

SEQ ID NO: 9249 - RNA, 20 nt, Artificial Sequence
  Synthetic oligonucleotide: FAS-715
gacgagcucacgaaaagccc

SEQ ID NO: 9250 - RNA, 20 nt, Artificial Sequence
  Synthetic oligonucleotide: FAS-716
gagcucacgaaaagccccgg

SEQ ID NO: 9251 - RNA, 20 nt, Artificial Sequence
  Synthetic oligonucleotide: FAS-718
gaaaagccccgguggucagg

SEQ ID NO: 9252 - RNA, 20 nt, Artificial Sequence
  Synthetic oligonucleotide: FAS-732
gcuccauugauucagcaacu

SEQ ID NO: 9253 - RNA, 20 nt, Artificial Sequence
  Synthetic oligonucleotide: FAS-747
gucaggguucguugcacaaa

SEQ ID NO: 9254 - RNA, 20 nt, Artificial Sequence
  Synthetic oligonucleotide: FAS-752
gucccggggcguuccugcag

SEQ ID NO: 9255 - RNA, 20 nt, Artificial Sequence
  Synthetic oligonucleotide: FAS-754
guggcuggcaugcucacuuc

SEQ ID NO: 9256 - RNA, 20 nt, Artificial Sequence
  Synthetic oligonucleotide: FAS-758
gcuucugcuguaguucaacc

SEQ ID NO: 9257 - RNA, 20 nt, Artificial Sequence
  Synthetic oligonucleotide: FAS-761
guaguucaaccugggaaguu

SEQ ID NO: 9258 - RNA, 20 nt, Artificial Sequence
  Synthetic oligonucleotide: FAS-776
gacuugcggggcauuugacu

SEQ ID NO: 9259 - RNA, 20 nt, Artificial Sequence
  Synthetic oligonucleotide: FAS-779
gagaggcucacagacguuuc

SEQ ID NO: 9260 - RNA, 20 nt, Artificial Sequence
  Synthetic oligonucleotide: FAS-784
gcgccauagggcucugaaaa

SEQ ID NO: 9261 - RNA, 17 nt, Artificial Sequence
  Synthetic oligonucleotide: FAS-791
gcuggggcuaugcgauu

SEQ ID NO: 9262 - RNA, 17 nt, Artificial Sequence
  Synthetic oligonucleotide: FAS-820
gcgcaagagugacacac

SEQ ID NO: 9263 - RNA, 17 nt, Artificial Sequence
  Synthetic oligonucleotide: FAS-821
guguucaaagacgcuuc

SEQ ID NO: 9264 - RNA, 17 nt, Artificial Sequence
  Synthetic oligonucleotide: FAS-827
gcgguuuacgagugacu

SEQ ID NO: 9265 - RNA, 17 nt, Artificial Sequence
  Synthetic oligonucleotide: FAS-844
gguggacccgcucagua

SEQ ID NO: 9266 - RNA, 17 nt, Artificial Sequence
  Synthetic oligonucleotide: FAS-848
gggaagcucuuucacuu

SEQ ID NO: 9267 - RNA, 17 nt, Artificial Sequence
  Synthetic oligonucleotide: FAS-861
gucuuagucccggggau

SEQ ID NO: 9268 - RNA, 17 nt, Artificial Sequence
  Synthetic oligonucleotide: FAS-865
ggauaggcaaagugggg

SEQ ID NO: 9269 - RNA, 17 nt, Artificial Sequence
  Synthetic oligonucleotide: FAS-871
ggacgcgugcgggauug

SEQ ID NO: 9270 - RNA, 17 nt, Artificial Sequence
  Synthetic oligonucleotide: FAS-877
ggcgcacgcgggcaccu

SEQ ID NO: 9271 - RNA, 17 nt, Artificial Sequence
  Synthetic oligonucleotide: FAS-884
gggguaagccuccaccc

SEQ ID NO: 9272 - RNA, 17 nt, Artificial Sequence
  Synthetic oligonucleotide: FAS-895
gcggguccaccaacccg

SEQ ID NO: 9273 - RNA, 17 nt, Artificial Sequence
  Synthetic oligonucleotide: FAS-906
gagcucacgaaaagccc

SEQ ID NO: 9274 - RNA, 17 nt, Artificial Sequence
  Synthetic oligonucleotide: FAS-908
gaaaagccccggugguc

SEQ ID NO: 9275 - RNA, 17 nt, Artificial Sequence
  Synthetic oligonucleotide: FAS-924
gcaacuuggccugcgcg

SEQ ID NO: 9276 - RNA, 17 nt, Artificial Sequence
  Synthetic oligonucleotide: FAS-939
ggguucguugcacaaau

SEQ ID NO: 9277 - RNA, 17 nt, Artificial Sequence
  Synthetic oligonucleotide: FAS-945
gcuggcaugcucacuuc

SEQ ID NO: 9278 - RNA, 17 nt, Artificial Sequence
  Synthetic oligonucleotide: FAS-952
guucaaccugggaaguu

SEQ ID NO: 9279 - RNA, 17 nt, Artificial Sequence
  Synthetic oligonucleotide: FAS-974
gccauagggcucugaaa

SEQ ID NO: 9280 - RNA, 20 nt, Artificial Sequence
  Synthetic oligonucleotide: FAS-600
auagcuggggcuaugcgauu

SEQ ID NO: 9281 - RNA, 20 nt, Artificial Sequence
  Synthetic oligonucleotide: FAS-620
cugcaggaacgccccgggac

SEQ ID NO: 9282 - RNA, 20 nt, Artificial Sequence
  Synthetic oligonucleotide: FAS-625
aacccgggcguuccccagcg

SEQ ID NO: 9283 - RNA, 20 nt, Artificial Sequence
  Synthetic oligonucleotide: FAS-629
cucgcgcaagagugacacac

SEQ ID NO: 9284 - RNA, 20 nt, Artificial Sequence
  Synthetic oligonucleotide: FAS-630
cagguguucaaagacgcuuc

SEQ ID NO: 9285 - RNA, 20 nt, Artificial Sequence
  Synthetic oligonucleotide: FAS-637
cgguuuacgagugacuuggc

SEQ ID NO: 9286 - RNA, 20 nt, Artificial Sequence
  Synthetic oligonucleotide: FAS-656
acccgcucaguacggaguug

SEQ ID NO: 9287 - RNA, 20 nt, Artificial Sequence
  Synthetic oligonucleotide: FAS-657
uuggggaagcucuuucacuu

SEQ ID NO: 9288 - RNA, 20 nt, Artificial Sequence
  Synthetic oligonucleotide: FAS-669
cuuaccccgucuuagucccg

SEQ ID NO: 9289 - RNA, 20 nt, Artificial Sequence
  Synthetic oligonucleotide: FAS-670
cccgucuuagucccggggau

SEQ ID NO: 9290 - RNA, 20 nt, Artificial Sequence
  Synthetic oligonucleotide: FAS-674
cggggauaggcaaagugggg

SEQ ID NO: 9291 - RNA, 20 nt, Artificial Sequence
  Synthetic oligonucleotide: FAS-686
agcggcgcacgcgggcaccu

SEQ ID NO: 9292 - RNA, 20 nt, Artificial Sequence
  Synthetic oligonucleotide: FAS-687
cgccccacuuugccuauccc

SEQ ID NO: 9293 - RNA, 20 nt, Artificial Sequence
  Synthetic oligonucleotide: FAS-690
ccuauccccgggacuaagac

SEQ ID NO: 9294 - RNA, 20 nt, Artificial Sequence
  Synthetic oligonucleotide: FAS-691
cuauccccgggacuaagacg

SEQ ID NO: 9295 - RNA, 20 nt, Artificial Sequence
  Synthetic oligonucleotide: FAS-692
agacgggguaagccuccacc

SEQ ID NO: 9296 - RNA, 20 nt, Artificial Sequence
  Synthetic oligonucleotide: FAS-704
ugagcggguccaccaacccg

SEQ ID NO: 9297 - RNA, 20 nt, Artificial Sequence
  Synthetic oligonucleotide: FAS-706
ccaccaacccgcgggagaag

SEQ ID NO: 9298 - RNA, 20 nt, Artificial Sequence
  Synthetic oligonucleotide: FAS-717
cacgaaaagccccggugguc

SEQ ID NO: 9299 - RNA, 20 nt, Artificial Sequence
  Synthetic oligonucleotide: FAS-725
aagccucgcuggggaacgcc

SEQ ID NO: 9300 - RNA, 20 nt, Artificial Sequence
  Synthetic oligonucleotide: FAS-727
ucgcuggggaacgcccgggu

SEQ ID NO: 9301 - RNA, 20 nt, Artificial Sequence
  Synthetic oligonucleotide: FAS-733
ucagcaacuuggccugcgcg

SEQ ID NO: 9302 - RNA, 20 nt, Artificial Sequence
  Synthetic oligonucleotide: FAS-736
acuuggccugcgcgcgggua

SEQ ID NO: 9303 - RNA, 20 nt, Artificial Sequence
  Synthetic oligonucleotide: FAS-748
ucaggguucguugcacaaau

SEQ ID NO: 9304 - RNA, 20 nt, Artificial Sequence
  Synthetic oligonucleotide: FAS-757
cggccuccugcccuuucuaa

SEQ ID NO: 9305 - RNA, 20 nt, Artificial Sequence
  Synthetic oligonucleotide: FAS-759
cuucugcuguaguucaaccu

SEQ ID NO: 9306 - RNA, 20 nt, Artificial Sequence
  Synthetic oligonucleotide: FAS-760
uguaguucaaccugggaagu

SEQ ID NO: 9307 - RNA, 20 nt, Artificial Sequence
  Synthetic oligonucleotide: FAS-773
ucacucagagaaagacuugc

SEQ ID NO: 9308 - RNA, 20 nt, Artificial Sequence
  Synthetic oligonucleotide: FAS-775
agacuugcggggcauuugac

SEQ ID NO: 9309 - RNA, 20 nt, Artificial Sequence
  Synthetic oligonucleotide: FAS-778
uguuguggcugcaacaugag

SEQ ID NO: 9310 - RNA, 20 nt, Artificial Sequence
  Synthetic oligonucleotide: FAS-781
aaguacagauguugcgccau

SEQ ID NO: 9311 - RNA, 20 nt, Artificial Sequence
  Synthetic oligonucleotide: FAS-783
ugcgccauagggcucugaaa

SEQ ID NO: 9312 - RNA, 20 nt, Artificial Sequence
  Synthetic oligonucleotide: FAS-785
ccauagggcucugaaaaggg

SEQ ID NO: 9313 - RNA, 17 nt, Artificial Sequence
  Synthetic oligonucleotide: FAS-811
caggaacgccccgggac

SEQ ID NO: 9314 - RNA, 17 nt, Artificial Sequence
  Synthetic oligonucleotide: FAS-816
ccgggcguuccccagcg

SEQ ID NO: 9315 - RNA, 17 nt, Artificial Sequence
  Synthetic oligonucleotide: FAS-828
uuuacgagugacuuggc

SEQ ID NO: 9316 - RNA, 17 nt, Artificial Sequence
  Synthetic oligonucleotide: FAS-845
cccgcucaguacggagu

SEQ ID NO: 9317 - RNA, 17 nt, Artificial Sequence
  Synthetic oligonucleotide: FAS-846
ccgcucaguacggaguu

SEQ ID NO: 9318 - RNA, 17 nt, Artificial Sequence
  Synthetic oligonucleotide: FAS-847
cgcucaguacggaguug

SEQ ID NO: 9319 - RNA, 17 nt, Artificial Sequence
  Synthetic oligonucleotide: FAS-849
aagcucuuucacuucgg

SEQ ID NO: 9320 - RNA, 17 nt, Artificial Sequence
  Synthetic oligonucleotide: FAS-850
uugcucaacaaccaugc

SEQ ID NO: 9321 - RNA, 17 nt, Artificial Sequence
  Synthetic oligonucleotide: FAS-858
uuaccccgucuuagucc

SEQ ID NO: 9322 - RNA, 17 nt, Artificial Sequence
  Synthetic oligonucleotide: FAS-859
uaccccgucuuaguccc

SEQ ID NO: 9323 - RNA, 17 nt, Artificial Sequence
  Synthetic oligonucleotide: FAS-860
accccgucuuagucccg

SEQ ID NO: 9324 - RNA, 17 nt, Artificial Sequence
  Synthetic oligonucleotide: FAS-863
ccggggauaggcaaagu

SEQ ID NO: 9325 - RNA, 17 nt, Artificial Sequence
  Synthetic oligonucleotide: FAS-878
cccacuuugccuauccc

SEQ ID NO: 9326 - RNA, 17 nt, Artificial Sequence
  Synthetic oligonucleotide: FAS-880
uauccccgggacuaaga

SEQ ID NO: 9327 - RNA, 17 nt, Artificial Sequence
  Synthetic oligonucleotide: FAS-881
auccccgggacuaagac

SEQ ID NO: 9328 - RNA, 17 nt, Artificial Sequence
  Synthetic oligonucleotide: FAS-882
uccccgggacuaagacg

SEQ ID NO: 9329 - RNA, 17 nt, Artificial Sequence
  Synthetic oligonucleotide: FAS-883
cgggguaagccuccacc

SEQ ID NO: 9330 - RNA, 17 nt, Artificial Sequence
  Synthetic oligonucleotide: FAS-896
cggguccaccaacccgc

SEQ ID NO: 9331 - RNA, 17 nt, Artificial Sequence
  Synthetic oligonucleotide: FAS-897
ccaacccgcgggagaag

SEQ ID NO: 9332 - RNA, 17 nt, Artificial Sequence
  Synthetic oligonucleotide: FAS-907
cucacgaaaagccccgg

SEQ ID NO: 9333 - RNA, 17 nt, Artificial Sequence
  Synthetic oligonucleotide: FAS-909
aagccccgguggucagg

SEQ ID NO: 9334 - RNA, 17 nt, Artificial Sequence
  Synthetic oligonucleotide: FAS-916
ccucgcuggggaacgcc

SEQ ID NO: 9335 - RNA, 17 nt, Artificial Sequence
  Synthetic oligonucleotide: FAS-918
cuggggaacgcccgggu

SEQ ID NO: 9336 - RNA, 17 nt, Artificial Sequence
  Synthetic oligonucleotide: FAS-923
ccauugauucagcaacu

SEQ ID NO: 9337 - RNA, 17 nt, Artificial Sequence
  Synthetic oligonucleotide: FAS-927
uggccugcgcgcgggua

SEQ ID NO: 9338 - RNA, 17 nt, Artificial Sequence
  Synthetic oligonucleotide: FAS-938
aggguucguugcacaaa

SEQ ID NO: 9339 - RNA, 17 nt, Artificial Sequence
  Synthetic oligonucleotide: FAS-943
ccggggcguuccugcag

SEQ ID NO: 9340 - RNA, 17 nt, Artificial Sequence
  Synthetic oligonucleotide: FAS-948
ccuccugcccuuucuaa

SEQ ID NO: 9341 - RNA, 17 nt, Artificial Sequence
  Synthetic oligonucleotide: FAS-949
ucugcuguaguucaacc

SEQ ID NO: 9342 - RNA, 17 nt, Artificial Sequence
  Synthetic oligonucleotide: FAS-950
cugcuguaguucaaccu

SEQ ID NO: 9343 - RNA, 17 nt, Artificial Sequence
  Synthetic oligonucleotide: FAS-951
aguucaaccugggaagu

SEQ ID NO: 9344 - RNA, 17 nt, Artificial Sequence
  Synthetic oligonucleotide: FAS-964
cucagagaaagacuugc

SEQ ID NO: 9345 - RNA, 17 nt, Artificial Sequence
  Synthetic oligonucleotide: FAS-966
cuugcggggcauuugac

SEQ ID NO: 9346 - RNA, 17 nt, Artificial Sequence
  Synthetic oligonucleotide: FAS-967
uugcggggcauuugacu

SEQ ID NO: 9347 - RNA, 17 nt, Artificial Sequence
  Synthetic oligonucleotide: FAS-969
uguggcugcaacaugag

SEQ ID NO: 9348 - RNA, 17 nt, Artificial Sequence
  Synthetic oligonucleotide: FAS-970
aggcucacagacguuuc

SEQ ID NO: 9349 - RNA, 17 nt, Artificial Sequence
  Synthetic oligonucleotide: FAS-972
uacagauguugcgccau

SEQ ID NO: 9350 - RNA, 17 nt, Artificial Sequence
  Synthetic oligonucleotide: FAS-975
ccauagggcucugaaaa

SEQ ID NO: 9351 - RNA, 17 nt, Artificial Sequence
  Synthetic oligonucleotide: FAS-976
uagggcucugaaaaggg

SEQ ID NO: 9352 - RNA, 17 nt, Artificial Sequence
  Synthetic oligonucleotide: FAS-921
gaacgcccggguugggg

SEQ ID NO: 9353 - RNA, 17 nt, Artificial Sequence
  Synthetic oligonucleotide: FAS-898
gaagaggcagcuccgcc

SEQ ID NO: 9354 - RNA, 20 nt, Artificial Sequence
  Synthetic oligonucleotide: FAS-766
gaauggagcucagagcgcag

SEQ ID NO: 9355 - RNA, 17 nt, Artificial Sequence
  Synthetic oligonucleotide: FAS-789
gaauguuuaauauagcu

SEQ ID NO: 9356 - RNA, 17 nt, Artificial Sequence
  Synthetic oligonucleotide: FAS-801
gaccuccccaacuuccc

SEQ ID NO: 9357 - RNA, 17 nt, Artificial Sequence
  Synthetic oligonucleotide: FAS-824
gacgcuucuggggagug

SEQ ID NO: 9358 - RNA, 17 nt, Artificial Sequence
  Synthetic oligonucleotide: FAS-829
gacuuggcuggagccuc

SEQ ID NO: 9359 - RNA, 17 nt, Artificial Sequence
  Synthetic oligonucleotide: FAS-794
gagaaauaaaaacuaag

SEQ ID NO: 9360 - RNA, 20 nt, Artificial Sequence
  Synthetic oligonucleotide: FAS-708
gagaagaggcagcuccgccu

SEQ ID NO: 9361 - RNA, 17 nt, Artificial Sequence
  Synthetic oligonucleotide: FAS-962
gagccuuggcuaauugc

SEQ ID NO: 9362 - RNA, 20 nt, Artificial Sequence
  Synthetic oligonucleotide: FAS-647
gaggccagcccuggcugccc

SEQ ID NO: 9363 - RNA, 17 nt, Artificial Sequence
  Synthetic oligonucleotide: FAS-115
gagggcucaccagaggu

SEQ ID NO: 9364 - RNA, 20 nt, Artificial Sequence
  Synthetic oligonucleotide: FAS-3
gagggcucaccagagguagg

SEQ ID NO: 9365 - RNA, 20 nt, Artificial Sequence
  Synthetic oligonucleotide: FAS-743
gagggggagaagucagggug

SEQ ID NO: 9366 - RNA, 20 nt, Artificial Sequence
  Synthetic oligonucleotide: FAS-5
gaggguccagaugcccagca

SEQ ID NO: 9367 - RNA, 17 nt, Artificial Sequence
  Synthetic oligonucleotide: FAS-956
gaggucuugaaggagaa

SEQ ID NO: 9368 - RNA, 17 nt, Artificial Sequence
  Synthetic oligonucleotide: FAS-866
gauaggcaaaguggggc

SEQ ID NO: 9369 - RNA, 20 nt, Artificial Sequence
  Synthetic oligonucleotide: FAS-723
gaugggaaggaagccucgcu

SEQ ID NO: 9370 - RNA, 20 nt, Artificial Sequence
  Synthetic oligonucleotide: FAS-660
gauugcucaacaaccaugcu

SEQ ID NO: 9371 - RNA, 17 nt, Artificial Sequence
  Synthetic oligonucleotide: FAS-867
gcaaaguggggcgggcg

SEQ ID NO: 9372 - RNA, 17 nt, Artificial Sequence
  Synthetic oligonucleotide: FAS-836
gcacggaacacacccug

SEQ ID NO: 9373 - RNA, 17 nt, Artificial Sequence
  Synthetic oligonucleotide: FAS-803
gcagaagccuuuagaaa

SEQ ID NO: 9374 - RNA, 20 nt, Artificial Sequence
  Synthetic oligonucleotide: FAS-709
gcagcuccgccugggcagcc

SEQ ID NO: 9375 - RNA, 17 nt, Artificial Sequence
  Synthetic oligonucleotide: FAS-838
gccagcccuggcugccc

SEQ ID NO: 9376 - RNA, 20 nt, Artificial Sequence
  Synthetic oligonucleotide: FAS-648
gccagcccuggcugcccagg

SEQ ID NO: 9377 - RNA, 17 nt, Artificial Sequence
  Synthetic oligonucleotide: FAS-905
gccagugcccgccccug

SEQ ID NO: 9378 - RNA, 20 nt, Artificial Sequence
  Synthetic oligonucleotide: FAS-688
gccccacuuugccuaucccc

SEQ ID NO: 9379 - RNA, 20 nt, Artificial Sequence
  Synthetic oligonucleotide: FAS-720
gccccgguggucaggaggau

SEQ ID NO: 9380 - RNA, 17 nt, Artificial Sequence
  Synthetic oligonucleotide: FAS-856
gcccucuccugcccggg

SEQ ID NO: 9381 - RNA, 20 nt, Artificial Sequence
  Synthetic oligonucleotide: FAS-666
gcccucuccugcccgggugg

SEQ ID NO: 9382 - RNA, 17 nt, Artificial Sequence
  Synthetic oligonucleotide: FAS-834
gccucaggggcgggcac

SEQ ID NO: 9383 - RNA, 20 nt, Artificial Sequence
  Synthetic oligonucleotide: FAS-696
gccuccacccgggcaggaga

SEQ ID NO: 9384 - RNA, 20 nt, Artificial Sequence
  Synthetic oligonucleotide: FAS-739
gccugcgcgcggguagggag

SEQ ID NO: 9385 - RNA, 17 nt, Artificial Sequence
  Synthetic oligonucleotide: FAS-902
gccugggcagccagggc

SEQ ID NO: 9386 - RNA, 17 nt, Artificial Sequence
  Synthetic oligonucleotide: FAS-959
gcgcagagguccugccu

SEQ ID NO: 9387 - RNA, 17 nt, Artificial Sequence
  Synthetic oligonucleotide: FAS-931
gcgcgcggguagggagg

SEQ ID NO: 9388 - RNA, 17 nt, Artificial Sequence
  Synthetic oligonucleotide: FAS-875
gcggcagcggcgcacgc

SEQ ID NO: 9389 - RNA, 20 nt, Artificial Sequence
  Synthetic oligonucleotide: FAS-684
gcggcggcagcggcgcacgc

SEQ ID NO: 9390 - RNA, 20 nt, Artificial Sequence
  Synthetic oligonucleotide: FAS-780
gcucacagacguuucuggaa

SEQ ID NO: 9391 - RNA, 17 nt, Artificial Sequence
  Synthetic oligonucleotide: FAS-9
gcucaccagagguagga

SEQ ID NO: 9392 - RNA, 17 nt, Artificial Sequence
  Synthetic oligonucleotide: FAS-900
gcuccgccugggcagcc

SEQ ID NO: 9393 - RNA, 17 nt, Artificial Sequence
  Synthetic oligonucleotide: FAS-841
gcugccucuucucccgc

SEQ ID NO: 9394 - RNA, 17 nt, Artificial Sequence
  Synthetic oligonucleotide: FAS-833
gcuggagccucaggggc

SEQ ID NO: 9395 - RNA, 20 nt, Artificial Sequence
  Synthetic oligonucleotide: FAS-729
gcuggggaacgcccggguug

SEQ ID NO: 9396 - RNA, 17 nt, Artificial Sequence
  Synthetic oligonucleotide: FAS-915
ggaaggaagccucgcug

SEQ ID NO: 9397 - RNA, 20 nt, Artificial Sequence
  Synthetic oligonucleotide: FAS-764
ggaaguuggggaggucuuga

SEQ ID NO: 9398 - RNA, 20 nt, Artificial Sequence
  Synthetic oligonucleotide: FAS-681
ggacgcgugcgggauugcgg

SEQ ID NO: 9399 - RNA, 20 nt, Artificial Sequence
  Synthetic oligonucleotide: FAS-707
ggagaagaggcagcuccgcc

SEQ ID NO: 9400 - RNA, 20 nt, Artificial Sequence
  Synthetic oligonucleotide: FAS-105
ggagagggcucaccagaggu

SEQ ID NO: 9401 - RNA, 17 nt, Artificial Sequence
  Synthetic oligonucleotide: FAS-815
ggagcccuccccaaccc

SEQ ID NO: 9402 - RNA, 20 nt, Artificial Sequence
  Synthetic oligonucleotide: FAS-643
ggagccucaggggcgggcac

SEQ ID NO: 9403 - RNA, 20 nt, Artificial Sequence
  Synthetic oligonucleotide: FAS-650
ggagcugccucuucucccgc

SEQ ID NO: 9404 - RNA, 20 nt, Artificial Sequence
  Synthetic oligonucleotide: FAS-722
ggaugggaaggaagccucgc

SEQ ID NO: 9405 - RNA, 20 nt, Artificial Sequence
  Synthetic oligonucleotide: FAS-713
ggcagccagggcuggccuca

SEQ ID NO: 9406 - RNA, 20 nt, Artificial Sequence
  Synthetic oligonucleotide: FAS-697
ggcaggagagggcucaccag

SEQ ID NO: 9407 - RNA, 20 nt, Artificial Sequence
  Synthetic oligonucleotide: FAS-738
ggccugcgcgcggguaggga

SEQ ID NO: 9408 - RNA, 17 nt, Artificial Sequence
  Synthetic oligonucleotide: FAS-874
ggcggcagcggcgcacg

SEQ ID NO: 9409 - RNA, 20 nt, Artificial Sequence
  Synthetic oligonucleotide: FAS-679
ggcgggcgcgggacgcgugc

SEQ ID NO: 9410 - RNA, 17 nt, Artificial Sequence
  Synthetic oligonucleotide: FAS-944
ggcguuccugcaguggc

SEQ ID NO: 9411 - RNA, 17 nt, Artificial Sequence
  Synthetic oligonucleotide: FAS-8
ggcucaccagagguagg

SEQ ID NO: 9412 - RNA, 17 nt, Artificial Sequence
  Synthetic oligonucleotide: FAS-800
ggcuccuguacccaggc

SEQ ID NO: 9413 - RNA, 17 nt, Artificial Sequence
  Synthetic oligonucleotide: FAS-832
ggcuggagccucagggg

SEQ ID NO: 9414 - RNA, 20 nt, Artificial Sequence
  Synthetic oligonucleotide: FAS-731
gggaacgcccggguugggga

SEQ ID NO: 9415 - RNA, 17 nt, Artificial Sequence
  Synthetic oligonucleotide: FAS-914
gggaaggaagccucgcu

SEQ ID NO: 9416 - RNA, 20 nt, Artificial Sequence
  Synthetic oligonucleotide: FAS-744
gggagaagucagggugagga

SEQ ID NO: 9417 - RNA, 17 nt, Artificial Sequence
  Synthetic oligonucleotide: FAS-933
gggagggggagaaguca

SEQ ID NO: 9418 - RNA, 20 nt, Artificial Sequence
  Synthetic oligonucleotide: FAS-712
gggcagccagggcuggccuc

SEQ ID NO: 9419 - RNA, 20 nt, Artificial Sequence
  Synthetic oligonucleotide: FAS-616
gggcaggaggccggcucucg

SEQ ID NO: 9420 - RNA, 17 nt, Artificial Sequence
  Synthetic oligonucleotide: FAS-870
gggcgcgggacgcgugc

SEQ ID NO: 9421 - RNA, 20 nt, Artificial Sequence
  Synthetic oligonucleotide: FAS-678
gggcgggcgcgggacgcgug

SEQ ID NO: 9422 - RNA, 17 nt, Artificial Sequence
  Synthetic oligonucleotide: FAS-920
ggggaacgcccggguug

SEQ ID NO: 9423 - RNA, 20 nt, Artificial Sequence
  Synthetic oligonucleotide: FAS-730
ggggaacgcccggguugggg

SEQ ID NO: 9424 - RNA, 17 nt, Artificial Sequence
  Synthetic oligonucleotide: FAS-934
ggggagaagucagggug

SEQ ID NO: 9425 - RNA, 20 nt, Artificial Sequence
  Synthetic oligonucleotide: FAS-765
ggggaggucuugaaggagaa

SEQ ID NO: 9426 - RNA, 20 nt, Artificial Sequence
  Synthetic oligonucleotide: FAS-675
ggggauaggcaaaguggggc

SEQ ID NO: 9427 - RNA, 20 nt, Artificial Sequence
  Synthetic oligonucleotide: FAS-694
ggguaagccuccacccgggc

SEQ ID NO: 9428 - RNA, 17 nt, Artificial Sequence
  Synthetic oligonucleotide: FAS-937
gggugaggaaggaguca

SEQ ID NO: 9429 - RNA, 20 nt, Artificial Sequence
  Synthetic oligonucleotide: FAS-741
gguagggagggggagaaguc

SEQ ID NO: 9430 - RNA, 17 nt, Artificial Sequence
  Synthetic oligonucleotide: FAS-10
gguccagaugcccagca

SEQ ID NO: 9431 - RNA, 20 nt, Artificial Sequence
  Synthetic oligonucleotide: FAS-632
gguguucaaagacgcuucug

SEQ ID NO: 9432 - RNA, 20 nt, Artificial Sequence
  Synthetic oligonucleotide: FAS-742
guagggagggggagaaguca

SEQ ID NO: 9433 - RNA, 20 nt, Artificial Sequence
  Synthetic oligonucleotide: FAS-772
gucacucagagaaagacuug

SEQ ID NO: 9434 - RNA, 20 nt, Artificial Sequence
  Synthetic oligonucleotide: FAS-745
gucagggugaggaaggaguc

SEQ ID NO: 9435 - RNA, 20 nt, Artificial Sequence
  Synthetic oligonucleotide: FAS-599
gugaauguuuaauauagcug

SEQ ID NO: 9436 - RNA, 20 nt, Artificial Sequence
  Synthetic oligonucleotide: FAS-607
gugacuccagcaauuagcca

SEQ ID NO: 9437 - RNA, 20 nt, Artificial Sequence
  Synthetic oligonucleotide: FAS-639
gugacuuggcuggagccuca

SEQ ID NO: 9438 - RNA, 20 nt, Artificial Sequence
  Synthetic oligonucleotide: FAS-617
gugagcaugccagccacugc

SEQ ID NO: 9439 - RNA, 17 nt, Artificial Sequence
  Synthetic oligonucleotide: FAS-854
gugagcccucuccugcc

SEQ ID NO: 9440 - RNA, 17 nt, Artificial Sequence
  Synthetic oligonucleotide: FAS-947
gugaggaccucgagagc

SEQ ID NO: 9441 - RNA, 20 nt, Artificial Sequence
  Synthetic oligonucleotide: FAS-682
gugcgggauugcggcggcag

SEQ ID NO: 9442 - RNA, 17 nt, Artificial Sequence
  Synthetic oligonucleotide: FAS-823
guucaaagacgcuucug

SEQ ID NO: 9443 - RNA, 20 nt, Artificial Sequence
  Synthetic oligonucleotide: FAS-633
aaagacgcuucuggggagug

SEQ ID NO: 9444 - RNA, 20 nt, Artificial Sequence
  Synthetic oligonucleotide: FAS-751
aaaugggcauuccugucccg

SEQ ID NO: 9445 - RNA, 20 nt, Artificial Sequence
  Synthetic oligonucleotide: FAS-605
aacaucuguacuuuuucaua

SEQ ID NO: 9446 - RNA, 17 nt, Artificial Sequence
  Synthetic oligonucleotide: FAS-954
aaccugggaaguugggg

SEQ ID NO: 9447 - RNA, 17 nt, Artificial Sequence
  Synthetic oligonucleotide: FAS-922
aacgcccggguugggga

SEQ ID NO: 9448 - RNA, 20 nt, Artificial Sequence
  Synthetic oligonucleotide: FAS-735
aacuuggccugcgcgcgggu

SEQ ID NO: 9449 - RNA, 20 nt, Artificial Sequence
  Synthetic oligonucleotide: FAS-634
aagacgcuucuggggaguga

SEQ ID NO: 9450 - RNA, 17 nt, Artificial Sequence
  Synthetic oligonucleotide: FAS-899
aagaggcagcuccgccu

SEQ ID NO: 9451 - RNA, 17 nt, Artificial Sequence
  Synthetic oligonucleotide: FAS-804
aagccuuuagaaagggc

SEQ ID NO: 9452 - RNA, 20 nt, Artificial Sequence
  Synthetic oligonucleotide: FAS-614
aagccuuuagaaagggcagg

SEQ ID NO: 9453 - RNA, 20 nt, Artificial Sequence
  Synthetic oligonucleotide: FAS-624
aauggagcccuccccaaccc

SEQ ID NO: 9454 - RNA, 17 nt, Artificial Sequence
  Synthetic oligonucleotide: FAS-940
aaugggcauuccugucc

SEQ ID NO: 9455 - RNA, 17 nt, Artificial Sequence
  Synthetic oligonucleotide: FAS-790
aauguuuaauauagcug

SEQ ID NO: 9456 - RNA, 20 nt, Artificial Sequence
  Synthetic oligonucleotide: FAS-749
acaaaugggcauuccugucc

SEQ ID NO: 9457 - RNA, 20 nt, Artificial Sequence
  Synthetic oligonucleotide: FAS-646
acacacccugaggccagccc

SEQ ID NO: 9458 - RNA, 17 nt, Artificial Sequence
  Synthetic oligonucleotide: FAS-973
acagauguugcgccaua

SEQ ID NO: 9459 - RNA, 20 nt, Artificial Sequence
  Synthetic oligonucleotide: FAS-612
acagcagaagccuuuagaaa

SEQ ID NO: 9460 - RNA, 17 nt, Artificial Sequence
  Synthetic oligonucleotide: FAS-825
acgcuucuggggaguga

SEQ ID NO: 9461 - RNA, 17 nt, Artificial Sequence
  Synthetic oligonucleotide: FAS-963
acucagagaaagacuug

SEQ ID NO: 9462 - RNA, 17 nt, Artificial Sequence
  Synthetic oligonucleotide: FAS-798
acuccagcaauuagcca

SEQ ID NO: 9463 - RNA, 17 nt, Artificial Sequence
  Synthetic oligonucleotide: FAS-830
acuuggcuggagccuca

SEQ ID NO: 9464 - RNA, 17 nt, Artificial Sequence
  Synthetic oligonucleotide: FAS-935
agaagucagggugagga

SEQ ID NO: 9465 - RNA, 20 nt, Artificial Sequence
  Synthetic oligonucleotide: FAS-768
agagcgcagagguccugccu

SEQ ID NO: 9466 - RNA, 17 nt, Artificial Sequence
  Synthetic oligonucleotide: FAS-802
agcagaagccuuuagaa

SEQ ID NO: 9467 - RNA, 17 nt, Artificial Sequence
  Synthetic oligonucleotide: FAS-808
agcaugccagccacugc

SEQ ID NO: 9468 - RNA, 20 nt, Artificial Sequence
  Synthetic oligonucleotide: FAS-619
agccacugcaggaacgcccc

SEQ ID NO: 9469 - RNA, 17 nt, Artificial Sequence
  Synthetic oligonucleotide: FAS-904
agccagggcuggccuca

SEQ ID NO: 9470 - RNA, 20 nt, Artificial Sequence
  Synthetic oligonucleotide: FAS-719
agccccgguggucaggagga

SEQ ID NO: 9471 - RNA, 17 nt, Artificial Sequence
  Synthetic oligonucleotide: FAS-839
agcccuggcugcccagg

SEQ ID NO: 9472 - RNA, 20 nt, Artificial Sequence
  Synthetic oligonucleotide: FAS-695
agccuccacccgggcaggag

SEQ ID NO: 9473 - RNA, 20 nt, Artificial Sequence
  Synthetic oligonucleotide: FAS-726
agccucgcuggggaacgccc

SEQ ID NO: 9474 - RNA, 17 nt, Artificial Sequence
  Synthetic oligonucleotide: FAS-958
agcgcagagguccugcc

SEQ ID NO: 9475 - RNA, 17 nt, Artificial Sequence
  Synthetic oligonucleotide: FAS-840
agcugccucuucucccg

SEQ ID NO: 9476 - RNA, 17 nt, Artificial Sequence
  Synthetic oligonucleotide: FAS-888
aggagagggcucaccag

SEQ ID NO: 9477 - RNA, 20 nt, Artificial Sequence
  Synthetic oligonucleotide: FAS-677
aggcaaaguggggcgggcgc

SEQ ID NO: 9478 - RNA, 20 nt, Artificial Sequence
  Synthetic oligonucleotide: FAS-622
aggccaaguugcugaaucaa

SEQ ID NO: 9479 - RNA, 17 nt, Artificial Sequence
  Synthetic oligonucleotide: FAS-932
agggagggggagaaguc

SEQ ID NO: 9480 - RNA, 20 nt, Artificial Sequence
  Synthetic oligonucleotide: FAS-4
agggcucaccagagguagga

SEQ ID NO: 9481 - RNA, 17 nt, Artificial Sequence
  Synthetic oligonucleotide: FAS-977
agggcucugaaaaggga

SEQ ID NO: 9482 - RNA, 17 nt, Artificial Sequence
  Synthetic oligonucleotide: FAS-835
aggggcgggcacuggca

SEQ ID NO: 9483 - RNA, 17 nt, Artificial Sequence
  Synthetic oligonucleotide: FAS-936
agggugaggaaggaguc

SEQ ID NO: 9484 - RNA, 17 nt, Artificial Sequence
  Synthetic oligonucleotide: FAS-960
agguccugccuggguac

SEQ ID NO: 9485 - RNA, 20 nt, Artificial Sequence
  Synthetic oligonucleotide: FAS-631
agguguucaaagacgcuucu

SEQ ID NO: 9486 - RNA, 20 nt, Artificial Sequence
  Synthetic oligonucleotide: FAS-782
aguacagauguugcgccaua

SEQ ID NO: 9487 - RNA, 20 nt, Artificial Sequence
  Synthetic oligonucleotide: FAS-671
agucccggggauaggcaaag

SEQ ID NO: 9488 - RNA, 20 nt, Artificial Sequence
  Synthetic oligonucleotide: FAS-638
agugacuuggcuggagccuc

SEQ ID NO: 9489 - RNA, 17 nt, Artificial Sequence
  Synthetic oligonucleotide: FAS-955
aguuggggaggucuuga

SEQ ID NO: 9490 - RNA, 17 nt, Artificial Sequence
  Synthetic oligonucleotide: FAS-978
aguuuuuauuucucaag

SEQ ID NO: 9491 - RNA, 17 nt, Artificial Sequence
  Synthetic oligonucleotide: FAS-796
aucuguacuuuuucaua

SEQ ID NO: 9492 - RNA, 20 nt, Artificial Sequence
  Synthetic oligonucleotide: FAS-724
augggaaggaagccucgcug

SEQ ID NO: 9493 - RNA, 17 nt, Artificial Sequence
  Synthetic oligonucleotide: FAS-941
augggcauuccuguccc

SEQ ID NO: 9494 - RNA, 17 nt, Artificial Sequence
  Synthetic oligonucleotide: FAS-797
auguugcagccacaaca

SEQ ID NO: 9495 - RNA, 17 nt, Artificial Sequence
  Synthetic oligonucleotide: FAS-868
caaaguggggcgggcgc

SEQ ID NO: 9496 - RNA, 20 nt, Artificial Sequence
  Synthetic oligonucleotide: FAS-750
caaaugggcauuccuguccc

SEQ ID NO: 9497 - RNA, 20 nt, Artificial Sequence
  Synthetic oligonucleotide: FAS-1
caacaaccaugcugggcauc

SEQ ID NO: 9498 - RNA, 17 nt, Artificial Sequence
  Synthetic oligonucleotide: FAS-6
caaccaugcugggcauc

SEQ ID NO: 9499 - RNA, 17 nt, Artificial Sequence
  Synthetic oligonucleotide: FAS-925
caacuuggccugcgcgc

SEQ ID NO: 9500 - RNA, 20 nt, Artificial Sequence
  Synthetic oligonucleotide: FAS-610
caagaccuccccaacuuccc

SEQ ID NO: 9501 - RNA, 20 nt, Artificial Sequence
  Synthetic oligonucleotide: FAS-609
caaggcuccuguacccaggc

SEQ ID NO: 9502 - RNA, 20 nt, Artificial Sequence
  Synthetic oligonucleotide: FAS-623
caauggagcccuccccaacc

SEQ ID NO: 9503 - RNA, 17 nt, Artificial Sequence
  Synthetic oligonucleotide: FAS-971
cacagacguuucuggaa

SEQ ID NO: 9504 - RNA, 17 nt, Artificial Sequence
  Synthetic oligonucleotide: FAS-837
cacccugaggccagccc

SEQ ID NO: 9505 - RNA, 20 nt, Artificial Sequence
  Synthetic oligonucleotide: FAS-774
cacucagagaaagacuugcg

SEQ ID NO: 9506 - RNA, 17 nt, Artificial Sequence
  Synthetic oligonucleotide: FAS-810
cacugcaggaacgcccc

SEQ ID NO: 9507 - RNA, 20 nt, Artificial Sequence
  Synthetic oligonucleotide: FAS-613
cagaagccuuuagaaagggc

SEQ ID NO: 9508 - RNA, 20 nt, Artificial Sequence
  Synthetic oligonucleotide: FAS-767
cagagcgcagagguccugcc

SEQ ID NO: 9509 - RNA, 20 nt, Artificial Sequence
  Synthetic oligonucleotide: FAS-769
cagagguccugccuggguac

SEQ ID NO: 9510 - RNA, 20 nt, Artificial Sequence
  Synthetic oligonucleotide: FAS-734
cagcaacuuggccugcgcgc

SEQ ID NO: 9511 - RNA, 20 nt, Artificial Sequence
  Synthetic oligonucleotide: FAS-618
cagccacugcaggaacgccc

SEQ ID NO: 9512 - RNA, 17 nt, Artificial Sequence
  Synthetic oligonucleotide: FAS-903
cagccagggcuggccuc

SEQ ID NO: 9513 - RNA, 20 nt, Artificial Sequence
  Synthetic oligonucleotide: FAS-685
cagcggcgcacgcgggcacc

SEQ ID NO: 9514 - RNA, 20 nt, Artificial Sequence
  Synthetic oligonucleotide: FAS-710
cagcuccgccugggcagcca

SEQ ID NO: 9515 - RNA, 20 nt, Artificial Sequence
  Synthetic oligonucleotide: FAS-771
caggagccuuggcuaauugc

SEQ ID NO: 9516 - RNA, 17 nt, Artificial Sequence
  Synthetic oligonucleotide: FAS-807
caggaggccggcucucg

SEQ ID NO: 9517 - RNA, 20 nt, Artificial Sequence
  Synthetic oligonucleotide: FAS-756
caggugaggaccucgagagc

SEQ ID NO: 9518 - RNA, 20 nt, Artificial Sequence
  Synthetic oligonucleotide: FAS-786
cauagggcucugaaaaggga

SEQ ID NO: 9519 - RNA, 17 nt, Artificial Sequence
  Synthetic oligonucleotide: FAS-819
cauccuccugaccaccg

SEQ ID NO: 9520 - RNA, 20 nt, Artificial Sequence
  Synthetic oligonucleotide: FAS-2
caucuggacccuccuaccuc

SEQ ID NO: 9521 - RNA, 17 nt, Artificial Sequence
  Synthetic oligonucleotide: FAS-946
caugcucacuucaggug

SEQ ID NO: 9522 - RNA, 17 nt, Artificial Sequence
  Synthetic oligonucleotide: FAS-894
ccaacuccguacugagc

SEQ ID NO: 9523 - RNA, 17 nt, Artificial Sequence
  Synthetic oligonucleotide: FAS-799
ccaaggcuccuguaccc

SEQ ID NO: 9524 - RNA, 17 nt, Artificial Sequence
  Synthetic oligonucleotide: FAS-813
ccaaguugcugaaucaa

SEQ ID NO: 9525 - RNA, 17 nt, Artificial Sequence
  Synthetic oligonucleotide: FAS-809
ccacugcaggaacgccc

SEQ ID NO: 9526 - RNA, 17 nt, Artificial Sequence
  Synthetic oligonucleotide: FAS-879
ccacuuugccuaucccc

SEQ ID NO: 9527 - RNA, 17 nt, Artificial Sequence
  Synthetic oligonucleotide: FAS-818
ccauccuccugaccacc

SEQ ID NO: 9528 - RNA, 17 nt, Artificial Sequence
  Synthetic oligonucleotide: FAS-893
cccaacuccguacugag

SEQ ID NO: 9529 - RNA, 17 nt, Artificial Sequence
  Synthetic oligonucleotide: FAS-817
cccauccuccugaccac

SEQ ID NO: 9530 - RNA, 20 nt, Artificial Sequence
  Synthetic oligonucleotide: FAS-621
cccccucccuacccgcgcgc

SEQ ID NO: 9531 - RNA, 17 nt, Artificial Sequence
  Synthetic oligonucleotide: FAS-862
cccggggauaggcaaag

SEQ ID NO: 9532 - RNA, 17 nt, Artificial Sequence
  Synthetic oligonucleotide: FAS-910
cccgguggucaggagga

SEQ ID NO: 9533 - RNA, 17 nt, Artificial Sequence
  Synthetic oligonucleotide: FAS-795
cccuuuucagagcccua

SEQ ID NO: 9534 - RNA, 17 nt, Artificial Sequence
  Synthetic oligonucleotide: FAS-911
ccgguggucaggaggau

SEQ ID NO: 9535 - RNA, 17 nt, Artificial Sequence
  Synthetic oligonucleotide: FAS-812
ccucccuacccgcgcgc

SEQ ID NO: 9536 - RNA, 20 nt, Artificial Sequence
  Synthetic oligonucleotide: FAS-604
ccucccuuuucagagcccua

SEQ ID NO: 9537 - RNA, 17 nt, Artificial Sequence
  Synthetic oligonucleotide: FAS-842
ccucuucucccgcgggu

SEQ ID NO: 9538 - RNA, 20 nt, Artificial Sequence
  Synthetic oligonucleotide: FAS-652
ccucuucucccgcggguugg

SEQ ID NO: 9539 - RNA, 17 nt, Artificial Sequence
  Synthetic oligonucleotide: FAS-928
ccugcgcgcggguaggg

SEQ ID NO: 9540 - RNA, 20 nt, Artificial Sequence
  Synthetic oligonucleotide: FAS-740
ccugcgcgcggguagggagg

SEQ ID NO: 9541 - RNA, 17 nt, Artificial Sequence
  Synthetic oligonucleotide: FAS-961
ccuggguacaggagccu

SEQ ID NO: 9542 - RNA, 17 nt, Artificial Sequence
  Synthetic oligonucleotide: FAS-805
ccuuuagaaagggcagg

SEQ ID NO: 9543 - RNA, 17 nt, Artificial Sequence
  Synthetic oligonucleotide: FAS-872
cgcgugcgggauugcgg

SEQ ID NO: 9544 - RNA, 20 nt, Artificial Sequence
  Synthetic oligonucleotide: FAS-728
cgcuggggaacgcccggguu

SEQ ID NO: 9545 - RNA, 20 nt, Artificial Sequence
  Synthetic oligonucleotide: FAS-649
cggagcugccucuucucccg

SEQ ID NO: 9546 - RNA, 17 nt, Artificial Sequence
  Synthetic oligonucleotide: FAS-876
cggcgcacgcgggcacc

SEQ ID NO: 9547 - RNA, 17 nt, Artificial Sequence
  Synthetic oligonucleotide: FAS-873
cgggauugcggcggcag

SEQ ID NO: 9548 - RNA, 17 nt, Artificial Sequence
  Synthetic oligonucleotide: FAS-869
cgggcgcgggacgcgug

SEQ ID NO: 9549 - RNA, 17 nt, Artificial Sequence
  Synthetic oligonucleotide: FAS-864
cggggauaggcaaagug

SEQ ID NO: 9550 - RNA, 20 nt, Artificial Sequence
  Synthetic oligonucleotide: FAS-753
cggggcguuccugcaguggc

SEQ ID NO: 9551 - RNA, 20 nt, Artificial Sequence
  Synthetic oligonucleotide: FAS-721
cgguggucaggaggauggga

SEQ ID NO: 9552 - RNA, 20 nt, Artificial Sequence
  Synthetic oligonucleotide: FAS-714
cgugccagugcccgccccug

SEQ ID NO: 9553 - RNA, 20 nt, Artificial Sequence
  Synthetic oligonucleotide: FAS-644
cucaggggcgggcacuggca

SEQ ID NO: 9554 - RNA, 20 nt, Artificial Sequence
  Synthetic oligonucleotide: FAS-606
cucauguugcagccacaaca

SEQ ID NO: 9555 - RNA, 17 nt, Artificial Sequence
  Synthetic oligonucleotide: FAS-886
cuccacccgggcaggag

SEQ ID NO: 9556 - RNA, 17 nt, Artificial Sequence
  Synthetic oligonucleotide: FAS-901
cuccgccugggcagcca

SEQ ID NO: 9557 - RNA, 17 nt, Artificial Sequence
  Synthetic oligonucleotide: FAS-917
cucgcuggggaacgccc

SEQ ID NO: 9558 - RNA, 17 nt, Artificial Sequence
  Synthetic oligonucleotide: FAS-857
cucuccugcccgggugg

SEQ ID NO: 9559 - RNA, 20 nt, Artificial Sequence
  Synthetic oligonucleotide: FAS-601
cucuugagaaauaaaaacua

SEQ ID NO: 9560 - RNA, 20 nt, Artificial Sequence
  Synthetic oligonucleotide: FAS-651
cugccucuucucccgcgggu

SEQ ID NO: 9561 - RNA, 20 nt, Artificial Sequence
  Synthetic oligonucleotide: FAS-770
cugccuggguacaggagccu

SEQ ID NO: 9562 - RNA, 17 nt, Artificial Sequence
  Synthetic oligonucleotide: FAS-929
cugcgcgcggguaggga

SEQ ID NO: 9563 - RNA, 17 nt, Artificial Sequence
  Synthetic oligonucleotide: FAS-7
cuggacccuccuaccuc

SEQ ID NO: 9564 - RNA, 20 nt, Artificial Sequence
  Synthetic oligonucleotide: FAS-645
cuggcacggaacacacccug

SEQ ID NO: 9565 - RNA, 17 nt, Artificial Sequence
  Synthetic oligonucleotide: FAS-968
cugggcuguccauguug

SEQ ID NO: 9566 - RNA, 17 nt, Artificial Sequence
  Synthetic oligonucleotide: FAS-826
cuggggagugagggaag

SEQ ID NO: 9567 - RNA, 20 nt, Artificial Sequence
  Synthetic oligonucleotide: FAS-663
cuggugagcccucuccugcc

SEQ ID NO: 9568 - RNA, 20 nt, Artificial Sequence
  Synthetic oligonucleotide: FAS-787
cuuaguuuuuauuucucaag

SEQ ID NO: 9569 - RNA, 20 nt, Artificial Sequence
  Synthetic oligonucleotide: FAS-626
cuucccauccuccugaccac

SEQ ID NO: 9570 - RNA, 17 nt, Artificial Sequence
  Synthetic oligonucleotide: FAS-843
cuucucccgcggguugg

SEQ ID NO: 9571 - RNA, 20 nt, Artificial Sequence
  Synthetic oligonucleotide: FAS-635
cuucuggggagugagggaag

SEQ ID NO: 9572 - RNA, 20 nt, Artificial Sequence
  Synthetic oligonucleotide: FAS-603
cuugagaaauaaaaacuaag

SEQ ID NO: 9573 - RNA, 17 nt, Artificial Sequence
  Synthetic oligonucleotide: FAS-831
cuuggcuggagccucag

SEQ ID NO: 9574 - RNA, 20 nt, Artificial Sequence
  Synthetic oligonucleotide: FAS-641
cuuggcuggagccucagggg

SEQ ID NO: 9575 - RNA, 20 nt, Artificial Sequence
  Synthetic oligonucleotide: FAS-615
cuuuagaaagggcaggaggc

SEQ ID NO: 9576 - RNA, 17 nt, Artificial Sequence
  Synthetic oligonucleotide: FAS-885
uaagccuccacccgggc

SEQ ID NO: 9577 - RNA, 20 nt, Artificial Sequence
  Synthetic oligonucleotide: FAS-611
uacagcagaagccuuuagaa

SEQ ID NO: 9578 - RNA, 17 nt, Artificial Sequence
  Synthetic oligonucleotide: FAS-806
uagaaagggcaggaggc

SEQ ID NO: 9579 - RNA, 20 nt, Artificial Sequence
  Synthetic oligonucleotide: FAS-608
uagccaaggcuccuguaccc

SEQ ID NO: 9580 - RNA, 20 nt, Artificial Sequence
  Synthetic oligonucleotide: FAS-676
uaggcaaaguggggcgggcg

SEQ ID NO: 9581 - RNA, 20 nt, Artificial Sequence
  Synthetic oligonucleotide: FAS-762
uaguucaaccugggaaguug

SEQ ID NO: 9582 - RNA, 17 nt, Artificial Sequence
  Synthetic oligonucleotide: FAS-965
ucagagaaagacuugcg

SEQ ID NO: 9583 - RNA, 20 nt, Artificial Sequence
  Synthetic oligonucleotide: FAS-746
ucagggugaggaaggaguca

SEQ ID NO: 9584 - RNA, 17 nt, Artificial Sequence
  Synthetic oligonucleotide: FAS-887
uccacccgggcaggaga

SEQ ID NO: 9585 - RNA, 20 nt, Artificial Sequence
  Synthetic oligonucleotide: FAS-628
ucccauccuccugaccaccg

SEQ ID NO: 9586 - RNA, 20 nt, Artificial Sequence
  Synthetic oligonucleotide: FAS-703
uccccaacuccguacugagc

SEQ ID NO: 9587 - RNA, 20 nt, Artificial Sequence
  Synthetic oligonucleotide: FAS-673
ucccggggauaggcaaagug

SEQ ID NO: 9588 - RNA, 20 nt, Artificial Sequence
  Synthetic oligonucleotide: FAS-711
uccgccugggcagccagggc

SEQ ID NO: 9589 - RNA, 20 nt, Artificial Sequence
  Synthetic oligonucleotide: FAS-602
ucuugagaaauaaaaacuaa

SEQ ID NO: 9590 - RNA, 17 nt, Artificial Sequence
  Synthetic oligonucleotide: FAS-788
ugaauguuuaauauagc

SEQ ID NO: 9591 - RNA, 20 nt, Artificial Sequence
  Synthetic oligonucleotide: FAS-777
ugacugggcuguccauguug

SEQ ID NO: 9592 - RNA, 20 nt, Artificial Sequence
  Synthetic oligonucleotide: FAS-640
ugacuuggcuggagccucag

SEQ ID NO: 9593 - RNA, 17 nt, Artificial Sequence
  Synthetic oligonucleotide: FAS-793
ugagaaauaaaaacuaa

SEQ ID NO: 9594 - RNA, 17 nt, Artificial Sequence
  Synthetic oligonucleotide: FAS-855
ugagcccucuccugccc

SEQ ID NO: 9595 - RNA, 20 nt, Artificial Sequence
  Synthetic oligonucleotide: FAS-665
ugagcccucuccugcccggg

SEQ ID NO: 9596 - RNA, 17 nt, Artificial Sequence
  Synthetic oligonucleotide: FAS-930
ugcgcgcggguagggag

SEQ ID NO: 9597 - RNA, 20 nt, Artificial Sequence
  Synthetic oligonucleotide: FAS-683
ugcggcggcagcggcgcacg

SEQ ID NO: 9598 - RNA, 17 nt, Artificial Sequence
  Synthetic oligonucleotide: FAS-851
ugcucaacaaccaugcu

SEQ ID NO: 9599 - RNA, 17 nt, Artificial Sequence
  Synthetic oligonucleotide: FAS-814
uggagcccuccccaacc

SEQ ID NO: 9600 - RNA, 17 nt, Artificial Sequence
  Synthetic oligonucleotide: FAS-957
uggagcucagagcgcag

SEQ ID NO: 9601 - RNA, 20 nt, Artificial Sequence
  Synthetic oligonucleotide: FAS-755
uggcaugcucacuucaggug

SEQ ID NO: 9602 - RNA, 20 nt, Artificial Sequence
  Synthetic oligonucleotide: FAS-737
uggccugcgcgcggguaggg

SEQ ID NO: 9603 - RNA, 17 nt, Artificial Sequence
  Synthetic oligonucleotide: FAS-913
ugggaaggaagccucgc

SEQ ID NO: 9604 - RNA, 17 nt, Artificial Sequence
  Synthetic oligonucleotide: FAS-942
ugggcauuccugucccg

SEQ ID NO: 9605 - RNA, 17 nt, Artificial Sequence
  Synthetic oligonucleotide: FAS-919
uggggaacgcccggguu

SEQ ID NO: 9606 - RNA, 17 nt, Artificial Sequence
  Synthetic oligonucleotide: FAS-912
uggucaggaggauggga

SEQ ID NO: 9607 - RNA, 20 nt, Artificial Sequence
  Synthetic oligonucleotide: FAS-664
uggugagcccucuccugccc

SEQ ID NO: 9608 - RNA, 20 nt, Artificial Sequence
  Synthetic oligonucleotide: FAS-598
ugugaauguuuaauauagcu

SEQ ID NO: 9609 - RNA, 17 nt, Artificial Sequence
  Synthetic oligonucleotide: FAS-822
uguucaaagacgcuucu

SEQ ID NO: 9610 - RNA, 17 nt, Artificial Sequence
  Synthetic oligonucleotide: FAS-953
uucaaccugggaaguug

SEQ ID NO: 9611 - RNA, 20 nt, Artificial Sequence
  Synthetic oligonucleotide: FAS-763
uucaaccugggaaguugggg

SEQ ID NO: 9612 - RNA, 20 nt, Artificial Sequence
  Synthetic oligonucleotide: FAS-627
uucccauccuccugaccacc

SEQ ID NO: 9613 - RNA, 20 nt, Artificial Sequence
  Synthetic oligonucleotide: FAS-702
uuccccaacuccguacugag

SEQ ID NO: 9614 - RNA, 17 nt, Artificial Sequence
  Synthetic oligonucleotide: FAS-792
uugagaaauaaaaacua

SEQ ID NO: 9615 - RNA, 17 nt, Artificial Sequence
  Synthetic oligonucleotide: FAS-926
uuggccugcgcgcgggu

SEQ ID NO: 9616 - RNA, 20 nt, Artificial Sequence
  Synthetic oligonucleotide: FAS-642
uuggcuggagccucaggggc

SEQ ID NO: 9617 - RNA, 20 nt, Artificial Sequence
  Synthetic oligonucleotide: FAS-597
uugugaauguuuaauauagc

SEQ ID NO: 9618 - RNA, 20 nt, Artificial Sequence
  Synthetic oligonucleotide: FAS-1779
ccuaucaacaccuacaagac

SEQ ID NO: 9619 - RNA, 20 nt, Artificial Sequence
  Synthetic oligonucleotide: FAS-1780
aucaacaccuacaagacugg

SEQ ID NO: 9620 - RNA, 20 nt, Artificial Sequence
  Synthetic oligonucleotide: FAS-1781
cagugacagaugcaaaacac

SEQ ID NO: 9621 - RNA, 20 nt, Artificial Sequence
  Synthetic oligonucleotide: FAS-1782
agugacagaugcaaaacaca

SEQ ID NO: 9622 - RNA, 20 nt, Artificial Sequence
  Synthetic oligonucleotide: FAS-1783
agaugcaaaacacaggguga

SEQ ID NO: 9623 - RNA, 20 nt, Artificial Sequence
  Synthetic oligonucleotide: FAS-1784
cagggugauggaaagcccuc

SEQ ID NO: 9624 - RNA, 20 nt, Artificial Sequence
  Synthetic oligonucleotide: FAS-1785
ggugauggaaagcccucagg

SEQ ID NO: 9625 - RNA, 20 nt, Artificial Sequence
  Synthetic oligonucleotide: FAS-1786
gugauggaaagcccucagga

SEQ ID NO: 9626 - RNA, 20 nt, Artificial Sequence
  Synthetic oligonucleotide: FAS-1787
gguaaccuaaccuagauuug

SEQ ID NO: 9627 - RNA, 20 nt, Artificial Sequence
  Synthetic oligonucleotide: FAS-1788
guaaccuaaccuagauuuga

SEQ ID NO: 9628 - RNA, 20 nt, Artificial Sequence
  Synthetic oligonucleotide: FAS-1789
cuagauuugagggcccaaac

SEQ ID NO: 9629 - RNA, 20 nt, Artificial Sequence
  Synthetic oligonucleotide: FAS-1790
agaagaaaaugucaacugag

SEQ ID NO: 9630 - RNA, 20 nt, Artificial Sequence
  Synthetic oligonucleotide: FAS-1791
ucaacugagaggaagccuga

SEQ ID NO: 9631 - RNA, 20 nt, Artificial Sequence
  Synthetic oligonucleotide: FAS-1792
gaagccugaaggaugaacag

SEQ ID NO: 9632 - RNA, 20 nt, Artificial Sequence
  Synthetic oligonucleotide: FAS-1793
aagccugaaggaugaacagu

SEQ ID NO: 9633 - RNA, 20 nt, Artificial Sequence
  Synthetic oligonucleotide: FAS-1794
augaacagugggcuaagcaa

SEQ ID NO: 9634 - RNA, 20 nt, Artificial Sequence
  Synthetic oligonucleotide: FAS-1795
ugaacagugggcuaagcaaa

SEQ ID NO: 9635 - RNA, 20 nt, Artificial Sequence
  Synthetic oligonucleotide: FAS-1796
gguuauuaauguguuauuaa

SEQ ID NO: 9636 - RNA, 20 nt, Artificial Sequence
  Synthetic oligonucleotide: FAS-1797
guuauuaauguguuauuaau

SEQ ID NO: 9637 - RNA, 20 nt, Artificial Sequence
  Synthetic oligonucleotide: FAS-1798
auuaauggguugaaucuaau

SEQ ID NO: 9638 - RNA, 20 nt, Artificial Sequence
  Synthetic oligonucleotide: FAS-1799
uuaauggguugaaucuaauu

SEQ ID NO: 9639 - RNA, 20 nt, Artificial Sequence
  Synthetic oligonucleotide: FAS-1800
uggguugaaucuaauuggga

SEQ ID NO: 9640 - RNA, 20 nt, Artificial Sequence
  Synthetic oligonucleotide: FAS-1801
ggguugaaucuaauugggaa

SEQ ID NO: 9641 - RNA, 20 nt, Artificial Sequence
  Synthetic oligonucleotide: FAS-1802
aucuaauugggaagggagag

SEQ ID NO: 9642 - RNA, 20 nt, Artificial Sequence
  Synthetic oligonucleotide: FAS-1803
gggagagagguugcagagug

SEQ ID NO: 9643 - RNA, 20 nt, Artificial Sequence
  Synthetic oligonucleotide: FAS-1804
gcagagugaggugcagagcu

SEQ ID NO: 9644 - RNA, 20 nt, Artificial Sequence
  Synthetic oligonucleotide: FAS-1805
gagugaggugcagagcuugg

SEQ ID NO: 9645 - RNA, 20 nt, Artificial Sequence
  Synthetic oligonucleotide: FAS-1806
agcuugguggacgaugccaa

SEQ ID NO: 9646 - RNA, 20 nt, Artificial Sequence
  Synthetic oligonucleotide: FAS-1807
aaccuuuaguguguccaguc

SEQ ID NO: 9647 - RNA, 20 nt, Artificial Sequence
  Synthetic oligonucleotide: FAS-1808
cuggaacugcauccaaauuc

SEQ ID NO: 9648 - RNA, 20 nt, Artificial Sequence
  Synthetic oligonucleotide: FAS-1809
gauuuuuuuuuaaagaaaau

SEQ ID NO: 9649 - RNA, 20 nt, Artificial Sequence
  Synthetic oligonucleotide: FAS-1810
uuuuuuaaagaaaauuggcc

SEQ ID NO: 9650 - RNA, 20 nt, Artificial Sequence
  Synthetic oligonucleotide: FAS-1811
caggaaauaaugaguaacga

SEQ ID NO: 9651 - RNA, 20 nt, Artificial Sequence
  Synthetic oligonucleotide: FAS-1812
aauaaugaguaacgaaggac

SEQ ID NO: 9652 - RNA, 17 nt, Artificial Sequence
  Synthetic oligonucleotide: FAS-1813
aucaacaccuacaagac

SEQ ID NO: 9653 - RNA, 17 nt, Artificial Sequence
  Synthetic oligonucleotide: FAS-1814
aacaccuacaagacugg

SEQ ID NO: 9654 - RNA, 17 nt, Artificial Sequence
  Synthetic oligonucleotide: FAS-1815
ugacagaugcaaaacac

SEQ ID NO: 9655 - RNA, 17 nt, Artificial Sequence
  Synthetic oligonucleotide: FAS-1816
gacagaugcaaaacaca

SEQ ID NO: 9656 - RNA, 17 nt, Artificial Sequence
  Synthetic oligonucleotide: FAS-1817
ugcaaaacacaggguga

SEQ ID NO: 9657 - RNA, 17 nt, Artificial Sequence
  Synthetic oligonucleotide: FAS-1818
ggugauggaaagcccuc

SEQ ID NO: 9658 - RNA, 17 nt, Artificial Sequence
  Synthetic oligonucleotide: FAS-1819
gauggaaagcccucagg

SEQ ID NO: 9659 - RNA, 17 nt, Artificial Sequence
  Synthetic oligonucleotide: FAS-1820
auggaaagcccucagga

SEQ ID NO: 9660 - RNA, 17 nt, Artificial Sequence
  Synthetic oligonucleotide: FAS-1821
aaccuaaccuagauuug

SEQ ID NO: 9661 - RNA, 17 nt, Artificial Sequence
  Synthetic oligonucleotide: FAS-1822
accuaaccuagauuuga

SEQ ID NO: 9662 - RNA, 17 nt, Artificial Sequence
  Synthetic oligonucleotide: FAS-1823
gauuugagggcccaaac

SEQ ID NO: 9663 - RNA, 17 nt, Artificial Sequence
  Synthetic oligonucleotide: FAS-1824
agaaaaugucaacugag

SEQ ID NO: 9664 - RNA, 17 nt, Artificial Sequence
  Synthetic oligonucleotide: FAS-1825
acugagaggaagccuga

SEQ ID NO: 9665 - RNA, 17 nt, Artificial Sequence
  Synthetic oligonucleotide: FAS-1826
gccugaaggaugaacag

SEQ ID NO: 9666 - RNA, 17 nt, Artificial Sequence
  Synthetic oligonucleotide: FAS-1827
ccugaaggaugaacagu

SEQ ID NO: 9667 - RNA, 17 nt, Artificial Sequence
  Synthetic oligonucleotide: FAS-1828
aacagugggcuaagcaa

SEQ ID NO: 9668 - RNA, 17 nt, Artificial Sequence
  Synthetic oligonucleotide: FAS-1829
acagugggcuaagcaaa

SEQ ID NO: 9669 - RNA, 17 nt, Artificial Sequence
  Synthetic oligonucleotide: FAS-1830
uauuaauguguuauuaa

SEQ ID NO: 9670 - RNA, 17 nt, Artificial Sequence
  Synthetic oligonucleotide: FAS-1831
auuaauguguuauuaau

SEQ ID NO: 9671 - RNA, 17 nt, Artificial Sequence
  Synthetic oligonucleotide: FAS-1832
aauggguugaaucuaau

SEQ ID NO: 9672 - RNA, 17 nt, Artificial Sequence
  Synthetic oligonucleotide: FAS-1833
auggguugaaucuaauu

SEQ ID NO: 9673 - RNA, 17 nt, Artificial Sequence
  Synthetic oligonucleotide: FAS-1834
guugaaucuaauuggga

SEQ ID NO: 9674 - RNA, 17 nt, Artificial Sequence
  Synthetic oligonucleotide: FAS-1835
uugaaucuaauugggaa

SEQ ID NO: 9675 - RNA, 17 nt, Artificial Sequence
  Synthetic oligonucleotide: FAS-1836
uaauugggaagggagag

SEQ ID NO: 9676 - RNA, 17 nt, Artificial Sequence
  Synthetic oligonucleotide: FAS-1837
agagagguugcagagug

SEQ ID NO: 9677 - RNA, 17 nt, Artificial Sequence
  Synthetic oligonucleotide: FAS-1838
gagugaggugcagagcu

SEQ ID NO: 9678 - RNA, 17 nt, Artificial Sequence
  Synthetic oligonucleotide: FAS-1839
ugaggugcagagcuugg

SEQ ID NO: 9679 - RNA, 17 nt, Artificial Sequence
  Synthetic oligonucleotide: FAS-1840
uugguggacgaugccaa

SEQ ID NO: 9680 - RNA, 17 nt, Artificial Sequence
  Synthetic oligonucleotide: FAS-1841
cuuuaguguguccaguc

SEQ ID NO: 9681 - RNA, 17 nt, Artificial Sequence
  Synthetic oligonucleotide: FAS-1842
gaacugcauccaaauuc

SEQ ID NO: 9682 - RNA, 17 nt, Artificial Sequence
  Synthetic oligonucleotide: FAS-1843
uuuuuuuuaaagaaaau

SEQ ID NO: 9683 - RNA, 17 nt, Artificial Sequence
  Synthetic oligonucleotide: FAS-1844
uuuaaagaaaauuggcc

SEQ ID NO: 9684 - RNA, 17 nt, Artificial Sequence
  Synthetic oligonucleotide: FAS-1845
gaaauaaugaguaacga

SEQ ID NO: 9685 - RNA, 17 nt, Artificial Sequence
  Synthetic oligonucleotide: FAS-1846
aaugaguaacgaaggac

SEQ ID NO: 9686 - RNA, 20 nt, Artificial Sequence
  Synthetic oligonucleotide: FAS-1847
cuucguuacucauuauuucc

SEQ ID NO: 9687 - RNA, 20 nt, Artificial Sequence
  Synthetic oligonucleotide: FAS-1848
cuuguaauucuuucgugcuc

SEQ ID NO: 9688 - RNA, 20 nt, Artificial Sequence
  Synthetic oligonucleotide: FAS-1849
guucaaagucacuauugcuu

SEQ ID NO: 9689 - RNA, 20 nt, Artificial Sequence
  Synthetic oligonucleotide: FAS-1850
aagucacuauugcuuuggaa

SEQ ID NO: 9690 - RNA, 20 nt, Artificial Sequence
  Synthetic oligonucleotide: FAS-1851
uggaacgguagauagcucuu

SEQ ID NO: 9691 - RNA, 20 nt, Artificial Sequence
  Synthetic oligonucleotide: FAS-1852
uuuagcaugaauuuuacaga

SEQ ID NO: 9692 - RNA, 20 nt, Artificial Sequence
  Synthetic oligonucleotide: FAS-1853
aauuuuacagaagguauguu

SEQ ID NO: 9693 - RNA, 20 nt, Artificial Sequence
  Synthetic oligonucleotide: FAS-1854
aucauuacugaaccugaauu

SEQ ID NO: 9694 - RNA, 20 nt, Artificial Sequence
  Synthetic oligonucleotide: FAS-1855
auuuggaugcaguuccagac

SEQ ID NO: 9695 - RNA, 20 nt, Artificial Sequence
  Synthetic oligonucleotide: FAS-1856
uuccagacuggacacacuaa

SEQ ID NO: 9696 - RNA, 20 nt, Artificial Sequence
  Synthetic oligonucleotide: FAS-1857
uaaagguuucaguauuccuu

SEQ ID NO: 9697 - RNA, 20 nt, Artificial Sequence
  Synthetic oligonucleotide: FAS-1858
uagcccacuguucauccuuc

SEQ ID NO: 9698 - RNA, 20 nt, Artificial Sequence
  Synthetic oligonucleotide: FAS-1859
ucucaguugacauuuucuuc

SEQ ID NO: 9699 - RNA, 20 nt, Artificial Sequence
  Synthetic oligonucleotide: FAS-1860
auuuucuucuggagccuguu

SEQ ID NO: 9700 - RNA, 20 nt, Artificial Sequence
  Synthetic oligonucleotide: FAS-1861
uuuucuucuggagccuguuu

SEQ ID NO: 9701 - RNA, 20 nt, Artificial Sequence
  Synthetic oligonucleotide: FAS-1862
cuguuugggcccucaaaucu

SEQ ID NO: 9702 - RNA, 20 nt, Artificial Sequence
  Synthetic oligonucleotide: FAS-1863
ugggcccucaaaucuagguu

SEQ ID NO: 9703 - RNA, 20 nt, Artificial Sequence
  Synthetic oligonucleotide: FAS-1864
uagguuagguuacccuccug

SEQ ID NO: 9704 - RNA, 20 nt, Artificial Sequence
  Synthetic oligonucleotide: FAS-1865
agguuagguuacccuccuga

SEQ ID NO: 9705 - RNA, 20 nt, Artificial Sequence
  Synthetic oligonucleotide: FAS-1866
gcacuuaccaccagucuugu

SEQ ID NO: 9706 - RNA, 20 nt, Artificial Sequence
  Synthetic oligonucleotide: FAS-1867
ccagucuuguagguguugau

SEQ ID NO: 9707 - RNA, 17 nt, Artificial Sequence
  Synthetic oligonucleotide: FAS-1868
cguuacucauuauuucc

SEQ ID NO: 9708 - RNA, 17 nt, Artificial Sequence
  Synthetic oligonucleotide: FAS-1869
guaauucuuucgugcuc

SEQ ID NO: 9709 - RNA, 17 nt, Artificial Sequence
  Synthetic oligonucleotide: FAS-1870
caaagucacuauugcuu

SEQ ID NO: 9710 - RNA, 17 nt, Artificial Sequence
  Synthetic oligonucleotide: FAS-1871
ucacuauugcuuuggaa

SEQ ID NO: 9711 - RNA, 17 nt, Artificial Sequence
  Synthetic oligonucleotide: FAS-1872
aacgguagauagcucuu

SEQ ID NO: 9712 - RNA, 17 nt, Artificial Sequence
  Synthetic oligonucleotide: FAS-1873
agcaugaauuuuacaga

SEQ ID NO: 9713 - RNA, 17 nt, Artificial Sequence
  Synthetic oligonucleotide: FAS-1874
uuuacagaagguauguu

SEQ ID NO: 9714 - RNA, 17 nt, Artificial Sequence
  Synthetic oligonucleotide: FAS-1875
auuacugaaccugaauu

SEQ ID NO: 9715 - RNA, 17 nt, Artificial Sequence
  Synthetic oligonucleotide: FAS-1876
uggaugcaguuccagac

SEQ ID NO: 9716 - RNA, 17 nt, Artificial Sequence
  Synthetic oligonucleotide: FAS-1877
cagacuggacacacuaa

SEQ ID NO: 9717 - RNA, 17 nt, Artificial Sequence
  Synthetic oligonucleotide: FAS-1878
agguuucaguauuccuu

SEQ ID NO: 9718 - RNA, 17 nt, Artificial Sequence
  Synthetic oligonucleotide: FAS-1879
cccacuguucauccuuc

SEQ ID NO: 9719 - RNA, 17 nt, Artificial Sequence
  Synthetic oligonucleotide: FAS-1880
caguugacauuuucuuc

SEQ ID NO: 9720 - RNA, 17 nt, Artificial Sequence
  Synthetic oligonucleotide: FAS-1881
uucuucuggagccuguu

SEQ ID NO: 9721 - RNA, 17 nt, Artificial Sequence
  Synthetic oligonucleotide: FAS-1882
ucuucuggagccuguuu

SEQ ID NO: 9722 - RNA, 17 nt, Artificial Sequence
  Synthetic oligonucleotide: FAS-1883
uuugggcccucaaaucu

SEQ ID NO: 9723 - RNA, 17 nt, Artificial Sequence
  Synthetic oligonucleotide: FAS-1884
gcccucaaaucuagguu

SEQ ID NO: 9724 - RNA, 17 nt, Artificial Sequence
  Synthetic oligonucleotide: FAS-1885
guuagguuacccuccug

SEQ ID NO: 9725 - RNA, 17 nt, Artificial Sequence
  Synthetic oligonucleotide: FAS-1886
uuagguuacccuccuga

SEQ ID NO: 9726 - RNA, 17 nt, Artificial Sequence
  Synthetic oligonucleotide: FAS-1887
cuuaccaccagucuugu

SEQ ID NO: 9727 - RNA, 17 nt, Artificial Sequence
  Synthetic oligonucleotide: FAS-1888
gucuuguagguguugau

SEQ ID NO: 9728 - RNA, 20 nt, Artificial Sequence
  Synthetic oligonucleotide: FAS-685
cagcggcgcacgcgggcacc

SEQ ID NO: 9729 - RNA, 20 nt, Artificial Sequence
  Synthetic oligonucleotide: FAS-686
agcggcgcacgcgggcaccu

SEQ ID NO: 9730 - RNA, 20 nt, Artificial Sequence
  Synthetic oligonucleotide: FAS-1891
cgcacgcgggcaccugggag

SEQ ID NO: 9731 - RNA, 20 nt, Artificial Sequence
  Synthetic oligonucleotide: FAS-1892
acgcgggcaccugggagcgg

SEQ ID NO: 9732 - RNA, 20 nt, Artificial Sequence
  Synthetic oligonucleotide: FAS-1893
cgcgggcaccugggagcggc

SEQ ID NO: 9733 - RNA, 20 nt, Artificial Sequence
  Synthetic oligonucleotide: FAS-1894
cugggagcggcgggcugcug

SEQ ID NO: 9734 - RNA, 20 nt, Artificial Sequence
  Synthetic oligonucleotide: FAS-1895
ugggagcggcgggcugcugc

SEQ ID NO: 9735 - RNA, 20 nt, Artificial Sequence
  Synthetic oligonucleotide: FAS-1896
gagcggcgggcugcugcggg

SEQ ID NO: 9736 - RNA, 20 nt, Artificial Sequence
  Synthetic oligonucleotide: FAS-1897
cgggcugcugcgggaggcgu

SEQ ID NO: 9737 - RNA, 20 nt, Artificial Sequence
  Synthetic oligonucleotide: FAS-1898
cugcgggaggcguuggagac

SEQ ID NO: 9738 - RNA, 20 nt, Artificial Sequence
  Synthetic oligonucleotide: FAS-1899
aggcguuggagacuggcucc

SEQ ID NO: 9739 - RNA, 20 nt, Artificial Sequence
  Synthetic oligonucleotide: FAS-1900
ggcguuggagacuggcuccc

SEQ ID NO: 9740 - RNA, 20 nt, Artificial Sequence
  Synthetic oligonucleotide: FAS-1901
gcguuggagacuggcucccg

SEQ ID NO: 9741 - RNA, 20 nt, Artificial Sequence
  Synthetic oligonucleotide: FAS-1902
cguuggagacuggcucccgg

SEQ ID NO: 9742 - RNA, 20 nt, Artificial Sequence
  Synthetic oligonucleotide: FAS-1903
acuggcucccgggggcuguu

SEQ ID NO: 9743 - RNA, 20 nt, Artificial Sequence
  Synthetic oligonucleotide: FAS-1904
ggcuguuaggaccuucccuc

SEQ ID NO: 9744 - RNA, 20 nt, Artificial Sequence
  Synthetic oligonucleotide: FAS-1905
uuaggaccuucccucaggcc

SEQ ID NO: 9745 - RNA, 20 nt, Artificial Sequence
  Synthetic oligonucleotide: FAS-1906
uaggaccuucccucaggccc

SEQ ID NO: 9746 - RNA, 20 nt, Artificial Sequence
  Synthetic oligonucleotide: FAS-1907
ggcccgggugcucagaacgc

SEQ ID NO: 9747 - RNA, 20 nt, Artificial Sequence
  Synthetic oligonucleotide: FAS-1908
ccgggugcucagaacgcugg

SEQ ID NO: 9748 - RNA, 20 nt, Artificial Sequence
  Synthetic oligonucleotide: FAS-1909
gcuggaggacuugcuuuucu

SEQ ID NO: 9749 - RNA, 20 nt, Artificial Sequence
  Synthetic oligonucleotide: FAS-1910
cuggaggacuugcuuuucuu

SEQ ID NO: 9750 - RNA, 20 nt, Artificial Sequence
  Synthetic oligonucleotide: FAS-1911
augcgaagugcugaccccgc

SEQ ID NO: 9751 - RNA, 20 nt, Artificial Sequence
  Synthetic oligonucleotide: FAS-1912
ugcgaagugcugaccccgcu

SEQ ID NO: 9752 - RNA, 20 nt, Artificial Sequence
  Synthetic oligonucleotide: FAS-1913
aagugcugaccccgcugggc

SEQ ID NO: 9753 - RNA, 20 nt, Artificial Sequence
  Synthetic oligonucleotide: FAS-1914
ugcugaccccgcugggcagg

SEQ ID NO: 9754 - RNA, 20 nt, Artificial Sequence
  Synthetic oligonucleotide: FAS-1915
gcugaccccgcugggcaggc

SEQ ID NO: 9755 - RNA, 20 nt, Artificial Sequence
  Synthetic oligonucleotide: FAS-1916
cugaccccgcugggcaggcg

SEQ ID NO: 9756 - RNA, 20 nt, Artificial Sequence
  Synthetic oligonucleotide: FAS-1917
cugggcaggcggggcagcuc

SEQ ID NO: 9757 - RNA, 20 nt, Artificial Sequence
  Synthetic oligonucleotide: FAS-1918
ggggcagcuccggcgcuccu

SEQ ID NO: 9758 - RNA, 20 nt, Artificial Sequence
  Synthetic oligonucleotide: FAS-1919
gaccacugcgcuccacguug

SEQ ID NO: 9759 - RNA, 20 nt, Artificial Sequence
  Synthetic oligonucleotide: FAS-1920
cacugcgcuccacguugagg

SEQ ID NO: 9760 - RNA, 20 nt, Artificial Sequence
  Synthetic oligonucleotide: FAS-1921
acugcgcuccacguugaggu

SEQ ID NO: 9761 - RNA, 20 nt, Artificial Sequence
  Synthetic oligonucleotide: FAS-1922
gcuccacguugaggugggcg

SEQ ID NO: 9762 - RNA, 20 nt, Artificial Sequence
  Synthetic oligonucleotide: FAS-1923
cuccacguugaggugggcgu

SEQ ID NO: 9763 - RNA, 20 nt, Artificial Sequence
  Synthetic oligonucleotide: FAS-1924
uccacguugaggugggcgug

SEQ ID NO: 9764 - RNA, 20 nt, Artificial Sequence
  Synthetic oligonucleotide: FAS-1925
guugaggugggcguggggug

SEQ ID NO: 9765 - RNA, 20 nt, Artificial Sequence
  Synthetic oligonucleotide: FAS-1926
ggugggcguggggugcggac

SEQ ID NO: 9766 - RNA, 20 nt, Artificial Sequence
  Synthetic oligonucleotide: FAS-1927
ggugcggacaggaauugaag

SEQ ID NO: 9767 - RNA, 20 nt, Artificial Sequence
  Synthetic oligonucleotide: FAS-1928
caggaauugaagcggaaguc

SEQ ID NO: 9768 - RNA, 20 nt, Artificial Sequence
  Synthetic oligonucleotide: FAS-1929
aggaauugaagcggaagucu

SEQ ID NO: 9769 - RNA, 20 nt, Artificial Sequence
  Synthetic oligonucleotide: FAS-1930
gcggaagucugggaagcuuu

SEQ ID NO: 9770 - RNA, 20 nt, Artificial Sequence
  Synthetic oligonucleotide: FAS-1931
cggaagucugggaagcuuua

SEQ ID NO: 9771 - RNA, 20 nt, Artificial Sequence
  Synthetic oligonucleotide: FAS-1932
cugggaagcuuuagggucgc

SEQ ID NO: 9772 - RNA, 20 nt, Artificial Sequence
  Synthetic oligonucleotide: FAS-1933
ggaagcuuuagggucgcugg

SEQ ID NO: 9773 - RNA, 20 nt, Artificial Sequence
  Synthetic oligonucleotide: FAS-1934
gaagcuuuagggucgcugga

SEQ ID NO: 9774 - RNA, 20 nt, Artificial Sequence
  Synthetic oligonucleotide: FAS-1935
aagcuuuagggucgcuggag

SEQ ID NO: 9775 - RNA, 20 nt, Artificial Sequence
  Synthetic oligonucleotide: FAS-1936
agcuuuagggucgcuggagg

SEQ ID NO: 9776 - RNA, 20 nt, Artificial Sequence
  Synthetic oligonucleotide: FAS-1937
gggucgcuggagggggaccc

SEQ ID NO: 9777 - RNA, 20 nt, Artificial Sequence
  Synthetic oligonucleotide: FAS-1938
cgcuggagggggaccccggu

SEQ ID NO: 9778 - RNA, 20 nt, Artificial Sequence
  Synthetic oligonucleotide: FAS-1939
gggggaccccgguuggagag

SEQ ID NO: 9779 - RNA, 20 nt, Artificial Sequence
  Synthetic oligonucleotide: FAS-1940
accccgguuggagagaggag

SEQ ID NO: 9780 - RNA, 20 nt, Artificial Sequence
  Synthetic oligonucleotide: FAS-1941
ggagagaggagcggaacucc

SEQ ID NO: 9781 - RNA, 20 nt, Artificial Sequence
  Synthetic oligonucleotide: FAS-1942
gcccugacaagccaagccaa

SEQ ID NO: 9782 - RNA, 20 nt, Artificial Sequence
  Synthetic oligonucleotide: FAS-1943
gccaagccaaagguccgcuc

SEQ ID NO: 9783 - RNA, 20 nt, Artificial Sequence
  Synthetic oligonucleotide: FAS-1944
gccaaagguccgcuccggcg

SEQ ID NO: 9784 - RNA, 20 nt, Artificial Sequence
  Synthetic oligonucleotide: FAS-1945
ccaaagguccgcuccggcgc

SEQ ID NO: 9785 - RNA, 20 nt, Artificial Sequence
  Synthetic oligonucleotide: FAS-1946
aagguccgcuccggcgcggg

SEQ ID NO: 9786 - RNA, 20 nt, Artificial Sequence
  Synthetic oligonucleotide: FAS-1947
agguccgcuccggcgcgggu

SEQ ID NO: 9787 - RNA, 20 nt, Artificial Sequence
  Synthetic oligonucleotide: FAS-1948
ggugagugcgcgccgccccg

SEQ ID NO: 9788 - RNA, 20 nt, Artificial Sequence
  Synthetic oligonucleotide: FAS-1949
gugagugcgcgccgccccgc

SEQ ID NO: 9789 - RNA, 20 nt, Artificial Sequence
  Synthetic oligonucleotide: FAS-1950
ugagugcgcgccgccccgcg

SEQ ID NO: 9790 - RNA, 20 nt, Artificial Sequence
  Synthetic oligonucleotide: FAS-1951
gagugcgcgccgccccgcgg

SEQ ID NO: 9791 - RNA, 20 nt, Artificial Sequence
  Synthetic oligonucleotide: FAS-1952
ugcgcgccgccccgcggggg

SEQ ID NO: 9792 - RNA, 20 nt, Artificial Sequence
  Synthetic oligonucleotide: FAS-1953
gcgcgccgccccgcgggggc

SEQ ID NO: 9793 - RNA, 20 nt, Artificial Sequence
  Synthetic oligonucleotide: FAS-1954
cgcgccgccccgcgggggcg

SEQ ID NO: 9794 - RNA, 20 nt, Artificial Sequence
  Synthetic oligonucleotide: FAS-1955
aacagauauugcucauuuuc

SEQ ID NO: 9795 - RNA, 20 nt, Artificial Sequence
  Synthetic oligonucleotide: FAS-1956
uucuggcaguucucagacgu

SEQ ID NO: 9796 - RNA, 20 nt, Artificial Sequence
  Synthetic oligonucleotide: FAS-1957
auaagucagcaccgaagcag

SEQ ID NO: 9797 - RNA, 20 nt, Artificial Sequence
  Synthetic oligonucleotide: FAS-1958
caccgaagcagugguuaagc

SEQ ID NO: 9798 - RNA, 20 nt, Artificial Sequence
  Synthetic oligonucleotide: FAS-1959
cgaagcagugguuaagccgg

SEQ ID NO: 9799 - RNA, 20 nt, Artificial Sequence
  Synthetic oligonucleotide: FAS-1960
gaagcagugguuaagccgga

SEQ ID NO: 9800 - RNA, 20 nt, Artificial Sequence
  Synthetic oligonucleotide: FAS-1961
agugguuaagccggagggcu

SEQ ID NO: 9801 - RNA, 20 nt, Artificial Sequence
  Synthetic oligonucleotide: FAS-1962
agccggagggcucggaagaa

SEQ ID NO: 9802 - RNA, 20 nt, Artificial Sequence
  Synthetic oligonucleotide: FAS-1963
ucuuucucgaaaaaguuaua

SEQ ID NO: 9803 - RNA, 20 nt, Artificial Sequence
  Synthetic oligonucleotide: FAS-1964
cuuucucgaaaaaguuauau

SEQ ID NO: 9804 - RNA, 20 nt, Artificial Sequence
  Synthetic oligonucleotide: FAS-1965
uuucucgaaaaaguuauaug

SEQ ID NO: 9805 - RNA, 20 nt, Artificial Sequence
  Synthetic oligonucleotide: FAS-1966
uucucgaaaaaguuauaugg

SEQ ID NO: 9806 - RNA, 20 nt, Artificial Sequence
  Synthetic oligonucleotide: FAS-1967
ucucgaaaaaguuauauggg

SEQ ID NO: 9807 - RNA, 20 nt, Artificial Sequence
  Synthetic oligonucleotide: FAS-1968
cucgaaaaaguuauaugggg

SEQ ID NO: 9808 - RNA, 20 nt, Artificial Sequence
  Synthetic oligonucleotide: FAS-1969
ucgaaaaaguuauauggggg

SEQ ID NO: 9809 - RNA, 17 nt, Artificial Sequence
  Synthetic oligonucleotide: FAS-876
cggcgcacgcgggcacc

SEQ ID NO: 9810 - RNA, 17 nt, Artificial Sequence
  Synthetic oligonucleotide: FAS-877
ggcgcacgcgggcaccu

SEQ ID NO: 9811 - RNA, 17 nt, Artificial Sequence
  Synthetic oligonucleotide: FAS-1972
acgcgggcaccugggag

SEQ ID NO: 9812 - RNA, 17 nt, Artificial Sequence
  Synthetic oligonucleotide: FAS-1973
cgggcaccugggagcgg

SEQ ID NO: 9813 - RNA, 17 nt, Artificial Sequence
  Synthetic oligonucleotide: FAS-1974
gggcaccugggagcggc

SEQ ID NO: 9814 - RNA, 17 nt, Artificial Sequence
  Synthetic oligonucleotide: FAS-1975
ggagcggcgggcugcug

SEQ ID NO: 9815 - RNA, 17 nt, Artificial Sequence
  Synthetic oligonucleotide: FAS-1976
gagcggcgggcugcugc

SEQ ID NO: 9816 - RNA, 17 nt, Artificial Sequence
  Synthetic oligonucleotide: FAS-1977
cggcgggcugcugcggg

SEQ ID NO: 9817 - RNA, 17 nt, Artificial Sequence
  Synthetic oligonucleotide: FAS-1978
gcugcugcgggaggcgu

SEQ ID NO: 9818 - RNA, 17 nt, Artificial Sequence
  Synthetic oligonucleotide: FAS-1979
cgggaggcguuggagac

SEQ ID NO: 9819 - RNA, 17 nt, Artificial Sequence
  Synthetic oligonucleotide: FAS-1980
cguuggagacuggcucc

SEQ ID NO: 9820 - RNA, 17 nt, Artificial Sequence
  Synthetic oligonucleotide: FAS-1981
guuggagacuggcuccc

SEQ ID NO: 9821 - RNA, 17 nt, Artificial Sequence
  Synthetic oligonucleotide: FAS-1982
uuggagacuggcucccg

SEQ ID NO: 9822 - RNA, 17 nt, Artificial Sequence
  Synthetic oligonucleotide: FAS-1983
uggagacuggcucccgg

SEQ ID NO: 9823 - RNA, 17 nt, Artificial Sequence
  Synthetic oligonucleotide: FAS-1984
ggcucccgggggcuguu

SEQ ID NO: 9824 - RNA, 17 nt, Artificial Sequence
  Synthetic oligonucleotide: FAS-1985
uguuaggaccuucccuc

SEQ ID NO: 9825 - RNA, 17 nt, Artificial Sequence
  Synthetic oligonucleotide: FAS-1986
ggaccuucccucaggcc

SEQ ID NO: 9826 - RNA, 17 nt, Artificial Sequence
  Synthetic oligonucleotide: FAS-1987
gaccuucccucaggccc

SEQ ID NO: 9827 - RNA, 17 nt, Artificial Sequence
  Synthetic oligonucleotide: FAS-1988
ccgggugcucagaacgc

SEQ ID NO: 9828 - RNA, 17 nt, Artificial Sequence
  Synthetic oligonucleotide: FAS-1989
ggugcucagaacgcugg

SEQ ID NO: 9829 - RNA, 17 nt, Artificial Sequence
  Synthetic oligonucleotide: FAS-1990
ggaggacuugcuuuucu

SEQ ID NO: 9830 - RNA, 17 nt, Artificial Sequence
  Synthetic oligonucleotide: FAS-1991
gaggacuugcuuuucuu

SEQ ID NO: 9831 - RNA, 17 nt, Artificial Sequence
  Synthetic oligonucleotide: FAS-1992
cgaagugcugaccccgc

SEQ ID NO: 9832 - RNA, 17 nt, Artificial Sequence
  Synthetic oligonucleotide: FAS-1993
gaagugcugaccccgcu

SEQ ID NO: 9833 - RNA, 17 nt, Artificial Sequence
  Synthetic oligonucleotide: FAS-1994
ugcugaccccgcugggc

SEQ ID NO: 9834 - RNA, 17 nt, Artificial Sequence
  Synthetic oligonucleotide: FAS-1995
ugaccccgcugggcagg

SEQ ID NO: 9835 - RNA, 17 nt, Artificial Sequence
  Synthetic oligonucleotide: FAS-1996
gaccccgcugggcaggc

SEQ ID NO: 9836 - RNA, 17 nt, Artificial Sequence
  Synthetic oligonucleotide: FAS-1997
accccgcugggcaggcg

SEQ ID NO: 9837 - RNA, 17 nt, Artificial Sequence
  Synthetic oligonucleotide: FAS-1998
ggcaggcggggcagcuc

SEQ ID NO: 9838 - RNA, 17 nt, Artificial Sequence
  Synthetic oligonucleotide: FAS-1999
gcagcuccggcgcuccu

SEQ ID NO: 9839 - RNA, 17 nt, Artificial Sequence
  Synthetic oligonucleotide: FAS-2000
cacugcgcuccacguug

SEQ ID NO: 9840 - RNA, 17 nt, Artificial Sequence
  Synthetic oligonucleotide: FAS-2001
ugcgcuccacguugagg

SEQ ID NO: 9841 - RNA, 17 nt, Artificial Sequence
  Synthetic oligonucleotide: FAS-2002
gcgcuccacguugaggu

SEQ ID NO: 9842 - RNA, 17 nt, Artificial Sequence
  Synthetic oligonucleotide: FAS-2003
ccacguugaggugggcg

SEQ ID NO: 9843 - RNA, 17 nt, Artificial Sequence
  Synthetic oligonucleotide: FAS-2004
cacguugaggugggcgu

SEQ ID NO: 9844 - RNA, 17 nt, Artificial Sequence
  Synthetic oligonucleotide: FAS-2005
acguugaggugggcgug

SEQ ID NO: 9845 - RNA, 17 nt, Artificial Sequence
  Synthetic oligonucleotide: FAS-2006
gaggugggcguggggug

SEQ ID NO: 9846 - RNA, 17 nt, Artificial Sequence
  Synthetic oligonucleotide: FAS-2007
gggcguggggugcggac

SEQ ID NO: 9847 - RNA, 17 nt, Artificial Sequence
  Synthetic oligonucleotide: FAS-2008
gcggacaggaauugaag

SEQ ID NO: 9848 - RNA, 17 nt, Artificial Sequence
  Synthetic oligonucleotide: FAS-2009
gaauugaagcggaaguc

SEQ ID NO: 9849 - RNA, 17 nt, Artificial Sequence
  Synthetic oligonucleotide: FAS-2010
aauugaagcggaagucu

SEQ ID NO: 9850 - RNA, 17 nt, Artificial Sequence
  Synthetic oligonucleotide: FAS-2011
gaagucugggaagcuuu

SEQ ID NO: 9851 - RNA, 17 nt, Artificial Sequence
  Synthetic oligonucleotide: FAS-2012
aagucugggaagcuuua

SEQ ID NO: 9852 - RNA, 17 nt, Artificial Sequence
  Synthetic oligonucleotide: FAS-2013
ggaagcuuuagggucgc

SEQ ID NO: 9853 - RNA, 17 nt, Artificial Sequence
  Synthetic oligonucleotide: FAS-2014
agcuuuagggucgcugg

SEQ ID NO: 9854 - RNA, 17 nt, Artificial Sequence
  Synthetic oligonucleotide: FAS-2015
gcuuuagggucgcugga

SEQ ID NO: 9855 - RNA, 17 nt, Artificial Sequence
  Synthetic oligonucleotide: FAS-2016
cuuuagggucgcuggag

SEQ ID NO: 9856 - RNA, 17 nt, Artificial Sequence
  Synthetic oligonucleotide: FAS-2017
uuuagggucgcuggagg

SEQ ID NO: 9857 - RNA, 17 nt, Artificial Sequence
  Synthetic oligonucleotide: FAS-2018
ucgcuggagggggaccc

SEQ ID NO: 9858 - RNA, 17 nt, Artificial Sequence
  Synthetic oligonucleotide: FAS-2019
uggagggggaccccggu

SEQ ID NO: 9859 - RNA, 17 nt, Artificial Sequence
  Synthetic oligonucleotide: FAS-2020
ggaccccgguuggagag

SEQ ID NO: 9860 - RNA, 17 nt, Artificial Sequence
  Synthetic oligonucleotide: FAS-2021
ccgguuggagagaggag

SEQ ID NO: 9861 - RNA, 17 nt, Artificial Sequence
  Synthetic oligonucleotide: FAS-2022
gagaggagcggaacucc

SEQ ID NO: 9862 - RNA, 17 nt, Artificial Sequence
  Synthetic oligonucleotide: FAS-2023
cugacaagccaagccaa

SEQ ID NO: 9863 - RNA, 17 nt, Artificial Sequence
  Synthetic oligonucleotide: FAS-2024
aagccaaagguccgcuc

SEQ ID NO: 9864 - RNA, 17 nt, Artificial Sequence
  Synthetic oligonucleotide: FAS-2025
aaagguccgcuccggcg

SEQ ID NO: 9865 - RNA, 17 nt, Artificial Sequence
  Synthetic oligonucleotide: FAS-2026
aagguccgcuccggcgc

SEQ ID NO: 9866 - RNA, 17 nt, Artificial Sequence
  Synthetic oligonucleotide: FAS-2027
guccgcuccggcgcggg

SEQ ID NO: 9867 - RNA, 17 nt, Artificial Sequence
  Synthetic oligonucleotide: FAS-2028
uccgcuccggcgcgggu

SEQ ID NO: 9868 - RNA, 17 nt, Artificial Sequence
  Synthetic oligonucleotide: FAS-2029
gagugcgcgccgccccg

SEQ ID NO: 9869 - RNA, 17 nt, Artificial Sequence
  Synthetic oligonucleotide: FAS-2030
agugcgcgccgccccgc

SEQ ID NO: 9870 - RNA, 17 nt, Artificial Sequence
  Synthetic oligonucleotide: FAS-2031
gugcgcgccgccccgcg

SEQ ID NO: 9871 - RNA, 17 nt, Artificial Sequence
  Synthetic oligonucleotide: FAS-2032
ugcgcgccgccccgcgg

SEQ ID NO: 9872 - RNA, 17 nt, Artificial Sequence
  Synthetic oligonucleotide: FAS-2033
gcgccgccccgcggggg

SEQ ID NO: 9873 - RNA, 17 nt, Artificial Sequence
  Synthetic oligonucleotide: FAS-2034
cgccgccccgcgggggc

SEQ ID NO: 9874 - RNA, 17 nt, Artificial Sequence
  Synthetic oligonucleotide: FAS-2035
gccgccccgcgggggcg

SEQ ID NO: 9875 - RNA, 17 nt, Artificial Sequence
  Synthetic oligonucleotide: FAS-2036
agauauugcucauuuuc

SEQ ID NO: 9876 - RNA, 17 nt, Artificial Sequence
  Synthetic oligonucleotide: FAS-2037
uggcaguucucagacgu

SEQ ID NO: 9877 - RNA, 17 nt, Artificial Sequence
  Synthetic oligonucleotide: FAS-2038
agucagcaccgaagcag

SEQ ID NO: 9878 - RNA, 17 nt, Artificial Sequence
  Synthetic oligonucleotide: FAS-2039
cgaagcagugguuaagc

SEQ ID NO: 9879 - RNA, 17 nt, Artificial Sequence
  Synthetic oligonucleotide: FAS-2040
agcagugguuaagccgg

SEQ ID NO: 9880 - RNA, 17 nt, Artificial Sequence
  Synthetic oligonucleotide: FAS-2041
gcagugguuaagccgga

SEQ ID NO: 9881 - RNA, 17 nt, Artificial Sequence
  Synthetic oligonucleotide: FAS-2042
gguuaagccggagggcu

SEQ ID NO: 9882 - RNA, 17 nt, Artificial Sequence
  Synthetic oligonucleotide: FAS-2043
cggagggcucggaagaa

SEQ ID NO: 9883 - RNA, 17 nt, Artificial Sequence
  Synthetic oligonucleotide: FAS-2044
uucucgaaaaaguuaua

SEQ ID NO: 9884 - RNA, 17 nt, Artificial Sequence
  Synthetic oligonucleotide: FAS-2045
ucucgaaaaaguuauau

SEQ ID NO: 9885 - RNA, 17 nt, Artificial Sequence
  Synthetic oligonucleotide: FAS-2046
cucgaaaaaguuauaug

SEQ ID NO: 9886 - RNA, 17 nt, Artificial Sequence
  Synthetic oligonucleotide: FAS-2047
ucgaaaaaguuauaugg

SEQ ID NO: 9887 - RNA, 17 nt, Artificial Sequence
  Synthetic oligonucleotide: FAS-2048
cgaaaaaguuauauggg

SEQ ID NO: 9888 - RNA, 17 nt, Artificial Sequence
  Synthetic oligonucleotide: FAS-2049
gaaaaaguuauaugggg

SEQ ID NO: 9889 - RNA, 17 nt, Artificial Sequence
  Synthetic oligonucleotide: FAS-2050
aaaaaguuauauggggg

SEQ ID NO: 9890 - RNA, 20 nt, Artificial Sequence
  Synthetic oligonucleotide: FAS-2051
uaacuuuuucgagaaagaaa

SEQ ID NO: 9891 - RNA, 20 nt, Artificial Sequence
  Synthetic oligonucleotide: FAS-2052
ugccguucuuccgagcccuc

SEQ ID NO: 9892 - RNA, 20 nt, Artificial Sequence
  Synthetic oligonucleotide: FAS-2053
cuccggcuuaaccacugcuu

SEQ ID NO: 9893 - RNA, 20 nt, Artificial Sequence
  Synthetic oligonucleotide: FAS-2054
augagcaauaucuguucuga

SEQ ID NO: 9894 - RNA, 20 nt, Artificial Sequence
  Synthetic oligonucleotide: FAS-2055
auaucuguucugaaggcugc

SEQ ID NO: 9895 - RNA, 20 nt, Artificial Sequence
  Synthetic oligonucleotide: FAS-2056
aggcucucuccccgcccccg

SEQ ID NO: 9896 - RNA, 20 nt, Artificial Sequence
  Synthetic oligonucleotide: FAS-2057
ggcucucuccccgcccccgc

SEQ ID NO: 9897 - RNA, 20 nt, Artificial Sequence
  Synthetic oligonucleotide: FAS-2058
gcucucuccccgcccccgcg

SEQ ID NO: 9898 - RNA, 20 nt, Artificial Sequence
  Synthetic oligonucleotide: FAS-2059
cucuccccgcccccgcgggg

SEQ ID NO: 9899 - RNA, 20 nt, Artificial Sequence
  Synthetic oligonucleotide: FAS-2060
gcgcacucacccacccgcgc

SEQ ID NO: 9900 - RNA, 20 nt, Artificial Sequence
  Synthetic oligonucleotide: FAS-2061
cucacccacccgcgccggag

SEQ ID NO: 9901 - RNA, 20 nt, Artificial Sequence
  Synthetic oligonucleotide: FAS-2062
cccgcgccggagcggaccuu

SEQ ID NO: 9902 - RNA, 20 nt, Artificial Sequence
  Synthetic oligonucleotide: FAS-2063
gccggagcggaccuuuggcu

SEQ ID NO: 9903 - RNA, 20 nt, Artificial Sequence
  Synthetic oligonucleotide: FAS-2064
gaccuuuggcuuggcuuguc

SEQ ID NO: 9904 - RNA, 20 nt, Artificial Sequence
  Synthetic oligonucleotide: FAS-2065
accuuuggcuuggcuuguca

SEQ ID NO: 9905 - RNA, 20 nt, Artificial Sequence
  Synthetic oligonucleotide: FAS-2066
uggcuugucagggcuugucc

SEQ ID NO: 9906 - RNA, 20 nt, Artificial Sequence
  Synthetic oligonucleotide: FAS-2067
guuccgcuccucucuccaac

SEQ ID NO: 9907 - RNA, 20 nt, Artificial Sequence
  Synthetic oligonucleotide: FAS-2068
uuccgcuccucucuccaacc

SEQ ID NO: 9908 - RNA, 20 nt, Artificial Sequence
  Synthetic oligonucleotide: FAS-2069
uccgcuccucucuccaaccg

SEQ ID NO: 9909 - RNA, 20 nt, Artificial Sequence
  Synthetic oligonucleotide: FAS-2070
accccacgcccaccucaacg

SEQ ID NO: 9910 - RNA, 20 nt, Artificial Sequence
  Synthetic oligonucleotide: FAS-2071
caccucaacguggagcgcag

SEQ ID NO: 9911 - RNA, 20 nt, Artificial Sequence
  Synthetic oligonucleotide: FAS-2072
guggagcgcaguggucuccg

SEQ ID NO: 9912 - RNA, 20 nt, Artificial Sequence
  Synthetic oligonucleotide: FAS-2073
caguggucuccgaggagcgc

SEQ ID NO: 9913 - RNA, 20 nt, Artificial Sequence
  Synthetic oligonucleotide: FAS-2074
gagcugccccgccugcccag

SEQ ID NO: 9914 - RNA, 20 nt, Artificial Sequence
  Synthetic oligonucleotide: FAS-2075
agcugccccgccugcccagc

SEQ ID NO: 9915 - RNA, 20 nt, Artificial Sequence
  Synthetic oligonucleotide: FAS-2076
gcugccccgccugcccagcg

SEQ ID NO: 9916 - RNA, 20 nt, Artificial Sequence
  Synthetic oligonucleotide: FAS-2077
ggggucagcacuucgcauca

SEQ ID NO: 9917 - RNA, 20 nt, Artificial Sequence
  Synthetic oligonucleotide: FAS-2078
ccuccagcguucugagcacc

SEQ ID NO: 9918 - RNA, 20 nt, Artificial Sequence
  Synthetic oligonucleotide: FAS-2079
cuccagcguucugagcaccc

SEQ ID NO: 9919 - RNA, 20 nt, Artificial Sequence
  Synthetic oligonucleotide: FAS-2080
guucugagcacccgggccug

SEQ ID NO: 9920 - RNA, 20 nt, Artificial Sequence
  Synthetic oligonucleotide: FAS-2081
uucugagcacccgggccuga

SEQ ID NO: 9921 - RNA, 20 nt, Artificial Sequence
  Synthetic oligonucleotide: FAS-2082
gagcacccgggccugaggga

SEQ ID NO: 9922 - RNA, 20 nt, Artificial Sequence
  Synthetic oligonucleotide: FAS-2083
gggaagguccuaacagcccc

SEQ ID NO: 9923 - RNA, 20 nt, Artificial Sequence
  Synthetic oligonucleotide: FAS-2084
ggaagguccuaacagccccc

SEQ ID NO: 9924 - RNA, 20 nt, Artificial Sequence
  Synthetic oligonucleotide: FAS-2085
cgcagcagcccgccgcuccc

SEQ ID NO: 9925 - RNA, 17 nt, Artificial Sequence
  Synthetic oligonucleotide: FAS-2086
cuuuuucgagaaagaaa

SEQ ID NO: 9926 - RNA, 17 nt, Artificial Sequence
  Synthetic oligonucleotide: FAS-2087
cguucuuccgagcccuc

SEQ ID NO: 9927 - RNA, 17 nt, Artificial Sequence
  Synthetic oligonucleotide: FAS-2088
cggcuuaaccacugcuu

SEQ ID NO: 9928 - RNA, 17 nt, Artificial Sequence
  Synthetic oligonucleotide: FAS-2089
agcaauaucuguucuga

SEQ ID NO: 9929 - RNA, 17 nt, Artificial Sequence
  Synthetic oligonucleotide: FAS-2090
ucuguucugaaggcugc

SEQ ID NO: 9930 - RNA, 17 nt, Artificial Sequence
  Synthetic oligonucleotide: FAS-2091
cucucuccccgcccccg

SEQ ID NO: 9931 - RNA, 17 nt, Artificial Sequence
  Synthetic oligonucleotide: FAS-2092
ucucuccccgcccccgc

SEQ ID NO: 9932 - RNA, 17 nt, Artificial Sequence
  Synthetic oligonucleotide: FAS-2093
cucuccccgcccccgcg

SEQ ID NO: 9933 - RNA, 17 nt, Artificial Sequence
  Synthetic oligonucleotide: FAS-2094
uccccgcccccgcgggg

SEQ ID NO: 9934 - RNA, 17 nt, Artificial Sequence
  Synthetic oligonucleotide: FAS-2095
cacucacccacccgcgc

SEQ ID NO: 9935 - RNA, 17 nt, Artificial Sequence
  Synthetic oligonucleotide: FAS-2096
acccacccgcgccggag

SEQ ID NO: 9936 - RNA, 17 nt, Artificial Sequence
  Synthetic oligonucleotide: FAS-2097
gcgccggagcggaccuu

SEQ ID NO: 9937 - RNA, 17 nt, Artificial Sequence
  Synthetic oligonucleotide: FAS-2098
ggagcggaccuuuggcu

SEQ ID NO: 9938 - RNA, 17 nt, Artificial Sequence
  Synthetic oligonucleotide: FAS-2099
cuuuggcuuggcuuguc

SEQ ID NO: 9939 - RNA, 17 nt, Artificial Sequence
  Synthetic oligonucleotide: FAS-2100
uuuggcuuggcuuguca

SEQ ID NO: 9940 - RNA, 17 nt, Artificial Sequence
  Synthetic oligonucleotide: FAS-2101
cuugucagggcuugucc

SEQ ID NO: 9941 - RNA, 17 nt, Artificial Sequence
  Synthetic oligonucleotide: FAS-2102
ccgcuccucucuccaac

SEQ ID NO: 9942 - RNA, 17 nt, Artificial Sequence
  Synthetic oligonucleotide: FAS-2103
cgcuccucucuccaacc

SEQ ID NO: 9943 - RNA, 17 nt, Artificial Sequence
  Synthetic oligonucleotide: FAS-2104
gcuccucucuccaaccg

SEQ ID NO: 9944 - RNA, 17 nt, Artificial Sequence
  Synthetic oligonucleotide: FAS-2105
ccacgcccaccucaacg

SEQ ID NO: 9945 - RNA, 17 nt, Artificial Sequence
  Synthetic oligonucleotide: FAS-2106
cucaacguggagcgcag

SEQ ID NO: 9946 - RNA, 17 nt, Artificial Sequence
  Synthetic oligonucleotide: FAS-2107
gagcgcaguggucuccg

SEQ ID NO: 9947 - RNA, 17 nt, Artificial Sequence
  Synthetic oligonucleotide: FAS-2108
uggucuccgaggagcgc

SEQ ID NO: 9948 - RNA, 17 nt, Artificial Sequence
  Synthetic oligonucleotide: FAS-2109
cugccccgccugcccag

SEQ ID NO: 9949 - RNA, 17 nt, Artificial Sequence
  Synthetic oligonucleotide: FAS-2110
ugccccgccugcccagc

SEQ ID NO: 9950 - RNA, 17 nt, Artificial Sequence
  Synthetic oligonucleotide: FAS-2111
gccccgccugcccagcg

SEQ ID NO: 9951 - RNA, 17 nt, Artificial Sequence
  Synthetic oligonucleotide: FAS-2112
gucagcacuucgcauca

SEQ ID NO: 9952 - RNA, 17 nt, Artificial Sequence
  Synthetic oligonucleotide: FAS-2113
ccagcguucugagcacc

SEQ ID NO: 9953 - RNA, 17 nt, Artificial Sequence
  Synthetic oligonucleotide: FAS-2114
cagcguucugagcaccc

SEQ ID NO: 9954 - RNA, 17 nt, Artificial Sequence
  Synthetic oligonucleotide: FAS-2115
cugagcacccgggccug

SEQ ID NO: 9955 - RNA, 17 nt, Artificial Sequence
  Synthetic oligonucleotide: FAS-2116
ugagcacccgggccuga

SEQ ID NO: 9956 - RNA, 17 nt, Artificial Sequence
  Synthetic oligonucleotide: FAS-2117
cacccgggccugaggga

SEQ ID NO: 9957 - RNA, 17 nt, Artificial Sequence
  Synthetic oligonucleotide: FAS-2118
aagguccuaacagcccc

SEQ ID NO: 9958 - RNA, 17 nt, Artificial Sequence
  Synthetic oligonucleotide: FAS-2119
agguccuaacagccccc

SEQ ID NO: 9959 - RNA, 17 nt, Artificial Sequence
  Synthetic oligonucleotide: FAS-2120
agcagcccgccgcuccc

SEQ ID NO: 9960 - RNA, 20 nt, Artificial Sequence
  Synthetic oligonucleotide: FAS-979
acgaaggacaggaaguaauu

SEQ ID NO: 9961 - RNA, 20 nt, Artificial Sequence
  Synthetic oligonucleotide: FAS-980
auugugaauguuuaauauag

SEQ ID NO: 9962 - RNA, 20 nt, Artificial Sequence
  Synthetic oligonucleotide: FAS-597
uugugaauguuuaauauagc

SEQ ID NO: 9963 - RNA, 20 nt, Artificial Sequence
  Synthetic oligonucleotide: FAS-982
uuguuagcuuuguuuuccuc

SEQ ID NO: 9964 - RNA, 20 nt, Artificial Sequence
  Synthetic oligonucleotide: FAS-983
guuagcuuuguuuuccucuu

SEQ ID NO: 9965 - RNA, 20 nt, Artificial Sequence
  Synthetic oligonucleotide: FAS-984
ccucuugagaaauaaaaacu

SEQ ID NO: 9966 - RNA, 20 nt, Artificial Sequence
  Synthetic oligonucleotide: FAS-601
cucuugagaaauaaaaacua

SEQ ID NO: 9967 - RNA, 20 nt, Artificial Sequence
  Synthetic oligonucleotide: FAS-986
acuaaggggcccucccuuuu

SEQ ID NO: 9968 - RNA, 20 nt, Artificial Sequence
  Synthetic oligonucleotide: FAS-987
auaugguuaacuguccauuc

SEQ ID NO: 9969 - RNA, 20 nt, Artificial Sequence
  Synthetic oligonucleotide: FAS-988
uguccauuccagaaacgucu

SEQ ID NO: 9970 - RNA, 20 nt, Artificial Sequence
  Synthetic oligonucleotide: FAS-989
ucucauguugcagccacaac

SEQ ID NO: 9971 - RNA, 20 nt, Artificial Sequence
  Synthetic oligonucleotide: FAS-990
aaugccccgcaagucuuucu

SEQ ID NO: 9972 - RNA, 20 nt, Artificial Sequence
  Synthetic oligonucleotide: FAS-991
ccaaggcuccuguacccagg

SEQ ID NO: 9973 - RNA, 20 nt, Artificial Sequence
  Synthetic oligonucleotide: FAS-992
ccaggcaggaccucugcgcu

SEQ ID NO: 9974 - RNA, 20 nt, Artificial Sequence
  Synthetic oligonucleotide: FAS-993
gaccuccccaacuucccagg

SEQ ID NO: 9975 - RNA, 20 nt, Artificial Sequence
  Synthetic oligonucleotide: FAS-994
cuucccagguugaacuacag

SEQ ID NO: 9976 - RNA, 20 nt, Artificial Sequence
  Synthetic oligonucleotide: FAS-995
ugaacuacagcagaagccuu

SEQ ID NO: 9977 - RNA, 20 nt, Artificial Sequence
  Synthetic oligonucleotide: FAS-996
cuacagcagaagccuuuaga

SEQ ID NO: 9978 - RNA, 20 nt, Artificial Sequence
  Synthetic oligonucleotide: FAS-997
gcagaagccuuuagaaaggg

SEQ ID NO: 9979 - RNA, 20 nt, Artificial Sequence
  Synthetic oligonucleotide: FAS-613
cagaagccuuuagaaagggc

SEQ ID NO: 9980 - RNA, 20 nt, Artificial Sequence
  Synthetic oligonucleotide: FAS-999
aaagggcaggaggccggcuc

SEQ ID NO: 9981 - RNA, 20 nt, Artificial Sequence
  Synthetic oligonucleotide: FAS-1000
ccggcucucgagguccucac

SEQ ID NO: 9982 - RNA, 20 nt, Artificial Sequence
  Synthetic oligonucleotide: FAS-1001
ucucgagguccucaccugaa

SEQ ID NO: 9983 - RNA, 20 nt, Artificial Sequence
  Synthetic oligonucleotide: FAS-1002
agugagcaugccagccacug

SEQ ID NO: 9984 - RNA, 20 nt, Artificial Sequence
  Synthetic oligonucleotide: FAS-617
gugagcaugccagccacugc

SEQ ID NO: 9985 - RNA, 20 nt, Artificial Sequence
  Synthetic oligonucleotide: FAS-1004
ccagccacugcaggaacgcc

SEQ ID NO: 9986 - RNA, 20 nt, Artificial Sequence
  Synthetic oligonucleotide: FAS-618
cagccacugcaggaacgccc

SEQ ID NO: 9987 - RNA, 20 nt, Artificial Sequence
  Synthetic oligonucleotide: FAS-1006
acugcaggaacgccccggga

SEQ ID NO: 9988 - RNA, 20 nt, Artificial Sequence
  Synthetic oligonucleotide: FAS-620
cugcaggaacgccccgggac

SEQ ID NO: 9989 - RNA, 20 nt, Artificial Sequence
  Synthetic oligonucleotide: FAS-1008
caggaaugcccauuugugca

SEQ ID NO: 9990 - RNA, 20 nt, Artificial Sequence
  Synthetic oligonucleotide: FAS-1009
cccgcgcgcaggccaaguug

SEQ ID NO: 9991 - RNA, 20 nt, Artificial Sequence
  Synthetic oligonucleotide: FAS-1010
caggccaaguugcugaauca

SEQ ID NO: 9992 - RNA, 20 nt, Artificial Sequence
  Synthetic oligonucleotide: FAS-622
aggccaaguugcugaaucaa

SEQ ID NO: 9993 - RNA, 20 nt, Artificial Sequence
  Synthetic oligonucleotide: FAS-1012
ucaauggagcccuccccaac

SEQ ID NO: 9994 - RNA, 20 nt, Artificial Sequence
  Synthetic oligonucleotide: FAS-1013
cccaacccgggcguucccca

SEQ ID NO: 9995 - RNA, 20 nt, Artificial Sequence
  Synthetic oligonucleotide: FAS-1014
ccuucccauccuccugacca

SEQ ID NO: 9996 - RNA, 20 nt, Artificial Sequence
  Synthetic oligonucleotide: FAS-626
cuucccauccuccugaccac

SEQ ID NO: 9997 - RNA, 20 nt, Artificial Sequence
  Synthetic oligonucleotide: FAS-1016
ccugaccaccggggcuuuuc

SEQ ID NO: 9998 - RNA, 20 nt, Artificial Sequence
  Synthetic oligonucleotide: FAS-1017
gcucgucucugaucucgcgc

SEQ ID NO: 9999 - RNA, 20 nt, Artificial Sequence
  Synthetic oligonucleotide: FAS-1018
acagguguucaaagacgcuu

SEQ ID NO: 10000 - RNA, 20 nt, Artificial Sequence
  Synthetic oligonucleotide: FAS-630
cagguguucaaagacgcuuc

SEQ ID NO: 10001 - RNA, 20 nt, Artificial Sequence
  Synthetic oligonucleotide: FAS-631
agguguucaaagacgcuucu

SEQ ID NO: 10002 - RNA, 20 nt, Artificial Sequence
  Synthetic oligonucleotide: FAS-632
gguguucaaagacgcuucug

SEQ ID NO: 10003 - RNA, 20 nt, Artificial Sequence
  Synthetic oligonucleotide: FAS-1022
uucaaagacgcuucugggga

SEQ ID NO: 10004 - RNA, 20 nt, Artificial Sequence
  Synthetic oligonucleotide: FAS-1023
caaagacgcuucuggggagu

SEQ ID NO: 10005 - RNA, 20 nt, Artificial Sequence
  Synthetic oligonucleotide: FAS-633
aaagacgcuucuggggagug

SEQ ID NO: 10006 - RNA, 20 nt, Artificial Sequence
  Synthetic oligonucleotide: FAS-634
aagacgcuucuggggaguga

SEQ ID NO: 10007 - RNA, 20 nt, Artificial Sequence
  Synthetic oligonucleotide: FAS-1026
gggagugagggaagcgguuu

SEQ ID NO: 10008 - RNA, 20 nt, Artificial Sequence
  Synthetic oligonucleotide: FAS-1027
gcgguuuacgagugacuugg

SEQ ID NO: 10009 - RNA, 20 nt, Artificial Sequence
  Synthetic oligonucleotide: FAS-637
cgguuuacgagugacuuggc

SEQ ID NO: 10010 - RNA, 20 nt, Artificial Sequence
  Synthetic oligonucleotide: FAS-1029
gagugacuuggcuggagccu

SEQ ID NO: 10011 - RNA, 20 nt, Artificial Sequence
  Synthetic oligonucleotide: FAS-638
agugacuuggcuggagccuc

SEQ ID NO: 10012 - RNA, 20 nt, Artificial Sequence
  Synthetic oligonucleotide: FAS-1031
acuuggcuggagccucaggg

SEQ ID NO: 10013 - RNA, 20 nt, Artificial Sequence
  Synthetic oligonucleotide: FAS-1032
ccucaggggcgggcacuggc

SEQ ID NO: 10014 - RNA, 20 nt, Artificial Sequence
  Synthetic oligonucleotide: FAS-644
cucaggggcgggcacuggca

SEQ ID NO: 10015 - RNA, 20 nt, Artificial Sequence
  Synthetic oligonucleotide: FAS-1034
gcacuggcacggaacacacc

SEQ ID NO: 10016 - RNA, 20 nt, Artificial Sequence
  Synthetic oligonucleotide: FAS-1035
ggccagcccuggcugcccag

SEQ ID NO: 10017 - RNA, 20 nt, Artificial Sequence
  Synthetic oligonucleotide: FAS-648
gccagcccuggcugcccagg

SEQ ID NO: 10018 - RNA, 20 nt, Artificial Sequence
  Synthetic oligonucleotide: FAS-1037
gcggagcugccucuucuccc

SEQ ID NO: 10019 - RNA, 20 nt, Artificial Sequence
  Synthetic oligonucleotide: FAS-1038
gccucuucucccgcggguug

SEQ ID NO: 10020 - RNA, 20 nt, Artificial Sequence
  Synthetic oligonucleotide: FAS-1039
gguugguggacccgcucagu

SEQ ID NO: 10021 - RNA, 20 nt, Artificial Sequence
  Synthetic oligonucleotide: FAS-653
guugguggacccgcucagua

SEQ ID NO: 10022 - RNA, 20 nt, Artificial Sequence
  Synthetic oligonucleotide: FAS-1041
uggacccgcucaguacggag

SEQ ID NO: 10023 - RNA, 20 nt, Artificial Sequence
  Synthetic oligonucleotide: FAS-654
ggacccgcucaguacggagu

SEQ ID NO: 10024 - RNA, 20 nt, Artificial Sequence
  Synthetic oligonucleotide: FAS-655
gacccgcucaguacggaguu

SEQ ID NO: 10025 - RNA, 20 nt, Artificial Sequence
  Synthetic oligonucleotide: FAS-656
acccgcucaguacggaguug

SEQ ID NO: 10026 - RNA, 20 nt, Artificial Sequence
  Synthetic oligonucleotide: FAS-1045
guuggggaagcucuuucacu

SEQ ID NO: 10027 - RNA, 20 nt, Artificial Sequence
  Synthetic oligonucleotide: FAS-657
uuggggaagcucuuucacuu

SEQ ID NO: 10028 - RNA, 20 nt, Artificial Sequence
  Synthetic oligonucleotide: FAS-1047
ggggaagcucuuucacuucg

SEQ ID NO: 10029 - RNA, 20 nt, Artificial Sequence
  Synthetic oligonucleotide: FAS-1048
aggauugcucaacaaccaug

SEQ ID NO: 10030 - RNA, 20 nt, Artificial Sequence
  Synthetic oligonucleotide: FAS-99
ucaacaaccaugcugggcau

SEQ ID NO: 10031 - RNA, 20 nt, Artificial Sequence
  Synthetic oligonucleotide: FAS-100
ucuggacccuccuaccucug

SEQ ID NO: 10032 - RNA, 20 nt, Artificial Sequence
  Synthetic oligonucleotide: FAS-1051
ucuggugagcccucuccugc

SEQ ID NO: 10033 - RNA, 20 nt, Artificial Sequence
  Synthetic oligonucleotide: FAS-1052
gugagcccucuccugcccgg

SEQ ID NO: 10034 - RNA, 20 nt, Artificial Sequence
  Synthetic oligonucleotide: FAS-665
ugagcccucuccugcccggg

SEQ ID NO: 10035 - RNA, 20 nt, Artificial Sequence
  Synthetic oligonucleotide: FAS-1054
aggcuuaccccgucuuaguc

SEQ ID NO: 10036 - RNA, 20 nt, Artificial Sequence
  Synthetic oligonucleotide: FAS-667
ggcuuaccccgucuuagucc

SEQ ID NO: 10037 - RNA, 20 nt, Artificial Sequence
  Synthetic oligonucleotide: FAS-668
gcuuaccccgucuuaguccc

SEQ ID NO: 10038 - RNA, 20 nt, Artificial Sequence
  Synthetic oligonucleotide: FAS-1057
uagucccggggauaggcaaa

SEQ ID NO: 10039 - RNA, 20 nt, Artificial Sequence
  Synthetic oligonucleotide: FAS-671
agucccggggauaggcaaag

SEQ ID NO: 10040 - RNA, 20 nt, Artificial Sequence
  Synthetic oligonucleotide: FAS-1059
ccggggauaggcaaaguggg

SEQ ID NO: 10041 - RNA, 20 nt, Artificial Sequence
  Synthetic oligonucleotide: FAS-1060
auaggcaaaguggggcgggc

SEQ ID NO: 10042 - RNA, 20 nt, Artificial Sequence
  Synthetic oligonucleotide: FAS-676
uaggcaaaguggggcgggcg

SEQ ID NO: 10043 - RNA, 20 nt, Artificial Sequence
  Synthetic oligonucleotide: FAS-1062
ggggcgggcgcgggacgcgu

SEQ ID NO: 10044 - RNA, 20 nt, Artificial Sequence
  Synthetic oligonucleotide: FAS-678
gggcgggcgcgggacgcgug

SEQ ID NO: 10045 - RNA, 20 nt, Artificial Sequence
  Synthetic oligonucleotide: FAS-1064
uugcggcggcagcggcgcac

SEQ ID NO: 10046 - RNA, 20 nt, Artificial Sequence
  Synthetic oligonucleotide: FAS-1065
gcagcggcgcacgcgggcac

SEQ ID NO: 10047 - RNA, 20 nt, Artificial Sequence
  Synthetic oligonucleotide: FAS-685
cagcggcgcacgcgggcacc

SEQ ID NO: 10048 - RNA, 20 nt, Artificial Sequence
  Synthetic oligonucleotide: FAS-686
agcggcgcacgcgggcaccu

SEQ ID NO: 10049 - RNA, 17 nt, Artificial Sequence
  Synthetic oligonucleotide: FAS-1068
aaggacaggaaguaauu

SEQ ID NO: 10050 - RNA, 17 nt, Artificial Sequence
  Synthetic oligonucleotide: FAS-1069
gugaauguuuaauauag

SEQ ID NO: 10051 - RNA, 17 nt, Artificial Sequence
  Synthetic oligonucleotide: FAS-788
ugaauguuuaauauagc

SEQ ID NO: 10052 - RNA, 17 nt, Artificial Sequence
  Synthetic oligonucleotide: FAS-1071
uuagcuuuguuuuccuc

SEQ ID NO: 10053 - RNA, 17 nt, Artificial Sequence
  Synthetic oligonucleotide: FAS-1072
agcuuuguuuuccucuu

SEQ ID NO: 10054 - RNA, 17 nt, Artificial Sequence
  Synthetic oligonucleotide: FAS-1073
cuugagaaauaaaaacu

SEQ ID NO: 10055 - RNA, 17 nt, Artificial Sequence
  Synthetic oligonucleotide: FAS-792
uugagaaauaaaaacua

SEQ ID NO: 10056 - RNA, 17 nt, Artificial Sequence
  Synthetic oligonucleotide: FAS-1075
aaggggcccucccuuuu

SEQ ID NO: 10057 - RNA, 17 nt, Artificial Sequence
  Synthetic oligonucleotide: FAS-1076
ugguuaacuguccauuc

SEQ ID NO: 10058 - RNA, 17 nt, Artificial Sequence
  Synthetic oligonucleotide: FAS-1077
ccauuccagaaacgucu

SEQ ID NO: 10059 - RNA, 17 nt, Artificial Sequence
  Synthetic oligonucleotide: FAS-1078
cauguugcagccacaac

SEQ ID NO: 10060 - RNA, 17 nt, Artificial Sequence
  Synthetic oligonucleotide: FAS-1079
gccccgcaagucuuucu

SEQ ID NO: 10061 - RNA, 17 nt, Artificial Sequence
  Synthetic oligonucleotide: FAS-1080
aggcuccuguacccagg

SEQ ID NO: 10062 - RNA, 17 nt, Artificial Sequence
  Synthetic oligonucleotide: FAS-1081
ggcaggaccucugcgcu

SEQ ID NO: 10063 - RNA, 17 nt, Artificial Sequence
  Synthetic oligonucleotide: FAS-1082
cuccccaacuucccagg

SEQ ID NO: 10064 - RNA, 17 nt, Artificial Sequence
  Synthetic oligonucleotide: FAS-1083
cccagguugaacuacag

SEQ ID NO: 10065 - RNA, 17 nt, Artificial Sequence
  Synthetic oligonucleotide: FAS-1084
acuacagcagaagccuu

SEQ ID NO: 10066 - RNA, 17 nt, Artificial Sequence
  Synthetic oligonucleotide: FAS-1085
cagcagaagccuuuaga

SEQ ID NO: 10067 - RNA, 17 nt, Artificial Sequence
  Synthetic oligonucleotide: FAS-1086
gaagccuuuagaaaggg

SEQ ID NO: 10068 - RNA, 17 nt, Artificial Sequence
  Synthetic oligonucleotide: FAS-804
aagccuuuagaaagggc

SEQ ID NO: 10069 - RNA, 17 nt, Artificial Sequence
  Synthetic oligonucleotide: FAS-1088
gggcaggaggccggcuc

SEQ ID NO: 10070 - RNA, 17 nt, Artificial Sequence
  Synthetic oligonucleotide: FAS-1089
gcucucgagguccucac

SEQ ID NO: 10071 - RNA, 17 nt, Artificial Sequence
  Synthetic oligonucleotide: FAS-1090
cgagguccucaccugaa

SEQ ID NO: 10072 - RNA, 17 nt, Artificial Sequence
  Synthetic oligonucleotide: FAS-1091
gagcaugccagccacug

SEQ ID NO: 10073 - RNA, 17 nt, Artificial Sequence
  Synthetic oligonucleotide: FAS-808
agcaugccagccacugc

SEQ ID NO: 10074 - RNA, 17 nt, Artificial Sequence
  Synthetic oligonucleotide: FAS-1093
gccacugcaggaacgcc

SEQ ID NO: 10075 - RNA, 17 nt, Artificial Sequence
  Synthetic oligonucleotide: FAS-809
ccacugcaggaacgccc

SEQ ID NO: 10076 - RNA, 17 nt, Artificial Sequence
  Synthetic oligonucleotide: FAS-1095
gcaggaacgccccggga

SEQ ID NO: 10077 - RNA, 17 nt, Artificial Sequence
  Synthetic oligonucleotide: FAS-811
caggaacgccccgggac

SEQ ID NO: 10078 - RNA, 17 nt, Artificial Sequence
  Synthetic oligonucleotide: FAS-1097
gaaugcccauuugugca

SEQ ID NO: 10079 - RNA, 17 nt, Artificial Sequence
  Synthetic oligonucleotide: FAS-1098
gcgcgcaggccaaguug

SEQ ID NO: 10080 - RNA, 17 nt, Artificial Sequence
  Synthetic oligonucleotide: FAS-1099
gccaaguugcugaauca

SEQ ID NO: 10081 - RNA, 17 nt, Artificial Sequence
  Synthetic oligonucleotide: FAS-813
ccaaguugcugaaucaa

SEQ ID NO: 10082 - RNA, 17 nt, Artificial Sequence
  Synthetic oligonucleotide: FAS-1101
auggagcccuccccaac

SEQ ID NO: 10083 - RNA, 17 nt, Artificial Sequence
  Synthetic oligonucleotide: FAS-1102
aacccgggcguucccca

SEQ ID NO: 10084 - RNA, 17 nt, Artificial Sequence
  Synthetic oligonucleotide: FAS-1103
ucccauccuccugacca

SEQ ID NO: 10085 - RNA, 17 nt, Artificial Sequence
  Synthetic oligonucleotide: FAS-817
cccauccuccugaccac

SEQ ID NO: 10086 - RNA, 17 nt, Artificial Sequence
  Synthetic oligonucleotide: FAS-1105
gaccaccggggcuuuuc

SEQ ID NO: 10087 - RNA, 17 nt, Artificial Sequence
  Synthetic oligonucleotide: FAS-1106
cgucucugaucucgcgc

SEQ ID NO: 10088 - RNA, 17 nt, Artificial Sequence
  Synthetic oligonucleotide: FAS-1107
gguguucaaagacgcuu

SEQ ID NO: 10089 - RNA, 17 nt, Artificial Sequence
  Synthetic oligonucleotide: FAS-821
guguucaaagacgcuuc

SEQ ID NO: 10090 - RNA, 17 nt, Artificial Sequence
  Synthetic oligonucleotide: FAS-822
uguucaaagacgcuucu

SEQ ID NO: 10091 - RNA, 17 nt, Artificial Sequence
  Synthetic oligonucleotide: FAS-823
guucaaagacgcuucug

SEQ ID NO: 10092 - RNA, 17 nt, Artificial Sequence
  Synthetic oligonucleotide: FAS-1111
aaagacgcuucugggga

SEQ ID NO: 10093 - RNA, 17 nt, Artificial Sequence
  Synthetic oligonucleotide: FAS-1112
agacgcuucuggggagu

SEQ ID NO: 10094 - RNA, 17 nt, Artificial Sequence
  Synthetic oligonucleotide: FAS-824
gacgcuucuggggagug

SEQ ID NO: 10095 - RNA, 17 nt, Artificial Sequence
  Synthetic oligonucleotide: FAS-825
acgcuucuggggaguga

SEQ ID NO: 10096 - RNA, 17 nt, Artificial Sequence
  Synthetic oligonucleotide: FAS-1115
agugagggaagcgguuu

SEQ ID NO: 10097 - RNA, 17 nt, Artificial Sequence
  Synthetic oligonucleotide: FAS-1116
guuuacgagugacuugg

SEQ ID NO: 10098 - RNA, 17 nt, Artificial Sequence
  Synthetic oligonucleotide: FAS-828
uuuacgagugacuuggc

SEQ ID NO: 10099 - RNA, 17 nt, Artificial Sequence
  Synthetic oligonucleotide: FAS-1118
ugacuuggcuggagccu

SEQ ID NO: 10100 - RNA, 17 nt, Artificial Sequence
  Synthetic oligonucleotide: FAS-829
gacuuggcuggagccuc

SEQ ID NO: 10101 - RNA, 17 nt, Artificial Sequence
  Synthetic oligonucleotide: FAS-1120
uggcuggagccucaggg

SEQ ID NO: 10102 - RNA, 17 nt, Artificial Sequence
  Synthetic oligonucleotide: FAS-1121
caggggcgggcacuggc

SEQ ID NO: 10103 - RNA, 17 nt, Artificial Sequence
  Synthetic oligonucleotide: FAS-835
aggggcgggcacuggca

SEQ ID NO: 10104 - RNA, 17 nt, Artificial Sequence
  Synthetic oligonucleotide: FAS-1123
cuggcacggaacacacc

SEQ ID NO: 10105 - RNA, 17 nt, Artificial Sequence
  Synthetic oligonucleotide: FAS-1124
cagcccuggcugcccag

SEQ ID NO: 10106 - RNA, 17 nt, Artificial Sequence
  Synthetic oligonucleotide: FAS-839
agcccuggcugcccagg

SEQ ID NO: 10107 - RNA, 17 nt, Artificial Sequence
  Synthetic oligonucleotide: FAS-1126
gagcugccucuucuccc

SEQ ID NO: 10108 - RNA, 17 nt, Artificial Sequence
  Synthetic oligonucleotide: FAS-1127
ucuucucccgcggguug

SEQ ID NO: 10109 - RNA, 17 nt, Artificial Sequence
  Synthetic oligonucleotide: FAS-1128
ugguggacccgcucagu

SEQ ID NO: 10110 - RNA, 17 nt, Artificial Sequence
  Synthetic oligonucleotide: FAS-844
gguggacccgcucagua

SEQ ID NO: 10111 - RNA, 17 nt, Artificial Sequence
  Synthetic oligonucleotide: FAS-1130
acccgcucaguacggag

SEQ ID NO: 10112 - RNA, 17 nt, Artificial Sequence
  Synthetic oligonucleotide: FAS-845
cccgcucaguacggagu

SEQ ID NO: 10113 - RNA, 17 nt, Artificial Sequence
  Synthetic oligonucleotide: FAS-846
ccgcucaguacggaguu

SEQ ID NO: 10114 - RNA, 17 nt, Artificial Sequence
  Synthetic oligonucleotide: FAS-847
cgcucaguacggaguug

SEQ ID NO: 10115 - RNA, 17 nt, Artificial Sequence
  Synthetic oligonucleotide: FAS-1134
ggggaagcucuuucacu

SEQ ID NO: 10116 - RNA, 17 nt, Artificial Sequence
  Synthetic oligonucleotide: FAS-848
gggaagcucuuucacuu

SEQ ID NO: 10117 - RNA, 17 nt, Artificial Sequence
  Synthetic oligonucleotide: FAS-1136
gaagcucuuucacuucg

SEQ ID NO: 10118 - RNA, 17 nt, Artificial Sequence
  Synthetic oligonucleotide: FAS-1137
auugcucaacaaccaug

SEQ ID NO: 10119 - RNA, 17 nt, Artificial Sequence
  Synthetic oligonucleotide: FAS-101
acaaccaugcugggcau

SEQ ID NO: 10120 - RNA, 17 nt, Artificial Sequence
  Synthetic oligonucleotide: FAS-102
ggacccuccuaccucug

SEQ ID NO: 10121 - RNA, 17 nt, Artificial Sequence
  Synthetic oligonucleotide: FAS-1140
ggugagcccucuccugc

SEQ ID NO: 10122 - RNA, 17 nt, Artificial Sequence
  Synthetic oligonucleotide: FAS-1141
agcccucuccugcccgg

SEQ ID NO: 10123 - RNA, 17 nt, Artificial Sequence
  Synthetic oligonucleotide: FAS-856
gcccucuccugcccggg

SEQ ID NO: 10124 - RNA, 17 nt, Artificial Sequence
  Synthetic oligonucleotide: FAS-1143
cuuaccccgucuuaguc

SEQ ID NO: 10125 - RNA, 17 nt, Artificial Sequence
  Synthetic oligonucleotide: FAS-858
uuaccccgucuuagucc

SEQ ID NO: 10126 - RNA, 17 nt, Artificial Sequence
  Synthetic oligonucleotide: FAS-859
uaccccgucuuaguccc

SEQ ID NO: 10127 - RNA, 17 nt, Artificial Sequence
  Synthetic oligonucleotide: FAS-1146
ucccggggauaggcaaa

SEQ ID NO: 10128 - RNA, 17 nt, Artificial Sequence
  Synthetic oligonucleotide: FAS-862
cccggggauaggcaaag

SEQ ID NO: 10129 - RNA, 17 nt, Artificial Sequence
  Synthetic oligonucleotide: FAS-1148
gggauaggcaaaguggg

SEQ ID NO: 10130 - RNA, 17 nt, Artificial Sequence
  Synthetic oligonucleotide: FAS-1149
ggcaaaguggggcgggc

SEQ ID NO: 10131 - RNA, 17 nt, Artificial Sequence
  Synthetic oligonucleotide: FAS-867
gcaaaguggggcgggcg

SEQ ID NO: 10132 - RNA, 17 nt, Artificial Sequence
  Synthetic oligonucleotide: FAS-1151
gcgggcgcgggacgcgu

SEQ ID NO: 10133 - RNA, 17 nt, Artificial Sequence
  Synthetic oligonucleotide: FAS-869
cgggcgcgggacgcgug

SEQ ID NO: 10134 - RNA, 17 nt, Artificial Sequence
  Synthetic oligonucleotide: FAS-1153
cggcggcagcggcgcac

SEQ ID NO: 10135 - RNA, 17 nt, Artificial Sequence
  Synthetic oligonucleotide: FAS-1154
gcggcgcacgcgggcac

SEQ ID NO: 10136 - RNA, 17 nt, Artificial Sequence
  Synthetic oligonucleotide: FAS-876
cggcgcacgcgggcacc

SEQ ID NO: 10137 - RNA, 17 nt, Artificial Sequence
  Synthetic oligonucleotide: FAS-877
ggcgcacgcgggcaccu

SEQ ID NO: 10138 - RNA, 20 nt, Artificial Sequence
  Synthetic oligonucleotide: FAS-1157
ccgccccacuuugccuaucc

SEQ ID NO: 10139 - RNA, 20 nt, Artificial Sequence
  Synthetic oligonucleotide: FAS-687
cgccccacuuugccuauccc

SEQ ID NO: 10140 - RNA, 20 nt, Artificial Sequence
  Synthetic oligonucleotide: FAS-1159
ugccuauccccgggacuaag

SEQ ID NO: 10141 - RNA, 20 nt, Artificial Sequence
  Synthetic oligonucleotide: FAS-689
gccuauccccgggacuaaga

SEQ ID NO: 10142 - RNA, 20 nt, Artificial Sequence
  Synthetic oligonucleotide: FAS-1161
aagacgggguaagccuccac

SEQ ID NO: 10143 - RNA, 20 nt, Artificial Sequence
  Synthetic oligonucleotide: FAS-1162
gggguaagccuccacccggg

SEQ ID NO: 10144 - RNA, 20 nt, Artificial Sequence
  Synthetic oligonucleotide: FAS-694
ggguaagccuccacccgggc

SEQ ID NO: 10145 - RNA, 20 nt, Artificial Sequence
  Synthetic oligonucleotide: FAS-1164
guaagccuccacccgggcag

SEQ ID NO: 10146 - RNA, 20 nt, Artificial Sequence
  Synthetic oligonucleotide: FAS-1165
aagccuccacccgggcagga

SEQ ID NO: 10147 - RNA, 20 nt, Artificial Sequence
  Synthetic oligonucleotide: FAS-103
ccgggcaggagagggcucac

SEQ ID NO: 10148 - RNA, 20 nt, Artificial Sequence
  Synthetic oligonucleotide: FAS-104
aggagagggcucaccagagg

SEQ ID NO: 10149 - RNA, 20 nt, Artificial Sequence
  Synthetic oligonucleotide: FAS-105
ggagagggcucaccagaggu

SEQ ID NO: 10150 - RNA, 20 nt, Artificial Sequence
  Synthetic oligonucleotide: FAS-106
agagggcucaccagagguag

SEQ ID NO: 10151 - RNA, 20 nt, Artificial Sequence
  Synthetic oligonucleotide: FAS-107
ccagaugcccagcaugguug

SEQ ID NO: 10152 - RNA, 20 nt, Artificial Sequence
  Synthetic oligonucleotide: FAS-1171
caugguuguugagcaauccu

SEQ ID NO: 10153 - RNA, 20 nt, Artificial Sequence
  Synthetic oligonucleotide: FAS-1172
uuguugagcaauccuccgaa

SEQ ID NO: 10154 - RNA, 20 nt, Artificial Sequence
  Synthetic oligonucleotide: FAS-1173
ugagcaauccuccgaaguga

SEQ ID NO: 10155 - RNA, 20 nt, Artificial Sequence
  Synthetic oligonucleotide: FAS-1174
agagcuuccccaacuccgua

SEQ ID NO: 10156 - RNA, 20 nt, Artificial Sequence
  Synthetic oligonucleotide: FAS-1175
cuuccccaacuccguacuga

SEQ ID NO: 10157 - RNA, 20 nt, Artificial Sequence
  Synthetic oligonucleotide: FAS-1176
cugagcggguccaccaaccc

SEQ ID NO: 10158 - RNA, 20 nt, Artificial Sequence
  Synthetic oligonucleotide: FAS-704
ugagcggguccaccaacccg

SEQ ID NO: 10159 - RNA, 20 nt, Artificial Sequence
  Synthetic oligonucleotide: FAS-705
gagcggguccaccaacccgc

SEQ ID NO: 10160 - RNA, 20 nt, Artificial Sequence
  Synthetic oligonucleotide: FAS-1179
gcggguccaccaacccgcgg

SEQ ID NO: 10161 - RNA, 20 nt, Artificial Sequence
  Synthetic oligonucleotide: FAS-1180
gguccaccaacccgcgggag

SEQ ID NO: 10162 - RNA, 20 nt, Artificial Sequence
  Synthetic oligonucleotide: FAS-1181
gggagaagaggcagcuccgc

SEQ ID NO: 10163 - RNA, 20 nt, Artificial Sequence
  Synthetic oligonucleotide: FAS-1182
ggcagcuccgccugggcagc

SEQ ID NO: 10164 - RNA, 20 nt, Artificial Sequence
  Synthetic oligonucleotide: FAS-1183
ugggcagccagggcuggccu

SEQ ID NO: 10165 - RNA, 20 nt, Artificial Sequence
  Synthetic oligonucleotide: FAS-1184
uuccgugccagugcccgccc

SEQ ID NO: 10166 - RNA, 20 nt, Artificial Sequence
  Synthetic oligonucleotide: FAS-1185
aaaccgcuucccucacuccc

SEQ ID NO: 10167 - RNA, 20 nt, Artificial Sequence
  Synthetic oligonucleotide: FAS-1186
cucacuccccagaagcgucu

SEQ ID NO: 10168 - RNA, 20 nt, Artificial Sequence
  Synthetic oligonucleotide: FAS-1187
caccugugugucacucuugc

SEQ ID NO: 10169 - RNA, 20 nt, Artificial Sequence
  Synthetic oligonucleotide: FAS-1188
gugucacucuugcgcgagau

SEQ ID NO: 10170 - RNA, 20 nt, Artificial Sequence
  Synthetic oligonucleotide: FAS-1189
acucuugcgcgagaucagag

SEQ ID NO: 10171 - RNA, 20 nt, Artificial Sequence
  Synthetic oligonucleotide: FAS-1190
gcgagaucagagacgagcuc

SEQ ID NO: 10172 - RNA, 20 nt, Artificial Sequence
  Synthetic oligonucleotide: FAS-1191
ucacgaaaagccccgguggu

SEQ ID NO: 10173 - RNA, 20 nt, Artificial Sequence
  Synthetic oligonucleotide: FAS-717
cacgaaaagccccggugguc

SEQ ID NO: 10174 - RNA, 20 nt, Artificial Sequence
  Synthetic oligonucleotide: FAS-1193
cgaaaagccccgguggucag

SEQ ID NO: 10175 - RNA, 20 nt, Artificial Sequence
  Synthetic oligonucleotide: FAS-1194
aagccccgguggucaggagg

SEQ ID NO: 10176 - RNA, 20 nt, Artificial Sequence
  Synthetic oligonucleotide: FAS-719
agccccgguggucaggagga

SEQ ID NO: 10177 - RNA, 20 nt, Artificial Sequence
  Synthetic oligonucleotide: FAS-720
gccccgguggucaggaggau

SEQ ID NO: 10178 - RNA, 20 nt, Artificial Sequence
  Synthetic oligonucleotide: FAS-1197
ccgguggucaggaggauggg

SEQ ID NO: 10179 - RNA, 20 nt, Artificial Sequence
  Synthetic oligonucleotide: FAS-721
cgguggucaggaggauggga

SEQ ID NO: 10180 - RNA, 20 nt, Artificial Sequence
  Synthetic oligonucleotide: FAS-1199
aggaugggaaggaagccucg

SEQ ID NO: 10181 - RNA, 20 nt, Artificial Sequence
  Synthetic oligonucleotide: FAS-722
ggaugggaaggaagccucgc

SEQ ID NO: 10182 - RNA, 20 nt, Artificial Sequence
  Synthetic oligonucleotide: FAS-723
gaugggaaggaagccucgcu

SEQ ID NO: 10183 - RNA, 20 nt, Artificial Sequence
  Synthetic oligonucleotide: FAS-724
augggaaggaagccucgcug

SEQ ID NO: 10184 - RNA, 20 nt, Artificial Sequence
  Synthetic oligonucleotide: FAS-1203
gaagccucgcuggggaacgc

SEQ ID NO: 10185 - RNA, 20 nt, Artificial Sequence
  Synthetic oligonucleotide: FAS-1204
cucgcuggggaacgcccggg

SEQ ID NO: 10186 - RNA, 20 nt, Artificial Sequence
  Synthetic oligonucleotide: FAS-727
ucgcuggggaacgcccgggu

SEQ ID NO: 10187 - RNA, 20 nt, Artificial Sequence
  Synthetic oligonucleotide: FAS-728
cgcuggggaacgcccggguu

SEQ ID NO: 10188 - RNA, 20 nt, Artificial Sequence
  Synthetic oligonucleotide: FAS-729
gcuggggaacgcccggguug

SEQ ID NO: 10189 - RNA, 20 nt, Artificial Sequence
  Synthetic oligonucleotide: FAS-1208
uggggaacgcccggguuggg

SEQ ID NO: 10190 - RNA, 20 nt, Artificial Sequence
  Synthetic oligonucleotide: FAS-1209
uucagcaacuuggccugcgc

SEQ ID NO: 10191 - RNA, 20 nt, Artificial Sequence
  Synthetic oligonucleotide: FAS-1210
caacuuggccugcgcgcggg

SEQ ID NO: 10192 - RNA, 20 nt, Artificial Sequence
  Synthetic oligonucleotide: FAS-735
aacuuggccugcgcgcgggu

SEQ ID NO: 10193 - RNA, 20 nt, Artificial Sequence
  Synthetic oligonucleotide: FAS-736
acuuggccugcgcgcgggua

SEQ ID NO: 10194 - RNA, 20 nt, Artificial Sequence
  Synthetic oligonucleotide: FAS-1213
uuggccugcgcgcggguagg

SEQ ID NO: 10195 - RNA, 20 nt, Artificial Sequence
  Synthetic oligonucleotide: FAS-737
uggccugcgcgcggguaggg

SEQ ID NO: 10196 - RNA, 20 nt, Artificial Sequence
  Synthetic oligonucleotide: FAS-738
ggccugcgcgcggguaggga

SEQ ID NO: 10197 - RNA, 20 nt, Artificial Sequence
  Synthetic oligonucleotide: FAS-739
gccugcgcgcggguagggag

SEQ ID NO: 10198 - RNA, 20 nt, Artificial Sequence
  Synthetic oligonucleotide: FAS-740
ccugcgcgcggguagggagg

SEQ ID NO: 10199 - RNA, 20 nt, Artificial Sequence
  Synthetic oligonucleotide: FAS-1218
ugcgcgcggguagggagggg

SEQ ID NO: 10200 - RNA, 20 nt, Artificial Sequence
  Synthetic oligonucleotide: FAS-1219
ggguagggagggggagaagu

SEQ ID NO: 10201 - RNA, 20 nt, Artificial Sequence
  Synthetic oligonucleotide: FAS-1220
agggagggggagaagucagg

SEQ ID NO: 10202 - RNA, 20 nt, Artificial Sequence
  Synthetic oligonucleotide: FAS-1221
ggagggggagaagucagggu

SEQ ID NO: 10203 - RNA, 20 nt, Artificial Sequence
  Synthetic oligonucleotide: FAS-743
gagggggagaagucagggug

SEQ ID NO: 10204 - RNA, 20 nt, Artificial Sequence
  Synthetic oligonucleotide: FAS-1223
ggggagaagucagggugagg

SEQ ID NO: 10205 - RNA, 20 nt, Artificial Sequence
  Synthetic oligonucleotide: FAS-744
gggagaagucagggugagga

SEQ ID NO: 10206 - RNA, 20 nt, Artificial Sequence
  Synthetic oligonucleotide: FAS-1225
agucagggugaggaaggagu

SEQ ID NO: 10207 - RNA, 20 nt, Artificial Sequence
  Synthetic oligonucleotide: FAS-1226
agucaggguucguugcacaa

SEQ ID NO: 10208 - RNA, 20 nt, Artificial Sequence
  Synthetic oligonucleotide: FAS-1227
cacaaaugggcauuccuguc

SEQ ID NO: 10209 - RNA, 20 nt, Artificial Sequence
  Synthetic oligonucleotide: FAS-749
acaaaugggcauuccugucc

SEQ ID NO: 10210 - RNA, 20 nt, Artificial Sequence
  Synthetic oligonucleotide: FAS-1229
ggcuggcaugcucacuucag

SEQ ID NO: 10211 - RNA, 20 nt, Artificial Sequence
  Synthetic oligonucleotide: FAS-1230
cuggcaugcucacuucaggu

SEQ ID NO: 10212 - RNA, 20 nt, Artificial Sequence
  Synthetic oligonucleotide: FAS-1231
gcucacuucaggugaggacc

SEQ ID NO: 10213 - RNA, 20 nt, Artificial Sequence
  Synthetic oligonucleotide: FAS-1232
ucacuucaggugaggaccuc

SEQ ID NO: 10214 - RNA, 20 nt, Artificial Sequence
  Synthetic oligonucleotide: FAS-1233
ggcuucugcuguaguucaac

SEQ ID NO: 10215 - RNA, 20 nt, Artificial Sequence
  Synthetic oligonucleotide: FAS-758
gcuucugcuguaguucaacc

SEQ ID NO: 10216 - RNA, 20 nt, Artificial Sequence
  Synthetic oligonucleotide: FAS-759
cuucugcuguaguucaaccu

SEQ ID NO: 10217 - RNA, 20 nt, Artificial Sequence
  Synthetic oligonucleotide: FAS-1236
cuguaguucaaccugggaag

SEQ ID NO: 10218 - RNA, 20 nt, Artificial Sequence
  Synthetic oligonucleotide: FAS-760
uguaguucaaccugggaagu

SEQ ID NO: 10219 - RNA, 20 nt, Artificial Sequence
  Synthetic oligonucleotide: FAS-761
guaguucaaccugggaaguu

SEQ ID NO: 10220 - RNA, 20 nt, Artificial Sequence
  Synthetic oligonucleotide: FAS-762
uaguucaaccugggaaguug

SEQ ID NO: 10221 - RNA, 20 nt, Artificial Sequence
  Synthetic oligonucleotide: FAS-1240
ccugggaaguuggggagguc

SEQ ID NO: 10222 - RNA, 20 nt, Artificial Sequence
  Synthetic oligonucleotide: FAS-1241
gggaaguuggggaggucuug

SEQ ID NO: 10223 - RNA, 20 nt, Artificial Sequence
  Synthetic oligonucleotide: FAS-764
ggaaguuggggaggucuuga

SEQ ID NO: 10224 - RNA, 20 nt, Artificial Sequence
  Synthetic oligonucleotide: FAS-1243
aaguuggggaggucuugaag

SEQ ID NO: 10225 - RNA, 20 nt, Artificial Sequence
  Synthetic oligonucleotide: FAS-1244
uggggaggucuugaaggaga

SEQ ID NO: 10226 - RNA, 20 nt, Artificial Sequence
  Synthetic oligonucleotide: FAS-765
ggggaggucuugaaggagaa

SEQ ID NO: 10227 - RNA, 20 nt, Artificial Sequence
  Synthetic oligonucleotide: FAS-1246
ucuugaaggagaauggagcu

SEQ ID NO: 10228 - RNA, 20 nt, Artificial Sequence
  Synthetic oligonucleotide: FAS-1247
ggagaauggagcucagagcg

SEQ ID NO: 10229 - RNA, 20 nt, Artificial Sequence
  Synthetic oligonucleotide: FAS-1248
ucagagcgcagagguccugc

SEQ ID NO: 10230 - RNA, 20 nt, Artificial Sequence
  Synthetic oligonucleotide: FAS-1249
gcagagguccugccugggua

SEQ ID NO: 10231 - RNA, 20 nt, Artificial Sequence
  Synthetic oligonucleotide: FAS-769
cagagguccugccuggguac

SEQ ID NO: 10232 - RNA, 20 nt, Artificial Sequence
  Synthetic oligonucleotide: FAS-1251
acaggagccuuggcuaauug

SEQ ID NO: 10233 - RNA, 20 nt, Artificial Sequence
  Synthetic oligonucleotide: FAS-771
caggagccuuggcuaauugc

SEQ ID NO: 10234 - RNA, 20 nt, Artificial Sequence
  Synthetic oligonucleotide: FAS-1253
ggcuaauugcuggagucacu

SEQ ID NO: 10235 - RNA, 20 nt, Artificial Sequence
  Synthetic oligonucleotide: FAS-1254
cuaauugcuggagucacuca

SEQ ID NO: 10236 - RNA, 20 nt, Artificial Sequence
  Synthetic oligonucleotide: FAS-1255
agucacucagagaaagacuu

SEQ ID NO: 10237 - RNA, 20 nt, Artificial Sequence
  Synthetic oligonucleotide: FAS-772
gucacucagagaaagacuug

SEQ ID NO: 10238 - RNA, 20 nt, Artificial Sequence
  Synthetic oligonucleotide: FAS-1257
aagacuugcggggcauuuga

SEQ ID NO: 10239 - RNA, 20 nt, Artificial Sequence
  Synthetic oligonucleotide: FAS-1258
guccauguuguggcugcaac

SEQ ID NO: 10240 - RNA, 20 nt, Artificial Sequence
  Synthetic oligonucleotide: FAS-1259
ccauguuguggcugcaacau

SEQ ID NO: 10241 - RNA, 20 nt, Artificial Sequence
  Synthetic oligonucleotide: FAS-1260
ugagaggcucacagacguuu

SEQ ID NO: 10242 - RNA, 20 nt, Artificial Sequence
  Synthetic oligonucleotide: FAS-779
gagaggcucacagacguuuc

SEQ ID NO: 10243 - RNA, 20 nt, Artificial Sequence
  Synthetic oligonucleotide: FAS-1262
ggcucacagacguuucugga

SEQ ID NO: 10244 - RNA, 20 nt, Artificial Sequence
  Synthetic oligonucleotide: FAS-1263
uggaauggacaguuaaccau

SEQ ID NO: 10245 - RNA, 20 nt, Artificial Sequence
  Synthetic oligonucleotide: FAS-1264
aaaguacagauguugcgcca

SEQ ID NO: 10246 - RNA, 20 nt, Artificial Sequence
  Synthetic oligonucleotide: FAS-1265
agauguugcgccauagggcu

SEQ ID NO: 10247 - RNA, 20 nt, Artificial Sequence
  Synthetic oligonucleotide: FAS-1266
uugcgccauagggcucugaa

SEQ ID NO: 10248 - RNA, 20 nt, Artificial Sequence
  Synthetic oligonucleotide: FAS-783
ugcgccauagggcucugaaa

SEQ ID NO: 10249 - RNA, 20 nt, Artificial Sequence
  Synthetic oligonucleotide: FAS-784
gcgccauagggcucugaaaa

SEQ ID NO: 10250 - RNA, 20 nt, Artificial Sequence
  Synthetic oligonucleotide: FAS-1269
gccauagggcucugaaaagg

SEQ ID NO: 10251 - RNA, 20 nt, Artificial Sequence
  Synthetic oligonucleotide: FAS-1270
ccccuuaguuuuuauuucuc

SEQ ID NO: 10252 - RNA, 20 nt, Artificial Sequence
  Synthetic oligonucleotide: FAS-1271
ccuuaguuuuuauuucucaa

SEQ ID NO: 10253 - RNA, 20 nt, Artificial Sequence
  Synthetic oligonucleotide: FAS-787
cuuaguuuuuauuucucaag

SEQ ID NO: 10254 - RNA, 17 nt, Artificial Sequence
  Synthetic oligonucleotide: FAS-1273
ccccacuuugccuaucc

SEQ ID NO: 10255 - RNA, 17 nt, Artificial Sequence
  Synthetic oligonucleotide: FAS-878
cccacuuugccuauccc

SEQ ID NO: 10256 - RNA, 17 nt, Artificial Sequence
  Synthetic oligonucleotide: FAS-1275
cuauccccgggacuaag

SEQ ID NO: 10257 - RNA, 17 nt, Artificial Sequence
  Synthetic oligonucleotide: FAS-880
uauccccgggacuaaga

SEQ ID NO: 10258 - RNA, 17 nt, Artificial Sequence
  Synthetic oligonucleotide: FAS-1277
acgggguaagccuccac

SEQ ID NO: 10259 - RNA, 17 nt, Artificial Sequence
  Synthetic oligonucleotide: FAS-1278
guaagccuccacccggg

SEQ ID NO: 10260 - RNA, 17 nt, Artificial Sequence
  Synthetic oligonucleotide: FAS-885
uaagccuccacccgggc

SEQ ID NO: 10261 - RNA, 17 nt, Artificial Sequence
  Synthetic oligonucleotide: FAS-1280
agccuccacccgggcag

SEQ ID NO: 10262 - RNA, 17 nt, Artificial Sequence
  Synthetic oligonucleotide: FAS-1281
ccuccacccgggcagga

SEQ ID NO: 10263 - RNA, 17 nt, Artificial Sequence
  Synthetic oligonucleotide: FAS-113
ggcaggagagggcucac

SEQ ID NO: 10264 - RNA, 17 nt, Artificial Sequence
  Synthetic oligonucleotide: FAS-114
agagggcucaccagagg

SEQ ID NO: 10265 - RNA, 17 nt, Artificial Sequence
  Synthetic oligonucleotide: FAS-115
gagggcucaccagaggu

SEQ ID NO: 10266 - RNA, 17 nt, Artificial Sequence
  Synthetic oligonucleotide: FAS-116
gggcucaccagagguag

SEQ ID NO: 10267 - RNA, 17 nt, Artificial Sequence
  Synthetic oligonucleotide: FAS-117
gaugcccagcaugguug

SEQ ID NO: 10268 - RNA, 17 nt, Artificial Sequence
  Synthetic oligonucleotide: FAS-1287
gguuguugagcaauccu

SEQ ID NO: 10269 - RNA, 17 nt, Artificial Sequence
  Synthetic oligonucleotide: FAS-1288
uugagcaauccuccgaa

SEQ ID NO: 10270 - RNA, 17 nt, Artificial Sequence
  Synthetic oligonucleotide: FAS-1289
gcaauccuccgaaguga

SEQ ID NO: 10271 - RNA, 17 nt, Artificial Sequence
  Synthetic oligonucleotide: FAS-1290
gcuuccccaacuccgua

SEQ ID NO: 10272 - RNA, 17 nt, Artificial Sequence
  Synthetic oligonucleotide: FAS-1291
ccccaacuccguacuga

SEQ ID NO: 10273 - RNA, 17 nt, Artificial Sequence
  Synthetic oligonucleotide: FAS-1292
agcggguccaccaaccc

SEQ ID NO: 10274 - RNA, 17 nt, Artificial Sequence
  Synthetic oligonucleotide: FAS-895
gcggguccaccaacccg

SEQ ID NO: 10275 - RNA, 17 nt, Artificial Sequence
  Synthetic oligonucleotide: FAS-896
cggguccaccaacccgc

SEQ ID NO: 10276 - RNA, 17 nt, Artificial Sequence
  Synthetic oligonucleotide: FAS-1295
gguccaccaacccgcgg

SEQ ID NO: 10277 - RNA, 17 nt, Artificial Sequence
  Synthetic oligonucleotide: FAS-1296
ccaccaacccgcgggag

SEQ ID NO: 10278 - RNA, 17 nt, Artificial Sequence
  Synthetic oligonucleotide: FAS-1297
agaagaggcagcuccgc

SEQ ID NO: 10279 - RNA, 17 nt, Artificial Sequence
  Synthetic oligonucleotide: FAS-1298
agcuccgccugggcagc

SEQ ID NO: 10280 - RNA, 17 nt, Artificial Sequence
  Synthetic oligonucleotide: FAS-1299
gcagccagggcuggccu

SEQ ID NO: 10281 - RNA, 17 nt, Artificial Sequence
  Synthetic oligonucleotide: FAS-1300
cgugccagugcccgccc

SEQ ID NO: 10282 - RNA, 17 nt, Artificial Sequence
  Synthetic oligonucleotide: FAS-1301
ccgcuucccucacuccc

SEQ ID NO: 10283 - RNA, 17 nt, Artificial Sequence
  Synthetic oligonucleotide: FAS-1302
acuccccagaagcgucu

SEQ ID NO: 10284 - RNA, 17 nt, Artificial Sequence
  Synthetic oligonucleotide: FAS-1303
cugugugucacucuugc

SEQ ID NO: 10285 - RNA, 17 nt, Artificial Sequence
  Synthetic oligonucleotide: FAS-1304
ucacucuugcgcgagau

SEQ ID NO: 10286 - RNA, 17 nt, Artificial Sequence
  Synthetic oligonucleotide: FAS-1305
cuugcgcgagaucagag

SEQ ID NO: 10287 - RNA, 17 nt, Artificial Sequence
  Synthetic oligonucleotide: FAS-1306
agaucagagacgagcuc

SEQ ID NO: 10288 - RNA, 17 nt, Artificial Sequence
  Synthetic oligonucleotide: FAS-1307
cgaaaagccccgguggu

SEQ ID NO: 10289 - RNA, 17 nt, Artificial Sequence
  Synthetic oligonucleotide: FAS-908
gaaaagccccggugguc

SEQ ID NO: 10290 - RNA, 17 nt, Artificial Sequence
  Synthetic oligonucleotide: FAS-1309
aaagccccgguggucag

SEQ ID NO: 10291 - RNA, 17 nt, Artificial Sequence
  Synthetic oligonucleotide: FAS-1310
ccccgguggucaggagg

SEQ ID NO: 10292 - RNA, 17 nt, Artificial Sequence
  Synthetic oligonucleotide: FAS-910
cccgguggucaggagga

SEQ ID NO: 10293 - RNA, 17 nt, Artificial Sequence
  Synthetic oligonucleotide: FAS-911
ccgguggucaggaggau

SEQ ID NO: 10294 - RNA, 17 nt, Artificial Sequence
  Synthetic oligonucleotide: FAS-1313
guggucaggaggauggg

SEQ ID NO: 10295 - RNA, 17 nt, Artificial Sequence
  Synthetic oligonucleotide: FAS-912
uggucaggaggauggga

SEQ ID NO: 10296 - RNA, 17 nt, Artificial Sequence
  Synthetic oligonucleotide: FAS-1315
augggaaggaagccucg

SEQ ID NO: 10297 - RNA, 17 nt, Artificial Sequence
  Synthetic oligonucleotide: FAS-913
ugggaaggaagccucgc

SEQ ID NO: 10298 - RNA, 17 nt, Artificial Sequence
  Synthetic oligonucleotide: FAS-914
gggaaggaagccucgcu

SEQ ID NO: 10299 - RNA, 17 nt, Artificial Sequence
  Synthetic oligonucleotide: FAS-915
ggaaggaagccucgcug

SEQ ID NO: 10300 - RNA, 17 nt, Artificial Sequence
  Synthetic oligonucleotide: FAS-1319
gccucgcuggggaacgc

SEQ ID NO: 10301 - RNA, 17 nt, Artificial Sequence
  Synthetic oligonucleotide: FAS-1320
gcuggggaacgcccggg

SEQ ID NO: 10302 - RNA, 17 nt, Artificial Sequence
  Synthetic oligonucleotide: FAS-918
cuggggaacgcccgggu

SEQ ID NO: 10303 - RNA, 17 nt, Artificial Sequence
  Synthetic oligonucleotide: FAS-919
uggggaacgcccggguu

SEQ ID NO: 10304 - RNA, 17 nt, Artificial Sequence
  Synthetic oligonucleotide: FAS-920
ggggaacgcccggguug

SEQ ID NO: 10305 - RNA, 17 nt, Artificial Sequence
  Synthetic oligonucleotide: FAS-1324
ggaacgcccggguuggg

SEQ ID NO: 10306 - RNA, 17 nt, Artificial Sequence
  Synthetic oligonucleotide: FAS-1325
agcaacuuggccugcgc

SEQ ID NO: 10307 - RNA, 17 nt, Artificial Sequence
  Synthetic oligonucleotide: FAS-1326
cuuggccugcgcgcggg

SEQ ID NO: 10308 - RNA, 17 nt, Artificial Sequence
  Synthetic oligonucleotide: FAS-926
uuggccugcgcgcgggu

SEQ ID NO: 10309 - RNA, 17 nt, Artificial Sequence
  Synthetic oligonucleotide: FAS-927
uggccugcgcgcgggua

SEQ ID NO: 10310 - RNA, 17 nt, Artificial Sequence
  Synthetic oligonucleotide: FAS-1329
gccugcgcgcggguagg

SEQ ID NO: 10311 - RNA, 17 nt, Artificial Sequence
  Synthetic oligonucleotide: FAS-928
ccugcgcgcggguaggg

SEQ ID NO: 10312 - RNA, 17 nt, Artificial Sequence
  Synthetic oligonucleotide: FAS-929
cugcgcgcggguaggga

SEQ ID NO: 10313 - RNA, 17 nt, Artificial Sequence
  Synthetic oligonucleotide: FAS-930
ugcgcgcggguagggag

SEQ ID NO: 10314 - RNA, 17 nt, Artificial Sequence
  Synthetic oligonucleotide: FAS-931
gcgcgcggguagggagg

SEQ ID NO: 10315 - RNA, 17 nt, Artificial Sequence
  Synthetic oligonucleotide: FAS-1334
gcgcggguagggagggg

SEQ ID NO: 10316 - RNA, 17 nt, Artificial Sequence
  Synthetic oligonucleotide: FAS-1335
uagggagggggagaagu

SEQ ID NO: 10317 - RNA, 17 nt, Artificial Sequence
  Synthetic oligonucleotide: FAS-1336
gagggggagaagucagg

SEQ ID NO: 10318 - RNA, 17 nt, Artificial Sequence
  Synthetic oligonucleotide: FAS-1337
gggggagaagucagggu

SEQ ID NO: 10319 - RNA, 17 nt, Artificial Sequence
  Synthetic oligonucleotide: FAS-934
ggggagaagucagggug

SEQ ID NO: 10320 - RNA, 17 nt, Artificial Sequence
  Synthetic oligonucleotide: FAS-1339
gagaagucagggugagg

SEQ ID NO: 10321 - RNA, 17 nt, Artificial Sequence
  Synthetic oligonucleotide: FAS-935
agaagucagggugagga

SEQ ID NO: 10322 - RNA, 17 nt, Artificial Sequence
  Synthetic oligonucleotide: FAS-1341
cagggugaggaaggagu

SEQ ID NO: 10323 - RNA, 17 nt, Artificial Sequence
  Synthetic oligonucleotide: FAS-1342
caggguucguugcacaa

SEQ ID NO: 10324 - RNA, 17 nt, Artificial Sequence
  Synthetic oligonucleotide: FAS-1343
aaaugggcauuccuguc

SEQ ID NO: 10325 - RNA, 17 nt, Artificial Sequence
  Synthetic oligonucleotide: FAS-940
aaugggcauuccugucc

SEQ ID NO: 10326 - RNA, 17 nt, Artificial Sequence
  Synthetic oligonucleotide: FAS-1345
uggcaugcucacuucag

SEQ ID NO: 10327 - RNA, 17 nt, Artificial Sequence
  Synthetic oligonucleotide: FAS-1346
gcaugcucacuucaggu

SEQ ID NO: 10328 - RNA, 17 nt, Artificial Sequence
  Synthetic oligonucleotide: FAS-1347
cacuucaggugaggacc

SEQ ID NO: 10329 - RNA, 17 nt, Artificial Sequence
  Synthetic oligonucleotide: FAS-1348
cuucaggugaggaccuc

SEQ ID NO: 10330 - RNA, 17 nt, Artificial Sequence
  Synthetic oligonucleotide: FAS-1349
uucugcuguaguucaac

SEQ ID NO: 10331 - RNA, 17 nt, Artificial Sequence
  Synthetic oligonucleotide: FAS-949
ucugcuguaguucaacc

SEQ ID NO: 10332 - RNA, 17 nt, Artificial Sequence
  Synthetic oligonucleotide: FAS-950
cugcuguaguucaaccu

SEQ ID NO: 10333 - RNA, 17 nt, Artificial Sequence
  Synthetic oligonucleotide: FAS-1352
uaguucaaccugggaag

SEQ ID NO: 10334 - RNA, 17 nt, Artificial Sequence
  Synthetic oligonucleotide: FAS-951
aguucaaccugggaagu

SEQ ID NO: 10335 - RNA, 17 nt, Artificial Sequence
  Synthetic oligonucleotide: FAS-952
guucaaccugggaaguu

SEQ ID NO: 10336 - RNA, 17 nt, Artificial Sequence
  Synthetic oligonucleotide: FAS-953
uucaaccugggaaguug

SEQ ID NO: 10337 - RNA, 17 nt, Artificial Sequence
  Synthetic oligonucleotide: FAS-1356
gggaaguuggggagguc

SEQ ID NO: 10338 - RNA, 17 nt, Artificial Sequence
  Synthetic oligonucleotide: FAS-1357
aaguuggggaggucuug

SEQ ID NO: 10339 - RNA, 17 nt, Artificial Sequence
  Synthetic oligonucleotide: FAS-955
aguuggggaggucuuga

SEQ ID NO: 10340 - RNA, 17 nt, Artificial Sequence
  Synthetic oligonucleotide: FAS-1359
uuggggaggucuugaag

SEQ ID NO: 10341 - RNA, 17 nt, Artificial Sequence
  Synthetic oligonucleotide: FAS-1360
ggaggucuugaaggaga

SEQ ID NO: 10342 - RNA, 17 nt, Artificial Sequence
  Synthetic oligonucleotide: FAS-956
gaggucuugaaggagaa

SEQ ID NO: 10343 - RNA, 17 nt, Artificial Sequence
  Synthetic oligonucleotide: FAS-1362
ugaaggagaauggagcu

SEQ ID NO: 10344 - RNA, 17 nt, Artificial Sequence
  Synthetic oligonucleotide: FAS-1363
gaauggagcucagagcg

SEQ ID NO: 10345 - RNA, 17 nt, Artificial Sequence
  Synthetic oligonucleotide: FAS-1364
gagcgcagagguccugc

SEQ ID NO: 10346 - RNA, 17 nt, Artificial Sequence
  Synthetic oligonucleotide: FAS-1365
gagguccugccugggua

SEQ ID NO: 10347 - RNA, 17 nt, Artificial Sequence
  Synthetic oligonucleotide: FAS-960
agguccugccuggguac

SEQ ID NO: 10348 - RNA, 17 nt, Artificial Sequence
  Synthetic oligonucleotide: FAS-1367
ggagccuuggcuaauug

SEQ ID NO: 10349 - RNA, 17 nt, Artificial Sequence
  Synthetic oligonucleotide: FAS-962
gagccuuggcuaauugc

SEQ ID NO: 10350 - RNA, 17 nt, Artificial Sequence
  Synthetic oligonucleotide: FAS-1369
uaauugcuggagucacu

SEQ ID NO: 10351 - RNA, 17 nt, Artificial Sequence
  Synthetic oligonucleotide: FAS-1370
auugcuggagucacuca

SEQ ID NO: 10352 - RNA, 17 nt, Artificial Sequence
  Synthetic oligonucleotide: FAS-1371
cacucagagaaagacuu

SEQ ID NO: 10353 - RNA, 17 nt, Artificial Sequence
  Synthetic oligonucleotide: FAS-963
acucagagaaagacuug

SEQ ID NO: 10354 - RNA, 17 nt, Artificial Sequence
  Synthetic oligonucleotide: FAS-1373
acuugcggggcauuuga

SEQ ID NO: 10355 - RNA, 17 nt, Artificial Sequence
  Synthetic oligonucleotide: FAS-1374
cauguuguggcugcaac

SEQ ID NO: 10356 - RNA, 17 nt, Artificial Sequence
  Synthetic oligonucleotide: FAS-1375
uguuguggcugcaacau

SEQ ID NO: 10357 - RNA, 17 nt, Artificial Sequence
  Synthetic oligonucleotide: FAS-1376
gaggcucacagacguuu

SEQ ID NO: 10358 - RNA, 17 nt, Artificial Sequence
  Synthetic oligonucleotide: FAS-970
aggcucacagacguuuc

SEQ ID NO: 10359 - RNA, 17 nt, Artificial Sequence
  Synthetic oligonucleotide: FAS-1378
ucacagacguuucugga

SEQ ID NO: 10360 - RNA, 17 nt, Artificial Sequence
  Synthetic oligonucleotide: FAS-1379
aauggacaguuaaccau

SEQ ID NO: 10361 - RNA, 17 nt, Artificial Sequence
  Synthetic oligonucleotide: FAS-1380
guacagauguugcgcca

SEQ ID NO: 10362 - RNA, 17 nt, Artificial Sequence
  Synthetic oligonucleotide: FAS-1381
uguugcgccauagggcu

SEQ ID NO: 10363 - RNA, 17 nt, Artificial Sequence
  Synthetic oligonucleotide: FAS-1382
cgccauagggcucugaa

SEQ ID NO: 10364 - RNA, 17 nt, Artificial Sequence
  Synthetic oligonucleotide: FAS-974
gccauagggcucugaaa

SEQ ID NO: 10365 - RNA, 17 nt, Artificial Sequence
  Synthetic oligonucleotide: FAS-975
ccauagggcucugaaaa

SEQ ID NO: 10366 - RNA, 17 nt, Artificial Sequence
  Synthetic oligonucleotide: FAS-1385
auagggcucugaaaagg

SEQ ID NO: 10367 - RNA, 17 nt, Artificial Sequence
  Synthetic oligonucleotide: FAS-1386
cuuaguuuuuauuucuc

SEQ ID NO: 10368 - RNA, 17 nt, Artificial Sequence
  Synthetic oligonucleotide: FAS-1387
uaguuuuuauuucucaa

SEQ ID NO: 10369 - RNA, 17 nt, Artificial Sequence
  Synthetic oligonucleotide: FAS-978
aguuuuuauuucucaag

SEQ ID NO: 10370 - RNA, 20 nt, Artificial Sequence
  Synthetic oligonucleotide: FAS-1389
gcagugacagaugcaaaaca

SEQ ID NO: 10371 - RNA, 20 nt, Artificial Sequence
  Synthetic oligonucleotide: FAS-1390
cagaugcaaaacacagggug

SEQ ID NO: 10372 - RNA, 20 nt, Artificial Sequence
  Synthetic oligonucleotide: FAS-1783
agaugcaaaacacaggguga

SEQ ID NO: 10373 - RNA, 20 nt, Artificial Sequence
  Synthetic oligonucleotide: FAS-1392
acagggugauggaaagcccu

SEQ ID NO: 10374 - RNA, 20 nt, Artificial Sequence
  Synthetic oligonucleotide: FAS-1784
cagggugauggaaagcccuc

SEQ ID NO: 10375 - RNA, 20 nt, Artificial Sequence
  Synthetic oligonucleotide: FAS-1394
gggugauggaaagcccucag

SEQ ID NO: 10376 - RNA, 20 nt, Artificial Sequence
  Synthetic oligonucleotide: FAS-1395
gaggguaaccuaaccuagau

SEQ ID NO: 10377 - RNA, 20 nt, Artificial Sequence
  Synthetic oligonucleotide: FAS-1396
ggguaaccuaaccuagauuu

SEQ ID NO: 10378 - RNA, 20 nt, Artificial Sequence
  Synthetic oligonucleotide: FAS-1397
uugagggcccaaacaggcuc

SEQ ID NO: 10379 - RNA, 20 nt, Artificial Sequence
  Synthetic oligonucleotide: FAS-1398
agggcccaaacaggcuccag

SEQ ID NO: 10380 - RNA, 20 nt, Artificial Sequence
  Synthetic oligonucleotide: FAS-1399
gcuccagaagaaaaugucaa

SEQ ID NO: 10381 - RNA, 20 nt, Artificial Sequence
  Synthetic oligonucleotide: FAS-1400
uccagaagaaaaugucaacu

SEQ ID NO: 10382 - RNA, 20 nt, Artificial Sequence
  Synthetic oligonucleotide: FAS-1401
cagaagaaaaugucaacuga

SEQ ID NO: 10383 - RNA, 20 nt, Artificial Sequence
  Synthetic oligonucleotide: FAS-1790
agaagaaaaugucaacugag

SEQ ID NO: 10384 - RNA, 20 nt, Artificial Sequence
  Synthetic oligonucleotide: FAS-1403
aaugucaacugagaggaagc

SEQ ID NO: 10385 - RNA, 20 nt, Artificial Sequence
  Synthetic oligonucleotide: FAS-1404
gucaacugagaggaagccug

SEQ ID NO: 10386 - RNA, 20 nt, Artificial Sequence
  Synthetic oligonucleotide: FAS-1405
acugagaggaagccugaagg

SEQ ID NO: 10387 - RNA, 20 nt, Artificial Sequence
  Synthetic oligonucleotide: FAS-1406
ggaagccugaaggaugaaca

SEQ ID NO: 10388 - RNA, 20 nt, Artificial Sequence
  Synthetic oligonucleotide: FAS-1407
gaugaacagugggcuaagca

SEQ ID NO: 10389 - RNA, 20 nt, Artificial Sequence
  Synthetic oligonucleotide: FAS-1408
ggguuauuaauguguuauua

SEQ ID NO: 10390 - RNA, 20 nt, Artificial Sequence
  Synthetic oligonucleotide: FAS-1409
auuaauguguuauuaauggg

SEQ ID NO: 10391 - RNA, 20 nt, Artificial Sequence
  Synthetic oligonucleotide: FAS-1410
uauuaauggguugaaucuaa

SEQ ID NO: 10392 - RNA, 20 nt, Artificial Sequence
  Synthetic oligonucleotide: FAS-1798
auuaauggguugaaucuaau

SEQ ID NO: 10393 - RNA, 20 nt, Artificial Sequence
  Synthetic oligonucleotide: FAS-1799
uuaauggguugaaucuaauu

SEQ ID NO: 10394 - RNA, 20 nt, Artificial Sequence
  Synthetic oligonucleotide: FAS-1413
auggguugaaucuaauuggg

SEQ ID NO: 10395 - RNA, 20 nt, Artificial Sequence
  Synthetic oligonucleotide: FAS-1800
uggguugaaucuaauuggga

SEQ ID NO: 10396 - RNA, 20 nt, Artificial Sequence
  Synthetic oligonucleotide: FAS-1801
ggguugaaucuaauugggaa

SEQ ID NO: 10397 - RNA, 20 nt, Artificial Sequence
  Synthetic oligonucleotide: FAS-1416
guugaaucuaauugggaagg

SEQ ID NO: 10398 - RNA, 20 nt, Artificial Sequence
  Synthetic oligonucleotide: FAS-1417
ugaaucuaauugggaaggga

SEQ ID NO: 10399 - RNA, 20 nt, Artificial Sequence
  Synthetic oligonucleotide: FAS-1418
uugggaagggagagagguug

SEQ ID NO: 10400 - RNA, 20 nt, Artificial Sequence
  Synthetic oligonucleotide: FAS-1419
gaagggagagagguugcaga

SEQ ID NO: 10401 - RNA, 20 nt, Artificial Sequence
  Synthetic oligonucleotide: FAS-1420
agagguugcagagugaggug

SEQ ID NO: 10402 - RNA, 20 nt, Artificial Sequence
  Synthetic oligonucleotide: FAS-1421
agagugaggugcagagcuug

SEQ ID NO: 10403 - RNA, 20 nt, Artificial Sequence
  Synthetic oligonucleotide: FAS-1422
gagcuugguggacgaugcca

SEQ ID NO: 10404 - RNA, 20 nt, Artificial Sequence
  Synthetic oligonucleotide: FAS-1806
agcuugguggacgaugccaa

SEQ ID NO: 10405 - RNA, 20 nt, Artificial Sequence
  Synthetic oligonucleotide: FAS-1424
uggacgaugccaaaggaaua

SEQ ID NO: 10406 - RNA, 20 nt, Artificial Sequence
  Synthetic oligonucleotide: FAS-1425
aaaccuuuaguguguccagu

SEQ ID NO: 10407 - RNA, 20 nt, Artificial Sequence
  Synthetic oligonucleotide: FAS-1807
aaccuuuaguguguccaguc

SEQ ID NO: 10408 - RNA, 20 nt, Artificial Sequence
  Synthetic oligonucleotide: FAS-1427
aaauucaugcuaaacuaccu

SEQ ID NO: 10409 - RNA, 20 nt, Artificial Sequence
  Synthetic oligonucleotide: FAS-1428
guuccaaagcaauagugacu

SEQ ID NO: 10410 - RNA, 20 nt, Artificial Sequence
  Synthetic oligonucleotide: FAS-1429
ugacuuugaacaguguucac

SEQ ID NO: 10411 - RNA, 20 nt, Artificial Sequence
  Synthetic oligonucleotide: FAS-1430
ugaacaguguucaccagagc

SEQ ID NO: 10412 - RNA, 20 nt, Artificial Sequence
  Synthetic oligonucleotide: FAS-1431
caguguucaccagagcacga

SEQ ID NO: 10413 - RNA, 20 nt, Artificial Sequence
  Synthetic oligonucleotide: FAS-1432
aauuacaagauuuuuuuuua

SEQ ID NO: 10414 - RNA, 20 nt, Artificial Sequence
  Synthetic oligonucleotide: FAS-1433
uuuuuuuaaagaaaauuggc

SEQ ID NO: 10415 - RNA, 20 nt, Artificial Sequence
  Synthetic oligonucleotide: FAS-1810
uuuuuuaaagaaaauuggcc

SEQ ID NO: 10416 - RNA, 20 nt, Artificial Sequence
  Synthetic oligonucleotide: FAS-1435
agaaaauuggccaggaaaua

SEQ ID NO: 10417 - RNA, 20 nt, Artificial Sequence
  Synthetic oligonucleotide: FAS-1436
uggccaggaaauaaugagua

SEQ ID NO: 10418 - RNA, 20 nt, Artificial Sequence
  Synthetic oligonucleotide: FAS-1437
ccaggaaauaaugaguaacg

SEQ ID NO: 10419 - RNA, 20 nt, Artificial Sequence
  Synthetic oligonucleotide: FAS-1438
aaauaaugaguaacgaagga

SEQ ID NO: 10420 - RNA, 20 nt, Artificial Sequence
  Synthetic oligonucleotide: FAS-1812
aauaaugaguaacgaaggac

SEQ ID NO: 10421 - RNA, 20 nt, Artificial Sequence
  Synthetic oligonucleotide: FAS-979
acgaaggacaggaaguaauu

SEQ ID NO: 10422 - RNA, 17 nt, Artificial Sequence
  Synthetic oligonucleotide: FAS-1441
gugacagaugcaaaaca

SEQ ID NO: 10423 - RNA, 17 nt, Artificial Sequence
  Synthetic oligonucleotide: FAS-1442
augcaaaacacagggug

SEQ ID NO: 10424 - RNA, 17 nt, Artificial Sequence
  Synthetic oligonucleotide: FAS-1817
ugcaaaacacaggguga

SEQ ID NO: 10425 - RNA, 17 nt, Artificial Sequence
  Synthetic oligonucleotide: FAS-1444
gggugauggaaagcccu

SEQ ID NO: 10426 - RNA, 17 nt, Artificial Sequence
  Synthetic oligonucleotide: FAS-1818
ggugauggaaagcccuc

SEQ ID NO: 10427 - RNA, 17 nt, Artificial Sequence
  Synthetic oligonucleotide: FAS-1446
ugauggaaagcccucag

SEQ ID NO: 10428 - RNA, 17 nt, Artificial Sequence
  Synthetic oligonucleotide: FAS-1447
gguaaccuaaccuagau

SEQ ID NO: 10429 - RNA, 17 nt, Artificial Sequence
  Synthetic oligonucleotide: FAS-1448
uaaccuaaccuagauuu

SEQ ID NO: 10430 - RNA, 17 nt, Artificial Sequence
  Synthetic oligonucleotide: FAS-1449
agggcccaaacaggcuc

SEQ ID NO: 10431 - RNA, 17 nt, Artificial Sequence
  Synthetic oligonucleotide: FAS-1450
gcccaaacaggcuccag

SEQ ID NO: 10432 - RNA, 17 nt, Artificial Sequence
  Synthetic oligonucleotide: FAS-1451
ccagaagaaaaugucaa

SEQ ID NO: 10433 - RNA, 17 nt, Artificial Sequence
  Synthetic oligonucleotide: FAS-1452
agaagaaaaugucaacu

SEQ ID NO: 10434 - RNA, 17 nt, Artificial Sequence
  Synthetic oligonucleotide: FAS-1453
aagaaaaugucaacuga

SEQ ID NO: 10435 - RNA, 17 nt, Artificial Sequence
  Synthetic oligonucleotide: FAS-1824
agaaaaugucaacugag

SEQ ID NO: 10436 - RNA, 17 nt, Artificial Sequence
  Synthetic oligonucleotide: FAS-1455
gucaacugagaggaagc

SEQ ID NO: 10437 - RNA, 17 nt, Artificial Sequence
  Synthetic oligonucleotide: FAS-1456
aacugagaggaagccug

SEQ ID NO: 10438 - RNA, 17 nt, Artificial Sequence
  Synthetic oligonucleotide: FAS-1457
gagaggaagccugaagg

SEQ ID NO: 10439 - RNA, 17 nt, Artificial Sequence
  Synthetic oligonucleotide: FAS-1458
agccugaaggaugaaca

SEQ ID NO: 10440 - RNA, 17 nt, Artificial Sequence
  Synthetic oligonucleotide: FAS-1459
gaacagugggcuaagca

SEQ ID NO: 10441 - RNA, 17 nt, Artificial Sequence
  Synthetic oligonucleotide: FAS-1460
uuauuaauguguuauua

SEQ ID NO: 10442 - RNA, 17 nt, Artificial Sequence
  Synthetic oligonucleotide: FAS-1461
aauguguuauuaauggg

SEQ ID NO: 10443 - RNA, 17 nt, Artificial Sequence
  Synthetic oligonucleotide: FAS-1462
uaauggguugaaucuaa

SEQ ID NO: 10444 - RNA, 17 nt, Artificial Sequence
  Synthetic oligonucleotide: FAS-1832
aauggguugaaucuaau

SEQ ID NO: 10445 - RNA, 17 nt, Artificial Sequence
  Synthetic oligonucleotide: FAS-1833
auggguugaaucuaauu

SEQ ID NO: 10446 - RNA, 17 nt, Artificial Sequence
  Synthetic oligonucleotide: FAS-1465
gguugaaucuaauuggg

SEQ ID NO: 10447 - RNA, 17 nt, Artificial Sequence
  Synthetic oligonucleotide: FAS-1834
guugaaucuaauuggga

SEQ ID NO: 10448 - RNA, 17 nt, Artificial Sequence
  Synthetic oligonucleotide: FAS-1835
uugaaucuaauugggaa

SEQ ID NO: 10449 - RNA, 17 nt, Artificial Sequence
  Synthetic oligonucleotide: FAS-1468
gaaucuaauugggaagg

SEQ ID NO: 10450 - RNA, 17 nt, Artificial Sequence
  Synthetic oligonucleotide: FAS-1469
aucuaauugggaaggga

SEQ ID NO: 10451 - RNA, 17 nt, Artificial Sequence
  Synthetic oligonucleotide: FAS-1470
ggaagggagagagguug

SEQ ID NO: 10452 - RNA, 17 nt, Artificial Sequence
  Synthetic oligonucleotide: FAS-1471
gggagagagguugcaga

SEQ ID NO: 10453 - RNA, 17 nt, Artificial Sequence
  Synthetic oligonucleotide: FAS-1472
gguugcagagugaggug

SEQ ID NO: 10454 - RNA, 17 nt, Artificial Sequence
  Synthetic oligonucleotide: FAS-1473
gugaggugcagagcuug

SEQ ID NO: 10455 - RNA, 17 nt, Artificial Sequence
  Synthetic oligonucleotide: FAS-1474
cuugguggacgaugcca

SEQ ID NO: 10456 - RNA, 17 nt, Artificial Sequence
  Synthetic oligonucleotide: FAS-1840
uugguggacgaugccaa

SEQ ID NO: 10457 - RNA, 17 nt, Artificial Sequence
  Synthetic oligonucleotide: FAS-1476
acgaugccaaaggaaua

SEQ ID NO: 10458 - RNA, 17 nt, Artificial Sequence
  Synthetic oligonucleotide: FAS-1477
ccuuuaguguguccagu

SEQ ID NO: 10459 - RNA, 17 nt, Artificial Sequence
  Synthetic oligonucleotide: FAS-1841
cuuuaguguguccaguc

SEQ ID NO: 10460 - RNA, 17 nt, Artificial Sequence
  Synthetic oligonucleotide: FAS-1479
uucaugcuaaacuaccu

SEQ ID NO: 10461 - RNA, 17 nt, Artificial Sequence
  Synthetic oligonucleotide: FAS-1480
ccaaagcaauagugacu

SEQ ID NO: 10462 - RNA, 17 nt, Artificial Sequence
  Synthetic oligonucleotide: FAS-1481
cuuugaacaguguucac

SEQ ID NO: 10463 - RNA, 17 nt, Artificial Sequence
  Synthetic oligonucleotide: FAS-1482
acaguguucaccagagc

SEQ ID NO: 10464 - RNA, 17 nt, Artificial Sequence
  Synthetic oligonucleotide: FAS-1483
uguucaccagagcacga

SEQ ID NO: 10465 - RNA, 17 nt, Artificial Sequence
  Synthetic oligonucleotide: FAS-1484
uacaagauuuuuuuuua

SEQ ID NO: 10466 - RNA, 17 nt, Artificial Sequence
  Synthetic oligonucleotide: FAS-1485
uuuuaaagaaaauuggc

SEQ ID NO: 10467 - RNA, 17 nt, Artificial Sequence
  Synthetic oligonucleotide: FAS-1844
uuuaaagaaaauuggcc

SEQ ID NO: 10468 - RNA, 17 nt, Artificial Sequence
  Synthetic oligonucleotide: FAS-1487
aaauuggccaggaaaua

SEQ ID NO: 10469 - RNA, 17 nt, Artificial Sequence
  Synthetic oligonucleotide: FAS-1488
ccaggaaauaaugagua

SEQ ID NO: 10470 - RNA, 17 nt, Artificial Sequence
  Synthetic oligonucleotide: FAS-1489
ggaaauaaugaguaacg

SEQ ID NO: 10471 - RNA, 17 nt, Artificial Sequence
  Synthetic oligonucleotide: FAS-1490
uaaugaguaacgaagga

SEQ ID NO: 10472 - RNA, 17 nt, Artificial Sequence
  Synthetic oligonucleotide: FAS-1846
aaugaguaacgaaggac

SEQ ID NO: 10473 - RNA, 17 nt, Artificial Sequence
  Synthetic oligonucleotide: FAS-1068
aaggacaggaaguaauu

SEQ ID NO: 10474 - RNA, 20 nt, Artificial Sequence
  Synthetic oligonucleotide: FAS-1493
uguaauucuuucgugcucug

SEQ ID NO: 10475 - RNA, 20 nt, Artificial Sequence
  Synthetic oligonucleotide: FAS-1494
uguucaaagucacuauugcu

SEQ ID NO: 10476 - RNA, 20 nt, Artificial Sequence
  Synthetic oligonucleotide: FAS-1849
guucaaagucacuauugcuu

SEQ ID NO: 10477 - RNA, 20 nt, Artificial Sequence
  Synthetic oligonucleotide: FAS-1496
uagcucuuagguaguuuagc

SEQ ID NO: 10478 - RNA, 20 nt, Artificial Sequence
  Synthetic oligonucleotide: FAS-1497
guaguuuagcaugaauuuua

SEQ ID NO: 10479 - RNA, 20 nt, Artificial Sequence
  Synthetic oligonucleotide: FAS-1498
gaauuuuacagaagguaugu

SEQ ID NO: 10480 - RNA, 20 nt, Artificial Sequence
  Synthetic oligonucleotide: FAS-1499
uuuggauaaugacaucauua

SEQ ID NO: 10481 - RNA, 20 nt, Artificial Sequence
  Synthetic oligonucleotide: FAS-1500
uaaugacaucauuacugaac

SEQ ID NO: 10482 - RNA, 20 nt, Artificial Sequence
  Synthetic oligonucleotide: FAS-1501
caucauuacugaaccugaau

SEQ ID NO: 10483 - RNA, 20 nt, Artificial Sequence
  Synthetic oligonucleotide: FAS-1502
aauuuggaugcaguuccaga

SEQ ID NO: 10484 - RNA, 20 nt, Artificial Sequence
  Synthetic oligonucleotide: FAS-1503
cucucaguugacauuuucuu

SEQ ID NO: 10485 - RNA, 20 nt, Artificial Sequence
  Synthetic oligonucleotide: FAS-1859
ucucaguugacauuuucuuc

SEQ ID NO: 10486 - RNA, 20 nt, Artificial Sequence
  Synthetic oligonucleotide: FAS-1505
cauuuucuucuggagccugu

SEQ ID NO: 10487 - RNA, 20 nt, Artificial Sequence
  Synthetic oligonucleotide: FAS-1506
aucuagguuagguuacccuc

SEQ ID NO: 10488 - RNA, 20 nt, Artificial Sequence
  Synthetic oligonucleotide: FAS-1507
cuagguuagguuacccuccu

SEQ ID NO: 10489 - RNA, 17 nt, Artificial Sequence
  Synthetic oligonucleotide: FAS-1508
aauucuuucgugcucug

SEQ ID NO: 10490 - RNA, 17 nt, Artificial Sequence
  Synthetic oligonucleotide: FAS-1509
ucaaagucacuauugcu

SEQ ID NO: 10491 - RNA, 17 nt, Artificial Sequence
  Synthetic oligonucleotide: FAS-1870
caaagucacuauugcuu

SEQ ID NO: 10492 - RNA, 17 nt, Artificial Sequence
  Synthetic oligonucleotide: FAS-1511
cucuuagguaguuuagc

SEQ ID NO: 10493 - RNA, 17 nt, Artificial Sequence
  Synthetic oligonucleotide: FAS-1512
guuuagcaugaauuuua

SEQ ID NO: 10494 - RNA, 17 nt, Artificial Sequence
  Synthetic oligonucleotide: FAS-1513
uuuuacagaagguaugu

SEQ ID NO: 10495 - RNA, 17 nt, Artificial Sequence
  Synthetic oligonucleotide: FAS-1514
ggauaaugacaucauua

SEQ ID NO: 10496 - RNA, 17 nt, Artificial Sequence
  Synthetic oligonucleotide: FAS-1515
ugacaucauuacugaac

SEQ ID NO: 10497 - RNA, 17 nt, Artificial Sequence
  Synthetic oligonucleotide: FAS-1516
cauuacugaaccugaau

SEQ ID NO: 10498 - RNA, 17 nt, Artificial Sequence
  Synthetic oligonucleotide: FAS-1517
uuggaugcaguuccaga

SEQ ID NO: 10499 - RNA, 17 nt, Artificial Sequence
  Synthetic oligonucleotide: FAS-1518
ucaguugacauuuucuu

SEQ ID NO: 10500 - RNA, 17 nt, Artificial Sequence
  Synthetic oligonucleotide: FAS-1880
caguugacauuuucuuc

SEQ ID NO: 10501 - RNA, 17 nt, Artificial Sequence
  Synthetic oligonucleotide: FAS-1520
uuucuucuggagccugu

SEQ ID NO: 10502 - RNA, 17 nt, Artificial Sequence
  Synthetic oligonucleotide: FAS-1521
uagguuagguuacccuc

SEQ ID NO: 10503 - RNA, 17 nt, Artificial Sequence
  Synthetic oligonucleotide: FAS-1522
gguuagguuacccuccu

SEQ ID NO: 10504 - RNA, 20 nt, Artificial Sequence
  Synthetic oligonucleotide: FAS-1065
gcagcggcgcacgcgggcac

SEQ ID NO: 10505 - RNA, 20 nt, Artificial Sequence
  Synthetic oligonucleotide: FAS-685
cagcggcgcacgcgggcacc

SEQ ID NO: 10506 - RNA, 20 nt, Artificial Sequence
  Synthetic oligonucleotide: FAS-686
agcggcgcacgcgggcaccu

SEQ ID NO: 10507 - RNA, 20 nt, Artificial Sequence
  Synthetic oligonucleotide: FAS-1526
cacgcgggcaccugggagcg

SEQ ID NO: 10508 - RNA, 20 nt, Artificial Sequence
  Synthetic oligonucleotide: FAS-1527
ccugggagcggcgggcugcu

SEQ ID NO: 10509 - RNA, 20 nt, Artificial Sequence
  Synthetic oligonucleotide: FAS-1894
cugggagcggcgggcugcug

SEQ ID NO: 10510 - RNA, 20 nt, Artificial Sequence
  Synthetic oligonucleotide: FAS-1895
ugggagcggcgggcugcugc

SEQ ID NO: 10511 - RNA, 20 nt, Artificial Sequence
  Synthetic oligonucleotide: FAS-1530
gcgggcugcugcgggaggcg

SEQ ID NO: 10512 - RNA, 20 nt, Artificial Sequence
  Synthetic oligonucleotide: FAS-1897
cgggcugcugcgggaggcgu

SEQ ID NO: 10513 - RNA, 20 nt, Artificial Sequence
  Synthetic oligonucleotide: FAS-1532
gaggcguuggagacuggcuc

SEQ ID NO: 10514 - RNA, 20 nt, Artificial Sequence
  Synthetic oligonucleotide: FAS-1899
aggcguuggagacuggcucc

SEQ ID NO: 10515 - RNA, 20 nt, Artificial Sequence
  Synthetic oligonucleotide: FAS-1900
ggcguuggagacuggcuccc

SEQ ID NO: 10516 - RNA, 20 nt, Artificial Sequence
  Synthetic oligonucleotide: FAS-1535
gacuggcucccgggggcugu

SEQ ID NO: 10517 - RNA, 20 nt, Artificial Sequence
  Synthetic oligonucleotide: FAS-1536
guuaggaccuucccucaggc

SEQ ID NO: 10518 - RNA, 20 nt, Artificial Sequence
  Synthetic oligonucleotide: FAS-1537
uucccucaggcccgggugcu

SEQ ID NO: 10519 - RNA, 20 nt, Artificial Sequence
  Synthetic oligonucleotide: FAS-1538
aggcccgggugcucagaacg

SEQ ID NO: 10520 - RNA, 20 nt, Artificial Sequence
  Synthetic oligonucleotide: FAS-1907
ggcccgggugcucagaacgc

SEQ ID NO: 10521 - RNA, 20 nt, Artificial Sequence
  Synthetic oligonucleotide: FAS-1540
cccgggugcucagaacgcug

SEQ ID NO: 10522 - RNA, 20 nt, Artificial Sequence
  Synthetic oligonucleotide: FAS-1541
cgcuggaggacuugcuuuuc

SEQ ID NO: 10523 - RNA, 20 nt, Artificial Sequence
  Synthetic oligonucleotide: FAS-1542
ugcuuuucuugggccuugau

SEQ ID NO: 10524 - RNA, 20 nt, Artificial Sequence
  Synthetic oligonucleotide: FAS-1543
gaugcgaagugcugaccccg

SEQ ID NO: 10525 - RNA, 20 nt, Artificial Sequence
  Synthetic oligonucleotide: FAS-1544
gugcugaccccgcugggcag

SEQ ID NO: 10526 - RNA, 20 nt, Artificial Sequence
  Synthetic oligonucleotide: FAS-1914
ugcugaccccgcugggcagg

SEQ ID NO: 10527 - RNA, 20 nt, Artificial Sequence
  Synthetic oligonucleotide: FAS-1546
cggggcagcuccggcgcucc

SEQ ID NO: 10528 - RNA, 20 nt, Artificial Sequence
  Synthetic oligonucleotide: FAS-1918
ggggcagcuccggcgcuccu

SEQ ID NO: 10529 - RNA, 20 nt, Artificial Sequence
  Synthetic oligonucleotide: FAS-1548
ggagaccacugcgcuccacg

SEQ ID NO: 10530 - RNA, 20 nt, Artificial Sequence
  Synthetic oligonucleotide: FAS-1549
ccacugcgcuccacguugag

SEQ ID NO: 10531 - RNA, 20 nt, Artificial Sequence
  Synthetic oligonucleotide: FAS-1550
cgcuccacguugaggugggc

SEQ ID NO: 10532 - RNA, 20 nt, Artificial Sequence
  Synthetic oligonucleotide: FAS-1922
gcuccacguugaggugggcg

SEQ ID NO: 10533 - RNA, 20 nt, Artificial Sequence
  Synthetic oligonucleotide: FAS-1552
cguugaggugggcguggggu

SEQ ID NO: 10534 - RNA, 20 nt, Artificial Sequence
  Synthetic oligonucleotide: FAS-1553
aggugggcguggggugcgga

SEQ ID NO: 10535 - RNA, 20 nt, Artificial Sequence
  Synthetic oligonucleotide: FAS-1926
ggugggcguggggugcggac

SEQ ID NO: 10536 - RNA, 20 nt, Artificial Sequence
  Synthetic oligonucleotide: FAS-1555
gcguggggugcggacaggaa

SEQ ID NO: 10537 - RNA, 20 nt, Artificial Sequence
  Synthetic oligonucleotide: FAS-1556
gggugcggacaggaauugaa

SEQ ID NO: 10538 - RNA, 20 nt, Artificial Sequence
  Synthetic oligonucleotide: FAS-1927
ggugcggacaggaauugaag

SEQ ID NO: 10539 - RNA, 20 nt, Artificial Sequence
  Synthetic oligonucleotide: FAS-1558
acaggaauugaagcggaagu

SEQ ID NO: 10540 - RNA, 20 nt, Artificial Sequence
  Synthetic oligonucleotide: FAS-1928
caggaauugaagcggaaguc

SEQ ID NO: 10541 - RNA, 20 nt, Artificial Sequence
  Synthetic oligonucleotide: FAS-1929
aggaauugaagcggaagucu

SEQ ID NO: 10542 - RNA, 20 nt, Artificial Sequence
  Synthetic oligonucleotide: FAS-1561
agcggaagucugggaagcuu

SEQ ID NO: 10543 - RNA, 20 nt, Artificial Sequence
  Synthetic oligonucleotide: FAS-1562
ucugggaagcuuuagggucg

SEQ ID NO: 10544 - RNA, 20 nt, Artificial Sequence
  Synthetic oligonucleotide: FAS-1932
cugggaagcuuuagggucgc

SEQ ID NO: 10545 - RNA, 20 nt, Artificial Sequence
  Synthetic oligonucleotide: FAS-1564
gggaagcuuuagggucgcug

SEQ ID NO: 10546 - RNA, 20 nt, Artificial Sequence
  Synthetic oligonucleotide: FAS-1933
ggaagcuuuagggucgcugg

SEQ ID NO: 10547 - RNA, 20 nt, Artificial Sequence
  Synthetic oligonucleotide: FAS-1934
gaagcuuuagggucgcugga

SEQ ID NO: 10548 - RNA, 20 nt, Artificial Sequence
  Synthetic oligonucleotide: FAS-1935
aagcuuuagggucgcuggag

SEQ ID NO: 10549 - RNA, 20 nt, Artificial Sequence
  Synthetic oligonucleotide: FAS-1568
ucgcuggagggggaccccgg

SEQ ID NO: 10550 - RNA, 20 nt, Artificial Sequence
  Synthetic oligonucleotide: FAS-1938
cgcuggagggggaccccggu

SEQ ID NO: 10551 - RNA, 20 nt, Artificial Sequence
  Synthetic oligonucleotide: FAS-1570
cuggagggggaccccgguug

SEQ ID NO: 10552 - RNA, 20 nt, Artificial Sequence
  Synthetic oligonucleotide: FAS-1571
ggagggggaccccgguugga

SEQ ID NO: 10553 - RNA, 20 nt, Artificial Sequence
  Synthetic oligonucleotide: FAS-1572
agggggaccccgguuggaga

SEQ ID NO: 10554 - RNA, 20 nt, Artificial Sequence
  Synthetic oligonucleotide: FAS-1939
gggggaccccgguuggagag

SEQ ID NO: 10555 - RNA, 20 nt, Artificial Sequence
  Synthetic oligonucleotide: FAS-1574
gaccccgguuggagagagga

SEQ ID NO: 10556 - RNA, 20 nt, Artificial Sequence
  Synthetic oligonucleotide: FAS-1940
accccgguuggagagaggag

SEQ ID NO: 10557 - RNA, 20 nt, Artificial Sequence
  Synthetic oligonucleotide: FAS-1576
uggagagaggagcggaacuc

SEQ ID NO: 10558 - RNA, 20 nt, Artificial Sequence
  Synthetic oligonucleotide: FAS-1577
agccaaagguccgcuccggc

SEQ ID NO: 10559 - RNA, 20 nt, Artificial Sequence
  Synthetic oligonucleotide: FAS-1578
aaagguccgcuccggcgcgg

SEQ ID NO: 10560 - RNA, 20 nt, Artificial Sequence
  Synthetic oligonucleotide: FAS-1579
guccgcuccggcgcgggugg

SEQ ID NO: 10561 - RNA, 20 nt, Artificial Sequence
  Synthetic oligonucleotide: FAS-1580
gggugagugcgcgccgcccc

SEQ ID NO: 10562 - RNA, 20 nt, Artificial Sequence
  Synthetic oligonucleotide: FAS-1948
ggugagugcgcgccgccccg

SEQ ID NO: 10563 - RNA, 20 nt, Artificial Sequence
  Synthetic oligonucleotide: FAS-1949
gugagugcgcgccgccccgc

SEQ ID NO: 10564 - RNA, 20 nt, Artificial Sequence
  Synthetic oligonucleotide: FAS-1583
gugcgcgccgccccgcgggg

SEQ ID NO: 10565 - RNA, 20 nt, Artificial Sequence
  Synthetic oligonucleotide: FAS-1952
ugcgcgccgccccgcggggg

SEQ ID NO: 10566 - RNA, 20 nt, Artificial Sequence
  Synthetic oligonucleotide: FAS-1953
gcgcgccgccccgcgggggc

SEQ ID NO: 10567 - RNA, 20 nt, Artificial Sequence
  Synthetic oligonucleotide: FAS-1954
cgcgccgccccgcgggggcg

SEQ ID NO: 10568 - RNA, 20 nt, Artificial Sequence
  Synthetic oligonucleotide: FAS-1587
cgccgccccgcgggggcggg

SEQ ID NO: 10569 - RNA, 20 nt, Artificial Sequence
  Synthetic oligonucleotide: FAS-1588
ccgccccgcgggggcgggga

SEQ ID NO: 10570 - RNA, 20 nt, Artificial Sequence
  Synthetic oligonucleotide: FAS-1589
gggagagagccugcagccuu

SEQ ID NO: 10571 - RNA, 20 nt, Artificial Sequence
  Synthetic oligonucleotide: FAS-1590
uuucuggcaguucucagacg

SEQ ID NO: 10572 - RNA, 20 nt, Artificial Sequence
  Synthetic oligonucleotide: FAS-1956
uucuggcaguucucagacgu

SEQ ID NO: 10573 - RNA, 20 nt, Artificial Sequence
  Synthetic oligonucleotide: FAS-1592
acguaggaaauaagucagca

SEQ ID NO: 10574 - RNA, 20 nt, Artificial Sequence
  Synthetic oligonucleotide: FAS-1593
gcaccgaagcagugguuaag

SEQ ID NO: 10575 - RNA, 20 nt, Artificial Sequence
  Synthetic oligonucleotide: FAS-1958
caccgaagcagugguuaagc

SEQ ID NO: 10576 - RNA, 20 nt, Artificial Sequence
  Synthetic oligonucleotide: FAS-1595
ccgaagcagugguuaagccg

SEQ ID NO: 10577 - RNA, 20 nt, Artificial Sequence
  Synthetic oligonucleotide: FAS-1596
cagugguuaagccggagggc

SEQ ID NO: 10578 - RNA, 20 nt, Artificial Sequence
  Synthetic oligonucleotide: FAS-1961
agugguuaagccggagggcu

SEQ ID NO: 10579 - RNA, 20 nt, Artificial Sequence
  Synthetic oligonucleotide: FAS-1598
gguuaagccggagggcucgg

SEQ ID NO: 10580 - RNA, 20 nt, Artificial Sequence
  Synthetic oligonucleotide: FAS-1599
agaacggcaccuuuucuuuc

SEQ ID NO: 10581 - RNA, 20 nt, Artificial Sequence
  Synthetic oligonucleotide: FAS-1600
uucuuucucgaaaaaguuau

SEQ ID NO: 10582 - RNA, 20 nt, Artificial Sequence
  Synthetic oligonucleotide: FAS-1963
ucuuucucgaaaaaguuaua

SEQ ID NO: 10583 - RNA, 20 nt, Artificial Sequence
  Synthetic oligonucleotide: FAS-1964
cuuucucgaaaaaguuauau

SEQ ID NO: 10584 - RNA, 20 nt, Artificial Sequence
  Synthetic oligonucleotide: FAS-1965
uuucucgaaaaaguuauaug

SEQ ID NO: 10585 - RNA, 20 nt, Artificial Sequence
  Synthetic oligonucleotide: FAS-1966
uucucgaaaaaguuauaugg

SEQ ID NO: 10586 - RNA, 20 nt, Artificial Sequence
  Synthetic oligonucleotide: FAS-1967
ucucgaaaaaguuauauggg

SEQ ID NO: 10587 - RNA, 20 nt, Artificial Sequence
  Synthetic oligonucleotide: FAS-1968
cucgaaaaaguuauaugggg

SEQ ID NO: 10588 - RNA, 20 nt, Artificial Sequence
  Synthetic oligonucleotide: FAS-1969
ucgaaaaaguuauauggggg

SEQ ID NO: 10589 - RNA, 17 nt, Artificial Sequence
  Synthetic oligonucleotide: FAS-1154
gcggcgcacgcgggcac

SEQ ID NO: 10590 - RNA, 17 nt, Artificial Sequence
  Synthetic oligonucleotide: FAS-876
cggcgcacgcgggcacc

SEQ ID NO: 10591 - RNA, 17 nt, Artificial Sequence
  Synthetic oligonucleotide: FAS-877
ggcgcacgcgggcaccu

SEQ ID NO: 10592 - RNA, 17 nt, Artificial Sequence
  Synthetic oligonucleotide: FAS-1611
gcgggcaccugggagcg

SEQ ID NO: 10593 - RNA, 17 nt, Artificial Sequence
  Synthetic oligonucleotide: FAS-1612
gggagcggcgggcugcu

SEQ ID NO: 10594 - RNA, 17 nt, Artificial Sequence
  Synthetic oligonucleotide: FAS-1975
ggagcggcgggcugcug

SEQ ID NO: 10595 - RNA, 17 nt, Artificial Sequence
  Synthetic oligonucleotide: FAS-1976
gagcggcgggcugcugc

SEQ ID NO: 10596 - RNA, 17 nt, Artificial Sequence
  Synthetic oligonucleotide: FAS-1615
ggcugcugcgggaggcg

SEQ ID NO: 10597 - RNA, 17 nt, Artificial Sequence
  Synthetic oligonucleotide: FAS-1978
gcugcugcgggaggcgu

SEQ ID NO: 10598 - RNA, 17 nt, Artificial Sequence
  Synthetic oligonucleotide: FAS-1617
gcguuggagacuggcuc

SEQ ID NO: 10599 - RNA, 17 nt, Artificial Sequence
  Synthetic oligonucleotide: FAS-1980
cguuggagacuggcucc

SEQ ID NO: 10600 - RNA, 17 nt, Artificial Sequence
  Synthetic oligonucleotide: FAS-1981
guuggagacuggcuccc

SEQ ID NO: 10601 - RNA, 17 nt, Artificial Sequence
  Synthetic oligonucleotide: FAS-1620
uggcucccgggggcugu

SEQ ID NO: 10602 - RNA, 17 nt, Artificial Sequence
  Synthetic oligonucleotide: FAS-1621
aggaccuucccucaggc

SEQ ID NO: 10603 - RNA, 17 nt, Artificial Sequence
  Synthetic oligonucleotide: FAS-1622
ccucaggcccgggugcu

SEQ ID NO: 10604 - RNA, 17 nt, Artificial Sequence
  Synthetic oligonucleotide: FAS-1623
cccgggugcucagaacg

SEQ ID NO: 10605 - RNA, 17 nt, Artificial Sequence
  Synthetic oligonucleotide: FAS-1988
ccgggugcucagaacgc

SEQ ID NO: 10606 - RNA, 17 nt, Artificial Sequence
  Synthetic oligonucleotide: FAS-1625
gggugcucagaacgcug

SEQ ID NO: 10607 - RNA, 17 nt, Artificial Sequence
  Synthetic oligonucleotide: FAS-1626
uggaggacuugcuuuuc

SEQ ID NO: 10608 - RNA, 17 nt, Artificial Sequence
  Synthetic oligonucleotide: FAS-1627
uuuucuugggccuugau

SEQ ID NO: 10609 - RNA, 17 nt, Artificial Sequence
  Synthetic oligonucleotide: FAS-1628
gcgaagugcugaccccg

SEQ ID NO: 10610 - RNA, 17 nt, Artificial Sequence
  Synthetic oligonucleotide: FAS-1629
cugaccccgcugggcag

SEQ ID NO: 10611 - RNA, 17 nt, Artificial Sequence
  Synthetic oligonucleotide: FAS-1995
ugaccccgcugggcagg

SEQ ID NO: 10612 - RNA, 17 nt, Artificial Sequence
  Synthetic oligonucleotide: FAS-1631
ggcagcuccggcgcucc

SEQ ID NO: 10613 - RNA, 17 nt, Artificial Sequence
  Synthetic oligonucleotide: FAS-1999
gcagcuccggcgcuccu

SEQ ID NO: 10614 - RNA, 17 nt, Artificial Sequence
  Synthetic oligonucleotide: FAS-1633
gaccacugcgcuccacg

SEQ ID NO: 10615 - RNA, 17 nt, Artificial Sequence
  Synthetic oligonucleotide: FAS-1634
cugcgcuccacguugag

SEQ ID NO: 10616 - RNA, 17 nt, Artificial Sequence
  Synthetic oligonucleotide: FAS-1635
uccacguugaggugggc

SEQ ID NO: 10617 - RNA, 17 nt, Artificial Sequence
  Synthetic oligonucleotide: FAS-2003
ccacguugaggugggcg

SEQ ID NO: 10618 - RNA, 17 nt, Artificial Sequence
  Synthetic oligonucleotide: FAS-1637
ugaggugggcguggggu

SEQ ID NO: 10619 - RNA, 17 nt, Artificial Sequence
  Synthetic oligonucleotide: FAS-1638
ugggcguggggugcgga

SEQ ID NO: 10620 - RNA, 17 nt, Artificial Sequence
  Synthetic oligonucleotide: FAS-2007
gggcguggggugcggac

SEQ ID NO: 10621 - RNA, 17 nt, Artificial Sequence
  Synthetic oligonucleotide: FAS-1640
uggggugcggacaggaa

SEQ ID NO: 10622 - RNA, 17 nt, Artificial Sequence
  Synthetic oligonucleotide: FAS-1641
ugcggacaggaauugaa

SEQ ID NO: 10623 - RNA, 17 nt, Artificial Sequence
  Synthetic oligonucleotide: FAS-2008
gcggacaggaauugaag

SEQ ID NO: 10624 - RNA, 17 nt, Artificial Sequence
  Synthetic oligonucleotide: FAS-1643
ggaauugaagcggaagu

SEQ ID NO: 10625 - RNA, 17 nt, Artificial Sequence
  Synthetic oligonucleotide: FAS-2009
gaauugaagcggaaguc

SEQ ID NO: 10626 - RNA, 17 nt, Artificial Sequence
  Synthetic oligonucleotide: FAS-2010
aauugaagcggaagucu

SEQ ID NO: 10627 - RNA, 17 nt, Artificial Sequence
  Synthetic oligonucleotide: FAS-1646
ggaagucugggaagcuu

SEQ ID NO: 10628 - RNA, 17 nt, Artificial Sequence
  Synthetic oligonucleotide: FAS-1647
gggaagcuuuagggucg

SEQ ID NO: 10629 - RNA, 17 nt, Artificial Sequence
  Synthetic oligonucleotide: FAS-2013
ggaagcuuuagggucgc

SEQ ID NO: 10630 - RNA, 17 nt, Artificial Sequence
  Synthetic oligonucleotide: FAS-1649
aagcuuuagggucgcug

SEQ ID NO: 10631 - RNA, 17 nt, Artificial Sequence
  Synthetic oligonucleotide: FAS-2014
agcuuuagggucgcugg

SEQ ID NO: 10632 - RNA, 17 nt, Artificial Sequence
  Synthetic oligonucleotide: FAS-2015
gcuuuagggucgcugga

SEQ ID NO: 10633 - RNA, 17 nt, Artificial Sequence
  Synthetic oligonucleotide: FAS-2016
cuuuagggucgcuggag

SEQ ID NO: 10634 - RNA, 17 nt, Artificial Sequence
  Synthetic oligonucleotide: FAS-1653
cuggagggggaccccgg

SEQ ID NO: 10635 - RNA, 17 nt, Artificial Sequence
  Synthetic oligonucleotide: FAS-2019
uggagggggaccccggu

SEQ ID NO: 10636 - RNA, 17 nt, Artificial Sequence
  Synthetic oligonucleotide: FAS-1655
gagggggaccccgguug

SEQ ID NO: 10637 - RNA, 17 nt, Artificial Sequence
  Synthetic oligonucleotide: FAS-1656
gggggaccccgguugga

SEQ ID NO: 10638 - RNA, 17 nt, Artificial Sequence
  Synthetic oligonucleotide: FAS-1657
gggaccccgguuggaga

SEQ ID NO: 10639 - RNA, 17 nt, Artificial Sequence
  Synthetic oligonucleotide: FAS-2020
ggaccccgguuggagag

SEQ ID NO: 10640 - RNA, 17 nt, Artificial Sequence
  Synthetic oligonucleotide: FAS-1659
cccgguuggagagagga

SEQ ID NO: 10641 - RNA, 17 nt, Artificial Sequence
  Synthetic oligonucleotide: FAS-2021
ccgguuggagagaggag

SEQ ID NO: 10642 - RNA, 17 nt, Artificial Sequence
  Synthetic oligonucleotide: FAS-1661
agagaggagcggaacuc

SEQ ID NO: 10643 - RNA, 17 nt, Artificial Sequence
  Synthetic oligonucleotide: FAS-1662
caaagguccgcuccggc

SEQ ID NO: 10644 - RNA, 17 nt, Artificial Sequence
  Synthetic oligonucleotide: FAS-1663
gguccgcuccggcgcgg

SEQ ID NO: 10645 - RNA, 17 nt, Artificial Sequence
  Synthetic oligonucleotide: FAS-1664
cgcuccggcgcgggugg

SEQ ID NO: 10646 - RNA, 17 nt, Artificial Sequence
  Synthetic oligonucleotide: FAS-1665
ugagugcgcgccgcccc

SEQ ID NO: 10647 - RNA, 17 nt, Artificial Sequence
  Synthetic oligonucleotide: FAS-2029
gagugcgcgccgccccg

SEQ ID NO: 10648 - RNA, 17 nt, Artificial Sequence
  Synthetic oligonucleotide: FAS-2030
agugcgcgccgccccgc

SEQ ID NO: 10649 - RNA, 17 nt, Artificial Sequence
  Synthetic oligonucleotide: FAS-1668
cgcgccgccccgcgggg

SEQ ID NO: 10650 - RNA, 17 nt, Artificial Sequence
  Synthetic oligonucleotide: FAS-2033
gcgccgccccgcggggg

SEQ ID NO: 10651 - RNA, 17 nt, Artificial Sequence
  Synthetic oligonucleotide: FAS-2034
cgccgccccgcgggggc

SEQ ID NO: 10652 - RNA, 17 nt, Artificial Sequence
  Synthetic oligonucleotide: FAS-2035
gccgccccgcgggggcg

SEQ ID NO: 10653 - RNA, 17 nt, Artificial Sequence
  Synthetic oligonucleotide: FAS-1672
cgccccgcgggggcggg

SEQ ID NO: 10654 - RNA, 17 nt, Artificial Sequence
  Synthetic oligonucleotide: FAS-1673
ccccgcgggggcgggga

SEQ ID NO: 10655 - RNA, 17 nt, Artificial Sequence
  Synthetic oligonucleotide: FAS-1674
agagagccugcagccuu

SEQ ID NO: 10656 - RNA, 17 nt, Artificial Sequence
  Synthetic oligonucleotide: FAS-1675
cuggcaguucucagacg

SEQ ID NO: 10657 - RNA, 17 nt, Artificial Sequence
  Synthetic oligonucleotide: FAS-2037
uggcaguucucagacgu

SEQ ID NO: 10658 - RNA, 17 nt, Artificial Sequence
  Synthetic oligonucleotide: FAS-1677
uaggaaauaagucagca

SEQ ID NO: 10659 - RNA, 17 nt, Artificial Sequence
  Synthetic oligonucleotide: FAS-1678
ccgaagcagugguuaag

SEQ ID NO: 10660 - RNA, 17 nt, Artificial Sequence
  Synthetic oligonucleotide: FAS-2039
cgaagcagugguuaagc

SEQ ID NO: 10661 - RNA, 17 nt, Artificial Sequence
  Synthetic oligonucleotide: FAS-1680
aagcagugguuaagccg

SEQ ID NO: 10662 - RNA, 17 nt, Artificial Sequence
  Synthetic oligonucleotide: FAS-1681
ugguuaagccggagggc

SEQ ID NO: 10663 - RNA, 17 nt, Artificial Sequence
  Synthetic oligonucleotide: FAS-2042
gguuaagccggagggcu

SEQ ID NO: 10664 - RNA, 17 nt, Artificial Sequence
  Synthetic oligonucleotide: FAS-1683
uaagccggagggcucgg

SEQ ID NO: 10665 - RNA, 17 nt, Artificial Sequence
  Synthetic oligonucleotide: FAS-1684
acggcaccuuuucuuuc

SEQ ID NO: 10666 - RNA, 17 nt, Artificial Sequence
  Synthetic oligonucleotide: FAS-1685
uuucucgaaaaaguuau

SEQ ID NO: 10667 - RNA, 17 nt, Artificial Sequence
  Synthetic oligonucleotide: FAS-2044
uucucgaaaaaguuaua

SEQ ID NO: 10668 - RNA, 17 nt, Artificial Sequence
  Synthetic oligonucleotide: FAS-2045
ucucgaaaaaguuauau

SEQ ID NO: 10669 - RNA, 17 nt, Artificial Sequence
  Synthetic oligonucleotide: FAS-2046
cucgaaaaaguuauaug

SEQ ID NO: 10670 - RNA, 17 nt, Artificial Sequence
  Synthetic oligonucleotide: FAS-2047
ucgaaaaaguuauaugg

SEQ ID NO: 10671 - RNA, 17 nt, Artificial Sequence
  Synthetic oligonucleotide: FAS-2048
cgaaaaaguuauauggg

SEQ ID NO: 10672 - RNA, 17 nt, Artificial Sequence
  Synthetic oligonucleotide: FAS-2049
gaaaaaguuauaugggg

SEQ ID NO: 10673 - RNA, 17 nt, Artificial Sequence
  Synthetic oligonucleotide: FAS-2050
aaaaaguuauauggggg

SEQ ID NO: 10674 - RNA, 20 nt, Artificial Sequence
  Synthetic oligonucleotide: FAS-1693
cccauauaacuuuuucgaga

SEQ ID NO: 10675 - RNA, 20 nt, Artificial Sequence
  Synthetic oligonucleotide: FAS-1694
aaagaaaaggugccguucuu

SEQ ID NO: 10676 - RNA, 20 nt, Artificial Sequence
  Synthetic oligonucleotide: FAS-1695
ugcugacuuauuuccuacgu

SEQ ID NO: 10677 - RNA, 20 nt, Artificial Sequence
  Synthetic oligonucleotide: FAS-1696
cugacuuauuuccuacgucu

SEQ ID NO: 10678 - RNA, 20 nt, Artificial Sequence
  Synthetic oligonucleotide: FAS-1697
uuccuacgucugagaacugc

SEQ ID NO: 10679 - RNA, 20 nt, Artificial Sequence
  Synthetic oligonucleotide: FAS-1698
cgucugagaacugccagaaa

SEQ ID NO: 10680 - RNA, 20 nt, Artificial Sequence
  Synthetic oligonucleotide: FAS-1699
gaaaaugagcaauaucuguu

SEQ ID NO: 10681 - RNA, 20 nt, Artificial Sequence
  Synthetic oligonucleotide: FAS-1700
caggcucucuccccgccccc

SEQ ID NO: 10682 - RNA, 20 nt, Artificial Sequence
  Synthetic oligonucleotide: FAS-2056
aggcucucuccccgcccccg

SEQ ID NO: 10683 - RNA, 20 nt, Artificial Sequence
  Synthetic oligonucleotide: FAS-1702
cgcgcacucacccacccgcg

SEQ ID NO: 10684 - RNA, 20 nt, Artificial Sequence
  Synthetic oligonucleotide: FAS-2060
gcgcacucacccacccgcgc

SEQ ID NO: 10685 - RNA, 20 nt, Artificial Sequence
  Synthetic oligonucleotide: FAS-1704
acucacccacccgcgccgga

SEQ ID NO: 10686 - RNA, 20 nt, Artificial Sequence
  Synthetic oligonucleotide: FAS-1705
ggaccuuuggcuuggcuugu

SEQ ID NO: 10687 - RNA, 20 nt, Artificial Sequence
  Synthetic oligonucleotide: FAS-1706
uuggcuugucagggcuuguc

SEQ ID NO: 10688 - RNA, 20 nt, Artificial Sequence
  Synthetic oligonucleotide: FAS-2066
uggcuugucagggcuugucc

SEQ ID NO: 10689 - RNA, 20 nt, Artificial Sequence
  Synthetic oligonucleotide: FAS-1708
aguuccgcuccucucuccaa

SEQ ID NO: 10690 - RNA, 20 nt, Artificial Sequence
  Synthetic oligonucleotide: FAS-2067
guuccgcuccucucuccaac

SEQ ID NO: 10691 - RNA, 20 nt, Artificial Sequence
  Synthetic oligonucleotide: FAS-1710
caccccacgcccaccucaac

SEQ ID NO: 10692 - RNA, 20 nt, Artificial Sequence
  Synthetic oligonucleotide: FAS-2070
accccacgcccaccucaacg

SEQ ID NO: 10693 - RNA, 20 nt, Artificial Sequence
  Synthetic oligonucleotide: FAS-1712
aacguggagcgcaguggucu

SEQ ID NO: 10694 - RNA, 20 nt, Artificial Sequence
  Synthetic oligonucleotide: FAS-1713
cguggagcgcaguggucucc

SEQ ID NO: 10695 - RNA, 20 nt, Artificial Sequence
  Synthetic oligonucleotide: FAS-2072
guggagcgcaguggucuccg

SEQ ID NO: 10696 - RNA, 20 nt, Artificial Sequence
  Synthetic oligonucleotide: FAS-1715
gcaguggucuccgaggagcg

SEQ ID NO: 10697 - RNA, 20 nt, Artificial Sequence
  Synthetic oligonucleotide: FAS-2073
caguggucuccgaggagcgc

SEQ ID NO: 10698 - RNA, 20 nt, Artificial Sequence
  Synthetic oligonucleotide: FAS-1717
ggagcugccccgccugccca

SEQ ID NO: 10699 - RNA, 20 nt, Artificial Sequence
  Synthetic oligonucleotide: FAS-2074
gagcugccccgccugcccag

SEQ ID NO: 10700 - RNA, 20 nt, Artificial Sequence
  Synthetic oligonucleotide: FAS-1719
agcacuucgcaucaaggccc

SEQ ID NO: 10701 - RNA, 20 nt, Artificial Sequence
  Synthetic oligonucleotide: FAS-1720
aaagcaaguccuccagcguu

SEQ ID NO: 10702 - RNA, 20 nt, Artificial Sequence
  Synthetic oligonucleotide: FAS-1721
uccuccagcguucugagcac

SEQ ID NO: 10703 - RNA, 20 nt, Artificial Sequence
  Synthetic oligonucleotide: FAS-1722
agcguucugagcacccgggc

SEQ ID NO: 10704 - RNA, 20 nt, Artificial Sequence
  Synthetic oligonucleotide: FAS-1723
cguucugagcacccgggccu

SEQ ID NO: 10705 - RNA, 20 nt, Artificial Sequence
  Synthetic oligonucleotide: FAS-2080
guucugagcacccgggccug

SEQ ID NO: 10706 - RNA, 20 nt, Artificial Sequence
  Synthetic oligonucleotide: FAS-2081
uucugagcacccgggccuga

SEQ ID NO: 10707 - RNA, 20 nt, Artificial Sequence
  Synthetic oligonucleotide: FAS-1726
agggaagguccuaacagccc

SEQ ID NO: 10708 - RNA, 20 nt, Artificial Sequence
  Synthetic oligonucleotide: FAS-2083
gggaagguccuaacagcccc

SEQ ID NO: 10709 - RNA, 20 nt, Artificial Sequence
  Synthetic oligonucleotide: FAS-2084
ggaagguccuaacagccccc

SEQ ID NO: 10710 - RNA, 17 nt, Artificial Sequence
  Synthetic oligonucleotide: FAS-1729
auauaacuuuuucgaga

SEQ ID NO: 10711 - RNA, 17 nt, Artificial Sequence
  Synthetic oligonucleotide: FAS-1730
gaaaaggugccguucuu

SEQ ID NO: 10712 - RNA, 17 nt, Artificial Sequence
  Synthetic oligonucleotide: FAS-1731
ugacuuauuuccuacgu

SEQ ID NO: 10713 - RNA, 17 nt, Artificial Sequence
  Synthetic oligonucleotide: FAS-1732
acuuauuuccuacgucu

SEQ ID NO: 10714 - RNA, 17 nt, Artificial Sequence
  Synthetic oligonucleotide: FAS-1733
cuacgucugagaacugc

SEQ ID NO: 10715 - RNA, 17 nt, Artificial Sequence
  Synthetic oligonucleotide: FAS-1734
cugagaacugccagaaa

SEQ ID NO: 10716 - RNA, 17 nt, Artificial Sequence
  Synthetic oligonucleotide: FAS-1735
aaugagcaauaucuguu

SEQ ID NO: 10717 - RNA, 17 nt, Artificial Sequence
  Synthetic oligonucleotide: FAS-1736
gcucucuccccgccccc

SEQ ID NO: 10718 - RNA, 17 nt, Artificial Sequence
  Synthetic oligonucleotide: FAS-2091
cucucuccccgcccccg

SEQ ID NO: 10719 - RNA, 17 nt, Artificial Sequence
  Synthetic oligonucleotide: FAS-1738
gcacucacccacccgcg

SEQ ID NO: 10720 - RNA, 17 nt, Artificial Sequence
  Synthetic oligonucleotide: FAS-2095
cacucacccacccgcgc

SEQ ID NO: 10721 - RNA, 17 nt, Artificial Sequence
  Synthetic oligonucleotide: FAS-1740
cacccacccgcgccgga

SEQ ID NO: 10722 - RNA, 17 nt, Artificial Sequence
  Synthetic oligonucleotide: FAS-1741
ccuuuggcuuggcuugu

SEQ ID NO: 10723 - RNA, 17 nt, Artificial Sequence
  Synthetic oligonucleotide: FAS-1742
gcuugucagggcuuguc

SEQ ID NO: 10724 - RNA, 17 nt, Artificial Sequence
  Synthetic oligonucleotide: FAS-2101
cuugucagggcuugucc

SEQ ID NO: 10725 - RNA, 17 nt, Artificial Sequence
  Synthetic oligonucleotide: FAS-1744
uccgcuccucucuccaa

SEQ ID NO: 10726 - RNA, 17 nt, Artificial Sequence
  Synthetic oligonucleotide: FAS-2102
ccgcuccucucuccaac

SEQ ID NO: 10727 - RNA, 17 nt, Artificial Sequence
  Synthetic oligonucleotide: FAS-1746
cccacgcccaccucaac

SEQ ID NO: 10728 - RNA, 17 nt, Artificial Sequence
  Synthetic oligonucleotide: FAS-2105
ccacgcccaccucaacg

SEQ ID NO: 10729 - RNA, 17 nt, Artificial Sequence
  Synthetic oligonucleotide: FAS-1748
guggagcgcaguggucu

SEQ ID NO: 10730 - RNA, 17 nt, Artificial Sequence
  Synthetic oligonucleotide: FAS-1749
ggagcgcaguggucucc

SEQ ID NO: 10731 - RNA, 17 nt, Artificial Sequence
  Synthetic oligonucleotide: FAS-2107
gagcgcaguggucuccg

SEQ ID NO: 10732 - RNA, 17 nt, Artificial Sequence
  Synthetic oligonucleotide: FAS-1751
guggucuccgaggagcg

SEQ ID NO: 10733 - RNA, 17 nt, Artificial Sequence
  Synthetic oligonucleotide: FAS-2108
uggucuccgaggagcgc

SEQ ID NO: 10734 - RNA, 17 nt, Artificial Sequence
  Synthetic oligonucleotide: FAS-1753
gcugccccgccugccca

SEQ ID NO: 10735 - RNA, 17 nt, Artificial Sequence
  Synthetic oligonucleotide: FAS-2109
cugccccgccugcccag

SEQ ID NO: 10736 - RNA, 17 nt, Artificial Sequence
  Synthetic oligonucleotide: FAS-1755
acuucgcaucaaggccc

SEQ ID NO: 10737 - RNA, 17 nt, Artificial Sequence
  Synthetic oligonucleotide: FAS-1756
gcaaguccuccagcguu

SEQ ID NO: 10738 - RNA, 17 nt, Artificial Sequence
  Synthetic oligonucleotide: FAS-1757
uccagcguucugagcac

SEQ ID NO: 10739 - RNA, 17 nt, Artificial Sequence
  Synthetic oligonucleotide: FAS-1758
guucugagcacccgggc

SEQ ID NO: 10740 - RNA, 17 nt, Artificial Sequence
  Synthetic oligonucleotide: FAS-1759
ucugagcacccgggccu

SEQ ID NO: 10741 - RNA, 17 nt, Artificial Sequence
  Synthetic oligonucleotide: FAS-2115
cugagcacccgggccug

SEQ ID NO: 10742 - RNA, 17 nt, Artificial Sequence
  Synthetic oligonucleotide: FAS-2116
ugagcacccgggccuga

SEQ ID NO: 10743 - RNA, 17 nt, Artificial Sequence
  Synthetic oligonucleotide: FAS-1762
gaagguccuaacagccc

SEQ ID NO: 10744 - RNA, 17 nt, Artificial Sequence
  Synthetic oligonucleotide: FAS-2118
aagguccuaacagcccc

SEQ ID NO: 10745 - RNA, 17 nt, Artificial Sequence
  Synthetic oligonucleotide: FAS-2119
agguccuaacagccccc

SEQ ID NO: 10746 - RNA, 20 nt, Artificial Sequence
  Synthetic oligonucleotide: FAS-1765
uguuuaauauagcuggggcu

SEQ ID NO: 10747 - RNA, 20 nt, Artificial Sequence
  Synthetic oligonucleotide: FAS-1766
uggggaagcucuuucacuuc

SEQ ID NO: 10748 - RNA, 20 nt, Artificial Sequence
  Synthetic oligonucleotide: FAS-1062
ggggcgggcgcgggacgcgu

SEQ ID NO: 10749 - RNA, 17 nt, Artificial Sequence
  Synthetic oligonucleotide: FAS-1768
uuaauauagcuggggcu

SEQ ID NO: 10750 - RNA, 17 nt, Artificial Sequence
  Synthetic oligonucleotide: FAS-1769
ggaagcucuuucacuuc

SEQ ID NO: 10751 - RNA, 17 nt, Artificial Sequence
  Synthetic oligonucleotide: FAS-1151
gcgggcgcgggacgcgu

SEQ ID NO: 10752 - RNA, 20 nt, Artificial Sequence
  Synthetic oligonucleotide: FAS-1771
gcccggguuggggagggcuc

SEQ ID NO: 10753 - RNA, 17 nt, Artificial Sequence
  Synthetic oligonucleotide: FAS-1772
cggguuggggagggcuc

SEQ ID NO: 10754 - RNA, 20 nt, Artificial Sequence
  Synthetic oligonucleotide: FAS-1773
cccucaggaggguaaccuaa

SEQ ID NO: 10755 - RNA, 20 nt, Artificial Sequence
  Synthetic oligonucleotide: FAS-1774
caccagagcacgaaagaauu

SEQ ID NO: 10756 - RNA, 17 nt, Artificial Sequence
  Synthetic oligonucleotide: FAS-1775
ucaggaggguaaccuaa

SEQ ID NO: 10757 - RNA, 17 nt, Artificial Sequence
  Synthetic oligonucleotide: FAS-1776
cagagcacgaaagaauu

SEQ ID NO: 10758 - RNA, 20 nt, Artificial Sequence
  Synthetic oligonucleotide: FAS-1777
gcaaccucucucccuuccca

SEQ ID NO: 10759 - RNA, 17 nt, Artificial Sequence
  Synthetic oligonucleotide: FAS-1778
accucucucccuuccca

SEQ ID NO: 10760 - RNA, 17 nt, Artificial Sequence
  Synthetic oligonucleotide: BID-231
gaacaccagccggucgg

SEQ ID NO: 10761 - RNA, 20 nt, Artificial Sequence
  Synthetic oligonucleotide: BID-199
gaacaccagccggucggagg

SEQ ID NO: 10762 - RNA, 17 nt, Artificial Sequence
  Synthetic oligonucleotide: BID-157
gaaccguuguugaccug

SEQ ID NO: 10763 - RNA, 17 nt, Artificial Sequence
  Synthetic oligonucleotide: BID-31
gaaugugcagcggugcu

SEQ ID NO: 10764 - RNA, 17 nt, Artificial Sequence
  Synthetic oligonucleotide: BID-236
gaccguagcaucccucc

SEQ ID NO: 10765 - RNA, 20 nt, Artificial Sequence
  Synthetic oligonucleotide: BID-7
gauggcucggugggcagcga

SEQ ID NO: 10766 - RNA, 17 nt, Artificial Sequence
  Synthetic oligonucleotide: BID-244
gcaccucgcccaggucg

SEQ ID NO: 10767 - RNA, 20 nt, Artificial Sequence
  Synthetic oligonucleotide: BID-5
gcggauucuguaagugggcu

SEQ ID NO: 10768 - RNA, 20 nt, Artificial Sequence
  Synthetic oligonucleotide: BID-104
gcucaucguagcccucccac

SEQ ID NO: 10769 - RNA, 17 nt, Artificial Sequence
  Synthetic oligonucleotide: BID-36
gcucggugggcagcgag

SEQ ID NO: 10770 - RNA, 20 nt, Artificial Sequence
  Synthetic oligonucleotide: BID-107
ggaaccguuguugaccugag

SEQ ID NO: 10771 - RNA, 17 nt, Artificial Sequence
  Synthetic oligonucleotide: BID-239
ggaccguagcaucccuc

SEQ ID NO: 10772 - RNA, 17 nt, Artificial Sequence
  Synthetic oligonucleotide: BID-245
ggcccggagggaugcua

SEQ ID NO: 10773 - RNA, 17 nt, Artificial Sequence
  Synthetic oligonucleotide: BID-247
gggccugaggaccgcgu

SEQ ID NO: 10774 - RNA, 17 nt, Artificial Sequence
  Synthetic oligonucleotide: BID-32
gggucaugauggcucgg

SEQ ID NO: 10775 - RNA, 17 nt, Artificial Sequence
  Synthetic oligonucleotide: BID-28
ggucaugauggcucggu

SEQ ID NO: 10776 - RNA, 20 nt, Artificial Sequence
  Synthetic oligonucleotide: BID-205
gguccaugcuguccccgacc

SEQ ID NO: 10777 - RNA, 17 nt, Artificial Sequence
  Synthetic oligonucleotide: BID-86
gguucacagugucccag

SEQ ID NO: 10778 - RNA, 20 nt, Artificial Sequence
  Synthetic oligonucleotide: BID-202
guccaugcuguccccgaccu

SEQ ID NO: 10779 - RNA, 20 nt, Artificial Sequence
  Synthetic oligonucleotide: BID-58
gucccaguggcgaccuggaa

SEQ ID NO: 10780 - RNA, 20 nt, Artificial Sequence
  Synthetic oligonucleotide: BID-59
gucccuuuccaggucgccac

SEQ ID NO: 10781 - RNA, 17 nt, Artificial Sequence
  Synthetic oligonucleotide: BID-156
gugcaucacaaaccuac

SEQ ID NO: 10782 - RNA, 17 nt, Artificial Sequence
  Synthetic oligonucleotide: BID-27
gugcggauucuguaagu

SEQ ID NO: 10783 - RNA, 17 nt, Artificial Sequence
  Synthetic oligonucleotide: BID-81
gugucccaguggcgacc

SEQ ID NO: 10784 - RNA, 17 nt, Artificial Sequence
  Synthetic oligonucleotide: BID-143
aaccguuguugaccuga

SEQ ID NO: 10785 - RNA, 17 nt, Artificial Sequence
  Synthetic oligonucleotide: BID-35
aaugugcagcggugcug

SEQ ID NO: 10786 - RNA, 17 nt, Artificial Sequence
  Synthetic oligonucleotide: BID-153
acaacgguuccagccuc

SEQ ID NO: 10787 - RNA, 20 nt, Artificial Sequence
  Synthetic oligonucleotide: BID-15
acagugcggauucuguaagu

SEQ ID NO: 10788 - RNA, 20 nt, Artificial Sequence
  Synthetic oligonucleotide: BID-194
acaucauccggaauauugcc

SEQ ID NO: 10789 - RNA, 17 nt, Artificial Sequence
  Synthetic oligonucleotide: BID-150
accguuguugaccugag

SEQ ID NO: 10790 - RNA, 20 nt, Artificial Sequence
  Synthetic oligonucleotide: BID-4
acgaaugugcagcggugcug

SEQ ID NO: 10791 - RNA, 20 nt, Artificial Sequence
  Synthetic oligonucleotide: BID-207
acucaccuccuccgaccggc

SEQ ID NO: 10792 - RNA, 17 nt, Artificial Sequence
  Synthetic oligonucleotide: BID-158
agcagccacucccgcuu

SEQ ID NO: 10793 - RNA, 20 nt, Artificial Sequence
  Synthetic oligonucleotide: BID-195
aggccguucaccaggcccgg

SEQ ID NO: 10794 - RNA, 20 nt, Artificial Sequence
  Synthetic oligonucleotide: BID-1
auacgaaugugcagcggugc

SEQ ID NO: 10795 - RNA, 20 nt, Artificial Sequence
  Synthetic oligonucleotide: BID-201
aucccuccgggccuggugaa

SEQ ID NO: 10796 - RNA, 17 nt, Artificial Sequence
  Synthetic oligonucleotide: BID-152
aucguagcccucccacu

SEQ ID NO: 10797 - RNA, 20 nt, Artificial Sequence
  Synthetic oligonucleotide: BID-198
auggaccguagcaucccucc

SEQ ID NO: 10798 - RNA, 20 nt, Artificial Sequence
  Synthetic oligonucleotide: BID-2
caacaaauacgaaugugcag

SEQ ID NO: 10799 - RNA, 17 nt, Artificial Sequence
  Synthetic oligonucleotide: BID-154
caacgguuccagccuca

SEQ ID NO: 10800 - RNA, 17 nt, Artificial Sequence
  Synthetic oligonucleotide: BID-243
caccagccggucggagg

SEQ ID NO: 10801 - RNA, 17 nt, Artificial Sequence
  Synthetic oligonucleotide: BID-246
caccuccuccgaccggc

SEQ ID NO: 10802 - RNA, 20 nt, Artificial Sequence
  Synthetic oligonucleotide: BID-200
caggaacaccagccggucgg

SEQ ID NO: 10803 - RNA, 17 nt, Artificial Sequence
  Synthetic oligonucleotide: BID-151
caucguagcccucccac

SEQ ID NO: 10804 - RNA, 17 nt, Artificial Sequence
  Synthetic oligonucleotide: BID-248
caugcuguccccgaccu

SEQ ID NO: 10805 - RNA, 20 nt, Artificial Sequence
  Synthetic oligonucleotide: BID-197
cauggaccguagcaucccuc

SEQ ID NO: 10806 - RNA, 20 nt, Artificial Sequence
  Synthetic oligonucleotide: BID-57
ccacugggacacugugaacc

SEQ ID NO: 10807 - RNA, 17 nt, Artificial Sequence
  Synthetic oligonucleotide: BID-155
ccgcuugggaagaauag

SEQ ID NO: 10808 - RNA, 20 nt, Artificial Sequence
  Synthetic oligonucleotide: BID-209
ccggucggaggaggugagug

SEQ ID NO: 10809 - RNA, 20 nt, Artificial Sequence
  Synthetic oligonucleotide: BID-196
ccguagcaucccuccgggcc

SEQ ID NO: 10810 - RNA, 17 nt, Artificial Sequence
  Synthetic oligonucleotide: BID-242
ccguucaccaggcccgg

SEQ ID NO: 10811 - RNA, 20 nt, Artificial Sequence
  Synthetic oligonucleotide: BID-62
ccugguucacagugucccag

SEQ ID NO: 10812 - RNA, 17 nt, Artificial Sequence
  Synthetic oligonucleotide: BID-80
ccuuuccaggucgccac

SEQ ID NO: 10813 - RNA, 17 nt, Artificial Sequence
  Synthetic oligonucleotide: BID-26
cgaaugugcagcggugc

SEQ ID NO: 10814 - RNA, 20 nt, Artificial Sequence
  Synthetic oligonucleotide: BID-206
cgaggugccuggcaauauuc

SEQ ID NO: 10815 - RNA, 20 nt, Artificial Sequence
  Synthetic oligonucleotide: BID-113
cgcagcagccacucccgcuu

SEQ ID NO: 10816 - RNA, 20 nt, Artificial Sequence
  Synthetic oligonucleotide: BID-17
cggauucuguaagugggcug

SEQ ID NO: 10817 - RNA, 20 nt, Artificial Sequence
  Synthetic oligonucleotide: BID-208
cggucggaggaggugaguga

SEQ ID NO: 10818 - RNA, 17 nt, Artificial Sequence
  Synthetic oligonucleotide: BID-241
cguucaccaggcccgga

SEQ ID NO: 10819 - RNA, 20 nt, Artificial Sequence
  Synthetic oligonucleotide: BID-114
cguuguugaccugaggggaa

SEQ ID NO: 10820 - RNA, 20 nt, Artificial Sequence
  Synthetic oligonucleotide: BID-112
cuauucuucccaagcgggag

SEQ ID NO: 10821 - RNA, 20 nt, Artificial Sequence
  Synthetic oligonucleotide: BID-109
cucaucguagcccucccacu

SEQ ID NO: 10822 - RNA, 20 nt, Artificial Sequence
  Synthetic oligonucleotide: BID-110
cucccgcuugggaagaauag

SEQ ID NO: 10823 - RNA, 17 nt, Artificial Sequence
  Synthetic oligonucleotide: BID-79
cuuuccaggucgccacu

SEQ ID NO: 10824 - RNA, 20 nt, Artificial Sequence
  Synthetic oligonucleotide: BID-14
uacgaaugugcagcggugcu

SEQ ID NO: 10825 - RNA, 20 nt, Artificial Sequence
  Synthetic oligonucleotide: BID-111
uacgaugagcugcagacuga

SEQ ID NO: 10826 - RNA, 17 nt, Artificial Sequence
  Synthetic oligonucleotide: BID-237
uagcaucccuccgggcc

SEQ ID NO: 10827 - RNA, 20 nt, Artificial Sequence
  Synthetic oligonucleotide: BID-210
uauugccaggcaccucgccc

SEQ ID NO: 10828 - RNA, 20 nt, Artificial Sequence
  Synthetic oligonucleotide: BID-106
ucaacaacgguuccagccuc

SEQ ID NO: 10829 - RNA, 17 nt, Artificial Sequence
  Synthetic oligonucleotide: BID-240
ucauccggaauauugcc

SEQ ID NO: 10830 - RNA, 20 nt, Artificial Sequence
  Synthetic oligonucleotide: BID-134
ucaucguagcccucccacug

SEQ ID NO: 10831 - RNA, 17 nt, Artificial Sequence
  Synthetic oligonucleotide: BID-159
uccccucaggucaacaa

SEQ ID NO: 10832 - RNA, 20 nt, Artificial Sequence
  Synthetic oligonucleotide: BID-203
uccgggccuggugaacggcc

SEQ ID NO: 10833 - RNA, 20 nt, Artificial Sequence
  Synthetic oligonucleotide: BID-56
ucggagcugccgcgcugccc

SEQ ID NO: 10834 - RNA, 17 nt, Artificial Sequence
  Synthetic oligonucleotide: BID-148
ucguagcccucccacug

SEQ ID NO: 10835 - RNA, 20 nt, Artificial Sequence
  Synthetic oligonucleotide: BID-204
ugagggccugaggaccgcgu

SEQ ID NO: 10836 - RNA, 20 nt, Artificial Sequence
  Synthetic oligonucleotide: BID-108
ugagugcaucacaaaccuac

SEQ ID NO: 10837 - RNA, 20 nt, Artificial Sequence
  Synthetic oligonucleotide: BID-6
ugcggauucuguaagugggc

SEQ ID NO: 10838 - RNA, 20 nt, Artificial Sequence
  Synthetic oligonucleotide: BID-105
uggaaccguuguugaccuga

SEQ ID NO: 10839 - RNA, 20 nt, Artificial Sequence
  Synthetic oligonucleotide: BID-3
uggggucaugauggcucggu

SEQ ID NO: 10840 - RNA, 17 nt, Artificial Sequence
  Synthetic oligonucleotide: BID-102
gaaagggacacacagag

SEQ ID NO: 10841 - RNA, 17 nt, Artificial Sequence
  Synthetic oligonucleotide: BID-187
gaagaauagaggcaggu

SEQ ID NO: 10842 - RNA, 20 nt, Artificial Sequence
  Synthetic oligonucleotide: BID-149
gaagaauagaggcagguagg

SEQ ID NO: 10843 - RNA, 17 nt, Artificial Sequence
  Synthetic oligonucleotide: BID-190
gaauagaggcagguagg

SEQ ID NO: 10844 - RNA, 17 nt, Artificial Sequence
  Synthetic oligonucleotide: BID-257
gaaucuguguucaggca

SEQ ID NO: 10845 - RNA, 20 nt, Artificial Sequence
  Synthetic oligonucleotide: BID-65
gaccucacaguccauggccu

SEQ ID NO: 10846 - RNA, 17 nt, Artificial Sequence
  Synthetic oligonucleotide: BID-270
gaccugggcgaggugcc

SEQ ID NO: 10847 - RNA, 17 nt, Artificial Sequence
  Synthetic oligonucleotide: BID-186
gacuccccuuuccccuc

SEQ ID NO: 10848 - RNA, 20 nt, Artificial Sequence
  Synthetic oligonucleotide: BID-220
gacuuucagaaucuguguuc

SEQ ID NO: 10849 - RNA, 20 nt, Artificial Sequence
  Synthetic oligonucleotide: BID-138
gagccagcacuggcagcucg

SEQ ID NO: 10850 - RNA, 17 nt, Artificial Sequence
  Synthetic oligonucleotide: BID-89
gagcugccgcgcugccc

SEQ ID NO: 10851 - RNA, 17 nt, Artificial Sequence
  Synthetic oligonucleotide: BID-93
gaggccagauccccugc

SEQ ID NO: 10852 - RNA, 17 nt, Artificial Sequence
  Synthetic oligonucleotide: BID-191
gaggggaaaggggaguc

SEQ ID NO: 10853 - RNA, 17 nt, Artificial Sequence
  Synthetic oligonucleotide: BID-166
gaugagcugcagacuga

SEQ ID NO: 10854 - RNA, 20 nt, Artificial Sequence
  Synthetic oligonucleotide: BID-126
gaugcacucaucccugaggc

SEQ ID NO: 10855 - RNA, 17 nt, Artificial Sequence
  Synthetic oligonucleotide: BID-42
gauucuguaagugggcu

SEQ ID NO: 10856 - RNA, 17 nt, Artificial Sequence
  Synthetic oligonucleotide: BID-168
gcacucaucccugaggc

SEQ ID NO: 10857 - RNA, 17 nt, Artificial Sequence
  Synthetic oligonucleotide: BID-50
gcagcgaggggccgggc

SEQ ID NO: 10858 - RNA, 20 nt, Artificial Sequence
  Synthetic oligonucleotide: BID-228
gcagggccaggccguucacc

SEQ ID NO: 10859 - RNA, 20 nt, Artificial Sequence
  Synthetic oligonucleotide: BID-219
gccaggcaccucgcccaggu

SEQ ID NO: 10860 - RNA, 20 nt, Artificial Sequence
  Synthetic oligonucleotide: BID-229
gccaggccguucaccaggcc

SEQ ID NO: 10861 - RNA, 20 nt, Artificial Sequence
  Synthetic oligonucleotide: BID-128
gccagugcuggcuccccagu

SEQ ID NO: 10862 - RNA, 20 nt, Artificial Sequence
  Synthetic oligonucleotide: BID-72
gccauggacugugaggucag

SEQ ID NO: 10863 - RNA, 20 nt, Artificial Sequence
  Synthetic oligonucleotide: BID-73
gccucugaccucacagucca

SEQ ID NO: 10864 - RNA, 17 nt, Artificial Sequence
  Synthetic oligonucleotide: BID-277
gccuggcccugcagcuc

SEQ ID NO: 10865 - RNA, 20 nt, Artificial Sequence
  Synthetic oligonucleotide: BID-214
gcucaggaacaccagccggu

SEQ ID NO: 10866 - RNA, 17 nt, Artificial Sequence
  Synthetic oligonucleotide: BID-47
gcuggaggagcacagug

SEQ ID NO: 10867 - RNA, 17 nt, Artificial Sequence
  Synthetic oligonucleotide: BID-181
gcuggcuccccaguggg

SEQ ID NO: 10868 - RNA, 20 nt, Artificial Sequence
  Synthetic oligonucleotide: BID-225
gcugguguuccugagcugca

SEQ ID NO: 10869 - RNA, 17 nt, Artificial Sequence
  Synthetic oligonucleotide: BID-161
ggaagccaaacaccagu

SEQ ID NO: 10870 - RNA, 20 nt, Artificial Sequence
  Synthetic oligonucleotide: BID-140
ggaggaagccaaacaccagu

SEQ ID NO: 10871 - RNA, 17 nt, Artificial Sequence
  Synthetic oligonucleotide: BID-38
ggauucuguaagugggc

SEQ ID NO: 10872 - RNA, 20 nt, Artificial Sequence
  Synthetic oligonucleotide: BID-16
ggauucuguaagugggcugg

SEQ ID NO: 10873 - RNA, 17 nt, Artificial Sequence
  Synthetic oligonucleotide: BID-83
ggcacccgcaggggauc

SEQ ID NO: 10874 - RNA, 17 nt, Artificial Sequence
  Synthetic oligonucleotide: BID-263
ggcaccucgcccagguc

SEQ ID NO: 10875 - RNA, 20 nt, Artificial Sequence
  Synthetic oligonucleotide: BID-211
ggccguucaccaggcccgga

SEQ ID NO: 10876 - RNA, 17 nt, Artificial Sequence
  Synthetic oligonucleotide: BID-37
ggcucggugggcagcga

SEQ ID NO: 10877 - RNA, 20 nt, Artificial Sequence
  Synthetic oligonucleotide: BID-235
ggcugguguuccugagcugc

SEQ ID NO: 10878 - RNA, 17 nt, Artificial Sequence
  Synthetic oligonucleotide: BID-99
gggacacacagaguggg

SEQ ID NO: 10879 - RNA, 20 nt, Artificial Sequence
  Synthetic oligonucleotide: BID-129
gggccacgagcugccagugc

SEQ ID NO: 10880 - RNA, 17 nt, Artificial Sequence
  Synthetic oligonucleotide: BID-260
gggccaggccguucacc

SEQ ID NO: 10881 - RNA, 17 nt, Artificial Sequence
  Synthetic oligonucleotide: BID-253
gggccuggugaacggcc

SEQ ID NO: 10882 - RNA, 17 nt, Artificial Sequence
  Synthetic oligonucleotide: BID-192
ggggaaggagguggggc

SEQ ID NO: 10883 - RNA, 17 nt, Artificial Sequence
  Synthetic oligonucleotide: BID-53
ggggccgggccggcugg

SEQ ID NO: 10884 - RNA, 17 nt, Artificial Sequence
  Synthetic oligonucleotide: BID-259
ggugccuggcaauauuc

SEQ ID NO: 10885 - RNA, 17 nt, Artificial Sequence
  Synthetic oligonucleotide: BID-54
ggugggcagcgaggggc

SEQ ID NO: 10886 - RNA, 17 nt, Artificial Sequence
  Synthetic oligonucleotide: BID-262
gguguuccugagcugca

SEQ ID NO: 10887 - RNA, 17 nt, Artificial Sequence
  Synthetic oligonucleotide: BID-51
guaagugggcugggggc

SEQ ID NO: 10888 - RNA, 17 nt, Artificial Sequence
  Synthetic oligonucleotide: BID-258
gucaagaagacaucauc

SEQ ID NO: 10889 - RNA, 20 nt, Artificial Sequence
  Synthetic oligonucleotide: BID-75
gucagaggccagauccccug

SEQ ID NO: 10890 - RNA, 17 nt, Artificial Sequence
  Synthetic oligonucleotide: BID-273
gucggaggaggugagug

SEQ ID NO: 10891 - RNA, 17 nt, Artificial Sequence
  Synthetic oligonucleotide: BID-85
gugaaccaggagugagu

SEQ ID NO: 10892 - RNA, 20 nt, Artificial Sequence
  Synthetic oligonucleotide: BID-213
gugagggccugaggaccgcg

SEQ ID NO: 10893 - RNA, 17 nt, Artificial Sequence
  Synthetic oligonucleotide: BID-167
gugcguccagcucucug

SEQ ID NO: 10894 - RNA, 20 nt, Artificial Sequence
  Synthetic oligonucleotide: BID-147
gugcuggcuccccaguggga

SEQ ID NO: 10895 - RNA, 20 nt, Artificial Sequence
  Synthetic oligonucleotide: BID-11
gugcuggggucaugauggcu

SEQ ID NO: 10896 - RNA, 17 nt, Artificial Sequence
  Synthetic oligonucleotide: BID-52
gugggcagcgaggggcc

SEQ ID NO: 10897 - RNA, 17 nt, Artificial Sequence
  Synthetic oligonucleotide: BID-170
guugaccugaggggaaa

SEQ ID NO: 10898 - RNA, 20 nt, Artificial Sequence
  Synthetic oligonucleotide: BID-135
guuguugaccugaggggaaa

SEQ ID NO: 10899 - RNA, 17 nt, Artificial Sequence
  Synthetic oligonucleotide: BID-98
aaagggacacacagagu

SEQ ID NO: 10900 - RNA, 20 nt, Artificial Sequence
  Synthetic oligonucleotide: BID-74
aaagggacacacagaguggg

SEQ ID NO: 10901 - RNA, 20 nt, Artificial Sequence
  Synthetic oligonucleotide: BID-224
aaagucaagaagacaucauc

SEQ ID NO: 10902 - RNA, 20 nt, Artificial Sequence
  Synthetic oligonucleotide: BID-132
aauagaggcagguaggcggc

SEQ ID NO: 10903 - RNA, 17 nt, Artificial Sequence
  Synthetic oligonucleotide: BID-269
aaucuguguucaggcag

SEQ ID NO: 10904 - RNA, 20 nt, Artificial Sequence
  Synthetic oligonucleotide: BID-223
aaucuguguucaggcagggg

SEQ ID NO: 10905 - RNA, 17 nt, Artificial Sequence
  Synthetic oligonucleotide: BID-160
acaaaccuacugguguu

SEQ ID NO: 10906 - RNA, 20 nt, Artificial Sequence
  Synthetic oligonucleotide: BID-60
acagugucccaguggcgacc

SEQ ID NO: 10907 - RNA, 20 nt, Artificial Sequence
  Synthetic oligonucleotide: BID-232
acggccuggcccugcagcuc

SEQ ID NO: 10908 - RNA, 20 nt, Artificial Sequence
  Synthetic oligonucleotide: BID-68
acugugaaccaggagugagu

SEQ ID NO: 10909 - RNA, 17 nt, Artificial Sequence
  Synthetic oligonucleotide: BID-268
agaaucuguguucaggc

SEQ ID NO: 10910 - RNA, 17 nt, Artificial Sequence
  Synthetic oligonucleotide: BID-162
agagagcuggacgcacu

SEQ ID NO: 10911 - RNA, 17 nt, Artificial Sequence
  Synthetic oligonucleotide: BID-185
agaggcagguaggcggc

SEQ ID NO: 10912 - RNA, 17 nt, Artificial Sequence
  Synthetic oligonucleotide: BID-101
agaggccagauccccug

SEQ ID NO: 10913 - RNA, 17 nt, Artificial Sequence
  Synthetic oligonucleotide: BID-180
agcgggaguggcugcug

SEQ ID NO: 10914 - RNA, 17 nt, Artificial Sequence
  Synthetic oligonucleotide: BID-265
agcucaggaacaccagc

SEQ ID NO: 10915 - RNA, 20 nt, Artificial Sequence
  Synthetic oligonucleotide: BID-136
agcuguugucagaacagcuu

SEQ ID NO: 10916 - RNA, 20 nt, Artificial Sequence
  Synthetic oligonucleotide: BID-238
aggaggugagugagggccug

SEQ ID NO: 10917 - RNA, 17 nt, Artificial Sequence
  Synthetic oligonucleotide: BID-264
aggcaccucgcccaggu

SEQ ID NO: 10918 - RNA, 17 nt, Artificial Sequence
  Synthetic oligonucleotide: BID-256
aggccguucaccaggcc

SEQ ID NO: 10919 - RNA, 17 nt, Artificial Sequence
  Synthetic oligonucleotide: BID-254
agggccugaggaccgcg

SEQ ID NO: 10920 - RNA, 17 nt, Artificial Sequence
  Synthetic oligonucleotide: BID-275
aggugagugagggccug

SEQ ID NO: 10921 - RNA, 20 nt, Artificial Sequence
  Synthetic oligonucleotide: BID-71
aguccauggccugggcagcg

SEQ ID NO: 10922 - RNA, 17 nt, Artificial Sequence
  Synthetic oligonucleotide: BID-34
agugcggauucuguaag

SEQ ID NO: 10923 - RNA, 17 nt, Artificial Sequence
  Synthetic oligonucleotide: BID-188
agugcuggcuccccagu

SEQ ID NO: 10924 - RNA, 20 nt, Artificial Sequence
  Synthetic oligonucleotide: BID-142
agugcuggcuccccaguggg

SEQ ID NO: 10925 - RNA, 20 nt, Artificial Sequence
  Synthetic oligonucleotide: BID-120
aucacaaaccuacugguguu

SEQ ID NO: 10926 - RNA, 17 nt, Artificial Sequence
  Synthetic oligonucleotide: BID-96
auggacugugaggucag

SEQ ID NO: 10927 - RNA, 20 nt, Artificial Sequence
  Synthetic oligonucleotide: BID-18
auggcucggugggcagcgag

SEQ ID NO: 10928 - RNA, 17 nt, Artificial Sequence
  Synthetic oligonucleotide: BID-41
auucuguaagugggcug

SEQ ID NO: 10929 - RNA, 17 nt, Artificial Sequence
  Synthetic oligonucleotide: BID-33
caaauacgaaugugcag

SEQ ID NO: 10930 - RNA, 20 nt, Artificial Sequence
  Synthetic oligonucleotide: BID-115
caacaacgguuccagccuca

SEQ ID NO: 10931 - RNA, 20 nt, Artificial Sequence
  Synthetic oligonucleotide: BID-124
caacagcuuccgcagagagc

SEQ ID NO: 10932 - RNA, 20 nt, Artificial Sequence
  Synthetic oligonucleotide: BID-10
cacagugcggauucuguaag

SEQ ID NO: 10933 - RNA, 17 nt, Artificial Sequence
  Synthetic oligonucleotide: BID-251
cacucaccuccuccgac

SEQ ID NO: 10934 - RNA, 20 nt, Artificial Sequence
  Synthetic oligonucleotide: BID-77
cacucugugugucccuuucc

SEQ ID NO: 10935 - RNA, 17 nt, Artificial Sequence
  Synthetic oligonucleotide: BID-184
cacuggggagccagcac

SEQ ID NO: 10936 - RNA, 17 nt, Artificial Sequence
  Synthetic oligonucleotide: BID-46
cacugugcuccuccagc

SEQ ID NO: 10937 - RNA, 20 nt, Artificial Sequence
  Synthetic oligonucleotide: BID-230
cagaaucuguguucaggcag

SEQ ID NO: 10938 - RNA, 17 nt, Artificial Sequence
  Synthetic oligonucleotide: BID-169
cagagagcuggacgcac

SEQ ID NO: 10939 - RNA, 17 nt, Artificial Sequence
  Synthetic oligonucleotide: BID-189
cagcagccacucccgcu

SEQ ID NO: 10940 - RNA, 20 nt, Artificial Sequence
  Synthetic oligonucleotide: BID-23
cagcgaggggccgggccggc

SEQ ID NO: 10941 - RNA, 20 nt, Artificial Sequence
  Synthetic oligonucleotide: BID-20
cagcggugcuggggucauga

SEQ ID NO: 10942 - RNA, 17 nt, Artificial Sequence
  Synthetic oligonucleotide: BID-84
cagcuccgacucacucc

SEQ ID NO: 10943 - RNA, 17 nt, Artificial Sequence
  Synthetic oligonucleotide: BID-174
cagcuuccgcagagagc

SEQ ID NO: 10944 - RNA, 17 nt, Artificial Sequence
  Synthetic oligonucleotide: BID-250
caggaacaccagccggu

SEQ ID NO: 10945 - RNA, 20 nt, Artificial Sequence
  Synthetic oligonucleotide: BID-218
caggcaccucgcccaggucg

SEQ ID NO: 10946 - RNA, 17 nt, Artificial Sequence
  Synthetic oligonucleotide: BID-182
cagugcuggcuccccag

SEQ ID NO: 10947 - RNA, 17 nt, Artificial Sequence
  Synthetic oligonucleotide: BID-82
caguggcgaccuggaaa

SEQ ID NO: 10948 - RNA, 20 nt, Artificial Sequence
  Synthetic oligonucleotide: BID-133
ccaagcgggaguggcugcug

SEQ ID NO: 10949 - RNA, 17 nt, Artificial Sequence
  Synthetic oligonucleotide: BID-163
ccacgagcugccagugc

SEQ ID NO: 10950 - RNA, 17 nt, Artificial Sequence
  Synthetic oligonucleotide: BID-176
ccagcacuggcagcucg

SEQ ID NO: 10951 - RNA, 20 nt, Artificial Sequence
  Synthetic oligonucleotide: BID-234
ccaggcaccucgcccagguc

SEQ ID NO: 10952 - RNA, 17 nt, Artificial Sequence
  Synthetic oligonucleotide: BID-95
ccaggccauggacugug

SEQ ID NO: 10953 - RNA, 20 nt, Artificial Sequence
  Synthetic oligonucleotide: BID-212
ccaggcccggagggaugcua

SEQ ID NO: 10954 - RNA, 17 nt, Artificial Sequence
  Synthetic oligonucleotide: BID-261
ccaggucggggacagca

SEQ ID NO: 10955 - RNA, 20 nt, Artificial Sequence
  Synthetic oligonucleotide: BID-131
ccagugcguccagcucucug

SEQ ID NO: 10956 - RNA, 17 nt, Artificial Sequence
  Synthetic oligonucleotide: BID-91
ccaguggcgaccuggaa

SEQ ID NO: 10957 - RNA, 17 nt, Artificial Sequence
  Synthetic oligonucleotide: BID-249
ccaugcuguccccgacc

SEQ ID NO: 10958 - RNA, 17 nt, Artificial Sequence
  Synthetic oligonucleotide: BID-94
ccauggccugggcagcg

SEQ ID NO: 10959 - RNA, 20 nt, Artificial Sequence
  Synthetic oligonucleotide: BID-217
cccgaccugggcgaggugcc

SEQ ID NO: 10960 - RNA, 20 nt, Artificial Sequence
  Synthetic oligonucleotide: BID-13
ccgcacugugcuccuccagc

SEQ ID NO: 10961 - RNA, 20 nt, Artificial Sequence
  Synthetic oligonucleotide: BID-117
ccgcagagagcuggacgcac

SEQ ID NO: 10962 - RNA, 20 nt, Artificial Sequence
  Synthetic oligonucleotide: BID-137
ccgcagcagccacucccgcu

SEQ ID NO: 10963 - RNA, 17 nt, Artificial Sequence
  Synthetic oligonucleotide: BID-90
ccgcgcugcccaggcca

SEQ ID NO: 10964 - RNA, 20 nt, Artificial Sequence
  Synthetic oligonucleotide: BID-12
ccggcuggaggagcacagug

SEQ ID NO: 10965 - RNA, 17 nt, Artificial Sequence
  Synthetic oligonucleotide: BID-97
ccucacaguccauggcc

SEQ ID NO: 10966 - RNA, 20 nt, Artificial Sequence
  Synthetic oligonucleotide: BID-222
ccucacucaccuccuccgac

SEQ ID NO: 10967 - RNA, 17 nt, Artificial Sequence
  Synthetic oligonucleotide: BID-252
ccuccgggccuggugaa

SEQ ID NO: 10968 - RNA, 17 nt, Artificial Sequence
  Synthetic oligonucleotide: BID-165
ccucuauucuucccaag

SEQ ID NO: 10969 - RNA, 20 nt, Artificial Sequence
  Synthetic oligonucleotide: BID-146
ccugacuccccuuuccccuc

SEQ ID NO: 10970 - RNA, 20 nt, Artificial Sequence
  Synthetic oligonucleotide: BID-144
ccugaggggaaaggggaguc

SEQ ID NO: 10971 - RNA, 17 nt, Artificial Sequence
  Synthetic oligonucleotide: BID-48
cgaggggccgggccggc

SEQ ID NO: 10972 - RNA, 20 nt, Artificial Sequence
  Synthetic oligonucleotide: BID-25
cgaggggccgggccggcugg

SEQ ID NO: 10973 - RNA, 20 nt, Artificial Sequence
  Synthetic oligonucleotide: BID-116
cgcagagagcuggacgcacu

SEQ ID NO: 10974 - RNA, 20 nt, Artificial Sequence
  Synthetic oligonucleotide: BID-216
cgcccaggucggggacagca

SEQ ID NO: 10975 - RNA, 20 nt, Artificial Sequence
  Synthetic oligonucleotide: BID-119
cgcuugggaagaauagaggc

SEQ ID NO: 10976 - RNA, 20 nt, Artificial Sequence
  Synthetic oligonucleotide: BID-63
cggcagcuccgacucacucc

SEQ ID NO: 10977 - RNA, 17 nt, Artificial Sequence
  Synthetic oligonucleotide: BID-43
cggugcuggggucauga

SEQ ID NO: 10978 - RNA, 17 nt, Artificial Sequence
  Synthetic oligonucleotide: BID-88
cucacaguccauggccu

SEQ ID NO: 10979 - RNA, 20 nt, Artificial Sequence
  Synthetic oligonucleotide: BID-24
cucggugggcagcgaggggc

SEQ ID NO: 10980 - RNA, 17 nt, Artificial Sequence
  Synthetic oligonucleotide: BID-178
cucuauucuucccaagc

SEQ ID NO: 10981 - RNA, 20 nt, Artificial Sequence
  Synthetic oligonucleotide: BID-66
cugccgcgcugcccaggcca

SEQ ID NO: 10982 - RNA, 20 nt, Artificial Sequence
  Synthetic oligonucleotide: BID-141
cugccucuauucuucccaag

SEQ ID NO: 10983 - RNA, 20 nt, Artificial Sequence
  Synthetic oligonucleotide: BID-78
cuggaaagggacacacagag

SEQ ID NO: 10984 - RNA, 20 nt, Artificial Sequence
  Synthetic oligonucleotide: BID-118
cuggaaccguuguugaccug

SEQ ID NO: 10985 - RNA, 17 nt, Artificial Sequence
  Synthetic oligonucleotide: BID-183
cuggcuccccaguggga

SEQ ID NO: 10986 - RNA, 17 nt, Artificial Sequence
  Synthetic oligonucleotide: BID-87
cugggacacugugaacc

SEQ ID NO: 10987 - RNA, 17 nt, Artificial Sequence
  Synthetic oligonucleotide: BID-44
cuggggucaugauggcu

SEQ ID NO: 10988 - RNA, 20 nt, Artificial Sequence
  Synthetic oligonucleotide: BID-8
cuggggucaugauggcucgg

SEQ ID NO: 10989 - RNA, 20 nt, Artificial Sequence
  Synthetic oligonucleotide: BID-30
cuguaagugggcugggggcu

SEQ ID NO: 10990 - RNA, 20 nt, Artificial Sequence
  Synthetic oligonucleotide: BID-21
cugugcuccuccagccggcc

SEQ ID NO: 10991 - RNA, 17 nt, Artificial Sequence
  Synthetic oligonucleotide: BID-274
cuguguucaggcagggg

SEQ ID NO: 10992 - RNA, 20 nt, Artificial Sequence
  Synthetic oligonucleotide: BID-127
cuuuccccucaggucaacaa

SEQ ID NO: 10993 - RNA, 17 nt, Artificial Sequence
  Synthetic oligonucleotide: BID-49
uaagugggcugggggcu

SEQ ID NO: 10994 - RNA, 20 nt, Artificial Sequence
  Synthetic oligonucleotide: BID-227
ucagaaucuguguucaggca

SEQ ID NO: 10995 - RNA, 20 nt, Artificial Sequence
  Synthetic oligonucleotide: BID-69
ucagaggccagauccccugc

SEQ ID NO: 10996 - RNA, 20 nt, Artificial Sequence
  Synthetic oligonucleotide: BID-121
ucccacuggggagccagcac

SEQ ID NO: 10997 - RNA, 20 nt, Artificial Sequence
  Synthetic oligonucleotide: BID-64
ucccaguggcgaccuggaaa

SEQ ID NO: 10998 - RNA, 20 nt, Artificial Sequence
  Synthetic oligonucleotide: BID-61
ucccuuuccaggucgccacu

SEQ ID NO: 10999 - RNA, 17 nt, Artificial Sequence
  Synthetic oligonucleotide: BID-276
uccugagcugcagggcc

SEQ ID NO: 11000 - RNA, 17 nt, Artificial Sequence
  Synthetic oligonucleotide: BID-267
ucggaggaggugaguga

SEQ ID NO: 11001 - RNA, 20 nt, Artificial Sequence
  Synthetic oligonucleotide: BID-19
ucggugggcagcgaggggcc

SEQ ID NO: 11002 - RNA, 17 nt, Artificial Sequence
  Synthetic oligonucleotide: BID-92
ucugaccucacagucca

SEQ ID NO: 11003 - RNA, 20 nt, Artificial Sequence
  Synthetic oligonucleotide: BID-22
ucuguaagugggcugggggc

SEQ ID NO: 11004 - RNA, 17 nt, Artificial Sequence
  Synthetic oligonucleotide: BID-100
ucugugugucccuuucc

SEQ ID NO: 11005 - RNA, 20 nt, Artificial Sequence
  Synthetic oligonucleotide: BID-70
ugaccucacaguccauggcc

SEQ ID NO: 11006 - RNA, 17 nt, Artificial Sequence
  Synthetic oligonucleotide: BID-171
ugaugcacucaucccug

SEQ ID NO: 11007 - RNA, 20 nt, Artificial Sequence
  Synthetic oligonucleotide: BID-9
ugauggcucggugggcagcg

SEQ ID NO: 11008 - RNA, 20 nt, Artificial Sequence
  Synthetic oligonucleotide: BID-221
ugcagcucaggaacaccagc

SEQ ID NO: 11009 - RNA, 17 nt, Artificial Sequence
  Synthetic oligonucleotide: BID-266
ugccaggcaccucgccc

SEQ ID NO: 11010 - RNA, 20 nt, Artificial Sequence
  Synthetic oligonucleotide: BID-139
ugccagugcuggcuccccag

SEQ ID NO: 11011 - RNA, 20 nt, Artificial Sequence
  Synthetic oligonucleotide: BID-67
ugcccaggccauggacugug

SEQ ID NO: 11012 - RNA, 20 nt, Artificial Sequence
  Synthetic oligonucleotide: BID-123
ugccucuauucuucccaagc

SEQ ID NO: 11013 - RNA, 17 nt, Artificial Sequence
  Synthetic oligonucleotide: BID-45
ugcuccuccagccggcc

SEQ ID NO: 11014 - RNA, 20 nt, Artificial Sequence
  Synthetic oligonucleotide: BID-215
ugcuguccccgaccugggcg

SEQ ID NO: 11015 - RNA, 20 nt, Artificial Sequence
  Synthetic oligonucleotide: BID-76
uggaaagggacacacagagu

SEQ ID NO: 11016 - RNA, 17 nt, Artificial Sequence
  Synthetic oligonucleotide: BID-39
uggcucggugggcagcg

SEQ ID NO: 11017 - RNA, 20 nt, Artificial Sequence
  Synthetic oligonucleotide: BID-145
ugggaagaauagaggcaggu

SEQ ID NO: 11018 - RNA, 20 nt, Artificial Sequence
  Synthetic oligonucleotide: BID-29
ugggcagcgaggggccgggc

SEQ ID NO: 11019 - RNA, 17 nt, Artificial Sequence
  Synthetic oligonucleotide: BID-271
ugguguuccugagcugc

SEQ ID NO: 11020 - RNA, 17 nt, Artificial Sequence
  Synthetic oligonucleotide: BID-177
ugucagaacagcuuugg

SEQ ID NO: 11021 - RNA, 17 nt, Artificial Sequence
  Synthetic oligonucleotide: BID-255
uguccccgaccugggcg

SEQ ID NO: 11022 - RNA, 20 nt, Artificial Sequence
  Synthetic oligonucleotide: BID-233
uguuccugagcugcagggcc

SEQ ID NO: 11023 - RNA, 17 nt, Artificial Sequence
  Synthetic oligonucleotide: BID-175
uguugaccugaggggaa

SEQ ID NO: 11024 - RNA, 17 nt, Artificial Sequence
  Synthetic oligonucleotide: BID-173
uguugucagaacagcuu

SEQ ID NO: 11025 - RNA, 20 nt, Artificial Sequence
  Synthetic oligonucleotide: BID-122
uguugucagaacagcuuugg

SEQ ID NO: 11026 - RNA, 20 nt, Artificial Sequence
  Synthetic oligonucleotide: BID-226
uucagaaucuguguucaggc

SEQ ID NO: 11027 - RNA, 17 nt, Artificial Sequence
  Synthetic oligonucleotide: BID-40
uucuguaagugggcugg

SEQ ID NO: 11028 - RNA, 17 nt, Artificial Sequence
  Synthetic oligonucleotide: BID-164
uucuucccaagcgggag

SEQ ID NO: 11029 - RNA, 17 nt, Artificial Sequence
  Synthetic oligonucleotide: BID-172
uugaccugaggggaaag

SEQ ID NO: 11030 - RNA, 17 nt, Artificial Sequence
  Synthetic oligonucleotide: BID-179
uugggaagaauagaggc

SEQ ID NO: 11031 - RNA, 20 nt, Artificial Sequence
  Synthetic oligonucleotide: BID-125
uugugaugcacucaucccug

SEQ ID NO: 11032 - RNA, 20 nt, Artificial Sequence
  Synthetic oligonucleotide: BID-130
uuguugaccugaggggaaag

SEQ ID NO: 11033 - RNA, 17 nt, Artificial Sequence
  Synthetic oligonucleotide: BID-272
uuucagaaucuguguuc

SEQ ID NO: 11034 - RNA, 20 nt, Artificial Sequence
  Synthetic oligonucleotide: BID-278
uucugugugccccucugugc

SEQ ID NO: 11035 - RNA, 20 nt, Artificial Sequence
  Synthetic oligonucleotide: BID-279
ugugccccucugugcaggac

SEQ ID NO: 11036 - RNA, 20 nt, Artificial Sequence
  Synthetic oligonucleotide: BID-280
ccucugugcaggaccggaac

SEQ ID NO: 11037 - RNA, 20 nt, Artificial Sequence
  Synthetic oligonucleotide: BID-281
cucugugcaggaccggaaca

SEQ ID NO: 11038 - RNA, 20 nt, Artificial Sequence
  Synthetic oligonucleotide: BID-282
gcaggaccggaacagggacc

SEQ ID NO: 11039 - RNA, 20 nt, Artificial Sequence
  Synthetic oligonucleotide: BID-283
cagggaccuggccacugccc

SEQ ID NO: 11040 - RNA, 20 nt, Artificial Sequence
  Synthetic oligonucleotide: BID-284
ugcccuggagcagcugcugc

SEQ ID NO: 11041 - RNA, 20 nt, Artificial Sequence
  Synthetic oligonucleotide: BID-285
gcaggccuacccuagagaca

SEQ ID NO: 11042 - RNA, 20 nt, Artificial Sequence
  Synthetic oligonucleotide: BID-286
cuacccuagagacauggaga

SEQ ID NO: 11043 - RNA, 20 nt, Artificial Sequence
  Synthetic oligonucleotide: BID-287
ggagaaggagaagaccaugc

SEQ ID NO: 11044 - RNA, 20 nt, Artificial Sequence
  Synthetic oligonucleotide: BID-288
ggagaagaccaugcuggugc

SEQ ID NO: 11045 - RNA, 20 nt, Artificial Sequence
  Synthetic oligonucleotide: BID-289
gcuggugcuggcccugcugc

SEQ ID NO: 11046 - RNA, 20 nt, Artificial Sequence
  Synthetic oligonucleotide: BID-290
ggcccugcugcuggccaaga

SEQ ID NO: 11047 - RNA, 20 nt, Artificial Sequence
  Synthetic oligonucleotide: BID-291
ccugcugcuggccaagaagg

SEQ ID NO: 11048 - RNA, 20 nt, Artificial Sequence
  Synthetic oligonucleotide: BID-292
agaaccuacgcaccuacgug

SEQ ID NO: 11049 - RNA, 20 nt, Artificial Sequence
  Synthetic oligonucleotide: BID-293
cagaaauguaagaacccuug

SEQ ID NO: 11050 - RNA, 17 nt, Artificial Sequence
  Synthetic oligonucleotide: BID-294
ugugugccccucugugc

SEQ ID NO: 11051 - RNA, 17 nt, Artificial Sequence
  Synthetic oligonucleotide: BID-295
gccccucugugcaggac

SEQ ID NO: 11052 - RNA, 17 nt, Artificial Sequence
  Synthetic oligonucleotide: BID-296
cugugcaggaccggaac

SEQ ID NO: 11053 - RNA, 17 nt, Artificial Sequence
  Synthetic oligonucleotide: BID-297
ugugcaggaccggaaca

SEQ ID NO: 11054 - RNA, 17 nt, Artificial Sequence
  Synthetic oligonucleotide: BID-298
ggaccggaacagggacc

SEQ ID NO: 11055 - RNA, 17 nt, Artificial Sequence
  Synthetic oligonucleotide: BID-299
ggaccuggccacugccc

SEQ ID NO: 11056 - RNA, 17 nt, Artificial Sequence
  Synthetic oligonucleotide: BID-300
ccuggagcagcugcugc

SEQ ID NO: 11057 - RNA, 17 nt, Artificial Sequence
  Synthetic oligonucleotide: BID-301
ggccuacccuagagaca

SEQ ID NO: 11058 - RNA, 17 nt, Artificial Sequence
  Synthetic oligonucleotide: BID-302
cccuagagacauggaga

SEQ ID NO: 11059 - RNA, 17 nt, Artificial Sequence
  Synthetic oligonucleotide: BID-303
gaaggagaagaccaugc

SEQ ID NO: 11060 - RNA, 17 nt, Artificial Sequence
  Synthetic oligonucleotide: BID-304
gaagaccaugcuggugc

SEQ ID NO: 11061 - RNA, 17 nt, Artificial Sequence
  Synthetic oligonucleotide: BID-305
ggugcuggcccugcugc

SEQ ID NO: 11062 - RNA, 17 nt, Artificial Sequence
  Synthetic oligonucleotide: BID-306
ccugcugcuggccaaga

SEQ ID NO: 11063 - RNA, 17 nt, Artificial Sequence
  Synthetic oligonucleotide: BID-307
gcugcuggccaagaagg

SEQ ID NO: 11064 - RNA, 17 nt, Artificial Sequence
  Synthetic oligonucleotide: BID-308
accuacgcaccuacgug

SEQ ID NO: 11065 - RNA, 17 nt, Artificial Sequence
  Synthetic oligonucleotide: BID-309
aaauguaagaacccuug

SEQ ID NO: 11066 - RNA, 20 nt, Artificial Sequence
  Synthetic oligonucleotide: BID-310
agggaaggagcugaccucaa

SEQ ID NO: 11067 - RNA, 20 nt, Artificial Sequence
  Synthetic oligonucleotide: BID-311
cucaaggguucuuacauuuc

SEQ ID NO: 11068 - RNA, 20 nt, Artificial Sequence
  Synthetic oligonucleotide: BID-312
ucuggcuaagcuccucacgu

SEQ ID NO: 11069 - RNA, 20 nt, Artificial Sequence
  Synthetic oligonucleotide: BID-313
agcuccucacguaggugcgu

SEQ ID NO: 11070 - RNA, 20 nt, Artificial Sequence
  Synthetic oligonucleotide: BID-314
ucacguaggugcguagguuc

SEQ ID NO: 11071 - RNA, 20 nt, Artificial Sequence
  Synthetic oligonucleotide: BID-315
cuguugugugaaagacauca

SEQ ID NO: 11072 - RNA, 20 nt, Artificial Sequence
  Synthetic oligonucleotide: BID-316
gugaaagacaucacggagca

SEQ ID NO: 11073 - RNA, 20 nt, Artificial Sequence
  Synthetic oligonucleotide: BID-317
aagacaucacggagcaagga

SEQ ID NO: 11074 - RNA, 20 nt, Artificial Sequence
  Synthetic oligonucleotide: BID-318
gagcaaggacggcgugugac

SEQ ID NO: 11075 - RNA, 20 nt, Artificial Sequence
  Synthetic oligonucleotide: BID-319
cgugugacuggccaccuucu

SEQ ID NO: 11076 - RNA, 20 nt, Artificial Sequence
  Synthetic oligonucleotide: BID-320
ccaccuucuuggccagcagc

SEQ ID NO: 11077 - RNA, 20 nt, Artificial Sequence
  Synthetic oligonucleotide: BID-321
caccuucuuggccagcagca

SEQ ID NO: 11078 - RNA, 20 nt, Artificial Sequence
  Synthetic oligonucleotide: BID-322
cagcagggccagcaccagca

SEQ ID NO: 11079 - RNA, 20 nt, Artificial Sequence
  Synthetic oligonucleotide: BID-323
uucuccuucuccaugucucu

SEQ ID NO: 11080 - RNA, 20 nt, Artificial Sequence
  Synthetic oligonucleotide: BID-324
ucuccuucuccaugucucua

SEQ ID NO: 11081 - RNA, 20 nt, Artificial Sequence
  Synthetic oligonucleotide: BID-325
cuucuccaugucucuagggu

SEQ ID NO: 11082 - RNA, 20 nt, Artificial Sequence
  Synthetic oligonucleotide: BID-326
aggccugcagcagcugcucc

SEQ ID NO: 11083 - RNA, 20 nt, Artificial Sequence
  Synthetic oligonucleotide: BID-327
ggccugcagcagcugcucca

SEQ ID NO: 11084 - RNA, 20 nt, Artificial Sequence
  Synthetic oligonucleotide: BID-328
cagcagcugcuccagggcag

SEQ ID NO: 11085 - RNA, 20 nt, Artificial Sequence
  Synthetic oligonucleotide: BID-329
gcugcuccagggcaguggcc

SEQ ID NO: 11086 - RNA, 20 nt, Artificial Sequence
  Synthetic oligonucleotide: BID-330
caguggccaggucccuguuc

SEQ ID NO: 11087 - RNA, 20 nt, Artificial Sequence
  Synthetic oligonucleotide: BID-331
ccuguuccgguccugcacag

SEQ ID NO: 11088 - RNA, 20 nt, Artificial Sequence
  Synthetic oligonucleotide: BID-332
cuguuccgguccugcacaga

SEQ ID NO: 11089 - RNA, 20 nt, Artificial Sequence
  Synthetic oligonucleotide: BID-333
uguuccgguccugcacagag

SEQ ID NO: 11090 - RNA, 20 nt, Artificial Sequence
  Synthetic oligonucleotide: BID-334
acagaggggcacacagaacc

SEQ ID NO: 11091 - RNA, 17 nt, Artificial Sequence
  Synthetic oligonucleotide: BID-335
gaaggagcugaccucaa

SEQ ID NO: 11092 - RNA, 17 nt, Artificial Sequence
  Synthetic oligonucleotide: BID-336
aaggguucuuacauuuc

SEQ ID NO: 11093 - RNA, 17 nt, Artificial Sequence
  Synthetic oligonucleotide: BID-337
ggcuaagcuccucacgu

SEQ ID NO: 11094 - RNA, 17 nt, Artificial Sequence
  Synthetic oligonucleotide: BID-338
uccucacguaggugcgu

SEQ ID NO: 11095 - RNA, 17 nt, Artificial Sequence
  Synthetic oligonucleotide: BID-339
cguaggugcguagguuc

SEQ ID NO: 11096 - RNA, 17 nt, Artificial Sequence
  Synthetic oligonucleotide: BID-340
uugugugaaagacauca

SEQ ID NO: 11097 - RNA, 17 nt, Artificial Sequence
  Synthetic oligonucleotide: BID-341
aaagacaucacggagca

SEQ ID NO: 11098 - RNA, 17 nt, Artificial Sequence
  Synthetic oligonucleotide: BID-342
acaucacggagcaagga

SEQ ID NO: 11099 - RNA, 17 nt, Artificial Sequence
  Synthetic oligonucleotide: BID-343
caaggacggcgugugac

SEQ ID NO: 11100 - RNA, 17 nt, Artificial Sequence
  Synthetic oligonucleotide: BID-344
gugacuggccaccuucu

SEQ ID NO: 11101 - RNA, 17 nt, Artificial Sequence
  Synthetic oligonucleotide: BID-345
ccuucuuggccagcagc

SEQ ID NO: 11102 - RNA, 17 nt, Artificial Sequence
  Synthetic oligonucleotide: BID-346
cuucuuggccagcagca

SEQ ID NO: 11103 - RNA, 17 nt, Artificial Sequence
  Synthetic oligonucleotide: BID-347
cagggccagcaccagca

SEQ ID NO: 11104 - RNA, 17 nt, Artificial Sequence
  Synthetic oligonucleotide: BID-348
uccuucuccaugucucu

SEQ ID NO: 11105 - RNA, 17 nt, Artificial Sequence
  Synthetic oligonucleotide: BID-349
ccuucuccaugucucua

SEQ ID NO: 11106 - RNA, 17 nt, Artificial Sequence
  Synthetic oligonucleotide: BID-350
cuccaugucucuagggu

SEQ ID NO: 11107 - RNA, 17 nt, Artificial Sequence
  Synthetic oligonucleotide: BID-351
ccugcagcagcugcucc

SEQ ID NO: 11108 - RNA, 17 nt, Artificial Sequence
  Synthetic oligonucleotide: BID-352
cugcagcagcugcucca

SEQ ID NO: 11109 - RNA, 17 nt, Artificial Sequence
  Synthetic oligonucleotide: BID-353
cagcugcuccagggcag

SEQ ID NO: 11110 - RNA, 17 nt, Artificial Sequence
  Synthetic oligonucleotide: BID-354
gcuccagggcaguggcc

SEQ ID NO: 11111 - RNA, 17 nt, Artificial Sequence
  Synthetic oligonucleotide: BID-355
uggccaggucccuguuc

SEQ ID NO: 11112 - RNA, 17 nt, Artificial Sequence
  Synthetic oligonucleotide: BID-356
guuccgguccugcacag

SEQ ID NO: 11113 - RNA, 17 nt, Artificial Sequence
  Synthetic oligonucleotide: BID-357
uuccgguccugcacaga

SEQ ID NO: 11114 - RNA, 17 nt, Artificial Sequence
  Synthetic oligonucleotide: BID-358
uccgguccugcacagag

SEQ ID NO: 11115 - RNA, 17 nt, Artificial Sequence
  Synthetic oligonucleotide: BID-359
gaggggcacacagaacc

SEQ ID NO: 11116 - RNA, 20 nt, Artificial Sequence
  Synthetic oligonucleotide: BID-360
cauucauucauucaacaaau

SEQ ID NO: 11117 - RNA, 20 nt, Artificial Sequence
  Synthetic oligonucleotide: BID-361
aauacgaaugugcagcggug

SEQ ID NO: 11118 - RNA, 20 nt, Artificial Sequence
  Synthetic oligonucleotide: BID-1
auacgaaugugcagcggugc

SEQ ID NO: 11119 - RNA, 20 nt, Artificial Sequence
  Synthetic oligonucleotide: BID-363
gcuggggucaugauggcucg

SEQ ID NO: 11120 - RNA, 20 nt, Artificial Sequence
  Synthetic oligonucleotide: BID-364
ucaugauggcucggugggca

SEQ ID NO: 11121 - RNA, 20 nt, Artificial Sequence
  Synthetic oligonucleotide: BID-365
augauggcucggugggcagc

SEQ ID NO: 11122 - RNA, 20 nt, Artificial Sequence
  Synthetic oligonucleotide: BID-9
ugauggcucggugggcagcg

SEQ ID NO: 11123 - RNA, 20 nt, Artificial Sequence
  Synthetic oligonucleotide: BID-367
gcucggugggcagcgagggg

SEQ ID NO: 11124 - RNA, 20 nt, Artificial Sequence
  Synthetic oligonucleotide: BID-368
gcagcgaggggccgggccgg

SEQ ID NO: 11125 - RNA, 20 nt, Artificial Sequence
  Synthetic oligonucleotide: BID-23
cagcgaggggccgggccggc

SEQ ID NO: 11126 - RNA, 20 nt, Artificial Sequence
  Synthetic oligonucleotide: BID-370
gcgaggggccgggccggcug

SEQ ID NO: 11127 - RNA, 20 nt, Artificial Sequence
  Synthetic oligonucleotide: BID-25
cgaggggccgggccggcugg

SEQ ID NO: 11128 - RNA, 20 nt, Artificial Sequence
  Synthetic oligonucleotide: BID-372
gccggcuggaggagcacagu

SEQ ID NO: 11129 - RNA, 20 nt, Artificial Sequence
  Synthetic oligonucleotide: BID-373
gcacagugcggauucuguaa

SEQ ID NO: 11130 - RNA, 20 nt, Artificial Sequence
  Synthetic oligonucleotide: BID-374
gugcggauucuguaaguggg

SEQ ID NO: 11131 - RNA, 20 nt, Artificial Sequence
  Synthetic oligonucleotide: BID-6
ugcggauucuguaagugggc

SEQ ID NO: 11132 - RNA, 20 nt, Artificial Sequence
  Synthetic oligonucleotide: BID-5
gcggauucuguaagugggcu

SEQ ID NO: 11133 - RNA, 20 nt, Artificial Sequence
  Synthetic oligonucleotide: BID-377
uucuguaagugggcuggggg

SEQ ID NO: 11134 - RNA, 20 nt, Artificial Sequence
  Synthetic oligonucleotide: BID-378
ugucccuuuccaggucgcca

SEQ ID NO: 11135 - RNA, 20 nt, Artificial Sequence
  Synthetic oligonucleotide: BID-59
gucccuuuccaggucgccac

SEQ ID NO: 11136 - RNA, 20 nt, Artificial Sequence
  Synthetic oligonucleotide: BID-380
caggucgccacugggacacu

SEQ ID NO: 11137 - RNA, 20 nt, Artificial Sequence
  Synthetic oligonucleotide: BID-381
gccacugggacacugugaac

SEQ ID NO: 11138 - RNA, 20 nt, Artificial Sequence
  Synthetic oligonucleotide: BID-57
ccacugggacacugugaacc

SEQ ID NO: 11139 - RNA, 20 nt, Artificial Sequence
  Synthetic oligonucleotide: BID-383
ugggacacugugaaccagga

SEQ ID NO: 11140 - RNA, 20 nt, Artificial Sequence
  Synthetic oligonucleotide: BID-384
cacugugaaccaggagugag

SEQ ID NO: 11141 - RNA, 20 nt, Artificial Sequence
  Synthetic oligonucleotide: BID-68
acugugaaccaggagugagu

SEQ ID NO: 11142 - RNA, 20 nt, Artificial Sequence
  Synthetic oligonucleotide: BID-386
gcugccgcgcugcccaggcc

SEQ ID NO: 11143 - RNA, 20 nt, Artificial Sequence
  Synthetic oligonucleotide: BID-387
cgcugcccaggccauggacu

SEQ ID NO: 11144 - RNA, 20 nt, Artificial Sequence
  Synthetic oligonucleotide: BID-388
caggccauggacugugaggu

SEQ ID NO: 11145 - RNA, 20 nt, Artificial Sequence
  Synthetic oligonucleotide: BID-389
ggucagaggccagauccccu

SEQ ID NO: 11146 - RNA, 20 nt, Artificial Sequence
  Synthetic oligonucleotide: BID-390
gucaacaacgguuccagccu

SEQ ID NO: 11147 - RNA, 20 nt, Artificial Sequence
  Synthetic oligonucleotide: BID-106
ucaacaacgguuccagccuc

SEQ ID NO: 11148 - RNA, 20 nt, Artificial Sequence
  Synthetic oligonucleotide: BID-392
caacgguuccagccucaggg

SEQ ID NO: 11149 - RNA, 20 nt, Artificial Sequence
  Synthetic oligonucleotide: BID-393
uguucugacaacagcuuccg

SEQ ID NO: 11150 - RNA, 20 nt, Artificial Sequence
  Synthetic oligonucleotide: BID-394
uucugacaacagcuuccgca

SEQ ID NO: 11151 - RNA, 20 nt, Artificial Sequence
  Synthetic oligonucleotide: BID-395
acaacagcuuccgcagagag

SEQ ID NO: 11152 - RNA, 20 nt, Artificial Sequence
  Synthetic oligonucleotide: BID-396
uccgcagagagcuggacgca

SEQ ID NO: 11153 - RNA, 20 nt, Artificial Sequence
  Synthetic oligonucleotide: BID-397
agagcuggacgcacugggcc

SEQ ID NO: 11154 - RNA, 20 nt, Artificial Sequence
  Synthetic oligonucleotide: BID-398
cugccagugcuggcucccca

SEQ ID NO: 11155 - RNA, 20 nt, Artificial Sequence
  Synthetic oligonucleotide: BID-139
ugccagugcuggcuccccag

SEQ ID NO: 11156 - RNA, 20 nt, Artificial Sequence
  Synthetic oligonucleotide: BID-128
gccagugcuggcuccccagu

SEQ ID NO: 11157 - RNA, 20 nt, Artificial Sequence
  Synthetic oligonucleotide: BID-401
cagugcuggcuccccagugg

SEQ ID NO: 11158 - RNA, 20 nt, Artificial Sequence
  Synthetic oligonucleotide: BID-402
uccccagugggagggcuacg

SEQ ID NO: 11159 - RNA, 20 nt, Artificial Sequence
  Synthetic oligonucleotide: BID-403
accgcagcagccacucccgc

SEQ ID NO: 11160 - RNA, 20 nt, Artificial Sequence
  Synthetic oligonucleotide: BID-137
ccgcagcagccacucccgcu

SEQ ID NO: 11161 - RNA, 20 nt, Artificial Sequence
  Synthetic oligonucleotide: BID-113
cgcagcagccacucccgcuu

SEQ ID NO: 11162 - RNA, 20 nt, Artificial Sequence
  Synthetic oligonucleotide: BID-406
agcagccacucccgcuuggg

SEQ ID NO: 11163 - RNA, 20 nt, Artificial Sequence
  Synthetic oligonucleotide: BID-407
ccacucccgcuugggaagaa

SEQ ID NO: 11164 - RNA, 20 nt, Artificial Sequence
  Synthetic oligonucleotide: BID-408
ucugucucugccgccccugc

SEQ ID NO: 11165 - RNA, 20 nt, Artificial Sequence
  Synthetic oligonucleotide: BID-409
ccccugccugaacacagauu

SEQ ID NO: 11166 - RNA, 20 nt, Artificial Sequence
  Synthetic oligonucleotide: BID-410
gaacacagauucugaaaguc

SEQ ID NO: 11167 - RNA, 20 nt, Artificial Sequence
  Synthetic oligonucleotide: BID-411
gaaagucaagaagacaucau

SEQ ID NO: 11168 - RNA, 20 nt, Artificial Sequence
  Synthetic oligonucleotide: BID-224
aaagucaagaagacaucauc

SEQ ID NO: 11169 - RNA, 20 nt, Artificial Sequence
  Synthetic oligonucleotide: BID-413
ugccaggcaccucgcccagg

SEQ ID NO: 11170 - RNA, 20 nt, Artificial Sequence
  Synthetic oligonucleotide: BID-219
gccaggcaccucgcccaggu

SEQ ID NO: 11171 - RNA, 20 nt, Artificial Sequence
  Synthetic oligonucleotide: BID-234
ccaggcaccucgcccagguc

SEQ ID NO: 11172 - RNA, 20 nt, Artificial Sequence
  Synthetic oligonucleotide: BID-416
ucgcccaggucggggacagc

SEQ ID NO: 11173 - RNA, 20 nt, Artificial Sequence
  Synthetic oligonucleotide: BID-417
gcauggaccguagcaucccu

SEQ ID NO: 11174 - RNA, 20 nt, Artificial Sequence
  Synthetic oligonucleotide: BID-418
guagcaucccuccgggccug

SEQ ID NO: 11175 - RNA, 20 nt, Artificial Sequence
  Synthetic oligonucleotide: BID-419
aacggccuggcccugcagcu

SEQ ID NO: 11176 - RNA, 20 nt, Artificial Sequence
  Synthetic oligonucleotide: BID-232
acggccuggcccugcagcuc

SEQ ID NO: 11177 - RNA, 20 nt, Artificial Sequence
  Synthetic oligonucleotide: BID-421
agcucaggaacaccagccgg

SEQ ID NO: 11178 - RNA, 20 nt, Artificial Sequence
  Synthetic oligonucleotide: BID-214
gcucaggaacaccagccggu

SEQ ID NO: 11179 - RNA, 20 nt, Artificial Sequence
  Synthetic oligonucleotide: BID-423
ucaggaacaccagccggucg

SEQ ID NO: 11180 - RNA, 20 nt, Artificial Sequence
  Synthetic oligonucleotide: BID-200
caggaacaccagccggucgg

SEQ ID NO: 11181 - RNA, 20 nt, Artificial Sequence
  Synthetic oligonucleotide: BID-425
acaccagccggucggaggag

SEQ ID NO: 11182 - RNA, 20 nt, Artificial Sequence
  Synthetic oligonucleotide: BID-426
cagccggucggaggagguga

SEQ ID NO: 11183 - RNA, 20 nt, Artificial Sequence
  Synthetic oligonucleotide: BID-427
gccggucggaggaggugagu

SEQ ID NO: 11184 - RNA, 20 nt, Artificial Sequence
  Synthetic oligonucleotide: BID-428
cggaggaggugagugagggc

SEQ ID NO: 11185 - RNA, 20 nt, Artificial Sequence
  Synthetic oligonucleotide: BID-429
gaggaggugagugagggccu

SEQ ID NO: 11186 - RNA, 20 nt, Artificial Sequence
  Synthetic oligonucleotide: BID-430
agugagggccugaggaccgc

SEQ ID NO: 11187 - RNA, 17 nt, Artificial Sequence
  Synthetic oligonucleotide: BID-431
ucauucauucaacaaau

SEQ ID NO: 11188 - RNA, 17 nt, Artificial Sequence
  Synthetic oligonucleotide: BID-432
acgaaugugcagcggug

SEQ ID NO: 11189 - RNA, 17 nt, Artificial Sequence
  Synthetic oligonucleotide: BID-26
cgaaugugcagcggugc

SEQ ID NO: 11190 - RNA, 17 nt, Artificial Sequence
  Synthetic oligonucleotide: BID-434
ggggucaugauggcucg

SEQ ID NO: 11191 - RNA, 17 nt, Artificial Sequence
  Synthetic oligonucleotide: BID-435
ugauggcucggugggca

SEQ ID NO: 11192 - RNA, 17 nt, Artificial Sequence
  Synthetic oligonucleotide: BID-436
auggcucggugggcagc

SEQ ID NO: 11193 - RNA, 17 nt, Artificial Sequence
  Synthetic oligonucleotide: BID-39
uggcucggugggcagcg

SEQ ID NO: 11194 - RNA, 17 nt, Artificial Sequence
  Synthetic oligonucleotide: BID-438
cggugggcagcgagggg

SEQ ID NO: 11195 - RNA, 17 nt, Artificial Sequence
  Synthetic oligonucleotide: BID-439
gcgaggggccgggccgg

SEQ ID NO: 11196 - RNA, 17 nt, Artificial Sequence
  Synthetic oligonucleotide: BID-48
cgaggggccgggccggc

SEQ ID NO: 11197 - RNA, 17 nt, Artificial Sequence
  Synthetic oligonucleotide: BID-441
aggggccgggccggcug

SEQ ID NO: 11198 - RNA, 17 nt, Artificial Sequence
  Synthetic oligonucleotide: BID-53
ggggccgggccggcugg

SEQ ID NO: 11199 - RNA, 17 nt, Artificial Sequence
  Synthetic oligonucleotide: BID-443
ggcuggaggagcacagu

SEQ ID NO: 11200 - RNA, 17 nt, Artificial Sequence
  Synthetic oligonucleotide: BID-444
cagugcggauucuguaa

SEQ ID NO: 11201 - RNA, 17 nt, Artificial Sequence
  Synthetic oligonucleotide: BID-445
cggauucuguaaguggg

SEQ ID NO: 11202 - RNA, 17 nt, Artificial Sequence
  Synthetic oligonucleotide: BID-38
ggauucuguaagugggc

SEQ ID NO: 11203 - RNA, 17 nt, Artificial Sequence
  Synthetic oligonucleotide: BID-42
gauucuguaagugggcu

SEQ ID NO: 11204 - RNA, 17 nt, Artificial Sequence
  Synthetic oligonucleotide: BID-448
uguaagugggcuggggg

SEQ ID NO: 11205 - RNA, 17 nt, Artificial Sequence
  Synthetic oligonucleotide: BID-449
cccuuuccaggucgcca

SEQ ID NO: 11206 - RNA, 17 nt, Artificial Sequence
  Synthetic oligonucleotide: BID-80
ccuuuccaggucgccac

SEQ ID NO: 11207 - RNA, 17 nt, Artificial Sequence
  Synthetic oligonucleotide: BID-451
gucgccacugggacacu

SEQ ID NO: 11208 - RNA, 17 nt, Artificial Sequence
  Synthetic oligonucleotide: BID-452
acugggacacugugaac

SEQ ID NO: 11209 - RNA, 17 nt, Artificial Sequence
  Synthetic oligonucleotide: BID-87
cugggacacugugaacc

SEQ ID NO: 11210 - RNA, 17 nt, Artificial Sequence
  Synthetic oligonucleotide: BID-454
gacacugugaaccagga

SEQ ID NO: 11211 - RNA, 17 nt, Artificial Sequence
  Synthetic oligonucleotide: BID-455
ugugaaccaggagugag

SEQ ID NO: 11212 - RNA, 17 nt, Artificial Sequence
  Synthetic oligonucleotide: BID-85
gugaaccaggagugagu

SEQ ID NO: 11213 - RNA, 17 nt, Artificial Sequence
  Synthetic oligonucleotide: BID-457
gccgcgcugcccaggcc

SEQ ID NO: 11214 - RNA, 17 nt, Artificial Sequence
  Synthetic oligonucleotide: BID-458
ugcccaggccauggacu

SEQ ID NO: 11215 - RNA, 17 nt, Artificial Sequence
  Synthetic oligonucleotide: BID-459
gccauggacugugaggu

SEQ ID NO: 11216 - RNA, 17 nt, Artificial Sequence
  Synthetic oligonucleotide: BID-460
cagaggccagauccccu

SEQ ID NO: 11217 - RNA, 17 nt, Artificial Sequence
  Synthetic oligonucleotide: BID-461
aacaacgguuccagccu

SEQ ID NO: 11218 - RNA, 17 nt, Artificial Sequence
  Synthetic oligonucleotide: BID-153
acaacgguuccagccuc

SEQ ID NO: 11219 - RNA, 17 nt, Artificial Sequence
  Synthetic oligonucleotide: BID-463
cgguuccagccucaggg

SEQ ID NO: 11220 - RNA, 17 nt, Artificial Sequence
  Synthetic oligonucleotide: BID-464
ucugacaacagcuuccg

SEQ ID NO: 11221 - RNA, 17 nt, Artificial Sequence
  Synthetic oligonucleotide: BID-465
ugacaacagcuuccgca

SEQ ID NO: 11222 - RNA, 17 nt, Artificial Sequence
  Synthetic oligonucleotide: BID-466
acagcuuccgcagagag

SEQ ID NO: 11223 - RNA, 17 nt, Artificial Sequence
  Synthetic oligonucleotide: BID-467
gcagagagcuggacgca

SEQ ID NO: 11224 - RNA, 17 nt, Artificial Sequence
  Synthetic oligonucleotide: BID-468
gcuggacgcacugggcc

SEQ ID NO: 11225 - RNA, 17 nt, Artificial Sequence
  Synthetic oligonucleotide: BID-469
ccagugcuggcucccca

SEQ ID NO: 11226 - RNA, 17 nt, Artificial Sequence
  Synthetic oligonucleotide: BID-182
cagugcuggcuccccag

SEQ ID NO: 11227 - RNA, 17 nt, Artificial Sequence
  Synthetic oligonucleotide: BID-188
agugcuggcuccccagu

SEQ ID NO: 11228 - RNA, 17 nt, Artificial Sequence
  Synthetic oligonucleotide: BID-472
ugcuggcuccccagugg

SEQ ID NO: 11229 - RNA, 17 nt, Artificial Sequence
  Synthetic oligonucleotide: BID-473
ccagugggagggcuacg

SEQ ID NO: 11230 - RNA, 17 nt, Artificial Sequence
  Synthetic oligonucleotide: BID-474
gcagcagccacucccgc

SEQ ID NO: 11231 - RNA, 17 nt, Artificial Sequence
  Synthetic oligonucleotide: BID-189
cagcagccacucccgcu

SEQ ID NO: 11232 - RNA, 17 nt, Artificial Sequence
  Synthetic oligonucleotide: BID-158
agcagccacucccgcuu

SEQ ID NO: 11233 - RNA, 17 nt, Artificial Sequence
  Synthetic oligonucleotide: BID-477
agccacucccgcuuggg

SEQ ID NO: 11234 - RNA, 17 nt, Artificial Sequence
  Synthetic oligonucleotide: BID-478
cucccgcuugggaagaa

SEQ ID NO: 11235 - RNA, 17 nt, Artificial Sequence
  Synthetic oligonucleotide: BID-479
gucucugccgccccugc

SEQ ID NO: 11236 - RNA, 17 nt, Artificial Sequence
  Synthetic oligonucleotide: BID-480
cugccugaacacagauu

SEQ ID NO: 11237 - RNA, 17 nt, Artificial Sequence
  Synthetic oligonucleotide: BID-481
cacagauucugaaaguc

SEQ ID NO: 11238 - RNA, 17 nt, Artificial Sequence
  Synthetic oligonucleotide: BID-482
agucaagaagacaucau

SEQ ID NO: 11239 - RNA, 17 nt, Artificial Sequence
  Synthetic oligonucleotide: BID-258
gucaagaagacaucauc

SEQ ID NO: 11240 - RNA, 17 nt, Artificial Sequence
  Synthetic oligonucleotide: BID-484
caggcaccucgcccagg

SEQ ID NO: 11241 - RNA, 17 nt, Artificial Sequence
  Synthetic oligonucleotide: BID-264
aggcaccucgcccaggu

SEQ ID NO: 11242 - RNA, 17 nt, Artificial Sequence
  Synthetic oligonucleotide: BID-263
ggcaccucgcccagguc

SEQ ID NO: 11243 - RNA, 17 nt, Artificial Sequence
  Synthetic oligonucleotide: BID-487
cccaggucggggacagc

SEQ ID NO: 11244 - RNA, 17 nt, Artificial Sequence
  Synthetic oligonucleotide: BID-488
uggaccguagcaucccu

SEQ ID NO: 11245 - RNA, 17 nt, Artificial Sequence
  Synthetic oligonucleotide: BID-489
gcaucccuccgggccug

SEQ ID NO: 11246 - RNA, 17 nt, Artificial Sequence
  Synthetic oligonucleotide: BID-490
ggccuggcccugcagcu

SEQ ID NO: 11247 - RNA, 17 nt, Artificial Sequence
  Synthetic oligonucleotide: BID-277
gccuggcccugcagcuc

SEQ ID NO: 11248 - RNA, 17 nt, Artificial Sequence
  Synthetic oligonucleotide: BID-492
ucaggaacaccagccgg

SEQ ID NO: 11249 - RNA, 17 nt, Artificial Sequence
  Synthetic oligonucleotide: BID-250
caggaacaccagccggu

SEQ ID NO: 11250 - RNA, 17 nt, Artificial Sequence
  Synthetic oligonucleotide: BID-494
ggaacaccagccggucg

SEQ ID NO: 11251 - RNA, 17 nt, Artificial Sequence
  Synthetic oligonucleotide: BID-231
gaacaccagccggucgg

SEQ ID NO: 11252 - RNA, 17 nt, Artificial Sequence
  Synthetic oligonucleotide: BID-496
ccagccggucggaggag

SEQ ID NO: 11253 - RNA, 17 nt, Artificial Sequence
  Synthetic oligonucleotide: BID-497
ccggucggaggagguga

SEQ ID NO: 11254 - RNA, 17 nt, Artificial Sequence
  Synthetic oligonucleotide: BID-498
ggucggaggaggugagu

SEQ ID NO: 11255 - RNA, 17 nt, Artificial Sequence
  Synthetic oligonucleotide: BID-499
aggaggugagugagggc

SEQ ID NO: 11256 - RNA, 17 nt, Artificial Sequence
  Synthetic oligonucleotide: BID-500
gaggugagugagggccu

SEQ ID NO: 11257 - RNA, 17 nt, Artificial Sequence
  Synthetic oligonucleotide: BID-501
gagggccugaggaccgc

SEQ ID NO: 11258 - RNA, 20 nt, Artificial Sequence
  Synthetic oligonucleotide: BID-502
ccuccgaccggcugguguuc

SEQ ID NO: 11259 - RNA, 20 nt, Artificial Sequence
  Synthetic oligonucleotide: BID-503
cggcugguguuccugagcug

SEQ ID NO: 11260 - RNA, 20 nt, Artificial Sequence
  Synthetic oligonucleotide: BID-504
ggccaggccguucaccaggc

SEQ ID NO: 11261 - RNA, 20 nt, Artificial Sequence
  Synthetic oligonucleotide: BID-229
gccaggccguucaccaggcc

SEQ ID NO: 11262 - RNA, 20 nt, Artificial Sequence
  Synthetic oligonucleotide: BID-506
caggccguucaccaggcccg

SEQ ID NO: 11263 - RNA, 20 nt, Artificial Sequence
  Synthetic oligonucleotide: BID-195
aggccguucaccaggcccgg

SEQ ID NO: 11264 - RNA, 20 nt, Artificial Sequence
  Synthetic oligonucleotide: BID-508
cgguccaugcuguccccgac

SEQ ID NO: 11265 - RNA, 20 nt, Artificial Sequence
  Synthetic oligonucleotide: BID-509
ccaugcuguccccgaccugg

SEQ ID NO: 11266 - RNA, 20 nt, Artificial Sequence
  Synthetic oligonucleotide: BID-510
gcgaggugccuggcaauauu

SEQ ID NO: 11267 - RNA, 20 nt, Artificial Sequence
  Synthetic oligonucleotide: BID-511
gaugaugucuucuugacuuu

SEQ ID NO: 11268 - RNA, 20 nt, Artificial Sequence
  Synthetic oligonucleotide: BID-512
uuucagaaucuguguucagg

SEQ ID NO: 11269 - RNA, 20 nt, Artificial Sequence
  Synthetic oligonucleotide: BID-226
uucagaaucuguguucaggc

SEQ ID NO: 11270 - RNA, 20 nt, Artificial Sequence
  Synthetic oligonucleotide: BID-514
cuguguucaggcaggggcgg

SEQ ID NO: 11271 - RNA, 20 nt, Artificial Sequence
  Synthetic oligonucleotide: BID-515
ccugccucuauucuucccaa

SEQ ID NO: 11272 - RNA, 20 nt, Artificial Sequence
  Synthetic oligonucleotide: BID-141
cugccucuauucuucccaag

SEQ ID NO: 11273 - RNA, 20 nt, Artificial Sequence
  Synthetic oligonucleotide: BID-123
ugccucuauucuucccaagc

SEQ ID NO: 11274 - RNA, 20 nt, Artificial Sequence
  Synthetic oligonucleotide: BID-518
agcucaucguagcccuccca

SEQ ID NO: 11275 - RNA, 20 nt, Artificial Sequence
  Synthetic oligonucleotide: BID-104
gcucaucguagcccucccac

SEQ ID NO: 11276 - RNA, 20 nt, Artificial Sequence
  Synthetic oligonucleotide: BID-109
cucaucguagcccucccacu

SEQ ID NO: 11277 - RNA, 20 nt, Artificial Sequence
  Synthetic oligonucleotide: BID-134
ucaucguagcccucccacug

SEQ ID NO: 11278 - RNA, 20 nt, Artificial Sequence
  Synthetic oligonucleotide: BID-522
cccagugcguccagcucucu

SEQ ID NO: 11279 - RNA, 20 nt, Artificial Sequence
  Synthetic oligonucleotide: BID-131
ccagugcguccagcucucug

SEQ ID NO: 11280 - RNA, 20 nt, Artificial Sequence
  Synthetic oligonucleotide: BID-524
cucucugcggaagcuguugu

SEQ ID NO: 11281 - RNA, 20 nt, Artificial Sequence
  Synthetic oligonucleotide: BID-525
aagcuguugucagaacagcu

SEQ ID NO: 11282 - RNA, 20 nt, Artificial Sequence
  Synthetic oligonucleotide: BID-136
agcuguugucagaacagcuu

SEQ ID NO: 11283 - RNA, 20 nt, Artificial Sequence
  Synthetic oligonucleotide: BID-527
cuguugucagaacagcuuug

SEQ ID NO: 11284 - RNA, 20 nt, Artificial Sequence
  Synthetic oligonucleotide: BID-122
uguugucagaacagcuuugg

SEQ ID NO: 11285 - RNA, 20 nt, Artificial Sequence
  Synthetic oligonucleotide: BID-529
gguuugugaugcacucaucc

SEQ ID NO: 11286 - RNA, 20 nt, Artificial Sequence
  Synthetic oligonucleotide: BID-530
ugaugcacucaucccugagg

SEQ ID NO: 11287 - RNA, 20 nt, Artificial Sequence
  Synthetic oligonucleotide: BID-126
gaugcacucaucccugaggc

SEQ ID NO: 11288 - RNA, 20 nt, Artificial Sequence
  Synthetic oligonucleotide: BID-532
aggcuggaaccguuguugac

SEQ ID NO: 11289 - RNA, 20 nt, Artificial Sequence
  Synthetic oligonucleotide: BID-533
gcuggaaccguuguugaccu

SEQ ID NO: 11290 - RNA, 20 nt, Artificial Sequence
  Synthetic oligonucleotide: BID-118
cuggaaccguuguugaccug

SEQ ID NO: 11291 - RNA, 20 nt, Artificial Sequence
  Synthetic oligonucleotide: BID-105
uggaaccguuguugaccuga

SEQ ID NO: 11292 - RNA, 20 nt, Artificial Sequence
  Synthetic oligonucleotide: BID-107
ggaaccguuguugaccugag

SEQ ID NO: 11293 - RNA, 20 nt, Artificial Sequence
  Synthetic oligonucleotide: BID-537
ccguuguugaccugagggga

SEQ ID NO: 11294 - RNA, 20 nt, Artificial Sequence
  Synthetic oligonucleotide: BID-114
cguuguugaccugaggggaa

SEQ ID NO: 11295 - RNA, 20 nt, Artificial Sequence
  Synthetic oligonucleotide: BID-135
guuguugaccugaggggaaa

SEQ ID NO: 11296 - RNA, 20 nt, Artificial Sequence
  Synthetic oligonucleotide: BID-130
uuguugaccugaggggaaag

SEQ ID NO: 11297 - RNA, 20 nt, Artificial Sequence
  Synthetic oligonucleotide: BID-541
accugaggggaaaggggagu

SEQ ID NO: 11298 - RNA, 20 nt, Artificial Sequence
  Synthetic oligonucleotide: BID-144
ccugaggggaaaggggaguc

SEQ ID NO: 11299 - RNA, 20 nt, Artificial Sequence
  Synthetic oligonucleotide: BID-543
gggaaaggggagucaggaag

SEQ ID NO: 11300 - RNA, 20 nt, Artificial Sequence
  Synthetic oligonucleotide: BID-544
cugaccucacaguccauggc

SEQ ID NO: 11301 - RNA, 20 nt, Artificial Sequence
  Synthetic oligonucleotide: BID-545
cacagugucccaguggcgac

SEQ ID NO: 11302 - RNA, 20 nt, Artificial Sequence
  Synthetic oligonucleotide: BID-60
acagugucccaguggcgacc

SEQ ID NO: 11303 - RNA, 20 nt, Artificial Sequence
  Synthetic oligonucleotide: BID-547
ugucccaguggcgaccugga

SEQ ID NO: 11304 - RNA, 20 nt, Artificial Sequence
  Synthetic oligonucleotide: BID-58
gucccaguggcgaccuggaa

SEQ ID NO: 11305 - RNA, 20 nt, Artificial Sequence
  Synthetic oligonucleotide: BID-549
gcgaccuggaaagggacaca

SEQ ID NO: 11306 - RNA, 20 nt, Artificial Sequence
  Synthetic oligonucleotide: BID-550
ccuggaaagggacacacaga

SEQ ID NO: 11307 - RNA, 20 nt, Artificial Sequence
  Synthetic oligonucleotide: BID-551
cccagcccccagcccacuua

SEQ ID NO: 11308 - RNA, 20 nt, Artificial Sequence
  Synthetic oligonucleotide: BID-552
gcccggccccucgcugccca

SEQ ID NO: 11309 - RNA, 20 nt, Artificial Sequence
  Synthetic oligonucleotide: BID-553
ccgcugcacauucguauuug

SEQ ID NO: 11310 - RNA, 20 nt, Artificial Sequence
  Synthetic oligonucleotide: BID-554
ugcacauucguauuuguuga

SEQ ID NO: 11311 - RNA, 20 nt, Artificial Sequence
  Synthetic oligonucleotide: BID-555
cauucguauuuguugaauga

SEQ ID NO: 11312 - RNA, 20 nt, Artificial Sequence
  Synthetic oligonucleotide: BID-556
cguauuuguugaaugaauga

SEQ ID NO: 11313 - RNA, 17 nt, Artificial Sequence
  Synthetic oligonucleotide: BID-557
ccgaccggcugguguuc

SEQ ID NO: 11314 - RNA, 17 nt, Artificial Sequence
  Synthetic oligonucleotide: BID-558
cugguguuccugagcug

SEQ ID NO: 11315 - RNA, 17 nt, Artificial Sequence
  Synthetic oligonucleotide: BID-559
caggccguucaccaggc

SEQ ID NO: 11316 - RNA, 17 nt, Artificial Sequence
  Synthetic oligonucleotide: BID-256
aggccguucaccaggcc

SEQ ID NO: 11317 - RNA, 17 nt, Artificial Sequence
  Synthetic oligonucleotide: BID-561
gccguucaccaggcccg

SEQ ID NO: 11318 - RNA, 17 nt, Artificial Sequence
  Synthetic oligonucleotide: BID-242
ccguucaccaggcccgg

SEQ ID NO: 11319 - RNA, 17 nt, Artificial Sequence
  Synthetic oligonucleotide: BID-563
uccaugcuguccccgac

SEQ ID NO: 11320 - RNA, 17 nt, Artificial Sequence
  Synthetic oligonucleotide: BID-564
ugcuguccccgaccugg

SEQ ID NO: 11321 - RNA, 17 nt, Artificial Sequence
  Synthetic oligonucleotide: BID-565
aggugccuggcaauauu

SEQ ID NO: 11322 - RNA, 17 nt, Artificial Sequence
  Synthetic oligonucleotide: BID-566
gaugucuucuugacuuu

SEQ ID NO: 11323 - RNA, 17 nt, Artificial Sequence
  Synthetic oligonucleotide: BID-567
cagaaucuguguucagg

SEQ ID NO: 11324 - RNA, 17 nt, Artificial Sequence
  Synthetic oligonucleotide: BID-268
agaaucuguguucaggc

SEQ ID NO: 11325 - RNA, 17 nt, Artificial Sequence
  Synthetic oligonucleotide: BID-569
uguucaggcaggggcgg

SEQ ID NO: 11326 - RNA, 17 nt, Artificial Sequence
  Synthetic oligonucleotide: BID-570
gccucuauucuucccaa

SEQ ID NO: 11327 - RNA, 17 nt, Artificial Sequence
  Synthetic oligonucleotide: BID-165
ccucuauucuucccaag

SEQ ID NO: 11328 - RNA, 17 nt, Artificial Sequence
  Synthetic oligonucleotide: BID-178
cucuauucuucccaagc

SEQ ID NO: 11329 - RNA, 17 nt, Artificial Sequence
  Synthetic oligonucleotide: BID-573
ucaucguagcccuccca

SEQ ID NO: 11330 - RNA, 17 nt, Artificial Sequence
  Synthetic oligonucleotide: BID-151
caucguagcccucccac

SEQ ID NO: 11331 - RNA, 17 nt, Artificial Sequence
  Synthetic oligonucleotide: BID-152
aucguagcccucccacu

SEQ ID NO: 11332 - RNA, 17 nt, Artificial Sequence
  Synthetic oligonucleotide: BID-148
ucguagcccucccacug

SEQ ID NO: 11333 - RNA, 17 nt, Artificial Sequence
  Synthetic oligonucleotide: BID-577
agugcguccagcucucu

SEQ ID NO: 11334 - RNA, 17 nt, Artificial Sequence
  Synthetic oligonucleotide: BID-167
gugcguccagcucucug

SEQ ID NO: 11335 - RNA, 17 nt, Artificial Sequence
  Synthetic oligonucleotide: BID-579
ucugcggaagcuguugu

SEQ ID NO: 11336 - RNA, 17 nt, Artificial Sequence
  Synthetic oligonucleotide: BID-580
cuguugucagaacagcu

SEQ ID NO: 11337 - RNA, 17 nt, Artificial Sequence
  Synthetic oligonucleotide: BID-173
uguugucagaacagcuu

SEQ ID NO: 11338 - RNA, 17 nt, Artificial Sequence
  Synthetic oligonucleotide: BID-582
uugucagaacagcuuug

SEQ ID NO: 11339 - RNA, 17 nt, Artificial Sequence
  Synthetic oligonucleotide: BID-177
ugucagaacagcuuugg

SEQ ID NO: 11340 - RNA, 17 nt, Artificial Sequence
  Synthetic oligonucleotide: BID-584
uugugaugcacucaucc

SEQ ID NO: 11341 - RNA, 17 nt, Artificial Sequence
  Synthetic oligonucleotide: BID-585
ugcacucaucccugagg

SEQ ID NO: 11342 - RNA, 17 nt, Artificial Sequence
  Synthetic oligonucleotide: BID-168
gcacucaucccugaggc

SEQ ID NO: 11343 - RNA, 17 nt, Artificial Sequence
  Synthetic oligonucleotide: BID-587
cuggaaccguuguugac

SEQ ID NO: 11344 - RNA, 17 nt, Artificial Sequence
  Synthetic oligonucleotide: BID-588
ggaaccguuguugaccu

SEQ ID NO: 11345 - RNA, 17 nt, Artificial Sequence
  Synthetic oligonucleotide: BID-157
gaaccguuguugaccug

SEQ ID NO: 11346 - RNA, 17 nt, Artificial Sequence
  Synthetic oligonucleotide: BID-143
aaccguuguugaccuga

SEQ ID NO: 11347 - RNA, 17 nt, Artificial Sequence
  Synthetic oligonucleotide: BID-150
accguuguugaccugag

SEQ ID NO: 11348 - RNA, 17 nt, Artificial Sequence
  Synthetic oligonucleotide: BID-592
uuguugaccugagggga

SEQ ID NO: 11349 - RNA, 17 nt, Artificial Sequence
  Synthetic oligonucleotide: BID-175
uguugaccugaggggaa

SEQ ID NO: 11350 - RNA, 17 nt, Artificial Sequence
  Synthetic oligonucleotide: BID-170
guugaccugaggggaaa

SEQ ID NO: 11351 - RNA, 17 nt, Artificial Sequence
  Synthetic oligonucleotide: BID-172
uugaccugaggggaaag

SEQ ID NO: 11352 - RNA, 17 nt, Artificial Sequence
  Synthetic oligonucleotide: BID-596
ugaggggaaaggggagu

SEQ ID NO: 11353 - RNA, 17 nt, Artificial Sequence
  Synthetic oligonucleotide: BID-191
gaggggaaaggggaguc

SEQ ID NO: 11354 - RNA, 17 nt, Artificial Sequence
  Synthetic oligonucleotide: BID-598
aaaggggagucaggaag

SEQ ID NO: 11355 - RNA, 17 nt, Artificial Sequence
  Synthetic oligonucleotide: BID-599
accucacaguccauggc

SEQ ID NO: 11356 - RNA, 17 nt, Artificial Sequence
  Synthetic oligonucleotide: BID-600
agugucccaguggcgac

SEQ ID NO: 11357 - RNA, 17 nt, Artificial Sequence
  Synthetic oligonucleotide: BID-81
gugucccaguggcgacc

SEQ ID NO: 11358 - RNA, 17 nt, Artificial Sequence
  Synthetic oligonucleotide: BID-602
cccaguggcgaccugga

SEQ ID NO: 11359 - RNA, 17 nt, Artificial Sequence
  Synthetic oligonucleotide: BID-91
ccaguggcgaccuggaa

SEQ ID NO: 11360 - RNA, 17 nt, Artificial Sequence
  Synthetic oligonucleotide: BID-604
accuggaaagggacaca

SEQ ID NO: 11361 - RNA, 17 nt, Artificial Sequence
  Synthetic oligonucleotide: BID-605
ggaaagggacacacaga

SEQ ID NO: 11362 - RNA, 17 nt, Artificial Sequence
  Synthetic oligonucleotide: BID-606
agcccccagcccacuua

SEQ ID NO: 11363 - RNA, 17 nt, Artificial Sequence
  Synthetic oligonucleotide: BID-607
cggccccucgcugccca

SEQ ID NO: 11364 - RNA, 17 nt, Artificial Sequence
  Synthetic oligonucleotide: BID-608
cugcacauucguauuug

SEQ ID NO: 11365 - RNA, 17 nt, Artificial Sequence
  Synthetic oligonucleotide: BID-609
acauucguauuuguuga

SEQ ID NO: 11366 - RNA, 17 nt, Artificial Sequence
  Synthetic oligonucleotide: BID-610
ucguauuuguugaauga

SEQ ID NO: 11367 - RNA, 17 nt, Artificial Sequence
  Synthetic oligonucleotide: BID-611
auuuguugaaugaauga

SEQ ID NO: 11368 - RNA, 20 nt, Artificial Sequence
  Synthetic oligonucleotide: BID-612
guucugugugccccucugug

SEQ ID NO: 11369 - RNA, 20 nt, Artificial Sequence
  Synthetic oligonucleotide: BID-613
gugugccccucugugcagga

SEQ ID NO: 11370 - RNA, 20 nt, Artificial Sequence
  Synthetic oligonucleotide: BID-279
ugugccccucugugcaggac

SEQ ID NO: 11371 - RNA, 20 nt, Artificial Sequence
  Synthetic oligonucleotide: BID-615
cccucugugcaggaccggaa

SEQ ID NO: 11372 - RNA, 20 nt, Artificial Sequence
  Synthetic oligonucleotide: BID-280
ccucugugcaggaccggaac

SEQ ID NO: 11373 - RNA, 20 nt, Artificial Sequence
  Synthetic oligonucleotide: BID-617
acagggaccuggccacugcc

SEQ ID NO: 11374 - RNA, 20 nt, Artificial Sequence
  Synthetic oligonucleotide: BID-283
cagggaccuggccacugccc

SEQ ID NO: 11375 - RNA, 20 nt, Artificial Sequence
  Synthetic oligonucleotide: BID-619
cagcugcugcaggccuaccc

SEQ ID NO: 11376 - RNA, 20 nt, Artificial Sequence
  Synthetic oligonucleotide: BID-620
ugcaggccuacccuagagac

SEQ ID NO: 11377 - RNA, 20 nt, Artificial Sequence
  Synthetic oligonucleotide: BID-285
gcaggccuacccuagagaca

SEQ ID NO: 11378 - RNA, 20 nt, Artificial Sequence
  Synthetic oligonucleotide: BID-622
aggccuacccuagagacaug

SEQ ID NO: 11379 - RNA, 20 nt, Artificial Sequence
  Synthetic oligonucleotide: BID-623
ccuacccuagagacauggag

SEQ ID NO: 11380 - RNA, 20 nt, Artificial Sequence
  Synthetic oligonucleotide: BID-286
cuacccuagagacauggaga

SEQ ID NO: 11381 - RNA, 20 nt, Artificial Sequence
  Synthetic oligonucleotide: BID-625
acccuagagacauggagaag

SEQ ID NO: 11382 - RNA, 20 nt, Artificial Sequence
  Synthetic oligonucleotide: BID-626
ugcuggcccugcugcuggcc

SEQ ID NO: 11383 - RNA, 20 nt, Artificial Sequence
  Synthetic oligonucleotide: BID-627
gugaugucuuucacacaaca

SEQ ID NO: 11384 - RNA, 20 nt, Artificial Sequence
  Synthetic oligonucleotide: BID-628
caacagugaauuuuauuaac

SEQ ID NO: 11385 - RNA, 20 nt, Artificial Sequence
  Synthetic oligonucleotide: BID-629
accagaaccuacgcaccuac

SEQ ID NO: 11386 - RNA, 20 nt, Artificial Sequence
  Synthetic oligonucleotide: BID-630
cagaaccuacgcaccuacgu

SEQ ID NO: 11387 - RNA, 20 nt, Artificial Sequence
  Synthetic oligonucleotide: BID-292
agaaccuacgcaccuacgug

SEQ ID NO: 11388 - RNA, 20 nt, Artificial Sequence
  Synthetic oligonucleotide: BID-632
accuacgugaggagcuuagc

SEQ ID NO: 11389 - RNA, 20 nt, Artificial Sequence
  Synthetic oligonucleotide: BID-633
aggagcuuagccagaaaugu

SEQ ID NO: 11390 - RNA, 20 nt, Artificial Sequence
  Synthetic oligonucleotide: BID-634
agccagaaauguaagaaccc

SEQ ID NO: 11391 - RNA, 17 nt, Artificial Sequence
  Synthetic oligonucleotide: BID-635
cugugugccccucugug

SEQ ID NO: 11392 - RNA, 17 nt, Artificial Sequence
  Synthetic oligonucleotide: BID-636
ugccccucugugcagga

SEQ ID NO: 11393 - RNA, 17 nt, Artificial Sequence
  Synthetic oligonucleotide: BID-295
gccccucugugcaggac

SEQ ID NO: 11394 - RNA, 17 nt, Artificial Sequence
  Synthetic oligonucleotide: BID-638
ucugugcaggaccggaa

SEQ ID NO: 11395 - RNA, 17 nt, Artificial Sequence
  Synthetic oligonucleotide: BID-296
cugugcaggaccggaac

SEQ ID NO: 11396 - RNA, 17 nt, Artificial Sequence
  Synthetic oligonucleotide: BID-640
gggaccuggccacugcc

SEQ ID NO: 11397 - RNA, 17 nt, Artificial Sequence
  Synthetic oligonucleotide: BID-299
ggaccuggccacugccc

SEQ ID NO: 11398 - RNA, 17 nt, Artificial Sequence
  Synthetic oligonucleotide: BID-642
cugcugcaggccuaccc

SEQ ID NO: 11399 - RNA, 17 nt, Artificial Sequence
  Synthetic oligonucleotide: BID-643
aggccuacccuagagac

SEQ ID NO: 11400 - RNA, 17 nt, Artificial Sequence
  Synthetic oligonucleotide: BID-301
ggccuacccuagagaca

SEQ ID NO: 11401 - RNA, 17 nt, Artificial Sequence
  Synthetic oligonucleotide: BID-645
ccuacccuagagacaug

SEQ ID NO: 11402 - RNA, 17 nt, Artificial Sequence
  Synthetic oligonucleotide: BID-646
acccuagagacauggag

SEQ ID NO: 11403 - RNA, 17 nt, Artificial Sequence
  Synthetic oligonucleotide: BID-302
cccuagagacauggaga

SEQ ID NO: 11404 - RNA, 17 nt, Artificial Sequence
  Synthetic oligonucleotide: BID-648
cuagagacauggagaag

SEQ ID NO: 11405 - RNA, 17 nt, Artificial Sequence
  Synthetic oligonucleotide: BID-649
uggcccugcugcuggcc

SEQ ID NO: 11406 - RNA, 17 nt, Artificial Sequence
  Synthetic oligonucleotide: BID-650
augucuuucacacaaca

SEQ ID NO: 11407 - RNA, 17 nt, Artificial Sequence
  Synthetic oligonucleotide: BID-651
cagugaauuuuauuaac

SEQ ID NO: 11408 - RNA, 17 nt, Artificial Sequence
  Synthetic oligonucleotide: BID-652
agaaccuacgcaccuac

SEQ ID NO: 11409 - RNA, 17 nt, Artificial Sequence
  Synthetic oligonucleotide: BID-653
aaccuacgcaccuacgu

SEQ ID NO: 11410 - RNA, 17 nt, Artificial Sequence
  Synthetic oligonucleotide: BID-308
accuacgcaccuacgug

SEQ ID NO: 11411 - RNA, 17 nt, Artificial Sequence
  Synthetic oligonucleotide: BID-655
uacgugaggagcuuagc

SEQ ID NO: 11412 - RNA, 17 nt, Artificial Sequence
  Synthetic oligonucleotide: BID-656
agcuuagccagaaaugu

SEQ ID NO: 11413 - RNA, 17 nt, Artificial Sequence
  Synthetic oligonucleotide: BID-657
cagaaauguaagaaccc

SEQ ID NO: 11414 - RNA, 20 nt, Artificial Sequence
  Synthetic oligonucleotide: BID-658
uuaauaaaauucacuguugu

SEQ ID NO: 11415 - RNA, 20 nt, Artificial Sequence
  Synthetic oligonucleotide: BID-659
acuguugugugaaagacauc

SEQ ID NO: 11416 - RNA, 20 nt, Artificial Sequence
  Synthetic oligonucleotide: BID-315
cuguugugugaaagacauca

SEQ ID NO: 11417 - RNA, 20 nt, Artificial Sequence
  Synthetic oligonucleotide: BID-661
ugugaaagacaucacggagc

SEQ ID NO: 11418 - RNA, 20 nt, Artificial Sequence
  Synthetic oligonucleotide: BID-662
gccaccuucuuggccagcag

SEQ ID NO: 11419 - RNA, 20 nt, Artificial Sequence
  Synthetic oligonucleotide: BID-663
cuucuccuucuccaugucuc

SEQ ID NO: 11420 - RNA, 20 nt, Artificial Sequence
  Synthetic oligonucleotide: BID-664
uaggccugcagcagcugcuc

SEQ ID NO: 11421 - RNA, 20 nt, Artificial Sequence
  Synthetic oligonucleotide: BID-665
gucccuguuccgguccugca

SEQ ID NO: 11422 - RNA, 20 nt, Artificial Sequence
  Synthetic oligonucleotide: BID-666
cccuguuccgguccugcaca

SEQ ID NO: 11423 - RNA, 20 nt, Artificial Sequence
  Synthetic oligonucleotide: BID-331
ccuguuccgguccugcacag

SEQ ID NO: 11424 - RNA, 20 nt, Artificial Sequence
  Synthetic oligonucleotide: BID-668
guccugcacagaggggcaca

SEQ ID NO: 11425 - RNA, 17 nt, Artificial Sequence
  Synthetic oligonucleotide: BID-669
auaaaauucacuguugu

SEQ ID NO: 11426 - RNA, 17 nt, Artificial Sequence
  Synthetic oligonucleotide: BID-670
guugugugaaagacauc

SEQ ID NO: 11427 - RNA, 17 nt, Artificial Sequence
  Synthetic oligonucleotide: BID-340
uugugugaaagacauca

SEQ ID NO: 11428 - RNA, 17 nt, Artificial Sequence
  Synthetic oligonucleotide: BID-672
gaaagacaucacggagc

SEQ ID NO: 11429 - RNA, 17 nt, Artificial Sequence
  Synthetic oligonucleotide: BID-673
accuucuuggccagcag

SEQ ID NO: 11430 - RNA, 17 nt, Artificial Sequence
  Synthetic oligonucleotide: BID-674
cuccuucuccaugucuc

SEQ ID NO: 11431 - RNA, 17 nt, Artificial Sequence
  Synthetic oligonucleotide: BID-675
gccugcagcagcugcuc

SEQ ID NO: 11432 - RNA, 17 nt, Artificial Sequence
  Synthetic oligonucleotide: BID-676
ccuguuccgguccugca

SEQ ID NO: 11433 - RNA, 17 nt, Artificial Sequence
  Synthetic oligonucleotide: BID-677
uguuccgguccugcaca

SEQ ID NO: 11434 - RNA, 17 nt, Artificial Sequence
  Synthetic oligonucleotide: BID-356
guuccgguccugcacag

SEQ ID NO: 11435 - RNA, 17 nt, Artificial Sequence
  Synthetic oligonucleotide: BID-679
cugcacagaggggcaca

SEQ ID NO: 11436 - RNA, 20 nt, Artificial Sequence
  Synthetic oligonucleotide: BID-680
ggccggcuggaggagcacag

SEQ ID NO: 11437 - RNA, 20 nt, Artificial Sequence
  Synthetic oligonucleotide: BID-681
cucugccgccccugccugaa

SEQ ID NO: 11438 - RNA, 17 nt, Artificial Sequence
  Synthetic oligonucleotide: BID-682
cggcuggaggagcacag

SEQ ID NO: 11439 - RNA, 17 nt, Artificial Sequence
  Synthetic oligonucleotide: BID-683
ugccgccccugccugaa

SEQ ID NO: 11440 - RNA, 20 nt, Artificial Sequence
  Synthetic oligonucleotide: BID-2075
gaaaacccgcgggccuggcc

SEQ ID NO: 11441 - RNA, 20 nt, Artificial Sequence
  Synthetic oligonucleotide: BID-2171
gaaagaccacggugugggcg

SEQ ID NO: 11442 - RNA, 20 nt, Artificial Sequence
  Synthetic oligonucleotide: BID-1988
gaagcgcgcggggcgccaua

SEQ ID NO: 11443 - RNA, 20 nt, Artificial Sequence
  Synthetic oligonucleotide: BID-2099
gaaugaccccaggggacccu

SEQ ID NO: 11444 - RNA, 20 nt, Artificial Sequence
  Synthetic oligonucleotide: BID-2254
gacuacccgcuuccuccuua

SEQ ID NO: 11445 - RNA, 20 nt, Artificial Sequence
  Synthetic oligonucleotide: BID-2073
gaggagaaaacccgcgggcc

SEQ ID NO: 11446 - RNA, 20 nt, Artificial Sequence
  Synthetic oligonucleotide: BID-2040
gagggucggguccgccucgg

SEQ ID NO: 11447 - RNA, 20 nt, Artificial Sequence
  Synthetic oligonucleotide: BID-1989
gcgcgcggggcgccauaagg

SEQ ID NO: 11448 - RNA, 20 nt, Artificial Sequence
  Synthetic oligonucleotide: BID-5
gcggauucuguaagugggcu

SEQ ID NO: 11449 - RNA, 20 nt, Artificial Sequence
  Synthetic oligonucleotide: BID-2204
gcgggagagacccggcccuc

SEQ ID NO: 11450 - RNA, 20 nt, Artificial Sequence
  Synthetic oligonucleotide: BID-2083
gcuccucccgagcggagcuc

SEQ ID NO: 11451 - RNA, 20 nt, Artificial Sequence
  Synthetic oligonucleotide: BID-2238
gcucggcgcguaccccggga

SEQ ID NO: 11452 - RNA, 20 nt, Artificial Sequence
  Synthetic oligonucleotide: BID-2039
gcugagggucggguccgccu

SEQ ID NO: 11453 - RNA, 20 nt, Artificial Sequence
  Synthetic oligonucleotide: BID-2174
ggauuccgauccgccggcaa

SEQ ID NO: 11454 - RNA, 20 nt, Artificial Sequence
  Synthetic oligonucleotide: BID-2079
ggccacccuugccggcggau

SEQ ID NO: 11455 - RNA, 20 nt, Artificial Sequence
  Synthetic oligonucleotide: BID-2237
ggcucggcgcguaccccggg

SEQ ID NO: 11456 - RNA, 20 nt, Artificial Sequence
  Synthetic oligonucleotide: BID-2173
gggauuccgauccgccggca

SEQ ID NO: 11457 - RNA, 20 nt, Artificial Sequence
  Synthetic oligonucleotide: BID-1991
gggcgccauaaggaggaagc

SEQ ID NO: 11458 - RNA, 20 nt, Artificial Sequence
  Synthetic oligonucleotide: BID-2172
gggcggggauuccgauccgc

SEQ ID NO: 11459 - RNA, 20 nt, Artificial Sequence
  Synthetic oligonucleotide: BID-2088
ggucagagcggccgcuuacu

SEQ ID NO: 11460 - RNA, 20 nt, Artificial Sequence
  Synthetic oligonucleotide: BID-2041
ggucggguccgccucggagg

SEQ ID NO: 11461 - RNA, 20 nt, Artificial Sequence
  Synthetic oligonucleotide: BID-2089
gucagagcggccgcuuacug

SEQ ID NO: 11462 - RNA, 20 nt, Artificial Sequence
  Synthetic oligonucleotide: BID-1992
gucgaccguguccgcgcgcc

SEQ ID NO: 11463 - RNA, 20 nt, Artificial Sequence
  Synthetic oligonucleotide: BID-2042
gucggguccgccucggaggc

SEQ ID NO: 11464 - RNA, 20 nt, Artificial Sequence
  Synthetic oligonucleotide: BID-2253
gucucccaggcgcgcggaca

SEQ ID NO: 11465 - RNA, 20 nt, Artificial Sequence
  Synthetic oligonucleotide: BID-2078
gugcaggccacccuugccgg

SEQ ID NO: 11466 - RNA, 17 nt, Artificial Sequence
  Synthetic oligonucleotide: BID-31
gaaugugcagcggugcu

SEQ ID NO: 11467 - RNA, 17 nt, Artificial Sequence
  Synthetic oligonucleotide: BID-2263
gaccguguccgcgcgcc

SEQ ID NO: 11468 - RNA, 17 nt, Artificial Sequence
  Synthetic oligonucleotide: BID-2344
gagaaaacccgcgggcc

SEQ ID NO: 11469 - RNA, 17 nt, Artificial Sequence
  Synthetic oligonucleotide: BID-2310
gagggucggguccgccu

SEQ ID NO: 11470 - RNA, 17 nt, Artificial Sequence
  Synthetic oligonucleotide: BID-42
gauucuguaagugggcu

SEQ ID NO: 11471 - RNA, 17 nt, Artificial Sequence
  Synthetic oligonucleotide: BID-2437
gcaggugucugcggugc

SEQ ID NO: 11472 - RNA, 17 nt, Artificial Sequence
  Synthetic oligonucleotide: BID-2414
gccgguccagccgcaga

SEQ ID NO: 11473 - RNA, 17 nt, Artificial Sequence
  Synthetic oligonucleotide: BID-2259
gcgcgcggggcgccaua

SEQ ID NO: 11474 - RNA, 17 nt, Artificial Sequence
  Synthetic oligonucleotide: BID-2435
gcucgggaggagccggc

SEQ ID NO: 11475 - RNA, 17 nt, Artificial Sequence
  Synthetic oligonucleotide: BID-2476
ggagagacccggcccuc

SEQ ID NO: 11476 - RNA, 17 nt, Artificial Sequence
  Synthetic oligonucleotide: BID-2342
ggagaggagaaaacccg

SEQ ID NO: 11477 - RNA, 17 nt, Artificial Sequence
  Synthetic oligonucleotide: BID-38
ggauucuguaagugggc

SEQ ID NO: 11478 - RNA, 17 nt, Artificial Sequence
  Synthetic oligonucleotide: BID-2508
ggcucggcgcguacccc

SEQ ID NO: 11479 - RNA, 17 nt, Artificial Sequence
  Synthetic oligonucleotide: BID-2430
gggcgagccccaguaag

SEQ ID NO: 11480 - RNA, 17 nt, Artificial Sequence
  Synthetic oligonucleotide: BID-2507
gggcucggcgcguaccc

SEQ ID NO: 11481 - RNA, 17 nt, Artificial Sequence
  Synthetic oligonucleotide: BID-2313
ggguccgccucggaggc

SEQ ID NO: 11482 - RNA, 17 nt, Artificial Sequence
  Synthetic oligonucleotide: BID-2454
ggguuuucuccucuccg

SEQ ID NO: 11483 - RNA, 17 nt, Artificial Sequence
  Synthetic oligonucleotide: BID-28
ggucaugauggcucggu

SEQ ID NO: 11484 - RNA, 17 nt, Artificial Sequence
  Synthetic oligonucleotide: BID-2314
gguccgccucggaggcg

SEQ ID NO: 11485 - RNA, 17 nt, Artificial Sequence
  Synthetic oligonucleotide: BID-2311
ggucggguccgccucgg

SEQ ID NO: 11486 - RNA, 17 nt, Artificial Sequence
  Synthetic oligonucleotide: BID-27
gugcggauucuguaagu

SEQ ID NO: 11487 - RNA, 20 nt, Artificial Sequence
  Synthetic oligonucleotide: BID-2142
aaggccgguccagccgcaga

SEQ ID NO: 11488 - RNA, 20 nt, Artificial Sequence
  Synthetic oligonucleotide: BID-15
acagugcggauucuguaagu

SEQ ID NO: 11489 - RNA, 20 nt, Artificial Sequence
  Synthetic oligonucleotide: BID-2155
acaucauugccagugcucua

SEQ ID NO: 11490 - RNA, 20 nt, Artificial Sequence
  Synthetic oligonucleotide: BID-4
acgaaugugcagcggugcug

SEQ ID NO: 11491 - RNA, 20 nt, Artificial Sequence
  Synthetic oligonucleotide: BID-2189
agccuuccccgccuccgagg

SEQ ID NO: 11492 - RNA, 20 nt, Artificial Sequence
  Synthetic oligonucleotide: BID-2158
agcgggcgagccccaguaag

SEQ ID NO: 11493 - RNA, 20 nt, Artificial Sequence
  Synthetic oligonucleotide: BID-1
auacgaaugugcagcggugc

SEQ ID NO: 11494 - RNA, 20 nt, Artificial Sequence
  Synthetic oligonucleotide: BID-2
caacaaauacgaaugugcag

SEQ ID NO: 11495 - RNA, 20 nt, Artificial Sequence
  Synthetic oligonucleotide: BID-2215
caccgcggucgggcccaggg

SEQ ID NO: 11496 - RNA, 20 nt, Artificial Sequence
  Synthetic oligonucleotide: BID-2071
cccggagaggagaaaacccg

SEQ ID NO: 11497 - RNA, 20 nt, Artificial Sequence
  Synthetic oligonucleotide: BID-2013
ccgaccgcggugggagccag

SEQ ID NO: 11498 - RNA, 20 nt, Artificial Sequence
  Synthetic oligonucleotide: BID-2181
ccgcggguuuucuccucucc

SEQ ID NO: 11499 - RNA, 20 nt, Artificial Sequence
  Synthetic oligonucleotide: BID-2165
ccggcaggugucugcggugc

SEQ ID NO: 11500 - RNA, 20 nt, Artificial Sequence
  Synthetic oligonucleotide: BID-2182
cgcggguuuucuccucuccg

SEQ ID NO: 11501 - RNA, 20 nt, Artificial Sequence
  Synthetic oligonucleotide: BID-2080
cggaauccccgcccacaccg

SEQ ID NO: 11502 - RNA, 20 nt, Artificial Sequence
  Synthetic oligonucleotide: BID-17
cggauucuguaagugggcug

SEQ ID NO: 11503 - RNA, 20 nt, Artificial Sequence
  Synthetic oligonucleotide: BID-2176
cggcaaggguggccugcacc

SEQ ID NO: 11504 - RNA, 20 nt, Artificial Sequence
  Synthetic oligonucleotide: BID-2087
cggucagagcggccgcuuac

SEQ ID NO: 11505 - RNA, 20 nt, Artificial Sequence
  Synthetic oligonucleotide: BID-2213
cucccaccgcggucgggccc

SEQ ID NO: 11506 - RNA, 20 nt, Artificial Sequence
  Synthetic oligonucleotide: BID-2084
cuccucccgagcggagcuca

SEQ ID NO: 11507 - RNA, 20 nt, Artificial Sequence
  Synthetic oligonucleotide: BID-2212
cucuggcucccaccgcgguc

SEQ ID NO: 11508 - RNA, 20 nt, Artificial Sequence
  Synthetic oligonucleotide: BID-2086
cugacaaagcgcggucagag

SEQ ID NO: 11509 - RNA, 20 nt, Artificial Sequence
  Synthetic oligonucleotide: BID-2235
cuggggcucggcgcguaccc

SEQ ID NO: 11510 - RNA, 20 nt, Artificial Sequence
  Synthetic oligonucleotide: BID-14
uacgaaugugcagcggugcu

SEQ ID NO: 11511 - RNA, 20 nt, Artificial Sequence
  Synthetic oligonucleotide: BID-2214
ucccaccgcggucgggccca

SEQ ID NO: 11512 - RNA, 20 nt, Artificial Sequence
  Synthetic oligonucleotide: BID-2163
uccgcucgggaggagccggc

SEQ ID NO: 11513 - RNA, 20 nt, Artificial Sequence
  Synthetic oligonucleotide: BID-1993
ucgaccguguccgcgcgccu

SEQ ID NO: 11514 - RNA, 20 nt, Artificial Sequence
  Synthetic oligonucleotide: BID-2090
ucgcccgcuccuuagagcac

SEQ ID NO: 11515 - RNA, 20 nt, Artificial Sequence
  Synthetic oligonucleotide: BID-2043
ucggguccgccucggaggcg

SEQ ID NO: 11516 - RNA, 20 nt, Artificial Sequence
  Synthetic oligonucleotide: BID-6
ugcggauucuguaagugggc

SEQ ID NO: 11517 - RNA, 20 nt, Artificial Sequence
  Synthetic oligonucleotide: BID-2236
uggggcucggcgcguacccc

SEQ ID NO: 11518 - RNA, 20 nt, Artificial Sequence
  Synthetic oligonucleotide: BID-3
uggggucaugauggcucggu

SEQ ID NO: 11519 - RNA, 20 nt, Artificial Sequence
  Synthetic oligonucleotide: BID-2175
uuccgauccgccggcaaggg

SEQ ID NO: 11520 - RNA, 17 nt, Artificial Sequence
  Synthetic oligonucleotide: BID-2346
aacccgcgggccuggcc

SEQ ID NO: 11521 - RNA, 17 nt, Artificial Sequence
  Synthetic oligonucleotide: BID-2351
aauccccgcccacaccg

SEQ ID NO: 11522 - RNA, 17 nt, Artificial Sequence
  Synthetic oligonucleotide: BID-35
aaugugcagcggugcug

SEQ ID NO: 11523 - RNA, 17 nt, Artificial Sequence
  Synthetic oligonucleotide: BID-2357
acaaagcgcggucagag

SEQ ID NO: 11524 - RNA, 17 nt, Artificial Sequence
  Synthetic oligonucleotide: BID-2284
accgcggugggagccag

SEQ ID NO: 11525 - RNA, 17 nt, Artificial Sequence
  Synthetic oligonucleotide: BID-2264
accguguccgcgcgccu

SEQ ID NO: 11526 - RNA, 17 nt, Artificial Sequence
  Synthetic oligonucleotide: BID-2443
agaccacggugugggcg

SEQ ID NO: 11527 - RNA, 17 nt, Artificial Sequence
  Synthetic oligonucleotide: BID-2360
agagcggccgcuuacug

SEQ ID NO: 11528 - RNA, 17 nt, Artificial Sequence
  Synthetic oligonucleotide: BID-2445
auuccgauccgccggca

SEQ ID NO: 11529 - RNA, 17 nt, Artificial Sequence
  Synthetic oligonucleotide: BID-41
auucuguaagugggcug

SEQ ID NO: 11530 - RNA, 17 nt, Artificial Sequence
  Synthetic oligonucleotide: BID-33
caaauacgaaugugcag

SEQ ID NO: 11531 - RNA, 17 nt, Artificial Sequence
  Synthetic oligonucleotide: BID-2448
caaggguggccugcacc

SEQ ID NO: 11532 - RNA, 17 nt, Artificial Sequence
  Synthetic oligonucleotide: BID-2350
cacccuugccggcggau

SEQ ID NO: 11533 - RNA, 17 nt, Artificial Sequence
  Synthetic oligonucleotide: BID-2486
caccgcggucgggccca

SEQ ID NO: 11534 - RNA, 17 nt, Artificial Sequence
  Synthetic oligonucleotide: BID-2359
cagagcggccgcuuacu

SEQ ID NO: 11535 - RNA, 17 nt, Artificial Sequence
  Synthetic oligonucleotide: BID-2349
caggccacccuugccgg

SEQ ID NO: 11536 - RNA, 17 nt, Artificial Sequence
  Synthetic oligonucleotide: BID-2485
ccaccgcggucgggccc

SEQ ID NO: 11537 - RNA, 17 nt, Artificial Sequence
  Synthetic oligonucleotide: BID-2361
cccgcuccuuagagcac

SEQ ID NO: 11538 - RNA, 17 nt, Artificial Sequence
  Synthetic oligonucleotide: BID-2354
ccucccgagcggagcuc

SEQ ID NO: 11539 - RNA, 17 nt, Artificial Sequence
  Synthetic oligonucleotide: BID-26
cgaaugugcagcggugc

SEQ ID NO: 11540 - RNA, 17 nt, Artificial Sequence
  Synthetic oligonucleotide: BID-2447
cgauccgccggcaaggg

SEQ ID NO: 11541 - RNA, 17 nt, Artificial Sequence
  Synthetic oligonucleotide: BID-2262
cgccauaaggaggaagc

SEQ ID NO: 11542 - RNA, 17 nt, Artificial Sequence
  Synthetic oligonucleotide: BID-2260
cgcggggcgccauaagg

SEQ ID NO: 11543 - RNA, 17 nt, Artificial Sequence
  Synthetic oligonucleotide: BID-2487
cgcggucgggcccaggg

SEQ ID NO: 11544 - RNA, 17 nt, Artificial Sequence
  Synthetic oligonucleotide: BID-2510
cggcgcguaccccggga

SEQ ID NO: 11545 - RNA, 17 nt, Artificial Sequence
  Synthetic oligonucleotide: BID-2444
cggggauuccgauccgc

SEQ ID NO: 11546 - RNA, 17 nt, Artificial Sequence
  Synthetic oligonucleotide: BID-2312
cggguccgccucggagg

SEQ ID NO: 11547 - RNA, 17 nt, Artificial Sequence
  Synthetic oligonucleotide: BID-2453
cggguuuucuccucucc

SEQ ID NO: 11548 - RNA, 17 nt, Artificial Sequence
  Synthetic oligonucleotide: BID-2355
cucccgagcggagcuca

SEQ ID NO: 11549 - RNA, 17 nt, Artificial Sequence
  Synthetic oligonucleotide: BID-2461
cuuccccgccuccgagg

SEQ ID NO: 11550 - RNA, 17 nt, Artificial Sequence
  Synthetic oligonucleotide: BID-2526
uacccgcuuccuccuua

SEQ ID NO: 11551 - RNA, 17 nt, Artificial Sequence
  Synthetic oligonucleotide: BID-2358
ucagagcggccgcuuac

SEQ ID NO: 11552 - RNA, 17 nt, Artificial Sequence
  Synthetic oligonucleotide: BID-2427
ucauugccagugcucua

SEQ ID NO: 11553 - RNA, 17 nt, Artificial Sequence
  Synthetic oligonucleotide: BID-2525
ucccaggcgcgcggaca

SEQ ID NO: 11554 - RNA, 17 nt, Artificial Sequence
  Synthetic oligonucleotide: BID-2509
ucggcgcguaccccggg

SEQ ID NO: 11555 - RNA, 17 nt, Artificial Sequence
  Synthetic oligonucleotide: BID-2370
ugaccccaggggacccu

SEQ ID NO: 11556 - RNA, 17 nt, Artificial Sequence
  Synthetic oligonucleotide: BID-2484
uggcucccaccgcgguc

SEQ ID NO: 11557 - RNA, 17 nt, Artificial Sequence
  Synthetic oligonucleotide: BID-2446
uuccgauccgccggcaa

SEQ ID NO: 11558 - RNA, 17 nt, Artificial Sequence
  Synthetic oligonucleotide: BID-2256
ccgaaggaggaagcgcg

SEQ ID NO: 11559 - RNA, 17 nt, Artificial Sequence
  Synthetic oligonucleotide: BID-2411
gccccaacccugccugc

SEQ ID NO: 11560 - RNA, 20 nt, Artificial Sequence
  Synthetic oligonucleotide: BID-2190
gacccucagcaccgaccugc

SEQ ID NO: 11561 - RNA, 20 nt, Artificial Sequence
  Synthetic oligonucleotide: BID-2020
gagccagaggaggggaggcg

SEQ ID NO: 11562 - RNA, 20 nt, Artificial Sequence
  Synthetic oligonucleotide: BID-2224
gagcuccacgccggggcagg

SEQ ID NO: 11563 - RNA, 20 nt, Artificial Sequence
  Synthetic oligonucleotide: BID-2162
gagcuccgcucgggaggagc

SEQ ID NO: 11564 - RNA, 20 nt, Artificial Sequence
  Synthetic oligonucleotide: BID-2152
gagcucucccaggguccccu

SEQ ID NO: 11565 - RNA, 20 nt, Artificial Sequence
  Synthetic oligonucleotide: BID-2164
gaggagccggcaggugucug

SEQ ID NO: 11566 - RNA, 20 nt, Artificial Sequence
  Synthetic oligonucleotide: BID-2198
gaggagggcgcccgggcgga

SEQ ID NO: 11567 - RNA, 20 nt, Artificial Sequence
  Synthetic oligonucleotide: BID-2149
gagggcuucagagcucuccc

SEQ ID NO: 11568 - RNA, 20 nt, Artificial Sequence
  Synthetic oligonucleotide: BID-2203
gaggggaggcgggagagacc

SEQ ID NO: 11569 - RNA, 20 nt, Artificial Sequence
  Synthetic oligonucleotide: BID-2061
gaggggugcggggcgcgggg

SEQ ID NO: 11570 - RNA, 20 nt, Artificial Sequence
  Synthetic oligonucleotide: BID-2001
gagugcacccgcgccccucc

SEQ ID NO: 11571 - RNA, 20 nt, Artificial Sequence
  Synthetic oligonucleotide: BID-2097
gaguggcugaaugaccccag

SEQ ID NO: 11572 - RNA, 20 nt, Artificial Sequence
  Synthetic oligonucleotide: BID-7
gauggcucggugggcagcga

SEQ ID NO: 11573 - RNA, 20 nt, Artificial Sequence
  Synthetic oligonucleotide: BID-2232
gcaggcaggggucacgggcu

SEQ ID NO: 11574 - RNA, 20 nt, Artificial Sequence
  Synthetic oligonucleotide: BID-2038
gcaggucggugcugaggguc

SEQ ID NO: 11575 - RNA, 20 nt, Artificial Sequence
  Synthetic oligonucleotide: BID-2022
gccagaggaggggaggcggg

SEQ ID NO: 11576 - RNA, 20 nt, Artificial Sequence
  Synthetic oligonucleotide: BID-2147
gcccagccacuugguggcug

SEQ ID NO: 11577 - RNA, 20 nt, Artificial Sequence
  Synthetic oligonucleotide: BID-2255
gccccgcgcgcuuccuccuu

SEQ ID NO: 11578 - RNA, 20 nt, Artificial Sequence
  Synthetic oligonucleotide: BID-2010
gcccgcccugggcccgaccg

SEQ ID NO: 11579 - RNA, 20 nt, Artificial Sequence
  Synthetic oligonucleotide: BID-1998
gcccgcgcccccgcggcugg

SEQ ID NO: 11580 - RNA, 20 nt, Artificial Sequence
  Synthetic oligonucleotide: BID-2101
gcccucagccaccaaguggc

SEQ ID NO: 11581 - RNA, 20 nt, Artificial Sequence
  Synthetic oligonucleotide: BID-2012
gcccugggcccgaccgcggu

SEQ ID NO: 11582 - RNA, 20 nt, Artificial Sequence
  Synthetic oligonucleotide: BID-1987
gccgaaggaggaagcgcgcg

SEQ ID NO: 11583 - RNA, 20 nt, Artificial Sequence
  Synthetic oligonucleotide: BID-2194
gccgcgccgaggagggcgcc

SEQ ID NO: 11584 - RNA, 20 nt, Artificial Sequence
  Synthetic oligonucleotide: BID-2227
gccggggcaggcggcaggca

SEQ ID NO: 11585 - RNA, 20 nt, Artificial Sequence
  Synthetic oligonucleotide: BID-2005
gccugccgccugccccggcg

SEQ ID NO: 11586 - RNA, 20 nt, Artificial Sequence
  Synthetic oligonucleotide: BID-2000
gcgcccccgcggcuggaggg

SEQ ID NO: 11587 - RNA, 20 nt, Artificial Sequence
  Synthetic oligonucleotide: BID-2201
gcgcccgggcggaggggagg

SEQ ID NO: 11588 - RNA, 20 nt, Artificial Sequence
  Synthetic oligonucleotide: BID-1994
gcgccugggagacgcugccu

SEQ ID NO: 11589 - RNA, 20 nt, Artificial Sequence
  Synthetic oligonucleotide: BID-2250
gcgcgggcgcguccgggccg

SEQ ID NO: 11590 - RNA, 20 nt, Artificial Sequence
  Synthetic oligonucleotide: BID-2220
gcgggcccugagcuccacgc

SEQ ID NO: 11591 - RNA, 20 nt, Artificial Sequence
  Synthetic oligonucleotide: BID-2068
gcggggagggggaggggccg

SEQ ID NO: 11592 - RNA, 20 nt, Artificial Sequence
  Synthetic oligonucleotide: BID-2066
gcggggcgcggggaggggga

SEQ ID NO: 11593 - RNA, 20 nt, Artificial Sequence
  Synthetic oligonucleotide: BID-2249
gcgggggcgcgggcgcgucc

SEQ ID NO: 11594 - RNA, 20 nt, Artificial Sequence
  Synthetic oligonucleotide: BID-2217
gcggucgggcccagggcggg

SEQ ID NO: 11595 - RNA, 20 nt, Artificial Sequence
  Synthetic oligonucleotide: BID-2241
gcguaccccgggaggggcgc

SEQ ID NO: 11596 - RNA, 20 nt, Artificial Sequence
  Synthetic oligonucleotide: BID-2094
gcugcugggaaacuguugag

SEQ ID NO: 11597 - RNA, 20 nt, Artificial Sequence
  Synthetic oligonucleotide: BID-2131
gcugggggcugggccuucug

SEQ ID NO: 11598 - RNA, 20 nt, Artificial Sequence
  Synthetic oligonucleotide: BID-2170
ggaaagaccacggugugggc

SEQ ID NO: 11599 - RNA, 20 nt, Artificial Sequence
  Synthetic oligonucleotide: BID-2019
ggagccagaggaggggaggc

SEQ ID NO: 11600 - RNA, 20 nt, Artificial Sequence
  Synthetic oligonucleotide: BID-2069
ggaggggccgaggccagccc

SEQ ID NO: 11601 - RNA, 20 nt, Artificial Sequence
  Synthetic oligonucleotide: BID-2093
ggauccucgcugcugcugcu

SEQ ID NO: 11602 - RNA, 20 nt, Artificial Sequence
  Synthetic oligonucleotide: BID-2057
ggauucaggggaggggugcg

SEQ ID NO: 11603 - RNA, 20 nt, Artificial Sequence
  Synthetic oligonucleotide: BID-16
ggauucuguaagugggcugg

SEQ ID NO: 11604 - RNA, 20 nt, Artificial Sequence
  Synthetic oligonucleotide: BID-2252
ggcagcgucucccaggcgcg

SEQ ID NO: 11605 - RNA, 20 nt, Artificial Sequence
  Synthetic oligonucleotide: BID-2231
ggcaggcaggggucacgggc

SEQ ID NO: 11606 - RNA, 20 nt, Artificial Sequence
  Synthetic oligonucleotide: BID-2037
ggcaggucggugcugagggu

SEQ ID NO: 11607 - RNA, 20 nt, Artificial Sequence
  Synthetic oligonucleotide: BID-1986
ggccgaaggaggaagcgcgc

SEQ ID NO: 11608 - RNA, 20 nt, Artificial Sequence
  Synthetic oligonucleotide: BID-2070
ggccgaggccagccccggag

SEQ ID NO: 11609 - RNA, 20 nt, Artificial Sequence
  Synthetic oligonucleotide: BID-2036
ggccggcaggucggugcuga

SEQ ID NO: 11610 - RNA, 20 nt, Artificial Sequence
  Synthetic oligonucleotide: BID-2054
ggccuggggauucaggggag

SEQ ID NO: 11611 - RNA, 20 nt, Artificial Sequence
  Synthetic oligonucleotide: BID-2032
ggcgcccuccucggcgcggc

SEQ ID NO: 11612 - RNA, 20 nt, Artificial Sequence
  Synthetic oligonucleotide: BID-2018
gggagccagaggaggggagg

SEQ ID NO: 11613 - RNA, 20 nt, Artificial Sequence
  Synthetic oligonucleotide: BID-2056
gggauucaggggaggggugc

SEQ ID NO: 11614 - RNA, 20 nt, Artificial Sequence
  Synthetic oligonucleotide: BID-2222
gggcccugagcuccacgccg

SEQ ID NO: 11615 - RNA, 20 nt, Artificial Sequence
  Synthetic oligonucleotide: BID-2251
gggccgaggcagcgucuccc

SEQ ID NO: 11616 - RNA, 20 nt, Artificial Sequence
  Synthetic oligonucleotide: BID-2060
ggggaggggugcggggcgcg

SEQ ID NO: 11617 - RNA, 20 nt, Artificial Sequence
  Synthetic oligonucleotide: BID-2055
ggggauucaggggaggggug

SEQ ID NO: 11618 - RNA, 20 nt, Artificial Sequence
  Synthetic oligonucleotide: BID-1990
ggggcgccauaaggaggaag

SEQ ID NO: 11619 - RNA, 20 nt, Artificial Sequence
  Synthetic oligonucleotide: BID-2132
ggggcugggccuucugcggc

SEQ ID NO: 11620 - RNA, 20 nt, Artificial Sequence
  Synthetic oligonucleotide: BID-2063
ggggugcggggcgcggggag

SEQ ID NO: 11621 - RNA, 20 nt, Artificial Sequence
  Synthetic oligonucleotide: BID-2064
gggugcggggcgcggggagg

SEQ ID NO: 11622 - RNA, 20 nt, Artificial Sequence
  Synthetic oligonucleotide: BID-2017
ggugggagccagaggagggg

SEQ ID NO: 11623 - RNA, 20 nt, Artificial Sequence
  Synthetic oligonucleotide: BID-2183
gguuuucuccucuccggggc

SEQ ID NO: 11624 - RNA, 20 nt, Artificial Sequence
  Synthetic oligonucleotide: BID-2160
gucagcccugagcuccgcuc

SEQ ID NO: 11625 - RNA, 20 nt, Artificial Sequence
  Synthetic oligonucleotide: BID-2044
guccgccucggaggcgggga

SEQ ID NO: 11626 - RNA, 20 nt, Artificial Sequence
  Synthetic oligonucleotide: BID-2218
gucgggcccagggcgggcgg

SEQ ID NO: 11627 - RNA, 20 nt, Artificial Sequence
  Synthetic oligonucleotide: BID-2003
gugcacccgcgccccucccg

SEQ ID NO: 11628 - RNA, 20 nt, Artificial Sequence
  Synthetic oligonucleotide: BID-2167
gugcuggaaagaccacggug

SEQ ID NO: 11629 - RNA, 20 nt, Artificial Sequence
  Synthetic oligonucleotide: BID-11
gugcuggggucaugauggcu

SEQ ID NO: 11630 - RNA, 20 nt, Artificial Sequence
  Synthetic oligonucleotide: BID-2052
guggccuggggauucagggg

SEQ ID NO: 11631 - RNA, 20 nt, Artificial Sequence
  Synthetic oligonucleotide: BID-2047
guguccucuccacguggccu

SEQ ID NO: 11632 - RNA, 20 nt, Artificial Sequence
  Synthetic oligonucleotide: BID-2154
guuucccagcagcagcagcg

SEQ ID NO: 11633 - RNA, 17 nt, Artificial Sequence
  Synthetic oligonucleotide: BID-2258
gaaggaggaagcgcgcg

SEQ ID NO: 11634 - RNA, 17 nt, Artificial Sequence
  Synthetic oligonucleotide: BID-2405
gaccggccuucaccugc

SEQ ID NO: 11635 - RNA, 17 nt, Artificial Sequence
  Synthetic oligonucleotide: BID-2266
gagacgcugccucggcc

SEQ ID NO: 11636 - RNA, 17 nt, Artificial Sequence
  Synthetic oligonucleotide: BID-2343
gagaggagaaaacccgc

SEQ ID NO: 11637 - RNA, 17 nt, Artificial Sequence
  Synthetic oligonucleotide: BID-2436
gagccggcaggugucug

SEQ ID NO: 11638 - RNA, 17 nt, Artificial Sequence
  Synthetic oligonucleotide: BID-2495
gagcuccacgccggggc

SEQ ID NO: 11639 - RNA, 17 nt, Artificial Sequence
  Synthetic oligonucleotide: BID-2470
gagggcgcccgggcgga

SEQ ID NO: 11640 - RNA, 17 nt, Artificial Sequence
  Synthetic oligonucleotide: BID-2331
gaggggugcggggcgcg

SEQ ID NO: 11641 - RNA, 17 nt, Artificial Sequence
  Synthetic oligonucleotide: BID-2326
gauucaggggaggggug

SEQ ID NO: 11642 - RNA, 17 nt, Artificial Sequence
  Synthetic oligonucleotide: BID-2273
gcacccgcgccccuccc

SEQ ID NO: 11643 - RNA, 17 nt, Artificial Sequence
  Synthetic oligonucleotide: BID-2450
gcacccggccaggcccg

SEQ ID NO: 11644 - RNA, 17 nt, Artificial Sequence
  Synthetic oligonucleotide: BID-2352
gcaccgcagacaccugc

SEQ ID NO: 11645 - RNA, 17 nt, Artificial Sequence
  Synthetic oligonucleotide: BID-2362
gcacuggcaaugaugug

SEQ ID NO: 11646 - RNA, 17 nt, Artificial Sequence
  Synthetic oligonucleotide: BID-2298
gcagcgaccugagggcc

SEQ ID NO: 11647 - RNA, 17 nt, Artificial Sequence
  Synthetic oligonucleotide: BID-50
gcagcgaggggccgggc

SEQ ID NO: 11648 - RNA, 17 nt, Artificial Sequence
  Synthetic oligonucleotide: BID-2505
gcaggggucacgggcug

SEQ ID NO: 11649 - RNA, 17 nt, Artificial Sequence
  Synthetic oligonucleotide: BID-2290
gccagaggaggggaggc

SEQ ID NO: 11650 - RNA, 17 nt, Artificial Sequence
  Synthetic oligonucleotide: BID-2428
gccagugcucuaaggag

SEQ ID NO: 11651 - RNA, 17 nt, Artificial Sequence
  Synthetic oligonucleotide: BID-2411
gccccaacccugccugc

SEQ ID NO: 11652 - RNA, 17 nt, Artificial Sequence
  Synthetic oligonucleotide: BID-2277
gccccggcguggagcuc

SEQ ID NO: 11653 - RNA, 17 nt, Artificial Sequence
  Synthetic oligonucleotide: BID-2268
gcccgcgcccccgcggc

SEQ ID NO: 11654 - RNA, 17 nt, Artificial Sequence
  Synthetic oligonucleotide: BID-2303
gcccuccucggcgcggc

SEQ ID NO: 11655 - RNA, 17 nt, Artificial Sequence
  Synthetic oligonucleotide: BID-2493
gcccugagcuccacgcc

SEQ ID NO: 11656 - RNA, 17 nt, Artificial Sequence
  Synthetic oligonucleotide: BID-2465
gccggccgcgccgagga

SEQ ID NO: 11657 - RNA, 17 nt, Artificial Sequence
  Synthetic oligonucleotide: BID-2295
gccucagcagcgaccug

SEQ ID NO: 11658 - RNA, 17 nt, Artificial Sequence
  Synthetic oligonucleotide: BID-2323
gccuggggauucagggg

SEQ ID NO: 11659 - RNA, 17 nt, Artificial Sequence
  Synthetic oligonucleotide: BID-2407
gccuucaccugcaggca

SEQ ID NO: 11660 - RNA, 17 nt, Artificial Sequence
  Synthetic oligonucleotide: BID-2404
gccuucugcggcuggac

SEQ ID NO: 11661 - RNA, 17 nt, Artificial Sequence
  Synthetic oligonucleotide: BID-2261
gcgccauaaggaggaag

SEQ ID NO: 11662 - RNA, 17 nt, Artificial Sequence
  Synthetic oligonucleotide: BID-2270
gcgcccccgcggcugga

SEQ ID NO: 11663 - RNA, 17 nt, Artificial Sequence
  Synthetic oligonucleotide: BID-2472
gcgcccgggcggagggg

SEQ ID NO: 11664 - RNA, 17 nt, Artificial Sequence
  Synthetic oligonucleotide: BID-2466
gcgccgaggagggcgcc

SEQ ID NO: 11665 - RNA, 17 nt, Artificial Sequence
  Synthetic oligonucleotide: BID-2501
gcggcaggcagggguca

SEQ ID NO: 11666 - RNA, 17 nt, Artificial Sequence
  Synthetic oligonucleotide: BID-2452
gcggguuuucuccucuc

SEQ ID NO: 11667 - RNA, 17 nt, Artificial Sequence
  Synthetic oligonucleotide: BID-2488
gcggucgggcccagggc

SEQ ID NO: 11668 - RNA, 17 nt, Artificial Sequence
  Synthetic oligonucleotide: BID-2285
gcggugggagccagagg

SEQ ID NO: 11669 - RNA, 17 nt, Artificial Sequence
  Synthetic oligonucleotide: BID-36
gcucggugggcagcgag

SEQ ID NO: 11670 - RNA, 17 nt, Artificial Sequence
  Synthetic oligonucleotide: BID-2423
gcucucccagggucccc

SEQ ID NO: 11671 - RNA, 17 nt, Artificial Sequence
  Synthetic oligonucleotide: BID-47
gcuggaggagcacagug

SEQ ID NO: 11672 - RNA, 17 nt, Artificial Sequence
  Synthetic oligonucleotide: BID-2365
gcugggaaacuguugag

SEQ ID NO: 11673 - RNA, 17 nt, Artificial Sequence
  Synthetic oligonucleotide: BID-2403
gcugggccuucugcggc

SEQ ID NO: 11674 - RNA, 17 nt, Artificial Sequence
  Synthetic oligonucleotide: BID-2422
gcuucagagcucuccca

SEQ ID NO: 11675 - RNA, 17 nt, Artificial Sequence
  Synthetic oligonucleotide: BID-2469
ggagggcgcccgggcgg

SEQ ID NO: 11676 - RNA, 17 nt, Artificial Sequence
  Synthetic oligonucleotide: BID-2330
ggaggggugcggggcgc

SEQ ID NO: 11677 - RNA, 17 nt, Artificial Sequence
  Synthetic oligonucleotide: BID-2504
ggcaggggucacgggcu

SEQ ID NO: 11678 - RNA, 17 nt, Artificial Sequence
  Synthetic oligonucleotide: BID-2491
ggcccagggcgggcggc

SEQ ID NO: 11679 - RNA, 17 nt, Artificial Sequence
  Synthetic oligonucleotide: BID-2280
ggcccgccgcccgcccu

SEQ ID NO: 11680 - RNA, 17 nt, Artificial Sequence
  Synthetic oligonucleotide: BID-2492
ggcccugagcuccacgc

SEQ ID NO: 11681 - RNA, 17 nt, Artificial Sequence
  Synthetic oligonucleotide: BID-2406
ggccuucaccugcaggc

SEQ ID NO: 11682 - RNA, 17 nt, Artificial Sequence
  Synthetic oligonucleotide: BID-2338
ggcgcggggagggggag

SEQ ID NO: 11683 - RNA, 17 nt, Artificial Sequence
  Synthetic oligonucleotide: BID-2511
ggcgcguaccccgggag

SEQ ID NO: 11684 - RNA, 17 nt, Artificial Sequence
  Synthetic oligonucleotide: BID-37
ggcucggugggcagcga

SEQ ID NO: 11685 - RNA, 17 nt, Artificial Sequence
  Synthetic oligonucleotide: BID-2421
ggcuucagagcucuccc

SEQ ID NO: 11686 - RNA, 17 nt, Artificial Sequence
  Synthetic oligonucleotide: BID-2288
gggagccagaggagggg

SEQ ID NO: 11687 - RNA, 17 nt, Artificial Sequence
  Synthetic oligonucleotide: BID-2475
gggaggcgggagagacc

SEQ ID NO: 11688 - RNA, 17 nt, Artificial Sequence
  Synthetic oligonucleotide: BID-2339
gggagggggaggggccg

SEQ ID NO: 11689 - RNA, 17 nt, Artificial Sequence
  Synthetic oligonucleotide: BID-2329
gggaggggugcggggcg

SEQ ID NO: 11690 - RNA, 17 nt, Artificial Sequence
  Synthetic oligonucleotide: BID-2500
gggcaggcggcaggcag

SEQ ID NO: 11691 - RNA, 17 nt, Artificial Sequence
  Synthetic oligonucleotide: BID-2490
gggcccagggcgggcgg

SEQ ID NO: 11692 - RNA, 17 nt, Artificial Sequence
  Synthetic oligonucleotide: BID-2279
gggcccgccgcccgccc

SEQ ID NO: 11693 - RNA, 17 nt, Artificial Sequence
  Synthetic oligonucleotide: BID-2302
gggcgcccuccucggcg

SEQ ID NO: 11694 - RNA, 17 nt, Artificial Sequence
  Synthetic oligonucleotide: BID-2337
gggcgcggggaggggga

SEQ ID NO: 11695 - RNA, 17 nt, Artificial Sequence
  Synthetic oligonucleotide: BID-2499
ggggcaggcggcaggca

SEQ ID NO: 11696 - RNA, 17 nt, Artificial Sequence
  Synthetic oligonucleotide: BID-2340
ggggccgaggccagccc

SEQ ID NO: 11697 - RNA, 17 nt, Artificial Sequence
  Synthetic oligonucleotide: BID-53
ggggccgggccggcugg

SEQ ID NO: 11698 - RNA, 17 nt, Artificial Sequence
  Synthetic oligonucleotide: BID-2521
ggggcgcgggcgcgucc

SEQ ID NO: 11699 - RNA, 17 nt, Artificial Sequence
  Synthetic oligonucleotide: BID-2336
ggggcgcggggaggggg

SEQ ID NO: 11700 - RNA, 17 nt, Artificial Sequence
  Synthetic oligonucleotide: BID-2520
gggggcgcgggcgcguc

SEQ ID NO: 11701 - RNA, 17 nt, Artificial Sequence
  Synthetic oligonucleotide: BID-2402
gggggcugggccuucug

SEQ ID NO: 11702 - RNA, 17 nt, Artificial Sequence
  Synthetic oligonucleotide: BID-32
gggucaugauggcucgg

SEQ ID NO: 11703 - RNA, 17 nt, Artificial Sequence
  Synthetic oligonucleotide: BID-2332
gggugcggggcgcgggg

SEQ ID NO: 11704 - RNA, 17 nt, Artificial Sequence
  Synthetic oligonucleotide: BID-2506
ggucacgggcuggggcu

SEQ ID NO: 11705 - RNA, 17 nt, Artificial Sequence
  Synthetic oligonucleotide: BID-2479
ggucgcugcugaggccu

SEQ ID NO: 11706 - RNA, 17 nt, Artificial Sequence
  Synthetic oligonucleotide: BID-2309
ggucggugcugaggguc

SEQ ID NO: 11707 - RNA, 17 nt, Artificial Sequence
  Synthetic oligonucleotide: BID-2333
ggugcggggcgcgggga

SEQ ID NO: 11708 - RNA, 17 nt, Artificial Sequence
  Synthetic oligonucleotide: BID-2287
ggugggagccagaggag

SEQ ID NO: 11709 - RNA, 17 nt, Artificial Sequence
  Synthetic oligonucleotide: BID-54
ggugggcagcgaggggc

SEQ ID NO: 11710 - RNA, 17 nt, Artificial Sequence
  Synthetic oligonucleotide: BID-51
guaagugggcugggggc

SEQ ID NO: 11711 - RNA, 17 nt, Artificial Sequence
  Synthetic oligonucleotide: BID-2512
guaccccgggaggggcg

SEQ ID NO: 11712 - RNA, 17 nt, Artificial Sequence
  Synthetic oligonucleotide: BID-2317
guccucuccacguggcc

SEQ ID NO: 11713 - RNA, 17 nt, Artificial Sequence
  Synthetic oligonucleotide: BID-2480
gucgcugcugaggccug

SEQ ID NO: 11714 - RNA, 17 nt, Artificial Sequence
  Synthetic oligonucleotide: BID-2489
gucgggcccagggcggg

SEQ ID NO: 11715 - RNA, 17 nt, Artificial Sequence
  Synthetic oligonucleotide: BID-2348
gugcaggccacccuugc

SEQ ID NO: 11716 - RNA, 17 nt, Artificial Sequence
  Synthetic oligonucleotide: BID-2334
gugcggggcgcggggag

SEQ ID NO: 11717 - RNA, 17 nt, Artificial Sequence
  Synthetic oligonucleotide: BID-2449
guggccugcacccggcc

SEQ ID NO: 11718 - RNA, 17 nt, Artificial Sequence
  Synthetic oligonucleotide: BID-2322
guggccuggggauucag

SEQ ID NO: 11719 - RNA, 17 nt, Artificial Sequence
  Synthetic oligonucleotide: BID-2367
guggcugaaugacccca

SEQ ID NO: 11720 - RNA, 17 nt, Artificial Sequence
  Synthetic oligonucleotide: BID-52
gugggcagcgaggggcc

SEQ ID NO: 11721 - RNA, 17 nt, Artificial Sequence
  Synthetic oligonucleotide: BID-2316
guuguguccucuccacg

SEQ ID NO: 11722 - RNA, 20 nt, Artificial Sequence
  Synthetic oligonucleotide: BID-2187
aauccccaggccacguggag

SEQ ID NO: 11723 - RNA, 20 nt, Artificial Sequence
  Synthetic oligonucleotide: BID-2104
accaaguggcugggcuggca

SEQ ID NO: 11724 - RNA, 20 nt, Artificial Sequence
  Synthetic oligonucleotide: BID-2209
accccccgccuccccuccuc

SEQ ID NO: 11725 - RNA, 20 nt, Artificial Sequence
  Synthetic oligonucleotide: BID-2246
acccuccagccgcgggggcg

SEQ ID NO: 11726 - RNA, 20 nt, Artificial Sequence
  Synthetic oligonucleotide: BID-2216
accgcggucgggcccagggc

SEQ ID NO: 11727 - RNA, 20 nt, Artificial Sequence
  Synthetic oligonucleotide: BID-2014
accgcggugggagccagagg

SEQ ID NO: 11728 - RNA, 20 nt, Artificial Sequence
  Synthetic oligonucleotide: BID-2135
accggccuucaccugcaggc

SEQ ID NO: 11729 - RNA, 20 nt, Artificial Sequence
  Synthetic oligonucleotide: BID-2192
accugccggccgcgccgagg

SEQ ID NO: 11730 - RNA, 20 nt, Artificial Sequence
  Synthetic oligonucleotide: BID-2082
accugccggcuccucccgag

SEQ ID NO: 11731 - RNA, 20 nt, Artificial Sequence
  Synthetic oligonucleotide: BID-2243
acucaccacccuccagccgc

SEQ ID NO: 11732 - RNA, 20 nt, Artificial Sequence
  Synthetic oligonucleotide: BID-2074
agaaaacccgcgggccuggc

SEQ ID NO: 11733 - RNA, 20 nt, Artificial Sequence
  Synthetic oligonucleotide: BID-2091
agagcacuggcaaugaugug

SEQ ID NO: 11734 - RNA, 20 nt, Artificial Sequence
  Synthetic oligonucleotide: BID-2151
agagcucucccagggucccc

SEQ ID NO: 11735 - RNA, 20 nt, Artificial Sequence
  Synthetic oligonucleotide: BID-2021
agccagaggaggggaggcgg

SEQ ID NO: 11736 - RNA, 20 nt, Artificial Sequence
  Synthetic oligonucleotide: BID-2161
agcccugagcuccgcucggg

SEQ ID NO: 11737 - RNA, 20 nt, Artificial Sequence
  Synthetic oligonucleotide: BID-2085
agcucagggcugacaaagcg

SEQ ID NO: 11738 - RNA, 20 nt, Artificial Sequence
  Synthetic oligonucleotide: BID-2153
agcucucccaggguccccug

SEQ ID NO: 11739 - RNA, 20 nt, Artificial Sequence
  Synthetic oligonucleotide: BID-2199
aggagggcgcccgggcggag

SEQ ID NO: 11740 - RNA, 20 nt, Artificial Sequence
  Synthetic oligonucleotide: BID-2025
aggccucagcagcgaccuga

SEQ ID NO: 11741 - RNA, 20 nt, Artificial Sequence
  Synthetic oligonucleotide: BID-2230
aggcggcaggcaggggucac

SEQ ID NO: 11742 - RNA, 20 nt, Artificial Sequence
  Synthetic oligonucleotide: BID-2023
aggcggggggucagagcccc

SEQ ID NO: 11743 - RNA, 20 nt, Artificial Sequence
  Synthetic oligonucleotide: BID-2200
agggcgcccgggcggagggg

SEQ ID NO: 11744 - RNA, 20 nt, Artificial Sequence
  Synthetic oligonucleotide: BID-2150
agggcuucagagcucuccca

SEQ ID NO: 11745 - RNA, 20 nt, Artificial Sequence
  Synthetic oligonucleotide: BID-2059
aggggaggggugcggggcgc

SEQ ID NO: 11746 - RNA, 20 nt, Artificial Sequence
  Synthetic oligonucleotide: BID-2234
aggggucacgggcuggggcu

SEQ ID NO: 11747 - RNA, 20 nt, Artificial Sequence
  Synthetic oligonucleotide: BID-2062
aggggugcggggcgcgggga

SEQ ID NO: 11748 - RNA, 20 nt, Artificial Sequence
  Synthetic oligonucleotide: BID-2177
aggguggccugcacccggcc

SEQ ID NO: 11749 - RNA, 20 nt, Artificial Sequence
  Synthetic oligonucleotide: BID-2002
agugcacccgcgccccuccc

SEQ ID NO: 11750 - RNA, 20 nt, Artificial Sequence
  Synthetic oligonucleotide: BID-18
auggcucggugggcagcgag

SEQ ID NO: 11751 - RNA, 20 nt, Artificial Sequence
  Synthetic oligonucleotide: BID-2156
auugccagugcucuaaggag

SEQ ID NO: 11752 - RNA, 20 nt, Artificial Sequence
  Synthetic oligonucleotide: BID-2188
caaagccuuccccgccuccg

SEQ ID NO: 11753 - RNA, 20 nt, Artificial Sequence
  Synthetic oligonucleotide: BID-10
cacagugcggauucuguaag

SEQ ID NO: 11754 - RNA, 20 nt, Artificial Sequence
  Synthetic oligonucleotide: BID-2185
caccccuccccugaaucccc

SEQ ID NO: 11755 - RNA, 20 nt, Artificial Sequence
  Synthetic oligonucleotide: BID-2051
cacguggccuggggauucag

SEQ ID NO: 11756 - RNA, 20 nt, Artificial Sequence
  Synthetic oligonucleotide: BID-2242
cacucaccacccuccagccg

SEQ ID NO: 11757 - RNA, 20 nt, Artificial Sequence
  Synthetic oligonucleotide: BID-2103
cagccaccaaguggcugggc

SEQ ID NO: 11758 - RNA, 20 nt, Artificial Sequence
  Synthetic oligonucleotide: BID-23
cagcgaggggccgggccggc

SEQ ID NO: 11759 - RNA, 20 nt, Artificial Sequence
  Synthetic oligonucleotide: BID-20
cagcggugcuggggucauga

SEQ ID NO: 11760 - RNA, 20 nt, Artificial Sequence
  Synthetic oligonucleotide: BID-2233
caggcaggggucacgggcug

SEQ ID NO: 11761 - RNA, 20 nt, Artificial Sequence
  Synthetic oligonucleotide: BID-2024
caggccucagcagcgaccug

SEQ ID NO: 11762 - RNA, 20 nt, Artificial Sequence
  Synthetic oligonucleotide: BID-2229
caggcggcaggcagggguca

SEQ ID NO: 11763 - RNA, 20 nt, Artificial Sequence
  Synthetic oligonucleotide: BID-2009
cagggcccgccgcccgcccu

SEQ ID NO: 11764 - RNA, 20 nt, Artificial Sequence
  Synthetic oligonucleotide: BID-2058
caggggaggggugcggggcg

SEQ ID NO: 11765 - RNA, 20 nt, Artificial Sequence
  Synthetic oligonucleotide: BID-2208
caggucgcugcugaggccug

SEQ ID NO: 11766 - RNA, 20 nt, Artificial Sequence
  Synthetic oligonucleotide: BID-2140
ccaacccugccugcagguga

SEQ ID NO: 11767 - RNA, 20 nt, Artificial Sequence
  Synthetic oligonucleotide: BID-2105
ccaaguggcugggcuggcaa

SEQ ID NO: 11768 - RNA, 20 nt, Artificial Sequence
  Synthetic oligonucleotide: BID-2050
ccacguggccuggggauuca

SEQ ID NO: 11769 - RNA, 20 nt, Artificial Sequence
  Synthetic oligonucleotide: BID-2081
ccagcaccgcagacaccugc

SEQ ID NO: 11770 - RNA, 20 nt, Artificial Sequence
  Synthetic oligonucleotide: BID-2148
cccagccacuugguggcuga

SEQ ID NO: 11771 - RNA, 20 nt, Artificial Sequence
  Synthetic oligonucleotide: BID-2004
ccccugccugccgccugccc

SEQ ID NO: 11772 - RNA, 20 nt, Artificial Sequence
  Synthetic oligonucleotide: BID-1999
cccgcgcccccgcggcugga

SEQ ID NO: 11773 - RNA, 20 nt, Artificial Sequence
  Synthetic oligonucleotide: BID-2180
cccgcggguuuucuccucuc

SEQ ID NO: 11774 - RNA, 20 nt, Artificial Sequence
  Synthetic oligonucleotide: BID-2031
cccgggcgcccuccucggcg

SEQ ID NO: 11775 - RNA, 20 nt, Artificial Sequence
  Synthetic oligonucleotide: BID-2102
cccucagccaccaaguggcu

SEQ ID NO: 11776 - RNA, 20 nt, Artificial Sequence
  Synthetic oligonucleotide: BID-2247
cccuccagccgcgggggcgc

SEQ ID NO: 11777 - RNA, 20 nt, Artificial Sequence
  Synthetic oligonucleotide: BID-2033
cccuccucggcgcggccggc

SEQ ID NO: 11778 - RNA, 20 nt, Artificial Sequence
  Synthetic oligonucleotide: BID-2210
cccuccucuggcucccaccg

SEQ ID NO: 11779 - RNA, 20 nt, Artificial Sequence
  Synthetic oligonucleotide: BID-2186
cccugaauccccaggccacg

SEQ ID NO: 11780 - RNA, 20 nt, Artificial Sequence
  Synthetic oligonucleotide: BID-2141
cccugccugcaggugaaggc

SEQ ID NO: 11781 - RNA, 20 nt, Artificial Sequence
  Synthetic oligonucleotide: BID-2145
cccuugccagcccagccacu

SEQ ID NO: 11782 - RNA, 20 nt, Artificial Sequence
  Synthetic oligonucleotide: BID-2191
ccgaccugccggccgcgccg

SEQ ID NO: 11783 - RNA, 20 nt, Artificial Sequence
  Synthetic oligonucleotide: BID-13
ccgcacugugcuccuccagc

SEQ ID NO: 11784 - RNA, 20 nt, Artificial Sequence
  Synthetic oligonucleotide: BID-2195
ccgcgccgaggagggcgccc

SEQ ID NO: 11785 - RNA, 20 nt, Artificial Sequence
  Synthetic oligonucleotide: BID-2076
ccgcgggccuggccgggugc

SEQ ID NO: 11786 - RNA, 20 nt, Artificial Sequence
  Synthetic oligonucleotide: BID-2015
ccgcggugggagccagagga

SEQ ID NO: 11787 - RNA, 20 nt, Artificial Sequence
  Synthetic oligonucleotide: BID-2072
ccggagaggagaaaacccgc

SEQ ID NO: 11788 - RNA, 20 nt, Artificial Sequence
  Synthetic oligonucleotide: BID-2136
ccggccuucaccugcaggca

SEQ ID NO: 11789 - RNA, 20 nt, Artificial Sequence
  Synthetic oligonucleotide: BID-12
ccggcuggaggagcacagug

SEQ ID NO: 11790 - RNA, 20 nt, Artificial Sequence
  Synthetic oligonucleotide: BID-2228
ccggggcaggcggcaggcag

SEQ ID NO: 11791 - RNA, 20 nt, Artificial Sequence
  Synthetic oligonucleotide: BID-2034
ccucggcgcggccggcaggu

SEQ ID NO: 11792 - RNA, 20 nt, Artificial Sequence
  Synthetic oligonucleotide: BID-2211
ccucuggcucccaccgcggu

SEQ ID NO: 11793 - RNA, 20 nt, Artificial Sequence
  Synthetic oligonucleotide: BID-2223
ccugagcuccacgccggggc

SEQ ID NO: 11794 - RNA, 20 nt, Artificial Sequence
  Synthetic oligonucleotide: BID-2178
ccugcacccggccaggcccg

SEQ ID NO: 11795 - RNA, 20 nt, Artificial Sequence
  Synthetic oligonucleotide: BID-2006
ccugccccggcguggagcuc

SEQ ID NO: 11796 - RNA, 20 nt, Artificial Sequence
  Synthetic oligonucleotide: BID-2193
ccugccggccgcgccgagga

SEQ ID NO: 11797 - RNA, 20 nt, Artificial Sequence
  Synthetic oligonucleotide: BID-2137
ccuucaccugcaggcagggu

SEQ ID NO: 11798 - RNA, 20 nt, Artificial Sequence
  Synthetic oligonucleotide: BID-2197
cgaggagggcgcccgggcgg

SEQ ID NO: 11799 - RNA, 20 nt, Artificial Sequence
  Synthetic oligonucleotide: BID-25
cgaggggccgggccggcugg

SEQ ID NO: 11800 - RNA, 20 nt, Artificial Sequence
  Synthetic oligonucleotide: BID-2202
cgcccgggcggaggggaggc

SEQ ID NO: 11801 - RNA, 20 nt, Artificial Sequence
  Synthetic oligonucleotide: BID-2011
cgcccugggcccgaccgcgg

SEQ ID NO: 11802 - RNA, 20 nt, Artificial Sequence
  Synthetic oligonucleotide: BID-2196
cgccgaggagggcgcccggg

SEQ ID NO: 11803 - RNA, 20 nt, Artificial Sequence
  Synthetic oligonucleotide: BID-2226
cgccggggcaggcggcaggc

SEQ ID NO: 11804 - RNA, 20 nt, Artificial Sequence
  Synthetic oligonucleotide: BID-1997
cgcgcccgcgcccccgcggc

SEQ ID NO: 11805 - RNA, 20 nt, Artificial Sequence
  Synthetic oligonucleotide: BID-2248
cgcgggggcgcgggcgcguc

SEQ ID NO: 11806 - RNA, 20 nt, Artificial Sequence
  Synthetic oligonucleotide: BID-2016
cgcggugggagccagaggag

SEQ ID NO: 11807 - RNA, 20 nt, Artificial Sequence
  Synthetic oligonucleotide: BID-2240
cgcguaccccgggaggggcg

SEQ ID NO: 11808 - RNA, 20 nt, Artificial Sequence
  Synthetic oligonucleotide: BID-1996
cggacgcgcccgcgcccccg

SEQ ID NO: 11809 - RNA, 20 nt, Artificial Sequence
  Synthetic oligonucleotide: BID-2092
cggauccucgcugcugcugc

SEQ ID NO: 11810 - RNA, 20 nt, Artificial Sequence
  Synthetic oligonucleotide: BID-2205
cggcccucaggucgcugcug

SEQ ID NO: 11811 - RNA, 20 nt, Artificial Sequence
  Synthetic oligonucleotide: BID-2035
cggccggcaggucggugcug

SEQ ID NO: 11812 - RNA, 20 nt, Artificial Sequence
  Synthetic oligonucleotide: BID-2221
cgggcccugagcuccacgcc

SEQ ID NO: 11813 - RNA, 20 nt, Artificial Sequence
  Synthetic oligonucleotide: BID-2067
cggggcgcggggagggggag

SEQ ID NO: 11814 - RNA, 20 nt, Artificial Sequence
  Synthetic oligonucleotide: BID-2077
cgggugcaggccacccuugc

SEQ ID NO: 11815 - RNA, 20 nt, Artificial Sequence
  Synthetic oligonucleotide: BID-2244
cucaccacccuccagccgcg

SEQ ID NO: 11816 - RNA, 20 nt, Artificial Sequence
  Synthetic oligonucleotide: BID-2026
cucagcagcgaccugagggc

SEQ ID NO: 11817 - RNA, 20 nt, Artificial Sequence
  Synthetic oligonucleotide: BID-2206
cucaggucgcugcugaggcc

SEQ ID NO: 11818 - RNA, 20 nt, Artificial Sequence
  Synthetic oligonucleotide: BID-2029
cucccgccuccccuccgccc

SEQ ID NO: 11819 - RNA, 20 nt, Artificial Sequence
  Synthetic oligonucleotide: BID-2030
cuccgcccgggcgcccuccu

SEQ ID NO: 11820 - RNA, 20 nt, Artificial Sequence
  Synthetic oligonucleotide: BID-2184
cuccucuccggggcuggccu

SEQ ID NO: 11821 - RNA, 20 nt, Artificial Sequence
  Synthetic oligonucleotide: BID-2239
cucggcgcguaccccgggag

SEQ ID NO: 11822 - RNA, 20 nt, Artificial Sequence
  Synthetic oligonucleotide: BID-24
cucggugggcagcgaggggc

SEQ ID NO: 11823 - RNA, 20 nt, Artificial Sequence
  Synthetic oligonucleotide: BID-2179
cugcacccggccaggcccgc

SEQ ID NO: 11824 - RNA, 20 nt, Artificial Sequence
  Synthetic oligonucleotide: BID-2007
cugccccggcguggagcuca

SEQ ID NO: 11825 - RNA, 20 nt, Artificial Sequence
  Synthetic oligonucleotide: BID-2166
cugcggugcuggaaagacca

SEQ ID NO: 11826 - RNA, 20 nt, Artificial Sequence
  Synthetic oligonucleotide: BID-2134
cuggaccggccuucaccugc

SEQ ID NO: 11827 - RNA, 20 nt, Artificial Sequence
  Synthetic oligonucleotide: BID-8
cuggggucaugauggcucgg

SEQ ID NO: 11828 - RNA, 20 nt, Artificial Sequence
  Synthetic oligonucleotide: BID-30
cuguaagugggcugggggcu

SEQ ID NO: 11829 - RNA, 20 nt, Artificial Sequence
  Synthetic oligonucleotide: BID-21
cugugcuccuccagccggcc

SEQ ID NO: 11830 - RNA, 20 nt, Artificial Sequence
  Synthetic oligonucleotide: BID-2138
cuucaccugcaggcaggguu

SEQ ID NO: 11831 - RNA, 20 nt, Artificial Sequence
  Synthetic oligonucleotide: BID-2245
ucaccacccuccagccgcgg

SEQ ID NO: 11832 - RNA, 20 nt, Artificial Sequence
  Synthetic oligonucleotide: BID-2027
ucagcagcgaccugagggcc

SEQ ID NO: 11833 - RNA, 20 nt, Artificial Sequence
  Synthetic oligonucleotide: BID-2008
ucagggcccgccgcccgccc

SEQ ID NO: 11834 - RNA, 20 nt, Artificial Sequence
  Synthetic oligonucleotide: BID-2207
ucaggucgcugcugaggccu

SEQ ID NO: 11835 - RNA, 20 nt, Artificial Sequence
  Synthetic oligonucleotide: BID-2225
uccacgccggggcaggcggc

SEQ ID NO: 11836 - RNA, 20 nt, Artificial Sequence
  Synthetic oligonucleotide: BID-2049
uccacguggccuggggauuc

SEQ ID NO: 11837 - RNA, 20 nt, Artificial Sequence
  Synthetic oligonucleotide: BID-2219
ucgggcccagggcgggcggc

SEQ ID NO: 11838 - RNA, 20 nt, Artificial Sequence
  Synthetic oligonucleotide: BID-19
ucggugggcagcgaggggcc

SEQ ID NO: 11839 - RNA, 20 nt, Artificial Sequence
  Synthetic oligonucleotide: BID-2028
ucucccgccuccccuccgcc

SEQ ID NO: 11840 - RNA, 20 nt, Artificial Sequence
  Synthetic oligonucleotide: BID-22
ucuguaagugggcugggggc

SEQ ID NO: 11841 - RNA, 20 nt, Artificial Sequence
  Synthetic oligonucleotide: BID-2100
ugaagcccucagccaccaag

SEQ ID NO: 11842 - RNA, 20 nt, Artificial Sequence
  Synthetic oligonucleotide: BID-2098
ugaaugaccccaggggaccc

SEQ ID NO: 11843 - RNA, 20 nt, Artificial Sequence
  Synthetic oligonucleotide: BID-2096
ugaguggcugaaugacccca

SEQ ID NO: 11844 - RNA, 20 nt, Artificial Sequence
  Synthetic oligonucleotide: BID-9
ugauggcucggugggcagcg

SEQ ID NO: 11845 - RNA, 20 nt, Artificial Sequence
  Synthetic oligonucleotide: BID-2065
ugcggggcgcggggaggggg

SEQ ID NO: 11846 - RNA, 20 nt, Artificial Sequence
  Synthetic oligonucleotide: BID-2168
ugcuggaaagaccacggugu

SEQ ID NO: 11847 - RNA, 20 nt, Artificial Sequence
  Synthetic oligonucleotide: BID-2169
uggaaagaccacgguguggg

SEQ ID NO: 11848 - RNA, 20 nt, Artificial Sequence
  Synthetic oligonucleotide: BID-2053
uggccuggggauucagggga

SEQ ID NO: 11849 - RNA, 20 nt, Artificial Sequence
  Synthetic oligonucleotide: BID-1995
ugggagacgcugccucggcc

SEQ ID NO: 11850 - RNA, 20 nt, Artificial Sequence
  Synthetic oligonucleotide: BID-29
ugggcagcgaggggccgggc

SEQ ID NO: 11851 - RNA, 20 nt, Artificial Sequence
  Synthetic oligonucleotide: BID-2133
ugggccuucugcggcuggac

SEQ ID NO: 11852 - RNA, 20 nt, Artificial Sequence
  Synthetic oligonucleotide: BID-2159
ugucagcccugagcuccgcu

SEQ ID NO: 11853 - RNA, 20 nt, Artificial Sequence
  Synthetic oligonucleotide: BID-2048
uguccucuccacguggccug

SEQ ID NO: 11854 - RNA, 20 nt, Artificial Sequence
  Synthetic oligonucleotide: BID-2046
uguguccucuccacguggcc

SEQ ID NO: 11855 - RNA, 20 nt, Artificial Sequence
  Synthetic oligonucleotide: BID-2139
uucaccugcaggcaggguug

SEQ ID NO: 11856 - RNA, 20 nt, Artificial Sequence
  Synthetic oligonucleotide: BID-2095
uugaguggcugaaugacccc

SEQ ID NO: 11857 - RNA, 20 nt, Artificial Sequence
  Synthetic oligonucleotide: BID-2146
uugccagcccagccacuugg

SEQ ID NO: 11858 - RNA, 20 nt, Artificial Sequence
  Synthetic oligonucleotide: BID-2157
uugccagugcucuaaggagc

SEQ ID NO: 11859 - RNA, 20 nt, Artificial Sequence
  Synthetic oligonucleotide: BID-2045
uuuguuguguccucuccacg

SEQ ID NO: 11860 - RNA, 17 nt, Artificial Sequence
  Synthetic oligonucleotide: BID-2345
aaacccgcgggccuggc

SEQ ID NO: 11861 - RNA, 17 nt, Artificial Sequence
  Synthetic oligonucleotide: BID-2441
aaagaccacgguguggg

SEQ ID NO: 11862 - RNA, 17 nt, Artificial Sequence
  Synthetic oligonucleotide: BID-2442
aagaccacggugugggc

SEQ ID NO: 11863 - RNA, 17 nt, Artificial Sequence
  Synthetic oligonucleotide: BID-2375
aaguggcugggcuggca

SEQ ID NO: 11864 - RNA, 17 nt, Artificial Sequence
  Synthetic oligonucleotide: BID-2516
accacccuccagccgcg

SEQ ID NO: 11865 - RNA, 17 nt, Artificial Sequence
  Synthetic oligonucleotide: BID-2412
acccugccugcagguga

SEQ ID NO: 11866 - RNA, 17 nt, Artificial Sequence
  Synthetic oligonucleotide: BID-2410
accugcaggcaggguug

SEQ ID NO: 11867 - RNA, 17 nt, Artificial Sequence
  Synthetic oligonucleotide: BID-2463
accugccggccgcgccg

SEQ ID NO: 11868 - RNA, 17 nt, Artificial Sequence
  Synthetic oligonucleotide: BID-2497
acgccggggcaggcggc

SEQ ID NO: 11869 - RNA, 17 nt, Artificial Sequence
  Synthetic oligonucleotide: BID-2267
acgcgcccgcgcccccg

SEQ ID NO: 11870 - RNA, 17 nt, Artificial Sequence
  Synthetic oligonucleotide: BID-2320
acguggccuggggauuc

SEQ ID NO: 11871 - RNA, 17 nt, Artificial Sequence
  Synthetic oligonucleotide: BID-2293
agaggaggggaggcggg

SEQ ID NO: 11872 - RNA, 17 nt, Artificial Sequence
  Synthetic oligonucleotide: BID-2297
agcagcgaccugagggc

SEQ ID NO: 11873 - RNA, 17 nt, Artificial Sequence
  Synthetic oligonucleotide: BID-2420
agccacuugguggcuga

SEQ ID NO: 11874 - RNA, 17 nt, Artificial Sequence
  Synthetic oligonucleotide: BID-2289
agccagaggaggggagg

SEQ ID NO: 11875 - RNA, 17 nt, Artificial Sequence
  Synthetic oligonucleotide: BID-2371
agcccucagccaccaag

SEQ ID NO: 11876 - RNA, 17 nt, Artificial Sequence
  Synthetic oligonucleotide: BID-2432
agcccugagcuccgcuc

SEQ ID NO: 11877 - RNA, 17 nt, Artificial Sequence
  Synthetic oligonucleotide: BID-2460
agccuuccccgccuccg

SEQ ID NO: 11878 - RNA, 17 nt, Artificial Sequence
  Synthetic oligonucleotide: BID-2524
agcgucucccaggcgcg

SEQ ID NO: 11879 - RNA, 17 nt, Artificial Sequence
  Synthetic oligonucleotide: BID-2503
aggcaggggucacgggc

SEQ ID NO: 11880 - RNA, 17 nt, Artificial Sequence
  Synthetic oligonucleotide: BID-2471
agggcgcccgggcggag

SEQ ID NO: 11881 - RNA, 17 nt, Artificial Sequence
  Synthetic oligonucleotide: BID-2478
aggucgcugcugaggcc

SEQ ID NO: 11882 - RNA, 17 nt, Artificial Sequence
  Synthetic oligonucleotide: BID-2308
aggucggugcugagggu

SEQ ID NO: 11883 - RNA, 17 nt, Artificial Sequence
  Synthetic oligonucleotide: BID-34
agugcggauucuguaag

SEQ ID NO: 11884 - RNA, 17 nt, Artificial Sequence
  Synthetic oligonucleotide: BID-2366
aguggcugaaugacccc

SEQ ID NO: 11885 - RNA, 17 nt, Artificial Sequence
  Synthetic oligonucleotide: BID-2376
aguggcugggcuggcaa

SEQ ID NO: 11886 - RNA, 17 nt, Artificial Sequence
  Synthetic oligonucleotide: BID-2363
auccucgcugcugcugc

SEQ ID NO: 11887 - RNA, 17 nt, Artificial Sequence
  Synthetic oligonucleotide: BID-2369
augaccccaggggaccc

SEQ ID NO: 11888 - RNA, 17 nt, Artificial Sequence
  Synthetic oligonucleotide: BID-2327
auucaggggaggggugc

SEQ ID NO: 11889 - RNA, 17 nt, Artificial Sequence
  Synthetic oligonucleotide: BID-2515
caccacccuccagccgc

SEQ ID NO: 11890 - RNA, 17 nt, Artificial Sequence
  Synthetic oligonucleotide: BID-2274
cacccgcgccccucccg

SEQ ID NO: 11891 - RNA, 17 nt, Artificial Sequence
  Synthetic oligonucleotide: BID-2451
cacccggccaggcccgc

SEQ ID NO: 11892 - RNA, 17 nt, Artificial Sequence
  Synthetic oligonucleotide: BID-2409
caccugcaggcaggguu

SEQ ID NO: 11893 - RNA, 17 nt, Artificial Sequence
  Synthetic oligonucleotide: BID-46
cacugugcuccuccagc

SEQ ID NO: 11894 - RNA, 17 nt, Artificial Sequence
  Synthetic oligonucleotide: BID-2292
cagaggaggggaggcgg

SEQ ID NO: 11895 - RNA, 17 nt, Artificial Sequence
  Synthetic oligonucleotide: BID-2419
cagccacuugguggcug

SEQ ID NO: 11896 - RNA, 17 nt, Artificial Sequence
  Synthetic oligonucleotide: BID-2431
cagcccugagcuccgcu

SEQ ID NO: 11897 - RNA, 17 nt, Artificial Sequence
  Synthetic oligonucleotide: BID-2374
ccaccaaguggcugggc

SEQ ID NO: 11898 - RNA, 17 nt, Artificial Sequence
  Synthetic oligonucleotide: BID-2517
ccacccuccagccgcgg

SEQ ID NO: 11899 - RNA, 17 nt, Artificial Sequence
  Synthetic oligonucleotide: BID-2291
ccagaggaggggaggcg

SEQ ID NO: 11900 - RNA, 17 nt, Artificial Sequence
  Synthetic oligonucleotide: BID-2418
ccagcccagccacuugg

SEQ ID NO: 11901 - RNA, 17 nt, Artificial Sequence
  Synthetic oligonucleotide: BID-2429
ccagugcucuaaggagc

SEQ ID NO: 11902 - RNA, 17 nt, Artificial Sequence
  Synthetic oligonucleotide: BID-2459
ccccaggccacguggag

SEQ ID NO: 11903 - RNA, 17 nt, Artificial Sequence
  Synthetic oligonucleotide: BID-2271
cccccgcggcuggaggg

SEQ ID NO: 11904 - RNA, 17 nt, Artificial Sequence
  Synthetic oligonucleotide: BID-2481
ccccgccuccccuccuc

SEQ ID NO: 11905 - RNA, 17 nt, Artificial Sequence
  Synthetic oligonucleotide: BID-2278
ccccggcguggagcuca

SEQ ID NO: 11906 - RNA, 17 nt, Artificial Sequence
  Synthetic oligonucleotide: BID-2299
cccgccuccccuccgcc

SEQ ID NO: 11907 - RNA, 17 nt, Artificial Sequence
  Synthetic oligonucleotide: BID-2473
cccgggcggaggggagg

SEQ ID NO: 11908 - RNA, 17 nt, Artificial Sequence
  Synthetic oligonucleotide: BID-2477
cccucaggucgcugcug

SEQ ID NO: 11909 - RNA, 17 nt, Artificial Sequence
  Synthetic oligonucleotide: BID-2457
cccuccccugaaucccc

SEQ ID NO: 11910 - RNA, 17 nt, Artificial Sequence
  Synthetic oligonucleotide: BID-2494
cccugagcuccacgccg

SEQ ID NO: 11911 - RNA, 17 nt, Artificial Sequence
  Synthetic oligonucleotide: BID-2256
ccgaaggaggaagcgcg

SEQ ID NO: 11912 - RNA, 17 nt, Artificial Sequence
  Synthetic oligonucleotide: BID-2523
ccgaggcagcgucuccc

SEQ ID NO: 11913 - RNA, 17 nt, Artificial Sequence
  Synthetic oligonucleotide: BID-2300
ccgccuccccuccgccc

SEQ ID NO: 11914 - RNA, 17 nt, Artificial Sequence
  Synthetic oligonucleotide: BID-2527
ccgcgcgcuuccuccuu

SEQ ID NO: 11915 - RNA, 17 nt, Artificial Sequence
  Synthetic oligonucleotide: BID-2306
ccggcaggucggugcug

SEQ ID NO: 11916 - RNA, 17 nt, Artificial Sequence
  Synthetic oligonucleotide: BID-2474
ccgggcggaggggaggc

SEQ ID NO: 11917 - RNA, 17 nt, Artificial Sequence
  Synthetic oligonucleotide: BID-2462
ccucagcaccgaccugc

SEQ ID NO: 11918 - RNA, 17 nt, Artificial Sequence
  Synthetic oligonucleotide: BID-2296
ccucagcagcgaccuga

SEQ ID NO: 11919 - RNA, 17 nt, Artificial Sequence
  Synthetic oligonucleotide: BID-2319
ccucuccacguggccug

SEQ ID NO: 11920 - RNA, 17 nt, Artificial Sequence
  Synthetic oligonucleotide: BID-2433
ccugagcuccgcucggg

SEQ ID NO: 11921 - RNA, 17 nt, Artificial Sequence
  Synthetic oligonucleotide: BID-2265
ccugggagacgcugccu

SEQ ID NO: 11922 - RNA, 17 nt, Artificial Sequence
  Synthetic oligonucleotide: BID-2282
ccugggcccgaccgcgg

SEQ ID NO: 11923 - RNA, 17 nt, Artificial Sequence
  Synthetic oligonucleotide: BID-2324
ccuggggauucagggga

SEQ ID NO: 11924 - RNA, 17 nt, Artificial Sequence
  Synthetic oligonucleotide: BID-2257
cgaaggaggaagcgcgc

SEQ ID NO: 11925 - RNA, 17 nt, Artificial Sequence
  Synthetic oligonucleotide: BID-2468
cgaggagggcgcccggg

SEQ ID NO: 11926 - RNA, 17 nt, Artificial Sequence
  Synthetic oligonucleotide: BID-2341
cgaggccagccccggag

SEQ ID NO: 11927 - RNA, 17 nt, Artificial Sequence
  Synthetic oligonucleotide: BID-48
cgaggggccgggccggc

SEQ ID NO: 11928 - RNA, 17 nt, Artificial Sequence
  Synthetic oligonucleotide: BID-2301
cgcccgggcgcccuccu

SEQ ID NO: 11929 - RNA, 17 nt, Artificial Sequence
  Synthetic oligonucleotide: BID-2281
cgcccugggcccgaccg

SEQ ID NO: 11930 - RNA, 17 nt, Artificial Sequence
  Synthetic oligonucleotide: BID-2467
cgccgaggagggcgccc

SEQ ID NO: 11931 - RNA, 17 nt, Artificial Sequence
  Synthetic oligonucleotide: BID-2315
cgccucggaggcgggga

SEQ ID NO: 11932 - RNA, 17 nt, Artificial Sequence
  Synthetic oligonucleotide: BID-2269
cgcgcccccgcggcugg

SEQ ID NO: 11933 - RNA, 17 nt, Artificial Sequence
  Synthetic oligonucleotide: BID-2502
cggcaggcaggggucac

SEQ ID NO: 11934 - RNA, 17 nt, Artificial Sequence
  Synthetic oligonucleotide: BID-2307
cggcaggucggugcuga

SEQ ID NO: 11935 - RNA, 17 nt, Artificial Sequence
  Synthetic oligonucleotide: BID-2305
cggcgcggccggcaggu

SEQ ID NO: 11936 - RNA, 17 nt, Artificial Sequence
  Synthetic oligonucleotide: BID-2347
cgggccuggccgggugc

SEQ ID NO: 11937 - RNA, 17 nt, Artificial Sequence
  Synthetic oligonucleotide: BID-2522
cgggcgcguccgggccg

SEQ ID NO: 11938 - RNA, 17 nt, Artificial Sequence
  Synthetic oligonucleotide: BID-2498
cggggcaggcggcaggc

SEQ ID NO: 11939 - RNA, 17 nt, Artificial Sequence
  Synthetic oligonucleotide: BID-2294
cggggggucagagcccc

SEQ ID NO: 11940 - RNA, 17 nt, Artificial Sequence
  Synthetic oligonucleotide: BID-2438
cggugcuggaaagacca

SEQ ID NO: 11941 - RNA, 17 nt, Artificial Sequence
  Synthetic oligonucleotide: BID-43
cggugcuggggucauga

SEQ ID NO: 11942 - RNA, 17 nt, Artificial Sequence
  Synthetic oligonucleotide: BID-2286
cggugggagccagagga

SEQ ID NO: 11943 - RNA, 17 nt, Artificial Sequence
  Synthetic oligonucleotide: BID-2321
cguggccuggggauuca

SEQ ID NO: 11944 - RNA, 17 nt, Artificial Sequence
  Synthetic oligonucleotide: BID-2372
cucagccaccaaguggc

SEQ ID NO: 11945 - RNA, 17 nt, Artificial Sequence
  Synthetic oligonucleotide: BID-2496
cuccacgccggggcagg

SEQ ID NO: 11946 - RNA, 17 nt, Artificial Sequence
  Synthetic oligonucleotide: BID-2518
cuccagccgcgggggcg

SEQ ID NO: 11947 - RNA, 17 nt, Artificial Sequence
  Synthetic oligonucleotide: BID-2434
cuccgcucgggaggagc

SEQ ID NO: 11948 - RNA, 17 nt, Artificial Sequence
  Synthetic oligonucleotide: BID-2424
cucucccaggguccccu

SEQ ID NO: 11949 - RNA, 17 nt, Artificial Sequence
  Synthetic oligonucleotide: BID-2456
cucuccggggcuggccu

SEQ ID NO: 11950 - RNA, 17 nt, Artificial Sequence
  Synthetic oligonucleotide: BID-2275
cugccugccgccugccc

SEQ ID NO: 11951 - RNA, 17 nt, Artificial Sequence
  Synthetic oligonucleotide: BID-2439
cuggaaagaccacggug

SEQ ID NO: 11952 - RNA, 17 nt, Artificial Sequence
  Synthetic oligonucleotide: BID-2483
cuggcucccaccgcggu

SEQ ID NO: 11953 - RNA, 17 nt, Artificial Sequence
  Synthetic oligonucleotide: BID-2283
cugggcccgaccgcggu

SEQ ID NO: 11954 - RNA, 17 nt, Artificial Sequence
  Synthetic oligonucleotide: BID-2325
cuggggauucaggggag

SEQ ID NO: 11955 - RNA, 17 nt, Artificial Sequence
  Synthetic oligonucleotide: BID-44
cuggggucaugauggcu

SEQ ID NO: 11956 - RNA, 17 nt, Artificial Sequence
  Synthetic oligonucleotide: BID-49
uaagugggcugggggcu

SEQ ID NO: 11957 - RNA, 17 nt, Artificial Sequence
  Synthetic oligonucleotide: BID-2513
uaccccgggaggggcgc

SEQ ID NO: 11958 - RNA, 17 nt, Artificial Sequence
  Synthetic oligonucleotide: BID-2514
ucaccacccuccagccg

SEQ ID NO: 11959 - RNA, 17 nt, Artificial Sequence
  Synthetic oligonucleotide: BID-2408
ucaccugcaggcagggu

SEQ ID NO: 11960 - RNA, 17 nt, Artificial Sequence
  Synthetic oligonucleotide: BID-2373
ucagccaccaaguggcu

SEQ ID NO: 11961 - RNA, 17 nt, Artificial Sequence
  Synthetic oligonucleotide: BID-2356
ucagggcugacaaagcg

SEQ ID NO: 11962 - RNA, 17 nt, Artificial Sequence
  Synthetic oligonucleotide: BID-2519
uccagccgcgggggcgc

SEQ ID NO: 11963 - RNA, 17 nt, Artificial Sequence
  Synthetic oligonucleotide: BID-2426
ucccagcagcagcagcg

SEQ ID NO: 11964 - RNA, 17 nt, Artificial Sequence
  Synthetic oligonucleotide: BID-2364
uccucgcugcugcugcu

SEQ ID NO: 11965 - RNA, 17 nt, Artificial Sequence
  Synthetic oligonucleotide: BID-2304
uccucggcgcggccggc

SEQ ID NO: 11966 - RNA, 17 nt, Artificial Sequence
  Synthetic oligonucleotide: BID-2318
uccucuccacguggccu

SEQ ID NO: 11967 - RNA, 17 nt, Artificial Sequence
  Synthetic oligonucleotide: BID-2482
uccucuggcucccaccg

SEQ ID NO: 11968 - RNA, 17 nt, Artificial Sequence
  Synthetic oligonucleotide: BID-2425
ucucccaggguccccug

SEQ ID NO: 11969 - RNA, 17 nt, Artificial Sequence
  Synthetic oligonucleotide: BID-2458
ugaauccccaggccacg

SEQ ID NO: 11970 - RNA, 17 nt, Artificial Sequence
  Synthetic oligonucleotide: BID-2272
ugcacccgcgccccucc

SEQ ID NO: 11971 - RNA, 17 nt, Artificial Sequence
  Synthetic oligonucleotide: BID-2276
ugccgccugccccggcg

SEQ ID NO: 11972 - RNA, 17 nt, Artificial Sequence
  Synthetic oligonucleotide: BID-2464
ugccggccgcgccgagg

SEQ ID NO: 11973 - RNA, 17 nt, Artificial Sequence
  Synthetic oligonucleotide: BID-2353
ugccggcuccucccgag

SEQ ID NO: 11974 - RNA, 17 nt, Artificial Sequence
  Synthetic oligonucleotide: BID-2413
ugccugcaggugaaggc

SEQ ID NO: 11975 - RNA, 17 nt, Artificial Sequence
  Synthetic oligonucleotide: BID-2335
ugcggggcgcggggagg

SEQ ID NO: 11976 - RNA, 17 nt, Artificial Sequence
  Synthetic oligonucleotide: BID-45
ugcuccuccagccggcc

SEQ ID NO: 11977 - RNA, 17 nt, Artificial Sequence
  Synthetic oligonucleotide: BID-2440
uggaaagaccacggugu

SEQ ID NO: 11978 - RNA, 17 nt, Artificial Sequence
  Synthetic oligonucleotide: BID-39
uggcucggugggcagcg

SEQ ID NO: 11979 - RNA, 17 nt, Artificial Sequence
  Synthetic oligonucleotide: BID-2368
uggcugaaugaccccag

SEQ ID NO: 11980 - RNA, 17 nt, Artificial Sequence
  Synthetic oligonucleotide: BID-2328
uucaggggaggggugcg

SEQ ID NO: 11981 - RNA, 17 nt, Artificial Sequence
  Synthetic oligonucleotide: BID-40
uucuguaagugggcugg

SEQ ID NO: 11982 - RNA, 17 nt, Artificial Sequence
  Synthetic oligonucleotide: BID-2417
uugccagcccagccacu

SEQ ID NO: 11983 - RNA, 17 nt, Artificial Sequence
  Synthetic oligonucleotide: BID-2455
uuucuccucuccggggc

SEQ ID NO: 11984 - RNA, 20 nt, Artificial Sequence
  Synthetic oligonucleotide: BID-684
gaccagccugagaccuccag

SEQ ID NO: 11985 - RNA, 20 nt, Artificial Sequence
  Synthetic oligonucleotide: BID-685
cagccugagaccuccagagg

SEQ ID NO: 11986 - RNA, 20 nt, Artificial Sequence
  Synthetic oligonucleotide: BID-686
aaacugaaaaagaaauuagu

SEQ ID NO: 11987 - RNA, 20 nt, Artificial Sequence
  Synthetic oligonucleotide: BID-687
aacugaaaaagaaauuaguu

SEQ ID NO: 11988 - RNA, 20 nt, Artificial Sequence
  Synthetic oligonucleotide: BID-688
aaaaagaaauuaguugggug

SEQ ID NO: 11989 - RNA, 20 nt, Artificial Sequence
  Synthetic oligonucleotide: BID-689
aaagaauaaacaacaagcac

SEQ ID NO: 11990 - RNA, 20 nt, Artificial Sequence
  Synthetic oligonucleotide: BID-690
aagaauaaacaacaagcaca

SEQ ID NO: 11991 - RNA, 20 nt, Artificial Sequence
  Synthetic oligonucleotide: BID-691
uaaacaacaagcacagggac

SEQ ID NO: 11992 - RNA, 20 nt, Artificial Sequence
  Synthetic oligonucleotide: BID-692
aacaagcacagggacuggug

SEQ ID NO: 11993 - RNA, 20 nt, Artificial Sequence
  Synthetic oligonucleotide: BID-693
acaagcacagggacugguga

SEQ ID NO: 11994 - RNA, 20 nt, Artificial Sequence
  Synthetic oligonucleotide: BID-694
caagcacagggacuggugag

SEQ ID NO: 11995 - RNA, 20 nt, Artificial Sequence
  Synthetic oligonucleotide: BID-695
cacagggacuggugaggggc

SEQ ID NO: 11996 - RNA, 20 nt, Artificial Sequence
  Synthetic oligonucleotide: BID-696
acagggacuggugaggggcu

SEQ ID NO: 11997 - RNA, 20 nt, Artificial Sequence
  Synthetic oligonucleotide: BID-697
cagauucucugcaacccaca

SEQ ID NO: 11998 - RNA, 20 nt, Artificial Sequence
  Synthetic oligonucleotide: BID-698
ucacccacuuuccaaacccc

SEQ ID NO: 11999 - RNA, 20 nt, Artificial Sequence
  Synthetic oligonucleotide: BID-699
uccaaaccccugguuccgug

SEQ ID NO: 12000 - RNA, 20 nt, Artificial Sequence
  Synthetic oligonucleotide: BID-700
agacuguuccagaaacagcc

SEQ ID NO: 12001 - RNA, 20 nt, Artificial Sequence
  Synthetic oligonucleotide: BID-701
gacuguuccagaaacagccu

SEQ ID NO: 12002 - RNA, 20 nt, Artificial Sequence
  Synthetic oligonucleotide: BID-702
acuguuccagaaacagccug

SEQ ID NO: 12003 - RNA, 20 nt, Artificial Sequence
  Synthetic oligonucleotide: BID-703
auguuucccagagaaucauu

SEQ ID NO: 12004 - RNA, 20 nt, Artificial Sequence
  Synthetic oligonucleotide: BID-704
aucauuaggaauuaucccag

SEQ ID NO: 12005 - RNA, 20 nt, Artificial Sequence
  Synthetic oligonucleotide: BID-705
aggaauuaucccagcggcgc

SEQ ID NO: 12006 - RNA, 20 nt, Artificial Sequence
  Synthetic oligonucleotide: BID-706
cccagcggcgcuggaguaag

SEQ ID NO: 12007 - RNA, 20 nt, Artificial Sequence
  Synthetic oligonucleotide: BID-707
guaaguggccaacuuaaagu

SEQ ID NO: 12008 - RNA, 20 nt, Artificial Sequence
  Synthetic oligonucleotide: BID-708
cugucugaaacagucgcgua

SEQ ID NO: 12009 - RNA, 20 nt, Artificial Sequence
  Synthetic oligonucleotide: BID-709
ugucugaaacagucgcguaa

SEQ ID NO: 12010 - RNA, 20 nt, Artificial Sequence
  Synthetic oligonucleotide: BID-710
gucugaaacagucgcguaag

SEQ ID NO: 12011 - RNA, 20 nt, Artificial Sequence
  Synthetic oligonucleotide: BID-711
aaacagucgcguaaggggua

SEQ ID NO: 12012 - RNA, 20 nt, Artificial Sequence
  Synthetic oligonucleotide: BID-712
aacagucgcguaagggguaa

SEQ ID NO: 12013 - RNA, 20 nt, Artificial Sequence
  Synthetic oligonucleotide: BID-713
agucgcguaagggguaaggg

SEQ ID NO: 12014 - RNA, 20 nt, Artificial Sequence
  Synthetic oligonucleotide: BID-714
agggguaaggguggaaagcc

SEQ ID NO: 12015 - RNA, 20 nt, Artificial Sequence
  Synthetic oligonucleotide: BID-715
ccugguucucacugcgcugc

SEQ ID NO: 12016 - RNA, 20 nt, Artificial Sequence
  Synthetic oligonucleotide: BID-716
cccgcuccacagccccgcgc

SEQ ID NO: 12017 - RNA, 20 nt, Artificial Sequence
  Synthetic oligonucleotide: BID-717
uccacagccccgcgccggcg

SEQ ID NO: 12018 - RNA, 20 nt, Artificial Sequence
  Synthetic oligonucleotide: BID-718
ccacagccccgcgccggcgc

SEQ ID NO: 12019 - RNA, 20 nt, Artificial Sequence
  Synthetic oligonucleotide: BID-719
ccgcgccggcgcgggcuccc

SEQ ID NO: 12020 - RNA, 20 nt, Artificial Sequence
  Synthetic oligonucleotide: BID-720
cgcgccggcgcgggcucccc

SEQ ID NO: 12021 - RNA, 17 nt, Artificial Sequence
  Synthetic oligonucleotide: BID-721
cagccugagaccuccag

SEQ ID NO: 12022 - RNA, 17 nt, Artificial Sequence
  Synthetic oligonucleotide: BID-722
ccugagaccuccagagg

SEQ ID NO: 12023 - RNA, 17 nt, Artificial Sequence
  Synthetic oligonucleotide: BID-723
cugaaaaagaaauuagu

SEQ ID NO: 12024 - RNA, 17 nt, Artificial Sequence
  Synthetic oligonucleotide: BID-724
ugaaaaagaaauuaguu

SEQ ID NO: 12025 - RNA, 17 nt, Artificial Sequence
  Synthetic oligonucleotide: BID-725
aagaaauuaguugggug

SEQ ID NO: 12026 - RNA, 17 nt, Artificial Sequence
  Synthetic oligonucleotide: BID-726
gaauaaacaacaagcac

SEQ ID NO: 12027 - RNA, 17 nt, Artificial Sequence
  Synthetic oligonucleotide: BID-727
aauaaacaacaagcaca

SEQ ID NO: 12028 - RNA, 17 nt, Artificial Sequence
  Synthetic oligonucleotide: BID-728
acaacaagcacagggac

SEQ ID NO: 12029 - RNA, 17 nt, Artificial Sequence
  Synthetic oligonucleotide: BID-729
aagcacagggacuggug

SEQ ID NO: 12030 - RNA, 17 nt, Artificial Sequence
  Synthetic oligonucleotide: BID-730
agcacagggacugguga

SEQ ID NO: 12031 - RNA, 17 nt, Artificial Sequence
  Synthetic oligonucleotide: BID-731
gcacagggacuggugag

SEQ ID NO: 12032 - RNA, 17 nt, Artificial Sequence
  Synthetic oligonucleotide: BID-732
agggacuggugaggggc

SEQ ID NO: 12033 - RNA, 17 nt, Artificial Sequence
  Synthetic oligonucleotide: BID-733
gggacuggugaggggcu

SEQ ID NO: 12034 - RNA, 17 nt, Artificial Sequence
  Synthetic oligonucleotide: BID-734
auucucugcaacccaca

SEQ ID NO: 12035 - RNA, 17 nt, Artificial Sequence
  Synthetic oligonucleotide: BID-735
cccacuuuccaaacccc

SEQ ID NO: 12036 - RNA, 17 nt, Artificial Sequence
  Synthetic oligonucleotide: BID-736
aaaccccugguuccgug

SEQ ID NO: 12037 - RNA, 17 nt, Artificial Sequence
  Synthetic oligonucleotide: BID-737
cuguuccagaaacagcc

SEQ ID NO: 12038 - RNA, 17 nt, Artificial Sequence
  Synthetic oligonucleotide: BID-738
uguuccagaaacagccu

SEQ ID NO: 12039 - RNA, 17 nt, Artificial Sequence
  Synthetic oligonucleotide: BID-739
guuccagaaacagccug

SEQ ID NO: 12040 - RNA, 17 nt, Artificial Sequence
  Synthetic oligonucleotide: BID-740
uuucccagagaaucauu

SEQ ID NO: 12041 - RNA, 17 nt, Artificial Sequence
  Synthetic oligonucleotide: BID-741
auuaggaauuaucccag

SEQ ID NO: 12042 - RNA, 17 nt, Artificial Sequence
  Synthetic oligonucleotide: BID-742
aauuaucccagcggcgc

SEQ ID NO: 12043 - RNA, 17 nt, Artificial Sequence
  Synthetic oligonucleotide: BID-743
agcggcgcuggaguaag

SEQ ID NO: 12044 - RNA, 17 nt, Artificial Sequence
  Synthetic oligonucleotide: BID-744
aguggccaacuuaaagu

SEQ ID NO: 12045 - RNA, 17 nt, Artificial Sequence
  Synthetic oligonucleotide: BID-745
ucugaaacagucgcgua

SEQ ID NO: 12046 - RNA, 17 nt, Artificial Sequence
  Synthetic oligonucleotide: BID-746
cugaaacagucgcguaa

SEQ ID NO: 12047 - RNA, 17 nt, Artificial Sequence
  Synthetic oligonucleotide: BID-747
ugaaacagucgcguaag

SEQ ID NO: 12048 - RNA, 17 nt, Artificial Sequence
  Synthetic oligonucleotide: BID-748
cagucgcguaaggggua

SEQ ID NO: 12049 - RNA, 17 nt, Artificial Sequence
  Synthetic oligonucleotide: BID-749
agucgcguaagggguaa

SEQ ID NO: 12050 - RNA, 17 nt, Artificial Sequence
  Synthetic oligonucleotide: BID-750
cgcguaagggguaaggg

SEQ ID NO: 12051 - RNA, 17 nt, Artificial Sequence
  Synthetic oligonucleotide: BID-751
gguaaggguggaaagcc

SEQ ID NO: 12052 - RNA, 17 nt, Artificial Sequence
  Synthetic oligonucleotide: BID-752
gguucucacugcgcugc

SEQ ID NO: 12053 - RNA, 17 nt, Artificial Sequence
  Synthetic oligonucleotide: BID-753
gcuccacagccccgcgc

SEQ ID NO: 12054 - RNA, 17 nt, Artificial Sequence
  Synthetic oligonucleotide: BID-754
acagccccgcgccggcg

SEQ ID NO: 12055 - RNA, 17 nt, Artificial Sequence
  Synthetic oligonucleotide: BID-755
cagccccgcgccggcgc

SEQ ID NO: 12056 - RNA, 17 nt, Artificial Sequence
  Synthetic oligonucleotide: BID-756
cgccggcgcgggcuccc

SEQ ID NO: 12057 - RNA, 17 nt, Artificial Sequence
  Synthetic oligonucleotide: BID-757
gccggcgcgggcucccc

SEQ ID NO: 12058 - RNA, 20 nt, Artificial Sequence
  Synthetic oligonucleotide: BID-758
gggacccggggagcccgcgc

SEQ ID NO: 12059 - RNA, 20 nt, Artificial Sequence
  Synthetic oligonucleotide: BID-759
ccggggagcccgcgccggcg

SEQ ID NO: 12060 - RNA, 20 nt, Artificial Sequence
  Synthetic oligonucleotide: BID-760
cggggagcccgcgccggcgc

SEQ ID NO: 12061 - RNA, 20 nt, Artificial Sequence
  Synthetic oligonucleotide: BID-761
ggggagcccgcgccggcgcg

SEQ ID NO: 12062 - RNA, 20 nt, Artificial Sequence
  Synthetic oligonucleotide: BID-762
cccgcgccggcgcggggcug

SEQ ID NO: 12063 - RNA, 20 nt, Artificial Sequence
  Synthetic oligonucleotide: BID-763
gccggcgcggggcuguggag

SEQ ID NO: 12064 - RNA, 20 nt, Artificial Sequence
  Synthetic oligonucleotide: BID-764
ccggcgcggggcuguggagc

SEQ ID NO: 12065 - RNA, 20 nt, Artificial Sequence
  Synthetic oligonucleotide: BID-765
cggcgcggggcuguggagcg

SEQ ID NO: 12066 - RNA, 20 nt, Artificial Sequence
  Synthetic oligonucleotide: BID-766
cgcggggcuguggagcgggg

SEQ ID NO: 12067 - RNA, 20 nt, Artificial Sequence
  Synthetic oligonucleotide: BID-767
gcggggcuguggagcggggc

SEQ ID NO: 12068 - RNA, 20 nt, Artificial Sequence
  Synthetic oligonucleotide: BID-768
cggggcuguggagcggggcg

SEQ ID NO: 12069 - RNA, 20 nt, Artificial Sequence
  Synthetic oligonucleotide: BID-769
uguggagcggggcggggagc

SEQ ID NO: 12070 - RNA, 20 nt, Artificial Sequence
  Synthetic oligonucleotide: BID-770
ccggcagcgcagugagaacc

SEQ ID NO: 12071 - RNA, 20 nt, Artificial Sequence
  Synthetic oligonucleotide: BID-771
agugucguccaacuuuaagu

SEQ ID NO: 12072 - RNA, 20 nt, Artificial Sequence
  Synthetic oligonucleotide: BID-772
gccacuuacuccagcgccgc

SEQ ID NO: 12073 - RNA, 20 nt, Artificial Sequence
  Synthetic oligonucleotide: BID-773
ccacuuacuccagcgccgcu

SEQ ID NO: 12074 - RNA, 20 nt, Artificial Sequence
  Synthetic oligonucleotide: BID-774
gauaauuccuaaugauucuc

SEQ ID NO: 12075 - RNA, 20 nt, Artificial Sequence
  Synthetic oligonucleotide: BID-775
auaauuccuaaugauucucu

SEQ ID NO: 12076 - RNA, 20 nt, Artificial Sequence
  Synthetic oligonucleotide: BID-776
gggaaacauucagaaucccc

SEQ ID NO: 12077 - RNA, 20 nt, Artificial Sequence
  Synthetic oligonucleotide: BID-777
cagaauccccaggcuguuuc

SEQ ID NO: 12078 - RNA, 20 nt, Artificial Sequence
  Synthetic oligonucleotide: BID-778
aggcuguuucuggaacaguc

SEQ ID NO: 12079 - RNA, 20 nt, Artificial Sequence
  Synthetic oligonucleotide: BID-779
ggcuguuucuggaacagucu

SEQ ID NO: 12080 - RNA, 20 nt, Artificial Sequence
  Synthetic oligonucleotide: BID-780
gcuguuucuggaacagucug

SEQ ID NO: 12081 - RNA, 20 nt, Artificial Sequence
  Synthetic oligonucleotide: BID-781
guuucuggaacagucugggg

SEQ ID NO: 12082 - RNA, 20 nt, Artificial Sequence
  Synthetic oligonucleotide: BID-782
cagucugggguggucauucu

SEQ ID NO: 12083 - RNA, 20 nt, Artificial Sequence
  Synthetic oligonucleotide: BID-783
guggucauucuagguccuca

SEQ ID NO: 12084 - RNA, 20 nt, Artificial Sequence
  Synthetic oligonucleotide: BID-784
uucuagguccucacggaacc

SEQ ID NO: 12085 - RNA, 20 nt, Artificial Sequence
  Synthetic oligonucleotide: BID-785
ucuagguccucacggaacca

SEQ ID NO: 12086 - RNA, 20 nt, Artificial Sequence
  Synthetic oligonucleotide: BID-786
cuagguccucacggaaccag

SEQ ID NO: 12087 - RNA, 20 nt, Artificial Sequence
  Synthetic oligonucleotide: BID-787
uccucacggaaccagggguu

SEQ ID NO: 12088 - RNA, 20 nt, Artificial Sequence
  Synthetic oligonucleotide: BID-788
ggaaccagggguuuggaaag

SEQ ID NO: 12089 - RNA, 20 nt, Artificial Sequence
  Synthetic oligonucleotide: BID-789
gaaccagggguuuggaaagu

SEQ ID NO: 12090 - RNA, 20 nt, Artificial Sequence
  Synthetic oligonucleotide: BID-790
ggaaagugggugaagccaug

SEQ ID NO: 12091 - RNA, 20 nt, Artificial Sequence
  Synthetic oligonucleotide: BID-791
gaaagugggugaagccaugu

SEQ ID NO: 12092 - RNA, 20 nt, Artificial Sequence
  Synthetic oligonucleotide: BID-792
cauguggguugcagagaauc

SEQ ID NO: 12093 - RNA, 20 nt, Artificial Sequence
  Synthetic oligonucleotide: BID-793
uuguuuauucuuuaauuauu

SEQ ID NO: 12094 - RNA, 20 nt, Artificial Sequence
  Synthetic oligonucleotide: BID-794
guuuaacauauagauaaugc

SEQ ID NO: 12095 - RNA, 20 nt, Artificial Sequence
  Synthetic oligonucleotide: BID-795
uuuaacauauagauaaugcu

SEQ ID NO: 12096 - RNA, 20 nt, Artificial Sequence
  Synthetic oligonucleotide: BID-796
auagauaaugcugggacuac

SEQ ID NO: 12097 - RNA, 20 nt, Artificial Sequence
  Synthetic oligonucleotide: BID-797
auuucuuuuucaguuuuuag

SEQ ID NO: 12098 - RNA, 20 nt, Artificial Sequence
  Synthetic oligonucleotide: BID-798
ucuuuuucaguuuuuagugg

SEQ ID NO: 12099 - RNA, 20 nt, Artificial Sequence
  Synthetic oligonucleotide: BID-799
uuuucaguuuuuaguggagg

SEQ ID NO: 12100 - RNA, 20 nt, Artificial Sequence
  Synthetic oligonucleotide: BID-800
ucaguuuuuaguggaggugg

SEQ ID NO: 12101 - RNA, 20 nt, Artificial Sequence
  Synthetic oligonucleotide: BID-801
caguuuuuaguggagguggu

SEQ ID NO: 12102 - RNA, 20 nt, Artificial Sequence
  Synthetic oligonucleotide: BID-802
aguuuuuaguggagguggug

SEQ ID NO: 12103 - RNA, 20 nt, Artificial Sequence
  Synthetic oligonucleotide: BID-803
guuuuuaguggagguggugg

SEQ ID NO: 12104 - RNA, 20 nt, Artificial Sequence
  Synthetic oligonucleotide: BID-804
uuuuuaguggaggugguggg

SEQ ID NO: 12105 - RNA, 20 nt, Artificial Sequence
  Synthetic oligonucleotide: BID-805
uuuuaguggagguggugggg

SEQ ID NO: 12106 - RNA, 20 nt, Artificial Sequence
  Synthetic oligonucleotide: BID-806
uuuaguggaggugguggggg

SEQ ID NO: 12107 - RNA, 20 nt, Artificial Sequence
  Synthetic oligonucleotide: BID-807
uuaguggagguggugggggg

SEQ ID NO: 12108 - RNA, 20 nt, Artificial Sequence
  Synthetic oligonucleotide: BID-808
uaguggaggugguggggggg

SEQ ID NO: 12109 - RNA, 20 nt, Artificial Sequence
  Synthetic oligonucleotide: BID-809
ggggggggggucuccaccuc

SEQ ID NO: 12110 - RNA, 20 nt, Artificial Sequence
  Synthetic oligonucleotide: BID-810
gggggggucuccaccucugg

SEQ ID NO: 12111 - RNA, 20 nt, Artificial Sequence
  Synthetic oligonucleotide: BID-811
ucuccaccucuggaggucuc

SEQ ID NO: 12112 - RNA, 20 nt, Artificial Sequence
  Synthetic oligonucleotide: BID-812
caccucuggaggucucaggc

SEQ ID NO: 12113 - RNA, 17 nt, Artificial Sequence
  Synthetic oligonucleotide: BID-813
acccggggagcccgcgc

SEQ ID NO: 12114 - RNA, 17 nt, Artificial Sequence
  Synthetic oligonucleotide: BID-814
gggagcccgcgccggcg

SEQ ID NO: 12115 - RNA, 17 nt, Artificial Sequence
  Synthetic oligonucleotide: BID-815
ggagcccgcgccggcgc

SEQ ID NO: 12116 - RNA, 17 nt, Artificial Sequence
  Synthetic oligonucleotide: BID-816
gagcccgcgccggcgcg

SEQ ID NO: 12117 - RNA, 17 nt, Artificial Sequence
  Synthetic oligonucleotide: BID-817
gcgccggcgcggggcug

SEQ ID NO: 12118 - RNA, 17 nt, Artificial Sequence
  Synthetic oligonucleotide: BID-818
ggcgcggggcuguggag

SEQ ID NO: 12119 - RNA, 17 nt, Artificial Sequence
  Synthetic oligonucleotide: BID-819
gcgcggggcuguggagc

SEQ ID NO: 12120 - RNA, 17 nt, Artificial Sequence
  Synthetic oligonucleotide: BID-820
cgcggggcuguggagcg

SEQ ID NO: 12121 - RNA, 17 nt, Artificial Sequence
  Synthetic oligonucleotide: BID-821
ggggcuguggagcgggg

SEQ ID NO: 12122 - RNA, 17 nt, Artificial Sequence
  Synthetic oligonucleotide: BID-822
gggcuguggagcggggc

SEQ ID NO: 12123 - RNA, 17 nt, Artificial Sequence
  Synthetic oligonucleotide: BID-823
ggcuguggagcggggcg

SEQ ID NO: 12124 - RNA, 17 nt, Artificial Sequence
  Synthetic oligonucleotide: BID-824
ggagcggggcggggagc

SEQ ID NO: 12125 - RNA, 17 nt, Artificial Sequence
  Synthetic oligonucleotide: BID-825
gcagcgcagugagaacc

SEQ ID NO: 12126 - RNA, 17 nt, Artificial Sequence
  Synthetic oligonucleotide: BID-826
gucguccaacuuuaagu

SEQ ID NO: 12127 - RNA, 17 nt, Artificial Sequence
  Synthetic oligonucleotide: BID-827
acuuacuccagcgccgc

SEQ ID NO: 12128 - RNA, 17 nt, Artificial Sequence
  Synthetic oligonucleotide: BID-828
cuuacuccagcgccgcu

SEQ ID NO: 12129 - RNA, 17 nt, Artificial Sequence
  Synthetic oligonucleotide: BID-829
aauuccuaaugauucuc

SEQ ID NO: 12130 - RNA, 17 nt, Artificial Sequence
  Synthetic oligonucleotide: BID-830
auuccuaaugauucucu

SEQ ID NO: 12131 - RNA, 17 nt, Artificial Sequence
  Synthetic oligonucleotide: BID-831
aaacauucagaaucccc

SEQ ID NO: 12132 - RNA, 17 nt, Artificial Sequence
  Synthetic oligonucleotide: BID-832
aauccccaggcuguuuc

SEQ ID NO: 12133 - RNA, 17 nt, Artificial Sequence
  Synthetic oligonucleotide: BID-833
cuguuucuggaacaguc

SEQ ID NO: 12134 - RNA, 17 nt, Artificial Sequence
  Synthetic oligonucleotide: BID-834
uguuucuggaacagucu

SEQ ID NO: 12135 - RNA, 17 nt, Artificial Sequence
  Synthetic oligonucleotide: BID-835
guuucuggaacagucug

SEQ ID NO: 12136 - RNA, 17 nt, Artificial Sequence
  Synthetic oligonucleotide: BID-836
ucuggaacagucugggg

SEQ ID NO: 12137 - RNA, 17 nt, Artificial Sequence
  Synthetic oligonucleotide: BID-837
ucugggguggucauucu

SEQ ID NO: 12138 - RNA, 17 nt, Artificial Sequence
  Synthetic oligonucleotide: BID-838
gucauucuagguccuca

SEQ ID NO: 12139 - RNA, 17 nt, Artificial Sequence
  Synthetic oligonucleotide: BID-839
uagguccucacggaacc

SEQ ID NO: 12140 - RNA, 17 nt, Artificial Sequence
  Synthetic oligonucleotide: BID-840
agguccucacggaacca

SEQ ID NO: 12141 - RNA, 17 nt, Artificial Sequence
  Synthetic oligonucleotide: BID-841
gguccucacggaaccag

SEQ ID NO: 12142 - RNA, 17 nt, Artificial Sequence
  Synthetic oligonucleotide: BID-842
ucacggaaccagggguu

SEQ ID NO: 12143 - RNA, 17 nt, Artificial Sequence
  Synthetic oligonucleotide: BID-843
accagggguuuggaaag

SEQ ID NO: 12144 - RNA, 17 nt, Artificial Sequence
  Synthetic oligonucleotide: BID-844
ccagggguuuggaaagu

SEQ ID NO: 12145 - RNA, 17 nt, Artificial Sequence
  Synthetic oligonucleotide: BID-845
aagugggugaagccaug

SEQ ID NO: 12146 - RNA, 17 nt, Artificial Sequence
  Synthetic oligonucleotide: BID-846
agugggugaagccaugu

SEQ ID NO: 12147 - RNA, 17 nt, Artificial Sequence
  Synthetic oligonucleotide: BID-847
guggguugcagagaauc

SEQ ID NO: 12148 - RNA, 17 nt, Artificial Sequence
  Synthetic oligonucleotide: BID-848
uuuauucuuuaauuauu

SEQ ID NO: 12149 - RNA, 17 nt, Artificial Sequence
  Synthetic oligonucleotide: BID-849
uaacauauagauaaugc

SEQ ID NO: 12150 - RNA, 17 nt, Artificial Sequence
  Synthetic oligonucleotide: BID-850
aacauauagauaaugcu

SEQ ID NO: 12151 - RNA, 17 nt, Artificial Sequence
  Synthetic oligonucleotide: BID-851
gauaaugcugggacuac

SEQ ID NO: 12152 - RNA, 17 nt, Artificial Sequence
  Synthetic oligonucleotide: BID-852
ucuuuuucaguuuuuag

SEQ ID NO: 12153 - RNA, 17 nt, Artificial Sequence
  Synthetic oligonucleotide: BID-853
uuuucaguuuuuagugg

SEQ ID NO: 12154 - RNA, 17 nt, Artificial Sequence
  Synthetic oligonucleotide: BID-854
ucaguuuuuaguggagg

SEQ ID NO: 12155 - RNA, 17 nt, Artificial Sequence
  Synthetic oligonucleotide: BID-855
guuuuuaguggaggugg

SEQ ID NO: 12156 - RNA, 17 nt, Artificial Sequence
  Synthetic oligonucleotide: BID-856
uuuuuaguggagguggu

SEQ ID NO: 12157 - RNA, 17 nt, Artificial Sequence
  Synthetic oligonucleotide: BID-857
uuuuaguggagguggug

SEQ ID NO: 12158 - RNA, 17 nt, Artificial Sequence
  Synthetic oligonucleotide: BID-858
uuuaguggagguggugg

SEQ ID NO: 12159 - RNA, 17 nt, Artificial Sequence
  Synthetic oligonucleotide: BID-859
uuaguggaggugguggg

SEQ ID NO: 12160 - RNA, 17 nt, Artificial Sequence
  Synthetic oligonucleotide: BID-860
uaguggagguggugggg

SEQ ID NO: 12161 - RNA, 17 nt, Artificial Sequence
  Synthetic oligonucleotide: BID-861
aguggaggugguggggg

SEQ ID NO: 12162 - RNA, 17 nt, Artificial Sequence
  Synthetic oligonucleotide: BID-862
guggagguggugggggg

SEQ ID NO: 12163 - RNA, 17 nt, Artificial Sequence
  Synthetic oligonucleotide: BID-863
uggaggugguggggggg

SEQ ID NO: 12164 - RNA, 17 nt, Artificial Sequence
  Synthetic oligonucleotide: BID-864
gggggggucuccaccuc

SEQ ID NO: 12165 - RNA, 17 nt, Artificial Sequence
  Synthetic oligonucleotide: BID-865
ggggucuccaccucugg

SEQ ID NO: 12166 - RNA, 17 nt, Artificial Sequence
  Synthetic oligonucleotide: BID-866
ccaccucuggaggucuc

SEQ ID NO: 12167 - RNA, 17 nt, Artificial Sequence
  Synthetic oligonucleotide: BID-867
cucuggaggucucaggc

SEQ ID NO: 12168 - RNA, 20 nt, Artificial Sequence
  Synthetic oligonucleotide: BID-868
cagagcucuuccaccuucuc

SEQ ID NO: 12169 - RNA, 20 nt, Artificial Sequence
  Synthetic oligonucleotide: BID-869
ucaggcuugcacccccuucc

SEQ ID NO: 12170 - RNA, 20 nt, Artificial Sequence
  Synthetic oligonucleotide: BID-870
cucaguccucgcucucacug

SEQ ID NO: 12171 - RNA, 20 nt, Artificial Sequence
  Synthetic oligonucleotide: BID-871
ucaguccucgcucucacugu

SEQ ID NO: 12172 - RNA, 20 nt, Artificial Sequence
  Synthetic oligonucleotide: BID-872
caguccucgcucucacugug

SEQ ID NO: 12173 - RNA, 20 nt, Artificial Sequence
  Synthetic oligonucleotide: BID-873
aguccucgcucucacugugg

SEQ ID NO: 12174 - RNA, 20 nt, Artificial Sequence
  Synthetic oligonucleotide: BID-874
ucacugugggggagcugcag

SEQ ID NO: 12175 - RNA, 20 nt, Artificial Sequence
  Synthetic oligonucleotide: BID-875
ugggggagcugcagaggaug

SEQ ID NO: 12176 - RNA, 20 nt, Artificial Sequence
  Synthetic oligonucleotide: BID-876
cacauuccaucuccacccac

SEQ ID NO: 12177 - RNA, 20 nt, Artificial Sequence
  Synthetic oligonucleotide: BID-877
auuccaucuccacccacagg

SEQ ID NO: 12178 - RNA, 20 nt, Artificial Sequence
  Synthetic oligonucleotide: BID-878
acccacaggaggcuuugaga

SEQ ID NO: 12179 - RNA, 20 nt, Artificial Sequence
  Synthetic oligonucleotide: BID-879
cccacaggaggcuuugagau

SEQ ID NO: 12180 - RNA, 20 nt, Artificial Sequence
  Synthetic oligonucleotide: BID-880
ccacaggaggcuuugagaug

SEQ ID NO: 12181 - RNA, 20 nt, Artificial Sequence
  Synthetic oligonucleotide: BID-881
cacaggaggcuuugagaugg

SEQ ID NO: 12182 - RNA, 20 nt, Artificial Sequence
  Synthetic oligonucleotide: BID-882
acaggaggcuuugagauggg

SEQ ID NO: 12183 - RNA, 20 nt, Artificial Sequence
  Synthetic oligonucleotide: BID-883
ugagauggggggagcucucc

SEQ ID NO: 12184 - RNA, 20 nt, Artificial Sequence
  Synthetic oligonucleotide: BID-884
gagauggggggagcucuccu

SEQ ID NO: 12185 - RNA, 20 nt, Artificial Sequence
  Synthetic oligonucleotide: BID-885
ggccugaaugugugccgucc

SEQ ID NO: 12186 - RNA, 20 nt, Artificial Sequence
  Synthetic oligonucleotide: BID-886
gccugaaugugugccguccu

SEQ ID NO: 12187 - RNA, 20 nt, Artificial Sequence
  Synthetic oligonucleotide: BID-887
ccugaaugugugccguccug

SEQ ID NO: 12188 - RNA, 20 nt, Artificial Sequence
  Synthetic oligonucleotide: BID-888
ccuggggcccugcagucccc

SEQ ID NO: 12189 - RNA, 20 nt, Artificial Sequence
  Synthetic oligonucleotide: BID-889
cuggggcccugcaguccccu

SEQ ID NO: 12190 - RNA, 20 nt, Artificial Sequence
  Synthetic oligonucleotide: BID-890
cgagaccagauucccugagc

SEQ ID NO: 12191 - RNA, 20 nt, Artificial Sequence
  Synthetic oligonucleotide: BID-891
gagaccagauucccugagcu

SEQ ID NO: 12192 - RNA, 20 nt, Artificial Sequence
  Synthetic oligonucleotide: BID-892
agaccagauucccugagcug

SEQ ID NO: 12193 - RNA, 20 nt, Artificial Sequence
  Synthetic oligonucleotide: BID-893
uucccugagcuggggucuua

SEQ ID NO: 12194 - RNA, 20 nt, Artificial Sequence
  Synthetic oligonucleotide: BID-894
ucccugagcuggggucuuaa

SEQ ID NO: 12195 - RNA, 20 nt, Artificial Sequence
  Synthetic oligonucleotide: BID-895
gagcuggggucuuaagggug

SEQ ID NO: 12196 - RNA, 20 nt, Artificial Sequence
  Synthetic oligonucleotide: BID-896
agcuggggucuuaagggugu

SEQ ID NO: 12197 - RNA, 20 nt, Artificial Sequence
  Synthetic oligonucleotide: BID-897
gcuggggucuuaagggugug

SEQ ID NO: 12198 - RNA, 20 nt, Artificial Sequence
  Synthetic oligonucleotide: BID-898
uaaggguguggggagcgcag

SEQ ID NO: 12199 - RNA, 20 nt, Artificial Sequence
  Synthetic oligonucleotide: BID-899
aaggguguggggagcgcaga

SEQ ID NO: 12200 - RNA, 20 nt, Artificial Sequence
  Synthetic oligonucleotide: BID-900
gggagcgcagagggauccuc

SEQ ID NO: 12201 - RNA, 20 nt, Artificial Sequence
  Synthetic oligonucleotide: BID-901
cagagggauccucuggcauc

SEQ ID NO: 12202 - RNA, 20 nt, Artificial Sequence
  Synthetic oligonucleotide: BID-902
uccucuggcaucaggaguug

SEQ ID NO: 12203 - RNA, 20 nt, Artificial Sequence
  Synthetic oligonucleotide: BID-903
guugagguagacagagcucc

SEQ ID NO: 12204 - RNA, 20 nt, Artificial Sequence
  Synthetic oligonucleotide: BID-904
uugagguagacagagcucca

SEQ ID NO: 12205 - RNA, 20 nt, Artificial Sequence
  Synthetic oligonucleotide: BID-905
agguagacagagcuccaggg

SEQ ID NO: 12206 - RNA, 20 nt, Artificial Sequence
  Synthetic oligonucleotide: BID-906
gagcuccagggaggcacugc

SEQ ID NO: 12207 - RNA, 20 nt, Artificial Sequence
  Synthetic oligonucleotide: BID-907
agcuccagggaggcacugcc

SEQ ID NO: 12208 - RNA, 20 nt, Artificial Sequence
  Synthetic oligonucleotide: BID-908
uccagggaggcacugccggg

SEQ ID NO: 12209 - RNA, 20 nt, Artificial Sequence
  Synthetic oligonucleotide: BID-909
cacugccgggaggacgaccc

SEQ ID NO: 12210 - RNA, 20 nt, Artificial Sequence
  Synthetic oligonucleotide: BID-910
ccuggccaagccucugccug

SEQ ID NO: 12211 - RNA, 20 nt, Artificial Sequence
  Synthetic oligonucleotide: BID-911
caagccucugccugcggccc

SEQ ID NO: 12212 - RNA, 20 nt, Artificial Sequence
  Synthetic oligonucleotide: BID-912
aagccucugccugcggccca

SEQ ID NO: 12213 - RNA, 20 nt, Artificial Sequence
  Synthetic oligonucleotide: BID-913
cccuucugccccucuugccc

SEQ ID NO: 12214 - RNA, 20 nt, Artificial Sequence
  Synthetic oligonucleotide: BID-914
ccuucugccccucuugccca

SEQ ID NO: 12215 - RNA, 20 nt, Artificial Sequence
  Synthetic oligonucleotide: BID-915
ucugccccucuugcccaggg

SEQ ID NO: 12216 - RNA, 20 nt, Artificial Sequence
  Synthetic oligonucleotide: BID-916
cugccccucuugcccaggga

SEQ ID NO: 12217 - RNA, 20 nt, Artificial Sequence
  Synthetic oligonucleotide: BID-917
cucuugcccagggagggaag

SEQ ID NO: 12218 - RNA, 20 nt, Artificial Sequence
  Synthetic oligonucleotide: BID-918
cagggagggaagaggaaaug

SEQ ID NO: 12219 - RNA, 20 nt, Artificial Sequence
  Synthetic oligonucleotide: BID-919
agggagggaagaggaaaugc

SEQ ID NO: 12220 - RNA, 20 nt, Artificial Sequence
  Synthetic oligonucleotide: BID-920
gggagggaagaggaaaugcg

SEQ ID NO: 12221 - RNA, 20 nt, Artificial Sequence
  Synthetic oligonucleotide: BID-921
aaugcggggucagcaguucg

SEQ ID NO: 12222 - RNA, 20 nt, Artificial Sequence
  Synthetic oligonucleotide: BID-922
cggggucagcaguucguggc

SEQ ID NO: 12223 - RNA, 20 nt, Artificial Sequence
  Synthetic oligonucleotide: BID-923
ggggucagcaguucguggcu

SEQ ID NO: 12224 - RNA, 20 nt, Artificial Sequence
  Synthetic oligonucleotide: BID-924
gggucagcaguucguggcug

SEQ ID NO: 12225 - RNA, 20 nt, Artificial Sequence
  Synthetic oligonucleotide: BID-925
aguucguggcugggguuuaa

SEQ ID NO: 12226 - RNA, 20 nt, Artificial Sequence
  Synthetic oligonucleotide: BID-926
cguggcugggguuuaaaggc

SEQ ID NO: 12227 - RNA, 20 nt, Artificial Sequence
  Synthetic oligonucleotide: BID-927
guggcugggguuuaaaggca

SEQ ID NO: 12228 - RNA, 20 nt, Artificial Sequence
  Synthetic oligonucleotide: BID-928
uuuaaaggcagggaucuccc

SEQ ID NO: 12229 - RNA, 20 nt, Artificial Sequence
  Synthetic oligonucleotide: BID-929
aaggcagggaucucccagga

SEQ ID NO: 12230 - RNA, 20 nt, Artificial Sequence
  Synthetic oligonucleotide: BID-930
aggcagggaucucccaggac

SEQ ID NO: 12231 - RNA, 20 nt, Artificial Sequence
  Synthetic oligonucleotide: BID-931
ggaucucccaggacgggcac

SEQ ID NO: 12232 - RNA, 20 nt, Artificial Sequence
  Synthetic oligonucleotide: BID-932
gaucucccaggacgggcaca

SEQ ID NO: 12233 - RNA, 20 nt, Artificial Sequence
  Synthetic oligonucleotide: BID-933
ggacgggcacagggagcaug

SEQ ID NO: 12234 - RNA, 17 nt, Artificial Sequence
  Synthetic oligonucleotide: BID-934
agcucuuccaccuucuc

SEQ ID NO: 12235 - RNA, 17 nt, Artificial Sequence
  Synthetic oligonucleotide: BID-935
ggcuugcacccccuucc

SEQ ID NO: 12236 - RNA, 17 nt, Artificial Sequence
  Synthetic oligonucleotide: BID-936
aguccucgcucucacug

SEQ ID NO: 12237 - RNA, 17 nt, Artificial Sequence
  Synthetic oligonucleotide: BID-937
guccucgcucucacugu

SEQ ID NO: 12238 - RNA, 17 nt, Artificial Sequence
  Synthetic oligonucleotide: BID-938
uccucgcucucacugug

SEQ ID NO: 12239 - RNA, 17 nt, Artificial Sequence
  Synthetic oligonucleotide: BID-939
ccucgcucucacugugg

SEQ ID NO: 12240 - RNA, 17 nt, Artificial Sequence
  Synthetic oligonucleotide: BID-940
cugugggggagcugcag

SEQ ID NO: 12241 - RNA, 17 nt, Artificial Sequence
  Synthetic oligonucleotide: BID-941
gggagcugcagaggaug

SEQ ID NO: 12242 - RNA, 17 nt, Artificial Sequence
  Synthetic oligonucleotide: BID-942
auuccaucuccacccac

SEQ ID NO: 12243 - RNA, 17 nt, Artificial Sequence
  Synthetic oligonucleotide: BID-943
ccaucuccacccacagg

SEQ ID NO: 12244 - RNA, 17 nt, Artificial Sequence
  Synthetic oligonucleotide: BID-944
cacaggaggcuuugaga

SEQ ID NO: 12245 - RNA, 17 nt, Artificial Sequence
  Synthetic oligonucleotide: BID-945
acaggaggcuuugagau

SEQ ID NO: 12246 - RNA, 17 nt, Artificial Sequence
  Synthetic oligonucleotide: BID-946
caggaggcuuugagaug

SEQ ID NO: 12247 - RNA, 17 nt, Artificial Sequence
  Synthetic oligonucleotide: BID-947
aggaggcuuugagaugg

SEQ ID NO: 12248 - RNA, 17 nt, Artificial Sequence
  Synthetic oligonucleotide: BID-948
ggaggcuuugagauggg

SEQ ID NO: 12249 - RNA, 17 nt, Artificial Sequence
  Synthetic oligonucleotide: BID-949
gauggggggagcucucc

SEQ ID NO: 12250 - RNA, 17 nt, Artificial Sequence
  Synthetic oligonucleotide: BID-950
auggggggagcucuccu

SEQ ID NO: 12251 - RNA, 17 nt, Artificial Sequence
  Synthetic oligonucleotide: BID-951
cugaaugugugccgucc

SEQ ID NO: 12252 - RNA, 17 nt, Artificial Sequence
  Synthetic oligonucleotide: BID-952
ugaaugugugccguccu

SEQ ID NO: 12253 - RNA, 17 nt, Artificial Sequence
  Synthetic oligonucleotide: BID-953
gaaugugugccguccug

SEQ ID NO: 12254 - RNA, 17 nt, Artificial Sequence
  Synthetic oligonucleotide: BID-954
ggggcccugcagucccc

SEQ ID NO: 12255 - RNA, 17 nt, Artificial Sequence
  Synthetic oligonucleotide: BID-955
gggcccugcaguccccu

SEQ ID NO: 12256 - RNA, 17 nt, Artificial Sequence
  Synthetic oligonucleotide: BID-956
gaccagauucccugagc

SEQ ID NO: 12257 - RNA, 17 nt, Artificial Sequence
  Synthetic oligonucleotide: BID-957
accagauucccugagcu

SEQ ID NO: 12258 - RNA, 17 nt, Artificial Sequence
  Synthetic oligonucleotide: BID-958
ccagauucccugagcug

SEQ ID NO: 12259 - RNA, 17 nt, Artificial Sequence
  Synthetic oligonucleotide: BID-959
ccugagcuggggucuua

SEQ ID NO: 12260 - RNA, 17 nt, Artificial Sequence
  Synthetic oligonucleotide: BID-960
cugagcuggggucuuaa

SEQ ID NO: 12261 - RNA, 17 nt, Artificial Sequence
  Synthetic oligonucleotide: BID-961
cuggggucuuaagggug

SEQ ID NO: 12262 - RNA, 17 nt, Artificial Sequence
  Synthetic oligonucleotide: BID-962
uggggucuuaagggugu

SEQ ID NO: 12263 - RNA, 17 nt, Artificial Sequence
  Synthetic oligonucleotide: BID-963
ggggucuuaagggugug

SEQ ID NO: 12264 - RNA, 17 nt, Artificial Sequence
  Synthetic oligonucleotide: BID-964
ggguguggggagcgcag

SEQ ID NO: 12265 - RNA, 17 nt, Artificial Sequence
  Synthetic oligonucleotide: BID-965
gguguggggagcgcaga

SEQ ID NO: 12266 - RNA, 17 nt, Artificial Sequence
  Synthetic oligonucleotide: BID-966
agcgcagagggauccuc

SEQ ID NO: 12267 - RNA, 17 nt, Artificial Sequence
  Synthetic oligonucleotide: BID-967
agggauccucuggcauc

SEQ ID NO: 12268 - RNA, 17 nt, Artificial Sequence
  Synthetic oligonucleotide: BID-968
ucuggcaucaggaguug

SEQ ID NO: 12269 - RNA, 17 nt, Artificial Sequence
  Synthetic oligonucleotide: BID-969
gagguagacagagcucc

SEQ ID NO: 12270 - RNA, 17 nt, Artificial Sequence
  Synthetic oligonucleotide: BID-970
agguagacagagcucca

SEQ ID NO: 12271 - RNA, 17 nt, Artificial Sequence
  Synthetic oligonucleotide: BID-971
uagacagagcuccaggg

SEQ ID NO: 12272 - RNA, 17 nt, Artificial Sequence
  Synthetic oligonucleotide: BID-972
cuccagggaggcacugc

SEQ ID NO: 12273 - RNA, 17 nt, Artificial Sequence
  Synthetic oligonucleotide: BID-973
uccagggaggcacugcc

SEQ ID NO: 12274 - RNA, 17 nt, Artificial Sequence
  Synthetic oligonucleotide: BID-974
agggaggcacugccggg

SEQ ID NO: 12275 - RNA, 17 nt, Artificial Sequence
  Synthetic oligonucleotide: BID-975
ugccgggaggacgaccc

SEQ ID NO: 12276 - RNA, 17 nt, Artificial Sequence
  Synthetic oligonucleotide: BID-976
ggccaagccucugccug

SEQ ID NO: 12277 - RNA, 17 nt, Artificial Sequence
  Synthetic oligonucleotide: BID-977
gccucugccugcggccc

SEQ ID NO: 12278 - RNA, 17 nt, Artificial Sequence
  Synthetic oligonucleotide: BID-978
ccucugccugcggccca

SEQ ID NO: 12279 - RNA, 17 nt, Artificial Sequence
  Synthetic oligonucleotide: BID-979
uucugccccucuugccc

SEQ ID NO: 12280 - RNA, 17 nt, Artificial Sequence
  Synthetic oligonucleotide: BID-980
ucugccccucuugccca

SEQ ID NO: 12281 - RNA, 17 nt, Artificial Sequence
  Synthetic oligonucleotide: BID-981
gccccucuugcccaggg

SEQ ID NO: 12282 - RNA, 17 nt, Artificial Sequence
  Synthetic oligonucleotide: BID-982
ccccucuugcccaggga

SEQ ID NO: 12283 - RNA, 17 nt, Artificial Sequence
  Synthetic oligonucleotide: BID-983
uugcccagggagggaag

SEQ ID NO: 12284 - RNA, 17 nt, Artificial Sequence
  Synthetic oligonucleotide: BID-984
ggagggaagaggaaaug

SEQ ID NO: 12285 - RNA, 17 nt, Artificial Sequence
  Synthetic oligonucleotide: BID-985
gagggaagaggaaaugc

SEQ ID NO: 12286 - RNA, 17 nt, Artificial Sequence
  Synthetic oligonucleotide: BID-986
agggaagaggaaaugcg

SEQ ID NO: 12287 - RNA, 17 nt, Artificial Sequence
  Synthetic oligonucleotide: BID-987
gcggggucagcaguucg

SEQ ID NO: 12288 - RNA, 17 nt, Artificial Sequence
  Synthetic oligonucleotide: BID-988
ggucagcaguucguggc

SEQ ID NO: 12289 - RNA, 17 nt, Artificial Sequence
  Synthetic oligonucleotide: BID-989
gucagcaguucguggcu

SEQ ID NO: 12290 - RNA, 17 nt, Artificial Sequence
  Synthetic oligonucleotide: BID-990
ucagcaguucguggcug

SEQ ID NO: 12291 - RNA, 17 nt, Artificial Sequence
  Synthetic oligonucleotide: BID-991
ucguggcugggguuuaa

SEQ ID NO: 12292 - RNA, 17 nt, Artificial Sequence
  Synthetic oligonucleotide: BID-992
ggcugggguuuaaaggc

SEQ ID NO: 12293 - RNA, 17 nt, Artificial Sequence
  Synthetic oligonucleotide: BID-993
gcugggguuuaaaggca

SEQ ID NO: 12294 - RNA, 17 nt, Artificial Sequence
  Synthetic oligonucleotide: BID-994
aaaggcagggaucuccc

SEQ ID NO: 12295 - RNA, 17 nt, Artificial Sequence
  Synthetic oligonucleotide: BID-995
gcagggaucucccagga

SEQ ID NO: 12296 - RNA, 17 nt, Artificial Sequence
  Synthetic oligonucleotide: BID-996
cagggaucucccaggac

SEQ ID NO: 12297 - RNA, 17 nt, Artificial Sequence
  Synthetic oligonucleotide: BID-997
ucucccaggacgggcac

SEQ ID NO: 12298 - RNA, 17 nt, Artificial Sequence
  Synthetic oligonucleotide: BID-998
cucccaggacgggcaca

SEQ ID NO: 12299 - RNA, 17 nt, Artificial Sequence
  Synthetic oligonucleotide: BID-999
cgggcacagggagcaug

SEQ ID NO: 12300 - RNA, 20 nt, Artificial Sequence
  Synthetic oligonucleotide: BID-1000
caugcucccugugcccgucc

SEQ ID NO: 12301 - RNA, 20 nt, Artificial Sequence
  Synthetic oligonucleotide: BID-1001
augcucccugugcccguccu

SEQ ID NO: 12302 - RNA, 20 nt, Artificial Sequence
  Synthetic oligonucleotide: BID-1002
cgcauuuccucuucccuccc

SEQ ID NO: 12303 - RNA, 20 nt, Artificial Sequence
  Synthetic oligonucleotide: BID-1003
gcauuuccucuucccucccu

SEQ ID NO: 12304 - RNA, 20 nt, Artificial Sequence
  Synthetic oligonucleotide: BID-1004
cucuucccucccugggcaag

SEQ ID NO: 12305 - RNA, 20 nt, Artificial Sequence
  Synthetic oligonucleotide: BID-1005
ucuucccucccugggcaaga

SEQ ID NO: 12306 - RNA, 20 nt, Artificial Sequence
  Synthetic oligonucleotide: BID-1006
cuucccucccugggcaagag

SEQ ID NO: 12307 - RNA, 20 nt, Artificial Sequence
  Synthetic oligonucleotide: BID-1007
cccugggcaagaggggcaga

SEQ ID NO: 12308 - RNA, 20 nt, Artificial Sequence
  Synthetic oligonucleotide: BID-1008
ccugggcaagaggggcagaa

SEQ ID NO: 12309 - RNA, 20 nt, Artificial Sequence
  Synthetic oligonucleotide: BID-1009
cugggcaagaggggcagaag

SEQ ID NO: 12310 - RNA, 20 nt, Artificial Sequence
  Synthetic oligonucleotide: BID-1010
gcaagaggggcagaaggggc

SEQ ID NO: 12311 - RNA, 20 nt, Artificial Sequence
  Synthetic oligonucleotide: BID-1011
caagaggggcagaaggggca

SEQ ID NO: 12312 - RNA, 20 nt, Artificial Sequence
  Synthetic oligonucleotide: BID-1012
aggggcagggacgcacaccc

SEQ ID NO: 12313 - RNA, 20 nt, Artificial Sequence
  Synthetic oligonucleotide: BID-1013
ggggcagggacgcacacccu

SEQ ID NO: 12314 - RNA, 20 nt, Artificial Sequence
  Synthetic oligonucleotide: BID-1014
ggacgcacacccugggccgc

SEQ ID NO: 12315 - RNA, 20 nt, Artificial Sequence
  Synthetic oligonucleotide: BID-1015
acacccugggccgcaggcag

SEQ ID NO: 12316 - RNA, 20 nt, Artificial Sequence
  Synthetic oligonucleotide: BID-1016
cugggccgcaggcagaggcu

SEQ ID NO: 12317 - RNA, 20 nt, Artificial Sequence
  Synthetic oligonucleotide: BID-1017
ccgcaggcagaggcuuggcc

SEQ ID NO: 12318 - RNA, 20 nt, Artificial Sequence
  Synthetic oligonucleotide: BID-1018
cgcaggcagaggcuuggcca

SEQ ID NO: 12319 - RNA, 20 nt, Artificial Sequence
  Synthetic oligonucleotide: BID-1019
cuuggccagggucguccucc

SEQ ID NO: 12320 - RNA, 20 nt, Artificial Sequence
  Synthetic oligonucleotide: BID-1020
uccucccggcagugccuccc

SEQ ID NO: 12321 - RNA, 20 nt, Artificial Sequence
  Synthetic oligonucleotide: BID-1021
accucaacuccugaugccag

SEQ ID NO: 12322 - RNA, 20 nt, Artificial Sequence
  Synthetic oligonucleotide: BID-1022
cacccuuaagaccccagcuc

SEQ ID NO: 12323 - RNA, 20 nt, Artificial Sequence
  Synthetic oligonucleotide: BID-1023
acccuuaagaccccagcuca

SEQ ID NO: 12324 - RNA, 20 nt, Artificial Sequence
  Synthetic oligonucleotide: BID-1024
agaccccagcucagggaauc

SEQ ID NO: 12325 - RNA, 20 nt, Artificial Sequence
  Synthetic oligonucleotide: BID-1025
cagcucagggaaucuggucu

SEQ ID NO: 12326 - RNA, 20 nt, Artificial Sequence
  Synthetic oligonucleotide: BID-1026
uggucucggucaucacuccc

SEQ ID NO: 12327 - RNA, 20 nt, Artificial Sequence
  Synthetic oligonucleotide: BID-1027
ggucucggucaucacuccca

SEQ ID NO: 12328 - RNA, 20 nt, Artificial Sequence
  Synthetic oligonucleotide: BID-1028
gucucggucaucacucccag

SEQ ID NO: 12329 - RNA, 20 nt, Artificial Sequence
  Synthetic oligonucleotide: BID-1029
caucacucccaggggacugc

SEQ ID NO: 12330 - RNA, 20 nt, Artificial Sequence
  Synthetic oligonucleotide: BID-1030
aucacucccaggggacugca

SEQ ID NO: 12331 - RNA, 20 nt, Artificial Sequence
  Synthetic oligonucleotide: BID-1031
ccaggggacugcagggcccc

SEQ ID NO: 12332 - RNA, 20 nt, Artificial Sequence
  Synthetic oligonucleotide: BID-1032
gggacugcagggccccagga

SEQ ID NO: 12333 - RNA, 20 nt, Artificial Sequence
  Synthetic oligonucleotide: BID-1033
ccccaggacggcacacauuc

SEQ ID NO: 12334 - RNA, 20 nt, Artificial Sequence
  Synthetic oligonucleotide: BID-1034
gacggcacacauucaggccc

SEQ ID NO: 12335 - RNA, 20 nt, Artificial Sequence
  Synthetic oligonucleotide: BID-1035
ccccaucucaaagccuccug

SEQ ID NO: 12336 - RNA, 20 nt, Artificial Sequence
  Synthetic oligonucleotide: BID-1036
cccaucucaaagccuccugu

SEQ ID NO: 12337 - RNA, 20 nt, Artificial Sequence
  Synthetic oligonucleotide: BID-1037
aucucaaagccuccuguggg

SEQ ID NO: 12338 - RNA, 20 nt, Artificial Sequence
  Synthetic oligonucleotide: BID-1038
aagccuccuguggguggaga

SEQ ID NO: 12339 - RNA, 20 nt, Artificial Sequence
  Synthetic oligonucleotide: BID-1039
cuguggguggagauggaaug

SEQ ID NO: 12340 - RNA, 20 nt, Artificial Sequence
  Synthetic oligonucleotide: BID-1040
gcucccccacagugagagcg

SEQ ID NO: 12341 - RNA, 20 nt, Artificial Sequence
  Synthetic oligonucleotide: BID-1041
cacagugagagcgaggacug

SEQ ID NO: 12342 - RNA, 20 nt, Artificial Sequence
  Synthetic oligonucleotide: BID-1042
acagugagagcgaggacuga

SEQ ID NO: 12343 - RNA, 20 nt, Artificial Sequence
  Synthetic oligonucleotide: BID-1043
gagagcgaggacugagggug

SEQ ID NO: 12344 - RNA, 20 nt, Artificial Sequence
  Synthetic oligonucleotide: BID-1044
gaggacugaggguguggaua

SEQ ID NO: 12345 - RNA, 20 nt, Artificial Sequence
  Synthetic oligonucleotide: BID-1045
gaggguguggauaaggcucc

SEQ ID NO: 12346 - RNA, 20 nt, Artificial Sequence
  Synthetic oligonucleotide: BID-1046
guguggauaaggcuccagga

SEQ ID NO: 12347 - RNA, 20 nt, Artificial Sequence
  Synthetic oligonucleotide: BID-1047
uguggauaaggcuccaggaa

SEQ ID NO: 12348 - RNA, 20 nt, Artificial Sequence
  Synthetic oligonucleotide: BID-1048
guggauaaggcuccaggaag

SEQ ID NO: 12349 - RNA, 20 nt, Artificial Sequence
  Synthetic oligonucleotide: BID-1049
uggauaaggcuccaggaagg

SEQ ID NO: 12350 - RNA, 20 nt, Artificial Sequence
  Synthetic oligonucleotide: BID-1050
aagggggugcaagccugaga

SEQ ID NO: 12351 - RNA, 20 nt, Artificial Sequence
  Synthetic oligonucleotide: BID-1051
ggggugcaagccugagaagg

SEQ ID NO: 12352 - RNA, 20 nt, Artificial Sequence
  Synthetic oligonucleotide: BID-1052
cugagaagguggaagagcuc

SEQ ID NO: 12353 - RNA, 20 nt, Artificial Sequence
  Synthetic oligonucleotide: BID-1053
ugagaagguggaagagcucu

SEQ ID NO: 12354 - RNA, 20 nt, Artificial Sequence
  Synthetic oligonucleotide: BID-1054
gaagguggaagagcucuggg

SEQ ID NO: 12355 - RNA, 20 nt, Artificial Sequence
  Synthetic oligonucleotide: BID-1055
aagguggaagagcucugggu

SEQ ID NO: 12356 - RNA, 17 nt, Artificial Sequence
  Synthetic oligonucleotide: BID-1056
gcucccugugcccgucc

SEQ ID NO: 12357 - RNA, 17 nt, Artificial Sequence
  Synthetic oligonucleotide: BID-1057
cucccugugcccguccu

SEQ ID NO: 12358 - RNA, 17 nt, Artificial Sequence
  Synthetic oligonucleotide: BID-1058
auuuccucuucccuccc

SEQ ID NO: 12359 - RNA, 17 nt, Artificial Sequence
  Synthetic oligonucleotide: BID-1059
uuuccucuucccucccu

SEQ ID NO: 12360 - RNA, 17 nt, Artificial Sequence
  Synthetic oligonucleotide: BID-1060
uucccucccugggcaag

SEQ ID NO: 12361 - RNA, 17 nt, Artificial Sequence
  Synthetic oligonucleotide: BID-1061
ucccucccugggcaaga

SEQ ID NO: 12362 - RNA, 17 nt, Artificial Sequence
  Synthetic oligonucleotide: BID-1062
cccucccugggcaagag

SEQ ID NO: 12363 - RNA, 17 nt, Artificial Sequence
  Synthetic oligonucleotide: BID-1063
ugggcaagaggggcaga

SEQ ID NO: 12364 - RNA, 17 nt, Artificial Sequence
  Synthetic oligonucleotide: BID-1064
gggcaagaggggcagaa

SEQ ID NO: 12365 - RNA, 17 nt, Artificial Sequence
  Synthetic oligonucleotide: BID-1065
ggcaagaggggcagaag

SEQ ID NO: 12366 - RNA, 17 nt, Artificial Sequence
  Synthetic oligonucleotide: BID-1066
agaggggcagaaggggc

SEQ ID NO: 12367 - RNA, 17 nt, Artificial Sequence
  Synthetic oligonucleotide: BID-1067
gaggggcagaaggggca

SEQ ID NO: 12368 - RNA, 17 nt, Artificial Sequence
  Synthetic oligonucleotide: BID-1068
ggcagggacgcacaccc

SEQ ID NO: 12369 - RNA, 17 nt, Artificial Sequence
  Synthetic oligonucleotide: BID-1069
gcagggacgcacacccu

SEQ ID NO: 12370 - RNA, 17 nt, Artificial Sequence
  Synthetic oligonucleotide: BID-1070
cgcacacccugggccgc

SEQ ID NO: 12371 - RNA, 17 nt, Artificial Sequence
  Synthetic oligonucleotide: BID-1071
cccugggccgcaggcag

SEQ ID NO: 12372 - RNA, 17 nt, Artificial Sequence
  Synthetic oligonucleotide: BID-1072
ggccgcaggcagaggcu

SEQ ID NO: 12373 - RNA, 17 nt, Artificial Sequence
  Synthetic oligonucleotide: BID-1073
caggcagaggcuuggcc

SEQ ID NO: 12374 - RNA, 17 nt, Artificial Sequence
  Synthetic oligonucleotide: BID-1074
aggcagaggcuuggcca

SEQ ID NO: 12375 - RNA, 17 nt, Artificial Sequence
  Synthetic oligonucleotide: BID-1075
ggccagggucguccucc

SEQ ID NO: 12376 - RNA, 17 nt, Artificial Sequence
  Synthetic oligonucleotide: BID-1076
ucccggcagugccuccc

SEQ ID NO: 12377 - RNA, 17 nt, Artificial Sequence
  Synthetic oligonucleotide: BID-1077
ucaacuccugaugccag

SEQ ID NO: 12378 - RNA, 17 nt, Artificial Sequence
  Synthetic oligonucleotide: BID-1078
ccuuaagaccccagcuc

SEQ ID NO: 12379 - RNA, 17 nt, Artificial Sequence
  Synthetic oligonucleotide: BID-1079
cuuaagaccccagcuca

SEQ ID NO: 12380 - RNA, 17 nt, Artificial Sequence
  Synthetic oligonucleotide: BID-1080
ccccagcucagggaauc

SEQ ID NO: 12381 - RNA, 17 nt, Artificial Sequence
  Synthetic oligonucleotide: BID-1081
cucagggaaucuggucu

SEQ ID NO: 12382 - RNA, 17 nt, Artificial Sequence
  Synthetic oligonucleotide: BID-1082
ucucggucaucacuccc

SEQ ID NO: 12383 - RNA, 17 nt, Artificial Sequence
  Synthetic oligonucleotide: BID-1083
cucggucaucacuccca

SEQ ID NO: 12384 - RNA, 17 nt, Artificial Sequence
  Synthetic oligonucleotide: BID-1084
ucggucaucacucccag

SEQ ID NO: 12385 - RNA, 17 nt, Artificial Sequence
  Synthetic oligonucleotide: BID-1085
cacucccaggggacugc

SEQ ID NO: 12386 - RNA, 17 nt, Artificial Sequence
  Synthetic oligonucleotide: BID-1086
acucccaggggacugca

SEQ ID NO: 12387 - RNA, 17 nt, Artificial Sequence
  Synthetic oligonucleotide: BID-1087
ggggacugcagggcccc

SEQ ID NO: 12388 - RNA, 17 nt, Artificial Sequence
  Synthetic oligonucleotide: BID-1088
acugcagggccccagga

SEQ ID NO: 12389 - RNA, 17 nt, Artificial Sequence
  Synthetic oligonucleotide: BID-1089
caggacggcacacauuc

SEQ ID NO: 12390 - RNA, 17 nt, Artificial Sequence
  Synthetic oligonucleotide: BID-1090
ggcacacauucaggccc

SEQ ID NO: 12391 - RNA, 17 nt, Artificial Sequence
  Synthetic oligonucleotide: BID-1091
caucucaaagccuccug

SEQ ID NO: 12392 - RNA, 17 nt, Artificial Sequence
  Synthetic oligonucleotide: BID-1092
aucucaaagccuccugu

SEQ ID NO: 12393 - RNA, 17 nt, Artificial Sequence
  Synthetic oligonucleotide: BID-1093
ucaaagccuccuguggg

SEQ ID NO: 12394 - RNA, 17 nt, Artificial Sequence
  Synthetic oligonucleotide: BID-1094
ccuccuguggguggaga

SEQ ID NO: 12395 - RNA, 17 nt, Artificial Sequence
  Synthetic oligonucleotide: BID-1095
uggguggagauggaaug

SEQ ID NO: 12396 - RNA, 17 nt, Artificial Sequence
  Synthetic oligonucleotide: BID-1096
cccccacagugagagcg

SEQ ID NO: 12397 - RNA, 17 nt, Artificial Sequence
  Synthetic oligonucleotide: BID-1097
agugagagcgaggacug

SEQ ID NO: 12398 - RNA, 17 nt, Artificial Sequence
  Synthetic oligonucleotide: BID-1098
gugagagcgaggacuga

SEQ ID NO: 12399 - RNA, 17 nt, Artificial Sequence
  Synthetic oligonucleotide: BID-1099
agcgaggacugagggug

SEQ ID NO: 12400 - RNA, 17 nt, Artificial Sequence
  Synthetic oligonucleotide: BID-1100
gacugaggguguggaua

SEQ ID NO: 12401 - RNA, 17 nt, Artificial Sequence
  Synthetic oligonucleotide: BID-1101
gguguggauaaggcucc

SEQ ID NO: 12402 - RNA, 17 nt, Artificial Sequence
  Synthetic oligonucleotide: BID-1102
uggauaaggcuccagga

SEQ ID NO: 12403 - RNA, 17 nt, Artificial Sequence
  Synthetic oligonucleotide: BID-1103
ggauaaggcuccaggaa

SEQ ID NO: 12404 - RNA, 17 nt, Artificial Sequence
  Synthetic oligonucleotide: BID-1104
gauaaggcuccaggaag

SEQ ID NO: 12405 - RNA, 17 nt, Artificial Sequence
  Synthetic oligonucleotide: BID-1105
auaaggcuccaggaagg

SEQ ID NO: 12406 - RNA, 17 nt, Artificial Sequence
  Synthetic oligonucleotide: BID-1106
ggggugcaagccugaga

SEQ ID NO: 12407 - RNA, 17 nt, Artificial Sequence
  Synthetic oligonucleotide: BID-1107
gugcaagccugagaagg

SEQ ID NO: 12408 - RNA, 17 nt, Artificial Sequence
  Synthetic oligonucleotide: BID-1108
agaagguggaagagcuc

SEQ ID NO: 12409 - RNA, 17 nt, Artificial Sequence
  Synthetic oligonucleotide: BID-1109
gaagguggaagagcucu

SEQ ID NO: 12410 - RNA, 17 nt, Artificial Sequence
  Synthetic oligonucleotide: BID-1110
gguggaagagcucuggg

SEQ ID NO: 12411 - RNA, 17 nt, Artificial Sequence
  Synthetic oligonucleotide: BID-1111
guggaagagcucugggu

SEQ ID NO: 12412 - RNA, 20 nt, Artificial Sequence
  Synthetic oligonucleotide: BID-1112
gggccgaaggaggaagcgcg

SEQ ID NO: 12413 - RNA, 20 nt, Artificial Sequence
  Synthetic oligonucleotide: BID-1113
ggaagcgcgcggggcgccau

SEQ ID NO: 12414 - RNA, 20 nt, Artificial Sequence
  Synthetic oligonucleotide: BID-1988
gaagcgcgcggggcgccaua

SEQ ID NO: 12415 - RNA, 20 nt, Artificial Sequence
  Synthetic oligonucleotide: BID-1115
agcgcgcggggcgccauaag

SEQ ID NO: 12416 - RNA, 20 nt, Artificial Sequence
  Synthetic oligonucleotide: BID-1989
gcgcgcggggcgccauaagg

SEQ ID NO: 12417 - RNA, 20 nt, Artificial Sequence
  Synthetic oligonucleotide: BID-1117
cggggcgccauaaggaggaa

SEQ ID NO: 12418 - RNA, 20 nt, Artificial Sequence
  Synthetic oligonucleotide: BID-1118
agucgaccguguccgcgcgc

SEQ ID NO: 12419 - RNA, 20 nt, Artificial Sequence
  Synthetic oligonucleotide: BID-1992
gucgaccguguccgcgcgcc

SEQ ID NO: 12420 - RNA, 20 nt, Artificial Sequence
  Synthetic oligonucleotide: BID-1993
ucgaccguguccgcgcgccu

SEQ ID NO: 12421 - RNA, 20 nt, Artificial Sequence
  Synthetic oligonucleotide: BID-1121
cugggagacgcugccucggc

SEQ ID NO: 12422 - RNA, 20 nt, Artificial Sequence
  Synthetic oligonucleotide: BID-1122
acgcgcccgcgcccccgcgg

SEQ ID NO: 12423 - RNA, 20 nt, Artificial Sequence
  Synthetic oligonucleotide: BID-1997
cgcgcccgcgcccccgcggc

SEQ ID NO: 12424 - RNA, 20 nt, Artificial Sequence
  Synthetic oligonucleotide: BID-1124
cgcccgcgcccccgcggcug

SEQ ID NO: 12425 - RNA, 20 nt, Artificial Sequence
  Synthetic oligonucleotide: BID-1125
gcccccgcggcuggagggug

SEQ ID NO: 12426 - RNA, 20 nt, Artificial Sequence
  Synthetic oligonucleotide: BID-1126
ugagugcacccgcgccccuc

SEQ ID NO: 12427 - RNA, 20 nt, Artificial Sequence
  Synthetic oligonucleotide: BID-2001
gagugcacccgcgccccucc

SEQ ID NO: 12428 - RNA, 20 nt, Artificial Sequence
  Synthetic oligonucleotide: BID-1128
cgccccucccgggguacgcg

SEQ ID NO: 12429 - RNA, 20 nt, Artificial Sequence
  Synthetic oligonucleotide: BID-1129
ugccugccgccugccccggc

SEQ ID NO: 12430 - RNA, 20 nt, Artificial Sequence
  Synthetic oligonucleotide: BID-2005
gccugccgccugccccggcg

SEQ ID NO: 12431 - RNA, 20 nt, Artificial Sequence
  Synthetic oligonucleotide: BID-1131
gccugccccggcguggagcu

SEQ ID NO: 12432 - RNA, 20 nt, Artificial Sequence
  Synthetic oligonucleotide: BID-1132
cucagggcccgccgcccgcc

SEQ ID NO: 12433 - RNA, 20 nt, Artificial Sequence
  Synthetic oligonucleotide: BID-1133
ccgcccugggcccgaccgcg

SEQ ID NO: 12434 - RNA, 20 nt, Artificial Sequence
  Synthetic oligonucleotide: BID-2011
cgcccugggcccgaccgcgg

SEQ ID NO: 12435 - RNA, 20 nt, Artificial Sequence
  Synthetic oligonucleotide: BID-2012
gcccugggcccgaccgcggu

SEQ ID NO: 12436 - RNA, 20 nt, Artificial Sequence
  Synthetic oligonucleotide: BID-1136
ggcccgaccgcggugggagc

SEQ ID NO: 12437 - RNA, 20 nt, Artificial Sequence
  Synthetic oligonucleotide: BID-1137
cccgaccgcggugggagcca

SEQ ID NO: 12438 - RNA, 20 nt, Artificial Sequence
  Synthetic oligonucleotide: BID-2013
ccgaccgcggugggagccag

SEQ ID NO: 12439 - RNA, 20 nt, Artificial Sequence
  Synthetic oligonucleotide: BID-1139
gaccgcggugggagccagag

SEQ ID NO: 12440 - RNA, 20 nt, Artificial Sequence
  Synthetic oligonucleotide: BID-2014
accgcggugggagccagagg

SEQ ID NO: 12441 - RNA, 20 nt, Artificial Sequence
  Synthetic oligonucleotide: BID-2015
ccgcggugggagccagagga

SEQ ID NO: 12442 - RNA, 20 nt, Artificial Sequence
  Synthetic oligonucleotide: BID-2016
cgcggugggagccagaggag

SEQ ID NO: 12443 - RNA, 20 nt, Artificial Sequence
  Synthetic oligonucleotide: BID-1143
ugggagccagaggaggggag

SEQ ID NO: 12444 - RNA, 20 nt, Artificial Sequence
  Synthetic oligonucleotide: BID-2018
gggagccagaggaggggagg

SEQ ID NO: 12445 - RNA, 20 nt, Artificial Sequence
  Synthetic oligonucleotide: BID-2019
ggagccagaggaggggaggc

SEQ ID NO: 12446 - RNA, 20 nt, Artificial Sequence
  Synthetic oligonucleotide: BID-2020
gagccagaggaggggaggcg

SEQ ID NO: 12447 - RNA, 20 nt, Artificial Sequence
  Synthetic oligonucleotide: BID-1147
gaggaggggaggcggggggu

SEQ ID NO: 12448 - RNA, 20 nt, Artificial Sequence
  Synthetic oligonucleotide: BID-1148
ccccaggccucagcagcgac

SEQ ID NO: 12449 - RNA, 20 nt, Artificial Sequence
  Synthetic oligonucleotide: BID-1149
ccaggccucagcagcgaccu

SEQ ID NO: 12450 - RNA, 20 nt, Artificial Sequence
  Synthetic oligonucleotide: BID-1150
ccucagcagcgaccugaggg

SEQ ID NO: 12451 - RNA, 20 nt, Artificial Sequence
  Synthetic oligonucleotide: BID-1151
cucucccgccuccccuccgc

SEQ ID NO: 12452 - RNA, 20 nt, Artificial Sequence
  Synthetic oligonucleotide: BID-1152
gcgcggccggcaggucggug

SEQ ID NO: 12453 - RNA, 20 nt, Artificial Sequence
  Synthetic oligonucleotide: BID-1153
gcggccggcaggucggugcu

SEQ ID NO: 12454 - RNA, 20 nt, Artificial Sequence
  Synthetic oligonucleotide: BID-1154
cggcaggucggugcugaggg

SEQ ID NO: 12455 - RNA, 20 nt, Artificial Sequence
  Synthetic oligonucleotide: BID-1155
ugcugagggucggguccgcc

SEQ ID NO: 12456 - RNA, 20 nt, Artificial Sequence
  Synthetic oligonucleotide: BID-2039
gcugagggucggguccgccu

SEQ ID NO: 12457 - RNA, 20 nt, Artificial Sequence
  Synthetic oligonucleotide: BID-1157
gggucggguccgccucggag

SEQ ID NO: 12458 - RNA, 20 nt, Artificial Sequence
  Synthetic oligonucleotide: BID-2041
ggucggguccgccucggagg

SEQ ID NO: 12459 - RNA, 20 nt, Artificial Sequence
  Synthetic oligonucleotide: BID-2042
gucggguccgccucggaggc

SEQ ID NO: 12460 - RNA, 20 nt, Artificial Sequence
  Synthetic oligonucleotide: BID-2043
ucggguccgccucggaggcg

SEQ ID NO: 12461 - RNA, 20 nt, Artificial Sequence
  Synthetic oligonucleotide: BID-1161
uuguguccucuccacguggc

SEQ ID NO: 12462 - RNA, 20 nt, Artificial Sequence
  Synthetic oligonucleotide: BID-2046
uguguccucuccacguggcc

SEQ ID NO: 12463 - RNA, 20 nt, Artificial Sequence
  Synthetic oligonucleotide: BID-2047
guguccucuccacguggccu

SEQ ID NO: 12464 - RNA, 20 nt, Artificial Sequence
  Synthetic oligonucleotide: BID-1164
cuccacguggccuggggauu

SEQ ID NO: 12465 - RNA, 20 nt, Artificial Sequence
  Synthetic oligonucleotide: BID-2049
uccacguggccuggggauuc

SEQ ID NO: 12466 - RNA, 20 nt, Artificial Sequence
  Synthetic oligonucleotide: BID-2050
ccacguggccuggggauuca

SEQ ID NO: 12467 - RNA, 20 nt, Artificial Sequence
  Synthetic oligonucleotide: BID-2051
cacguggccuggggauucag

SEQ ID NO: 12468 - RNA, 20 nt, Artificial Sequence
  Synthetic oligonucleotide: BID-1168
cguggccuggggauucaggg

SEQ ID NO: 12469 - RNA, 20 nt, Artificial Sequence
  Synthetic oligonucleotide: BID-2052
guggccuggggauucagggg

SEQ ID NO: 12470 - RNA, 20 nt, Artificial Sequence
  Synthetic oligonucleotide: BID-1170
uggggauucaggggaggggu

SEQ ID NO: 12471 - RNA, 20 nt, Artificial Sequence
  Synthetic oligonucleotide: BID-2055
ggggauucaggggaggggug

SEQ ID NO: 12472 - RNA, 20 nt, Artificial Sequence
  Synthetic oligonucleotide: BID-1172
ucaggggaggggugcggggc

SEQ ID NO: 12473 - RNA, 20 nt, Artificial Sequence
  Synthetic oligonucleotide: BID-2058
caggggaggggugcggggcg

SEQ ID NO: 12474 - RNA, 20 nt, Artificial Sequence
  Synthetic oligonucleotide: BID-2059
aggggaggggugcggggcgc

SEQ ID NO: 12475 - RNA, 20 nt, Artificial Sequence
  Synthetic oligonucleotide: BID-2060
ggggaggggugcggggcgcg

SEQ ID NO: 12476 - RNA, 20 nt, Artificial Sequence
  Synthetic oligonucleotide: BID-1176
ggaggggugcggggcgcggg

SEQ ID NO: 12477 - RNA, 20 nt, Artificial Sequence
  Synthetic oligonucleotide: BID-2061
gaggggugcggggcgcgggg

SEQ ID NO: 12478 - RNA, 20 nt, Artificial Sequence
  Synthetic oligonucleotide: BID-2062
aggggugcggggcgcgggga

SEQ ID NO: 12479 - RNA, 20 nt, Artificial Sequence
  Synthetic oligonucleotide: BID-2063
ggggugcggggcgcggggag

SEQ ID NO: 12480 - RNA, 20 nt, Artificial Sequence
  Synthetic oligonucleotide: BID-2064
gggugcggggcgcggggagg

SEQ ID NO: 12481 - RNA, 20 nt, Artificial Sequence
  Synthetic oligonucleotide: BID-1181
gugcggggcgcggggagggg

SEQ ID NO: 12482 - RNA, 20 nt, Artificial Sequence
  Synthetic oligonucleotide: BID-2065
ugcggggcgcggggaggggg

SEQ ID NO: 12483 - RNA, 20 nt, Artificial Sequence
  Synthetic oligonucleotide: BID-1183
ggcgcggggagggggagggg

SEQ ID NO: 12484 - RNA, 20 nt, Artificial Sequence
  Synthetic oligonucleotide: BID-1184
gggaggggccgaggccagcc

SEQ ID NO: 12485 - RNA, 20 nt, Artificial Sequence
  Synthetic oligonucleotide: BID-2069
ggaggggccgaggccagccc

SEQ ID NO: 12486 - RNA, 20 nt, Artificial Sequence
  Synthetic oligonucleotide: BID-1186
aggggccgaggccagccccg

SEQ ID NO: 12487 - RNA, 20 nt, Artificial Sequence
  Synthetic oligonucleotide: BID-1187
gggccgaggccagccccgga

SEQ ID NO: 12488 - RNA, 20 nt, Artificial Sequence
  Synthetic oligonucleotide: BID-2070
ggccgaggccagccccggag

SEQ ID NO: 12489 - RNA, 20 nt, Artificial Sequence
  Synthetic oligonucleotide: BID-1189
ccgaggccagccccggagag

SEQ ID NO: 12490 - RNA, 20 nt, Artificial Sequence
  Synthetic oligonucleotide: BID-1190
ccccggagaggagaaaaccc

SEQ ID NO: 12491 - RNA, 20 nt, Artificial Sequence
  Synthetic oligonucleotide: BID-1191
gagaaaacccgcgggccugg

SEQ ID NO: 12492 - RNA, 20 nt, Artificial Sequence
  Synthetic oligonucleotide: BID-1192
ggugcaggccacccuugccg

SEQ ID NO: 12493 - RNA, 20 nt, Artificial Sequence
  Synthetic oligonucleotide: BID-1193
aggccacccuugccggcgga

SEQ ID NO: 12494 - RNA, 20 nt, Artificial Sequence
  Synthetic oligonucleotide: BID-2079
ggccacccuugccggcggau

SEQ ID NO: 12495 - RNA, 20 nt, Artificial Sequence
  Synthetic oligonucleotide: BID-1195
cagacaccugccggcuccuc

SEQ ID NO: 12496 - RNA, 20 nt, Artificial Sequence
  Synthetic oligonucleotide: BID-1196
caccugccggcuccucccga

SEQ ID NO: 12497 - RNA, 20 nt, Artificial Sequence
  Synthetic oligonucleotide: BID-2082
accugccggcuccucccgag

SEQ ID NO: 12498 - RNA, 20 nt, Artificial Sequence
  Synthetic oligonucleotide: BID-1198
ggcuccucccgagcggagcu

SEQ ID NO: 12499 - RNA, 20 nt, Artificial Sequence
  Synthetic oligonucleotide: BID-1199
cagggcugacaaagcgcggu

SEQ ID NO: 12500 - RNA, 20 nt, Artificial Sequence
  Synthetic oligonucleotide: BID-1200
gcggucagagcggccgcuua

SEQ ID NO: 12501 - RNA, 20 nt, Artificial Sequence
  Synthetic oligonucleotide: BID-2087
cggucagagcggccgcuuac

SEQ ID NO: 12502 - RNA, 20 nt, Artificial Sequence
  Synthetic oligonucleotide: BID-1202
acuggggcucgcccgcuccu

SEQ ID NO: 12503 - RNA, 20 nt, Artificial Sequence
  Synthetic oligonucleotide: BID-1203
uagagcacuggcaaugaugu

SEQ ID NO: 12504 - RNA, 20 nt, Artificial Sequence
  Synthetic oligonucleotide: BID-1204
gcggauccucgcugcugcug

SEQ ID NO: 12505 - RNA, 20 nt, Artificial Sequence
  Synthetic oligonucleotide: BID-2092
cggauccucgcugcugcugc

SEQ ID NO: 12506 - RNA, 20 nt, Artificial Sequence
  Synthetic oligonucleotide: BID-2093
ggauccucgcugcugcugcu

SEQ ID NO: 12507 - RNA, 20 nt, Artificial Sequence
  Synthetic oligonucleotide: BID-1207
cugcugcugcugggaaacug

SEQ ID NO: 12508 - RNA, 20 nt, Artificial Sequence
  Synthetic oligonucleotide: BID-1208
gcugggaaacuguugagugg

SEQ ID NO: 12509 - RNA, 20 nt, Artificial Sequence
  Synthetic oligonucleotide: BID-1209
guugaguggcugaaugaccc

SEQ ID NO: 12510 - RNA, 20 nt, Artificial Sequence
  Synthetic oligonucleotide: BID-2095
uugaguggcugaaugacccc

SEQ ID NO: 12511 - RNA, 20 nt, Artificial Sequence
  Synthetic oligonucleotide: BID-2096
ugaguggcugaaugacccca

SEQ ID NO: 12512 - RNA, 20 nt, Artificial Sequence
  Synthetic oligonucleotide: BID-1212
cugaaugaccccaggggacc

SEQ ID NO: 12513 - RNA, 20 nt, Artificial Sequence
  Synthetic oligonucleotide: BID-2098
ugaaugaccccaggggaccc

SEQ ID NO: 12514 - RNA, 20 nt, Artificial Sequence
  Synthetic oligonucleotide: BID-2099
gaaugaccccaggggacccu

SEQ ID NO: 12515 - RNA, 20 nt, Artificial Sequence
  Synthetic oligonucleotide: BID-1215
augaccccaggggacccugg

SEQ ID NO: 12516 - RNA, 20 nt, Artificial Sequence
  Synthetic oligonucleotide: BID-1216
caggggacccugggagagcu

SEQ ID NO: 12517 - RNA, 20 nt, Artificial Sequence
  Synthetic oligonucleotide: BID-1217
agcccucagccaccaagugg

SEQ ID NO: 12518 - RNA, 20 nt, Artificial Sequence
  Synthetic oligonucleotide: BID-1218
caccaaguggcugggcuggc

SEQ ID NO: 12519 - RNA, 20 nt, Artificial Sequence
  Synthetic oligonucleotide: BID-360
cauucauucauucaacaaau

SEQ ID NO: 12520 - RNA, 20 nt, Artificial Sequence
  Synthetic oligonucleotide: BID-361
aauacgaaugugcagcggug

SEQ ID NO: 12521 - RNA, 20 nt, Artificial Sequence
  Synthetic oligonucleotide: BID-1
auacgaaugugcagcggugc

SEQ ID NO: 12522 - RNA, 20 nt, Artificial Sequence
  Synthetic oligonucleotide: BID-363
gcuggggucaugauggcucg

SEQ ID NO: 12523 - RNA, 20 nt, Artificial Sequence
  Synthetic oligonucleotide: BID-364
ucaugauggcucggugggca

SEQ ID NO: 12524 - RNA, 20 nt, Artificial Sequence
  Synthetic oligonucleotide: BID-365
augauggcucggugggcagc

SEQ ID NO: 12525 - RNA, 20 nt, Artificial Sequence
  Synthetic oligonucleotide: BID-9
ugauggcucggugggcagcg

SEQ ID NO: 12526 - RNA, 20 nt, Artificial Sequence
  Synthetic oligonucleotide: BID-367
gcucggugggcagcgagggg

SEQ ID NO: 12527 - RNA, 20 nt, Artificial Sequence
  Synthetic oligonucleotide: BID-368
gcagcgaggggccgggccgg

SEQ ID NO: 12528 - RNA, 20 nt, Artificial Sequence
  Synthetic oligonucleotide: BID-23
cagcgaggggccgggccggc

SEQ ID NO: 12529 - RNA, 20 nt, Artificial Sequence
  Synthetic oligonucleotide: BID-370
gcgaggggccgggccggcug

SEQ ID NO: 12530 - RNA, 20 nt, Artificial Sequence
  Synthetic oligonucleotide: BID-25
cgaggggccgggccggcugg

SEQ ID NO: 12531 - RNA, 20 nt, Artificial Sequence
  Synthetic oligonucleotide: BID-372
gccggcuggaggagcacagu

SEQ ID NO: 12532 - RNA, 20 nt, Artificial Sequence
  Synthetic oligonucleotide: BID-373
gcacagugcggauucuguaa

SEQ ID NO: 12533 - RNA, 20 nt, Artificial Sequence
  Synthetic oligonucleotide: BID-374
gugcggauucuguaaguggg

SEQ ID NO: 12534 - RNA, 20 nt, Artificial Sequence
  Synthetic oligonucleotide: BID-6
ugcggauucuguaagugggc

SEQ ID NO: 12535 - RNA, 20 nt, Artificial Sequence
  Synthetic oligonucleotide: BID-5
gcggauucuguaagugggcu

SEQ ID NO: 12536 - RNA, 20 nt, Artificial Sequence
  Synthetic oligonucleotide: BID-377
uucuguaagugggcuggggg

SEQ ID NO: 12537 - RNA, 20 nt, Artificial Sequence
  Synthetic oligonucleotide: BID-1237
gggggcugggccuucugcgg

SEQ ID NO: 12538 - RNA, 20 nt, Artificial Sequence
  Synthetic oligonucleotide: BID-1238
gaccggccuucaccugcagg

SEQ ID NO: 12539 - RNA, 20 nt, Artificial Sequence
  Synthetic oligonucleotide: BID-1239
gccuucaccugcaggcaggg

SEQ ID NO: 12540 - RNA, 20 nt, Artificial Sequence
  Synthetic oligonucleotide: BID-2137
ccuucaccugcaggcagggu

SEQ ID NO: 12541 - RNA, 17 nt, Artificial Sequence
  Synthetic oligonucleotide: BID-2256
ccgaaggaggaagcgcg

SEQ ID NO: 12542 - RNA, 17 nt, Artificial Sequence
  Synthetic oligonucleotide: BID-1242
agcgcgcggggcgccau

SEQ ID NO: 12543 - RNA, 17 nt, Artificial Sequence
  Synthetic oligonucleotide: BID-2259
gcgcgcggggcgccaua

SEQ ID NO: 12544 - RNA, 17 nt, Artificial Sequence
  Synthetic oligonucleotide: BID-1244
gcgcggggcgccauaag

SEQ ID NO: 12545 - RNA, 17 nt, Artificial Sequence
  Synthetic oligonucleotide: BID-2260
cgcggggcgccauaagg

SEQ ID NO: 12546 - RNA, 17 nt, Artificial Sequence
  Synthetic oligonucleotide: BID-1246
ggcgccauaaggaggaa

SEQ ID NO: 12547 - RNA, 17 nt, Artificial Sequence
  Synthetic oligonucleotide: BID-1247
cgaccguguccgcgcgc

SEQ ID NO: 12548 - RNA, 17 nt, Artificial Sequence
  Synthetic oligonucleotide: BID-2263
gaccguguccgcgcgcc

SEQ ID NO: 12549 - RNA, 17 nt, Artificial Sequence
  Synthetic oligonucleotide: BID-2264
accguguccgcgcgccu

SEQ ID NO: 12550 - RNA, 17 nt, Artificial Sequence
  Synthetic oligonucleotide: BID-1250
ggagacgcugccucggc

SEQ ID NO: 12551 - RNA, 17 nt, Artificial Sequence
  Synthetic oligonucleotide: BID-1251
cgcccgcgcccccgcgg

SEQ ID NO: 12552 - RNA, 17 nt, Artificial Sequence
  Synthetic oligonucleotide: BID-2268
gcccgcgcccccgcggc

SEQ ID NO: 12553 - RNA, 17 nt, Artificial Sequence
  Synthetic oligonucleotide: BID-1253
ccgcgcccccgcggcug

SEQ ID NO: 12554 - RNA, 17 nt, Artificial Sequence
  Synthetic oligonucleotide: BID-1254
cccgcggcuggagggug

SEQ ID NO: 12555 - RNA, 17 nt, Artificial Sequence
  Synthetic oligonucleotide: BID-1255
gugcacccgcgccccuc

SEQ ID NO: 12556 - RNA, 17 nt, Artificial Sequence
  Synthetic oligonucleotide: BID-2272
ugcacccgcgccccucc

SEQ ID NO: 12557 - RNA, 17 nt, Artificial Sequence
  Synthetic oligonucleotide: BID-1257
cccucccgggguacgcg

SEQ ID NO: 12558 - RNA, 17 nt, Artificial Sequence
  Synthetic oligonucleotide: BID-1258
cugccgccugccccggc

SEQ ID NO: 12559 - RNA, 17 nt, Artificial Sequence
  Synthetic oligonucleotide: BID-2276
ugccgccugccccggcg

SEQ ID NO: 12560 - RNA, 17 nt, Artificial Sequence
  Synthetic oligonucleotide: BID-1260
ugccccggcguggagcu

SEQ ID NO: 12561 - RNA, 17 nt, Artificial Sequence
  Synthetic oligonucleotide: BID-1261
agggcccgccgcccgcc

SEQ ID NO: 12562 - RNA, 17 nt, Artificial Sequence
  Synthetic oligonucleotide: BID-1262
cccugggcccgaccgcg

SEQ ID NO: 12563 - RNA, 17 nt, Artificial Sequence
  Synthetic oligonucleotide: BID-2282
ccugggcccgaccgcgg

SEQ ID NO: 12564 - RNA, 17 nt, Artificial Sequence
  Synthetic oligonucleotide: BID-2283
cugggcccgaccgcggu

SEQ ID NO: 12565 - RNA, 17 nt, Artificial Sequence
  Synthetic oligonucleotide: BID-1265
ccgaccgcggugggagc

SEQ ID NO: 12566 - RNA, 17 nt, Artificial Sequence
  Synthetic oligonucleotide: BID-1266
gaccgcggugggagcca

SEQ ID NO: 12567 - RNA, 17 nt, Artificial Sequence
  Synthetic oligonucleotide: BID-2284
accgcggugggagccag

SEQ ID NO: 12568 - RNA, 17 nt, Artificial Sequence
  Synthetic oligonucleotide: BID-1268
cgcggugggagccagag

SEQ ID NO: 12569 - RNA, 17 nt, Artificial Sequence
  Synthetic oligonucleotide: BID-2285
gcggugggagccagagg

SEQ ID NO: 12570 - RNA, 17 nt, Artificial Sequence
  Synthetic oligonucleotide: BID-2286
cggugggagccagagga

SEQ ID NO: 12571 - RNA, 17 nt, Artificial Sequence
  Synthetic oligonucleotide: BID-2287
ggugggagccagaggag

SEQ ID NO: 12572 - RNA, 17 nt, Artificial Sequence
  Synthetic oligonucleotide: BID-1272
gagccagaggaggggag

SEQ ID NO: 12573 - RNA, 17 nt, Artificial Sequence
  Synthetic oligonucleotide: BID-2289
agccagaggaggggagg

SEQ ID NO: 12574 - RNA, 17 nt, Artificial Sequence
  Synthetic oligonucleotide: BID-2290
gccagaggaggggaggc

SEQ ID NO: 12575 - RNA, 17 nt, Artificial Sequence
  Synthetic oligonucleotide: BID-2291
ccagaggaggggaggcg

SEQ ID NO: 12576 - RNA, 17 nt, Artificial Sequence
  Synthetic oligonucleotide: BID-1276
gaggggaggcggggggu

SEQ ID NO: 12577 - RNA, 17 nt, Artificial Sequence
  Synthetic oligonucleotide: BID-1277
caggccucagcagcgac

SEQ ID NO: 12578 - RNA, 17 nt, Artificial Sequence
  Synthetic oligonucleotide: BID-1278
ggccucagcagcgaccu

SEQ ID NO: 12579 - RNA, 17 nt, Artificial Sequence
  Synthetic oligonucleotide: BID-1279
cagcagcgaccugaggg

SEQ ID NO: 12580 - RNA, 17 nt, Artificial Sequence
  Synthetic oligonucleotide: BID-1280
ucccgccuccccuccgc

SEQ ID NO: 12581 - RNA, 17 nt, Artificial Sequence
  Synthetic oligonucleotide: BID-1281
cggccggcaggucggug

SEQ ID NO: 12582 - RNA, 17 nt, Artificial Sequence
  Synthetic oligonucleotide: BID-1282
gccggcaggucggugcu

SEQ ID NO: 12583 - RNA, 17 nt, Artificial Sequence
  Synthetic oligonucleotide: BID-1283
caggucggugcugaggg

SEQ ID NO: 12584 - RNA, 17 nt, Artificial Sequence
  Synthetic oligonucleotide: BID-1284
ugagggucggguccgcc

SEQ ID NO: 12585 - RNA, 17 nt, Artificial Sequence
  Synthetic oligonucleotide: BID-2310
gagggucggguccgccu

SEQ ID NO: 12586 - RNA, 17 nt, Artificial Sequence
  Synthetic oligonucleotide: BID-1286
ucggguccgccucggag

SEQ ID NO: 12587 - RNA, 17 nt, Artificial Sequence
  Synthetic oligonucleotide: BID-2312
cggguccgccucggagg

SEQ ID NO: 12588 - RNA, 17 nt, Artificial Sequence
  Synthetic oligonucleotide: BID-2313
ggguccgccucggaggc

SEQ ID NO: 12589 - RNA, 17 nt, Artificial Sequence
  Synthetic oligonucleotide: BID-2314
gguccgccucggaggcg

SEQ ID NO: 12590 - RNA, 17 nt, Artificial Sequence
  Synthetic oligonucleotide: BID-1290
uguccucuccacguggc

SEQ ID NO: 12591 - RNA, 17 nt, Artificial Sequence
  Synthetic oligonucleotide: BID-2317
guccucuccacguggcc

SEQ ID NO: 12592 - RNA, 17 nt, Artificial Sequence
  Synthetic oligonucleotide: BID-2318
uccucuccacguggccu

SEQ ID NO: 12593 - RNA, 17 nt, Artificial Sequence
  Synthetic oligonucleotide: BID-1293
cacguggccuggggauu

SEQ ID NO: 12594 - RNA, 17 nt, Artificial Sequence
  Synthetic oligonucleotide: BID-2320
acguggccuggggauuc

SEQ ID NO: 12595 - RNA, 17 nt, Artificial Sequence
  Synthetic oligonucleotide: BID-2321
cguggccuggggauuca

SEQ ID NO: 12596 - RNA, 17 nt, Artificial Sequence
  Synthetic oligonucleotide: BID-2322
guggccuggggauucag

SEQ ID NO: 12597 - RNA, 17 nt, Artificial Sequence
  Synthetic oligonucleotide: BID-1297
ggccuggggauucaggg

SEQ ID NO: 12598 - RNA, 17 nt, Artificial Sequence
  Synthetic oligonucleotide: BID-2323
gccuggggauucagggg

SEQ ID NO: 12599 - RNA, 17 nt, Artificial Sequence
  Synthetic oligonucleotide: BID-1299
ggauucaggggaggggu

SEQ ID NO: 12600 - RNA, 17 nt, Artificial Sequence
  Synthetic oligonucleotide: BID-2326
gauucaggggaggggug

SEQ ID NO: 12601 - RNA, 17 nt, Artificial Sequence
  Synthetic oligonucleotide: BID-1301
ggggaggggugcggggc

SEQ ID NO: 12602 - RNA, 17 nt, Artificial Sequence
  Synthetic oligonucleotide: BID-2329
gggaggggugcggggcg

SEQ ID NO: 12603 - RNA, 17 nt, Artificial Sequence
  Synthetic oligonucleotide: BID-2330
ggaggggugcggggcgc

SEQ ID NO: 12604 - RNA, 17 nt, Artificial Sequence
  Synthetic oligonucleotide: BID-2331
gaggggugcggggcgcg

SEQ ID NO: 12605 - RNA, 17 nt, Artificial Sequence
  Synthetic oligonucleotide: BID-1305
ggggugcggggcgcggg

SEQ ID NO: 12606 - RNA, 17 nt, Artificial Sequence
  Synthetic oligonucleotide: BID-2332
gggugcggggcgcgggg

SEQ ID NO: 12607 - RNA, 17 nt, Artificial Sequence
  Synthetic oligonucleotide: BID-2333
ggugcggggcgcgggga

SEQ ID NO: 12608 - RNA, 17 nt, Artificial Sequence
  Synthetic oligonucleotide: BID-2334
gugcggggcgcggggag

SEQ ID NO: 12609 - RNA, 17 nt, Artificial Sequence
  Synthetic oligonucleotide: BID-2335
ugcggggcgcggggagg

SEQ ID NO: 12610 - RNA, 17 nt, Artificial Sequence
  Synthetic oligonucleotide: BID-1310
cggggcgcggggagggg

SEQ ID NO: 12611 - RNA, 17 nt, Artificial Sequence
  Synthetic oligonucleotide: BID-2336
ggggcgcggggaggggg

SEQ ID NO: 12612 - RNA, 17 nt, Artificial Sequence
  Synthetic oligonucleotide: BID-1312
gcggggagggggagggg

SEQ ID NO: 12613 - RNA, 17 nt, Artificial Sequence
  Synthetic oligonucleotide: BID-1313
aggggccgaggccagcc

SEQ ID NO: 12614 - RNA, 17 nt, Artificial Sequence
  Synthetic oligonucleotide: BID-2340
ggggccgaggccagccc

SEQ ID NO: 12615 - RNA, 17 nt, Artificial Sequence
  Synthetic oligonucleotide: BID-1315
ggccgaggccagccccg

SEQ ID NO: 12616 - RNA, 17 nt, Artificial Sequence
  Synthetic oligonucleotide: BID-1316
ccgaggccagccccgga

SEQ ID NO: 12617 - RNA, 17 nt, Artificial Sequence
  Synthetic oligonucleotide: BID-2341
cgaggccagccccggag

SEQ ID NO: 12618 - RNA, 17 nt, Artificial Sequence
  Synthetic oligonucleotide: BID-1318
aggccagccccggagag

SEQ ID NO: 12619 - RNA, 17 nt, Artificial Sequence
  Synthetic oligonucleotide: BID-1319
cggagaggagaaaaccc

SEQ ID NO: 12620 - RNA, 17 nt, Artificial Sequence
  Synthetic oligonucleotide: BID-1320
aaaacccgcgggccugg

SEQ ID NO: 12621 - RNA, 17 nt, Artificial Sequence
  Synthetic oligonucleotide: BID-1321
gcaggccacccuugccg

SEQ ID NO: 12622 - RNA, 17 nt, Artificial Sequence
  Synthetic oligonucleotide: BID-1322
ccacccuugccggcgga

SEQ ID NO: 12623 - RNA, 17 nt, Artificial Sequence
  Synthetic oligonucleotide: BID-2350
cacccuugccggcggau

SEQ ID NO: 12624 - RNA, 17 nt, Artificial Sequence
  Synthetic oligonucleotide: BID-1324
acaccugccggcuccuc

SEQ ID NO: 12625 - RNA, 17 nt, Artificial Sequence
  Synthetic oligonucleotide: BID-1325
cugccggcuccucccga

SEQ ID NO: 12626 - RNA, 17 nt, Artificial Sequence
  Synthetic oligonucleotide: BID-2353
ugccggcuccucccgag

SEQ ID NO: 12627 - RNA, 17 nt, Artificial Sequence
  Synthetic oligonucleotide: BID-1327
uccucccgagcggagcu

SEQ ID NO: 12628 - RNA, 17 nt, Artificial Sequence
  Synthetic oligonucleotide: BID-1328
ggcugacaaagcgcggu

SEQ ID NO: 12629 - RNA, 17 nt, Artificial Sequence
  Synthetic oligonucleotide: BID-1329
gucagagcggccgcuua

SEQ ID NO: 12630 - RNA, 17 nt, Artificial Sequence
  Synthetic oligonucleotide: BID-2358
ucagagcggccgcuuac

SEQ ID NO: 12631 - RNA, 17 nt, Artificial Sequence
  Synthetic oligonucleotide: BID-1331
ggggcucgcccgcuccu

SEQ ID NO: 12632 - RNA, 17 nt, Artificial Sequence
  Synthetic oligonucleotide: BID-1332
agcacuggcaaugaugu

SEQ ID NO: 12633 - RNA, 17 nt, Artificial Sequence
  Synthetic oligonucleotide: BID-1333
gauccucgcugcugcug

SEQ ID NO: 12634 - RNA, 17 nt, Artificial Sequence
  Synthetic oligonucleotide: BID-2363
auccucgcugcugcugc

SEQ ID NO: 12635 - RNA, 17 nt, Artificial Sequence
  Synthetic oligonucleotide: BID-2364
uccucgcugcugcugcu

SEQ ID NO: 12636 - RNA, 17 nt, Artificial Sequence
  Synthetic oligonucleotide: BID-1336
cugcugcugggaaacug

SEQ ID NO: 12637 - RNA, 17 nt, Artificial Sequence
  Synthetic oligonucleotide: BID-1337
gggaaacuguugagugg

SEQ ID NO: 12638 - RNA, 17 nt, Artificial Sequence
  Synthetic oligonucleotide: BID-1338
gaguggcugaaugaccc

SEQ ID NO: 12639 - RNA, 17 nt, Artificial Sequence
  Synthetic oligonucleotide: BID-2366
aguggcugaaugacccc

SEQ ID NO: 12640 - RNA, 17 nt, Artificial Sequence
  Synthetic oligonucleotide: BID-2367
guggcugaaugacccca

SEQ ID NO: 12641 - RNA, 17 nt, Artificial Sequence
  Synthetic oligonucleotide: BID-1341
aaugaccccaggggacc

SEQ ID NO: 12642 - RNA, 17 nt, Artificial Sequence
  Synthetic oligonucleotide: BID-2369
augaccccaggggaccc

SEQ ID NO: 12643 - RNA, 17 nt, Artificial Sequence
  Synthetic oligonucleotide: BID-2370
ugaccccaggggacccu

SEQ ID NO: 12644 - RNA, 17 nt, Artificial Sequence
  Synthetic oligonucleotide: BID-1344
accccaggggacccugg

SEQ ID NO: 12645 - RNA, 17 nt, Artificial Sequence
  Synthetic oligonucleotide: BID-1345
gggacccugggagagcu

SEQ ID NO: 12646 - RNA, 17 nt, Artificial Sequence
  Synthetic oligonucleotide: BID-1346
ccucagccaccaagugg

SEQ ID NO: 12647 - RNA, 17 nt, Artificial Sequence
  Synthetic oligonucleotide: BID-1347
caaguggcugggcuggc

SEQ ID NO: 12648 - RNA, 17 nt, Artificial Sequence
  Synthetic oligonucleotide: BID-431
ucauucauucaacaaau

SEQ ID NO: 12649 - RNA, 17 nt, Artificial Sequence
  Synthetic oligonucleotide: BID-432
acgaaugugcagcggug

SEQ ID NO: 12650 - RNA, 17 nt, Artificial Sequence
  Synthetic oligonucleotide: BID-26
cgaaugugcagcggugc

SEQ ID NO: 12651 - RNA, 17 nt, Artificial Sequence
  Synthetic oligonucleotide: BID-434
ggggucaugauggcucg

SEQ ID NO: 12652 - RNA, 17 nt, Artificial Sequence
  Synthetic oligonucleotide: BID-435
ugauggcucggugggca

SEQ ID NO: 12653 - RNA, 17 nt, Artificial Sequence
  Synthetic oligonucleotide: BID-436
auggcucggugggcagc

SEQ ID NO: 12654 - RNA, 17 nt, Artificial Sequence
  Synthetic oligonucleotide: BID-39
uggcucggugggcagcg

SEQ ID NO: 12655 - RNA, 17 nt, Artificial Sequence
  Synthetic oligonucleotide: BID-438
cggugggcagcgagggg

SEQ ID NO: 12656 - RNA, 17 nt, Artificial Sequence
  Synthetic oligonucleotide: BID-439
gcgaggggccgggccgg

SEQ ID NO: 12657 - RNA, 17 nt, Artificial Sequence
  Synthetic oligonucleotide: BID-48
cgaggggccgggccggc

SEQ ID NO: 12658 - RNA, 17 nt, Artificial Sequence
  Synthetic oligonucleotide: BID-441
aggggccgggccggcug

SEQ ID NO: 12659 - RNA, 17 nt, Artificial Sequence
  Synthetic oligonucleotide: BID-53
ggggccgggccggcugg

SEQ ID NO: 12660 - RNA, 17 nt, Artificial Sequence
  Synthetic oligonucleotide: BID-443
ggcuggaggagcacagu

SEQ ID NO: 12661 - RNA, 17 nt, Artificial Sequence
  Synthetic oligonucleotide: BID-444
cagugcggauucuguaa

SEQ ID NO: 12662 - RNA, 17 nt, Artificial Sequence
  Synthetic oligonucleotide: BID-445
cggauucuguaaguggg

SEQ ID NO: 12663 - RNA, 17 nt, Artificial Sequence
  Synthetic oligonucleotide: BID-38
ggauucuguaagugggc

SEQ ID NO: 12664 - RNA, 17 nt, Artificial Sequence
  Synthetic oligonucleotide: BID-42
gauucuguaagugggcu

SEQ ID NO: 12665 - RNA, 17 nt, Artificial Sequence
  Synthetic oligonucleotide: BID-448
uguaagugggcuggggg

SEQ ID NO: 12666 - RNA, 17 nt, Artificial Sequence
  Synthetic oligonucleotide: BID-1366
ggcugggccuucugcgg

SEQ ID NO: 12667 - RNA, 17 nt, Artificial Sequence
  Synthetic oligonucleotide: BID-1367
cggccuucaccugcagg

SEQ ID NO: 12668 - RNA, 17 nt, Artificial Sequence
  Synthetic oligonucleotide: BID-1368
uucaccugcaggcaggg

SEQ ID NO: 12669 - RNA, 17 nt, Artificial Sequence
  Synthetic oligonucleotide: BID-2408
ucaccugcaggcagggu

SEQ ID NO: 12670 - RNA, 20 nt, Artificial Sequence
  Synthetic oligonucleotide: BID-1370
ugccccaacccugccugcag

SEQ ID NO: 12671 - RNA, 20 nt, Artificial Sequence
  Synthetic oligonucleotide: BID-1371
ggugaaggccgguccagccg

SEQ ID NO: 12672 - RNA, 20 nt, Artificial Sequence
  Synthetic oligonucleotide: BID-551
cccagcccccagcccacuua

SEQ ID NO: 12673 - RNA, 20 nt, Artificial Sequence
  Synthetic oligonucleotide: BID-552
gcccggccccucgcugccca

SEQ ID NO: 12674 - RNA, 20 nt, Artificial Sequence
  Synthetic oligonucleotide: BID-553
ccgcugcacauucguauuug

SEQ ID NO: 12675 - RNA, 20 nt, Artificial Sequence
  Synthetic oligonucleotide: BID-554
ugcacauucguauuuguuga

SEQ ID NO: 12676 - RNA, 20 nt, Artificial Sequence
  Synthetic oligonucleotide: BID-555
cauucguauuuguugaauga

SEQ ID NO: 12677 - RNA, 20 nt, Artificial Sequence
  Synthetic oligonucleotide: BID-556
cguauuuguugaaugaauga

SEQ ID NO: 12678 - RNA, 20 nt, Artificial Sequence
  Synthetic oligonucleotide: BID-1378
ccagcccagccacuuggugg

SEQ ID NO: 12679 - RNA, 20 nt, Artificial Sequence
  Synthetic oligonucleotide: BID-1379
agcccagccacuugguggcu

SEQ ID NO: 12680 - RNA, 20 nt, Artificial Sequence
  Synthetic oligonucleotide: BID-1380
cacuugguggcugagggcuu

SEQ ID NO: 12681 - RNA, 20 nt, Artificial Sequence
  Synthetic oligonucleotide: BID-1381
ugagggcuucagagcucucc

SEQ ID NO: 12682 - RNA, 20 nt, Artificial Sequence
  Synthetic oligonucleotide: BID-1382
cagagcucucccaggguccc

SEQ ID NO: 12683 - RNA, 20 nt, Artificial Sequence
  Synthetic oligonucleotide: BID-2151
agagcucucccagggucccc

SEQ ID NO: 12684 - RNA, 20 nt, Artificial Sequence
  Synthetic oligonucleotide: BID-1384
acaguuucccagcagcagca

SEQ ID NO: 12685 - RNA, 20 nt, Artificial Sequence
  Synthetic oligonucleotide: BID-1385
aguuucccagcagcagcagc

SEQ ID NO: 12686 - RNA, 20 nt, Artificial Sequence
  Synthetic oligonucleotide: BID-1386
cacaucauugccagugcucu

SEQ ID NO: 12687 - RNA, 20 nt, Artificial Sequence
  Synthetic oligonucleotide: BID-2155
acaucauugccagugcucua

SEQ ID NO: 12688 - RNA, 20 nt, Artificial Sequence
  Synthetic oligonucleotide: BID-1388
cauugccagugcucuaagga

SEQ ID NO: 12689 - RNA, 20 nt, Artificial Sequence
  Synthetic oligonucleotide: BID-1389
gccagugcucuaaggagcgg

SEQ ID NO: 12690 - RNA, 20 nt, Artificial Sequence
  Synthetic oligonucleotide: BID-1390
cugaccgcgcuuugucagcc

SEQ ID NO: 12691 - RNA, 20 nt, Artificial Sequence
  Synthetic oligonucleotide: BID-1391
uugucagcccugagcuccgc

SEQ ID NO: 12692 - RNA, 20 nt, Artificial Sequence
  Synthetic oligonucleotide: BID-2159
ugucagcccugagcuccgcu

SEQ ID NO: 12693 - RNA, 20 nt, Artificial Sequence
  Synthetic oligonucleotide: BID-2160
gucagcccugagcuccgcuc

SEQ ID NO: 12694 - RNA, 20 nt, Artificial Sequence
  Synthetic oligonucleotide: BID-1394
cagcccugagcuccgcucgg

SEQ ID NO: 12695 - RNA, 20 nt, Artificial Sequence
  Synthetic oligonucleotide: BID-2161
agcccugagcuccgcucggg

SEQ ID NO: 12696 - RNA, 20 nt, Artificial Sequence
  Synthetic oligonucleotide: BID-1396
gccggcaggugucugcggug

SEQ ID NO: 12697 - RNA, 20 nt, Artificial Sequence
  Synthetic oligonucleotide: BID-2165
ccggcaggugucugcggugc

SEQ ID NO: 12698 - RNA, 20 nt, Artificial Sequence
  Synthetic oligonucleotide: BID-1398
ggugcuggaaagaccacggu

SEQ ID NO: 12699 - RNA, 20 nt, Artificial Sequence
  Synthetic oligonucleotide: BID-1399
cuggaaagaccacggugugg

SEQ ID NO: 12700 - RNA, 20 nt, Artificial Sequence
  Synthetic oligonucleotide: BID-2169
uggaaagaccacgguguggg

SEQ ID NO: 12701 - RNA, 20 nt, Artificial Sequence
  Synthetic oligonucleotide: BID-2170
ggaaagaccacggugugggc

SEQ ID NO: 12702 - RNA, 20 nt, Artificial Sequence
  Synthetic oligonucleotide: BID-1402
ggggauuccgauccgccggc

SEQ ID NO: 12703 - RNA, 20 nt, Artificial Sequence
  Synthetic oligonucleotide: BID-1403
gccugcacccggccaggccc

SEQ ID NO: 12704 - RNA, 20 nt, Artificial Sequence
  Synthetic oligonucleotide: BID-1404
gcccgcggguuuucuccucu

SEQ ID NO: 12705 - RNA, 20 nt, Artificial Sequence
  Synthetic oligonucleotide: BID-2180
cccgcggguuuucuccucuc

SEQ ID NO: 12706 - RNA, 20 nt, Artificial Sequence
  Synthetic oligonucleotide: BID-1406
ccgcgccccgcaccccuccc

SEQ ID NO: 12707 - RNA, 20 nt, Artificial Sequence
  Synthetic oligonucleotide: BID-1407
ccccugaauccccaggccac

SEQ ID NO: 12708 - RNA, 20 nt, Artificial Sequence
  Synthetic oligonucleotide: BID-2186
cccugaauccccaggccacg

SEQ ID NO: 12709 - RNA, 20 nt, Artificial Sequence
  Synthetic oligonucleotide: BID-1409
cugaauccccaggccacgug

SEQ ID NO: 12710 - RNA, 20 nt, Artificial Sequence
  Synthetic oligonucleotide: BID-1410
gaauccccaggccacgugga

SEQ ID NO: 12711 - RNA, 20 nt, Artificial Sequence
  Synthetic oligonucleotide: BID-1411
caacaaagccuuccccgccu

SEQ ID NO: 12712 - RNA, 20 nt, Artificial Sequence
  Synthetic oligonucleotide: BID-1412
aagccuuccccgccuccgag

SEQ ID NO: 12713 - RNA, 20 nt, Artificial Sequence
  Synthetic oligonucleotide: BID-1413
gcaccgaccugccggccgcg

SEQ ID NO: 12714 - RNA, 20 nt, Artificial Sequence
  Synthetic oligonucleotide: BID-1414
accgaccugccggccgcgcc

SEQ ID NO: 12715 - RNA, 20 nt, Artificial Sequence
  Synthetic oligonucleotide: BID-2191
ccgaccugccggccgcgccg

SEQ ID NO: 12716 - RNA, 20 nt, Artificial Sequence
  Synthetic oligonucleotide: BID-1416
gaccugccggccgcgccgag

SEQ ID NO: 12717 - RNA, 20 nt, Artificial Sequence
  Synthetic oligonucleotide: BID-1417
ggccgcgccgaggagggcgc

SEQ ID NO: 12718 - RNA, 20 nt, Artificial Sequence
  Synthetic oligonucleotide: BID-1418
gcgccgaggagggcgcccgg

SEQ ID NO: 12719 - RNA, 20 nt, Artificial Sequence
  Synthetic oligonucleotide: BID-2196
cgccgaggagggcgcccggg

SEQ ID NO: 12720 - RNA, 20 nt, Artificial Sequence
  Synthetic oligonucleotide: BID-1420
ccgaggagggcgcccgggcg

SEQ ID NO: 12721 - RNA, 20 nt, Artificial Sequence
  Synthetic oligonucleotide: BID-2197
cgaggagggcgcccgggcgg

SEQ ID NO: 12722 - RNA, 20 nt, Artificial Sequence
  Synthetic oligonucleotide: BID-2198
gaggagggcgcccgggcgga

SEQ ID NO: 12723 - RNA, 20 nt, Artificial Sequence
  Synthetic oligonucleotide: BID-2199
aggagggcgcccgggcggag

SEQ ID NO: 12724 - RNA, 20 nt, Artificial Sequence
  Synthetic oligonucleotide: BID-1424
ggcgcccgggcggaggggag

SEQ ID NO: 12725 - RNA, 20 nt, Artificial Sequence
  Synthetic oligonucleotide: BID-2201
gcgcccgggcggaggggagg

SEQ ID NO: 12726 - RNA, 20 nt, Artificial Sequence
  Synthetic oligonucleotide: BID-2202
cgcccgggcggaggggaggc

SEQ ID NO: 12727 - RNA, 20 nt, Artificial Sequence
  Synthetic oligonucleotide: BID-1427
cccgggcggaggggaggcgg

SEQ ID NO: 12728 - RNA, 20 nt, Artificial Sequence
  Synthetic oligonucleotide: BID-1428
acccggcccucaggucgcug

SEQ ID NO: 12729 - RNA, 20 nt, Artificial Sequence
  Synthetic oligonucleotide: BID-1429
ccucaggucgcugcugaggc

SEQ ID NO: 12730 - RNA, 20 nt, Artificial Sequence
  Synthetic oligonucleotide: BID-2206
cucaggucgcugcugaggcc

SEQ ID NO: 12731 - RNA, 20 nt, Artificial Sequence
  Synthetic oligonucleotide: BID-1431
uccucuggcucccaccgcgg

SEQ ID NO: 12732 - RNA, 20 nt, Artificial Sequence
  Synthetic oligonucleotide: BID-1432
gcucccaccgcggucgggcc

SEQ ID NO: 12733 - RNA, 20 nt, Artificial Sequence
  Synthetic oligonucleotide: BID-1433
ccaccgcggucgggcccagg

SEQ ID NO: 12734 - RNA, 20 nt, Artificial Sequence
  Synthetic oligonucleotide: BID-1434
ggucgggcccagggcgggcg

SEQ ID NO: 12735 - RNA, 20 nt, Artificial Sequence
  Synthetic oligonucleotide: BID-1435
cccagggcgggcggcgggcc

SEQ ID NO: 12736 - RNA, 20 nt, Artificial Sequence
  Synthetic oligonucleotide: BID-1436
ggcgggcccugagcuccacg

SEQ ID NO: 12737 - RNA, 20 nt, Artificial Sequence
  Synthetic oligonucleotide: BID-2220
gcgggcccugagcuccacgc

SEQ ID NO: 12738 - RNA, 20 nt, Artificial Sequence
  Synthetic oligonucleotide: BID-1438
acgccggggcaggcggcagg

SEQ ID NO: 12739 - RNA, 20 nt, Artificial Sequence
  Synthetic oligonucleotide: BID-2226
cgccggggcaggcggcaggc

SEQ ID NO: 12740 - RNA, 20 nt, Artificial Sequence
  Synthetic oligonucleotide: BID-1440
gcaggcggcaggcagggguc

SEQ ID NO: 12741 - RNA, 20 nt, Artificial Sequence
  Synthetic oligonucleotide: BID-1441
cggcaggcaggggucacggg

SEQ ID NO: 12742 - RNA, 20 nt, Artificial Sequence
  Synthetic oligonucleotide: BID-2231
ggcaggcaggggucacgggc

SEQ ID NO: 12743 - RNA, 20 nt, Artificial Sequence
  Synthetic oligonucleotide: BID-1443
gcuggggcucggcgcguacc

SEQ ID NO: 12744 - RNA, 20 nt, Artificial Sequence
  Synthetic oligonucleotide: BID-2235
cuggggcucggcgcguaccc

SEQ ID NO: 12745 - RNA, 20 nt, Artificial Sequence
  Synthetic oligonucleotide: BID-2236
uggggcucggcgcguacccc

SEQ ID NO: 12746 - RNA, 20 nt, Artificial Sequence
  Synthetic oligonucleotide: BID-1446
gggcucggcgcguaccccgg

SEQ ID NO: 12747 - RNA, 20 nt, Artificial Sequence
  Synthetic oligonucleotide: BID-2237
ggcucggcgcguaccccggg

SEQ ID NO: 12748 - RNA, 20 nt, Artificial Sequence
  Synthetic oligonucleotide: BID-1448
gcgcguaccccgggaggggc

SEQ ID NO: 12749 - RNA, 20 nt, Artificial Sequence
  Synthetic oligonucleotide: BID-1449
gcacucaccacccuccagcc

SEQ ID NO: 12750 - RNA, 20 nt, Artificial Sequence
  Synthetic oligonucleotide: BID-2242
cacucaccacccuccagccg

SEQ ID NO: 12751 - RNA, 20 nt, Artificial Sequence
  Synthetic oligonucleotide: BID-2243
acucaccacccuccagccgc

SEQ ID NO: 12752 - RNA, 20 nt, Artificial Sequence
  Synthetic oligonucleotide: BID-1452
cacccuccagccgcgggggc

SEQ ID NO: 12753 - RNA, 20 nt, Artificial Sequence
  Synthetic oligonucleotide: BID-1453
ccgcgggggcgcgggcgcgu

SEQ ID NO: 12754 - RNA, 20 nt, Artificial Sequence
  Synthetic oligonucleotide: BID-1454
ggggcgcgggcgcguccggg

SEQ ID NO: 12755 - RNA, 20 nt, Artificial Sequence
  Synthetic oligonucleotide: BID-1455
aggcagcgucucccaggcgc

SEQ ID NO: 12756 - RNA, 17 nt, Artificial Sequence
  Synthetic oligonucleotide: BID-1456
cccaacccugccugcag

SEQ ID NO: 12757 - RNA, 17 nt, Artificial Sequence
  Synthetic oligonucleotide: BID-1457
gaaggccgguccagccg

SEQ ID NO: 12758 - RNA, 17 nt, Artificial Sequence
  Synthetic oligonucleotide: BID-606
agcccccagcccacuua

SEQ ID NO: 12759 - RNA, 17 nt, Artificial Sequence
  Synthetic oligonucleotide: BID-607
cggccccucgcugccca

SEQ ID NO: 12760 - RNA, 17 nt, Artificial Sequence
  Synthetic oligonucleotide: BID-608
cugcacauucguauuug

SEQ ID NO: 12761 - RNA, 17 nt, Artificial Sequence
  Synthetic oligonucleotide: BID-609
acauucguauuuguuga

SEQ ID NO: 12762 - RNA, 17 nt, Artificial Sequence
  Synthetic oligonucleotide: BID-610
ucguauuuguugaauga

SEQ ID NO: 12763 - RNA, 17 nt, Artificial Sequence
  Synthetic oligonucleotide: BID-611
auuuguugaaugaauga

SEQ ID NO: 12764 - RNA, 17 nt, Artificial Sequence
  Synthetic oligonucleotide: BID-1464
gcccagccacuuggugg

SEQ ID NO: 12765 - RNA, 17 nt, Artificial Sequence
  Synthetic oligonucleotide: BID-1465
ccagccacuugguggcu

SEQ ID NO: 12766 - RNA, 17 nt, Artificial Sequence
  Synthetic oligonucleotide: BID-1466
uugguggcugagggcuu

SEQ ID NO: 12767 - RNA, 17 nt, Artificial Sequence
  Synthetic oligonucleotide: BID-1467
gggcuucagagcucucc

SEQ ID NO: 12768 - RNA, 17 nt, Artificial Sequence
  Synthetic oligonucleotide: BID-1468
agcucucccaggguccc

SEQ ID NO: 12769 - RNA, 17 nt, Artificial Sequence
  Synthetic oligonucleotide: BID-2423
gcucucccagggucccc

SEQ ID NO: 12770 - RNA, 17 nt, Artificial Sequence
  Synthetic oligonucleotide: BID-1470
guuucccagcagcagca

SEQ ID NO: 12771 - RNA, 17 nt, Artificial Sequence
  Synthetic oligonucleotide: BID-1471
uucccagcagcagcagc

SEQ ID NO: 12772 - RNA, 17 nt, Artificial Sequence
  Synthetic oligonucleotide: BID-1472
aucauugccagugcucu

SEQ ID NO: 12773 - RNA, 17 nt, Artificial Sequence
  Synthetic oligonucleotide: BID-2427
ucauugccagugcucua

SEQ ID NO: 12774 - RNA, 17 nt, Artificial Sequence
  Synthetic oligonucleotide: BID-1474
ugccagugcucuaagga

SEQ ID NO: 12775 - RNA, 17 nt, Artificial Sequence
  Synthetic oligonucleotide: BID-1475
agugcucuaaggagcgg

SEQ ID NO: 12776 - RNA, 17 nt, Artificial Sequence
  Synthetic oligonucleotide: BID-1476
accgcgcuuugucagcc

SEQ ID NO: 12777 - RNA, 17 nt, Artificial Sequence
  Synthetic oligonucleotide: BID-1477
ucagcccugagcuccgc

SEQ ID NO: 12778 - RNA, 17 nt, Artificial Sequence
  Synthetic oligonucleotide: BID-2431
cagcccugagcuccgcu

SEQ ID NO: 12779 - RNA, 17 nt, Artificial Sequence
  Synthetic oligonucleotide: BID-2432
agcccugagcuccgcuc

SEQ ID NO: 12780 - RNA, 17 nt, Artificial Sequence
  Synthetic oligonucleotide: BID-1480
cccugagcuccgcucgg

SEQ ID NO: 12781 - RNA, 17 nt, Artificial Sequence
  Synthetic oligonucleotide: BID-2433
ccugagcuccgcucggg

SEQ ID NO: 12782 - RNA, 17 nt, Artificial Sequence
  Synthetic oligonucleotide: BID-1482
ggcaggugucugcggug

SEQ ID NO: 12783 - RNA, 17 nt, Artificial Sequence
  Synthetic oligonucleotide: BID-2437
gcaggugucugcggugc

SEQ ID NO: 12784 - RNA, 17 nt, Artificial Sequence
  Synthetic oligonucleotide: BID-1484
gcuggaaagaccacggu

SEQ ID NO: 12785 - RNA, 17 nt, Artificial Sequence
  Synthetic oligonucleotide: BID-1485
gaaagaccacggugugg

SEQ ID NO: 12786 - RNA, 17 nt, Artificial Sequence
  Synthetic oligonucleotide: BID-2441
aaagaccacgguguggg

SEQ ID NO: 12787 - RNA, 17 nt, Artificial Sequence
  Synthetic oligonucleotide: BID-2442
aagaccacggugugggc

SEQ ID NO: 12788 - RNA, 17 nt, Artificial Sequence
  Synthetic oligonucleotide: BID-1488
gauuccgauccgccggc

SEQ ID NO: 12789 - RNA, 17 nt, Artificial Sequence
  Synthetic oligonucleotide: BID-1489
ugcacccggccaggccc

SEQ ID NO: 12790 - RNA, 17 nt, Artificial Sequence
  Synthetic oligonucleotide: BID-1490
cgcggguuuucuccucu

SEQ ID NO: 12791 - RNA, 17 nt, Artificial Sequence
  Synthetic oligonucleotide: BID-2452
gcggguuuucuccucuc

SEQ ID NO: 12792 - RNA, 17 nt, Artificial Sequence
  Synthetic oligonucleotide: BID-1492
cgccccgcaccccuccc

SEQ ID NO: 12793 - RNA, 17 nt, Artificial Sequence
  Synthetic oligonucleotide: BID-1493
cugaauccccaggccac

SEQ ID NO: 12794 - RNA, 17 nt, Artificial Sequence
  Synthetic oligonucleotide: BID-2458
ugaauccccaggccacg

SEQ ID NO: 12795 - RNA, 17 nt, Artificial Sequence
  Synthetic oligonucleotide: BID-1495
aauccccaggccacgug

SEQ ID NO: 12796 - RNA, 17 nt, Artificial Sequence
  Synthetic oligonucleotide: BID-1496
uccccaggccacgugga

SEQ ID NO: 12797 - RNA, 17 nt, Artificial Sequence
  Synthetic oligonucleotide: BID-1497
caaagccuuccccgccu

SEQ ID NO: 12798 - RNA, 17 nt, Artificial Sequence
  Synthetic oligonucleotide: BID-1498
ccuuccccgccuccgag

SEQ ID NO: 12799 - RNA, 17 nt, Artificial Sequence
  Synthetic oligonucleotide: BID-1499
ccgaccugccggccgcg

SEQ ID NO: 12800 - RNA, 17 nt, Artificial Sequence
  Synthetic oligonucleotide: BID-1500
gaccugccggccgcgcc

SEQ ID NO: 12801 - RNA, 17 nt, Artificial Sequence
  Synthetic oligonucleotide: BID-2463
accugccggccgcgccg

SEQ ID NO: 12802 - RNA, 17 nt, Artificial Sequence
  Synthetic oligonucleotide: BID-1502
cugccggccgcgccgag

SEQ ID NO: 12803 - RNA, 17 nt, Artificial Sequence
  Synthetic oligonucleotide: BID-1503
cgcgccgaggagggcgc

SEQ ID NO: 12804 - RNA, 17 nt, Artificial Sequence
  Synthetic oligonucleotide: BID-1504
ccgaggagggcgcccgg

SEQ ID NO: 12805 - RNA, 17 nt, Artificial Sequence
  Synthetic oligonucleotide: BID-2468
cgaggagggcgcccggg

SEQ ID NO: 12806 - RNA, 17 nt, Artificial Sequence
  Synthetic oligonucleotide: BID-1506
aggagggcgcccgggcg

SEQ ID NO: 12807 - RNA, 17 nt, Artificial Sequence
  Synthetic oligonucleotide: BID-2469
ggagggcgcccgggcgg

SEQ ID NO: 12808 - RNA, 17 nt, Artificial Sequence
  Synthetic oligonucleotide: BID-2470
gagggcgcccgggcgga

SEQ ID NO: 12809 - RNA, 17 nt, Artificial Sequence
  Synthetic oligonucleotide: BID-2471
agggcgcccgggcggag

SEQ ID NO: 12810 - RNA, 17 nt, Artificial Sequence
  Synthetic oligonucleotide: BID-1510
gcccgggcggaggggag

SEQ ID NO: 12811 - RNA, 17 nt, Artificial Sequence
  Synthetic oligonucleotide: BID-2473
cccgggcggaggggagg

SEQ ID NO: 12812 - RNA, 17 nt, Artificial Sequence
  Synthetic oligonucleotide: BID-2474
ccgggcggaggggaggc

SEQ ID NO: 12813 - RNA, 17 nt, Artificial Sequence
  Synthetic oligonucleotide: BID-1513
gggcggaggggaggcgg

SEQ ID NO: 12814 - RNA, 17 nt, Artificial Sequence
  Synthetic oligonucleotide: BID-1514
cggcccucaggucgcug

SEQ ID NO: 12815 - RNA, 17 nt, Artificial Sequence
  Synthetic oligonucleotide: BID-1515
caggucgcugcugaggc

SEQ ID NO: 12816 - RNA, 17 nt, Artificial Sequence
  Synthetic oligonucleotide: BID-2478
aggucgcugcugaggcc

SEQ ID NO: 12817 - RNA, 17 nt, Artificial Sequence
  Synthetic oligonucleotide: BID-1517
ucuggcucccaccgcgg

SEQ ID NO: 12818 - RNA, 17 nt, Artificial Sequence
  Synthetic oligonucleotide: BID-1518
cccaccgcggucgggcc

SEQ ID NO: 12819 - RNA, 17 nt, Artificial Sequence
  Synthetic oligonucleotide: BID-1519
ccgcggucgggcccagg

SEQ ID NO: 12820 - RNA, 17 nt, Artificial Sequence
  Synthetic oligonucleotide: BID-1520
cgggcccagggcgggcg

SEQ ID NO: 12821 - RNA, 17 nt, Artificial Sequence
  Synthetic oligonucleotide: BID-1521
agggcgggcggcgggcc

SEQ ID NO: 12822 - RNA, 17 nt, Artificial Sequence
  Synthetic oligonucleotide: BID-1522
gggcccugagcuccacg

SEQ ID NO: 12823 - RNA, 17 nt, Artificial Sequence
  Synthetic oligonucleotide: BID-2492
ggcccugagcuccacgc

SEQ ID NO: 12824 - RNA, 17 nt, Artificial Sequence
  Synthetic oligonucleotide: BID-1524
ccggggcaggcggcagg

SEQ ID NO: 12825 - RNA, 17 nt, Artificial Sequence
  Synthetic oligonucleotide: BID-2498
cggggcaggcggcaggc

SEQ ID NO: 12826 - RNA, 17 nt, Artificial Sequence
  Synthetic oligonucleotide: BID-1526
ggcggcaggcagggguc

SEQ ID NO: 12827 - RNA, 17 nt, Artificial Sequence
  Synthetic oligonucleotide: BID-1527
caggcaggggucacggg

SEQ ID NO: 12828 - RNA, 17 nt, Artificial Sequence
  Synthetic oligonucleotide: BID-2503
aggcaggggucacgggc

SEQ ID NO: 12829 - RNA, 17 nt, Artificial Sequence
  Synthetic oligonucleotide: BID-1529
ggggcucggcgcguacc

SEQ ID NO: 12830 - RNA, 17 nt, Artificial Sequence
  Synthetic oligonucleotide: BID-2507
gggcucggcgcguaccc

SEQ ID NO: 12831 - RNA, 17 nt, Artificial Sequence
  Synthetic oligonucleotide: BID-2508
ggcucggcgcguacccc

SEQ ID NO: 12832 - RNA, 17 nt, Artificial Sequence
  Synthetic oligonucleotide: BID-1532
cucggcgcguaccccgg

SEQ ID NO: 12833 - RNA, 17 nt, Artificial Sequence
  Synthetic oligonucleotide: BID-2509
ucggcgcguaccccggg

SEQ ID NO: 12834 - RNA, 17 nt, Artificial Sequence
  Synthetic oligonucleotide: BID-1534
cguaccccgggaggggc

SEQ ID NO: 12835 - RNA, 17 nt, Artificial Sequence
  Synthetic oligonucleotide: BID-1535
cucaccacccuccagcc

SEQ ID NO: 12836 - RNA, 17 nt, Artificial Sequence
  Synthetic oligonucleotide: BID-2514
ucaccacccuccagccg

SEQ ID NO: 12837 - RNA, 17 nt, Artificial Sequence
  Synthetic oligonucleotide: BID-2515
caccacccuccagccgc

SEQ ID NO: 12838 - RNA, 17 nt, Artificial Sequence
  Synthetic oligonucleotide: BID-1538
ccuccagccgcgggggc

SEQ ID NO: 12839 - RNA, 17 nt, Artificial Sequence
  Synthetic oligonucleotide: BID-1539
cgggggcgcgggcgcgu

SEQ ID NO: 12840 - RNA, 17 nt, Artificial Sequence
  Synthetic oligonucleotide: BID-1540
gcgcgggcgcguccggg

SEQ ID NO: 12841 - RNA, 17 nt, Artificial Sequence
  Synthetic oligonucleotide: BID-1541
cagcgucucccaggcgc

SEQ ID NO: 12842 - RNA, 20 nt, Artificial Sequence
  Synthetic oligonucleotide: BID-1542
ccagccugagaccuccagag

SEQ ID NO: 12843 - RNA, 20 nt, Artificial Sequence
  Synthetic oligonucleotide: BID-685
cagccugagaccuccagagg

SEQ ID NO: 12844 - RNA, 20 nt, Artificial Sequence
  Synthetic oligonucleotide: BID-1544
cccaccaccuccacuaaaaa

SEQ ID NO: 12845 - RNA, 20 nt, Artificial Sequence
  Synthetic oligonucleotide: BID-1545
accuccacuaaaaacugaaa

SEQ ID NO: 12846 - RNA, 20 nt, Artificial Sequence
  Synthetic oligonucleotide: BID-1546
aaaacugaaaaagaaauuag

SEQ ID NO: 12847 - RNA, 20 nt, Artificial Sequence
  Synthetic oligonucleotide: BID-1547
guuaaacugauguuuuaaau

SEQ ID NO: 12848 - RNA, 20 nt, Artificial Sequence
  Synthetic oligonucleotide: BID-1548
aguugauauccaaauaauua

SEQ ID NO: 12849 - RNA, 20 nt, Artificial Sequence
  Synthetic oligonucleotide: BID-1549
uaaagaauaaacaacaagca

SEQ ID NO: 12850 - RNA, 20 nt, Artificial Sequence
  Synthetic oligonucleotide: BID-689
aaagaauaaacaacaagcac

SEQ ID NO: 12851 - RNA, 20 nt, Artificial Sequence
  Synthetic oligonucleotide: BID-1551
aacaacaagcacagggacug

SEQ ID NO: 12852 - RNA, 20 nt, Artificial Sequence
  Synthetic oligonucleotide: BID-1552
caacaagcacagggacuggu

SEQ ID NO: 12853 - RNA, 20 nt, Artificial Sequence
  Synthetic oligonucleotide: BID-692
aacaagcacagggacuggug

SEQ ID NO: 12854 - RNA, 20 nt, Artificial Sequence
  Synthetic oligonucleotide: BID-1554
gcacagggacuggugagggg

SEQ ID NO: 12855 - RNA, 20 nt, Artificial Sequence
  Synthetic oligonucleotide: BID-1555
cuuuccaaaccccugguucc

SEQ ID NO: 12856 - RNA, 20 nt, Artificial Sequence
  Synthetic oligonucleotide: BID-1556
uuccaaaccccugguuccgu

SEQ ID NO: 12857 - RNA, 20 nt, Artificial Sequence
  Synthetic oligonucleotide: BID-1557
ccccugguuccgugaggacc

SEQ ID NO: 12858 - RNA, 20 nt, Artificial Sequence
  Synthetic oligonucleotide: BID-1558
augaccaccccagacuguuc

SEQ ID NO: 12859 - RNA, 20 nt, Artificial Sequence
  Synthetic oligonucleotide: BID-1559
cagacuguuccagaaacagc

SEQ ID NO: 12860 - RNA, 20 nt, Artificial Sequence
  Synthetic oligonucleotide: BID-700
agacuguuccagaaacagcc

SEQ ID NO: 12861 - RNA, 20 nt, Artificial Sequence
  Synthetic oligonucleotide: BID-701
gacuguuccagaaacagccu

SEQ ID NO: 12862 - RNA, 20 nt, Artificial Sequence
  Synthetic oligonucleotide: BID-1562
ccagaaacagccuggggauu

SEQ ID NO: 12863 - RNA, 20 nt, Artificial Sequence
  Synthetic oligonucleotide: BID-1563
uggggauucugaauguuucc

SEQ ID NO: 12864 - RNA, 20 nt, Artificial Sequence
  Synthetic oligonucleotide: BID-1564
gggauucugaauguuuccca

SEQ ID NO: 12865 - RNA, 20 nt, Artificial Sequence
  Synthetic oligonucleotide: BID-1565
aauguuucccagagaaucau

SEQ ID NO: 12866 - RNA, 20 nt, Artificial Sequence
  Synthetic oligonucleotide: BID-703
auguuucccagagaaucauu

SEQ ID NO: 12867 - RNA, 20 nt, Artificial Sequence
  Synthetic oligonucleotide: BID-1567
uaggaauuaucccagcggcg

SEQ ID NO: 12868 - RNA, 20 nt, Artificial Sequence
  Synthetic oligonucleotide: BID-705
aggaauuaucccagcggcgc

SEQ ID NO: 12869 - RNA, 20 nt, Artificial Sequence
  Synthetic oligonucleotide: BID-1569
aguaaguggccaacuuaaag

SEQ ID NO: 12870 - RNA, 20 nt, Artificial Sequence
  Synthetic oligonucleotide: BID-1570
uuaaaguuggacgacacugu

SEQ ID NO: 12871 - RNA, 20 nt, Artificial Sequence
  Synthetic oligonucleotide: BID-1571
acugucugaaacagucgcgu

SEQ ID NO: 12872 - RNA, 20 nt, Artificial Sequence
  Synthetic oligonucleotide: BID-708
cugucugaaacagucgcgua

SEQ ID NO: 12873 - RNA, 20 nt, Artificial Sequence
  Synthetic oligonucleotide: BID-1573
gaaacagucgcguaaggggu

SEQ ID NO: 12874 - RNA, 20 nt, Artificial Sequence
  Synthetic oligonucleotide: BID-1574
cagucgcguaagggguaagg

SEQ ID NO: 12875 - RNA, 20 nt, Artificial Sequence
  Synthetic oligonucleotide: BID-713
agucgcguaagggguaaggg

SEQ ID NO: 12876 - RNA, 20 nt, Artificial Sequence
  Synthetic oligonucleotide: BID-1576
cuccacagccccgcgccggc

SEQ ID NO: 12877 - RNA, 20 nt, Artificial Sequence
  Synthetic oligonucleotide: BID-1577
cccgcgccggcgcgggcucc

SEQ ID NO: 12878 - RNA, 17 nt, Artificial Sequence
  Synthetic oligonucleotide: BID-1578
gccugagaccuccagag

SEQ ID NO: 12879 - RNA, 17 nt, Artificial Sequence
  Synthetic oligonucleotide: BID-722
ccugagaccuccagagg

SEQ ID NO: 12880 - RNA, 17 nt, Artificial Sequence
  Synthetic oligonucleotide: BID-1580
accaccuccacuaaaaa

SEQ ID NO: 12881 - RNA, 17 nt, Artificial Sequence
  Synthetic oligonucleotide: BID-1581
uccacuaaaaacugaaa

SEQ ID NO: 12882 - RNA, 17 nt, Artificial Sequence
  Synthetic oligonucleotide: BID-1582
acugaaaaagaaauuag

SEQ ID NO: 12883 - RNA, 17 nt, Artificial Sequence
  Synthetic oligonucleotide: BID-1583
aaacugauguuuuaaau

SEQ ID NO: 12884 - RNA, 17 nt, Artificial Sequence
  Synthetic oligonucleotide: BID-1584
ugauauccaaauaauua

SEQ ID NO: 12885 - RNA, 17 nt, Artificial Sequence
  Synthetic oligonucleotide: BID-1585
agaauaaacaacaagca

SEQ ID NO: 12886 - RNA, 17 nt, Artificial Sequence
  Synthetic oligonucleotide: BID-726
gaauaaacaacaagcac

SEQ ID NO: 12887 - RNA, 17 nt, Artificial Sequence
  Synthetic oligonucleotide: BID-1587
aacaagcacagggacug

SEQ ID NO: 12888 - RNA, 17 nt, Artificial Sequence
  Synthetic oligonucleotide: BID-1588
caagcacagggacuggu

SEQ ID NO: 12889 - RNA, 17 nt, Artificial Sequence
  Synthetic oligonucleotide: BID-729
aagcacagggacuggug

SEQ ID NO: 12890 - RNA, 17 nt, Artificial Sequence
  Synthetic oligonucleotide: BID-1590
cagggacuggugagggg

SEQ ID NO: 12891 - RNA, 17 nt, Artificial Sequence
  Synthetic oligonucleotide: BID-1591
uccaaaccccugguucc

SEQ ID NO: 12892 - RNA, 17 nt, Artificial Sequence
  Synthetic oligonucleotide: BID-1592
caaaccccugguuccgu

SEQ ID NO: 12893 - RNA, 17 nt, Artificial Sequence
  Synthetic oligonucleotide: BID-1593
cugguuccgugaggacc

SEQ ID NO: 12894 - RNA, 17 nt, Artificial Sequence
  Synthetic oligonucleotide: BID-1594
accaccccagacuguuc

SEQ ID NO: 12895 - RNA, 17 nt, Artificial Sequence
  Synthetic oligonucleotide: BID-1595
acuguuccagaaacagc

SEQ ID NO: 12896 - RNA, 17 nt, Artificial Sequence
  Synthetic oligonucleotide: BID-737
cuguuccagaaacagcc

SEQ ID NO: 12897 - RNA, 17 nt, Artificial Sequence
  Synthetic oligonucleotide: BID-738
uguuccagaaacagccu

SEQ ID NO: 12898 - RNA, 17 nt, Artificial Sequence
  Synthetic oligonucleotide: BID-1598
gaaacagccuggggauu

SEQ ID NO: 12899 - RNA, 17 nt, Artificial Sequence
  Synthetic oligonucleotide: BID-1599
ggauucugaauguuucc

SEQ ID NO: 12900 - RNA, 17 nt, Artificial Sequence
  Synthetic oligonucleotide: BID-1600
auucugaauguuuccca

SEQ ID NO: 12901 - RNA, 17 nt, Artificial Sequence
  Synthetic oligonucleotide: BID-1601
guuucccagagaaucau

SEQ ID NO: 12902 - RNA, 17 nt, Artificial Sequence
  Synthetic oligonucleotide: BID-740
uuucccagagaaucauu

SEQ ID NO: 12903 - RNA, 17 nt, Artificial Sequence
  Synthetic oligonucleotide: BID-1603
gaauuaucccagcggcg

SEQ ID NO: 12904 - RNA, 17 nt, Artificial Sequence
  Synthetic oligonucleotide: BID-742
aauuaucccagcggcgc

SEQ ID NO: 12905 - RNA, 17 nt, Artificial Sequence
  Synthetic oligonucleotide: BID-1605
aaguggccaacuuaaag

SEQ ID NO: 12906 - RNA, 17 nt, Artificial Sequence
  Synthetic oligonucleotide: BID-1606
aaguuggacgacacugu

SEQ ID NO: 12907 - RNA, 17 nt, Artificial Sequence
  Synthetic oligonucleotide: BID-1607
gucugaaacagucgcgu

SEQ ID NO: 12908 - RNA, 17 nt, Artificial Sequence
  Synthetic oligonucleotide: BID-745
ucugaaacagucgcgua

SEQ ID NO: 12909 - RNA, 17 nt, Artificial Sequence
  Synthetic oligonucleotide: BID-1609
acagucgcguaaggggu

SEQ ID NO: 12910 - RNA, 17 nt, Artificial Sequence
  Synthetic oligonucleotide: BID-1610
ucgcguaagggguaagg

SEQ ID NO: 12911 - RNA, 17 nt, Artificial Sequence
  Synthetic oligonucleotide: BID-750
cgcguaagggguaaggg

SEQ ID NO: 12912 - RNA, 17 nt, Artificial Sequence
  Synthetic oligonucleotide: BID-1612
cacagccccgcgccggc

SEQ ID NO: 12913 - RNA, 17 nt, Artificial Sequence
  Synthetic oligonucleotide: BID-1613
gcgccggcgcgggcucc

SEQ ID NO: 12914 - RNA, 20 nt, Artificial Sequence
  Synthetic oligonucleotide: BID-1614
cccggggagcccgcgccggc

SEQ ID NO: 12915 - RNA, 20 nt, Artificial Sequence
  Synthetic oligonucleotide: BID-759
ccggggagcccgcgccggcg

SEQ ID NO: 12916 - RNA, 20 nt, Artificial Sequence
  Synthetic oligonucleotide: BID-1616
gcccgcgccggcgcggggcu

SEQ ID NO: 12917 - RNA, 20 nt, Artificial Sequence
  Synthetic oligonucleotide: BID-762
cccgcgccggcgcggggcug

SEQ ID NO: 12918 - RNA, 20 nt, Artificial Sequence
  Synthetic oligonucleotide: BID-1618
cgccggcgcggggcugugga

SEQ ID NO: 12919 - RNA, 20 nt, Artificial Sequence
  Synthetic oligonucleotide: BID-763
gccggcgcggggcuguggag

SEQ ID NO: 12920 - RNA, 20 nt, Artificial Sequence
  Synthetic oligonucleotide: BID-1620
gcgcggggcuguggagcggg

SEQ ID NO: 12921 - RNA, 20 nt, Artificial Sequence
  Synthetic oligonucleotide: BID-766
cgcggggcuguggagcgggg

SEQ ID NO: 12922 - RNA, 20 nt, Artificial Sequence
  Synthetic oligonucleotide: BID-767
gcggggcuguggagcggggc

SEQ ID NO: 12923 - RNA, 20 nt, Artificial Sequence
  Synthetic oligonucleotide: BID-768
cggggcuguggagcggggcg

SEQ ID NO: 12924 - RNA, 20 nt, Artificial Sequence
  Synthetic oligonucleotide: BID-1624
ggcggggagccggcagcgca

SEQ ID NO: 12925 - RNA, 20 nt, Artificial Sequence
  Synthetic oligonucleotide: BID-1625
cggggagccggcagcgcagu

SEQ ID NO: 12926 - RNA, 20 nt, Artificial Sequence
  Synthetic oligonucleotide: BID-1626
ggccacuuacuccagcgccg

SEQ ID NO: 12927 - RNA, 20 nt, Artificial Sequence
  Synthetic oligonucleotide: BID-772
gccacuuacuccagcgccgc

SEQ ID NO: 12928 - RNA, 20 nt, Artificial Sequence
  Synthetic oligonucleotide: BID-1628
ggauaauuccuaaugauucu

SEQ ID NO: 12929 - RNA, 20 nt, Artificial Sequence
  Synthetic oligonucleotide: BID-774
gauaauuccuaaugauucuc

SEQ ID NO: 12930 - RNA, 20 nt, Artificial Sequence
  Synthetic oligonucleotide: BID-775
auaauuccuaaugauucucu

SEQ ID NO: 12931 - RNA, 20 nt, Artificial Sequence
  Synthetic oligonucleotide: BID-1631
augauucucugggaaacauu

SEQ ID NO: 12932 - RNA, 20 nt, Artificial Sequence
  Synthetic oligonucleotide: BID-1632
ucagaauccccaggcuguuu

SEQ ID NO: 12933 - RNA, 20 nt, Artificial Sequence
  Synthetic oligonucleotide: BID-777
cagaauccccaggcuguuuc

SEQ ID NO: 12934 - RNA, 20 nt, Artificial Sequence
  Synthetic oligonucleotide: BID-1634
caggcuguuucuggaacagu

SEQ ID NO: 12935 - RNA, 20 nt, Artificial Sequence
  Synthetic oligonucleotide: BID-778
aggcuguuucuggaacaguc

SEQ ID NO: 12936 - RNA, 20 nt, Artificial Sequence
  Synthetic oligonucleotide: BID-1636
gguggucauucuagguccuc

SEQ ID NO: 12937 - RNA, 20 nt, Artificial Sequence
  Synthetic oligonucleotide: BID-783
guggucauucuagguccuca

SEQ ID NO: 12938 - RNA, 20 nt, Artificial Sequence
  Synthetic oligonucleotide: BID-1638
auucuagguccucacggaac

SEQ ID NO: 12939 - RNA, 20 nt, Artificial Sequence
  Synthetic oligonucleotide: BID-784
uucuagguccucacggaacc

SEQ ID NO: 12940 - RNA, 20 nt, Artificial Sequence
  Synthetic oligonucleotide: BID-1640
guccucacggaaccaggggu

SEQ ID NO: 12941 - RNA, 20 nt, Artificial Sequence
  Synthetic oligonucleotide: BID-787
uccucacggaaccagggguu

SEQ ID NO: 12942 - RNA, 20 nt, Artificial Sequence
  Synthetic oligonucleotide: BID-1642
cggaaccagggguuuggaaa

SEQ ID NO: 12943 - RNA, 20 nt, Artificial Sequence
  Synthetic oligonucleotide: BID-1643
accagggguuuggaaagugg

SEQ ID NO: 12944 - RNA, 20 nt, Artificial Sequence
  Synthetic oligonucleotide: BID-1644
uggaaagugggugaagccau

SEQ ID NO: 12945 - RNA, 20 nt, Artificial Sequence
  Synthetic oligonucleotide: BID-1645
gggugaagccauguggguug

SEQ ID NO: 12946 - RNA, 20 nt, Artificial Sequence
  Synthetic oligonucleotide: BID-1646
gugaagccauguggguugca

SEQ ID NO: 12947 - RNA, 20 nt, Artificial Sequence
  Synthetic oligonucleotide: BID-1647
guuguuuauucuuuaauuau

SEQ ID NO: 12948 - RNA, 20 nt, Artificial Sequence
  Synthetic oligonucleotide: BID-1648
aguuuaacauauagauaaug

SEQ ID NO: 12949 - RNA, 20 nt, Artificial Sequence
  Synthetic oligonucleotide: BID-794
guuuaacauauagauaaugc

SEQ ID NO: 12950 - RNA, 20 nt, Artificial Sequence
  Synthetic oligonucleotide: BID-1650
aauuucuuuuucaguuuuua

SEQ ID NO: 12951 - RNA, 20 nt, Artificial Sequence
  Synthetic oligonucleotide: BID-797
auuucuuuuucaguuuuuag

SEQ ID NO: 12952 - RNA, 20 nt, Artificial Sequence
  Synthetic oligonucleotide: BID-1652
uucaguuuuuaguggaggug

SEQ ID NO: 12953 - RNA, 20 nt, Artificial Sequence
  Synthetic oligonucleotide: BID-800
ucaguuuuuaguggaggugg

SEQ ID NO: 12954 - RNA, 20 nt, Artificial Sequence
  Synthetic oligonucleotide: BID-801
caguuuuuaguggagguggu

SEQ ID NO: 12955 - RNA, 20 nt, Artificial Sequence
  Synthetic oligonucleotide: BID-802
aguuuuuaguggagguggug

SEQ ID NO: 12956 - RNA, 20 nt, Artificial Sequence
  Synthetic oligonucleotide: BID-803
guuuuuaguggagguggugg

SEQ ID NO: 12957 - RNA, 20 nt, Artificial Sequence
  Synthetic oligonucleotide: BID-804
uuuuuaguggaggugguggg

SEQ ID NO: 12958 - RNA, 20 nt, Artificial Sequence
  Synthetic oligonucleotide: BID-805
uuuuaguggagguggugggg

SEQ ID NO: 12959 - RNA, 20 nt, Artificial Sequence
  Synthetic oligonucleotide: BID-806
uuuaguggaggugguggggg

SEQ ID NO: 12960 - RNA, 20 nt, Artificial Sequence
  Synthetic oligonucleotide: BID-1660
uggggggggggucuccaccu

SEQ ID NO: 12961 - RNA, 20 nt, Artificial Sequence
  Synthetic oligonucleotide: BID-809
ggggggggggucuccaccuc

SEQ ID NO: 12962 - RNA, 17 nt, Artificial Sequence
  Synthetic oligonucleotide: BID-1662
ggggagcccgcgccggc

SEQ ID NO: 12963 - RNA, 17 nt, Artificial Sequence
  Synthetic oligonucleotide: BID-814
gggagcccgcgccggcg

SEQ ID NO: 12964 - RNA, 17 nt, Artificial Sequence
  Synthetic oligonucleotide: BID-1664
cgcgccggcgcggggcu

SEQ ID NO: 12965 - RNA, 17 nt, Artificial Sequence
  Synthetic oligonucleotide: BID-817
gcgccggcgcggggcug

SEQ ID NO: 12966 - RNA, 17 nt, Artificial Sequence
  Synthetic oligonucleotide: BID-1666
cggcgcggggcugugga

SEQ ID NO: 12967 - RNA, 17 nt, Artificial Sequence
  Synthetic oligonucleotide: BID-818
ggcgcggggcuguggag

SEQ ID NO: 12968 - RNA, 17 nt, Artificial Sequence
  Synthetic oligonucleotide: BID-1668
cggggcuguggagcggg

SEQ ID NO: 12969 - RNA, 17 nt, Artificial Sequence
  Synthetic oligonucleotide: BID-821
ggggcuguggagcgggg

SEQ ID NO: 12970 - RNA, 17 nt, Artificial Sequence
  Synthetic oligonucleotide: BID-822
gggcuguggagcggggc

SEQ ID NO: 12971 - RNA, 17 nt, Artificial Sequence
  Synthetic oligonucleotide: BID-823
ggcuguggagcggggcg

SEQ ID NO: 12972 - RNA, 17 nt, Artificial Sequence
  Synthetic oligonucleotide: BID-1672
ggggagccggcagcgca

SEQ ID NO: 12973 - RNA, 17 nt, Artificial Sequence
  Synthetic oligonucleotide: BID-1673
ggagccggcagcgcagu

SEQ ID NO: 12974 - RNA, 17 nt, Artificial Sequence
  Synthetic oligonucleotide: BID-1674
cacuuacuccagcgccg

SEQ ID NO: 12975 - RNA, 17 nt, Artificial Sequence
  Synthetic oligonucleotide: BID-827
acuuacuccagcgccgc

SEQ ID NO: 12976 - RNA, 17 nt, Artificial Sequence
  Synthetic oligonucleotide: BID-1676
uaauuccuaaugauucu

SEQ ID NO: 12977 - RNA, 17 nt, Artificial Sequence
  Synthetic oligonucleotide: BID-829
aauuccuaaugauucuc

SEQ ID NO: 12978 - RNA, 17 nt, Artificial Sequence
  Synthetic oligonucleotide: BID-830
auuccuaaugauucucu

SEQ ID NO: 12979 - RNA, 17 nt, Artificial Sequence
  Synthetic oligonucleotide: BID-1679
auucucugggaaacauu

SEQ ID NO: 12980 - RNA, 17 nt, Artificial Sequence
  Synthetic oligonucleotide: BID-1680
gaauccccaggcuguuu

SEQ ID NO: 12981 - RNA, 17 nt, Artificial Sequence
  Synthetic oligonucleotide: BID-832
aauccccaggcuguuuc

SEQ ID NO: 12982 - RNA, 17 nt, Artificial Sequence
  Synthetic oligonucleotide: BID-1682
gcuguuucuggaacagu

SEQ ID NO: 12983 - RNA, 17 nt, Artificial Sequence
  Synthetic oligonucleotide: BID-833
cuguuucuggaacaguc

SEQ ID NO: 12984 - RNA, 17 nt, Artificial Sequence
  Synthetic oligonucleotide: BID-1684
ggucauucuagguccuc

SEQ ID NO: 12985 - RNA, 17 nt, Artificial Sequence
  Synthetic oligonucleotide: BID-838
gucauucuagguccuca

SEQ ID NO: 12986 - RNA, 17 nt, Artificial Sequence
  Synthetic oligonucleotide: BID-1686
cuagguccucacggaac

SEQ ID NO: 12987 - RNA, 17 nt, Artificial Sequence
  Synthetic oligonucleotide: BID-839
uagguccucacggaacc

SEQ ID NO: 12988 - RNA, 17 nt, Artificial Sequence
  Synthetic oligonucleotide: BID-1688
cucacggaaccaggggu

SEQ ID NO: 12989 - RNA, 17 nt, Artificial Sequence
  Synthetic oligonucleotide: BID-842
ucacggaaccagggguu

SEQ ID NO: 12990 - RNA, 17 nt, Artificial Sequence
  Synthetic oligonucleotide: BID-1690
aaccagggguuuggaaa

SEQ ID NO: 12991 - RNA, 17 nt, Artificial Sequence
  Synthetic oligonucleotide: BID-1691
agggguuuggaaagugg

SEQ ID NO: 12992 - RNA, 17 nt, Artificial Sequence
  Synthetic oligonucleotide: BID-1692
aaagugggugaagccau

SEQ ID NO: 12993 - RNA, 17 nt, Artificial Sequence
  Synthetic oligonucleotide: BID-1693
ugaagccauguggguug

SEQ ID NO: 12994 - RNA, 17 nt, Artificial Sequence
  Synthetic oligonucleotide: BID-1694
aagccauguggguugca

SEQ ID NO: 12995 - RNA, 17 nt, Artificial Sequence
  Synthetic oligonucleotide: BID-1695
guuuauucuuuaauuau

SEQ ID NO: 12996 - RNA, 17 nt, Artificial Sequence
  Synthetic oligonucleotide: BID-1696
uuaacauauagauaaug

SEQ ID NO: 12997 - RNA, 17 nt, Artificial Sequence
  Synthetic oligonucleotide: BID-849
uaacauauagauaaugc

SEQ ID NO: 12998 - RNA, 17 nt, Artificial Sequence
  Synthetic oligonucleotide: BID-1698
uucuuuuucaguuuuua

SEQ ID NO: 12999 - RNA, 17 nt, Artificial Sequence
  Synthetic oligonucleotide: BID-852
ucuuuuucaguuuuuag

SEQ ID NO: 13000 - RNA, 17 nt, Artificial Sequence
  Synthetic oligonucleotide: BID-1700
aguuuuuaguggaggug

SEQ ID NO: 13001 - RNA, 17 nt, Artificial Sequence
  Synthetic oligonucleotide: BID-855
guuuuuaguggaggugg

SEQ ID NO: 13002 - RNA, 17 nt, Artificial Sequence
  Synthetic oligonucleotide: BID-856
uuuuuaguggagguggu

SEQ ID NO: 13003 - RNA, 17 nt, Artificial Sequence
  Synthetic oligonucleotide: BID-857
uuuuaguggagguggug

SEQ ID NO: 13004 - RNA, 17 nt, Artificial Sequence
  Synthetic oligonucleotide: BID-858
uuuaguggagguggugg

SEQ ID NO: 13005 - RNA, 17 nt, Artificial Sequence
  Synthetic oligonucleotide: BID-859
uuaguggaggugguggg

SEQ ID NO: 13006 - RNA, 17 nt, Artificial Sequence
  Synthetic oligonucleotide: BID-860
uaguggagguggugggg

SEQ ID NO: 13007 - RNA, 17 nt, Artificial Sequence
  Synthetic oligonucleotide: BID-861
aguggaggugguggggg

SEQ ID NO: 13008 - RNA, 17 nt, Artificial Sequence
  Synthetic oligonucleotide: BID-1708
ggggggggucuccaccu

SEQ ID NO: 13009 - RNA, 17 nt, Artificial Sequence
  Synthetic oligonucleotide: BID-864
gggggggucuccaccuc

SEQ ID NO: 13010 - RNA, 20 nt, Artificial Sequence
  Synthetic oligonucleotide: BID-1710
gaggagcagauggacccacc

SEQ ID NO: 13011 - RNA, 20 nt, Artificial Sequence
  Synthetic oligonucleotide: BID-1711
cucaggcuugcacccccuuc

SEQ ID NO: 13012 - RNA, 20 nt, Artificial Sequence
  Synthetic oligonucleotide: BID-869
ucaggcuugcacccccuucc

SEQ ID NO: 13013 - RNA, 20 nt, Artificial Sequence
  Synthetic oligonucleotide: BID-1713
ccucaguccucgcucucacu

SEQ ID NO: 13014 - RNA, 20 nt, Artificial Sequence
  Synthetic oligonucleotide: BID-870
cucaguccucgcucucacug

SEQ ID NO: 13015 - RNA, 20 nt, Artificial Sequence
  Synthetic oligonucleotide: BID-871
ucaguccucgcucucacugu

SEQ ID NO: 13016 - RNA, 20 nt, Artificial Sequence
  Synthetic oligonucleotide: BID-872
caguccucgcucucacugug

SEQ ID NO: 13017 - RNA, 20 nt, Artificial Sequence
  Synthetic oligonucleotide: BID-873
aguccucgcucucacugugg

SEQ ID NO: 13018 - RNA, 20 nt, Artificial Sequence
  Synthetic oligonucleotide: BID-1718
cucucacugugggggagcug

SEQ ID NO: 13019 - RNA, 20 nt, Artificial Sequence
  Synthetic oligonucleotide: BID-1719
cucacugugggggagcugca

SEQ ID NO: 13020 - RNA, 20 nt, Artificial Sequence
  Synthetic oligonucleotide: BID-1720
ccacauuccaucuccaccca

SEQ ID NO: 13021 - RNA, 20 nt, Artificial Sequence
  Synthetic oligonucleotide: BID-876
cacauuccaucuccacccac

SEQ ID NO: 13022 - RNA, 20 nt, Artificial Sequence
  Synthetic oligonucleotide: BID-1722
aucuccacccacaggaggcu

SEQ ID NO: 13023 - RNA, 20 nt, Artificial Sequence
  Synthetic oligonucleotide: BID-1723
cacccacaggaggcuuugag

SEQ ID NO: 13024 - RNA, 20 nt, Artificial Sequence
  Synthetic oligonucleotide: BID-878
acccacaggaggcuuugaga

SEQ ID NO: 13025 - RNA, 20 nt, Artificial Sequence
  Synthetic oligonucleotide: BID-879
cccacaggaggcuuugagau

SEQ ID NO: 13026 - RNA, 20 nt, Artificial Sequence
  Synthetic oligonucleotide: BID-880
ccacaggaggcuuugagaug

SEQ ID NO: 13027 - RNA, 20 nt, Artificial Sequence
  Synthetic oligonucleotide: BID-881
cacaggaggcuuugagaugg

SEQ ID NO: 13028 - RNA, 20 nt, Artificial Sequence
  Synthetic oligonucleotide: BID-882
acaggaggcuuugagauggg

SEQ ID NO: 13029 - RNA, 20 nt, Artificial Sequence
  Synthetic oligonucleotide: BID-1729
uugagauggggggagcucuc

SEQ ID NO: 13030 - RNA, 20 nt, Artificial Sequence
  Synthetic oligonucleotide: BID-1730
uggggggagcucuccugggc

SEQ ID NO: 13031 - RNA, 20 nt, Artificial Sequence
  Synthetic oligonucleotide: BID-1731
gggccugaaugugugccguc

SEQ ID NO: 13032 - RNA, 20 nt, Artificial Sequence
  Synthetic oligonucleotide: BID-885
ggccugaaugugugccgucc

SEQ ID NO: 13033 - RNA, 20 nt, Artificial Sequence
  Synthetic oligonucleotide: BID-1733
uccuggggcccugcaguccc

SEQ ID NO: 13034 - RNA, 20 nt, Artificial Sequence
  Synthetic oligonucleotide: BID-888
ccuggggcccugcagucccc

SEQ ID NO: 13035 - RNA, 20 nt, Artificial Sequence
  Synthetic oligonucleotide: BID-889
cuggggcccugcaguccccu

SEQ ID NO: 13036 - RNA, 20 nt, Artificial Sequence
  Synthetic oligonucleotide: BID-1736
caguccccugggagugauga

SEQ ID NO: 13037 - RNA, 20 nt, Artificial Sequence
  Synthetic oligonucleotide: BID-1737
gaugaccgagaccagauucc

SEQ ID NO: 13038 - RNA, 20 nt, Artificial Sequence
  Synthetic oligonucleotide: BID-1738
ccgagaccagauucccugag

SEQ ID NO: 13039 - RNA, 20 nt, Artificial Sequence
  Synthetic oligonucleotide: BID-890
cgagaccagauucccugagc

SEQ ID NO: 13040 - RNA, 20 nt, Artificial Sequence
  Synthetic oligonucleotide: BID-1740
auucccugagcuggggucuu

SEQ ID NO: 13041 - RNA, 20 nt, Artificial Sequence
  Synthetic oligonucleotide: BID-1741
ugagcuggggucuuaagggu

SEQ ID NO: 13042 - RNA, 20 nt, Artificial Sequence
  Synthetic oligonucleotide: BID-895
gagcuggggucuuaagggug

SEQ ID NO: 13043 - RNA, 20 nt, Artificial Sequence
  Synthetic oligonucleotide: BID-896
agcuggggucuuaagggugu

SEQ ID NO: 13044 - RNA, 20 nt, Artificial Sequence
  Synthetic oligonucleotide: BID-897
gcuggggucuuaagggugug

SEQ ID NO: 13045 - RNA, 20 nt, Artificial Sequence
  Synthetic oligonucleotide: BID-1745
ucuuaaggguguggggagcg

SEQ ID NO: 13046 - RNA, 20 nt, Artificial Sequence
  Synthetic oligonucleotide: BID-1746
uuaaggguguggggagcgca

SEQ ID NO: 13047 - RNA, 20 nt, Artificial Sequence
  Synthetic oligonucleotide: BID-898
uaaggguguggggagcgcag

SEQ ID NO: 13048 - RNA, 20 nt, Artificial Sequence
  Synthetic oligonucleotide: BID-1748
gcagagggauccucuggcau

SEQ ID NO: 13049 - RNA, 20 nt, Artificial Sequence
  Synthetic oligonucleotide: BID-901
cagagggauccucuggcauc

SEQ ID NO: 13050 - RNA, 20 nt, Artificial Sequence
  Synthetic oligonucleotide: BID-1750
ggauccucuggcaucaggag

SEQ ID NO: 13051 - RNA, 20 nt, Artificial Sequence
  Synthetic oligonucleotide: BID-1751
gcaucaggaguugagguaga

SEQ ID NO: 13052 - RNA, 20 nt, Artificial Sequence
  Synthetic oligonucleotide: BID-1752
aguugagguagacagagcuc

SEQ ID NO: 13053 - RNA, 20 nt, Artificial Sequence
  Synthetic oligonucleotide: BID-903
guugagguagacagagcucc

SEQ ID NO: 13054 - RNA, 20 nt, Artificial Sequence
  Synthetic oligonucleotide: BID-904
uugagguagacagagcucca

SEQ ID NO: 13055 - RNA, 20 nt, Artificial Sequence
  Synthetic oligonucleotide: BID-1755
agagcuccagggaggcacug

SEQ ID NO: 13056 - RNA, 20 nt, Artificial Sequence
  Synthetic oligonucleotide: BID-906
gagcuccagggaggcacugc

SEQ ID NO: 13057 - RNA, 20 nt, Artificial Sequence
  Synthetic oligonucleotide: BID-907
agcuccagggaggcacugcc

SEQ ID NO: 13058 - RNA, 20 nt, Artificial Sequence
  Synthetic oligonucleotide: BID-1758
cuccagggaggcacugccgg

SEQ ID NO: 13059 - RNA, 20 nt, Artificial Sequence
  Synthetic oligonucleotide: BID-1759
ccaagccucugccugcggcc

SEQ ID NO: 13060 - RNA, 20 nt, Artificial Sequence
  Synthetic oligonucleotide: BID-1760
ccccuucugccccucuugcc

SEQ ID NO: 13061 - RNA, 20 nt, Artificial Sequence
  Synthetic oligonucleotide: BID-913
cccuucugccccucuugccc

SEQ ID NO: 13062 - RNA, 20 nt, Artificial Sequence
  Synthetic oligonucleotide: BID-914
ccuucugccccucuugccca

SEQ ID NO: 13063 - RNA, 20 nt, Artificial Sequence
  Synthetic oligonucleotide: BID-1763
uucugccccucuugcccagg

SEQ ID NO: 13064 - RNA, 20 nt, Artificial Sequence
  Synthetic oligonucleotide: BID-915
ucugccccucuugcccaggg

SEQ ID NO: 13065 - RNA, 20 nt, Artificial Sequence
  Synthetic oligonucleotide: BID-916
cugccccucuugcccaggga

SEQ ID NO: 13066 - RNA, 20 nt, Artificial Sequence
  Synthetic oligonucleotide: BID-1766
ccccucuugcccagggaggg

SEQ ID NO: 13067 - RNA, 20 nt, Artificial Sequence
  Synthetic oligonucleotide: BID-1767
ccucuugcccagggagggaa

SEQ ID NO: 13068 - RNA, 20 nt, Artificial Sequence
  Synthetic oligonucleotide: BID-917
cucuugcccagggagggaag

SEQ ID NO: 13069 - RNA, 20 nt, Artificial Sequence
  Synthetic oligonucleotide: BID-1769
ccagggagggaagaggaaau

SEQ ID NO: 13070 - RNA, 20 nt, Artificial Sequence
  Synthetic oligonucleotide: BID-918
cagggagggaagaggaaaug

SEQ ID NO: 13071 - RNA, 20 nt, Artificial Sequence
  Synthetic oligonucleotide: BID-1771
gcggggucagcaguucgugg

SEQ ID NO: 13072 - RNA, 20 nt, Artificial Sequence
  Synthetic oligonucleotide: BID-922
cggggucagcaguucguggc

SEQ ID NO: 13073 - RNA, 20 nt, Artificial Sequence
  Synthetic oligonucleotide: BID-1773
ucguggcugggguuuaaagg

SEQ ID NO: 13074 - RNA, 20 nt, Artificial Sequence
  Synthetic oligonucleotide: BID-926
cguggcugggguuuaaaggc

SEQ ID NO: 13075 - RNA, 20 nt, Artificial Sequence
  Synthetic oligonucleotide: BID-1775
guuuaaaggcagggaucucc

SEQ ID NO: 13076 - RNA, 20 nt, Artificial Sequence
  Synthetic oligonucleotide: BID-1776
aaaggcagggaucucccagg

SEQ ID NO: 13077 - RNA, 20 nt, Artificial Sequence
  Synthetic oligonucleotide: BID-1777
gggaucucccaggacgggca

SEQ ID NO: 13078 - RNA, 20 nt, Artificial Sequence
  Synthetic oligonucleotide: BID-931
ggaucucccaggacgggcac

SEQ ID NO: 13079 - RNA, 20 nt, Artificial Sequence
  Synthetic oligonucleotide: BID-932
gaucucccaggacgggcaca

SEQ ID NO: 13080 - RNA, 20 nt, Artificial Sequence
  Synthetic oligonucleotide: BID-1780
ccaggacgggcacagggagc

SEQ ID NO: 13081 - RNA, 20 nt, Artificial Sequence
  Synthetic oligonucleotide: BID-1781
aggacgggcacagggagcau

SEQ ID NO: 13082 - RNA, 20 nt, Artificial Sequence
  Synthetic oligonucleotide: BID-933
ggacgggcacagggagcaug

SEQ ID NO: 13083 - RNA, 17 nt, Artificial Sequence
  Synthetic oligonucleotide: BID-1783
gagcagauggacccacc

SEQ ID NO: 13084 - RNA, 17 nt, Artificial Sequence
  Synthetic oligonucleotide: BID-1784
aggcuugcacccccuuc

SEQ ID NO: 13085 - RNA, 17 nt, Artificial Sequence
  Synthetic oligonucleotide: BID-935
ggcuugcacccccuucc

SEQ ID NO: 13086 - RNA, 17 nt, Artificial Sequence
  Synthetic oligonucleotide: BID-1786
caguccucgcucucacu

SEQ ID NO: 13087 - RNA, 17 nt, Artificial Sequence
  Synthetic oligonucleotide: BID-936
aguccucgcucucacug

SEQ ID NO: 13088 - RNA, 17 nt, Artificial Sequence
  Synthetic oligonucleotide: BID-937
guccucgcucucacugu

SEQ ID NO: 13089 - RNA, 17 nt, Artificial Sequence
  Synthetic oligonucleotide: BID-938
uccucgcucucacugug

SEQ ID NO: 13090 - RNA, 17 nt, Artificial Sequence
  Synthetic oligonucleotide: BID-939
ccucgcucucacugugg

SEQ ID NO: 13091 - RNA, 17 nt, Artificial Sequence
  Synthetic oligonucleotide: BID-1791
ucacugugggggagcug

SEQ ID NO: 13092 - RNA, 17 nt, Artificial Sequence
  Synthetic oligonucleotide: BID-1792
acugugggggagcugca

SEQ ID NO: 13093 - RNA, 17 nt, Artificial Sequence
  Synthetic oligonucleotide: BID-1793
cauuccaucuccaccca

SEQ ID NO: 13094 - RNA, 17 nt, Artificial Sequence
  Synthetic oligonucleotide: BID-942
auuccaucuccacccac

SEQ ID NO: 13095 - RNA, 17 nt, Artificial Sequence
  Synthetic oligonucleotide: BID-1795
uccacccacaggaggcu

SEQ ID NO: 13096 - RNA, 17 nt, Artificial Sequence
  Synthetic oligonucleotide: BID-1796
ccacaggaggcuuugag

SEQ ID NO: 13097 - RNA, 17 nt, Artificial Sequence
  Synthetic oligonucleotide: BID-944
cacaggaggcuuugaga

SEQ ID NO: 13098 - RNA, 17 nt, Artificial Sequence
  Synthetic oligonucleotide: BID-945
acaggaggcuuugagau

SEQ ID NO: 13099 - RNA, 17 nt, Artificial Sequence
  Synthetic oligonucleotide: BID-946
caggaggcuuugagaug

SEQ ID NO: 13100 - RNA, 17 nt, Artificial Sequence
  Synthetic oligonucleotide: BID-947
aggaggcuuugagaugg

SEQ ID NO: 13101 - RNA, 17 nt, Artificial Sequence
  Synthetic oligonucleotide: BID-948
ggaggcuuugagauggg

SEQ ID NO: 13102 - RNA, 17 nt, Artificial Sequence
  Synthetic oligonucleotide: BID-1802
agauggggggagcucuc

SEQ ID NO: 13103 - RNA, 17 nt, Artificial Sequence
  Synthetic oligonucleotide: BID-1803
ggggagcucuccugggc

SEQ ID NO: 13104 - RNA, 17 nt, Artificial Sequence
  Synthetic oligonucleotide: BID-1804
ccugaaugugugccguc

SEQ ID NO: 13105 - RNA, 17 nt, Artificial Sequence
  Synthetic oligonucleotide: BID-951
cugaaugugugccgucc

SEQ ID NO: 13106 - RNA, 17 nt, Artificial Sequence
  Synthetic oligonucleotide: BID-1806
uggggcccugcaguccc

SEQ ID NO: 13107 - RNA, 17 nt, Artificial Sequence
  Synthetic oligonucleotide: BID-954
ggggcccugcagucccc

SEQ ID NO: 13108 - RNA, 17 nt, Artificial Sequence
  Synthetic oligonucleotide: BID-955
gggcccugcaguccccu

SEQ ID NO: 13109 - RNA, 17 nt, Artificial Sequence
  Synthetic oligonucleotide: BID-1809
uccccugggagugauga

SEQ ID NO: 13110 - RNA, 17 nt, Artificial Sequence
  Synthetic oligonucleotide: BID-1810
gaccgagaccagauucc

SEQ ID NO: 13111 - RNA, 17 nt, Artificial Sequence
  Synthetic oligonucleotide: BID-1811
agaccagauucccugag

SEQ ID NO: 13112 - RNA, 17 nt, Artificial Sequence
  Synthetic oligonucleotide: BID-956
gaccagauucccugagc

SEQ ID NO: 13113 - RNA, 17 nt, Artificial Sequence
  Synthetic oligonucleotide: BID-1813
cccugagcuggggucuu

SEQ ID NO: 13114 - RNA, 17 nt, Artificial Sequence
  Synthetic oligonucleotide: BID-1814
gcuggggucuuaagggu

SEQ ID NO: 13115 - RNA, 17 nt, Artificial Sequence
  Synthetic oligonucleotide: BID-961
cuggggucuuaagggug

SEQ ID NO: 13116 - RNA, 17 nt, Artificial Sequence
  Synthetic oligonucleotide: BID-962
uggggucuuaagggugu

SEQ ID NO: 13117 - RNA, 17 nt, Artificial Sequence
  Synthetic oligonucleotide: BID-963
ggggucuuaagggugug

SEQ ID NO: 13118 - RNA, 17 nt, Artificial Sequence
  Synthetic oligonucleotide: BID-1818
uaaggguguggggagcg

SEQ ID NO: 13119 - RNA, 17 nt, Artificial Sequence
  Synthetic oligonucleotide: BID-1819
aggguguggggagcgca

SEQ ID NO: 13120 - RNA, 17 nt, Artificial Sequence
  Synthetic oligonucleotide: BID-964
ggguguggggagcgcag

SEQ ID NO: 13121 - RNA, 17 nt, Artificial Sequence
  Synthetic oligonucleotide: BID-1821
gagggauccucuggcau

SEQ ID NO: 13122 - RNA, 17 nt, Artificial Sequence
  Synthetic oligonucleotide: BID-967
agggauccucuggcauc

SEQ ID NO: 13123 - RNA, 17 nt, Artificial Sequence
  Synthetic oligonucleotide: BID-1823
uccucuggcaucaggag

SEQ ID NO: 13124 - RNA, 17 nt, Artificial Sequence
  Synthetic oligonucleotide: BID-1824
ucaggaguugagguaga

SEQ ID NO: 13125 - RNA, 17 nt, Artificial Sequence
  Synthetic oligonucleotide: BID-1825
ugagguagacagagcuc

SEQ ID NO: 13126 - RNA, 17 nt, Artificial Sequence
  Synthetic oligonucleotide: BID-969
gagguagacagagcucc

SEQ ID NO: 13127 - RNA, 17 nt, Artificial Sequence
  Synthetic oligonucleotide: BID-970
agguagacagagcucca

SEQ ID NO: 13128 - RNA, 17 nt, Artificial Sequence
  Synthetic oligonucleotide: BID-1828
gcuccagggaggcacug

SEQ ID NO: 13129 - RNA, 17 nt, Artificial Sequence
  Synthetic oligonucleotide: BID-972
cuccagggaggcacugc

SEQ ID NO: 13130 - RNA, 17 nt, Artificial Sequence
  Synthetic oligonucleotide: BID-973
uccagggaggcacugcc

SEQ ID NO: 13131 - RNA, 17 nt, Artificial Sequence
  Synthetic oligonucleotide: BID-1831
cagggaggcacugccgg

SEQ ID NO: 13132 - RNA, 17 nt, Artificial Sequence
  Synthetic oligonucleotide: BID-1832
agccucugccugcggcc

SEQ ID NO: 13133 - RNA, 17 nt, Artificial Sequence
  Synthetic oligonucleotide: BID-1833
cuucugccccucuugcc

SEQ ID NO: 13134 - RNA, 17 nt, Artificial Sequence
  Synthetic oligonucleotide: BID-979
uucugccccucuugccc

SEQ ID NO: 13135 - RNA, 17 nt, Artificial Sequence
  Synthetic oligonucleotide: BID-980
ucugccccucuugccca

SEQ ID NO: 13136 - RNA, 17 nt, Artificial Sequence
  Synthetic oligonucleotide: BID-1836
ugccccucuugcccagg

SEQ ID NO: 13137 - RNA, 17 nt, Artificial Sequence
  Synthetic oligonucleotide: BID-981
gccccucuugcccaggg

SEQ ID NO: 13138 - RNA, 17 nt, Artificial Sequence
  Synthetic oligonucleotide: BID-982
ccccucuugcccaggga

SEQ ID NO: 13139 - RNA, 17 nt, Artificial Sequence
  Synthetic oligonucleotide: BID-1839
cucuugcccagggaggg

SEQ ID NO: 13140 - RNA, 17 nt, Artificial Sequence
  Synthetic oligonucleotide: BID-1840
cuugcccagggagggaa

SEQ ID NO: 13141 - RNA, 17 nt, Artificial Sequence
  Synthetic oligonucleotide: BID-983
uugcccagggagggaag

SEQ ID NO: 13142 - RNA, 17 nt, Artificial Sequence
  Synthetic oligonucleotide: BID-1842
gggagggaagaggaaau

SEQ ID NO: 13143 - RNA, 17 nt, Artificial Sequence
  Synthetic oligonucleotide: BID-984
ggagggaagaggaaaug

SEQ ID NO: 13144 - RNA, 17 nt, Artificial Sequence
  Synthetic oligonucleotide: BID-1844
gggucagcaguucgugg

SEQ ID NO: 13145 - RNA, 17 nt, Artificial Sequence
  Synthetic oligonucleotide: BID-988
ggucagcaguucguggc

SEQ ID NO: 13146 - RNA, 17 nt, Artificial Sequence
  Synthetic oligonucleotide: BID-1846
uggcugggguuuaaagg

SEQ ID NO: 13147 - RNA, 17 nt, Artificial Sequence
  Synthetic oligonucleotide: BID-992
ggcugggguuuaaaggc

SEQ ID NO: 13148 - RNA, 17 nt, Artificial Sequence
  Synthetic oligonucleotide: BID-1848
uaaaggcagggaucucc

SEQ ID NO: 13149 - RNA, 17 nt, Artificial Sequence
  Synthetic oligonucleotide: BID-1849
ggcagggaucucccagg

SEQ ID NO: 13150 - RNA, 17 nt, Artificial Sequence
  Synthetic oligonucleotide: BID-1850
aucucccaggacgggca

SEQ ID NO: 13151 - RNA, 17 nt, Artificial Sequence
  Synthetic oligonucleotide: BID-997
ucucccaggacgggcac

SEQ ID NO: 13152 - RNA, 17 nt, Artificial Sequence
  Synthetic oligonucleotide: BID-998
cucccaggacgggcaca

SEQ ID NO: 13153 - RNA, 17 nt, Artificial Sequence
  Synthetic oligonucleotide: BID-1853
ggacgggcacagggagc

SEQ ID NO: 13154 - RNA, 17 nt, Artificial Sequence
  Synthetic oligonucleotide: BID-1854
acgggcacagggagcau

SEQ ID NO: 13155 - RNA, 17 nt, Artificial Sequence
  Synthetic oligonucleotide: BID-999
cgggcacagggagcaug

SEQ ID NO: 13156 - RNA, 20 nt, Artificial Sequence
  Synthetic oligonucleotide: BID-1856
ucaugcucccugugcccguc

SEQ ID NO: 13157 - RNA, 20 nt, Artificial Sequence
  Synthetic oligonucleotide: BID-1000
caugcucccugugcccgucc

SEQ ID NO: 13158 - RNA, 20 nt, Artificial Sequence
  Synthetic oligonucleotide: BID-1001
augcucccugugcccguccu

SEQ ID NO: 13159 - RNA, 20 nt, Artificial Sequence
  Synthetic oligonucleotide: BID-1859
ccugccuuuaaaccccagcc

SEQ ID NO: 13160 - RNA, 20 nt, Artificial Sequence
  Synthetic oligonucleotide: BID-1860
ccgcauuuccucuucccucc

SEQ ID NO: 13161 - RNA, 20 nt, Artificial Sequence
  Synthetic oligonucleotide: BID-1861
uuccucuucccucccugggc

SEQ ID NO: 13162 - RNA, 20 nt, Artificial Sequence
  Synthetic oligonucleotide: BID-1862
ccucuucccucccugggcaa

SEQ ID NO: 13163 - RNA, 20 nt, Artificial Sequence
  Synthetic oligonucleotide: BID-1004
cucuucccucccugggcaag

SEQ ID NO: 13164 - RNA, 20 nt, Artificial Sequence
  Synthetic oligonucleotide: BID-1864
cccucccugggcaagagggg

SEQ ID NO: 13165 - RNA, 20 nt, Artificial Sequence
  Synthetic oligonucleotide: BID-1865
ucccugggcaagaggggcag

SEQ ID NO: 13166 - RNA, 20 nt, Artificial Sequence
  Synthetic oligonucleotide: BID-1007
cccugggcaagaggggcaga

SEQ ID NO: 13167 - RNA, 20 nt, Artificial Sequence
  Synthetic oligonucleotide: BID-1867
ggcaagaggggcagaagggg

SEQ ID NO: 13168 - RNA, 20 nt, Artificial Sequence
  Synthetic oligonucleotide: BID-1010
gcaagaggggcagaaggggc

SEQ ID NO: 13169 - RNA, 20 nt, Artificial Sequence
  Synthetic oligonucleotide: BID-1869
aaggggcagggacgcacacc

SEQ ID NO: 13170 - RNA, 20 nt, Artificial Sequence
  Synthetic oligonucleotide: BID-1870
cgcacacccugggccgcagg

SEQ ID NO: 13171 - RNA, 20 nt, Artificial Sequence
  Synthetic oligonucleotide: BID-1871
gccgcaggcagaggcuuggc

SEQ ID NO: 13172 - RNA, 20 nt, Artificial Sequence
  Synthetic oligonucleotide: BID-1872
guccucccggcagugccucc

SEQ ID NO: 13173 - RNA, 20 nt, Artificial Sequence
  Synthetic oligonucleotide: BID-1020
uccucccggcagugccuccc

SEQ ID NO: 13174 - RNA, 20 nt, Artificial Sequence
  Synthetic oligonucleotide: BID-1874
ucuaccucaacuccugaugc

SEQ ID NO: 13175 - RNA, 20 nt, Artificial Sequence
  Synthetic oligonucleotide: BID-1875
uaccucaacuccugaugcca

SEQ ID NO: 13176 - RNA, 20 nt, Artificial Sequence
  Synthetic oligonucleotide: BID-1876
acacccuuaagaccccagcu

SEQ ID NO: 13177 - RNA, 20 nt, Artificial Sequence
  Synthetic oligonucleotide: BID-1022
cacccuuaagaccccagcuc

SEQ ID NO: 13178 - RNA, 20 nt, Artificial Sequence
  Synthetic oligonucleotide: BID-1023
acccuuaagaccccagcuca

SEQ ID NO: 13179 - RNA, 20 nt, Artificial Sequence
  Synthetic oligonucleotide: BID-1879
cuggucucggucaucacucc

SEQ ID NO: 13180 - RNA, 20 nt, Artificial Sequence
  Synthetic oligonucleotide: BID-1026
uggucucggucaucacuccc

SEQ ID NO: 13181 - RNA, 20 nt, Artificial Sequence
  Synthetic oligonucleotide: BID-1027
ggucucggucaucacuccca

SEQ ID NO: 13182 - RNA, 20 nt, Artificial Sequence
  Synthetic oligonucleotide: BID-1882
ucaucacucccaggggacug

SEQ ID NO: 13183 - RNA, 20 nt, Artificial Sequence
  Synthetic oligonucleotide: BID-1883
cccaggggacugcagggccc

SEQ ID NO: 13184 - RNA, 20 nt, Artificial Sequence
  Synthetic oligonucleotide: BID-1884
ggacggcacacauucaggcc

SEQ ID NO: 13185 - RNA, 20 nt, Artificial Sequence
  Synthetic oligonucleotide: BID-1034
gacggcacacauucaggccc

SEQ ID NO: 13186 - RNA, 20 nt, Artificial Sequence
  Synthetic oligonucleotide: BID-1886
cggcacacauucaggcccag

SEQ ID NO: 13187 - RNA, 20 nt, Artificial Sequence
  Synthetic oligonucleotide: BID-1887
cccccaucucaaagccuccu

SEQ ID NO: 13188 - RNA, 20 nt, Artificial Sequence
  Synthetic oligonucleotide: BID-1888
caucucaaagccuccugugg

SEQ ID NO: 13189 - RNA, 20 nt, Artificial Sequence
  Synthetic oligonucleotide: BID-1037
aucucaaagccuccuguggg

SEQ ID NO: 13190 - RNA, 20 nt, Artificial Sequence
  Synthetic oligonucleotide: BID-1890
aaagccuccuguggguggag

SEQ ID NO: 13191 - RNA, 20 nt, Artificial Sequence
  Synthetic oligonucleotide: BID-1038
aagccuccuguggguggaga

SEQ ID NO: 13192 - RNA, 20 nt, Artificial Sequence
  Synthetic oligonucleotide: BID-1892
ccuguggguggagauggaau

SEQ ID NO: 13193 - RNA, 20 nt, Artificial Sequence
  Synthetic oligonucleotide: BID-1039
cuguggguggagauggaaug

SEQ ID NO: 13194 - RNA, 20 nt, Artificial Sequence
  Synthetic oligonucleotide: BID-1894
uccucugcagcucccccaca

SEQ ID NO: 13195 - RNA, 20 nt, Artificial Sequence
  Synthetic oligonucleotide: BID-1895
cucugcagcucccccacagu

SEQ ID NO: 13196 - RNA, 20 nt, Artificial Sequence
  Synthetic oligonucleotide: BID-1896
gcagcucccccacagugaga

SEQ ID NO: 13197 - RNA, 20 nt, Artificial Sequence
  Synthetic oligonucleotide: BID-1897
agcucccccacagugagagc

SEQ ID NO: 13198 - RNA, 20 nt, Artificial Sequence
  Synthetic oligonucleotide: BID-1898
ccccacagugagagcgagga

SEQ ID NO: 13199 - RNA, 20 nt, Artificial Sequence
  Synthetic oligonucleotide: BID-1899
ccacagugagagcgaggacu

SEQ ID NO: 13200 - RNA, 20 nt, Artificial Sequence
  Synthetic oligonucleotide: BID-1900
ugagagcgaggacugagggu

SEQ ID NO: 13201 - RNA, 20 nt, Artificial Sequence
  Synthetic oligonucleotide: BID-1901
ugaggguguggauaaggcuc

SEQ ID NO: 13202 - RNA, 20 nt, Artificial Sequence
  Synthetic oligonucleotide: BID-1045
gaggguguggauaaggcucc

SEQ ID NO: 13203 - RNA, 20 nt, Artificial Sequence
  Synthetic oligonucleotide: BID-1903
gguguggauaaggcuccagg

SEQ ID NO: 13204 - RNA, 20 nt, Artificial Sequence
  Synthetic oligonucleotide: BID-1046
guguggauaaggcuccagga

SEQ ID NO: 13205 - RNA, 20 nt, Artificial Sequence
  Synthetic oligonucleotide: BID-1047
uguggauaaggcuccaggaa

SEQ ID NO: 13206 - RNA, 20 nt, Artificial Sequence
  Synthetic oligonucleotide: BID-1906
uccaggaagggggugcaagc

SEQ ID NO: 13207 - RNA, 20 nt, Artificial Sequence
  Synthetic oligonucleotide: BID-1907
caggaagggggugcaagccu

SEQ ID NO: 13208 - RNA, 20 nt, Artificial Sequence
  Synthetic oligonucleotide: BID-1908
gggggugcaagccugagaag

SEQ ID NO: 13209 - RNA, 20 nt, Artificial Sequence
  Synthetic oligonucleotide: BID-1051
ggggugcaagccugagaagg

SEQ ID NO: 13210 - RNA, 20 nt, Artificial Sequence
  Synthetic oligonucleotide: BID-1910
gugcaagccugagaaggugg

SEQ ID NO: 13211 - RNA, 20 nt, Artificial Sequence
  Synthetic oligonucleotide: BID-1911
ccugagaagguggaagagcu

SEQ ID NO: 13212 - RNA, 20 nt, Artificial Sequence
  Synthetic oligonucleotide: BID-1912
agaagguggaagagcucugg

SEQ ID NO: 13213 - RNA, 17 nt, Artificial Sequence
  Synthetic oligonucleotide: BID-1913
ugcucccugugcccguc

SEQ ID NO: 13214 - RNA, 17 nt, Artificial Sequence
  Synthetic oligonucleotide: BID-1056
gcucccugugcccgucc

SEQ ID NO: 13215 - RNA, 17 nt, Artificial Sequence
  Synthetic oligonucleotide: BID-1057
cucccugugcccguccu

SEQ ID NO: 13216 - RNA, 17 nt, Artificial Sequence
  Synthetic oligonucleotide: BID-1916
gccuuuaaaccccagcc

SEQ ID NO: 13217 - RNA, 17 nt, Artificial Sequence
  Synthetic oligonucleotide: BID-1917
cauuuccucuucccucc

SEQ ID NO: 13218 - RNA, 17 nt, Artificial Sequence
  Synthetic oligonucleotide: BID-1918
cucuucccucccugggc

SEQ ID NO: 13219 - RNA, 17 nt, Artificial Sequence
  Synthetic oligonucleotide: BID-1919
cuucccucccugggcaa

SEQ ID NO: 13220 - RNA, 17 nt, Artificial Sequence
  Synthetic oligonucleotide: BID-1060
uucccucccugggcaag

SEQ ID NO: 13221 - RNA, 17 nt, Artificial Sequence
  Synthetic oligonucleotide: BID-1921
ucccugggcaagagggg

SEQ ID NO: 13222 - RNA, 17 nt, Artificial Sequence
  Synthetic oligonucleotide: BID-1922
cugggcaagaggggcag

SEQ ID NO: 13223 - RNA, 17 nt, Artificial Sequence
  Synthetic oligonucleotide: BID-1063
ugggcaagaggggcaga

SEQ ID NO: 13224 - RNA, 17 nt, Artificial Sequence
  Synthetic oligonucleotide: BID-1924
aagaggggcagaagggg

SEQ ID NO: 13225 - RNA, 17 nt, Artificial Sequence
  Synthetic oligonucleotide: BID-1066
agaggggcagaaggggc

SEQ ID NO: 13226 - RNA, 17 nt, Artificial Sequence
  Synthetic oligonucleotide: BID-1926
gggcagggacgcacacc

SEQ ID NO: 13227 - RNA, 17 nt, Artificial Sequence
  Synthetic oligonucleotide: BID-1927
acacccugggccgcagg

SEQ ID NO: 13228 - RNA, 17 nt, Artificial Sequence
  Synthetic oligonucleotide: BID-1928
gcaggcagaggcuuggc

SEQ ID NO: 13229 - RNA, 17 nt, Artificial Sequence
  Synthetic oligonucleotide: BID-1929
cucccggcagugccucc

SEQ ID NO: 13230 - RNA, 17 nt, Artificial Sequence
  Synthetic oligonucleotide: BID-1076
ucccggcagugccuccc

SEQ ID NO: 13231 - RNA, 17 nt, Artificial Sequence
  Synthetic oligonucleotide: BID-1931
accucaacuccugaugc

SEQ ID NO: 13232 - RNA, 17 nt, Artificial Sequence
  Synthetic oligonucleotide: BID-1932
cucaacuccugaugcca

SEQ ID NO: 13233 - RNA, 17 nt, Artificial Sequence
  Synthetic oligonucleotide: BID-1933
cccuuaagaccccagcu

SEQ ID NO: 13234 - RNA, 17 nt, Artificial Sequence
  Synthetic oligonucleotide: BID-1078
ccuuaagaccccagcuc

SEQ ID NO: 13235 - RNA, 17 nt, Artificial Sequence
  Synthetic oligonucleotide: BID-1079
cuuaagaccccagcuca

SEQ ID NO: 13236 - RNA, 17 nt, Artificial Sequence
  Synthetic oligonucleotide: BID-1936
gucucggucaucacucc

SEQ ID NO: 13237 - RNA, 17 nt, Artificial Sequence
  Synthetic oligonucleotide: BID-1082
ucucggucaucacuccc

SEQ ID NO: 13238 - RNA, 17 nt, Artificial Sequence
  Synthetic oligonucleotide: BID-1083
cucggucaucacuccca

SEQ ID NO: 13239 - RNA, 17 nt, Artificial Sequence
  Synthetic oligonucleotide: BID-1939
ucacucccaggggacug

SEQ ID NO: 13240 - RNA, 17 nt, Artificial Sequence
  Synthetic oligonucleotide: BID-1940
aggggacugcagggccc

SEQ ID NO: 13241 - RNA, 17 nt, Artificial Sequence
  Synthetic oligonucleotide: BID-1941
cggcacacauucaggcc

SEQ ID NO: 13242 - RNA, 17 nt, Artificial Sequence
  Synthetic oligonucleotide: BID-1090
ggcacacauucaggccc

SEQ ID NO: 13243 - RNA, 17 nt, Artificial Sequence
  Synthetic oligonucleotide: BID-1943
cacacauucaggcccag

SEQ ID NO: 13244 - RNA, 17 nt, Artificial Sequence
  Synthetic oligonucleotide: BID-1944
ccaucucaaagccuccu

SEQ ID NO: 13245 - RNA, 17 nt, Artificial Sequence
  Synthetic oligonucleotide: BID-1945
cucaaagccuccugugg

SEQ ID NO: 13246 - RNA, 17 nt, Artificial Sequence
  Synthetic oligonucleotide: BID-1093
ucaaagccuccuguggg

SEQ ID NO: 13247 - RNA, 17 nt, Artificial Sequence
  Synthetic oligonucleotide: BID-1947
gccuccuguggguggag

SEQ ID NO: 13248 - RNA, 17 nt, Artificial Sequence
  Synthetic oligonucleotide: BID-1094
ccuccuguggguggaga

SEQ ID NO: 13249 - RNA, 17 nt, Artificial Sequence
  Synthetic oligonucleotide: BID-1949
guggguggagauggaau

SEQ ID NO: 13250 - RNA, 17 nt, Artificial Sequence
  Synthetic oligonucleotide: BID-1095
uggguggagauggaaug

SEQ ID NO: 13251 - RNA, 17 nt, Artificial Sequence
  Synthetic oligonucleotide: BID-1951
ucugcagcucccccaca

SEQ ID NO: 13252 - RNA, 17 nt, Artificial Sequence
  Synthetic oligonucleotide: BID-1952
ugcagcucccccacagu

SEQ ID NO: 13253 - RNA, 17 nt, Artificial Sequence
  Synthetic oligonucleotide: BID-1953
gcucccccacagugaga

SEQ ID NO: 13254 - RNA, 17 nt, Artificial Sequence
  Synthetic oligonucleotide: BID-1954
ucccccacagugagagc

SEQ ID NO: 13255 - RNA, 17 nt, Artificial Sequence
  Synthetic oligonucleotide: BID-1955
cacagugagagcgagga

SEQ ID NO: 13256 - RNA, 17 nt, Artificial Sequence
  Synthetic oligonucleotide: BID-1956
cagugagagcgaggacu

SEQ ID NO: 13257 - RNA, 17 nt, Artificial Sequence
  Synthetic oligonucleotide: BID-1957
gagcgaggacugagggu

SEQ ID NO: 13258 - RNA, 17 nt, Artificial Sequence
  Synthetic oligonucleotide: BID-1958
ggguguggauaaggcuc

SEQ ID NO: 13259 - RNA, 17 nt, Artificial Sequence
  Synthetic oligonucleotide: BID-1101
gguguggauaaggcucc

SEQ ID NO: 13260 - RNA, 17 nt, Artificial Sequence
  Synthetic oligonucleotide: BID-1960
guggauaaggcuccagg

SEQ ID NO: 13261 - RNA, 17 nt, Artificial Sequence
  Synthetic oligonucleotide: BID-1102
uggauaaggcuccagga

SEQ ID NO: 13262 - RNA, 17 nt, Artificial Sequence
  Synthetic oligonucleotide: BID-1103
ggauaaggcuccaggaa

SEQ ID NO: 13263 - RNA, 17 nt, Artificial Sequence
  Synthetic oligonucleotide: BID-1963
aggaagggggugcaagc

SEQ ID NO: 13264 - RNA, 17 nt, Artificial Sequence
  Synthetic oligonucleotide: BID-1964
gaagggggugcaagccu

SEQ ID NO: 13265 - RNA, 17 nt, Artificial Sequence
  Synthetic oligonucleotide: BID-1965
ggugcaagccugagaag

SEQ ID NO: 13266 - RNA, 17 nt, Artificial Sequence
  Synthetic oligonucleotide: BID-1107
gugcaagccugagaagg

SEQ ID NO: 13267 - RNA, 17 nt, Artificial Sequence
  Synthetic oligonucleotide: BID-1967
caagccugagaaggugg

SEQ ID NO: 13268 - RNA, 17 nt, Artificial Sequence
  Synthetic oligonucleotide: BID-1968
gagaagguggaagagcu

SEQ ID NO: 13269 - RNA, 17 nt, Artificial Sequence
  Synthetic oligonucleotide: BID-1969
agguggaagagcucugg

SEQ ID NO: 13270 - RNA, 20 nt, Artificial Sequence
  Synthetic oligonucleotide: BID-2046
uguguccucuccacguggcc

SEQ ID NO: 13271 - RNA, 20 nt, Artificial Sequence
  Synthetic oligonucleotide: BID-680
ggccggcuggaggagcacag

SEQ ID NO: 13272 - RNA, 17 nt, Artificial Sequence
  Synthetic oligonucleotide: BID-2317
guccucuccacguggcc

SEQ ID NO: 13273 - RNA, 17 nt, Artificial Sequence
  Synthetic oligonucleotide: BID-682
cggcuggaggagcacag

SEQ ID NO: 13274 - RNA, 20 nt, Artificial Sequence
  Synthetic oligonucleotide: BID-2169
uggaaagaccacgguguggg

SEQ ID NO: 13275 - RNA, 17 nt, Artificial Sequence
  Synthetic oligonucleotide: BID-2441
aaagaccacgguguggg

SEQ ID NO: 13276 - RNA, 20 nt, Artificial Sequence
  Synthetic oligonucleotide: BID-1976
agggacuggugaggggcugg

SEQ ID NO: 13277 - RNA, 20 nt, Artificial Sequence
  Synthetic oligonucleotide: BID-700
agacuguuccagaaacagcc

SEQ ID NO: 13278 - RNA, 17 nt, Artificial Sequence
  Synthetic oligonucleotide: BID-1978
gacuggugaggggcugg

SEQ ID NO: 13279 - RNA, 17 nt, Artificial Sequence
  Synthetic oligonucleotide: BID-737
cuguuccagaaacagcc

SEQ ID NO: 13280 - RNA, 20 nt, Artificial Sequence
  Synthetic oligonucleotide: BID-1980
agcgccgcugggauaauucc

SEQ ID NO: 13281 - RNA, 20 nt, Artificial Sequence
  Synthetic oligonucleotide: BID-1981
uuuaauuauuuggauaucaa

SEQ ID NO: 13282 - RNA, 17 nt, Artificial Sequence
  Synthetic oligonucleotide: BID-1982
gccgcugggauaauucc

SEQ ID NO: 13283 - RNA, 17 nt, Artificial Sequence
  Synthetic oligonucleotide: BID-1983
aauuauuuggauaucaa

SEQ ID NO: 13284 - RNA, 20 nt, Artificial Sequence
  Synthetic oligonucleotide: BID-1984
cccugggagugaugaccgag

SEQ ID NO: 13285 - RNA, 17 nt, Artificial Sequence
  Synthetic oligonucleotide: BID-1985
ugggagugaugaccgag

SEQ ID NO: 13286 - RNA, 17 nt, Artificial Sequence
  Synthetic oligonucleotide: CTLA4-92
ggugacagugcuucggc

SEQ ID NO: 13287 - RNA, 20 nt, Artificial Sequence
  Synthetic oligonucleotide: CTLA4-25
gugcggcaaccuacaugaug

SEQ ID NO: 13288 - RNA, 17 nt, Artificial Sequence
  Synthetic oligonucleotide: CTLA4-96
gcggcaaccuacaugau

SEQ ID NO: 13289 - RNA, 20 nt, Artificial Sequence
  Synthetic oligonucleotide: CTLA4-56
ggccacgugcauugcuagca

SEQ ID NO: 13290 - RNA, 20 nt, Artificial Sequence
  Synthetic oligonucleotide: CTLA4-72
gcuuuaugggagcgguguuc

SEQ ID NO: 13291 - RNA, 20 nt, Artificial Sequence
  Synthetic oligonucleotide: CTLA4-1
acaccgcucccauaaagcca

SEQ ID NO: 13292 - RNA, 17 nt, Artificial Sequence
  Synthetic oligonucleotide: CTLA4-73
ccgcucccauaaagcca

SEQ ID NO: 13293 - RNA, 20 nt, Artificial Sequence
  Synthetic oligonucleotide: CTLA4-4
ccuuggauuucagcggcaca

SEQ ID NO: 13294 - RNA, 17 nt, Artificial Sequence
  Synthetic oligonucleotide: CTLA4-76
uggauuucagcggcaca

SEQ ID NO: 13295 - RNA, 20 nt, Artificial Sequence
  Synthetic oligonucleotide: CTLA4-7
ugaaccuggcuaccaggacc

SEQ ID NO: 13296 - RNA, 17 nt, Artificial Sequence
  Synthetic oligonucleotide: CTLA4-79
accuggcuaccaggacc

SEQ ID NO: 13297 - RNA, 20 nt, Artificial Sequence
  Synthetic oligonucleotide: CTLA4-19
agguccgggugacagugcuu

SEQ ID NO: 13298 - RNA, 20 nt, Artificial Sequence
  Synthetic oligonucleotide: CTLA4-20
ccgggugacagugcuucggc

SEQ ID NO: 13299 - RNA, 17 nt, Artificial Sequence
  Synthetic oligonucleotide: CTLA4-91
uccgggugacagugcuu

SEQ ID NO: 13300 - RNA, 20 nt, Artificial Sequence
  Synthetic oligonucleotide: CTLA4-23
cugugcggcaaccuacauga

SEQ ID NO: 13301 - RNA, 20 nt, Artificial Sequence
  Synthetic oligonucleotide: CTLA4-24
ugugcggcaaccuacaugau

SEQ ID NO: 13302 - RNA, 17 nt, Artificial Sequence
  Synthetic oligonucleotide: CTLA4-95
ugcggcaaccuacauga

SEQ ID NO: 13303 - RNA, 17 nt, Artificial Sequence
  Synthetic oligonucleotide: CTLA4-97
cggcaaccuacaugaug

SEQ ID NO: 13304 - RNA, 17 nt, Artificial Sequence
  Synthetic oligonucleotide: CTLA4-128
cacgugcauugcuagca

SEQ ID NO: 13305 - RNA, 20 nt, Artificial Sequence
  Synthetic oligonucleotide: CTLA4-67
ccuugugccgcugaaaucca

SEQ ID NO: 13306 - RNA, 17 nt, Artificial Sequence
  Synthetic oligonucleotide: CTLA4-139
ugugccgcugaaaucca

SEQ ID NO: 13307 - RNA, 17 nt, Artificial Sequence
  Synthetic oligonucleotide: CTLA4-144
uuaugggagcgguguuc

SEQ ID NO: 13308 - RNA, 20 nt, Artificial Sequence
  Synthetic oligonucleotide: CTLA4-65
gagagugcagggccaggucc

SEQ ID NO: 13309 - RNA, 20 nt, Artificial Sequence
  Synthetic oligonucleotide: CTLA4-40
gagguucacuugauuuccac

SEQ ID NO: 13310 - RNA, 17 nt, Artificial Sequence
  Synthetic oligonucleotide: CTLA4-99
gaugauuccaucugcac

SEQ ID NO: 13311 - RNA, 17 nt, Artificial Sequence
  Synthetic oligonucleotide: CTLA4-116
gauggaaucaucuagga

SEQ ID NO: 13312 - RNA, 20 nt, Artificial Sequence
  Synthetic oligonucleotide: CTLA4-37
gauguagagucccgugucca

SEQ ID NO: 13313 - RNA, 17 nt, Artificial Sequence
  Synthetic oligonucleotide: CTLA4-89
gcaaagccacugagguc

SEQ ID NO: 13314 - RNA, 20 nt, Artificial Sequence
  Synthetic oligonucleotide: CTLA4-9
gcaaaggugagugagacuuu

SEQ ID NO: 13315 - RNA, 17 nt, Artificial Sequence
  Synthetic oligonucleotide: CTLA4-142
gcaagccauggcuuuau

SEQ ID NO: 13316 - RNA, 20 nt, Artificial Sequence
  Synthetic oligonucleotide: CTLA4-5
gcacaaggcucagcugaacc

SEQ ID NO: 13317 - RNA, 20 nt, Artificial Sequence
  Synthetic oligonucleotide: CTLA4-12
gcacguggcccagccugcug

SEQ ID NO: 13318 - RNA, 20 nt, Artificial Sequence
  Synthetic oligonucleotide: CTLA4-44
gcagauggaaucaucuagga

SEQ ID NO: 13319 - RNA, 17 nt, Artificial Sequence
  Synthetic oligonucleotide: CTLA4-138
gccagguccugguagcc

SEQ ID NO: 13320 - RNA, 17 nt, Artificial Sequence
  Synthetic oligonucleotide: CTLA4-119
gccgaagcacugucacc

SEQ ID NO: 13321 - RNA, 20 nt, Artificial Sequence
  Synthetic oligonucleotide: CTLA4-58
gcuagcauggaaaagccaaa

SEQ ID NO: 13322 - RNA, 20 nt, Artificial Sequence
  Synthetic oligonucleotide: CTLA4-52
gcuggcgaugccucggcugc

SEQ ID NO: 13323 - RNA, 20 nt, Artificial Sequence
  Synthetic oligonucleotide: CTLA4-21
gcuucggcaggcugacagcc

SEQ ID NO: 13324 - RNA, 20 nt, Artificial Sequence
  Synthetic oligonucleotide: CTLA4-34
ggacugagggccauggacac

SEQ ID NO: 13325 - RNA, 17 nt, Artificial Sequence
  Synthetic oligonucleotide: CTLA4-114
ggaggugcccgugcaga

SEQ ID NO: 13326 - RNA, 20 nt, Artificial Sequence
  Synthetic oligonucleotide: CTLA4-61
ggaugaagagaagaaaaaac

SEQ ID NO: 13327 - RNA, 17 nt, Artificial Sequence
  Synthetic oligonucleotide: CTLA4-141
ggcaagccauggcuuua

SEQ ID NO: 13328 - RNA, 20 nt, Artificial Sequence
  Synthetic oligonucleotide: CTLA4-55
ggccaguaccacagcaggcu

SEQ ID NO: 13329 - RNA, 20 nt, Artificial Sequence
  Synthetic oligonucleotide: CTLA4-13
ggcccagccugcugugguac

SEQ ID NO: 13330 - RNA, 17 nt, Artificial Sequence
  Synthetic oligonucleotide: CTLA4-124
ggcgaugccucggcugc

SEQ ID NO: 13331 - RNA, 17 nt, Artificial Sequence
  Synthetic oligonucleotide: CTLA4-107
gggacucuacaucugca

SEQ ID NO: 13332 - RNA, 20 nt, Artificial Sequence
  Synthetic oligonucleotide: CTLA4-36
gggacucuacaucugcaagg

SEQ ID NO: 13333 - RNA, 17 nt, Artificial Sequence
  Synthetic oligonucleotide: CTLA4-94
ggugacugaagucugug

SEQ ID NO: 13334 - RNA, 17 nt, Artificial Sequence
  Synthetic oligonucleotide: CTLA4-86
guacuggccagcagccg

SEQ ID NO: 13335 - RNA, 17 nt, Artificial Sequence
  Synthetic oligonucleotide: CTLA4-109
guagagucccgugucca

SEQ ID NO: 13336 - RNA, 17 nt, Artificial Sequence
  Synthetic oligonucleotide: CTLA4-101
gugaaccucacuaucca

SEQ ID NO: 13337 - RNA, 20 nt, Artificial Sequence
  Synthetic oligonucleotide: CTLA4-14
gugguacuggccagcagccg

SEQ ID NO: 13338 - RNA, 20 nt, Artificial Sequence
  Synthetic oligonucleotide: CTLA4-15
gugugugaguaugcaucucc

SEQ ID NO: 13339 - RNA, 17 nt, Artificial Sequence
  Synthetic oligonucleotide: CTLA4-112
guucacuugauuuccac

SEQ ID NO: 13340 - RNA, 20 nt, Artificial Sequence
  Synthetic oligonucleotide: CTLA4-41
guucacuugauuuccacugg

SEQ ID NO: 13341 - RNA, 20 nt, Artificial Sequence
  Synthetic oligonucleotide: CTLA4-2
cauaaagccauggcuugccu

SEQ ID NO: 13342 - RNA, 17 nt, Artificial Sequence
  Synthetic oligonucleotide: CTLA4-134
aaaaaacaggagagugc

SEQ ID NO: 13343 - RNA, 17 nt, Artificial Sequence
  Synthetic oligonucleotide: CTLA4-135
aaaaacaggagagugca

SEQ ID NO: 13344 - RNA, 20 nt, Artificial Sequence
  Synthetic oligonucleotide: CTLA4-64
aaacaggagagugcagggcc

SEQ ID NO: 13345 - RNA, 17 nt, Artificial Sequence
  Synthetic oligonucleotide: CTLA4-74
aaagccauggcuugccu

SEQ ID NO: 13346 - RNA, 17 nt, Artificial Sequence
  Synthetic oligonucleotide: CTLA4-140
aaauccaaggcaagcca

SEQ ID NO: 13347 - RNA, 20 nt, Artificial Sequence
  Synthetic oligonucleotide: CTLA4-62
aagaaaaaacaggagagugc

SEQ ID NO: 13348 - RNA, 20 nt, Artificial Sequence
  Synthetic oligonucleotide: CTLA4-71
aagccauggcuuuaugggag

SEQ ID NO: 13349 - RNA, 20 nt, Artificial Sequence
  Synthetic oligonucleotide: CTLA4-70
aaggcaagccauggcuuuau

SEQ ID NO: 13350 - RNA, 17 nt, Artificial Sequence
  Synthetic oligonucleotide: CTLA4-81
aaggugagugagacuuu

SEQ ID NO: 13351 - RNA, 20 nt, Artificial Sequence
  Synthetic oligonucleotide: CTLA4-51
acacaaagcuggcgaugccu

SEQ ID NO: 13352 - RNA, 20 nt, Artificial Sequence
  Synthetic oligonucleotide: CTLA4-30
accucacuauccaaggacug

SEQ ID NO: 13353 - RNA, 17 nt, Artificial Sequence
  Synthetic oligonucleotide: CTLA4-121
accucaguggcuuugcc

SEQ ID NO: 13354 - RNA, 20 nt, Artificial Sequence
  Synthetic oligonucleotide: CTLA4-60
acucaccuuugcagaagaca

SEQ ID NO: 13355 - RNA, 17 nt, Artificial Sequence
  Synthetic oligonucleotide: CTLA4-108
acucuacaucugcaagg

SEQ ID NO: 13356 - RNA, 17 nt, Artificial Sequence
  Synthetic oligonucleotide: CTLA4-105
acugagggccauggaca

SEQ ID NO: 13357 - RNA, 20 nt, Artificial Sequence
  Synthetic oligonucleotide: CTLA4-42
acuggaggugcccgugcaga

SEQ ID NO: 13358 - RNA, 20 nt, Artificial Sequence
  Synthetic oligonucleotide: CTLA4-63
agaaaaaacaggagagugca

SEQ ID NO: 13359 - RNA, 20 nt, Artificial Sequence
  Synthetic oligonucleotide: CTLA4-10
agacuuuuggagcaugaaga

SEQ ID NO: 13360 - RNA, 17 nt, Artificial Sequence
  Synthetic oligonucleotide: CTLA4-98
agaugauuccaucugca

SEQ ID NO: 13361 - RNA, 17 nt, Artificial Sequence
  Synthetic oligonucleotide: CTLA4-130
agcauggaaaagccaaa

SEQ ID NO: 13362 - RNA, 17 nt, Artificial Sequence
  Synthetic oligonucleotide: CTLA4-78
agcugaaccuggcuacc

SEQ ID NO: 13363 - RNA, 20 nt, Artificial Sequence
  Synthetic oligonucleotide: CTLA4-33
aggacugagggccauggaca

SEQ ID NO: 13364 - RNA, 20 nt, Artificial Sequence
  Synthetic oligonucleotide: CTLA4-18
aggcaaagccacugaggucc

SEQ ID NO: 13365 - RNA, 20 nt, Artificial Sequence
  Synthetic oligonucleotide: CTLA4-66
agggccagguccugguagcc

SEQ ID NO: 13366 - RNA, 17 nt, Artificial Sequence
  Synthetic oligonucleotide: CTLA4-137
agugcagggccaggucc

SEQ ID NO: 13367 - RNA, 17 nt, Artificial Sequence
  Synthetic oligonucleotide: CTLA4-122
auacucacacacaaagc

SEQ ID NO: 13368 - RNA, 17 nt, Artificial Sequence
  Synthetic oligonucleotide: CTLA4-80
aucccugucuucugcaa

SEQ ID NO: 13369 - RNA, 20 nt, Artificial Sequence
  Synthetic oligonucleotide: CTLA4-16
aucuccaggcaaagccacug

SEQ ID NO: 13370 - RNA, 20 nt, Artificial Sequence
  Synthetic oligonucleotide: CTLA4-28
aucugcacgggcaccuccag

SEQ ID NO: 13371 - RNA, 17 nt, Artificial Sequence
  Synthetic oligonucleotide: CTLA4-90
caaagccacugaggucc

SEQ ID NO: 13372 - RNA, 17 nt, Artificial Sequence
  Synthetic oligonucleotide: CTLA4-123
caaagcuggcgaugccu

SEQ ID NO: 13373 - RNA, 20 nt, Artificial Sequence
  Synthetic oligonucleotide: CTLA4-45
caacucauuccccaucaugu

SEQ ID NO: 13374 - RNA, 20 nt, Artificial Sequence
  Synthetic oligonucleotide: CTLA4-69
caaggcaagccauggcuuua

SEQ ID NO: 13375 - RNA, 17 nt, Artificial Sequence
  Synthetic oligonucleotide: CTLA4-77
caaggcucagcugaacc

SEQ ID NO: 13376 - RNA, 20 nt, Artificial Sequence
  Synthetic oligonucleotide: CTLA4-29
caagugaaccucacuaucca

SEQ ID NO: 13377 - RNA, 17 nt, Artificial Sequence
  Synthetic oligonucleotide: CTLA4-118
cacagacuucagucacc

SEQ ID NO: 13378 - RNA, 17 nt, Artificial Sequence
  Synthetic oligonucleotide: CTLA4-132
caccuuugcagaagaca

SEQ ID NO: 13379 - RNA, 20 nt, Artificial Sequence
  Synthetic oligonucleotide: CTLA4-35
cacgggacucuacaucugca

SEQ ID NO: 13380 - RNA, 17 nt, Artificial Sequence
  Synthetic oligonucleotide: CTLA4-103
cacuauccaaggacuga

SEQ ID NO: 13381 - RNA, 20 nt, Artificial Sequence
  Synthetic oligonucleotide: CTLA4-59
cacucaccuuugcagaagac

SEQ ID NO: 13382 - RNA, 20 nt, Artificial Sequence
  Synthetic oligonucleotide: CTLA4-48
cacugucacccggaccucag

SEQ ID NO: 13383 - RNA, 17 nt, Artificial Sequence
  Synthetic oligonucleotide: CTLA4-113
cacuugauuuccacugg

SEQ ID NO: 13384 - RNA, 17 nt, Artificial Sequence
  Synthetic oligonucleotide: CTLA4-136
caggagagugcagggcc

SEQ ID NO: 13385 - RNA, 20 nt, Artificial Sequence
  Synthetic oligonucleotide: CTLA4-17
caggcaaagccacugagguc

SEQ ID NO: 13386 - RNA, 17 nt, Artificial Sequence
  Synthetic oligonucleotide: CTLA4-127
caguaccacagcaggcu

SEQ ID NO: 13387 - RNA, 17 nt, Artificial Sequence
  Synthetic oligonucleotide: CTLA4-83
caugcuagcaaugcacg

SEQ ID NO: 13388 - RNA, 17 nt, Artificial Sequence
  Synthetic oligonucleotide: CTLA4-104
ccaaggacugagggcca

SEQ ID NO: 13389 - RNA, 17 nt, Artificial Sequence
  Synthetic oligonucleotide: CTLA4-85
ccagccugcugugguac

SEQ ID NO: 13390 - RNA, 20 nt, Artificial Sequence
  Synthetic oligonucleotide: CTLA4-22
ccaggugacugaagucugug

SEQ ID NO: 13391 - RNA, 17 nt, Artificial Sequence
  Synthetic oligonucleotide: CTLA4-126
ccaguaccacagcaggc

SEQ ID NO: 13392 - RNA, 17 nt, Artificial Sequence
  Synthetic oligonucleotide: CTLA4-110
ccauggcccucaguccu

SEQ ID NO: 13393 - RNA, 17 nt, Artificial Sequence
  Synthetic oligonucleotide: CTLA4-143
ccauggcuuuaugggag

SEQ ID NO: 13394 - RNA, 20 nt, Artificial Sequence
  Synthetic oligonucleotide: CTLA4-39
cccucaguccuuggauagug

SEQ ID NO: 13395 - RNA, 20 nt, Artificial Sequence
  Synthetic oligonucleotide: CTLA4-46
ccgcacagacuucagucacc

SEQ ID NO: 13396 - RNA, 20 nt, Artificial Sequence
  Synthetic oligonucleotide: CTLA4-43
ccgugcagauggaaucaucu

SEQ ID NO: 13397 - RNA, 20 nt, Artificial Sequence
  Synthetic oligonucleotide: CTLA4-26
ccuagaugauuccaucugca

SEQ ID NO: 13398 - RNA, 20 nt, Artificial Sequence
  Synthetic oligonucleotide: CTLA4-31
ccucacuauccaaggacuga

SEQ ID NO: 13399 - RNA, 20 nt, Artificial Sequence
  Synthetic oligonucleotide: CTLA4-47
ccugccgaagcacugucacc

SEQ ID NO: 13400 - RNA, 20 nt, Artificial Sequence
  Synthetic oligonucleotide: CTLA4-49
cggaccucaguggcuuugcc

SEQ ID NO: 13401 - RNA, 17 nt, Artificial Sequence
  Synthetic oligonucleotide: CTLA4-84
cguggcccagccugcug

SEQ ID NO: 13402 - RNA, 20 nt, Artificial Sequence
  Synthetic oligonucleotide: CTLA4-27
cuagaugauuccaucugcac

SEQ ID NO: 13403 - RNA, 20 nt, Artificial Sequence
  Synthetic oligonucleotide: CTLA4-6
cucagcugaaccuggcuacc

SEQ ID NO: 13404 - RNA, 17 nt, Artificial Sequence
  Synthetic oligonucleotide: CTLA4-117
cucauuccccaucaugu

SEQ ID NO: 13405 - RNA, 20 nt, Artificial Sequence
  Synthetic oligonucleotide: CTLA4-68
cugaaauccaaggcaagcca

SEQ ID NO: 13406 - RNA, 17 nt, Artificial Sequence
  Synthetic oligonucleotide: CTLA4-106
cugagggccauggacac

SEQ ID NO: 13407 - RNA, 20 nt, Artificial Sequence
  Synthetic oligonucleotide: CTLA4-53
cugcuggccaguaccacagc

SEQ ID NO: 13408 - RNA, 17 nt, Artificial Sequence
  Synthetic oligonucleotide: CTLA4-125
cuggccaguaccacagc

SEQ ID NO: 13409 - RNA, 17 nt, Artificial Sequence
  Synthetic oligonucleotide: CTLA4-75
cuugccuuggauuucag

SEQ ID NO: 13410 - RNA, 17 nt, Artificial Sequence
  Synthetic oligonucleotide: CTLA4-82
cuuuuggagcaugaaga

SEQ ID NO: 13411 - RNA, 17 nt, Artificial Sequence
  Synthetic oligonucleotide: CTLA4-129
uagcauggaaaagccaa

SEQ ID NO: 13412 - RNA, 20 nt, Artificial Sequence
  Synthetic oligonucleotide: CTLA4-32
uauccaaggacugagggcca

SEQ ID NO: 13413 - RNA, 17 nt, Artificial Sequence
  Synthetic oligonucleotide: CTLA4-131
ucaccuuugcagaagac

SEQ ID NO: 13414 - RNA, 17 nt, Artificial Sequence
  Synthetic oligonucleotide: CTLA4-102
ucacuauccaaggacug

SEQ ID NO: 13415 - RNA, 17 nt, Artificial Sequence
  Synthetic oligonucleotide: CTLA4-111
ucaguccuuggauagug

SEQ ID NO: 13416 - RNA, 17 nt, Artificial Sequence
  Synthetic oligonucleotide: CTLA4-88
uccaggcaaagccacug

SEQ ID NO: 13417 - RNA, 17 nt, Artificial Sequence
  Synthetic oligonucleotide: CTLA4-93
ucggcaggcugacagcc

SEQ ID NO: 13418 - RNA, 17 nt, Artificial Sequence
  Synthetic oligonucleotide: CTLA4-133
ugaagagaagaaaaaac

SEQ ID NO: 13419 - RNA, 17 nt, Artificial Sequence
  Synthetic oligonucleotide: CTLA4-100
ugcacgggcaccuccag

SEQ ID NO: 13420 - RNA, 17 nt, Artificial Sequence
  Synthetic oligonucleotide: CTLA4-115
ugcagauggaaucaucu

SEQ ID NO: 13421 - RNA, 20 nt, Artificial Sequence
  Synthetic oligonucleotide: CTLA4-50
ugcauacucacacacaaagc

SEQ ID NO: 13422 - RNA, 20 nt, Artificial Sequence
  Synthetic oligonucleotide: CTLA4-57
ugcuagcauggaaaagccaa

SEQ ID NO: 13423 - RNA, 20 nt, Artificial Sequence
  Synthetic oligonucleotide: CTLA4-54
uggccaguaccacagcaggc

SEQ ID NO: 13424 - RNA, 20 nt, Artificial Sequence
  Synthetic oligonucleotide: CTLA4-3
uggcuugccuuggauuucag

SEQ ID NO: 13425 - RNA, 17 nt, Artificial Sequence
  Synthetic oligonucleotide: CTLA4-120
ugucacccggaccucag

SEQ ID NO: 13426 - RNA, 20 nt, Artificial Sequence
  Synthetic oligonucleotide: CTLA4-38
uguccauggcccucaguccu

SEQ ID NO: 13427 - RNA, 17 nt, Artificial Sequence
  Synthetic oligonucleotide: CTLA4-87
ugugaguaugcaucucc

SEQ ID NO: 13428 - RNA, 20 nt, Artificial Sequence
  Synthetic oligonucleotide: CTLA4-8
uucaucccugucuucugcaa

SEQ ID NO: 13429 - RNA, 20 nt, Artificial Sequence
  Synthetic oligonucleotide: CTLA4-11
uuccaugcuagcaaugcacg

SEQ ID NO: 13430 - RNA, 20 nt, Artificial Sequence
  Synthetic oligonucleotide: CTLA4-145
uacuaccugggcauaggcaa

SEQ ID NO: 13431 - RNA, 20 nt, Artificial Sequence
  Synthetic oligonucleotide: CTLA4-146
ggaacccagauuuauguaau

SEQ ID NO: 13432 - RNA, 20 nt, Artificial Sequence
  Synthetic oligonucleotide: CTLA4-147
cagauucugacuuccuccuc

SEQ ID NO: 13433 - RNA, 20 nt, Artificial Sequence
  Synthetic oligonucleotide: CTLA4-148
gauccuugcagcaguuaguu

SEQ ID NO: 13434 - RNA, 20 nt, Artificial Sequence
  Synthetic oligonucleotide: CTLA4-149
auccuugcagcaguuaguuc

SEQ ID NO: 13435 - RNA, 20 nt, Artificial Sequence
  Synthetic oligonucleotide: CTLA4-150
uccuugcagcaguuaguucg

SEQ ID NO: 13436 - RNA, 20 nt, Artificial Sequence
  Synthetic oligonucleotide: CTLA4-151
agcuguuucuuugagcaaaa

SEQ ID NO: 13437 - RNA, 20 nt, Artificial Sequence
  Synthetic oligonucleotide: CTLA4-152
uuugagcaaaauggugagug

SEQ ID NO: 13438 - RNA, 20 nt, Artificial Sequence
  Synthetic oligonucleotide: CTLA4-153
aauggugaguguggugcuga

SEQ ID NO: 13439 - RNA, 20 nt, Artificial Sequence
  Synthetic oligonucleotide: CTLA4-154
aaaagaagcccucuuacaac

SEQ ID NO: 13440 - RNA, 20 nt, Artificial Sequence
  Synthetic oligonucleotide: CTLA4-155
aaagaagcccucuuacaaca

SEQ ID NO: 13441 - RNA, 20 nt, Artificial Sequence
  Synthetic oligonucleotide: CTLA4-156
aagaagcccucuuacaacag

SEQ ID NO: 13442 - RNA, 17 nt, Artificial Sequence
  Synthetic oligonucleotide: CTLA4-157
uaccugggcauaggcaa

SEQ ID NO: 13443 - RNA, 17 nt, Artificial Sequence
  Synthetic oligonucleotide: CTLA4-158
acccagauuuauguaau

SEQ ID NO: 13444 - RNA, 17 nt, Artificial Sequence
  Synthetic oligonucleotide: CTLA4-159
auucugacuuccuccuc

SEQ ID NO: 13445 - RNA, 17 nt, Artificial Sequence
  Synthetic oligonucleotide: CTLA4-160
ccuugcagcaguuaguu

SEQ ID NO: 13446 - RNA, 17 nt, Artificial Sequence
  Synthetic oligonucleotide: CTLA4-161
cuugcagcaguuaguuc

SEQ ID NO: 13447 - RNA, 17 nt, Artificial Sequence
  Synthetic oligonucleotide: CTLA4-162
uugcagcaguuaguucg

SEQ ID NO: 13448 - RNA, 17 nt, Artificial Sequence
  Synthetic oligonucleotide: CTLA4-163
uguuucuuugagcaaaa

SEQ ID NO: 13449 - RNA, 17 nt, Artificial Sequence
  Synthetic oligonucleotide: CTLA4-164
gagcaaaauggugagug

SEQ ID NO: 13450 - RNA, 17 nt, Artificial Sequence
  Synthetic oligonucleotide: CTLA4-165
ggugaguguggugcuga

SEQ ID NO: 13451 - RNA, 17 nt, Artificial Sequence
  Synthetic oligonucleotide: CTLA4-166
agaagcccucuuacaac

SEQ ID NO: 13452 - RNA, 17 nt, Artificial Sequence
  Synthetic oligonucleotide: CTLA4-167
gaagcccucuuacaaca

SEQ ID NO: 13453 - RNA, 17 nt, Artificial Sequence
  Synthetic oligonucleotide: CTLA4-168
aagcccucuuacaacag

SEQ ID NO: 13454 - RNA, 20 nt, Artificial Sequence
  Synthetic oligonucleotide: CTLA4-169
uugccuaugcccagguagua

SEQ ID NO: 13455 - RNA, 20 nt, Artificial Sequence
  Synthetic oligonucleotide: CTLA4-170
ggguuccguugccuaugccc

SEQ ID NO: 13456 - RNA, 20 nt, Artificial Sequence
  Synthetic oligonucleotide: CTLA4-171
cucaccaauuacauaaaucu

SEQ ID NO: 13457 - RNA, 20 nt, Artificial Sequence
  Synthetic oligonucleotide: CTLA4-172
gcucaccaauuacauaaauc

SEQ ID NO: 13458 - RNA, 20 nt, Artificial Sequence
  Synthetic oligonucleotide: CTLA4-173
ucagaaucugggcacgguuc

SEQ ID NO: 13459 - RNA, 20 nt, Artificial Sequence
  Synthetic oligonucleotide: CTLA4-174
aggaagucagaaucugggca

SEQ ID NO: 13460 - RNA, 20 nt, Artificial Sequence
  Synthetic oligonucleotide: CTLA4-175
agaggaggaagucagaaucu

SEQ ID NO: 13461 - RNA, 20 nt, Artificial Sequence
  Synthetic oligonucleotide: CTLA4-176
cagaggaggaagucagaauc

SEQ ID NO: 13462 - RNA, 20 nt, Artificial Sequence
  Synthetic oligonucleotide: CTLA4-177
cugcugcaaggauccagagg

SEQ ID NO: 13463 - RNA, 20 nt, Artificial Sequence
  Synthetic oligonucleotide: CTLA4-178
uaacugcugcaaggauccag

SEQ ID NO: 13464 - RNA, 20 nt, Artificial Sequence
  Synthetic oligonucleotide: CTLA4-179
accccgaacuaacugcugca

SEQ ID NO: 13465 - RNA, 20 nt, Artificial Sequence
  Synthetic oligonucleotide: CTLA4-180
ugcucaaagaaacagcugug

SEQ ID NO: 13466 - RNA, 20 nt, Artificial Sequence
  Synthetic oligonucleotide: CTLA4-181
cauagaccccuguuguaaga

SEQ ID NO: 13467 - RNA, 20 nt, Artificial Sequence
  Synthetic oligonucleotide: CTLA4-182
acauagaccccuguuguaag

SEQ ID NO: 13468 - RNA, 20 nt, Artificial Sequence
  Synthetic oligonucleotide: CTLA4-183
ucacauucuggcucuguugg

SEQ ID NO: 13469 - RNA, 20 nt, Artificial Sequence
  Synthetic oligonucleotide: CTLA4-184
uucacauucuggcucuguug

SEQ ID NO: 13470 - RNA, 20 nt, Artificial Sequence
  Synthetic oligonucleotide: CTLA4-185
uuucacauucuggcucuguu

SEQ ID NO: 13471 - RNA, 20 nt, Artificial Sequence
  Synthetic oligonucleotide: CTLA4-186
uuuucacauucuggcucugu

SEQ ID NO: 13472 - RNA, 20 nt, Artificial Sequence
  Synthetic oligonucleotide: CTLA4-187
ugaaauugcuuuucacauuc

SEQ ID NO: 13473 - RNA, 20 nt, Artificial Sequence
  Synthetic oligonucleotide: CTLA4-188
caauugaugggaauaaaaua

SEQ ID NO: 13474 - RNA, 20 nt, Artificial Sequence
  Synthetic oligonucleotide: CTLA4-189
auaaugguuucucaauugau

SEQ ID NO: 13475 - RNA, 20 nt, Artificial Sequence
  Synthetic oligonucleotide: CTLA4-190
cauaaugguuucucaauuga

SEQ ID NO: 13476 - RNA, 20 nt, Artificial Sequence
  Synthetic oligonucleotide: CTLA4-191
auggacucucuucuucauaa

SEQ ID NO: 13477 - RNA, 17 nt, Artificial Sequence
  Synthetic oligonucleotide: CTLA4-192
ccuaugcccagguagua

SEQ ID NO: 13478 - RNA, 17 nt, Artificial Sequence
  Synthetic oligonucleotide: CTLA4-193
uuccguugccuaugccc

SEQ ID NO: 13479 - RNA, 17 nt, Artificial Sequence
  Synthetic oligonucleotide: CTLA4-194
accaauuacauaaaucu

SEQ ID NO: 13480 - RNA, 17 nt, Artificial Sequence
  Synthetic oligonucleotide: CTLA4-195
caccaauuacauaaauc

SEQ ID NO: 13481 - RNA, 17 nt, Artificial Sequence
  Synthetic oligonucleotide: CTLA4-196
gugucaacucagugaaa

SEQ ID NO: 13482 - RNA, 17 nt, Artificial Sequence
  Synthetic oligonucleotide: CTLA4-197
gaaucugggcacgguuc

SEQ ID NO: 13483 - RNA, 17 nt, Artificial Sequence
  Synthetic oligonucleotide: CTLA4-198
aagucagaaucugggca

SEQ ID NO: 13484 - RNA, 17 nt, Artificial Sequence
  Synthetic oligonucleotide: CTLA4-199
ggaggaagucagaaucu

SEQ ID NO: 13485 - RNA, 17 nt, Artificial Sequence
  Synthetic oligonucleotide: CTLA4-200
aggaggaagucagaauc

SEQ ID NO: 13486 - RNA, 17 nt, Artificial Sequence
  Synthetic oligonucleotide: CTLA4-201
cugcaaggauccagagg

SEQ ID NO: 13487 - RNA, 17 nt, Artificial Sequence
  Synthetic oligonucleotide: CTLA4-202
cugcugcaaggauccag

SEQ ID NO: 13488 - RNA, 17 nt, Artificial Sequence
  Synthetic oligonucleotide: CTLA4-203
ccgaacuaacugcugca

SEQ ID NO: 13489 - RNA, 17 nt, Artificial Sequence
  Synthetic oligonucleotide: CTLA4-204
ucaaagaaacagcugug

SEQ ID NO: 13490 - RNA, 17 nt, Artificial Sequence
  Synthetic oligonucleotide: CTLA4-205
agaccccuguuguaaga

SEQ ID NO: 13491 - RNA, 17 nt, Artificial Sequence
  Synthetic oligonucleotide: CTLA4-206
uagaccccuguuguaag

SEQ ID NO: 13492 - RNA, 17 nt, Artificial Sequence
  Synthetic oligonucleotide: CTLA4-207
cauucuggcucuguugg

SEQ ID NO: 13493 - RNA, 17 nt, Artificial Sequence
  Synthetic oligonucleotide: CTLA4-208
acauucuggcucuguug

SEQ ID NO: 13494 - RNA, 17 nt, Artificial Sequence
  Synthetic oligonucleotide: CTLA4-209
cacauucuggcucuguu

SEQ ID NO: 13495 - RNA, 17 nt, Artificial Sequence
  Synthetic oligonucleotide: CTLA4-210
ucacauucuggcucugu

SEQ ID NO: 13496 - RNA, 17 nt, Artificial Sequence
  Synthetic oligonucleotide: CTLA4-211
aauugcuuuucacauuc

SEQ ID NO: 13497 - RNA, 17 nt, Artificial Sequence
  Synthetic oligonucleotide: CTLA4-212
uugaugggaauaaaaua

SEQ ID NO: 13498 - RNA, 17 nt, Artificial Sequence
  Synthetic oligonucleotide: CTLA4-213
augguuucucaauugau

SEQ ID NO: 13499 - RNA, 17 nt, Artificial Sequence
  Synthetic oligonucleotide: CTLA4-214
aaugguuucucaauuga

SEQ ID NO: 13500 - RNA, 17 nt, Artificial Sequence
  Synthetic oligonucleotide: CTLA4-215
gacucucuucuucauaa

SEQ ID NO: 13501 - RNA, 20 nt, Artificial Sequence
  Synthetic oligonucleotide: CTLA4-216
ccauaaagccauggcuugcc

SEQ ID NO: 13502 - RNA, 20 nt, Artificial Sequence
  Synthetic oligonucleotide: CTLA4-217
uucagcggcacaaggcucag

SEQ ID NO: 13503 - RNA, 20 nt, Artificial Sequence
  Synthetic oligonucleotide: CTLA4-218
gcucagcugaaccuggcuac

SEQ ID NO: 13504 - RNA, 20 nt, Artificial Sequence
  Synthetic oligonucleotide: CTLA4-219
caucccugucuucugcaaag

SEQ ID NO: 13505 - RNA, 20 nt, Artificial Sequence
  Synthetic oligonucleotide: CTLA4-220
ccugucuucugcaaagguga

SEQ ID NO: 13506 - RNA, 20 nt, Artificial Sequence
  Synthetic oligonucleotide: CTLA4-221
ugcaaaggugagugagacuu

SEQ ID NO: 13507 - RNA, 20 nt, Artificial Sequence
  Synthetic oligonucleotide: CTLA4-9
gcaaaggugagugagacuuu

SEQ ID NO: 13508 - RNA, 20 nt, Artificial Sequence
  Synthetic oligonucleotide: CTLA4-223
gugagugagacuuuuggagc

SEQ ID NO: 13509 - RNA, 20 nt, Artificial Sequence
  Synthetic oligonucleotide: CTLA4-224
gcugugguacuggccagcag

SEQ ID NO: 13510 - RNA, 20 nt, Artificial Sequence
  Synthetic oligonucleotide: CTLA4-225
aggcaucgccagcuuugugu

SEQ ID NO: 13511 - RNA, 20 nt, Artificial Sequence
  Synthetic oligonucleotide: CTLA4-226
ugcaucuccaggcaaagcca

SEQ ID NO: 13512 - RNA, 20 nt, Artificial Sequence
  Synthetic oligonucleotide: CTLA4-227
ccaggcaaagccacugaggu

SEQ ID NO: 13513 - RNA, 20 nt, Artificial Sequence
  Synthetic oligonucleotide: CTLA4-228
gcaggcugacagccagguga

SEQ ID NO: 13514 - RNA, 20 nt, Artificial Sequence
  Synthetic oligonucleotide: CTLA4-229
ucugugcggcaaccuacaug

SEQ ID NO: 13515 - RNA, 20 nt, Artificial Sequence
  Synthetic oligonucleotide: CTLA4-23
cugugcggcaaccuacauga

SEQ ID NO: 13516 - RNA, 20 nt, Artificial Sequence
  Synthetic oligonucleotide: CTLA4-24
ugugcggcaaccuacaugau

SEQ ID NO: 13517 - RNA, 20 nt, Artificial Sequence
  Synthetic oligonucleotide: CTLA4-25
gugcggcaaccuacaugaug

SEQ ID NO: 13518 - RNA, 20 nt, Artificial Sequence
  Synthetic oligonucleotide: CTLA4-233
ggcaaccuacaugaugggga

SEQ ID NO: 13519 - RNA, 20 nt, Artificial Sequence
  Synthetic oligonucleotide: CTLA4-234
uccuagaugauuccaucugc

SEQ ID NO: 13520 - RNA, 20 nt, Artificial Sequence
  Synthetic oligonucleotide: CTLA4-235
caucugcacgggcaccucca

SEQ ID NO: 13521 - RNA, 20 nt, Artificial Sequence
  Synthetic oligonucleotide: CTLA4-28
aucugcacgggcaccuccag

SEQ ID NO: 13522 - RNA, 20 nt, Artificial Sequence
  Synthetic oligonucleotide: CTLA4-237
gcaccuccaguggaaaucaa

SEQ ID NO: 13523 - RNA, 20 nt, Artificial Sequence
  Synthetic oligonucleotide: CTLA4-238
ucaagugaaccucacuaucc

SEQ ID NO: 13524 - RNA, 20 nt, Artificial Sequence
  Synthetic oligonucleotide: CTLA4-239
ugaaccucacuauccaagga

SEQ ID NO: 13525 - RNA, 20 nt, Artificial Sequence
  Synthetic oligonucleotide: CTLA4-240
aaccucacuauccaaggacu

SEQ ID NO: 13526 - RNA, 20 nt, Artificial Sequence
  Synthetic oligonucleotide: CTLA4-241
cuauccaaggacugagggcc

SEQ ID NO: 13527 - RNA, 20 nt, Artificial Sequence
  Synthetic oligonucleotide: CTLA4-242
aaggacugagggccauggac

SEQ ID NO: 13528 - RNA, 20 nt, Artificial Sequence
  Synthetic oligonucleotide: CTLA4-33
aggacugagggccauggaca

SEQ ID NO: 13529 - RNA, 20 nt, Artificial Sequence
  Synthetic oligonucleotide: CTLA4-244
cgggacucuacaucugcaag

SEQ ID NO: 13530 - RNA, 20 nt, Artificial Sequence
  Synthetic oligonucleotide: CTLA4-36
gggacucuacaucugcaagg

SEQ ID NO: 13531 - RNA, 17 nt, Artificial Sequence
  Synthetic oligonucleotide: CTLA4-246
uaaagccauggcuugcc

SEQ ID NO: 13532 - RNA, 17 nt, Artificial Sequence
  Synthetic oligonucleotide: CTLA4-247
agcggcacaaggcucag

SEQ ID NO: 13533 - RNA, 17 nt, Artificial Sequence
  Synthetic oligonucleotide: CTLA4-248
cagcugaaccuggcuac

SEQ ID NO: 13534 - RNA, 17 nt, Artificial Sequence
  Synthetic oligonucleotide: CTLA4-249
cccugucuucugcaaag

SEQ ID NO: 13535 - RNA, 17 nt, Artificial Sequence
  Synthetic oligonucleotide: CTLA4-250
gucuucugcaaagguga

SEQ ID NO: 13536 - RNA, 17 nt, Artificial Sequence
  Synthetic oligonucleotide: CTLA4-251
aaaggugagugagacuu

SEQ ID NO: 13537 - RNA, 17 nt, Artificial Sequence
  Synthetic oligonucleotide: CTLA4-81
aaggugagugagacuuu

SEQ ID NO: 13538 - RNA, 17 nt, Artificial Sequence
  Synthetic oligonucleotide: CTLA4-253
agugagacuuuuggagc

SEQ ID NO: 13539 - RNA, 17 nt, Artificial Sequence
  Synthetic oligonucleotide: CTLA4-254
gugguacuggccagcag

SEQ ID NO: 13540 - RNA, 17 nt, Artificial Sequence
  Synthetic oligonucleotide: CTLA4-255
caucgccagcuuugugu

SEQ ID NO: 13541 - RNA, 17 nt, Artificial Sequence
  Synthetic oligonucleotide: CTLA4-256
aucuccaggcaaagcca

SEQ ID NO: 13542 - RNA, 17 nt, Artificial Sequence
  Synthetic oligonucleotide: CTLA4-257
ggcaaagccacugaggu

SEQ ID NO: 13543 - RNA, 17 nt, Artificial Sequence
  Synthetic oligonucleotide: CTLA4-258
ggcugacagccagguga

SEQ ID NO: 13544 - RNA, 17 nt, Artificial Sequence
  Synthetic oligonucleotide: CTLA4-259
gugcggcaaccuacaug

SEQ ID NO: 13545 - RNA, 17 nt, Artificial Sequence
  Synthetic oligonucleotide: CTLA4-95
ugcggcaaccuacauga

SEQ ID NO: 13546 - RNA, 17 nt, Artificial Sequence
  Synthetic oligonucleotide: CTLA4-96
gcggcaaccuacaugau

SEQ ID NO: 13547 - RNA, 17 nt, Artificial Sequence
  Synthetic oligonucleotide: CTLA4-97
cggcaaccuacaugaug

SEQ ID NO: 13548 - RNA, 17 nt, Artificial Sequence
  Synthetic oligonucleotide: CTLA4-263
aaccuacaugaugggga

SEQ ID NO: 13549 - RNA, 17 nt, Artificial Sequence
  Synthetic oligonucleotide: CTLA4-264
uagaugauuccaucugc

SEQ ID NO: 13550 - RNA, 17 nt, Artificial Sequence
  Synthetic oligonucleotide: CTLA4-265
cugcacgggcaccucca

SEQ ID NO: 13551 - RNA, 17 nt, Artificial Sequence
  Synthetic oligonucleotide: CTLA4-100
ugcacgggcaccuccag

SEQ ID NO: 13552 - RNA, 17 nt, Artificial Sequence
  Synthetic oligonucleotide: CTLA4-267
ccuccaguggaaaucaa

SEQ ID NO: 13553 - RNA, 17 nt, Artificial Sequence
  Synthetic oligonucleotide: CTLA4-268
agugaaccucacuaucc

SEQ ID NO: 13554 - RNA, 17 nt, Artificial Sequence
  Synthetic oligonucleotide: CTLA4-269
accucacuauccaagga

SEQ ID NO: 13555 - RNA, 17 nt, Artificial Sequence
  Synthetic oligonucleotide: CTLA4-270
cucacuauccaaggacu

SEQ ID NO: 13556 - RNA, 17 nt, Artificial Sequence
  Synthetic oligonucleotide: CTLA4-271
uccaaggacugagggcc

SEQ ID NO: 13557 - RNA, 17 nt, Artificial Sequence
  Synthetic oligonucleotide: CTLA4-272
gacugagggccauggac

SEQ ID NO: 13558 - RNA, 17 nt, Artificial Sequence
  Synthetic oligonucleotide: CTLA4-105
acugagggccauggaca

SEQ ID NO: 13559 - RNA, 17 nt, Artificial Sequence
  Synthetic oligonucleotide: CTLA4-274
gacucuacaucugcaag

SEQ ID NO: 13560 - RNA, 17 nt, Artificial Sequence
  Synthetic oligonucleotide: CTLA4-108
acucuacaucugcaagg

SEQ ID NO: 13561 - RNA, 20 nt, Artificial Sequence
  Synthetic oligonucleotide: CTLA4-70
aaggcaagccauggcuuuau

SEQ ID NO: 13562 - RNA, 20 nt, Artificial Sequence
  Synthetic oligonucleotide: CTLA4-69
caaggcaagccauggcuuua

SEQ ID NO: 13563 - RNA, 20 nt, Artificial Sequence
  Synthetic oligonucleotide: CTLA4-278
ccaaggcaagccauggcuuu

SEQ ID NO: 13564 - RNA, 20 nt, Artificial Sequence
  Synthetic oligonucleotide: CTLA4-279
uucagcugagccuugugccg

SEQ ID NO: 13565 - RNA, 20 nt, Artificial Sequence
  Synthetic oligonucleotide: CTLA4-280
guccugguagccagguucag

SEQ ID NO: 13566 - RNA, 20 nt, Artificial Sequence
  Synthetic oligonucleotide: CTLA4-281
gaagaaaaaacaggagagug

SEQ ID NO: 13567 - RNA, 20 nt, Artificial Sequence
  Synthetic oligonucleotide: CTLA4-282
augaagagaagaaaaaacag

SEQ ID NO: 13568 - RNA, 20 nt, Artificial Sequence
  Synthetic oligonucleotide: CTLA4-61
ggaugaagagaagaaaaaac

SEQ ID NO: 13569 - RNA, 20 nt, Artificial Sequence
  Synthetic oligonucleotide: CTLA4-284
gggaugaagagaagaaaaaa

SEQ ID NO: 13570 - RNA, 20 nt, Artificial Sequence
  Synthetic oligonucleotide: CTLA4-285
cagaagacagggaugaagag

SEQ ID NO: 13571 - RNA, 20 nt, Artificial Sequence
  Synthetic oligonucleotide: CTLA4-286
uugcagaagacagggaugaa

SEQ ID NO: 13572 - RNA, 20 nt, Artificial Sequence
  Synthetic oligonucleotide: CTLA4-287
cuuugcagaagacagggaug

SEQ ID NO: 13573 - RNA, 20 nt, Artificial Sequence
  Synthetic oligonucleotide: CTLA4-288
caccuuugcagaagacaggg

SEQ ID NO: 13574 - RNA, 20 nt, Artificial Sequence
  Synthetic oligonucleotide: CTLA4-59
cacucaccuuugcagaagac

SEQ ID NO: 13575 - RNA, 20 nt, Artificial Sequence
  Synthetic oligonucleotide: CTLA4-290
ucacucaccuuugcagaaga

SEQ ID NO: 13576 - RNA, 20 nt, Artificial Sequence
  Synthetic oligonucleotide: CTLA4-291
aaaagucucacucaccuuug

SEQ ID NO: 13577 - RNA, 20 nt, Artificial Sequence
  Synthetic oligonucleotide: CTLA4-58
gcuagcauggaaaagccaaa

SEQ ID NO: 13578 - RNA, 20 nt, Artificial Sequence
  Synthetic oligonucleotide: CTLA4-57
ugcuagcauggaaaagccaa

SEQ ID NO: 13579 - RNA, 20 nt, Artificial Sequence
  Synthetic oligonucleotide: CTLA4-294
uugcuagcauggaaaagcca

SEQ ID NO: 13580 - RNA, 20 nt, Artificial Sequence
  Synthetic oligonucleotide: CTLA4-56
ggccacgugcauugcuagca

SEQ ID NO: 13581 - RNA, 20 nt, Artificial Sequence
  Synthetic oligonucleotide: CTLA4-296
gggccacgugcauugcuagc

SEQ ID NO: 13582 - RNA, 20 nt, Artificial Sequence
  Synthetic oligonucleotide: CTLA4-297
cuggccaguaccacagcagg

SEQ ID NO: 13583 - RNA, 20 nt, Artificial Sequence
  Synthetic oligonucleotide: CTLA4-49
cggaccucaguggcuuugcc

SEQ ID NO: 13584 - RNA, 20 nt, Artificial Sequence
  Synthetic oligonucleotide: CTLA4-299
ccggaccucaguggcuuugc

SEQ ID NO: 13585 - RNA, 20 nt, Artificial Sequence
  Synthetic oligonucleotide: CTLA4-300
gccugccgaagcacugucac

SEQ ID NO: 13586 - RNA, 20 nt, Artificial Sequence
  Synthetic oligonucleotide: CTLA4-301
gucaccuggcugucagccug

SEQ ID NO: 13587 - RNA, 20 nt, Artificial Sequence
  Synthetic oligonucleotide: CTLA4-43
ccgugcagauggaaucaucu

SEQ ID NO: 13588 - RNA, 20 nt, Artificial Sequence
  Synthetic oligonucleotide: CTLA4-303
cccgugcagauggaaucauc

SEQ ID NO: 13589 - RNA, 20 nt, Artificial Sequence
  Synthetic oligonucleotide: CTLA4-42
acuggaggugcccgugcaga

SEQ ID NO: 13590 - RNA, 20 nt, Artificial Sequence
  Synthetic oligonucleotide: CTLA4-305
cacuggaggugcccgugcag

SEQ ID NO: 13591 - RNA, 20 nt, Artificial Sequence
  Synthetic oligonucleotide: CTLA4-40
gagguucacuugauuuccac

SEQ ID NO: 13592 - RNA, 20 nt, Artificial Sequence
  Synthetic oligonucleotide: CTLA4-307
ugagguucacuugauuucca

SEQ ID NO: 13593 - RNA, 20 nt, Artificial Sequence
  Synthetic oligonucleotide: CTLA4-308
uggcccucaguccuuggaua

SEQ ID NO: 13594 - RNA, 20 nt, Artificial Sequence
  Synthetic oligonucleotide: CTLA4-309
guguccauggcccucagucc

SEQ ID NO: 13595 - RNA, 20 nt, Artificial Sequence
  Synthetic oligonucleotide: CTLA4-310
ugagcuccaccuugcagaug

SEQ ID NO: 13596 - RNA, 17 nt, Artificial Sequence
  Synthetic oligonucleotide: CTLA4-142
gcaagccauggcuuuau

SEQ ID NO: 13597 - RNA, 17 nt, Artificial Sequence
  Synthetic oligonucleotide: CTLA4-141
ggcaagccauggcuuua

SEQ ID NO: 13598 - RNA, 17 nt, Artificial Sequence
  Synthetic oligonucleotide: CTLA4-313
aggcaagccauggcuuu

SEQ ID NO: 13599 - RNA, 17 nt, Artificial Sequence
  Synthetic oligonucleotide: CTLA4-314
agcugagccuugugccg

SEQ ID NO: 13600 - RNA, 17 nt, Artificial Sequence
  Synthetic oligonucleotide: CTLA4-315
cugguagccagguucag

SEQ ID NO: 13601 - RNA, 17 nt, Artificial Sequence
  Synthetic oligonucleotide: CTLA4-316
gaaaaaacaggagagug

SEQ ID NO: 13602 - RNA, 17 nt, Artificial Sequence
  Synthetic oligonucleotide: CTLA4-317
aagagaagaaaaaacag

SEQ ID NO: 13603 - RNA, 17 nt, Artificial Sequence
  Synthetic oligonucleotide: CTLA4-133
ugaagagaagaaaaaac

SEQ ID NO: 13604 - RNA, 17 nt, Artificial Sequence
  Synthetic oligonucleotide: CTLA4-319
augaagagaagaaaaaa

SEQ ID NO: 13605 - RNA, 17 nt, Artificial Sequence
  Synthetic oligonucleotide: CTLA4-320
aagacagggaugaagag

SEQ ID NO: 13606 - RNA, 17 nt, Artificial Sequence
  Synthetic oligonucleotide: CTLA4-321
cagaagacagggaugaa

SEQ ID NO: 13607 - RNA, 17 nt, Artificial Sequence
  Synthetic oligonucleotide: CTLA4-322
ugcagaagacagggaug

SEQ ID NO: 13608 - RNA, 17 nt, Artificial Sequence
  Synthetic oligonucleotide: CTLA4-323
cuuugcagaagacaggg

SEQ ID NO: 13609 - RNA, 17 nt, Artificial Sequence
  Synthetic oligonucleotide: CTLA4-131
ucaccuuugcagaagac

SEQ ID NO: 13610 - RNA, 17 nt, Artificial Sequence
  Synthetic oligonucleotide: CTLA4-325
cucaccuuugcagaaga

SEQ ID NO: 13611 - RNA, 17 nt, Artificial Sequence
  Synthetic oligonucleotide: CTLA4-326
agucucacucaccuuug

SEQ ID NO: 13612 - RNA, 17 nt, Artificial Sequence
  Synthetic oligonucleotide: CTLA4-130
agcauggaaaagccaaa

SEQ ID NO: 13613 - RNA, 17 nt, Artificial Sequence
  Synthetic oligonucleotide: CTLA4-129
uagcauggaaaagccaa

SEQ ID NO: 13614 - RNA, 17 nt, Artificial Sequence
  Synthetic oligonucleotide: CTLA4-329
cuagcauggaaaagcca

SEQ ID NO: 13615 - RNA, 17 nt, Artificial Sequence
  Synthetic oligonucleotide: CTLA4-128
cacgugcauugcuagca

SEQ ID NO: 13616 - RNA, 17 nt, Artificial Sequence
  Synthetic oligonucleotide: CTLA4-331
ccacgugcauugcuagc

SEQ ID NO: 13617 - RNA, 17 nt, Artificial Sequence
  Synthetic oligonucleotide: CTLA4-332
gccaguaccacagcagg

SEQ ID NO: 13618 - RNA, 17 nt, Artificial Sequence
  Synthetic oligonucleotide: CTLA4-121
accucaguggcuuugcc

SEQ ID NO: 13619 - RNA, 17 nt, Artificial Sequence
  Synthetic oligonucleotide: CTLA4-334
gaccucaguggcuuugc

SEQ ID NO: 13620 - RNA, 17 nt, Artificial Sequence
  Synthetic oligonucleotide: CTLA4-335
ugccgaagcacugucac

SEQ ID NO: 13621 - RNA, 17 nt, Artificial Sequence
  Synthetic oligonucleotide: CTLA4-336
accuggcugucagccug

SEQ ID NO: 13622 - RNA, 17 nt, Artificial Sequence
  Synthetic oligonucleotide: CTLA4-115
ugcagauggaaucaucu

SEQ ID NO: 13623 - RNA, 17 nt, Artificial Sequence
  Synthetic oligonucleotide: CTLA4-338
gugcagauggaaucauc

SEQ ID NO: 13624 - RNA, 17 nt, Artificial Sequence
  Synthetic oligonucleotide: CTLA4-114
ggaggugcccgugcaga

SEQ ID NO: 13625 - RNA, 17 nt, Artificial Sequence
  Synthetic oligonucleotide: CTLA4-340
uggaggugcccgugcag

SEQ ID NO: 13626 - RNA, 17 nt, Artificial Sequence
  Synthetic oligonucleotide: CTLA4-112
guucacuugauuuccac

SEQ ID NO: 13627 - RNA, 17 nt, Artificial Sequence
  Synthetic oligonucleotide: CTLA4-342
gguucacuugauuucca

SEQ ID NO: 13628 - RNA, 17 nt, Artificial Sequence
  Synthetic oligonucleotide: CTLA4-343
cccucaguccuuggaua

SEQ ID NO: 13629 - RNA, 17 nt, Artificial Sequence
  Synthetic oligonucleotide: CTLA4-344
uccauggcccucagucc

SEQ ID NO: 13630 - RNA, 17 nt, Artificial Sequence
  Synthetic oligonucleotide: CTLA4-345
gcuccaccuugcagaug

SEQ ID NO: 13631 - RNA, 20 nt, Artificial Sequence
  Synthetic oligonucleotide: CTLA4-346
auacuaccugggcauaggca

SEQ ID NO: 13632 - RNA, 20 nt, Artificial Sequence
  Synthetic oligonucleotide: CTLA4-145
uacuaccugggcauaggcaa

SEQ ID NO: 13633 - RNA, 20 nt, Artificial Sequence
  Synthetic oligonucleotide: CTLA4-348
aacccagauuuauguaauug

SEQ ID NO: 13634 - RNA, 20 nt, Artificial Sequence
  Synthetic oligonucleotide: CTLA4-349
uggugagcaaagccauuuca

SEQ ID NO: 13635 - RNA, 20 nt, Artificial Sequence
  Synthetic oligonucleotide: CTLA4-350
uuuguuuucuguugcagauc

SEQ ID NO: 13636 - RNA, 20 nt, Artificial Sequence
  Synthetic oligonucleotide: CTLA4-351
ccagauucugacuuccuccu

SEQ ID NO: 13637 - RNA, 20 nt, Artificial Sequence
  Synthetic oligonucleotide: CTLA4-352
ggauccuugcagcaguuagu

SEQ ID NO: 13638 - RNA, 20 nt, Artificial Sequence
  Synthetic oligonucleotide: CTLA4-148
gauccuugcagcaguuaguu

SEQ ID NO: 13639 - RNA, 20 nt, Artificial Sequence
  Synthetic oligonucleotide: CTLA4-354
uucuccucacagcuguuucu

SEQ ID NO: 13640 - RNA, 20 nt, Artificial Sequence
  Synthetic oligonucleotide: CTLA4-355
cuguuucuuugagcaaaaug

SEQ ID NO: 13641 - RNA, 20 nt, Artificial Sequence
  Synthetic oligonucleotide: CTLA4-356
cuuuuuguguuugacagcua

SEQ ID NO: 13642 - RNA, 20 nt, Artificial Sequence
  Synthetic oligonucleotide: CTLA4-357
uguguuugacagcuaaagaa

SEQ ID NO: 13643 - RNA, 20 nt, Artificial Sequence
  Synthetic oligonucleotide: CTLA4-358
gaaaagaagcccucuuacaa

SEQ ID NO: 13644 - RNA, 20 nt, Artificial Sequence
  Synthetic oligonucleotide: CTLA4-154
aaaagaagcccucuuacaac

SEQ ID NO: 13645 - RNA, 20 nt, Artificial Sequence
  Synthetic oligonucleotide: CTLA4-360
cucuuacaacaggggucuau

SEQ ID NO: 13646 - RNA, 20 nt, Artificial Sequence
  Synthetic oligonucleotide: CTLA4-361
cuaugugaaaaugcccccaa

SEQ ID NO: 13647 - RNA, 20 nt, Artificial Sequence
  Synthetic oligonucleotide: CTLA4-362
gaaaaugcccccaacagagc

SEQ ID NO: 13648 - RNA, 20 nt, Artificial Sequence
  Synthetic oligonucleotide: CTLA4-363
gcccccaacagagccagaau

SEQ ID NO: 13649 - RNA, 20 nt, Artificial Sequence
  Synthetic oligonucleotide: CTLA4-364
ccuuauuuuauucccaucaa

SEQ ID NO: 13650 - RNA, 20 nt, Artificial Sequence
  Synthetic oligonucleotide: CTLA4-365
uuauuuuauucccaucaauu

SEQ ID NO: 13651 - RNA, 20 nt, Artificial Sequence
  Synthetic oligonucleotide: CTLA4-366
ccaucaauugagaaaccauu

SEQ ID NO: 13652 - RNA, 20 nt, Artificial Sequence
  Synthetic oligonucleotide: CTLA4-367
ucaauugagaaaccauuaug

SEQ ID NO: 13653 - RNA, 20 nt, Artificial Sequence
  Synthetic oligonucleotide: CTLA4-368
auugagaaaccauuaugaag

SEQ ID NO: 13654 - RNA, 20 nt, Artificial Sequence
  Synthetic oligonucleotide: CTLA4-369
ugagaaaccauuaugaagaa

SEQ ID NO: 13655 - RNA, 17 nt, Artificial Sequence
  Synthetic oligonucleotide: CTLA4-370
cuaccugggcauaggca

SEQ ID NO: 13656 - RNA, 17 nt, Artificial Sequence
  Synthetic oligonucleotide: CTLA4-157
uaccugggcauaggcaa

SEQ ID NO: 13657 - RNA, 17 nt, Artificial Sequence
  Synthetic oligonucleotide: CTLA4-372
ccagauuuauguaauug

SEQ ID NO: 13658 - RNA, 17 nt, Artificial Sequence
  Synthetic oligonucleotide: CTLA4-373
ugagcaaagccauuuca

SEQ ID NO: 13659 - RNA, 17 nt, Artificial Sequence
  Synthetic oligonucleotide: CTLA4-374
guuuucuguugcagauc

SEQ ID NO: 13660 - RNA, 17 nt, Artificial Sequence
  Synthetic oligonucleotide: CTLA4-375
gauucugacuuccuccu

SEQ ID NO: 13661 - RNA, 17 nt, Artificial Sequence
  Synthetic oligonucleotide: CTLA4-376
uccuugcagcaguuagu

SEQ ID NO: 13662 - RNA, 17 nt, Artificial Sequence
  Synthetic oligonucleotide: CTLA4-160
ccuugcagcaguuaguu

SEQ ID NO: 13663 - RNA, 17 nt, Artificial Sequence
  Synthetic oligonucleotide: CTLA4-378
uccucacagcuguuucu

SEQ ID NO: 13664 - RNA, 17 nt, Artificial Sequence
  Synthetic oligonucleotide: CTLA4-379
uuucuuugagcaaaaug

SEQ ID NO: 13665 - RNA, 17 nt, Artificial Sequence
  Synthetic oligonucleotide: CTLA4-380
uuuguguuugacagcua

SEQ ID NO: 13666 - RNA, 17 nt, Artificial Sequence
  Synthetic oligonucleotide: CTLA4-381
guuugacagcuaaagaa

SEQ ID NO: 13667 - RNA, 17 nt, Artificial Sequence
  Synthetic oligonucleotide: CTLA4-382
aagaagcccucuuacaa

SEQ ID NO: 13668 - RNA, 17 nt, Artificial Sequence
  Synthetic oligonucleotide: CTLA4-166
agaagcccucuuacaac

SEQ ID NO: 13669 - RNA, 17 nt, Artificial Sequence
  Synthetic oligonucleotide: CTLA4-384
uuacaacaggggucuau

SEQ ID NO: 13670 - RNA, 17 nt, Artificial Sequence
  Synthetic oligonucleotide: CTLA4-385
ugugaaaaugcccccaa

SEQ ID NO: 13671 - RNA, 17 nt, Artificial Sequence
  Synthetic oligonucleotide: CTLA4-386
aaugcccccaacagagc

SEQ ID NO: 13672 - RNA, 17 nt, Artificial Sequence
  Synthetic oligonucleotide: CTLA4-387
cccaacagagccagaau

SEQ ID NO: 13673 - RNA, 17 nt, Artificial Sequence
  Synthetic oligonucleotide: CTLA4-388
uauuuuauucccaucaa

SEQ ID NO: 13674 - RNA, 17 nt, Artificial Sequence
  Synthetic oligonucleotide: CTLA4-389
uuuuauucccaucaauu

SEQ ID NO: 13675 - RNA, 17 nt, Artificial Sequence
  Synthetic oligonucleotide: CTLA4-390
ucaauugagaaaccauu

SEQ ID NO: 13676 - RNA, 17 nt, Artificial Sequence
  Synthetic oligonucleotide: CTLA4-391
auugagaaaccauuaug

SEQ ID NO: 13677 - RNA, 17 nt, Artificial Sequence
  Synthetic oligonucleotide: CTLA4-392
gagaaaccauuaugaag

SEQ ID NO: 13678 - RNA, 17 nt, Artificial Sequence
  Synthetic oligonucleotide: CTLA4-393
gaaaccauuaugaagaa

SEQ ID NO: 13679 - RNA, 20 nt, Artificial Sequence
  Synthetic oligonucleotide: CTLA4-394
ugcucaccaauuacauaaau

SEQ ID NO: 13680 - RNA, 20 nt, Artificial Sequence
  Synthetic oligonucleotide: CTLA4-395
aucugcaacagaaaacaaag

SEQ ID NO: 13681 - RNA, 20 nt, Artificial Sequence
  Synthetic oligonucleotide: CTLA4-396
gcacgguucuggaucugcaa

SEQ ID NO: 13682 - RNA, 20 nt, Artificial Sequence
  Synthetic oligonucleotide: CTLA4-397
gucagaaucugggcacgguu

SEQ ID NO: 13683 - RNA, 20 nt, Artificial Sequence
  Synthetic oligonucleotide: CTLA4-398
ccagaggaggaagucagaau

SEQ ID NO: 13684 - RNA, 20 nt, Artificial Sequence
  Synthetic oligonucleotide: CTLA4-399
aaggauccagaggaggaagu

SEQ ID NO: 13685 - RNA, 20 nt, Artificial Sequence
  Synthetic oligonucleotide: CTLA4-177
cugcugcaaggauccagagg

SEQ ID NO: 13686 - RNA, 20 nt, Artificial Sequence
  Synthetic oligonucleotide: CTLA4-401
acugcugcaaggauccagag

SEQ ID NO: 13687 - RNA, 20 nt, Artificial Sequence
  Synthetic oligonucleotide: CTLA4-178
uaacugcugcaaggauccag

SEQ ID NO: 13688 - RNA, 20 nt, Artificial Sequence
  Synthetic oligonucleotide: CTLA4-403
cuaacugcugcaaggaucca

SEQ ID NO: 13689 - RNA, 20 nt, Artificial Sequence
  Synthetic oligonucleotide: CTLA4-404
aacuaacugcugcaaggauc

SEQ ID NO: 13690 - RNA, 20 nt, Artificial Sequence
  Synthetic oligonucleotide: CTLA4-405
aaccccgaacuaacugcugc

SEQ ID NO: 13691 - RNA, 20 nt, Artificial Sequence
  Synthetic oligonucleotide: CTLA4-406
aaagcuauaaaaaaacaacc

SEQ ID NO: 13692 - RNA, 20 nt, Artificial Sequence
  Synthetic oligonucleotide: CTLA4-407
cucaaagaaacagcugugag

SEQ ID NO: 13693 - RNA, 20 nt, Artificial Sequence
  Synthetic oligonucleotide: CTLA4-180
ugcucaaagaaacagcugug

SEQ ID NO: 13694 - RNA, 20 nt, Artificial Sequence
  Synthetic oligonucleotide: CTLA4-409
uugcucaaagaaacagcugu

SEQ ID NO: 13695 - RNA, 20 nt, Artificial Sequence
  Synthetic oligonucleotide: CTLA4-410
uuuugcucaaagaaacagcu

SEQ ID NO: 13696 - RNA, 20 nt, Artificial Sequence
  Synthetic oligonucleotide: CTLA4-411
cacacucaccauuuugcuca

SEQ ID NO: 13697 - RNA, 20 nt, Artificial Sequence
  Synthetic oligonucleotide: CTLA4-412
cuuuagcugucaaacacaaa

SEQ ID NO: 13698 - RNA, 20 nt, Artificial Sequence
  Synthetic oligonucleotide: CTLA4-413
cacauagaccccuguuguaa

SEQ ID NO: 13699 - RNA, 20 nt, Artificial Sequence
  Synthetic oligonucleotide: CTLA4-414
uucacauagaccccuguugu

SEQ ID NO: 13700 - RNA, 20 nt, Artificial Sequence
  Synthetic oligonucleotide: CTLA4-185
uuucacauucuggcucuguu

SEQ ID NO: 13701 - RNA, 20 nt, Artificial Sequence
  Synthetic oligonucleotide: CTLA4-186
uuuucacauucuggcucugu

SEQ ID NO: 13702 - RNA, 20 nt, Artificial Sequence
  Synthetic oligonucleotide: CTLA4-417
cuuuucacauucuggcucug

SEQ ID NO: 13703 - RNA, 20 nt, Artificial Sequence
  Synthetic oligonucleotide: CTLA4-418
uugaugggaauaaaauaagg

SEQ ID NO: 13704 - RNA, 20 nt, Artificial Sequence
  Synthetic oligonucleotide: CTLA4-189
auaaugguuucucaauugau

SEQ ID NO: 13705 - RNA, 20 nt, Artificial Sequence
  Synthetic oligonucleotide: CTLA4-190
cauaaugguuucucaauuga

SEQ ID NO: 13706 - RNA, 20 nt, Artificial Sequence
  Synthetic oligonucleotide: CTLA4-421
ucauaaugguuucucaauug

SEQ ID NO: 13707 - RNA, 20 nt, Artificial Sequence
  Synthetic oligonucleotide: CTLA4-421
ucauaaugguuucucaauug

SEQ ID NO: 13708 - RNA, 17 nt, Artificial Sequence
  Synthetic oligonucleotide: CTLA4-423
ucaccaauuacauaaau

SEQ ID NO: 13709 - RNA, 17 nt, Artificial Sequence
  Synthetic oligonucleotide: CTLA4-424
ugcaacagaaaacaaag

SEQ ID NO: 13710 - RNA, 17 nt, Artificial Sequence
  Synthetic oligonucleotide: CTLA4-425
cgguucuggaucugcaa

SEQ ID NO: 13711 - RNA, 17 nt, Artificial Sequence
  Synthetic oligonucleotide: CTLA4-426
agaaucugggcacgguu

SEQ ID NO: 13712 - RNA, 17 nt, Artificial Sequence
  Synthetic oligonucleotide: CTLA4-427
gaggaggaagucagaau

SEQ ID NO: 13713 - RNA, 17 nt, Artificial Sequence
  Synthetic oligonucleotide: CTLA4-428
gauccagaggaggaagu

SEQ ID NO: 13714 - RNA, 17 nt, Artificial Sequence
  Synthetic oligonucleotide: CTLA4-201
cugcaaggauccagagg

SEQ ID NO: 13715 - RNA, 17 nt, Artificial Sequence
  Synthetic oligonucleotide: CTLA4-430
gcugcaaggauccagag

SEQ ID NO: 13716 - RNA, 17 nt, Artificial Sequence
  Synthetic oligonucleotide: CTLA4-202
cugcugcaaggauccag

SEQ ID NO: 13717 - RNA, 17 nt, Artificial Sequence
  Synthetic oligonucleotide: CTLA4-432
acugcugcaaggaucca

SEQ ID NO: 13718 - RNA, 17 nt, Artificial Sequence
  Synthetic oligonucleotide: CTLA4-433
uaacugcugcaaggauc

SEQ ID NO: 13719 - RNA, 17 nt, Artificial Sequence
  Synthetic oligonucleotide: CTLA4-434
cccgaacuaacugcugc

SEQ ID NO: 13720 - RNA, 17 nt, Artificial Sequence
  Synthetic oligonucleotide: CTLA4-435
gcuauaaaaaaacaacc

SEQ ID NO: 13721 - RNA, 17 nt, Artificial Sequence
  Synthetic oligonucleotide: CTLA4-436
aaagaaacagcugugag

SEQ ID NO: 13722 - RNA, 17 nt, Artificial Sequence
  Synthetic oligonucleotide: CTLA4-204
ucaaagaaacagcugug

SEQ ID NO: 13723 - RNA, 17 nt, Artificial Sequence
  Synthetic oligonucleotide: CTLA4-438
cucaaagaaacagcugu

SEQ ID NO: 13724 - RNA, 17 nt, Artificial Sequence
  Synthetic oligonucleotide: CTLA4-439
ugcucaaagaaacagcu

SEQ ID NO: 13725 - RNA, 17 nt, Artificial Sequence
  Synthetic oligonucleotide: CTLA4-440
acucaccauuuugcuca

SEQ ID NO: 13726 - RNA, 17 nt, Artificial Sequence
  Synthetic oligonucleotide: CTLA4-441
uagcugucaaacacaaa

SEQ ID NO: 13727 - RNA, 17 nt, Artificial Sequence
  Synthetic oligonucleotide: CTLA4-442
auagaccccuguuguaa

SEQ ID NO: 13728 - RNA, 17 nt, Artificial Sequence
  Synthetic oligonucleotide: CTLA4-443
acauagaccccuguugu

SEQ ID NO: 13729 - RNA, 17 nt, Artificial Sequence
  Synthetic oligonucleotide: CTLA4-209
cacauucuggcucuguu

SEQ ID NO: 13730 - RNA, 17 nt, Artificial Sequence
  Synthetic oligonucleotide: CTLA4-210
ucacauucuggcucugu

SEQ ID NO: 13731 - RNA, 17 nt, Artificial Sequence
  Synthetic oligonucleotide: CTLA4-446
uucacauucuggcucug

SEQ ID NO: 13732 - RNA, 17 nt, Artificial Sequence
  Synthetic oligonucleotide: CTLA4-447
augggaauaaaauaagg

SEQ ID NO: 13733 - RNA, 17 nt, Artificial Sequence
  Synthetic oligonucleotide: CTLA4-213
augguuucucaauugau

SEQ ID NO: 13734 - RNA, 17 nt, Artificial Sequence
  Synthetic oligonucleotide: CTLA4-214
aaugguuucucaauuga

SEQ ID NO: 13735 - RNA, 17 nt, Artificial Sequence
  Synthetic oligonucleotide: CTLA4-450
uaaugguuucucaauug

SEQ ID NO: 13736 - RNA, 20 nt, Artificial Sequence
  Synthetic oligonucleotide: CTLA4-1370
cccauaaagccauggcuugc

SEQ ID NO: 13737 - RNA, 20 nt, Artificial Sequence
  Synthetic oligonucleotide: CTLA4-451
gggaaugaguugaccuuccu

SEQ ID NO: 13738 - RNA, 17 nt, Artificial Sequence
  Synthetic oligonucleotide: CTLA4-452
auaaagccauggcuugc

SEQ ID NO: 13739 - RNA, 17 nt, Artificial Sequence
  Synthetic oligonucleotide: CTLA4-453
aaugaguugaccuuccu

SEQ ID NO: 13740 - RNA, 20 nt, Artificial Sequence
  Synthetic oligonucleotide: CTLA4-454
guccuuggauagugagguuc

SEQ ID NO: 13741 - RNA, 17 nt, Artificial Sequence
  Synthetic oligonucleotide: CTLA4-455
cuuggauagugagguuc

SEQ ID NO: 13742 - RNA, 20 nt, Artificial Sequence
  Synthetic oligonucleotide: CTLA4-456
ccugggcauaggcaacggaa

SEQ ID NO: 13743 - RNA, 20 nt, Artificial Sequence
  Synthetic oligonucleotide: CTLA4-457
guugcagauccagaaccgug

SEQ ID NO: 13744 - RNA, 17 nt, Artificial Sequence
  Synthetic oligonucleotide: CTLA4-458
gggcauaggcaacggaa

SEQ ID NO: 13745 - RNA, 17 nt, Artificial Sequence
  Synthetic oligonucleotide: CTLA4-459
gcagauccagaaccgug

SEQ ID NO: 13746 - RNA, 17 nt, Artificial Sequence
  Synthetic oligonucleotide: CTLA4-622
gcucagaacagagcgcc

SEQ ID NO: 13747 - RNA, 20 nt, Artificial Sequence
  Synthetic oligonucleotide: CTLA4-513
gagcgccagguauuuaguag

SEQ ID NO: 13748 - RNA, 17 nt, Artificial Sequence
  Synthetic oligonucleotide: CTLA4-624
gcgccagguauuuagua

SEQ ID NO: 13749 - RNA, 20 nt, Artificial Sequence
  Synthetic oligonucleotide: CTLA4-72
gcuuuaugggagcgguguuc

SEQ ID NO: 13750 - RNA, 20 nt, Artificial Sequence
  Synthetic oligonucleotide: CTLA4-548
ggagcgguguucaggucuuc

SEQ ID NO: 13751 - RNA, 17 nt, Artificial Sequence
  Synthetic oligonucleotide: CTLA4-660
gcgguguucaggucuuc

SEQ ID NO: 13752 - RNA, 17 nt, Artificial Sequence
  Synthetic oligonucleotide: CTLA4-144
uuaugggagcgguguuc

SEQ ID NO: 13753 - RNA, 20 nt, Artificial Sequence
  Synthetic oligonucleotide: CTLA4-475
cgacguaacagcuaaaccca

SEQ ID NO: 13754 - RNA, 17 nt, Artificial Sequence
  Synthetic oligonucleotide: CTLA4-587
cguaacagcuaaaccca

SEQ ID NO: 13755 - RNA, 20 nt, Artificial Sequence
  Synthetic oligonucleotide: CTLA4-1
acaccgcucccauaaagcca

SEQ ID NO: 13756 - RNA, 17 nt, Artificial Sequence
  Synthetic oligonucleotide: CTLA4-73
ccgcucccauaaagcca

SEQ ID NO: 13757 - RNA, 20 nt, Artificial Sequence
  Synthetic oligonucleotide: CTLA4-4
ccuuggauuucagcggcaca

SEQ ID NO: 13758 - RNA, 17 nt, Artificial Sequence
  Synthetic oligonucleotide: CTLA4-76
uggauuucagcggcaca

SEQ ID NO: 13759 - RNA, 20 nt, Artificial Sequence
  Synthetic oligonucleotide: CTLA4-7
ugaaccuggcuaccaggacc

SEQ ID NO: 13760 - RNA, 17 nt, Artificial Sequence
  Synthetic oligonucleotide: CTLA4-79
accuggcuaccaggacc

SEQ ID NO: 13761 - RNA, 20 nt, Artificial Sequence
  Synthetic oligonucleotide: CTLA4-501
aaacuccaaucuggcuuggc

SEQ ID NO: 13762 - RNA, 17 nt, Artificial Sequence
  Synthetic oligonucleotide: CTLA4-613
cuccaaucuggcuuggc

SEQ ID NO: 13763 - RNA, 20 nt, Artificial Sequence
  Synthetic oligonucleotide: CTLA4-509
caguugggcggcagcaaaua

SEQ ID NO: 13764 - RNA, 20 nt, Artificial Sequence
  Synthetic oligonucleotide: CTLA4-510
auagcucagaacagagcgcc

SEQ ID NO: 13765 - RNA, 17 nt, Artificial Sequence
  Synthetic oligonucleotide: CTLA4-621
uugggcggcagcaaaua

SEQ ID NO: 13766 - RNA, 20 nt, Artificial Sequence
  Synthetic oligonucleotide: CTLA4-512
agagcgccagguauuuagua

SEQ ID NO: 13767 - RNA, 17 nt, Artificial Sequence
  Synthetic oligonucleotide: CTLA4-625
cgccagguauuuaguag

SEQ ID NO: 13768 - RNA, 20 nt, Artificial Sequence
  Synthetic oligonucleotide: CTLA4-67
ccuugugccgcugaaaucca

SEQ ID NO: 13769 - RNA, 17 nt, Artificial Sequence
  Synthetic oligonucleotide: CTLA4-139
ugugccgcugaaaucca

SEQ ID NO: 13770 - RNA, 20 nt, Artificial Sequence
  Synthetic oligonucleotide: CTLA4-555
uuuacgagaaaggaagccgu

SEQ ID NO: 13771 - RNA, 17 nt, Artificial Sequence
  Synthetic oligonucleotide: CTLA4-667
acgagaaaggaagccgu

SEQ ID NO: 13772 - RNA, 20 nt, Artificial Sequence
  Synthetic oligonucleotide: CTLA4-533
gaaacaaaugaaacccaggu

SEQ ID NO: 13773 - RNA, 20 nt, Artificial Sequence
  Synthetic oligonucleotide: CTLA4-556
gaacaaaacaagccaaucca

SEQ ID NO: 13774 - RNA, 17 nt, Artificial Sequence
  Synthetic oligonucleotide: CTLA4-662
gaacccacacagaauca

SEQ ID NO: 13775 - RNA, 17 nt, Artificial Sequence
  Synthetic oligonucleotide: CTLA4-580
gaagauugaauaaaauu

SEQ ID NO: 13776 - RNA, 20 nt, Artificial Sequence
  Synthetic oligonucleotide: CTLA4-558
gaagcuucauguucacuuug

SEQ ID NO: 13777 - RNA, 20 nt, Artificial Sequence
  Synthetic oligonucleotide: CTLA4-549
gaaguagagcaaaaccuuuc

SEQ ID NO: 13778 - RNA, 17 nt, Artificial Sequence
  Synthetic oligonucleotide: CTLA4-581
gaauaaaauugggauuu

SEQ ID NO: 13779 - RNA, 20 nt, Artificial Sequence
  Synthetic oligonucleotide: CTLA4-470
gaauaaaauugggauuuagg

SEQ ID NO: 13780 - RNA, 17 nt, Artificial Sequence
  Synthetic oligonucleotide: CTLA4-675
gaauuuccuggaguaca

SEQ ID NO: 13781 - RNA, 20 nt, Artificial Sequence
  Synthetic oligonucleotide: CTLA4-564
gagaauuuccuggaguacaa

SEQ ID NO: 13782 - RNA, 20 nt, Artificial Sequence
  Synthetic oligonucleotide: CTLA4-517
gagacuggaagugauuuaag

SEQ ID NO: 13783 - RNA, 20 nt, Artificial Sequence
  Synthetic oligonucleotide: CTLA4-65
gagagugcagggccaggucc

SEQ ID NO: 13784 - RNA, 17 nt, Artificial Sequence
  Synthetic oligonucleotide: CTLA4-606
gagcaugaagauggagg

SEQ ID NO: 13785 - RNA, 17 nt, Artificial Sequence
  Synthetic oligonucleotide: CTLA4-583
gaggacccuuguacucc

SEQ ID NO: 13786 - RNA, 20 nt, Artificial Sequence
  Synthetic oligonucleotide: CTLA4-495
gaggagguguuucuccuacc

SEQ ID NO: 13787 - RNA, 17 nt, Artificial Sequence
  Synthetic oligonucleotide: CTLA4-607
gagguguuucuccuacc

SEQ ID NO: 13788 - RNA, 20 nt, Artificial Sequence
  Synthetic oligonucleotide: CTLA4-463
gaguugucaaugaaaugaau

SEQ ID NO: 13789 - RNA, 17 nt, Artificial Sequence
  Synthetic oligonucleotide: CTLA4-610
gcaaagccagaaguuaa

SEQ ID NO: 13790 - RNA, 20 nt, Artificial Sequence
  Synthetic oligonucleotide: CTLA4-9
gcaaaggugagugagacuuu

SEQ ID NO: 13791 - RNA, 17 nt, Artificial Sequence
  Synthetic oligonucleotide: CTLA4-142
gcaagccauggcuuuau

SEQ ID NO: 13792 - RNA, 20 nt, Artificial Sequence
  Synthetic oligonucleotide: CTLA4-5
gcacaaggcucagcugaacc

SEQ ID NO: 13793 - RNA, 20 nt, Artificial Sequence
  Synthetic oligonucleotide: CTLA4-477
gcacauguguaauacauauc

SEQ ID NO: 13794 - RNA, 17 nt, Artificial Sequence
  Synthetic oligonucleotide: CTLA4-619
gccagcagggagcaguu

SEQ ID NO: 13795 - RNA, 20 nt, Artificial Sequence
  Synthetic oligonucleotide: CTLA4-508
gccagcagggagcaguuggg

SEQ ID NO: 13796 - RNA, 17 nt, Artificial Sequence
  Synthetic oligonucleotide: CTLA4-138
gccagguccugguagcc

SEQ ID NO: 13797 - RNA, 17 nt, Artificial Sequence
  Synthetic oligonucleotide: CTLA4-640
gcccaacugcucccugc

SEQ ID NO: 13798 - RNA, 17 nt, Artificial Sequence
  Synthetic oligonucleotide: CTLA4-683
gcccuugggcuaauggc

SEQ ID NO: 13799 - RNA, 20 nt, Artificial Sequence
  Synthetic oligonucleotide: CTLA4-528
gccgcccaacugcucccugc

SEQ ID NO: 13800 - RNA, 17 nt, Artificial Sequence
  Synthetic oligonucleotide: CTLA4-615
gcuggcucuguauucca

SEQ ID NO: 13801 - RNA, 17 nt, Artificial Sequence
  Synthetic oligonucleotide: CTLA4-670
gcuucauguucacuuug

SEQ ID NO: 13802 - RNA, 20 nt, Artificial Sequence
  Synthetic oligonucleotide: CTLA4-519
ggaagugauuuaagagggaa

SEQ ID NO: 13803 - RNA, 20 nt, Artificial Sequence
  Synthetic oligonucleotide: CTLA4-563
ggagaauuuccuggaguaca

SEQ ID NO: 13804 - RNA, 20 nt, Artificial Sequence
  Synthetic oligonucleotide: CTLA4-531
ggaguuuuaccuuuaacuuc

SEQ ID NO: 13805 - RNA, 17 nt, Artificial Sequence
  Synthetic oligonucleotide: CTLA4-672
ggaucuggauaacuaag

SEQ ID NO: 13806 - RNA, 20 nt, Artificial Sequence
  Synthetic oligonucleotide: CTLA4-61
ggaugaagagaagaaaaaac

SEQ ID NO: 13807 - RNA, 17 nt, Artificial Sequence
  Synthetic oligonucleotide: CTLA4-141
ggcaagccauggcuuua

SEQ ID NO: 13808 - RNA, 17 nt, Artificial Sequence
  Synthetic oligonucleotide: CTLA4-618
ggccagcagggagcagu

SEQ ID NO: 13809 - RNA, 17 nt, Artificial Sequence
  Synthetic oligonucleotide: CTLA4-614
ggcuggcucuguauucc

SEQ ID NO: 13810 - RNA, 20 nt, Artificial Sequence
  Synthetic oligonucleotide: CTLA4-500
gguaaaacuccaaucuggcu

SEQ ID NO: 13811 - RNA, 17 nt, Artificial Sequence
  Synthetic oligonucleotide: CTLA4-588
guaaaaccaaaacaaaa

SEQ ID NO: 13812 - RNA, 17 nt, Artificial Sequence
  Synthetic oligonucleotide: CTLA4-661
guagagcaaaaccuuuc

SEQ ID NO: 13813 - RNA, 17 nt, Artificial Sequence
  Synthetic oligonucleotide: CTLA4-617
guauuccagggccagca

SEQ ID NO: 13814 - RNA, 20 nt, Artificial Sequence
  Synthetic oligonucleotide: CTLA4-464
gucaaugaaaugaauuggac

SEQ ID NO: 13815 - RNA, 20 nt, Artificial Sequence
  Synthetic oligonucleotide: CTLA4-521
guccugaauacauuugagcu

SEQ ID NO: 13816 - RNA, 17 nt, Artificial Sequence
  Synthetic oligonucleotide: CTLA4-586
guucaguugagugcuug

SEQ ID NO: 13817 - RNA, 17 nt, Artificial Sequence
  Synthetic oligonucleotide: CTLA4-627
guuuaguagagagacac

SEQ ID NO: 13818 - RNA, 17 nt, Artificial Sequence
  Synthetic oligonucleotide: CTLA4-643
guuuuaccuuuaacuuc

SEQ ID NO: 13819 - RNA, 17 nt, Artificial Sequence
  Synthetic oligonucleotide: CTLA4-134
aaaaaacaggagagugc

SEQ ID NO: 13820 - RNA, 17 nt, Artificial Sequence
  Synthetic oligonucleotide: CTLA4-135
aaaaacaggagagugca

SEQ ID NO: 13821 - RNA, 20 nt, Artificial Sequence
  Synthetic oligonucleotide: CTLA4-557
aaaacaagccaauccaugga

SEQ ID NO: 13822 - RNA, 17 nt, Artificial Sequence
  Synthetic oligonucleotide: CTLA4-612
aaaacuccaaucuggcu

SEQ ID NO: 13823 - RNA, 20 nt, Artificial Sequence
  Synthetic oligonucleotide: CTLA4-64
aaacaggagagugcagggcc

SEQ ID NO: 13824 - RNA, 17 nt, Artificial Sequence
  Synthetic oligonucleotide: CTLA4-74
aaagccauggcuugccu

SEQ ID NO: 13825 - RNA, 17 nt, Artificial Sequence
  Synthetic oligonucleotide: CTLA4-140
aaauccaaggcaagcca

SEQ ID NO: 13826 - RNA, 20 nt, Artificial Sequence
  Synthetic oligonucleotide: CTLA4-461
aaauccugccauuagcccaa

SEQ ID NO: 13827 - RNA, 17 nt, Artificial Sequence
  Synthetic oligonucleotide: CTLA4-577
aaaugaauuggacugga

SEQ ID NO: 13828 - RNA, 17 nt, Artificial Sequence
  Synthetic oligonucleotide: CTLA4-636
aaauguauucaggacua

SEQ ID NO: 13829 - RNA, 20 nt, Artificial Sequence
  Synthetic oligonucleotide: CTLA4-523
aacccagcucaaauguauuc

SEQ ID NO: 13830 - RNA, 20 nt, Artificial Sequence
  Synthetic oligonucleotide: CTLA4-62
aagaaaaaacaggagagugc

SEQ ID NO: 13831 - RNA, 20 nt, Artificial Sequence
  Synthetic oligonucleotide: CTLA4-71
aagccauggcuuuaugggag

SEQ ID NO: 13832 - RNA, 20 nt, Artificial Sequence
  Synthetic oligonucleotide: CTLA4-70
aaggcaagccauggcuuuau

SEQ ID NO: 13833 - RNA, 17 nt, Artificial Sequence
  Synthetic oligonucleotide: CTLA4-611
aagguaaaacuccaauc

SEQ ID NO: 13834 - RNA, 17 nt, Artificial Sequence
  Synthetic oligonucleotide: CTLA4-81
aaggugagugagacuuu

SEQ ID NO: 13835 - RNA, 17 nt, Artificial Sequence
  Synthetic oligonucleotide: CTLA4-591
aaguccuugauucugug

SEQ ID NO: 13836 - RNA, 17 nt, Artificial Sequence
  Synthetic oligonucleotide: CTLA4-584
aauacauuuuccaucca

SEQ ID NO: 13837 - RNA, 20 nt, Artificial Sequence
  Synthetic oligonucleotide: CTLA4-552
aauagaaagccuuuuuguuu

SEQ ID NO: 13838 - RNA, 17 nt, Artificial Sequence
  Synthetic oligonucleotide: CTLA4-576
aaugaaaugaauuggac

SEQ ID NO: 13839 - RNA, 17 nt, Artificial Sequence
  Synthetic oligonucleotide: CTLA4-676
aauuuccuggaguacaa

SEQ ID NO: 13840 - RNA, 17 nt, Artificial Sequence
  Synthetic oligonucleotide: CTLA4-677
aauuuuauucaaucuuc

SEQ ID NO: 13841 - RNA, 17 nt, Artificial Sequence
  Synthetic oligonucleotide: CTLA4-645
acaaaugaaacccaggu

SEQ ID NO: 13842 - RNA, 17 nt, Artificial Sequence
  Synthetic oligonucleotide: CTLA4-679
acaacuccaaaacuacu

SEQ ID NO: 13843 - RNA, 17 nt, Artificial Sequence
  Synthetic oligonucleotide: CTLA4-669
acaagccaauccaugga

SEQ ID NO: 13844 - RNA, 17 nt, Artificial Sequence
  Synthetic oligonucleotide: CTLA4-593
acacauuucaaagcuuc

SEQ ID NO: 13845 - RNA, 17 nt, Artificial Sequence
  Synthetic oligonucleotide: CTLA4-663
acaugugcacacacaga

SEQ ID NO: 13846 - RNA, 20 nt, Artificial Sequence
  Synthetic oligonucleotide: CTLA4-60
acucaccuuugcagaagaca

SEQ ID NO: 13847 - RNA, 17 nt, Artificial Sequence
  Synthetic oligonucleotide: CTLA4-629
acuggaagugauuuaag

SEQ ID NO: 13848 - RNA, 17 nt, Artificial Sequence
  Synthetic oligonucleotide: CTLA4-637
acuuccagucucauaga

SEQ ID NO: 13849 - RNA, 20 nt, Artificial Sequence
  Synthetic oligonucleotide: CTLA4-63
agaaaaaacaggagagugca

SEQ ID NO: 13850 - RNA, 17 nt, Artificial Sequence
  Synthetic oligonucleotide: CTLA4-664
agaaagccuuuuuguuu

SEQ ID NO: 13851 - RNA, 17 nt, Artificial Sequence
  Synthetic oligonucleotide: CTLA4-579
agaagauugaauaaaau

SEQ ID NO: 13852 - RNA, 17 nt, Artificial Sequence
  Synthetic oligonucleotide: CTLA4-628
agacccuucuaugagac

SEQ ID NO: 13853 - RNA, 20 nt, Artificial Sequence
  Synthetic oligonucleotide: CTLA4-518
agacuggaagugauuuaaga

SEQ ID NO: 13854 - RNA, 17 nt, Artificial Sequence
  Synthetic oligonucleotide: CTLA4-674
agacuuggagaauuucc

SEQ ID NO: 13855 - RNA, 20 nt, Artificial Sequence
  Synthetic oligonucleotide: CTLA4-10
agacuuuuggagcaugaaga

SEQ ID NO: 13856 - RNA, 17 nt, Artificial Sequence
  Synthetic oligonucleotide: CTLA4-620
agcagggagcaguuggg

SEQ ID NO: 13857 - RNA, 17 nt, Artificial Sequence
  Synthetic oligonucleotide: CTLA4-642
agccagccaagccagau

SEQ ID NO: 13858 - RNA, 17 nt, Artificial Sequence
  Synthetic oligonucleotide: CTLA4-639
agccccuacuaaauacc

SEQ ID NO: 13859 - RNA, 17 nt, Artificial Sequence
  Synthetic oligonucleotide: CTLA4-623
agcgccagguauuuagu

SEQ ID NO: 13860 - RNA, 17 nt, Artificial Sequence
  Synthetic oligonucleotide: CTLA4-78
agcugaaccuggcuacc

SEQ ID NO: 13861 - RNA, 17 nt, Artificial Sequence
  Synthetic oligonucleotide: CTLA4-594
agcuucaggauccugaa

SEQ ID NO: 13862 - RNA, 20 nt, Artificial Sequence
  Synthetic oligonucleotide: CTLA4-496
aggagguguuucuccuaccu

SEQ ID NO: 13863 - RNA, 20 nt, Artificial Sequence
  Synthetic oligonucleotide: CTLA4-507
agggccagcagggagcaguu

SEQ ID NO: 13864 - RNA, 20 nt, Artificial Sequence
  Synthetic oligonucleotide: CTLA4-66
agggccagguccugguagcc

SEQ ID NO: 13865 - RNA, 17 nt, Artificial Sequence
  Synthetic oligonucleotide: CTLA4-608
agguguuucuccuaccu

SEQ ID NO: 13866 - RNA, 20 nt, Artificial Sequence
  Synthetic oligonucleotide: CTLA4-520
aguccugaauacauuugagc

SEQ ID NO: 13867 - RNA, 17 nt, Artificial Sequence
  Synthetic oligonucleotide: CTLA4-592
aguccuugauucugugu

SEQ ID NO: 13868 - RNA, 17 nt, Artificial Sequence
  Synthetic oligonucleotide: CTLA4-631
agugauuuaagagggaa

SEQ ID NO: 13869 - RNA, 17 nt, Artificial Sequence
  Synthetic oligonucleotide: CTLA4-137
agugcagggccaggucc

SEQ ID NO: 13870 - RNA, 20 nt, Artificial Sequence
  Synthetic oligonucleotide: CTLA4-462
aguuagcagccuaguaguuu

SEQ ID NO: 13871 - RNA, 20 nt, Artificial Sequence
  Synthetic oligonucleotide: CTLA4-479
auaaaguccuugauucugug

SEQ ID NO: 13872 - RNA, 17 nt, Artificial Sequence
  Synthetic oligonucleotide: CTLA4-673
auaacuaaguggagacu

SEQ ID NO: 13873 - RNA, 20 nt, Artificial Sequence
  Synthetic oligonucleotide: CTLA4-522
auacauuugagcuggguuuc

SEQ ID NO: 13874 - RNA, 20 nt, Artificial Sequence
  Synthetic oligonucleotide: CTLA4-498
auagcaaagccagaaguuaa

SEQ ID NO: 13875 - RNA, 20 nt, Artificial Sequence
  Synthetic oligonucleotide: CTLA4-525
aucacuuccagucucauaga

SEQ ID NO: 13876 - RNA, 17 nt, Artificial Sequence
  Synthetic oligonucleotide: CTLA4-80
aucccugucuucugcaa

SEQ ID NO: 13877 - RNA, 17 nt, Artificial Sequence
  Synthetic oligonucleotide: CTLA4-572
auccugccauuagccca

SEQ ID NO: 13878 - RNA, 20 nt, Artificial Sequence
  Synthetic oligonucleotide: CTLA4-465
augaaaugaauuggacugga

SEQ ID NO: 13879 - RNA, 17 nt, Artificial Sequence
  Synthetic oligonucleotide: CTLA4-590
auguguaauacauaucu

SEQ ID NO: 13880 - RNA, 20 nt, Artificial Sequence
  Synthetic oligonucleotide: CTLA4-469
auugaauaaaauugggauuu

SEQ ID NO: 13881 - RNA, 17 nt, Artificial Sequence
  Synthetic oligonucleotide: CTLA4-578
auuggacuggaugguua

SEQ ID NO: 13882 - RNA, 17 nt, Artificial Sequence
  Synthetic oligonucleotide: CTLA4-678
auuuuauucaaucuucu

SEQ ID NO: 13883 - RNA, 17 nt, Artificial Sequence
  Synthetic oligonucleotide: CTLA4-585
auuuuccauccauggau

SEQ ID NO: 13884 - RNA, 17 nt, Artificial Sequence
  Synthetic oligonucleotide: CTLA4-668
caaaacaagccaaucca

SEQ ID NO: 13885 - RNA, 20 nt, Artificial Sequence
  Synthetic oligonucleotide: CTLA4-481
caaacacauuucaaagcuuc

SEQ ID NO: 13886 - RNA, 20 nt, Artificial Sequence
  Synthetic oligonucleotide: CTLA4-482
caaagcuucaggauccugaa

SEQ ID NO: 13887 - RNA, 20 nt, Artificial Sequence
  Synthetic oligonucleotide: CTLA4-460
caaauccugccauuagccca

SEQ ID NO: 13888 - RNA, 20 nt, Artificial Sequence
  Synthetic oligonucleotide: CTLA4-529
caacugcucccugcuggccc

SEQ ID NO: 13889 - RNA, 20 nt, Artificial Sequence
  Synthetic oligonucleotide: CTLA4-69
caaggcaagccauggcuuua

SEQ ID NO: 13890 - RNA, 17 nt, Artificial Sequence
  Synthetic oligonucleotide: CTLA4-77
caaggcucagcugaacc

SEQ ID NO: 13891 - RNA, 20 nt, Artificial Sequence
  Synthetic oligonucleotide: CTLA4-478
cacauguguaauacauaucu

SEQ ID NO: 13892 - RNA, 17 nt, Artificial Sequence
  Synthetic oligonucleotide: CTLA4-132
caccuuugcagaagaca

SEQ ID NO: 13893 - RNA, 20 nt, Artificial Sequence
  Synthetic oligonucleotide: CTLA4-59
cacucaccuuugcagaagac

SEQ ID NO: 13894 - RNA, 20 nt, Artificial Sequence
  Synthetic oligonucleotide: CTLA4-530
cagagccagccaagccagau

SEQ ID NO: 13895 - RNA, 20 nt, Artificial Sequence
  Synthetic oligonucleotide: CTLA4-511
cagagcgccagguauuuagu

SEQ ID NO: 13896 - RNA, 17 nt, Artificial Sequence
  Synthetic oligonucleotide: CTLA4-136
caggagagugcagggcc

SEQ ID NO: 13897 - RNA, 20 nt, Artificial Sequence
  Synthetic oligonucleotide: CTLA4-506
cagggccagcagggagcagu

SEQ ID NO: 13898 - RNA, 20 nt, Artificial Sequence
  Synthetic oligonucleotide: CTLA4-2
cauaaagccauggcuugccu

SEQ ID NO: 13899 - RNA, 17 nt, Artificial Sequence
  Synthetic oligonucleotide: CTLA4-626
caugaaugcaugugagu

SEQ ID NO: 13900 - RNA, 17 nt, Artificial Sequence
  Synthetic oligonucleotide: CTLA4-589
cauguguaauacauauc

SEQ ID NO: 13901 - RNA, 17 nt, Artificial Sequence
  Synthetic oligonucleotide: CTLA4-634
cauuugagcuggguuuc

SEQ ID NO: 13902 - RNA, 20 nt, Artificial Sequence
  Synthetic oligonucleotide: CTLA4-566
ccaauuuuauucaaucuucu

SEQ ID NO: 13903 - RNA, 20 nt, Artificial Sequence
  Synthetic oligonucleotide: CTLA4-468
ccagaagauugaauaaaauu

SEQ ID NO: 13904 - RNA, 17 nt, Artificial Sequence
  Synthetic oligonucleotide: CTLA4-635
ccagcucaaauguauuc

SEQ ID NO: 13905 - RNA, 17 nt, Artificial Sequence
  Synthetic oligonucleotide: CTLA4-143
ccauggcuuuaugggag

SEQ ID NO: 13906 - RNA, 20 nt, Artificial Sequence
  Synthetic oligonucleotide: CTLA4-565
cccaauuuuauucaaucuuc

SEQ ID NO: 13907 - RNA, 20 nt, Artificial Sequence
  Synthetic oligonucleotide: CTLA4-467
cccagaagauugaauaaaau

SEQ ID NO: 13908 - RNA, 17 nt, Artificial Sequence
  Synthetic oligonucleotide: CTLA4-632
ccugaauacauuugagc

SEQ ID NO: 13909 - RNA, 17 nt, Artificial Sequence
  Synthetic oligonucleotide: CTLA4-680
cuaacuuucugagcccu

SEQ ID NO: 13910 - RNA, 20 nt, Artificial Sequence
  Synthetic oligonucleotide: CTLA4-524
cucaaauguauucaggacua

SEQ ID NO: 13911 - RNA, 20 nt, Artificial Sequence
  Synthetic oligonucleotide: CTLA4-6
cucagcugaaccuggcuacc

SEQ ID NO: 13912 - RNA, 20 nt, Artificial Sequence
  Synthetic oligonucleotide: CTLA4-476
cucguaaaaccaaaacaaaa

SEQ ID NO: 13913 - RNA, 20 nt, Artificial Sequence
  Synthetic oligonucleotide: CTLA4-504
cucuguauuccagggccagc

SEQ ID NO: 13914 - RNA, 20 nt, Artificial Sequence
  Synthetic oligonucleotide: CTLA4-68
cugaaauccaaggcaagcca

SEQ ID NO: 13915 - RNA, 17 nt, Artificial Sequence
  Synthetic oligonucleotide: CTLA4-633
cugaauacauuugagcu

SEQ ID NO: 13916 - RNA, 17 nt, Artificial Sequence
  Synthetic oligonucleotide: CTLA4-682
cugagcccuugggcuaa

SEQ ID NO: 13917 - RNA, 20 nt, Artificial Sequence
  Synthetic oligonucleotide: CTLA4-568
cugcuaacuuucugagcccu

SEQ ID NO: 13918 - RNA, 17 nt, Artificial Sequence
  Synthetic oligonucleotide: CTLA4-641
cugcucccugcuggccc

SEQ ID NO: 13919 - RNA, 17 nt, Artificial Sequence
  Synthetic oligonucleotide: CTLA4-630
cuggaagugauuuaaga

SEQ ID NO: 13920 - RNA, 20 nt, Artificial Sequence
  Synthetic oligonucleotide: CTLA4-514
cuucaugaaugcaugugagu

SEQ ID NO: 13921 - RNA, 17 nt, Artificial Sequence
  Synthetic oligonucleotide: CTLA4-638
cuuccagucucauagaa

SEQ ID NO: 13922 - RNA, 17 nt, Artificial Sequence
  Synthetic oligonucleotide: CTLA4-75
cuugccuuggauuucag

SEQ ID NO: 13923 - RNA, 20 nt, Artificial Sequence
  Synthetic oligonucleotide: CTLA4-502
cuuggcuggcucuguauucc

SEQ ID NO: 13924 - RNA, 17 nt, Artificial Sequence
  Synthetic oligonucleotide: CTLA4-82
cuuuuggagcaugaaga

SEQ ID NO: 13925 - RNA, 20 nt, Artificial Sequence
  Synthetic oligonucleotide: CTLA4-493
cuuuuggagcaugaagaugg

SEQ ID NO: 13926 - RNA, 17 nt, Artificial Sequence
  Synthetic oligonucleotide: CTLA4-582
uaaaauugggauuuagg

SEQ ID NO: 13927 - RNA, 20 nt, Artificial Sequence
  Synthetic oligonucleotide: CTLA4-480
uaaaguccuugauucugugu

SEQ ID NO: 13928 - RNA, 17 nt, Artificial Sequence
  Synthetic oligonucleotide: CTLA4-681
uaacuuucugagcccuu

SEQ ID NO: 13929 - RNA, 20 nt, Artificial Sequence
  Synthetic oligonucleotide: CTLA4-551
uacacaugugcacacacaga

SEQ ID NO: 13930 - RNA, 20 nt, Artificial Sequence
  Synthetic oligonucleotide: CTLA4-473
uacauuuuccauccauggau

SEQ ID NO: 13931 - RNA, 17 nt, Artificial Sequence
  Synthetic oligonucleotide: CTLA4-666
uacgagaaaggaagccg

SEQ ID NO: 13932 - RNA, 17 nt, Artificial Sequence
  Synthetic oligonucleotide: CTLA4-574
uagcagccuaguaguuu

SEQ ID NO: 13933 - RNA, 20 nt, Artificial Sequence
  Synthetic oligonucleotide: CTLA4-471
uaggaggacccuuguacucc

SEQ ID NO: 13934 - RNA, 17 nt, Artificial Sequence
  Synthetic oligonucleotide: CTLA4-131
ucaccuuugcagaagac

SEQ ID NO: 13935 - RNA, 20 nt, Artificial Sequence
  Synthetic oligonucleotide: CTLA4-526
ucacuuccagucucauagaa

SEQ ID NO: 13936 - RNA, 20 nt, Artificial Sequence
  Synthetic oligonucleotide: CTLA4-559
ucauguucacuuugaggauc

SEQ ID NO: 13937 - RNA, 20 nt, Artificial Sequence
  Synthetic oligonucleotide: CTLA4-497
ucauuuguuucagcagucaa

SEQ ID NO: 13938 - RNA, 17 nt, Artificial Sequence
  Synthetic oligonucleotide: CTLA4-573
uccugccauuagcccaa

SEQ ID NO: 13939 - RNA, 20 nt, Artificial Sequence
  Synthetic oligonucleotide: CTLA4-505
ucuguauuccagggccagca

SEQ ID NO: 13940 - RNA, 17 nt, Artificial Sequence
  Synthetic oligonucleotide: CTLA4-644
ugaaacaaaugaaaccc

SEQ ID NO: 13941 - RNA, 17 nt, Artificial Sequence
  Synthetic oligonucleotide: CTLA4-133
ugaagagaagaaaaaac

SEQ ID NO: 13942 - RNA, 20 nt, Artificial Sequence
  Synthetic oligonucleotide: CTLA4-527
ugaagccccuacuaaauacc

SEQ ID NO: 13943 - RNA, 20 nt, Artificial Sequence
  Synthetic oligonucleotide: CTLA4-466
ugaauuggacuggaugguua

SEQ ID NO: 13944 - RNA, 20 nt, Artificial Sequence
  Synthetic oligonucleotide: CTLA4-571
ugagcccuugggcuaauggc

SEQ ID NO: 13945 - RNA, 20 nt, Artificial Sequence
  Synthetic oligonucleotide: CTLA4-560
ugaggaucuggauaacuaag

SEQ ID NO: 13946 - RNA, 20 nt, Artificial Sequence
  Synthetic oligonucleotide: CTLA4-569
ugcuaacuuucugagcccuu

SEQ ID NO: 13947 - RNA, 20 nt, Artificial Sequence
  Synthetic oligonucleotide: CTLA4-532
ugcugaaacaaaugaaaccc

SEQ ID NO: 13948 - RNA, 20 nt, Artificial Sequence
  Synthetic oligonucleotide: CTLA4-562
uggagacuuggagaauuucc

SEQ ID NO: 13949 - RNA, 20 nt, Artificial Sequence
  Synthetic oligonucleotide: CTLA4-561
uggauaacuaaguggagacu

SEQ ID NO: 13950 - RNA, 20 nt, Artificial Sequence
  Synthetic oligonucleotide: CTLA4-3
uggcuugccuuggauuucag

SEQ ID NO: 13951 - RNA, 17 nt, Artificial Sequence
  Synthetic oligonucleotide: CTLA4-616
uguauuccagggccagc

SEQ ID NO: 13952 - RNA, 17 nt, Artificial Sequence
  Synthetic oligonucleotide: CTLA4-671
uguucacuuugaggauc

SEQ ID NO: 13953 - RNA, 20 nt, Artificial Sequence
  Synthetic oligonucleotide: CTLA4-499
uuaaagguaaaacuccaauc

SEQ ID NO: 13954 - RNA, 20 nt, Artificial Sequence
  Synthetic oligonucleotide: CTLA4-516
uucagacccuucuaugagac

SEQ ID NO: 13955 - RNA, 20 nt, Artificial Sequence
  Synthetic oligonucleotide: CTLA4-8
uucaucccugucuucugcaa

SEQ ID NO: 13956 - RNA, 20 nt, Artificial Sequence
  Synthetic oligonucleotide: CTLA4-472
uugaauacauuuuccaucca

SEQ ID NO: 13957 - RNA, 20 nt, Artificial Sequence
  Synthetic oligonucleotide: CTLA4-567
uugacaacuccaaaacuacu

SEQ ID NO: 13958 - RNA, 17 nt, Artificial Sequence
  Synthetic oligonucleotide: CTLA4-605
uuggagcaugaagaugg

SEQ ID NO: 13959 - RNA, 20 nt, Artificial Sequence
  Synthetic oligonucleotide: CTLA4-494
uuggagcaugaagauggagg

SEQ ID NO: 13960 - RNA, 20 nt, Artificial Sequence
  Synthetic oligonucleotide: CTLA4-503
uuggcuggcucuguauucca

SEQ ID NO: 13961 - RNA, 20 nt, Artificial Sequence
  Synthetic oligonucleotide: CTLA4-515
uugguuuaguagagagacac

SEQ ID NO: 13962 - RNA, 17 nt, Artificial Sequence
  Synthetic oligonucleotide: CTLA4-575
uugucaaugaaaugaau

SEQ ID NO: 13963 - RNA, 20 nt, Artificial Sequence
  Synthetic oligonucleotide: CTLA4-553
uuguuuugguuuuacgagaa

SEQ ID NO: 13964 - RNA, 20 nt, Artificial Sequence
  Synthetic oligonucleotide: CTLA4-570
uuucugagcccuugggcuaa

SEQ ID NO: 13965 - RNA, 20 nt, Artificial Sequence
  Synthetic oligonucleotide: CTLA4-550
uuugaacccacacagaauca

SEQ ID NO: 13966 - RNA, 20 nt, Artificial Sequence
  Synthetic oligonucleotide: CTLA4-474
uuuguucaguugagugcuug

SEQ ID NO: 13967 - RNA, 17 nt, Artificial Sequence
  Synthetic oligonucleotide: CTLA4-609
uuuguuucagcagucaa

SEQ ID NO: 13968 - RNA, 20 nt, Artificial Sequence
  Synthetic oligonucleotide: CTLA4-554
uuuuacgagaaaggaagccg

SEQ ID NO: 13969 - RNA, 17 nt, Artificial Sequence
  Synthetic oligonucleotide: CTLA4-665
uuuugguuuuacgagaa

SEQ ID NO: 13970 - RNA, 20 nt, Artificial Sequence
  Synthetic oligonucleotide: CTLA4-684
augaaaacucuccagauuua

SEQ ID NO: 13971 - RNA, 20 nt, Artificial Sequence
  Synthetic oligonucleotide: CTLA4-685
aaacucuccagauuuaagga

SEQ ID NO: 13972 - RNA, 20 nt, Artificial Sequence
  Synthetic oligonucleotide: CTLA4-686
aauucuuuuuguuagaucau

SEQ ID NO: 13973 - RNA, 20 nt, Artificial Sequence
  Synthetic oligonucleotide: CTLA4-687
cuacagcugucacaaauuua

SEQ ID NO: 13974 - RNA, 20 nt, Artificial Sequence
  Synthetic oligonucleotide: CTLA4-688
ugucacaaauuuaaggacuc

SEQ ID NO: 13975 - RNA, 20 nt, Artificial Sequence
  Synthetic oligonucleotide: CTLA4-689
aaaaaaagucuauccuuuua

SEQ ID NO: 13976 - RNA, 20 nt, Artificial Sequence
  Synthetic oligonucleotide: CTLA4-690
aaagucuauccuuuuaugga

SEQ ID NO: 13977 - RNA, 20 nt, Artificial Sequence
  Synthetic oligonucleotide: CTLA4-691
cucuaaucucuugaaucauu

SEQ ID NO: 13978 - RNA, 20 nt, Artificial Sequence
  Synthetic oligonucleotide: CTLA4-692
ucuaaucucuugaaucauuu

SEQ ID NO: 13979 - RNA, 20 nt, Artificial Sequence
  Synthetic oligonucleotide: CTLA4-693
aucucuugaaucauuugggu

SEQ ID NO: 13980 - RNA, 20 nt, Artificial Sequence
  Synthetic oligonucleotide: CTLA4-694
cauuuggguuggcuuuucuu

SEQ ID NO: 13981 - RNA, 20 nt, Artificial Sequence
  Synthetic oligonucleotide: CTLA4-695
guuuugucucuguugaguua

SEQ ID NO: 13982 - RNA, 20 nt, Artificial Sequence
  Synthetic oligonucleotide: CTLA4-696
cuuuccuucugcaaaaccag

SEQ ID NO: 13983 - RNA, 20 nt, Artificial Sequence
  Synthetic oligonucleotide: CTLA4-697
ucucuuaaccaaaugcuaaa

SEQ ID NO: 13984 - RNA, 20 nt, Artificial Sequence
  Synthetic oligonucleotide: CTLA4-698
accaaaugcuaaauggauuu

SEQ ID NO: 13985 - RNA, 20 nt, Artificial Sequence
  Synthetic oligonucleotide: CTLA4-699
acuuauuuguaaagcuguca

SEQ ID NO: 13986 - RNA, 20 nt, Artificial Sequence
  Synthetic oligonucleotide: CTLA4-700
cuuauuuguaaagcugucaa

SEQ ID NO: 13987 - RNA, 20 nt, Artificial Sequence
  Synthetic oligonucleotide: CTLA4-701
gcugucaagggaccauuaga

SEQ ID NO: 13988 - RNA, 20 nt, Artificial Sequence
  Synthetic oligonucleotide: CTLA4-702
ucaagggaccauuagaagga

SEQ ID NO: 13989 - RNA, 20 nt, Artificial Sequence
  Synthetic oligonucleotide: CTLA4-703
uuuuuuugcuauacaauuca

SEQ ID NO: 13990 - RNA, 20 nt, Artificial Sequence
  Synthetic oligonucleotide: CTLA4-704
cuauacaauucaagguuuua

SEQ ID NO: 13991 - RNA, 20 nt, Artificial Sequence
  Synthetic oligonucleotide: CTLA4-705
auucaagguuuuaagguccu

SEQ ID NO: 13992 - RNA, 20 nt, Artificial Sequence
  Synthetic oligonucleotide: CTLA4-706
agccagcuuguuuaaaaugu

SEQ ID NO: 13993 - RNA, 20 nt, Artificial Sequence
  Synthetic oligonucleotide: CTLA4-707
gccagcuuguuuaaaaugua

SEQ ID NO: 13994 - RNA, 20 nt, Artificial Sequence
  Synthetic oligonucleotide: CTLA4-708
uuuaaaauguagggaaauug

SEQ ID NO: 13995 - RNA, 20 nt, Artificial Sequence
  Synthetic oligonucleotide: CTLA4-709
uuaaaauguagggaaauugu

SEQ ID NO: 13996 - RNA, 20 nt, Artificial Sequence
  Synthetic oligonucleotide: CTLA4-710
ugccuucuuuacuuaauuca

SEQ ID NO: 13997 - RNA, 20 nt, Artificial Sequence
  Synthetic oligonucleotide: CTLA4-711
uuacuuaauucaagguuuua

SEQ ID NO: 13998 - RNA, 20 nt, Artificial Sequence
  Synthetic oligonucleotide: CTLA4-712
auugccaaaaaaaaaagaca

SEQ ID NO: 13999 - RNA, 20 nt, Artificial Sequence
  Synthetic oligonucleotide: CTLA4-713
aaaaaaaaaagacaaggaaa

SEQ ID NO: 14000 - RNA, 20 nt, Artificial Sequence
  Synthetic oligonucleotide: CTLA4-714
aagaaagccaccagucuguu

SEQ ID NO: 14001 - RNA, 20 nt, Artificial Sequence
  Synthetic oligonucleotide: CTLA4-715
auuguugccugaccuacgug

SEQ ID NO: 14002 - RNA, 20 nt, Artificial Sequence
  Synthetic oligonucleotide: CTLA4-716
uuguugccugaccuacgugu

SEQ ID NO: 14003 - RNA, 20 nt, Artificial Sequence
  Synthetic oligonucleotide: CTLA4-717
gcucuucagagacugacacc

SEQ ID NO: 14004 - RNA, 20 nt, Artificial Sequence
  Synthetic oligonucleotide: CTLA4-718
cugacaccagguuuguuaca

SEQ ID NO: 14005 - RNA, 20 nt, Artificial Sequence
  Synthetic oligonucleotide: CTLA4-719
uaucucucucuagaccuucu

SEQ ID NO: 14006 - RNA, 20 nt, Artificial Sequence
  Synthetic oligonucleotide: CTLA4-720
ccauguaguuuguaugaagu

SEQ ID NO: 14007 - RNA, 20 nt, Artificial Sequence
  Synthetic oligonucleotide: CTLA4-721
uuugaugauuuaauuuuuac

SEQ ID NO: 14008 - RNA, 17 nt, Artificial Sequence
  Synthetic oligonucleotide: CTLA4-722
aaaacucuccagauuua

SEQ ID NO: 14009 - RNA, 17 nt, Artificial Sequence
  Synthetic oligonucleotide: CTLA4-723
cucuccagauuuaagga

SEQ ID NO: 14010 - RNA, 17 nt, Artificial Sequence
  Synthetic oligonucleotide: CTLA4-724
ucuuuuuguuagaucau

SEQ ID NO: 14011 - RNA, 17 nt, Artificial Sequence
  Synthetic oligonucleotide: CTLA4-725
cagcugucacaaauuua

SEQ ID NO: 14012 - RNA, 17 nt, Artificial Sequence
  Synthetic oligonucleotide: CTLA4-726
cacaaauuuaaggacuc

SEQ ID NO: 14013 - RNA, 17 nt, Artificial Sequence
  Synthetic oligonucleotide: CTLA4-727
aaaagucuauccuuuua

SEQ ID NO: 14014 - RNA, 17 nt, Artificial Sequence
  Synthetic oligonucleotide: CTLA4-728
gucuauccuuuuaugga

SEQ ID NO: 14015 - RNA, 17 nt, Artificial Sequence
  Synthetic oligonucleotide: CTLA4-729
uaaucucuugaaucauu

SEQ ID NO: 14016 - RNA, 17 nt, Artificial Sequence
  Synthetic oligonucleotide: CTLA4-730
aaucucuugaaucauuu

SEQ ID NO: 14017 - RNA, 17 nt, Artificial Sequence
  Synthetic oligonucleotide: CTLA4-731
ucuugaaucauuugggu

SEQ ID NO: 14018 - RNA, 17 nt, Artificial Sequence
  Synthetic oligonucleotide: CTLA4-732
uuggguuggcuuuucuu

SEQ ID NO: 14019 - RNA, 17 nt, Artificial Sequence
  Synthetic oligonucleotide: CTLA4-733
uugucucuguugaguua

SEQ ID NO: 14020 - RNA, 17 nt, Artificial Sequence
  Synthetic oligonucleotide: CTLA4-734
uccuucugcaaaaccag

SEQ ID NO: 14021 - RNA, 17 nt, Artificial Sequence
  Synthetic oligonucleotide: CTLA4-735
cuuaaccaaaugcuaaa

SEQ ID NO: 14022 - RNA, 17 nt, Artificial Sequence
  Synthetic oligonucleotide: CTLA4-736
aaaugcuaaauggauuu

SEQ ID NO: 14023 - RNA, 17 nt, Artificial Sequence
  Synthetic oligonucleotide: CTLA4-737
uauuuguaaagcuguca

SEQ ID NO: 14024 - RNA, 17 nt, Artificial Sequence
  Synthetic oligonucleotide: CTLA4-738
auuuguaaagcugucaa

SEQ ID NO: 14025 - RNA, 17 nt, Artificial Sequence
  Synthetic oligonucleotide: CTLA4-739
gucaagggaccauuaga

SEQ ID NO: 14026 - RNA, 17 nt, Artificial Sequence
  Synthetic oligonucleotide: CTLA4-740
agggaccauuagaagga

SEQ ID NO: 14027 - RNA, 17 nt, Artificial Sequence
  Synthetic oligonucleotide: CTLA4-741
uuuugcuauacaauuca

SEQ ID NO: 14028 - RNA, 17 nt, Artificial Sequence
  Synthetic oligonucleotide: CTLA4-742
uacaauucaagguuuua

SEQ ID NO: 14029 - RNA, 17 nt, Artificial Sequence
  Synthetic oligonucleotide: CTLA4-743
caagguuuuaagguccu

SEQ ID NO: 14030 - RNA, 17 nt, Artificial Sequence
  Synthetic oligonucleotide: CTLA4-744
cagcuuguuuaaaaugu

SEQ ID NO: 14031 - RNA, 17 nt, Artificial Sequence
  Synthetic oligonucleotide: CTLA4-745
agcuuguuuaaaaugua

SEQ ID NO: 14032 - RNA, 17 nt, Artificial Sequence
  Synthetic oligonucleotide: CTLA4-746
aaaauguagggaaauug

SEQ ID NO: 14033 - RNA, 17 nt, Artificial Sequence
  Synthetic oligonucleotide: CTLA4-747
aaauguagggaaauugu

SEQ ID NO: 14034 - RNA, 17 nt, Artificial Sequence
  Synthetic oligonucleotide: CTLA4-748
cuucuuuacuuaauuca

SEQ ID NO: 14035 - RNA, 17 nt, Artificial Sequence
  Synthetic oligonucleotide: CTLA4-749
cuuaauucaagguuuua

SEQ ID NO: 14036 - RNA, 17 nt, Artificial Sequence
  Synthetic oligonucleotide: CTLA4-750
gccaaaaaaaaaagaca

SEQ ID NO: 14037 - RNA, 17 nt, Artificial Sequence
  Synthetic oligonucleotide: CTLA4-751
aaaaaaagacaaggaaa

SEQ ID NO: 14038 - RNA, 17 nt, Artificial Sequence
  Synthetic oligonucleotide: CTLA4-752
aaagccaccagucuguu

SEQ ID NO: 14039 - RNA, 17 nt, Artificial Sequence
  Synthetic oligonucleotide: CTLA4-753
guugccugaccuacgug

SEQ ID NO: 14040 - RNA, 17 nt, Artificial Sequence
  Synthetic oligonucleotide: CTLA4-754
uugccugaccuacgugu

SEQ ID NO: 14041 - RNA, 17 nt, Artificial Sequence
  Synthetic oligonucleotide: CTLA4-755
cuucagagacugacacc

SEQ ID NO: 14042 - RNA, 17 nt, Artificial Sequence
  Synthetic oligonucleotide: CTLA4-756
acaccagguuuguuaca

SEQ ID NO: 14043 - RNA, 17 nt, Artificial Sequence
  Synthetic oligonucleotide: CTLA4-757
cucucucuagaccuucu

SEQ ID NO: 14044 - RNA, 17 nt, Artificial Sequence
  Synthetic oligonucleotide: CTLA4-758
uguaguuuguaugaagu

SEQ ID NO: 14045 - RNA, 17 nt, Artificial Sequence
  Synthetic oligonucleotide: CTLA4-759
gaugauuuaauuuuuac

SEQ ID NO: 14046 - RNA, 20 nt, Artificial Sequence
  Synthetic oligonucleotide: CTLA4-760
uaaagaaagaaacauucaug

SEQ ID NO: 14047 - RNA, 20 nt, Artificial Sequence
  Synthetic oligonucleotide: CTLA4-761
auaaagaaagaaacauucau

SEQ ID NO: 14048 - RNA, 20 nt, Artificial Sequence
  Synthetic oligonucleotide: CTLA4-762
aauaaagaaagaaacauuca

SEQ ID NO: 14049 - RNA, 20 nt, Artificial Sequence
  Synthetic oligonucleotide: CTLA4-763
uugaggaccuuccuuaaauc

SEQ ID NO: 14050 - RNA, 20 nt, Artificial Sequence
  Synthetic oligonucleotide: CTLA4-764
aaaaagaauuugaaacauug

SEQ ID NO: 14051 - RNA, 20 nt, Artificial Sequence
  Synthetic oligonucleotide: CTLA4-765
aauuugugacagcuguagac

SEQ ID NO: 14052 - RNA, 20 nt, Artificial Sequence
  Synthetic oligonucleotide: CTLA4-766
agauuagagccguccauaaa

SEQ ID NO: 14053 - RNA, 20 nt, Artificial Sequence
  Synthetic oligonucleotide: CTLA4-767
agacaaaacagaguugaaga

SEQ ID NO: 14054 - RNA, 20 nt, Artificial Sequence
  Synthetic oligonucleotide: CTLA4-768
uuugcagaaggaaagaauuc

SEQ ID NO: 14055 - RNA, 20 nt, Artificial Sequence
  Synthetic oligonucleotide: CTLA4-769
gcugccucugguuuugcaga

SEQ ID NO: 14056 - RNA, 20 nt, Artificial Sequence
  Synthetic oligonucleotide: CTLA4-770
ggcggaaaagaagcugccuc

SEQ ID NO: 14057 - RNA, 20 nt, Artificial Sequence
  Synthetic oligonucleotide: CTLA4-771
agaaauaaacugaaaauagg

SEQ ID NO: 14058 - RNA, 20 nt, Artificial Sequence
  Synthetic oligonucleotide: CTLA4-772
acaagaaauaaacugaaaau

SEQ ID NO: 14059 - RNA, 20 nt, Artificial Sequence
  Synthetic oligonucleotide: CTLA4-773
uccuaaauccauuuagcauu

SEQ ID NO: 14060 - RNA, 20 nt, Artificial Sequence
  Synthetic oligonucleotide: CTLA4-774
gugaagcaccauccuucuaa

SEQ ID NO: 14061 - RNA, 20 nt, Artificial Sequence
  Synthetic oligonucleotide: CTLA4-775
auagcaaaaaaacucuuccc

SEQ ID NO: 14062 - RNA, 20 nt, Artificial Sequence
  Synthetic oligonucleotide: CTLA4-776
uuauaaaguauaugaauccg

SEQ ID NO: 14063 - RNA, 20 nt, Artificial Sequence
  Synthetic oligonucleotide: CTLA4-777
ucccuacauuuuaaacaagc

SEQ ID NO: 14064 - RNA, 20 nt, Artificial Sequence
  Synthetic oligonucleotide: CTLA4-778
aaccuugaauuaaguaaaga

SEQ ID NO: 14065 - RNA, 20 nt, Artificial Sequence
  Synthetic oligonucleotide: CTLA4-779
aacuuuuauuuuuaaauaau

SEQ ID NO: 14066 - RNA, 20 nt, Artificial Sequence
  Synthetic oligonucleotide: CTLA4-780
uuuuccuugucuuuuuuuuu

SEQ ID NO: 14067 - RNA, 20 nt, Artificial Sequence
  Synthetic oligonucleotide: CTLA4-781
uuguaugccaaacagacugg

SEQ ID NO: 14068 - RNA, 20 nt, Artificial Sequence
  Synthetic oligonucleotide: CTLA4-782
guauuguaugccaaacagac

SEQ ID NO: 14069 - RNA, 20 nt, Artificial Sequence
  Synthetic oligonucleotide: CTLA4-783
cugaaacccacacguagguc

SEQ ID NO: 14070 - RNA, 20 nt, Artificial Sequence
  Synthetic oligonucleotide: CTLA4-784
ugcaucugaaacccacacgu

SEQ ID NO: 14071 - RNA, 20 nt, Artificial Sequence
  Synthetic oligonucleotide: CTLA4-785
cucugaagagcugaaaacug

SEQ ID NO: 14072 - RNA, 20 nt, Artificial Sequence
  Synthetic oligonucleotide: CTLA4-786
uuuaagccguguaacaaacc

SEQ ID NO: 14073 - RNA, 20 nt, Artificial Sequence
  Synthetic oligonucleotide: CTLA4-787
gagauaagguugagauucaa

SEQ ID NO: 14074 - RNA, 20 nt, Artificial Sequence
  Synthetic oligonucleotide: CTLA4-788
agaaggucuagagagagaua

SEQ ID NO: 14075 - RNA, 20 nt, Artificial Sequence
  Synthetic oligonucleotide: CTLA4-789
acaugguuucuuaaccaaga

SEQ ID NO: 14076 - RNA, 20 nt, Artificial Sequence
  Synthetic oligonucleotide: CTLA4-790
ccuacuucauacaaacuaca

SEQ ID NO: 14077 - RNA, 17 nt, Artificial Sequence
  Synthetic oligonucleotide: CTLA4-791
agaaagaaacauucaug

SEQ ID NO: 14078 - RNA, 17 nt, Artificial Sequence
  Synthetic oligonucleotide: CTLA4-792
aagaaagaaacauucau

SEQ ID NO: 14079 - RNA, 17 nt, Artificial Sequence
  Synthetic oligonucleotide: CTLA4-793
aaagaaagaaacauuca

SEQ ID NO: 14080 - RNA, 17 nt, Artificial Sequence
  Synthetic oligonucleotide: CTLA4-794
aggaccuuccuuaaauc

SEQ ID NO: 14081 - RNA, 17 nt, Artificial Sequence
  Synthetic oligonucleotide: CTLA4-795
aagaauuugaaacauug

SEQ ID NO: 14082 - RNA, 17 nt, Artificial Sequence
  Synthetic oligonucleotide: CTLA4-796
uugugacagcuguagac

SEQ ID NO: 14083 - RNA, 17 nt, Artificial Sequence
  Synthetic oligonucleotide: CTLA4-797
uuagagccguccauaaa

SEQ ID NO: 14084 - RNA, 17 nt, Artificial Sequence
  Synthetic oligonucleotide: CTLA4-798
caaaacagaguugaaga

SEQ ID NO: 14085 - RNA, 17 nt, Artificial Sequence
  Synthetic oligonucleotide: CTLA4-799
gcagaaggaaagaauuc

SEQ ID NO: 14086 - RNA, 17 nt, Artificial Sequence
  Synthetic oligonucleotide: CTLA4-800
gccucugguuuugcaga

SEQ ID NO: 14087 - RNA, 17 nt, Artificial Sequence
  Synthetic oligonucleotide: CTLA4-801
ggaaaagaagcugccuc

SEQ ID NO: 14088 - RNA, 17 nt, Artificial Sequence
  Synthetic oligonucleotide: CTLA4-802
aauaaacugaaaauagg

SEQ ID NO: 14089 - RNA, 17 nt, Artificial Sequence
  Synthetic oligonucleotide: CTLA4-803
agaaauaaacugaaaau

SEQ ID NO: 14090 - RNA, 17 nt, Artificial Sequence
  Synthetic oligonucleotide: CTLA4-804
uaaauccauuuagcauu

SEQ ID NO: 14091 - RNA, 17 nt, Artificial Sequence
  Synthetic oligonucleotide: CTLA4-805
aagcaccauccuucuaa

SEQ ID NO: 14092 - RNA, 17 nt, Artificial Sequence
  Synthetic oligonucleotide: CTLA4-806
gcaaaaaaacucuuccc

SEQ ID NO: 14093 - RNA, 17 nt, Artificial Sequence
  Synthetic oligonucleotide: CTLA4-807
uaaaguauaugaauccg

SEQ ID NO: 14094 - RNA, 17 nt, Artificial Sequence
  Synthetic oligonucleotide: CTLA4-808
cuacauuuuaaacaagc

SEQ ID NO: 14095 - RNA, 17 nt, Artificial Sequence
  Synthetic oligonucleotide: CTLA4-809
cuugaauuaaguaaaga

SEQ ID NO: 14096 - RNA, 17 nt, Artificial Sequence
  Synthetic oligonucleotide: CTLA4-810
uuuuauuuuuaaauaau

SEQ ID NO: 14097 - RNA, 17 nt, Artificial Sequence
  Synthetic oligonucleotide: CTLA4-811
uccuugucuuuuuuuuu

SEQ ID NO: 14098 - RNA, 17 nt, Artificial Sequence
  Synthetic oligonucleotide: CTLA4-812
uaugccaaacagacugg

SEQ ID NO: 14099 - RNA, 17 nt, Artificial Sequence
  Synthetic oligonucleotide: CTLA4-813
uuguaugccaaacagac

SEQ ID NO: 14100 - RNA, 17 nt, Artificial Sequence
  Synthetic oligonucleotide: CTLA4-814
aaacccacacguagguc

SEQ ID NO: 14101 - RNA, 17 nt, Artificial Sequence
  Synthetic oligonucleotide: CTLA4-815
aucugaaacccacacgu

SEQ ID NO: 14102 - RNA, 17 nt, Artificial Sequence
  Synthetic oligonucleotide: CTLA4-816
ugaagagcugaaaacug

SEQ ID NO: 14103 - RNA, 17 nt, Artificial Sequence
  Synthetic oligonucleotide: CTLA4-817
aagccguguaacaaacc

SEQ ID NO: 14104 - RNA, 17 nt, Artificial Sequence
  Synthetic oligonucleotide: CTLA4-818
auaagguugagauucaa

SEQ ID NO: 14105 - RNA, 17 nt, Artificial Sequence
  Synthetic oligonucleotide: CTLA4-819
aggucuagagagagaua

SEQ ID NO: 14106 - RNA, 17 nt, Artificial Sequence
  Synthetic oligonucleotide: CTLA4-820
ugguuucuuaaccaaga

SEQ ID NO: 14107 - RNA, 17 nt, Artificial Sequence
  Synthetic oligonucleotide: CTLA4-821
acuucauacaaacuaca

SEQ ID NO: 14108 - RNA, 20 nt, Artificial Sequence
  Synthetic oligonucleotide: CTLA4-822
acaaauccugccauuagccc

SEQ ID NO: 14109 - RNA, 20 nt, Artificial Sequence
  Synthetic oligonucleotide: CTLA4-823
cugccauuagcccaagggcu

SEQ ID NO: 14110 - RNA, 20 nt, Artificial Sequence
  Synthetic oligonucleotide: CTLA4-824
aaguuagcagccuaguaguu

SEQ ID NO: 14111 - RNA, 20 nt, Artificial Sequence
  Synthetic oligonucleotide: CTLA4-462
aguuagcagccuaguaguuu

SEQ ID NO: 14112 - RNA, 20 nt, Artificial Sequence
  Synthetic oligonucleotide: CTLA4-826
uaguaguuuuggaguuguca

SEQ ID NO: 14113 - RNA, 20 nt, Artificial Sequence
  Synthetic oligonucleotide: CTLA4-827
guuuuggaguugucaaugaa

SEQ ID NO: 14114 - RNA, 20 nt, Artificial Sequence
  Synthetic oligonucleotide: CTLA4-828
ggaguugucaaugaaaugaa

SEQ ID NO: 14115 - RNA, 20 nt, Artificial Sequence
  Synthetic oligonucleotide: CTLA4-829
ugucaaugaaaugaauugga

SEQ ID NO: 14116 - RNA, 20 nt, Artificial Sequence
  Synthetic oligonucleotide: CTLA4-830
augaauuggacuggaugguu

SEQ ID NO: 14117 - RNA, 20 nt, Artificial Sequence
  Synthetic oligonucleotide: CTLA4-831
acuggaugguuaaggaugcc

SEQ ID NO: 14118 - RNA, 20 nt, Artificial Sequence
  Synthetic oligonucleotide: CTLA4-832
gguuaaggaugcccagaaga

SEQ ID NO: 14119 - RNA, 20 nt, Artificial Sequence
  Synthetic oligonucleotide: CTLA4-833
gcccagaagauugaauaaaa

SEQ ID NO: 14120 - RNA, 20 nt, Artificial Sequence
  Synthetic oligonucleotide: CTLA4-467
cccagaagauugaauaaaau

SEQ ID NO: 14121 - RNA, 20 nt, Artificial Sequence
  Synthetic oligonucleotide: CTLA4-835
gauugaauaaaauugggauu

SEQ ID NO: 14122 - RNA, 20 nt, Artificial Sequence
  Synthetic oligonucleotide: CTLA4-469
auugaauaaaauugggauuu

SEQ ID NO: 14123 - RNA, 20 nt, Artificial Sequence
  Synthetic oligonucleotide: CTLA4-837
ugaauaaaauugggauuuag

SEQ ID NO: 14124 - RNA, 20 nt, Artificial Sequence
  Synthetic oligonucleotide: CTLA4-838
uuaggaggacccuuguacuc

SEQ ID NO: 14125 - RNA, 20 nt, Artificial Sequence
  Synthetic oligonucleotide: CTLA4-471
uaggaggacccuuguacucc

SEQ ID NO: 14126 - RNA, 20 nt, Artificial Sequence
  Synthetic oligonucleotide: CTLA4-840
uaguuauccagauccucaaa

SEQ ID NO: 14127 - RNA, 20 nt, Artificial Sequence
  Synthetic oligonucleotide: CTLA4-841
uccagauccucaaagugaac

SEQ ID NO: 14128 - RNA, 20 nt, Artificial Sequence
  Synthetic oligonucleotide: CTLA4-842
caugaagcuucaguuucaaa

SEQ ID NO: 14129 - RNA, 20 nt, Artificial Sequence
  Synthetic oligonucleotide: CTLA4-843
auugaauacauuuuccaucc

SEQ ID NO: 14130 - RNA, 20 nt, Artificial Sequence
  Synthetic oligonucleotide: CTLA4-844
gauuggcuuguuuuguucag

SEQ ID NO: 14131 - RNA, 20 nt, Artificial Sequence
  Synthetic oligonucleotide: CTLA4-845
uguuuuguucaguugagugc

SEQ ID NO: 14132 - RNA, 20 nt, Artificial Sequence
  Synthetic oligonucleotide: CTLA4-846
ugcacauguguaauacauau

SEQ ID NO: 14133 - RNA, 20 nt, Artificial Sequence
  Synthetic oligonucleotide: CTLA4-477
gcacauguguaauacauauc

SEQ ID NO: 14134 - RNA, 20 nt, Artificial Sequence
  Synthetic oligonucleotide: CTLA4-848
uauaaaguccuugauucugu

SEQ ID NO: 14135 - RNA, 20 nt, Artificial Sequence
  Synthetic oligonucleotide: CTLA4-849
ucaaacacauuucaaagcuu

SEQ ID NO: 14136 - RNA, 20 nt, Artificial Sequence
  Synthetic oligonucleotide: CTLA4-850
cauuucaaagcuucaggauc

SEQ ID NO: 14137 - RNA, 20 nt, Artificial Sequence
  Synthetic oligonucleotide: CTLA4-851
gaaagguuuugcucuacuuc

SEQ ID NO: 14138 - RNA, 20 nt, Artificial Sequence
  Synthetic oligonucleotide: CTLA4-852
uugcucuacuuccugaagac

SEQ ID NO: 14139 - RNA, 20 nt, Artificial Sequence
  Synthetic oligonucleotide: CTLA4-216
ccauaaagccauggcuugcc

SEQ ID NO: 14140 - RNA, 20 nt, Artificial Sequence
  Synthetic oligonucleotide: CTLA4-217
uucagcggcacaaggcucag

SEQ ID NO: 14141 - RNA, 20 nt, Artificial Sequence
  Synthetic oligonucleotide: CTLA4-218
gcucagcugaaccuggcuac

SEQ ID NO: 14142 - RNA, 20 nt, Artificial Sequence
  Synthetic oligonucleotide: CTLA4-219
caucccugucuucugcaaag

SEQ ID NO: 14143 - RNA, 20 nt, Artificial Sequence
  Synthetic oligonucleotide: CTLA4-220
ccugucuucugcaaagguga

SEQ ID NO: 14144 - RNA, 20 nt, Artificial Sequence
  Synthetic oligonucleotide: CTLA4-221
ugcaaaggugagugagacuu

SEQ ID NO: 14145 - RNA, 20 nt, Artificial Sequence
  Synthetic oligonucleotide: CTLA4-9
gcaaaggugagugagacuuu

SEQ ID NO: 14146 - RNA, 20 nt, Artificial Sequence
  Synthetic oligonucleotide: CTLA4-223
gugagugagacuuuuggagc

SEQ ID NO: 14147 - RNA, 20 nt, Artificial Sequence
  Synthetic oligonucleotide: CTLA4-861
gagacuuuuggagcaugaag

SEQ ID NO: 14148 - RNA, 20 nt, Artificial Sequence
  Synthetic oligonucleotide: CTLA4-10
agacuuuuggagcaugaaga

SEQ ID NO: 14149 - RNA, 20 nt, Artificial Sequence
  Synthetic oligonucleotide: CTLA4-863
acuuuuggagcaugaagaug

SEQ ID NO: 14150 - RNA, 20 nt, Artificial Sequence
  Synthetic oligonucleotide: CTLA4-493
cuuuuggagcaugaagaugg

SEQ ID NO: 14151 - RNA, 20 nt, Artificial Sequence
  Synthetic oligonucleotide: CTLA4-865
ggaggagguguuucuccuac

SEQ ID NO: 14152 - RNA, 20 nt, Artificial Sequence
  Synthetic oligonucleotide: CTLA4-866
gcagugauuuauagcaaagc

SEQ ID NO: 14153 - RNA, 20 nt, Artificial Sequence
  Synthetic oligonucleotide: CTLA4-867
gcuuggcuggcucuguauuc

SEQ ID NO: 14154 - RNA, 20 nt, Artificial Sequence
  Synthetic oligonucleotide: CTLA4-868
gcucuguauuccagggccag

SEQ ID NO: 14155 - RNA, 20 nt, Artificial Sequence
  Synthetic oligonucleotide: CTLA4-504
cucuguauuccagggccagc

SEQ ID NO: 14156 - RNA, 20 nt, Artificial Sequence
  Synthetic oligonucleotide: CTLA4-505
ucuguauuccagggccagca

SEQ ID NO: 14157 - RNA, 20 nt, Artificial Sequence
  Synthetic oligonucleotide: CTLA4-871
ccagggccagcagggagcag

SEQ ID NO: 14158 - RNA, 20 nt, Artificial Sequence
  Synthetic oligonucleotide: CTLA4-872
gggcggcagcaaauaaggca

SEQ ID NO: 14159 - RNA, 20 nt, Artificial Sequence
  Synthetic oligonucleotide: CTLA4-873
aauaaggcaaagagauagcu

SEQ ID NO: 14160 - RNA, 20 nt, Artificial Sequence
  Synthetic oligonucleotide: CTLA4-874
ggcaaagagauagcucagaa

SEQ ID NO: 14161 - RNA, 20 nt, Artificial Sequence
  Synthetic oligonucleotide: CTLA4-875
acagagcgccagguauuuag

SEQ ID NO: 14162 - RNA, 20 nt, Artificial Sequence
  Synthetic oligonucleotide: CTLA4-511
cagagcgccagguauuuagu

SEQ ID NO: 14163 - RNA, 20 nt, Artificial Sequence
  Synthetic oligonucleotide: CTLA4-877
agguauuuaguaggggcuuc

SEQ ID NO: 14164 - RNA, 20 nt, Artificial Sequence
  Synthetic oligonucleotide: CTLA4-878
uaggggcuucaugaaugcau

SEQ ID NO: 14165 - RNA, 20 nt, Artificial Sequence
  Synthetic oligonucleotide: CTLA4-879
augcaugugaguugguuuag

SEQ ID NO: 14166 - RNA, 20 nt, Artificial Sequence
  Synthetic oligonucleotide: CTLA4-880
gcaugugaguugguuuagua

SEQ ID NO: 14167 - RNA, 20 nt, Artificial Sequence
  Synthetic oligonucleotide: CTLA4-881
aggcaauuucagacccuucu

SEQ ID NO: 14168 - RNA, 20 nt, Artificial Sequence
  Synthetic oligonucleotide: CTLA4-882
uuucagacccuucuaugaga

SEQ ID NO: 14169 - RNA, 20 nt, Artificial Sequence
  Synthetic oligonucleotide: CTLA4-516
uucagacccuucuaugagac

SEQ ID NO: 14170 - RNA, 20 nt, Artificial Sequence
  Synthetic oligonucleotide: CTLA4-884
uaugagacuggaagugauuu

SEQ ID NO: 14171 - RNA, 20 nt, Artificial Sequence
  Synthetic oligonucleotide: CTLA4-885
ugagacuggaagugauuuaa

SEQ ID NO: 14172 - RNA, 20 nt, Artificial Sequence
  Synthetic oligonucleotide: CTLA4-517
gagacuggaagugauuuaag

SEQ ID NO: 14173 - RNA, 20 nt, Artificial Sequence
  Synthetic oligonucleotide: CTLA4-518
agacuggaagugauuuaaga

SEQ ID NO: 14174 - RNA, 20 nt, Artificial Sequence
  Synthetic oligonucleotide: CTLA4-888
uggaagugauuuaagaggga

SEQ ID NO: 14175 - RNA, 20 nt, Artificial Sequence
  Synthetic oligonucleotide: CTLA4-889
gggaaaggauagccauaguc

SEQ ID NO: 14176 - RNA, 20 nt, Artificial Sequence
  Synthetic oligonucleotide: CTLA4-890
agccauaguccugaauacau

SEQ ID NO: 14177 - RNA, 20 nt, Artificial Sequence
  Synthetic oligonucleotide: CTLA4-891
uaguccugaauacauuugag

SEQ ID NO: 14178 - RNA, 20 nt, Artificial Sequence
  Synthetic oligonucleotide: CTLA4-892
aauacauuugagcuggguuu

SEQ ID NO: 14179 - RNA, 20 nt, Artificial Sequence
  Synthetic oligonucleotide: CTLA4-893
cauuugagcuggguuucagg

SEQ ID NO: 14180 - RNA, 17 nt, Artificial Sequence
  Synthetic oligonucleotide: CTLA4-894
aauccugccauuagccc

SEQ ID NO: 14181 - RNA, 17 nt, Artificial Sequence
  Synthetic oligonucleotide: CTLA4-895
ccauuagcccaagggcu

SEQ ID NO: 14182 - RNA, 17 nt, Artificial Sequence
  Synthetic oligonucleotide: CTLA4-896
uuagcagccuaguaguu

SEQ ID NO: 14183 - RNA, 17 nt, Artificial Sequence
  Synthetic oligonucleotide: CTLA4-574
uagcagccuaguaguuu

SEQ ID NO: 14184 - RNA, 17 nt, Artificial Sequence
  Synthetic oligonucleotide: CTLA4-898
uaguuuuggaguuguca

SEQ ID NO: 14185 - RNA, 17 nt, Artificial Sequence
  Synthetic oligonucleotide: CTLA4-899
uuggaguugucaaugaa

SEQ ID NO: 14186 - RNA, 17 nt, Artificial Sequence
  Synthetic oligonucleotide: CTLA4-900
guugucaaugaaaugaa

SEQ ID NO: 14187 - RNA, 17 nt, Artificial Sequence
  Synthetic oligonucleotide: CTLA4-901
caaugaaaugaauugga

SEQ ID NO: 14188 - RNA, 17 nt, Artificial Sequence
  Synthetic oligonucleotide: CTLA4-902
aauuggacuggaugguu

SEQ ID NO: 14189 - RNA, 17 nt, Artificial Sequence
  Synthetic oligonucleotide: CTLA4-903
ggaugguuaaggaugcc

SEQ ID NO: 14190 - RNA, 17 nt, Artificial Sequence
  Synthetic oligonucleotide: CTLA4-904
uaaggaugcccagaaga

SEQ ID NO: 14191 - RNA, 17 nt, Artificial Sequence
  Synthetic oligonucleotide: CTLA4-905
cagaagauugaauaaaa

SEQ ID NO: 14192 - RNA, 17 nt, Artificial Sequence
  Synthetic oligonucleotide: CTLA4-579
agaagauugaauaaaau

SEQ ID NO: 14193 - RNA, 17 nt, Artificial Sequence
  Synthetic oligonucleotide: CTLA4-907
ugaauaaaauugggauu

SEQ ID NO: 14194 - RNA, 17 nt, Artificial Sequence
  Synthetic oligonucleotide: CTLA4-581
gaauaaaauugggauuu

SEQ ID NO: 14195 - RNA, 17 nt, Artificial Sequence
  Synthetic oligonucleotide: CTLA4-909
auaaaauugggauuuag

SEQ ID NO: 14196 - RNA, 17 nt, Artificial Sequence
  Synthetic oligonucleotide: CTLA4-910
ggaggacccuuguacuc

SEQ ID NO: 14197 - RNA, 17 nt, Artificial Sequence
  Synthetic oligonucleotide: CTLA4-583
gaggacccuuguacucc

SEQ ID NO: 14198 - RNA, 17 nt, Artificial Sequence
  Synthetic oligonucleotide: CTLA4-912
uuauccagauccucaaa

SEQ ID NO: 14199 - RNA, 17 nt, Artificial Sequence
  Synthetic oligonucleotide: CTLA4-913
agauccucaaagugaac

SEQ ID NO: 14200 - RNA, 17 nt, Artificial Sequence
  Synthetic oligonucleotide: CTLA4-914
gaagcuucaguuucaaa

SEQ ID NO: 14201 - RNA, 17 nt, Artificial Sequence
  Synthetic oligonucleotide: CTLA4-915
gaauacauuuuccaucc

SEQ ID NO: 14202 - RNA, 17 nt, Artificial Sequence
  Synthetic oligonucleotide: CTLA4-916
uggcuuguuuuguucag

SEQ ID NO: 14203 - RNA, 17 nt, Artificial Sequence
  Synthetic oligonucleotide: CTLA4-917
uuuguucaguugagugc

SEQ ID NO: 14204 - RNA, 17 nt, Artificial Sequence
  Synthetic oligonucleotide: CTLA4-918
acauguguaauacauau

SEQ ID NO: 14205 - RNA, 17 nt, Artificial Sequence
  Synthetic oligonucleotide: CTLA4-589
cauguguaauacauauc

SEQ ID NO: 14206 - RNA, 17 nt, Artificial Sequence
  Synthetic oligonucleotide: CTLA4-920
aaaguccuugauucugu

SEQ ID NO: 14207 - RNA, 17 nt, Artificial Sequence
  Synthetic oligonucleotide: CTLA4-921
aacacauuucaaagcuu

SEQ ID NO: 14208 - RNA, 17 nt, Artificial Sequence
  Synthetic oligonucleotide: CTLA4-922
uucaaagcuucaggauc

SEQ ID NO: 14209 - RNA, 17 nt, Artificial Sequence
  Synthetic oligonucleotide: CTLA4-923
agguuuugcucuacuuc

SEQ ID NO: 14210 - RNA, 17 nt, Artificial Sequence
  Synthetic oligonucleotide: CTLA4-924
cucuacuuccugaagac

SEQ ID NO: 14211 - RNA, 17 nt, Artificial Sequence
  Synthetic oligonucleotide: CTLA4-246
uaaagccauggcuugcc

SEQ ID NO: 14212 - RNA, 17 nt, Artificial Sequence
  Synthetic oligonucleotide: CTLA4-247
agcggcacaaggcucag

SEQ ID NO: 14213 - RNA, 17 nt, Artificial Sequence
  Synthetic oligonucleotide: CTLA4-248
cagcugaaccuggcuac

SEQ ID NO: 14214 - RNA, 17 nt, Artificial Sequence
  Synthetic oligonucleotide: CTLA4-249
cccugucuucugcaaag

SEQ ID NO: 14215 - RNA, 17 nt, Artificial Sequence
  Synthetic oligonucleotide: CTLA4-250
gucuucugcaaagguga

SEQ ID NO: 14216 - RNA, 17 nt, Artificial Sequence
  Synthetic oligonucleotide: CTLA4-251
aaaggugagugagacuu

SEQ ID NO: 14217 - RNA, 17 nt, Artificial Sequence
  Synthetic oligonucleotide: CTLA4-81
aaggugagugagacuuu

SEQ ID NO: 14218 - RNA, 17 nt, Artificial Sequence
  Synthetic oligonucleotide: CTLA4-253
agugagacuuuuggagc

SEQ ID NO: 14219 - RNA, 17 nt, Artificial Sequence
  Synthetic oligonucleotide: CTLA4-933
acuuuuggagcaugaag

SEQ ID NO: 14220 - RNA, 17 nt, Artificial Sequence
  Synthetic oligonucleotide: CTLA4-82
cuuuuggagcaugaaga

SEQ ID NO: 14221 - RNA, 17 nt, Artificial Sequence
  Synthetic oligonucleotide: CTLA4-935
uuuggagcaugaagaug

SEQ ID NO: 14222 - RNA, 17 nt, Artificial Sequence
  Synthetic oligonucleotide: CTLA4-605
uuggagcaugaagaugg

SEQ ID NO: 14223 - RNA, 17 nt, Artificial Sequence
  Synthetic oligonucleotide: CTLA4-937
ggagguguuucuccuac

SEQ ID NO: 14224 - RNA, 17 nt, Artificial Sequence
  Synthetic oligonucleotide: CTLA4-938
gugauuuauagcaaagc

SEQ ID NO: 14225 - RNA, 17 nt, Artificial Sequence
  Synthetic oligonucleotide: CTLA4-939
uggcuggcucuguauuc

SEQ ID NO: 14226 - RNA, 17 nt, Artificial Sequence
  Synthetic oligonucleotide: CTLA4-940
cuguauuccagggccag

SEQ ID NO: 14227 - RNA, 17 nt, Artificial Sequence
  Synthetic oligonucleotide: CTLA4-616
uguauuccagggccagc

SEQ ID NO: 14228 - RNA, 17 nt, Artificial Sequence
  Synthetic oligonucleotide: CTLA4-617
guauuccagggccagca

SEQ ID NO: 14229 - RNA, 17 nt, Artificial Sequence
  Synthetic oligonucleotide: CTLA4-943
gggccagcagggagcag

SEQ ID NO: 14230 - RNA, 17 nt, Artificial Sequence
  Synthetic oligonucleotide: CTLA4-944
cggcagcaaauaaggca

SEQ ID NO: 14231 - RNA, 17 nt, Artificial Sequence
  Synthetic oligonucleotide: CTLA4-945
aaggcaaagagauagcu

SEQ ID NO: 14232 - RNA, 17 nt, Artificial Sequence
  Synthetic oligonucleotide: CTLA4-946
aaagagauagcucagaa

SEQ ID NO: 14233 - RNA, 17 nt, Artificial Sequence
  Synthetic oligonucleotide: CTLA4-947
gagcgccagguauuuag

SEQ ID NO: 14234 - RNA, 17 nt, Artificial Sequence
  Synthetic oligonucleotide: CTLA4-623
agcgccagguauuuagu

SEQ ID NO: 14235 - RNA, 17 nt, Artificial Sequence
  Synthetic oligonucleotide: CTLA4-949
uauuuaguaggggcuuc

SEQ ID NO: 14236 - RNA, 17 nt, Artificial Sequence
  Synthetic oligonucleotide: CTLA4-950
gggcuucaugaaugcau

SEQ ID NO: 14237 - RNA, 17 nt, Artificial Sequence
  Synthetic oligonucleotide: CTLA4-951
caugugaguugguuuag

SEQ ID NO: 14238 - RNA, 17 nt, Artificial Sequence
  Synthetic oligonucleotide: CTLA4-952
ugugaguugguuuagua

SEQ ID NO: 14239 - RNA, 17 nt, Artificial Sequence
  Synthetic oligonucleotide: CTLA4-953
caauuucagacccuucu

SEQ ID NO: 14240 - RNA, 17 nt, Artificial Sequence
  Synthetic oligonucleotide: CTLA4-954
cagacccuucuaugaga

SEQ ID NO: 14241 - RNA, 17 nt, Artificial Sequence
  Synthetic oligonucleotide: CTLA4-628
agacccuucuaugagac

SEQ ID NO: 14242 - RNA, 17 nt, Artificial Sequence
  Synthetic oligonucleotide: CTLA4-956
gagacuggaagugauuu

SEQ ID NO: 14243 - RNA, 17 nt, Artificial Sequence
  Synthetic oligonucleotide: CTLA4-957
gacuggaagugauuuaa

SEQ ID NO: 14244 - RNA, 17 nt, Artificial Sequence
  Synthetic oligonucleotide: CTLA4-629
acuggaagugauuuaag

SEQ ID NO: 14245 - RNA, 17 nt, Artificial Sequence
  Synthetic oligonucleotide: CTLA4-630
cuggaagugauuuaaga

SEQ ID NO: 14246 - RNA, 17 nt, Artificial Sequence
  Synthetic oligonucleotide: CTLA4-960
aagugauuuaagaggga

SEQ ID NO: 14247 - RNA, 17 nt, Artificial Sequence
  Synthetic oligonucleotide: CTLA4-961
aaaggauagccauaguc

SEQ ID NO: 14248 - RNA, 17 nt, Artificial Sequence
  Synthetic oligonucleotide: CTLA4-962
cauaguccugaauacau

SEQ ID NO: 14249 - RNA, 17 nt, Artificial Sequence
  Synthetic oligonucleotide: CTLA4-963
uccugaauacauuugag

SEQ ID NO: 14250 - RNA, 17 nt, Artificial Sequence
  Synthetic oligonucleotide: CTLA4-964
acauuugagcuggguuu

SEQ ID NO: 14251 - RNA, 17 nt, Artificial Sequence
  Synthetic oligonucleotide: CTLA4-965
uugagcuggguuucagg

SEQ ID NO: 14252 - RNA, 20 nt, Artificial Sequence
  Synthetic oligonucleotide: CTLA4-966
cugagcccuugggcuaaugg

SEQ ID NO: 14253 - RNA, 20 nt, Artificial Sequence
  Synthetic oligonucleotide: CTLA4-967
gcugcuaacuuucugagccc

SEQ ID NO: 14254 - RNA, 20 nt, Artificial Sequence
  Synthetic oligonucleotide: CTLA4-968
acuacuaggcugcuaacuuu

SEQ ID NO: 14255 - RNA, 20 nt, Artificial Sequence
  Synthetic oligonucleotide: CTLA4-969
ucccaauuuuauucaaucuu

SEQ ID NO: 14256 - RNA, 20 nt, Artificial Sequence
  Synthetic oligonucleotide: CTLA4-970
uggagaauuuccuggaguac

SEQ ID NO: 14257 - RNA, 20 nt, Artificial Sequence
  Synthetic oligonucleotide: CTLA4-562
uggagacuuggagaauuucc

SEQ ID NO: 14258 - RNA, 20 nt, Artificial Sequence
  Synthetic oligonucleotide: CTLA4-972
guggagacuuggagaauuuc

SEQ ID NO: 14259 - RNA, 20 nt, Artificial Sequence
  Synthetic oligonucleotide: CTLA4-973
gauaacuaaguggagacuug

SEQ ID NO: 14260 - RNA, 20 nt, Artificial Sequence
  Synthetic oligonucleotide: CTLA4-561
uggauaacuaaguggagacu

SEQ ID NO: 14261 - RNA, 20 nt, Artificial Sequence
  Synthetic oligonucleotide: CTLA4-975
cuggauaacuaaguggagac

SEQ ID NO: 14262 - RNA, 20 nt, Artificial Sequence
  Synthetic oligonucleotide: CTLA4-560
ugaggaucuggauaacuaag

SEQ ID NO: 14263 - RNA, 20 nt, Artificial Sequence
  Synthetic oligonucleotide: CTLA4-977
uugaggaucuggauaacuaa

SEQ ID NO: 14264 - RNA, 20 nt, Artificial Sequence
  Synthetic oligonucleotide: CTLA4-978
uucauguucacuuugaggau

SEQ ID NO: 14265 - RNA, 20 nt, Artificial Sequence
  Synthetic oligonucleotide: CTLA4-979
ugaagcuucauguucacuuu

SEQ ID NO: 14266 - RNA, 20 nt, Artificial Sequence
  Synthetic oligonucleotide: CTLA4-980
acugaagcuucauguucacu

SEQ ID NO: 14267 - RNA, 20 nt, Artificial Sequence
  Synthetic oligonucleotide: CTLA4-981
aaaauguauucaauuugaaa

SEQ ID NO: 14268 - RNA, 20 nt, Artificial Sequence
  Synthetic oligonucleotide: CTLA4-982
ggauggaaaauguauucaau

SEQ ID NO: 14269 - RNA, 20 nt, Artificial Sequence
  Synthetic oligonucleotide: CTLA4-557
aaaacaagccaauccaugga

SEQ ID NO: 14270 - RNA, 20 nt, Artificial Sequence
  Synthetic oligonucleotide: CTLA4-984
caaaacaagccaauccaugg

SEQ ID NO: 14271 - RNA, 20 nt, Artificial Sequence
  Synthetic oligonucleotide: CTLA4-985
ugaacaaaacaagccaaucc

SEQ ID NO: 14272 - RNA, 20 nt, Artificial Sequence
  Synthetic oligonucleotide: CTLA4-986
agacaaccucaagcacucaa

SEQ ID NO: 14273 - RNA, 20 nt, Artificial Sequence
  Synthetic oligonucleotide: CTLA4-987
ccguggguuuagcuguuacg

SEQ ID NO: 14274 - RNA, 20 nt, Artificial Sequence
  Synthetic oligonucleotide: CTLA4-988
guuuuacgagaaaggaagcc

SEQ ID NO: 14275 - RNA, 20 nt, Artificial Sequence
  Synthetic oligonucleotide: CTLA4-553
uuguuuugguuuuacgagaa

SEQ ID NO: 14276 - RNA, 20 nt, Artificial Sequence
  Synthetic oligonucleotide: CTLA4-990
uuuguuuugguuuuacgaga

SEQ ID NO: 14277 - RNA, 20 nt, Artificial Sequence
  Synthetic oligonucleotide: CTLA4-991
ccuuuuuguuuugguuuuac

SEQ ID NO: 14278 - RNA, 20 nt, Artificial Sequence
  Synthetic oligonucleotide: CTLA4-992
agccuuuuuguuuugguuuu

SEQ ID NO: 14279 - RNA, 20 nt, Artificial Sequence
  Synthetic oligonucleotide: CTLA4-993
acacacagaaggcacuugaa

SEQ ID NO: 14280 - RNA, 20 nt, Artificial Sequence
  Synthetic oligonucleotide: CTLA4-994
ugugcacacacagaaggcac

SEQ ID NO: 14281 - RNA, 20 nt, Artificial Sequence
  Synthetic oligonucleotide: CTLA4-995
guauuacacaugugcacaca

SEQ ID NO: 14282 - RNA, 20 nt, Artificial Sequence
  Synthetic oligonucleotide: CTLA4-996
guuugaacccacacagaauc

SEQ ID NO: 14283 - RNA, 20 nt, Artificial Sequence
  Synthetic oligonucleotide: CTLA4-997
gaaauguguuugaacccaca

SEQ ID NO: 14284 - RNA, 20 nt, Artificial Sequence
  Synthetic oligonucleotide: CTLA4-998
ccugaagcuuugaaaugugu

SEQ ID NO: 14285 - RNA, 20 nt, Artificial Sequence
  Synthetic oligonucleotide: CTLA4-999
ccuuucaggauccugaagcu

SEQ ID NO: 14286 - RNA, 20 nt, Artificial Sequence
  Synthetic oligonucleotide: CTLA4-1000
gagcaaaaccuuucaggauc

SEQ ID NO: 14287 - RNA, 20 nt, Artificial Sequence
  Synthetic oligonucleotide: CTLA4-1001
ggaaguagagcaaaaccuuu

SEQ ID NO: 14288 - RNA, 20 nt, Artificial Sequence
  Synthetic oligonucleotide: CTLA4-1002
guguucaggucuucaggaag

SEQ ID NO: 14289 - RNA, 20 nt, Artificial Sequence
  Synthetic oligonucleotide: CTLA4-548
ggagcgguguucaggucuuc

SEQ ID NO: 14290 - RNA, 20 nt, Artificial Sequence
  Synthetic oligonucleotide: CTLA4-1004
gggagcgguguucaggucuu

SEQ ID NO: 14291 - RNA, 20 nt, Artificial Sequence
  Synthetic oligonucleotide: CTLA4-70
aaggcaagccauggcuuuau

SEQ ID NO: 14292 - RNA, 20 nt, Artificial Sequence
  Synthetic oligonucleotide: CTLA4-69
caaggcaagccauggcuuua

SEQ ID NO: 14293 - RNA, 20 nt, Artificial Sequence
  Synthetic oligonucleotide: CTLA4-278
ccaaggcaagccauggcuuu

SEQ ID NO: 14294 - RNA, 20 nt, Artificial Sequence
  Synthetic oligonucleotide: CTLA4-279
uucagcugagccuugugccg

SEQ ID NO: 14295 - RNA, 20 nt, Artificial Sequence
  Synthetic oligonucleotide: CTLA4-280
guccugguagccagguucag

SEQ ID NO: 14296 - RNA, 20 nt, Artificial Sequence
  Synthetic oligonucleotide: CTLA4-281
gaagaaaaaacaggagagug

SEQ ID NO: 14297 - RNA, 20 nt, Artificial Sequence
  Synthetic oligonucleotide: CTLA4-282
augaagagaagaaaaaacag

SEQ ID NO: 14298 - RNA, 20 nt, Artificial Sequence
  Synthetic oligonucleotide: CTLA4-61
ggaugaagagaagaaaaaac

SEQ ID NO: 14299 - RNA, 20 nt, Artificial Sequence
  Synthetic oligonucleotide: CTLA4-284
gggaugaagagaagaaaaaa

SEQ ID NO: 14300 - RNA, 20 nt, Artificial Sequence
  Synthetic oligonucleotide: CTLA4-285
cagaagacagggaugaagag

SEQ ID NO: 14301 - RNA, 20 nt, Artificial Sequence
  Synthetic oligonucleotide: CTLA4-286
uugcagaagacagggaugaa

SEQ ID NO: 14302 - RNA, 20 nt, Artificial Sequence
  Synthetic oligonucleotide: CTLA4-287
cuuugcagaagacagggaug

SEQ ID NO: 14303 - RNA, 20 nt, Artificial Sequence
  Synthetic oligonucleotide: CTLA4-288
caccuuugcagaagacaggg

SEQ ID NO: 14304 - RNA, 20 nt, Artificial Sequence
  Synthetic oligonucleotide: CTLA4-59
cacucaccuuugcagaagac

SEQ ID NO: 14305 - RNA, 20 nt, Artificial Sequence
  Synthetic oligonucleotide: CTLA4-290
ucacucaccuuugcagaaga

SEQ ID NO: 14306 - RNA, 20 nt, Artificial Sequence
  Synthetic oligonucleotide: CTLA4-291
aaaagucucacucaccuuug

SEQ ID NO: 14307 - RNA, 20 nt, Artificial Sequence
  Synthetic oligonucleotide: CTLA4-1021
aacaaaugaaacccagguag

SEQ ID NO: 14308 - RNA, 20 nt, Artificial Sequence
  Synthetic oligonucleotide: CTLA4-533
gaaacaaaugaaacccaggu

SEQ ID NO: 14309 - RNA, 20 nt, Artificial Sequence
  Synthetic oligonucleotide: CTLA4-1023
ugaaacaaaugaaacccagg

SEQ ID NO: 14310 - RNA, 20 nt, Artificial Sequence
  Synthetic oligonucleotide: CTLA4-1024
gccuuugacugcugaaacaa

SEQ ID NO: 14311 - RNA, 20 nt, Artificial Sequence
  Synthetic oligonucleotide: CTLA4-1025
uaaaucacugccuuugacug

SEQ ID NO: 14312 - RNA, 20 nt, Artificial Sequence
  Synthetic oligonucleotide: CTLA4-530
cagagccagccaagccagau

SEQ ID NO: 14313 - RNA, 20 nt, Artificial Sequence
  Synthetic oligonucleotide: CTLA4-1027
acagagccagccaagccaga

SEQ ID NO: 14314 - RNA, 20 nt, Artificial Sequence
  Synthetic oligonucleotide: CTLA4-1028
ucccugcuggcccuggaaua

SEQ ID NO: 14315 - RNA, 20 nt, Artificial Sequence
  Synthetic oligonucleotide: CTLA4-529
caacugcucccugcuggccc

SEQ ID NO: 14316 - RNA, 20 nt, Artificial Sequence
  Synthetic oligonucleotide: CTLA4-1030
ccaacugcucccugcuggcc

SEQ ID NO: 14317 - RNA, 20 nt, Artificial Sequence
  Synthetic oligonucleotide: CTLA4-1031
uaaauaccuggcgcucuguu

SEQ ID NO: 14318 - RNA, 20 nt, Artificial Sequence
  Synthetic oligonucleotide: CTLA4-1032
aaaccaacucacaugcauuc

SEQ ID NO: 14319 - RNA, 20 nt, Artificial Sequence
  Synthetic oligonucleotide: CTLA4-1033
uuccagucucauagaagggu

SEQ ID NO: 14320 - RNA, 20 nt, Artificial Sequence
  Synthetic oligonucleotide: CTLA4-1034
aaucacuuccagucucauag

SEQ ID NO: 14321 - RNA, 20 nt, Artificial Sequence
  Synthetic oligonucleotide: CTLA4-1035
uuaaaucacuuccagucuca

SEQ ID NO: 14322 - RNA, 20 nt, Artificial Sequence
  Synthetic oligonucleotide: CTLA4-1036
aaacccagcucaaauguauu

SEQ ID NO: 14323 - RNA, 20 nt, Artificial Sequence
  Synthetic oligonucleotide: CTLA4-1037
aaggaacuugugagcucauc

SEQ ID NO: 14324 - RNA, 20 nt, Artificial Sequence
  Synthetic oligonucleotide: CTLA4-1038
aauuuuuuuuaaaggaacuu

SEQ ID NO: 14325 - RNA, 20 nt, Artificial Sequence
  Synthetic oligonucleotide: CTLA4-1039
aagucaauuuuuuuuaaagg

SEQ ID NO: 14326 - RNA, 20 nt, Artificial Sequence
  Synthetic oligonucleotide: CTLA4-1039
aagucaauuuuuuuuaaagg

SEQ ID NO: 14327 - RNA, 17 nt, Artificial Sequence
  Synthetic oligonucleotide: CTLA4-1041
agcccuugggcuaaugg

SEQ ID NO: 14328 - RNA, 17 nt, Artificial Sequence
  Synthetic oligonucleotide: CTLA4-1042
gcuaacuuucugagccc

SEQ ID NO: 14329 - RNA, 17 nt, Artificial Sequence
  Synthetic oligonucleotide: CTLA4-1043
acuaggcugcuaacuuu

SEQ ID NO: 14330 - RNA, 17 nt, Artificial Sequence
  Synthetic oligonucleotide: CTLA4-1044
caauuuuauucaaucuu

SEQ ID NO: 14331 - RNA, 17 nt, Artificial Sequence
  Synthetic oligonucleotide: CTLA4-1045
agaauuuccuggaguac

SEQ ID NO: 14332 - RNA, 17 nt, Artificial Sequence
  Synthetic oligonucleotide: CTLA4-674
agacuuggagaauuucc

SEQ ID NO: 14333 - RNA, 17 nt, Artificial Sequence
  Synthetic oligonucleotide: CTLA4-1047
gagacuuggagaauuuc

SEQ ID NO: 14334 - RNA, 17 nt, Artificial Sequence
  Synthetic oligonucleotide: CTLA4-1048
aacuaaguggagacuug

SEQ ID NO: 14335 - RNA, 17 nt, Artificial Sequence
  Synthetic oligonucleotide: CTLA4-673
auaacuaaguggagacu

SEQ ID NO: 14336 - RNA, 17 nt, Artificial Sequence
  Synthetic oligonucleotide: CTLA4-1050
gauaacuaaguggagac

SEQ ID NO: 14337 - RNA, 17 nt, Artificial Sequence
  Synthetic oligonucleotide: CTLA4-672
ggaucuggauaacuaag

SEQ ID NO: 14338 - RNA, 17 nt, Artificial Sequence
  Synthetic oligonucleotide: CTLA4-1052
aggaucuggauaacuaa

SEQ ID NO: 14339 - RNA, 17 nt, Artificial Sequence
  Synthetic oligonucleotide: CTLA4-1053
auguucacuuugaggau

SEQ ID NO: 14340 - RNA, 17 nt, Artificial Sequence
  Synthetic oligonucleotide: CTLA4-1054
agcuucauguucacuuu

SEQ ID NO: 14341 - RNA, 17 nt, Artificial Sequence
  Synthetic oligonucleotide: CTLA4-1055
gaagcuucauguucacu

SEQ ID NO: 14342 - RNA, 17 nt, Artificial Sequence
  Synthetic oligonucleotide: CTLA4-1056
auguauucaauuugaaa

SEQ ID NO: 14343 - RNA, 17 nt, Artificial Sequence
  Synthetic oligonucleotide: CTLA4-1057
uggaaaauguauucaau

SEQ ID NO: 14344 - RNA, 17 nt, Artificial Sequence
  Synthetic oligonucleotide: CTLA4-669
acaagccaauccaugga

SEQ ID NO: 14345 - RNA, 17 nt, Artificial Sequence
  Synthetic oligonucleotide: CTLA4-1059
aacaagccaauccaugg

SEQ ID NO: 14346 - RNA, 17 nt, Artificial Sequence
  Synthetic oligonucleotide: CTLA4-1060
acaaaacaagccaaucc

SEQ ID NO: 14347 - RNA, 17 nt, Artificial Sequence
  Synthetic oligonucleotide: CTLA4-1061
caaccucaagcacucaa

SEQ ID NO: 14348 - RNA, 17 nt, Artificial Sequence
  Synthetic oligonucleotide: CTLA4-1062
uggguuuagcuguuacg

SEQ ID NO: 14349 - RNA, 17 nt, Artificial Sequence
  Synthetic oligonucleotide: CTLA4-1063
uuacgagaaaggaagcc

SEQ ID NO: 14350 - RNA, 17 nt, Artificial Sequence
  Synthetic oligonucleotide: CTLA4-665
uuuugguuuuacgagaa

SEQ ID NO: 14351 - RNA, 17 nt, Artificial Sequence
  Synthetic oligonucleotide: CTLA4-1065
guuuugguuuuacgaga

SEQ ID NO: 14352 - RNA, 17 nt, Artificial Sequence
  Synthetic oligonucleotide: CTLA4-1066
uuuuguuuugguuuuac

SEQ ID NO: 14353 - RNA, 17 nt, Artificial Sequence
  Synthetic oligonucleotide: CTLA4-1067
cuuuuuguuuugguuuu

SEQ ID NO: 14354 - RNA, 17 nt, Artificial Sequence
  Synthetic oligonucleotide: CTLA4-1068
cacagaaggcacuugaa

SEQ ID NO: 14355 - RNA, 17 nt, Artificial Sequence
  Synthetic oligonucleotide: CTLA4-1069
gcacacacagaaggcac

SEQ ID NO: 14356 - RNA, 17 nt, Artificial Sequence
  Synthetic oligonucleotide: CTLA4-1070
uuacacaugugcacaca

SEQ ID NO: 14357 - RNA, 17 nt, Artificial Sequence
  Synthetic oligonucleotide: CTLA4-1071
ugaacccacacagaauc

SEQ ID NO: 14358 - RNA, 17 nt, Artificial Sequence
  Synthetic oligonucleotide: CTLA4-1072
auguguuugaacccaca

SEQ ID NO: 14359 - RNA, 17 nt, Artificial Sequence
  Synthetic oligonucleotide: CTLA4-1073
gaagcuuugaaaugugu

SEQ ID NO: 14360 - RNA, 17 nt, Artificial Sequence
  Synthetic oligonucleotide: CTLA4-1074
uucaggauccugaagcu

SEQ ID NO: 14361 - RNA, 17 nt, Artificial Sequence
  Synthetic oligonucleotide: CTLA4-1075
caaaaccuuucaggauc

SEQ ID NO: 14362 - RNA, 17 nt, Artificial Sequence
  Synthetic oligonucleotide: CTLA4-1076
aguagagcaaaaccuuu

SEQ ID NO: 14363 - RNA, 17 nt, Artificial Sequence
  Synthetic oligonucleotide: CTLA4-1077
uucaggucuucaggaag

SEQ ID NO: 14364 - RNA, 17 nt, Artificial Sequence
  Synthetic oligonucleotide: CTLA4-660
gcgguguucaggucuuc

SEQ ID NO: 14365 - RNA, 17 nt, Artificial Sequence
  Synthetic oligonucleotide: CTLA4-1079
agcgguguucaggucuu

SEQ ID NO: 14366 - RNA, 17 nt, Artificial Sequence
  Synthetic oligonucleotide: CTLA4-142
gcaagccauggcuuuau

SEQ ID NO: 14367 - RNA, 17 nt, Artificial Sequence
  Synthetic oligonucleotide: CTLA4-141
ggcaagccauggcuuua

SEQ ID NO: 14368 - RNA, 17 nt, Artificial Sequence
  Synthetic oligonucleotide: CTLA4-313
aggcaagccauggcuuu

SEQ ID NO: 14369 - RNA, 17 nt, Artificial Sequence
  Synthetic oligonucleotide: CTLA4-314
agcugagccuugugccg

SEQ ID NO: 14370 - RNA, 17 nt, Artificial Sequence
  Synthetic oligonucleotide: CTLA4-315
cugguagccagguucag

SEQ ID NO: 14371 - RNA, 17 nt, Artificial Sequence
  Synthetic oligonucleotide: CTLA4-316
gaaaaaacaggagagug

SEQ ID NO: 14372 - RNA, 17 nt, Artificial Sequence
  Synthetic oligonucleotide: CTLA4-317
aagagaagaaaaaacag

SEQ ID NO: 14373 - RNA, 17 nt, Artificial Sequence
  Synthetic oligonucleotide: CTLA4-133
ugaagagaagaaaaaac

SEQ ID NO: 14374 - RNA, 17 nt, Artificial Sequence
  Synthetic oligonucleotide: CTLA4-319
augaagagaagaaaaaa

SEQ ID NO: 14375 - RNA, 17 nt, Artificial Sequence
  Synthetic oligonucleotide: CTLA4-320
aagacagggaugaagag

SEQ ID NO: 14376 - RNA, 17 nt, Artificial Sequence
  Synthetic oligonucleotide: CTLA4-321
cagaagacagggaugaa

SEQ ID NO: 14377 - RNA, 17 nt, Artificial Sequence
  Synthetic oligonucleotide: CTLA4-322
ugcagaagacagggaug

SEQ ID NO: 14378 - RNA, 17 nt, Artificial Sequence
  Synthetic oligonucleotide: CTLA4-323
cuuugcagaagacaggg

SEQ ID NO: 14379 - RNA, 17 nt, Artificial Sequence
  Synthetic oligonucleotide: CTLA4-131
ucaccuuugcagaagac

SEQ ID NO: 14380 - RNA, 17 nt, Artificial Sequence
  Synthetic oligonucleotide: CTLA4-325
cucaccuuugcagaaga

SEQ ID NO: 14381 - RNA, 17 nt, Artificial Sequence
  Synthetic oligonucleotide: CTLA4-326
agucucacucaccuuug

SEQ ID NO: 14382 - RNA, 17 nt, Artificial Sequence
  Synthetic oligonucleotide: CTLA4-1096
aaaugaaacccagguag

SEQ ID NO: 14383 - RNA, 17 nt, Artificial Sequence
  Synthetic oligonucleotide: CTLA4-645
acaaaugaaacccaggu

SEQ ID NO: 14384 - RNA, 17 nt, Artificial Sequence
  Synthetic oligonucleotide: CTLA4-1098
aacaaaugaaacccagg

SEQ ID NO: 14385 - RNA, 17 nt, Artificial Sequence
  Synthetic oligonucleotide: CTLA4-1099
uuugacugcugaaacaa

SEQ ID NO: 14386 - RNA, 17 nt, Artificial Sequence
  Synthetic oligonucleotide: CTLA4-1100
aucacugccuuugacug

SEQ ID NO: 14387 - RNA, 17 nt, Artificial Sequence
  Synthetic oligonucleotide: CTLA4-642
agccagccaagccagau

SEQ ID NO: 14388 - RNA, 17 nt, Artificial Sequence
  Synthetic oligonucleotide: CTLA4-1102
gagccagccaagccaga

SEQ ID NO: 14389 - RNA, 17 nt, Artificial Sequence
  Synthetic oligonucleotide: CTLA4-1103
cugcuggcccuggaaua

SEQ ID NO: 14390 - RNA, 17 nt, Artificial Sequence
  Synthetic oligonucleotide: CTLA4-641
cugcucccugcuggccc

SEQ ID NO: 14391 - RNA, 17 nt, Artificial Sequence
  Synthetic oligonucleotide: CTLA4-1105
acugcucccugcuggcc

SEQ ID NO: 14392 - RNA, 17 nt, Artificial Sequence
  Synthetic oligonucleotide: CTLA4-1106
auaccuggcgcucuguu

SEQ ID NO: 14393 - RNA, 17 nt, Artificial Sequence
  Synthetic oligonucleotide: CTLA4-1107
ccaacucacaugcauuc

SEQ ID NO: 14394 - RNA, 17 nt, Artificial Sequence
  Synthetic oligonucleotide: CTLA4-1108
cagucucauagaagggu

SEQ ID NO: 14395 - RNA, 17 nt, Artificial Sequence
  Synthetic oligonucleotide: CTLA4-1109
cacuuccagucucauag

SEQ ID NO: 14396 - RNA, 17 nt, Artificial Sequence
  Synthetic oligonucleotide: CTLA4-1110
aaucacuuccagucuca

SEQ ID NO: 14397 - RNA, 17 nt, Artificial Sequence
  Synthetic oligonucleotide: CTLA4-1111
cccagcucaaauguauu

SEQ ID NO: 14398 - RNA, 17 nt, Artificial Sequence
  Synthetic oligonucleotide: CTLA4-1112
gaacuugugagcucauc

SEQ ID NO: 14399 - RNA, 17 nt, Artificial Sequence
  Synthetic oligonucleotide: CTLA4-1113
uuuuuuuaaaggaacuu

SEQ ID NO: 14400 - RNA, 17 nt, Artificial Sequence
  Synthetic oligonucleotide: CTLA4-1114
aagucaauuuuuuuuaa

SEQ ID NO: 14401 - RNA, 20 nt, Artificial Sequence
  Synthetic oligonucleotide: CTLA4-1115
uucuuucuuuauuaaaaugu

SEQ ID NO: 14402 - RNA, 20 nt, Artificial Sequence
  Synthetic oligonucleotide: CTLA4-1116
uaugaaaacucuccagauuu

SEQ ID NO: 14403 - RNA, 20 nt, Artificial Sequence
  Synthetic oligonucleotide: CTLA4-684
augaaaacucuccagauuua

SEQ ID NO: 14404 - RNA, 20 nt, Artificial Sequence
  Synthetic oligonucleotide: CTLA4-1118
ucuacagcugucacaaauuu

SEQ ID NO: 14405 - RNA, 20 nt, Artificial Sequence
  Synthetic oligonucleotide: CTLA4-1119
guuauauuuaaucuucacuu

SEQ ID NO: 14406 - RNA, 20 nt, Artificial Sequence
  Synthetic oligonucleotide: CTLA4-1120
uucacuuuugaauuuucugc

SEQ ID NO: 14407 - RNA, 20 nt, Artificial Sequence
  Synthetic oligonucleotide: CTLA4-1121
ucugcuugaaaaauuuguau

SEQ ID NO: 14408 - RNA, 20 nt, Artificial Sequence
  Synthetic oligonucleotide: CTLA4-1122
aaaaaaaagucuauccuuuu

SEQ ID NO: 14409 - RNA, 20 nt, Artificial Sequence
  Synthetic oligonucleotide: CTLA4-1123
uuauggacggcucuaaucuc

SEQ ID NO: 14410 - RNA, 20 nt, Artificial Sequence
  Synthetic oligonucleotide: CTLA4-1124
gcucuaaucucuugaaucau

SEQ ID NO: 14411 - RNA, 20 nt, Artificial Sequence
  Synthetic oligonucleotide: CTLA4-1125
ucauuuggguuggcuuuucu

SEQ ID NO: 14412 - RNA, 20 nt, Artificial Sequence
  Synthetic oligonucleotide: CTLA4-1126
ucaacucuguuuugucucug

SEQ ID NO: 14413 - RNA, 20 nt, Artificial Sequence
  Synthetic oligonucleotide: CTLA4-1127
ucuguugaguuaaggcuuuu

SEQ ID NO: 14414 - RNA, 20 nt, Artificial Sequence
  Synthetic oligonucleotide: CTLA4-1128
guuaaggcuuuuaagaacac

SEQ ID NO: 14415 - RNA, 20 nt, Artificial Sequence
  Synthetic oligonucleotide: CTLA4-1129
auucuuuccuucugcaaaac

SEQ ID NO: 14416 - RNA, 20 nt, Artificial Sequence
  Synthetic oligonucleotide: CTLA4-1130
uucucuuaaccaaaugcuaa

SEQ ID NO: 14417 - RNA, 20 nt, Artificial Sequence
  Synthetic oligonucleotide: CTLA4-1131
aaccaaaugcuaaauggauu

SEQ ID NO: 14418 - RNA, 20 nt, Artificial Sequence
  Synthetic oligonucleotide: CTLA4-698
accaaaugcuaaauggauuu

SEQ ID NO: 14419 - RNA, 20 nt, Artificial Sequence
  Synthetic oligonucleotide: CTLA4-1133
caaaugcuaaauggauuuag

SEQ ID NO: 14420 - RNA, 20 nt, Artificial Sequence
  Synthetic oligonucleotide: CTLA4-1134
aacuuauuuguaaagcuguc

SEQ ID NO: 14421 - RNA, 20 nt, Artificial Sequence
  Synthetic oligonucleotide: CTLA4-699
acuuauuuguaaagcuguca

SEQ ID NO: 14422 - RNA, 20 nt, Artificial Sequence
  Synthetic oligonucleotide: CTLA4-1136
uaaagcugucaagggaccau

SEQ ID NO: 14423 - RNA, 20 nt, Artificial Sequence
  Synthetic oligonucleotide: CTLA4-1137
agcugucaagggaccauuag

SEQ ID NO: 14424 - RNA, 20 nt, Artificial Sequence
  Synthetic oligonucleotide: CTLA4-1138
gaaggauggugcuucacaga

SEQ ID NO: 14425 - RNA, 20 nt, Artificial Sequence
  Synthetic oligonucleotide: CTLA4-1139
aauucaagguuuuaaggucc

SEQ ID NO: 14426 - RNA, 20 nt, Artificial Sequence
  Synthetic oligonucleotide: CTLA4-1140
cggauucauauacuuuauaa

SEQ ID NO: 14427 - RNA, 20 nt, Artificial Sequence
  Synthetic oligonucleotide: CTLA4-1141
uagccagcuuguuuaaaaug

SEQ ID NO: 14428 - RNA, 20 nt, Artificial Sequence
  Synthetic oligonucleotide: CTLA4-706
agccagcuuguuuaaaaugu

SEQ ID NO: 14429 - RNA, 20 nt, Artificial Sequence
  Synthetic oligonucleotide: CTLA4-707
gccagcuuguuuaaaaugua

SEQ ID NO: 14430 - RNA, 20 nt, Artificial Sequence
  Synthetic oligonucleotide: CTLA4-1144
guuuaaaauguagggaaauu

SEQ ID NO: 14431 - RNA, 20 nt, Artificial Sequence
  Synthetic oligonucleotide: CTLA4-708
uuuaaaauguagggaaauug

SEQ ID NO: 14432 - RNA, 20 nt, Artificial Sequence
  Synthetic oligonucleotide: CTLA4-709
uuaaaauguagggaaauugu

SEQ ID NO: 14433 - RNA, 20 nt, Artificial Sequence
  Synthetic oligonucleotide: CTLA4-1147
aaauguagggaaauuguggg

SEQ ID NO: 14434 - RNA, 20 nt, Artificial Sequence
  Synthetic oligonucleotide: CTLA4-1148
aauuauuuaaaaauaaaagu

SEQ ID NO: 14435 - RNA, 20 nt, Artificial Sequence
  Synthetic oligonucleotide: CTLA4-1149
aauugccaaaaaaaaaagac

SEQ ID NO: 14436 - RNA, 20 nt, Artificial Sequence
  Synthetic oligonucleotide: CTLA4-712
auugccaaaaaaaaaagaca

SEQ ID NO: 14437 - RNA, 20 nt, Artificial Sequence
  Synthetic oligonucleotide: CTLA4-1151
caaaaaaaaaagacaaggaa

SEQ ID NO: 14438 - RNA, 20 nt, Artificial Sequence
  Synthetic oligonucleotide: CTLA4-713
aaaaaaaaaagacaaggaaa

SEQ ID NO: 14439 - RNA, 20 nt, Artificial Sequence
  Synthetic oligonucleotide: CTLA4-1153
aaaaaagacaaggaaaagga

SEQ ID NO: 14440 - RNA, 20 nt, Artificial Sequence
  Synthetic oligonucleotide: CTLA4-1154
aagacaaggaaaaggaaaga

SEQ ID NO: 14441 - RNA, 20 nt, Artificial Sequence
  Synthetic oligonucleotide: CTLA4-1155
aauuguugccugaccuacgu

SEQ ID NO: 14442 - RNA, 20 nt, Artificial Sequence
  Synthetic oligonucleotide: CTLA4-1156
auccucaguuuucagcucuu

SEQ ID NO: 14443 - RNA, 20 nt, Artificial Sequence
  Synthetic oligonucleotide: CTLA4-1157
uuguuacacggcuuaaaaug

SEQ ID NO: 14444 - RNA, 20 nt, Artificial Sequence
  Synthetic oligonucleotide: CTLA4-1158
uaaaaugaugaguauaucca

SEQ ID NO: 14445 - RNA, 20 nt, Artificial Sequence
  Synthetic oligonucleotide: CTLA4-1159
cucucuagaccuucuugguu

SEQ ID NO: 14446 - RNA, 20 nt, Artificial Sequence
  Synthetic oligonucleotide: CTLA4-1160
uaagaaaccauguaguuugu

SEQ ID NO: 14447 - RNA, 20 nt, Artificial Sequence
  Synthetic oligonucleotide: CTLA4-1161
auuugaugauuuaauuuuua

SEQ ID NO: 14448 - RNA, 20 nt, Artificial Sequence
  Synthetic oligonucleotide: CTLA4-721
uuugaugauuuaauuuuuac

SEQ ID NO: 14449 - RNA, 20 nt, Artificial Sequence
  Synthetic oligonucleotide: CTLA4-1163
ugaugauuuaauuuuuacug

SEQ ID NO: 14450 - RNA, 20 nt, Artificial Sequence
  Synthetic oligonucleotide: CTLA4-1164
ugauuuaauuuuuacuggag

SEQ ID NO: 14451 - RNA, 17 nt, Artificial Sequence
  Synthetic oligonucleotide: CTLA4-1165
uuucuuuauuaaaaugu

SEQ ID NO: 14452 - RNA, 17 nt, Artificial Sequence
  Synthetic oligonucleotide: CTLA4-1166
gaaaacucuccagauuu

SEQ ID NO: 14453 - RNA, 17 nt, Artificial Sequence
  Synthetic oligonucleotide: CTLA4-722
aaaacucuccagauuua

SEQ ID NO: 14454 - RNA, 17 nt, Artificial Sequence
  Synthetic oligonucleotide: CTLA4-1168
acagcugucacaaauuu

SEQ ID NO: 14455 - RNA, 17 nt, Artificial Sequence
  Synthetic oligonucleotide: CTLA4-1169
auauuuaaucuucacuu

SEQ ID NO: 14456 - RNA, 17 nt, Artificial Sequence
  Synthetic oligonucleotide: CTLA4-1170
acuuuugaauuuucugc

SEQ ID NO: 14457 - RNA, 17 nt, Artificial Sequence
  Synthetic oligonucleotide: CTLA4-1171
gcuugaaaaauuuguau

SEQ ID NO: 14458 - RNA, 17 nt, Artificial Sequence
  Synthetic oligonucleotide: CTLA4-1172
aaaaagucuauccuuuu

SEQ ID NO: 14459 - RNA, 17 nt, Artificial Sequence
  Synthetic oligonucleotide: CTLA4-1173
uggacggcucuaaucuc

SEQ ID NO: 14460 - RNA, 17 nt, Artificial Sequence
  Synthetic oligonucleotide: CTLA4-1174
cuaaucucuugaaucau

SEQ ID NO: 14461 - RNA, 17 nt, Artificial Sequence
  Synthetic oligonucleotide: CTLA4-1175
uuuggguuggcuuuucu

SEQ ID NO: 14462 - RNA, 17 nt, Artificial Sequence
  Synthetic oligonucleotide: CTLA4-1176
acucuguuuugucucug

SEQ ID NO: 14463 - RNA, 17 nt, Artificial Sequence
  Synthetic oligonucleotide: CTLA4-1177
guugaguuaaggcuuuu

SEQ ID NO: 14464 - RNA, 17 nt, Artificial Sequence
  Synthetic oligonucleotide: CTLA4-1178
aaggcuuuuaagaacac

SEQ ID NO: 14465 - RNA, 17 nt, Artificial Sequence
  Synthetic oligonucleotide: CTLA4-1179
cuuuccuucugcaaaac

SEQ ID NO: 14466 - RNA, 17 nt, Artificial Sequence
  Synthetic oligonucleotide: CTLA4-1180
ucuuaaccaaaugcuaa

SEQ ID NO: 14467 - RNA, 17 nt, Artificial Sequence
  Synthetic oligonucleotide: CTLA4-1181
caaaugcuaaauggauu

SEQ ID NO: 14468 - RNA, 17 nt, Artificial Sequence
  Synthetic oligonucleotide: CTLA4-736
aaaugcuaaauggauuu

SEQ ID NO: 14469 - RNA, 17 nt, Artificial Sequence
  Synthetic oligonucleotide: CTLA4-1183
augcuaaauggauuuag

SEQ ID NO: 14470 - RNA, 17 nt, Artificial Sequence
  Synthetic oligonucleotide: CTLA4-1184
uuauuuguaaagcuguc

SEQ ID NO: 14471 - RNA, 17 nt, Artificial Sequence
  Synthetic oligonucleotide: CTLA4-737
uauuuguaaagcuguca

SEQ ID NO: 14472 - RNA, 17 nt, Artificial Sequence
  Synthetic oligonucleotide: CTLA4-1186
agcugucaagggaccau

SEQ ID NO: 14473 - RNA, 17 nt, Artificial Sequence
  Synthetic oligonucleotide: CTLA4-1187
ugucaagggaccauuag

SEQ ID NO: 14474 - RNA, 17 nt, Artificial Sequence
  Synthetic oligonucleotide: CTLA4-1188
ggauggugcuucacaga

SEQ ID NO: 14475 - RNA, 17 nt, Artificial Sequence
  Synthetic oligonucleotide: CTLA4-1189
ucaagguuuuaaggucc

SEQ ID NO: 14476 - RNA, 17 nt, Artificial Sequence
  Synthetic oligonucleotide: CTLA4-1190
auucauauacuuuauaa

SEQ ID NO: 14477 - RNA, 17 nt, Artificial Sequence
  Synthetic oligonucleotide: CTLA4-1191
ccagcuuguuuaaaaug

SEQ ID NO: 14478 - RNA, 17 nt, Artificial Sequence
  Synthetic oligonucleotide: CTLA4-744
cagcuuguuuaaaaugu

SEQ ID NO: 14479 - RNA, 17 nt, Artificial Sequence
  Synthetic oligonucleotide: CTLA4-745
agcuuguuuaaaaugua

SEQ ID NO: 14480 - RNA, 17 nt, Artificial Sequence
  Synthetic oligonucleotide: CTLA4-1194
uaaaauguagggaaauu

SEQ ID NO: 14481 - RNA, 17 nt, Artificial Sequence
  Synthetic oligonucleotide: CTLA4-746
aaaauguagggaaauug

SEQ ID NO: 14482 - RNA, 17 nt, Artificial Sequence
  Synthetic oligonucleotide: CTLA4-747
aaauguagggaaauugu

SEQ ID NO: 14483 - RNA, 17 nt, Artificial Sequence
  Synthetic oligonucleotide: CTLA4-1197
uguagggaaauuguggg

SEQ ID NO: 14484 - RNA, 17 nt, Artificial Sequence
  Synthetic oligonucleotide: CTLA4-1198
uauuuaaaaauaaaagu

SEQ ID NO: 14485 - RNA, 17 nt, Artificial Sequence
  Synthetic oligonucleotide: CTLA4-1199
ugccaaaaaaaaaagac

SEQ ID NO: 14486 - RNA, 17 nt, Artificial Sequence
  Synthetic oligonucleotide: CTLA4-750
gccaaaaaaaaaagaca

SEQ ID NO: 14487 - RNA, 17 nt, Artificial Sequence
  Synthetic oligonucleotide: CTLA4-1201
aaaaaaaagacaaggaa

SEQ ID NO: 14488 - RNA, 17 nt, Artificial Sequence
  Synthetic oligonucleotide: CTLA4-751
aaaaaaagacaaggaaa

SEQ ID NO: 14489 - RNA, 17 nt, Artificial Sequence
  Synthetic oligonucleotide: CTLA4-1203
aaagacaaggaaaagga

SEQ ID NO: 14490 - RNA, 17 nt, Artificial Sequence
  Synthetic oligonucleotide: CTLA4-1204
acaaggaaaaggaaaga

SEQ ID NO: 14491 - RNA, 17 nt, Artificial Sequence
  Synthetic oligonucleotide: CTLA4-1205
uguugccugaccuacgu

SEQ ID NO: 14492 - RNA, 17 nt, Artificial Sequence
  Synthetic oligonucleotide: CTLA4-1206
cucaguuuucagcucuu

SEQ ID NO: 14493 - RNA, 17 nt, Artificial Sequence
  Synthetic oligonucleotide: CTLA4-1207
uuacacggcuuaaaaug

SEQ ID NO: 14494 - RNA, 17 nt, Artificial Sequence
  Synthetic oligonucleotide: CTLA4-1208
aaugaugaguauaucca

SEQ ID NO: 14495 - RNA, 17 nt, Artificial Sequence
  Synthetic oligonucleotide: CTLA4-1209
ucuagaccuucuugguu

SEQ ID NO: 14496 - RNA, 17 nt, Artificial Sequence
  Synthetic oligonucleotide: CTLA4-1210
gaaaccauguaguuugu

SEQ ID NO: 14497 - RNA, 17 nt, Artificial Sequence
  Synthetic oligonucleotide: CTLA4-1211
ugaugauuuaauuuuua

SEQ ID NO: 14498 - RNA, 17 nt, Artificial Sequence
  Synthetic oligonucleotide: CTLA4-759
gaugauuuaauuuuuac

SEQ ID NO: 14499 - RNA, 17 nt, Artificial Sequence
  Synthetic oligonucleotide: CTLA4-1213
ugauuuaauuuuuacug

SEQ ID NO: 14500 - RNA, 17 nt, Artificial Sequence
  Synthetic oligonucleotide: CTLA4-1214
uuuaauuuuuacuggag

SEQ ID NO: 14501 - RNA, 20 nt, Artificial Sequence
  Synthetic oligonucleotide: CTLA4-762
aauaaagaaagaaacauuca

SEQ ID NO: 14502 - RNA, 20 nt, Artificial Sequence
  Synthetic oligonucleotide: CTLA4-1216
uaauaaagaaagaaacauuc

SEQ ID NO: 14503 - RNA, 20 nt, Artificial Sequence
  Synthetic oligonucleotide: CTLA4-1217
uucauacauuuuaauaaaga

SEQ ID NO: 14504 - RNA, 20 nt, Artificial Sequence
  Synthetic oligonucleotide: CTLA4-1218
aguuuucauacauuuuaaua

SEQ ID NO: 14505 - RNA, 20 nt, Artificial Sequence
  Synthetic oligonucleotide: CTLA4-1219
gaggaccuuccuuaaaucug

SEQ ID NO: 14506 - RNA, 20 nt, Artificial Sequence
  Synthetic oligonucleotide: CTLA4-763
uugaggaccuuccuuaaauc

SEQ ID NO: 14507 - RNA, 20 nt, Artificial Sequence
  Synthetic oligonucleotide: CTLA4-1221
auugaggaccuuccuuaaau

SEQ ID NO: 14508 - RNA, 20 nt, Artificial Sequence
  Synthetic oligonucleotide: CTLA4-1222
caaaaagaauuugaaacauu

SEQ ID NO: 14509 - RNA, 20 nt, Artificial Sequence
  Synthetic oligonucleotide: CTLA4-1223
aacaaaaagaauuugaaaca

SEQ ID NO: 14510 - RNA, 20 nt, Artificial Sequence
  Synthetic oligonucleotide: CTLA4-1224
aaugaucuaacaaaaagaau

SEQ ID NO: 14511 - RNA, 20 nt, Artificial Sequence
  Synthetic oligonucleotide: CTLA4-1225
aggaccaaugaucuaacaaa

SEQ ID NO: 14512 - RNA, 20 nt, Artificial Sequence
  Synthetic oligonucleotide: CTLA4-1226
aaauuugugacagcuguaga

SEQ ID NO: 14513 - RNA, 20 nt, Artificial Sequence
  Synthetic oligonucleotide: CTLA4-1227
aagugaagauuaaauauaac

SEQ ID NO: 14514 - RNA, 20 nt, Artificial Sequence
  Synthetic oligonucleotide: CTLA4-1228
uucaagcagaaaauucaaaa

SEQ ID NO: 14515 - RNA, 20 nt, Artificial Sequence
  Synthetic oligonucleotide: CTLA4-1229
ucuaauacaaauuuuucaag

SEQ ID NO: 14516 - RNA, 20 nt, Artificial Sequence
  Synthetic oligonucleotide: CTLA4-1230
gagauuagagccguccauaa

SEQ ID NO: 14517 - RNA, 20 nt, Artificial Sequence
  Synthetic oligonucleotide: CTLA4-1231
acccaaaugauucaagagau

SEQ ID NO: 14518 - RNA, 20 nt, Artificial Sequence
  Synthetic oligonucleotide: CTLA4-1232
aaagccaacccaaaugauuc

SEQ ID NO: 14519 - RNA, 20 nt, Artificial Sequence
  Synthetic oligonucleotide: CTLA4-1233
acagaguugaagaaggucca

SEQ ID NO: 14520 - RNA, 20 nt, Artificial Sequence
  Synthetic oligonucleotide: CTLA4-1234
acagagacaaaacagaguug

SEQ ID NO: 14521 - RNA, 20 nt, Artificial Sequence
  Synthetic oligonucleotide: CTLA4-1235
ucaacagagacaaaacagag

SEQ ID NO: 14522 - RNA, 20 nt, Artificial Sequence
  Synthetic oligonucleotide: CTLA4-1236
uuaacucaacagagacaaaa

SEQ ID NO: 14523 - RNA, 20 nt, Artificial Sequence
  Synthetic oligonucleotide: CTLA4-1237
ucuuaaaagccuuaacucaa

SEQ ID NO: 14524 - RNA, 20 nt, Artificial Sequence
  Synthetic oligonucleotide: CTLA4-1238
ccucugguuuugcagaagga

SEQ ID NO: 14525 - RNA, 20 nt, Artificial Sequence
  Synthetic oligonucleotide: CTLA4-769
gcugccucugguuuugcaga

SEQ ID NO: 14526 - RNA, 20 nt, Artificial Sequence
  Synthetic oligonucleotide: CTLA4-1240
agcugccucugguuuugcag

SEQ ID NO: 14527 - RNA, 20 nt, Artificial Sequence
  Synthetic oligonucleotide: CTLA4-1241
agaagcugccucugguuuug

SEQ ID NO: 14528 - RNA, 20 nt, Artificial Sequence
  Synthetic oligonucleotide: CTLA4-1242
uaaacugaaaauaggcggaa

SEQ ID NO: 14529 - RNA, 20 nt, Artificial Sequence
  Synthetic oligonucleotide: CTLA4-771
agaaauaaacugaaaauagg

SEQ ID NO: 14530 - RNA, 20 nt, Artificial Sequence
  Synthetic oligonucleotide: CTLA4-1244
aagaaauaaacugaaaauag

SEQ ID NO: 14531 - RNA, 20 nt, Artificial Sequence
  Synthetic oligonucleotide: CTLA4-1245
cuaaaaucacaagaaauaaa

SEQ ID NO: 14532 - RNA, 20 nt, Artificial Sequence
  Synthetic oligonucleotide: CTLA4-1246
gagaaaaaaacuaaaaucac

SEQ ID NO: 14533 - RNA, 20 nt, Artificial Sequence
  Synthetic oligonucleotide: CTLA4-1247
uccauuuagcauuugguuaa

SEQ ID NO: 14534 - RNA, 20 nt, Artificial Sequence
  Synthetic oligonucleotide: CTLA4-1248
aauccauuuagcauuugguu

SEQ ID NO: 14535 - RNA, 20 nt, Artificial Sequence
  Synthetic oligonucleotide: CTLA4-1249
auaaaaacuguauucuaucu

SEQ ID NO: 14536 - RNA, 20 nt, Artificial Sequence
  Synthetic oligonucleotide: CTLA4-1250
uauagcaaaaaaacucuucc

SEQ ID NO: 14537 - RNA, 20 nt, Artificial Sequence
  Synthetic oligonucleotide: CTLA4-1251
aauccgaggaccuuaaaacc

SEQ ID NO: 14538 - RNA, 20 nt, Artificial Sequence
  Synthetic oligonucleotide: CTLA4-1252
uuuauaaaguauaugaaucc

SEQ ID NO: 14539 - RNA, 20 nt, Artificial Sequence
  Synthetic oligonucleotide: CTLA4-1253
cauuuauaaaguauaugaau

SEQ ID NO: 14540 - RNA, 20 nt, Artificial Sequence
  Synthetic oligonucleotide: CTLA4-1254
cuaauucauuuauaaaguau

SEQ ID NO: 14541 - RNA, 20 nt, Artificial Sequence
  Synthetic oligonucleotide: CTLA4-1255
uuaaaaccuugaauuaagua

SEQ ID NO: 14542 - RNA, 20 nt, Artificial Sequence
  Synthetic oligonucleotide: CTLA4-1256
auuaagagaaccuuaaaacc

SEQ ID NO: 14543 - RNA, 20 nt, Artificial Sequence
  Synthetic oligonucleotide: CTLA4-1257
uagcuaguagaauugauuaa

SEQ ID NO: 14544 - RNA, 20 nt, Artificial Sequence
  Synthetic oligonucleotide: CTLA4-1258
auuagcuaguagaauugauu

SEQ ID NO: 14545 - RNA, 20 nt, Artificial Sequence
  Synthetic oligonucleotide: CTLA4-1259
auaauuggcuaauuagcuag

SEQ ID NO: 14546 - RNA, 20 nt, Artificial Sequence
  Synthetic oligonucleotide: CTLA4-1260
ugaaaacugaggaucugcau

SEQ ID NO: 14547 - RNA, 20 nt, Artificial Sequence
  Synthetic oligonucleotide: CTLA4-1261
ucucugaagagcugaaaacu

SEQ ID NO: 14548 - RNA, 20 nt, Artificial Sequence
  Synthetic oligonucleotide: CTLA4-1262
agucucugaagagcugaaaa

SEQ ID NO: 14549 - RNA, 20 nt, Artificial Sequence
  Synthetic oligonucleotide: CTLA4-1263
uggugucagucucugaagag

SEQ ID NO: 14550 - RNA, 20 nt, Artificial Sequence
  Synthetic oligonucleotide: CTLA4-1264
aaaccuggugucagucucug

SEQ ID NO: 14551 - RNA, 20 nt, Artificial Sequence
  Synthetic oligonucleotide: CTLA4-1265
aacaaaccuggugucagucu

SEQ ID NO: 14552 - RNA, 20 nt, Artificial Sequence
  Synthetic oligonucleotide: CTLA4-1266
agagauaagguugagauuca

SEQ ID NO: 14553 - RNA, 20 nt, Artificial Sequence
  Synthetic oligonucleotide: CTLA4-1267
aggucuagagagagauaagg

SEQ ID NO: 14554 - RNA, 20 nt, Artificial Sequence
  Synthetic oligonucleotide: CTLA4-1268
cuuaaccaagaaggucuaga

SEQ ID NO: 14555 - RNA, 20 nt, Artificial Sequence
  Synthetic oligonucleotide: CTLA4-1269
uucuuaaccaagaaggucua

SEQ ID NO: 14556 - RNA, 20 nt, Artificial Sequence
  Synthetic oligonucleotide: CTLA4-1270
guuucuuaaccaagaagguc

SEQ ID NO: 14557 - RNA, 20 nt, Artificial Sequence
  Synthetic oligonucleotide: CTLA4-1271
aacuacaugguuucuuaacc

SEQ ID NO: 14558 - RNA, 20 nt, Artificial Sequence
  Synthetic oligonucleotide: CTLA4-1272
auuaaaucaucaaauaucuu

SEQ ID NO: 14559 - RNA, 17 nt, Artificial Sequence
  Synthetic oligonucleotide: CTLA4-793
aaagaaagaaacauuca

SEQ ID NO: 14560 - RNA, 17 nt, Artificial Sequence
  Synthetic oligonucleotide: CTLA4-1274
uaaagaaagaaacauuc

SEQ ID NO: 14561 - RNA, 17 nt, Artificial Sequence
  Synthetic oligonucleotide: CTLA4-1275
auacauuuuaauaaaga

SEQ ID NO: 14562 - RNA, 17 nt, Artificial Sequence
  Synthetic oligonucleotide: CTLA4-1276
uuucauacauuuuaaua

SEQ ID NO: 14563 - RNA, 17 nt, Artificial Sequence
  Synthetic oligonucleotide: CTLA4-1277
gaccuuccuuaaaucug

SEQ ID NO: 14564 - RNA, 17 nt, Artificial Sequence
  Synthetic oligonucleotide: CTLA4-794
aggaccuuccuuaaauc

SEQ ID NO: 14565 - RNA, 17 nt, Artificial Sequence
  Synthetic oligonucleotide: CTLA4-1279
gaggaccuuccuuaaau

SEQ ID NO: 14566 - RNA, 17 nt, Artificial Sequence
  Synthetic oligonucleotide: CTLA4-1280
aaagaauuugaaacauu

SEQ ID NO: 14567 - RNA, 17 nt, Artificial Sequence
  Synthetic oligonucleotide: CTLA4-1281
aaaaagaauuugaaaca

SEQ ID NO: 14568 - RNA, 17 nt, Artificial Sequence
  Synthetic oligonucleotide: CTLA4-1282
gaucuaacaaaaagaau

SEQ ID NO: 14569 - RNA, 17 nt, Artificial Sequence
  Synthetic oligonucleotide: CTLA4-1283
accaaugaucuaacaaa

SEQ ID NO: 14570 - RNA, 17 nt, Artificial Sequence
  Synthetic oligonucleotide: CTLA4-1284
uuugugacagcuguaga

SEQ ID NO: 14571 - RNA, 17 nt, Artificial Sequence
  Synthetic oligonucleotide: CTLA4-1285
ugaagauuaaauauaac

SEQ ID NO: 14572 - RNA, 17 nt, Artificial Sequence
  Synthetic oligonucleotide: CTLA4-1286
aagcagaaaauucaaaa

SEQ ID NO: 14573 - RNA, 17 nt, Artificial Sequence
  Synthetic oligonucleotide: CTLA4-1287
aauacaaauuuuucaag

SEQ ID NO: 14574 - RNA, 17 nt, Artificial Sequence
  Synthetic oligonucleotide: CTLA4-1288
auuagagccguccauaa

SEQ ID NO: 14575 - RNA, 17 nt, Artificial Sequence
  Synthetic oligonucleotide: CTLA4-1289
caaaugauucaagagau

SEQ ID NO: 14576 - RNA, 17 nt, Artificial Sequence
  Synthetic oligonucleotide: CTLA4-1290
gccaacccaaaugauuc

SEQ ID NO: 14577 - RNA, 17 nt, Artificial Sequence
  Synthetic oligonucleotide: CTLA4-1291
gaguugaagaaggucca

SEQ ID NO: 14578 - RNA, 17 nt, Artificial Sequence
  Synthetic oligonucleotide: CTLA4-1292
gagacaaaacagaguug

SEQ ID NO: 14579 - RNA, 17 nt, Artificial Sequence
  Synthetic oligonucleotide: CTLA4-1293
acagagacaaaacagag

SEQ ID NO: 14580 - RNA, 17 nt, Artificial Sequence
  Synthetic oligonucleotide: CTLA4-1294
acucaacagagacaaaa

SEQ ID NO: 14581 - RNA, 17 nt, Artificial Sequence
  Synthetic oligonucleotide: CTLA4-1295
uaaaagccuuaacucaa

SEQ ID NO: 14582 - RNA, 17 nt, Artificial Sequence
  Synthetic oligonucleotide: CTLA4-1296
cugguuuugcagaagga

SEQ ID NO: 14583 - RNA, 17 nt, Artificial Sequence
  Synthetic oligonucleotide: CTLA4-800
gccucugguuuugcaga

SEQ ID NO: 14584 - RNA, 17 nt, Artificial Sequence
  Synthetic oligonucleotide: CTLA4-1298
ugccucugguuuugcag

SEQ ID NO: 14585 - RNA, 17 nt, Artificial Sequence
  Synthetic oligonucleotide: CTLA4-1299
agcugccucugguuuug

SEQ ID NO: 14586 - RNA, 17 nt, Artificial Sequence
  Synthetic oligonucleotide: CTLA4-1300
acugaaaauaggcggaa

SEQ ID NO: 14587 - RNA, 17 nt, Artificial Sequence
  Synthetic oligonucleotide: CTLA4-802
aauaaacugaaaauagg

SEQ ID NO: 14588 - RNA, 17 nt, Artificial Sequence
  Synthetic oligonucleotide: CTLA4-1302
aaauaaacugaaaauag

SEQ ID NO: 14589 - RNA, 17 nt, Artificial Sequence
  Synthetic oligonucleotide: CTLA4-1303
aaaucacaagaaauaaa

SEQ ID NO: 14590 - RNA, 17 nt, Artificial Sequence
  Synthetic oligonucleotide: CTLA4-1304
aaaaaaacuaaaaucac

SEQ ID NO: 14591 - RNA, 17 nt, Artificial Sequence
  Synthetic oligonucleotide: CTLA4-1305
auuuagcauuugguuaa

SEQ ID NO: 14592 - RNA, 17 nt, Artificial Sequence
  Synthetic oligonucleotide: CTLA4-1306
ccauuuagcauuugguu

SEQ ID NO: 14593 - RNA, 17 nt, Artificial Sequence
  Synthetic oligonucleotide: CTLA4-1307
aaaacuguauucuaucu

SEQ ID NO: 14594 - RNA, 17 nt, Artificial Sequence
  Synthetic oligonucleotide: CTLA4-1308
agcaaaaaaacucuucc

SEQ ID NO: 14595 - RNA, 17 nt, Artificial Sequence
  Synthetic oligonucleotide: CTLA4-1309
ccgaggaccuuaaaacc

SEQ ID NO: 14596 - RNA, 17 nt, Artificial Sequence
  Synthetic oligonucleotide: CTLA4-1310
auaaaguauaugaaucc

SEQ ID NO: 14597 - RNA, 17 nt, Artificial Sequence
  Synthetic oligonucleotide: CTLA4-1311
uuauaaaguauaugaau

SEQ ID NO: 14598 - RNA, 17 nt, Artificial Sequence
  Synthetic oligonucleotide: CTLA4-1312
auucauuuauaaaguau

SEQ ID NO: 14599 - RNA, 17 nt, Artificial Sequence
  Synthetic oligonucleotide: CTLA4-1313
aaaccuugaauuaagua

SEQ ID NO: 14600 - RNA, 17 nt, Artificial Sequence
  Synthetic oligonucleotide: CTLA4-1314
aagagaaccuuaaaacc

SEQ ID NO: 14601 - RNA, 17 nt, Artificial Sequence
  Synthetic oligonucleotide: CTLA4-1315
cuaguagaauugauuaa

SEQ ID NO: 14602 - RNA, 17 nt, Artificial Sequence
  Synthetic oligonucleotide: CTLA4-1316
agcuaguagaauugauu

SEQ ID NO: 14603 - RNA, 17 nt, Artificial Sequence
  Synthetic oligonucleotide: CTLA4-1317
auuggcuaauuagcuag

SEQ ID NO: 14604 - RNA, 17 nt, Artificial Sequence
  Synthetic oligonucleotide: CTLA4-1318
aaacugaggaucugcau

SEQ ID NO: 14605 - RNA, 17 nt, Artificial Sequence
  Synthetic oligonucleotide: CTLA4-1319
cugaagagcugaaaacu

SEQ ID NO: 14606 - RNA, 17 nt, Artificial Sequence
  Synthetic oligonucleotide: CTLA4-1320
cucugaagagcugaaaa

SEQ ID NO: 14607 - RNA, 17 nt, Artificial Sequence
  Synthetic oligonucleotide: CTLA4-1321
ugucagucucugaagag

SEQ ID NO: 14608 - RNA, 17 nt, Artificial Sequence
  Synthetic oligonucleotide: CTLA4-1322
ccuggugucagucucug

SEQ ID NO: 14609 - RNA, 17 nt, Artificial Sequence
  Synthetic oligonucleotide: CTLA4-1323
aaaccuggugucagucu

SEQ ID NO: 14610 - RNA, 17 nt, Artificial Sequence
  Synthetic oligonucleotide: CTLA4-1324
gauaagguugagauuca

SEQ ID NO: 14611 - RNA, 17 nt, Artificial Sequence
  Synthetic oligonucleotide: CTLA4-1325
ucuagagagagauaagg

SEQ ID NO: 14612 - RNA, 17 nt, Artificial Sequence
  Synthetic oligonucleotide: CTLA4-1326
aaccaagaaggucuaga

SEQ ID NO: 14613 - RNA, 17 nt, Artificial Sequence
  Synthetic oligonucleotide: CTLA4-1327
uuaaccaagaaggucua

SEQ ID NO: 14614 - RNA, 17 nt, Artificial Sequence
  Synthetic oligonucleotide: CTLA4-1328
ucuuaaccaagaagguc

SEQ ID NO: 14615 - RNA, 17 nt, Artificial Sequence
  Synthetic oligonucleotide: CTLA4-1329
uacaugguuucuuaacc

SEQ ID NO: 14616 - RNA, 17 nt, Artificial Sequence
  Synthetic oligonucleotide: CTLA4-1330
aaaucaucaaauaucuu

SEQ ID NO: 14617 - RNA, 20 nt, Artificial Sequence
  Synthetic oligonucleotide: CTLA4-1331
cuggaugguuaaggaugccc

SEQ ID NO: 14618 - RNA, 20 nt, Artificial Sequence
  Synthetic oligonucleotide: CTLA4-833
gcccagaagauugaauaaaa

SEQ ID NO: 14619 - RNA, 20 nt, Artificial Sequence
  Synthetic oligonucleotide: CTLA4-1333
aauugaauacauuuuccauc

SEQ ID NO: 14620 - RNA, 20 nt, Artificial Sequence
  Synthetic oligonucleotide: CTLA4-1334
caaagcuaucuauauaaagu

SEQ ID NO: 14621 - RNA, 20 nt, Artificial Sequence
  Synthetic oligonucleotide: CTLA4-1370
cccauaaagccauggcuugc

SEQ ID NO: 14622 - RNA, 20 nt, Artificial Sequence
  Synthetic oligonucleotide: CTLA4-1336
uuuguuucagcagucaaagg

SEQ ID NO: 14623 - RNA, 20 nt, Artificial Sequence
  Synthetic oligonucleotide: CTLA4-1337
agacccuucuaugagacugg

SEQ ID NO: 14624 - RNA, 17 nt, Artificial Sequence
  Synthetic oligonucleotide: CTLA4-1338
gaugguuaaggaugccc

SEQ ID NO: 14625 - RNA, 17 nt, Artificial Sequence
  Synthetic oligonucleotide: CTLA4-905
cagaagauugaauaaaa

SEQ ID NO: 14626 - RNA, 17 nt, Artificial Sequence
  Synthetic oligonucleotide: CTLA4-1340
ugaauacauuuuccauc

SEQ ID NO: 14627 - RNA, 17 nt, Artificial Sequence
  Synthetic oligonucleotide: CTLA4-1341
agcuaucuauauaaagu

SEQ ID NO: 14628 - RNA, 17 nt, Artificial Sequence
  Synthetic oligonucleotide: CTLA4-452
auaaagccauggcuugc

SEQ ID NO: 14629 - RNA, 17 nt, Artificial Sequence
  Synthetic oligonucleotide: CTLA4-1343
guuucagcagucaaagg

SEQ ID NO: 14630 - RNA, 17 nt, Artificial Sequence
  Synthetic oligonucleotide: CTLA4-1344
cccuucuaugagacugg

SEQ ID NO: 14631 - RNA, 20 nt, Artificial Sequence
  Synthetic oligonucleotide: CTLA4-1345
ucugagcccuugggcuaaug

SEQ ID NO: 14632 - RNA, 20 nt, Artificial Sequence
  Synthetic oligonucleotide: CTLA4-1346
uggaauacagagccagccaa

SEQ ID NO: 14633 - RNA, 17 nt, Artificial Sequence
  Synthetic oligonucleotide: CTLA4-1347
gagcccuugggcuaaug

SEQ ID NO: 14634 - RNA, 17 nt, Artificial Sequence
  Synthetic oligonucleotide: CTLA4-1348
aauacagagccagccaa

SEQ ID NO: 14635 - RNA, 20 nt, Artificial Sequence
  Synthetic oligonucleotide: CTLA4-1349
auuaaaauguaugaaaacuc

SEQ ID NO: 14636 - RNA, 20 nt, Artificial Sequence
  Synthetic oligonucleotide: CTLA4-1350
gccuauuuucaguuuauuuc

SEQ ID NO: 14637 - RNA, 20 nt, Artificial Sequence
  Synthetic oligonucleotide: CTLA4-1351
uuucucuuaaccaaaugcua

SEQ ID NO: 14638 - RNA, 17 nt, Artificial Sequence
  Synthetic oligonucleotide: CTLA4-1352
aaaauguaugaaaacuc

SEQ ID NO: 14639 - RNA, 17 nt, Artificial Sequence
  Synthetic oligonucleotide: CTLA4-1353
uauuuucaguuuauuuc

SEQ ID NO: 14640 - RNA, 17 nt, Artificial Sequence
  Synthetic oligonucleotide: CTLA4-1354
cucuuaaccaaaugcua

SEQ ID NO: 14641 - RNA, 20 nt, Artificial Sequence
  Synthetic oligonucleotide: CTLA4-1355
caauucaagguuuuaagguc

SEQ ID NO: 14642 - RNA, 20 nt, Artificial Sequence
  Synthetic oligonucleotide: CTLA4-1356
guagguacucaaaagauauu

SEQ ID NO: 14643 - RNA, 17 nt, Artificial Sequence
  Synthetic oligonucleotide: CTLA4-1357
uucaagguuuuaagguc

SEQ ID NO: 14644 - RNA, 17 nt, Artificial Sequence
  Synthetic oligonucleotide: CTLA4-1358
gguacucaaaagauauu

SEQ ID NO: 14645 - RNA, 20 nt, Artificial Sequence
  Synthetic oligonucleotide: CTLA4-1359
ucaagcagaaaauucaaaag

SEQ ID NO: 14646 - RNA, 20 nt, Artificial Sequence
  Synthetic oligonucleotide: CTLA4-1232
aaagccaacccaaaugauuc

SEQ ID NO: 14647 - RNA, 20 nt, Artificial Sequence
  Synthetic oligonucleotide: CTLA4-1361
guccaaagaaaagccaaccc

SEQ ID NO: 14648 - RNA, 17 nt, Artificial Sequence
  Synthetic oligonucleotide: CTLA4-1362
agcagaaaauucaaaag

SEQ ID NO: 14649 - RNA, 17 nt, Artificial Sequence
  Synthetic oligonucleotide: CTLA4-1290
gccaacccaaaugauuc

SEQ ID NO: 14650 - RNA, 17 nt, Artificial Sequence
  Synthetic oligonucleotide: CTLA4-1364
caaagaaaagccaaccc

SEQ ID NO: 14651 - RNA, 20 nt, Artificial Sequence
  Synthetic oligonucleotide: CTLA4-1365
guauagcaaaaaaacucuuc

SEQ ID NO: 14652 - RNA, 20 nt, Artificial Sequence
  Synthetic oligonucleotide: CTLA4-1366
auuggcuaauuagcuaguag

SEQ ID NO: 14653 - RNA, 20 nt, Artificial Sequence
  Synthetic oligonucleotide: CTLA4-1267
aggucuagagagagauaagg

SEQ ID NO: 14654 - RNA, 17 nt, Artificial Sequence
  Synthetic oligonucleotide: CTLA4-1368
uagcaaaaaaacucuuc

SEQ ID NO: 14655 - RNA, 17 nt, Artificial Sequence
  Synthetic oligonucleotide: CTLA4-1369
ggcuaauuagcuaguag

SEQ ID NO: 14656 - RNA, 17 nt, Artificial Sequence
  Synthetic oligonucleotide: CTLA4-1325
ucuagagagagauaagg

SEQ ID NO: 14657 - RNA, 17 nt, Artificial Sequence
  Synthetic oligonucleotide: PDCD1-206
uucggucaccacgagca

SEQ ID NO: 14658 - RNA, 17 nt, Artificial Sequence
  Synthetic oligonucleotide: PDCD1-145
ccacaugagcgugguca

SEQ ID NO: 14659 - RNA, 17 nt, Artificial Sequence
  Synthetic oligonucleotide: PDCD1-131
cugcucguggugaccga

SEQ ID NO: 14660 - RNA, 17 nt, Artificial Sequence
  Synthetic oligonucleotide: PDCD1-193
gcugcgguccucgggga

SEQ ID NO: 14661 - RNA, 17 nt, Artificial Sequence
  Synthetic oligonucleotide: PDCD1-135
agagcuucgugcuaaac

SEQ ID NO: 14662 - RNA, 17 nt, Artificial Sequence
  Synthetic oligonucleotide: PDCD1-234
cugggcggugcuacaac

SEQ ID NO: 14663 - RNA, 17 nt, Artificial Sequence
  Synthetic oligonucleotide: PDCD1-249
agcaccgcccagacgac

SEQ ID NO: 14664 - RNA, 17 nt, Artificial Sequence
  Synthetic oligonucleotide: PDCD1-179
gccgcugucauugcgcc

SEQ ID NO: 14665 - RNA, 17 nt, Artificial Sequence
  Synthetic oligonucleotide: PDCD1-250
cgcccagacgacuggcc

SEQ ID NO: 14666 - RNA, 17 nt, Artificial Sequence
  Synthetic oligonucleotide: PDCD1-248
cuaccuaagaaccaucc

SEQ ID NO: 14667 - RNA, 17 nt, Artificial Sequence
  Synthetic oligonucleotide: PDCD1-185
cacggaagcggcagucc

SEQ ID NO: 14668 - RNA, 17 nt, Artificial Sequence
  Synthetic oligonucleotide: PDCD1-137
caaccagacggacaagc

SEQ ID NO: 14669 - RNA, 17 nt, Artificial Sequence
  Synthetic oligonucleotide: PDCD1-205
cuucggucaccacgagc

SEQ ID NO: 14670 - RNA, 17 nt, Artificial Sequence
  Synthetic oligonucleotide: PDCD1-178
ugccgcugucauugcgc

SEQ ID NO: 14671 - RNA, 17 nt, Artificial Sequence
  Synthetic oligonucleotide: PDCD1-196
cuuguccgucugguugc

SEQ ID NO: 14672 - RNA, 17 nt, Artificial Sequence
  Synthetic oligonucleotide: PDCD1-231
cgcccuggccagucguc

SEQ ID NO: 14673 - RNA, 17 nt, Artificial Sequence
  Synthetic oligonucleotide: PDCD1-144
uccacaugagcgugguc

SEQ ID NO: 14674 - RNA, 17 nt, Artificial Sequence
  Synthetic oligonucleotide: PDCD1-147
gcccggcgcaaugacag

SEQ ID NO: 14675 - RNA, 17 nt, Artificial Sequence
  Synthetic oligonucleotide: PDCD1-143
ugacuuccacaugagcg

SEQ ID NO: 14676 - RNA, 17 nt, Artificial Sequence
  Synthetic oligonucleotide: PDCD1-160
gacaggugcggccucgg

SEQ ID NO: 14677 - RNA, 17 nt, Artificial Sequence
  Synthetic oligonucleotide: PDCD1-180
cccugaccacgcucaug

SEQ ID NO: 14678 - RNA, 17 nt, Artificial Sequence
  Synthetic oligonucleotide: PDCD1-169
cucuuugaucugcgccu

SEQ ID NO: 14679 - RNA, 17 nt, Artificial Sequence
  Synthetic oligonucleotide: PDCD1-197
uuguccgucugguugcu

SEQ ID NO: 14680 - RNA, 17 nt, Artificial Sequence
  Synthetic oligonucleotide: PDCD1-181
guggaagucacgcccgu

SEQ ID NO: 14681 - RNA, 17 nt, Artificial Sequence
  Synthetic oligonucleotide: PDCD1-149
gcggcaccuaccucugu

SEQ ID NO: 14682 - RNA, 17 nt, Artificial Sequence
  Synthetic oligonucleotide: PDCD1-200
gaagcucuccgaugugu

SEQ ID NO: 14683 - RNA, 17 nt, Artificial Sequence
  Synthetic oligonucleotide: PDCD1-182
uggaagucacgcccguu

SEQ ID NO: 14684 - RNA, 20 nt, Artificial Sequence
  Synthetic oligonucleotide: PDCD1-14
cgugucacacaacugcccaa

SEQ ID NO: 14685 - RNA, 20 nt, Artificial Sequence
  Synthetic oligonucleotide: PDCD1-56
cguugggcaguugugugaca

SEQ ID NO: 14686 - RNA, 20 nt, Artificial Sequence
  Synthetic oligonucleotide: PDCD1-47
gaucugcgccuugggggcca

SEQ ID NO: 14687 - RNA, 20 nt, Artificial Sequence
  Synthetic oligonucleotide: PDCD1-124
accgcccagacgacuggcca

SEQ ID NO: 14688 - RNA, 20 nt, Artificial Sequence
  Synthetic oligonucleotide: PDCD1-79
cccuucggucaccacgagca

SEQ ID NO: 14689 - RNA, 20 nt, Artificial Sequence
  Synthetic oligonucleotide: PDCD1-18
cuuccacaugagcgugguca

SEQ ID NO: 14690 - RNA, 20 nt, Artificial Sequence
  Synthetic oligonucleotide: PDCD1-4
gcccugcucguggugaccga

SEQ ID NO: 14691 - RNA, 20 nt, Artificial Sequence
  Synthetic oligonucleotide: PDCD1-8
cggagagcuucgugcuaaac

SEQ ID NO: 14692 - RNA, 20 nt, Artificial Sequence
  Synthetic oligonucleotide: PDCD1-107
cgucugggcggugcuacaac

SEQ ID NO: 14693 - RNA, 20 nt, Artificial Sequence
  Synthetic oligonucleotide: PDCD1-15
gugucacacaacugcccaac

SEQ ID NO: 14694 - RNA, 20 nt, Artificial Sequence
  Synthetic oligonucleotide: PDCD1-122
uguagcaccgcccagacgac

SEQ ID NO: 14695 - RNA, 20 nt, Artificial Sequence
  Synthetic oligonucleotide: PDCD1-111
cuacaacugggcuggcggcc

SEQ ID NO: 14696 - RNA, 20 nt, Artificial Sequence
  Synthetic oligonucleotide: PDCD1-19
acaugagcguggucagggcc

SEQ ID NO: 14697 - RNA, 20 nt, Artificial Sequence
  Synthetic oligonucleotide: PDCD1-46
ugaucugcgccuugggggcc

SEQ ID NO: 14698 - RNA, 20 nt, Artificial Sequence
  Synthetic oligonucleotide: PDCD1-123
caccgcccagacgacuggcc

SEQ ID NO: 14699 - RNA, 20 nt, Artificial Sequence
  Synthetic oligonucleotide: PDCD1-60
cggaagcggcaguccuggcc

SEQ ID NO: 14700 - RNA, 20 nt, Artificial Sequence
  Synthetic oligonucleotide: PDCD1-121
caccuaccuaagaaccaucc

SEQ ID NO: 14701 - RNA, 20 nt, Artificial Sequence
  Synthetic oligonucleotide: PDCD1-78
ccccuucggucaccacgagc

SEQ ID NO: 14702 - RNA, 20 nt, Artificial Sequence
  Synthetic oligonucleotide: PDCD1-69
cagcuuguccgucugguugc

SEQ ID NO: 14703 - RNA, 20 nt, Artificial Sequence
  Synthetic oligonucleotide: PDCD1-64
ccgggcuggcugcgguccuc

SEQ ID NO: 14704 - RNA, 20 nt, Artificial Sequence
  Synthetic oligonucleotide: PDCD1-68
aggcggccagcuuguccguc

SEQ ID NO: 14705 - RNA, 20 nt, Artificial Sequence
  Synthetic oligonucleotide: PDCD1-104
aggcgcccuggccagucguc

SEQ ID NO: 14706 - RNA, 20 nt, Artificial Sequence
  Synthetic oligonucleotide: PDCD1-6
ccugcucguggugaccgaag

SEQ ID NO: 14707 - RNA, 20 nt, Artificial Sequence
  Synthetic oligonucleotide: PDCD1-20
agggcccggcgcaaugacag

SEQ ID NO: 14708 - RNA, 20 nt, Artificial Sequence
  Synthetic oligonucleotide: PDCD1-11
caagcuggccgccuuccccg

SEQ ID NO: 14709 - RNA, 20 nt, Artificial Sequence
  Synthetic oligonucleotide: PDCD1-16
gcgugacuuccacaugagcg

SEQ ID NO: 14710 - RNA, 20 nt, Artificial Sequence
  Synthetic oligonucleotide: PDCD1-33
ggugacaggugcggccucgg

SEQ ID NO: 14711 - RNA, 20 nt, Artificial Sequence
  Synthetic oligonucleotide: PDCD1-53
gggcccugaccacgcucaug

SEQ ID NO: 14712 - RNA, 20 nt, Artificial Sequence
  Synthetic oligonucleotide: PDCD1-71
gcuuguccgucugguugcug

SEQ ID NO: 14713 - RNA, 20 nt, Artificial Sequence
  Synthetic oligonucleotide: PDCD1-117
ggaugguucuuagguaggug

SEQ ID NO: 14714 - RNA, 20 nt, Artificial Sequence
  Synthetic oligonucleotide: PDCD1-108
gucugggcggugcuacaacu

SEQ ID NO: 14715 - RNA, 20 nt, Artificial Sequence
  Synthetic oligonucleotide: PDCD1-42
gcucucuuugaucugcgccu

SEQ ID NO: 14716 - RNA, 20 nt, Artificial Sequence
  Synthetic oligonucleotide: PDCD1-81
cggucaccacgagcagggcu

SEQ ID NO: 14717 - RNA, 20 nt, Artificial Sequence
  Synthetic oligonucleotide: PDCD1-105
ggcgcccuggccagucgucu

SEQ ID NO: 14718 - RNA, 20 nt, Artificial Sequence
  Synthetic oligonucleotide: PDCD1-116
aggaugguucuuagguaggu

SEQ ID NO: 14719 - RNA, 20 nt, Artificial Sequence
  Synthetic oligonucleotide: PDCD1-114
ggccaggaugguucuuaggu

SEQ ID NO: 14720 - RNA, 20 nt, Artificial Sequence
  Synthetic oligonucleotide: PDCD1-118
gguucuuagguagguggggu

SEQ ID NO: 14721 - RNA, 20 nt, Artificial Sequence
  Synthetic oligonucleotide: PDCD1-126
cgacuggccagggcgccugu

SEQ ID NO: 14722 - RNA, 20 nt, Artificial Sequence
  Synthetic oligonucleotide: PDCD1-73
cacgaagcucuccgaugugu

SEQ ID NO: 14723 - RNA, 20 nt, Artificial Sequence
  Synthetic oligonucleotide: PDCD1-43
cucucuuugaucugcgccuu

SEQ ID NO: 14724 - RNA, 20 nt, Artificial Sequence
  Synthetic oligonucleotide: PDCD1-55
auguggaagucacgcccguu

SEQ ID NO: 14725 - RNA, 17 nt, Artificial Sequence
  Synthetic oligonucleotide: PDCD1-141
gucacacaacugcccaa

SEQ ID NO: 14726 - RNA, 17 nt, Artificial Sequence
  Synthetic oligonucleotide: PDCD1-132
ugcucguggugaccgaa

SEQ ID NO: 14727 - RNA, 17 nt, Artificial Sequence
  Synthetic oligonucleotide: PDCD1-226
uggagagaggugaggaa

SEQ ID NO: 14728 - RNA, 17 nt, Artificial Sequence
  Synthetic oligonucleotide: PDCD1-183
ugggcaguugugugaca

SEQ ID NO: 14729 - RNA, 17 nt, Artificial Sequence
  Synthetic oligonucleotide: PDCD1-152
caucucccuggccccca

SEQ ID NO: 14730 - RNA, 17 nt, Artificial Sequence
  Synthetic oligonucleotide: PDCD1-174
cugcgccuugggggcca

SEQ ID NO: 14731 - RNA, 17 nt, Artificial Sequence
  Synthetic oligonucleotide: PDCD1-251
gcccagacgacuggcca

SEQ ID NO: 14732 - RNA, 17 nt, Artificial Sequence
  Synthetic oligonucleotide: PDCD1-218
aagguggggggguucca

SEQ ID NO: 14733 - RNA, 17 nt, Artificial Sequence
  Synthetic oligonucleotide: PDCD1-165
ucggaggccccggggca

SEQ ID NO: 14734 - RNA, 17 nt, Artificial Sequence
  Synthetic oligonucleotide: PDCD1-156
ccugcgggcagagcuca

SEQ ID NO: 14735 - RNA, 17 nt, Artificial Sequence
  Synthetic oligonucleotide: PDCD1-136
gagccccagcaaccaga

SEQ ID NO: 14736 - RNA, 17 nt, Artificial Sequence
  Synthetic oligonucleotide: PDCD1-222
cuggggagucugagaga

SEQ ID NO: 14737 - RNA, 17 nt, Artificial Sequence
  Synthetic oligonucleotide: PDCD1-175
cuugggggccagggaga

SEQ ID NO: 14738 - RNA, 17 nt, Artificial Sequence
  Synthetic oligonucleotide: PDCD1-210
gagcagggcuggggaga

SEQ ID NO: 14739 - RNA, 17 nt, Artificial Sequence
  Synthetic oligonucleotide: PDCD1-239
ugggcuggcggccagga

SEQ ID NO: 14740 - RNA, 17 nt, Artificial Sequence
  Synthetic oligonucleotide: PDCD1-225
auggagagaggugagga

SEQ ID NO: 14741 - RNA, 17 nt, Artificial Sequence
  Synthetic oligonucleotide: PDCD1-202
ggagaagcugcagguga

SEQ ID NO: 14742 - RNA, 17 nt, Artificial Sequence
  Synthetic oligonucleotide: PDCD1-142
ucacacaacugcccaac

SEQ ID NO: 14743 - RNA, 17 nt, Artificial Sequence
  Synthetic oligonucleotide: PDCD1-229
aggcaugcagaucccac

SEQ ID NO: 14744 - RNA, 17 nt, Artificial Sequence
  Synthetic oligonucleotide: PDCD1-128
ucucagacuccccagac

SEQ ID NO: 14745 - RNA, 17 nt, Artificial Sequence
  Synthetic oligonucleotide: PDCD1-157
gcagagcucagggugac

SEQ ID NO: 14746 - RNA, 17 nt, Artificial Sequence
  Synthetic oligonucleotide: PDCD1-162
gcggccucggaggcccc

SEQ ID NO: 14747 - RNA, 17 nt, Artificial Sequence
  Synthetic oligonucleotide: PDCD1-230
agaucccacaggcgccc

SEQ ID NO: 14748 - RNA, 17 nt, Artificial Sequence
  Synthetic oligonucleotide: PDCD1-129
acuccccagacaggccc

SEQ ID NO: 14749 - RNA, 17 nt, Artificial Sequence
  Synthetic oligonucleotide: PDCD1-161
ugcggccucggaggccc

SEQ ID NO: 14750 - RNA, 17 nt, Artificial Sequence
  Synthetic oligonucleotide: PDCD1-151
cuguggggccaucuccc

SEQ ID NO: 14751 - RNA, 17 nt, Artificial Sequence
  Synthetic oligonucleotide: PDCD1-139
gaggaccgcagccagcc

SEQ ID NO: 14752 - RNA, 17 nt, Artificial Sequence
  Synthetic oligonucleotide: PDCD1-140
ccgcagccagcccggcc

SEQ ID NO: 14753 - RNA, 17 nt, Artificial Sequence
  Synthetic oligonucleotide: PDCD1-238
caacugggcuggcggcc

SEQ ID NO: 14754 - RNA, 17 nt, Artificial Sequence
  Synthetic oligonucleotide: PDCD1-146
ugagcguggucagggcc

SEQ ID NO: 14755 - RNA, 17 nt, Artificial Sequence
  Synthetic oligonucleotide: PDCD1-173
ucugcgccuugggggcc

SEQ ID NO: 14756 - RNA, 17 nt, Artificial Sequence
  Synthetic oligonucleotide: PDCD1-187
aagcggcaguccuggcc

SEQ ID NO: 14757 - RNA, 17 nt, Artificial Sequence
  Synthetic oligonucleotide: PDCD1-254
ugugggaucugcaugcc

SEQ ID NO: 14758 - RNA, 17 nt, Artificial Sequence
  Synthetic oligonucleotide: PDCD1-228
ucugguggggcugcucc

SEQ ID NO: 14759 - RNA, 17 nt, Artificial Sequence
  Synthetic oligonucleotide: PDCD1-217
gaagguggggggguucc

SEQ ID NO: 14760 - RNA, 17 nt, Artificial Sequence
  Synthetic oligonucleotide: PDCD1-168
cccugagcucugcccgc

SEQ ID NO: 14761 - RNA, 17 nt, Artificial Sequence
  Synthetic oligonucleotide: PDCD1-207
gucaccacgagcagggc

SEQ ID NO: 14762 - RNA, 17 nt, Artificial Sequence
  Synthetic oligonucleotide: PDCD1-188
ggcaguccuggccgggc

SEQ ID NO: 14763 - RNA, 17 nt, Artificial Sequence
  Synthetic oligonucleotide: PDCD1-164
cucggaggccccggggc

SEQ ID NO: 14764 - RNA, 17 nt, Artificial Sequence
  Synthetic oligonucleotide: PDCD1-236
cggugcuacaacugggc

SEQ ID NO: 14765 - RNA, 17 nt, Artificial Sequence
  Synthetic oligonucleotide: PDCD1-186
gaagcggcaguccuggc

SEQ ID NO: 14766 - RNA, 17 nt, Artificial Sequence
  Synthetic oligonucleotide: PDCD1-154
gaucaaagagagccugc

SEQ ID NO: 14767 - RNA, 17 nt, Artificial Sequence
  Synthetic oligonucleotide: PDCD1-201
uguguuggagaagcugc

SEQ ID NO: 14768 - RNA, 17 nt, Artificial Sequence
  Synthetic oligonucleotide: PDCD1-191
ggcuggcugcgguccuc

SEQ ID NO: 14769 - RNA, 17 nt, Artificial Sequence
  Synthetic oligonucleotide: PDCD1-155
gccugcgggcagagcuc

SEQ ID NO: 14770 - RNA, 17 nt, Artificial Sequence
  Synthetic oligonucleotide: PDCD1-195
cggccagcuuguccguc

SEQ ID NO: 14771 - RNA, 17 nt, Artificial Sequence
  Synthetic oligonucleotide: PDCD1-247
agguggggucggcgguc

SEQ ID NO: 14772 - RNA, 17 nt, Artificial Sequence
  Synthetic oligonucleotide: PDCD1-219
ggguuccagggccuguc

SEQ ID NO: 14773 - RNA, 17 nt, Artificial Sequence
  Synthetic oligonucleotide: PDCD1-133
gcucguggugaccgaag

SEQ ID NO: 14774 - RNA, 17 nt, Artificial Sequence
  Synthetic oligonucleotide: PDCD1-227
ggagagaggugaggaag

SEQ ID NO: 14775 - RNA, 17 nt, Artificial Sequence
  Synthetic oligonucleotide: PDCD1-184
guugugugacacggaag

SEQ ID NO: 14776 - RNA, 17 nt, Artificial Sequence
  Synthetic oligonucleotide: PDCD1-176
gggagauggccccacag

SEQ ID NO: 14777 - RNA, 17 nt, Artificial Sequence
  Synthetic oligonucleotide: PDCD1-166
cggaggccccggggcag

SEQ ID NO: 14778 - RNA, 17 nt, Artificial Sequence
  Synthetic oligonucleotide: PDCD1-223
gucugagagauggagag

SEQ ID NO: 14779 - RNA, 17 nt, Artificial Sequence
  Synthetic oligonucleotide: PDCD1-163
cggccucggaggccccg

SEQ ID NO: 14780 - RNA, 17 nt, Artificial Sequence
  Synthetic oligonucleotide: PDCD1-138
gcuggccgccuuccccg

SEQ ID NO: 14781 - RNA, 17 nt, Artificial Sequence
  Synthetic oligonucleotide: PDCD1-167
cugccccggggccuccg

SEQ ID NO: 14782 - RNA, 17 nt, Artificial Sequence
  Synthetic oligonucleotide: PDCD1-192
gcuggcugcgguccucg

SEQ ID NO: 14783 - RNA, 17 nt, Artificial Sequence
  Synthetic oligonucleotide: PDCD1-130
cuccccagcccugcucg

SEQ ID NO: 14784 - RNA, 17 nt, Artificial Sequence
  Synthetic oligonucleotide: PDCD1-211
cagggcuggggagaagg

SEQ ID NO: 14785 - RNA, 17 nt, Artificial Sequence
  Synthetic oligonucleotide: PDCD1-194
gcgguccucggggaagg

SEQ ID NO: 14786 - RNA, 17 nt, Artificial Sequence
  Synthetic oligonucleotide: PDCD1-203
gaagcugcaggugaagg

SEQ ID NO: 14787 - RNA, 17 nt, Artificial Sequence
  Synthetic oligonucleotide: PDCD1-242
gaugguucuuagguagg

SEQ ID NO: 14788 - RNA, 17 nt, Artificial Sequence
  Synthetic oligonucleotide: PDCD1-246
uagguagguggggucgg

SEQ ID NO: 14789 - RNA, 17 nt, Artificial Sequence
  Synthetic oligonucleotide: PDCD1-216
cuggggagaaggugggg

SEQ ID NO: 14790 - RNA, 17 nt, Artificial Sequence
  Synthetic oligonucleotide: PDCD1-233
cuggccagucgucuggg

SEQ ID NO: 14791 - RNA, 17 nt, Artificial Sequence
  Synthetic oligonucleotide: PDCD1-215
gcuggggagaagguggg

SEQ ID NO: 14792 - RNA, 17 nt, Artificial Sequence
  Synthetic oligonucleotide: PDCD1-237
ugcuacaacugggcugg

SEQ ID NO: 14793 - RNA, 17 nt, Artificial Sequence
  Synthetic oligonucleotide: PDCD1-214
ggcuggggagaaggugg

SEQ ID NO: 14794 - RNA, 17 nt, Artificial Sequence
  Synthetic oligonucleotide: PDCD1-172
uuugaucugcgccuugg

SEQ ID NO: 14795 - RNA, 17 nt, Artificial Sequence
  Synthetic oligonucleotide: PDCD1-199
gguugcuggggcucaug

SEQ ID NO: 14796 - RNA, 17 nt, Artificial Sequence
  Synthetic oligonucleotide: PDCD1-153
agaucaaagagagccug

SEQ ID NO: 14797 - RNA, 17 nt, Artificial Sequence
  Synthetic oligonucleotide: PDCD1-252
acuggccagggcgccug

SEQ ID NO: 14798 - RNA, 17 nt, Artificial Sequence
  Synthetic oligonucleotide: PDCD1-209
caccacgagcagggcug

SEQ ID NO: 14799 - RNA, 17 nt, Artificial Sequence
  Synthetic oligonucleotide: PDCD1-189
ccuggccgggcuggcug

SEQ ID NO: 14800 - RNA, 17 nt, Artificial Sequence
  Synthetic oligonucleotide: PDCD1-198
uguccgucugguugcug

SEQ ID NO: 14801 - RNA, 17 nt, Artificial Sequence
  Synthetic oligonucleotide: PDCD1-148
agcggcaccuaccucug

SEQ ID NO: 14802 - RNA, 17 nt, Artificial Sequence
  Synthetic oligonucleotide: PDCD1-221
guuccagggccugucug

SEQ ID NO: 14803 - RNA, 17 nt, Artificial Sequence
  Synthetic oligonucleotide: PDCD1-213
gggcuggggagaaggug

SEQ ID NO: 14804 - RNA, 17 nt, Artificial Sequence
  Synthetic oligonucleotide: PDCD1-158
gcucagggugacaggug

SEQ ID NO: 14805 - RNA, 17 nt, Artificial Sequence
  Synthetic oligonucleotide: PDCD1-224
agagauggagagaggug

SEQ ID NO: 14806 - RNA, 17 nt, Artificial Sequence
  Synthetic oligonucleotide: PDCD1-244
ugguucuuagguaggug

SEQ ID NO: 14807 - RNA, 17 nt, Artificial Sequence
  Synthetic oligonucleotide: PDCD1-150
cggcaccuaccucugug

SEQ ID NO: 14808 - RNA, 17 nt, Artificial Sequence
  Synthetic oligonucleotide: PDCD1-171
cuuugaucugcgccuug

SEQ ID NO: 14809 - RNA, 17 nt, Artificial Sequence
  Synthetic oligonucleotide: PDCD1-134
cagcuucuccaacacau

SEQ ID NO: 14810 - RNA, 17 nt, Artificial Sequence
  Synthetic oligonucleotide: PDCD1-235
ugggcggugcuacaacu

SEQ ID NO: 14811 - RNA, 17 nt, Artificial Sequence
  Synthetic oligonucleotide: PDCD1-159
ggugacaggugcggccu

SEQ ID NO: 14812 - RNA, 17 nt, Artificial Sequence
  Synthetic oligonucleotide: PDCD1-190
gggcuggcugcgguccu

SEQ ID NO: 14813 - RNA, 17 nt, Artificial Sequence
  Synthetic oligonucleotide: PDCD1-208
ucaccacgagcagggcu

SEQ ID NO: 14814 - RNA, 17 nt, Artificial Sequence
  Synthetic oligonucleotide: PDCD1-232
gcccuggccagucgucu

SEQ ID NO: 14815 - RNA, 17 nt, Artificial Sequence
  Synthetic oligonucleotide: PDCD1-220
gguuccagggccugucu

SEQ ID NO: 14816 - RNA, 17 nt, Artificial Sequence
  Synthetic oligonucleotide: PDCD1-212
agggcuggggagaaggu

SEQ ID NO: 14817 - RNA, 17 nt, Artificial Sequence
  Synthetic oligonucleotide: PDCD1-177
gauggccccacagaggu

SEQ ID NO: 14818 - RNA, 17 nt, Artificial Sequence
  Synthetic oligonucleotide: PDCD1-243
augguucuuagguaggu

SEQ ID NO: 14819 - RNA, 17 nt, Artificial Sequence
  Synthetic oligonucleotide: PDCD1-241
caggaugguucuuaggu

SEQ ID NO: 14820 - RNA, 17 nt, Artificial Sequence
  Synthetic oligonucleotide: PDCD1-245
ucuuagguagguggggu

SEQ ID NO: 14821 - RNA, 17 nt, Artificial Sequence
  Synthetic oligonucleotide: PDCD1-253
cuggccagggcgccugu

SEQ ID NO: 14822 - RNA, 17 nt, Artificial Sequence
  Synthetic oligonucleotide: PDCD1-204
gguggcguuguccccuu

SEQ ID NO: 14823 - RNA, 17 nt, Artificial Sequence
  Synthetic oligonucleotide: PDCD1-170
ucuuugaucugcgccuu

SEQ ID NO: 14824 - RNA, 17 nt, Artificial Sequence
  Synthetic oligonucleotide: PDCD1-240
cggccaggaugguucuu

SEQ ID NO: 14825 - RNA, 20 nt, Artificial Sequence
  Synthetic oligonucleotide: PDCD1-5
cccugcucguggugaccgaa

SEQ ID NO: 14826 - RNA, 20 nt, Artificial Sequence
  Synthetic oligonucleotide: PDCD1-99
agauggagagaggugaggaa

SEQ ID NO: 14827 - RNA, 20 nt, Artificial Sequence
  Synthetic oligonucleotide: PDCD1-25
ggccaucucccuggccccca

SEQ ID NO: 14828 - RNA, 20 nt, Artificial Sequence
  Synthetic oligonucleotide: PDCD1-91
gagaagguggggggguucca

SEQ ID NO: 14829 - RNA, 20 nt, Artificial Sequence
  Synthetic oligonucleotide: PDCD1-38
gccucggaggccccggggca

SEQ ID NO: 14830 - RNA, 20 nt, Artificial Sequence
  Synthetic oligonucleotide: PDCD1-29
gagccugcgggcagagcuca

SEQ ID NO: 14831 - RNA, 20 nt, Artificial Sequence
  Synthetic oligonucleotide: PDCD1-9
caugagccccagcaaccaga

SEQ ID NO: 14832 - RNA, 20 nt, Artificial Sequence
  Synthetic oligonucleotide: PDCD1-95
ugucuggggagucugagaga

SEQ ID NO: 14833 - RNA, 20 nt, Artificial Sequence
  Synthetic oligonucleotide: PDCD1-48
cgccuugggggccagggaga

SEQ ID NO: 14834 - RNA, 20 nt, Artificial Sequence
  Synthetic oligonucleotide: PDCD1-83
cacgagcagggcuggggaga

SEQ ID NO: 14835 - RNA, 20 nt, Artificial Sequence
  Synthetic oligonucleotide: PDCD1-112
aacugggcuggcggccagga

SEQ ID NO: 14836 - RNA, 20 nt, Artificial Sequence
  Synthetic oligonucleotide: PDCD1-98
gagauggagagaggugagga

SEQ ID NO: 14837 - RNA, 20 nt, Artificial Sequence
  Synthetic oligonucleotide: PDCD1-66
cuggcugcgguccucgggga

SEQ ID NO: 14838 - RNA, 20 nt, Artificial Sequence
  Synthetic oligonucleotide: PDCD1-75
guuggagaagcugcagguga

SEQ ID NO: 14839 - RNA, 20 nt, Artificial Sequence
  Synthetic oligonucleotide: PDCD1-102
uccaggcaugcagaucccac

SEQ ID NO: 14840 - RNA, 20 nt, Artificial Sequence
  Synthetic oligonucleotide: PDCD1-1
aucucucagacuccccagac

SEQ ID NO: 14841 - RNA, 20 nt, Artificial Sequence
  Synthetic oligonucleotide: PDCD1-30
cgggcagagcucagggugac

SEQ ID NO: 14842 - RNA, 20 nt, Artificial Sequence
  Synthetic oligonucleotide: PDCD1-35
ggugcggccucggaggcccc

SEQ ID NO: 14843 - RNA, 20 nt, Artificial Sequence
  Synthetic oligonucleotide: PDCD1-103
ugcagaucccacaggcgccc

SEQ ID NO: 14844 - RNA, 20 nt, Artificial Sequence
  Synthetic oligonucleotide: PDCD1-2
cagacuccccagacaggccc

SEQ ID NO: 14845 - RNA, 20 nt, Artificial Sequence
  Synthetic oligonucleotide: PDCD1-34
aggugcggccucggaggccc

SEQ ID NO: 14846 - RNA, 20 nt, Artificial Sequence
  Synthetic oligonucleotide: PDCD1-24
ccucuguggggccaucuccc

SEQ ID NO: 14847 - RNA, 20 nt, Artificial Sequence
  Synthetic oligonucleotide: PDCD1-12
cccgaggaccgcagccagcc

SEQ ID NO: 14848 - RNA, 20 nt, Artificial Sequence
  Synthetic oligonucleotide: PDCD1-52
ggugccgcugucauugcgcc

SEQ ID NO: 14849 - RNA, 20 nt, Artificial Sequence
  Synthetic oligonucleotide: PDCD1-13
ggaccgcagccagcccggcc

SEQ ID NO: 14850 - RNA, 20 nt, Artificial Sequence
  Synthetic oligonucleotide: PDCD1-127
gccugugggaucugcaugcc

SEQ ID NO: 14851 - RNA, 20 nt, Artificial Sequence
  Synthetic oligonucleotide: PDCD1-101
cacucugguggggcugcucc

SEQ ID NO: 14852 - RNA, 20 nt, Artificial Sequence
  Synthetic oligonucleotide: PDCD1-58
ugacacggaagcggcagucc

SEQ ID NO: 14853 - RNA, 20 nt, Artificial Sequence
  Synthetic oligonucleotide: PDCD1-90
ggagaagguggggggguucc

SEQ ID NO: 14854 - RNA, 20 nt, Artificial Sequence
  Synthetic oligonucleotide: PDCD1-10
cagcaaccagacggacaagc

SEQ ID NO: 14855 - RNA, 20 nt, Artificial Sequence
  Synthetic oligonucleotide: PDCD1-41
ucacccugagcucugcccgc

SEQ ID NO: 14856 - RNA, 20 nt, Artificial Sequence
  Synthetic oligonucleotide: PDCD1-51
aggugccgcugucauugcgc

SEQ ID NO: 14857 - RNA, 20 nt, Artificial Sequence
  Synthetic oligonucleotide: PDCD1-80
ucggucaccacgagcagggc

SEQ ID NO: 14858 - RNA, 20 nt, Artificial Sequence
  Synthetic oligonucleotide: PDCD1-61
agcggcaguccuggccgggc

SEQ ID NO: 14859 - RNA, 20 nt, Artificial Sequence
  Synthetic oligonucleotide: PDCD1-37
ggccucggaggccccggggc

SEQ ID NO: 14860 - RNA, 20 nt, Artificial Sequence
  Synthetic oligonucleotide: PDCD1-109
gggcggugcuacaacugggc

SEQ ID NO: 14861 - RNA, 20 nt, Artificial Sequence
  Synthetic oligonucleotide: PDCD1-59
acggaagcggcaguccuggc

SEQ ID NO: 14862 - RNA, 20 nt, Artificial Sequence
  Synthetic oligonucleotide: PDCD1-27
gcagaucaaagagagccugc

SEQ ID NO: 14863 - RNA, 20 nt, Artificial Sequence
  Synthetic oligonucleotide: PDCD1-74
cgauguguuggagaagcugc

SEQ ID NO: 14864 - RNA, 20 nt, Artificial Sequence
  Synthetic oligonucleotide: PDCD1-28
agagccugcgggcagagcuc

SEQ ID NO: 14865 - RNA, 20 nt, Artificial Sequence
  Synthetic oligonucleotide: PDCD1-120
gguagguggggucggcgguc

SEQ ID NO: 14866 - RNA, 20 nt, Artificial Sequence
  Synthetic oligonucleotide: PDCD1-17
acuuccacaugagcgugguc

SEQ ID NO: 14867 - RNA, 20 nt, Artificial Sequence
  Synthetic oligonucleotide: PDCD1-92
gggggguuccagggccuguc

SEQ ID NO: 14868 - RNA, 20 nt, Artificial Sequence
  Synthetic oligonucleotide: PDCD1-100
gauggagagaggugaggaag

SEQ ID NO: 14869 - RNA, 20 nt, Artificial Sequence
  Synthetic oligonucleotide: PDCD1-57
gcaguugugugacacggaag

SEQ ID NO: 14870 - RNA, 20 nt, Artificial Sequence
  Synthetic oligonucleotide: PDCD1-49
ccagggagauggccccacag

SEQ ID NO: 14871 - RNA, 20 nt, Artificial Sequence
  Synthetic oligonucleotide: PDCD1-39
ccucggaggccccggggcag

SEQ ID NO: 14872 - RNA, 20 nt, Artificial Sequence
  Synthetic oligonucleotide: PDCD1-96
ggagucugagagauggagag

SEQ ID NO: 14873 - RNA, 20 nt, Artificial Sequence
  Synthetic oligonucleotide: PDCD1-36
gugcggccucggaggccccg

SEQ ID NO: 14874 - RNA, 20 nt, Artificial Sequence
  Synthetic oligonucleotide: PDCD1-40
ccccugccccggggccuccg

SEQ ID NO: 14875 - RNA, 20 nt, Artificial Sequence
  Synthetic oligonucleotide: PDCD1-65
cgggcuggcugcgguccucg

SEQ ID NO: 14876 - RNA, 20 nt, Artificial Sequence
  Synthetic oligonucleotide: PDCD1-3
cuucuccccagcccugcucg

SEQ ID NO: 14877 - RNA, 20 nt, Artificial Sequence
  Synthetic oligonucleotide: PDCD1-84
gagcagggcuggggagaagg

SEQ ID NO: 14878 - RNA, 20 nt, Artificial Sequence
  Synthetic oligonucleotide: PDCD1-67
gcugcgguccucggggaagg

SEQ ID NO: 14879 - RNA, 20 nt, Artificial Sequence
  Synthetic oligonucleotide: PDCD1-76
ggagaagcugcaggugaagg

SEQ ID NO: 14880 - RNA, 20 nt, Artificial Sequence
  Synthetic oligonucleotide: PDCD1-115
caggaugguucuuagguagg

SEQ ID NO: 14881 - RNA, 20 nt, Artificial Sequence
  Synthetic oligonucleotide: PDCD1-119
ucuuagguagguggggucgg

SEQ ID NO: 14882 - RNA, 20 nt, Artificial Sequence
  Synthetic oligonucleotide: PDCD1-89
gggcuggggagaaggugggg

SEQ ID NO: 14883 - RNA, 20 nt, Artificial Sequence
  Synthetic oligonucleotide: PDCD1-106
gcccuggccagucgucuggg

SEQ ID NO: 14884 - RNA, 20 nt, Artificial Sequence
  Synthetic oligonucleotide: PDCD1-88
agggcuggggagaagguggg

SEQ ID NO: 14885 - RNA, 20 nt, Artificial Sequence
  Synthetic oligonucleotide: PDCD1-110
cggugcuacaacugggcugg

SEQ ID NO: 14886 - RNA, 20 nt, Artificial Sequence
  Synthetic oligonucleotide: PDCD1-87
cagggcuggggagaaggugg

SEQ ID NO: 14887 - RNA, 20 nt, Artificial Sequence
  Synthetic oligonucleotide: PDCD1-45
cucuuugaucugcgccuugg

SEQ ID NO: 14888 - RNA, 20 nt, Artificial Sequence
  Synthetic oligonucleotide: PDCD1-72
ucugguugcuggggcucaug

SEQ ID NO: 14889 - RNA, 20 nt, Artificial Sequence
  Synthetic oligonucleotide: PDCD1-26
cgcagaucaaagagagccug

SEQ ID NO: 14890 - RNA, 20 nt, Artificial Sequence
  Synthetic oligonucleotide: PDCD1-125
acgacuggccagggcgccug

SEQ ID NO: 14891 - RNA, 20 nt, Artificial Sequence
  Synthetic oligonucleotide: PDCD1-82
ggucaccacgagcagggcug

SEQ ID NO: 14892 - RNA, 20 nt, Artificial Sequence
  Synthetic oligonucleotide: PDCD1-62
aguccuggccgggcuggcug

SEQ ID NO: 14893 - RNA, 20 nt, Artificial Sequence
  Synthetic oligonucleotide: PDCD1-21
gacagcggcaccuaccucug

SEQ ID NO: 14894 - RNA, 20 nt, Artificial Sequence
  Synthetic oligonucleotide: PDCD1-94
gggguuccagggccugucug

SEQ ID NO: 14895 - RNA, 20 nt, Artificial Sequence
  Synthetic oligonucleotide: PDCD1-86
gcagggcuggggagaaggug

SEQ ID NO: 14896 - RNA, 20 nt, Artificial Sequence
  Synthetic oligonucleotide: PDCD1-31
agagcucagggugacaggug

SEQ ID NO: 14897 - RNA, 20 nt, Artificial Sequence
  Synthetic oligonucleotide: PDCD1-97
cugagagauggagagaggug

SEQ ID NO: 14898 - RNA, 20 nt, Artificial Sequence
  Synthetic oligonucleotide: PDCD1-23
cagcggcaccuaccucugug

SEQ ID NO: 14899 - RNA, 20 nt, Artificial Sequence
  Synthetic oligonucleotide: PDCD1-44
ucucuuugaucugcgccuug

SEQ ID NO: 14900 - RNA, 20 nt, Artificial Sequence
  Synthetic oligonucleotide: PDCD1-7
cugcagcuucuccaacacau

SEQ ID NO: 14901 - RNA, 20 nt, Artificial Sequence
  Synthetic oligonucleotide: PDCD1-32
cagggugacaggugcggccu

SEQ ID NO: 14902 - RNA, 20 nt, Artificial Sequence
  Synthetic oligonucleotide: PDCD1-63
gccgggcuggcugcgguccu

SEQ ID NO: 14903 - RNA, 20 nt, Artificial Sequence
  Synthetic oligonucleotide: PDCD1-70
agcuuguccgucugguugcu

SEQ ID NO: 14904 - RNA, 20 nt, Artificial Sequence
  Synthetic oligonucleotide: PDCD1-93
ggggguuccagggccugucu

SEQ ID NO: 14905 - RNA, 20 nt, Artificial Sequence
  Synthetic oligonucleotide: PDCD1-54
cauguggaagucacgcccgu

SEQ ID NO: 14906 - RNA, 20 nt, Artificial Sequence
  Synthetic oligonucleotide: PDCD1-85
agcagggcuggggagaaggu

SEQ ID NO: 14907 - RNA, 20 nt, Artificial Sequence
  Synthetic oligonucleotide: PDCD1-50
ggagauggccccacagaggu

SEQ ID NO: 14908 - RNA, 20 nt, Artificial Sequence
  Synthetic oligonucleotide: PDCD1-22
acagcggcaccuaccucugu

SEQ ID NO: 14909 - RNA, 20 nt, Artificial Sequence
  Synthetic oligonucleotide: PDCD1-77
gaagguggcguuguccccuu

SEQ ID NO: 14910 - RNA, 20 nt, Artificial Sequence
  Synthetic oligonucleotide: PDCD1-113
uggcggccaggaugguucuu

SEQ ID NO: 14911 - RNA, 17 nt, Artificial Sequence
  Synthetic oligonucleotide: PDCD1-487
ccuucuuugaggagaaa

SEQ ID NO: 14912 - RNA, 17 nt, Artificial Sequence
  Synthetic oligonucleotide: PDCD1-446
ucucuggaagggcacaa

SEQ ID NO: 14913 - RNA, 17 nt, Artificial Sequence
  Synthetic oligonucleotide: PDCD1-509
uccgcuaggaaagacaa

SEQ ID NO: 14914 - RNA, 17 nt, Artificial Sequence
  Synthetic oligonucleotide: PDCD1-306
ugcccuuccagagagaa

SEQ ID NO: 14915 - RNA, 17 nt, Artificial Sequence
  Synthetic oligonucleotide: PDCD1-488
uccuucuuugaggagaa

SEQ ID NO: 14916 - RNA, 17 nt, Artificial Sequence
  Synthetic oligonucleotide: PDCD1-342
ugucuuuccuagcggaa

SEQ ID NO: 14917 - RNA, 17 nt, Artificial Sequence
  Synthetic oligonucleotide: PDCD1-447
ugcccuucucucuggaa

SEQ ID NO: 14918 - RNA, 17 nt, Artificial Sequence
  Synthetic oligonucleotide: PDCD1-504
gucugcucagggacaca

SEQ ID NO: 14919 - RNA, 17 nt, Artificial Sequence
  Synthetic oligonucleotide: PDCD1-466
cacgacaccaaccacca

SEQ ID NO: 14920 - RNA, 17 nt, Artificial Sequence
  Synthetic oligonucleotide: PDCD1-483
aagagugagacucacca

SEQ ID NO: 14921 - RNA, 17 nt, Artificial Sequence
  Synthetic oligonucleotide: PDCD1-528
cagaacacugguggcca

SEQ ID NO: 14922 - RNA, 17 nt, Artificial Sequence
  Synthetic oligonucleotide: PDCD1-345
cucaucccccgcccgca

SEQ ID NO: 14923 - RNA, 17 nt, Artificial Sequence
  Synthetic oligonucleotide: PDCD1-493
cacagagaacacaggca

SEQ ID NO: 14924 - RNA, 17 nt, Artificial Sequence
  Synthetic oligonucleotide: PDCD1-503
cucagggacacagggca

SEQ ID NO: 14925 - RNA, 17 nt, Artificial Sequence
  Synthetic oligonucleotide: PDCD1-326
aaguguguuucucugca

SEQ ID NO: 14926 - RNA, 17 nt, Artificial Sequence
  Synthetic oligonucleotide: PDCD1-506
cauacuccgucugcuca

SEQ ID NO: 14927 - RNA, 17 nt, Artificial Sequence
  Synthetic oligonucleotide: PDCD1-444
gaagggcacaaagguca

SEQ ID NO: 14928 - RNA, 17 nt, Artificial Sequence
  Synthetic oligonucleotide: PDCD1-331
cccuuucuccucaaaga

SEQ ID NO: 14929 - RNA, 17 nt, Artificial Sequence
  Synthetic oligonucleotide: PDCD1-340
cugugucccugagcaga

SEQ ID NO: 14930 - RNA, 17 nt, Artificial Sequence
  Synthetic oligonucleotide: PDCD1-525
caaggaagccggucaga

SEQ ID NO: 14931 - RNA, 17 nt, Artificial Sequence
  Synthetic oligonucleotide: PDCD1-305
gugcccuuccagagaga

SEQ ID NO: 14932 - RNA, 17 nt, Artificial Sequence
  Synthetic oligonucleotide: PDCD1-485
uugaggagaaagggaga

SEQ ID NO: 14933 - RNA, 17 nt, Artificial Sequence
  Synthetic oligonucleotide: PDCD1-518
guggcugggcacuccga

SEQ ID NO: 14934 - RNA, 17 nt, Artificial Sequence
  Synthetic oligonucleotide: PDCD1-351
ccacugaggccugagga

SEQ ID NO: 14935 - RNA, 17 nt, Artificial Sequence
  Synthetic oligonucleotide: PDCD1-448
cugcccuucucucugga

SEQ ID NO: 14936 - RNA, 17 nt, Artificial Sequence
  Synthetic oligonucleotide: PDCD1-471
ggcccgggagcagauga

SEQ ID NO: 14937 - RNA, 17 nt, Artificial Sequence
  Synthetic oligonucleotide: PDCD1-347
cgcaggggcucagcuga

SEQ ID NO: 14938 - RNA, 17 nt, Artificial Sequence
  Synthetic oligonucleotide: PDCD1-491
aacacaggcacggcuga

SEQ ID NO: 14939 - RNA, 17 nt, Artificial Sequence
  Synthetic oligonucleotide: PDCD1-458
ccggcuggccuggguga

SEQ ID NO: 14940 - RNA, 17 nt, Artificial Sequence
  Synthetic oligonucleotide: PDCD1-334
guguucucuguggacua

SEQ ID NO: 14941 - RNA, 17 nt, Artificial Sequence
  Synthetic oligonucleotide: PDCD1-464
ccaccaggguuuggaac

SEQ ID NO: 14942 - RNA, 17 nt, Artificial Sequence
  Synthetic oligonucleotide: PDCD1-494
uaguccacagagaacac

SEQ ID NO: 14943 - RNA, 17 nt, Artificial Sequence
  Synthetic oligonucleotide: PDCD1-505
cgucugcucagggacac

SEQ ID NO: 14944 - RNA, 17 nt, Artificial Sequence
  Synthetic oligonucleotide: PDCD1-495
gggucuucucucgccac

SEQ ID NO: 14945 - RNA, 17 nt, Artificial Sequence
  Synthetic oligonucleotide: PDCD1-329
auaggagccaggcgcac

SEQ ID NO: 14946 - RNA, 17 nt, Artificial Sequence
  Synthetic oligonucleotide: PDCD1-502
ucagggacacagggcac

SEQ ID NO: 14947 - RNA, 17 nt, Artificial Sequence
  Synthetic oligonucleotide: PDCD1-353
cucuuggccccucugac

SEQ ID NO: 14948 - RNA, 17 nt, Artificial Sequence
  Synthetic oligonucleotide: PDCD1-467
ccacgacaccaaccacc

SEQ ID NO: 14949 - RNA, 17 nt, Artificial Sequence
  Synthetic oligonucleotide: PDCD1-469
cccagacuagcagcacc

SEQ ID NO: 14950 - RNA, 17 nt, Artificial Sequence
  Synthetic oligonucleotide: PDCD1-484
aaagagugagacucacc

SEQ ID NO: 14951 - RNA, 17 nt, Artificial Sequence
  Synthetic oligonucleotide: PDCD1-475
acacacuuggggucacc

SEQ ID NO: 14952 - RNA, 17 nt, Artificial Sequence
  Synthetic oligonucleotide: PDCD1-309
cggccaguuccaaaccc

SEQ ID NO: 14953 - RNA, 17 nt, Artificial Sequence
  Synthetic oligonucleotide: PDCD1-307
accccagccccucaccc

SEQ ID NO: 14954 - RNA, 17 nt, Artificial Sequence
  Synthetic oligonucleotide: PDCD1-339
guggcgagagaagaccc

SEQ ID NO: 14955 - RNA, 17 nt, Artificial Sequence
  Synthetic oligonucleotide: PDCD1-330
gcgcaccggccagcccc

SEQ ID NO: 14956 - RNA, 17 nt, Artificial Sequence
  Synthetic oligonucleotide: PDCD1-472
guuaccucgugcggccc

SEQ ID NO: 14957 - RNA, 17 nt, Artificial Sequence
  Synthetic oligonucleotide: PDCD1-322
ggccgucaucugcuccc

SEQ ID NO: 14958 - RNA, 17 nt, Artificial Sequence
  Synthetic oligonucleotide: PDCD1-317
cggccugcugggcagcc

SEQ ID NO: 14959 - RNA, 17 nt, Artificial Sequence
  Synthetic oligonucleotide: PDCD1-328
cagggacaauaggagcc

SEQ ID NO: 14960 - RNA, 17 nt, Artificial Sequence
  Synthetic oligonucleotide: PDCD1-479
gggcuggccggugcgcc

SEQ ID NO: 14961 - RNA, 17 nt, Artificial Sequence
  Synthetic oligonucleotide: PDCD1-470
gggagcagaugacggcc

SEQ ID NO: 14962 - RNA, 17 nt, Artificial Sequence
  Synthetic oligonucleotide: PDCD1-473
cguuaccucgugcggcc

SEQ ID NO: 14963 - RNA, 17 nt, Artificial Sequence
  Synthetic oligonucleotide: PDCD1-461
gaacuggccggcuggcc

SEQ ID NO: 14964 - RNA, 17 nt, Artificial Sequence
  Synthetic oligonucleotide: PDCD1-497
agggcacggggggcucc

SEQ ID NO: 14965 - RNA, 17 nt, Artificial Sequence
  Synthetic oligonucleotide: PDCD1-321
uggccgucaucugcucc

SEQ ID NO: 14966 - RNA, 17 nt, Artificial Sequence
  Synthetic oligonucleotide: PDCD1-320
gcugcuagucugggucc

SEQ ID NO: 14967 - RNA, 17 nt, Artificial Sequence
  Synthetic oligonucleotide: PDCD1-527
cugguggccaaggaagc

SEQ ID NO: 14968 - RNA, 17 nt, Artificial Sequence
  Synthetic oligonucleotide: PDCD1-468
gcaccaggcugcccagc

SEQ ID NO: 14969 - RNA, 17 nt, Artificial Sequence
  Synthetic oligonucleotide: PDCD1-308
cccucacccaggccagc

SEQ ID NO: 14970 - RNA, 17 nt, Artificial Sequence
  Synthetic oligonucleotide: PDCD1-337
uguggacuauggggagc

SEQ ID NO: 14971 - RNA, 17 nt, Artificial Sequence
  Synthetic oligonucleotide: PDCD1-344
ccucaucccccgcccgc

SEQ ID NO: 14972 - RNA, 17 nt, Artificial Sequence
  Synthetic oligonucleotide: PDCD1-462
guuuggaacuggccggc

SEQ ID NO: 14973 - RNA, 17 nt, Artificial Sequence
  Synthetic oligonucleotide: PDCD1-514
gcugagccccugcgggc

SEQ ID NO: 14974 - RNA, 17 nt, Artificial Sequence
  Synthetic oligonucleotide: PDCD1-481
ugagacucaccaggggc

SEQ ID NO: 14975 - RNA, 17 nt, Artificial Sequence
  Synthetic oligonucleotide: PDCD1-456
uggccugggugaggggc

SEQ ID NO: 14976 - RNA, 17 nt, Artificial Sequence
  Synthetic oligonucleotide: PDCD1-463
caggguuuggaacuggc

SEQ ID NO: 14977 - RNA, 17 nt, Artificial Sequence
  Synthetic oligonucleotide: PDCD1-480
acucaccaggggcuggc

SEQ ID NO: 14978 - RNA, 17 nt, Artificial Sequence
  Synthetic oligonucleotide: PDCD1-521
ccucaggccucaguggc

SEQ ID NO: 14979 - RNA, 17 nt, Artificial Sequence
  Synthetic oligonucleotide: PDCD1-516
gucagcugagccccugc

SEQ ID NO: 14980 - RNA, 17 nt, Artificial Sequence
  Synthetic oligonucleotide: PDCD1-315
ugucgugggcggccugc

SEQ ID NO: 14981 - RNA, 17 nt, Artificial Sequence
  Synthetic oligonucleotide: PDCD1-325
caaguguguuucucugc

SEQ ID NO: 14982 - RNA, 17 nt, Artificial Sequence
  Synthetic oligonucleotide: PDCD1-523
gagcaguguccauccuc

SEQ ID NO: 14983 - RNA, 17 nt, Artificial Sequence
  Synthetic oligonucleotide: PDCD1-498
cagggcacggggggcuc

SEQ ID NO: 14984 - RNA, 17 nt, Artificial Sequence
  Synthetic oligonucleotide: PDCD1-507
gcauacuccgucugcuc

SEQ ID NO: 14985 - RNA, 17 nt, Artificial Sequence
  Synthetic oligonucleotide: PDCD1-449
acuucugcccuucucuc

SEQ ID NO: 14986 - RNA, 17 nt, Artificial Sequence
  Synthetic oligonucleotide: PDCD1-318
gccuggugcugcuaguc

SEQ ID NO: 14987 - RNA, 17 nt, Artificial Sequence
  Synthetic oligonucleotide: PDCD1-445
ggaagggcacaaagguc

SEQ ID NO: 14988 - RNA, 17 nt, Artificial Sequence
  Synthetic oligonucleotide: PDCD1-482
agagugagacucaccag

SEQ ID NO: 14989 - RNA, 17 nt, Artificial Sequence
  Synthetic oligonucleotide: PDCD1-338
gggagcuggauuuccag

SEQ ID NO: 14990 - RNA, 17 nt, Artificial Sequence
  Synthetic oligonucleotide: PDCD1-346
ucaucccccgcccgcag

SEQ ID NO: 14991 - RNA, 17 nt, Artificial Sequence
  Synthetic oligonucleotide: PDCD1-522
ccauccucaggccucag

SEQ ID NO: 14992 - RNA, 17 nt, Artificial Sequence
  Synthetic oligonucleotide: PDCD1-443
aagggcacaaaggucag

SEQ ID NO: 14993 - RNA, 17 nt, Artificial Sequence
  Synthetic oligonucleotide: PDCD1-526
ccaaggaagccggucag

SEQ ID NO: 14994 - RNA, 17 nt, Artificial Sequence
  Synthetic oligonucleotide: PDCD1-524
aaggaagccggucagag

SEQ ID NO: 14995 - RNA, 17 nt, Artificial Sequence
  Synthetic oligonucleotide: PDCD1-486
uuugaggagaaagggag

SEQ ID NO: 14996 - RNA, 17 nt, Artificial Sequence
  Synthetic oligonucleotide: PDCD1-490
acacaggcacggcugag

SEQ ID NO: 14997 - RNA, 17 nt, Artificial Sequence
  Synthetic oligonucleotide: PDCD1-457
cggcuggccugggugag

SEQ ID NO: 14998 - RNA, 17 nt, Artificial Sequence
  Synthetic oligonucleotide: PDCD1-341
accauugucuuuccuag

SEQ ID NO: 14999 - RNA, 17 nt, Artificial Sequence
  Synthetic oligonucleotide: PDCD1-323
ugcucccgggccgcacg

SEQ ID NO: 15000 - RNA, 17 nt, Artificial Sequence
  Synthetic oligonucleotide: PDCD1-501
cagggacacagggcacg

SEQ ID NO: 15001 - RNA, 17 nt, Artificial Sequence
  Synthetic oligonucleotide: PDCD1-519
aguggcugggcacuccg

SEQ ID NO: 15002 - RNA, 17 nt, Artificial Sequence
  Synthetic oligonucleotide: PDCD1-496
gggcacggggggcuccg

SEQ ID NO: 15003 - RNA, 17 nt, Artificial Sequence
  Synthetic oligonucleotide: PDCD1-513
cugagccccugcgggcg

SEQ ID NO: 15004 - RNA, 17 nt, Artificial Sequence
  Synthetic oligonucleotide: PDCD1-312
ccuggugguuggugucg

SEQ ID NO: 15005 - RNA, 17 nt, Artificial Sequence
  Synthetic oligonucleotide: PDCD1-332
uuucuccucaaagaagg

SEQ ID NO: 15006 - RNA, 17 nt, Artificial Sequence
  Synthetic oligonucleotide: PDCD1-500
agggacacagggcacgg

SEQ ID NO: 15007 - RNA, 17 nt, Artificial Sequence
  Synthetic oligonucleotide: PDCD1-512
ugagccccugcgggcgg

SEQ ID NO: 15008 - RNA, 17 nt, Artificial Sequence
  Synthetic oligonucleotide: PDCD1-499
gggacacagggcacggg

SEQ ID NO: 15009 - RNA, 17 nt, Artificial Sequence
  Synthetic oligonucleotide: PDCD1-515
agcugagccccugcggg

SEQ ID NO: 15010 - RNA, 17 nt, Artificial Sequence
  Synthetic oligonucleotide: PDCD1-453
ugggugaggggcugggg

SEQ ID NO: 15011 - RNA, 17 nt, Artificial Sequence
  Synthetic oligonucleotide: PDCD1-314
gugguuggugucguggg

SEQ ID NO: 15012 - RNA, 17 nt, Artificial Sequence
  Synthetic oligonucleotide: PDCD1-508
gcuaggaaagacaaugg

SEQ ID NO: 15013 - RNA, 17 nt, Artificial Sequence
  Synthetic oligonucleotide: PDCD1-310
ccaguuccaaacccugg

SEQ ID NO: 15014 - RNA, 17 nt, Artificial Sequence
  Synthetic oligonucleotide: PDCD1-511
ccugcgggcgggggaug

SEQ ID NO: 15015 - RNA, 17 nt, Artificial Sequence
  Synthetic oligonucleotide: PDCD1-336
guucucuguggacuaug

SEQ ID NO: 15016 - RNA, 17 nt, Artificial Sequence
  Synthetic oligonucleotide: PDCD1-349
ggagugcccagccacug

SEQ ID NO: 15017 - RNA, 17 nt, Artificial Sequence
  Synthetic oligonucleotide: PDCD1-517
cgucagcugagccccug

SEQ ID NO: 15018 - RNA, 17 nt, Artificial Sequence
  Synthetic oligonucleotide: PDCD1-350
ccagccacugaggccug

SEQ ID NO: 15019 - RNA, 17 nt, Artificial Sequence
  Synthetic oligonucleotide: PDCD1-492
gaacacaggcacggcug

SEQ ID NO: 15020 - RNA, 17 nt, Artificial Sequence
  Synthetic oligonucleotide: PDCD1-454
gccugggugaggggcug

SEQ ID NO: 15021 - RNA, 17 nt, Artificial Sequence
  Synthetic oligonucleotide: PDCD1-451
ggggcuggggugggcug

SEQ ID NO: 15022 - RNA, 17 nt, Artificial Sequence
  Synthetic oligonucleotide: PDCD1-333
cgugccuguguucucug

SEQ ID NO: 15023 - RNA, 17 nt, Artificial Sequence
  Synthetic oligonucleotide: PDCD1-474
gaugacguuaccucgug

SEQ ID NO: 15024 - RNA, 17 nt, Artificial Sequence
  Synthetic oligonucleotide: PDCD1-459
gccggcuggccugggug

SEQ ID NO: 15025 - RNA, 17 nt, Artificial Sequence
  Synthetic oligonucleotide: PDCD1-476
gcagagaaacacacuug

SEQ ID NO: 15026 - RNA, 17 nt, Artificial Sequence
  Synthetic oligonucleotide: PDCD1-489
gggguccuccuucuuug

SEQ ID NO: 15027 - RNA, 17 nt, Artificial Sequence
  Synthetic oligonucleotide: PDCD1-327
uucucugcagggacaau

SEQ ID NO: 15028 - RNA, 17 nt, Artificial Sequence
  Synthetic oligonucleotide: PDCD1-343
gucuuuccuagcggaau

SEQ ID NO: 15029 - RNA, 17 nt, Artificial Sequence
  Synthetic oligonucleotide: PDCD1-335
uguucucuguggacuau

SEQ ID NO: 15030 - RNA, 17 nt, Artificial Sequence
  Synthetic oligonucleotide: PDCD1-478
cugcagagaaacacacu

SEQ ID NO: 15031 - RNA, 17 nt, Artificial Sequence
  Synthetic oligonucleotide: PDCD1-324
acgucaucccagccccu

SEQ ID NO: 15032 - RNA, 17 nt, Artificial Sequence
  Synthetic oligonucleotide: PDCD1-348
gcucagcugacggcccu

SEQ ID NO: 15033 - RNA, 17 nt, Artificial Sequence
  Synthetic oligonucleotide: PDCD1-460
aacuggccggcuggccu

SEQ ID NO: 15034 - RNA, 17 nt, Artificial Sequence
  Synthetic oligonucleotide: PDCD1-354
ccucugaccggcuuccu

SEQ ID NO: 15035 - RNA, 17 nt, Artificial Sequence
  Synthetic oligonucleotide: PDCD1-510
gaggugcccauuccgcu

SEQ ID NO: 15036 - RNA, 17 nt, Artificial Sequence
  Synthetic oligonucleotide: PDCD1-3187
gggcaggccgaggggcu

SEQ ID NO: 15037 - RNA, 17 nt, Artificial Sequence
  Synthetic oligonucleotide: PDCD1-455
ggccugggugaggggcu

SEQ ID NO: 15038 - RNA, 17 nt, Artificial Sequence
  Synthetic oligonucleotide: PDCD1-520
cucaggccucaguggcu

SEQ ID NO: 15039 - RNA, 17 nt, Artificial Sequence
  Synthetic oligonucleotide: PDCD1-316
gucgugggcggccugcu

SEQ ID NO: 15040 - RNA, 17 nt, Artificial Sequence
  Synthetic oligonucleotide: PDCD1-352
aggauggacacugcucu

SEQ ID NO: 15041 - RNA, 17 nt, Artificial Sequence
  Synthetic oligonucleotide: PDCD1-319
ccuggugcugcuagucu

SEQ ID NO: 15042 - RNA, 17 nt, Artificial Sequence
  Synthetic oligonucleotide: PDCD1-313
cuggugguuggugucgu

SEQ ID NO: 15043 - RNA, 17 nt, Artificial Sequence
  Synthetic oligonucleotide: PDCD1-452
gggugaggggcuggggu

SEQ ID NO: 15044 - RNA, 17 nt, Artificial Sequence
  Synthetic oligonucleotide: PDCD1-311
uuccaaacccugguggu

SEQ ID NO: 15045 - RNA, 17 nt, Artificial Sequence
  Synthetic oligonucleotide: PDCD1-450
gggcuggggugggcugu

SEQ ID NO: 15046 - RNA, 17 nt, Artificial Sequence
  Synthetic oligonucleotide: PDCD1-477
ugcagagaaacacacuu

SEQ ID NO: 15047 - RNA, 17 nt, Artificial Sequence
  Synthetic oligonucleotide: PDCD1-465
caccaaccaccaggguu

SEQ ID NO: 15048 - RNA, 17 nt, Artificial Sequence
  Synthetic oligonucleotide: PDCD1-442
cacaaaggucagggguu

SEQ ID NO: 15049 - RNA, 20 nt, Artificial Sequence
  Synthetic oligonucleotide: PDCD1-400
ccuccuucuuugaggagaaa

SEQ ID NO: 15050 - RNA, 20 nt, Artificial Sequence
  Synthetic oligonucleotide: PDCD1-359
uucucucuggaagggcacaa

SEQ ID NO: 15051 - RNA, 20 nt, Artificial Sequence
  Synthetic oligonucleotide: PDCD1-422
cauuccgcuaggaaagacaa

SEQ ID NO: 15052 - RNA, 20 nt, Artificial Sequence
  Synthetic oligonucleotide: PDCD1-256
uugugcccuuccagagagaa

SEQ ID NO: 15053 - RNA, 20 nt, Artificial Sequence
  Synthetic oligonucleotide: PDCD1-401
uccuccuucuuugaggagaa

SEQ ID NO: 15054 - RNA, 20 nt, Artificial Sequence
  Synthetic oligonucleotide: PDCD1-292
cauugucuuuccuagcggaa

SEQ ID NO: 15055 - RNA, 20 nt, Artificial Sequence
  Synthetic oligonucleotide: PDCD1-360
uucugcccuucucucuggaa

SEQ ID NO: 15056 - RNA, 20 nt, Artificial Sequence
  Synthetic oligonucleotide: PDCD1-417
uccgucugcucagggacaca

SEQ ID NO: 15057 - RNA, 20 nt, Artificial Sequence
  Synthetic oligonucleotide: PDCD1-379
gcccacgacaccaaccacca

SEQ ID NO: 15058 - RNA, 20 nt, Artificial Sequence
  Synthetic oligonucleotide: PDCD1-396
gaaaagagugagacucacca

SEQ ID NO: 15059 - RNA, 20 nt, Artificial Sequence
  Synthetic oligonucleotide: PDCD1-441
cugcagaacacugguggcca

SEQ ID NO: 15060 - RNA, 20 nt, Artificial Sequence
  Synthetic oligonucleotide: PDCD1-295
caccucaucccccgcccgca

SEQ ID NO: 15061 - RNA, 20 nt, Artificial Sequence
  Synthetic oligonucleotide: PDCD1-406
guccacagagaacacaggca

SEQ ID NO: 15062 - RNA, 20 nt, Artificial Sequence
  Synthetic oligonucleotide: PDCD1-416
cugcucagggacacagggca

SEQ ID NO: 15063 - RNA, 20 nt, Artificial Sequence
  Synthetic oligonucleotide: PDCD1-276
cccaaguguguuucucugca

SEQ ID NO: 15064 - RNA, 20 nt, Artificial Sequence
  Synthetic oligonucleotide: PDCD1-419
uggcauacuccgucugcuca

SEQ ID NO: 15065 - RNA, 20 nt, Artificial Sequence
  Synthetic oligonucleotide: PDCD1-357
cuggaagggcacaaagguca

SEQ ID NO: 15066 - RNA, 20 nt, Artificial Sequence
  Synthetic oligonucleotide: PDCD1-281
ucucccuuucuccucaaaga

SEQ ID NO: 15067 - RNA, 20 nt, Artificial Sequence
  Synthetic oligonucleotide: PDCD1-290
gcccugugucccugagcaga

SEQ ID NO: 15068 - RNA, 20 nt, Artificial Sequence
  Synthetic oligonucleotide: PDCD1-438
ggccaaggaagccggucaga

SEQ ID NO: 15069 - RNA, 20 nt, Artificial Sequence
  Synthetic oligonucleotide: PDCD1-255
uuugugcccuuccagagaga

SEQ ID NO: 15070 - RNA, 20 nt, Artificial Sequence
  Synthetic oligonucleotide: PDCD1-398
ucuuugaggagaaagggaga

SEQ ID NO: 15071 - RNA, 20 nt, Artificial Sequence
  Synthetic oligonucleotide: PDCD1-431
ucaguggcugggcacuccga

SEQ ID NO: 15072 - RNA, 20 nt, Artificial Sequence
  Synthetic oligonucleotide: PDCD1-301
cagccacugaggccugagga

SEQ ID NO: 15073 - RNA, 20 nt, Artificial Sequence
  Synthetic oligonucleotide: PDCD1-361
cuucugcccuucucucugga

SEQ ID NO: 15074 - RNA, 20 nt, Artificial Sequence
  Synthetic oligonucleotide: PDCD1-384
ugcggcccgggagcagauga

SEQ ID NO: 15075 - RNA, 20 nt, Artificial Sequence
  Synthetic oligonucleotide: PDCD1-297
gcccgcaggggcucagcuga

SEQ ID NO: 15076 - RNA, 20 nt, Artificial Sequence
  Synthetic oligonucleotide: PDCD1-404
gagaacacaggcacggcuga

SEQ ID NO: 15077 - RNA, 20 nt, Artificial Sequence
  Synthetic oligonucleotide: PDCD1-371
uggccggcuggccuggguga

SEQ ID NO: 15078 - RNA, 20 nt, Artificial Sequence
  Synthetic oligonucleotide: PDCD1-284
ccuguguucucuguggacua

SEQ ID NO: 15079 - RNA, 20 nt, Artificial Sequence
  Synthetic oligonucleotide: PDCD1-377
caaccaccaggguuuggaac

SEQ ID NO: 15080 - RNA, 20 nt, Artificial Sequence
  Synthetic oligonucleotide: PDCD1-407
ccauaguccacagagaacac

SEQ ID NO: 15081 - RNA, 20 nt, Artificial Sequence
  Synthetic oligonucleotide: PDCD1-418
cuccgucugcucagggacac

SEQ ID NO: 15082 - RNA, 20 nt, Artificial Sequence
  Synthetic oligonucleotide: PDCD1-408
ccggggucuucucucgccac

SEQ ID NO: 15083 - RNA, 20 nt, Artificial Sequence
  Synthetic oligonucleotide: PDCD1-279
acaauaggagccaggcgcac

SEQ ID NO: 15084 - RNA, 20 nt, Artificial Sequence
  Synthetic oligonucleotide: PDCD1-415
ugcucagggacacagggcac

SEQ ID NO: 15085 - RNA, 20 nt, Artificial Sequence
  Synthetic oligonucleotide: PDCD1-303
cugcucuuggccccucugac

SEQ ID NO: 15086 - RNA, 20 nt, Artificial Sequence
  Synthetic oligonucleotide: PDCD1-380
cgcccacgacaccaaccacc

SEQ ID NO: 15087 - RNA, 20 nt, Artificial Sequence
  Synthetic oligonucleotide: PDCD1-382
ggacccagacuagcagcacc

SEQ ID NO: 15088 - RNA, 20 nt, Artificial Sequence
  Synthetic oligonucleotide: PDCD1-397
ggaaaagagugagacucacc

SEQ ID NO: 15089 - RNA, 20 nt, Artificial Sequence
  Synthetic oligonucleotide: PDCD1-388
gaaacacacuuggggucacc

SEQ ID NO: 15090 - RNA, 20 nt, Artificial Sequence
  Synthetic oligonucleotide: PDCD1-259
agccggccaguuccaaaccc

SEQ ID NO: 15091 - RNA, 20 nt, Artificial Sequence
  Synthetic oligonucleotide: PDCD1-257
cccaccccagccccucaccc

SEQ ID NO: 15092 - RNA, 20 nt, Artificial Sequence
  Synthetic oligonucleotide: PDCD1-289
ccaguggcgagagaagaccc

SEQ ID NO: 15093 - RNA, 20 nt, Artificial Sequence
  Synthetic oligonucleotide: PDCD1-280
caggcgcaccggccagcccc

SEQ ID NO: 15094 - RNA, 20 nt, Artificial Sequence
  Synthetic oligonucleotide: PDCD1-385
gacguuaccucgugcggccc

SEQ ID NO: 15095 - RNA, 20 nt, Artificial Sequence
  Synthetic oligonucleotide: PDCD1-272
ccuggccgucaucugcuccc

SEQ ID NO: 15096 - RNA, 20 nt, Artificial Sequence
  Synthetic oligonucleotide: PDCD1-267
gggcggccugcugggcagcc

SEQ ID NO: 15097 - RNA, 20 nt, Artificial Sequence
  Synthetic oligonucleotide: PDCD1-278
cugcagggacaauaggagcc

SEQ ID NO: 15098 - RNA, 20 nt, Artificial Sequence
  Synthetic oligonucleotide: PDCD1-392
caggggcuggccggugcgcc

SEQ ID NO: 15099 - RNA, 20 nt, Artificial Sequence
  Synthetic oligonucleotide: PDCD1-383
cccgggagcagaugacggcc

SEQ ID NO: 15100 - RNA, 20 nt, Artificial Sequence
  Synthetic oligonucleotide: PDCD1-386
ugacguuaccucgugcggcc

SEQ ID NO: 15101 - RNA, 20 nt, Artificial Sequence
  Synthetic oligonucleotide: PDCD1-374
uuggaacuggccggcuggcc

SEQ ID NO: 15102 - RNA, 20 nt, Artificial Sequence
  Synthetic oligonucleotide: PDCD1-410
cacagggcacggggggcucc

SEQ ID NO: 15103 - RNA, 20 nt, Artificial Sequence
  Synthetic oligonucleotide: PDCD1-271
uccuggccgucaucugcucc

SEQ ID NO: 15104 - RNA, 20 nt, Artificial Sequence
  Synthetic oligonucleotide: PDCD1-270
ggugcugcuagucugggucc

SEQ ID NO: 15105 - RNA, 20 nt, Artificial Sequence
  Synthetic oligonucleotide: PDCD1-440
acacugguggccaaggaagc

SEQ ID NO: 15106 - RNA, 20 nt, Artificial Sequence
  Synthetic oligonucleotide: PDCD1-381
gcagcaccaggcugcccagc

SEQ ID NO: 15107 - RNA, 20 nt, Artificial Sequence
  Synthetic oligonucleotide: PDCD1-258
agccccucacccaggccagc

SEQ ID NO: 15108 - RNA, 20 nt, Artificial Sequence
  Synthetic oligonucleotide: PDCD1-287
cucuguggacuauggggagc

SEQ ID NO: 15109 - RNA, 20 nt, Artificial Sequence
  Synthetic oligonucleotide: PDCD1-294
gcaccucaucccccgcccgc

SEQ ID NO: 15110 - RNA, 20 nt, Artificial Sequence
  Synthetic oligonucleotide: PDCD1-375
aggguuuggaacuggccggc

SEQ ID NO: 15111 - RNA, 20 nt, Artificial Sequence
  Synthetic oligonucleotide: PDCD1-427
ucagcugagccccugcgggc

SEQ ID NO: 15112 - RNA, 20 nt, Artificial Sequence
  Synthetic oligonucleotide: PDCD1-394
gagugagacucaccaggggc

SEQ ID NO: 15113 - RNA, 20 nt, Artificial Sequence
  Synthetic oligonucleotide: PDCD1-369
ggcuggccugggugaggggc

SEQ ID NO: 15114 - RNA, 20 nt, Artificial Sequence
  Synthetic oligonucleotide: PDCD1-376
caccaggguuuggaacuggc

SEQ ID NO: 15115 - RNA, 20 nt, Artificial Sequence
  Synthetic oligonucleotide: PDCD1-393
gagacucaccaggggcuggc

SEQ ID NO: 15116 - RNA, 20 nt, Artificial Sequence
  Synthetic oligonucleotide: PDCD1-434
cauccucaggccucaguggc

SEQ ID NO: 15117 - RNA, 20 nt, Artificial Sequence
  Synthetic oligonucleotide: PDCD1-429
gccgucagcugagccccugc

SEQ ID NO: 15118 - RNA, 20 nt, Artificial Sequence
  Synthetic oligonucleotide: PDCD1-265
uggugucgugggcggccugc

SEQ ID NO: 15119 - RNA, 20 nt, Artificial Sequence
  Synthetic oligonucleotide: PDCD1-275
ccccaaguguguuucucugc

SEQ ID NO: 15120 - RNA, 20 nt, Artificial Sequence
  Synthetic oligonucleotide: PDCD1-436
caagagcaguguccauccuc

SEQ ID NO: 15121 - RNA, 20 nt, Artificial Sequence
  Synthetic oligonucleotide: PDCD1-411
acacagggcacggggggcuc

SEQ ID NO: 15122 - RNA, 20 nt, Artificial Sequence
  Synthetic oligonucleotide: PDCD1-420
guggcauacuccgucugcuc

SEQ ID NO: 15123 - RNA, 20 nt, Artificial Sequence
  Synthetic oligonucleotide: PDCD1-362
ggcacuucugcccuucucuc

SEQ ID NO: 15124 - RNA, 20 nt, Artificial Sequence
  Synthetic oligonucleotide: PDCD1-268
gcagccuggugcugcuaguc

SEQ ID NO: 15125 - RNA, 20 nt, Artificial Sequence
  Synthetic oligonucleotide: PDCD1-358
ucuggaagggcacaaagguc

SEQ ID NO: 15126 - RNA, 20 nt, Artificial Sequence
  Synthetic oligonucleotide: PDCD1-395
aaaagagugagacucaccag

SEQ ID NO: 15127 - RNA, 20 nt, Artificial Sequence
  Synthetic oligonucleotide: PDCD1-288
auggggagcuggauuuccag

SEQ ID NO: 15128 - RNA, 20 nt, Artificial Sequence
  Synthetic oligonucleotide: PDCD1-296
accucaucccccgcccgcag

SEQ ID NO: 15129 - RNA, 20 nt, Artificial Sequence
  Synthetic oligonucleotide: PDCD1-435
uguccauccucaggccucag

SEQ ID NO: 15130 - RNA, 20 nt, Artificial Sequence
  Synthetic oligonucleotide: PDCD1-356
uggaagggcacaaaggucag

SEQ ID NO: 15131 - RNA, 20 nt, Artificial Sequence
  Synthetic oligonucleotide: PDCD1-439
uggccaaggaagccggucag

SEQ ID NO: 15132 - RNA, 20 nt, Artificial Sequence
  Synthetic oligonucleotide: PDCD1-437
gccaaggaagccggucagag

SEQ ID NO: 15133 - RNA, 20 nt, Artificial Sequence
  Synthetic oligonucleotide: PDCD1-399
uucuuugaggagaaagggag

SEQ ID NO: 15134 - RNA, 20 nt, Artificial Sequence
  Synthetic oligonucleotide: PDCD1-403
agaacacaggcacggcugag

SEQ ID NO: 15135 - RNA, 20 nt, Artificial Sequence
  Synthetic oligonucleotide: PDCD1-370
ggccggcuggccugggugag

SEQ ID NO: 15136 - RNA, 20 nt, Artificial Sequence
  Synthetic oligonucleotide: PDCD1-291
gccaccauugucuuuccuag

SEQ ID NO: 15137 - RNA, 20 nt, Artificial Sequence
  Synthetic oligonucleotide: PDCD1-273
aucugcucccgggccgcacg

SEQ ID NO: 15138 - RNA, 20 nt, Artificial Sequence
  Synthetic oligonucleotide: PDCD1-414
gcucagggacacagggcacg

SEQ ID NO: 15139 - RNA, 20 nt, Artificial Sequence
  Synthetic oligonucleotide: PDCD1-432
cucaguggcugggcacuccg

SEQ ID NO: 15140 - RNA, 20 nt, Artificial Sequence
  Synthetic oligonucleotide: PDCD1-409
acagggcacggggggcuccg

SEQ ID NO: 15141 - RNA, 20 nt, Artificial Sequence
  Synthetic oligonucleotide: PDCD1-426
cagcugagccccugcgggcg

SEQ ID NO: 15142 - RNA, 20 nt, Artificial Sequence
  Synthetic oligonucleotide: PDCD1-262
aacccuggugguuggugucg

SEQ ID NO: 15143 - RNA, 20 nt, Artificial Sequence
  Synthetic oligonucleotide: PDCD1-282
cccuuucuccucaaagaagg

SEQ ID NO: 15144 - RNA, 20 nt, Artificial Sequence
  Synthetic oligonucleotide: PDCD1-413
cucagggacacagggcacgg

SEQ ID NO: 15145 - RNA, 20 nt, Artificial Sequence
  Synthetic oligonucleotide: PDCD1-425
agcugagccccugcgggcgg

SEQ ID NO: 15146 - RNA, 20 nt, Artificial Sequence
  Synthetic oligonucleotide: PDCD1-412
ucagggacacagggcacggg

SEQ ID NO: 15147 - RNA, 20 nt, Artificial Sequence
  Synthetic oligonucleotide: PDCD1-428
gucagcugagccccugcggg

SEQ ID NO: 15148 - RNA, 20 nt, Artificial Sequence
  Synthetic oligonucleotide: PDCD1-366
gccugggugaggggcugggg

SEQ ID NO: 15149 - RNA, 20 nt, Artificial Sequence
  Synthetic oligonucleotide: PDCD1-264
cuggugguuggugucguggg

SEQ ID NO: 15150 - RNA, 20 nt, Artificial Sequence
  Synthetic oligonucleotide: PDCD1-421
uccgcuaggaaagacaaugg

SEQ ID NO: 15151 - RNA, 20 nt, Artificial Sequence
  Synthetic oligonucleotide: PDCD1-260
cggccaguuccaaacccugg

SEQ ID NO: 15152 - RNA, 20 nt, Artificial Sequence
  Synthetic oligonucleotide: PDCD1-424
gccccugcgggcgggggaug

SEQ ID NO: 15153 - RNA, 20 nt, Artificial Sequence
  Synthetic oligonucleotide: PDCD1-286
uguguucucuguggacuaug

SEQ ID NO: 15154 - RNA, 20 nt, Artificial Sequence
  Synthetic oligonucleotide: PDCD1-299
cucggagugcccagccacug

SEQ ID NO: 15155 - RNA, 20 nt, Artificial Sequence
  Synthetic oligonucleotide: PDCD1-430
ggccgucagcugagccccug

SEQ ID NO: 15156 - RNA, 20 nt, Artificial Sequence
  Synthetic oligonucleotide: PDCD1-300
ugcccagccacugaggccug

SEQ ID NO: 15157 - RNA, 20 nt, Artificial Sequence
  Synthetic oligonucleotide: PDCD1-405
agagaacacaggcacggcug

SEQ ID NO: 15158 - RNA, 20 nt, Artificial Sequence
  Synthetic oligonucleotide: PDCD1-367
cuggccugggugaggggcug

SEQ ID NO: 15159 - RNA, 20 nt, Artificial Sequence
  Synthetic oligonucleotide: PDCD1-364
ugaggggcuggggugggcug

SEQ ID NO: 15160 - RNA, 20 nt, Artificial Sequence
  Synthetic oligonucleotide: PDCD1-283
agccgugccuguguucucug

SEQ ID NO: 15161 - RNA, 20 nt, Artificial Sequence
  Synthetic oligonucleotide: PDCD1-387
ugggaugacguuaccucgug

SEQ ID NO: 15162 - RNA, 20 nt, Artificial Sequence
  Synthetic oligonucleotide: PDCD1-372
cuggccggcuggccugggug

SEQ ID NO: 15163 - RNA, 20 nt, Artificial Sequence
  Synthetic oligonucleotide: PDCD1-389
ccugcagagaaacacacuug

SEQ ID NO: 15164 - RNA, 20 nt, Artificial Sequence
  Synthetic oligonucleotide: PDCD1-402
ugagggguccuccuucuuug

SEQ ID NO: 15165 - RNA, 20 nt, Artificial Sequence
  Synthetic oligonucleotide: PDCD1-277
uguuucucugcagggacaau

SEQ ID NO: 15166 - RNA, 20 nt, Artificial Sequence
  Synthetic oligonucleotide: PDCD1-293
auugucuuuccuagcggaau

SEQ ID NO: 15167 - RNA, 20 nt, Artificial Sequence
  Synthetic oligonucleotide: PDCD1-285
cuguguucucuguggacuau

SEQ ID NO: 15168 - RNA, 20 nt, Artificial Sequence
  Synthetic oligonucleotide: PDCD1-391
ucccugcagagaaacacacu

SEQ ID NO: 15169 - RNA, 20 nt, Artificial Sequence
  Synthetic oligonucleotide: PDCD1-274
guaacgucaucccagccccu

SEQ ID NO: 15170 - RNA, 20 nt, Artificial Sequence
  Synthetic oligonucleotide: PDCD1-298
ggggcucagcugacggcccu

SEQ ID NO: 15171 - RNA, 20 nt, Artificial Sequence
  Synthetic oligonucleotide: PDCD1-373
uggaacuggccggcuggccu

SEQ ID NO: 15172 - RNA, 20 nt, Artificial Sequence
  Synthetic oligonucleotide: PDCD1-304
gccccucugaccggcuuccu

SEQ ID NO: 15173 - RNA, 20 nt, Artificial Sequence
  Synthetic oligonucleotide: PDCD1-423
gaugaggugcccauuccgcu

SEQ ID NO: 15174 - RNA, 20 nt, Artificial Sequence
  Synthetic oligonucleotide: PDCD1-368
gcuggccugggugaggggcu

SEQ ID NO: 15175 - RNA, 20 nt, Artificial Sequence
  Synthetic oligonucleotide: PDCD1-433
auccucaggccucaguggcu

SEQ ID NO: 15176 - RNA, 20 nt, Artificial Sequence
  Synthetic oligonucleotide: PDCD1-266
ggugucgugggcggccugcu

SEQ ID NO: 15177 - RNA, 20 nt, Artificial Sequence
  Synthetic oligonucleotide: PDCD1-302
cugaggauggacacugcucu

SEQ ID NO: 15178 - RNA, 20 nt, Artificial Sequence
  Synthetic oligonucleotide: PDCD1-269
cagccuggugcugcuagucu

SEQ ID NO: 15179 - RNA, 20 nt, Artificial Sequence
  Synthetic oligonucleotide: PDCD1-263
acccuggugguuggugucgu

SEQ ID NO: 15180 - RNA, 20 nt, Artificial Sequence
  Synthetic oligonucleotide: PDCD1-365
ccugggugaggggcuggggu

SEQ ID NO: 15181 - RNA, 20 nt, Artificial Sequence
  Synthetic oligonucleotide: PDCD1-261
caguuccaaacccugguggu

SEQ ID NO: 15182 - RNA, 20 nt, Artificial Sequence
  Synthetic oligonucleotide: PDCD1-363
gaggggcuggggugggcugu

SEQ ID NO: 15183 - RNA, 20 nt, Artificial Sequence
  Synthetic oligonucleotide: PDCD1-390
cccugcagagaaacacacuu

SEQ ID NO: 15184 - RNA, 20 nt, Artificial Sequence
  Synthetic oligonucleotide: PDCD1-378
cgacaccaaccaccaggguu

SEQ ID NO: 15185 - RNA, 20 nt, Artificial Sequence
  Synthetic oligonucleotide: PDCD1-355
gggcacaaaggucagggguu

SEQ ID NO: 15186 - RNA, 18 nt, Artificial Sequence
  Synthetic oligonucleotide: PDCD1-3188
gacuggccagggcgccug

SEQ ID NO: 15187 - RNA, 19 nt, Artificial Sequence
  Synthetic oligonucleotide: PDCD1-3189
cgacuggccagggcgccug

SEQ ID NO: 15188 - RNA, 20 nt, Artificial Sequence
  Synthetic oligonucleotide: PDCD1-125
acgacuggccagggcgccug

SEQ ID NO: 15189 - RNA, 21 nt, Artificial Sequence
  Synthetic oligonucleotide: PDCD1-3190
gacgacuggccagggcgccug

SEQ ID NO: 15190 - RNA, 22 nt, Artificial Sequence
  Synthetic oligonucleotide: PDCD1-3191
agacgacuggccagggcgccug

SEQ ID NO: 15191 - RNA, 23 nt, Artificial Sequence
  Synthetic oligonucleotide: PDCD1-3192
cagacgacuggccagggcgccug

SEQ ID NO: 15192 - RNA, 24 nt, Artificial Sequence
  Synthetic oligonucleotide: PDCD1-3193
ccagacgacuggccagggcgccug

SEQ ID NO: 15193 - RNA, 21 nt, Artificial Sequence
  Synthetic oligonucleotide: PDCD1-3194
ggggguuccagggccugucug

SEQ ID NO: 15194 - RNA, 22 nt, Artificial Sequence
  Synthetic oligonucleotide: PDCD1-3195
gggggguuccagggccugucug

SEQ ID NO: 15195 - RNA, 23 nt, Artificial Sequence
  Synthetic oligonucleotide: PDCD1-3196
ggggggguuccagggccugucug

SEQ ID NO: 15196 - RNA, 24 nt, Artificial Sequence
  Synthetic oligonucleotide: PDCD1-3197
uggggggguuccagggccugucug

SEQ ID NO: 15197 - RNA, 18 nt, Artificial Sequence
  Synthetic oligonucleotide: PDCD1-3198
uacaacugggcuggcggc

SEQ ID NO: 15198 - RNA, 19 nt, Artificial Sequence
  Synthetic oligonucleotide: PDCD1-3199
cuacaacugggcuggcggc

SEQ ID NO: 15199 - RNA, 20 nt, Artificial Sequence
  Synthetic oligonucleotide: PDCD1-531
gcuacaacugggcuggcggc

SEQ ID NO: 15200 - RNA, 21 nt, Artificial Sequence
  Synthetic oligonucleotide: PDCD1-3200
ugcuacaacugggcuggcggc

SEQ ID NO: 15201 - RNA, 22 nt, Artificial Sequence
  Synthetic oligonucleotide: PDCD1-3201
gugcuacaacugggcuggcggc

SEQ ID NO: 15202 - RNA, 23 nt, Artificial Sequence
  Synthetic oligonucleotide: PDCD1-3202
ggugcuacaacugggcuggcggc

SEQ ID NO: 15203 - RNA, 24 nt, Artificial Sequence
  Synthetic oligonucleotide: PDCD1-3203
cggugcuacaacugggcuggcggc

SEQ ID NO: 15204 - RNA, 18 nt, Artificial Sequence
  Synthetic oligonucleotide: PDCD1-3204
ggaugguucuuagguagg

SEQ ID NO: 15205 - RNA, 19 nt, Artificial Sequence
  Synthetic oligonucleotide: PDCD1-3205
aggaugguucuuagguagg

SEQ ID NO: 15206 - RNA, 20 nt, Artificial Sequence
  Synthetic oligonucleotide: PDCD1-115
caggaugguucuuagguagg

SEQ ID NO: 15207 - RNA, 21 nt, Artificial Sequence
  Synthetic oligonucleotide: PDCD1-3206
ccaggaugguucuuagguagg

SEQ ID NO: 15208 - RNA, 22 nt, Artificial Sequence
  Synthetic oligonucleotide: PDCD1-3207
gccaggaugguucuuagguagg

SEQ ID NO: 15209 - RNA, 23 nt, Artificial Sequence
  Synthetic oligonucleotide: PDCD1-3208
ggccaggaugguucuuagguagg

SEQ ID NO: 15210 - RNA, 24 nt, Artificial Sequence
  Synthetic oligonucleotide: PDCD1-3209
cggccaggaugguucuuagguagg

SEQ ID NO: 15211 - RNA, 21 nt, Artificial Sequence
  Synthetic oligonucleotide: PDCD1-3210
agagagccugcgggcagagcu

SEQ ID NO: 15212 - RNA, 22 nt, Artificial Sequence
  Synthetic oligonucleotide: PDCD1-3211
aagagagccugcgggcagagcu

SEQ ID NO: 15213 - RNA, 23 nt, Artificial Sequence
  Synthetic oligonucleotide: PDCD1-3212
aaagagagccugcgggcagagcu

SEQ ID NO: 15214 - RNA, 24 nt, Artificial Sequence
  Synthetic oligonucleotide: PDCD1-3213
caaagagagccugcgggcagagcu

SEQ ID NO: 15215 - RNA, 18 nt, Artificial Sequence
  Synthetic oligonucleotide: PDCD1-3214
ugccuggagcagccccac

SEQ ID NO: 15216 - RNA, 19 nt, Artificial Sequence
  Synthetic oligonucleotide: PDCD1-3215
augccuggagcagccccac

SEQ ID NO: 15217 - RNA, 20 nt, Artificial Sequence
  Synthetic oligonucleotide: PDCD1-587
caugccuggagcagccccac

SEQ ID NO: 15218 - RNA, 21 nt, Artificial Sequence
  Synthetic oligonucleotide: PDCD1-3216
gcaugccuggagcagccccac

SEQ ID NO: 15219 - RNA, 22 nt, Artificial Sequence
  Synthetic oligonucleotide: PDCD1-3217
ugcaugccuggagcagccccac

SEQ ID NO: 15220 - RNA, 23 nt, Artificial Sequence
  Synthetic oligonucleotide: PDCD1-3218
cugcaugccuggagcagccccac

SEQ ID NO: 15221 - RNA, 24 nt, Artificial Sequence
  Synthetic oligonucleotide: PDCD1-3219
ucugcaugccuggagcagccccac

SEQ ID NO: 15222 - RNA, 18 nt, Artificial Sequence
  Synthetic oligonucleotide: PDCD1-3220
gggcuggggagaaggugg

SEQ ID NO: 15223 - RNA, 19 nt, Artificial Sequence
  Synthetic oligonucleotide: PDCD1-3221
agggcuggggagaaggugg

SEQ ID NO: 15224 - RNA, 20 nt, Artificial Sequence
  Synthetic oligonucleotide: PDCD1-87
cagggcuggggagaaggugg

SEQ ID NO: 15225 - RNA, 21 nt, Artificial Sequence
  Synthetic oligonucleotide: PDCD1-3222
gcagggcuggggagaaggugg

SEQ ID NO: 15226 - RNA, 22 nt, Artificial Sequence
  Synthetic oligonucleotide: PDCD1-3223
agcagggcuggggagaaggugg

SEQ ID NO: 15227 - RNA, 23 nt, Artificial Sequence
  Synthetic oligonucleotide: PDCD1-3224
gagcagggcuggggagaaggugg

SEQ ID NO: 15228 - RNA, 24 nt, Artificial Sequence
  Synthetic oligonucleotide: PDCD1-3225
cgagcagggcuggggagaaggugg

SEQ ID NO: 15229 - RNA, 18 nt, Artificial Sequence
  Synthetic oligonucleotide: PDCD1-3226
gguuccagggccugucug

SEQ ID NO: 15230 - RNA, 19 nt, Artificial Sequence
  Synthetic oligonucleotide: PDCD1-3227
ggguuccagggccugucug

SEQ ID NO: 15231 - RNA, 20 nt, Artificial Sequence
  Synthetic oligonucleotide: PDCD1-94
gggguuccagggccugucug

SEQ ID NO: 15232 - RNA, 18 nt, Artificial Sequence
  Synthetic oligonucleotide: PDCD1-3228
ccucggaggccccggggc

SEQ ID NO: 15233 - RNA, 19 nt, Artificial Sequence
  Synthetic oligonucleotide: PDCD1-3229
gccucggaggccccggggc

SEQ ID NO: 15234 - RNA, 20 nt, Artificial Sequence
  Synthetic oligonucleotide: PDCD1-37
ggccucggaggccccggggc

SEQ ID NO: 15235 - RNA, 21 nt, Artificial Sequence
  Synthetic oligonucleotide: PDCD1-3230
cggccucggaggccccggggc

SEQ ID NO: 15236 - RNA, 22 nt, Artificial Sequence
  Synthetic oligonucleotide: PDCD1-3231
gcggccucggaggccccggggc

SEQ ID NO: 15237 - RNA, 23 nt, Artificial Sequence
  Synthetic oligonucleotide: PDCD1-3232
ugcggccucggaggccccggggc

SEQ ID NO: 15238 - RNA, 24 nt, Artificial Sequence
  Synthetic oligonucleotide: PDCD1-3233
gugcggccucggaggccccggggc

SEQ ID NO: 15239 - RNA, 18 nt, Artificial Sequence
  Synthetic oligonucleotide: PDCD1-3234
gagccugcgggcagagcu

SEQ ID NO: 15240 - RNA, 19 nt, Artificial Sequence
  Synthetic oligonucleotide: PDCD1-3235
agagccugcgggcagagcu

SEQ ID NO: 15241 - RNA, 20 nt, Artificial Sequence
  Synthetic oligonucleotide: PDCD1-557
gagagccugcgggcagagcu

SEQ ID NO: 15242 - RNA, 18 nt, Artificial Sequence
  Synthetic oligonucleotide: PDCD1-3236
uugggcaguugugugaca

SEQ ID NO: 15243 - RNA, 19 nt, Artificial Sequence
  Synthetic oligonucleotide: PDCD1-3237
guugggcaguugugugaca

SEQ ID NO: 15244 - RNA, 20 nt, Artificial Sequence
  Synthetic oligonucleotide: PDCD1-56
cguugggcaguugugugaca

SEQ ID NO: 15245 - RNA, 21 nt, Artificial Sequence
  Synthetic oligonucleotide: PDCD1-3238
ccguugggcaguugugugaca

SEQ ID NO: 15246 - RNA, 22 nt, Artificial Sequence
  Synthetic oligonucleotide: PDCD1-3239
cccguugggcaguugugugaca

SEQ ID NO: 15247 - RNA, 23 nt, Artificial Sequence
  Synthetic oligonucleotide: PDCD1-3240
gcccguugggcaguugugugaca

SEQ ID NO: 15248 - RNA, 24 nt, Artificial Sequence
  Synthetic oligonucleotide: PDCD1-3241
cgcccguugggcaguugugugaca

SEQ ID NO: 15249 - RNA, 18 nt, Artificial Sequence
  Synthetic oligonucleotide: PDCD1-3242
gccagggagauggcccca

SEQ ID NO: 15250 - RNA, 19 nt, Artificial Sequence
  Synthetic oligonucleotide: PDCD1-3243
ggccagggagauggcccca

SEQ ID NO: 15251 - RNA, 20 nt, Artificial Sequence
  Synthetic oligonucleotide: PDCD1-640
gggccagggagauggcccca

SEQ ID NO: 15252 - RNA, 21 nt, Artificial Sequence
  Synthetic oligonucleotide: PDCD1-3244
ggggccagggagauggcccca

SEQ ID NO: 15253 - RNA, 22 nt, Artificial Sequence
  Synthetic oligonucleotide: PDCD1-3245
gggggccagggagauggcccca

SEQ ID NO: 15254 - RNA, 23 nt, Artificial Sequence
  Synthetic oligonucleotide: PDCD1-3246
ugggggccagggagauggcccca

SEQ ID NO: 15255 - RNA, 24 nt, Artificial Sequence
  Synthetic oligonucleotide: PDCD1-3247
uugggggccagggagauggcccca

SEQ ID NO: 15256 - RNA, 18 nt, Artificial Sequence
  Synthetic oligonucleotide: PDCD1-3248
ucugcgccuugggggcca

SEQ ID NO: 15257 - RNA, 19 nt, Artificial Sequence
  Synthetic oligonucleotide: PDCD1-3249
aucugcgccuugggggcca

SEQ ID NO: 15258 - RNA, 20 nt, Artificial Sequence
  Synthetic oligonucleotide: PDCD1-47
gaucugcgccuugggggcca

SEQ ID NO: 15259 - RNA, 21 nt, Artificial Sequence
  Synthetic oligonucleotide: PDCD1-3250
ugaucugcgccuugggggcca

SEQ ID NO: 15260 - RNA, 22 nt, Artificial Sequence
  Synthetic oligonucleotide: PDCD1-3251
uugaucugcgccuugggggcca

SEQ ID NO: 15261 - RNA, 23 nt, Artificial Sequence
  Synthetic oligonucleotide: PDCD1-3252
uuugaucugcgccuugggggcca

SEQ ID NO: 15262 - RNA, 24 nt, Artificial Sequence
  Synthetic oligonucleotide: PDCD1-3253
cuuugaucugcgccuugggggcca

SEQ ID NO: 15263 - RNA, 18 nt, Artificial Sequence
  Synthetic oligonucleotide: PDCD1-3254
ucuggggagucugagaga

SEQ ID NO: 15264 - RNA, 19 nt, Artificial Sequence
  Synthetic oligonucleotide: PDCD1-3255
gucuggggagucugagaga

SEQ ID NO: 15265 - RNA, 20 nt, Artificial Sequence
  Synthetic oligonucleotide: PDCD1-95
ugucuggggagucugagaga

SEQ ID NO: 15266 - RNA, 21 nt, Artificial Sequence
  Synthetic oligonucleotide: PDCD1-3256
cugucuggggagucugagaga

SEQ ID NO: 15267 - RNA, 22 nt, Artificial Sequence
  Synthetic oligonucleotide: PDCD1-3257
ccugucuggggagucugagaga

SEQ ID NO: 15268 - RNA, 23 nt, Artificial Sequence
  Synthetic oligonucleotide: PDCD1-3258
gccugucuggggagucugagaga

SEQ ID NO: 15269 - RNA, 24 nt, Artificial Sequence
  Synthetic oligonucleotide: PDCD1-3259
ggccugucuggggagucugagaga

SEQ ID NO: 15270 - RNA, 18 nt, Artificial Sequence
  Synthetic oligonucleotide: PDCD1-3260
gauggagagaggugagga

SEQ ID NO: 15271 - RNA, 19 nt, Artificial Sequence
  Synthetic oligonucleotide: PDCD1-3261
agauggagagaggugagga

SEQ ID NO: 15272 - RNA, 20 nt, Artificial Sequence
  Synthetic oligonucleotide: PDCD1-98
gagauggagagaggugagga

SEQ ID NO: 15273 - RNA, 21 nt, Artificial Sequence
  Synthetic oligonucleotide: PDCD1-3262
agagauggagagaggugagga

SEQ ID NO: 15274 - RNA, 22 nt, Artificial Sequence
  Synthetic oligonucleotide: PDCD1-3263
gagagauggagagaggugagga

SEQ ID NO: 15275 - RNA, 23 nt, Artificial Sequence
  Synthetic oligonucleotide: PDCD1-3264
ugagagauggagagaggugagga

SEQ ID NO: 15276 - RNA, 24 nt, Artificial Sequence
  Synthetic oligonucleotide: PDCD1-3265
cugagagauggagagaggugagga

SEQ ID NO: 15277 - RNA, 18 nt, Artificial Sequence
  Synthetic oligonucleotide: PDCD1-3266
gggagucugagagaugga

SEQ ID NO: 15278 - RNA, 19 nt, Artificial Sequence
  Synthetic oligonucleotide: PDCD1-3267
ggggagucugagagaugga

SEQ ID NO: 15279 - RNA, 20 nt, Artificial Sequence
  Synthetic oligonucleotide: PDCD1-599
uggggagucugagagaugga

SEQ ID NO: 15280 - RNA, 21 nt, Artificial Sequence
  Synthetic oligonucleotide: PDCD1-3268
cuggggagucugagagaugga

SEQ ID NO: 15281 - RNA, 22 nt, Artificial Sequence
  Synthetic oligonucleotide: PDCD1-3269
ucuggggagucugagagaugga

SEQ ID NO: 15282 - RNA, 23 nt, Artificial Sequence
  Synthetic oligonucleotide: PDCD1-3270
gucuggggagucugagagaugga

SEQ ID NO: 15283 - RNA, 24 nt, Artificial Sequence
  Synthetic oligonucleotide: PDCD1-3271
ugucuggggagucugagagaugga

SEQ ID NO: 15284 - RNA, 18 nt, Artificial Sequence
  Synthetic oligonucleotide: PDCD1-3272
guugggcaguugugugac

SEQ ID NO: 15285 - RNA, 19 nt, Artificial Sequence
  Synthetic oligonucleotide: PDCD1-3273
cguugggcaguugugugac

SEQ ID NO: 15286 - RNA, 20 nt, Artificial Sequence
  Synthetic oligonucleotide: PDCD1-635
ccguugggcaguugugugac

SEQ ID NO: 15287 - RNA, 21 nt, Artificial Sequence
  Synthetic oligonucleotide: PDCD1-3274
cccguugggcaguugugugac

SEQ ID NO: 15288 - RNA, 22 nt, Artificial Sequence
  Synthetic oligonucleotide: PDCD1-3275
gcccguugggcaguugugugac

SEQ ID NO: 15289 - RNA, 23 nt, Artificial Sequence
  Synthetic oligonucleotide: PDCD1-3276
cgcccguugggcaguugugugac

SEQ ID NO: 15290 - RNA, 24 nt, Artificial Sequence
  Synthetic oligonucleotide: PDCD1-3277
acgcccguugggcaguugugugac

SEQ ID NO: 15291 - RNA, 18 nt, Artificial Sequence
  Synthetic oligonucleotide: PDCD1-3278
uuguccccuucggucacc

SEQ ID NO: 15292 - RNA, 19 nt, Artificial Sequence
  Synthetic oligonucleotide: PDCD1-3279
guuguccccuucggucacc

SEQ ID NO: 15293 - RNA, 20 nt, Artificial Sequence
  Synthetic oligonucleotide: PDCD1-621
cguuguccccuucggucacc

SEQ ID NO: 15294 - RNA, 21 nt, Artificial Sequence
  Synthetic oligonucleotide: PDCD1-3280
gcguuguccccuucggucacc

SEQ ID NO: 15295 - RNA, 22 nt, Artificial Sequence
  Synthetic oligonucleotide: PDCD1-3281
ggcguuguccccuucggucacc

SEQ ID NO: 15296 - RNA, 23 nt, Artificial Sequence
  Synthetic oligonucleotide: PDCD1-3282
uggcguuguccccuucggucacc

SEQ ID NO: 15297 - RNA, 24 nt, Artificial Sequence
  Synthetic oligonucleotide: PDCD1-3283
guggcguuguccccuucggucacc

SEQ ID NO: 15298 - RNA, 18 nt, Artificial Sequence
  Synthetic oligonucleotide: PDCD1-3284
gaggccgcaccugucacc

SEQ ID NO: 15299 - RNA, 19 nt, Artificial Sequence
  Synthetic oligonucleotide: PDCD1-3285
cgaggccgcaccugucacc

SEQ ID NO: 15300 - RNA, 20 nt, Artificial Sequence
  Synthetic oligonucleotide: PDCD1-807
ccgaggccgcaccugucacc

SEQ ID NO: 15301 - RNA, 21 nt, Artificial Sequence
  Synthetic oligonucleotide: PDCD1-3286
uccgaggccgcaccugucacc

SEQ ID NO: 15302 - RNA, 22 nt, Artificial Sequence
  Synthetic oligonucleotide: PDCD1-3287
cuccgaggccgcaccugucacc

SEQ ID NO: 15303 - RNA, 23 nt, Artificial Sequence
  Synthetic oligonucleotide: PDCD1-3288
ccuccgaggccgcaccugucacc

SEQ ID NO: 15304 - RNA, 24 nt, Artificial Sequence
  Synthetic oligonucleotide: PDCD1-3289
gccuccgaggccgcaccugucacc

SEQ ID NO: 15305 - RNA, 18 nt, Artificial Sequence
  Synthetic oligonucleotide: PDCD1-3290
cucucuuugaucugcgcc

SEQ ID NO: 15306 - RNA, 19 nt, Artificial Sequence
  Synthetic oligonucleotide: PDCD1-3291
gcucucuuugaucugcgcc

SEQ ID NO: 15307 - RNA, 20 nt, Artificial Sequence
  Synthetic oligonucleotide: PDCD1-646
ggcucucuuugaucugcgcc

SEQ ID NO: 15308 - RNA, 21 nt, Artificial Sequence
  Synthetic oligonucleotide: PDCD1-3292
aggcucucuuugaucugcgcc

SEQ ID NO: 15309 - RNA, 22 nt, Artificial Sequence
  Synthetic oligonucleotide: PDCD1-3293
caggcucucuuugaucugcgcc

SEQ ID NO: 15310 - RNA, 23 nt, Artificial Sequence
  Synthetic oligonucleotide: PDCD1-3294
gcaggcucucuuugaucugcgcc

SEQ ID NO: 15311 - RNA, 24 nt, Artificial Sequence
  Synthetic oligonucleotide: PDCD1-3295
cgcaggcucucuuugaucugcgcc

SEQ ID NO: 15312 - RNA, 18 nt, Artificial Sequence
  Synthetic oligonucleotide: PDCD1-3296
aucugcgccuugggggcc

SEQ ID NO: 15313 - RNA, 19 nt, Artificial Sequence
  Synthetic oligonucleotide: PDCD1-3297
gaucugcgccuugggggcc

SEQ ID NO: 15314 - RNA, 20 nt, Artificial Sequence
  Synthetic oligonucleotide: PDCD1-46
ugaucugcgccuugggggcc

SEQ ID NO: 15315 - RNA, 21 nt, Artificial Sequence
  Synthetic oligonucleotide: PDCD1-3298
uugaucugcgccuugggggcc

SEQ ID NO: 15316 - RNA, 22 nt, Artificial Sequence
  Synthetic oligonucleotide: PDCD1-3299
uuugaucugcgccuugggggcc

SEQ ID NO: 15317 - RNA, 23 nt, Artificial Sequence
  Synthetic oligonucleotide: PDCD1-3300
cuuugaucugcgccuugggggcc

SEQ ID NO: 15318 - RNA, 24 nt, Artificial Sequence
  Synthetic oligonucleotide: PDCD1-3301
ucuuugaucugcgccuugggggcc

SEQ ID NO: 15319 - RNA, 18 nt, Artificial Sequence
  Synthetic oligonucleotide: PDCD1-3302
cugugggaucugcaugcc

SEQ ID NO: 15320 - RNA, 19 nt, Artificial Sequence
  Synthetic oligonucleotide: PDCD1-3303
ccugugggaucugcaugcc

SEQ ID NO: 15321 - RNA, 20 nt, Artificial Sequence
  Synthetic oligonucleotide: PDCD1-127
gccugugggaucugcaugcc

SEQ ID NO: 15322 - RNA, 21 nt, Artificial Sequence
  Synthetic oligonucleotide: PDCD1-3304
cgccugugggaucugcaugcc

SEQ ID NO: 15323 - RNA, 22 nt, Artificial Sequence
  Synthetic oligonucleotide: PDCD1-3305
gcgccugugggaucugcaugcc

SEQ ID NO: 15324 - RNA, 23 nt, Artificial Sequence
  Synthetic oligonucleotide: PDCD1-3306
ggcgccugugggaucugcaugcc

SEQ ID NO: 15325 - RNA, 24 nt, Artificial Sequence
  Synthetic oligonucleotide: PDCD1-3307
gggcgccugugggaucugcaugcc

SEQ ID NO: 15326 - RNA, 18 nt, Artificial Sequence
  Synthetic oligonucleotide: PDCD1-3308
ccgggcuggcugcggucc

SEQ ID NO: 15327 - RNA, 19 nt, Artificial Sequence
  Synthetic oligonucleotide: PDCD1-3309
gccgggcuggcugcggucc

SEQ ID NO: 15328 - RNA, 20 nt, Artificial Sequence
  Synthetic oligonucleotide: PDCD1-632
ggccgggcuggcugcggucc

SEQ ID NO: 15329 - RNA, 21 nt, Artificial Sequence
  Synthetic oligonucleotide: PDCD1-3310
uggccgggcuggcugcggucc

SEQ ID NO: 15330 - RNA, 22 nt, Artificial Sequence
  Synthetic oligonucleotide: PDCD1-3311
cuggccgggcuggcugcggucc

SEQ ID NO: 15331 - RNA, 23 nt, Artificial Sequence
  Synthetic oligonucleotide: PDCD1-3312
ccuggccgggcuggcugcggucc

SEQ ID NO: 15332 - RNA, 24 nt, Artificial Sequence
  Synthetic oligonucleotide: PDCD1-3313
uccuggccgggcuggcugcggucc

SEQ ID NO: 15333 - RNA, 18 nt, Artificial Sequence
  Synthetic oligonucleotide: PDCD1-3314
augcgguaccaguuuagc

SEQ ID NO: 15334 - RNA, 19 nt, Artificial Sequence
  Synthetic oligonucleotide: PDCD1-3315
caugcgguaccaguuuagc

SEQ ID NO: 15335 - RNA, 20 nt, Artificial Sequence
  Synthetic oligonucleotide: PDCD1-626
ucaugcgguaccaguuuagc

SEQ ID NO: 15336 - RNA, 21 nt, Artificial Sequence
  Synthetic oligonucleotide: PDCD1-3316
cucaugcgguaccaguuuagc

SEQ ID NO: 15337 - RNA, 22 nt, Artificial Sequence
  Synthetic oligonucleotide: PDCD1-3317
gcucaugcgguaccaguuuagc

SEQ ID NO: 15338 - RNA, 23 nt, Artificial Sequence
  Synthetic oligonucleotide: PDCD1-3318
ggcucaugcgguaccaguuuagc

SEQ ID NO: 15339 - RNA, 24 nt, Artificial Sequence
  Synthetic oligonucleotide: PDCD1-3319
gggcucaugcgguaccaguuuagc

SEQ ID NO: 15340 - RNA, 18 nt, Artificial Sequence
  Synthetic oligonucleotide: PDCD1-3320
ggucaccacgagcagggc

SEQ ID NO: 15341 - RNA, 19 nt, Artificial Sequence
  Synthetic oligonucleotide: PDCD1-3321
cggucaccacgagcagggc

SEQ ID NO: 15342 - RNA, 20 nt, Artificial Sequence
  Synthetic oligonucleotide: PDCD1-80
ucggucaccacgagcagggc

SEQ ID NO: 15343 - RNA, 21 nt, Artificial Sequence
  Synthetic oligonucleotide: PDCD1-3322
uucggucaccacgagcagggc

SEQ ID NO: 15344 - RNA, 22 nt, Artificial Sequence
  Synthetic oligonucleotide: PDCD1-3323
cuucggucaccacgagcagggc

SEQ ID NO: 15345 - RNA, 23 nt, Artificial Sequence
  Synthetic oligonucleotide: PDCD1-3324
ccuucggucaccacgagcagggc

SEQ ID NO: 15346 - RNA, 24 nt, Artificial Sequence
  Synthetic oligonucleotide: PDCD1-3325
cccuucggucaccacgagcagggc

SEQ ID NO: 15347 - RNA, 18 nt, Artificial Sequence
  Synthetic oligonucleotide: PDCD1-3326
gaucugcgccuugggggc

SEQ ID NO: 15348 - RNA, 19 nt, Artificial Sequence
  Synthetic oligonucleotide: PDCD1-3327
ugaucugcgccuugggggc

SEQ ID NO: 15349 - RNA, 20 nt, Artificial Sequence
  Synthetic oligonucleotide: PDCD1-643
uugaucugcgccuugggggc

SEQ ID NO: 15350 - RNA, 21 nt, Artificial Sequence
  Synthetic oligonucleotide: PDCD1-3328
uuugaucugcgccuugggggc

SEQ ID NO: 15351 - RNA, 22 nt, Artificial Sequence
  Synthetic oligonucleotide: PDCD1-3329
cuuugaucugcgccuugggggc

SEQ ID NO: 15352 - RNA, 23 nt, Artificial Sequence
  Synthetic oligonucleotide: PDCD1-3330
ucuuugaucugcgccuugggggc

SEQ ID NO: 15353 - RNA, 24 nt, Artificial Sequence
  Synthetic oligonucleotide: PDCD1-3331
cucuuugaucugcgccuugggggc

SEQ ID NO: 15354 - RNA, 18 nt, Artificial Sequence
  Synthetic oligonucleotide: PDCD1-3332
accgcccagacgacuggc

SEQ ID NO: 15355 - RNA, 19 nt, Artificial Sequence
  Synthetic oligonucleotide: PDCD1-3333
caccgcccagacgacuggc

SEQ ID NO: 15356 - RNA, 20 nt, Artificial Sequence
  Synthetic oligonucleotide: PDCD1-592
gcaccgcccagacgacuggc

SEQ ID NO: 15357 - RNA, 21 nt, Artificial Sequence
  Synthetic oligonucleotide: PDCD1-3334
agcaccgcccagacgacuggc

SEQ ID NO: 15358 - RNA, 22 nt, Artificial Sequence
  Synthetic oligonucleotide: PDCD1-3335
uagcaccgcccagacgacuggc

SEQ ID NO: 15359 - RNA, 23 nt, Artificial Sequence
  Synthetic oligonucleotide: PDCD1-3336
guagcaccgcccagacgacuggc

SEQ ID NO: 15360 - RNA, 24 nt, Artificial Sequence
  Synthetic oligonucleotide: PDCD1-3337
uguagcaccgcccagacgacuggc

SEQ ID NO: 15361 - RNA, 18 nt, Artificial Sequence
  Synthetic oligonucleotide: PDCD1-3338
ccugugggaucugcaugc

SEQ ID NO: 15362 - RNA, 19 nt, Artificial Sequence
  Synthetic oligonucleotide: PDCD1-3339
gccugugggaucugcaugc

SEQ ID NO: 15363 - RNA, 20 nt, Artificial Sequence
  Synthetic oligonucleotide: PDCD1-589
cgccugugggaucugcaugc

SEQ ID NO: 15364 - RNA, 21 nt, Artificial Sequence
  Synthetic oligonucleotide: PDCD1-3340
gcgccugugggaucugcaugc

SEQ ID NO: 15365 - RNA, 22 nt, Artificial Sequence
  Synthetic oligonucleotide: PDCD1-3341
ggcgccugugggaucugcaugc

SEQ ID NO: 15366 - RNA, 23 nt, Artificial Sequence
  Synthetic oligonucleotide: PDCD1-3342
gggcgccugugggaucugcaugc

SEQ ID NO: 15367 - RNA, 24 nt, Artificial Sequence
  Synthetic oligonucleotide: PDCD1-3343
agggcgccugugggaucugcaugc

SEQ ID NO: 15368 - RNA, 18 nt, Artificial Sequence
  Synthetic oligonucleotide: PDCD1-3344
gcuuguccgucugguugc

SEQ ID NO: 15369 - RNA, 19 nt, Artificial Sequence
  Synthetic oligonucleotide: PDCD1-3345
agcuuguccgucugguugc

SEQ ID NO: 15370 - RNA, 20 nt, Artificial Sequence
  Synthetic oligonucleotide: PDCD1-69
cagcuuguccgucugguugc

SEQ ID NO: 15371 - RNA, 21 nt, Artificial Sequence
  Synthetic oligonucleotide: PDCD1-3346
ccagcuuguccgucugguugc

SEQ ID NO: 15372 - RNA, 22 nt, Artificial Sequence
  Synthetic oligonucleotide: PDCD1-3347
gccagcuuguccgucugguugc

SEQ ID NO: 15373 - RNA, 23 nt, Artificial Sequence
  Synthetic oligonucleotide: PDCD1-3348
ggccagcuuguccgucugguugc

SEQ ID NO: 15374 - RNA, 24 nt, Artificial Sequence
  Synthetic oligonucleotide: PDCD1-3349
cggccagcuuguccgucugguugc

SEQ ID NO: 15375 - RNA, 18 nt, Artificial Sequence
  Synthetic oligonucleotide: PDCD1-3350
gggcuggcugcgguccuc

SEQ ID NO: 15376 - RNA, 19 nt, Artificial Sequence
  Synthetic oligonucleotide: PDCD1-3351
cgggcuggcugcgguccuc

SEQ ID NO: 15377 - RNA, 20 nt, Artificial Sequence
  Synthetic oligonucleotide: PDCD1-64
ccgggcuggcugcgguccuc

SEQ ID NO: 15378 - RNA, 21 nt, Artificial Sequence
  Synthetic oligonucleotide: PDCD1-3352
gccgggcuggcugcgguccuc

SEQ ID NO: 15379 - RNA, 22 nt, Artificial Sequence
  Synthetic oligonucleotide: PDCD1-3353
ggccgggcuggcugcgguccuc

SEQ ID NO: 15380 - RNA, 23 nt, Artificial Sequence
  Synthetic oligonucleotide: PDCD1-3354
uggccgggcuggcugcgguccuc

SEQ ID NO: 15381 - RNA, 24 nt, Artificial Sequence
  Synthetic oligonucleotide: PDCD1-3355
cuggccgggcuggcugcgguccuc

SEQ ID NO: 15382 - RNA, 18 nt, Artificial Sequence
  Synthetic oligonucleotide: PDCD1-3356
gggguuccagggccuguc

SEQ ID NO: 15383 - RNA, 19 nt, Artificial Sequence
  Synthetic oligonucleotide: PDCD1-3357
ggggguuccagggccuguc

SEQ ID NO: 15384 - RNA, 20 nt, Artificial Sequence
  Synthetic oligonucleotide: PDCD1-92
gggggguuccagggccuguc

SEQ ID NO: 15385 - RNA, 21 nt, Artificial Sequence
  Synthetic oligonucleotide: PDCD1-3358
ggggggguuccagggccuguc

SEQ ID NO: 15386 - RNA, 22 nt, Artificial Sequence
  Synthetic oligonucleotide: PDCD1-3359
uggggggguuccagggccuguc

SEQ ID NO: 15387 - RNA, 23 nt, Artificial Sequence
  Synthetic oligonucleotide: PDCD1-3360
guggggggguuccagggccuguc

SEQ ID NO: 15388 - RNA, 24 nt, Artificial Sequence
  Synthetic oligonucleotide: PDCD1-3361
gguggggggguuccagggccuguc

SEQ ID NO: 15389 - RNA, 18 nt, Artificial Sequence
  Synthetic oligonucleotide: PDCD1-3362
gagaagguggggggguuc

SEQ ID NO: 15390 - RNA, 19 nt, Artificial Sequence
  Synthetic oligonucleotide: PDCD1-3363
ggagaagguggggggguuc

SEQ ID NO: 15391 - RNA, 20 nt, Artificial Sequence
  Synthetic oligonucleotide: PDCD1-609
gggagaagguggggggguuc

SEQ ID NO: 15392 - RNA, 21 nt, Artificial Sequence
  Synthetic oligonucleotide: PDCD1-3364
ggggagaagguggggggguuc

SEQ ID NO: 15393 - RNA, 22 nt, Artificial Sequence
  Synthetic oligonucleotide: PDCD1-3365
uggggagaagguggggggguuc

SEQ ID NO: 15394 - RNA, 23 nt, Artificial Sequence
  Synthetic oligonucleotide: PDCD1-3366
cuggggagaagguggggggguuc

SEQ ID NO: 15395 - RNA, 24 nt, Artificial Sequence
  Synthetic oligonucleotide: PDCD1-3367
gcuggggagaagguggggggguuc

SEQ ID NO: 15396 - RNA, 18 nt, Artificial Sequence
  Synthetic oligonucleotide: PDCD1-3368
agcagggcuggggagaag

SEQ ID NO: 15397 - RNA, 19 nt, Artificial Sequence
  Synthetic oligonucleotide: PDCD1-3369
gagcagggcuggggagaag

SEQ ID NO: 15398 - RNA, 20 nt, Artificial Sequence
  Synthetic oligonucleotide: PDCD1-614
cgagcagggcuggggagaag

SEQ ID NO: 15399 - RNA, 21 nt, Artificial Sequence
  Synthetic oligonucleotide: PDCD1-3370
acgagcagggcuggggagaag

SEQ ID NO: 15400 - RNA, 22 nt, Artificial Sequence
  Synthetic oligonucleotide: PDCD1-3371
cacgagcagggcuggggagaag

SEQ ID NO: 15401 - RNA, 23 nt, Artificial Sequence
  Synthetic oligonucleotide: PDCD1-3372
ccacgagcagggcuggggagaag

SEQ ID NO: 15402 - RNA, 24 nt, Artificial Sequence
  Synthetic oligonucleotide: PDCD1-3373
accacgagcagggcuggggagaag

SEQ ID NO: 15403 - RNA, 18 nt, Artificial Sequence
  Synthetic oligonucleotide: PDCD1-3374
guguuggagaagcugcag

SEQ ID NO: 15404 - RNA, 19 nt, Artificial Sequence
  Synthetic oligonucleotide: PDCD1-3375
uguguuggagaagcugcag

SEQ ID NO: 15405 - RNA, 20 nt, Artificial Sequence
  Synthetic oligonucleotide: PDCD1-622
auguguuggagaagcugcag

SEQ ID NO: 15406 - RNA, 21 nt, Artificial Sequence
  Synthetic oligonucleotide: PDCD1-3376
gauguguuggagaagcugcag

SEQ ID NO: 15407 - RNA, 22 nt, Artificial Sequence
  Synthetic oligonucleotide: PDCD1-3377
cgauguguuggagaagcugcag

SEQ ID NO: 15408 - RNA, 23 nt, Artificial Sequence
  Synthetic oligonucleotide: PDCD1-3378
ccgauguguuggagaagcugcag

SEQ ID NO: 15409 - RNA, 24 nt, Artificial Sequence
  Synthetic oligonucleotide: PDCD1-3379
uccgauguguuggagaagcugcag

SEQ ID NO: 15410 - RNA, 18 nt, Artificial Sequence
  Synthetic oligonucleotide: PDCD1-3380
ucugagagauggagagag

SEQ ID NO: 15411 - RNA, 19 nt, Artificial Sequence
  Synthetic oligonucleotide: PDCD1-3381
gucugagagauggagagag

SEQ ID NO: 15412 - RNA, 20 nt, Artificial Sequence
  Synthetic oligonucleotide: PDCD1-598
agucugagagauggagagag

SEQ ID NO: 15413 - RNA, 21 nt, Artificial Sequence
  Synthetic oligonucleotide: PDCD1-3382
gagucugagagauggagagag

SEQ ID NO: 15414 - RNA, 22 nt, Artificial Sequence
  Synthetic oligonucleotide: PDCD1-3383
ggagucugagagauggagagag

SEQ ID NO: 15415 - RNA, 23 nt, Artificial Sequence
  Synthetic oligonucleotide: PDCD1-3384
gggagucugagagauggagagag

SEQ ID NO: 15416 - RNA, 24 nt, Artificial Sequence
  Synthetic oligonucleotide: PDCD1-3385
ggggagucugagagauggagagag

SEQ ID NO: 15417 - RNA, 18 nt, Artificial Sequence
  Synthetic oligonucleotide: PDCD1-3386
gucuggggagucugagag

SEQ ID NO: 15418 - RNA, 19 nt, Artificial Sequence
  Synthetic oligonucleotide: PDCD1-3387
ugucuggggagucugagag

SEQ ID NO: 15419 - RNA, 20 nt, Artificial Sequence
  Synthetic oligonucleotide: PDCD1-602
cugucuggggagucugagag

SEQ ID NO: 15420 - RNA, 21 nt, Artificial Sequence
  Synthetic oligonucleotide: PDCD1-3388
ccugucuggggagucugagag

SEQ ID NO: 15421 - RNA, 22 nt, Artificial Sequence
  Synthetic oligonucleotide: PDCD1-3389
gccugucuggggagucugagag

SEQ ID NO: 15422 - RNA, 23 nt, Artificial Sequence
  Synthetic oligonucleotide: PDCD1-3390
ggccugucuggggagucugagag

SEQ ID NO: 15423 - RNA, 24 nt, Artificial Sequence
  Synthetic oligonucleotide: PDCD1-3391
gggccugucuggggagucugagag

SEQ ID NO: 15424 - RNA, 18 nt, Artificial Sequence
  Synthetic oligonucleotide: PDCD1-3392
cccuucggucaccacgag

SEQ ID NO: 15425 - RNA, 19 nt, Artificial Sequence
  Synthetic oligonucleotide: PDCD1-3393
ccccuucggucaccacgag

SEQ ID NO: 15426 - RNA, 20 nt, Artificial Sequence
  Synthetic oligonucleotide: PDCD1-620
uccccuucggucaccacgag

SEQ ID NO: 15427 - RNA, 21 nt, Artificial Sequence
  Synthetic oligonucleotide: PDCD1-3394
guccccuucggucaccacgag

SEQ ID NO: 15428 - RNA, 22 nt, Artificial Sequence
  Synthetic oligonucleotide: PDCD1-3395
uguccccuucggucaccacgag

SEQ ID NO: 15429 - RNA, 23 nt, Artificial Sequence
  Synthetic oligonucleotide: PDCD1-3396
uuguccccuucggucaccacgag

SEQ ID NO: 15430 - RNA, 24 nt, Artificial Sequence
  Synthetic oligonucleotide: PDCD1-3397
guuguccccuucggucaccacgag

SEQ ID NO: 15431 - RNA, 18 nt, Artificial Sequence
  Synthetic oligonucleotide: PDCD1-3398
auguggaagucacgcccg

SEQ ID NO: 15432 - RNA, 19 nt, Artificial Sequence
  Synthetic oligonucleotide: PDCD1-3399
cauguggaagucacgcccg

SEQ ID NO: 15433 - RNA, 20 nt, Artificial Sequence
  Synthetic oligonucleotide: PDCD1-636
ucauguggaagucacgcccg

SEQ ID NO: 15434 - RNA, 21 nt, Artificial Sequence
  Synthetic oligonucleotide: PDCD1-3400
cucauguggaagucacgcccg

SEQ ID NO: 15435 - RNA, 22 nt, Artificial Sequence
  Synthetic oligonucleotide: PDCD1-3401
gcucauguggaagucacgcccg

SEQ ID NO: 15436 - RNA, 23 nt, Artificial Sequence
  Synthetic oligonucleotide: PDCD1-3402
cgcucauguggaagucacgcccg

SEQ ID NO: 15437 - RNA, 24 nt, Artificial Sequence
  Synthetic oligonucleotide: PDCD1-3403
acgcucauguggaagucacgcccg

SEQ ID NO: 15438 - RNA, 18 nt, Artificial Sequence
  Synthetic oligonucleotide: PDCD1-3404
ggugccgcugucauugcg

SEQ ID NO: 15439 - RNA, 19 nt, Artificial Sequence
  Synthetic oligonucleotide: PDCD1-3405
aggugccgcugucauugcg

SEQ ID NO: 15440 - RNA, 20 nt, Artificial Sequence
  Synthetic oligonucleotide: PDCD1-639
uaggugccgcugucauugcg

SEQ ID NO: 15441 - RNA, 21 nt, Artificial Sequence
  Synthetic oligonucleotide: PDCD1-3406
guaggugccgcugucauugcg

SEQ ID NO: 15442 - RNA, 22 nt, Artificial Sequence
  Synthetic oligonucleotide: PDCD1-3407
gguaggugccgcugucauugcg

SEQ ID NO: 15443 - RNA, 23 nt, Artificial Sequence
  Synthetic oligonucleotide: PDCD1-3408
agguaggugccgcugucauugcg

SEQ ID NO: 15444 - RNA, 24 nt, Artificial Sequence
  Synthetic oligonucleotide: PDCD1-3409
gagguaggugccgcugucauugcg

SEQ ID NO: 15445 - RNA, 18 nt, Artificial Sequence
  Synthetic oligonucleotide: PDCD1-3410
ggcuggcugcgguccucg

SEQ ID NO: 15446 - RNA, 19 nt, Artificial Sequence
  Synthetic oligonucleotide: PDCD1-3411
gggcuggcugcgguccucg

SEQ ID NO: 15447 - RNA, 20 nt, Artificial Sequence
  Synthetic oligonucleotide: PDCD1-65
cgggcuggcugcgguccucg

SEQ ID NO: 15448 - RNA, 21 nt, Artificial Sequence
  Synthetic oligonucleotide: PDCD1-3412
ccgggcuggcugcgguccucg

SEQ ID NO: 15449 - RNA, 22 nt, Artificial Sequence
  Synthetic oligonucleotide: PDCD1-3413
gccgggcuggcugcgguccucg

SEQ ID NO: 15450 - RNA, 23 nt, Artificial Sequence
  Synthetic oligonucleotide: PDCD1-3414
ggccgggcuggcugcgguccucg

SEQ ID NO: 15451 - RNA, 24 nt, Artificial Sequence
  Synthetic oligonucleotide: PDCD1-3415
uggccgggcuggcugcgguccucg

SEQ ID NO: 15452 - RNA, 18 nt, Artificial Sequence
  Synthetic oligonucleotide: PDCD1-3416
gcagggcuggggagaagg

SEQ ID NO: 15453 - RNA, 19 nt, Artificial Sequence
  Synthetic oligonucleotide: PDCD1-3417
agcagggcuggggagaagg

SEQ ID NO: 15454 - RNA, 20 nt, Artificial Sequence
  Synthetic oligonucleotide: PDCD1-84
gagcagggcuggggagaagg

SEQ ID NO: 15455 - RNA, 21 nt, Artificial Sequence
  Synthetic oligonucleotide: PDCD1-3418
cgagcagggcuggggagaagg

SEQ ID NO: 15456 - RNA, 22 nt, Artificial Sequence
  Synthetic oligonucleotide: PDCD1-3419
acgagcagggcuggggagaagg

SEQ ID NO: 15457 - RNA, 23 nt, Artificial Sequence
  Synthetic oligonucleotide: PDCD1-3420
cacgagcagggcuggggagaagg

SEQ ID NO: 15458 - RNA, 24 nt, Artificial Sequence
  Synthetic oligonucleotide: PDCD1-3421
ccacgagcagggcuggggagaagg

SEQ ID NO: 15459 - RNA, 18 nt, Artificial Sequence
  Synthetic oligonucleotide: PDCD1-3422
agauggagagaggugagg

SEQ ID NO: 15460 - RNA, 19 nt, Artificial Sequence
  Synthetic oligonucleotide: PDCD1-3423
gagauggagagaggugagg

SEQ ID NO: 15461 - RNA, 20 nt, Artificial Sequence
  Synthetic oligonucleotide: PDCD1-595
agagauggagagaggugagg

SEQ ID NO: 15462 - RNA, 21 nt, Artificial Sequence
  Synthetic oligonucleotide: PDCD1-3424
gagagauggagagaggugagg

SEQ ID NO: 15463 - RNA, 22 nt, Artificial Sequence
  Synthetic oligonucleotide: PDCD1-3425
ugagagauggagagaggugagg

SEQ ID NO: 15464 - RNA, 23 nt, Artificial Sequence
  Synthetic oligonucleotide: PDCD1-3426
cugagagauggagagaggugagg

SEQ ID NO: 15465 - RNA, 24 nt, Artificial Sequence
  Synthetic oligonucleotide: PDCD1-3427
ucugagagauggagagaggugagg

SEQ ID NO: 15466 - RNA, 18 nt, Artificial Sequence
  Synthetic oligonucleotide: PDCD1-3428
cggucaccacgagcaggg

SEQ ID NO: 15467 - RNA, 19 nt, Artificial Sequence
  Synthetic oligonucleotide: PDCD1-3429
ucggucaccacgagcaggg

SEQ ID NO: 15468 - RNA, 20 nt, Artificial Sequence
  Synthetic oligonucleotide: PDCD1-619
uucggucaccacgagcaggg

SEQ ID NO: 15469 - RNA, 21 nt, Artificial Sequence
  Synthetic oligonucleotide: PDCD1-3430
cuucggucaccacgagcaggg

SEQ ID NO: 15470 - RNA, 22 nt, Artificial Sequence
  Synthetic oligonucleotide: PDCD1-3431
ccuucggucaccacgagcaggg

SEQ ID NO: 15471 - RNA, 23 nt, Artificial Sequence
  Synthetic oligonucleotide: PDCD1-3432
cccuucggucaccacgagcaggg

SEQ ID NO: 15472 - RNA, 24 nt, Artificial Sequence
  Synthetic oligonucleotide: PDCD1-3433
ccccuucggucaccacgagcaggg

SEQ ID NO: 15473 - RNA, 18 nt, Artificial Sequence
  Synthetic oligonucleotide: PDCD1-3434
accacgagcagggcuggg

SEQ ID NO: 15474 - RNA, 19 nt, Artificial Sequence
  Synthetic oligonucleotide: PDCD1-3435
caccacgagcagggcuggg

SEQ ID NO: 15475 - RNA, 20 nt, Artificial Sequence
  Synthetic oligonucleotide: PDCD1-615
ucaccacgagcagggcuggg

SEQ ID NO: 15476 - RNA, 21 nt, Artificial Sequence
  Synthetic oligonucleotide: PDCD1-3436
gucaccacgagcagggcuggg

SEQ ID NO: 15477 - RNA, 22 nt, Artificial Sequence
  Synthetic oligonucleotide: PDCD1-3437
ggucaccacgagcagggcuggg

SEQ ID NO: 15478 - RNA, 23 nt, Artificial Sequence
  Synthetic oligonucleotide: PDCD1-3438
cggucaccacgagcagggcuggg

SEQ ID NO: 15479 - RNA, 24 nt, Artificial Sequence
  Synthetic oligonucleotide: PDCD1-3439
ucggucaccacgagcagggcuggg

SEQ ID NO: 15480 - RNA, 18 nt, Artificial Sequence
  Synthetic oligonucleotide: PDCD1-3440
cggaagcggcaguccugg

SEQ ID NO: 15481 - RNA, 19 nt, Artificial Sequence
  Synthetic oligonucleotide: PDCD1-3441
acggaagcggcaguccugg

SEQ ID NO: 15482 - RNA, 20 nt, Artificial Sequence
  Synthetic oligonucleotide: PDCD1-633
cacggaagcggcaguccugg

SEQ ID NO: 15483 - RNA, 21 nt, Artificial Sequence
  Synthetic oligonucleotide: PDCD1-3442
acacggaagcggcaguccugg

SEQ ID NO: 15484 - RNA, 22 nt, Artificial Sequence
  Synthetic oligonucleotide: PDCD1-3443
gacacggaagcggcaguccugg

SEQ ID NO: 15485 - RNA, 23 nt, Artificial Sequence
  Synthetic oligonucleotide: PDCD1-3444
ugacacggaagcggcaguccugg

SEQ ID NO: 15486 - RNA, 24 nt, Artificial Sequence
  Synthetic oligonucleotide: PDCD1-3445
gugacacggaagcggcaguccugg

SEQ ID NO: 15487 - RNA, 18 nt, Artificial Sequence
  Synthetic oligonucleotide: PDCD1-3446
gcccugaccacgcucaug

SEQ ID NO: 15488 - RNA, 19 nt, Artificial Sequence
  Synthetic oligonucleotide: PDCD1-3447
ggcccugaccacgcucaug

SEQ ID NO: 15489 - RNA, 20 nt, Artificial Sequence
  Synthetic oligonucleotide: PDCD1-53
gggcccugaccacgcucaug

SEQ ID NO: 15490 - RNA, 21 nt, Artificial Sequence
  Synthetic oligonucleotide: PDCD1-3448
cgggcccugaccacgcucaug

SEQ ID NO: 15491 - RNA, 22 nt, Artificial Sequence
  Synthetic oligonucleotide: PDCD1-3449
ccgggcccugaccacgcucaug

SEQ ID NO: 15492 - RNA, 23 nt, Artificial Sequence
  Synthetic oligonucleotide: PDCD1-3450
gccgggcccugaccacgcucaug

SEQ ID NO: 15493 - RNA, 24 nt, Artificial Sequence
  Synthetic oligonucleotide: PDCD1-3451
cgccgggcccugaccacgcucaug

SEQ ID NO: 15494 - RNA, 18 nt, Artificial Sequence
  Synthetic oligonucleotide: PDCD1-3452
uggggagucugagagaug

SEQ ID NO: 15495 - RNA, 19 nt, Artificial Sequence
  Synthetic oligonucleotide: PDCD1-3453
cuggggagucugagagaug

SEQ ID NO: 15496 - RNA, 20 nt, Artificial Sequence
  Synthetic oligonucleotide: PDCD1-600
ucuggggagucugagagaug

SEQ ID NO: 15497 - RNA, 21 nt, Artificial Sequence
  Synthetic oligonucleotide: PDCD1-3454
gucuggggagucugagagaug

SEQ ID NO: 15498 - RNA, 22 nt, Artificial Sequence
  Synthetic oligonucleotide: PDCD1-3455
ugucuggggagucugagagaug

SEQ ID NO: 15499 - RNA, 23 nt, Artificial Sequence
  Synthetic oligonucleotide: PDCD1-3456
cugucuggggagucugagagaug

SEQ ID NO: 15500 - RNA, 24 nt, Artificial Sequence
  Synthetic oligonucleotide: PDCD1-3457
ccugucuggggagucugagagaug

SEQ ID NO: 15501 - RNA, 18 nt, Artificial Sequence
  Synthetic oligonucleotide: PDCD1-3458
ucaccacgagcagggcug

SEQ ID NO: 15502 - RNA, 19 nt, Artificial Sequence
  Synthetic oligonucleotide: PDCD1-3459
gucaccacgagcagggcug

SEQ ID NO: 15503 - RNA, 20 nt, Artificial Sequence
  Synthetic oligonucleotide: PDCD1-82
ggucaccacgagcagggcug

SEQ ID NO: 15504 - RNA, 21 nt, Artificial Sequence
  Synthetic oligonucleotide: PDCD1-3460
cggucaccacgagcagggcug

SEQ ID NO: 15505 - RNA, 22 nt, Artificial Sequence
  Synthetic oligonucleotide: PDCD1-3461
ucggucaccacgagcagggcug

SEQ ID NO: 15506 - RNA, 23 nt, Artificial Sequence
  Synthetic oligonucleotide: PDCD1-3462
uucggucaccacgagcagggcug

SEQ ID NO: 15507 - RNA, 24 nt, Artificial Sequence
  Synthetic oligonucleotide: PDCD1-3463
cuucggucaccacgagcagggcug

SEQ ID NO: 15508 - RNA, 18 nt, Artificial Sequence
  Synthetic oligonucleotide: PDCD1-3464
agggcuggggagaaggug

SEQ ID NO: 15509 - RNA, 19 nt, Artificial Sequence
  Synthetic oligonucleotide: PDCD1-3465
cagggcuggggagaaggug

SEQ ID NO: 15510 - RNA, 20 nt, Artificial Sequence
  Synthetic oligonucleotide: PDCD1-86
gcagggcuggggagaaggug

SEQ ID NO: 15511 - RNA, 21 nt, Artificial Sequence
  Synthetic oligonucleotide: PDCD1-3466
agcagggcuggggagaaggug

SEQ ID NO: 15512 - RNA, 22 nt, Artificial Sequence
  Synthetic oligonucleotide: PDCD1-3467
gagcagggcuggggagaaggug

SEQ ID NO: 15513 - RNA, 23 nt, Artificial Sequence
  Synthetic oligonucleotide: PDCD1-3468
cgagcagggcuggggagaaggug

SEQ ID NO: 15514 - RNA, 24 nt, Artificial Sequence
  Synthetic oligonucleotide: PDCD1-3469
acgagcagggcuggggagaaggug

SEQ ID NO: 15515 - RNA, 18 nt, Artificial Sequence
  Synthetic oligonucleotide: PDCD1-3470
gagagauggagagaggug

SEQ ID NO: 15516 - RNA, 19 nt, Artificial Sequence
  Synthetic oligonucleotide: PDCD1-3471
ugagagauggagagaggug

SEQ ID NO: 15517 - RNA, 20 nt, Artificial Sequence
  Synthetic oligonucleotide: PDCD1-97
cugagagauggagagaggug

SEQ ID NO: 15518 - RNA, 21 nt, Artificial Sequence
  Synthetic oligonucleotide: PDCD1-3472
ucugagagauggagagaggug

SEQ ID NO: 15519 - RNA, 22 nt, Artificial Sequence
  Synthetic oligonucleotide: PDCD1-3473
gucugagagauggagagaggug

SEQ ID NO: 15520 - RNA, 23 nt, Artificial Sequence
  Synthetic oligonucleotide: PDCD1-3474
agucugagagauggagagaggug

SEQ ID NO: 15521 - RNA, 24 nt, Artificial Sequence
  Synthetic oligonucleotide: PDCD1-3475
gagucugagagauggagagaggug

SEQ ID NO: 15522 - RNA, 18 nt, Artificial Sequence
  Synthetic oligonucleotide: PDCD1-3476
acgaagcucuccgaugug

SEQ ID NO: 15523 - RNA, 19 nt, Artificial Sequence
  Synthetic oligonucleotide: PDCD1-3477
cacgaagcucuccgaugug

SEQ ID NO: 15524 - RNA, 20 nt, Artificial Sequence
  Synthetic oligonucleotide: PDCD1-625
gcacgaagcucuccgaugug

SEQ ID NO: 15525 - RNA, 21 nt, Artificial Sequence
  Synthetic oligonucleotide: PDCD1-3478
agcacgaagcucuccgaugug

SEQ ID NO: 15526 - RNA, 22 nt, Artificial Sequence
  Synthetic oligonucleotide: PDCD1-3479
uagcacgaagcucuccgaugug

SEQ ID NO: 15527 - RNA, 23 nt, Artificial Sequence
  Synthetic oligonucleotide: PDCD1-3480
uuagcacgaagcucuccgaugug

SEQ ID NO: 15528 - RNA, 24 nt, Artificial Sequence
  Synthetic oligonucleotide: PDCD1-3481
uuuagcacgaagcucuccgaugug

SEQ ID NO: 15529 - RNA, 18 nt, Artificial Sequence
  Synthetic oligonucleotide: PDCD1-3482
agcuuguccgucugguug

SEQ ID NO: 15530 - RNA, 19 nt, Artificial Sequence
  Synthetic oligonucleotide: PDCD1-3483
cagcuuguccgucugguug

SEQ ID NO: 15531 - RNA, 20 nt, Artificial Sequence
  Synthetic oligonucleotide: PDCD1-628
ccagcuuguccgucugguug

SEQ ID NO: 15532 - RNA, 21 nt, Artificial Sequence
  Synthetic oligonucleotide: PDCD1-3484
gccagcuuguccgucugguug

SEQ ID NO: 15533 - RNA, 22 nt, Artificial Sequence
  Synthetic oligonucleotide: PDCD1-3485
ggccagcuuguccgucugguug

SEQ ID NO: 15534 - RNA, 23 nt, Artificial Sequence
  Synthetic oligonucleotide: PDCD1-3486
cggccagcuuguccgucugguug

SEQ ID NO: 15535 - RNA, 24 nt, Artificial Sequence
  Synthetic oligonucleotide: PDCD1-3487
gcggccagcuuguccgucugguug

SEQ ID NO: 15536 - RNA, 18 nt, Artificial Sequence
  Synthetic oligonucleotide: PDCD1-3488
aagcucuccgauguguug

SEQ ID NO: 15537 - RNA, 19 nt, Artificial Sequence
  Synthetic oligonucleotide: PDCD1-3489
gaagcucuccgauguguug

SEQ ID NO: 15538 - RNA, 20 nt, Artificial Sequence
  Synthetic oligonucleotide: PDCD1-623
cgaagcucuccgauguguug

SEQ ID NO: 15539 - RNA, 21 nt, Artificial Sequence
  Synthetic oligonucleotide: PDCD1-3490
acgaagcucuccgauguguug

SEQ ID NO: 15540 - RNA, 22 nt, Artificial Sequence
  Synthetic oligonucleotide: PDCD1-3491
cacgaagcucuccgauguguug

SEQ ID NO: 15541 - RNA, 23 nt, Artificial Sequence
  Synthetic oligonucleotide: PDCD1-3492
gcacgaagcucuccgauguguug

SEQ ID NO: 15542 - RNA, 24 nt, Artificial Sequence
  Synthetic oligonucleotide: PDCD1-3493
agcacgaagcucuccgauguguug

SEQ ID NO: 15543 - RNA, 18 nt, Artificial Sequence
  Synthetic oligonucleotide: PDCD1-3494
ggcccugaccacgcucau

SEQ ID NO: 15544 - RNA, 19 nt, Artificial Sequence
  Synthetic oligonucleotide: PDCD1-3495
gggcccugaccacgcucau

SEQ ID NO: 15545 - RNA, 20 nt, Artificial Sequence
  Synthetic oligonucleotide: PDCD1-638
cgggcccugaccacgcucau

SEQ ID NO: 15546 - RNA, 21 nt, Artificial Sequence
  Synthetic oligonucleotide: PDCD1-3496
ccgggcccugaccacgcucau

SEQ ID NO: 15547 - RNA, 22 nt, Artificial Sequence
  Synthetic oligonucleotide: PDCD1-3497
gccgggcccugaccacgcucau

SEQ ID NO: 15548 - RNA, 23 nt, Artificial Sequence
  Synthetic oligonucleotide: PDCD1-3498
cgccgggcccugaccacgcucau

SEQ ID NO: 15549 - RNA, 24 nt, Artificial Sequence
  Synthetic oligonucleotide: PDCD1-3499
gcgccgggcccugaccacgcucau

SEQ ID NO: 15550 - RNA, 18 nt, Artificial Sequence
  Synthetic oligonucleotide: PDCD1-3500
cgccgaccccaccuaccu

SEQ ID NO: 15551 - RNA, 19 nt, Artificial Sequence
  Synthetic oligonucleotide: PDCD1-3501
ccgccgaccccaccuaccu

SEQ ID NO: 15552 - RNA, 20 nt, Artificial Sequence
  Synthetic oligonucleotide: PDCD1-593
accgccgaccccaccuaccu

SEQ ID NO: 15553 - RNA, 21 nt, Artificial Sequence
  Synthetic oligonucleotide: PDCD1-3502
gaccgccgaccccaccuaccu

SEQ ID NO: 15554 - RNA, 22 nt, Artificial Sequence
  Synthetic oligonucleotide: PDCD1-3503
ugaccgccgaccccaccuaccu

SEQ ID NO: 15555 - RNA, 23 nt, Artificial Sequence
  Synthetic oligonucleotide: PDCD1-3504
cugaccgccgaccccaccuaccu

SEQ ID NO: 15556 - RNA, 24 nt, Artificial Sequence
  Synthetic oligonucleotide: PDCD1-3505
ccugaccgccgaccccaccuaccu

SEQ ID NO: 15557 - RNA, 18 nt, Artificial Sequence
  Synthetic oligonucleotide: PDCD1-3506
cgacuggccagggcgccu

SEQ ID NO: 15558 - RNA, 19 nt, Artificial Sequence
  Synthetic oligonucleotide: PDCD1-3507
acgacuggccagggcgccu

SEQ ID NO: 15559 - RNA, 20 nt, Artificial Sequence
  Synthetic oligonucleotide: PDCD1-591
gacgacuggccagggcgccu

SEQ ID NO: 15560 - RNA, 21 nt, Artificial Sequence
  Synthetic oligonucleotide: PDCD1-3508
agacgacuggccagggcgccu

SEQ ID NO: 15561 - RNA, 22 nt, Artificial Sequence
  Synthetic oligonucleotide: PDCD1-3509
cagacgacuggccagggcgccu

SEQ ID NO: 15562 - RNA, 23 nt, Artificial Sequence
  Synthetic oligonucleotide: PDCD1-3510
ccagacgacuggccagggcgccu

SEQ ID NO: 15563 - RNA, 24 nt, Artificial Sequence
  Synthetic oligonucleotide: PDCD1-3511
cccagacgacuggccagggcgccu

SEQ ID NO: 15564 - RNA, 18 nt, Artificial Sequence
  Synthetic oligonucleotide: PDCD1-3512
ucucuuugaucugcgccu

SEQ ID NO: 15565 - RNA, 19 nt, Artificial Sequence
  Synthetic oligonucleotide: PDCD1-3513
cucucuuugaucugcgccu

SEQ ID NO: 15566 - RNA, 20 nt, Artificial Sequence
  Synthetic oligonucleotide: PDCD1-42
gcucucuuugaucugcgccu

SEQ ID NO: 15567 - RNA, 21 nt, Artificial Sequence
  Synthetic oligonucleotide: PDCD1-3514
ggcucucuuugaucugcgccu

SEQ ID NO: 15568 - RNA, 22 nt, Artificial Sequence
  Synthetic oligonucleotide: PDCD1-3515
aggcucucuuugaucugcgccu

SEQ ID NO: 15569 - RNA, 23 nt, Artificial Sequence
  Synthetic oligonucleotide: PDCD1-3516
caggcucucuuugaucugcgccu

SEQ ID NO: 15570 - RNA, 24 nt, Artificial Sequence
  Synthetic oligonucleotide: PDCD1-3517
gcaggcucucuuugaucugcgccu

SEQ ID NO: 15571 - RNA, 18 nt, Artificial Sequence
  Synthetic oligonucleotide: PDCD1-3518
cgggcuggcugcgguccu

SEQ ID NO: 15572 - RNA, 19 nt, Artificial Sequence
  Synthetic oligonucleotide: PDCD1-3519
ccgggcuggcugcgguccu

SEQ ID NO: 15573 - RNA, 20 nt, Artificial Sequence
  Synthetic oligonucleotide: PDCD1-63
gccgggcuggcugcgguccu

SEQ ID NO: 15574 - RNA, 21 nt, Artificial Sequence
  Synthetic oligonucleotide: PDCD1-3520
ggccgggcuggcugcgguccu

SEQ ID NO: 15575 - RNA, 22 nt, Artificial Sequence
  Synthetic oligonucleotide: PDCD1-3521
uggccgggcuggcugcgguccu

SEQ ID NO: 15576 - RNA, 23 nt, Artificial Sequence
  Synthetic oligonucleotide: PDCD1-3522
cuggccgggcuggcugcgguccu

SEQ ID NO: 15577 - RNA, 24 nt, Artificial Sequence
  Synthetic oligonucleotide: PDCD1-3523
ccuggccgggcuggcugcgguccu

SEQ ID NO: 15578 - RNA, 18 nt, Artificial Sequence
  Synthetic oligonucleotide: PDCD1-3524
gucaccacgagcagggcu

SEQ ID NO: 15579 - RNA, 19 nt, Artificial Sequence
  Synthetic oligonucleotide: PDCD1-3525
ggucaccacgagcagggcu

SEQ ID NO: 15580 - RNA, 20 nt, Artificial Sequence
  Synthetic oligonucleotide: PDCD1-81
cggucaccacgagcagggcu

SEQ ID NO: 15581 - RNA, 21 nt, Artificial Sequence
  Synthetic oligonucleotide: PDCD1-3526
ucggucaccacgagcagggcu

SEQ ID NO: 15582 - RNA, 22 nt, Artificial Sequence
  Synthetic oligonucleotide: PDCD1-3527
uucggucaccacgagcagggcu

SEQ ID NO: 15583 - RNA, 23 nt, Artificial Sequence
  Synthetic oligonucleotide: PDCD1-3528
cuucggucaccacgagcagggcu

SEQ ID NO: 15584 - RNA, 24 nt, Artificial Sequence
  Synthetic oligonucleotide: PDCD1-3529
ccuucggucaccacgagcagggcu

SEQ ID NO: 15585 - RNA, 18 nt, Artificial Sequence
  Synthetic oligonucleotide: PDCD1-3530
ggccugucuggggagucu

SEQ ID NO: 15586 - RNA, 19 nt, Artificial Sequence
  Synthetic oligonucleotide: PDCD1-3531
gggccugucuggggagucu

SEQ ID NO: 15587 - RNA, 20 nt, Artificial Sequence
  Synthetic oligonucleotide: PDCD1-603
agggccugucuggggagucu

SEQ ID NO: 15588 - RNA, 21 nt, Artificial Sequence
  Synthetic oligonucleotide: PDCD1-3532
cagggccugucuggggagucu

SEQ ID NO: 15589 - RNA, 22 nt, Artificial Sequence
  Synthetic oligonucleotide: PDCD1-3533
ccagggccugucuggggagucu

SEQ ID NO: 15590 - RNA, 23 nt, Artificial Sequence
  Synthetic oligonucleotide: PDCD1-3534
uccagggccugucuggggagucu

SEQ ID NO: 15591 - RNA, 24 nt, Artificial Sequence
  Synthetic oligonucleotide: PDCD1-3535
uuccagggccugucuggggagucu

SEQ ID NO: 15592 - RNA, 18 nt, Artificial Sequence
  Synthetic oligonucleotide: PDCD1-3536
ggguuccagggccugucu

SEQ ID NO: 15593 - RNA, 19 nt, Artificial Sequence
  Synthetic oligonucleotide: PDCD1-3537
gggguuccagggccugucu

SEQ ID NO: 15594 - RNA, 20 nt, Artificial Sequence
  Synthetic oligonucleotide: PDCD1-93
ggggguuccagggccugucu

SEQ ID NO: 15595 - RNA, 21 nt, Artificial Sequence
  Synthetic oligonucleotide: PDCD1-3538
gggggguuccagggccugucu

SEQ ID NO: 15596 - RNA, 22 nt, Artificial Sequence
  Synthetic oligonucleotide: PDCD1-3539
ggggggguuccagggccugucu

SEQ ID NO: 15597 - RNA, 23 nt, Artificial Sequence
  Synthetic oligonucleotide: PDCD1-3540
uggggggguuccagggccugucu

SEQ ID NO: 15598 - RNA, 24 nt, Artificial Sequence
  Synthetic oligonucleotide: PDCD1-3541
guggggggguuccagggccugucu

SEQ ID NO: 15599 - RNA, 18 nt, Artificial Sequence
  Synthetic oligonucleotide: PDCD1-3542
agggccugucuggggagu

SEQ ID NO: 15600 - RNA, 19 nt, Artificial Sequence
  Synthetic oligonucleotide: PDCD1-3543
cagggccugucuggggagu

SEQ ID NO: 15601 - RNA, 20 nt, Artificial Sequence
  Synthetic oligonucleotide: PDCD1-604
ccagggccugucuggggagu

SEQ ID NO: 15602 - RNA, 21 nt, Artificial Sequence
  Synthetic oligonucleotide: PDCD1-3544
uccagggccugucuggggagu

SEQ ID NO: 15603 - RNA, 22 nt, Artificial Sequence
  Synthetic oligonucleotide: PDCD1-3545
uuccagggccugucuggggagu

SEQ ID NO: 15604 - RNA, 23 nt, Artificial Sequence
  Synthetic oligonucleotide: PDCD1-3546
guuccagggccugucuggggagu

SEQ ID NO: 15605 - RNA, 24 nt, Artificial Sequence
  Synthetic oligonucleotide: PDCD1-3547
gguuccagggccugucuggggagu

SEQ ID NO: 15606 - RNA, 18 nt, Artificial Sequence
  Synthetic oligonucleotide: PDCD1-3548
cagggcuggggagaaggu

SEQ ID NO: 15607 - RNA, 19 nt, Artificial Sequence
  Synthetic oligonucleotide: PDCD1-3549
gcagggcuggggagaaggu

SEQ ID NO: 15608 - RNA, 20 nt, Artificial Sequence
  Synthetic oligonucleotide: PDCD1-85
agcagggcuggggagaaggu

SEQ ID NO: 15609 - RNA, 21 nt, Artificial Sequence
  Synthetic oligonucleotide: PDCD1-3550
gagcagggcuggggagaaggu

SEQ ID NO: 15610 - RNA, 22 nt, Artificial Sequence
  Synthetic oligonucleotide: PDCD1-3551
cgagcagggcuggggagaaggu

SEQ ID NO: 15611 - RNA, 23 nt, Artificial Sequence
  Synthetic oligonucleotide: PDCD1-3552
acgagcagggcuggggagaaggu

SEQ ID NO: 15612 - RNA, 24 nt, Artificial Sequence
  Synthetic oligonucleotide: PDCD1-3553
cacgagcagggcuggggagaaggu

SEQ ID NO: 15613 - RNA, 18 nt, Artificial Sequence
  Synthetic oligonucleotide: PDCD1-3554
ugagagauggagagaggu

SEQ ID NO: 15614 - RNA, 19 nt, Artificial Sequence
  Synthetic oligonucleotide: PDCD1-3555
cugagagauggagagaggu

SEQ ID NO: 15615 - RNA, 20 nt, Artificial Sequence
  Synthetic oligonucleotide: PDCD1-597
ucugagagauggagagaggu

SEQ ID NO: 15616 - RNA, 21 nt, Artificial Sequence
  Synthetic oligonucleotide: PDCD1-3556
gucugagagauggagagaggu

SEQ ID NO: 15617 - RNA, 22 nt, Artificial Sequence
  Synthetic oligonucleotide: PDCD1-3557
agucugagagauggagagaggu

SEQ ID NO: 15618 - RNA, 23 nt, Artificial Sequence
  Synthetic oligonucleotide: PDCD1-3558
gagucugagagauggagagaggu

SEQ ID NO: 15619 - RNA, 24 nt, Artificial Sequence
  Synthetic oligonucleotide: PDCD1-3559
ggagucugagagauggagagaggu

SEQ ID NO: 15620 - RNA, 18 nt, Artificial Sequence
  Synthetic oligonucleotide: PDCD1-3560
ggggguuccagggccugu

SEQ ID NO: 15621 - RNA, 19 nt, Artificial Sequence
  Synthetic oligonucleotide: PDCD1-3561
gggggguuccagggccugu

SEQ ID NO: 15622 - RNA, 20 nt, Artificial Sequence
  Synthetic oligonucleotide: PDCD1-608
ggggggguuccagggccugu

SEQ ID NO: 15623 - RNA, 21 nt, Artificial Sequence
  Synthetic oligonucleotide: PDCD1-3562
uggggggguuccagggccugu

SEQ ID NO: 15624 - RNA, 22 nt, Artificial Sequence
  Synthetic oligonucleotide: PDCD1-3563
guggggggguuccagggccugu

SEQ ID NO: 15625 - RNA, 23 nt, Artificial Sequence
  Synthetic oligonucleotide: PDCD1-3564
gguggggggguuccagggccugu

SEQ ID NO: 15626 - RNA, 24 nt, Artificial Sequence
  Synthetic oligonucleotide: PDCD1-3565
agguggggggguuccagggccugu

SEQ ID NO: 15627 - RNA, 18 nt, Artificial Sequence
  Synthetic oligonucleotide: PDCD1-3566
cgaagcucuccgaugugu

SEQ ID NO: 15628 - RNA, 19 nt, Artificial Sequence
  Synthetic oligonucleotide: PDCD1-3567
acgaagcucuccgaugugu

SEQ ID NO: 15629 - RNA, 20 nt, Artificial Sequence
  Synthetic oligonucleotide: PDCD1-73
cacgaagcucuccgaugugu

SEQ ID NO: 15630 - RNA, 21 nt, Artificial Sequence
  Synthetic oligonucleotide: PDCD1-3568
gcacgaagcucuccgaugugu

SEQ ID NO: 15631 - RNA, 22 nt, Artificial Sequence
  Synthetic oligonucleotide: PDCD1-3569
agcacgaagcucuccgaugugu

SEQ ID NO: 15632 - RNA, 23 nt, Artificial Sequence
  Synthetic oligonucleotide: PDCD1-3570
uagcacgaagcucuccgaugugu

SEQ ID NO: 15633 - RNA, 24 nt, Artificial Sequence
  Synthetic oligonucleotide: PDCD1-3571
uuagcacgaagcucuccgaugugu

SEQ ID NO: 15634 - RNA, 18 nt, Artificial Sequence
  Synthetic oligonucleotide: PDCD1-3572
cucuuugaucugcgccuu

SEQ ID NO: 15635 - RNA, 19 nt, Artificial Sequence
  Synthetic oligonucleotide: PDCD1-3573
ucucuuugaucugcgccuu

SEQ ID NO: 15636 - RNA, 20 nt, Artificial Sequence
  Synthetic oligonucleotide: PDCD1-43
cucucuuugaucugcgccuu

SEQ ID NO: 15637 - RNA, 21 nt, Artificial Sequence
  Synthetic oligonucleotide: PDCD1-3574
gcucucuuugaucugcgccuu

SEQ ID NO: 15638 - RNA, 22 nt, Artificial Sequence
  Synthetic oligonucleotide: PDCD1-3575
ggcucucuuugaucugcgccuu

SEQ ID NO: 15639 - RNA, 23 nt, Artificial Sequence
  Synthetic oligonucleotide: PDCD1-3576
aggcucucuuugaucugcgccuu

SEQ ID NO: 15640 - RNA, 24 nt, Artificial Sequence
  Synthetic oligonucleotide: PDCD1-3577
caggcucucuuugaucugcgccuu

SEQ ID NO: 15641 - RNA, 18 nt, Artificial Sequence
  Synthetic oligonucleotide: PDCD1-3578
cccaaggcgcagaucaaa

SEQ ID NO: 15642 - RNA, 19 nt, Artificial Sequence
  Synthetic oligonucleotide: PDCD1-3579
ccccaaggcgcagaucaaa

SEQ ID NO: 15643 - RNA, 20 nt, Artificial Sequence
  Synthetic oligonucleotide: PDCD1-554
cccccaaggcgcagaucaaa

SEQ ID NO: 15644 - RNA, 21 nt, Artificial Sequence
  Synthetic oligonucleotide: PDCD1-3580
gcccccaaggcgcagaucaaa

SEQ ID NO: 15645 - RNA, 22 nt, Artificial Sequence
  Synthetic oligonucleotide: PDCD1-3581
ggcccccaaggcgcagaucaaa

SEQ ID NO: 15646 - RNA, 23 nt, Artificial Sequence
  Synthetic oligonucleotide: PDCD1-3582
uggcccccaaggcgcagaucaaa

SEQ ID NO: 15647 - RNA, 24 nt, Artificial Sequence
  Synthetic oligonucleotide: PDCD1-3583
cuggcccccaaggcgcagaucaaa

SEQ ID NO: 15648 - RNA, 18 nt, Artificial Sequence
  Synthetic oligonucleotide: PDCD1-3584
gucugggcggugcuacaa

SEQ ID NO: 15649 - RNA, 19 nt, Artificial Sequence
  Synthetic oligonucleotide: PDCD1-3585
cgucugggcggugcuacaa

SEQ ID NO: 15650 - RNA, 20 nt, Artificial Sequence
  Synthetic oligonucleotide: PDCD1-530
ucgucugggcggugcuacaa

SEQ ID NO: 15651 - RNA, 21 nt, Artificial Sequence
  Synthetic oligonucleotide: PDCD1-3586
gucgucugggcggugcuacaa

SEQ ID NO: 15652 - RNA, 22 nt, Artificial Sequence
  Synthetic oligonucleotide: PDCD1-3587
agucgucugggcggugcuacaa

SEQ ID NO: 15653 - RNA, 23 nt, Artificial Sequence
  Synthetic oligonucleotide: PDCD1-3588
cagucgucugggcggugcuacaa

SEQ ID NO: 15654 - RNA, 24 nt, Artificial Sequence
  Synthetic oligonucleotide: PDCD1-3589
ccagucgucugggcggugcuacaa

SEQ ID NO: 15655 - RNA, 18 nt, Artificial Sequence
  Synthetic oligonucleotide: PDCD1-3590
cugcucguggugaccgaa

SEQ ID NO: 15656 - RNA, 19 nt, Artificial Sequence
  Synthetic oligonucleotide: PDCD1-3591
ccugcucguggugaccgaa

SEQ ID NO: 15657 - RNA, 20 nt, Artificial Sequence
  Synthetic oligonucleotide: PDCD1-5
cccugcucguggugaccgaa

SEQ ID NO: 15658 - RNA, 21 nt, Artificial Sequence
  Synthetic oligonucleotide: PDCD1-3592
gcccugcucguggugaccgaa

SEQ ID NO: 15659 - RNA, 22 nt, Artificial Sequence
  Synthetic oligonucleotide: PDCD1-3593
agcccugcucguggugaccgaa

SEQ ID NO: 15660 - RNA, 23 nt, Artificial Sequence
  Synthetic oligonucleotide: PDCD1-3594
cagcccugcucguggugaccgaa

SEQ ID NO: 15661 - RNA, 24 nt, Artificial Sequence
  Synthetic oligonucleotide: PDCD1-3595
ccagcccugcucguggugaccgaa

SEQ ID NO: 15662 - RNA, 18 nt, Artificial Sequence
  Synthetic oligonucleotide: PDCD1-3596
ugcagcuucuccaacaca

SEQ ID NO: 15663 - RNA, 19 nt, Artificial Sequence
  Synthetic oligonucleotide: PDCD1-3597
cugcagcuucuccaacaca

SEQ ID NO: 15664 - RNA, 20 nt, Artificial Sequence
  Synthetic oligonucleotide: PDCD1-540
ccugcagcuucuccaacaca

SEQ ID NO: 15665 - RNA, 21 nt, Artificial Sequence
  Synthetic oligonucleotide: PDCD1-3598
accugcagcuucuccaacaca

SEQ ID NO: 15666 - RNA, 22 nt, Artificial Sequence
  Synthetic oligonucleotide: PDCD1-3599
caccugcagcuucuccaacaca

SEQ ID NO: 15667 - RNA, 23 nt, Artificial Sequence
  Synthetic oligonucleotide: PDCD1-3600
ucaccugcagcuucuccaacaca

SEQ ID NO: 15668 - RNA, 24 nt, Artificial Sequence
  Synthetic oligonucleotide: PDCD1-3601
uucaccugcagcuucuccaacaca

SEQ ID NO: 15669 - RNA, 18 nt, Artificial Sequence
  Synthetic oligonucleotide: PDCD1-3602
gugucacacaacugccca

SEQ ID NO: 15670 - RNA, 19 nt, Artificial Sequence
  Synthetic oligonucleotide: PDCD1-3603
cgugucacacaacugccca

SEQ ID NO: 15671 - RNA, 20 nt, Artificial Sequence
  Synthetic oligonucleotide: PDCD1-548
ccgugucacacaacugccca

SEQ ID NO: 15672 - RNA, 21 nt, Artificial Sequence
  Synthetic oligonucleotide: PDCD1-3604
uccgugucacacaacugccca

SEQ ID NO: 15673 - RNA, 22 nt, Artificial Sequence
  Synthetic oligonucleotide: PDCD1-3605
uuccgugucacacaacugccca

SEQ ID NO: 15674 - RNA, 23 nt, Artificial Sequence
  Synthetic oligonucleotide: PDCD1-3606
cuuccgugucacacaacugccca

SEQ ID NO: 15675 - RNA, 24 nt, Artificial Sequence
  Synthetic oligonucleotide: PDCD1-3607
gcuuccgugucacacaacugccca

SEQ ID NO: 15676 - RNA, 18 nt, Artificial Sequence
  Synthetic oligonucleotide: PDCD1-3608
cccccaaggcgcagauca

SEQ ID NO: 15677 - RNA, 19 nt, Artificial Sequence
  Synthetic oligonucleotide: PDCD1-3609
gcccccaaggcgcagauca

SEQ ID NO: 15678 - RNA, 20 nt, Artificial Sequence
  Synthetic oligonucleotide: PDCD1-553
ggcccccaaggcgcagauca

SEQ ID NO: 15679 - RNA, 21 nt, Artificial Sequence
  Synthetic oligonucleotide: PDCD1-3610
uggcccccaaggcgcagauca

SEQ ID NO: 15680 - RNA, 22 nt, Artificial Sequence
  Synthetic oligonucleotide: PDCD1-3611
cuggcccccaaggcgcagauca

SEQ ID NO: 15681 - RNA, 23 nt, Artificial Sequence
  Synthetic oligonucleotide: PDCD1-3612
ccuggcccccaaggcgcagauca

SEQ ID NO: 15682 - RNA, 24 nt, Artificial Sequence
  Synthetic oligonucleotide: PDCD1-3613
cccuggcccccaaggcgcagauca

SEQ ID NO: 15683 - RNA, 18 nt, Artificial Sequence
  Synthetic oligonucleotide: PDCD1-3614
ccugcucguggugaccga

SEQ ID NO: 15684 - RNA, 19 nt, Artificial Sequence
  Synthetic oligonucleotide: PDCD1-3615
cccugcucguggugaccga

SEQ ID NO: 15685 - RNA, 20 nt, Artificial Sequence
  Synthetic oligonucleotide: PDCD1-4
gcccugcucguggugaccga

SEQ ID NO: 15686 - RNA, 21 nt, Artificial Sequence
  Synthetic oligonucleotide: PDCD1-3616
agcccugcucguggugaccga

SEQ ID NO: 15687 - RNA, 22 nt, Artificial Sequence
  Synthetic oligonucleotide: PDCD1-3617
cagcccugcucguggugaccga

SEQ ID NO: 15688 - RNA, 23 nt, Artificial Sequence
  Synthetic oligonucleotide: PDCD1-3618
ccagcccugcucguggugaccga

SEQ ID NO: 15689 - RNA, 24 nt, Artificial Sequence
  Synthetic oligonucleotide: PDCD1-3619
cccagcccugcucguggugaccga

SEQ ID NO: 15690 - RNA, 18 nt, Artificial Sequence
  Synthetic oligonucleotide: PDCD1-3620
cagcccugcucgugguga

SEQ ID NO: 15691 - RNA, 19 nt, Artificial Sequence
  Synthetic oligonucleotide: PDCD1-3621
ccagcccugcucgugguga

SEQ ID NO: 15692 - RNA, 20 nt, Artificial Sequence
  Synthetic oligonucleotide: PDCD1-536
cccagcccugcucgugguga

SEQ ID NO: 15693 - RNA, 21 nt, Artificial Sequence
  Synthetic oligonucleotide: PDCD1-3622
ccccagcccugcucgugguga

SEQ ID NO: 15694 - RNA, 22 nt, Artificial Sequence
  Synthetic oligonucleotide: PDCD1-3623
uccccagcccugcucgugguga

SEQ ID NO: 15695 - RNA, 23 nt, Artificial Sequence
  Synthetic oligonucleotide: PDCD1-3624
cuccccagcccugcucgugguga

SEQ ID NO: 15696 - RNA, 24 nt, Artificial Sequence
  Synthetic oligonucleotide: PDCD1-3625
ucuccccagcccugcucgugguga

SEQ ID NO: 15697 - RNA, 18 nt, Artificial Sequence
  Synthetic oligonucleotide: PDCD1-3626
aacgggcgugacuuccac

SEQ ID NO: 15698 - RNA, 19 nt, Artificial Sequence
  Synthetic oligonucleotide: PDCD1-3627
caacgggcgugacuuccac

SEQ ID NO: 15699 - RNA, 20 nt, Artificial Sequence
  Synthetic oligonucleotide: PDCD1-549
ccaacgggcgugacuuccac

SEQ ID NO: 15700 - RNA, 21 nt, Artificial Sequence
  Synthetic oligonucleotide: PDCD1-3628
cccaacgggcgugacuuccac

SEQ ID NO: 15701 - RNA, 22 nt, Artificial Sequence
  Synthetic oligonucleotide: PDCD1-3629
gcccaacgggcgugacuuccac

SEQ ID NO: 15702 - RNA, 23 nt, Artificial Sequence
  Synthetic oligonucleotide: PDCD1-3630
ugcccaacgggcgugacuuccac

SEQ ID NO: 15703 - RNA, 24 nt, Artificial Sequence
  Synthetic oligonucleotide: PDCD1-3631
cugcccaacgggcgugacuuccac

SEQ ID NO: 15704 - RNA, 18 nt, Artificial Sequence
  Synthetic oligonucleotide: PDCD1-3632
aagcuggccgccuucccc

SEQ ID NO: 15705 - RNA, 19 nt, Artificial Sequence
  Synthetic oligonucleotide: PDCD1-3633
caagcuggccgccuucccc

SEQ ID NO: 15706 - RNA, 20 nt, Artificial Sequence
  Synthetic oligonucleotide: PDCD1-546
acaagcuggccgccuucccc

SEQ ID NO: 15707 - RNA, 21 nt, Artificial Sequence
  Synthetic oligonucleotide: PDCD1-3634
gacaagcuggccgccuucccc

SEQ ID NO: 15708 - RNA, 22 nt, Artificial Sequence
  Synthetic oligonucleotide: PDCD1-3635
ggacaagcuggccgccuucccc

SEQ ID NO: 15709 - RNA, 23 nt, Artificial Sequence
  Synthetic oligonucleotide: PDCD1-3636
cggacaagcuggccgccuucccc

SEQ ID NO: 15710 - RNA, 24 nt, Artificial Sequence
  Synthetic oligonucleotide: PDCD1-3637
acggacaagcuggccgccuucccc

SEQ ID NO: 15711 - RNA, 18 nt, Artificial Sequence
  Synthetic oligonucleotide: PDCD1-3638
gacuccccagacaggccc

SEQ ID NO: 15712 - RNA, 19 nt, Artificial Sequence
  Synthetic oligonucleotide: PDCD1-3639
agacuccccagacaggccc

SEQ ID NO: 15713 - RNA, 20 nt, Artificial Sequence
  Synthetic oligonucleotide: PDCD1-2
cagacuccccagacaggccc

SEQ ID NO: 15714 - RNA, 21 nt, Artificial Sequence
  Synthetic oligonucleotide: PDCD1-3640
ucagacuccccagacaggccc

SEQ ID NO: 15715 - RNA, 22 nt, Artificial Sequence
  Synthetic oligonucleotide: PDCD1-3641
cucagacuccccagacaggccc

SEQ ID NO: 15716 - RNA, 23 nt, Artificial Sequence
  Synthetic oligonucleotide: PDCD1-3642
ucucagacuccccagacaggccc

SEQ ID NO: 15717 - RNA, 24 nt, Artificial Sequence
  Synthetic oligonucleotide: PDCD1-3643
cucucagacuccccagacaggccc

SEQ ID NO: 15718 - RNA, 18 nt, Artificial Sequence
  Synthetic oligonucleotide: PDCD1-3644
gugcggccucggaggccc

SEQ ID NO: 15719 - RNA, 19 nt, Artificial Sequence
  Synthetic oligonucleotide: PDCD1-3645
ggugcggccucggaggccc

SEQ ID NO: 15720 - RNA, 20 nt, Artificial Sequence
  Synthetic oligonucleotide: PDCD1-34
aggugcggccucggaggccc

SEQ ID NO: 15721 - RNA, 21 nt, Artificial Sequence
  Synthetic oligonucleotide: PDCD1-3646
caggugcggccucggaggccc

SEQ ID NO: 15722 - RNA, 22 nt, Artificial Sequence
  Synthetic oligonucleotide: PDCD1-3647
acaggugcggccucggaggccc

SEQ ID NO: 15723 - RNA, 23 nt, Artificial Sequence
  Synthetic oligonucleotide: PDCD1-3648
gacaggugcggccucggaggccc

SEQ ID NO: 15724 - RNA, 24 nt, Artificial Sequence
  Synthetic oligonucleotide: PDCD1-3649
ugacaggugcggccucggaggccc

SEQ ID NO: 15725 - RNA, 18 nt, Artificial Sequence
  Synthetic oligonucleotide: PDCD1-3650
agacuccccagacaggcc

SEQ ID NO: 15726 - RNA, 19 nt, Artificial Sequence
  Synthetic oligonucleotide: PDCD1-3651
cagacuccccagacaggcc

SEQ ID NO: 15727 - RNA, 20 nt, Artificial Sequence
  Synthetic oligonucleotide: PDCD1-534
ucagacuccccagacaggcc

SEQ ID NO: 15728 - RNA, 21 nt, Artificial Sequence
  Synthetic oligonucleotide: PDCD1-3652
cucagacuccccagacaggcc

SEQ ID NO: 15729 - RNA, 22 nt, Artificial Sequence
  Synthetic oligonucleotide: PDCD1-3653
ucucagacuccccagacaggcc

SEQ ID NO: 15730 - RNA, 23 nt, Artificial Sequence
  Synthetic oligonucleotide: PDCD1-3654
cucucagacuccccagacaggcc

SEQ ID NO: 15731 - RNA, 24 nt, Artificial Sequence
  Synthetic oligonucleotide: PDCD1-3655
ucucucagacuccccagacaggcc

SEQ ID NO: 15732 - RNA, 18 nt, Artificial Sequence
  Synthetic oligonucleotide: PDCD1-3656
ggugcggccucggaggcc

SEQ ID NO: 15733 - RNA, 19 nt, Artificial Sequence
  Synthetic oligonucleotide: PDCD1-3657
aggugcggccucggaggcc

SEQ ID NO: 15734 - RNA, 20 nt, Artificial Sequence
  Synthetic oligonucleotide: PDCD1-709
caggugcggccucggaggcc

SEQ ID NO: 15735 - RNA, 21 nt, Artificial Sequence
  Synthetic oligonucleotide: PDCD1-3658
acaggugcggccucggaggcc

SEQ ID NO: 15736 - RNA, 22 nt, Artificial Sequence
  Synthetic oligonucleotide: PDCD1-3659
gacaggugcggccucggaggcc

SEQ ID NO: 15737 - RNA, 23 nt, Artificial Sequence
  Synthetic oligonucleotide: PDCD1-3660
ugacaggugcggccucggaggcc

SEQ ID NO: 15738 - RNA, 24 nt, Artificial Sequence
  Synthetic oligonucleotide: PDCD1-3661
gugacaggugcggccucggaggcc

SEQ ID NO: 15739 - RNA, 18 nt, Artificial Sequence
  Synthetic oligonucleotide: PDCD1-3662
agggugacaggugcggcc

SEQ ID NO: 15740 - RNA, 19 nt, Artificial Sequence
  Synthetic oligonucleotide: PDCD1-3663
cagggugacaggugcggcc

SEQ ID NO: 15741 - RNA, 20 nt, Artificial Sequence
  Synthetic oligonucleotide: PDCD1-707
ucagggugacaggugcggcc

SEQ ID NO: 15742 - RNA, 21 nt, Artificial Sequence
  Synthetic oligonucleotide: PDCD1-3664
cucagggugacaggugcggcc

SEQ ID NO: 15743 - RNA, 22 nt, Artificial Sequence
  Synthetic oligonucleotide: PDCD1-3665
gcucagggugacaggugcggcc

SEQ ID NO: 15744 - RNA, 23 nt, Artificial Sequence
  Synthetic oligonucleotide: PDCD1-3666
agcucagggugacaggugcggcc

SEQ ID NO: 15745 - RNA, 24 nt, Artificial Sequence
  Synthetic oligonucleotide: PDCD1-3667
gagcucagggugacaggugcggcc

SEQ ID NO: 15746 - RNA, 18 nt, Artificial Sequence
  Synthetic oligonucleotide: PDCD1-3668
acaagcuggccgccuucc

SEQ ID NO: 15747 - RNA, 19 nt, Artificial Sequence
  Synthetic oligonucleotide: PDCD1-3669
gacaagcuggccgccuucc

SEQ ID NO: 15748 - RNA, 20 nt, Artificial Sequence
  Synthetic oligonucleotide: PDCD1-545
ggacaagcuggccgccuucc

SEQ ID NO: 15749 - RNA, 21 nt, Artificial Sequence
  Synthetic oligonucleotide: PDCD1-3670
cggacaagcuggccgccuucc

SEQ ID NO: 15750 - RNA, 22 nt, Artificial Sequence
  Synthetic oligonucleotide: PDCD1-3671
acggacaagcuggccgccuucc

SEQ ID NO: 15751 - RNA, 23 nt, Artificial Sequence
  Synthetic oligonucleotide: PDCD1-3672
gacggacaagcuggccgccuucc

SEQ ID NO: 15752 - RNA, 24 nt, Artificial Sequence
  Synthetic oligonucleotide: PDCD1-3673
agacggacaagcuggccgccuucc

SEQ ID NO: 15753 - RNA, 18 nt, Artificial Sequence
  Synthetic oligonucleotide: PDCD1-3674
gugcuaaacugguaccgc

SEQ ID NO: 15754 - RNA, 19 nt, Artificial Sequence
  Synthetic oligonucleotide: PDCD1-3675
cgugcuaaacugguaccgc

SEQ ID NO: 15755 - RNA, 20 nt, Artificial Sequence
  Synthetic oligonucleotide: PDCD1-543
ucgugcuaaacugguaccgc

SEQ ID NO: 15756 - RNA, 21 nt, Artificial Sequence
  Synthetic oligonucleotide: PDCD1-3676
uucgugcuaaacugguaccgc

SEQ ID NO: 15757 - RNA, 22 nt, Artificial Sequence
  Synthetic oligonucleotide: PDCD1-3677
cuucgugcuaaacugguaccgc

SEQ ID NO: 15758 - RNA, 23 nt, Artificial Sequence
  Synthetic oligonucleotide: PDCD1-3678
gcuucgugcuaaacugguaccgc

SEQ ID NO: 15759 - RNA, 24 nt, Artificial Sequence
  Synthetic oligonucleotide: PDCD1-3679
agcuucgugcuaaacugguaccgc

SEQ ID NO: 15760 - RNA, 18 nt, Artificial Sequence
  Synthetic oligonucleotide: PDCD1-3680
gaccgcagccagcccggc

SEQ ID NO: 15761 - RNA, 19 nt, Artificial Sequence
  Synthetic oligonucleotide: PDCD1-3681
ggaccgcagccagcccggc

SEQ ID NO: 15762 - RNA, 20 nt, Artificial Sequence
  Synthetic oligonucleotide: PDCD1-547
aggaccgcagccagcccggc

SEQ ID NO: 15763 - RNA, 21 nt, Artificial Sequence
  Synthetic oligonucleotide: PDCD1-3682
gaggaccgcagccagcccggc

SEQ ID NO: 15764 - RNA, 22 nt, Artificial Sequence
  Synthetic oligonucleotide: PDCD1-3683
cgaggaccgcagccagcccggc

SEQ ID NO: 15765 - RNA, 23 nt, Artificial Sequence
  Synthetic oligonucleotide: PDCD1-3684
ccgaggaccgcagccagcccggc

SEQ ID NO: 15766 - RNA, 24 nt, Artificial Sequence
  Synthetic oligonucleotide: PDCD1-3685
cccgaggaccgcagccagcccggc

SEQ ID NO: 15767 - RNA, 18 nt, Artificial Sequence
  Synthetic oligonucleotide: PDCD1-3686
augagccccagcaaccag

SEQ ID NO: 15768 - RNA, 19 nt, Artificial Sequence
  Synthetic oligonucleotide: PDCD1-3687
caugagccccagcaaccag

SEQ ID NO: 15769 - RNA, 20 nt, Artificial Sequence
  Synthetic oligonucleotide: PDCD1-544
gcaugagccccagcaaccag

SEQ ID NO: 15770 - RNA, 21 nt, Artificial Sequence
  Synthetic oligonucleotide: PDCD1-3688
cgcaugagccccagcaaccag

SEQ ID NO: 15771 - RNA, 22 nt, Artificial Sequence
  Synthetic oligonucleotide: PDCD1-3689
ccgcaugagccccagcaaccag

SEQ ID NO: 15772 - RNA, 23 nt, Artificial Sequence
  Synthetic oligonucleotide: PDCD1-3690
accgcaugagccccagcaaccag

SEQ ID NO: 15773 - RNA, 24 nt, Artificial Sequence
  Synthetic oligonucleotide: PDCD1-3691
uaccgcaugagccccagcaaccag

SEQ ID NO: 15774 - RNA, 18 nt, Artificial Sequence
  Synthetic oligonucleotide: PDCD1-3692
aggaugguucuuagguag

SEQ ID NO: 15775 - RNA, 19 nt, Artificial Sequence
  Synthetic oligonucleotide: PDCD1-3693
caggaugguucuuagguag

SEQ ID NO: 15776 - RNA, 20 nt, Artificial Sequence
  Synthetic oligonucleotide: PDCD1-532
ccaggaugguucuuagguag

SEQ ID NO: 15777 - RNA, 21 nt, Artificial Sequence
  Synthetic oligonucleotide: PDCD1-3694
gccaggaugguucuuagguag

SEQ ID NO: 15778 - RNA, 22 nt, Artificial Sequence
  Synthetic oligonucleotide: PDCD1-3695
ggccaggaugguucuuagguag

SEQ ID NO: 15779 - RNA, 23 nt, Artificial Sequence
  Synthetic oligonucleotide: PDCD1-3696
cggccaggaugguucuuagguag

SEQ ID NO: 15780 - RNA, 24 nt, Artificial Sequence
  Synthetic oligonucleotide: PDCD1-3697
gcggccaggaugguucuuagguag

SEQ ID NO: 15781 - RNA, 18 nt, Artificial Sequence
  Synthetic oligonucleotide: PDCD1-3698
cccugcucguggugaccg

SEQ ID NO: 15782 - RNA, 19 nt, Artificial Sequence
  Synthetic oligonucleotide: PDCD1-3699
gcccugcucguggugaccg

SEQ ID NO: 15783 - RNA, 20 nt, Artificial Sequence
  Synthetic oligonucleotide: PDCD1-537
agcccugcucguggugaccg

SEQ ID NO: 15784 - RNA, 21 nt, Artificial Sequence
  Synthetic oligonucleotide: PDCD1-3700
cagcccugcucguggugaccg

SEQ ID NO: 15785 - RNA, 22 nt, Artificial Sequence
  Synthetic oligonucleotide: PDCD1-3701
ccagcccugcucguggugaccg

SEQ ID NO: 15786 - RNA, 23 nt, Artificial Sequence
  Synthetic oligonucleotide: PDCD1-3702
cccagcccugcucguggugaccg

SEQ ID NO: 15787 - RNA, 24 nt, Artificial Sequence
  Synthetic oligonucleotide: PDCD1-3703
ccccagcccugcucguggugaccg

SEQ ID NO: 15788 - RNA, 18 nt, Artificial Sequence
  Synthetic oligonucleotide: PDCD1-3704
agcuucuccaacacaucg

SEQ ID NO: 15789 - RNA, 19 nt, Artificial Sequence
  Synthetic oligonucleotide: PDCD1-3705
cagcuucuccaacacaucg

SEQ ID NO: 15790 - RNA, 20 nt, Artificial Sequence
  Synthetic oligonucleotide: PDCD1-542
gcagcuucuccaacacaucg

SEQ ID NO: 15791 - RNA, 21 nt, Artificial Sequence
  Synthetic oligonucleotide: PDCD1-3706
ugcagcuucuccaacacaucg

SEQ ID NO: 15792 - RNA, 22 nt, Artificial Sequence
  Synthetic oligonucleotide: PDCD1-3707
cugcagcuucuccaacacaucg

SEQ ID NO: 15793 - RNA, 23 nt, Artificial Sequence
  Synthetic oligonucleotide: PDCD1-3708
ccugcagcuucuccaacacaucg

SEQ ID NO: 15794 - RNA, 24 nt, Artificial Sequence
  Synthetic oligonucleotide: PDCD1-3709
accugcagcuucuccaacacaucg

SEQ ID NO: 15795 - RNA, 18 nt, Artificial Sequence
  Synthetic oligonucleotide: PDCD1-3710
ucaaagagagccugcggg

SEQ ID NO: 15796 - RNA, 19 nt, Artificial Sequence
  Synthetic oligonucleotide: PDCD1-3711
aucaaagagagccugcggg

SEQ ID NO: 15797 - RNA, 20 nt, Artificial Sequence
  Synthetic oligonucleotide: PDCD1-556
gaucaaagagagccugcggg

SEQ ID NO: 15798 - RNA, 21 nt, Artificial Sequence
  Synthetic oligonucleotide: PDCD1-3712
agaucaaagagagccugcggg

SEQ ID NO: 15799 - RNA, 22 nt, Artificial Sequence
  Synthetic oligonucleotide: PDCD1-3713
cagaucaaagagagccugcggg

SEQ ID NO: 15800 - RNA, 23 nt, Artificial Sequence
  Synthetic oligonucleotide: PDCD1-3714
gcagaucaaagagagccugcggg

SEQ ID NO: 15801 - RNA, 24 nt, Artificial Sequence
  Synthetic oligonucleotide: PDCD1-3715
cgcagaucaaagagagccugcggg

SEQ ID NO: 15802 - RNA, 18 nt, Artificial Sequence
  Synthetic oligonucleotide: PDCD1-3716
gccucggaggccccgggg

SEQ ID NO: 15803 - RNA, 19 nt, Artificial Sequence
  Synthetic oligonucleotide: PDCD1-3717
ggccucggaggccccgggg

SEQ ID NO: 15804 - RNA, 20 nt, Artificial Sequence
  Synthetic oligonucleotide: PDCD1-711
cggccucggaggccccgggg

SEQ ID NO: 15805 - RNA, 21 nt, Artificial Sequence
  Synthetic oligonucleotide: PDCD1-3718
gcggccucggaggccccgggg

SEQ ID NO: 15806 - RNA, 22 nt, Artificial Sequence
  Synthetic oligonucleotide: PDCD1-3719
ugcggccucggaggccccgggg

SEQ ID NO: 15807 - RNA, 23 nt, Artificial Sequence
  Synthetic oligonucleotide: PDCD1-3720
gugcggccucggaggccccgggg

SEQ ID NO: 15808 - RNA, 24 nt, Artificial Sequence
  Synthetic oligonucleotide: PDCD1-3721
ggugcggccucggaggccccgggg

SEQ ID NO: 15809 - RNA, 18 nt, Artificial Sequence
  Synthetic oligonucleotide: PDCD1-3722
cagcggcaccuaccucug

SEQ ID NO: 15810 - RNA, 19 nt, Artificial Sequence
  Synthetic oligonucleotide: PDCD1-3723
acagcggcaccuaccucug

SEQ ID NO: 15811 - RNA, 20 nt, Artificial Sequence
  Synthetic oligonucleotide: PDCD1-21
gacagcggcaccuaccucug

SEQ ID NO: 15812 - RNA, 21 nt, Artificial Sequence
  Synthetic oligonucleotide: PDCD1-3724
ugacagcggcaccuaccucug

SEQ ID NO: 15813 - RNA, 22 nt, Artificial Sequence
  Synthetic oligonucleotide: PDCD1-3725
augacagcggcaccuaccucug

SEQ ID NO: 15814 - RNA, 23 nt, Artificial Sequence
  Synthetic oligonucleotide: PDCD1-3726
aaugacagcggcaccuaccucug

SEQ ID NO: 15815 - RNA, 24 nt, Artificial Sequence
  Synthetic oligonucleotide: PDCD1-3727
caaugacagcggcaccuaccucug

SEQ ID NO: 15816 - RNA, 18 nt, Artificial Sequence
  Synthetic oligonucleotide: PDCD1-3728
gcagcuucuccaacacau

SEQ ID NO: 15817 - RNA, 19 nt, Artificial Sequence
  Synthetic oligonucleotide: PDCD1-3729
ugcagcuucuccaacacau

SEQ ID NO: 15818 - RNA, 20 nt, Artificial Sequence
  Synthetic oligonucleotide: PDCD1-7
cugcagcuucuccaacacau

SEQ ID NO: 15819 - RNA, 21 nt, Artificial Sequence
  Synthetic oligonucleotide: PDCD1-3730
ccugcagcuucuccaacacau

SEQ ID NO: 15820 - RNA, 22 nt, Artificial Sequence
  Synthetic oligonucleotide: PDCD1-3731
accugcagcuucuccaacacau

SEQ ID NO: 15821 - RNA, 23 nt, Artificial Sequence
  Synthetic oligonucleotide: PDCD1-3732
caccugcagcuucuccaacacau

SEQ ID NO: 15822 - RNA, 24 nt, Artificial Sequence
  Synthetic oligonucleotide: PDCD1-3733
ucaccugcagcuucuccaacacau

SEQ ID NO: 15823 - RNA, 18 nt, Artificial Sequence
  Synthetic oligonucleotide: PDCD1-3734
gcagaucaaagagagccu

SEQ ID NO: 15824 - RNA, 19 nt, Artificial Sequence
  Synthetic oligonucleotide: PDCD1-3735
cgcagaucaaagagagccu

SEQ ID NO: 15825 - RNA, 20 nt, Artificial Sequence
  Synthetic oligonucleotide: PDCD1-555
gcgcagaucaaagagagccu

SEQ ID NO: 15826 - RNA, 21 nt, Artificial Sequence
  Synthetic oligonucleotide: PDCD1-3736
ggcgcagaucaaagagagccu

SEQ ID NO: 15827 - RNA, 22 nt, Artificial Sequence
  Synthetic oligonucleotide: PDCD1-3737
aggcgcagaucaaagagagccu

SEQ ID NO: 15828 - RNA, 23 nt, Artificial Sequence
  Synthetic oligonucleotide: PDCD1-3738
aaggcgcagaucaaagagagccu

SEQ ID NO: 15829 - RNA, 24 nt, Artificial Sequence
  Synthetic oligonucleotide: PDCD1-3739
caaggcgcagaucaaagagagccu

SEQ ID NO: 15830 - RNA, 18 nt, Artificial Sequence
  Synthetic oligonucleotide: PDCD1-3740
gggugacaggugcggccu

SEQ ID NO: 15831 - RNA, 19 nt, Artificial Sequence
  Synthetic oligonucleotide: PDCD1-3741
agggugacaggugcggccu

SEQ ID NO: 15832 - RNA, 20 nt, Artificial Sequence
  Synthetic oligonucleotide: PDCD1-32
cagggugacaggugcggccu

SEQ ID NO: 15833 - RNA, 21 nt, Artificial Sequence
  Synthetic oligonucleotide: PDCD1-3742
ucagggugacaggugcggccu

SEQ ID NO: 15834 - RNA, 22 nt, Artificial Sequence
  Synthetic oligonucleotide: PDCD1-3743
cucagggugacaggugcggccu

SEQ ID NO: 15835 - RNA, 23 nt, Artificial Sequence
  Synthetic oligonucleotide: PDCD1-3744
gcucagggugacaggugcggccu

SEQ ID NO: 15836 - RNA, 24 nt, Artificial Sequence
  Synthetic oligonucleotide: PDCD1-3745
agcucagggugacaggugcggccu

SEQ ID NO: 15837 - RNA, 18 nt, Artificial Sequence
  Synthetic oligonucleotide: PDCD1-3746
acagcggcaccuaccucu

SEQ ID NO: 15838 - RNA, 19 nt, Artificial Sequence
  Synthetic oligonucleotide: PDCD1-3747
gacagcggcaccuaccucu

SEQ ID NO: 15839 - RNA, 20 nt, Artificial Sequence
  Synthetic oligonucleotide: PDCD1-551
ugacagcggcaccuaccucu

SEQ ID NO: 15840 - RNA, 21 nt, Artificial Sequence
  Synthetic oligonucleotide: PDCD1-3748
augacagcggcaccuaccucu

SEQ ID NO: 15841 - RNA, 22 nt, Artificial Sequence
  Synthetic oligonucleotide: PDCD1-3749
aaugacagcggcaccuaccucu

SEQ ID NO: 15842 - RNA, 23 nt, Artificial Sequence
  Synthetic oligonucleotide: PDCD1-3750
caaugacagcggcaccuaccucu

SEQ ID NO: 15843 - RNA, 24 nt, Artificial Sequence
  Synthetic oligonucleotide: PDCD1-3751
gcaaugacagcggcaccuaccucu

SEQ ID NO: 15844 - RNA, 18 nt, Artificial Sequence
  Synthetic oligonucleotide: PDCD1-3752
ggcgcccuggccagucgu

SEQ ID NO: 15845 - RNA, 19 nt, Artificial Sequence
  Synthetic oligonucleotide: PDCD1-3753
aggcgcccuggccagucgu

SEQ ID NO: 15846 - RNA, 20 nt, Artificial Sequence
  Synthetic oligonucleotide: PDCD1-529
caggcgcccuggccagucgu

SEQ ID NO: 15847 - RNA, 21 nt, Artificial Sequence
  Synthetic oligonucleotide: PDCD1-3754
acaggcgcccuggccagucgu

SEQ ID NO: 15848 - RNA, 22 nt, Artificial Sequence
  Synthetic oligonucleotide: PDCD1-3755
cacaggcgcccuggccagucgu

SEQ ID NO: 15849 - RNA, 23 nt, Artificial Sequence
  Synthetic oligonucleotide: PDCD1-3756
ccacaggcgcccuggccagucgu

SEQ ID NO: 15850 - RNA, 24 nt, Artificial Sequence
  Synthetic oligonucleotide: PDCD1-3757
cccacaggcgcccuggccagucgu

SEQ ID NO: 15851 - RNA, 18 nt, Artificial Sequence
  Synthetic oligonucleotide: PDCD1-3758
cuuccacaugagcguggu

SEQ ID NO: 15852 - RNA, 19 nt, Artificial Sequence
  Synthetic oligonucleotide: PDCD1-3759
acuuccacaugagcguggu

SEQ ID NO: 15853 - RNA, 20 nt, Artificial Sequence
  Synthetic oligonucleotide: PDCD1-550
gacuuccacaugagcguggu

SEQ ID NO: 15854 - RNA, 21 nt, Artificial Sequence
  Synthetic oligonucleotide: PDCD1-3760
ugacuuccacaugagcguggu

SEQ ID NO: 15855 - RNA, 22 nt, Artificial Sequence
  Synthetic oligonucleotide: PDCD1-3761
gugacuuccacaugagcguggu

SEQ ID NO: 15856 - RNA, 23 nt, Artificial Sequence
  Synthetic oligonucleotide: PDCD1-3762
cgugacuuccacaugagcguggu

SEQ ID NO: 15857 - RNA, 24 nt, Artificial Sequence
  Synthetic oligonucleotide: PDCD1-3763
gcgugacuuccacaugagcguggu

SEQ ID NO: 15858 - RNA, 18 nt, Artificial Sequence
  Synthetic oligonucleotide: PDCD1-3764
uuugaggagaaagggaga

SEQ ID NO: 15859 - RNA, 19 nt, Artificial Sequence
  Synthetic oligonucleotide: PDCD1-3765
cuuugaggagaaagggaga

SEQ ID NO: 15860 - RNA, 20 nt, Artificial Sequence
  Synthetic oligonucleotide: PDCD1-398
ucuuugaggagaaagggaga

SEQ ID NO: 15861 - RNA, 21 nt, Artificial Sequence
  Synthetic oligonucleotide: PDCD1-3766
uucuuugaggagaaagggaga

SEQ ID NO: 15862 - RNA, 22 nt, Artificial Sequence
  Synthetic oligonucleotide: PDCD1-3767
cuucuuugaggagaaagggaga

SEQ ID NO: 15863 - RNA, 23 nt, Artificial Sequence
  Synthetic oligonucleotide: PDCD1-3768
ccuucuuugaggagaaagggaga

SEQ ID NO: 15864 - RNA, 24 nt, Artificial Sequence
  Synthetic oligonucleotide: PDCD1-3769
uccuucuuugaggagaaagggaga

SEQ ID NO: 15865 - RNA, 18 nt, Artificial Sequence
  Synthetic oligonucleotide: PDCD1-3770
gcccacgacaccaaccac

SEQ ID NO: 15866 - RNA, 19 nt, Artificial Sequence
  Synthetic oligonucleotide: PDCD1-3771
cgcccacgacaccaaccac

SEQ ID NO: 15867 - RNA, 20 nt, Artificial Sequence
  Synthetic oligonucleotide: PDCD1-824
ccgcccacgacaccaaccac

SEQ ID NO: 15868 - RNA, 21 nt, Artificial Sequence
  Synthetic oligonucleotide: PDCD1-3772
gccgcccacgacaccaaccac

SEQ ID NO: 15869 - RNA, 22 nt, Artificial Sequence
  Synthetic oligonucleotide: PDCD1-3773
ggccgcccacgacaccaaccac

SEQ ID NO: 15870 - RNA, 23 nt, Artificial Sequence
  Synthetic oligonucleotide: PDCD1-3774
aggccgcccacgacaccaaccac

SEQ ID NO: 15871 - RNA, 24 nt, Artificial Sequence
  Synthetic oligonucleotide: PDCD1-3775
caggccgcccacgacaccaaccac

SEQ ID NO: 15872 - RNA, 18 nt, Artificial Sequence
  Synthetic oligonucleotide: PDCD1-3776
cuggccugggugaggggc

SEQ ID NO: 15873 - RNA, 19 nt, Artificial Sequence
  Synthetic oligonucleotide: PDCD1-3777
gcuggccugggugaggggc

SEQ ID NO: 15874 - RNA, 20 nt, Artificial Sequence
  Synthetic oligonucleotide: PDCD1-369
ggcuggccugggugaggggc

SEQ ID NO: 15875 - RNA, 21 nt, Artificial Sequence
  Synthetic oligonucleotide: PDCD1-3778
cggcuggccugggugaggggc

SEQ ID NO: 15876 - RNA, 22 nt, Artificial Sequence
  Synthetic oligonucleotide: PDCD1-3779
ccggcuggccugggugaggggc

SEQ ID NO: 15877 - RNA, 23 nt, Artificial Sequence
  Synthetic oligonucleotide: PDCD1-3780
gccggcuggccugggugaggggc

SEQ ID NO: 15878 - RNA, 24 nt, Artificial Sequence
  Synthetic oligonucleotide: PDCD1-3781
ggccggcuggccugggugaggggc

SEQ ID NO: 15879 - RNA, 18 nt, Artificial Sequence
  Synthetic oligonucleotide: PDCD1-3782
uggaacuggccggcuggc

SEQ ID NO: 15880 - RNA, 19 nt, Artificial Sequence
  Synthetic oligonucleotide: PDCD1-3783
uuggaacuggccggcuggc

SEQ ID NO: 15881 - RNA, 20 nt, Artificial Sequence
  Synthetic oligonucleotide: PDCD1-821
uuuggaacuggccggcuggc

SEQ ID NO: 15882 - RNA, 21 nt, Artificial Sequence
  Synthetic oligonucleotide: PDCD1-3784
guuuggaacuggccggcuggc

SEQ ID NO: 15883 - RNA, 22 nt, Artificial Sequence
  Synthetic oligonucleotide: PDCD1-3785
gguuuggaacuggccggcuggc

SEQ ID NO: 15884 - RNA, 23 nt, Artificial Sequence
  Synthetic oligonucleotide: PDCD1-3786
ggguuuggaacuggccggcuggc

SEQ ID NO: 15885 - RNA, 24 nt, Artificial Sequence
  Synthetic oligonucleotide: PDCD1-3787
aggguuuggaacuggccggcuggc

SEQ ID NO: 15886 - RNA, 18 nt, Artificial Sequence
  Synthetic oligonucleotide: PDCD1-3788
acagggcacggggggcuc

SEQ ID NO: 15887 - RNA, 19 nt, Artificial Sequence
  Synthetic oligonucleotide: PDCD1-3789
cacagggcacggggggcuc

SEQ ID NO: 15888 - RNA, 20 nt, Artificial Sequence
  Synthetic oligonucleotide: PDCD1-411
acacagggcacggggggcuc

SEQ ID NO: 15889 - RNA, 21 nt, Artificial Sequence
  Synthetic oligonucleotide: PDCD1-3790
gacacagggcacggggggcuc

SEQ ID NO: 15890 - RNA, 22 nt, Artificial Sequence
  Synthetic oligonucleotide: PDCD1-3791
ggacacagggcacggggggcuc

SEQ ID NO: 15891 - RNA, 23 nt, Artificial Sequence
  Synthetic oligonucleotide: PDCD1-3792
gggacacagggcacggggggcuc

SEQ ID NO: 15892 - RNA, 24 nt, Artificial Sequence
  Synthetic oligonucleotide: PDCD1-3793
agggacacagggcacggggggcuc

SEQ ID NO: 15893 - RNA, 18 nt, Artificial Sequence
  Synthetic oligonucleotide: PDCD1-3794
uggaagggcacaaagguc

SEQ ID NO: 15894 - RNA, 19 nt, Artificial Sequence
  Synthetic oligonucleotide: PDCD1-3795
cuggaagggcacaaagguc

SEQ ID NO: 15895 - RNA, 20 nt, Artificial Sequence
  Synthetic oligonucleotide: PDCD1-358
ucuggaagggcacaaagguc

SEQ ID NO: 15896 - RNA, 21 nt, Artificial Sequence
  Synthetic oligonucleotide: PDCD1-3796
cucuggaagggcacaaagguc

SEQ ID NO: 15897 - RNA, 22 nt, Artificial Sequence
  Synthetic oligonucleotide: PDCD1-3797
ucucuggaagggcacaaagguc

SEQ ID NO: 15898 - RNA, 23 nt, Artificial Sequence
  Synthetic oligonucleotide: PDCD1-3798
cucucuggaagggcacaaagguc

SEQ ID NO: 15899 - RNA, 24 nt, Artificial Sequence
  Synthetic oligonucleotide: PDCD1-3799
ucucucuggaagggcacaaagguc

SEQ ID NO: 15900 - RNA, 18 nt, Artificial Sequence
  Synthetic oligonucleotide: PDCD1-3800
gcugagccccugcgggcg

SEQ ID NO: 15901 - RNA, 19 nt, Artificial Sequence
  Synthetic oligonucleotide: PDCD1-3801
agcugagccccugcgggcg

SEQ ID NO: 15902 - RNA, 20 nt, Artificial Sequence
  Synthetic oligonucleotide: PDCD1-426
cagcugagccccugcgggcg

SEQ ID NO: 15903 - RNA, 21 nt, Artificial Sequence
  Synthetic oligonucleotide: PDCD1-3802
ucagcugagccccugcgggcg

SEQ ID NO: 15904 - RNA, 22 nt, Artificial Sequence
  Synthetic oligonucleotide: PDCD1-3803
gucagcugagccccugcgggcg

SEQ ID NO: 15905 - RNA, 23 nt, Artificial Sequence
  Synthetic oligonucleotide: PDCD1-3804
cgucagcugagccccugcgggcg

SEQ ID NO: 15906 - RNA, 24 nt, Artificial Sequence
  Synthetic oligonucleotide: PDCD1-3805
ccgucagcugagccccugcgggcg

SEQ ID NO: 15907 - RNA, 18 nt, Artificial Sequence
  Synthetic oligonucleotide: PDCD1-3806
agaacacaggcacggcug

SEQ ID NO: 15908 - RNA, 19 nt, Artificial Sequence
  Synthetic oligonucleotide: PDCD1-3807
gagaacacaggcacggcug

SEQ ID NO: 15909 - RNA, 20 nt, Artificial Sequence
  Synthetic oligonucleotide: PDCD1-405
agagaacacaggcacggcug

SEQ ID NO: 15910 - RNA, 21 nt, Artificial Sequence
  Synthetic oligonucleotide: PDCD1-3808
cagagaacacaggcacggcug

SEQ ID NO: 15911 - RNA, 22 nt, Artificial Sequence
  Synthetic oligonucleotide: PDCD1-3809
acagagaacacaggcacggcug

SEQ ID NO: 15912 - RNA, 23 nt, Artificial Sequence
  Synthetic oligonucleotide: PDCD1-3810
cacagagaacacaggcacggcug

SEQ ID NO: 15913 - RNA, 24 nt, Artificial Sequence
  Synthetic oligonucleotide: PDCD1-3811
ccacagagaacacaggcacggcug

SEQ ID NO: 15914 - RNA, 18 nt, Artificial Sequence
  Synthetic oligonucleotide: PDCD1-3812
ccugcagagaaacacacu

SEQ ID NO: 15915 - RNA, 19 nt, Artificial Sequence
  Synthetic oligonucleotide: PDCD1-3813
cccugcagagaaacacacu

SEQ ID NO: 15916 - RNA, 20 nt, Artificial Sequence
  Synthetic oligonucleotide: PDCD1-391
ucccugcagagaaacacacu

SEQ ID NO: 15917 - RNA, 21 nt, Artificial Sequence
  Synthetic oligonucleotide: PDCD1-3814
gucccugcagagaaacacacu

SEQ ID NO: 15918 - RNA, 22 nt, Artificial Sequence
  Synthetic oligonucleotide: PDCD1-3815
ugucccugcagagaaacacacu

SEQ ID NO: 15919 - RNA, 23 nt, Artificial Sequence
  Synthetic oligonucleotide: PDCD1-3816
uugucccugcagagaaacacacu

SEQ ID NO: 15920 - RNA, 24 nt, Artificial Sequence
  Synthetic oligonucleotide: PDCD1-3817
auugucccugcagagaaacacacu

SEQ ID NO: 15921 - RNA, 18 nt, Artificial Sequence
  Synthetic oligonucleotide: PDCD1-3818
ccugugucccugagcaga

SEQ ID NO: 15922 - RNA, 19 nt, Artificial Sequence
  Synthetic oligonucleotide: PDCD1-3819
cccugugucccugagcaga

SEQ ID NO: 15923 - RNA, 20 nt, Artificial Sequence
  Synthetic oligonucleotide: PDCD1-290
gcccugugucccugagcaga

SEQ ID NO: 15924 - RNA, 21 nt, Artificial Sequence
  Synthetic oligonucleotide: PDCD1-3820
ugcccugugucccugagcaga

SEQ ID NO: 15925 - RNA, 22 nt, Artificial Sequence
  Synthetic oligonucleotide: PDCD1-3821
gugcccugugucccugagcaga

SEQ ID NO: 15926 - RNA, 23 nt, Artificial Sequence
  Synthetic oligonucleotide: PDCD1-3822
cgugcccugugucccugagcaga

SEQ ID NO: 15927 - RNA, 24 nt, Artificial Sequence
  Synthetic oligonucleotide: PDCD1-3823
ccgugcccugugucccugagcaga

SEQ ID NO: 15928 - RNA, 18 nt, Artificial Sequence
  Synthetic oligonucleotide: PDCD1-3824
ucuguggacuauggggag

SEQ ID NO: 15929 - RNA, 19 nt, Artificial Sequence
  Synthetic oligonucleotide: PDCD1-3825
cucuguggacuauggggag

SEQ ID NO: 15930 - RNA, 20 nt, Artificial Sequence
  Synthetic oligonucleotide: PDCD1-737
ucucuguggacuauggggag

SEQ ID NO: 15931 - RNA, 21 nt, Artificial Sequence
  Synthetic oligonucleotide: PDCD1-3826
uucucuguggacuauggggag

SEQ ID NO: 15932 - RNA, 22 nt, Artificial Sequence
  Synthetic oligonucleotide: PDCD1-3827
guucucuguggacuauggggag

SEQ ID NO: 15933 - RNA, 23 nt, Artificial Sequence
  Synthetic oligonucleotide: PDCD1-3828
uguucucuguggacuauggggag

SEQ ID NO: 15934 - RNA, 24 nt, Artificial Sequence
  Synthetic oligonucleotide: PDCD1-3829
guguucucuguggacuauggggag

SEQ ID NO: 15935 - RNA, 18 nt, Artificial Sequence
  Synthetic oligonucleotide: PDCD1-3830
caccauugucuuuccuag

SEQ ID NO: 15936 - RNA, 19 nt, Artificial Sequence
  Synthetic oligonucleotide: PDCD1-3831
ccaccauugucuuuccuag

SEQ ID NO: 15937 - RNA, 20 nt, Artificial Sequence
  Synthetic oligonucleotide: PDCD1-291
gccaccauugucuuuccuag

SEQ ID NO: 15938 - RNA, 21 nt, Artificial Sequence
  Synthetic oligonucleotide: PDCD1-3832
ugccaccauugucuuuccuag

SEQ ID NO: 15939 - RNA, 22 nt, Artificial Sequence
  Synthetic oligonucleotide: PDCD1-3833
augccaccauugucuuuccuag

SEQ ID NO: 15940 - RNA, 23 nt, Artificial Sequence
  Synthetic oligonucleotide: PDCD1-3834
uaugccaccauugucuuuccuag

SEQ ID NO: 15941 - RNA, 24 nt, Artificial Sequence
  Synthetic oligonucleotide: PDCD1-3835
guaugccaccauugucuuuccuag

SEQ ID NO: 15942 - RNA, 18 nt, Artificial Sequence
  Synthetic oligonucleotide: PDCD1-3836
cgcaccggccagccccug

SEQ ID NO: 15943 - RNA, 19 nt, Artificial Sequence
  Synthetic oligonucleotide: PDCD1-3837
gcgcaccggccagccccug

SEQ ID NO: 15944 - RNA, 20 nt, Artificial Sequence
  Synthetic oligonucleotide: PDCD1-727
ggcgcaccggccagccccug

SEQ ID NO: 15945 - RNA, 21 nt, Artificial Sequence
  Synthetic oligonucleotide: PDCD1-3838
aggcgcaccggccagccccug

SEQ ID NO: 15946 - RNA, 22 nt, Artificial Sequence
  Synthetic oligonucleotide: PDCD1-3839
caggcgcaccggccagccccug

SEQ ID NO: 15947 - RNA, 23 nt, Artificial Sequence
  Synthetic oligonucleotide: PDCD1-3840
ccaggcgcaccggccagccccug

SEQ ID NO: 15948 - RNA, 24 nt, Artificial Sequence
  Synthetic oligonucleotide: PDCD1-3841
gccaggcgcaccggccagccccug

SEQ ID NO: 15949 - RNA, 18 nt, Artificial Sequence
  Synthetic oligonucleotide: PDCD1-3842
ggcucagcugacggcccu

SEQ ID NO: 15950 - RNA, 19 nt, Artificial Sequence
  Synthetic oligonucleotide: PDCD1-3843
gggcucagcugacggcccu

SEQ ID NO: 15951 - RNA, 20 nt, Artificial Sequence
  Synthetic oligonucleotide: PDCD1-298
ggggcucagcugacggcccu

SEQ ID NO: 15952 - RNA, 21 nt, Artificial Sequence
  Synthetic oligonucleotide: PDCD1-3844
aggggcucagcugacggcccu

SEQ ID NO: 15953 - RNA, 22 nt, Artificial Sequence
  Synthetic oligonucleotide: PDCD1-3845
caggggcucagcugacggcccu

SEQ ID NO: 15954 - RNA, 23 nt, Artificial Sequence
  Synthetic oligonucleotide: PDCD1-3846
gcaggggcucagcugacggcccu

SEQ ID NO: 15955 - RNA, 24 nt, Artificial Sequence
  Synthetic oligonucleotide: PDCD1-3847
cgcaggggcucagcugacggcccu

SEQ ID NO: 15956 - RNA, 18 nt, Artificial Sequence
  Synthetic oligonucleotide: PDCD1-3848
gcccagccacugaggccu

SEQ ID NO: 15957 - RNA, 19 nt, Artificial Sequence
  Synthetic oligonucleotide: PDCD1-3849
ugcccagccacugaggccu

SEQ ID NO: 15958 - RNA, 20 nt, Artificial Sequence
  Synthetic oligonucleotide: PDCD1-755
gugcccagccacugaggccu

SEQ ID NO: 15959 - RNA, 21 nt, Artificial Sequence
  Synthetic oligonucleotide: PDCD1-3850
agugcccagccacugaggccu

SEQ ID NO: 15960 - RNA, 22 nt, Artificial Sequence
  Synthetic oligonucleotide: PDCD1-3851
gagugcccagccacugaggccu

SEQ ID NO: 15961 - RNA, 23 nt, Artificial Sequence
  Synthetic oligonucleotide: PDCD1-3852
ggagugcccagccacugaggccu

SEQ ID NO: 15962 - RNA, 24 nt, Artificial Sequence
  Synthetic oligonucleotide: PDCD1-3853
cggagugcccagccacugaggccu

SEQ ID NO: 15963 - RNA, 18 nt, Artificial Sequence
  Synthetic oligonucleotide: PDCD1-3854
cagccuggugcugcuagu

SEQ ID NO: 15964 - RNA, 19 nt, Artificial Sequence
  Synthetic oligonucleotide: PDCD1-3855
gcagccuggugcugcuagu

SEQ ID NO: 15965 - RNA, 20 nt, Artificial Sequence
  Synthetic oligonucleotide: PDCD1-720
ggcagccuggugcugcuagu

SEQ ID NO: 15966 - RNA, 21 nt, Artificial Sequence
  Synthetic oligonucleotide: PDCD1-3856
gggcagccuggugcugcuagu

SEQ ID NO: 15967 - RNA, 22 nt, Artificial Sequence
  Synthetic oligonucleotide: PDCD1-3857
ugggcagccuggugcugcuagu

SEQ ID NO: 15968 - RNA, 23 nt, Artificial Sequence
  Synthetic oligonucleotide: PDCD1-3858
cugggcagccuggugcugcuagu

SEQ ID NO: 15969 - RNA, 24 nt, Artificial Sequence
  Synthetic oligonucleotide: PDCD1-3859
gcugggcagccuggugcugcuagu

SEQ ID NO: 15970 - RNA, 18 nt, Artificial Sequence
  Synthetic oligonucleotide: PDCD1-3860
uccuucuuugaggagaaa

SEQ ID NO: 15971 - RNA, 19 nt, Artificial Sequence
  Synthetic oligonucleotide: PDCD1-3861
cuccuucuuugaggagaaa

SEQ ID NO: 15972 - RNA, 20 nt, Artificial Sequence
  Synthetic oligonucleotide: PDCD1-400
ccuccuucuuugaggagaaa

SEQ ID NO: 15973 - RNA, 21 nt, Artificial Sequence
  Synthetic oligonucleotide: PDCD1-3862
uccuccuucuuugaggagaaa

SEQ ID NO: 15974 - RNA, 22 nt, Artificial Sequence
  Synthetic oligonucleotide: PDCD1-3863
guccuccuucuuugaggagaaa

SEQ ID NO: 15975 - RNA, 23 nt, Artificial Sequence
  Synthetic oligonucleotide: PDCD1-3864
gguccuccuucuuugaggagaaa

SEQ ID NO: 15976 - RNA, 24 nt, Artificial Sequence
  Synthetic oligonucleotide: PDCD1-3865
ggguccuccuucuuugaggagaaa

SEQ ID NO: 15977 - RNA, 18 nt, Artificial Sequence
  Synthetic oligonucleotide: PDCD1-3866
cuccuucuuugaggagaa

SEQ ID NO: 15978 - RNA, 19 nt, Artificial Sequence
  Synthetic oligonucleotide: PDCD1-3867
ccuccuucuuugaggagaa

SEQ ID NO: 15979 - RNA, 20 nt, Artificial Sequence
  Synthetic oligonucleotide: PDCD1-401
uccuccuucuuugaggagaa

SEQ ID NO: 15980 - RNA, 21 nt, Artificial Sequence
  Synthetic oligonucleotide: PDCD1-3868
guccuccuucuuugaggagaa

SEQ ID NO: 15981 - RNA, 22 nt, Artificial Sequence
  Synthetic oligonucleotide: PDCD1-3869
gguccuccuucuuugaggagaa

SEQ ID NO: 15982 - RNA, 23 nt, Artificial Sequence
  Synthetic oligonucleotide: PDCD1-3870
ggguccuccuucuuugaggagaa

SEQ ID NO: 15983 - RNA, 24 nt, Artificial Sequence
  Synthetic oligonucleotide: PDCD1-3871
gggguccuccuucuuugaggagaa

SEQ ID NO: 15984 - RNA, 18 nt, Artificial Sequence
  Synthetic oligonucleotide: PDCD1-3872
agcuccccauaguccaca

SEQ ID NO: 15985 - RNA, 19 nt, Artificial Sequence
  Synthetic oligonucleotide: PDCD1-3873
cagcuccccauaguccaca

SEQ ID NO: 15986 - RNA, 20 nt, Artificial Sequence
  Synthetic oligonucleotide: PDCD1-849
ccagcuccccauaguccaca

SEQ ID NO: 15987 - RNA, 21 nt, Artificial Sequence
  Synthetic oligonucleotide: PDCD1-3874
uccagcuccccauaguccaca

SEQ ID NO: 15988 - RNA, 22 nt, Artificial Sequence
  Synthetic oligonucleotide: PDCD1-3875
auccagcuccccauaguccaca

SEQ ID NO: 15989 - RNA, 23 nt, Artificial Sequence
  Synthetic oligonucleotide: PDCD1-3876
aauccagcuccccauaguccaca

SEQ ID NO: 15990 - RNA, 24 nt, Artificial Sequence
  Synthetic oligonucleotide: PDCD1-3877
aaauccagcuccccauaguccaca

SEQ ID NO: 15991 - RNA, 18 nt, Artificial Sequence
  Synthetic oligonucleotide: PDCD1-3878
uccgucugcucagggaca

SEQ ID NO: 15992 - RNA, 19 nt, Artificial Sequence
  Synthetic oligonucleotide: PDCD1-3879
cuccgucugcucagggaca

SEQ ID NO: 15993 - RNA, 20 nt, Artificial Sequence
  Synthetic oligonucleotide: PDCD1-859
acuccgucugcucagggaca

SEQ ID NO: 15994 - RNA, 21 nt, Artificial Sequence
  Synthetic oligonucleotide: PDCD1-3880
uacuccgucugcucagggaca

SEQ ID NO: 15995 - RNA, 22 nt, Artificial Sequence
  Synthetic oligonucleotide: PDCD1-3881
auacuccgucugcucagggaca

SEQ ID NO: 15996 - RNA, 23 nt, Artificial Sequence
  Synthetic oligonucleotide: PDCD1-3882
cauacuccgucugcucagggaca

SEQ ID NO: 15997 - RNA, 24 nt, Artificial Sequence
  Synthetic oligonucleotide: PDCD1-3883
gcauacuccgucugcucagggaca

SEQ ID NO: 15998 - RNA, 18 nt, Artificial Sequence
  Synthetic oligonucleotide: PDCD1-3884
cggggucuucucucgcca

SEQ ID NO: 15999 - RNA, 19 nt, Artificial Sequence
  Synthetic oligonucleotide: PDCD1-3885
ccggggucuucucucgcca

SEQ ID NO: 16000 - RNA, 20 nt, Artificial Sequence
  Synthetic oligonucleotide: PDCD1-852
uccggggucuucucucgcca

SEQ ID NO: 16001 - RNA, 21 nt, Artificial Sequence
  Synthetic oligonucleotide: PDCD1-3886
cuccggggucuucucucgcca

SEQ ID NO: 16002 - RNA, 22 nt, Artificial Sequence
  Synthetic oligonucleotide: PDCD1-3887
gcuccggggucuucucucgcca

SEQ ID NO: 16003 - RNA, 23 nt, Artificial Sequence
  Synthetic oligonucleotide: PDCD1-3888
ggcuccggggucuucucucgcca

SEQ ID NO: 16004 - RNA, 24 nt, Artificial Sequence
  Synthetic oligonucleotide: PDCD1-3889
gggcuccggggucuucucucgcca

SEQ ID NO: 16005 - RNA, 18 nt, Artificial Sequence
  Synthetic oligonucleotide: PDCD1-3890
gcagaacacugguggcca

SEQ ID NO: 16006 - RNA, 19 nt, Artificial Sequence
  Synthetic oligonucleotide: PDCD1-3891
ugcagaacacugguggcca

SEQ ID NO: 16007 - RNA, 20 nt, Artificial Sequence
  Synthetic oligonucleotide: PDCD1-441
cugcagaacacugguggcca

SEQ ID NO: 16008 - RNA, 18 nt, Artificial Sequence
  Synthetic oligonucleotide: PDCD1-3892
ccagcuccccauagucca

SEQ ID NO: 16009 - RNA, 19 nt, Artificial Sequence
  Synthetic oligonucleotide: PDCD1-3893
uccagcuccccauagucca

SEQ ID NO: 16010 - RNA, 20 nt, Artificial Sequence
  Synthetic oligonucleotide: PDCD1-850
auccagcuccccauagucca

SEQ ID NO: 16011 - RNA, 21 nt, Artificial Sequence
  Synthetic oligonucleotide: PDCD1-3894
aauccagcuccccauagucca

SEQ ID NO: 16012 - RNA, 22 nt, Artificial Sequence
  Synthetic oligonucleotide: PDCD1-3895
aaauccagcuccccauagucca

SEQ ID NO: 16013 - RNA, 23 nt, Artificial Sequence
  Synthetic oligonucleotide: PDCD1-3896
gaaauccagcuccccauagucca

SEQ ID NO: 16014 - RNA, 24 nt, Artificial Sequence
  Synthetic oligonucleotide: PDCD1-3897
ggaaauccagcuccccauagucca

SEQ ID NO: 16015 - RNA, 18 nt, Artificial Sequence
  Synthetic oligonucleotide: PDCD1-3898
gcucagggacacagggca

SEQ ID NO: 16016 - RNA, 19 nt, Artificial Sequence
  Synthetic oligonucleotide: PDCD1-3899
ugcucagggacacagggca

SEQ ID NO: 16017 - RNA, 20 nt, Artificial Sequence
  Synthetic oligonucleotide: PDCD1-416
cugcucagggacacagggca

SEQ ID NO: 16018 - RNA, 21 nt, Artificial Sequence
  Synthetic oligonucleotide: PDCD1-3900
ucugcucagggacacagggca

SEQ ID NO: 16019 - RNA, 22 nt, Artificial Sequence
  Synthetic oligonucleotide: PDCD1-3901
gucugcucagggacacagggca

SEQ ID NO: 16020 - RNA, 23 nt, Artificial Sequence
  Synthetic oligonucleotide: PDCD1-3902
cgucugcucagggacacagggca

SEQ ID NO: 16021 - RNA, 24 nt, Artificial Sequence
  Synthetic oligonucleotide: PDCD1-3903
ccgucugcucagggacacagggca

SEQ ID NO: 16022 - RNA, 18 nt, Artificial Sequence
  Synthetic oligonucleotide: PDCD1-3904
gcuccuauugucccugca

SEQ ID NO: 16023 - RNA, 19 nt, Artificial Sequence
  Synthetic oligonucleotide: PDCD1-3905
ggcuccuauugucccugca

SEQ ID NO: 16024 - RNA, 20 nt, Artificial Sequence
  Synthetic oligonucleotide: PDCD1-831
uggcuccuauugucccugca

SEQ ID NO: 16025 - RNA, 21 nt, Artificial Sequence
  Synthetic oligonucleotide: PDCD1-3906
cuggcuccuauugucccugca

SEQ ID NO: 16026 - RNA, 22 nt, Artificial Sequence
  Synthetic oligonucleotide: PDCD1-3907
ccuggcuccuauugucccugca

SEQ ID NO: 16027 - RNA, 23 nt, Artificial Sequence
  Synthetic oligonucleotide: PDCD1-3908
gccuggcuccuauugucccugca

SEQ ID NO: 16028 - RNA, 24 nt, Artificial Sequence
  Synthetic oligonucleotide: PDCD1-3909
cgccuggcuccuauugucccugca

SEQ ID NO: 16029 - RNA, 18 nt, Artificial Sequence
  Synthetic oligonucleotide: PDCD1-3910
ggccaaggaagccgguca

SEQ ID NO: 16030 - RNA, 19 nt, Artificial Sequence
  Synthetic oligonucleotide: PDCD1-3911
uggccaaggaagccgguca

SEQ ID NO: 16031 - RNA, 20 nt, Artificial Sequence
  Synthetic oligonucleotide: PDCD1-876
guggccaaggaagccgguca

SEQ ID NO: 16032 - RNA, 21 nt, Artificial Sequence
  Synthetic oligonucleotide: PDCD1-3912
gguggccaaggaagccgguca

SEQ ID NO: 16033 - RNA, 22 nt, Artificial Sequence
  Synthetic oligonucleotide: PDCD1-3913
ugguggccaaggaagccgguca

SEQ ID NO: 16034 - RNA, 23 nt, Artificial Sequence
  Synthetic oligonucleotide: PDCD1-3914
cugguggccaaggaagccgguca

SEQ ID NO: 16035 - RNA, 24 nt, Artificial Sequence
  Synthetic oligonucleotide: PDCD1-3915
acugguggccaaggaagccgguca

SEQ ID NO: 16036 - RNA, 18 nt, Artificial Sequence
  Synthetic oligonucleotide: PDCD1-3916
ccuccuucuuugaggaga

SEQ ID NO: 16037 - RNA, 19 nt, Artificial Sequence
  Synthetic oligonucleotide: PDCD1-3917
uccuccuucuuugaggaga

SEQ ID NO: 16038 - RNA, 20 nt, Artificial Sequence
  Synthetic oligonucleotide: PDCD1-841
guccuccuucuuugaggaga

SEQ ID NO: 16039 - RNA, 21 nt, Artificial Sequence
  Synthetic oligonucleotide: PDCD1-3918
gguccuccuucuuugaggaga

SEQ ID NO: 16040 - RNA, 22 nt, Artificial Sequence
  Synthetic oligonucleotide: PDCD1-3919
ggguccuccuucuuugaggaga

SEQ ID NO: 16041 - RNA, 23 nt, Artificial Sequence
  Synthetic oligonucleotide: PDCD1-3920
gggguccuccuucuuugaggaga

SEQ ID NO: 16042 - RNA, 24 nt, Artificial Sequence
  Synthetic oligonucleotide: PDCD1-3921
agggguccuccuucuuugaggaga

SEQ ID NO: 16043 - RNA, 18 nt, Artificial Sequence
  Synthetic oligonucleotide: PDCD1-3922
ucuuugaggagaaaggga

SEQ ID NO: 16044 - RNA, 19 nt, Artificial Sequence
  Synthetic oligonucleotide: PDCD1-3923
uucuuugaggagaaaggga

SEQ ID NO: 16045 - RNA, 20 nt, Artificial Sequence
  Synthetic oligonucleotide: PDCD1-837
cuucuuugaggagaaaggga

SEQ ID NO: 16046 - RNA, 21 nt, Artificial Sequence
  Synthetic oligonucleotide: PDCD1-3924
ccuucuuugaggagaaaggga

SEQ ID NO: 16047 - RNA, 22 nt, Artificial Sequence
  Synthetic oligonucleotide: PDCD1-3925
uccuucuuugaggagaaaggga

SEQ ID NO: 16048 - RNA, 23 nt, Artificial Sequence
  Synthetic oligonucleotide: PDCD1-3926
cuccuucuuugaggagaaaggga

SEQ ID NO: 16049 - RNA, 24 nt, Artificial Sequence
  Synthetic oligonucleotide: PDCD1-3927
ccuccuucuuugaggagaaaggga

SEQ ID NO: 16050 - RNA, 18 nt, Artificial Sequence
  Synthetic oligonucleotide: PDCD1-3928
cccugcagagaaacacac

SEQ ID NO: 16051 - RNA, 19 nt, Artificial Sequence
  Synthetic oligonucleotide: PDCD1-3929
ucccugcagagaaacacac

SEQ ID NO: 16052 - RNA, 20 nt, Artificial Sequence
  Synthetic oligonucleotide: PDCD1-830
gucccugcagagaaacacac

SEQ ID NO: 16053 - RNA, 21 nt, Artificial Sequence
  Synthetic oligonucleotide: PDCD1-3930
ugucccugcagagaaacacac

SEQ ID NO: 16054 - RNA, 22 nt, Artificial Sequence
  Synthetic oligonucleotide: PDCD1-3931
uugucccugcagagaaacacac

SEQ ID NO: 16055 - RNA, 23 nt, Artificial Sequence
  Synthetic oligonucleotide: PDCD1-3932
auugucccugcagagaaacacac

SEQ ID NO: 16056 - RNA, 24 nt, Artificial Sequence
  Synthetic oligonucleotide: PDCD1-3933
uauugucccugcagagaaacacac

SEQ ID NO: 16057 - RNA, 18 nt, Artificial Sequence
  Synthetic oligonucleotide: PDCD1-3934
ggggucuucucucgccac

SEQ ID NO: 16058 - RNA, 19 nt, Artificial Sequence
  Synthetic oligonucleotide: PDCD1-3935
cggggucuucucucgccac

SEQ ID NO: 16059 - RNA, 20 nt, Artificial Sequence
  Synthetic oligonucleotide: PDCD1-408
ccggggucuucucucgccac

SEQ ID NO: 16060 - RNA, 21 nt, Artificial Sequence
  Synthetic oligonucleotide: PDCD1-3936
uccggggucuucucucgccac

SEQ ID NO: 16061 - RNA, 22 nt, Artificial Sequence
  Synthetic oligonucleotide: PDCD1-3937
cuccggggucuucucucgccac

SEQ ID NO: 16062 - RNA, 23 nt, Artificial Sequence
  Synthetic oligonucleotide: PDCD1-3938
gcuccggggucuucucucgccac

SEQ ID NO: 16063 - RNA, 24 nt, Artificial Sequence
  Synthetic oligonucleotide: PDCD1-3939
ggcuccggggucuucucucgccac

SEQ ID NO: 16064 - RNA, 18 nt, Artificial Sequence
  Synthetic oligonucleotide: PDCD1-3940
cucagggacacagggcac

SEQ ID NO: 16065 - RNA, 19 nt, Artificial Sequence
  Synthetic oligonucleotide: PDCD1-3941
gcucagggacacagggcac

SEQ ID NO: 16066 - RNA, 20 nt, Artificial Sequence
  Synthetic oligonucleotide: PDCD1-415
ugcucagggacacagggcac

SEQ ID NO: 16067 - RNA, 21 nt, Artificial Sequence
  Synthetic oligonucleotide: PDCD1-3942
cugcucagggacacagggcac

SEQ ID NO: 16068 - RNA, 22 nt, Artificial Sequence
  Synthetic oligonucleotide: PDCD1-3943
ucugcucagggacacagggcac

SEQ ID NO: 16069 - RNA, 23 nt, Artificial Sequence
  Synthetic oligonucleotide: PDCD1-3944
gucugcucagggacacagggcac

SEQ ID NO: 16070 - RNA, 24 nt, Artificial Sequence
  Synthetic oligonucleotide: PDCD1-3945
cgucugcucagggacacagggcac

SEQ ID NO: 16071 - RNA, 18 nt, Artificial Sequence
  Synthetic oligonucleotide: PDCD1-3946
gaaaagagugagacucac

SEQ ID NO: 16072 - RNA, 19 nt, Artificial Sequence
  Synthetic oligonucleotide: PDCD1-3947
ggaaaagagugagacucac

SEQ ID NO: 16073 - RNA, 20 nt, Artificial Sequence
  Synthetic oligonucleotide: PDCD1-834
aggaaaagagugagacucac

SEQ ID NO: 16074 - RNA, 21 nt, Artificial Sequence
  Synthetic oligonucleotide: PDCD1-3948
caggaaaagagugagacucac

SEQ ID NO: 16075 - RNA, 22 nt, Artificial Sequence
  Synthetic oligonucleotide: PDCD1-3949
gcaggaaaagagugagacucac

SEQ ID NO: 16076 - RNA, 23 nt, Artificial Sequence
  Synthetic oligonucleotide: PDCD1-3950
ugcaggaaaagagugagacucac

SEQ ID NO: 16077 - RNA, 24 nt, Artificial Sequence
  Synthetic oligonucleotide: PDCD1-3951
augcaggaaaagagugagacucac

SEQ ID NO: 16078 - RNA, 18 nt, Artificial Sequence
  Synthetic oligonucleotide: PDCD1-3952
aaaagagugagacucacc

SEQ ID NO: 16079 - RNA, 19 nt, Artificial Sequence
  Synthetic oligonucleotide: PDCD1-3953
gaaaagagugagacucacc

SEQ ID NO: 16080 - RNA, 20 nt, Artificial Sequence
  Synthetic oligonucleotide: PDCD1-397
ggaaaagagugagacucacc

SEQ ID NO: 16081 - RNA, 21 nt, Artificial Sequence
  Synthetic oligonucleotide: PDCD1-3954
aggaaaagagugagacucacc

SEQ ID NO: 16082 - RNA, 22 nt, Artificial Sequence
  Synthetic oligonucleotide: PDCD1-3955
caggaaaagagugagacucacc

SEQ ID NO: 16083 - RNA, 23 nt, Artificial Sequence
  Synthetic oligonucleotide: PDCD1-3956
gcaggaaaagagugagacucacc

SEQ ID NO: 16084 - RNA, 24 nt, Artificial Sequence
  Synthetic oligonucleotide: PDCD1-3957
ugcaggaaaagagugagacucacc

SEQ ID NO: 16085 - RNA, 18 nt, Artificial Sequence
  Synthetic oligonucleotide: PDCD1-3958
cguuaccucgugcggccc

SEQ ID NO: 16086 - RNA, 19 nt, Artificial Sequence
  Synthetic oligonucleotide: PDCD1-3959
acguuaccucgugcggccc

SEQ ID NO: 16087 - RNA, 20 nt, Artificial Sequence
  Synthetic oligonucleotide: PDCD1-385
gacguuaccucgugcggccc

SEQ ID NO: 16088 - RNA, 21 nt, Artificial Sequence
  Synthetic oligonucleotide: PDCD1-3960
ugacguuaccucgugcggccc

SEQ ID NO: 16089 - RNA, 22 nt, Artificial Sequence
  Synthetic oligonucleotide: PDCD1-3961
augacguuaccucgugcggccc

SEQ ID NO: 16090 - RNA, 23 nt, Artificial Sequence
  Synthetic oligonucleotide: PDCD1-3962
gaugacguuaccucgugcggccc

SEQ ID NO: 16091 - RNA, 24 nt, Artificial Sequence
  Synthetic oligonucleotide: PDCD1-3963
ggaugacguuaccucgugcggccc

SEQ ID NO: 16092 - RNA, 18 nt, Artificial Sequence
  Synthetic oligonucleotide: PDCD1-3964
acguuaccucgugcggcc

SEQ ID NO: 16093 - RNA, 19 nt, Artificial Sequence
  Synthetic oligonucleotide: PDCD1-3965
gacguuaccucgugcggcc

SEQ ID NO: 16094 - RNA, 20 nt, Artificial Sequence
  Synthetic oligonucleotide: PDCD1-386
ugacguuaccucgugcggcc

SEQ ID NO: 16095 - RNA, 21 nt, Artificial Sequence
  Synthetic oligonucleotide: PDCD1-3966
augacguuaccucgugcggcc

SEQ ID NO: 16096 - RNA, 22 nt, Artificial Sequence
  Synthetic oligonucleotide: PDCD1-3967
gaugacguuaccucgugcggcc

SEQ ID NO: 16097 - RNA, 23 nt, Artificial Sequence
  Synthetic oligonucleotide: PDCD1-3968
ggaugacguuaccucgugcggcc

SEQ ID NO: 16098 - RNA, 24 nt, Artificial Sequence
  Synthetic oligonucleotide: PDCD1-3969
gggaugacguuaccucgugcggcc

SEQ ID NO: 16099 - RNA, 18 nt, Artificial Sequence
  Synthetic oligonucleotide: PDCD1-3970
aagccggucagaggggcc

SEQ ID NO: 16100 - RNA, 19 nt, Artificial Sequence
  Synthetic oligonucleotide: PDCD1-3971
gaagccggucagaggggcc

SEQ ID NO: 16101 - RNA, 20 nt, Artificial Sequence
  Synthetic oligonucleotide: PDCD1-874
ggaagccggucagaggggcc

SEQ ID NO: 16102 - RNA, 21 nt, Artificial Sequence
  Synthetic oligonucleotide: PDCD1-3972
aggaagccggucagaggggcc

SEQ ID NO: 16103 - RNA, 22 nt, Artificial Sequence
  Synthetic oligonucleotide: PDCD1-3973
aaggaagccggucagaggggcc

SEQ ID NO: 16104 - RNA, 23 nt, Artificial Sequence
  Synthetic oligonucleotide: PDCD1-3974
caaggaagccggucagaggggcc

SEQ ID NO: 16105 - RNA, 24 nt, Artificial Sequence
  Synthetic oligonucleotide: PDCD1-3975
ccaaggaagccggucagaggggcc

SEQ ID NO: 16106 - RNA, 18 nt, Artificial Sequence
  Synthetic oligonucleotide: PDCD1-3976
ucaguggcugggcacucc

SEQ ID NO: 16107 - RNA, 19 nt, Artificial Sequence
  Synthetic oligonucleotide: PDCD1-3977
cucaguggcugggcacucc

SEQ ID NO: 16108 - RNA, 20 nt, Artificial Sequence
  Synthetic oligonucleotide: PDCD1-871
ccucaguggcugggcacucc

SEQ ID NO: 16109 - RNA, 21 nt, Artificial Sequence
  Synthetic oligonucleotide: PDCD1-3978
gccucaguggcugggcacucc

SEQ ID NO: 16110 - RNA, 22 nt, Artificial Sequence
  Synthetic oligonucleotide: PDCD1-3979
ggccucaguggcugggcacucc

SEQ ID NO: 16111 - RNA, 23 nt, Artificial Sequence
  Synthetic oligonucleotide: PDCD1-3980
aggccucaguggcugggcacucc

SEQ ID NO: 16112 - RNA, 24 nt, Artificial Sequence
  Synthetic oligonucleotide: PDCD1-3981
caggccucaguggcugggcacucc

SEQ ID NO: 16113 - RNA, 18 nt, Artificial Sequence
  Synthetic oligonucleotide: PDCD1-3982
augaggugcccauuccgc

SEQ ID NO: 16114 - RNA, 19 nt, Artificial Sequence
  Synthetic oligonucleotide: PDCD1-3983
gaugaggugcccauuccgc

SEQ ID NO: 16115 - RNA, 20 nt, Artificial Sequence
  Synthetic oligonucleotide: PDCD1-863
ggaugaggugcccauuccgc

SEQ ID NO: 16116 - RNA, 21 nt, Artificial Sequence
  Synthetic oligonucleotide: PDCD1-3984
gggaugaggugcccauuccgc

SEQ ID NO: 16117 - RNA, 22 nt, Artificial Sequence
  Synthetic oligonucleotide: PDCD1-3985
ggggaugaggugcccauuccgc

SEQ ID NO: 16118 - RNA, 23 nt, Artificial Sequence
  Synthetic oligonucleotide: PDCD1-3986
gggggaugaggugcccauuccgc

SEQ ID NO: 16119 - RNA, 24 nt, Artificial Sequence
  Synthetic oligonucleotide: PDCD1-3987
cgggggaugaggugcccauuccgc

SEQ ID NO: 16120 - RNA, 18 nt, Artificial Sequence
  Synthetic oligonucleotide: PDCD1-3988
ccgggagcagaugacggc

SEQ ID NO: 16121 - RNA, 19 nt, Artificial Sequence
  Synthetic oligonucleotide: PDCD1-3989
cccgggagcagaugacggc

SEQ ID NO: 16122 - RNA, 20 nt, Artificial Sequence
  Synthetic oligonucleotide: PDCD1-825
gcccgggagcagaugacggc

SEQ ID NO: 16123 - RNA, 21 nt, Artificial Sequence
  Synthetic oligonucleotide: PDCD1-3990
ggcccgggagcagaugacggc

SEQ ID NO: 16124 - RNA, 22 nt, Artificial Sequence
  Synthetic oligonucleotide: PDCD1-3991
cggcccgggagcagaugacggc

SEQ ID NO: 16125 - RNA, 23 nt, Artificial Sequence
  Synthetic oligonucleotide: PDCD1-3992
gcggcccgggagcagaugacggc

SEQ ID NO: 16126 - RNA, 24 nt, Artificial Sequence
  Synthetic oligonucleotide: PDCD1-3993
ugcggcccgggagcagaugacggc

SEQ ID NO: 16127 - RNA, 18 nt, Artificial Sequence
  Synthetic oligonucleotide: PDCD1-3994
gacguuaccucgugcggc

SEQ ID NO: 16128 - RNA, 19 nt, Artificial Sequence
  Synthetic oligonucleotide: PDCD1-3995
ugacguuaccucgugcggc

SEQ ID NO: 16129 - RNA, 20 nt, Artificial Sequence
  Synthetic oligonucleotide: PDCD1-828
augacguuaccucgugcggc

SEQ ID NO: 16130 - RNA, 21 nt, Artificial Sequence
  Synthetic oligonucleotide: PDCD1-3996
gaugacguuaccucgugcggc

SEQ ID NO: 16131 - RNA, 22 nt, Artificial Sequence
  Synthetic oligonucleotide: PDCD1-3997
ggaugacguuaccucgugcggc

SEQ ID NO: 16132 - RNA, 23 nt, Artificial Sequence
  Synthetic oligonucleotide: PDCD1-3998
gggaugacguuaccucgugcggc

SEQ ID NO: 16133 - RNA, 24 nt, Artificial Sequence
  Synthetic oligonucleotide: PDCD1-3999
ugggaugacguuaccucgugcggc

SEQ ID NO: 16134 - RNA, 18 nt, Artificial Sequence
  Synthetic oligonucleotide: PDCD1-4000
ugcucagggacacagggc

SEQ ID NO: 16135 - RNA, 19 nt, Artificial Sequence
  Synthetic oligonucleotide: PDCD1-4001
cugcucagggacacagggc

SEQ ID NO: 16136 - RNA, 20 nt, Artificial Sequence
  Synthetic oligonucleotide: PDCD1-858
ucugcucagggacacagggc

SEQ ID NO: 16137 - RNA, 21 nt, Artificial Sequence
  Synthetic oligonucleotide: PDCD1-4002
gucugcucagggacacagggc

SEQ ID NO: 16138 - RNA, 22 nt, Artificial Sequence
  Synthetic oligonucleotide: PDCD1-4003
cgucugcucagggacacagggc

SEQ ID NO: 16139 - RNA, 23 nt, Artificial Sequence
  Synthetic oligonucleotide: PDCD1-4004
ccgucugcucagggacacagggc

SEQ ID NO: 16140 - RNA, 24 nt, Artificial Sequence
  Synthetic oligonucleotide: PDCD1-4005
uccgucugcucagggacacagggc

SEQ ID NO: 16141 - RNA, 18 nt, Artificial Sequence
  Synthetic oligonucleotide: PDCD1-4006
agcugagccccugcgggc

SEQ ID NO: 16142 - RNA, 19 nt, Artificial Sequence
  Synthetic oligonucleotide: PDCD1-4007
cagcugagccccugcgggc

SEQ ID NO: 16143 - RNA, 20 nt, Artificial Sequence
  Synthetic oligonucleotide: PDCD1-427
ucagcugagccccugcgggc

SEQ ID NO: 16144 - RNA, 21 nt, Artificial Sequence
  Synthetic oligonucleotide: PDCD1-4008
gucagcugagccccugcgggc

SEQ ID NO: 16145 - RNA, 22 nt, Artificial Sequence
  Synthetic oligonucleotide: PDCD1-4009
cgucagcugagccccugcgggc

SEQ ID NO: 16146 - RNA, 23 nt, Artificial Sequence
  Synthetic oligonucleotide: PDCD1-4010
ccgucagcugagccccugcgggc

SEQ ID NO: 16147 - RNA, 24 nt, Artificial Sequence
  Synthetic oligonucleotide: PDCD1-4011
gccgucagcugagccccugcgggc

SEQ ID NO: 16148 - RNA, 18 nt, Artificial Sequence
  Synthetic oligonucleotide: PDCD1-4012
ggcauacuccgucugcuc

SEQ ID NO: 16149 - RNA, 19 nt, Artificial Sequence
  Synthetic oligonucleotide: PDCD1-4013
uggcauacuccgucugcuc

SEQ ID NO: 16150 - RNA, 20 nt, Artificial Sequence
  Synthetic oligonucleotide: PDCD1-420
guggcauacuccgucugcuc

SEQ ID NO: 16151 - RNA, 21 nt, Artificial Sequence
  Synthetic oligonucleotide: PDCD1-4014
gguggcauacuccgucugcuc

SEQ ID NO: 16152 - RNA, 22 nt, Artificial Sequence
  Synthetic oligonucleotide: PDCD1-4015
ugguggcauacuccgucugcuc

SEQ ID NO: 16153 - RNA, 23 nt, Artificial Sequence
  Synthetic oligonucleotide: PDCD1-4016
augguggcauacuccgucugcuc

SEQ ID NO: 16154 - RNA, 24 nt, Artificial Sequence
  Synthetic oligonucleotide: PDCD1-4017
aaugguggcauacuccgucugcuc

SEQ ID NO: 16155 - RNA, 18 nt, Artificial Sequence
  Synthetic oligonucleotide: PDCD1-4018
cacuucugcccuucucuc

SEQ ID NO: 16156 - RNA, 19 nt, Artificial Sequence
  Synthetic oligonucleotide: PDCD1-4019
gcacuucugcccuucucuc

SEQ ID NO: 16157 - RNA, 20 nt, Artificial Sequence
  Synthetic oligonucleotide: PDCD1-362
ggcacuucugcccuucucuc

SEQ ID NO: 16158 - RNA, 21 nt, Artificial Sequence
  Synthetic oligonucleotide: PDCD1-4020
gggcacuucugcccuucucuc

SEQ ID NO: 16159 - RNA, 22 nt, Artificial Sequence
  Synthetic oligonucleotide: PDCD1-4021
ugggcacuucugcccuucucuc

SEQ ID NO: 16160 - RNA, 23 nt, Artificial Sequence
  Synthetic oligonucleotide: PDCD1-4022
gugggcacuucugcccuucucuc

SEQ ID NO: 16161 - RNA, 24 nt, Artificial Sequence
  Synthetic oligonucleotide: PDCD1-4023
ugugggcacuucugcccuucucuc

SEQ ID NO: 16162 - RNA, 18 nt, Artificial Sequence
  Synthetic oligonucleotide: PDCD1-4024
cacuccgagggccgucag

SEQ ID NO: 16163 - RNA, 19 nt, Artificial Sequence
  Synthetic oligonucleotide: PDCD1-4025
gcacuccgagggccgucag

SEQ ID NO: 16164 - RNA, 20 nt, Artificial Sequence
  Synthetic oligonucleotide: PDCD1-870
ggcacuccgagggccgucag

SEQ ID NO: 16165 - RNA, 21 nt, Artificial Sequence
  Synthetic oligonucleotide: PDCD1-4026
gggcacuccgagggccgucag

SEQ ID NO: 16166 - RNA, 22 nt, Artificial Sequence
  Synthetic oligonucleotide: PDCD1-4027
ugggcacuccgagggccgucag

SEQ ID NO: 16167 - RNA, 23 nt, Artificial Sequence
  Synthetic oligonucleotide: PDCD1-4028
cugggcacuccgagggccgucag

SEQ ID NO: 16168 - RNA, 24 nt, Artificial Sequence
  Synthetic oligonucleotide: PDCD1-4029
gcugggcacuccgagggccgucag

SEQ ID NO: 16169 - RNA, 18 nt, Artificial Sequence
  Synthetic oligonucleotide: PDCD1-4030
gccaaggaagccggucag

SEQ ID NO: 16170 - RNA, 19 nt, Artificial Sequence
  Synthetic oligonucleotide: PDCD1-4031
ggccaaggaagccggucag

SEQ ID NO: 16171 - RNA, 20 nt, Artificial Sequence
  Synthetic oligonucleotide: PDCD1-439
uggccaaggaagccggucag

SEQ ID NO: 16172 - RNA, 21 nt, Artificial Sequence
  Synthetic oligonucleotide: PDCD1-4032
guggccaaggaagccggucag

SEQ ID NO: 16173 - RNA, 22 nt, Artificial Sequence
  Synthetic oligonucleotide: PDCD1-4033
gguggccaaggaagccggucag

SEQ ID NO: 16174 - RNA, 23 nt, Artificial Sequence
  Synthetic oligonucleotide: PDCD1-4034
ugguggccaaggaagccggucag

SEQ ID NO: 16175 - RNA, 24 nt, Artificial Sequence
  Synthetic oligonucleotide: PDCD1-4035
cugguggccaaggaagccggucag

SEQ ID NO: 16176 - RNA, 18 nt, Artificial Sequence
  Synthetic oligonucleotide: PDCD1-4036
cuuugaggagaaagggag

SEQ ID NO: 16177 - RNA, 19 nt, Artificial Sequence
  Synthetic oligonucleotide: PDCD1-4037
ucuuugaggagaaagggag

SEQ ID NO: 16178 - RNA, 20 nt, Artificial Sequence
  Synthetic oligonucleotide: PDCD1-399
uucuuugaggagaaagggag

SEQ ID NO: 16179 - RNA, 21 nt, Artificial Sequence
  Synthetic oligonucleotide: PDCD1-4038
cuucuuugaggagaaagggag

SEQ ID NO: 16180 - RNA, 22 nt, Artificial Sequence
  Synthetic oligonucleotide: PDCD1-4039
ccuucuuugaggagaaagggag

SEQ ID NO: 16181 - RNA, 23 nt, Artificial Sequence
  Synthetic oligonucleotide: PDCD1-4040
uccuucuuugaggagaaagggag

SEQ ID NO: 16182 - RNA, 24 nt, Artificial Sequence
  Synthetic oligonucleotide: PDCD1-4041
cuccuucuuugaggagaaagggag

SEQ ID NO: 16183 - RNA, 18 nt, Artificial Sequence
  Synthetic oligonucleotide: PDCD1-4042
ggguccuccuucuuugag

SEQ ID NO: 16184 - RNA, 19 nt, Artificial Sequence
  Synthetic oligonucleotide: PDCD1-4043
gggguccuccuucuuugag

SEQ ID NO: 16185 - RNA, 20 nt, Artificial Sequence
  Synthetic oligonucleotide: PDCD1-842
agggguccuccuucuuugag

SEQ ID NO: 16186 - RNA, 21 nt, Artificial Sequence
  Synthetic oligonucleotide: PDCD1-4044
gagggguccuccuucuuugag

SEQ ID NO: 16187 - RNA, 22 nt, Artificial Sequence
  Synthetic oligonucleotide: PDCD1-4045
ugagggguccuccuucuuugag

SEQ ID NO: 16188 - RNA, 23 nt, Artificial Sequence
  Synthetic oligonucleotide: PDCD1-4046
cugagggguccuccuucuuugag

SEQ ID NO: 16189 - RNA, 24 nt, Artificial Sequence
  Synthetic oligonucleotide: PDCD1-4047
gcugagggguccuccuucuuugag

SEQ ID NO: 16190 - RNA, 18 nt, Artificial Sequence
  Synthetic oligonucleotide: PDCD1-4048
ucagggacacagggcacg

SEQ ID NO: 16191 - RNA, 19 nt, Artificial Sequence
  Synthetic oligonucleotide: PDCD1-4049
cucagggacacagggcacg

SEQ ID NO: 16192 - RNA, 20 nt, Artificial Sequence
  Synthetic oligonucleotide: PDCD1-414
gcucagggacacagggcacg

SEQ ID NO: 16193 - RNA, 21 nt, Artificial Sequence
  Synthetic oligonucleotide: PDCD1-4050
ugcucagggacacagggcacg

SEQ ID NO: 16194 - RNA, 22 nt, Artificial Sequence
  Synthetic oligonucleotide: PDCD1-4051
cugcucagggacacagggcacg

SEQ ID NO: 16195 - RNA, 23 nt, Artificial Sequence
  Synthetic oligonucleotide: PDCD1-4052
ucugcucagggacacagggcacg

SEQ ID NO: 16196 - RNA, 24 nt, Artificial Sequence
  Synthetic oligonucleotide: PDCD1-4053
gucugcucagggacacagggcacg

SEQ ID NO: 16197 - RNA, 18 nt, Artificial Sequence
  Synthetic oligonucleotide: PDCD1-4054
cuucuuugaggagaaagg

SEQ ID NO: 16198 - RNA, 19 nt, Artificial Sequence
  Synthetic oligonucleotide: PDCD1-4055
ccuucuuugaggagaaagg

SEQ ID NO: 16199 - RNA, 20 nt, Artificial Sequence
  Synthetic oligonucleotide: PDCD1-838
uccuucuuugaggagaaagg

SEQ ID NO: 16200 - RNA, 21 nt, Artificial Sequence
  Synthetic oligonucleotide: PDCD1-4056
cuccuucuuugaggagaaagg

SEQ ID NO: 16201 - RNA, 22 nt, Artificial Sequence
  Synthetic oligonucleotide: PDCD1-4057
ccuccuucuuugaggagaaagg

SEQ ID NO: 16202 - RNA, 23 nt, Artificial Sequence
  Synthetic oligonucleotide: PDCD1-4058
uccuccuucuuugaggagaaagg

SEQ ID NO: 16203 - RNA, 24 nt, Artificial Sequence
  Synthetic oligonucleotide: PDCD1-4059
guccuccuucuuugaggagaaagg

SEQ ID NO: 16204 - RNA, 18 nt, Artificial Sequence
  Synthetic oligonucleotide: PDCD1-4060
cagagaacacaggcacgg

SEQ ID NO: 16205 - RNA, 19 nt, Artificial Sequence
  Synthetic oligonucleotide: PDCD1-4061
acagagaacacaggcacgg

SEQ ID NO: 16206 - RNA, 20 nt, Artificial Sequence
  Synthetic oligonucleotide: PDCD1-848
cacagagaacacaggcacgg

SEQ ID NO: 16207 - RNA, 21 nt, Artificial Sequence
  Synthetic oligonucleotide: PDCD1-4062
ccacagagaacacaggcacgg

SEQ ID NO: 16208 - RNA, 22 nt, Artificial Sequence
  Synthetic oligonucleotide: PDCD1-4063
uccacagagaacacaggcacgg

SEQ ID NO: 16209 - RNA, 23 nt, Artificial Sequence
  Synthetic oligonucleotide: PDCD1-4064
guccacagagaacacaggcacgg

SEQ ID NO: 16210 - RNA, 24 nt, Artificial Sequence
  Synthetic oligonucleotide: PDCD1-4065
aguccacagagaacacaggcacgg

SEQ ID NO: 16211 - RNA, 18 nt, Artificial Sequence
  Synthetic oligonucleotide: PDCD1-4066
ucagcugagccccugcgg

SEQ ID NO: 16212 - RNA, 19 nt, Artificial Sequence
  Synthetic oligonucleotide: PDCD1-4067
gucagcugagccccugcgg

SEQ ID NO: 16213 - RNA, 20 nt, Artificial Sequence
  Synthetic oligonucleotide: PDCD1-868
cgucagcugagccccugcgg

SEQ ID NO: 16214 - RNA, 21 nt, Artificial Sequence
  Synthetic oligonucleotide: PDCD1-4068
ccgucagcugagccccugcgg

SEQ ID NO: 16215 - RNA, 22 nt, Artificial Sequence
  Synthetic oligonucleotide: PDCD1-4069
gccgucagcugagccccugcgg

SEQ ID NO: 16216 - RNA, 23 nt, Artificial Sequence
  Synthetic oligonucleotide: PDCD1-4070
ggccgucagcugagccccugcgg

SEQ ID NO: 16217 - RNA, 24 nt, Artificial Sequence
  Synthetic oligonucleotide: PDCD1-4071
gggccgucagcugagccccugcgg

SEQ ID NO: 16218 - RNA, 18 nt, Artificial Sequence
  Synthetic oligonucleotide: PDCD1-4072
cagcugagccccugcggg

SEQ ID NO: 16219 - RNA, 19 nt, Artificial Sequence
  Synthetic oligonucleotide: PDCD1-4073
ucagcugagccccugcggg

SEQ ID NO: 16220 - RNA, 20 nt, Artificial Sequence
  Synthetic oligonucleotide: PDCD1-428
gucagcugagccccugcggg

SEQ ID NO: 16221 - RNA, 21 nt, Artificial Sequence
  Synthetic oligonucleotide: PDCD1-4074
cgucagcugagccccugcggg

SEQ ID NO: 16222 - RNA, 22 nt, Artificial Sequence
  Synthetic oligonucleotide: PDCD1-4075
ccgucagcugagccccugcggg

SEQ ID NO: 16223 - RNA, 23 nt, Artificial Sequence
  Synthetic oligonucleotide: PDCD1-4076
gccgucagcugagccccugcggg

SEQ ID NO: 16224 - RNA, 24 nt, Artificial Sequence
  Synthetic oligonucleotide: PDCD1-4077
ggccgucagcugagccccugcggg

SEQ ID NO: 16225 - RNA, 18 nt, Artificial Sequence
  Synthetic oligonucleotide: PDCD1-4078
gcuggccugggugagggg

SEQ ID NO: 16226 - RNA, 19 nt, Artificial Sequence
  Synthetic oligonucleotide: PDCD1-4079
ggcuggccugggugagggg

SEQ ID NO: 16227 - RNA, 20 nt, Artificial Sequence
  Synthetic oligonucleotide: PDCD1-817
cggcuggccugggugagggg

SEQ ID NO: 16228 - RNA, 21 nt, Artificial Sequence
  Synthetic oligonucleotide: PDCD1-4080
ccggcuggccugggugagggg

SEQ ID NO: 16229 - RNA, 22 nt, Artificial Sequence
  Synthetic oligonucleotide: PDCD1-4081
gccggcuggccugggugagggg

SEQ ID NO: 16230 - RNA, 23 nt, Artificial Sequence
  Synthetic oligonucleotide: PDCD1-4082
ggccggcuggccugggugagggg

SEQ ID NO: 16231 - RNA, 24 nt, Artificial Sequence
  Synthetic oligonucleotide: PDCD1-4083
uggccggcuggccugggugagggg

SEQ ID NO: 16232 - RNA, 18 nt, Artificial Sequence
  Synthetic oligonucleotide: PDCD1-4084
agccccugcgggcggggg

SEQ ID NO: 16233 - RNA, 19 nt, Artificial Sequence
  Synthetic oligonucleotide: PDCD1-4085
gagccccugcgggcggggg

SEQ ID NO: 16234 - RNA, 20 nt, Artificial Sequence
  Synthetic oligonucleotide: PDCD1-864
ugagccccugcgggcggggg

SEQ ID NO: 16235 - RNA, 21 nt, Artificial Sequence
  Synthetic oligonucleotide: PDCD1-4086
cugagccccugcgggcggggg

SEQ ID NO: 16236 - RNA, 22 nt, Artificial Sequence
  Synthetic oligonucleotide: PDCD1-4087
gcugagccccugcgggcggggg

SEQ ID NO: 16237 - RNA, 23 nt, Artificial Sequence
  Synthetic oligonucleotide: PDCD1-4088
agcugagccccugcgggcggggg

SEQ ID NO: 16238 - RNA, 24 nt, Artificial Sequence
  Synthetic oligonucleotide: PDCD1-4089
cagcugagccccugcgggcggggg

SEQ ID NO: 16239 - RNA, 18 nt, Artificial Sequence
  Synthetic oligonucleotide: PDCD1-4090
ccugggugaggggcuggg

SEQ ID NO: 16240 - RNA, 19 nt, Artificial Sequence
  Synthetic oligonucleotide: PDCD1-4091
gccugggugaggggcuggg

SEQ ID NO: 16241 - RNA, 20 nt, Artificial Sequence
  Synthetic oligonucleotide: PDCD1-815
ggccugggugaggggcuggg

SEQ ID NO: 16242 - RNA, 21 nt, Artificial Sequence
  Synthetic oligonucleotide: PDCD1-4092
uggccugggugaggggcuggg

SEQ ID NO: 16243 - RNA, 22 nt, Artificial Sequence
  Synthetic oligonucleotide: PDCD1-4093
cuggccugggugaggggcuggg

SEQ ID NO: 16244 - RNA, 23 nt, Artificial Sequence
  Synthetic oligonucleotide: PDCD1-4094
gcuggccugggugaggggcuggg

SEQ ID NO: 16245 - RNA, 24 nt, Artificial Sequence
  Synthetic oligonucleotide: PDCD1-4095
ggcuggccugggugaggggcuggg

SEQ ID NO: 16246 - RNA, 18 nt, Artificial Sequence
  Synthetic oligonucleotide: PDCD1-4096
acuggccggcuggccugg

SEQ ID NO: 16247 - RNA, 19 nt, Artificial Sequence
  Synthetic oligonucleotide: PDCD1-4097
aacuggccggcuggccugg

SEQ ID NO: 16248 - RNA, 20 nt, Artificial Sequence
  Synthetic oligonucleotide: PDCD1-820
gaacuggccggcuggccugg

SEQ ID NO: 16249 - RNA, 21 nt, Artificial Sequence
  Synthetic oligonucleotide: PDCD1-4098
ggaacuggccggcuggccugg

SEQ ID NO: 16250 - RNA, 22 nt, Artificial Sequence
  Synthetic oligonucleotide: PDCD1-4099
uggaacuggccggcuggccugg

SEQ ID NO: 16251 - RNA, 23 nt, Artificial Sequence
  Synthetic oligonucleotide: PDCD1-4100
uuggaacuggccggcuggccugg

SEQ ID NO: 16252 - RNA, 24 nt, Artificial Sequence
  Synthetic oligonucleotide: PDCD1-4101
uuuggaacuggccggcuggccugg

SEQ ID NO: 16253 - RNA, 18 nt, Artificial Sequence
  Synthetic oligonucleotide: PDCD1-4102
uucugcccuucucucugg

SEQ ID NO: 16254 - RNA, 19 nt, Artificial Sequence
  Synthetic oligonucleotide: PDCD1-4103
cuucugcccuucucucugg

SEQ ID NO: 16255 - RNA, 20 nt, Artificial Sequence
  Synthetic oligonucleotide: PDCD1-811
acuucugcccuucucucugg

SEQ ID NO: 16256 - RNA, 21 nt, Artificial Sequence
  Synthetic oligonucleotide: PDCD1-4104
cacuucugcccuucucucugg

SEQ ID NO: 16257 - RNA, 22 nt, Artificial Sequence
  Synthetic oligonucleotide: PDCD1-4105
gcacuucugcccuucucucugg

SEQ ID NO: 16258 - RNA, 23 nt, Artificial Sequence
  Synthetic oligonucleotide: PDCD1-4106
ggcacuucugcccuucucucugg

SEQ ID NO: 16259 - RNA, 24 nt, Artificial Sequence
  Synthetic oligonucleotide: PDCD1-4107
gggcacuucugcccuucucucugg

SEQ ID NO: 16260 - RNA, 18 nt, Artificial Sequence
  Synthetic oligonucleotide: PDCD1-4108
auccucaggccucagugg

SEQ ID NO: 16261 - RNA, 19 nt, Artificial Sequence
  Synthetic oligonucleotide: PDCD1-4109
cauccucaggccucagugg

SEQ ID NO: 16262 - RNA, 20 nt, Artificial Sequence
  Synthetic oligonucleotide: PDCD1-873
ccauccucaggccucagugg

SEQ ID NO: 16263 - RNA, 21 nt, Artificial Sequence
  Synthetic oligonucleotide: PDCD1-4110
uccauccucaggccucagugg

SEQ ID NO: 16264 - RNA, 22 nt, Artificial Sequence
  Synthetic oligonucleotide: PDCD1-4111
guccauccucaggccucagugg

SEQ ID NO: 16265 - RNA, 23 nt, Artificial Sequence
  Synthetic oligonucleotide: PDCD1-4112
uguccauccucaggccucagugg

SEQ ID NO: 16266 - RNA, 24 nt, Artificial Sequence
  Synthetic oligonucleotide: PDCD1-4113
guguccauccucaggccucagugg

SEQ ID NO: 16267 - RNA, 18 nt, Artificial Sequence
  Synthetic oligonucleotide: PDCD1-4114
uggcuccuauugucccug

SEQ ID NO: 16268 - RNA, 19 nt, Artificial Sequence
  Synthetic oligonucleotide: PDCD1-4115
cuggcuccuauugucccug

SEQ ID NO: 16269 - RNA, 20 nt, Artificial Sequence
  Synthetic oligonucleotide: PDCD1-832
ccuggcuccuauugucccug

SEQ ID NO: 16270 - RNA, 21 nt, Artificial Sequence
  Synthetic oligonucleotide: PDCD1-4116
gccuggcuccuauugucccug

SEQ ID NO: 16271 - RNA, 22 nt, Artificial Sequence
  Synthetic oligonucleotide: PDCD1-4117
cgccuggcuccuauugucccug

SEQ ID NO: 16272 - RNA, 23 nt, Artificial Sequence
  Synthetic oligonucleotide: PDCD1-4118
gcgccuggcuccuauugucccug

SEQ ID NO: 16273 - RNA, 24 nt, Artificial Sequence
  Synthetic oligonucleotide: PDCD1-4119
ugcgccuggcuccuauugucccug

SEQ ID NO: 16274 - RNA, 18 nt, Artificial Sequence
  Synthetic oligonucleotide: PDCD1-4120
ggccggcuggccugggug

SEQ ID NO: 16275 - RNA, 19 nt, Artificial Sequence
  Synthetic oligonucleotide: PDCD1-4121
uggccggcuggccugggug

SEQ ID NO: 16276 - RNA, 20 nt, Artificial Sequence
  Synthetic oligonucleotide: PDCD1-372
cuggccggcuggccugggug

SEQ ID NO: 16277 - RNA, 21 nt, Artificial Sequence
  Synthetic oligonucleotide: PDCD1-4122
acuggccggcuggccugggug

SEQ ID NO: 16278 - RNA, 22 nt, Artificial Sequence
  Synthetic oligonucleotide: PDCD1-4123
aacuggccggcuggccugggug

SEQ ID NO: 16279 - RNA, 23 nt, Artificial Sequence
  Synthetic oligonucleotide: PDCD1-4124
gaacuggccggcuggccugggug

SEQ ID NO: 16280 - RNA, 24 nt, Artificial Sequence
  Synthetic oligonucleotide: PDCD1-4125
ggaacuggccggcuggccugggug

SEQ ID NO: 16281 - RNA, 18 nt, Artificial Sequence
  Synthetic oligonucleotide: PDCD1-4126
agggguccuccuucuuug

SEQ ID NO: 16282 - RNA, 19 nt, Artificial Sequence
  Synthetic oligonucleotide: PDCD1-4127
gagggguccuccuucuuug

SEQ ID NO: 16283 - RNA, 20 nt, Artificial Sequence
  Synthetic oligonucleotide: PDCD1-402
ugagggguccuccuucuuug

SEQ ID NO: 16284 - RNA, 21 nt, Artificial Sequence
  Synthetic oligonucleotide: PDCD1-4128
cugagggguccuccuucuuug

SEQ ID NO: 16285 - RNA, 22 nt, Artificial Sequence
  Synthetic oligonucleotide: PDCD1-4129
gcugagggguccuccuucuuug

SEQ ID NO: 16286 - RNA, 23 nt, Artificial Sequence
  Synthetic oligonucleotide: PDCD1-4130
ggcugagggguccuccuucuuug

SEQ ID NO: 16287 - RNA, 24 nt, Artificial Sequence
  Synthetic oligonucleotide: PDCD1-4131
cggcugagggguccuccuucuuug

SEQ ID NO: 16288 - RNA, 18 nt, Artificial Sequence
  Synthetic oligonucleotide: PDCD1-4132
ccucaguggcugggcacu

SEQ ID NO: 16289 - RNA, 19 nt, Artificial Sequence
  Synthetic oligonucleotide: PDCD1-4133
gccucaguggcugggcacu

SEQ ID NO: 16290 - RNA, 20 nt, Artificial Sequence
  Synthetic oligonucleotide: PDCD1-872
ggccucaguggcugggcacu

SEQ ID NO: 16291 - RNA, 21 nt, Artificial Sequence
  Synthetic oligonucleotide: PDCD1-4134
aggccucaguggcugggcacu

SEQ ID NO: 16292 - RNA, 22 nt, Artificial Sequence
  Synthetic oligonucleotide: PDCD1-4135
caggccucaguggcugggcacu

SEQ ID NO: 16293 - RNA, 23 nt, Artificial Sequence
  Synthetic oligonucleotide: PDCD1-4136
ucaggccucaguggcugggcacu

SEQ ID NO: 16294 - RNA, 24 nt, Artificial Sequence
  Synthetic oligonucleotide: PDCD1-4137
cucaggccucaguggcugggcacu

SEQ ID NO: 16295 - RNA, 18 nt, Artificial Sequence
  Synthetic oligonucleotide: PDCD1-4138
gccgucagcugagccccu

SEQ ID NO: 16296 - RNA, 19 nt, Artificial Sequence
  Synthetic oligonucleotide: PDCD1-4139
ggccgucagcugagccccu

SEQ ID NO: 16297 - RNA, 20 nt, Artificial Sequence
  Synthetic oligonucleotide: PDCD1-869
gggccgucagcugagccccu

SEQ ID NO: 16298 - RNA, 21 nt, Artificial Sequence
  Synthetic oligonucleotide: PDCD1-4140
agggccgucagcugagccccu

SEQ ID NO: 16299 - RNA, 22 nt, Artificial Sequence
  Synthetic oligonucleotide: PDCD1-4141
gagggccgucagcugagccccu

SEQ ID NO: 16300 - RNA, 23 nt, Artificial Sequence
  Synthetic oligonucleotide: PDCD1-4142
cgagggccgucagcugagccccu

SEQ ID NO: 16301 - RNA, 24 nt, Artificial Sequence
  Synthetic oligonucleotide: PDCD1-4143
ccgagggccgucagcugagccccu

SEQ ID NO: 16302 - RNA, 18 nt, Artificial Sequence
  Synthetic oligonucleotide: PDCD1-4144
ugaggugcccauuccgcu

SEQ ID NO: 16303 - RNA, 19 nt, Artificial Sequence
  Synthetic oligonucleotide: PDCD1-4145
augaggugcccauuccgcu

SEQ ID NO: 16304 - RNA, 20 nt, Artificial Sequence
  Synthetic oligonucleotide: PDCD1-423
gaugaggugcccauuccgcu

SEQ ID NO: 16305 - RNA, 21 nt, Artificial Sequence
  Synthetic oligonucleotide: PDCD1-4146
ggaugaggugcccauuccgcu

SEQ ID NO: 16306 - RNA, 22 nt, Artificial Sequence
  Synthetic oligonucleotide: PDCD1-4147
gggaugaggugcccauuccgcu

SEQ ID NO: 16307 - RNA, 23 nt, Artificial Sequence
  Synthetic oligonucleotide: PDCD1-4148
ggggaugaggugcccauuccgcu

SEQ ID NO: 16308 - RNA, 24 nt, Artificial Sequence
  Synthetic oligonucleotide: PDCD1-4149
gggggaugaggugcccauuccgcu

SEQ ID NO: 16309 - RNA, 18 nt, Artificial Sequence
  Synthetic oligonucleotide: PDCD1-4150
gagaacacaggcacggcu

SEQ ID NO: 16310 - RNA, 19 nt, Artificial Sequence
  Synthetic oligonucleotide: PDCD1-4151
agagaacacaggcacggcu

SEQ ID NO: 16311 - RNA, 20 nt, Artificial Sequence
  Synthetic oligonucleotide: PDCD1-847
cagagaacacaggcacggcu

SEQ ID NO: 16312 - RNA, 21 nt, Artificial Sequence
  Synthetic oligonucleotide: PDCD1-4152
acagagaacacaggcacggcu

SEQ ID NO: 16313 - RNA, 22 nt, Artificial Sequence
  Synthetic oligonucleotide: PDCD1-4153
cacagagaacacaggcacggcu

SEQ ID NO: 16314 - RNA, 23 nt, Artificial Sequence
  Synthetic oligonucleotide: PDCD1-4154
ccacagagaacacaggcacggcu

SEQ ID NO: 16315 - RNA, 24 nt, Artificial Sequence
  Synthetic oligonucleotide: PDCD1-4155
uccacagagaacacaggcacggcu

SEQ ID NO: 16316 - RNA, 18 nt, Artificial Sequence
  Synthetic oligonucleotide: PDCD1-4156
cacagggcacggggggcu

SEQ ID NO: 16317 - RNA, 19 nt, Artificial Sequence
  Synthetic oligonucleotide: PDCD1-4157
acacagggcacggggggcu

SEQ ID NO: 16318 - RNA, 20 nt, Artificial Sequence
  Synthetic oligonucleotide: PDCD1-854
gacacagggcacggggggcu

SEQ ID NO: 16319 - RNA, 21 nt, Artificial Sequence
  Synthetic oligonucleotide: PDCD1-4158
ggacacagggcacggggggcu

SEQ ID NO: 16320 - RNA, 22 nt, Artificial Sequence
  Synthetic oligonucleotide: PDCD1-4159
gggacacagggcacggggggcu

SEQ ID NO: 16321 - RNA, 23 nt, Artificial Sequence
  Synthetic oligonucleotide: PDCD1-4160
agggacacagggcacggggggcu

SEQ ID NO: 16322 - RNA, 24 nt, Artificial Sequence
  Synthetic oligonucleotide: PDCD1-4161
cagggacacagggcacggggggcu

SEQ ID NO: 16323 - RNA, 18 nt, Artificial Sequence
  Synthetic oligonucleotide: PDCD1-4162
gaggggcuggggugggcu

SEQ ID NO: 16324 - RNA, 19 nt, Artificial Sequence
  Synthetic oligonucleotide: PDCD1-4163
ugaggggcuggggugggcu

SEQ ID NO: 16325 - RNA, 20 nt, Artificial Sequence
  Synthetic oligonucleotide: PDCD1-814
gugaggggcuggggugggcu

SEQ ID NO: 16326 - RNA, 21 nt, Artificial Sequence
  Synthetic oligonucleotide: PDCD1-4164
ggugaggggcuggggugggcu

SEQ ID NO: 16327 - RNA, 22 nt, Artificial Sequence
  Synthetic oligonucleotide: PDCD1-4165
gggugaggggcuggggugggcu

SEQ ID NO: 16328 - RNA, 23 nt, Artificial Sequence
  Synthetic oligonucleotide: PDCD1-4166
ugggugaggggcuggggugggcu

SEQ ID NO: 16329 - RNA, 24 nt, Artificial Sequence
  Synthetic oligonucleotide: PDCD1-4167
cugggugaggggcuggggugggcu

SEQ ID NO: 16330 - RNA, 18 nt, Artificial Sequence
  Synthetic oligonucleotide: PDCD1-4168
uggcauacuccgucugcu

SEQ ID NO: 16331 - RNA, 19 nt, Artificial Sequence
  Synthetic oligonucleotide: PDCD1-4169
guggcauacuccgucugcu

SEQ ID NO: 16332 - RNA, 20 nt, Artificial Sequence
  Synthetic oligonucleotide: PDCD1-861
gguggcauacuccgucugcu

SEQ ID NO: 16333 - RNA, 21 nt, Artificial Sequence
  Synthetic oligonucleotide: PDCD1-4170
ugguggcauacuccgucugcu

SEQ ID NO: 16334 - RNA, 22 nt, Artificial Sequence
  Synthetic oligonucleotide: PDCD1-4171
augguggcauacuccgucugcu

SEQ ID NO: 16335 - RNA, 23 nt, Artificial Sequence
  Synthetic oligonucleotide: PDCD1-4172
aaugguggcauacuccgucugcu

SEQ ID NO: 16336 - RNA, 24 nt, Artificial Sequence
  Synthetic oligonucleotide: PDCD1-4173
caaugguggcauacuccgucugcu

SEQ ID NO: 16337 - RNA, 18 nt, Artificial Sequence
  Synthetic oligonucleotide: PDCD1-4174
gcacuucugcccuucucu

SEQ ID NO: 16338 - RNA, 19 nt, Artificial Sequence
  Synthetic oligonucleotide: PDCD1-4175
ggcacuucugcccuucucu

SEQ ID NO: 16339 - RNA, 20 nt, Artificial Sequence
  Synthetic oligonucleotide: PDCD1-813
gggcacuucugcccuucucu

SEQ ID NO: 16340 - RNA, 21 nt, Artificial Sequence
  Synthetic oligonucleotide: PDCD1-4176
ugggcacuucugcccuucucu

SEQ ID NO: 16341 - RNA, 22 nt, Artificial Sequence
  Synthetic oligonucleotide: PDCD1-4177
gugggcacuucugcccuucucu

SEQ ID NO: 16342 - RNA, 23 nt, Artificial Sequence
  Synthetic oligonucleotide: PDCD1-4178
ugugggcacuucugcccuucucu

SEQ ID NO: 16343 - RNA, 24 nt, Artificial Sequence
  Synthetic oligonucleotide: PDCD1-4179
cugugggcacuucugcccuucucu

SEQ ID NO: 16344 - RNA, 18 nt, Artificial Sequence
  Synthetic oligonucleotide: PDCD1-4180
cugagggguccuccuucu

SEQ ID NO: 16345 - RNA, 19 nt, Artificial Sequence
  Synthetic oligonucleotide: PDCD1-4181
gcugagggguccuccuucu

SEQ ID NO: 16346 - RNA, 20 nt, Artificial Sequence
  Synthetic oligonucleotide: PDCD1-845
ggcugagggguccuccuucu

SEQ ID NO: 16347 - RNA, 21 nt, Artificial Sequence
  Synthetic oligonucleotide: PDCD1-4182
cggcugagggguccuccuucu

SEQ ID NO: 16348 - RNA, 22 nt, Artificial Sequence
  Synthetic oligonucleotide: PDCD1-4183
acggcugagggguccuccuucu

SEQ ID NO: 16349 - RNA, 23 nt, Artificial Sequence
  Synthetic oligonucleotide: PDCD1-4184
cacggcugagggguccuccuucu

SEQ ID NO: 16350 - RNA, 24 nt, Artificial Sequence
  Synthetic oligonucleotide: PDCD1-4185
gcacggcugagggguccuccuucu

SEQ ID NO: 16351 - RNA, 18 nt, Artificial Sequence
  Synthetic oligonucleotide: PDCD1-4186
cuggaagggcacaaaggu

SEQ ID NO: 16352 - RNA, 19 nt, Artificial Sequence
  Synthetic oligonucleotide: PDCD1-4187
ucuggaagggcacaaaggu

SEQ ID NO: 16353 - RNA, 20 nt, Artificial Sequence
  Synthetic oligonucleotide: PDCD1-810
cucuggaagggcacaaaggu

SEQ ID NO: 16354 - RNA, 21 nt, Artificial Sequence
  Synthetic oligonucleotide: PDCD1-4188
ucucuggaagggcacaaaggu

SEQ ID NO: 16355 - RNA, 22 nt, Artificial Sequence
  Synthetic oligonucleotide: PDCD1-4189
cucucuggaagggcacaaaggu

SEQ ID NO: 16356 - RNA, 23 nt, Artificial Sequence
  Synthetic oligonucleotide: PDCD1-4190
ucucucuggaagggcacaaaggu

SEQ ID NO: 16357 - RNA, 24 nt, Artificial Sequence
  Synthetic oligonucleotide: PDCD1-4191
uucucucuggaagggcacaaaggu

SEQ ID NO: 16358 - RNA, 18 nt, Artificial Sequence
  Synthetic oligonucleotide: PDCD1-4192
guggccaaggaagccggu

SEQ ID NO: 16359 - RNA, 19 nt, Artificial Sequence
  Synthetic oligonucleotide: PDCD1-4193
gguggccaaggaagccggu

SEQ ID NO: 16360 - RNA, 20 nt, Artificial Sequence
  Synthetic oligonucleotide: PDCD1-877
ugguggccaaggaagccggu

SEQ ID NO: 16361 - RNA, 21 nt, Artificial Sequence
  Synthetic oligonucleotide: PDCD1-4194
cugguggccaaggaagccggu

SEQ ID NO: 16362 - RNA, 22 nt, Artificial Sequence
  Synthetic oligonucleotide: PDCD1-4195
acugguggccaaggaagccggu

SEQ ID NO: 16363 - RNA, 23 nt, Artificial Sequence
  Synthetic oligonucleotide: PDCD1-4196
cacugguggccaaggaagccggu

SEQ ID NO: 16364 - RNA, 24 nt, Artificial Sequence
  Synthetic oligonucleotide: PDCD1-4197
acacugguggccaaggaagccggu

SEQ ID NO: 16365 - RNA, 18 nt, Artificial Sequence
  Synthetic oligonucleotide: PDCD1-4198
gacaccaaccaccagggu

SEQ ID NO: 16366 - RNA, 19 nt, Artificial Sequence
  Synthetic oligonucleotide: PDCD1-4199
cgacaccaaccaccagggu

SEQ ID NO: 16367 - RNA, 20 nt, Artificial Sequence
  Synthetic oligonucleotide: PDCD1-823
acgacaccaaccaccagggu

SEQ ID NO: 16368 - RNA, 21 nt, Artificial Sequence
  Synthetic oligonucleotide: PDCD1-4200
cacgacaccaaccaccagggu

SEQ ID NO: 16369 - RNA, 22 nt, Artificial Sequence
  Synthetic oligonucleotide: PDCD1-4201
ccacgacaccaaccaccagggu

SEQ ID NO: 16370 - RNA, 23 nt, Artificial Sequence
  Synthetic oligonucleotide: PDCD1-4202
cccacgacaccaaccaccagggu

SEQ ID NO: 16371 - RNA, 24 nt, Artificial Sequence
  Synthetic oligonucleotide: PDCD1-4203
gcccacgacaccaaccaccagggu

SEQ ID NO: 16372 - RNA, 18 nt, Artificial Sequence
  Synthetic oligonucleotide: PDCD1-4204
ggcacaaaggucaggggu

SEQ ID NO: 16373 - RNA, 19 nt, Artificial Sequence
  Synthetic oligonucleotide: PDCD1-4205
gggcacaaaggucaggggu

SEQ ID NO: 16374 - RNA, 20 nt, Artificial Sequence
  Synthetic oligonucleotide: PDCD1-808
agggcacaaaggucaggggu

SEQ ID NO: 16375 - RNA, 21 nt, Artificial Sequence
  Synthetic oligonucleotide: PDCD1-4206
aagggcacaaaggucaggggu

SEQ ID NO: 16376 - RNA, 22 nt, Artificial Sequence
  Synthetic oligonucleotide: PDCD1-4207
gaagggcacaaaggucaggggu

SEQ ID NO: 16377 - RNA, 23 nt, Artificial Sequence
  Synthetic oligonucleotide: PDCD1-4208
ggaagggcacaaaggucaggggu

SEQ ID NO: 16378 - RNA, 24 nt, Artificial Sequence
  Synthetic oligonucleotide: PDCD1-4209
uggaagggcacaaaggucaggggu

SEQ ID NO: 16379 - RNA, 18 nt, Artificial Sequence
  Synthetic oligonucleotide: PDCD1-4210
uggccggcuggccugggu

SEQ ID NO: 16380 - RNA, 19 nt, Artificial Sequence
  Synthetic oligonucleotide: PDCD1-4211
cuggccggcuggccugggu

SEQ ID NO: 16381 - RNA, 20 nt, Artificial Sequence
  Synthetic oligonucleotide: PDCD1-819
acuggccggcuggccugggu

SEQ ID NO: 16382 - RNA, 21 nt, Artificial Sequence
  Synthetic oligonucleotide: PDCD1-4212
aacuggccggcuggccugggu

SEQ ID NO: 16383 - RNA, 22 nt, Artificial Sequence
  Synthetic oligonucleotide: PDCD1-4213
gaacuggccggcuggccugggu

SEQ ID NO: 16384 - RNA, 23 nt, Artificial Sequence
  Synthetic oligonucleotide: PDCD1-4214
ggaacuggccggcuggccugggu

SEQ ID NO: 16385 - RNA, 24 nt, Artificial Sequence
  Synthetic oligonucleotide: PDCD1-4215
uggaacuggccggcuggccugggu

SEQ ID NO: 16386 - RNA, 18 nt, Artificial Sequence
  Synthetic oligonucleotide: PDCD1-4216
acaccaaccaccaggguu

SEQ ID NO: 16387 - RNA, 19 nt, Artificial Sequence
  Synthetic oligonucleotide: PDCD1-4217
gacaccaaccaccaggguu

SEQ ID NO: 16388 - RNA, 20 nt, Artificial Sequence
  Synthetic oligonucleotide: PDCD1-378
cgacaccaaccaccaggguu

SEQ ID NO: 16389 - RNA, 21 nt, Artificial Sequence
  Synthetic oligonucleotide: PDCD1-4218
acgacaccaaccaccaggguu

SEQ ID NO: 16390 - RNA, 22 nt, Artificial Sequence
  Synthetic oligonucleotide: PDCD1-4219
cacgacaccaaccaccaggguu

SEQ ID NO: 16391 - RNA, 23 nt, Artificial Sequence
  Synthetic oligonucleotide: PDCD1-4220
ccacgacaccaaccaccaggguu

SEQ ID NO: 16392 - RNA, 24 nt, Artificial Sequence
  Synthetic oligonucleotide: PDCD1-4221
cccacgacaccaaccaccaggguu

SEQ ID NO: 16393 - RNA, 18 nt, Artificial Sequence
  Synthetic oligonucleotide: PDCD1-4222
gagggguccuccuucuuu

SEQ ID NO: 16394 - RNA, 19 nt, Artificial Sequence
  Synthetic oligonucleotide: PDCD1-4223
ugagggguccuccuucuuu

SEQ ID NO: 16395 - RNA, 20 nt, Artificial Sequence
  Synthetic oligonucleotide: PDCD1-844
cugagggguccuccuucuuu

SEQ ID NO: 16396 - RNA, 21 nt, Artificial Sequence
  Synthetic oligonucleotide: PDCD1-4224
gcugagggguccuccuucuuu

SEQ ID NO: 16397 - RNA, 22 nt, Artificial Sequence
  Synthetic oligonucleotide: PDCD1-4225
ggcugagggguccuccuucuuu

SEQ ID NO: 16398 - RNA, 23 nt, Artificial Sequence
  Synthetic oligonucleotide: PDCD1-4226
cggcugagggguccuccuucuuu

SEQ ID NO: 16399 - RNA, 24 nt, Artificial Sequence
  Synthetic oligonucleotide: PDCD1-4227
acggcugagggguccuccuucuuu

SEQ ID NO: 16400 - RNA, 18 nt, Artificial Sequence
  Synthetic oligonucleotide: PDCD1-4228
guuucucugcagggacaa

SEQ ID NO: 16401 - RNA, 19 nt, Artificial Sequence
  Synthetic oligonucleotide: PDCD1-4229
uguuucucugcagggacaa

SEQ ID NO: 16402 - RNA, 20 nt, Artificial Sequence
  Synthetic oligonucleotide: PDCD1-725
guguuucucugcagggacaa

SEQ ID NO: 16403 - RNA, 21 nt, Artificial Sequence
  Synthetic oligonucleotide: PDCD1-4230
uguguuucucugcagggacaa

SEQ ID NO: 16404 - RNA, 22 nt, Artificial Sequence
  Synthetic oligonucleotide: PDCD1-4231
guguguuucucugcagggacaa

SEQ ID NO: 16405 - RNA, 23 nt, Artificial Sequence
  Synthetic oligonucleotide: PDCD1-4232
aguguguuucucugcagggacaa

SEQ ID NO: 16406 - RNA, 24 nt, Artificial Sequence
  Synthetic oligonucleotide: PDCD1-4233
aaguguguuucucugcagggacaa

SEQ ID NO: 16407 - RNA, 18 nt, Artificial Sequence
  Synthetic oligonucleotide: PDCD1-4234
ccucggagugcccagcca

SEQ ID NO: 16408 - RNA, 19 nt, Artificial Sequence
  Synthetic oligonucleotide: PDCD1-4235
cccucggagugcccagcca

SEQ ID NO: 16409 - RNA, 20 nt, Artificial Sequence
  Synthetic oligonucleotide: PDCD1-753
gcccucggagugcccagcca

SEQ ID NO: 16410 - RNA, 21 nt, Artificial Sequence
  Synthetic oligonucleotide: PDCD1-4236
ggcccucggagugcccagcca

SEQ ID NO: 16411 - RNA, 22 nt, Artificial Sequence
  Synthetic oligonucleotide: PDCD1-4237
cggcccucggagugcccagcca

SEQ ID NO: 16412 - RNA, 23 nt, Artificial Sequence
  Synthetic oligonucleotide: PDCD1-4238
acggcccucggagugcccagcca

SEQ ID NO: 16413 - RNA, 24 nt, Artificial Sequence
  Synthetic oligonucleotide: PDCD1-4239
gacggcccucggagugcccagcca

SEQ ID NO: 16414 - RNA, 18 nt, Artificial Sequence
  Synthetic oligonucleotide: PDCD1-4240
gaccuuugugcccuucca

SEQ ID NO: 16415 - RNA, 19 nt, Artificial Sequence
  Synthetic oligonucleotide: PDCD1-4241
ugaccuuugugcccuucca

SEQ ID NO: 16416 - RNA, 20 nt, Artificial Sequence
  Synthetic oligonucleotide: PDCD1-714
cugaccuuugugcccuucca

SEQ ID NO: 16417 - RNA, 21 nt, Artificial Sequence
  Synthetic oligonucleotide: PDCD1-4242
ccugaccuuugugcccuucca

SEQ ID NO: 16418 - RNA, 22 nt, Artificial Sequence
  Synthetic oligonucleotide: PDCD1-4243
cccugaccuuugugcccuucca

SEQ ID NO: 16419 - RNA, 23 nt, Artificial Sequence
  Synthetic oligonucleotide: PDCD1-4244
ccccugaccuuugugcccuucca

SEQ ID NO: 16420 - RNA, 24 nt, Artificial Sequence
  Synthetic oligonucleotide: PDCD1-4245
accccugaccuuugugcccuucca

SEQ ID NO: 16421 - RNA, 18 nt, Artificial Sequence
  Synthetic oligonucleotide: PDCD1-4246
ccucucccuuucuccuca

SEQ ID NO: 16422 - RNA, 19 nt, Artificial Sequence
  Synthetic oligonucleotide: PDCD1-4247
cccucucccuuucuccuca

SEQ ID NO: 16423 - RNA, 20 nt, Artificial Sequence
  Synthetic oligonucleotide: PDCD1-728
ucccucucccuuucuccuca

SEQ ID NO: 16424 - RNA, 21 nt, Artificial Sequence
  Synthetic oligonucleotide: PDCD1-4248
cucccucucccuuucuccuca

SEQ ID NO: 16425 - RNA, 22 nt, Artificial Sequence
  Synthetic oligonucleotide: PDCD1-4249
acucccucucccuuucuccuca

SEQ ID NO: 16426 - RNA, 23 nt, Artificial Sequence
  Synthetic oligonucleotide: PDCD1-4250
gacucccucucccuuucuccuca

SEQ ID NO: 16427 - RNA, 24 nt, Artificial Sequence
  Synthetic oligonucleotide: PDCD1-4251
ugacucccucucccuuucuccuca

SEQ ID NO: 16428 - RNA, 18 nt, Artificial Sequence
  Synthetic oligonucleotide: PDCD1-4252
ucccuuucuccucaaaga

SEQ ID NO: 16429 - RNA, 19 nt, Artificial Sequence
  Synthetic oligonucleotide: PDCD1-4253
cucccuuucuccucaaaga

SEQ ID NO: 16430 - RNA, 20 nt, Artificial Sequence
  Synthetic oligonucleotide: PDCD1-281
ucucccuuucuccucaaaga

SEQ ID NO: 16431 - RNA, 21 nt, Artificial Sequence
  Synthetic oligonucleotide: PDCD1-4254
cucucccuuucuccucaaaga

SEQ ID NO: 16432 - RNA, 22 nt, Artificial Sequence
  Synthetic oligonucleotide: PDCD1-4255
ccucucccuuucuccucaaaga

SEQ ID NO: 16433 - RNA, 23 nt, Artificial Sequence
  Synthetic oligonucleotide: PDCD1-4256
cccucucccuuucuccucaaaga

SEQ ID NO: 16434 - RNA, 24 nt, Artificial Sequence
  Synthetic oligonucleotide: PDCD1-4257
ucccucucccuuucuccucaaaga

SEQ ID NO: 16435 - RNA, 18 nt, Artificial Sequence
  Synthetic oligonucleotide: PDCD1-4258
ccuuugugcccuuccaga

SEQ ID NO: 16436 - RNA, 19 nt, Artificial Sequence
  Synthetic oligonucleotide: PDCD1-4259
accuuugugcccuuccaga

SEQ ID NO: 16437 - RNA, 20 nt, Artificial Sequence
  Synthetic oligonucleotide: PDCD1-715
gaccuuugugcccuuccaga

SEQ ID NO: 16438 - RNA, 21 nt, Artificial Sequence
  Synthetic oligonucleotide: PDCD1-4260
ugaccuuugugcccuuccaga

SEQ ID NO: 16439 - RNA, 22 nt, Artificial Sequence
  Synthetic oligonucleotide: PDCD1-4261
cugaccuuugugcccuuccaga

SEQ ID NO: 16440 - RNA, 23 nt, Artificial Sequence
  Synthetic oligonucleotide: PDCD1-4262
ccugaccuuugugcccuuccaga

SEQ ID NO: 16441 - RNA, 24 nt, Artificial Sequence
  Synthetic oligonucleotide: PDCD1-4263
cccugaccuuugugcccuuccaga

SEQ ID NO: 16442 - RNA, 18 nt, Artificial Sequence
  Synthetic oligonucleotide: PDCD1-4264
cuggauuuccaguggcga

SEQ ID NO: 16443 - RNA, 19 nt, Artificial Sequence
  Synthetic oligonucleotide: PDCD1-4265
gcuggauuuccaguggcga

SEQ ID NO: 16444 - RNA, 20 nt, Artificial Sequence
  Synthetic oligonucleotide: PDCD1-740
agcuggauuuccaguggcga

SEQ ID NO: 16445 - RNA, 21 nt, Artificial Sequence
  Synthetic oligonucleotide: PDCD1-4266
gagcuggauuuccaguggcga

SEQ ID NO: 16446 - RNA, 22 nt, Artificial Sequence
  Synthetic oligonucleotide: PDCD1-4267
ggagcuggauuuccaguggcga

SEQ ID NO: 16447 - RNA, 23 nt, Artificial Sequence
  Synthetic oligonucleotide: PDCD1-4268
gggagcuggauuuccaguggcga

SEQ ID NO: 16448 - RNA, 24 nt, Artificial Sequence
  Synthetic oligonucleotide: PDCD1-4269
ggggagcuggauuuccaguggcga

SEQ ID NO: 16449 - RNA, 18 nt, Artificial Sequence
  Synthetic oligonucleotide: PDCD1-4270
auugucuuuccuagcgga

SEQ ID NO: 16450 - RNA, 19 nt, Artificial Sequence
  Synthetic oligonucleotide: PDCD1-4271
cauugucuuuccuagcgga

SEQ ID NO: 16451 - RNA, 20 nt, Artificial Sequence
  Synthetic oligonucleotide: PDCD1-748
ccauugucuuuccuagcgga

SEQ ID NO: 16452 - RNA, 21 nt, Artificial Sequence
  Synthetic oligonucleotide: PDCD1-4272
accauugucuuuccuagcgga

SEQ ID NO: 16453 - RNA, 22 nt, Artificial Sequence
  Synthetic oligonucleotide: PDCD1-4273
caccauugucuuuccuagcgga

SEQ ID NO: 16454 - RNA, 23 nt, Artificial Sequence
  Synthetic oligonucleotide: PDCD1-4274
ccaccauugucuuuccuagcgga

SEQ ID NO: 16455 - RNA, 24 nt, Artificial Sequence
  Synthetic oligonucleotide: PDCD1-4275
gccaccauugucuuuccuagcgga

SEQ ID NO: 16456 - RNA, 18 nt, Artificial Sequence
  Synthetic oligonucleotide: PDCD1-4276
uguguucucuguggacua

SEQ ID NO: 16457 - RNA, 19 nt, Artificial Sequence
  Synthetic oligonucleotide: PDCD1-4277
cuguguucucuguggacua

SEQ ID NO: 16458 - RNA, 20 nt, Artificial Sequence
  Synthetic oligonucleotide: PDCD1-284
ccuguguucucuguggacua

SEQ ID NO: 16459 - RNA, 21 nt, Artificial Sequence
  Synthetic oligonucleotide: PDCD1-4278
gccuguguucucuguggacua

SEQ ID NO: 16460 - RNA, 22 nt, Artificial Sequence
  Synthetic oligonucleotide: PDCD1-4279
ugccuguguucucuguggacua

SEQ ID NO: 16461 - RNA, 23 nt, Artificial Sequence
  Synthetic oligonucleotide: PDCD1-4280
gugccuguguucucuguggacua

SEQ ID NO: 16462 - RNA, 24 nt, Artificial Sequence
  Synthetic oligonucleotide: PDCD1-4281
cgugccuguguucucuguggacua

SEQ ID NO: 16463 - RNA, 18 nt, Artificial Sequence
  Synthetic oligonucleotide: PDCD1-4282
ccaccauugucuuuccua

SEQ ID NO: 16464 - RNA, 19 nt, Artificial Sequence
  Synthetic oligonucleotide: PDCD1-4283
gccaccauugucuuuccua

SEQ ID NO: 16465 - RNA, 20 nt, Artificial Sequence
  Synthetic oligonucleotide: PDCD1-746
ugccaccauugucuuuccua

SEQ ID NO: 16466 - RNA, 21 nt, Artificial Sequence
  Synthetic oligonucleotide: PDCD1-4284
augccaccauugucuuuccua

SEQ ID NO: 16467 - RNA, 22 nt, Artificial Sequence
  Synthetic oligonucleotide: PDCD1-4285
uaugccaccauugucuuuccua

SEQ ID NO: 16468 - RNA, 23 nt, Artificial Sequence
  Synthetic oligonucleotide: PDCD1-4286
guaugccaccauugucuuuccua

SEQ ID NO: 16469 - RNA, 24 nt, Artificial Sequence
  Synthetic oligonucleotide: PDCD1-4287
aguaugccaccauugucuuuccua

SEQ ID NO: 16470 - RNA, 18 nt, Artificial Sequence
  Synthetic oligonucleotide: PDCD1-4288
caguggcgagagaagacc

SEQ ID NO: 16471 - RNA, 19 nt, Artificial Sequence
  Synthetic oligonucleotide: PDCD1-4289
ccaguggcgagagaagacc

SEQ ID NO: 16472 - RNA, 20 nt, Artificial Sequence
  Synthetic oligonucleotide: PDCD1-741
uccaguggcgagagaagacc

SEQ ID NO: 16473 - RNA, 21 nt, Artificial Sequence
  Synthetic oligonucleotide: PDCD1-4290
uuccaguggcgagagaagacc

SEQ ID NO: 16474 - RNA, 22 nt, Artificial Sequence
  Synthetic oligonucleotide: PDCD1-4291
uuuccaguggcgagagaagacc

SEQ ID NO: 16475 - RNA, 23 nt, Artificial Sequence
  Synthetic oligonucleotide: PDCD1-4292
auuuccaguggcgagagaagacc

SEQ ID NO: 16476 - RNA, 24 nt, Artificial Sequence
  Synthetic oligonucleotide: PDCD1-4293
gauuuccaguggcgagagaagacc

SEQ ID NO: 16477 - RNA, 18 nt, Artificial Sequence
  Synthetic oligonucleotide: PDCD1-4294
aguggcgagagaagaccc

SEQ ID NO: 16478 - RNA, 19 nt, Artificial Sequence
  Synthetic oligonucleotide: PDCD1-4295
caguggcgagagaagaccc

SEQ ID NO: 16479 - RNA, 20 nt, Artificial Sequence
  Synthetic oligonucleotide: PDCD1-289
ccaguggcgagagaagaccc

SEQ ID NO: 16480 - RNA, 21 nt, Artificial Sequence
  Synthetic oligonucleotide: PDCD1-4296
uccaguggcgagagaagaccc

SEQ ID NO: 16481 - RNA, 22 nt, Artificial Sequence
  Synthetic oligonucleotide: PDCD1-4297
uuccaguggcgagagaagaccc

SEQ ID NO: 16482 - RNA, 23 nt, Artificial Sequence
  Synthetic oligonucleotide: PDCD1-4298
uuuccaguggcgagagaagaccc

SEQ ID NO: 16483 - RNA, 24 nt, Artificial Sequence
  Synthetic oligonucleotide: PDCD1-4299
auuuccaguggcgagagaagaccc

SEQ ID NO: 16484 - RNA, 18 nt, Artificial Sequence
  Synthetic oligonucleotide: PDCD1-4300
gggcucagcugacggccc

SEQ ID NO: 16485 - RNA, 19 nt, Artificial Sequence
  Synthetic oligonucleotide: PDCD1-4301
ggggcucagcugacggccc

SEQ ID NO: 16486 - RNA, 20 nt, Artificial Sequence
  Synthetic oligonucleotide: PDCD1-751
aggggcucagcugacggccc

SEQ ID NO: 16487 - RNA, 21 nt, Artificial Sequence
  Synthetic oligonucleotide: PDCD1-4302
caggggcucagcugacggccc

SEQ ID NO: 16488 - RNA, 22 nt, Artificial Sequence
  Synthetic oligonucleotide: PDCD1-4303
gcaggggcucagcugacggccc

SEQ ID NO: 16489 - RNA, 23 nt, Artificial Sequence
  Synthetic oligonucleotide: PDCD1-4304
cgcaggggcucagcugacggccc

SEQ ID NO: 16490 - RNA, 24 nt, Artificial Sequence
  Synthetic oligonucleotide: PDCD1-4305
ccgcaggggcucagcugacggccc

SEQ ID NO: 16491 - RNA, 18 nt, Artificial Sequence
  Synthetic oligonucleotide: PDCD1-4306
cccccgugcccugugucc

SEQ ID NO: 16492 - RNA, 19 nt, Artificial Sequence
  Synthetic oligonucleotide: PDCD1-4307
ccccccgugcccugugucc

SEQ ID NO: 16493 - RNA, 20 nt, Artificial Sequence
  Synthetic oligonucleotide: PDCD1-743
gccccccgugcccugugucc

SEQ ID NO: 16494 - RNA, 21 nt, Artificial Sequence
  Synthetic oligonucleotide: PDCD1-4308
agccccccgugcccugugucc

SEQ ID NO: 16495 - RNA, 22 nt, Artificial Sequence
  Synthetic oligonucleotide: PDCD1-4309
gagccccccgugcccugugucc

SEQ ID NO: 16496 - RNA, 23 nt, Artificial Sequence
  Synthetic oligonucleotide: PDCD1-4310
ggagccccccgugcccugugucc

SEQ ID NO: 16497 - RNA, 24 nt, Artificial Sequence
  Synthetic oligonucleotide: PDCD1-4311
cggagccccccgugcccugugucc

SEQ ID NO: 16498 - RNA, 18 nt, Artificial Sequence
  Synthetic oligonucleotide: PDCD1-4312
accucaucccccgcccgc

SEQ ID NO: 16499 - RNA, 19 nt, Artificial Sequence
  Synthetic oligonucleotide: PDCD1-4313
caccucaucccccgcccgc

SEQ ID NO: 16500 - RNA, 20 nt, Artificial Sequence
  Synthetic oligonucleotide: PDCD1-294
gcaccucaucccccgcccgc

SEQ ID NO: 16501 - RNA, 21 nt, Artificial Sequence
  Synthetic oligonucleotide: PDCD1-4314
ggcaccucaucccccgcccgc

SEQ ID NO: 16502 - RNA, 22 nt, Artificial Sequence
  Synthetic oligonucleotide: PDCD1-4315
gggcaccucaucccccgcccgc

SEQ ID NO: 16503 - RNA, 23 nt, Artificial Sequence
  Synthetic oligonucleotide: PDCD1-4316
ugggcaccucaucccccgcccgc

SEQ ID NO: 16504 - RNA, 24 nt, Artificial Sequence
  Synthetic oligonucleotide: PDCD1-4317
augggcaccucaucccccgcccgc

SEQ ID NO: 16505 - RNA, 18 nt, Artificial Sequence
  Synthetic oligonucleotide: PDCD1-4318
caucugcucccgggccgc

SEQ ID NO: 16506 - RNA, 19 nt, Artificial Sequence
  Synthetic oligonucleotide: PDCD1-4319
ucaucugcucccgggccgc

SEQ ID NO: 16507 - RNA, 20 nt, Artificial Sequence
  Synthetic oligonucleotide: PDCD1-722
gucaucugcucccgggccgc

SEQ ID NO: 16508 - RNA, 21 nt, Artificial Sequence
  Synthetic oligonucleotide: PDCD1-4320
cgucaucugcucccgggccgc

SEQ ID NO: 16509 - RNA, 22 nt, Artificial Sequence
  Synthetic oligonucleotide: PDCD1-4321
ccgucaucugcucccgggccgc

SEQ ID NO: 16510 - RNA, 23 nt, Artificial Sequence
  Synthetic oligonucleotide: PDCD1-4322
gccgucaucugcucccgggccgc

SEQ ID NO: 16511 - RNA, 24 nt, Artificial Sequence
  Synthetic oligonucleotide: PDCD1-4323
ggccgucaucugcucccgggccgc

SEQ ID NO: 16512 - RNA, 18 nt, Artificial Sequence
  Synthetic oligonucleotide: PDCD1-4324
gugcccagccacugaggc

SEQ ID NO: 16513 - RNA, 19 nt, Artificial Sequence
  Synthetic oligonucleotide: PDCD1-4325
agugcccagccacugaggc

SEQ ID NO: 16514 - RNA, 20 nt, Artificial Sequence
  Synthetic oligonucleotide: PDCD1-754
gagugcccagccacugaggc

SEQ ID NO: 16515 - RNA, 21 nt, Artificial Sequence
  Synthetic oligonucleotide: PDCD1-4326
ggagugcccagccacugaggc

SEQ ID NO: 16516 - RNA, 22 nt, Artificial Sequence
  Synthetic oligonucleotide: PDCD1-4327
cggagugcccagccacugaggc

SEQ ID NO: 16517 - RNA, 23 nt, Artificial Sequence
  Synthetic oligonucleotide: PDCD1-4328
ucggagugcccagccacugaggc

SEQ ID NO: 16518 - RNA, 24 nt, Artificial Sequence
  Synthetic oligonucleotide: PDCD1-4329
cucggagugcccagccacugaggc

SEQ ID NO: 16519 - RNA, 18 nt, Artificial Sequence
  Synthetic oligonucleotide: PDCD1-4330
agcuggauuuccaguggc

SEQ ID NO: 16520 - RNA, 19 nt, Artificial Sequence
  Synthetic oligonucleotide: PDCD1-4331
gagcuggauuuccaguggc

SEQ ID NO: 16521 - RNA, 20 nt, Artificial Sequence
  Synthetic oligonucleotide: PDCD1-739
ggagcuggauuuccaguggc

SEQ ID NO: 16522 - RNA, 21 nt, Artificial Sequence
  Synthetic oligonucleotide: PDCD1-4332
gggagcuggauuuccaguggc

SEQ ID NO: 16523 - RNA, 22 nt, Artificial Sequence
  Synthetic oligonucleotide: PDCD1-4333
ggggagcuggauuuccaguggc

SEQ ID NO: 16524 - RNA, 23 nt, Artificial Sequence
  Synthetic oligonucleotide: PDCD1-4334
uggggagcuggauuuccaguggc

SEQ ID NO: 16525 - RNA, 24 nt, Artificial Sequence
  Synthetic oligonucleotide: PDCD1-4335
auggggagcuggauuuccaguggc

SEQ ID NO: 16526 - RNA, 18 nt, Artificial Sequence
  Synthetic oligonucleotide: PDCD1-4336
ccaaguguguuucucugc

SEQ ID NO: 16527 - RNA, 19 nt, Artificial Sequence
  Synthetic oligonucleotide: PDCD1-4337
cccaaguguguuucucugc

SEQ ID NO: 16528 - RNA, 20 nt, Artificial Sequence
  Synthetic oligonucleotide: PDCD1-275
ccccaaguguguuucucugc

SEQ ID NO: 16529 - RNA, 21 nt, Artificial Sequence
  Synthetic oligonucleotide: PDCD1-4338
accccaaguguguuucucugc

SEQ ID NO: 16530 - RNA, 22 nt, Artificial Sequence
  Synthetic oligonucleotide: PDCD1-4339
gaccccaaguguguuucucugc

SEQ ID NO: 16531 - RNA, 23 nt, Artificial Sequence
  Synthetic oligonucleotide: PDCD1-4340
ugaccccaaguguguuucucugc

SEQ ID NO: 16532 - RNA, 24 nt, Artificial Sequence
  Synthetic oligonucleotide: PDCD1-4341
gugaccccaaguguguuucucugc

SEQ ID NO: 16533 - RNA, 18 nt, Artificial Sequence
  Synthetic oligonucleotide: PDCD1-4342
ccuggccgucaucugcuc

SEQ ID NO: 16534 - RNA, 19 nt, Artificial Sequence
  Synthetic oligonucleotide: PDCD1-4343
uccuggccgucaucugcuc

SEQ ID NO: 16535 - RNA, 20 nt, Artificial Sequence
  Synthetic oligonucleotide: PDCD1-721
guccuggccgucaucugcuc

SEQ ID NO: 16536 - RNA, 21 nt, Artificial Sequence
  Synthetic oligonucleotide: PDCD1-4344
gguccuggccgucaucugcuc

SEQ ID NO: 16537 - RNA, 22 nt, Artificial Sequence
  Synthetic oligonucleotide: PDCD1-4345
ggguccuggccgucaucugcuc

SEQ ID NO: 16538 - RNA, 23 nt, Artificial Sequence
  Synthetic oligonucleotide: PDCD1-4346
uggguccuggccgucaucugcuc

SEQ ID NO: 16539 - RNA, 24 nt, Artificial Sequence
  Synthetic oligonucleotide: PDCD1-4347
cuggguccuggccgucaucugcuc

SEQ ID NO: 16540 - RNA, 18 nt, Artificial Sequence
  Synthetic oligonucleotide: PDCD1-4348
acccuggugguugguguc

SEQ ID NO: 16541 - RNA, 19 nt, Artificial Sequence
  Synthetic oligonucleotide: PDCD1-4349
aacccuggugguugguguc

SEQ ID NO: 16542 - RNA, 20 nt, Artificial Sequence
  Synthetic oligonucleotide: PDCD1-718
aaacccuggugguugguguc

SEQ ID NO: 16543 - RNA, 21 nt, Artificial Sequence
  Synthetic oligonucleotide: PDCD1-4350
caaacccuggugguugguguc

SEQ ID NO: 16544 - RNA, 22 nt, Artificial Sequence
  Synthetic oligonucleotide: PDCD1-4351
ccaaacccuggugguugguguc

SEQ ID NO: 16545 - RNA, 23 nt, Artificial Sequence
  Synthetic oligonucleotide: PDCD1-4352
uccaaacccuggugguugguguc

SEQ ID NO: 16546 - RNA, 24 nt, Artificial Sequence
  Synthetic oligonucleotide: PDCD1-4353
uuccaaacccuggugguugguguc

SEQ ID NO: 16547 - RNA, 18 nt, Artificial Sequence
  Synthetic oligonucleotide: PDCD1-4354
cugaccuuugugcccuuc

SEQ ID NO: 16548 - RNA, 19 nt, Artificial Sequence
  Synthetic oligonucleotide: PDCD1-4355
ccugaccuuugugcccuuc

SEQ ID NO: 16549 - RNA, 20 nt, Artificial Sequence
  Synthetic oligonucleotide: PDCD1-713
cccugaccuuugugcccuuc

SEQ ID NO: 16550 - RNA, 21 nt, Artificial Sequence
  Synthetic oligonucleotide: PDCD1-4356
ccccugaccuuugugcccuuc

SEQ ID NO: 16551 - RNA, 22 nt, Artificial Sequence
  Synthetic oligonucleotide: PDCD1-4357
accccugaccuuugugcccuuc

SEQ ID NO: 16552 - RNA, 23 nt, Artificial Sequence
  Synthetic oligonucleotide: PDCD1-4358
aaccccugaccuuugugcccuuc

SEQ ID NO: 16553 - RNA, 24 nt, Artificial Sequence
  Synthetic oligonucleotide: PDCD1-4359
uaaccccugaccuuugugcccuuc

SEQ ID NO: 16554 - RNA, 18 nt, Artificial Sequence
  Synthetic oligonucleotide: PDCD1-4360
cucccuuucuccucaaag

SEQ ID NO: 16555 - RNA, 19 nt, Artificial Sequence
  Synthetic oligonucleotide: PDCD1-4361
ucucccuuucuccucaaag

SEQ ID NO: 16556 - RNA, 20 nt, Artificial Sequence
  Synthetic oligonucleotide: PDCD1-729
cucucccuuucuccucaaag

SEQ ID NO: 16557 - RNA, 21 nt, Artificial Sequence
  Synthetic oligonucleotide: PDCD1-4362
ccucucccuuucuccucaaag

SEQ ID NO: 16558 - RNA, 22 nt, Artificial Sequence
  Synthetic oligonucleotide: PDCD1-4363
cccucucccuuucuccucaaag

SEQ ID NO: 16559 - RNA, 23 nt, Artificial Sequence
  Synthetic oligonucleotide: PDCD1-4364
ucccucucccuuucuccucaaag

SEQ ID NO: 16560 - RNA, 24 nt, Artificial Sequence
  Synthetic oligonucleotide: PDCD1-4365
cucccucucccuuucuccucaaag

SEQ ID NO: 16561 - RNA, 18 nt, Artificial Sequence
  Synthetic oligonucleotide: PDCD1-4366
ccuuucuccucaaagaag

SEQ ID NO: 16562 - RNA, 19 nt, Artificial Sequence
  Synthetic oligonucleotide: PDCD1-4367
cccuuucuccucaaagaag

SEQ ID NO: 16563 - RNA, 20 nt, Artificial Sequence
  Synthetic oligonucleotide: PDCD1-731
ucccuuucuccucaaagaag

SEQ ID NO: 16564 - RNA, 21 nt, Artificial Sequence
  Synthetic oligonucleotide: PDCD1-4368
cucccuuucuccucaaagaag

SEQ ID NO: 16565 - RNA, 22 nt, Artificial Sequence
  Synthetic oligonucleotide: PDCD1-4369
ucucccuuucuccucaaagaag

SEQ ID NO: 16566 - RNA, 23 nt, Artificial Sequence
  Synthetic oligonucleotide: PDCD1-4370
cucucccuuucuccucaaagaag

SEQ ID NO: 16567 - RNA, 24 nt, Artificial Sequence
  Synthetic oligonucleotide: PDCD1-4371
ccucucccuuucuccucaaagaag

SEQ ID NO: 16568 - RNA, 18 nt, Artificial Sequence
  Synthetic oligonucleotide: PDCD1-4372
cccugugucccugagcag

SEQ ID NO: 16569 - RNA, 19 nt, Artificial Sequence
  Synthetic oligonucleotide: PDCD1-4373
gcccugugucccugagcag

SEQ ID NO: 16570 - RNA, 20 nt, Artificial Sequence
  Synthetic oligonucleotide: PDCD1-744
ugcccugugucccugagcag

SEQ ID NO: 16571 - RNA, 21 nt, Artificial Sequence
  Synthetic oligonucleotide: PDCD1-4374
gugcccugugucccugagcag

SEQ ID NO: 16572 - RNA, 22 nt, Artificial Sequence
  Synthetic oligonucleotide: PDCD1-4375
cgugcccugugucccugagcag

SEQ ID NO: 16573 - RNA, 23 nt, Artificial Sequence
  Synthetic oligonucleotide: PDCD1-4376
ccgugcccugugucccugagcag

SEQ ID NO: 16574 - RNA, 24 nt, Artificial Sequence
  Synthetic oligonucleotide: PDCD1-4377
cccgugcccugugucccugagcag

SEQ ID NO: 16575 - RNA, 18 nt, Artificial Sequence
  Synthetic oligonucleotide: PDCD1-4378
uugugcccuuccagagag

SEQ ID NO: 16576 - RNA, 19 nt, Artificial Sequence
  Synthetic oligonucleotide: PDCD1-4379
uuugugcccuuccagagag

SEQ ID NO: 16577 - RNA, 20 nt, Artificial Sequence
  Synthetic oligonucleotide: PDCD1-716
cuuugugcccuuccagagag

SEQ ID NO: 16578 - RNA, 21 nt, Artificial Sequence
  Synthetic oligonucleotide: PDCD1-4380
ccuuugugcccuuccagagag

SEQ ID NO: 16579 - RNA, 22 nt, Artificial Sequence
  Synthetic oligonucleotide: PDCD1-4381
accuuugugcccuuccagagag

SEQ ID NO: 16580 - RNA, 23 nt, Artificial Sequence
  Synthetic oligonucleotide: PDCD1-4382
gaccuuugugcccuuccagagag

SEQ ID NO: 16581 - RNA, 24 nt, Artificial Sequence
  Synthetic oligonucleotide: PDCD1-4383
ugaccuuugugcccuuccagagag

SEQ ID NO: 16582 - RNA, 18 nt, Artificial Sequence
  Synthetic oligonucleotide: PDCD1-4384
caccucaucccccgcccg

SEQ ID NO: 16583 - RNA, 19 nt, Artificial Sequence
  Synthetic oligonucleotide: PDCD1-4385
gcaccucaucccccgcccg

SEQ ID NO: 16584 - RNA, 20 nt, Artificial Sequence
  Synthetic oligonucleotide: PDCD1-749
ggcaccucaucccccgcccg

SEQ ID NO: 16585 - RNA, 21 nt, Artificial Sequence
  Synthetic oligonucleotide: PDCD1-4386
gggcaccucaucccccgcccg

SEQ ID NO: 16586 - RNA, 22 nt, Artificial Sequence
  Synthetic oligonucleotide: PDCD1-4387
ugggcaccucaucccccgcccg

SEQ ID NO: 16587 - RNA, 23 nt, Artificial Sequence
  Synthetic oligonucleotide: PDCD1-4388
augggcaccucaucccccgcccg

SEQ ID NO: 16588 - RNA, 24 nt, Artificial Sequence
  Synthetic oligonucleotide: PDCD1-4389
aaugggcaccucaucccccgcccg

SEQ ID NO: 16589 - RNA, 18 nt, Artificial Sequence
  Synthetic oligonucleotide: PDCD1-4390
agccacugaggccugagg

SEQ ID NO: 16590 - RNA, 19 nt, Artificial Sequence
  Synthetic oligonucleotide: PDCD1-4391
cagccacugaggccugagg

SEQ ID NO: 16591 - RNA, 20 nt, Artificial Sequence
  Synthetic oligonucleotide: PDCD1-756
ccagccacugaggccugagg

SEQ ID NO: 16592 - RNA, 21 nt, Artificial Sequence
  Synthetic oligonucleotide: PDCD1-4392
cccagccacugaggccugagg

SEQ ID NO: 16593 - RNA, 22 nt, Artificial Sequence
  Synthetic oligonucleotide: PDCD1-4393
gcccagccacugaggccugagg

SEQ ID NO: 16594 - RNA, 23 nt, Artificial Sequence
  Synthetic oligonucleotide: PDCD1-4394
ugcccagccacugaggccugagg

SEQ ID NO: 16595 - RNA, 24 nt, Artificial Sequence
  Synthetic oligonucleotide: PDCD1-4395
gugcccagccacugaggccugagg

SEQ ID NO: 16596 - RNA, 18 nt, Artificial Sequence
  Synthetic oligonucleotide: PDCD1-4396
cccuuccagagagaaggg

SEQ ID NO: 16597 - RNA, 19 nt, Artificial Sequence
  Synthetic oligonucleotide: PDCD1-4397
gcccuuccagagagaaggg

SEQ ID NO: 16598 - RNA, 20 nt, Artificial Sequence
  Synthetic oligonucleotide: PDCD1-717
ugcccuuccagagagaaggg

SEQ ID NO: 16599 - RNA, 21 nt, Artificial Sequence
  Synthetic oligonucleotide: PDCD1-4398
gugcccuuccagagagaaggg

SEQ ID NO: 16600 - RNA, 22 nt, Artificial Sequence
  Synthetic oligonucleotide: PDCD1-4399
ugugcccuuccagagagaaggg

SEQ ID NO: 16601 - RNA, 23 nt, Artificial Sequence
  Synthetic oligonucleotide: PDCD1-4400
uugugcccuuccagagagaaggg

SEQ ID NO: 16602 - RNA, 24 nt, Artificial Sequence
  Synthetic oligonucleotide: PDCD1-4401
uuugugcccuuccagagagaaggg

SEQ ID NO: 16603 - RNA, 18 nt, Artificial Sequence
  Synthetic oligonucleotide: PDCD1-4402
uguucucuguggacuaug

SEQ ID NO: 16604 - RNA, 19 nt, Artificial Sequence
  Synthetic oligonucleotide: PDCD1-4403
guguucucuguggacuaug

SEQ ID NO: 16605 - RNA, 20 nt, Artificial Sequence
  Synthetic oligonucleotide: PDCD1-286
uguguucucuguggacuaug

SEQ ID NO: 16606 - RNA, 21 nt, Artificial Sequence
  Synthetic oligonucleotide: PDCD1-4404
cuguguucucuguggacuaug

SEQ ID NO: 16607 - RNA, 22 nt, Artificial Sequence
  Synthetic oligonucleotide: PDCD1-4405
ccuguguucucuguggacuaug

SEQ ID NO: 16608 - RNA, 23 nt, Artificial Sequence
  Synthetic oligonucleotide: PDCD1-4406
gccuguguucucuguggacuaug

SEQ ID NO: 16609 - RNA, 24 nt, Artificial Sequence
  Synthetic oligonucleotide: PDCD1-4407
ugccuguguucucuguggacuaug

SEQ ID NO: 16610 - RNA, 18 nt, Artificial Sequence
  Synthetic oligonucleotide: PDCD1-4408
ggugucgugggcggccug

SEQ ID NO: 16611 - RNA, 19 nt, Artificial Sequence
  Synthetic oligonucleotide: PDCD1-4409
uggugucgugggcggccug

SEQ ID NO: 16612 - RNA, 20 nt, Artificial Sequence
  Synthetic oligonucleotide: PDCD1-719
uuggugucgugggcggccug

SEQ ID NO: 16613 - RNA, 21 nt, Artificial Sequence
  Synthetic oligonucleotide: PDCD1-4410
guuggugucgugggcggccug

SEQ ID NO: 16614 - RNA, 22 nt, Artificial Sequence
  Synthetic oligonucleotide: PDCD1-4411
gguuggugucgugggcggccug

SEQ ID NO: 16615 - RNA, 23 nt, Artificial Sequence
  Synthetic oligonucleotide: PDCD1-4412
ugguuggugucgugggcggccug

SEQ ID NO: 16616 - RNA, 24 nt, Artificial Sequence
  Synthetic oligonucleotide: PDCD1-4413
gugguuggugucgugggcggccug

SEQ ID NO: 16617 - RNA, 18 nt, Artificial Sequence
  Synthetic oligonucleotide: PDCD1-4414
cccaaguguguuucucug

SEQ ID NO: 16618 - RNA, 19 nt, Artificial Sequence
  Synthetic oligonucleotide: PDCD1-4415
ccccaaguguguuucucug

SEQ ID NO: 16619 - RNA, 20 nt, Artificial Sequence
  Synthetic oligonucleotide: PDCD1-723
accccaaguguguuucucug

SEQ ID NO: 16620 - RNA, 21 nt, Artificial Sequence
  Synthetic oligonucleotide: PDCD1-4416
gaccccaaguguguuucucug

SEQ ID NO: 16621 - RNA, 22 nt, Artificial Sequence
  Synthetic oligonucleotide: PDCD1-4417
ugaccccaaguguguuucucug

SEQ ID NO: 16622 - RNA, 23 nt, Artificial Sequence
  Synthetic oligonucleotide: PDCD1-4418
gugaccccaaguguguuucucug

SEQ ID NO: 16623 - RNA, 24 nt, Artificial Sequence
  Synthetic oligonucleotide: PDCD1-4419
ggugaccccaaguguguuucucug

SEQ ID NO: 16624 - RNA, 18 nt, Artificial Sequence
  Synthetic oligonucleotide: PDCD1-4420
ggagcuggauuuccagug

SEQ ID NO: 16625 - RNA, 19 nt, Artificial Sequence
  Synthetic oligonucleotide: PDCD1-4421
gggagcuggauuuccagug

SEQ ID NO: 16626 - RNA, 20 nt, Artificial Sequence
  Synthetic oligonucleotide: PDCD1-738
ggggagcuggauuuccagug

SEQ ID NO: 16627 - RNA, 21 nt, Artificial Sequence
  Synthetic oligonucleotide: PDCD1-4422
uggggagcuggauuuccagug

SEQ ID NO: 16628 - RNA, 22 nt, Artificial Sequence
  Synthetic oligonucleotide: PDCD1-4423
auggggagcuggauuuccagug

SEQ ID NO: 16629 - RNA, 23 nt, Artificial Sequence
  Synthetic oligonucleotide: PDCD1-4424
uauggggagcuggauuuccagug

SEQ ID NO: 16630 - RNA, 24 nt, Artificial Sequence
  Synthetic oligonucleotide: PDCD1-4425
cuauggggagcuggauuuccagug

SEQ ID NO: 16631 - RNA, 18 nt, Artificial Sequence
  Synthetic oligonucleotide: PDCD1-4426
uuucucugcagggacaau

SEQ ID NO: 16632 - RNA, 19 nt, Artificial Sequence
  Synthetic oligonucleotide: PDCD1-4427
guuucucugcagggacaau

SEQ ID NO: 16633 - RNA, 20 nt, Artificial Sequence
  Synthetic oligonucleotide: PDCD1-277
uguuucucugcagggacaau

SEQ ID NO: 16634 - RNA, 21 nt, Artificial Sequence
  Synthetic oligonucleotide: PDCD1-4428
guguuucucugcagggacaau

SEQ ID NO: 16635 - RNA, 22 nt, Artificial Sequence
  Synthetic oligonucleotide: PDCD1-4429
uguguuucucugcagggacaau

SEQ ID NO: 16636 - RNA, 23 nt, Artificial Sequence
  Synthetic oligonucleotide: PDCD1-4430
guguguuucucugcagggacaau

SEQ ID NO: 16637 - RNA, 24 nt, Artificial Sequence
  Synthetic oligonucleotide: PDCD1-4431
aguguguuucucugcagggacaau

SEQ ID NO: 16638 - RNA, 18 nt, Artificial Sequence
  Synthetic oligonucleotide: PDCD1-4432
guguucucuguggacuau

SEQ ID NO: 16639 - RNA, 19 nt, Artificial Sequence
  Synthetic oligonucleotide: PDCD1-4433
uguguucucuguggacuau

SEQ ID NO: 16640 - RNA, 20 nt, Artificial Sequence
  Synthetic oligonucleotide: PDCD1-285
cuguguucucuguggacuau

SEQ ID NO: 16641 - RNA, 21 nt, Artificial Sequence
  Synthetic oligonucleotide: PDCD1-4434
ccuguguucucuguggacuau

SEQ ID NO: 16642 - RNA, 22 nt, Artificial Sequence
  Synthetic oligonucleotide: PDCD1-4435
gccuguguucucuguggacuau

SEQ ID NO: 16643 - RNA, 23 nt, Artificial Sequence
  Synthetic oligonucleotide: PDCD1-4436
ugccuguguucucuguggacuau

SEQ ID NO: 16644 - RNA, 24 nt, Artificial Sequence
  Synthetic oligonucleotide: PDCD1-4437
gugccuguguucucuguggacuau

SEQ ID NO: 16645 - RNA, 18 nt, Artificial Sequence
  Synthetic oligonucleotide: PDCD1-4438
cuguguucucuguggacu

SEQ ID NO: 16646 - RNA, 19 nt, Artificial Sequence
  Synthetic oligonucleotide: PDCD1-4439
ccuguguucucuguggacu

SEQ ID NO: 16647 - RNA, 20 nt, Artificial Sequence
  Synthetic oligonucleotide: PDCD1-733
gccuguguucucuguggacu

SEQ ID NO: 16648 - RNA, 21 nt, Artificial Sequence
  Synthetic oligonucleotide: PDCD1-4440
ugccuguguucucuguggacu

SEQ ID NO: 16649 - RNA, 22 nt, Artificial Sequence
  Synthetic oligonucleotide: PDCD1-4441
gugccuguguucucuguggacu

SEQ ID NO: 16650 - RNA, 23 nt, Artificial Sequence
  Synthetic oligonucleotide: PDCD1-4442
cgugccuguguucucuguggacu

SEQ ID NO: 16651 - RNA, 24 nt, Artificial Sequence
  Synthetic oligonucleotide: PDCD1-4443
ccgugccuguguucucuguggacu

SEQ ID NO: 16652 - RNA, 18 nt, Artificial Sequence
  Synthetic oligonucleotide: PDCD1-4444
gccgugccuguguucucu

SEQ ID NO: 16653 - RNA, 19 nt, Artificial Sequence
  Synthetic oligonucleotide: PDCD1-4445
agccgugccuguguucucu

SEQ ID NO: 16654 - RNA, 20 nt, Artificial Sequence
  Synthetic oligonucleotide: PDCD1-732
cagccgugccuguguucucu

SEQ ID NO: 16655 - RNA, 21 nt, Artificial Sequence
  Synthetic oligonucleotide: PDCD1-4446
ucagccgugccuguguucucu

SEQ ID NO: 16656 - RNA, 22 nt, Artificial Sequence
  Synthetic oligonucleotide: PDCD1-4447
cucagccgugccuguguucucu

SEQ ID NO: 16657 - RNA, 23 nt, Artificial Sequence
  Synthetic oligonucleotide: PDCD1-4448
ccucagccgugccuguguucucu

SEQ ID NO: 16658 - RNA, 24 nt, Artificial Sequence
  Synthetic oligonucleotide: PDCD1-4449
cccucagccgugccuguguucucu

SEQ ID NO: 16659 - RNA, 17 nt, Artificial Sequence
  Synthetic oligonucleotide: PDCD1-4450
gccagcccggccaggac

SEQ ID NO: 16660 - RNA, 17 nt, Artificial Sequence
  Synthetic oligonucleotide: PDCD1-4451
acaacgccaccuucacc

SEQ ID NO: 16661 - RNA, 17 nt, Artificial Sequence
  Synthetic oligonucleotide: PDCD1-4452
gguccucggggaaggcg

SEQ ID NO: 16662 - RNA, 17 nt, Artificial Sequence
  Synthetic oligonucleotide: PDCD1-571
gcuucuccaacacaucg

SEQ ID NO: 16663 - RNA, 20 nt, Artificial Sequence
  Synthetic oligonucleotide: PDCD1-4453
gcagccagcccggccaggac

SEQ ID NO: 16664 - RNA, 20 nt, Artificial Sequence
  Synthetic oligonucleotide: PDCD1-4454
gggacaacgccaccuucacc

SEQ ID NO: 16665 - RNA, 20 nt, Artificial Sequence
  Synthetic oligonucleotide: PDCD1-4455
ugcgguccucggggaaggcg

SEQ ID NO: 16666 - RNA, 20 nt, Artificial Sequence
  Synthetic oligonucleotide: PDCD1-542
gcagcuucuccaacacaucg

SEQ ID NO: 16667 - RNA, 17 nt, Artificial Sequence
  Synthetic oligonucleotide: PDCD1-954
ucuguggacuaugggga

SEQ ID NO: 16668 - RNA, 17 nt, Artificial Sequence
  Synthetic oligonucleotide: PDCD1-4456
ugcucuuggccccucug

SEQ ID NO: 16669 - RNA, 20 nt, Artificial Sequence
  Synthetic oligonucleotide: PDCD1-953
uucucuguggacuaugggga

SEQ ID NO: 16670 - RNA, 20 nt, Artificial Sequence
  Synthetic oligonucleotide: PDCD1-4457
cacugcucuuggccccucug

SEQ ID NO: 16671 - RNA, 17 nt, Artificial Sequence
  Synthetic oligonucleotide: PDCD1-2652
gcagcucgggcgggaua

SEQ ID NO: 16672 - RNA, 17 nt, Artificial Sequence
  Synthetic oligonucleotide: PDCD1-2666
gagacccccacggggua

SEQ ID NO: 16673 - RNA, 17 nt, Artificial Sequence
  Synthetic oligonucleotide: PDCD1-234
cugggcggugcuacaac

SEQ ID NO: 16674 - RNA, 17 nt, Artificial Sequence
  Synthetic oligonucleotide: PDCD1-249
agcaccgcccagacgac

SEQ ID NO: 16675 - RNA, 17 nt, Artificial Sequence
  Synthetic oligonucleotide: PDCD1-250
cgcccagacgacuggcc

SEQ ID NO: 16676 - RNA, 17 nt, Artificial Sequence
  Synthetic oligonucleotide: PDCD1-248
cuaccuaagaaccaucc

SEQ ID NO: 16677 - RNA, 17 nt, Artificial Sequence
  Synthetic oligonucleotide: PDCD1-2888
cauucugucggagccuc

SEQ ID NO: 16678 - RNA, 17 nt, Artificial Sequence
  Synthetic oligonucleotide: PDCD1-231
cgcccuggccagucguc

SEQ ID NO: 16679 - RNA, 17 nt, Artificial Sequence
  Synthetic oligonucleotide: PDCD1-2496
ucccggagcgagggguc

SEQ ID NO: 16680 - RNA, 17 nt, Artificial Sequence
  Synthetic oligonucleotide: PDCD1-2673
ugucacucucgcccacg

SEQ ID NO: 16681 - RNA, 17 nt, Artificial Sequence
  Synthetic oligonucleotide: PDCD1-2589
cacgcccuaccccgugg

SEQ ID NO: 16682 - RNA, 17 nt, Artificial Sequence
  Synthetic oligonucleotide: PDCD1-2675
cgcccacguggaugugg

SEQ ID NO: 16683 - RNA, 17 nt, Artificial Sequence
  Synthetic oligonucleotide: PDCD1-2674
ucucgcccacguggaug

SEQ ID NO: 16684 - RNA, 17 nt, Artificial Sequence
  Synthetic oligonucleotide: PDCD1-3120
ccgacagaaugggagug

SEQ ID NO: 16685 - RNA, 17 nt, Artificial Sequence
  Synthetic oligonucleotide: PDCD1-2669
ccacgggguagggcgug

SEQ ID NO: 16686 - RNA, 17 nt, Artificial Sequence
  Synthetic oligonucleotide: PDCD1-3123
agaggcuccgacagaau

SEQ ID NO: 16687 - RNA, 17 nt, Artificial Sequence
  Synthetic oligonucleotide: PDCD1-3121
uccgacagaaugggagu

SEQ ID NO: 16688 - RNA, 17 nt, Artificial Sequence
  Synthetic oligonucleotide: PDCD1-2523
ccucucagccgguccuu

SEQ ID NO: 16689 - RNA, 20 nt, Artificial Sequence
  Synthetic oligonucleotide: PDCD1-2233
ucaggcggaggugagcggaa

SEQ ID NO: 16690 - RNA, 20 nt, Artificial Sequence
  Synthetic oligonucleotide: PDCD1-124
accgcccagacgacuggcca

SEQ ID NO: 16691 - RNA, 20 nt, Artificial Sequence
  Synthetic oligonucleotide: PDCD1-2232
cucaggcggaggugagcgga

SEQ ID NO: 16692 - RNA, 20 nt, Artificial Sequence
  Synthetic oligonucleotide: PDCD1-2236
acugucccaggucagguuga

SEQ ID NO: 16693 - RNA, 20 nt, Artificial Sequence
  Synthetic oligonucleotide: PDCD1-107
cgucugggcggugcuacaac

SEQ ID NO: 16694 - RNA, 20 nt, Artificial Sequence
  Synthetic oligonucleotide: PDCD1-122
uguagcaccgcccagacgac

SEQ ID NO: 16695 - RNA, 20 nt, Artificial Sequence
  Synthetic oligonucleotide: PDCD1-2138
ggaaggucccuccagacccc

SEQ ID NO: 16696 - RNA, 20 nt, Artificial Sequence
  Synthetic oligonucleotide: PDCD1-111
cuacaacugggcuggcggcc

SEQ ID NO: 16697 - RNA, 20 nt, Artificial Sequence
  Synthetic oligonucleotide: PDCD1-123
caccgcccagacgacuggcc

SEQ ID NO: 16698 - RNA, 20 nt, Artificial Sequence
  Synthetic oligonucleotide: PDCD1-121
caccuaccuaagaaccaucc

SEQ ID NO: 16699 - RNA, 20 nt, Artificial Sequence
  Synthetic oligonucleotide: PDCD1-2205
cuuugggcagcucgaacucc

SEQ ID NO: 16700 - RNA, 20 nt, Artificial Sequence
  Synthetic oligonucleotide: PDCD1-2764
ucccauucugucggagccuc

SEQ ID NO: 16701 - RNA, 20 nt, Artificial Sequence
  Synthetic oligonucleotide: PDCD1-2207
cgaacuccuggguuccucuc

SEQ ID NO: 16702 - RNA, 20 nt, Artificial Sequence
  Synthetic oligonucleotide: PDCD1-104
aggcgcccuggccagucguc

SEQ ID NO: 16703 - RNA, 20 nt, Artificial Sequence
  Synthetic oligonucleotide: PDCD1-2189
gggucccggagcgagggguc

SEQ ID NO: 16704 - RNA, 20 nt, Artificial Sequence
  Synthetic oligonucleotide: PDCD1-2346
cucgggcgggauauggaaag

SEQ ID NO: 16705 - RNA, 20 nt, Artificial Sequence
  Synthetic oligonucleotide: PDCD1-2366
cucugucacucucgcccacg

SEQ ID NO: 16706 - RNA, 20 nt, Artificial Sequence
  Synthetic oligonucleotide: PDCD1-2367
cacucucgcccacguggaug

SEQ ID NO: 16707 - RNA, 20 nt, Artificial Sequence
  Synthetic oligonucleotide: PDCD1-2999
gcuccgacagaaugggagug

SEQ ID NO: 16708 - RNA, 20 nt, Artificial Sequence
  Synthetic oligonucleotide: PDCD1-117
ggaugguucuuagguaggug

SEQ ID NO: 16709 - RNA, 20 nt, Artificial Sequence
  Synthetic oligonucleotide: PDCD1-2388
gagaaggcggcacucuggug

SEQ ID NO: 16710 - RNA, 20 nt, Artificial Sequence
  Synthetic oligonucleotide: PDCD1-3002
cccagaggcuccgacagaau

SEQ ID NO: 16711 - RNA, 20 nt, Artificial Sequence
  Synthetic oligonucleotide: PDCD1-108
gucugggcggugcuacaacu

SEQ ID NO: 16712 - RNA, 20 nt, Artificial Sequence
  Synthetic oligonucleotide: PDCD1-2206
uuugggcagcucgaacuccu

SEQ ID NO: 16713 - RNA, 20 nt, Artificial Sequence
  Synthetic oligonucleotide: PDCD1-2765
cccauucugucggagccucu

SEQ ID NO: 16714 - RNA, 20 nt, Artificial Sequence
  Synthetic oligonucleotide: PDCD1-105
ggcgcccuggccagucgucu

SEQ ID NO: 16715 - RNA, 20 nt, Artificial Sequence
  Synthetic oligonucleotide: PDCD1-116
aggaugguucuuagguaggu

SEQ ID NO: 16716 - RNA, 20 nt, Artificial Sequence
  Synthetic oligonucleotide: PDCD1-114
ggccaggaugguucuuaggu

SEQ ID NO: 16717 - RNA, 20 nt, Artificial Sequence
  Synthetic oligonucleotide: PDCD1-118
gguucuuagguagguggggu

SEQ ID NO: 16718 - RNA, 20 nt, Artificial Sequence
  Synthetic oligonucleotide: PDCD1-126
cgacuggccagggcgccugu

SEQ ID NO: 16719 - RNA, 17 nt, Artificial Sequence
  Synthetic oligonucleotide: PDCD1-2683
agagggggcgggagcaa

SEQ ID NO: 16720 - RNA, 17 nt, Artificial Sequence
  Synthetic oligonucleotide: PDCD1-3124
cagaggcuccgacagaa

SEQ ID NO: 16721 - RNA, 17 nt, Artificial Sequence
  Synthetic oligonucleotide: PDCD1-2642
gggaugggggaggagaa

SEQ ID NO: 16722 - RNA, 17 nt, Artificial Sequence
  Synthetic oligonucleotide: PDCD1-2657
gagacacagaggaggaa

SEQ ID NO: 16723 - RNA, 17 nt, Artificial Sequence
  Synthetic oligonucleotide: PDCD1-2540
ggcggaggugagcggaa

SEQ ID NO: 16724 - RNA, 17 nt, Artificial Sequence
  Synthetic oligonucleotide: PDCD1-2431
cagggacugagagugaa

SEQ ID NO: 16725 - RNA, 17 nt, Artificial Sequence
  Synthetic oligonucleotide: PDCD1-2544
ucccaggucagguugaa

SEQ ID NO: 16726 - RNA, 17 nt, Artificial Sequence
  Synthetic oligonucleotide: PDCD1-2420
cacacagcucaggguaa

SEQ ID NO: 16727 - RNA, 17 nt, Artificial Sequence
  Synthetic oligonucleotide: PDCD1-2576
agagagagacagagaca

SEQ ID NO: 16728 - RNA, 17 nt, Artificial Sequence
  Synthetic oligonucleotide: PDCD1-2662
agcuggggagaccccca

SEQ ID NO: 16729 - RNA, 17 nt, Artificial Sequence
  Synthetic oligonucleotide: PDCD1-2629
gggaggcccggccccca

SEQ ID NO: 16730 - RNA, 17 nt, Artificial Sequence
  Synthetic oligonucleotide: PDCD1-2490
cuggcccuggcagccca

SEQ ID NO: 16731 - RNA, 17 nt, Artificial Sequence
  Synthetic oligonucleotide: PDCD1-2472
caggugucccagagcca

SEQ ID NO: 16732 - RNA, 17 nt, Artificial Sequence
  Synthetic oligonucleotide: PDCD1-2426
ggcagagcugggggcca

SEQ ID NO: 16733 - RNA, 17 nt, Artificial Sequence
  Synthetic oligonucleotide: PDCD1-2671
guagggcgugggggcca

SEQ ID NO: 16734 - RNA, 17 nt, Artificial Sequence
  Synthetic oligonucleotide: PDCD1-2409
agaggggacuugggcca

SEQ ID NO: 16735 - RNA, 17 nt, Artificial Sequence
  Synthetic oligonucleotide: PDCD1-251
gcccagacgacuggcca

SEQ ID NO: 16736 - RNA, 17 nt, Artificial Sequence
  Synthetic oligonucleotide: PDCD1-2430
caccccccgaccugcca

SEQ ID NO: 16737 - RNA, 17 nt, Artificial Sequence
  Synthetic oligonucleotide: PDCD1-2437
ggaccccugggcugcca

SEQ ID NO: 16738 - RNA, 17 nt, Artificial Sequence
  Synthetic oligonucleotide: PDCD1-2682
aagagggggcgggagca

SEQ ID NO: 16739 - RNA, 17 nt, Artificial Sequence
  Synthetic oligonucleotide: PDCD1-2625
cccaccuuccccaggca

SEQ ID NO: 16740 - RNA, 17 nt, Artificial Sequence
  Synthetic oligonucleotide: PDCD1-2418
caaagccacacagcuca

SEQ ID NO: 16741 - RNA, 17 nt, Artificial Sequence
  Synthetic oligonucleotide: PDCD1-2591
ggggucuccccagcuca

SEQ ID NO: 16742 - RNA, 17 nt, Artificial Sequence
  Synthetic oligonucleotide: PDCD1-2404
cugcccaggagcaaaga

SEQ ID NO: 16743 - RNA, 17 nt, Artificial Sequence
  Synthetic oligonucleotide: PDCD1-2677
guggauguggaggaaga

SEQ ID NO: 16744 - RNA, 17 nt, Artificial Sequence
  Synthetic oligonucleotide: PDCD1-2620
aggaaccugagcccaga

SEQ ID NO: 16745 - RNA, 17 nt, Artificial Sequence
  Synthetic oligonucleotide: PDCD1-2578
cagggagacagaggaga

SEQ ID NO: 16746 - RNA, 17 nt, Artificial Sequence
  Synthetic oligonucleotide: PDCD1-2641
ggggaugggggaggaga

SEQ ID NO: 16747 - RNA, 17 nt, Artificial Sequence
  Synthetic oligonucleotide: PDCD1-2630
cccggcccccagggaga

SEQ ID NO: 16748 - RNA, 17 nt, Artificial Sequence
  Synthetic oligonucleotide: PDCD1-2568
ggguaggacuggggaga

SEQ ID NO: 16749 - RNA, 17 nt, Artificial Sequence
  Synthetic oligonucleotide: PDCD1-2690
cgccugagcaguggaga

SEQ ID NO: 16750 - RNA, 17 nt, Artificial Sequence
  Synthetic oligonucleotide: PDCD1-2399
ccaaggaccggcugaga

SEQ ID NO: 16751 - RNA, 17 nt, Artificial Sequence
  Synthetic oligonucleotide: PDCD1-2494
caggggucccggagcga

SEQ ID NO: 16752 - RNA, 17 nt, Artificial Sequence
  Synthetic oligonucleotide: PDCD1-239
ugggcuggcggccagga

SEQ ID NO: 16753 - RNA, 17 nt, Artificial Sequence
  Synthetic oligonucleotide: PDCD1-2646
acccggcagccucagga

SEQ ID NO: 16754 - RNA, 17 nt, Artificial Sequence
  Synthetic oligonucleotide: PDCD1-2656
agagacacagaggagga

SEQ ID NO: 16755 - RNA, 17 nt, Artificial Sequence
  Synthetic oligonucleotide: PDCD1-2556
gcagugcugggggagga

SEQ ID NO: 16756 - RNA, 17 nt, Artificial Sequence
  Synthetic oligonucleotide: PDCD1-2560
gggaggaggggugagga

SEQ ID NO: 16757 - RNA, 17 nt, Artificial Sequence
  Synthetic oligonucleotide: PDCD1-2539
aggcggaggugagcgga

SEQ ID NO: 16758 - RNA, 17 nt, Artificial Sequence
  Synthetic oligonucleotide: PDCD1-2546
aggucagguugaaggga

SEQ ID NO: 16759 - RNA, 17 nt, Artificial Sequence
  Synthetic oligonucleotide: PDCD1-2636
cagggagauggggggga

SEQ ID NO: 16760 - RNA, 17 nt, Artificial Sequence
  Synthetic oligonucleotide: PDCD1-2574
ggggagaggguggggga

SEQ ID NO: 16761 - RNA, 17 nt, Artificial Sequence
  Synthetic oligonucleotide: PDCD1-2610
gccucccugccugggga

SEQ ID NO: 16762 - RNA, 17 nt, Artificial Sequence
  Synthetic oligonucleotide: PDCD1-2476
agagccaggggucugga

SEQ ID NO: 16763 - RNA, 17 nt, Artificial Sequence
  Synthetic oligonucleotide: PDCD1-2498
ggagcgaggggucugga

SEQ ID NO: 16764 - RNA, 17 nt, Artificial Sequence
  Synthetic oligonucleotide: PDCD1-2444
cagggacugagggugga

SEQ ID NO: 16765 - RNA, 17 nt, Artificial Sequence
  Synthetic oligonucleotide: PDCD1-2442
gaccugccagggacuga

SEQ ID NO: 16766 - RNA, 17 nt, Artificial Sequence
  Synthetic oligonucleotide: PDCD1-4458
uuccugggcugcaguga

SEQ ID NO: 16767 - RNA, 17 nt, Artificial Sequence
  Synthetic oligonucleotide: PDCD1-2543
gucccaggucagguuga

SEQ ID NO: 16768 - RNA, 17 nt, Artificial Sequence
  Synthetic oligonucleotide: PDCD1-2419
ccacacagcucagggua

SEQ ID NO: 16769 - RNA, 17 nt, Artificial Sequence
  Synthetic oligonucleotide: PDCD1-2663
gcuggggagacccccac

SEQ ID NO: 16770 - RNA, 17 nt, Artificial Sequence
  Synthetic oligonucleotide: PDCD1-229
aggcaugcagaucccac

SEQ ID NO: 16771 - RNA, 17 nt, Artificial Sequence
  Synthetic oligonucleotide: PDCD1-2672
uagggcgugggggccac

SEQ ID NO: 16772 - RNA, 17 nt, Artificial Sequence
  Synthetic oligonucleotide: PDCD1-2575
gagagagagacagagac

SEQ ID NO: 16773 - RNA, 17 nt, Artificial Sequence
  Synthetic oligonucleotide: PDCD1-2397
cacgcagccccaaggac

SEQ ID NO: 16774 - RNA, 17 nt, Artificial Sequence
  Synthetic oligonucleotide: PDCD1-2564
ugaggaggggguaggac

SEQ ID NO: 16775 - RNA, 17 nt, Artificial Sequence
  Synthetic oligonucleotide: PDCD1-2643
aagggccugcccccacc

SEQ ID NO: 16776 - RNA, 17 nt, Artificial Sequence
  Synthetic oligonucleotide: PDCD1-2687
cucccuucaaccugacc

SEQ ID NO: 16777 - RNA, 17 nt, Artificial Sequence
  Synthetic oligonucleotide: PDCD1-2416
ggcccagagaggaaccc

SEQ ID NO: 16778 - RNA, 17 nt, Artificial Sequence
  Synthetic oligonucleotide: PDCD1-2445
aggucccuccagacccc

SEQ ID NO: 16779 - RNA, 17 nt, Artificial Sequence
  Synthetic oligonucleotide: PDCD1-2434
ccucgcuccgggacccc

SEQ ID NO: 16780 - RNA, 17 nt, Artificial Sequence
  Synthetic oligonucleotide: PDCD1-2628
agggaggcccggccccc

SEQ ID NO: 16781 - RNA, 17 nt, Artificial Sequence
  Synthetic oligonucleotide: PDCD1-2516
ggccccaacuccucccc

SEQ ID NO: 16782 - RNA, 17 nt, Artificial Sequence
  Synthetic oligonucleotide: PDCD1-2623
ggccacccaccuucccc

SEQ ID NO: 16783 - RNA, 17 nt, Artificial Sequence
  Synthetic oligonucleotide: PDCD1-2489
ccuggcccuggcagccc

SEQ ID NO: 16784 - RNA, 17 nt, Artificial Sequence
  Synthetic oligonucleotide: PDCD1-4459
accccucacugcagccc

SEQ ID NO: 16785 - RNA, 17 nt, Artificial Sequence
  Synthetic oligonucleotide: PDCD1-230
agaucccacaggcgccc

SEQ ID NO: 16786 - RNA, 17 nt, Artificial Sequence
  Synthetic oligonucleotide: PDCD1-2488
ugaggcgggccuggccc

SEQ ID NO: 16787 - RNA, 17 nt, Artificial Sequence
  Synthetic oligonucleotide: PDCD1-2402
agagguccugccugccc

SEQ ID NO: 16788 - RNA, 17 nt, Artificial Sequence
  Synthetic oligonucleotide: PDCD1-2601
caucccccccaucuccc

SEQ ID NO: 16789 - RNA, 17 nt, Artificial Sequence
  Synthetic oligonucleotide: PDCD1-2477
cuuccacccucaguccc

SEQ ID NO: 16790 - RNA, 17 nt, Artificial Sequence
  Synthetic oligonucleotide: PDCD1-2499
cuuucacucucaguccc

SEQ ID NO: 16791 - RNA, 17 nt, Artificial Sequence
  Synthetic oligonucleotide: PDCD1-2541
ggaagggaaacuguccc

SEQ ID NO: 16792 - RNA, 17 nt, Artificial Sequence
  Synthetic oligonucleotide: PDCD1-3127
agaggcugugggcagcc

SEQ ID NO: 16793 - RNA, 17 nt, Artificial Sequence
  Synthetic oligonucleotide: PDCD1-2471
ucaggugucccagagcc

SEQ ID NO: 16794 - RNA, 17 nt, Artificial Sequence
  Synthetic oligonucleotide: PDCD1-2627
ccccaggcagggaggcc

SEQ ID NO: 16795 - RNA, 17 nt, Artificial Sequence
  Synthetic oligonucleotide: PDCD1-238
caacugggcuggcggcc

SEQ ID NO: 16796 - RNA, 17 nt, Artificial Sequence
  Synthetic oligonucleotide: PDCD1-2438
ccugggcugccagggcc

SEQ ID NO: 16797 - RNA, 17 nt, Artificial Sequence
  Synthetic oligonucleotide: PDCD1-2487
gggugcugaggcgggcc

SEQ ID NO: 16798 - RNA, 17 nt, Artificial Sequence
  Synthetic oligonucleotide: PDCD1-2606
ccaucucccugggggcc

SEQ ID NO: 16799 - RNA, 17 nt, Artificial Sequence
  Synthetic oligonucleotide: PDCD1-2408
aagaggggacuugggcc

SEQ ID NO: 16800 - RNA, 17 nt, Artificial Sequence
  Synthetic oligonucleotide: PDCD1-254
ugugggaucugcaugcc

SEQ ID NO: 16801 - RNA, 17 nt, Artificial Sequence
  Synthetic oligonucleotide: PDCD1-2429
gcaccccccgaccugcc

SEQ ID NO: 16802 - RNA, 17 nt, Artificial Sequence
  Synthetic oligonucleotide: PDCD1-2607
ggccgggccucccugcc

SEQ ID NO: 16803 - RNA, 17 nt, Artificial Sequence
  Synthetic oligonucleotide: PDCD1-2595
ccccuccugaggcugcc

SEQ ID NO: 16804 - RNA, 17 nt, Artificial Sequence
  Synthetic oligonucleotide: PDCD1-2436
gggaccccugggcugcc

SEQ ID NO: 16805 - RNA, 17 nt, Artificial Sequence
  Synthetic oligonucleotide: PDCD1-2512
ugggcagcucgaacucc

SEQ ID NO: 16806 - RNA, 17 nt, Artificial Sequence
  Synthetic oligonucleotide: PDCD1-2890
agccucugggagccucc

SEQ ID NO: 16807 - RNA, 17 nt, Artificial Sequence
  Synthetic oligonucleotide: PDCD1-2433
uccagaccccucgcucc

SEQ ID NO: 16808 - RNA, 17 nt, Artificial Sequence
  Synthetic oligonucleotide: PDCD1-228
ucugguggggcugcucc

SEQ ID NO: 16809 - RNA, 17 nt, Artificial Sequence
  Synthetic oligonucleotide: PDCD1-2517
aguccccucuuugcucc

SEQ ID NO: 16810 - RNA, 17 nt, Artificial Sequence
  Synthetic oligonucleotide: PDCD1-2492
uggcagcccaggggucc

SEQ ID NO: 16811 - RNA, 17 nt, Artificial Sequence
  Synthetic oligonucleotide: PDCD1-2617
cucugggcucagguucc

SEQ ID NO: 16812 - RNA, 17 nt, Artificial Sequence
  Synthetic oligonucleotide: PDCD1-2521
cucuguccccucucagc

SEQ ID NO: 16813 - RNA, 17 nt, Artificial Sequence
  Synthetic oligonucleotide: PDCD1-2422
aggguaaggggcagagc

SEQ ID NO: 16814 - RNA, 17 nt, Artificial Sequence
  Synthetic oligonucleotide: PDCD1-2659
aggaaggggcccugagc

SEQ ID NO: 16815 - RNA, 17 nt, Artificial Sequence
  Synthetic oligonucleotide: PDCD1-2427
gagcugggggccaaggc

SEQ ID NO: 16816 - RNA, 17 nt, Artificial Sequence
  Synthetic oligonucleotide: PDCD1-2624
acccaccuuccccaggc

SEQ ID NO: 16817 - RNA, 17 nt, Artificial Sequence
  Synthetic oligonucleotide: PDCD1-2520
uuugcuccugggcaggc

SEQ ID NO: 16818 - RNA, 17 nt, Artificial Sequence
  Synthetic oligonucleotide: PDCD1-2486
ucggggggugcugaggc

SEQ ID NO: 16819 - RNA, 17 nt, Artificial Sequence
  Synthetic oligonucleotide: PDCD1-2651
ggaggggcagcucgggc

SEQ ID NO: 16820 - RNA, 17 nt, Artificial Sequence
  Synthetic oligonucleotide: PDCD1-2686
gggcgggagcaaggggc

SEQ ID NO: 16821 - RNA, 17 nt, Artificial Sequence
  Synthetic oligonucleotide: PDCD1-2681
guggaggaagagggggc

SEQ ID NO: 16822 - RNA, 17 nt, Artificial Sequence
  Synthetic oligonucleotide: PDCD1-2605
cccaucucccugggggc

SEQ ID NO: 16823 - RNA, 17 nt, Artificial Sequence
  Synthetic oligonucleotide: PDCD1-2600
ggcugccgggugggggc

SEQ ID NO: 16824 - RNA, 17 nt, Artificial Sequence
  Synthetic oligonucleotide: PDCD1-236
cggugcuacaacugggc

SEQ ID NO: 16825 - RNA, 17 nt, Artificial Sequence
  Synthetic oligonucleotide: PDCD1-2519
ccucuuugcuccugggc

SEQ ID NO: 16826 - RNA, 17 nt, Artificial Sequence
  Synthetic oligonucleotide: PDCD1-2478
cacccucagucccuggc

SEQ ID NO: 16827 - RNA, 17 nt, Artificial Sequence
  Synthetic oligonucleotide: PDCD1-2500
cacucucagucccuggc

SEQ ID NO: 16828 - RNA, 17 nt, Artificial Sequence
  Synthetic oligonucleotide: PDCD1-2507
ucggggggugcuguggc

SEQ ID NO: 16829 - RNA, 17 nt, Artificial Sequence
  Synthetic oligonucleotide: PDCD1-2594
gccccuccugaggcugc

SEQ ID NO: 16830 - RNA, 17 nt, Artificial Sequence
  Synthetic oligonucleotide: PDCD1-2550
agugacagaggcagugc

SEQ ID NO: 16831 - RNA, 17 nt, Artificial Sequence
  Synthetic oligonucleotide: PDCD1-2692
uggagaaggcggcacuc

SEQ ID NO: 16832 - RNA, 17 nt, Artificial Sequence
  Synthetic oligonucleotide: PDCD1-2614
agguggguggcccccuc

SEQ ID NO: 16833 - RNA, 17 nt, Artificial Sequence
  Synthetic oligonucleotide: PDCD1-2644
ccccacccggcagccuc

SEQ ID NO: 16834 - RNA, 17 nt, Artificial Sequence
  Synthetic oligonucleotide: PDCD1-2417
ccaaagccacacagcuc

SEQ ID NO: 16835 - RNA, 17 nt, Artificial Sequence
  Synthetic oligonucleotide: PDCD1-2590
gggggucuccccagcuc

SEQ ID NO: 16836 - RNA, 17 nt, Artificial Sequence
  Synthetic oligonucleotide: PDCD1-2649
cucaggaggggcagcuc

SEQ ID NO: 16837 - RNA, 17 nt, Artificial Sequence
  Synthetic oligonucleotide: PDCD1-2432
cuccagaccccucgcuc

SEQ ID NO: 16838 - RNA, 17 nt, Artificial Sequence
  Synthetic oligonucleotide: PDCD1-2616
uggcccccucugggcuc

SEQ ID NO: 16839 - RNA, 17 nt, Artificial Sequence
  Synthetic oligonucleotide: PDCD1-2446
cuccagaccccuggcuc

SEQ ID NO: 16840 - RNA, 17 nt, Artificial Sequence
  Synthetic oligonucleotide: PDCD1-2535
cgccuucuccacugcuc

SEQ ID NO: 16841 - RNA, 17 nt, Artificial Sequence
  Synthetic oligonucleotide: PDCD1-2514
acuccuggguuccucuc

SEQ ID NO: 16842 - RNA, 17 nt, Artificial Sequence
  Synthetic oligonucleotide: PDCD1-2542
ggaaacugucccagguc

SEQ ID NO: 16843 - RNA, 17 nt, Artificial Sequence
  Synthetic oligonucleotide: PDCD1-2480
ucagucccuggcagguc

SEQ ID NO: 16844 - RNA, 17 nt, Artificial Sequence
  Synthetic oligonucleotide: PDCD1-247
agguggggucggcgguc

SEQ ID NO: 16845 - RNA, 17 nt, Artificial Sequence
  Synthetic oligonucleotide: PDCD1-2474
ucccagagccagggguc

SEQ ID NO: 16846 - RNA, 17 nt, Artificial Sequence
  Synthetic oligonucleotide: PDCD1-2403
ccugcccaggagcaaag

SEQ ID NO: 16847 - RNA, 17 nt, Artificial Sequence
  Synthetic oligonucleotide: PDCD1-2653
gggcgggauauggaaag

SEQ ID NO: 16848 - RNA, 17 nt, Artificial Sequence
  Synthetic oligonucleotide: PDCD1-2684
gagggggcgggagcaag

SEQ ID NO: 16849 - RNA, 17 nt, Artificial Sequence
  Synthetic oligonucleotide: PDCD1-2658
agacacagaggaggaag

SEQ ID NO: 16850 - RNA, 17 nt, Artificial Sequence
  Synthetic oligonucleotide: PDCD1-2676
cguggauguggaggaag

SEQ ID NO: 16851 - RNA, 17 nt, Artificial Sequence
  Synthetic oligonucleotide: PDCD1-2421
acacagcucaggguaag

SEQ ID NO: 16852 - RNA, 17 nt, Artificial Sequence
  Synthetic oligonucleotide: PDCD1-2654
agugagcagagacacag

SEQ ID NO: 16853 - RNA, 17 nt, Artificial Sequence
  Synthetic oligonucleotide: PDCD1-2577
cagagacagggagacag

SEQ ID NO: 16854 - RNA, 17 nt, Artificial Sequence
  Synthetic oligonucleotide: PDCD1-2401
cggcugagaggggacag

SEQ ID NO: 16855 - RNA, 17 nt, Artificial Sequence
  Synthetic oligonucleotide: PDCD1-2549
gugggcgagagugacag

SEQ ID NO: 16856 - RNA, 17 nt, Artificial Sequence
  Synthetic oligonucleotide: PDCD1-2491
uggcccuggcagcccag

SEQ ID NO: 16857 - RNA, 17 nt, Artificial Sequence
  Synthetic oligonucleotide: PDCD1-2619
caggaaccugagcccag

SEQ ID NO: 16858 - RNA, 17 nt, Artificial Sequence
  Synthetic oligonucleotide: PDCD1-3125
agccgggaggcucccag

SEQ ID NO: 16859 - RNA, 17 nt, Artificial Sequence
  Synthetic oligonucleotide: PDCD1-2473
aggugucccagagccag

SEQ ID NO: 16860 - RNA, 17 nt, Artificial Sequence
  Synthetic oligonucleotide: PDCD1-2410
gaggggacuugggccag

SEQ ID NO: 16861 - RNA, 17 nt, Artificial Sequence
  Synthetic oligonucleotide: PDCD1-2689
caccuccgccugagcag

SEQ ID NO: 16862 - RNA, 17 nt, Artificial Sequence
  Synthetic oligonucleotide: PDCD1-2405
ugcccaggagcaaagag

SEQ ID NO: 16863 - RNA, 17 nt, Artificial Sequence
  Synthetic oligonucleotide: PDCD1-2678
uggauguggaggaagag

SEQ ID NO: 16864 - RNA, 17 nt, Artificial Sequence
  Synthetic oligonucleotide: PDCD1-2621
ggaaccugagcccagag

SEQ ID NO: 16865 - RNA, 17 nt, Artificial Sequence
  Synthetic oligonucleotide: PDCD1-2415
ggaguuggggcccagag

SEQ ID NO: 16866 - RNA, 17 nt, Artificial Sequence
  Synthetic oligonucleotide: PDCD1-2400
caaggaccggcugagag

SEQ ID NO: 16867 - RNA, 17 nt, Artificial Sequence
  Synthetic oligonucleotide: PDCD1-2495
aggggucccggagcgag

SEQ ID NO: 16868 - RNA, 17 nt, Artificial Sequence
  Synthetic oligonucleotide: PDCD1-2647
cccggcagccucaggag

SEQ ID NO: 16869 - RNA, 17 nt, Artificial Sequence
  Synthetic oligonucleotide: PDCD1-2557
cagugcugggggaggag

SEQ ID NO: 16870 - RNA, 17 nt, Artificial Sequence
  Synthetic oligonucleotide: PDCD1-2561
ggaggaggggugaggag

SEQ ID NO: 16871 - RNA, 17 nt, Artificial Sequence
  Synthetic oligonucleotide: PDCD1-2567
gggguaggacuggggag

SEQ ID NO: 16872 - RNA, 17 nt, Artificial Sequence
  Synthetic oligonucleotide: PDCD1-3122
cuccgacagaaugggag

SEQ ID NO: 16873 - RNA, 17 nt, Artificial Sequence
  Synthetic oligonucleotide: PDCD1-2398
cccaaggaccggcugag

SEQ ID NO: 16874 - RNA, 17 nt, Artificial Sequence
  Synthetic oligonucleotide: PDCD1-4460
uccugggcugcagugag

SEQ ID NO: 16875 - RNA, 17 nt, Artificial Sequence
  Synthetic oligonucleotide: PDCD1-2538
gcucaggcggaggugag

SEQ ID NO: 16876 - RNA, 17 nt, Artificial Sequence
  Synthetic oligonucleotide: PDCD1-2664
cuggggagacccccacg

SEQ ID NO: 16877 - RNA, 17 nt, Artificial Sequence
  Synthetic oligonucleotide: PDCD1-2547
cuuccuccacauccacg

SEQ ID NO: 16878 - RNA, 17 nt, Artificial Sequence
  Synthetic oligonucleotide: PDCD1-2586
ccccacgcccuaccccg

SEQ ID NO: 16879 - RNA, 17 nt, Artificial Sequence
  Synthetic oligonucleotide: PDCD1-2585
gggaggaggugggcccg

SEQ ID NO: 16880 - RNA, 17 nt, Artificial Sequence
  Synthetic oligonucleotide: PDCD1-2493
ccaggggucccggagcg

SEQ ID NO: 16881 - RNA, 17 nt, Artificial Sequence
  Synthetic oligonucleotide: PDCD1-2667
ccccacgggguagggcg

SEQ ID NO: 16882 - RNA, 17 nt, Artificial Sequence
  Synthetic oligonucleotide: PDCD1-2481
cagucccuggcaggucg

SEQ ID NO: 16883 - RNA, 17 nt, Artificial Sequence
  Synthetic oligonucleotide: PDCD1-2691
cugagcaguggagaagg

SEQ ID NO: 16884 - RNA, 17 nt, Artificial Sequence
  Synthetic oligonucleotide: PDCD1-2611
ucccugccuggggaagg

SEQ ID NO: 16885 - RNA, 17 nt, Artificial Sequence
  Synthetic oligonucleotide: PDCD1-2645
cacccggcagccucagg

SEQ ID NO: 16886 - RNA, 17 nt, Artificial Sequence
  Synthetic oligonucleotide: PDCD1-2536
cuucuccacugcucagg

SEQ ID NO: 16887 - RNA, 17 nt, Artificial Sequence
  Synthetic oligonucleotide: PDCD1-2679
ggauguggaggaagagg

SEQ ID NO: 16888 - RNA, 17 nt, Artificial Sequence
  Synthetic oligonucleotide: PDCD1-2655
gagcagagacacagagg

SEQ ID NO: 16889 - RNA, 17 nt, Artificial Sequence
  Synthetic oligonucleotide: PDCD1-2622
gaaccugagcccagagg

SEQ ID NO: 16890 - RNA, 17 nt, Artificial Sequence
  Synthetic oligonucleotide: PDCD1-2583
aggagauggggaggagg

SEQ ID NO: 16891 - RNA, 17 nt, Artificial Sequence
  Synthetic oligonucleotide: PDCD1-2562
gaggaggggugaggagg

SEQ ID NO: 16892 - RNA, 17 nt, Artificial Sequence
  Synthetic oligonucleotide: PDCD1-2555
ggcagugcugggggagg

SEQ ID NO: 16893 - RNA, 17 nt, Artificial Sequence
  Synthetic oligonucleotide: PDCD1-2582
cagaggagauggggagg

SEQ ID NO: 16894 - RNA, 17 nt, Artificial Sequence
  Synthetic oligonucleotide: PDCD1-2485
gucggggggugcugagg

SEQ ID NO: 16895 - RNA, 17 nt, Artificial Sequence
  Synthetic oligonucleotide: PDCD1-2559
ggggaggaggggugagg

SEQ ID NO: 16896 - RNA, 17 nt, Artificial Sequence
  Synthetic oligonucleotide: PDCD1-242
gaugguucuuagguagg

SEQ ID NO: 16897 - RNA, 17 nt, Artificial Sequence
  Synthetic oligonucleotide: PDCD1-2537
cuccacugcucaggcgg

SEQ ID NO: 16898 - RNA, 17 nt, Artificial Sequence
  Synthetic oligonucleotide: PDCD1-2482
agucccuggcaggucgg

SEQ ID NO: 16899 - RNA, 17 nt, Artificial Sequence
  Synthetic oligonucleotide: PDCD1-246
uagguagguggggucgg

SEQ ID NO: 16900 - RNA, 17 nt, Artificial Sequence
  Synthetic oligonucleotide: PDCD1-2545
caggucagguugaaggg

SEQ ID NO: 16901 - RNA, 17 nt, Artificial Sequence
  Synthetic oligonucleotide: PDCD1-2626
accuuccccaggcaggg

SEQ ID NO: 16902 - RNA, 17 nt, Artificial Sequence
  Synthetic oligonucleotide: PDCD1-2569
uaggacuggggagaggg

SEQ ID NO: 16903 - RNA, 17 nt, Artificial Sequence
  Synthetic oligonucleotide: PDCD1-2443
cugccagggacugaggg

SEQ ID NO: 16904 - RNA, 17 nt, Artificial Sequence
  Synthetic oligonucleotide: PDCD1-3126
ggcugugggcagccggg

SEQ ID NO: 16905 - RNA, 17 nt, Artificial Sequence
  Synthetic oligonucleotide: PDCD1-2596
cuccugaggcugccggg

SEQ ID NO: 16906 - RNA, 17 nt, Artificial Sequence
  Synthetic oligonucleotide: PDCD1-2650
aggaggggcagcucggg

SEQ ID NO: 16907 - RNA, 17 nt, Artificial Sequence
  Synthetic oligonucleotide: PDCD1-2483
gucccuggcaggucggg

SEQ ID NO: 16908 - RNA, 17 nt, Artificial Sequence
  Synthetic oligonucleotide: PDCD1-2685
ggggcgggagcaagggg

SEQ ID NO: 16909 - RNA, 17 nt, Artificial Sequence
  Synthetic oligonucleotide: PDCD1-2411
gggacuugggccagggg

SEQ ID NO: 16910 - RNA, 17 nt, Artificial Sequence
  Synthetic oligonucleotide: PDCD1-4461
ugggcugcagugagggg

SEQ ID NO: 16911 - RNA, 17 nt, Artificial Sequence
  Synthetic oligonucleotide: PDCD1-2680
uguggaggaagaggggg

SEQ ID NO: 16912 - RNA, 17 nt, Artificial Sequence
  Synthetic oligonucleotide: PDCD1-2640
gaugggggggauggggg

SEQ ID NO: 16913 - RNA, 17 nt, Artificial Sequence
  Synthetic oligonucleotide: PDCD1-2554
agaggcagugcuggggg

SEQ ID NO: 16914 - RNA, 17 nt, Artificial Sequence
  Synthetic oligonucleotide: PDCD1-2573
uggggagaggguggggg

SEQ ID NO: 16915 - RNA, 17 nt, Artificial Sequence
  Synthetic oligonucleotide: PDCD1-2581
agacagaggagaugggg

SEQ ID NO: 16916 - RNA, 17 nt, Artificial Sequence
  Synthetic oligonucleotide: PDCD1-2635
cccccagggagaugggg

SEQ ID NO: 16917 - RNA, 17 nt, Artificial Sequence
  Synthetic oligonucleotide: PDCD1-2634
gcccccagggagauggg

SEQ ID NO: 16918 - RNA, 17 nt, Artificial Sequence
  Synthetic oligonucleotide: PDCD1-233
cuggccagucgucuggg

SEQ ID NO: 16919 - RNA, 17 nt, Artificial Sequence
  Synthetic oligonucleotide: PDCD1-2613
ugccuggggaagguggg

SEQ ID NO: 16920 - RNA, 17 nt, Artificial Sequence
  Synthetic oligonucleotide: PDCD1-2633
ggcccccagggagaugg

SEQ ID NO: 16921 - RNA, 17 nt, Artificial Sequence
  Synthetic oligonucleotide: PDCD1-2639
ggagaugggggggaugg

SEQ ID NO: 16922 - RNA, 17 nt, Artificial Sequence
  Synthetic oligonucleotide: PDCD1-2604
cccccccaucucccugg

SEQ ID NO: 16923 - RNA, 17 nt, Artificial Sequence
  Synthetic oligonucleotide: PDCD1-2425
guaaggggcagagcugg

SEQ ID NO: 16924 - RNA, 17 nt, Artificial Sequence
  Synthetic oligonucleotide: PDCD1-237
ugcuacaacugggcugg

SEQ ID NO: 16925 - RNA, 17 nt, Artificial Sequence
  Synthetic oligonucleotide: PDCD1-2553
gacagaggcagugcugg

SEQ ID NO: 16926 - RNA, 17 nt, Artificial Sequence
  Synthetic oligonucleotide: PDCD1-2693
agaaggcggcacucugg

SEQ ID NO: 16927 - RNA, 17 nt, Artificial Sequence
  Synthetic oligonucleotide: PDCD1-2475
cagagccaggggucugg

SEQ ID NO: 16928 - RNA, 17 nt, Artificial Sequence
  Synthetic oligonucleotide: PDCD1-2497
cggagcgaggggucugg

SEQ ID NO: 16929 - RNA, 17 nt, Artificial Sequence
  Synthetic oligonucleotide: PDCD1-2670
cacgggguagggcgugg

SEQ ID NO: 16930 - RNA, 17 nt, Artificial Sequence
  Synthetic oligonucleotide: PDCD1-2572
gacuggggagagggugg

SEQ ID NO: 16931 - RNA, 17 nt, Artificial Sequence
  Synthetic oligonucleotide: PDCD1-2599
cugaggcugccgggugg

SEQ ID NO: 16932 - RNA, 17 nt, Artificial Sequence
  Synthetic oligonucleotide: PDCD1-2580
gggagacagaggagaug

SEQ ID NO: 16933 - RNA, 17 nt, Artificial Sequence
  Synthetic oligonucleotide: PDCD1-2632
cggcccccagggagaug

SEQ ID NO: 16934 - RNA, 17 nt, Artificial Sequence
  Synthetic oligonucleotide: PDCD1-2638
gggagaugggggggaug

SEQ ID NO: 16935 - RNA, 17 nt, Artificial Sequence
  Synthetic oligonucleotide: PDCD1-2566
aggaggggguaggacug

SEQ ID NO: 16936 - RNA, 17 nt, Artificial Sequence
  Synthetic oligonucleotide: PDCD1-2441
cgaccugccagggacug

SEQ ID NO: 16937 - RNA, 17 nt, Artificial Sequence
  Synthetic oligonucleotide: PDCD1-2603
ucccccccaucucccug

SEQ ID NO: 16938 - RNA, 17 nt, Artificial Sequence
  Synthetic oligonucleotide: PDCD1-252
acuggccagggcgccug

SEQ ID NO: 16939 - RNA, 17 nt, Artificial Sequence
  Synthetic oligonucleotide: PDCD1-2609
ccgggccucccugccug

SEQ ID NO: 16940 - RNA, 17 nt, Artificial Sequence
  Synthetic oligonucleotide: PDCD1-2593
ccgagcugccccuccug

SEQ ID NO: 16941 - RNA, 17 nt, Artificial Sequence
  Synthetic oligonucleotide: PDCD1-2424
gguaaggggcagagcug

SEQ ID NO: 16942 - RNA, 17 nt, Artificial Sequence
  Synthetic oligonucleotide: PDCD1-2661
gaaggggcccugagcug

SEQ ID NO: 16943 - RNA, 17 nt, Artificial Sequence
  Synthetic oligonucleotide: PDCD1-2592
gucucugcucacugcug

SEQ ID NO: 16944 - RNA, 17 nt, Artificial Sequence
  Synthetic oligonucleotide: PDCD1-2552
ugacagaggcagugcug

SEQ ID NO: 16945 - RNA, 17 nt, Artificial Sequence
  Synthetic oligonucleotide: PDCD1-4462
guuccugggcugcagug

SEQ ID NO: 16946 - RNA, 17 nt, Artificial Sequence
  Synthetic oligonucleotide: PDCD1-2588
ccacgcccuaccccgug

SEQ ID NO: 16947 - RNA, 17 nt, Artificial Sequence
  Synthetic oligonucleotide: PDCD1-244
ugguucuuagguaggug

SEQ ID NO: 16948 - RNA, 17 nt, Artificial Sequence
  Synthetic oligonucleotide: PDCD1-2571
ggacuggggagagggug

SEQ ID NO: 16949 - RNA, 17 nt, Artificial Sequence
  Synthetic oligonucleotide: PDCD1-2598
ccugaggcugccgggug

SEQ ID NO: 16950 - RNA, 17 nt, Artificial Sequence
  Synthetic oligonucleotide: PDCD1-2558
cugggggaggaggggug

SEQ ID NO: 16951 - RNA, 17 nt, Artificial Sequence
  Synthetic oligonucleotide: PDCD1-2695
aaggcggcacucuggug

SEQ ID NO: 16952 - RNA, 17 nt, Artificial Sequence
  Synthetic oligonucleotide: PDCD1-2509
ccuuacccugagcugug

SEQ ID NO: 16953 - RNA, 17 nt, Artificial Sequence
  Synthetic oligonucleotide: PDCD1-2524
cucucagccgguccuug

SEQ ID NO: 16954 - RNA, 17 nt, Artificial Sequence
  Synthetic oligonucleotide: PDCD1-2414
ggccaggggaggaguug

SEQ ID NO: 16955 - RNA, 17 nt, Artificial Sequence
  Synthetic oligonucleotide: PDCD1-2579
agggagacagaggagau

SEQ ID NO: 16956 - RNA, 17 nt, Artificial Sequence
  Synthetic oligonucleotide: PDCD1-2631
ccggcccccagggagau

SEQ ID NO: 16957 - RNA, 17 nt, Artificial Sequence
  Synthetic oligonucleotide: PDCD1-2637
agggagaugggggggau

SEQ ID NO: 16958 - RNA, 17 nt, Artificial Sequence
  Synthetic oligonucleotide: PDCD1-235
ugggcggugcuacaacu

SEQ ID NO: 16959 - RNA, 17 nt, Artificial Sequence
  Synthetic oligonucleotide: PDCD1-2565
gaggaggggguaggacu

SEQ ID NO: 16960 - RNA, 17 nt, Artificial Sequence
  Synthetic oligonucleotide: PDCD1-2406
ggagcaaagaggggacu

SEQ ID NO: 16961 - RNA, 17 nt, Artificial Sequence
  Synthetic oligonucleotide: PDCD1-2688
ucccuucaaccugaccu

SEQ ID NO: 16962 - RNA, 17 nt, Artificial Sequence
  Synthetic oligonucleotide: PDCD1-2435
cucgcuccgggaccccu

SEQ ID NO: 16963 - RNA, 17 nt, Artificial Sequence
  Synthetic oligonucleotide: PDCD1-2602
aucccccccaucucccu

SEQ ID NO: 16964 - RNA, 17 nt, Artificial Sequence
  Synthetic oligonucleotide: PDCD1-2508
uguggcaggcccagccu

SEQ ID NO: 16965 - RNA, 17 nt, Artificial Sequence
  Synthetic oligonucleotide: PDCD1-2608
gccgggccucccugccu

SEQ ID NO: 16966 - RNA, 17 nt, Artificial Sequence
  Synthetic oligonucleotide: PDCD1-2513
gggcagcucgaacuccu

SEQ ID NO: 16967 - RNA, 17 nt, Artificial Sequence
  Synthetic oligonucleotide: PDCD1-2518
guccccucuuugcuccu

SEQ ID NO: 16968 - RNA, 17 nt, Artificial Sequence
  Synthetic oligonucleotide: PDCD1-2522
cccucucagccgguccu

SEQ ID NO: 16969 - RNA, 17 nt, Artificial Sequence
  Synthetic oligonucleotide: PDCD1-2618
ucugggcucagguuccu

SEQ ID NO: 16970 - RNA, 17 nt, Artificial Sequence
  Synthetic oligonucleotide: PDCD1-2648
ccucaggaggggcagcu

SEQ ID NO: 16971 - RNA, 17 nt, Artificial Sequence
  Synthetic oligonucleotide: PDCD1-2423
ggguaaggggcagagcu

SEQ ID NO: 16972 - RNA, 17 nt, Artificial Sequence
  Synthetic oligonucleotide: PDCD1-2660
ggaaggggcccugagcu

SEQ ID NO: 16973 - RNA, 17 nt, Artificial Sequence
  Synthetic oligonucleotide: PDCD1-2428
agcugggggccaaggcu

SEQ ID NO: 16974 - RNA, 17 nt, Artificial Sequence
  Synthetic oligonucleotide: PDCD1-2551
gugacagaggcagugcu

SEQ ID NO: 16975 - RNA, 17 nt, Artificial Sequence
  Synthetic oligonucleotide: PDCD1-2615
gguggguggcccccucu

SEQ ID NO: 16976 - RNA, 17 nt, Artificial Sequence
  Synthetic oligonucleotide: PDCD1-2889
auucugucggagccucu

SEQ ID NO: 16977 - RNA, 17 nt, Artificial Sequence
  Synthetic oligonucleotide: PDCD1-2447
uccagaccccuggcucu

SEQ ID NO: 16978 - RNA, 17 nt, Artificial Sequence
  Synthetic oligonucleotide: PDCD1-2515
cuccuggguuccucucu

SEQ ID NO: 16979 - RNA, 17 nt, Artificial Sequence
  Synthetic oligonucleotide: PDCD1-232
gcccuggccagucgucu

SEQ ID NO: 16980 - RNA, 17 nt, Artificial Sequence
  Synthetic oligonucleotide: PDCD1-2412
ugggccaggggaggagu

SEQ ID NO: 16981 - RNA, 17 nt, Artificial Sequence
  Synthetic oligonucleotide: PDCD1-2548
uuccuccacauccacgu

SEQ ID NO: 16982 - RNA, 17 nt, Artificial Sequence
  Synthetic oligonucleotide: PDCD1-2587
cccacgcccuaccccgu

SEQ ID NO: 16983 - RNA, 17 nt, Artificial Sequence
  Synthetic oligonucleotide: PDCD1-2668
cccacgggguagggcgu

SEQ ID NO: 16984 - RNA, 17 nt, Artificial Sequence
  Synthetic oligonucleotide: PDCD1-2612
cccugccuggggaaggu

SEQ ID NO: 16985 - RNA, 17 nt, Artificial Sequence
  Synthetic oligonucleotide: PDCD1-2479
cucagucccuggcaggu

SEQ ID NO: 16986 - RNA, 17 nt, Artificial Sequence
  Synthetic oligonucleotide: PDCD1-2584
ggagauggggaggaggu

SEQ ID NO: 16987 - RNA, 17 nt, Artificial Sequence
  Synthetic oligonucleotide: PDCD1-243
augguucuuagguaggu

SEQ ID NO: 16988 - RNA, 17 nt, Artificial Sequence
  Synthetic oligonucleotide: PDCD1-241
caggaugguucuuaggu

SEQ ID NO: 16989 - RNA, 17 nt, Artificial Sequence
  Synthetic oligonucleotide: PDCD1-2570
aggacuggggagagggu

SEQ ID NO: 16990 - RNA, 17 nt, Artificial Sequence
  Synthetic oligonucleotide: PDCD1-2597
uccugaggcugccgggu

SEQ ID NO: 16991 - RNA, 17 nt, Artificial Sequence
  Synthetic oligonucleotide: PDCD1-4463
gggcugcagugaggggu

SEQ ID NO: 16992 - RNA, 17 nt, Artificial Sequence
  Synthetic oligonucleotide: PDCD1-2665
ggagacccccacggggu

SEQ ID NO: 16993 - RNA, 17 nt, Artificial Sequence
  Synthetic oligonucleotide: PDCD1-2563
aggggugaggagggggu

SEQ ID NO: 16994 - RNA, 17 nt, Artificial Sequence
  Synthetic oligonucleotide: PDCD1-245
ucuuagguagguggggu

SEQ ID NO: 16995 - RNA, 17 nt, Artificial Sequence
  Synthetic oligonucleotide: PDCD1-2694
gaaggcggcacucuggu

SEQ ID NO: 16996 - RNA, 17 nt, Artificial Sequence
  Synthetic oligonucleotide: PDCD1-253
cuggccagggcgccugu

SEQ ID NO: 16997 - RNA, 17 nt, Artificial Sequence
  Synthetic oligonucleotide: PDCD1-2887
ccccacucccauucugu

SEQ ID NO: 16998 - RNA, 17 nt, Artificial Sequence
  Synthetic oligonucleotide: PDCD1-2407
gagcaaagaggggacuu

SEQ ID NO: 16999 - RNA, 17 nt, Artificial Sequence
  Synthetic oligonucleotide: PDCD1-2510
ccugagcuguguggcuu

SEQ ID NO: 17000 - RNA, 17 nt, Artificial Sequence
  Synthetic oligonucleotide: PDCD1-240
cggccaggaugguucuu

SEQ ID NO: 17001 - RNA, 17 nt, Artificial Sequence
  Synthetic oligonucleotide: PDCD1-2413
gggccaggggaggaguu

SEQ ID NO: 17002 - RNA, 17 nt, Artificial Sequence
  Synthetic oligonucleotide: PDCD1-2511
cugagcuguguggcuuu

SEQ ID NO: 17003 - RNA, 20 nt, Artificial Sequence
  Synthetic oligonucleotide: PDCD1-2376
ggaagagggggcgggagcaa

SEQ ID NO: 17004 - RNA, 20 nt, Artificial Sequence
  Synthetic oligonucleotide: PDCD1-3003
ucccagaggcuccgacagaa

SEQ ID NO: 17005 - RNA, 20 nt, Artificial Sequence
  Synthetic oligonucleotide: PDCD1-2335
ggggggaugggggaggagaa

SEQ ID NO: 17006 - RNA, 20 nt, Artificial Sequence
  Synthetic oligonucleotide: PDCD1-2350
gcagagacacagaggaggaa

SEQ ID NO: 17007 - RNA, 20 nt, Artificial Sequence
  Synthetic oligonucleotide: PDCD1-2124
ugccagggacugagagugaa

SEQ ID NO: 17008 - RNA, 20 nt, Artificial Sequence
  Synthetic oligonucleotide: PDCD1-2237
cugucccaggucagguugaa

SEQ ID NO: 17009 - RNA, 20 nt, Artificial Sequence
  Synthetic oligonucleotide: PDCD1-2113
agccacacagcucaggguaa

SEQ ID NO: 17010 - RNA, 20 nt, Artificial Sequence
  Synthetic oligonucleotide: PDCD1-2269
gggagagagagacagagaca

SEQ ID NO: 17011 - RNA, 20 nt, Artificial Sequence
  Synthetic oligonucleotide: PDCD1-2355
cugagcuggggagaccccca

SEQ ID NO: 17012 - RNA, 20 nt, Artificial Sequence
  Synthetic oligonucleotide: PDCD1-2322
gcagggaggcccggccccca

SEQ ID NO: 17013 - RNA, 20 nt, Artificial Sequence
  Synthetic oligonucleotide: PDCD1-2183
ggccuggcccuggcagccca

SEQ ID NO: 17014 - RNA, 20 nt, Artificial Sequence
  Synthetic oligonucleotide: PDCD1-2165
ggucaggugucccagagcca

SEQ ID NO: 17015 - RNA, 20 nt, Artificial Sequence
  Synthetic oligonucleotide: PDCD1-2119
aggggcagagcugggggcca

SEQ ID NO: 17016 - RNA, 20 nt, Artificial Sequence
  Synthetic oligonucleotide: PDCD1-2364
gggguagggcgugggggcca

SEQ ID NO: 17017 - RNA, 20 nt, Artificial Sequence
  Synthetic oligonucleotide: PDCD1-2102
caaagaggggacuugggcca

SEQ ID NO: 17018 - RNA, 20 nt, Artificial Sequence
  Synthetic oligonucleotide: PDCD1-2123
cagcaccccccgaccugcca

SEQ ID NO: 17019 - RNA, 20 nt, Artificial Sequence
  Synthetic oligonucleotide: PDCD1-2130
ccgggaccccugggcugcca

SEQ ID NO: 17020 - RNA, 20 nt, Artificial Sequence
  Synthetic oligonucleotide: PDCD1-2375
aggaagagggggcgggagca

SEQ ID NO: 17021 - RNA, 20 nt, Artificial Sequence
  Synthetic oligonucleotide: PDCD1-2318
ccacccaccuuccccaggca

SEQ ID NO: 17022 - RNA, 20 nt, Artificial Sequence
  Synthetic oligonucleotide: PDCD1-2111
gcccaaagccacacagcuca

SEQ ID NO: 17023 - RNA, 20 nt, Artificial Sequence
  Synthetic oligonucleotide: PDCD1-2284
gugggggucuccccagcuca

SEQ ID NO: 17024 - RNA, 20 nt, Artificial Sequence
  Synthetic oligonucleotide: PDCD1-2097
ugccugcccaggagcaaaga

SEQ ID NO: 17025 - RNA, 20 nt, Artificial Sequence
  Synthetic oligonucleotide: PDCD1-2370
cacguggauguggaggaaga

SEQ ID NO: 17026 - RNA, 20 nt, Artificial Sequence
  Synthetic oligonucleotide: PDCD1-2313
cccaggaaccugagcccaga

SEQ ID NO: 17027 - RNA, 20 nt, Artificial Sequence
  Synthetic oligonucleotide: PDCD1-2271
agacagggagacagaggaga

SEQ ID NO: 17028 - RNA, 20 nt, Artificial Sequence
  Synthetic oligonucleotide: PDCD1-2334
gggggggaugggggaggaga

SEQ ID NO: 17029 - RNA, 20 nt, Artificial Sequence
  Synthetic oligonucleotide: PDCD1-2323
aggcccggcccccagggaga

SEQ ID NO: 17030 - RNA, 20 nt, Artificial Sequence
  Synthetic oligonucleotide: PDCD1-2261
aggggguaggacuggggaga

SEQ ID NO: 17031 - RNA, 20 nt, Artificial Sequence
  Synthetic oligonucleotide: PDCD1-2383
cuccgccugagcaguggaga

SEQ ID NO: 17032 - RNA, 20 nt, Artificial Sequence
  Synthetic oligonucleotide: PDCD1-2092
gccccaaggaccggcugaga

SEQ ID NO: 17033 - RNA, 20 nt, Artificial Sequence
  Synthetic oligonucleotide: PDCD1-2187
gcccaggggucccggagcga

SEQ ID NO: 17034 - RNA, 20 nt, Artificial Sequence
  Synthetic oligonucleotide: PDCD1-112
aacugggcuggcggccagga

SEQ ID NO: 17035 - RNA, 20 nt, Artificial Sequence
  Synthetic oligonucleotide: PDCD1-2339
cccacccggcagccucagga

SEQ ID NO: 17036 - RNA, 20 nt, Artificial Sequence
  Synthetic oligonucleotide: PDCD1-2349
agcagagacacagaggagga

SEQ ID NO: 17037 - RNA, 20 nt, Artificial Sequence
  Synthetic oligonucleotide: PDCD1-2249
gaggcagugcugggggagga

SEQ ID NO: 17038 - RNA, 20 nt, Artificial Sequence
  Synthetic oligonucleotide: PDCD1-2253
ugggggaggaggggugagga

SEQ ID NO: 17039 - RNA, 20 nt, Artificial Sequence
  Synthetic oligonucleotide: PDCD1-2239
cccaggucagguugaaggga

SEQ ID NO: 17040 - RNA, 20 nt, Artificial Sequence
  Synthetic oligonucleotide: PDCD1-2329
ccccagggagauggggggga

SEQ ID NO: 17041 - RNA, 20 nt, Artificial Sequence
  Synthetic oligonucleotide: PDCD1-2267
acuggggagaggguggggga

SEQ ID NO: 17042 - RNA, 20 nt, Artificial Sequence
  Synthetic oligonucleotide: PDCD1-2303
cgggccucccugccugggga

SEQ ID NO: 17043 - RNA, 20 nt, Artificial Sequence
  Synthetic oligonucleotide: PDCD1-2169
cccagagccaggggucugga

SEQ ID NO: 17044 - RNA, 20 nt, Artificial Sequence
  Synthetic oligonucleotide: PDCD1-2191
cccggagcgaggggucugga

SEQ ID NO: 17045 - RNA, 20 nt, Artificial Sequence
  Synthetic oligonucleotide: PDCD1-2137
ugccagggacugagggugga

SEQ ID NO: 17046 - RNA, 20 nt, Artificial Sequence
  Synthetic oligonucleotide: PDCD1-2135
cccgaccugccagggacuga

SEQ ID NO: 17047 - RNA, 20 nt, Artificial Sequence
  Synthetic oligonucleotide: PDCD1-4464
agguuccugggcugcaguga

SEQ ID NO: 17048 - RNA, 20 nt, Artificial Sequence
  Synthetic oligonucleotide: PDCD1-2345
ggggcagcucgggcgggaua

SEQ ID NO: 17049 - RNA, 20 nt, Artificial Sequence
  Synthetic oligonucleotide: PDCD1-2112
aagccacacagcucagggua

SEQ ID NO: 17050 - RNA, 20 nt, Artificial Sequence
  Synthetic oligonucleotide: PDCD1-2359
ggggagacccccacggggua

SEQ ID NO: 17051 - RNA, 20 nt, Artificial Sequence
  Synthetic oligonucleotide: PDCD1-2356
ugagcuggggagacccccac

SEQ ID NO: 17052 - RNA, 20 nt, Artificial Sequence
  Synthetic oligonucleotide: PDCD1-102
uccaggcaugcagaucccac

SEQ ID NO: 17053 - RNA, 20 nt, Artificial Sequence
  Synthetic oligonucleotide: PDCD1-2365
ggguagggcgugggggccac

SEQ ID NO: 17054 - RNA, 20 nt, Artificial Sequence
  Synthetic oligonucleotide: PDCD1-2268
agggagagagagacagagac

SEQ ID NO: 17055 - RNA, 20 nt, Artificial Sequence
  Synthetic oligonucleotide: PDCD1-2257
gggugaggaggggguaggac

SEQ ID NO: 17056 - RNA, 20 nt, Artificial Sequence
  Synthetic oligonucleotide: PDCD1-2336
gagaagggccugcccccacc

SEQ ID NO: 17057 - RNA, 20 nt, Artificial Sequence
  Synthetic oligonucleotide: PDCD1-2380
acccucccuucaaccugacc

SEQ ID NO: 17058 - RNA, 20 nt, Artificial Sequence
  Synthetic oligonucleotide: PDCD1-2109
uggggcccagagaggaaccc

SEQ ID NO: 17059 - RNA, 20 nt, Artificial Sequence
  Synthetic oligonucleotide: PDCD1-2127
accccucgcuccgggacccc

SEQ ID NO: 17060 - RNA, 20 nt, Artificial Sequence
  Synthetic oligonucleotide: PDCD1-2321
ggcagggaggcccggccccc

SEQ ID NO: 17061 - RNA, 20 nt, Artificial Sequence
  Synthetic oligonucleotide: PDCD1-2209
cugggccccaacuccucccc

SEQ ID NO: 17062 - RNA, 20 nt, Artificial Sequence
  Synthetic oligonucleotide: PDCD1-2316
gggggccacccaccuucccc

SEQ ID NO: 17063 - RNA, 20 nt, Artificial Sequence
  Synthetic oligonucleotide: PDCD1-2182
gggccuggcccuggcagccc

SEQ ID NO: 17064 - RNA, 20 nt, Artificial Sequence
  Synthetic oligonucleotide: PDCD1-4465
cccaccccucacugcagccc

SEQ ID NO: 17065 - RNA, 20 nt, Artificial Sequence
  Synthetic oligonucleotide: PDCD1-103
ugcagaucccacaggcgccc

SEQ ID NO: 17066 - RNA, 20 nt, Artificial Sequence
  Synthetic oligonucleotide: PDCD1-2181
ugcugaggcgggccuggccc

SEQ ID NO: 17067 - RNA, 20 nt, Artificial Sequence
  Synthetic oligonucleotide: PDCD1-2095
gacagagguccugccugccc

SEQ ID NO: 17068 - RNA, 20 nt, Artificial Sequence
  Synthetic oligonucleotide: PDCD1-2294
ccccaucccccccaucuccc

SEQ ID NO: 17069 - RNA, 20 nt, Artificial Sequence
  Synthetic oligonucleotide: PDCD1-2170
gaccuuccacccucaguccc

SEQ ID NO: 17070 - RNA, 20 nt, Artificial Sequence
  Synthetic oligonucleotide: PDCD1-2192
gaccuuucacucucaguccc

SEQ ID NO: 17071 - RNA, 20 nt, Artificial Sequence
  Synthetic oligonucleotide: PDCD1-2234
agcggaagggaaacuguccc

SEQ ID NO: 17072 - RNA, 20 nt, Artificial Sequence
  Synthetic oligonucleotide: PDCD1-2164
cggucaggugucccagagcc

SEQ ID NO: 17073 - RNA, 20 nt, Artificial Sequence
  Synthetic oligonucleotide: PDCD1-2320
cuuccccaggcagggaggcc

SEQ ID NO: 17074 - RNA, 20 nt, Artificial Sequence
  Synthetic oligonucleotide: PDCD1-2131
accccugggcugccagggcc

SEQ ID NO: 17075 - RNA, 20 nt, Artificial Sequence
  Synthetic oligonucleotide: PDCD1-2180
ggggggugcugaggcgggcc

SEQ ID NO: 17076 - RNA, 20 nt, Artificial Sequence
  Synthetic oligonucleotide: PDCD1-2299
cccccaucucccugggggcc

SEQ ID NO: 17077 - RNA, 20 nt, Artificial Sequence
  Synthetic oligonucleotide: PDCD1-2101
gcaaagaggggacuugggcc

SEQ ID NO: 17078 - RNA, 20 nt, Artificial Sequence
  Synthetic oligonucleotide: PDCD1-127
gccugugggaucugcaugcc

SEQ ID NO: 17079 - RNA, 20 nt, Artificial Sequence
  Synthetic oligonucleotide: PDCD1-2122
acagcaccccccgaccugcc

SEQ ID NO: 17080 - RNA, 20 nt, Artificial Sequence
  Synthetic oligonucleotide: PDCD1-2132
ucagcaccccccgaccugcc

SEQ ID NO: 17081 - RNA, 20 nt, Artificial Sequence
  Synthetic oligonucleotide: PDCD1-2300
gggggccgggccucccugcc

SEQ ID NO: 17082 - RNA, 20 nt, Artificial Sequence
  Synthetic oligonucleotide: PDCD1-2288
cugccccuccugaggcugcc

SEQ ID NO: 17083 - RNA, 20 nt, Artificial Sequence
  Synthetic oligonucleotide: PDCD1-2129
uccgggaccccugggcugcc

SEQ ID NO: 17084 - RNA, 20 nt, Artificial Sequence
  Synthetic oligonucleotide: PDCD1-2766
cggagccucugggagccucc

SEQ ID NO: 17085 - RNA, 20 nt, Artificial Sequence
  Synthetic oligonucleotide: PDCD1-2126
cccuccagaccccucgcucc

SEQ ID NO: 17086 - RNA, 20 nt, Artificial Sequence
  Synthetic oligonucleotide: PDCD1-101
cacucugguggggcugcucc

SEQ ID NO: 17087 - RNA, 20 nt, Artificial Sequence
  Synthetic oligonucleotide: PDCD1-2210
ccaaguccccucuuugcucc

SEQ ID NO: 17088 - RNA, 20 nt, Artificial Sequence
  Synthetic oligonucleotide: PDCD1-2185
cccuggcagcccaggggucc

SEQ ID NO: 17089 - RNA, 20 nt, Artificial Sequence
  Synthetic oligonucleotide: PDCD1-2310
ccccucugggcucagguucc

SEQ ID NO: 17090 - RNA, 20 nt, Artificial Sequence
  Synthetic oligonucleotide: PDCD1-2214
gaccucuguccccucucagc

SEQ ID NO: 17091 - RNA, 20 nt, Artificial Sequence
  Synthetic oligonucleotide: PDCD1-2115
cucaggguaaggggcagagc

SEQ ID NO: 17092 - RNA, 20 nt, Artificial Sequence
  Synthetic oligonucleotide: PDCD1-2352
aggaggaaggggcccugagc

SEQ ID NO: 17093 - RNA, 20 nt, Artificial Sequence
  Synthetic oligonucleotide: PDCD1-2120
gcagagcugggggccaaggc

SEQ ID NO: 17094 - RNA, 20 nt, Artificial Sequence
  Synthetic oligonucleotide: PDCD1-2317
gccacccaccuuccccaggc

SEQ ID NO: 17095 - RNA, 20 nt, Artificial Sequence
  Synthetic oligonucleotide: PDCD1-2213
cucuuugcuccugggcaggc

SEQ ID NO: 17096 - RNA, 20 nt, Artificial Sequence
  Synthetic oligonucleotide: PDCD1-2179
aggucggggggugcugaggc

SEQ ID NO: 17097 - RNA, 20 nt, Artificial Sequence
  Synthetic oligonucleotide: PDCD1-2344
ucaggaggggcagcucgggc

SEQ ID NO: 17098 - RNA, 20 nt, Artificial Sequence
  Synthetic oligonucleotide: PDCD1-2379
agggggcgggagcaaggggc

SEQ ID NO: 17099 - RNA, 20 nt, Artificial Sequence
  Synthetic oligonucleotide: PDCD1-2374
gauguggaggaagagggggc

SEQ ID NO: 17100 - RNA, 20 nt, Artificial Sequence
  Synthetic oligonucleotide: PDCD1-2298
ccccccaucucccugggggc

SEQ ID NO: 17101 - RNA, 20 nt, Artificial Sequence
  Synthetic oligonucleotide: PDCD1-2293
ugaggcugccgggugggggc

SEQ ID NO: 17102 - RNA, 20 nt, Artificial Sequence
  Synthetic oligonucleotide: PDCD1-109
gggcggugcuacaacugggc

SEQ ID NO: 17103 - RNA, 20 nt, Artificial Sequence
  Synthetic oligonucleotide: PDCD1-2212
uccccucuuugcuccugggc

SEQ ID NO: 17104 - RNA, 20 nt, Artificial Sequence
  Synthetic oligonucleotide: PDCD1-2171
uuccacccucagucccuggc

SEQ ID NO: 17105 - RNA, 20 nt, Artificial Sequence
  Synthetic oligonucleotide: PDCD1-2193
uuucacucucagucccuggc

SEQ ID NO: 17106 - RNA, 20 nt, Artificial Sequence
  Synthetic oligonucleotide: PDCD1-2200
aggucggggggugcuguggc

SEQ ID NO: 17107 - RNA, 20 nt, Artificial Sequence
  Synthetic oligonucleotide: PDCD1-2287
gcugccccuccugaggcugc

SEQ ID NO: 17108 - RNA, 20 nt, Artificial Sequence
  Synthetic oligonucleotide: PDCD1-2243
gagagugacagaggcagugc

SEQ ID NO: 17109 - RNA, 20 nt, Artificial Sequence
  Synthetic oligonucleotide: PDCD1-2385
caguggagaaggcggcacuc

SEQ ID NO: 17110 - RNA, 20 nt, Artificial Sequence
  Synthetic oligonucleotide: PDCD1-2307
ggaagguggguggcccccuc

SEQ ID NO: 17111 - RNA, 20 nt, Artificial Sequence
  Synthetic oligonucleotide: PDCD1-2337
ugcccccacccggcagccuc

SEQ ID NO: 17112 - RNA, 20 nt, Artificial Sequence
  Synthetic oligonucleotide: PDCD1-2110
ugcccaaagccacacagcuc

SEQ ID NO: 17113 - RNA, 20 nt, Artificial Sequence
  Synthetic oligonucleotide: PDCD1-2283
cgugggggucuccccagcuc

SEQ ID NO: 17114 - RNA, 20 nt, Artificial Sequence
  Synthetic oligonucleotide: PDCD1-2342
agccucaggaggggcagcuc

SEQ ID NO: 17115 - RNA, 20 nt, Artificial Sequence
  Synthetic oligonucleotide: PDCD1-2125
ucccuccagaccccucgcuc

SEQ ID NO: 17116 - RNA, 20 nt, Artificial Sequence
  Synthetic oligonucleotide: PDCD1-2309
ggguggcccccucugggcuc

SEQ ID NO: 17117 - RNA, 20 nt, Artificial Sequence
  Synthetic oligonucleotide: PDCD1-2139
ucccuccagaccccuggcuc

SEQ ID NO: 17118 - RNA, 20 nt, Artificial Sequence
  Synthetic oligonucleotide: PDCD1-2228
ugccgccuucuccacugcuc

SEQ ID NO: 17119 - RNA, 20 nt, Artificial Sequence
  Synthetic oligonucleotide: PDCD1-2235
aagggaaacugucccagguc

SEQ ID NO: 17120 - RNA, 20 nt, Artificial Sequence
  Synthetic oligonucleotide: PDCD1-2173
cccucagucccuggcagguc

SEQ ID NO: 17121 - RNA, 20 nt, Artificial Sequence
  Synthetic oligonucleotide: PDCD1-2195
cucucagucccuggcagguc

SEQ ID NO: 17122 - RNA, 20 nt, Artificial Sequence
  Synthetic oligonucleotide: PDCD1-120
gguagguggggucggcgguc

SEQ ID NO: 17123 - RNA, 20 nt, Artificial Sequence
  Synthetic oligonucleotide: PDCD1-2167
gugucccagagccagggguc

SEQ ID NO: 17124 - RNA, 20 nt, Artificial Sequence
  Synthetic oligonucleotide: PDCD1-2096
cugccugcccaggagcaaag

SEQ ID NO: 17125 - RNA, 20 nt, Artificial Sequence
  Synthetic oligonucleotide: PDCD1-2377
gaagagggggcgggagcaag

SEQ ID NO: 17126 - RNA, 20 nt, Artificial Sequence
  Synthetic oligonucleotide: PDCD1-2351
cagagacacagaggaggaag

SEQ ID NO: 17127 - RNA, 20 nt, Artificial Sequence
  Synthetic oligonucleotide: PDCD1-2369
ccacguggauguggaggaag

SEQ ID NO: 17128 - RNA, 20 nt, Artificial Sequence
  Synthetic oligonucleotide: PDCD1-2114
gccacacagcucaggguaag

SEQ ID NO: 17129 - RNA, 20 nt, Artificial Sequence
  Synthetic oligonucleotide: PDCD1-2347
agcagugagcagagacacag

SEQ ID NO: 17130 - RNA, 20 nt, Artificial Sequence
  Synthetic oligonucleotide: PDCD1-2270
agacagagacagggagacag

SEQ ID NO: 17131 - RNA, 20 nt, Artificial Sequence
  Synthetic oligonucleotide: PDCD1-2094
gaccggcugagaggggacag

SEQ ID NO: 17132 - RNA, 20 nt, Artificial Sequence
  Synthetic oligonucleotide: PDCD1-2242
cacgugggcgagagugacag

SEQ ID NO: 17133 - RNA, 20 nt, Artificial Sequence
  Synthetic oligonucleotide: PDCD1-2184
gccuggcccuggcagcccag

SEQ ID NO: 17134 - RNA, 20 nt, Artificial Sequence
  Synthetic oligonucleotide: PDCD1-2312
gcccaggaaccugagcccag

SEQ ID NO: 17135 - RNA, 20 nt, Artificial Sequence
  Synthetic oligonucleotide: PDCD1-3004
ggcagccgggaggcucccag

SEQ ID NO: 17136 - RNA, 20 nt, Artificial Sequence
  Synthetic oligonucleotide: PDCD1-2166
gucaggugucccagagccag

SEQ ID NO: 17137 - RNA, 20 nt, Artificial Sequence
  Synthetic oligonucleotide: PDCD1-2103
aaagaggggacuugggccag

SEQ ID NO: 17138 - RNA, 20 nt, Artificial Sequence
  Synthetic oligonucleotide: PDCD1-2382
gcucaccuccgccugagcag

SEQ ID NO: 17139 - RNA, 20 nt, Artificial Sequence
  Synthetic oligonucleotide: PDCD1-2098
gccugcccaggagcaaagag

SEQ ID NO: 17140 - RNA, 20 nt, Artificial Sequence
  Synthetic oligonucleotide: PDCD1-2371
acguggauguggaggaagag

SEQ ID NO: 17141 - RNA, 20 nt, Artificial Sequence
  Synthetic oligonucleotide: PDCD1-2314
ccaggaaccugagcccagag

SEQ ID NO: 17142 - RNA, 20 nt, Artificial Sequence
  Synthetic oligonucleotide: PDCD1-2108
ggaggaguuggggcccagag

SEQ ID NO: 17143 - RNA, 20 nt, Artificial Sequence
  Synthetic oligonucleotide: PDCD1-2093
ccccaaggaccggcugagag

SEQ ID NO: 17144 - RNA, 20 nt, Artificial Sequence
  Synthetic oligonucleotide: PDCD1-2188
cccaggggucccggagcgag

SEQ ID NO: 17145 - RNA, 20 nt, Artificial Sequence
  Synthetic oligonucleotide: PDCD1-2340
ccacccggcagccucaggag

SEQ ID NO: 17146 - RNA, 20 nt, Artificial Sequence
  Synthetic oligonucleotide: PDCD1-2250
aggcagugcugggggaggag

SEQ ID NO: 17147 - RNA, 20 nt, Artificial Sequence
  Synthetic oligonucleotide: PDCD1-2254
gggggaggaggggugaggag

SEQ ID NO: 17148 - RNA, 20 nt, Artificial Sequence
  Synthetic oligonucleotide: PDCD1-2260
gaggggguaggacuggggag

SEQ ID NO: 17149 - RNA, 20 nt, Artificial Sequence
  Synthetic oligonucleotide: PDCD1-3001
aggcuccgacagaaugggag

SEQ ID NO: 17150 - RNA, 20 nt, Artificial Sequence
  Synthetic oligonucleotide: PDCD1-2091
agccccaaggaccggcugag

SEQ ID NO: 17151 - RNA, 20 nt, Artificial Sequence
  Synthetic oligonucleotide: PDCD1-4466
gguuccugggcugcagugag

SEQ ID NO: 17152 - RNA, 20 nt, Artificial Sequence
  Synthetic oligonucleotide: PDCD1-2231
acugcucaggcggaggugag

SEQ ID NO: 17153 - RNA, 20 nt, Artificial Sequence
  Synthetic oligonucleotide: PDCD1-2357
gagcuggggagacccccacg

SEQ ID NO: 17154 - RNA, 20 nt, Artificial Sequence
  Synthetic oligonucleotide: PDCD1-2240
ccucuuccuccacauccacg

SEQ ID NO: 17155 - RNA, 20 nt, Artificial Sequence
  Synthetic oligonucleotide: PDCD1-2279
ggcccccacgcccuaccccg

SEQ ID NO: 17156 - RNA, 20 nt, Artificial Sequence
  Synthetic oligonucleotide: PDCD1-2278
auggggaggaggugggcccg

SEQ ID NO: 17157 - RNA, 20 nt, Artificial Sequence
  Synthetic oligonucleotide: PDCD1-2186
agcccaggggucccggagcg

SEQ ID NO: 17158 - RNA, 20 nt, Artificial Sequence
  Synthetic oligonucleotide: PDCD1-2360
gacccccacgggguagggcg

SEQ ID NO: 17159 - RNA, 20 nt, Artificial Sequence
  Synthetic oligonucleotide: PDCD1-2174
ccucagucccuggcaggucg

SEQ ID NO: 17160 - RNA, 20 nt, Artificial Sequence
  Synthetic oligonucleotide: PDCD1-2196
ucucagucccuggcaggucg

SEQ ID NO: 17161 - RNA, 20 nt, Artificial Sequence
  Synthetic oligonucleotide: PDCD1-2384
cgccugagcaguggagaagg

SEQ ID NO: 17162 - RNA, 20 nt, Artificial Sequence
  Synthetic oligonucleotide: PDCD1-2304
gccucccugccuggggaagg

SEQ ID NO: 17163 - RNA, 20 nt, Artificial Sequence
  Synthetic oligonucleotide: PDCD1-2338
ccccacccggcagccucagg

SEQ ID NO: 17164 - RNA, 20 nt, Artificial Sequence
  Synthetic oligonucleotide: PDCD1-2229
cgccuucuccacugcucagg

SEQ ID NO: 17165 - RNA, 20 nt, Artificial Sequence
  Synthetic oligonucleotide: PDCD1-2372
cguggauguggaggaagagg

SEQ ID NO: 17166 - RNA, 20 nt, Artificial Sequence
  Synthetic oligonucleotide: PDCD1-2348
agugagcagagacacagagg

SEQ ID NO: 17167 - RNA, 20 nt, Artificial Sequence
  Synthetic oligonucleotide: PDCD1-2315
caggaaccugagcccagagg

SEQ ID NO: 17168 - RNA, 20 nt, Artificial Sequence
  Synthetic oligonucleotide: PDCD1-2276
cagaggagauggggaggagg

SEQ ID NO: 17169 - RNA, 20 nt, Artificial Sequence
  Synthetic oligonucleotide: PDCD1-2255
ggggaggaggggugaggagg

SEQ ID NO: 17170 - RNA, 20 nt, Artificial Sequence
  Synthetic oligonucleotide: PDCD1-2248
agaggcagugcugggggagg

SEQ ID NO: 17171 - RNA, 20 nt, Artificial Sequence
  Synthetic oligonucleotide: PDCD1-2275
agacagaggagauggggagg

SEQ ID NO: 17172 - RNA, 20 nt, Artificial Sequence
  Synthetic oligonucleotide: PDCD1-2178
caggucggggggugcugagg

SEQ ID NO: 17173 - RNA, 20 nt, Artificial Sequence
  Synthetic oligonucleotide: PDCD1-2252
cugggggaggaggggugagg

SEQ ID NO: 17174 - RNA, 20 nt, Artificial Sequence
  Synthetic oligonucleotide: PDCD1-115
caggaugguucuuagguagg

SEQ ID NO: 17175 - RNA, 20 nt, Artificial Sequence
  Synthetic oligonucleotide: PDCD1-2230
cuucuccacugcucaggcgg

SEQ ID NO: 17176 - RNA, 20 nt, Artificial Sequence
  Synthetic oligonucleotide: PDCD1-2175
cucagucccuggcaggucgg

SEQ ID NO: 17177 - RNA, 20 nt, Artificial Sequence
  Synthetic oligonucleotide: PDCD1-119
ucuuagguagguggggucgg

SEQ ID NO: 17178 - RNA, 20 nt, Artificial Sequence
  Synthetic oligonucleotide: PDCD1-2238
ucccaggucagguugaaggg

SEQ ID NO: 17179 - RNA, 20 nt, Artificial Sequence
  Synthetic oligonucleotide: PDCD1-2319
cccaccuuccccaggcaggg

SEQ ID NO: 17180 - RNA, 20 nt, Artificial Sequence
  Synthetic oligonucleotide: PDCD1-2262
ggguaggacuggggagaggg

SEQ ID NO: 17181 - RNA, 20 nt, Artificial Sequence
  Synthetic oligonucleotide: PDCD1-2136
gaccugccagggacugaggg

SEQ ID NO: 17182 - RNA, 20 nt, Artificial Sequence
  Synthetic oligonucleotide: PDCD1-3005
agaggcugugggcagccggg

SEQ ID NO: 17183 - RNA, 20 nt, Artificial Sequence
  Synthetic oligonucleotide: PDCD1-2289
ccccuccugaggcugccggg

SEQ ID NO: 17184 - RNA, 20 nt, Artificial Sequence
  Synthetic oligonucleotide: PDCD1-2343
cucaggaggggcagcucggg

SEQ ID NO: 17185 - RNA, 20 nt, Artificial Sequence
  Synthetic oligonucleotide: PDCD1-2176
ucagucccuggcaggucggg

SEQ ID NO: 17186 - RNA, 20 nt, Artificial Sequence
  Synthetic oligonucleotide: PDCD1-2378
gagggggcgggagcaagggg

SEQ ID NO: 17187 - RNA, 20 nt, Artificial Sequence
  Synthetic oligonucleotide: PDCD1-2104
gaggggacuugggccagggg

SEQ ID NO: 17188 - RNA, 20 nt, Artificial Sequence
  Synthetic oligonucleotide: PDCD1-4467
uccugggcugcagugagggg

SEQ ID NO: 17189 - RNA, 20 nt, Artificial Sequence
  Synthetic oligonucleotide: PDCD1-2373
ggauguggaggaagaggggg

SEQ ID NO: 17190 - RNA, 20 nt, Artificial Sequence
  Synthetic oligonucleotide: PDCD1-2333
ggagaugggggggauggggg

SEQ ID NO: 17191 - RNA, 20 nt, Artificial Sequence
  Synthetic oligonucleotide: PDCD1-2247
gacagaggcagugcuggggg

SEQ ID NO: 17192 - RNA, 20 nt, Artificial Sequence
  Synthetic oligonucleotide: PDCD1-2266
gacuggggagaggguggggg

SEQ ID NO: 17193 - RNA, 20 nt, Artificial Sequence
  Synthetic oligonucleotide: PDCD1-2274
gggagacagaggagaugggg

SEQ ID NO: 17194 - RNA, 20 nt, Artificial Sequence
  Synthetic oligonucleotide: PDCD1-2328
cggcccccagggagaugggg

SEQ ID NO: 17195 - RNA, 20 nt, Artificial Sequence
  Synthetic oligonucleotide: PDCD1-2327
ccggcccccagggagauggg

SEQ ID NO: 17196 - RNA, 20 nt, Artificial Sequence
  Synthetic oligonucleotide: PDCD1-106
gcccuggccagucgucuggg

SEQ ID NO: 17197 - RNA, 20 nt, Artificial Sequence
  Synthetic oligonucleotide: PDCD1-2306
cccugccuggggaagguggg

SEQ ID NO: 17198 - RNA, 20 nt, Artificial Sequence
  Synthetic oligonucleotide: PDCD1-2326
cccggcccccagggagaugg

SEQ ID NO: 17199 - RNA, 20 nt, Artificial Sequence
  Synthetic oligonucleotide: PDCD1-2332
cagggagaugggggggaugg

SEQ ID NO: 17200 - RNA, 20 nt, Artificial Sequence
  Synthetic oligonucleotide: PDCD1-2297
caucccccccaucucccugg

SEQ ID NO: 17201 - RNA, 20 nt, Artificial Sequence
  Synthetic oligonucleotide: PDCD1-2118
aggguaaggggcagagcugg

SEQ ID NO: 17202 - RNA, 20 nt, Artificial Sequence
  Synthetic oligonucleotide: PDCD1-110
cggugcuacaacugggcugg

SEQ ID NO: 17203 - RNA, 20 nt, Artificial Sequence
  Synthetic oligonucleotide: PDCD1-2246
agugacagaggcagugcugg

SEQ ID NO: 17204 - RNA, 20 nt, Artificial Sequence
  Synthetic oligonucleotide: PDCD1-2386
uggagaaggcggcacucugg

SEQ ID NO: 17205 - RNA, 20 nt, Artificial Sequence
  Synthetic oligonucleotide: PDCD1-2168
ucccagagccaggggucugg

SEQ ID NO: 17206 - RNA, 20 nt, Artificial Sequence
  Synthetic oligonucleotide: PDCD1-2190
ucccggagcgaggggucugg

SEQ ID NO: 17207 - RNA, 20 nt, Artificial Sequence
  Synthetic oligonucleotide: PDCD1-2282
ccccacgcccuaccccgugg

SEQ ID NO: 17208 - RNA, 20 nt, Artificial Sequence
  Synthetic oligonucleotide: PDCD1-2363
ccccacgggguagggcgugg

SEQ ID NO: 17209 - RNA, 20 nt, Artificial Sequence
  Synthetic oligonucleotide: PDCD1-2265
uaggacuggggagagggugg

SEQ ID NO: 17210 - RNA, 20 nt, Artificial Sequence
  Synthetic oligonucleotide: PDCD1-2292
cuccugaggcugccgggugg

SEQ ID NO: 17211 - RNA, 20 nt, Artificial Sequence
  Synthetic oligonucleotide: PDCD1-2368
ucucgcccacguggaugugg

SEQ ID NO: 17212 - RNA, 20 nt, Artificial Sequence
  Synthetic oligonucleotide: PDCD1-2273
acagggagacagaggagaug

SEQ ID NO: 17213 - RNA, 20 nt, Artificial Sequence
  Synthetic oligonucleotide: PDCD1-2325
gcccggcccccagggagaug

SEQ ID NO: 17214 - RNA, 20 nt, Artificial Sequence
  Synthetic oligonucleotide: PDCD1-2331
ccagggagaugggggggaug

SEQ ID NO: 17215 - RNA, 20 nt, Artificial Sequence
  Synthetic oligonucleotide: PDCD1-2259
gugaggaggggguaggacug

SEQ ID NO: 17216 - RNA, 20 nt, Artificial Sequence
  Synthetic oligonucleotide: PDCD1-2134
ccccgaccugccagggacug

SEQ ID NO: 17217 - RNA, 20 nt, Artificial Sequence
  Synthetic oligonucleotide: PDCD1-2296
ccaucccccccaucucccug

SEQ ID NO: 17218 - RNA, 20 nt, Artificial Sequence
  Synthetic oligonucleotide: PDCD1-125
acgacuggccagggcgccug

SEQ ID NO: 17219 - RNA, 20 nt, Artificial Sequence
  Synthetic oligonucleotide: PDCD1-2302
gggccgggccucccugccug

SEQ ID NO: 17220 - RNA, 20 nt, Artificial Sequence
  Synthetic oligonucleotide: PDCD1-2286
cgcccgagcugccccuccug

SEQ ID NO: 17221 - RNA, 20 nt, Artificial Sequence
  Synthetic oligonucleotide: PDCD1-2117
caggguaaggggcagagcug

SEQ ID NO: 17222 - RNA, 20 nt, Artificial Sequence
  Synthetic oligonucleotide: PDCD1-2354
gaggaaggggcccugagcug

SEQ ID NO: 17223 - RNA, 20 nt, Artificial Sequence
  Synthetic oligonucleotide: PDCD1-2285
ugugucucugcucacugcug

SEQ ID NO: 17224 - RNA, 20 nt, Artificial Sequence
  Synthetic oligonucleotide: PDCD1-2245
gagugacagaggcagugcug

SEQ ID NO: 17225 - RNA, 20 nt, Artificial Sequence
  Synthetic oligonucleotide: PDCD1-4468
cagguuccugggcugcagug

SEQ ID NO: 17226 - RNA, 20 nt, Artificial Sequence
  Synthetic oligonucleotide: PDCD1-2281
cccccacgcccuaccccgug

SEQ ID NO: 17227 - RNA, 20 nt, Artificial Sequence
  Synthetic oligonucleotide: PDCD1-2362
cccccacgggguagggcgug

SEQ ID NO: 17228 - RNA, 20 nt, Artificial Sequence
  Synthetic oligonucleotide: PDCD1-2264
guaggacuggggagagggug

SEQ ID NO: 17229 - RNA, 20 nt, Artificial Sequence
  Synthetic oligonucleotide: PDCD1-2291
ccuccugaggcugccgggug

SEQ ID NO: 17230 - RNA, 20 nt, Artificial Sequence
  Synthetic oligonucleotide: PDCD1-2251
gugcugggggaggaggggug

SEQ ID NO: 17231 - RNA, 20 nt, Artificial Sequence
  Synthetic oligonucleotide: PDCD1-2202
gccccuuacccugagcugug

SEQ ID NO: 17232 - RNA, 20 nt, Artificial Sequence
  Synthetic oligonucleotide: PDCD1-2217
ccccucucagccgguccuug

SEQ ID NO: 17233 - RNA, 20 nt, Artificial Sequence
  Synthetic oligonucleotide: PDCD1-2107
uugggccaggggaggaguug

SEQ ID NO: 17234 - RNA, 20 nt, Artificial Sequence
  Synthetic oligonucleotide: PDCD1-2272
gacagggagacagaggagau

SEQ ID NO: 17235 - RNA, 20 nt, Artificial Sequence
  Synthetic oligonucleotide: PDCD1-2324
ggcccggcccccagggagau

SEQ ID NO: 17236 - RNA, 20 nt, Artificial Sequence
  Synthetic oligonucleotide: PDCD1-2330
cccagggagaugggggggau

SEQ ID NO: 17237 - RNA, 20 nt, Artificial Sequence
  Synthetic oligonucleotide: PDCD1-2258
ggugaggaggggguaggacu

SEQ ID NO: 17238 - RNA, 20 nt, Artificial Sequence
  Synthetic oligonucleotide: PDCD1-2099
ccaggagcaaagaggggacu

SEQ ID NO: 17239 - RNA, 20 nt, Artificial Sequence
  Synthetic oligonucleotide: PDCD1-2381
cccucccuucaaccugaccu

SEQ ID NO: 17240 - RNA, 20 nt, Artificial Sequence
  Synthetic oligonucleotide: PDCD1-2128
ccccucgcuccgggaccccu

SEQ ID NO: 17241 - RNA, 20 nt, Artificial Sequence
  Synthetic oligonucleotide: PDCD1-2295
cccaucccccccaucucccu

SEQ ID NO: 17242 - RNA, 20 nt, Artificial Sequence
  Synthetic oligonucleotide: PDCD1-2201
ugcuguggcaggcccagccu

SEQ ID NO: 17243 - RNA, 20 nt, Artificial Sequence
  Synthetic oligonucleotide: PDCD1-2301
ggggccgggccucccugccu

SEQ ID NO: 17244 - RNA, 20 nt, Artificial Sequence
  Synthetic oligonucleotide: PDCD1-2211
caaguccccucuuugcuccu

SEQ ID NO: 17245 - RNA, 20 nt, Artificial Sequence
  Synthetic oligonucleotide: PDCD1-2215
guccccucucagccgguccu

SEQ ID NO: 17246 - RNA, 20 nt, Artificial Sequence
  Synthetic oligonucleotide: PDCD1-2311
cccucugggcucagguuccu

SEQ ID NO: 17247 - RNA, 20 nt, Artificial Sequence
  Synthetic oligonucleotide: PDCD1-2341
cagccucaggaggggcagcu

SEQ ID NO: 17248 - RNA, 20 nt, Artificial Sequence
  Synthetic oligonucleotide: PDCD1-2116
ucaggguaaggggcagagcu

SEQ ID NO: 17249 - RNA, 20 nt, Artificial Sequence
  Synthetic oligonucleotide: PDCD1-2353
ggaggaaggggcccugagcu

SEQ ID NO: 17250 - RNA, 20 nt, Artificial Sequence
  Synthetic oligonucleotide: PDCD1-2121
cagagcugggggccaaggcu

SEQ ID NO: 17251 - RNA, 20 nt, Artificial Sequence
  Synthetic oligonucleotide: PDCD1-2244
agagugacagaggcagugcu

SEQ ID NO: 17252 - RNA, 20 nt, Artificial Sequence
  Synthetic oligonucleotide: PDCD1-2308
gaagguggguggcccccucu

SEQ ID NO: 17253 - RNA, 20 nt, Artificial Sequence
  Synthetic oligonucleotide: PDCD1-2140
cccuccagaccccuggcucu

SEQ ID NO: 17254 - RNA, 20 nt, Artificial Sequence
  Synthetic oligonucleotide: PDCD1-2208
gaacuccuggguuccucucu

SEQ ID NO: 17255 - RNA, 20 nt, Artificial Sequence
  Synthetic oligonucleotide: PDCD1-2105
acuugggccaggggaggagu

SEQ ID NO: 17256 - RNA, 20 nt, Artificial Sequence
  Synthetic oligonucleotide: PDCD1-3000
ggcuccgacagaaugggagu

SEQ ID NO: 17257 - RNA, 20 nt, Artificial Sequence
  Synthetic oligonucleotide: PDCD1-2241
cucuuccuccacauccacgu

SEQ ID NO: 17258 - RNA, 20 nt, Artificial Sequence
  Synthetic oligonucleotide: PDCD1-2280
gcccccacgcccuaccccgu

SEQ ID NO: 17259 - RNA, 20 nt, Artificial Sequence
  Synthetic oligonucleotide: PDCD1-2361
acccccacgggguagggcgu

SEQ ID NO: 17260 - RNA, 20 nt, Artificial Sequence
  Synthetic oligonucleotide: PDCD1-2305
ccucccugccuggggaaggu

SEQ ID NO: 17261 - RNA, 20 nt, Artificial Sequence
  Synthetic oligonucleotide: PDCD1-2172
acccucagucccuggcaggu

SEQ ID NO: 17262 - RNA, 20 nt, Artificial Sequence
  Synthetic oligonucleotide: PDCD1-2194
acucucagucccuggcaggu

SEQ ID NO: 17263 - RNA, 20 nt, Artificial Sequence
  Synthetic oligonucleotide: PDCD1-2277
agaggagauggggaggaggu

SEQ ID NO: 17264 - RNA, 20 nt, Artificial Sequence
  Synthetic oligonucleotide: PDCD1-2263
gguaggacuggggagagggu

SEQ ID NO: 17265 - RNA, 20 nt, Artificial Sequence
  Synthetic oligonucleotide: PDCD1-2290
cccuccugaggcugccgggu

SEQ ID NO: 17266 - RNA, 20 nt, Artificial Sequence
  Synthetic oligonucleotide: PDCD1-4469
ccugggcugcagugaggggu

SEQ ID NO: 17267 - RNA, 20 nt, Artificial Sequence
  Synthetic oligonucleotide: PDCD1-2358
uggggagacccccacggggu

SEQ ID NO: 17268 - RNA, 20 nt, Artificial Sequence
  Synthetic oligonucleotide: PDCD1-2256
aggaggggugaggagggggu

SEQ ID NO: 17269 - RNA, 20 nt, Artificial Sequence
  Synthetic oligonucleotide: PDCD1-2387
ggagaaggcggcacucuggu

SEQ ID NO: 17270 - RNA, 20 nt, Artificial Sequence
  Synthetic oligonucleotide: PDCD1-2763
caaccccacucccauucugu

SEQ ID NO: 17271 - RNA, 20 nt, Artificial Sequence
  Synthetic oligonucleotide: PDCD1-2100
caggagcaaagaggggacuu

SEQ ID NO: 17272 - RNA, 20 nt, Artificial Sequence
  Synthetic oligonucleotide: PDCD1-2216
uccccucucagccgguccuu

SEQ ID NO: 17273 - RNA, 20 nt, Artificial Sequence
  Synthetic oligonucleotide: PDCD1-2203
uacccugagcuguguggcuu

SEQ ID NO: 17274 - RNA, 20 nt, Artificial Sequence
  Synthetic oligonucleotide: PDCD1-113
uggcggccaggaugguucuu

SEQ ID NO: 17275 - RNA, 20 nt, Artificial Sequence
  Synthetic oligonucleotide: PDCD1-2106
cuugggccaggggaggaguu

SEQ ID NO: 17276 - RNA, 20 nt, Artificial Sequence
  Synthetic oligonucleotide: PDCD1-2204
acccugagcuguguggcuuu

SEQ ID NO: 17277 - RNA, 17 nt, Artificial Sequence
  Synthetic oligonucleotide: PDCD1-2942
gcccggcguuugugaaa

SEQ ID NO: 17278 - RNA, 17 nt, Artificial Sequence
  Synthetic oligonucleotide: PDCD1-2943
cauuuuauuacagcgaa

SEQ ID NO: 17279 - RNA, 17 nt, Artificial Sequence
  Synthetic oligonucleotide: PDCD1-3144
accugugccccagcgaa

SEQ ID NO: 17280 - RNA, 17 nt, Artificial Sequence
  Synthetic oligonucleotide: PDCD1-3165
gaaggucaaggcuggaa

SEQ ID NO: 17281 - RNA, 17 nt, Artificial Sequence
  Synthetic oligonucleotide: PDCD1-2861
cacggauggucugaaca

SEQ ID NO: 17282 - RNA, 17 nt, Artificial Sequence
  Synthetic oligonucleotide: PDCD1-2878
ccaagguuagucccaca

SEQ ID NO: 17283 - RNA, 17 nt, Artificial Sequence
  Synthetic oligonucleotide: PDCD1-3154
gugugaggccauccaca

SEQ ID NO: 17284 - RNA, 17 nt, Artificial Sequence
  Synthetic oligonucleotide: PDCD1-3160
cuguugcaggcaucaca

SEQ ID NO: 17285 - RNA, 17 nt, Artificial Sequence
  Synthetic oligonucleotide: PDCD1-3186
gcucagcacagaauaca

SEQ ID NO: 17286 - RNA, 17 nt, Artificial Sequence
  Synthetic oligonucleotide: PDCD1-2906
uggauggccucacacca

SEQ ID NO: 17287 - RNA, 17 nt, Artificial Sequence
  Synthetic oligonucleotide: PDCD1-2883
aacucgagugaggacca

SEQ ID NO: 17288 - RNA, 17 nt, Artificial Sequence
  Synthetic oligonucleotide: PDCD1-2858
ggccaaggccuccccca

SEQ ID NO: 17289 - RNA, 17 nt, Artificial Sequence
  Synthetic oligonucleotide: PDCD1-2390
gccacgcagacucccca

SEQ ID NO: 17290 - RNA, 17 nt, Artificial Sequence
  Synthetic oligonucleotide: PDCD1-2849
uguacacagagggccca

SEQ ID NO: 17291 - RNA, 17 nt, Artificial Sequence
  Synthetic oligonucleotide: PDCD1-2877
uugacgucguaaagcca

SEQ ID NO: 17292 - RNA, 17 nt, Artificial Sequence
  Synthetic oligonucleotide: PDCD1-3148
ggggagccgauuagcca

SEQ ID NO: 17293 - RNA, 17 nt, Artificial Sequence
  Synthetic oligonucleotide: PDCD1-2857
ccgggagagugaggcca

SEQ ID NO: 17294 - RNA, 17 nt, Artificial Sequence
  Synthetic oligonucleotide: PDCD1-2391
cagacuccccacggcca

SEQ ID NO: 17295 - RNA, 17 nt, Artificial Sequence
  Synthetic oligonucleotide: PDCD1-3156
aucuggaacuguggcca

SEQ ID NO: 17296 - RNA, 17 nt, Artificial Sequence
  Synthetic oligonucleotide: PDCD1-3080
ugcaccuggggaugcca

SEQ ID NO: 17297 - RNA, 17 nt, Artificial Sequence
  Synthetic oligonucleotide: PDCD1-2927
ccagcccacucgugcca

SEQ ID NO: 17298 - RNA, 17 nt, Artificial Sequence
  Synthetic oligonucleotide: PDCD1-2902
ugaaugacaacugucca

SEQ ID NO: 17299 - RNA, 17 nt, Artificial Sequence
  Synthetic oligonucleotide: PDCD1-3101
ucucugcccagauucca

SEQ ID NO: 17300 - RNA, 17 nt, Artificial Sequence
  Synthetic oligonucleotide: PDCD1-3133
ggcaccugcccccagca

SEQ ID NO: 17301 - RNA, 17 nt, Artificial Sequence
  Synthetic oligonucleotide: PDCD1-3173
gagugggcuggagggca

SEQ ID NO: 17302 - RNA, 17 nt, Artificial Sequence
  Synthetic oligonucleotide: PDCD1-2886
ccaaggaugccugggca

SEQ ID NO: 17303 - RNA, 17 nt, Artificial Sequence
  Synthetic oligonucleotide: PDCD1-2919
gggcuggggcgguggca

SEQ ID NO: 17304 - RNA, 17 nt, Artificial Sequence
  Synthetic oligonucleotide: PDCD1-3168
cccggggaagaagguca

SEQ ID NO: 17305 - RNA, 17 nt, Artificial Sequence
  Synthetic oligonucleotide: PDCD1-2850
cagagggcccaggguca

SEQ ID NO: 17306 - RNA, 17 nt, Artificial Sequence
  Synthetic oligonucleotide: PDCD1-2933
caggguggggugguuca

SEQ ID NO: 17307 - RNA, 17 nt, Artificial Sequence
  Synthetic oligonucleotide: PDCD1-3169
cagggccccggggaaga

SEQ ID NO: 17308 - RNA, 17 nt, Artificial Sequence
  Synthetic oligonucleotide: PDCD1-2847
gucacaguguacacaga

SEQ ID NO: 17309 - RNA, 17 nt, Artificial Sequence
  Synthetic oligonucleotide: PDCD1-2841
ggccagccgggcacaga

SEQ ID NO: 17310 - RNA, 17 nt, Artificial Sequence
  Synthetic oligonucleotide: PDCD1-2837
ggcuggcugggcacaga

SEQ ID NO: 17311 - RNA, 17 nt, Artificial Sequence
  Synthetic oligonucleotide: PDCD1-3091
cccggaucgaggagaga

SEQ ID NO: 17312 - RNA, 17 nt, Artificial Sequence
  Synthetic oligonucleotide: PDCD1-3145
caccugugccccagcga

SEQ ID NO: 17313 - RNA, 17 nt, Artificial Sequence
  Synthetic oligonucleotide: PDCD1-3117
ucgaguuuuccuaagga

SEQ ID NO: 17314 - RNA, 17 nt, Artificial Sequence
  Synthetic oligonucleotide: PDCD1-2873
acaauccccacccagga

SEQ ID NO: 17315 - RNA, 17 nt, Artificial Sequence
  Synthetic oligonucleotide: PDCD1-2859
aaggccucccccacgga

SEQ ID NO: 17316 - RNA, 17 nt, Artificial Sequence
  Synthetic oligonucleotide: PDCD1-3137
agggggaugggccggga

SEQ ID NO: 17317 - RNA, 17 nt, Artificial Sequence
  Synthetic oligonucleotide: PDCD1-3141
gccccagcgaaggggga

SEQ ID NO: 17318 - RNA, 17 nt, Artificial Sequence
  Synthetic oligonucleotide: PDCD1-3166
agaaggucaaggcugga

SEQ ID NO: 17319 - RNA, 17 nt, Artificial Sequence
  Synthetic oligonucleotide: PDCD1-3175
ggcacgagugggcugga

SEQ ID NO: 17320 - RNA, 17 nt, Artificial Sequence
  Synthetic oligonucleotide: PDCD1-2905
agcuuccaccuugugga

SEQ ID NO: 17321 - RNA, 17 nt, Artificial Sequence
  Synthetic oligonucleotide: PDCD1-2907
ugccugcaacagccuga

SEQ ID NO: 17322 - RNA, 17 nt, Artificial Sequence
  Synthetic oligonucleotide: PDCD1-3151
caagguggaagcuuuga

SEQ ID NO: 17323 - RNA, 17 nt, Artificial Sequence
  Synthetic oligonucleotide: PDCD1-3118
ucacucgaguuuuccua

SEQ ID NO: 17324 - RNA, 17 nt, Artificial Sequence
  Synthetic oligonucleotide: PDCD1-3146
acaguugucauucagua

SEQ ID NO: 17325 - RNA, 17 nt, Artificial Sequence
  Synthetic oligonucleotide: PDCD1-2944
uacagcgaauggaaaac

SEQ ID NO: 17326 - RNA, 17 nt, Artificial Sequence
  Synthetic oligonucleotide: PDCD1-2875
acuguccucacucgaac

SEQ ID NO: 17327 - RNA, 17 nt, Artificial Sequence
  Synthetic oligonucleotide: PDCD1-2860
ccacggauggucugaac

SEQ ID NO: 17328 - RNA, 17 nt, Artificial Sequence
  Synthetic oligonucleotide: PDCD1-3181
cagccaggcccaggcac

SEQ ID NO: 17329 - RNA, 17 nt, Artificial Sequence
  Synthetic oligonucleotide: PDCD1-2901
ccccuucgcuggggcac

SEQ ID NO: 17330 - RNA, 17 nt, Artificial Sequence
  Synthetic oligonucleotide: PDCD1-2851
agagggcccagggucac

SEQ ID NO: 17331 - RNA, 17 nt, Artificial Sequence
  Synthetic oligonucleotide: PDCD1-2908
gccugcaacagccugac

SEQ ID NO: 17332 - RNA, 17 nt, Artificial Sequence
  Synthetic oligonucleotide: PDCD1-3083
cccagccagccugcacc

SEQ ID NO: 17333 - RNA, 17 nt, Artificial Sequence
  Synthetic oligonucleotide: PDCD1-3180
ccugaaccaccccaccc

SEQ ID NO: 17334 - RNA, 17 nt, Artificial Sequence
  Synthetic oligonucleotide: PDCD1-2871
gggcacaauccccaccc

SEQ ID NO: 17335 - RNA, 17 nt, Artificial Sequence
  Synthetic oligonucleotide: PDCD1-2868
aaucugggcagagaccc

SEQ ID NO: 17336 - RNA, 17 nt, Artificial Sequence
  Synthetic oligonucleotide: PDCD1-3088
ugggcugcccgugaccc

SEQ ID NO: 17337 - RNA, 17 nt, Artificial Sequence
  Synthetic oligonucleotide: PDCD1-3171
cuggagggcagggcccc

SEQ ID NO: 17338 - RNA, 17 nt, Artificial Sequence
  Synthetic oligonucleotide: PDCD1-2831
caggccuuggcaucccc

SEQ ID NO: 17339 - RNA, 17 nt, Artificial Sequence
  Synthetic oligonucleotide: PDCD1-2924
ccuugaccuucuucccc

SEQ ID NO: 17340 - RNA, 17 nt, Artificial Sequence
  Synthetic oligonucleotide: PDCD1-2852
agggucacgggcagccc

SEQ ID NO: 17341 - RNA, 17 nt, Artificial Sequence
  Synthetic oligonucleotide: PDCD1-2865
gggcucggggagagccc

SEQ ID NO: 17342 - RNA, 17 nt, Artificial Sequence
  Synthetic oligonucleotide: PDCD1-3182
ggccgccagccaggccc

SEQ ID NO: 17343 - RNA, 17 nt, Artificial Sequence
  Synthetic oligonucleotide: PDCD1-3172
gcuggagggcagggccc

SEQ ID NO: 17344 - RNA, 17 nt, Artificial Sequence
  Synthetic oligonucleotide: PDCD1-2848
guguacacagagggccc

SEQ ID NO: 17345 - RNA, 17 nt, Artificial Sequence
  Synthetic oligonucleotide: PDCD1-4470
gcggcucugccuugccc

SEQ ID NO: 17346 - RNA, 17 nt, Artificial Sequence
  Synthetic oligonucleotide: PDCD1-2923
gccuugaccuucuuccc

SEQ ID NO: 17347 - RNA, 17 nt, Artificial Sequence
  Synthetic oligonucleotide: PDCD1-3183
acgccgggccgccagcc

SEQ ID NO: 17348 - RNA, 17 nt, Artificial Sequence
  Synthetic oligonucleotide: PDCD1-2839
ggcacagagggccagcc

SEQ ID NO: 17349 - RNA, 17 nt, Artificial Sequence
  Synthetic oligonucleotide: PDCD1-3184
gccauuucacaaacgcc

SEQ ID NO: 17350 - RNA, 17 nt, Artificial Sequence
  Synthetic oligonucleotide: PDCD1-3104
uggggauugugcccgcc

SEQ ID NO: 17351 - RNA, 17 nt, Artificial Sequence
  Synthetic oligonucleotide: PDCD1-3079
cuggggaugccaaggcc

SEQ ID NO: 17352 - RNA, 17 nt, Artificial Sequence
  Synthetic oligonucleotide: PDCD1-3135
ccgggaaggcagaggcc

SEQ ID NO: 17353 - RNA, 17 nt, Artificial Sequence
  Synthetic oligonucleotide: PDCD1-2941
gggccuggcuggcggcc

SEQ ID NO: 17354 - RNA, 17 nt, Artificial Sequence
  Synthetic oligonucleotide: PDCD1-3138
gcgaagggggaugggcc

SEQ ID NO: 17355 - RNA, 17 nt, Artificial Sequence
  Synthetic oligonucleotide: PDCD1-2938
gguccagugccugggcc

SEQ ID NO: 17356 - RNA, 17 nt, Artificial Sequence
  Synthetic oligonucleotide: PDCD1-2884
ugaggaccaaggaugcc

SEQ ID NO: 17357 - RNA, 17 nt, Artificial Sequence
  Synthetic oligonucleotide: PDCD1-2936
ucaggggguccagugcc

SEQ ID NO: 17358 - RNA, 17 nt, Artificial Sequence
  Synthetic oligonucleotide: PDCD1-2926
uccagcccacucgugcc

SEQ ID NO: 17359 - RNA, 17 nt, Artificial Sequence
  Synthetic oligonucleotide: PDCD1-2896
ugcugggggcaggugcc

SEQ ID NO: 17360 - RNA, 17 nt, Artificial Sequence
  Synthetic oligonucleotide: PDCD1-3085
ccuggacccucugugcc

SEQ ID NO: 17361 - RNA, 17 nt, Artificial Sequence
  Synthetic oligonucleotide: PDCD1-2855
cccucucuccucgaucc

SEQ ID NO: 17362 - RNA, 17 nt, Artificial Sequence
  Synthetic oligonucleotide: PDCD1-2874
ccacccaggagggaucc

SEQ ID NO: 17363 - RNA, 17 nt, Artificial Sequence
  Synthetic oligonucleotide: PDCD1-3109
gucuccaggaucccucc

SEQ ID NO: 17364 - RNA, 17 nt, Artificial Sequence
  Synthetic oligonucleotide: PDCD1-3086
ugaccacagcccgcucc

SEQ ID NO: 17365 - RNA, 17 nt, Artificial Sequence
  Synthetic oligonucleotide: PDCD1-3094
ccuuggccucacucucc

SEQ ID NO: 17366 - RNA, 17 nt, Artificial Sequence
  Synthetic oligonucleotide: PDCD1-3110
acaguucuucugucucc

SEQ ID NO: 17367 - RNA, 17 nt, Artificial Sequence
  Synthetic oligonucleotide: PDCD1-2842
ccgggcacagagggucc

SEQ ID NO: 17368 - RNA, 17 nt, Artificial Sequence
  Synthetic oligonucleotide: PDCD1-3102
gucucugcccagauucc

SEQ ID NO: 17369 - RNA, 17 nt, Artificial Sequence
  Synthetic oligonucleotide: PDCD1-2897
ccuggccucugccuucc

SEQ ID NO: 17370 - RNA, 17 nt, Artificial Sequence
  Synthetic oligonucleotide: PDCD1-3090
gagagggagccucuucc

SEQ ID NO: 17371 - RNA, 17 nt, Artificial Sequence
  Synthetic oligonucleotide: PDCD1-3134
aggcaccugcccccagc

SEQ ID NO: 17372 - RNA, 17 nt, Artificial Sequence
  Synthetic oligonucleotide: PDCD1-2838
gggcacagagggccagc

SEQ ID NO: 17373 - RNA, 17 nt, Artificial Sequence
  Synthetic oligonucleotide: PDCD1-2844
acagaggguccaggagc

SEQ ID NO: 17374 - RNA, 17 nt, Artificial Sequence
  Synthetic oligonucleotide: PDCD1-3112
ucaaaguuuagaugagc

SEQ ID NO: 17375 - RNA, 17 nt, Artificial Sequence
  Synthetic oligonucleotide: PDCD1-3185
agccauuucacaaacgc

SEQ ID NO: 17376 - RNA, 17 nt, Artificial Sequence
  Synthetic oligonucleotide: PDCD1-2898
ggcccaucccccuucgc

SEQ ID NO: 17377 - RNA, 17 nt, Artificial Sequence
  Synthetic oligonucleotide: PDCD1-3167
gggaagaaggucaaggc

SEQ ID NO: 17378 - RNA, 17 nt, Artificial Sequence
  Synthetic oligonucleotide: PDCD1-2870
ugggcagagacccaggc

SEQ ID NO: 17379 - RNA, 17 nt, Artificial Sequence
  Synthetic oligonucleotide: PDCD1-2833
cauccccaggugcaggc

SEQ ID NO: 17380 - RNA, 17 nt, Artificial Sequence
  Synthetic oligonucleotide: PDCD1-2528
agaaugacgggucaggc

SEQ ID NO: 17381 - RNA, 17 nt, Artificial Sequence
  Synthetic oligonucleotide: PDCD1-3084
gacccucugugcccggc

SEQ ID NO: 17382 - RNA, 17 nt, Artificial Sequence
  Synthetic oligonucleotide: PDCD1-3174
cgagugggcuggagggc

SEQ ID NO: 17383 - RNA, 17 nt, Artificial Sequence
  Synthetic oligonucleotide: PDCD1-2921
ggggcgguggcaggggc

SEQ ID NO: 17384 - RNA, 17 nt, Artificial Sequence
  Synthetic oligonucleotide: PDCD1-2913
cagccugacgggggggc

SEQ ID NO: 17385 - RNA, 17 nt, Artificial Sequence
  Synthetic oligonucleotide: PDCD1-3139
agcgaagggggaugggc

SEQ ID NO: 17386 - RNA, 17 nt, Artificial Sequence
  Synthetic oligonucleotide: PDCD1-3177
cccuggcacgagugggc

SEQ ID NO: 17387 - RNA, 17 nt, Artificial Sequence
  Synthetic oligonucleotide: PDCD1-2939
cagugccugggccuggc

SEQ ID NO: 17388 - RNA, 17 nt, Artificial Sequence
  Synthetic oligonucleotide: PDCD1-2834
cccaggugcaggcuggc

SEQ ID NO: 17389 - RNA, 17 nt, Artificial Sequence
  Synthetic oligonucleotide: PDCD1-2918
ggggcuggggcgguggc

SEQ ID NO: 17390 - RNA, 17 nt, Artificial Sequence
  Synthetic oligonucleotide: PDCD1-2832
uuggcauccccaggugc

SEQ ID NO: 17391 - RNA, 17 nt, Artificial Sequence
  Synthetic oligonucleotide: PDCD1-3161
ccccgucaggcuguugc

SEQ ID NO: 17392 - RNA, 17 nt, Artificial Sequence
  Synthetic oligonucleotide: PDCD1-2866
gggagagcccuggaauc

SEQ ID NO: 17393 - RNA, 17 nt, Artificial Sequence
  Synthetic oligonucleotide: PDCD1-3158
cacacgguggaaagauc

SEQ ID NO: 17394 - RNA, 17 nt, Artificial Sequence
  Synthetic oligonucleotide: PDCD1-2854
ucccucucuccucgauc

SEQ ID NO: 17395 - RNA, 17 nt, Artificial Sequence
  Synthetic oligonucleotide: PDCD1-2863
uggucugaacagggcuc

SEQ ID NO: 17396 - RNA, 17 nt, Artificial Sequence
  Synthetic oligonucleotide: PDCD1-3162
gccccagcccccccguc

SEQ ID NO: 17397 - RNA, 17 nt, Artificial Sequence
  Synthetic oligonucleotide: PDCD1-4471
uagugaugagaugcguc

SEQ ID NO: 17398 - RNA, 17 nt, Artificial Sequence
  Synthetic oligonucleotide: PDCD1-2527
cuguagaaugacggguc

SEQ ID NO: 17399 - RNA, 17 nt, Artificial Sequence
  Synthetic oligonucleotide: PDCD1-2395
gccaagguuugggguuc

SEQ ID NO: 17400 - RNA, 17 nt, Artificial Sequence
  Synthetic oligonucleotide: PDCD1-2932
ccaggguggggugguuc

SEQ ID NO: 17401 - RNA, 17 nt, Artificial Sequence
  Synthetic oligonucleotide: PDCD1-3143
ccugugccccagcgaag

SEQ ID NO: 17402 - RNA, 17 nt, Artificial Sequence
  Synthetic oligonucleotide: PDCD1-2853
acgggcagcccaggaag

SEQ ID NO: 17403 - RNA, 17 nt, Artificial Sequence
  Synthetic oligonucleotide: PDCD1-3164
aaggucaaggcuggaag

SEQ ID NO: 17404 - RNA, 17 nt, Artificial Sequence
  Synthetic oligonucleotide: PDCD1-2846
ggucacaguguacacag

SEQ ID NO: 17405 - RNA, 17 nt, Artificial Sequence
  Synthetic oligonucleotide: PDCD1-2840
gggccagccgggcacag

SEQ ID NO: 17406 - RNA, 17 nt, Artificial Sequence
  Synthetic oligonucleotide: PDCD1-2836
aggcuggcugggcacag

SEQ ID NO: 17407 - RNA, 17 nt, Artificial Sequence
  Synthetic oligonucleotide: PDCD1-3132
gcaccugcccccagcag

SEQ ID NO: 17408 - RNA, 17 nt, Artificial Sequence
  Synthetic oligonucleotide: PDCD1-3136
augggccgggaaggcag

SEQ ID NO: 17409 - RNA, 17 nt, Artificial Sequence
  Synthetic oligonucleotide: PDCD1-2920
ggcuggggcgguggcag

SEQ ID NO: 17410 - RNA, 17 nt, Artificial Sequence
  Synthetic oligonucleotide: PDCD1-2934
aggguggggugguucag

SEQ ID NO: 17411 - RNA, 17 nt, Artificial Sequence
  Synthetic oligonucleotide: PDCD1-3092
ucccggaucgaggagag

SEQ ID NO: 17412 - RNA, 17 nt, Artificial Sequence
  Synthetic oligonucleotide: PDCD1-3179
ccccacccuggcacgag

SEQ ID NO: 17413 - RNA, 17 nt, Artificial Sequence
  Synthetic oligonucleotide: PDCD1-2843
cacagaggguccaggag

SEQ ID NO: 17414 - RNA, 17 nt, Artificial Sequence
  Synthetic oligonucleotide: PDCD1-3150
aagguggaagcuuugag

SEQ ID NO: 17415 - RNA, 17 nt, Artificial Sequence
  Synthetic oligonucleotide: PDCD1-2909
ccugcaacagccugacg

SEQ ID NO: 17416 - RNA, 17 nt, Artificial Sequence
  Synthetic oligonucleotide: PDCD1-3170
uggagggcagggccccg

SEQ ID NO: 17417 - RNA, 17 nt, Artificial Sequence
  Synthetic oligonucleotide: PDCD1-2925
cuugaccuucuuccccg

SEQ ID NO: 17418 - RNA, 17 nt, Artificial Sequence
  Synthetic oligonucleotide: PDCD1-2530
accccaaaccuuggccg

SEQ ID NO: 17419 - RNA, 17 nt, Artificial Sequence
  Synthetic oligonucleotide: PDCD1-3100
ccuguucagaccauccg

SEQ ID NO: 17420 - RNA, 17 nt, Artificial Sequence
  Synthetic oligonucleotide: PDCD1-4472
uuaaaauaaccgaagcg

SEQ ID NO: 17421 - RNA, 17 nt, Artificial Sequence
  Synthetic oligonucleotide: PDCD1-2533
gccguggggagucugcg

SEQ ID NO: 17422 - RNA, 17 nt, Artificial Sequence
  Synthetic oligonucleotide: PDCD1-3093
cucacucucccggaucg

SEQ ID NO: 17423 - RNA, 17 nt, Artificial Sequence
  Synthetic oligonucleotide: PDCD1-2864
ggucugaacagggcucg

SEQ ID NO: 17424 - RNA, 17 nt, Artificial Sequence
  Synthetic oligonucleotide: PDCD1-3153
ugaggccauccacaagg

SEQ ID NO: 17425 - RNA, 17 nt, Artificial Sequence
  Synthetic oligonucleotide: PDCD1-3142
cugugccccagcgaagg

SEQ ID NO: 17426 - RNA, 17 nt, Artificial Sequence
  Synthetic oligonucleotide: PDCD1-2872
cacaauccccacccagg

SEQ ID NO: 17427 - RNA, 17 nt, Artificial Sequence
  Synthetic oligonucleotide: PDCD1-2869
cugggcagagacccagg

SEQ ID NO: 17428 - RNA, 17 nt, Artificial Sequence
  Synthetic oligonucleotide: PDCD1-2935
ggguggggugguucagg

SEQ ID NO: 17429 - RNA, 17 nt, Artificial Sequence
  Synthetic oligonucleotide: PDCD1-3149
agguggaagcuuugagg

SEQ ID NO: 17430 - RNA, 17 nt, Artificial Sequence
  Synthetic oligonucleotide: PDCD1-3159
uugcaggcaucacacgg

SEQ ID NO: 17431 - RNA, 17 nt, Artificial Sequence
  Synthetic oligonucleotide: PDCD1-2910
cugcaacagccugacgg

SEQ ID NO: 17432 - RNA, 17 nt, Artificial Sequence
  Synthetic oligonucleotide: PDCD1-2917
cgggggggcuggggcgg

SEQ ID NO: 17433 - RNA, 17 nt, Artificial Sequence
  Synthetic oligonucleotide: PDCD1-2928
gcccacucgugccaggg

SEQ ID NO: 17434 - RNA, 17 nt, Artificial Sequence
  Synthetic oligonucleotide: PDCD1-2911
ugcaacagccugacggg

SEQ ID NO: 17435 - RNA, 17 nt, Artificial Sequence
  Synthetic oligonucleotide: PDCD1-3163
gucaaggcuggaagggg

SEQ ID NO: 17436 - RNA, 17 nt, Artificial Sequence
  Synthetic oligonucleotide: PDCD1-2912
gcaacagccugacgggg

SEQ ID NO: 17437 - RNA, 17 nt, Artificial Sequence
  Synthetic oligonucleotide: PDCD1-3096
cagaccauccguggggg

SEQ ID NO: 17438 - RNA, 17 nt, Artificial Sequence
  Synthetic oligonucleotide: PDCD1-2916
ugacgggggggcugggg

SEQ ID NO: 17439 - RNA, 17 nt, Artificial Sequence
  Synthetic oligonucleotide: PDCD1-2931
cucgugccagggugggg

SEQ ID NO: 17440 - RNA, 17 nt, Artificial Sequence
  Synthetic oligonucleotide: PDCD1-3107
ccaggaucccuccuggg

SEQ ID NO: 17441 - RNA, 17 nt, Artificial Sequence
  Synthetic oligonucleotide: PDCD1-3176
uggcacgagugggcugg

SEQ ID NO: 17442 - RNA, 17 nt, Artificial Sequence
  Synthetic oligonucleotide: PDCD1-2940
ugccugggccuggcugg

SEQ ID NO: 17443 - RNA, 17 nt, Artificial Sequence
  Synthetic oligonucleotide: PDCD1-3097
guucagaccauccgugg

SEQ ID NO: 17444 - RNA, 17 nt, Artificial Sequence
  Synthetic oligonucleotide: PDCD1-2534
guggggagucugcgugg

SEQ ID NO: 17445 - RNA, 17 nt, Artificial Sequence
  Synthetic oligonucleotide: PDCD1-2880
aagguuagucccacaug

SEQ ID NO: 17446 - RNA, 17 nt, Artificial Sequence
  Synthetic oligonucleotide: PDCD1-3115
augggaugagccccaug

SEQ ID NO: 17447 - RNA, 17 nt, Artificial Sequence
  Synthetic oligonucleotide: PDCD1-3157
ggaaagaucuggaacug

SEQ ID NO: 17448 - RNA, 17 nt, Artificial Sequence
  Synthetic oligonucleotide: PDCD1-3081
cagccagccugcaccug

SEQ ID NO: 17449 - RNA, 17 nt, Artificial Sequence
  Synthetic oligonucleotide: PDCD1-2900
cccaucccccuucgcug

SEQ ID NO: 17450 - RNA, 17 nt, Artificial Sequence
  Synthetic oligonucleotide: PDCD1-2845
gguccaggagcgggcug

SEQ ID NO: 17451 - RNA, 17 nt, Artificial Sequence
  Synthetic oligonucleotide: PDCD1-2915
gccugacgggggggcug

SEQ ID NO: 17452 - RNA, 17 nt, Artificial Sequence
  Synthetic oligonucleotide: PDCD1-2856
cucgauccgggagagug

SEQ ID NO: 17453 - RNA, 17 nt, Artificial Sequence
  Synthetic oligonucleotide: PDCD1-2882
uuaggaaaacucgagug

SEQ ID NO: 17454 - RNA, 17 nt, Artificial Sequence
  Synthetic oligonucleotide: PDCD1-3111
guguaccuguucgagug

SEQ ID NO: 17455 - RNA, 17 nt, Artificial Sequence
  Synthetic oligonucleotide: PDCD1-2532
cccaaaccuuggccgug

SEQ ID NO: 17456 - RNA, 17 nt, Artificial Sequence
  Synthetic oligonucleotide: PDCD1-3098
uguucagaccauccgug

SEQ ID NO: 17457 - RNA, 17 nt, Artificial Sequence
  Synthetic oligonucleotide: PDCD1-2930
ccacucgugccagggug

SEQ ID NO: 17458 - RNA, 17 nt, Artificial Sequence
  Synthetic oligonucleotide: PDCD1-3105
aggaucccuccugggug

SEQ ID NO: 17459 - RNA, 17 nt, Artificial Sequence
  Synthetic oligonucleotide: PDCD1-2922
ggcaggggcuggcugug

SEQ ID NO: 17460 - RNA, 17 nt, Artificial Sequence
  Synthetic oligonucleotide: PDCD1-3155
acuguggccauggugug

SEQ ID NO: 17461 - RNA, 17 nt, Artificial Sequence
  Synthetic oligonucleotide: PDCD1-2904
ucaaagcuuccaccuug

SEQ ID NO: 17462 - RNA, 17 nt, Artificial Sequence
  Synthetic oligonucleotide: PDCD1-3152
acaagguggaagcuuug

SEQ ID NO: 17463 - RNA, 17 nt, Artificial Sequence
  Synthetic oligonucleotide: PDCD1-2394
cccacggccaagguuug

SEQ ID NO: 17464 - RNA, 17 nt, Artificial Sequence
  Synthetic oligonucleotide: PDCD1-2903
aacuguccauggcuaau

SEQ ID NO: 17465 - RNA, 17 nt, Artificial Sequence
  Synthetic oligonucleotide: PDCD1-2879
caagguuagucccacau

SEQ ID NO: 17466 - RNA, 17 nt, Artificial Sequence
  Synthetic oligonucleotide: PDCD1-3116
cgaguuuuccuaaggau

SEQ ID NO: 17467 - RNA, 17 nt, Artificial Sequence
  Synthetic oligonucleotide: PDCD1-3140
ccccagcgaagggggau

SEQ ID NO: 17468 - RNA, 17 nt, Artificial Sequence
  Synthetic oligonucleotide: PDCD1-2529
gccagaaccccaaaccu

SEQ ID NO: 17469 - RNA, 17 nt, Artificial Sequence
  Synthetic oligonucleotide: PDCD1-3113
ccaugugggacuaaccu

SEQ ID NO: 17470 - RNA, 17 nt, Artificial Sequence
  Synthetic oligonucleotide: PDCD1-3082
ccagccagccugcaccu

SEQ ID NO: 17471 - RNA, 17 nt, Artificial Sequence
  Synthetic oligonucleotide: PDCD1-3087
gggcugcccgugacccu

SEQ ID NO: 17472 - RNA, 17 nt, Artificial Sequence
  Synthetic oligonucleotide: PDCD1-3103
ggggauugugcccgccu

SEQ ID NO: 17473 - RNA, 17 nt, Artificial Sequence
  Synthetic oligonucleotide: PDCD1-3095
auccgugggggaggccu

SEQ ID NO: 17474 - RNA, 17 nt, Artificial Sequence
  Synthetic oligonucleotide: PDCD1-2885
gaggaccaaggaugccu

SEQ ID NO: 17475 - RNA, 17 nt, Artificial Sequence
  Synthetic oligonucleotide: PDCD1-2937
caggggguccagugccu

SEQ ID NO: 17476 - RNA, 17 nt, Artificial Sequence
  Synthetic oligonucleotide: PDCD1-3119
ccuugcccaggcauccu

SEQ ID NO: 17477 - RNA, 17 nt, Artificial Sequence
  Synthetic oligonucleotide: PDCD1-3108
ucuccaggaucccuccu

SEQ ID NO: 17478 - RNA, 17 nt, Artificial Sequence
  Synthetic oligonucleotide: PDCD1-3089
agagggagccucuuccu

SEQ ID NO: 17479 - RNA, 17 nt, Artificial Sequence
  Synthetic oligonucleotide: PDCD1-2899
gcccaucccccuucgcu

SEQ ID NO: 17480 - RNA, 17 nt, Artificial Sequence
  Synthetic oligonucleotide: PDCD1-2862
auggucugaacagggcu

SEQ ID NO: 17481 - RNA, 17 nt, Artificial Sequence
  Synthetic oligonucleotide: PDCD1-2914
agccugacgggggggcu

SEQ ID NO: 17482 - RNA, 17 nt, Artificial Sequence
  Synthetic oligonucleotide: PDCD1-2835
ccaggugcaggcuggcu

SEQ ID NO: 17483 - RNA, 17 nt, Artificial Sequence
  Synthetic oligonucleotide: PDCD1-2867
ggagagcccuggaaucu

SEQ ID NO: 17484 - RNA, 17 nt, Artificial Sequence
  Synthetic oligonucleotide: PDCD1-3147
gacaguugucauucagu

SEQ ID NO: 17485 - RNA, 17 nt, Artificial Sequence
  Synthetic oligonucleotide: PDCD1-3178
cccacccuggcacgagu

SEQ ID NO: 17486 - RNA, 17 nt, Artificial Sequence
  Synthetic oligonucleotide: PDCD1-2531
ccccaaaccuuggccgu

SEQ ID NO: 17487 - RNA, 17 nt, Artificial Sequence
  Synthetic oligonucleotide: PDCD1-3099
cuguucagaccauccgu

SEQ ID NO: 17488 - RNA, 17 nt, Artificial Sequence
  Synthetic oligonucleotide: PDCD1-2929
cccacucgugccagggu

SEQ ID NO: 17489 - RNA, 17 nt, Artificial Sequence
  Synthetic oligonucleotide: PDCD1-3106
caggaucccuccugggu

SEQ ID NO: 17490 - RNA, 17 nt, Artificial Sequence
  Synthetic oligonucleotide: PDCD1-3114
ugggaugagccccaugu

SEQ ID NO: 17491 - RNA, 17 nt, Artificial Sequence
  Synthetic oligonucleotide: PDCD1-2876
cucgaacagguacacuu

SEQ ID NO: 17492 - RNA, 17 nt, Artificial Sequence
  Synthetic oligonucleotide: PDCD1-2881
gggcucaucccauccuu

SEQ ID NO: 17493 - RNA, 17 nt, Artificial Sequence
  Synthetic oligonucleotide: PDCD1-4473
gguuucuagccucgcuu

SEQ ID NO: 17494 - RNA, 17 nt, Artificial Sequence
  Synthetic oligonucleotide: PDCD1-2392
uccccacggccaagguu

SEQ ID NO: 17495 - RNA, 17 nt, Artificial Sequence
  Synthetic oligonucleotide: PDCD1-2393
ccccacggccaagguuu

SEQ ID NO: 17496 - RNA, 20 nt, Artificial Sequence
  Synthetic oligonucleotide: PDCD1-2818
gcggcccggcguuugugaaa

SEQ ID NO: 17497 - RNA, 20 nt, Artificial Sequence
  Synthetic oligonucleotide: PDCD1-2819
gagcauuuuauuacagcgaa

SEQ ID NO: 17498 - RNA, 20 nt, Artificial Sequence
  Synthetic oligonucleotide: PDCD1-3023
gucaccugugccccagcgaa

SEQ ID NO: 17499 - RNA, 20 nt, Artificial Sequence
  Synthetic oligonucleotide: PDCD1-3044
gaagaaggucaaggcuggaa

SEQ ID NO: 17500 - RNA, 20 nt, Artificial Sequence
  Synthetic oligonucleotide: PDCD1-2737
ccccacggauggucugaaca

SEQ ID NO: 17501 - RNA, 20 nt, Artificial Sequence
  Synthetic oligonucleotide: PDCD1-2754
aagccaagguuagucccaca

SEQ ID NO: 17502 - RNA, 20 nt, Artificial Sequence
  Synthetic oligonucleotide: PDCD1-3033
auggugugaggccauccaca

SEQ ID NO: 17503 - RNA, 20 nt, Artificial Sequence
  Synthetic oligonucleotide: PDCD1-3039
aggcuguugcaggcaucaca

SEQ ID NO: 17504 - RNA, 20 nt, Artificial Sequence
  Synthetic oligonucleotide: PDCD1-3065
aaugcucagcacagaauaca

SEQ ID NO: 17505 - RNA, 20 nt, Artificial Sequence
  Synthetic oligonucleotide: PDCD1-2782
uuguggauggccucacacca

SEQ ID NO: 17506 - RNA, 20 nt, Artificial Sequence
  Synthetic oligonucleotide: PDCD1-2759
gaaaacucgagugaggacca

SEQ ID NO: 17507 - RNA, 20 nt, Artificial Sequence
  Synthetic oligonucleotide: PDCD1-2734
ugaggccaaggccuccccca

SEQ ID NO: 17508 - RNA, 20 nt, Artificial Sequence
  Synthetic oligonucleotide: PDCD1-2083
gccgccacgcagacucccca

SEQ ID NO: 17509 - RNA, 20 nt, Artificial Sequence
  Synthetic oligonucleotide: PDCD1-2725
caguguacacagagggccca

SEQ ID NO: 17510 - RNA, 20 nt, Artificial Sequence
  Synthetic oligonucleotide: PDCD1-2753
acuuugacgucguaaagcca

SEQ ID NO: 17511 - RNA, 20 nt, Artificial Sequence
  Synthetic oligonucleotide: PDCD1-3027
gagggggagccgauuagcca

SEQ ID NO: 17512 - RNA, 20 nt, Artificial Sequence
  Synthetic oligonucleotide: PDCD1-2733
gauccgggagagugaggcca

SEQ ID NO: 17513 - RNA, 20 nt, Artificial Sequence
  Synthetic oligonucleotide: PDCD1-2084
acgcagacuccccacggcca

SEQ ID NO: 17514 - RNA, 20 nt, Artificial Sequence
  Synthetic oligonucleotide: PDCD1-3035
aagaucuggaacuguggcca

SEQ ID NO: 17515 - RNA, 20 nt, Artificial Sequence
  Synthetic oligonucleotide: PDCD1-2959
gccugcaccuggggaugcca

SEQ ID NO: 17516 - RNA, 20 nt, Artificial Sequence
  Synthetic oligonucleotide: PDCD1-2803
ccuccagcccacucgugcca

SEQ ID NO: 17517 - RNA, 20 nt, Artificial Sequence
  Synthetic oligonucleotide: PDCD1-2778
uacugaaugacaacugucca

SEQ ID NO: 17518 - RNA, 20 nt, Artificial Sequence
  Synthetic oligonucleotide: PDCD1-2980
gggucucugcccagauucca

SEQ ID NO: 17519 - RNA, 20 nt, Artificial Sequence
  Synthetic oligonucleotide: PDCD1-3012
ccaggcaccugcccccagca

SEQ ID NO: 17520 - RNA, 20 nt, Artificial Sequence
  Synthetic oligonucleotide: PDCD1-3052
cacgagugggcuggagggca

SEQ ID NO: 17521 - RNA, 20 nt, Artificial Sequence
  Synthetic oligonucleotide: PDCD1-2762
ggaccaaggaugccugggca

SEQ ID NO: 17522 - RNA, 20 nt, Artificial Sequence
  Synthetic oligonucleotide: PDCD1-2795
ggggggcuggggcgguggca

SEQ ID NO: 17523 - RNA, 20 nt, Artificial Sequence
  Synthetic oligonucleotide: PDCD1-3047
ggccccggggaagaagguca

SEQ ID NO: 17524 - RNA, 20 nt, Artificial Sequence
  Synthetic oligonucleotide: PDCD1-2726
acacagagggcccaggguca

SEQ ID NO: 17525 - RNA, 20 nt, Artificial Sequence
  Synthetic oligonucleotide: PDCD1-2809
ugccaggguggggugguuca

SEQ ID NO: 17526 - RNA, 20 nt, Artificial Sequence
  Synthetic oligonucleotide: PDCD1-3048
gggcagggccccggggaaga

SEQ ID NO: 17527 - RNA, 20 nt, Artificial Sequence
  Synthetic oligonucleotide: PDCD1-2723
guggucacaguguacacaga

SEQ ID NO: 17528 - RNA, 20 nt, Artificial Sequence
  Synthetic oligonucleotide: PDCD1-2717
gagggccagccgggcacaga

SEQ ID NO: 17529 - RNA, 20 nt, Artificial Sequence
  Synthetic oligonucleotide: PDCD1-2713
gcaggcuggcugggcacaga

SEQ ID NO: 17530 - RNA, 20 nt, Artificial Sequence
  Synthetic oligonucleotide: PDCD1-2970
ucucccggaucgaggagaga

SEQ ID NO: 17531 - RNA, 20 nt, Artificial Sequence
  Synthetic oligonucleotide: PDCD1-3024
ggucaccugugccccagcga

SEQ ID NO: 17532 - RNA, 20 nt, Artificial Sequence
  Synthetic oligonucleotide: PDCD1-2996
cacucgaguuuuccuaagga

SEQ ID NO: 17533 - RNA, 20 nt, Artificial Sequence
  Synthetic oligonucleotide: PDCD1-2749
ggcacaauccccacccagga

SEQ ID NO: 17534 - RNA, 20 nt, Artificial Sequence
  Synthetic oligonucleotide: PDCD1-2735
gccaaggccucccccacgga

SEQ ID NO: 17535 - RNA, 20 nt, Artificial Sequence
  Synthetic oligonucleotide: PDCD1-3016
cgaagggggaugggccggga

SEQ ID NO: 17536 - RNA, 20 nt, Artificial Sequence
  Synthetic oligonucleotide: PDCD1-3020
ugugccccagcgaaggggga

SEQ ID NO: 17537 - RNA, 20 nt, Artificial Sequence
  Synthetic oligonucleotide: PDCD1-3045
ggaagaaggucaaggcugga

SEQ ID NO: 17538 - RNA, 20 nt, Artificial Sequence
  Synthetic oligonucleotide: PDCD1-3054
ccuggcacgagugggcugga

SEQ ID NO: 17539 - RNA, 20 nt, Artificial Sequence
  Synthetic oligonucleotide: PDCD1-2781
caaagcuuccaccuugugga

SEQ ID NO: 17540 - RNA, 20 nt, Artificial Sequence
  Synthetic oligonucleotide: PDCD1-2783
ugaugccugcaacagccuga

SEQ ID NO: 17541 - RNA, 20 nt, Artificial Sequence
  Synthetic oligonucleotide: PDCD1-3030
ccacaagguggaagcuuuga

SEQ ID NO: 17542 - RNA, 20 nt, Artificial Sequence
  Synthetic oligonucleotide: PDCD1-2997
uccucacucgaguuuuccua

SEQ ID NO: 17543 - RNA, 20 nt, Artificial Sequence
  Synthetic oligonucleotide: PDCD1-3025
uggacaguugucauucagua

SEQ ID NO: 17544 - RNA, 20 nt, Artificial Sequence
  Synthetic oligonucleotide: PDCD1-2820
uauuacagcgaauggaaaac

SEQ ID NO: 17545 - RNA, 20 nt, Artificial Sequence
  Synthetic oligonucleotide: PDCD1-2751
agaacuguccucacucgaac

SEQ ID NO: 17546 - RNA, 20 nt, Artificial Sequence
  Synthetic oligonucleotide: PDCD1-2736
cccccacggauggucugaac

SEQ ID NO: 17547 - RNA, 20 nt, Artificial Sequence
  Synthetic oligonucleotide: PDCD1-3060
cgccagccaggcccaggcac

SEQ ID NO: 17548 - RNA, 20 nt, Artificial Sequence
  Synthetic oligonucleotide: PDCD1-2777
aucccccuucgcuggggcac

SEQ ID NO: 17549 - RNA, 20 nt, Artificial Sequence
  Synthetic oligonucleotide: PDCD1-2727
cacagagggcccagggucac

SEQ ID NO: 17550 - RNA, 20 nt, Artificial Sequence
  Synthetic oligonucleotide: PDCD1-2784
gaugccugcaacagccugac

SEQ ID NO: 17551 - RNA, 20 nt, Artificial Sequence
  Synthetic oligonucleotide: PDCD1-2962
gugcccagccagccugcacc

SEQ ID NO: 17552 - RNA, 20 nt, Artificial Sequence
  Synthetic oligonucleotide: PDCD1-3059
cccccugaaccaccccaccc

SEQ ID NO: 17553 - RNA, 20 nt, Artificial Sequence
  Synthetic oligonucleotide: PDCD1-2747
ggcgggcacaauccccaccc

SEQ ID NO: 17554 - RNA, 20 nt, Artificial Sequence
  Synthetic oligonucleotide: PDCD1-2744
uggaaucugggcagagaccc

SEQ ID NO: 17555 - RNA, 20 nt, Artificial Sequence
  Synthetic oligonucleotide: PDCD1-2967
uccugggcugcccgugaccc

SEQ ID NO: 17556 - RNA, 20 nt, Artificial Sequence
  Synthetic oligonucleotide: PDCD1-3050
gggcuggagggcagggcccc

SEQ ID NO: 17557 - RNA, 20 nt, Artificial Sequence
  Synthetic oligonucleotide: PDCD1-2800
cagccuugaccuucuucccc

SEQ ID NO: 17558 - RNA, 20 nt, Artificial Sequence
  Synthetic oligonucleotide: PDCD1-2728
cccagggucacgggcagccc

SEQ ID NO: 17559 - RNA, 20 nt, Artificial Sequence
  Synthetic oligonucleotide: PDCD1-2741
acagggcucggggagagccc

SEQ ID NO: 17560 - RNA, 20 nt, Artificial Sequence
  Synthetic oligonucleotide: PDCD1-3061
ccgggccgccagccaggccc

SEQ ID NO: 17561 - RNA, 20 nt, Artificial Sequence
  Synthetic oligonucleotide: PDCD1-3051
ugggcuggagggcagggccc

SEQ ID NO: 17562 - RNA, 20 nt, Artificial Sequence
  Synthetic oligonucleotide: PDCD1-2724
acaguguacacagagggccc

SEQ ID NO: 17563 - RNA, 20 nt, Artificial Sequence
  Synthetic oligonucleotide: PDCD1-4474
guggcggcucugccuugccc

SEQ ID NO: 17564 - RNA, 20 nt, Artificial Sequence
  Synthetic oligonucleotide: PDCD1-2799
ccagccuugaccuucuuccc

SEQ ID NO: 17565 - RNA, 20 nt, Artificial Sequence
  Synthetic oligonucleotide: PDCD1-3062
caaacgccgggccgccagcc

SEQ ID NO: 17566 - RNA, 20 nt, Artificial Sequence
  Synthetic oligonucleotide: PDCD1-2715
cugggcacagagggccagcc

SEQ ID NO: 17567 - RNA, 20 nt, Artificial Sequence
  Synthetic oligonucleotide: PDCD1-3063
caagccauuucacaaacgcc

SEQ ID NO: 17568 - RNA, 20 nt, Artificial Sequence
  Synthetic oligonucleotide: PDCD1-2983
ggguggggauugugcccgcc

SEQ ID NO: 17569 - RNA, 20 nt, Artificial Sequence
  Synthetic oligonucleotide: PDCD1-2958
caccuggggaugccaaggcc

SEQ ID NO: 17570 - RNA, 20 nt, Artificial Sequence
  Synthetic oligonucleotide: PDCD1-3014
gggccgggaaggcagaggcc

SEQ ID NO: 17571 - RNA, 20 nt, Artificial Sequence
  Synthetic oligonucleotide: PDCD1-2817
ccugggccuggcuggcggcc

SEQ ID NO: 17572 - RNA, 20 nt, Artificial Sequence
  Synthetic oligonucleotide: PDCD1-3017
ccagcgaagggggaugggcc

SEQ ID NO: 17573 - RNA, 20 nt, Artificial Sequence
  Synthetic oligonucleotide: PDCD1-2814
ggggguccagugccugggcc

SEQ ID NO: 17574 - RNA, 20 nt, Artificial Sequence
  Synthetic oligonucleotide: PDCD1-2760
gagugaggaccaaggaugcc

SEQ ID NO: 17575 - RNA, 20 nt, Artificial Sequence
  Synthetic oligonucleotide: PDCD1-2812
gguucaggggguccagugcc

SEQ ID NO: 17576 - RNA, 20 nt, Artificial Sequence
  Synthetic oligonucleotide: PDCD1-2802
cccuccagcccacucgugcc

SEQ ID NO: 17577 - RNA, 20 nt, Artificial Sequence
  Synthetic oligonucleotide: PDCD1-2772
cccugcugggggcaggugcc

SEQ ID NO: 17578 - RNA, 20 nt, Artificial Sequence
  Synthetic oligonucleotide: PDCD1-2964
gcuccuggacccucugugcc

SEQ ID NO: 17579 - RNA, 20 nt, Artificial Sequence
  Synthetic oligonucleotide: PDCD1-2731
gcucccucucuccucgaucc

SEQ ID NO: 17580 - RNA, 20 nt, Artificial Sequence
  Synthetic oligonucleotide: PDCD1-2750
uccccacccaggagggaucc

SEQ ID NO: 17581 - RNA, 20 nt, Artificial Sequence
  Synthetic oligonucleotide: PDCD1-2988
ucugucuccaggaucccucc

SEQ ID NO: 17582 - RNA, 20 nt, Artificial Sequence
  Synthetic oligonucleotide: PDCD1-2965
cugugaccacagcccgcucc

SEQ ID NO: 17583 - RNA, 20 nt, Artificial Sequence
  Synthetic oligonucleotide: PDCD1-2973
aggccuuggccucacucucc

SEQ ID NO: 17584 - RNA, 20 nt, Artificial Sequence
  Synthetic oligonucleotide: PDCD1-2989
aggacaguucuucugucucc

SEQ ID NO: 17585 - RNA, 20 nt, Artificial Sequence
  Synthetic oligonucleotide: PDCD1-2718
cagccgggcacagagggucc

SEQ ID NO: 17586 - RNA, 20 nt, Artificial Sequence
  Synthetic oligonucleotide: PDCD1-2981
ugggucucugcccagauucc

SEQ ID NO: 17587 - RNA, 20 nt, Artificial Sequence
  Synthetic oligonucleotide: PDCD1-2773
gugccuggccucugccuucc

SEQ ID NO: 17588 - RNA, 20 nt, Artificial Sequence
  Synthetic oligonucleotide: PDCD1-2969
ggagagagggagccucuucc

SEQ ID NO: 17589 - RNA, 20 nt, Artificial Sequence
  Synthetic oligonucleotide: PDCD1-3013
gccaggcaccugcccccagc

SEQ ID NO: 17590 - RNA, 20 nt, Artificial Sequence
  Synthetic oligonucleotide: PDCD1-2714
gcugggcacagagggccagc

SEQ ID NO: 17591 - RNA, 20 nt, Artificial Sequence
  Synthetic oligonucleotide: PDCD1-2720
ggcacagaggguccaggagc

SEQ ID NO: 17592 - RNA, 20 nt, Artificial Sequence
  Synthetic oligonucleotide: PDCD1-2991
acgucaaaguuuagaugagc

SEQ ID NO: 17593 - RNA, 20 nt, Artificial Sequence
  Synthetic oligonucleotide: PDCD1-3064
gcaagccauuucacaaacgc

SEQ ID NO: 17594 - RNA, 20 nt, Artificial Sequence
  Synthetic oligonucleotide: PDCD1-2774
cccggcccaucccccuucgc

SEQ ID NO: 17595 - RNA, 20 nt, Artificial Sequence
  Synthetic oligonucleotide: PDCD1-3046
ccggggaagaaggucaaggc

SEQ ID NO: 17596 - RNA, 20 nt, Artificial Sequence
  Synthetic oligonucleotide: PDCD1-2746
aucugggcagagacccaggc

SEQ ID NO: 17597 - RNA, 20 nt, Artificial Sequence
  Synthetic oligonucleotide: PDCD1-2709
uggcauccccaggugcaggc

SEQ ID NO: 17598 - RNA, 20 nt, Artificial Sequence
  Synthetic oligonucleotide: PDCD1-2221
uguagaaugacgggucaggc

SEQ ID NO: 17599 - RNA, 20 nt, Artificial Sequence
  Synthetic oligonucleotide: PDCD1-2963
cuggacccucugugcccggc

SEQ ID NO: 17600 - RNA, 20 nt, Artificial Sequence
  Synthetic oligonucleotide: PDCD1-3053
gcacgagugggcuggagggc

SEQ ID NO: 17601 - RNA, 20 nt, Artificial Sequence
  Synthetic oligonucleotide: PDCD1-2797
gcuggggcgguggcaggggc

SEQ ID NO: 17602 - RNA, 20 nt, Artificial Sequence
  Synthetic oligonucleotide: PDCD1-2789
caacagccugacgggggggc

SEQ ID NO: 17603 - RNA, 20 nt, Artificial Sequence
  Synthetic oligonucleotide: PDCD1-3018
cccagcgaagggggaugggc

SEQ ID NO: 17604 - RNA, 20 nt, Artificial Sequence
  Synthetic oligonucleotide: PDCD1-3056
ccacccuggcacgagugggc

SEQ ID NO: 17605 - RNA, 20 nt, Artificial Sequence
  Synthetic oligonucleotide: PDCD1-2815
guccagugccugggccuggc

SEQ ID NO: 17606 - RNA, 20 nt, Artificial Sequence
  Synthetic oligonucleotide: PDCD1-2710
auccccaggugcaggcuggc

SEQ ID NO: 17607 - RNA, 20 nt, Artificial Sequence
  Synthetic oligonucleotide: PDCD1-2794
gggggggcuggggcgguggc

SEQ ID NO: 17608 - RNA, 20 nt, Artificial Sequence
  Synthetic oligonucleotide: PDCD1-2708
gccuuggcauccccaggugc

SEQ ID NO: 17609 - RNA, 20 nt, Artificial Sequence
  Synthetic oligonucleotide: PDCD1-3040
cccccccgucaggcuguugc

SEQ ID NO: 17610 - RNA, 20 nt, Artificial Sequence
  Synthetic oligonucleotide: PDCD1-2742
ucggggagagcccuggaauc

SEQ ID NO: 17611 - RNA, 20 nt, Artificial Sequence
  Synthetic oligonucleotide: PDCD1-3037
caucacacgguggaaagauc

SEQ ID NO: 17612 - RNA, 20 nt, Artificial Sequence
  Synthetic oligonucleotide: PDCD1-2730
ggcucccucucuccucgauc

SEQ ID NO: 17613 - RNA, 20 nt, Artificial Sequence
  Synthetic oligonucleotide: PDCD1-2739
ggauggucugaacagggcuc

SEQ ID NO: 17614 - RNA, 20 nt, Artificial Sequence
  Synthetic oligonucleotide: PDCD1-3041
accgccccagcccccccguc

SEQ ID NO: 17615 - RNA, 20 nt, Artificial Sequence
  Synthetic oligonucleotide: PDCD1-4475
uauuagugaugagaugcguc

SEQ ID NO: 17616 - RNA, 20 nt, Artificial Sequence
  Synthetic oligonucleotide: PDCD1-2220
uuucuguagaaugacggguc

SEQ ID NO: 17617 - RNA, 20 nt, Artificial Sequence
  Synthetic oligonucleotide: PDCD1-2088
acggccaagguuugggguuc

SEQ ID NO: 17618 - RNA, 20 nt, Artificial Sequence
  Synthetic oligonucleotide: PDCD1-2808
gugccaggguggggugguuc

SEQ ID NO: 17619 - RNA, 20 nt, Artificial Sequence
  Synthetic oligonucleotide: PDCD1-3022
ucaccugugccccagcgaag

SEQ ID NO: 17620 - RNA, 20 nt, Artificial Sequence
  Synthetic oligonucleotide: PDCD1-2729
gucacgggcagcccaggaag

SEQ ID NO: 17621 - RNA, 20 nt, Artificial Sequence
  Synthetic oligonucleotide: PDCD1-3043
aagaaggucaaggcuggaag

SEQ ID NO: 17622 - RNA, 20 nt, Artificial Sequence
  Synthetic oligonucleotide: PDCD1-2722
uguggucacaguguacacag

SEQ ID NO: 17623 - RNA, 20 nt, Artificial Sequence
  Synthetic oligonucleotide: PDCD1-2716
agagggccagccgggcacag

SEQ ID NO: 17624 - RNA, 20 nt, Artificial Sequence
  Synthetic oligonucleotide: PDCD1-2712
ugcaggcuggcugggcacag

SEQ ID NO: 17625 - RNA, 20 nt, Artificial Sequence
  Synthetic oligonucleotide: PDCD1-3011
caggcaccugcccccagcag

SEQ ID NO: 17626 - RNA, 20 nt, Artificial Sequence
  Synthetic oligonucleotide: PDCD1-3015
gggaugggccgggaaggcag

SEQ ID NO: 17627 - RNA, 20 nt, Artificial Sequence
  Synthetic oligonucleotide: PDCD1-2796
gggggcuggggcgguggcag

SEQ ID NO: 17628 - RNA, 20 nt, Artificial Sequence
  Synthetic oligonucleotide: PDCD1-2810
gccaggguggggugguucag

SEQ ID NO: 17629 - RNA, 20 nt, Artificial Sequence
  Synthetic oligonucleotide: PDCD1-2971
cucucccggaucgaggagag

SEQ ID NO: 17630 - RNA, 20 nt, Artificial Sequence
  Synthetic oligonucleotide: PDCD1-3058
ccaccccacccuggcacgag

SEQ ID NO: 17631 - RNA, 20 nt, Artificial Sequence
  Synthetic oligonucleotide: PDCD1-2719
gggcacagaggguccaggag

SEQ ID NO: 17632 - RNA, 20 nt, Artificial Sequence
  Synthetic oligonucleotide: PDCD1-3029
cacaagguggaagcuuugag

SEQ ID NO: 17633 - RNA, 20 nt, Artificial Sequence
  Synthetic oligonucleotide: PDCD1-2785
augccugcaacagccugacg

SEQ ID NO: 17634 - RNA, 20 nt, Artificial Sequence
  Synthetic oligonucleotide: PDCD1-3049
ggcuggagggcagggccccg

SEQ ID NO: 17635 - RNA, 20 nt, Artificial Sequence
  Synthetic oligonucleotide: PDCD1-2801
agccuugaccuucuuccccg

SEQ ID NO: 17636 - RNA, 20 nt, Artificial Sequence
  Synthetic oligonucleotide: PDCD1-2223
agaaccccaaaccuuggccg

SEQ ID NO: 17637 - RNA, 20 nt, Artificial Sequence
  Synthetic oligonucleotide: PDCD1-2979
agcccuguucagaccauccg

SEQ ID NO: 17638 - RNA, 20 nt, Artificial Sequence
  Synthetic oligonucleotide: PDCD1-4476
agcuuaaaauaaccgaagcg

SEQ ID NO: 17639 - RNA, 20 nt, Artificial Sequence
  Synthetic oligonucleotide: PDCD1-2226
uuggccguggggagucugcg

SEQ ID NO: 17640 - RNA, 20 nt, Artificial Sequence
  Synthetic oligonucleotide: PDCD1-2972
ggccucacucucccggaucg

SEQ ID NO: 17641 - RNA, 20 nt, Artificial Sequence
  Synthetic oligonucleotide: PDCD1-2740
gauggucugaacagggcucg

SEQ ID NO: 17642 - RNA, 20 nt, Artificial Sequence
  Synthetic oligonucleotide: PDCD1-3032
gugugaggccauccacaagg

SEQ ID NO: 17643 - RNA, 20 nt, Artificial Sequence
  Synthetic oligonucleotide: PDCD1-3021
caccugugccccagcgaagg

SEQ ID NO: 17644 - RNA, 20 nt, Artificial Sequence
  Synthetic oligonucleotide: PDCD1-2748
gggcacaauccccacccagg

SEQ ID NO: 17645 - RNA, 20 nt, Artificial Sequence
  Synthetic oligonucleotide: PDCD1-2745
aaucugggcagagacccagg

SEQ ID NO: 17646 - RNA, 20 nt, Artificial Sequence
  Synthetic oligonucleotide: PDCD1-2811
ccaggguggggugguucagg

SEQ ID NO: 17647 - RNA, 20 nt, Artificial Sequence
  Synthetic oligonucleotide: PDCD1-3028
acaagguggaagcuuugagg

SEQ ID NO: 17648 - RNA, 20 nt, Artificial Sequence
  Synthetic oligonucleotide: PDCD1-3038
cuguugcaggcaucacacgg

SEQ ID NO: 17649 - RNA, 20 nt, Artificial Sequence
  Synthetic oligonucleotide: PDCD1-2786
ugccugcaacagccugacgg

SEQ ID NO: 17650 - RNA, 20 nt, Artificial Sequence
  Synthetic oligonucleotide: PDCD1-2793
ugacgggggggcuggggcgg

SEQ ID NO: 17651 - RNA, 20 nt, Artificial Sequence
  Synthetic oligonucleotide: PDCD1-2804
ccagcccacucgugccaggg

SEQ ID NO: 17652 - RNA, 20 nt, Artificial Sequence
  Synthetic oligonucleotide: PDCD1-2787
gccugcaacagccugacggg

SEQ ID NO: 17653 - RNA, 20 nt, Artificial Sequence
  Synthetic oligonucleotide: PDCD1-3042
aaggucaaggcuggaagggg

SEQ ID NO: 17654 - RNA, 20 nt, Artificial Sequence
  Synthetic oligonucleotide: PDCD1-2788
ccugcaacagccugacgggg

SEQ ID NO: 17655 - RNA, 20 nt, Artificial Sequence
  Synthetic oligonucleotide: PDCD1-2975
guucagaccauccguggggg

SEQ ID NO: 17656 - RNA, 20 nt, Artificial Sequence
  Synthetic oligonucleotide: PDCD1-2792
gccugacgggggggcugggg

SEQ ID NO: 17657 - RNA, 20 nt, Artificial Sequence
  Synthetic oligonucleotide: PDCD1-2807
ccacucgugccagggugggg

SEQ ID NO: 17658 - RNA, 20 nt, Artificial Sequence
  Synthetic oligonucleotide: PDCD1-2986
ucuccaggaucccuccuggg

SEQ ID NO: 17659 - RNA, 20 nt, Artificial Sequence
  Synthetic oligonucleotide: PDCD1-3055
cccuggcacgagugggcugg

SEQ ID NO: 17660 - RNA, 20 nt, Artificial Sequence
  Synthetic oligonucleotide: PDCD1-2816
cagugccugggccuggcugg

SEQ ID NO: 17661 - RNA, 20 nt, Artificial Sequence
  Synthetic oligonucleotide: PDCD1-2976
ccuguucagaccauccgugg

SEQ ID NO: 17662 - RNA, 20 nt, Artificial Sequence
  Synthetic oligonucleotide: PDCD1-2227
gccguggggagucugcgugg

SEQ ID NO: 17663 - RNA, 20 nt, Artificial Sequence
  Synthetic oligonucleotide: PDCD1-2756
gccaagguuagucccacaug

SEQ ID NO: 17664 - RNA, 20 nt, Artificial Sequence
  Synthetic oligonucleotide: PDCD1-2994
aggaugggaugagccccaug

SEQ ID NO: 17665 - RNA, 20 nt, Artificial Sequence
  Synthetic oligonucleotide: PDCD1-3036
gguggaaagaucuggaacug

SEQ ID NO: 17666 - RNA, 20 nt, Artificial Sequence
  Synthetic oligonucleotide: PDCD1-2960
gcccagccagccugcaccug

SEQ ID NO: 17667 - RNA, 20 nt, Artificial Sequence
  Synthetic oligonucleotide: PDCD1-2776
cggcccaucccccuucgcug

SEQ ID NO: 17668 - RNA, 20 nt, Artificial Sequence
  Synthetic oligonucleotide: PDCD1-2721
gaggguccaggagcgggcug

SEQ ID NO: 17669 - RNA, 20 nt, Artificial Sequence
  Synthetic oligonucleotide: PDCD1-2791
acagccugacgggggggcug

SEQ ID NO: 17670 - RNA, 20 nt, Artificial Sequence
  Synthetic oligonucleotide: PDCD1-2732
cuccucgauccgggagagug

SEQ ID NO: 17671 - RNA, 20 nt, Artificial Sequence
  Synthetic oligonucleotide: PDCD1-2758
uccuuaggaaaacucgagug

SEQ ID NO: 17672 - RNA, 20 nt, Artificial Sequence
  Synthetic oligonucleotide: PDCD1-2990
aaaguguaccuguucgagug

SEQ ID NO: 17673 - RNA, 20 nt, Artificial Sequence
  Synthetic oligonucleotide: PDCD1-2225
aaccccaaaccuuggccgug

SEQ ID NO: 17674 - RNA, 20 nt, Artificial Sequence
  Synthetic oligonucleotide: PDCD1-2977
cccuguucagaccauccgug

SEQ ID NO: 17675 - RNA, 20 nt, Artificial Sequence
  Synthetic oligonucleotide: PDCD1-2806
agcccacucgugccagggug

SEQ ID NO: 17676 - RNA, 20 nt, Artificial Sequence
  Synthetic oligonucleotide: PDCD1-2984
uccaggaucccuccugggug

SEQ ID NO: 17677 - RNA, 20 nt, Artificial Sequence
  Synthetic oligonucleotide: PDCD1-2798
gguggcaggggcuggcugug

SEQ ID NO: 17678 - RNA, 20 nt, Artificial Sequence
  Synthetic oligonucleotide: PDCD1-3034
ggaacuguggccauggugug

SEQ ID NO: 17679 - RNA, 20 nt, Artificial Sequence
  Synthetic oligonucleotide: PDCD1-2780
cccucaaagcuuccaccuug

SEQ ID NO: 17680 - RNA, 20 nt, Artificial Sequence
  Synthetic oligonucleotide: PDCD1-3031
uccacaagguggaagcuuug

SEQ ID NO: 17681 - RNA, 20 nt, Artificial Sequence
  Synthetic oligonucleotide: PDCD1-2087
cuccccacggccaagguuug

SEQ ID NO: 17682 - RNA, 20 nt, Artificial Sequence
  Synthetic oligonucleotide: PDCD1-2779
gacaacuguccauggcuaau

SEQ ID NO: 17683 - RNA, 20 nt, Artificial Sequence
  Synthetic oligonucleotide: PDCD1-2755
agccaagguuagucccacau

SEQ ID NO: 17684 - RNA, 20 nt, Artificial Sequence
  Synthetic oligonucleotide: PDCD1-2995
acucgaguuuuccuaaggau

SEQ ID NO: 17685 - RNA, 20 nt, Artificial Sequence
  Synthetic oligonucleotide: PDCD1-3019
gugccccagcgaagggggau

SEQ ID NO: 17686 - RNA, 20 nt, Artificial Sequence
  Synthetic oligonucleotide: PDCD1-2222
cuggccagaaccccaaaccu

SEQ ID NO: 17687 - RNA, 20 nt, Artificial Sequence
  Synthetic oligonucleotide: PDCD1-2992
gccccaugugggacuaaccu

SEQ ID NO: 17688 - RNA, 20 nt, Artificial Sequence
  Synthetic oligonucleotide: PDCD1-2961
ugcccagccagccugcaccu

SEQ ID NO: 17689 - RNA, 20 nt, Artificial Sequence
  Synthetic oligonucleotide: PDCD1-2966
ccugggcugcccgugacccu

SEQ ID NO: 17690 - RNA, 20 nt, Artificial Sequence
  Synthetic oligonucleotide: PDCD1-2982
gguggggauugugcccgccu

SEQ ID NO: 17691 - RNA, 20 nt, Artificial Sequence
  Synthetic oligonucleotide: PDCD1-2974
accauccgugggggaggccu

SEQ ID NO: 17692 - RNA, 20 nt, Artificial Sequence
  Synthetic oligonucleotide: PDCD1-2761
agugaggaccaaggaugccu

SEQ ID NO: 17693 - RNA, 20 nt, Artificial Sequence
  Synthetic oligonucleotide: PDCD1-2813
guucaggggguccagugccu

SEQ ID NO: 17694 - RNA, 20 nt, Artificial Sequence
  Synthetic oligonucleotide: PDCD1-2998
cugccuugcccaggcauccu

SEQ ID NO: 17695 - RNA, 20 nt, Artificial Sequence
  Synthetic oligonucleotide: PDCD1-2987
cugucuccaggaucccuccu

SEQ ID NO: 17696 - RNA, 20 nt, Artificial Sequence
  Synthetic oligonucleotide: PDCD1-2968
gagagagggagccucuuccu

SEQ ID NO: 17697 - RNA, 20 nt, Artificial Sequence
  Synthetic oligonucleotide: PDCD1-2775
ccggcccaucccccuucgcu

SEQ ID NO: 17698 - RNA, 20 nt, Artificial Sequence
  Synthetic oligonucleotide: PDCD1-2738
cggauggucugaacagggcu

SEQ ID NO: 17699 - RNA, 20 nt, Artificial Sequence
  Synthetic oligonucleotide: PDCD1-2790
aacagccugacgggggggcu

SEQ ID NO: 17700 - RNA, 20 nt, Artificial Sequence
  Synthetic oligonucleotide: PDCD1-2711
uccccaggugcaggcuggcu

SEQ ID NO: 17701 - RNA, 20 nt, Artificial Sequence
  Synthetic oligonucleotide: PDCD1-2743
cggggagagcccuggaaucu

SEQ ID NO: 17702 - RNA, 20 nt, Artificial Sequence
  Synthetic oligonucleotide: PDCD1-3026
auggacaguugucauucagu

SEQ ID NO: 17703 - RNA, 20 nt, Artificial Sequence
  Synthetic oligonucleotide: PDCD1-3057
caccccacccuggcacgagu

SEQ ID NO: 17704 - RNA, 20 nt, Artificial Sequence
  Synthetic oligonucleotide: PDCD1-2224
gaaccccaaaccuuggccgu

SEQ ID NO: 17705 - RNA, 20 nt, Artificial Sequence
  Synthetic oligonucleotide: PDCD1-2978
gcccuguucagaccauccgu

SEQ ID NO: 17706 - RNA, 20 nt, Artificial Sequence
  Synthetic oligonucleotide: PDCD1-2805
cagcccacucgugccagggu

SEQ ID NO: 17707 - RNA, 20 nt, Artificial Sequence
  Synthetic oligonucleotide: PDCD1-2985
cuccaggaucccuccugggu

SEQ ID NO: 17708 - RNA, 20 nt, Artificial Sequence
  Synthetic oligonucleotide: PDCD1-2993
ggaugggaugagccccaugu

SEQ ID NO: 17709 - RNA, 20 nt, Artificial Sequence
  Synthetic oligonucleotide: PDCD1-2752
ucacucgaacagguacacuu

SEQ ID NO: 17710 - RNA, 20 nt, Artificial Sequence
  Synthetic oligonucleotide: PDCD1-2757
auggggcucaucccauccuu

SEQ ID NO: 17711 - RNA, 20 nt, Artificial Sequence
  Synthetic oligonucleotide: PDCD1-4477
ggcgguuucuagccucgcuu

SEQ ID NO: 17712 - RNA, 20 nt, Artificial Sequence
  Synthetic oligonucleotide: PDCD1-2085
gacuccccacggccaagguu

SEQ ID NO: 17713 - RNA, 20 nt, Artificial Sequence
  Synthetic oligonucleotide: PDCD1-2086
acuccccacggccaagguuu

SEQ ID NO: 17714 - RNA, 21 nt, Artificial Sequence
  Synthetic oligonucleotide: PDCD1-4478
uuggggcccagagaggaaccc

SEQ ID NO: 17715 - RNA, 22 nt, Artificial Sequence
  Synthetic oligonucleotide: PDCD1-4479
guuggggcccagagaggaaccc

SEQ ID NO: 17716 - RNA, 23 nt, Artificial Sequence
  Synthetic oligonucleotide: PDCD1-4480
aguuggggcccagagaggaaccc

SEQ ID NO: 17717 - RNA, 24 nt, Artificial Sequence
  Synthetic oligonucleotide: PDCD1-4481
gaguuggggcccagagaggaaccc

SEQ ID NO: 17718 - RNA, 18 nt, Artificial Sequence
  Synthetic oligonucleotide: PDCD1-4482
cuccacauccacgugggc

SEQ ID NO: 17719 - RNA, 19 nt, Artificial Sequence
  Synthetic oligonucleotide: PDCD1-4483
ccuccacauccacgugggc

SEQ ID NO: 17720 - RNA, 20 nt, Artificial Sequence
  Synthetic oligonucleotide: PDCD1-1034
uccuccacauccacgugggc

SEQ ID NO: 17721 - RNA, 21 nt, Artificial Sequence
  Synthetic oligonucleotide: PDCD1-4484
uuccuccacauccacgugggc

SEQ ID NO: 17722 - RNA, 22 nt, Artificial Sequence
  Synthetic oligonucleotide: PDCD1-4485
cuuccuccacauccacgugggc

SEQ ID NO: 17723 - RNA, 23 nt, Artificial Sequence
  Synthetic oligonucleotide: PDCD1-4486
ucuuccuccacauccacgugggc

SEQ ID NO: 17724 - RNA, 24 nt, Artificial Sequence
  Synthetic oligonucleotide: PDCD1-4487
cucuuccuccacauccacgugggc

SEQ ID NO: 17725 - RNA, 18 nt, Artificial Sequence
  Synthetic oligonucleotide: PDCD1-4488
cccaggucagguugaagg

SEQ ID NO: 17726 - RNA, 19 nt, Artificial Sequence
  Synthetic oligonucleotide: PDCD1-4489
ucccaggucagguugaagg

SEQ ID NO: 17727 - RNA, 20 nt, Artificial Sequence
  Synthetic oligonucleotide: PDCD1-1031
gucccaggucagguugaagg

SEQ ID NO: 17728 - RNA, 21 nt, Artificial Sequence
  Synthetic oligonucleotide: PDCD1-4490
ugucccaggucagguugaagg

SEQ ID NO: 17729 - RNA, 22 nt, Artificial Sequence
  Synthetic oligonucleotide: PDCD1-4491
cugucccaggucagguugaagg

SEQ ID NO: 17730 - RNA, 23 nt, Artificial Sequence
  Synthetic oligonucleotide: PDCD1-4492
acugucccaggucagguugaagg

SEQ ID NO: 17731 - RNA, 24 nt, Artificial Sequence
  Synthetic oligonucleotide: PDCD1-4493
aacugucccaggucagguugaagg

SEQ ID NO: 17732 - RNA, 18 nt, Artificial Sequence
  Synthetic oligonucleotide: PDCD1-3188
gacuggccagggcgccug

SEQ ID NO: 17733 - RNA, 19 nt, Artificial Sequence
  Synthetic oligonucleotide: PDCD1-3189
cgacuggccagggcgccug

SEQ ID NO: 17734 - RNA, 20 nt, Artificial Sequence
  Synthetic oligonucleotide: PDCD1-125
acgacuggccagggcgccug

SEQ ID NO: 17735 - RNA, 21 nt, Artificial Sequence
  Synthetic oligonucleotide: PDCD1-3190
gacgacuggccagggcgccug

SEQ ID NO: 17736 - RNA, 22 nt, Artificial Sequence
  Synthetic oligonucleotide: PDCD1-3191
agacgacuggccagggcgccug

SEQ ID NO: 17737 - RNA, 23 nt, Artificial Sequence
  Synthetic oligonucleotide: PDCD1-3192
cagacgacuggccagggcgccug

SEQ ID NO: 17738 - RNA, 24 nt, Artificial Sequence
  Synthetic oligonucleotide: PDCD1-3193
ccagacgacuggccagggcgccug

SEQ ID NO: 17739 - RNA, 21 nt, Artificial Sequence
  Synthetic oligonucleotide: PDCD1-4494
gagcugccccuccugaggcug

SEQ ID NO: 17740 - RNA, 22 nt, Artificial Sequence
  Synthetic oligonucleotide: PDCD1-4495
cgagcugccccuccugaggcug

SEQ ID NO: 17741 - RNA, 23 nt, Artificial Sequence
  Synthetic oligonucleotide: PDCD1-4496
ccgagcugccccuccugaggcug

SEQ ID NO: 17742 - RNA, 24 nt, Artificial Sequence
  Synthetic oligonucleotide: PDCD1-4497
cccgagcugccccuccugaggcug

SEQ ID NO: 17743 - RNA, 21 nt, Artificial Sequence
  Synthetic oligonucleotide: PDCD1-4498
ucagguuccugggcugcagug

SEQ ID NO: 17744 - RNA, 22 nt, Artificial Sequence
  Synthetic oligonucleotide: PDCD1-4499
cucagguuccugggcugcagug

SEQ ID NO: 17745 - RNA, 23 nt, Artificial Sequence
  Synthetic oligonucleotide: PDCD1-4500
gcucagguuccugggcugcagug

SEQ ID NO: 17746 - RNA, 24 nt, Artificial Sequence
  Synthetic oligonucleotide: PDCD1-4501
ggcucagguuccugggcugcagug

SEQ ID NO: 17747 - RNA, 18 nt, Artificial Sequence
  Synthetic oligonucleotide: PDCD1-4502
ccccacgcccuaccccgu

SEQ ID NO: 17748 - RNA, 19 nt, Artificial Sequence
  Synthetic oligonucleotide: PDCD1-4503
cccccacgcccuaccccgu

SEQ ID NO: 17749 - RNA, 20 nt, Artificial Sequence
  Synthetic oligonucleotide: PDCD1-2280
gcccccacgcccuaccccgu

SEQ ID NO: 17750 - RNA, 21 nt, Artificial Sequence
  Synthetic oligonucleotide: PDCD1-4504
ggcccccacgcccuaccccgu

SEQ ID NO: 17751 - RNA, 22 nt, Artificial Sequence
  Synthetic oligonucleotide: PDCD1-4505
uggcccccacgcccuaccccgu

SEQ ID NO: 17752 - RNA, 23 nt, Artificial Sequence
  Synthetic oligonucleotide: PDCD1-4506
guggcccccacgcccuaccccgu

SEQ ID NO: 17753 - RNA, 24 nt, Artificial Sequence
  Synthetic oligonucleotide: PDCD1-4507
cguggcccccacgcccuaccccgu

SEQ ID NO: 17754 - RNA, 21 nt, Artificial Sequence
  Synthetic oligonucleotide: PDCD1-4508
ccugagcuggggagaccccca

SEQ ID NO: 17755 - RNA, 22 nt, Artificial Sequence
  Synthetic oligonucleotide: PDCD1-4509
cccugagcuggggagaccccca

SEQ ID NO: 17756 - RNA, 23 nt, Artificial Sequence
  Synthetic oligonucleotide: PDCD1-4510
gcccugagcuggggagaccccca

SEQ ID NO: 17757 - RNA, 24 nt, Artificial Sequence
  Synthetic oligonucleotide: PDCD1-4511
ggcccugagcuggggagaccccca

SEQ ID NO: 17758 - RNA, 21 nt, Artificial Sequence
  Synthetic oligonucleotide: PDCD1-4512
ggaggcucccagaggcuccga

SEQ ID NO: 17759 - RNA, 22 nt, Artificial Sequence
  Synthetic oligonucleotide: PDCD1-4513
gggaggcucccagaggcuccga

SEQ ID NO: 17760 - RNA, 23 nt, Artificial Sequence
  Synthetic oligonucleotide: PDCD1-4514
cgggaggcucccagaggcuccga

SEQ ID NO: 17761 - RNA, 24 nt, Artificial Sequence
  Synthetic oligonucleotide: PDCD1-4515
ccgggaggcucccagaggcuccga

SEQ ID NO: 17762 - RNA, 18 nt, Artificial Sequence
  Synthetic oligonucleotide: PDCD1-4516
ucugucacucucgcccac

SEQ ID NO: 17763 - RNA, 19 nt, Artificial Sequence
  Synthetic oligonucleotide: PDCD1-4517
cucugucacucucgcccac

SEQ ID NO: 17764 - RNA, 20 nt, Artificial Sequence
  Synthetic oligonucleotide: PDCD1-1470
ccucugucacucucgcccac

SEQ ID NO: 17765 - RNA, 21 nt, Artificial Sequence
  Synthetic oligonucleotide: PDCD1-4518
gccucugucacucucgcccac

SEQ ID NO: 17766 - RNA, 22 nt, Artificial Sequence
  Synthetic oligonucleotide: PDCD1-4519
ugccucugucacucucgcccac

SEQ ID NO: 17767 - RNA, 23 nt, Artificial Sequence
  Synthetic oligonucleotide: PDCD1-4520
cugccucugucacucucgcccac

SEQ ID NO: 17768 - RNA, 24 nt, Artificial Sequence
  Synthetic oligonucleotide: PDCD1-4521
acugccucugucacucucgcccac

SEQ ID NO: 17769 - RNA, 18 nt, Artificial Sequence
  Synthetic oligonucleotide: PDCD1-4522
gucaggugucccagagcc

SEQ ID NO: 17770 - RNA, 19 nt, Artificial Sequence
  Synthetic oligonucleotide: PDCD1-4523
ggucaggugucccagagcc

SEQ ID NO: 17771 - RNA, 20 nt, Artificial Sequence
  Synthetic oligonucleotide: PDCD1-2164
cggucaggugucccagagcc

SEQ ID NO: 17772 - RNA, 21 nt, Artificial Sequence
  Synthetic oligonucleotide: PDCD1-4524
gcggucaggugucccagagcc

SEQ ID NO: 17773 - RNA, 22 nt, Artificial Sequence
  Synthetic oligonucleotide: PDCD1-4525
ggcggucaggugucccagagcc

SEQ ID NO: 17774 - RNA, 23 nt, Artificial Sequence
  Synthetic oligonucleotide: PDCD1-4526
cggcggucaggugucccagagcc

SEQ ID NO: 17775 - RNA, 24 nt, Artificial Sequence
  Synthetic oligonucleotide: PDCD1-4527
ucggcggucaggugucccagagcc

SEQ ID NO: 17776 - RNA, 18 nt, Artificial Sequence
  Synthetic oligonucleotide: PDCD1-3198
uacaacugggcuggcggc

SEQ ID NO: 17777 - RNA, 19 nt, Artificial Sequence
  Synthetic oligonucleotide: PDCD1-3199
cuacaacugggcuggcggc

SEQ ID NO: 17778 - RNA, 20 nt, Artificial Sequence
  Synthetic oligonucleotide: PDCD1-531
gcuacaacugggcuggcggc

SEQ ID NO: 17779 - RNA, 21 nt, Artificial Sequence
  Synthetic oligonucleotide: PDCD1-3200
ugcuacaacugggcuggcggc

SEQ ID NO: 17780 - RNA, 22 nt, Artificial Sequence
  Synthetic oligonucleotide: PDCD1-3201
gugcuacaacugggcuggcggc

SEQ ID NO: 17781 - RNA, 23 nt, Artificial Sequence
  Synthetic oligonucleotide: PDCD1-3202
ggugcuacaacugggcuggcggc

SEQ ID NO: 17782 - RNA, 24 nt, Artificial Sequence
  Synthetic oligonucleotide: PDCD1-3203
cggugcuacaacugggcuggcggc

SEQ ID NO: 17783 - RNA, 18 nt, Artificial Sequence
  Synthetic oligonucleotide: PDCD1-4528
uuugggcagcucgaacuc

SEQ ID NO: 17784 - RNA, 19 nt, Artificial Sequence
  Synthetic oligonucleotide: PDCD1-4529
cuuugggcagcucgaacuc

SEQ ID NO: 17785 - RNA, 20 nt, Artificial Sequence
  Synthetic oligonucleotide: PDCD1-1411
gcuuugggcagcucgaacuc

SEQ ID NO: 17786 - RNA, 21 nt, Artificial Sequence
  Synthetic oligonucleotide: PDCD1-4530
ggcuuugggcagcucgaacuc

SEQ ID NO: 17787 - RNA, 22 nt, Artificial Sequence
  Synthetic oligonucleotide: PDCD1-4531
uggcuuugggcagcucgaacuc

SEQ ID NO: 17788 - RNA, 23 nt, Artificial Sequence
  Synthetic oligonucleotide: PDCD1-4532
guggcuuugggcagcucgaacuc

SEQ ID NO: 17789 - RNA, 24 nt, Artificial Sequence
  Synthetic oligonucleotide: PDCD1-4533
uguggcuuugggcagcucgaacuc

SEQ ID NO: 17790 - RNA, 21 nt, Artificial Sequence
  Synthetic oligonucleotide: PDCD1-4534
gaggcuccgacagaaugggag

SEQ ID NO: 17791 - RNA, 22 nt, Artificial Sequence
  Synthetic oligonucleotide: PDCD1-4535
agaggcuccgacagaaugggag

SEQ ID NO: 17792 - RNA, 23 nt, Artificial Sequence
  Synthetic oligonucleotide: PDCD1-4536
cagaggcuccgacagaaugggag

SEQ ID NO: 17793 - RNA, 24 nt, Artificial Sequence
  Synthetic oligonucleotide: PDCD1-4537
ccagaggcuccgacagaaugggag

SEQ ID NO: 17794 - RNA, 18 nt, Artificial Sequence
  Synthetic oligonucleotide: PDCD1-4538
cccaggggucccggagcg

SEQ ID NO: 17795 - RNA, 19 nt, Artificial Sequence
  Synthetic oligonucleotide: PDCD1-4539
gcccaggggucccggagcg

SEQ ID NO: 17796 - RNA, 20 nt, Artificial Sequence
  Synthetic oligonucleotide: PDCD1-2186
agcccaggggucccggagcg

SEQ ID NO: 17797 - RNA, 21 nt, Artificial Sequence
  Synthetic oligonucleotide: PDCD1-4540
cagcccaggggucccggagcg

SEQ ID NO: 17798 - RNA, 22 nt, Artificial Sequence
  Synthetic oligonucleotide: PDCD1-4541
gcagcccaggggucccggagcg

SEQ ID NO: 17799 - RNA, 23 nt, Artificial Sequence
  Synthetic oligonucleotide: PDCD1-4542
ggcagcccaggggucccggagcg

SEQ ID NO: 17800 - RNA, 24 nt, Artificial Sequence
  Synthetic oligonucleotide: PDCD1-4543
uggcagcccaggggucccggagcg

SEQ ID NO: 17801 - RNA, 18 nt, Artificial Sequence
  Synthetic oligonucleotide: PDCD1-3204
ggaugguucuuagguagg

SEQ ID NO: 17802 - RNA, 19 nt, Artificial Sequence
  Synthetic oligonucleotide: PDCD1-3205
aggaugguucuuagguagg

SEQ ID NO: 17803 - RNA, 20 nt, Artificial Sequence
  Synthetic oligonucleotide: PDCD1-115
caggaugguucuuagguagg

SEQ ID NO: 17804 - RNA, 21 nt, Artificial Sequence
  Synthetic oligonucleotide: PDCD1-3206
ccaggaugguucuuagguagg

SEQ ID NO: 17805 - RNA, 22 nt, Artificial Sequence
  Synthetic oligonucleotide: PDCD1-3207
gccaggaugguucuuagguagg

SEQ ID NO: 17806 - RNA, 23 nt, Artificial Sequence
  Synthetic oligonucleotide: PDCD1-3208
ggccaggaugguucuuagguagg

SEQ ID NO: 17807 - RNA, 24 nt, Artificial Sequence
  Synthetic oligonucleotide: PDCD1-3209
cggccaggaugguucuuagguagg

SEQ ID NO: 17808 - RNA, 21 nt, Artificial Sequence
  Synthetic oligonucleotide: PDCD1-4544
cccggcccccagggagauggg

SEQ ID NO: 17809 - RNA, 22 nt, Artificial Sequence
  Synthetic oligonucleotide: PDCD1-4545
gcccggcccccagggagauggg

SEQ ID NO: 17810 - RNA, 23 nt, Artificial Sequence
  Synthetic oligonucleotide: PDCD1-4546
ggcccggcccccagggagauggg

SEQ ID NO: 17811 - RNA, 24 nt, Artificial Sequence
  Synthetic oligonucleotide: PDCD1-4547
aggcccggcccccagggagauggg

SEQ ID NO: 17812 - RNA, 18 nt, Artificial Sequence
  Synthetic oligonucleotide: PDCD1-4548
cagaggcuccgacagaau

SEQ ID NO: 17813 - RNA, 19 nt, Artificial Sequence
  Synthetic oligonucleotide: PDCD1-4549
ccagaggcuccgacagaau

SEQ ID NO: 17814 - RNA, 20 nt, Artificial Sequence
  Synthetic oligonucleotide: PDCD1-3002
cccagaggcuccgacagaau

SEQ ID NO: 17815 - RNA, 21 nt, Artificial Sequence
  Synthetic oligonucleotide: PDCD1-4550
ucccagaggcuccgacagaau

SEQ ID NO: 17816 - RNA, 22 nt, Artificial Sequence
  Synthetic oligonucleotide: PDCD1-4551
cucccagaggcuccgacagaau

SEQ ID NO: 17817 - RNA, 23 nt, Artificial Sequence
  Synthetic oligonucleotide: PDCD1-4552
gcucccagaggcuccgacagaau

SEQ ID NO: 17818 - RNA, 24 nt, Artificial Sequence
  Synthetic oligonucleotide: PDCD1-4553
ggcucccagaggcuccgacagaau

SEQ ID NO: 17819 - RNA, 18 nt, Artificial Sequence
  Synthetic oligonucleotide: PDCD1-4554
ggggaggaggggugagga

SEQ ID NO: 17820 - RNA, 19 nt, Artificial Sequence
  Synthetic oligonucleotide: PDCD1-4555
gggggaggaggggugagga

SEQ ID NO: 17821 - RNA, 20 nt, Artificial Sequence
  Synthetic oligonucleotide: PDCD1-2253
ugggggaggaggggugagga

SEQ ID NO: 17822 - RNA, 21 nt, Artificial Sequence
  Synthetic oligonucleotide: PDCD1-4556
cugggggaggaggggugagga

SEQ ID NO: 17823 - RNA, 22 nt, Artificial Sequence
  Synthetic oligonucleotide: PDCD1-4557
gcugggggaggaggggugagga

SEQ ID NO: 17824 - RNA, 23 nt, Artificial Sequence
  Synthetic oligonucleotide: PDCD1-4558
ugcugggggaggaggggugagga

SEQ ID NO: 17825 - RNA, 24 nt, Artificial Sequence
  Synthetic oligonucleotide: PDCD1-4559
gugcugggggaggaggggugagga

SEQ ID NO: 17826 - RNA, 18 nt, Artificial Sequence
  Synthetic oligonucleotide: PDCD1-4560
aggggguaggacugggga

SEQ ID NO: 17827 - RNA, 19 nt, Artificial Sequence
  Synthetic oligonucleotide: PDCD1-4561
gaggggguaggacugggga

SEQ ID NO: 17828 - RNA, 20 nt, Artificial Sequence
  Synthetic oligonucleotide: PDCD1-1057
ggaggggguaggacugggga

SEQ ID NO: 17829 - RNA, 21 nt, Artificial Sequence
  Synthetic oligonucleotide: PDCD1-4562
aggaggggguaggacugggga

SEQ ID NO: 17830 - RNA, 22 nt, Artificial Sequence
  Synthetic oligonucleotide: PDCD1-4563
gaggaggggguaggacugggga

SEQ ID NO: 17831 - RNA, 23 nt, Artificial Sequence
  Synthetic oligonucleotide: PDCD1-4564
ugaggaggggguaggacugggga

SEQ ID NO: 17832 - RNA, 24 nt, Artificial Sequence
  Synthetic oligonucleotide: PDCD1-4565
gugaggaggggguaggacugggga

SEQ ID NO: 17833 - RNA, 18 nt, Artificial Sequence
  Synthetic oligonucleotide: PDCD1-3214
ugccuggagcagccccac

SEQ ID NO: 17834 - RNA, 19 nt, Artificial Sequence
  Synthetic oligonucleotide: PDCD1-3215
augccuggagcagccccac

SEQ ID NO: 17835 - RNA, 20 nt, Artificial Sequence
  Synthetic oligonucleotide: PDCD1-587
caugccuggagcagccccac

SEQ ID NO: 17836 - RNA, 21 nt, Artificial Sequence
  Synthetic oligonucleotide: PDCD1-3216
gcaugccuggagcagccccac

SEQ ID NO: 17837 - RNA, 22 nt, Artificial Sequence
  Synthetic oligonucleotide: PDCD1-3217
ugcaugccuggagcagccccac

SEQ ID NO: 17838 - RNA, 23 nt, Artificial Sequence
  Synthetic oligonucleotide: PDCD1-3218
cugcaugccuggagcagccccac

SEQ ID NO: 17839 - RNA, 24 nt, Artificial Sequence
  Synthetic oligonucleotide: PDCD1-3219
ucugcaugccuggagcagccccac

SEQ ID NO: 17840 - RNA, 18 nt, Artificial Sequence
  Synthetic oligonucleotide: PDCD1-4566
gggcccagagaggaaccc

SEQ ID NO: 17841 - RNA, 19 nt, Artificial Sequence
  Synthetic oligonucleotide: PDCD1-4567
ggggcccagagaggaaccc

SEQ ID NO: 17842 - RNA, 20 nt, Artificial Sequence
  Synthetic oligonucleotide: PDCD1-2109
uggggcccagagaggaaccc

SEQ ID NO: 17843 - RNA, 18 nt, Artificial Sequence
  Synthetic oligonucleotide: PDCD1-4568
ccucccugccuggggaag

SEQ ID NO: 17844 - RNA, 19 nt, Artificial Sequence
  Synthetic oligonucleotide: PDCD1-4569
gccucccugccuggggaag

SEQ ID NO: 17845 - RNA, 20 nt, Artificial Sequence
  Synthetic oligonucleotide: PDCD1-1101
ggccucccugccuggggaag

SEQ ID NO: 17846 - RNA, 21 nt, Artificial Sequence
  Synthetic oligonucleotide: PDCD1-4570
gggccucccugccuggggaag

SEQ ID NO: 17847 - RNA, 22 nt, Artificial Sequence
  Synthetic oligonucleotide: PDCD1-4571
cgggccucccugccuggggaag

SEQ ID NO: 17848 - RNA, 23 nt, Artificial Sequence
  Synthetic oligonucleotide: PDCD1-4572
ccgggccucccugccuggggaag

SEQ ID NO: 17849 - RNA, 24 nt, Artificial Sequence
  Synthetic oligonucleotide: PDCD1-4573
gccgggccucccugccuggggaag

SEQ ID NO: 17850 - RNA, 18 nt, Artificial Sequence
  Synthetic oligonucleotide: PDCD1-4574
aggcagugcugggggagg

SEQ ID NO: 17851 - RNA, 19 nt, Artificial Sequence
  Synthetic oligonucleotide: PDCD1-4575
gaggcagugcugggggagg

SEQ ID NO: 17852 - RNA, 20 nt, Artificial Sequence
  Synthetic oligonucleotide: PDCD1-2248
agaggcagugcugggggagg

SEQ ID NO: 17853 - RNA, 21 nt, Artificial Sequence
  Synthetic oligonucleotide: PDCD1-4576
cagaggcagugcugggggagg

SEQ ID NO: 17854 - RNA, 22 nt, Artificial Sequence
  Synthetic oligonucleotide: PDCD1-4577
acagaggcagugcugggggagg

SEQ ID NO: 17855 - RNA, 23 nt, Artificial Sequence
  Synthetic oligonucleotide: PDCD1-4578
gacagaggcagugcugggggagg

SEQ ID NO: 17856 - RNA, 24 nt, Artificial Sequence
  Synthetic oligonucleotide: PDCD1-4579
ugacagaggcagugcugggggagg

SEQ ID NO: 17857 - RNA, 18 nt, Artificial Sequence
  Synthetic oligonucleotide: PDCD1-4580
ggggacuugggccagggg

SEQ ID NO: 17858 - RNA, 19 nt, Artificial Sequence
  Synthetic oligonucleotide: PDCD1-4581
aggggacuugggccagggg

SEQ ID NO: 17859 - RNA, 20 nt, Artificial Sequence
  Synthetic oligonucleotide: PDCD1-2104
gaggggacuugggccagggg

SEQ ID NO: 17860 - RNA, 21 nt, Artificial Sequence
  Synthetic oligonucleotide: PDCD1-4582
agaggggacuugggccagggg

SEQ ID NO: 17861 - RNA, 22 nt, Artificial Sequence
  Synthetic oligonucleotide: PDCD1-4583
aagaggggacuugggccagggg

SEQ ID NO: 17862 - RNA, 23 nt, Artificial Sequence
  Synthetic oligonucleotide: PDCD1-4584
aaagaggggacuugggccagggg

SEQ ID NO: 17863 - RNA, 24 nt, Artificial Sequence
  Synthetic oligonucleotide: PDCD1-4585
caaagaggggacuugggccagggg

SEQ ID NO: 17864 - RNA, 18 nt, Artificial Sequence
  Synthetic oligonucleotide: PDCD1-4586
cugccccuccugaggcug

SEQ ID NO: 17865 - RNA, 19 nt, Artificial Sequence
  Synthetic oligonucleotide: PDCD1-4587
gcugccccuccugaggcug

SEQ ID NO: 17866 - RNA, 20 nt, Artificial Sequence
  Synthetic oligonucleotide: PDCD1-1089
agcugccccuccugaggcug

SEQ ID NO: 17867 - RNA, 18 nt, Artificial Sequence
  Synthetic oligonucleotide: PDCD1-4588
gguuccugggcugcagug

SEQ ID NO: 17868 - RNA, 19 nt, Artificial Sequence
  Synthetic oligonucleotide: PDCD1-4589
agguuccugggcugcagug

SEQ ID NO: 17869 - RNA, 20 nt, Artificial Sequence
  Synthetic oligonucleotide: PDCD1-4468
cagguuccugggcugcagug

SEQ ID NO: 17870 - RNA, 18 nt, Artificial Sequence
  Synthetic oligonucleotide: PDCD1-4590
cccgaccugccagggacu

SEQ ID NO: 17871 - RNA, 19 nt, Artificial Sequence
  Synthetic oligonucleotide: PDCD1-4591
ccccgaccugccagggacu

SEQ ID NO: 17872 - RNA, 20 nt, Artificial Sequence
  Synthetic oligonucleotide: PDCD1-998
cccccgaccugccagggacu

SEQ ID NO: 17873 - RNA, 21 nt, Artificial Sequence
  Synthetic oligonucleotide: PDCD1-4592
ccccccgaccugccagggacu

SEQ ID NO: 17874 - RNA, 22 nt, Artificial Sequence
  Synthetic oligonucleotide: PDCD1-4593
accccccgaccugccagggacu

SEQ ID NO: 17875 - RNA, 23 nt, Artificial Sequence
  Synthetic oligonucleotide: PDCD1-4594
caccccccgaccugccagggacu

SEQ ID NO: 17876 - RNA, 24 nt, Artificial Sequence
  Synthetic oligonucleotide: PDCD1-4595
gcaccccccgaccugccagggacu

SEQ ID NO: 17877 - RNA, 18 nt, Artificial Sequence
  Synthetic oligonucleotide: PDCD1-4596
gcccaaagccacacagcu

SEQ ID NO: 17878 - RNA, 19 nt, Artificial Sequence
  Synthetic oligonucleotide: PDCD1-4597
ugcccaaagccacacagcu

SEQ ID NO: 17879 - RNA, 20 nt, Artificial Sequence
  Synthetic oligonucleotide: PDCD1-987
cugcccaaagccacacagcu

SEQ ID NO: 17880 - RNA, 21 nt, Artificial Sequence
  Synthetic oligonucleotide: PDCD1-4598
gcugcccaaagccacacagcu

SEQ ID NO: 17881 - RNA, 22 nt, Artificial Sequence
  Synthetic oligonucleotide: PDCD1-4599
agcugcccaaagccacacagcu

SEQ ID NO: 17882 - RNA, 23 nt, Artificial Sequence
  Synthetic oligonucleotide: PDCD1-4600
gagcugcccaaagccacacagcu

SEQ ID NO: 17883 - RNA, 24 nt, Artificial Sequence
  Synthetic oligonucleotide: PDCD1-4601
cgagcugcccaaagccacacagcu

SEQ ID NO: 17884 - RNA, 18 nt, Artificial Sequence
  Synthetic oligonucleotide: PDCD1-4602
gagcuggggagaccccca

SEQ ID NO: 17885 - RNA, 19 nt, Artificial Sequence
  Synthetic oligonucleotide: PDCD1-4603
ugagcuggggagaccccca

SEQ ID NO: 17886 - RNA, 20 nt, Artificial Sequence
  Synthetic oligonucleotide: PDCD1-2355
cugagcuggggagaccccca

SEQ ID NO: 17887 - RNA, 18 nt, Artificial Sequence
  Synthetic oligonucleotide: PDCD1-4604
ggcucccagaggcuccga

SEQ ID NO: 17888 - RNA, 19 nt, Artificial Sequence
  Synthetic oligonucleotide: PDCD1-4605
aggcucccagaggcuccga

SEQ ID NO: 17889 - RNA, 20 nt, Artificial Sequence
  Synthetic oligonucleotide: PDCD1-1909
gaggcucccagaggcuccga

SEQ ID NO: 17890 - RNA, 18 nt, Artificial Sequence
  Synthetic oligonucleotide: PDCD1-4606
gccuggcccuggcagccc

SEQ ID NO: 17891 - RNA, 19 nt, Artificial Sequence
  Synthetic oligonucleotide: PDCD1-4607
ggccuggcccuggcagccc

SEQ ID NO: 17892 - RNA, 20 nt, Artificial Sequence
  Synthetic oligonucleotide: PDCD1-2182
gggccuggcccuggcagccc

SEQ ID NO: 17893 - RNA, 21 nt, Artificial Sequence
  Synthetic oligonucleotide: PDCD1-4608
cgggccuggcccuggcagccc

SEQ ID NO: 17894 - RNA, 22 nt, Artificial Sequence
  Synthetic oligonucleotide: PDCD1-4609
gcgggccuggcccuggcagccc

SEQ ID NO: 17895 - RNA, 23 nt, Artificial Sequence
  Synthetic oligonucleotide: PDCD1-4610
ggcgggccuggcccuggcagccc

SEQ ID NO: 17896 - RNA, 24 nt, Artificial Sequence
  Synthetic oligonucleotide: PDCD1-4611
aggcgggccuggcccuggcagccc

SEQ ID NO: 17897 - RNA, 18 nt, Artificial Sequence
  Synthetic oligonucleotide: PDCD1-4612
gcuccgacagaaugggag

SEQ ID NO: 17898 - RNA, 19 nt, Artificial Sequence
  Synthetic oligonucleotide: PDCD1-4613
ggcuccgacagaaugggag

SEQ ID NO: 17899 - RNA, 20 nt, Artificial Sequence
  Synthetic oligonucleotide: PDCD1-3001
aggcuccgacagaaugggag

SEQ ID NO: 17900 - RNA, 18 nt, Artificial Sequence
  Synthetic oligonucleotide: PDCD1-4614
ucagucccuggcaggucg

SEQ ID NO: 17901 - RNA, 19 nt, Artificial Sequence
  Synthetic oligonucleotide: PDCD1-4615
cucagucccuggcaggucg

SEQ ID NO: 17902 - RNA, 20 nt, Artificial Sequence
  Synthetic oligonucleotide: PDCD1-2174
ccucagucccuggcaggucg

SEQ ID NO: 17903 - RNA, 21 nt, Artificial Sequence
  Synthetic oligonucleotide: PDCD1-4616
cccucagucccuggcaggucg

SEQ ID NO: 17904 - RNA, 22 nt, Artificial Sequence
  Synthetic oligonucleotide: PDCD1-4617
acccucagucccuggcaggucg

SEQ ID NO: 17905 - RNA, 23 nt, Artificial Sequence
  Synthetic oligonucleotide: PDCD1-4618
cacccucagucccuggcaggucg

SEQ ID NO: 17906 - RNA, 24 nt, Artificial Sequence
  Synthetic oligonucleotide: PDCD1-4619
ccacccucagucccuggcaggucg

SEQ ID NO: 17907 - RNA, 20 nt, Artificial Sequence
  Synthetic oligonucleotide: PDCD1-2196
ucucagucccuggcaggucg

SEQ ID NO: 17908 - RNA, 21 nt, Artificial Sequence
  Synthetic oligonucleotide: PDCD1-4620
cucucagucccuggcaggucg

SEQ ID NO: 17909 - RNA, 22 nt, Artificial Sequence
  Synthetic oligonucleotide: PDCD1-4621
acucucagucccuggcaggucg

SEQ ID NO: 17910 - RNA, 23 nt, Artificial Sequence
  Synthetic oligonucleotide: PDCD1-4622
cacucucagucccuggcaggucg

SEQ ID NO: 17911 - RNA, 24 nt, Artificial Sequence
  Synthetic oligonucleotide: PDCD1-4623
ucacucucagucccuggcaggucg

SEQ ID NO: 17912 - RNA, 18 nt, Artificial Sequence
  Synthetic oligonucleotide: PDCD1-4624
caggaggggcagcucggg

SEQ ID NO: 17913 - RNA, 19 nt, Artificial Sequence
  Synthetic oligonucleotide: PDCD1-4625
ucaggaggggcagcucggg

SEQ ID NO: 17914 - RNA, 20 nt, Artificial Sequence
  Synthetic oligonucleotide: PDCD1-2343
cucaggaggggcagcucggg

SEQ ID NO: 17915 - RNA, 21 nt, Artificial Sequence
  Synthetic oligonucleotide: PDCD1-4626
ccucaggaggggcagcucggg

SEQ ID NO: 17916 - RNA, 22 nt, Artificial Sequence
  Synthetic oligonucleotide: PDCD1-4627
gccucaggaggggcagcucggg

SEQ ID NO: 17917 - RNA, 23 nt, Artificial Sequence
  Synthetic oligonucleotide: PDCD1-4628
agccucaggaggggcagcucggg

SEQ ID NO: 17918 - RNA, 24 nt, Artificial Sequence
  Synthetic oligonucleotide: PDCD1-4629
cagccucaggaggggcagcucggg

SEQ ID NO: 17919 - RNA, 18 nt, Artificial Sequence
  Synthetic oligonucleotide: PDCD1-4630
ggcccccagggagauggg

SEQ ID NO: 17920 - RNA, 19 nt, Artificial Sequence
  Synthetic oligonucleotide: PDCD1-4631
cggcccccagggagauggg

SEQ ID NO: 17921 - RNA, 20 nt, Artificial Sequence
  Synthetic oligonucleotide: PDCD1-2327
ccggcccccagggagauggg

SEQ ID NO: 17922 - RNA, 18 nt, Artificial Sequence
  Synthetic oligonucleotide: PDCD1-4632
ugccugcccaggagcaaa

SEQ ID NO: 17923 - RNA, 19 nt, Artificial Sequence
  Synthetic oligonucleotide: PDCD1-4633
cugccugcccaggagcaaa

SEQ ID NO: 17924 - RNA, 20 nt, Artificial Sequence
  Synthetic oligonucleotide: PDCD1-968
ccugccugcccaggagcaaa

SEQ ID NO: 17925 - RNA, 21 nt, Artificial Sequence
  Synthetic oligonucleotide: PDCD1-4634
uccugccugcccaggagcaaa

SEQ ID NO: 17926 - RNA, 22 nt, Artificial Sequence
  Synthetic oligonucleotide: PDCD1-4635
guccugccugcccaggagcaaa

SEQ ID NO: 17927 - RNA, 23 nt, Artificial Sequence
  Synthetic oligonucleotide: PDCD1-4636
gguccugccugcccaggagcaaa

SEQ ID NO: 17928 - RNA, 24 nt, Artificial Sequence
  Synthetic oligonucleotide: PDCD1-4637
agguccugccugcccaggagcaaa

SEQ ID NO: 17929 - RNA, 18 nt, Artificial Sequence
  Synthetic oligonucleotide: PDCD1-4638
aggcggaggugagcggaa

SEQ ID NO: 17930 - RNA, 19 nt, Artificial Sequence
  Synthetic oligonucleotide: PDCD1-4639
caggcggaggugagcggaa

SEQ ID NO: 17931 - RNA, 20 nt, Artificial Sequence
  Synthetic oligonucleotide: PDCD1-2233
ucaggcggaggugagcggaa

SEQ ID NO: 17932 - RNA, 21 nt, Artificial Sequence
  Synthetic oligonucleotide: PDCD1-4640
cucaggcggaggugagcggaa

SEQ ID NO: 17933 - RNA, 22 nt, Artificial Sequence
  Synthetic oligonucleotide: PDCD1-4641
gcucaggcggaggugagcggaa

SEQ ID NO: 17934 - RNA, 23 nt, Artificial Sequence
  Synthetic oligonucleotide: PDCD1-4642
ugcucaggcggaggugagcggaa

SEQ ID NO: 17935 - RNA, 24 nt, Artificial Sequence
  Synthetic oligonucleotide: PDCD1-4643
cugcucaggcggaggugagcggaa

SEQ ID NO: 17936 - RNA, 18 nt, Artificial Sequence
  Synthetic oligonucleotide: PDCD1-4644
gucccaggucagguugaa

SEQ ID NO: 17937 - RNA, 19 nt, Artificial Sequence
  Synthetic oligonucleotide: PDCD1-4645
ugucccaggucagguugaa

SEQ ID NO: 17938 - RNA, 20 nt, Artificial Sequence
  Synthetic oligonucleotide: PDCD1-2237
cugucccaggucagguugaa

SEQ ID NO: 17939 - RNA, 21 nt, Artificial Sequence
  Synthetic oligonucleotide: PDCD1-4646
acugucccaggucagguugaa

SEQ ID NO: 17940 - RNA, 22 nt, Artificial Sequence
  Synthetic oligonucleotide: PDCD1-4647
aacugucccaggucagguugaa

SEQ ID NO: 17941 - RNA, 23 nt, Artificial Sequence
  Synthetic oligonucleotide: PDCD1-4648
aaacugucccaggucagguugaa

SEQ ID NO: 17942 - RNA, 24 nt, Artificial Sequence
  Synthetic oligonucleotide: PDCD1-4649
gaaacugucccaggucagguugaa

SEQ ID NO: 17943 - RNA, 18 nt, Artificial Sequence
  Synthetic oligonucleotide: PDCD1-4650
gagagagagacagagaca

SEQ ID NO: 17944 - RNA, 19 nt, Artificial Sequence
  Synthetic oligonucleotide: PDCD1-4651
ggagagagagacagagaca

SEQ ID NO: 17945 - RNA, 20 nt, Artificial Sequence
  Synthetic oligonucleotide: PDCD1-2269
gggagagagagacagagaca

SEQ ID NO: 17946 - RNA, 21 nt, Artificial Sequence
  Synthetic oligonucleotide: PDCD1-4652
agggagagagagacagagaca

SEQ ID NO: 17947 - RNA, 22 nt, Artificial Sequence
  Synthetic oligonucleotide: PDCD1-4653
gagggagagagagacagagaca

SEQ ID NO: 17948 - RNA, 23 nt, Artificial Sequence
  Synthetic oligonucleotide: PDCD1-4654
ggagggagagagagacagagaca

SEQ ID NO: 17949 - RNA, 24 nt, Artificial Sequence
  Synthetic oligonucleotide: PDCD1-4655
gggagggagagagagacagagaca

SEQ ID NO: 17950 - RNA, 18 nt, Artificial Sequence
  Synthetic oligonucleotide: PDCD1-4656
gacagagacagggagaca

SEQ ID NO: 17951 - RNA, 19 nt, Artificial Sequence
  Synthetic oligonucleotide: PDCD1-4657
agacagagacagggagaca

SEQ ID NO: 17952 - RNA, 20 nt, Artificial Sequence
  Synthetic oligonucleotide: PDCD1-1074
gagacagagacagggagaca

SEQ ID NO: 17953 - RNA, 21 nt, Artificial Sequence
  Synthetic oligonucleotide: PDCD1-4658
agagacagagacagggagaca

SEQ ID NO: 17954 - RNA, 22 nt, Artificial Sequence
  Synthetic oligonucleotide: PDCD1-4659
gagagacagagacagggagaca

SEQ ID NO: 17955 - RNA, 23 nt, Artificial Sequence
  Synthetic oligonucleotide: PDCD1-4660
agagagacagagacagggagaca

SEQ ID NO: 17956 - RNA, 24 nt, Artificial Sequence
  Synthetic oligonucleotide: PDCD1-4661
gagagagacagagacagggagaca

SEQ ID NO: 17957 - RNA, 18 nt, Artificial Sequence
  Synthetic oligonucleotide: PDCD1-4662
gggaggaguuggggccca

SEQ ID NO: 17958 - RNA, 19 nt, Artificial Sequence
  Synthetic oligonucleotide: PDCD1-4663
ggggaggaguuggggccca

SEQ ID NO: 17959 - RNA, 20 nt, Artificial Sequence
  Synthetic oligonucleotide: PDCD1-981
aggggaggaguuggggccca

SEQ ID NO: 17960 - RNA, 21 nt, Artificial Sequence
  Synthetic oligonucleotide: PDCD1-4664
caggggaggaguuggggccca

SEQ ID NO: 17961 - RNA, 22 nt, Artificial Sequence
  Synthetic oligonucleotide: PDCD1-4665
ccaggggaggaguuggggccca

SEQ ID NO: 17962 - RNA, 23 nt, Artificial Sequence
  Synthetic oligonucleotide: PDCD1-4666
gccaggggaggaguuggggccca

SEQ ID NO: 17963 - RNA, 24 nt, Artificial Sequence
  Synthetic oligonucleotide: PDCD1-4667
ggccaggggaggaguuggggccca

SEQ ID NO: 17964 - RNA, 18 nt, Artificial Sequence
  Synthetic oligonucleotide: PDCD1-4668
aagaggggacuugggcca

SEQ ID NO: 17965 - RNA, 19 nt, Artificial Sequence
  Synthetic oligonucleotide: PDCD1-4669
aaagaggggacuugggcca

SEQ ID NO: 17966 - RNA, 20 nt, Artificial Sequence
  Synthetic oligonucleotide: PDCD1-2102
caaagaggggacuugggcca

SEQ ID NO: 17967 - RNA, 21 nt, Artificial Sequence
  Synthetic oligonucleotide: PDCD1-4670
gcaaagaggggacuugggcca

SEQ ID NO: 17968 - RNA, 22 nt, Artificial Sequence
  Synthetic oligonucleotide: PDCD1-4671
agcaaagaggggacuugggcca

SEQ ID NO: 17969 - RNA, 23 nt, Artificial Sequence
  Synthetic oligonucleotide: PDCD1-4672
gagcaaagaggggacuugggcca

SEQ ID NO: 17970 - RNA, 24 nt, Artificial Sequence
  Synthetic oligonucleotide: PDCD1-4673
ggagcaaagaggggacuugggcca

SEQ ID NO: 17971 - RNA, 18 nt, Artificial Sequence
  Synthetic oligonucleotide: PDCD1-4674
ccugccugcccaggagca

SEQ ID NO: 17972 - RNA, 19 nt, Artificial Sequence
  Synthetic oligonucleotide: PDCD1-4675
uccugccugcccaggagca

SEQ ID NO: 17973 - RNA, 20 nt, Artificial Sequence
  Synthetic oligonucleotide: PDCD1-967
guccugccugcccaggagca

SEQ ID NO: 17974 - RNA, 21 nt, Artificial Sequence
  Synthetic oligonucleotide: PDCD1-4676
gguccugccugcccaggagca

SEQ ID NO: 17975 - RNA, 22 nt, Artificial Sequence
  Synthetic oligonucleotide: PDCD1-4677
agguccugccugcccaggagca

SEQ ID NO: 17976 - RNA, 23 nt, Artificial Sequence
  Synthetic oligonucleotide: PDCD1-4678
gagguccugccugcccaggagca

SEQ ID NO: 17977 - RNA, 24 nt, Artificial Sequence
  Synthetic oligonucleotide: PDCD1-4679
agagguccugccugcccaggagca

SEQ ID NO: 17978 - RNA, 18 nt, Artificial Sequence
  Synthetic oligonucleotide: PDCD1-4680
ucagguuccugggcugca

SEQ ID NO: 17979 - RNA, 19 nt, Artificial Sequence
  Synthetic oligonucleotide: PDCD1-4681
cucagguuccugggcugca

SEQ ID NO: 17980 - RNA, 20 nt, Artificial Sequence
  Synthetic oligonucleotide: PDCD1-4682
gcucagguuccugggcugca

SEQ ID NO: 17981 - RNA, 21 nt, Artificial Sequence
  Synthetic oligonucleotide: PDCD1-4683
ggcucagguuccugggcugca

SEQ ID NO: 17982 - RNA, 22 nt, Artificial Sequence
  Synthetic oligonucleotide: PDCD1-4684
gggcucagguuccugggcugca

SEQ ID NO: 17983 - RNA, 23 nt, Artificial Sequence
  Synthetic oligonucleotide: PDCD1-4685
ugggcucagguuccugggcugca

SEQ ID NO: 17984 - RNA, 24 nt, Artificial Sequence
  Synthetic oligonucleotide: PDCD1-4686
cugggcucagguuccugggcugca

SEQ ID NO: 17985 - RNA, 18 nt, Artificial Sequence
  Synthetic oligonucleotide: PDCD1-4687
ccugcccaggagcaaaga

SEQ ID NO: 17986 - RNA, 19 nt, Artificial Sequence
  Synthetic oligonucleotide: PDCD1-4688
gccugcccaggagcaaaga

SEQ ID NO: 17987 - RNA, 20 nt, Artificial Sequence
  Synthetic oligonucleotide: PDCD1-2097
ugccugcccaggagcaaaga

SEQ ID NO: 17988 - RNA, 21 nt, Artificial Sequence
  Synthetic oligonucleotide: PDCD1-4689
cugccugcccaggagcaaaga

SEQ ID NO: 17989 - RNA, 22 nt, Artificial Sequence
  Synthetic oligonucleotide: PDCD1-4690
ccugccugcccaggagcaaaga

SEQ ID NO: 17990 - RNA, 23 nt, Artificial Sequence
  Synthetic oligonucleotide: PDCD1-4691
uccugccugcccaggagcaaaga

SEQ ID NO: 17991 - RNA, 24 nt, Artificial Sequence
  Synthetic oligonucleotide: PDCD1-4692
guccugccugcccaggagcaaaga

SEQ ID NO: 17992 - RNA, 18 nt, Artificial Sequence
  Synthetic oligonucleotide: PDCD1-4693
gaggaguuggggcccaga

SEQ ID NO: 17993 - RNA, 19 nt, Artificial Sequence
  Synthetic oligonucleotide: PDCD1-4694
ggaggaguuggggcccaga

SEQ ID NO: 17994 - RNA, 20 nt, Artificial Sequence
  Synthetic oligonucleotide: PDCD1-982
gggaggaguuggggcccaga

SEQ ID NO: 17995 - RNA, 21 nt, Artificial Sequence
  Synthetic oligonucleotide: PDCD1-4695
ggggaggaguuggggcccaga

SEQ ID NO: 17996 - RNA, 22 nt, Artificial Sequence
  Synthetic oligonucleotide: PDCD1-4696
aggggaggaguuggggcccaga

SEQ ID NO: 17997 - RNA, 23 nt, Artificial Sequence
  Synthetic oligonucleotide: PDCD1-4697
caggggaggaguuggggcccaga

SEQ ID NO: 17998 - RNA, 24 nt, Artificial Sequence
  Synthetic oligonucleotide: PDCD1-4698
ccaggggaggaguuggggcccaga

SEQ ID NO: 17999 - RNA, 18 nt, Artificial Sequence
  Synthetic oligonucleotide: PDCD1-4699
gggagagagagacagaga

SEQ ID NO: 18000 - RNA, 19 nt, Artificial Sequence
  Synthetic oligonucleotide: PDCD1-4700
agggagagagagacagaga

SEQ ID NO: 18001 - RNA, 20 nt, Artificial Sequence
  Synthetic oligonucleotide: PDCD1-1070
gagggagagagagacagaga

SEQ ID NO: 18002 - RNA, 21 nt, Artificial Sequence
  Synthetic oligonucleotide: PDCD1-4701
ggagggagagagagacagaga

SEQ ID NO: 18003 - RNA, 22 nt, Artificial Sequence
  Synthetic oligonucleotide: PDCD1-4702
gggagggagagagagacagaga

SEQ ID NO: 18004 - RNA, 23 nt, Artificial Sequence
  Synthetic oligonucleotide: PDCD1-4703
ggggagggagagagagacagaga

SEQ ID NO: 18005 - RNA, 24 nt, Artificial Sequence
  Synthetic oligonucleotide: PDCD1-4704
gggggagggagagagagacagaga

SEQ ID NO: 18006 - RNA, 18 nt, Artificial Sequence
  Synthetic oligonucleotide: PDCD1-4705
gggggagggagagagaga

SEQ ID NO: 18007 - RNA, 19 nt, Artificial Sequence
  Synthetic oligonucleotide: PDCD1-4706
ugggggagggagagagaga

SEQ ID NO: 18008 - RNA, 20 nt, Artificial Sequence
  Synthetic oligonucleotide: PDCD1-1069
gugggggagggagagagaga

SEQ ID NO: 18009 - RNA, 21 nt, Artificial Sequence
  Synthetic oligonucleotide: PDCD1-4707
ggugggggagggagagagaga

SEQ ID NO: 18010 - RNA, 22 nt, Artificial Sequence
  Synthetic oligonucleotide: PDCD1-4708
gggugggggagggagagagaga

SEQ ID NO: 18011 - RNA, 23 nt, Artificial Sequence
  Synthetic oligonucleotide: PDCD1-4709
agggugggggagggagagagaga

SEQ ID NO: 18012 - RNA, 24 nt, Artificial Sequence
  Synthetic oligonucleotide: PDCD1-4710
gagggugggggagggagagagaga

SEQ ID NO: 18013 - RNA, 18 nt, Artificial Sequence
  Synthetic oligonucleotide: PDCD1-4711
acagggagacagaggaga

SEQ ID NO: 18014 - RNA, 19 nt, Artificial Sequence
  Synthetic oligonucleotide: PDCD1-4712
gacagggagacagaggaga

SEQ ID NO: 18015 - RNA, 20 nt, Artificial Sequence
  Synthetic oligonucleotide: PDCD1-2271
agacagggagacagaggaga

SEQ ID NO: 18016 - RNA, 21 nt, Artificial Sequence
  Synthetic oligonucleotide: PDCD1-4713
gagacagggagacagaggaga

SEQ ID NO: 18017 - RNA, 22 nt, Artificial Sequence
  Synthetic oligonucleotide: PDCD1-4714
agagacagggagacagaggaga

SEQ ID NO: 18018 - RNA, 23 nt, Artificial Sequence
  Synthetic oligonucleotide: PDCD1-4715
cagagacagggagacagaggaga

SEQ ID NO: 18019 - RNA, 24 nt, Artificial Sequence
  Synthetic oligonucleotide: PDCD1-4716
acagagacagggagacagaggaga

SEQ ID NO: 18020 - RNA, 18 nt, Artificial Sequence
  Synthetic oligonucleotide: PDCD1-4717
gagacagagacagggaga

SEQ ID NO: 18021 - RNA, 19 nt, Artificial Sequence
  Synthetic oligonucleotide: PDCD1-4718
agagacagagacagggaga

SEQ ID NO: 18022 - RNA, 20 nt, Artificial Sequence
  Synthetic oligonucleotide: PDCD1-1073
gagagacagagacagggaga

SEQ ID NO: 18023 - RNA, 21 nt, Artificial Sequence
  Synthetic oligonucleotide: PDCD1-4719
agagagacagagacagggaga

SEQ ID NO: 18024 - RNA, 22 nt, Artificial Sequence
  Synthetic oligonucleotide: PDCD1-4720
gagagagacagagacagggaga

SEQ ID NO: 18025 - RNA, 23 nt, Artificial Sequence
  Synthetic oligonucleotide: PDCD1-4721
agagagagacagagacagggaga

SEQ ID NO: 18026 - RNA, 24 nt, Artificial Sequence
  Synthetic oligonucleotide: PDCD1-4722
gagagagagacagagacagggaga

SEQ ID NO: 18027 - RNA, 18 nt, Artificial Sequence
  Synthetic oligonucleotide: PDCD1-4723
gagggugggggagggaga

SEQ ID NO: 18028 - RNA, 19 nt, Artificial Sequence
  Synthetic oligonucleotide: PDCD1-4724
agagggugggggagggaga

SEQ ID NO: 18029 - RNA, 20 nt, Artificial Sequence
  Synthetic oligonucleotide: PDCD1-1068
gagagggugggggagggaga

SEQ ID NO: 18030 - RNA, 21 nt, Artificial Sequence
  Synthetic oligonucleotide: PDCD1-4725
ggagagggugggggagggaga

SEQ ID NO: 18031 - RNA, 22 nt, Artificial Sequence
  Synthetic oligonucleotide: PDCD1-4726
gggagagggugggggagggaga

SEQ ID NO: 18032 - RNA, 23 nt, Artificial Sequence
  Synthetic oligonucleotide: PDCD1-4727
ggggagagggugggggagggaga

SEQ ID NO: 18033 - RNA, 24 nt, Artificial Sequence
  Synthetic oligonucleotide: PDCD1-4728
uggggagagggugggggagggaga

SEQ ID NO: 18034 - RNA, 18 nt, Artificial Sequence
  Synthetic oligonucleotide: PDCD1-4729
accugccagggacugaga

SEQ ID NO: 18035 - RNA, 19 nt, Artificial Sequence
  Synthetic oligonucleotide: PDCD1-4730
gaccugccagggacugaga

SEQ ID NO: 18036 - RNA, 20 nt, Artificial Sequence
  Synthetic oligonucleotide: PDCD1-999
cgaccugccagggacugaga

SEQ ID NO: 18037 - RNA, 21 nt, Artificial Sequence
  Synthetic oligonucleotide: PDCD1-4731
ccgaccugccagggacugaga

SEQ ID NO: 18038 - RNA, 22 nt, Artificial Sequence
  Synthetic oligonucleotide: PDCD1-4732
cccgaccugccagggacugaga

SEQ ID NO: 18039 - RNA, 23 nt, Artificial Sequence
  Synthetic oligonucleotide: PDCD1-4733
ccccgaccugccagggacugaga

SEQ ID NO: 18040 - RNA, 24 nt, Artificial Sequence
  Synthetic oligonucleotide: PDCD1-4734
cccccgaccugccagggacugaga

SEQ ID NO: 18041 - RNA, 18 nt, Artificial Sequence
  Synthetic oligonucleotide: PDCD1-4735
cccaaggaccggcugaga

SEQ ID NO: 18042 - RNA, 19 nt, Artificial Sequence
  Synthetic oligonucleotide: PDCD1-4736
ccccaaggaccggcugaga

SEQ ID NO: 18043 - RNA, 20 nt, Artificial Sequence
  Synthetic oligonucleotide: PDCD1-2092
gccccaaggaccggcugaga

SEQ ID NO: 18044 - RNA, 21 nt, Artificial Sequence
  Synthetic oligonucleotide: PDCD1-4737
agccccaaggaccggcugaga

SEQ ID NO: 18045 - RNA, 22 nt, Artificial Sequence
  Synthetic oligonucleotide: PDCD1-4738
cagccccaaggaccggcugaga

SEQ ID NO: 18046 - RNA, 23 nt, Artificial Sequence
  Synthetic oligonucleotide: PDCD1-4739
gcagccccaaggaccggcugaga

SEQ ID NO: 18047 - RNA, 24 nt, Artificial Sequence
  Synthetic oligonucleotide: PDCD1-4740
cgcagccccaaggaccggcugaga

SEQ ID NO: 18048 - RNA, 18 nt, Artificial Sequence
  Synthetic oligonucleotide: PDCD1-4741
ggugaggaggggguagga

SEQ ID NO: 18049 - RNA, 19 nt, Artificial Sequence
  Synthetic oligonucleotide: PDCD1-4742
gggugaggaggggguagga

SEQ ID NO: 18050 - RNA, 20 nt, Artificial Sequence
  Synthetic oligonucleotide: PDCD1-1052
ggggugaggaggggguagga

SEQ ID NO: 18051 - RNA, 21 nt, Artificial Sequence
  Synthetic oligonucleotide: PDCD1-4743
aggggugaggaggggguagga

SEQ ID NO: 18052 - RNA, 22 nt, Artificial Sequence
  Synthetic oligonucleotide: PDCD1-4744
gaggggugaggaggggguagga

SEQ ID NO: 18053 - RNA, 23 nt, Artificial Sequence
  Synthetic oligonucleotide: PDCD1-4745
ggaggggugaggaggggguagga

SEQ ID NO: 18054 - RNA, 24 nt, Artificial Sequence
  Synthetic oligonucleotide: PDCD1-4746
aggaggggugaggaggggguagga

SEQ ID NO: 18055 - RNA, 18 nt, Artificial Sequence
  Synthetic oligonucleotide: PDCD1-4747
caggcggaggugagcgga

SEQ ID NO: 18056 - RNA, 19 nt, Artificial Sequence
  Synthetic oligonucleotide: PDCD1-4748
ucaggcggaggugagcgga

SEQ ID NO: 18057 - RNA, 20 nt, Artificial Sequence
  Synthetic oligonucleotide: PDCD1-2232
cucaggcggaggugagcgga

SEQ ID NO: 18058 - RNA, 21 nt, Artificial Sequence
  Synthetic oligonucleotide: PDCD1-4749
gcucaggcggaggugagcgga

SEQ ID NO: 18059 - RNA, 22 nt, Artificial Sequence
  Synthetic oligonucleotide: PDCD1-4750
ugcucaggcggaggugagcgga

SEQ ID NO: 18060 - RNA, 23 nt, Artificial Sequence
  Synthetic oligonucleotide: PDCD1-4751
cugcucaggcggaggugagcgga

SEQ ID NO: 18061 - RNA, 24 nt, Artificial Sequence
  Synthetic oligonucleotide: PDCD1-4752
acugcucaggcggaggugagcgga

SEQ ID NO: 18062 - RNA, 18 nt, Artificial Sequence
  Synthetic oligonucleotide: PDCD1-4753
cccccgaccugccaggga

SEQ ID NO: 18063 - RNA, 19 nt, Artificial Sequence
  Synthetic oligonucleotide: PDCD1-4754
ccccccgaccugccaggga

SEQ ID NO: 18064 - RNA, 20 nt, Artificial Sequence
  Synthetic oligonucleotide: PDCD1-997
accccccgaccugccaggga

SEQ ID NO: 18065 - RNA, 21 nt, Artificial Sequence
  Synthetic oligonucleotide: PDCD1-4755
caccccccgaccugccaggga

SEQ ID NO: 18066 - RNA, 22 nt, Artificial Sequence
  Synthetic oligonucleotide: PDCD1-4756
gcaccccccgaccugccaggga

SEQ ID NO: 18067 - RNA, 23 nt, Artificial Sequence
  Synthetic oligonucleotide: PDCD1-4757
agcaccccccgaccugccaggga

SEQ ID NO: 18068 - RNA, 24 nt, Artificial Sequence
  Synthetic oligonucleotide: PDCD1-4758
cagcaccccccgaccugccaggga

SEQ ID NO: 18069 - RNA, 18 nt, Artificial Sequence
  Synthetic oligonucleotide: PDCD1-4759
gagagggugggggaggga

SEQ ID NO: 18070 - RNA, 19 nt, Artificial Sequence
  Synthetic oligonucleotide: PDCD1-4760
ggagagggugggggaggga

SEQ ID NO: 18071 - RNA, 20 nt, Artificial Sequence
  Synthetic oligonucleotide: PDCD1-1067
gggagagggugggggaggga

SEQ ID NO: 18072 - RNA, 21 nt, Artificial Sequence
  Synthetic oligonucleotide: PDCD1-4761
ggggagagggugggggaggga

SEQ ID NO: 18073 - RNA, 22 nt, Artificial Sequence
  Synthetic oligonucleotide: PDCD1-4762
uggggagagggugggggaggga

SEQ ID NO: 18074 - RNA, 23 nt, Artificial Sequence
  Synthetic oligonucleotide: PDCD1-4763
cuggggagagggugggggaggga

SEQ ID NO: 18075 - RNA, 24 nt, Artificial Sequence
  Synthetic oligonucleotide: PDCD1-4764
acuggggagagggugggggaggga

SEQ ID NO: 18076 - RNA, 18 nt, Artificial Sequence
  Synthetic oligonucleotide: PDCD1-4765
ggaccggcugagagggga

SEQ ID NO: 18077 - RNA, 19 nt, Artificial Sequence
  Synthetic oligonucleotide: PDCD1-4766
aggaccggcugagagggga

SEQ ID NO: 18078 - RNA, 20 nt, Artificial Sequence
  Synthetic oligonucleotide: PDCD1-964
aaggaccggcugagagggga

SEQ ID NO: 18079 - RNA, 21 nt, Artificial Sequence
  Synthetic oligonucleotide: PDCD1-4767
caaggaccggcugagagggga

SEQ ID NO: 18080 - RNA, 22 nt, Artificial Sequence
  Synthetic oligonucleotide: PDCD1-4768
ccaaggaccggcugagagggga

SEQ ID NO: 18081 - RNA, 23 nt, Artificial Sequence
  Synthetic oligonucleotide: PDCD1-4769
cccaaggaccggcugagagggga

SEQ ID NO: 18082 - RNA, 24 nt, Artificial Sequence
  Synthetic oligonucleotide: PDCD1-4770
ccccaaggaccggcugagagggga

SEQ ID NO: 18083 - RNA, 18 nt, Artificial Sequence
  Synthetic oligonucleotide: PDCD1-4771
uggggagaggguggggga

SEQ ID NO: 18084 - RNA, 19 nt, Artificial Sequence
  Synthetic oligonucleotide: PDCD1-4772
cuggggagaggguggggga

SEQ ID NO: 18085 - RNA, 20 nt, Artificial Sequence
  Synthetic oligonucleotide: PDCD1-2267
acuggggagaggguggggga

SEQ ID NO: 18086 - RNA, 21 nt, Artificial Sequence
  Synthetic oligonucleotide: PDCD1-4773
gacuggggagaggguggggga

SEQ ID NO: 18087 - RNA, 22 nt, Artificial Sequence
  Synthetic oligonucleotide: PDCD1-4774
ggacuggggagaggguggggga

SEQ ID NO: 18088 - RNA, 23 nt, Artificial Sequence
  Synthetic oligonucleotide: PDCD1-4775
aggacuggggagaggguggggga

SEQ ID NO: 18089 - RNA, 24 nt, Artificial Sequence
  Synthetic oligonucleotide: PDCD1-4776
uaggacuggggagaggguggggga

SEQ ID NO: 18090 - RNA, 18 nt, Artificial Sequence
  Synthetic oligonucleotide: PDCD1-4777
gccccaaggaccggcuga

SEQ ID NO: 18091 - RNA, 19 nt, Artificial Sequence
  Synthetic oligonucleotide: PDCD1-4778
agccccaaggaccggcuga

SEQ ID NO: 18092 - RNA, 20 nt, Artificial Sequence
  Synthetic oligonucleotide: PDCD1-961
cagccccaaggaccggcuga

SEQ ID NO: 18093 - RNA, 21 nt, Artificial Sequence
  Synthetic oligonucleotide: PDCD1-4779
gcagccccaaggaccggcuga

SEQ ID NO: 18094 - RNA, 22 nt, Artificial Sequence
  Synthetic oligonucleotide: PDCD1-4780
cgcagccccaaggaccggcuga

SEQ ID NO: 18095 - RNA, 23 nt, Artificial Sequence
  Synthetic oligonucleotide: PDCD1-4781
acgcagccccaaggaccggcuga

SEQ ID NO: 18096 - RNA, 24 nt, Artificial Sequence
  Synthetic oligonucleotide: PDCD1-4782
cacgcagccccaaggaccggcuga

SEQ ID NO: 18097 - RNA, 18 nt, Artificial Sequence
  Synthetic oligonucleotide: PDCD1-4783
ccacgugggcgagaguga

SEQ ID NO: 18098 - RNA, 19 nt, Artificial Sequence
  Synthetic oligonucleotide: PDCD1-4784
uccacgugggcgagaguga

SEQ ID NO: 18099 - RNA, 20 nt, Artificial Sequence
  Synthetic oligonucleotide: PDCD1-1035
auccacgugggcgagaguga

SEQ ID NO: 18100 - RNA, 21 nt, Artificial Sequence
  Synthetic oligonucleotide: PDCD1-4785
cauccacgugggcgagaguga

SEQ ID NO: 18101 - RNA, 22 nt, Artificial Sequence
  Synthetic oligonucleotide: PDCD1-4786
acauccacgugggcgagaguga

SEQ ID NO: 18102 - RNA, 23 nt, Artificial Sequence
  Synthetic oligonucleotide: PDCD1-4787
cacauccacgugggcgagaguga

SEQ ID NO: 18103 - RNA, 24 nt, Artificial Sequence
  Synthetic oligonucleotide: PDCD1-4788
ccacauccacgugggcgagaguga

SEQ ID NO: 18104 - RNA, 18 nt, Artificial Sequence
  Synthetic oligonucleotide: PDCD1-4789
cugcucaggcggagguga

SEQ ID NO: 18105 - RNA, 19 nt, Artificial Sequence
  Synthetic oligonucleotide: PDCD1-4790
acugcucaggcggagguga

SEQ ID NO: 18106 - RNA, 20 nt, Artificial Sequence
  Synthetic oligonucleotide: PDCD1-1022
cacugcucaggcggagguga

SEQ ID NO: 18107 - RNA, 21 nt, Artificial Sequence
  Synthetic oligonucleotide: PDCD1-4791
ccacugcucaggcggagguga

SEQ ID NO: 18108 - RNA, 22 nt, Artificial Sequence
  Synthetic oligonucleotide: PDCD1-4792
uccacugcucaggcggagguga

SEQ ID NO: 18109 - RNA, 23 nt, Artificial Sequence
  Synthetic oligonucleotide: PDCD1-4793
cuccacugcucaggcggagguga

SEQ ID NO: 18110 - RNA, 24 nt, Artificial Sequence
  Synthetic oligonucleotide: PDCD1-4794
ucuccacugcucaggcggagguga

SEQ ID NO: 18111 - RNA, 18 nt, Artificial Sequence
  Synthetic oligonucleotide: PDCD1-4795
ugucccaggucagguuga

SEQ ID NO: 18112 - RNA, 19 nt, Artificial Sequence
  Synthetic oligonucleotide: PDCD1-4796
cugucccaggucagguuga

SEQ ID NO: 18113 - RNA, 20 nt, Artificial Sequence
  Synthetic oligonucleotide: PDCD1-2236
acugucccaggucagguuga

SEQ ID NO: 18114 - RNA, 21 nt, Artificial Sequence
  Synthetic oligonucleotide: PDCD1-4797
aacugucccaggucagguuga

SEQ ID NO: 18115 - RNA, 22 nt, Artificial Sequence
  Synthetic oligonucleotide: PDCD1-4798
aaacugucccaggucagguuga

SEQ ID NO: 18116 - RNA, 23 nt, Artificial Sequence
  Synthetic oligonucleotide: PDCD1-4799
gaaacugucccaggucagguuga

SEQ ID NO: 18117 - RNA, 24 nt, Artificial Sequence
  Synthetic oligonucleotide: PDCD1-4800
ggaaacugucccaggucagguuga

SEQ ID NO: 18118 - RNA, 18 nt, Artificial Sequence
  Synthetic oligonucleotide: PDCD1-4801
gccacacagcucagggua

SEQ ID NO: 18119 - RNA, 19 nt, Artificial Sequence
  Synthetic oligonucleotide: PDCD1-4802
agccacacagcucagggua

SEQ ID NO: 18120 - RNA, 20 nt, Artificial Sequence
  Synthetic oligonucleotide: PDCD1-2112
aagccacacagcucagggua

SEQ ID NO: 18121 - RNA, 21 nt, Artificial Sequence
  Synthetic oligonucleotide: PDCD1-4803
aaagccacacagcucagggua

SEQ ID NO: 18122 - RNA, 22 nt, Artificial Sequence
  Synthetic oligonucleotide: PDCD1-4804
caaagccacacagcucagggua

SEQ ID NO: 18123 - RNA, 23 nt, Artificial Sequence
  Synthetic oligonucleotide: PDCD1-4805
ccaaagccacacagcucagggua

SEQ ID NO: 18124 - RNA, 24 nt, Artificial Sequence
  Synthetic oligonucleotide: PDCD1-4806
cccaaagccacacagcucagggua

SEQ ID NO: 18125 - RNA, 18 nt, Artificial Sequence
  Synthetic oligonucleotide: PDCD1-4807
cucuuccuccacauccac

SEQ ID NO: 18126 - RNA, 19 nt, Artificial Sequence
  Synthetic oligonucleotide: PDCD1-4808
ccucuuccuccacauccac

SEQ ID NO: 18127 - RNA, 20 nt, Artificial Sequence
  Synthetic oligonucleotide: PDCD1-1032
cccucuuccuccacauccac

SEQ ID NO: 18128 - RNA, 21 nt, Artificial Sequence
  Synthetic oligonucleotide: PDCD1-4809
ccccucuuccuccacauccac

SEQ ID NO: 18129 - RNA, 22 nt, Artificial Sequence
  Synthetic oligonucleotide: PDCD1-4810
cccccucuuccuccacauccac

SEQ ID NO: 18130 - RNA, 23 nt, Artificial Sequence
  Synthetic oligonucleotide: PDCD1-4811
gcccccucuuccuccacauccac

SEQ ID NO: 18131 - RNA, 24 nt, Artificial Sequence
  Synthetic oligonucleotide: PDCD1-4812
cgcccccucuuccuccacauccac

SEQ ID NO: 18132 - RNA, 18 nt, Artificial Sequence
  Synthetic oligonucleotide: PDCD1-4813
ggagagagagacagagac

SEQ ID NO: 18133 - RNA, 19 nt, Artificial Sequence
  Synthetic oligonucleotide: PDCD1-4814
gggagagagagacagagac

SEQ ID NO: 18134 - RNA, 20 nt, Artificial Sequence
  Synthetic oligonucleotide: PDCD1-2268
agggagagagagacagagac

SEQ ID NO: 18135 - RNA, 21 nt, Artificial Sequence
  Synthetic oligonucleotide: PDCD1-4815
gagggagagagagacagagac

SEQ ID NO: 18136 - RNA, 22 nt, Artificial Sequence
  Synthetic oligonucleotide: PDCD1-4816
ggagggagagagagacagagac

SEQ ID NO: 18137 - RNA, 23 nt, Artificial Sequence
  Synthetic oligonucleotide: PDCD1-4817
gggagggagagagagacagagac

SEQ ID NO: 18138 - RNA, 24 nt, Artificial Sequence
  Synthetic oligonucleotide: PDCD1-4818
ggggagggagagagagacagagac

SEQ ID NO: 18139 - RNA, 18 nt, Artificial Sequence
  Synthetic oligonucleotide: PDCD1-4819
gugaggaggggguaggac

SEQ ID NO: 18140 - RNA, 19 nt, Artificial Sequence
  Synthetic oligonucleotide: PDCD1-4820
ggugaggaggggguaggac

SEQ ID NO: 18141 - RNA, 20 nt, Artificial Sequence
  Synthetic oligonucleotide: PDCD1-2257
gggugaggaggggguaggac

SEQ ID NO: 18142 - RNA, 21 nt, Artificial Sequence
  Synthetic oligonucleotide: PDCD1-4821
ggggugaggaggggguaggac

SEQ ID NO: 18143 - RNA, 22 nt, Artificial Sequence
  Synthetic oligonucleotide: PDCD1-4822
aggggugaggaggggguaggac

SEQ ID NO: 18144 - RNA, 23 nt, Artificial Sequence
  Synthetic oligonucleotide: PDCD1-4823
gaggggugaggaggggguaggac

SEQ ID NO: 18145 - RNA, 24 nt, Artificial Sequence
  Synthetic oligonucleotide: PDCD1-4824
ggaggggugaggaggggguaggac

SEQ ID NO: 18146 - RNA, 18 nt, Artificial Sequence
  Synthetic oligonucleotide: PDCD1-4825
caggagcaaagaggggac

SEQ ID NO: 18147 - RNA, 19 nt, Artificial Sequence
  Synthetic oligonucleotide: PDCD1-4826
ccaggagcaaagaggggac

SEQ ID NO: 18148 - RNA, 20 nt, Artificial Sequence
  Synthetic oligonucleotide: PDCD1-971
cccaggagcaaagaggggac

SEQ ID NO: 18149 - RNA, 21 nt, Artificial Sequence
  Synthetic oligonucleotide: PDCD1-4827
gcccaggagcaaagaggggac

SEQ ID NO: 18150 - RNA, 22 nt, Artificial Sequence
  Synthetic oligonucleotide: PDCD1-4828
ugcccaggagcaaagaggggac

SEQ ID NO: 18151 - RNA, 23 nt, Artificial Sequence
  Synthetic oligonucleotide: PDCD1-4829
cugcccaggagcaaagaggggac

SEQ ID NO: 18152 - RNA, 24 nt, Artificial Sequence
  Synthetic oligonucleotide: PDCD1-4830
ccugcccaggagcaaagaggggac

SEQ ID NO: 18153 - RNA, 18 nt, Artificial Sequence
  Synthetic oligonucleotide: PDCD1-4831
ggggcccagagaggaacc

SEQ ID NO: 18154 - RNA, 19 nt, Artificial Sequence
  Synthetic oligonucleotide: PDCD1-4832
uggggcccagagaggaacc

SEQ ID NO: 18155 - RNA, 20 nt, Artificial Sequence
  Synthetic oligonucleotide: PDCD1-984
uuggggcccagagaggaacc

SEQ ID NO: 18156 - RNA, 21 nt, Artificial Sequence
  Synthetic oligonucleotide: PDCD1-4833
guuggggcccagagaggaacc

SEQ ID NO: 18157 - RNA, 22 nt, Artificial Sequence
  Synthetic oligonucleotide: PDCD1-4834
aguuggggcccagagaggaacc

SEQ ID NO: 18158 - RNA, 23 nt, Artificial Sequence
  Synthetic oligonucleotide: PDCD1-4835
gaguuggggcccagagaggaacc

SEQ ID NO: 18159 - RNA, 24 nt, Artificial Sequence
  Synthetic oligonucleotide: PDCD1-4836
ggaguuggggcccagagaggaacc

SEQ ID NO: 18160 - RNA, 18 nt, Artificial Sequence
  Synthetic oligonucleotide: PDCD1-4837
ccccucgcuccgggaccc

SEQ ID NO: 18161 - RNA, 19 nt, Artificial Sequence
  Synthetic oligonucleotide: PDCD1-4838
accccucgcuccgggaccc

SEQ ID NO: 18162 - RNA, 20 nt, Artificial Sequence
  Synthetic oligonucleotide: PDCD1-1002
gaccccucgcuccgggaccc

SEQ ID NO: 18163 - RNA, 21 nt, Artificial Sequence
  Synthetic oligonucleotide: PDCD1-4839
agaccccucgcuccgggaccc

SEQ ID NO: 18164 - RNA, 22 nt, Artificial Sequence
  Synthetic oligonucleotide: PDCD1-4840
cagaccccucgcuccgggaccc

SEQ ID NO: 18165 - RNA, 23 nt, Artificial Sequence
  Synthetic oligonucleotide: PDCD1-4841
ccagaccccucgcuccgggaccc

SEQ ID NO: 18166 - RNA, 24 nt, Artificial Sequence
  Synthetic oligonucleotide: PDCD1-4842
uccagaccccucgcuccgggaccc

SEQ ID NO: 18167 - RNA, 18 nt, Artificial Sequence
  Synthetic oligonucleotide: PDCD1-4843
gcccccacgcccuacccc

SEQ ID NO: 18168 - RNA, 19 nt, Artificial Sequence
  Synthetic oligonucleotide: PDCD1-4844
ggcccccacgcccuacccc

SEQ ID NO: 18169 - RNA, 20 nt, Artificial Sequence
  Synthetic oligonucleotide: PDCD1-1083
uggcccccacgcccuacccc

SEQ ID NO: 18170 - RNA, 21 nt, Artificial Sequence
  Synthetic oligonucleotide: PDCD1-4845
guggcccccacgcccuacccc

SEQ ID NO: 18171 - RNA, 22 nt, Artificial Sequence
  Synthetic oligonucleotide: PDCD1-4846
cguggcccccacgcccuacccc

SEQ ID NO: 18172 - RNA, 23 nt, Artificial Sequence
  Synthetic oligonucleotide: PDCD1-4847
ccguggcccccacgcccuacccc

SEQ ID NO: 18173 - RNA, 24 nt, Artificial Sequence
  Synthetic oligonucleotide: PDCD1-4848
cccguggcccccacgcccuacccc

SEQ ID NO: 18174 - RNA, 18 nt, Artificial Sequence
  Synthetic oligonucleotide: PDCD1-4849
cagagguccugccugccc

SEQ ID NO: 18175 - RNA, 19 nt, Artificial Sequence
  Synthetic oligonucleotide: PDCD1-4850
acagagguccugccugccc

SEQ ID NO: 18176 - RNA, 20 nt, Artificial Sequence
  Synthetic oligonucleotide: PDCD1-2095
gacagagguccugccugccc

SEQ ID NO: 18177 - RNA, 21 nt, Artificial Sequence
  Synthetic oligonucleotide: PDCD1-4851
ggacagagguccugccugccc

SEQ ID NO: 18178 - RNA, 22 nt, Artificial Sequence
  Synthetic oligonucleotide: PDCD1-4852
gggacagagguccugccugccc

SEQ ID NO: 18179 - RNA, 23 nt, Artificial Sequence
  Synthetic oligonucleotide: PDCD1-4853
ggggacagagguccugccugccc

SEQ ID NO: 18180 - RNA, 24 nt, Artificial Sequence
  Synthetic oligonucleotide: PDCD1-4854
aggggacagagguccugccugccc

SEQ ID NO: 18181 - RNA, 18 nt, Artificial Sequence
  Synthetic oligonucleotide: PDCD1-4855
ccaucccccccaucuccc

SEQ ID NO: 18182 - RNA, 19 nt, Artificial Sequence
  Synthetic oligonucleotide: PDCD1-4856
cccaucccccccaucuccc

SEQ ID NO: 18183 - RNA, 20 nt, Artificial Sequence
  Synthetic oligonucleotide: PDCD1-2294
ccccaucccccccaucuccc

SEQ ID NO: 18184 - RNA, 21 nt, Artificial Sequence
  Synthetic oligonucleotide: PDCD1-4857
cccccaucccccccaucuccc

SEQ ID NO: 18185 - RNA, 22 nt, Artificial Sequence
  Synthetic oligonucleotide: PDCD1-4858
ucccccaucccccccaucuccc

SEQ ID NO: 18186 - RNA, 23 nt, Artificial Sequence
  Synthetic oligonucleotide: PDCD1-4859
cucccccaucccccccaucuccc

SEQ ID NO: 18187 - RNA, 24 nt, Artificial Sequence
  Synthetic oligonucleotide: PDCD1-4860
ccucccccaucccccccaucuccc

SEQ ID NO: 18188 - RNA, 18 nt, Artificial Sequence
  Synthetic oligonucleotide: PDCD1-4861
aggggaggaguuggggcc

SEQ ID NO: 18189 - RNA, 19 nt, Artificial Sequence
  Synthetic oligonucleotide: PDCD1-4862
caggggaggaguuggggcc

SEQ ID NO: 18190 - RNA, 20 nt, Artificial Sequence
  Synthetic oligonucleotide: PDCD1-980
ccaggggaggaguuggggcc

SEQ ID NO: 18191 - RNA, 21 nt, Artificial Sequence
  Synthetic oligonucleotide: PDCD1-4863
gccaggggaggaguuggggcc

SEQ ID NO: 18192 - RNA, 22 nt, Artificial Sequence
  Synthetic oligonucleotide: PDCD1-4864
ggccaggggaggaguuggggcc

SEQ ID NO: 18193 - RNA, 23 nt, Artificial Sequence
  Synthetic oligonucleotide: PDCD1-4865
gggccaggggaggaguuggggcc

SEQ ID NO: 18194 - RNA, 24 nt, Artificial Sequence
  Synthetic oligonucleotide: PDCD1-4866
ugggccaggggaggaguuggggcc

SEQ ID NO: 18195 - RNA, 18 nt, Artificial Sequence
  Synthetic oligonucleotide: PDCD1-4867
aaagaggggacuugggcc

SEQ ID NO: 18196 - RNA, 19 nt, Artificial Sequence
  Synthetic oligonucleotide: PDCD1-4868
caaagaggggacuugggcc

SEQ ID NO: 18197 - RNA, 20 nt, Artificial Sequence
  Synthetic oligonucleotide: PDCD1-2101
gcaaagaggggacuugggcc

SEQ ID NO: 18198 - RNA, 21 nt, Artificial Sequence
  Synthetic oligonucleotide: PDCD1-4869
agcaaagaggggacuugggcc

SEQ ID NO: 18199 - RNA, 22 nt, Artificial Sequence
  Synthetic oligonucleotide: PDCD1-4870
gagcaaagaggggacuugggcc

SEQ ID NO: 18200 - RNA, 23 nt, Artificial Sequence
  Synthetic oligonucleotide: PDCD1-4871
ggagcaaagaggggacuugggcc

SEQ ID NO: 18201 - RNA, 24 nt, Artificial Sequence
  Synthetic oligonucleotide: PDCD1-4872
aggagcaaagaggggacuugggcc

SEQ ID NO: 18202 - RNA, 18 nt, Artificial Sequence
  Synthetic oligonucleotide: PDCD1-3302
cugugggaucugcaugcc

SEQ ID NO: 18203 - RNA, 19 nt, Artificial Sequence
  Synthetic oligonucleotide: PDCD1-3303
ccugugggaucugcaugcc

SEQ ID NO: 18204 - RNA, 20 nt, Artificial Sequence
  Synthetic oligonucleotide: PDCD1-127
gccugugggaucugcaugcc

SEQ ID NO: 18205 - RNA, 21 nt, Artificial Sequence
  Synthetic oligonucleotide: PDCD1-3304
cgccugugggaucugcaugcc

SEQ ID NO: 18206 - RNA, 22 nt, Artificial Sequence
  Synthetic oligonucleotide: PDCD1-3305
gcgccugugggaucugcaugcc

SEQ ID NO: 18207 - RNA, 23 nt, Artificial Sequence
  Synthetic oligonucleotide: PDCD1-3306
ggcgccugugggaucugcaugcc

SEQ ID NO: 18208 - RNA, 24 nt, Artificial Sequence
  Synthetic oligonucleotide: PDCD1-3307
gggcgccugugggaucugcaugcc

SEQ ID NO: 18209 - RNA, 18 nt, Artificial Sequence
  Synthetic oligonucleotide: PDCD1-4873
agcaccccccgaccugcc

SEQ ID NO: 18210 - RNA, 19 nt, Artificial Sequence
  Synthetic oligonucleotide: PDCD1-4874
cagcaccccccgaccugcc

SEQ ID NO: 18211 - RNA, 20 nt, Artificial Sequence
  Synthetic oligonucleotide: PDCD1-2122
acagcaccccccgaccugcc

SEQ ID NO: 18212 - RNA, 21 nt, Artificial Sequence
  Synthetic oligonucleotide: PDCD1-4875
cacagcaccccccgaccugcc

SEQ ID NO: 18213 - RNA, 22 nt, Artificial Sequence
  Synthetic oligonucleotide: PDCD1-4876
ccacagcaccccccgaccugcc

SEQ ID NO: 18214 - RNA, 23 nt, Artificial Sequence
  Synthetic oligonucleotide: PDCD1-4877
gccacagcaccccccgaccugcc

SEQ ID NO: 18215 - RNA, 24 nt, Artificial Sequence
  Synthetic oligonucleotide: PDCD1-4878
ugccacagcaccccccgaccugcc

SEQ ID NO: 18216 - RNA, 20 nt, Artificial Sequence
  Synthetic oligonucleotide: PDCD1-2132
ucagcaccccccgaccugcc

SEQ ID NO: 18217 - RNA, 21 nt, Artificial Sequence
  Synthetic oligonucleotide: PDCD1-4879
cucagcaccccccgaccugcc

SEQ ID NO: 18218 - RNA, 22 nt, Artificial Sequence
  Synthetic oligonucleotide: PDCD1-4880
ccucagcaccccccgaccugcc

SEQ ID NO: 18219 - RNA, 23 nt, Artificial Sequence
  Synthetic oligonucleotide: PDCD1-4881
gccucagcaccccccgaccugcc

SEQ ID NO: 18220 - RNA, 24 nt, Artificial Sequence
  Synthetic oligonucleotide: PDCD1-4882
cgccucagcaccccccgaccugcc

SEQ ID NO: 18221 - RNA, 18 nt, Artificial Sequence
  Synthetic oligonucleotide: PDCD1-4883
gggccgggccucccugcc

SEQ ID NO: 18222 - RNA, 19 nt, Artificial Sequence
  Synthetic oligonucleotide: PDCD1-4884
ggggccgggccucccugcc

SEQ ID NO: 18223 - RNA, 20 nt, Artificial Sequence
  Synthetic oligonucleotide: PDCD1-2300
gggggccgggccucccugcc

SEQ ID NO: 18224 - RNA, 21 nt, Artificial Sequence
  Synthetic oligonucleotide: PDCD1-4885
ugggggccgggccucccugcc

SEQ ID NO: 18225 - RNA, 22 nt, Artificial Sequence
  Synthetic oligonucleotide: PDCD1-4886
cugggggccgggccucccugcc

SEQ ID NO: 18226 - RNA, 23 nt, Artificial Sequence
  Synthetic oligonucleotide: PDCD1-4887
ccugggggccgggccucccugcc

SEQ ID NO: 18227 - RNA, 24 nt, Artificial Sequence
  Synthetic oligonucleotide: PDCD1-4888
cccugggggccgggccucccugcc

SEQ ID NO: 18228 - RNA, 18 nt, Artificial Sequence
  Synthetic oligonucleotide: PDCD1-4889
acagagguccugccugcc

SEQ ID NO: 18229 - RNA, 19 nt, Artificial Sequence
  Synthetic oligonucleotide: PDCD1-4890
gacagagguccugccugcc

SEQ ID NO: 18230 - RNA, 20 nt, Artificial Sequence
  Synthetic oligonucleotide: PDCD1-965
ggacagagguccugccugcc

SEQ ID NO: 18231 - RNA, 21 nt, Artificial Sequence
  Synthetic oligonucleotide: PDCD1-4891
gggacagagguccugccugcc

SEQ ID NO: 18232 - RNA, 22 nt, Artificial Sequence
  Synthetic oligonucleotide: PDCD1-4892
ggggacagagguccugccugcc

SEQ ID NO: 18233 - RNA, 23 nt, Artificial Sequence
  Synthetic oligonucleotide: PDCD1-4893
aggggacagagguccugccugcc

SEQ ID NO: 18234 - RNA, 24 nt, Artificial Sequence
  Synthetic oligonucleotide: PDCD1-4894
gaggggacagagguccugccugcc

SEQ ID NO: 18235 - RNA, 18 nt, Artificial Sequence
  Synthetic oligonucleotide: PDCD1-4895
cccaucccccccaucucc

SEQ ID NO: 18236 - RNA, 19 nt, Artificial Sequence
  Synthetic oligonucleotide: PDCD1-4896
ccccaucccccccaucucc

SEQ ID NO: 18237 - RNA, 20 nt, Artificial Sequence
  Synthetic oligonucleotide: PDCD1-1093
cccccaucccccccaucucc

SEQ ID NO: 18238 - RNA, 21 nt, Artificial Sequence
  Synthetic oligonucleotide: PDCD1-4897
ucccccaucccccccaucucc

SEQ ID NO: 18239 - RNA, 22 nt, Artificial Sequence
  Synthetic oligonucleotide: PDCD1-4898
cucccccaucccccccaucucc

SEQ ID NO: 18240 - RNA, 23 nt, Artificial Sequence
  Synthetic oligonucleotide: PDCD1-4899
ccucccccaucccccccaucucc

SEQ ID NO: 18241 - RNA, 24 nt, Artificial Sequence
  Synthetic oligonucleotide: PDCD1-4900
uccucccccaucccccccaucucc

SEQ ID NO: 18242 - RNA, 18 nt, Artificial Sequence
  Synthetic oligonucleotide: PDCD1-4901
caggguaaggggcagagc

SEQ ID NO: 18243 - RNA, 19 nt, Artificial Sequence
  Synthetic oligonucleotide: PDCD1-4902
ucaggguaaggggcagagc

SEQ ID NO: 18244 - RNA, 20 nt, Artificial Sequence
  Synthetic oligonucleotide: PDCD1-2115
cucaggguaaggggcagagc

SEQ ID NO: 18245 - RNA, 21 nt, Artificial Sequence
  Synthetic oligonucleotide: PDCD1-4903
gcucaggguaaggggcagagc

SEQ ID NO: 18246 - RNA, 22 nt, Artificial Sequence
  Synthetic oligonucleotide: PDCD1-4904
agcucaggguaaggggcagagc

SEQ ID NO: 18247 - RNA, 23 nt, Artificial Sequence
  Synthetic oligonucleotide: PDCD1-4905
cagcucaggguaaggggcagagc

SEQ ID NO: 18248 - RNA, 24 nt, Artificial Sequence
  Synthetic oligonucleotide: PDCD1-4906
acagcucaggguaaggggcagagc

SEQ ID NO: 18249 - RNA, 18 nt, Artificial Sequence
  Synthetic oligonucleotide: PDCD1-4907
ccucuuuccauaucccgc

SEQ ID NO: 18250 - RNA, 19 nt, Artificial Sequence
  Synthetic oligonucleotide: PDCD1-4908
gccucuuuccauaucccgc

SEQ ID NO: 18251 - RNA, 20 nt, Artificial Sequence
  Synthetic oligonucleotide: PDCD1-1087
ggccucuuuccauaucccgc

SEQ ID NO: 18252 - RNA, 21 nt, Artificial Sequence
  Synthetic oligonucleotide: PDCD1-4909
uggccucuuuccauaucccgc

SEQ ID NO: 18253 - RNA, 22 nt, Artificial Sequence
  Synthetic oligonucleotide: PDCD1-4910
guggccucuuuccauaucccgc

SEQ ID NO: 18254 - RNA, 23 nt, Artificial Sequence
  Synthetic oligonucleotide: PDCD1-4911
uguggccucuuuccauaucccgc

SEQ ID NO: 18255 - RNA, 24 nt, Artificial Sequence
  Synthetic oligonucleotide: PDCD1-4912
cuguggccucuuuccauaucccgc

SEQ ID NO: 18256 - RNA, 18 nt, Artificial Sequence
  Synthetic oligonucleotide: PDCD1-4913
caaagaggggacuugggc

SEQ ID NO: 18257 - RNA, 19 nt, Artificial Sequence
  Synthetic oligonucleotide: PDCD1-4914
gcaaagaggggacuugggc

SEQ ID NO: 18258 - RNA, 20 nt, Artificial Sequence
  Synthetic oligonucleotide: PDCD1-972
agcaaagaggggacuugggc

SEQ ID NO: 18259 - RNA, 21 nt, Artificial Sequence
  Synthetic oligonucleotide: PDCD1-4915
gagcaaagaggggacuugggc

SEQ ID NO: 18260 - RNA, 22 nt, Artificial Sequence
  Synthetic oligonucleotide: PDCD1-4916
ggagcaaagaggggacuugggc

SEQ ID NO: 18261 - RNA, 23 nt, Artificial Sequence
  Synthetic oligonucleotide: PDCD1-4917
aggagcaaagaggggacuugggc

SEQ ID NO: 18262 - RNA, 24 nt, Artificial Sequence
  Synthetic oligonucleotide: PDCD1-4918
caggagcaaagaggggacuugggc

SEQ ID NO: 18263 - RNA, 18 nt, Artificial Sequence
  Synthetic oligonucleotide: PDCD1-3332
accgcccagacgacuggc

SEQ ID NO: 18264 - RNA, 19 nt, Artificial Sequence
  Synthetic oligonucleotide: PDCD1-3333
caccgcccagacgacuggc

SEQ ID NO: 18265 - RNA, 20 nt, Artificial Sequence
  Synthetic oligonucleotide: PDCD1-592
gcaccgcccagacgacuggc

SEQ ID NO: 18266 - RNA, 21 nt, Artificial Sequence
  Synthetic oligonucleotide: PDCD1-3334
agcaccgcccagacgacuggc

SEQ ID NO: 18267 - RNA, 22 nt, Artificial Sequence
  Synthetic oligonucleotide: PDCD1-3335
uagcaccgcccagacgacuggc

SEQ ID NO: 18268 - RNA, 23 nt, Artificial Sequence
  Synthetic oligonucleotide: PDCD1-3336
guagcaccgcccagacgacuggc

SEQ ID NO: 18269 - RNA, 24 nt, Artificial Sequence
  Synthetic oligonucleotide: PDCD1-3337
uguagcaccgcccagacgacuggc

SEQ ID NO: 18270 - RNA, 18 nt, Artificial Sequence
  Synthetic oligonucleotide: PDCD1-3338
ccugugggaucugcaugc

SEQ ID NO: 18271 - RNA, 19 nt, Artificial Sequence
  Synthetic oligonucleotide: PDCD1-3339
gccugugggaucugcaugc

SEQ ID NO: 18272 - RNA, 20 nt, Artificial Sequence
  Synthetic oligonucleotide: PDCD1-589
cgccugugggaucugcaugc

SEQ ID NO: 18273 - RNA, 21 nt, Artificial Sequence
  Synthetic oligonucleotide: PDCD1-3340
gcgccugugggaucugcaugc

SEQ ID NO: 18274 - RNA, 22 nt, Artificial Sequence
  Synthetic oligonucleotide: PDCD1-3341
ggcgccugugggaucugcaugc

SEQ ID NO: 18275 - RNA, 23 nt, Artificial Sequence
  Synthetic oligonucleotide: PDCD1-3342
gggcgccugugggaucugcaugc

SEQ ID NO: 18276 - RNA, 24 nt, Artificial Sequence
  Synthetic oligonucleotide: PDCD1-3343
agggcgccugugggaucugcaugc

SEQ ID NO: 18277 - RNA, 18 nt, Artificial Sequence
  Synthetic oligonucleotide: PDCD1-4919
cagcaccccccgaccugc

SEQ ID NO: 18278 - RNA, 19 nt, Artificial Sequence
  Synthetic oligonucleotide: PDCD1-4920
acagcaccccccgaccugc

SEQ ID NO: 18279 - RNA, 20 nt, Artificial Sequence
  Synthetic oligonucleotide: PDCD1-995
cacagcaccccccgaccugc

SEQ ID NO: 18280 - RNA, 21 nt, Artificial Sequence
  Synthetic oligonucleotide: PDCD1-4921
ccacagcaccccccgaccugc

SEQ ID NO: 18281 - RNA, 22 nt, Artificial Sequence
  Synthetic oligonucleotide: PDCD1-4922
gccacagcaccccccgaccugc

SEQ ID NO: 18282 - RNA, 23 nt, Artificial Sequence
  Synthetic oligonucleotide: PDCD1-4923
ugccacagcaccccccgaccugc

SEQ ID NO: 18283 - RNA, 24 nt, Artificial Sequence
  Synthetic oligonucleotide: PDCD1-4924
cugccacagcaccccccgaccugc

SEQ ID NO: 18284 - RNA, 19 nt, Artificial Sequence
  Synthetic oligonucleotide: PDCD1-4925
ucagcaccccccgaccugc

SEQ ID NO: 18285 - RNA, 20 nt, Artificial Sequence
  Synthetic oligonucleotide: PDCD1-1004
cucagcaccccccgaccugc

SEQ ID NO: 18286 - RNA, 21 nt, Artificial Sequence
  Synthetic oligonucleotide: PDCD1-4926
ccucagcaccccccgaccugc

SEQ ID NO: 18287 - RNA, 22 nt, Artificial Sequence
  Synthetic oligonucleotide: PDCD1-4927
gccucagcaccccccgaccugc

SEQ ID NO: 18288 - RNA, 23 nt, Artificial Sequence
  Synthetic oligonucleotide: PDCD1-4928
cgccucagcaccccccgaccugc

SEQ ID NO: 18289 - RNA, 24 nt, Artificial Sequence
  Synthetic oligonucleotide: PDCD1-4929
ccgccucagcaccccccgaccugc

SEQ ID NO: 18290 - RNA, 18 nt, Artificial Sequence
  Synthetic oligonucleotide: PDCD1-4930
ggggccgggccucccugc

SEQ ID NO: 18291 - RNA, 19 nt, Artificial Sequence
  Synthetic oligonucleotide: PDCD1-4931
gggggccgggccucccugc

SEQ ID NO: 18292 - RNA, 20 nt, Artificial Sequence
  Synthetic oligonucleotide: PDCD1-1097
ugggggccgggccucccugc

SEQ ID NO: 18293 - RNA, 21 nt, Artificial Sequence
  Synthetic oligonucleotide: PDCD1-4932
cugggggccgggccucccugc

SEQ ID NO: 18294 - RNA, 22 nt, Artificial Sequence
  Synthetic oligonucleotide: PDCD1-4933
ccugggggccgggccucccugc

SEQ ID NO: 18295 - RNA, 23 nt, Artificial Sequence
  Synthetic oligonucleotide: PDCD1-4934
cccugggggccgggccucccugc

SEQ ID NO: 18296 - RNA, 24 nt, Artificial Sequence
  Synthetic oligonucleotide: PDCD1-4935
ucccugggggccgggccucccugc

SEQ ID NO: 18297 - RNA, 18 nt, Artificial Sequence
  Synthetic oligonucleotide: PDCD1-4936
ccgggaccccugggcugc

SEQ ID NO: 18298 - RNA, 19 nt, Artificial Sequence
  Synthetic oligonucleotide: PDCD1-4937
uccgggaccccugggcugc

SEQ ID NO: 18299 - RNA, 20 nt, Artificial Sequence
  Synthetic oligonucleotide: PDCD1-1003
cuccgggaccccugggcugc

SEQ ID NO: 18300 - RNA, 21 nt, Artificial Sequence
  Synthetic oligonucleotide: PDCD1-4938
gcuccgggaccccugggcugc

SEQ ID NO: 18301 - RNA, 22 nt, Artificial Sequence
  Synthetic oligonucleotide: PDCD1-4939
cgcuccgggaccccugggcugc

SEQ ID NO: 18302 - RNA, 23 nt, Artificial Sequence
  Synthetic oligonucleotide: PDCD1-4940
ucgcuccgggaccccugggcugc

SEQ ID NO: 18303 - RNA, 24 nt, Artificial Sequence
  Synthetic oligonucleotide: PDCD1-4941
cucgcuccgggaccccugggcugc

SEQ ID NO: 18304 - RNA, 18 nt, Artificial Sequence
  Synthetic oligonucleotide: PDCD1-4942
gagugacagaggcagugc

SEQ ID NO: 18305 - RNA, 19 nt, Artificial Sequence
  Synthetic oligonucleotide: PDCD1-4943
agagugacagaggcagugc

SEQ ID NO: 18306 - RNA, 20 nt, Artificial Sequence
  Synthetic oligonucleotide: PDCD1-2243
gagagugacagaggcagugc

SEQ ID NO: 18307 - RNA, 21 nt, Artificial Sequence
  Synthetic oligonucleotide: PDCD1-4944
cgagagugacagaggcagugc

SEQ ID NO: 18308 - RNA, 22 nt, Artificial Sequence
  Synthetic oligonucleotide: PDCD1-4945
gcgagagugacagaggcagugc

SEQ ID NO: 18309 - RNA, 23 nt, Artificial Sequence
  Synthetic oligonucleotide: PDCD1-4946
ggcgagagugacagaggcagugc

SEQ ID NO: 18310 - RNA, 24 nt, Artificial Sequence
  Synthetic oligonucleotide: PDCD1-4947
gggcgagagugacagaggcagugc

SEQ ID NO: 18311 - RNA, 18 nt, Artificial Sequence
  Synthetic oligonucleotide: PDCD1-4948
ccgcccgagcugccccuc

SEQ ID NO: 18312 - RNA, 19 nt, Artificial Sequence
  Synthetic oligonucleotide: PDCD1-4949
cccgcccgagcugccccuc

SEQ ID NO: 18313 - RNA, 20 nt, Artificial Sequence
  Synthetic oligonucleotide: PDCD1-1088
ucccgcccgagcugccccuc

SEQ ID NO: 18314 - RNA, 21 nt, Artificial Sequence
  Synthetic oligonucleotide: PDCD1-4950
aucccgcccgagcugccccuc

SEQ ID NO: 18315 - RNA, 22 nt, Artificial Sequence
  Synthetic oligonucleotide: PDCD1-4951
uaucccgcccgagcugccccuc

SEQ ID NO: 18316 - RNA, 23 nt, Artificial Sequence
  Synthetic oligonucleotide: PDCD1-4952
auaucccgcccgagcugccccuc

SEQ ID NO: 18317 - RNA, 24 nt, Artificial Sequence
  Synthetic oligonucleotide: PDCD1-4953
cauaucccgcccgagcugccccuc

SEQ ID NO: 18318 - RNA, 18 nt, Artificial Sequence
  Synthetic oligonucleotide: PDCD1-4954
ccauucugucggagccuc

SEQ ID NO: 18319 - RNA, 19 nt, Artificial Sequence
  Synthetic oligonucleotide: PDCD1-4955
cccauucugucggagccuc

SEQ ID NO: 18320 - RNA, 20 nt, Artificial Sequence
  Synthetic oligonucleotide: PDCD1-2764
ucccauucugucggagccuc

SEQ ID NO: 18321 - RNA, 21 nt, Artificial Sequence
  Synthetic oligonucleotide: PDCD1-4956
cucccauucugucggagccuc

SEQ ID NO: 18322 - RNA, 22 nt, Artificial Sequence
  Synthetic oligonucleotide: PDCD1-4957
acucccauucugucggagccuc

SEQ ID NO: 18323 - RNA, 23 nt, Artificial Sequence
  Synthetic oligonucleotide: PDCD1-4958
cacucccauucugucggagccuc

SEQ ID NO: 18324 - RNA, 24 nt, Artificial Sequence
  Synthetic oligonucleotide: PDCD1-4959
ccacucccauucugucggagccuc

SEQ ID NO: 18325 - RNA, 18 nt, Artificial Sequence
  Synthetic oligonucleotide: PDCD1-4960
ccuccagaccccucgcuc

SEQ ID NO: 18326 - RNA, 19 nt, Artificial Sequence
  Synthetic oligonucleotide: PDCD1-4961
cccuccagaccccucgcuc

SEQ ID NO: 18327 - RNA, 20 nt, Artificial Sequence
  Synthetic oligonucleotide: PDCD1-2125
ucccuccagaccccucgcuc

SEQ ID NO: 18328 - RNA, 21 nt, Artificial Sequence
  Synthetic oligonucleotide: PDCD1-4962
gucccuccagaccccucgcuc

SEQ ID NO: 18329 - RNA, 22 nt, Artificial Sequence
  Synthetic oligonucleotide: PDCD1-4963
ggucccuccagaccccucgcuc

SEQ ID NO: 18330 - RNA, 23 nt, Artificial Sequence
  Synthetic oligonucleotide: PDCD1-4964
aggucccuccagaccccucgcuc

SEQ ID NO: 18331 - RNA, 24 nt, Artificial Sequence
  Synthetic oligonucleotide: PDCD1-4965
aaggucccuccagaccccucgcuc

SEQ ID NO: 18332 - RNA, 18 nt, Artificial Sequence
  Synthetic oligonucleotide: PDCD1-4966
ccuccagaccccuggcuc

SEQ ID NO: 18333 - RNA, 19 nt, Artificial Sequence
  Synthetic oligonucleotide: PDCD1-4967
cccuccagaccccuggcuc

SEQ ID NO: 18334 - RNA, 20 nt, Artificial Sequence
  Synthetic oligonucleotide: PDCD1-2139
ucccuccagaccccuggcuc

SEQ ID NO: 18335 - RNA, 21 nt, Artificial Sequence
  Synthetic oligonucleotide: PDCD1-4968
gucccuccagaccccuggcuc

SEQ ID NO: 18336 - RNA, 22 nt, Artificial Sequence
  Synthetic oligonucleotide: PDCD1-4969
ggucccuccagaccccuggcuc

SEQ ID NO: 18337 - RNA, 23 nt, Artificial Sequence
  Synthetic oligonucleotide: PDCD1-4970
aggucccuccagaccccuggcuc

SEQ ID NO: 18338 - RNA, 24 nt, Artificial Sequence
  Synthetic oligonucleotide: PDCD1-4971
aaggucccuccagaccccuggcuc

SEQ ID NO: 18339 - RNA, 18 nt, Artificial Sequence
  Synthetic oligonucleotide: PDCD1-4972
cccucugggcucagguuc

SEQ ID NO: 18340 - RNA, 19 nt, Artificial Sequence
  Synthetic oligonucleotide: PDCD1-4973
ccccucugggcucagguuc

SEQ ID NO: 18341 - RNA, 20 nt, Artificial Sequence
  Synthetic oligonucleotide: PDCD1-1103
cccccucugggcucagguuc

SEQ ID NO: 18342 - RNA, 21 nt, Artificial Sequence
  Synthetic oligonucleotide: PDCD1-4974
gcccccucugggcucagguuc

SEQ ID NO: 18343 - RNA, 22 nt, Artificial Sequence
  Synthetic oligonucleotide: PDCD1-4975
ggcccccucugggcucagguuc

SEQ ID NO: 18344 - RNA, 23 nt, Artificial Sequence
  Synthetic oligonucleotide: PDCD1-4976
uggcccccucugggcucagguuc

SEQ ID NO: 18345 - RNA, 24 nt, Artificial Sequence
  Synthetic oligonucleotide: PDCD1-4977
guggcccccucugggcucagguuc

SEQ ID NO: 18346 - RNA, 18 nt, Artificial Sequence
  Synthetic oligonucleotide: PDCD1-4978
gccugcccaggagcaaag

SEQ ID NO: 18347 - RNA, 19 nt, Artificial Sequence
  Synthetic oligonucleotide: PDCD1-4979
ugccugcccaggagcaaag

SEQ ID NO: 18348 - RNA, 20 nt, Artificial Sequence
  Synthetic oligonucleotide: PDCD1-2096
cugccugcccaggagcaaag

SEQ ID NO: 18349 - RNA, 21 nt, Artificial Sequence
  Synthetic oligonucleotide: PDCD1-4980
ccugccugcccaggagcaaag

SEQ ID NO: 18350 - RNA, 22 nt, Artificial Sequence
  Synthetic oligonucleotide: PDCD1-4981
uccugccugcccaggagcaaag

SEQ ID NO: 18351 - RNA, 23 nt, Artificial Sequence
  Synthetic oligonucleotide: PDCD1-4982
guccugccugcccaggagcaaag

SEQ ID NO: 18352 - RNA, 24 nt, Artificial Sequence
  Synthetic oligonucleotide: PDCD1-4983
gguccugccugcccaggagcaaag

SEQ ID NO: 18353 - RNA, 18 nt, Artificial Sequence
  Synthetic oligonucleotide: PDCD1-4984
acagagacagggagacag

SEQ ID NO: 18354 - RNA, 19 nt, Artificial Sequence
  Synthetic oligonucleotide: PDCD1-4985
gacagagacagggagacag

SEQ ID NO: 18355 - RNA, 20 nt, Artificial Sequence
  Synthetic oligonucleotide: PDCD1-2270
agacagagacagggagacag

SEQ ID NO: 18356 - RNA, 21 nt, Artificial Sequence
  Synthetic oligonucleotide: PDCD1-4986
gagacagagacagggagacag

SEQ ID NO: 18357 - RNA, 22 nt, Artificial Sequence
  Synthetic oligonucleotide: PDCD1-4987
agagacagagacagggagacag

SEQ ID NO: 18358 - RNA, 23 nt, Artificial Sequence
  Synthetic oligonucleotide: PDCD1-4988
gagagacagagacagggagacag

SEQ ID NO: 18359 - RNA, 24 nt, Artificial Sequence
  Synthetic oligonucleotide: PDCD1-4989
agagagacagagacagggagacag

SEQ ID NO: 18360 - RNA, 18 nt, Artificial Sequence
  Synthetic oligonucleotide: PDCD1-4990
agaggggacuugggccag

SEQ ID NO: 18361 - RNA, 19 nt, Artificial Sequence
  Synthetic oligonucleotide: PDCD1-4991
aagaggggacuugggccag

SEQ ID NO: 18362 - RNA, 20 nt, Artificial Sequence
  Synthetic oligonucleotide: PDCD1-2103
aaagaggggacuugggccag

SEQ ID NO: 18363 - RNA, 21 nt, Artificial Sequence
  Synthetic oligonucleotide: PDCD1-4992
caaagaggggacuugggccag

SEQ ID NO: 18364 - RNA, 22 nt, Artificial Sequence
  Synthetic oligonucleotide: PDCD1-4993
gcaaagaggggacuugggccag

SEQ ID NO: 18365 - RNA, 23 nt, Artificial Sequence
  Synthetic oligonucleotide: PDCD1-4994
agcaaagaggggacuugggccag

SEQ ID NO: 18366 - RNA, 24 nt, Artificial Sequence
  Synthetic oligonucleotide: PDCD1-4995
gagcaaagaggggacuugggccag

SEQ ID NO: 18367 - RNA, 18 nt, Artificial Sequence
  Synthetic oligonucleotide: PDCD1-4996
gccuucuccacugcucag

SEQ ID NO: 18368 - RNA, 19 nt, Artificial Sequence
  Synthetic oligonucleotide: PDCD1-4997
cgccuucuccacugcucag

SEQ ID NO: 18369 - RNA, 20 nt, Artificial Sequence
  Synthetic oligonucleotide: PDCD1-1019
ccgccuucuccacugcucag

SEQ ID NO: 18370 - RNA, 21 nt, Artificial Sequence
  Synthetic oligonucleotide: PDCD1-4998
gccgccuucuccacugcucag

SEQ ID NO: 18371 - RNA, 22 nt, Artificial Sequence
  Synthetic oligonucleotide: PDCD1-4999
ugccgccuucuccacugcucag

SEQ ID NO: 18372 - RNA, 23 nt, Artificial Sequence
  Synthetic oligonucleotide: PDCD1-5000
gugccgccuucuccacugcucag

SEQ ID NO: 18373 - RNA, 24 nt, Artificial Sequence
  Synthetic oligonucleotide: PDCD1-5001
agugccgccuucuccacugcucag

SEQ ID NO: 18374 - RNA, 18 nt, Artificial Sequence
  Synthetic oligonucleotide: PDCD1-5002
aggaguuggggcccagag

SEQ ID NO: 18375 - RNA, 19 nt, Artificial Sequence
  Synthetic oligonucleotide: PDCD1-5003
gaggaguuggggcccagag

SEQ ID NO: 18376 - RNA, 20 nt, Artificial Sequence
  Synthetic oligonucleotide: PDCD1-2108
ggaggaguuggggcccagag

SEQ ID NO: 18377 - RNA, 21 nt, Artificial Sequence
  Synthetic oligonucleotide: PDCD1-5004
gggaggaguuggggcccagag

SEQ ID NO: 18378 - RNA, 22 nt, Artificial Sequence
  Synthetic oligonucleotide: PDCD1-5005
ggggaggaguuggggcccagag

SEQ ID NO: 18379 - RNA, 23 nt, Artificial Sequence
  Synthetic oligonucleotide: PDCD1-5006
aggggaggaguuggggcccagag

SEQ ID NO: 18380 - RNA, 24 nt, Artificial Sequence
  Synthetic oligonucleotide: PDCD1-5007
caggggaggaguuggggcccagag

SEQ ID NO: 18381 - RNA, 18 nt, Artificial Sequence
  Synthetic oligonucleotide: PDCD1-5008
ucaggguaaggggcagag

SEQ ID NO: 18382 - RNA, 19 nt, Artificial Sequence
  Synthetic oligonucleotide: PDCD1-5009
cucaggguaaggggcagag

SEQ ID NO: 18383 - RNA, 20 nt, Artificial Sequence
  Synthetic oligonucleotide: PDCD1-991
gcucaggguaaggggcagag

SEQ ID NO: 18384 - RNA, 21 nt, Artificial Sequence
  Synthetic oligonucleotide: PDCD1-5010
agcucaggguaaggggcagag

SEQ ID NO: 18385 - RNA, 22 nt, Artificial Sequence
  Synthetic oligonucleotide: PDCD1-5011
cagcucaggguaaggggcagag

SEQ ID NO: 18386 - RNA, 23 nt, Artificial Sequence
  Synthetic oligonucleotide: PDCD1-5012
acagcucaggguaaggggcagag

SEQ ID NO: 18387 - RNA, 24 nt, Artificial Sequence
  Synthetic oligonucleotide: PDCD1-5013
cacagcucaggguaaggggcagag

SEQ ID NO: 18388 - RNA, 18 nt, Artificial Sequence
  Synthetic oligonucleotide: PDCD1-5014
gacagggagacagaggag

SEQ ID NO: 18389 - RNA, 19 nt, Artificial Sequence
  Synthetic oligonucleotide: PDCD1-5015
agacagggagacagaggag

SEQ ID NO: 18390 - RNA, 20 nt, Artificial Sequence
  Synthetic oligonucleotide: PDCD1-1076
gagacagggagacagaggag

SEQ ID NO: 18391 - RNA, 21 nt, Artificial Sequence
  Synthetic oligonucleotide: PDCD1-5016
agagacagggagacagaggag

SEQ ID NO: 18392 - RNA, 22 nt, Artificial Sequence
  Synthetic oligonucleotide: PDCD1-5017
cagagacagggagacagaggag

SEQ ID NO: 18393 - RNA, 23 nt, Artificial Sequence
  Synthetic oligonucleotide: PDCD1-5018
acagagacagggagacagaggag

SEQ ID NO: 18394 - RNA, 24 nt, Artificial Sequence
  Synthetic oligonucleotide: PDCD1-5019
gacagagacagggagacagaggag

SEQ ID NO: 18395 - RNA, 18 nt, Artificial Sequence
  Synthetic oligonucleotide: PDCD1-5020
cuugggccaggggaggag

SEQ ID NO: 18396 - RNA, 19 nt, Artificial Sequence
  Synthetic oligonucleotide: PDCD1-5021
acuugggccaggggaggag

SEQ ID NO: 18397 - RNA, 20 nt, Artificial Sequence
  Synthetic oligonucleotide: PDCD1-978
gacuugggccaggggaggag

SEQ ID NO: 18398 - RNA, 21 nt, Artificial Sequence
  Synthetic oligonucleotide: PDCD1-5022
ggacuugggccaggggaggag

SEQ ID NO: 18399 - RNA, 22 nt, Artificial Sequence
  Synthetic oligonucleotide: PDCD1-5023
gggacuugggccaggggaggag

SEQ ID NO: 18400 - RNA, 23 nt, Artificial Sequence
  Synthetic oligonucleotide: PDCD1-5024
ggggacuugggccaggggaggag

SEQ ID NO: 18401 - RNA, 24 nt, Artificial Sequence
  Synthetic oligonucleotide: PDCD1-5025
aggggacuugggccaggggaggag

SEQ ID NO: 18402 - RNA, 18 nt, Artificial Sequence
  Synthetic oligonucleotide: PDCD1-5026
agaggagauggggaggag

SEQ ID NO: 18403 - RNA, 19 nt, Artificial Sequence
  Synthetic oligonucleotide: PDCD1-5027
cagaggagauggggaggag

SEQ ID NO: 18404 - RNA, 20 nt, Artificial Sequence
  Synthetic oligonucleotide: PDCD1-1082
acagaggagauggggaggag

SEQ ID NO: 18405 - RNA, 21 nt, Artificial Sequence
  Synthetic oligonucleotide: PDCD1-5028
gacagaggagauggggaggag

SEQ ID NO: 18406 - RNA, 22 nt, Artificial Sequence
  Synthetic oligonucleotide: PDCD1-5029
agacagaggagauggggaggag

SEQ ID NO: 18407 - RNA, 23 nt, Artificial Sequence
  Synthetic oligonucleotide: PDCD1-5030
gagacagaggagauggggaggag

SEQ ID NO: 18408 - RNA, 24 nt, Artificial Sequence
  Synthetic oligonucleotide: PDCD1-5031
ggagacagaggagauggggaggag

SEQ ID NO: 18409 - RNA, 18 nt, Artificial Sequence
  Synthetic oligonucleotide: PDCD1-5032
uccacugcucaggcggag

SEQ ID NO: 18410 - RNA, 19 nt, Artificial Sequence
  Synthetic oligonucleotide: PDCD1-5033
cuccacugcucaggcggag

SEQ ID NO: 18411 - RNA, 20 nt, Artificial Sequence
  Synthetic oligonucleotide: PDCD1-1021
ucuccacugcucaggcggag

SEQ ID NO: 18412 - RNA, 21 nt, Artificial Sequence
  Synthetic oligonucleotide: PDCD1-5034
uucuccacugcucaggcggag

SEQ ID NO: 18413 - RNA, 22 nt, Artificial Sequence
  Synthetic oligonucleotide: PDCD1-5035
cuucuccacugcucaggcggag

SEQ ID NO: 18414 - RNA, 23 nt, Artificial Sequence
  Synthetic oligonucleotide: PDCD1-5036
ccuucuccacugcucaggcggag

SEQ ID NO: 18415 - RNA, 24 nt, Artificial Sequence
  Synthetic oligonucleotide: PDCD1-5037
gccuucuccacugcucaggcggag

SEQ ID NO: 18416 - RNA, 18 nt, Artificial Sequence
  Synthetic oligonucleotide: PDCD1-5038
gaggcagugcugggggag

SEQ ID NO: 18417 - RNA, 19 nt, Artificial Sequence
  Synthetic oligonucleotide: PDCD1-5039
agaggcagugcugggggag

SEQ ID NO: 18418 - RNA, 20 nt, Artificial Sequence
  Synthetic oligonucleotide: PDCD1-1043
cagaggcagugcugggggag

SEQ ID NO: 18419 - RNA, 21 nt, Artificial Sequence
  Synthetic oligonucleotide: PDCD1-5040
acagaggcagugcugggggag

SEQ ID NO: 18420 - RNA, 22 nt, Artificial Sequence
  Synthetic oligonucleotide: PDCD1-5041
gacagaggcagugcugggggag

SEQ ID NO: 18421 - RNA, 23 nt, Artificial Sequence
  Synthetic oligonucleotide: PDCD1-5042
ugacagaggcagugcugggggag

SEQ ID NO: 18422 - RNA, 24 nt, Artificial Sequence
  Synthetic oligonucleotide: PDCD1-5043
gugacagaggcagugcugggggag

SEQ ID NO: 18423 - RNA, 18 nt, Artificial Sequence
  Synthetic oligonucleotide: PDCD1-5044
ccccaaggaccggcugag

SEQ ID NO: 18424 - RNA, 19 nt, Artificial Sequence
  Synthetic oligonucleotide: PDCD1-5045
gccccaaggaccggcugag

SEQ ID NO: 18425 - RNA, 20 nt, Artificial Sequence
  Synthetic oligonucleotide: PDCD1-2091
agccccaaggaccggcugag

SEQ ID NO: 18426 - RNA, 21 nt, Artificial Sequence
  Synthetic oligonucleotide: PDCD1-5046
cagccccaaggaccggcugag

SEQ ID NO: 18427 - RNA, 22 nt, Artificial Sequence
  Synthetic oligonucleotide: PDCD1-5047
gcagccccaaggaccggcugag

SEQ ID NO: 18428 - RNA, 23 nt, Artificial Sequence
  Synthetic oligonucleotide: PDCD1-5048
cgcagccccaaggaccggcugag

SEQ ID NO: 18429 - RNA, 24 nt, Artificial Sequence
  Synthetic oligonucleotide: PDCD1-5049
acgcagccccaaggaccggcugag

SEQ ID NO: 18430 - RNA, 18 nt, Artificial Sequence
  Synthetic oligonucleotide: PDCD1-5050
ugcucaggcggaggugag

SEQ ID NO: 18431 - RNA, 19 nt, Artificial Sequence
  Synthetic oligonucleotide: PDCD1-5051
cugcucaggcggaggugag

SEQ ID NO: 18432 - RNA, 20 nt, Artificial Sequence
  Synthetic oligonucleotide: PDCD1-2231
acugcucaggcggaggugag

SEQ ID NO: 18433 - RNA, 21 nt, Artificial Sequence
  Synthetic oligonucleotide: PDCD1-5052
cacugcucaggcggaggugag

SEQ ID NO: 18434 - RNA, 22 nt, Artificial Sequence
  Synthetic oligonucleotide: PDCD1-5053
ccacugcucaggcggaggugag

SEQ ID NO: 18435 - RNA, 23 nt, Artificial Sequence
  Synthetic oligonucleotide: PDCD1-5054
uccacugcucaggcggaggugag

SEQ ID NO: 18436 - RNA, 24 nt, Artificial Sequence
  Synthetic oligonucleotide: PDCD1-5055
cuccacugcucaggcggaggugag

SEQ ID NO: 18437 - RNA, 18 nt, Artificial Sequence
  Synthetic oligonucleotide: PDCD1-5056
ugggggaggaggggugag

SEQ ID NO: 18438 - RNA, 19 nt, Artificial Sequence
  Synthetic oligonucleotide: PDCD1-5057
cugggggaggaggggugag

SEQ ID NO: 18439 - RNA, 20 nt, Artificial Sequence
  Synthetic oligonucleotide: PDCD1-1048
gcugggggaggaggggugag

SEQ ID NO: 18440 - RNA, 21 nt, Artificial Sequence
  Synthetic oligonucleotide: PDCD1-5058
ugcugggggaggaggggugag

SEQ ID NO: 18441 - RNA, 22 nt, Artificial Sequence
  Synthetic oligonucleotide: PDCD1-5059
gugcugggggaggaggggugag

SEQ ID NO: 18442 - RNA, 23 nt, Artificial Sequence
  Synthetic oligonucleotide: PDCD1-5060
agugcugggggaggaggggugag

SEQ ID NO: 18443 - RNA, 24 nt, Artificial Sequence
  Synthetic oligonucleotide: PDCD1-5061
cagugcugggggaggaggggugag

SEQ ID NO: 18444 - RNA, 18 nt, Artificial Sequence
  Synthetic oligonucleotide: PDCD1-5062
cccccacgcccuaccccg

SEQ ID NO: 18445 - RNA, 19 nt, Artificial Sequence
  Synthetic oligonucleotide: PDCD1-5063
gcccccacgcccuaccccg

SEQ ID NO: 18446 - RNA, 20 nt, Artificial Sequence
  Synthetic oligonucleotide: PDCD1-2279
ggcccccacgcccuaccccg

SEQ ID NO: 18447 - RNA, 21 nt, Artificial Sequence
  Synthetic oligonucleotide: PDCD1-5064
uggcccccacgcccuaccccg

SEQ ID NO: 18448 - RNA, 22 nt, Artificial Sequence
  Synthetic oligonucleotide: PDCD1-5065
guggcccccacgcccuaccccg

SEQ ID NO: 18449 - RNA, 23 nt, Artificial Sequence
  Synthetic oligonucleotide: PDCD1-5066
cguggcccccacgcccuaccccg

SEQ ID NO: 18450 - RNA, 24 nt, Artificial Sequence
  Synthetic oligonucleotide: PDCD1-5067
ccguggcccccacgcccuaccccg

SEQ ID NO: 18451 - RNA, 18 nt, Artificial Sequence
  Synthetic oligonucleotide: PDCD1-5068
cagagcugggggccaagg

SEQ ID NO: 18452 - RNA, 19 nt, Artificial Sequence
  Synthetic oligonucleotide: PDCD1-5069
gcagagcugggggccaagg

SEQ ID NO: 18453 - RNA, 20 nt, Artificial Sequence
  Synthetic oligonucleotide: PDCD1-994
ggcagagcugggggccaagg

SEQ ID NO: 18454 - RNA, 21 nt, Artificial Sequence
  Synthetic oligonucleotide: PDCD1-5070
gggcagagcugggggccaagg

SEQ ID NO: 18455 - RNA, 22 nt, Artificial Sequence
  Synthetic oligonucleotide: PDCD1-5071
ggggcagagcugggggccaagg

SEQ ID NO: 18456 - RNA, 23 nt, Artificial Sequence
  Synthetic oligonucleotide: PDCD1-5072
aggggcagagcugggggccaagg

SEQ ID NO: 18457 - RNA, 24 nt, Artificial Sequence
  Synthetic oligonucleotide: PDCD1-5073
aaggggcagagcugggggccaagg

SEQ ID NO: 18458 - RNA, 18 nt, Artificial Sequence
  Synthetic oligonucleotide: PDCD1-5074
ccuucuccacugcucagg

SEQ ID NO: 18459 - RNA, 19 nt, Artificial Sequence
  Synthetic oligonucleotide: PDCD1-5075
gccuucuccacugcucagg

SEQ ID NO: 18460 - RNA, 20 nt, Artificial Sequence
  Synthetic oligonucleotide: PDCD1-2229
cgccuucuccacugcucagg

SEQ ID NO: 18461 - RNA, 21 nt, Artificial Sequence
  Synthetic oligonucleotide: PDCD1-5076
ccgccuucuccacugcucagg

SEQ ID NO: 18462 - RNA, 22 nt, Artificial Sequence
  Synthetic oligonucleotide: PDCD1-5077
gccgccuucuccacugcucagg

SEQ ID NO: 18463 - RNA, 23 nt, Artificial Sequence
  Synthetic oligonucleotide: PDCD1-5078
ugccgccuucuccacugcucagg

SEQ ID NO: 18464 - RNA, 24 nt, Artificial Sequence
  Synthetic oligonucleotide: PDCD1-5079
gugccgccuucuccacugcucagg

SEQ ID NO: 18465 - RNA, 18 nt, Artificial Sequence
  Synthetic oligonucleotide: PDCD1-5080
aaacugucccaggucagg

SEQ ID NO: 18466 - RNA, 19 nt, Artificial Sequence
  Synthetic oligonucleotide: PDCD1-5081
gaaacugucccaggucagg

SEQ ID NO: 18467 - RNA, 20 nt, Artificial Sequence
  Synthetic oligonucleotide: PDCD1-1027
ggaaacugucccaggucagg

SEQ ID NO: 18468 - RNA, 21 nt, Artificial Sequence
  Synthetic oligonucleotide: PDCD1-5082
gggaaacugucccaggucagg

SEQ ID NO: 18469 - RNA, 22 nt, Artificial Sequence
  Synthetic oligonucleotide: PDCD1-5083
agggaaacugucccaggucagg

SEQ ID NO: 18470 - RNA, 23 nt, Artificial Sequence
  Synthetic oligonucleotide: PDCD1-5084
aagggaaacugucccaggucagg

SEQ ID NO: 18471 - RNA, 24 nt, Artificial Sequence
  Synthetic oligonucleotide: PDCD1-5085
gaagggaaacugucccaggucagg

SEQ ID NO: 18472 - RNA, 18 nt, Artificial Sequence
  Synthetic oligonucleotide: PDCD1-5086
gguaggacuggggagagg

SEQ ID NO: 18473 - RNA, 19 nt, Artificial Sequence
  Synthetic oligonucleotide: PDCD1-5087
ggguaggacuggggagagg

SEQ ID NO: 18474 - RNA, 20 nt, Artificial Sequence
  Synthetic oligonucleotide: PDCD1-1058
gggguaggacuggggagagg

SEQ ID NO: 18475 - RNA, 21 nt, Artificial Sequence
  Synthetic oligonucleotide: PDCD1-5088
ggggguaggacuggggagagg

SEQ ID NO: 18476 - RNA, 22 nt, Artificial Sequence
  Synthetic oligonucleotide: PDCD1-5089
aggggguaggacuggggagagg

SEQ ID NO: 18477 - RNA, 23 nt, Artificial Sequence
  Synthetic oligonucleotide: PDCD1-5090
gaggggguaggacuggggagagg

SEQ ID NO: 18478 - RNA, 24 nt, Artificial Sequence
  Synthetic oligonucleotide: PDCD1-5091
ggaggggguaggacuggggagagg

SEQ ID NO: 18479 - RNA, 18 nt, Artificial Sequence
  Synthetic oligonucleotide: PDCD1-5092
gggagagggugggggagg

SEQ ID NO: 18480 - RNA, 19 nt, Artificial Sequence
  Synthetic oligonucleotide: PDCD1-5093
ggggagagggugggggagg

SEQ ID NO: 18481 - RNA, 20 nt, Artificial Sequence
  Synthetic oligonucleotide: PDCD1-1066
uggggagagggugggggagg

SEQ ID NO: 18482 - RNA, 21 nt, Artificial Sequence
  Synthetic oligonucleotide: PDCD1-5094
cuggggagagggugggggagg

SEQ ID NO: 18483 - RNA, 22 nt, Artificial Sequence
  Synthetic oligonucleotide: PDCD1-5095
acuggggagagggugggggagg

SEQ ID NO: 18484 - RNA, 23 nt, Artificial Sequence
  Synthetic oligonucleotide: PDCD1-5096
gacuggggagagggugggggagg

SEQ ID NO: 18485 - RNA, 24 nt, Artificial Sequence
  Synthetic oligonucleotide: PDCD1-5097
ggacuggggagagggugggggagg

SEQ ID NO: 18486 - RNA, 18 nt, Artificial Sequence
  Synthetic oligonucleotide: PDCD1-5098
accugccagggacugagg

SEQ ID NO: 18487 - RNA, 19 nt, Artificial Sequence
  Synthetic oligonucleotide: PDCD1-5099
gaccugccagggacugagg

SEQ ID NO: 18488 - RNA, 20 nt, Artificial Sequence
  Synthetic oligonucleotide: PDCD1-1008
cgaccugccagggacugagg

SEQ ID NO: 18489 - RNA, 21 nt, Artificial Sequence
  Synthetic oligonucleotide: PDCD1-5100
ccgaccugccagggacugagg

SEQ ID NO: 18490 - RNA, 22 nt, Artificial Sequence
  Synthetic oligonucleotide: PDCD1-5101
cccgaccugccagggacugagg

SEQ ID NO: 18491 - RNA, 23 nt, Artificial Sequence
  Synthetic oligonucleotide: PDCD1-5102
ccccgaccugccagggacugagg

SEQ ID NO: 18492 - RNA, 24 nt, Artificial Sequence
  Synthetic oligonucleotide: PDCD1-5103
cccccgaccugccagggacugagg

SEQ ID NO: 18493 - RNA, 18 nt, Artificial Sequence
  Synthetic oligonucleotide: PDCD1-5104
gggggaggaggggugagg

SEQ ID NO: 18494 - RNA, 19 nt, Artificial Sequence
  Synthetic oligonucleotide: PDCD1-5105
ugggggaggaggggugagg

SEQ ID NO: 18495 - RNA, 20 nt, Artificial Sequence
  Synthetic oligonucleotide: PDCD1-2252
cugggggaggaggggugagg

SEQ ID NO: 18496 - RNA, 21 nt, Artificial Sequence
  Synthetic oligonucleotide: PDCD1-5106
gcugggggaggaggggugagg

SEQ ID NO: 18497 - RNA, 22 nt, Artificial Sequence
  Synthetic oligonucleotide: PDCD1-5107
ugcugggggaggaggggugagg

SEQ ID NO: 18498 - RNA, 23 nt, Artificial Sequence
  Synthetic oligonucleotide: PDCD1-5108
gugcugggggaggaggggugagg

SEQ ID NO: 18499 - RNA, 24 nt, Artificial Sequence
  Synthetic oligonucleotide: PDCD1-5109
agugcugggggaggaggggugagg

SEQ ID NO: 18500 - RNA, 18 nt, Artificial Sequence
  Synthetic oligonucleotide: PDCD1-5110
cgcagccccaaggaccgg

SEQ ID NO: 18501 - RNA, 19 nt, Artificial Sequence
  Synthetic oligonucleotide: PDCD1-5111
acgcagccccaaggaccgg

SEQ ID NO: 18502 - RNA, 20 nt, Artificial Sequence
  Synthetic oligonucleotide: PDCD1-959
cacgcagccccaaggaccgg

SEQ ID NO: 18503 - RNA, 18 nt, Artificial Sequence
  Synthetic oligonucleotide: PDCD1-5112
cccuccugaggcugccgg

SEQ ID NO: 18504 - RNA, 19 nt, Artificial Sequence
  Synthetic oligonucleotide: PDCD1-5113
ccccuccugaggcugccgg

SEQ ID NO: 18505 - RNA, 20 nt, Artificial Sequence
  Synthetic oligonucleotide: PDCD1-1090
gccccuccugaggcugccgg

SEQ ID NO: 18506 - RNA, 21 nt, Artificial Sequence
  Synthetic oligonucleotide: PDCD1-5114
ugccccuccugaggcugccgg

SEQ ID NO: 18507 - RNA, 22 nt, Artificial Sequence
  Synthetic oligonucleotide: PDCD1-5115
cugccccuccugaggcugccgg

SEQ ID NO: 18508 - RNA, 23 nt, Artificial Sequence
  Synthetic oligonucleotide: PDCD1-5116
gcugccccuccugaggcugccgg

SEQ ID NO: 18509 - RNA, 24 nt, Artificial Sequence
  Synthetic oligonucleotide: PDCD1-5117
agcugccccuccugaggcugccgg

SEQ ID NO: 18510 - RNA, 18 nt, Artificial Sequence
  Synthetic oligonucleotide: PDCD1-5118
ucaggcggaggugagcgg

SEQ ID NO: 18511 - RNA, 19 nt, Artificial Sequence
  Synthetic oligonucleotide: PDCD1-5119
cucaggcggaggugagcgg

SEQ ID NO: 18512 - RNA, 20 nt, Artificial Sequence
  Synthetic oligonucleotide: PDCD1-1024
gcucaggcggaggugagcgg

SEQ ID NO: 18513 - RNA, 21 nt, Artificial Sequence
  Synthetic oligonucleotide: PDCD1-5120
ugcucaggcggaggugagcgg

SEQ ID NO: 18514 - RNA, 22 nt, Artificial Sequence
  Synthetic oligonucleotide: PDCD1-5121
cugcucaggcggaggugagcgg

SEQ ID NO: 18515 - RNA, 23 nt, Artificial Sequence
  Synthetic oligonucleotide: PDCD1-5122
acugcucaggcggaggugagcgg

SEQ ID NO: 18516 - RNA, 24 nt, Artificial Sequence
  Synthetic oligonucleotide: PDCD1-5123
cacugcucaggcggaggugagcgg

SEQ ID NO: 18517 - RNA, 18 nt, Artificial Sequence
  Synthetic oligonucleotide: PDCD1-5124
aggggacuugggccaggg

SEQ ID NO: 18518 - RNA, 19 nt, Artificial Sequence
  Synthetic oligonucleotide: PDCD1-5125
gaggggacuugggccaggg

SEQ ID NO: 18519 - RNA, 20 nt, Artificial Sequence
  Synthetic oligonucleotide: PDCD1-976
agaggggacuugggccaggg

SEQ ID NO: 18520 - RNA, 21 nt, Artificial Sequence
  Synthetic oligonucleotide: PDCD1-5126
aagaggggacuugggccaggg

SEQ ID NO: 18521 - RNA, 22 nt, Artificial Sequence
  Synthetic oligonucleotide: PDCD1-5127
aaagaggggacuugggccaggg

SEQ ID NO: 18522 - RNA, 23 nt, Artificial Sequence
  Synthetic oligonucleotide: PDCD1-5128
caaagaggggacuugggccaggg

SEQ ID NO: 18523 - RNA, 24 nt, Artificial Sequence
  Synthetic oligonucleotide: PDCD1-5129
gcaaagaggggacuugggccaggg

SEQ ID NO: 18524 - RNA, 18 nt, Artificial Sequence
  Synthetic oligonucleotide: PDCD1-5130
guaggacuggggagaggg

SEQ ID NO: 18525 - RNA, 19 nt, Artificial Sequence
  Synthetic oligonucleotide: PDCD1-5131
gguaggacuggggagaggg

SEQ ID NO: 18526 - RNA, 20 nt, Artificial Sequence
  Synthetic oligonucleotide: PDCD1-2262
ggguaggacuggggagaggg

SEQ ID NO: 18527 - RNA, 21 nt, Artificial Sequence
  Synthetic oligonucleotide: PDCD1-5132
gggguaggacuggggagaggg

SEQ ID NO: 18528 - RNA, 22 nt, Artificial Sequence
  Synthetic oligonucleotide: PDCD1-5133
ggggguaggacuggggagaggg

SEQ ID NO: 18529 - RNA, 23 nt, Artificial Sequence
  Synthetic oligonucleotide: PDCD1-5134
aggggguaggacuggggagaggg

SEQ ID NO: 18530 - RNA, 24 nt, Artificial Sequence
  Synthetic oligonucleotide: PDCD1-5135
gaggggguaggacuggggagaggg

SEQ ID NO: 18531 - RNA, 18 nt, Artificial Sequence
  Synthetic oligonucleotide: PDCD1-5136
agugcugggggaggaggg

SEQ ID NO: 18532 - RNA, 19 nt, Artificial Sequence
  Synthetic oligonucleotide: PDCD1-5137
cagugcugggggaggaggg

SEQ ID NO: 18533 - RNA, 20 nt, Artificial Sequence
  Synthetic oligonucleotide: PDCD1-1045
gcagugcugggggaggaggg

SEQ ID NO: 18534 - RNA, 21 nt, Artificial Sequence
  Synthetic oligonucleotide: PDCD1-5138
ggcagugcugggggaggaggg

SEQ ID NO: 18535 - RNA, 22 nt, Artificial Sequence
  Synthetic oligonucleotide: PDCD1-5139
aggcagugcugggggaggaggg

SEQ ID NO: 18536 - RNA, 23 nt, Artificial Sequence
  Synthetic oligonucleotide: PDCD1-5140
gaggcagugcugggggaggaggg

SEQ ID NO: 18537 - RNA, 24 nt, Artificial Sequence
  Synthetic oligonucleotide: PDCD1-5141
agaggcagugcugggggaggaggg

SEQ ID NO: 18538 - RNA, 18 nt, Artificial Sequence
  Synthetic oligonucleotide: PDCD1-5142
ccugccagggacugaggg

SEQ ID NO: 18539 - RNA, 19 nt, Artificial Sequence
  Synthetic oligonucleotide: PDCD1-5143
accugccagggacugaggg

SEQ ID NO: 18540 - RNA, 20 nt, Artificial Sequence
  Synthetic oligonucleotide: PDCD1-2136
gaccugccagggacugaggg

SEQ ID NO: 18541 - RNA, 21 nt, Artificial Sequence
  Synthetic oligonucleotide: PDCD1-5144
cgaccugccagggacugaggg

SEQ ID NO: 18542 - RNA, 22 nt, Artificial Sequence
  Synthetic oligonucleotide: PDCD1-5145
ccgaccugccagggacugaggg

SEQ ID NO: 18543 - RNA, 23 nt, Artificial Sequence
  Synthetic oligonucleotide: PDCD1-5146
cccgaccugccagggacugaggg

SEQ ID NO: 18544 - RNA, 24 nt, Artificial Sequence
  Synthetic oligonucleotide: PDCD1-5147
ccccgaccugccagggacugaggg

SEQ ID NO: 18545 - RNA, 18 nt, Artificial Sequence
  Synthetic oligonucleotide: PDCD1-5148
ccugggcugcagugaggg

SEQ ID NO: 18546 - RNA, 19 nt, Artificial Sequence
  Synthetic oligonucleotide: PDCD1-5149
uccugggcugcagugaggg

SEQ ID NO: 18547 - RNA, 20 nt, Artificial Sequence
  Synthetic oligonucleotide: PDCD1-5150
uuccugggcugcagugaggg

SEQ ID NO: 18548 - RNA, 21 nt, Artificial Sequence
  Synthetic oligonucleotide: PDCD1-5151
guuccugggcugcagugaggg

SEQ ID NO: 18549 - RNA, 22 nt, Artificial Sequence
  Synthetic oligonucleotide: PDCD1-5152
gguuccugggcugcagugaggg

SEQ ID NO: 18550 - RNA, 23 nt, Artificial Sequence
  Synthetic oligonucleotide: PDCD1-5153
agguuccugggcugcagugaggg

SEQ ID NO: 18551 - RNA, 24 nt, Artificial Sequence
  Synthetic oligonucleotide: PDCD1-5154
cagguuccugggcugcagugaggg

SEQ ID NO: 18552 - RNA, 18 nt, Artificial Sequence
  Synthetic oligonucleotide: PDCD1-5155
ccuccugaggcugccggg

SEQ ID NO: 18553 - RNA, 19 nt, Artificial Sequence
  Synthetic oligonucleotide: PDCD1-5156
cccuccugaggcugccggg

SEQ ID NO: 18554 - RNA, 20 nt, Artificial Sequence
  Synthetic oligonucleotide: PDCD1-2289
ccccuccugaggcugccggg

SEQ ID NO: 18555 - RNA, 21 nt, Artificial Sequence
  Synthetic oligonucleotide: PDCD1-5157
gccccuccugaggcugccggg

SEQ ID NO: 18556 - RNA, 22 nt, Artificial Sequence
  Synthetic oligonucleotide: PDCD1-5158
ugccccuccugaggcugccggg

SEQ ID NO: 18557 - RNA, 23 nt, Artificial Sequence
  Synthetic oligonucleotide: PDCD1-5159
cugccccuccugaggcugccggg

SEQ ID NO: 18558 - RNA, 24 nt, Artificial Sequence
  Synthetic oligonucleotide: PDCD1-5160
gcugccccuccugaggcugccggg

SEQ ID NO: 18559 - RNA, 18 nt, Artificial Sequence
  Synthetic oligonucleotide: PDCD1-5161
acagcucaggguaagggg

SEQ ID NO: 18560 - RNA, 19 nt, Artificial Sequence
  Synthetic oligonucleotide: PDCD1-5162
cacagcucaggguaagggg

SEQ ID NO: 18561 - RNA, 20 nt, Artificial Sequence
  Synthetic oligonucleotide: PDCD1-990
acacagcucaggguaagggg

SEQ ID NO: 18562 - RNA, 21 nt, Artificial Sequence
  Synthetic oligonucleotide: PDCD1-5163
cacacagcucaggguaagggg

SEQ ID NO: 18563 - RNA, 22 nt, Artificial Sequence
  Synthetic oligonucleotide: PDCD1-5164
ccacacagcucaggguaagggg

SEQ ID NO: 18564 - RNA, 23 nt, Artificial Sequence
  Synthetic oligonucleotide: PDCD1-5165
gccacacagcucaggguaagggg

SEQ ID NO: 18565 - RNA, 24 nt, Artificial Sequence
  Synthetic oligonucleotide: PDCD1-5166
agccacacagcucaggguaagggg

SEQ ID NO: 18566 - RNA, 18 nt, Artificial Sequence
  Synthetic oligonucleotide: PDCD1-5167
ggaggggugaggaggggg

SEQ ID NO: 18567 - RNA, 19 nt, Artificial Sequence
  Synthetic oligonucleotide: PDCD1-5168
aggaggggugaggaggggg

SEQ ID NO: 18568 - RNA, 20 nt, Artificial Sequence
  Synthetic oligonucleotide: PDCD1-1051
gaggaggggugaggaggggg

SEQ ID NO: 18569 - RNA, 21 nt, Artificial Sequence
  Synthetic oligonucleotide: PDCD1-5169
ggaggaggggugaggaggggg

SEQ ID NO: 18570 - RNA, 22 nt, Artificial Sequence
  Synthetic oligonucleotide: PDCD1-5170
gggaggaggggugaggaggggg

SEQ ID NO: 18571 - RNA, 23 nt, Artificial Sequence
  Synthetic oligonucleotide: PDCD1-5171
ggggaggaggggugaggaggggg

SEQ ID NO: 18572 - RNA, 24 nt, Artificial Sequence
  Synthetic oligonucleotide: PDCD1-5172
gggggaggaggggugaggaggggg

SEQ ID NO: 18573 - RNA, 18 nt, Artificial Sequence
  Synthetic oligonucleotide: PDCD1-5173
cccccaucucccuggggg

SEQ ID NO: 18574 - RNA, 19 nt, Artificial Sequence
  Synthetic oligonucleotide: PDCD1-5174
ccccccaucucccuggggg

SEQ ID NO: 18575 - RNA, 20 nt, Artificial Sequence
  Synthetic oligonucleotide: PDCD1-1096
cccccccaucucccuggggg

SEQ ID NO: 18576 - RNA, 21 nt, Artificial Sequence
  Synthetic oligonucleotide: PDCD1-5175
ucccccccaucucccuggggg

SEQ ID NO: 18577 - RNA, 22 nt, Artificial Sequence
  Synthetic oligonucleotide: PDCD1-5176
aucccccccaucucccuggggg

SEQ ID NO: 18578 - RNA, 23 nt, Artificial Sequence
  Synthetic oligonucleotide: PDCD1-5177
caucccccccaucucccuggggg

SEQ ID NO: 18579 - RNA, 24 nt, Artificial Sequence
  Synthetic oligonucleotide: PDCD1-5178
ccaucccccccaucucccuggggg

SEQ ID NO: 18580 - RNA, 18 nt, Artificial Sequence
  Synthetic oligonucleotide: PDCD1-5179
cagaggcagugcuggggg

SEQ ID NO: 18581 - RNA, 19 nt, Artificial Sequence
  Synthetic oligonucleotide: PDCD1-5180
acagaggcagugcuggggg

SEQ ID NO: 18582 - RNA, 20 nt, Artificial Sequence
  Synthetic oligonucleotide: PDCD1-2247
gacagaggcagugcuggggg

SEQ ID NO: 18583 - RNA, 21 nt, Artificial Sequence
  Synthetic oligonucleotide: PDCD1-5181
ugacagaggcagugcuggggg

SEQ ID NO: 18584 - RNA, 22 nt, Artificial Sequence
  Synthetic oligonucleotide: PDCD1-5182
gugacagaggcagugcuggggg

SEQ ID NO: 18585 - RNA, 23 nt, Artificial Sequence
  Synthetic oligonucleotide: PDCD1-5183
agugacagaggcagugcuggggg

SEQ ID NO: 18586 - RNA, 24 nt, Artificial Sequence
  Synthetic oligonucleotide: PDCD1-5184
gagugacagaggcagugcuggggg

SEQ ID NO: 18587 - RNA, 18 nt, Artificial Sequence
  Synthetic oligonucleotide: PDCD1-5185
cuggggagaggguggggg

SEQ ID NO: 18588 - RNA, 19 nt, Artificial Sequence
  Synthetic oligonucleotide: PDCD1-5186
acuggggagaggguggggg

SEQ ID NO: 18589 - RNA, 20 nt, Artificial Sequence
  Synthetic oligonucleotide: PDCD1-2266
gacuggggagaggguggggg

SEQ ID NO: 18590 - RNA, 21 nt, Artificial Sequence
  Synthetic oligonucleotide: PDCD1-5187
ggacuggggagaggguggggg

SEQ ID NO: 18591 - RNA, 22 nt, Artificial Sequence
  Synthetic oligonucleotide: PDCD1-5188
aggacuggggagaggguggggg

SEQ ID NO: 18592 - RNA, 23 nt, Artificial Sequence
  Synthetic oligonucleotide: PDCD1-5189
uaggacuggggagaggguggggg

SEQ ID NO: 18593 - RNA, 24 nt, Artificial Sequence
  Synthetic oligonucleotide: PDCD1-5190
guaggacuggggagaggguggggg

SEQ ID NO: 18594 - RNA, 18 nt, Artificial Sequence
  Synthetic oligonucleotide: PDCD1-5191
gagacagaggagaugggg

SEQ ID NO: 18595 - RNA, 19 nt, Artificial Sequence
  Synthetic oligonucleotide: PDCD1-5192
ggagacagaggagaugggg

SEQ ID NO: 18596 - RNA, 20 nt, Artificial Sequence
  Synthetic oligonucleotide: PDCD1-2274
gggagacagaggagaugggg

SEQ ID NO: 18597 - RNA, 21 nt, Artificial Sequence
  Synthetic oligonucleotide: PDCD1-5193
agggagacagaggagaugggg

SEQ ID NO: 18598 - RNA, 22 nt, Artificial Sequence
  Synthetic oligonucleotide: PDCD1-5194
cagggagacagaggagaugggg

SEQ ID NO: 18599 - RNA, 23 nt, Artificial Sequence
  Synthetic oligonucleotide: PDCD1-5195
acagggagacagaggagaugggg

SEQ ID NO: 18600 - RNA, 24 nt, Artificial Sequence
  Synthetic oligonucleotide: PDCD1-5196
gacagggagacagaggagaugggg

SEQ ID NO: 18601 - RNA, 18 nt, Artificial Sequence
  Synthetic oligonucleotide: PDCD1-5197
acagaggcagugcugggg

SEQ ID NO: 18602 - RNA, 19 nt, Artificial Sequence
  Synthetic oligonucleotide: PDCD1-5198
gacagaggcagugcugggg

SEQ ID NO: 18603 - RNA, 20 nt, Artificial Sequence
  Synthetic oligonucleotide: PDCD1-1041
ugacagaggcagugcugggg

SEQ ID NO: 18604 - RNA, 21 nt, Artificial Sequence
  Synthetic oligonucleotide: PDCD1-5199
gugacagaggcagugcugggg

SEQ ID NO: 18605 - RNA, 22 nt, Artificial Sequence
  Synthetic oligonucleotide: PDCD1-5200
agugacagaggcagugcugggg

SEQ ID NO: 18606 - RNA, 23 nt, Artificial Sequence
  Synthetic oligonucleotide: PDCD1-5201
gagugacagaggcagugcugggg

SEQ ID NO: 18607 - RNA, 24 nt, Artificial Sequence
  Synthetic oligonucleotide: PDCD1-5202
agagugacagaggcagugcugggg

SEQ ID NO: 18608 - RNA, 18 nt, Artificial Sequence
  Synthetic oligonucleotide: PDCD1-5203
acuggggagagggugggg

SEQ ID NO: 18609 - RNA, 19 nt, Artificial Sequence
  Synthetic oligonucleotide: PDCD1-5204
gacuggggagagggugggg

SEQ ID NO: 18610 - RNA, 20 nt, Artificial Sequence
  Synthetic oligonucleotide: PDCD1-1063
ggacuggggagagggugggg

SEQ ID NO: 18611 - RNA, 21 nt, Artificial Sequence
  Synthetic oligonucleotide: PDCD1-5205
aggacuggggagagggugggg

SEQ ID NO: 18612 - RNA, 22 nt, Artificial Sequence
  Synthetic oligonucleotide: PDCD1-5206
uaggacuggggagagggugggg

SEQ ID NO: 18613 - RNA, 23 nt, Artificial Sequence
  Synthetic oligonucleotide: PDCD1-5207
guaggacuggggagagggugggg

SEQ ID NO: 18614 - RNA, 24 nt, Artificial Sequence
  Synthetic oligonucleotide: PDCD1-5208
gguaggacuggggagagggugggg

SEQ ID NO: 18615 - RNA, 18 nt, Artificial Sequence
  Synthetic oligonucleotide: PDCD1-5209
ggagacagaggagauggg

SEQ ID NO: 18616 - RNA, 19 nt, Artificial Sequence
  Synthetic oligonucleotide: PDCD1-5210
gggagacagaggagauggg

SEQ ID NO: 18617 - RNA, 20 nt, Artificial Sequence
  Synthetic oligonucleotide: PDCD1-1080
agggagacagaggagauggg

SEQ ID NO: 18618 - RNA, 21 nt, Artificial Sequence
  Synthetic oligonucleotide: PDCD1-5211
cagggagacagaggagauggg

SEQ ID NO: 18619 - RNA, 22 nt, Artificial Sequence
  Synthetic oligonucleotide: PDCD1-5212
acagggagacagaggagauggg

SEQ ID NO: 18620 - RNA, 23 nt, Artificial Sequence
  Synthetic oligonucleotide: PDCD1-5213
gacagggagacagaggagauggg

SEQ ID NO: 18621 - RNA, 24 nt, Artificial Sequence
  Synthetic oligonucleotide: PDCD1-5214
agacagggagacagaggagauggg

SEQ ID NO: 18622 - RNA, 18 nt, Artificial Sequence
  Synthetic oligonucleotide: PDCD1-5215
ggaggggguaggacuggg

SEQ ID NO: 18623 - RNA, 19 nt, Artificial Sequence
  Synthetic oligonucleotide: PDCD1-5216
aggaggggguaggacuggg

SEQ ID NO: 18624 - RNA, 20 nt, Artificial Sequence
  Synthetic oligonucleotide: PDCD1-1056
gaggaggggguaggacuggg

SEQ ID NO: 18625 - RNA, 21 nt, Artificial Sequence
  Synthetic oligonucleotide: PDCD1-5217
ugaggaggggguaggacuggg

SEQ ID NO: 18626 - RNA, 22 nt, Artificial Sequence
  Synthetic oligonucleotide: PDCD1-5218
gugaggaggggguaggacuggg

SEQ ID NO: 18627 - RNA, 23 nt, Artificial Sequence
  Synthetic oligonucleotide: PDCD1-5219
ggugaggaggggguaggacuggg

SEQ ID NO: 18628 - RNA, 24 nt, Artificial Sequence
  Synthetic oligonucleotide: PDCD1-5220
gggugaggaggggguaggacuggg

SEQ ID NO: 18629 - RNA, 18 nt, Artificial Sequence
  Synthetic oligonucleotide: PDCD1-5221
ugacagaggcagugcugg

SEQ ID NO: 18630 - RNA, 19 nt, Artificial Sequence
  Synthetic oligonucleotide: PDCD1-5222
gugacagaggcagugcugg

SEQ ID NO: 18631 - RNA, 20 nt, Artificial Sequence
  Synthetic oligonucleotide: PDCD1-2246
agugacagaggcagugcugg

SEQ ID NO: 18632 - RNA, 21 nt, Artificial Sequence
  Synthetic oligonucleotide: PDCD1-5223
gagugacagaggcagugcugg

SEQ ID NO: 18633 - RNA, 22 nt, Artificial Sequence
  Synthetic oligonucleotide: PDCD1-5224
agagugacagaggcagugcugg

SEQ ID NO: 18634 - RNA, 23 nt, Artificial Sequence
  Synthetic oligonucleotide: PDCD1-5225
gagagugacagaggcagugcugg

SEQ ID NO: 18635 - RNA, 24 nt, Artificial Sequence
  Synthetic oligonucleotide: PDCD1-5226
cgagagugacagaggcagugcugg

SEQ ID NO: 18636 - RNA, 18 nt, Artificial Sequence
  Synthetic oligonucleotide: PDCD1-5227
uccuccacauccacgugg

SEQ ID NO: 18637 - RNA, 19 nt, Artificial Sequence
  Synthetic oligonucleotide: PDCD1-5228
uuccuccacauccacgugg

SEQ ID NO: 18638 - RNA, 20 nt, Artificial Sequence
  Synthetic oligonucleotide: PDCD1-1033
cuuccuccacauccacgugg

SEQ ID NO: 18639 - RNA, 21 nt, Artificial Sequence
  Synthetic oligonucleotide: PDCD1-5229
ucuuccuccacauccacgugg

SEQ ID NO: 18640 - RNA, 22 nt, Artificial Sequence
  Synthetic oligonucleotide: PDCD1-5230
cucuuccuccacauccacgugg

SEQ ID NO: 18641 - RNA, 23 nt, Artificial Sequence
  Synthetic oligonucleotide: PDCD1-5231
ccucuuccuccacauccacgugg

SEQ ID NO: 18642 - RNA, 24 nt, Artificial Sequence
  Synthetic oligonucleotide: PDCD1-5232
cccucuuccuccacauccacgugg

SEQ ID NO: 18643 - RNA, 18 nt, Artificial Sequence
  Synthetic oligonucleotide: PDCD1-5233
ggacuggggagagggugg

SEQ ID NO: 18644 - RNA, 19 nt, Artificial Sequence
  Synthetic oligonucleotide: PDCD1-5234
aggacuggggagagggugg

SEQ ID NO: 18645 - RNA, 20 nt, Artificial Sequence
  Synthetic oligonucleotide: PDCD1-2265
uaggacuggggagagggugg

SEQ ID NO: 18646 - RNA, 21 nt, Artificial Sequence
  Synthetic oligonucleotide: PDCD1-5235
guaggacuggggagagggugg

SEQ ID NO: 18647 - RNA, 22 nt, Artificial Sequence
  Synthetic oligonucleotide: PDCD1-5236
gguaggacuggggagagggugg

SEQ ID NO: 18648 - RNA, 23 nt, Artificial Sequence
  Synthetic oligonucleotide: PDCD1-5237
ggguaggacuggggagagggugg

SEQ ID NO: 18649 - RNA, 24 nt, Artificial Sequence
  Synthetic oligonucleotide: PDCD1-5238
gggguaggacuggggagagggugg

SEQ ID NO: 18650 - RNA, 18 nt, Artificial Sequence
  Synthetic oligonucleotide: PDCD1-5239
agggagacagaggagaug

SEQ ID NO: 18651 - RNA, 19 nt, Artificial Sequence
  Synthetic oligonucleotide: PDCD1-5240
cagggagacagaggagaug

SEQ ID NO: 18652 - RNA, 20 nt, Artificial Sequence
  Synthetic oligonucleotide: PDCD1-2273
acagggagacagaggagaug

SEQ ID NO: 18653 - RNA, 21 nt, Artificial Sequence
  Synthetic oligonucleotide: PDCD1-5241
gacagggagacagaggagaug

SEQ ID NO: 18654 - RNA, 22 nt, Artificial Sequence
  Synthetic oligonucleotide: PDCD1-5242
agacagggagacagaggagaug

SEQ ID NO: 18655 - RNA, 23 nt, Artificial Sequence
  Synthetic oligonucleotide: PDCD1-5243
gagacagggagacagaggagaug

SEQ ID NO: 18656 - RNA, 24 nt, Artificial Sequence
  Synthetic oligonucleotide: PDCD1-5244
agagacagggagacagaggagaug

SEQ ID NO: 18657 - RNA, 18 nt, Artificial Sequence
  Synthetic oligonucleotide: PDCD1-5245
gaggaggggguaggacug

SEQ ID NO: 18658 - RNA, 19 nt, Artificial Sequence
  Synthetic oligonucleotide: PDCD1-5246
ugaggaggggguaggacug

SEQ ID NO: 18659 - RNA, 20 nt, Artificial Sequence
  Synthetic oligonucleotide: PDCD1-2259
gugaggaggggguaggacug

SEQ ID NO: 18660 - RNA, 21 nt, Artificial Sequence
  Synthetic oligonucleotide: PDCD1-5247
ggugaggaggggguaggacug

SEQ ID NO: 18661 - RNA, 22 nt, Artificial Sequence
  Synthetic oligonucleotide: PDCD1-5248
gggugaggaggggguaggacug

SEQ ID NO: 18662 - RNA, 23 nt, Artificial Sequence
  Synthetic oligonucleotide: PDCD1-5249
ggggugaggaggggguaggacug

SEQ ID NO: 18663 - RNA, 24 nt, Artificial Sequence
  Synthetic oligonucleotide: PDCD1-5250
aggggugaggaggggguaggacug

SEQ ID NO: 18664 - RNA, 18 nt, Artificial Sequence
  Synthetic oligonucleotide: PDCD1-5251
gccgggccucccugccug

SEQ ID NO: 18665 - RNA, 19 nt, Artificial Sequence
  Synthetic oligonucleotide: PDCD1-5252
ggccgggccucccugccug

SEQ ID NO: 18666 - RNA, 20 nt, Artificial Sequence
  Synthetic oligonucleotide: PDCD1-2302
gggccgggccucccugccug

SEQ ID NO: 18667 - RNA, 21 nt, Artificial Sequence
  Synthetic oligonucleotide: PDCD1-5253
ggggccgggccucccugccug

SEQ ID NO: 18668 - RNA, 22 nt, Artificial Sequence
  Synthetic oligonucleotide: PDCD1-5254
gggggccgggccucccugccug

SEQ ID NO: 18669 - RNA, 23 nt, Artificial Sequence
  Synthetic oligonucleotide: PDCD1-5255
ugggggccgggccucccugccug

SEQ ID NO: 18670 - RNA, 24 nt, Artificial Sequence
  Synthetic oligonucleotide: PDCD1-5256
cugggggccgggccucccugccug

SEQ ID NO: 18671 - RNA, 18 nt, Artificial Sequence
  Synthetic oligonucleotide: PDCD1-5257
gugacagaggcagugcug

SEQ ID NO: 18672 - RNA, 19 nt, Artificial Sequence
  Synthetic oligonucleotide: PDCD1-5258
agugacagaggcagugcug

SEQ ID NO: 18673 - RNA, 20 nt, Artificial Sequence
  Synthetic oligonucleotide: PDCD1-2245
gagugacagaggcagugcug

SEQ ID NO: 18674 - RNA, 21 nt, Artificial Sequence
  Synthetic oligonucleotide: PDCD1-5259
agagugacagaggcagugcug

SEQ ID NO: 18675 - RNA, 22 nt, Artificial Sequence
  Synthetic oligonucleotide: PDCD1-5260
gagagugacagaggcagugcug

SEQ ID NO: 18676 - RNA, 23 nt, Artificial Sequence
  Synthetic oligonucleotide: PDCD1-5261
cgagagugacagaggcagugcug

SEQ ID NO: 18677 - RNA, 24 nt, Artificial Sequence
  Synthetic oligonucleotide: PDCD1-5262
gcgagagugacagaggcagugcug

SEQ ID NO: 18678 - RNA, 18 nt, Artificial Sequence
  Synthetic oligonucleotide: PDCD1-5263
aaccccacucccauucug

SEQ ID NO: 18679 - RNA, 19 nt, Artificial Sequence
  Synthetic oligonucleotide: PDCD1-5264
caaccccacucccauucug

SEQ ID NO: 18680 - RNA, 20 nt, Artificial Sequence
  Synthetic oligonucleotide: PDCD1-1715
ucaaccccacucccauucug

SEQ ID NO: 18681 - RNA, 21 nt, Artificial Sequence
  Synthetic oligonucleotide: PDCD1-5265
cucaaccccacucccauucug

SEQ ID NO: 18682 - RNA, 22 nt, Artificial Sequence
  Synthetic oligonucleotide: PDCD1-5266
gcucaaccccacucccauucug

SEQ ID NO: 18683 - RNA, 23 nt, Artificial Sequence
  Synthetic oligonucleotide: PDCD1-5267
ggcucaaccccacucccauucug

SEQ ID NO: 18684 - RNA, 24 nt, Artificial Sequence
  Synthetic oligonucleotide: PDCD1-5268
gggcucaaccccacucccauucug

SEQ ID NO: 18685 - RNA, 18 nt, Artificial Sequence
  Synthetic oligonucleotide: PDCD1-5269
agagugacagaggcagug

SEQ ID NO: 18686 - RNA, 19 nt, Artificial Sequence
  Synthetic oligonucleotide: PDCD1-5270
gagagugacagaggcagug

SEQ ID NO: 18687 - RNA, 20 nt, Artificial Sequence
  Synthetic oligonucleotide: PDCD1-1036
cgagagugacagaggcagug

SEQ ID NO: 18688 - RNA, 21 nt, Artificial Sequence
  Synthetic oligonucleotide: PDCD1-5271
gcgagagugacagaggcagug

SEQ ID NO: 18689 - RNA, 22 nt, Artificial Sequence
  Synthetic oligonucleotide: PDCD1-5272
ggcgagagugacagaggcagug

SEQ ID NO: 18690 - RNA, 23 nt, Artificial Sequence
  Synthetic oligonucleotide: PDCD1-5273
gggcgagagugacagaggcagug

SEQ ID NO: 18691 - RNA, 24 nt, Artificial Sequence
  Synthetic oligonucleotide: PDCD1-5274
ugggcgagagugacagaggcagug

SEQ ID NO: 18692 - RNA, 18 nt, Artificial Sequence
  Synthetic oligonucleotide: PDCD1-5275
aggacuggggagagggug

SEQ ID NO: 18693 - RNA, 19 nt, Artificial Sequence
  Synthetic oligonucleotide: PDCD1-5276
uaggacuggggagagggug

SEQ ID NO: 18694 - RNA, 20 nt, Artificial Sequence
  Synthetic oligonucleotide: PDCD1-2264
guaggacuggggagagggug

SEQ ID NO: 18695 - RNA, 21 nt, Artificial Sequence
  Synthetic oligonucleotide: PDCD1-5277
gguaggacuggggagagggug

SEQ ID NO: 18696 - RNA, 22 nt, Artificial Sequence
  Synthetic oligonucleotide: PDCD1-5278
ggguaggacuggggagagggug

SEQ ID NO: 18697 - RNA, 23 nt, Artificial Sequence
  Synthetic oligonucleotide: PDCD1-5279
gggguaggacuggggagagggug

SEQ ID NO: 18698 - RNA, 24 nt, Artificial Sequence
  Synthetic oligonucleotide: PDCD1-5280
ggggguaggacuggggagagggug

SEQ ID NO: 18699 - RNA, 18 nt, Artificial Sequence
  Synthetic oligonucleotide: PDCD1-5281
gcugggggaggaggggug

SEQ ID NO: 18700 - RNA, 19 nt, Artificial Sequence
  Synthetic oligonucleotide: PDCD1-5282
ugcugggggaggaggggug

SEQ ID NO: 18701 - RNA, 20 nt, Artificial Sequence
  Synthetic oligonucleotide: PDCD1-2251
gugcugggggaggaggggug

SEQ ID NO: 18702 - RNA, 21 nt, Artificial Sequence
  Synthetic oligonucleotide: PDCD1-5283
agugcugggggaggaggggug

SEQ ID NO: 18703 - RNA, 22 nt, Artificial Sequence
  Synthetic oligonucleotide: PDCD1-5284
cagugcugggggaggaggggug

SEQ ID NO: 18704 - RNA, 23 nt, Artificial Sequence
  Synthetic oligonucleotide: PDCD1-5285
gcagugcugggggaggaggggug

SEQ ID NO: 18705 - RNA, 24 nt, Artificial Sequence
  Synthetic oligonucleotide: PDCD1-5286
ggcagugcugggggaggaggggug

SEQ ID NO: 18706 - RNA, 18 nt, Artificial Sequence
  Synthetic oligonucleotide: PDCD1-5287
cugucccaggucagguug

SEQ ID NO: 18707 - RNA, 19 nt, Artificial Sequence
  Synthetic oligonucleotide: PDCD1-5288
acugucccaggucagguug

SEQ ID NO: 18708 - RNA, 20 nt, Artificial Sequence
  Synthetic oligonucleotide: PDCD1-1028
aacugucccaggucagguug

SEQ ID NO: 18709 - RNA, 21 nt, Artificial Sequence
  Synthetic oligonucleotide: PDCD1-5289
aaacugucccaggucagguug

SEQ ID NO: 18710 - RNA, 22 nt, Artificial Sequence
  Synthetic oligonucleotide: PDCD1-5290
gaaacugucccaggucagguug

SEQ ID NO: 18711 - RNA, 23 nt, Artificial Sequence
  Synthetic oligonucleotide: PDCD1-5291
ggaaacugucccaggucagguug

SEQ ID NO: 18712 - RNA, 24 nt, Artificial Sequence
  Synthetic oligonucleotide: PDCD1-5292
gggaaacugucccaggucagguug

SEQ ID NO: 18713 - RNA, 18 nt, Artificial Sequence
  Synthetic oligonucleotide: PDCD1-5293
cagggagacagaggagau

SEQ ID NO: 18714 - RNA, 19 nt, Artificial Sequence
  Synthetic oligonucleotide: PDCD1-5294
acagggagacagaggagau

SEQ ID NO: 18715 - RNA, 20 nt, Artificial Sequence
  Synthetic oligonucleotide: PDCD1-2272
gacagggagacagaggagau

SEQ ID NO: 18716 - RNA, 21 nt, Artificial Sequence
  Synthetic oligonucleotide: PDCD1-5295
agacagggagacagaggagau

SEQ ID NO: 18717 - RNA, 22 nt, Artificial Sequence
  Synthetic oligonucleotide: PDCD1-5296
gagacagggagacagaggagau

SEQ ID NO: 18718 - RNA, 23 nt, Artificial Sequence
  Synthetic oligonucleotide: PDCD1-5297
agagacagggagacagaggagau

SEQ ID NO: 18719 - RNA, 24 nt, Artificial Sequence
  Synthetic oligonucleotide: PDCD1-5298
cagagacagggagacagaggagau

SEQ ID NO: 18720 - RNA, 18 nt, Artificial Sequence
  Synthetic oligonucleotide: PDCD1-5299
ugaggaggggguaggacu

SEQ ID NO: 18721 - RNA, 19 nt, Artificial Sequence
  Synthetic oligonucleotide: PDCD1-5300
gugaggaggggguaggacu

SEQ ID NO: 18722 - RNA, 20 nt, Artificial Sequence
  Synthetic oligonucleotide: PDCD1-2258
ggugaggaggggguaggacu

SEQ ID NO: 18723 - RNA, 21 nt, Artificial Sequence
  Synthetic oligonucleotide: PDCD1-5301
gggugaggaggggguaggacu

SEQ ID NO: 18724 - RNA, 22 nt, Artificial Sequence
  Synthetic oligonucleotide: PDCD1-5302
ggggugaggaggggguaggacu

SEQ ID NO: 18725 - RNA, 23 nt, Artificial Sequence
  Synthetic oligonucleotide: PDCD1-5303
aggggugaggaggggguaggacu

SEQ ID NO: 18726 - RNA, 24 nt, Artificial Sequence
  Synthetic oligonucleotide: PDCD1-5304
gaggggugaggaggggguaggacu

SEQ ID NO: 18727 - RNA, 18 nt, Artificial Sequence
  Synthetic oligonucleotide: PDCD1-3500
cgccgaccccaccuaccu

SEQ ID NO: 18728 - RNA, 19 nt, Artificial Sequence
  Synthetic oligonucleotide: PDCD1-3501
ccgccgaccccaccuaccu

SEQ ID NO: 18729 - RNA, 20 nt, Artificial Sequence
  Synthetic oligonucleotide: PDCD1-593
accgccgaccccaccuaccu

SEQ ID NO: 18730 - RNA, 21 nt, Artificial Sequence
  Synthetic oligonucleotide: PDCD1-3502
gaccgccgaccccaccuaccu

SEQ ID NO: 18731 - RNA, 22 nt, Artificial Sequence
  Synthetic oligonucleotide: PDCD1-3503
ugaccgccgaccccaccuaccu

SEQ ID NO: 18732 - RNA, 23 nt, Artificial Sequence
  Synthetic oligonucleotide: PDCD1-3504
cugaccgccgaccccaccuaccu

SEQ ID NO: 18733 - RNA, 24 nt, Artificial Sequence
  Synthetic oligonucleotide: PDCD1-3505
ccugaccgccgaccccaccuaccu

SEQ ID NO: 18734 - RNA, 18 nt, Artificial Sequence
  Synthetic oligonucleotide: PDCD1-5305
gaagguggguggcccccu

SEQ ID NO: 18735 - RNA, 19 nt, Artificial Sequence
  Synthetic oligonucleotide: PDCD1-5306
ggaagguggguggcccccu

SEQ ID NO: 18736 - RNA, 20 nt, Artificial Sequence
  Synthetic oligonucleotide: PDCD1-1102
gggaagguggguggcccccu

SEQ ID NO: 18737 - RNA, 21 nt, Artificial Sequence
  Synthetic oligonucleotide: PDCD1-5307
ggggaagguggguggcccccu

SEQ ID NO: 18738 - RNA, 22 nt, Artificial Sequence
  Synthetic oligonucleotide: PDCD1-5308
uggggaagguggguggcccccu

SEQ ID NO: 18739 - RNA, 23 nt, Artificial Sequence
  Synthetic oligonucleotide: PDCD1-5309
cuggggaagguggguggcccccu

SEQ ID NO: 18740 - RNA, 24 nt, Artificial Sequence
  Synthetic oligonucleotide: PDCD1-5310
ccuggggaagguggguggcccccu

SEQ ID NO: 18741 - RNA, 18 nt, Artificial Sequence
  Synthetic oligonucleotide: PDCD1-5311
caucccccccaucucccu

SEQ ID NO: 18742 - RNA, 19 nt, Artificial Sequence
  Synthetic oligonucleotide: PDCD1-5312
ccaucccccccaucucccu

SEQ ID NO: 18743 - RNA, 20 nt, Artificial Sequence
  Synthetic oligonucleotide: PDCD1-2295
cccaucccccccaucucccu

SEQ ID NO: 18744 - RNA, 21 nt, Artificial Sequence
  Synthetic oligonucleotide: PDCD1-5313
ccccaucccccccaucucccu

SEQ ID NO: 18745 - RNA, 22 nt, Artificial Sequence
  Synthetic oligonucleotide: PDCD1-5314
cccccaucccccccaucucccu

SEQ ID NO: 18746 - RNA, 23 nt, Artificial Sequence
  Synthetic oligonucleotide: PDCD1-5315
ucccccaucccccccaucucccu

SEQ ID NO: 18747 - RNA, 24 nt, Artificial Sequence
  Synthetic oligonucleotide: PDCD1-5316
cucccccaucccccccaucucccu

SEQ ID NO: 18748 - RNA, 18 nt, Artificial Sequence
  Synthetic oligonucleotide: PDCD1-5317
cccauucugucggagccu

SEQ ID NO: 18749 - RNA, 19 nt, Artificial Sequence
  Synthetic oligonucleotide: PDCD1-5318
ucccauucugucggagccu

SEQ ID NO: 18750 - RNA, 20 nt, Artificial Sequence
  Synthetic oligonucleotide: PDCD1-1717
cucccauucugucggagccu

SEQ ID NO: 18751 - RNA, 21 nt, Artificial Sequence
  Synthetic oligonucleotide: PDCD1-5319
acucccauucugucggagccu

SEQ ID NO: 18752 - RNA, 22 nt, Artificial Sequence
  Synthetic oligonucleotide: PDCD1-5320
cacucccauucugucggagccu

SEQ ID NO: 18753 - RNA, 23 nt, Artificial Sequence
  Synthetic oligonucleotide: PDCD1-5321
ccacucccauucugucggagccu

SEQ ID NO: 18754 - RNA, 24 nt, Artificial Sequence
  Synthetic oligonucleotide: PDCD1-5322
cccacucccauucugucggagccu

SEQ ID NO: 18755 - RNA, 18 nt, Artificial Sequence
  Synthetic oligonucleotide: PDCD1-3506
cgacuggccagggcgccu

SEQ ID NO: 18756 - RNA, 19 nt, Artificial Sequence
  Synthetic oligonucleotide: PDCD1-3507
acgacuggccagggcgccu

SEQ ID NO: 18757 - RNA, 20 nt, Artificial Sequence
  Synthetic oligonucleotide: PDCD1-591
gacgacuggccagggcgccu

SEQ ID NO: 18758 - RNA, 21 nt, Artificial Sequence
  Synthetic oligonucleotide: PDCD1-3508
agacgacuggccagggcgccu

SEQ ID NO: 18759 - RNA, 22 nt, Artificial Sequence
  Synthetic oligonucleotide: PDCD1-3509
cagacgacuggccagggcgccu

SEQ ID NO: 18760 - RNA, 23 nt, Artificial Sequence
  Synthetic oligonucleotide: PDCD1-3510
ccagacgacuggccagggcgccu

SEQ ID NO: 18761 - RNA, 24 nt, Artificial Sequence
  Synthetic oligonucleotide: PDCD1-3511
cccagacgacuggccagggcgccu

SEQ ID NO: 18762 - RNA, 18 nt, Artificial Sequence
  Synthetic oligonucleotide: PDCD1-5323
ggccgggccucccugccu

SEQ ID NO: 18763 - RNA, 19 nt, Artificial Sequence
  Synthetic oligonucleotide: PDCD1-5324
gggccgggccucccugccu

SEQ ID NO: 18764 - RNA, 20 nt, Artificial Sequence
  Synthetic oligonucleotide: PDCD1-2301
ggggccgggccucccugccu

SEQ ID NO: 18765 - RNA, 21 nt, Artificial Sequence
  Synthetic oligonucleotide: PDCD1-5325
gggggccgggccucccugccu

SEQ ID NO: 18766 - RNA, 22 nt, Artificial Sequence
  Synthetic oligonucleotide: PDCD1-5326
ugggggccgggccucccugccu

SEQ ID NO: 18767 - RNA, 23 nt, Artificial Sequence
  Synthetic oligonucleotide: PDCD1-5327
cugggggccgggccucccugccu

SEQ ID NO: 18768 - RNA, 24 nt, Artificial Sequence
  Synthetic oligonucleotide: PDCD1-5328
ccugggggccgggccucccugccu

SEQ ID NO: 18769 - RNA, 18 nt, Artificial Sequence
  Synthetic oligonucleotide: PDCD1-5329
gugggggucuccccagcu

SEQ ID NO: 18770 - RNA, 19 nt, Artificial Sequence
  Synthetic oligonucleotide: PDCD1-5330
cgugggggucuccccagcu

SEQ ID NO: 18771 - RNA, 20 nt, Artificial Sequence
  Synthetic oligonucleotide: PDCD1-1086
ccgugggggucuccccagcu

SEQ ID NO: 18772 - RNA, 21 nt, Artificial Sequence
  Synthetic oligonucleotide: PDCD1-5331
cccgugggggucuccccagcu

SEQ ID NO: 18773 - RNA, 22 nt, Artificial Sequence
  Synthetic oligonucleotide: PDCD1-5332
ccccgugggggucuccccagcu

SEQ ID NO: 18774 - RNA, 23 nt, Artificial Sequence
  Synthetic oligonucleotide: PDCD1-5333
accccgugggggucuccccagcu

SEQ ID NO: 18775 - RNA, 24 nt, Artificial Sequence
  Synthetic oligonucleotide: PDCD1-5334
uaccccgugggggucuccccagcu

SEQ ID NO: 18776 - RNA, 18 nt, Artificial Sequence
  Synthetic oligonucleotide: PDCD1-5335
aggguaaggggcagagcu

SEQ ID NO: 18777 - RNA, 19 nt, Artificial Sequence
  Synthetic oligonucleotide: PDCD1-5336
caggguaaggggcagagcu

SEQ ID NO: 18778 - RNA, 20 nt, Artificial Sequence
  Synthetic oligonucleotide: PDCD1-2116
ucaggguaaggggcagagcu

SEQ ID NO: 18779 - RNA, 21 nt, Artificial Sequence
  Synthetic oligonucleotide: PDCD1-5337
cucaggguaaggggcagagcu

SEQ ID NO: 18780 - RNA, 22 nt, Artificial Sequence
  Synthetic oligonucleotide: PDCD1-5338
gcucaggguaaggggcagagcu

SEQ ID NO: 18781 - RNA, 23 nt, Artificial Sequence
  Synthetic oligonucleotide: PDCD1-5339
agcucaggguaaggggcagagcu

SEQ ID NO: 18782 - RNA, 24 nt, Artificial Sequence
  Synthetic oligonucleotide: PDCD1-5340
cagcucaggguaaggggcagagcu

SEQ ID NO: 18783 - RNA, 18 nt, Artificial Sequence
  Synthetic oligonucleotide: PDCD1-5341
cccuccagaccccucgcu

SEQ ID NO: 18784 - RNA, 19 nt, Artificial Sequence
  Synthetic oligonucleotide: PDCD1-5342
ucccuccagaccccucgcu

SEQ ID NO: 18785 - RNA, 20 nt, Artificial Sequence
  Synthetic oligonucleotide: PDCD1-1000
gucccuccagaccccucgcu

SEQ ID NO: 18786 - RNA, 21 nt, Artificial Sequence
  Synthetic oligonucleotide: PDCD1-5343
ggucccuccagaccccucgcu

SEQ ID NO: 18787 - RNA, 22 nt, Artificial Sequence
  Synthetic oligonucleotide: PDCD1-5344
aggucccuccagaccccucgcu

SEQ ID NO: 18788 - RNA, 23 nt, Artificial Sequence
  Synthetic oligonucleotide: PDCD1-5345
aaggucccuccagaccccucgcu

SEQ ID NO: 18789 - RNA, 24 nt, Artificial Sequence
  Synthetic oligonucleotide: PDCD1-5346
aaaggucccuccagaccccucgcu

SEQ ID NO: 18790 - RNA, 18 nt, Artificial Sequence
  Synthetic oligonucleotide: PDCD1-5347
cagccccaaggaccggcu

SEQ ID NO: 18791 - RNA, 19 nt, Artificial Sequence
  Synthetic oligonucleotide: PDCD1-5348
gcagccccaaggaccggcu

SEQ ID NO: 18792 - RNA, 20 nt, Artificial Sequence
  Synthetic oligonucleotide: PDCD1-960
cgcagccccaaggaccggcu

SEQ ID NO: 18793 - RNA, 18 nt, Artificial Sequence
  Synthetic oligonucleotide: PDCD1-5349
cccuccagaccccuggcu

SEQ ID NO: 18794 - RNA, 19 nt, Artificial Sequence
  Synthetic oligonucleotide: PDCD1-5350
ucccuccagaccccuggcu

SEQ ID NO: 18795 - RNA, 20 nt, Artificial Sequence
  Synthetic oligonucleotide: PDCD1-1010
gucccuccagaccccuggcu

SEQ ID NO: 18796 - RNA, 21 nt, Artificial Sequence
  Synthetic oligonucleotide: PDCD1-5351
ggucccuccagaccccuggcu

SEQ ID NO: 18797 - RNA, 22 nt, Artificial Sequence
  Synthetic oligonucleotide: PDCD1-5352
aggucccuccagaccccuggcu

SEQ ID NO: 18798 - RNA, 23 nt, Artificial Sequence
  Synthetic oligonucleotide: PDCD1-5353
aaggucccuccagaccccuggcu

SEQ ID NO: 18799 - RNA, 24 nt, Artificial Sequence
  Synthetic oligonucleotide: PDCD1-5354
gaaggucccuccagaccccuggcu

SEQ ID NO: 18800 - RNA, 18 nt, Artificial Sequence
  Synthetic oligonucleotide: PDCD1-5355
agugacagaggcagugcu

SEQ ID NO: 18801 - RNA, 19 nt, Artificial Sequence
  Synthetic oligonucleotide: PDCD1-5356
gagugacagaggcagugcu

SEQ ID NO: 18802 - RNA, 20 nt, Artificial Sequence
  Synthetic oligonucleotide: PDCD1-2244
agagugacagaggcagugcu

SEQ ID NO: 18803 - RNA, 21 nt, Artificial Sequence
  Synthetic oligonucleotide: PDCD1-5357
gagagugacagaggcagugcu

SEQ ID NO: 18804 - RNA, 22 nt, Artificial Sequence
  Synthetic oligonucleotide: PDCD1-5358
cgagagugacagaggcagugcu

SEQ ID NO: 18805 - RNA, 23 nt, Artificial Sequence
  Synthetic oligonucleotide: PDCD1-5359
gcgagagugacagaggcagugcu

SEQ ID NO: 18806 - RNA, 24 nt, Artificial Sequence
  Synthetic oligonucleotide: PDCD1-5360
ggcgagagugacagaggcagugcu

SEQ ID NO: 18807 - RNA, 18 nt, Artificial Sequence
  Synthetic oligonucleotide: PDCD1-5361
cauucugucggagccucu

SEQ ID NO: 18808 - RNA, 19 nt, Artificial Sequence
  Synthetic oligonucleotide: PDCD1-5362
ccauucugucggagccucu

SEQ ID NO: 18809 - RNA, 20 nt, Artificial Sequence
  Synthetic oligonucleotide: PDCD1-2765
cccauucugucggagccucu

SEQ ID NO: 18810 - RNA, 21 nt, Artificial Sequence
  Synthetic oligonucleotide: PDCD1-5363
ucccauucugucggagccucu

SEQ ID NO: 18811 - RNA, 22 nt, Artificial Sequence
  Synthetic oligonucleotide: PDCD1-5364
cucccauucugucggagccucu

SEQ ID NO: 18812 - RNA, 23 nt, Artificial Sequence
  Synthetic oligonucleotide: PDCD1-5365
acucccauucugucggagccucu

SEQ ID NO: 18813 - RNA, 24 nt, Artificial Sequence
  Synthetic oligonucleotide: PDCD1-5366
cacucccauucugucggagccucu

SEQ ID NO: 18814 - RNA, 18 nt, Artificial Sequence
  Synthetic oligonucleotide: PDCD1-5367
agguuccugggcugcagu

SEQ ID NO: 18815 - RNA, 19 nt, Artificial Sequence
  Synthetic oligonucleotide: PDCD1-5368
cagguuccugggcugcagu

SEQ ID NO: 18816 - RNA, 20 nt, Artificial Sequence
  Synthetic oligonucleotide: PDCD1-5369
ucagguuccugggcugcagu

SEQ ID NO: 18817 - RNA, 21 nt, Artificial Sequence
  Synthetic oligonucleotide: PDCD1-5370
cucagguuccugggcugcagu

SEQ ID NO: 18818 - RNA, 22 nt, Artificial Sequence
  Synthetic oligonucleotide: PDCD1-5371
gcucagguuccugggcugcagu

SEQ ID NO: 18819 - RNA, 23 nt, Artificial Sequence
  Synthetic oligonucleotide: PDCD1-5372
ggcucagguuccugggcugcagu

SEQ ID NO: 18820 - RNA, 24 nt, Artificial Sequence
  Synthetic oligonucleotide: PDCD1-5373
gggcucagguuccugggcugcagu

SEQ ID NO: 18821 - RNA, 18 nt, Artificial Sequence
  Synthetic oligonucleotide: PDCD1-5374
agagaggaacccaggagu

SEQ ID NO: 18822 - RNA, 19 nt, Artificial Sequence
  Synthetic oligonucleotide: PDCD1-5375
cagagaggaacccaggagu

SEQ ID NO: 18823 - RNA, 20 nt, Artificial Sequence
  Synthetic oligonucleotide: PDCD1-986
ccagagaggaacccaggagu

SEQ ID NO: 18824 - RNA, 21 nt, Artificial Sequence
  Synthetic oligonucleotide: PDCD1-5376
cccagagaggaacccaggagu

SEQ ID NO: 18825 - RNA, 22 nt, Artificial Sequence
  Synthetic oligonucleotide: PDCD1-5377
gcccagagaggaacccaggagu

SEQ ID NO: 18826 - RNA, 23 nt, Artificial Sequence
  Synthetic oligonucleotide: PDCD1-5378
ggcccagagaggaacccaggagu

SEQ ID NO: 18827 - RNA, 24 nt, Artificial Sequence
  Synthetic oligonucleotide: PDCD1-5379
gggcccagagaggaacccaggagu

SEQ ID NO: 18828 - RNA, 18 nt, Artificial Sequence
  Synthetic oligonucleotide: PDCD1-5380
uugggccaggggaggagu

SEQ ID NO: 18829 - RNA, 19 nt, Artificial Sequence
  Synthetic oligonucleotide: PDCD1-5381
cuugggccaggggaggagu

SEQ ID NO: 18830 - RNA, 20 nt, Artificial Sequence
  Synthetic oligonucleotide: PDCD1-2105
acuugggccaggggaggagu

SEQ ID NO: 18831 - RNA, 21 nt, Artificial Sequence
  Synthetic oligonucleotide: PDCD1-5382
gacuugggccaggggaggagu

SEQ ID NO: 18832 - RNA, 22 nt, Artificial Sequence
  Synthetic oligonucleotide: PDCD1-5383
ggacuugggccaggggaggagu

SEQ ID NO: 18833 - RNA, 23 nt, Artificial Sequence
  Synthetic oligonucleotide: PDCD1-5384
gggacuugggccaggggaggagu

SEQ ID NO: 18834 - RNA, 24 nt, Artificial Sequence
  Synthetic oligonucleotide: PDCD1-5385
ggggacuugggccaggggaggagu

SEQ ID NO: 18835 - RNA, 18 nt, Artificial Sequence
  Synthetic oligonucleotide: PDCD1-5386
agccacacagcucagggu

SEQ ID NO: 18836 - RNA, 19 nt, Artificial Sequence
  Synthetic oligonucleotide: PDCD1-5387
aagccacacagcucagggu

SEQ ID NO: 18837 - RNA, 20 nt, Artificial Sequence
  Synthetic oligonucleotide: PDCD1-988
aaagccacacagcucagggu

SEQ ID NO: 18838 - RNA, 21 nt, Artificial Sequence
  Synthetic oligonucleotide: PDCD1-5388
caaagccacacagcucagggu

SEQ ID NO: 18839 - RNA, 22 nt, Artificial Sequence
  Synthetic oligonucleotide: PDCD1-5389
ccaaagccacacagcucagggu

SEQ ID NO: 18840 - RNA, 23 nt, Artificial Sequence
  Synthetic oligonucleotide: PDCD1-5390
cccaaagccacacagcucagggu

SEQ ID NO: 18841 - RNA, 24 nt, Artificial Sequence
  Synthetic oligonucleotide: PDCD1-5391
gcccaaagccacacagcucagggu

SEQ ID NO: 18842 - RNA, 18 nt, Artificial Sequence
  Synthetic oligonucleotide: PDCD1-5392
uaggacuggggagagggu

SEQ ID NO: 18843 - RNA, 19 nt, Artificial Sequence
  Synthetic oligonucleotide: PDCD1-5393
guaggacuggggagagggu

SEQ ID NO: 18844 - RNA, 20 nt, Artificial Sequence
  Synthetic oligonucleotide: PDCD1-2263
gguaggacuggggagagggu

SEQ ID NO: 18845 - RNA, 21 nt, Artificial Sequence
  Synthetic oligonucleotide: PDCD1-5394
ggguaggacuggggagagggu

SEQ ID NO: 18846 - RNA, 22 nt, Artificial Sequence
  Synthetic oligonucleotide: PDCD1-5395
gggguaggacuggggagagggu

SEQ ID NO: 18847 - RNA, 23 nt, Artificial Sequence
  Synthetic oligonucleotide: PDCD1-5396
ggggguaggacuggggagagggu

SEQ ID NO: 18848 - RNA, 24 nt, Artificial Sequence
  Synthetic oligonucleotide: PDCD1-5397
aggggguaggacuggggagagggu

SEQ ID NO: 18849 - RNA, 18 nt, Artificial Sequence
  Synthetic oligonucleotide: PDCD1-5398
cuccugaggcugccgggu

SEQ ID NO: 18850 - RNA, 19 nt, Artificial Sequence
  Synthetic oligonucleotide: PDCD1-5399
ccuccugaggcugccgggu

SEQ ID NO: 18851 - RNA, 20 nt, Artificial Sequence
  Synthetic oligonucleotide: PDCD1-2290
cccuccugaggcugccgggu

SEQ ID NO: 18852 - RNA, 21 nt, Artificial Sequence
  Synthetic oligonucleotide: PDCD1-5400
ccccuccugaggcugccgggu

SEQ ID NO: 18853 - RNA, 22 nt, Artificial Sequence
  Synthetic oligonucleotide: PDCD1-5401
gccccuccugaggcugccgggu

SEQ ID NO: 18854 - RNA, 23 nt, Artificial Sequence
  Synthetic oligonucleotide: PDCD1-5402
ugccccuccugaggcugccgggu

SEQ ID NO: 18855 - RNA, 24 nt, Artificial Sequence
  Synthetic oligonucleotide: PDCD1-5403
cugccccuccugaggcugccgggu

SEQ ID NO: 18856 - RNA, 18 nt, Artificial Sequence
  Synthetic oligonucleotide: PDCD1-5404
ugcugggggaggaggggu

SEQ ID NO: 18857 - RNA, 19 nt, Artificial Sequence
  Synthetic oligonucleotide: PDCD1-5405
gugcugggggaggaggggu

SEQ ID NO: 18858 - RNA, 20 nt, Artificial Sequence
  Synthetic oligonucleotide: PDCD1-1046
agugcugggggaggaggggu

SEQ ID NO: 18859 - RNA, 21 nt, Artificial Sequence
  Synthetic oligonucleotide: PDCD1-5406
cagugcugggggaggaggggu

SEQ ID NO: 18860 - RNA, 22 nt, Artificial Sequence
  Synthetic oligonucleotide: PDCD1-5407
gcagugcugggggaggaggggu

SEQ ID NO: 18861 - RNA, 23 nt, Artificial Sequence
  Synthetic oligonucleotide: PDCD1-5408
ggcagugcugggggaggaggggu

SEQ ID NO: 18862 - RNA, 24 nt, Artificial Sequence
  Synthetic oligonucleotide: PDCD1-5409
aggcagugcugggggaggaggggu

SEQ ID NO: 18863 - RNA, 18 nt, Artificial Sequence
  Synthetic oligonucleotide: PDCD1-5410
accccacucccauucugu

SEQ ID NO: 18864 - RNA, 19 nt, Artificial Sequence
  Synthetic oligonucleotide: PDCD1-5411
aaccccacucccauucugu

SEQ ID NO: 18865 - RNA, 20 nt, Artificial Sequence
  Synthetic oligonucleotide: PDCD1-2763
caaccccacucccauucugu

SEQ ID NO: 18866 - RNA, 21 nt, Artificial Sequence
  Synthetic oligonucleotide: PDCD1-5412
ucaaccccacucccauucugu

SEQ ID NO: 18867 - RNA, 22 nt, Artificial Sequence
  Synthetic oligonucleotide: PDCD1-5413
cucaaccccacucccauucugu

SEQ ID NO: 18868 - RNA, 23 nt, Artificial Sequence
  Synthetic oligonucleotide: PDCD1-5414
gcucaaccccacucccauucugu

SEQ ID NO: 18869 - RNA, 24 nt, Artificial Sequence
  Synthetic oligonucleotide: PDCD1-5415
ggcucaaccccacucccauucugu

SEQ ID NO: 18870 - RNA, 18 nt, Artificial Sequence
  Synthetic oligonucleotide: PDCD1-3584
gucugggcggugcuacaa

SEQ ID NO: 18871 - RNA, 19 nt, Artificial Sequence
  Synthetic oligonucleotide: PDCD1-3585
cgucugggcggugcuacaa

SEQ ID NO: 18872 - RNA, 20 nt, Artificial Sequence
  Synthetic oligonucleotide: PDCD1-530
ucgucugggcggugcuacaa

SEQ ID NO: 18873 - RNA, 21 nt, Artificial Sequence
  Synthetic oligonucleotide: PDCD1-3586
gucgucugggcggugcuacaa

SEQ ID NO: 18874 - RNA, 22 nt, Artificial Sequence
  Synthetic oligonucleotide: PDCD1-3587
agucgucugggcggugcuacaa

SEQ ID NO: 18875 - RNA, 23 nt, Artificial Sequence
  Synthetic oligonucleotide: PDCD1-3588
cagucgucugggcggugcuacaa

SEQ ID NO: 18876 - RNA, 24 nt, Artificial Sequence
  Synthetic oligonucleotide: PDCD1-3589
ccagucgucugggcggugcuacaa

SEQ ID NO: 18877 - RNA, 18 nt, Artificial Sequence
  Synthetic oligonucleotide: PDCD1-5416
ccagaggcuccgacagaa

SEQ ID NO: 18878 - RNA, 19 nt, Artificial Sequence
  Synthetic oligonucleotide: PDCD1-5417
cccagaggcuccgacagaa

SEQ ID NO: 18879 - RNA, 20 nt, Artificial Sequence
  Synthetic oligonucleotide: PDCD1-3003
ucccagaggcuccgacagaa

SEQ ID NO: 18880 - RNA, 21 nt, Artificial Sequence
  Synthetic oligonucleotide: PDCD1-5418
cucccagaggcuccgacagaa

SEQ ID NO: 18881 - RNA, 22 nt, Artificial Sequence
  Synthetic oligonucleotide: PDCD1-5419
gcucccagaggcuccgacagaa

SEQ ID NO: 18882 - RNA, 23 nt, Artificial Sequence
  Synthetic oligonucleotide: PDCD1-5420
ggcucccagaggcuccgacagaa

SEQ ID NO: 18883 - RNA, 24 nt, Artificial Sequence
  Synthetic oligonucleotide: PDCD1-5421
aggcucccagaggcuccgacagaa

SEQ ID NO: 18884 - RNA, 18 nt, Artificial Sequence
  Synthetic oligonucleotide: PDCD1-5422
cacguggauguggaggaa

SEQ ID NO: 18885 - RNA, 19 nt, Artificial Sequence
  Synthetic oligonucleotide: PDCD1-5423
ccacguggauguggaggaa

SEQ ID NO: 18886 - RNA, 20 nt, Artificial Sequence
  Synthetic oligonucleotide: PDCD1-1464
cccacguggauguggaggaa

SEQ ID NO: 18887 - RNA, 21 nt, Artificial Sequence
  Synthetic oligonucleotide: PDCD1-5424
gcccacguggauguggaggaa

SEQ ID NO: 18888 - RNA, 22 nt, Artificial Sequence
  Synthetic oligonucleotide: PDCD1-5425
cgcccacguggauguggaggaa

SEQ ID NO: 18889 - RNA, 23 nt, Artificial Sequence
  Synthetic oligonucleotide: PDCD1-5426
ucgcccacguggauguggaggaa

SEQ ID NO: 18890 - RNA, 24 nt, Artificial Sequence
  Synthetic oligonucleotide: PDCD1-5427
cucgcccacguggauguggaggaa

SEQ ID NO: 18891 - RNA, 18 nt, Artificial Sequence
  Synthetic oligonucleotide: PDCD1-5428
gcagugagcagagacaca

SEQ ID NO: 18892 - RNA, 19 nt, Artificial Sequence
  Synthetic oligonucleotide: PDCD1-5429
agcagugagcagagacaca

SEQ ID NO: 18893 - RNA, 20 nt, Artificial Sequence
  Synthetic oligonucleotide: PDCD1-1488
cagcagugagcagagacaca

SEQ ID NO: 18894 - RNA, 21 nt, Artificial Sequence
  Synthetic oligonucleotide: PDCD1-5430
acagcagugagcagagacaca

SEQ ID NO: 18895 - RNA, 22 nt, Artificial Sequence
  Synthetic oligonucleotide: PDCD1-5431
cacagcagugagcagagacaca

SEQ ID NO: 18896 - RNA, 23 nt, Artificial Sequence
  Synthetic oligonucleotide: PDCD1-5432
ccacagcagugagcagagacaca

SEQ ID NO: 18897 - RNA, 24 nt, Artificial Sequence
  Synthetic oligonucleotide: PDCD1-5433
gccacagcagugagcagagacaca

SEQ ID NO: 18898 - RNA, 18 nt, Artificial Sequence
  Synthetic oligonucleotide: PDCD1-5434
cagcagugagcagagaca

SEQ ID NO: 18899 - RNA, 19 nt, Artificial Sequence
  Synthetic oligonucleotide: PDCD1-5435
acagcagugagcagagaca

SEQ ID NO: 18900 - RNA, 20 nt, Artificial Sequence
  Synthetic oligonucleotide: PDCD1-1489
cacagcagugagcagagaca

SEQ ID NO: 18901 - RNA, 21 nt, Artificial Sequence
  Synthetic oligonucleotide: PDCD1-5436
ccacagcagugagcagagaca

SEQ ID NO: 18902 - RNA, 22 nt, Artificial Sequence
  Synthetic oligonucleotide: PDCD1-5437
gccacagcagugagcagagaca

SEQ ID NO: 18903 - RNA, 23 nt, Artificial Sequence
  Synthetic oligonucleotide: PDCD1-5438
ggccacagcagugagcagagaca

SEQ ID NO: 18904 - RNA, 24 nt, Artificial Sequence
  Synthetic oligonucleotide: PDCD1-5439
aggccacagcagugagcagagaca

SEQ ID NO: 18905 - RNA, 18 nt, Artificial Sequence
  Synthetic oligonucleotide: PDCD1-5440
agggaggcccggccccca

SEQ ID NO: 18906 - RNA, 19 nt, Artificial Sequence
  Synthetic oligonucleotide: PDCD1-5441
cagggaggcccggccccca

SEQ ID NO: 18907 - RNA, 20 nt, Artificial Sequence
  Synthetic oligonucleotide: PDCD1-2322
gcagggaggcccggccccca

SEQ ID NO: 18908 - RNA, 21 nt, Artificial Sequence
  Synthetic oligonucleotide: PDCD1-5442
ggcagggaggcccggccccca

SEQ ID NO: 18909 - RNA, 22 nt, Artificial Sequence
  Synthetic oligonucleotide: PDCD1-5443
aggcagggaggcccggccccca

SEQ ID NO: 18910 - RNA, 23 nt, Artificial Sequence
  Synthetic oligonucleotide: PDCD1-5444
caggcagggaggcccggccccca

SEQ ID NO: 18911 - RNA, 24 nt, Artificial Sequence
  Synthetic oligonucleotide: PDCD1-5445
ccaggcagggaggcccggccccca

SEQ ID NO: 18912 - RNA, 18 nt, Artificial Sequence
  Synthetic oligonucleotide: PDCD1-5446
cccaggaaccugagccca

SEQ ID NO: 18913 - RNA, 19 nt, Artificial Sequence
  Synthetic oligonucleotide: PDCD1-5447
gcccaggaaccugagccca

SEQ ID NO: 18914 - RNA, 20 nt, Artificial Sequence
  Synthetic oligonucleotide: PDCD1-1525
agcccaggaaccugagccca

SEQ ID NO: 18915 - RNA, 21 nt, Artificial Sequence
  Synthetic oligonucleotide: PDCD1-5448
cagcccaggaaccugagccca

SEQ ID NO: 18916 - RNA, 22 nt, Artificial Sequence
  Synthetic oligonucleotide: PDCD1-5449
gcagcccaggaaccugagccca

SEQ ID NO: 18917 - RNA, 23 nt, Artificial Sequence
  Synthetic oligonucleotide: PDCD1-5450
ugcagcccaggaaccugagccca

SEQ ID NO: 18918 - RNA, 24 nt, Artificial Sequence
  Synthetic oligonucleotide: PDCD1-5451
cugcagcccaggaaccugagccca

SEQ ID NO: 18919 - RNA, 18 nt, Artificial Sequence
  Synthetic oligonucleotide: PDCD1-5452
uggaaagaggccacagca

SEQ ID NO: 18920 - RNA, 19 nt, Artificial Sequence
  Synthetic oligonucleotide: PDCD1-5453
auggaaagaggccacagca

SEQ ID NO: 18921 - RNA, 20 nt, Artificial Sequence
  Synthetic oligonucleotide: PDCD1-1491
uauggaaagaggccacagca

SEQ ID NO: 18922 - RNA, 21 nt, Artificial Sequence
  Synthetic oligonucleotide: PDCD1-5454
auauggaaagaggccacagca

SEQ ID NO: 18923 - RNA, 22 nt, Artificial Sequence
  Synthetic oligonucleotide: PDCD1-5455
gauauggaaagaggccacagca

SEQ ID NO: 18924 - RNA, 23 nt, Artificial Sequence
  Synthetic oligonucleotide: PDCD1-5456
ggauauggaaagaggccacagca

SEQ ID NO: 18925 - RNA, 24 nt, Artificial Sequence
  Synthetic oligonucleotide: PDCD1-5457
gggauauggaaagaggccacagca

SEQ ID NO: 18926 - RNA, 18 nt, Artificial Sequence
  Synthetic oligonucleotide: PDCD1-5458
gaagagggggcgggagca

SEQ ID NO: 18927 - RNA, 19 nt, Artificial Sequence
  Synthetic oligonucleotide: PDCD1-5459
ggaagagggggcgggagca

SEQ ID NO: 18928 - RNA, 20 nt, Artificial Sequence
  Synthetic oligonucleotide: PDCD1-2375
aggaagagggggcgggagca

SEQ ID NO: 18929 - RNA, 21 nt, Artificial Sequence
  Synthetic oligonucleotide: PDCD1-5460
gaggaagagggggcgggagca

SEQ ID NO: 18930 - RNA, 22 nt, Artificial Sequence
  Synthetic oligonucleotide: PDCD1-5461
ggaggaagagggggcgggagca

SEQ ID NO: 18931 - RNA, 23 nt, Artificial Sequence
  Synthetic oligonucleotide: PDCD1-5462
uggaggaagagggggcgggagca

SEQ ID NO: 18932 - RNA, 24 nt, Artificial Sequence
  Synthetic oligonucleotide: PDCD1-5463
guggaggaagagggggcgggagca

SEQ ID NO: 18933 - RNA, 18 nt, Artificial Sequence
  Synthetic oligonucleotide: PDCD1-5464
cucaccuccgccugagca

SEQ ID NO: 18934 - RNA, 19 nt, Artificial Sequence
  Synthetic oligonucleotide: PDCD1-5465
gcucaccuccgccugagca

SEQ ID NO: 18935 - RNA, 20 nt, Artificial Sequence
  Synthetic oligonucleotide: PDCD1-1452
cgcucaccuccgccugagca

SEQ ID NO: 18936 - RNA, 21 nt, Artificial Sequence
  Synthetic oligonucleotide: PDCD1-5466
ccgcucaccuccgccugagca

SEQ ID NO: 18937 - RNA, 22 nt, Artificial Sequence
  Synthetic oligonucleotide: PDCD1-5467
uccgcucaccuccgccugagca

SEQ ID NO: 18938 - RNA, 23 nt, Artificial Sequence
  Synthetic oligonucleotide: PDCD1-5468
uuccgcucaccuccgccugagca

SEQ ID NO: 18939 - RNA, 24 nt, Artificial Sequence
  Synthetic oligonucleotide: PDCD1-5469
cuuccgcucaccuccgccugagca

SEQ ID NO: 18940 - RNA, 18 nt, Artificial Sequence
  Synthetic oligonucleotide: PDCD1-5470
acccaccuuccccaggca

SEQ ID NO: 18941 - RNA, 19 nt, Artificial Sequence
  Synthetic oligonucleotide: PDCD1-5471
cacccaccuuccccaggca

SEQ ID NO: 18942 - RNA, 20 nt, Artificial Sequence
  Synthetic oligonucleotide: PDCD1-2318
ccacccaccuuccccaggca

SEQ ID NO: 18943 - RNA, 21 nt, Artificial Sequence
  Synthetic oligonucleotide: PDCD1-5472
gccacccaccuuccccaggca

SEQ ID NO: 18944 - RNA, 22 nt, Artificial Sequence
  Synthetic oligonucleotide: PDCD1-5473
ggccacccaccuuccccaggca

SEQ ID NO: 18945 - RNA, 23 nt, Artificial Sequence
  Synthetic oligonucleotide: PDCD1-5474
gggccacccaccuuccccaggca

SEQ ID NO: 18946 - RNA, 24 nt, Artificial Sequence
  Synthetic oligonucleotide: PDCD1-5475
ggggccacccaccuuccccaggca

SEQ ID NO: 18947 - RNA, 18 nt, Artificial Sequence
  Synthetic oligonucleotide: PDCD1-5476
cguggauguggaggaaga

SEQ ID NO: 18948 - RNA, 19 nt, Artificial Sequence
  Synthetic oligonucleotide: PDCD1-5477
acguggauguggaggaaga

SEQ ID NO: 18949 - RNA, 20 nt, Artificial Sequence
  Synthetic oligonucleotide: PDCD1-2370
cacguggauguggaggaaga

SEQ ID NO: 18950 - RNA, 21 nt, Artificial Sequence
  Synthetic oligonucleotide: PDCD1-5478
ccacguggauguggaggaaga

SEQ ID NO: 18951 - RNA, 22 nt, Artificial Sequence
  Synthetic oligonucleotide: PDCD1-5479
cccacguggauguggaggaaga

SEQ ID NO: 18952 - RNA, 23 nt, Artificial Sequence
  Synthetic oligonucleotide: PDCD1-5480
gcccacguggauguggaggaaga

SEQ ID NO: 18953 - RNA, 24 nt, Artificial Sequence
  Synthetic oligonucleotide: PDCD1-5481
cgcccacguggauguggaggaaga

SEQ ID NO: 18954 - RNA, 18 nt, Artificial Sequence
  Synthetic oligonucleotide: PDCD1-5482
cccagaggcuccgacaga

SEQ ID NO: 18955 - RNA, 19 nt, Artificial Sequence
  Synthetic oligonucleotide: PDCD1-5483
ucccagaggcuccgacaga

SEQ ID NO: 18956 - RNA, 20 nt, Artificial Sequence
  Synthetic oligonucleotide: PDCD1-1908
cucccagaggcuccgacaga

SEQ ID NO: 18957 - RNA, 21 nt, Artificial Sequence
  Synthetic oligonucleotide: PDCD1-5484
gcucccagaggcuccgacaga

SEQ ID NO: 18958 - RNA, 22 nt, Artificial Sequence
  Synthetic oligonucleotide: PDCD1-5485
ggcucccagaggcuccgacaga

SEQ ID NO: 18959 - RNA, 23 nt, Artificial Sequence
  Synthetic oligonucleotide: PDCD1-5486
aggcucccagaggcuccgacaga

SEQ ID NO: 18960 - RNA, 24 nt, Artificial Sequence
  Synthetic oligonucleotide: PDCD1-5487
gaggcucccagaggcuccgacaga

SEQ ID NO: 18961 - RNA, 18 nt, Artificial Sequence
  Synthetic oligonucleotide: PDCD1-5488
caggaaccugagcccaga

SEQ ID NO: 18962 - RNA, 19 nt, Artificial Sequence
  Synthetic oligonucleotide: PDCD1-5489
ccaggaaccugagcccaga

SEQ ID NO: 18963 - RNA, 20 nt, Artificial Sequence
  Synthetic oligonucleotide: PDCD1-2313
cccaggaaccugagcccaga

SEQ ID NO: 18964 - RNA, 21 nt, Artificial Sequence
  Synthetic oligonucleotide: PDCD1-5490
gcccaggaaccugagcccaga

SEQ ID NO: 18965 - RNA, 22 nt, Artificial Sequence
  Synthetic oligonucleotide: PDCD1-5491
agcccaggaaccugagcccaga

SEQ ID NO: 18966 - RNA, 23 nt, Artificial Sequence
  Synthetic oligonucleotide: PDCD1-5492
cagcccaggaaccugagcccaga

SEQ ID NO: 18967 - RNA, 24 nt, Artificial Sequence
  Synthetic oligonucleotide: PDCD1-5493
gcagcccaggaaccugagcccaga

SEQ ID NO: 18968 - RNA, 18 nt, Artificial Sequence
  Synthetic oligonucleotide: PDCD1-5494
gcccggcccccagggaga

SEQ ID NO: 18969 - RNA, 19 nt, Artificial Sequence
  Synthetic oligonucleotide: PDCD1-5495
ggcccggcccccagggaga

SEQ ID NO: 18970 - RNA, 20 nt, Artificial Sequence
  Synthetic oligonucleotide: PDCD1-2323
aggcccggcccccagggaga

SEQ ID NO: 18971 - RNA, 21 nt, Artificial Sequence
  Synthetic oligonucleotide: PDCD1-5496
gaggcccggcccccagggaga

SEQ ID NO: 18972 - RNA, 22 nt, Artificial Sequence
  Synthetic oligonucleotide: PDCD1-5497
ggaggcccggcccccagggaga

SEQ ID NO: 18973 - RNA, 23 nt, Artificial Sequence
  Synthetic oligonucleotide: PDCD1-5498
gggaggcccggcccccagggaga

SEQ ID NO: 18974 - RNA, 24 nt, Artificial Sequence
  Synthetic oligonucleotide: PDCD1-5499
agggaggcccggcccccagggaga

SEQ ID NO: 18975 - RNA, 18 nt, Artificial Sequence
  Synthetic oligonucleotide: PDCD1-5500
cagagacacagaggagga

SEQ ID NO: 18976 - RNA, 19 nt, Artificial Sequence
  Synthetic oligonucleotide: PDCD1-5501
gcagagacacagaggagga

SEQ ID NO: 18977 - RNA, 20 nt, Artificial Sequence
  Synthetic oligonucleotide: PDCD1-2349
agcagagacacagaggagga

SEQ ID NO: 18978 - RNA, 21 nt, Artificial Sequence
  Synthetic oligonucleotide: PDCD1-5502
gagcagagacacagaggagga

SEQ ID NO: 18979 - RNA, 22 nt, Artificial Sequence
  Synthetic oligonucleotide: PDCD1-5503
ugagcagagacacagaggagga

SEQ ID NO: 18980 - RNA, 23 nt, Artificial Sequence
  Synthetic oligonucleotide: PDCD1-5504
gugagcagagacacagaggagga

SEQ ID NO: 18981 - RNA, 24 nt, Artificial Sequence
  Synthetic oligonucleotide: PDCD1-5505
agugagcagagacacagaggagga

SEQ ID NO: 18982 - RNA, 18 nt, Artificial Sequence
  Synthetic oligonucleotide: PDCD1-5506
cagcccaggggucccgga

SEQ ID NO: 18983 - RNA, 19 nt, Artificial Sequence
  Synthetic oligonucleotide: PDCD1-5507
gcagcccaggggucccgga

SEQ ID NO: 18984 - RNA, 20 nt, Artificial Sequence
  Synthetic oligonucleotide: PDCD1-1425
ggcagcccaggggucccgga

SEQ ID NO: 18985 - RNA, 21 nt, Artificial Sequence
  Synthetic oligonucleotide: PDCD1-5508
uggcagcccaggggucccgga

SEQ ID NO: 18986 - RNA, 22 nt, Artificial Sequence
  Synthetic oligonucleotide: PDCD1-5509
cuggcagcccaggggucccgga

SEQ ID NO: 18987 - RNA, 23 nt, Artificial Sequence
  Synthetic oligonucleotide: PDCD1-5510
ccuggcagcccaggggucccgga

SEQ ID NO: 18988 - RNA, 24 nt, Artificial Sequence
  Synthetic oligonucleotide: PDCD1-5511
cccuggcagcccaggggucccgga

SEQ ID NO: 18989 - RNA, 18 nt, Artificial Sequence
  Synthetic oligonucleotide: PDCD1-5512
ccagggagauggggggga

SEQ ID NO: 18990 - RNA, 19 nt, Artificial Sequence
  Synthetic oligonucleotide: PDCD1-5513
cccagggagauggggggga

SEQ ID NO: 18991 - RNA, 20 nt, Artificial Sequence
  Synthetic oligonucleotide: PDCD1-2329
ccccagggagauggggggga

SEQ ID NO: 18992 - RNA, 21 nt, Artificial Sequence
  Synthetic oligonucleotide: PDCD1-5514
cccccagggagauggggggga

SEQ ID NO: 18993 - RNA, 22 nt, Artificial Sequence
  Synthetic oligonucleotide: PDCD1-5515
gcccccagggagauggggggga

SEQ ID NO: 18994 - RNA, 23 nt, Artificial Sequence
  Synthetic oligonucleotide: PDCD1-5516
ggcccccagggagauggggggga

SEQ ID NO: 18995 - RNA, 24 nt, Artificial Sequence
  Synthetic oligonucleotide: PDCD1-5517
cggcccccagggagauggggggga

SEQ ID NO: 18996 - RNA, 18 nt, Artificial Sequence
  Synthetic oligonucleotide: PDCD1-5518
ggcuccgacagaauggga

SEQ ID NO: 18997 - RNA, 19 nt, Artificial Sequence
  Synthetic oligonucleotide: PDCD1-5519
aggcuccgacagaauggga

SEQ ID NO: 18998 - RNA, 20 nt, Artificial Sequence
  Synthetic oligonucleotide: PDCD1-1905
gaggcuccgacagaauggga

SEQ ID NO: 18999 - RNA, 21 nt, Artificial Sequence
  Synthetic oligonucleotide: PDCD1-5520
agaggcuccgacagaauggga

SEQ ID NO: 19000 - RNA, 22 nt, Artificial Sequence
  Synthetic oligonucleotide: PDCD1-5521
cagaggcuccgacagaauggga

SEQ ID NO: 19001 - RNA, 23 nt, Artificial Sequence
  Synthetic oligonucleotide: PDCD1-5522
ccagaggcuccgacagaauggga

SEQ ID NO: 19002 - RNA, 24 nt, Artificial Sequence
  Synthetic oligonucleotide: PDCD1-5523
cccagaggcuccgacagaauggga

SEQ ID NO: 19003 - RNA, 18 nt, Artificial Sequence
  Synthetic oligonucleotide: PDCD1-5524
gcucgggcgggauaugga

SEQ ID NO: 19004 - RNA, 19 nt, Artificial Sequence
  Synthetic oligonucleotide: PDCD1-5525
agcucgggcgggauaugga

SEQ ID NO: 19005 - RNA, 20 nt, Artificial Sequence
  Synthetic oligonucleotide: PDCD1-1492
cagcucgggcgggauaugga

SEQ ID NO: 19006 - RNA, 21 nt, Artificial Sequence
  Synthetic oligonucleotide: PDCD1-5526
gcagcucgggcgggauaugga

SEQ ID NO: 19007 - RNA, 22 nt, Artificial Sequence
  Synthetic oligonucleotide: PDCD1-5527
ggcagcucgggcgggauaugga

SEQ ID NO: 19008 - RNA, 23 nt, Artificial Sequence
  Synthetic oligonucleotide: PDCD1-5528
gggcagcucgggcgggauaugga

SEQ ID NO: 19009 - RNA, 24 nt, Artificial Sequence
  Synthetic oligonucleotide: PDCD1-5529
ggggcagcucgggcgggauaugga

SEQ ID NO: 19010 - RNA, 18 nt, Artificial Sequence
  Synthetic oligonucleotide: PDCD1-5530
ggcagcucgggcgggaua

SEQ ID NO: 19011 - RNA, 19 nt, Artificial Sequence
  Synthetic oligonucleotide: PDCD1-5531
gggcagcucgggcgggaua

SEQ ID NO: 19012 - RNA, 20 nt, Artificial Sequence
  Synthetic oligonucleotide: PDCD1-2345
ggggcagcucgggcgggaua

SEQ ID NO: 19013 - RNA, 21 nt, Artificial Sequence
  Synthetic oligonucleotide: PDCD1-5532
aggggcagcucgggcgggaua

SEQ ID NO: 19014 - RNA, 22 nt, Artificial Sequence
  Synthetic oligonucleotide: PDCD1-5533
gaggggcagcucgggcgggaua

SEQ ID NO: 19015 - RNA, 23 nt, Artificial Sequence
  Synthetic oligonucleotide: PDCD1-5534
ggaggggcagcucgggcgggaua

SEQ ID NO: 19016 - RNA, 24 nt, Artificial Sequence
  Synthetic oligonucleotide: PDCD1-5535
aggaggggcagcucgggcgggaua

SEQ ID NO: 19017 - RNA, 18 nt, Artificial Sequence
  Synthetic oligonucleotide: PDCD1-5536
ucacugcagcccaggaac

SEQ ID NO: 19018 - RNA, 19 nt, Artificial Sequence
  Synthetic oligonucleotide: PDCD1-5537
cucacugcagcccaggaac

SEQ ID NO: 19019 - RNA, 20 nt, Artificial Sequence
  Synthetic oligonucleotide: PDCD1-5538
ccucacugcagcccaggaac

SEQ ID NO: 19020 - RNA, 21 nt, Artificial Sequence
  Synthetic oligonucleotide: PDCD1-5539
cccucacugcagcccaggaac

SEQ ID NO: 19021 - RNA, 22 nt, Artificial Sequence
  Synthetic oligonucleotide: PDCD1-5540
ccccucacugcagcccaggaac

SEQ ID NO: 19022 - RNA, 23 nt, Artificial Sequence
  Synthetic oligonucleotide: PDCD1-5541
accccucacugcagcccaggaac

SEQ ID NO: 19023 - RNA, 24 nt, Artificial Sequence
  Synthetic oligonucleotide: PDCD1-5542
caccccucacugcagcccaggaac

SEQ ID NO: 19024 - RNA, 18 nt, Artificial Sequence
  Synthetic oligonucleotide: PDCD1-5543
cccucccuucaaccugac

SEQ ID NO: 19025 - RNA, 19 nt, Artificial Sequence
  Synthetic oligonucleotide: PDCD1-5544
acccucccuucaaccugac

SEQ ID NO: 19026 - RNA, 20 nt, Artificial Sequence
  Synthetic oligonucleotide: PDCD1-1455
cacccucccuucaaccugac

SEQ ID NO: 19027 - RNA, 21 nt, Artificial Sequence
  Synthetic oligonucleotide: PDCD1-5545
gcacccucccuucaaccugac

SEQ ID NO: 19028 - RNA, 22 nt, Artificial Sequence
  Synthetic oligonucleotide: PDCD1-5546
ggcacccucccuucaaccugac

SEQ ID NO: 19029 - RNA, 23 nt, Artificial Sequence
  Synthetic oligonucleotide: PDCD1-5547
gggcacccucccuucaaccugac

SEQ ID NO: 19030 - RNA, 24 nt, Artificial Sequence
  Synthetic oligonucleotide: PDCD1-5548
cgggcacccucccuucaaccugac

SEQ ID NO: 19031 - RNA, 18 nt, Artificial Sequence
  Synthetic oligonucleotide: PDCD1-5549
ccucccuucaaccugacc

SEQ ID NO: 19032 - RNA, 19 nt, Artificial Sequence
  Synthetic oligonucleotide: PDCD1-5550
cccucccuucaaccugacc

SEQ ID NO: 19033 - RNA, 20 nt, Artificial Sequence
  Synthetic oligonucleotide: PDCD1-2380
acccucccuucaaccugacc

SEQ ID NO: 19034 - RNA, 21 nt, Artificial Sequence
  Synthetic oligonucleotide: PDCD1-5551
cacccucccuucaaccugacc

SEQ ID NO: 19035 - RNA, 22 nt, Artificial Sequence
  Synthetic oligonucleotide: PDCD1-5552
gcacccucccuucaaccugacc

SEQ ID NO: 19036 - RNA, 23 nt, Artificial Sequence
  Synthetic oligonucleotide: PDCD1-5553
ggcacccucccuucaaccugacc

SEQ ID NO: 19037 - RNA, 24 nt, Artificial Sequence
  Synthetic oligonucleotide: PDCD1-5554
gggcacccucccuucaaccugacc

SEQ ID NO: 19038 - RNA, 18 nt, Artificial Sequence
  Synthetic oligonucleotide: PDCD1-5555
ccagcucugccccuuacc

SEQ ID NO: 19039 - RNA, 19 nt, Artificial Sequence
  Synthetic oligonucleotide: PDCD1-5556
cccagcucugccccuuacc

SEQ ID NO: 19040 - RNA, 20 nt, Artificial Sequence
  Synthetic oligonucleotide: PDCD1-1414
ccccagcucugccccuuacc

SEQ ID NO: 19041 - RNA, 21 nt, Artificial Sequence
  Synthetic oligonucleotide: PDCD1-5557
cccccagcucugccccuuacc

SEQ ID NO: 19042 - RNA, 22 nt, Artificial Sequence
  Synthetic oligonucleotide: PDCD1-5558
gcccccagcucugccccuuacc

SEQ ID NO: 19043 - RNA, 23 nt, Artificial Sequence
  Synthetic oligonucleotide: PDCD1-5559
ggcccccagcucugccccuuacc

SEQ ID NO: 19044 - RNA, 24 nt, Artificial Sequence
  Synthetic oligonucleotide: PDCD1-5560
uggcccccagcucugccccuuacc

SEQ ID NO: 19045 - RNA, 18 nt, Artificial Sequence
  Synthetic oligonucleotide: PDCD1-5561
ugagcuggggagaccccc

SEQ ID NO: 19046 - RNA, 19 nt, Artificial Sequence
  Synthetic oligonucleotide: PDCD1-5562
cugagcuggggagaccccc

SEQ ID NO: 19047 - RNA, 20 nt, Artificial Sequence
  Synthetic oligonucleotide: PDCD1-1477
ccugagcuggggagaccccc

SEQ ID NO: 19048 - RNA, 21 nt, Artificial Sequence
  Synthetic oligonucleotide: PDCD1-5563
cccugagcuggggagaccccc

SEQ ID NO: 19049 - RNA, 22 nt, Artificial Sequence
  Synthetic oligonucleotide: PDCD1-5564
gcccugagcuggggagaccccc

SEQ ID NO: 19050 - RNA, 23 nt, Artificial Sequence
  Synthetic oligonucleotide: PDCD1-5565
ggcccugagcuggggagaccccc

SEQ ID NO: 19051 - RNA, 24 nt, Artificial Sequence
  Synthetic oligonucleotide: PDCD1-5566
gggcccugagcuggggagaccccc

SEQ ID NO: 19052 - RNA, 18 nt, Artificial Sequence
  Synthetic oligonucleotide: PDCD1-5567
cagggaggcccggccccc

SEQ ID NO: 19053 - RNA, 19 nt, Artificial Sequence
  Synthetic oligonucleotide: PDCD1-5568
gcagggaggcccggccccc

SEQ ID NO: 19054 - RNA, 20 nt, Artificial Sequence
  Synthetic oligonucleotide: PDCD1-2321
ggcagggaggcccggccccc

SEQ ID NO: 19055 - RNA, 21 nt, Artificial Sequence
  Synthetic oligonucleotide: PDCD1-5569
aggcagggaggcccggccccc

SEQ ID NO: 19056 - RNA, 22 nt, Artificial Sequence
  Synthetic oligonucleotide: PDCD1-5570
caggcagggaggcccggccccc

SEQ ID NO: 19057 - RNA, 23 nt, Artificial Sequence
  Synthetic oligonucleotide: PDCD1-5571
ccaggcagggaggcccggccccc

SEQ ID NO: 19058 - RNA, 24 nt, Artificial Sequence
  Synthetic oligonucleotide: PDCD1-5572
cccaggcagggaggcccggccccc

SEQ ID NO: 19059 - RNA, 18 nt, Artificial Sequence
  Synthetic oligonucleotide: PDCD1-5573
gcagggaggcccggcccc

SEQ ID NO: 19060 - RNA, 19 nt, Artificial Sequence
  Synthetic oligonucleotide: PDCD1-5574
ggcagggaggcccggcccc

SEQ ID NO: 19061 - RNA, 20 nt, Artificial Sequence
  Synthetic oligonucleotide: PDCD1-1519
aggcagggaggcccggcccc

SEQ ID NO: 19062 - RNA, 21 nt, Artificial Sequence
  Synthetic oligonucleotide: PDCD1-5575
caggcagggaggcccggcccc

SEQ ID NO: 19063 - RNA, 22 nt, Artificial Sequence
  Synthetic oligonucleotide: PDCD1-5576
ccaggcagggaggcccggcccc

SEQ ID NO: 19064 - RNA, 23 nt, Artificial Sequence
  Synthetic oligonucleotide: PDCD1-5577
cccaggcagggaggcccggcccc

SEQ ID NO: 19065 - RNA, 24 nt, Artificial Sequence
  Synthetic oligonucleotide: PDCD1-5578
ccccaggcagggaggcccggcccc

SEQ ID NO: 19066 - RNA, 18 nt, Artificial Sequence
  Synthetic oligonucleotide: PDCD1-5579
caccccucacugcagccc

SEQ ID NO: 19067 - RNA, 19 nt, Artificial Sequence
  Synthetic oligonucleotide: PDCD1-5580
ccaccccucacugcagccc

SEQ ID NO: 19068 - RNA, 20 nt, Artificial Sequence
  Synthetic oligonucleotide: PDCD1-4465
cccaccccucacugcagccc

SEQ ID NO: 19069 - RNA, 21 nt, Artificial Sequence
  Synthetic oligonucleotide: PDCD1-5581
gcccaccccucacugcagccc

SEQ ID NO: 19070 - RNA, 22 nt, Artificial Sequence
  Synthetic oligonucleotide: PDCD1-5582
agcccaccccucacugcagccc

SEQ ID NO: 19071 - RNA, 23 nt, Artificial Sequence
  Synthetic oligonucleotide: PDCD1-5583
gagcccaccccucacugcagccc

SEQ ID NO: 19072 - RNA, 24 nt, Artificial Sequence
  Synthetic oligonucleotide: PDCD1-5584
ugagcccaccccucacugcagccc

SEQ ID NO: 19073 - RNA, 18 nt, Artificial Sequence
  Synthetic oligonucleotide: PDCD1-5585
ggccuggcccuggcagcc

SEQ ID NO: 19074 - RNA, 19 nt, Artificial Sequence
  Synthetic oligonucleotide: PDCD1-5586
gggccuggcccuggcagcc

SEQ ID NO: 19075 - RNA, 20 nt, Artificial Sequence
  Synthetic oligonucleotide: PDCD1-1429
cgggccuggcccuggcagcc

SEQ ID NO: 19076 - RNA, 21 nt, Artificial Sequence
  Synthetic oligonucleotide: PDCD1-5587
gcgggccuggcccuggcagcc

SEQ ID NO: 19077 - RNA, 22 nt, Artificial Sequence
  Synthetic oligonucleotide: PDCD1-5588
ggcgggccuggcccuggcagcc

SEQ ID NO: 19078 - RNA, 23 nt, Artificial Sequence
  Synthetic oligonucleotide: PDCD1-5589
aggcgggccuggcccuggcagcc

SEQ ID NO: 19079 - RNA, 24 nt, Artificial Sequence
  Synthetic oligonucleotide: PDCD1-5590
gaggcgggccuggcccuggcagcc

SEQ ID NO: 19080 - RNA, 18 nt, Artificial Sequence
  Synthetic oligonucleotide: PDCD1-5591
ccaccccucacugcagcc

SEQ ID NO: 19081 - RNA, 19 nt, Artificial Sequence
  Synthetic oligonucleotide: PDCD1-5592
cccaccccucacugcagcc

SEQ ID NO: 19082 - RNA, 20 nt, Artificial Sequence
  Synthetic oligonucleotide: PDCD1-5593
gcccaccccucacugcagcc

SEQ ID NO: 19083 - RNA, 21 nt, Artificial Sequence
  Synthetic oligonucleotide: PDCD1-5594
agcccaccccucacugcagcc

SEQ ID NO: 19084 - RNA, 22 nt, Artificial Sequence
  Synthetic oligonucleotide: PDCD1-5595
gagcccaccccucacugcagcc

SEQ ID NO: 19085 - RNA, 23 nt, Artificial Sequence
  Synthetic oligonucleotide: PDCD1-5596
ugagcccaccccucacugcagcc

SEQ ID NO: 19086 - RNA, 24 nt, Artificial Sequence
  Synthetic oligonucleotide: PDCD1-5597
uugagcccaccccucacugcagcc

SEQ ID NO: 19087 - RNA, 18 nt, Artificial Sequence
  Synthetic oligonucleotide: PDCD1-5598
agcccaggaaccugagcc

SEQ ID NO: 19088 - RNA, 19 nt, Artificial Sequence
  Synthetic oligonucleotide: PDCD1-5599
cagcccaggaaccugagcc

SEQ ID NO: 19089 - RNA, 20 nt, Artificial Sequence
  Synthetic oligonucleotide: PDCD1-1526
gcagcccaggaaccugagcc

SEQ ID NO: 19090 - RNA, 21 nt, Artificial Sequence
  Synthetic oligonucleotide: PDCD1-5600
ugcagcccaggaaccugagcc

SEQ ID NO: 19091 - RNA, 22 nt, Artificial Sequence
  Synthetic oligonucleotide: PDCD1-5601
cugcagcccaggaaccugagcc

SEQ ID NO: 19092 - RNA, 23 nt, Artificial Sequence
  Synthetic oligonucleotide: PDCD1-5602
acugcagcccaggaaccugagcc

SEQ ID NO: 19093 - RNA, 24 nt, Artificial Sequence
  Synthetic oligonucleotide: PDCD1-5603
cacugcagcccaggaaccugagcc

SEQ ID NO: 19094 - RNA, 18 nt, Artificial Sequence
  Synthetic oligonucleotide: PDCD1-5604
acagaggaggaaggggcc

SEQ ID NO: 19095 - RNA, 19 nt, Artificial Sequence
  Synthetic oligonucleotide: PDCD1-5605
cacagaggaggaaggggcc

SEQ ID NO: 19096 - RNA, 20 nt, Artificial Sequence
  Synthetic oligonucleotide: PDCD1-1482
acacagaggaggaaggggcc

SEQ ID NO: 19097 - RNA, 21 nt, Artificial Sequence
  Synthetic oligonucleotide: PDCD1-5606
gacacagaggaggaaggggcc

SEQ ID NO: 19098 - RNA, 22 nt, Artificial Sequence
  Synthetic oligonucleotide: PDCD1-5607
agacacagaggaggaaggggcc

SEQ ID NO: 19099 - RNA, 23 nt, Artificial Sequence
  Synthetic oligonucleotide: PDCD1-5608
gagacacagaggaggaaggggcc

SEQ ID NO: 19100 - RNA, 24 nt, Artificial Sequence
  Synthetic oligonucleotide: PDCD1-5609
agagacacagaggaggaaggggcc

SEQ ID NO: 19101 - RNA, 18 nt, Artificial Sequence
  Synthetic oligonucleotide: PDCD1-5610
ggguagggcgugggggcc

SEQ ID NO: 19102 - RNA, 19 nt, Artificial Sequence
  Synthetic oligonucleotide: PDCD1-5611
gggguagggcgugggggcc

SEQ ID NO: 19103 - RNA, 20 nt, Artificial Sequence
  Synthetic oligonucleotide: PDCD1-1471
cgggguagggcgugggggcc

SEQ ID NO: 19104 - RNA, 21 nt, Artificial Sequence
  Synthetic oligonucleotide: PDCD1-5612
acgggguagggcgugggggcc

SEQ ID NO: 19105 - RNA, 22 nt, Artificial Sequence
  Synthetic oligonucleotide: PDCD1-5613
cacgggguagggcgugggggcc

SEQ ID NO: 19106 - RNA, 23 nt, Artificial Sequence
  Synthetic oligonucleotide: PDCD1-5614
ccacgggguagggcgugggggcc

SEQ ID NO: 19107 - RNA, 24 nt, Artificial Sequence
  Synthetic oligonucleotide: PDCD1-5615
cccacgggguagggcgugggggcc

SEQ ID NO: 19108 - RNA, 18 nt, Artificial Sequence
  Synthetic oligonucleotide: PDCD1-5616
gggcagccgggaggcucc

SEQ ID NO: 19109 - RNA, 19 nt, Artificial Sequence
  Synthetic oligonucleotide: PDCD1-5617
ugggcagccgggaggcucc

SEQ ID NO: 19110 - RNA, 20 nt, Artificial Sequence
  Synthetic oligonucleotide: PDCD1-1910
gugggcagccgggaggcucc

SEQ ID NO: 19111 - RNA, 21 nt, Artificial Sequence
  Synthetic oligonucleotide: PDCD1-5618
ugugggcagccgggaggcucc

SEQ ID NO: 19112 - RNA, 22 nt, Artificial Sequence
  Synthetic oligonucleotide: PDCD1-5619
cugugggcagccgggaggcucc

SEQ ID NO: 19113 - RNA, 23 nt, Artificial Sequence
  Synthetic oligonucleotide: PDCD1-5620
gcugugggcagccgggaggcucc

SEQ ID NO: 19114 - RNA, 24 nt, Artificial Sequence
  Synthetic oligonucleotide: PDCD1-5621
ggcugugggcagccgggaggcucc

SEQ ID NO: 19115 - RNA, 18 nt, Artificial Sequence
  Synthetic oligonucleotide: PDCD1-5622
uccccucucagccggucc

SEQ ID NO: 19116 - RNA, 19 nt, Artificial Sequence
  Synthetic oligonucleotide: PDCD1-5623
guccccucucagccggucc

SEQ ID NO: 19117 - RNA, 20 nt, Artificial Sequence
  Synthetic oligonucleotide: PDCD1-1407
uguccccucucagccggucc

SEQ ID NO: 19118 - RNA, 21 nt, Artificial Sequence
  Synthetic oligonucleotide: PDCD1-5624
cuguccccucucagccggucc

SEQ ID NO: 19119 - RNA, 22 nt, Artificial Sequence
  Synthetic oligonucleotide: PDCD1-5625
ucuguccccucucagccggucc

SEQ ID NO: 19120 - RNA, 23 nt, Artificial Sequence
  Synthetic oligonucleotide: PDCD1-5626
cucuguccccucucagccggucc

SEQ ID NO: 19121 - RNA, 24 nt, Artificial Sequence
  Synthetic oligonucleotide: PDCD1-5627
ccucuguccccucucagccggucc

SEQ ID NO: 19122 - RNA, 18 nt, Artificial Sequence
  Synthetic oligonucleotide: PDCD1-5628
cuggcagcccaggggucc

SEQ ID NO: 19123 - RNA, 19 nt, Artificial Sequence
  Synthetic oligonucleotide: PDCD1-5629
ccuggcagcccaggggucc

SEQ ID NO: 19124 - RNA, 20 nt, Artificial Sequence
  Synthetic oligonucleotide: PDCD1-2185
cccuggcagcccaggggucc

SEQ ID NO: 19125 - RNA, 21 nt, Artificial Sequence
  Synthetic oligonucleotide: PDCD1-5630
gcccuggcagcccaggggucc

SEQ ID NO: 19126 - RNA, 22 nt, Artificial Sequence
  Synthetic oligonucleotide: PDCD1-5631
ggcccuggcagcccaggggucc

SEQ ID NO: 19127 - RNA, 23 nt, Artificial Sequence
  Synthetic oligonucleotide: PDCD1-5632
uggcccuggcagcccaggggucc

SEQ ID NO: 19128 - RNA, 24 nt, Artificial Sequence
  Synthetic oligonucleotide: PDCD1-5633
cuggcccuggcagcccaggggucc

SEQ ID NO: 19129 - RNA, 18 nt, Artificial Sequence
  Synthetic oligonucleotide: PDCD1-5634
gucggcggucaggugucc

SEQ ID NO: 19130 - RNA, 19 nt, Artificial Sequence
  Synthetic oligonucleotide: PDCD1-5635
ggucggcggucaggugucc

SEQ ID NO: 19131 - RNA, 20 nt, Artificial Sequence
  Synthetic oligonucleotide: PDCD1-1442
gggucggcggucaggugucc

SEQ ID NO: 19132 - RNA, 21 nt, Artificial Sequence
  Synthetic oligonucleotide: PDCD1-5636
ggggucggcggucaggugucc

SEQ ID NO: 19133 - RNA, 22 nt, Artificial Sequence
  Synthetic oligonucleotide: PDCD1-5637
uggggucggcggucaggugucc

SEQ ID NO: 19134 - RNA, 23 nt, Artificial Sequence
  Synthetic oligonucleotide: PDCD1-5638
guggggucggcggucaggugucc

SEQ ID NO: 19135 - RNA, 24 nt, Artificial Sequence
  Synthetic oligonucleotide: PDCD1-5639
gguggggucggcggucaggugucc

SEQ ID NO: 19136 - RNA, 18 nt, Artificial Sequence
  Synthetic oligonucleotide: PDCD1-5640
agccucaggaggggcagc

SEQ ID NO: 19137 - RNA, 19 nt, Artificial Sequence
  Synthetic oligonucleotide: PDCD1-5641
cagccucaggaggggcagc

SEQ ID NO: 19138 - RNA, 20 nt, Artificial Sequence
  Synthetic oligonucleotide: PDCD1-1497
gcagccucaggaggggcagc

SEQ ID NO: 19139 - RNA, 21 nt, Artificial Sequence
  Synthetic oligonucleotide: PDCD1-5642
ggcagccucaggaggggcagc

SEQ ID NO: 19140 - RNA, 22 nt, Artificial Sequence
  Synthetic oligonucleotide: PDCD1-5643
cggcagccucaggaggggcagc

SEQ ID NO: 19141 - RNA, 23 nt, Artificial Sequence
  Synthetic oligonucleotide: PDCD1-5644
ccggcagccucaggaggggcagc

SEQ ID NO: 19142 - RNA, 24 nt, Artificial Sequence
  Synthetic oligonucleotide: PDCD1-5645
cccggcagccucaggaggggcagc

SEQ ID NO: 19143 - RNA, 18 nt, Artificial Sequence
  Synthetic oligonucleotide: PDCD1-5646
uguguggcuuugggcagc

SEQ ID NO: 19144 - RNA, 19 nt, Artificial Sequence
  Synthetic oligonucleotide: PDCD1-5647
cuguguggcuuugggcagc

SEQ ID NO: 19145 - RNA, 20 nt, Artificial Sequence
  Synthetic oligonucleotide: PDCD1-1412
gcuguguggcuuugggcagc

SEQ ID NO: 19146 - RNA, 21 nt, Artificial Sequence
  Synthetic oligonucleotide: PDCD1-5648
agcuguguggcuuugggcagc

SEQ ID NO: 19147 - RNA, 22 nt, Artificial Sequence
  Synthetic oligonucleotide: PDCD1-5649
gagcuguguggcuuugggcagc

SEQ ID NO: 19148 - RNA, 23 nt, Artificial Sequence
  Synthetic oligonucleotide: PDCD1-5650
ugagcuguguggcuuugggcagc

SEQ ID NO: 19149 - RNA, 24 nt, Artificial Sequence
  Synthetic oligonucleotide: PDCD1-5651
cugagcuguguggcuuugggcagc

SEQ ID NO: 19150 - RNA, 18 nt, Artificial Sequence
  Synthetic oligonucleotide: PDCD1-5652
ggucaggugucccagagc

SEQ ID NO: 19151 - RNA, 19 nt, Artificial Sequence
  Synthetic oligonucleotide: PDCD1-5653
cggucaggugucccagagc

SEQ ID NO: 19152 - RNA, 20 nt, Artificial Sequence
  Synthetic oligonucleotide: PDCD1-1441
gcggucaggugucccagagc

SEQ ID NO: 19153 - RNA, 21 nt, Artificial Sequence
  Synthetic oligonucleotide: PDCD1-5654
ggcggucaggugucccagagc

SEQ ID NO: 19154 - RNA, 22 nt, Artificial Sequence
  Synthetic oligonucleotide: PDCD1-5655
cggcggucaggugucccagagc

SEQ ID NO: 19155 - RNA, 23 nt, Artificial Sequence
  Synthetic oligonucleotide: PDCD1-5656
ucggcggucaggugucccagagc

SEQ ID NO: 19156 - RNA, 24 nt, Artificial Sequence
  Synthetic oligonucleotide: PDCD1-5657
gucggcggucaggugucccagagc

SEQ ID NO: 19157 - RNA, 18 nt, Artificial Sequence
  Synthetic oligonucleotide: PDCD1-5658
gcccaggggucccggagc

SEQ ID NO: 19158 - RNA, 19 nt, Artificial Sequence
  Synthetic oligonucleotide: PDCD1-5659
agcccaggggucccggagc

SEQ ID NO: 19159 - RNA, 20 nt, Artificial Sequence
  Synthetic oligonucleotide: PDCD1-1424
cagcccaggggucccggagc

SEQ ID NO: 19160 - RNA, 21 nt, Artificial Sequence
  Synthetic oligonucleotide: PDCD1-5660
gcagcccaggggucccggagc

SEQ ID NO: 19161 - RNA, 22 nt, Artificial Sequence
  Synthetic oligonucleotide: PDCD1-5661
ggcagcccaggggucccggagc

SEQ ID NO: 19162 - RNA, 23 nt, Artificial Sequence
  Synthetic oligonucleotide: PDCD1-5662
uggcagcccaggggucccggagc

SEQ ID NO: 19163 - RNA, 24 nt, Artificial Sequence
  Synthetic oligonucleotide: PDCD1-5663
cuggcagcccaggggucccggagc

SEQ ID NO: 19164 - RNA, 18 nt, Artificial Sequence
  Synthetic oligonucleotide: PDCD1-5664
ggaagagggggcgggagc

SEQ ID NO: 19165 - RNA, 19 nt, Artificial Sequence
  Synthetic oligonucleotide: PDCD1-5665
aggaagagggggcgggagc

SEQ ID NO: 19166 - RNA, 20 nt, Artificial Sequence
  Synthetic oligonucleotide: PDCD1-1458
gaggaagagggggcgggagc

SEQ ID NO: 19167 - RNA, 21 nt, Artificial Sequence
  Synthetic oligonucleotide: PDCD1-5666
ggaggaagagggggcgggagc

SEQ ID NO: 19168 - RNA, 22 nt, Artificial Sequence
  Synthetic oligonucleotide: PDCD1-5667
uggaggaagagggggcgggagc

SEQ ID NO: 19169 - RNA, 23 nt, Artificial Sequence
  Synthetic oligonucleotide: PDCD1-5668
guggaggaagagggggcgggagc

SEQ ID NO: 19170 - RNA, 24 nt, Artificial Sequence
  Synthetic oligonucleotide: PDCD1-5669
uguggaggaagagggggcgggagc

SEQ ID NO: 19171 - RNA, 18 nt, Artificial Sequence
  Synthetic oligonucleotide: PDCD1-5670
gaggaaggggcccugagc

SEQ ID NO: 19172 - RNA, 19 nt, Artificial Sequence
  Synthetic oligonucleotide: PDCD1-5671
ggaggaaggggcccugagc

SEQ ID NO: 19173 - RNA, 20 nt, Artificial Sequence
  Synthetic oligonucleotide: PDCD1-2352
aggaggaaggggcccugagc

SEQ ID NO: 19174 - RNA, 21 nt, Artificial Sequence
  Synthetic oligonucleotide: PDCD1-5672
gaggaggaaggggcccugagc

SEQ ID NO: 19175 - RNA, 22 nt, Artificial Sequence
  Synthetic oligonucleotide: PDCD1-5673
agaggaggaaggggcccugagc

SEQ ID NO: 19176 - RNA, 23 nt, Artificial Sequence
  Synthetic oligonucleotide: PDCD1-5674
cagaggaggaaggggcccugagc

SEQ ID NO: 19177 - RNA, 24 nt, Artificial Sequence
  Synthetic oligonucleotide: PDCD1-5675
acagaggaggaaggggcccugagc

SEQ ID NO: 19178 - RNA, 18 nt, Artificial Sequence
  Synthetic oligonucleotide: PDCD1-5676
ccuuccgcucaccuccgc

SEQ ID NO: 19179 - RNA, 19 nt, Artificial Sequence
  Synthetic oligonucleotide: PDCD1-5677
cccuuccgcucaccuccgc

SEQ ID NO: 19180 - RNA, 20 nt, Artificial Sequence
  Synthetic oligonucleotide: PDCD1-1453
ucccuuccgcucaccuccgc

SEQ ID NO: 19181 - RNA, 21 nt, Artificial Sequence
  Synthetic oligonucleotide: PDCD1-5678
uucccuuccgcucaccuccgc

SEQ ID NO: 19182 - RNA, 22 nt, Artificial Sequence
  Synthetic oligonucleotide: PDCD1-5679
uuucccuuccgcucaccuccgc

SEQ ID NO: 19183 - RNA, 23 nt, Artificial Sequence
  Synthetic oligonucleotide: PDCD1-5680
guuucccuuccgcucaccuccgc

SEQ ID NO: 19184 - RNA, 24 nt, Artificial Sequence
  Synthetic oligonucleotide: PDCD1-5681
aguuucccuuccgcucaccuccgc

SEQ ID NO: 19185 - RNA, 18 nt, Artificial Sequence
  Synthetic oligonucleotide: PDCD1-5682
cacccaccuuccccaggc

SEQ ID NO: 19186 - RNA, 19 nt, Artificial Sequence
  Synthetic oligonucleotide: PDCD1-5683
ccacccaccuuccccaggc

SEQ ID NO: 19187 - RNA, 20 nt, Artificial Sequence
  Synthetic oligonucleotide: PDCD1-2317
gccacccaccuuccccaggc

SEQ ID NO: 19188 - RNA, 21 nt, Artificial Sequence
  Synthetic oligonucleotide: PDCD1-5684
ggccacccaccuuccccaggc

SEQ ID NO: 19189 - RNA, 22 nt, Artificial Sequence
  Synthetic oligonucleotide: PDCD1-5685
gggccacccaccuuccccaggc

SEQ ID NO: 19190 - RNA, 23 nt, Artificial Sequence
  Synthetic oligonucleotide: PDCD1-5686
ggggccacccaccuuccccaggc

SEQ ID NO: 19191 - RNA, 24 nt, Artificial Sequence
  Synthetic oligonucleotide: PDCD1-5687
gggggccacccaccuuccccaggc

SEQ ID NO: 19192 - RNA, 18 nt, Artificial Sequence
  Synthetic oligonucleotide: PDCD1-5688
acccccacgggguagggc

SEQ ID NO: 19193 - RNA, 19 nt, Artificial Sequence
  Synthetic oligonucleotide: PDCD1-5689
gacccccacgggguagggc

SEQ ID NO: 19194 - RNA, 20 nt, Artificial Sequence
  Synthetic oligonucleotide: PDCD1-1474
agacccccacgggguagggc

SEQ ID NO: 19195 - RNA, 21 nt, Artificial Sequence
  Synthetic oligonucleotide: PDCD1-5690
gagacccccacgggguagggc

SEQ ID NO: 19196 - RNA, 22 nt, Artificial Sequence
  Synthetic oligonucleotide: PDCD1-5691
ggagacccccacgggguagggc

SEQ ID NO: 19197 - RNA, 23 nt, Artificial Sequence
  Synthetic oligonucleotide: PDCD1-5692
gggagacccccacgggguagggc

SEQ ID NO: 19198 - RNA, 24 nt, Artificial Sequence
  Synthetic oligonucleotide: PDCD1-5693
ggggagacccccacgggguagggc

SEQ ID NO: 19199 - RNA, 18 nt, Artificial Sequence
  Synthetic oligonucleotide: PDCD1-5694
uguggaggaagagggggc

SEQ ID NO: 19200 - RNA, 19 nt, Artificial Sequence
  Synthetic oligonucleotide: PDCD1-5695
auguggaggaagagggggc

SEQ ID NO: 19201 - RNA, 20 nt, Artificial Sequence
  Synthetic oligonucleotide: PDCD1-2374
gauguggaggaagagggggc

SEQ ID NO: 19202 - RNA, 21 nt, Artificial Sequence
  Synthetic oligonucleotide: PDCD1-5696
ggauguggaggaagagggggc

SEQ ID NO: 19203 - RNA, 22 nt, Artificial Sequence
  Synthetic oligonucleotide: PDCD1-5697
uggauguggaggaagagggggc

SEQ ID NO: 19204 - RNA, 23 nt, Artificial Sequence
  Synthetic oligonucleotide: PDCD1-5698
guggauguggaggaagagggggc

SEQ ID NO: 19205 - RNA, 24 nt, Artificial Sequence
  Synthetic oligonucleotide: PDCD1-5699
cguggauguggaggaagagggggc

SEQ ID NO: 19206 - RNA, 18 nt, Artificial Sequence
  Synthetic oligonucleotide: PDCD1-5700
cccccacccggcagccuc

SEQ ID NO: 19207 - RNA, 19 nt, Artificial Sequence
  Synthetic oligonucleotide: PDCD1-5701
gcccccacccggcagccuc

SEQ ID NO: 19208 - RNA, 20 nt, Artificial Sequence
  Synthetic oligonucleotide: PDCD1-2337
ugcccccacccggcagccuc

SEQ ID NO: 19209 - RNA, 21 nt, Artificial Sequence
  Synthetic oligonucleotide: PDCD1-5702
cugcccccacccggcagccuc

SEQ ID NO: 19210 - RNA, 22 nt, Artificial Sequence
  Synthetic oligonucleotide: PDCD1-5703
ccugcccccacccggcagccuc

SEQ ID NO: 19211 - RNA, 23 nt, Artificial Sequence
  Synthetic oligonucleotide: PDCD1-5704
gccugcccccacccggcagccuc

SEQ ID NO: 19212 - RNA, 24 nt, Artificial Sequence
  Synthetic oligonucleotide: PDCD1-5705
ggccugcccccacccggcagccuc

SEQ ID NO: 19213 - RNA, 18 nt, Artificial Sequence
  Synthetic oligonucleotide: PDCD1-5706
caaguccccucuuugcuc

SEQ ID NO: 19214 - RNA, 19 nt, Artificial Sequence
  Synthetic oligonucleotide: PDCD1-5707
ccaaguccccucuuugcuc

SEQ ID NO: 19215 - RNA, 20 nt, Artificial Sequence
  Synthetic oligonucleotide: PDCD1-1409
cccaaguccccucuuugcuc

SEQ ID NO: 19216 - RNA, 21 nt, Artificial Sequence
  Synthetic oligonucleotide: PDCD1-5708
gcccaaguccccucuuugcuc

SEQ ID NO: 19217 - RNA, 22 nt, Artificial Sequence
  Synthetic oligonucleotide: PDCD1-5709
ggcccaaguccccucuuugcuc

SEQ ID NO: 19218 - RNA, 23 nt, Artificial Sequence
  Synthetic oligonucleotide: PDCD1-5710
uggcccaaguccccucuuugcuc

SEQ ID NO: 19219 - RNA, 24 nt, Artificial Sequence
  Synthetic oligonucleotide: PDCD1-5711
cuggcccaaguccccucuuugcuc

SEQ ID NO: 19220 - RNA, 18 nt, Artificial Sequence
  Synthetic oligonucleotide: PDCD1-5712
cucagucccuggcagguc

SEQ ID NO: 19221 - RNA, 19 nt, Artificial Sequence
  Synthetic oligonucleotide: PDCD1-5713
ccucagucccuggcagguc

SEQ ID NO: 19222 - RNA, 20 nt, Artificial Sequence
  Synthetic oligonucleotide: PDCD1-2173
cccucagucccuggcagguc

SEQ ID NO: 19223 - RNA, 21 nt, Artificial Sequence
  Synthetic oligonucleotide: PDCD1-5714
acccucagucccuggcagguc

SEQ ID NO: 19224 - RNA, 22 nt, Artificial Sequence
  Synthetic oligonucleotide: PDCD1-5715
cacccucagucccuggcagguc

SEQ ID NO: 19225 - RNA, 23 nt, Artificial Sequence
  Synthetic oligonucleotide: PDCD1-5716
ccacccucagucccuggcagguc

SEQ ID NO: 19226 - RNA, 24 nt, Artificial Sequence
  Synthetic oligonucleotide: PDCD1-5717
uccacccucagucccuggcagguc

SEQ ID NO: 19227 - RNA, 19 nt, Artificial Sequence
  Synthetic oligonucleotide: PDCD1-5718
ucucagucccuggcagguc

SEQ ID NO: 19228 - RNA, 20 nt, Artificial Sequence
  Synthetic oligonucleotide: PDCD1-2195
cucucagucccuggcagguc

SEQ ID NO: 19229 - RNA, 21 nt, Artificial Sequence
  Synthetic oligonucleotide: PDCD1-5719
acucucagucccuggcagguc

SEQ ID NO: 19230 - RNA, 22 nt, Artificial Sequence
  Synthetic oligonucleotide: PDCD1-5720
cacucucagucccuggcagguc

SEQ ID NO: 19231 - RNA, 23 nt, Artificial Sequence
  Synthetic oligonucleotide: PDCD1-5721
ucacucucagucccuggcagguc

SEQ ID NO: 19232 - RNA, 24 nt, Artificial Sequence
  Synthetic oligonucleotide: PDCD1-5722
uucacucucagucccuggcagguc

SEQ ID NO: 19233 - RNA, 18 nt, Artificial Sequence
  Synthetic oligonucleotide: PDCD1-5723
ccuggcagcccagggguc

SEQ ID NO: 19234 - RNA, 19 nt, Artificial Sequence
  Synthetic oligonucleotide: PDCD1-5724
cccuggcagcccagggguc

SEQ ID NO: 19235 - RNA, 20 nt, Artificial Sequence
  Synthetic oligonucleotide: PDCD1-1427
gcccuggcagcccagggguc

SEQ ID NO: 19236 - RNA, 21 nt, Artificial Sequence
  Synthetic oligonucleotide: PDCD1-5725
ggcccuggcagcccagggguc

SEQ ID NO: 19237 - RNA, 22 nt, Artificial Sequence
  Synthetic oligonucleotide: PDCD1-5726
uggcccuggcagcccagggguc

SEQ ID NO: 19238 - RNA, 23 nt, Artificial Sequence
  Synthetic oligonucleotide: PDCD1-5727
cuggcccuggcagcccagggguc

SEQ ID NO: 19239 - RNA, 24 nt, Artificial Sequence
  Synthetic oligonucleotide: PDCD1-5728
ccuggcccuggcagcccagggguc

SEQ ID NO: 19240 - RNA, 18 nt, Artificial Sequence
  Synthetic oligonucleotide: PDCD1-5729
gucccagagccagggguc

SEQ ID NO: 19241 - RNA, 19 nt, Artificial Sequence
  Synthetic oligonucleotide: PDCD1-5730
ugucccagagccagggguc

SEQ ID NO: 19242 - RNA, 20 nt, Artificial Sequence
  Synthetic oligonucleotide: PDCD1-2167
gugucccagagccagggguc

SEQ ID NO: 19243 - RNA, 21 nt, Artificial Sequence
  Synthetic oligonucleotide: PDCD1-5731
ggugucccagagccagggguc

SEQ ID NO: 19244 - RNA, 22 nt, Artificial Sequence
  Synthetic oligonucleotide: PDCD1-5732
aggugucccagagccagggguc

SEQ ID NO: 19245 - RNA, 23 nt, Artificial Sequence
  Synthetic oligonucleotide: PDCD1-5733
caggugucccagagccagggguc

SEQ ID NO: 19246 - RNA, 24 nt, Artificial Sequence
  Synthetic oligonucleotide: PDCD1-5734
ucaggugucccagagccagggguc

SEQ ID NO: 19247 - RNA, 18 nt, Artificial Sequence
  Synthetic oligonucleotide: PDCD1-5735
gucccggagcgagggguc

SEQ ID NO: 19248 - RNA, 19 nt, Artificial Sequence
  Synthetic oligonucleotide: PDCD1-5736
ggucccggagcgagggguc

SEQ ID NO: 19249 - RNA, 20 nt, Artificial Sequence
  Synthetic oligonucleotide: PDCD1-2189
gggucccggagcgagggguc

SEQ ID NO: 19250 - RNA, 21 nt, Artificial Sequence
  Synthetic oligonucleotide: PDCD1-5737
ggggucccggagcgagggguc

SEQ ID NO: 19251 - RNA, 22 nt, Artificial Sequence
  Synthetic oligonucleotide: PDCD1-5738
aggggucccggagcgagggguc

SEQ ID NO: 19252 - RNA, 23 nt, Artificial Sequence
  Synthetic oligonucleotide: PDCD1-5739
caggggucccggagcgagggguc

SEQ ID NO: 19253 - RNA, 24 nt, Artificial Sequence
  Synthetic oligonucleotide: PDCD1-5740
ccaggggucccggagcgagggguc

SEQ ID NO: 19254 - RNA, 18 nt, Artificial Sequence
  Synthetic oligonucleotide: PDCD1-5741
acguggauguggaggaag

SEQ ID NO: 19255 - RNA, 19 nt, Artificial Sequence
  Synthetic oligonucleotide: PDCD1-5742
cacguggauguggaggaag

SEQ ID NO: 19256 - RNA, 20 nt, Artificial Sequence
  Synthetic oligonucleotide: PDCD1-2369
ccacguggauguggaggaag

SEQ ID NO: 19257 - RNA, 21 nt, Artificial Sequence
  Synthetic oligonucleotide: PDCD1-5743
cccacguggauguggaggaag

SEQ ID NO: 19258 - RNA, 22 nt, Artificial Sequence
  Synthetic oligonucleotide: PDCD1-5744
gcccacguggauguggaggaag

SEQ ID NO: 19259 - RNA, 23 nt, Artificial Sequence
  Synthetic oligonucleotide: PDCD1-5745
cgcccacguggauguggaggaag

SEQ ID NO: 19260 - RNA, 24 nt, Artificial Sequence
  Synthetic oligonucleotide: PDCD1-5746
ucgcccacguggauguggaggaag

SEQ ID NO: 19261 - RNA, 18 nt, Artificial Sequence
  Synthetic oligonucleotide: PDCD1-5747
cagugagcagagacacag

SEQ ID NO: 19262 - RNA, 19 nt, Artificial Sequence
  Synthetic oligonucleotide: PDCD1-5748
gcagugagcagagacacag

SEQ ID NO: 19263 - RNA, 20 nt, Artificial Sequence
  Synthetic oligonucleotide: PDCD1-2347
agcagugagcagagacacag

SEQ ID NO: 19264 - RNA, 21 nt, Artificial Sequence
  Synthetic oligonucleotide: PDCD1-5749
cagcagugagcagagacacag

SEQ ID NO: 19265 - RNA, 22 nt, Artificial Sequence
  Synthetic oligonucleotide: PDCD1-5750
acagcagugagcagagacacag

SEQ ID NO: 19266 - RNA, 23 nt, Artificial Sequence
  Synthetic oligonucleotide: PDCD1-5751
cacagcagugagcagagacacag

SEQ ID NO: 19267 - RNA, 24 nt, Artificial Sequence
  Synthetic oligonucleotide: PDCD1-5752
ccacagcagugagcagagacacag

SEQ ID NO: 19268 - RNA, 18 nt, Artificial Sequence
  Synthetic oligonucleotide: PDCD1-5753
ccaggaaccugagcccag

SEQ ID NO: 19269 - RNA, 19 nt, Artificial Sequence
  Synthetic oligonucleotide: PDCD1-5754
cccaggaaccugagcccag

SEQ ID NO: 19270 - RNA, 20 nt, Artificial Sequence
  Synthetic oligonucleotide: PDCD1-2312
gcccaggaaccugagcccag

SEQ ID NO: 19271 - RNA, 21 nt, Artificial Sequence
  Synthetic oligonucleotide: PDCD1-5755
agcccaggaaccugagcccag

SEQ ID NO: 19272 - RNA, 22 nt, Artificial Sequence
  Synthetic oligonucleotide: PDCD1-5756
cagcccaggaaccugagcccag

SEQ ID NO: 19273 - RNA, 23 nt, Artificial Sequence
  Synthetic oligonucleotide: PDCD1-5757
gcagcccaggaaccugagcccag

SEQ ID NO: 19274 - RNA, 24 nt, Artificial Sequence
  Synthetic oligonucleotide: PDCD1-5758
ugcagcccaggaaccugagcccag

SEQ ID NO: 19275 - RNA, 18 nt, Artificial Sequence
  Synthetic oligonucleotide: PDCD1-5759
ucaccuccgccugagcag

SEQ ID NO: 19276 - RNA, 19 nt, Artificial Sequence
  Synthetic oligonucleotide: PDCD1-5760
cucaccuccgccugagcag

SEQ ID NO: 19277 - RNA, 20 nt, Artificial Sequence
  Synthetic oligonucleotide: PDCD1-2382
gcucaccuccgccugagcag

SEQ ID NO: 19278 - RNA, 21 nt, Artificial Sequence
  Synthetic oligonucleotide: PDCD1-5761
cgcucaccuccgccugagcag

SEQ ID NO: 19279 - RNA, 22 nt, Artificial Sequence
  Synthetic oligonucleotide: PDCD1-5762
ccgcucaccuccgccugagcag

SEQ ID NO: 19280 - RNA, 23 nt, Artificial Sequence
  Synthetic oligonucleotide: PDCD1-5763
uccgcucaccuccgccugagcag

SEQ ID NO: 19281 - RNA, 24 nt, Artificial Sequence
  Synthetic oligonucleotide: PDCD1-5764
uuccgcucaccuccgccugagcag

SEQ ID NO: 19282 - RNA, 18 nt, Artificial Sequence
  Synthetic oligonucleotide: PDCD1-5765
cccacccggcagccucag

SEQ ID NO: 19283 - RNA, 19 nt, Artificial Sequence
  Synthetic oligonucleotide: PDCD1-5766
ccccacccggcagccucag

SEQ ID NO: 19284 - RNA, 20 nt, Artificial Sequence
  Synthetic oligonucleotide: PDCD1-1499
cccccacccggcagccucag

SEQ ID NO: 19285 - RNA, 21 nt, Artificial Sequence
  Synthetic oligonucleotide: PDCD1-5767
gcccccacccggcagccucag

SEQ ID NO: 19286 - RNA, 22 nt, Artificial Sequence
  Synthetic oligonucleotide: PDCD1-5768
ugcccccacccggcagccucag

SEQ ID NO: 19287 - RNA, 23 nt, Artificial Sequence
  Synthetic oligonucleotide: PDCD1-5769
cugcccccacccggcagccucag

SEQ ID NO: 19288 - RNA, 24 nt, Artificial Sequence
  Synthetic oligonucleotide: PDCD1-5770
ccugcccccacccggcagccucag

SEQ ID NO: 19289 - RNA, 18 nt, Artificial Sequence
  Synthetic oligonucleotide: PDCD1-5771
gugagcagagacacagag

SEQ ID NO: 19290 - RNA, 19 nt, Artificial Sequence
  Synthetic oligonucleotide: PDCD1-5772
agugagcagagacacagag

SEQ ID NO: 19291 - RNA, 20 nt, Artificial Sequence
  Synthetic oligonucleotide: PDCD1-1486
cagugagcagagacacagag

SEQ ID NO: 19292 - RNA, 21 nt, Artificial Sequence
  Synthetic oligonucleotide: PDCD1-5773
gcagugagcagagacacagag

SEQ ID NO: 19293 - RNA, 22 nt, Artificial Sequence
  Synthetic oligonucleotide: PDCD1-5774
agcagugagcagagacacagag

SEQ ID NO: 19294 - RNA, 23 nt, Artificial Sequence
  Synthetic oligonucleotide: PDCD1-5775
cagcagugagcagagacacagag

SEQ ID NO: 19295 - RNA, 24 nt, Artificial Sequence
  Synthetic oligonucleotide: PDCD1-5776
acagcagugagcagagacacagag

SEQ ID NO: 19296 - RNA, 18 nt, Artificial Sequence
  Synthetic oligonucleotide: PDCD1-5777
ggggggaugggggaggag

SEQ ID NO: 19297 - RNA, 19 nt, Artificial Sequence
  Synthetic oligonucleotide: PDCD1-5778
gggggggaugggggaggag

SEQ ID NO: 19298 - RNA, 20 nt, Artificial Sequence
  Synthetic oligonucleotide: PDCD1-1502
ugggggggaugggggaggag

SEQ ID NO: 19299 - RNA, 21 nt, Artificial Sequence
  Synthetic oligonucleotide: PDCD1-5779
augggggggaugggggaggag

SEQ ID NO: 19300 - RNA, 22 nt, Artificial Sequence
  Synthetic oligonucleotide: PDCD1-5780
gaugggggggaugggggaggag

SEQ ID NO: 19301 - RNA, 23 nt, Artificial Sequence
  Synthetic oligonucleotide: PDCD1-5781
agaugggggggaugggggaggag

SEQ ID NO: 19302 - RNA, 24 nt, Artificial Sequence
  Synthetic oligonucleotide: PDCD1-5782
gagaugggggggaugggggaggag

SEQ ID NO: 19303 - RNA, 18 nt, Artificial Sequence
  Synthetic oligonucleotide: PDCD1-5783
ggcccggcccccagggag

SEQ ID NO: 19304 - RNA, 19 nt, Artificial Sequence
  Synthetic oligonucleotide: PDCD1-5784
aggcccggcccccagggag

SEQ ID NO: 19305 - RNA, 20 nt, Artificial Sequence
  Synthetic oligonucleotide: PDCD1-1516
gaggcccggcccccagggag

SEQ ID NO: 19306 - RNA, 21 nt, Artificial Sequence
  Synthetic oligonucleotide: PDCD1-5785
ggaggcccggcccccagggag

SEQ ID NO: 19307 - RNA, 22 nt, Artificial Sequence
  Synthetic oligonucleotide: PDCD1-5786
gggaggcccggcccccagggag

SEQ ID NO: 19308 - RNA, 23 nt, Artificial Sequence
  Synthetic oligonucleotide: PDCD1-5787
agggaggcccggcccccagggag

SEQ ID NO: 19309 - RNA, 24 nt, Artificial Sequence
  Synthetic oligonucleotide: PDCD1-5788
cagggaggcccggcccccagggag

SEQ ID NO: 19310 - RNA, 18 nt, Artificial Sequence
  Synthetic oligonucleotide: PDCD1-5789
augggggggaugggggag

SEQ ID NO: 19311 - RNA, 19 nt, Artificial Sequence
  Synthetic oligonucleotide: PDCD1-5790
gaugggggggaugggggag

SEQ ID NO: 19312 - RNA, 20 nt, Artificial Sequence
  Synthetic oligonucleotide: PDCD1-1503
agaugggggggaugggggag

SEQ ID NO: 19313 - RNA, 21 nt, Artificial Sequence
  Synthetic oligonucleotide: PDCD1-5791
gagaugggggggaugggggag

SEQ ID NO: 19314 - RNA, 22 nt, Artificial Sequence
  Synthetic oligonucleotide: PDCD1-5792
ggagaugggggggaugggggag

SEQ ID NO: 19315 - RNA, 23 nt, Artificial Sequence
  Synthetic oligonucleotide: PDCD1-5793
gggagaugggggggaugggggag

SEQ ID NO: 19316 - RNA, 24 nt, Artificial Sequence
  Synthetic oligonucleotide: PDCD1-5794
agggagaugggggggaugggggag

SEQ ID NO: 19317 - RNA, 18 nt, Artificial Sequence
  Synthetic oligonucleotide: PDCD1-5795
ggaggaaggggcccugag

SEQ ID NO: 19318 - RNA, 19 nt, Artificial Sequence
  Synthetic oligonucleotide: PDCD1-5796
aggaggaaggggcccugag

SEQ ID NO: 19319 - RNA, 20 nt, Artificial Sequence
  Synthetic oligonucleotide: PDCD1-1481
gaggaggaaggggcccugag

SEQ ID NO: 19320 - RNA, 21 nt, Artificial Sequence
  Synthetic oligonucleotide: PDCD1-5797
agaggaggaaggggcccugag

SEQ ID NO: 19321 - RNA, 22 nt, Artificial Sequence
  Synthetic oligonucleotide: PDCD1-5798
cagaggaggaaggggcccugag

SEQ ID NO: 19322 - RNA, 23 nt, Artificial Sequence
  Synthetic oligonucleotide: PDCD1-5799
acagaggaggaaggggcccugag

SEQ ID NO: 19323 - RNA, 24 nt, Artificial Sequence
  Synthetic oligonucleotide: PDCD1-5800
cacagaggaggaaggggcccugag

SEQ ID NO: 19324 - RNA, 18 nt, Artificial Sequence
  Synthetic oligonucleotide: PDCD1-5801
aggucggggggugcugag

SEQ ID NO: 19325 - RNA, 19 nt, Artificial Sequence
  Synthetic oligonucleotide: PDCD1-5802
caggucggggggugcugag

SEQ ID NO: 19326 - RNA, 20 nt, Artificial Sequence
  Synthetic oligonucleotide: PDCD1-1430
gcaggucggggggugcugag

SEQ ID NO: 19327 - RNA, 21 nt, Artificial Sequence
  Synthetic oligonucleotide: PDCD1-5803
ggcaggucggggggugcugag

SEQ ID NO: 19328 - RNA, 22 nt, Artificial Sequence
  Synthetic oligonucleotide: PDCD1-5804
uggcaggucggggggugcugag

SEQ ID NO: 19329 - RNA, 23 nt, Artificial Sequence
  Synthetic oligonucleotide: PDCD1-5805
cuggcaggucggggggugcugag

SEQ ID NO: 19330 - RNA, 24 nt, Artificial Sequence
  Synthetic oligonucleotide: PDCD1-5806
ccuggcaggucggggggugcugag

SEQ ID NO: 19331 - RNA, 18 nt, Artificial Sequence
  Synthetic oligonucleotide: PDCD1-5807
agaggccacagcagugag

SEQ ID NO: 19332 - RNA, 19 nt, Artificial Sequence
  Synthetic oligonucleotide: PDCD1-5808
aagaggccacagcagugag

SEQ ID NO: 19333 - RNA, 20 nt, Artificial Sequence
  Synthetic oligonucleotide: PDCD1-1490
aaagaggccacagcagugag

SEQ ID NO: 19334 - RNA, 21 nt, Artificial Sequence
  Synthetic oligonucleotide: PDCD1-5809
gaaagaggccacagcagugag

SEQ ID NO: 19335 - RNA, 22 nt, Artificial Sequence
  Synthetic oligonucleotide: PDCD1-5810
ggaaagaggccacagcagugag

SEQ ID NO: 19336 - RNA, 23 nt, Artificial Sequence
  Synthetic oligonucleotide: PDCD1-5811
uggaaagaggccacagcagugag

SEQ ID NO: 19337 - RNA, 24 nt, Artificial Sequence
  Synthetic oligonucleotide: PDCD1-5812
auggaaagaggccacagcagugag

SEQ ID NO: 19338 - RNA, 18 nt, Artificial Sequence
  Synthetic oligonucleotide: PDCD1-3692
aggaugguucuuagguag

SEQ ID NO: 19339 - RNA, 19 nt, Artificial Sequence
  Synthetic oligonucleotide: PDCD1-3693
caggaugguucuuagguag

SEQ ID NO: 19340 - RNA, 20 nt, Artificial Sequence
  Synthetic oligonucleotide: PDCD1-532
ccaggaugguucuuagguag

SEQ ID NO: 19341 - RNA, 21 nt, Artificial Sequence
  Synthetic oligonucleotide: PDCD1-3694
gccaggaugguucuuagguag

SEQ ID NO: 19342 - RNA, 22 nt, Artificial Sequence
  Synthetic oligonucleotide: PDCD1-3695
ggccaggaugguucuuagguag

SEQ ID NO: 19343 - RNA, 23 nt, Artificial Sequence
  Synthetic oligonucleotide: PDCD1-3696
cggccaggaugguucuuagguag

SEQ ID NO: 19344 - RNA, 24 nt, Artificial Sequence
  Synthetic oligonucleotide: PDCD1-3697
gcggccaggaugguucuuagguag

SEQ ID NO: 19345 - RNA, 18 nt, Artificial Sequence
  Synthetic oligonucleotide: PDCD1-5813
cccccacgggguagggcg

SEQ ID NO: 19346 - RNA, 19 nt, Artificial Sequence
  Synthetic oligonucleotide: PDCD1-5814
acccccacgggguagggcg

SEQ ID NO: 19347 - RNA, 20 nt, Artificial Sequence
  Synthetic oligonucleotide: PDCD1-2360
gacccccacgggguagggcg

SEQ ID NO: 19348 - RNA, 21 nt, Artificial Sequence
  Synthetic oligonucleotide: PDCD1-5815
agacccccacgggguagggcg

SEQ ID NO: 19349 - RNA, 22 nt, Artificial Sequence
  Synthetic oligonucleotide: PDCD1-5816
gagacccccacgggguagggcg

SEQ ID NO: 19350 - RNA, 23 nt, Artificial Sequence
  Synthetic oligonucleotide: PDCD1-5817
ggagacccccacgggguagggcg

SEQ ID NO: 19351 - RNA, 24 nt, Artificial Sequence
  Synthetic oligonucleotide: PDCD1-5818
gggagacccccacgggguagggcg

SEQ ID NO: 19352 - RNA, 18 nt, Artificial Sequence
  Synthetic oligonucleotide: PDCD1-5819
ccacccaccuuccccagg

SEQ ID NO: 19353 - RNA, 19 nt, Artificial Sequence
  Synthetic oligonucleotide: PDCD1-5820
gccacccaccuuccccagg

SEQ ID NO: 19354 - RNA, 20 nt, Artificial Sequence
  Synthetic oligonucleotide: PDCD1-1522
ggccacccaccuuccccagg

SEQ ID NO: 19355 - RNA, 21 nt, Artificial Sequence
  Synthetic oligonucleotide: PDCD1-5821
gggccacccaccuuccccagg

SEQ ID NO: 19356 - RNA, 22 nt, Artificial Sequence
  Synthetic oligonucleotide: PDCD1-5822
ggggccacccaccuuccccagg

SEQ ID NO: 19357 - RNA, 23 nt, Artificial Sequence
  Synthetic oligonucleotide: PDCD1-5823
gggggccacccaccuuccccagg

SEQ ID NO: 19358 - RNA, 24 nt, Artificial Sequence
  Synthetic oligonucleotide: PDCD1-5824
agggggccacccaccuuccccagg

SEQ ID NO: 19359 - RNA, 18 nt, Artificial Sequence
  Synthetic oligonucleotide: PDCD1-5825
ucuuugcuccugggcagg

SEQ ID NO: 19360 - RNA, 19 nt, Artificial Sequence
  Synthetic oligonucleotide: PDCD1-5826
cucuuugcuccugggcagg

SEQ ID NO: 19361 - RNA, 20 nt, Artificial Sequence
  Synthetic oligonucleotide: PDCD1-1408
ccucuuugcuccugggcagg

SEQ ID NO: 19362 - RNA, 21 nt, Artificial Sequence
  Synthetic oligonucleotide: PDCD1-5827
cccucuuugcuccugggcagg

SEQ ID NO: 19363 - RNA, 22 nt, Artificial Sequence
  Synthetic oligonucleotide: PDCD1-5828
ccccucuuugcuccugggcagg

SEQ ID NO: 19364 - RNA, 23 nt, Artificial Sequence
  Synthetic oligonucleotide: PDCD1-5829
uccccucuuugcuccugggcagg

SEQ ID NO: 19365 - RNA, 24 nt, Artificial Sequence
  Synthetic oligonucleotide: PDCD1-5830
guccccucuuugcuccugggcagg

SEQ ID NO: 19366 - RNA, 18 nt, Artificial Sequence
  Synthetic oligonucleotide: PDCD1-5831
cccucagucccuggcagg

SEQ ID NO: 19367 - RNA, 19 nt, Artificial Sequence
  Synthetic oligonucleotide: PDCD1-5832
acccucagucccuggcagg

SEQ ID NO: 19368 - RNA, 20 nt, Artificial Sequence
  Synthetic oligonucleotide: PDCD1-1435
cacccucagucccuggcagg

SEQ ID NO: 19369 - RNA, 21 nt, Artificial Sequence
  Synthetic oligonucleotide: PDCD1-5833
ccacccucagucccuggcagg

SEQ ID NO: 19370 - RNA, 22 nt, Artificial Sequence
  Synthetic oligonucleotide: PDCD1-5834
uccacccucagucccuggcagg

SEQ ID NO: 19371 - RNA, 23 nt, Artificial Sequence
  Synthetic oligonucleotide: PDCD1-5835
uuccacccucagucccuggcagg

SEQ ID NO: 19372 - RNA, 24 nt, Artificial Sequence
  Synthetic oligonucleotide: PDCD1-5836
cuuccacccucagucccuggcagg

SEQ ID NO: 19373 - RNA, 18 nt, Artificial Sequence
  Synthetic oligonucleotide: PDCD1-5837
cucucagucccuggcagg

SEQ ID NO: 19374 - RNA, 19 nt, Artificial Sequence
  Synthetic oligonucleotide: PDCD1-5838
acucucagucccuggcagg

SEQ ID NO: 19375 - RNA, 20 nt, Artificial Sequence
  Synthetic oligonucleotide: PDCD1-1418
cacucucagucccuggcagg

SEQ ID NO: 19376 - RNA, 21 nt, Artificial Sequence
  Synthetic oligonucleotide: PDCD1-5839
ucacucucagucccuggcagg

SEQ ID NO: 19377 - RNA, 22 nt, Artificial Sequence
  Synthetic oligonucleotide: PDCD1-5840
uucacucucagucccuggcagg

SEQ ID NO: 19378 - RNA, 23 nt, Artificial Sequence
  Synthetic oligonucleotide: PDCD1-5841
uuucacucucagucccuggcagg

SEQ ID NO: 19379 - RNA, 24 nt, Artificial Sequence
  Synthetic oligonucleotide: PDCD1-5842
cuuucacucucagucccuggcagg

SEQ ID NO: 19380 - RNA, 18 nt, Artificial Sequence
  Synthetic oligonucleotide: PDCD1-5843
ccacccggcagccucagg

SEQ ID NO: 19381 - RNA, 19 nt, Artificial Sequence
  Synthetic oligonucleotide: PDCD1-5844
cccacccggcagccucagg

SEQ ID NO: 19382 - RNA, 20 nt, Artificial Sequence
  Synthetic oligonucleotide: PDCD1-2338
ccccacccggcagccucagg

SEQ ID NO: 19383 - RNA, 21 nt, Artificial Sequence
  Synthetic oligonucleotide: PDCD1-5845
cccccacccggcagccucagg

SEQ ID NO: 19384 - RNA, 22 nt, Artificial Sequence
  Synthetic oligonucleotide: PDCD1-5846
gcccccacccggcagccucagg

SEQ ID NO: 19385 - RNA, 23 nt, Artificial Sequence
  Synthetic oligonucleotide: PDCD1-5847
ugcccccacccggcagccucagg

SEQ ID NO: 19386 - RNA, 24 nt, Artificial Sequence
  Synthetic oligonucleotide: PDCD1-5848
cugcccccacccggcagccucagg

SEQ ID NO: 19387 - RNA, 18 nt, Artificial Sequence
  Synthetic oligonucleotide: PDCD1-5849
ugagcagagacacagagg

SEQ ID NO: 19388 - RNA, 19 nt, Artificial Sequence
  Synthetic oligonucleotide: PDCD1-5850
gugagcagagacacagagg

SEQ ID NO: 19389 - RNA, 20 nt, Artificial Sequence
  Synthetic oligonucleotide: PDCD1-2348
agugagcagagacacagagg

SEQ ID NO: 19390 - RNA, 21 nt, Artificial Sequence
  Synthetic oligonucleotide: PDCD1-5851
cagugagcagagacacagagg

SEQ ID NO: 19391 - RNA, 22 nt, Artificial Sequence
  Synthetic oligonucleotide: PDCD1-5852
gcagugagcagagacacagagg

SEQ ID NO: 19392 - RNA, 23 nt, Artificial Sequence
  Synthetic oligonucleotide: PDCD1-5853
agcagugagcagagacacagagg

SEQ ID NO: 19393 - RNA, 24 nt, Artificial Sequence
  Synthetic oligonucleotide: PDCD1-5854
cagcagugagcagagacacagagg

SEQ ID NO: 19394 - RNA, 18 nt, Artificial Sequence
  Synthetic oligonucleotide: PDCD1-5855
gcagagacacagaggagg

SEQ ID NO: 19395 - RNA, 19 nt, Artificial Sequence
  Synthetic oligonucleotide: PDCD1-5856
agcagagacacagaggagg

SEQ ID NO: 19396 - RNA, 20 nt, Artificial Sequence
  Synthetic oligonucleotide: PDCD1-1484
gagcagagacacagaggagg

SEQ ID NO: 19397 - RNA, 21 nt, Artificial Sequence
  Synthetic oligonucleotide: PDCD1-5857
ugagcagagacacagaggagg

SEQ ID NO: 19398 - RNA, 22 nt, Artificial Sequence
  Synthetic oligonucleotide: PDCD1-5858
gugagcagagacacagaggagg

SEQ ID NO: 19399 - RNA, 23 nt, Artificial Sequence
  Synthetic oligonucleotide: PDCD1-5859
agugagcagagacacagaggagg

SEQ ID NO: 19400 - RNA, 24 nt, Artificial Sequence
  Synthetic oligonucleotide: PDCD1-5860
cagugagcagagacacagaggagg

SEQ ID NO: 19401 - RNA, 18 nt, Artificial Sequence
  Synthetic oligonucleotide: PDCD1-5861
cccacguggauguggagg

SEQ ID NO: 19402 - RNA, 19 nt, Artificial Sequence
  Synthetic oligonucleotide: PDCD1-5862
gcccacguggauguggagg

SEQ ID NO: 19403 - RNA, 20 nt, Artificial Sequence
  Synthetic oligonucleotide: PDCD1-1465
cgcccacguggauguggagg

SEQ ID NO: 19404 - RNA, 21 nt, Artificial Sequence
  Synthetic oligonucleotide: PDCD1-5863
ucgcccacguggauguggagg

SEQ ID NO: 19405 - RNA, 22 nt, Artificial Sequence
  Synthetic oligonucleotide: PDCD1-5864
cucgcccacguggauguggagg

SEQ ID NO: 19406 - RNA, 23 nt, Artificial Sequence
  Synthetic oligonucleotide: PDCD1-5865
ucucgcccacguggauguggagg

SEQ ID NO: 19407 - RNA, 24 nt, Artificial Sequence
  Synthetic oligonucleotide: PDCD1-5866
cucucgcccacguggauguggagg

SEQ ID NO: 19408 - RNA, 18 nt, Artificial Sequence
  Synthetic oligonucleotide: PDCD1-5867
ucaggaggggcagcucgg

SEQ ID NO: 19409 - RNA, 19 nt, Artificial Sequence
  Synthetic oligonucleotide: PDCD1-5868
cucaggaggggcagcucgg

SEQ ID NO: 19410 - RNA, 20 nt, Artificial Sequence
  Synthetic oligonucleotide: PDCD1-1496
ccucaggaggggcagcucgg

SEQ ID NO: 19411 - RNA, 21 nt, Artificial Sequence
  Synthetic oligonucleotide: PDCD1-5869
gccucaggaggggcagcucgg

SEQ ID NO: 19412 - RNA, 22 nt, Artificial Sequence
  Synthetic oligonucleotide: PDCD1-5870
agccucaggaggggcagcucgg

SEQ ID NO: 19413 - RNA, 23 nt, Artificial Sequence
  Synthetic oligonucleotide: PDCD1-5871
cagccucaggaggggcagcucgg

SEQ ID NO: 19414 - RNA, 24 nt, Artificial Sequence
  Synthetic oligonucleotide: PDCD1-5872
gcagccucaggaggggcagcucgg

SEQ ID NO: 19415 - RNA, 18 nt, Artificial Sequence
  Synthetic oligonucleotide: PDCD1-5873
agggggcgggagcaaggg

SEQ ID NO: 19416 - RNA, 19 nt, Artificial Sequence
  Synthetic oligonucleotide: PDCD1-5874
gagggggcgggagcaaggg

SEQ ID NO: 19417 - RNA, 20 nt, Artificial Sequence
  Synthetic oligonucleotide: PDCD1-1456
agagggggcgggagcaaggg

SEQ ID NO: 19418 - RNA, 21 nt, Artificial Sequence
  Synthetic oligonucleotide: PDCD1-5875
aagagggggcgggagcaaggg

SEQ ID NO: 19419 - RNA, 22 nt, Artificial Sequence
  Synthetic oligonucleotide: PDCD1-5876
gaagagggggcgggagcaaggg

SEQ ID NO: 19420 - RNA, 23 nt, Artificial Sequence
  Synthetic oligonucleotide: PDCD1-5877
ggaagagggggcgggagcaaggg

SEQ ID NO: 19421 - RNA, 24 nt, Artificial Sequence
  Synthetic oligonucleotide: PDCD1-5878
aggaagagggggcgggagcaaggg

SEQ ID NO: 19422 - RNA, 18 nt, Artificial Sequence
  Synthetic oligonucleotide: PDCD1-5879
gauguggaggaagagggg

SEQ ID NO: 19423 - RNA, 19 nt, Artificial Sequence
  Synthetic oligonucleotide: PDCD1-5880
ggauguggaggaagagggg

SEQ ID NO: 19424 - RNA, 20 nt, Artificial Sequence
  Synthetic oligonucleotide: PDCD1-1461
uggauguggaggaagagggg

SEQ ID NO: 19425 - RNA, 21 nt, Artificial Sequence
  Synthetic oligonucleotide: PDCD1-5881
guggauguggaggaagagggg

SEQ ID NO: 19426 - RNA, 22 nt, Artificial Sequence
  Synthetic oligonucleotide: PDCD1-5882
cguggauguggaggaagagggg

SEQ ID NO: 19427 - RNA, 23 nt, Artificial Sequence
  Synthetic oligonucleotide: PDCD1-5883
acguggauguggaggaagagggg

SEQ ID NO: 19428 - RNA, 24 nt, Artificial Sequence
  Synthetic oligonucleotide: PDCD1-5884
cacguggauguggaggaagagggg

SEQ ID NO: 19429 - RNA, 18 nt, Artificial Sequence
  Synthetic oligonucleotide: PDCD1-5885
ggggagacccccacgggg

SEQ ID NO: 19430 - RNA, 19 nt, Artificial Sequence
  Synthetic oligonucleotide: PDCD1-5886
uggggagacccccacgggg

SEQ ID NO: 19431 - RNA, 20 nt, Artificial Sequence
  Synthetic oligonucleotide: PDCD1-1475
cuggggagacccccacgggg

SEQ ID NO: 19432 - RNA, 21 nt, Artificial Sequence
  Synthetic oligonucleotide: PDCD1-5887
gcuggggagacccccacgggg

SEQ ID NO: 19433 - RNA, 22 nt, Artificial Sequence
  Synthetic oligonucleotide: PDCD1-5888
agcuggggagacccccacgggg

SEQ ID NO: 19434 - RNA, 23 nt, Artificial Sequence
  Synthetic oligonucleotide: PDCD1-5889
gagcuggggagacccccacgggg

SEQ ID NO: 19435 - RNA, 24 nt, Artificial Sequence
  Synthetic oligonucleotide: PDCD1-5890
ugagcuggggagacccccacgggg

SEQ ID NO: 19436 - RNA, 18 nt, Artificial Sequence
  Synthetic oligonucleotide: PDCD1-5891
auguggaggaagaggggg

SEQ ID NO: 19437 - RNA, 19 nt, Artificial Sequence
  Synthetic oligonucleotide: PDCD1-5892
gauguggaggaagaggggg

SEQ ID NO: 19438 - RNA, 20 nt, Artificial Sequence
  Synthetic oligonucleotide: PDCD1-2373
ggauguggaggaagaggggg

SEQ ID NO: 19439 - RNA, 21 nt, Artificial Sequence
  Synthetic oligonucleotide: PDCD1-5893
uggauguggaggaagaggggg

SEQ ID NO: 19440 - RNA, 22 nt, Artificial Sequence
  Synthetic oligonucleotide: PDCD1-5894
guggauguggaggaagaggggg

SEQ ID NO: 19441 - RNA, 23 nt, Artificial Sequence
  Synthetic oligonucleotide: PDCD1-5895
cguggauguggaggaagaggggg

SEQ ID NO: 19442 - RNA, 24 nt, Artificial Sequence
  Synthetic oligonucleotide: PDCD1-5896
acguggauguggaggaagaggggg

SEQ ID NO: 19443 - RNA, 18 nt, Artificial Sequence
  Synthetic oligonucleotide: PDCD1-5897
cccagggagauggggggg

SEQ ID NO: 19444 - RNA, 19 nt, Artificial Sequence
  Synthetic oligonucleotide: PDCD1-5898
ccccagggagauggggggg

SEQ ID NO: 19445 - RNA, 20 nt, Artificial Sequence
  Synthetic oligonucleotide: PDCD1-1510
cccccagggagauggggggg

SEQ ID NO: 19446 - RNA, 21 nt, Artificial Sequence
  Synthetic oligonucleotide: PDCD1-5899
gcccccagggagauggggggg

SEQ ID NO: 19447 - RNA, 22 nt, Artificial Sequence
  Synthetic oligonucleotide: PDCD1-5900
ggcccccagggagauggggggg

SEQ ID NO: 19448 - RNA, 23 nt, Artificial Sequence
  Synthetic oligonucleotide: PDCD1-5901
cggcccccagggagauggggggg

SEQ ID NO: 19449 - RNA, 24 nt, Artificial Sequence
  Synthetic oligonucleotide: PDCD1-5902
ccggcccccagggagauggggggg

SEQ ID NO: 19450 - RNA, 18 nt, Artificial Sequence
  Synthetic oligonucleotide: PDCD1-5903
agaugggggggauggggg

SEQ ID NO: 19451 - RNA, 19 nt, Artificial Sequence
  Synthetic oligonucleotide: PDCD1-5904
gagaugggggggauggggg

SEQ ID NO: 19452 - RNA, 20 nt, Artificial Sequence
  Synthetic oligonucleotide: PDCD1-2333
ggagaugggggggauggggg

SEQ ID NO: 19453 - RNA, 21 nt, Artificial Sequence
  Synthetic oligonucleotide: PDCD1-5905
gggagaugggggggauggggg

SEQ ID NO: 19454 - RNA, 22 nt, Artificial Sequence
  Synthetic oligonucleotide: PDCD1-5906
agggagaugggggggauggggg

SEQ ID NO: 19455 - RNA, 23 nt, Artificial Sequence
  Synthetic oligonucleotide: PDCD1-5907
cagggagaugggggggauggggg

SEQ ID NO: 19456 - RNA, 24 nt, Artificial Sequence
  Synthetic oligonucleotide: PDCD1-5908
ccagggagaugggggggauggggg

SEQ ID NO: 19457 - RNA, 18 nt, Artificial Sequence
  Synthetic oligonucleotide: PDCD1-5909
gagaugggggggaugggg

SEQ ID NO: 19458 - RNA, 19 nt, Artificial Sequence
  Synthetic oligonucleotide: PDCD1-5910
ggagaugggggggaugggg

SEQ ID NO: 19459 - RNA, 20 nt, Artificial Sequence
  Synthetic oligonucleotide: PDCD1-1505
gggagaugggggggaugggg

SEQ ID NO: 19460 - RNA, 21 nt, Artificial Sequence
  Synthetic oligonucleotide: PDCD1-5911
agggagaugggggggaugggg

SEQ ID NO: 19461 - RNA, 22 nt, Artificial Sequence
  Synthetic oligonucleotide: PDCD1-5912
cagggagaugggggggaugggg

SEQ ID NO: 19462 - RNA, 23 nt, Artificial Sequence
  Synthetic oligonucleotide: PDCD1-5913
ccagggagaugggggggaugggg

SEQ ID NO: 19463 - RNA, 24 nt, Artificial Sequence
  Synthetic oligonucleotide: PDCD1-5914
cccagggagaugggggggaugggg

SEQ ID NO: 19464 - RNA, 18 nt, Artificial Sequence
  Synthetic oligonucleotide: PDCD1-5915
gacagaaugggagugggg

SEQ ID NO: 19465 - RNA, 19 nt, Artificial Sequence
  Synthetic oligonucleotide: PDCD1-5916
cgacagaaugggagugggg

SEQ ID NO: 19466 - RNA, 20 nt, Artificial Sequence
  Synthetic oligonucleotide: PDCD1-1903
ccgacagaaugggagugggg

SEQ ID NO: 19467 - RNA, 21 nt, Artificial Sequence
  Synthetic oligonucleotide: PDCD1-5917
uccgacagaaugggagugggg

SEQ ID NO: 19468 - RNA, 22 nt, Artificial Sequence
  Synthetic oligonucleotide: PDCD1-5918
cuccgacagaaugggagugggg

SEQ ID NO: 19469 - RNA, 23 nt, Artificial Sequence
  Synthetic oligonucleotide: PDCD1-5919
gcuccgacagaaugggagugggg

SEQ ID NO: 19470 - RNA, 24 nt, Artificial Sequence
  Synthetic oligonucleotide: PDCD1-5920
ggcuccgacagaaugggagugggg

SEQ ID NO: 19471 - RNA, 18 nt, Artificial Sequence
  Synthetic oligonucleotide: PDCD1-5921
cggcccccagggagaugg

SEQ ID NO: 19472 - RNA, 19 nt, Artificial Sequence
  Synthetic oligonucleotide: PDCD1-5922
ccggcccccagggagaugg

SEQ ID NO: 19473 - RNA, 20 nt, Artificial Sequence
  Synthetic oligonucleotide: PDCD1-2326
cccggcccccagggagaugg

SEQ ID NO: 19474 - RNA, 21 nt, Artificial Sequence
  Synthetic oligonucleotide: PDCD1-5923
gcccggcccccagggagaugg

SEQ ID NO: 19475 - RNA, 22 nt, Artificial Sequence
  Synthetic oligonucleotide: PDCD1-5924
ggcccggcccccagggagaugg

SEQ ID NO: 19476 - RNA, 23 nt, Artificial Sequence
  Synthetic oligonucleotide: PDCD1-5925
aggcccggcccccagggagaugg

SEQ ID NO: 19477 - RNA, 24 nt, Artificial Sequence
  Synthetic oligonucleotide: PDCD1-5926
gaggcccggcccccagggagaugg

SEQ ID NO: 19478 - RNA, 18 nt, Artificial Sequence
  Synthetic oligonucleotide: PDCD1-5927
gggagaugggggggaugg

SEQ ID NO: 19479 - RNA, 19 nt, Artificial Sequence
  Synthetic oligonucleotide: PDCD1-5928
agggagaugggggggaugg

SEQ ID NO: 19480 - RNA, 20 nt, Artificial Sequence
  Synthetic oligonucleotide: PDCD1-2332
cagggagaugggggggaugg

SEQ ID NO: 19481 - RNA, 21 nt, Artificial Sequence
  Synthetic oligonucleotide: PDCD1-5929
ccagggagaugggggggaugg

SEQ ID NO: 19482 - RNA, 22 nt, Artificial Sequence
  Synthetic oligonucleotide: PDCD1-5930
cccagggagaugggggggaugg

SEQ ID NO: 19483 - RNA, 23 nt, Artificial Sequence
  Synthetic oligonucleotide: PDCD1-5931
ccccagggagaugggggggaugg

SEQ ID NO: 19484 - RNA, 24 nt, Artificial Sequence
  Synthetic oligonucleotide: PDCD1-5932
cccccagggagaugggggggaugg

SEQ ID NO: 19485 - RNA, 18 nt, Artificial Sequence
  Synthetic oligonucleotide: PDCD1-5933
gagaaggcggcacucugg

SEQ ID NO: 19486 - RNA, 19 nt, Artificial Sequence
  Synthetic oligonucleotide: PDCD1-5934
ggagaaggcggcacucugg

SEQ ID NO: 19487 - RNA, 20 nt, Artificial Sequence
  Synthetic oligonucleotide: PDCD1-2386
uggagaaggcggcacucugg

SEQ ID NO: 19488 - RNA, 21 nt, Artificial Sequence
  Synthetic oligonucleotide: PDCD1-5935
guggagaaggcggcacucugg

SEQ ID NO: 19489 - RNA, 22 nt, Artificial Sequence
  Synthetic oligonucleotide: PDCD1-5936
aguggagaaggcggcacucugg

SEQ ID NO: 19490 - RNA, 23 nt, Artificial Sequence
  Synthetic oligonucleotide: PDCD1-5937
caguggagaaggcggcacucugg

SEQ ID NO: 19491 - RNA, 24 nt, Artificial Sequence
  Synthetic oligonucleotide: PDCD1-5938
gcaguggagaaggcggcacucugg

SEQ ID NO: 19492 - RNA, 18 nt, Artificial Sequence
  Synthetic oligonucleotide: PDCD1-5939
ccagagccaggggucugg

SEQ ID NO: 19493 - RNA, 19 nt, Artificial Sequence
  Synthetic oligonucleotide: PDCD1-5940
cccagagccaggggucugg

SEQ ID NO: 19494 - RNA, 20 nt, Artificial Sequence
  Synthetic oligonucleotide: PDCD1-2168
ucccagagccaggggucugg

SEQ ID NO: 19495 - RNA, 21 nt, Artificial Sequence
  Synthetic oligonucleotide: PDCD1-5941
gucccagagccaggggucugg

SEQ ID NO: 19496 - RNA, 22 nt, Artificial Sequence
  Synthetic oligonucleotide: PDCD1-5942
ugucccagagccaggggucugg

SEQ ID NO: 19497 - RNA, 23 nt, Artificial Sequence
  Synthetic oligonucleotide: PDCD1-5943
gugucccagagccaggggucugg

SEQ ID NO: 19498 - RNA, 24 nt, Artificial Sequence
  Synthetic oligonucleotide: PDCD1-5944
ggugucccagagccaggggucugg

SEQ ID NO: 19499 - RNA, 18 nt, Artificial Sequence
  Synthetic oligonucleotide: PDCD1-5945
ccggagcgaggggucugg

SEQ ID NO: 19500 - RNA, 19 nt, Artificial Sequence
  Synthetic oligonucleotide: PDCD1-5946
cccggagcgaggggucugg

SEQ ID NO: 19501 - RNA, 20 nt, Artificial Sequence
  Synthetic oligonucleotide: PDCD1-2190
ucccggagcgaggggucugg

SEQ ID NO: 19502 - RNA, 21 nt, Artificial Sequence
  Synthetic oligonucleotide: PDCD1-5947
gucccggagcgaggggucugg

SEQ ID NO: 19503 - RNA, 22 nt, Artificial Sequence
  Synthetic oligonucleotide: PDCD1-5948
ggucccggagcgaggggucugg

SEQ ID NO: 19504 - RNA, 23 nt, Artificial Sequence
  Synthetic oligonucleotide: PDCD1-5949
gggucccggagcgaggggucugg

SEQ ID NO: 19505 - RNA, 24 nt, Artificial Sequence
  Synthetic oligonucleotide: PDCD1-5950
ggggucccggagcgaggggucugg

SEQ ID NO: 19506 - RNA, 18 nt, Artificial Sequence
  Synthetic oligonucleotide: PDCD1-5951
ucgcccacguggaugugg

SEQ ID NO: 19507 - RNA, 19 nt, Artificial Sequence
  Synthetic oligonucleotide: PDCD1-5952
cucgcccacguggaugugg

SEQ ID NO: 19508 - RNA, 20 nt, Artificial Sequence
  Synthetic oligonucleotide: PDCD1-2368
ucucgcccacguggaugugg

SEQ ID NO: 19509 - RNA, 21 nt, Artificial Sequence
  Synthetic oligonucleotide: PDCD1-5953
cucucgcccacguggaugugg

SEQ ID NO: 19510 - RNA, 22 nt, Artificial Sequence
  Synthetic oligonucleotide: PDCD1-5954
acucucgcccacguggaugugg

SEQ ID NO: 19511 - RNA, 23 nt, Artificial Sequence
  Synthetic oligonucleotide: PDCD1-5955
cacucucgcccacguggaugugg

SEQ ID NO: 19512 - RNA, 24 nt, Artificial Sequence
  Synthetic oligonucleotide: PDCD1-5956
ucacucucgcccacguggaugugg

SEQ ID NO: 19513 - RNA, 18 nt, Artificial Sequence
  Synthetic oligonucleotide: PDCD1-5957
ccggcccccagggagaug

SEQ ID NO: 19514 - RNA, 19 nt, Artificial Sequence
  Synthetic oligonucleotide: PDCD1-5958
cccggcccccagggagaug

SEQ ID NO: 19515 - RNA, 20 nt, Artificial Sequence
  Synthetic oligonucleotide: PDCD1-2325
gcccggcccccagggagaug

SEQ ID NO: 19516 - RNA, 21 nt, Artificial Sequence
  Synthetic oligonucleotide: PDCD1-5959
ggcccggcccccagggagaug

SEQ ID NO: 19517 - RNA, 22 nt, Artificial Sequence
  Synthetic oligonucleotide: PDCD1-5960
aggcccggcccccagggagaug

SEQ ID NO: 19518 - RNA, 23 nt, Artificial Sequence
  Synthetic oligonucleotide: PDCD1-5961
gaggcccggcccccagggagaug

SEQ ID NO: 19519 - RNA, 24 nt, Artificial Sequence
  Synthetic oligonucleotide: PDCD1-5962
ggaggcccggcccccagggagaug

SEQ ID NO: 19520 - RNA, 18 nt, Artificial Sequence
  Synthetic oligonucleotide: PDCD1-5963
agggagaugggggggaug

SEQ ID NO: 19521 - RNA, 19 nt, Artificial Sequence
  Synthetic oligonucleotide: PDCD1-5964
cagggagaugggggggaug

SEQ ID NO: 19522 - RNA, 20 nt, Artificial Sequence
  Synthetic oligonucleotide: PDCD1-2331
ccagggagaugggggggaug

SEQ ID NO: 19523 - RNA, 21 nt, Artificial Sequence
  Synthetic oligonucleotide: PDCD1-5965
cccagggagaugggggggaug

SEQ ID NO: 19524 - RNA, 22 nt, Artificial Sequence
  Synthetic oligonucleotide: PDCD1-5966
ccccagggagaugggggggaug

SEQ ID NO: 19525 - RNA, 23 nt, Artificial Sequence
  Synthetic oligonucleotide: PDCD1-5967
cccccagggagaugggggggaug

SEQ ID NO: 19526 - RNA, 24 nt, Artificial Sequence
  Synthetic oligonucleotide: PDCD1-5968
gcccccagggagaugggggggaug

SEQ ID NO: 19527 - RNA, 18 nt, Artificial Sequence
  Synthetic oligonucleotide: PDCD1-5969
cucucgcccacguggaug

SEQ ID NO: 19528 - RNA, 19 nt, Artificial Sequence
  Synthetic oligonucleotide: PDCD1-5970
acucucgcccacguggaug

SEQ ID NO: 19529 - RNA, 20 nt, Artificial Sequence
  Synthetic oligonucleotide: PDCD1-2367
cacucucgcccacguggaug

SEQ ID NO: 19530 - RNA, 21 nt, Artificial Sequence
  Synthetic oligonucleotide: PDCD1-5971
ucacucucgcccacguggaug

SEQ ID NO: 19531 - RNA, 22 nt, Artificial Sequence
  Synthetic oligonucleotide: PDCD1-5972
gucacucucgcccacguggaug

SEQ ID NO: 19532 - RNA, 23 nt, Artificial Sequence
  Synthetic oligonucleotide: PDCD1-5973
ugucacucucgcccacguggaug

SEQ ID NO: 19533 - RNA, 24 nt, Artificial Sequence
  Synthetic oligonucleotide: PDCD1-5974
cugucacucucgcccacguggaug

SEQ ID NO: 19534 - RNA, 18 nt, Artificial Sequence
  Synthetic oligonucleotide: PDCD1-5975
ggaaggggcccugagcug

SEQ ID NO: 19535 - RNA, 19 nt, Artificial Sequence
  Synthetic oligonucleotide: PDCD1-5976
aggaaggggcccugagcug

SEQ ID NO: 19536 - RNA, 20 nt, Artificial Sequence
  Synthetic oligonucleotide: PDCD1-2354
gaggaaggggcccugagcug

SEQ ID NO: 19537 - RNA, 21 nt, Artificial Sequence
  Synthetic oligonucleotide: PDCD1-5977
ggaggaaggggcccugagcug

SEQ ID NO: 19538 - RNA, 22 nt, Artificial Sequence
  Synthetic oligonucleotide: PDCD1-5978
aggaggaaggggcccugagcug

SEQ ID NO: 19539 - RNA, 23 nt, Artificial Sequence
  Synthetic oligonucleotide: PDCD1-5979
gaggaggaaggggcccugagcug

SEQ ID NO: 19540 - RNA, 24 nt, Artificial Sequence
  Synthetic oligonucleotide: PDCD1-5980
agaggaggaaggggcccugagcug

SEQ ID NO: 19541 - RNA, 18 nt, Artificial Sequence
  Synthetic oligonucleotide: PDCD1-5981
ggagaaggcggcacucug

SEQ ID NO: 19542 - RNA, 19 nt, Artificial Sequence
  Synthetic oligonucleotide: PDCD1-5982
uggagaaggcggcacucug

SEQ ID NO: 19543 - RNA, 20 nt, Artificial Sequence
  Synthetic oligonucleotide: PDCD1-1449
guggagaaggcggcacucug

SEQ ID NO: 19544 - RNA, 21 nt, Artificial Sequence
  Synthetic oligonucleotide: PDCD1-5983
aguggagaaggcggcacucug

SEQ ID NO: 19545 - RNA, 22 nt, Artificial Sequence
  Synthetic oligonucleotide: PDCD1-5984
caguggagaaggcggcacucug

SEQ ID NO: 19546 - RNA, 23 nt, Artificial Sequence
  Synthetic oligonucleotide: PDCD1-5985
gcaguggagaaggcggcacucug

SEQ ID NO: 19547 - RNA, 24 nt, Artificial Sequence
  Synthetic oligonucleotide: PDCD1-5986
agcaguggagaaggcggcacucug

SEQ ID NO: 19548 - RNA, 18 nt, Artificial Sequence
  Synthetic oligonucleotide: PDCD1-5987
cccagagccaggggucug

SEQ ID NO: 19549 - RNA, 19 nt, Artificial Sequence
  Synthetic oligonucleotide: PDCD1-5988
ucccagagccaggggucug

SEQ ID NO: 19550 - RNA, 20 nt, Artificial Sequence
  Synthetic oligonucleotide: PDCD1-1437
gucccagagccaggggucug

SEQ ID NO: 19551 - RNA, 21 nt, Artificial Sequence
  Synthetic oligonucleotide: PDCD1-5989
ugucccagagccaggggucug

SEQ ID NO: 19552 - RNA, 22 nt, Artificial Sequence
  Synthetic oligonucleotide: PDCD1-5990
gugucccagagccaggggucug

SEQ ID NO: 19553 - RNA, 23 nt, Artificial Sequence
  Synthetic oligonucleotide: PDCD1-5991
ggugucccagagccaggggucug

SEQ ID NO: 19554 - RNA, 24 nt, Artificial Sequence
  Synthetic oligonucleotide: PDCD1-5992
aggugucccagagccaggggucug

SEQ ID NO: 19555 - RNA, 18 nt, Artificial Sequence
  Synthetic oligonucleotide: PDCD1-5993
cccggagcgaggggucug

SEQ ID NO: 19556 - RNA, 19 nt, Artificial Sequence
  Synthetic oligonucleotide: PDCD1-5994
ucccggagcgaggggucug

SEQ ID NO: 19557 - RNA, 20 nt, Artificial Sequence
  Synthetic oligonucleotide: PDCD1-1420
gucccggagcgaggggucug

SEQ ID NO: 19558 - RNA, 21 nt, Artificial Sequence
  Synthetic oligonucleotide: PDCD1-5995
ggucccggagcgaggggucug

SEQ ID NO: 19559 - RNA, 22 nt, Artificial Sequence
  Synthetic oligonucleotide: PDCD1-5996
gggucccggagcgaggggucug

SEQ ID NO: 19560 - RNA, 23 nt, Artificial Sequence
  Synthetic oligonucleotide: PDCD1-5997
ggggucccggagcgaggggucug

SEQ ID NO: 19561 - RNA, 24 nt, Artificial Sequence
  Synthetic oligonucleotide: PDCD1-5998
aggggucccggagcgaggggucug

SEQ ID NO: 19562 - RNA, 18 nt, Artificial Sequence
  Synthetic oligonucleotide: PDCD1-5999
accuccgccugagcagug

SEQ ID NO: 19563 - RNA, 19 nt, Artificial Sequence
  Synthetic oligonucleotide: PDCD1-6000
caccuccgccugagcagug

SEQ ID NO: 19564 - RNA, 20 nt, Artificial Sequence
  Synthetic oligonucleotide: PDCD1-1450
ucaccuccgccugagcagug

SEQ ID NO: 19565 - RNA, 21 nt, Artificial Sequence
  Synthetic oligonucleotide: PDCD1-6001
cucaccuccgccugagcagug

SEQ ID NO: 19566 - RNA, 22 nt, Artificial Sequence
  Synthetic oligonucleotide: PDCD1-6002
gcucaccuccgccugagcagug

SEQ ID NO: 19567 - RNA, 23 nt, Artificial Sequence
  Synthetic oligonucleotide: PDCD1-6003
cgcucaccuccgccugagcagug

SEQ ID NO: 19568 - RNA, 24 nt, Artificial Sequence
  Synthetic oligonucleotide: PDCD1-6004
ccgcucaccuccgccugagcagug

SEQ ID NO: 19569 - RNA, 18 nt, Artificial Sequence
  Synthetic oligonucleotide: PDCD1-6005
cuggcaggucggggggug

SEQ ID NO: 19570 - RNA, 19 nt, Artificial Sequence
  Synthetic oligonucleotide: PDCD1-6006
ccuggcaggucggggggug

SEQ ID NO: 19571 - RNA, 20 nt, Artificial Sequence
  Synthetic oligonucleotide: PDCD1-1431
cccuggcaggucggggggug

SEQ ID NO: 19572 - RNA, 21 nt, Artificial Sequence
  Synthetic oligonucleotide: PDCD1-6007
ucccuggcaggucggggggug

SEQ ID NO: 19573 - RNA, 22 nt, Artificial Sequence
  Synthetic oligonucleotide: PDCD1-6008
gucccuggcaggucggggggug

SEQ ID NO: 19574 - RNA, 23 nt, Artificial Sequence
  Synthetic oligonucleotide: PDCD1-6009
agucccuggcaggucggggggug

SEQ ID NO: 19575 - RNA, 24 nt, Artificial Sequence
  Synthetic oligonucleotide: PDCD1-6010
cagucccuggcaggucggggggug

SEQ ID NO: 19576 - RNA, 18 nt, Artificial Sequence
  Synthetic oligonucleotide: PDCD1-6011
cucgcccacguggaugug

SEQ ID NO: 19577 - RNA, 19 nt, Artificial Sequence
  Synthetic oligonucleotide: PDCD1-6012
ucucgcccacguggaugug

SEQ ID NO: 19578 - RNA, 20 nt, Artificial Sequence
  Synthetic oligonucleotide: PDCD1-1467
cucucgcccacguggaugug

SEQ ID NO: 19579 - RNA, 21 nt, Artificial Sequence
  Synthetic oligonucleotide: PDCD1-6013
acucucgcccacguggaugug

SEQ ID NO: 19580 - RNA, 22 nt, Artificial Sequence
  Synthetic oligonucleotide: PDCD1-6014
cacucucgcccacguggaugug

SEQ ID NO: 19581 - RNA, 23 nt, Artificial Sequence
  Synthetic oligonucleotide: PDCD1-6015
ucacucucgcccacguggaugug

SEQ ID NO: 19582 - RNA, 24 nt, Artificial Sequence
  Synthetic oligonucleotide: PDCD1-6016
gucacucucgcccacguggaugug

SEQ ID NO: 19583 - RNA, 18 nt, Artificial Sequence
  Synthetic oligonucleotide: PDCD1-6017
cccggcccccagggagau

SEQ ID NO: 19584 - RNA, 19 nt, Artificial Sequence
  Synthetic oligonucleotide: PDCD1-6018
gcccggcccccagggagau

SEQ ID NO: 19585 - RNA, 20 nt, Artificial Sequence
  Synthetic oligonucleotide: PDCD1-2324
ggcccggcccccagggagau

SEQ ID NO: 19586 - RNA, 21 nt, Artificial Sequence
  Synthetic oligonucleotide: PDCD1-6019
aggcccggcccccagggagau

SEQ ID NO: 19587 - RNA, 22 nt, Artificial Sequence
  Synthetic oligonucleotide: PDCD1-6020
gaggcccggcccccagggagau

SEQ ID NO: 19588 - RNA, 23 nt, Artificial Sequence
  Synthetic oligonucleotide: PDCD1-6021
ggaggcccggcccccagggagau

SEQ ID NO: 19589 - RNA, 24 nt, Artificial Sequence
  Synthetic oligonucleotide: PDCD1-6022
gggaggcccggcccccagggagau

SEQ ID NO: 19590 - RNA, 18 nt, Artificial Sequence
  Synthetic oligonucleotide: PDCD1-6023
gggcagcucgggcgggau

SEQ ID NO: 19591 - RNA, 19 nt, Artificial Sequence
  Synthetic oligonucleotide: PDCD1-6024
ggggcagcucgggcgggau

SEQ ID NO: 19592 - RNA, 20 nt, Artificial Sequence
  Synthetic oligonucleotide: PDCD1-1494
aggggcagcucgggcgggau

SEQ ID NO: 19593 - RNA, 21 nt, Artificial Sequence
  Synthetic oligonucleotide: PDCD1-6025
gaggggcagcucgggcgggau

SEQ ID NO: 19594 - RNA, 22 nt, Artificial Sequence
  Synthetic oligonucleotide: PDCD1-6026
ggaggggcagcucgggcgggau

SEQ ID NO: 19595 - RNA, 23 nt, Artificial Sequence
  Synthetic oligonucleotide: PDCD1-6027
aggaggggcagcucgggcgggau

SEQ ID NO: 19596 - RNA, 24 nt, Artificial Sequence
  Synthetic oligonucleotide: PDCD1-6028
caggaggggcagcucgggcgggau

SEQ ID NO: 19597 - RNA, 18 nt, Artificial Sequence
  Synthetic oligonucleotide: PDCD1-6029
cagggagaugggggggau

SEQ ID NO: 19598 - RNA, 19 nt, Artificial Sequence
  Synthetic oligonucleotide: PDCD1-6030
ccagggagaugggggggau

SEQ ID NO: 19599 - RNA, 20 nt, Artificial Sequence
  Synthetic oligonucleotide: PDCD1-2330
cccagggagaugggggggau

SEQ ID NO: 19600 - RNA, 21 nt, Artificial Sequence
  Synthetic oligonucleotide: PDCD1-6031
ccccagggagaugggggggau

SEQ ID NO: 19601 - RNA, 22 nt, Artificial Sequence
  Synthetic oligonucleotide: PDCD1-6032
cccccagggagaugggggggau

SEQ ID NO: 19602 - RNA, 23 nt, Artificial Sequence
  Synthetic oligonucleotide: PDCD1-6033
gcccccagggagaugggggggau

SEQ ID NO: 19603 - RNA, 24 nt, Artificial Sequence
  Synthetic oligonucleotide: PDCD1-6034
ggcccccagggagaugggggggau

SEQ ID NO: 19604 - RNA, 18 nt, Artificial Sequence
  Synthetic oligonucleotide: PDCD1-6035
acucucgcccacguggau

SEQ ID NO: 19605 - RNA, 19 nt, Artificial Sequence
  Synthetic oligonucleotide: PDCD1-6036
cacucucgcccacguggau

SEQ ID NO: 19606 - RNA, 20 nt, Artificial Sequence
  Synthetic oligonucleotide: PDCD1-1469
ucacucucgcccacguggau

SEQ ID NO: 19607 - RNA, 21 nt, Artificial Sequence
  Synthetic oligonucleotide: PDCD1-6037
gucacucucgcccacguggau

SEQ ID NO: 19608 - RNA, 22 nt, Artificial Sequence
  Synthetic oligonucleotide: PDCD1-6038
ugucacucucgcccacguggau

SEQ ID NO: 19609 - RNA, 23 nt, Artificial Sequence
  Synthetic oligonucleotide: PDCD1-6039
cugucacucucgcccacguggau

SEQ ID NO: 19610 - RNA, 24 nt, Artificial Sequence
  Synthetic oligonucleotide: PDCD1-6040
ucugucacucucgcccacguggau

SEQ ID NO: 19611 - RNA, 18 nt, Artificial Sequence
  Synthetic oligonucleotide: PDCD1-6041
gcccccacccggcagccu

SEQ ID NO: 19612 - RNA, 19 nt, Artificial Sequence
  Synthetic oligonucleotide: PDCD1-6042
ugcccccacccggcagccu

SEQ ID NO: 19613 - RNA, 20 nt, Artificial Sequence
  Synthetic oligonucleotide: PDCD1-1501
cugcccccacccggcagccu

SEQ ID NO: 19614 - RNA, 21 nt, Artificial Sequence
  Synthetic oligonucleotide: PDCD1-6043
ccugcccccacccggcagccu

SEQ ID NO: 19615 - RNA, 22 nt, Artificial Sequence
  Synthetic oligonucleotide: PDCD1-6044
gccugcccccacccggcagccu

SEQ ID NO: 19616 - RNA, 23 nt, Artificial Sequence
  Synthetic oligonucleotide: PDCD1-6045
ggccugcccccacccggcagccu

SEQ ID NO: 19617 - RNA, 24 nt, Artificial Sequence
  Synthetic oligonucleotide: PDCD1-6046
gggccugcccccacccggcagccu

SEQ ID NO: 19618 - RNA, 18 nt, Artificial Sequence
  Synthetic oligonucleotide: PDCD1-6047
ccccucucagccgguccu

SEQ ID NO: 19619 - RNA, 19 nt, Artificial Sequence
  Synthetic oligonucleotide: PDCD1-6048
uccccucucagccgguccu

SEQ ID NO: 19620 - RNA, 20 nt, Artificial Sequence
  Synthetic oligonucleotide: PDCD1-2215
guccccucucagccgguccu

SEQ ID NO: 19621 - RNA, 21 nt, Artificial Sequence
  Synthetic oligonucleotide: PDCD1-6049
uguccccucucagccgguccu

SEQ ID NO: 19622 - RNA, 22 nt, Artificial Sequence
  Synthetic oligonucleotide: PDCD1-6050
cuguccccucucagccgguccu

SEQ ID NO: 19623 - RNA, 23 nt, Artificial Sequence
  Synthetic oligonucleotide: PDCD1-6051
ucuguccccucucagccgguccu

SEQ ID NO: 19624 - RNA, 24 nt, Artificial Sequence
  Synthetic oligonucleotide: PDCD1-6052
cucuguccccucucagccgguccu

SEQ ID NO: 19625 - RNA, 18 nt, Artificial Sequence
  Synthetic oligonucleotide: PDCD1-6053
aggaaggggcccugagcu

SEQ ID NO: 19626 - RNA, 19 nt, Artificial Sequence
  Synthetic oligonucleotide: PDCD1-6054
gaggaaggggcccugagcu

SEQ ID NO: 19627 - RNA, 20 nt, Artificial Sequence
  Synthetic oligonucleotide: PDCD1-2353
ggaggaaggggcccugagcu

SEQ ID NO: 19628 - RNA, 21 nt, Artificial Sequence
  Synthetic oligonucleotide: PDCD1-6055
aggaggaaggggcccugagcu

SEQ ID NO: 19629 - RNA, 22 nt, Artificial Sequence
  Synthetic oligonucleotide: PDCD1-6056
gaggaggaaggggcccugagcu

SEQ ID NO: 19630 - RNA, 23 nt, Artificial Sequence
  Synthetic oligonucleotide: PDCD1-6057
agaggaggaaggggcccugagcu

SEQ ID NO: 19631 - RNA, 24 nt, Artificial Sequence
  Synthetic oligonucleotide: PDCD1-6058
cagaggaggaaggggcccugagcu

SEQ ID NO: 19632 - RNA, 18 nt, Artificial Sequence
  Synthetic oligonucleotide: PDCD1-6059
acccugagcuguguggcu

SEQ ID NO: 19633 - RNA, 19 nt, Artificial Sequence
  Synthetic oligonucleotide: PDCD1-6060
uacccugagcuguguggcu

SEQ ID NO: 19634 - RNA, 20 nt, Artificial Sequence
  Synthetic oligonucleotide: PDCD1-1413
uuacccugagcuguguggcu

SEQ ID NO: 19635 - RNA, 21 nt, Artificial Sequence
  Synthetic oligonucleotide: PDCD1-6061
cuuacccugagcuguguggcu

SEQ ID NO: 19636 - RNA, 22 nt, Artificial Sequence
  Synthetic oligonucleotide: PDCD1-6062
ccuuacccugagcuguguggcu

SEQ ID NO: 19637 - RNA, 23 nt, Artificial Sequence
  Synthetic oligonucleotide: PDCD1-6063
cccuuacccugagcuguguggcu

SEQ ID NO: 19638 - RNA, 24 nt, Artificial Sequence
  Synthetic oligonucleotide: PDCD1-6064
ccccuuacccugagcuguguggcu

SEQ ID NO: 19639 - RNA, 18 nt, Artificial Sequence
  Synthetic oligonucleotide: PDCD1-6065
gaacuccuggguuccucu

SEQ ID NO: 19640 - RNA, 19 nt, Artificial Sequence
  Synthetic oligonucleotide: PDCD1-6066
cgaacuccuggguuccucu

SEQ ID NO: 19641 - RNA, 20 nt, Artificial Sequence
  Synthetic oligonucleotide: PDCD1-1410
ucgaacuccuggguuccucu

SEQ ID NO: 19642 - RNA, 21 nt, Artificial Sequence
  Synthetic oligonucleotide: PDCD1-6067
cucgaacuccuggguuccucu

SEQ ID NO: 19643 - RNA, 22 nt, Artificial Sequence
  Synthetic oligonucleotide: PDCD1-6068
gcucgaacuccuggguuccucu

SEQ ID NO: 19644 - RNA, 23 nt, Artificial Sequence
  Synthetic oligonucleotide: PDCD1-6069
agcucgaacuccuggguuccucu

SEQ ID NO: 19645 - RNA, 24 nt, Artificial Sequence
  Synthetic oligonucleotide: PDCD1-6070
cagcucgaacuccuggguuccucu

SEQ ID NO: 19646 - RNA, 18 nt, Artificial Sequence
  Synthetic oligonucleotide: PDCD1-6071
ccccacgggguagggcgu

SEQ ID NO: 19647 - RNA, 19 nt, Artificial Sequence
  Synthetic oligonucleotide: PDCD1-6072
cccccacgggguagggcgu

SEQ ID NO: 19648 - RNA, 20 nt, Artificial Sequence
  Synthetic oligonucleotide: PDCD1-2361
acccccacgggguagggcgu

SEQ ID NO: 19649 - RNA, 21 nt, Artificial Sequence
  Synthetic oligonucleotide: PDCD1-6073
gacccccacgggguagggcgu

SEQ ID NO: 19650 - RNA, 22 nt, Artificial Sequence
  Synthetic oligonucleotide: PDCD1-6074
agacccccacgggguagggcgu

SEQ ID NO: 19651 - RNA, 23 nt, Artificial Sequence
  Synthetic oligonucleotide: PDCD1-6075
gagacccccacgggguagggcgu

SEQ ID NO: 19652 - RNA, 24 nt, Artificial Sequence
  Synthetic oligonucleotide: PDCD1-6076
ggagacccccacgggguagggcgu

SEQ ID NO: 19653 - RNA, 18 nt, Artificial Sequence
  Synthetic oligonucleotide: PDCD1-3752
ggcgcccuggccagucgu

SEQ ID NO: 19654 - RNA, 19 nt, Artificial Sequence
  Synthetic oligonucleotide: PDCD1-3753
aggcgcccuggccagucgu

SEQ ID NO: 19655 - RNA, 20 nt, Artificial Sequence
  Synthetic oligonucleotide: PDCD1-529
caggcgcccuggccagucgu

SEQ ID NO: 19656 - RNA, 21 nt, Artificial Sequence
  Synthetic oligonucleotide: PDCD1-3754
acaggcgcccuggccagucgu

SEQ ID NO: 19657 - RNA, 22 nt, Artificial Sequence
  Synthetic oligonucleotide: PDCD1-3755
cacaggcgcccuggccagucgu

SEQ ID NO: 19658 - RNA, 23 nt, Artificial Sequence
  Synthetic oligonucleotide: PDCD1-3756
ccacaggcgcccuggccagucgu

SEQ ID NO: 19659 - RNA, 24 nt, Artificial Sequence
  Synthetic oligonucleotide: PDCD1-3757
cccacaggcgcccuggccagucgu

SEQ ID NO: 19660 - RNA, 18 nt, Artificial Sequence
  Synthetic oligonucleotide: PDCD1-6077
ccucagucccuggcaggu

SEQ ID NO: 19661 - RNA, 19 nt, Artificial Sequence
  Synthetic oligonucleotide: PDCD1-6078
cccucagucccuggcaggu

SEQ ID NO: 19662 - RNA, 20 nt, Artificial Sequence
  Synthetic oligonucleotide: PDCD1-2172
acccucagucccuggcaggu

SEQ ID NO: 19663 - RNA, 21 nt, Artificial Sequence
  Synthetic oligonucleotide: PDCD1-6079
cacccucagucccuggcaggu

SEQ ID NO: 19664 - RNA, 22 nt, Artificial Sequence
  Synthetic oligonucleotide: PDCD1-6080
ccacccucagucccuggcaggu

SEQ ID NO: 19665 - RNA, 23 nt, Artificial Sequence
  Synthetic oligonucleotide: PDCD1-6081
uccacccucagucccuggcaggu

SEQ ID NO: 19666 - RNA, 24 nt, Artificial Sequence
  Synthetic oligonucleotide: PDCD1-6082
uuccacccucagucccuggcaggu

SEQ ID NO: 19667 - RNA, 18 nt, Artificial Sequence
  Synthetic oligonucleotide: PDCD1-6083
ucucagucccuggcaggu

SEQ ID NO: 19668 - RNA, 19 nt, Artificial Sequence
  Synthetic oligonucleotide: PDCD1-6084
cucucagucccuggcaggu

SEQ ID NO: 19669 - RNA, 20 nt, Artificial Sequence
  Synthetic oligonucleotide: PDCD1-2194
acucucagucccuggcaggu

SEQ ID NO: 19670 - RNA, 21 nt, Artificial Sequence
  Synthetic oligonucleotide: PDCD1-6085
cacucucagucccuggcaggu

SEQ ID NO: 19671 - RNA, 22 nt, Artificial Sequence
  Synthetic oligonucleotide: PDCD1-6086
ucacucucagucccuggcaggu

SEQ ID NO: 19672 - RNA, 23 nt, Artificial Sequence
  Synthetic oligonucleotide: PDCD1-6087
uucacucucagucccuggcaggu

SEQ ID NO: 19673 - RNA, 24 nt, Artificial Sequence
  Synthetic oligonucleotide: PDCD1-6088
uuucacucucagucccuggcaggu

SEQ ID NO: 19674 - RNA, 18 nt, Artificial Sequence
  Synthetic oligonucleotide: PDCD1-6089
ugucccagagccaggggu

SEQ ID NO: 19675 - RNA, 19 nt, Artificial Sequence
  Synthetic oligonucleotide: PDCD1-6090
gugucccagagccaggggu

SEQ ID NO: 19676 - RNA, 20 nt, Artificial Sequence
  Synthetic oligonucleotide: PDCD1-1439
ggugucccagagccaggggu

SEQ ID NO: 19677 - RNA, 21 nt, Artificial Sequence
  Synthetic oligonucleotide: PDCD1-6091
aggugucccagagccaggggu

SEQ ID NO: 19678 - RNA, 22 nt, Artificial Sequence
  Synthetic oligonucleotide: PDCD1-6092
caggugucccagagccaggggu

SEQ ID NO: 19679 - RNA, 23 nt, Artificial Sequence
  Synthetic oligonucleotide: PDCD1-6093
ucaggugucccagagccaggggu

SEQ ID NO: 19680 - RNA, 24 nt, Artificial Sequence
  Synthetic oligonucleotide: PDCD1-6094
gucaggugucccagagccaggggu

SEQ ID NO: 19681 - RNA, 18 nt, Artificial Sequence
  Synthetic oligonucleotide: PDCD1-6095
ggucccggagcgaggggu

SEQ ID NO: 19682 - RNA, 19 nt, Artificial Sequence
  Synthetic oligonucleotide: PDCD1-6096
gggucccggagcgaggggu

SEQ ID NO: 19683 - RNA, 20 nt, Artificial Sequence
  Synthetic oligonucleotide: PDCD1-1422
ggggucccggagcgaggggu

SEQ ID NO: 19684 - RNA, 21 nt, Artificial Sequence
  Synthetic oligonucleotide: PDCD1-6097
aggggucccggagcgaggggu

SEQ ID NO: 19685 - RNA, 22 nt, Artificial Sequence
  Synthetic oligonucleotide: PDCD1-6098
caggggucccggagcgaggggu

SEQ ID NO: 19686 - RNA, 23 nt, Artificial Sequence
  Synthetic oligonucleotide: PDCD1-6099
ccaggggucccggagcgaggggu

SEQ ID NO: 19687 - RNA, 24 nt, Artificial Sequence
  Synthetic oligonucleotide: PDCD1-6100
cccaggggucccggagcgaggggu

SEQ ID NO: 19688 - RNA, 18 nt, Artificial Sequence
  Synthetic oligonucleotide: PDCD1-6101
gagggccagccgggcaca

SEQ ID NO: 19689 - RNA, 19 nt, Artificial Sequence
  Synthetic oligonucleotide: PDCD1-6102
agagggccagccgggcaca

SEQ ID NO: 19690 - RNA, 20 nt, Artificial Sequence
  Synthetic oligonucleotide: PDCD1-1665
cagagggccagccgggcaca

SEQ ID NO: 19691 - RNA, 21 nt, Artificial Sequence
  Synthetic oligonucleotide: PDCD1-6103
acagagggccagccgggcaca

SEQ ID NO: 19692 - RNA, 22 nt, Artificial Sequence
  Synthetic oligonucleotide: PDCD1-6104
cacagagggccagccgggcaca

SEQ ID NO: 19693 - RNA, 23 nt, Artificial Sequence
  Synthetic oligonucleotide: PDCD1-6105
gcacagagggccagccgggcaca

SEQ ID NO: 19694 - RNA, 24 nt, Artificial Sequence
  Synthetic oligonucleotide: PDCD1-6106
ggcacagagggccagccgggcaca

SEQ ID NO: 19695 - RNA, 18 nt, Artificial Sequence
  Synthetic oligonucleotide: PDCD1-6107
guaauaaaaugcucagca

SEQ ID NO: 19696 - RNA, 19 nt, Artificial Sequence
  Synthetic oligonucleotide: PDCD1-6108
uguaauaaaaugcucagca

SEQ ID NO: 19697 - RNA, 20 nt, Artificial Sequence
  Synthetic oligonucleotide: PDCD1-1965
cuguaauaaaaugcucagca

SEQ ID NO: 19698 - RNA, 21 nt, Artificial Sequence
  Synthetic oligonucleotide: PDCD1-6109
gcuguaauaaaaugcucagca

SEQ ID NO: 19699 - RNA, 22 nt, Artificial Sequence
  Synthetic oligonucleotide: PDCD1-6110
cgcuguaauaaaaugcucagca

SEQ ID NO: 19700 - RNA, 23 nt, Artificial Sequence
  Synthetic oligonucleotide: PDCD1-6111
ucgcuguaauaaaaugcucagca

SEQ ID NO: 19701 - RNA, 24 nt, Artificial Sequence
  Synthetic oligonucleotide: PDCD1-6112
uucgcuguaauaaaaugcucagca

SEQ ID NO: 19702 - RNA, 18 nt, Artificial Sequence
  Synthetic oligonucleotide: PDCD1-6113
ucccauccuuaggaaaac

SEQ ID NO: 19703 - RNA, 19 nt, Artificial Sequence
  Synthetic oligonucleotide: PDCD1-6114
aucccauccuuaggaaaac

SEQ ID NO: 19704 - RNA, 20 nt, Artificial Sequence
  Synthetic oligonucleotide: PDCD1-1710
caucccauccuuaggaaaac

SEQ ID NO: 19705 - RNA, 21 nt, Artificial Sequence
  Synthetic oligonucleotide: PDCD1-6115
ucaucccauccuuaggaaaac

SEQ ID NO: 19706 - RNA, 22 nt, Artificial Sequence
  Synthetic oligonucleotide: PDCD1-6116
cucaucccauccuuaggaaaac

SEQ ID NO: 19707 - RNA, 23 nt, Artificial Sequence
  Synthetic oligonucleotide: PDCD1-6117
gcucaucccauccuuaggaaaac

SEQ ID NO: 19708 - RNA, 24 nt, Artificial Sequence
  Synthetic oligonucleotide: PDCD1-6118
ggcucaucccauccuuaggaaaac

SEQ ID NO: 19709 - RNA, 18 nt, Artificial Sequence
  Synthetic oligonucleotide: PDCD1-6119
aaaacucgagugaggacc

SEQ ID NO: 19710 - RNA, 19 nt, Artificial Sequence
  Synthetic oligonucleotide: PDCD1-6120
gaaaacucgagugaggacc

SEQ ID NO: 19711 - RNA, 20 nt, Artificial Sequence
  Synthetic oligonucleotide: PDCD1-1713
ggaaaacucgagugaggacc

SEQ ID NO: 19712 - RNA, 21 nt, Artificial Sequence
  Synthetic oligonucleotide: PDCD1-6121
aggaaaacucgagugaggacc

SEQ ID NO: 19713 - RNA, 22 nt, Artificial Sequence
  Synthetic oligonucleotide: PDCD1-6122
uaggaaaacucgagugaggacc

SEQ ID NO: 19714 - RNA, 23 nt, Artificial Sequence
  Synthetic oligonucleotide: PDCD1-6123
uuaggaaaacucgagugaggacc

SEQ ID NO: 19715 - RNA, 24 nt, Artificial Sequence
  Synthetic oligonucleotide: PDCD1-6124
cuuaggaaaacucgagugaggacc

SEQ ID NO: 19716 - RNA, 18 nt, Artificial Sequence
  Synthetic oligonucleotide: PDCD1-6125
gaggccaaggccuccccc

SEQ ID NO: 19717 - RNA, 19 nt, Artificial Sequence
  Synthetic oligonucleotide: PDCD1-6126
ugaggccaaggccuccccc

SEQ ID NO: 19718 - RNA, 20 nt, Artificial Sequence
  Synthetic oligonucleotide: PDCD1-1681
gugaggccaaggccuccccc

SEQ ID NO: 19719 - RNA, 21 nt, Artificial Sequence
  Synthetic oligonucleotide: PDCD1-6127
agugaggccaaggccuccccc

SEQ ID NO: 19720 - RNA, 22 nt, Artificial Sequence
  Synthetic oligonucleotide: PDCD1-6128
gagugaggccaaggccuccccc

SEQ ID NO: 19721 - RNA, 23 nt, Artificial Sequence
  Synthetic oligonucleotide: PDCD1-6129
agagugaggccaaggccuccccc

SEQ ID NO: 19722 - RNA, 24 nt, Artificial Sequence
  Synthetic oligonucleotide: PDCD1-6130
gagagugaggccaaggccuccccc

SEQ ID NO: 19723 - RNA, 18 nt, Artificial Sequence
  Synthetic oligonucleotide: PDCD1-6131
agggcucggggagagccc

SEQ ID NO: 19724 - RNA, 19 nt, Artificial Sequence
  Synthetic oligonucleotide: PDCD1-6132
cagggcucggggagagccc

SEQ ID NO: 19725 - RNA, 20 nt, Artificial Sequence
  Synthetic oligonucleotide: PDCD1-2741
acagggcucggggagagccc

SEQ ID NO: 19726 - RNA, 21 nt, Artificial Sequence
  Synthetic oligonucleotide: PDCD1-6133
aacagggcucggggagagccc

SEQ ID NO: 19727 - RNA, 22 nt, Artificial Sequence
  Synthetic oligonucleotide: PDCD1-6134
gaacagggcucggggagagccc

SEQ ID NO: 19728 - RNA, 23 nt, Artificial Sequence
  Synthetic oligonucleotide: PDCD1-6135
ugaacagggcucggggagagccc

SEQ ID NO: 19729 - RNA, 24 nt, Artificial Sequence
  Synthetic oligonucleotide: PDCD1-6136
cugaacagggcucggggagagccc

SEQ ID NO: 19730 - RNA, 18 nt, Artificial Sequence
  Synthetic oligonucleotide: PDCD1-6137
caguguacacagagggcc

SEQ ID NO: 19731 - RNA, 19 nt, Artificial Sequence
  Synthetic oligonucleotide: PDCD1-6138
acaguguacacagagggcc

SEQ ID NO: 19732 - RNA, 20 nt, Artificial Sequence
  Synthetic oligonucleotide: PDCD1-1671
cacaguguacacagagggcc

SEQ ID NO: 19733 - RNA, 21 nt, Artificial Sequence
  Synthetic oligonucleotide: PDCD1-6139
ucacaguguacacagagggcc

SEQ ID NO: 19734 - RNA, 22 nt, Artificial Sequence
  Synthetic oligonucleotide: PDCD1-6140
gucacaguguacacagagggcc

SEQ ID NO: 19735 - RNA, 23 nt, Artificial Sequence
  Synthetic oligonucleotide: PDCD1-6141
ggucacaguguacacagagggcc

SEQ ID NO: 19736 - RNA, 24 nt, Artificial Sequence
  Synthetic oligonucleotide: PDCD1-6142
uggucacaguguacacagagggcc

SEQ ID NO: 19737 - RNA, 18 nt, Artificial Sequence
  Synthetic oligonucleotide: PDCD1-6143
gaaccaccccacccuggc

SEQ ID NO: 19738 - RNA, 19 nt, Artificial Sequence
  Synthetic oligonucleotide: PDCD1-6144
ugaaccaccccacccuggc

SEQ ID NO: 19739 - RNA, 20 nt, Artificial Sequence
  Synthetic oligonucleotide: PDCD1-1959
cugaaccaccccacccuggc

SEQ ID NO: 19740 - RNA, 21 nt, Artificial Sequence
  Synthetic oligonucleotide: PDCD1-6145
ccugaaccaccccacccuggc

SEQ ID NO: 19741 - RNA, 22 nt, Artificial Sequence
  Synthetic oligonucleotide: PDCD1-6146
cccugaaccaccccacccuggc

SEQ ID NO: 19742 - RNA, 23 nt, Artificial Sequence
  Synthetic oligonucleotide: PDCD1-6147
ccccugaaccaccccacccuggc

SEQ ID NO: 19743 - RNA, 24 nt, Artificial Sequence
  Synthetic oligonucleotide: PDCD1-6148
cccccugaaccaccccacccuggc

SEQ ID NO: 19744 - RNA, 18 nt, Artificial Sequence
  Synthetic oligonucleotide: PDCD1-6149
accugugccccagcgaag

SEQ ID NO: 19745 - RNA, 19 nt, Artificial Sequence
  Synthetic oligonucleotide: PDCD1-6150
caccugugccccagcgaag

SEQ ID NO: 19746 - RNA, 20 nt, Artificial Sequence
  Synthetic oligonucleotide: PDCD1-3022
ucaccugugccccagcgaag

SEQ ID NO: 19747 - RNA, 21 nt, Artificial Sequence
  Synthetic oligonucleotide: PDCD1-6151
gucaccugugccccagcgaag

SEQ ID NO: 19748 - RNA, 22 nt, Artificial Sequence
  Synthetic oligonucleotide: PDCD1-6152
ggucaccugugccccagcgaag

SEQ ID NO: 19749 - RNA, 23 nt, Artificial Sequence
  Synthetic oligonucleotide: PDCD1-6153
gggucaccugugccccagcgaag

SEQ ID NO: 19750 - RNA, 24 nt, Artificial Sequence
  Synthetic oligonucleotide: PDCD1-6154
agggucaccugugccccagcgaag

SEQ ID NO: 19751 - RNA, 18 nt, Artificial Sequence
  Synthetic oligonucleotide: PDCD1-6155
uggacaguugucauucag

SEQ ID NO: 19752 - RNA, 19 nt, Artificial Sequence
  Synthetic oligonucleotide: PDCD1-6156
auggacaguugucauucag

SEQ ID NO: 19753 - RNA, 20 nt, Artificial Sequence
  Synthetic oligonucleotide: PDCD1-1928
cauggacaguugucauucag

SEQ ID NO: 19754 - RNA, 21 nt, Artificial Sequence
  Synthetic oligonucleotide: PDCD1-6157
ccauggacaguugucauucag

SEQ ID NO: 19755 - RNA, 22 nt, Artificial Sequence
  Synthetic oligonucleotide: PDCD1-6158
gccauggacaguugucauucag

SEQ ID NO: 19756 - RNA, 23 nt, Artificial Sequence
  Synthetic oligonucleotide: PDCD1-6159
agccauggacaguugucauucag

SEQ ID NO: 19757 - RNA, 24 nt, Artificial Sequence
  Synthetic oligonucleotide: PDCD1-6160
uagccauggacaguugucauucag

SEQ ID NO: 19758 - RNA, 18 nt, Artificial Sequence
  Synthetic oligonucleotide: PDCD1-6161
gcacaauccccacccagg

SEQ ID NO: 19759 - RNA, 19 nt, Artificial Sequence
  Synthetic oligonucleotide: PDCD1-6162
ggcacaauccccacccagg

SEQ ID NO: 19760 - RNA, 20 nt, Artificial Sequence
  Synthetic oligonucleotide: PDCD1-2748
gggcacaauccccacccagg

SEQ ID NO: 19761 - RNA, 21 nt, Artificial Sequence
  Synthetic oligonucleotide: PDCD1-6163
cgggcacaauccccacccagg

SEQ ID NO: 19762 - RNA, 22 nt, Artificial Sequence
  Synthetic oligonucleotide: PDCD1-6164
gcgggcacaauccccacccagg

SEQ ID NO: 19763 - RNA, 23 nt, Artificial Sequence
  Synthetic oligonucleotide: PDCD1-6165
ggcgggcacaauccccacccagg

SEQ ID NO: 19764 - RNA, 24 nt, Artificial Sequence
  Synthetic oligonucleotide: PDCD1-6166
aggcgggcacaauccccacccagg

SEQ ID NO: 19765 - RNA, 18 nt, Artificial Sequence
  Synthetic oligonucleotide: PDCD1-6167
ccucucuccucgauccgg

SEQ ID NO: 19766 - RNA, 19 nt, Artificial Sequence
  Synthetic oligonucleotide: PDCD1-6168
cccucucuccucgauccgg

SEQ ID NO: 19767 - RNA, 20 nt, Artificial Sequence
  Synthetic oligonucleotide: PDCD1-1679
ucccucucuccucgauccgg

SEQ ID NO: 19768 - RNA, 21 nt, Artificial Sequence
  Synthetic oligonucleotide: PDCD1-6169
cucccucucuccucgauccgg

SEQ ID NO: 19769 - RNA, 22 nt, Artificial Sequence
  Synthetic oligonucleotide: PDCD1-6170
gcucccucucuccucgauccgg

SEQ ID NO: 19770 - RNA, 23 nt, Artificial Sequence
  Synthetic oligonucleotide: PDCD1-6171
ggcucccucucuccucgauccgg

SEQ ID NO: 19771 - RNA, 24 nt, Artificial Sequence
  Synthetic oligonucleotide: PDCD1-6172
aggcucccucucuccucgauccgg

SEQ ID NO: 19772 - RNA, 18 nt, Artificial Sequence
  Synthetic oligonucleotide: PDCD1-6173
cacucgaacagguacacu

SEQ ID NO: 19773 - RNA, 19 nt, Artificial Sequence
  Synthetic oligonucleotide: PDCD1-6174
ucacucgaacagguacacu

SEQ ID NO: 19774 - RNA, 20 nt, Artificial Sequence
  Synthetic oligonucleotide: PDCD1-1703
cucacucgaacagguacacu

SEQ ID NO: 19775 - RNA, 21 nt, Artificial Sequence
  Synthetic oligonucleotide: PDCD1-6175
ccucacucgaacagguacacu

SEQ ID NO: 19776 - RNA, 22 nt, Artificial Sequence
  Synthetic oligonucleotide: PDCD1-6176
uccucacucgaacagguacacu

SEQ ID NO: 19777 - RNA, 23 nt, Artificial Sequence
  Synthetic oligonucleotide: PDCD1-6177
guccucacucgaacagguacacu

SEQ ID NO: 19778 - RNA, 24 nt, Artificial Sequence
  Synthetic oligonucleotide: PDCD1-6178
uguccucacucgaacagguacacu

SEQ ID NO: 19779 - RNA, 18 nt, Artificial Sequence
  Synthetic oligonucleotide: PDCD1-6179
cuccccacggccaagguu

SEQ ID NO: 19780 - RNA, 19 nt, Artificial Sequence
  Synthetic oligonucleotide: PDCD1-6180
acuccccacggccaagguu

SEQ ID NO: 19781 - RNA, 20 nt, Artificial Sequence
  Synthetic oligonucleotide: PDCD1-2085
gacuccccacggccaagguu

SEQ ID NO: 19782 - RNA, 21 nt, Artificial Sequence
  Synthetic oligonucleotide: PDCD1-6181
agacuccccacggccaagguu

SEQ ID NO: 19783 - RNA, 22 nt, Artificial Sequence
  Synthetic oligonucleotide: PDCD1-6182
cagacuccccacggccaagguu

SEQ ID NO: 19784 - RNA, 23 nt, Artificial Sequence
  Synthetic oligonucleotide: PDCD1-6183
gcagacuccccacggccaagguu

SEQ ID NO: 19785 - RNA, 24 nt, Artificial Sequence
  Synthetic oligonucleotide: PDCD1-6184
cgcagacuccccacggccaagguu

SEQ ID NO: 19786 - RNA, 18 nt, Artificial Sequence
  Synthetic oligonucleotide: PDCD1-6185
gcugagcauuuuauuaca

SEQ ID NO: 19787 - RNA, 19 nt, Artificial Sequence
  Synthetic oligonucleotide: PDCD1-6186
ugcugagcauuuuauuaca

SEQ ID NO: 19788 - RNA, 20 nt, Artificial Sequence
  Synthetic oligonucleotide: PDCD1-1748
gugcugagcauuuuauuaca

SEQ ID NO: 19789 - RNA, 21 nt, Artificial Sequence
  Synthetic oligonucleotide: PDCD1-6187
ugugcugagcauuuuauuaca

SEQ ID NO: 19790 - RNA, 22 nt, Artificial Sequence
  Synthetic oligonucleotide: PDCD1-6188
cugugcugagcauuuuauuaca

SEQ ID NO: 19791 - RNA, 23 nt, Artificial Sequence
  Synthetic oligonucleotide: PDCD1-6189
ucugugcugagcauuuuauuaca

SEQ ID NO: 19792 - RNA, 24 nt, Artificial Sequence
  Synthetic oligonucleotide: PDCD1-6190
uucugugcugagcauuuuauuaca

SEQ ID NO: 19793 - RNA, 18 nt, Artificial Sequence
  Synthetic oligonucleotide: PDCD1-6191
ccaggguggggugguuca

SEQ ID NO: 19794 - RNA, 19 nt, Artificial Sequence
  Synthetic oligonucleotide: PDCD1-6192
gccaggguggggugguuca

SEQ ID NO: 19795 - RNA, 20 nt, Artificial Sequence
  Synthetic oligonucleotide: PDCD1-2809
ugccaggguggggugguuca

SEQ ID NO: 19796 - RNA, 21 nt, Artificial Sequence
  Synthetic oligonucleotide: PDCD1-6193
gugccaggguggggugguuca

SEQ ID NO: 19797 - RNA, 22 nt, Artificial Sequence
  Synthetic oligonucleotide: PDCD1-6194
cgugccaggguggggugguuca

SEQ ID NO: 19798 - RNA, 23 nt, Artificial Sequence
  Synthetic oligonucleotide: PDCD1-6195
ucgugccaggguggggugguuca

SEQ ID NO: 19799 - RNA, 24 nt, Artificial Sequence
  Synthetic oligonucleotide: PDCD1-6196
cucgugccaggguggggugguuca

SEQ ID NO: 19800 - RNA, 18 nt, Artificial Sequence
  Synthetic oligonucleotide: PDCD1-6197
cucgaguuuuccuaagga

SEQ ID NO: 19801 - RNA, 19 nt, Artificial Sequence
  Synthetic oligonucleotide: PDCD1-6198
acucgaguuuuccuaagga

SEQ ID NO: 19802 - RNA, 20 nt, Artificial Sequence
  Synthetic oligonucleotide: PDCD1-2996
cacucgaguuuuccuaagga

SEQ ID NO: 19803 - RNA, 21 nt, Artificial Sequence
  Synthetic oligonucleotide: PDCD1-6199
ucacucgaguuuuccuaagga

SEQ ID NO: 19804 - RNA, 22 nt, Artificial Sequence
  Synthetic oligonucleotide: PDCD1-6200
cucacucgaguuuuccuaagga

SEQ ID NO: 19805 - RNA, 23 nt, Artificial Sequence
  Synthetic oligonucleotide: PDCD1-6201
ccucacucgaguuuuccuaagga

SEQ ID NO: 19806 - RNA, 24 nt, Artificial Sequence
  Synthetic oligonucleotide: PDCD1-6202
uccucacucgaguuuuccuaagga

SEQ ID NO: 19807 - RNA, 18 nt, Artificial Sequence
  Synthetic oligonucleotide: PDCD1-6203
ggggcacaggugacccua

SEQ ID NO: 19808 - RNA, 19 nt, Artificial Sequence
  Synthetic oligonucleotide: PDCD1-6204
uggggcacaggugacccua

SEQ ID NO: 19809 - RNA, 20 nt, Artificial Sequence
  Synthetic oligonucleotide: PDCD1-1725
cuggggcacaggugacccua

SEQ ID NO: 19810 - RNA, 21 nt, Artificial Sequence
  Synthetic oligonucleotide: PDCD1-6205
gcuggggcacaggugacccua

SEQ ID NO: 19811 - RNA, 22 nt, Artificial Sequence
  Synthetic oligonucleotide: PDCD1-6206
cgcuggggcacaggugacccua

SEQ ID NO: 19812 - RNA, 23 nt, Artificial Sequence
  Synthetic oligonucleotide: PDCD1-6207
ucgcuggggcacaggugacccua

SEQ ID NO: 19813 - RNA, 24 nt, Artificial Sequence
  Synthetic oligonucleotide: PDCD1-6208
uucgcuggggcacaggugacccua

SEQ ID NO: 19814 - RNA, 18 nt, Artificial Sequence
  Synthetic oligonucleotide: PDCD1-6209
ggcauccuugguccucac

SEQ ID NO: 19815 - RNA, 19 nt, Artificial Sequence
  Synthetic oligonucleotide: PDCD1-6210
aggcauccuugguccucac

SEQ ID NO: 19816 - RNA, 20 nt, Artificial Sequence
  Synthetic oligonucleotide: PDCD1-1902
caggcauccuugguccucac

SEQ ID NO: 19817 - RNA, 21 nt, Artificial Sequence
  Synthetic oligonucleotide: PDCD1-6211
ccaggcauccuugguccucac

SEQ ID NO: 19818 - RNA, 22 nt, Artificial Sequence
  Synthetic oligonucleotide: PDCD1-6212
cccaggcauccuugguccucac

SEQ ID NO: 19819 - RNA, 23 nt, Artificial Sequence
  Synthetic oligonucleotide: PDCD1-6213
gcccaggcauccuugguccucac

SEQ ID NO: 19820 - RNA, 24 nt, Artificial Sequence
  Synthetic oligonucleotide: PDCD1-6214
ugcccaggcauccuugguccucac

SEQ ID NO: 19821 - RNA, 18 nt, Artificial Sequence
  Synthetic oligonucleotide: PDCD1-6215
gguggggauugugcccgc

SEQ ID NO: 19822 - RNA, 19 nt, Artificial Sequence
  Synthetic oligonucleotide: PDCD1-6216
ggguggggauugugcccgc

SEQ ID NO: 19823 - RNA, 20 nt, Artificial Sequence
  Synthetic oligonucleotide: PDCD1-1886
uggguggggauugugcccgc

SEQ ID NO: 19824 - RNA, 21 nt, Artificial Sequence
  Synthetic oligonucleotide: PDCD1-6217
cuggguggggauugugcccgc

SEQ ID NO: 19825 - RNA, 22 nt, Artificial Sequence
  Synthetic oligonucleotide: PDCD1-6218
ccuggguggggauugugcccgc

SEQ ID NO: 19826 - RNA, 23 nt, Artificial Sequence
  Synthetic oligonucleotide: PDCD1-6219
uccuggguggggauugugcccgc

SEQ ID NO: 19827 - RNA, 24 nt, Artificial Sequence
  Synthetic oligonucleotide: PDCD1-6220
cuccuggguggggauugugcccgc

SEQ ID NO: 19828 - RNA, 18 nt, Artificial Sequence
  Synthetic oligonucleotide: PDCD1-6221
ccuccagcccacucgugc

SEQ ID NO: 19829 - RNA, 19 nt, Artificial Sequence
  Synthetic oligonucleotide: PDCD1-6222
cccuccagcccacucgugc

SEQ ID NO: 19830 - RNA, 20 nt, Artificial Sequence
  Synthetic oligonucleotide: PDCD1-1739
gcccuccagcccacucgugc

SEQ ID NO: 19831 - RNA, 21 nt, Artificial Sequence
  Synthetic oligonucleotide: PDCD1-6223
ugcccuccagcccacucgugc

SEQ ID NO: 19832 - RNA, 22 nt, Artificial Sequence
  Synthetic oligonucleotide: PDCD1-6224
cugcccuccagcccacucgugc

SEQ ID NO: 19833 - RNA, 23 nt, Artificial Sequence
  Synthetic oligonucleotide: PDCD1-6225
ccugcccuccagcccacucgugc

SEQ ID NO: 19834 - RNA, 24 nt, Artificial Sequence
  Synthetic oligonucleotide: PDCD1-6226
cccugcccuccagcccacucgugc

SEQ ID NO: 19835 - RNA, 18 nt, Artificial Sequence
  Synthetic oligonucleotide: PDCD1-6227
cugucuccaggaucccuc

SEQ ID NO: 19836 - RNA, 19 nt, Artificial Sequence
  Synthetic oligonucleotide: PDCD1-6228
ucugucuccaggaucccuc

SEQ ID NO: 19837 - RNA, 20 nt, Artificial Sequence
  Synthetic oligonucleotide: PDCD1-1890
uucugucuccaggaucccuc

SEQ ID NO: 19838 - RNA, 21 nt, Artificial Sequence
  Synthetic oligonucleotide: PDCD1-6229
cuucugucuccaggaucccuc

SEQ ID NO: 19839 - RNA, 22 nt, Artificial Sequence
  Synthetic oligonucleotide: PDCD1-6230
ucuucugucuccaggaucccuc

SEQ ID NO: 19840 - RNA, 23 nt, Artificial Sequence
  Synthetic oligonucleotide: PDCD1-6231
uucuucugucuccaggaucccuc

SEQ ID NO: 19841 - RNA, 24 nt, Artificial Sequence
  Synthetic oligonucleotide: PDCD1-6232
guucuucugucuccaggaucccuc

SEQ ID NO: 19842 - RNA, 18 nt, Artificial Sequence
  Synthetic oligonucleotide: PDCD1-6233
ggccuuggccucacucuc

SEQ ID NO: 19843 - RNA, 19 nt, Artificial Sequence
  Synthetic oligonucleotide: PDCD1-6234
aggccuuggccucacucuc

SEQ ID NO: 19844 - RNA, 20 nt, Artificial Sequence
  Synthetic oligonucleotide: PDCD1-1878
gaggccuuggccucacucuc

SEQ ID NO: 19845 - RNA, 21 nt, Artificial Sequence
  Synthetic oligonucleotide: PDCD1-6235
ggaggccuuggccucacucuc

(The sequence listing continues in the following parts.)

What is claimed is:

1. A gRNA molecule comprising a targeting domain which is complementary with a target domain from the FAS, BID, CTLA4, PDCD1, CBLB, PTPN6, TRAC or TRBC gene.

2. The gRNA molecule of claim 1, wherein the targeting domain is configured to provide a cleavage event selected from a double strand break and a single strand break, within 500, 400, 300, 200, 100, 50, 25, or 10 nucleotides of a T cell target knockout position.

3. The gRNA molecule of claim 1, wherein the targeting domain is configured to target an enzymatically inactive Cas9 (eiCas9) or an eiCas9 fusion protein, sufficiently close to a T cell target knockdown position to reduce, decrease or repress expression of the FAS, BID, CTLA4, PDCD1, CBLB, or PTPN6 gene.

4. The gRNA molecule of claim 3, wherein the targeting domain is configured to target the promoter region of the FAS, BID, CTLA4, PDCD1, CBLB, or PTPN6 gene.

5. The gRNA molecule of claim 1, wherein the targeting domain comprises a sequence that is the same as, or differs by no more than 3 nucleotides from, a targeting domain sequence from any of Tables 1A-I, Tables 2A-I, Tables 3A-H, Tables 4A-I, Tables 5A-I, Tables 6A-I, Tables 7A-H, Tables 8A-H, Tables 9A-I, Tables 10A-I, Tables 11A-I, Tables 12A-I, Tables 13A-K, Tables 14A-K, Tables 15A-F, Tables 16A-K, Tables 17A-K, Tables 18A-K, Tables 19A-J, Tables 20A-J, Tables 21A-K, Tables 22A-K, Tables 23A-J, Tables 24A-K, Tables 25A-G, Tables 26A-G, Table 27, Table 29, Table 31, or Table 32.

6. The gRNA molecule of claim 1, wherein the targeting domain is selected from those in Tables 1A-F or Tables 13A-K.

7. The gRNA molecule of claim 1, wherein the targeting domain is selected from those in Tables 2A-I or Tables 14A-K.

8. The gRNA molecule of claim 1, wherein the targeting domain is selected from those in Tables 3A-H or Tables 15A-F.

9. The gRNA molecule of claim 1, wherein the targeting domain is selected from those in Tables 4A-I or Tables 16A-K.

10. The gRNA molecule of claim 1, wherein the targeting domain is selected from those in Tables 5A-I or Tables 17A-K.

11. The gRNA molecule of claim 1, wherein the targeting domain is selected from those in Tables 6A-I or Tables 18A-K.

12. The gRNA molecule of claim 1, wherein the targeting domain is selected from those in Tables 7A-H, Tables 19A-J, Table 31 or Table 32.

13. The gRNA molecule of claim 1, wherein the targeting domain is selected from those in Tables 8A-H or Tables 20A-J.

14. The gRNA molecule of claim 1, wherein the targeting domain is selected from those in Tables 9A-I or Tables 21A-K.

15. The gRNA molecule of claim 1, wherein the targeting domain is selected from those in Tables 10A-I or Tables 22A-K.

16. The gRNA molecule of claim 1, wherein the targeting domain is selected from those in Tables 11A-I or Tables 23A-J.

17. The gRNA molecule of claim 1, wherein the targeting domain is selected from those in Tables 12A-I or Tables 24A-K.

18. The gRNA molecule of claim 1, wherein the targeting domain is selected from those in Tables 25A-G or Table 29.

19. The gRNA molecule of claim 1, wherein the targeting domain is selected from those in Tables 26A-G or Table 27.

20. The gRNA molecule of any of claims 1-19, wherein the gRNA is a modular gRNA molecule.

21. The gRNA molecule of any of claims 1-19, wherein the gRNA is a chimeric gRNA molecule.

22. The gRNA molecule of any of claims 1-19, wherein the targeting domain is 16 or 17 nucleotides or more in length.

23. The gRNA molecule of any of claims 1-19, wherein the targeting domain is 16 or 17 nucleotides in length.

24. The gRNA molecule of any of claims 1-19, wherein the targeting domain is 18 nucleotides in length.

25. The gRNA molecule of any of claims 1-19, wherein the targeting domain is 19 nucleotides in length.

26. The gRNA molecule of any of claims 1-19, wherein the targeting domain is 20 nucleotides in length.

27. The gRNA molecule of any of claims 1-19, wherein the targeting domain is 21 nucleotides in length.

28. The gRNA molecule of any of claims 1-19, wherein the targeting domain is 22 nucleotides in length.

29. The gRNA molecule of any of claims 1-19, wherein the targeting domain is 23 nucleotides in length.

30. The gRNA molecule of any of claims 1-19, wherein the targeting domain is 24, 25, or 26 nucleotides in length.

31. The gRNA molecule of any of claims 1-30, comprising from 5′ to 3′:
a targeting domain;
a first complementarity domain;
a linking domain;
a second complementarity domain;
a proximal domain; and
a tail domain.

32. The gRNA molecule of any of claims 1-30, comprising:
a linking domain of no more than 25 nucleotides in length;
a proximal and tail domain, that taken together, are at least 20 nucleotides in length; and
a targeting domain of 17, 18, 19, 20, 21, 22, 23 or 24 nucleotides in length.

33. The gRNA molecule of any of claims 1-30, comprising:
a linking domain of no more than 25 nucleotides in length;
a proximal and tail domain, that taken together, are at least 30 nucleotides in length; and
a targeting domain of 17, 18, 19, 20, 21, 22, 23 or 24 nucleotides in length.

34. The gRNA molecule of any of claims 1-30, comprising:
a linking domain of no more than 25 nucleotides in length;
a proximal and tail domain, that taken together, are at least 35 nucleotides in length; and
a targeting domain of 17, 18, 19, 20, 21, 22, 23 or 24 nucleotides in length.

35. The gRNA molecule of any of claims 1-30, comprising:
a linking domain of no more than 25 nucleotides in length;
a proximal and tail domain, that taken together, are at least 40 nucleotides in length; and
a targeting domain of 17, 18, 19, 20, 21, 22, 23 or 24 nucleotides in length.

36. A nucleic acid that comprises: (a) sequence that encodes a gRNA molecule comprising a targeting domain that is complementary with a T cell target domain in the FAS, BID, CTLA4, PDCD1, CBLB, PTPN6, TRAC or TRBC gene.

37. The nucleic acid of claim 36, wherein the gRNA molecule is a gRNA molecule of any of claims 1-35.

38. The nucleic acid of claim 36, wherein the targeting domain is configured to provide a cleavage event selected from a double strand break and a single strand break, within 500, 400, 300, 200, 100, 50, 25, or 10 nucleotides of the T cell target knockout position.

39. The nucleic acid of claim 36, wherein the targeting domain is configured to target an enzymatically inactive Cas9 (eiCas9) or an eiCas9 fusion protein, sufficiently close to a T cell target knockdown position to reduce, decrease or repress expression of the FAS, BID, CTLA4, PDCD1, CBLB, or PTPN6 gene.

40. The nucleic acid of claim 36, wherein the targeting domain is configured to target the promoter region of the FAS, BID, CTLA4, PDCD1, CBLB, or PTPN6 gene.

41. The nucleic acid of claim 36, wherein the targeting domain comprises a sequence that is the same as, or differs by no more than 3 nucleotides from, a targeting domain sequence from any of Tables 1A-I, Tables 2A-I, Tables 3A-H, Tables 4A-I, Tables 5A-I, Tables 6A-I, Tables 7A-H, Tables 8A-H, Tables 9A-I, Tables 10A-I, Tables 11A-I, Tables 12A-I, Tables 13A-K, Tables 14A-K, Tables 15A-F, Tables 16A-K, Tables 17A-K, Tables 18A-K, Tables 19A-J, Tables 20A-J, Tables 21A-K, Tables 22A-K, Tables 23A-J, Tables 24A-K, Tables 25A-G, Tables 26A-G, Table 27, Table 29, Table 31, or Table 32.

42. The nucleic acid of claim 36, wherein the targeting domain is selected from those in Tables 1A-I, Tables 2A-I, Tables 3A-H, Tables 4A-I, Tables 5A-I, Tables 6A-I, Tables 7A-H, Tables 8A-H, Tables 9A-I, Tables 10A-I, Tables 11A-I, Tables 12A-I, Tables 13A-K, Tables 14A-K, Tables 15A-F, Tables 16A-K, Tables 17A-K, Tables 18A-K, Tables 19A-J, Tables 20A-J, Tables 21A-K, Tables 22A-K, Tables 23A-J, Tables 24A-K, Tables 25A-G, Tables 26A-G, Table 27, Table 29, Table 31, or Table 32.

43. The nucleic acid of any of claims 36-42, wherein the gRNA is a modular gRNA molecule.

44. The nucleic acid of any of claims 36-42, wherein the gRNA is a chimeric gRNA molecule.

45. The nucleic acid of any of claims 36-42, wherein the targeting domain is 16 or 17 nucleotides or more in length.

46. The nucleic acid of any of claims 36-42, wherein the targeting domain is 16 or 17 nucleotides in length.

47. The nucleic acid of any of claims 36-42, wherein the targeting domain is 18 nucleotides in length.

48. The nucleic acid of any of claims 36-42, wherein the targeting domain is 19 nucleotides in length.

49. The nucleic acid of any of claims 36-42, wherein the targeting domain is 20 nucleotides in length.

50. The nucleic acid of any of claims 36-42, wherein the targeting domain is 21 nucleotides in length.

51. The nucleic acid of any of claims 36-42, wherein the targeting domain is 22 nucleotides in length.

52. The nucleic acid of any of claims 36-42, wherein the targeting domain is 23 nucleotides in length.

53. The nucleic acid of any of claims 36-42, wherein the targeting domain is 24, 25, or 26 nucleotides in length.

54. The nucleic acid of any of claims 36-54, comprising from 5′ to 3′:
a targeting domain;
a first complementarity domain;
a linking domain;
a second complementarity domain;
a proximal domain; and
a tail domain.

55. The nucleic acid of any of claims 36-54, comprising:
a linking domain of no more than 25 nucleotides in length;
a proximal and tail domain, that taken together, are at least 20 nucleotides in length; and
a targeting domain of 17, 18, 19, 20, 21, 22, 23 or 24 nucleotides in length.

56. The nucleic acid of any of claims 36-54, comprising:
a linking domain of no more than 25 nucleotides in length;
a proximal and tail domain, that taken together, are at least 30 nucleotides in length; and
a targeting domain of 17, 18, 19, 20, 21, 22, 23 or 24 nucleotides in length.

57. The nucleic acid of any of claims 36-54, comprising:
a linking domain of no more than 25 nucleotides in length;
a proximal and tail domain, that taken together, are at least 35 nucleotides in length; and
a targeting domain of 17, 18, 19, 20, 21, 22, 23 or 24 nucleotides in length.

58. The nucleic acid of any of claims 36-54, comprising:
a linking domain of no more than 25 nucleotides in length;
a proximal and tail domain, that taken together, are at least 40 nucleotides in length; and
a targeting domain of 17, 18, 19, 20, 21, 22, 23 or 24 nucleotides in length.

59. The nucleic acid of any of claims 36-58, further comprising: (b) sequence that encodes a Cas9 molecule.

60. The nucleic acid of claim 59, wherein the Cas9 molecule is an eaCas9 molecule.

61. The nucleic acid of claim 60, wherein the eaCas9 molecule comprises a nickase molecule.

62. The nucleic acid of claim 60, wherein the eaCas9 molecule forms a double strand break in a target nucleic acid.

63. The nucleic acid of claim 60, wherein the eaCas9 molecule forms a single strand break in a target nucleic acid.

64. The nucleic acid of claim 63, wherein the single strand break is formed in the strand of the target nucleic acid to which the targeting domain of the gRNA molecule is complementary.

65. The nucleic acid of claim 63, wherein the single strand break is formed in the strand of the target nucleic acid other than the strand to which to which the targeting domain of the gRNA is complementary.

66. The nucleic acid of claim 60, wherein the eaCas9 molecule comprises HNH-like domain cleavage activity but has no, or no significant, N-terminal RuvC-like domain cleavage activity.

67. The nucleic acid of claim 60, wherein the eaCas9 molecule is an HNH-like domain nickase.

68. The nucleic acid of claim 60, wherein the eaCas9 molecule comprises a mutation at D10.

69. The nucleic acid of claim 60, wherein the eaCas9 molecule comprises N-terminal RuvC-like domain cleavage activity but has no, or no significant, HNH-like domain cleavage activity.

70. The nucleic acid of claim 60, wherein the eaCas9 molecule is an N-terminal RuvC-like domain nickase.

71. The nucleic acid of claim 60, wherein the eaCas9 molecule comprises a mutation at H840.

72. The nucleic acid of claim 59, wherein the Cas9 molecule is an eiCas9 molecule.

73. The nucleic acid of claim 72, wherein the Cas9 molecule is an eiCas9-fusion protein molecule (e.g., an eiCas9-transcription repressor domain fusion, e.g., an eiCas9-KRAB domain fusion).

74. The nucleic acid of any of claims 36-73, further comprising: (c) sequence that encodes a second gRNA molecule described herein having a targeting domain that is complementary to a second target domain of the FAS, BID, CTLA4, PDCD1, CBLB, PTPN6, TRAC or TRBC gene.

75. The nucleic acid of claim 74, wherein the second gRNA molecule is a gRNA molecule of any of claims 1-35.

76. The nucleic acid of claim 74, wherein the targeting domain of the second gRNA is configured to provide a cleavage event selected from a double strand break and a single strand break, within 500, 400, 300, 200, 100, 50, 25, or 10 nucleotides of the T cell target knockout position.

77. The nucleic acid of claim 74, wherein the targeting domain of the second gRNA is configured to target an enzymatically inactive Cas9 (eiCas9) or an eiCas9 fusion protein, sufficiently close to a T cell target knockdown position to reduce, decrease or repress expression of the FAS, BID, CTLA4, PDCD1, CBLB, or PTPN6 gene.

78. The nucleic acid of claim 74, wherein the targeting domain of the second gRNA is configured to target the promoter region of the FAS, BID, CTLA4, PDCD1, CBLB, or PTPN6 gene.

79. The nucleic acid of claim 74, wherein the targeting domain of the second gRNA comprises a sequence that is the same as, or differs by no more than 3 nucleotides from, a targeting domain sequence from any of Tables 1A-I, Tables 2A-I, Tables 3A-H, Tables 4A-I, Tables 5A-I, Tables 6A-I, Tables 7A-H, Tables 8A-H, Tables 9A-I, Tables 10A-I, Tables 11A-I, Tables 12A-I, Tables 13A-K, Tables 14A-K, Tables 15A-F, Tables 16A-K, Tables 17A-K, Tables 18A-K, Tables 19A-J, Tables 20A-J, Tables 21A-K, Tables 22A-K, Tables 23A-J, Tables 24A-K, Tables 25A-G, Tables 26A-G, Table 27, Table 29, Table 31, or Table 32.

80. The nucleic acid of claim 74, wherein the targeting domain of the second gRNA is selected from those in Tables 1A-I, Tables 2A-I, Tables 3A-H, Tables 4A-I, Tables 5A-I, Tables 6A-I, Tables 7A-H, Tables 8A-H, Tables 9A-I, Tables 10A-I, Tables 11A-I, Tables 12A-I, Tables 13A-K, Tables 14A-K, Tables 15A-F, Tables 16A-K, Tables 17A-K, Tables 18A-K, Tables 19A-J, Tables 20A-J, Tables 21A-K, Tables 22A-K, Tables 23A-J, Tables 24A-K, Tables 25A-G, Tables 26A-G, Table 27, Table 29, Table 31, or Table 32.

81. The nucleic acid of any of claims 74-80, wherein the second gRNA molecule is a modular gRNA molecule.

82. The nucleic acid of any of claims 74-80, wherein the second gRNA molecule is a chimeric gRNA molecule.

83. The nucleic acid of any of claims 74-80, wherein the targeting domain is 16 or 17 nucleotides or more in length.

84. The nucleic acid of any of claims 74-80, wherein the targeting domain is 16 or 17 nucleotides in length.

85. The nucleic acid of any of claims 74-80, wherein the targeting domain is 18 nucleotides in length.

86. The nucleic acid of any of claims 74-80, wherein the targeting domain is 19 nucleotides in length.

87. The nucleic acid of any of claims 74-80, wherein the targeting domain is 20 nucleotides in length.

88. The nucleic acid of any of claims 74-80, wherein the targeting domain is 21 nucleotides in length.

89. The nucleic acid of any of claims 74-80, wherein the targeting domain is 22 nucleotides in length.

90. The nucleic acid of any of claims 74-80, wherein the targeting domain is 23 nucleotides in length.

91. The nucleic acid of any of claims 74-80, wherein the targeting domain is 24, 25, or 26 nucleotides in length.

92. The nucleic acid of any of claims 74-91, wherein the second gRNA molecule comprises from 5′ to 3′:
a targeting domain;
a first complementarity domain;
a linking domain;
a second complementarity domain;
a proximal domain; and
a tail domain.

93. The nucleic acid of any of claims 74-92, wherein the second gRNA molecule comprises:
a linking domain of no more than 25 nucleotides in length;
a proximal and tail domain, that taken together, are at least 20 nucleotides in length; and
a targeting domain of 17, 18, 19, 20, 21, 22, 23 or 24 nucleotides in length.

94. The nucleic acid of any of claims 74-92, wherein the second molecule gRNA molecule comprises:
a linking domain of no more than 25 nucleotides in length;
a proximal and tail domain, that taken together, are at least 30 nucleotides in length; and
a targeting domain of 17, 18, 19, 20, 21, 22, 23 or 24 nucleotides in length.

95. The nucleic acid of any of claims 74-92, wherein the second gRNA molecule comprises:
a linking domain of no more than 25 nucleotides in length;
a proximal and tail domain, that taken together, are at least 35 nucleotides in length; and
a targeting domain of 17, 18, 19, 20, 21, 22, 23 or 24 nucleotides in length.

96. The nucleic acid of any of claims 74-92, wherein the second gRNA molecule comprises:
a linking domain of no more than 25 nucleotides in length;
a proximal and tail domain, that taken together, are at least 40 nucleotides in length; and
a targeting domain of 17, 18, 19, 20, 21, 22, 23 or 24 nucleotides in length.

97. The nucleic acid of any of claims 74-96, further comprising a third gRNA molecule.

98. The nucleic acid of claim 97, further comprising a fourth gRNA molecule.

99. The nucleic acid of claim 36, further comprising: (b) sequence that encodes a Cas9 molecule of any of claims 59-73.

100. The nucleic acid of claim 99, wherein the nucleic acid does not comprise (c) a sequence that encodes a second gRNA molecule.

101. The nucleic acid of claim 100, wherein each of (a) and (b) is present on the same nucleic acid molecule.

102. The nucleic acid of claim 100, wherein the nucleic acid molecule is an AAV vector.

103. The nucleic acid of claim 101, wherein: (a) is present on a first nucleic acid molecule; and (b) is present on a second nucleic acid molecule.

104. The nucleic acid of claim 103, wherein the first and second nucleic acid molecules are AAV vectors.

105. The nucleic acid of claim 36, further comprising:
(b) sequence that encodes a Cas9 molecule of any of claims 59-73; and
(c) sequence that encode a second gRNA molecule of claims 74-96.

106. The nucleic acid of claim 105, wherein each of (a), (b), and (c) are present on the same nucleic acid molecule.

107. The nucleic acid of claim 106, wherein the nucleic acid molecule is an AAV vector.

108. The nucleic acid of claim 105, wherein:
one of(a), (b), and (c) is encoded on a first nucleic acid molecule; and
a second and third of (a), (b), and (c) is encoded on a second nucleic acid molecule.

109. The nucleic acid of claim 108, wherein the first and second nucleic acid molecules are AAV vectors.

110. The nucleic acid of claim 108, wherein: (a) is present on a first nucleic acid molecule; and (b) and (c) are present on a second nucleic acid molecule.

111. The nucleic acid of claim 110, wherein the first and second nucleic acid molecules are AAV vectors.

112. The nucleic acid of claim 108, wherein: (b) is present on a first nucleic acid molecule; and (a) and (c) are present on a second nucleic acid molecule.

113. The nucleic acid of claim 112, wherein the first and second nucleic acid molecules are AAV vectors.

114. The nucleic acid of claim 108, wherein: (c) is present on a first nucleic acid molecule; and (b) and (a) are present on a second nucleic acid molecule.

115. The nucleic acid of claim 114, wherein the first and second nucleic acid molecules are AAV vectors.

116. The nucleic acid of any of claims 103, 108, 110, 112, or 114, wherein the first nucleic acid molecule is other than an AAV vector and the second nucleic acid molecule is an AAV vector.

117. The nucleic acid of any of claims 36-58, wherein the nucleic acid comprises a promoter operably linked to the sequence that encodes the gRNA molecule of (a).

118. The nucleic acid of any of claims 74-96, wherein the nucleic acid comprises a second promoter operably linked to the sequence that encodes the second gRNA molecule of (c).

119. The nucleic acid of any of claims 117 or 118, wherein the promoter and second promoter differ from one another.

120. The nucleic acid of any of claims 117 or 118, wherein the promoter and second promoter are the same.

121. The nucleic acid of any of claims 59-73, wherein the nucleic acid comprises a promoter operably linked to the sequence that encodes the Cas9 molecule of (b).

122. The nucleic acid of any of claims 36-96, further comprising a gRNA molecule targeting a second gene selected from the group consisting of FAS, BID, CTLA4, PDCD1, CBLB, PTPN6, TRAC and TRBC genes.

123. The nucleic acid of any of claims 36-96, further comprising a gRNA molecule targeting at least one additional gene selected from the group consisting of FAS, BID, CTLA4, PDCD1, CBLB, PTPN6, TRAC and TRBC genes.

124. A composition comprising the (a) gRNA molecule of any of claims 1-35.

125. The composition of claim 124, further comprising (b) a Cas9 molecule of any of claims 59-73.

126. The composition of any of claims 124 or 125, further comprising (c) a second gRNA molecule of any of claims 74-96.

127. The composition of claim 126, further comprising a third gRNA molecule.

128. The composition of claim 127, further comprising a fourth gRNA molecule.

129. A composition comprising at least two gRNA molecules to target two or more of FAS, BID, CTLA4, PDCD1, CBLB, PTPN6, TRAC and TRBC genes.

130. The composition of claim 129, wherein the at least two gRNA molecules to two or more of FAS, BID, CTLA4, PDCD1, CBLB, PTPN6, TRAC and TRBC genes comprise a sequence that is the same as, or differs by no more than 3 nucleotides from, a targeting domain sequence from any of Tables 1A-I, Tables 2A-I, Tables 3A-H, Tables 4A-I, Tables 5A-I, Tables 6A-I, Tables 7A-H, Tables 8A-H, Tables 9A-I, Tables 10A-I, Tables 11A-I, Tables 12A-I, Tables 13A-K, Tables 14A-K, Tables 15A-F, Tables 16A-K, Tables 17A-K, Tables 18A-K, Tables 19A-J, Tables 20A-J, Tables 21A-K, Tables 22A-K, Tables 23A-J, Tables 24A-K, Tables 25A-G, Tables 26A-G, Table 27, Table 29, Table 31, or Table 32.

131. The composition of claim 129, wherein the at least two gRNA molecules to two or more of FAS, BID, CTLA4, PDCD1, CBLB, PTPN6, TRAC and TRBC genes are selected from those in Tables 1A-I, Tables 2A-I, Tables 3A-H, Tables 4A-I, Tables 5A-I, Tables 6A-I, Tables 7A-H, Tables 8A-H, Tables 9A-I, Tables 10A-I, Tables 11A-I, Tables 12A-I, Tables 13A-K, Tables 14A-K, Tables 15A-F, Tables 16A-K, Tables 17A-K, Tables 18A-K, Tables 19A-J, Tables 20A-J, Tables 21A-K, Tables 22A-K, Tables 23A-J, Tables 24A-K, Tables 25A-G, Tables 26A-G, Table 27, Table 29, Table 31, or Table 32.

132. The composition of any of claims 127-129, further comprising (b) a Cas9 molecule of any of claims 59-73.

133. The composition of any of claims 129-132, further comprising (c) a second gRNA molecule of any of claims 74-96 targeting two or more of FAS, BID, CTLA4, PDCD1, CBLB, PTPN6, TRAC and TRBC genes.

134. The composition of claim 133, further comprising a third gRNA molecule.

135. The composition of claim 134, further comprising a fourth gRNA molecule.

136. A method of altering a cell comprising contacting the cell with:
(a) a gRNA of any of claims 1-35;
(b) a Cas9 molecule of any of claims 59-73; and
optionally, (c) a second gRNA molecule of any of claims 74-96.

137. The method of claim 136, further comprising a third gRNA molecule.

138. The method of claim 137, further comprising a fourth gRNA molecule.

139. The method of any of claims 136-138, comprising contacting the cell with (a), (b), and optionally (c).

140. The method of any of claims 136-139, wherein the gRNA molecule of(a) is selected from any of claims 1-35.

141. The method of any of claims 136-140, wherein the cell is from a subject suffering from cancer.

142. The method of any of claims 136-141, wherein the cell is from a subject having cancer or which could otherwise benefit from a mutation at a T cell target position of the FAS, BID, CTLA4, PDCD1, CBLB, PTPN6, TRAC or TRBC gene.

143. The method of any of claims 136-142, wherein the cell is a T cell.

144. The method of claim 143, wherein the T cell is an engineered T cell.

145. The method of claim 144, wherein the engineered T cell is an engineered chimeric antigen receptor (CAR) T cell.

146. The method of claim 144, wherein the engineered T cell is an engineered TCR (T-cell receptor) T cell.

147. The method of claim 143, wherein the T cell is engineered to express a TCR or a CAR prior to introducing a T cell target position mutation in one or more of the FAS, BID, CTLA4, PDCD1, CBLB, PTPN6, TRAC or TRBC gene.

148. The method of claim 143, wherein the T cell is engineered to express a TCR or a CAR after introducing a T cell target position mutation in one or more of the FAS, BID, CTLA4, PDCD1, CBLB, PTPN6, TRAC or TRBC gene.

149. The method of claim 143, wherein the T cell is engineered to express a TCR or a CAR at the same time as introducing a T cell target position mutation in one or more of the FAS, BID, CTLA4, PDCD1, CBLB, PTPN6, TRAC or TRBC gene.

150. The method of claim 136-149, wherein the contacting is performed ex vivo.

151. The method of claim 136-150, wherein the contacted cell is returned to the subject's body.

152. The method of any of claims 136-151, wherein the cell is from a subject that has cancer.

153. The method of any of claims 136-152, comprising acquiring knowledge of the sequence of the T cell target position in the cell.

154. The method of claim 153, comprising acquiring knowledge of the sequence of the T cell target position in the cell by sequencing a portion of the FAS, BID, CTLA4, PDCD1, CBLB, PTPN6, TRAC or TRBC gene.

155. The method of any of claims 136-154, comprising inducing a T cell target position mutation.

156. The method of any of claims 136-155, wherein contacting comprises contacting the cell with a nucleic acid that encodes at least one of (a), (b), and (c).

157. The method of any of claims 136-156, wherein contacting comprises contacting the cell with a nucleic acid of any of claims 36-123.

158. The method of any of claims 136-157, wherein contacting comprises delivering to the cell the Cas9 molecule of (b) and a nucleic acid which encodes (a) and optionally (c).

159. The method of any of claims 136-158, wherein contacting comprises delivering to the cell the Cas9 molecule of (b), the gRNA molecule of (a) and optionally the second gRNA molecule of (c).

160. The method of any of claims 136-159, wherein contacting comprises delivering to the cell the gRNA molecule of (a), optionally the second gRNA molecule of (c) and a nucleic acid that encodes the Cas9 molecule of (b).

161. A method of treating a subject, comprising contacting a subject (or a cell from the subject) with:
(a) a gRNA of any of claims 1-35;
(b) a Cas9 molecule of any of claims 59-73; and
optionally, (c) a second gRNA of any of claims 74-96.

162. The method of claim 161, further comprising a third gRNA molecule.

163. The method of claim 162, further comprising a fourth gRNA molecule.

164. The method of any of claims 161-163, further comprising contacting the subject with (a), (b), and optionally (c).

165. The method of any of claims 161-164, wherein the subject is suffering from cancer.

166. The method of claim 165, wherein the cancer is selected from the group consisting of: lymphoma, chronic lymphocytic leukemia (CLL), B cell acute lymphocytic leukemia (B-ALL), acute lymphoblastic leukemia, acute myeloid leukemia, non-Hodgkin's lymphoma (NHL), diffuse large cell lymphoma (DLCL), multiple myeloma, renal cell carcinoma (RCC), neuroblastoma, colorectal cancer, breast cancer, ovarian cancer, melanoma, sarcoma, prostate cancer, lung cancer, esophageal cancer, hepatocellular carcinoma, pancreatic cancer, astrocytoma, mesothelioma, head and neck cancer, and medulloblastoma.

167. The method of any of claims 161-166, wherein the subject would benefit from a mutation at the T cell target position of the FAS, BID, CTLA4, PDCD1, CBLB, PTPN6, TRAC or TRBC gene.

168. The method of any of claims 161-167, wherein the subject would benefit from a mutation in one or more of the FAS, BID, CTLA4, PDCD1, CBLB, PTPN6, TRAC and TRBC genes.

169. The method of any of claims 161-167, wherein the subject would benefit from a mutation in two or more of the FAS, BID, CTLA4, PDCD1, CBLB, PTPN6, TRAC and TRBC genes.

170. The method of any of claims 161-167, wherein the subject would benefit from a mutation in three or more of the FAS, BID, CTLA4, PDCD1, CBLB, PTPN6, TRAC and TRBC genes.

171. The method of any of claims 161-167, wherein the subject would benefit from a mutation in four or more of the FAS, BID, CTLA4, PDCD1, CBLB, PTPN6, TRAC and TRBC genes.

172. The method of any of claims 161-167, wherein the subject would benefit from a mutation in five or more of the FAS, BID, CTLA4, PDCD1, CBLB, PTPN6, TRAC and TRBC genes.

173. The method of any of claims 161-167, wherein the subject would benefit from a mutation in six or more of the FAS, BID, CTLA4, PDCD1, CBLB, PTPN6, TRAC and TRBC genes.

174. The method of any of claims 161-167, wherein the subject would benefit from a mutation in seven or more of the FAS, BID, CTLA4, PDCD1, CBLB, PTPN6, TRAC and TRBC genes.

175. The method of any of claims 161-167, wherein the subject would benefit from a mutation in each of the FAS, BID, CTLA4, PDCD1, CBLB, PTPN6, TRAC and TRBC genes.

176. The method of any of claims 161-175, comprising acquiring knowledge of the sequence of the T cell target position in the subject.

177. The method of claim 176, comprising acquiring knowledge of the sequence of the T cell target position in the subject by sequencing one or more of the FAS, BID, CTLA4, PDCD1, CBLB, PTPN6, TRAC or TRBC gene or a portion thereof.

178. The method of any of claims 161-177, comprising inducing a T cell target position mutation in the FAS, BID, CTLA4, PDCD1, CBLB, PTPN6, TRAC or TRBC gene.

179. The method of any of claims 161-178, wherein a cell of the subject is contacted ex vivo with (a), (b), and optionally (c).

180. The method of claim 179, wherein the cell of the subject is a T cell.

181. The method of claim 180, wherein the T cell is engineered to express a TCR or a CAR.

182. The method of claim 180, wherein the T cell is engineered to express a TCR or a CAR prior to inducing a T cell target position mutation in one or more of the FAS, BID, CTLA4, PDCD1, CBLB, PTPN6, TRAC or TRBC gene.

183. The method of claim 180, wherein the T cell is engineered to express a TCR or a CAR after to inducing a T cell target position mutation in one or more of the FAS, BID, CTLA4, PDCD1, CBLB, PTPN6, TRAC or TRBC gene.

184. The method of claim 180, wherein the T cell is engineered to express a TCR or a CAR at the same time as inducing a T cell target position mutation in one or more of the FAS, BID, CTLA4, PDCD1, CBLB, PTPN6, TRAC or TRBC gene.

185. The method of any of claims 179-184, wherein the cell is returned to the subject's body.

186. The method of any of claims 179-185, wherein treatment comprises introducing a cell into the subject's body, wherein the cell subject is contacted ex vivo with (a), (b), and optionally (c).

187. The method of any of claims 161-186, wherein contacting comprises contacting the subject with a nucleic acid that encodes at least one of (a), (b), and (c).

188. The method of any of claims 161-187, wherein contacting comprises contacting the subject with a nucleic acid of any of any of claims 36-123.

189. The method of any of claims 161-188, wherein contacting comprises delivering to the subject the Cas9 molecule of (b) and a nucleic acid which encodes and (a) and optionally (c).

190. The method of any of claims 161-188, wherein contacting comprises delivering to the subject the Cas9 molecule of (b), and the gRNA of (a) and optionally the second gRNA of (c).

191. The method of any of claims 161-188, wherein contacting comprises delivering to the subject the gRNA of (a), optionally the second gRNA of (c) and a nucleic acid that encodes the Cas9 molecule of (b).

192. A reaction mixture comprising a gRNA, a nucleic acid, or a composition described herein, and a cell from a subject having cancer, or a subject which would benefit from a mutation at a T cell target position in one or more of the FAS, BID, CTLA4, PDCD1, CBLB, PTPN6, TRAC or TRBC genes.

193. A kit comprising, (a) gRNA molecule of any of claims 1-35, or nucleic acid that encodes the gRNA, and one or more of the following:
(b) a Cas9 molecule of any of claims 59-73;
(c) a second gRNA molecule of any of claims 74-96; and
(d) nucleic acid that encodes one or more of (b) and (c).

194. The kit of claim 193, comprising nucleic acid that encodes one or more of (a), (b) and (c).

195. The kit of claim 194, further comprising a third gRNA molecule targeting a T cell target position.

196. The kit of claim 195, further comprising a fourth gRNA molecule targeting a T cell target position.

197. A gRNA of any of claims 1-35, wherein the gRNA comprises a modification at or near its 5′ end (e.g., within 1-10, 1-5, or 1-2 nucleotides of its 5′ end).

198. A gRNA of any of claims 1-35, wherein the gRNA comprises a modification at or near its 3′ end (e.g., within 1-10, 1-5, or 1-2 nucleotides of its 3′ end).

199. A gRNA of any of claims 1-35, wherein the gRNA comprises a modification at or near its 5′ end (e.g., within 1-10, 1-5, or 1-2 nucleotides of its 5′ end) and a modification at or near its 3′ end (e.g., within 1-10, 1-5, or 1-2 nucleotides of its 3′ end).

200. A gRNA of any of claims 197-199, wherein the modification causes the gRNA to exhibit increase stability towards nucleases when introduced into a T cell.

201. A gRNA of any of claims 197-199, wherein the modification causes the gRNA to exhibit a reduced innate immune response when introduced into a T cell.

202. A gRNA of claim 201, wherein the innate immune response involves the induction of cytokine expression.
